(19) United States
(12) Patent Application Publication
(10) Pub. No.: US 2003/0104410 A1
(43) Pub. Date: Jun. 5, 2003

(54) Human microarray

(75) Inventor: Michael P. Mittmann, Palo Alto, CA (US)

Correspondence Address: Alison B. Mohr, Parsons Behle & Latimer, One Utah Center, 201 South Main Street, Suite 1800, Salt Lake City, UT, 84145-0898, US

(73) Assignee: Affymetrix, Inc., Santa Clara, CA (US)

(21) Appl. No.: 10/098,263

(22) Filed: Mar. 15, 2002

Related U.S. Application Data
(60) Provisional application No. 60/276,759, filed on Mar. 16, 2001.

(51) Int. Cl. C12Q 1/68; C12M 1/34

(52) U.S. Cl. 435/6; 435/287.2

(57) ABSTRACT

Nucleic acid sequences are provided that are complementary, in one embodiment, to a wide variety of human genes. The sequences are provided in such a way as to make them available for a variety of analyses. As such, they are related to diverse fields impacted by the nature of molecular interaction, including chemistry, biology, medicine, and medical diagnostics.

### RELATED APPLICATIONS

[0001] This application claims priority to Provisional Application Serial No. 60/276,759 filed Mar. 16, 2001, which is herein incorporated by reference in its entirety for all purposes.

### REFERENCE TO SEQUENCE LISTING

[0002] The sequence listing, including SEQ ID NOS 1-2,018,500, is contained on compact disc in two copies, labeled Copy 1 and Copy 2. The computer readable form is on a compact disc labeled CRF. The file name on each of the three compact discs is seqlist.rtf, created Mar. 12, 2002. Each file is 141,637 kilobytes. The sequence listing information recorded in the computer readable form is identical to the written compact disc sequence listing. The sequence listing is hereby incorporated in this application in its entirety and is to be considered part of the disclosure of this specification.

### BACKGROUND OF THE INVENTION

[0003] The present invention provides a unique pool of nucleic acid sequences useful for analyzing molecular interactions of biological interest. The invention therefore relates to diverse fields impacted by the nature of molecular interaction, including chemistry, biology, medicine, and medical diagnostics.

### FIELD OF THE INVENTION

[0004] Many biological functions are carried out by regulating the expression levels of various genes, either through changes in levels of transcription (e.g. through control of initiation, provision of RNA precursors, RNA processing, etc.) of particular genes, through changes in the copy number of the genetic DNA, or through changes in protein synthesis. For example, control of the cell cycle and cell differentiation, as well as diseases, are characterized by the variations in the transcription levels of a group of genes.

[0005] Gene expression is not only responsible for physiological functions, but it is also associated with pathogenesis. For example, the lack of sufficient functional tumor suppressor genes and/or the over expression of oncogene/protooncogenes can lead to tumorigenesis. (See e.g. Marshall, Cell, 64: 313-326 (1991) and Weinberg, Science, 254:1138-1146 (1991)). Thus, changes in the expression levels of particular genes (e.g. oncogenes or tumor suppressors) serve as signposts for the presence and progression of various diseases. As a consequence, novel techniques and apparatus are needed to study gene expression in specific biological systems.

[0006] All documents, i.e., publications and patent applications, cited in this disclosure, including the foregoing, are incorporated by reference herein in their entireties for all purposes to the same extent as if each of the individual documents was specifically and individually indicated to be so incorporated by reference herein in its entirety.

### SUMMARY OF THE INVENTION

[0007] The invention provides nucleic acid sequences that are complementary to particular human genes and expressed sequence tags (ESTs) and makes them available for a variety of analyses, including, for example, gene expression analysis. For example, one embodiment of the invention comprises an array comprising of any two or more, 10 or more, 100 or more, 1000 or more, 10,000 or more, 100,000 or more, or 1,000,000 or more nucleic acid probes containing 9 or more consecutive nucleotides from the sequences listed in SEQ ID NOS: 1-2,018,500, or the perfect match, perfect mismatch, antisense match or antisense mismatch thereof. In a further embodiment, the invention comprises the use of any of the above arrays or fragments disclosed in SEQ ID NOS 1-2,018,500 to: monitor gene expression levels by hybridization of the array to a DNA library; monitor gene expression levels by hybridization to an mRNA-protein fusion compound; identify polymorphisms; identify biallelic markers; produce genetic maps; analyze genetic variation; comparatively analyze gene expression between different species; analyze gene knockouts; or hybridize tag-labeled compounds. In a further embodiment, the invention comprises a method of analysis comprising hybridizing one or more pools of nucleic acids to two or more of the fragments disclosed in SEQ ID NOS 1-2,018,500 and detecting said hybridization. In a further embodiment the invention comprises the use of any one or more of the fragments disclosed in SEQ ID NOS 1-2,018,500 as a primer for polymerase chain reaction (PCR). In a further embodiment the invention comprises the use of any one or more of the fragments disclosed in SEQ ID NOS 1-2,018,500 as a ligand.

### DETAILED DESCRIPTION OF THE INVENTION

[0008] Definitions

[0009] Massive Parallel Screening: The phrase “massive parallel screening” refers to the simultaneous screening of at least about 100, preferably about 1000, more preferably about 10,000, even more preferably about 100,000, and most preferably 1,000,000 or more different nucleic acid hybridizations.

[0010] Nucleic Acid: The terms “nucleic acid” or “nucleic acid molecule” refer to a deoxyribonucleotide or ribonucleotide polymer in either single- or double-stranded form, and unless otherwise limited, would encompass analogs of natural nucleotides that can function in a similar manner as naturally occurring nucleotides. Nucleic acids may include Peptide Nucleic Acids (PNAs). Nucleic acids may be derived from a variety or sources including, but not limited to, naturally occurring nucleic acids, clones, and synthesis in solution or solid phase synthesis.

[0011] Probe: As used herein a “probe” is defined as a nucleic acid capable of binding to a target nucleic acid of complementary sequence through one or more types of chemical bonds, usually through complementary base pairing, usually through hydrogen bond formation. As used herein, a probe may include natural (i.e. A, G, U, C, or T), unusual or modified bases (7-deazaguanosine, inosine, etc.). In addition, a linkage other than a phosphodiester bond may join the bases in probes, so long as it does not interfere with hybridization. Any portion of nucleic acids may be other than that found in nature. Thus, probes may be PNAs in which the constituent bases are joined by peptide bonds rather than phosphodiester linkages. It is also envisioned that the definition of probes may include mixed nucleic acid peptide probes.

[0012] Target nucleic acid: The term “target nucleic acid” or “target sequence” refers to a nucleic acid or nucleic acid sequence that is to be analyzed. A target can be a nucleic acid to which a probe will hybridize. The probe may or may not be specifically designed to hybridize to the target. It is either the presence or absence of the target nucleic acid that is to be detected, or the amount of the target nucleic acid that is to be quantified. The term target nucleic acid may refer to the specific subsequence of a larger nucleic acid to which the probe is directed or to the overall sequence (e.g., gene or mRNA) whose expression level it is desired to detect. The difference in usage will be apparent to one of skill in the art, based on the context.

[0013] mRNA or transcript: The term “mRNA” refers to transcripts of a gene. Transcripts are ribonucleic acid including, for example, mature mRNA ready for translation and products of various stages of transcript processing. Transcript processing may include splicing, editing and degradation.

[0014] Subsequence: “Subsequence” refers to a sequence of nucleic acids that comprise a part of a longer sequence of nucleic acids.

[0015] Perfect match: The term “match,” “perfect match,” “perfect match probe” or “perfect match control” refers to a nucleic acid that has a sequence that is designed to be perfectly complementary to a particular target sequence. The nucleic acid is typically perfectly complementary to a portion (subsequence) of the target sequence. A perfect match (PM) probe can be a test probe, a normalization control probe, an expression level control probe and the like. A perfect match control or perfect match is, however, distinguished from a “mismatch” or “mismatch probe.”

[0016] Mismatch: The term “mismatch,” “mismatch control” or “mismatch probe” refers to a nucleic acid whose sequence is deliberately designed not to be perfectly complementary to a particular target sequence. As a non-limiting example, for each mismatch (MM) control in a high-density probe array there typically exists a corresponding perfect match (PM) probe that is perfectly complementary to the same particular target sequence. The mismatch may comprise one or more bases. While the mismatch(es) may be located anywhere in the mismatch probe, terminal mismatches are less desirable because a terminal mismatch is less likely to prevent hybridization of the target sequence. In a particularly preferred embodiment, the mismatch is located at or near the center of the probe such that the mismatch is most likely to destabilize the duplex with the target sequence under the test hybridization conditions. A homo-mismatch substitutes an adenine (A) for a thymine (T) and vice versa and a guanine (G) for a cytosine (C) and vice versa. For example, if the target sequence was: 5′-AGGTCCA-3′, a probe designed with a single homo-mismatch at the central, or fourth position, would result in the following sequence: TCCTGGT. It should also be appreciated that antiparallel and parallel hybrid orientations are envisioned depending on the chemical composition of the nucleic acid.

[0017] Array: An “array” is a solid support with at least a first surface having a plurality of different nucleic acid sequences attached.

[0018] Gene Knockout: the term “gene knockout,” as defined in Lodish et al., MOLECULAR CELL BIOLOGY, (3rd ed. 1995) which is hereby incorporated in its entirety for all purposes is, is a technique for selectively inactivating a gene by replacing it with a mutant allele in an otherwise normal organism.

[0019] DNA Library: as used herein the term “genomic library” or “genomic DNA library” refers to a collection of cloned DNA molecules consisting of fragments of the entire genome (genomic library) or of DNA copies of all the mRNA produced by a cell type (cDNA library) inserted into a suitable cloning vector.

[0020] Polymorphism: “polymorphism” refers to the occurrence of two or more genetically determined alternative sequences or alleles in a population. A polymorphic marker or site is the locus at which divergence occurs. Preferred markers have at least two alleles, each occurring at a frequency of greater than 1%, and more preferably greater than 10% or 20% of the selected population. A polymorphic locus may be as small as one base pair. Polymorphic markers include restriction fragment length polymorphisms, variable number or tandem repeats (VNTR's), hypervariable regions, minisatellites, dinucleotide repeats, trinucleotide repeats, tetranucleotide repeats, simple sequence repeats, and insertion elements such as ALU. The first identified allelic form is arbitrarily designated as the reference form and other allelic forms are designated as alternative or variant alleles. The allelic form occurring most frequently in a selected population is sometimes referred to as the wild type form. Diploid organisms may be homozygous or heterozygous for allelic forms. A diallelic or biallelic polymorphism has two forms. A triallelic polymorphism has three forms.

[0021] Genetic map: a “genetic map” is a map that presents the order of specific sequences on a chromosome.

[0022] Genetic variation: “genetic variation” refers to variation in the sequence of the same region between two or more organisms.

[0023] Hybridization: the association of two complementary nucleic acid strands, nucleic acid and a nucleic acid derivative, or nucleic acid derivatives (such as PNA) to form double stranded molecules. Hybrids can contain two DNA strands, two RNA strands, or one DNA and one RNA strand. Additionally, hybrids can contain derivatives in any combination.

[0024] mRNA-protein fusion: a compound whereby an mRNA is directly attached to the peptide or protein it encodes by a stable covalent linkage.

[0025] Ligand: any molecule that binds tightly and specifically to a macromolecule, for example, a protein, forming a macromolecule-ligand complex.

[0026] General

[0027] SEQ ID NOS 1-2,018,500, present target sequences included in the invention. Each target sequence corresponds to and represents at least four additional nucleic acid sequences included in the invention. For example, if the first nucleic acid sequence listed in SEQ ID NOS 1-2,018,500 is: 5′-cgtgc-3′ the additional sequences included in the invention which are represented by this nucleic acid sequence are, for example:

[0028] gcacg=(perfect) sense match

[0029] gctcg=sense mismatch

[0030] cgtgc=(perfect) antisense match

[0031] cgagc=antisense mismatch

[0032] Accordingly, for each nucleic acid sequence listed in SEQ ID NOS 1-2,018,500, this disclosure includes the corresponding sense match, sense mismatch, antisense match, and antisense mismatch. The position of the mismatch is not limited to the above example; it may be located anywhere in the nucleic acid sequence and may comprise one or more bases.

[0033] Consequently, the present invention includes: a) the target sequences listed in SEQ ID NOS 1-2,018,500, or the sense-match, sense mismatch, antisense match or antisense mismatch thereof; b) clones which comprise the target nucleic acid sequences listed in SEQ ID NOS 1-2,018,500, or the sense-match, sense mismatch, antisense match or antisense mismatch thereof; c) longer nucleotide sequences that include the nucleic acid sequences listed in SEQ ID NOS 1-2,018,500, or the sense-match, sense mismatch, antisense match or antisense mismatch thereof and d) sub-sequences greater than 9 nucleotides in length of the target nucleic acid sequences listed in SEQ ID NOS 1-2,018,500, or the sense match, sense mismatch, antisense match or antisense mismatch thereof.

[0034] Target sequences were chosen from known human genes and EST clusters available from UniGene (http://www.ncbi.nim.nih.gov/UniGenel). Target sequences can be selected using computer-implemented methods of monitoring gene expression using high density arrays, for example, as described in U.S. Pat. No. 6,309,822 incorporated herein by reference for all purposes. The present invention provides a pool of unique nucleotide sequences complementary to Human genes and ESTs in particular embodiments that alone, or in combinations of two or more, 10 or more, 100 or more, 1,000 or more, 10,000 or more, 100,000 or more, or 1,000,000 or more can be used for a variety of applications.

[0035] In one embodiment, the present invention provides for a pool of unique nucleotide sequences that are complementary to Human genes and ESTs formed into a high density array of probes suitable for array based massive parallel gene expression. Array based methods for monitoring gene expression are disclosed and discussed in detail in U.S. Pat. Nos. 5,800,992 and 6,040,138 which are incorporated herein by reference for all purposes. Generally those methods of monitoring gene expression involve: (1) providing a pool of target nucleic acids comprising RNA transcript(s) of one or more target gene(s), or nucleic acids derived from the RNA transcript(s); (2) hybridizing the nucleic acid sample to a high density array of probes; and (3) detecting the hybridized nucleic acids and calculating a relative expression (transcription, RNA processing or degradation) level.

[0036] For example, in one embodiment of the present invention gene expression can be monitored by hybridization to high density oligonucleotide arrays. Arrays containing the desired number of probes can be synthesized using the method described in U.S. Pat. No. 5,143,854 (incorporated by reference in its entirety herein). Extracted poly (A)⁺RNA can then be converted to cDNA using the methods described in the example below. The cDNA is then transcribed in the presence of labeled ribonucleotide triphosphates. The label may be biotin or a dye such as fluorescein. RNA is then fragmented with heat in the presence of magnesium ions. Hybridizations are carried out in a flow cell that contains the two-dimensional DNA probe arrays. Following a brief washing step to remove unhybridized RNA, the arrays are scanned using a scanning confocal microscope.

[0037] The development of Very Large Scale Immobilized Polymer Synthesis or VLSIPS™ technology has provided methods for making very large arrays of nucleic acid probes in very small arrays. See U.S. Pat. No. 5,143,854 and PCT Nos. WO 90/15070 and 92/10092, and Fodor et al., Science, 251:767-77 (1991), each of which is incorporated herein by reference. U.S. Pat. Nos. 5,800,992 and 6,040,138, incorporated by reference above, describe methods for making arrays of nucleic acid probes that can be used to detect the presence of a nucleic acid containing a specific nucleotide sequence. Methods of forming high-density arrays of nucleic acids, peptides and other polymer sequences with a minimal number of synthetic steps are known. The nucleic acid array can be synthesized on a solid substrate by a variety of methods, including, but not limited to, light-directed chemical coupling, and mechanically directed coupling.

[0038] In a preferred detection method using light-directed chemical coupling, the array of immobilized nucleic acids, or probes, is contacted with a sample containing target nucleic acids, to which a fluorescent label is attached. Target nucleic acids hybridize to the probes on the array and any non-hybridized nucleic acids are removed. The array containing the hybridized target nucleic acids is exposed to light that excites the fluorescent label. The resulting fluorescent intensity, or brightness, is detected. Relative brightness is used to determine which probe is the best candidate for the perfect match to the hybridized target nucleic acid as fluorescent intensity (brightness) corresponds to binding affinity. Once the position of the perfect match probe is known, the sequence of the hybridized target nucleic is known due to the known sequence and position of the probe.

[0039] In an array of the present invention probes are presented in pairs, one probe in each pair being a perfect match to the target sequence and the other probe being identical to the perfect match probe except that the central base is a homo-mismatch. Mismatch probes provide a control for non-specific binding or cross-hybridization to a nucleic acid in the sample other than the target to which the probe is directed. Thus, mismatch probes indicate whether hybridization is or is not specific. For example, if the target is present, the perfect match probes should be consistently brighter than the mismatch probes because fluorescence intensity, or brightness, corresponds to binding affinity. (See e.g., U.S. Pat. No. 5,324,633, which is incorporated by reference herein for all purposes.) Finally, the difference in intensity between the perfect match and the mismatch probe (I(PM)−I(MM)) provides a good measure of the concentration of the hybridized material. One skilled in the art will appreciate the four different probe orientation possibilities: sense match, sense mismatch, antisense match and antisense mismatch.

[0040] In another embodiment, the current invention provides a pool of sequences that may be used as probes for their complementary genes listed in the GenBank database (http://www.ncbi.nim.nih.gov/Genbank/). Methods for making probes are well known. See e.g., Sambrook, Fritsche and Maniatis. MOLECULAR CLONING A LABORATORY MANUAL (2^{nd} ed. 1989) which is hereby incorporated in its entirety by reference for all purposes. Sambrook describes a number of uses for nucleic acid probes of defined sequence. Some of the uses described by Sambrook include: (1) screening cDNA or genomic DNA libraries, or subclones derived from them, for additional clones containing segments of DNA that have been isolated and previously sequenced; (2) identifying or detecting the sequences of specific genes; (3) detecting specific mutations in genes of known sequence; (4) detecting specific mutations generated by site-directed mutagenesis of cloned genes; (5) and mapping the 5′ termini of mRNA molecules by primer extensions. Sambrook describes other uses for probes throughout. See also Alberts et al., MOLECULAR BIOLOGY OF THE CELL (3rd ed. 1994) at 307 and Lodish et al., MOLECULAR CELL BIOLOGY, (3^{rd} ed. 1995) at 285-286, each of which is hereby incorporated by reference in its entirety for all purposes, for a brief discussion of the use of nucleic acid probes in in situ hybridization. Other uses for probes derived from the sequences disclosed in this invention will be readily apparent to those of skill in the art. See e.g., Lodish et al., MOLECULAR CELL BIOLOGY, (3rd ed. 1995) at 229-233, incorporated above, for a description of the construction of genomic libraries.

[0041] In another embodiment, the current invention may be combined with known methods to monitor expression levels of genes in a wide variety of contexts. For example, where the effects of a drug on gene expression are to be determined, the drug will be administered to an organism, a tissue sample, or a cell and the gene expression levels will be analyzed. For example, nucleic acids are isolated from the treated tissue sample, cell, or a biological sample from the organism and from an untreated organism tissue sample or cell, hybridized to a high density probe array containing probes directed to the gene of interest, and the expression levels of that gene are determined. The types of drugs that may be used in these types of experiments include, but are not limited to, antibiotics, antivirals, narcotics, anti-cancer drugs, tumor suppressing drugs, and any chemical composition that may affect the expression of genes in vivo or in vitro. A current embodiment of the invention is particularly suited to be used in the types of analyses described by, for example, U.S. Pat. No. 6,309,822, which is incorporated by reference in its entirety for all purposes, including genetic diagnostics, medical diagnosis, drug discovery, molecular biology, immunology and toxicology.

[0042] Hybridization patterns can be compared to determine differential gene expression because mRNA hybridization correlates to gene expression level, as described in Wodicka et al., Nat. Biotechnol. 15(13):1359-67 (1997), (hereby incorporated by reference in its entirety for all purposes). Some non-limiting examples include: hybridization patterns from samples treated with certain types of drugs may be compared to hybridization patterns from samples that have not been treated or that have been treated with a different drug; hybridization patterns for samples infected with a specific virus may be compared against hybridization patterns from non-infected samples; hybridization patterns for samples with cancer may be compared against hybridization patterns for samples without cancer; hybridization patterns of samples from cancerous cells that have been treated with a tumor suppressing drug may be compared against untreated cancerous cells, etc. Zhang et al., Science 276:1268-1272 (1997), hereby incorporated by reference in its entirety for all purposes, provides an example of how gene expression data can provide a great deal of insight into cancer research. One skilled in the art will appreciate that a wide range of applications will be available using two or more, 10 or more, 100 or more, 1000 or more, 10,000 or more, 100,000 or more, or 1,000,000 or more of the SEQ ID NOS 1-2,018,500 sequences as probes for gene expression analysis. The combination of the DNA array technology and the Human specific probes in this disclosure is a powerful tool for studying gene expression.

[0043] In another embodiment, the invention may be used in conjunction with the techniques that link specific proteins to the mRNA that encodes the protein. (See e.g. Roberts and Szostak, Proc. Natl, Acad. Sci. USA, 94:12297-12302 (1997) which is incorporated herein in its entirety for all purposes.) Hybridization of these mRNA-protein fusion compounds to arrays comprised of two or more, 10 or more, 100 or more, 1000 or more, 10,000 or more, 100,000 or more, or 1,000,000 or more of the sequences disclosed in the present invention provides a powerful tool for monitoring expression levels.

[0044] In one embodiment, the current invention provides a pool of unique nucleic acid sequences that can be used for parallel analysis of gene expression under selective conditions. Genetic selection under selective conditions includes, but is not limited to: variation in the temperature of the organism's environment; variation in pH levels in the organism's environment; variation in an organism's food (type, texture, amount etc.); variation in an organism's surroundings, etc. Arrays, such as those in the present invention, can be used to determine whether gene expression is altered when an organism is exposed to selective conditions.

[0045] Methods for using nucleic acid arrays to analyze genetic selections under selective conditions are known. See, e.g., R. Cho et al., Proc. Natl. Acad. Sci. USA 95:3752-3757 (1998) incorporated herein in its entirety for all purposes. Cho et al. describes the use of a high-density array containing oligonucleotides complementary to every gene in the yeast Saccharomyces cerevisiae to perform two-hybrid protein-protein interaction screens for S. cerevisiae genes implicated in mRNA splicing and microtubule assembly. Cho et al. were able to characterize the results of a screen in a single experiment by hybridization of labeled DNA derived from positive clones. Briefly, two proteins are expressed in yeast as fusions to either the DNA-binding domain or the activation domain of a transcription factor. Physical interaction of the two proteins reconstitutes transcriptional activity, turning on a gene essential for survival under selective conditions. In screening for novel protein-protein interactions, yeast cells are first transformed with a plasmid encoding a specific DNA-binding fusion protein. A plasmid library of activation domain fusions derived from genomic DNA is then introduced into these cells. Transcriptional activation fusions found in cells that survive selective conditions are considered to encode peptide domains that may interact with the DNA-binding domain fusion protein. Clones are then isolated from the two-hybrid screen and mixed into a single pool. Plasmid DNA is purified from the pooled clones and the gene inserts are amplified using PCR. The DNA products are then hybridized to yeast whole genome arrays for characterization. The methods employed by Cho et al. are applicable to the analysis of a range of genetic selections. High density arrays created using two or more, 10 or more, 100 or more, 1000 or more, 10,000 or more, 100,000 or more, or 1,000,000 or more of the sequences disclosed in the current invention can be used to analyze genetic selections in humans using the methods described in Cho et al.

[0046] In another embodiment, the present invention may be used for cross-species comparisons. One skilled in the art will appreciate that it is often useful to determine whether a gene present in one species, for example human, is present in a conserved format in another species, including, without limitation, mouse, rat, chicken, zebrafish, Drosophila, or yeast. See e.g. Andersson et al., Mamm. Genome, 7(10):717′-734 (1996), which is hereby incorporated by reference for all purposes, which describes the utility of cross-species comparisons. The use of two or more, 10 or more, 100 or more, 1000 or more, 10,000 or more, 100,000 or more, or 1,000,000 or more of the sequences disclosed in this invention in an array can be used to determine whether any sequence from one or more of the Human genes represented by the sequences disclosed in this invention is conserved in another species by, for example, hybridizing genomic nucleic acid samples from another species to an array comprised of the sequences disclosed in this invention. Areas of hybridization will yield genomic regions where the nucleotide sequence is highly conserved between the interrogation species and human.

[0047] In another embodiment, the present invention may be used to characterize the genotype of knockouts. Methods for using gene knockouts to identify a gene are well known. See, e.g., Lodish et al., MOLECULAR CELL BIOLOGY, (3rd e. 1995) at 292-296 and U.S. Pat. No. 5,679,523, which are hereby incorporated by reference for all purposes. By isolating genomic nucleic acid samples from knockout species with a known phenotype and hybridizing the samples to an array comprised of two or more, 10 or more, 100 or more, 1000 or more, 10,000 or more, 100,000 or more, or 1,000,000 or more of the sequences disclosed in this invention, candidates genes that contribute to the phenotype will be identified and made accessible for further characterization.

[0048] In another embodiment, the present invention may be used to identify new gene family members. Methods of screening libraries with probes are well known. (See, e.g., Sambrook, incorporated by reference above.) Because the present invention is comprised of nucleic acid sequences from specific known genes, two or more, 10 or more, 100 or more, 1000 or more, 10,000 or more, 100,000 or more, or 1,000,000 or more of the sequences disclosed in this invention may be used as probes to screen genomic libraries to look for additional family members of those genes from which the target sequences are derived.

[0049] In another embodiment, the present invention may be used to provide nucleic acid sequences to be used as tag sequences. Tag sequences are a type of genetic “bar code” that can be used to label compounds of interest. The analysis of deletion mutants using tag sequences is described in, for example, Shoemaker et al., Nature Genetics 14:450-456 (1996), which is hereby incorporated by reference in its entirety for all purposes. Shoemaker et al. describes the use of PCR to generate large numbers of deletion strains. Each deletion strain is labeled with a unique 20-base tag sequence that can be hybridized to a high-density oligonucleotide array. The tags serve as unique identifiers (molecular bar codes) that allow analysis of large numbers of deletion strains simultaneously through selective growth conditions. The use of tag sequences need not be limited to this example however. The utility of using unique known short oligonucleotide sequences capable of hybridizing to a nucleic acid array to label various compounds will be apparent to one skilled in the art. One or more, 10 or more, 100 or more, 1000 or more, 10,000 or more, 100,000 or more, or 1,000,000 or more of the SEQ ID NOS 1-2,018,500 sequences are excellent candidates to be used as tag sequences.

[0050] In another embodiment of the invention, the sequences listed in SEQ ID NOS 1-2,018,500 may be used to generate primers directed to their corresponding genes as disclosed in the GenBank or any other public database. These primers may be used in such basic techniques as sequencing or PCR, see, for example, Sambrook, incorporated by reference above.

[0051] In another embodiment, the invention provides a pool of nucleic acid sequences to be used as ligands for specific genes. The sequences disclosed in this invention may be used as ligands to their corresponding genes as disclosed in the GenBank or any other public database. Compounds that specifically bind known genes are of interest for a variety of uses. One particular clinical use is to act as an antisense protein that specifically binds and disables a gene that has been, for example, linked to a disease. Methods and uses for ligands to specific genes are known. See, e.g., U.S. Pat. No. 5,723,594, which is hereby incorporated by reference in its entirety for all purposes.

[0052] In a preferred embodiment, the hybridized nucleic acids are detected by detecting one or more labels attached to the sample nucleic acids. The labels may be incorporated by any of a number of means well known to those of skill in the art. In one embodiment, the label is simultaneously incorporated during the amplification step in the preparation of the sample nucleic acids. Thus, for example, PCR with labeled primers or labeled nucleotides will provide a labeled amplification product. In another embodiment, transcription amplification, as described above using light-directed chemical coupling, using a labeled nucleotide (e.g. fluorescein labeled UTP and/or CTP) incorporates a label into the transcribed nucleic acids.

[0053] Alternatively, a label may be added directly to the original nucleic acid sample (e.g., mRNA, polyA mRNA, cDNA, etc.) or to the amplification product after the amplification is completed. Means of attaching labels to nucleic acids are well known to those of skill in the art and include, for example, nick translation or end-labeling (e.g. with a labeled RNA) by kinasing the nucleic acid and subsequent attachment (ligation) of a nucleic acid linker joining the sample nucleic acid to a label (e.g., a fluorophore).

[0054] Detectable labels suitable for use in the present invention include any composition detectable by spectroscopic, photochemical, biochemical, immunochemical, electrical, optical or chemical means. Useful labels in the present invention include, but are not limited to: biotin for staining with labeled streptavidin conjugate; magnetic beads (e.g., DynabeadS™); fluorescent dyes (e.g., fluorescein, texas red, rhodamine, green fluorescent protein, and the like); radiolabels (e.g., ³H, ¹²⁵I, ³⁵S, ¹⁴C, or ³²P); phosphorescent labels; enzymes (e.g., horse radish peroxidase, alkaline phosphatase and others commonly used in an ELISA); and colorimetric labels such as colloidal gold or colored glass or plastic (e.g., polystyrene, polypropylene, latex, etc.) beads. Patents teaching the use of such labels include U.S. Pat. Nos. 3,817,837; 3,850,752; 3,939,350; 3,996,345; 4,277,437; 4,275,149; and 4,366,241, each of which is hereby incorporated by reference in its entirety for all purposes.

[0055] Means of detecting such labels are well known to those of skill in the art. Thus, for example, radiolabels may be detected using photographic film or scintillation counters; fluorescent markers may be detected using a photodetector to detect emitted light. Enzymatic labels are typically detected by providing the enzyme with a substrate and detecting the reaction product produced by the action of the enzyme on the substrate, and calorimetric labels are detected by simply visualizing the colored label.

[0056] The label may be added to the target nucleic acid(s) prior to, or after the hybridization. So called “direct labels” are detectable labels that are directly attached to or incorporated into the target nucleic acid prior to hybridization. In contrast, so called “indirect labels” are joined to the hybrid duplex after hybridization. Often, the indirect label is attached to a binding moiety that has been attached to the target nucleic acid prior to the hybridization. Thus, for example, the target nucleic acid may be biotinylated before the hybridization. After hybridization, an avidin-conjugated fluorophore will bind the biotin bearing hybrid duplexes providing a label that is easily detected. For a detailed review of methods of labeling nucleic acids and detecting labeled hybridized nucleic acids see Tijssen, LABORATORY TECHNIQUES IN BIOCHEMISTRY AND MOLECULAR BIOLOGY, VOL. 24: HYBRIDIZATION WITH NUCLEIC ACID PROBES (1993), which is hereby incorporated by reference in its entirety for all purposes.

[0057] In addition, fluorescent labels are preferred and easily added during an in vitro transcription reaction. In a preferred embodiment, fluorescein labeled UTP and CTP are incorporated into the RNA produced in an in vitro transcription reaction as described above.

### EXAMPLE

[0058] The following example serves to illustrate the type of experiment that could be conducted using the invention for expression monitoring by hybridization to high density oligonucleotide arrays.

[0059] Arrays containing the desired number of probes can be synthesized using the method described in U.S. Pat. No. 5,143,854, incorporated by reference above. Extracted poly (A)⁺RNA can then be converted to cDNA using the methods described below. The cDNA is then transcribed in the presence of labeled ribonucleotide triphosphates. The label may be biotin or a dye such as fluorescein. RNA is then fragmented with heat in the presence of magnesium ions. Hybridizations are carried out in a flow cell that contains the two-dimensional DNA probe arrays. Following a brief washing step to remove unhybridized RNA, the arrays are scanned using a scanning confocal microscope.

[0060] A Method of RNA Preparation:

[0061] Labeled RNA is prepared from clones containing a T7 RNA polymerase promoter site by incorporating labeled ribonucleotides in an DIT reaction. Either biotin-labeled or fluorescein-labeled UTP and CTP (1:3 labeled to unlabeled) plus unlabeled ATP and GTP is used for the reaction with 2500 U of T7 RNA polymerase. Following the reaction, unincorporated nucleotide triphosphates are removed using size-selective membrane such as Microcon-100, (Amicon, Beverly, Mass.). The total molar concentration of RNA is based on a measurement of the absorbance at 260 nm. Following quantitation of RNA amounts, RNA is fragmented randomly to an average length of approximately 50 bases by heating at 94 C in 40 mM Tris-acetate pH 8.1, 100 mM potassium acetate, 30 mM magnesium acetate, for 30 to 40 minutes. Fragmentation reduces possible interference from RNA secondary structure, and minimizes the effects of multiple interactions with closely spaced probe molecules.

[0062] For material made directly from cellular RNA, cytoplasmic RNA is extracted from cells by the method of Favaloro et al., Methods Enzymol. 65:718-749 (1980) hereby incorporated by reference for all purposes, and poly (A)⁺ RNA is isolated with an oligo dT selection step using, for example, Poly Atract, (Promega, Madison, Wis.). RNA can be amplified using a modification of the procedure described by Eberwine et al., Proc. Natl. Acad Sci. USA, 89:3010-3014 (1992) hereby incorporated by reference for all purposes. Microgram amounts of poly (A)⁺ RNA are converted into double stranded cDNA using a cDNA synthesis kit (kits may be obtained from Life Technologies, Gaithersburg, Md.) with an oligo dT primer incorporating a T7 RNA polymerase promoter site.

[0063] After second-strand synthesis, the reaction mixture is extracted with phenol/chloroform, and the double-stranded DNA isolated using a membrane filtration step using, for example, Microcon-100, (Amicon). Labeled cRNA can be made directly from the cDNA pool with an IVT step as described above. The total molar concentration of labeled cRNA is determined from the absorbance at 260 nm and assuming an average RNA size of 1000 ribonucleotides. The commonly used convention is that 1 OD is equivalent to 40 ug of RNA, and that 1 ug of cellular mRNA consists of 3 pmol of RNA molecules. Cellular mRNA may also be labeled directly without any intermediate cDNA synthesis steps. In this case, Poly (A)⁺ RNA is fragmented as described, and the 5′ ends of the fragments are kinased and then incubated overnight with a biotinylated oligoribonucleotide (5′-biotin-AAAAAA-3′) in the presence of T4 RNA ligase (available from Epicentre Technologies, Madison, Wis.). Alternatively, mRNA has been labeled directly by UV-induced cross-linking to a psoralen derivative linked to biotin (available from Schleiicher & Schuell, Keene, N.H.).

[0064] Array Hybridization and Scanning:

[0065] Array hybridization solutions can be made containing 0.9 M NaCl, 60 mM EDTA, and 0.005% Triton X-100, adjusted to pH 7.6 (referred to as 6×SSPE-T). In addition, the solutions should contain 0.5 mg/ml unlabeled, degraded herring sperm DNA (available from Sigma, St. Louis, Mo.). Prior to hybridization, RNA samples are heated in the hybridization solution to 99° C. for 10 minutes, placed on ice for five minutes, and allowed to equilibrate at room temperature before being placed in the hybridization flow cell. Following hybridization, the solutions are removed, the arrays washed with 6×SSPE-T at 22C for seven minutes, and then washed with 0.5×SSPE-T at 40° C. for 15 minutes. When biotin labeled RNA is used the hybridized RNA should be stained with a streptavidin-phycoerythrin in 6×SSPE-T at 40° C. for five minutes. The arrays are read using a scanning confocal microscope made by Molecular Dynamics (commercially available through Affymetrix, Santa Clara, Calif.). The scanner uses an argon ion laser as the excitation source, with the emission detected by a photomultiplier tube through either a 530 nm bandpass filter (fluorescein) or a 560 nm longpass filter (phycoerythrin).

[0066] Nucleic acids of either sense or antisense orientations may be used in hybridization experiments. Arrays for probes with either orientation (reverse complements of each other) are made using the same set of photolithographic masks by reversing the order of the photochemical steps and incorporating the complementary nucleotide.

[0067] Quantitative Analysis of Hybridization Patterns and Intensities:

[0068] Following a quantitative scan of an array; a grid is aligned to the image using the known dimensions of the array and the corner control regions as markers. The image is then reduced to a simple text file containing position and intensity information using software developed at Affymetrix (available with the confocal scanner). This information is merged with another text file that contains information relating physical position on the array to probe sequence and the identity of the RNA (and the specific part of the RNA) for which the oligonucleotide probe is designed. The quantitative analysis of the hybridization results involves a simple form of pattern recognition based on the assumption that, in the presence of a specific RNA, the perfect match (PM) probes will hybridize more strongly on average than their mismatch (MM) partners. The number of instances in which the PM hybridization is larger than the MM signal is computed along with the average of the logarithm of the PM/MM ratios for each probe set. These values are used to make a decision (using a predefined decision matrix) concerning the presence or absence of an RNA. To determine the quantitative RNA abundance, the average of the difference (PM−MM) for each probe family is calculated. The advantage of the difference method is that signals from random cross-hybridization contribute equally, on average, to the PM and MM probes, while specific hybridization contributes more to the PM probes. By averaging the pairwise differences, the real signals add constructively while the contributions from cross-hybridization tend to cancel. When assessing the differences between two different RNA samples, the hybridization signals from side-by-side experiments on identically synthesized arrays are compared directly. The magnitude of the changes in the average of the difference (PM−MM) values is interpreted by comparison with the results of spiking experiments as well as the signals observed for the internal standard bacterial and phase RNAs spiked into each sample at a known amount. Data analysis programs, such as those described in U.S. patent application Ser. No. 08/828,952 perform these operations automatically.

### CONCLUSION

[0069] The inventions herein provide a pool of unique nucleic acid sequences that are complementary to known human genes and ESTs. These sequences can be used for a variety of types of analyses.

[0070] The above description is illustrative and not restrictive. Many variations of the invention will become apparent to those of skill in the art upon review of this disclosure. The scope of the invention should, therefore, be determined not with reference to the above description, but instead be determined with reference to the appended claims along with their full scope of equivalents.

[0071] Additionally, any amendments made during prosecution of this application or any subsequent application that depend on it, are not made for reasons due to patentability unless expressly stated as such.

The application's sequence listing, which the Patent Office published only in electronic form, follows.

SEQUENCE LISTING (131066 sequences)

SEQ ID NO: 1 - DNA, 25 bp, Homo sapien
aaggttcctcgaaggatactgtcct

SEQ ID NO: 2 - DNA, 25 bp, Homo sapien
aaggttcctcgatggatactgtcct

SEQ ID NO: 3 - DNA, 25 bp, Homo sapien
agatgtctcgattgaacacgtctcg

SEQ ID NO: 4 - DNA, 25 bp, Homo sapien
agatgtctcgatagaacacgtctcg

SEQ ID NO: 5 - DNA, 25 bp, Homo sapien
aaagatttcagtcacgtaacagttg

SEQ ID NO: 6 - DNA, 25 bp, Homo sapien
aaagatttcagtgacgtaacagttg

SEQ ID NO: 7 - DNA, 25 bp, Homo sapien
attaagacactgaacgctgttacag

SEQ ID NO: 8 - DNA, 25 bp, Homo sapien
attaagacactgtacgctgttacag

SEQ ID NO: 9 - DNA, 25 bp, Homo sapien
acatctctggtgtagtaggtgccaa

SEQ ID NO: 10 - DNA, 25 bp, Homo sapien
acatctctggtgaagtaggtgccaa

SEQ ID NO: 11 - DNA, 25 bp, Homo sapien
agtcattaactatcgtgaacatccg

SEQ ID NO: 12 - DNA, 25 bp, Homo sapien
agtcattaactaacgtgaacatccg

SEQ ID NO: 13 - DNA, 25 bp, Homo sapien
ttgcagtctccaacgtaggaatcgg

SEQ ID NO: 14 - DNA, 25 bp, Homo sapien
ttgcagtctccatcgtaggaatcgg

SEQ ID NO: 15 - DNA, 25 bp, Homo sapien
tatgtctagttccttgaggaggtca

SEQ ID NO: 16 - DNA, 25 bp, Homo sapien
tatgtctagttcgttgaggaggtca

SEQ ID NO: 17 - DNA, 25 bp, Homo sapien
tgacagtgtcgatctgggatagtcc

SEQ ID NO: 18 - DNA, 25 bp, Homo sapien
tgacagtgtcgaactgggatagtcc

SEQ ID NO: 19 - DNA, 25 bp, Homo sapien
acagaagtcgtcactgaaatatctt

SEQ ID NO: 20 - DNA, 25 bp, Homo sapien
acagaagtcgtctctgaaatatctt

SEQ ID NO: 21 - DNA, 25 bp, Homo sapien
caggactgtcccttgtagaaacttc

SEQ ID NO: 22 - DNA, 25 bp, Homo sapien
caggactgtcccatgtagaaacttc

SEQ ID NO: 23 - DNA, 25 bp, Homo sapien
gggaccgtccgcaggacgaaatctc

SEQ ID NO: 24 - DNA, 25 bp, Homo sapien
gggaccgtccgctggacgaaatctc

SEQ ID NO: 25 - DNA, 25 bp, Homo sapien
ggagatgtccctagagtaacggtcc

SEQ ID NO: 26 - DNA, 25 bp, Homo sapien
ggagatgtcccttgagtaacggtcc

SEQ ID NO: 27 - DNA, 25 bp, Homo sapien
gaactgttctctctgatacgttcct

SEQ ID NO: 28 - DNA, 25 bp, Homo sapien
gaactgttctctgtgatacgttcct

SEQ ID NO: 29 - DNA, 25 bp, Homo sapien
gaacttgtccgtgtcgagagactcc

SEQ ID NO: 30 - DNA, 25 bp, Homo sapien
gaacttgtccgtctcgagagactcc

SEQ ID NO: 31 - DNA, 25 bp, Homo sapien
taactgtatccgtcgacaagagtcc

SEQ ID NO: 32 - DNA, 25 bp, Homo sapien
taactgtatccgacgacaagagtcc

SEQ ID NO: 33 - DNA, 25 bp, Homo sapien
aacttcgaccgaagcgaagtgtctg

SEQ ID NO: 34 - DNA, 25 bp, Homo sapien
aacttcgaccgatgcgaagtgtctg

SEQ ID NO: 35 - DNA, 25 bp, Homo sapien
gaatttcgaccactgacagtgtcta

SEQ ID NO: 36 - DNA, 25 bp, Homo sapien
gaatttcgaccagtgacagtgtcta

SEQ ID NO: 37 - DNA, 25 bp, Homo sapien
gtgtgtcacgtaagtgacactatta

SEQ ID NO: 38 - DNA, 25 bp, Homo sapien
gtgtgtcacgtatgtgacactatta

SEQ ID NO: 39 - DNA, 25 bp, Homo sapien
aggggttcgacgattgaaccgttat

SEQ ID NO: 40 - DNA, 25 bp, Homo sapien
aggggttcgacgtttgaaccgttat

SEQ ID NO: 41 - DNA, 25 bp, Homo sapien
agggagtcggacttctgatacttcc

SEQ ID NO: 42 - DNA, 25 bp, Homo sapien
agggagtcggacatctgatacttcc

SEQ ID NO: 43 - DNA, 25 bp, Homo sapien
ggtcagtttcgacagatatatactc

SEQ ID NO: 44 - DNA, 25 bp, Homo sapien
ggtcagtttcgagagatatatactc

SEQ ID NO: 45 - DNA, 25 bp, Homo sapien
cggcgtatttcacgaacttgtctcg

SEQ ID NO: 46 - DNA, 25 bp, Homo sapien
cggcgtatttcaggaacttgtctcg

SEQ ID NO: 47 - DNA, 25 bp, Homo sapien
ctttcaagtacgaacatagtcgtgt

SEQ ID NO: 48 - DNA, 25 bp, Homo sapien
ctttcaagtacgtacatagtcgtgt

SEQ ID NO: 49 - DNA, 25 bp, Homo sapien
actactgtcgacgtcgaaaagtggt

SEQ ID NO: 50 - DNA, 25 bp, Homo sapien
actactgtcgacctcgaaaagtggt

SEQ ID NO: 51 - DNA, 25 bp, Homo sapien
accgtgacacactggacacacgtgg

SEQ ID NO: 52 - DNA, 25 bp, Homo sapien
accgtgacacacaggacacacgtgg

SEQ ID NO: 53 - DNA, 25 bp, Homo sapien
cgctcttcacgaagtgcagatcgtc

SEQ ID NO: 54 - DNA, 25 bp, Homo sapien
cgctcttcacgatgtgcagatcgtc

SEQ ID NO: 55 - DNA, 25 bp, Homo sapien
cagtctgtcgtcgattgtcaaactc

SEQ ID NO: 56 - DNA, 25 bp, Homo sapien
cagtctgtcgtccattgtcaaactc

SEQ ID NO: 57 - DNA, 25 bp, Homo sapien
ggctcgtatctctatagacaaactt

SEQ ID NO: 58 - DNA, 25 bp, Homo sapien
ggctcgtatctcaatagacaaactt

SEQ ID NO: 59 - DNA, 25 bp, Homo sapien
gacctgattacaagtaacaagctat

SEQ ID NO: 60 - DNA, 25 bp, Homo sapien
gacctgattacatgtaacaagctat

SEQ ID NO: 61 - DNA, 25 bp, Homo sapien
agactgagtctacctggttcagctt

SEQ ID NO: 62 - DNA, 25 bp, Homo sapien
agactgagtctagctggttcagctt

SEQ ID NO: 63 - DNA, 25 bp, Homo sapien
agattgtcttactgtgtcacattct

SEQ ID NO: 64 - DNA, 25 bp, Homo sapien
agattgtcttacagtgtcacattct

SEQ ID NO: 65 - DNA, 25 bp, Homo sapien
agtgactatgtataggtgtcattcc

SEQ ID NO: 66 - DNA, 25 bp, Homo sapien
agtgactatgtaaaggtgtcattcc

SEQ ID NO: 67 - DNA, 25 bp, Homo sapien
ggactatctacttttagtcaccgcc

SEQ ID NO: 68 - DNA, 25 bp, Homo sapien
ggactatctactattagtcaccgcc

SEQ ID NO: 69 - DNA, 25 bp, Homo sapien
gaaatcctcctcagtacgacagtcc

SEQ ID NO: 70 - DNA, 25 bp, Homo sapien
gaaatcctcctctgtacgacagtcc

SEQ ID NO: 71 - DNA, 25 bp, Homo sapien
cggactactttcctctgaacacctg

SEQ ID NO: 72 - DNA, 25 bp, Homo sapien
cggactactttcgtctgaacacctg

SEQ ID NO: 73 - DNA, 25 bp, Homo sapien
actcgcttttcagtcgacaccactg

SEQ ID NO: 74 - DNA, 25 bp, Homo sapien
actcgcttttcactcgacaccactg

SEQ ID NO: 75 - DNA, 25 bp, Homo sapien
tgtacctttctcatgtcgacccctg

SEQ ID NO: 76 - DNA, 25 bp, Homo sapien
tgtacctttctcttgtcgacccctg

SEQ ID NO: 77 - DNA, 25 bp, Homo sapien
gacactcttcgattgtggacatctg

SEQ ID NO: 78 - DNA, 25 bp, Homo sapien
gacactcttcgaatgtggacatctg

SEQ ID NO: 79 - DNA, 25 bp, Homo sapien
agaggtcttcaaccgggacagtcag

SEQ ID NO: 80 - DNA, 25 bp, Homo sapien
agaggtcttcaagcgggacagtcag

SEQ ID NO: 81 - DNA, 25 bp, Homo sapien
gagactcgtcgtccatgtggcagga

SEQ ID NO: 82 - DNA, 25 bp, Homo sapien
gagactcgtcgtgcatgtggcagga

SEQ ID NO: 83 - DNA, 25 bp, Homo sapien
gctgtcgtagacatggaccggtacc

SEQ ID NO: 84 - DNA, 25 bp, Homo sapien
gctgtcgtagacttggaccggtacc

SEQ ID NO: 85 - DNA, 25 bp, Homo sapien
agggtctcagtcaggacacggtccg

SEQ ID NO: 86 - DNA, 25 bp, Homo sapien
agggtctcagtctggacacggtccg

SEQ ID NO: 87 - DNA, 25 bp, Homo sapien
gggggtcctgtcttagacatgtccg

SEQ ID NO: 88 - DNA, 25 bp, Homo sapien
gggggtcctgtcatagacatgtccg

SEQ ID NO: 89 - DNA, 25 bp, Homo sapien
ggttctcctgtaactgcactagccg

SEQ ID NO: 90 - DNA, 25 bp, Homo sapien
ggttctcctgtatctgcactagccg

SEQ ID NO: 91 - DNA, 25 bp, Homo sapien
tgggcttcctcgtctagcaaggacg

SEQ ID NO: 92 - DNA, 25 bp, Homo sapien
tgggcttcctcgactagcaaggacg

SEQ ID NO: 93 - DNA, 25 bp, Homo sapien
tccagcatccgcttctgcaaggtct

SEQ ID NO: 94 - DNA, 25 bp, Homo sapien
tccagcatccgcatctgcaaggtct

SEQ ID NO: 95 - DNA, 25 bp, Homo sapien
acaccatctccgtcgagtcaagatc

SEQ ID NO: 96 - DNA, 25 bp, Homo sapien
acaccatctccgacgagtcaagatc

SEQ ID NO: 97 - DNA, 25 bp, Homo sapien
acacgaccagtttcttggcaagacc

SEQ ID NO: 98 - DNA, 25 bp, Homo sapien
acacgaccagttacttggcaagacc

SEQ ID NO: 99 - DNA, 25 bp, Homo sapien
aacgacgaggtccttagggaagctc

SEQ ID NO: 100 - DNA, 25 bp, Homo sapien
aacgacgaggtcgttagggaagctc

SEQ ID NO: 101 - DNA, 25 bp, Homo sapien
aagtactggcaggtgacacgaagcc

SEQ ID NO: 102 - DNA, 25 bp, Homo sapien
aagtactggcagctgacacgaagcc

SEQ ID NO: 103 - DNA, 25 bp, Homo sapien
gatggtcgagtctgacagagagctc

SEQ ID NO: 104 - DNA, 25 bp, Homo sapien
gatggtcgagtcagacagagagctc

SEQ ID NO: 105 - DNA, 25 bp, Homo sapien
agttgtgtctgtacacgaaagtctc

SEQ ID NO: 106 - DNA, 25 bp, Homo sapien
agttgtgtctgttcacgaaagtctc

SEQ ID NO: 107 - DNA, 25 bp, Homo sapien
gagactgtagttttcacctaggttc

SEQ ID NO: 108 - DNA, 25 bp, Homo sapien
gagactgtagttatcacctaggttc

SEQ ID NO: 109 - DNA, 25 bp, Homo sapien
gagactactgttcattcctatgaac

SEQ ID NO: 110 - DNA, 25 bp, Homo sapien
gagactactgttgattcctatgaac

SEQ ID NO: 111 - DNA, 25 bp, Homo sapien
aagacatgttgactgaccgggacgt

SEQ ID NO: 112 - DNA, 25 bp, Homo sapien
aagacatgttgagtgaccgggacgt

SEQ ID NO: 113 - DNA, 25 bp, Homo sapien
acaacatgtccaatgtcctgaacgt

SEQ ID NO: 114 - DNA, 25 bp, Homo sapien
acaacatgtccattgtcctgaacgt

SEQ ID NO: 115 - DNA, 25 bp, Homo sapien
cagacagtgcaactgtacccgactt

SEQ ID NO: 116 - DNA, 25 bp, Homo sapien
cagacagtgcaagtgtacccgactt

SEQ ID NO: 117 - DNA, 25 bp, Homo sapien
cgcagacattcagagtgacaccctc

SEQ ID NO: 118 - DNA, 25 bp, Homo sapien
cgcagacattcacagtgacaccctc

SEQ ID NO: 119 - DNA, 25 bp, Homo sapien
ggaccatttcacagagacaccccgt

SEQ ID NO: 120 - DNA, 25 bp, Homo sapien
ggaccatttcactgagacaccccgt

SEQ ID NO: 121 - DNA, 25 bp, Homo sapien
acagagcagttacatcgaaaccttt

SEQ ID NO: 122 - DNA, 25 bp, Homo sapien
acagagcagttagatcgaaaccttt

SEQ ID NO: 123 - DNA, 25 bp, Homo sapien
gatcagtgtgcatcggtaactcttg

SEQ ID NO: 124 - DNA, 25 bp, Homo sapien
gatcagtgtgcaacggtaactcttg

SEQ ID NO: 125 - DNA, 25 bp, Homo sapien
aagtctgttccgacggtaaacttag

SEQ ID NO: 126 - DNA, 25 bp, Homo sapien
aagtctgttccgtcggtaaacttag

SEQ ID NO: 127 - DNA, 25 bp, Homo sapien
cagactgttgcgttatgacaacttg

SEQ ID NO: 128 - DNA, 25 bp, Homo sapien
cagactgttgcgatatgacaacttg

SEQ ID NO: 129 - DNA, 25 bp, Homo sapien
agagtttctcgaatgtacgtttctg

SEQ ID NO: 130 - DNA, 25 bp, Homo sapien
agagtttctcgattgtacgtttctg

SEQ ID NO: 131 - DNA, 25 bp, Homo sapien
tgggtcgtccatggtacgattctgt

SEQ ID NO: 132 - DNA, 25 bp, Homo sapien
tgggtcgtccatcgtacgattctgt

SEQ ID NO: 133 - DNA, 25 bp, Homo sapien
ggggtcgtcttactcgacattcgtc

SEQ ID NO: 134 - DNA, 25 bp, Homo sapien
ggggtcgtcttagtcgacattcgtc

SEQ ID NO: 135 - DNA, 25 bp, Homo sapien
gagggagtgtctttgtgtccgttcc

SEQ ID NO: 136 - DNA, 25 bp, Homo sapien
gagggagtgtctatgtgtccgttcc

SEQ ID NO: 137 - DNA, 25 bp, Homo sapien
agggtttcagtctgtcacgactccg

SEQ ID NO: 138 - DNA, 25 bp, Homo sapien
agggtttcagtcagtcacgactccg

SEQ ID NO: 139 - DNA, 25 bp, Homo sapien
cagaagtagtctcaggagtcaatgg

SEQ ID NO: 140 - DNA, 25 bp, Homo sapien
cagaagtagtctgaggagtcaatgg

SEQ ID NO: 141 - DNA, 25 bp, Homo sapien
gaactgtctcgagagacagtgtgta

SEQ ID NO: 142 - DNA, 25 bp, Homo sapien
gaactgtctcgacagacagtgtgta

SEQ ID NO: 143 - DNA, 25 bp, Homo sapien
ggcactcgtccacatactagagctt

SEQ ID NO: 144 - DNA, 25 bp, Homo sapien
ggcactcgtccagatactagagctt

SEQ ID NO: 145 - DNA, 25 bp, Homo sapien
actagaccttctcaggtataaggca

SEQ ID NO: 146 - DNA, 25 bp, Homo sapien
actagaccttctgaggtataaggca

SEQ ID NO: 147 - DNA, 25 bp, Homo sapien
gactctatctagacgacgaatgaca

SEQ ID NO: 148 - DNA, 25 bp, Homo sapien
gactctatctagtcgacgaatgaca

SEQ ID NO: 149 - DNA, 25 bp, Homo sapien
gacttccgtggtgacgtcatgtcct

SEQ ID NO: 150 - DNA, 25 bp, Homo sapien
gacttccgtggtcacgtcatgtcct

SEQ ID NO: 151 - DNA, 25 bp, Homo sapien
ggcgtatccgggttagtaaagtcct

SEQ ID NO: 152 - DNA, 25 bp, Homo sapien
ggcgtatccgggatagtaaagtcct

SEQ ID NO: 153 - DNA, 25 bp, Homo sapien
gggagtttcgcgagtatcaggtcct

SEQ ID NO: 154 - DNA, 25 bp, Homo sapien
gggagtttcgcgtgtatcaggtcct

SEQ ID NO: 155 - DNA, 25 bp, Homo sapien
gaacttcttcgctgtaaatgtactt

SEQ ID NO: 156 - DNA, 25 bp, Homo sapien
gaacttcttcgcagtaaatgtactt

SEQ ID NO: 157 - DNA, 25 bp, Homo sapien
cttctccgccgtaaactacgacagt

SEQ ID NO: 158 - DNA, 25 bp, Homo sapien
cttctccgccgttaactacgacagt

SEQ ID NO: 159 - DNA, 25 bp, Homo sapien
gacttccacacctgacctgacgagt

SEQ ID NO: 160 - DNA, 25 bp, Homo sapien
gacttccacaccagacctgacgagt

SEQ ID NO: 161 - DNA, 25 bp, Homo sapien
tgatctcctcgacaaacgtagacag

SEQ ID NO: 162 - DNA, 25 bp, Homo sapien
tgatctcctcgagaaacgtagacag

SEQ ID NO: 163 - DNA, 25 bp, Homo sapien
gtgattcatacgtggaactgtacta

SEQ ID NO: 164 - DNA, 25 bp, Homo sapien
gtgattcatacgaggaactgtacta

SEQ ID NO: 165 - DNA, 25 bp, Homo sapien
attctgtacgtagtgacactgtatt

SEQ ID NO: 166 - DNA, 25 bp, Homo sapien
attctgtacgtactgacactgtatt

SEQ ID NO: 167 - DNA, 25 bp, Homo sapien
agtgtctacgtacagactcatctat

SEQ ID NO: 168 - DNA, 25 bp, Homo sapien
agtgtctacgtagagactcatctat

SEQ ID NO: 169 - DNA, 25 bp, Homo sapien
atcgtgtcgcgaagagactcctctt

SEQ ID NO: 170 - DNA, 25 bp, Homo sapien
atcgtgtcgcgatgagactcctctt

SEQ ID NO: 171 - DNA, 25 bp, Homo sapien
acgatgttcctatgagctcgtgctg

SEQ ID NO: 172 - DNA, 25 bp, Homo sapien
acgatgttcctaagagctcgtgctg

SEQ ID NO: 173 - DNA, 25 bp, Homo sapien
acacacgtagccacgtgcctgtctg

SEQ ID NO: 174 - DNA, 25 bp, Homo sapien
acacacgtagcctcgtgcctgtctg

SEQ ID NO: 175 - DNA, 25 bp, Homo sapien
agtcctgtgctaatagtgcctgttg

SEQ ID NO: 176 - DNA, 25 bp, Homo sapien
agtcctgtgctattagtgcctgttg

SEQ ID NO: 177 - DNA, 25 bp, Homo sapien
taacttcctacgttggcctaactag

SEQ ID NO: 178 - DNA, 25 bp, Homo sapien
taacttcctacgatggcctaactag

SEQ ID NO: 179 - DNA, 25 bp, Homo sapien
acttcttcgagtcgatcttactacg

SEQ ID NO: 180 - DNA, 25 bp, Homo sapien
acttcttcgagtggatcttactacg

SEQ ID NO: 181 - DNA, 25 bp, Homo sapien
cgacttattcactggcacagtagcg

SEQ ID NO: 182 - DNA, 25 bp, Homo sapien
cgacttattcacaggcacagtagcg

SEQ ID NO: 183 - DNA, 25 bp, Homo sapien
cgaatagtctcaagcggacgttgcg

SEQ ID NO: 184 - DNA, 25 bp, Homo sapien
cgaatagtctcatgcggacgttgcg

SEQ ID NO: 185 - DNA, 25 bp, Homo sapien
tccggagtagccattgagactggtc

SEQ ID NO: 186 - DNA, 25 bp, Homo sapien
tccggagtagcctttgagactggtc

SEQ ID NO: 187 - DNA, 25 bp, Homo sapien
ccgtgtgtgccttgtagagatgatt

SEQ ID NO: 188 - DNA, 25 bp, Homo sapien
ccgtgtgtgcctagtagagatgatt

SEQ ID NO: 189 - DNA, 25 bp, Homo sapien
gagcgtgacagtacggaagtgtctt

SEQ ID NO: 190 - DNA, 25 bp, Homo sapien
gagcgtgacagttcggaagtgtctt

SEQ ID NO: 191 - DNA, 25 bp, Homo sapien
aaccttacatatcagagagtctctg

SEQ ID NO: 192 - DNA, 25 bp, Homo sapien
aaccttacatatgagagagtctctg

SEQ ID NO: 193 - DNA, 25 bp, Homo sapien
aaaccgtccataacggcgactcctt

SEQ ID NO: 194 - DNA, 25 bp, Homo sapien
aaaccgtccatatcggcgactcctt

SEQ ID NO: 195 - DNA, 25 bp, Homo sapien
tcggtaccactacgagcgactcctt

SEQ ID NO: 196 - DNA, 25 bp, Homo sapien
tcggtaccactaggagcgactcctt

SEQ ID NO: 197 - DNA, 25 bp, Homo sapien
atccgtctctacgtgagcatcgcgc

SEQ ID NO: 198 - DNA, 25 bp, Homo sapien
atccgtctctacctgagcatcgcgc

SEQ ID NO: 199 - DNA, 25 bp, Homo sapien
ccagtcatgtctattgaactgactt

SEQ ID NO: 200 - DNA, 25 bp, Homo sapien
ccagtcatgtcttttgaactgactt

SEQ ID NO: 201 - DNA, 25 bp, Homo sapien
ccattagtgcacttggacaagatgt

SEQ ID NO: 202 - DNA, 25 bp, Homo sapien
ccattagtgcacatggacaagatgt

SEQ ID NO: 203 - DNA, 25 bp, Homo sapien
ccatatcttcacgtggaccagtacc

SEQ ID NO: 204 - DNA, 25 bp, Homo sapien
ccatatcttcacctggaccagtacc

SEQ ID NO: 205 - DNA, 25 bp, Homo sapien
ggtcctgcaccttgaccagacgtcg

SEQ ID NO: 206 - DNA, 25 bp, Homo sapien
ggtcctgcacctagaccagacgtcg

SEQ ID NO: 207 - DNA, 25 bp, Homo sapien
aggtctgccgctgagacactcgacc

SEQ ID NO: 208 - DNA, 25 bp, Homo sapien
aggtctgccgctcagacactcgacc

SEQ ID NO: 209 - DNA, 25 bp, Homo sapien
ccctctgaacgacagacgagtgtcc

SEQ ID NO: 210 - DNA, 25 bp, Homo sapien
ccctctgaacgagagacgagtgtcc

SEQ ID NO: 211 - DNA, 25 bp, Homo sapien
ccccgtgtttcacagacgaggtctt

SEQ ID NO: 212 - DNA, 25 bp, Homo sapien
ccccgtgtttcagagacgaggtctt

SEQ ID NO: 213 - DNA, 25 bp, Homo sapien
cgggtttctacagagacggactctt

SEQ ID NO: 214 - DNA, 25 bp, Homo sapien
cgggtttctacacagacggactctt

SEQ ID NO: 215 - DNA, 25 bp, Homo sapien
accgttttccgacagctcagtcgta

SEQ ID NO: 216 - DNA, 25 bp, Homo sapien
accgttttccgagagctcagtcgta

SEQ ID NO: 217 - DNA, 25 bp, Homo sapien
acatcttacccgtggtcctgtcgta

SEQ ID NO: 218 - DNA, 25 bp, Homo sapien
acatcttacccgaggtcctgtcgta

SEQ ID NO: 219 - DNA, 25 bp, Homo sapien
catcctcttcgatggacatcgcgat

SEQ ID NO: 220 - DNA, 25 bp, Homo sapien
catcctcttcgaaggacatcgcgat

SEQ ID NO: 221 - DNA, 25 bp, Homo sapien
ttactcttctcgtggaactagtcct

SEQ ID NO: 222 - DNA, 25 bp, Homo sapien
ttactcttctcgaggaactagtcct

SEQ ID NO: 223 - DNA, 25 bp, Homo sapien
tcctcgtcgtcgagaagaacgtcct

SEQ ID NO: 224 - DNA, 25 bp, Homo sapien
tcctcgtcgtcgtgaagaacgtcct

SEQ ID NO: 225 - DNA, 25 bp, Homo sapien
gtcctcgtcgtcgagaagaacgtcc

SEQ ID NO: 226 - DNA, 25 bp, Homo sapien
gtcctcgtcgtccagaagaacgtcc

SEQ ID NO: 227 - DNA, 25 bp, Homo sapien
ggccgtccgtcgaaggagacaccgc

SEQ ID NO: 228 - DNA, 25 bp, Homo sapien
ggccgtccgtcgtaggagacaccgc

SEQ ID NO: 229 - DNA, 25 bp, Homo sapien
aggacacggccgacgaagatcctct

SEQ ID NO: 230 - DNA, 25 bp, Homo sapien
aggacacggccgtcgaagatcctct

SEQ ID NO: 231 - DNA, 25 bp, Homo sapien
gagcacgaactctacgaacatcctt

SEQ ID NO: 232 - DNA, 25 bp, Homo sapien
gagcacgaactcaacgaacatcctt

SEQ ID NO: 233 - DNA, 25 bp, Homo sapien
cgagcgggttcgaacggcctcgttt

SEQ ID NO: 234 - DNA, 25 bp, Homo sapien
cgagcgggttcgtacggcctcgttt

SEQ ID NO: 235 - DNA, 25 bp, Homo sapien
tcgagcggtttctacgggcagagct

SEQ ID NO: 236 - DNA, 25 bp, Homo sapien
tcgagcggtttcaacgggcagagct

SEQ ID NO: 237 - DNA, 25 bp, Homo sapien
gtgggtgactacacggtccaggtct

SEQ ID NO: 238 - DNA, 25 bp, Homo sapien
gtgggtgactactcggtccaggtct

SEQ ID NO: 239 - DNA, 25 bp, Homo sapien
ggaggtaaccgacagacacacggtc

SEQ ID NO: 240 - DNA, 25 bp, Homo sapien
ggaggtaaccgagagacacacggtc

SEQ ID NO: 241 - DNA, 25 bp, Homo sapien
agatgttaccaacgacagagtagtc

SEQ ID NO: 242 - DNA, 25 bp, Homo sapien
agatgttaccaaggacagagtagtc

SEQ ID NO: 243 - DNA, 25 bp, Homo sapien
cctcgttcctaggagacatgtctcg

SEQ ID NO: 244 - DNA, 25 bp, Homo sapien
cctcgttcctagcagacatgtctcg

SEQ ID NO: 245 - DNA, 25 bp, Homo sapien
acgagttctttctgactatgtctct

SEQ ID NO: 246 - DNA, 25 bp, Homo sapien
acgagttctttcagactatgtctct

SEQ ID NO: 247 - DNA, 25 bp, Homo sapien
tttacatgtctcttcagagggtctc

SEQ ID NO: 248 - DNA, 25 bp, Homo sapien
tttacatgtctcatcagagggtctc

SEQ ID NO: 249 - DNA, 25 bp, Homo sapien
tgtacctgtccatctagttaggcac

SEQ ID NO: 250 - DNA, 25 bp, Homo sapien
tgtacctgtccaactagttaggcac

SEQ ID NO: 251 - DNA, 25 bp, Homo sapien
tgtatacgttcaaacagaaagtcac

SEQ ID NO: 252 - DNA, 25 bp, Homo sapien
tgtatacgttcatacagaaagtcac

SEQ ID NO: 253 - DNA, 25 bp, Homo sapien
gtatacgttactgtctaaactgtca

SEQ ID NO: 254 - DNA, 25 bp, Homo sapien
gtatacgttactctctaaactgtca

SEQ ID NO: 255 - DNA, 25 bp, Homo sapien
gagacttactctacgaaatagtaca

SEQ ID NO: 256 - DNA, 25 bp, Homo sapien
gagacttactcttcgaaatagtaca

SEQ ID NO: 257 - DNA, 25 bp, Homo sapien
ctgacgtactgtcttgagaatgtta

SEQ ID NO: 258 - DNA, 25 bp, Homo sapien
ctgacgtactgtgttgagaatgtta

SEQ ID NO: 259 - DNA, 25 bp, Homo sapien
cgagactccgttctcgagaacttcc

SEQ ID NO: 260 - DNA, 25 bp, Homo sapien
cgagactccgttgtcgagaacttcc

SEQ ID NO: 261 - DNA, 25 bp, Homo sapien
accgactccttctcggagaggtctc

SEQ ID NO: 262 - DNA, 25 bp, Homo sapien
accgactccttcacggagaggtctc

SEQ ID NO: 263 - DNA, 25 bp, Homo sapien
acagacagtttcactgaacggtatt

SEQ ID NO: 264 - DNA, 25 bp, Homo sapien
acagacagtttctctgaacggtatt

SEQ ID NO: 265 - DNA, 25 bp, Homo sapien
gtactggactcactgaaccgtctct

SEQ ID NO: 266 - DNA, 25 bp, Homo sapien
gtactggactcagtgaaccgtctct

SEQ ID NO: 267 - DNA, 25 bp, Homo sapien
gctttcgtctactgtgtaacctctt

SEQ ID NO: 268 - DNA, 25 bp, Homo sapien
gctttcgtctacagtgtaacctctt

SEQ ID NO: 269 - DNA, 25 bp, Homo sapien
agtctatttcgtgtaatactgtctt

SEQ ID NO: 270 - DNA, 25 bp, Homo sapien
agtctatttcgtctaatactgtctt

SEQ ID NO: 271 - DNA, 25 bp, Homo sapien
gctctattcgactgatatatgtctg

SEQ ID NO: 272 - DNA, 25 bp, Homo sapien
gctctattcgacagatatatgtctg

SEQ ID NO: 273 - DNA, 25 bp, Homo sapien
ccgcagtatccgatggtattacctc

SEQ ID NO: 274 - DNA, 25 bp, Homo sapien
ccgcagtatccgttggtattacctc

SEQ ID NO: 275 - DNA, 25 bp, Homo sapien
ccctagttctcgtcgttttcgtctt

SEQ ID NO: 276 - DNA, 25 bp, Homo sapien
ccctagttctcgacgttttcgtctt

SEQ ID NO: 277 - DNA, 25 bp, Homo sapien
aacgtttctcgaagtcggttacctt

SEQ ID NO: 278 - DNA, 25 bp, Homo sapien
aacgtttctcgatgtcggttacctt

SEQ ID NO: 279 - DNA, 25 bp, Homo sapien
ccttgtcacgatgagacctacactg

SEQ ID NO: 280 - DNA, 25 bp, Homo sapien
ccttgtcacgatcagacctacactg

SEQ ID NO: 281 - DNA, 25 bp, Homo sapien
acacgcttgtcacctcaacagattg

SEQ ID NO: 282 - DNA, 25 bp, Homo sapien
acacgcttgtcagctcaacagattg

SEQ ID NO: 283 - DNA, 25 bp, Homo sapien
ataactttcgagatgaacatttacg

SEQ ID NO: 284 - DNA, 25 bp, Homo sapien
ataactttcgagttgaacatttacg

SEQ ID NO: 285 - DNA, 25 bp, Homo sapien
gaattgtcgcttaagacagtgtccg

SEQ ID NO: 286 - DNA, 25 bp, Homo sapien
gaattgtcgctttagacagtgtccg

SEQ ID NO: 287 - DNA, 25 bp, Homo sapien
aggaacttcgtccagtaaacattcc

SEQ ID NO: 288 - DNA, 25 bp, Homo sapien
aggaacttcgtcgagtaaacattcc

SEQ ID NO: 289 - DNA, 25 bp, Homo sapien
agggtctatgctgtgaaactatcct

SEQ ID NO: 290 - DNA, 25 bp, Homo sapien
agggtctatgctctgaaactatcct

SEQ ID NO: 291 - DNA, 25 bp, Homo sapien
aacgggatgccgagagtaatagcct

SEQ ID NO: 292 - DNA, 25 bp, Homo sapien
aacgggatgccgtgagtaatagcct

SEQ ID NO: 293 - DNA, 25 bp, Homo sapien
gagtgagtcggtcattgaatgccgt

SEQ ID NO: 294 - DNA, 25 bp, Homo sapien
gagtgagtcggtgattgaatgccgt

SEQ ID NO: 295 - DNA, 25 bp, Homo sapien
cgagggtcgacgtatcaaagtgtcc

SEQ ID NO: 296 - DNA, 25 bp, Homo sapien
cgagggtcgacgaatcaaagtgtcc

SEQ ID NO: 297 - DNA, 25 bp, Homo sapien
gaggggtacaatcagaacggtgtac

SEQ ID NO: 298 - DNA, 25 bp, Homo sapien
gaggggtacaatgagaacggtgtac

SEQ ID NO: 299 - DNA, 25 bp, Homo sapien
acggaaggtcgcacggaatgtcgac

SEQ ID NO: 300 - DNA, 25 bp, Homo sapien
acggaaggtcgctcggaatgtcgac

SEQ ID NO: 301 - DNA, 25 bp, Homo sapien
ctcggaaggtccacgggatgtactc

SEQ ID NO: 302 - DNA, 25 bp, Homo sapien
ctcggaaggtcctcgggatgtactc

SEQ ID NO: 303 - DNA, 25 bp, Homo sapien
accaagagtccgaggcgaagtacct

SEQ ID NO: 304 - DNA, 25 bp, Homo sapien
accaagagtccgtggcgaagtacct

SEQ ID NO: 305 - DNA, 25 bp, Homo sapien
aactcaagtgtccacggggaagctc

SEQ ID NO: 306 - DNA, 25 bp, Homo sapien
aactcaagtgtcgacggggaagctc

SEQ ID NO: 307 - DNA, 25 bp, Homo sapien
tcacagtgtccgagagaagacccgt

SEQ ID NO: 308 - DNA, 25 bp, Homo sapien
tcacagtgtccgtgagaagacccgt

SEQ ID NO: 309 - DNA, 25 bp, Homo sapien
ggcgatgtctgttcgaaagacccgt

SEQ ID NO: 310 - DNA, 25 bp, Homo sapien
ggcgatgtctgtacgaaagacccgt

SEQ ID NO: 311 - DNA, 25 bp, Homo sapien
agaggactattccaaaagaacgcct

SEQ ID NO: 312 - DNA, 25 bp, Homo sapien
agaggactattcgaaaagaacgcct

SEQ ID NO: 313 - DNA, 25 bp, Homo sapien
gaggatttccgaagagactggtaca

SEQ ID NO: 314 - DNA, 25 bp, Homo sapien
gaggatttccgatgagactggtaca

SEQ ID NO: 315 - DNA, 25 bp, Homo sapien
acgaaattccgaaggcgggactacg

SEQ ID NO: 316 - DNA, 25 bp, Homo sapien
acgaaattccgatggcgggactacg

SEQ ID NO: 317 - DNA, 25 bp, Homo sapien
ctagaccttccgtgtggtaggtctt

SEQ ID NO: 318 - DNA, 25 bp, Homo sapien
ctagaccttccgagtggtaggtctt

SEQ ID NO: 319 - DNA, 25 bp, Homo sapien
tgaccttcgacgaataagcggctct

SEQ ID NO: 320 - DNA, 25 bp, Homo sapien
tgaccttcgacgtataagcggctct

SEQ ID NO: 321 - DNA, 25 bp, Homo sapien
agtccttgtcgatagaccggcgtgt

SEQ ID NO: 322 - DNA, 25 bp, Homo sapien
agtccttgtcgaaagaccggcgtgt

SEQ ID NO: 323 - DNA, 25 bp, Homo sapien
agtcgtctttcaagcaacgtgactt

SEQ ID NO: 324 - DNA, 25 bp, Homo sapien
agtcgtctttcatgcaacgtgactt

SEQ ID NO: 325 - DNA, 25 bp, Homo sapien
gatcttagtccatgtaatctagctt

SEQ ID NO: 326 - DNA, 25 bp, Homo sapien
gatcttagtccaagtaatctagctt

SEQ ID NO: 327 - DNA, 25 bp, Homo sapien
tgcatatgtccatgtaagtctgtcc

SEQ ID NO: 328 - DNA, 25 bp, Homo sapien
tgcatatgtccaagtaagtctgtcc

SEQ ID NO: 329 - DNA, 25 bp, Homo sapien
gatcgtgtctacaactgttctgtcc

SEQ ID NO: 330 - DNA, 25 bp, Homo sapien
gatcgtgtctactactgttctgtcc

SEQ ID NO: 331 - DNA, 25 bp, Homo sapien
acagtgtcttagctagtttagtcac

SEQ ID NO: 332 - DNA, 25 bp, Homo sapien
acagtgtcttaggtagtttagtcac

SEQ ID NO: 333 - DNA, 25 bp, Homo sapien
gacagttaccactgagttattacta

SEQ ID NO: 334 - DNA, 25 bp, Homo sapien
gacagttaccacagagttattacta

SEQ ID NO: 335 - DNA, 25 bp, Homo sapien
cagttaccacagtcactgacgtagt

SEQ ID NO: 336 - DNA, 25 bp, Homo sapien
cagttaccacagacactgacgtagt

SEQ ID NO: 337 - DNA, 25 bp, Homo sapien
agctgtgtaaacgaacactgtactg

SEQ ID NO: 338 - DNA, 25 bp, Homo sapien
agctgtgtaaaccaacactgtactg

SEQ ID NO: 339 - DNA, 25 bp, Homo sapien
agagactcttatgaccaacatcctg

SEQ ID NO: 340 - DNA, 25 bp, Homo sapien
agagactcttatcaccaacatcctg

SEQ ID NO: 341 - DNA, 25 bp, Homo sapien
agacgttcctcctggacctcgactg

SEQ ID NO: 342 - DNA, 25 bp, Homo sapien
agacgttcctccaggacctcgactg

SEQ ID NO: 343 - DNA, 25 bp, Homo sapien
gtcgacgttcctctcggaaagtctc

SEQ ID NO: 344 - DNA, 25 bp, Homo sapien
gtcgacgttcctgtcggaaagtctc

SEQ ID NO: 345 - DNA, 25 bp, Homo sapien
accggcgtggcctaggacgaagtcc

SEQ ID NO: 346 - DNA, 25 bp, Homo sapien
accggcgtggccaaggacgaagtcc

SEQ ID NO: 347 - DNA, 25 bp, Homo sapien
ggtcgtggacgcaaggaccacgctt

SEQ ID NO: 348 - DNA, 25 bp, Homo sapien
ggtcgtggacgctaggaccacgctt

SEQ ID NO: 349 - DNA, 25 bp, Homo sapien
ttgcggagctcgaggaaccgctcgt

SEQ ID NO: 350 - DNA, 25 bp, Homo sapien
ttgcggagctcgtggaaccgctcgt

SEQ ID NO: 351 - DNA, 25 bp, Homo sapien
tttcgggtagcacctggaaacctct

SEQ ID NO: 352 - DNA, 25 bp, Homo sapien
tttcgggtagcagctggaaacctct

SEQ ID NO: 353 - DNA, 25 bp, Homo sapien
tccggtgtcgctctgagaagtcgcc

SEQ ID NO: 354 - DNA, 25 bp, Homo sapien
tccggtgtcgctgtgagaagtcgcc

SEQ ID NO: 355 - DNA, 25 bp, Homo sapien
aggtcgtgacctcagtggcagagcc

SEQ ID NO: 356 - DNA, 25 bp, Homo sapien
aggtcgtgacctgagtggcagagcc

SEQ ID NO: 357 - DNA, 25 bp, Homo sapien
aagtgctagccaaggagcaggtcct

SEQ ID NO: 358 - DNA, 25 bp, Homo sapien
aagtgctagccatggagcaggtcct

SEQ ID NO: 359 - DNA, 25 bp, Homo sapien
tggagggcatcctaggagaaatcct

SEQ ID NO: 360 - DNA, 25 bp, Homo sapien
tggagggcatccaaggagaaatcct

SEQ ID NO: 361 - DNA, 25 bp, Homo sapien
ggccctgtcctcagtgaggaatctt

SEQ ID NO: 362 - DNA, 25 bp, Homo sapien
ggccctgtcctctgtgaggaatctt

SEQ ID NO: 363 - DNA, 25 bp, Homo sapien
gcccgtgttactcattggacttcat

SEQ ID NO: 364 - DNA, 25 bp, Homo sapien
gcccgtgttactgattggacttcat

SEQ ID NO: 365 - DNA, 25 bp, Homo sapien
accgttctctacaagtgaacttcta

SEQ ID NO: 366 - DNA, 25 bp, Homo sapien
accgttctctactagtgaacttcta

SEQ ID NO: 367 - DNA, 25 bp, Homo sapien
agtcttcgtcgtgatggaccttcta

SEQ ID NO: 368 - DNA, 25 bp, Homo sapien
agtcttcgtcgtcatggaccttcta

SEQ ID NO: 369 - DNA, 25 bp, Homo sapien
agtacctgcacgacgagacgcttca

SEQ ID NO: 370 - DNA, 25 bp, Homo sapien
agtacctgcacgtcgagacgcttca

SEQ ID NO: 371 - DNA, 25 bp, Homo sapien
cagtctcttccgtcagcacttagtc

SEQ ID NO: 372 - DNA, 25 bp, Homo sapien
cagtctcttccgacagcacttagtc

SEQ ID NO: 373 - DNA, 25 bp, Homo sapien
gtctctgtccgaactccactggtct

SEQ ID NO: 374 - DNA, 25 bp, Homo sapien
gtctctgtccgatctccactggtct

SEQ ID NO: 375 - DNA, 25 bp, Homo sapien
ctctatctcgaccttgtactggtct

SEQ ID NO: 376 - DNA, 25 bp, Homo sapien
ctctatctcgacgttgtactggtct

SEQ ID NO: 377 - DNA, 25 bp, Homo sapien
aggcctagcacacgtttacacgtcc

SEQ ID NO: 378 - DNA, 25 bp, Homo sapien
aggcctagcacaggtttacacgtcc

SEQ ID NO: 379 - DNA, 25 bp, Homo sapien
ggggcctgcgaccagtgccagtcac

SEQ ID NO: 380 - DNA, 25 bp, Homo sapien
ggggcctgcgacgagtgccagtcac

SEQ ID NO: 381 - DNA, 25 bp, Homo sapien
ttggctctctgagtgtgacctgtcc

SEQ ID NO: 382 - DNA, 25 bp, Homo sapien
ttggctctctgactgtgacctgtcc

SEQ ID NO: 383 - DNA, 25 bp, Homo sapien
ggtcatttactcctgacactcgtcc

SEQ ID NO: 384 - DNA, 25 bp, Homo sapien
ggtcatttactcgtgacactcgtcc

SEQ ID NO: 385 - DNA, 25 bp, Homo sapien
ggaattcgtcctaagacctgtacct

SEQ ID NO: 386 - DNA, 25 bp, Homo sapien
ggaattcgtccttagacctgtacct

SEQ ID NO: 387 - DNA, 25 bp, Homo sapien
gaagaatccgtcgtcgtgccggacc

SEQ ID NO: 388 - DNA, 25 bp, Homo sapien
gaagaatccgtcctcgtgccggacc

SEQ ID NO: 389 - DNA, 25 bp, Homo sapien
aagaatccgtcgtcgtgccggacct

SEQ ID NO: 390 - DNA, 25 bp, Homo sapien
aagaatccgtcgacgtgccggacct

SEQ ID NO: 391 - DNA, 25 bp, Homo sapien
ataaatgctcgaactgaccttctac

SEQ ID NO: 392 - DNA, 25 bp, Homo sapien
ataaatgctcgatctgaccttctac

SEQ ID NO: 393 - DNA, 25 bp, Homo sapien
aatgtcacatgtaccgactcgtacg

SEQ ID NO: 394 - DNA, 25 bp, Homo sapien
aatgtcacatgttccgactcgtacg

SEQ ID NO: 395 - DNA, 25 bp, Homo sapien
gacagtagtcacaggctcccgtcgg

SEQ ID NO: 396 - DNA, 25 bp, Homo sapien
gacagtagtcactggctcccgtcgg

SEQ ID NO: 397 - DNA, 25 bp, Homo sapien
gtgacaagtcactttgacaaccgtt

SEQ ID NO: 398 - DNA, 25 bp, Homo sapien
gtgacaagtcacattgacaaccgtt

SEQ ID NO: 399 - DNA, 25 bp, Homo sapien
aagagaattccgattcgaaagtctc

SEQ ID NO: 400 - DNA, 25 bp, Homo sapien
aagagaattccgtttcgaaagtctc

SEQ ID NO: 401 - DNA, 25 bp, Homo sapien
agagacagatcctttgtgaactctt

SEQ ID NO: 402 - DNA, 25 bp, Homo sapien
agagacagatccattgtgaactctt

SEQ ID NO: 403 - DNA, 25 bp, Homo sapien
gacgtgttcctactgctattacggt

SEQ ID NO: 404 - DNA, 25 bp, Homo sapien
gacgtgttcctagtgctattacggt

SEQ ID NO: 405 - DNA, 25 bp, Homo sapien
gactttccgtaatgactacaacgta

SEQ ID NO: 406 - DNA, 25 bp, Homo sapien
gactttccgtaaagactacaacgta

SEQ ID NO: 407 - DNA, 25 bp, Homo sapien
cggactttcacatacgtacatggta

SEQ ID NO: 408 - DNA, 25 bp, Homo sapien
cggactttcacaaacgtacatggta

SEQ ID NO: 409 - DNA, 25 bp, Homo sapien
actgtgtcgacgaagactcatgttc

SEQ ID NO: 410 - DNA, 25 bp, Homo sapien
actgtgtcgacgtagactcatgttc

SEQ ID NO: 411 - DNA, 25 bp, Homo sapien
cgaacgttggtcatgagtcatgttt

SEQ ID NO: 412 - DNA, 25 bp, Homo sapien
cgaacgttggtcttgagtcatgttt

SEQ ID NO: 413 - DNA, 25 bp, Homo sapien
cggacttttacgttacaggactttt

SEQ ID NO: 414 - DNA, 25 bp, Homo sapien
cggacttttacgatacaggactttt

SEQ ID NO: 415 - DNA, 25 bp, Homo sapien
acgtatcttacaacgggacgtttgt

SEQ ID NO: 416 - DNA, 25 bp, Homo sapien
acgtatcttacatcgggacgtttgt

SEQ ID NO: 417 - DNA, 25 bp, Homo sapien
gtcgtatcccacgagatacgtgttt

SEQ ID NO: 418 - DNA, 25 bp, Homo sapien
gtcgtatcccaccagatacgtgttt

SEQ ID NO: 419 - DNA, 25 bp, Homo sapien
cagtaccgacaccagaacgacttct

SEQ ID NO: 420 - DNA, 25 bp, Homo sapien
cagtaccgacacgagaacgacttct

SEQ ID NO: 421 - DNA, 25 bp, Homo sapien
aagcttcaactcgggaacgatctct

SEQ ID NO: 422 - DNA, 25 bp, Homo sapien
aagcttcaactccggaacgatctct

SEQ ID NO: 423 - DNA, 25 bp, Homo sapien
agtctttaagactcggacagtctct

SEQ ID NO: 424 - DNA, 25 bp, Homo sapien
agtctttaagacacggacagtctct

SEQ ID NO: 425 - DNA, 25 bp, Homo sapien
gagtattttcgatgtgctaagtctc

SEQ ID NO: 426 - DNA, 25 bp, Homo sapien
gagtattttcgaagtgctaagtctc

SEQ ID NO: 427 - DNA, 25 bp, Homo sapien
caagtttggcgaggtagcactgccg

SEQ ID NO: 428 - DNA, 25 bp, Homo sapien
caagtttggcgacgtagcactgccg

SEQ ID NO: 429 - DNA, 25 bp, Homo sapien
ggtcgtgcgccgtagagacacttcc

SEQ ID NO: 430 - DNA, 25 bp, Homo sapien
ggtcgtgcgccgaagagacacttcc

SEQ ID NO: 431 - DNA, 25 bp, Homo sapien
gcgtcgtctcgtcagggaccttccg

SEQ ID NO: 432 - DNA, 25 bp, Homo sapien
gcgtcgtctcgtgagggaccttccg

SEQ ID NO: 433 - DNA, 25 bp, Homo sapien
gtcggtcctagaggtcgaccatctt

SEQ ID NO: 434 - DNA, 25 bp, Homo sapien
gtcggtcctagacgtcgaccatctt

SEQ ID NO: 435 - DNA, 25 bp, Homo sapien
ccgcggcctcgtcgtgcacgagcta

SEQ ID NO: 436 - DNA, 25 bp, Homo sapien
ccgcggcctcgtggtgcacgagcta

SEQ ID NO: 437 - DNA, 25 bp, Homo sapien
accgtcggtgctttcgggaggtcta

SEQ ID NO: 438 - DNA, 25 bp, Homo sapien
accgtcggtgctatcgggaggtcta

SEQ ID NO: 439 - DNA, 25 bp, Homo sapien
cgggtagtcgaaacgggaccgtctt

SEQ ID NO: 440 - DNA, 25 bp, Homo sapien
cgggtagtcgaatcgggaccgtctt

SEQ ID NO: 441 - DNA, 25 bp, Homo sapien
tgagtgtgtcaactgaagacgtcct

SEQ ID NO: 442 - DNA, 25 bp, Homo sapien
tgagtgtgtcaagtgaagacgtcct

SEQ ID NO: 443 - DNA, 25 bp, Homo sapien
ccgtctgctagaggtgaaacgtctc

SEQ ID NO: 444 - DNA, 25 bp, Homo sapien
ccgtctgctagacgtgaaacgtctc

SEQ ID NO: 445 - DNA, 25 bp, Homo sapien
tcctctgtcagacgtgactataatt

SEQ ID NO: 446 - DNA, 25 bp, Homo sapien
tcctctgtcagaggtgactataatt

SEQ ID NO: 447 - DNA, 25 bp, Homo sapien
acacagttccggtgaatagacgtcg

SEQ ID NO: 448 - DNA, 25 bp, Homo sapien
acacagttccggagaatagacgtcg

SEQ ID NO: 449 - DNA, 25 bp, Homo sapien
aacgaaagaacccacatgtcagaat

SEQ ID NO: 450 - DNA, 25 bp, Homo sapien
aacgaaagaaccgacatgtcagaat

SEQ ID NO: 451 - DNA, 25 bp, Homo sapien
gacaggacgcgaagaacagacgcta

SEQ ID NO: 452 - DNA, 25 bp, Homo sapien
gacaggacgcgatgaacagacgcta

SEQ ID NO: 453 - DNA, 25 bp, Homo sapien
actgtgttcatgaatactcgtctgt

SEQ ID NO: 454 - DNA, 25 bp, Homo sapien
actgtgttcatgtatactcgtctgt

SEQ ID NO: 455 - DNA, 25 bp, Homo sapien
cagactgtgtccttgaaactcttct

SEQ ID NO: 456 - DNA, 25 bp, Homo sapien
cagactgtgtccatgaaactcttct

SEQ ID NO: 457 - DNA, 25 bp, Homo sapien
ttaacggtatccatgtaaattccgt

SEQ ID NO: 458 - DNA, 25 bp, Homo sapien
ttaacggtatccttgtaaattccgt

SEQ ID NO: 459 - DNA, 25 bp, Homo sapien
atgtgattctccatgtccattccgt

SEQ ID NO: 460 - DNA, 25 bp, Homo sapien
atgtgattctccttgtccattccgt

SEQ ID NO: 461 - DNA, 25 bp, Homo sapien
aactgatggtcctttccgatgtctc

SEQ ID NO: 462 - DNA, 25 bp, Homo sapien
aactgatggtccattccgatgtctc

SEQ ID NO: 463 - DNA, 25 bp, Homo sapien
acaaaggtccttccctacagtctcg

SEQ ID NO: 464 - DNA, 25 bp, Homo sapien
acaaaggtccttgcctacagtctcg

SEQ ID NO: 465 - DNA, 25 bp, Homo sapien
cttcaaaggtcctccggacagtctc

SEQ ID NO: 466 - DNA, 25 bp, Homo sapien
cttcaaaggtccaccggacagtctc

SEQ ID NO: 467 - DNA, 25 bp, Homo sapien
acagcaggtcgctcaggaacgcgct

SEQ ID NO: 468 - DNA, 25 bp, Homo sapien
acagcaggtcgcacaggaacgcgct

SEQ ID NO: 469 - DNA, 25 bp, Homo sapien
acgaaggtccataatagaagtcact

SEQ ID NO: 470 - DNA, 25 bp, Homo sapien
acgaaggtccattatagaagtcact

SEQ ID NO: 471 - DNA, 25 bp, Homo sapien
agaactgtgtcgtggtagaagtctt

SEQ ID NO: 472 - DNA, 25 bp, Homo sapien
agaactgtgtcgaggtagaagtctt

SEQ ID NO: 473 - DNA, 25 bp, Homo sapien
agcatgttcgtaaagtgagtgtctc

SEQ ID NO: 474 - DNA, 25 bp, Homo sapien
agcatgttcgtatagtgagtgtctc

SEQ ID NO: 475 - DNA, 25 bp, Homo sapien
gagacatgaccgaagatggtgctct

SEQ ID NO: 476 - DNA, 25 bp, Homo sapien
gagacatgaccgtagatggtgctct

SEQ ID NO: 477 - DNA, 25 bp, Homo sapien
taaccatgcacgagagtcatgttgt

SEQ ID NO: 478 - DNA, 25 bp, Homo sapien
taaccatgcacgtgagtcatgttgt

SEQ ID NO: 479 - DNA, 25 bp, Homo sapien
aaagaatacgcctgtgatcatgttt

SEQ ID NO: 480 - DNA, 25 bp, Homo sapien
aaagaatacgccagtgatcatgttt

SEQ ID NO: 481 - DNA, 25 bp, Homo sapien
aagagaatgaccatgagtcctttat

SEQ ID NO: 482 - DNA, 25 bp, Homo sapien
aagagaatgaccttgagtcctttat

SEQ ID NO: 483 - DNA, 25 bp, Homo sapien
ccagacatcatcttgagcccgttcg

SEQ ID NO: 484 - DNA, 25 bp, Homo sapien
ccagacatcatcatgagcccgttcg

SEQ ID NO: 485 - DNA, 25 bp, Homo sapien
gtacatcaccggtagccagtcgtcg

SEQ ID NO: 486 - DNA, 25 bp, Homo sapien
gtacatcaccggaagccagtcgtcg

SEQ ID NO: 487 - DNA, 25 bp, Homo sapien
gaaagtcaccgacacgtctcagctc

SEQ ID NO: 488 - DNA, 25 bp, Homo sapien
gaaagtcaccgagacgtctcagctc

SEQ ID NO: 489 - DNA, 25 bp, Homo sapien
aaacgtctccgacgagaacactcac

SEQ ID NO: 490 - DNA, 25 bp, Homo sapien
aaacgtctccgaggagaacactcac

SEQ ID NO: 491 - DNA, 25 bp, Homo sapien
agaacgtctccgacaaagtagtcat

SEQ ID NO: 492 - DNA, 25 bp, Homo sapien
agaacgtctccgtcaaagtagtcat

SEQ ID NO: 493 - DNA, 25 bp, Homo sapien
ggaacgtccacatgaaccgtagcag

SEQ ID NO: 494 - DNA, 25 bp, Homo sapien
ggaacgtccacaagaaccgtagcag

SEQ ID NO: 495 - DNA, 25 bp, Homo sapien
cacgtagctacaagaacgcggtcag

SEQ ID NO: 496 - DNA, 25 bp, Homo sapien
cacgtagctacatgaacgcggtcag

SEQ ID NO: 497 - DNA, 25 bp, Homo sapien
gccatgactcactggtacaggtcag

SEQ ID NO: 498 - DNA, 25 bp, Homo sapien
gccatgactcacaggtacaggtcag

SEQ ID NO: 499 - DNA, 25 bp, Homo sapien
ccccgagtagctcaaggcactgcga

SEQ ID NO: 500 - DNA, 25 bp, Homo sapien
ccccgagtagctgaaggcactgcga

SEQ ID NO: 501 - DNA, 25 bp, Homo sapien
ccctgttctgattgacatcgtaccg

SEQ ID NO: 502 - DNA, 25 bp, Homo sapien
ccctgttctgatagacatcgtaccg

SEQ ID NO: 503 - DNA, 25 bp, Homo sapien
agcgtttcgtcagaccactcgacct

SEQ ID NO: 504 - DNA, 25 bp, Homo sapien
agcgtttcgtcacaccactcgacct

SEQ ID NO: 505 - DNA, 25 bp, Homo sapien
ggactttgttatcaaacgtacgcat

SEQ ID NO: 506 - DNA, 25 bp, Homo sapien
ggactttgttatgaaacgtacgcat

SEQ ID NO: 507 - DNA, 25 bp, Homo sapien
tcaggacattggtttgacacatcat

SEQ ID NO: 508 - DNA, 25 bp, Homo sapien
tcaggacattggattgacacatcat

SEQ ID NO: 509 - DNA, 25 bp, Homo sapien
catgcatgttgttagtgcacaactg

SEQ ID NO: 510 - DNA, 25 bp, Homo sapien
catgcatgttgtaagtgcacaactg

SEQ ID NO: 511 - DNA, 25 bp, Homo sapien
agccgtagtcggaagtagcattctc

SEQ ID NO: 512 - DNA, 25 bp, Homo sapien
agccgtagtcggtagtagcattctc

SEQ ID NO: 513 - DNA, 25 bp, Homo sapien
tcgctcgttcagtagaacacttctt

SEQ ID NO: 514 - DNA, 25 bp, Homo sapien
tcgctcgttcagaagaacacttctt

SEQ ID NO: 515 - DNA, 25 bp, Homo sapien
gactcggtcacgacgtaaatatcgg

SEQ ID NO: 516 - DNA, 25 bp, Homo sapien
gactcggtcacgtcgtaaatatcgg

SEQ ID NO: 517 - DNA, 25 bp, Homo sapien
gtactcggtccgtcgaggcttcgtc

SEQ ID NO: 518 - DNA, 25 bp, Homo sapien
gtactcggtccgacgaggcttcgtc

SEQ ID NO: 519 - DNA, 25 bp, Homo sapien
gggtcctgtcacgtcgggatcgtcc

SEQ ID NO: 520 - DNA, 25 bp, Homo sapien
gggtcctgtcacctcgggatcgtcc

SEQ ID NO: 521 - DNA, 25 bp, Homo sapien
tggtggtagcacctgagcatgtcga

SEQ ID NO: 522 - DNA, 25 bp, Homo sapien
tggtggtagcacgtgagcatgtcga

SEQ ID NO: 523 - DNA, 25 bp, Homo sapien
ggtgagtgtcactagagctaggacc

SEQ ID NO: 524 - DNA, 25 bp, Homo sapien
ggtgagtgtcacaagagctaggacc

SEQ ID NO: 525 - DNA, 25 bp, Homo sapien
cgggtattcacacgagacttcactt

SEQ ID NO: 526 - DNA, 25 bp, Homo sapien
cgggtattcacaggagacttcactt

SEQ ID NO: 527 - DNA, 25 bp, Homo sapien
gagtatttaccatagactatctctg

SEQ ID NO: 528 - DNA, 25 bp, Homo sapien
gagtatttaccaaagactatctctg

SEQ ID NO: 529 - DNA, 25 bp, Homo sapien
aggagtatttcgaacacgacatttt

SEQ ID NO: 530 - DNA, 25 bp, Homo sapien
aggagtatttcgtacacgacatttt

SEQ ID NO: 531 - DNA, 25 bp, Homo sapien
aaagatttcagtcacgtaacagttg

SEQ ID NO: 532 - DNA, 25 bp, Homo sapien
aaagatttcagtgacgtaacagttg

SEQ ID NO: 533 - DNA, 25 bp, Homo sapien
gaacagttccgatgacggcggtcct

SEQ ID NO: 534 - DNA, 25 bp, Homo sapien
gaacagttccgaagacggcggtcct

SEQ ID NO: 535 - DNA, 25 bp, Homo sapien
taacagtctccgacggaccggctcg

SEQ ID NO: 536 - DNA, 25 bp, Homo sapien
taacagtctccgtcggaccggctcg

SEQ ID NO: 537 - DNA, 25 bp, Homo sapien
gacacacttccgtgaacagtgctcg

SEQ ID NO: 538 - DNA, 25 bp, Homo sapien
gacacacttccgagaacagtgctcg

SEQ ID NO: 539 - DNA, 25 bp, Homo sapien
agtggaattccgtaggacatggtcg

SEQ ID NO: 540 - DNA, 25 bp, Homo sapien
agtggaattccgaaggacatggtcg

SEQ ID NO: 541 - DNA, 25 bp, Homo sapien
agggaacgtgttcaaggacctgttt

SEQ ID NO: 542 - DNA, 25 bp, Homo sapien
agggaacgtgttgaaggacctgttt

SEQ ID NO: 543 - DNA, 25 bp, Homo sapien
ggacctattacgacttacactgttt

SEQ ID NO: 544 - DNA, 25 bp, Homo sapien
ggacctattacgtcttacactgttt

SEQ ID NO: 545 - DNA, 25 bp, Homo sapien
cgacatttcgattcccgtacgttct

SEQ ID NO: 546 - DNA, 25 bp, Homo sapien
cgacatttcgatacccgtacgttct

SEQ ID NO: 547 - DNA, 25 bp, Homo sapien
gactaatcttatcacggacagttac

SEQ ID NO: 548 - DNA, 25 bp, Homo sapien
gactaatcttatgacggacagttac

SEQ ID NO: 549 - DNA, 25 bp, Homo sapien
gacgtagtactctatctgcaagtgc

SEQ ID NO: 550 - DNA, 25 bp, Homo sapien
gacgtagtactcaatctgcaagtgc

SEQ ID NO: 551 - DNA, 25 bp, Homo sapien
tgagttactccgttctgaaagatct

SEQ ID NO: 552 - DNA, 25 bp, Homo sapien
tgagttactccgatctgaaagatct

SEQ ID NO: 553 - DNA, 25 bp, Homo sapien
gacgaagtccgagggagagagtctt

SEQ ID NO: 554 - DNA, 25 bp, Homo sapien
gacgaagtccgacggagagagtctt

SEQ ID NO: 555 - DNA, 25 bp, Homo sapien
ccgcagacgcactcggacgggtctt

SEQ ID NO: 556 - DNA, 25 bp, Homo sapien
ccgcagacgcacacggacgggtctt

SEQ ID NO: 557 - DNA, 25 bp, Homo sapien
cgctgtgtcgagacggacaacgttt

SEQ ID NO: 558 - DNA, 25 bp, Homo sapien
cgctgtgtcgagtcggacaacgttt

SEQ ID NO: 559 - DNA, 25 bp, Homo sapien
aggtatagtccgacggacaccttat

SEQ ID NO: 560 - DNA, 25 bp, Homo sapien
aggtatagtccgtcggacaccttat

SEQ ID NO: 561 - DNA, 25 bp, Homo sapien
agtctacttctgttgggactctctt

SEQ ID NO: 562 - DNA, 25 bp, Homo sapien
agtctacttctgatgggactctctt

SEQ ID NO: 563 - DNA, 25 bp, Homo sapien
gtctatgtcaattcgacgatgttgt

SEQ ID NO: 564 - DNA, 25 bp, Homo sapien
gtctatgtcaatacgacgatgttgt

SEQ ID NO: 565 - DNA, 25 bp, Homo sapien
ggtaccttaccatcgacgaattcat

SEQ ID NO: 566 - DNA, 25 bp, Homo sapien
ggtaccttaccaacgacgaattcat

SEQ ID NO: 567 - DNA, 25 bp, Homo sapien
gactctgtaccgaacgaaatcttcg

SEQ ID NO: 568 - DNA, 25 bp, Homo sapien
gactctgtaccgtacgaaatcttcg

SEQ ID NO: 569 - DNA, 25 bp, Homo sapien
gactctcgtcctcgacagactttct

SEQ ID NO: 570 - DNA, 25 bp, Homo sapien
gactctcgtcctggacagactttct

SEQ ID NO: 571 - DNA, 25 bp, Homo sapien
cgagactttcctcgacaagaactct

SEQ ID NO: 572 - DNA, 25 bp, Homo sapien
cgagactttcctggacaagaactct

SEQ ID NO: 573 - DNA, 25 bp, Homo sapien
aaagtgtcgtcccgtgaaaagtctt

SEQ ID NO: 574 - DNA, 25 bp, Homo sapien
aaagtgtcgtccggtgaaaagtctt

SEQ ID NO: 575 - DNA, 25 bp, Homo sapien
tgtaacagtcccttgtaaatgttct

SEQ ID NO: 576 - DNA, 25 bp, Homo sapien
tgtaacagtcccatgtaaatgttct

SEQ ID NO: 577 - DNA, 25 bp, Homo sapien
tttaacggtatccatgtaaattccg

SEQ ID NO: 578 - DNA, 25 bp, Homo sapien
tttaacggtatcgatgtaaattccg

SEQ ID NO: 579 - DNA, 25 bp, Homo sapien
aacagggatccgtagtaaatatacc

SEQ ID NO: 580 - DNA, 25 bp, Homo sapien
aacagggatccgaagtaaatatacc

SEQ ID NO: 581 - DNA, 25 bp, Homo sapien
gacaggggcacatgtattatagccg

SEQ ID NO: 582 - DNA, 25 bp, Homo sapien
gacaggggcacaagtattatagccg

SEQ ID NO: 583 - DNA, 25 bp, Homo sapien
agaactgtcacagagttatgactcg

SEQ ID NO: 584 - DNA, 25 bp, Homo sapien
agaactgtcacacagttatgactcg

SEQ ID NO: 585 - DNA, 25 bp, Homo sapien
ggaaatgtctcacagtcactcgcct

SEQ ID NO: 586 - DNA, 25 bp, Homo sapien
ggaaatgtctcagagtcactcgcct

SEQ ID NO: 587 - DNA, 25 bp, Homo sapien
aacatgtatctagagtgaggtctct

SEQ ID NO: 588 - DNA, 25 bp, Homo sapien
aacatgtatctacagtgaggtctct

SEQ ID NO: 589 - DNA, 25 bp, Homo sapien
cataagtttcatcagtaacatacct

SEQ ID NO: 590 - DNA, 25 bp, Homo sapien
cataagtttcatgagtaacatacct

SEQ ID NO: 591 - DNA, 25 bp, Homo sapien
cagaagtgcaccttagcagagtctt

SEQ ID NO: 592 - DNA, 25 bp, Homo sapien
cagaagtgcaccatagcagagtctt

SEQ ID NO: 593 - DNA, 25 bp, Homo sapien
ccgagggacacactgacgaggccgt

SEQ ID NO: 594 - DNA, 25 bp, Homo sapien
ccgagggacacagtgacgaggccgt

SEQ ID NO: 595 - DNA, 25 bp, Homo sapien
agccggtcacgagtcaccggtccgt

SEQ ID NO: 596 - DNA, 25 bp, Homo sapien
agccggtcacgactcaccggtccgt

SEQ ID NO: 597 - DNA, 25 bp, Homo sapien
ggtctctctccacgtgtccggtctt

SEQ ID NO: 598 - DNA, 25 bp, Homo sapien
ggtctctctccaggtgtccggtctt

SEQ ID NO: 599 - DNA, 25 bp, Homo sapien
caggtcccttgaggtgtcctgtctt

SEQ ID NO: 600 - DNA, 25 bp, Homo sapien
caggtcccttgacgtgtcctgtctt

SEQ ID NO: 601 - DNA, 25 bp, Homo sapien
agtcttcgtcgtgatggaccttcta

SEQ ID NO: 602 - DNA, 25 bp, Homo sapien
agtcttcgtcgtcatggaccttcta

SEQ ID NO: 603 - DNA, 25 bp, Homo sapien
ccagtgttgtgtcactggcctgctt

SEQ ID NO: 604 - DNA, 25 bp, Homo sapien
ccagtgttgtgtgactggcctgctt

SEQ ID NO: 605 - DNA, 25 bp, Homo sapien
gcctctgtgtgatgtgtcatgtcat

SEQ ID NO: 606 - DNA, 25 bp, Homo sapien
gcctctgtgtgaagtgtcatgtcat

SEQ ID NO: 607 - DNA, 25 bp, Homo sapien
aggtcgtttccagagtaatagtcac

SEQ ID NO: 608 - DNA, 25 bp, Homo sapien
aggtcgtttccacagtaatagtcac

SEQ ID NO: 609 - DNA, 25 bp, Homo sapien
aaaggattaccgaaggtactcttcc

SEQ ID NO: 610 - DNA, 25 bp, Homo sapien
aaaggattaccgtaggtactcttcc

SEQ ID NO: 611 - DNA, 25 bp, Homo sapien
gagacttctcgatgaatcctctact

SEQ ID NO: 612 - DNA, 25 bp, Homo sapien
gagacttctcgaagaatcctctact

SEQ ID NO: 613 - DNA, 25 bp, Homo sapien
tcaaagattccgaagacgaaatcta

SEQ ID NO: 614 - DNA, 25 bp, Homo sapien
tcaaagattccgtagacgaaatcta

SEQ ID NO: 615 - DNA, 25 bp, Homo sapien
tttattaagacactgaacgctgtta

SEQ ID NO: 616 - DNA, 25 bp, Homo sapien
tttattaagacagtgaacgctgtta

SEQ ID NO: 617 - DNA, 25 bp, Homo sapien
tctaggacatctctggtgtagtagg

SEQ ID NO: 618 - DNA, 25 bp, Homo sapien
tctaggacatctgtggtgtagtagg

SEQ ID NO: 619 - DNA, 25 bp, Homo sapien
gtcagtgtgactgtcgaccaaccgt

SEQ ID NO: 620 - DNA, 25 bp, Homo sapien
gtcagtgtgactctcgaccaaccgt

SEQ ID NO: 621 - DNA, 25 bp, Homo sapien
tttcagtttacgagtgagaacccgt

SEQ ID NO: 622 - DNA, 25 bp, Homo sapien
tttcagtttacgtgtgagaacccgt

SEQ ID NO: 623 - DNA, 25 bp, Homo sapien
ttttcagtttttgaaggactacact

SEQ ID NO: 624 - DNA, 25 bp, Homo sapien
ttttcagtttttcaaggactacact

SEQ ID NO: 625 - DNA, 25 bp, Homo sapien
tgctacggtcgttatggggagactc

SEQ ID NO: 626 - DNA, 25 bp, Homo sapien
tgctacggtcgtaatggggagactc

SEQ ID NO: 627 - DNA, 25 bp, Homo sapien
tgcatatatgtcactgatgaaactt

SEQ ID NO: 628 - DNA, 25 bp, Homo sapien
tgcatatatgtctctgatgaaactt

SEQ ID NO: 629 - DNA, 25 bp, Homo sapien
ggaaactatcccttgtaagaaactt

SEQ ID NO: 630 - DNA, 25 bp, Homo sapien
ggaaactatcccatgtaagaaactt

SEQ ID NO: 631 - DNA, 25 bp, Homo sapien
cggtagaccccgaggaatacaactt

SEQ ID NO: 632 - DNA, 25 bp, Homo sapien
cggtagaccccgtggaatacaactt

SEQ ID NO: 633 - DNA, 25 bp, Homo sapien
cgggatgtcctctgggatctctctc

SEQ ID NO: 634 - DNA, 25 bp, Homo sapien
cgggatgtcctcagggatctctctc

SEQ ID NO: 635 - DNA, 25 bp, Homo sapien
ccgaatgtcctctctgatctgtcct

SEQ ID NO: 636 - DNA, 25 bp, Homo sapien
ccgaatgtcctcactgatctgtcct

SEQ ID NO: 637 - DNA, 25 bp, Homo sapien
gaatgtatcgtcaactcatgaccct

SEQ ID NO: 638 - DNA, 25 bp, Homo sapien
gaatgtatcgtctactcatgaccct

SEQ ID NO: 639 - DNA, 25 bp, Homo sapien
tgaaggttctcgtccctgacgtcct

SEQ ID NO: 640 - DNA, 25 bp, Homo sapien
tgaaggttctcgaccctgacgtcct

SEQ ID NO: 641 - DNA, 25 bp, Homo sapien
agacttgactcaacctctgtatcag

SEQ ID NO: 642 - DNA, 25 bp, Homo sapien
agacttgactcatcctctgtatcag

SEQ ID NO: 643 - DNA, 25 bp, Homo sapien
gattttgacggactgtacagtgttc

SEQ ID NO: 644 - DNA, 25 bp, Homo sapien
gattttgacggagtgtacagtgttc

SEQ ID NO: 645 - DNA, 25 bp, Homo sapien
atcttttacacaagtcgaatatata

SEQ ID NO: 646 - DNA, 25 bp, Homo sapien
atcttttacacatgtcgaatatata

SEQ ID NO: 647 - DNA, 25 bp, Homo sapien
cagggtttcgactcagacaagtata

SEQ ID NO: 648 - DNA, 25 bp, Homo sapien
cagggtttcgacacagacaagtata

SEQ ID NO: 649 - DNA, 25 bp, Homo sapien
tggggtcgagactaccgaagttaga

SEQ ID NO: 650 - DNA, 25 bp, Homo sapien
tggggtcgagacaaccgaagttaga

SEQ ID NO: 651 - DNA, 25 bp, Homo sapien
tgggtgtgttcaaagacacgttaca

SEQ ID NO: 652 - DNA, 25 bp, Homo sapien
tgggtgtgttcatagacacgttaca

SEQ ID NO: 653 - DNA, 25 bp, Homo sapien
cgaggtatttacgaacactttactc

SEQ ID NO: 654 - DNA, 25 bp, Homo sapien
cgaggtatttaccaacactttactc

SEQ ID NO: 655 - DNA, 25 bp, Homo sapien
ggtcttcatagacctcagtgtactg

SEQ ID NO: 656 - DNA, 25 bp, Homo sapien
ggtcttcatagagctcagtgtactg

SEQ ID NO: 657 - DNA, 25 bp, Homo sapien
actcgtacgtccacgaaatatgtag

SEQ ID NO: 658 - DNA, 25 bp, Homo sapien
actcgtacgtcctcgaaatatgtag

SEQ ID NO: 659 - DNA, 25 bp, Homo sapien
tactcgtgtacttaaggacaaccgg

SEQ ID NO: 660 - DNA, 25 bp, Homo sapien
tactcgtgtactaaaggacaaccgg

SEQ ID NO: 661 - DNA, 25 bp, Homo sapien
gaacttaagtacaggcagaccgtcg

SEQ ID NO: 662 - DNA, 25 bp, Homo sapien
gaacttaagtactggcagaccgtcg

SEQ ID NO: 663 - DNA, 25 bp, Homo sapien
gagtcgttgtaaactggtcagaacc

SEQ ID NO: 664 - DNA, 25 bp, Homo sapien
gagtcgttgtaatctggtcagaacc

SEQ ID NO: 665 - DNA, 25 bp, Homo sapien
ggctcgtatcctcaggtaaaaccgt

SEQ ID NO: 666 - DNA, 25 bp, Homo sapien
ggctcgtatcctgaggtaaaaccgt

SEQ ID NO: 667 - DNA, 25 bp, Homo sapien
acgcgttacttcacgctaaagacct

SEQ ID NO: 668 - DNA, 25 bp, Homo sapien
acgcgttacttctcgctaaagacct

SEQ ID NO: 669 - DNA, 25 bp, Homo sapien
aactgtatccgaagcatcagacgtt

SEQ ID NO: 670 - DNA, 25 bp, Homo sapien
aactgtatccgatgcatcagacgtt

SEQ ID NO: 671 - DNA, 25 bp, Homo sapien
tcagatgtgtgtatgtttacacttc

SEQ ID NO: 672 - DNA, 25 bp, Homo sapien
tcagatgtgtgtttgtttacacttc

SEQ ID NO: 673 - DNA, 25 bp, Homo sapien
tacagatatgttttgttcgtttacc

SEQ ID NO: 674 - DNA, 25 bp, Homo sapien
tacagatatgttatgttcgtttacc

SEQ ID NO: 675 - DNA, 25 bp, Homo sapien
tggacgatacattttctcgacctcc

SEQ ID NO: 676 - DNA, 25 bp, Homo sapien
tggacgatacatattctcgacctcc

SEQ ID NO: 677 - DNA, 25 bp, Homo sapien
gaacattagtcatctatgagatcct

SEQ ID NO: 678 - DNA, 25 bp, Homo sapien
gaacattagtcaactatgagatcct

SEQ ID NO: 679 - DNA, 25 bp, Homo sapien
cgacactttcgacctgatacaactg

SEQ ID NO: 680 - DNA, 25 bp, Homo sapien
cgacactttcgagctgatacaactg

SEQ ID NO: 681 - DNA, 25 bp, Homo sapien
gtgacctttcaggtctaacggactg

SEQ ID NO: 682 - DNA, 25 bp, Homo sapien
gtgacctttcagctctaacggactg

SEQ ID NO: 683 - DNA, 25 bp, Homo sapien
gagcttgtactccagtgacgccctg

SEQ ID NO: 684 - DNA, 25 bp, Homo sapien
gagcttgtactcgagtgacgccctg

SEQ ID NO: 685 - DNA, 25 bp, Homo sapien
acactcttcgattgtggacatctgt

SEQ ID NO: 686 - DNA, 25 bp, Homo sapien
acactcttcgatagtggacatctgt

SEQ ID NO: 687 - DNA, 25 bp, Homo sapien
agacgagtcttctaggagtgcctca

SEQ ID NO: 688 - DNA, 25 bp, Homo sapien
agacgagtcttcaaggagtgcctca

SEQ ID NO: 689 - DNA, 25 bp, Homo sapien
gagaccgtgtgcagggagcacacac

SEQ ID NO: 690 - DNA, 25 bp, Homo sapien
gagaccgtgtgctgggagcacacac

SEQ ID NO: 691 - DNA, 25 bp, Homo sapien
accagtcgtcgcgtcggacgggtcc

SEQ ID NO: 692 - DNA, 25 bp, Homo sapien
accagtcgtcgcctcggacgggtcc

SEQ ID NO: 693 - DNA, 25 bp, Homo sapien
ggggtctcgatcagagtctggtcct

SEQ ID NO: 694 - DNA, 25 bp, Homo sapien
ggggtctcgatctgagtctggtcct

SEQ ID NO: 695 - DNA, 25 bp, Homo sapien
ggggtcacatacgtagacacgttcc

SEQ ID NO: 696 - DNA, 25 bp, Homo sapien
ggggtcacatacctagacacgttcc

SEQ ID NO: 697 - DNA, 25 bp, Homo sapien
tggtcttcaccaactgacgtttccg

SEQ ID NO: 698 - DNA, 25 bp, Homo sapien
tggtcttcaccatctgacgtttccg

SEQ ID NO: 699 - DNA, 25 bp, Homo sapien
gtgggcttcctcgtctagcaaggac

SEQ ID NO: 700 - DNA, 25 bp, Homo sapien
gtgggcttcctcctctagcaaggac

SEQ ID NO: 701 - DNA, 25 bp, Homo sapien
ccagtacttcgaccctttcaagatt

SEQ ID NO: 702 - DNA, 25 bp, Homo sapien
ccagtacttcgagcctttcaagatt

SEQ ID NO: 703 - DNA, 25 bp, Homo sapien
ccaccatctccgagtgcataagtgt

SEQ ID NO: 704 - DNA, 25 bp, Homo sapien
ccaccatctccgtgtgcataagtgt

SEQ ID NO: 705 - DNA, 25 bp, Homo sapien
accaccgtagcttttggcgttaaac

SEQ ID NO: 706 - DNA, 25 bp, Homo sapien
accaccgtagctattggcgttaaac

SEQ ID NO: 707 - DNA, 25 bp, Homo sapien
caaccgtaggtctttgggaggactc

SEQ ID NO: 708 - DNA, 25 bp, Homo sapien
caaccgtaggtcattgggaggactc

SEQ ID NO: 709 - DNA, 25 bp, Homo sapien
actaccgggcaggtgacagaagacc

SEQ ID NO: 710 - DNA, 25 bp, Homo sapien
actaccgggcagctgacagaagacc

SEQ ID NO: 711 - DNA, 25 bp, Homo sapien
atggtcgagtctgacagagagctct

SEQ ID NO: 712 - DNA, 25 bp, Homo sapien
atggtcgagtctcacagagagctct

SEQ ID NO: 713 - DNA, 25 bp, Homo sapien
ccgttggtcggtactacatgaactc

SEQ ID NO: 714 - DNA, 25 bp, Homo sapien
ccgttggtcggttctacatgaactc

SEQ ID NO: 715 - DNA, 25 bp, Homo sapien
acgtctctgtatttccctgataccg

SEQ ID NO: 716 - DNA, 25 bp, Homo sapien
acgtctctgtatatccctgataccg

SEQ ID NO: 717 - DNA, 25 bp, Homo sapien
tcgactcgtagtagagttcctggaa

SEQ ID NO: 718 - DNA, 25 bp, Homo sapien
tcgactcgtagttgagttcctggaa

SEQ ID NO: 719 - DNA, 25 bp, Homo sapien
aggacctgtctgtccgtactgggag

SEQ ID NO: 720 - DNA, 25 bp, Homo sapien
aggacctgtctgaccgtactgggag

SEQ ID NO: 721 - DNA, 25 bp, Homo sapien
aacaacatgtccaatgtcctgaacg

SEQ ID NO: 722 - DNA, 25 bp, Homo sapien
aacaacatgtcctatgtcctgaacg

SEQ ID NO: 723 - DNA, 25 bp, Homo sapien
aacagaagtagacaaggtcccgaac

SEQ ID NO: 724 - DNA, 25 bp, Homo sapien
aacagaagtagagaaggtcccgaac

SEQ ID NO: 725 - DNA, 25 bp, Homo sapien
gcagtcatgtaagtagtgccgccgc

SEQ ID NO: 726 - DNA, 25 bp, Homo sapien
gcagtcatgtaactagtgccgccgc

SEQ ID NO: 727 - DNA, 25 bp, Homo sapien
ggacctattaacgtacgaaacaccc

SEQ ID NO: 728 - DNA, 25 bp, Homo sapien
ggacctattaacctacgaaacaccc

SEQ ID NO: 729 - DNA, 25 bp, Homo sapien
gagagcctgttacgatgaccccttt

SEQ ID NO: 730 - DNA, 25 bp, Homo sapien
gagagcctgttaggatgaccccttt

SEQ ID NO: 731 - DNA, 25 bp, Homo sapien
accggtgtggtatcgtgtcccgttg

SEQ ID NO: 732 - DNA, 25 bp, Homo sapien
accggtgtggtaacgtgtcccgttg

SEQ ID NO: 733 - DNA, 25 bp, Homo sapien
aagggttacagtaccgtaaacttag

SEQ ID NO: 734 - DNA, 25 bp, Homo sapien
aagggttacagttccgtaaacttag

SEQ ID NO: 735 - DNA, 25 bp, Homo sapien
cgagatttaacgtacagaaacttac

SEQ ID NO: 736 - DNA, 25 bp, Homo sapien
cgagatttaacgaacagaaacttac

SEQ ID NO: 737 - DNA, 25 bp, Homo sapien
gagttataccgaaccgtttttacgt

SEQ ID NO: 738 - DNA, 25 bp, Homo sapien
gagttataccgatccgtttttacgt

SEQ ID NO: 739 - DNA, 25 bp, Homo sapien
ttatcgtctccatgatacgatttgt

SEQ ID NO: 740 - DNA, 25 bp, Homo sapien
ttatcgtctccaagatacgatttgt

SEQ ID NO: 741 - DNA, 25 bp, Homo sapien
gtcgtcgtcttcgttacatgtctgt

SEQ ID NO: 742 - DNA, 25 bp, Homo sapien
gtcgtcgtcttccttacatgtctgt

SEQ ID NO: 743 - DNA, 25 bp, Homo sapien
ggggtcgtctgttgttccgtgtcac

SEQ ID NO: 744 - DNA, 25 bp, Homo sapien
ggggtcgtctgtagttccgtgtcac

SEQ ID NO: 745 - DNA, 25 bp, Homo sapien
tggttctctatagtcgacactaccg

SEQ ID NO: 746 - DNA, 25 bp, Homo sapien
tggttctctatactcgacactaccg

SEQ ID NO: 747 - DNA, 25 bp, Homo sapien
tcagaagtctctgtcggtcacaagg

SEQ ID NO: 748 - DNA, 25 bp, Homo sapien
tcagaagtctctctcggtcacaagg

SEQ ID NO: 749 - DNA, 25 bp, Homo sapien
agaactgtctcgtgagcgacaagag

SEQ ID NO: 750 - DNA, 25 bp, Homo sapien
agaactgtctcgagagcgacaagag

SEQ ID NO: 751 - DNA, 25 bp, Homo sapien
tagcacgtcccacactctcgagggt

SEQ ID NO: 752 - DNA, 25 bp, Homo sapien
tagcacgtcccagactctcgagggt

SEQ ID NO: 753 - DNA, 25 bp, Homo sapien
actgcttcctcaagtactaagggta

SEQ ID NO: 754 - DNA, 25 bp, Homo sapien
actgcttcctcatgtactaagggta

SEQ ID NO: 755 - DNA, 25 bp, Homo sapien
ggactcatcttaagtcgaaccgaat

SEQ ID NO: 756 - DNA, 25 bp, Homo sapien
ggactcatcttatgtcgaaccgaat

SEQ ID NO: 757 - DNA, 25 bp, Homo sapien
tatttcgtcagtgactacaccgtcc

SEQ ID NO: 758 - DNA, 25 bp, Homo sapien
tatttcgtcagtcactacaccgtcc

SEQ ID NO: 759 - DNA, 25 bp, Homo sapien
gttgtattgaagttctacaactcct

SEQ ID NO: 760 - DNA, 25 bp, Homo sapien
gttgtattgaagatctacaactcct

SEQ ID NO: 761 - DNA, 25 bp, Homo sapien
ggtaggtctgtgagtatctgtgtcc

SEQ ID NO: 762 - DNA, 25 bp, Homo sapien
ggtaggtctgtgtgtatctgtgtcc

SEQ ID NO: 763 - DNA, 25 bp, Homo sapien
cgaacgttttgttgacattatactt

SEQ ID NO: 764 - DNA, 25 bp, Homo sapien
cgaacgttttgtagacattatactt

SEQ ID NO: 765 - DNA, 25 bp, Homo sapien
agtctccgtccgaagactcactact

SEQ ID NO: 766 - DNA, 25 bp, Homo sapien
agtctccgtccgtagactcactact

SEQ ID NO: 767 - DNA, 25 bp, Homo sapien
gacgatctccgaccaacgactgagg

SEQ ID NO: 768 - DNA, 25 bp, Homo sapien
gacgatctccgagcaacgactgagg

SEQ ID NO: 769 - DNA, 25 bp, Homo sapien
aacgtctctctctacaaagtgacag

SEQ ID NO: 770 - DNA, 25 bp, Homo sapien
aacgtctctctcaacaaagtgacag

SEQ ID NO: 771 - DNA, 25 bp, Homo sapien
gtgctcaactcactgaactagtata

SEQ ID NO: 772 - DNA, 25 bp, Homo sapien
gtgctcaactcagtgaactagtata

SEQ ID NO: 773 - DNA, 25 bp, Homo sapien
aattatctcgtagtcacaggtagtg

SEQ ID NO: 774 - DNA, 25 bp, Homo sapien
aattatctcgtactcacaggtagtg

SEQ ID NO: 775 - DNA, 25 bp, Homo sapien
cgtgtgtgtcgacaacgcgactctt

SEQ ID NO: 776 - DNA, 25 bp, Homo sapien
cgtgtgtgtcgagaacgcgactctt

SEQ ID NO: 777 - DNA, 25 bp, Homo sapien
ggtcgtcgtcgacgacacttctcct

SEQ ID NO: 778 - DNA, 25 bp, Homo sapien
ggtcgtcgtcgaggacacttctcct

SEQ ID NO: 779 - DNA, 25 bp, Homo sapien
acgaagttcggtggtcctgtgtccg

SEQ ID NO: 780 - DNA, 25 bp, Homo sapien
acgaagttcggtcgtcctgtgtccg

SEQ ID NO: 781 - DNA, 25 bp, Homo sapien
gaatcgtaccctacgtcctctttcg

SEQ ID NO: 782 - DNA, 25 bp, Homo sapien
gaatcgtacccttcgtcctctttcg

SEQ ID NO: 783 - DNA, 25 bp, Homo sapien
accgtgtacacaatgtccctattcg

SEQ ID NO: 784 - DNA, 25 bp, Homo sapien
accgtgtacacattgtccctattcg

SEQ ID NO: 785 - DNA, 25 bp, Homo sapien
gtagaccgtccattgccgcttacta

SEQ ID NO: 786 - DNA, 25 bp, Homo sapien
gtagaccgtccaatgccgcttacta

SEQ ID NO: 787 - DNA, 25 bp, Homo sapien
gattcgttcactcgaccctacgacg

SEQ ID NO: 788 - DNA, 25 bp, Homo sapien
gattcgttcactggaccctacgacg

SEQ ID NO: 789 - DNA, 25 bp, Homo sapien
ggacttacactccaggacacactgg

SEQ ID NO: 790 - DNA, 25 bp, Homo sapien
ggacttacactcgaggacacactgg

SEQ ID NO: 791 - DNA, 25 bp, Homo sapien
cataagttacacaggaactctgtcg

SEQ ID NO: 792 - DNA, 25 bp, Homo sapien
cataagttacactggaactctgtcg

SEQ ID NO: 793 - DNA, 25 bp, Homo sapien
tccctaagtcacagtaaagacttgc

SEQ ID NO: 794 - DNA, 25 bp, Homo sapien
tccctaagtcactgtaaagacttgc

SEQ ID NO: 795 - DNA, 25 bp, Homo sapien
ccggtaggtcctttagtgacttgac

SEQ ID NO: 796 - DNA, 25 bp, Homo sapien
ccggtaggtcctatagtgacttgac

SEQ ID NO: 797 - DNA, 25 bp, Homo sapien
agggtagacactaccgaagtcgttc

SEQ ID NO: 798 - DNA, 25 bp, Homo sapien
agggtagacacttccgaagtcgttc

SEQ ID NO: 799 - DNA, 25 bp, Homo sapien
aaaactataacacagaggtcgtccg

SEQ ID NO: 800 - DNA, 25 bp, Homo sapien
aaaactataacagagaggtcgtccg

SEQ ID NO: 801 - DNA, 25 bp, Homo sapien
acatcctacaaaacggtgagtccct

SEQ ID NO: 802 - DNA, 25 bp, Homo sapien
acatcctacaaatcggtgagtccct

SEQ ID NO: 803 - DNA, 25 bp, Homo sapien
ttaccggtaaaacgtggtactcctt

SEQ ID NO: 804 - DNA, 25 bp, Homo sapien
ttaccggtaaaaggtggtactcctt

SEQ ID NO: 805 - DNA, 25 bp, Homo sapien
atccgtcccgacagaggtgtccgtc

SEQ ID NO: 806 - DNA, 25 bp, Homo sapien
atccgtcccgactgaggtgtccgtc

SEQ ID NO: 807 - DNA, 25 bp, Homo sapien
gtccgtctccgcagagggtgacacg

SEQ ID NO: 808 - DNA, 25 bp, Homo sapien
gtccgtctccgctgagggtgacacg

SEQ ID NO: 809 - DNA, 25 bp, Homo sapien
gacacgtcaccattagtggtgacac

SEQ ID NO: 810 - DNA, 25 bp, Homo sapien
gacacgtcaccaatagtggtgacac

SEQ ID NO: 811 - DNA, 25 bp, Homo sapien
cggacgtcacctagtaggagtcgaa

SEQ ID NO: 812 - DNA, 25 bp, Homo sapien
cggacgtcaccttgtaggagtcgaa

SEQ ID NO: 813 - DNA, 25 bp, Homo sapien
cgagactcgctttgacgtggtgaga

SEQ ID NO: 814 - DNA, 25 bp, Homo sapien
cgagactcgcttagacgtggtgaga

SEQ ID NO: 815 - DNA, 25 bp, Homo sapien
gtagctcgttattgacgttgtcaga

SEQ ID NO: 816 - DNA, 25 bp, Homo sapien
gtagctcgttatagacgttgtcaga

SEQ ID NO: 817 - DNA, 25 bp, Homo sapien
acagtcagttctattgttagttaca

SEQ ID NO: 818 - DNA, 25 bp, Homo sapien
acagtcagttcttttgttagttaca

SEQ ID NO: 819 - DNA, 25 bp, Homo sapien
ccttctatgacctgggtacaggatt

SEQ ID NO: 820 - DNA, 25 bp, Homo sapien
ccttctatgaccagggtacaggatt

SEQ ID NO: 821 - DNA, 25 bp, Homo sapien
ccttcttagtcagtggactcgttcc

SEQ ID NO: 822 - DNA, 25 bp, Homo sapien
ccttcttagtcactggactcgttcc

SEQ ID NO: 823 - DNA, 25 bp, Homo sapien
gtccggtcacctgtacctatctact

SEQ ID NO: 824 - DNA, 25 bp, Homo sapien
gtccggtcacctctacctatctact

SEQ ID NO: 825 - DNA, 25 bp, Homo sapien
aggtggtcctacttatacacttacc

SEQ ID NO: 826 - DNA, 25 bp, Homo sapien
aggtggtcctacatatacacttacc

SEQ ID NO: 827 - DNA, 25 bp, Homo sapien
gtcccgttgtacgtaaaaagttctc

SEQ ID NO: 828 - DNA, 25 bp, Homo sapien
gtcccgttgtacctaaaaagttctc

SEQ ID NO: 829 - DNA, 25 bp, Homo sapien
ttcccggtgtccaaggacaggtcgg

SEQ ID NO: 830 - DNA, 25 bp, Homo sapien
ttcccggtgtcctaggacaggtcgg

SEQ ID NO: 831 - DNA, 25 bp, Homo sapien
ttgggtttcccttgacgtcgctctc

SEQ ID NO: 832 - DNA, 25 bp, Homo sapien
ttgggtttccctagacgtcgctctc

SEQ ID NO: 833 - DNA, 25 bp, Homo sapien
acctctttccgagagatgacgtgtc

SEQ ID NO: 834 - DNA, 25 bp, Homo sapien
acctctttccgacagatgacgtgtc

SEQ ID NO: 835 - DNA, 25 bp, Homo sapien
acacttttaccgaaggtagtcttta

SEQ ID NO: 836 - DNA, 25 bp, Homo sapien
acacttttaccgtaggtagtcttta

SEQ ID NO: 837 - DNA, 25 bp, Homo sapien
catccgtacccttggtaactctcag

SEQ ID NO: 838 - DNA, 25 bp, Homo sapien
catccgtaccctaggtaactctcag

SEQ ID NO: 839 - DNA, 25 bp, Homo sapien
tctactcggctgtggagacttactc

SEQ ID NO: 840 - DNA, 25 bp, Homo sapien
tctactcggctgaggagacttactc

SEQ ID NO: 841 - DNA, 25 bp, Homo sapien
tcctcgtcgtcgagaagaacgtcct

SEQ ID NO: 842 - DNA, 25 bp, Homo sapien
tcctcgtcgtcgtgaagaacgtcct

SEQ ID NO: 843 - DNA, 25 bp, Homo sapien
gacctcgtcgaccagacagaagacc

SEQ ID NO: 844 - DNA, 25 bp, Homo sapien
gacctcgtcgacgagacagaagacc

SEQ ID NO: 845 - DNA, 25 bp, Homo sapien
gacgctacctagaagaacgcaccac

SEQ ID NO: 846 - DNA, 25 bp, Homo sapien
gacgctacctagtagaacgcaccac

SEQ ID NO: 847 - DNA, 25 bp, Homo sapien
agagacccctgaggaacgtactccc

SEQ ID NO: 848 - DNA, 25 bp, Homo sapien
agagacccctgacgaacgtactccc

SEQ ID NO: 849 - DNA, 25 bp, Homo sapien
gagtccgaactcacggagttctcct

SEQ ID NO: 850 - DNA, 25 bp, Homo sapien
gagtccgaactctcggagttctcct

SEQ ID NO: 851 - DNA, 25 bp, Homo sapien
gcccgcgtctcgacggagcgtgttt

SEQ ID NO: 852 - DNA, 25 bp, Homo sapien
gcccgcgtctcgtcggagcgtgttt

SEQ ID NO: 853 - DNA, 25 bp, Homo sapien
tggtcggcttactcggagacttatc

SEQ ID NO: 854 - DNA, 25 bp, Homo sapien
tggtcggcttacacggagacttatc

SEQ ID NO: 855 - DNA, 25 bp, Homo sapien
ctgtgggacgacaccgtctcagttc

SEQ ID NO: 856 - DNA, 25 bp, Homo sapien
ctgtgggacgactccgtctcagttc

SEQ ID NO: 857 - DNA, 25 bp, Homo sapien
gtggtgacacgaaccgactcaagtg

SEQ ID NO: 858 - DNA, 25 bp, Homo sapien
gtggtgacacgatccgactcaagtg

SEQ ID NO: 859 - DNA, 25 bp, Homo sapien
aggtgaccgtcacgactaggagtct

SEQ ID NO: 860 - DNA, 25 bp, Homo sapien
aggtgaccgtcaggactaggagtct

SEQ ID NO: 861 - DNA, 25 bp, Homo sapien
gacccgtgcctggtagaaggtagtc

SEQ ID NO: 862 - DNA, 25 bp, Homo sapien
gacccgtgcctgctagaaggtagtc

SEQ ID NO: 863 - DNA, 25 bp, Homo sapien
agagttctctcttgcggtgtcgtct

SEQ ID NO: 864 - DNA, 25 bp, Homo sapien
agagttctctctagcggtgtcgtct

SEQ ID NO: 865 - DNA, 25 bp, Homo sapien
ttagatctagtcttcaagtgagttc

SEQ ID NO: 866 - DNA, 25 bp, Homo sapien
ttagatctagtcatcaagtgagttc

SEQ ID NO: 867 - DNA, 25 bp, Homo sapien
gtgtaactccgtcatacaggggctc

SEQ ID NO: 868 - DNA, 25 bp, Homo sapien
gtgtaactccgtgatacaggggctc

SEQ ID NO: 869 - DNA, 25 bp, Homo sapien
tgactagtctcaaaccagggtcgac

SEQ ID NO: 870 - DNA, 25 bp, Homo sapien
tgactagtctcataccagggtcgac

SEQ ID NO: 871 - DNA, 25 bp, Homo sapien
gactattcagcttcataccgtcgac

SEQ ID NO: 872 - DNA, 25 bp, Homo sapien
gactattcagctacataccgtcgac

SEQ ID NO: 873 - DNA, 25 bp, Homo sapien
acgtatagtccttcgacaatagtta

SEQ ID NO: 874 - DNA, 25 bp, Homo sapien
acgtatagtcctacgacaatagtta

SEQ ID NO: 875 - DNA, 25 bp, Homo sapien
tcgacaagttctagtacataagtta

SEQ ID NO: 876 - DNA, 25 bp, Homo sapien
tcgacaagttcttgtacataagtta

SEQ ID NO: 877 - DNA, 25 bp, Homo sapien
cgagacccgtctcgtcacagaatca

SEQ ID NO: 878 - DNA, 25 bp, Homo sapien
cgagacccgtctggtcacagaatca

SEQ ID NO: 879 - DNA, 25 bp, Homo sapien
tccgaccactatctcgaggaagttc

SEQ ID NO: 880 - DNA, 25 bp, Homo sapien
tccgaccactatgtcgaggaagttc

SEQ ID NO: 881 - DNA, 25 bp, Homo sapien
cgagacattccttcacgaagatatt

SEQ ID NO: 882 - DNA, 25 bp, Homo sapien
cgagacattcctacacgaagatatt

SEQ ID NO: 883 - DNA, 25 bp, Homo sapien
agacgggactcttccgatacctgtt

SEQ ID NO: 884 - DNA, 25 bp, Homo sapien
agacgggactctaccgatacctgtt

SEQ ID NO: 885 - DNA, 25 bp, Homo sapien
gtctattgtcgttgtgtaacctgtt

SEQ ID NO: 886 - DNA, 25 bp, Homo sapien
gtctattgtcgtagtgtaacctgtt

SEQ ID NO: 887 - DNA, 25 bp, Homo sapien
gtctagtttcagaaatatgtcgtct

SEQ ID NO: 888 - DNA, 25 bp, Homo sapien
gtctagtttcagtaatatgtcgtct

SEQ ID NO: 889 - DNA, 25 bp, Homo sapien
tacgttcgactgttatagtgtcgtc

SEQ ID NO: 890 - DNA, 25 bp, Homo sapien
tacgttcgactgatatagtgtcgtc

SEQ ID NO: 891 - DNA, 25 bp, Homo sapien
acccgtagtccgtgtataacttctc

SEQ ID NO: 892 - DNA, 25 bp, Homo sapien
acccgtagtccgagtataacttctc

SEQ ID NO: 893 - DNA, 25 bp, Homo sapien
acctcgtggtcgtcgtatattttgt

SEQ ID NO: 894 - DNA, 25 bp, Homo sapien
acctcgtggtcgacgtatattttgt

SEQ ID NO: 895 - DNA, 25 bp, Homo sapien
aggtttctcgttggtgttactcgtt

SEQ ID NO: 896 - DNA, 25 bp, Homo sapien
aggtttctcgttcgtgttactcgtt

SEQ ID NO: 897 - DNA, 25 bp, Homo sapien
atctgtacgacgatggaccaacgtg

SEQ ID NO: 898 - DNA, 25 bp, Homo sapien
atctgtacgacgttggaccaacgtg

SEQ ID NO: 899 - DNA, 25 bp, Homo sapien
tcagattgtaagtcacactaatatg

SEQ ID NO: 900 - DNA, 25 bp, Homo sapien
tcagattgtaagacacactaatatg

SEQ ID NO: 901 - DNA, 25 bp, Homo sapien
ggaatatgttagatcaacactttac

SEQ ID NO: 902 - DNA, 25 bp, Homo sapien
ggaatatgttagttcaacactttac

SEQ ID NO: 903 - DNA, 25 bp, Homo sapien
tcgaattgggtgagactagtgtcgc

SEQ ID NO: 904 - DNA, 25 bp, Homo sapien
tcgaattgggtgtgactagtgtcgc

SEQ ID NO: 905 - DNA, 25 bp, Homo sapien
taggaatttacgaggtatcattcgc

SEQ ID NO: 906 - DNA, 25 bp, Homo sapien
taggaatttacgtggtatcattcgc

SEQ ID NO: 907 - DNA, 25 bp, Homo sapien
gtgtatcgattttcggataattcct

SEQ ID NO: 908 - DNA, 25 bp, Homo sapien
gtgtatcgatttacggataattcct

SEQ ID NO: 909 - DNA, 25 bp, Homo sapien
gggactgggacttagtaagttcgct

SEQ ID NO: 910 - DNA, 25 bp, Homo sapien
gggactgggactaagtaagttcgct

SEQ ID NO: 911 - DNA, 25 bp, Homo sapien
atgagtcggcacagcgaatatacct

SEQ ID NO: 912 - DNA, 25 bp, Homo sapien
atgagtcggcactgcgaatatacct

SEQ ID NO: 913 - DNA, 25 bp, Homo sapien
ggtcgaccgactgacgataggacct

SEQ ID NO: 914 - DNA, 25 bp, Homo sapien
ggtcgaccgactcacgataggacct

SEQ ID NO: 915 - DNA, 25 bp, Homo sapien
tagaggggactacttacgaaggtgc

SEQ ID NO: 916 - DNA, 25 bp, Homo sapien
tagaggggactagttacgaaggtgc

SEQ ID NO: 917 - DNA, 25 bp, Homo sapien
acggcaggacgtataccgacattga

SEQ ID NO: 918 - DNA, 25 bp, Homo sapien
acggcaggacgtttaccgacattga

SEQ ID NO: 919 - DNA, 25 bp, Homo sapien
ccgggacggtcctcaggacggtata

SEQ ID NO: 920 - DNA, 25 bp, Homo sapien
ccgggacggtccacaggacggtata

SEQ ID NO: 921 - DNA, 25 bp, Homo sapien
taaaaaagtccgagggacactacct

SEQ ID NO: 922 - DNA, 25 bp, Homo sapien
taaaaaagtccgtgggacactacct

SEQ ID NO: 923 - DNA, 25 bp, Homo sapien
aacagaggacccagggaacgactct

SEQ ID NO: 924 - DNA, 25 bp, Homo sapien
aacagaggaccctgggaacgactct

SEQ ID NO: 925 - DNA, 25 bp, Homo sapien
acacgaggtcccagtccaacgactt

SEQ ID NO: 926 - DNA, 25 bp, Homo sapien
acacgaggtccctgtccaacgactt

SEQ ID NO: 927 - DNA, 25 bp, Homo sapien
ggagtgtctgcaccaaactacacgt

SEQ ID NO: 928 - DNA, 25 bp, Homo sapien
ggagtgtctgcagcaaactacacgt

SEQ ID NO: 929 - DNA, 25 bp, Homo sapien
agggtagtttaccacaagaaagcct

SEQ ID NO: 930 - DNA, 25 bp, Homo sapien
agggtagtttacgacaagaaagcct

SEQ ID NO: 931 - DNA, 25 bp, Homo sapien
gggtttccgactaaacggacgtaac

SEQ ID NO: 932 - DNA, 25 bp, Homo sapien
gggtttccgacttaacggacgtaac

SEQ ID NO: 933 - DNA, 25 bp, Homo sapien
agagattattcaagtgtcgggtcac

SEQ ID NO: 934 - DNA, 25 bp, Homo sapien
agagattattcatgtgtcgggtcac

SEQ ID NO: 935 - DNA, 25 bp, Homo sapien
gataacattccttgcgcggtgtcct

SEQ ID NO: 936 - DNA, 25 bp, Homo sapien
gataacattcctagcgcggtgtcct

SEQ ID NO: 937 - DNA, 25 bp, Homo sapien
ttgacctccactactgtagggtctt

SEQ ID NO: 938 - DNA, 25 bp, Homo sapien
ttgacctccacttctgtagggtctt

SEQ ID NO: 939 - DNA, 25 bp, Homo sapien
ggtatcttgtcactgtggtgtctgt

SEQ ID NO: 940 - DNA, 25 bp, Homo sapien
ggtatcttgtcagtgtggtgtctgt

SEQ ID NO: 941 - DNA, 25 bp, Homo sapien
gggtcgttgtccagtccaggactat

SEQ ID NO: 942 - DNA, 25 bp, Homo sapien
gggtcgttgtcctgtccaggactat

SEQ ID NO: 943 - DNA, 25 bp, Homo sapien
gagtcatagtcctatcatcgtcatt

SEQ ID NO: 944 - DNA, 25 bp, Homo sapien
gagtcatagtccaatcatcgtcatt

SEQ ID NO: 945 - DNA, 25 bp, Homo sapien
tccagtcttccgaagtaagtcttcc

SEQ ID NO: 946 - DNA, 25 bp, Homo sapien
tccagtcttccgtagtaagtcttcc

SEQ ID NO: 947 - DNA, 25 bp, Homo sapien
acgtctgttcgtaaagtttcgtccg

SEQ ID NO: 948 - DNA, 25 bp, Homo sapien
acgtctgttcgttaagtttcgtccg

SEQ ID NO: 949 - DNA, 25 bp, Homo sapien
actgtgttgacgaagtttcgttact

SEQ ID NO: 950 - DNA, 25 bp, Homo sapien
actgtgttgacgtagtttcgttact

SEQ ID NO: 951 - DNA, 25 bp, Homo sapien
gacaggtttacaagtcttcgacgta

SEQ ID NO: 952 - DNA, 25 bp, Homo sapien
gacaggtttacatgtcttcgacgta

SEQ ID NO: 953 - DNA, 25 bp, Homo sapien
gactgatataactgttctatgacta

SEQ ID NO: 954 - DNA, 25 bp, Homo sapien
gactgatataacagttctatgacta

SEQ ID NO: 955 - DNA, 25 bp, Homo sapien
gtctagttttacgttacatgtactg

SEQ ID NO: 956 - DNA, 25 bp, Homo sapien
gtctagttttaccttacatgtactg

SEQ ID NO: 957 - DNA, 25 bp, Homo sapien
agacctttgacatgtactatcttag

SEQ ID NO: 958 - DNA, 25 bp, Homo sapien
agacctttgacaagtactatcttag

SEQ ID NO: 959 - DNA, 25 bp, Homo sapien
aacgtactcccctggactactgaca

SEQ ID NO: 960 - DNA, 25 bp, Homo sapien
aacgtactccccaggactactgaca

SEQ ID NO: 961 - DNA, 25 bp, Homo sapien
tcacgttctttcaggatgagtactt

SEQ ID NO: 962 - DNA, 25 bp, Homo sapien
tcacgttctttctggatgagtactt

SEQ ID NO: 963 - DNA, 25 bp, Homo sapien
ccggcgtggcctaggacgaagtcct

SEQ ID NO: 964 - DNA, 25 bp, Homo sapien
ccggcgtggccttggacgaagtcct

SEQ ID NO: 965 - DNA, 25 bp, Homo sapien
ggtccggcgcgagagcctacgtcct

SEQ ID NO: 966 - DNA, 25 bp, Homo sapien
ggtccggcgcgacagcctacgtcct

SEQ ID NO: 967 - DNA, 25 bp, Homo sapien
gaccgggtcgtgacgaccacgctct

SEQ ID NO: 968 - DNA, 25 bp, Homo sapien
gaccgggtcgtgtcgaccacgctct

SEQ ID NO: 969 - DNA, 25 bp, Homo sapien
gctttcggggtccagggcaccctct

SEQ ID NO: 970 - DNA, 25 bp, Homo sapien
gctttcggggtcgagggcaccctct

SEQ ID NO: 971 - DNA, 25 bp, Homo sapien
tctcggtgttcaagagagacacccc

SEQ ID NO: 972 - DNA, 25 bp, Homo sapien
tctcggtgttcatgagagacacccc

SEQ ID NO: 973 - DNA, 25 bp, Homo sapien
caggtggacgtttagtggcagctcc

SEQ ID NO: 974 - DNA, 25 bp, Homo sapien
caggtggacgttaagtggcagctcc

SEQ ID NO: 975 - DNA, 25 bp, Homo sapien
taagtgctagccaaggagcaggtcc

SEQ ID NO: 976 - DNA, 25 bp, Homo sapien
taagtgctagcctaggagcaggtcc

SEQ ID NO: 977 - DNA, 25 bp, Homo sapien
gtgaggcgccccaagggtcaagacc

SEQ ID NO: 978 - DNA, 25 bp, Homo sapien
gtgaggcgcccctagggtcaagacc

SEQ ID NO: 979 - DNA, 25 bp, Homo sapien
gccactcgacccagggcgacggttt

SEQ ID NO: 980 - DNA, 25 bp, Homo sapien
gccactcgaccctgggcgacggttt

SEQ ID NO: 981 - DNA, 25 bp, Homo sapien
gtacaacggttctattggactttct

SEQ ID NO: 982 - DNA, 25 bp, Homo sapien
gtacaacggttcaattggactttct

SEQ ID NO: 983 - DNA, 25 bp, Homo sapien
aaccgtttcacactgtgtatcgtca

SEQ ID NO: 984 - DNA, 25 bp, Homo sapien
aaccgtttcacagtgtgtatcgtca

SEQ ID NO: 985 - DNA, 25 bp, Homo sapien
acgtctcttcgtcagttgctttcga

SEQ ID NO: 986 - DNA, 25 bp, Homo sapien
acgtctcttcgtgagttgctttcga

SEQ ID NO: 987 - DNA, 25 bp, Homo sapien
tcgtcctggacgactgtcctagtca

SEQ ID NO: 988 - DNA, 25 bp, Homo sapien
tcgtcctggacgtctgtcctagtca

SEQ ID NO: 989 - DNA, 25 bp, Homo sapien
agtcgtctccggtcttccttactac

SEQ ID NO: 990 - DNA, 25 bp, Homo sapien
agtcgtctccggacttccttactac

SEQ ID NO: 991 - DNA, 25 bp, Homo sapien
ggtctctgtccgaactccactggtc

SEQ ID NO: 992 - DNA, 25 bp, Homo sapien
ggtctctgtccgtactccactggtc

SEQ ID NO: 993 - DNA, 25 bp, Homo sapien
gaccttcgtccgaactttacttgtc

SEQ ID NO: 994 - DNA, 25 bp, Homo sapien
gaccttcgtccgtactttacttgtc

SEQ ID NO: 995 - DNA, 25 bp, Homo sapien
gaccctacgcagagttccagtacct

SEQ ID NO: 996 - DNA, 25 bp, Homo sapien
gaccctacgcagtgttccagtacct

SEQ ID NO: 997 - DNA, 25 bp, Homo sapien
ctgagcttcgcgtgtagtgccatcc

SEQ ID NO: 998 - DNA, 25 bp, Homo sapien
ctgagcttcgcgagtagtgccatcc

SEQ ID NO: 999 - DNA, 25 bp, Homo sapien
gagtcttcgtcaaagtcctctctcc

SEQ ID NO: 1000 - DNA, 25 bp, Homo sapien
gagtcttcgtcatagtcctctctcc

SEQ ID NO: 1001 - DNA, 25 bp, Homo sapien
cggtcatttagtcatgtcactcctc

SEQ ID NO: 1002 - DNA, 25 bp, Homo sapien
cggtcatttagtgatgtcactcctc

SEQ ID NO: 1003 - DNA, 25 bp, Homo sapien
gatatgtcgttaatgtcttctacct

SEQ ID NO: 1004 - DNA, 25 bp, Homo sapien
gatatgtcgttattgtcttctacct

SEQ ID NO: 1005 - DNA, 25 bp, Homo sapien
aagaacctcgaggtcgtgctccacc

SEQ ID NO: 1006 - DNA, 25 bp, Homo sapien
aagaacctcgagctcgtgctccacc

SEQ ID NO: 1007 - DNA, 25 bp, Homo sapien
aaagaatccgtcgtcgtgccggacc

SEQ ID NO: 1008 - DNA, 25 bp, Homo sapien
aaagaatccgtcctcgtgccggacc

SEQ ID NO: 1009 - DNA, 25 bp, Homo sapien
ataaataacggacgtgacctggacg

SEQ ID NO: 1010 - DNA, 25 bp, Homo sapien
ataaataacggaggtgacctggacg

SEQ ID NO: 1011 - DNA, 25 bp, Homo sapien
acgatgtcgtacatgttcctgtgac

SEQ ID NO: 1012 - DNA, 25 bp, Homo sapien
acgatgtcgtacttgttcctgtgac

SEQ ID NO: 1013 - DNA, 25 bp, Homo sapien
aacgaagttacttcgctcctctggt

SEQ ID NO: 1014 - DNA, 25 bp, Homo sapien
aacgaagttactacgctcctctggt

SEQ ID NO: 1015 - DNA, 25 bp, Homo sapien
gttcaactcgacactgacgaacctt

SEQ ID NO: 1016 - DNA, 25 bp, Homo sapien
gttcaactcgactctgacgaacctt

SEQ ID NO: 1017 - DNA, 25 bp, Homo sapien
aagaagattccgatattaaaccgta

SEQ ID NO: 1018 - DNA, 25 bp, Homo sapien
aagaagattccgttattaaaccgta

SEQ ID NO: 1019 - DNA, 25 bp, Homo sapien
gaagggatctcgtttcgtcaaccat

SEQ ID NO: 1020 - DNA, 25 bp, Homo sapien
gaagggatctcgattcgtcaaccat

SEQ ID NO: 1021 - DNA, 25 bp, Homo sapien
ttgagggatctcattgtcaacacga

SEQ ID NO: 1022 - DNA, 25 bp, Homo sapien
ttgagggatctctttgtcaacacga

SEQ ID NO: 1023 - DNA, 25 bp, Homo sapien
tgagcgagaccctcttacacctcga

SEQ ID NO: 1024 - DNA, 25 bp, Homo sapien
tgagcgagacccacttacacctcga

SEQ ID NO: 1025 - DNA, 25 bp, Homo sapien
tacgggaacctcacatgactccgag

SEQ ID NO: 1026 - DNA, 25 bp, Homo sapien
tacgggaacctctcatgactccgag

SEQ ID NO: 1027 - DNA, 25 bp, Homo sapien
cgaggaaatcttcagtccgtccggt

SEQ ID NO: 1028 - DNA, 25 bp, Homo sapien
cgaggaaatcttgagtccgtccggt

SEQ ID NO: 1029 - DNA, 25 bp, Homo sapien
caggtaaactttgagtacatcggat

SEQ ID NO: 1030 - DNA, 25 bp, Homo sapien
caggtaaactttcagtacatcggat

SEQ ID NO: 1031 - DNA, 25 bp, Homo sapien
gcgacagttcttctgacgtattaat

SEQ ID NO: 1032 - DNA, 25 bp, Homo sapien
gcgacagttcttgtgacgtattaat

SEQ ID NO: 1033 - DNA, 25 bp, Homo sapien
ggagacctttctatgtctacaacta

SEQ ID NO: 1034 - DNA, 25 bp, Homo sapien
ggagacctttctttgtctacaacta

SEQ ID NO: 1035 - DNA, 25 bp, Homo sapien
aggactttcgtagacttcataagta

SEQ ID NO: 1036 - DNA, 25 bp, Homo sapien
aggactttcgtacacttcataagta

SEQ ID NO: 1037 - DNA, 25 bp, Homo sapien
taaggattcgtcgaaactcatggtc

SEQ ID NO: 1038 - DNA, 25 bp, Homo sapien
taaggattcgtccaaactcatggtc

SEQ ID NO: 1039 - DNA, 25 bp, Homo sapien
cgattgtcgttcatgagacatgttc

SEQ ID NO: 1040 - DNA, 25 bp, Homo sapien
cgattgtcgttcttgagacatgttc

SEQ ID NO: 1041 - DNA, 25 bp, Homo sapien
ccagtcttgttgtttaggacgtttt

SEQ ID NO: 1042 - DNA, 25 bp, Homo sapien
ccagtcttgttgattaggacgtttt

SEQ ID NO: 1043 - DNA, 25 bp, Homo sapien
aacgttgctacaatggtcgagttgt

SEQ ID NO: 1044 - DNA, 25 bp, Homo sapien
aacgttgctacattggtcgagttgt

SEQ ID NO: 1045 - DNA, 25 bp, Homo sapien
tcgttacccacatgatagtactggt

SEQ ID NO: 1046 - DNA, 25 bp, Homo sapien
tcgttacccacaagatagtactggt

SEQ ID NO: 1047 - DNA, 25 bp, Homo sapien
cgtatacccactagacagtcgtgac

SEQ ID NO: 1048 - DNA, 25 bp, Homo sapien
cgtatacccacttgacagtcgtgac

SEQ ID NO: 1049 - DNA, 25 bp, Homo sapien
gtcttacacatctggtatgtatcct

SEQ ID NO: 1050 - DNA, 25 bp, Homo sapien
gtcttacacatcaggtatgtatcct

SEQ ID NO: 1051 - DNA, 25 bp, Homo sapien
ggtctttataccaacggtctagttt

SEQ ID NO: 1052 - DNA, 25 bp, Homo sapien
ggtctttatacctacggtctagttt

SEQ ID NO: 1053 - DNA, 25 bp, Homo sapien
ctatggtttttccaggttaagtatc

SEQ ID NO: 1054 - DNA, 25 bp, Homo sapien
ctatggtttttcgaggttaagtatc

SEQ ID NO: 1055 - DNA, 25 bp, Homo sapien
tgatgttgtgcagtgtcgatgtcac

SEQ ID NO: 1056 - DNA, 25 bp, Homo sapien
tgatgttgtgcactgtcgatgtcac

SEQ ID NO: 1057 - DNA, 25 bp, Homo sapien
ggacgttggtgctaggacagtatcc

SEQ ID NO: 1058 - DNA, 25 bp, Homo sapien
ggacgttggtgcaaggacagtatcc

SEQ ID NO: 1059 - DNA, 25 bp, Homo sapien
gtagcgttcgcgtacggacagttcc

SEQ ID NO: 1060 - DNA, 25 bp, Homo sapien
gtagcgttcgcgaacggacagttcc

SEQ ID NO: 1061 - DNA, 25 bp, Homo sapien
cgtgttcactgatgtcacagaactt

SEQ ID NO: 1062 - DNA, 25 bp, Homo sapien
cgtgttcactgaagtcacagaactt

SEQ ID NO: 1063 - DNA, 25 bp, Homo sapien
cgcggcctcgtcgtgcacgagctac

SEQ ID NO: 1064 - DNA, 25 bp, Homo sapien
cgcggcctcgtcctgcacgagctac

SEQ ID NO: 1065 - DNA, 25 bp, Homo sapien
tcggtgtttgtcgtgcgagagtcta

SEQ ID NO: 1066 - DNA, 25 bp, Homo sapien
tcggtgtttgtcctgcgagagtcta

SEQ ID NO: 1067 - DNA, 25 bp, Homo sapien
cgggtacgtcgcacaggagacgttt

SEQ ID NO: 1068 - DNA, 25 bp, Homo sapien
cgggtacgtcgctcaggagacgttt

SEQ ID NO: 1069 - DNA, 25 bp, Homo sapien
taagtgtaaggactgtaagacgtcc

SEQ ID NO: 1070 - DNA, 25 bp, Homo sapien
taagtgtaaggagtgtaagacgtcc

SEQ ID NO: 1071 - DNA, 25 bp, Homo sapien
actgacgtagaggtgaagtcgtctt

SEQ ID NO: 1072 - DNA, 25 bp, Homo sapien
actgacgtagagctgaagtcgtctt

SEQ ID NO: 1073 - DNA, 25 bp, Homo sapien
ctagctagccgactgatataactgt

SEQ ID NO: 1074 - DNA, 25 bp, Homo sapien
ctagctagccgagtgatataactgt

SEQ ID NO: 1075 - DNA, 25 bp, Homo sapien
ataccgttccgagtaattatacgtc

SEQ ID NO: 1076 - DNA, 25 bp, Homo sapien
ataccgttccgactaattatacgtc

SEQ ID NO: 1077 - DNA, 25 bp, Homo sapien
tacgttgtccgaaataacaacgtcg

SEQ ID NO: 1078 - DNA, 25 bp, Homo sapien
tacgttgtccgatataacaacgtcg

SEQ ID NO: 1079 - DNA, 25 bp, Homo sapien
tacgatggcgaaagacacgccgacg

SEQ ID NO: 1080 - DNA, 25 bp, Homo sapien
tacgatggcgaatgacacgccgacg

SEQ ID NO: 1081 - DNA, 25 bp, Homo sapien
acggtgtccgattcttacgacttgt

SEQ ID NO: 1082 - DNA, 25 bp, Homo sapien
acggtgtccgatacttacgacttgt

SEQ ID NO: 1083 - DNA, 25 bp, Homo sapien
cgcagacggttccttgaaacacttc

SEQ ID NO: 1084 - DNA, 25 bp, Homo sapien
cgcagacggttcgttgaaacacttc

SEQ ID NO: 1085 - DNA, 25 bp, Homo sapien
aaatagacggttgttctaaattacc

SEQ ID NO: 1086 - DNA, 25 bp, Homo sapien
aaatagacggttcttctaaattacc

SEQ ID NO: 1087 - DNA, 25 bp, Homo sapien
aaaagattccccagttcacttacct

SEQ ID NO: 1088 - DNA, 25 bp, Homo sapien
aaaagattcccctgttcacttacct

SEQ ID NO: 1089 - DNA, 25 bp, Homo sapien
caacgtcatggtccaagtcccttcc

SEQ ID NO: 1090 - DNA, 25 bp, Homo sapien
caacgtcatggtgcaagtcccttcc

SEQ ID NO: 1091 - DNA, 25 bp, Homo sapien
caataggacctaggtccacacgtcc

SEQ ID NO: 1092 - DNA, 25 bp, Homo sapien
caataggacctacgtccacacgtcc

SEQ ID NO: 1093 - DNA, 25 bp, Homo sapien
gtgaaaggactcacgcgcacctctc

SEQ ID NO: 1094 - DNA, 25 bp, Homo sapien
gtgaaaggactctcgcgcacctctc

SEQ ID NO: 1095 - DNA, 25 bp, Homo sapien
ccgaaaggacaatcaggtaactcct

SEQ ID NO: 1096 - DNA, 25 bp, Homo sapien
ccgaaaggacaaacaggtaactcct

SEQ ID NO: 1097 - DNA, 25 bp, Homo sapien
ctgaaggttcataagtgaatctcgt

SEQ ID NO: 1098 - DNA, 25 bp, Homo sapien
ctgaaggttcattagtgaatctcgt

SEQ ID NO: 1099 - DNA, 25 bp, Homo sapien
tgactacttgcgtcagtgaaactgt

SEQ ID NO: 1100 - DNA, 25 bp, Homo sapien
tgactacttgcgacagtgaaactgt

SEQ ID NO: 1101 - DNA, 25 bp, Homo sapien
tacattatgtgtcagtgtatgtctc

SEQ ID NO: 1102 - DNA, 25 bp, Homo sapien
tacattatgtgtgagtgtatgtctc

SEQ ID NO: 1103 - DNA, 25 bp, Homo sapien
acgtaatgacggaagactggtgctg

SEQ ID NO: 1104 - DNA, 25 bp, Homo sapien
acgtaatgacggtagactggtgctg

SEQ ID NO: 1105 - DNA, 25 bp, Homo sapien
aaccgactccagaggtctattatgt

SEQ ID NO: 1106 - DNA, 25 bp, Homo sapien
aaccgactccagtggtctattatgt

SEQ ID NO: 1107 - DNA, 25 bp, Homo sapien
taaacataccgtgtgactctatttg

SEQ ID NO: 1108 - DNA, 25 bp, Homo sapien
taaacataccgtctgactctatttg

SEQ ID NO: 1109 - DNA, 25 bp, Homo sapien
acggagatagacactgacttttctg

SEQ ID NO: 1110 - DNA, 25 bp, Homo sapien
acggagatagactctgacttttctg

SEQ ID NO: 1111 - DNA, 25 bp, Homo sapien
ccaacaaaccttagtaccggtctcg

SEQ ID NO: 1112 - DNA, 25 bp, Homo sapien
ccaacaaacctttgtaccggtctcg

SEQ ID NO: 1113 - DNA, 25 bp, Homo sapien
aataactctcctttgtaccagtgtg

SEQ ID NO: 1114 - DNA, 25 bp, Homo sapien
aataactctcctatgtaccagtgtg

SEQ ID NO: 1115 - DNA, 25 bp, Homo sapien
aagagtctcacgtcggccacgttcg

SEQ ID NO: 1116 - DNA, 25 bp, Homo sapien
aagagtctcacgacggccacgttcg

SEQ ID NO: 1117 - DNA, 25 bp, Homo sapien
taacaagtctaccaaagaacactgg

SEQ ID NO: 1118 - DNA, 25 bp, Homo sapien
taacaagtctacgaaagaacactgg

SEQ ID NO: 1119 - DNA, 25 bp, Homo sapien
agaacgtccctgaacagtagatggt

SEQ ID NO: 1120 - DNA, 25 bp, Homo sapien
agaacgtccctgtacagtagatggt

SEQ ID NO: 1121 - DNA, 25 bp, Homo sapien
ggtaagtcccattacagtatggtag

SEQ ID NO: 1122 - DNA, 25 bp, Homo sapien
ggtaagtcccataacagtatggtag

SEQ ID NO: 1123 - DNA, 25 bp, Homo sapien
ccgacacgtgccatagacccggtaa

SEQ ID NO: 1124 - DNA, 25 bp, Homo sapien
ccgacacgtgccttagacccggtaa

SEQ ID NO: 1125 - DNA, 25 bp, Homo sapien
accctcgtctcttgaacaggtcact

SEQ ID NO: 1126 - DNA, 25 bp, Homo sapien
accctcgtctctagaacaggtcact

SEQ ID NO: 1127 - DNA, 25 bp, Homo sapien
cctcggttccgaagagaactgacga

SEQ ID NO: 1128 - DNA, 25 bp, Homo sapien
cctcggttccgatgagaactgacga

SEQ ID NO: 1129 - DNA, 25 bp, Homo sapien
tcccggtcctggaacgacatgacgc

SEQ ID NO: 1130 - DNA, 25 bp, Homo sapien
tcccggtcctggtacgacatgacgc

SEQ ID NO: 1131 - DNA, 25 bp, Homo sapien
gtcgtttcgcgagacgggtcgaccg

SEQ ID NO: 1132 - DNA, 25 bp, Homo sapien
gtcgtttcgcgacacgggtcgaccg

SEQ ID NO: 1133 - DNA, 25 bp, Homo sapien
gtcagtgtgttactacgaggtgcat

SEQ ID NO: 1134 - DNA, 25 bp, Homo sapien
gtcagtgtgttagtacgaggtgcat

SEQ ID NO: 1135 - DNA, 25 bp, Homo sapien
tcaggacagggatcttgacaccctt

SEQ ID NO: 1136 - DNA, 25 bp, Homo sapien
tcaggacagggaacttgacaccctt

SEQ ID NO: 1137 - DNA, 25 bp, Homo sapien
tgtcgatggtgtttcgacacaatgt

SEQ ID NO: 1138 - DNA, 25 bp, Homo sapien
tgtcgatggtgtatcgacacaatgt

SEQ ID NO: 1139 - DNA, 25 bp, Homo sapien
aagactctgtggaagtgaccctgtg

SEQ ID NO: 1140 - DNA, 25 bp, Homo sapien
aagactctgtggtagtgaccctgtg

SEQ ID NO: 1141 - DNA, 25 bp, Homo sapien
gctacctgtgagtagtaccatcttt

SEQ ID NO: 1142 - DNA, 25 bp, Homo sapien
gctacctgtgagaagtaccatcttt

SEQ ID NO: 1143 - DNA, 25 bp, Homo sapien
ggactctgtctgagtgcagtctgta

SEQ ID NO: 1144 - DNA, 25 bp, Homo sapien
ggactctgtctgtgtgcagtctgta

SEQ ID NO: 1145 - DNA, 25 bp, Homo sapien
agtactcatatgtgtagacgcttcc

SEQ ID NO: 1146 - DNA, 25 bp, Homo sapien
agtactcatatgagtagacgcttcc

SEQ ID NO: 1147 - DNA, 25 bp, Homo sapien
ggtctgtgtatcacggaccgtctcc

SEQ ID NO: 1148 - DNA, 25 bp, Homo sapien
ggtctgtgtatctcggaccgtctcc

SEQ ID NO: 1149 - DNA, 25 bp, Homo sapien
tggttgtcgcacctgtaccgttcca

SEQ ID NO: 1150 - DNA, 25 bp, Homo sapien
tggttgtcgcacgtgtaccgttcca

SEQ ID NO: 1151 - DNA, 25 bp, Homo sapien
cggttggtaccgagacgtcaggacc

SEQ ID NO: 1152 - DNA, 25 bp, Homo sapien
cggttggtaccgtgacgtcaggacc

SEQ ID NO: 1153 - DNA, 25 bp, Homo sapien
acggtagattcaaacggacttcacc

SEQ ID NO: 1154 - DNA, 25 bp, Homo sapien
acggtagattcatacggacttcacc

SEQ ID NO: 1155 - DNA, 25 bp, Homo sapien
aggtactttccgtacaactgccgtg

SEQ ID NO: 1156 - DNA, 25 bp, Homo sapien
aggtactttccgaacaactgccgtg

SEQ ID NO: 1157 - DNA, 25 bp, Homo sapien
cggagtctttcgactcgagatttct

SEQ ID NO: 1158 - DNA, 25 bp, Homo sapien
cggagtctttcgtctcgagatttct

SEQ ID NO: 1159 - DNA, 25 bp, Homo sapien
gaagaacttcattcgtagtcattct

SEQ ID NO: 1160 - DNA, 25 bp, Homo sapien
gaagaacttcatacgtagtcattct

SEQ ID NO: 1161 - DNA, 25 bp, Homo sapien
agaaagtgtccgtcctgcatcgtct

SEQ ID NO: 1162 - DNA, 25 bp, Homo sapien
agaaagtgtccgacctgcatcgtct

SEQ ID NO: 1163 - DNA, 25 bp, Homo sapien
ctgaagctcgcgagcccggacgtcg

SEQ ID NO: 1164 - DNA, 25 bp, Homo sapien
ctgaagctcgcgtgcccggacgtcg

SEQ ID NO: 1165 - DNA, 25 bp, Homo sapien
gaactatacgtgtggacgggcgtcg

SEQ ID NO: 1166 - DNA, 25 bp, Homo sapien
gaactatacgtgaggacgggcgtcg

SEQ ID NO: 1167 - DNA, 25 bp, Homo sapien
ggtgaatcttcttacggaccttgtg

SEQ ID NO: 1168 - DNA, 25 bp, Homo sapien
ggtgaatcttctaacggaccttgtg

SEQ ID NO: 1169 - DNA, 25 bp, Homo sapien
tcgtgaagtttctacagaccagttt

SEQ ID NO: 1170 - DNA, 25 bp, Homo sapien
tcgtgaagtttcaacagaccagttt

SEQ ID NO: 1171 - DNA, 25 bp, Homo sapien
aggaattgagtaacagacgctgttt

SEQ ID NO: 1172 - DNA, 25 bp, Homo sapien
aggaattgagtatcagacgctgttt

SEQ ID NO: 1173 - DNA, 25 bp, Homo sapien
agacttatcgattaacacgtctgtc

SEQ ID NO: 1174 - DNA, 25 bp, Homo sapien
agacttatcgataaacacgtctgtc

SEQ ID NO: 1175 - DNA, 25 bp, Homo sapien
ccgacgaattcaaggagaccgtgta

SEQ ID NO: 1176 - DNA, 25 bp, Homo sapien
ccgacgaattcatggagaccgtgta

SEQ ID NO: 1177 - DNA, 25 bp, Homo sapien
ggacgtaatcactttggaccggacg

SEQ ID NO: 1178 - DNA, 25 bp, Homo sapien
ggacgtaatcacattggaccggacg

SEQ ID NO: 1179 - DNA, 25 bp, Homo sapien
tagagttatccgttcaaatagactt

SEQ ID NO: 1180 - DNA, 25 bp, Homo sapien
tagagttatccgatcaaatagactt

SEQ ID NO: 1181 - DNA, 25 bp, Homo sapien
aggaacgaccgagagacgtaggttt

SEQ ID NO: 1182 - DNA, 25 bp, Homo sapien
aggaacgaccgacagacgtaggttt

SEQ ID NO: 1183 - DNA, 25 bp, Homo sapien
cgatgcagaccctcacgactggatt

SEQ ID NO: 1184 - DNA, 25 bp, Homo sapien
cgatgcagacccacacgactggatt

SEQ ID NO: 1185 - DNA, 25 bp, Homo sapien
cgctatacggagaccagagacgttt

SEQ ID NO: 1186 - DNA, 25 bp, Homo sapien
cgctatacggagtccagagacgttt

SEQ ID NO: 1187 - DNA, 25 bp, Homo sapien
aggtacctctacttcgagaaccttt

SEQ ID NO: 1188 - DNA, 25 bp, Homo sapien
aggtacctctacatcgagaaccttt

SEQ ID NO: 1189 - DNA, 25 bp, Homo sapien
agacacgtttattaggaagtcttct

SEQ ID NO: 1190 - DNA, 25 bp, Homo sapien
agacacgtttataaggaagtcttct

SEQ ID NO: 1191 - DNA, 25 bp, Homo sapien
cttacattgtaaaggtacgattctt

SEQ ID NO: 1192 - DNA, 25 bp, Homo sapien
cttacattgtaatggtacgattctt

SEQ ID NO: 1193 - DNA, 25 bp, Homo sapien
cgttaattcacttagagaactttgt

SEQ ID NO: 1194 - DNA, 25 bp, Homo sapien
cgttaattcactaagagaactttgt

SEQ ID NO: 1195 - DNA, 25 bp, Homo sapien
gtcacctcgtccaagtaccatttcg

SEQ ID NO: 1196 - DNA, 25 bp, Homo sapien
gtcacctcgtcctagtaccatttcg

SEQ ID NO: 1197 - DNA, 25 bp, Homo sapien
tcctctgttctctgccacgttgtct

SEQ ID NO: 1198 - DNA, 25 bp, Homo sapien
tcctctgttctcagccacgttgtct

SEQ ID NO: 1199 - DNA, 25 bp, Homo sapien
ctcttctacctccgtcacagaagtt

SEQ ID NO: 1200 - DNA, 25 bp, Homo sapien
ctcttctacctcggtcacagaagtt

SEQ ID NO: 1201 - DNA, 25 bp, Homo sapien
catgtcgtaccttcgaacaacagtt

SEQ ID NO: 1202 - DNA, 25 bp, Homo sapien
catgtcgtacctacgaacaacagtt

SEQ ID NO: 1203 - DNA, 25 bp, Homo sapien
tattacatccacttcaaatcatact

SEQ ID NO: 1204 - DNA, 25 bp, Homo sapien
tattacatccacatcaaatcatact

SEQ ID NO: 1205 - DNA, 25 bp, Homo sapien
cttaaaatccgaagacaagttctcg

SEQ ID NO: 1206 - DNA, 25 bp, Homo sapien
cttaaaatccgatgacaagttctcg

SEQ ID NO: 1207 - DNA, 25 bp, Homo sapien
tcaaagtttccgtagtacaattgtc

SEQ ID NO: 1208 - DNA, 25 bp, Homo sapien
tcaaagtttccgaagtacaattgtc

SEQ ID NO: 1209 - DNA, 25 bp, Homo sapien
tgacaggggcacatgtattatagcc

SEQ ID NO: 1210 - DNA, 25 bp, Homo sapien
tgacaggggcacttgtattatagcc

SEQ ID NO: 1211 - DNA, 25 bp, Homo sapien
agcgacagcgacttcgagttggacc

SEQ ID NO: 1212 - DNA, 25 bp, Homo sapien
agcgacagcgacatcgagttggacc

SEQ ID NO: 1213 - DNA, 25 bp, Homo sapien
aggaagtcgtcacgtgtcctacacc

SEQ ID NO: 1214 - DNA, 25 bp, Homo sapien
aggaagtcgtcaggtgtcctacacc

SEQ ID NO: 1215 - DNA, 25 bp, Homo sapien
acgacagtttaggtaggtagcgttc

SEQ ID NO: 1216 - DNA, 25 bp, Homo sapien
acgacagtttagctaggtagcgttc

SEQ ID NO: 1217 - DNA, 25 bp, Homo sapien
actagattcttatcggaagatatct

SEQ ID NO: 1218 - DNA, 25 bp, Homo sapien
actagattcttaacggaagatatct

SEQ ID NO: 1219 - DNA, 25 bp, Homo sapien
gaggtgctaccgataccagagactt

SEQ ID NO: 1220 - DNA, 25 bp, Homo sapien
gaggtgctaccgttaccagagactt

SEQ ID NO: 1221 - DNA, 25 bp, Homo sapien
cgaggtagaccagcggcaggtctcg

SEQ ID NO: 1222 - DNA, 25 bp, Homo sapien
cgaggtagaccaccggcaggtctcg

SEQ ID NO: 1223 - DNA, 25 bp, Homo sapien
acgacggtgccgactcgaccagccg

SEQ ID NO: 1224 - DNA, 25 bp, Homo sapien
acgacggtgccgtctcgaccagccg

SEQ ID NO: 1225 - DNA, 25 bp, Homo sapien
caggttcgtccctattcctgtccgt

SEQ ID NO: 1226 - DNA, 25 bp, Homo sapien
caggttcgtcccaattcctgtccgt

SEQ ID NO: 1227 - DNA, 25 bp, Homo sapien
cgaggtcctctttaggttcctcacc

SEQ ID NO: 1228 - DNA, 25 bp, Homo sapien
cgaggtcctcttaaggttcctcacc

SEQ ID NO: 1229 - DNA, 25 bp, Homo sapien
gagtcaccgctgaagtgacctccac

SEQ ID NO: 1230 - DNA, 25 bp, Homo sapien
gagtcaccgctgtagtgacctccac

SEQ ID NO: 1231 - DNA, 25 bp, Homo sapien
tgagagtgtccgacctggcccgcct

SEQ ID NO: 1232 - DNA, 25 bp, Homo sapien
tgagagtgtccgtcctggcccgcct

SEQ ID NO: 1233 - DNA, 25 bp, Homo sapien
tgtctcggcttatggtcactgtcct

SEQ ID NO: 1234 - DNA, 25 bp, Homo sapien
tgtctcggcttaaggtcactgtcct

SEQ ID NO: 1235 - DNA, 25 bp, Homo sapien
gagttcgatccaggtatataatcac

SEQ ID NO: 1236 - DNA, 25 bp, Homo sapien
gagttcgatccacgtatataatcac

SEQ ID NO: 1237 - DNA, 25 bp, Homo sapien
taaaggagttaaaaggctccgtacc

SEQ ID NO: 1238 - DNA, 25 bp, Homo sapien
taaaggagttaataggctccgtacc

SEQ ID NO: 1239 - DNA, 25 bp, Homo sapien
ctacggattaagtagtttcctctac

SEQ ID NO: 1240 - DNA, 25 bp, Homo sapien
ctacggattaagaagtttcctctac

SEQ ID NO: 1241 - DNA, 25 bp, Homo sapien
aaagactgtgtgagtacgaaaccta

SEQ ID NO: 1242 - DNA, 25 bp, Homo sapien
aaagactgtgtgtgtacgaaaccta

SEQ ID NO: 1243 - DNA, 25 bp, Homo sapien
gcgaagtttgtcgtctaggtcgttg

SEQ ID NO: 1244 - DNA, 25 bp, Homo sapien
gcgaagtttgtcctctaggtcgttg

SEQ ID NO: 1245 - DNA, 25 bp, Homo sapien
ctgtaacagcgttcagtgtcttaat

SEQ ID NO: 1246 - DNA, 25 bp, Homo sapien
ctgtaacagcgtacagtgtcttaat

SEQ ID NO: 1247 - DNA, 25 bp, Homo sapien
tcgacgtgcacttggacacacccgt

SEQ ID NO: 1248 - DNA, 25 bp, Homo sapien
tcgacgtgcactaggacacacccgt

SEQ ID NO: 1249 - DNA, 25 bp, Homo sapien
ttctactagaacacggtagaccccg

SEQ ID NO: 1250 - DNA, 25 bp, Homo sapien
ttctactagaactcggtagaccccg

SEQ ID NO: 1251 - DNA, 25 bp, Homo sapien
ttatcagttgcatcgaaggacctcg

SEQ ID NO: 1252 - DNA, 25 bp, Homo sapien
ttatcagttgcaacgaaggacctcg

SEQ ID NO: 1253 - DNA, 25 bp, Homo sapien
cttagggtgtacttggggtagactc

SEQ ID NO: 1254 - DNA, 25 bp, Homo sapien
cttagggtgtacatggggtagactc

SEQ ID NO: 1255 - DNA, 25 bp, Homo sapien
agtcataatgtcttctgtgaaaatc

SEQ ID NO: 1256 - DNA, 25 bp, Homo sapien
agtcataatgtcatctgtgaaaatc

SEQ ID NO: 1257 - DNA, 25 bp, Homo sapien
agaaaagtctccaagtaagaatcta

SEQ ID NO: 1258 - DNA, 25 bp, Homo sapien
agaaaagtctcctagtaagaatcta

SEQ ID NO: 1259 - DNA, 25 bp, Homo sapien
ggaggtgccgcgagaagtacaactt

SEQ ID NO: 1260 - DNA, 25 bp, Homo sapien
ggaggtgccgcgtgaagtacaactt

SEQ ID NO: 1261 - DNA, 25 bp, Homo sapien
tgactagtacccttggatctcacct

SEQ ID NO: 1262 - DNA, 25 bp, Homo sapien
tgactagtacccatggatctcacct

SEQ ID NO: 1263 - DNA, 25 bp, Homo sapien
accgaatgtcctctctgatctgtcc

SEQ ID NO: 1264 - DNA, 25 bp, Homo sapien
accgaatgtcctgtctgatctgtcc

SEQ ID NO: 1265 - DNA, 25 bp, Homo sapien
gtaagtgtcctctttcctcgaccct

SEQ ID NO: 1266 - DNA, 25 bp, Homo sapien
gtaagtgtcctcattcctcgaccct

SEQ ID NO: 1267 - DNA, 25 bp, Homo sapien
gacaggtcctaggtccctgtcgtcc

SEQ ID NO: 1268 - DNA, 25 bp, Homo sapien
gacaggtcctagctccctgtcgtcc

SEQ ID NO: 1269 - DNA, 25 bp, Homo sapien
agattcgactcgaacccgcgatacc

SEQ ID NO: 1270 - DNA, 25 bp, Homo sapien
agattcgactcgtacccgcgatacc

SEQ ID NO: 1271 - DNA, 25 bp, Homo sapien
ttgttagacggactcaagagtgtac

SEQ ID NO: 1272 - DNA, 25 bp, Homo sapien
ttgttagacggagtcaagagtgtac

SEQ ID NO: 1273 - DNA, 25 bp, Homo sapien
gttcttctcgaagtcgtaatagtta

SEQ ID NO: 1274 - DNA, 25 bp, Homo sapien
gttcttctcgaactcgtaatagtta

SEQ ID NO: 1275 - DNA, 25 bp, Homo sapien
agggtttcgactcagacaagtataa

SEQ ID NO: 1276 - DNA, 25 bp, Homo sapien
agggtttcgactgagacaagtataa

SEQ ID NO: 1277 - DNA, 25 bp, Homo sapien
tgccggtctgactacctaggtaaat

SEQ ID NO: 1278 - DNA, 25 bp, Homo sapien
tgccggtctgacaacctaggtaaat

SEQ ID NO: 1279 - DNA, 25 bp, Homo sapien
aggttgtctcaactacgtgttatat

SEQ ID NO: 1280 - DNA, 25 bp, Homo sapien
aggttgtctcaagtacgtgttatat

SEQ ID NO: 1281 - DNA, 25 bp, Homo sapien
cagaggttttacataaagtgtcttc

SEQ ID NO: 1282 - DNA, 25 bp, Homo sapien
cagaggttttacttaaagtgtcttc

SEQ ID NO: 1283 - DNA, 25 bp, Homo sapien
gggtacttctattatcacaagtctc

SEQ ID NO: 1284 - DNA, 25 bp, Homo sapien
gggtacttctataatcacaagtctc

SEQ ID NO: 1285 - DNA, 25 bp, Homo sapien
ctactacgtccagtacaacagtgtg

SEQ ID NO: 1286 - DNA, 25 bp, Homo sapien
ctactacgtccactacaacagtgtg

SEQ ID NO: 1287 - DNA, 25 bp, Homo sapien
tactctctcgaatcagtacaaccgg

SEQ ID NO: 1288 - DNA, 25 bp, Homo sapien
tactctctcgaaacagtacaaccgg

SEQ ID NO: 1289 - DNA, 25 bp, Homo sapien
gatatctaaaccacagtactacgtg

SEQ ID NO: 1290 - DNA, 25 bp, Homo sapien
gatatctaaacctcagtactacgtg

SEQ ID NO: 1291 - DNA, 25 bp, Homo sapien
tgtcgagtgtaaacccgtcaaactc

SEQ ID NO: 1292 - DNA, 25 bp, Homo sapien
tgtcgagtgtaatcccgtcaaactc

SEQ ID NO: 1293 - DNA, 25 bp, Homo sapien
gtgtgtcgtgagtcctgtaaaacct

SEQ ID NO: 1294 - DNA, 25 bp, Homo sapien
gtgtgtcgtgagacctgtaaaacct

SEQ ID NO: 1295 - DNA, 25 bp, Homo sapien
cggtactaggtcctacctaaaatct

SEQ ID NO: 1296 - DNA, 25 bp, Homo sapien
cggtactaggtcgtacctaaaatct

SEQ ID NO: 1297 - DNA, 25 bp, Homo sapien
cactcgaggcgaagacatcagacgc

SEQ ID NO: 1298 - DNA, 25 bp, Homo sapien
cactcgaggcgatgacatcagacgc

SEQ ID NO: 1299 - DNA, 25 bp, Homo sapien
ccactagaggtcatgccgtaacatc

SEQ ID NO: 1300 - DNA, 25 bp, Homo sapien
ccactagaggtcttgccgtaacatc

SEQ ID NO: 1301 - DNA, 25 bp, Homo sapien
acagatatgttttgttcgtttacct

SEQ ID NO: 1302 - DNA, 25 bp, Homo sapien
acagatatgtttagttcgtttacct

SEQ ID NO: 1303 - DNA, 25 bp, Homo sapien
taagaaagattcatctgatactccg

SEQ ID NO: 1304 - DNA, 25 bp, Homo sapien
taagaaagattcttctgatactccg

SEQ ID NO: 1305 - DNA, 25 bp, Homo sapien
agtaacttaggatctactgacccct

SEQ ID NO: 1306 - DNA, 25 bp, Homo sapien
agtaacttaggaactactgacccct

SEQ ID NO: 1307 - DNA, 25 bp, Homo sapien
cgacactcttgacgtctgactcttg

SEQ ID NO: 1308 - DNA, 25 bp, Homo sapien
cgacactcttgaggtctgactcttg

SEQ ID NO: 1309 - DNA, 25 bp, Homo sapien
gtcgacctttgcatacttctctctg

SEQ ID NO: 1310 - DNA, 25 bp, Homo sapien
gtcgacctttgcttacttctctctg

SEQ ID NO: 1311 - DNA, 25 bp, Homo sapien
ggtctttactcagtcacgtctccgg

SEQ ID NO: 1312 - DNA, 25 bp, Homo sapien
ggtctttactcactcacgtctccgg

SEQ ID NO: 1313 - DNA, 25 bp, Homo sapien
gagtctttcgatttcagacaccact

SEQ ID NO: 1314 - DNA, 25 bp, Homo sapien
gagtctttcgatatcagacaccact

SEQ ID NO: 1315 - DNA, 25 bp, Homo sapien
gagacgtctttcttgggaccccact

SEQ ID NO: 1316 - DNA, 25 bp, Homo sapien
gagacgtctttcatgggaccccact

SEQ ID NO: 1317 - DNA, 25 bp, Homo sapien
taaagacatgttcctgggagccacc

SEQ ID NO: 1318 - DNA, 25 bp, Homo sapien
taaagacatgttgctgggagccacc

SEQ ID NO: 1319 - DNA, 25 bp, Homo sapien
gacctagtgcgagacggcgagccct

SEQ ID NO: 1320 - DNA, 25 bp, Homo sapien
gacctagtgcgacacggcgagccct

SEQ ID NO: 1321 - DNA, 25 bp, Homo sapien
tgcggtatccaccacagttgcgcct

SEQ ID NO: 1322 - DNA, 25 bp, Homo sapien
tgcggtatccacgacagttgcgcct

SEQ ID NO: 1323 - DNA, 25 bp, Homo sapien
gagtaatcaaacgtagaacgatcct

SEQ ID NO: 1324 - DNA, 25 bp, Homo sapien
gagtaatcaaacctagaacgatcct

SEQ ID NO: 1325 - DNA, 25 bp, Homo sapien
tggtctttacacctctgacttgacc

SEQ ID NO: 1326 - DNA, 25 bp, Homo sapien
tggtctttacacgtctgacttgacc

SEQ ID NO: 1327 - DNA, 25 bp, Homo sapien
tttggttttctcatcaaaagtagac

SEQ ID NO: 1328 - DNA, 25 bp, Homo sapien
tttggttttctcttcaaaagtagac

SEQ ID NO: 1329 - DNA, 25 bp, Homo sapien
ctgtgttcgatcattctaaagtatt

SEQ ID NO: 1330 - DNA, 25 bp, Homo sapien
ctgtgttcgatctttctaaagtatt

SEQ ID NO: 1331 - DNA, 25 bp, Homo sapien
cccgatcgaccgagtctgaacagtg

SEQ ID NO: 1332 - DNA, 25 bp, Homo sapien
cccgatcgaccgtgtctgaacagtg

SEQ ID NO: 1333 - DNA, 25 bp, Homo sapien
ctccctagtcccttggtgactaaat

SEQ ID NO: 1334 - DNA, 25 bp, Homo sapien
ctccctagtcccatggtgactaaat

SEQ ID NO: 1335 - DNA, 25 bp, Homo sapien
acaccggagtcttatgtggagaatt

SEQ ID NO: 1336 - DNA, 25 bp, Homo sapien
acaccggagtctaatgtggagaatt

SEQ ID NO: 1337 - DNA, 25 bp, Homo sapien
ctcaggagtctggtgtaccgaaccc

SEQ ID NO: 1338 - DNA, 25 bp, Homo sapien
ctcaggagtctgctgtaccgaaccc

SEQ ID NO: 1339 - DNA, 25 bp, Homo sapien
agacgggtcgagtgacacggaacct

SEQ ID NO: 1340 - DNA, 25 bp, Homo sapien
agacgggtcgagagacacggaacct

SEQ ID NO: 1341 - DNA, 25 bp, Homo sapien
acgtgtggtggtgcacttcgacacc

SEQ ID NO: 1342 - DNA, 25 bp, Homo sapien
acgtgtggtggtccacttcgacacc

SEQ ID NO: 1343 - DNA, 25 bp, Homo sapien
ggaagtttgtgttgtcaccagaacc

SEQ ID NO: 1344 - DNA, 25 bp, Homo sapien
ggaagtttgtgtagtcaccagaacc

SEQ ID NO: 1345 - DNA, 25 bp, Homo sapien
tacgactgtaggagtatcccgaata

SEQ ID NO: 1346 - DNA, 25 bp, Homo sapien
tacgactgtaggtgtatcccgaata

SEQ ID NO: 1347 - DNA, 25 bp, Homo sapien
agtcgaccaggtgtaactctggaga

SEQ ID NO: 1348 - DNA, 25 bp, Homo sapien
agtcgaccaggtctaactctggaga

SEQ ID NO: 1349 - DNA, 25 bp, Homo sapien
aaacgagttcccaagtctaagagac

SEQ ID NO: 1350 - DNA, 25 bp, Homo sapien
aaacgagttccctagtctaagagac

SEQ ID NO: 1351 - DNA, 25 bp, Homo sapien
aactaaagtgttcagaagtccaaca

SEQ ID NO: 1352 - DNA, 25 bp, Homo sapien
aactaaagtgttgagaagtccaaca

SEQ ID NO: 1353 - DNA, 25 bp, Homo sapien
gcatattgtatagttagactccacc

SEQ ID NO: 1354 - DNA, 25 bp, Homo sapien
gcatattgtatacttagactccacc

SEQ ID NO: 1355 - DNA, 25 bp, Homo sapien
ggcctggtagaggtgtagaaacacc

SEQ ID NO: 1356 - DNA, 25 bp, Homo sapien
ggcctggtagagctgtagaaacacc

SEQ ID NO: 1357 - DNA, 25 bp, Homo sapien
aggacccttgttcatagaccccttc

SEQ ID NO: 1358 - DNA, 25 bp, Homo sapien
aggacccttgttgatagaccccttc

SEQ ID NO: 1359 - DNA, 25 bp, Homo sapien
acccttagtatgtcgacacccgttg

SEQ ID NO: 1360 - DNA, 25 bp, Homo sapien
acccttagtatgacgacacccgttg

SEQ ID NO: 1361 - DNA, 25 bp, Homo sapien
acagtggatatgtctcaatacttag

SEQ ID NO: 1362 - DNA, 25 bp, Homo sapien
acagtggatatgactcaatacttag

SEQ ID NO: 1363 - DNA, 25 bp, Homo sapien
gagtcgtttccgtacacgaacctta

SEQ ID NO: 1364 - DNA, 25 bp, Homo sapien
gagtcgtttccgaacacgaacctta

SEQ ID NO: 1365 - DNA, 25 bp, Homo sapien
gtagaactccgaacatttacttcgt

SEQ ID NO: 1366 - DNA, 25 bp, Homo sapien
gtagaactccgatcatttacttcgt

SEQ ID NO: 1367 - DNA, 25 bp, Homo sapien
tgtacctatccacatacgtatgatg

SEQ ID NO: 1368 - DNA, 25 bp, Homo sapien
tgtacctatccagatacgtatgatg

SEQ ID NO: 1369 - DNA, 25 bp, Homo sapien
tcggcgtatttcgttaatgacgtgt

SEQ ID NO: 1370 - DNA, 25 bp, Homo sapien
tcggcgtatttccttaatgacgtgt

SEQ ID NO: 1371 - DNA, 25 bp, Homo sapien
tgaggtgttctttgttcccgtcgag

SEQ ID NO: 1372 - DNA, 25 bp, Homo sapien
tgaggtgttcttagttcccgtcgag

SEQ ID NO: 1373 - DNA, 25 bp, Homo sapien
taggtttcgaaggtcgacgacgacc

SEQ ID NO: 1374 - DNA, 25 bp, Homo sapien
taggtttcgaagctcgacgacgacc

SEQ ID NO: 1375 - DNA, 25 bp, Homo sapien
tcacatgttctgtggtaacacaggt

SEQ ID NO: 1376 - DNA, 25 bp, Homo sapien
tcacatgttctgaggtaacacaggt

SEQ ID NO: 1377 - DNA, 25 bp, Homo sapien
cagatttcgtctcagtgaacaagag

SEQ ID NO: 1378 - DNA, 25 bp, Homo sapien
cagatttcgtctgagtgaacaagag

SEQ ID NO: 1379 - DNA, 25 bp, Homo sapien
aacagtccctgttctaccgaggtcg

SEQ ID NO: 1380 - DNA, 25 bp, Homo sapien
aacagtccctgtactaccgaggtcg

SEQ ID NO: 1381 - DNA, 25 bp, Homo sapien
actgcttcctcaagtactaagggta

SEQ ID NO: 1382 - DNA, 25 bp, Homo sapien
actgcttcctcatgtactaagggta

SEQ ID NO: 1383 - DNA, 25 bp, Homo sapien
tggactcatcttaagtcgaaccgaa

SEQ ID NO: 1384 - DNA, 25 bp, Homo sapien
tggactcatctttagtcgaaccgaa

SEQ ID NO: 1385 - DNA, 25 bp, Homo sapien
cattccgttagttcaacacgtcgac

SEQ ID NO: 1386 - DNA, 25 bp, Homo sapien
cattccgttagtacaacacgtcgac

SEQ ID NO: 1387 - DNA, 25 bp, Homo sapien
attttaggaagaagtacagactcct

SEQ ID NO: 1388 - DNA, 25 bp, Homo sapien
attttaggaagatgtacagactcct

SEQ ID NO: 1389 - DNA, 25 bp, Homo sapien
gaggtattcttggagtattcgttcc

SEQ ID NO: 1390 - DNA, 25 bp, Homo sapien
gaggtattcttgcagtattcgttcc

SEQ ID NO: 1391 - DNA, 25 bp, Homo sapien
gagaattttgtcagatatctcactt

SEQ ID NO: 1392 - DNA, 25 bp, Homo sapien
gagaattttgtctgatatctcactt

SEQ ID NO: 1393 - DNA, 25 bp, Homo sapien
tagagtctacgttgaagtactcctt

SEQ ID NO: 1394 - DNA, 25 bp, Homo sapien
tagagtctacgtagaagtactcctt

SEQ ID NO: 1395 - DNA, 25 bp, Homo sapien
agagagctcagaaacgactcggtgt

SEQ ID NO: 1396 - DNA, 25 bp, Homo sapien
agagagctcagatacgactcggtgt

SEQ ID NO: 1397 - DNA, 25 bp, Homo sapien
acgactacgtccacacacgatcaag

SEQ ID NO: 1398 - DNA, 25 bp, Homo sapien
acgactacgtcctcacacgatcaag

SEQ ID NO: 1399 - DNA, 25 bp, Homo sapien
gctacagatcattctagactcgaga

SEQ ID NO: 1400 - DNA, 25 bp, Homo sapien
gctacagatcatactagactcgaga

SEQ ID NO: 1401 - DNA, 25 bp, Homo sapien
ataaattctctagtcaagtcgtgtc

SEQ ID NO: 1402 - DNA, 25 bp, Homo sapien
ataaattctctactcaagtcgtgtc

SEQ ID NO: 1403 - DNA, 25 bp, Homo sapien
tactcgtggttacaaccgtacttat

SEQ ID NO: 1404 - DNA, 25 bp, Homo sapien
tactcgtggttagaaccgtacttat

SEQ ID NO: 1405 - DNA, 25 bp, Homo sapien
gagtcgtctgtatgtacctgtccat

SEQ ID NO: 1406 - DNA, 25 bp, Homo sapien
gagtcgtctgtaagtacctgtccat

SEQ ID NO: 1407 - DNA, 25 bp, Homo sapien
accggtcgcgttggtcttgtgtctg

SEQ ID NO: 1408 - DNA, 25 bp, Homo sapien
accggtcgcgttcgtcttgtgtctg

SEQ ID NO: 1409 - DNA, 25 bp, Homo sapien
tgaatcgtccttacactatttcgtg

SEQ ID NO: 1410 - DNA, 25 bp, Homo sapien
tgaatcgtcctttcactatttcgtg

SEQ ID NO: 1411 - DNA, 25 bp, Homo sapien
actactgacgacaatgctttgtgtg

SEQ ID NO: 1412 - DNA, 25 bp, Homo sapien
actactgacgactatgctttgtgtg

SEQ ID NO: 1413 - DNA, 25 bp, Homo sapien
tagaccgtccattgccgcttactac

SEQ ID NO: 1414 - DNA, 25 bp, Homo sapien
tagaccgtccatagccgcttactac

SEQ ID NO: 1415 - DNA, 25 bp, Homo sapien
gatccgtgactaagacgaccaagac

SEQ ID NO: 1416 - DNA, 25 bp, Homo sapien
gatccgtgactatgacgaccaagac

SEQ ID NO: 1417 - DNA, 25 bp, Homo sapien
tgattacctaccagaacacactggt

SEQ ID NO: 1418 - DNA, 25 bp, Homo sapien
tgattacctacctgaacacactggt

SEQ ID NO: 1419 - DNA, 25 bp, Homo sapien
catgacttaactgagaccgtactga

SEQ ID NO: 1420 - DNA, 25 bp, Homo sapien
catgacttaactcagaccgtactga

SEQ ID NO: 1421 - DNA, 25 bp, Homo sapien
gtctcagtaatcaaaaagtcttcga

SEQ ID NO: 1422 - DNA, 25 bp, Homo sapien
gtctcagtaatctaaaagtcttcga

SEQ ID NO: 1423 - DNA, 25 bp, Homo sapien
accgggccctaaagaactgtcgact

SEQ ID NO: 1424 - DNA, 25 bp, Homo sapien
accgggccctaatgaactgtcgact

SEQ ID NO: 1425 - DNA, 25 bp, Homo sapien
aaggggaacactaccgaccgtccac

SEQ ID NO: 1426 - DNA, 25 bp, Homo sapien
aaggggaacacttccgaccgtccac

SEQ ID NO: 1427 - DNA, 25 bp, Homo sapien
agggggaaactactagaggtcccgt

SEQ ID NO: 1428 - DNA, 25 bp, Homo sapien
agggggaaactagtagaggtcccgt

SEQ ID NO: 1429 - DNA, 25 bp, Homo sapien
cgggacccaacagtgtacggtccct

SEQ ID NO: 1430 - DNA, 25 bp, Homo sapien
cgggacccaacactgtacggtccct

SEQ ID NO: 1431 - DNA, 25 bp, Homo sapien
gaggacgtaaaacgtggagacctgt

SEQ ID NO: 1432 - DNA, 25 bp, Homo sapien
gaggacgtaaaaggtggagacctgt

SEQ ID NO: 1433 - DNA, 25 bp, Homo sapien
gtgacgcccgctgaggtatcgcgtc

SEQ ID NO: 1434 - DNA, 25 bp, Homo sapien
gtgacgcccgctcaggtatcgcgtc

SEQ ID NO: 1435 - DNA, 25 bp, Homo sapien
gtccctcgtcgtagacgggtcgctc

SEQ ID NO: 1436 - DNA, 25 bp, Homo sapien
gtccctcgtcgttgacgggtcgctc

SEQ ID NO: 1437 - DNA, 25 bp, Homo sapien
acacgtcaccattagtggtgacact

SEQ ID NO: 1438 - DNA, 25 bp, Homo sapien
acacgtcaccataagtggtgacact

SEQ ID NO: 1439 - DNA, 25 bp, Homo sapien
accgaagaccccagtgtgagtcgaa

SEQ ID NO: 1440 - DNA, 25 bp, Homo sapien
accgaagacccctgtgtgagtcgaa

SEQ ID NO: 1441 - DNA, 25 bp, Homo sapien
tccgacgacccctaacggaggacga

SEQ ID NO: 1442 - DNA, 25 bp, Homo sapien
tccgacgaccccaaacggaggacga

SEQ ID NO: 1443 - DNA, 25 bp, Homo sapien
tccgacgacccctaacggaggacga

SEQ ID NO: 1444 - DNA, 25 bp, Homo sapien
tccgacgaccccaaacggaggacga

SEQ ID NO: 1445 - DNA, 25 bp, Homo sapien
acactcgagccgaaattggttacta

SEQ ID NO: 1446 - DNA, 25 bp, Homo sapien
acactcgagccgtaattggttacta

SEQ ID NO: 1447 - DNA, 25 bp, Homo sapien
cagtcatgacttattacagtgtaat

SEQ ID NO: 1448 - DNA, 25 bp, Homo sapien
cagtcatgactttttacagtgtaat

SEQ ID NO: 1449 - DNA, 25 bp, Homo sapien
cctcgtttagatcatggtctgttcc

SEQ ID NO: 1450 - DNA, 25 bp, Homo sapien
cctcgtttagatgatggtctgttcc

SEQ ID NO: 1451 - DNA, 25 bp, Homo sapien
cggtatcggttctccgtccttccgt

SEQ ID NO: 1452 - DNA, 25 bp, Homo sapien
cggtatcggttcaccgtccttccgt

SEQ ID NO: 1453 - DNA, 25 bp, Homo sapien
aggtcggttctacatctctaacgac

SEQ ID NO: 1454 - DNA, 25 bp, Homo sapien
aggtcggttctagatctctaacgac

SEQ ID NO: 1455 - DNA, 25 bp, Homo sapien
ctaccggtgtgagtaaatgtattcc

SEQ ID NO: 1456 - DNA, 25 bp, Homo sapien
ctaccggtgtgactaaatgtattcc

SEQ ID NO: 1457 - DNA, 25 bp, Homo sapien
ttctcagggaccaaagacactgttc

SEQ ID NO: 1458 - DNA, 25 bp, Homo sapien
ttctcagggacctaagacactgttc

SEQ ID NO: 1459 - DNA, 25 bp, Homo sapien
ttagggtttccgtctgatctcttct

SEQ ID NO: 1460 - DNA, 25 bp, Homo sapien
ttagggtttccgactgatctcttct

SEQ ID NO: 1461 - DNA, 25 bp, Homo sapien
cctttcttcgcaagtatcacgtgtc

SEQ ID NO: 1462 - DNA, 25 bp, Homo sapien
cctttcttcgcatgtatcacgtgtc

SEQ ID NO: 1463 - DNA, 25 bp, Homo sapien
tcactttaagtcaatgtgtctcttg

SEQ ID NO: 1464 - DNA, 25 bp, Homo sapien
tcactttaagtctatgtgtctcttg

SEQ ID NO: 1465 - DNA, 25 bp, Homo sapien
cttctgtaatcttagtgtaactttg

SEQ ID NO: 1466 - DNA, 25 bp, Homo sapien
cttctgtaatctaagtgtaactttg

SEQ ID NO: 1467 - DNA, 25 bp, Homo sapien
tcacgtcggttgaaggtaactgttt

SEQ ID NO: 1468 - DNA, 25 bp, Homo sapien
tcacgtcggttgtaggtaactgttt

SEQ ID NO: 1469 - DNA, 25 bp, Homo sapien
tcctcgtcgtcgagaagaacgtcct

SEQ ID NO: 1470 - DNA, 25 bp, Homo sapien
tcctcgtcgtcgtgaagaacgtcct

SEQ ID NO: 1471 - DNA, 25 bp, Homo sapien
atgactcactcctgtagaaaagacc

SEQ ID NO: 1472 - DNA, 25 bp, Homo sapien
atgactcactccagtagaaaagacc

SEQ ID NO: 1473 - DNA, 25 bp, Homo sapien
ggtcttactacgaacgaaccacaac

SEQ ID NO: 1474 - DNA, 25 bp, Homo sapien
ggtcttactacgtacgaaccacaac

SEQ ID NO: 1475 - DNA, 25 bp, Homo sapien
ggctacccacgggaagtactccgac

SEQ ID NO: 1476 - DNA, 25 bp, Homo sapien
ggctacccacggcaagtactccgac

SEQ ID NO: 1477 - DNA, 25 bp, Homo sapien
gtgtccccgtcgtcggtgtttccgt

SEQ ID NO: 1478 - DNA, 25 bp, Homo sapien
gtgtccccgtcgacggtgtttccgt

SEQ ID NO: 1479 - DNA, 25 bp, Homo sapien
gtctccggttcgagggtcgatctcg

SEQ ID NO: 1480 - DNA, 25 bp, Homo sapien
gtctccggttcgtgggtcgatctcg

SEQ ID NO: 1481 - DNA, 25 bp, Homo sapien
ctcctctgtttctcggagtacttcc

SEQ ID NO: 1482 - DNA, 25 bp, Homo sapien
ctcctctgtttcacggagtacttcc

SEQ ID NO: 1483 - DNA, 25 bp, Homo sapien
cctttggtactctcggttctacttc

SEQ ID NO: 1484 - DNA, 25 bp, Homo sapien
cctttggtactcacggttctacttc

SEQ ID NO: 1485 - DNA, 25 bp, Homo sapien
ctgaggtcgtagaccgatctaagtc

SEQ ID NO: 1486 - DNA, 25 bp, Homo sapien
ctgaggtcgtagtccgatctaagtc

SEQ ID NO: 1487 - DNA, 25 bp, Homo sapien
ggtgtactgttagtctctatagtct

SEQ ID NO: 1488 - DNA, 25 bp, Homo sapien
ggtgtactgttactctctatagtct

SEQ ID NO: 1489 - DNA, 25 bp, Homo sapien
acctctgagatggtacacaagtgtc

SEQ ID NO: 1490 - DNA, 25 bp, Homo sapien
acctctgagatgctacacaagtgtc

SEQ ID NO: 1491 - DNA, 25 bp, Homo sapien
ggtgttactgtcaccgtcgtcgtct

SEQ ID NO: 1492 - DNA, 25 bp, Homo sapien
ggtgttactgtctccgtcgtcgtct

SEQ ID NO: 1493 - DNA, 25 bp, Homo sapien
attgatcaacttcacaggagtctcg

SEQ ID NO: 1494 - DNA, 25 bp, Homo sapien
attgatcaacttgacaggagtctcg

SEQ ID NO: 1495 - DNA, 25 bp, Homo sapien
gtgtccccgtgacgagtgaggtctc

SEQ ID NO: 1496 - DNA, 25 bp, Homo sapien
gtgtccccgtgaggagtgaggtctc

SEQ ID NO: 1497 - DNA, 25 bp, Homo sapien
cgtctgtcgtcaggagacagggtcc

SEQ ID NO: 1498 - DNA, 25 bp, Homo sapien
cgtctgtcgtcacgagacagggtcc

SEQ ID NO: 1499 - DNA, 25 bp, Homo sapien
gtatattctaccttaccaggtcgtc

SEQ ID NO: 1500 - DNA, 25 bp, Homo sapien
gtatattctaccataccaggtcgtc

SEQ ID NO: 1501 - DNA, 25 bp, Homo sapien
caagttgtcctcgaccatcgtctag

SEQ ID NO: 1502 - DNA, 25 bp, Homo sapien
caagttgtcctccaccatcgtctag

SEQ ID NO: 1503 - DNA, 25 bp, Homo sapien
agataagtcttcagaccaggtgtac

SEQ ID NO: 1504 - DNA, 25 bp, Homo sapien
agataagtcttctgaccaggtgtac

SEQ ID NO: 1505 - DNA, 25 bp, Homo sapien
gaaaccgtgtgtcacccgaagtcga

SEQ ID NO: 1506 - DNA, 25 bp, Homo sapien
gaaaccgtgtgtgacccgaagtcga

SEQ ID NO: 1507 - DNA, 25 bp, Homo sapien
ccgtcccgacttccaggtaagtgtc

SEQ ID NO: 1508 - DNA, 25 bp, Homo sapien
ccgtcccgacttgcaggtaagtgtc

SEQ ID NO: 1509 - DNA, 25 bp, Homo sapien
cacgcaccccgtccaggacgatgtc

SEQ ID NO: 1510 - DNA, 25 bp, Homo sapien
cacgcaccccgtgcaggacgatgtc

SEQ ID NO: 1511 - DNA, 25 bp, Homo sapien
tcacgacagaatttccgaacctgtt

SEQ ID NO: 1512 - DNA, 25 bp, Homo sapien
tcacgacagaatatccgaacctgtt

SEQ ID NO: 1513 - DNA, 25 bp, Homo sapien
atacagatgtgtttcgaatcttcgt

SEQ ID NO: 1514 - DNA, 25 bp, Homo sapien
atacagatgtgtatcgaatcttcgt

SEQ ID NO: 1515 - DNA, 25 bp, Homo sapien
cagtctagttatgacgaattatttc

SEQ ID NO: 1516 - DNA, 25 bp, Homo sapien
cagtctagttatcacgaattatttc

SEQ ID NO: 1517 - DNA, 25 bp, Homo sapien
aagtacggtcacagtaacagttgtc

SEQ ID NO: 1518 - DNA, 25 bp, Homo sapien
aagtacggtcactgtaacagttgtc

SEQ ID NO: 1519 - DNA, 25 bp, Homo sapien
acatacgatccgtcgaaccgtttct

SEQ ID NO: 1520 - DNA, 25 bp, Homo sapien
acatacgatccgacgaaccgtttct

SEQ ID NO: 1521 - DNA, 25 bp, Homo sapien
acactctgtggtagatctctcttgt

SEQ ID NO: 1522 - DNA, 25 bp, Homo sapien
acactctgtggttgatctctcttgt

SEQ ID NO: 1523 - DNA, 25 bp, Homo sapien
aacgtctatctttggtagtttctgt

SEQ ID NO: 1524 - DNA, 25 bp, Homo sapien
aacgtctatcttaggtagtttctgt

SEQ ID NO: 1525 - DNA, 25 bp, Homo sapien
ttgtacgtacgtgacggaaccactg

SEQ ID NO: 1526 - DNA, 25 bp, Homo sapien
ttgtacgtacgtcacggaaccactg

SEQ ID NO: 1527 - DNA, 25 bp, Homo sapien
caaatgagtagttcacgaaaactgt

SEQ ID NO: 1528 - DNA, 25 bp, Homo sapien
caaatgagtagtacacgaaaactgt

SEQ ID NO: 1529 - DNA, 25 bp, Homo sapien
gagatctgactgatacaacatattc

SEQ ID NO: 1530 - DNA, 25 bp, Homo sapien
gagatctgactgttacaacatattc

SEQ ID NO: 1531 - DNA, 25 bp, Homo sapien
ttacaattggggagttacgtgtcct

SEQ ID NO: 1532 - DNA, 25 bp, Homo sapien
ttacaattggggtgttacgtgtcct

SEQ ID NO: 1533 - DNA, 25 bp, Homo sapien
aaattactttcgagagtttattcgc

SEQ ID NO: 1534 - DNA, 25 bp, Homo sapien
aaattactttcgtgagtttattcgc

SEQ ID NO: 1535 - DNA, 25 bp, Homo sapien
ggagttccttttggttatattacct

SEQ ID NO: 1536 - DNA, 25 bp, Homo sapien
ggagttccttttcgttatattacct

SEQ ID NO: 1537 - DNA, 25 bp, Homo sapien
cactcgggtctcttaggttcgtcgt

SEQ ID NO: 1538 - DNA, 25 bp, Homo sapien
cactcgggtctcataggttcgtcgt

SEQ ID NO: 1539 - DNA, 25 bp, Homo sapien
agtgagtcgaccttccgaattcggt

SEQ ID NO: 1540 - DNA, 25 bp, Homo sapien
agtgagtcgaccatccgaattcggt

SEQ ID NO: 1541 - DNA, 25 bp, Homo sapien
ggtcgatcgactgacatcggtagag

SEQ ID NO: 1542 - DNA, 25 bp, Homo sapien
ggtcgatcgactcacatcggtagag

SEQ ID NO: 1543 - DNA, 25 bp, Homo sapien
gaggggactccttacgagtctgttc

SEQ ID NO: 1544 - DNA, 25 bp, Homo sapien
gaggggactcctaacgagtctgttc

SEQ ID NO: 1545 - DNA, 25 bp, Homo sapien
ggacccgactctaccgactttgtag

SEQ ID NO: 1546 - DNA, 25 bp, Homo sapien
ggacccgactcttccgactttgtag

SEQ ID NO: 1547 - DNA, 25 bp, Homo sapien
cctgggaccgaccatcaagggtatg

SEQ ID NO: 1548 - DNA, 25 bp, Homo sapien
cctgggaccgacgatcaagggtatg

SEQ ID NO: 1549 - DNA, 25 bp, Homo sapien
aaatagaatctgagagaggactccg

SEQ ID NO: 1550 - DNA, 25 bp, Homo sapien
aaatagaatctgtgagaggactccg

SEQ ID NO: 1551 - DNA, 25 bp, Homo sapien
aaaacgaaacacctgtggaaactct

SEQ ID NO: 1552 - DNA, 25 bp, Homo sapien
aaaacgaaacacgtgtggaaactct

SEQ ID NO: 1553 - DNA, 25 bp, Homo sapien
aaggaaaccctaactcaacgacgtt

SEQ ID NO: 1554 - DNA, 25 bp, Homo sapien
aaggaaaccctatctcaacgacgtt

SEQ ID NO: 1555 - DNA, 25 bp, Homo sapien
aggagtgctgacagccagacacgtt

SEQ ID NO: 1556 - DNA, 25 bp, Homo sapien
aggagtgctgactgccagacacgtt

SEQ ID NO: 1557 - DNA, 25 bp, Homo sapien
ggtgtagaggatgacaacaaagcct

SEQ ID NO: 1558 - DNA, 25 bp, Homo sapien
ggtgtagaggatcacaacaaagcct

SEQ ID NO: 1559 - DNA, 25 bp, Homo sapien
agtaggatcgacaacaagagtatac

SEQ ID NO: 1560 - DNA, 25 bp, Homo sapien
agtaggatcgactacaagagtatac

SEQ ID NO: 1561 - DNA, 25 bp, Homo sapien
tgacttagtagtcatttgggtcgac

SEQ ID NO: 1562 - DNA, 25 bp, Homo sapien
tgacttagtagtgatttgggtcgac

SEQ ID NO: 1563 - DNA, 25 bp, Homo sapien
aataagtcctactgttcggtagtcc

SEQ ID NO: 1564 - DNA, 25 bp, Homo sapien
aataagtcctacagttcggtagtcc

SEQ ID NO: 1565 - DNA, 25 bp, Homo sapien
tctgaaccctatctgaggacgtctt

SEQ ID NO: 1566 - DNA, 25 bp, Homo sapien
tctgaaccctatgtgaggacgtctt

SEQ ID NO: 1567 - DNA, 25 bp, Homo sapien
gttgttgttgttcgtagtggagttt

SEQ ID NO: 1568 - DNA, 25 bp, Homo sapien
gttgttgttgttggtagtggagttt

SEQ ID NO: 1569 - DNA, 25 bp, Homo sapien
ggtttgtactcaactcacgagtctt

SEQ ID NO: 1570 - DNA, 25 bp, Homo sapien
ggtttgtactcatctcacgagtctt

SEQ ID NO: 1571 - DNA, 25 bp, Homo sapien
agtacattgctcctcatcgtgactt

SEQ ID NO: 1572 - DNA, 25 bp, Homo sapien
agtacattgctcgtcatcgtgactt

SEQ ID NO: 1573 - DNA, 25 bp, Homo sapien
ccgtttccttatcacgtctgtccgt

SEQ ID NO: 1574 - DNA, 25 bp, Homo sapien
ccgtttccttatgacgtctgtccgt

SEQ ID NO: 1575 - DNA, 25 bp, Homo sapien
cgtctgtgtcgtaaggtgcagttgt

SEQ ID NO: 1576 - DNA, 25 bp, Homo sapien
cgtctgtgtcgttaggtgcagttgt

SEQ ID NO: 1577 - DNA, 25 bp, Homo sapien
cgtatgtatccgaagtctccgttag

SEQ ID NO: 1578 - DNA, 25 bp, Homo sapien
cgtatgtatccgtagtctccgttag

SEQ ID NO: 1579 - DNA, 25 bp, Homo sapien
cacaggagtcacatgtttcgacgat

SEQ ID NO: 1580 - DNA, 25 bp, Homo sapien
cacaggagtcacttgtttcgacgat

SEQ ID NO: 1581 - DNA, 25 bp, Homo sapien
cgtaggtgaaactttcagtcgacga

SEQ ID NO: 1582 - DNA, 25 bp, Homo sapien
cgtaggtgaaacattcagtcgacga

SEQ ID NO: 1583 - DNA, 25 bp, Homo sapien
tttagtttgtacaactacatgaccg

SEQ ID NO: 1584 - DNA, 25 bp, Homo sapien
tttagtttgtactactacatgaccg

SEQ ID NO: 1585 - DNA, 25 bp, Homo sapien
aacgttttgtcatgactatgacagt

SEQ ID NO: 1586 - DNA, 25 bp, Homo sapien
aacgttttgtcaagactatgacagt

SEQ ID NO: 1587 - DNA, 25 bp, Homo sapien
tgaacaaccctcttgactatgactg

SEQ ID NO: 1588 - DNA, 25 bp, Homo sapien
tgaacaaccctcatgactatgactg

SEQ ID NO: 1589 - DNA, 25 bp, Homo sapien
cacccctgtctcaggacaagactgt

SEQ ID NO: 1590 - DNA, 25 bp, Homo sapien
cacccctgtctctggacaagactgt

SEQ ID NO: 1591 - DNA, 25 bp, Homo sapien
gggtctgccgtttggagaagtacct

SEQ ID NO: 1592 - DNA, 25 bp, Homo sapien
gggtctgccgttaggagaagtacct

SEQ ID NO: 1593 - DNA, 25 bp, Homo sapien
gtagtcccccgagtgtaccgagcct

SEQ ID NO: 1594 - DNA, 25 bp, Homo sapien
gtagtcccccgactgtaccgagcct

SEQ ID NO: 1595 - DNA, 25 bp, Homo sapien
ttaccggtcctggtgtccaccgtct

SEQ ID NO: 1596 - DNA, 25 bp, Homo sapien
ttaccggtcctgctgtccaccgtct

SEQ ID NO: 1597 - DNA, 25 bp, Homo sapien
gcttttgggtcctgtggtcccgtcc

SEQ ID NO: 1598 - DNA, 25 bp, Homo sapien
gcttttgggtccagtggtcccgtcc

SEQ ID NO: 1599 - DNA, 25 bp, Homo sapien
ggttctgcatcgagtgagaccctcc

SEQ ID NO: 1600 - DNA, 25 bp, Homo sapien
ggttctgcatcgtgtgagaccctcc

SEQ ID NO: 1601 - DNA, 25 bp, Homo sapien
gtagtggtgacgtatgtggccctcc

SEQ ID NO: 1602 - DNA, 25 bp, Homo sapien
gtagtggtgacgaatgtggccctcc

SEQ ID NO: 1603 - DNA, 25 bp, Homo sapien
agtggagacctatggcggacgtccc

SEQ ID NO: 1604 - DNA, 25 bp, Homo sapien
agtggagacctaaggcggacgtccc

SEQ ID NO: 1605 - DNA, 25 bp, Homo sapien
gggggtaaccactgggtacaagacc

SEQ ID NO: 1606 - DNA, 25 bp, Homo sapien
gggggtaaccacagggtacaagacc

SEQ ID NO: 1607 - DNA, 25 bp, Homo sapien
cactcgaccgactgggaagagtcct

SEQ ID NO: 1608 - DNA, 25 bp, Homo sapien
cactcgaccgacagggaagagtcct

SEQ ID NO: 1609 - DNA, 25 bp, Homo sapien
gtccctgtactcacttaggagattc

SEQ ID NO: 1610 - DNA, 25 bp, Homo sapien
gtccctgtactctcttaggagattc

SEQ ID NO: 1611 - DNA, 25 bp, Homo sapien
gaccacttctcattcaggtagttga

SEQ ID NO: 1612 - DNA, 25 bp, Homo sapien
gaccacttctcaatcaggtagttga

SEQ ID NO: 1613 - DNA, 25 bp, Homo sapien
actctctttggttgcgtggtcgagt

SEQ ID NO: 1614 - DNA, 25 bp, Homo sapien
actctctttggtagcgtggtcgagt

SEQ ID NO: 1615 - DNA, 25 bp, Homo sapien
tctcctcgtgtgtgtgtgcgagcga

SEQ ID NO: 1616 - DNA, 25 bp, Homo sapien
tctcctcgtgtgagtgtgcgagcga

SEQ ID NO: 1617 - DNA, 25 bp, Homo sapien
gaggactcgatgtcttccttactag

SEQ ID NO: 1618 - DNA, 25 bp, Homo sapien
gaggactcgatgacttccttactag

SEQ ID NO: 1619 - DNA, 25 bp, Homo sapien
ggttccgctcgttacctcctaggtc

SEQ ID NO: 1620 - DNA, 25 bp, Homo sapien
ggttccgctcgtaacctcctaggtc

SEQ ID NO: 1621 - DNA, 25 bp, Homo sapien
tagacctctcgtgtccttcctgtgc

SEQ ID NO: 1622 - DNA, 25 bp, Homo sapien
tagacctctcgtctccttcctgtgc

SEQ ID NO: 1623 - DNA, 25 bp, Homo sapien
aagtcccagcctctgtccgagtacc

SEQ ID NO: 1624 - DNA, 25 bp, Homo sapien
aagtcccagcctgtgtccgagtacc

SEQ ID NO: 1625 - DNA, 25 bp, Homo sapien
tgagacttccacagatgtctcaacc

SEQ ID NO: 1626 - DNA, 25 bp, Homo sapien
tgagacttccactgatgtctcaacc

SEQ ID NO: 1627 - DNA, 25 bp, Homo sapien
tggacgtctgccaatttctcttacc

SEQ ID NO: 1628 - DNA, 25 bp, Homo sapien
tggacgtctgcctatttctcttacc

SEQ ID NO: 1629 - DNA, 25 bp, Homo sapien
gtgtaattcttcgtgtcacctactc

SEQ ID NO: 1630 - DNA, 25 bp, Homo sapien
gtgtaattcttcctgtcacctactc

SEQ ID NO: 1631 - DNA, 25 bp, Homo sapien
gtgtaatgtcgttatttctaccatt

SEQ ID NO: 1632 - DNA, 25 bp, Homo sapien
gtgtaatgtcgtaatttctaccatt

SEQ ID NO: 1633 - DNA, 25 bp, Homo sapien
ggatactccgacgtttctaccctac

SEQ ID NO: 1634 - DNA, 25 bp, Homo sapien
ggatactccgacctttctaccctac

SEQ ID NO: 1635 - DNA, 25 bp, Homo sapien
gtagtacccgtcgtctttccgcgac

SEQ ID NO: 1636 - DNA, 25 bp, Homo sapien
gtagtacccgtcctctttccgcgac

SEQ ID NO: 1637 - DNA, 25 bp, Homo sapien
ccaaaaaagtagtttgctctggacg

SEQ ID NO: 1638 - DNA, 25 bp, Homo sapien
ccaaaaaagtagattgctctggacg

SEQ ID NO: 1639 - DNA, 25 bp, Homo sapien
aagactggtgctggtcgtctgtgac

SEQ ID NO: 1640 - DNA, 25 bp, Homo sapien
aagactggtgctcgtcgtctgtgac

SEQ ID NO: 1641 - DNA, 25 bp, Homo sapien
cacaaatgtacgtccgcatcgtggt

SEQ ID NO: 1642 - DNA, 25 bp, Homo sapien
cacaaatgtacgaccgcatcgtggt

SEQ ID NO: 1643 - DNA, 25 bp, Homo sapien
gctcaactcgagactcggtgacctg

SEQ ID NO: 1644 - DNA, 25 bp, Homo sapien
gctcaactcgagtctcggtgacctg

SEQ ID NO: 1645 - DNA, 25 bp, Homo sapien
aaaaatttccggttgagtaaccgta

SEQ ID NO: 1646 - DNA, 25 bp, Homo sapien
aaaaatttccggatgagtaaccgta

SEQ ID NO: 1647 - DNA, 25 bp, Homo sapien
gaaggggttctcgttccaaccgagt

SEQ ID NO: 1648 - DNA, 25 bp, Homo sapien
gaaggggttctccttccaaccgagt

SEQ ID NO: 1649 - DNA, 25 bp, Homo sapien
ggagggttctttctaccaccgtagt

SEQ ID NO: 1650 - DNA, 25 bp, Homo sapien
ggagggttctttgtaccaccgtagt

SEQ ID NO: 1651 - DNA, 25 bp, Homo sapien
ggacgggtacttctggacacctcga

SEQ ID NO: 1652 - DNA, 25 bp, Homo sapien
ggacgggtacttgtggacacctcga

SEQ ID NO: 1653 - DNA, 25 bp, Homo sapien
aagaggaactcctacagcatccagt

SEQ ID NO: 1654 - DNA, 25 bp, Homo sapien
aagaggaactccaacagcatccagt

SEQ ID NO: 1655 - DNA, 25 bp, Homo sapien
tgggacattcttaagtcctgcgagt

SEQ ID NO: 1656 - DNA, 25 bp, Homo sapien
tgggacattctttagtcctgcgagt

SEQ ID NO: 1657 - DNA, 25 bp, Homo sapien
aggtaaatgttcagtactcgggtct

SEQ ID NO: 1658 - DNA, 25 bp, Homo sapien
aggtaaatgttctgtactcgggtct

SEQ ID NO: 1659 - DNA, 25 bp, Homo sapien
gacacatccttactgactcgagatt

SEQ ID NO: 1660 - DNA, 25 bp, Homo sapien
gacacatccttagtgactcgagatt

SEQ ID NO: 1661 - DNA, 25 bp, Homo sapien
gggacaccacctgttgactcaacta

SEQ ID NO: 1662 - DNA, 25 bp, Homo sapien
gggacaccacctcttgactcaacta

SEQ ID NO: 1663 - DNA, 25 bp, Homo sapien
gacactgtctctagatcctaaagta

SEQ ID NO: 1664 - DNA, 25 bp, Homo sapien
gacactgtctcttgatcctaaagta

SEQ ID NO: 1665 - DNA, 25 bp, Homo sapien
gaggatctcgtcgaagaccattgtc

SEQ ID NO: 1666 - DNA, 25 bp, Homo sapien
gaggatctcgtccaagaccattgtc

SEQ ID NO: 1667 - DNA, 25 bp, Homo sapien
acgatagttgtactcagaaatttac

SEQ ID NO: 1668 - DNA, 25 bp, Homo sapien
acgatagttgtagtcagaaatttac

SEQ ID NO: 1669 - DNA, 25 bp, Homo sapien
catcttgttctagtgagtactattt

SEQ ID NO: 1670 - DNA, 25 bp, Homo sapien
catcttgttctactgagtactattt

SEQ ID NO: 1671 - DNA, 25 bp, Homo sapien
taattgtgtcacgtgttcgcgttgt

SEQ ID NO: 1672 - DNA, 25 bp, Homo sapien
taattgtgtcacctgttcgcgttgt

SEQ ID NO: 1673 - DNA, 25 bp, Homo sapien
taccgacgacactgagacgtctgtt

SEQ ID NO: 1674 - DNA, 25 bp, Homo sapien
taccgacgacacagagacgtctgtt

SEQ ID NO: 1675 - DNA, 25 bp, Homo sapien
actacacggaccagctagtacgtga

SEQ ID NO: 1676 - DNA, 25 bp, Homo sapien
actacacggacctgctagtacgtga

SEQ ID NO: 1677 - DNA, 25 bp, Homo sapien
tcgtgacacttctgtgtctgatccg

SEQ ID NO: 1678 - DNA, 25 bp, Homo sapien
tcgtgacacttcagtgtctgatccg

SEQ ID NO: 1679 - DNA, 25 bp, Homo sapien
tgtgtcttctttcaagttctagtcc

SEQ ID NO: 1680 - DNA, 25 bp, Homo sapien
tgtgtcttctttgaagttctagtcc

SEQ ID NO: 1681 - DNA, 25 bp, Homo sapien
cattattttctcgaggttacaaacg

SEQ ID NO: 1682 - DNA, 25 bp, Homo sapien
cattattttctccaggttacaaacg

SEQ ID NO: 1683 - DNA, 25 bp, Homo sapien
atgtgttgcaacttctacttctacg

SEQ ID NO: 1684 - DNA, 25 bp, Homo sapien
atgtgttgcaacatctacttctacg

SEQ ID NO: 1685 - DNA, 25 bp, Homo sapien
gatgtaggtgactaggaccgacttc

SEQ ID NO: 1686 - DNA, 25 bp, Homo sapien
gatgtaggtgacaaggaccgacttc

SEQ ID NO: 1687 - DNA, 25 bp, Homo sapien
ggtagacgttcgaggtagatgttcc

SEQ ID NO: 1688 - DNA, 25 bp, Homo sapien
ggtagacgttcgtggtagatgttcc

SEQ ID NO: 1689 - DNA, 25 bp, Homo sapien
gtgtctcatgtaagtaaccgtattc

SEQ ID NO: 1690 - DNA, 25 bp, Homo sapien
gtgtctcatgtatgtaaccgtattc

SEQ ID NO: 1691 - DNA, 25 bp, Homo sapien
cgcgtgccgtgtgaggaacagtctc

SEQ ID NO: 1692 - DNA, 25 bp, Homo sapien
cgcgtgccgtgtcaggaacagtctc

SEQ ID NO: 1693 - DNA, 25 bp, Homo sapien
cgaggacgtccagagacaggtgact

SEQ ID NO: 1694 - DNA, 25 bp, Homo sapien
cgaggacgtccacagacaggtgact

SEQ ID NO: 1695 - DNA, 25 bp, Homo sapien
tgtaggacccgacgtagaagatcgc

SEQ ID NO: 1696 - DNA, 25 bp, Homo sapien
tgtaggacccgaggtagaagatcgc

SEQ ID NO: 1697 - DNA, 25 bp, Homo sapien
atgaaagacgaaatgaagtcgtcct

SEQ ID NO: 1698 - DNA, 25 bp, Homo sapien
atgaaagacgaattgaagtcgtcct

SEQ ID NO: 1699 - DNA, 25 bp, Homo sapien
agactagaacgattgacaggctagt

SEQ ID NO: 1700 - DNA, 25 bp, Homo sapien
agactagaacgaatgacaggctagt

SEQ ID NO: 1701 - DNA, 25 bp, Homo sapien
actcgtgtgccactagatttacgtc

SEQ ID NO: 1702 - DNA, 25 bp, Homo sapien
actcgtgtgccagtagatttacgtc

SEQ ID NO: 1703 - DNA, 25 bp, Homo sapien
ctcgtgtgtcaaagttcataagtcg

SEQ ID NO: 1704 - DNA, 25 bp, Homo sapien
ctcgtgtgtcaatgttcataagtcg

SEQ ID NO: 1705 - DNA, 25 bp, Homo sapien
tctacgatggcgaaagacacgccga

SEQ ID NO: 1706 - DNA, 25 bp, Homo sapien
tctacgatggcgtaagacacgccga

SEQ ID NO: 1707 - DNA, 25 bp, Homo sapien
ggacggtgtccatgtactataattg

SEQ ID NO: 1708 - DNA, 25 bp, Homo sapien
ggacggtgtccaagtactataattg

SEQ ID NO: 1709 - DNA, 25 bp, Homo sapien
ccggggtgtcctaaagtaaacgatc

SEQ ID NO: 1710 - DNA, 25 bp, Homo sapien
ccggggtgtccttaagtaaacgatc

SEQ ID NO: 1711 - DNA, 25 bp, Homo sapien
gaaagaaggtctgttttaaactctc

SEQ ID NO: 1712 - DNA, 25 bp, Homo sapien
gaaagaaggtctcttttaaactctc

SEQ ID NO: 1713 - DNA, 25 bp, Homo sapien
aaaaatgtacttttgttgactgtcc

SEQ ID NO: 1714 - DNA, 25 bp, Homo sapien
aaaaatgtacttatgttgactgtcc

SEQ ID NO: 1715 - DNA, 25 bp, Homo sapien
gacggactggtggacggtcccttcc

SEQ ID NO: 1716 - DNA, 25 bp, Homo sapien
gacggactggtgcacggtcccttcc

SEQ ID NO: 1717 - DNA, 25 bp, Homo sapien
cggactggaactgtcgacccgtcga

SEQ ID NO: 1718 - DNA, 25 bp, Homo sapien
cggactggaactctcgacccgtcga

SEQ ID NO: 1719 - DNA, 25 bp, Homo sapien
tgaacagacgattagcggccctctc

SEQ ID NO: 1720 - DNA, 25 bp, Homo sapien
tgaacagacgataagcggccctctc

SEQ ID NO: 1721 - DNA, 25 bp, Homo sapien
accgaaaggacaatcaggtaactcc

SEQ ID NO: 1722 - DNA, 25 bp, Homo sapien
accgaaaggacattcaggtaactcc

SEQ ID NO: 1723 - DNA, 25 bp, Homo sapien
ttccgaaggttgtacagtgaatctt

SEQ ID NO: 1724 - DNA, 25 bp, Homo sapien
ttccgaaggttgaacagtgaatctt

SEQ ID NO: 1725 - DNA, 25 bp, Homo sapien
gctgacattgtgacacgtgaaactt

SEQ ID NO: 1726 - DNA, 25 bp, Homo sapien
gctgacattgtgtcacgtgaaactt

SEQ ID NO: 1727 - DNA, 25 bp, Homo sapien
tacttaataatgtcacgtgatgatc

SEQ ID NO: 1728 - DNA, 25 bp, Homo sapien
tacttaataatgacacgtgatgatc

SEQ ID NO: 1729 - DNA, 25 bp, Homo sapien
agagactgggacagactcggtgagg

SEQ ID NO: 1730 - DNA, 25 bp, Homo sapien
agagactgggactgactcggtgagg

SEQ ID NO: 1731 - DNA, 25 bp, Homo sapien
acaccgtccggaaggtccgtgtatg

SEQ ID NO: 1732 - DNA, 25 bp, Homo sapien
acaccgtccggatggtccgtgtatg

SEQ ID NO: 1733 - DNA, 25 bp, Homo sapien
aaaccctaccgtttccctgtgtatg

SEQ ID NO: 1734 - DNA, 25 bp, Homo sapien
aaaccctaccgtatccctgtgtatg

SEQ ID NO: 1735 - DNA, 25 bp, Homo sapien
aacggagtcagaaatgcttcttgtg

SEQ ID NO: 1736 - DNA, 25 bp, Homo sapien
aacggagtcagatatgcttcttgtg

SEQ ID NO: 1737 - DNA, 25 bp, Homo sapien
agagagtcacccttttccgttctcg

SEQ ID NO: 1738 - DNA, 25 bp, Homo sapien
agagagtcacccatttccgttctcg

SEQ ID NO: 1739 - DNA, 25 bp, Homo sapien
tccaaacctctcgtgtttccatgtg

SEQ ID NO: 1740 - DNA, 25 bp, Homo sapien
tccaaacctctcctgtttccatgtg

SEQ ID NO: 1741 - DNA, 25 bp, Homo sapien
atacaccgtcagtggtaccacggtc

SEQ ID NO: 1742 - DNA, 25 bp, Homo sapien
atacaccgtcagaggtaccacggtc

SEQ ID NO: 1743 - DNA, 25 bp, Homo sapien
ctataggctacaaaagaactactgc

SEQ ID NO: 1744 - DNA, 25 bp, Homo sapien
ctataggctacataagaactactgc

SEQ ID NO: 1745 - DNA, 25 bp, Homo sapien
actaacccccgtaacatgacggcgt

SEQ ID NO: 1746 - DNA, 25 bp, Homo sapien
actaacccccgttacatgacggcgt

SEQ ID NO: 1747 - DNA, 25 bp, Homo sapien
cctagacccctcttcagtagtaggg

SEQ ID NO: 1748 - DNA, 25 bp, Homo sapien
cctagacccctcatcagtagtaggg

SEQ ID NO: 1749 - DNA, 25 bp, Homo sapien
ccgacgaccctgatagacccttaag

SEQ ID NO: 1750 - DNA, 25 bp, Homo sapien
ccgacgaccctgttagacccttaag

SEQ ID NO: 1751 - DNA, 25 bp, Homo sapien
gaacccacgtccaagaacaggtcac

SEQ ID NO: 1752 - DNA, 25 bp, Homo sapien
gaacccacgtcctagaacaggtcac

SEQ ID NO: 1753 - DNA, 25 bp, Homo sapien
gtcgcccttccgataagaactgtca

SEQ ID NO: 1754 - DNA, 25 bp, Homo sapien
gtcgcccttccgttaagaactgtca

SEQ ID NO: 1755 - DNA, 25 bp, Homo sapien
tgacctactcctggaaacatgacga

SEQ ID NO: 1756 - DNA, 25 bp, Homo sapien
tgacctactcctcgaaacatgacga

SEQ ID NO: 1757 - DNA, 25 bp, Homo sapien
ggtttgtcggtggaggagtgacacg

SEQ ID NO: 1758 - DNA, 25 bp, Homo sapien
ggtttgtcggtgcaggagtgacacg

SEQ ID NO: 1759 - DNA, 25 bp, Homo sapien
gagtttgtcggatacgacgaggaca

SEQ ID NO: 1760 - DNA, 25 bp, Homo sapien
gagtttgtcggaaacgacgaggaca

SEQ ID NO: 1761 - DNA, 25 bp, Homo sapien
caagcatggaacacacacgtgactt

SEQ ID NO: 1762 - DNA, 25 bp, Homo sapien
caagcatggaactcacacgtgactt

SEQ ID NO: 1763 - DNA, 25 bp, Homo sapien
tggaaggagtcatcgaacagactct

SEQ ID NO: 1764 - DNA, 25 bp, Homo sapien
tggaaggagtcaacgaacagactct

SEQ ID NO: 1765 - DNA, 25 bp, Homo sapien
agacgtctagtgagagtcaacattc

SEQ ID NO: 1766 - DNA, 25 bp, Homo sapien
agacgtctagtgtgagtcaacattc

SEQ ID NO: 1767 - DNA, 25 bp, Homo sapien
actacctaggattcgtccagacttt

SEQ ID NO: 1768 - DNA, 25 bp, Homo sapien
actacctaggatacgtccagacttt

SEQ ID NO: 1769 - DNA, 25 bp, Homo sapien
gagactctttatgtccatctatacg

SEQ ID NO: 1770 - DNA, 25 bp, Homo sapien
gagactctttatctccatctatacg

SEQ ID NO: 1771 - DNA, 25 bp, Homo sapien
gcgactcatctttagtgaccctcta

SEQ ID NO: 1772 - DNA, 25 bp, Homo sapien
gcgactcatcttaagtgaccctcta

SEQ ID NO: 1773 - DNA, 25 bp, Homo sapien
tcgtctggttgtagtaaccgtaccc

SEQ ID NO: 1774 - DNA, 25 bp, Homo sapien
tcgtctggttgttgtaaccgtaccc

SEQ ID NO: 1775 - DNA, 25 bp, Homo sapien
ctaggtcgtaggaccttaccctcca

SEQ ID NO: 1776 - DNA, 25 bp, Homo sapien
ctaggtcgtaggtccttaccctcca

SEQ ID NO: 1777 - DNA, 25 bp, Homo sapien
tgtgttggtctcccgcgtccggcgc

SEQ ID NO: 1778 - DNA, 25 bp, Homo sapien
tgtgttggtctcgcgcgtccggcgc

SEQ ID NO: 1779 - DNA, 25 bp, Homo sapien
cccaggttttcagacgtgtcttccc

SEQ ID NO: 1780 - DNA, 25 bp, Homo sapien
cccaggttttcacacgtgtcttccc

SEQ ID NO: 1781 - DNA, 25 bp, Homo sapien
caccaggttttcgttcctttccggt

SEQ ID NO: 1782 - DNA, 25 bp, Homo sapien
caccaggttttccttcctttccggt

SEQ ID NO: 1783 - DNA, 25 bp, Homo sapien
ccggagtttcgtcttcagatatggt

SEQ ID NO: 1784 - DNA, 25 bp, Homo sapien
ccggagtttcgtgttcagatatggt

SEQ ID NO: 1785 - DNA, 25 bp, Homo sapien
cggagaatctcctcgagctacagtc

SEQ ID NO: 1786 - DNA, 25 bp, Homo sapien
cggagaatctccacgagctacagtc

SEQ ID NO: 1787 - DNA, 25 bp, Homo sapien
acaacatgttcgtcctgtcatatcg

SEQ ID NO: 1788 - DNA, 25 bp, Homo sapien
acaacatgttcgacctgtcatatcg

SEQ ID NO: 1789 - DNA, 25 bp, Homo sapien
actcaaggttcgaagtccacaggtc

SEQ ID NO: 1790 - DNA, 25 bp, Homo sapien
actcaaggttcgtagtccacaggtc

SEQ ID NO: 1791 - DNA, 25 bp, Homo sapien
cgaactatacgtgtggacgggcgtc

SEQ ID NO: 1792 - DNA, 25 bp, Homo sapien
cgaactatacgtctggacgggcgtc

SEQ ID NO: 1793 - DNA, 25 bp, Homo sapien
gagggaatttctgtgtaccggtgtc

SEQ ID NO: 1794 - DNA, 25 bp, Homo sapien
gagggaatttctctgtaccggtgtc

SEQ ID NO: 1795 - DNA, 25 bp, Homo sapien
agtgaatttccgagacgcacgttct

SEQ ID NO: 1796 - DNA, 25 bp, Homo sapien
agtgaatttccgtgacgcacgttct

SEQ ID NO: 1797 - DNA, 25 bp, Homo sapien
ctaggagtttgactcaggcacgttt

SEQ ID NO: 1798 - DNA, 25 bp, Homo sapien
ctaggagtttgagtcaggcacgttt

SEQ ID NO: 1799 - DNA, 25 bp, Homo sapien
aagtctaatcattacggacgctgta

SEQ ID NO: 1800 - DNA, 25 bp, Homo sapien
aagtctaatcataacggacgctgta

SEQ ID NO: 1801 - DNA, 25 bp, Homo sapien
accgacaggtcagggagacctgtac

SEQ ID NO: 1802 - DNA, 25 bp, Homo sapien
accgacaggtcacggagacctgtac

SEQ ID NO: 1803 - DNA, 25 bp, Homo sapien
gggacgtcaccctctggaacggacg

SEQ ID NO: 1804 - DNA, 25 bp, Homo sapien
gggacgtcacccactggaacggacg

SEQ ID NO: 1805 - DNA, 25 bp, Homo sapien
tagaggtctcctcactaaaagagtc

SEQ ID NO: 1806 - DNA, 25 bp, Homo sapien
tagaggtctcctgactaaaagagtc

SEQ ID NO: 1807 - DNA, 25 bp, Homo sapien
agacaacccgtagaactacgatgtg

SEQ ID NO: 1808 - DNA, 25 bp, Homo sapien
agacaacccgtacaactacgatgtg

SEQ ID NO: 1809 - DNA, 25 bp, Homo sapien
gatgtcaacccgtttaacagattgt

SEQ ID NO: 1810 - DNA, 25 bp, Homo sapien
gatgtcaacccgattaacagattgt

SEQ ID NO: 1811 - DNA, 25 bp, Homo sapien
catgtctgagggtccaacgacttgt

SEQ ID NO: 1812 - DNA, 25 bp, Homo sapien
catgtctgagggaccaacgacttgt

SEQ ID NO: 1813 - DNA, 25 bp, Homo sapien
aaggtcctctacacggtaatagtta

SEQ ID NO: 1814 - DNA, 25 bp, Homo sapien
aaggtcctctactcggtaatagtta

SEQ ID NO: 1815 - DNA, 25 bp, Homo sapien
acgtcgttacgttacggatactttt

SEQ ID NO: 1816 - DNA, 25 bp, Homo sapien
acgtcgttacgtaacggatactttt

SEQ ID NO: 1817 - DNA, 25 bp, Homo sapien
ctgtaatttcgtaagaacggttctt

SEQ ID NO: 1818 - DNA, 25 bp, Homo sapien
ctgtaatttcgttagaacggttctt

SEQ ID NO: 1819 - DNA, 25 bp, Homo sapien
cttgagtttacctgaggatctatgt

SEQ ID NO: 1820 - DNA, 25 bp, Homo sapien
cttgagtttaccagaggatctatgt

SEQ ID NO: 1821 - DNA, 25 bp, Homo sapien
atcacggtagtcgaaacagatttgt

SEQ ID NO: 1822 - DNA, 25 bp, Homo sapien
atcacggtagtccaaacagatttgt

SEQ ID NO: 1823 - DNA, 25 bp, Homo sapien
tacccgattcctatacacgtgtgtt

SEQ ID NO: 1824 - DNA, 25 bp, Homo sapien
tacccgattcctttacacgtgtgtt

SEQ ID NO: 1825 - DNA, 25 bp, Homo sapien
cacccctgtctccgtcgacattgtt

SEQ ID NO: 1826 - DNA, 25 bp, Homo sapien
cacccctgtctcggtcgacattgtt

SEQ ID NO: 1827 - DNA, 25 bp, Homo sapien
accctcgtagcgacgtaaatcagtt

SEQ ID NO: 1828 - DNA, 25 bp, Homo sapien
accctcgtagcgtcgtaaatcagtt

SEQ ID NO: 1829 - DNA, 25 bp, Homo sapien
atgacataacactgtacaaataatt

SEQ ID NO: 1830 - DNA, 25 bp, Homo sapien
atgacataacacagtacaaataatt

SEQ ID NO: 1831 - DNA, 25 bp, Homo sapien
ttagacgaatgtcaggaaacgtttc

SEQ ID NO: 1832 - DNA, 25 bp, Homo sapien
ttagacgaatgtgaggaaacgtttc

SEQ ID NO: 1833 - DNA, 25 bp, Homo sapien
tccaagtaatcctagataacgtttg

SEQ ID NO: 1834 - DNA, 25 bp, Homo sapien
tccaagtaatccaagataacgtttg

SEQ ID NO: 1835 - DNA, 25 bp, Homo sapien
tcgacagggcgcaaagatttccgtc

SEQ ID NO: 1836 - DNA, 25 bp, Homo sapien
tcgacagggcgctaagatttccgtc

SEQ ID NO: 1837 - DNA, 25 bp, Homo sapien
tacagccagcaatcatctgtgactc

SEQ ID NO: 1838 - DNA, 25 bp, Homo sapien
tacagccagcaaacatctgtgactc

SEQ ID NO: 1839 - DNA, 25 bp, Homo sapien
taaaccatcgcacgagtctaacacc

SEQ ID NO: 1840 - DNA, 25 bp, Homo sapien
taaaccatcgcaggagtctaacacc

SEQ ID NO: 1841 - DNA, 25 bp, Homo sapien
agacctagtgagagtgtaacgttct

SEQ ID NO: 1842 - DNA, 25 bp, Homo sapien
agacctagtgagtgtgtaacgttct

SEQ ID NO: 1843 - DNA, 25 bp, Homo sapien
cacgatctagtttcggttgtattgt

SEQ ID NO: 1844 - DNA, 25 bp, Homo sapien
cacgatctagttacggttgtattgt

SEQ ID NO: 1845 - DNA, 25 bp, Homo sapien
acacggtgtctattgtaccaggttt

SEQ ID NO: 1846 - DNA, 25 bp, Homo sapien
acacggtgtctaatgtaccaggttt

SEQ ID NO: 1847 - DNA, 25 bp, Homo sapien
taagggacccgtgagtacaggtctg

SEQ ID NO: 1848 - DNA, 25 bp, Homo sapien
taagggacccgtcagtacaggtctg

SEQ ID NO: 1849 - DNA, 25 bp, Homo sapien
aacaaggaccgtttcgcacagtccg

SEQ ID NO: 1850 - DNA, 25 bp, Homo sapien
aacaaggaccgtatcgcacagtccg

SEQ ID NO: 1851 - DNA, 25 bp, Homo sapien
tcgggttgtctcgagtttccttccg

SEQ ID NO: 1852 - DNA, 25 bp, Homo sapien
tcgggttgtctccagtttccttccg

SEQ ID NO: 1853 - DNA, 25 bp, Homo sapien
agggttccttctcttcactcacacg

SEQ ID NO: 1854 - DNA, 25 bp, Homo sapien
agggttccttctgttcactcacacg

SEQ ID NO: 1855 - DNA, 25 bp, Homo sapien
aagagtcccgacgaagttcacccta

SEQ ID NO: 1856 - DNA, 25 bp, Homo sapien
aagagtcccgaccaagttcacccta

SEQ ID NO: 1857 - DNA, 25 bp, Homo sapien
aaagtgcctgcctgtgcccgtctct

SEQ ID NO: 1858 - DNA, 25 bp, Homo sapien
aaagtgcctgccagtgcccgtctct

SEQ ID NO: 1859 - DNA, 25 bp, Homo sapien
tgtcttgtactttgtgtccgtgtcc

SEQ ID NO: 1860 - DNA, 25 bp, Homo sapien
tgtcttgtacttagtgtccgtgtcc

SEQ ID NO: 1861 - DNA, 25 bp, Homo sapien
gagaccactccaggtgttcatcgtc

SEQ ID NO: 1862 - DNA, 25 bp, Homo sapien
gagaccactccacgtgttcatcgtc

SEQ ID NO: 1863 - DNA, 25 bp, Homo sapien
aaaggagttaaaaggctccgtaccg

SEQ ID NO: 1864 - DNA, 25 bp, Homo sapien
aaaggagttaaatggctccgtaccg

SEQ ID NO: 1865 - DNA, 25 bp, Homo sapien
tgtggtatgtaatagtcttccttct

SEQ ID NO: 1866 - DNA, 25 bp, Homo sapien
tgtggtatgtaaaagtcttccttct

SEQ ID NO: 1867 - DNA, 25 bp, Homo sapien
acgtagtggtgaagacgagacccta

SEQ ID NO: 1868 - DNA, 25 bp, Homo sapien
acgtagtggtgatgacgagacccta

SEQ ID NO: 1869 - DNA, 25 bp, Homo sapien
gacgacgcgaagtttgtcgtctagg

SEQ ID NO: 1870 - DNA, 25 bp, Homo sapien
gacgacgcgaagattgtcgtctagg

SEQ ID NO: 1871 - DNA, 25 bp, Homo sapien
taacagcgttcagtgtcttaataaa

SEQ ID NO: 1872 - DNA, 25 bp, Homo sapien
taacagcgttcactgtcttaataaa

SEQ ID NO: 1873 - DNA, 25 bp, Homo sapien
gtcgagtgactattggaacaactcg

SEQ ID NO: 1874 - DNA, 25 bp, Homo sapien
gtcgagtgactaatggaacaactcg

SEQ ID NO: 1875 - DNA, 25 bp, Homo sapien
ttagtgacaggaggtagtaccgccg

SEQ ID NO: 1876 - DNA, 25 bp, Homo sapien
ttagtgacaggacgtagtaccgccg

SEQ ID NO: 1877 - DNA, 25 bp, Homo sapien
tattatctgtcagaagctctactcg

SEQ ID NO: 1878 - DNA, 25 bp, Homo sapien
tattatctgtcacaagctctactcg

SEQ ID NO: 1879 - DNA, 25 bp, Homo sapien
ctctaagggtcaagaaggtactatc

SEQ ID NO: 1880 - DNA, 25 bp, Homo sapien
ctctaagggtcatgaaggtactatc

SEQ ID NO: 1881 - DNA, 25 bp, Homo sapien
tcgttacatcgtttctgaagttttc

SEQ ID NO: 1882 - DNA, 25 bp, Homo sapien
tcgttacatcgtatctgaagttttc

SEQ ID NO: 1883 - DNA, 25 bp, Homo sapien
ggaaactcgccttacgaaaactctc

SEQ ID NO: 1884 - DNA, 25 bp, Homo sapien
ggaaactcgcctaacgaaaactctc

SEQ ID NO: 1885 - DNA, 25 bp, Homo sapien
ggcggacgcccgaagtaagtccccg

SEQ ID NO: 1886 - DNA, 25 bp, Homo sapien
ggcggacgcccgtagtaagtccccg

SEQ ID NO: 1887 - DNA, 25 bp, Homo sapien
tgagtgacccgatgagagtcacacc

SEQ ID NO: 1888 - DNA, 25 bp, Homo sapien
tgagtgacccgaagagagtcacacc

SEQ ID NO: 1889 - DNA, 25 bp, Homo sapien
gttatgacctcagacgactcttacc

SEQ ID NO: 1890 - DNA, 25 bp, Homo sapien
gttatgacctcacacgactcttacc

SEQ ID NO: 1891 - DNA, 25 bp, Homo sapien
agtttgaccctttcctcgtcgacct

SEQ ID NO: 1892 - DNA, 25 bp, Homo sapien
agtttgacccttacctcgtcgacct

SEQ ID NO: 1893 - DNA, 25 bp, Homo sapien
atgtaggggtccattccctgtgtcc

SEQ ID NO: 1894 - DNA, 25 bp, Homo sapien
atgtaggggtcctttccctgtgtcc

SEQ ID NO: 1895 - DNA, 25 bp, Homo sapien
ggggagtttcgacttccccgagtcc

SEQ ID NO: 1896 - DNA, 25 bp, Homo sapien
ggggagtttcgagttccccgagtcc

SEQ ID NO: 1897 - DNA, 25 bp, Homo sapien
gactttagtagatgccaagagtctc

SEQ ID NO: 1898 - DNA, 25 bp, Homo sapien
gactttagtagaagccaagagtctc

SEQ ID NO: 1899 - DNA, 25 bp, Homo sapien
gttgtttcgacatacgtaatactga

SEQ ID NO: 1900 - DNA, 25 bp, Homo sapien
gttgtttcgacaaacgtaatactga

SEQ ID NO: 1901 - DNA, 25 bp, Homo sapien
gggatctcgaaaacaactactatac

SEQ ID NO: 1902 - DNA, 25 bp, Homo sapien
gggatctcgaaatcaactactatac

SEQ ID NO: 1903 - DNA, 25 bp, Homo sapien
ggaccggtctcaatcctataaaact

SEQ ID NO: 1904 - DNA, 25 bp, Homo sapien
ggaccggtctcattcctataaaact

SEQ ID NO: 1905 - DNA, 25 bp, Homo sapien
aagtgttgtcttacctagtttagac

SEQ ID NO: 1906 - DNA, 25 bp, Homo sapien
aagtgttgtctttcctagtttagac

SEQ ID NO: 1907 - DNA, 25 bp, Homo sapien
aggttttcgttatcattactgtact

SEQ ID NO: 1908 - DNA, 25 bp, Homo sapien
aggttttcgttaacattactgtact

SEQ ID NO: 1909 - DNA, 25 bp, Homo sapien
catgggtctttattatccgtaattt

SEQ ID NO: 1910 - DNA, 25 bp, Homo sapien
catgggtctttaatatccgtaattt

SEQ ID NO: 1911 - DNA, 25 bp, Homo sapien
ctcttcacgtacgtcaacacgtctg

SEQ ID NO: 1912 - DNA, 25 bp, Homo sapien
ctcttcacgtacctcaacacgtctg

SEQ ID NO: 1913 - DNA, 25 bp, Homo sapien
tctctctccgacttagacggaccgg

SEQ ID NO: 1914 - DNA, 25 bp, Homo sapien
tctctctccgacatagacggaccgg

SEQ ID NO: 1915 - DNA, 25 bp, Homo sapien
gctatccagagcaacacactacgtg

SEQ ID NO: 1916 - DNA, 25 bp, Homo sapien
gctatccagagctacacactacgtg

SEQ ID NO: 1917 - DNA, 25 bp, Homo sapien
tgtgcagtcataacccgtaataacc

SEQ ID NO: 1918 - DNA, 25 bp, Homo sapien
tgtgcagtcatatcccgtaataacc

SEQ ID NO: 1919 - DNA, 25 bp, Homo sapien
ggttcgtaagatgtcgtaaactacc

SEQ ID NO: 1920 - DNA, 25 bp, Homo sapien
ggttcgtaagatctcgtaaactacc

SEQ ID NO: 1921 - DNA, 25 bp, Homo sapien
cggtcgaggtcgaccgtcgaaaact

SEQ ID NO: 1922 - DNA, 25 bp, Homo sapien
cggtcgaggtcgtccgtcgaaaact

SEQ ID NO: 1923 - DNA, 25 bp, Homo sapien
agcatcgaggcgtcctaccagtccg

SEQ ID NO: 1924 - DNA, 25 bp, Homo sapien
agcatcgaggcgacctaccagtccg

SEQ ID NO: 1925 - DNA, 25 bp, Homo sapien
cgacctagaggtatcgcaggagacc

SEQ ID NO: 1926 - DNA, 25 bp, Homo sapien
cgacctagaggtttcgcaggagacc

SEQ ID NO: 1927 - DNA, 25 bp, Homo sapien
caagagttgtttcgttactttctct

SEQ ID NO: 1928 - DNA, 25 bp, Homo sapien
caagagttgtttggttactttctct

SEQ ID NO: 1929 - DNA, 25 bp, Homo sapien
agagaagtaatttcgtctgaagtcc

SEQ ID NO: 1930 - DNA, 25 bp, Homo sapien
agagaagtaattacgtctgaagtcc

SEQ ID NO: 1931 - DNA, 25 bp, Homo sapien
agtaacttaggatctactgacccct

SEQ ID NO: 1932 - DNA, 25 bp, Homo sapien
agtaacttaggaactactgacccct

SEQ ID NO: 1933 - DNA, 25 bp, Homo sapien
gactaccagtcactctagactttcg

SEQ ID NO: 1934 - DNA, 25 bp, Homo sapien
gactaccagtcagtctagactttcg

SEQ ID NO: 1935 - DNA, 25 bp, Homo sapien
gtgtacctctgtcttctgctctgtg

SEQ ID NO: 1936 - DNA, 25 bp, Homo sapien
gtgtacctctgtgttctgctctgtg

SEQ ID NO: 1937 - DNA, 25 bp, Homo sapien
ttgtctattctcactcagcttcgtg

SEQ ID NO: 1938 - DNA, 25 bp, Homo sapien
ttgtctattctctctcagcttcgtg

SEQ ID NO: 1939 - DNA, 25 bp, Homo sapien
tgtctttgagttactaacacgcgta

SEQ ID NO: 1940 - DNA, 25 bp, Homo sapien
tgtctttgagtttctaacacgcgta

SEQ ID NO: 1941 - DNA, 25 bp, Homo sapien
acgagacgtctttcttgggacccca

SEQ ID NO: 1942 - DNA, 25 bp, Homo sapien
acgagacgtcttacttgggacccca

SEQ ID NO: 1943 - DNA, 25 bp, Homo sapien
aaagacatgttcctgggagccacct

SEQ ID NO: 1944 - DNA, 25 bp, Homo sapien
aaagacatgttcgtgggagccacct

SEQ ID NO: 1945 - DNA, 25 bp, Homo sapien
tgacctagtgcgagacggcgagccc

SEQ ID NO: 1946 - DNA, 25 bp, Homo sapien
tgacctagtgcgtgacggcgagccc

SEQ ID NO: 1947 - DNA, 25 bp, Homo sapien
gtcgtcgtgccccacgaggagccct

SEQ ID NO: 1948 - DNA, 25 bp, Homo sapien
gtcgtcgtgcccgacgaggagccct

SEQ ID NO: 1949 - DNA, 25 bp, Homo sapien
cgtcttggaacgaagagagactcct

SEQ ID NO: 1950 - DNA, 25 bp, Homo sapien
cgtcttggaacgtagagagactcct

SEQ ID NO: 1951 - DNA, 25 bp, Homo sapien
gatttacaccgttgacacgtaacct

SEQ ID NO: 1952 - DNA, 25 bp, Homo sapien
gatttacaccgtagacacgtaacct

SEQ ID NO: 1953 - DNA, 25 bp, Homo sapien
tttttatttctttcacgaaataact

SEQ ID NO: 1954 - DNA, 25 bp, Homo sapien
tttttatttcttacacgaaataact

SEQ ID NO: 1955 - DNA, 25 bp, Homo sapien
tcttttcatctaacactgacattgt

SEQ ID NO: 1956 - DNA, 25 bp, Homo sapien
tcttttcatctatcactgacattgt

SEQ ID NO: 1957 - DNA, 25 bp, Homo sapien
cccgagtctaccactgtgacaagag

SEQ ID NO: 1958 - DNA, 25 bp, Homo sapien
cccgagtctacctctgtgacaagag

SEQ ID NO: 1959 - DNA, 25 bp, Homo sapien
ccccttcaccgtgtgtgtacgagaa

SEQ ID NO: 1960 - DNA, 25 bp, Homo sapien
ccccttcaccgtctgtgtacgagaa

SEQ ID NO: 1961 - DNA, 25 bp, Homo sapien
cgaccgttgtccttcgttgaagaat

SEQ ID NO: 1962 - DNA, 25 bp, Homo sapien
cgaccgttgtccatcgttgaagaat

SEQ ID NO: 1963 - DNA, 25 bp, Homo sapien
cacagagactctttcaccgaagcct

SEQ ID NO: 1964 - DNA, 25 bp, Homo sapien
cacagagactctatcaccgaagcct

SEQ ID NO: 1965 - DNA, 25 bp, Homo sapien
cagaaggttaactgtaacggaacac

SEQ ID NO: 1966 - DNA, 25 bp, Homo sapien
cagaaggttaacagtaacggaacac

SEQ ID NO: 1967 - DNA, 25 bp, Homo sapien
aacggtaggttggtgagtcagaacc

SEQ ID NO: 1968 - DNA, 25 bp, Homo sapien
aacggtaggttgctgagtcagaacc

SEQ ID NO: 1969 - DNA, 25 bp, Homo sapien
aaggtgtgtgtcgtcgaataacacc

SEQ ID NO: 1970 - DNA, 25 bp, Homo sapien
aaggtgtgtgtcctcgaataacacc

SEQ ID NO: 1971 - DNA, 25 bp, Homo sapien
acgactgtaggagtatcccgaatag

SEQ ID NO: 1972 - DNA, 25 bp, Homo sapien
acgactgtaggactatcccgaatag

SEQ ID NO: 1973 - DNA, 25 bp, Homo sapien
agtccaggagtcgtaacctgtagaa

SEQ ID NO: 1974 - DNA, 25 bp, Homo sapien
agtccaggagtcctaacctgtagaa

SEQ ID NO: 1975 - DNA, 25 bp, Homo sapien
aagagtaatcctaagtctaaagtct

SEQ ID NO: 1976 - DNA, 25 bp, Homo sapien
aagagtaatccttagtctaaagtct

SEQ ID NO: 1977 - DNA, 25 bp, Homo sapien
gaataaagtttcctcagtaaagaca

SEQ ID NO: 1978 - DNA, 25 bp, Homo sapien
gaataaagtttcgtcagtaaagaca

SEQ ID NO: 1979 - DNA, 25 bp, Homo sapien
gtgcatttgactgttaactcatacc

SEQ ID NO: 1980 - DNA, 25 bp, Homo sapien
gtgcatttgactcttaactcatacc

SEQ ID NO: 1981 - DNA, 25 bp, Homo sapien
gtccctggtaacgttaaatctctac

SEQ ID NO: 1982 - DNA, 25 bp, Homo sapien
gtccctggtaaccttaaatctctac

SEQ ID NO: 1983 - DNA, 25 bp, Homo sapien
tctcctgtgttaatgactgcctgtc

SEQ ID NO: 1984 - DNA, 25 bp, Homo sapien
tctcctgtgttattgactgcctgtc

SEQ ID NO: 1985 - DNA, 25 bp, Homo sapien
tcgtcctttaggtcccgactcttcg

SEQ ID NO: 1986 - DNA, 25 bp, Homo sapien
tcgtcctttaggacccgactcttcg

SEQ ID NO: 1987 - DNA, 25 bp, Homo sapien
aacgggaagtgaactcaagactgta

SEQ ID NO: 1988 - DNA, 25 bp, Homo sapien
aacgggaagtgatctcaagactgta

SEQ ID NO: 1989 - DNA, 25 bp, Homo sapien
gagtcggaactgccacggtacctta

SEQ ID NO: 1990 - DNA, 25 bp, Homo sapien
gagtcggaactggcacggtacctta

SEQ ID NO: 1991 - DNA, 25 bp, Homo sapien
gtgactacactcacgatttatgtct

SEQ ID NO: 1992 - DNA, 25 bp, Homo sapien
gtgactacactctcgatttatgtct

SEQ ID NO: 1993 - DNA, 25 bp, Homo sapien
agtatctattctcgagtctatttgt

SEQ ID NO: 1994 - DNA, 25 bp, Homo sapien
agtatctattctggagtctatttgt

SEQ ID NO: 1995 - DNA, 25 bp, Homo sapien
tagtccgatttcgtgacgattacgg

SEQ ID NO: 1996 - DNA, 25 bp, Homo sapien
tagtccgatttcctgacgattacgg

SEQ ID NO: 1997 - DNA, 25 bp, Homo sapien
gtagggctcttcttataacagtgag

SEQ ID NO: 1998 - DNA, 25 bp, Homo sapien
gtagggctcttcatataacagtgag

SEQ ID NO: 1999 - DNA, 25 bp, Homo sapien
tcttaggttttcaggcacgagacac

SEQ ID NO: 2000 - DNA, 25 bp, Homo sapien
tcttaggttttctggcacgagacac

SEQ ID NO: 2001 - DNA, 25 bp, Homo sapien
tcttatgtttagaggtgacgacacc

SEQ ID NO: 2002 - DNA, 25 bp, Homo sapien
tcttatgtttagtggtgacgacacc

SEQ ID NO: 2003 - DNA, 25 bp, Homo sapien
taaatgttcgtcacgtgacagaaag

SEQ ID NO: 2004 - DNA, 25 bp, Homo sapien
taaatgttcgtctcgtgacagaaag

SEQ ID NO: 2005 - DNA, 25 bp, Homo sapien
acagtacctctgtcgaccgtaaact

SEQ ID NO: 2006 - DNA, 25 bp, Homo sapien
acagtacctctgacgaccgtaaact

SEQ ID NO: 2007 - DNA, 25 bp, Homo sapien
tcgtacacttacatactacagtgga

SEQ ID NO: 2008 - DNA, 25 bp, Homo sapien
tcgtacacttacttactacagtgga

SEQ ID NO: 2009 - DNA, 25 bp, Homo sapien
gaatcctacgtttgtacacatagaa

SEQ ID NO: 2010 - DNA, 25 bp, Homo sapien
gaatcctacgttagtacacatagaa

SEQ ID NO: 2011 - DNA, 25 bp, Homo sapien
gaacttccatagatacacacaggat

SEQ ID NO: 2012 - DNA, 25 bp, Homo sapien
gaacttccatagttacacacaggat

SEQ ID NO: 2013 - DNA, 25 bp, Homo sapien
tttcgagacgagaacaaagtcgact

SEQ ID NO: 2014 - DNA, 25 bp, Homo sapien
tttcgagacgagtacaaagtcgact

SEQ ID NO: 2015 - DNA, 25 bp, Homo sapien
gattattttcggagatcgtatcgac

SEQ ID NO: 2016 - DNA, 25 bp, Homo sapien
gattattttcggtgatcgtatcgac

SEQ ID NO: 2017 - DNA, 25 bp, Homo sapien
cgacgaattttgttatttgtcatct

SEQ ID NO: 2018 - DNA, 25 bp, Homo sapien
cgacgaattttgatatttgtcatct

SEQ ID NO: 2019 - DNA, 25 bp, Homo sapien
tctacgtactacgggaagtctcatt

SEQ ID NO: 2020 - DNA, 25 bp, Homo sapien
tctacgtactaccggaagtctcatt

SEQ ID NO: 2021 - DNA, 25 bp, Homo sapien
agagagtcgtcacgactgctggtgt

SEQ ID NO: 2022 - DNA, 25 bp, Homo sapien
agagagtcgtcaggactgctggtgt

SEQ ID NO: 2023 - DNA, 25 bp, Homo sapien
tgactactccataactcgccgaacg

SEQ ID NO: 2024 - DNA, 25 bp, Homo sapien
tgactactccattactcgccgaacg

SEQ ID NO: 2025 - DNA, 25 bp, Homo sapien
gtctcaatcactgacgtgacggaag

SEQ ID NO: 2026 - DNA, 25 bp, Homo sapien
gtctcaatcactcacgtgacggaag

SEQ ID NO: 2027 - DNA, 25 bp, Homo sapien
aaaaacttctcaggtcatacgttgg

SEQ ID NO: 2028 - DNA, 25 bp, Homo sapien
aaaaacttctcacgtcatacgttgg

SEQ ID NO: 2029 - DNA, 25 bp, Homo sapien
aattcgttagaacgataccgtatta

SEQ ID NO: 2030 - DNA, 25 bp, Homo sapien
aattcgttagaaggataccgtatta

SEQ ID NO: 2031 - DNA, 25 bp, Homo sapien
ggtcgtataataactactcgaccta

SEQ ID NO: 2032 - DNA, 25 bp, Homo sapien
ggtcgtataatatctactcgaccta

SEQ ID NO: 2033 - DNA, 25 bp, Homo sapien
acgggtcgtagtaggactctttcag

SEQ ID NO: 2034 - DNA, 25 bp, Homo sapien
acgggtcgtagttggactctttcag

SEQ ID NO: 2035 - DNA, 25 bp, Homo sapien
gatagtctcattttactgtttcgtg

SEQ ID NO: 2036 - DNA, 25 bp, Homo sapien
gatagtctcattatactgtttcgtg

SEQ ID NO: 2037 - DNA, 25 bp, Homo sapien
tgacttccgatttgtcgtttggtgt

SEQ ID NO: 2038 - DNA, 25 bp, Homo sapien
tgacttccgattagtcgtttggtgt

SEQ ID NO: 2039 - DNA, 25 bp, Homo sapien
gcggtagcctccttttccgctttct

SEQ ID NO: 2040 - DNA, 25 bp, Homo sapien
gcggtagcctccatttccgctttct

SEQ ID NO: 2041 - DNA, 25 bp, Homo sapien
tagagtctctccttgaaccagaact

SEQ ID NO: 2042 - DNA, 25 bp, Homo sapien
tagagtctctccatgaaccagaact

SEQ ID NO: 2043 - DNA, 25 bp, Homo sapien
gacgttaccccaggacgactctggt

SEQ ID NO: 2044 - DNA, 25 bp, Homo sapien
gacgttaccccacgacgactctggt

SEQ ID NO: 2045 - DNA, 25 bp, Homo sapien
atcactctaactaacgcctagtgag

SEQ ID NO: 2046 - DNA, 25 bp, Homo sapien
atcactctaacttacgcctagtgag

SEQ ID NO: 2047 - DNA, 25 bp, Homo sapien
gtctcagaggtcaaaaccactatca

SEQ ID NO: 2048 - DNA, 25 bp, Homo sapien
gtctcagaggtctaaaccactatca

SEQ ID NO: 2049 - DNA, 25 bp, Homo sapien
aagtaccgggccaaaagctactgga

SEQ ID NO: 2050 - DNA, 25 bp, Homo sapien
aagtaccgggcctaaagctactgga

SEQ ID NO: 2051 - DNA, 25 bp, Homo sapien
aaccagggaaataacagaccccacg

SEQ ID NO: 2052 - DNA, 25 bp, Homo sapien
aaccagggaaattacagaccccacg

SEQ ID NO: 2053 - DNA, 25 bp, Homo sapien
aaggggagaacactcagagcgtcca

SEQ ID NO: 2054 - DNA, 25 bp, Homo sapien
aaggggagaacagtcagagcgtcca

SEQ ID NO: 2055 - DNA, 25 bp, Homo sapien
ggacgtccgaagtctgaggtcctct

SEQ ID NO: 2056 - DNA, 25 bp, Homo sapien
ggacgtccgaagactgaggtcctct

SEQ ID NO: 2057 - DNA, 25 bp, Homo sapien
gatgactcaaaacgtgagtccgtgt

SEQ ID NO: 2058 - DNA, 25 bp, Homo sapien
gatgactcaaaaggtgagtccgtgt

SEQ ID NO: 2059 - DNA, 25 bp, Homo sapien
gggtgcgacccgagtggtatcctct

SEQ ID NO: 2060 - DNA, 25 bp, Homo sapien
gggtgcgacccgtgtggtatcctct

SEQ ID NO: 2061 - DNA, 25 bp, Homo sapien
gtcccgtcgtctttggttctcgtct

SEQ ID NO: 2062 - DNA, 25 bp, Homo sapien
gtcccgtcgtctatggttctcgtct

SEQ ID NO: 2063 - DNA, 25 bp, Homo sapien
tgtcgacgccctagtggtgtgacct

SEQ ID NO: 2064 - DNA, 25 bp, Homo sapien
tgtcgacgcccttgtggtgtgacct

SEQ ID NO: 2065 - DNA, 25 bp, Homo sapien
ggccgacaccgctcgtgtggttgaa

SEQ ID NO: 2066 - DNA, 25 bp, Homo sapien
ggccgacaccgcacgtgtggttgaa

SEQ ID NO: 2067 - DNA, 25 bp, Homo sapien
tccgacgacccctaacggaggacga

SEQ ID NO: 2068 - DNA, 25 bp, Homo sapien
tccgacgaccccaaacggaggacga

SEQ ID NO: 2069 - DNA, 25 bp, Homo sapien
ccgcgaccgccttgcggagatacga

SEQ ID NO: 2070 - DNA, 25 bp, Homo sapien
ccgcgaccgcctagcggagatacga

SEQ ID NO: 2071 - DNA, 25 bp, Homo sapien
acccgtagtccgttgtttggatata

SEQ ID NO: 2072 - DNA, 25 bp, Homo sapien
acccgtagtccgatgtttggatata

SEQ ID NO: 2073 - DNA, 25 bp, Homo sapien
caccggtcctattcttaaggaacgt

SEQ ID NO: 2074 - DNA, 25 bp, Homo sapien
caccggtcctatacttaaggaacgt

SEQ ID NO: 2075 - DNA, 25 bp, Homo sapien
ttcgtcgtgtagatttttcagttcc

SEQ ID NO: 2076 - DNA, 25 bp, Homo sapien
ttcgtcgtgtagttttttcagttcc

SEQ ID NO: 2077 - DNA, 25 bp, Homo sapien
gtggtatctgttttcccactgtccg

SEQ ID NO: 2078 - DNA, 25 bp, Homo sapien
gtggtatctgttatcccactgtccg

SEQ ID NO: 2079 - DNA, 25 bp, Homo sapien
gttcgttcactacaccctataccgt

SEQ ID NO: 2080 - DNA, 25 bp, Homo sapien
gttcgttcactagaccctataccgt

SEQ ID NO: 2081 - DNA, 25 bp, Homo sapien
ccggtctcgacgtaagatgttctcc

SEQ ID NO: 2082 - DNA, 25 bp, Homo sapien
ccggtctcgacgaaagatgttctcc

SEQ ID NO: 2083 - DNA, 25 bp, Homo sapien
gtctcgaccggagaaaagactcttc

SEQ ID NO: 2084 - DNA, 25 bp, Homo sapien
gtctcgaccggacaaaagactcttc

SEQ ID NO: 2085 - DNA, 25 bp, Homo sapien
gggtggaccgcaaggtctacgttct

SEQ ID NO: 2086 - DNA, 25 bp, Homo sapien
gggtggaccgcatggtctacgttct

SEQ ID NO: 2087 - DNA, 25 bp, Homo sapien
ttttcttacacaatgtcgacgtgta

SEQ ID NO: 2088 - DNA, 25 bp, Homo sapien
ttttcttacacattgtcgacgtgta

SEQ ID NO: 2089 - DNA, 25 bp, Homo sapien
ttgtttaccgtaaattgtcactatg

SEQ ID NO: 2090 - DNA, 25 bp, Homo sapien
ttgtttaccgtatattgtcactatg

SEQ ID NO: 2091 - DNA, 25 bp, Homo sapien
ctgttgaagtcacgtttctatatgt

SEQ ID NO: 2092 - DNA, 25 bp, Homo sapien
ctgttgaagtcaggtttctatatgt

SEQ ID NO: 2093 - DNA, 25 bp, Homo sapien
cttagtggcagaaggacacttatgt

SEQ ID NO: 2094 - DNA, 25 bp, Homo sapien
cttagtggcagatggacacttatgt

SEQ ID NO: 2095 - DNA, 25 bp, Homo sapien
gtcctcgtcgtcgagaagaacgtcc

SEQ ID NO: 2096 - DNA, 25 bp, Homo sapien
gtcctcgtcgtccagaagaacgtcc

SEQ ID NO: 2097 - DNA, 25 bp, Homo sapien
ctcacgtgctacagaaagagtctac

SEQ ID NO: 2098 - DNA, 25 bp, Homo sapien
ctcacgtgctactgaaagagtctac

SEQ ID NO: 2099 - DNA, 25 bp, Homo sapien
cgtcttcgtcgtaataaccagacag

SEQ ID NO: 2100 - DNA, 25 bp, Homo sapien
cgtcttcgtcgttataaccagacag

SEQ ID NO: 2101 - DNA, 25 bp, Homo sapien
gtctaccatcgatcaagtcccgact

SEQ ID NO: 2102 - DNA, 25 bp, Homo sapien
gtctaccatcgaacaagtcccgact

SEQ ID NO: 2103 - DNA, 25 bp, Homo sapien
gtgtaccacctcagtccttcttcct

SEQ ID NO: 2104 - DNA, 25 bp, Homo sapien
gtgtaccacctctgtccttcttcct

SEQ ID NO: 2105 - DNA, 25 bp, Homo sapien
tttaccgggtctacgggtcgactcc

SEQ ID NO: 2106 - DNA, 25 bp, Homo sapien
tttaccgggtcttcgggtcgactcc

SEQ ID NO: 2107 - DNA, 25 bp, Homo sapien
tccttttgtgtcacggacgtctccc

SEQ ID NO: 2108 - DNA, 25 bp, Homo sapien
tccttttgtgtctcggacgtctccc

SEQ ID NO: 2109 - DNA, 25 bp, Homo sapien
ccttttagtagtgaccgttgttttc

SEQ ID NO: 2110 - DNA, 25 bp, Homo sapien
ccttttagtagtcaccgttgttttc

SEQ ID NO: 2111 - DNA, 25 bp, Homo sapien
tcgtggtgtcgtccacctttgcgtc

SEQ ID NO: 2112 - DNA, 25 bp, Homo sapien
tcgtggtgtcgtgcacctttgcgtc

SEQ ID NO: 2113 - DNA, 25 bp, Homo sapien
cgagtgtatgttaacttactctgtt

SEQ ID NO: 2114 - DNA, 25 bp, Homo sapien
cgagtgtatgtttacttactctgtt

SEQ ID NO: 2115 - DNA, 25 bp, Homo sapien
acccgtcggactgtcactacttgta

SEQ ID NO: 2116 - DNA, 25 bp, Homo sapien
acccgtcggactctcactacttgta

SEQ ID NO: 2117 - DNA, 25 bp, Homo sapien
ccgtttatgcgtatacgtctacgtc

SEQ ID NO: 2118 - DNA, 25 bp, Homo sapien
ccgtttatgcgtttacgtctacgtc

SEQ ID NO: 2119 - DNA, 25 bp, Homo sapien
cttgatgagacttgaatgatactct

SEQ ID NO: 2120 - DNA, 25 bp, Homo sapien
cttgatgagactagaatgatactct

SEQ ID NO: 2121 - DNA, 25 bp, Homo sapien
gttcccgcacgaagggtgagtccgt

SEQ ID NO: 2122 - DNA, 25 bp, Homo sapien
gttcccgcacgatgggtgagtccgt

SEQ ID NO: 2123 - DNA, 25 bp, Homo sapien
aattcgctccagtcgaggtggtccg

SEQ ID NO: 2124 - DNA, 25 bp, Homo sapien
aattcgctccagacgaggtggtccg

SEQ ID NO: 2125 - DNA, 25 bp, Homo sapien
gtagacttacccaagactggacgtc

SEQ ID NO: 2126 - DNA, 25 bp, Homo sapien
gtagacttaccctagactggacgtc

SEQ ID NO: 2127 - DNA, 25 bp, Homo sapien
ccaagttgtcctcgaccatcgtcta

SEQ ID NO: 2128 - DNA, 25 bp, Homo sapien
ccaagttgtcctggaccatcgtcta

SEQ ID NO: 2129 - DNA, 25 bp, Homo sapien
aatataagtttgaccgacggtcgta

SEQ ID NO: 2130 - DNA, 25 bp, Homo sapien
aatataagtttgtccgacggtcgta

SEQ ID NO: 2131 - DNA, 25 bp, Homo sapien
gaaaggggtgtcctccgtaagtcga

SEQ ID NO: 2132 - DNA, 25 bp, Homo sapien
gaaaggggtgtcgtccgtaagtcga

SEQ ID NO: 2133 - DNA, 25 bp, Homo sapien
atgagcgctcgtccaggaagtctac

SEQ ID NO: 2134 - DNA, 25 bp, Homo sapien
atgagcgctcgtgcaggaagtctac

SEQ ID NO: 2135 - DNA, 25 bp, Homo sapien
acgtcacaccggacagtgacatctt

SEQ ID NO: 2136 - DNA, 25 bp, Homo sapien
acgtcacaccggtcagtgacatctt

SEQ ID NO: 2137 - DNA, 25 bp, Homo sapien
ccggaaacactgtccgagactcttt

SEQ ID NO: 2138 - DNA, 25 bp, Homo sapien
ccggaaacactgaccgagactcttt

SEQ ID NO: 2139 - DNA, 25 bp, Homo sapien
ggtaaaatgtactacgaactacttt

SEQ ID NO: 2140 - DNA, 25 bp, Homo sapien
ggtaaaatgtacaacgaactacttt

SEQ ID NO: 2141 - DNA, 25 bp, Homo sapien
cggacactgtattcgaatgttattt

SEQ ID NO: 2142 - DNA, 25 bp, Homo sapien
cggacactgtatacgaatgttattt

SEQ ID NO: 2143 - DNA, 25 bp, Homo sapien
gagacagggtccagaagatatcgtt

SEQ ID NO: 2144 - DNA, 25 bp, Homo sapien
gagacagggtcctgaagatatcgtt

SEQ ID NO: 2145 - DNA, 25 bp, Homo sapien
aaacggagatggtcaaccgtctgtc

SEQ ID NO: 2146 - DNA, 25 bp, Homo sapien
aaacggagatggacaaccgtctgtc

SEQ ID NO: 2147 - DNA, 25 bp, Homo sapien
aacttactggcgacgaaccctatgt

SEQ ID NO: 2148 - DNA, 25 bp, Homo sapien
aacttactggcgtcgaaccctatgt

SEQ ID NO: 2149 - DNA, 25 bp, Homo sapien
atgtactatcttagtgtctttactg

SEQ ID NO: 2150 - DNA, 25 bp, Homo sapien
atgtactatctttgtgtctttactg

SEQ ID NO: 2151 - DNA, 25 bp, Homo sapien
ttcgagtcgtaggacggtccctcgg

SEQ ID NO: 2152 - DNA, 25 bp, Homo sapien
ttcgagtcgtagcacggtccctcgg

SEQ ID NO: 2153 - DNA, 25 bp, Homo sapien
ccaaatgagtagttcacgaaaactg

SEQ ID NO: 2154 - DNA, 25 bp, Homo sapien
ccaaatgagtagatcacgaaaactg

SEQ ID NO: 2155 - DNA, 25 bp, Homo sapien
ggaacctgatataaccgacattatg

SEQ ID NO: 2156 - DNA, 25 bp, Homo sapien
ggaacctgatattaccgacattatg

SEQ ID NO: 2157 - DNA, 25 bp, Homo sapien
gcaatctcattgacgtaactgtcct

SEQ ID NO: 2158 - DNA, 25 bp, Homo sapien
gcaatctcattgtcgtaactgtcct

SEQ ID NO: 2159 - DNA, 25 bp, Homo sapien
atgaaacttgtctaggtgtatttcc

SEQ ID NO: 2160 - DNA, 25 bp, Homo sapien
atgaaacttgtcaaggtgtatttcc

SEQ ID NO: 2161 - DNA, 25 bp, Homo sapien
acgggtttacttttggttttctacc

SEQ ID NO: 2162 - DNA, 25 bp, Homo sapien
acgggtttacttatggttttctacc

SEQ ID NO: 2163 - DNA, 25 bp, Homo sapien
gcactacggatggtctacggtctgg

SEQ ID NO: 2164 - DNA, 25 bp, Homo sapien
gcactacggatgctctacggtctgg

SEQ ID NO: 2165 - DNA, 25 bp, Homo sapien
acgagacgacgagtgtccccttcgg

SEQ ID NO: 2166 - DNA, 25 bp, Homo sapien
acgagacgacgactgtccccttcgg

SEQ ID NO: 2167 - DNA, 25 bp, Homo sapien
cactgtcggacgttccatcggtagg

SEQ ID NO: 2168 - DNA, 25 bp, Homo sapien
cactgtcggacgatccatcggtagg

SEQ ID NO: 2169 - DNA, 25 bp, Homo sapien
acggtaagctcattacatcggtgtc

SEQ ID NO: 2170 - DNA, 25 bp, Homo sapien
acggtaagctcaatacatcggtgtc

SEQ ID NO: 2171 - DNA, 25 bp, Homo sapien
ggacctccgtctaccactaattagt

SEQ ID NO: 2172 - DNA, 25 bp, Homo sapien
ggacctccgtcttccactaattagt

SEQ ID NO: 2173 - DNA, 25 bp, Homo sapien
ccgagggccgcgaagtcaaggataa

SEQ ID NO: 2174 - DNA, 25 bp, Homo sapien
ccgagggccgcgtagtcaaggataa

SEQ ID NO: 2175 - DNA, 25 bp, Homo sapien
acaaggaagcagtgtagaggactcc

SEQ ID NO: 2176 - DNA, 25 bp, Homo sapien
acaaggaagcagagtagaggactcc

SEQ ID NO: 2177 - DNA, 25 bp, Homo sapien
aaagagaacaactcgacgaaacgtc

SEQ ID NO: 2178 - DNA, 25 bp, Homo sapien
aaagagaacaacacgacgaaacgtc

SEQ ID NO: 2179 - DNA, 25 bp, Homo sapien
aacgaaacgaccacagacactcgtc

SEQ ID NO: 2180 - DNA, 25 bp, Homo sapien
aacgaaacgacctcagacactcgtc

SEQ ID NO: 2181 - DNA, 25 bp, Homo sapien
aacgcgtgccgcagcacgagccggt

SEQ ID NO: 2182 - DNA, 25 bp, Homo sapien
aacgcgtgccgctgcacgagccggt

SEQ ID NO: 2183 - DNA, 25 bp, Homo sapien
aggatagaggaacgaacgaaaccat

SEQ ID NO: 2184 - DNA, 25 bp, Homo sapien
aggatagaggaaggaacgaaaccat

SEQ ID NO: 2185 - DNA, 25 bp, Homo sapien
gtagtaggaacggagacagacaaat

SEQ ID NO: 2186 - DNA, 25 bp, Homo sapien
gtagtaggaacgcagacagacaaat

SEQ ID NO: 2187 - DNA, 25 bp, Homo sapien
tgtcgtagaggaccttctggagtcc

SEQ ID NO: 2188 - DNA, 25 bp, Homo sapien
tgtcgtagaggagcttctggagtcc

SEQ ID NO: 2189 - DNA, 25 bp, Homo sapien
atagttagtatctcttctagggtcc

SEQ ID NO: 2190 - DNA, 25 bp, Homo sapien
atagttagtatcacttctagggtcc

SEQ ID NO: 2191 - DNA, 25 bp, Homo sapien
ttcgtaatccctttagtaggagtca

SEQ ID NO: 2192 - DNA, 25 bp, Homo sapien
ttcgtaatccctatagtaggagtca

SEQ ID NO: 2193 - DNA, 25 bp, Homo sapien
gttcaagtttctgtcgtaggatctt

SEQ ID NO: 2194 - DNA, 25 bp, Homo sapien
gttcaagtttctctcgtaggatctt

SEQ ID NO: 2195 - DNA, 25 bp, Homo sapien
ggtacggttccgactcgacgagttt

SEQ ID NO: 2196 - DNA, 25 bp, Homo sapien
ggtacggttccgtctcgacgagttt

SEQ ID NO: 2197 - DNA, 25 bp, Homo sapien
gctattagtctcctcagtccgacct

SEQ ID NO: 2198 - DNA, 25 bp, Homo sapien
gctattagtctcgtcagtccgacct

SEQ ID NO: 2199 - DNA, 25 bp, Homo sapien
cctttgtctagtcgacgtcggtcac

SEQ ID NO: 2200 - DNA, 25 bp, Homo sapien
cctttgtctagtggacgtcggtcac

SEQ ID NO: 2201 - DNA, 25 bp, Homo sapien
tccttgtgctactgggtccggtcgt

SEQ ID NO: 2202 - DNA, 25 bp, Homo sapien
tccttgtgctacagggtccggtcgt

SEQ ID NO: 2203 - DNA, 25 bp, Homo sapien
ctctgtatatcgagtctaccttacg

SEQ ID NO: 2204 - DNA, 25 bp, Homo sapien
ctctgtatatcgtgtctaccttacg

SEQ ID NO: 2205 - DNA, 25 bp, Homo sapien
caccggtgtccgttgtacttccggt

SEQ ID NO: 2206 - DNA, 25 bp, Homo sapien
caccggtgtccgatgtacttccggt

SEQ ID NO: 2207 - DNA, 25 bp, Homo sapien
ctggaagaactcagtaagtcgacga

SEQ ID NO: 2208 - DNA, 25 bp, Homo sapien
ctggaagaactctgtaagtcgacga

SEQ ID NO: 2209 - DNA, 25 bp, Homo sapien
tagttctaagactctcactgacgag

SEQ ID NO: 2210 - DNA, 25 bp, Homo sapien
tagttctaagacactcactgacgag

SEQ ID NO: 2211 - DNA, 25 bp, Homo sapien
tacgtctttcgtgtcctgtgacgag

SEQ ID NO: 2212 - DNA, 25 bp, Homo sapien
tacgtctttcgtctcctgtgacgag

SEQ ID NO: 2213 - DNA, 25 bp, Homo sapien
ctaataaatctcttatgctatggtg

SEQ ID NO: 2214 - DNA, 25 bp, Homo sapien
ctaataaatctcatatgctatggtg

SEQ ID NO: 2215 - DNA, 25 bp, Homo sapien
acacccctgtctcaggacaagactg

SEQ ID NO: 2216 - DNA, 25 bp, Homo sapien
acacccctgtctgaggacaagactg

SEQ ID NO: 2217 - DNA, 25 bp, Homo sapien
cgggtctgccgtttggagaagtacc

SEQ ID NO: 2218 - DNA, 25 bp, Homo sapien
cgggtctgccgtatggagaagtacc

SEQ ID NO: 2219 - DNA, 25 bp, Homo sapien
aagtccccgtaattataccagtcct

SEQ ID NO: 2220 - DNA, 25 bp, Homo sapien
aagtccccgtaaatataccagtcct

SEQ ID NO: 2221 - DNA, 25 bp, Homo sapien
taccgtcgtttgattccagtctact

SEQ ID NO: 2222 - DNA, 25 bp, Homo sapien
taccgtcgtttgtttccagtctact

SEQ ID NO: 2223 - DNA, 25 bp, Homo sapien
gtctaaggttactcgtggtccctcc

SEQ ID NO: 2224 - DNA, 25 bp, Homo sapien
gtctaaggttacacgtggtccctcc

SEQ ID NO: 2225 - DNA, 25 bp, Homo sapien
gtcctcggtgcgagtgagtccatcc

SEQ ID NO: 2226 - DNA, 25 bp, Homo sapien
gtcctcggtgcgtgtgagtccatcc

SEQ ID NO: 2227 - DNA, 25 bp, Homo sapien
taggcgtgtcgttcagggccactcc

SEQ ID NO: 2228 - DNA, 25 bp, Homo sapien
taggcgtgtcgtacagggccactcc

SEQ ID NO: 2229 - DNA, 25 bp, Homo sapien
catagcgtgacggaagagggacccc

SEQ ID NO: 2230 - DNA, 25 bp, Homo sapien
catagcgtgacgcaagagggacccc

SEQ ID NO: 2231 - DNA, 25 bp, Homo sapien
tgagacgggccatcgggtagaaacc

SEQ ID NO: 2232 - DNA, 25 bp, Homo sapien
tgagacgggccaacgggtagaaacc

SEQ ID NO: 2233 - DNA, 25 bp, Homo sapien
atctagtcgaccaaaggtaaaacct

SEQ ID NO: 2234 - DNA, 25 bp, Homo sapien
atctagtcgacctaaggtaaaacct

SEQ ID NO: 2235 - DNA, 25 bp, Homo sapien
gcctatgactcagtgtcagagattc

SEQ ID NO: 2236 - DNA, 25 bp, Homo sapien
gcctatgactcactgtcagagattc

SEQ ID NO: 2237 - DNA, 25 bp, Homo sapien
gaccctgtatcataagtcgtcttga

SEQ ID NO: 2238 - DNA, 25 bp, Homo sapien
gaccctgtatcaaaagtcgtcttga

SEQ ID NO: 2239 - DNA, 25 bp, Homo sapien
cactcttttagaacttgtgttcagt

SEQ ID NO: 2240 - DNA, 25 bp, Homo sapien
cactcttttagatcttgtgttcagt

SEQ ID NO: 2241 - DNA, 25 bp, Homo sapien
tcgtctctcttgttttgtggagcat

SEQ ID NO: 2242 - DNA, 25 bp, Homo sapien
tcgtctctcttgatttgtggagcat

SEQ ID NO: 2243 - DNA, 25 bp, Homo sapien
gaggtaccgggatttcctcgacgta

SEQ ID NO: 2244 - DNA, 25 bp, Homo sapien
gaggtaccgggaattcctcgacgta

SEQ ID NO: 2245 - DNA, 25 bp, Homo sapien
aaaggttccgggttattcctaggta

SEQ ID NO: 2246 - DNA, 25 bp, Homo sapien
aaaggttccgggatattcctaggta

SEQ ID NO: 2247 - DNA, 25 bp, Homo sapien
catagcttcctcgttttccacggag

SEQ ID NO: 2248 - DNA, 25 bp, Homo sapien
catagcttcctccttttccacggag

SEQ ID NO: 2249 - DNA, 25 bp, Homo sapien
agctccagtctccagtggcgagacc

SEQ ID NO: 2250 - DNA, 25 bp, Homo sapien
agctccagtctcgagtggcgagacc

SEQ ID NO: 2251 - DNA, 25 bp, Homo sapien
gacgactaccctaacgatttgaacc

SEQ ID NO: 2252 - DNA, 25 bp, Homo sapien
gacgactacccttacgatttgaacc

SEQ ID NO: 2253 - DNA, 25 bp, Homo sapien
atggactctgccttttgtggttagc

SEQ ID NO: 2254 - DNA, 25 bp, Homo sapien
atggactctgccatttgtggttagc

SEQ ID NO: 2255 - DNA, 25 bp, Homo sapien
tggtcgtccttctcggtgcacttcc

SEQ ID NO: 2256 - DNA, 25 bp, Homo sapien
tggtcgtccttcacggtgcacttcc

SEQ ID NO: 2257 - DNA, 25 bp, Homo sapien
gtgacttgtcgtcttaccaccacta

SEQ ID NO: 2258 - DNA, 25 bp, Homo sapien
gtgacttgtcgtgttaccaccacta

SEQ ID NO: 2259 - DNA, 25 bp, Homo sapien
ggagtactctcagtttacctccgtg

SEQ ID NO: 2260 - DNA, 25 bp, Homo sapien
ggagtactctcactttacctccgtg

SEQ ID NO: 2261 - DNA, 25 bp, Homo sapien
ccgtgtacccgtgtcatcgtccggg

SEQ ID NO: 2262 - DNA, 25 bp, Homo sapien
ccgtgtacccgtctcatcgtccggg

SEQ ID NO: 2263 - DNA, 25 bp, Homo sapien
ccaaaacgtagaagtcctctgcgag

SEQ ID NO: 2264 - DNA, 25 bp, Homo sapien
ccaaaacgtagatgtcctctgcgag

SEQ ID NO: 2265 - DNA, 25 bp, Homo sapien
actagactcggtgaaggtccttaga

SEQ ID NO: 2266 - DNA, 25 bp, Homo sapien
actagactcggtcaaggtccttaga

SEQ ID NO: 2267 - DNA, 25 bp, Homo sapien
caaatgtgacgaacggctatgtaga

SEQ ID NO: 2268 - DNA, 25 bp, Homo sapien
caaatgtgacgatcggctatgtaga

SEQ ID NO: 2269 - DNA, 25 bp, Homo sapien
gaccactaggagaccggtgactccg

SEQ ID NO: 2270 - DNA, 25 bp, Homo sapien
gaccactaggagtccggtgactccg

SEQ ID NO: 2271 - DNA, 25 bp, Homo sapien
acttctcgacggttcgatgatcgtt

SEQ ID NO: 2272 - DNA, 25 bp, Homo sapien
acttctcgacggatcgatgatcgtt

SEQ ID NO: 2273 - DNA, 25 bp, Homo sapien
gaagggttttacaatcacacatcga

SEQ ID NO: 2274 - DNA, 25 bp, Homo sapien
gaagggttttactatcacacatcga

SEQ ID NO: 2275 - DNA, 25 bp, Homo sapien
gtaggtgtctccatatcccactcga

SEQ ID NO: 2276 - DNA, 25 bp, Homo sapien
gtaggtgtctccttatcccactcga

SEQ ID NO: 2277 - DNA, 25 bp, Homo sapien
cagaggagtacctcgtggtccccga

SEQ ID NO: 2278 - DNA, 25 bp, Homo sapien
cagaggagtaccacgtggtccccga

SEQ ID NO: 2279 - DNA, 25 bp, Homo sapien
aacgaggacccctacagaacgacca

SEQ ID NO: 2280 - DNA, 25 bp, Homo sapien
aacgaggaccccaacagaacgacca

SEQ ID NO: 2281 - DNA, 25 bp, Homo sapien
gttgggacattcttaagtcctgcga

SEQ ID NO: 2282 - DNA, 25 bp, Homo sapien
gttgggacattcataagtcctgcga

SEQ ID NO: 2283 - DNA, 25 bp, Homo sapien
aggtcgaaccaaagtccggagtact

SEQ ID NO: 2284 - DNA, 25 bp, Homo sapien
aggtcgaaccaatgtccggagtact

SEQ ID NO: 2285 - DNA, 25 bp, Homo sapien
agagacgataacacattccgaactt

SEQ ID NO: 2286 - DNA, 25 bp, Homo sapien
agagacgataactcattccgaactt

SEQ ID NO: 2287 - DNA, 25 bp, Homo sapien
gacacatacaaggatgtccgacaca

SEQ ID NO: 2288 - DNA, 25 bp, Homo sapien
gacacatacaagcatgtccgacaca

SEQ ID NO: 2289 - DNA, 25 bp, Homo sapien
gacacctactcaagtactcccaagg

SEQ ID NO: 2290 - DNA, 25 bp, Homo sapien
gacacctactcatgtactcccaagg

SEQ ID NO: 2291 - DNA, 25 bp, Homo sapien
aaaatccgtcacaggtcccttgtct

SEQ ID NO: 2292 - DNA, 25 bp, Homo sapien
aaaatccgtcactggtcccttgtct

SEQ ID NO: 2293 - DNA, 25 bp, Homo sapien
aatgttcgacctgagattctctcta

SEQ ID NO: 2294 - DNA, 25 bp, Homo sapien
aatgttcgacctcagattctctcta

SEQ ID NO: 2295 - DNA, 25 bp, Homo sapien
cattatgtgtcagtgtatgtctcta

SEQ ID NO: 2296 - DNA, 25 bp, Homo sapien
cattatgtgtcactgtatgtctcta

SEQ ID NO: 2297 - DNA, 25 bp, Homo sapien
ttgtagtcactcgtaggacgtatgt

SEQ ID NO: 2298 - DNA, 25 bp, Homo sapien
ttgtagtcactcctaggacgtatgt

SEQ ID NO: 2299 - DNA, 25 bp, Homo sapien
cgtacagtcacgtcgggtcgtgtgt

SEQ ID NO: 2300 - DNA, 25 bp, Homo sapien
cgtacagtcacgacgggtcgtgtgt

SEQ ID NO: 2301 - DNA, 25 bp, Homo sapien
atctaccggaccagtcgaacgtcat

SEQ ID NO: 2302 - DNA, 25 bp, Homo sapien
atctaccggacctgtcgaacgtcat

SEQ ID NO: 2303 - DNA, 25 bp, Homo sapien
tactcgactccgtgttccgagtcct

SEQ ID NO: 2304 - DNA, 25 bp, Homo sapien
tactcgactccgagttccgagtcct

SEQ ID NO: 2305 - DNA, 25 bp, Homo sapien
gtgtcttactaccttgatcttgtcc

SEQ ID NO: 2306 - DNA, 25 bp, Homo sapien
gtgtcttactacgttgatcttgtcc

SEQ ID NO: 2307 - DNA, 25 bp, Homo sapien
atattctttactgtgatgtcttgac

SEQ ID NO: 2308 - DNA, 25 bp, Homo sapien
atattctttactctgatgtcttgac

SEQ ID NO: 2309 - DNA, 25 bp, Homo sapien
ttagttgtgtcctcggtctctttag

SEQ ID NO: 2310 - DNA, 25 bp, Homo sapien
ttagttgtgtccacggtctctttag

SEQ ID NO: 2311 - DNA, 25 bp, Homo sapien
ttgagtcgactaacggtccacttgt

SEQ ID NO: 2312 - DNA, 25 bp, Homo sapien
ttgagtcgactatcggtccacttgt

SEQ ID NO: 2313 - DNA, 25 bp, Homo sapien
tggtaccggtcgtaggtgttctgcc

SEQ ID NO: 2314 - DNA, 25 bp, Homo sapien
tggtaccggtcgaaggtgttctgcc

SEQ ID NO: 2315 - DNA, 25 bp, Homo sapien
gcgtcctagtgaacgataccattcg

SEQ ID NO: 2316 - DNA, 25 bp, Homo sapien
gcgtcctagtgatcgataccattcg

SEQ ID NO: 2317 - DNA, 25 bp, Homo sapien
cggtgggtagtaacgcaccatgtcg

SEQ ID NO: 2318 - DNA, 25 bp, Homo sapien
cggtgggtagtatcgcaccatgtcg

SEQ ID NO: 2319 - DNA, 25 bp, Homo sapien
cgtaggtactctctgagacaggtgg

SEQ ID NO: 2320 - DNA, 25 bp, Homo sapien
cgtaggtactctgtgagacaggtgg

SEQ ID NO: 2321 - DNA, 25 bp, Homo sapien
tgtcgggacccgtgtgaacgatgtc

SEQ ID NO: 2322 - DNA, 25 bp, Homo sapien
tgtcgggacccgagtgaacgatgtc

SEQ ID NO: 2323 - DNA, 25 bp, Homo sapien
ttcaagaagagtttgaagacgtcct

SEQ ID NO: 2324 - DNA, 25 bp, Homo sapien
ttcaagaagagtatgaagacgtcct

SEQ ID NO: 2325 - DNA, 25 bp, Homo sapien
ttcacgaaggcgtttgacaggtgtg

SEQ ID NO: 2326 - DNA, 25 bp, Homo sapien
ttcacgaaggcgattgacaggtgtg

SEQ ID NO: 2327 - DNA, 25 bp, Homo sapien
cacgtgtggcactgtcgattgtgtc

SEQ ID NO: 2328 - DNA, 25 bp, Homo sapien
cacgtgtggcacagtcgattgtgtc

SEQ ID NO: 2329 - DNA, 25 bp, Homo sapien
ccggtagaatacagtcatctaggtc

SEQ ID NO: 2330 - DNA, 25 bp, Homo sapien
ccggtagaatactgtcatctaggtc

SEQ ID NO: 2331 - DNA, 25 bp, Homo sapien
ctgacgtaaaattagacgacgccga

SEQ ID NO: 2332 - DNA, 25 bp, Homo sapien
ctgacgtaaaataagacgacgccga

SEQ ID NO: 2333 - DNA, 25 bp, Homo sapien
tttacgctgtctaatgactaaattg

SEQ ID NO: 2334 - DNA, 25 bp, Homo sapien
tttacgctgtcttatgactaaattg

SEQ ID NO: 2335 - DNA, 25 bp, Homo sapien
tgtcgtggggtctgttttaaacttc

SEQ ID NO: 2336 - DNA, 25 bp, Homo sapien
tgtcgtggggtcagttttaaacttc

SEQ ID NO: 2337 - DNA, 25 bp, Homo sapien
agttaagatgatgttttacaactcc

SEQ ID NO: 2338 - DNA, 25 bp, Homo sapien
agttaagatgatcttttacaactcc

SEQ ID NO: 2339 - DNA, 25 bp, Homo sapien
aaagtttgtacttggtttcacttcc

SEQ ID NO: 2340 - DNA, 25 bp, Homo sapien
aaagtttgtactaggtttcacttcc

SEQ ID NO: 2341 - DNA, 25 bp, Homo sapien
gtgggtgtcgtcgacggtccttttc

SEQ ID NO: 2342 - DNA, 25 bp, Homo sapien
gtgggtgtcgtccacggtccttttc

SEQ ID NO: 2343 - DNA, 25 bp, Homo sapien
ggactcgtgaacgtctccttctgtc

SEQ ID NO: 2344 - DNA, 25 bp, Homo sapien
ggactcgtgaacctctccttctgtc

SEQ ID NO: 2345 - DNA, 25 bp, Homo sapien
taggaatacgaagtccctctcttct

SEQ ID NO: 2346 - DNA, 25 bp, Homo sapien
taggaatacgaactccctctcttct

SEQ ID NO: 2347 - DNA, 25 bp, Homo sapien
gtgtaaatagacaatcaggaccttt

SEQ ID NO: 2348 - DNA, 25 bp, Homo sapien
gtgtaaatagactatcaggaccttt

SEQ ID NO: 2349 - DNA, 25 bp, Homo sapien
cacacataagatttcagtgaccttt

SEQ ID NO: 2350 - DNA, 25 bp, Homo sapien
cacacataagatatcagtgaccttt

SEQ ID NO: 2351 - DNA, 25 bp, Homo sapien
ggacggcaagggacagttacaactt

SEQ ID NO: 2352 - DNA, 25 bp, Homo sapien
ggacggcaagggtcagttacaactt

SEQ ID NO: 2353 - DNA, 25 bp, Homo sapien
tctaaaaagtgatcaggtcaagtct

SEQ ID NO: 2354 - DNA, 25 bp, Homo sapien
tctaaaaagtgaacaggtcaagtct

SEQ ID NO: 2355 - DNA, 25 bp, Homo sapien
ttacgaatgacgtcaactcctaagg

SEQ ID NO: 2356 - DNA, 25 bp, Homo sapien
ttacgaatgacgacaactcctaagg

SEQ ID NO: 2357 - DNA, 25 bp, Homo sapien
acaacgtcttagaatgtcctgatgt

SEQ ID NO: 2358 - DNA, 25 bp, Homo sapien
acaacgtcttagtatgtcctgatgt

SEQ ID NO: 2359 - DNA, 25 bp, Homo sapien
aaaccacccgtcttctttggaccgt

SEQ ID NO: 2360 - DNA, 25 bp, Homo sapien
aaaccacccgtcatctttggaccgt

SEQ ID NO: 2361 - DNA, 25 bp, Homo sapien
ggaacaaccagaaatgtctttctgg

SEQ ID NO: 2362 - DNA, 25 bp, Homo sapien
ggaacaaccagatatgtctttctgg

SEQ ID NO: 2363 - DNA, 25 bp, Homo sapien
aacgaaaccaggttttctcatctcg

SEQ ID NO: 2364 - DNA, 25 bp, Homo sapien
aacgaaaccaggatttctcatctcg

SEQ ID NO: 2365 - DNA, 25 bp, Homo sapien
tccaatagatctggttttcggattt

SEQ ID NO: 2366 - DNA, 25 bp, Homo sapien
tccaatagatctcgttttcggattt

SEQ ID NO: 2367 - DNA, 25 bp, Homo sapien
tacactcgtctgtctgtccctctct

SEQ ID NO: 2368 - DNA, 25 bp, Homo sapien
tacactcgtctgactgtccctctct

SEQ ID NO: 2369 - DNA, 25 bp, Homo sapien
taggtacgtacaaactagaaatacc

SEQ ID NO: 2370 - DNA, 25 bp, Homo sapien
taggtacgtacatactagaaatacc

SEQ ID NO: 2371 - DNA, 25 bp, Homo sapien
ccttgtcgcccttcatgagcgacgt

SEQ ID NO: 2372 - DNA, 25 bp, Homo sapien
ccttgtcgccctacatgagcgacgt

SEQ ID NO: 2373 - DNA, 25 bp, Homo sapien
ctgactccctcgaacacgttagagg

SEQ ID NO: 2374 - DNA, 25 bp, Homo sapien
ctgactccctcgtacacgttagagg

SEQ ID NO: 2375 - DNA, 25 bp, Homo sapien
tccgacgaccctgatagacccttaa

SEQ ID NO: 2376 - DNA, 25 bp, Homo sapien
tccgacgaccctcatagacccttaa

SEQ ID NO: 2377 - DNA, 25 bp, Homo sapien
gatccaaccgcaagtactaagttca

SEQ ID NO: 2378 - DNA, 25 bp, Homo sapien
gatccaaccgcatgtactaagttca

SEQ ID NO: 2379 - DNA, 25 bp, Homo sapien
ggtcgccggatccaagataacttcc

SEQ ID NO: 2380 - DNA, 25 bp, Homo sapien
ggtcgccggatcgaagataacttcc

SEQ ID NO: 2381 - DNA, 25 bp, Homo sapien
tcgccgactccttcggaaatgacgc

SEQ ID NO: 2382 - DNA, 25 bp, Homo sapien
tcgccgactcctacggaaatgacgc

SEQ ID NO: 2383 - DNA, 25 bp, Homo sapien
cttattgtcctggaagacgttaccg

SEQ ID NO: 2384 - DNA, 25 bp, Homo sapien
cttattgtcctgcaagacgttaccg

SEQ ID NO: 2385 - DNA, 25 bp, Homo sapien
cctttagtccagttaaagacgtaca

SEQ ID NO: 2386 - DNA, 25 bp, Homo sapien
cctttagtccagataaagacgtaca

SEQ ID NO: 2387 - DNA, 25 bp, Homo sapien
acgtctactggaacatataccggaa

SEQ ID NO: 2388 - DNA, 25 bp, Homo sapien
acgtctactggatcatataccggaa

SEQ ID NO: 2389 - DNA, 25 bp, Homo sapien
agaaaggagtcgtcgacctaacgac

SEQ ID NO: 2390 - DNA, 25 bp, Homo sapien
agaaaggagtcgacgacctaacgac

SEQ ID NO: 2391 - DNA, 25 bp, Homo sapien
cagacacttggtaaacaacaacgtc

SEQ ID NO: 2392 - DNA, 25 bp, Homo sapien
cagacacttggttaacaacaacgtc

SEQ ID NO: 2393 - DNA, 25 bp, Homo sapien
ctacctccgtcttgcaagagtctgt

SEQ ID NO: 2394 - DNA, 25 bp, Homo sapien
ctacctccgtctagcaagagtctgt

SEQ ID NO: 2395 - DNA, 25 bp, Homo sapien
cgggaccttttcgtcaaacttacgt

SEQ ID NO: 2396 - DNA, 25 bp, Homo sapien
cgggaccttttcctcaaacttacgt

SEQ ID NO: 2397 - DNA, 25 bp, Homo sapien
gcgtacttcttgtcgaccctctact

SEQ ID NO: 2398 - DNA, 25 bp, Homo sapien
gcgtacttcttgacgaccctctact

SEQ ID NO: 2399 - DNA, 25 bp, Homo sapien
gtctacggtttgaacgactcatcct

SEQ ID NO: 2400 - DNA, 25 bp, Homo sapien
gtctacggtttgtacgactcatcct

SEQ ID NO: 2401 - DNA, 25 bp, Homo sapien
caatcgacggttgttcctgtaccac

SEQ ID NO: 2402 - DNA, 25 bp, Homo sapien
caatcgacggttcttcctgtaccac

SEQ ID NO: 2403 - DNA, 25 bp, Homo sapien
tactggggttactcgtcccgccgac

SEQ ID NO: 2404 - DNA, 25 bp, Homo sapien
tactggggttacacgtcccgccgac

SEQ ID NO: 2405 - DNA, 25 bp, Homo sapien
agtaggctttcgacgtcgtctcccc

SEQ ID NO: 2406 - DNA, 25 bp, Homo sapien
agtaggctttcgtcgtcgtctcccc

SEQ ID NO: 2407 - DNA, 25 bp, Homo sapien
cctaggtgtttcgtttgtcttcacc

SEQ ID NO: 2408 - DNA, 25 bp, Homo sapien
cctaggtgtttcctttgtcttcacc

SEQ ID NO: 2409 - DNA, 25 bp, Homo sapien
ccgtggtttttctccgctaccgcgt

SEQ ID NO: 2410 - DNA, 25 bp, Homo sapien
ccgtggtttttcaccgctaccgcgt

SEQ ID NO: 2411 - DNA, 25 bp, Homo sapien
ggacgttcttccaaccctaagtcgt

SEQ ID NO: 2412 - DNA, 25 bp, Homo sapien
ggacgttcttcctaccctaagtcgt

SEQ ID NO: 2413 - DNA, 25 bp, Homo sapien
atacatgtatggtaccgtcacatac

SEQ ID NO: 2414 - DNA, 25 bp, Homo sapien
atacatgtatggaaccgtcacatac

SEQ ID NO: 2415 - DNA, 25 bp, Homo sapien
ctaaaggttgacatcctacacgccg

SEQ ID NO: 2416 - DNA, 25 bp, Homo sapien
ctaaaggttgacttcctacacgccg

SEQ ID NO: 2417 - DNA, 25 bp, Homo sapien
aacgtatacgtgacccggagtcgtc

SEQ ID NO: 2418 - DNA, 25 bp, Homo sapien
aacgtatacgtgtcccggagtcgtc

SEQ ID NO: 2419 - DNA, 25 bp, Homo sapien
agggaatctacttctgagcgggtgc

SEQ ID NO: 2420 - DNA, 25 bp, Homo sapien
agggaatctactactgagcgggtgc

SEQ ID NO: 2421 - DNA, 25 bp, Homo sapien
agatatttgtagagacccgtgtact

SEQ ID NO: 2422 - DNA, 25 bp, Homo sapien
agatatttgtagtgacccgtgtact

SEQ ID NO: 2423 - DNA, 25 bp, Homo sapien
atggatttcatgtcggacacgtgat

SEQ ID NO: 2424 - DNA, 25 bp, Homo sapien
atggatttcatgacggacacgtgat

SEQ ID NO: 2425 - DNA, 25 bp, Homo sapien
agactaactcaaacgagacctcgtc

SEQ ID NO: 2426 - DNA, 25 bp, Homo sapien
agactaactcaatcgagacctcgtc

SEQ ID NO: 2427 - DNA, 25 bp, Homo sapien
ctaaagagtcaggtggacactcgta

SEQ ID NO: 2428 - DNA, 25 bp, Homo sapien
ctaaagagtcagctggacactcgta

SEQ ID NO: 2429 - DNA, 25 bp, Homo sapien
gagggtgcaccctctggactatgag

SEQ ID NO: 2430 - DNA, 25 bp, Homo sapien
gagggtgcacccactggactatgag

SEQ ID NO: 2431 - DNA, 25 bp, Homo sapien
ggtagtgcccccaatatactaggtc

SEQ ID NO: 2432 - DNA, 25 bp, Homo sapien
ggtagtgccccctatatactaggtc

SEQ ID NO: 2433 - DNA, 25 bp, Homo sapien
gcgtcgcccgtagactacaagtgtg

SEQ ID NO: 2434 - DNA, 25 bp, Homo sapien
gcgtcgcccgtacactacaagtgtg

SEQ ID NO: 2435 - DNA, 25 bp, Homo sapien
tcgtcagaagcgacacgacagattg

SEQ ID NO: 2436 - DNA, 25 bp, Homo sapien
tcgtcagaagcgtcacgacagattg

SEQ ID NO: 2437 - DNA, 25 bp, Homo sapien
tgcacgacggcgtcgcggaccttcg

SEQ ID NO: 2438 - DNA, 25 bp, Homo sapien
tgcacgacggcgacgcggaccttcg

SEQ ID NO: 2439 - DNA, 25 bp, Homo sapien
aagcacgccctcagagtaaacgttc

SEQ ID NO: 2440 - DNA, 25 bp, Homo sapien
aagcacgccctctgagtaaacgttc

SEQ ID NO: 2441 - DNA, 25 bp, Homo sapien
cgacttacgtcaggatacgtcagtt

SEQ ID NO: 2442 - DNA, 25 bp, Homo sapien
cgacttacgtcacgatacgtcagtt

SEQ ID NO: 2443 - DNA, 25 bp, Homo sapien
ttgtaagtttgtcagagacaccttt

SEQ ID NO: 2444 - DNA, 25 bp, Homo sapien
ttgtaagtttgtgagagacaccttt

SEQ ID NO: 2445 - DNA, 25 bp, Homo sapien
cgcttgtatttcgagatgatcgatt

SEQ ID NO: 2446 - DNA, 25 bp, Homo sapien
cgcttgtatttccagatgatcgatt

SEQ ID NO: 2447 - DNA, 25 bp, Homo sapien
atctcagtttcgaaactgtatgttt

SEQ ID NO: 2448 - DNA, 25 bp, Homo sapien
atctcagtttcgtaactgtatgttt

SEQ ID NO: 2449 - DNA, 25 bp, Homo sapien
ggcccgtttccttatcacgtctgtc

SEQ ID NO: 2450 - DNA, 25 bp, Homo sapien
ggcccgtttcctaatcacgtctgtc

SEQ ID NO: 2451 - DNA, 25 bp, Homo sapien
gacccttgtccgacgacatctactt

SEQ ID NO: 2452 - DNA, 25 bp, Homo sapien
gacccttgtccgtcgacatctactt

SEQ ID NO: 2453 - DNA, 25 bp, Homo sapien
aacccgactgtgaccaatcagtact

SEQ ID NO: 2454 - DNA, 25 bp, Homo sapien
aacccgactgtgtccaatcagtact

SEQ ID NO: 2455 - DNA, 25 bp, Homo sapien
caggtcacacaagtcaaatacagtt

SEQ ID NO: 2456 - DNA, 25 bp, Homo sapien
caggtcacacaactcaaatacagtt

SEQ ID NO: 2457 - DNA, 25 bp, Homo sapien
tagacgaatgtcaggaaacgtttct

SEQ ID NO: 2458 - DNA, 25 bp, Homo sapien
tagacgaatgtctggaaacgtttct

SEQ ID NO: 2459 - DNA, 25 bp, Homo sapien
agtataatcgcctgactaagtcttt

SEQ ID NO: 2460 - DNA, 25 bp, Homo sapien
agtataatcgccagactaagtcttt

SEQ ID NO: 2461 - DNA, 25 bp, Homo sapien
acagagtgacgcaacaaattccgag

SEQ ID NO: 2462 - DNA, 25 bp, Homo sapien
acagagtgacgctacaaattccgag

SEQ ID NO: 2463 - DNA, 25 bp, Homo sapien
acacgccagaccaaaagtctgaccg

SEQ ID NO: 2464 - DNA, 25 bp, Homo sapien
acacgccagacctaaagtctgaccg

SEQ ID NO: 2465 - DNA, 25 bp, Homo sapien
caaaaccagcaaaggcacacacacg

SEQ ID NO: 2466 - DNA, 25 bp, Homo sapien
caaaaccagcaatggcacacacacg

SEQ ID NO: 2467 - DNA, 25 bp, Homo sapien
taaacgtgagaaacgtgaacgtcct

SEQ ID NO: 2468 - DNA, 25 bp, Homo sapien
taaacgtgagaatcgtgaacgtcct

SEQ ID NO: 2469 - DNA, 25 bp, Homo sapien
gcagtagtctaggagccgtttattg

SEQ ID NO: 2470 - DNA, 25 bp, Homo sapien
gcagtagtctagcagccgtttattg

SEQ ID NO: 2471 - DNA, 25 bp, Homo sapien
acgagagtctacaattccaatcgtt

SEQ ID NO: 2472 - DNA, 25 bp, Homo sapien
acgagagtctactattccaatcgtt

SEQ ID NO: 2473 - DNA, 25 bp, Homo sapien
ggaagggatccgttgtacagttctt

SEQ ID NO: 2474 - DNA, 25 bp, Homo sapien
ggaagggatccgatgtacagttctt

SEQ ID NO: 2475 - DNA, 25 bp, Homo sapien
aaacgcaggcctcatcgcaggtcgg

SEQ ID NO: 2476 - DNA, 25 bp, Homo sapien
aaacgcaggcctgatcgcaggtcgg

SEQ ID NO: 2477 - DNA, 25 bp, Homo sapien
tcagggcggtcctggtcccatccgt

SEQ ID NO: 2478 - DNA, 25 bp, Homo sapien
tcagggcggtccaggtcccatccgt

SEQ ID NO: 2479 - DNA, 25 bp, Homo sapien
gggtcggtctctcgtactccccagt

SEQ ID NO: 2480 - DNA, 25 bp, Homo sapien
gggtcggtctctggtactccccagt

SEQ ID NO: 2481 - DNA, 25 bp, Homo sapien
aagaaccacgtcgaggtgtcccatg

SEQ ID NO: 2482 - DNA, 25 bp, Homo sapien
aagaaccacgtccaggtgtcccatg

SEQ ID NO: 2483 - DNA, 25 bp, Homo sapien
aaaatgaccgacctggtgtccccct

SEQ ID NO: 2484 - DNA, 25 bp, Homo sapien
aaaatgaccgacgtggtgtccccct

SEQ ID NO: 2485 - DNA, 25 bp, Homo sapien
aacgtcgggattcgtgtcactgtcc

SEQ ID NO: 2486 - DNA, 25 bp, Homo sapien
aacgtcgggattggtgtcactgtcc

SEQ ID NO: 2487 - DNA, 25 bp, Homo sapien
gagacgacactctatcggttcaagc

SEQ ID NO: 2488 - DNA, 25 bp, Homo sapien
gagacgacactcaatcggttcaagc

SEQ ID NO: 2489 - DNA, 25 bp, Homo sapien
gaggaccagccagtgacacccgtcg

SEQ ID NO: 2490 - DNA, 25 bp, Homo sapien
gaggaccagccactgacacccgtcg

SEQ ID NO: 2491 - DNA, 25 bp, Homo sapien
agacactagccacaacagtccgtcg

SEQ ID NO: 2492 - DNA, 25 bp, Homo sapien
agacactagccagaacagtccgtcg

SEQ ID NO: 2493 - DNA, 25 bp, Homo sapien
aggttgtaatacagagacatctccg

SEQ ID NO: 2494 - DNA, 25 bp, Homo sapien
aggttgtaatactgagacatctccg

SEQ ID NO: 2495 - DNA, 25 bp, Homo sapien
gggttgtaaactcattatactctct

SEQ ID NO: 2496 - DNA, 25 bp, Homo sapien
gggttgtaaactgattatactctct

SEQ ID NO: 2497 - DNA, 25 bp, Homo sapien
ggacggtggtgacacgaaccgactc

SEQ ID NO: 2498 - DNA, 25 bp, Homo sapien
ggacggtggtgagacgaaccgactc

SEQ ID NO: 2499 - DNA, 25 bp, Homo sapien
ttacgaccgctacgtggacgacgcg

SEQ ID NO: 2500 - DNA, 25 bp, Homo sapien
ttacgaccgctaggtggacgacgcg

SEQ ID NO: 2501 - DNA, 25 bp, Homo sapien
caacgacctagacgacaaacttcgc

SEQ ID NO: 2502 - DNA, 25 bp, Homo sapien
caacgacctagaggacaaacttcgc

SEQ ID NO: 2503 - DNA, 25 bp, Homo sapien
gtgtagtcatacttgtaagacaaac

SEQ ID NO: 2504 - DNA, 25 bp, Homo sapien
gtgtagtcatacatgtaagacaaac

SEQ ID NO: 2505 - DNA, 25 bp, Homo sapien
gttgtaaaggttgacgtacacgatc

SEQ ID NO: 2506 - DNA, 25 bp, Homo sapien
gttgtaaaggttcacgtacacgatc

SEQ ID NO: 2507 - DNA, 25 bp, Homo sapien
gtagttctttcagttagcacacgtc

SEQ ID NO: 2508 - DNA, 25 bp, Homo sapien
gtagttctttcacttagcacacgtc

SEQ ID NO: 2509 - DNA, 25 bp, Homo sapien
tctacaggtgcagtgagtgacagtc

SEQ ID NO: 2510 - DNA, 25 bp, Homo sapien
tctacaggtgcactgagtgacagtc

SEQ ID NO: 2511 - DNA, 25 bp, Homo sapien
gtgttacatgtcaattcacgttttc

SEQ ID NO: 2512 - DNA, 25 bp, Homo sapien
gtgttacatgtctattcacgttttc

SEQ ID NO: 2513 - DNA, 25 bp, Homo sapien
ggaaatcctctgtaacgatacttct

SEQ ID NO: 2514 - DNA, 25 bp, Homo sapien
ggaaatcctctgaaacgatacttct

SEQ ID NO: 2515 - DNA, 25 bp, Homo sapien
aagacgtccacgaaaactcccacgt

SEQ ID NO: 2516 - DNA, 25 bp, Homo sapien
aagacgtccacgtaaactcccacgt

SEQ ID NO: 2517 - DNA, 25 bp, Homo sapien
acgcgaccacgaggagatcgacccg

SEQ ID NO: 2518 - DNA, 25 bp, Homo sapien
acgcgaccacgacgagatcgacccg

SEQ ID NO: 2519 - DNA, 25 bp, Homo sapien
tcatagacctcagtgtactggtacc

SEQ ID NO: 2520 - DNA, 25 bp, Homo sapien
tcatagacctcactgtactggtacc

SEQ ID NO: 2521 - DNA, 25 bp, Homo sapien
ttgtcacctcgatactaccggtacc

SEQ ID NO: 2522 - DNA, 25 bp, Homo sapien
ttgtcacctcgaaactaccggtacc

SEQ ID NO: 2523 - DNA, 25 bp, Homo sapien
cgtgtgggtccattcgtccaggtcc

SEQ ID NO: 2524 - DNA, 25 bp, Homo sapien
cgtgtgggtccaatcgtccaggtcc

SEQ ID NO: 2525 - DNA, 25 bp, Homo sapien
ggggtctcaccgtcccagtagtcct

SEQ ID NO: 2526 - DNA, 25 bp, Homo sapien
ggggtctcaccgacccagtagtcct

SEQ ID NO: 2527 - DNA, 25 bp, Homo sapien
gacgttcttccaaccctaagtcgtc

SEQ ID NO: 2528 - DNA, 25 bp, Homo sapien
gacgttcttccatccctaagtcgtc

SEQ ID NO: 2529 - DNA, 25 bp, Homo sapien
gttttatcacacctctctaagtgtg

SEQ ID NO: 2530 - DNA, 25 bp, Homo sapien
gttttatcacacgtctctaagtgtg

SEQ ID NO: 2531 - DNA, 25 bp, Homo sapien
gtaggatcgtcgaaaccaaatcgta

SEQ ID NO: 2532 - DNA, 25 bp, Homo sapien
gtaggatcgtcgtaaccaaatcgta

SEQ ID NO: 2533 - DNA, 25 bp, Homo sapien
gtacctgttttaacgcataaatacg

SEQ ID NO: 2534 - DNA, 25 bp, Homo sapien
gtacctgttttatcgcataaatacg

SEQ ID NO: 2535 - DNA, 25 bp, Homo sapien
ctgtatagtctttacctagtgttaa

SEQ ID NO: 2536 - DNA, 25 bp, Homo sapien
ctgtatagtcttaacctagtgttaa

SEQ ID NO: 2537 - DNA, 25 bp, Homo sapien
gttgtatctcgttatcagtatttac

SEQ ID NO: 2538 - DNA, 25 bp, Homo sapien
gttgtatctcgtaatcagtatttac

SEQ ID NO: 2539 - DNA, 25 bp, Homo sapien
gtggtgtgtcttcaagtccaatgtt

SEQ ID NO: 2540 - DNA, 25 bp, Homo sapien
gtggtgtgtcttgaagtccaatgtt

SEQ ID NO: 2541 - DNA, 25 bp, Homo sapien
ggttctacttgtgtctctacacttg

SEQ ID NO: 2542 - DNA, 25 bp, Homo sapien
ggttctacttgtctctctacacttg

SEQ ID NO: 2543 - DNA, 25 bp, Homo sapien
ctctctccgacttagacggaccggt

SEQ ID NO: 2544 - DNA, 25 bp, Homo sapien
ctctctccgactaagacggaccggt

SEQ ID NO: 2545 - DNA, 25 bp, Homo sapien
cgcgttcagcgagaaccactacggt

SEQ ID NO: 2546 - DNA, 25 bp, Homo sapien
cgcgttcagcgacaaccactacggt

SEQ ID NO: 2547 - DNA, 25 bp, Homo sapien
atcgtcgatcagaccctaaacctcg

SEQ ID NO: 2548 - DNA, 25 bp, Homo sapien
atcgtcgatcagtccctaaacctcg

SEQ ID NO: 2549 - DNA, 25 bp, Homo sapien
ggtccgtatgttgtcaaatacgtcg

SEQ ID NO: 2550 - DNA, 25 bp, Homo sapien
ggtccgtatgttctcaaatacgtcg

SEQ ID NO: 2551 - DNA, 25 bp, Homo sapien
aaggtcgaggtctccgtaaagagcg

SEQ ID NO: 2552 - DNA, 25 bp, Homo sapien
aaggtcgaggtcaccgtaaagagcg

SEQ ID NO: 2553 - DNA, 25 bp, Homo sapien
ggaacgagaacgtcctaacgagtgg

SEQ ID NO: 2554 - DNA, 25 bp, Homo sapien
ggaacgagaacgacctaacgagtgg

SEQ ID NO: 2555 - DNA, 25 bp, Homo sapien
ggtacagagaagtcgacaggatacc

SEQ ID NO: 2556 - DNA, 25 bp, Homo sapien
ggtacagagaagacgacaggatacc

SEQ ID NO: 2557 - DNA, 25 bp, Homo sapien
ggtagatgttatcgttactgtttag

SEQ ID NO: 2558 - DNA, 25 bp, Homo sapien
ggtagatgttatggttactgtttag

SEQ ID NO: 2559 - DNA, 25 bp, Homo sapien
gagacgaggattctctcagagtctg

SEQ ID NO: 2560 - DNA, 25 bp, Homo sapien
gagacgaggattgtctcagagtctg

SEQ ID NO: 2561 - DNA, 25 bp, Homo sapien
cagtaacttaggatctactgacccc

SEQ ID NO: 2562 - DNA, 25 bp, Homo sapien
cagtaacttaggttctactgacccc

SEQ ID NO: 2563 - DNA, 25 bp, Homo sapien
atcctcagtactcttgacgtcttcg

SEQ ID NO: 2564 - DNA, 25 bp, Homo sapien
atcctcagtactgttgacgtcttcg

SEQ ID NO: 2565 - DNA, 25 bp, Homo sapien
ggaccctgtatcataagtcgtcttg

SEQ ID NO: 2566 - DNA, 25 bp, Homo sapien
ggaccctgtatcttaagtcgtcttg

SEQ ID NO: 2567 - DNA, 25 bp, Homo sapien
ttcgtccttcttgacgaagtctttg

SEQ ID NO: 2568 - DNA, 25 bp, Homo sapien
ttcgtccttcttcacgaagtctttg

SEQ ID NO: 2569 - DNA, 25 bp, Homo sapien
cttctttgtgtccttgacagtcgta

SEQ ID NO: 2570 - DNA, 25 bp, Homo sapien
cttctttgtgtcgttgacagtcgta

SEQ ID NO: 2571 - DNA, 25 bp, Homo sapien
acgacttcgtgttctgggctcccca

SEQ ID NO: 2572 - DNA, 25 bp, Homo sapien
acgacttcgtgtactgggctcccca

SEQ ID NO: 2573 - DNA, 25 bp, Homo sapien
aaggaatgtccgagagggtccccgt

SEQ ID NO: 2574 - DNA, 25 bp, Homo sapien
aaggaatgtccgtgagggtccccgt

SEQ ID NO: 2575 - DNA, 25 bp, Homo sapien
atgcttactccgagggcagacacct

SEQ ID NO: 2576 - DNA, 25 bp, Homo sapien
atgcttactccgtgggcagacacct

SEQ ID NO: 2577 - DNA, 25 bp, Homo sapien
gcgacgtccaccaggaggaaccgct

SEQ ID NO: 2578 - DNA, 25 bp, Homo sapien
gcgacgtccacctggaggaaccgct

SEQ ID NO: 2579 - DNA, 25 bp, Homo sapien
tacgtgttccgaaggagagagctcc

SEQ ID NO: 2580 - DNA, 25 bp, Homo sapien
tacgtgttccgatggagagagctcc

SEQ ID NO: 2581 - DNA, 25 bp, Homo sapien
tgatttacaccgttgacacgtaacc

SEQ ID NO: 2582 - DNA, 25 bp, Homo sapien
tgatttacaccgatgacacgtaacc

SEQ ID NO: 2583 - DNA, 25 bp, Homo sapien
ttttcactttctcgactgaaggaac

SEQ ID NO: 2584 - DNA, 25 bp, Homo sapien
ttttcactttctggactgaaggaac

SEQ ID NO: 2585 - DNA, 25 bp, Homo sapien
ttcttttcatctaacactgacattg

SEQ ID NO: 2586 - DNA, 25 bp, Homo sapien
ttcttttcatcttacactgacattg

SEQ ID NO: 2587 - DNA, 25 bp, Homo sapien
atcgagtcagtcactctgcaagtcg

SEQ ID NO: 2588 - DNA, 25 bp, Homo sapien
atcgagtcagtctctctgcaagtcg

SEQ ID NO: 2589 - DNA, 25 bp, Homo sapien
acctttcactgtctgtgacgaacac

SEQ ID NO: 2590 - DNA, 25 bp, Homo sapien
acctttcactgtgtgtgacgaacac

SEQ ID NO: 2591 - DNA, 25 bp, Homo sapien
ccccctgtgtcctgtcgggaagaca

SEQ ID NO: 2592 - DNA, 25 bp, Homo sapien
ccccctgtgtccagtcgggaagaca

SEQ ID NO: 2593 - DNA, 25 bp, Homo sapien
cacagagactcgtgttatcaagaag

SEQ ID NO: 2594 - DNA, 25 bp, Homo sapien
cacagagactcgagttatcaagaag

SEQ ID NO: 2595 - DNA, 25 bp, Homo sapien
acgaaagtgaacgatacgtggacta

SEQ ID NO: 2596 - DNA, 25 bp, Homo sapien
acgaaagtgaaccatacgtggacta

SEQ ID NO: 2597 - DNA, 25 bp, Homo sapien
cgatagacgtctaactggtctgaaa

SEQ ID NO: 2598 - DNA, 25 bp, Homo sapien
cgatagacgtcttactggtctgaaa

SEQ ID NO: 2599 - DNA, 25 bp, Homo sapien
aagatgtgatcgagagttagacacc

SEQ ID NO: 2600 - DNA, 25 bp, Homo sapien
aagatgtgatcgtgagttagacacc

SEQ ID NO: 2601 - DNA, 25 bp, Homo sapien
cagactgtgaacttgactcggaaag

SEQ ID NO: 2602 - DNA, 25 bp, Homo sapien
cagactgtgaacatgactcggaaag

SEQ ID NO: 2603 - DNA, 25 bp, Homo sapien
gtgacacggaccttgaccgagtgaa

SEQ ID NO: 2604 - DNA, 25 bp, Homo sapien
gtgacacggaccatgaccgagtgaa

SEQ ID NO: 2605 - DNA, 25 bp, Homo sapien
aaaagaggcactagtactagaagtc

SEQ ID NO: 2606 - DNA, 25 bp, Homo sapien
aaaagaggcacttgtactagaagtc

SEQ ID NO: 2607 - DNA, 25 bp, Homo sapien
gaataatgtattctcggagaaacac

SEQ ID NO: 2608 - DNA, 25 bp, Homo sapien
gaataatgtattgtcggagaaacac

SEQ ID NO: 2609 - DNA, 25 bp, Homo sapien
ggttaatgttctgtttatcacgtcc

SEQ ID NO: 2610 - DNA, 25 bp, Homo sapien
ggttaatgttctctttatcacgtcc

SEQ ID NO: 2611 - DNA, 25 bp, Homo sapien
tatcgctggtaactctaaactagcc

SEQ ID NO: 2612 - DNA, 25 bp, Homo sapien
tatcgctggtaagtctaaactagcc

SEQ ID NO: 2613 - DNA, 25 bp, Homo sapien
ttcactagtgtaatttctggactcc

SEQ ID NO: 2614 - DNA, 25 bp, Homo sapien
ttcactagtgtattttctggactcc

SEQ ID NO: 2615 - DNA, 25 bp, Homo sapien
gacaccgttaggtactccaccttcg

SEQ ID NO: 2616 - DNA, 25 bp, Homo sapien
gacaccgttaggaactccaccttcg

SEQ ID NO: 2617 - DNA, 25 bp, Homo sapien
acgggatacggtaattacgacctga

SEQ ID NO: 2618 - DNA, 25 bp, Homo sapien
acgggatacggttattacgacctga

SEQ ID NO: 2619 - DNA, 25 bp, Homo sapien
cacgggtaacagtcacggtaccata

SEQ ID NO: 2620 - DNA, 25 bp, Homo sapien
cacgggtaacagacacggtaccata

SEQ ID NO: 2621 - DNA, 25 bp, Homo sapien
atgtatacacagaccggtatatata

SEQ ID NO: 2622 - DNA, 25 bp, Homo sapien
atgtatacacagtccggtatatata

SEQ ID NO: 2623 - DNA, 25 bp, Homo sapien
cagtattaccactctagtgtttatg

SEQ ID NO: 2624 - DNA, 25 bp, Homo sapien
cagtattaccacactagtgtttatg

SEQ ID NO: 2625 - DNA, 25 bp, Homo sapien
tgtccacttccatgacttctagtcg

SEQ ID NO: 2626 - DNA, 25 bp, Homo sapien
tgtccacttccaagacttctagtcg

SEQ ID NO: 2627 - DNA, 25 bp, Homo sapien
agtgtgaactctccaatagaacggg

SEQ ID NO: 2628 - DNA, 25 bp, Homo sapien
agtgtgaactctgcaatagaacggg

SEQ ID NO: 2629 - DNA, 25 bp, Homo sapien
tgttaagtatttattcacacgagac

SEQ ID NO: 2630 - DNA, 25 bp, Homo sapien
tgttaagtattttttcacacgagac

SEQ ID NO: 2631 - DNA, 25 bp, Homo sapien
tagtattatctttggtcacgacacc

SEQ ID NO: 2632 - DNA, 25 bp, Homo sapien
tagtattatcttaggtcacgacacc

SEQ ID NO: 2633 - DNA, 25 bp, Homo sapien
aaatcactcgtgagtaccacgaaag

SEQ ID NO: 2634 - DNA, 25 bp, Homo sapien
aaatcactcgtgtgtaccacgaaag

SEQ ID NO: 2635 - DNA, 25 bp, Homo sapien
aaatgtaccttggacgaccgtaacc

SEQ ID NO: 2636 - DNA, 25 bp, Homo sapien
aaatgtaccttgcacgaccgtaacc

SEQ ID NO: 2637 - DNA, 25 bp, Homo sapien
ctcgaccttacgaccgagtagaccg

SEQ ID NO: 2638 - DNA, 25 bp, Homo sapien
ctcgaccttacgtccgagtagaccg

SEQ ID NO: 2639 - DNA, 25 bp, Homo sapien
atacctactgtgtacgaacgtaaca

SEQ ID NO: 2640 - DNA, 25 bp, Homo sapien
atacctactgtgaacgaacgtaaca

SEQ ID NO: 2641 - DNA, 25 bp, Homo sapien
taatattcgttgaacgaacaacgat

SEQ ID NO: 2642 - DNA, 25 bp, Homo sapien
taatattcgttgtacgaacaacgat

SEQ ID NO: 2643 - DNA, 25 bp, Homo sapien
atctcgaagtagtacaacaacacgt

SEQ ID NO: 2644 - DNA, 25 bp, Homo sapien
atctcgaagtagaacaacaacacgt

SEQ ID NO: 2645 - DNA, 25 bp, Homo sapien
attattttcggagatcgtatcgact

SEQ ID NO: 2646 - DNA, 25 bp, Homo sapien
attattttcggacatcgtatcgact

SEQ ID NO: 2647 - DNA, 25 bp, Homo sapien
cacaagtgtcttgattttgacagtt

SEQ ID NO: 2648 - DNA, 25 bp, Homo sapien
cacaagtgtcttcattttgacagtt

SEQ ID NO: 2649 - DNA, 25 bp, Homo sapien
tctacgtactgctgtactttcagtt

SEQ ID NO: 2650 - DNA, 25 bp, Homo sapien
tctacgtactgcagtactttcagtt

SEQ ID NO: 2651 - DNA, 25 bp, Homo sapien
aggtcggtacacgactcgtctggtt

SEQ ID NO: 2652 - DNA, 25 bp, Homo sapien
aggtcggtacaccactcgtctggtt

SEQ ID NO: 2653 - DNA, 25 bp, Homo sapien
gtgactcctacactactgccggact

SEQ ID NO: 2654 - DNA, 25 bp, Homo sapien
gtgactcctacagtactgccggact

SEQ ID NO: 2655 - DNA, 25 bp, Homo sapien
gtctccttcgactcgtgccgagacg

SEQ ID NO: 2656 - DNA, 25 bp, Homo sapien
gtctccttcgacacgtgccgagacg

SEQ ID NO: 2657 - DNA, 25 bp, Homo sapien
agtataccttcacctcttcgtatgg

SEQ ID NO: 2658 - DNA, 25 bp, Homo sapien
agtataccttcagctcttcgtatgg

SEQ ID NO: 2659 - DNA, 25 bp, Homo sapien
tttcgttacagacactcgtcttgta

SEQ ID NO: 2660 - DNA, 25 bp, Homo sapien
tttcgttacagagactcgtcttgta

SEQ ID NO: 2661 - DNA, 25 bp, Homo sapien
gtcgtataataactactcgacctag

SEQ ID NO: 2662 - DNA, 25 bp, Homo sapien
gtcgtataataagtactcgacctag

SEQ ID NO: 2663 - DNA, 25 bp, Homo sapien
acagtgtatattaagctctgttcct

SEQ ID NO: 2664 - DNA, 25 bp, Homo sapien
acagtgtatatttagctctgttcct

SEQ ID NO: 2665 - DNA, 25 bp, Homo sapien
gacattacagtttcgtctgtttatt

SEQ ID NO: 2666 - DNA, 25 bp, Homo sapien
gacattacagttacgtctgtttatt

SEQ ID NO: 2667 - DNA, 25 bp, Homo sapien
gacttcctatgttcggtgtccggtg

SEQ ID NO: 2668 - DNA, 25 bp, Homo sapien
gacttcctatgtacggtgtccggtg

SEQ ID NO: 2669 - DNA, 25 bp, Homo sapien
ggggtcgctcccttttatcttttct

SEQ ID NO: 2670 - DNA, 25 bp, Homo sapien
ggggtcgctcccatttatcttttct

SEQ ID NO: 2671 - DNA, 25 bp, Homo sapien
taggtctcccttcagtcgtccaact

SEQ ID NO: 2672 - DNA, 25 bp, Homo sapien
taggtctcccttgagtcgtccaact

SEQ ID NO: 2673 - DNA, 25 bp, Homo sapien
ggtataccgaccagagacatctgcg

SEQ ID NO: 2674 - DNA, 25 bp, Homo sapien
ggtataccgacctgagacatctgcg

SEQ ID NO: 2675 - DNA, 25 bp, Homo sapien
ggtgtcctaactacgacgtctcggg

SEQ ID NO: 2676 - DNA, 25 bp, Homo sapien
ggtgtcctaacttcgacgtctcggg

SEQ ID NO: 2677 - DNA, 25 bp, Homo sapien
tccgtacggctcacaaacacttcag

SEQ ID NO: 2678 - DNA, 25 bp, Homo sapien
tccgtacggctctcaaacacttcag

SEQ ID NO: 2679 - DNA, 25 bp, Homo sapien
aacacggtgcacttccacgcctgga

SEQ ID NO: 2680 - DNA, 25 bp, Homo sapien
aacacggtgcacatccacgcctgga

SEQ ID NO: 2681 - DNA, 25 bp, Homo sapien
accgcaggagcagtataaaccccac

SEQ ID NO: 2682 - DNA, 25 bp, Homo sapien
accgcaggagcactataaaccccac

SEQ ID NO: 2683 - DNA, 25 bp, Homo sapien
ggggagaacgacacgaaacgcgaca

SEQ ID NO: 2684 - DNA, 25 bp, Homo sapien
ggggagaacgactcgaaacgcgaca

SEQ ID NO: 2685 - DNA, 25 bp, Homo sapien
ggggaccacgagtcttaggacgcac

SEQ ID NO: 2686 - DNA, 25 bp, Homo sapien
ggggaccacgagacttaggacgcac

SEQ ID NO: 2687 - DNA, 25 bp, Homo sapien
aaatgactcaagaaggtggactctc

SEQ ID NO: 2688 - DNA, 25 bp, Homo sapien
aaatgactcaagtaggtggactctc

SEQ ID NO: 2689 - DNA, 25 bp, Homo sapien
gtggtactaccgtcggagtaacctc

SEQ ID NO: 2690 - DNA, 25 bp, Homo sapien
gtggtactaccgacggagtaacctc

SEQ ID NO: 2691 - DNA, 25 bp, Homo sapien
gtcctcaccaacagagtagtacctc

SEQ ID NO: 2692 - DNA, 25 bp, Homo sapien
gtcctcaccaactgagtagtacctc

SEQ ID NO: 2693 - DNA, 25 bp, Homo sapien
tggtccgtccctattgtcgtaacct

SEQ ID NO: 2694 - DNA, 25 bp, Homo sapien
tggtccgtcccttttgtcgtaacct

SEQ ID NO: 2695 - DNA, 25 bp, Homo sapien
tcccgacctccctttgtgtgtcaat

SEQ ID NO: 2696 - DNA, 25 bp, Homo sapien
tcccgacctcccattgtgtgtcaat

SEQ ID NO: 2697 - DNA, 25 bp, Homo sapien
tccgacgacccctaacggaggacga

SEQ ID NO: 2698 - DNA, 25 bp, Homo sapien
tccgacgaccccaaacggaggacga

SEQ ID NO: 2699 - DNA, 25 bp, Homo sapien
gccgcgaccccgacgacgcgaagga

SEQ ID NO: 2700 - DNA, 25 bp, Homo sapien
gccgcgaccccgtcgacgcgaagga

SEQ ID NO: 2701 - DNA, 25 bp, Homo sapien
acccgatccgtccagcgtggaagta

SEQ ID NO: 2702 - DNA, 25 bp, Homo sapien
acccgatccgtcgagcgtggaagta

SEQ ID NO: 2703 - DNA, 25 bp, Homo sapien
cgaccggtctcctcgataagacgaa

SEQ ID NO: 2704 - DNA, 25 bp, Homo sapien
cgaccggtctccacgataagacgaa

SEQ ID NO: 2705 - DNA, 25 bp, Homo sapien
actcgtgtaatgttttcagtcgaac

SEQ ID NO: 2706 - DNA, 25 bp, Homo sapien
actcgtgtaatgatttcagtcgaac

SEQ ID NO: 2707 - DNA, 25 bp, Homo sapien
aggtattctgtcttgtcccatcgcc

SEQ ID NO: 2708 - DNA, 25 bp, Homo sapien
aggtattctgtcatgtcccatcgcc

SEQ ID NO: 2709 - DNA, 25 bp, Homo sapien
attctagtcatgtacacgacttccg

SEQ ID NO: 2710 - DNA, 25 bp, Homo sapien
attctagtcatgaacacgacttccg

SEQ ID NO: 2711 - DNA, 25 bp, Homo sapien
acttctgactattggtcgacttccg

SEQ ID NO: 2712 - DNA, 25 bp, Homo sapien
acttctgactataggtcgacttccg

SEQ ID NO: 2713 - DNA, 25 bp, Homo sapien
agactgatcggatcagaaacatttc

SEQ ID NO: 2714 - DNA, 25 bp, Homo sapien
agactgatcggaacagaaacatttc

SEQ ID NO: 2715 - DNA, 25 bp, Homo sapien
cggggtgtcgaagaagagtttctct

SEQ ID NO: 2716 - DNA, 25 bp, Homo sapien
cggggtgtcgaacaagagtttctct

SEQ ID NO: 2717 - DNA, 25 bp, Homo sapien
atgtctctactaaatgtgctacgtt

SEQ ID NO: 2718 - DNA, 25 bp, Homo sapien
atgtctctactatatgtgctacgtt

SEQ ID NO: 2719 - DNA, 25 bp, Homo sapien
gatttttccgtcaatttcgaactgt

SEQ ID NO: 2720 - DNA, 25 bp, Homo sapien
gatttttccgtctatttcgaactgt

SEQ ID NO: 2721 - DNA, 25 bp, Homo sapien
tttattaagttatgtttcaactcgt

SEQ ID NO: 2722 - DNA, 25 bp, Homo sapien
tttattaagttaagtttcaactcgt

SEQ ID NO: 2723 - DNA, 25 bp, Homo sapien
gtttatggctcagagaccctactgt

SEQ ID NO: 2724 - DNA, 25 bp, Homo sapien
gtttatggctcacagaccctactgt

SEQ ID NO: 2725 - DNA, 25 bp, Homo sapien
gtcccgtagtcgaagacgaaatacc

SEQ ID NO: 2726 - DNA, 25 bp, Homo sapien
gtcccgtagtcgtagacgaaatacc

SEQ ID NO: 2727 - DNA, 25 bp, Homo sapien
cgacgtgacgtcagtaaagacgtta

SEQ ID NO: 2728 - DNA, 25 bp, Homo sapien
cgacgtgacgtctgtaaagacgtta

SEQ ID NO: 2729 - DNA, 25 bp, Homo sapien
cctcggtcgtacgtaaccacggtag

SEQ ID NO: 2730 - DNA, 25 bp, Homo sapien
cctcggtcgtacctaaccacggtag

SEQ ID NO: 2731 - DNA, 25 bp, Homo sapien
agtctaccatcgatcaagtcccgac

SEQ ID NO: 2732 - DNA, 25 bp, Homo sapien
agtctaccatcgttcaagtcccgac

SEQ ID NO: 2733 - DNA, 25 bp, Homo sapien
gttctccctttcgtgtactgtctct

SEQ ID NO: 2734 - DNA, 25 bp, Homo sapien
gttctccctttcctgtactgtctct

SEQ ID NO: 2735 - DNA, 25 bp, Homo sapien
ggttcctgttctaccggtcacctct

SEQ ID NO: 2736 - DNA, 25 bp, Homo sapien
ggttcctgttcttccggtcacctct

SEQ ID NO: 2737 - DNA, 25 bp, Homo sapien
tccgttttggtcacacgatccgtcc

SEQ ID NO: 2738 - DNA, 25 bp, Homo sapien
tccgttttggtctcacgatccgtcc

SEQ ID NO: 2739 - DNA, 25 bp, Homo sapien
tccttttgtggactactgttcgtga

SEQ ID NO: 2740 - DNA, 25 bp, Homo sapien
tccttttgtggagtactgttcgtga

SEQ ID NO: 2741 - DNA, 25 bp, Homo sapien
tattggtttgtcgaccttttcgtac

SEQ ID NO: 2742 - DNA, 25 bp, Homo sapien
tattggtttgtccaccttttcgtac

SEQ ID NO: 2743 - DNA, 25 bp, Homo sapien
cgagtacgtagtgtcgcttctctta

SEQ ID NO: 2744 - DNA, 25 bp, Homo sapien
cgagtacgtagtctcgcttctctta

SEQ ID NO: 2745 - DNA, 25 bp, Homo sapien
ccgacggtgtatgtcgttcactgta

SEQ ID NO: 2746 - DNA, 25 bp, Homo sapien
ccgacggtgtatctcgttcactgta

SEQ ID NO: 2747 - DNA, 25 bp, Homo sapien
aacgtgtactatgtttacttcgtcg

SEQ ID NO: 2748 - DNA, 25 bp, Homo sapien
aacgtgtactatctttacttcgtcg

SEQ ID NO: 2749 - DNA, 25 bp, Homo sapien
ttgggagtacgtagacatctatctt

SEQ ID NO: 2750 - DNA, 25 bp, Homo sapien
ttgggagtacgttgacatctatctt

SEQ ID NO: 2751 - DNA, 25 bp, Homo sapien
tgctcgggcagaagaggttagtcct

SEQ ID NO: 2752 - DNA, 25 bp, Homo sapien
tgctcgggcagatgaggttagtcct

SEQ ID NO: 2753 - DNA, 25 bp, Homo sapien
tttcgtcttcagtggggtagtcacg

SEQ ID NO: 2754 - DNA, 25 bp, Homo sapien
tttcgtcttcagaggggtagtcacg

SEQ ID NO: 2755 - DNA, 25 bp, Homo sapien
tagactgaccggagaccgaactacg

SEQ ID NO: 2756 - DNA, 25 bp, Homo sapien
tagactgaccggtgaccgaactacg

SEQ ID NO: 2757 - DNA, 25 bp, Homo sapien
cgaagggtacctggaaccagtacta

SEQ ID NO: 2758 - DNA, 25 bp, Homo sapien
cgaagggtacctcgaaccagtacta

SEQ ID NO: 2759 - DNA, 25 bp, Homo sapien
aagtatggtttttactcgacggtca

SEQ ID NO: 2760 - DNA, 25 bp, Homo sapien
aagtatggttttaactcgacggtca

SEQ ID NO: 2761 - DNA, 25 bp, Homo sapien
aaaggggtgtcctccgtaagtcgac

SEQ ID NO: 2762 - DNA, 25 bp, Homo sapien
aaaggggtgtccaccgtaagtcgac

SEQ ID NO: 2763 - DNA, 25 bp, Homo sapien
aagagcttcgtgtcggtggtcgtac

SEQ ID NO: 2764 - DNA, 25 bp, Homo sapien
aagagcttcgtgacggtggtcgtac

SEQ ID NO: 2765 - DNA, 25 bp, Homo sapien
aaagaagacccgaaaggacatcgtt

SEQ ID NO: 2766 - DNA, 25 bp, Homo sapien
aaagaagacccgtaaggacatcgtt

SEQ ID NO: 2767 - DNA, 25 bp, Homo sapien
ggaaccactacatccgatacttgtt

SEQ ID NO: 2768 - DNA, 25 bp, Homo sapien
ggaaccactacaaccgatacttgtt

SEQ ID NO: 2769 - DNA, 25 bp, Homo sapien
ggtaaaacagacacactacgcttat

SEQ ID NO: 2770 - DNA, 25 bp, Homo sapien
ggtaaaacagactcactacgcttat

SEQ ID NO: 2771 - DNA, 25 bp, Homo sapien
gaatgtactgactttctagttactt

SEQ ID NO: 2772 - DNA, 25 bp, Homo sapien
gaatgtactgacattctagttactt

SEQ ID NO: 2773 - DNA, 25 bp, Homo sapien
cagacagtgtgtttaaacagttcat

SEQ ID NO: 2774 - DNA, 25 bp, Homo sapien
cagacagtgtgtataaacagttcat

SEQ ID NO: 2775 - DNA, 25 bp, Homo sapien
gaaaaagagtggtcttaccgtcttt

SEQ ID NO: 2776 - DNA, 25 bp, Homo sapien
gaaaaagagtggacttaccgtcttt

SEQ ID NO: 2777 - DNA, 25 bp, Homo sapien
aaatgagtgacgtcatactccttgt

SEQ ID NO: 2778 - DNA, 25 bp, Homo sapien
aaatgagtgacgacatactccttgt

SEQ ID NO: 2779 - DNA, 25 bp, Homo sapien
atgtatagtcctggtgtgtaccttg

SEQ ID NO: 2780 - DNA, 25 bp, Homo sapien
atgtatagtcctcgtgtgtaccttg

SEQ ID NO: 2781 - DNA, 25 bp, Homo sapien
tcgtgtgcgtatgtcgtgcctcgtg

SEQ ID NO: 2782 - DNA, 25 bp, Homo sapien
tcgtgtgcgtatctcgtgcctcgtg

SEQ ID NO: 2783 - DNA, 25 bp, Homo sapien
cgcaccaatgcgtttcagaaacctg

SEQ ID NO: 2784 - DNA, 25 bp, Homo sapien
cgcaccaatgcgattcagaaacctg

SEQ ID NO: 2785 - DNA, 25 bp, Homo sapien
gacaacgaatgaattccaaatactg

SEQ ID NO: 2786 - DNA, 25 bp, Homo sapien
gacaacgaatgatttccaaatactg

SEQ ID NO: 2787 - DNA, 25 bp, Homo sapien
acaaactcattgaagaacgtcaccg

SEQ ID NO: 2788 - DNA, 25 bp, Homo sapien
acaaactcattgtagaacgtcaccg

SEQ ID NO: 2789 - DNA, 25 bp, Homo sapien
taacaacggtggttggtgatttacc

SEQ ID NO: 2790 - DNA, 25 bp, Homo sapien
taacaacggtggatggtgatttacc

SEQ ID NO: 2791 - DNA, 25 bp, Homo sapien
cgatattgattgtggttggtctacc

SEQ ID NO: 2792 - DNA, 25 bp, Homo sapien
cgatattgattgaggttggtctacc

SEQ ID NO: 2793 - DNA, 25 bp, Homo sapien
cctccactcgtgaggtctggttgac

SEQ ID NO: 2794 - DNA, 25 bp, Homo sapien
cctccactcgtgtggtctggttgac

SEQ ID NO: 2795 - DNA, 25 bp, Homo sapien
acgtcactgacgatgtccccttagc

SEQ ID NO: 2796 - DNA, 25 bp, Homo sapien
acgtcactgacgttgtccccttagc

SEQ ID NO: 2797 - DNA, 25 bp, Homo sapien
gccgtcgtcgagtttcctcccgtgg

SEQ ID NO: 2798 - DNA, 25 bp, Homo sapien
gccgtcgtcgagattcctcccgtgg

SEQ ID NO: 2799 - DNA, 25 bp, Homo sapien
acacgaaattattcactccgtgtcg

SEQ ID NO: 2800 - DNA, 25 bp, Homo sapien
acacgaaattatacactccgtgtcg

SEQ ID NO: 2801 - DNA, 25 bp, Homo sapien
ggaccgtggtcttcaccaactgacg

SEQ ID NO: 2802 - DNA, 25 bp, Homo sapien
ggaccgtggtctacaccaactgacg

SEQ ID NO: 2803 - DNA, 25 bp, Homo sapien
cgagggccgcgaagtcaaggataat

SEQ ID NO: 2804 - DNA, 25 bp, Homo sapien
cgagggccgcgatgtcaaggataat

SEQ ID NO: 2805 - DNA, 25 bp, Homo sapien
gagggaccgccgtctaaggactcct

SEQ ID NO: 2806 - DNA, 25 bp, Homo sapien
gagggaccgccgactaaggactcct

SEQ ID NO: 2807 - DNA, 25 bp, Homo sapien
agaagataaaaccatacgagatcct

SEQ ID NO: 2808 - DNA, 25 bp, Homo sapien
agaagataaaacgatacgagatcct

SEQ ID NO: 2809 - DNA, 25 bp, Homo sapien
agaacaagaaggacaacgactcgac

SEQ ID NO: 2810 - DNA, 25 bp, Homo sapien
agaacaagaaggtcaacgactcgac

SEQ ID NO: 2811 - DNA, 25 bp, Homo sapien
cagactggaccgagccgacgaccga

SEQ ID NO: 2812 - DNA, 25 bp, Homo sapien
cagactggaccgtgccgacgaccga

SEQ ID NO: 2813 - DNA, 25 bp, Homo sapien
attaagaggaaccaaaagaccgagt

SEQ ID NO: 2814 - DNA, 25 bp, Homo sapien
attaagaggaacgaaaagaccgagt

SEQ ID NO: 2815 - DNA, 25 bp, Homo sapien
ctatagtgatacgaaaaactcgagt

SEQ ID NO: 2816 - DNA, 25 bp, Homo sapien
ctatagtgataccaaaaactcgagt

SEQ ID NO: 2817 - DNA, 25 bp, Homo sapien
ttcgacgacggatttctgtagatca

SEQ ID NO: 2818 - DNA, 25 bp, Homo sapien
ttcgacgacggaattctgtagatca

SEQ ID NO: 2819 - DNA, 25 bp, Homo sapien
tatttgtatcacttatccgaggtcc

SEQ ID NO: 2820 - DNA, 25 bp, Homo sapien
tatttgtatcacatatccgaggtcc

SEQ ID NO: 2821 - DNA, 25 bp, Homo sapien
tgtgtaagttccttattgaggtcac

SEQ ID NO: 2822 - DNA, 25 bp, Homo sapien
tgtgtaagttccatattgaggtcac

SEQ ID NO: 2823 - DNA, 25 bp, Homo sapien
ttcagagtttcaggtgtgcggcgct

SEQ ID NO: 2824 - DNA, 25 bp, Homo sapien
ttcagagtttcacgtgtgcggcgct

SEQ ID NO: 2825 - DNA, 25 bp, Homo sapien
gagagtgtgtcctttccggtctcgt

SEQ ID NO: 2826 - DNA, 25 bp, Homo sapien
gagagtgtgtccattccggtctcgt

SEQ ID NO: 2827 - DNA, 25 bp, Homo sapien
cgcaggatctacatcatctcgccgt

SEQ ID NO: 2828 - DNA, 25 bp, Homo sapien
cgcaggatctacttcatctcgccgt

SEQ ID NO: 2829 - DNA, 25 bp, Homo sapien
ctgtacctttatctacgtccgtccg

SEQ ID NO: 2830 - DNA, 25 bp, Homo sapien
ctgtacctttatgtacgtccgtccg

SEQ ID NO: 2831 - DNA, 25 bp, Homo sapien
ttcaccggttactggttccggtcgt

SEQ ID NO: 2832 - DNA, 25 bp, Homo sapien
ttcaccggttacaggttccggtcgt

SEQ ID NO: 2833 - DNA, 25 bp, Homo sapien
ttcccgtagtatcgacgtccacttc

SEQ ID NO: 2834 - DNA, 25 bp, Homo sapien
ttcccgtagtatggacgtccacttc

SEQ ID NO: 2835 - DNA, 25 bp, Homo sapien
tctccggtgttcgagtaccctacgg

SEQ ID NO: 2836 - DNA, 25 bp, Homo sapien
tctccggtgttccagtaccctacgg

SEQ ID NO: 2837 - DNA, 25 bp, Homo sapien
gtctgaggtatatcctgaccgtcaa

SEQ ID NO: 2838 - DNA, 25 bp, Homo sapien
gtctgaggtataacctgaccgtcaa

SEQ ID NO: 2839 - DNA, 25 bp, Homo sapien
ctagtgtctaagacccagtgtagag

SEQ ID NO: 2840 - DNA, 25 bp, Homo sapien
ctagtgtctaagtcccagtgtagag

SEQ ID NO: 2841 - DNA, 25 bp, Homo sapien
gtacgtctttcgtgtcctgtgacga

SEQ ID NO: 2842 - DNA, 25 bp, Homo sapien
gtacgtctttcgagtcctgtgacga

SEQ ID NO: 2843 - DNA, 25 bp, Homo sapien
aatctactatcttgacgttcttggg

SEQ ID NO: 2844 - DNA, 25 bp, Homo sapien
aatctactatctagacgttcttggg

SEQ ID NO: 2845 - DNA, 25 bp, Homo sapien
caacctccctgttcgggacaaagtg

SEQ ID NO: 2846 - DNA, 25 bp, Homo sapien
caacctccctgtacgggacaaagtg

SEQ ID NO: 2847 - DNA, 25 bp, Homo sapien
acgggtccgaccctagagggaaacc

SEQ ID NO: 2848 - DNA, 25 bp, Homo sapien
acgggtccgaccgtagagggaaacc

SEQ ID NO: 2849 - DNA, 25 bp, Homo sapien
taagtccccgtaattataccagtcc

SEQ ID NO: 2850 - DNA, 25 bp, Homo sapien
taagtccccgtatttataccagtcc

SEQ ID NO: 2851 - DNA, 25 bp, Homo sapien
ctaccgtcgtttgattccagtctac

SEQ ID NO: 2852 - DNA, 25 bp, Homo sapien
ctaccgtcgtttcattccagtctac

SEQ ID NO: 2853 - DNA, 25 bp, Homo sapien
gtgaagtgtcagtcagtgtccttcc

SEQ ID NO: 2854 - DNA, 25 bp, Homo sapien
gtgaagtgtcagacagtgtccttcc

SEQ ID NO: 2855 - DNA, 25 bp, Homo sapien
gtcataggaccgagggtccgatctg

SEQ ID NO: 2856 - DNA, 25 bp, Homo sapien
gtcataggaccgtgggtccgatctg

SEQ ID NO: 2857 - DNA, 25 bp, Homo sapien
tcgtagtaggcttgggacgccatcc

SEQ ID NO: 2858 - DNA, 25 bp, Homo sapien
tcgtagtaggctagggacgccatcc

SEQ ID NO: 2859 - DNA, 25 bp, Homo sapien
tatggacgacggtaggagagacccc

SEQ ID NO: 2860 - DNA, 25 bp, Homo sapien
tatggacgacggaaggagagacccc

SEQ ID NO: 2861 - DNA, 25 bp, Homo sapien
gagacggcaacgacggaggaatctc

SEQ ID NO: 2862 - DNA, 25 bp, Homo sapien
gagacggcaacgtcggaggaatctc

SEQ ID NO: 2863 - DNA, 25 bp, Homo sapien
atccgtcgacgctaaaggaacacct

SEQ ID NO: 2864 - DNA, 25 bp, Homo sapien
atccgtcgacgcaaaaggaacacct

SEQ ID NO: 2865 - DNA, 25 bp, Homo sapien
ctactgaccgaaagtctgagacacc

SEQ ID NO: 2866 - DNA, 25 bp, Homo sapien
ctactgaccgaatgtctgagacacc

SEQ ID NO: 2867 - DNA, 25 bp, Homo sapien
gacccttctcgctatgtgtcgatta

SEQ ID NO: 2868 - DNA, 25 bp, Homo sapien
gacccttctcgcaatgtgtcgatta

SEQ ID NO: 2869 - DNA, 25 bp, Homo sapien
gacacgtattttcaattgtaatccg

SEQ ID NO: 2870 - DNA, 25 bp, Homo sapien
gacacgtattttgaattgtaatccg

SEQ ID NO: 2871 - DNA, 25 bp, Homo sapien
gtcgctctcttatttcttggataac

SEQ ID NO: 2872 - DNA, 25 bp, Homo sapien
gtcgctctcttaattcttggataac

SEQ ID NO: 2873 - DNA, 25 bp, Homo sapien
caggactgagggttctcgctcgaga

SEQ ID NO: 2874 - DNA, 25 bp, Homo sapien
caggactgagggatctcgctcgaga

SEQ ID NO: 2875 - DNA, 25 bp, Homo sapien
aggtgactgagtcatattcctaaga

SEQ ID NO: 2876 - DNA, 25 bp, Homo sapien
aggtgactgagtgatattcctaaga

SEQ ID NO: 2877 - DNA, 25 bp, Homo sapien
taagtctttatctttttctcaggag

SEQ ID NO: 2878 - DNA, 25 bp, Homo sapien
taagtctttatcattttctcaggag

SEQ ID NO: 2879 - DNA, 25 bp, Homo sapien
aagctccatcactagtttgacgaat

SEQ ID NO: 2880 - DNA, 25 bp, Homo sapien
aagctccatcacaagtttgacgaat

SEQ ID NO: 2881 - DNA, 25 bp, Homo sapien
aagcgactacaagacattctgaaca

SEQ ID NO: 2882 - DNA, 25 bp, Homo sapien
aagcgactacaacacattctgaaca

SEQ ID NO: 2883 - DNA, 25 bp, Homo sapien
gggtctcgacggacttgtggttcac

SEQ ID NO: 2884 - DNA, 25 bp, Homo sapien
gggtctcgacggtcttgtggttcac

SEQ ID NO: 2885 - DNA, 25 bp, Homo sapien
gtgtcaccgtcatcgggtcttctcc

SEQ ID NO: 2886 - DNA, 25 bp, Homo sapien
gtgtcaccgtcaacgggtcttctcc

SEQ ID NO: 2887 - DNA, 25 bp, Homo sapien
cgtgctacttcagtgtctcccacta

SEQ ID NO: 2888 - DNA, 25 bp, Homo sapien
cgtgctacttcactgtctcccacta

SEQ ID NO: 2889 - DNA, 25 bp, Homo sapien
ggtaccttccctttcactctacgag

SEQ ID NO: 2890 - DNA, 25 bp, Homo sapien
ggtaccttccctatcactctacgag

SEQ ID NO: 2891 - DNA, 25 bp, Homo sapien
ggacgacaccgtctcagttccgagg

SEQ ID NO: 2892 - DNA, 25 bp, Homo sapien
ggacgacaccgtgtcagttccgagg

SEQ ID NO: 2893 - DNA, 25 bp, Homo sapien
ccagaaccgagtcgagactctgggt

SEQ ID NO: 2894 - DNA, 25 bp, Homo sapien
ccagaaccgagtggagactctgggt

SEQ ID NO: 2895 - DNA, 25 bp, Homo sapien
acagagacggaagagccgtcgtaga

SEQ ID NO: 2896 - DNA, 25 bp, Homo sapien
acagagacggaacagccgtcgtaga

SEQ ID NO: 2897 - DNA, 25 bp, Homo sapien
caacgtgtcacagagactatgtaga

SEQ ID NO: 2898 - DNA, 25 bp, Homo sapien
caacgtgtcacacagactatgtaga

SEQ ID NO: 2899 - DNA, 25 bp, Homo sapien
cactactggacagcacggggtcacg

SEQ ID NO: 2900 - DNA, 25 bp, Homo sapien
cactactggacaccacggggtcacg

SEQ ID NO: 2901 - DNA, 25 bp, Homo sapien
cttaccacgcgacgacgggtcgacg

SEQ ID NO: 2902 - DNA, 25 bp, Homo sapien
cttaccacgcgaggacgggtcgacg

SEQ ID NO: 2903 - DNA, 25 bp, Homo sapien
cactggttttacaagcaccggtgac

SEQ ID NO: 2904 - DNA, 25 bp, Homo sapien
cactggttttactagcaccggtgac

SEQ ID NO: 2905 - DNA, 25 bp, Homo sapien
tggtttaccttagactccgtcgagt

SEQ ID NO: 2906 - DNA, 25 bp, Homo sapien
tggtttaccttacactccgtcgagt

SEQ ID NO: 2907 - DNA, 25 bp, Homo sapien
cgcaggggtccctgtggacccctac

SEQ ID NO: 2908 - DNA, 25 bp, Homo sapien
cgcaggggtcccagtggacccctac

SEQ ID NO: 2909 - DNA, 25 bp, Homo sapien
gtagggaccccgtagaacacgtccc

SEQ ID NO: 2910 - DNA, 25 bp, Homo sapien
gtagggaccccgaagaacacgtccc

SEQ ID NO: 2911 - DNA, 25 bp, Homo sapien
gttggccatccgttgagccttagac

SEQ ID NO: 2912 - DNA, 25 bp, Homo sapien
gttggccatccgatgagccttagac

SEQ ID NO: 2913 - DNA, 25 bp, Homo sapien
caggtcgaaccaaagtccggagtac

SEQ ID NO: 2914 - DNA, 25 bp, Homo sapien
caggtcgaaccatagtccggagtac

SEQ ID NO: 2915 - DNA, 25 bp, Homo sapien
acgagaccgcagacacttccgaata

SEQ ID NO: 2916 - DNA, 25 bp, Homo sapien
acgagaccgcagtcacttccgaata

SEQ ID NO: 2917 - DNA, 25 bp, Homo sapien
acgacatcggtaggatgttgacaca

SEQ ID NO: 2918 - DNA, 25 bp, Homo sapien
acgacatcggtacgatgttgacaca

SEQ ID NO: 2919 - DNA, 25 bp, Homo sapien
acgacctccactatccgtcgtaaga

SEQ ID NO: 2920 - DNA, 25 bp, Homo sapien
acgacctccactttccgtcgtaaga

SEQ ID NO: 2921 - DNA, 25 bp, Homo sapien
aaagagtcctcacttcccgagtgac

SEQ ID NO: 2922 - DNA, 25 bp, Homo sapien
aaagagtcctcagttcccgagtgac

SEQ ID NO: 2923 - DNA, 25 bp, Homo sapien
aatgtttctcgttcatgtcctcgac

SEQ ID NO: 2924 - DNA, 25 bp, Homo sapien
aatgtttctcgtacatgtcctcgac

SEQ ID NO: 2925 - DNA, 25 bp, Homo sapien
tatatatgtgtctccgtctttcgta

SEQ ID NO: 2926 - DNA, 25 bp, Homo sapien
tatatatgtgtcaccgtctttcgta

SEQ ID NO: 2927 - DNA, 25 bp, Homo sapien
ttctagtccgtcgtacgtccggtgt

SEQ ID NO: 2928 - DNA, 25 bp, Homo sapien
ttctagtccgtcctacgtccggtgt

SEQ ID NO: 2929 - DNA, 25 bp, Homo sapien
cttgacggtccgacgtgttcgtggt

SEQ ID NO: 2930 - DNA, 25 bp, Homo sapien
cttgacggtccgtcgtgttcgtggt

SEQ ID NO: 2931 - DNA, 25 bp, Homo sapien
agtctacttgccttgtaacgtgtgt

SEQ ID NO: 2932 - DNA, 25 bp, Homo sapien
agtctacttgccatgtaacgtgtgt

SEQ ID NO: 2933 - DNA, 25 bp, Homo sapien
ttagacccgtccatccgtagtccgt

SEQ ID NO: 2934 - DNA, 25 bp, Homo sapien
ttagacccgtccttccgtagtccgt

SEQ ID NO: 2935 - DNA, 25 bp, Homo sapien
ggttcacacccgttttcttagtacc

SEQ ID NO: 2936 - DNA, 25 bp, Homo sapien
ggttcacacccgatttcttagtacc

SEQ ID NO: 2937 - DNA, 25 bp, Homo sapien
acgttctgttacctctgatttatgc

SEQ ID NO: 2938 - DNA, 25 bp, Homo sapien
acgttctgttacgtctgatttatgc

SEQ ID NO: 2939 - DNA, 25 bp, Homo sapien
ttctgtagtccgaggtctatacttg

SEQ ID NO: 2940 - DNA, 25 bp, Homo sapien
ttctgtagtccgtggtctatacttg

SEQ ID NO: 2941 - DNA, 25 bp, Homo sapien
tgtatgactcacagtggcaacttct

SEQ ID NO: 2942 - DNA, 25 bp, Homo sapien
tgtatgactcactgtggcaacttct

SEQ ID NO: 2943 - DNA, 25 bp, Homo sapien
tggtatgagtcctgggttcataact

SEQ ID NO: 2944 - DNA, 25 bp, Homo sapien
tggtatgagtccagggttcataact

SEQ ID NO: 2945 - DNA, 25 bp, Homo sapien
atagtcctggaggacgtccacttct

SEQ ID NO: 2946 - DNA, 25 bp, Homo sapien
atagtcctggagcacgtccacttct

SEQ ID NO: 2947 - DNA, 25 bp, Homo sapien
acgtgcgggtgtgaaccccgtgtct

SEQ ID NO: 2948 - DNA, 25 bp, Homo sapien
acgtgcgggtgtcaaccccgtgtct

SEQ ID NO: 2949 - DNA, 25 bp, Homo sapien
tcgagtgccttcatgtcgaagtcgc

SEQ ID NO: 2950 - DNA, 25 bp, Homo sapien
tcgagtgccttcttgtcgaagtcgc

SEQ ID NO: 2951 - DNA, 25 bp, Homo sapien
cttcggtgacttctgacagagatgg

SEQ ID NO: 2952 - DNA, 25 bp, Homo sapien
cttcggtgacttgtgacagagatgg

SEQ ID NO: 2953 - DNA, 25 bp, Homo sapien
cgtcgggacccgtgtgaaccgtgtc

SEQ ID NO: 2954 - DNA, 25 bp, Homo sapien
cgtcgggacccgagtgaaccgtgtc

SEQ ID NO: 2955 - DNA, 25 bp, Homo sapien
ttcgaggaaacgagtgaagactcga

SEQ ID NO: 2956 - DNA, 25 bp, Homo sapien
ttcgaggaaacgtgtgaagactcga

SEQ ID NO: 2957 - DNA, 25 bp, Homo sapien
tctcaaaggacgtttcggaggtgtc

SEQ ID NO: 2958 - DNA, 25 bp, Homo sapien
tctcaaaggacgattcggaggtgtc

SEQ ID NO: 2959 - DNA, 25 bp, Homo sapien
accaggggaccagagtgtgtcgtac

SEQ ID NO: 2960 - DNA, 25 bp, Homo sapien
accaggggaccacagtgtgtcgtac

SEQ ID NO: 2961 - DNA, 25 bp, Homo sapien
ggggtaagatacatcagtcgtggtc

SEQ ID NO: 2962 - DNA, 25 bp, Homo sapien
ggggtaagatacttcagtcgtggtc

SEQ ID NO: 2963 - DNA, 25 bp, Homo sapien
cgtgagttaaacttaggtacttcga

SEQ ID NO: 2964 - DNA, 25 bp, Homo sapien
cgtgagttaaacataggtacttcga

SEQ ID NO: 2965 - DNA, 25 bp, Homo sapien
ttttagctatacacaatacatatta

SEQ ID NO: 2966 - DNA, 25 bp, Homo sapien
ttttagctatactcaatacatatta

SEQ ID NO: 2967 - DNA, 25 bp, Homo sapien
gtgtgtgctcttcttttacaacttc

SEQ ID NO: 2968 - DNA, 25 bp, Homo sapien
gtgtgtgctcttgttttacaacttc

SEQ ID NO: 2969 - DNA, 25 bp, Homo sapien
attaagtatgatgttaagacatccc

SEQ ID NO: 2970 - DNA, 25 bp, Homo sapien
attaagtatgatcttaagacatccc

SEQ ID NO: 2971 - DNA, 25 bp, Homo sapien
agtaagtttgtatgaattaaacccc

SEQ ID NO: 2972 - DNA, 25 bp, Homo sapien
agtaagtttgtaagaattaaacccc

SEQ ID NO: 2973 - DNA, 25 bp, Homo sapien
ttcgtggtgtcaaattacctccttc

SEQ ID NO: 2974 - DNA, 25 bp, Homo sapien
ttcgtggtgtcatattacctccttc

SEQ ID NO: 2975 - DNA, 25 bp, Homo sapien
gtgtctcgtttctcgtcctcctgtc

SEQ ID NO: 2976 - DNA, 25 bp, Homo sapien
gtgtctcgtttcacgtcctcctgtc

SEQ ID NO: 2977 - DNA, 25 bp, Homo sapien
cggaagtcgtaccatctccttttct

SEQ ID NO: 2978 - DNA, 25 bp, Homo sapien
cggaagtcgtacgatctccttttct

SEQ ID NO: 2979 - DNA, 25 bp, Homo sapien
gtaacatgacaatcacgtcgatttc

SEQ ID NO: 2980 - DNA, 25 bp, Homo sapien
gtaacatgacaaacacgtcgatttc

SEQ ID NO: 2981 - DNA, 25 bp, Homo sapien
cgacaagaagataccacggattctt

SEQ ID NO: 2982 - DNA, 25 bp, Homo sapien
cgacaagaagattccacggattctt

SEQ ID NO: 2983 - DNA, 25 bp, Homo sapien
cgaggagaagatcgtacaggaattc

SEQ ID NO: 2984 - DNA, 25 bp, Homo sapien
cgaggagaagatggtacaggaattc

SEQ ID NO: 2985 - DNA, 25 bp, Homo sapien
agtctgaaaggtctcgaggaaagtc

SEQ ID NO: 2986 - DNA, 25 bp, Homo sapien
agtctgaaaggtgtcgaggaaagtc

SEQ ID NO: 2987 - DNA, 25 bp, Homo sapien
ttttaaatggttgcacccatagacg

SEQ ID NO: 2988 - DNA, 25 bp, Homo sapien
ttttaaatggttccacccatagacg

SEQ ID NO: 2989 - DNA, 25 bp, Homo sapien
ttacacctcttaaatcgtccgtttt

SEQ ID NO: 2990 - DNA, 25 bp, Homo sapien
ttacacctcttatatcgtccgtttt

SEQ ID NO: 2991 - DNA, 25 bp, Homo sapien
tagacgacccttttctgttggtacc

SEQ ID NO: 2992 - DNA, 25 bp, Homo sapien
tagacgacccttatctgttggtacc

SEQ ID NO: 2993 - DNA, 25 bp, Homo sapien
gaagaaccataccatcggtttccgg

SEQ ID NO: 2994 - DNA, 25 bp, Homo sapien
gaagaaccatacgatcggtttccgg

SEQ ID NO: 2995 - DNA, 25 bp, Homo sapien
aagaaacgcttggttgttctctcag

SEQ ID NO: 2996 - DNA, 25 bp, Homo sapien
aagaaacgcttgcttgttctctcag

SEQ ID NO: 2997 - DNA, 25 bp, Homo sapien
ctacaaaacactggtttgggttatt

SEQ ID NO: 2998 - DNA, 25 bp, Homo sapien
ctacaaaacactcgtttgggttatt

SEQ ID NO: 2999 - DNA, 25 bp, Homo sapien
ggataccctcggtctagggctcgtt

SEQ ID NO: 3000 - DNA, 25 bp, Homo sapien
ggataccctcggactagggctcgtt

SEQ ID NO: 3001 - DNA, 25 bp, Homo sapien
atacgaacgtccaatatagaatcac

SEQ ID NO: 3002 - DNA, 25 bp, Homo sapien
atacgaacgtcctatatagaatcac

SEQ ID NO: 3003 - DNA, 25 bp, Homo sapien
tctgttcccgtctcactaagcgacg

SEQ ID NO: 3004 - DNA, 25 bp, Homo sapien
tctgttcccgtcacactaagcgacg

SEQ ID NO: 3005 - DNA, 25 bp, Homo sapien
tcgtgttcctccacgactcacggtg

SEQ ID NO: 3006 - DNA, 25 bp, Homo sapien
tcgtgttcctcctcgactcacggtg

SEQ ID NO: 3007 - DNA, 25 bp, Homo sapien
ccgtgctccaaatcgacctgtacta

SEQ ID NO: 3008 - DNA, 25 bp, Homo sapien
ccgtgctccaaaacgacctgtacta

SEQ ID NO: 3009 - DNA, 25 bp, Homo sapien
agtcccaccggagtaccagtctcta

SEQ ID NO: 3010 - DNA, 25 bp, Homo sapien
agtcccaccggactaccagtctcta

SEQ ID NO: 3011 - DNA, 25 bp, Homo sapien
cgtcgacccgattgaggaccattcc

SEQ ID NO: 3012 - DNA, 25 bp, Homo sapien
cgtcgacccgatagaggaccattcc

SEQ ID NO: 3013 - DNA, 25 bp, Homo sapien
ggcgccctctcttcgggcagtggtc

SEQ ID NO: 3014 - DNA, 25 bp, Homo sapien
ggcgccctctctacgggcagtggtc

SEQ ID NO: 3015 - DNA, 25 bp, Homo sapien
atccttttaccagagacagttaacg

SEQ ID NO: 3016 - DNA, 25 bp, Homo sapien
atccttttaccacagacagttaacg

SEQ ID NO: 3017 - DNA, 25 bp, Homo sapien
tagccttttctcgttgagagtataa

SEQ ID NO: 3018 - DNA, 25 bp, Homo sapien
tagccttttctccttgagagtataa

SEQ ID NO: 3019 - DNA, 25 bp, Homo sapien
tcgtcatgtgaccatgtaccgagaa

SEQ ID NO: 3020 - DNA, 25 bp, Homo sapien
tcgtcatgtgacgatgtaccgagaa

SEQ ID NO: 3021 - DNA, 25 bp, Homo sapien
gagaaaggactggtcgacccgaacg

SEQ ID NO: 3022 - DNA, 25 bp, Homo sapien
gagaaaggactgctcgacccgaacg

SEQ ID NO: 3023 - DNA, 25 bp, Homo sapien
tagatacagtggacacataagactc

SEQ ID NO: 3024 - DNA, 25 bp, Homo sapien
tagatacagtggtcacataagactc

SEQ ID NO: 3025 - DNA, 25 bp, Homo sapien
cttaccgagtcttagcaaatactgt

SEQ ID NO: 3026 - DNA, 25 bp, Homo sapien
cttaccgagtctaagcaaatactgt

SEQ ID NO: 3027 - DNA, 25 bp, Homo sapien
gggatctcattctgtctacaaatac

SEQ ID NO: 3028 - DNA, 25 bp, Homo sapien
gggatctcattcagtctacaaatac

SEQ ID NO: 3029 - DNA, 25 bp, Homo sapien
taggacacttcttggcgacacctcc

SEQ ID NO: 3030 - DNA, 25 bp, Homo sapien
taggacacttctaggcgacacctcc

SEQ ID NO: 3031 - DNA, 25 bp, Homo sapien
gtctcggtactcaggaccccgtctc

SEQ ID NO: 3032 - DNA, 25 bp, Homo sapien
gtctcggtactctggaccccgtctc

SEQ ID NO: 3033 - DNA, 25 bp, Homo sapien
agtcgacagtatttgaccagacctc

SEQ ID NO: 3034 - DNA, 25 bp, Homo sapien
agtcgacagtatatgaccagacctc

SEQ ID NO: 3035 - DNA, 25 bp, Homo sapien
ttgcacggttcatgtagtccctcac

SEQ ID NO: 3036 - DNA, 25 bp, Homo sapien
ttgcacggttcaagtagtccctcac

SEQ ID NO: 3037 - DNA, 25 bp, Homo sapien
agtggaccttagaaccgtccctcgc

SEQ ID NO: 3038 - DNA, 25 bp, Homo sapien
agtggaccttagtaccgtccctcgc

SEQ ID NO: 3039 - DNA, 25 bp, Homo sapien
ctcgagggttatgtttgtccgcacc

SEQ ID NO: 3040 - DNA, 25 bp, Homo sapien
ctcgagggttatctttgtccgcacc

SEQ ID NO: 3041 - DNA, 25 bp, Homo sapien
tccgtgcattttgaagtccctccgt

SEQ ID NO: 3042 - DNA, 25 bp, Homo sapien
tccgtgcattttcaagtccctccgt

SEQ ID NO: 3043 - DNA, 25 bp, Homo sapien
cgggaccttctcaagaccccgtcgt

SEQ ID NO: 3044 - DNA, 25 bp, Homo sapien
cgggaccttctctagaccccgtcgt

SEQ ID NO: 3045 - DNA, 25 bp, Homo sapien
ataaggtctccgtaacgtaccacta

SEQ ID NO: 3046 - DNA, 25 bp, Homo sapien
ataaggtctccgaaacgtaccacta

SEQ ID NO: 3047 - DNA, 25 bp, Homo sapien
taagaagttgacctgactacacaca

SEQ ID NO: 3048 - DNA, 25 bp, Homo sapien
taagaagttgacgtgactacacaca

SEQ ID NO: 3049 - DNA, 25 bp, Homo sapien
actatatgtatagctacaagacgtc

SEQ ID NO: 3050 - DNA, 25 bp, Homo sapien
actatatgtatacctacaagacgtc

SEQ ID NO: 3051 - DNA, 25 bp, Homo sapien
ggttactcactcttgagcgggtgct

SEQ ID NO: 3052 - DNA, 25 bp, Homo sapien
ggttactcactcatgagcgggtgct

SEQ ID NO: 3053 - DNA, 25 bp, Homo sapien
actctccgtcgagagtcccgtgtac

SEQ ID NO: 3054 - DNA, 25 bp, Homo sapien
actctccgtcgacagtcccgtgtac

SEQ ID NO: 3055 - DNA, 25 bp, Homo sapien
cgtggatttctgtccggcacgtcga

SEQ ID NO: 3056 - DNA, 25 bp, Homo sapien
cgtggatttctgaccggcacgtcga

SEQ ID NO: 3057 - DNA, 25 bp, Homo sapien
gagctacatgagacggactcgtcga

SEQ ID NO: 3058 - DNA, 25 bp, Homo sapien
gagctacatgagtcggactcgtcga

SEQ ID NO: 3059 - DNA, 25 bp, Homo sapien
ccaacacgaggaggtcgcacactca

SEQ ID NO: 3060 - DNA, 25 bp, Homo sapien
ccaacacgaggacgtcgcacactca

SEQ ID NO: 3061 - DNA, 25 bp, Homo sapien
gaattggacccgtctcggcaccgag

SEQ ID NO: 3062 - DNA, 25 bp, Homo sapien
gaattggacccgactcggcaccgag

SEQ ID NO: 3063 - DNA, 25 bp, Homo sapien
tgatgtaggcccaggattacaggta

SEQ ID NO: 3064 - DNA, 25 bp, Homo sapien
tgatgtaggccctggattacaggta

SEQ ID NO: 3065 - DNA, 25 bp, Homo sapien
tacgtccacctgtatactatatgtg

SEQ ID NO: 3066 - DNA, 25 bp, Homo sapien
tacgtccacctgaatactatatgtg

SEQ ID NO: 3067 - DNA, 25 bp, Homo sapien
tgtccaagactgaactacaactccg

SEQ ID NO: 3068 - DNA, 25 bp, Homo sapien
tgtccaagactgtactacaactccg

SEQ ID NO: 3069 - DNA, 25 bp, Homo sapien
tgccctagtacttcgcgagccatcg

SEQ ID NO: 3070 - DNA, 25 bp, Homo sapien
tgccctagtactacgcgagccatcg

SEQ ID NO: 3071 - DNA, 25 bp, Homo sapien
gccgccgtctcacgtgtaactgtcg

SEQ ID NO: 3072 - DNA, 25 bp, Homo sapien
gccgccgtctcaggtgtaactgtcg

SEQ ID NO: 3073 - DNA, 25 bp, Homo sapien
cgacgttactcagacggtctagtct

SEQ ID NO: 3074 - DNA, 25 bp, Homo sapien
cgacgttactcacacggtctagtct

SEQ ID NO: 3075 - DNA, 25 bp, Homo sapien
acgacgtacttgcaacagacctatt

SEQ ID NO: 3076 - DNA, 25 bp, Homo sapien
acgacgtacttggaacagacctatt

SEQ ID NO: 3077 - DNA, 25 bp, Homo sapien
ctgcttggtttcgagctggtgatct

SEQ ID NO: 3078 - DNA, 25 bp, Homo sapien
ctgcttggtttccagctggtgatct

SEQ ID NO: 3079 - DNA, 25 bp, Homo sapien
ttaattcggtttcaacctcgatttg

SEQ ID NO: 3080 - DNA, 25 bp, Homo sapien
ttaattcggtttgaacctcgatttg

SEQ ID NO: 3081 - DNA, 25 bp, Homo sapien
gtggtccgtttcgtcataacctgta

SEQ ID NO: 3082 - DNA, 25 bp, Homo sapien
gtggtccgtttcctcataacctgta

SEQ ID NO: 3083 - DNA, 25 bp, Homo sapien
tagatcccttgcacgtacaccagtc

SEQ ID NO: 3084 - DNA, 25 bp, Homo sapien
tagatcccttgctcgtacaccagtc

SEQ ID NO: 3085 - DNA, 25 bp, Homo sapien
agaacccgactgtgaccaatcagta

SEQ ID NO: 3086 - DNA, 25 bp, Homo sapien
agaacccgactgagaccaatcagta

SEQ ID NO: 3087 - DNA, 25 bp, Homo sapien
gatgttcaccaagtcataatacatg

SEQ ID NO: 3088 - DNA, 25 bp, Homo sapien
gatgttcaccaactcataatacatg

SEQ ID NO: 3089 - DNA, 25 bp, Homo sapien
gttgactaaaacaggaacatctatt

SEQ ID NO: 3090 - DNA, 25 bp, Homo sapien
gttgactaaaactggaacatctatt

SEQ ID NO: 3091 - DNA, 25 bp, Homo sapien
agctagagtcccataaagtactctt

SEQ ID NO: 3092 - DNA, 25 bp, Homo sapien
agctagagtcccttaaagtactctt

SEQ ID NO: 3093 - DNA, 25 bp, Homo sapien
gtcacagggatctcaaatagtccac

SEQ ID NO: 3094 - DNA, 25 bp, Homo sapien
gtcacagggatcacaaatagtccac

SEQ ID NO: 3095 - DNA, 25 bp, Homo sapien
agcccctgagccaagaagctgtacc

SEQ ID NO: 3096 - DNA, 25 bp, Homo sapien
agcccctgagcctagaagctgtacc

SEQ ID NO: 3097 - DNA, 25 bp, Homo sapien
gaaccgccggcaaagacggaacaac

SEQ ID NO: 3098 - DNA, 25 bp, Homo sapien
gaaccgccggcatagacggaacaac

SEQ ID NO: 3099 - DNA, 25 bp, Homo sapien
atcaaccacgaaggtgatactaact

SEQ ID NO: 3100 - DNA, 25 bp, Homo sapien
atcaaccacgaacgtgatactaact

SEQ ID NO: 3101 - DNA, 25 bp, Homo sapien
gacaagtctgcagagtgtctactgg

SEQ ID NO: 3102 - DNA, 25 bp, Homo sapien
gacaagtctgcacagtgtctactgg

SEQ ID NO: 3103 - DNA, 25 bp, Homo sapien
gacgatacgtctggaattcaacttt

SEQ ID NO: 3104 - DNA, 25 bp, Homo sapien
gacgatacgtctcgaattcaacttt

SEQ ID NO: 3105 - DNA, 25 bp, Homo sapien
tggtaatcgcatcgatgtcattctg

SEQ ID NO: 3106 - DNA, 25 bp, Homo sapien
tggtaatcgcatggatgtcattctg

SEQ ID NO: 3107 - DNA, 25 bp, Homo sapien
caatatcggcctcagtcgcaggtgg

SEQ ID NO: 3108 - DNA, 25 bp, Homo sapien
caatatcggcctgagtcgcaggtgg

SEQ ID NO: 3109 - DNA, 25 bp, Homo sapien
caggtgtcgcttgtgtcccgatctg

SEQ ID NO: 3110 - DNA, 25 bp, Homo sapien
caggtgtcgcttctgtcccgatctg

SEQ ID NO: 3111 - DNA, 25 bp, Homo sapien
ggtgtcgagtttcgactcctcctcg

SEQ ID NO: 3112 - DNA, 25 bp, Homo sapien
ggtgtcgagtttggactcctcctcg

SEQ ID NO: 3113 - DNA, 25 bp, Homo sapien
ggtctcagtctatggtgttccatgt

SEQ ID NO: 3114 - DNA, 25 bp, Homo sapien
ggtctcagtctaaggtgttccatgt

SEQ ID NO: 3115 - DNA, 25 bp, Homo sapien
gaggtgcctaccagggtccgaacct

SEQ ID NO: 3116 - DNA, 25 bp, Homo sapien
gaggtgcctacctgggtccgaacct

SEQ ID NO: 3117 - DNA, 25 bp, Homo sapien
actgaggtcgttcgtgtccgtcgcc

SEQ ID NO: 3118 - DNA, 25 bp, Homo sapien
actgaggtcgttggtgtccgtcgcc

SEQ ID NO: 3119 - DNA, 25 bp, Homo sapien
gacaaagtcgaagcggtagtccagc

SEQ ID NO: 3120 - DNA, 25 bp, Homo sapien
gacaaagtcgaaccggtagtccagc

SEQ ID NO: 3121 - DNA, 25 bp, Homo sapien
tgtacatggtaaaccggtctccagg

SEQ ID NO: 3122 - DNA, 25 bp, Homo sapien
tgtacatggtaatccggtctccagg

SEQ ID NO: 3123 - DNA, 25 bp, Homo sapien
agatcctgtgtctccggtccgcagg

SEQ ID NO: 3124 - DNA, 25 bp, Homo sapien
agatcctgtgtcaccggtccgcagg

SEQ ID NO: 3125 - DNA, 25 bp, Homo sapien
ggtccgatccaggtgaccaccgacg

SEQ ID NO: 3126 - DNA, 25 bp, Homo sapien
ggtccgatccagctgaccaccgacg

SEQ ID NO: 3127 - DNA, 25 bp, Homo sapien
gtaacgtaaccacgtaacgaccctc

SEQ ID NO: 3128 - DNA, 25 bp, Homo sapien
gtaacgtaaccaggtaacgaccctc

SEQ ID NO: 3129 - DNA, 25 bp, Homo sapien
agttctcgtaccatgaacgatgtcc

SEQ ID NO: 3130 - DNA, 25 bp, Homo sapien
agttctcgtaccttgaacgatgtcc

SEQ ID NO: 3131 - DNA, 25 bp, Homo sapien
gtgtatgtataatcgatctatgcac

SEQ ID NO: 3132 - DNA, 25 bp, Homo sapien
gtgtatgtataaacgatctatgcac

SEQ ID NO: 3133 - DNA, 25 bp, Homo sapien
gtgggcgttcgaacgaccactgctc

SEQ ID NO: 3134 - DNA, 25 bp, Homo sapien
gtgggcgttcgatcgaccactgctc

SEQ ID NO: 3135 - DNA, 25 bp, Homo sapien
tagctttacgaccgctacgtggacg

SEQ ID NO: 3136 - DNA, 25 bp, Homo sapien
tagctttacgacggctacgtggacg

SEQ ID NO: 3137 - DNA, 25 bp, Homo sapien
cctagacgacaaacttcgcgtcgtc

SEQ ID NO: 3138 - DNA, 25 bp, Homo sapien
cctagacgacaatcttcgcgtcgtc

SEQ ID NO: 3139 - DNA, 25 bp, Homo sapien
gtggagtaccaatagtaagtcaaac

SEQ ID NO: 3140 - DNA, 25 bp, Homo sapien
gtggagtaccaaaagtaagtcaaac

SEQ ID NO: 3141 - DNA, 25 bp, Homo sapien
tgttaaaatgttgacgaccgacgtc

SEQ ID NO: 3142 - DNA, 25 bp, Homo sapien
tgttaaaatgttcacgaccgacgtc

SEQ ID NO: 3143 - DNA, 25 bp, Homo sapien
aagttttttacgtctagaacgagtc

SEQ ID NO: 3144 - DNA, 25 bp, Homo sapien
aagttttttacgactagaacgagtc

SEQ ID NO: 3145 - DNA, 25 bp, Homo sapien
ctcctattcaccagagacgagagtc

SEQ ID NO: 3146 - DNA, 25 bp, Homo sapien
ctcctattcacctgagacgagagtc

SEQ ID NO: 3147 - DNA, 25 bp, Homo sapien
ggtgtctccttcttttaacgaattc

SEQ ID NO: 3148 - DNA, 25 bp, Homo sapien
ggtgtctccttcatttaacgaattc

SEQ ID NO: 3149 - DNA, 25 bp, Homo sapien
ggtactaatccctgtaatcaatgta

SEQ ID NO: 3150 - DNA, 25 bp, Homo sapien
ggtactaatcccagtaatcaatgta

SEQ ID NO: 3151 - DNA, 25 bp, Homo sapien
tgttcagatcccaaaagtacccagt

SEQ ID NO: 3152 - DNA, 25 bp, Homo sapien
tgttcagatccctaaagtacccagt

SEQ ID NO: 3153 - DNA, 25 bp, Homo sapien
aggtgacacgaggacgatgtacccg

SEQ ID NO: 3154 - DNA, 25 bp, Homo sapien
aggtgacacgagcacgatgtacccg

SEQ ID NO: 3155 - DNA, 25 bp, Homo sapien
agtagagacactggagatgagtcac

SEQ ID NO: 3156 - DNA, 25 bp, Homo sapien
agtagagacactcgagatgagtcac

SEQ ID NO: 3157 - DNA, 25 bp, Homo sapien
tcttacacctcgacgacttgagacc

SEQ ID NO: 3158 - DNA, 25 bp, Homo sapien
tcttacacctcgtcgacttgagacc

SEQ ID NO: 3159 - DNA, 25 bp, Homo sapien
aggtggaacccgttgtcaaggtcgc

SEQ ID NO: 3160 - DNA, 25 bp, Homo sapien
aggtggaacccgatgtcaaggtcgc

SEQ ID NO: 3161 - DNA, 25 bp, Homo sapien
cgctggttcccgtcgtccgaggtca

SEQ ID NO: 3162 - DNA, 25 bp, Homo sapien
cgctggttcccgacgtccgaggtca

SEQ ID NO: 3163 - DNA, 25 bp, Homo sapien
gtcgttcctaccaccgctagagcgg

SEQ ID NO: 3164 - DNA, 25 bp, Homo sapien
gtcgttcctacctccgctagagcgg

SEQ ID NO: 3165 - DNA, 25 bp, Homo sapien
ttttattacgtcactcagagtagtg

SEQ ID NO: 3166 - DNA, 25 bp, Homo sapien
ttttattacgtctctcagagtagtg

SEQ ID NO: 3167 - DNA, 25 bp, Homo sapien
taggatcgtcgaaaccaaatcgtat

SEQ ID NO: 3168 - DNA, 25 bp, Homo sapien
taggatcgtcgataccaaatcgtat

SEQ ID NO: 3169 - DNA, 25 bp, Homo sapien
cacttgtttgtatgcataaactacg

SEQ ID NO: 3170 - DNA, 25 bp, Homo sapien
cacttgtttgtaagcataaactacg

SEQ ID NO: 3171 - DNA, 25 bp, Homo sapien
gtctgttgtgtttaccatcgttaca

SEQ ID NO: 3172 - DNA, 25 bp, Homo sapien
gtctgttgtgttaaccatcgttaca

SEQ ID NO: 3173 - DNA, 25 bp, Homo sapien
cgttgtagttctttacgatgttatc

SEQ ID NO: 3174 - DNA, 25 bp, Homo sapien
cgttgtagttctatacgatgttatc

SEQ ID NO: 3175 - DNA, 25 bp, Homo sapien
ttttgtcttactagtcagaactgtt

SEQ ID NO: 3176 - DNA, 25 bp, Homo sapien
ttttgtcttacttgtcagaactgtt

SEQ ID NO: 3177 - DNA, 25 bp, Homo sapien
gttttacgtttcgtccacaccgtcg

SEQ ID NO: 3178 - DNA, 25 bp, Homo sapien
gttttacgtttcctccacaccgtcg

SEQ ID NO: 3179 - DNA, 25 bp, Homo sapien
tcttaccgtcactcactgacacggt

SEQ ID NO: 3180 - DNA, 25 bp, Homo sapien
tcttaccgtcacacactgacacggt

SEQ ID NO: 3181 - DNA, 25 bp, Homo sapien
ccgcgttcagcgagaaccactacgg

SEQ ID NO: 3182 - DNA, 25 bp, Homo sapien
ccgcgttcagcgtgaaccactacgg

SEQ ID NO: 3183 - DNA, 25 bp, Homo sapien
atccgttcagctagctcgaacgccg

SEQ ID NO: 3184 - DNA, 25 bp, Homo sapien
atccgttcagcttgctcgaacgccg

SEQ ID NO: 3185 - DNA, 25 bp, Homo sapien
tctacgactgtgtcgtcagaaactc

SEQ ID NO: 3186 - DNA, 25 bp, Homo sapien
tctacgactgtgacgtcagaaactc

SEQ ID NO: 3187 - DNA, 25 bp, Homo sapien
gaaaggtcgaaggaaccaaagactg

SEQ ID NO: 3188 - DNA, 25 bp, Homo sapien
gaaaggtcgaagcaaccaaagactg

SEQ ID NO: 3189 - DNA, 25 bp, Homo sapien
gaagacgaagctacctgaggtcgtg

SEQ ID NO: 3190 - DNA, 25 bp, Homo sapien
gaagacgaagcttcctgaggtcgtg

SEQ ID NO: 3191 - DNA, 25 bp, Homo sapien
tgtgacaaggagtcctggagtagtc

SEQ ID NO: 3192 - DNA, 25 bp, Homo sapien
tgtgacaaggagacctggagtagtc

SEQ ID NO: 3193 - DNA, 25 bp, Homo sapien
cagaagtgtagtcgttcttatagtc

SEQ ID NO: 3194 - DNA, 25 bp, Homo sapien
cagaagtgtagtggttcttatagtc

SEQ ID NO: 3195 - DNA, 25 bp, Homo sapien
aggagaggtattgacttccagtctc

SEQ ID NO: 3196 - DNA, 25 bp, Homo sapien
aggagaggtattcacttccagtctc

SEQ ID NO: 3197 - DNA, 25 bp, Homo sapien
cagtaacttaggatctactgacccc

SEQ ID NO: 3198 - DNA, 25 bp, Homo sapien
cagtaacttaggttctactgacccc

SEQ ID NO: 3199 - DNA, 25 bp, Homo sapien
tgcctctactcttctgtgactctgc

SEQ ID NO: 3200 - DNA, 25 bp, Homo sapien
tgcctctactctactgtgactctgc

SEQ ID NO: 3201 - DNA, 25 bp, Homo sapien
ggagaccctaatagttatcgtcttt

SEQ ID NO: 3202 - DNA, 25 bp, Homo sapien
ggagaccctaattgttatcgtcttt

SEQ ID NO: 3203 - DNA, 25 bp, Homo sapien
tctcgccttctttaggtgtcttggt

SEQ ID NO: 3204 - DNA, 25 bp, Homo sapien
tctcgccttcttaaggtgtcttggt

SEQ ID NO: 3205 - DNA, 25 bp, Homo sapien
ctcctttgagtagtatgacatctgt

SEQ ID NO: 3206 - DNA, 25 bp, Homo sapien
ctcctttgagtactatgacatctgt

SEQ ID NO: 3207 - DNA, 25 bp, Homo sapien
gtcacttgtgttacgggacccccag

SEQ ID NO: 3208 - DNA, 25 bp, Homo sapien
gtcacttgtgtttcgggacccccag

SEQ ID NO: 3209 - DNA, 25 bp, Homo sapien
aacaacttctacgagagggccctgt

SEQ ID NO: 3210 - DNA, 25 bp, Homo sapien
aacaacttctaccagagggccctgt

SEQ ID NO: 3211 - DNA, 25 bp, Homo sapien
gtgacgtttcccagggtcggtcacc

SEQ ID NO: 3212 - DNA, 25 bp, Homo sapien
gtgacgtttccctgggtcggtcacc

SEQ ID NO: 3213 - DNA, 25 bp, Homo sapien
gtcttccgacacaagagtcgaaccc

SEQ ID NO: 3214 - DNA, 25 bp, Homo sapien
gtcttccgacactagagtcgaaccc

SEQ ID NO: 3215 - DNA, 25 bp, Homo sapien
tgtctcctcgagaagaacgacctcc

SEQ ID NO: 3216 - DNA, 25 bp, Homo sapien
tgtctcctcgagtagaacgacctcc

SEQ ID NO: 3217 - DNA, 25 bp, Homo sapien
agtgctcgaccgacgacacgagacc

SEQ ID NO: 3218 - DNA, 25 bp, Homo sapien
agtgctcgaccgtcgacacgagacc

SEQ ID NO: 3219 - DNA, 25 bp, Homo sapien
tttttcactttctcgactgaaggaa

SEQ ID NO: 3220 - DNA, 25 bp, Homo sapien
tttttcactttcacgactgaaggaa

SEQ ID NO: 3221 - DNA, 25 bp, Homo sapien
ttctgattcaataactcgaacaggg

SEQ ID NO: 3222 - DNA, 25 bp, Homo sapien
ttctgattcaattactcgaacaggg

SEQ ID NO: 3223 - DNA, 25 bp, Homo sapien
ctggtgacaactactaccgcaagtg

SEQ ID NO: 3224 - DNA, 25 bp, Homo sapien
ctggtgacaacttctaccgcaagtg

SEQ ID NO: 3225 - DNA, 25 bp, Homo sapien
acggtgtcccttcgtcggtcgaaca

SEQ ID NO: 3226 - DNA, 25 bp, Homo sapien
acggtgtcccttggtcggtcgaaca

SEQ ID NO: 3227 - DNA, 25 bp, Homo sapien
cccctgtgtcctgtcgggaagacac

SEQ ID NO: 3228 - DNA, 25 bp, Homo sapien
cccctgtgtcctctcgggaagacac

SEQ ID NO: 3229 - DNA, 25 bp, Homo sapien
cacgtgtgctcgagttgtcgaagga

SEQ ID NO: 3230 - DNA, 25 bp, Homo sapien
cacgtgtgctcgtgttgtcgaagga

SEQ ID NO: 3231 - DNA, 25 bp, Homo sapien
ttcacgtaaatgtgtcttcggagga

SEQ ID NO: 3232 - DNA, 25 bp, Homo sapien
ttcacgtaaatgagtcttcggagga

SEQ ID NO: 3233 - DNA, 25 bp, Homo sapien
cgacgaaagtctcacgtggttcaaa

SEQ ID NO: 3234 - DNA, 25 bp, Homo sapien
cgacgaaagtctgacgtggttcaaa

SEQ ID NO: 3235 - DNA, 25 bp, Homo sapien
agattgtactcaagagtttacgacc

SEQ ID NO: 3236 - DNA, 25 bp, Homo sapien
agattgtactcatgagtttacgacc

SEQ ID NO: 3237 - DNA, 25 bp, Homo sapien
atactctgaacattatccgagacag

SEQ ID NO: 3238 - DNA, 25 bp, Homo sapien
atactctgaacaatatccgagacag

SEQ ID NO: 3239 - DNA, 25 bp, Homo sapien
gaacggtgacacatgttcagtgaag

SEQ ID NO: 3240 - DNA, 25 bp, Homo sapien
gaacggtgacacttgttcagtgaag

SEQ ID NO: 3241 - DNA, 25 bp, Homo sapien
caaaaaggactctgtgtaagacagg

SEQ ID NO: 3242 - DNA, 25 bp, Homo sapien
caaaaaggactcagtgtaagacagg

SEQ ID NO: 3243 - DNA, 25 bp, Homo sapien
aaaaagacgtttacgacgaggaacc

SEQ ID NO: 3244 - DNA, 25 bp, Homo sapien
aaaaagacgttttcgacgaggaacc

SEQ ID NO: 3245 - DNA, 25 bp, Homo sapien
ggtataatgtttgtaacagtccctt

SEQ ID NO: 3246 - DNA, 25 bp, Homo sapien
ggtataatgtttctaacagtccctt

SEQ ID NO: 3247 - DNA, 25 bp, Homo sapien
tatcttcggtatgtcttaacgagcc

SEQ ID NO: 3248 - DNA, 25 bp, Homo sapien
tatcttcggtatctcttaacgagcc

SEQ ID NO: 3249 - DNA, 25 bp, Homo sapien
gtctctcgtgtaatcgtttggaaca

SEQ ID NO: 3250 - DNA, 25 bp, Homo sapien
gtctctcgtgtattcgtttggaaca

SEQ ID NO: 3251 - DNA, 25 bp, Homo sapien
gcatcggtaggaactccctctactc

SEQ ID NO: 3252 - DNA, 25 bp, Homo sapien
gcatcggtaggatctccctctactc

SEQ ID NO: 3253 - DNA, 25 bp, Homo sapien
cacaggagtggtttgacgacccgac

SEQ ID NO: 3254 - DNA, 25 bp, Homo sapien
cacaggagtggtatgacgacccgac

SEQ ID NO: 3255 - DNA, 25 bp, Homo sapien
ctacaggaagggttacggagcacac

SEQ ID NO: 3256 - DNA, 25 bp, Homo sapien
ctacaggaagggatacggagcacac

SEQ ID NO: 3257 - DNA, 25 bp, Homo sapien
gttgtcacagagactcgtgttatca

SEQ ID NO: 3258 - DNA, 25 bp, Homo sapien
gttgtcacagagtctcgtgttatca

SEQ ID NO: 3259 - DNA, 25 bp, Homo sapien
agatctcctacattacgtgttttcg

SEQ ID NO: 3260 - DNA, 25 bp, Homo sapien
agatctcctacaatacgtgttttcg

SEQ ID NO: 3261 - DNA, 25 bp, Homo sapien
tagaccctgaccaacgtcttcttag

SEQ ID NO: 3262 - DNA, 25 bp, Homo sapien
tagaccctgacctacgtcttcttag

SEQ ID NO: 3263 - DNA, 25 bp, Homo sapien
gtgtcgacctctccaatcggacagg

SEQ ID NO: 3264 - DNA, 25 bp, Homo sapien
gtgtcgacctctgcaatcggacagg

SEQ ID NO: 3265 - DNA, 25 bp, Homo sapien
ttagttaattgtctttcgtcacgga

SEQ ID NO: 3266 - DNA, 25 bp, Homo sapien
ttagttaattgtgtttcgtcacgga

SEQ ID NO: 3267 - DNA, 25 bp, Homo sapien
ggagttgtctcttcggtctcgaccc

SEQ ID NO: 3268 - DNA, 25 bp, Homo sapien
ggagttgtctctacggtctcgaccc

SEQ ID NO: 3269 - DNA, 25 bp, Homo sapien
aggtcactctaaagactacacaaac

SEQ ID NO: 3270 - DNA, 25 bp, Homo sapien
aggtcactctaatgactacacaaac

SEQ ID NO: 3271 - DNA, 25 bp, Homo sapien
aataaccgttgtgactacagtataa

SEQ ID NO: 3272 - DNA, 25 bp, Homo sapien
aataaccgttgtcactacagtataa

SEQ ID NO: 3273 - DNA, 25 bp, Homo sapien
cgtcgtactctttcccagtagactc

SEQ ID NO: 3274 - DNA, 25 bp, Homo sapien
cgtcgtactcttacccagtagactc

SEQ ID NO: 3275 - DNA, 25 bp, Homo sapien
actctaactgtgtacagacgcactt

SEQ ID NO: 3276 - DNA, 25 bp, Homo sapien
actctaactgtgaacagacgcactt

SEQ ID NO: 3277 - DNA, 25 bp, Homo sapien
cgaattacgttgttacgtaaaacta

SEQ ID NO: 3278 - DNA, 25 bp, Homo sapien
cgaattacgttgatacgtaaaacta

SEQ ID NO: 3279 - DNA, 25 bp, Homo sapien
gtatctcgaagtagtacaacaacac

SEQ ID NO: 3280 - DNA, 25 bp, Homo sapien
gtatctcgaagttgtacaacaacac

SEQ ID NO: 3281 - DNA, 25 bp, Homo sapien
cattattttcgttagtgatttcacg

SEQ ID NO: 3282 - DNA, 25 bp, Homo sapien
cattattttcgtaagtgatttcacg

SEQ ID NO: 3283 - DNA, 25 bp, Homo sapien
atcataagttttgaagtttgccgtc

SEQ ID NO: 3284 - DNA, 25 bp, Homo sapien
atcataagttttcaagtttgccgtc

SEQ ID NO: 3285 - DNA, 25 bp, Homo sapien
acgtacgataactgtttgtctagtt

SEQ ID NO: 3286 - DNA, 25 bp, Homo sapien
acgtacgataacagtttgtctagtt

SEQ ID NO: 3287 - DNA, 25 bp, Homo sapien
agagtagttaccactcgtgtcggtg

SEQ ID NO: 3288 - DNA, 25 bp, Homo sapien
agagtagttacctctcgtgtcggtg

SEQ ID NO: 3289 - DNA, 25 bp, Homo sapien
tagggtcctctactaccgccggtct

SEQ ID NO: 3290 - DNA, 25 bp, Homo sapien
tagggtcctctagtaccgccggtct

SEQ ID NO: 3291 - DNA, 25 bp, Homo sapien
gtgttccttctcactgcctagtact

SEQ ID NO: 3292 - DNA, 25 bp, Homo sapien
gtgttccttctctctgcctagtact

SEQ ID NO: 3293 - DNA, 25 bp, Homo sapien
tgttcctctcgttcgtcctcgttgg

SEQ ID NO: 3294 - DNA, 25 bp, Homo sapien
tgttcctctcgtacgtcctcgttgg

SEQ ID NO: 3295 - DNA, 25 bp, Homo sapien
ttgatttcagaacctcgtacttgtc

SEQ ID NO: 3296 - DNA, 25 bp, Homo sapien
ttgatttcagaagctcgtacttgtc

SEQ ID NO: 3297 - DNA, 25 bp, Homo sapien
tctgtataaagatctacgactgtgt

SEQ ID NO: 3298 - DNA, 25 bp, Homo sapien
tctgtataaagaactacgactgtgt

SEQ ID NO: 3299 - DNA, 25 bp, Homo sapien
catgtctagttaagtccgtttcgct

SEQ ID NO: 3300 - DNA, 25 bp, Homo sapien
catgtctagttatgtccgtttcgct

SEQ ID NO: 3301 - DNA, 25 bp, Homo sapien
agtacagttcgatttgtcctatttt

SEQ ID NO: 3302 - DNA, 25 bp, Homo sapien
agtacagttcgaattgtcctatttt

SEQ ID NO: 3303 - DNA, 25 bp, Homo sapien
gacttccgtattaaggtgtcctgta

SEQ ID NO: 3304 - DNA, 25 bp, Homo sapien
gacttccgtatttaggtgtcctgta

SEQ ID NO: 3305 - DNA, 25 bp, Homo sapien
ggggtgccgacattttgcgttttgt

SEQ ID NO: 3306 - DNA, 25 bp, Homo sapien
ggggtgccgacaatttgcgttttgt

SEQ ID NO: 3307 - DNA, 25 bp, Homo sapien
cttaggtctcccttcagtcgtccaa

SEQ ID NO: 3308 - DNA, 25 bp, Homo sapien
cttaggtctcccatcagtcgtccaa

SEQ ID NO: 3309 - DNA, 25 bp, Homo sapien
gactccgactctgacgctactctga

SEQ ID NO: 3310 - DNA, 25 bp, Homo sapien
gactccgactctcacgctactctga

SEQ ID NO: 3311 - DNA, 25 bp, Homo sapien
tgggtcactattctacgtctgtggt

SEQ ID NO: 3312 - DNA, 25 bp, Homo sapien
tgggtcactattgtacgtctgtggt

SEQ ID NO: 3313 - DNA, 25 bp, Homo sapien
ttgtcgagttcatagaacacttcat

SEQ ID NO: 3314 - DNA, 25 bp, Homo sapien
ttgtcgagttcaaagaacacttcat

SEQ ID NO: 3315 - DNA, 25 bp, Homo sapien
accgggtgtcttggagcctgtcgac

SEQ ID NO: 3316 - DNA, 25 bp, Homo sapien
accgggtgtcttcgagcctgtcgac

SEQ ID NO: 3317 - DNA, 25 bp, Homo sapien
ctgtgaggtttaacacgaccctcac

SEQ ID NO: 3318 - DNA, 25 bp, Homo sapien
ctgtgaggtttatcacgaccctcac

SEQ ID NO: 3319 - DNA, 25 bp, Homo sapien
gtggtggactaaaagagaaccgtca

SEQ ID NO: 3320 - DNA, 25 bp, Homo sapien
gtggtggactaatagagaaccgtca

SEQ ID NO: 3321 - DNA, 25 bp, Homo sapien
cggggaccacgagtcttaggacgca

SEQ ID NO: 3322 - DNA, 25 bp, Homo sapien
cggggaccacgactcttaggacgca

SEQ ID NO: 3323 - DNA, 25 bp, Homo sapien
aatgacacaaatgagggactactct

SEQ ID NO: 3324 - DNA, 25 bp, Homo sapien
aatgacacaaatcagggactactct

SEQ ID NO: 3325 - DNA, 25 bp, Homo sapien
gtcgaagtaccgtgtaggaactctc

SEQ ID NO: 3326 - DNA, 25 bp, Homo sapien
gtcgaagtaccgagtaggaactctc

SEQ ID NO: 3327 - DNA, 25 bp, Homo sapien
gtcgacgcgacctctagataactcc

SEQ ID NO: 3328 - DNA, 25 bp, Homo sapien
gtcgacgcgaccactagataactcc

SEQ ID NO: 3329 - DNA, 25 bp, Homo sapien
ctggtccgtccctattgtcgtaacc

SEQ ID NO: 3330 - DNA, 25 bp, Homo sapien
ctggtccgtcccaattgtcgtaacc

SEQ ID NO: 3331 - DNA, 25 bp, Homo sapien
ggacccacccccaagtgttgtgaat

SEQ ID NO: 3332 - DNA, 25 bp, Homo sapien
ggacccaccccctagtgttgtgaat

SEQ ID NO: 3333 - DNA, 25 bp, Homo sapien
gaccactccaccttaacggggacga

SEQ ID NO: 3334 - DNA, 25 bp, Homo sapien
gaccactccaccataacggggacga

SEQ ID NO: 3335 - DNA, 25 bp, Homo sapien
ccgacgccactgtcgtccgaagaga

SEQ ID NO: 3336 - DNA, 25 bp, Homo sapien
ccgacgccactgacgtccgaagaga

SEQ ID NO: 3337 - DNA, 25 bp, Homo sapien
accacgtgtcattgagctgtgaata

SEQ ID NO: 3338 - DNA, 25 bp, Homo sapien
accacgtgtcatagagctgtgaata

SEQ ID NO: 3339 - DNA, 25 bp, Homo sapien
ccacggttgtcttgaacgagagaca

SEQ ID NO: 3340 - DNA, 25 bp, Homo sapien
ccacggttgtctagaacgagagaca

SEQ ID NO: 3341 - DNA, 25 bp, Homo sapien
ctcgtgtaatgttttcagtcgaacg

SEQ ID NO: 3342 - DNA, 25 bp, Homo sapien
ctcgtgtaatgtattcagtcgaacg

SEQ ID NO: 3343 - DNA, 25 bp, Homo sapien
gtgtctctcttttgacttcatccgc

SEQ ID NO: 3344 - DNA, 25 bp, Homo sapien
gtgtctctctttagacttcatccgc

SEQ ID NO: 3345 - DNA, 25 bp, Homo sapien
gtttctagttggagacgactagtcc

SEQ ID NO: 3346 - DNA, 25 bp, Homo sapien
gtttctagttggtgacgactagtcc

SEQ ID NO: 3347 - DNA, 25 bp, Homo sapien
gacttctgactattggtcgacttcc

SEQ ID NO: 3348 - DNA, 25 bp, Homo sapien
gacttctgactaatggtcgacttcc

SEQ ID NO: 3349 - DNA, 25 bp, Homo sapien
aagatttacagacagaagaacttcc

SEQ ID NO: 3350 - DNA, 25 bp, Homo sapien
aagatttacagagagaagaacttcc

SEQ ID NO: 3351 - DNA, 25 bp, Homo sapien
catggtagggacgaagagacttctt

SEQ ID NO: 3352 - DNA, 25 bp, Homo sapien
catggtagggaccaagagacttctt

SEQ ID NO: 3353 - DNA, 25 bp, Homo sapien
cctgtggtactcaccgtagctcgtt

SEQ ID NO: 3354 - DNA, 25 bp, Homo sapien
cctgtggtactctccgtagctcgtt

SEQ ID NO: 3355 - DNA, 25 bp, Homo sapien
agatttttccgtcaatttcgaactg

SEQ ID NO: 3356 - DNA, 25 bp, Homo sapien
agatttttccgtgaatttcgaactg

SEQ ID NO: 3357 - DNA, 25 bp, Homo sapien
tttattatgaaattagtcaccgtcg

SEQ ID NO: 3358 - DNA, 25 bp, Homo sapien
tttattatgaaaatagtcaccgtcg

SEQ ID NO: 3359 - DNA, 25 bp, Homo sapien
gtttagtcgaaataatacccactgt

SEQ ID NO: 3360 - DNA, 25 bp, Homo sapien
gtttagtcgaaaaaatacccactgt

SEQ ID NO: 3361 - DNA, 25 bp, Homo sapien
ttccgagtacgaaacgaagttactt

SEQ ID NO: 3362 - DNA, 25 bp, Homo sapien
ttccgagtacgatacgaagttactt

SEQ ID NO: 3363 - DNA, 25 bp, Homo sapien
atacgactcgatgtaaacgacgtta

SEQ ID NO: 3364 - DNA, 25 bp, Homo sapien
atacgactcgatctaaacgacgtta

SEQ ID NO: 3365 - DNA, 25 bp, Homo sapien
tccggtcgtccttacgatagtgtag

SEQ ID NO: 3366 - DNA, 25 bp, Homo sapien
tccggtcgtcctaacgatagtgtag

SEQ ID NO: 3367 - DNA, 25 bp, Homo sapien
tctacacgagtgtcaatacctacga

SEQ ID NO: 3368 - DNA, 25 bp, Homo sapien
tctacacgagtgacaatacctacga

SEQ ID NO: 3369 - DNA, 25 bp, Homo sapien
ctactatgtttcgtatactgtctgt

SEQ ID NO: 3370 - DNA, 25 bp, Homo sapien
ctactatgtttcctatactgtctgt

SEQ ID NO: 3371 - DNA, 25 bp, Homo sapien
gggttccggttctactcggtccctt

SEQ ID NO: 3372 - DNA, 25 bp, Homo sapien
gggttccggttcaactcggtccctt

SEQ ID NO: 3373 - DNA, 25 bp, Homo sapien
ctccttttggtctccgagcggtccg

SEQ ID NO: 3374 - DNA, 25 bp, Homo sapien
ctccttttggtcaccgagcggtccg

SEQ ID NO: 3375 - DNA, 25 bp, Homo sapien
cttttgtggactactgttcgtgagt

SEQ ID NO: 3376 - DNA, 25 bp, Homo sapien
cttttgtggacttctgttcgtgagt

SEQ ID NO: 3377 - DNA, 25 bp, Homo sapien
tatttttcggtggaccgttttgact

SEQ ID NO: 3378 - DNA, 25 bp, Homo sapien
tatttttcggtgcaccgttttgact

SEQ ID NO: 3379 - DNA, 25 bp, Homo sapien
agttagtagtaaactctcttctgta

SEQ ID NO: 3380 - DNA, 25 bp, Homo sapien
agttagtagtaatctctcttctgta

SEQ ID NO: 3381 - DNA, 25 bp, Homo sapien
ccgacgagtcggaactttacatgta

SEQ ID NO: 3382 - DNA, 25 bp, Homo sapien
ccgacgagtcggtactttacatgta

SEQ ID NO: 3383 - DNA, 25 bp, Homo sapien
atcgagactataggtttacttcgtc

SEQ ID NO: 3384 - DNA, 25 bp, Homo sapien
atcgagactatacgtttacttcgtc

SEQ ID NO: 3385 - DNA, 25 bp, Homo sapien
cggtagtcgtaggacttcttcgtat

SEQ ID NO: 3386 - DNA, 25 bp, Homo sapien
cggtagtcgtagcacttcttcgtat

SEQ ID NO: 3387 - DNA, 25 bp, Homo sapien
ggtgtcggacggaacagagtttctt

SEQ ID NO: 3388 - DNA, 25 bp, Homo sapien
ggtgtcggacggtacagagtttctt

SEQ ID NO: 3389 - DNA, 25 bp, Homo sapien
tctcgttagcagtagtgggtgctac

SEQ ID NO: 3390 - DNA, 25 bp, Homo sapien
tctcgttagcagaagtgggtgctac

SEQ ID NO: 3391 - DNA, 25 bp, Homo sapien
tcagaagaccggacgacctaatact

SEQ ID NO: 3392 - DNA, 25 bp, Homo sapien
tcagaagaccggtcgacctaatact

SEQ ID NO: 3393 - DNA, 25 bp, Homo sapien
caaagtaccgtaggagacgcctcta

SEQ ID NO: 3394 - DNA, 25 bp, Homo sapien
caaagtaccgtacgagacgcctcta

SEQ ID NO: 3395 - DNA, 25 bp, Homo sapien
aacatggtgtaaatacgtcggttca

SEQ ID NO: 3396 - DNA, 25 bp, Homo sapien
aacatggtgtaattacgtcggttca

SEQ ID NO: 3397 - DNA, 25 bp, Homo sapien
aacggggtcgccttcacgaggtacc

SEQ ID NO: 3398 - DNA, 25 bp, Homo sapien
aacggggtcgccatcacgaggtacc

SEQ ID NO: 3399 - DNA, 25 bp, Homo sapien
aaccagggtcggtcgatggtactct

SEQ ID NO: 3400 - DNA, 25 bp, Homo sapien
aaccagggtcggacgatggtactct

SEQ ID NO: 3401 - DNA, 25 bp, Homo sapien
aaagaacacccgtcgaggtctgttt

SEQ ID NO: 3402 - DNA, 25 bp, Homo sapien
aaagaacacccgacgaggtctgttt

SEQ ID NO: 3403 - DNA, 25 bp, Homo sapien
ggatacacacaagagactacatgtt

SEQ ID NO: 3404 - DNA, 25 bp, Homo sapien
ggatacacacaacagactacatgtt

SEQ ID NO: 3405 - DNA, 25 bp, Homo sapien
ggatcttagaactaactacgattat

SEQ ID NO: 3406 - DNA, 25 bp, Homo sapien
ggatcttagaacaaactacgattat

SEQ ID NO: 3407 - DNA, 25 bp, Homo sapien
agaatgtatatcttataactcactt

SEQ ID NO: 3408 - DNA, 25 bp, Homo sapien
agaatgtatatcatataactcactt

SEQ ID NO: 3409 - DNA, 25 bp, Homo sapien
cagacattgtagtaatcgatgtcac

SEQ ID NO: 3410 - DNA, 25 bp, Homo sapien
cagacattgtagaaatcgatgtcac

SEQ ID NO: 3411 - DNA, 25 bp, Homo sapien
aaaaaagggacattacagtgtctct

SEQ ID NO: 3412 - DNA, 25 bp, Homo sapien
aaaaaagggacaatacagtgtctct

SEQ ID NO: 3413 - DNA, 25 bp, Homo sapien
aaaaaatgtcgacgatacttgctct

SEQ ID NO: 3414 - DNA, 25 bp, Homo sapien
aaaaaatgtcgaggatacttgctct

SEQ ID NO: 3415 - DNA, 25 bp, Homo sapien
gaaagagttcgtggagtctcctgtg

SEQ ID NO: 3416 - DNA, 25 bp, Homo sapien
gaaagagttcgtcgagtctcctgtg

SEQ ID NO: 3417 - DNA, 25 bp, Homo sapien
tgctgagctactcgtcgtccctcta

SEQ ID NO: 3418 - DNA, 25 bp, Homo sapien
tgctgagctactggtcgtccctcta

SEQ ID NO: 3419 - DNA, 25 bp, Homo sapien
ccactgaataggtttcagtaaacca

SEQ ID NO: 3420 - DNA, 25 bp, Homo sapien
ccactgaataggattcagtaaacca

SEQ ID NO: 3421 - DNA, 25 bp, Homo sapien
taaagaatgaatacctcaatacgag

SEQ ID NO: 3422 - DNA, 25 bp, Homo sapien
taaagaatgaattcctcaatacgag

SEQ ID NO: 3423 - DNA, 25 bp, Homo sapien
aagaatacgatttaggacacgaacc

SEQ ID NO: 3424 - DNA, 25 bp, Homo sapien
aagaatacgattaaggacacgaacc

SEQ ID NO: 3425 - DNA, 25 bp, Homo sapien
taacgagatggtagtaggactttcc

SEQ ID NO: 3426 - DNA, 25 bp, Homo sapien
taacgagatggttgtaggactttcc

SEQ ID NO: 3427 - DNA, 25 bp, Homo sapien
ctgtagggattgtgtttaggtccct

SEQ ID NO: 3428 - DNA, 25 bp, Homo sapien
ctgtagggattgagtttaggtccct

SEQ ID NO: 3429 - DNA, 25 bp, Homo sapien
cgtccccgtcggaggttcggttcac

SEQ ID NO: 3430 - DNA, 25 bp, Homo sapien
cgtccccgtcggtggttcggttcac

SEQ ID NO: 3431 - DNA, 25 bp, Homo sapien
cagtcactgacgatgtccccttagc

SEQ ID NO: 3432 - DNA, 25 bp, Homo sapien
cagtcactgacgttgtccccttagc

SEQ ID NO: 3433 - DNA, 25 bp, Homo sapien
gacacactcgtacttcgctcctggg

SEQ ID NO: 3434 - DNA, 25 bp, Homo sapien
gacacactcgtagttcgctcctggg

SEQ ID NO: 3435 - DNA, 25 bp, Homo sapien
acacacaaagtatcatcgcgtgtgg

SEQ ID NO: 3436 - DNA, 25 bp, Homo sapien
acacacaaagtaacatcgcgtgtgg

SEQ ID NO: 3437 - DNA, 25 bp, Homo sapien
gagaccacagcgtacatcagtctgc

SEQ ID NO: 3438 - DNA, 25 bp, Homo sapien
gagaccacagcgaacatcagtctgc

SEQ ID NO: 3439 - DNA, 25 bp, Homo sapien
aggcgcgcgtcgaccaagagtctca

SEQ ID NO: 3440 - DNA, 25 bp, Homo sapien
aggcgcgcgtcgtccaagagtctca

SEQ ID NO: 3441 - DNA, 25 bp, Homo sapien
aggagggaccgctaccaagacatcc

SEQ ID NO: 3442 - DNA, 25 bp, Homo sapien
aggagggaccgcaaccaagacatcc

SEQ ID NO: 3443 - DNA, 25 bp, Homo sapien
tgaagaaccacacagatacatccgt

SEQ ID NO: 3444 - DNA, 25 bp, Homo sapien
tgaagaaccacagagatacatccgt

SEQ ID NO: 3445 - DNA, 25 bp, Homo sapien
caacaacaagagtaactcatcgacg

SEQ ID NO: 3446 - DNA, 25 bp, Homo sapien
caacaacaagagaaactcatcgacg

SEQ ID NO: 3447 - DNA, 25 bp, Homo sapien
ctcaatgacaaggaggaccgaccga

SEQ ID NO: 3448 - DNA, 25 bp, Homo sapien
ctcaatgacaagcaggaccgaccga

SEQ ID NO: 3449 - DNA, 25 bp, Homo sapien
ttacacctcaaccaagaagaccggt

SEQ ID NO: 3450 - DNA, 25 bp, Homo sapien
ttacacctcaacgaagaagaccggt

SEQ ID NO: 3451 - DNA, 25 bp, Homo sapien
ttcgtaatgatcgagacgaaatcac

SEQ ID NO: 3452 - DNA, 25 bp, Homo sapien
ttcgtaatgatccagacgaaatcac

SEQ ID NO: 3453 - DNA, 25 bp, Homo sapien
ctcgagtaggtgcagttagagatca

SEQ ID NO: 3454 - DNA, 25 bp, Homo sapien
ctcgagtaggtggagttagagatca

SEQ ID NO: 3455 - DNA, 25 bp, Homo sapien
atttgtatcacttatccgaggtccg

SEQ ID NO: 3456 - DNA, 25 bp, Homo sapien
atttgtatcactaatccgaggtccg

SEQ ID NO: 3457 - DNA, 25 bp, Homo sapien
tgtgtagtctccttttcgacggctc

SEQ ID NO: 3458 - DNA, 25 bp, Homo sapien
tgtgtagtctccatttcgacggctc

SEQ ID NO: 3459 - DNA, 25 bp, Homo sapien
atcagagtttcagagtaggtgtctc

SEQ ID NO: 3460 - DNA, 25 bp, Homo sapien
atcagagtttcacagtaggtgtctc

SEQ ID NO: 3461 - DNA, 25 bp, Homo sapien
tcggagttttctagtcagtgttcgt

SEQ ID NO: 3462 - DNA, 25 bp, Homo sapien
tcggagttttcttgtcagtgttcgt

SEQ ID NO: 3463 - DNA, 25 bp, Homo sapien
tctccggatctctcgatctcttcgt

SEQ ID NO: 3464 - DNA, 25 bp, Homo sapien
tctccggatctcacgatctcttcgt

SEQ ID NO: 3465 - DNA, 25 bp, Homo sapien
ccacactttatcagtacgccgctag

SEQ ID NO: 3466 - DNA, 25 bp, Homo sapien
ccacactttatctgtacgccgctag

SEQ ID NO: 3467 - DNA, 25 bp, Homo sapien
tacgaccagttattggtccggtagt

SEQ ID NO: 3468 - DNA, 25 bp, Homo sapien
tacgaccagttaatggtccggtagt

SEQ ID NO: 3469 - DNA, 25 bp, Homo sapien
cctcgtactgtacgacgtcccggtt

SEQ ID NO: 3470 - DNA, 25 bp, Homo sapien
cctcgtactgtaggacgtcccggtt

SEQ ID NO: 3471 - DNA, 25 bp, Homo sapien
ctctcggagttctgacccctacgag

SEQ ID NO: 3472 - DNA, 25 bp, Homo sapien
ctctcggagttcagacccctacgag

SEQ ID NO: 3473 - DNA, 25 bp, Homo sapien
agcggggtacttcctcgaccgtcca

SEQ ID NO: 3474 - DNA, 25 bp, Homo sapien
agcggggtacttgctcgaccgtcca

SEQ ID NO: 3475 - DNA, 25 bp, Homo sapien
cacgaggtcaagaccgacggtgaca

SEQ ID NO: 3476 - DNA, 25 bp, Homo sapien
cacgaggtcaagtccgacggtgaca

SEQ ID NO: 3477 - DNA, 25 bp, Homo sapien
aggtatttacgctgtccgtcggacc

SEQ ID NO: 3478 - DNA, 25 bp, Homo sapien
aggtatttacgcagtccgtcggacc

SEQ ID NO: 3479 - DNA, 25 bp, Homo sapien
agactgtatatttacgttctctggg

SEQ ID NO: 3480 - DNA, 25 bp, Homo sapien
agactgtatattaacgttctctggg

SEQ ID NO: 3481 - DNA, 25 bp, Homo sapien
acactcgtccttcaggaactaaagg

SEQ ID NO: 3482 - DNA, 25 bp, Homo sapien
acactcgtccttgaggaactaaagg

SEQ ID NO: 3483 - DNA, 25 bp, Homo sapien
gaactccgaccaacggaggaacacc

SEQ ID NO: 3484 - DNA, 25 bp, Homo sapien
gaactccgaccatcggaggaacacc

SEQ ID NO: 3485 - DNA, 25 bp, Homo sapien
gtaagccgcctgtttaatctacgcc

SEQ ID NO: 3486 - DNA, 25 bp, Homo sapien
gtaagccgcctgattaatctacgcc

SEQ ID NO: 3487 - DNA, 25 bp, Homo sapien
agacctttgtagttatcgaagtcta

SEQ ID NO: 3488 - DNA, 25 bp, Homo sapien
agacctttgtagatatcgaagtcta

SEQ ID NO: 3489 - DNA, 25 bp, Homo sapien
aatgtcatcgtagtgtcatcgtcac

SEQ ID NO: 3490 - DNA, 25 bp, Homo sapien
aatgtcatcgtactgtcatcgtcac

SEQ ID NO: 3491 - DNA, 25 bp, Homo sapien
gtcattgaccttctgtcagtctctt

SEQ ID NO: 3492 - DNA, 25 bp, Homo sapien
gtcattgaccttgtgtcagtctctt

SEQ ID NO: 3493 - DNA, 25 bp, Homo sapien
gtctagtatccttgggaccctgacc

SEQ ID NO: 3494 - DNA, 25 bp, Homo sapien
gtctagtatcctagggaccctgacc

SEQ ID NO: 3495 - DNA, 25 bp, Homo sapien
tttagtgacggaaggtcgaaccacc

SEQ ID NO: 3496 - DNA, 25 bp, Homo sapien
tttagtgacggatggtcgaaccacc

SEQ ID NO: 3497 - DNA, 25 bp, Homo sapien
gaccgtgcacagtcggggaaacgac

SEQ ID NO: 3498 - DNA, 25 bp, Homo sapien
gaccgtgcacagacggggaaacgac

SEQ ID NO: 3499 - DNA, 25 bp, Homo sapien
accaacacgacgtcaagtgaaccac

SEQ ID NO: 3500 - DNA, 25 bp, Homo sapien
accaacacgacgacaagtgaaccac

SEQ ID NO: 3501 - DNA, 25 bp, Homo sapien
tcacggaccgaaacgtgggacacgg

SEQ ID NO: 3502 - DNA, 25 bp, Homo sapien
tcacggaccgaatcgtgggacacgg

SEQ ID NO: 3503 - DNA, 25 bp, Homo sapien
tttccttaccggtactgtgacgaaa

SEQ ID NO: 3504 - DNA, 25 bp, Homo sapien
tttccttaccggaactgtgacgaaa

SEQ ID NO: 3505 - DNA, 25 bp, Homo sapien
tgaacatttcgtgactttgattccg

SEQ ID NO: 3506 - DNA, 25 bp, Homo sapien
tgaacatttcgtcactttgattccg

SEQ ID NO: 3507 - DNA, 25 bp, Homo sapien
agacattttacctcttgagataacg

SEQ ID NO: 3508 - DNA, 25 bp, Homo sapien
agacattttaccacttgagataacg

SEQ ID NO: 3509 - DNA, 25 bp, Homo sapien
caacatgatgagtgtcttgggaact

SEQ ID NO: 3510 - DNA, 25 bp, Homo sapien
caacatgatgagagtcttgggaact

SEQ ID NO: 3511 - DNA, 25 bp, Homo sapien
aatgtgatagagtatttccacatac

SEQ ID NO: 3512 - DNA, 25 bp, Homo sapien
aatgtgatagagaatttccacatac

SEQ ID NO: 3513 - DNA, 25 bp, Homo sapien
aagtctttatctttttctcaggagt

SEQ ID NO: 3514 - DNA, 25 bp, Homo sapien
aagtctttatctatttctcaggagt

SEQ ID NO: 3515 - DNA, 25 bp, Homo sapien
gttcaagtacgattagtttcacaat

SEQ ID NO: 3516 - DNA, 25 bp, Homo sapien
gttcaagtacgaatagtttcacaat

SEQ ID NO: 3517 - DNA, 25 bp, Homo sapien
agcgactacaagacattctgaacag

SEQ ID NO: 3518 - DNA, 25 bp, Homo sapien
agcgactacaagtcattctgaacag

SEQ ID NO: 3519 - DNA, 25 bp, Homo sapien
gggtaccacggcattgtcggagaac

SEQ ID NO: 3520 - DNA, 25 bp, Homo sapien
gggtaccacggctttgtcggagaac

SEQ ID NO: 3521 - DNA, 25 bp, Homo sapien
ggtgtcctcgtgtcggcgttgcctc

SEQ ID NO: 3522 - DNA, 25 bp, Homo sapien
ggtgtcctcgtgacggcgttgcctc

SEQ ID NO: 3523 - DNA, 25 bp, Homo sapien
cgtgccgtgtcagtgacacacacca

SEQ ID NO: 3524 - DNA, 25 bp, Homo sapien
cgtgccgtgtcactgacacacacca

SEQ ID NO: 3525 - DNA, 25 bp, Homo sapien
gacggtaccttcgatttcgacttaa

SEQ ID NO: 3526 - DNA, 25 bp, Homo sapien
gacggtaccttccatttcgacttaa

SEQ ID NO: 3527 - DNA, 25 bp, Homo sapien
ccgacgactcctctgtttctcggag

SEQ ID NO: 3528 - DNA, 25 bp, Homo sapien
ccgacgactcctgtgtttctcggag

SEQ ID NO: 3529 - DNA, 25 bp, Homo sapien
agatactgagaggagtctctcgggt

SEQ ID NO: 3530 - DNA, 25 bp, Homo sapien
agatactgagagcagtctctcgggt

SEQ ID NO: 3531 - DNA, 25 bp, Homo sapien
catagaggaagtgtcgtcgtctgag

SEQ ID NO: 3532 - DNA, 25 bp, Homo sapien
catagaggaagtctcgtcgtctgag

SEQ ID NO: 3533 - DNA, 25 bp, Homo sapien
cgaactgtgaattgacgtacgtgga

SEQ ID NO: 3534 - DNA, 25 bp, Homo sapien
cgaactgtgaatagacgtacgtgga

SEQ ID NO: 3535 - DNA, 25 bp, Homo sapien
gcactactggacagcacggggtcac

SEQ ID NO: 3536 - DNA, 25 bp, Homo sapien
gcactactggactgcacggggtcac

SEQ ID NO: 3537 - DNA, 25 bp, Homo sapien
acgtctaacagtgaccgggttcgac

SEQ ID NO: 3538 - DNA, 25 bp, Homo sapien
acgtctaacagtcaccgggttcgac

SEQ ID NO: 3539 - DNA, 25 bp, Homo sapien
actggttttacaagcaccggtgact

SEQ ID NO: 3540 - DNA, 25 bp, Homo sapien
actggttttacatgcaccggtgact

SEQ ID NO: 3541 - DNA, 25 bp, Homo sapien
cggtttccgtactcgactccgtcgg

SEQ ID NO: 3542 - DNA, 25 bp, Homo sapien
cggtttccgtacacgactccgtcgg

SEQ ID NO: 3543 - DNA, 25 bp, Homo sapien
aggggttctacaggagaccacctag

SEQ ID NO: 3544 - DNA, 25 bp, Homo sapien
aggggttctacacgagaccacctag

SEQ ID NO: 3545 - DNA, 25 bp, Homo sapien
tgtggtgccccgtgtgactccctcg

SEQ ID NO: 3546 - DNA, 25 bp, Homo sapien
tgtggtgccccgagtgactccctcg

SEQ ID NO: 3547 - DNA, 25 bp, Homo sapien
gttggctccccgacgtgctcttgct

SEQ ID NO: 3548 - DNA, 25 bp, Homo sapien
gttggctccccgtcgtgctcttgct

SEQ ID NO: 3549 - DNA, 25 bp, Homo sapien
taccgggcagcctagagtccgggct

SEQ ID NO: 3550 - DNA, 25 bp, Homo sapien
taccgggcagccaagagtccgggct

SEQ ID NO: 3551 - DNA, 25 bp, Homo sapien
cgagaccgcagacacttccgaatac

SEQ ID NO: 3552 - DNA, 25 bp, Homo sapien
cgagaccgcagagacttccgaatac

SEQ ID NO: 3553 - DNA, 25 bp, Homo sapien
ggaactgtagtagatgcggacagac

SEQ ID NO: 3554 - DNA, 25 bp, Homo sapien
ggaactgtagtacatgcggacagac

SEQ ID NO: 3555 - DNA, 25 bp, Homo sapien
agtaaccagactacgtgcgtcaaga

SEQ ID NO: 3556 - DNA, 25 bp, Homo sapien
agtaaccagacttcgtgcgtcaaga

SEQ ID NO: 3557 - DNA, 25 bp, Homo sapien
cattctgctcctcaaggctcagagt

SEQ ID NO: 3558 - DNA, 25 bp, Homo sapien
cattctgctcctgaaggctcagagt

SEQ ID NO: 3559 - DNA, 25 bp, Homo sapien
aatgacttctgactattggtcgact

SEQ ID NO: 3560 - DNA, 25 bp, Homo sapien
aatgacttctgagtattggtcgact

SEQ ID NO: 3561 - DNA, 25 bp, Homo sapien
ggtaatatttcgaccgtcgtggtca

SEQ ID NO: 3562 - DNA, 25 bp, Homo sapien
ggtaatatttcgtccgtcgtggtca

SEQ ID NO: 3563 - DNA, 25 bp, Homo sapien
tgtcagtacggtccacgtcggtctg

SEQ ID NO: 3564 - DNA, 25 bp, Homo sapien
tgtcagtacggtgcacgtcggtctg

SEQ ID NO: 3565 - DNA, 25 bp, Homo sapien
ttgtaggtcggtacactgtcgcggt

SEQ ID NO: 3566 - DNA, 25 bp, Homo sapien
ttgtaggtcggttcactgtcgcggt

SEQ ID NO: 3567 - DNA, 25 bp, Homo sapien
gtcacgttgttcaagtgtacgtgtg

SEQ ID NO: 3568 - DNA, 25 bp, Homo sapien
gtcacgttgttctagtgtacgtgtg

SEQ ID NO: 3569 - DNA, 25 bp, Homo sapien
tagacgtctcccatctcgagcgagt

SEQ ID NO: 3570 - DNA, 25 bp, Homo sapien
tagacgtctcccttctcgagcgagt

SEQ ID NO: 3571 - DNA, 25 bp, Homo sapien
ccttaacgaccccgtttctcatccg

SEQ ID NO: 3572 - DNA, 25 bp, Homo sapien
ccttaacgacccggtttctcatccg

SEQ ID NO: 3573 - DNA, 25 bp, Homo sapien
cgtgtactttactttggttcatgac

SEQ ID NO: 3574 - DNA, 25 bp, Homo sapien
cgtgtactttacattggttcatgac

SEQ ID NO: 3575 - DNA, 25 bp, Homo sapien
cttatgtgtcaaatgtctaacttag

SEQ ID NO: 3576 - DNA, 25 bp, Homo sapien
cttatgtgtcaattgtctaacttag

SEQ ID NO: 3577 - DNA, 25 bp, Homo sapien
cttatggtataatggttagactctc

SEQ ID NO: 3578 - DNA, 25 bp, Homo sapien
cttatggtataaaggttagactctc

SEQ ID NO: 3579 - DNA, 25 bp, Homo sapien
taagagtcgtctcgtgttcatagtt

SEQ ID NO: 3580 - DNA, 25 bp, Homo sapien
taagagtcgtctggtgttcatagtt

SEQ ID NO: 3581 - DNA, 25 bp, Homo sapien
attacctcgtggtcgtcgtatattt

SEQ ID NO: 3582 - DNA, 25 bp, Homo sapien
attacctcgtggacgtcgtatattt

SEQ ID NO: 3583 - DNA, 25 bp, Homo sapien
aatgtcctctgtgaatcatactgtt

SEQ ID NO: 3584 - DNA, 25 bp, Homo sapien
aatgtcctctgtcaatcatactgtt

SEQ ID NO: 3585 - DNA, 25 bp, Homo sapien
ttgatctcctgtgtcgtcgaagtcc

SEQ ID NO: 3586 - DNA, 25 bp, Homo sapien
ttgatctcctgtctcgtcgaagtcc

SEQ ID NO: 3587 - DNA, 25 bp, Homo sapien
ttcggtctctattgctactaaaggg

SEQ ID NO: 3588 - DNA, 25 bp, Homo sapien
ttcggtctctatagctactaaaggg

SEQ ID NO: 3589 - DNA, 25 bp, Homo sapien
cgggttacgtcatctgtaacaggtg

SEQ ID NO: 3590 - DNA, 25 bp, Homo sapien
cgggttacgtcaactgtaacaggtg

SEQ ID NO: 3591 - DNA, 25 bp, Homo sapien
aacgaggctaggagtcgaaagtcga

SEQ ID NO: 3592 - DNA, 25 bp, Homo sapien
aacgaggctaggtgtcgaaagtcga

SEQ ID NO: 3593 - DNA, 25 bp, Homo sapien
ttaccaacagacctttcgaaggtga

SEQ ID NO: 3594 - DNA, 25 bp, Homo sapien
ttaccaacagacgtttcgaaggtga

SEQ ID NO: 3595 - DNA, 25 bp, Homo sapien
actcaaagaaccaacataggtcgac

SEQ ID NO: 3596 - DNA, 25 bp, Homo sapien
actcaaagaacctacataggtcgac

SEQ ID NO: 3597 - DNA, 25 bp, Homo sapien
gcgagacgaccgttcagtcgtggtc

SEQ ID NO: 3598 - DNA, 25 bp, Homo sapien
gcgagacgaccgatcagtcgtggtc

SEQ ID NO: 3599 - DNA, 25 bp, Homo sapien
ggttggttaaacataagtcttcgtc

SEQ ID NO: 3600 - DNA, 25 bp, Homo sapien
ggttggttaaacttaagtcttcgtc

SEQ ID NO: 3601 - DNA, 25 bp, Homo sapien
ttgtattatacaaaatactatttgt

SEQ ID NO: 3602 - DNA, 25 bp, Homo sapien
ttgtattatacataatactatttgt

SEQ ID NO: 3603 - DNA, 25 bp, Homo sapien
tttctcgtttatcttacaacaattc

SEQ ID NO: 3604 - DNA, 25 bp, Homo sapien
tttctcgtttatgttacaacaattc

SEQ ID NO: 3605 - DNA, 25 bp, Homo sapien
ttagtagttttagttactgaaaccc

SEQ ID NO: 3606 - DNA, 25 bp, Homo sapien
ttagtagttttacttactgaaaccc

SEQ ID NO: 3607 - DNA, 25 bp, Homo sapien
acgtgatttcatgaatctgaaaccc

SEQ ID NO: 3608 - DNA, 25 bp, Homo sapien
acgtgatttcatcaatctgaaaccc

SEQ ID NO: 3609 - DNA, 25 bp, Homo sapien
cgtggtgtcaaattacctccttcgt

SEQ ID NO: 3610 - DNA, 25 bp, Homo sapien
cgtggtgtcaaaatacctccttcgt

SEQ ID NO: 3611 - DNA, 25 bp, Homo sapien
aggtttcgtatcttctcctccggtc

SEQ ID NO: 3612 - DNA, 25 bp, Homo sapien
aggtttcgtatcatctcctccggtc

SEQ ID NO: 3613 - DNA, 25 bp, Homo sapien
cgtgtagtaaatcatctccttttcg

SEQ ID NO: 3614 - DNA, 25 bp, Homo sapien
cgtgtagtaaatgatctccttttcg

SEQ ID NO: 3615 - DNA, 25 bp, Homo sapien
gtaaaggacgtttcctctatcgttc

SEQ ID NO: 3616 - DNA, 25 bp, Homo sapien
gtaaaggacgttacctctatcgttc

SEQ ID NO: 3617 - DNA, 25 bp, Homo sapien
atcccgaaaaatacaccggaagttt

SEQ ID NO: 3618 - DNA, 25 bp, Homo sapien
atcccgaaaaattcaccggaagttt

SEQ ID NO: 3619 - DNA, 25 bp, Homo sapien
cgggtaaggaatcgtacaaaattct

SEQ ID NO: 3620 - DNA, 25 bp, Homo sapien
cgggtaaggaatggtacaaaattct

SEQ ID NO: 3621 - DNA, 25 bp, Homo sapien
gatttaagaggtggaccggaacatc

SEQ ID NO: 3622 - DNA, 25 bp, Homo sapien
gatttaagaggtcgaccggaacatc

SEQ ID NO: 3623 - DNA, 25 bp, Homo sapien
aataaaagggtatcgccccgatatg

SEQ ID NO: 3624 - DNA, 25 bp, Homo sapien
aataaaagggtaacgccccgatatg

SEQ ID NO: 3625 - DNA, 25 bp, Homo sapien
ttaccctgttacgatctcggtgtta

SEQ ID NO: 3626 - DNA, 25 bp, Homo sapien
ttaccctgttaccatctcggtgtta

SEQ ID NO: 3627 - DNA, 25 bp, Homo sapien
tgtacagccgttctcttcttagtca

SEQ ID NO: 3628 - DNA, 25 bp, Homo sapien
tgtacagccgttgtcttcttagtca

SEQ ID NO: 3629 - DNA, 25 bp, Homo sapien
gttgagaccatcgagtcttttgcgc

SEQ ID NO: 3630 - DNA, 25 bp, Homo sapien
gttgagaccatccagtcttttgcgc

SEQ ID NO: 3631 - DNA, 25 bp, Homo sapien
aaagaaacgcttggttgttctctca

SEQ ID NO: 3632 - DNA, 25 bp, Homo sapien
aaagaaacgcttcgttgttctctca

SEQ ID NO: 3633 - DNA, 25 bp, Homo sapien
ctagaaggacatgtttcggttctta

SEQ ID NO: 3634 - DNA, 25 bp, Homo sapien
ctagaaggacatctttcggttctta

SEQ ID NO: 3635 - DNA, 25 bp, Homo sapien
taacggatggtatctgaggtctctt

SEQ ID NO: 3636 - DNA, 25 bp, Homo sapien
taacggatggtaactgaggtctctt

SEQ ID NO: 3637 - DNA, 25 bp, Homo sapien
tatacgaacgtccaatatagaatca

SEQ ID NO: 3638 - DNA, 25 bp, Homo sapien
tatacgaacgtcgaatatagaatca

SEQ ID NO: 3639 - DNA, 25 bp, Homo sapien
cgtctgttcccgtctcactaagcga

SEQ ID NO: 3640 - DNA, 25 bp, Homo sapien
cgtctgttcccgactcactaagcga

SEQ ID NO: 3641 - DNA, 25 bp, Homo sapien
tcgtgttccacgactacatcggtga

SEQ ID NO: 3642 - DNA, 25 bp, Homo sapien
tcgtgttccacgtctacatcggtga

SEQ ID NO: 3643 - DNA, 25 bp, Homo sapien
cacggttcccacttactactttcga

SEQ ID NO: 3644 - DNA, 25 bp, Homo sapien
cacggttcccacatactactttcga

SEQ ID NO: 3645 - DNA, 25 bp, Homo sapien
gttccctcctacgacgaagtctcta

SEQ ID NO: 3646 - DNA, 25 bp, Homo sapien
gttccctcctaccacgaagtctcta

SEQ ID NO: 3647 - DNA, 25 bp, Homo sapien
cgtagacccctcttcggaaaatcct

SEQ ID NO: 3648 - DNA, 25 bp, Homo sapien
cgtagacccctcatcggaaaatcct

SEQ ID NO: 3649 - DNA, 25 bp, Homo sapien
agagaccctgtctcaggcaaggtac

SEQ ID NO: 3650 - DNA, 25 bp, Homo sapien
agagaccctgtcacaggcaaggtac

SEQ ID NO: 3651 - DNA, 25 bp, Homo sapien
agagcttttccgtgagacagtgcac

SEQ ID NO: 3652 - DNA, 25 bp, Homo sapien
agagcttttccgagagacagtgcac

SEQ ID NO: 3653 - DNA, 25 bp, Homo sapien
agaattcgtttcactgacgatgaat

SEQ ID NO: 3654 - DNA, 25 bp, Homo sapien
agaattcgtttctctgacgatgaat

SEQ ID NO: 3655 - DNA, 25 bp, Homo sapien
aagtcacttgtttgtgacgacagaa

SEQ ID NO: 3656 - DNA, 25 bp, Homo sapien
aagtcacttgttagtgacgacagaa

SEQ ID NO: 3657 - DNA, 25 bp, Homo sapien
tggaagaaggctatcgacagacgaa

SEQ ID NO: 3658 - DNA, 25 bp, Homo sapien
tggaagaaggctttcgacagacgaa

SEQ ID NO: 3659 - DNA, 25 bp, Homo sapien
gacgaacgggcgaccatagacgatc

SEQ ID NO: 3660 - DNA, 25 bp, Homo sapien
gacgaacgggcgtccatagacgatc

SEQ ID NO: 3661 - DNA, 25 bp, Homo sapien
acttaccgagtcttagcaaatactg

SEQ ID NO: 3662 - DNA, 25 bp, Homo sapien
acttaccgagtcatagcaaatactg

SEQ ID NO: 3663 - DNA, 25 bp, Homo sapien
aaagtctcatgttgtcgtaaattac

SEQ ID NO: 3664 - DNA, 25 bp, Homo sapien
aaagtctcatgtagtcgtaaattac

SEQ ID NO: 3665 - DNA, 25 bp, Homo sapien
taatactccacttgggtaaactcat

SEQ ID NO: 3666 - DNA, 25 bp, Homo sapien
taatactccactagggtaaactcat

SEQ ID NO: 3667 - DNA, 25 bp, Homo sapien
ttctgctcttaggacccacgtcacg

SEQ ID NO: 3668 - DNA, 25 bp, Homo sapien
ttctgctcttagcacccacgtcacg

SEQ ID NO: 3669 - DNA, 25 bp, Homo sapien
agtactcggtaattcgacccgaacc

SEQ ID NO: 3670 - DNA, 25 bp, Homo sapien
agtactcggtaaatcgacccgaacc

SEQ ID NO: 3671 - DNA, 25 bp, Homo sapien
aaccagttctactgacgtccgaacc

SEQ ID NO: 3672 - DNA, 25 bp, Homo sapien
aaccagttctacagacgtccgaacc

SEQ ID NO: 3673 - DNA, 25 bp, Homo sapien
ttagcgaacttgaaccctccgtctc

SEQ ID NO: 3674 - DNA, 25 bp, Homo sapien
ttagcgaacttgtaccctccgtctc

SEQ ID NO: 3675 - DNA, 25 bp, Homo sapien
aggagtgatactttgtttccgcctc

SEQ ID NO: 3676 - DNA, 25 bp, Homo sapien
aggagtgatactatgtttccgcctc

SEQ ID NO: 3677 - DNA, 25 bp, Homo sapien
acggtggactctttggagtctcccc

SEQ ID NO: 3678 - DNA, 25 bp, Homo sapien
acggtggactctatggagtctcccc

SEQ ID NO: 3679 - DNA, 25 bp, Homo sapien
gggtcctgtctgcagctacccgtcg

SEQ ID NO: 3680 - DNA, 25 bp, Homo sapien
gggtcctgtctggagctacccgtcg

SEQ ID NO: 3681 - DNA, 25 bp, Homo sapien
agaagttcctcgtacggtaccgaac

SEQ ID NO: 3682 - DNA, 25 bp, Homo sapien
agaagttcctcgaacggtaccgaac

SEQ ID NO: 3683 - DNA, 25 bp, Homo sapien
tgagatattgtctgaactaccacac

SEQ ID NO: 3684 - DNA, 25 bp, Homo sapien
tgagatattgtcagaactaccacac

SEQ ID NO: 3685 - DNA, 25 bp, Homo sapien
tggactctagtcaagacacaagacc

SEQ ID NO: 3686 - DNA, 25 bp, Homo sapien
tggactctagtctagacacaagacc

SEQ ID NO: 3687 - DNA, 25 bp, Homo sapien
ggtcgcttacgtctgaccaggtacc

SEQ ID NO: 3688 - DNA, 25 bp, Homo sapien
ggtcgcttacgtgtgaccaggtacc

SEQ ID NO: 3689 - DNA, 25 bp, Homo sapien
gggtctccgtcgatccgtccggtga

SEQ ID NO: 3690 - DNA, 25 bp, Homo sapien
gggtctccgtcgttccgtccggtga

SEQ ID NO: 3691 - DNA, 25 bp, Homo sapien
ccggtgattcttgtaccgtgctgga

SEQ ID NO: 3692 - DNA, 25 bp, Homo sapien
ccggtgattcttctaccgtgctgga

SEQ ID NO: 3693 - DNA, 25 bp, Homo sapien
ggcacgactgcgactgacgtgcgat

SEQ ID NO: 3694 - DNA, 25 bp, Homo sapien
ggcacgactgcgtctgacgtgcgat

SEQ ID NO: 3695 - DNA, 25 bp, Homo sapien
ccagaaggtgaggtcctacagtcta

SEQ ID NO: 3696 - DNA, 25 bp, Homo sapien
ccagaaggtgagctcctacagtcta

SEQ ID NO: 3697 - DNA, 25 bp, Homo sapien
ttgtgacgaccgtctaggtcgagga

SEQ ID NO: 3698 - DNA, 25 bp, Homo sapien
ttgtgacgaccgactaggtcgagga

SEQ ID NO: 3699 - DNA, 25 bp, Homo sapien
agatgttcgacaacagcattaagga

SEQ ID NO: 3700 - DNA, 25 bp, Homo sapien
agatgttcgacatcagcattaagga

SEQ ID NO: 3701 - DNA, 25 bp, Homo sapien
aggattactccacaaataataggtg

SEQ ID NO: 3702 - DNA, 25 bp, Homo sapien
aggattactccagaaataataggtg

SEQ ID NO: 3703 - DNA, 25 bp, Homo sapien
gttcctaaacagtactaccgacccg

SEQ ID NO: 3704 - DNA, 25 bp, Homo sapien
gttcctaaacagaactaccgacccg

SEQ ID NO: 3705 - DNA, 25 bp, Homo sapien
ccttaactgtagaagcgtacctacg

SEQ ID NO: 3706 - DNA, 25 bp, Homo sapien
ccttaactgtagtagcgtacctacg

SEQ ID NO: 3707 - DNA, 25 bp, Homo sapien
accatctcacgactagaatcgtacg

SEQ ID NO: 3708 - DNA, 25 bp, Homo sapien
accatctcacgagtagaatcgtacg

SEQ ID NO: 3709 - DNA, 25 bp, Homo sapien
acatctactctaggtcgctcacgtc

SEQ ID NO: 3710 - DNA, 25 bp, Homo sapien
acatctactctacgtcgctcacgtc

SEQ ID NO: 3711 - DNA, 25 bp, Homo sapien
acgtactcagtactaacggccttcg

SEQ ID NO: 3712 - DNA, 25 bp, Homo sapien
acgtactcagtagtaacggccttcg

SEQ ID NO: 3713 - DNA, 25 bp, Homo sapien
cttcggtcagtcgtgggagtgtctc

SEQ ID NO: 3714 - DNA, 25 bp, Homo sapien
cttcggtcagtcctgggagtgtctc

SEQ ID NO: 3715 - DNA, 25 bp, Homo sapien
gttggtctgtcgtaaccgaagtctg

SEQ ID NO: 3716 - DNA, 25 bp, Homo sapien
gttggtctgtcgaaaccgaagtctg

SEQ ID NO: 3717 - DNA, 25 bp, Homo sapien
atgggtcttttcgaaagacactgac

SEQ ID NO: 3718 - DNA, 25 bp, Homo sapien
atgggtcttttccaaagacactgac

SEQ ID NO: 3719 - DNA, 25 bp, Homo sapien
gttcgattcattgtaaacaccagtc

SEQ ID NO: 3720 - DNA, 25 bp, Homo sapien
gttcgattcattctaaacaccagtc

SEQ ID NO: 3721 - DNA, 25 bp, Homo sapien
ggaatcacactgtggacaactgaga

SEQ ID NO: 3722 - DNA, 25 bp, Homo sapien
ggaatcacactgaggacaactgaga

SEQ ID NO: 3723 - DNA, 25 bp, Homo sapien
tcatgaccaatagcactaataacgg

SEQ ID NO: 3724 - DNA, 25 bp, Homo sapien
tcatgaccaataccactaataacgg

SEQ ID NO: 3725 - DNA, 25 bp, Homo sapien
ttaacactaaaatgatacatcttct

SEQ ID NO: 3726 - DNA, 25 bp, Homo sapien
ttaacactaaaaagatacatcttct

SEQ ID NO: 3727 - DNA, 25 bp, Homo sapien
gaacgaagaaccaatcatactctgt

SEQ ID NO: 3728 - DNA, 25 bp, Homo sapien
gaacgaagaacctatcatactctgt

SEQ ID NO: 3729 - DNA, 25 bp, Homo sapien
aaaggatacactgaatatatcactc

SEQ ID NO: 3730 - DNA, 25 bp, Homo sapien
aaaggatacactcaatatatcactc

SEQ ID NO: 3731 - DNA, 25 bp, Homo sapien
ccctcgggtatcgtaaagcttaccg

SEQ ID NO: 3732 - DNA, 25 bp, Homo sapien
ccctcgggtatcctaaagcttaccg

SEQ ID NO: 3733 - DNA, 25 bp, Homo sapien
aacactcctgaactaacagaattac

SEQ ID NO: 3734 - DNA, 25 bp, Homo sapien
aacactcctgaagtaacagaattac

SEQ ID NO: 3735 - DNA, 25 bp, Homo sapien
acatcaaccacgaaggtgatactaa

SEQ ID NO: 3736 - DNA, 25 bp, Homo sapien
acatcaaccacgtaggtgatactaa

SEQ ID NO: 3737 - DNA, 25 bp, Homo sapien
acctcagacccagtagtgttacagg

SEQ ID NO: 3738 - DNA, 25 bp, Homo sapien
acctcagacccactagtgttacagg

SEQ ID NO: 3739 - DNA, 25 bp, Homo sapien
ctatgtctccaaggtcaactagtct

SEQ ID NO: 3740 - DNA, 25 bp, Homo sapien
ctatgtctccaacgtcaactagtct

SEQ ID NO: 3741 - DNA, 25 bp, Homo sapien
tgtgaatccattcacgtgtcttttt

SEQ ID NO: 3742 - DNA, 25 bp, Homo sapien
tgtgaatccattgacgtgtcttttt

SEQ ID NO: 3743 - DNA, 25 bp, Homo sapien
gacatcggtcttcgtcctggtctgt

SEQ ID NO: 3744 - DNA, 25 bp, Homo sapien
gacatcggtcttggtcctggtctgt

SEQ ID NO: 3745 - DNA, 25 bp, Homo sapien
aggacgcgctagagtgcctgatctg

SEQ ID NO: 3746 - DNA, 25 bp, Homo sapien
aggacgcgctagtgtgcctgatctg

SEQ ID NO: 3747 - DNA, 25 bp, Homo sapien
gtcgagtttgtgtttacgtcctcgt

SEQ ID NO: 3748 - DNA, 25 bp, Homo sapien
gtcgagtttgtgattacgtcctcgt

SEQ ID NO: 3749 - DNA, 25 bp, Homo sapien
atgtcgtgatcgtaggtgttccatt

SEQ ID NO: 3750 - DNA, 25 bp, Homo sapien
atgtcgtgatcgaaggtgttccatt

SEQ ID NO: 3751 - DNA, 25 bp, Homo sapien
ttaggtggctcacgaggtgcaacat

SEQ ID NO: 3752 - DNA, 25 bp, Homo sapien
ttaggtggctcaggaggtgcaacat

SEQ ID NO: 3753 - DNA, 25 bp, Homo sapien
acaggttcgagtacggtccgaccct

SEQ ID NO: 3754 - DNA, 25 bp, Homo sapien
acaggttcgagttcggtccgaccct

SEQ ID NO: 3755 - DNA, 25 bp, Homo sapien
gcacactgtgaaggtgtagcgccct

SEQ ID NO: 3756 - DNA, 25 bp, Homo sapien
gcacactgtgaacgtgtagcgccct

SEQ ID NO: 3757 - DNA, 25 bp, Homo sapien
tgtcattcgtgtacctgttcacccg

SEQ ID NO: 3758 - DNA, 25 bp, Homo sapien
tgtcattcgtgttcctgttcacccg

SEQ ID NO: 3759 - DNA, 25 bp, Homo sapien
cggtgacttctttccggtctccatg

SEQ ID NO: 3760 - DNA, 25 bp, Homo sapien
cggtgacttcttaccggtctccatg

SEQ ID NO: 3761 - DNA, 25 bp, Homo sapien
aggtccgatccaggtgaccaccgac

SEQ ID NO: 3762 - DNA, 25 bp, Homo sapien
aggtccgatccacgtgaccaccgac

SEQ ID NO: 3763 - DNA, 25 bp, Homo sapien
ggtacaacgccacgaacgcgtccta

SEQ ID NO: 3764 - DNA, 25 bp, Homo sapien
ggtacaacgccaggaacgcgtccta

SEQ ID NO: 3765 - DNA, 25 bp, Homo sapien
gctcgcgtaccatgagacggtccga

SEQ ID NO: 3766 - DNA, 25 bp, Homo sapien
gctcgcgtaccaagagacggtccga

SEQ ID NO: 3767 - DNA, 25 bp, Homo sapien
gtcggtactacatgaactcgtgcta

SEQ ID NO: 3768 - DNA, 25 bp, Homo sapien
gtcggtactacaagaactcgtgcta

SEQ ID NO: 3769 - DNA, 25 bp, Homo sapien
ggaggagtaagaagactcctcgacc

SEQ ID NO: 3770 - DNA, 25 bp, Homo sapien
ggaggagtaagatgactcctcgacc

SEQ ID NO: 3771 - DNA, 25 bp, Homo sapien
tgctcctagctttacgaccgctacg

SEQ ID NO: 3772 - DNA, 25 bp, Homo sapien
tgctcctagcttaacgaccgctacg

SEQ ID NO: 3773 - DNA, 25 bp, Homo sapien
cgcgtcgtccacgtagcggtcgtaa

SEQ ID NO: 3774 - DNA, 25 bp, Homo sapien
cgcgtcgtccacctagcggtcgtaa

SEQ ID NO: 3775 - DNA, 25 bp, Homo sapien
atgtggtccgagaaacaagtcacaa

SEQ ID NO: 3776 - DNA, 25 bp, Homo sapien
atgtggtccgagtaacaagtcacaa

SEQ ID NO: 3777 - DNA, 25 bp, Homo sapien
tgtagtaagaacattaacgacaaca

SEQ ID NO: 3778 - DNA, 25 bp, Homo sapien
tgtagtaagaactttaacgacaaca

SEQ ID NO: 3779 - DNA, 25 bp, Homo sapien
gtctatgtttatttagcagtacgtc

SEQ ID NO: 3780 - DNA, 25 bp, Homo sapien
gtctatgtttatatagcagtacgtc

SEQ ID NO: 3781 - DNA, 25 bp, Homo sapien
gtctcaagtcccagagagacgactc

SEQ ID NO: 3782 - DNA, 25 bp, Homo sapien
gtctcaagtccctgagagacgactc

SEQ ID NO: 3783 - DNA, 25 bp, Homo sapien
cgagtctccttgtttctaggaaacc

SEQ ID NO: 3784 - DNA, 25 bp, Homo sapien
cgagtctccttgattctaggaaacc

SEQ ID NO: 3785 - DNA, 25 bp, Homo sapien
aggtcagagtcctcgtttcaatcta

SEQ ID NO: 3786 - DNA, 25 bp, Homo sapien
aggtcagagtccacgtttcaatcta

SEQ ID NO: 3787 - DNA, 25 bp, Homo sapien
tttcagagtcacactgatgaacctg

SEQ ID NO: 3788 - DNA, 25 bp, Homo sapien
tttcagagtcactctgatgaacctg

SEQ ID NO: 3789 - DNA, 25 bp, Homo sapien
ccgggtagacactggagaggtaccc

SEQ ID NO: 3790 - DNA, 25 bp, Homo sapien
ccgggtagacacaggagaggtaccc

SEQ ID NO: 3791 - DNA, 25 bp, Homo sapien
aagacgtaacttgagaggtacgtca

SEQ ID NO: 3792 - DNA, 25 bp, Homo sapien
aagacgtaacttcagaggtacgtca

SEQ ID NO: 3793 - DNA, 25 bp, Homo sapien
ctcactactctgacgacatggactc

SEQ ID NO: 3794 - DNA, 25 bp, Homo sapien
ctcactactctgtcgacatggactc

SEQ ID NO: 3795 - DNA, 25 bp, Homo sapien
gtcgaacacctacacaaggtactct

SEQ ID NO: 3796 - DNA, 25 bp, Homo sapien
gtcgaacacctagacaaggtactct

SEQ ID NO: 3797 - DNA, 25 bp, Homo sapien
gtctggcacccgacgcacagtgcag

SEQ ID NO: 3798 - DNA, 25 bp, Homo sapien
gtctggcacccgtcgcacagtgcag

SEQ ID NO: 3799 - DNA, 25 bp, Homo sapien
cctgttcctctcttccacagtggag

SEQ ID NO: 3800 - DNA, 25 bp, Homo sapien
cctgttcctctcatccacagtggag

SEQ ID NO: 3801 - DNA, 25 bp, Homo sapien
ctgttttattacgttccacggtatg

SEQ ID NO: 3802 - DNA, 25 bp, Homo sapien
ctgttttattaccttccacggtatg

SEQ ID NO: 3803 - DNA, 25 bp, Homo sapien
taggtttcgtcatctctaaaacgta

SEQ ID NO: 3804 - DNA, 25 bp, Homo sapien
taggtttcgtcaactctaaaacgta

SEQ ID NO: 3805 - DNA, 25 bp, Homo sapien
tctacttcttctcataaagtaaata

SEQ ID NO: 3806 - DNA, 25 bp, Homo sapien
tctacttcttctgataaagtaaata

SEQ ID NO: 3807 - DNA, 25 bp, Homo sapien
gatgtatgtgtttccagtagttacc

SEQ ID NO: 3808 - DNA, 25 bp, Homo sapien
gatgtatgtgttaccagtagttacc

SEQ ID NO: 3809 - DNA, 25 bp, Homo sapien
tgttagttctacaacgttagttaac

SEQ ID NO: 3810 - DNA, 25 bp, Homo sapien
tgttagttctactacgttagttaac

SEQ ID NO: 3811 - DNA, 25 bp, Homo sapien
ttttgtcttactactggatacgatt

SEQ ID NO: 3812 - DNA, 25 bp, Homo sapien
ttttgtcttacttctggatacgatt

SEQ ID NO: 3813 - DNA, 25 bp, Homo sapien
tgttttacgtttcgtccacaccgtc

SEQ ID NO: 3814 - DNA, 25 bp, Homo sapien
tgttttacgtttggtccacaccgtc

SEQ ID NO: 3815 - DNA, 25 bp, Homo sapien
ctgacgtgtctctgcccgaccgtgt

SEQ ID NO: 3816 - DNA, 25 bp, Homo sapien
ctgacgtgtctcagcccgaccgtgt

SEQ ID NO: 3817 - DNA, 25 bp, Homo sapien
gcgttcgccctgaaccgactcgagt

SEQ ID NO: 3818 - DNA, 25 bp, Homo sapien
gcgttcgccctgtaccgactcgagt

SEQ ID NO: 3819 - DNA, 25 bp, Homo sapien
ccgtttcctctatctacgatactgg

SEQ ID NO: 3820 - DNA, 25 bp, Homo sapien
ccgtttcctctaactacgatactgg

SEQ ID NO: 3821 - DNA, 25 bp, Homo sapien
cctcgaccgacgactctagaaacgg

SEQ ID NO: 3822 - DNA, 25 bp, Homo sapien
cctcgaccgacgtctctagaaacgg

SEQ ID NO: 3823 - DNA, 25 bp, Homo sapien
gggtcgtaagacagtactcaaaagg

SEQ ID NO: 3824 - DNA, 25 bp, Homo sapien
gggtcgtaagactgtactcaaaagg

SEQ ID NO: 3825 - DNA, 25 bp, Homo sapien
tggaagaaagacactcgtcaaggtg

SEQ ID NO: 3826 - DNA, 25 bp, Homo sapien
tggaagaaagactctcgtcaaggtg

SEQ ID NO: 3827 - DNA, 25 bp, Homo sapien
gtaaaaagacgatcctgaccgtatc

SEQ ID NO: 3828 - DNA, 25 bp, Homo sapien
gtaaaaagacgaacctgaccgtatc

SEQ ID NO: 3829 - DNA, 25 bp, Homo sapien
actacaatgagtggttacatatatc

SEQ ID NO: 3830 - DNA, 25 bp, Homo sapien
actacaatgagtcgttacatatatc

SEQ ID NO: 3831 - DNA, 25 bp, Homo sapien
tcgaaagtcgtcgactctccatctc

SEQ ID NO: 3832 - DNA, 25 bp, Homo sapien
tcgaaagtcgtccactctccatctc

SEQ ID NO: 3833 - DNA, 25 bp, Homo sapien
agtagacagtcgactccttacatcc

SEQ ID NO: 3834 - DNA, 25 bp, Homo sapien
agtagacagtcgtctccttacatcc

SEQ ID NO: 3835 - DNA, 25 bp, Homo sapien
taggtccgtctctctcgtgattacc

SEQ ID NO: 3836 - DNA, 25 bp, Homo sapien
taggtccgtctcactcgtgattacc

SEQ ID NO: 3837 - DNA, 25 bp, Homo sapien
gagaccactgaactttacgtcgtta

SEQ ID NO: 3838 - DNA, 25 bp, Homo sapien
gagaccactgaagtttacgtcgtta

SEQ ID NO: 3839 - DNA, 25 bp, Homo sapien
tcggacctccaaaggagtctgtgct

SEQ ID NO: 3840 - DNA, 25 bp, Homo sapien
tcggacctccaatggagtctgtgct

SEQ ID NO: 3841 - DNA, 25 bp, Homo sapien
cccctctgagatgtgtacgtcttgt

SEQ ID NO: 3842 - DNA, 25 bp, Homo sapien
cccctctgagatctgtacgtcttgt

SEQ ID NO: 3843 - DNA, 25 bp, Homo sapien
gtcactcctcctagggatgttcccg

SEQ ID NO: 3844 - DNA, 25 bp, Homo sapien
gtcactcctccttgggatgttcccg

SEQ ID NO: 3845 - DNA, 25 bp, Homo sapien
accaaccgtctagagggtcctccgg

SEQ ID NO: 3846 - DNA, 25 bp, Homo sapien
accaaccgtctacagggtcctccgg

SEQ ID NO: 3847 - DNA, 25 bp, Homo sapien
tcttatttatctcagggtccgtccc

SEQ ID NO: 3848 - DNA, 25 bp, Homo sapien
tcttatttatctgagggtccgtccc

SEQ ID NO: 3849 - DNA, 25 bp, Homo sapien
tctttttcaagaacgagtcgccacc

SEQ ID NO: 3850 - DNA, 25 bp, Homo sapien
tctttttcaagatcgagtcgccacc

SEQ ID NO: 3851 - DNA, 25 bp, Homo sapien
cttctcgcacagatgtaaccatccg

SEQ ID NO: 3852 - DNA, 25 bp, Homo sapien
cttctcgcacagttgtaaccatccg

SEQ ID NO: 3853 - DNA, 25 bp, Homo sapien
agtgactgaccgaccgacgagtccg

SEQ ID NO: 3854 - DNA, 25 bp, Homo sapien
agtgactgaccgtccgacgagtccg

SEQ ID NO: 3855 - DNA, 25 bp, Homo sapien
tcgactgtctcgtcattcaggtcag

SEQ ID NO: 3856 - DNA, 25 bp, Homo sapien
tcgactgtctcgacattcaggtcag

SEQ ID NO: 3857 - DNA, 25 bp, Homo sapien
ttttcatgtcaacaccgtaaatgag

SEQ ID NO: 3858 - DNA, 25 bp, Homo sapien
ttttcatgtcaagaccgtaaatgag

SEQ ID NO: 3859 - DNA, 25 bp, Homo sapien
tgggtacctactactgacgacaatg

SEQ ID NO: 3860 - DNA, 25 bp, Homo sapien
tgggtacctacttctgacgacaatg

SEQ ID NO: 3861 - DNA, 25 bp, Homo sapien
cggtgtcccttcgtcggtcgaacac

SEQ ID NO: 3862 - DNA, 25 bp, Homo sapien
cggtgtcccttcctcggtcgaacac

SEQ ID NO: 3863 - DNA, 25 bp, Homo sapien
ccgtgtcggctcagcgggtacaacc

SEQ ID NO: 3864 - DNA, 25 bp, Homo sapien
ccgtgtcggctctgcgggtacaacc

SEQ ID NO: 3865 - DNA, 25 bp, Homo sapien
cagtatgtctcgttgtttgagagca

SEQ ID NO: 3866 - DNA, 25 bp, Homo sapien
cagtatgtctcgatgtttgagagca

SEQ ID NO: 3867 - DNA, 25 bp, Homo sapien
ttcagtcattcgtctttcgtggaag

SEQ ID NO: 3868 - DNA, 25 bp, Homo sapien
ttcagtcattcgactttcgtggaag

SEQ ID NO: 3869 - DNA, 25 bp, Homo sapien
tccgtacattctacgttttcagaag

SEQ ID NO: 3870 - DNA, 25 bp, Homo sapien
tccgtacattcttcgttttcagaag

SEQ ID NO: 3871 - DNA, 25 bp, Homo sapien
tcgtataggactttagattcagacc

SEQ ID NO: 3872 - DNA, 25 bp, Homo sapien
tcgtataggactatagattcagacc

SEQ ID NO: 3873 - DNA, 25 bp, Homo sapien
tatactggtcaattattcagactgt

SEQ ID NO: 3874 - DNA, 25 bp, Homo sapien
tatactggtcaaatattcagactgt

SEQ ID NO: 3875 - DNA, 25 bp, Homo sapien
cgaaggtgtacaagtgtctcatggg

SEQ ID NO: 3876 - DNA, 25 bp, Homo sapien
cgaaggtgtacatgtgtctcatggg

SEQ ID NO: 3877 - DNA, 25 bp, Homo sapien
acagtgggaccgttgacagtcacgg

SEQ ID NO: 3878 - DNA, 25 bp, Homo sapien
acagtgggaccgatgacagtcacgg

SEQ ID NO: 3879 - DNA, 25 bp, Homo sapien
aacaagggtctcgacgacggaacag

SEQ ID NO: 3880 - DNA, 25 bp, Homo sapien
aacaagggtctccacgacggaacag

SEQ ID NO: 3881 - DNA, 25 bp, Homo sapien
ggtagaaagttttcttaacaccctt

SEQ ID NO: 3882 - DNA, 25 bp, Homo sapien
ggtagaaagtttacttaacaccctt

SEQ ID NO: 3883 - DNA, 25 bp, Homo sapien
tatgttactgatgtttacacagcgc

SEQ ID NO: 3884 - DNA, 25 bp, Homo sapien
tatgttactgatctttacacagcgc

SEQ ID NO: 3885 - DNA, 25 bp, Homo sapien
tctctgtagatattcttgtgaacga

SEQ ID NO: 3886 - DNA, 25 bp, Homo sapien
tctctgtagataatcttgtgaacga

SEQ ID NO: 3887 - DNA, 25 bp, Homo sapien
tctggtgtgagaactcctcgtcctc

SEQ ID NO: 3888 - DNA, 25 bp, Homo sapien
tctggtgtgagatctcctcgtcctc

SEQ ID NO: 3889 - DNA, 25 bp, Homo sapien
gcagaggtgtggttagagtctccac

SEQ ID NO: 3890 - DNA, 25 bp, Homo sapien
gcagaggtgtggatagagtctccac

SEQ ID NO: 3891 - DNA, 25 bp, Homo sapien
aaccaagaggggtaagtacgtcaca

SEQ ID NO: 3892 - DNA, 25 bp, Homo sapien
aaccaagaggggaaagtacgtcaca

SEQ ID NO: 3893 - DNA, 25 bp, Homo sapien
gtctatgaagagaactagagcttca

SEQ ID NO: 3894 - DNA, 25 bp, Homo sapien
gtctatgaagagtactagagcttca

SEQ ID NO: 3895 - DNA, 25 bp, Homo sapien
tgagtattccagtagtcgtgatttc

SEQ ID NO: 3896 - DNA, 25 bp, Homo sapien
tgagtattccagaagtcgtgatttc

SEQ ID NO: 3897 - DNA, 25 bp, Homo sapien
cttcgaccccgaggatcgtttttat

SEQ ID NO: 3898 - DNA, 25 bp, Homo sapien
cttcgaccccgacgatcgtttttat

SEQ ID NO: 3899 - DNA, 25 bp, Homo sapien
gtcgagacctccttaatggacatgt

SEQ ID NO: 3900 - DNA, 25 bp, Homo sapien
gtcgagacctccataatggacatgt

SEQ ID NO: 3901 - DNA, 25 bp, Homo sapien
agacgatatttcctttgacaggtat

SEQ ID NO: 3902 - DNA, 25 bp, Homo sapien
agacgatatttcgtttgacaggtat

SEQ ID NO: 3903 - DNA, 25 bp, Homo sapien
gagagttttactgatgttagacctc

SEQ ID NO: 3904 - DNA, 25 bp, Homo sapien
gagagttttactcatgttagacctc

SEQ ID NO: 3905 - DNA, 25 bp, Homo sapien
gaaggtcttcaaaagacacgaatac

SEQ ID NO: 3906 - DNA, 25 bp, Homo sapien
gaaggtcttcaatagacacgaatac

SEQ ID NO: 3907 - DNA, 25 bp, Homo sapien
gagataaccttggtataacgattac

SEQ ID NO: 3908 - DNA, 25 bp, Homo sapien
gagataaccttgctataacgattac

SEQ ID NO: 3909 - DNA, 25 bp, Homo sapien
agtgacgtctgttcatatagtattc

SEQ ID NO: 3910 - DNA, 25 bp, Homo sapien
agtgacgtctgtacatatagtattc

SEQ ID NO: 3911 - DNA, 25 bp, Homo sapien
actctagtatgttaatgacgtccct

SEQ ID NO: 3912 - DNA, 25 bp, Homo sapien
actctagtatgtaaatgacgtccct

SEQ ID NO: 3913 - DNA, 25 bp, Homo sapien
cgatatttcgtgttacgataaactt

SEQ ID NO: 3914 - DNA, 25 bp, Homo sapien
cgatatttcgtgatacgataaactt

SEQ ID NO: 3915 - DNA, 25 bp, Homo sapien
cgatttagatatcacgaagaactac

SEQ ID NO: 3916 - DNA, 25 bp, Homo sapien
cgatttagatatgacgaagaactac

SEQ ID NO: 3917 - DNA, 25 bp, Homo sapien
tatattgtctatacgagatgtacac

SEQ ID NO: 3918 - DNA, 25 bp, Homo sapien
tatattgtctattcgagatgtacac

SEQ ID NO: 3919 - DNA, 25 bp, Homo sapien
gataatttgtcaagacttgtccgtc

SEQ ID NO: 3920 - DNA, 25 bp, Homo sapien
gataatttgtcatgacttgtccgtc

SEQ ID NO: 3921 - DNA, 25 bp, Homo sapien
ttaacgtgtagaatttttctacgtc

SEQ ID NO: 3922 - DNA, 25 bp, Homo sapien
ttaacgtgtagattttttctacgtc

SEQ ID NO: 3923 - DNA, 25 bp, Homo sapien
taagtgtgtactcgatcggtcgtgg

SEQ ID NO: 3924 - DNA, 25 bp, Homo sapien
taagtgtgtactggatcggtcgtgg

SEQ ID NO: 3925 - DNA, 25 bp, Homo sapien
gaggtctctcgtgcaccgacgggct

SEQ ID NO: 3926 - DNA, 25 bp, Homo sapien
gaggtctctcgtccaccgacgggct

SEQ ID NO: 3927 - DNA, 25 bp, Homo sapien
ttcgtcttcgtcactcgtagctgta

SEQ ID NO: 3928 - DNA, 25 bp, Homo sapien
ttcgtcttcgtctctcgtagctgta

SEQ ID NO: 3929 - DNA, 25 bp, Homo sapien
tcggtccgtccgacgtccgtcttgg

SEQ ID NO: 3930 - DNA, 25 bp, Homo sapien
tcggtccgtccgtcgtccgtcttgg

SEQ ID NO: 3931 - DNA, 25 bp, Homo sapien
tatcattgttagacgcttattgtct

SEQ ID NO: 3932 - DNA, 25 bp, Homo sapien
tatcattgttagtcgcttattgtct

SEQ ID NO: 3933 - DNA, 25 bp, Homo sapien
gttctgtatagtctttacctagtgt

SEQ ID NO: 3934 - DNA, 25 bp, Homo sapien
gttctgtatagtgtttacctagtgt

SEQ ID NO: 3935 - DNA, 25 bp, Homo sapien
agtactgttgtattgtcccttcggt

SEQ ID NO: 3936 - DNA, 25 bp, Homo sapien
agtactgttgtaatgtcccttcggt

SEQ ID NO: 3937 - DNA, 25 bp, Homo sapien
tagacgttcagtaaatcgctatttt

SEQ ID NO: 3938 - DNA, 25 bp, Homo sapien
tagacgttcagttaatcgctatttt

SEQ ID NO: 3939 - DNA, 25 bp, Homo sapien
gagactccatctaaagtgtctcctt

SEQ ID NO: 3940 - DNA, 25 bp, Homo sapien
gagactccatcttaagtgtctcctt

SEQ ID NO: 3941 - DNA, 25 bp, Homo sapien
gtgaccgaatgtttaggtctctgta

SEQ ID NO: 3942 - DNA, 25 bp, Homo sapien
gtgaccgaatgtataggtctctgta

SEQ ID NO: 3943 - DNA, 25 bp, Homo sapien
gctgtggttgaggttcaggtcccta

SEQ ID NO: 3944 - DNA, 25 bp, Homo sapien
gctgtggttgagcttcaggtcccta

SEQ ID NO: 3945 - DNA, 25 bp, Homo sapien
gactatagacttaacggtactcaag

SEQ ID NO: 3946 - DNA, 25 bp, Homo sapien
gactatagactttacggtactcaag

SEQ ID NO: 3947 - DNA, 25 bp, Homo sapien
ctgtgccacatctacgagtctgggt

SEQ ID NO: 3948 - DNA, 25 bp, Homo sapien
ctgtgccacatcaacgagtctgggt

SEQ ID NO: 3949 - DNA, 25 bp, Homo sapien
cttgtgaggtcaaatagactttcga

SEQ ID NO: 3950 - DNA, 25 bp, Homo sapien
cttgtgaggtcatatagactttcga

SEQ ID NO: 3951 - DNA, 25 bp, Homo sapien
cgacagggttcaattagccttacgc

SEQ ID NO: 3952 - DNA, 25 bp, Homo sapien
cgacagggttcatttagccttacgc

SEQ ID NO: 3953 - DNA, 25 bp, Homo sapien
tctggacggtcgattctagacccca

SEQ ID NO: 3954 - DNA, 25 bp, Homo sapien
tctggacggtcgtttctagacccca

SEQ ID NO: 3955 - DNA, 25 bp, Homo sapien
tggtgggtcgaatagacacgaccta

SEQ ID NO: 3956 - DNA, 25 bp, Homo sapien
tggtgggtcgaaaagacacgaccta

SEQ ID NO: 3957 - DNA, 25 bp, Homo sapien
gggaccacgagtcttaggacgcacg

SEQ ID NO: 3958 - DNA, 25 bp, Homo sapien
gggaccacgagtgttaggacgcacg

SEQ ID NO: 3959 - DNA, 25 bp, Homo sapien
aaggaccaagacgtcggagacgcta

SEQ ID NO: 3960 - DNA, 25 bp, Homo sapien
aaggaccaagacctcggagacgcta

SEQ ID NO: 3961 - DNA, 25 bp, Homo sapien
tcggaagtacagtttggagactatc

SEQ ID NO: 3962 - DNA, 25 bp, Homo sapien
tcggaagtacagattggagactatc

SEQ ID NO: 3963 - DNA, 25 bp, Homo sapien
gtgaccgatatatcgtaaacctacc

SEQ ID NO: 3964 - DNA, 25 bp, Homo sapien
gtgaccgatataacgtaaacctacc

SEQ ID NO: 3965 - DNA, 25 bp, Homo sapien
ggtccgtccctattgtcgtaacctc

SEQ ID NO: 3966 - DNA, 25 bp, Homo sapien
ggtccgtccctaatgtcgtaacctc

SEQ ID NO: 3967 - DNA, 25 bp, Homo sapien
atcctccgtcccttatagttggatc

SEQ ID NO: 3968 - DNA, 25 bp, Homo sapien
atcctccgtcccatatagttggatc

SEQ ID NO: 3969 - DNA, 25 bp, Homo sapien
gacctaccctcctacgagaggtgaa

SEQ ID NO: 3970 - DNA, 25 bp, Homo sapien
gacctaccctccaacgagaggtgaa

SEQ ID NO: 3971 - DNA, 25 bp, Homo sapien
ctctcccgtctgtcgtcaggagaca

SEQ ID NO: 3972 - DNA, 25 bp, Homo sapien
ctctcccgtctgacgtcaggagaca

SEQ ID NO: 3973 - DNA, 25 bp, Homo sapien
ctctcgagtccctgagcttgtgaac

SEQ ID NO: 3974 - DNA, 25 bp, Homo sapien
ctctcgagtcccagagcttgtgaac

SEQ ID NO: 3975 - DNA, 25 bp, Homo sapien
cctcggtcagcttgtatacggaaga

SEQ ID NO: 3976 - DNA, 25 bp, Homo sapien
cctcggtcagctagtatacggaaga

SEQ ID NO: 3977 - DNA, 25 bp, Homo sapien
cccggtgacgtttattcaggcgacg

SEQ ID NO: 3978 - DNA, 25 bp, Homo sapien
cccggtgacgttaattcaggcgacg

SEQ ID NO: 3979 - DNA, 25 bp, Homo sapien
gtgtcttctttcaagttctagtccc

SEQ ID NO: 3980 - DNA, 25 bp, Homo sapien
gtgtcttctttctagttctagtccc

SEQ ID NO: 3981 - DNA, 25 bp, Homo sapien
acatttcttgggaagacatagtctc

SEQ ID NO: 3982 - DNA, 25 bp, Homo sapien
acatttcttgggtagacatagtctc

SEQ ID NO: 3983 - DNA, 25 bp, Homo sapien
gagatctctgactctgtccacttcc

SEQ ID NO: 3984 - DNA, 25 bp, Homo sapien
gagatctctgacactgtccacttcc

SEQ ID NO: 3985 - DNA, 25 bp, Homo sapien
actttagtaaaccaggagaacttcc

SEQ ID NO: 3986 - DNA, 25 bp, Homo sapien
actttagtaaacgaggagaacttcc

SEQ ID NO: 3987 - DNA, 25 bp, Homo sapien
cctatatgaggactgaagaacttcc

SEQ ID NO: 3988 - DNA, 25 bp, Homo sapien
cctatatgaggagtgaagaacttcc

SEQ ID NO: 3989 - DNA, 25 bp, Homo sapien
tgtgtggtacgtgatacctaccctc

SEQ ID NO: 3990 - DNA, 25 bp, Homo sapien
tgtgtggtacgtcatacctaccctc

SEQ ID NO: 3991 - DNA, 25 bp, Homo sapien
aagtttattcctttatttacaactc

SEQ ID NO: 3992 - DNA, 25 bp, Homo sapien
aagtttattcctatatttacaactc

SEQ ID NO: 3993 - DNA, 25 bp, Homo sapien
tttttctcaagtttgtcgtagcgtc

SEQ ID NO: 3994 - DNA, 25 bp, Homo sapien
tttttctcaagtatgtcgtagcgtc

SEQ ID NO: 3995 - DNA, 25 bp, Homo sapien
gttgtcgtgaaataaccctagactc

SEQ ID NO: 3996 - DNA, 25 bp, Homo sapien
gttgtcgtgaaaaaaccctagactc

SEQ ID NO: 3997 - DNA, 25 bp, Homo sapien
ttttcacgaaacgacgagtgttatt

SEQ ID NO: 3998 - DNA, 25 bp, Homo sapien
ttttcacgaaaccacgagtgttatt

SEQ ID NO: 3999 - DNA, 25 bp, Homo sapien
gctacgactcatcgtaaagacagtc

SEQ ID NO: 4000 - DNA, 25 bp, Homo sapien
gctacgactcatggtaaagacagtc

SEQ ID NO: 4001 - DNA, 25 bp, Homo sapien
cctgacactcgtccaacaagtgtag

SEQ ID NO: 4002 - DNA, 25 bp, Homo sapien
cctgacactcgtgcaacaagtgtag

SEQ ID NO: 4003 - DNA, 25 bp, Homo sapien
cactcgacgtcgtcatcacatagta

SEQ ID NO: 4004 - DNA, 25 bp, Homo sapien
cactcgacgtcgacatcacatagta

SEQ ID NO: 4005 - DNA, 25 bp, Homo sapien
cttagtgtttacaggtacgttctgt

SEQ ID NO: 4006 - DNA, 25 bp, Homo sapien
cttagtgtttactggtacgttctgt

SEQ ID NO: 4007 - DNA, 25 bp, Homo sapien
tctacggtactctaccggtaaactt

SEQ ID NO: 4008 - DNA, 25 bp, Homo sapien
tctacggtactcaaccggtaaactt

SEQ ID NO: 4009 - DNA, 25 bp, Homo sapien
tccttttgatcatccagtagaacgg

SEQ ID NO: 4010 - DNA, 25 bp, Homo sapien
tccttttgatcaaccagtagaacgg

SEQ ID NO: 4011 - DNA, 25 bp, Homo sapien
cttttgttcaacattacgtagtggt

SEQ ID NO: 4012 - DNA, 25 bp, Homo sapien
cttttgttcaactttacgtagtggt

SEQ ID NO: 4013 - DNA, 25 bp, Homo sapien
ttgtgtttggtagaccttcgaagct

SEQ ID NO: 4014 - DNA, 25 bp, Homo sapien
ttgtgtttggtacaccttcgaagct

SEQ ID NO: 4015 - DNA, 25 bp, Homo sapien
atgattgtagaaatcactctcagtg

SEQ ID NO: 4016 - DNA, 25 bp, Homo sapien
atgattgtagaattcactctcagtg

SEQ ID NO: 4017 - DNA, 25 bp, Homo sapien
cagtgtgagagacttctacaggtag

SEQ ID NO: 4018 - DNA, 25 bp, Homo sapien
cagtgtgagagagttctacaggtag

SEQ ID NO: 4019 - DNA, 25 bp, Homo sapien
catgagactactacggtctatttac

SEQ ID NO: 4020 - DNA, 25 bp, Homo sapien
catgagactacttcggtctatttac

SEQ ID NO: 4021 - DNA, 25 bp, Homo sapien
gatggtatctgaggtctcttctagt

SEQ ID NO: 4022 - DNA, 25 bp, Homo sapien
gatggtatctgacgtctcttctagt

SEQ ID NO: 4023 - DNA, 25 bp, Homo sapien
ccgtgtcgtgggagacgcgtttcta

SEQ ID NO: 4024 - DNA, 25 bp, Homo sapien
ccgtgtcgtgggtgacgcgtttcta

SEQ ID NO: 4025 - DNA, 25 bp, Homo sapien
gatctgtggtcatatgtttgtctac

SEQ ID NO: 4026 - DNA, 25 bp, Homo sapien
gatctgtggtcaaatgtttgtctac

SEQ ID NO: 4027 - DNA, 25 bp, Homo sapien
tcagaagctctactcggtttatacg

SEQ ID NO: 4028 - DNA, 25 bp, Homo sapien
tcagaagctctagtcggtttatacg

SEQ ID NO: 4029 - DNA, 25 bp, Homo sapien
acaccagtacctggaccgtcttata

SEQ ID NO: 4030 - DNA, 25 bp, Homo sapien
acaccagtacctcgaccgtcttata

SEQ ID NO: 4031 - DNA, 25 bp, Homo sapien
gtaacactttaatgttaccggttta

SEQ ID NO: 4032 - DNA, 25 bp, Homo sapien
gtaacactttaaagttaccggttta

SEQ ID NO: 4033 - DNA, 25 bp, Homo sapien
acacgggtctctcgttccgaggtcc

SEQ ID NO: 4034 - DNA, 25 bp, Homo sapien
acacgggtctctggttccgaggtcc

SEQ ID NO: 4035 - DNA, 25 bp, Homo sapien
agacgcacggccggccgagggtctc

SEQ ID NO: 4036 - DNA, 25 bp, Homo sapien
agacgcacggcccgccgagggtctc

SEQ ID NO: 4037 - DNA, 25 bp, Homo sapien
agaaaaatctcgtcggtagatgttc

SEQ ID NO: 4038 - DNA, 25 bp, Homo sapien
agaaaaatctcgacggtagatgttc

SEQ ID NO: 4039 - DNA, 25 bp, Homo sapien
gaaataaacgaagactatacatgtc

SEQ ID NO: 4040 - DNA, 25 bp, Homo sapien
gaaataaacgaacactatacatgtc

SEQ ID NO: 4041 - DNA, 25 bp, Homo sapien
atttcgtaagaaatacgacttacgt

SEQ ID NO: 4042 - DNA, 25 bp, Homo sapien
atttcgtaagaattacgacttacgt

SEQ ID NO: 4043 - DNA, 25 bp, Homo sapien
acgaattcatagtaaacgtcagtat

SEQ ID NO: 4044 - DNA, 25 bp, Homo sapien
acgaattcatagaaaacgtcagtat

SEQ ID NO: 4045 - DNA, 25 bp, Homo sapien
ccgaatgtgaggaatagatcgtctt

SEQ ID NO: 4046 - DNA, 25 bp, Homo sapien
ccgaatgtgaggtatagatcgtctt

SEQ ID NO: 4047 - DNA, 25 bp, Homo sapien
aaagtataaggacgattcacttctt

SEQ ID NO: 4048 - DNA, 25 bp, Homo sapien
aaagtataaggaggattcacttctt

SEQ ID NO: 4049 - DNA, 25 bp, Homo sapien
aaacaaaggtcgtagagactttcta

SEQ ID NO: 4050 - DNA, 25 bp, Homo sapien
aaacaaaggtcgaagagactttcta

SEQ ID NO: 4051 - DNA, 25 bp, Homo sapien
aaataaagttcgatggctaccctgt

SEQ ID NO: 4052 - DNA, 25 bp, Homo sapien
aaataaagttcgttggctaccctgt

SEQ ID NO: 4053 - DNA, 25 bp, Homo sapien
ctaggttactagtcgcactctacta

SEQ ID NO: 4054 - DNA, 25 bp, Homo sapien
ctaggttactagacgcactctacta

SEQ ID NO: 4055 - DNA, 25 bp, Homo sapien
actgataagtgacacacgaatccat

SEQ ID NO: 4056 - DNA, 25 bp, Homo sapien
actgataagtgagacacgaatccat

SEQ ID NO: 4057 - DNA, 25 bp, Homo sapien
acagagatgttattcctataaacga

SEQ ID NO: 4058 - DNA, 25 bp, Homo sapien
acagagatgttaatcctataaacga

SEQ ID NO: 4059 - DNA, 25 bp, Homo sapien
caaaagatgttttggtaacgacacc

SEQ ID NO: 4060 - DNA, 25 bp, Homo sapien
caaaagatgtttaggtaacgacacc

SEQ ID NO: 4061 - DNA, 25 bp, Homo sapien
aaggagtgtatttaggaacctacac

SEQ ID NO: 4062 - DNA, 25 bp, Homo sapien
aaggagtgtattaaggaacctacac

SEQ ID NO: 4063 - DNA, 25 bp, Homo sapien
tctgtagggattgtgtttaggtccc

SEQ ID NO: 4064 - DNA, 25 bp, Homo sapien
tctgtagggattctgtttaggtccc

SEQ ID NO: 4065 - DNA, 25 bp, Homo sapien
ttgacctcgtcgagtgttggttcct

SEQ ID NO: 4066 - DNA, 25 bp, Homo sapien
ttgacctcgtcgtgtgttggttcct

SEQ ID NO: 4067 - DNA, 25 bp, Homo sapien
agacatgacctgtaccgtttagact

SEQ ID NO: 4068 - DNA, 25 bp, Homo sapien
agacatgacctgaaccgtttagact

SEQ ID NO: 4069 - DNA, 25 bp, Homo sapien
agacactgtgctacgccatctagag

SEQ ID NO: 4070 - DNA, 25 bp, Homo sapien
agacactgtgcttcgccatctagag

SEQ ID NO: 4071 - DNA, 25 bp, Homo sapien
acaccaacactatccgtccggtgag

SEQ ID NO: 4072 - DNA, 25 bp, Homo sapien
acaccaacactaaccgtccggtgag

SEQ ID NO: 4073 - DNA, 25 bp, Homo sapien
tgtaccacacgctcactcagttcga

SEQ ID NO: 4074 - DNA, 25 bp, Homo sapien
tgtaccacacgcacactcagttcga

SEQ ID NO: 4075 - DNA, 25 bp, Homo sapien
agtgaccccgatcgaccgagtctga

SEQ ID NO: 4076 - DNA, 25 bp, Homo sapien
agtgaccccgatggaccgagtctga

SEQ ID NO: 4077 - DNA, 25 bp, Homo sapien
aaaggtgacccttctcaagaagcac

SEQ ID NO: 4078 - DNA, 25 bp, Homo sapien
aaaggtgaccctactcaagaagcac

SEQ ID NO: 4079 - DNA, 25 bp, Homo sapien
gtgaagaaccacacagatacatccg

SEQ ID NO: 4080 - DNA, 25 bp, Homo sapien
gtgaagaaccactcagatacatccg

SEQ ID NO: 4081 - DNA, 25 bp, Homo sapien
aaacaacgaaggtagctccgtctcg

SEQ ID NO: 4082 - DNA, 25 bp, Homo sapien
aaacaacgaaggaagctccgtctcg

SEQ ID NO: 4083 - DNA, 25 bp, Homo sapien
caacatgacagagagagacatccga

SEQ ID NO: 4084 - DNA, 25 bp, Homo sapien
caacatgacagacagagacatccga

SEQ ID NO: 4085 - DNA, 25 bp, Homo sapien
ttaacccacgacaataaacgccgcg

SEQ ID NO: 4086 - DNA, 25 bp, Homo sapien
ttaacccacgactataaacgccgcg

SEQ ID NO: 4087 - DNA, 25 bp, Homo sapien
tctcgaactgaacgaacacgaaccc

SEQ ID NO: 4088 - DNA, 25 bp, Homo sapien
tctcgaactgaaggaacacgaaccc

SEQ ID NO: 4089 - DNA, 25 bp, Homo sapien
tcgcagaggtgtggttagagtctcc

SEQ ID NO: 4090 - DNA, 25 bp, Homo sapien
tcgcagaggtgtcgttagagtctcc

SEQ ID NO: 4091 - DNA, 25 bp, Homo sapien
gtgtaagttccttattgaggtcacg

SEQ ID NO: 4092 - DNA, 25 bp, Homo sapien
gtgtaagttcctaattgaggtcacg

SEQ ID NO: 4093 - DNA, 25 bp, Homo sapien
ttggttcctctttcgagtcgtctgt

SEQ ID NO: 4094 - DNA, 25 bp, Homo sapien
ttggttcctcttacgagtcgtctgt

SEQ ID NO: 4095 - DNA, 25 bp, Homo sapien
agattgagtttcgacgaaagttctc

SEQ ID NO: 4096 - DNA, 25 bp, Homo sapien
agattgagtttccacgaaagttctc

SEQ ID NO: 4097 - DNA, 25 bp, Homo sapien
tccgaattctcttgaagtctctcgt

SEQ ID NO: 4098 - DNA, 25 bp, Homo sapien
tccgaattctctagaagtctctcgt

SEQ ID NO: 4099 - DNA, 25 bp, Homo sapien
gttccgaatctttacatatctgtgt

SEQ ID NO: 4100 - DNA, 25 bp, Homo sapien
gttccgaatcttaacatatctgtgt

SEQ ID NO: 4101 - DNA, 25 bp, Homo sapien
tgagcccacttcttcagtcccggag

SEQ ID NO: 4102 - DNA, 25 bp, Homo sapien
tgagcccacttcatcagtcccggag

SEQ ID NO: 4103 - DNA, 25 bp, Homo sapien
tcacctagcagaaccgaccggtagt

SEQ ID NO: 4104 - DNA, 25 bp, Homo sapien
tcacctagcagatccgaccggtagt

SEQ ID NO: 4105 - DNA, 25 bp, Homo sapien
gacctctcgagacacgtcaccggtc

SEQ ID NO: 4106 - DNA, 25 bp, Homo sapien
gacctctcgagagacgtcaccggtc

SEQ ID NO: 4107 - DNA, 25 bp, Homo sapien
cgtctggttcgttgtacgcccagag

SEQ ID NO: 4108 - DNA, 25 bp, Homo sapien
cgtctggttcgtagtacgcccagag

SEQ ID NO: 4109 - DNA, 25 bp, Homo sapien
ccagggggttcgacacgaacgtcca

SEQ ID NO: 4110 - DNA, 25 bp, Homo sapien
ccagggggttcgtcacgaacgtcca

SEQ ID NO: 4111 - DNA, 25 bp, Homo sapien
ccgagaggcctcacagaccggacga

SEQ ID NO: 4112 - DNA, 25 bp, Homo sapien
ccgagaggcctctcagaccggacga

SEQ ID NO: 4113 - DNA, 25 bp, Homo sapien
gtagataattagtgacctcggtaac

SEQ ID NO: 4114 - DNA, 25 bp, Homo sapien
gtagataattagagacctcggtaac

SEQ ID NO: 4115 - DNA, 25 bp, Homo sapien
agtgactcaatttacttcctgttag

SEQ ID NO: 4116 - DNA, 25 bp, Homo sapien
agtgactcaattaacttcctgttag

SEQ ID NO: 4117 - DNA, 25 bp, Homo sapien
cgaccgtcctctgagaaacttaaag

SEQ ID NO: 4118 - DNA, 25 bp, Homo sapien
cgaccgtcctctcagaaacttaaag

SEQ ID NO: 4119 - DNA, 25 bp, Homo sapien
gtatacccgaccacagaacagtcaa

SEQ ID NO: 4120 - DNA, 25 bp, Homo sapien
gtatacccgacctcagaacagtcaa

SEQ ID NO: 4121 - DNA, 25 bp, Homo sapien
gataccggcacttttacatgtcaca

SEQ ID NO: 4122 - DNA, 25 bp, Homo sapien
gataccggcactattacatgtcaca

SEQ ID NO: 4123 - DNA, 25 bp, Homo sapien
ataacggttttgttaactcggttac

SEQ ID NO: 4124 - DNA, 25 bp, Homo sapien
ataacggttttgataactcggttac

SEQ ID NO: 4125 - DNA, 25 bp, Homo sapien
aatcgtttctactagtacccgtgac

SEQ ID NO: 4126 - DNA, 25 bp, Homo sapien
aatcgtttctacaagtacccgtgac

SEQ ID NO: 4127 - DNA, 25 bp, Homo sapien
aaagtgtcctctctgtctgtctcct

SEQ ID NO: 4128 - DNA, 25 bp, Homo sapien
aaagtgtcctctgtgtctgtctcct

SEQ ID NO: 4129 - DNA, 25 bp, Homo sapien
gtctgagtccatctgtgcatcgacc

SEQ ID NO: 4130 - DNA, 25 bp, Homo sapien
gtctgagtccatgtgtgcatcgacc

SEQ ID NO: 4131 - DNA, 25 bp, Homo sapien
gctaagccgagtaggcgaagacacc

SEQ ID NO: 4132 - DNA, 25 bp, Homo sapien
gctaagccgagttggcgaagacacc

SEQ ID NO: 4133 - DNA, 25 bp, Homo sapien
accagagacatctgcgggaaacgac

SEQ ID NO: 4134 - DNA, 25 bp, Homo sapien
accagagacatcagcgggaaacgac

SEQ ID NO: 4135 - DNA, 25 bp, Homo sapien
aaccaacgaagtactacagggacca

SEQ ID NO: 4136 - DNA, 25 bp, Homo sapien
aaccaacgaagttctacagggacca

SEQ ID NO: 4137 - DNA, 25 bp, Homo sapien
ccacagaagtaagtggttaccgagt

SEQ ID NO: 4138 - DNA, 25 bp, Homo sapien
ccacagaagtaactggttaccgagt

SEQ ID NO: 4139 - DNA, 25 bp, Homo sapien
tctcctgaaggatctgggacggtgt

SEQ ID NO: 4140 - DNA, 25 bp, Homo sapien
tctcctgaaggaactgggacggtgt

SEQ ID NO: 4141 - DNA, 25 bp, Homo sapien
actaatgatcgtgatcttcggttgc

SEQ ID NO: 4142 - DNA, 25 bp, Homo sapien
actaatgatcgtcatcttcggttgc

SEQ ID NO: 4143 - DNA, 25 bp, Homo sapien
tagaattttctcactactgtgatga

SEQ ID NO: 4144 - DNA, 25 bp, Homo sapien
tagaattttctctctactgtgatga

SEQ ID NO: 4145 - DNA, 25 bp, Homo sapien
tcaacatgatgagtgtcttgggaac

SEQ ID NO: 4146 - DNA, 25 bp, Homo sapien
tcaacatgatgactgtcttgggaac

SEQ ID NO: 4147 - DNA, 25 bp, Homo sapien
aacagtgttaagtgttttaccttac

SEQ ID NO: 4148 - DNA, 25 bp, Homo sapien
aacagtgttaagagttttaccttac

SEQ ID NO: 4149 - DNA, 25 bp, Homo sapien
aaatttatttatttatcgacggtat

SEQ ID NO: 4150 - DNA, 25 bp, Homo sapien
aaatttatttatatatcgacggtat

SEQ ID NO: 4151 - DNA, 25 bp, Homo sapien
acttagtagtagtagtttatcaaat

SEQ ID NO: 4152 - DNA, 25 bp, Homo sapien
acttagtagtagaagtttatcaaat

SEQ ID NO: 4153 - DNA, 25 bp, Homo sapien
gtcaggtctaaaacacattatgaaa

SEQ ID NO: 4154 - DNA, 25 bp, Homo sapien
gtcaggtctaaatcacattatgaaa

SEQ ID NO: 4155 - DNA, 25 bp, Homo sapien
gtccaccgtcacagtgtccgagaga

SEQ ID NO: 4156 - DNA, 25 bp, Homo sapien
gtccaccgtcactgtgtccgagaga

SEQ ID NO: 4157 - DNA, 25 bp, Homo sapien
tcggtcccgtgctgggtctgaagtc

SEQ ID NO: 4158 - DNA, 25 bp, Homo sapien
tcggtcccgtgcagggtctgaagtc

SEQ ID NO: 4159 - DNA, 25 bp, Homo sapien
cggccggtgcgacgacaccaactag

SEQ ID NO: 4160 - DNA, 25 bp, Homo sapien
cggccggtgcgaggacaccaactag

SEQ ID NO: 4161 - DNA, 25 bp, Homo sapien
gaggtcctgtctttcctcgacttaa

SEQ ID NO: 4162 - DNA, 25 bp, Homo sapien
gaggtcctgtctatcctcgacttaa

SEQ ID NO: 4163 - DNA, 25 bp, Homo sapien
gacggacctcctactcttccgttgg

SEQ ID NO: 4164 - DNA, 25 bp, Homo sapien
gacggacctccttctcttccgttgg

SEQ ID NO: 4165 - DNA, 25 bp, Homo sapien
tagatactgagaggagtctctcggg

SEQ ID NO: 4166 - DNA, 25 bp, Homo sapien
tagatactgagacgagtctctcggg

SEQ ID NO: 4167 - DNA, 25 bp, Homo sapien
aggtaggaccgtcgtctgtctgtag

SEQ ID NO: 4168 - DNA, 25 bp, Homo sapien
aggtaggaccgtggtctgtctgtag

SEQ ID NO: 4169 - DNA, 25 bp, Homo sapien
caattgtaaggtgacgagtcgagac

SEQ ID NO: 4170 - DNA, 25 bp, Homo sapien
caattgtaaggtcacgagtcgagac

SEQ ID NO: 4171 - DNA, 25 bp, Homo sapien
cacacgtgtcgtcgacacggaggca

SEQ ID NO: 4172 - DNA, 25 bp, Homo sapien
cacacgtgtcgtggacacggaggca

SEQ ID NO: 4173 - DNA, 25 bp, Homo sapien
cgacttagacggaccggtaggacac

SEQ ID NO: 4174 - DNA, 25 bp, Homo sapien
cgacttagacggtccggtaggacac

SEQ ID NO: 4175 - DNA, 25 bp, Homo sapien
cacctttcgtaaagcccgagtcgac

SEQ ID NO: 4176 - DNA, 25 bp, Homo sapien
cacctttcgtaatgcccgagtcgac

SEQ ID NO: 4177 - DNA, 25 bp, Homo sapien
taaggtttcccgtcgactcgagtgg

SEQ ID NO: 4178 - DNA, 25 bp, Homo sapien
taaggtttcccgacgactcgagtgg

SEQ ID NO: 4179 - DNA, 25 bp, Homo sapien
gtgcgggtgtcagaacgccacttag

SEQ ID NO: 4180 - DNA, 25 bp, Homo sapien
gtgcgggtgtcacaacgccacttag

SEQ ID NO: 4181 - DNA, 25 bp, Homo sapien
ggtgggacccagtgttccacctcgt

SEQ ID NO: 4182 - DNA, 25 bp, Homo sapien
ggtgggacccagagttccacctcgt

SEQ ID NO: 4183 - DNA, 25 bp, Homo sapien
ttggacggcccgagtgtcacaccct

SEQ ID NO: 4184 - DNA, 25 bp, Homo sapien
ttggacggcccgtgtgtcacaccct

SEQ ID NO: 4185 - DNA, 25 bp, Homo sapien
acaggagccccgtaggtcccggacg

SEQ ID NO: 4186 - DNA, 25 bp, Homo sapien
acaggagccccgaaggtcccggacg

SEQ ID NO: 4187 - DNA, 25 bp, Homo sapien
ggtgcgacgagagcatgtcccagac

SEQ ID NO: 4188 - DNA, 25 bp, Homo sapien
ggtgcgacgagaccatgtcccagac

SEQ ID NO: 4189 - DNA, 25 bp, Homo sapien
gaactagtacgctatctacgccaac

SEQ ID NO: 4190 - DNA, 25 bp, Homo sapien
gaactagtacgcaatctacgccaac

SEQ ID NO: 4191 - DNA, 25 bp, Homo sapien
ctgaagcagactacgtgtccataag

SEQ ID NO: 4192 - DNA, 25 bp, Homo sapien
ctgaagcagacttcgtgtccataag

SEQ ID NO: 4193 - DNA, 25 bp, Homo sapien
ccaaatcctcaaggtcccgagtcga

SEQ ID NO: 4194 - DNA, 25 bp, Homo sapien
ccaaatcctcaacgtcccgagtcga

SEQ ID NO: 4195 - DNA, 25 bp, Homo sapien
agaatgactctcaccttccggtctc

SEQ ID NO: 4196 - DNA, 25 bp, Homo sapien
agaatgactctctccttccggtctc

SEQ ID NO: 4197 - DNA, 25 bp, Homo sapien
gctacagtctctgtaccctctggca

SEQ ID NO: 4198 - DNA, 25 bp, Homo sapien
gctacagtctctctaccctctggca

SEQ ID NO: 4199 - DNA, 25 bp, Homo sapien
attcactaccgtcactctggtaccg

SEQ ID NO: 4200 - DNA, 25 bp, Homo sapien
attcactaccgtgactctggtaccg

SEQ ID NO: 4201 - DNA, 25 bp, Homo sapien
ttgtcagtactcactgtgtcgtcgc

SEQ ID NO: 4202 - DNA, 25 bp, Homo sapien
ttgtcagtactctctgtgtcgtcgc

SEQ ID NO: 4203 - DNA, 25 bp, Homo sapien
gtgtccctgttcttgacgtcggtcg

SEQ ID NO: 4204 - DNA, 25 bp, Homo sapien
gtgtccctgttcatgacgtcggtcg

SEQ ID NO: 4205 - DNA, 25 bp, Homo sapien
tataactccccgacgtcgtccgagt

SEQ ID NO: 4206 - DNA, 25 bp, Homo sapien
tataactccccgtcgtcgtccgagt

SEQ ID NO: 4207 - DNA, 25 bp, Homo sapien
tccttaacgaccccgtttctcatcc

SEQ ID NO: 4208 - DNA, 25 bp, Homo sapien
tccttaacgaccgcgtttctcatcc

SEQ ID NO: 4209 - DNA, 25 bp, Homo sapien
gtactttacctaggtttcatacgac

SEQ ID NO: 4210 - DNA, 25 bp, Homo sapien
gtactttacctacgtttcatacgac

SEQ ID NO: 4211 - DNA, 25 bp, Homo sapien
ctattgtagtactaccggttaatta

SEQ ID NO: 4212 - DNA, 25 bp, Homo sapien
ctattgtagtacaaccggttaatta

SEQ ID NO: 4213 - DNA, 25 bp, Homo sapien
cgtttgtagacatacacgttaattt

SEQ ID NO: 4214 - DNA, 25 bp, Homo sapien
cgtttgtagacaaacacgttaattt

SEQ ID NO: 4215 - DNA, 25 bp, Homo sapien
ctctcaagtcctctcgtttatagtg

SEQ ID NO: 4216 - DNA, 25 bp, Homo sapien
ctctcaagtcctgtcgtttatagtg

SEQ ID NO: 4217 - DNA, 25 bp, Homo sapien
tctgcttcgcggtcgtctagacttt

SEQ ID NO: 4218 - DNA, 25 bp, Homo sapien
tctgcttcgcggacgtctagacttt

SEQ ID NO: 4219 - DNA, 25 bp, Homo sapien
accttcgttcaggacctcaactgtg

SEQ ID NO: 4220 - DNA, 25 bp, Homo sapien
accttcgttcagcacctcaactgtg

SEQ ID NO: 4221 - DNA, 25 bp, Homo sapien
gtatcccgagtaggtgtcgaggtcc

SEQ ID NO: 4222 - DNA, 25 bp, Homo sapien
gtatcccgagtacgtgtcgaggtcc

SEQ ID NO: 4223 - DNA, 25 bp, Homo sapien
cttcgtattcattccgtaaacatgg

SEQ ID NO: 4224 - DNA, 25 bp, Homo sapien
cttcgtattcataccgtaaacatgg

SEQ ID NO: 4225 - DNA, 25 bp, Homo sapien
tcggcggacctacctgaactaggtg

SEQ ID NO: 4226 - DNA, 25 bp, Homo sapien
tcggcggacctagctgaactaggtg

SEQ ID NO: 4227 - DNA, 25 bp, Homo sapien
aatcgggctccgaatcgaaagtaat

SEQ ID NO: 4228 - DNA, 25 bp, Homo sapien
aatcgggctccgtatcgaaagtaat

SEQ ID NO: 4229 - DNA, 25 bp, Homo sapien
tacctgacggacctctataaaggaa

SEQ ID NO: 4230 - DNA, 25 bp, Homo sapien
tacctgacggacgtctataaaggaa

SEQ ID NO: 4231 - DNA, 25 bp, Homo sapien
gaccaaagaaccatcgacgacggaa

SEQ ID NO: 4232 - DNA, 25 bp, Homo sapien
gaccaaagaaccttcgacgacggaa

SEQ ID NO: 4233 - DNA, 25 bp, Homo sapien
ctgggagcccgacacgtcggacgtc

SEQ ID NO: 4234 - DNA, 25 bp, Homo sapien
ctgggagcccgagacgtcggacgtc

SEQ ID NO: 4235 - DNA, 25 bp, Homo sapien
gatgtttttagaaaacgtcttcgtc

SEQ ID NO: 4236 - DNA, 25 bp, Homo sapien
gatgtttttagataacgtcttcgtc

SEQ ID NO: 4237 - DNA, 25 bp, Homo sapien
tattttacactaaaaactctgtctt

SEQ ID NO: 4238 - DNA, 25 bp, Homo sapien
tattttacactataaactctgtctt

SEQ ID NO: 4239 - DNA, 25 bp, Homo sapien
tctttctattaaaatcaaactattc

SEQ ID NO: 4240 - DNA, 25 bp, Homo sapien
tctttctattaatatcaaactattc

SEQ ID NO: 4241 - DNA, 25 bp, Homo sapien
tatatgtcttgagttctgaaacctc

SEQ ID NO: 4242 - DNA, 25 bp, Homo sapien
tatatgtcttgacttctgaaacctc

SEQ ID NO: 4243 - DNA, 25 bp, Homo sapien
gacgttttgtaagtctgtaaaccct

SEQ ID NO: 4244 - DNA, 25 bp, Homo sapien
gacgttttgtaactctgtaaaccct

SEQ ID NO: 4245 - DNA, 25 bp, Homo sapien
gtgtttgttaactttcccacttcgt

SEQ ID NO: 4246 - DNA, 25 bp, Homo sapien
gtgtttgttaacattcccacttcgt

SEQ ID NO: 4247 - DNA, 25 bp, Homo sapien
aggacttctaagtctcctccgttac

SEQ ID NO: 4248 - DNA, 25 bp, Homo sapien
aggacttctaagactcctccgttac

SEQ ID NO: 4249 - DNA, 25 bp, Homo sapien
ctcggttaacaacgtctccttttcg

SEQ ID NO: 4250 - DNA, 25 bp, Homo sapien
ctcggttaacaaggtctccttttcg

SEQ ID NO: 4251 - DNA, 25 bp, Homo sapien
cagataagacagagacccttgtatc

SEQ ID NO: 4252 - DNA, 25 bp, Homo sapien
cagataagacagtgacccttgtatc

SEQ ID NO: 4253 - DNA, 25 bp, Homo sapien
ccccgaaaataacacacaggtgttt

SEQ ID NO: 4254 - DNA, 25 bp, Homo sapien
ccccgaaaataagacacaggtgttt

SEQ ID NO: 4255 - DNA, 25 bp, Homo sapien
gacgagaagaaagacacaagacttt

SEQ ID NO: 4256 - DNA, 25 bp, Homo sapien
gacgagaagaaacacacaagacttt

SEQ ID NO: 4257 - DNA, 25 bp, Homo sapien
tatttaaagtgacgacacggaaccc

SEQ ID NO: 4258 - DNA, 25 bp, Homo sapien
tatttaaagtgaggacacggaaccc

SEQ ID NO: 4259 - DNA, 25 bp, Homo sapien
aagtaaagtggaaccacctcagttg

SEQ ID NO: 4260 - DNA, 25 bp, Homo sapien
aagtaaagtggatccacctcagttg

SEQ ID NO: 4261 - DNA, 25 bp, Homo sapien
ataaccgtgtcgaacccctaggtta

SEQ ID NO: 4262 - DNA, 25 bp, Homo sapien
ataaccgtgtcgtacccctaggtta

SEQ ID NO: 4263 - DNA, 25 bp, Homo sapien
ttgtaccgccgtacttcctttgtca

SEQ ID NO: 4264 - DNA, 25 bp, Homo sapien
ttgtaccgccgttcttcctttgtca

SEQ ID NO: 4265 - DNA, 25 bp, Homo sapien
tgacgacctgtctcttgtttaggac

SEQ ID NO: 4266 - DNA, 25 bp, Homo sapien
tgacgacctgtcacttgtttaggac

SEQ ID NO: 4267 - DNA, 25 bp, Homo sapien
aatagacaagtctttctggatttca

SEQ ID NO: 4268 - DNA, 25 bp, Homo sapien
aatagacaagtcattctggatttca

SEQ ID NO: 4269 - DNA, 25 bp, Homo sapien
taggagaacgagtctttcgatttca

SEQ ID NO: 4270 - DNA, 25 bp, Homo sapien
taggagaacgagactttcgatttca

SEQ ID NO: 4271 - DNA, 25 bp, Homo sapien
actacaggggtattcggtgttctag

SEQ ID NO: 4272 - DNA, 25 bp, Homo sapien
actacaggggtaatcggtgttctag

SEQ ID NO: 4273 - DNA, 25 bp, Homo sapien
tagacaagtgataattacgatctca

SEQ ID NO: 4274 - DNA, 25 bp, Homo sapien
tagacaagtgattattacgatctca

SEQ ID NO: 4275 - DNA, 25 bp, Homo sapien
gtcgtttacccgacgtcacttgtca

SEQ ID NO: 4276 - DNA, 25 bp, Homo sapien
gtcgtttacccgtcgtcacttgtca

SEQ ID NO: 4277 - DNA, 25 bp, Homo sapien
cgtgttccacgactacatcggtgat

SEQ ID NO: 4278 - DNA, 25 bp, Homo sapien
cgtgttccacgagtacatcggtgat

SEQ ID NO: 4279 - DNA, 25 bp, Homo sapien
acctgttccggtgatacgtctttca

SEQ ID NO: 4280 - DNA, 25 bp, Homo sapien
acctgttccggtcatacgtctttca

SEQ ID NO: 4281 - DNA, 25 bp, Homo sapien
cttcgccaacgcaacgaagtcacta

SEQ ID NO: 4282 - DNA, 25 bp, Homo sapien
cttcgccaacgctacgaagtcacta

SEQ ID NO: 4283 - DNA, 25 bp, Homo sapien
cctgtctctccctgggaaaatacct

SEQ ID NO: 4284 - DNA, 25 bp, Homo sapien
cctgtctctcccagggaaaatacct

SEQ ID NO: 4285 - DNA, 25 bp, Homo sapien
aactgccctctcaacgggcaaaact

SEQ ID NO: 4286 - DNA, 25 bp, Homo sapien
aactgccctctctacgggcaaaact

SEQ ID NO: 4287 - DNA, 25 bp, Homo sapien
tgcttcttcgcctgacacacggaac

SEQ ID NO: 4288 - DNA, 25 bp, Homo sapien
tgcttcttcgccagacacacggaac

SEQ ID NO: 4289 - DNA, 25 bp, Homo sapien
gacattgattctcatgacatgacta

SEQ ID NO: 4290 - DNA, 25 bp, Homo sapien
gacattgattctgatgacatgacta

SEQ ID NO: 4291 - DNA, 25 bp, Homo sapien
ataagtccctttttgacaagacgag

SEQ ID NO: 4292 - DNA, 25 bp, Homo sapien
ataagtccctttatgacaagacgag

SEQ ID NO: 4293 - DNA, 25 bp, Homo sapien
aaccacagtcgcatcgacagacaga

SEQ ID NO: 4294 - DNA, 25 bp, Homo sapien
aaccacagtcgcttcgacagacaga

SEQ ID NO: 4295 - DNA, 25 bp, Homo sapien
gacccgggaggttcataacgatact

SEQ ID NO: 4296 - DNA, 25 bp, Homo sapien
gacccgggaggtacataacgatact

SEQ ID NO: 4297 - DNA, 25 bp, Homo sapien
gactcgtatgggtgacaatcactgt

SEQ ID NO: 4298 - DNA, 25 bp, Homo sapien
gactcgtatgggagacaatcactgt

SEQ ID NO: 4299 - DNA, 25 bp, Homo sapien
agaatctgttgtgtctagactttac

SEQ ID NO: 4300 - DNA, 25 bp, Homo sapien
agaatctgttgtctctagactttac

SEQ ID NO: 4301 - DNA, 25 bp, Homo sapien
acaatctcgattgtgtaaacgtcat

SEQ ID NO: 4302 - DNA, 25 bp, Homo sapien
acaatctcgattctgtaaacgtcat

SEQ ID NO: 4303 - DNA, 25 bp, Homo sapien
ttttcgtacttggtactcaacgaag

SEQ ID NO: 4304 - DNA, 25 bp, Homo sapien
ttttcgtacttgctactcaacgaag

SEQ ID NO: 4305 - DNA, 25 bp, Homo sapien
gtaccggtacactggtctccgcaca

SEQ ID NO: 4306 - DNA, 25 bp, Homo sapien
gtaccggtacacaggtctccgcaca

SEQ ID NO: 4307 - DNA, 25 bp, Homo sapien
ctcagctactacagtagccgacacc

SEQ ID NO: 4308 - DNA, 25 bp, Homo sapien
ctcagctactactgtagccgacacc

SEQ ID NO: 4309 - DNA, 25 bp, Homo sapien
gtaacgacactcttttcctacctcc

SEQ ID NO: 4310 - DNA, 25 bp, Homo sapien
gtaacgacactcatttcctacctcc

SEQ ID NO: 4311 - DNA, 25 bp, Homo sapien
ggcgtactgatattatgtttccccc

SEQ ID NO: 4312 - DNA, 25 bp, Homo sapien
ggcgtactgataatatgtttccccc

SEQ ID NO: 4313 - DNA, 25 bp, Homo sapien
acggtgtgtttatctgggatccacc

SEQ ID NO: 4314 - DNA, 25 bp, Homo sapien
acggtgtgtttaactgggatccacc

SEQ ID NO: 4315 - DNA, 25 bp, Homo sapien
gtacctctactgcagatacacgccg

SEQ ID NO: 4316 - DNA, 25 bp, Homo sapien
gtacctctactggagatacacgccg

SEQ ID NO: 4317 - DNA, 25 bp, Homo sapien
tagacgatcctcgaggtccgacgac

SEQ ID NO: 4318 - DNA, 25 bp, Homo sapien
tagacgatcctccaggtccgacgac

SEQ ID NO: 4319 - DNA, 25 bp, Homo sapien
gagatattgtctgaactaccacact

SEQ ID NO: 4320 - DNA, 25 bp, Homo sapien
gagatattgtctcaactaccacact

SEQ ID NO: 4321 - DNA, 25 bp, Homo sapien
cacggactcatcttgaacaagacct

SEQ ID NO: 4322 - DNA, 25 bp, Homo sapien
cacggactcatcatgaacaagacct

SEQ ID NO: 4323 - DNA, 25 bp, Homo sapien
agggtcgctcacttcggaaaagacc

SEQ ID NO: 4324 - DNA, 25 bp, Homo sapien
agggtcgctcacatcggaaaagacc

SEQ ID NO: 4325 - DNA, 25 bp, Homo sapien
cgtctacctagaacggtaccggtgc

SEQ ID NO: 4326 - DNA, 25 bp, Homo sapien
cgtctacctagatcggtaccggtgc

SEQ ID NO: 4327 - DNA, 25 bp, Homo sapien
cgggcagttcatgtacttgaccgga

SEQ ID NO: 4328 - DNA, 25 bp, Homo sapien
cgggcagttcatctacttgaccgga

SEQ ID NO: 4329 - DNA, 25 bp, Homo sapien
atgtctactactctttgacagtgat

SEQ ID NO: 4330 - DNA, 25 bp, Homo sapien
atgtctactactgtttgacagtgat

SEQ ID NO: 4331 - DNA, 25 bp, Homo sapien
gtacctctgtagttctccagtacta

SEQ ID NO: 4332 - DNA, 25 bp, Homo sapien
gtacctctgtagatctccagtacta

SEQ ID NO: 4333 - DNA, 25 bp, Homo sapien
tgtaggtcagtaactcgtgtcggga

SEQ ID NO: 4334 - DNA, 25 bp, Homo sapien
tgtaggtcagtatctcgtgtcggga

SEQ ID NO: 4335 - DNA, 25 bp, Homo sapien
gactataacgaaactcccttaggga

SEQ ID NO: 4336 - DNA, 25 bp, Homo sapien
gactataacgaatctcccttaggga

SEQ ID NO: 4337 - DNA, 25 bp, Homo sapien
gacatataccactaaactgaaagtg

SEQ ID NO: 4338 - DNA, 25 bp, Homo sapien
gacatataccacaaaactgaaagtg

SEQ ID NO: 4339 - DNA, 25 bp, Homo sapien
agcactctacaaagaacccgaccag

SEQ ID NO: 4340 - DNA, 25 bp, Homo sapien
agcactctacaatgaacccgaccag

SEQ ID NO: 4341 - DNA, 25 bp, Homo sapien
tctacttgttagttagcgtaccgag

SEQ ID NO: 4342 - DNA, 25 bp, Homo sapien
tctacttgttagatagcgtaccgag

SEQ ID NO: 4343 - DNA, 25 bp, Homo sapien
accatctcacgactagaatcgtacg

SEQ ID NO: 4344 - DNA, 25 bp, Homo sapien
accatctcacgagtagaatcgtacg

SEQ ID NO: 4345 - DNA, 25 bp, Homo sapien
gaccctacatctacaggtgcccgtg

SEQ ID NO: 4346 - DNA, 25 bp, Homo sapien
gaccctacatcttcaggtgcccgtg

SEQ ID NO: 4347 - DNA, 25 bp, Homo sapien
tacgtactcagtactaacggccttc

SEQ ID NO: 4348 - DNA, 25 bp, Homo sapien
tacgtactcagttctaacggccttc

SEQ ID NO: 4349 - DNA, 25 bp, Homo sapien
tacgagtgacgtgtccgggtctctc

SEQ ID NO: 4350 - DNA, 25 bp, Homo sapien
tacgagtgacgtctccgggtctctc

SEQ ID NO: 4351 - DNA, 25 bp, Homo sapien
gggcgtcacgtctcaccgaggtctt

SEQ ID NO: 4352 - DNA, 25 bp, Homo sapien
gggcgtcacgtcacaccgaggtctt

SEQ ID NO: 4353 - DNA, 25 bp, Homo sapien
ttaggtttattcgaaaacctcacgt

SEQ ID NO: 4354 - DNA, 25 bp, Homo sapien
ttaggtttattccaaaacctcacgt

SEQ ID NO: 4355 - DNA, 25 bp, Homo sapien
gttggttcgaagtgtaaaacccgtc

SEQ ID NO: 4356 - DNA, 25 bp, Homo sapien
gttggttcgaagagtaaaacccgtc

SEQ ID NO: 4357 - DNA, 25 bp, Homo sapien
gtgggatctcacgttggaaagtcaa

SEQ ID NO: 4358 - DNA, 25 bp, Homo sapien
gtgggatctcaccttggaaagtcaa

SEQ ID NO: 4359 - DNA, 25 bp, Homo sapien
gtagtgaccgaaaggacaatcaggt

SEQ ID NO: 4360 - DNA, 25 bp, Homo sapien
gtagtgaccgaatggacaatcaggt

SEQ ID NO: 4361 - DNA, 25 bp, Homo sapien
gtaaacggactaaggataatcttct

SEQ ID NO: 4362 - DNA, 25 bp, Homo sapien
gtaaacggactatggataatcttct

SEQ ID NO: 4363 - DNA, 25 bp, Homo sapien
agaacgaagaaccaatcatactctg

SEQ ID NO: 4364 - DNA, 25 bp, Homo sapien
agaacgaagaacgaatcatactctg

SEQ ID NO: 4365 - DNA, 25 bp, Homo sapien
taaggagtaaccaacactctcactc

SEQ ID NO: 4366 - DNA, 25 bp, Homo sapien
taaggagtaacctacactctcactc

SEQ ID NO: 4367 - DNA, 25 bp, Homo sapien
gccatggtatacaacaactttaccg

SEQ ID NO: 4368 - DNA, 25 bp, Homo sapien
gccatggtatactacaactttaccg

SEQ ID NO: 4369 - DNA, 25 bp, Homo sapien
ccacttcgttatctaaccttacttc

SEQ ID NO: 4370 - DNA, 25 bp, Homo sapien
ccacttcgttatgtaaccttacttc

SEQ ID NO: 4371 - DNA, 25 bp, Homo sapien
gaatctaacccgttaaggaacacta

SEQ ID NO: 4372 - DNA, 25 bp, Homo sapien
gaatctaacccgataaggaacacta

SEQ ID NO: 4373 - DNA, 25 bp, Homo sapien
acattcagacccattggtgacgatg

SEQ ID NO: 4374 - DNA, 25 bp, Homo sapien
acattcagaccctttggtgacgatg

SEQ ID NO: 4375 - DNA, 25 bp, Homo sapien
tatgtctccgtttcgacaacagtct

SEQ ID NO: 4376 - DNA, 25 bp, Homo sapien
tatgtctccgttacgacaacagtct

SEQ ID NO: 4377 - DNA, 25 bp, Homo sapien
gaaatccacttatgacgtcaacatt

SEQ ID NO: 4378 - DNA, 25 bp, Homo sapien
gaaatccacttaagacgtcaacatt

SEQ ID NO: 4379 - DNA, 25 bp, Homo sapien
acactggtcttaagtaccaagatat

SEQ ID NO: 4380 - DNA, 25 bp, Homo sapien
acactggtcttatgtaccaagatat

SEQ ID NO: 4381 - DNA, 25 bp, Homo sapien
accgaccgccggatgcctgagaagt

SEQ ID NO: 4382 - DNA, 25 bp, Homo sapien
accgaccgccggttgcctgagaagt

SEQ ID NO: 4383 - DNA, 25 bp, Homo sapien
gtcactcgtgtctcttcgtcgctgt

SEQ ID NO: 4384 - DNA, 25 bp, Homo sapien
gtcactcgtgtcacttcgtcgctgt

SEQ ID NO: 4385 - DNA, 25 bp, Homo sapien
gtgtctatgatagtattacgtcctt

SEQ ID NO: 4386 - DNA, 25 bp, Homo sapien
gtgtctatgatactattacgtcctt

SEQ ID NO: 4387 - DNA, 25 bp, Homo sapien
caaggtgtttgaagaggtgctccag

SEQ ID NO: 4388 - DNA, 25 bp, Homo sapien
caaggtgtttgatgaggtgctccag

SEQ ID NO: 4389 - DNA, 25 bp, Homo sapien
gccagtgttacgtaaggtcctcctc

SEQ ID NO: 4390 - DNA, 25 bp, Homo sapien
gccagtgttacgaaaggtcctcctc

SEQ ID NO: 4391 - DNA, 25 bp, Homo sapien
caccgtgtcgacccggtgtcgaccc

SEQ ID NO: 4392 - DNA, 25 bp, Homo sapien
caccgtgtcgacgcggtgtcgaccc

SEQ ID NO: 4393 - DNA, 25 bp, Homo sapien
gtgtcattcgtgtacctgttcaccc

SEQ ID NO: 4394 - DNA, 25 bp, Homo sapien
gtgtcattcgtgaacctgttcaccc

SEQ ID NO: 4395 - DNA, 25 bp, Homo sapien
tcgggtcttcggactcggtcccatc

SEQ ID NO: 4396 - DNA, 25 bp, Homo sapien
tcgggtcttcggtctcggtcccatc

SEQ ID NO: 4397 - DNA, 25 bp, Homo sapien
gtcacgagttcaagtgcacctacgc

SEQ ID NO: 4398 - DNA, 25 bp, Homo sapien
gtcacgagttcatgtgcacctacgc

SEQ ID NO: 4399 - DNA, 25 bp, Homo sapien
aggtacagaccgtcggaaccctcta

SEQ ID NO: 4400 - DNA, 25 bp, Homo sapien
aggtacagaccgacggaaccctcta

SEQ ID NO: 4401 - DNA, 25 bp, Homo sapien
ggttcgtaacaacgagaggtctcga

SEQ ID NO: 4402 - DNA, 25 bp, Homo sapien
ggttcgtaacaaggagaggtctcga

SEQ ID NO: 4403 - DNA, 25 bp, Homo sapien
atagttgtcacagagactcgtgtta

SEQ ID NO: 4404 - DNA, 25 bp, Homo sapien
atagttgtcacacagactcgtgtta

SEQ ID NO: 4405 - DNA, 25 bp, Homo sapien
gacgtgtagtaaccaacctcttacc

SEQ ID NO: 4406 - DNA, 25 bp, Homo sapien
gacgtgtagtaagcaacctcttacc

SEQ ID NO: 4407 - DNA, 25 bp, Homo sapien
gacgtggactgctcctagctttacg

SEQ ID NO: 4408 - DNA, 25 bp, Homo sapien
gacgtggactgcacctagctttacg

SEQ ID NO: 4409 - DNA, 25 bp, Homo sapien
cgtccacgtagcggtcgtaaagcta

SEQ ID NO: 4410 - DNA, 25 bp, Homo sapien
cgtccacgtagccgtcgtaaagcta

SEQ ID NO: 4411 - DNA, 25 bp, Homo sapien
gtgtgtaccgcgaatcaggtcataa

SEQ ID NO: 4412 - DNA, 25 bp, Homo sapien
gtgtgtaccgcgtatcaggtcataa

SEQ ID NO: 4413 - DNA, 25 bp, Homo sapien
ttgttacgagaaagtacaaccacaa

SEQ ID NO: 4414 - DNA, 25 bp, Homo sapien
ttgttacgagaatgtacaaccacaa

SEQ ID NO: 4415 - DNA, 25 bp, Homo sapien
gtcaatctctatcaagcagtagtcg

SEQ ID NO: 4416 - DNA, 25 bp, Homo sapien
gtcaatctctatgaagcagtagtcg

SEQ ID NO: 4417 - DNA, 25 bp, Homo sapien
gtaacaagtcaaagagtcagtctcg

SEQ ID NO: 4418 - DNA, 25 bp, Homo sapien
gtaacaagtcaatgagtcagtctcg

SEQ ID NO: 4419 - DNA, 25 bp, Homo sapien
gagtctttactgtttatgaaactcc

SEQ ID NO: 4420 - DNA, 25 bp, Homo sapien
gagtctttactgattatgaaactcc

SEQ ID NO: 4421 - DNA, 25 bp, Homo sapien
ggtctacagtccagattccacatta

SEQ ID NO: 4422 - DNA, 25 bp, Homo sapien
ggtctacagtcctgattccacatta

SEQ ID NO: 4423 - DNA, 25 bp, Homo sapien
gtactaggtcctacctaaaatctag

SEQ ID NO: 4424 - DNA, 25 bp, Homo sapien
gtactaggtccttcctaaaatctag

SEQ ID NO: 4425 - DNA, 25 bp, Homo sapien
aggacgagacactgtgagaggaccc

SEQ ID NO: 4426 - DNA, 25 bp, Homo sapien
aggacgagacacagtgagaggaccc

SEQ ID NO: 4427 - DNA, 25 bp, Homo sapien
gacaacgagactagagggtcgtacc

SEQ ID NO: 4428 - DNA, 25 bp, Homo sapien
gacaacgagacttgagggtcgtacc

SEQ ID NO: 4429 - DNA, 25 bp, Homo sapien
ccgacgctgtcgtagacatggaccg

SEQ ID NO: 4430 - DNA, 25 bp, Homo sapien
ccgacgctgtcgaagacatggaccg

SEQ ID NO: 4431 - DNA, 25 bp, Homo sapien
ccgatctcacgttaacacaggtctt

SEQ ID NO: 4432 - DNA, 25 bp, Homo sapien
ccgatctcacgtaaacacaggtctt

SEQ ID NO: 4433 - DNA, 25 bp, Homo sapien
gaaggtcaccctagacacaggtgtg

SEQ ID NO: 4434 - DNA, 25 bp, Homo sapien
gaaggtcacccttgacacaggtgtg

SEQ ID NO: 4435 - DNA, 25 bp, Homo sapien
cgccggtacctctactccaagggtg

SEQ ID NO: 4436 - DNA, 25 bp, Homo sapien
cgccggtacctcaactccaagggtg

SEQ ID NO: 4437 - DNA, 25 bp, Homo sapien
ctagagttaattacttccgggagtg

SEQ ID NO: 4438 - DNA, 25 bp, Homo sapien
ctagagttaatttcttccgggagtg

SEQ ID NO: 4439 - DNA, 25 bp, Homo sapien
tgagttgtcttatcttcaaaacgta

SEQ ID NO: 4440 - DNA, 25 bp, Homo sapien
tgagttgtcttaacttcaaaacgta

SEQ ID NO: 4441 - DNA, 25 bp, Homo sapien
atcgacttcggttgatccaaaatat

SEQ ID NO: 4442 - DNA, 25 bp, Homo sapien
atcgacttcggtagatccaaaatat

SEQ ID NO: 4443 - DNA, 25 bp, Homo sapien
gtgtatgtgtgtaattccaaacacc

SEQ ID NO: 4444 - DNA, 25 bp, Homo sapien
gtgtatgtgtgttattccaaacacc

SEQ ID NO: 4445 - DNA, 25 bp, Homo sapien
gatcgttattattccgtcagtataa

SEQ ID NO: 4446 - DNA, 25 bp, Homo sapien
gatcgttattataccgtcagtataa

SEQ ID NO: 4447 - DNA, 25 bp, Homo sapien
ttactggtttctactgttatacgaa

SEQ ID NO: 4448 - DNA, 25 bp, Homo sapien
ttactggtttcttctgttatacgaa

SEQ ID NO: 4449 - DNA, 25 bp, Homo sapien
ctcttcgtgtttcgtccgaacctct

SEQ ID NO: 4450 - DNA, 25 bp, Homo sapien
ctcttcgtgtttggtccgaacctct

SEQ ID NO: 4451 - DNA, 25 bp, Homo sapien
ctgtctgtctacgtccgagatgtgt

SEQ ID NO: 4452 - DNA, 25 bp, Homo sapien
ctgtctgtctacctccgagatgtgt

SEQ ID NO: 4453 - DNA, 25 bp, Homo sapien
gacgttcttcacacctacgatagat

SEQ ID NO: 4454 - DNA, 25 bp, Homo sapien
gacgttcttcactcctacgatagat

SEQ ID NO: 4455 - DNA, 25 bp, Homo sapien
gccgtttcctcatctcgtcgtcggg

SEQ ID NO: 4456 - DNA, 25 bp, Homo sapien
gccgtttcctcaactcgtcgtcggg

SEQ ID NO: 4457 - DNA, 25 bp, Homo sapien
ccctcgttcgagaaacacgaaccgg

SEQ ID NO: 4458 - DNA, 25 bp, Homo sapien
ccctcgttcgagtaacacgaaccgg

SEQ ID NO: 4459 - DNA, 25 bp, Homo sapien
ctcgaagactcgttctaaagtaggt

SEQ ID NO: 4460 - DNA, 25 bp, Homo sapien
ctcgaagactcgatctaaagtaggt

SEQ ID NO: 4461 - DNA, 25 bp, Homo sapien
agtcactagacatctctcacaggtg

SEQ ID NO: 4462 - DNA, 25 bp, Homo sapien
agtcactagacaactctcacaggtg

SEQ ID NO: 4463 - DNA, 25 bp, Homo sapien
gaaagtacagaagtctcacagtgtc

SEQ ID NO: 4464 - DNA, 25 bp, Homo sapien
gaaagtacagaactctcacagtgtc

SEQ ID NO: 4465 - DNA, 25 bp, Homo sapien
acataatgactgattacagatgtct

SEQ ID NO: 4466 - DNA, 25 bp, Homo sapien
acataatgactgtttacagatgtct

SEQ ID NO: 4467 - DNA, 25 bp, Homo sapien
cgaaagtcgtacgaagtctcttctc

SEQ ID NO: 4468 - DNA, 25 bp, Homo sapien
cgaaagtcgtaccaagtctcttctc

SEQ ID NO: 4469 - DNA, 25 bp, Homo sapien
aagtaacgtcgactccttatatccg

SEQ ID NO: 4470 - DNA, 25 bp, Homo sapien
aagtaacgtcgagtccttatatccg

SEQ ID NO: 4471 - DNA, 25 bp, Homo sapien
ttaaaacgtcactccgagtttaccg

SEQ ID NO: 4472 - DNA, 25 bp, Homo sapien
ttaaaacgtcacaccgagtttaccg

SEQ ID NO: 4473 - DNA, 25 bp, Homo sapien
gaacccagactaatgttactttacg

SEQ ID NO: 4474 - DNA, 25 bp, Homo sapien
gaacccagactattgttactttacg

SEQ ID NO: 4475 - DNA, 25 bp, Homo sapien
ggacgtctccgaatccgagtcattc

SEQ ID NO: 4476 - DNA, 25 bp, Homo sapien
ggacgtctccgattccgagtcattc

SEQ ID NO: 4477 - DNA, 25 bp, Homo sapien
ctcctcttcgacttctcgggtcttt

SEQ ID NO: 4478 - DNA, 25 bp, Homo sapien
ctcctcttcgacatctcgggtcttt

SEQ ID NO: 4479 - DNA, 25 bp, Homo sapien
ccctcttcgagaggtgtgtgtaccc

SEQ ID NO: 4480 - DNA, 25 bp, Homo sapien
ccctcttcgagacgtgtgtgtaccc

SEQ ID NO: 4481 - DNA, 25 bp, Homo sapien
actcgcgtgtatgaggtgtttcagg

SEQ ID NO: 4482 - DNA, 25 bp, Homo sapien
actcgcgtgtatcaggtgtttcagg

SEQ ID NO: 4483 - DNA, 25 bp, Homo sapien
cctgattgttcttcggtgtcctcca

SEQ ID NO: 4484 - DNA, 25 bp, Homo sapien
cctgattgttctacggtgtcctcca

SEQ ID NO: 4485 - DNA, 25 bp, Homo sapien
tttttcctcgacgtgtacgactccc

SEQ ID NO: 4486 - DNA, 25 bp, Homo sapien
tttttcctcgacctgtacgactccc

SEQ ID NO: 4487 - DNA, 25 bp, Homo sapien
tactgttcccagtgtgtaccccgac

SEQ ID NO: 4488 - DNA, 25 bp, Homo sapien
tactgttcccagagtgtaccccgac

SEQ ID NO: 4489 - DNA, 25 bp, Homo sapien
gtcgctgaccgagtctagagtctac

SEQ ID NO: 4490 - DNA, 25 bp, Homo sapien
gtcgctgaccgactctagagtctac

SEQ ID NO: 4491 - DNA, 25 bp, Homo sapien
gactgatgctgacacctcaagtcag

SEQ ID NO: 4492 - DNA, 25 bp, Homo sapien
gactgatgctgagacctcaagtcag

SEQ ID NO: 4493 - DNA, 25 bp, Homo sapien
tttcatgtcaacaccgtaaatgagt

SEQ ID NO: 4494 - DNA, 25 bp, Homo sapien
tttcatgtcaactccgtaaatgagt

SEQ ID NO: 4495 - DNA, 25 bp, Homo sapien
gtgacgtcgtcgactttgaaaatag

SEQ ID NO: 4496 - DNA, 25 bp, Homo sapien
gtgacgtcgtcgtctttgaaaatag

SEQ ID NO: 4497 - DNA, 25 bp, Homo sapien
tgacgtgtacccttcctcggtgaaa

SEQ ID NO: 4498 - DNA, 25 bp, Homo sapien
tgacgtgtacccatcctcggtgaaa

SEQ ID NO: 4499 - DNA, 25 bp, Homo sapien
ctcgtcgtcgggagtagcggcaacc

SEQ ID NO: 4500 - DNA, 25 bp, Homo sapien
ctcgtcgtcgggtgtagcggcaacc

SEQ ID NO: 4501 - DNA, 25 bp, Homo sapien
cgtcgaggtctgtttttcgaagaca

SEQ ID NO: 4502 - DNA, 25 bp, Homo sapien
cgtcgaggtctgattttcgaagaca

SEQ ID NO: 4503 - DNA, 25 bp, Homo sapien
cttcagtcatgtattttcgataaga

SEQ ID NO: 4504 - DNA, 25 bp, Homo sapien
cttcagtcatgttttttcgataaga

SEQ ID NO: 4505 - DNA, 25 bp, Homo sapien
gttctcgatgtctgtttttcagaag

SEQ ID NO: 4506 - DNA, 25 bp, Homo sapien
gttctcgatgtcagtttttcagaag

SEQ ID NO: 4507 - DNA, 25 bp, Homo sapien
tcgagaggtaattgatctcgaggac

SEQ ID NO: 4508 - DNA, 25 bp, Homo sapien
tcgagaggtaatagatctcgaggac

SEQ ID NO: 4509 - DNA, 25 bp, Homo sapien
atataggtctaaaatatcagacgtc

SEQ ID NO: 4510 - DNA, 25 bp, Homo sapien
atataggtctaatatatcagacgtc

SEQ ID NO: 4511 - DNA, 25 bp, Homo sapien
ccggagtggtcaaggtcctctggtc

SEQ ID NO: 4512 - DNA, 25 bp, Homo sapien
ccggagtggtcatggtcctctggtc

SEQ ID NO: 4513 - DNA, 25 bp, Homo sapien
aagtggtctaccttccagtcgtacc

SEQ ID NO: 4514 - DNA, 25 bp, Homo sapien
aagtggtctaccatccagtcgtacc

SEQ ID NO: 4515 - DNA, 25 bp, Homo sapien
taaagtgggttcacgcagatacagt

SEQ ID NO: 4516 - DNA, 25 bp, Homo sapien
taaagtgggttctcgcagatacagt

SEQ ID NO: 4517 - DNA, 25 bp, Homo sapien
ggacaacggtttttgtaaagacctt

SEQ ID NO: 4518 - DNA, 25 bp, Homo sapien
ggacaacggtttatgtaaagacctt

SEQ ID NO: 4519 - DNA, 25 bp, Homo sapien
taagtgtcttgtgtgttatacccac

SEQ ID NO: 4520 - DNA, 25 bp, Homo sapien
taagtgtcttgtctgttatacccac

SEQ ID NO: 4521 - DNA, 25 bp, Homo sapien
gtgtctaggtacttcttcgtgaaga

SEQ ID NO: 4522 - DNA, 25 bp, Homo sapien
gtgtctaggtacatcttcgtgaaga

SEQ ID NO: 4523 - DNA, 25 bp, Homo sapien
cctggtcgtgcgtctccgtgtcccg

SEQ ID NO: 4524 - DNA, 25 bp, Homo sapien
cctggtcgtgcgactccgtgtcccg

SEQ ID NO: 4525 - DNA, 25 bp, Homo sapien
cgcagaggtgtggttagagtctcca

SEQ ID NO: 4526 - DNA, 25 bp, Homo sapien
cgcagaggtgtgcttagagtctcca

SEQ ID NO: 4527 - DNA, 25 bp, Homo sapien
cgcaagaggttgtcagagtcgacga

SEQ ID NO: 4528 - DNA, 25 bp, Homo sapien
cgcaagaggttgacagagtcgacga

SEQ ID NO: 4529 - DNA, 25 bp, Homo sapien
cttatagagaaggactgaggtccta

SEQ ID NO: 4530 - DNA, 25 bp, Homo sapien
cttatagagaagcactgaggtccta

SEQ ID NO: 4531 - DNA, 25 bp, Homo sapien
gtattcgtacattagacggagcttc

SEQ ID NO: 4532 - DNA, 25 bp, Homo sapien
gtattcgtacataagacggagcttc

SEQ ID NO: 4533 - DNA, 25 bp, Homo sapien
ttgatctacgcaaagtcgttcctta

SEQ ID NO: 4534 - DNA, 25 bp, Homo sapien
ttgatctacgcatagtcgttcctta

SEQ ID NO: 4535 - DNA, 25 bp, Homo sapien
gtgaaccgtctctattgaactactt

SEQ ID NO: 4536 - DNA, 25 bp, Homo sapien
gtgaaccgtctcaattgaactactt

SEQ ID NO: 4537 - DNA, 25 bp, Homo sapien
ttacagattccctttgaagtcgtat

SEQ ID NO: 4538 - DNA, 25 bp, Homo sapien
ttacagattcccattgaagtcgtat

SEQ ID NO: 4539 - DNA, 25 bp, Homo sapien
gaggttttactgaaagagtacctac

SEQ ID NO: 4540 - DNA, 25 bp, Homo sapien
gaggttttactgtaagagtacctac

SEQ ID NO: 4541 - DNA, 25 bp, Homo sapien
gaagattctcaaaaactagacctcg

SEQ ID NO: 4542 - DNA, 25 bp, Homo sapien
gaagattctcaataactagacctcg

SEQ ID NO: 4543 - DNA, 25 bp, Homo sapien
ttggagatcaccttgaaaagaatac

SEQ ID NO: 4544 - DNA, 25 bp, Homo sapien
ttggagatcaccatgaaaagaatac

SEQ ID NO: 4545 - DNA, 25 bp, Homo sapien
gtgacgtctgttcatatagtattcg

SEQ ID NO: 4546 - DNA, 25 bp, Homo sapien
gtgacgtctgttgatatagtattcg

SEQ ID NO: 4547 - DNA, 25 bp, Homo sapien
tacggagtactgttgtattgtccct

SEQ ID NO: 4548 - DNA, 25 bp, Homo sapien
tacggagtactgatgtattgtccct

SEQ ID NO: 4549 - DNA, 25 bp, Homo sapien
ccgaagtctttatgtacgaaaactt

SEQ ID NO: 4550 - DNA, 25 bp, Homo sapien
ccgaagtctttaagtacgaaaactt

SEQ ID NO: 4551 - DNA, 25 bp, Homo sapien
gtaacgttgataggacaagacactt

SEQ ID NO: 4552 - DNA, 25 bp, Homo sapien
gtaacgttgatacgacaagacactt

SEQ ID NO: 4553 - DNA, 25 bp, Homo sapien
tagacgttcgcgttctgagatgaca

SEQ ID NO: 4554 - DNA, 25 bp, Homo sapien
tagacgttcgcgatctgagatgaca

SEQ ID NO: 4555 - DNA, 25 bp, Homo sapien
taatagttatgcataaagtgtcctc

SEQ ID NO: 4556 - DNA, 25 bp, Homo sapien
taatagttatgcttaaagtgtcctc

SEQ ID NO: 4557 - DNA, 25 bp, Homo sapien
agtaagtgtgactctatttcactgt

SEQ ID NO: 4558 - DNA, 25 bp, Homo sapien
agtaagtgtgacactatttcactgt

SEQ ID NO: 4559 - DNA, 25 bp, Homo sapien
tgagaggtactacttggcgtcgtgt

SEQ ID NO: 4560 - DNA, 25 bp, Homo sapien
tgagaggtactagttggcgtcgtgt

SEQ ID NO: 4561 - DNA, 25 bp, Homo sapien
gggtctaccgaccaccggcgagtct

SEQ ID NO: 4562 - DNA, 25 bp, Homo sapien
gggtctaccgacgaccggcgagtct

SEQ ID NO: 4563 - DNA, 25 bp, Homo sapien
ttctcgttctctgtcgtagtctgta

SEQ ID NO: 4564 - DNA, 25 bp, Homo sapien
ttctcgttctctctcgtagtctgta

SEQ ID NO: 4565 - DNA, 25 bp, Homo sapien
ctctccgtctcgaccggtgttacgg

SEQ ID NO: 4566 - DNA, 25 bp, Homo sapien
ctctccgtctcgtccggtgttacgg

SEQ ID NO: 4567 - DNA, 25 bp, Homo sapien
ttatcattgttagacgcttattgtc

SEQ ID NO: 4568 - DNA, 25 bp, Homo sapien
ttatcattgttacacgcttattgtc

SEQ ID NO: 4569 - DNA, 25 bp, Homo sapien
gtctctgtagatcttttcgtgtact

SEQ ID NO: 4570 - DNA, 25 bp, Homo sapien
gtctctgtagatgttttcgtgtact

SEQ ID NO: 4571 - DNA, 25 bp, Homo sapien
aagtctgttgaagtcacgtttctat

SEQ ID NO: 4572 - DNA, 25 bp, Homo sapien
aagtctgttgaactcacgtttctat

SEQ ID NO: 4573 - DNA, 25 bp, Homo sapien
cacgacgttggtaaatgactttctt

SEQ ID NO: 4574 - DNA, 25 bp, Homo sapien
cacgacgttggttaatgactttctt

SEQ ID NO: 4575 - DNA, 25 bp, Homo sapien
taacgatcccttaaggtgttaccct

SEQ ID NO: 4576 - DNA, 25 bp, Homo sapien
taacgatccctttaggtgttaccct

SEQ ID NO: 4577 - DNA, 25 bp, Homo sapien
ggctcgagacttttgcgtctagtca

SEQ ID NO: 4578 - DNA, 25 bp, Homo sapien
ggctcgagacttatgcgtctagtca

SEQ ID NO: 4579 - DNA, 25 bp, Homo sapien
gtcggtcgacgaggtttacggccca

SEQ ID NO: 4580 - DNA, 25 bp, Homo sapien
gtcggtcgacgacgtttacggccca

SEQ ID NO: 4581 - DNA, 25 bp, Homo sapien
ggactatagacttaacggtactcaa

SEQ ID NO: 4582 - DNA, 25 bp, Homo sapien
ggactatagactaaacggtactcaa

SEQ ID NO: 4583 - DNA, 25 bp, Homo sapien
cttgacacgaaatacagtctctaag

SEQ ID NO: 4584 - DNA, 25 bp, Homo sapien
cttgacacgaaaaacagtctctaag

SEQ ID NO: 4585 - DNA, 25 bp, Homo sapien
ctgttgggtcaaaagattcgtgact

SEQ ID NO: 4586 - DNA, 25 bp, Homo sapien
ctgttgggtcaatagattcgtgact

SEQ ID NO: 4587 - DNA, 25 bp, Homo sapien
gtgaagtgtgttaattgaccttgac

SEQ ID NO: 4588 - DNA, 25 bp, Homo sapien
gtgaagtgtgtttattgaccttgac

SEQ ID NO: 4589 - DNA, 25 bp, Homo sapien
ctcgggacggtgacttgacacctcc

SEQ ID NO: 4590 - DNA, 25 bp, Homo sapien
ctcgggacggtgtcttgacacctcc

SEQ ID NO: 4591 - DNA, 25 bp, Homo sapien
gcgtgtgcgcgaacaagcacacctt

SEQ ID NO: 4592 - DNA, 25 bp, Homo sapien
gcgtgtgcgcgatcaagcacacctt

SEQ ID NO: 4593 - DNA, 25 bp, Homo sapien
gtcggaccgagtctaaccaccacgt

SEQ ID NO: 4594 - DNA, 25 bp, Homo sapien
gtcggaccgagtgtaaccaccacgt

SEQ ID NO: 4595 - DNA, 25 bp, Homo sapien
gacgcgccatgaggtggtagaccta

SEQ ID NO: 4596 - DNA, 25 bp, Homo sapien
gacgcgccatgacgtggtagaccta

SEQ ID NO: 4597 - DNA, 25 bp, Homo sapien
cgtcggaaaccgattgaggcgatac

SEQ ID NO: 4598 - DNA, 25 bp, Homo sapien
cgtcggaaaccgtttgaggcgatac

SEQ ID NO: 4599 - DNA, 25 bp, Homo sapien
ggagaccgacattctatacacccac

SEQ ID NO: 4600 - DNA, 25 bp, Homo sapien
ggagaccgacatactatacacccac

SEQ ID NO: 4601 - DNA, 25 bp, Homo sapien
gggtccgtccgtcttgtcgatccac

SEQ ID NO: 4602 - DNA, 25 bp, Homo sapien
gggtccgtccgtgttgtcgatccac

SEQ ID NO: 4603 - DNA, 25 bp, Homo sapien
cctaccgtcccgttataggacttaa

SEQ ID NO: 4604 - DNA, 25 bp, Homo sapien
cctaccgtcccgatataggacttaa

SEQ ID NO: 4605 - DNA, 25 bp, Homo sapien
aggactccttcctcgggagtgtaga

SEQ ID NO: 4606 - DNA, 25 bp, Homo sapien
aggactccttccacgggagtgtaga

SEQ ID NO: 4607 - DNA, 25 bp, Homo sapien
tctttacgtcggtgtcaggtagaga

SEQ ID NO: 4608 - DNA, 25 bp, Homo sapien
tctttacgtcggagtcaggtagaga

SEQ ID NO: 4609 - DNA, 25 bp, Homo sapien
ccttagtaccgtgaggactatgaaa

SEQ ID NO: 4610 - DNA, 25 bp, Homo sapien
ccttagtaccgtcaggactatgaaa

SEQ ID NO: 4611 - DNA, 25 bp, Homo sapien
accgtgtgggctctatatagaacga

SEQ ID NO: 4612 - DNA, 25 bp, Homo sapien
accgtgtgggctgtatatagaacga

SEQ ID NO: 4613 - DNA, 25 bp, Homo sapien
cgggtgcgtgtatcttccgccgacg

SEQ ID NO: 4614 - DNA, 25 bp, Homo sapien
cgggtgcgtgtaacttccgccgacg

SEQ ID NO: 4615 - DNA, 25 bp, Homo sapien
ttttgtatgttcacgtgtctgtcca

SEQ ID NO: 4616 - DNA, 25 bp, Homo sapien
ttttgtatgttctcgtgtctgtcca

SEQ ID NO: 4617 - DNA, 25 bp, Homo sapien
catcttttggagtttactatatcga

SEQ ID NO: 4618 - DNA, 25 bp, Homo sapien
catcttttggagattactatatcga

SEQ ID NO: 4619 - DNA, 25 bp, Homo sapien
gagtttctgtatttatcaccttcga

SEQ ID NO: 4620 - DNA, 25 bp, Homo sapien
gagtttctgtatatatcaccttcga

SEQ ID NO: 4621 - DNA, 25 bp, Homo sapien
gtaacagtattacagtgaaacttcc

SEQ ID NO: 4622 - DNA, 25 bp, Homo sapien
gtaacagtattagagtgaaacttcc

SEQ ID NO: 4623 - DNA, 25 bp, Homo sapien
acgacatgaggacgaggaatttcgc

SEQ ID NO: 4624 - DNA, 25 bp, Homo sapien
acgacatgaggaggaggaatttcgc

SEQ ID NO: 4625 - DNA, 25 bp, Homo sapien
agagggtactgaacctccgtcgtct

SEQ ID NO: 4626 - DNA, 25 bp, Homo sapien
agagggtactgatcctccgtcgtct

SEQ ID NO: 4627 - DNA, 25 bp, Homo sapien
agtttattcctttatttacaactct

SEQ ID NO: 4628 - DNA, 25 bp, Homo sapien
agtttattccttaatttacaactct

SEQ ID NO: 4629 - DNA, 25 bp, Homo sapien
ttcttattccaagttgtgtagtcac

SEQ ID NO: 4630 - DNA, 25 bp, Homo sapien
ttcttattccaacttgtgtagtcac

SEQ ID NO: 4631 - DNA, 25 bp, Homo sapien
ggtctgtgtaaatacttgctatacc

SEQ ID NO: 4632 - DNA, 25 bp, Homo sapien
ggtctgtgtaaaaacttgctatacc

SEQ ID NO: 4633 - DNA, 25 bp, Homo sapien
tagtttcagaaatatgtcgtctatc

SEQ ID NO: 4634 - DNA, 25 bp, Homo sapien
tagtttcagaaaaatgtcgtctatc

SEQ ID NO: 4635 - DNA, 25 bp, Homo sapien
atagtaacccatgtaaacgcgagtc

SEQ ID NO: 4636 - DNA, 25 bp, Homo sapien
atagtaacccatctaaacgcgagtc

SEQ ID NO: 4637 - DNA, 25 bp, Homo sapien
tcgtctcgtctctcgcaaaaggtag

SEQ ID NO: 4638 - DNA, 25 bp, Homo sapien
tcgtctcgtctcacgcaaaaggtag

SEQ ID NO: 4639 - DNA, 25 bp, Homo sapien
cactgactcgttcaccactatagtg

SEQ ID NO: 4640 - DNA, 25 bp, Homo sapien
cactgactcgttgaccactatagtg

SEQ ID NO: 4641 - DNA, 25 bp, Homo sapien
tcttagacgtctacaggtataatgt

SEQ ID NO: 4642 - DNA, 25 bp, Homo sapien
tcttagacgtcttcaggtataatgt

SEQ ID NO: 4643 - DNA, 25 bp, Homo sapien
ttctacggactcgtcacggaactta

SEQ ID NO: 4644 - DNA, 25 bp, Homo sapien
ttctacggactcctcacggaactta

SEQ ID NO: 4645 - DNA, 25 bp, Homo sapien
cttgtttgttcatccggacgaggag

SEQ ID NO: 4646 - DNA, 25 bp, Homo sapien
cttgtttgttcaaccggacgaggag

SEQ ID NO: 4647 - DNA, 25 bp, Homo sapien
tctttgtatctctaattcgatgagt

SEQ ID NO: 4648 - DNA, 25 bp, Homo sapien
tctttgtatctcaaattcgatgagt

SEQ ID NO: 4649 - DNA, 25 bp, Homo sapien
ggtttgttgctagacacttcaggac

SEQ ID NO: 4650 - DNA, 25 bp, Homo sapien
ggtttgttgctacacacttcaggac

SEQ ID NO: 4651 - DNA, 25 bp, Homo sapien
cttctatgtcaaacctactccggtg

SEQ ID NO: 4652 - DNA, 25 bp, Homo sapien
cttctatgtcaatcctactccggtg

SEQ ID NO: 4653 - DNA, 25 bp, Homo sapien
tactagtgatagatgcttactggtg

SEQ ID NO: 4654 - DNA, 25 bp, Homo sapien
tactagtgatagttgcttactggtg

SEQ ID NO: 4655 - DNA, 25 bp, Homo sapien
ctagaggactctcgtctcacttctc

SEQ ID NO: 4656 - DNA, 25 bp, Homo sapien
ctagaggactctggtctcacttctc

SEQ ID NO: 4657 - DNA, 25 bp, Homo sapien
tatcggtatgtgtacttcgtttcgt

SEQ ID NO: 4658 - DNA, 25 bp, Homo sapien
tatcggtatgtgaacttcgtttcgt

SEQ ID NO: 4659 - DNA, 25 bp, Homo sapien
aggtcgtgaggttgaccgtttctat

SEQ ID NO: 4660 - DNA, 25 bp, Homo sapien
aggtcgtgaggtagaccgtttctat

SEQ ID NO: 4661 - DNA, 25 bp, Homo sapien
aaactggtgtcgtaattcttgttcg

SEQ ID NO: 4662 - DNA, 25 bp, Homo sapien
aaactggtgtcgaaattcttgttcg

SEQ ID NO: 4663 - DNA, 25 bp, Homo sapien
cggatagtcacatttcgtatgtatg

SEQ ID NO: 4664 - DNA, 25 bp, Homo sapien
cggatagtcacaattcgtatgtatg

SEQ ID NO: 4665 - DNA, 25 bp, Homo sapien
gaccgacagtcctgagcctcttcta

SEQ ID NO: 4666 - DNA, 25 bp, Homo sapien
gaccgacagtccagagcctcttcta

SEQ ID NO: 4667 - DNA, 25 bp, Homo sapien
taaacatcacatggtaacggttcta

SEQ ID NO: 4668 - DNA, 25 bp, Homo sapien
taaacatcacatcgtaacggttcta

SEQ ID NO: 4669 - DNA, 25 bp, Homo sapien
tacaggacacctcgttccggttctt

SEQ ID NO: 4670 - DNA, 25 bp, Homo sapien
tacaggacacctggttccggttctt

SEQ ID NO: 4671 - DNA, 25 bp, Homo sapien
accgacggcgtggtccaggagtatc

SEQ ID NO: 4672 - DNA, 25 bp, Homo sapien
accgacggcgtgctccaggagtatc

SEQ ID NO: 4673 - DNA, 25 bp, Homo sapien
attcaggactcgtcggtagaggttc

SEQ ID NO: 4674 - DNA, 25 bp, Homo sapien
attcaggactcgacggtagaggttc

SEQ ID NO: 4675 - DNA, 25 bp, Homo sapien
aacattgacgaagacgtagggtctc

SEQ ID NO: 4676 - DNA, 25 bp, Homo sapien
aacattgacgaacacgtagggtctc

SEQ ID NO: 4677 - DNA, 25 bp, Homo sapien
gtatgttgtaagtcagtcgacttct

SEQ ID NO: 4678 - DNA, 25 bp, Homo sapien
gtatgttgtaagacagtcgacttct

SEQ ID NO: 4679 - DNA, 25 bp, Homo sapien
gtgaggttcaaggacaacgtcagcg

SEQ ID NO: 4680 - DNA, 25 bp, Homo sapien
gtgaggttcaagcacaacgtcagcg

SEQ ID NO: 4681 - DNA, 25 bp, Homo sapien
cggtttctaggaaaggtcgtcgtgt

SEQ ID NO: 4682 - DNA, 25 bp, Homo sapien
cggtttctaggataggtcgtcgtgt

SEQ ID NO: 4683 - DNA, 25 bp, Homo sapien
ctgacaagaatgaggattcactttg

SEQ ID NO: 4684 - DNA, 25 bp, Homo sapien
ctgacaagaatgtggattcactttg

SEQ ID NO: 4685 - DNA, 25 bp, Homo sapien
cgaacaaaaggtagagagtctttca

SEQ ID NO: 4686 - DNA, 25 bp, Homo sapien
cgaacaaaaggttgagagtctttca

SEQ ID NO: 4687 - DNA, 25 bp, Homo sapien
gacataaaattgatggtatctcctt

SEQ ID NO: 4688 - DNA, 25 bp, Homo sapien
gacataaaattgttggtatctcctt

SEQ ID NO: 4689 - DNA, 25 bp, Homo sapien
taaggtgttcgttgtcacgtcacta

SEQ ID NO: 4690 - DNA, 25 bp, Homo sapien
taaggtgttcgtagtcacgtcacta

SEQ ID NO: 4691 - DNA, 25 bp, Homo sapien
catgaacgagagtacaacgaaacca

SEQ ID NO: 4692 - DNA, 25 bp, Homo sapien
catgaacgagagaacaacgaaacca

SEQ ID NO: 4693 - DNA, 25 bp, Homo sapien
accgacgagggacgtcctcaaccga

SEQ ID NO: 4694 - DNA, 25 bp, Homo sapien
accgacgagggaggtcctcaaccga

SEQ ID NO: 4695 - DNA, 25 bp, Homo sapien
aaaagatgttttggtaacgacaccg

SEQ ID NO: 4696 - DNA, 25 bp, Homo sapien
aaaagatgttttcgtaacgacaccg

SEQ ID NO: 4697 - DNA, 25 bp, Homo sapien
caaggatagctttggaacgacagac

SEQ ID NO: 4698 - DNA, 25 bp, Homo sapien
caaggatagcttaggaacgacagac

SEQ ID NO: 4699 - DNA, 25 bp, Homo sapien
tgtaggaagtttagtcgtaggaccc

SEQ ID NO: 4700 - DNA, 25 bp, Homo sapien
tgtaggaagttttgtcgtaggaccc

SEQ ID NO: 4701 - DNA, 25 bp, Homo sapien
ttaggccgttttcgtgagtcgtcct

SEQ ID NO: 4702 - DNA, 25 bp, Homo sapien
ttaggccgttttggtgagtcgtcct

SEQ ID NO: 4703 - DNA, 25 bp, Homo sapien
acgtcctatctgtaccggttagact

SEQ ID NO: 4704 - DNA, 25 bp, Homo sapien
acgtcctatctgaaccggttagact

SEQ ID NO: 4705 - DNA, 25 bp, Homo sapien
gaaacccgttctggacactttagag

SEQ ID NO: 4706 - DNA, 25 bp, Homo sapien
gaaacccgttctcgacactttagag

SEQ ID NO: 4707 - DNA, 25 bp, Homo sapien
acaccaagactatccgtcagtgagc

SEQ ID NO: 4708 - DNA, 25 bp, Homo sapien
acaccaagactaaccgtcagtgagc

SEQ ID NO: 4709 - DNA, 25 bp, Homo sapien
cgtaccgacagaagacccagtaaca

SEQ ID NO: 4710 - DNA, 25 bp, Homo sapien
cgtaccgacagatgacccagtaaca

SEQ ID NO: 4711 - DNA, 25 bp, Homo sapien
tcacgcacagacttcgccggttaca

SEQ ID NO: 4712 - DNA, 25 bp, Homo sapien
tcacgcacagacatcgccggttaca

SEQ ID NO: 4713 - DNA, 25 bp, Homo sapien
cattacgaccctttccaggagtcct

SEQ ID NO: 4714 - DNA, 25 bp, Homo sapien
cattacgaccctatccaggagtcct

SEQ ID NO: 4715 - DNA, 25 bp, Homo sapien
ggtgaagaaccacacagatacatcc

SEQ ID NO: 4716 - DNA, 25 bp, Homo sapien
ggtgaagaaccagacagatacatcc

SEQ ID NO: 4717 - DNA, 25 bp, Homo sapien
gaaaacaagcaggaatctacctacc

SEQ ID NO: 4718 - DNA, 25 bp, Homo sapien
gaaaacaagcagcaatctacctacc

SEQ ID NO: 4719 - DNA, 25 bp, Homo sapien
taaaattcgagacagaacttcacga

SEQ ID NO: 4720 - DNA, 25 bp, Homo sapien
taaaattcgagagagaacttcacga

SEQ ID NO: 4721 - DNA, 25 bp, Homo sapien
gttataacccaggagtcaaccccgg

SEQ ID NO: 4722 - DNA, 25 bp, Homo sapien
gttataacccagcagtcaaccccgg

SEQ ID NO: 4723 - DNA, 25 bp, Homo sapien
tacctatccgaacgacaagaacctg

SEQ ID NO: 4724 - DNA, 25 bp, Homo sapien
tacctatccgaaggacaagaacctg

SEQ ID NO: 4725 - DNA, 25 bp, Homo sapien
tccataaggtgtagtgtagactccc

SEQ ID NO: 4726 - DNA, 25 bp, Homo sapien
tccataaggtgttgtgtagactccc

SEQ ID NO: 4727 - DNA, 25 bp, Homo sapien
ggtagacttccgttttggtcacacg

SEQ ID NO: 4728 - DNA, 25 bp, Homo sapien
ggtagacttccgatttggtcacacg

SEQ ID NO: 4729 - DNA, 25 bp, Homo sapien
attggttcctctttcgagtcgtctg

SEQ ID NO: 4730 - DNA, 25 bp, Homo sapien
attggttcctctatcgagtcgtctg

SEQ ID NO: 4731 - DNA, 25 bp, Homo sapien
actctgattatcgaccaagtgtctt

SEQ ID NO: 4732 - DNA, 25 bp, Homo sapien
actctgattatccaccaagtgtctt

SEQ ID NO: 4733 - DNA, 25 bp, Homo sapien
ctgaatatacccaacgagtctccgt

SEQ ID NO: 4734 - DNA, 25 bp, Homo sapien
ctgaatataccctacgagtctccgt

SEQ ID NO: 4735 - DNA, 25 bp, Homo sapien
ggttcaacttcttctacttctcggt

SEQ ID NO: 4736 - DNA, 25 bp, Homo sapien
ggttcaacttctactacttctcggt

SEQ ID NO: 4737 - DNA, 25 bp, Homo sapien
tggttcgctcctttcagtcctccga

SEQ ID NO: 4738 - DNA, 25 bp, Homo sapien
tggttcgctcctatcagtcctccga

SEQ ID NO: 4739 - DNA, 25 bp, Homo sapien
ctcacctagcagaaccgaccggtag

SEQ ID NO: 4740 - DNA, 25 bp, Homo sapien
ctcacctagcagtaccgaccggtag

SEQ ID NO: 4741 - DNA, 25 bp, Homo sapien
aggaccttcgagaagagtcacccga

SEQ ID NO: 4742 - DNA, 25 bp, Homo sapien
aggaccttcgagtagagtcacccga

SEQ ID NO: 4743 - DNA, 25 bp, Homo sapien
tcagtcgtgagttgtagcacccggt

SEQ ID NO: 4744 - DNA, 25 bp, Homo sapien
tcagtcgtgagtagtagcacccggt

SEQ ID NO: 4745 - DNA, 25 bp, Homo sapien
cagtgagggttgaaacacgaccctc

SEQ ID NO: 4746 - DNA, 25 bp, Homo sapien
cagtgagggttgtaacacgaccctc

SEQ ID NO: 4747 - DNA, 25 bp, Homo sapien
cgacgaggtccctacaacgtcggga

SEQ ID NO: 4748 - DNA, 25 bp, Homo sapien
cgacgaggtcccaacaacgtcggga

SEQ ID NO: 4749 - DNA, 25 bp, Homo sapien
tgtagagaattcaagactctcgggg

SEQ ID NO: 4750 - DNA, 25 bp, Homo sapien
tgtagagaattctagactctcgggg

SEQ ID NO: 4751 - DNA, 25 bp, Homo sapien
attacaacttattcttctctgtgtg

SEQ ID NO: 4752 - DNA, 25 bp, Homo sapien
attacaacttatacttctctgtgtg

SEQ ID NO: 4753 - DNA, 25 bp, Homo sapien
cgtaccgtccttcgaagtctattaa

SEQ ID NO: 4754 - DNA, 25 bp, Homo sapien
cgtaccgtccttggaagtctattaa

SEQ ID NO: 4755 - DNA, 25 bp, Homo sapien
gatactgacactgtcagaactgaaa

SEQ ID NO: 4756 - DNA, 25 bp, Homo sapien
gatactgacactctcagaactgaaa

SEQ ID NO: 4757 - DNA, 25 bp, Homo sapien
aaatcggagtcctcttaactgtcaa

SEQ ID NO: 4758 - DNA, 25 bp, Homo sapien
aaatcggagtccacttaactgtcaa

SEQ ID NO: 4759 - DNA, 25 bp, Homo sapien
acaaaggtcctctctaatcgttgtc

SEQ ID NO: 4760 - DNA, 25 bp, Homo sapien
acaaaggtcctcactaatcgttgtc

SEQ ID NO: 4761 - DNA, 25 bp, Homo sapien
aaaagtttctacaatactcgtccta

SEQ ID NO: 4762 - DNA, 25 bp, Homo sapien
aaaagtttctactatactcgtccta

SEQ ID NO: 4763 - DNA, 25 bp, Homo sapien
caaggtccgtgcacgtctgtccact

SEQ ID NO: 4764 - DNA, 25 bp, Homo sapien
caaggtccgtgctcgtctgtccact

SEQ ID NO: 4765 - DNA, 25 bp, Homo sapien
gtctgaggtcattttccctcgacct

SEQ ID NO: 4766 - DNA, 25 bp, Homo sapien
gtctgaggtcatattccctcgacct

SEQ ID NO: 4767 - DNA, 25 bp, Homo sapien
gacgacgacagtaggtcgagagccc

SEQ ID NO: 4768 - DNA, 25 bp, Homo sapien
gacgacgacagttggtcgagagccc

SEQ ID NO: 4769 - DNA, 25 bp, Homo sapien
acgacaccaagttgtcggaaacacc

SEQ ID NO: 4770 - DNA, 25 bp, Homo sapien
acgacaccaagtagtcggaaacacc

SEQ ID NO: 4771 - DNA, 25 bp, Homo sapien
aaccaaagagtggtatgggacgtca

SEQ ID NO: 4772 - DNA, 25 bp, Homo sapien
aaccaaagagtgctatgggacgtca

SEQ ID NO: 4773 - DNA, 25 bp, Homo sapien
ttccaagaaggagttgtgacgtcag

SEQ ID NO: 4774 - DNA, 25 bp, Homo sapien
ttccaagaaggacttgtgacgtcag

SEQ ID NO: 4775 - DNA, 25 bp, Homo sapien
tccgcaaaggaacctagtgcggtgt

SEQ ID NO: 4776 - DNA, 25 bp, Homo sapien
tccgcaaaggaagctagtgcggtgt

SEQ ID NO: 4777 - DNA, 25 bp, Homo sapien
taccactgtatcgaccccggggtcg

SEQ ID NO: 4778 - DNA, 25 bp, Homo sapien
taccactgtatccaccccggggtcg

SEQ ID NO: 4779 - DNA, 25 bp, Homo sapien
gactctaattccacactcggatgtc

SEQ ID NO: 4780 - DNA, 25 bp, Homo sapien
gactctaattcctcactcggatgtc

SEQ ID NO: 4781 - DNA, 25 bp, Homo sapien
aatacctgatgttttcctggattcg

SEQ ID NO: 4782 - DNA, 25 bp, Homo sapien
aatacctgatgtattcctggattcg

SEQ ID NO: 4783 - DNA, 25 bp, Homo sapien
cactgtgtcgaggagttttaccttc

SEQ ID NO: 4784 - DNA, 25 bp, Homo sapien
cactgtgtcgagcagttttaccttc

SEQ ID NO: 4785 - DNA, 25 bp, Homo sapien
gaatgttttctatatatcgtacttc

SEQ ID NO: 4786 - DNA, 25 bp, Homo sapien
gaatgttttctaaatatcgtacttc

SEQ ID NO: 4787 - DNA, 25 bp, Homo sapien
attatattactatatatacacaggt

SEQ ID NO: 4788 - DNA, 25 bp, Homo sapien
attatattactaaatatacacaggt

SEQ ID NO: 4789 - DNA, 25 bp, Homo sapien
cgtcaatgtaaaaccatcatgaaga

SEQ ID NO: 4790 - DNA, 25 bp, Homo sapien
cgtcaatgtaaatccatcatgaaga

SEQ ID NO: 4791 - DNA, 25 bp, Homo sapien
gtccacgttcacatcgtgtcaacga

SEQ ID NO: 4792 - DNA, 25 bp, Homo sapien
gtccacgttcacttcgtgtcaacga

SEQ ID NO: 4793 - DNA, 25 bp, Homo sapien
tcgagtctccggaggagtctgagaa

SEQ ID NO: 4794 - DNA, 25 bp, Homo sapien
tcgagtctccggtggagtctgagaa

SEQ ID NO: 4795 - DNA, 25 bp, Homo sapien
tcggaccggggtcgaccccacgagt

SEQ ID NO: 4796 - DNA, 25 bp, Homo sapien
tcggaccggggtggaccccacgagt

SEQ ID NO: 4797 - DNA, 25 bp, Homo sapien
taggcccggttcgtctcgaccgtaa

SEQ ID NO: 4798 - DNA, 25 bp, Homo sapien
taggcccggttcctctcgaccgtaa

SEQ ID NO: 4799 - DNA, 25 bp, Homo sapien
tcacaggacccgttgccttcctttg

SEQ ID NO: 4800 - DNA, 25 bp, Homo sapien
tcacaggacccgatgccttcctttg

SEQ ID NO: 4801 - DNA, 25 bp, Homo sapien
acgactacgggatcgttccgtgggt

SEQ ID NO: 4802 - DNA, 25 bp, Homo sapien
acgactacgggaacgttccgtgggt

SEQ ID NO: 4803 - DNA, 25 bp, Homo sapien
gaggtaggaccgtcgtctgtctgta

SEQ ID NO: 4804 - DNA, 25 bp, Homo sapien
gaggtaggaccgacgtctgtctgta

SEQ ID NO: 4805 - DNA, 25 bp, Homo sapien
gatggtaggagttcgagtctacgac

SEQ ID NO: 4806 - DNA, 25 bp, Homo sapien
gatggtaggagtacgagtctacgac

SEQ ID NO: 4807 - DNA, 25 bp, Homo sapien
acactagtcgtatacagggtatcga

SEQ ID NO: 4808 - DNA, 25 bp, Homo sapien
acactagtcgtaaacagggtatcga

SEQ ID NO: 4809 - DNA, 25 bp, Homo sapien
cgactaagagtgaacaggattactt

SEQ ID NO: 4810 - DNA, 25 bp, Homo sapien
cgactaagagtgtacaggattactt

SEQ ID NO: 4811 - DNA, 25 bp, Homo sapien
ccacctttcgtaaagcccgagtcga

SEQ ID NO: 4812 - DNA, 25 bp, Homo sapien
ccacctttcgtatagcccgagtcga

SEQ ID NO: 4813 - DNA, 25 bp, Homo sapien
aagacctttccctccgacgagtcga

SEQ ID NO: 4814 - DNA, 25 bp, Homo sapien
aagacctttcccaccgacgagtcga

SEQ ID NO: 4815 - DNA, 25 bp, Homo sapien
gaaggaaattcagaacccactctat

SEQ ID NO: 4816 - DNA, 25 bp, Homo sapien
gaaggaaattcacaacccactctat

SEQ ID NO: 4817 - DNA, 25 bp, Homo sapien
tgggggcccacacgtgtcacacctt

SEQ ID NO: 4818 - DNA, 25 bp, Homo sapien
tgggggcccacaggtgtcacacctt

SEQ ID NO: 4819 - DNA, 25 bp, Homo sapien
tttggctggccgaagtattaacctt

SEQ ID NO: 4820 - DNA, 25 bp, Homo sapien
tttggctggccgtagtattaacctt

SEQ ID NO: 4821 - DNA, 25 bp, Homo sapien
acacagagcccctggtgtcccggag

SEQ ID NO: 4822 - DNA, 25 bp, Homo sapien
acacagagccccaggtgtcccggag

SEQ ID NO: 4823 - DNA, 25 bp, Homo sapien
cgggtccgaggaccatagtcccaag

SEQ ID NO: 4824 - DNA, 25 bp, Homo sapien
cgggtccgaggagcatagtcccaag

SEQ ID NO: 4825 - DNA, 25 bp, Homo sapien
gagtagctagaggaattgcctacag

SEQ ID NO: 4826 - DNA, 25 bp, Homo sapien
gagtagctagagcaattgcctacag

SEQ ID NO: 4827 - DNA, 25 bp, Homo sapien
cgtacctcaactaccgtcgcataag

SEQ ID NO: 4828 - DNA, 25 bp, Homo sapien
cgtacctcaacttccgtcgcataag

SEQ ID NO: 4829 - DNA, 25 bp, Homo sapien
ctaaccccagagactccgagtacag

SEQ ID NO: 4830 - DNA, 25 bp, Homo sapien
ctaaccccagagtctccgagtacag

SEQ ID NO: 4831 - DNA, 25 bp, Homo sapien
gaaccagattcaaccttccggactc

SEQ ID NO: 4832 - DNA, 25 bp, Homo sapien
gaaccagattcatccttccggactc

SEQ ID NO: 4833 - DNA, 25 bp, Homo sapien
gacgtcattcgtgtcgccccggcga

SEQ ID NO: 4834 - DNA, 25 bp, Homo sapien
gacgtcattcgtctcgccccggcga

SEQ ID NO: 4835 - DNA, 25 bp, Homo sapien
ttcttgatccgtcaccgaggtcgcg

SEQ ID NO: 4836 - DNA, 25 bp, Homo sapien
ttcttgatccgtgaccgaggtcgcg

SEQ ID NO: 4837 - DNA, 25 bp, Homo sapien
tcttcgtacttctcggtgtgtcgtc

SEQ ID NO: 4838 - DNA, 25 bp, Homo sapien
tcttcgtacttcacggtgtgtcgtc

SEQ ID NO: 4839 - DNA, 25 bp, Homo sapien
gtctacttgtcggaggagtcgcgtc

SEQ ID NO: 4840 - DNA, 25 bp, Homo sapien
gtctacttgtcgcaggagtcgcgtc

SEQ ID NO: 4841 - DNA, 25 bp, Homo sapien
gtaaattccgtcatgtgtccgtagt

SEQ ID NO: 4842 - DNA, 25 bp, Homo sapien
gtaaattccgtcttgtgtccgtagt

SEQ ID NO: 4843 - DNA, 25 bp, Homo sapien
cttaacgaccccgtttctcatccgt

SEQ ID NO: 4844 - DNA, 25 bp, Homo sapien
cttaacgaccccctttctcatccgt

SEQ ID NO: 4845 - DNA, 25 bp, Homo sapien
ctgactctacctagttgtcatacga

SEQ ID NO: 4846 - DNA, 25 bp, Homo sapien
ctgactctaccttgttgtcatacga

SEQ ID NO: 4847 - DNA, 25 bp, Homo sapien
tctttacgttaaaccggttagattt

SEQ ID NO: 4848 - DNA, 25 bp, Homo sapien
tctttacgttaatccggttagattt

SEQ ID NO: 4849 - DNA, 25 bp, Homo sapien
tccttctgtgaacctggtataattt

SEQ ID NO: 4850 - DNA, 25 bp, Homo sapien
tccttctgtgaagctggtataattt

SEQ ID NO: 4851 - DNA, 25 bp, Homo sapien
ttcactgaacgtcagtgtttatatt

SEQ ID NO: 4852 - DNA, 25 bp, Homo sapien
ttcactgaacgtgagtgtttatatt

SEQ ID NO: 4853 - DNA, 25 bp, Homo sapien
ctcgttgtccggtgtcagtacgttt

SEQ ID NO: 4854 - DNA, 25 bp, Homo sapien
ctcgttgtccggagtcagtacgttt

SEQ ID NO: 4855 - DNA, 25 bp, Homo sapien
gacacttttaagacgccagacgtgg

SEQ ID NO: 4856 - DNA, 25 bp, Homo sapien
gacacttttaagtcgccagacgtgg

SEQ ID NO: 4857 - DNA, 25 bp, Homo sapien
ttcacgtcggtcgagcgacgcgtcc

SEQ ID NO: 4858 - DNA, 25 bp, Homo sapien
ttcacgtcggtccagcgacgcgtcc

SEQ ID NO: 4859 - DNA, 25 bp, Homo sapien
cttgtattcgtttaggagaacctgc

SEQ ID NO: 4860 - DNA, 25 bp, Homo sapien
cttgtattcgttaaggagaacctgc

SEQ ID NO: 4861 - DNA, 25 bp, Homo sapien
tatcggacactagtcgtatacaggg

SEQ ID NO: 4862 - DNA, 25 bp, Homo sapien
tatcggacactactcgtatacaggg

SEQ ID NO: 4863 - DNA, 25 bp, Homo sapien
tcgtccggtccgactcgaagatatt

SEQ ID NO: 4864 - DNA, 25 bp, Homo sapien
tcgtccggtccgtctcgaagatatt

SEQ ID NO: 4865 - DNA, 25 bp, Homo sapien
agtgacggtaccttactaaacggaa

SEQ ID NO: 4866 - DNA, 25 bp, Homo sapien
agtgacggtaccatactaaacggaa

SEQ ID NO: 4867 - DNA, 25 bp, Homo sapien
gcctacagggccatgagacggagta

SEQ ID NO: 4868 - DNA, 25 bp, Homo sapien
gcctacagggccttgagacggagta

SEQ ID NO: 4869 - DNA, 25 bp, Homo sapien
tctgaaggatcctagacacggacgc

SEQ ID NO: 4870 - DNA, 25 bp, Homo sapien
tctgaaggatccaagacacggacgc

SEQ ID NO: 4871 - DNA, 25 bp, Homo sapien
ttgattgaacataaacgactcggtc

SEQ ID NO: 4872 - DNA, 25 bp, Homo sapien
ttgattgaacattaacgactcggtc

SEQ ID NO: 4873 - DNA, 25 bp, Homo sapien
gttttgaaacattaacactgagtac

SEQ ID NO: 4874 - DNA, 25 bp, Homo sapien
gttttgaaacataaacactgagtac

SEQ ID NO: 4875 - DNA, 25 bp, Homo sapien
cgtttgttaaacgtgaaactttact

SEQ ID NO: 4876 - DNA, 25 bp, Homo sapien
cgtttgttaaacctgaaactttact

SEQ ID NO: 4877 - DNA, 25 bp, Homo sapien
gataatgtctaaaattgaagcctct

SEQ ID NO: 4878 - DNA, 25 bp, Homo sapien
gataatgtctaatattgaagcctct

SEQ ID NO: 4879 - DNA, 25 bp, Homo sapien
agtaatgttttattctgtaagaccc

SEQ ID NO: 4880 - DNA, 25 bp, Homo sapien
agtaatgttttaatctgtaagaccc

SEQ ID NO: 4881 - DNA, 25 bp, Homo sapien
gattggttaacactaccagacctct

SEQ ID NO: 4882 - DNA, 25 bp, Homo sapien
gattggttaacagtaccagacctct

SEQ ID NO: 4883 - DNA, 25 bp, Homo sapien
aatgatgttaaagtacccgatctcg

SEQ ID NO: 4884 - DNA, 25 bp, Homo sapien
aatgatgttaaactacccgatctcg

SEQ ID NO: 4885 - DNA, 25 bp, Homo sapien
taaaggtaaaaagtctaccatttcg

SEQ ID NO: 4886 - DNA, 25 bp, Homo sapien
taaaggtaaaaactctaccatttcg

SEQ ID NO: 4887 - DNA, 25 bp, Homo sapien
acagagtaaaagtaaatcgcttatc

SEQ ID NO: 4888 - DNA, 25 bp, Homo sapien
acagagtaaaagaaaatcgcttatc

SEQ ID NO: 4889 - DNA, 25 bp, Homo sapien
ggacagatgtaacacaaggttactt

SEQ ID NO: 4890 - DNA, 25 bp, Homo sapien
ggacagatgtaagacaaggttactt

SEQ ID NO: 4891 - DNA, 25 bp, Homo sapien
acgaagaggaataccagagacgatt

SEQ ID NO: 4892 - DNA, 25 bp, Homo sapien
acgaagaggaattccagagacgatt

SEQ ID NO: 4893 - DNA, 25 bp, Homo sapien
tttaaaagttacctaacggaaagtc

SEQ ID NO: 4894 - DNA, 25 bp, Homo sapien
tttaaaagttacgtaacggaaagtc

SEQ ID NO: 4895 - DNA, 25 bp, Homo sapien
aaaaatggatacaccgctagtgtgt

SEQ ID NO: 4896 - DNA, 25 bp, Homo sapien
aaaaatggatactccgctagtgtgt

SEQ ID NO: 4897 - DNA, 25 bp, Homo sapien
aaaacattcaaccaccgtatgcgta

SEQ ID NO: 4898 - DNA, 25 bp, Homo sapien
aaaacattcaacgaccgtatgcgta

SEQ ID NO: 4899 - DNA, 25 bp, Homo sapien
tcgtccacggtcgtgtccctatgca

SEQ ID NO: 4900 - DNA, 25 bp, Homo sapien
tcgtccacggtcctgtccctatgca

SEQ ID NO: 4901 - DNA, 25 bp, Homo sapien
gttacctgtcactttttgtaggact

SEQ ID NO: 4902 - DNA, 25 bp, Homo sapien
gttacctgtcacattttgtaggact

SEQ ID NO: 4903 - DNA, 25 bp, Homo sapien
tagacaagtctttctggatttcagt

SEQ ID NO: 4904 - DNA, 25 bp, Homo sapien
tagacaagtcttactggatttcagt

SEQ ID NO: 4905 - DNA, 25 bp, Homo sapien
ttaggacgaaagtgtttgactttcc

SEQ ID NO: 4906 - DNA, 25 bp, Homo sapien
ttaggacgaaagagtttgactttcc

SEQ ID NO: 4907 - DNA, 25 bp, Homo sapien
tacgtacagaggattatacttttcc

SEQ ID NO: 4908 - DNA, 25 bp, Homo sapien
tacgtacagaggtttatacttttcc

SEQ ID NO: 4909 - DNA, 25 bp, Homo sapien
agagtcaagtgtattcaatctcacg

SEQ ID NO: 4910 - DNA, 25 bp, Homo sapien
agagtcaagtgttttcaatctcacg

SEQ ID NO: 4911 - DNA, 25 bp, Homo sapien
gtgtgtatagccacgtcatgtgtta

SEQ ID NO: 4912 - DNA, 25 bp, Homo sapien
gtgtgtatagcctcgtcatgtgtta

SEQ ID NO: 4913 - DNA, 25 bp, Homo sapien
gcgtgctccagactcactggacgac

SEQ ID NO: 4914 - DNA, 25 bp, Homo sapien
gcgtgctccagagtcactggacgac

SEQ ID NO: 4915 - DNA, 25 bp, Homo sapien
aaggttccggtcgactcttatctac

SEQ ID NO: 4916 - DNA, 25 bp, Homo sapien
aaggttccggtccactcttatctac

SEQ ID NO: 4917 - DNA, 25 bp, Homo sapien
cgaccaacgacaccagtagtcatac

SEQ ID NO: 4918 - DNA, 25 bp, Homo sapien
cgaccaacgacagcagtagtcatac

SEQ ID NO: 4919 - DNA, 25 bp, Homo sapien
ttgttcttcctgcagaagaagctct

SEQ ID NO: 4920 - DNA, 25 bp, Homo sapien
ttgttcttcctggagaagaagctct

SEQ ID NO: 4921 - DNA, 25 bp, Homo sapien
ttaccccttctcaaccgaacaaaac

SEQ ID NO: 4922 - DNA, 25 bp, Homo sapien
ttaccccttctctaccgaacaaaac

SEQ ID NO: 4923 - DNA, 25 bp, Homo sapien
gcctcgttccgccgagacaggagcg

SEQ ID NO: 4924 - DNA, 25 bp, Homo sapien
gcctcgttccgcggagacaggagcg

SEQ ID NO: 4925 - DNA, 25 bp, Homo sapien
gtcactttatttcctgtacagagaa

SEQ ID NO: 4926 - DNA, 25 bp, Homo sapien
gtcactttatttgctgtacagagaa

SEQ ID NO: 4927 - DNA, 25 bp, Homo sapien
agagatctttttaactcacaaagag

SEQ ID NO: 4928 - DNA, 25 bp, Homo sapien
agagatcttttttactcacaaagag

SEQ ID NO: 4929 - DNA, 25 bp, Homo sapien
acccttatgtacatcgacaagaagt

SEQ ID NO: 4930 - DNA, 25 bp, Homo sapien
acccttatgtacttcgacaagaagt

SEQ ID NO: 4931 - DNA, 25 bp, Homo sapien
actccacgagggtcaatacgagtct

SEQ ID NO: 4932 - DNA, 25 bp, Homo sapien
actccacgagggacaatacgagtct

SEQ ID NO: 4933 - DNA, 25 bp, Homo sapien
ggaccatggggtatcatcgacgtgt

SEQ ID NO: 4934 - DNA, 25 bp, Homo sapien
ggaccatggggtttcatcgacgtgt

SEQ ID NO: 4935 - DNA, 25 bp, Homo sapien
agatgcgtggtgatcttaattcgtc

SEQ ID NO: 4936 - DNA, 25 bp, Homo sapien
agatgcgtggtgttcttaattcgtc

SEQ ID NO: 4937 - DNA, 25 bp, Homo sapien
agtatttcgagtctttaaatcgact

SEQ ID NO: 4938 - DNA, 25 bp, Homo sapien
agtatttcgagtgtttaaatcgact

SEQ ID NO: 4939 - DNA, 25 bp, Homo sapien
gacgttttcatgggtattaactaac

SEQ ID NO: 4940 - DNA, 25 bp, Homo sapien
gacgttttcatgcgtattaactaac

SEQ ID NO: 4941 - DNA, 25 bp, Homo sapien
gttaccgtaactgtatccgtcgaca

SEQ ID NO: 4942 - DNA, 25 bp, Homo sapien
gttaccgtaactctatccgtcgaca

SEQ ID NO: 4943 - DNA, 25 bp, Homo sapien
tgacgtactacaaacgtccgtcaac

SEQ ID NO: 4944 - DNA, 25 bp, Homo sapien
tgacgtactacatacgtccgtcaac

SEQ ID NO: 4945 - DNA, 25 bp, Homo sapien
gttgacgctaccatattctcgctcc

SEQ ID NO: 4946 - DNA, 25 bp, Homo sapien
gttgacgctaccttattctcgctcc

SEQ ID NO: 4947 - DNA, 25 bp, Homo sapien
caacgttgatatatgttttaccccg

SEQ ID NO: 4948 - DNA, 25 bp, Homo sapien
caacgttgatatttgttttaccccg

SEQ ID NO: 4949 - DNA, 25 bp, Homo sapien
tacaacttgttttctggtgtccccc

SEQ ID NO: 4950 - DNA, 25 bp, Homo sapien
tacaacttgtttactggtgtccccc

SEQ ID NO: 4951 - DNA, 25 bp, Homo sapien
gtacactatctgtagtaccagactc

SEQ ID NO: 4952 - DNA, 25 bp, Homo sapien
gtacactatctgaagtaccagactc

SEQ ID NO: 4953 - DNA, 25 bp, Homo sapien
agacctttctacagacctcgacgac

SEQ ID NO: 4954 - DNA, 25 bp, Homo sapien
agacctttctactgacctcgacgac

SEQ ID NO: 4955 - DNA, 25 bp, Homo sapien
acaacttgtcatgactagacgacac

SEQ ID NO: 4956 - DNA, 25 bp, Homo sapien
acaacttgtcatcactagacgacac

SEQ ID NO: 4957 - DNA, 25 bp, Homo sapien
gcacagacacttggtaaacaacaac

SEQ ID NO: 4958 - DNA, 25 bp, Homo sapien
gcacagacacttcgtaaacaacaac

SEQ ID NO: 4959 - DNA, 25 bp, Homo sapien
gggtgagcctatagacaaagactac

SEQ ID NO: 4960 - DNA, 25 bp, Homo sapien
gggtgagcctattgacaaagactac

SEQ ID NO: 4961 - DNA, 25 bp, Homo sapien
gaagaacctacgtaggactcggagc

SEQ ID NO: 4962 - DNA, 25 bp, Homo sapien
gaagaacctacgaaggactcggagc

SEQ ID NO: 4963 - DNA, 25 bp, Homo sapien
gtggcagcacatgaacttcccgaag

SEQ ID NO: 4964 - DNA, 25 bp, Homo sapien
gtggcagcacatcaacttcccgaag

SEQ ID NO: 4965 - DNA, 25 bp, Homo sapien
agggtctcactcctcttcaactaga

SEQ ID NO: 4966 - DNA, 25 bp, Homo sapien
agggtctcactcgtcttcaactaga

SEQ ID NO: 4967 - DNA, 25 bp, Homo sapien
gtggtacctctgtagttctccagta

SEQ ID NO: 4968 - DNA, 25 bp, Homo sapien
gtggtacctctgaagttctccagta

SEQ ID NO: 4969 - DNA, 25 bp, Homo sapien
acgggtaggttatttgtctcgccga

SEQ ID NO: 4970 - DNA, 25 bp, Homo sapien
acgggtaggttaattgtctcgccga

SEQ ID NO: 4971 - DNA, 25 bp, Homo sapien
ggtactaaaacgaacccattaggga

SEQ ID NO: 4972 - DNA, 25 bp, Homo sapien
ggtactaaaacgtacccattaggga

SEQ ID NO: 4973 - DNA, 25 bp, Homo sapien
gacgattacccttcaactatatggg

SEQ ID NO: 4974 - DNA, 25 bp, Homo sapien
gacgattaccctacaactatatggg

SEQ ID NO: 4975 - DNA, 25 bp, Homo sapien
aacgacatccagacgaactcccaga

SEQ ID NO: 4976 - DNA, 25 bp, Homo sapien
aacgacatccagtcgaactcccaga

SEQ ID NO: 4977 - DNA, 25 bp, Homo sapien
catcattgtccgagcgtacgcgacg

SEQ ID NO: 4978 - DNA, 25 bp, Homo sapien
catcattgtccgtgcgtacgcgacg

SEQ ID NO: 4979 - DNA, 25 bp, Homo sapien
ctccatctccgcacggtatagtacg

SEQ ID NO: 4980 - DNA, 25 bp, Homo sapien
ctccatctccgctcggtatagtacg

SEQ ID NO: 4981 - DNA, 25 bp, Homo sapien
cccgtacagttaacgagggtccatg

SEQ ID NO: 4982 - DNA, 25 bp, Homo sapien
cccgtacagttatcgagggtccatg

SEQ ID NO: 4983 - DNA, 25 bp, Homo sapien
ttcgtataacgtgtaatgtctcttc

SEQ ID NO: 4984 - DNA, 25 bp, Homo sapien
ttcgtataacgtctaatgtctcttc

SEQ ID NO: 4985 - DNA, 25 bp, Homo sapien
tagagagacgtctccgatatctctt

SEQ ID NO: 4986 - DNA, 25 bp, Homo sapien
tagagagacgtcaccgatatctctt

SEQ ID NO: 4987 - DNA, 25 bp, Homo sapien
tgtcgtcgaccttccggaggtctat

SEQ ID NO: 4988 - DNA, 25 bp, Homo sapien
tgtcgtcgacctaccggaggtctat

SEQ ID NO: 4989 - DNA, 25 bp, Homo sapien
attaaggttatttcaaagattcact

SEQ ID NO: 4990 - DNA, 25 bp, Homo sapien
attaaggttattacaaagattcact

SEQ ID NO: 4991 - DNA, 25 bp, Homo sapien
gttagggaaatctgtaaaaactctc

SEQ ID NO: 4992 - DNA, 25 bp, Homo sapien
gttagggaaatcagtaaaaactctc

SEQ ID NO: 4993 - DNA, 25 bp, Homo sapien
gtcgcggatggacttggaaagtcca

SEQ ID NO: 4994 - DNA, 25 bp, Homo sapien
gtcgcggatggagttggaaagtcca

SEQ ID NO: 4995 - DNA, 25 bp, Homo sapien
tcgtggaccgagaaggaacaccagg

SEQ ID NO: 4996 - DNA, 25 bp, Homo sapien
tcgtggaccgagtaggaacaccagg

SEQ ID NO: 4997 - DNA, 25 bp, Homo sapien
tgttaaccgtataggataacacatt

SEQ ID NO: 4998 - DNA, 25 bp, Homo sapien
tgttaaccgtattggataacacatt

SEQ ID NO: 4999 - DNA, 25 bp, Homo sapien
agttaccgactagaaatcatacttg

SEQ ID NO: 5000 - DNA, 25 bp, Homo sapien
agttaccgactacaaatcatacttg

SEQ ID NO: 5001 - DNA, 25 bp, Homo sapien
tgaagagaccgtgaacctctcactg

SEQ ID NO: 5002 - DNA, 25 bp, Homo sapien
tgaagagaccgtcaacctctcactg

SEQ ID NO: 5003 - DNA, 25 bp, Homo sapien
ctaatgaatacgacggactttaccg

SEQ ID NO: 5004 - DNA, 25 bp, Homo sapien
ctaatgaatacgtcggactttaccg

SEQ ID NO: 5005 - DNA, 25 bp, Homo sapien
cgttacgtcatcgtagtccttattc

SEQ ID NO: 5006 - DNA, 25 bp, Homo sapien
cgttacgtcatcctagtccttattc

SEQ ID NO: 5007 - DNA, 25 bp, Homo sapien
gaattagactatctacgaggaaatc

SEQ ID NO: 5008 - DNA, 25 bp, Homo sapien
gaattagactatgtacgaggaaatc

SEQ ID NO: 5009 - DNA, 25 bp, Homo sapien
caatcggaccttgtcggcgagagtg

SEQ ID NO: 5010 - DNA, 25 bp, Homo sapien
caatcggaccttctcggcgagagtg

SEQ ID NO: 5011 - DNA, 25 bp, Homo sapien
gtatgacgtttttcgacatagagct

SEQ ID NO: 5012 - DNA, 25 bp, Homo sapien
gtatgacgttttacgacatagagct

SEQ ID NO: 5013 - DNA, 25 bp, Homo sapien
aaaatcgacactgtgacgaaaatgt

SEQ ID NO: 5014 - DNA, 25 bp, Homo sapien
aaaatcgacactctgacgaaaatgt

SEQ ID NO: 5015 - DNA, 25 bp, Homo sapien
gatcaatgatcttctgtcaagaaat

SEQ ID NO: 5016 - DNA, 25 bp, Homo sapien
gatcaatgatctactgtcaagaaat

SEQ ID NO: 5017 - DNA, 25 bp, Homo sapien
tacggatcgggtactgtcatggaag

SEQ ID NO: 5018 - DNA, 25 bp, Homo sapien
tacggatcgggttctgtcatggaag

SEQ ID NO: 5019 - DNA, 25 bp, Homo sapien
gtatcgtcgtcttcttcgagactgt

SEQ ID NO: 5020 - DNA, 25 bp, Homo sapien
gtatcgtcgtctacttcgagactgt

SEQ ID NO: 5021 - DNA, 25 bp, Homo sapien
tgctatgtacgtaacttatcgtcca

SEQ ID NO: 5022 - DNA, 25 bp, Homo sapien
tgctatgtacgttacttatcgtcca

SEQ ID NO: 5023 - DNA, 25 bp, Homo sapien
gaaaggtgactttttaggatctcca

SEQ ID NO: 5024 - DNA, 25 bp, Homo sapien
gaaaggtgacttattaggatctcca

SEQ ID NO: 5025 - DNA, 25 bp, Homo sapien
gaatccgacttataaggttctcctc

SEQ ID NO: 5026 - DNA, 25 bp, Homo sapien
gaatccgacttaaaaggttctcctc

SEQ ID NO: 5027 - DNA, 25 bp, Homo sapien
tcagtgttacgactagtgtttaccc

SEQ ID NO: 5028 - DNA, 25 bp, Homo sapien
tcagtgttacgagtagtgtttaccc

SEQ ID NO: 5029 - DNA, 25 bp, Homo sapien
tctcatggtagatagattctacctc

SEQ ID NO: 5030 - DNA, 25 bp, Homo sapien
tctcatggtagaaagattctacctc

SEQ ID NO: 5031 - DNA, 25 bp, Homo sapien
caggtctcgtggaccgtgcctcagc

SEQ ID NO: 5032 - DNA, 25 bp, Homo sapien
caggtctcgtggtccgtgcctcagc

SEQ ID NO: 5033 - DNA, 25 bp, Homo sapien
gtgactcggctcactgacacttcgg

SEQ ID NO: 5034 - DNA, 25 bp, Homo sapien
gtgactcggctctctgacacttcgg

SEQ ID NO: 5035 - DNA, 25 bp, Homo sapien
acgactcgaccgtggtgaccctaca

SEQ ID NO: 5036 - DNA, 25 bp, Homo sapien
acgactcgaccgaggtgaccctaca

SEQ ID NO: 5037 - DNA, 25 bp, Homo sapien
gcgcgcgaacaactgagcgtaccga

SEQ ID NO: 5038 - DNA, 25 bp, Homo sapien
gcgcgcgaacaagtgagcgtaccga

SEQ ID NO: 5039 - DNA, 25 bp, Homo sapien
ctagattacaattgatacgtgtcta

SEQ ID NO: 5040 - DNA, 25 bp, Homo sapien
ctagattacaatagatacgtgtcta

SEQ ID NO: 5041 - DNA, 25 bp, Homo sapien
ccgtagtagtaagtaacatcatacc

SEQ ID NO: 5042 - DNA, 25 bp, Homo sapien
ccgtagtagtaactaacatcatacc

SEQ ID NO: 5043 - DNA, 25 bp, Homo sapien
cgactggacgtggactgctcctagc

SEQ ID NO: 5044 - DNA, 25 bp, Homo sapien
cgactggacgtgcactgctcctagc

SEQ ID NO: 5045 - DNA, 25 bp, Homo sapien
cgtagcggtcgtaaagctaggagca

SEQ ID NO: 5046 - DNA, 25 bp, Homo sapien
cgtagcggtcgttaagctaggagca

SEQ ID NO: 5047 - DNA, 25 bp, Homo sapien
tgtagtcagcgatgtcacagcataa

SEQ ID NO: 5048 - DNA, 25 bp, Homo sapien
tgtagtcagcgaagtcacagcataa

SEQ ID NO: 5049 - DNA, 25 bp, Homo sapien
ggttcagtgtacagtacaaccatga

SEQ ID NO: 5050 - DNA, 25 bp, Homo sapien
ggttcagtgtactgtacaaccatga

SEQ ID NO: 5051 - DNA, 25 bp, Homo sapien
aagtgaatctcgttaaaacgattcg

SEQ ID NO: 5052 - DNA, 25 bp, Homo sapien
aagtgaatctcgataaaacgattcg

SEQ ID NO: 5053 - DNA, 25 bp, Homo sapien
gtcactaatctgagacgtcagttcg

SEQ ID NO: 5054 - DNA, 25 bp, Homo sapien
gtcactaatctgtgacgtcagttcg

SEQ ID NO: 5055 - DNA, 25 bp, Homo sapien
gttataccgtatttgagacacctct

SEQ ID NO: 5056 - DNA, 25 bp, Homo sapien
gttataccgtatatgagacacctct

SEQ ID NO: 5057 - DNA, 25 bp, Homo sapien
gtgacataccttcgtgtacacatta

SEQ ID NO: 5058 - DNA, 25 bp, Homo sapien
gtgacataccttggtgtacacatta

SEQ ID NO: 5059 - DNA, 25 bp, Homo sapien
gactagatctttcgtacaaacttag

SEQ ID NO: 5060 - DNA, 25 bp, Homo sapien
gactagatctttggtacaaacttag

SEQ ID NO: 5061 - DNA, 25 bp, Homo sapien
agaggagtaacattaacaagaccag

SEQ ID NO: 5062 - DNA, 25 bp, Homo sapien
agaggagtaacaataacaagaccag

SEQ ID NO: 5063 - DNA, 25 bp, Homo sapien
ggacacagactaaggggacgtcagt

SEQ ID NO: 5064 - DNA, 25 bp, Homo sapien
ggacacagactatggggacgtcagt

SEQ ID NO: 5065 - DNA, 25 bp, Homo sapien
ggaccgtaacgacgaatcggaccgt

SEQ ID NO: 5066 - DNA, 25 bp, Homo sapien
ggaccgtaacgaggaatcggaccgt

SEQ ID NO: 5067 - DNA, 25 bp, Homo sapien
ccgtacacttcgttaacaccggtca

SEQ ID NO: 5068 - DNA, 25 bp, Homo sapien
ccgtacacttcgataacaccggtca

SEQ ID NO: 5069 - DNA, 25 bp, Homo sapien
gcaaggtcaccctaccgacagggtc

SEQ ID NO: 5070 - DNA, 25 bp, Homo sapien
gcaaggtcacccaaccgacagggtc

SEQ ID NO: 5071 - DNA, 25 bp, Homo sapien
acccggcaccacttcgcgaagggta

SEQ ID NO: 5072 - DNA, 25 bp, Homo sapien
acccggcaccacatcgcgaagggta

SEQ ID NO: 5073 - DNA, 25 bp, Homo sapien
accagggaatctacttctgagcggg

SEQ ID NO: 5074 - DNA, 25 bp, Homo sapien
accagggaatcttcttctgagcggg

SEQ ID NO: 5075 - DNA, 25 bp, Homo sapien
gtcgtgtcttcttctgttaaaagtg

SEQ ID NO: 5076 - DNA, 25 bp, Homo sapien
gtcgtgtcttctactgttaaaagtg

SEQ ID NO: 5077 - DNA, 25 bp, Homo sapien
tatcgacttcggttgatccaaaata

SEQ ID NO: 5078 - DNA, 25 bp, Homo sapien
tatcgacttcggatgatccaaaata

SEQ ID NO: 5079 - DNA, 25 bp, Homo sapien
tttactggtgttatgacataaactc

SEQ ID NO: 5080 - DNA, 25 bp, Homo sapien
tttactggtgttttgacataaactc

SEQ ID NO: 5081 - DNA, 25 bp, Homo sapien
agtcgtaagtggtccgtctagtaaa

SEQ ID NO: 5082 - DNA, 25 bp, Homo sapien
agtcgtaagtggaccgtctagtaaa

SEQ ID NO: 5083 - DNA, 25 bp, Homo sapien
agtgcgtctattcctgttagtagaa

SEQ ID NO: 5084 - DNA, 25 bp, Homo sapien
agtgcgtctattgctgttagtagaa

SEQ ID NO: 5085 - DNA, 25 bp, Homo sapien
tatcgtcgtcttcttcgagactgtc

SEQ ID NO: 5086 - DNA, 25 bp, Homo sapien
tatcgtcgtcttgttcgagactgtc

SEQ ID NO: 5087 - DNA, 25 bp, Homo sapien
cctgtctgtctacgtccgagatgtg

SEQ ID NO: 5088 - DNA, 25 bp, Homo sapien
cctgtctgtctaggtccgagatgtg

SEQ ID NO: 5089 - DNA, 25 bp, Homo sapien
gactgtactttaggtccgtgagaga

SEQ ID NO: 5090 - DNA, 25 bp, Homo sapien
gactgtactttacgtccgtgagaga

SEQ ID NO: 5091 - DNA, 25 bp, Homo sapien
actctgatcccatccgtcgtcgtgg

SEQ ID NO: 5092 - DNA, 25 bp, Homo sapien
actctgatcccaaccgtcgtcgtgg

SEQ ID NO: 5093 - DNA, 25 bp, Homo sapien
cgttagatcgagacaccataccggt

SEQ ID NO: 5094 - DNA, 25 bp, Homo sapien
cgttagatcgagtcaccataccggt

SEQ ID NO: 5095 - DNA, 25 bp, Homo sapien
cctacggacgattctcgtaaaggtg

SEQ ID NO: 5096 - DNA, 25 bp, Homo sapien
cctacggacgatactcgtaaaggtg

SEQ ID NO: 5097 - DNA, 25 bp, Homo sapien
tacacacagtcttactcaccaggtg

SEQ ID NO: 5098 - DNA, 25 bp, Homo sapien
tacacacagtctaactcaccaggtg

SEQ ID NO: 5099 - DNA, 25 bp, Homo sapien
ggtaaacagacactactctacattg

SEQ ID NO: 5100 - DNA, 25 bp, Homo sapien
ggtaaacagacagtactctacattg

SEQ ID NO: 5101 - DNA, 25 bp, Homo sapien
tccgaaaagactagtgtatacattc

SEQ ID NO: 5102 - DNA, 25 bp, Homo sapien
tccgaaaagacttgtgtatacattc

SEQ ID NO: 5103 - DNA, 25 bp, Homo sapien
accaaagacgactatagtccgattt

SEQ ID NO: 5104 - DNA, 25 bp, Homo sapien
accaaagacgacaatagtccgattt

SEQ ID NO: 5105 - DNA, 25 bp, Homo sapien
cagaagtgatacttcttctactccg

SEQ ID NO: 5106 - DNA, 25 bp, Homo sapien
cagaagtgatacatcttctactccg

SEQ ID NO: 5107 - DNA, 25 bp, Homo sapien
taaaactacaagttcgtctttcgcg

SEQ ID NO: 5108 - DNA, 25 bp, Homo sapien
taaaactacaagatcgtctttcgcg

SEQ ID NO: 5109 - DNA, 25 bp, Homo sapien
ggacctcagataaccgttctgttcg

SEQ ID NO: 5110 - DNA, 25 bp, Homo sapien
ggacctcagatatccgttctgttcg

SEQ ID NO: 5111 - DNA, 25 bp, Homo sapien
ggtactacacggaatccttcttctc

SEQ ID NO: 5112 - DNA, 25 bp, Homo sapien
ggtactacacggtatccttcttctc

SEQ ID NO: 5113 - DNA, 25 bp, Homo sapien
gtcctcgtcggatctctcctttctt

SEQ ID NO: 5114 - DNA, 25 bp, Homo sapien
gtcctcgtcggaactctcctttctt

SEQ ID NO: 5115 - DNA, 25 bp, Homo sapien
cctcttcgagaggtgtgtgtacccg

SEQ ID NO: 5116 - DNA, 25 bp, Homo sapien
cctcttcgagagctgtgtgtacccg

SEQ ID NO: 5117 - DNA, 25 bp, Homo sapien
tatgtcgtttaacgtgttgtcgagc

SEQ ID NO: 5118 - DNA, 25 bp, Homo sapien
tatgtcgtttaaggtgttgtcgagc

SEQ ID NO: 5119 - DNA, 25 bp, Homo sapien
cttttcttacttggtgttgtcacga

SEQ ID NO: 5120 - DNA, 25 bp, Homo sapien
cttttcttacttcgtgttgtcacga

SEQ ID NO: 5121 - DNA, 25 bp, Homo sapien
tgtttttgtgacgtgtcgacgccct

SEQ ID NO: 5122 - DNA, 25 bp, Homo sapien
tgtttttgtgacctgtcgacgccct

SEQ ID NO: 5123 - DNA, 25 bp, Homo sapien
ctttcgtttctgtggtaccaccgac

SEQ ID NO: 5124 - DNA, 25 bp, Homo sapien
ctttcgtttctgaggtaccaccgac

SEQ ID NO: 5125 - DNA, 25 bp, Homo sapien
ccgttgcgcgatgctagacgttact

SEQ ID NO: 5126 - DNA, 25 bp, Homo sapien
ccgttgcgcgatcctagacgttact

SEQ ID NO: 5127 - DNA, 25 bp, Homo sapien
gggttgagacgacctcagagtctct

SEQ ID NO: 5128 - DNA, 25 bp, Homo sapien
gggttgagacgagctcagagtctct

SEQ ID NO: 5129 - DNA, 25 bp, Homo sapien
cgacgttcatacaccgtaaccttgt

SEQ ID NO: 5130 - DNA, 25 bp, Homo sapien
cgacgttcatactccgtaaccttgt

SEQ ID NO: 5131 - DNA, 25 bp, Homo sapien
gacgtgtcgaacatcctagaacaag

SEQ ID NO: 5132 - DNA, 25 bp, Homo sapien
gacgtgtcgaacttcctagaacaag

SEQ ID NO: 5133 - DNA, 25 bp, Homo sapien
acggacgtcgaccacccggtgaaag

SEQ ID NO: 5134 - DNA, 25 bp, Homo sapien
acggacgtcgacgacccggtgaaag

SEQ ID NO: 5135 - DNA, 25 bp, Homo sapien
tcgtcgtcgggagtagcggcaacct

SEQ ID NO: 5136 - DNA, 25 bp, Homo sapien
tcgtcgtcgggactagcggcaacct

SEQ ID NO: 5137 - DNA, 25 bp, Homo sapien
ccgaggtcgcgcatgttcgacacca

SEQ ID NO: 5138 - DNA, 25 bp, Homo sapien
ccgaggtcgcgcttgttcgacacca

SEQ ID NO: 5139 - DNA, 25 bp, Homo sapien
cttgaggatgtccttcttgaaagac

SEQ ID NO: 5140 - DNA, 25 bp, Homo sapien
cttgaggatgtcgttcttgaaagac

SEQ ID NO: 5141 - DNA, 25 bp, Homo sapien
gtctctcgaggtgtgtttcgcaaga

SEQ ID NO: 5142 - DNA, 25 bp, Homo sapien
gtctctcgaggtctgtttcgcaaga

SEQ ID NO: 5143 - DNA, 25 bp, Homo sapien
cttcgagaggtgtgtgtacccgaaa

SEQ ID NO: 5144 - DNA, 25 bp, Homo sapien
cttcgagaggtgagtgtacccgaaa

SEQ ID NO: 5145 - DNA, 25 bp, Homo sapien
gataaggtcagacattcatacgtac

SEQ ID NO: 5146 - DNA, 25 bp, Homo sapien
gataaggtcagagattcatacgtac

SEQ ID NO: 5147 - DNA, 25 bp, Homo sapien
ggaggagtcaagacccacgacgtct

SEQ ID NO: 5148 - DNA, 25 bp, Homo sapien
ggaggagtcaagtcccacgacgtct

SEQ ID NO: 5149 - DNA, 25 bp, Homo sapien
aggtgttaccgaacacgacggacct

SEQ ID NO: 5150 - DNA, 25 bp, Homo sapien
aggtgttaccgatcacgacggacct

SEQ ID NO: 5151 - DNA, 25 bp, Homo sapien
caacagggtgttcatccggaactgt

SEQ ID NO: 5152 - DNA, 25 bp, Homo sapien
caacagggtgttgatccggaactgt

SEQ ID NO: 5153 - DNA, 25 bp, Homo sapien
ctaaaaggtgtttttgcagacttct

SEQ ID NO: 5154 - DNA, 25 bp, Homo sapien
ctaaaaggtgttattgcagacttct

SEQ ID NO: 5155 - DNA, 25 bp, Homo sapien
ctagtgtctgttgtgtttaccatcg

SEQ ID NO: 5156 - DNA, 25 bp, Homo sapien
ctagtgtctgttctgtttaccatcg

SEQ ID NO: 5157 - DNA, 25 bp, Homo sapien
gtgtcgacgtcgtctctttcgaaga

SEQ ID NO: 5158 - DNA, 25 bp, Homo sapien
gtgtcgacgtcgactctttcgaaga

SEQ ID NO: 5159 - DNA, 25 bp, Homo sapien
agcttggtcgggtccctgtcgagac

SEQ ID NO: 5160 - DNA, 25 bp, Homo sapien
agcttggtcgggaccctgtcgagac

SEQ ID NO: 5161 - DNA, 25 bp, Homo sapien
gaaaggtgtgacttgactgtcgcga

SEQ ID NO: 5162 - DNA, 25 bp, Homo sapien
gaaaggtgtgacatgactgtcgcga

SEQ ID NO: 5163 - DNA, 25 bp, Homo sapien
tacaagagtcggttcaggtcgacga

SEQ ID NO: 5164 - DNA, 25 bp, Homo sapien
tacaagagtcggatcaggtcgacga

SEQ ID NO: 5165 - DNA, 25 bp, Homo sapien
ctttagaacgagactaaggtaccta

SEQ ID NO: 5166 - DNA, 25 bp, Homo sapien
ctttagaacgagtctaaggtaccta

SEQ ID NO: 5167 - DNA, 25 bp, Homo sapien
ctaatgtgacggttgaagagtcttc

SEQ ID NO: 5168 - DNA, 25 bp, Homo sapien
ctaatgtgacggatgaagagtcttc

SEQ ID NO: 5169 - DNA, 25 bp, Homo sapien
taatcacgtcagttgtggtaccttg

SEQ ID NO: 5170 - DNA, 25 bp, Homo sapien
taatcacgtcagatgtggtaccttg

SEQ ID NO: 5171 - DNA, 25 bp, Homo sapien
gtgaacacttagtgtggactacatg

SEQ ID NO: 5172 - DNA, 25 bp, Homo sapien
gtgaacacttagagtggactacatg

SEQ ID NO: 5173 - DNA, 25 bp, Homo sapien
ttcaatccacacatcgtgatgtgta

SEQ ID NO: 5174 - DNA, 25 bp, Homo sapien
ttcaatccacacttcgtgatgtgta

SEQ ID NO: 5175 - DNA, 25 bp, Homo sapien
gggtttgtgtcgtgaggtacctact

SEQ ID NO: 5176 - DNA, 25 bp, Homo sapien
gggtttgtgtcgagaggtacctact

SEQ ID NO: 5177 - DNA, 25 bp, Homo sapien
gtgagtattccacgaaagagaccta

SEQ ID NO: 5178 - DNA, 25 bp, Homo sapien
gtgagtattccaggaaagagaccta

SEQ ID NO: 5179 - DNA, 25 bp, Homo sapien
ttgagagtcaacagtcgaaaaaacc

SEQ ID NO: 5180 - DNA, 25 bp, Homo sapien
ttgagagtcaactgtcgaaaaaacc

SEQ ID NO: 5181 - DNA, 25 bp, Homo sapien
gtcagtttcgacagatatatactct

SEQ ID NO: 5182 - DNA, 25 bp, Homo sapien
gtcagtttcgactgatatatactct

SEQ ID NO: 5183 - DNA, 25 bp, Homo sapien
cgtgagtgtgtcagtgaagtcactc

SEQ ID NO: 5184 - DNA, 25 bp, Homo sapien
cgtgagtgtgtctgtgaagtcactc

SEQ ID NO: 5185 - DNA, 25 bp, Homo sapien
gtagattctgtttgtgaacacactt

SEQ ID NO: 5186 - DNA, 25 bp, Homo sapien
gtagattctgttagtgaacacactt

SEQ ID NO: 5187 - DNA, 25 bp, Homo sapien
tgacatactgctcgtaaagaactat

SEQ ID NO: 5188 - DNA, 25 bp, Homo sapien
tgacatactgctggtaaagaactat

SEQ ID NO: 5189 - DNA, 25 bp, Homo sapien
tcgactctcgtctttacagaagtaa

SEQ ID NO: 5190 - DNA, 25 bp, Homo sapien
tcgactctcgtcattacagaagtaa

SEQ ID NO: 5191 - DNA, 25 bp, Homo sapien
gatatgtttaccaaaagtatcgtcc

SEQ ID NO: 5192 - DNA, 25 bp, Homo sapien
gatatgtttacctaaagtatcgtcc

SEQ ID NO: 5193 - DNA, 25 bp, Homo sapien
aagattaacaattacgttcgactgt

SEQ ID NO: 5194 - DNA, 25 bp, Homo sapien
aagattaacaataacgttcgactgt

SEQ ID NO: 5195 - DNA, 25 bp, Homo sapien
tgacgtaggaaacaggtgtcgtcgt

SEQ ID NO: 5196 - DNA, 25 bp, Homo sapien
tgacgtaggaaagaggtgtcgtcgt

SEQ ID NO: 5197 - DNA, 25 bp, Homo sapien
ggggtctaccgaccaccggcgagtc

SEQ ID NO: 5198 - DNA, 25 bp, Homo sapien
ggggtctaccgagcaccggcgagtc

SEQ ID NO: 5199 - DNA, 25 bp, Homo sapien
gttctgtccttattcgttctagtac

SEQ ID NO: 5200 - DNA, 25 bp, Homo sapien
gttctgtccttaatcgttctagtac

SEQ ID NO: 5201 - DNA, 25 bp, Homo sapien
acctccggaccgacccgtgtgtagg

SEQ ID NO: 5202 - DNA, 25 bp, Homo sapien
acctccggaccgtcccgtgtgtagg

SEQ ID NO: 5203 - DNA, 25 bp, Homo sapien
actcctggtccgtccctattgtcgt

SEQ ID NO: 5204 - DNA, 25 bp, Homo sapien
actcctggtccgaccctattgtcgt

SEQ ID NO: 5205 - DNA, 25 bp, Homo sapien
tgttggagaaccatttacgtgtact

SEQ ID NO: 5206 - DNA, 25 bp, Homo sapien
tgttggagaaccttttacgtgtact

SEQ ID NO: 5207 - DNA, 25 bp, Homo sapien
ggtctttgtaaatcctttactacgt

SEQ ID NO: 5208 - DNA, 25 bp, Homo sapien
ggtctttgtaaaacctttactacgt

SEQ ID NO: 5209 - DNA, 25 bp, Homo sapien
cggttgagtagacacactttatact

SEQ ID NO: 5210 - DNA, 25 bp, Homo sapien
cggttgagtagagacactttatact

SEQ ID NO: 5211 - DNA, 25 bp, Homo sapien
ttaacgatcccttaaggtgttaccc

SEQ ID NO: 5212 - DNA, 25 bp, Homo sapien
ttaacgatccctaaaggtgttaccc

SEQ ID NO: 5213 - DNA, 25 bp, Homo sapien
gctcgagacttttgcgtctagtcag

SEQ ID NO: 5214 - DNA, 25 bp, Homo sapien
gctcgagactttagcgtctagtcag

SEQ ID NO: 5215 - DNA, 25 bp, Homo sapien
tgtggtcggaggttctcgctgtcca

SEQ ID NO: 5216 - DNA, 25 bp, Homo sapien
tgtggtcggaggatctcgctgtcca

SEQ ID NO: 5217 - DNA, 25 bp, Homo sapien
gagcgtacacgctcaccgagtcaca

SEQ ID NO: 5218 - DNA, 25 bp, Homo sapien
gagcgtacacgcacaccgagtcaca

SEQ ID NO: 5219 - DNA, 25 bp, Homo sapien
agagatacgacatagacacgttcaa

SEQ ID NO: 5220 - DNA, 25 bp, Homo sapien
agagatacgacaaagacacgttcaa

SEQ ID NO: 5221 - DNA, 25 bp, Homo sapien
gtggggtagaacaacacgtttgact

SEQ ID NO: 5222 - DNA, 25 bp, Homo sapien
gtggggtagaactacacgtttgact

SEQ ID NO: 5223 - DNA, 25 bp, Homo sapien
tgaagtgtgttaattgaccttgacg

SEQ ID NO: 5224 - DNA, 25 bp, Homo sapien
tgaagtgtgttatttgaccttgacg

SEQ ID NO: 5225 - DNA, 25 bp, Homo sapien
tagtccgaggtgttttgactcctcc

SEQ ID NO: 5226 - DNA, 25 bp, Homo sapien
tagtccgaggtgatttgactcctcc

SEQ ID NO: 5227 - DNA, 25 bp, Homo sapien
ttggtgtggacagaagagacaccct

SEQ ID NO: 5228 - DNA, 25 bp, Homo sapien
ttggtgtggacacaagagacaccct

SEQ ID NO: 5229 - DNA, 25 bp, Homo sapien
gtcgtgaccgatatatcgtaaacct

SEQ ID NO: 5230 - DNA, 25 bp, Homo sapien
gtcgtgaccgatttatcgtaaacct

SEQ ID NO: 5231 - DNA, 25 bp, Homo sapien
gtctcggacaaagaggtagacctct

SEQ ID NO: 5232 - DNA, 25 bp, Homo sapien
gtctcggacaaacaggtagacctct

SEQ ID NO: 5233 - DNA, 25 bp, Homo sapien
accagacaaccgattagggtcatac

SEQ ID NO: 5234 - DNA, 25 bp, Homo sapien
accagacaaccgtttagggtcatac

SEQ ID NO: 5235 - DNA, 25 bp, Homo sapien
tctgagacccatgttacgacacacc

SEQ ID NO: 5236 - DNA, 25 bp, Homo sapien
tctgagacccatcttacgacacacc

SEQ ID NO: 5237 - DNA, 25 bp, Homo sapien
gtggacgtctctcttttacatccac

SEQ ID NO: 5238 - DNA, 25 bp, Homo sapien
gtggacgtctctgttttacatccac

SEQ ID NO: 5239 - DNA, 25 bp, Homo sapien
cgtactcgtgcctatgacgacacaa

SEQ ID NO: 5240 - DNA, 25 bp, Homo sapien
cgtactcgtgccaatgacgacacaa

SEQ ID NO: 5241 - DNA, 25 bp, Homo sapien
acccgtgtccgatccgtgactaaga

SEQ ID NO: 5242 - DNA, 25 bp, Homo sapien
acccgtgtccgaaccgtgactaaga

SEQ ID NO: 5243 - DNA, 25 bp, Homo sapien
tatcagtatcggtgtcagacgaaga

SEQ ID NO: 5244 - DNA, 25 bp, Homo sapien
tatcagtatcggagtcagacgaaga

SEQ ID NO: 5245 - DNA, 25 bp, Homo sapien
atgagacctgaggacactcgagaag

SEQ ID NO: 5246 - DNA, 25 bp, Homo sapien
atgagacctgagcacactcgagaag

SEQ ID NO: 5247 - DNA, 25 bp, Homo sapien
cggggaccgactctacactcgaaag

SEQ ID NO: 5248 - DNA, 25 bp, Homo sapien
cggggaccgactgtacactcgaaag

SEQ ID NO: 5249 - DNA, 25 bp, Homo sapien
cggagggtacgcttgtctcgacccg

SEQ ID NO: 5250 - DNA, 25 bp, Homo sapien
cggagggtacgcatgtctcgacccg

SEQ ID NO: 5251 - DNA, 25 bp, Homo sapien
ttgtacggtcccttgtctcgtcctg

SEQ ID NO: 5252 - DNA, 25 bp, Homo sapien
ttgtacggtcccatgtctcgtcctg

SEQ ID NO: 5253 - DNA, 25 bp, Homo sapien
cctacttttgggtgtcgtagatcta

SEQ ID NO: 5254 - DNA, 25 bp, Homo sapien
cctacttttgggagtcgtagatcta

SEQ ID NO: 5255 - DNA, 25 bp, Homo sapien
gtttactgtacttttcaccgttcag

SEQ ID NO: 5256 - DNA, 25 bp, Homo sapien
gtttactgtactattcaccgttcag

SEQ ID NO: 5257 - DNA, 25 bp, Homo sapien
ctgacttattatgtgaatacttccg

SEQ ID NO: 5258 - DNA, 25 bp, Homo sapien
ctgacttattatctgaatacttccg

SEQ ID NO: 5259 - DNA, 25 bp, Homo sapien
aagagcttagggaggaactcttccg

SEQ ID NO: 5260 - DNA, 25 bp, Homo sapien
aagagcttagggtggaactcttccg

SEQ ID NO: 5261 - DNA, 25 bp, Homo sapien
ccagagtttctgacctcactcgtct

SEQ ID NO: 5262 - DNA, 25 bp, Homo sapien
ccagagtttctgtcctcactcgtct

SEQ ID NO: 5263 - DNA, 25 bp, Homo sapien
agtcctttccttggtctctgacctt

SEQ ID NO: 5264 - DNA, 25 bp, Homo sapien
agtcctttccttcgtctctgacctt

SEQ ID NO: 5265 - DNA, 25 bp, Homo sapien
tttgtttccacatcttgtgtcgaac

SEQ ID NO: 5266 - DNA, 25 bp, Homo sapien
tttgtttccacaacttgtgtcgaac

SEQ ID NO: 5267 - DNA, 25 bp, Homo sapien
gtctgtgtaaatacttgctatacct

SEQ ID NO: 5268 - DNA, 25 bp, Homo sapien
gtctgtgtaaattcttgctatacct

SEQ ID NO: 5269 - DNA, 25 bp, Homo sapien
tagttgtggtaataactggtcactc

SEQ ID NO: 5270 - DNA, 25 bp, Homo sapien
tagttgtggtaaaaactggtcactc

SEQ ID NO: 5271 - DNA, 25 bp, Homo sapien
aagttacccagtcatagaacccgtc

SEQ ID NO: 5272 - DNA, 25 bp, Homo sapien
aagttacccagtgatagaacccgtc

SEQ ID NO: 5273 - DNA, 25 bp, Homo sapien
tgttacctctgtgacagtaactgga

SEQ ID NO: 5274 - DNA, 25 bp, Homo sapien
tgttacctctgtcacagtaactgga

SEQ ID NO: 5275 - DNA, 25 bp, Homo sapien
aatcgactgttaacgcgactagagg

SEQ ID NO: 5276 - DNA, 25 bp, Homo sapien
aatcgactgttatcgcgactagagg

SEQ ID NO: 5277 - DNA, 25 bp, Homo sapien
tgtgacgtttactgagtcactatgt

SEQ ID NO: 5278 - DNA, 25 bp, Homo sapien
tgtgacgtttacagagtcactatgt

SEQ ID NO: 5279 - DNA, 25 bp, Homo sapien
actggtacttgtaaggtaactctct

SEQ ID NO: 5280 - DNA, 25 bp, Homo sapien
actggtacttgttaggtaactctct

SEQ ID NO: 5281 - DNA, 25 bp, Homo sapien
cttattttcgtatcctgacgaggag

SEQ ID NO: 5282 - DNA, 25 bp, Homo sapien
cttattttcgtaacctgacgaggag

SEQ ID NO: 5283 - DNA, 25 bp, Homo sapien
ctctttgtatctctaattcgatgag

SEQ ID NO: 5284 - DNA, 25 bp, Homo sapien
ctctttgtatctgtaattcgatgag

SEQ ID NO: 5285 - DNA, 25 bp, Homo sapien
ggttttgtgctggaacccattacgt

SEQ ID NO: 5286 - DNA, 25 bp, Homo sapien
ggttttgtgctgcaacccattacgt

SEQ ID NO: 5287 - DNA, 25 bp, Homo sapien
gtgtttgtgtcacactaccccgatg

SEQ ID NO: 5288 - DNA, 25 bp, Homo sapien
gtgtttgtgtcagactaccccgatg

SEQ ID NO: 5289 - DNA, 25 bp, Homo sapien
tttacttgaagattcttactcggag

SEQ ID NO: 5290 - DNA, 25 bp, Homo sapien
tttacttgaagaatcttactcggag

SEQ ID NO: 5291 - DNA, 25 bp, Homo sapien
ccgagcgacttacgtcaacttctac

SEQ ID NO: 5292 - DNA, 25 bp, Homo sapien
ccgagcgacttaggtcaacttctac

SEQ ID NO: 5293 - DNA, 25 bp, Homo sapien
agtcggatactgtcatactgtcact

SEQ ID NO: 5294 - DNA, 25 bp, Homo sapien
agtcggatactgacatactgtcact

SEQ ID NO: 5295 - DNA, 25 bp, Homo sapien
ccaagacgggagtgaccttctcagt

SEQ ID NO: 5296 - DNA, 25 bp, Homo sapien
ccaagacgggagagaccttctcagt

SEQ ID NO: 5297 - DNA, 25 bp, Homo sapien
caaactggtgtcgtaattcttgttc

SEQ ID NO: 5298 - DNA, 25 bp, Homo sapien
caaactggtgtcctaattcttgttc

SEQ ID NO: 5299 - DNA, 25 bp, Homo sapien
caggtgtcaatttacgtgtgtagtc

SEQ ID NO: 5300 - DNA, 25 bp, Homo sapien
caggtgtcaattaacgtgtgtagtc

SEQ ID NO: 5301 - DNA, 25 bp, Homo sapien
gccgtggtcctcttaccgtttcgtc

SEQ ID NO: 5302 - DNA, 25 bp, Homo sapien
gccgtggtcctcataccgtttcgtc

SEQ ID NO: 5303 - DNA, 25 bp, Homo sapien
aatacatgaataggtaccgatatca

SEQ ID NO: 5304 - DNA, 25 bp, Homo sapien
aatacatgaatacgtaccgatatca

SEQ ID NO: 5305 - DNA, 25 bp, Homo sapien
agtgacacgtctcgtctccgtttcc

SEQ ID NO: 5306 - DNA, 25 bp, Homo sapien
agtgacacgtctggtctccgtttcc

SEQ ID NO: 5307 - DNA, 25 bp, Homo sapien
gaagtccgtctggtccaggacgtcc

SEQ ID NO: 5308 - DNA, 25 bp, Homo sapien
gaagtccgtctgctccaggacgtcc

SEQ ID NO: 5309 - DNA, 25 bp, Homo sapien
agttaccggctgtccgagaggtcga

SEQ ID NO: 5310 - DNA, 25 bp, Homo sapien
agttaccggctgaccgagaggtcga

SEQ ID NO: 5311 - DNA, 25 bp, Homo sapien
acattgacgaagacgtagggtctct

SEQ ID NO: 5312 - DNA, 25 bp, Homo sapien
acattgacgaagtcgtagggtctct

SEQ ID NO: 5313 - DNA, 25 bp, Homo sapien
ctatgggtaagttcttgactgtact

SEQ ID NO: 5314 - DNA, 25 bp, Homo sapien
ctatgggtaagtacttgactgtact

SEQ ID NO: 5315 - DNA, 25 bp, Homo sapien
ggtgaggttcaaggacaacgtcagc

SEQ ID NO: 5316 - DNA, 25 bp, Homo sapien
ggtgaggttcaacgacaacgtcagc

SEQ ID NO: 5317 - DNA, 25 bp, Homo sapien
tggtttcgggagtaacgtaccgtgt

SEQ ID NO: 5318 - DNA, 25 bp, Homo sapien
tggtttcgggagaaacgtaccgtgt

SEQ ID NO: 5319 - DNA, 25 bp, Homo sapien
ataaatggggtaagtcgacgttctc

SEQ ID NO: 5320 - DNA, 25 bp, Homo sapien
ataaatggggtatgtcgacgttctc

SEQ ID NO: 5321 - DNA, 25 bp, Homo sapien
cggaacaaagagagggtctattcga

SEQ ID NO: 5322 - DNA, 25 bp, Homo sapien
cggaacaaagagtgggtctattcga

SEQ ID NO: 5323 - DNA, 25 bp, Homo sapien
gtcataaaagatttggactataccc

SEQ ID NO: 5324 - DNA, 25 bp, Homo sapien
gtcataaaagatatggactataccc

SEQ ID NO: 5325 - DNA, 25 bp, Homo sapien
ttaacaggtcttggtctctaccgta

SEQ ID NO: 5326 - DNA, 25 bp, Homo sapien
ttaacaggtcttcgtctctaccgta

SEQ ID NO: 5327 - DNA, 25 bp, Homo sapien
gatagtaaaggatcaacatacacca

SEQ ID NO: 5328 - DNA, 25 bp, Homo sapien
gatagtaaaggaacaacatacacca

SEQ ID NO: 5329 - DNA, 25 bp, Homo sapien
agttacgaaggaggtgaccgaacca

SEQ ID NO: 5330 - DNA, 25 bp, Homo sapien
agttacgaaggacgtgaccgaacca

SEQ ID NO: 5331 - DNA, 25 bp, Homo sapien
cataaaatgttgagcgtaacgaaca

SEQ ID NO: 5332 - DNA, 25 bp, Homo sapien
cataaaatgttgtgcgtaacgaaca

SEQ ID NO: 5333 - DNA, 25 bp, Homo sapien
caagtgaaggtgtcgacgaggaaac

SEQ ID NO: 5334 - DNA, 25 bp, Homo sapien
caagtgaaggtgacgacgaggaaac

SEQ ID NO: 5335 - DNA, 25 bp, Homo sapien
ggggttgaattttgtcgaggacctc

SEQ ID NO: 5336 - DNA, 25 bp, Homo sapien
ggggttgaatttagtcgaggacctc

SEQ ID NO: 5337 - DNA, 25 bp, Homo sapien
ttagttcagtttactgggtgtctac

SEQ ID NO: 5338 - DNA, 25 bp, Homo sapien
ttagttcagttttctgggtgtctac

SEQ ID NO: 5339 - DNA, 25 bp, Homo sapien
gagatgacattgtaccggtgtagac

SEQ ID NO: 5340 - DNA, 25 bp, Homo sapien
gagatgacattgaaccggtgtagac

SEQ ID NO: 5341 - DNA, 25 bp, Homo sapien
gaaaccctaactcaacgacgtttga

SEQ ID NO: 5342 - DNA, 25 bp, Homo sapien
gaaaccctaactgaacgacgtttga

SEQ ID NO: 5343 - DNA, 25 bp, Homo sapien
tcaccacaacgttccggtgtcgagg

SEQ ID NO: 5344 - DNA, 25 bp, Homo sapien
tcaccacaacgtaccggtgtcgagg

SEQ ID NO: 5345 - DNA, 25 bp, Homo sapien
tacgtcgacaacagccggaggacga

SEQ ID NO: 5346 - DNA, 25 bp, Homo sapien
tacgtcgacaactgccggaggacga

SEQ ID NO: 5347 - DNA, 25 bp, Homo sapien
cccgacatgacgtcgcgcgggtaca

SEQ ID NO: 5348 - DNA, 25 bp, Homo sapien
cccgacatgacgacgcgcgggtaca

SEQ ID NO: 5349 - DNA, 25 bp, Homo sapien
tccgacccgagttaccggggtccgt

SEQ ID NO: 5350 - DNA, 25 bp, Homo sapien
tccgacccgagtaaccggggtccgt

SEQ ID NO: 5351 - DNA, 25 bp, Homo sapien
gtaagacacctaaacaagtagatca

SEQ ID NO: 5352 - DNA, 25 bp, Homo sapien
gtaagacacctatacaagtagatca

SEQ ID NO: 5353 - DNA, 25 bp, Homo sapien
gaaaggaaccaggaacctcgacccg

SEQ ID NO: 5354 - DNA, 25 bp, Homo sapien
gaaaggaaccagcaacctcgacccg

SEQ ID NO: 5355 - DNA, 25 bp, Homo sapien
aaattcgagacagaacttcacgact

SEQ ID NO: 5356 - DNA, 25 bp, Homo sapien
aaattcgagacacaacttcacgact

SEQ ID NO: 5357 - DNA, 25 bp, Homo sapien
aagaagtccagcatcaacacccgtt

SEQ ID NO: 5358 - DNA, 25 bp, Homo sapien
aagaagtccagcttcaacacccgtt

SEQ ID NO: 5359 - DNA, 25 bp, Homo sapien
agatgaccgagacacagaaacctct

SEQ ID NO: 5360 - DNA, 25 bp, Homo sapien
agatgaccgagagacagaaacctct

SEQ ID NO: 5361 - DNA, 25 bp, Homo sapien
tgactcaagatggaggaactcacct

SEQ ID NO: 5362 - DNA, 25 bp, Homo sapien
tgactcaagatgcaggaactcacct

SEQ ID NO: 5363 - DNA, 25 bp, Homo sapien
ggtgagtagattttaattggtcccg

SEQ ID NO: 5364 - DNA, 25 bp, Homo sapien
ggtgagtagattataattggtcccg

SEQ ID NO: 5365 - DNA, 25 bp, Homo sapien
gttggtctgttctccgacgtccgtg

SEQ ID NO: 5366 - DNA, 25 bp, Homo sapien
gttggtctgttcaccgacgtccgtg

SEQ ID NO: 5367 - DNA, 25 bp, Homo sapien
cttacgattctcgtccctagtcctg

SEQ ID NO: 5368 - DNA, 25 bp, Homo sapien
cttacgattctcctccctagtcctg

SEQ ID NO: 5369 - DNA, 25 bp, Homo sapien
ccaaaggtcccgaacgagtacccgt

SEQ ID NO: 5370 - DNA, 25 bp, Homo sapien
ccaaaggtcccgtacgagtacccgt

SEQ ID NO: 5371 - DNA, 25 bp, Homo sapien
ggtataaagttcgtctactctccac

SEQ ID NO: 5372 - DNA, 25 bp, Homo sapien
ggtataaagttcctctactctccac

SEQ ID NO: 5373 - DNA, 25 bp, Homo sapien
aggttccgtgctgtccgtccgtcca

SEQ ID NO: 5374 - DNA, 25 bp, Homo sapien
aggttccgtgctctccgtccgtcca

SEQ ID NO: 5375 - DNA, 25 bp, Homo sapien
gctcacttacgcaaaccgtaccatg

SEQ ID NO: 5376 - DNA, 25 bp, Homo sapien
gctcacttacgctaaccgtaccatg

SEQ ID NO: 5377 - DNA, 25 bp, Homo sapien
agtcccttcgagacatctccctagt

SEQ ID NO: 5378 - DNA, 25 bp, Homo sapien
agtcccttcgagtcatctccctagt

SEQ ID NO: 5379 - DNA, 25 bp, Homo sapien
tgtcagggacgcttagtccccgacg

SEQ ID NO: 5380 - DNA, 25 bp, Homo sapien
tgtcagggacgcatagtccccgacg

SEQ ID NO: 5381 - DNA, 25 bp, Homo sapien
agtgagggttgaaacacgaccctct

SEQ ID NO: 5382 - DNA, 25 bp, Homo sapien
agtgagggttgatacacgaccctct

SEQ ID NO: 5383 - DNA, 25 bp, Homo sapien
agtcgaagacctcaacaaccgggta

SEQ ID NO: 5384 - DNA, 25 bp, Homo sapien
agtcgaagacctgaacaaccgggta

SEQ ID NO: 5385 - DNA, 25 bp, Homo sapien
gaggaggactctgaaacacttggtg

SEQ ID NO: 5386 - DNA, 25 bp, Homo sapien
gaggaggactctcaaacacttggtg

SEQ ID NO: 5387 - DNA, 25 bp, Homo sapien
tgtcggacctacaacccgtcttgtg

SEQ ID NO: 5388 - DNA, 25 bp, Homo sapien
tgtcggacctactacccgtcttgtg

SEQ ID NO: 5389 - DNA, 25 bp, Homo sapien
gtaccgtccttcgaagtctattaac

SEQ ID NO: 5390 - DNA, 25 bp, Homo sapien
gtaccgtccttccaagtctattaac

SEQ ID NO: 5391 - DNA, 25 bp, Homo sapien
gtaccgacactgacagaacgcaaac

SEQ ID NO: 5392 - DNA, 25 bp, Homo sapien
gtaccgacactgtcagaacgcaaac

SEQ ID NO: 5393 - DNA, 25 bp, Homo sapien
agactagaaacctctgaacttcaag

SEQ ID NO: 5394 - DNA, 25 bp, Homo sapien
agactagaaaccactgaacttcaag

SEQ ID NO: 5395 - DNA, 25 bp, Homo sapien
aacaaggacccatctcagtgttgac

SEQ ID NO: 5396 - DNA, 25 bp, Homo sapien
aacaaggacccaactcagtgttgac

SEQ ID NO: 5397 - DNA, 25 bp, Homo sapien
aaaaagacccaggacaccgtcctac

SEQ ID NO: 5398 - DNA, 25 bp, Homo sapien
aaaaagacccagcacaccgtcctac

SEQ ID NO: 5399 - DNA, 25 bp, Homo sapien
aaggccgtgcgcatctcgtcttacg

SEQ ID NO: 5400 - DNA, 25 bp, Homo sapien
aaggccgtgcgcttctcgtcttacg

SEQ ID NO: 5401 - DNA, 25 bp, Homo sapien
ctgggtaattttcaccgtcgtactg

SEQ ID NO: 5402 - DNA, 25 bp, Homo sapien
ctgggtaattttgaccgtcgtactg

SEQ ID NO: 5403 - DNA, 25 bp, Homo sapien
ccgagaagaagttgttcgaggaccc

SEQ ID NO: 5404 - DNA, 25 bp, Homo sapien
ccgagaagaagtagttcgaggaccc

SEQ ID NO: 5405 - DNA, 25 bp, Homo sapien
gaacacgaagtcgtccgacaaccac

SEQ ID NO: 5406 - DNA, 25 bp, Homo sapien
gaacacgaagtcctccgacaaccac

SEQ ID NO: 5407 - DNA, 25 bp, Homo sapien
taaccaacagatgtatgacccgtcc

SEQ ID NO: 5408 - DNA, 25 bp, Homo sapien
taaccaacagatctatgacccgtcc

SEQ ID NO: 5409 - DNA, 25 bp, Homo sapien
ttactcaaagggtttctgagctcag

SEQ ID NO: 5410 - DNA, 25 bp, Homo sapien
ttactcaaagggattctgagctcag

SEQ ID NO: 5411 - DNA, 25 bp, Homo sapien
accaaagagagacacttgacggagt

SEQ ID NO: 5412 - DNA, 25 bp, Homo sapien
accaaagagagagacttgacggagt

SEQ ID NO: 5413 - DNA, 25 bp, Homo sapien
tccgactcgaaggacacccggggag

SEQ ID NO: 5414 - DNA, 25 bp, Homo sapien
tccgactcgaagcacacccggggag

SEQ ID NO: 5415 - DNA, 25 bp, Homo sapien
atctactgtcccaactaccggggta

SEQ ID NO: 5416 - DNA, 25 bp, Homo sapien
atctactgtccctactaccggggta

SEQ ID NO: 5417 - DNA, 25 bp, Homo sapien
aaccctggtcccttcctggtgtgtg

SEQ ID NO: 5418 - DNA, 25 bp, Homo sapien
aaccctggtcccatcctggtgtgtg

SEQ ID NO: 5419 - DNA, 25 bp, Homo sapien
cctagttaggtcagtttcaccttcg

SEQ ID NO: 5420 - DNA, 25 bp, Homo sapien
cctagttaggtctgtttcaccttcg

SEQ ID NO: 5421 - DNA, 25 bp, Homo sapien
aagttttctacttagtgacgacatc

SEQ ID NO: 5422 - DNA, 25 bp, Homo sapien
aagttttctactaagtgacgacatc

SEQ ID NO: 5423 - DNA, 25 bp, Homo sapien
catatacattcctagatacgacagg

SEQ ID NO: 5424 - DNA, 25 bp, Homo sapien
catatacattccaagatacgacagg

SEQ ID NO: 5425 - DNA, 25 bp, Homo sapien
cagtaatataagactcatcaaaagg

SEQ ID NO: 5426 - DNA, 25 bp, Homo sapien
cagtaatataagtctcatcaaaagg

SEQ ID NO: 5427 - DNA, 25 bp, Homo sapien
gtacatactactacttctgtcaagg

SEQ ID NO: 5428 - DNA, 25 bp, Homo sapien
gtacatactacttcttctgtcaagg

SEQ ID NO: 5429 - DNA, 25 bp, Homo sapien
ctcggtctcgggagtttactgaaat

SEQ ID NO: 5430 - DNA, 25 bp, Homo sapien
ctcggtctcgggtgtttactgaaat

SEQ ID NO: 5431 - DNA, 25 bp, Homo sapien
tgtacgaccgggaggacccccgagt

SEQ ID NO: 5432 - DNA, 25 bp, Homo sapien
tgtacgaccgggtggacccccgagt

SEQ ID NO: 5433 - DNA, 25 bp, Homo sapien
tggacctggtgtgtctcgtcctgag

SEQ ID NO: 5434 - DNA, 25 bp, Homo sapien
tggacctggtgtctctcgtcctgag

SEQ ID NO: 5435 - DNA, 25 bp, Homo sapien
cctggaacggatctcttcgtccttg

SEQ ID NO: 5436 - DNA, 25 bp, Homo sapien
cctggaacggatgtcttcgtccttg

SEQ ID NO: 5437 - DNA, 25 bp, Homo sapien
acacgtccggagttcgttctcgggg

SEQ ID NO: 5438 - DNA, 25 bp, Homo sapien
acacgtccggagatcgttctcgggg

SEQ ID NO: 5439 - DNA, 25 bp, Homo sapien
agggtggaccgttcttcgtctctgt

SEQ ID NO: 5440 - DNA, 25 bp, Homo sapien
agggtggaccgtacttcgtctctgt

SEQ ID NO: 5441 - DNA, 25 bp, Homo sapien
cgactgcaggagttacctctcgacg

SEQ ID NO: 5442 - DNA, 25 bp, Homo sapien
cgactgcaggagatacctctcgacg

SEQ ID NO: 5443 - DNA, 25 bp, Homo sapien
cgcacctgtcacacaagtttcgacg

SEQ ID NO: 5444 - DNA, 25 bp, Homo sapien
cgcacctgtcactcaagtttcgacg

SEQ ID NO: 5445 - DNA, 25 bp, Homo sapien
cacaaggtgcactgcgtcttcgcgt

SEQ ID NO: 5446 - DNA, 25 bp, Homo sapien
cacaaggtgcacagcgtcttcgcgt

SEQ ID NO: 5447 - DNA, 25 bp, Homo sapien
ccctcatcgtaggagtcctcatcac

SEQ ID NO: 5448 - DNA, 25 bp, Homo sapien
ccctcatcgtagcagtcctcatcac

SEQ ID NO: 5449 - DNA, 25 bp, Homo sapien
acacctcgatacctttccggagtca

SEQ ID NO: 5450 - DNA, 25 bp, Homo sapien
acacctcgatacgtttccggagtca

SEQ ID NO: 5451 - DNA, 25 bp, Homo sapien
aaggactttcatgagtcccatcgtt

SEQ ID NO: 5452 - DNA, 25 bp, Homo sapien
aaggactttcatcagtcccatcgtt

SEQ ID NO: 5453 - DNA, 25 bp, Homo sapien
tgtaggggctcctaggtgtccccga

SEQ ID NO: 5454 - DNA, 25 bp, Homo sapien
tgtaggggctccaaggtgtccccga

SEQ ID NO: 5455 - DNA, 25 bp, Homo sapien
ttgggctgagggaagtttccttact

SEQ ID NO: 5456 - DNA, 25 bp, Homo sapien
ttgggctgagggtagtttccttact

SEQ ID NO: 5457 - DNA, 25 bp, Homo sapien
cacaggcctccgacgagtgccggag

SEQ ID NO: 5458 - DNA, 25 bp, Homo sapien
cacaggcctccgtcgagtgccggag

SEQ ID NO: 5459 - DNA, 25 bp, Homo sapien
cccggtccggggtgactcccgaagt

SEQ ID NO: 5460 - DNA, 25 bp, Homo sapien
cccggtccggggagactcccgaagt

SEQ ID NO: 5461 - DNA, 25 bp, Homo sapien
taggtgactgagtcatattcctaag

SEQ ID NO: 5462 - DNA, 25 bp, Homo sapien
taggtgactgagacatattcctaag

SEQ ID NO: 5463 - DNA, 25 bp, Homo sapien
gtcggtcgacacaactgtgcatatg

SEQ ID NO: 5464 - DNA, 25 bp, Homo sapien
gtcggtcgacactactgtgcatatg

SEQ ID NO: 5465 - DNA, 25 bp, Homo sapien
ttacttccgaggacgtgtcggtatg

SEQ ID NO: 5466 - DNA, 25 bp, Homo sapien
ttacttccgaggtcgtgtcggtatg

SEQ ID NO: 5467 - DNA, 25 bp, Homo sapien
gaaagtaattcatactctccgggtg

SEQ ID NO: 5468 - DNA, 25 bp, Homo sapien
gaaagtaattcaaactctccgggtg

SEQ ID NO: 5469 - DNA, 25 bp, Homo sapien
gcgacttgtcctaccgtccggtgta

SEQ ID NO: 5470 - DNA, 25 bp, Homo sapien
gcgacttgtccttccgtccggtgta

SEQ ID NO: 5471 - DNA, 25 bp, Homo sapien
tttagactctctacgtcacgggtcg

SEQ ID NO: 5472 - DNA, 25 bp, Homo sapien
tttagactctcttcgtcacgggtcg

SEQ ID NO: 5473 - DNA, 25 bp, Homo sapien
tctcttgatacctcggtcgtgtgtg

SEQ ID NO: 5474 - DNA, 25 bp, Homo sapien
tctcttgataccacggtcgtgtgtg

SEQ ID NO: 5475 - DNA, 25 bp, Homo sapien
tatgtttacttcgagacgagtggtc

SEQ ID NO: 5476 - DNA, 25 bp, Homo sapien
tatgtttacttccagacgagtggtc

SEQ ID NO: 5477 - DNA, 25 bp, Homo sapien
cgtaaagttccgttactgtgtggta

SEQ ID NO: 5478 - DNA, 25 bp, Homo sapien
cgtaaagttccgatactgtgtggta

SEQ ID NO: 5479 - DNA, 25 bp, Homo sapien
tttgagacattcattatgtcatccg

SEQ ID NO: 5480 - DNA, 25 bp, Homo sapien
tttgagacattctttatgtcatccg

SEQ ID NO: 5481 - DNA, 25 bp, Homo sapien
tcgtgattccgtcatgtatcatcga

SEQ ID NO: 5482 - DNA, 25 bp, Homo sapien
tcgtgattccgtgatgtatcatcga

SEQ ID NO: 5483 - DNA, 25 bp, Homo sapien
tcgtcgtagctaaaccggtaaatga

SEQ ID NO: 5484 - DNA, 25 bp, Homo sapien
tcgtcgtagctataccggtaaatga

SEQ ID NO: 5485 - DNA, 25 bp, Homo sapien
ccttcgggggtctgtgtaaatactt

SEQ ID NO: 5486 - DNA, 25 bp, Homo sapien
ccttcgggggtcagtgtaaatactt

SEQ ID NO: 5487 - DNA, 25 bp, Homo sapien
tttccgggacgtagtctttaagtgt

SEQ ID NO: 5488 - DNA, 25 bp, Homo sapien
tttccgggacgttgtctttaagtgt

SEQ ID NO: 5489 - DNA, 25 bp, Homo sapien
ctgtctgtccggtctatcgatctgt

SEQ ID NO: 5490 - DNA, 25 bp, Homo sapien
ctgtctgtccggactatcgatctgt

SEQ ID NO: 5491 - DNA, 25 bp, Homo sapien
gaccttctctggatccgggacgtgg

SEQ ID NO: 5492 - DNA, 25 bp, Homo sapien
gaccttctctggttccgggacgtgg

SEQ ID NO: 5493 - DNA, 25 bp, Homo sapien
attcggtggtcacgtcgagactgtc

SEQ ID NO: 5494 - DNA, 25 bp, Homo sapien
attcggtggtcaggtcgagactgtc

SEQ ID NO: 5495 - DNA, 25 bp, Homo sapien
tcgagtttgtggaagaggacctgtc

SEQ ID NO: 5496 - DNA, 25 bp, Homo sapien
tcgagtttgtggtagaggacctgtc

SEQ ID NO: 5497 - DNA, 25 bp, Homo sapien
tacgttgtaccagtctgtcacgggt

SEQ ID NO: 5498 - DNA, 25 bp, Homo sapien
tacgttgtaccactctgtcacgggt

SEQ ID NO: 5499 - DNA, 25 bp, Homo sapien
tgtcgtgtgtccaaccacagaagtt

SEQ ID NO: 5500 - DNA, 25 bp, Homo sapien
tgtcgtgtgtcctaccacagaagtt

SEQ ID NO: 5501 - DNA, 25 bp, Homo sapien
gagtgtcggtcctacctcaggagta

SEQ ID NO: 5502 - DNA, 25 bp, Homo sapien
gagtgtcggtccaacctcaggagta

SEQ ID NO: 5503 - DNA, 25 bp, Homo sapien
gactaacggtccacttgtagtggta

SEQ ID NO: 5504 - DNA, 25 bp, Homo sapien
gactaacggtcctcttgtagtggta

SEQ ID NO: 5505 - DNA, 25 bp, Homo sapien
cgggacggttcctaatacgagactc

SEQ ID NO: 5506 - DNA, 25 bp, Homo sapien
cgggacggttccaaatacgagactc

SEQ ID NO: 5507 - DNA, 25 bp, Homo sapien
tctggggaacagaaatactagtcct

SEQ ID NO: 5508 - DNA, 25 bp, Homo sapien
tctggggaacagtaatactagtcct

SEQ ID NO: 5509 - DNA, 25 bp, Homo sapien
cttgcggaaacatttacactcgacc

SEQ ID NO: 5510 - DNA, 25 bp, Homo sapien
cttgcggaaacaattacactcgacc

SEQ ID NO: 5511 - DNA, 25 bp, Homo sapien
ccgggggaaaccaggaacgtgaact

SEQ ID NO: 5512 - DNA, 25 bp, Homo sapien
ccgggggaaacctggaacgtgaact

SEQ ID NO: 5513 - DNA, 25 bp, Homo sapien
caacggtcgtaaatattgaaccctc

SEQ ID NO: 5514 - DNA, 25 bp, Homo sapien
caacggtcgtaattattgaaccctc

SEQ ID NO: 5515 - DNA, 25 bp, Homo sapien
gaacgtagtacaatgttttaacccc

SEQ ID NO: 5516 - DNA, 25 bp, Homo sapien
gaacgtagtacattgttttaacccc

SEQ ID NO: 5517 - DNA, 25 bp, Homo sapien
gattgttcagtagtatccagacctc

SEQ ID NO: 5518 - DNA, 25 bp, Homo sapien
gattgttcagtactatccagacctc

SEQ ID NO: 5519 - DNA, 25 bp, Homo sapien
tgatgttaagacatcccgttcgtgt

SEQ ID NO: 5520 - DNA, 25 bp, Homo sapien
tgatgttaagacttcccgttcgtgt

SEQ ID NO: 5521 - DNA, 25 bp, Homo sapien
ttacaagtaaaaaacttccttttag

SEQ ID NO: 5522 - DNA, 25 bp, Homo sapien
ttacaagtaaaatacttccttttag

SEQ ID NO: 5523 - DNA, 25 bp, Homo sapien
aagacgtaagaagataagtcccttt

SEQ ID NO: 5524 - DNA, 25 bp, Homo sapien
aagacgtaagaacataagtcccttt

SEQ ID NO: 5525 - DNA, 25 bp, Homo sapien
ggagtaattaactaccagtgtcttt

SEQ ID NO: 5526 - DNA, 25 bp, Homo sapien
ggagtaattaacaaccagtgtcttt

SEQ ID NO: 5527 - DNA, 25 bp, Homo sapien
gaagaaaggaaaaccagaaccgtct

SEQ ID NO: 5528 - DNA, 25 bp, Homo sapien
gaagaaaggaaatccagaaccgtct

SEQ ID NO: 5529 - DNA, 25 bp, Homo sapien
ttatataaggtcatcactgaatgtc

SEQ ID NO: 5530 - DNA, 25 bp, Homo sapien
ttatataaggtcttcactgaatgtc

SEQ ID NO: 5531 - DNA, 25 bp, Homo sapien
atagaggttacgaccacgtactgtt

SEQ ID NO: 5532 - DNA, 25 bp, Homo sapien
atagaggttacgtccacgtactgtt

SEQ ID NO: 5533 - DNA, 25 bp, Homo sapien
aacagatccactcactgtagtggta

SEQ ID NO: 5534 - DNA, 25 bp, Homo sapien
aacagatccactgactgtagtggta

SEQ ID NO: 5535 - DNA, 25 bp, Homo sapien
tcgccgagagtcactccctacttta

SEQ ID NO: 5536 - DNA, 25 bp, Homo sapien
tcgccgagagtctctccctacttta

SEQ ID NO: 5537 - DNA, 25 bp, Homo sapien
cgatatcttcacttgtgtttatgta

SEQ ID NO: 5538 - DNA, 25 bp, Homo sapien
cgatatcttcacatgtgtttatgta

SEQ ID NO: 5539 - DNA, 25 bp, Homo sapien
tgataacctatattggactttatat

SEQ ID NO: 5540 - DNA, 25 bp, Homo sapien
tgataacctataatggactttatat

SEQ ID NO: 5541 - DNA, 25 bp, Homo sapien
gggataattaacttcgactttactt

SEQ ID NO: 5542 - DNA, 25 bp, Homo sapien
gggataattaacatcgactttactt

SEQ ID NO: 5543 - DNA, 25 bp, Homo sapien
ttcgtaaaggtaacatacatgttca

SEQ ID NO: 5544 - DNA, 25 bp, Homo sapien
ttcgtaaaggtatcatacatgttca

SEQ ID NO: 5545 - DNA, 25 bp, Homo sapien
atgtcgaacgtttttaccttctcag

SEQ ID NO: 5546 - DNA, 25 bp, Homo sapien
atgtcgaacgttattaccttctcag

SEQ ID NO: 5547 - DNA, 25 bp, Homo sapien
ctggaacgtaccatctcatccttag

SEQ ID NO: 5548 - DNA, 25 bp, Homo sapien
ctggaacgtaccttctcatccttag

SEQ ID NO: 5549 - DNA, 25 bp, Homo sapien
gtaggaccccgtctctctcgggtac

SEQ ID NO: 5550 - DNA, 25 bp, Homo sapien
gtaggaccccgtgtctctcgggtac

SEQ ID NO: 5551 - DNA, 25 bp, Homo sapien
aaggctccggtatcctctcctagtc

SEQ ID NO: 5552 - DNA, 25 bp, Homo sapien
aaggctccggtaacctctcctagtc

SEQ ID NO: 5553 - DNA, 25 bp, Homo sapien
gtatcaacacaccactcgtcgagac

SEQ ID NO: 5554 - DNA, 25 bp, Homo sapien
gtatcaacacacgactcgtcgagac

SEQ ID NO: 5555 - DNA, 25 bp, Homo sapien
tgttttacctgacgagataacgttt

SEQ ID NO: 5556 - DNA, 25 bp, Homo sapien
tgttttacctgaggagataacgttt

SEQ ID NO: 5557 - DNA, 25 bp, Homo sapien
tgtcttttccgtaggagacatacaa

SEQ ID NO: 5558 - DNA, 25 bp, Homo sapien
tgtcttttccgttggagacatacaa

SEQ ID NO: 5559 - DNA, 25 bp, Homo sapien
gtcctgtccgggagacgaccagacg

SEQ ID NO: 5560 - DNA, 25 bp, Homo sapien
gtcctgtccgggtgacgaccagacg

SEQ ID NO: 5561 - DNA, 25 bp, Homo sapien
gtctacctttctcttgtacataagg

SEQ ID NO: 5562 - DNA, 25 bp, Homo sapien
gtctacctttctgttgtacataagg

SEQ ID NO: 5563 - DNA, 25 bp, Homo sapien
gtagaatttattgtctcacaaggcg

SEQ ID NO: 5564 - DNA, 25 bp, Homo sapien
gtagaatttattctctcacaaggcg

SEQ ID NO: 5565 - DNA, 25 bp, Homo sapien
gaaacccttagtctactgcaagcac

SEQ ID NO: 5566 - DNA, 25 bp, Homo sapien
gaaacccttagtgtactgcaagcac

SEQ ID NO: 5567 - DNA, 25 bp, Homo sapien
acactcaaggagtcacactaacgtc

SEQ ID NO: 5568 - DNA, 25 bp, Homo sapien
acactcaaggagacacactaacgtc

SEQ ID NO: 5569 - DNA, 25 bp, Homo sapien
acacctccggggtcttcgacgtcgt

SEQ ID NO: 5570 - DNA, 25 bp, Homo sapien
acacctccggggacttcgacgtcgt

SEQ ID NO: 5571 - DNA, 25 bp, Homo sapien
gaccgctacgggtcggactttgtcg

SEQ ID NO: 5572 - DNA, 25 bp, Homo sapien
gaccgctacgggacggactttgtcg

SEQ ID NO: 5573 - DNA, 25 bp, Homo sapien
agatttcgatgtcgtgagtaaacct

SEQ ID NO: 5574 - DNA, 25 bp, Homo sapien
agatttcgatgtggtgagtaaacct

SEQ ID NO: 5575 - DNA, 25 bp, Homo sapien
gtacgtgtttccttttagttaaacc

SEQ ID NO: 5576 - DNA, 25 bp, Homo sapien
gtacgtgtttccatttagttaaacc

SEQ ID NO: 5577 - DNA, 25 bp, Homo sapien
aatttccaacgtgttctcgatacag

SEQ ID NO: 5578 - DNA, 25 bp, Homo sapien
aatttccaacgtcttctcgatacag

SEQ ID NO: 5579 - DNA, 25 bp, Homo sapien
tagtctatcgtaaactcgagcaacg

SEQ ID NO: 5580 - DNA, 25 bp, Homo sapien
tagtctatcgtatactcgagcaacg

SEQ ID NO: 5581 - DNA, 25 bp, Homo sapien
tttcacgaccctaatgtccgcactc

SEQ ID NO: 5582 - DNA, 25 bp, Homo sapien
tttcacgacccttatgtccgcactc

SEQ ID NO: 5583 - DNA, 25 bp, Homo sapien
ttatctgagactctttgtctccctc

SEQ ID NO: 5584 - DNA, 25 bp, Homo sapien
ttatctgagactgtttgtctccctc

SEQ ID NO: 5585 - DNA, 25 bp, Homo sapien
cctacttggagttgtgggttccacc

SEQ ID NO: 5586 - DNA, 25 bp, Homo sapien
cctacttggagtagtgggttccacc

SEQ ID NO: 5587 - DNA, 25 bp, Homo sapien
tacactatctgtagtaccagactcg

SEQ ID NO: 5588 - DNA, 25 bp, Homo sapien
tacactatctgttgtaccagactcg

SEQ ID NO: 5589 - DNA, 25 bp, Homo sapien
ggtacacttttctgtcgactcagac

SEQ ID NO: 5590 - DNA, 25 bp, Homo sapien
ggtacacttttcagtcgactcagac

SEQ ID NO: 5591 - DNA, 25 bp, Homo sapien
gacactatgtcgttacgctggagac

SEQ ID NO: 5592 - DNA, 25 bp, Homo sapien
gacactatgtcgatacgctggagac

SEQ ID NO: 5593 - DNA, 25 bp, Homo sapien
accagactgtgtgaaacgaccgaac

SEQ ID NO: 5594 - DNA, 25 bp, Homo sapien
accagactgtgtcaaacgaccgaac

SEQ ID NO: 5595 - DNA, 25 bp, Homo sapien
tgggtgagcctatagacaaagacta

SEQ ID NO: 5596 - DNA, 25 bp, Homo sapien
tgggtgagcctaaagacaaagacta

SEQ ID NO: 5597 - DNA, 25 bp, Homo sapien
aagaacctacgtaggactcggagcg

SEQ ID NO: 5598 - DNA, 25 bp, Homo sapien
aagaacctacgttggactcggagcg

SEQ ID NO: 5599 - DNA, 25 bp, Homo sapien
ggcggagacacatgtggctcccaag

SEQ ID NO: 5600 - DNA, 25 bp, Homo sapien
ggcggagacacaagtggctcccaag

SEQ ID NO: 5601 - DNA, 25 bp, Homo sapien
aggagtccatcgagtttaacgacga

SEQ ID NO: 5602 - DNA, 25 bp, Homo sapien
aggagtccatcgtgtttaacgacga

SEQ ID NO: 5603 - DNA, 25 bp, Homo sapien
tggtacctctgtagttctccagtac

SEQ ID NO: 5604 - DNA, 25 bp, Homo sapien
tggtacctctgttgttctccagtac

SEQ ID NO: 5605 - DNA, 25 bp, Homo sapien
agaggtagtgttattttacgtcgca

SEQ ID NO: 5606 - DNA, 25 bp, Homo sapien
agaggtagtgtttttttacgtcgca

SEQ ID NO: 5607 - DNA, 25 bp, Homo sapien
gacgaagatagttaccttttcggga

SEQ ID NO: 5608 - DNA, 25 bp, Homo sapien
gacgaagatagtaaccttttcggga

SEQ ID NO: 5609 - DNA, 25 bp, Homo sapien
gacgatagacttaccgaaaatcggg

SEQ ID NO: 5610 - DNA, 25 bp, Homo sapien
gacgatagactttccgaaaatcggg

SEQ ID NO: 5611 - DNA, 25 bp, Homo sapien
agacgacaactctccaagtccaaag

SEQ ID NO: 5612 - DNA, 25 bp, Homo sapien
agacgacaactcaccaagtccaaag

SEQ ID NO: 5613 - DNA, 25 bp, Homo sapien
cactcgtttgtcgaatcgtaacgcg

SEQ ID NO: 5614 - DNA, 25 bp, Homo sapien
cactcgtttgtccaatcgtaacgcg

SEQ ID NO: 5615 - DNA, 25 bp, Homo sapien
ctcatacttcggactgtatcgtagt

SEQ ID NO: 5616 - DNA, 25 bp, Homo sapien
ctcatacttcggtctgtatcgtagt

SEQ ID NO: 5617 - DNA, 25 bp, Homo sapien
ctcacgagtgttgaggctcgacata

SEQ ID NO: 5618 - DNA, 25 bp, Homo sapien
ctcacgagtgttcaggctcgacata

SEQ ID NO: 5619 - DNA, 25 bp, Homo sapien
agtcacatagtgtagaagtcctatc

SEQ ID NO: 5620 - DNA, 25 bp, Homo sapien
agtcacatagtgaagaagtcctatc

SEQ ID NO: 5621 - DNA, 25 bp, Homo sapien
gatcgagaacttaaacagtatcttt

SEQ ID NO: 5622 - DNA, 25 bp, Homo sapien
gatcgagaactttaacagtatcttt

SEQ ID NO: 5623 - DNA, 25 bp, Homo sapien
ggtgtgtgactcttcacaggctctt

SEQ ID NO: 5624 - DNA, 25 bp, Homo sapien
ggtgtgtgactcatcacaggctctt

SEQ ID NO: 5625 - DNA, 25 bp, Homo sapien
atggtcactcactacagagttcact

SEQ ID NO: 5626 - DNA, 25 bp, Homo sapien
atggtcactcacaacagagttcact

SEQ ID NO: 5627 - DNA, 25 bp, Homo sapien
tgttcggggaatcatcacaagccac

SEQ ID NO: 5628 - DNA, 25 bp, Homo sapien
tgttcggggaatgatcacaagccac

SEQ ID NO: 5629 - DNA, 25 bp, Homo sapien
ttgtcgatccgattttgaaggtcca

SEQ ID NO: 5630 - DNA, 25 bp, Homo sapien
ttgtcgatccgaatttgaaggtcca

SEQ ID NO: 5631 - DNA, 25 bp, Homo sapien
gtactgcaagagaagtgaacccatg

SEQ ID NO: 5632 - DNA, 25 bp, Homo sapien
gtactgcaagagtagtgaacccatg

SEQ ID NO: 5633 - DNA, 25 bp, Homo sapien
gtgtgtaaccggagggtcacaatgt

SEQ ID NO: 5634 - DNA, 25 bp, Homo sapien
gtgtgtaaccggtgggtcacaatgt

SEQ ID NO: 5635 - DNA, 25 bp, Homo sapien
tcgtctacaaaggtgcatcaattgt

SEQ ID NO: 5636 - DNA, 25 bp, Homo sapien
tcgtctacaaagctgcatcaattgt

SEQ ID NO: 5637 - DNA, 25 bp, Homo sapien
ctcaaagactctgagatctgaacgg

SEQ ID NO: 5638 - DNA, 25 bp, Homo sapien
ctcaaagactctcagatctgaacgg

SEQ ID NO: 5639 - DNA, 25 bp, Homo sapien
ctaatcgaatagacggttttacggt

SEQ ID NO: 5640 - DNA, 25 bp, Homo sapien
ctaatcgaatagtcggttttacggt

SEQ ID NO: 5641 - DNA, 25 bp, Homo sapien
ctgttacaagacgtgtgtcttttgt

SEQ ID NO: 5642 - DNA, 25 bp, Homo sapien
ctgttacaagacctgtgtcttttgt

SEQ ID NO: 5643 - DNA, 25 bp, Homo sapien
gggttaacttactcgcggtaaaacg

SEQ ID NO: 5644 - DNA, 25 bp, Homo sapien
gggttaacttacacgcggtaaaacg

SEQ ID NO: 5645 - DNA, 25 bp, Homo sapien
agtcgcacctgtggtcgagcaggag

SEQ ID NO: 5646 - DNA, 25 bp, Homo sapien
agtcgcacctgtcgtcgagcaggag

SEQ ID NO: 5647 - DNA, 25 bp, Homo sapien
ggtatgacgtttttcgacatagagc

SEQ ID NO: 5648 - DNA, 25 bp, Homo sapien
ggtatgacgtttatcgacatagagc

SEQ ID NO: 5649 - DNA, 25 bp, Homo sapien
aatgactcgtttcacgtaaagatgt

SEQ ID NO: 5650 - DNA, 25 bp, Homo sapien
aatgactcgtttgacgtaaagatgt

SEQ ID NO: 5651 - DNA, 25 bp, Homo sapien
gatgaactggtctccgtcgaaaagg

SEQ ID NO: 5652 - DNA, 25 bp, Homo sapien
gatgaactggtcaccgtcgaaaagg

SEQ ID NO: 5653 - DNA, 25 bp, Homo sapien
ggcgcggaccggtcctgtcatgaaa

SEQ ID NO: 5654 - DNA, 25 bp, Homo sapien
ggcgcggaccggacctgtcatgaaa

SEQ ID NO: 5655 - DNA, 25 bp, Homo sapien
gtacgtgtcgtcgtacatgaagagt

SEQ ID NO: 5656 - DNA, 25 bp, Homo sapien
gtacgtgtcgtcctacatgaagagt

SEQ ID NO: 5657 - DNA, 25 bp, Homo sapien
gactactgtacgaactataaccgca

SEQ ID NO: 5658 - DNA, 25 bp, Homo sapien
gactactgtacgtactataaccgca

SEQ ID NO: 5659 - DNA, 25 bp, Homo sapien
aaagctcgatcttttaggccctcac

SEQ ID NO: 5660 - DNA, 25 bp, Homo sapien
aaagctcgatctattaggccctcac

SEQ ID NO: 5661 - DNA, 25 bp, Homo sapien
taaaaccgattcaaaggtcttcctg

SEQ ID NO: 5662 - DNA, 25 bp, Homo sapien
taaaaccgattctaaggtcttcctg

SEQ ID NO: 5663 - DNA, 25 bp, Homo sapien
ctagtagtctagtcagagtttaccc

SEQ ID NO: 5664 - DNA, 25 bp, Homo sapien
ctagtagtctagacagagtttaccc

SEQ ID NO: 5665 - DNA, 25 bp, Homo sapien
tcagattgtgaaagatttaccgtac

SEQ ID NO: 5666 - DNA, 25 bp, Homo sapien
tcagattgtgaatgatttaccgtac

SEQ ID NO: 5667 - DNA, 25 bp, Homo sapien
aaaggtcgtgtgaccggtttcggct

SEQ ID NO: 5668 - DNA, 25 bp, Homo sapien
aaaggtcgtgtgtccggtttcggct

SEQ ID NO: 5669 - DNA, 25 bp, Homo sapien
gtaactacttcttttgacattgtcg

SEQ ID NO: 5670 - DNA, 25 bp, Homo sapien
gtaactacttctattgacattgtcg

SEQ ID NO: 5671 - DNA, 25 bp, Homo sapien
acgactcgaccgtggtgaccctaca

SEQ ID NO: 5672 - DNA, 25 bp, Homo sapien
acgactcgaccgaggtgaccctaca

SEQ ID NO: 5673 - DNA, 25 bp, Homo sapien
acacgtcaacgaagggagacccgac

SEQ ID NO: 5674 - DNA, 25 bp, Homo sapien
acacgtcaacgatgggagacccgac

SEQ ID NO: 5675 - DNA, 25 bp, Homo sapien
tgaatacatgtatgtaacctcgtac

SEQ ID NO: 5676 - DNA, 25 bp, Homo sapien
tgaatacatgtaagtaacctcgtac

SEQ ID NO: 5677 - DNA, 25 bp, Homo sapien
aacgtatagacatgtaaatcatccg

SEQ ID NO: 5678 - DNA, 25 bp, Homo sapien
aacgtatagacaagtaaatcatccg

SEQ ID NO: 5679 - DNA, 25 bp, Homo sapien
gttgcacgactggacgtggactgct

SEQ ID NO: 5680 - DNA, 25 bp, Homo sapien
gttgcacgactgcacgtggactgct

SEQ ID NO: 5681 - DNA, 25 bp, Homo sapien
cgtaaagctaggagcagtccacgtc

SEQ ID NO: 5682 - DNA, 25 bp, Homo sapien
cgtaaagctaggtgcagtccacgtc

SEQ ID NO: 5683 - DNA, 25 bp, Homo sapien
tcagtcgaacgattgacaacactaa

SEQ ID NO: 5684 - DNA, 25 bp, Homo sapien
tcagtcgaacgaatgacaacactaa

SEQ ID NO: 5685 - DNA, 25 bp, Homo sapien
ccaggagtagtaagacgaaccataa

SEQ ID NO: 5686 - DNA, 25 bp, Homo sapien
ccaggagtagtatgacgaaccataa

SEQ ID NO: 5687 - DNA, 25 bp, Homo sapien
cactgaatgtagaacaaaatctacg

SEQ ID NO: 5688 - DNA, 25 bp, Homo sapien
cactgaatgtagtacaaaatctacg

SEQ ID NO: 5689 - DNA, 25 bp, Homo sapien
aagtcactaaaccaaactcagtgtg

SEQ ID NO: 5690 - DNA, 25 bp, Homo sapien
aagtcactaaacgaaactcagtgtg

SEQ ID NO: 5691 - DNA, 25 bp, Homo sapien
cactacataggaagagactactcct

SEQ ID NO: 5692 - DNA, 25 bp, Homo sapien
cactacataggatgagactactcct

SEQ ID NO: 5693 - DNA, 25 bp, Homo sapien
gtgaatacatgtatgtaacctcgta

SEQ ID NO: 5694 - DNA, 25 bp, Homo sapien
gtgaatacatgtttgtaacctcgta

SEQ ID NO: 5695 - DNA, 25 bp, Homo sapien
gagtaaactttacacaagacgtata

SEQ ID NO: 5696 - DNA, 25 bp, Homo sapien
gagtaaactttagacaagacgtata

SEQ ID NO: 5697 - DNA, 25 bp, Homo sapien
tagagataaccttagaaagactaca

SEQ ID NO: 5698 - DNA, 25 bp, Homo sapien
tagagataacctaagaaagactaca

SEQ ID NO: 5699 - DNA, 25 bp, Homo sapien
agagacaagagtagggagtctccgt

SEQ ID NO: 5700 - DNA, 25 bp, Homo sapien
agagacaagagttgggagtctccgt

SEQ ID NO: 5701 - DNA, 25 bp, Homo sapien
gggaccgtaacgacgaatcggaccg

SEQ ID NO: 5702 - DNA, 25 bp, Homo sapien
gggaccgtaacgtcgaatcggaccg

SEQ ID NO: 5703 - DNA, 25 bp, Homo sapien
gtacacttcgttaacaccggtcact

SEQ ID NO: 5704 - DNA, 25 bp, Homo sapien
gtacacttcgtttacaccggtcact

SEQ ID NO: 5705 - DNA, 25 bp, Homo sapien
aggtccgtccgaaccgacggaggac

SEQ ID NO: 5706 - DNA, 25 bp, Homo sapien
aggtccgtccgatccgacggaggac

SEQ ID NO: 5707 - DNA, 25 bp, Homo sapien
cccggcaccacttcgcgaagggtat

SEQ ID NO: 5708 - DNA, 25 bp, Homo sapien
cccggcaccactacgcgaagggtat

SEQ ID NO: 5709 - DNA, 25 bp, Homo sapien
ccagggaatctacttctgagcgggt

SEQ ID NO: 5710 - DNA, 25 bp, Homo sapien
ccagggaatctagttctgagcgggt

SEQ ID NO: 5711 - DNA, 25 bp, Homo sapien
gtcgtcgtttcactttcgacaagtc

SEQ ID NO: 5712 - DNA, 25 bp, Homo sapien
gtcgtcgtttcagtttcgacaagtc

SEQ ID NO: 5713 - DNA, 25 bp, Homo sapien
catcgctccggacattcagaaagta

SEQ ID NO: 5714 - DNA, 25 bp, Homo sapien
catcgctccggagattcagaaagta

SEQ ID NO: 5715 - DNA, 25 bp, Homo sapien
gtctatggtattttacacgtaaatc

SEQ ID NO: 5716 - DNA, 25 bp, Homo sapien
gtctatggtattatacacgtaaatc

SEQ ID NO: 5717 - DNA, 25 bp, Homo sapien
agagtaggtgttatacactaacaac

SEQ ID NO: 5718 - DNA, 25 bp, Homo sapien
agagtaggtgttttacactaacaac

SEQ ID NO: 5719 - DNA, 25 bp, Homo sapien
agtaggtctattactttgtagacgc

SEQ ID NO: 5720 - DNA, 25 bp, Homo sapien
agtaggtctatttctttgtagacgc

SEQ ID NO: 5721 - DNA, 25 bp, Homo sapien
ctatctactcttactgttgagtgtc

SEQ ID NO: 5722 - DNA, 25 bp, Homo sapien
ctatctactctttctgttgagtgtc

SEQ ID NO: 5723 - DNA, 25 bp, Homo sapien
cctaccgtctctgtgtcggagtgtg

SEQ ID NO: 5724 - DNA, 25 bp, Homo sapien
cctaccgtctctctgtcggagtgtg

SEQ ID NO: 5725 - DNA, 25 bp, Homo sapien
cacggtacttcagtccgtcgaggag

SEQ ID NO: 5726 - DNA, 25 bp, Homo sapien
cacggtacttcactccgtcgaggag

SEQ ID NO: 5727 - DNA, 25 bp, Homo sapien
cccagatctcgagtcacgtggtgag

SEQ ID NO: 5728 - DNA, 25 bp, Homo sapien
cccagatctcgactcacgtggtgag

SEQ ID NO: 5729 - DNA, 25 bp, Homo sapien
agtatagatcggactcatagacagg

SEQ ID NO: 5730 - DNA, 25 bp, Homo sapien
agtatagatcggtctcatagacagg

SEQ ID NO: 5731 - DNA, 25 bp, Homo sapien
tctcggactacttctcgaaggcgtg

SEQ ID NO: 5732 - DNA, 25 bp, Homo sapien
tctcggactactactcgaaggcgtg

SEQ ID NO: 5733 - DNA, 25 bp, Homo sapien
ccggacgtactactcacggagtcgg

SEQ ID NO: 5734 - DNA, 25 bp, Homo sapien
ccggacgtactagtcacggagtcgg

SEQ ID NO: 5735 - DNA, 25 bp, Homo sapien
ggtaaacagacactactctacattg

SEQ ID NO: 5736 - DNA, 25 bp, Homo sapien
ggtaaacagacagtactctacattg

SEQ ID NO: 5737 - DNA, 25 bp, Homo sapien
ttgaaaagaactatctatacataac

SEQ ID NO: 5738 - DNA, 25 bp, Homo sapien
ttgaaaagaactttctatacataac

SEQ ID NO: 5739 - DNA, 25 bp, Homo sapien
acacaagacgtatattctcgagtaa

SEQ ID NO: 5740 - DNA, 25 bp, Homo sapien
acacaagacgtaaattctcgagtaa

SEQ ID NO: 5741 - DNA, 25 bp, Homo sapien
cagagacgagtaccatcttcgttcc

SEQ ID NO: 5742 - DNA, 25 bp, Homo sapien
cagagacgagtagcatcttcgttcc

SEQ ID NO: 5743 - DNA, 25 bp, Homo sapien
ttaaaacgttggttctactttcacg

SEQ ID NO: 5744 - DNA, 25 bp, Homo sapien
ttaaaacgttggatctactttcacg

SEQ ID NO: 5745 - DNA, 25 bp, Homo sapien
cggacctcagataaccgttctgttc

SEQ ID NO: 5746 - DNA, 25 bp, Homo sapien
cggacctcagattaccgttctgttc

SEQ ID NO: 5747 - DNA, 25 bp, Homo sapien
ggactaaggataatcttctcactct

SEQ ID NO: 5748 - DNA, 25 bp, Homo sapien
ggactaaggatattcttctcactct

SEQ ID NO: 5749 - DNA, 25 bp, Homo sapien
gcgctacagtgcttctccctgactt

SEQ ID NO: 5750 - DNA, 25 bp, Homo sapien
gcgctacagtgcatctccctgactt

SEQ ID NO: 5751 - DNA, 25 bp, Homo sapien
ctctacaacggaggttgtcgtccct

SEQ ID NO: 5752 - DNA, 25 bp, Homo sapien
ctctacaacggacgttgtcgtccct

SEQ ID NO: 5753 - DNA, 25 bp, Homo sapien
gatgtctcatgacgttttctacgac

SEQ ID NO: 5754 - DNA, 25 bp, Homo sapien
gatgtctcatgaggttttctacgac

SEQ ID NO: 5755 - DNA, 25 bp, Homo sapien
ttctgtccacttgagtgtttcatat

SEQ ID NO: 5756 - DNA, 25 bp, Homo sapien
ttctgtccacttcagtgtttcatat

SEQ ID NO: 5757 - DNA, 25 bp, Homo sapien
gtcgtctgttgttccgtgtcacccc

SEQ ID NO: 5758 - DNA, 25 bp, Homo sapien
gtcgtctgttgtaccgtgtcacccc

SEQ ID NO: 5759 - DNA, 25 bp, Homo sapien
cctttcgtttctgtggtaccaccga

SEQ ID NO: 5760 - DNA, 25 bp, Homo sapien
cctttcgtttctctggtaccaccga

SEQ ID NO: 5761 - DNA, 25 bp, Homo sapien
cgcttctgcgaggactcctcgacgt

SEQ ID NO: 5762 - DNA, 25 bp, Homo sapien
cgcttctgcgagcactcctcgacgt

SEQ ID NO: 5763 - DNA, 25 bp, Homo sapien
gttcgagtcgacgtcttcgtacact

SEQ ID NO: 5764 - DNA, 25 bp, Homo sapien
gttcgagtcgacctcttcgtacact

SEQ ID NO: 5765 - DNA, 25 bp, Homo sapien
tcgacgttcatacaccgtaaccttg

SEQ ID NO: 5766 - DNA, 25 bp, Homo sapien
tcgacgttcatagaccgtaaccttg

SEQ ID NO: 5767 - DNA, 25 bp, Homo sapien
gagagtcgttacacacgtgaaccag

SEQ ID NO: 5768 - DNA, 25 bp, Homo sapien
gagagtcgttactcacgtgaaccag

SEQ ID NO: 5769 - DNA, 25 bp, Homo sapien
aaagagacgccgttccgtggaccag

SEQ ID NO: 5770 - DNA, 25 bp, Homo sapien
aaagagacgccgatccgtggaccag

SEQ ID NO: 5771 - DNA, 25 bp, Homo sapien
acgtcgtaggagaaagcggacacca

SEQ ID NO: 5772 - DNA, 25 bp, Homo sapien
acgtcgtaggagtaagcggacacca

SEQ ID NO: 5773 - DNA, 25 bp, Homo sapien
cacgatatcggtatatctagaacca

SEQ ID NO: 5774 - DNA, 25 bp, Homo sapien
cacgatatcggtttatctagaacca

SEQ ID NO: 5775 - DNA, 25 bp, Homo sapien
gagagatcgcgcatcttcgaaggag

SEQ ID NO: 5776 - DNA, 25 bp, Homo sapien
gagagatcgcgcttcttcgaaggag

SEQ ID NO: 5777 - DNA, 25 bp, Homo sapien
aggtctgacggtctgtccccagaga

SEQ ID NO: 5778 - DNA, 25 bp, Homo sapien
aggtctgacggtgtgtccccagaga

SEQ ID NO: 5779 - DNA, 25 bp, Homo sapien
ttcgagaggtgtgtgtacccgaaag

SEQ ID NO: 5780 - DNA, 25 bp, Homo sapien
ttcgagaggtgtctgtacccgaaag

SEQ ID NO: 5781 - DNA, 25 bp, Homo sapien
gagagagtcggatactgtcatactg

SEQ ID NO: 5782 - DNA, 25 bp, Homo sapien
gagagagtcggaaactgtcatactg

SEQ ID NO: 5783 - DNA, 25 bp, Homo sapien
ggtgggtctcggaccctagtacgtt

SEQ ID NO: 5784 - DNA, 25 bp, Homo sapien
ggtgggtctcggtccctagtacgtt

SEQ ID NO: 5785 - DNA, 25 bp, Homo sapien
gtggttacgcgtgaacacggacgtc

SEQ ID NO: 5786 - DNA, 25 bp, Homo sapien
gtggttacgcgtcaacacggacgtc

SEQ ID NO: 5787 - DNA, 25 bp, Homo sapien
aagggtgtatcaggacggaccgtct

SEQ ID NO: 5788 - DNA, 25 bp, Homo sapien
aagggtgtatcacgacggaccgtct

SEQ ID NO: 5789 - DNA, 25 bp, Homo sapien
aaagatgttgtcttcgaccctgtct

SEQ ID NO: 5790 - DNA, 25 bp, Homo sapien
aaagatgttgtcatcgaccctgtct

SEQ ID NO: 5791 - DNA, 25 bp, Homo sapien
tctatgtgtttcgttctaaccttcg

SEQ ID NO: 5792 - DNA, 25 bp, Homo sapien
tctatgtgtttccttctaaccttcg

SEQ ID NO: 5793 - DNA, 25 bp, Homo sapien
gtcgacgtcgtctctttcgaagagt

SEQ ID NO: 5794 - DNA, 25 bp, Homo sapien
gtcgacgtcgtcactttcgaagagt

SEQ ID NO: 5795 - DNA, 25 bp, Homo sapien
cgcctgtatggctccctgtacggac

SEQ ID NO: 5796 - DNA, 25 bp, Homo sapien
cgcctgtatggcaccctgtacggac

SEQ ID NO: 5797 - DNA, 25 bp, Homo sapien
aatacggtgaaacacgtgtcgagta

SEQ ID NO: 5798 - DNA, 25 bp, Homo sapien
aatacggtgaaagacgtgtcgagta

SEQ ID NO: 5799 - DNA, 25 bp, Homo sapien
gaacgagtgtcatcaacggtcgaga

SEQ ID NO: 5800 - DNA, 25 bp, Homo sapien
gaacgagtgtcaacaacggtcgaga

SEQ ID NO: 5801 - DNA, 25 bp, Homo sapien
actgaggagacgagtaaaggtccta

SEQ ID NO: 5802 - DNA, 25 bp, Homo sapien
actgaggagacgtgtaaaggtccta

SEQ ID NO: 5803 - DNA, 25 bp, Homo sapien
aatagatgaaggtagaacagtcctc

SEQ ID NO: 5804 - DNA, 25 bp, Homo sapien
aatagatgaaggaagaacagtcctc

SEQ ID NO: 5805 - DNA, 25 bp, Homo sapien
gtgatcatcggagtaggtcctactc

SEQ ID NO: 5806 - DNA, 25 bp, Homo sapien
gtgatcatcggactaggtcctactc

SEQ ID NO: 5807 - DNA, 25 bp, Homo sapien
tgaacacttagtgtggactacatgt

SEQ ID NO: 5808 - DNA, 25 bp, Homo sapien
tgaacacttagtctggactacatgt

SEQ ID NO: 5809 - DNA, 25 bp, Homo sapien
tgaagtaccactaatgtgatcacga

SEQ ID NO: 5810 - DNA, 25 bp, Homo sapien
tgaagtaccacttatgtgatcacga

SEQ ID NO: 5811 - DNA, 25 bp, Homo sapien
agaggtttctcgtgtggtaccgacg

SEQ ID NO: 5812 - DNA, 25 bp, Homo sapien
agaggtttctcgagtggtaccgacg

SEQ ID NO: 5813 - DNA, 25 bp, Homo sapien
tctcgacttcatcgaagaggaccta

SEQ ID NO: 5814 - DNA, 25 bp, Homo sapien
tctcgacttcatggaagaggaccta

SEQ ID NO: 5815 - DNA, 25 bp, Homo sapien
gacgacgtcccttgtaaaaacacac

SEQ ID NO: 5816 - DNA, 25 bp, Homo sapien
gacgacgtccctagtaaaaacacac

SEQ ID NO: 5817 - DNA, 25 bp, Homo sapien
gggtccgctggcagaacgtagactt

SEQ ID NO: 5818 - DNA, 25 bp, Homo sapien
gggtccgctggctgaacgtagactt

SEQ ID NO: 5819 - DNA, 25 bp, Homo sapien
tttcgtgcgcgtgttgaagacatct

SEQ ID NO: 5820 - DNA, 25 bp, Homo sapien
tttcgtgcgcgtcttgaagacatct

SEQ ID NO: 5821 - DNA, 25 bp, Homo sapien
agtagatgtccgttttcagaacatt

SEQ ID NO: 5822 - DNA, 25 bp, Homo sapien
agtagatgtccgatttcagaacatt

SEQ ID NO: 5823 - DNA, 25 bp, Homo sapien
actgaaacaggtcgtataataacta

SEQ ID NO: 5824 - DNA, 25 bp, Homo sapien
actgaaacaggtggtataataacta

SEQ ID NO: 5825 - DNA, 25 bp, Homo sapien
tgttaccgtgtctttctagaataag

SEQ ID NO: 5826 - DNA, 25 bp, Homo sapien
tgttaccgtgtcattctagaataag

SEQ ID NO: 5827 - DNA, 25 bp, Homo sapien
ccggttttactcataaagatctccg

SEQ ID NO: 5828 - DNA, 25 bp, Homo sapien
ccggttttactcttaaagatctccg

SEQ ID NO: 5829 - DNA, 25 bp, Homo sapien
aagtagataccgtaaacatcaccgt

SEQ ID NO: 5830 - DNA, 25 bp, Homo sapien
aagtagataccgaaaacatcaccgt

SEQ ID NO: 5831 - DNA, 25 bp, Homo sapien
aagacggggacacagagtctctacg

SEQ ID NO: 5832 - DNA, 25 bp, Homo sapien
aagacggggacagagagtctctacg

SEQ ID NO: 5833 - DNA, 25 bp, Homo sapien
cgcgtcacgcgaccacgaggagatc

SEQ ID NO: 5834 - DNA, 25 bp, Homo sapien
cgcgtcacgcgagcacgaggagatc

SEQ ID NO: 5835 - DNA, 25 bp, Homo sapien
tttcgtcgaccttttgttctcgtac

SEQ ID NO: 5836 - DNA, 25 bp, Homo sapien
tttcgtcgacctattgttctcgtac

SEQ ID NO: 5837 - DNA, 25 bp, Homo sapien
ttaccgtgaccgaccggtgagtcga

SEQ ID NO: 5838 - DNA, 25 bp, Homo sapien
ttaccgtgaccgtccggtgagtcga

SEQ ID NO: 5839 - DNA, 25 bp, Homo sapien
actcactggaccctcaccttaggac

SEQ ID NO: 5840 - DNA, 25 bp, Homo sapien
actcactggaccgtcaccttaggac

SEQ ID NO: 5841 - DNA, 25 bp, Homo sapien
ttgttggagaaccatttacgtgtac

SEQ ID NO: 5842 - DNA, 25 bp, Homo sapien
ttgttggagaacgatttacgtgtac

SEQ ID NO: 5843 - DNA, 25 bp, Homo sapien
ggtctccagtaactctttagtcact

SEQ ID NO: 5844 - DNA, 25 bp, Homo sapien
ggtctccagtaagtctttagtcact

SEQ ID NO: 5845 - DNA, 25 bp, Homo sapien
ccgttaagtacacgtacactttaga

SEQ ID NO: 5846 - DNA, 25 bp, Homo sapien
ccgttaagtacaggtacactttaga

SEQ ID NO: 5847 - DNA, 25 bp, Homo sapien
cgagtctacgcttagggtttcgaca

SEQ ID NO: 5848 - DNA, 25 bp, Homo sapien
cgagtctacgctaagggtttcgaca

SEQ ID NO: 5849 - DNA, 25 bp, Homo sapien
ctcagactacagtcttctcgtacag

SEQ ID NO: 5850 - DNA, 25 bp, Homo sapien
ctcagactacagacttctcgtacag

SEQ ID NO: 5851 - DNA, 25 bp, Homo sapien
acgtcggaggaagctctcgtcacag

SEQ ID NO: 5852 - DNA, 25 bp, Homo sapien
acgtcggaggaacctctcgtcacag

SEQ ID NO: 5853 - DNA, 25 bp, Homo sapien
ggaggtacaggtacaggtcgtcaca

SEQ ID NO: 5854 - DNA, 25 bp, Homo sapien
ggaggtacaggttcaggtcgtcaca

SEQ ID NO: 5855 - DNA, 25 bp, Homo sapien
aaaggacacacatgagacaggtcaa

SEQ ID NO: 5856 - DNA, 25 bp, Homo sapien
aaaggacacacaagagacaggtcaa

SEQ ID NO: 5857 - DNA, 25 bp, Homo sapien
aggcgggacaccacagtgtgtcgac

SEQ ID NO: 5858 - DNA, 25 bp, Homo sapien
aggcgggacacctcagtgtgtcgac

SEQ ID NO: 5859 - DNA, 25 bp, Homo sapien
tgaggtgtgtgaatcctacctttag

SEQ ID NO: 5860 - DNA, 25 bp, Homo sapien
tgaggtgtgtgattcctacctttag

SEQ ID NO: 5861 - DNA, 25 bp, Homo sapien
agtccgggtcggttcgtgtccctcc

SEQ ID NO: 5862 - DNA, 25 bp, Homo sapien
agtccgggtcggatcgtgtccctcc

SEQ ID NO: 5863 - DNA, 25 bp, Homo sapien
tttgaggatcaggtacagagcaccc

SEQ ID NO: 5864 - DNA, 25 bp, Homo sapien
tttgaggatcagctacagagcaccc

SEQ ID NO: 5865 - DNA, 25 bp, Homo sapien
ttgagtgtaccgatttgttaatacc

SEQ ID NO: 5866 - DNA, 25 bp, Homo sapien
ttgagtgtaccgttttgttaatacc

SEQ ID NO: 5867 - DNA, 25 bp, Homo sapien
gtaccggaggcagagtgtagattct

SEQ ID NO: 5868 - DNA, 25 bp, Homo sapien
gtaccggaggcacagtgtagattct

SEQ ID NO: 5869 - DNA, 25 bp, Homo sapien
cagacgaaggactaggagaactact

SEQ ID NO: 5870 - DNA, 25 bp, Homo sapien
cagacgaaggacaaggagaactact

SEQ ID NO: 5871 - DNA, 25 bp, Homo sapien
ctgtagactccgactggaaacactc

SEQ ID NO: 5872 - DNA, 25 bp, Homo sapien
ctgtagactccgtctggaaacactc

SEQ ID NO: 5873 - DNA, 25 bp, Homo sapien
gtagtagtatgtctctttacatcaa

SEQ ID NO: 5874 - DNA, 25 bp, Homo sapien
gtagtagtatgtgtctttacatcaa

SEQ ID NO: 5875 - DNA, 25 bp, Homo sapien
cgtacttgtacctgatgtcgcaaat

SEQ ID NO: 5876 - DNA, 25 bp, Homo sapien
cgtacttgtaccagatgtcgcaaat

SEQ ID NO: 5877 - DNA, 25 bp, Homo sapien
ccctctgtaccgtgtgtgacaggag

SEQ ID NO: 5878 - DNA, 25 bp, Homo sapien
ccctctgtaccgagtgtgacaggag

SEQ ID NO: 5879 - DNA, 25 bp, Homo sapien
acctctgtcgccttcgacgacagga

SEQ ID NO: 5880 - DNA, 25 bp, Homo sapien
acctctgtcgccatcgacgacagga

SEQ ID NO: 5881 - DNA, 25 bp, Homo sapien
tgacgacttgaggtcgagtcagaag

SEQ ID NO: 5882 - DNA, 25 bp, Homo sapien
tgacgacttgagctcgagtcagaag

SEQ ID NO: 5883 - DNA, 25 bp, Homo sapien
aacactcgacgtcgtcatcacatag

SEQ ID NO: 5884 - DNA, 25 bp, Homo sapien
aacactcgacgtggtcatcacatag

SEQ ID NO: 5885 - DNA, 25 bp, Homo sapien
gacgtgttacgtcgtcatcaccacg

SEQ ID NO: 5886 - DNA, 25 bp, Homo sapien
gacgtgttacgtggtcatcaccacg

SEQ ID NO: 5887 - DNA, 25 bp, Homo sapien
ttactgtcaccgtcgtcgtctccag

SEQ ID NO: 5888 - DNA, 25 bp, Homo sapien
ttactgtcaccgacgtcgtctccag

SEQ ID NO: 5889 - DNA, 25 bp, Homo sapien
ctacttttgggtgtcgtagatctag

SEQ ID NO: 5890 - DNA, 25 bp, Homo sapien
ctacttttgggtctcgtagatctag

SEQ ID NO: 5891 - DNA, 25 bp, Homo sapien
tctactacttcttttcgggttctag

SEQ ID NO: 5892 - DNA, 25 bp, Homo sapien
tctactacttctattcgggttctag

SEQ ID NO: 5893 - DNA, 25 bp, Homo sapien
ctgtcttactttgtgtataggttta

SEQ ID NO: 5894 - DNA, 25 bp, Homo sapien
ctgtcttactttctgtataggttta

SEQ ID NO: 5895 - DNA, 25 bp, Homo sapien
gagtcttatgtgagggagtctaccc

SEQ ID NO: 5896 - DNA, 25 bp, Homo sapien
gagtcttatgtgtgggagtctaccc

SEQ ID NO: 5897 - DNA, 25 bp, Homo sapien
tacaattagctgtgcgcacgtcgtc

SEQ ID NO: 5898 - DNA, 25 bp, Homo sapien
tacaattagctgagcgcacgtcgtc

SEQ ID NO: 5899 - DNA, 25 bp, Homo sapien
tgtcctttcactgtcgtccgcattt

SEQ ID NO: 5900 - DNA, 25 bp, Homo sapien
tgtcctttcactctcgtccgcattt

SEQ ID NO: 5901 - DNA, 25 bp, Homo sapien
ttgtgttccccttttcggtcgctac

SEQ ID NO: 5902 - DNA, 25 bp, Homo sapien
ttgtgttcccctattcggtcgctac

SEQ ID NO: 5903 - DNA, 25 bp, Homo sapien
ttgttgtgtatacttttccgtcacc

SEQ ID NO: 5904 - DNA, 25 bp, Homo sapien
ttgttgtgtatagttttccgtcacc

SEQ ID NO: 5905 - DNA, 25 bp, Homo sapien
gtggttgtgttttcaaaggtcactc

SEQ ID NO: 5906 - DNA, 25 bp, Homo sapien
gtggttgtgtttacaaaggtcactc

SEQ ID NO: 5907 - DNA, 25 bp, Homo sapien
ggagatttcgtaatgataaaccctc

SEQ ID NO: 5908 - DNA, 25 bp, Homo sapien
ggagatttcgtattgataaaccctc

SEQ ID NO: 5909 - DNA, 25 bp, Homo sapien
gttctacctttgcacgacacttaga

SEQ ID NO: 5910 - DNA, 25 bp, Homo sapien
gttctacctttggacgacacttaga

SEQ ID NO: 5911 - DNA, 25 bp, Homo sapien
acgtcctccgtaacgactactagaa

SEQ ID NO: 5912 - DNA, 25 bp, Homo sapien
acgtcctccgtatcgactactagaa

SEQ ID NO: 5913 - DNA, 25 bp, Homo sapien
tgtcgctacctaccagtctctacag

SEQ ID NO: 5914 - DNA, 25 bp, Homo sapien
tgtcgctacctagcagtctctacag

SEQ ID NO: 5915 - DNA, 25 bp, Homo sapien
aggtctacctgtaagggactctacg

SEQ ID NO: 5916 - DNA, 25 bp, Homo sapien
aggtctacctgttagggactctacg

SEQ ID NO: 5917 - DNA, 25 bp, Homo sapien
cctatttcacgttattggtactgac

SEQ ID NO: 5918 - DNA, 25 bp, Homo sapien
cctatttcacgtaattggtactgac

SEQ ID NO: 5919 - DNA, 25 bp, Homo sapien
gttatttctcttaaatctcgagtga

SEQ ID NO: 5920 - DNA, 25 bp, Homo sapien
gttatttctctttaatctcgagtga

SEQ ID NO: 5921 - DNA, 25 bp, Homo sapien
gtctttagtccagaacggtcatgta

SEQ ID NO: 5922 - DNA, 25 bp, Homo sapien
gtctttagtccacaacggtcatgta

SEQ ID NO: 5923 - DNA, 25 bp, Homo sapien
atttatgtgtcacaagtcctaatag

SEQ ID NO: 5924 - DNA, 25 bp, Homo sapien
atttatgtgtcagaagtcctaatag

SEQ ID NO: 5925 - DNA, 25 bp, Homo sapien
attttacttgaagattcttactcgg

SEQ ID NO: 5926 - DNA, 25 bp, Homo sapien
attttacttgaacattcttactcgg

SEQ ID NO: 5927 - DNA, 25 bp, Homo sapien
cccgagcgacttacgtcaacttcta

SEQ ID NO: 5928 - DNA, 25 bp, Homo sapien
cccgagcgactttcgtcaacttcta

SEQ ID NO: 5929 - DNA, 25 bp, Homo sapien
gagtcggatactgtcatactgtcac

SEQ ID NO: 5930 - DNA, 25 bp, Homo sapien
gagtcggatactctcatactgtcac

SEQ ID NO: 5931 - DNA, 25 bp, Homo sapien
gaccaagacgggagtgaccttctca

SEQ ID NO: 5932 - DNA, 25 bp, Homo sapien
gaccaagacgggtgtgaccttctca

SEQ ID NO: 5933 - DNA, 25 bp, Homo sapien
cgaaaggggcagtaatctgtcgtta

SEQ ID NO: 5934 - DNA, 25 bp, Homo sapien
cgaaaggggcagaaatctgtcgtta

SEQ ID NO: 5935 - DNA, 25 bp, Homo sapien
cggcggtaagataagactgtgtctc

SEQ ID NO: 5936 - DNA, 25 bp, Homo sapien
cggcggtaagattagactgtgtctc

SEQ ID NO: 5937 - DNA, 25 bp, Homo sapien
tctgtcggtcctttacctgtcactg

SEQ ID NO: 5938 - DNA, 25 bp, Homo sapien
tctgtcggtcctatacctgtcactg

SEQ ID NO: 5939 - DNA, 25 bp, Homo sapien
tcactgagtatagtacacggtatga

SEQ ID NO: 5940 - DNA, 25 bp, Homo sapien
tcactgagtatactacacggtatga

SEQ ID NO: 5941 - DNA, 25 bp, Homo sapien
agtcgactcgattctcctcgggtcc

SEQ ID NO: 5942 - DNA, 25 bp, Homo sapien
agtcgactcgatactcctcgggtcc

SEQ ID NO: 5943 - DNA, 25 bp, Homo sapien
gaagtccgtctggtccaggacgtcc

SEQ ID NO: 5944 - DNA, 25 bp, Homo sapien
gaagtccgtctgctccaggacgtcc

SEQ ID NO: 5945 - DNA, 25 bp, Homo sapien
aacaacgccgggtccgacgaggtga

SEQ ID NO: 5946 - DNA, 25 bp, Homo sapien
aacaacgccgggaccgacgaggtga

SEQ ID NO: 5947 - DNA, 25 bp, Homo sapien
aactctgaggagatcgagggtcacg

SEQ ID NO: 5948 - DNA, 25 bp, Homo sapien
aactctgaggagttcgagggtcacg

SEQ ID NO: 5949 - DNA, 25 bp, Homo sapien
ctatcggtcgtaagtccctgggact

SEQ ID NO: 5950 - DNA, 25 bp, Homo sapien
ctatcggtcgtatgtccctgggact

SEQ ID NO: 5951 - DNA, 25 bp, Homo sapien
ggggaagttcaaggaaaccgtagac

SEQ ID NO: 5952 - DNA, 25 bp, Homo sapien
ggggaagttcaacgaaaccgtagac

SEQ ID NO: 5953 - DNA, 25 bp, Homo sapien
gctcctttcgaggagaaacgactga

SEQ ID NO: 5954 - DNA, 25 bp, Homo sapien
gctcctttcgagcagaaacgactga

SEQ ID NO: 5955 - DNA, 25 bp, Homo sapien
ataactttccggaatgtacgatcta

SEQ ID NO: 5956 - DNA, 25 bp, Homo sapien
ataactttccggtatgtacgatcta

SEQ ID NO: 5957 - DNA, 25 bp, Homo sapien
ccgtaaattcggagaggtgacttca

SEQ ID NO: 5958 - DNA, 25 bp, Homo sapien
ccgtaaattcggtgaggtgacttca

SEQ ID NO: 5959 - DNA, 25 bp, Homo sapien
tcataaatacatttgtggactcctg

SEQ ID NO: 5960 - DNA, 25 bp, Homo sapien
tcataaatacatatgtggactcctg

SEQ ID NO: 5961 - DNA, 25 bp, Homo sapien
taaaagatactttgtcatacacgtg

SEQ ID NO: 5962 - DNA, 25 bp, Homo sapien
taaaagatacttagtcatacacgtg

SEQ ID NO: 5963 - DNA, 25 bp, Homo sapien
gatcaaaggaacgactctacaccga

SEQ ID NO: 5964 - DNA, 25 bp, Homo sapien
gatcaaaggaaccactctacaccga

SEQ ID NO: 5965 - DNA, 25 bp, Homo sapien
gagttaaaggaacgagtcgaacctt

SEQ ID NO: 5966 - DNA, 25 bp, Homo sapien
gagttaaaggaaggagtcgaacctt

SEQ ID NO: 5967 - DNA, 25 bp, Homo sapien
cacagaaaagggaagtcgtgcacca

SEQ ID NO: 5968 - DNA, 25 bp, Homo sapien
cacagaaaagggtagtcgtgcacca

SEQ ID NO: 5969 - DNA, 25 bp, Homo sapien
ccaagtgaaggtgtcgacgaggaaa

SEQ ID NO: 5970 - DNA, 25 bp, Homo sapien
ccaagtgaaggtctcgacgaggaaa

SEQ ID NO: 5971 - DNA, 25 bp, Homo sapien
tcggttagaatttctggagaacctc

SEQ ID NO: 5972 - DNA, 25 bp, Homo sapien
tcggttagaattactggagaacctc

SEQ ID NO: 5973 - DNA, 25 bp, Homo sapien
tagttcagtcgttgttggttcgtcc

SEQ ID NO: 5974 - DNA, 25 bp, Homo sapien
tagttcagtcgtagttggttcgtcc

SEQ ID NO: 5975 - DNA, 25 bp, Homo sapien
gtgctgcatgagtcgcggtcgtagc

SEQ ID NO: 5976 - DNA, 25 bp, Homo sapien
gtgctgcatgagacgcggtcgtagc

SEQ ID NO: 5977 - DNA, 25 bp, Homo sapien
aaagtaacccaacaacagttgtagg

SEQ ID NO: 5978 - DNA, 25 bp, Homo sapien
aaagtaacccaagaacagttgtagg

SEQ ID NO: 5979 - DNA, 25 bp, Homo sapien
actacccgaacttccatactcgagg

SEQ ID NO: 5980 - DNA, 25 bp, Homo sapien
actacccgaactaccatactcgagg

SEQ ID NO: 5981 - DNA, 25 bp, Homo sapien
gtcgtcgacgaaggccgagggactc

SEQ ID NO: 5982 - DNA, 25 bp, Homo sapien
gtcgtcgacgaacgccgagggactc

SEQ ID NO: 5983 - DNA, 25 bp, Homo sapien
cgtcgactcgagtccgtccggacgg

SEQ ID NO: 5984 - DNA, 25 bp, Homo sapien
cgtcgactcgagaccgtccggacgg

SEQ ID NO: 5985 - DNA, 25 bp, Homo sapien
gtcgcacgtccgtaccgggtgtcct

SEQ ID NO: 5986 - DNA, 25 bp, Homo sapien
gtcgcacgtccgaaccgggtgtcct

SEQ ID NO: 5987 - DNA, 25 bp, Homo sapien
gaacgaacctctacacatgtgtcta

SEQ ID NO: 5988 - DNA, 25 bp, Homo sapien
gaacgaacctcttcacatgtgtcta

SEQ ID NO: 5989 - DNA, 25 bp, Homo sapien
aagaacccgtaggaccgtcgtccct

SEQ ID NO: 5990 - DNA, 25 bp, Homo sapien
aagaacccgtagcaccgtcgtccct

SEQ ID NO: 5991 - DNA, 25 bp, Homo sapien
gaatataagctacgaccggtctcct

SEQ ID NO: 5992 - DNA, 25 bp, Homo sapien
gaatataagctaggaccggtctcct

SEQ ID NO: 5993 - DNA, 25 bp, Homo sapien
aagaagtccggctggtaaaccttct

SEQ ID NO: 5994 - DNA, 25 bp, Homo sapien
aagaagtccggcaggtaaaccttct

SEQ ID NO: 5995 - DNA, 25 bp, Homo sapien
agaaagtaccggagaggaaaccgtt

SEQ ID NO: 5996 - DNA, 25 bp, Homo sapien
agaaagtaccggtgaggaaaccgtt

SEQ ID NO: 5997 - DNA, 25 bp, Homo sapien
ctgactcaagatggaggaactcacc

SEQ ID NO: 5998 - DNA, 25 bp, Homo sapien
ctgactcaagatcgaggaactcacc

SEQ ID NO: 5999 - DNA, 25 bp, Homo sapien
tacagtagattttacgatgtttcca

SEQ ID NO: 6000 - DNA, 25 bp, Homo sapien
tacagtagatttaacgatgtttcca

SEQ ID NO: 6001 - DNA, 25 bp, Homo sapien
tgttgcgtttatcaggcggtccgtt

SEQ ID NO: 6002 - DNA, 25 bp, Homo sapien
tgttgcgtttatgaggcggtccgtt

SEQ ID NO: 6003 - DNA, 25 bp, Homo sapien
atcttagacgttctttcctgtcctg

SEQ ID NO: 6004 - DNA, 25 bp, Homo sapien
atcttagacgttgtttcctgtcctg

SEQ ID NO: 6005 - DNA, 25 bp, Homo sapien
cgaaggacccgtaacgagtcaccgt

SEQ ID NO: 6006 - DNA, 25 bp, Homo sapien
cgaaggacccgttacgagtcaccgt

SEQ ID NO: 6007 - DNA, 25 bp, Homo sapien
cgcgttaaggttctcgtcgctcccg

SEQ ID NO: 6008 - DNA, 25 bp, Homo sapien
cgcgttaaggttgtcgtcgctcccg

SEQ ID NO: 6009 - DNA, 25 bp, Homo sapien
tgcgtcgcgggtgtcactcctccta

SEQ ID NO: 6010 - DNA, 25 bp, Homo sapien
tgcgtcgcgggtctcactcctccta

SEQ ID NO: 6011 - DNA, 25 bp, Homo sapien
cgtcactgacggaaacacgcaccag

SEQ ID NO: 6012 - DNA, 25 bp, Homo sapien
cgtcactgacggtaacacgcaccag

SEQ ID NO: 6013 - DNA, 25 bp, Homo sapien
agacccttacgaccaatctccgatg

SEQ ID NO: 6014 - DNA, 25 bp, Homo sapien
agacccttacgagcaatctccgatg

SEQ ID NO: 6015 - DNA, 25 bp, Homo sapien
tgtcaggaactcaagtccgacctcg

SEQ ID NO: 6016 - DNA, 25 bp, Homo sapien
tgtcaggaactctagtccgacctcg

SEQ ID NO: 6017 - DNA, 25 bp, Homo sapien
gtggggacacgcacgacgagacctc

SEQ ID NO: 6018 - DNA, 25 bp, Homo sapien
gtggggacacgctcgacgagacctc

SEQ ID NO: 6019 - DNA, 25 bp, Homo sapien
agtgaagacacctaaacgtatagga

SEQ ID NO: 6020 - DNA, 25 bp, Homo sapien
agtgaagacaccaaaacgtatagga

SEQ ID NO: 6021 - DNA, 25 bp, Homo sapien
aggtatagacccagtaatcttcggg

SEQ ID NO: 6022 - DNA, 25 bp, Homo sapien
aggtatagaccctgtaatcttcggg

SEQ ID NO: 6023 - DNA, 25 bp, Homo sapien
ttcgagcctcttatcgtcgtctgtg

SEQ ID NO: 6024 - DNA, 25 bp, Homo sapien
ttcgagcctcttttcgtcgtctgtg

SEQ ID NO: 6025 - DNA, 25 bp, Homo sapien
gtcctgacttcatatcttctcgtag

SEQ ID NO: 6026 - DNA, 25 bp, Homo sapien
gtcctgacttcaaatcttctcgtag

SEQ ID NO: 6027 - DNA, 25 bp, Homo sapien
gtacacaccgtgtcaaactgaagta

SEQ ID NO: 6028 - DNA, 25 bp, Homo sapien
gtacacaccgtgacaaactgaagta

SEQ ID NO: 6029 - DNA, 25 bp, Homo sapien
gactagaaacctctgaacttcaagt

SEQ ID NO: 6030 - DNA, 25 bp, Homo sapien
gactagaaacctgtgaacttcaagt

SEQ ID NO: 6031 - DNA, 25 bp, Homo sapien
atcaagagacccttctacattcgga

SEQ ID NO: 6032 - DNA, 25 bp, Homo sapien
atcaagagacccatctacattcgga

SEQ ID NO: 6033 - DNA, 25 bp, Homo sapien
agagacctcagttagtaggtcgcta

SEQ ID NO: 6034 - DNA, 25 bp, Homo sapien
agagacctcagtaagtaggtcgcta

SEQ ID NO: 6035 - DNA, 25 bp, Homo sapien
acaggaccgccgacgtctcgggacg

SEQ ID NO: 6036 - DNA, 25 bp, Homo sapien
acaggaccgccgtcgtctcgggacg

SEQ ID NO: 6037 - DNA, 25 bp, Homo sapien
tgggtattgttgtccgtcgtgtacg

SEQ ID NO: 6038 - DNA, 25 bp, Homo sapien
tgggtattgttgaccgtcgtgtacg

SEQ ID NO: 6039 - DNA, 25 bp, Homo sapien
ccgtaaggtatttttgggacggtct

SEQ ID NO: 6040 - DNA, 25 bp, Homo sapien
ccgtaaggtattattgggacggtct

SEQ ID NO: 6041 - DNA, 25 bp, Homo sapien
ggaactgaatccttcgagaactcct

SEQ ID NO: 6042 - DNA, 25 bp, Homo sapien
ggaactgaatccatcgagaactcct

SEQ ID NO: 6043 - DNA, 25 bp, Homo sapien
aaacaagatccgaagacacgctgct

SEQ ID NO: 6044 - DNA, 25 bp, Homo sapien
aaacaagatccgtagacacgctgct

SEQ ID NO: 6045 - DNA, 25 bp, Homo sapien
acgtaaacagggacttcgagcgtca

SEQ ID NO: 6046 - DNA, 25 bp, Homo sapien
acgtaaacagggtcttcgagcgtca

SEQ ID NO: 6047 - DNA, 25 bp, Homo sapien
agaccgaaagggttctattgtcggg

SEQ ID NO: 6048 - DNA, 25 bp, Homo sapien
agaccgaaagggatctattgtcggg

SEQ ID NO: 6049 - DNA, 25 bp, Homo sapien
caccgacgacgagaccaccggggag

SEQ ID NO: 6050 - DNA, 25 bp, Homo sapien
caccgacgacgacaccaccggggag

SEQ ID NO: 6051 - DNA, 25 bp, Homo sapien
ctctcgaccgcaacccgggtagtat

SEQ ID NO: 6052 - DNA, 25 bp, Homo sapien
ctctcgaccgcatcccgggtagtat

SEQ ID NO: 6053 - DNA, 25 bp, Homo sapien
cacacactgcccttccaggtgtagg

SEQ ID NO: 6054 - DNA, 25 bp, Homo sapien
cacacactgcccatccaggtgtagg

SEQ ID NO: 6055 - DNA, 25 bp, Homo sapien
accaggtaggcgatcttccttagta

SEQ ID NO: 6056 - DNA, 25 bp, Homo sapien
accaggtaggcgttcttccttagta

SEQ ID NO: 6057 - DNA, 25 bp, Homo sapien
atcggattctcatgtgtcgacagtc

SEQ ID NO: 6058 - DNA, 25 bp, Homo sapien
atcggattctcaagtgtcgacagtc

SEQ ID NO: 6059 - DNA, 25 bp, Homo sapien
cgaagaattatctcgtagtcacagg

SEQ ID NO: 6060 - DNA, 25 bp, Homo sapien
cgaagaattatcacgtagtcacagg

SEQ ID NO: 6061 - DNA, 25 bp, Homo sapien
gcaacaagtgtgaccatcaaaagag

SEQ ID NO: 6062 - DNA, 25 bp, Homo sapien
gcaacaagtgtgtccatcaaaagag

SEQ ID NO: 6063 - DNA, 25 bp, Homo sapien
ccagtaagtctttcatacataaagg

SEQ ID NO: 6064 - DNA, 25 bp, Homo sapien
ccagtaagtcttacatacataaagg

SEQ ID NO: 6065 - DNA, 25 bp, Homo sapien
accggtcctgtcactgttactcaaa

SEQ ID NO: 6066 - DNA, 25 bp, Homo sapien
accggtcctgtctctgttactcaaa

SEQ ID NO: 6067 - DNA, 25 bp, Homo sapien
gacgtaccaggtaaggaccgccgga

SEQ ID NO: 6068 - DNA, 25 bp, Homo sapien
gacgtaccaggttaggaccgccgga

SEQ ID NO: 6069 - DNA, 25 bp, Homo sapien
actcgcgggtgttcctcgtcccgag

SEQ ID NO: 6070 - DNA, 25 bp, Homo sapien
actcgcgggtgtacctcgtcccgag

SEQ ID NO: 6071 - DNA, 25 bp, Homo sapien
ctttcccggtatctttgtccttcgt

SEQ ID NO: 6072 - DNA, 25 bp, Homo sapien
ctttcccggtatgtttgtccttcgt

SEQ ID NO: 6073 - DNA, 25 bp, Homo sapien
ggacacccgtggttgttccggtgac

SEQ ID NO: 6074 - DNA, 25 bp, Homo sapien
ggacacccgtggatgttccggtgac

SEQ ID NO: 6075 - DNA, 25 bp, Homo sapien
agccgtcgtgtactatattcgttca

SEQ ID NO: 6076 - DNA, 25 bp, Homo sapien
agccgtcgtgtagtatattcgttca

SEQ ID NO: 6077 - DNA, 25 bp, Homo sapien
ttcgcgtacggacagttcctccacg

SEQ ID NO: 6078 - DNA, 25 bp, Homo sapien
ttcgcgtacggagagttcctccacg

SEQ ID NO: 6079 - DNA, 25 bp, Homo sapien
gacaggtgtcacaaaacgtttgact

SEQ ID NO: 6080 - DNA, 25 bp, Homo sapien
gacaggtgtcactaaacgtttgact

SEQ ID NO: 6081 - DNA, 25 bp, Homo sapien
cacgaagacgttctccgtttcgtct

SEQ ID NO: 6082 - DNA, 25 bp, Homo sapien
cacgaagacgttgtccgtttcgtct

SEQ ID NO: 6083 - DNA, 25 bp, Homo sapien
gccctcatcgtaggagtcctcatca

SEQ ID NO: 6084 - DNA, 25 bp, Homo sapien
gccctcatcgtacgagtcctcatca

SEQ ID NO: 6085 - DNA, 25 bp, Homo sapien
agccccgttacagttaccacagtca

SEQ ID NO: 6086 - DNA, 25 bp, Homo sapien
agccccgttacacttaccacagtca

SEQ ID NO: 6087 - DNA, 25 bp, Homo sapien
aggactcttacagactcccctagtc

SEQ ID NO: 6088 - DNA, 25 bp, Homo sapien
aggactcttacacactcccctagtc

SEQ ID NO: 6089 - DNA, 25 bp, Homo sapien
ggggtctaccttcagtctcacccga

SEQ ID NO: 6090 - DNA, 25 bp, Homo sapien
ggggtctaccttgagtctcacccga

SEQ ID NO: 6091 - DNA, 25 bp, Homo sapien
tcggggtcagggttagttcctcttg

SEQ ID NO: 6092 - DNA, 25 bp, Homo sapien
tcggggtcagggatagttcctcttg

SEQ ID NO: 6093 - DNA, 25 bp, Homo sapien
ccgaggctgccgtgactgccggtac

SEQ ID NO: 6094 - DNA, 25 bp, Homo sapien
ccgaggctgccgagactgccggtac

SEQ ID NO: 6095 - DNA, 25 bp, Homo sapien
gacggtccggccgggactccgggac

SEQ ID NO: 6096 - DNA, 25 bp, Homo sapien
gacggtccggcccggactccgggac

SEQ ID NO: 6097 - DNA, 25 bp, Homo sapien
tagtttcggacgtcaccttccaacg

SEQ ID NO: 6098 - DNA, 25 bp, Homo sapien
tagtttcggacgacaccttccaacg

SEQ ID NO: 6099 - DNA, 25 bp, Homo sapien
gcgtcgtacacatatatgcatatag

SEQ ID NO: 6100 - DNA, 25 bp, Homo sapien
gcgtcgtacacaaatatgcatatag

SEQ ID NO: 6101 - DNA, 25 bp, Homo sapien
tctactgtcccaatagtgcggttcg

SEQ ID NO: 6102 - DNA, 25 bp, Homo sapien
tctactgtcccattagtgcggttcg

SEQ ID NO: 6103 - DNA, 25 bp, Homo sapien
aaaacaatgtactaattccgagttg

SEQ ID NO: 6104 - DNA, 25 bp, Homo sapien
aaaacaatgtacaaattccgagttg

SEQ ID NO: 6105 - DNA, 25 bp, Homo sapien
gacggttcctctcctccgagtcgta

SEQ ID NO: 6106 - DNA, 25 bp, Homo sapien
gacggttcctctgctccgagtcgta

SEQ ID NO: 6107 - DNA, 25 bp, Homo sapien
ataacactcgtcctcgtcggcgtcg

SEQ ID NO: 6108 - DNA, 25 bp, Homo sapien
ataacactcgtcgtcgtcggcgtcg

SEQ ID NO: 6109 - DNA, 25 bp, Homo sapien
attcttaagtcctgcgagtctcggg

SEQ ID NO: 6110 - DNA, 25 bp, Homo sapien
attcttaagtccagcgagtctcggg

SEQ ID NO: 6111 - DNA, 25 bp, Homo sapien
cttatgttagacacaaagactggtc

SEQ ID NO: 6112 - DNA, 25 bp, Homo sapien
cttatgttagactcaaagactggtc

SEQ ID NO: 6113 - DNA, 25 bp, Homo sapien
ctcgtaacagcttcgaaccggtgca

SEQ ID NO: 6114 - DNA, 25 bp, Homo sapien
ctcgtaacagctacgaaccggtgca

SEQ ID NO: 6115 - DNA, 25 bp, Homo sapien
ttgtgcattcgcaacgttcgtgtcc

SEQ ID NO: 6116 - DNA, 25 bp, Homo sapien
ttgtgcattcgctacgttcgtgtcc

SEQ ID NO: 6117 - DNA, 25 bp, Homo sapien
attgattacagtcatgtattgtcac

SEQ ID NO: 6118 - DNA, 25 bp, Homo sapien
attgattacagtgatgtattgtcac

SEQ ID NO: 6119 - DNA, 25 bp, Homo sapien
ctacgtgtgctaaacatcgttttca

SEQ ID NO: 6120 - DNA, 25 bp, Homo sapien
ctacgtgtgctatacatcgttttca

SEQ ID NO: 6121 - DNA, 25 bp, Homo sapien
ctactcgtggtgcttaggaaatctc

SEQ ID NO: 6122 - DNA, 25 bp, Homo sapien
ctactcgtggtggttaggaaatctc

SEQ ID NO: 6123 - DNA, 25 bp, Homo sapien
tgttctcggggcagtctcttaggtg

SEQ ID NO: 6124 - DNA, 25 bp, Homo sapien
tgttctcggggctgtctcttaggtg

SEQ ID NO: 6125 - DNA, 25 bp, Homo sapien
tgtctgtcgtcctgggattgatctg

SEQ ID NO: 6126 - DNA, 25 bp, Homo sapien
tgtctgtcgtccagggattgatctg

SEQ ID NO: 6127 - DNA, 25 bp, Homo sapien
gtatcttctctggtttcttgaacgg

SEQ ID NO: 6128 - DNA, 25 bp, Homo sapien
gtatcttctctgctttcttgaacgg

SEQ ID NO: 6129 - DNA, 25 bp, Homo sapien
acctctgtggtatgccgagacagtg

SEQ ID NO: 6130 - DNA, 25 bp, Homo sapien
acctctgtggtaagccgagacagtg

SEQ ID NO: 6131 - DNA, 25 bp, Homo sapien
ccgtttgtaccgaaaggcctgtcgt

SEQ ID NO: 6132 - DNA, 25 bp, Homo sapien
ccgtttgtaccgtaaggcctgtcgt

SEQ ID NO: 6133 - DNA, 25 bp, Homo sapien
cgcgcttgtccatctggtccggcgt

SEQ ID NO: 6134 - DNA, 25 bp, Homo sapien
cgcgcttgtccaactggtccggcgt

SEQ ID NO: 6135 - DNA, 25 bp, Homo sapien
gggtgtcgtctcaaccgacaacttt

SEQ ID NO: 6136 - DNA, 25 bp, Homo sapien
gggtgtcgtctctaccgacaacttt

SEQ ID NO: 6137 - DNA, 25 bp, Homo sapien
caggtgtccgcctacctactggtga

SEQ ID NO: 6138 - DNA, 25 bp, Homo sapien
caggtgtccgccaacctactggtga

SEQ ID NO: 6139 - DNA, 25 bp, Homo sapien
gtataaggtctcacggagtggcgta

SEQ ID NO: 6140 - DNA, 25 bp, Homo sapien
gtataaggtctctcggagtggcgta

SEQ ID NO: 6141 - DNA, 25 bp, Homo sapien
gtggggtcactcttaagtggtacta

SEQ ID NO: 6142 - DNA, 25 bp, Homo sapien
gtggggtcactcataagtggtacta

SEQ ID NO: 6143 - DNA, 25 bp, Homo sapien
ctggggtagaccaaactagcgttac

SEQ ID NO: 6144 - DNA, 25 bp, Homo sapien
ctggggtagacctaactagcgttac

SEQ ID NO: 6145 - DNA, 25 bp, Homo sapien
tctatggagaagaaatcaactgacc

SEQ ID NO: 6146 - DNA, 25 bp, Homo sapien
tctatggagaagtaatcaactgacc

SEQ ID NO: 6147 - DNA, 25 bp, Homo sapien
acccgggtgaaaaaccccgtgacac

SEQ ID NO: 6148 - DNA, 25 bp, Homo sapien
acccgggtgaaataccccgtgacac

SEQ ID NO: 6149 - DNA, 25 bp, Homo sapien
cagagaggtagaattgcaactaccc

SEQ ID NO: 6150 - DNA, 25 bp, Homo sapien
cagagaggtagatttgcaactaccc

SEQ ID NO: 6151 - DNA, 25 bp, Homo sapien
ggaacgaggagctgtcttcaaaccc

SEQ ID NO: 6152 - DNA, 25 bp, Homo sapien
ggaacgaggagcagtcttcaaaccc

SEQ ID NO: 6153 - DNA, 25 bp, Homo sapien
gaagggtaagaggttcatagacgcc

SEQ ID NO: 6154 - DNA, 25 bp, Homo sapien
gaagggtaagagcttcatagacgcc

SEQ ID NO: 6155 - DNA, 25 bp, Homo sapien
aaggattaggacctcctcgttactg

SEQ ID NO: 6156 - DNA, 25 bp, Homo sapien
aaggattaggacgtcctcgttactg

SEQ ID NO: 6157 - DNA, 25 bp, Homo sapien
accgagtttaagacttcacttgttg

SEQ ID NO: 6158 - DNA, 25 bp, Homo sapien
accgagtttaagtcttcacttgttg

SEQ ID NO: 6159 - DNA, 25 bp, Homo sapien
gcagagttgatggttgctctccttt

SEQ ID NO: 6160 - DNA, 25 bp, Homo sapien
gcagagttgatgcttgctctccttt

SEQ ID NO: 6161 - DNA, 25 bp, Homo sapien
ggttaacttaacttccagttctgtg

SEQ ID NO: 6162 - DNA, 25 bp, Homo sapien
ggttaacttaacatccagttctgtg

SEQ ID NO: 6163 - DNA, 25 bp, Homo sapien
aaggaaacgtcaaaaccagatcttc

SEQ ID NO: 6164 - DNA, 25 bp, Homo sapien
aaggaaacgtcataaccagatcttc

SEQ ID NO: 6165 - DNA, 25 bp, Homo sapien
tatataaggtcatcactgaatgtct

SEQ ID NO: 6166 - DNA, 25 bp, Homo sapien
tatataaggtcaacactgaatgtct

SEQ ID NO: 6167 - DNA, 25 bp, Homo sapien
ctagatagtccgaaccacgatgtct

SEQ ID NO: 6168 - DNA, 25 bp, Homo sapien
ctagatagtccgtaccacgatgtct

SEQ ID NO: 6169 - DNA, 25 bp, Homo sapien
ctcgttacccgtcacagtacgggtg

SEQ ID NO: 6170 - DNA, 25 bp, Homo sapien
ctcgttacccgtgacagtacgggtg

SEQ ID NO: 6171 - DNA, 25 bp, Homo sapien
ccgaggtcccgtcaacgacggtgtg

SEQ ID NO: 6172 - DNA, 25 bp, Homo sapien
ccgaggtcccgtgaacgacggtgtg

SEQ ID NO: 6173 - DNA, 25 bp, Homo sapien
gtgacatcctcctttgtttatgtat

SEQ ID NO: 6174 - DNA, 25 bp, Homo sapien
gtgacatcctccattgtttatgtat

SEQ ID NO: 6175 - DNA, 25 bp, Homo sapien
tgctactccgttagtggatattatt

SEQ ID NO: 6176 - DNA, 25 bp, Homo sapien
tgctactccgtttgtggatattatt

SEQ ID NO: 6177 - DNA, 25 bp, Homo sapien
gggatccgtacttacccatttactt

SEQ ID NO: 6178 - DNA, 25 bp, Homo sapien
gggatccgtactaacccatttactt

SEQ ID NO: 6179 - DNA, 25 bp, Homo sapien
tcgtaactcggaacttcactttaca

SEQ ID NO: 6180 - DNA, 25 bp, Homo sapien
tcgtaactcggatcttcactttaca

SEQ ID NO: 6181 - DNA, 25 bp, Homo sapien
tatgtggtactattgttacctttca

SEQ ID NO: 6182 - DNA, 25 bp, Homo sapien
tatgtggtactaatgttacctttca

SEQ ID NO: 6183 - DNA, 25 bp, Homo sapien
tcggagtcgtaaattacagtcccag

SEQ ID NO: 6184 - DNA, 25 bp, Homo sapien
tcggagtcgtaatttacagtcccag

SEQ ID NO: 6185 - DNA, 25 bp, Homo sapien
agtaggaccccgtctctctcgggta

SEQ ID NO: 6186 - DNA, 25 bp, Homo sapien
agtaggaccccgactctctcgggta

SEQ ID NO: 6187 - DNA, 25 bp, Homo sapien
caaaagggccggtccttcgaagtag

SEQ ID NO: 6188 - DNA, 25 bp, Homo sapien
caaaagggccggaccttcgaagtag

SEQ ID NO: 6189 - DNA, 25 bp, Homo sapien
agttaacacacactttcgtagtacg

SEQ ID NO: 6190 - DNA, 25 bp, Homo sapien
agttaacacacagtttcgtagtacg

SEQ ID NO: 6191 - DNA, 25 bp, Homo sapien
gttagttacccaccagtactttgta

SEQ ID NO: 6192 - DNA, 25 bp, Homo sapien
gttagttacccagcagtactttgta

SEQ ID NO: 6193 - DNA, 25 bp, Homo sapien
ttcttgttccgtagaggaataactc

SEQ ID NO: 6194 - DNA, 25 bp, Homo sapien
ttcttgttccgttgaggaataactc

SEQ ID NO: 6195 - DNA, 25 bp, Homo sapien
acgtatctcgggagacgacccgacg

SEQ ID NO: 6196 - DNA, 25 bp, Homo sapien
acgtatctcgggtgacgacccgacg

SEQ ID NO: 6197 - DNA, 25 bp, Homo sapien
gtctctcgttttcgtttacaaagtt

SEQ ID NO: 6198 - DNA, 25 bp, Homo sapien
gtctctcgttttggtttacaaagtt

SEQ ID NO: 6199 - DNA, 25 bp, Homo sapien
ttaatttctatggtgtccacaggat

SEQ ID NO: 6200 - DNA, 25 bp, Homo sapien
ttaatttctatgctgtccacaggat

SEQ ID NO: 6201 - DNA, 25 bp, Homo sapien
gtaaagtttcttctcggcagaggac

SEQ ID NO: 6202 - DNA, 25 bp, Homo sapien
gtaaagtttcttgtcggcagaggac

SEQ ID NO: 6203 - DNA, 25 bp, Homo sapien
cgacccagacaggtcacagaacgtc

SEQ ID NO: 6204 - DNA, 25 bp, Homo sapien
cgacccagacagctcacagaacgtc

SEQ ID NO: 6205 - DNA, 25 bp, Homo sapien
acagactccgggtgaccctacgtct

SEQ ID NO: 6206 - DNA, 25 bp, Homo sapien
acagactccgggagaccctacgtct

SEQ ID NO: 6207 - DNA, 25 bp, Homo sapien
gacagacaccggggagacgatgttg

SEQ ID NO: 6208 - DNA, 25 bp, Homo sapien
gacagacaccggcgagacgatgttg

SEQ ID NO: 6209 - DNA, 25 bp, Homo sapien
cacggttggtgtcgtggtaaacgtt

SEQ ID NO: 6210 - DNA, 25 bp, Homo sapien
cacggttggtgtggtggtaaacgtt

SEQ ID NO: 6211 - DNA, 25 bp, Homo sapien
tacgtgttggctttgtcgattaacc

SEQ ID NO: 6212 - DNA, 25 bp, Homo sapien
tacgtgttggctatgtcgattaacc

SEQ ID NO: 6213 - DNA, 25 bp, Homo sapien
catcgttccaagtgtcacataacag

SEQ ID NO: 6214 - DNA, 25 bp, Homo sapien
catcgttccaagagtcacataacag

SEQ ID NO: 6215 - DNA, 25 bp, Homo sapien
tacgtcgagcgagaccgtcgacaag

SEQ ID NO: 6216 - DNA, 25 bp, Homo sapien
tacgtcgagcgacaccgtcgacaag

SEQ ID NO: 6217 - DNA, 25 bp, Homo sapien
ttcacgaccctaatgtccgcactcg

SEQ ID NO: 6218 - DNA, 25 bp, Homo sapien
ttcacgaccctattgtccgcactcg

SEQ ID NO: 6219 - DNA, 25 bp, Homo sapien
ctctttcagagtctttgttcctgtc

SEQ ID NO: 6220 - DNA, 25 bp, Homo sapien
ctctttcagagtgtttgttcctgtc

SEQ ID NO: 6221 - DNA, 25 bp, Homo sapien
tccgtcttggagaggtgtgaacccc

SEQ ID NO: 6222 - DNA, 25 bp, Homo sapien
tccgtcttggagtggtgtgaacccc

SEQ ID NO: 6223 - DNA, 25 bp, Homo sapien
cttgagaactacgttgtaacatctc

SEQ ID NO: 6224 - DNA, 25 bp, Homo sapien
cttgagaactaccttgtaacatctc

SEQ ID NO: 6225 - DNA, 25 bp, Homo sapien
gcgacacctcattgtcacactgacg

SEQ ID NO: 6226 - DNA, 25 bp, Homo sapien
gcgacacctcatagtcacactgacg

SEQ ID NO: 6227 - DNA, 25 bp, Homo sapien
ggccctcgtacgtacgctgggtact

SEQ ID NO: 6228 - DNA, 25 bp, Homo sapien
ggccctcgtacgaacgctgggtact

SEQ ID NO: 6229 - DNA, 25 bp, Homo sapien
ccagacttgtcgcccgacggtctac

SEQ ID NO: 6230 - DNA, 25 bp, Homo sapien
ccagacttgtcggccgacggtctac

SEQ ID NO: 6231 - DNA, 25 bp, Homo sapien
gggacgtcctctggtacaagagaca

SEQ ID NO: 6232 - DNA, 25 bp, Homo sapien
gggacgtcctctcgtacaagagaca

SEQ ID NO: 6233 - DNA, 25 bp, Homo sapien
tagagtctctgtgtgactggaacgt

SEQ ID NO: 6234 - DNA, 25 bp, Homo sapien
tagagtctctgtctgactggaacgt

SEQ ID NO: 6235 - DNA, 25 bp, Homo sapien
agggtgtgacactcgggccgtccaa

SEQ ID NO: 6236 - DNA, 25 bp, Homo sapien
agggtgtgacacacgggccgtccaa

SEQ ID NO: 6237 - DNA, 25 bp, Homo sapien
gaagagatcacgaagggtttaacca

SEQ ID NO: 6238 - DNA, 25 bp, Homo sapien
gaagagatcacgtagggtttaacca

SEQ ID NO: 6239 - DNA, 25 bp, Homo sapien
gtttgtccctgaagtttaactagtc

SEQ ID NO: 6240 - DNA, 25 bp, Homo sapien
gtttgtccctgatgtttaactagtc

SEQ ID NO: 6241 - DNA, 25 bp, Homo sapien
tagggatcgtgtattcctactcacc

SEQ ID NO: 6242 - DNA, 25 bp, Homo sapien
tagggatcgtgttttcctactcacc

SEQ ID NO: 6243 - DNA, 25 bp, Homo sapien
agtaagctgttcctttctacggcga

SEQ ID NO: 6244 - DNA, 25 bp, Homo sapien
agtaagctgttcgtttctacggcga

SEQ ID NO: 6245 - DNA, 25 bp, Homo sapien
gagaagtctttactcgaaaacgagg

SEQ ID NO: 6246 - DNA, 25 bp, Homo sapien
gagaagtctttagtcgaaaacgagg

SEQ ID NO: 6247 - DNA, 25 bp, Homo sapien
gacaagactggtgagaagtccagaa

SEQ ID NO: 6248 - DNA, 25 bp, Homo sapien
gacaagactggtcagaagtccagaa

SEQ ID NO: 6249 - DNA, 25 bp, Homo sapien
gcaacgtcttttgacaatcgaagac

SEQ ID NO: 6250 - DNA, 25 bp, Homo sapien
gcaacgtcttttcacaatcgaagac

SEQ ID NO: 6251 - DNA, 25 bp, Homo sapien
ggccatcttgtagacgtcgttgagt

SEQ ID NO: 6252 - DNA, 25 bp, Homo sapien
ggccatcttgtacacgtcgttgagt

SEQ ID NO: 6253 - DNA, 25 bp, Homo sapien
gcacagtgtttacgacgtgagatcg

SEQ ID NO: 6254 - DNA, 25 bp, Homo sapien
gcacagtgtttaggacgtgagatcg

SEQ ID NO: 6255 - DNA, 25 bp, Homo sapien
gctacaagtgtctgggtcagtaacg

SEQ ID NO: 6256 - DNA, 25 bp, Homo sapien
gctacaagtgtcagggtcagtaacg

SEQ ID NO: 6257 - DNA, 25 bp, Homo sapien
aaagatccaattcagaagtccttgt

SEQ ID NO: 6258 - DNA, 25 bp, Homo sapien
aaagatccaattgagaagtccttgt

SEQ ID NO: 6259 - DNA, 25 bp, Homo sapien
gaggttagaatctacgagaggcttc

SEQ ID NO: 6260 - DNA, 25 bp, Homo sapien
gaggttagaatcaacgagaggcttc

SEQ ID NO: 6261 - DNA, 25 bp, Homo sapien
aatggtcactcactacagagttcac

SEQ ID NO: 6262 - DNA, 25 bp, Homo sapien
aatggtcactcagtacagagttcac

SEQ ID NO: 6263 - DNA, 25 bp, Homo sapien
tgtctcatggaacacccgtaatcca

SEQ ID NO: 6264 - DNA, 25 bp, Homo sapien
tgtctcatggaagacccgtaatcca

SEQ ID NO: 6265 - DNA, 25 bp, Homo sapien
tgttcgagggaagtcaggaagtccc

SEQ ID NO: 6266 - DNA, 25 bp, Homo sapien
tgttcgagggaactcaggaagtccc

SEQ ID NO: 6267 - DNA, 25 bp, Homo sapien
gtcgttcataacaactggaaccatc

SEQ ID NO: 6268 - DNA, 25 bp, Homo sapien
gtcgttcataactactggaaccatc

SEQ ID NO: 6269 - DNA, 25 bp, Homo sapien
gtgtgaaccgtgtcgggtcccccgt

SEQ ID NO: 6270 - DNA, 25 bp, Homo sapien
gtgtgaaccgtgacgggtcccccgt

SEQ ID NO: 6271 - DNA, 25 bp, Homo sapien
tcgtctacaaaggtgcatcaattgt

SEQ ID NO: 6272 - DNA, 25 bp, Homo sapien
tcgtctacaaagctgcatcaattgt

SEQ ID NO: 6273 - DNA, 25 bp, Homo sapien
cgttcaggtatgaccagaaacatgt

SEQ ID NO: 6274 - DNA, 25 bp, Homo sapien
cgttcaggtatgtccagaaacatgt

SEQ ID NO: 6275 - DNA, 25 bp, Homo sapien
ctgatgtagaagaggtccatcgtat

SEQ ID NO: 6276 - DNA, 25 bp, Homo sapien
ctgatgtagaagtggtccatcgtat

SEQ ID NO: 6277 - DNA, 25 bp, Homo sapien
gtgtgtaagagaggtgtttcatgtt

SEQ ID NO: 6278 - DNA, 25 bp, Homo sapien
gtgtgtaagagacgtgtttcatgtt

SEQ ID NO: 6279 - DNA, 25 bp, Homo sapien
ggtgtaaatactactcagtcacaac

SEQ ID NO: 6280 - DNA, 25 bp, Homo sapien
ggtgtaaatacttctcagtcacaac

SEQ ID NO: 6281 - DNA, 25 bp, Homo sapien
gtccacctccgctgagtacaagtag

SEQ ID NO: 6282 - DNA, 25 bp, Homo sapien
gtccacctccgcagagtacaagtag

SEQ ID NO: 6283 - DNA, 25 bp, Homo sapien
cgtaggtccttgacgacataagacg

SEQ ID NO: 6284 - DNA, 25 bp, Homo sapien
cgtaggtccttgtcgacataagacg

SEQ ID NO: 6285 - DNA, 25 bp, Homo sapien
aagtgctcggtttctcgatacatgt

SEQ ID NO: 6286 - DNA, 25 bp, Homo sapien
aagtgctcggttactcgatacatgt

SEQ ID NO: 6287 - DNA, 25 bp, Homo sapien
ttgaactgtgtcaccgtgtaaaatg

SEQ ID NO: 6288 - DNA, 25 bp, Homo sapien
ttgaactgtgtctccgtgtaaaatg

SEQ ID NO: 6289 - DNA, 25 bp, Homo sapien
tcggtgtaccggttaccaaatgaaa

SEQ ID NO: 6290 - DNA, 25 bp, Homo sapien
tcggtgtaccggataccaaatgaaa

SEQ ID NO: 6291 - DNA, 25 bp, Homo sapien
cttggtgtcgtctgtcatagaacat

SEQ ID NO: 6292 - DNA, 25 bp, Homo sapien
cttggtgtcgtcagtcatagaacat

SEQ ID NO: 6293 - DNA, 25 bp, Homo sapien
ctccactatcgtaacgaaagcacat

SEQ ID NO: 6294 - DNA, 25 bp, Homo sapien
ctccactatcgttacgaaagcacat

SEQ ID NO: 6295 - DNA, 25 bp, Homo sapien
aagttcggtttcataagacaactca

SEQ ID NO: 6296 - DNA, 25 bp, Homo sapien
aagttcggtttcttaagacaactca

SEQ ID NO: 6297 - DNA, 25 bp, Homo sapien
aacccgatttactgaatctccctgt

SEQ ID NO: 6298 - DNA, 25 bp, Homo sapien
aacccgatttacagaatctccctgt

SEQ ID NO: 6299 - DNA, 25 bp, Homo sapien
actcagttagtagaacgtttacaca

SEQ ID NO: 6300 - DNA, 25 bp, Homo sapien
actcagttagtacaacgtttacaca

SEQ ID NO: 6301 - DNA, 25 bp, Homo sapien
caggttgtagaaggtacttataccc

SEQ ID NO: 6302 - DNA, 25 bp, Homo sapien
caggttgtagaacgtacttataccc

SEQ ID NO: 6303 - DNA, 25 bp, Homo sapien
agagcgtcgttgttcccttctcggc

SEQ ID NO: 6304 - DNA, 25 bp, Homo sapien
agagcgtcgttgatcccttctcggc

SEQ ID NO: 6305 - DNA, 25 bp, Homo sapien
gtaaataactactttgtaatctctg

SEQ ID NO: 6306 - DNA, 25 bp, Homo sapien
gtaaataactacattgtaatctctg

SEQ ID NO: 6307 - DNA, 25 bp, Homo sapien
gttcctagaccctggtgtaccctca

SEQ ID NO: 6308 - DNA, 25 bp, Homo sapien
gttcctagacccaggtgtaccctca

SEQ ID NO: 6309 - DNA, 25 bp, Homo sapien
acacgtgacacagatgacgacccac

SEQ ID NO: 6310 - DNA, 25 bp, Homo sapien
acacgtgacacacatgacgacccac

SEQ ID NO: 6311 - DNA, 25 bp, Homo sapien
tagtagtaaatgtatagtcccgtac

SEQ ID NO: 6312 - DNA, 25 bp, Homo sapien
tagtagtaaatgaatagtcccgtac

SEQ ID NO: 6313 - DNA, 25 bp, Homo sapien
actacgtagtaaaagaattctcctg

SEQ ID NO: 6314 - DNA, 25 bp, Homo sapien
actacgtagtaatagaattctcctg

SEQ ID NO: 6315 - DNA, 25 bp, Homo sapien
ttagctgtcgttgcacgactggacg

SEQ ID NO: 6316 - DNA, 25 bp, Homo sapien
ttagctgtcgttccacgactggacg

SEQ ID NO: 6317 - DNA, 25 bp, Homo sapien
gctaggagcagtccacgtccagtcg

SEQ ID NO: 6318 - DNA, 25 bp, Homo sapien
gctaggagcagtgcacgtccagtcg

SEQ ID NO: 6319 - DNA, 25 bp, Homo sapien
ctcataaggacgttgtacaaccgaa

SEQ ID NO: 6320 - DNA, 25 bp, Homo sapien
ctcataaggacgatgtacaaccgaa

SEQ ID NO: 6321 - DNA, 25 bp, Homo sapien
cagtggtgtataacggacgacagaa

SEQ ID NO: 6322 - DNA, 25 bp, Homo sapien
cagtggtgtatatcggacgacagaa

SEQ ID NO: 6323 - DNA, 25 bp, Homo sapien
gacagtagattaatcgtaaacaaca

SEQ ID NO: 6324 - DNA, 25 bp, Homo sapien
gacagtagattattcgtaaacaaca

SEQ ID NO: 6325 - DNA, 25 bp, Homo sapien
atgctacaactacgacaaccaagtg

SEQ ID NO: 6326 - DNA, 25 bp, Homo sapien
atgctacaactaggacaaccaagtg

SEQ ID NO: 6327 - DNA, 25 bp, Homo sapien
tatatagtagtgaaagtctactacc

SEQ ID NO: 6328 - DNA, 25 bp, Homo sapien
tatatagtagtgtaagtctactacc

SEQ ID NO: 6329 - DNA, 25 bp, Homo sapien
tgtgagatacatgtatgtatctccc

SEQ ID NO: 6330 - DNA, 25 bp, Homo sapien
tgtgagatacatctatgtatctccc

SEQ ID NO: 6331 - DNA, 25 bp, Homo sapien
gtagaagactttagtacatataccc

SEQ ID NO: 6332 - DNA, 25 bp, Homo sapien
gtagaagacttttgtacatataccc

SEQ ID NO: 6333 - DNA, 25 bp, Homo sapien
cttgagataatctagacataacagg

SEQ ID NO: 6334 - DNA, 25 bp, Homo sapien
cttgagataatcaagacataacagg

SEQ ID NO: 6335 - DNA, 25 bp, Homo sapien
agtgacaagacaagggacgtccgag

SEQ ID NO: 6336 - DNA, 25 bp, Homo sapien
agtgacaagacatgggacgtccgag

SEQ ID NO: 6337 - DNA, 25 bp, Homo sapien
ggtgaataacttgaactcgcactgt

SEQ ID NO: 6338 - DNA, 25 bp, Homo sapien
ggtgaataacttcaactcgcactgt

SEQ ID NO: 6339 - DNA, 25 bp, Homo sapien
gagtacatgacgaccccgtgtcact

SEQ ID NO: 6340 - DNA, 25 bp, Homo sapien
gagtacatgacgtccccgtgtcact

SEQ ID NO: 6341 - DNA, 25 bp, Homo sapien
ctgagtccccgaacagaccgaggac

SEQ ID NO: 6342 - DNA, 25 bp, Homo sapien
ctgagtccccgatcagaccgaggac

SEQ ID NO: 6343 - DNA, 25 bp, Homo sapien
ctcggcacctacttcgcactggtga

SEQ ID NO: 6344 - DNA, 25 bp, Homo sapien
ctcggcacctacatcgcactggtga

SEQ ID NO: 6345 - DNA, 25 bp, Homo sapien
cagggaatctacttctgagcgggtg

SEQ ID NO: 6346 - DNA, 25 bp, Homo sapien
cagggaatctacatctgagcgggtg

SEQ ID NO: 6347 - DNA, 25 bp, Homo sapien
acggagatctcattttacacaagtg

SEQ ID NO: 6348 - DNA, 25 bp, Homo sapien
acggagatctcaatttacacaagtg

SEQ ID NO: 6349 - DNA, 25 bp, Homo sapien
gacttcccagaacattccgaaagag

SEQ ID NO: 6350 - DNA, 25 bp, Homo sapien
gacttcccagaagattccgaaagag

SEQ ID NO: 6351 - DNA, 25 bp, Homo sapien
ttctaggatgtcttacttaaatacg

SEQ ID NO: 6352 - DNA, 25 bp, Homo sapien
ttctaggatgtcatacttaaatacg

SEQ ID NO: 6353 - DNA, 25 bp, Homo sapien
aaactggttgtcagtcgactcaaac

SEQ ID NO: 6354 - DNA, 25 bp, Homo sapien
aaactggttgtctgtcgactcaaac

SEQ ID NO: 6355 - DNA, 25 bp, Homo sapien
aataagtctgtttagtctatgaaac

SEQ ID NO: 6356 - DNA, 25 bp, Homo sapien
aataagtctgttaagtctatgaaac

SEQ ID NO: 6357 - DNA, 25 bp, Homo sapien
actataccgtttacggttcggagac

SEQ ID NO: 6358 - DNA, 25 bp, Homo sapien
actataccgttttcggttcggagac

SEQ ID NO: 6359 - DNA, 25 bp, Homo sapien
ccgtccgtccgttcgaggcgaggtc

SEQ ID NO: 6360 - DNA, 25 bp, Homo sapien
ccgtccgtccgtacgaggcgaggtc

SEQ ID NO: 6361 - DNA, 25 bp, Homo sapien
accggtacttcagtggtcacgtggt

SEQ ID NO: 6362 - DNA, 25 bp, Homo sapien
accggtacttcactggtcacgtggt

SEQ ID NO: 6363 - DNA, 25 bp, Homo sapien
ccgaacttctacagtcacgtctggg

SEQ ID NO: 6364 - DNA, 25 bp, Homo sapien
ccgaacttctactgtcacgtctggg

SEQ ID NO: 6365 - DNA, 25 bp, Homo sapien
cgtagaattcgtttcactgacgatg

SEQ ID NO: 6366 - DNA, 25 bp, Homo sapien
cgtagaattcgtatcactgacgatg

SEQ ID NO: 6367 - DNA, 25 bp, Homo sapien
acgtcggacacgttctacaaggggt

SEQ ID NO: 6368 - DNA, 25 bp, Homo sapien
acgtcggacacgatctacaaggggt

SEQ ID NO: 6369 - DNA, 25 bp, Homo sapien
tccgtgaacgtatccatgcgtcgcg

SEQ ID NO: 6370 - DNA, 25 bp, Homo sapien
tccgtgaacgtaaccatgcgtcgcg

SEQ ID NO: 6371 - DNA, 25 bp, Homo sapien
cgcaacagagacctctaccacttag

SEQ ID NO: 6372 - DNA, 25 bp, Homo sapien
cgcaacagagacgtctaccacttag

SEQ ID NO: 6373 - DNA, 25 bp, Homo sapien
ctgagacaagaaccatctaaaagac

SEQ ID NO: 6374 - DNA, 25 bp, Homo sapien
ctgagacaagaagcatctaaaagac

SEQ ID NO: 6375 - DNA, 25 bp, Homo sapien
tcagaaaagagactttctgataacg

SEQ ID NO: 6376 - DNA, 25 bp, Homo sapien
tcagaaaagagagtttctgataacg

SEQ ID NO: 6377 - DNA, 25 bp, Homo sapien
tacggacgagacgtatgtctggtcc

SEQ ID NO: 6378 - DNA, 25 bp, Homo sapien
tacggacgagacctatgtctggtcc

SEQ ID NO: 6379 - DNA, 25 bp, Homo sapien
cgagactataggtttacttcgtccg

SEQ ID NO: 6380 - DNA, 25 bp, Homo sapien
cgagactataggattacttcgtccg

SEQ ID NO: 6381 - DNA, 25 bp, Homo sapien
gacactacagtatgttcttctgttc

SEQ ID NO: 6382 - DNA, 25 bp, Homo sapien
gacactacagtaagttcttctgttc

SEQ ID NO: 6383 - DNA, 25 bp, Homo sapien
gaccaggtataaagttcgtctactc

SEQ ID NO: 6384 - DNA, 25 bp, Homo sapien
gaccaggtataatgttcgtctactc

SEQ ID NO: 6385 - DNA, 25 bp, Homo sapien
ctgtcagtgttaactcatctgactc

SEQ ID NO: 6386 - DNA, 25 bp, Homo sapien
ctgtcagtgttatctcatctgactc

SEQ ID NO: 6387 - DNA, 25 bp, Homo sapien
ttcacgacgtgactcagacgtccct

SEQ ID NO: 6388 - DNA, 25 bp, Homo sapien
ttcacgacgtgagtcagacgtccct

SEQ ID NO: 6389 - DNA, 25 bp, Homo sapien
gaagtacctagtgaggtcttttaca

SEQ ID NO: 6390 - DNA, 25 bp, Homo sapien
gaagtacctagtcaggtcttttaca

SEQ ID NO: 6391 - DNA, 25 bp, Homo sapien
tttagtccacttgaacgtcttaaag

SEQ ID NO: 6392 - DNA, 25 bp, Homo sapien
tttagtccacttcaacgtcttaaag

SEQ ID NO: 6393 - DNA, 25 bp, Homo sapien
tcgtcgttctttagacgtccaccac

SEQ ID NO: 6394 - DNA, 25 bp, Homo sapien
tcgtcgttcttttgacgtccaccac

SEQ ID NO: 6395 - DNA, 25 bp, Homo sapien
ttatacttgtgtgtaagtccaacac

SEQ ID NO: 6396 - DNA, 25 bp, Homo sapien
ttatacttgtgtctaagtccaacac

SEQ ID NO: 6397 - DNA, 25 bp, Homo sapien
acgtcttactcccggctcatctacg

SEQ ID NO: 6398 - DNA, 25 bp, Homo sapien
acgtcttactccgggctcatctacg

SEQ ID NO: 6399 - DNA, 25 bp, Homo sapien
ggtcggtcgatggtactctacacgt

SEQ ID NO: 6400 - DNA, 25 bp, Homo sapien
ggtcggtcgatgctactctacacgt

SEQ ID NO: 6401 - DNA, 25 bp, Homo sapien
tgagtgtctggtcacctaacctatt

SEQ ID NO: 6402 - DNA, 25 bp, Homo sapien
tgagtgtctggtgacctaacctatt

SEQ ID NO: 6403 - DNA, 25 bp, Homo sapien
cgtagtgtctgtgcacctgaatcta

SEQ ID NO: 6404 - DNA, 25 bp, Homo sapien
cgtagtgtctgtccacctgaatcta

SEQ ID NO: 6405 - DNA, 25 bp, Homo sapien
aagggacccgtatccgttgacacta

SEQ ID NO: 6406 - DNA, 25 bp, Homo sapien
aagggacccgtaaccgttgacacta

SEQ ID NO: 6407 - DNA, 25 bp, Homo sapien
caagtcgaagacaaagcgaaaccac

SEQ ID NO: 6408 - DNA, 25 bp, Homo sapien
caagtcgaagactaagcgaaaccac

SEQ ID NO: 6409 - DNA, 25 bp, Homo sapien
tccgtgttgcttaagcgagaacccg

SEQ ID NO: 6410 - DNA, 25 bp, Homo sapien
tccgtgttgctttagcgagaacccg

SEQ ID NO: 6411 - DNA, 25 bp, Homo sapien
ggagtctccgtcgtcttagacacca

SEQ ID NO: 6412 - DNA, 25 bp, Homo sapien
ggagtctccgtcctcttagacacca

SEQ ID NO: 6413 - DNA, 25 bp, Homo sapien
agtggtgttgcccgtctctccagca

SEQ ID NO: 6414 - DNA, 25 bp, Homo sapien
agtggtgttgccggtctctccagca

SEQ ID NO: 6415 - DNA, 25 bp, Homo sapien
ttcagaccgtctcctgtcctgagaa

SEQ ID NO: 6416 - DNA, 25 bp, Homo sapien
ttcagaccgtctgctgtcctgagaa

SEQ ID NO: 6417 - DNA, 25 bp, Homo sapien
actaagtctgactagtgtactaatg

SEQ ID NO: 6418 - DNA, 25 bp, Homo sapien
actaagtctgacaagtgtactaatg

SEQ ID NO: 6419 - DNA, 25 bp, Homo sapien
ggaaagtcctcgacgtcctagagat

SEQ ID NO: 6420 - DNA, 25 bp, Homo sapien
ggaaagtcctcgtcgtcctagagat

SEQ ID NO: 6421 - DNA, 25 bp, Homo sapien
cgtgtgtcccgtgatcacggtagac

SEQ ID NO: 6422 - DNA, 25 bp, Homo sapien
cgtgtgtcccgtcatcacggtagac

SEQ ID NO: 6423 - DNA, 25 bp, Homo sapien
aaagggtgtatcaggacggaccgtc

SEQ ID NO: 6424 - DNA, 25 bp, Homo sapien
aaagggtgtatctggacggaccgtc

SEQ ID NO: 6425 - DNA, 25 bp, Homo sapien
aatgttcgtgttgtgactccgttct

SEQ ID NO: 6426 - DNA, 25 bp, Homo sapien
aatgttcgtgttctgactccgttct

SEQ ID NO: 6427 - DNA, 25 bp, Homo sapien
ctatgtgtttcgttctaaccttcgt

SEQ ID NO: 6428 - DNA, 25 bp, Homo sapien
ctatgtgtttcgatctaaccttcgt

SEQ ID NO: 6429 - DNA, 25 bp, Homo sapien
cagtcgtcgtttcactttcgacaag

SEQ ID NO: 6430 - DNA, 25 bp, Homo sapien
cagtcgtcgtttgactttcgacaag

SEQ ID NO: 6431 - DNA, 25 bp, Homo sapien
caagtctggtccttctctgacgaag

SEQ ID NO: 6432 - DNA, 25 bp, Homo sapien
caagtctggtccatctctgacgaag

SEQ ID NO: 6433 - DNA, 25 bp, Homo sapien
acttagtgtgacaatcatgtcagag

SEQ ID NO: 6434 - DNA, 25 bp, Homo sapien
acttagtgtgactatcatgtcagag

SEQ ID NO: 6435 - DNA, 25 bp, Homo sapien
aacgagtgtcatcaacggtcgagag

SEQ ID NO: 6436 - DNA, 25 bp, Homo sapien
aacgagtgtcatgaacggtcgagag

SEQ ID NO: 6437 - DNA, 25 bp, Homo sapien
gactgaggtaggactgaaggacctt

SEQ ID NO: 6438 - DNA, 25 bp, Homo sapien
gactgaggtaggtctgaaggacctt

SEQ ID NO: 6439 - DNA, 25 bp, Homo sapien
agacgaataaggagaactagtcctt

SEQ ID NO: 6440 - DNA, 25 bp, Homo sapien
agacgaataaggtgaactagtcctt

SEQ ID NO: 6441 - DNA, 25 bp, Homo sapien
tgtaatatcggagtaagtacacttc

SEQ ID NO: 6442 - DNA, 25 bp, Homo sapien
tgtaatatcggactaagtacacttc

SEQ ID NO: 6443 - DNA, 25 bp, Homo sapien
ttgacacctgatacttgacacgatt

SEQ ID NO: 6444 - DNA, 25 bp, Homo sapien
ttgacacctgattcttgacacgatt

SEQ ID NO: 6445 - DNA, 25 bp, Homo sapien
gtttaatccataagttgactcagtc

SEQ ID NO: 6446 - DNA, 25 bp, Homo sapien
gtttaatccatatgttgactcagtc

SEQ ID NO: 6447 - DNA, 25 bp, Homo sapien
tataggttttacgtcgtgagtaacc

SEQ ID NO: 6448 - DNA, 25 bp, Homo sapien
tataggttttacctcgtgagtaacc

SEQ ID NO: 6449 - DNA, 25 bp, Homo sapien
acagtgtctattgtagtgagaccta

SEQ ID NO: 6450 - DNA, 25 bp, Homo sapien
acagtgtctattctagtgagaccta

SEQ ID NO: 6451 - DNA, 25 bp, Homo sapien
ggaccgttcttttagtaataacaac

SEQ ID NO: 6452 - DNA, 25 bp, Homo sapien
ggaccgttctttaagtaataacaac

SEQ ID NO: 6453 - DNA, 25 bp, Homo sapien
ggtcgtcggcgttcgcgaaagaatt

SEQ ID NO: 6454 - DNA, 25 bp, Homo sapien
ggtcgtcggcgtacgcgaaagaatt

SEQ ID NO: 6455 - DNA, 25 bp, Homo sapien
tttcgagcttcgagtaagacacgtt

SEQ ID NO: 6456 - DNA, 25 bp, Homo sapien
tttcgagcttcgtgtaagacacgtt

SEQ ID NO: 6457 - DNA, 25 bp, Homo sapien
tatgttgtgctatttcgaaacacta

SEQ ID NO: 6458 - DNA, 25 bp, Homo sapien
tatgttgtgctaattcgaaacacta

SEQ ID NO: 6459 - DNA, 25 bp, Homo sapien
taggtaaagattcgtcaacacacta

SEQ ID NO: 6460 - DNA, 25 bp, Homo sapien
taggtaaagattggtcaacacacta

SEQ ID NO: 6461 - DNA, 25 bp, Homo sapien
gtctcagagttttactagaactata

SEQ ID NO: 6462 - DNA, 25 bp, Homo sapien
gtctcagagtttaactagaactata

SEQ ID NO: 6463 - DNA, 25 bp, Homo sapien
gggttctaactctaagaatacttat

SEQ ID NO: 6464 - DNA, 25 bp, Homo sapien
gggttctaactcaaagaatacttat

SEQ ID NO: 6465 - DNA, 25 bp, Homo sapien
aggtcgtagtaccaaaaactcactt

SEQ ID NO: 6466 - DNA, 25 bp, Homo sapien
aggtcgtagtacgaaaaactcactt

SEQ ID NO: 6467 - DNA, 25 bp, Homo sapien
tggaggaagacacagactactcgta

SEQ ID NO: 6468 - DNA, 25 bp, Homo sapien
tggaggaagacagagactactcgta

SEQ ID NO: 6469 - DNA, 25 bp, Homo sapien
ccgggaccgacgttgagcacgagtc

SEQ ID NO: 6470 - DNA, 25 bp, Homo sapien
ccgggaccgacgatgagcacgagtc

SEQ ID NO: 6471 - DNA, 25 bp, Homo sapien
ggtttgggaccttttagtgtctgtc

SEQ ID NO: 6472 - DNA, 25 bp, Homo sapien
ggtttgggacctattagtgtctgtc

SEQ ID NO: 6473 - DNA, 25 bp, Homo sapien
ctcggtgtaccgaatcattgtcgac

SEQ ID NO: 6474 - DNA, 25 bp, Homo sapien
ctcggtgtaccgtatcattgtcgac

SEQ ID NO: 6475 - DNA, 25 bp, Homo sapien
tctcacggagtcccgtcgccttggc

SEQ ID NO: 6476 - DNA, 25 bp, Homo sapien
tctcacggagtcgcgtcgccttggc

SEQ ID NO: 6477 - DNA, 25 bp, Homo sapien
ttgctgaggtcagcatgttatgtac

SEQ ID NO: 6478 - DNA, 25 bp, Homo sapien
ttgctgaggtcaccatgttatgtac

SEQ ID NO: 6479 - DNA, 25 bp, Homo sapien
ggagtccagttaatctttacgttct

SEQ ID NO: 6480 - DNA, 25 bp, Homo sapien
ggagtccagttattctttacgttct

SEQ ID NO: 6481 - DNA, 25 bp, Homo sapien
gtgtcacgtacacgtacatattcat

SEQ ID NO: 6482 - DNA, 25 bp, Homo sapien
gtgtcacgtacaggtacatattcat

SEQ ID NO: 6483 - DNA, 25 bp, Homo sapien
cggtgtcgactttgtgtttgtcagt

SEQ ID NO: 6484 - DNA, 25 bp, Homo sapien
cggtgtcgacttagtgtttgtcagt

SEQ ID NO: 6485 - DNA, 25 bp, Homo sapien
cgtcacgactaaagtcgttactcaa

SEQ ID NO: 6486 - DNA, 25 bp, Homo sapien
cgtcacgactaatgtcgttactcaa

SEQ ID NO: 6487 - DNA, 25 bp, Homo sapien
cgtccgtagaaacgtctatccgtag

SEQ ID NO: 6488 - DNA, 25 bp, Homo sapien
cgtccgtagaaaggtctatccgtag

SEQ ID NO: 6489 - DNA, 25 bp, Homo sapien
tcgtactacagtaacaggtctcaca

SEQ ID NO: 6490 - DNA, 25 bp, Homo sapien
tcgtactacagttacaggtctcaca

SEQ ID NO: 6491 - DNA, 25 bp, Homo sapien
aagaaaacacacttgagaggtcaca

SEQ ID NO: 6492 - DNA, 25 bp, Homo sapien
aagaaaacacacatgagaggtcaca

SEQ ID NO: 6493 - DNA, 25 bp, Homo sapien
ggaaggaacactttagtgtcgacga

SEQ ID NO: 6494 - DNA, 25 bp, Homo sapien
ggaaggaacactatagtgtcgacga

SEQ ID NO: 6495 - DNA, 25 bp, Homo sapien
cggatagttagaatccttctttagt

SEQ ID NO: 6496 - DNA, 25 bp, Homo sapien
cggatagttagattccttctttagt

SEQ ID NO: 6497 - DNA, 25 bp, Homo sapien
gtctgtgttcgatgtccgccactcc

SEQ ID NO: 6498 - DNA, 25 bp, Homo sapien
gtctgtgttcgaagtccgccactcc

SEQ ID NO: 6499 - DNA, 25 bp, Homo sapien
tttgtgataacgtccgactcaccct

SEQ ID NO: 6500 - DNA, 25 bp, Homo sapien
tttgtgataacgaccgactcaccct

SEQ ID NO: 6501 - DNA, 25 bp, Homo sapien
ttttgtgtatccattgctcagtctc

SEQ ID NO: 6502 - DNA, 25 bp, Homo sapien
ttttgtgtatcctttgctcagtctc

SEQ ID NO: 6503 - DNA, 25 bp, Homo sapien
tttgtgtatcctagggtagagtcct

SEQ ID NO: 6504 - DNA, 25 bp, Homo sapien
tttgtgtatccttgggtagagtcct

SEQ ID NO: 6505 - DNA, 25 bp, Homo sapien
ctagaggaggactcggtacgagaac

SEQ ID NO: 6506 - DNA, 25 bp, Homo sapien
ctagaggaggacacggtacgagaac

SEQ ID NO: 6507 - DNA, 25 bp, Homo sapien
gactcggtcactcagataacgtacc

SEQ ID NO: 6508 - DNA, 25 bp, Homo sapien
gactcggtcactgagataacgtacc

SEQ ID NO: 6509 - DNA, 25 bp, Homo sapien
aggtatcgttaagttacatactaac

SEQ ID NO: 6510 - DNA, 25 bp, Homo sapien
aggtatcgttaacttacatactaac

SEQ ID NO: 6511 - DNA, 25 bp, Homo sapien
agacttcgactccagtgtcaaacat

SEQ ID NO: 6512 - DNA, 25 bp, Homo sapien
agacttcgactcgagtgtcaaacat

SEQ ID NO: 6513 - DNA, 25 bp, Homo sapien
gtacttgaccggaagtcaacggagt

SEQ ID NO: 6514 - DNA, 25 bp, Homo sapien
gtacttgaccggtagtcaacggagt

SEQ ID NO: 6515 - DNA, 25 bp, Homo sapien
atcttgatacttacgtacacaggag

SEQ ID NO: 6516 - DNA, 25 bp, Homo sapien
atcttgatactttcgtacacaggag

SEQ ID NO: 6517 - DNA, 25 bp, Homo sapien
catgtacctcttatcgagacagaga

SEQ ID NO: 6518 - DNA, 25 bp, Homo sapien
catgtacctcttttcgagacagaga

SEQ ID NO: 6519 - DNA, 25 bp, Homo sapien
aaacctcgtcgagtctatgacgata

SEQ ID NO: 6520 - DNA, 25 bp, Homo sapien
aaacctcgtcgactctatgacgata

SEQ ID NO: 6521 - DNA, 25 bp, Homo sapien
gtcaccgtaactcgttatgacacac

SEQ ID NO: 6522 - DNA, 25 bp, Homo sapien
gtcaccgtaactggttatgacacac

SEQ ID NO: 6523 - DNA, 25 bp, Homo sapien
ttatgtcactcttgtcgtacccgat

SEQ ID NO: 6524 - DNA, 25 bp, Homo sapien
ttatgtcactctagtcgtacccgat

SEQ ID NO: 6525 - DNA, 25 bp, Homo sapien
ctcgttattgacgttgtcagaccga

SEQ ID NO: 6526 - DNA, 25 bp, Homo sapien
ctcgttattgaccttgtcagaccga

SEQ ID NO: 6527 - DNA, 25 bp, Homo sapien
gtctgtcttcgttcttagggattag

SEQ ID NO: 6528 - DNA, 25 bp, Homo sapien
gtctgtcttcgtacttagggattag

SEQ ID NO: 6529 - DNA, 25 bp, Homo sapien
gtctgtatttcctactggtctagta

SEQ ID NO: 6530 - DNA, 25 bp, Homo sapien
gtctgtatttccaactggtctagta

SEQ ID NO: 6531 - DNA, 25 bp, Homo sapien
ggtacttgtttcagaggaatcacac

SEQ ID NO: 6532 - DNA, 25 bp, Homo sapien
ggtacttgtttctgaggaatcacac

SEQ ID NO: 6533 - DNA, 25 bp, Homo sapien
ttctcaattttgtgacctcgtcgct

SEQ ID NO: 6534 - DNA, 25 bp, Homo sapien
ttctcaattttgagacctcgtcgct

SEQ ID NO: 6535 - DNA, 25 bp, Homo sapien
tcctgtctcctatgctggctatctt

SEQ ID NO: 6536 - DNA, 25 bp, Homo sapien
tcctgtctcctaagctggctatctt

SEQ ID NO: 6537 - DNA, 25 bp, Homo sapien
tgtgttccctcttcggtcggtgaac

SEQ ID NO: 6538 - DNA, 25 bp, Homo sapien
tgtgttccctctacggtcggtgaac

SEQ ID NO: 6539 - DNA, 25 bp, Homo sapien
gttttaagagttaagtccgtcagac

SEQ ID NO: 6540 - DNA, 25 bp, Homo sapien
gttttaagagtttagtccgtcagac

SEQ ID NO: 6541 - DNA, 25 bp, Homo sapien
gtggtttcacactcaaagtgtcaac

SEQ ID NO: 6542 - DNA, 25 bp, Homo sapien
gtggtttcacacacaaagtgtcaac

SEQ ID NO: 6543 - DNA, 25 bp, Homo sapien
gagatttcgtaatgataaaccctct

SEQ ID NO: 6544 - DNA, 25 bp, Homo sapien
gagatttcgtaaagataaaccctct

SEQ ID NO: 6545 - DNA, 25 bp, Homo sapien
ggactcgtacctaccgaaaactcaa

SEQ ID NO: 6546 - DNA, 25 bp, Homo sapien
ggactcgtaccttccgaaaactcaa

SEQ ID NO: 6547 - DNA, 25 bp, Homo sapien
gagactactcataacgactatcgaa

SEQ ID NO: 6548 - DNA, 25 bp, Homo sapien
gagactactcattacgactatcgaa

SEQ ID NO: 6549 - DNA, 25 bp, Homo sapien
ttgtgttacgacatacagttcgtaa

SEQ ID NO: 6550 - DNA, 25 bp, Homo sapien
ttgtgttacgacttacagttcgtaa

SEQ ID NO: 6551 - DNA, 25 bp, Homo sapien
agattccggttacgtgactcgtagt

SEQ ID NO: 6552 - DNA, 25 bp, Homo sapien
agattccggttaggtgactcgtagt

SEQ ID NO: 6553 - DNA, 25 bp, Homo sapien
gtcctacttctctttttggtctgag

SEQ ID NO: 6554 - DNA, 25 bp, Homo sapien
gtcctacttctcattttggtctgag

SEQ ID NO: 6555 - DNA, 25 bp, Homo sapien
ggtttattccttccatctgatacga

SEQ ID NO: 6556 - DNA, 25 bp, Homo sapien
ggtttattccttgcatctgatacga

SEQ ID NO: 6557 - DNA, 25 bp, Homo sapien
gtccttcgtccagaccagcagtaga

SEQ ID NO: 6558 - DNA, 25 bp, Homo sapien
gtccttcgtccacaccagcagtaga

SEQ ID NO: 6559 - DNA, 25 bp, Homo sapien
ttagttacgtcagtacagtccaaag

SEQ ID NO: 6560 - DNA, 25 bp, Homo sapien
ttagttacgtcactacagtccaaag

SEQ ID NO: 6561 - DNA, 25 bp, Homo sapien
ttactagtgatagatgcttactggt

SEQ ID NO: 6562 - DNA, 25 bp, Homo sapien
ttactagtgatacatgcttactggt

SEQ ID NO: 6563 - DNA, 25 bp, Homo sapien
tccgacgacgataggtcccttctgt

SEQ ID NO: 6564 - DNA, 25 bp, Homo sapien
tccgacgacgattggtcccttctgt

SEQ ID NO: 6565 - DNA, 25 bp, Homo sapien
gggtagagatcttcgtcaatgctac

SEQ ID NO: 6566 - DNA, 25 bp, Homo sapien
gggtagagatctacgtcaatgctac

SEQ ID NO: 6567 - DNA, 25 bp, Homo sapien
cggtgtaggagtacggaccatgtca

SEQ ID NO: 6568 - DNA, 25 bp, Homo sapien
cggtgtaggagttcggaccatgtca

SEQ ID NO: 6569 - DNA, 25 bp, Homo sapien
aaagagcggcaggagactcttgtgc

SEQ ID NO: 6570 - DNA, 25 bp, Homo sapien
aaagagcggcagcagactcttgtgc

SEQ ID NO: 6571 - DNA, 25 bp, Homo sapien
gaggtcggaagaagtccgttgttac

SEQ ID NO: 6572 - DNA, 25 bp, Homo sapien
gaggtcggaagatgtccgttgttac

SEQ ID NO: 6573 - DNA, 25 bp, Homo sapien
tgtacgatacatttacatgtcctcg

SEQ ID NO: 6574 - DNA, 25 bp, Homo sapien
tgtacgatacatatacatgtcctcg

SEQ ID NO: 6575 - DNA, 25 bp, Homo sapien
gacgtagagatagtcacgagctgtt

SEQ ID NO: 6576 - DNA, 25 bp, Homo sapien
gacgtagagatactcacgagctgtt

SEQ ID NO: 6577 - DNA, 25 bp, Homo sapien
ttaccacagtaatctcccggtgtcc

SEQ ID NO: 6578 - DNA, 25 bp, Homo sapien
ttaccacagtaaactcccggtgtcc

SEQ ID NO: 6579 - DNA, 25 bp, Homo sapien
gtgaacgcgtgcagctccaggccgc

SEQ ID NO: 6580 - DNA, 25 bp, Homo sapien
gtgaacgcgtgctgctccaggccgc

SEQ ID NO: 6581 - DNA, 25 bp, Homo sapien
tacacacgtccgaggccgaggagga

SEQ ID NO: 6582 - DNA, 25 bp, Homo sapien
tacacacgtccgtggccgaggagga

SEQ ID NO: 6583 - DNA, 25 bp, Homo sapien
gaagtccgaggagctcgaggaccta

SEQ ID NO: 6584 - DNA, 25 bp, Homo sapien
gaagtccgaggacctcgaggaccta

SEQ ID NO: 6585 - DNA, 25 bp, Homo sapien
gaagtggtagtagtcacccgggact

SEQ ID NO: 6586 - DNA, 25 bp, Homo sapien
gaagtggtagtactcacccgggact

SEQ ID NO: 6587 - DNA, 25 bp, Homo sapien
ggaacagtccaaccacaaccgagct

SEQ ID NO: 6588 - DNA, 25 bp, Homo sapien
ggaacagtccaagcacaaccgagct

SEQ ID NO: 6589 - DNA, 25 bp, Homo sapien
gtgcctcatcgagaggaacgccgac

SEQ ID NO: 6590 - DNA, 25 bp, Homo sapien
gtgcctcatcgacaggaacgccgac

SEQ ID NO: 6591 - DNA, 25 bp, Homo sapien
acactttcaggagagtcgacgtcga

SEQ ID NO: 6592 - DNA, 25 bp, Homo sapien
acactttcaggacagtcgacgtcga

SEQ ID NO: 6593 - DNA, 25 bp, Homo sapien
aattacgttaaaggtgtacgtacca

SEQ ID NO: 6594 - DNA, 25 bp, Homo sapien
aattacgttaaacgtgtacgtacca

SEQ ID NO: 6595 - DNA, 25 bp, Homo sapien
cagttatacacaatatgggactcca

SEQ ID NO: 6596 - DNA, 25 bp, Homo sapien
cagttatacacattatgggactcca

SEQ ID NO: 6597 - DNA, 25 bp, Homo sapien
aataacgatattagtaccaccgacg

SEQ ID NO: 6598 - DNA, 25 bp, Homo sapien
aataacgatatttgtaccaccgacg

SEQ ID NO: 6599 - DNA, 25 bp, Homo sapien
atcaaaggaacgactctacaccgat

SEQ ID NO: 6600 - DNA, 25 bp, Homo sapien
atcaaaggaacgtctctacaccgat

SEQ ID NO: 6601 - DNA, 25 bp, Homo sapien
attcaagagaagatatgacactctt

SEQ ID NO: 6602 - DNA, 25 bp, Homo sapien
attcaagagaagttatgacactctt

SEQ ID NO: 6603 - DNA, 25 bp, Homo sapien
cgaaataaaggaaacgttgtcccat

SEQ ID NO: 6604 - DNA, 25 bp, Homo sapien
cgaaataaaggatacgttgtcccat

SEQ ID NO: 6605 - DNA, 25 bp, Homo sapien
cgaaacggatggtctgagagtgcaa

SEQ ID NO: 6606 - DNA, 25 bp, Homo sapien
cgaaacggatggactgagagtgcaa

SEQ ID NO: 6607 - DNA, 25 bp, Homo sapien
tggtctgaagttttgaagactaccc

SEQ ID NO: 6608 - DNA, 25 bp, Homo sapien
tggtctgaagttatgaagactaccc

SEQ ID NO: 6609 - DNA, 25 bp, Homo sapien
aagttcgagtcgtttgaggatgtcc

SEQ ID NO: 6610 - DNA, 25 bp, Homo sapien
aagttcgagtcgattgaggatgtcc

SEQ ID NO: 6611 - DNA, 25 bp, Homo sapien
gtgactcgacctggaagcgtggacc

SEQ ID NO: 6612 - DNA, 25 bp, Homo sapien
gtgactcgacctcgaagcgtggacc

SEQ ID NO: 6613 - DNA, 25 bp, Homo sapien
atacaactccaacgacaagttaagg

SEQ ID NO: 6614 - DNA, 25 bp, Homo sapien
atacaactccaaggacaagttaagg

SEQ ID NO: 6615 - DNA, 25 bp, Homo sapien
aaacccatattcagactctacgggt

SEQ ID NO: 6616 - DNA, 25 bp, Homo sapien
aaacccatattctgactctacgggt

SEQ ID NO: 6617 - DNA, 25 bp, Homo sapien
agactcgaggagtccgatcgcgacc

SEQ ID NO: 6618 - DNA, 25 bp, Homo sapien
agactcgaggagaccgatcgcgacc

SEQ ID NO: 6619 - DNA, 25 bp, Homo sapien
cgtctagtcagaacttcaggacgcg

SEQ ID NO: 6620 - DNA, 25 bp, Homo sapien
cgtctagtcagatcttcaggacgcg

SEQ ID NO: 6621 - DNA, 25 bp, Homo sapien
gggtcacgtccgtatctcgggcact

SEQ ID NO: 6622 - DNA, 25 bp, Homo sapien
gggtcacgtccgaatctcgggcact

SEQ ID NO: 6623 - DNA, 25 bp, Homo sapien
gacacgaccgccaacaacttgtaca

SEQ ID NO: 6624 - DNA, 25 bp, Homo sapien
gacacgaccgcctacaacttgtaca

SEQ ID NO: 6625 - DNA, 25 bp, Homo sapien
gtaaaactccgagtactcgttctca

SEQ ID NO: 6626 - DNA, 25 bp, Homo sapien
gtaaaactccgactactcgttctca

SEQ ID NO: 6627 - DNA, 25 bp, Homo sapien
gaacatacagcgaaacctgtctcct

SEQ ID NO: 6628 - DNA, 25 bp, Homo sapien
gaacatacagcgtaacctgtctcct

SEQ ID NO: 6629 - DNA, 25 bp, Homo sapien
atgaagacacggtgtgaatcctgtt

SEQ ID NO: 6630 - DNA, 25 bp, Homo sapien
atgaagacacggagtgaatcctgtt

SEQ ID NO: 6631 - DNA, 25 bp, Homo sapien
acgaagaccgtgagggaaacttagt

SEQ ID NO: 6632 - DNA, 25 bp, Homo sapien
acgaagaccgtgtgggaaacttagt

SEQ ID NO: 6633 - DNA, 25 bp, Homo sapien
gactataagatggaggacacacgaa

SEQ ID NO: 6634 - DNA, 25 bp, Homo sapien
gactataagatgcaggacacacgaa

SEQ ID NO: 6635 - DNA, 25 bp, Homo sapien
ttctataagttttcggtgttcacca

SEQ ID NO: 6636 - DNA, 25 bp, Homo sapien
ttctataagtttacggtgttcacca

SEQ ID NO: 6637 - DNA, 25 bp, Homo sapien
atttagatttaccaggcggactcga

SEQ ID NO: 6638 - DNA, 25 bp, Homo sapien
atttagatttacgaggcggactcga

SEQ ID NO: 6639 - DNA, 25 bp, Homo sapien
atttaggtttcgtgtcactttctag

SEQ ID NO: 6640 - DNA, 25 bp, Homo sapien
atttaggtttcgagtcactttctag

SEQ ID NO: 6641 - DNA, 25 bp, Homo sapien
agacagtcgactccttacatcccgt

SEQ ID NO: 6642 - DNA, 25 bp, Homo sapien
agacagtcgactgcttacatcccgt

SEQ ID NO: 6643 - DNA, 25 bp, Homo sapien
cgctaccggagtctgtcatctaccg

SEQ ID NO: 6644 - DNA, 25 bp, Homo sapien
cgctaccggagtgtgtcatctaccg

SEQ ID NO: 6645 - DNA, 25 bp, Homo sapien
ttcgtcgtcaggtttcactccttcc

SEQ ID NO: 6646 - DNA, 25 bp, Homo sapien
ttcgtcgtcaggattcactccttcc

SEQ ID NO: 6647 - DNA, 25 bp, Homo sapien
tcgttactgagactaacagttccta

SEQ ID NO: 6648 - DNA, 25 bp, Homo sapien
tcgttactgagagtaacagttccta

SEQ ID NO: 6649 - DNA, 25 bp, Homo sapien
gactactttgacgaatcttcgatat

SEQ ID NO: 6650 - DNA, 25 bp, Homo sapien
gactactttgaccaatcttcgatat

SEQ ID NO: 6651 - DNA, 25 bp, Homo sapien
ccgtcggggtaccaagttgtcctcg

SEQ ID NO: 6652 - DNA, 25 bp, Homo sapien
ccgtcggggtacgaagttgtcctcg

SEQ ID NO: 6653 - DNA, 25 bp, Homo sapien
tgtcgggaagacacgacagctactg

SEQ ID NO: 6654 - DNA, 25 bp, Homo sapien
tgtcgggaagactcgacagctactg

SEQ ID NO: 6655 - DNA, 25 bp, Homo sapien
tgaagcgaccgagaccgtatcgtga

SEQ ID NO: 6656 - DNA, 25 bp, Homo sapien
tgaagcgaccgacaccgtatcgtga

SEQ ID NO: 6657 - DNA, 25 bp, Homo sapien
agaagaacccgtcatcgtgtcggac

SEQ ID NO: 6658 - DNA, 25 bp, Homo sapien
agaagaacccgtgatcgtgtcggac

SEQ ID NO: 6659 - DNA, 25 bp, Homo sapien
gtcgacggccttctcgtagcgtgtg

SEQ ID NO: 6660 - DNA, 25 bp, Homo sapien
gtcgacggccttgtcgtagcgtgtg

SEQ ID NO: 6661 - DNA, 25 bp, Homo sapien
ttccttcttcataatctagctgtag

SEQ ID NO: 6662 - DNA, 25 bp, Homo sapien
ttccttcttcattatctagctgtag

SEQ ID NO: 6663 - DNA, 25 bp, Homo sapien
gtacactcctgtcacaaatttcgtg

SEQ ID NO: 6664 - DNA, 25 bp, Homo sapien
gtacactcctgtgacaaatttcgtg

SEQ ID NO: 6665 - DNA, 25 bp, Homo sapien
gatcaagtacttttgaacttcctgt

SEQ ID NO: 6666 - DNA, 25 bp, Homo sapien
gatcaagtacttatgaacttcctgt

SEQ ID NO: 6667 - DNA, 25 bp, Homo sapien
cgaagagaccaaacagcttccgtag

SEQ ID NO: 6668 - DNA, 25 bp, Homo sapien
cgaagagaccaatcagcttccgtag

SEQ ID NO: 6669 - DNA, 25 bp, Homo sapien
aacggaccaacttggtgtcgtcgta

SEQ ID NO: 6670 - DNA, 25 bp, Homo sapien
aacggaccaactaggtgtcgtcgta

SEQ ID NO: 6671 - DNA, 25 bp, Homo sapien
aaaaggacccacacgtctcggtccg

SEQ ID NO: 6672 - DNA, 25 bp, Homo sapien
aaaaggacccactcgtctcggtccg

SEQ ID NO: 6673 - DNA, 25 bp, Homo sapien
ttgggtattgttgtccgtcgtgtac

SEQ ID NO: 6674 - DNA, 25 bp, Homo sapien
ttgggtattgttctccgtcgtgtac

SEQ ID NO: 6675 - DNA, 25 bp, Homo sapien
gtagaggagttgtttccgagctgtc

SEQ ID NO: 6676 - DNA, 25 bp, Homo sapien
gtagaggagttgattccgagctgtc

SEQ ID NO: 6677 - DNA, 25 bp, Homo sapien
ggaagtgatttcgtcgataactgac

SEQ ID NO: 6678 - DNA, 25 bp, Homo sapien
ggaagtgatttcctcgataactgac

SEQ ID NO: 6679 - DNA, 25 bp, Homo sapien
aaggtaagttccacgaaactagtct

SEQ ID NO: 6680 - DNA, 25 bp, Homo sapien
aaggtaagttcctcgaaactagtct

SEQ ID NO: 6681 - DNA, 25 bp, Homo sapien
cgaagaacggagactgacgggtgac

SEQ ID NO: 6682 - DNA, 25 bp, Homo sapien
cgaagaacggagtctgacgggtgac

SEQ ID NO: 6683 - DNA, 25 bp, Homo sapien
taagccaaagggttccgtcggggat

SEQ ID NO: 6684 - DNA, 25 bp, Homo sapien
taagccaaagggatccgtcggggat

SEQ ID NO: 6685 - DNA, 25 bp, Homo sapien
cgactacggacataccccggcgggt

SEQ ID NO: 6686 - DNA, 25 bp, Homo sapien
cgactacggacaaaccccggcgggt

SEQ ID NO: 6687 - DNA, 25 bp, Homo sapien
ctcgcacgcgcaaccgtcggtggat

SEQ ID NO: 6688 - DNA, 25 bp, Homo sapien
ctcgcacgcgcatccgtcggtggat

SEQ ID NO: 6689 - DNA, 25 bp, Homo sapien
cttctcgacccttcgacaggtgtga

SEQ ID NO: 6690 - DNA, 25 bp, Homo sapien
cttctcgaccctacgacaggtgtga

SEQ ID NO: 6691 - DNA, 25 bp, Homo sapien
aacagagaccacacgtcccttagta

SEQ ID NO: 6692 - DNA, 25 bp, Homo sapien
aacagagaccactcgtcccttagta

SEQ ID NO: 6693 - DNA, 25 bp, Homo sapien
caccgagaccctctagtgtctaaga

SEQ ID NO: 6694 - DNA, 25 bp, Homo sapien
caccgagaccctgtagtgtctaaga

SEQ ID NO: 6695 - DNA, 25 bp, Homo sapien
gaagaattatctcgtagtcacaggt

SEQ ID NO: 6696 - DNA, 25 bp, Homo sapien
gaagaattatctggtagtcacaggt

SEQ ID NO: 6697 - DNA, 25 bp, Homo sapien
ataaagtagtcgaccatcagctaaa

SEQ ID NO: 6698 - DNA, 25 bp, Homo sapien
ataaagtagtcgtccatcagctaaa

SEQ ID NO: 6699 - DNA, 25 bp, Homo sapien
ccaaagagtcatgactaacaaaatg

SEQ ID NO: 6700 - DNA, 25 bp, Homo sapien
ccaaagagtcatcactaacaaaatg

SEQ ID NO: 6701 - DNA, 25 bp, Homo sapien
actcgagcctccacttaacggaaac

SEQ ID NO: 6702 - DNA, 25 bp, Homo sapien
actcgagcctcctcttaacggaaac

SEQ ID NO: 6703 - DNA, 25 bp, Homo sapien
tgagtccgacggtcggaccctctga

SEQ ID NO: 6704 - DNA, 25 bp, Homo sapien
tgagtccgacggacggaccctctga

SEQ ID NO: 6705 - DNA, 25 bp, Homo sapien
cgacccggggtgactcgaccagtag

SEQ ID NO: 6706 - DNA, 25 bp, Homo sapien
cgacccggggtgtctcgaccagtag

SEQ ID NO: 6707 - DNA, 25 bp, Homo sapien
ttctcgaccggaaggctcttccttc

SEQ ID NO: 6708 - DNA, 25 bp, Homo sapien
ttctcgaccggatggctcttccttc

SEQ ID NO: 6709 - DNA, 25 bp, Homo sapien
tgtccctgtgtgtgtctccggtggt

SEQ ID NO: 6710 - DNA, 25 bp, Homo sapien
tgtccctgtgtgagtctccggtggt

SEQ ID NO: 6711 - DNA, 25 bp, Homo sapien
ccgtcgtcgtaggtagttgtctttt

SEQ ID NO: 6712 - DNA, 25 bp, Homo sapien
ccgtcgtcgtagctagttgtctttt

SEQ ID NO: 6713 - DNA, 25 bp, Homo sapien
ctcgtcgaggtgcagtttctactcc

SEQ ID NO: 6714 - DNA, 25 bp, Homo sapien
ctcgtcgaggtggagtttctactcc

SEQ ID NO: 6715 - DNA, 25 bp, Homo sapien
agactcggagtgaaagatgttccct

SEQ ID NO: 6716 - DNA, 25 bp, Homo sapien
agactcggagtgtaagatgttccct

SEQ ID NO: 6717 - DNA, 25 bp, Homo sapien
ccgacaggttcgaccgttactcgac

SEQ ID NO: 6718 - DNA, 25 bp, Homo sapien
ccgacaggttcgtccgttactcgac

SEQ ID NO: 6719 - DNA, 25 bp, Homo sapien
actcccagtgtagtaaccgtgatca

SEQ ID NO: 6720 - DNA, 25 bp, Homo sapien
actcccagtgtactaaccgtgatca

SEQ ID NO: 6721 - DNA, 25 bp, Homo sapien
ggtcccgcgtcaggtatcctggtca

SEQ ID NO: 6722 - DNA, 25 bp, Homo sapien
ggtcccgcgtcacgtatcctggtca

SEQ ID NO: 6723 - DNA, 25 bp, Homo sapien
gaggacccgtgagaccccgctgtac

SEQ ID NO: 6724 - DNA, 25 bp, Homo sapien
gaggacccgtgacaccccgctgtac

SEQ ID NO: 6725 - DNA, 25 bp, Homo sapien
ggggagtccctacagtccagttgac

SEQ ID NO: 6726 - DNA, 25 bp, Homo sapien
ggggagtccctagagtccagttgac

SEQ ID NO: 6727 - DNA, 25 bp, Homo sapien
tcgggctcaggtctcgtgcctctta

SEQ ID NO: 6728 - DNA, 25 bp, Homo sapien
tcgggctcaggtgtcgtgcctctta

SEQ ID NO: 6729 - DNA, 25 bp, Homo sapien
ccgagaactggctcgcgttcagata

SEQ ID NO: 6730 - DNA, 25 bp, Homo sapien
ccgagaactggcacgcgttcagata

SEQ ID NO: 6731 - DNA, 25 bp, Homo sapien
ccacgtaccggatcgggatccggga

SEQ ID NO: 6732 - DNA, 25 bp, Homo sapien
ccacgtaccggaacgggatccggga

SEQ ID NO: 6733 - DNA, 25 bp, Homo sapien
ccttatcgaagagaccttccacgag

SEQ ID NO: 6734 - DNA, 25 bp, Homo sapien
ccttatcgaagacaccttccacgag

SEQ ID NO: 6735 - DNA, 25 bp, Homo sapien
gtcctgacacattatatgttcatag

SEQ ID NO: 6736 - DNA, 25 bp, Homo sapien
gtcctgacacataatatgttcatag

SEQ ID NO: 6737 - DNA, 25 bp, Homo sapien
ttctactgtcccaatagtgcggttc

SEQ ID NO: 6738 - DNA, 25 bp, Homo sapien
ttctactgtccctatagtgcggttc

SEQ ID NO: 6739 - DNA, 25 bp, Homo sapien
atcaagttccataatatcgagatcg

SEQ ID NO: 6740 - DNA, 25 bp, Homo sapien
atcaagttccattatatcgagatcg

SEQ ID NO: 6741 - DNA, 25 bp, Homo sapien
gactagttcccgtctctcgagttag

SEQ ID NO: 6742 - DNA, 25 bp, Homo sapien
gactagttcccgactctcgagttag

SEQ ID NO: 6743 - DNA, 25 bp, Homo sapien
aaagtatcctctaccgtcggtcgag

SEQ ID NO: 6744 - DNA, 25 bp, Homo sapien
aaagtatcctcttccgtcggtcgag

SEQ ID NO: 6745 - DNA, 25 bp, Homo sapien
cgtagtactgcctgtcggtccgggt

SEQ ID NO: 6746 - DNA, 25 bp, Homo sapien
cgtagtactgccagtcggtccgggt

SEQ ID NO: 6747 - DNA, 25 bp, Homo sapien
gtgacgacgctcatacagtatgggt

SEQ ID NO: 6748 - DNA, 25 bp, Homo sapien
gtgacgacgctcttacagtatgggt

SEQ ID NO: 6749 - DNA, 25 bp, Homo sapien
gggtagaacgcgttcaaccagtgca

SEQ ID NO: 6750 - DNA, 25 bp, Homo sapien
gggtagaacgcgatcaaccagtgca

SEQ ID NO: 6751 - DNA, 25 bp, Homo sapien
tgggagtcgtccaacagtcggtcac

SEQ ID NO: 6752 - DNA, 25 bp, Homo sapien
tgggagtcgtcctacagtcggtcac

SEQ ID NO: 6753 - DNA, 25 bp, Homo sapien
ttgattacagtcatgtattgtcact

SEQ ID NO: 6754 - DNA, 25 bp, Homo sapien
ttgattacagtcttgtattgtcact

SEQ ID NO: 6755 - DNA, 25 bp, Homo sapien
ttctcgttcaatcctcgtttgtcat

SEQ ID NO: 6756 - DNA, 25 bp, Homo sapien
ttctcgttcaatgctcgtttgtcat

SEQ ID NO: 6757 - DNA, 25 bp, Homo sapien
ttacgtgtcgtactgatggattcta

SEQ ID NO: 6758 - DNA, 25 bp, Homo sapien
ttacgtgtcgtagtgatggattcta

SEQ ID NO: 6759 - DNA, 25 bp, Homo sapien
tgtgccgtgaggagcttatgtcagt

SEQ ID NO: 6760 - DNA, 25 bp, Homo sapien
tgtgccgtgaggtgcttatgtcagt

SEQ ID NO: 6761 - DNA, 25 bp, Homo sapien
ttcttcgtcggtggaatctggtcta

SEQ ID NO: 6762 - DNA, 25 bp, Homo sapien
ttcttcgtcggtcgaatctggtcta

SEQ ID NO: 6763 - DNA, 25 bp, Homo sapien
gtattatcagtgttttctttgactg

SEQ ID NO: 6764 - DNA, 25 bp, Homo sapien
gtattatcagtgatttctttgactg

SEQ ID NO: 6765 - DNA, 25 bp, Homo sapien
ccttaggtagtaggtctcacgaatg

SEQ ID NO: 6766 - DNA, 25 bp, Homo sapien
ccttaggtagtacgtctcacgaatg

SEQ ID NO: 6767 - DNA, 25 bp, Homo sapien
tcttgagccgtaaccggaccatcgt

SEQ ID NO: 6768 - DNA, 25 bp, Homo sapien
tcttgagccgtatccggaccatcgt

SEQ ID NO: 6769 - DNA, 25 bp, Homo sapien
gcgcgcttgtccatctggtccggcg

SEQ ID NO: 6770 - DNA, 25 bp, Homo sapien
gcgcgcttgtccttctggtccggcg

SEQ ID NO: 6771 - DNA, 25 bp, Homo sapien
tgggttgtctcgataagaccctgta

SEQ ID NO: 6772 - DNA, 25 bp, Homo sapien
tgggttgtctcgttaagaccctgta

SEQ ID NO: 6773 - DNA, 25 bp, Homo sapien
tgttatcgtccttaatactgctgta

SEQ ID NO: 6774 - DNA, 25 bp, Homo sapien
tgttatcgtcctaaatactgctgta

SEQ ID NO: 6775 - DNA, 25 bp, Homo sapien
agtatcgggtccaagaactagccta

SEQ ID NO: 6776 - DNA, 25 bp, Homo sapien
agtatcgggtcctagaactagccta

SEQ ID NO: 6777 - DNA, 25 bp, Homo sapien
agatcggttcctagtaagaggacta

SEQ ID NO: 6778 - DNA, 25 bp, Homo sapien
agatcggttccttgtaagaggacta

SEQ ID NO: 6779 - DNA, 25 bp, Homo sapien
ctagtgggaacacatcaggtactac

SEQ ID NO: 6780 - DNA, 25 bp, Homo sapien
ctagtgggaacagatcaggtactac

SEQ ID NO: 6781 - DNA, 25 bp, Homo sapien
tatcggtactaagaatcaatgtacc

SEQ ID NO: 6782 - DNA, 25 bp, Homo sapien
tatcggtactaacaatcaatgtacc

SEQ ID NO: 6783 - DNA, 25 bp, Homo sapien
gtccctggacaaaaatccatgacat

SEQ ID NO: 6784 - DNA, 25 bp, Homo sapien
gtccctggacaataatccatgacat

SEQ ID NO: 6785 - DNA, 25 bp, Homo sapien
ctaagtagggtactttcaactccct

SEQ ID NO: 6786 - DNA, 25 bp, Homo sapien
ctaagtagggtagtttcaactccct

SEQ ID NO: 6787 - DNA, 25 bp, Homo sapien
aaagtggtcgagatgtacaagaccc

SEQ ID NO: 6788 - DNA, 25 bp, Homo sapien
aaagtggtcgagttgtacaagaccc

SEQ ID NO: 6789 - DNA, 25 bp, Homo sapien
gaagggcaagaggtccacagacgcc

SEQ ID NO: 6790 - DNA, 25 bp, Homo sapien
gaagggcaagagctccacagacgcc

SEQ ID NO: 6791 - DNA, 25 bp, Homo sapien
gagctatagagactcctacgcctac

SEQ ID NO: 6792 - DNA, 25 bp, Homo sapien
gagctatagagagtcctacgcctac

SEQ ID NO: 6793 - DNA, 25 bp, Homo sapien
acatagttttagagttcccttatag

SEQ ID NO: 6794 - DNA, 25 bp, Homo sapien
acatagttttagtgttcccttatag

SEQ ID NO: 6795 - DNA, 25 bp, Homo sapien
tcgggttgatggattccgtccttct

SEQ ID NO: 6796 - DNA, 25 bp, Homo sapien
tcgggttgatggtttccgtccttct

SEQ ID NO: 6797 - DNA, 25 bp, Homo sapien
aggttactcgttttattccgtttgg

SEQ ID NO: 6798 - DNA, 25 bp, Homo sapien
aggttactcgttatattccgtttgg

SEQ ID NO: 6799 - DNA, 25 bp, Homo sapien
aggaagttcacatagtcacatcttg

SEQ ID NO: 6800 - DNA, 25 bp, Homo sapien
aggaagttcacaaagtcacatcttg

SEQ ID NO: 6801 - DNA, 25 bp, Homo sapien
aataagcgtcatttcgtattgtacg

SEQ ID NO: 6802 - DNA, 25 bp, Homo sapien
aataagcgtcatatcgtattgtacg

SEQ ID NO: 6803 - DNA, 25 bp, Homo sapien
ccatgagtgtctttaccacttgtct

SEQ ID NO: 6804 - DNA, 25 bp, Homo sapien
ccatgagtgtctataccacttgtct

SEQ ID NO: 6805 - DNA, 25 bp, Homo sapien
ctgagtcactgttacagtcgttgtg

SEQ ID NO: 6806 - DNA, 25 bp, Homo sapien
ctgagtcactgtaacagtcgttgtg

SEQ ID NO: 6807 - DNA, 25 bp, Homo sapien
aaccgtggtccagagagacgttgag

SEQ ID NO: 6808 - DNA, 25 bp, Homo sapien
aaccgtggtccacagagacgttgag

SEQ ID NO: 6809 - DNA, 25 bp, Homo sapien
actatcctcgtctccgttatatgta

SEQ ID NO: 6810 - DNA, 25 bp, Homo sapien
actatcctcgtcaccgttatatgta

SEQ ID NO: 6811 - DNA, 25 bp, Homo sapien
tgcatccgttttcgtctatctgtgt

SEQ ID NO: 6812 - DNA, 25 bp, Homo sapien
tgcatccgttttggtctatctgtgt

SEQ ID NO: 6813 - DNA, 25 bp, Homo sapien
ggcgataccgtatccgccaattggt

SEQ ID NO: 6814 - DNA, 25 bp, Homo sapien
ggcgataccgtaaccgccaattggt

SEQ ID NO: 6815 - DNA, 25 bp, Homo sapien
tctctatccgaacctcctatttaac

SEQ ID NO: 6816 - DNA, 25 bp, Homo sapien
tctctatccgaagctcctatttaac

SEQ ID NO: 6817 - DNA, 25 bp, Homo sapien
tactggtactacattgttccttgaa

SEQ ID NO: 6818 - DNA, 25 bp, Homo sapien
tactggtactactttgttccttgaa

SEQ ID NO: 6819 - DNA, 25 bp, Homo sapien
gtcgagatctaatcttaccttcaag

SEQ ID NO: 6820 - DNA, 25 bp, Homo sapien
gtcgagatctaaacttaccttcaag

SEQ ID NO: 6821 - DNA, 25 bp, Homo sapien
agtggaacaacgaatcccgtggagt

SEQ ID NO: 6822 - DNA, 25 bp, Homo sapien
agtggaacaacgtatcccgtggagt

SEQ ID NO: 6823 - DNA, 25 bp, Homo sapien
tataggaccccgtcataccgaggag

SEQ ID NO: 6824 - DNA, 25 bp, Homo sapien
tataggaccccgacataccgaggag

SEQ ID NO: 6825 - DNA, 25 bp, Homo sapien
atggtccacaccttctattcgagcg

SEQ ID NO: 6826 - DNA, 25 bp, Homo sapien
atggtccacaccatctattcgagcg

SEQ ID NO: 6827 - DNA, 25 bp, Homo sapien
ttgactccaccagagacttctgacg

SEQ ID NO: 6828 - DNA, 25 bp, Homo sapien
ttgactccaccacagacttctgacg

SEQ ID NO: 6829 - DNA, 25 bp, Homo sapien
aggttttttcctagggctatctctc

SEQ ID NO: 6830 - DNA, 25 bp, Homo sapien
aggttttttccttgggctatctctc

SEQ ID NO: 6831 - DNA, 25 bp, Homo sapien
tcgtgtctctgtggtcacgacccgg

SEQ ID NO: 6832 - DNA, 25 bp, Homo sapien
tcgtgtctctgtcgtcacgacccgg

SEQ ID NO: 6833 - DNA, 25 bp, Homo sapien
gtctctgttctgtttcacgaacatt

SEQ ID NO: 6834 - DNA, 25 bp, Homo sapien
gtctctgttctgattcacgaacatt

SEQ ID NO: 6835 - DNA, 25 bp, Homo sapien
ttgttgtttcttcctgtccaagaac

SEQ ID NO: 6836 - DNA, 25 bp, Homo sapien
ttgttgtttcttgctgtccaagaac

SEQ ID NO: 6837 - DNA, 25 bp, Homo sapien
attaatttcttgaggctagagcgtc

SEQ ID NO: 6838 - DNA, 25 bp, Homo sapien
attaatttcttgtggctagagcgtc

SEQ ID NO: 6839 - DNA, 25 bp, Homo sapien
gtcccgagggctccacgtagacgtc

SEQ ID NO: 6840 - DNA, 25 bp, Homo sapien
gtcccgagggctgcacgtagacgtc

SEQ ID NO: 6841 - DNA, 25 bp, Homo sapien
ctagccacggcgtagacagctcgtt

SEQ ID NO: 6842 - DNA, 25 bp, Homo sapien
ctagccacggcgaagacagctcgtt

SEQ ID NO: 6843 - DNA, 25 bp, Homo sapien
gaacgaccccgtcaaacactgttct

SEQ ID NO: 6844 - DNA, 25 bp, Homo sapien
gaacgaccccgtgaaacactgttct

SEQ ID NO: 6845 - DNA, 25 bp, Homo sapien
aactgtctgcggacggactaatctt

SEQ ID NO: 6846 - DNA, 25 bp, Homo sapien
aactgtctgcggtcggactaatctt

SEQ ID NO: 6847 - DNA, 25 bp, Homo sapien
gagtttcaggtctagtgatattcct

SEQ ID NO: 6848 - DNA, 25 bp, Homo sapien
gagtttcaggtcaagtgatattcct

SEQ ID NO: 6849 - DNA, 25 bp, Homo sapien
cgagtcgtttgaggatgtccattaa

SEQ ID NO: 6850 - DNA, 25 bp, Homo sapien
cgagtcgtttgacgatgtccattaa

SEQ ID NO: 6851 - DNA, 25 bp, Homo sapien
gtcgtagaacgagacccgtctaagt

SEQ ID NO: 6852 - DNA, 25 bp, Homo sapien
gtcgtagaacgacacccgtctaagt

SEQ ID NO: 6853 - DNA, 25 bp, Homo sapien
atcagaacatagaagtccgaactcg

SEQ ID NO: 6854 - DNA, 25 bp, Homo sapien
atcagaacatagtagtccgaactcg

SEQ ID NO: 6855 - DNA, 25 bp, Homo sapien
atttttctagaactcttgtccatgc

SEQ ID NO: 6856 - DNA, 25 bp, Homo sapien
atttttctagaagtcttgtccatgc

SEQ ID NO: 6857 - DNA, 25 bp, Homo sapien
tctcctttgaatgactggcactccc

SEQ ID NO: 6858 - DNA, 25 bp, Homo sapien
tctcctttgaatcactggcactccc

SEQ ID NO: 6859 - DNA, 25 bp, Homo sapien
gcttgtgaactacgttgaacagctc

SEQ ID NO: 6860 - DNA, 25 bp, Homo sapien
gcttgtgaactaggttgaacagctc

SEQ ID NO: 6861 - DNA, 25 bp, Homo sapien
gcgactacgactgattccaatcacg

SEQ ID NO: 6862 - DNA, 25 bp, Homo sapien
gcgactacgactcattccaatcacg

SEQ ID NO: 6863 - DNA, 25 bp, Homo sapien
gtccctccgtcgtcgtctgtgatac

SEQ ID NO: 6864 - DNA, 25 bp, Homo sapien
gtccctccgtcgacgtctgtgatac

SEQ ID NO: 6865 - DNA, 25 bp, Homo sapien
atcggcttcgtgtccgacgagacac

SEQ ID NO: 6866 - DNA, 25 bp, Homo sapien
atcggcttcgtgaccgacgagacac

SEQ ID NO: 6867 - DNA, 25 bp, Homo sapien
agacgtcgatctcgtacagagaaag

SEQ ID NO: 6868 - DNA, 25 bp, Homo sapien
agacgtcgatctggtacagagaaag

SEQ ID NO: 6869 - DNA, 25 bp, Homo sapien
tctagagtctctgtgtgactggaac

SEQ ID NO: 6870 - DNA, 25 bp, Homo sapien
tctagagtctctctgtgactggaac

SEQ ID NO: 6871 - DNA, 25 bp, Homo sapien
tgttctagacagtgggcatctcgaa

SEQ ID NO: 6872 - DNA, 25 bp, Homo sapien
tgttctagacagagggcatctcgaa

SEQ ID NO: 6873 - DNA, 25 bp, Homo sapien
cgtggtatcagaagggtcggttcca

SEQ ID NO: 6874 - DNA, 25 bp, Homo sapien
cgtggtatcagatgggtcggttcca

SEQ ID NO: 6875 - DNA, 25 bp, Homo sapien
gtgtttcaaccgtatgttaacactc

SEQ ID NO: 6876 - DNA, 25 bp, Homo sapien
gtgtttcaaccgaatgttaacactc

SEQ ID NO: 6877 - DNA, 25 bp, Homo sapien
ttaggtgatgacttttcgtttcatc

SEQ ID NO: 6878 - DNA, 25 bp, Homo sapien
ttaggtgatgacatttcgtttcatc

SEQ ID NO: 6879 - DNA, 25 bp, Homo sapien
agttaggtcgcctttttcggtacac

SEQ ID NO: 6880 - DNA, 25 bp, Homo sapien
agttaggtcgccattttcggtacac

SEQ ID NO: 6881 - DNA, 25 bp, Homo sapien
cggaagctcttctcgacataagagc

SEQ ID NO: 6882 - DNA, 25 bp, Homo sapien
cggaagctcttcacgacataagagc

SEQ ID NO: 6883 - DNA, 25 bp, Homo sapien
cggctaagacttggaaagctctaaa

SEQ ID NO: 6884 - DNA, 25 bp, Homo sapien
cggctaagacttcgaaagctctaaa

SEQ ID NO: 6885 - DNA, 25 bp, Homo sapien
gacatcttttgtgaagctctagaga

SEQ ID NO: 6886 - DNA, 25 bp, Homo sapien
gacatcttttgtcaagctctagaga

SEQ ID NO: 6887 - DNA, 25 bp, Homo sapien
ggcggtatctttaacgactgtgaga

SEQ ID NO: 6888 - DNA, 25 bp, Homo sapien
ggcggtatcttttacgactgtgaga

SEQ ID NO: 6889 - DNA, 25 bp, Homo sapien
cacagtgtttacgacgtgagatcgt

SEQ ID NO: 6890 - DNA, 25 bp, Homo sapien
cacagtgtttaccacgtgagatcgt

SEQ ID NO: 6891 - DNA, 25 bp, Homo sapien
cctacagagttctaccgcacgagcg

SEQ ID NO: 6892 - DNA, 25 bp, Homo sapien
cctacagagttcaaccgcacgagcg

SEQ ID NO: 6893 - DNA, 25 bp, Homo sapien
taagtaccagatcgaacagtccttc

SEQ ID NO: 6894 - DNA, 25 bp, Homo sapien
taagtaccagatggaacagtccttc

SEQ ID NO: 6895 - DNA, 25 bp, Homo sapien
taacgtaaaatggacgtcaggtttc

SEQ ID NO: 6896 - DNA, 25 bp, Homo sapien
taacgtaaaatgcacgtcaggtttc

SEQ ID NO: 6897 - DNA, 25 bp, Homo sapien
aaccggaaccgacacagatcgtctc

SEQ ID NO: 6898 - DNA, 25 bp, Homo sapien
aaccggaaccgagacagatcgtctc

SEQ ID NO: 6899 - DNA, 25 bp, Homo sapien
ttcaagagtatagacccgaattctt

SEQ ID NO: 6900 - DNA, 25 bp, Homo sapien
ttcaagagtatacacccgaattctt

SEQ ID NO: 6901 - DNA, 25 bp, Homo sapien
ttttaggagaagtcaaggagtcctc

SEQ ID NO: 6902 - DNA, 25 bp, Homo sapien
ttttaggagaagacaaggagtcctc

SEQ ID NO: 6903 - DNA, 25 bp, Homo sapien
cgttcagtaagaaccaggacgaatc

SEQ ID NO: 6904 - DNA, 25 bp, Homo sapien
cgttcagtaagatccaggacgaatc

SEQ ID NO: 6905 - DNA, 25 bp, Homo sapien
gtcagacacgtgtcggagggaccct

SEQ ID NO: 6906 - DNA, 25 bp, Homo sapien
gtcagacacgtgacggagggaccct

SEQ ID NO: 6907 - DNA, 25 bp, Homo sapien
tcttaaagaggaaatcaactcgtgt

SEQ ID NO: 6908 - DNA, 25 bp, Homo sapien
tcttaaagaggatatcaactcgtgt

SEQ ID NO: 6909 - DNA, 25 bp, Homo sapien
aactcaaaatctaggtggactcggt

SEQ ID NO: 6910 - DNA, 25 bp, Homo sapien
aactcaaaatcttggtggactcggt

SEQ ID NO: 6911 - DNA, 25 bp, Homo sapien
ctgaaaatagtctgagttaatcgtc

SEQ ID NO: 6912 - DNA, 25 bp, Homo sapien
ctgaaaatagtcagagttaatcgtc

SEQ ID NO: 6913 - DNA, 25 bp, Homo sapien
ctagtgttaaagtaactttcatgtc

SEQ ID NO: 6914 - DNA, 25 bp, Homo sapien
ctagtgttaaagaaactttcatgtc

SEQ ID NO: 6915 - DNA, 25 bp, Homo sapien
tggttaagacaaagtacatacaatc

SEQ ID NO: 6916 - DNA, 25 bp, Homo sapien
tggttaagacaatgtacatacaatc

SEQ ID NO: 6917 - DNA, 25 bp, Homo sapien
gggcgtcgcccgtagactacaagtg

SEQ ID NO: 6918 - DNA, 25 bp, Homo sapien
gggcgtcgcccgaagactacaagtg

SEQ ID NO: 6919 - DNA, 25 bp, Homo sapien
gaggtcttctcgtcgacactggacg

SEQ ID NO: 6920 - DNA, 25 bp, Homo sapien
gaggtcttctcgacgacactggacg

SEQ ID NO: 6921 - DNA, 25 bp, Homo sapien
agtttgtgtcgtgactgacacggtg

SEQ ID NO: 6922 - DNA, 25 bp, Homo sapien
agtttgtgtcgtcactgacacggtg

SEQ ID NO: 6923 - DNA, 25 bp, Homo sapien
ataatactctgtgtccttagaaatg

SEQ ID NO: 6924 - DNA, 25 bp, Homo sapien
ataatactctgtctccttagaaatg

SEQ ID NO: 6925 - DNA, 25 bp, Homo sapien
ctcgtttcaccgactcaaatgaaga

SEQ ID NO: 6926 - DNA, 25 bp, Homo sapien
ctcgtttcaccgtctcaaatgaaga

SEQ ID NO: 6927 - DNA, 25 bp, Homo sapien
aaacttccgtatcctatcaaaacat

SEQ ID NO: 6928 - DNA, 25 bp, Homo sapien
aaacttccgtatgctatcaaaacat

SEQ ID NO: 6929 - DNA, 25 bp, Homo sapien
ttctctcgtatggagaaagtccact

SEQ ID NO: 6930 - DNA, 25 bp, Homo sapien
ttctctcgtatgcagaaagtccact

SEQ ID NO: 6931 - DNA, 25 bp, Homo sapien
tgttcgatttacatgaaagactcac

SEQ ID NO: 6932 - DNA, 25 bp, Homo sapien
tgttcgatttacttgaaagactcac

SEQ ID NO: 6933 - DNA, 25 bp, Homo sapien
cggatccatttctttattaccctat

SEQ ID NO: 6934 - DNA, 25 bp, Homo sapien
cggatccatttcattattaccctat

SEQ ID NO: 6935 - DNA, 25 bp, Homo sapien
aatttcgtagtagaagttactcaca

SEQ ID NO: 6936 - DNA, 25 bp, Homo sapien
aatttcgtagtacaagttactcaca

SEQ ID NO: 6937 - DNA, 25 bp, Homo sapien
agtactgttagaacggtatttccct

SEQ ID NO: 6938 - DNA, 25 bp, Homo sapien
agtactgttagatcggtatttccct

SEQ ID NO: 6939 - DNA, 25 bp, Homo sapien
gcgtctggatacttacttctacctc

SEQ ID NO: 6940 - DNA, 25 bp, Homo sapien
gcgtctggatacatacttctacctc

SEQ ID NO: 6941 - DNA, 25 bp, Homo sapien
caataactaatatgtgatcgtctag

SEQ ID NO: 6942 - DNA, 25 bp, Homo sapien
caataactaataagtgatcgtctag

SEQ ID NO: 6943 - DNA, 25 bp, Homo sapien
tccagacccgtaagtctaccctgta

SEQ ID NO: 6944 - DNA, 25 bp, Homo sapien
tccagacccgtatgtctaccctgta

SEQ ID NO: 6945 - DNA, 25 bp, Homo sapien
acacgacgacaaaagtcgaccacca

SEQ ID NO: 6946 - DNA, 25 bp, Homo sapien
acacgacgacaatagtcgaccacca

SEQ ID NO: 6947 - DNA, 25 bp, Homo sapien
gtaaagagtaaaagactaatcccta

SEQ ID NO: 6948 - DNA, 25 bp, Homo sapien
gtaaagagtaaatgactaatcccta

SEQ ID NO: 6949 - DNA, 25 bp, Homo sapien
aacgtagactaaaaaaggtccctat

SEQ ID NO: 6950 - DNA, 25 bp, Homo sapien
aacgtagactaataaaggtccctat

SEQ ID NO: 6951 - DNA, 25 bp, Homo sapien
ccagaattagctgtcgttgcacgac

SEQ ID NO: 6952 - DNA, 25 bp, Homo sapien
ccagaattagctctcgttgcacgac

SEQ ID NO: 6953 - DNA, 25 bp, Homo sapien
agcagtccacgtccagtcgtgcaac

SEQ ID NO: 6954 - DNA, 25 bp, Homo sapien
agcagtccacgtgcagtcgtgcaac

SEQ ID NO: 6955 - DNA, 25 bp, Homo sapien
tcttataaggtctttcaagtacgaa

SEQ ID NO: 6956 - DNA, 25 bp, Homo sapien
tcttataaggtcattcaagtacgaa

SEQ ID NO: 6957 - DNA, 25 bp, Homo sapien
ttccaaatgttaagacacgacagaa

SEQ ID NO: 6958 - DNA, 25 bp, Homo sapien
ttccaaatgttatgacacgacagaa

SEQ ID NO: 6959 - DNA, 25 bp, Homo sapien
atgtatacttcgatcgtaaacaaag

SEQ ID NO: 6960 - DNA, 25 bp, Homo sapien
atgtatacttcgttcgtaaacaaag

SEQ ID NO: 6961 - DNA, 25 bp, Homo sapien
gtgtctcagacacacaaacgaagta

SEQ ID NO: 6962 - DNA, 25 bp, Homo sapien
gtgtctcagacagacaaacgaagta

SEQ ID NO: 6963 - DNA, 25 bp, Homo sapien
ttctcctatagtgagaagtctcacc

SEQ ID NO: 6964 - DNA, 25 bp, Homo sapien
ttctcctatagtcagaagtctcacc

SEQ ID NO: 6965 - DNA, 25 bp, Homo sapien
ttgtgtgtcacagtcttgagtcccc

SEQ ID NO: 6966 - DNA, 25 bp, Homo sapien
ttgtgtgtcacactcttgagtcccc

SEQ ID NO: 6967 - DNA, 25 bp, Homo sapien
gtgataactactgtgtatcttaccc

SEQ ID NO: 6968 - DNA, 25 bp, Homo sapien
gtgataactactctgtatcttaccc

SEQ ID NO: 6969 - DNA, 25 bp, Homo sapien
tttgagctggtctagacataacaga

SEQ ID NO: 6970 - DNA, 25 bp, Homo sapien
tttgagctggtcaagacataacaga

SEQ ID NO: 6971 - DNA, 25 bp, Homo sapien
atgagacaggacaggggacgaccta

SEQ ID NO: 6972 - DNA, 25 bp, Homo sapien
atgagacaggactggggacgaccta

SEQ ID NO: 6973 - DNA, 25 bp, Homo sapien
ggtcacataattgaacggtacccgt

SEQ ID NO: 6974 - DNA, 25 bp, Homo sapien
ggtcacataattcaacggtacccgt

SEQ ID NO: 6975 - DNA, 25 bp, Homo sapien
ggggtgtatgactcctccgttccgt

SEQ ID NO: 6976 - DNA, 25 bp, Homo sapien
ggggtgtatgacacctccgttccgt

SEQ ID NO: 6977 - DNA, 25 bp, Homo sapien
ccgtgagctcccacgaaccgtgtgg

SEQ ID NO: 6978 - DNA, 25 bp, Homo sapien
ccgtgagctccctcgaaccgtgtgg

SEQ ID NO: 6979 - DNA, 25 bp, Homo sapien
cccgagcaccagtcgtgctggtcga

SEQ ID NO: 6980 - DNA, 25 bp, Homo sapien
cccgagcaccagacgtgctggtcga

SEQ ID NO: 6981 - DNA, 25 bp, Homo sapien
gctccggaacccacggaccggtgag

SEQ ID NO: 6982 - DNA, 25 bp, Homo sapien
gctccggaaccctcggaccggtgag

SEQ ID NO: 6983 - DNA, 25 bp, Homo sapien
cgagatccttttacacgatacgagt

SEQ ID NO: 6984 - DNA, 25 bp, Homo sapien
cgagatcctttttcacgatacgagt

SEQ ID NO: 6985 - DNA, 25 bp, Homo sapien
tcaacactacacacttccgagaagg

SEQ ID NO: 6986 - DNA, 25 bp, Homo sapien
tcaacactacactcttccgagaagg

SEQ ID NO: 6987 - DNA, 25 bp, Homo sapien
ctagtgaggtcttttacagagacgt

SEQ ID NO: 6988 - DNA, 25 bp, Homo sapien
ctagtgaggtctattacagagacgt

SEQ ID NO: 6989 - DNA, 25 bp, Homo sapien
aactggtggtacaacgccacgaacg

SEQ ID NO: 6990 - DNA, 25 bp, Homo sapien
aactggtggtactacgccacgaacg

SEQ ID NO: 6991 - DNA, 25 bp, Homo sapien
aaaaagtcgtcgacagtgttgacaa

SEQ ID NO: 6992 - DNA, 25 bp, Homo sapien
aaaaagtcgtcgtcagtgttgacaa

SEQ ID NO: 6993 - DNA, 25 bp, Homo sapien
aactcattgttcagtgttggtacga

SEQ ID NO: 6994 - DNA, 25 bp, Homo sapien
aactcattgttctgtgttggtacga

SEQ ID NO: 6995 - DNA, 25 bp, Homo sapien
actccgtcgtcgtcgggtcgaggtc

SEQ ID NO: 6996 - DNA, 25 bp, Homo sapien
actccgtcgtcgacgggtcgaggtc

SEQ ID NO: 6997 - DNA, 25 bp, Homo sapien
ccaccgtcttctagggtcgactggt

SEQ ID NO: 6998 - DNA, 25 bp, Homo sapien
ccaccgtcttcttgggtcgactggt

SEQ ID NO: 6999 - DNA, 25 bp, Homo sapien
ctccactcttccagtcatcagagag

SEQ ID NO: 7000 - DNA, 25 bp, Homo sapien
ctccactcttcctgtcatcagagag

SEQ ID NO: 7001 - DNA, 25 bp, Homo sapien
tctagacacttctttgacgtcagaa

SEQ ID NO: 7002 - DNA, 25 bp, Homo sapien
tctagacacttcattgacgtcagaa

SEQ ID NO: 7003 - DNA, 25 bp, Homo sapien
acgacggacgacacacagtagggtg

SEQ ID NO: 7004 - DNA, 25 bp, Homo sapien
acgacggacgactcacagtagggtg

SEQ ID NO: 7005 - DNA, 25 bp, Homo sapien
tctcgagacgcgtccagcgcgacgg

SEQ ID NO: 7006 - DNA, 25 bp, Homo sapien
tctcgagacgcgaccagcgcgacgg

SEQ ID NO: 7007 - DNA, 25 bp, Homo sapien
cggaacagagaccttaccactaccg

SEQ ID NO: 7008 - DNA, 25 bp, Homo sapien
cggaacagagacgttaccactaccg

SEQ ID NO: 7009 - DNA, 25 bp, Homo sapien
gacggagagagagctttacaaaact

SEQ ID NO: 7010 - DNA, 25 bp, Homo sapien
gacggagagagacctttacaaaact

SEQ ID NO: 7011 - DNA, 25 bp, Homo sapien
aacacacagagacttcgcaaacacg

SEQ ID NO: 7012 - DNA, 25 bp, Homo sapien
aacacacagagagttcgcaaacacg

SEQ ID NO: 7013 - DNA, 25 bp, Homo sapien
ctacacgacagaagtgtccaatacc

SEQ ID NO: 7014 - DNA, 25 bp, Homo sapien
ctacacgacagatgtgtccaatacc

SEQ ID NO: 7015 - DNA, 25 bp, Homo sapien
gacgtaactagacgattctatctcc

SEQ ID NO: 7016 - DNA, 25 bp, Homo sapien
gacgtaactagaggattctatctcc

SEQ ID NO: 7017 - DNA, 25 bp, Homo sapien
gacgacacagaggtccatcttgtac

SEQ ID NO: 7018 - DNA, 25 bp, Homo sapien
gacgacacagagctccatcttgtac

SEQ ID NO: 7019 - DNA, 25 bp, Homo sapien
gaccagagacgagacttctctacac

SEQ ID NO: 7020 - DNA, 25 bp, Homo sapien
gaccagagacgacacttctctacac

SEQ ID NO: 7021 - DNA, 25 bp, Homo sapien
cctgtcaggtagaccggtctacgcc

SEQ ID NO: 7022 - DNA, 25 bp, Homo sapien
cctgtcaggtagtccggtctacgcc

SEQ ID NO: 7023 - DNA, 25 bp, Homo sapien
gtctcagtctagtccttcgtaccct

SEQ ID NO: 7024 - DNA, 25 bp, Homo sapien
gtctcagtctagaccttcgtaccct

SEQ ID NO: 7025 - DNA, 25 bp, Homo sapien
gagtaccttgagatacttctaagat

SEQ ID NO: 7026 - DNA, 25 bp, Homo sapien
gagtaccttgagttacttctaagat

SEQ ID NO: 7027 - DNA, 25 bp, Homo sapien
tttgtacattctaatactttacaag

SEQ ID NO: 7028 - DNA, 25 bp, Homo sapien
tttgtacattcttatactttacaag

SEQ ID NO: 7029 - DNA, 25 bp, Homo sapien
agtggttttctacacgtcacacacc

SEQ ID NO: 7030 - DNA, 25 bp, Homo sapien
agtggttttctagacgtcacacacc

SEQ ID NO: 7031 - DNA, 25 bp, Homo sapien
tattaactttgtgtagagtcaatcc

SEQ ID NO: 7032 - DNA, 25 bp, Homo sapien
tattaactttgtctagagtcaatcc

SEQ ID NO: 7033 - DNA, 25 bp, Homo sapien
ttaagttttgtcagagttcatacac

SEQ ID NO: 7034 - DNA, 25 bp, Homo sapien
ttaagttttgtctgagttcatacac

SEQ ID NO: 7035 - DNA, 25 bp, Homo sapien
agtgtcgtgtcaggtgtcgaccacg

SEQ ID NO: 7036 - DNA, 25 bp, Homo sapien
agtgtcgtgtcacgtgtcgaccacg

SEQ ID NO: 7037 - DNA, 25 bp, Homo sapien
ggtgttcgtagtacctgacactaat

SEQ ID NO: 7038 - DNA, 25 bp, Homo sapien
ggtgttcgtagttcctgacactaat

SEQ ID NO: 7039 - DNA, 25 bp, Homo sapien
cgatctctcgtgcacccgaagacta

SEQ ID NO: 7040 - DNA, 25 bp, Homo sapien
cgatctctcgtggacccgaagacta

SEQ ID NO: 7041 - DNA, 25 bp, Homo sapien
acgggaccgcgacgtctgtgaccta

SEQ ID NO: 7042 - DNA, 25 bp, Homo sapien
acgggaccgcgaggtctgtgaccta

SEQ ID NO: 7043 - DNA, 25 bp, Homo sapien
caacgggagccacgtcgaggctcga

SEQ ID NO: 7044 - DNA, 25 bp, Homo sapien
caacgggagccaggtcgaggctcga

SEQ ID NO: 7045 - DNA, 25 bp, Homo sapien
ccgtgttgcttaagcgagaacccgt

SEQ ID NO: 7046 - DNA, 25 bp, Homo sapien
ccgtgttgcttatgcgagaacccgt

SEQ ID NO: 7047 - DNA, 25 bp, Homo sapien
ccggagtctccgtgtctgagaaccc

SEQ ID NO: 7048 - DNA, 25 bp, Homo sapien
ccggagtctccgagtctgagaaccc

SEQ ID NO: 7049 - DNA, 25 bp, Homo sapien
gggcgctacgcgagtttatacagca

SEQ ID NO: 7050 - DNA, 25 bp, Homo sapien
gggcgctacgcgtgtttatacagca

SEQ ID NO: 7051 - DNA, 25 bp, Homo sapien
atttgacacgttcatgtttacagaa

SEQ ID NO: 7052 - DNA, 25 bp, Homo sapien
atttgacacgttgatgtttacagaa

SEQ ID NO: 7053 - DNA, 25 bp, Homo sapien
ttaaagttagcttgtctactacgaa

SEQ ID NO: 7054 - DNA, 25 bp, Homo sapien
ttaaagttagctagtctactacgaa

SEQ ID NO: 7055 - DNA, 25 bp, Homo sapien
tgaaagtctctcgagtcccgtacga

SEQ ID NO: 7056 - DNA, 25 bp, Homo sapien
tgaaagtctctccagtcccgtacga

SEQ ID NO: 7057 - DNA, 25 bp, Homo sapien
agggtggtcctcatcagtagtagac

SEQ ID NO: 7058 - DNA, 25 bp, Homo sapien
agggtggtcctcttcagtagtagac

SEQ ID NO: 7059 - DNA, 25 bp, Homo sapien
taaaagggttaaggtcggactcgtc

SEQ ID NO: 7060 - DNA, 25 bp, Homo sapien
taaaagggttaacgtcggactcgtc

SEQ ID NO: 7061 - DNA, 25 bp, Homo sapien
aaattctcgttttgtctctacttct

SEQ ID NO: 7062 - DNA, 25 bp, Homo sapien
aaattctcgtttagtctctacttct

SEQ ID NO: 7063 - DNA, 25 bp, Homo sapien
atcattggttgtaactgacctgtct

SEQ ID NO: 7064 - DNA, 25 bp, Homo sapien
atcattggttgttactgacctgtct

SEQ ID NO: 7065 - DNA, 25 bp, Homo sapien
tacatcgtcgttgtactttcatatg

SEQ ID NO: 7066 - DNA, 25 bp, Homo sapien
tacatcgtcgttctactttcatatg

SEQ ID NO: 7067 - DNA, 25 bp, Homo sapien
tacgtcgtgtcctgtcttcgagagg

SEQ ID NO: 7068 - DNA, 25 bp, Homo sapien
tacgtcgtgtccagtcttcgagagg

SEQ ID NO: 7069 - DNA, 25 bp, Homo sapien
cttagtgtgacaatcatgtcagagt

SEQ ID NO: 7070 - DNA, 25 bp, Homo sapien
cttagtgtgacattcatgtcagagt

SEQ ID NO: 7071 - DNA, 25 bp, Homo sapien
aacagttccagtcgaggtcgtagag

SEQ ID NO: 7072 - DNA, 25 bp, Homo sapien
aacagttccagtggaggtcgtagag

SEQ ID NO: 7073 - DNA, 25 bp, Homo sapien
atgacatgtcggaaggaggacctat

SEQ ID NO: 7074 - DNA, 25 bp, Homo sapien
atgacatgtcggtaggaggacctat

SEQ ID NO: 7075 - DNA, 25 bp, Homo sapien
cgacttagtaggaggatactcctct

SEQ ID NO: 7076 - DNA, 25 bp, Homo sapien
cgacttagtaggtggatactcctct

SEQ ID NO: 7077 - DNA, 25 bp, Homo sapien
gtattgacgtgagagatacgtattt

SEQ ID NO: 7078 - DNA, 25 bp, Homo sapien
gtattgacgtgacagatacgtattt

SEQ ID NO: 7079 - DNA, 25 bp, Homo sapien
gaacttgataacttcgtacacgatc

SEQ ID NO: 7080 - DNA, 25 bp, Homo sapien
gaacttgataacatcgtacacgatc

SEQ ID NO: 7081 - DNA, 25 bp, Homo sapien
tgtcatccggtaagtattacctgtc

SEQ ID NO: 7082 - DNA, 25 bp, Homo sapien
tgtcatccggtatgtattacctgtc

SEQ ID NO: 7083 - DNA, 25 bp, Homo sapien
ttacgatgtcgtactgtttataatc

SEQ ID NO: 7084 - DNA, 25 bp, Homo sapien
ttacgatgtcgttctgtttataatc

SEQ ID NO: 7085 - DNA, 25 bp, Homo sapien
taagtatcttgtgtactgacaacta

SEQ ID NO: 7086 - DNA, 25 bp, Homo sapien
taagtatcttgtctactgacaacta

SEQ ID NO: 7087 - DNA, 25 bp, Homo sapien
tacactatcttcttactaaataatc

SEQ ID NO: 7088 - DNA, 25 bp, Homo sapien
tacactatcttcatactaaataatc

SEQ ID NO: 7089 - DNA, 25 bp, Homo sapien
ccgtctacccgtttacgaaagattt

SEQ ID NO: 7090 - DNA, 25 bp, Homo sapien
ccgtctacccgtatacgaaagattt

SEQ ID NO: 7091 - DNA, 25 bp, Homo sapien
tctgtacttttgactacagaccgtt

SEQ ID NO: 7092 - DNA, 25 bp, Homo sapien
tctgtacttttgtctacagaccgtt

SEQ ID NO: 7093 - DNA, 25 bp, Homo sapien
tatttcgtgactgtaacaaactatg

SEQ ID NO: 7094 - DNA, 25 bp, Homo sapien
tatttcgtgactctaacaaactatg

SEQ ID NO: 7095 - DNA, 25 bp, Homo sapien
agttaagtagataccgtaaacatca

SEQ ID NO: 7096 - DNA, 25 bp, Homo sapien
agttaagtagattccgtaaacatca

SEQ ID NO: 7097 - DNA, 25 bp, Homo sapien
gtactcatagtgtctatgacatcta

SEQ ID NO: 7098 - DNA, 25 bp, Homo sapien
gtactcatagtgactatgacatcta

SEQ ID NO: 7099 - DNA, 25 bp, Homo sapien
gtgtatcaactgtcgtacaatctta

SEQ ID NO: 7100 - DNA, 25 bp, Homo sapien
gtgtatcaactgacgtacaatctta

SEQ ID NO: 7101 - DNA, 25 bp, Homo sapien
gagatagtatacaaggaaatctctt

SEQ ID NO: 7102 - DNA, 25 bp, Homo sapien
gagatagtatactaggaaatctctt

SEQ ID NO: 7103 - DNA, 25 bp, Homo sapien
ggagtgacaggaaaccgtactctat

SEQ ID NO: 7104 - DNA, 25 bp, Homo sapien
ggagtgacaggataccgtactctat

SEQ ID NO: 7105 - DNA, 25 bp, Homo sapien
gcgacgacgacgatgagaacgctac

SEQ ID NO: 7106 - DNA, 25 bp, Homo sapien
gcgacgacgacgttgagaacgctac

SEQ ID NO: 7107 - DNA, 25 bp, Homo sapien
ctgtttgggacgacgtttatgattc

SEQ ID NO: 7108 - DNA, 25 bp, Homo sapien
ctgtttgggacgtcgtttatgattc

SEQ ID NO: 7109 - DNA, 25 bp, Homo sapien
ttctggcgtactgatattatgtttc

SEQ ID NO: 7110 - DNA, 25 bp, Homo sapien
ttctggcgtactcatattatgtttc

SEQ ID NO: 7111 - DNA, 25 bp, Homo sapien
ctcaggagtccttcgtctttcgacc

SEQ ID NO: 7112 - DNA, 25 bp, Homo sapien
ctcaggagtcctacgtctttcgacc

SEQ ID NO: 7113 - DNA, 25 bp, Homo sapien
tcgactgtagtctccgactttaggc

SEQ ID NO: 7114 - DNA, 25 bp, Homo sapien
tcgactgtagtcaccgactttaggc

SEQ ID NO: 7115 - DNA, 25 bp, Homo sapien
gggtctcgacttcctcattacgtcc

SEQ ID NO: 7116 - DNA, 25 bp, Homo sapien
gggtctcgacttgctcattacgtcc

SEQ ID NO: 7117 - DNA, 25 bp, Homo sapien
ggggtgtcagtctgccatctctcct

SEQ ID NO: 7118 - DNA, 25 bp, Homo sapien
ggggtgtcagtcagccatctctcct

SEQ ID NO: 7119 - DNA, 25 bp, Homo sapien
accggtgtcgactttgtgtttgtca

SEQ ID NO: 7120 - DNA, 25 bp, Homo sapien
accggtgtcgacattgtgtttgtca

SEQ ID NO: 7121 - DNA, 25 bp, Homo sapien
cgtcacgactaggagtctttgagta

SEQ ID NO: 7122 - DNA, 25 bp, Homo sapien
cgtcacgactagcagtctttgagta

SEQ ID NO: 7123 - DNA, 25 bp, Homo sapien
aacgcgtccgagaaacggtttcagg

SEQ ID NO: 7124 - DNA, 25 bp, Homo sapien
aacgcgtccgagtaacggtttcagg

SEQ ID NO: 7125 - DNA, 25 bp, Homo sapien
taccacagaacaggtctacgacgta

SEQ ID NO: 7126 - DNA, 25 bp, Homo sapien
taccacagaacacgtctacgacgta

SEQ ID NO: 7127 - DNA, 25 bp, Homo sapien
acaaattcacagacaagttcgacga

SEQ ID NO: 7128 - DNA, 25 bp, Homo sapien
acaaattcacagtcaagttcgacga

SEQ ID NO: 7129 - DNA, 25 bp, Homo sapien
gaactgtacaatgtagtgtcacgag

SEQ ID NO: 7130 - DNA, 25 bp, Homo sapien
gaactgtacaatctagtgtcacgag

SEQ ID NO: 7131 - DNA, 25 bp, Homo sapien
attcgatattctatccttcttaagt

SEQ ID NO: 7132 - DNA, 25 bp, Homo sapien
attcgatattctttccttcttaagt

SEQ ID NO: 7133 - DNA, 25 bp, Homo sapien
tcgatcgttcgattccgtccaccgg

SEQ ID NO: 7134 - DNA, 25 bp, Homo sapien
tcgatcgttcgaatccgtccaccgg

SEQ ID NO: 7135 - DNA, 25 bp, Homo sapien
ataaggtatccgtctcgaccaccct

SEQ ID NO: 7136 - DNA, 25 bp, Homo sapien
ataaggtatccgactcgaccaccct

SEQ ID NO: 7137 - DNA, 25 bp, Homo sapien
ttgtggtatcgctatcgaacacttc

SEQ ID NO: 7138 - DNA, 25 bp, Homo sapien
ttgtggtatcgcaatcgaacacttc

SEQ ID NO: 7139 - DNA, 25 bp, Homo sapien
tgtgggtcgtccatggtacgattct

SEQ ID NO: 7140 - DNA, 25 bp, Homo sapien
tgtgggtcgtccttggtacgattct

SEQ ID NO: 7141 - DNA, 25 bp, Homo sapien
cctagaggaggactcggtacgagaa

SEQ ID NO: 7142 - DNA, 25 bp, Homo sapien
cctagaggaggagtcggtacgagaa

SEQ ID NO: 7143 - DNA, 25 bp, Homo sapien
gagtcagtctaccacgaagtagaac

SEQ ID NO: 7144 - DNA, 25 bp, Homo sapien
gagtcagtctacgacgaagtagaac

SEQ ID NO: 7145 - DNA, 25 bp, Homo sapien
gagtatctcgaagtagtacaacaac

SEQ ID NO: 7146 - DNA, 25 bp, Homo sapien
gagtatctcgaactagtacaacaac

SEQ ID NO: 7147 - DNA, 25 bp, Homo sapien
gacttcgttactcagtgacataaat

SEQ ID NO: 7148 - DNA, 25 bp, Homo sapien
gacttcgttactgagtgacataaat

SEQ ID NO: 7149 - DNA, 25 bp, Homo sapien
ctatagtaccgtagagacaacaggt

SEQ ID NO: 7150 - DNA, 25 bp, Homo sapien
ctatagtaccgttgagacaacaggt

SEQ ID NO: 7151 - DNA, 25 bp, Homo sapien
ccaattgatttggtactacagtagg

SEQ ID NO: 7152 - DNA, 25 bp, Homo sapien
ccaattgatttgctactacagtagg

SEQ ID NO: 7153 - DNA, 25 bp, Homo sapien
aacaagtcctcttattgcgtcagga

SEQ ID NO: 7154 - DNA, 25 bp, Homo sapien
aacaagtcctctaattgcgtcagga

SEQ ID NO: 7155 - DNA, 25 bp, Homo sapien
caagtccgtccagacgttcacgata

SEQ ID NO: 7156 - DNA, 25 bp, Homo sapien
caagtccgtccacacgttcacgata

SEQ ID NO: 7157 - DNA, 25 bp, Homo sapien
cgtcccgtatctacggtatcacgaa

SEQ ID NO: 7158 - DNA, 25 bp, Homo sapien
cgtcccgtatcttcggtatcacgaa

SEQ ID NO: 7159 - DNA, 25 bp, Homo sapien
gactagtcactttcgtccaccgtat

SEQ ID NO: 7160 - DNA, 25 bp, Homo sapien
gactagtcacttacgtccaccgtat

SEQ ID NO: 7161 - DNA, 25 bp, Homo sapien
ctctgatctcaggttgtcgcgccgg

SEQ ID NO: 7162 - DNA, 25 bp, Homo sapien
ctctgatctcagcttgtcgcgccgg

SEQ ID NO: 7163 - DNA, 25 bp, Homo sapien
gtcttctttccgttgtgcagttagt

SEQ ID NO: 7164 - DNA, 25 bp, Homo sapien
gtcttctttccgatgtgcagttagt

SEQ ID NO: 7165 - DNA, 25 bp, Homo sapien
tagttcgtatttcttctggttacga

SEQ ID NO: 7166 - DNA, 25 bp, Homo sapien
tagttcgtatttgttctggttacga

SEQ ID NO: 7167 - DNA, 25 bp, Homo sapien
cggtaatgttatgttggatacacac

SEQ ID NO: 7168 - DNA, 25 bp, Homo sapien
cggtaatgttatcttggatacacac

SEQ ID NO: 7169 - DNA, 25 bp, Homo sapien
tccgtcatttttgtcgtttcgtccg

SEQ ID NO: 7170 - DNA, 25 bp, Homo sapien
tccgtcatttttctcgtttcgtccg

SEQ ID NO: 7171 - DNA, 25 bp, Homo sapien
tcactatttctctgcgggatattgt

SEQ ID NO: 7172 - DNA, 25 bp, Homo sapien
tcactatttctcagcgggatattgt

SEQ ID NO: 7173 - DNA, 25 bp, Homo sapien
ttttctccgacttcgaggagtcgaa

SEQ ID NO: 7174 - DNA, 25 bp, Homo sapien
ttttctccgactacgaggagtcgaa

SEQ ID NO: 7175 - DNA, 25 bp, Homo sapien
cttttgtaagatttcgtccgtacaa

SEQ ID NO: 7176 - DNA, 25 bp, Homo sapien
cttttgtaagatatcgtccgtacaa

SEQ ID NO: 7177 - DNA, 25 bp, Homo sapien
cgtcttttctgaatcattgtgtcaa

SEQ ID NO: 7178 - DNA, 25 bp, Homo sapien
cgtcttttctgattcattgtgtcaa

SEQ ID NO: 7179 - DNA, 25 bp, Homo sapien
tccggtatttgaatgtatttccatt

SEQ ID NO: 7180 - DNA, 25 bp, Homo sapien
tccggtatttgattgtatttccatt

SEQ ID NO: 7181 - DNA, 25 bp, Homo sapien
tggaagtcactttcgaaaaccgaat

SEQ ID NO: 7182 - DNA, 25 bp, Homo sapien
tggaagtcacttacgaaaaccgaat

SEQ ID NO: 7183 - DNA, 25 bp, Homo sapien
gctgacgacttcaacagaactacaa

SEQ ID NO: 7184 - DNA, 25 bp, Homo sapien
gctgacgacttctacagaactacaa

SEQ ID NO: 7185 - DNA, 25 bp, Homo sapien
tcggtagttacgattacacgatgaa

SEQ ID NO: 7186 - DNA, 25 bp, Homo sapien
tcggtagttacgtttacacgatgaa

SEQ ID NO: 7187 - DNA, 25 bp, Homo sapien
aagattccggttacgtgactcgtag

SEQ ID NO: 7188 - DNA, 25 bp, Homo sapien
aagattccggtttcgtgactcgtag

SEQ ID NO: 7189 - DNA, 25 bp, Homo sapien
acgtcatatttctgatttgtttcga

SEQ ID NO: 7190 - DNA, 25 bp, Homo sapien
acgtcatatttcagatttgtttcga

SEQ ID NO: 7191 - DNA, 25 bp, Homo sapien
gtttattcgtacataacttggttca

SEQ ID NO: 7192 - DNA, 25 bp, Homo sapien
gtttattcgtacttaacttggttca

SEQ ID NO: 7193 - DNA, 25 bp, Homo sapien
caggtcttttcctaactcagtttta

SEQ ID NO: 7194 - DNA, 25 bp, Homo sapien
caggtcttttccaaactcagtttta

SEQ ID NO: 7195 - DNA, 25 bp, Homo sapien
tctgtcgtaccaggtaccccataac

SEQ ID NO: 7196 - DNA, 25 bp, Homo sapien
tctgtcgtaccacgtaccccataac

SEQ ID NO: 7197 - DNA, 25 bp, Homo sapien
cttatatgacatgaagtccatgtgt

SEQ ID NO: 7198 - DNA, 25 bp, Homo sapien
cttatatgacatcaagtccatgtgt

SEQ ID NO: 7199 - DNA, 25 bp, Homo sapien
gtcaagacgtagaggtcctttctgt

SEQ ID NO: 7200 - DNA, 25 bp, Homo sapien
gtcaagacgtagtggtcctttctgt

SEQ ID NO: 7201 - DNA, 25 bp, Homo sapien
gtagaggagctaggtcgataagctc

SEQ ID NO: 7202 - DNA, 25 bp, Homo sapien
gtagaggagctacgtcgataagctc

SEQ ID NO: 7203 - DNA, 25 bp, Homo sapien
ttttgaggagtcctgacgcatgctc

SEQ ID NO: 7204 - DNA, 25 bp, Homo sapien
ttttgaggagtcgtgacgcatgctc

SEQ ID NO: 7205 - DNA, 25 bp, Homo sapien
aaaggaggggtcggatacggtgtgc

SEQ ID NO: 7206 - DNA, 25 bp, Homo sapien
aaaggaggggtccgatacggtgtgc

SEQ ID NO: 7207 - DNA, 25 bp, Homo sapien
gggtcggaactaacgtccagtcttc

SEQ ID NO: 7208 - DNA, 25 bp, Homo sapien
gggtcggaactatcgtccagtcttc

SEQ ID NO: 7209 - DNA, 25 bp, Homo sapien
cgggacataagatgtctctgtcctc

SEQ ID NO: 7210 - DNA, 25 bp, Homo sapien
cgggacataagaagtctctgtcctc

SEQ ID NO: 7211 - DNA, 25 bp, Homo sapien
ggtactagaatactcagactcatct

SEQ ID NO: 7212 - DNA, 25 bp, Homo sapien
ggtactagaatagtcagactcatct

SEQ ID NO: 7213 - DNA, 25 bp, Homo sapien
tttccacagacagtgcaactgtacc

SEQ ID NO: 7214 - DNA, 25 bp, Homo sapien
tttccacagacactgcaactgtacc

SEQ ID NO: 7215 - DNA, 25 bp, Homo sapien
tgaacgcgtgcagctccaggccgcg

SEQ ID NO: 7216 - DNA, 25 bp, Homo sapien
tgaacgcgtgcacctccaggccgcg

SEQ ID NO: 7217 - DNA, 25 bp, Homo sapien
taacgacccggacctccgagcgaaa

SEQ ID NO: 7218 - DNA, 25 bp, Homo sapien
taacgacccggagctccgagcgaaa

SEQ ID NO: 7219 - DNA, 25 bp, Homo sapien
ccaggtccgtggatccgggacgcta

SEQ ID NO: 7220 - DNA, 25 bp, Homo sapien
ccaggtccgtggttccgggacgcta

SEQ ID NO: 7221 - DNA, 25 bp, Homo sapien
agaagtggtagtagtcacccgggac

SEQ ID NO: 7222 - DNA, 25 bp, Homo sapien
agaagtggtagttgtcacccgggac

SEQ ID NO: 7223 - DNA, 25 bp, Homo sapien
gaacgagtcgaagaacgaccgcggc

SEQ ID NO: 7224 - DNA, 25 bp, Homo sapien
gaacgagtcgaacaacgaccgcggc

SEQ ID NO: 7225 - DNA, 25 bp, Homo sapien
gtgcctcatcgagaggaacgccgac

SEQ ID NO: 7226 - DNA, 25 bp, Homo sapien
gtgcctcatcgacaggaacgccgac

SEQ ID NO: 7227 - DNA, 25 bp, Homo sapien
aatgaactttcacaccgagagccga

SEQ ID NO: 7228 - DNA, 25 bp, Homo sapien
aatgaactttcagaccgagagccga

SEQ ID NO: 7229 - DNA, 25 bp, Homo sapien
taaaatgtctaaaccggagactcac

SEQ ID NO: 7230 - DNA, 25 bp, Homo sapien
taaaatgtctaatccggagactcac

SEQ ID NO: 7231 - DNA, 25 bp, Homo sapien
ctttatagaagatagggactctcta

SEQ ID NO: 7232 - DNA, 25 bp, Homo sapien
ctttatagaagaaagggactctcta

SEQ ID NO: 7233 - DNA, 25 bp, Homo sapien
aaagtaagattttgaccgtctcgac

SEQ ID NO: 7234 - DNA, 25 bp, Homo sapien
aaagtaagatttagaccgtctcgac

SEQ ID NO: 7235 - DNA, 25 bp, Homo sapien
aaagaaggaacgaacctctacacat

SEQ ID NO: 7236 - DNA, 25 bp, Homo sapien
aaagaaggaacgtacctctacacat

SEQ ID NO: 7237 - DNA, 25 bp, Homo sapien
aaattcgaaagagttaataccctgt

SEQ ID NO: 7238 - DNA, 25 bp, Homo sapien
aaattcgaaagacttaataccctgt

SEQ ID NO: 7239 - DNA, 25 bp, Homo sapien
acgaaataaaggaaacgttgtccca

SEQ ID NO: 7240 - DNA, 25 bp, Homo sapien
acgaaataaaggtaacgttgtccca

SEQ ID NO: 7241 - DNA, 25 bp, Homo sapien
gcaaacaaagggtttctagtccaat

SEQ ID NO: 7242 - DNA, 25 bp, Homo sapien
gcaaacaaagggattctagtccaat

SEQ ID NO: 7243 - DNA, 25 bp, Homo sapien
agaatgaagttgatgtacattaccc

SEQ ID NO: 7244 - DNA, 25 bp, Homo sapien
agaatgaagttgttgtacattaccc

SEQ ID NO: 7245 - DNA, 25 bp, Homo sapien
atcacgagtcattgtaggtatgtca

SEQ ID NO: 7246 - DNA, 25 bp, Homo sapien
atcacgagtcatagtaggtatgtca

SEQ ID NO: 7247 - DNA, 25 bp, Homo sapien
gaccgtacctacgacagggagtacc

SEQ ID NO: 7248 - DNA, 25 bp, Homo sapien
gaccgtacctaccacagggagtacc

SEQ ID NO: 7249 - DNA, 25 bp, Homo sapien
aacaatcccatcaagagtctgacgg

SEQ ID NO: 7250 - DNA, 25 bp, Homo sapien
aacaatcccatctagagtctgacgg

SEQ ID NO: 7251 - DNA, 25 bp, Homo sapien
aaaacccatattcagactctacggg

SEQ ID NO: 7252 - DNA, 25 bp, Homo sapien
aaaacccatattgagactctacggg

SEQ ID NO: 7253 - DNA, 25 bp, Homo sapien
taggaccgagggtccgatctgagtc

SEQ ID NO: 7254 - DNA, 25 bp, Homo sapien
taggaccgagggaccgatctgagtc

SEQ ID NO: 7255 - DNA, 25 bp, Homo sapien
gctctcagtcggactcgcccacgcg

SEQ ID NO: 7256 - DNA, 25 bp, Homo sapien
gctctcagtcggtctcgcccacgcg

SEQ ID NO: 7257 - DNA, 25 bp, Homo sapien
gtcggtcatccgtcccgtgaaccgt

SEQ ID NO: 7258 - DNA, 25 bp, Homo sapien
gtcggtcatccgacccgtgaaccgt

SEQ ID NO: 7259 - DNA, 25 bp, Homo sapien
acagacgagaccacccgtatgtaag

SEQ ID NO: 7260 - DNA, 25 bp, Homo sapien
acagacgagacctcccgtatgtaag

SEQ ID NO: 7261 - DNA, 25 bp, Homo sapien
gacaacatcacgtcgatgtatgtca

SEQ ID NO: 7262 - DNA, 25 bp, Homo sapien
gacaacatcacgacgatgtatgtca

SEQ ID NO: 7263 - DNA, 25 bp, Homo sapien
cgacgctaaaggaacaccttctgct

SEQ ID NO: 7264 - DNA, 25 bp, Homo sapien
cgacgctaaaggtacaccttctgct

SEQ ID NO: 7265 - DNA, 25 bp, Homo sapien
atagaccaacggaccaatcctgtat

SEQ ID NO: 7266 - DNA, 25 bp, Homo sapien
atagaccaacggtccaatcctgtat

SEQ ID NO: 7267 - DNA, 25 bp, Homo sapien
acaaagacgcggtggaaatcgttgt

SEQ ID NO: 7268 - DNA, 25 bp, Homo sapien
acaaagacgcggaggaaatcgttgt

SEQ ID NO: 7269 - DNA, 25 bp, Homo sapien
caactagaacatccaggacccatag

SEQ ID NO: 7270 - DNA, 25 bp, Homo sapien
caactagaacatgcaggacccatag

SEQ ID NO: 7271 - DNA, 25 bp, Homo sapien
atgtcgaagttttcagtgtgtccca

SEQ ID NO: 7272 - DNA, 25 bp, Homo sapien
atgtcgaagtttacagtgtgtccca

SEQ ID NO: 7273 - DNA, 25 bp, Homo sapien
atgtgtgatgtctacagaggtgcca

SEQ ID NO: 7274 - DNA, 25 bp, Homo sapien
atgtgtgatgtcaacagaggtgcca

SEQ ID NO: 7275 - DNA, 25 bp, Homo sapien
atgttaacgtttcaccaagtttcag

SEQ ID NO: 7276 - DNA, 25 bp, Homo sapien
atgttaacgtttgaccaagtttcag

SEQ ID NO: 7277 - DNA, 25 bp, Homo sapien
aactactcgaggaatcgtatccagt

SEQ ID NO: 7278 - DNA, 25 bp, Homo sapien
aactactcgaggtatcgtatccagt

SEQ ID NO: 7279 - DNA, 25 bp, Homo sapien
tgcgacccgagtggtatcctctcct

SEQ ID NO: 7280 - DNA, 25 bp, Homo sapien
tgcgacccgagtcgtatcctctcct

SEQ ID NO: 7281 - DNA, 25 bp, Homo sapien
ggttgttcctcgatccatccttcct

SEQ ID NO: 7282 - DNA, 25 bp, Homo sapien
ggttgttcctcgttccatccttcct

SEQ ID NO: 7283 - DNA, 25 bp, Homo sapien
tcgttactgagactaacagttccta

SEQ ID NO: 7284 - DNA, 25 bp, Homo sapien
tcgttactgagagtaacagttccta

SEQ ID NO: 7285 - DNA, 25 bp, Homo sapien
cgactactttgacgaatcttcgata

SEQ ID NO: 7286 - DNA, 25 bp, Homo sapien
cgactactttgaggaatcttcgata

SEQ ID NO: 7287 - DNA, 25 bp, Homo sapien
tcccgtcggttgagaacttgtcatc

SEQ ID NO: 7288 - DNA, 25 bp, Homo sapien
tcccgtcggttgtgaacttgtcatc

SEQ ID NO: 7289 - DNA, 25 bp, Homo sapien
ttcggtcgggaattacaccagcttg

SEQ ID NO: 7290 - DNA, 25 bp, Homo sapien
ttcggtcgggaaatacaccagcttg

SEQ ID NO: 7291 - DNA, 25 bp, Homo sapien
gaagcgaccgagaccgtatcgtgac

SEQ ID NO: 7292 - DNA, 25 bp, Homo sapien
gaagcgaccgagtccgtatcgtgac

SEQ ID NO: 7293 - DNA, 25 bp, Homo sapien
aaagattcgagtctcgtgtcgcgag

SEQ ID NO: 7294 - DNA, 25 bp, Homo sapien
aaagattcgagtgtcgtgtcgcgag

SEQ ID NO: 7295 - DNA, 25 bp, Homo sapien
tcgaggactctattctgtgtcggtg

SEQ ID NO: 7296 - DNA, 25 bp, Homo sapien
tcgaggactctaatctgtgtcggtg

SEQ ID NO: 7297 - DNA, 25 bp, Homo sapien
tccagacctcagaatcgtagtcttc

SEQ ID NO: 7298 - DNA, 25 bp, Homo sapien
tccagacctcagtatcgtagtcttc

SEQ ID NO: 7299 - DNA, 25 bp, Homo sapien
agtcactacactcgacataatttgg

SEQ ID NO: 7300 - DNA, 25 bp, Homo sapien
agtcactacactggacataatttgg

SEQ ID NO: 7301 - DNA, 25 bp, Homo sapien
cgatcaagtacttttgaacttcctg

SEQ ID NO: 7302 - DNA, 25 bp, Homo sapien
cgatcaagtactattgaacttcctg

SEQ ID NO: 7303 - DNA, 25 bp, Homo sapien
gaagaaccacacagatacatccgtg

SEQ ID NO: 7304 - DNA, 25 bp, Homo sapien
gaagaaccacactgatacatccgtg

SEQ ID NO: 7305 - DNA, 25 bp, Homo sapien
agaacggaccaacttggtgtcgtcg

SEQ ID NO: 7306 - DNA, 25 bp, Homo sapien
agaacggaccaagttggtgtcgtcg

SEQ ID NO: 7307 - DNA, 25 bp, Homo sapien
tgaaggaaacacgtatctcggtcct

SEQ ID NO: 7308 - DNA, 25 bp, Homo sapien
tgaaggaaacacctatctcggtcct

SEQ ID NO: 7309 - DNA, 25 bp, Homo sapien
ttgtgggtattggagttcccgtgac

SEQ ID NO: 7310 - DNA, 25 bp, Homo sapien
ttgtgggtattgcagttcccgtgac

SEQ ID NO: 7311 - DNA, 25 bp, Homo sapien
ttgagaggtaatggttccgacctta

SEQ ID NO: 7312 - DNA, 25 bp, Homo sapien
ttgagaggtaatcgttccgacctta

SEQ ID NO: 7313 - DNA, 25 bp, Homo sapien
gaacgttgtttcacatacctgtact

SEQ ID NO: 7314 - DNA, 25 bp, Homo sapien
gaacgttgtttctcatacctgtact

SEQ ID NO: 7315 - DNA, 25 bp, Homo sapien
agatgtaagtttaccgaaccgtgtg

SEQ ID NO: 7316 - DNA, 25 bp, Homo sapien
agatgtaagttttccgaaccgtgtg

SEQ ID NO: 7317 - DNA, 25 bp, Homo sapien
cagaagaaggtattctgactccaga

SEQ ID NO: 7318 - DNA, 25 bp, Homo sapien
cagaagaaggtaatctgactccaga

SEQ ID NO: 7319 - DNA, 25 bp, Homo sapien
accaagaagtgtctccgcggggtag

SEQ ID NO: 7320 - DNA, 25 bp, Homo sapien
accaagaagtgtgtccgcggggtag

SEQ ID NO: 7321 - DNA, 25 bp, Homo sapien
acgtagtgcacgtagtcccgggggt

SEQ ID NO: 7322 - DNA, 25 bp, Homo sapien
acgtagtgcacgaagtcccgggggt

SEQ ID NO: 7323 - DNA, 25 bp, Homo sapien
gctcgcacgcgcaaccgtcggtgga

SEQ ID NO: 7324 - DNA, 25 bp, Homo sapien
gctcgcacgcgctaccgtcggtgga

SEQ ID NO: 7325 - DNA, 25 bp, Homo sapien
cagtgtcacccttcgtctaggggat

SEQ ID NO: 7326 - DNA, 25 bp, Homo sapien
cagtgtcaccctacgtctaggggat

SEQ ID NO: 7327 - DNA, 25 bp, Homo sapien
gcaactaccctaagtccctgtgtat

SEQ ID NO: 7328 - DNA, 25 bp, Homo sapien
gcaactaccctatgtccctgtgtat

SEQ ID NO: 7329 - DNA, 25 bp, Homo sapien
ctacacgaaccaatgtttcgtggac

SEQ ID NO: 7330 - DNA, 25 bp, Homo sapien
ctacacgaaccattgtttcgtggac

SEQ ID NO: 7331 - DNA, 25 bp, Homo sapien
agaagacagctactttgtcacacgg

SEQ ID NO: 7332 - DNA, 25 bp, Homo sapien
agaagacagctagtttgtcacacgg

SEQ ID NO: 7333 - DNA, 25 bp, Homo sapien
aatacaagtgagtacccaagctaaa

SEQ ID NO: 7334 - DNA, 25 bp, Homo sapien
aatacaagtgagaacccaagctaaa

SEQ ID NO: 7335 - DNA, 25 bp, Homo sapien
ctagaaagcgaaactacaaaatctg

SEQ ID NO: 7336 - DNA, 25 bp, Homo sapien
ctagaaagcgaatctacaaaatctg

SEQ ID NO: 7337 - DNA, 25 bp, Homo sapien
tctcgaaggccaactataaggccat

SEQ ID NO: 7338 - DNA, 25 bp, Homo sapien
tctcgaaggccatctataaggccat

SEQ ID NO: 7339 - DNA, 25 bp, Homo sapien
ttgtcgagggcctcggaagcctaga

SEQ ID NO: 7340 - DNA, 25 bp, Homo sapien
ttgtcgagggccacggaagcctaga

SEQ ID NO: 7341 - DNA, 25 bp, Homo sapien
ggaccaggggcgacagacctgtact

SEQ ID NO: 7342 - DNA, 25 bp, Homo sapien
ggaccaggggcgtcagacctgtact

SEQ ID NO: 7343 - DNA, 25 bp, Homo sapien
gactcccgggggtcctagctgtact

SEQ ID NO: 7344 - DNA, 25 bp, Homo sapien
gactcccgggggacctagctgtact

SEQ ID NO: 7345 - DNA, 25 bp, Homo sapien
ctccctcggggaccctcggtagagt

SEQ ID NO: 7346 - DNA, 25 bp, Homo sapien
ctccctcggggagcctcggtagagt

SEQ ID NO: 7347 - DNA, 25 bp, Homo sapien
tccctccagcggttcgtctgtgtct

SEQ ID NO: 7348 - DNA, 25 bp, Homo sapien
tccctccagcggatcgtctgtgtct

SEQ ID NO: 7349 - DNA, 25 bp, Homo sapien
ctcgaccttgggatagtctgtcgct

SEQ ID NO: 7350 - DNA, 25 bp, Homo sapien
ctcgaccttgggttagtctgtcgct

SEQ ID NO: 7351 - DNA, 25 bp, Homo sapien
atccgaagtcaatgagtgttgtcct

SEQ ID NO: 7352 - DNA, 25 bp, Homo sapien
atccgaagtcaaagagtgttgtcct

SEQ ID NO: 7353 - DNA, 25 bp, Homo sapien
ccacatgtgcgaacacgtcgtatgc

SEQ ID NO: 7354 - DNA, 25 bp, Homo sapien
ccacatgtgcgatcacgtcgtatgc

SEQ ID NO: 7355 - DNA, 25 bp, Homo sapien
acccccatgaggattcgtcgatcga

SEQ ID NO: 7356 - DNA, 25 bp, Homo sapien
acccccatgaggtttcgtcgatcga

SEQ ID NO: 7357 - DNA, 25 bp, Homo sapien
gcgccccgaggttcgctcgtagtca

SEQ ID NO: 7358 - DNA, 25 bp, Homo sapien
gcgccccgaggtacgctcgtagtca

SEQ ID NO: 7359 - DNA, 25 bp, Homo sapien
gagcgctccagagtccgccactgtt

SEQ ID NO: 7360 - DNA, 25 bp, Homo sapien
gagcgctccagactccgccactgtt

SEQ ID NO: 7361 - DNA, 25 bp, Homo sapien
ggagggtcaccaaagacaagatgac

SEQ ID NO: 7362 - DNA, 25 bp, Homo sapien
ggagggtcaccatagacaagatgac

SEQ ID NO: 7363 - DNA, 25 bp, Homo sapien
caggtcgtcaggtatgtgccacttc

SEQ ID NO: 7364 - DNA, 25 bp, Homo sapien
caggtcgtcaggaatgtgccacttc

SEQ ID NO: 7365 - DNA, 25 bp, Homo sapien
ccggaactgaggatggtcaggtata

SEQ ID NO: 7366 - DNA, 25 bp, Homo sapien
ccggaactgaggttggtcaggtata

SEQ ID NO: 7367 - DNA, 25 bp, Homo sapien
cccggacctgtatccggaacaggaa

SEQ ID NO: 7368 - DNA, 25 bp, Homo sapien
cccggacctgtaaccggaacaggaa

SEQ ID NO: 7369 - DNA, 25 bp, Homo sapien
tgtatcgggaactactactaccaag

SEQ ID NO: 7370 - DNA, 25 bp, Homo sapien
tgtatcgggaacaactactaccaag

SEQ ID NO: 7371 - DNA, 25 bp, Homo sapien
gtttgaccatatgacttctctaagt

SEQ ID NO: 7372 - DNA, 25 bp, Homo sapien
gtttgaccatatcacttctctaagt

SEQ ID NO: 7373 - DNA, 25 bp, Homo sapien
tagtccgtctccaaagttcggtacc

SEQ ID NO: 7374 - DNA, 25 bp, Homo sapien
tagtccgtctcctaagttcggtacc

SEQ ID NO: 7375 - DNA, 25 bp, Homo sapien
gatgactttccaaatatctgatacg

SEQ ID NO: 7376 - DNA, 25 bp, Homo sapien
gatgactttccatatatctgatacg

SEQ ID NO: 7377 - DNA, 25 bp, Homo sapien
gacagtttcagtttcgacgagtaag

SEQ ID NO: 7378 - DNA, 25 bp, Homo sapien
gacagtttcagtatcgacgagtaag

SEQ ID NO: 7379 - DNA, 25 bp, Homo sapien
accactgttcataaccgtcagtcag

SEQ ID NO: 7380 - DNA, 25 bp, Homo sapien
accactgttcattaccgtcagtcag

SEQ ID NO: 7381 - DNA, 25 bp, Homo sapien
gtagtactgcgcttggtctctgtgt

SEQ ID NO: 7382 - DNA, 25 bp, Homo sapien
gtagtactgcgcatggtctctgtgt

SEQ ID NO: 7383 - DNA, 25 bp, Homo sapien
gcgtgtagcgccatcaacgtgtggt

SEQ ID NO: 7384 - DNA, 25 bp, Homo sapien
gcgtgtagcgccttcaacgtgtggt

SEQ ID NO: 7385 - DNA, 25 bp, Homo sapien
ggcagaacgcgaaccgcacgaggca

SEQ ID NO: 7386 - DNA, 25 bp, Homo sapien
ggcagaacgcgatccgcacgaggca

SEQ ID NO: 7387 - DNA, 25 bp, Homo sapien
gtgagggacaccaaccgtcggtgac

SEQ ID NO: 7388 - DNA, 25 bp, Homo sapien
gtgagggacacctaccgtcggtgac

SEQ ID NO: 7389 - DNA, 25 bp, Homo sapien
ttggacgtgtcacctttatttccgt

SEQ ID NO: 7390 - DNA, 25 bp, Homo sapien
ttggacgtgtcagctttatttccgt

SEQ ID NO: 7391 - DNA, 25 bp, Homo sapien
tttcggtcaagtcccttacttcggt

SEQ ID NO: 7392 - DNA, 25 bp, Homo sapien
tttcggtcaagtgccttacttcggt

SEQ ID NO: 7393 - DNA, 25 bp, Homo sapien
cgagtcgaatcgtcggatctcgagt

SEQ ID NO: 7394 - DNA, 25 bp, Homo sapien
cgagtcgaatcgacggatctcgagt

SEQ ID NO: 7395 - DNA, 25 bp, Homo sapien
ggcacgtgaccgttatggattcggt

SEQ ID NO: 7396 - DNA, 25 bp, Homo sapien
ggcacgtgaccgatatggattcggt

SEQ ID NO: 7397 - DNA, 25 bp, Homo sapien
tgtcgtcgctggtgtcgaggtcact

SEQ ID NO: 7398 - DNA, 25 bp, Homo sapien
tgtcgtcgctggagtcgaggtcact

SEQ ID NO: 7399 - DNA, 25 bp, Homo sapien
tattatcagtgttttctttgactgt

SEQ ID NO: 7400 - DNA, 25 bp, Homo sapien
tattatcagtgtattctttgactgt

SEQ ID NO: 7401 - DNA, 25 bp, Homo sapien
ccttaggtagacaactcagtagagg

SEQ ID NO: 7402 - DNA, 25 bp, Homo sapien
ccttaggtagactactcagtagagg

SEQ ID NO: 7403 - DNA, 25 bp, Homo sapien
tcatgagtaagaccacagaccaacg

SEQ ID NO: 7404 - DNA, 25 bp, Homo sapien
tcatgagtaagagcacagaccaacg

SEQ ID NO: 7405 - DNA, 25 bp, Homo sapien
ggcgctgtcgtcatttaggttgagc

SEQ ID NO: 7406 - DNA, 25 bp, Homo sapien
ggcgctgtcgtcttttaggttgagc

SEQ ID NO: 7407 - DNA, 25 bp, Homo sapien
gagagttgtgtcatacagaccccga

SEQ ID NO: 7408 - DNA, 25 bp, Homo sapien
gagagttgtgtcttacagaccccga

SEQ ID NO: 7409 - DNA, 25 bp, Homo sapien
tgtagttgtagctgaaaccgctcgg

SEQ ID NO: 7410 - DNA, 25 bp, Homo sapien
tgtagttgtagcagaaaccgctcgg

SEQ ID NO: 7411 - DNA, 25 bp, Homo sapien
ttaaggtcgtccaaaacaggtacta

SEQ ID NO: 7412 - DNA, 25 bp, Homo sapien
ttaaggtcgtcctaaacaggtacta

SEQ ID NO: 7413 - DNA, 25 bp, Homo sapien
caatggatcctttgacgggtagtag

SEQ ID NO: 7414 - DNA, 25 bp, Homo sapien
caatggatccttagacgggtagtag

SEQ ID NO: 7415 - DNA, 25 bp, Homo sapien
atgtggaacatcagcgacgagttac

SEQ ID NO: 7416 - DNA, 25 bp, Homo sapien
atgtggaacatctgcgacgagttac

SEQ ID NO: 7417 - DNA, 25 bp, Homo sapien
aatgagttagaggaatcacgattcc

SEQ ID NO: 7418 - DNA, 25 bp, Homo sapien
aatgagttagagcaatcacgattcc

SEQ ID NO: 7419 - DNA, 25 bp, Homo sapien
cagtgaggagagcaatccttgtcac

SEQ ID NO: 7420 - DNA, 25 bp, Homo sapien
cagtgaggagaggaatccttgtcac

SEQ ID NO: 7421 - DNA, 25 bp, Homo sapien
tgagtagaggagtagtatcaacccc

SEQ ID NO: 7422 - DNA, 25 bp, Homo sapien
tgagtagaggagaagtatcaacccc

SEQ ID NO: 7423 - DNA, 25 bp, Homo sapien
tagaagtcgggtgtgaaagaccgac

SEQ ID NO: 7424 - DNA, 25 bp, Homo sapien
tagaagtcgggtctgaaagaccgac

SEQ ID NO: 7425 - DNA, 25 bp, Homo sapien
aagggtctcagaggtcaaaaccact

SEQ ID NO: 7426 - DNA, 25 bp, Homo sapien
aagggtctcagacgtcaaaaccact

SEQ ID NO: 7427 - DNA, 25 bp, Homo sapien
gaataagagtaccatccgactctac

SEQ ID NO: 7428 - DNA, 25 bp, Homo sapien
gaataagagtacgatccgactctac

SEQ ID NO: 7429 - DNA, 25 bp, Homo sapien
acaactcaataggaggacccttata

SEQ ID NO: 7430 - DNA, 25 bp, Homo sapien
acaactcaatagcaggacccttata

SEQ ID NO: 7431 - DNA, 25 bp, Homo sapien
acaggtccaagtatatccgcgcttt

SEQ ID NO: 7432 - DNA, 25 bp, Homo sapien
acaggtccaagtttatccgcgcttt

SEQ ID NO: 7433 - DNA, 25 bp, Homo sapien
atagtctctcatctttcacgattgg

SEQ ID NO: 7434 - DNA, 25 bp, Homo sapien
atagtctctcatgtttcacgattgg

SEQ ID NO: 7435 - DNA, 25 bp, Homo sapien
agtagatgccaagagtctcgatttg

SEQ ID NO: 7436 - DNA, 25 bp, Homo sapien
agtagatgccaacagtctcgatttg

SEQ ID NO: 7437 - DNA, 25 bp, Homo sapien
gtaagactacaattcgaatactacg

SEQ ID NO: 7438 - DNA, 25 bp, Homo sapien
gtaagactacaaatcgaatactacg

SEQ ID NO: 7439 - DNA, 25 bp, Homo sapien
ttagtgaggtctgtagcgaatactc

SEQ ID NO: 7440 - DNA, 25 bp, Homo sapien
ttagtgaggtctctagcgaatactc

SEQ ID NO: 7441 - DNA, 25 bp, Homo sapien
actagtgcactgtagatcgtatatg

SEQ ID NO: 7442 - DNA, 25 bp, Homo sapien
actagtgcactgaagatcgtatatg

SEQ ID NO: 7443 - DNA, 25 bp, Homo sapien
tcacagttccaaagtaacgtatcag

SEQ ID NO: 7444 - DNA, 25 bp, Homo sapien
tcacagttccaatgtaacgtatcag

SEQ ID NO: 7445 - DNA, 25 bp, Homo sapien
aatgtactcgcttactgtgtattca

SEQ ID NO: 7446 - DNA, 25 bp, Homo sapien
aatgtactcgctaactgtgtattca

SEQ ID NO: 7447 - DNA, 25 bp, Homo sapien
cgaaaacgtgttttagtctatcttt

SEQ ID NO: 7448 - DNA, 25 bp, Homo sapien
cgaaaacgtgttatagtctatcttt

SEQ ID NO: 7449 - DNA, 25 bp, Homo sapien
ggtagacctagtacgaccgaatttg

SEQ ID NO: 7450 - DNA, 25 bp, Homo sapien
ggtagacctagttcgaccgaatttg

SEQ ID NO: 7451 - DNA, 25 bp, Homo sapien
tctcactaccgtttccttatttaca

SEQ ID NO: 7452 - DNA, 25 bp, Homo sapien
tctcactaccgtatccttatttaca

SEQ ID NO: 7453 - DNA, 25 bp, Homo sapien
gtctcggactactttgcttgttaaa

SEQ ID NO: 7454 - DNA, 25 bp, Homo sapien
gtctcggactacattgcttgttaaa

SEQ ID NO: 7455 - DNA, 25 bp, Homo sapien
tcgacgactatgtcatatgtctcaa

SEQ ID NO: 7456 - DNA, 25 bp, Homo sapien
tcgacgactatgacatatgtctcaa

SEQ ID NO: 7457 - DNA, 25 bp, Homo sapien
tggataccaacatcactcgtaggat

SEQ ID NO: 7458 - DNA, 25 bp, Homo sapien
tggataccaacaacactcgtaggat

SEQ ID NO: 7459 - DNA, 25 bp, Homo sapien
actaggttcccgataaatctagaag

SEQ ID NO: 7460 - DNA, 25 bp, Homo sapien
actaggttcccgttaaatctagaag

SEQ ID NO: 7461 - DNA, 25 bp, Homo sapien
aacggtcccctctactagttagacc

SEQ ID NO: 7462 - DNA, 25 bp, Homo sapien
aacggtcccctcaactagttagacc

SEQ ID NO: 7463 - DNA, 25 bp, Homo sapien
cacgttccaccagagactcttatcg

SEQ ID NO: 7464 - DNA, 25 bp, Homo sapien
cacgttccaccacagactcttatcg

SEQ ID NO: 7465 - DNA, 25 bp, Homo sapien
agtgttttcctctagggtcttctcc

SEQ ID NO: 7466 - DNA, 25 bp, Homo sapien
agtgttttcctcaagggtcttctcc

SEQ ID NO: 7467 - DNA, 25 bp, Homo sapien
cttcgtcttcctggtaccgacccag

SEQ ID NO: 7468 - DNA, 25 bp, Homo sapien
cttcgtcttcctcgtaccgacccag

SEQ ID NO: 7469 - DNA, 25 bp, Homo sapien
gtgtctttctttccacgagacctcg

SEQ ID NO: 7470 - DNA, 25 bp, Homo sapien
gtgtctttctttgcacgagacctcg

SEQ ID NO: 7471 - DNA, 25 bp, Homo sapien
gtgtgtgtttttcctcaccacaaag

SEQ ID NO: 7472 - DNA, 25 bp, Homo sapien
gtgtgtgtttttgctcaccacaaag

SEQ ID NO: 7473 - DNA, 25 bp, Homo sapien
tttatttcgtggtcccaagactcgt

SEQ ID NO: 7474 - DNA, 25 bp, Homo sapien
tttatttcgtggacccaagactcgt

SEQ ID NO: 7475 - DNA, 25 bp, Homo sapien
ccgtgtgtgcacgacgtacgacgtc

SEQ ID NO: 7476 - DNA, 25 bp, Homo sapien
ccgtgtgtgcaccacgtacgacgtc

SEQ ID NO: 7477 - DNA, 25 bp, Homo sapien
gtacgcccggtcgagacacgcctgt

SEQ ID NO: 7478 - DNA, 25 bp, Homo sapien
gtacgcccggtccagacacgcctgt

SEQ ID NO: 7479 - DNA, 25 bp, Homo sapien
agaacgaccccgtcaaacactgttc

SEQ ID NO: 7480 - DNA, 25 bp, Homo sapien
agaacgaccccgacaaacactgttc

SEQ ID NO: 7481 - DNA, 25 bp, Homo sapien
agaaccacccggaccgatagatctt

SEQ ID NO: 7482 - DNA, 25 bp, Homo sapien
agaaccacccggtccgatagatctt

SEQ ID NO: 7483 - DNA, 25 bp, Homo sapien
gattaagatgtctatcgacattcct

SEQ ID NO: 7484 - DNA, 25 bp, Homo sapien
gattaagatgtcaatcgacattcct

SEQ ID NO: 7485 - DNA, 25 bp, Homo sapien
agtcgttgttggttcgtccattgta

SEQ ID NO: 7486 - DNA, 25 bp, Homo sapien
agtcgttgttggatcgtccattgta

SEQ ID NO: 7487 - DNA, 25 bp, Homo sapien
gtcgtagaacgagacccgtctaagt

SEQ ID NO: 7488 - DNA, 25 bp, Homo sapien
gtcgtagaacgacacccgtctaagt

SEQ ID NO: 7489 - DNA, 25 bp, Homo sapien
gaccgtagacacctaaatccatatg

SEQ ID NO: 7490 - DNA, 25 bp, Homo sapien
gaccgtagacacgtaaatccatatg

SEQ ID NO: 7491 - DNA, 25 bp, Homo sapien
ctttttcgagaagttttcctagtta

SEQ ID NO: 7492 - DNA, 25 bp, Homo sapien
ctttttcgagaacttttcctagtta

SEQ ID NO: 7493 - DNA, 25 bp, Homo sapien
tccttatagatagtctcccactccc

SEQ ID NO: 7494 - DNA, 25 bp, Homo sapien
tccttatagatactctcccactccc

SEQ ID NO: 7495 - DNA, 25 bp, Homo sapien
gacttgtggacctgtctcaaccctc

SEQ ID NO: 7496 - DNA, 25 bp, Homo sapien
gacttgtggaccagtctcaaccctc

SEQ ID NO: 7497 - DNA, 25 bp, Homo sapien
aattccgaagattttccaagtcacg

SEQ ID NO: 7498 - DNA, 25 bp, Homo sapien
aattccgaagatattccaagtcacg

SEQ ID NO: 7499 - DNA, 25 bp, Homo sapien
gcccgtccgtcttatctctgtaacg

SEQ ID NO: 7500 - DNA, 25 bp, Homo sapien
gcccgtccgtctaatctctgtaacg

SEQ ID NO: 7501 - DNA, 25 bp, Homo sapien
gaccggctccttacacgtagagacc

SEQ ID NO: 7502 - DNA, 25 bp, Homo sapien
gaccggctcctttcacgtagagacc

SEQ ID NO: 7503 - DNA, 25 bp, Homo sapien
acgagtagacctcgacgaggcacac

SEQ ID NO: 7504 - DNA, 25 bp, Homo sapien
acgagtagacctggacgaggcacac

SEQ ID NO: 7505 - DNA, 25 bp, Homo sapien
acacgacgctctttgcgactggacc

SEQ ID NO: 7506 - DNA, 25 bp, Homo sapien
acacgacgctctatgcgactggacc

SEQ ID NO: 7507 - DNA, 25 bp, Homo sapien
atgactagaccgtgggcatctgaac

SEQ ID NO: 7508 - DNA, 25 bp, Homo sapien
atgactagaccgagggcatctgaac

SEQ ID NO: 7509 - DNA, 25 bp, Homo sapien
cgtcccacacgaagggtcggttcca

SEQ ID NO: 7510 - DNA, 25 bp, Homo sapien
cgtcccacacgatgggtcggttcca

SEQ ID NO: 7511 - DNA, 25 bp, Homo sapien
tgtgttgtcagaaggattcgatccc

SEQ ID NO: 7512 - DNA, 25 bp, Homo sapien
tgtgttgtcagatggattcgatccc

SEQ ID NO: 7513 - DNA, 25 bp, Homo sapien
ttagttgccgactctccgtgttttc

SEQ ID NO: 7514 - DNA, 25 bp, Homo sapien
ttagttgccgacactccgtgttttc

SEQ ID NO: 7515 - DNA, 25 bp, Homo sapien
ttgtatggtcactcttagttttaac

SEQ ID NO: 7516 - DNA, 25 bp, Homo sapien
ttgtatggtcacacttagttttaac

SEQ ID NO: 7517 - DNA, 25 bp, Homo sapien
actgcttgtcactgactataagtcc

SEQ ID NO: 7518 - DNA, 25 bp, Homo sapien
actgcttgtcacagactataagtcc

SEQ ID NO: 7519 - DNA, 25 bp, Homo sapien
ggtcaaattgagaagagcacacaac

SEQ ID NO: 7520 - DNA, 25 bp, Homo sapien
ggtcaaattgagtagagcacacaac

SEQ ID NO: 7521 - DNA, 25 bp, Homo sapien
tgtcattcgtttatggctcagagac

SEQ ID NO: 7522 - DNA, 25 bp, Homo sapien
tgtcattcgtttttggctcagagac

SEQ ID NO: 7523 - DNA, 25 bp, Homo sapien
ggtggttcttctcgtcgtgtagtga

SEQ ID NO: 7524 - DNA, 25 bp, Homo sapien
ggtggttcttctggtcgtgtagtga

SEQ ID NO: 7525 - DNA, 25 bp, Homo sapien
caaggtatctaggacggtacagtgt

SEQ ID NO: 7526 - DNA, 25 bp, Homo sapien
caaggtatctagcacggtacagtgt

SEQ ID NO: 7527 - DNA, 25 bp, Homo sapien
ccaaacgtacctcaacgacgacagg

SEQ ID NO: 7528 - DNA, 25 bp, Homo sapien
ccaaacgtacctgaacgacgacagg

SEQ ID NO: 7529 - DNA, 25 bp, Homo sapien
acgtaaagatgtcataagtcacaac

SEQ ID NO: 7530 - DNA, 25 bp, Homo sapien
acgtaaagatgtgataagtcacaac

SEQ ID NO: 7531 - DNA, 25 bp, Homo sapien
taactaacaaaggtagtcgattccc

SEQ ID NO: 7532 - DNA, 25 bp, Homo sapien
taactaacaaagctagtcgattccc

SEQ ID NO: 7533 - DNA, 25 bp, Homo sapien
acgaccggcccgtagtaaatccgtc

SEQ ID NO: 7534 - DNA, 25 bp, Homo sapien
acgaccggcccgaagtaaatccgtc

SEQ ID NO: 7535 - DNA, 25 bp, Homo sapien
tacacaggtatggaacaaacttgtg

SEQ ID NO: 7536 - DNA, 25 bp, Homo sapien
tacacaggtatgcaacaaacttgtg

SEQ ID NO: 7537 - DNA, 25 bp, Homo sapien
ttagtggtagtgcaatgggtcctcg

SEQ ID NO: 7538 - DNA, 25 bp, Homo sapien
ttagtggtagtggaatgggtcctcg

SEQ ID NO: 7539 - DNA, 25 bp, Homo sapien
gattatcctatgaccgggagacctc

SEQ ID NO: 7540 - DNA, 25 bp, Homo sapien
gattatcctatgtccgggagacctc

SEQ ID NO: 7541 - DNA, 25 bp, Homo sapien
gggacacgcctgtccggggactacc

SEQ ID NO: 7542 - DNA, 25 bp, Homo sapien
gggacacgcctgaccggggactacc

SEQ ID NO: 7543 - DNA, 25 bp, Homo sapien
gttctaaacaggaacaaaaccgtct

SEQ ID NO: 7544 - DNA, 25 bp, Homo sapien
gttctaaacaggtacaaaaccgtct

SEQ ID NO: 7545 - DNA, 25 bp, Homo sapien
tgatgtaaaaatacggtgaactcct

SEQ ID NO: 7546 - DNA, 25 bp, Homo sapien
tgatgtaaaaattcggtgaactcct

SEQ ID NO: 7547 - DNA, 25 bp, Homo sapien
gtcaagaaatcgtgtgtaatcgtac

SEQ ID NO: 7548 - DNA, 25 bp, Homo sapien
gtcaagaaatcgagtgtaatcgtac

SEQ ID NO: 7549 - DNA, 25 bp, Homo sapien
tctaaaagaagagacttctcatgtc

SEQ ID NO: 7550 - DNA, 25 bp, Homo sapien
tctaaaagaagacacttctcatgtc

SEQ ID NO: 7551 - DNA, 25 bp, Homo sapien
tttgtagtaaaaaatctaacaactc

SEQ ID NO: 7552 - DNA, 25 bp, Homo sapien
tttgtagtaaaatatctaacaactc

SEQ ID NO: 7553 - DNA, 25 bp, Homo sapien
ggagacaacccgtagaactacgatg

SEQ ID NO: 7554 - DNA, 25 bp, Homo sapien
ggagacaacccgaagaactacgatg

SEQ ID NO: 7555 - DNA, 25 bp, Homo sapien
gacgcaagttcgacgacctagagtg

SEQ ID NO: 7556 - DNA, 25 bp, Homo sapien
gacgcaagttcgtcgacctagagtg

SEQ ID NO: 7557 - DNA, 25 bp, Homo sapien
agaattcgtcgttcttactaggtgt

SEQ ID NO: 7558 - DNA, 25 bp, Homo sapien
agaattcgtcgtacttactaggtgt

SEQ ID NO: 7559 - DNA, 25 bp, Homo sapien
taatactctgtgtccttagaaatgt

SEQ ID NO: 7560 - DNA, 25 bp, Homo sapien
taatactctgtgaccttagaaatgt

SEQ ID NO: 7561 - DNA, 25 bp, Homo sapien
actgctccatcgaccaaaagaacga

SEQ ID NO: 7562 - DNA, 25 bp, Homo sapien
actgctccatcgtccaaaagaacga

SEQ ID NO: 7563 - DNA, 25 bp, Homo sapien
ttaccttcacatcctctcaaaacta

SEQ ID NO: 7564 - DNA, 25 bp, Homo sapien
ttaccttcacatgctctcaaaacta

SEQ ID NO: 7565 - DNA, 25 bp, Homo sapien
ttctccactcgtgacggaagtgcac

SEQ ID NO: 7566 - DNA, 25 bp, Homo sapien
ttctccactcgtcacggaagtgcac

SEQ ID NO: 7567 - DNA, 25 bp, Homo sapien
tttcgtttctacatcggacaatgac

SEQ ID NO: 7568 - DNA, 25 bp, Homo sapien
tttcgtttctacttcggacaatgac

SEQ ID NO: 7569 - DNA, 25 bp, Homo sapien
gagttcagttgtttagataacccta

SEQ ID NO: 7570 - DNA, 25 bp, Homo sapien
gagttcagttgtatagataacccta

SEQ ID NO: 7571 - DNA, 25 bp, Homo sapien
gatatggtagtagtaagtaacccac

SEQ ID NO: 7572 - DNA, 25 bp, Homo sapien
gatatggtagtactaagtaacccac

SEQ ID NO: 7573 - DNA, 25 bp, Homo sapien
agttagttagtacataatctacgca

SEQ ID NO: 7574 - DNA, 25 bp, Homo sapien
agttagttagtagataatctacgca

SEQ ID NO: 7575 - DNA, 25 bp, Homo sapien
gtcgtacttaacgttatttacctag

SEQ ID NO: 7576 - DNA, 25 bp, Homo sapien
gtcgtacttaaccttatttacctag

SEQ ID NO: 7577 - DNA, 25 bp, Homo sapien
caataacctatattgtaccgtagtg

SEQ ID NO: 7578 - DNA, 25 bp, Homo sapien
caataacctataatgtaccgtagtg

SEQ ID NO: 7579 - DNA, 25 bp, Homo sapien
ttaagataccgaagttccctcgtag

SEQ ID NO: 7580 - DNA, 25 bp, Homo sapien
ttaagataccgatgttccctcgtag

SEQ ID NO: 7581 - DNA, 25 bp, Homo sapien
tacgacgacaagagtgcgcggtcga

SEQ ID NO: 7582 - DNA, 25 bp, Homo sapien
tacgacgacaagtgtgcgcggtcga

SEQ ID NO: 7583 - DNA, 25 bp, Homo sapien
gtaaaacgtaaaaattctgtcctag

SEQ ID NO: 7584 - DNA, 25 bp, Homo sapien
gtaaaacgtaaatattctgtcctag

SEQ ID NO: 7585 - DNA, 25 bp, Homo sapien
aaacagacactataagggtgtccta

SEQ ID NO: 7586 - DNA, 25 bp, Homo sapien
aaacagacactaaaagggtgtccta

SEQ ID NO: 7587 - DNA, 25 bp, Homo sapien
tgttcgaggccagaattagctgtcg

SEQ ID NO: 7588 - DNA, 25 bp, Homo sapien
tgttcgaggccacaattagctgtcg

SEQ ID NO: 7589 - DNA, 25 bp, Homo sapien
cgtccagtcgtgcaacgacagctaa

SEQ ID NO: 7590 - DNA, 25 bp, Homo sapien
cgtccagtcgtggaacgacagctaa

SEQ ID NO: 7591 - DNA, 25 bp, Homo sapien
ttcgttataggtcttcgcagtagaa

SEQ ID NO: 7592 - DNA, 25 bp, Homo sapien
ttcgttataggtgttcgcagtagaa

SEQ ID NO: 7593 - DNA, 25 bp, Homo sapien
ttttaagagttaagtccgtcagaca

SEQ ID NO: 7594 - DNA, 25 bp, Homo sapien
ttttaagagttatgtccgtcagaca

SEQ ID NO: 7595 - DNA, 25 bp, Homo sapien
ctgttagtaggatcgacaacaagag

SEQ ID NO: 7596 - DNA, 25 bp, Homo sapien
ctgttagtaggaacgacaacaagag

SEQ ID NO: 7597 - DNA, 25 bp, Homo sapien
cgttttagaactcacgtaaagaata

SEQ ID NO: 7598 - DNA, 25 bp, Homo sapien
cgttttagaactgacgtaaagaata

SEQ ID NO: 7599 - DNA, 25 bp, Homo sapien
acgtgttccgaaggagagagctccc

SEQ ID NO: 7600 - DNA, 25 bp, Homo sapien
acgtgttccgaacgagagagctccc

SEQ ID NO: 7601 - DNA, 25 bp, Homo sapien
tcggtgtctccagtgcgagtccacc

SEQ ID NO: 7602 - DNA, 25 bp, Homo sapien
tcggtgtctccactgcgagtccacc

SEQ ID NO: 7603 - DNA, 25 bp, Homo sapien
gtgtctacgaccactgtttcacctc

SEQ ID NO: 7604 - DNA, 25 bp, Homo sapien
gtgtctacgacctctgtttcacctc

SEQ ID NO: 7605 - DNA, 25 bp, Homo sapien
ctgagtgaggtctcgattacacaga

SEQ ID NO: 7606 - DNA, 25 bp, Homo sapien
ctgagtgaggtcacgattacacaga

SEQ ID NO: 7607 - DNA, 25 bp, Homo sapien
tgtagacaggcaacgactccactca

SEQ ID NO: 7608 - DNA, 25 bp, Homo sapien
tgtagacaggcatcgactccactca

SEQ ID NO: 7609 - DNA, 25 bp, Homo sapien
gtgtaacatccatactcggaccact

SEQ ID NO: 7610 - DNA, 25 bp, Homo sapien
gtgtaacatccaaactcggaccact

SEQ ID NO: 7611 - DNA, 25 bp, Homo sapien
gtgagtatgacgtcctctctcttct

SEQ ID NO: 7612 - DNA, 25 bp, Homo sapien
gtgagtatgacgacctctctcttct

SEQ ID NO: 7613 - DNA, 25 bp, Homo sapien
gtggatctcacaacacccgtgtgtg

SEQ ID NO: 7614 - DNA, 25 bp, Homo sapien
gtggatctcacatcacccgtgtgtg

SEQ ID NO: 7615 - DNA, 25 bp, Homo sapien
ggagcacacacgaacgcgctgccga

SEQ ID NO: 7616 - DNA, 25 bp, Homo sapien
ggagcacacacgtacgcgctgccga

SEQ ID NO: 7617 - DNA, 25 bp, Homo sapien
cttggcgaccccaggaccggtcggt

SEQ ID NO: 7618 - DNA, 25 bp, Homo sapien
cttggcgacccctggaccggtcggt

SEQ ID NO: 7619 - DNA, 25 bp, Homo sapien
gcgagatccttttacacgatacgag

SEQ ID NO: 7620 - DNA, 25 bp, Homo sapien
gcgagatcctttaacacgatacgag

SEQ ID NO: 7621 - DNA, 25 bp, Homo sapien
ataaacgtcctcctcttccagaagg

SEQ ID NO: 7622 - DNA, 25 bp, Homo sapien
ataaacgtcctcgtcttccagaagg

SEQ ID NO: 7623 - DNA, 25 bp, Homo sapien
actactggtgcttctagacgaggag

SEQ ID NO: 7624 - DNA, 25 bp, Homo sapien
actactggtgctactagacgaggag

SEQ ID NO: 7625 - DNA, 25 bp, Homo sapien
acaccggtggtctactccgagatac

SEQ ID NO: 7626 - DNA, 25 bp, Homo sapien
acaccggtggtcaactccgagatac

SEQ ID NO: 7627 - DNA, 25 bp, Homo sapien
caaaaatcgtcgtaagtgggcacag

SEQ ID NO: 7628 - DNA, 25 bp, Homo sapien
caaaaatcgtcgaaagtgggcacag

SEQ ID NO: 7629 - DNA, 25 bp, Homo sapien
aaaacttagttcagtgtcggcacac

SEQ ID NO: 7630 - DNA, 25 bp, Homo sapien
aaaacttagttctgtgtcggcacac

SEQ ID NO: 7631 - DNA, 25 bp, Homo sapien
cgtcgttctacgtcggtgtgaagtc

SEQ ID NO: 7632 - DNA, 25 bp, Homo sapien
cgtcgttctacgacggtgtgaagtc

SEQ ID NO: 7633 - DNA, 25 bp, Homo sapien
caccggtcgtctagtaggtgctgct

SEQ ID NO: 7634 - DNA, 25 bp, Homo sapien
caccggtcgtcttgtaggtgctgct

SEQ ID NO: 7635 - DNA, 25 bp, Homo sapien
ccaccatctttcgtcgagcagagag

SEQ ID NO: 7636 - DNA, 25 bp, Homo sapien
ccaccatctttcctcgagcagagag

SEQ ID NO: 7637 - DNA, 25 bp, Homo sapien
cgaccttacctttgggacgtcagaa

SEQ ID NO: 7638 - DNA, 25 bp, Homo sapien
cgaccttaccttagggacgtcagaa

SEQ ID NO: 7639 - DNA, 25 bp, Homo sapien
gtcacggacgttacccgtcggagtg

SEQ ID NO: 7640 - DNA, 25 bp, Homo sapien
gtcacggacgtttcccgtcggagtg

SEQ ID NO: 7641 - DNA, 25 bp, Homo sapien
gactgtcgaccgtccaccgtgacgg

SEQ ID NO: 7642 - DNA, 25 bp, Homo sapien
gactgtcgaccgaccaccgtgacgg

SEQ ID NO: 7643 - DNA, 25 bp, Homo sapien
gcgcgaagaggacttaccgactcct

SEQ ID NO: 7644 - DNA, 25 bp, Homo sapien
gcgcgaagaggagttaccgactcct

SEQ ID NO: 7645 - DNA, 25 bp, Homo sapien
agaggagagagatcctttgaacact

SEQ ID NO: 7646 - DNA, 25 bp, Homo sapien
agaggagagagaacctttgaacact

SEQ ID NO: 7647 - DNA, 25 bp, Homo sapien
agaaagagagaaccagtcggaacac

SEQ ID NO: 7648 - DNA, 25 bp, Homo sapien
agaaagagagaagcagtcggaacac

SEQ ID NO: 7649 - DNA, 25 bp, Homo sapien
aaacgaaagtagttaccagagacac

SEQ ID NO: 7650 - DNA, 25 bp, Homo sapien
aaacgaaagtagataccagagacac

SEQ ID NO: 7651 - DNA, 25 bp, Homo sapien
aatacgacagaggaactcattacct

SEQ ID NO: 7652 - DNA, 25 bp, Homo sapien
aatacgacagagcaactcattacct

SEQ ID NO: 7653 - DNA, 25 bp, Homo sapien
acacaagagtctacagtcgttaact

SEQ ID NO: 7654 - DNA, 25 bp, Homo sapien
acacaagagtcttcagtcgttaact

SEQ ID NO: 7655 - DNA, 25 bp, Homo sapien
gacacagacgactccactctgaact

SEQ ID NO: 7656 - DNA, 25 bp, Homo sapien
gacacagacgacaccactctgaact

SEQ ID NO: 7657 - DNA, 25 bp, Homo sapien
gcgtcgtcagggacggatctgaact

SEQ ID NO: 7658 - DNA, 25 bp, Homo sapien
gcgtcgtcagggtcggatctgaact

SEQ ID NO: 7659 - DNA, 25 bp, Homo sapien
acgtctcggaggtccagtcgaccct

SEQ ID NO: 7660 - DNA, 25 bp, Homo sapien
acgtctcggaggaccagtcgaccct

SEQ ID NO: 7661 - DNA, 25 bp, Homo sapien
ccgagaccttgaactagtactcaaa

SEQ ID NO: 7662 - DNA, 25 bp, Homo sapien
ccgagaccttgatctagtactcaaa

SEQ ID NO: 7663 - DNA, 25 bp, Homo sapien
cttgtgacatcttttactttagagg

SEQ ID NO: 7664 - DNA, 25 bp, Homo sapien
cttgtgacatctattactttagagg

SEQ ID NO: 7665 - DNA, 25 bp, Homo sapien
ttgcgatattcacacgctccactgt

SEQ ID NO: 7666 - DNA, 25 bp, Homo sapien
ttgcgatattcagacgctccactgt

SEQ ID NO: 7667 - DNA, 25 bp, Homo sapien
atgtagacatttttgaactagatcc

SEQ ID NO: 7668 - DNA, 25 bp, Homo sapien
atgtagacatttatgaactagatcc

SEQ ID NO: 7669 - DNA, 25 bp, Homo sapien
gtgtagatttttcagttcctacact

SEQ ID NO: 7670 - DNA, 25 bp, Homo sapien
gtgtagatttttgagttcctacact

SEQ ID NO: 7671 - DNA, 25 bp, Homo sapien
aggtgtctgtgtggttgacgctact

SEQ ID NO: 7672 - DNA, 25 bp, Homo sapien
aggtgtctgtgtcgttgacgctact

SEQ ID NO: 7673 - DNA, 25 bp, Homo sapien
gagtgtcgtcatacagtgtacataa

SEQ ID NO: 7674 - DNA, 25 bp, Homo sapien
gagtgtcgtcattcagtgtacataa

SEQ ID NO: 7675 - DNA, 25 bp, Homo sapien
gagttactctataccggaagtcgac

SEQ ID NO: 7676 - DNA, 25 bp, Homo sapien
gagttactctattccggaagtcgac

SEQ ID NO: 7677 - DNA, 25 bp, Homo sapien
acgaggaccatcgtctagaacctac

SEQ ID NO: 7678 - DNA, 25 bp, Homo sapien
acgaggaccatcctctagaacctac

SEQ ID NO: 7679 - DNA, 25 bp, Homo sapien
acggtgtagacaagcgtcatgacca

SEQ ID NO: 7680 - DNA, 25 bp, Homo sapien
acggtgtagacatgcgtcatgacca

SEQ ID NO: 7681 - DNA, 25 bp, Homo sapien
cggtgtacgacgtgtgcaggtccac

SEQ ID NO: 7682 - DNA, 25 bp, Homo sapien
cggtgtacgacgagtgcaggtccac

SEQ ID NO: 7683 - DNA, 25 bp, Homo sapien
gcgtactaccgcatctggagaccac

SEQ ID NO: 7684 - DNA, 25 bp, Homo sapien
gcgtactaccgcttctggagaccac

SEQ ID NO: 7685 - DNA, 25 bp, Homo sapien
ggggctagtggttttctacacgtca

SEQ ID NO: 7686 - DNA, 25 bp, Homo sapien
ggggctagtggtattctacacgtca

SEQ ID NO: 7687 - DNA, 25 bp, Homo sapien
tagacacgttcaaggttaacgacat

SEQ ID NO: 7688 - DNA, 25 bp, Homo sapien
tagacacgttcatggttaacgacat

SEQ ID NO: 7689 - DNA, 25 bp, Homo sapien
taacggtgtccttcgttcacgtaag

SEQ ID NO: 7690 - DNA, 25 bp, Homo sapien
taacggtgtcctacgttcacgtaag

SEQ ID NO: 7691 - DNA, 25 bp, Homo sapien
tcagaagttcttaagccactacagt

SEQ ID NO: 7692 - DNA, 25 bp, Homo sapien
tcagaagttctttagccactacagt

SEQ ID NO: 7693 - DNA, 25 bp, Homo sapien
gtgaggtcctacagtctatactgcg

SEQ ID NO: 7694 - DNA, 25 bp, Homo sapien
gtgaggtcctactgtctatactgcg

SEQ ID NO: 7695 - DNA, 25 bp, Homo sapien
taaagaggtagttcaggttgtaccc

SEQ ID NO: 7696 - DNA, 25 bp, Homo sapien
taaagaggtagtacaggttgtaccc

SEQ ID NO: 7697 - DNA, 25 bp, Homo sapien
aaaattctcgttttgtctctacttc

SEQ ID NO: 7698 - DNA, 25 bp, Homo sapien
aaaattctcgttatgtctctacttc

SEQ ID NO: 7699 - DNA, 25 bp, Homo sapien
tccgtgtggttgtcgtgtatctgtc

SEQ ID NO: 7700 - DNA, 25 bp, Homo sapien
tccgtgtggttgacgtgtatctgtc

SEQ ID NO: 7701 - DNA, 25 bp, Homo sapien
tcactccgagtttaccgttcatatg

SEQ ID NO: 7702 - DNA, 25 bp, Homo sapien
tcactccgagttaaccgttcatatg

SEQ ID NO: 7703 - DNA, 25 bp, Homo sapien
ttttctgtcgtcgtcttcgtaatcg

SEQ ID NO: 7704 - DNA, 25 bp, Homo sapien
ttttctgtcgtcctcttcgtaatcg

SEQ ID NO: 7705 - DNA, 25 bp, Homo sapien
ttactgtgaccatctatgtagaagt

SEQ ID NO: 7706 - DNA, 25 bp, Homo sapien
ttactgtgaccaactatgtagaagt

SEQ ID NO: 7707 - DNA, 25 bp, Homo sapien
taatatccacgtacggtagtacaga

SEQ ID NO: 7708 - DNA, 25 bp, Homo sapien
taatatccacgttcggtagtacaga

SEQ ID NO: 7709 - DNA, 25 bp, Homo sapien
gtaatagtcgaggaggacggaacac

SEQ ID NO: 7710 - DNA, 25 bp, Homo sapien
gtaatagtcgagcaggacggaacac

SEQ ID NO: 7711 - DNA, 25 bp, Homo sapien
tcacctagtaggagtcgaacctcac

SEQ ID NO: 7712 - DNA, 25 bp, Homo sapien
tcacctagtaggtgtcgaacctcac

SEQ ID NO: 7713 - DNA, 25 bp, Homo sapien
cgggttcagtgagtgatacgtttct

SEQ ID NO: 7714 - DNA, 25 bp, Homo sapien
cgggttcagtgactgatacgtttct

SEQ ID NO: 7715 - DNA, 25 bp, Homo sapien
acttgtagtgtctacgtacagactc

SEQ ID NO: 7716 - DNA, 25 bp, Homo sapien
acttgtagtgtcaacgtacagactc

SEQ ID NO: 7717 - DNA, 25 bp, Homo sapien
tcatccgtgagtcacttacagtcgg

SEQ ID NO: 7718 - DNA, 25 bp, Homo sapien
tcatccgtgagtgacttacagtcgg

SEQ ID NO: 7719 - DNA, 25 bp, Homo sapien
catagtcgtctctgtatttagactg

SEQ ID NO: 7720 - DNA, 25 bp, Homo sapien
catagtcgtctcagtatttagactg

SEQ ID NO: 7721 - DNA, 25 bp, Homo sapien
attagaactttcagacttcagactg

SEQ ID NO: 7722 - DNA, 25 bp, Homo sapien
attagaactttctgacttcagactg

SEQ ID NO: 7723 - DNA, 25 bp, Homo sapien
acactatcttcttactaaataatct

SEQ ID NO: 7724 - DNA, 25 bp, Homo sapien
acactatcttctaactaaataatct

SEQ ID NO: 7725 - DNA, 25 bp, Homo sapien
cgtacccacgttactaaggtatctt

SEQ ID NO: 7726 - DNA, 25 bp, Homo sapien
cgtacccacgtttctaaggtatctt

SEQ ID NO: 7727 - DNA, 25 bp, Homo sapien
tcttacggtatgttgttaagacctt

SEQ ID NO: 7728 - DNA, 25 bp, Homo sapien
tcttacggtatgatgttaagacctt

SEQ ID NO: 7729 - DNA, 25 bp, Homo sapien
tgttcgtgacagaacgataaacttt

SEQ ID NO: 7730 - DNA, 25 bp, Homo sapien
tgttcgtgacagtacgataaacttt

SEQ ID NO: 7731 - DNA, 25 bp, Homo sapien
aattagagaagtaccgaaaacctgt

SEQ ID NO: 7732 - DNA, 25 bp, Homo sapien
aattagagaagttccgaaaacctgt

SEQ ID NO: 7733 - DNA, 25 bp, Homo sapien
gttactcacttgtctatgatatctg

SEQ ID NO: 7734 - DNA, 25 bp, Homo sapien
gttactcacttgactatgatatctg

SEQ ID NO: 7735 - DNA, 25 bp, Homo sapien
gttagttatatgtacgcaagtcctg

SEQ ID NO: 7736 - DNA, 25 bp, Homo sapien
gttagttatatgaacgcaagtcctg

SEQ ID NO: 7737 - DNA, 25 bp, Homo sapien
aatataactgggactatctactagt

SEQ ID NO: 7738 - DNA, 25 bp, Homo sapien
aatataactgggtctatctactagt

SEQ ID NO: 7739 - DNA, 25 bp, Homo sapien
ttggactagaaggaaccactcctat

SEQ ID NO: 7740 - DNA, 25 bp, Homo sapien
ttggactagaagcaaccactcctat

SEQ ID NO: 7741 - DNA, 25 bp, Homo sapien
aaccggacgtcgaagtaaacgctct

SEQ ID NO: 7742 - DNA, 25 bp, Homo sapien
aaccggacgtcgtagtaaacgctct

SEQ ID NO: 7743 - DNA, 25 bp, Homo sapien
cttatgtgtgagacgttcaagattc

SEQ ID NO: 7744 - DNA, 25 bp, Homo sapien
cttatgtgtgagtcgttcaagattc

SEQ ID NO: 7745 - DNA, 25 bp, Homo sapien
cttatggagacgtctatctgatttc

SEQ ID NO: 7746 - DNA, 25 bp, Homo sapien
cttatggagacgactatctgatttc

SEQ ID NO: 7747 - DNA, 25 bp, Homo sapien
cctactgggtccatgtctatattaa

SEQ ID NO: 7748 - DNA, 25 bp, Homo sapien
cctactgggtccttgtctatattaa

SEQ ID NO: 7749 - DNA, 25 bp, Homo sapien
cctacgatggactccttaatacggc

SEQ ID NO: 7750 - DNA, 25 bp, Homo sapien
cctacgatggacaccttaatacggc

SEQ ID NO: 7751 - DNA, 25 bp, Homo sapien
ttgacgatccttacctcatgacgcc

SEQ ID NO: 7752 - DNA, 25 bp, Homo sapien
ttgacgatcctttcctcatgacgcc

SEQ ID NO: 7753 - DNA, 25 bp, Homo sapien
gtagggtactattcccacgtctccc

SEQ ID NO: 7754 - DNA, 25 bp, Homo sapien
gtagggtactatacccacgtctccc

SEQ ID NO: 7755 - DNA, 25 bp, Homo sapien
ttggtcgtcatatttgttctcgtcc

SEQ ID NO: 7756 - DNA, 25 bp, Homo sapien
ttggtcgtcataattgttctcgtcc

SEQ ID NO: 7757 - DNA, 25 bp, Homo sapien
ttccgtcacgacagaatttccgaac

SEQ ID NO: 7758 - DNA, 25 bp, Homo sapien
ttccgtcacgactgaatttccgaac

SEQ ID NO: 7759 - DNA, 25 bp, Homo sapien
taaggtcggacgagactttaccagg

SEQ ID NO: 7760 - DNA, 25 bp, Homo sapien
taaggtcggacgtgactttaccagg

SEQ ID NO: 7761 - DNA, 25 bp, Homo sapien
ggtccagggacaggtacacacgtct

SEQ ID NO: 7762 - DNA, 25 bp, Homo sapien
ggtccagggacacgtacacacgtct

SEQ ID NO: 7763 - DNA, 25 bp, Homo sapien
acaaactctgggacaagtcacagac

SEQ ID NO: 7764 - DNA, 25 bp, Homo sapien
acaaactctgggtcaagtcacagac

SEQ ID NO: 7765 - DNA, 25 bp, Homo sapien
gagatgtgaactaacgagtgaccga

SEQ ID NO: 7766 - DNA, 25 bp, Homo sapien
gagatgtgaacttacgagtgaccga

SEQ ID NO: 7767 - DNA, 25 bp, Homo sapien
aaattcgatattctatccttcttaa

SEQ ID NO: 7768 - DNA, 25 bp, Homo sapien
aaattcgatattgtatccttcttaa

SEQ ID NO: 7769 - DNA, 25 bp, Homo sapien
tcgaactcttcgttccttcaccggt

SEQ ID NO: 7770 - DNA, 25 bp, Homo sapien
tcgaactcttcgatccttcaccggt

SEQ ID NO: 7771 - DNA, 25 bp, Homo sapien
gggacgtatctgtctcgctcccggt

SEQ ID NO: 7772 - DNA, 25 bp, Homo sapien
gggacgtatctgactcgctcccggt

SEQ ID NO: 7773 - DNA, 25 bp, Homo sapien
tggaggtctctgatatcgcaccttc

SEQ ID NO: 7774 - DNA, 25 bp, Homo sapien
tggaggtctctgttatcgcaccttc

SEQ ID NO: 7775 - DNA, 25 bp, Homo sapien
cttggggtacgttcatgacccttcg

SEQ ID NO: 7776 - DNA, 25 bp, Homo sapien
cttggggtacgtacatgacccttcg

SEQ ID NO: 7777 - DNA, 25 bp, Homo sapien
ccagacttaggagtcgctacacgaa

SEQ ID NO: 7778 - DNA, 25 bp, Homo sapien
ccagacttaggactcgctacacgaa

SEQ ID NO: 7779 - DNA, 25 bp, Homo sapien
cctgactcagtaagccacatgaacg

SEQ ID NO: 7780 - DNA, 25 bp, Homo sapien
cctgactcagtatgccacatgaacg

SEQ ID NO: 7781 - DNA, 25 bp, Homo sapien
cgactacctcgtagcatacaaaacg

SEQ ID NO: 7782 - DNA, 25 bp, Homo sapien
cgactacctcgttgcatacaaaacg

SEQ ID NO: 7783 - DNA, 25 bp, Homo sapien
agtaccgttctacacagacaaaagt

SEQ ID NO: 7784 - DNA, 25 bp, Homo sapien
agtaccgttctagacagacaaaagt

SEQ ID NO: 7785 - DNA, 25 bp, Homo sapien
tccctataccgtacgagaaacggtt

SEQ ID NO: 7786 - DNA, 25 bp, Homo sapien
tccctataccgttcgagaaacggtt

SEQ ID NO: 7787 - DNA, 25 bp, Homo sapien
atctgtacttttgactacagaccgt

SEQ ID NO: 7788 - DNA, 25 bp, Homo sapien
atctgtacttttcactacagaccgt

SEQ ID NO: 7789 - DNA, 25 bp, Homo sapien
aacaatctacttcgttcggcaggac

SEQ ID NO: 7790 - DNA, 25 bp, Homo sapien
aacaatctacttggttcggcaggac

SEQ ID NO: 7791 - DNA, 25 bp, Homo sapien
tcaagtccggggtctcgtcacggag

SEQ ID NO: 7792 - DNA, 25 bp, Homo sapien
tcaagtccggggactcgtcacggag

SEQ ID NO: 7793 - DNA, 25 bp, Homo sapien
ccccgtcggtgtggtatcgacgaga

SEQ ID NO: 7794 - DNA, 25 bp, Homo sapien
ccccgtcggtgtcgtatcgacgaga

SEQ ID NO: 7795 - DNA, 25 bp, Homo sapien
caactgtcacttctgtacgacctat

SEQ ID NO: 7796 - DNA, 25 bp, Homo sapien
caactgtcacttgtgtacgacctat

SEQ ID NO: 7797 - DNA, 25 bp, Homo sapien
ctctgagtttagattgtgaaccgtt

SEQ ID NO: 7798 - DNA, 25 bp, Homo sapien
ctctgagtttagtttgtgaaccgtt

SEQ ID NO: 7799 - DNA, 25 bp, Homo sapien
tctttttgtcgttatgtacacgctg

SEQ ID NO: 7800 - DNA, 25 bp, Homo sapien
tctttttgtcgtaatgtacacgctg

SEQ ID NO: 7801 - DNA, 25 bp, Homo sapien
cctctccggtttcttactggtgaca

SEQ ID NO: 7802 - DNA, 25 bp, Homo sapien
cctctccggtttgttactggtgaca

SEQ ID NO: 7803 - DNA, 25 bp, Homo sapien
cttaagtgtttctgtttgggacgac

SEQ ID NO: 7804 - DNA, 25 bp, Homo sapien
cttaagtgtttcagtttgggacgac

SEQ ID NO: 7805 - DNA, 25 bp, Homo sapien
cgtgtcatttttgtggtgtcatacg

SEQ ID NO: 7806 - DNA, 25 bp, Homo sapien
cgtgtcatttttctggtgtcatacg

SEQ ID NO: 7807 - DNA, 25 bp, Homo sapien
tcttcgagtttttgtcggggtttcg

SEQ ID NO: 7808 - DNA, 25 bp, Homo sapien
tcttcgagttttagtcggggtttcg

SEQ ID NO: 7809 - DNA, 25 bp, Homo sapien
gtttcagctcccatcggggtccacg

SEQ ID NO: 7810 - DNA, 25 bp, Homo sapien
gtttcagctcccttcggggtccacg

SEQ ID NO: 7811 - DNA, 25 bp, Homo sapien
tttgtttgaacttccgttgtaccta

SEQ ID NO: 7812 - DNA, 25 bp, Homo sapien
tttgtttgaactaccgttgtaccta

SEQ ID NO: 7813 - DNA, 25 bp, Homo sapien
ctttcctctgaacacctgtgacaag

SEQ ID NO: 7814 - DNA, 25 bp, Homo sapien
ctttcctctgaagacctgtgacaag

SEQ ID NO: 7815 - DNA, 25 bp, Homo sapien
tcaagatttgaaaatcatcacgatg

SEQ ID NO: 7816 - DNA, 25 bp, Homo sapien
tcaagatttgaatatcatcacgatg

SEQ ID NO: 7817 - DNA, 25 bp, Homo sapien
gatatacgagtttcaacatccagat

SEQ ID NO: 7818 - DNA, 25 bp, Homo sapien
gatatacgagttacaacatccagat

SEQ ID NO: 7819 - DNA, 25 bp, Homo sapien
gtaccagacatcaaacaactcgaga

SEQ ID NO: 7820 - DNA, 25 bp, Homo sapien
gtaccagacatctaacaactcgaga

SEQ ID NO: 7821 - DNA, 25 bp, Homo sapien
ttacggtgtcgtaaaaccgatgaga

SEQ ID NO: 7822 - DNA, 25 bp, Homo sapien
ttacggtgtcgttaaaccgatgaga

SEQ ID NO: 7823 - DNA, 25 bp, Homo sapien
acatgtccgagtagcgagcgtacga

SEQ ID NO: 7824 - DNA, 25 bp, Homo sapien
acatgtccgagttgcgagcgtacga

SEQ ID NO: 7825 - DNA, 25 bp, Homo sapien
aaaatattctcgtttccgttgtcag

SEQ ID NO: 7826 - DNA, 25 bp, Homo sapien
aaaatattctcgattccgttgtcag

SEQ ID NO: 7827 - DNA, 25 bp, Homo sapien
tagtttctctcagtctcgagttcag

SEQ ID NO: 7828 - DNA, 25 bp, Homo sapien
tagtttctctcactctcgagttcag

SEQ ID NO: 7829 - DNA, 25 bp, Homo sapien
tggacttttccgtaacaagttgttt

SEQ ID NO: 7830 - DNA, 25 bp, Homo sapien
tggacttttccgaaacaagttgttt

SEQ ID NO: 7831 - DNA, 25 bp, Homo sapien
gttgtctctcgaagacttccattac

SEQ ID NO: 7832 - DNA, 25 bp, Homo sapien
gttgtctctcgatgacttccattac

SEQ ID NO: 7833 - DNA, 25 bp, Homo sapien
cgtttgagaagtgaatcgcatgtcg

SEQ ID NO: 7834 - DNA, 25 bp, Homo sapien
cgtttgagaagtcaatcgcatgtcg

SEQ ID NO: 7835 - DNA, 25 bp, Homo sapien
tcaagagtaggagtacctcatgtct

SEQ ID NO: 7836 - DNA, 25 bp, Homo sapien
tcaagagtaggactacctcatgtct

SEQ ID NO: 7837 - DNA, 25 bp, Homo sapien
ccaagataggtacgtcagtaagtcc

SEQ ID NO: 7838 - DNA, 25 bp, Homo sapien
ccaagataggtaggtcagtaagtcc

SEQ ID NO: 7839 - DNA, 25 bp, Homo sapien
ctctgacgggttcagacgaatgtcc

SEQ ID NO: 7840 - DNA, 25 bp, Homo sapien
ctctgacgggttgagacgaatgtcc

SEQ ID NO: 7841 - DNA, 25 bp, Homo sapien
aaaagatggagtgaggtaccggtcc

SEQ ID NO: 7842 - DNA, 25 bp, Homo sapien
aaaagatggagtcaggtaccggtcc

SEQ ID NO: 7843 - DNA, 25 bp, Homo sapien
ggagaggaatacgtgtctacctgtc

SEQ ID NO: 7844 - DNA, 25 bp, Homo sapien
ggagaggaatacctgtctacctgtc

SEQ ID NO: 7845 - DNA, 25 bp, Homo sapien
aggacgaaaatatgtgtctgcgccg

SEQ ID NO: 7846 - DNA, 25 bp, Homo sapien
aggacgaaaataagtgtctgcgccg

SEQ ID NO: 7847 - DNA, 25 bp, Homo sapien
taggtctaaaatatcagacgtcatt

SEQ ID NO: 7848 - DNA, 25 bp, Homo sapien
taggtctaaaatttcagacgtcatt

SEQ ID NO: 7849 - DNA, 25 bp, Homo sapien
tttctccagacagtcaacgactgaa

SEQ ID NO: 7850 - DNA, 25 bp, Homo sapien
tttctccagacactcaacgactgaa

SEQ ID NO: 7851 - DNA, 25 bp, Homo sapien
tcgaccgggacaggtccaggctgag

SEQ ID NO: 7852 - DNA, 25 bp, Homo sapien
tcgaccgggacacgtccaggctgag

SEQ ID NO: 7853 - DNA, 25 bp, Homo sapien
ataacgattggactcacgatgaaga

SEQ ID NO: 7854 - DNA, 25 bp, Homo sapien
ataacgattggagtcacgatgaaga

SEQ ID NO: 7855 - DNA, 25 bp, Homo sapien
aagatcctcgagaccgggaccgact

SEQ ID NO: 7856 - DNA, 25 bp, Homo sapien
aagatcctcgagtccgggaccgact

SEQ ID NO: 7857 - DNA, 25 bp, Homo sapien
aggagtacaactgagcacccgggac

SEQ ID NO: 7858 - DNA, 25 bp, Homo sapien
aggagtacaactcagcacccgggac

SEQ ID NO: 7859 - DNA, 25 bp, Homo sapien
aagacgcgaaacgaccaccgaggac

SEQ ID NO: 7860 - DNA, 25 bp, Homo sapien
aagacgcgaaaccaccaccgaggac

SEQ ID NO: 7861 - DNA, 25 bp, Homo sapien
ggctctcgaacaccaccaacgaaga

SEQ ID NO: 7862 - DNA, 25 bp, Homo sapien
ggctctcgaacagcaccaacgaaga

SEQ ID NO: 7863 - DNA, 25 bp, Homo sapien
atgaactttcacaccgagagccgag

SEQ ID NO: 7864 - DNA, 25 bp, Homo sapien
atgaactttcactccgagagccgag

SEQ ID NO: 7865 - DNA, 25 bp, Homo sapien
ctaaatagttcacaccggagatcag

SEQ ID NO: 7866 - DNA, 25 bp, Homo sapien
ctaaatagttcagaccggagatcag

SEQ ID NO: 7867 - DNA, 25 bp, Homo sapien
ttaatgatacaatgggatacgtctc

SEQ ID NO: 7868 - DNA, 25 bp, Homo sapien
ttaatgatacaaagggatacgtctc

SEQ ID NO: 7869 - DNA, 25 bp, Homo sapien
aatgacgatgtttgtaagtacctac

SEQ ID NO: 7870 - DNA, 25 bp, Homo sapien
aatgacgatgttagtaagtacctac

SEQ ID NO: 7871 - DNA, 25 bp, Homo sapien
gaacgaaggcagaccactcactagt

SEQ ID NO: 7872 - DNA, 25 bp, Homo sapien
gaacgaaggcagtccactcactagt

SEQ ID NO: 7873 - DNA, 25 bp, Homo sapien
attgaagtgaacttaccctccgtgt

SEQ ID NO: 7874 - DNA, 25 bp, Homo sapien
attgaagtgaacataccctccgtgt

SEQ ID NO: 7875 - DNA, 25 bp, Homo sapien
gacacgaaaaggagatactgttcca

SEQ ID NO: 7876 - DNA, 25 bp, Homo sapien
gacacgaaaaggtgatactgttcca

SEQ ID NO: 7877 - DNA, 25 bp, Homo sapien
gcagacaaaaggtctttttacacta

SEQ ID NO: 7878 - DNA, 25 bp, Homo sapien
gcagacaaaaggactttttacacta

SEQ ID NO: 7879 - DNA, 25 bp, Homo sapien
taggatgatgttacctaattaccat

SEQ ID NO: 7880 - DNA, 25 bp, Homo sapien
taggatgatgtttcctaattaccat

SEQ ID NO: 7881 - DNA, 25 bp, Homo sapien
gactcaagtcatgactaggttccta

SEQ ID NO: 7882 - DNA, 25 bp, Homo sapien
gactcaagtcatcactaggttccta

SEQ ID NO: 7883 - DNA, 25 bp, Homo sapien
gtacaactctacgacatagggcacg

SEQ ID NO: 7884 - DNA, 25 bp, Homo sapien
gtacaactctaccacatagggcacg

SEQ ID NO: 7885 - DNA, 25 bp, Homo sapien
aaaacctcatcaaagacgacgaccg

SEQ ID NO: 7886 - DNA, 25 bp, Homo sapien
aaaacctcatcatagacgacgaccg

SEQ ID NO: 7887 - DNA, 25 bp, Homo sapien
acgacccatattaacaactacggtg

SEQ ID NO: 7888 - DNA, 25 bp, Homo sapien
acgacccatatttacaactacggtg

SEQ ID NO: 7889 - DNA, 25 bp, Homo sapien
atcccccgagtgtccatctagagcg

SEQ ID NO: 7890 - DNA, 25 bp, Homo sapien
atcccccgagtgaccatctagagcg

SEQ ID NO: 7891 - DNA, 25 bp, Homo sapien
gttctctcagggactcactcttccg

SEQ ID NO: 7892 - DNA, 25 bp, Homo sapien
gttctctcagggtctcactcttccg

SEQ ID NO: 7893 - DNA, 25 bp, Homo sapien
ggcatgatacggtccctcataccgt

SEQ ID NO: 7894 - DNA, 25 bp, Homo sapien
ggcatgatacggaccctcataccgt

SEQ ID NO: 7895 - DNA, 25 bp, Homo sapien
tggtaaaataccaccctatgtacag

SEQ ID NO: 7896 - DNA, 25 bp, Homo sapien
tggtaaaatacctccctatgtacag

SEQ ID NO: 7897 - DNA, 25 bp, Homo sapien
gaggaaaatccctatgtactgtcta

SEQ ID NO: 7898 - DNA, 25 bp, Homo sapien
gaggaaaatcccaatgtactgtcta

SEQ ID NO: 7899 - DNA, 25 bp, Homo sapien
agacggaaacggataactccctgac

SEQ ID NO: 7900 - DNA, 25 bp, Homo sapien
agacggaaacggttaactccctgac

SEQ ID NO: 7901 - DNA, 25 bp, Homo sapien
cagtccaaggttcaagttcctgtat

SEQ ID NO: 7902 - DNA, 25 bp, Homo sapien
cagtccaaggttgaagttcctgtat

SEQ ID NO: 7903 - DNA, 25 bp, Homo sapien
caaaagtgggttaagagatcgttgt

SEQ ID NO: 7904 - DNA, 25 bp, Homo sapien
caaaagtgggtttagagatcgttgt

SEQ ID NO: 7905 - DNA, 25 bp, Homo sapien
cgaaaaccgagctaggaacacatag

SEQ ID NO: 7906 - DNA, 25 bp, Homo sapien
cgaaaaccgagcaaggaacacatag

SEQ ID NO: 7907 - DNA, 25 bp, Homo sapien
agacaacgtgttcaaggatcctaca

SEQ ID NO: 7908 - DNA, 25 bp, Homo sapien
agacaacgtgttgaaggatcctaca

SEQ ID NO: 7909 - DNA, 25 bp, Homo sapien
aagtagggtagctacagggagtcca

SEQ ID NO: 7910 - DNA, 25 bp, Homo sapien
aagtagggtagcaacagggagtcca

SEQ ID NO: 7911 - DNA, 25 bp, Homo sapien
actgtgaactgtatccgaagcatca

SEQ ID NO: 7912 - DNA, 25 bp, Homo sapien
actgtgaactgtttccgaagcatca

SEQ ID NO: 7913 - DNA, 25 bp, Homo sapien
aaccttggtataacgattacgacgt

SEQ ID NO: 7914 - DNA, 25 bp, Homo sapien
aaccttggtatatcgattacgacgt

SEQ ID NO: 7915 - DNA, 25 bp, Homo sapien
cgcgacccggtcgttacgtttaccg

SEQ ID NO: 7916 - DNA, 25 bp, Homo sapien
cgcgacccggtccttacgtttaccg

SEQ ID NO: 7917 - DNA, 25 bp, Homo sapien
gggaacgactcgatcctcctttcct

SEQ ID NO: 7918 - DNA, 25 bp, Homo sapien
gggaacgactcgttcctcctttcct

SEQ ID NO: 7919 - DNA, 25 bp, Homo sapien
tgtataccgagtcgaacacttgtcc

SEQ ID NO: 7920 - DNA, 25 bp, Homo sapien
tgtataccgagtggaacacttgtcc

SEQ ID NO: 7921 - DNA, 25 bp, Homo sapien
gcacacttgtgacgaaacctcttat

SEQ ID NO: 7922 - DNA, 25 bp, Homo sapien
gcacacttgtgaggaaacctcttat

SEQ ID NO: 7923 - DNA, 25 bp, Homo sapien
tccttctgttgacaagtctgctatc

SEQ ID NO: 7924 - DNA, 25 bp, Homo sapien
tccttctgttgagaagtctgctatc

SEQ ID NO: 7925 - DNA, 25 bp, Homo sapien
ctcttcgggacataagatgtctctg

SEQ ID NO: 7926 - DNA, 25 bp, Homo sapien
ctcttcgggacaaaagatgtctctg

SEQ ID NO: 7927 - DNA, 25 bp, Homo sapien
acacggaccaatcgtatagtgtacg

SEQ ID NO: 7928 - DNA, 25 bp, Homo sapien
acacggaccaatggtatagtgtacg

SEQ ID NO: 7929 - DNA, 25 bp, Homo sapien
acaggttctgtatgtacgtgtccga

SEQ ID NO: 7930 - DNA, 25 bp, Homo sapien
acaggttctgtaagtacgtgtccga

SEQ ID NO: 7931 - DNA, 25 bp, Homo sapien
cccagagactcactctgtgtcgagg

SEQ ID NO: 7932 - DNA, 25 bp, Homo sapien
cccagagactcagtctgtgtcgagg

SEQ ID NO: 7933 - DNA, 25 bp, Homo sapien
tccgaactttaggagtcggtctgtc

SEQ ID NO: 7934 - DNA, 25 bp, Homo sapien
tccgaactttagcagtcggtctgtc

SEQ ID NO: 7935 - DNA, 25 bp, Homo sapien
gtcctagactgtatctatatttagg

SEQ ID NO: 7936 - DNA, 25 bp, Homo sapien
gtcctagactgtttctatatttagg

SEQ ID NO: 7937 - DNA, 25 bp, Homo sapien
cgtgtcaacgccttttaattgtcag

SEQ ID NO: 7938 - DNA, 25 bp, Homo sapien
cgtgtcaacgccatttaattgtcag

SEQ ID NO: 7939 - DNA, 25 bp, Homo sapien
gtagaaagccaaataacttcctcgt

SEQ ID NO: 7940 - DNA, 25 bp, Homo sapien
gtagaaagccaattaacttcctcgt

SEQ ID NO: 7941 - DNA, 25 bp, Homo sapien
agacaggcgacagatttgtctcgtc

SEQ ID NO: 7942 - DNA, 25 bp, Homo sapien
agacaggcgacacatttgtctcgtc

SEQ ID NO: 7943 - DNA, 25 bp, Homo sapien
gtaaggaaagacaacttgatcgtac

SEQ ID NO: 7944 - DNA, 25 bp, Homo sapien
gtaaggaaagactacttgatcgtac

SEQ ID NO: 7945 - DNA, 25 bp, Homo sapien
gtgggtctgtgctgatccctagacg

SEQ ID NO: 7946 - DNA, 25 bp, Homo sapien
gtgggtctgtgcagatccctagacg

SEQ ID NO: 7947 - DNA, 25 bp, Homo sapien
ttaggggtattgaagtccactctta

SEQ ID NO: 7948 - DNA, 25 bp, Homo sapien
ttaggggtattgtagtccactctta

SEQ ID NO: 7949 - DNA, 25 bp, Homo sapien
cccgtgatgttcaaccactcttact

SEQ ID NO: 7950 - DNA, 25 bp, Homo sapien
cccgtgatgttctaccactcttact

SEQ ID NO: 7951 - DNA, 25 bp, Homo sapien
actgtacattttgtacacgacgttg

SEQ ID NO: 7952 - DNA, 25 bp, Homo sapien
actgtacattttctacacgacgttg

SEQ ID NO: 7953 - DNA, 25 bp, Homo sapien
aagacatgtacattgtacaccggta

SEQ ID NO: 7954 - DNA, 25 bp, Homo sapien
aagacatgtacaatgtacaccggta

SEQ ID NO: 7955 - DNA, 25 bp, Homo sapien
ccaggtaagtgtcactcctggggta

SEQ ID NO: 7956 - DNA, 25 bp, Homo sapien
ccaggtaagtgtgactcctggggta

SEQ ID NO: 7957 - DNA, 25 bp, Homo sapien
acgagtgtcaccagtcccggggagt

SEQ ID NO: 7958 - DNA, 25 bp, Homo sapien
acgagtgtcacctgtcccggggagt

SEQ ID NO: 7959 - DNA, 25 bp, Homo sapien
gatctcgtccggaacctcggtaggg

SEQ ID NO: 7960 - DNA, 25 bp, Homo sapien
gatctcgtccggtacctcggtaggg

SEQ ID NO: 7961 - DNA, 25 bp, Homo sapien
gtgtcgtccacttgtcagagggagt

SEQ ID NO: 7962 - DNA, 25 bp, Homo sapien
gtgtcgtccactagtcagagggagt

SEQ ID NO: 7963 - DNA, 25 bp, Homo sapien
tgcaactaccctaagtccctgtgta

SEQ ID NO: 7964 - DNA, 25 bp, Homo sapien
tgcaactacccttagtccctgtgta

SEQ ID NO: 7965 - DNA, 25 bp, Homo sapien
gtccagacaccatagttttagtcac

SEQ ID NO: 7966 - DNA, 25 bp, Homo sapien
gtccagacaccaaagttttagtcac

SEQ ID NO: 7967 - DNA, 25 bp, Homo sapien
aaacacgaccctctttgcacagtcg

SEQ ID NO: 7968 - DNA, 25 bp, Homo sapien
aaacacgaccctgtttgcacagtcg

SEQ ID NO: 7969 - DNA, 25 bp, Homo sapien
taaacaactgagaccgaatgttaaa

SEQ ID NO: 7970 - DNA, 25 bp, Homo sapien
taaacaactgagtccgaatgttaaa

SEQ ID NO: 7971 - DNA, 25 bp, Homo sapien
aacaaaagtgacctctaaaaatcgg

SEQ ID NO: 7972 - DNA, 25 bp, Homo sapien
aacaaaagtgacgtctaaaaatcgg

SEQ ID NO: 7973 - DNA, 25 bp, Homo sapien
ctctcgaaggccaactataaggcca

SEQ ID NO: 7974 - DNA, 25 bp, Homo sapien
ctctcgaaggcctactataaggcca

SEQ ID NO: 7975 - DNA, 25 bp, Homo sapien
cctcggagggcctcagatgcgtcca

SEQ ID NO: 7976 - DNA, 25 bp, Homo sapien
cctcggagggccacagatgcgtcca

SEQ ID NO: 7977 - DNA, 25 bp, Homo sapien
tcggtaccagggacgaagaacctgc

SEQ ID NO: 7978 - DNA, 25 bp, Homo sapien
tcggtaccagggtcgaagaacctgc

SEQ ID NO: 7979 - DNA, 25 bp, Homo sapien
gctcctcgggggacacgagtctagc

SEQ ID NO: 7980 - DNA, 25 bp, Homo sapien
gctcctcgggggtcacgagtctagc

SEQ ID NO: 7981 - DNA, 25 bp, Homo sapien
ctcccgtccgggacacagagtaagt

SEQ ID NO: 7982 - DNA, 25 bp, Homo sapien
ctcccgtccgggtcacagagtaagt

SEQ ID NO: 7983 - DNA, 25 bp, Homo sapien
ccgctcactgggagtcgatagtact

SEQ ID NO: 7984 - DNA, 25 bp, Homo sapien
ccgctcactgggtgtcgatagtact

SEQ ID NO: 7985 - DNA, 25 bp, Homo sapien
actgacttggtgagtgtttacgtct

SEQ ID NO: 7986 - DNA, 25 bp, Homo sapien
actgacttggtgtgtgtttacgtct

SEQ ID NO: 7987 - DNA, 25 bp, Homo sapien
ctcaagtaatcgaagtgttgtccgt

SEQ ID NO: 7988 - DNA, 25 bp, Homo sapien
ctcaagtaatcgtagtgttgtccgt

SEQ ID NO: 7989 - DNA, 25 bp, Homo sapien
tccgaatggacgatacttcttcggt

SEQ ID NO: 7990 - DNA, 25 bp, Homo sapien
tccgaatggacgttacttcttcggt

SEQ ID NO: 7991 - DNA, 25 bp, Homo sapien
gcccccgaatagggatcctcatcgg

SEQ ID NO: 7992 - DNA, 25 bp, Homo sapien
gcccccgaatagcgatcctcatcgg

SEQ ID NO: 7993 - DNA, 25 bp, Homo sapien
cgccaacgcgggatcctcgtagctt

SEQ ID NO: 7994 - DNA, 25 bp, Homo sapien
cgccaacgcgggttcctcgtagctt

SEQ ID NO: 7995 - DNA, 25 bp, Homo sapien
gagactctccggagcccacgatgtt

SEQ ID NO: 7996 - DNA, 25 bp, Homo sapien
gagactctccggtgcccacgatgtt

SEQ ID NO: 7997 - DNA, 25 bp, Homo sapien
gaggtaggaccctcgaccagactga

SEQ ID NO: 7998 - DNA, 25 bp, Homo sapien
gaggtaggacccacgaccagactga

SEQ ID NO: 7999 - DNA, 25 bp, Homo sapien
cgcgagtgcaggaccggccacttcg

SEQ ID NO: 8000 - DNA, 25 bp, Homo sapien
cgcgagtgcaggtccggccacttcg

SEQ ID NO: 8001 - DNA, 25 bp, Homo sapien
ccgacggaccggagggacacatatg

SEQ ID NO: 8002 - DNA, 25 bp, Homo sapien
ccgacggaccggtgggacacatatg

SEQ ID NO: 8003 - DNA, 25 bp, Homo sapien
cgacgacttggaacggatacagcaa

SEQ ID NO: 8004 - DNA, 25 bp, Homo sapien
cgacgacttggatcggatacagcaa

SEQ ID NO: 8005 - DNA, 25 bp, Homo sapien
gggttacttggagttatataccaac

SEQ ID NO: 8006 - DNA, 25 bp, Homo sapien
gggttacttggacttatataccaac

SEQ ID NO: 8007 - DNA, 25 bp, Homo sapien
ggtgtttgtaccttttaataccatt

SEQ ID NO: 8008 - DNA, 25 bp, Homo sapien
ggtgtttgtaccatttaataccatt

SEQ ID NO: 8009 - DNA, 25 bp, Homo sapien
atttcgtacccattaagtcggtccg

SEQ ID NO: 8010 - DNA, 25 bp, Homo sapien
atttcgtacccaataagtcggtccg

SEQ ID NO: 8011 - DNA, 25 bp, Homo sapien
gacttcctcaacttatcgtagatag

SEQ ID NO: 8012 - DNA, 25 bp, Homo sapien
gacttcctcaacatatcgtagatag

SEQ ID NO: 8013 - DNA, 25 bp, Homo sapien
gtacattttagattcaagtacacgt

SEQ ID NO: 8014 - DNA, 25 bp, Homo sapien
gtacattttagaatcaagtacacgt

SEQ ID NO: 8015 - DNA, 25 bp, Homo sapien
agacgactttcctccgacagtcagt

SEQ ID NO: 8016 - DNA, 25 bp, Homo sapien
agacgactttccaccgacagtcagt

SEQ ID NO: 8017 - DNA, 25 bp, Homo sapien
agtcgattccttcagtcgactgtgt

SEQ ID NO: 8018 - DNA, 25 bp, Homo sapien
agtcgattccttgagtcgactgtgt

SEQ ID NO: 8019 - DNA, 25 bp, Homo sapien
aggtagtaacctaacatcgtagggt

SEQ ID NO: 8020 - DNA, 25 bp, Homo sapien
aggtagtaaccttacatcgtagggt

SEQ ID NO: 8021 - DNA, 25 bp, Homo sapien
agagtcgaagtcgtgacgacggcat

SEQ ID NO: 8022 - DNA, 25 bp, Homo sapien
agagtcgaagtcctgacgacggcat

SEQ ID NO: 8023 - DNA, 25 bp, Homo sapien
agacgacgacaccttcagcgggact

SEQ ID NO: 8024 - DNA, 25 bp, Homo sapien
agacgacgacacgttcagcgggact

SEQ ID NO: 8025 - DNA, 25 bp, Homo sapien
tttgggaggtacgactttatttcct

SEQ ID NO: 8026 - DNA, 25 bp, Homo sapien
tttgggaggtaccactttatttcct

SEQ ID NO: 8027 - DNA, 25 bp, Homo sapien
gatcggtcgacgaagtccttttggt

SEQ ID NO: 8028 - DNA, 25 bp, Homo sapien
gatcggtcgacgtagtccttttggt

SEQ ID NO: 8029 - DNA, 25 bp, Homo sapien
cacgtcgggtcgtctgtagttgtag

SEQ ID NO: 8030 - DNA, 25 bp, Homo sapien
cacgtcgggtcgactgtagttgtag

SEQ ID NO: 8031 - DNA, 25 bp, Homo sapien
gctactaggtcgtttgtttgtcggt

SEQ ID NO: 8032 - DNA, 25 bp, Homo sapien
gctactaggtcgattgtttgtcggt

SEQ ID NO: 8033 - DNA, 25 bp, Homo sapien
ggtccggtcgcctgtccgtgtccgt

SEQ ID NO: 8034 - DNA, 25 bp, Homo sapien
ggtccggtcgccagtccgtgtccgt

SEQ ID NO: 8035 - DNA, 25 bp, Homo sapien
gtatcaggtcttcctcctacgactt

SEQ ID NO: 8036 - DNA, 25 bp, Homo sapien
gtatcaggtcttgctcctacgactt

SEQ ID NO: 8037 - DNA, 25 bp, Homo sapien
tcttaggtagacaggtcatagacac

SEQ ID NO: 8038 - DNA, 25 bp, Homo sapien
tcttaggtagactggtcatagacac

SEQ ID NO: 8039 - DNA, 25 bp, Homo sapien
tcatcgtaaagacagtcgacgaaac

SEQ ID NO: 8040 - DNA, 25 bp, Homo sapien
tcatcgtaaagagagtcgacgaaac

SEQ ID NO: 8041 - DNA, 25 bp, Homo sapien
ggcactagtctaatttgtcttcaac

SEQ ID NO: 8042 - DNA, 25 bp, Homo sapien
ggcactagtctattttgtcttcaac

SEQ ID NO: 8043 - DNA, 25 bp, Homo sapien
gaccttatgtcgtcagacctcacac

SEQ ID NO: 8044 - DNA, 25 bp, Homo sapien
gaccttatgtcgacagacctcacac

SEQ ID NO: 8045 - DNA, 25 bp, Homo sapien
tggtggtagtcgtagaaccgacaga

SEQ ID NO: 8046 - DNA, 25 bp, Homo sapien
tggtggtagtcgaagaaccgacaga

SEQ ID NO: 8047 - DNA, 25 bp, Homo sapien
tcactgtcgtccataaacaggagtc

SEQ ID NO: 8048 - DNA, 25 bp, Homo sapien
tcactgtcgtccttaaacaggagtc

SEQ ID NO: 8049 - DNA, 25 bp, Homo sapien
acaatggatcctttgacgggtagta

SEQ ID NO: 8050 - DNA, 25 bp, Homo sapien
acaatggatcctatgacgggtagta

SEQ ID NO: 8051 - DNA, 25 bp, Homo sapien
aggggacgacaaagcgcgagtactc

SEQ ID NO: 8052 - DNA, 25 bp, Homo sapien
aggggacgacaatgcgcgagtactc

SEQ ID NO: 8053 - DNA, 25 bp, Homo sapien
tacgagttatagtaatcagtaatcc

SEQ ID NO: 8054 - DNA, 25 bp, Homo sapien
tacgagttatagaaatcagtaatcc

SEQ ID NO: 8055 - DNA, 25 bp, Homo sapien
atgagttactgtacattacttgtcc

SEQ ID NO: 8056 - DNA, 25 bp, Homo sapien
atgagttactgttcattacttgtcc

SEQ ID NO: 8057 - DNA, 25 bp, Homo sapien
gggtgtgtcgtgtgattacactccc

SEQ ID NO: 8058 - DNA, 25 bp, Homo sapien
gggtgtgtcgtgagattacactccc

SEQ ID NO: 8059 - DNA, 25 bp, Homo sapien
tcaagtgtgtgtggacaaaggcgac

SEQ ID NO: 8060 - DNA, 25 bp, Homo sapien
tcaagtgtgtgtcgacaaaggcgac

SEQ ID NO: 8061 - DNA, 25 bp, Homo sapien
caggagtctggtgtaccgaacccac

SEQ ID NO: 8062 - DNA, 25 bp, Homo sapien
caggagtctggtctaccgaacccac

SEQ ID NO: 8063 - DNA, 25 bp, Homo sapien
ggaactaggacgagcctacgaccac

SEQ ID NO: 8064 - DNA, 25 bp, Homo sapien
ggaactaggacgtgcctacgaccac

SEQ ID NO: 8065 - DNA, 25 bp, Homo sapien
tagtcaagtacgaggacccgtctta

SEQ ID NO: 8066 - DNA, 25 bp, Homo sapien
tagtcaagtacgtggacccgtctta

SEQ ID NO: 8067 - DNA, 25 bp, Homo sapien
ggtactaagggttgtaccggtcttt

SEQ ID NO: 8068 - DNA, 25 bp, Homo sapien
ggtactaagggtagtaccggtcttt

SEQ ID NO: 8069 - DNA, 25 bp, Homo sapien
agctccagtcgcttctccgacttgg

SEQ ID NO: 8070 - DNA, 25 bp, Homo sapien
agctccagtcgcatctccgacttgg

SEQ ID NO: 8071 - DNA, 25 bp, Homo sapien
ggtctgcacaccaagtccggtcttg

SEQ ID NO: 8072 - DNA, 25 bp, Homo sapien
ggtctgcacacctagtccggtcttg

SEQ ID NO: 8073 - DNA, 25 bp, Homo sapien
ggtcgaaactactcccgatatacag

SEQ ID NO: 8074 - DNA, 25 bp, Homo sapien
ggtcgaaactacacccgatatacag

SEQ ID NO: 8075 - DNA, 25 bp, Homo sapien
gtatagaggtcgtcgaccgaagtca

SEQ ID NO: 8076 - DNA, 25 bp, Homo sapien
gtatagaggtcgacgaccgaagtca

SEQ ID NO: 8077 - DNA, 25 bp, Homo sapien
gtactacgggacagggactcatagg

SEQ ID NO: 8078 - DNA, 25 bp, Homo sapien
gtactacgggactgggactcatagg

SEQ ID NO: 8079 - DNA, 25 bp, Homo sapien
tcgtaccttcgctaagccgagtagg

SEQ ID NO: 8080 - DNA, 25 bp, Homo sapien
tcgtaccttcgcaaagccgagtagg

SEQ ID NO: 8081 - DNA, 25 bp, Homo sapien
tataccgatcgctctatcgtaggga

SEQ ID NO: 8082 - DNA, 25 bp, Homo sapien
tataccgatcgcactatcgtaggga

SEQ ID NO: 8083 - DNA, 25 bp, Homo sapien
gaaagacgttatctacctgacgttt

SEQ ID NO: 8084 - DNA, 25 bp, Homo sapien
gaaagacgttatgtacctgacgttt

SEQ ID NO: 8085 - DNA, 25 bp, Homo sapien
ggagtcagtagtacacacaacattt

SEQ ID NO: 8086 - DNA, 25 bp, Homo sapien
ggagtcagtagttcacacaacattt

SEQ ID NO: 8087 - DNA, 25 bp, Homo sapien
tcggtaccgattcctcattatgtag

SEQ ID NO: 8088 - DNA, 25 bp, Homo sapien
tcggtaccgattgctcattatgtag

SEQ ID NO: 8089 - DNA, 25 bp, Homo sapien
ctcgtagaaatatgtcttgttaaac

SEQ ID NO: 8090 - DNA, 25 bp, Homo sapien
ctcgtagaaataagtcttgttaaac

SEQ ID NO: 8091 - DNA, 25 bp, Homo sapien
taacgacagtcctgtattgtccaat

SEQ ID NO: 8092 - DNA, 25 bp, Homo sapien
taacgacagtccagtattgtccaat

SEQ ID NO: 8093 - DNA, 25 bp, Homo sapien
tgaggtacccacatagactcgagga

SEQ ID NO: 8094 - DNA, 25 bp, Homo sapien
tgaggtacccacttagactcgagga

SEQ ID NO: 8095 - DNA, 25 bp, Homo sapien
gttaaggttccctagaactccgaag

SEQ ID NO: 8096 - DNA, 25 bp, Homo sapien
gttaaggttcccaagaactccgaag

SEQ ID NO: 8097 - DNA, 25 bp, Homo sapien
aacggttcctcctcagtatagacta

SEQ ID NO: 8098 - DNA, 25 bp, Homo sapien
aacggttcctccacagtatagacta

SEQ ID NO: 8099 - DNA, 25 bp, Homo sapien
gtgtccaccgacgacgaccatagtc

SEQ ID NO: 8100 - DNA, 25 bp, Homo sapien
gtgtccaccgaccacgaccatagtc

SEQ ID NO: 8101 - DNA, 25 bp, Homo sapien
cgtttttcctcaagggtctacttga

SEQ ID NO: 8102 - DNA, 25 bp, Homo sapien
cgtttttcctcatgggtctacttga

SEQ ID NO: 8103 - DNA, 25 bp, Homo sapien
gttcgtctctcatcggtaggtccca

SEQ ID NO: 8104 - DNA, 25 bp, Homo sapien
gttcgtctctcaacggtaggtccca

SEQ ID NO: 8105 - DNA, 25 bp, Homo sapien
gtgtctgttcttgcaagtaccctct

SEQ ID NO: 8106 - DNA, 25 bp, Homo sapien
gtgtctgttcttccaagtaccctct

SEQ ID NO: 8107 - DNA, 25 bp, Homo sapien
gttgtgctatttcgaaacactaata

SEQ ID NO: 8108 - DNA, 25 bp, Homo sapien
gttgtgctatttggaaacactaata

SEQ ID NO: 8109 - DNA, 25 bp, Homo sapien
tgtctttctttgacccgaaacacgt

SEQ ID NO: 8110 - DNA, 25 bp, Homo sapien
tgtctttctttgtcccgaaacacgt

SEQ ID NO: 8111 - DNA, 25 bp, Homo sapien
ggtcctgtgtgaaccgctcacgtct

SEQ ID NO: 8112 - DNA, 25 bp, Homo sapien
ggtcctgtgtgatccgctcacgtct

SEQ ID NO: 8113 - DNA, 25 bp, Homo sapien
agaggctcggtggtagaaccactgt

SEQ ID NO: 8114 - DNA, 25 bp, Homo sapien
agaggctcggtgctagaaccactgt

SEQ ID NO: 8115 - DNA, 25 bp, Homo sapien
aagaagacccggtccaagacacatc

SEQ ID NO: 8116 - DNA, 25 bp, Homo sapien
aagaagacccggaccaagacacatc

SEQ ID NO: 8117 - DNA, 25 bp, Homo sapien
gaaattacctggaacactaagattt

SEQ ID NO: 8118 - DNA, 25 bp, Homo sapien
gaaattacctggtacactaagattt

SEQ ID NO: 8119 - DNA, 25 bp, Homo sapien
tgattaagatgtctatcgacattcc

SEQ ID NO: 8120 - DNA, 25 bp, Homo sapien
tgattaagatgtgtatcgacattcc

SEQ ID NO: 8121 - DNA, 25 bp, Homo sapien
agtcttacctcgtgtctcccttgtt

SEQ ID NO: 8122 - DNA, 25 bp, Homo sapien
agtcttacctcgagtctcccttgtt

SEQ ID NO: 8123 - DNA, 25 bp, Homo sapien
gtacctgtcgaagatcacccttaat

SEQ ID NO: 8124 - DNA, 25 bp, Homo sapien
gtacctgtcgaacatcacccttaat

SEQ ID NO: 8125 - DNA, 25 bp, Homo sapien
gaggacatagaacacatatccaata

SEQ ID NO: 8126 - DNA, 25 bp, Homo sapien
gaggacatagaagacatatccaata

SEQ ID NO: 8127 - DNA, 25 bp, Homo sapien
ttatttctgacaggtttccctaaga

SEQ ID NO: 8128 - DNA, 25 bp, Homo sapien
ttatttctgacacgtttccctaaga

SEQ ID NO: 8129 - DNA, 25 bp, Homo sapien
gattgtataatagttccgtcccacc

SEQ ID NO: 8130 - DNA, 25 bp, Homo sapien
gattgtataatacttccgtcccacc

SEQ ID NO: 8131 - DNA, 25 bp, Homo sapien
cgatttgtgacctgttataaactcc

SEQ ID NO: 8132 - DNA, 25 bp, Homo sapien
cgatttgtgaccagttataaactcc

SEQ ID NO: 8133 - DNA, 25 bp, Homo sapien
gatattcggagacattcacaatcga

SEQ ID NO: 8134 - DNA, 25 bp, Homo sapien
gatattcggagagattcacaatcga

SEQ ID NO: 8135 - DNA, 25 bp, Homo sapien
aaggctccggcgataaacctgtaac

SEQ ID NO: 8136 - DNA, 25 bp, Homo sapien
aaggctccggcgttaaacctgtaac

SEQ ID NO: 8137 - DNA, 25 bp, Homo sapien
gggccggacccgaaaacgtgtgacc

SEQ ID NO: 8138 - DNA, 25 bp, Homo sapien
gggccggacccgtaaacgtgtgacc

SEQ ID NO: 8139 - DNA, 25 bp, Homo sapien
cgacggtgtcccaggaggctacgac

SEQ ID NO: 8140 - DNA, 25 bp, Homo sapien
cgacggtgtccctggaggctacgac

SEQ ID NO: 8141 - DNA, 25 bp, Homo sapien
acaggctcttctgtactgtctacac

SEQ ID NO: 8142 - DNA, 25 bp, Homo sapien
acaggctcttctctactgtctacac

SEQ ID NO: 8143 - DNA, 25 bp, Homo sapien
agacacgactcgtggccctctgtca

SEQ ID NO: 8144 - DNA, 25 bp, Homo sapien
agacacgactcgaggccctctgtca

SEQ ID NO: 8145 - DNA, 25 bp, Homo sapien
cgaacgagacagaagggccggttca

SEQ ID NO: 8146 - DNA, 25 bp, Homo sapien
cgaacgagacagtagggccggttca

SEQ ID NO: 8147 - DNA, 25 bp, Homo sapien
agaggtgtgaacaggattcggttcc

SEQ ID NO: 8148 - DNA, 25 bp, Homo sapien
agaggtgtgaactggattcggttcc

SEQ ID NO: 8149 - DNA, 25 bp, Homo sapien
tatgatgccgattcctctttgttac

SEQ ID NO: 8150 - DNA, 25 bp, Homo sapien
tatgatgccgatacctctttgttac

SEQ ID NO: 8151 - DNA, 25 bp, Homo sapien
tcttgtatggcctcctgttccgttc

SEQ ID NO: 8152 - DNA, 25 bp, Homo sapien
tcttgtatggccacctgttccgttc

SEQ ID NO: 8153 - DNA, 25 bp, Homo sapien
actgaccttcacgtcaacagtccgt

SEQ ID NO: 8154 - DNA, 25 bp, Homo sapien
actgaccttcacctcaacagtccgt

SEQ ID NO: 8155 - DNA, 25 bp, Homo sapien
ggtcataaaccaaaggctaacaacg

SEQ ID NO: 8156 - DNA, 25 bp, Homo sapien
ggtcataaaccataggctaacaacg

SEQ ID NO: 8157 - DNA, 25 bp, Homo sapien
tcgattcctctactcggcttaatac

SEQ ID NO: 8158 - DNA, 25 bp, Homo sapien
tcgattcctctagtcggcttaatac

SEQ ID NO: 8159 - DNA, 25 bp, Homo sapien
gtggttcttctcgtcgtgtagtgac

SEQ ID NO: 8160 - DNA, 25 bp, Homo sapien
gtggttcttctcctcgtgtagtgac

SEQ ID NO: 8161 - DNA, 25 bp, Homo sapien
ctacagtcttctcgtacagtcaggt

SEQ ID NO: 8162 - DNA, 25 bp, Homo sapien
ctacagtcttctggtacagtcaggt

SEQ ID NO: 8163 - DNA, 25 bp, Homo sapien
gcgaagtcgtccctcacgacgaagg

SEQ ID NO: 8164 - DNA, 25 bp, Homo sapien
gcgaagtcgtccgtcacgacgaagg

SEQ ID NO: 8165 - DNA, 25 bp, Homo sapien
acgacgtaaacttcggtaaggacaa

SEQ ID NO: 8166 - DNA, 25 bp, Homo sapien
acgacgtaaactacggtaaggacaa

SEQ ID NO: 8167 - DNA, 25 bp, Homo sapien
actactaacaaaggtgcaccgtccc

SEQ ID NO: 8168 - DNA, 25 bp, Homo sapien
actactaacaaacgtgcaccgtccc

SEQ ID NO: 8169 - DNA, 25 bp, Homo sapien
tagaccaggccctagtaaagtaccc

SEQ ID NO: 8170 - DNA, 25 bp, Homo sapien
tagaccaggcccaagtaaagtaccc

SEQ ID NO: 8171 - DNA, 25 bp, Homo sapien
aacaaaggtatgaaacaaatctctg

SEQ ID NO: 8172 - DNA, 25 bp, Homo sapien
aacaaaggtatgtaacaaatctctg

SEQ ID NO: 8173 - DNA, 25 bp, Homo sapien
attagtggtagtgcaatgggtcctc

SEQ ID NO: 8174 - DNA, 25 bp, Homo sapien
attagtggtagtccaatgggtcctc

SEQ ID NO: 8175 - DNA, 25 bp, Homo sapien
ggattttgactgacagggagacctg

SEQ ID NO: 8176 - DNA, 25 bp, Homo sapien
ggattttgactgtcagggagacctg

SEQ ID NO: 8177 - DNA, 25 bp, Homo sapien
ggtgacccaccgtcggctcggaccc

SEQ ID NO: 8178 - DNA, 25 bp, Homo sapien
ggtgacccaccgacggctcggaccc

SEQ ID NO: 8179 - DNA, 25 bp, Homo sapien
gtccagaaccggtactatcaacctc

SEQ ID NO: 8180 - DNA, 25 bp, Homo sapien
gtccagaaccggaactatcaacctc

SEQ ID NO: 8181 - DNA, 25 bp, Homo sapien
gcttcacaaggtacgagtgagccct

SEQ ID NO: 8182 - DNA, 25 bp, Homo sapien
gcttcacaaggttcgagtgagccct

SEQ ID NO: 8183 - DNA, 25 bp, Homo sapien
tgttagtaaatccatcgtagatcct

SEQ ID NO: 8184 - DNA, 25 bp, Homo sapien
tgttagtaaatcgatcgtagatcct

SEQ ID NO: 8185 - DNA, 25 bp, Homo sapien
ttaagagtaacgtgtactttcattc

SEQ ID NO: 8186 - DNA, 25 bp, Homo sapien
ttaagagtaacgagtactttcattc

SEQ ID NO: 8187 - DNA, 25 bp, Homo sapien
gtcttgagaacagattctataattc

SEQ ID NO: 8188 - DNA, 25 bp, Homo sapien
gtcttgagaacacattctataattc

SEQ ID NO: 8189 - DNA, 25 bp, Homo sapien
gagacaacccgtagaactacgatgt

SEQ ID NO: 8190 - DNA, 25 bp, Homo sapien
gagacaacccgttgaactacgatgt

SEQ ID NO: 8191 - DNA, 25 bp, Homo sapien
cgagacaaccaggtcaccgtagctg

SEQ ID NO: 8192 - DNA, 25 bp, Homo sapien
cgagacaaccagctcaccgtagctg

SEQ ID NO: 8193 - DNA, 25 bp, Homo sapien
gtaatatgtactccttactaggtat

SEQ ID NO: 8194 - DNA, 25 bp, Homo sapien
gtaatatgtactgcttactaggtat

SEQ ID NO: 8195 - DNA, 25 bp, Homo sapien
taagtctcgatgtcccggtaatatt

SEQ ID NO: 8196 - DNA, 25 bp, Homo sapien
taagtctcgatgacccggtaatatt

SEQ ID NO: 8197 - DNA, 25 bp, Homo sapien
gaaaccccgtcgaccaaagacaaca

SEQ ID NO: 8198 - DNA, 25 bp, Homo sapien
gaaaccccgtcgtccaaagacaaca

SEQ ID NO: 8199 - DNA, 25 bp, Homo sapien
tactttaccgatccttcagaaagtg

SEQ ID NO: 8200 - DNA, 25 bp, Homo sapien
tactttaccgatgcttcagaaagtg

SEQ ID NO: 8201 - DNA, 25 bp, Homo sapien
tgttacgtccacgccggaagagacc

SEQ ID NO: 8202 - DNA, 25 bp, Homo sapien
tgttacgtccaccccggaagagacc

SEQ ID NO: 8203 - DNA, 25 bp, Homo sapien
tttacgttacctctggtaacactga

SEQ ID NO: 8204 - DNA, 25 bp, Homo sapien
tttacgttacctgtggtaacactga

SEQ ID NO: 8205 - DNA, 25 bp, Homo sapien
gtttcgtttcgtagtgaaacctaca

SEQ ID NO: 8206 - DNA, 25 bp, Homo sapien
gtttcgtttcgttgtgaaacctaca

SEQ ID NO: 8207 - DNA, 25 bp, Homo sapien
gatttgtagagtcgttaaaccacac

SEQ ID NO: 8208 - DNA, 25 bp, Homo sapien
gatttgtagagtggttaaaccacac

SEQ ID NO: 8209 - DNA, 25 bp, Homo sapien
ttactatacgtagagtaatcgcaca

SEQ ID NO: 8210 - DNA, 25 bp, Homo sapien
ttactatacgtacagtaatcgcaca

SEQ ID NO: 8211 - DNA, 25 bp, Homo sapien
tctacttgtctctgtagtcttacca

SEQ ID NO: 8212 - DNA, 25 bp, Homo sapien
tctacttgtctcagtagtcttacca

SEQ ID NO: 8213 - DNA, 25 bp, Homo sapien
cgaagtatcctaatcctaccgtagg

SEQ ID NO: 8214 - DNA, 25 bp, Homo sapien
cgaagtatcctattcctaccgtagg

SEQ ID NO: 8215 - DNA, 25 bp, Homo sapien
acacgataccgtagttcaccgaccg

SEQ ID NO: 8216 - DNA, 25 bp, Homo sapien
acacgataccgttgttcaccgaccg

SEQ ID NO: 8217 - DNA, 25 bp, Homo sapien
actcgacacgacttagtgtccccga

SEQ ID NO: 8218 - DNA, 25 bp, Homo sapien
actcgacacgacatagtgtccccga

SEQ ID NO: 8219 - DNA, 25 bp, Homo sapien
acaacggaagacatacttcggtcca

SEQ ID NO: 8220 - DNA, 25 bp, Homo sapien
acaacggaagacttacttcggtcca

SEQ ID NO: 8221 - DNA, 25 bp, Homo sapien
gacacacagtagtaaggtctgtcca

SEQ ID NO: 8222 - DNA, 25 bp, Homo sapien
gacacacagtagaaaggtctgtcca

SEQ ID NO: 8223 - DNA, 25 bp, Homo sapien
cataaacgttagaaggcctgttcga

SEQ ID NO: 8224 - DNA, 25 bp, Homo sapien
cataaacgttagtaggcctgttcga

SEQ ID NO: 8225 - DNA, 25 bp, Homo sapien
gtcgtgcaacgacagctaattctgg

SEQ ID NO: 8226 - DNA, 25 bp, Homo sapien
gtcgtgcaacgagagctaattctgg

SEQ ID NO: 8227 - DNA, 25 bp, Homo sapien
ctcttactgtgttttcgacgataaa

SEQ ID NO: 8228 - DNA, 25 bp, Homo sapien
ctcttactgtgtattcgacgataaa

SEQ ID NO: 8229 - DNA, 25 bp, Homo sapien
tttaccgttatattctcgacagaag

SEQ ID NO: 8230 - DNA, 25 bp, Homo sapien
tttaccgttataatctcgacagaag

SEQ ID NO: 8231 - DNA, 25 bp, Homo sapien
cctgttagtaggatcgacaacaaga

SEQ ID NO: 8232 - DNA, 25 bp, Homo sapien
cctgttagtaggttcgacaacaaga

SEQ ID NO: 8233 - DNA, 25 bp, Homo sapien
tcctttaagactccacgaagacaga

SEQ ID NO: 8234 - DNA, 25 bp, Homo sapien
tcctttaagactgcacgaagacaga

SEQ ID NO: 8235 - DNA, 25 bp, Homo sapien
gactgtttcgaaaaacagactctca

SEQ ID NO: 8236 - DNA, 25 bp, Homo sapien
gactgtttcgaataacagactctca

SEQ ID NO: 8237 - DNA, 25 bp, Homo sapien
tgtgtgtgtgcatttgtagtccacc

SEQ ID NO: 8238 - DNA, 25 bp, Homo sapien
tgtgtgtgtgcaattgtagtccacc

SEQ ID NO: 8239 - DNA, 25 bp, Homo sapien
gtagttacgtccacttgtttcacta

SEQ ID NO: 8240 - DNA, 25 bp, Homo sapien
gtagttacgtcctcttgtttcacta

SEQ ID NO: 8241 - DNA, 25 bp, Homo sapien
ggtcgtagtgtttgattacacacct

SEQ ID NO: 8242 - DNA, 25 bp, Homo sapien
ggtcgtagtgttagattacacacct

SEQ ID NO: 8243 - DNA, 25 bp, Homo sapien
gtagactagggtggacctcacacac

SEQ ID NO: 8244 - DNA, 25 bp, Homo sapien
gtagactagggtcgacctcacacac

SEQ ID NO: 8245 - DNA, 25 bp, Homo sapien
agtagacactcgtcaaccgaacaac

SEQ ID NO: 8246 - DNA, 25 bp, Homo sapien
agtagacactcgacaaccgaacaac

SEQ ID NO: 8247 - DNA, 25 bp, Homo sapien
gtgttaccgacgtcactactccttc

SEQ ID NO: 8248 - DNA, 25 bp, Homo sapien
gtgttaccgacgacactactccttc

SEQ ID NO: 8249 - DNA, 25 bp, Homo sapien
tcggagtcccgaccactccgttgta

SEQ ID NO: 8250 - DNA, 25 bp, Homo sapien
tcggagtcccgagcactccgttgta

SEQ ID NO: 8251 - DNA, 25 bp, Homo sapien
aggtcgtactcgaacgcgtcggcca

SEQ ID NO: 8252 - DNA, 25 bp, Homo sapien
aggtcgtactcgtacgcgtcggcca

SEQ ID NO: 8253 - DNA, 25 bp, Homo sapien
ggtcactctacaggacgccgtcgag

SEQ ID NO: 8254 - DNA, 25 bp, Homo sapien
ggtcactctacacgacgccgtcgag

SEQ ID NO: 8255 - DNA, 25 bp, Homo sapien
acgatatgactcatgaccatacgag

SEQ ID NO: 8256 - DNA, 25 bp, Homo sapien
acgatatgactcttgaccatacgag

SEQ ID NO: 8257 - DNA, 25 bp, Homo sapien
accaatctgtacctcttcctgaagg

SEQ ID NO: 8258 - DNA, 25 bp, Homo sapien
accaatctgtacgtcttcctgaagg

SEQ ID NO: 8259 - DNA, 25 bp, Homo sapien
actacgtgtggagacactacgaggg

SEQ ID NO: 8260 - DNA, 25 bp, Homo sapien
actacgtgtggacacactacgaggg

SEQ ID NO: 8261 - DNA, 25 bp, Homo sapien
atactctgtgtggtcacaccggaac

SEQ ID NO: 8262 - DNA, 25 bp, Homo sapien
atactctgtgtgctcacaccggaac

SEQ ID NO: 8263 - DNA, 25 bp, Homo sapien
acaaaaatcgtcgtaagtgggcaca

SEQ ID NO: 8264 - DNA, 25 bp, Homo sapien
acaaaaatcgtcctaagtgggcaca

SEQ ID NO: 8265 - DNA, 25 bp, Homo sapien
gaaaacttagttcagtgtcggcaca

SEQ ID NO: 8266 - DNA, 25 bp, Homo sapien
gaaaacttagttgagtgtcggcaca

SEQ ID NO: 8267 - DNA, 25 bp, Homo sapien
gaacgtcttccgtcggtggacagtg

SEQ ID NO: 8268 - DNA, 25 bp, Homo sapien
gaacgtcttccgacggtggacagtg

SEQ ID NO: 8269 - DNA, 25 bp, Homo sapien
ccgcgttctcgtcgtaggtgtaggc

SEQ ID NO: 8270 - DNA, 25 bp, Homo sapien
ccgcgttctcgtggtaggtgtaggc

SEQ ID NO: 8271 - DNA, 25 bp, Homo sapien
acgaccctctttgcacagtcgaggg

SEQ ID NO: 8272 - DNA, 25 bp, Homo sapien
acgaccctctttccacagtcgaggg

SEQ ID NO: 8273 - DNA, 25 bp, Homo sapien
ttcccttcctttggagacggacgaa

SEQ ID NO: 8274 - DNA, 25 bp, Homo sapien
ttcccttcctttcgagacggacgaa

SEQ ID NO: 8275 - DNA, 25 bp, Homo sapien
ttgccgtcgattacctacgtggagg

SEQ ID NO: 8276 - DNA, 25 bp, Homo sapien
ttgccgtcgatttcctacgtggagg

SEQ ID NO: 8277 - DNA, 25 bp, Homo sapien
gctgaagtgacctccactcgagagg

SEQ ID NO: 8278 - DNA, 25 bp, Homo sapien
gctgaagtgaccaccactcgagagg

SEQ ID NO: 8279 - DNA, 25 bp, Homo sapien
agcgcgaagaggacttaccgactcc

SEQ ID NO: 8280 - DNA, 25 bp, Homo sapien
agcgcgaagaggtcttaccgactcc

SEQ ID NO: 8281 - DNA, 25 bp, Homo sapien
cagaggagagagatcctttgaacac

SEQ ID NO: 8282 - DNA, 25 bp, Homo sapien
cagaggagagagttcctttgaacac

SEQ ID NO: 8283 - DNA, 25 bp, Homo sapien
gagaaagggaaccagttagttacac

SEQ ID NO: 8284 - DNA, 25 bp, Homo sapien
gagaaagggaacgagttagttacac

SEQ ID NO: 8285 - DNA, 25 bp, Homo sapien
aaaacgaagatgtccgagtagacta

SEQ ID NO: 8286 - DNA, 25 bp, Homo sapien
aaaacgaagatgaccgagtagacta

SEQ ID NO: 8287 - DNA, 25 bp, Homo sapien
tacgagagaagaaccgatgtctact

SEQ ID NO: 8288 - DNA, 25 bp, Homo sapien
tacgagagaagatccgatgtctact

SEQ ID NO: 8289 - DNA, 25 bp, Homo sapien
gacacaagagtctacagtcgttaac

SEQ ID NO: 8290 - DNA, 25 bp, Homo sapien
gacacaagagtcaacagtcgttaac

SEQ ID NO: 8291 - DNA, 25 bp, Homo sapien
gacgaagacgacgacccttgagtac

SEQ ID NO: 8292 - DNA, 25 bp, Homo sapien
gacgaagacgaccacccttgagtac

SEQ ID NO: 8293 - DNA, 25 bp, Homo sapien
gacgtcgaggcgtccgagtctgtaa

SEQ ID NO: 8294 - DNA, 25 bp, Homo sapien
gacgtcgaggcgaccgagtctgtaa

SEQ ID NO: 8295 - DNA, 25 bp, Homo sapien
agatcgacgaggtccgactcgtccc

SEQ ID NO: 8296 - DNA, 25 bp, Homo sapien
agatcgacgaggaccgactcgtccc

SEQ ID NO: 8297 - DNA, 25 bp, Homo sapien
cgagacgtcttgatctcctcgacaa

SEQ ID NO: 8298 - DNA, 25 bp, Homo sapien
cgagacgtcttgttctcctcgacaa

SEQ ID NO: 8299 - DNA, 25 bp, Homo sapien
catgtaactatttttcagttcgagg

SEQ ID NO: 8300 - DNA, 25 bp, Homo sapien
catgtaactattattcagttcgagg

SEQ ID NO: 8301 - DNA, 25 bp, Homo sapien
acttgagttttcaagacattcatgt

SEQ ID NO: 8302 - DNA, 25 bp, Homo sapien
acttgagttttctagacattcatgt

SEQ ID NO: 8303 - DNA, 25 bp, Homo sapien
ttaacgttttagttgaacagttcct

SEQ ID NO: 8304 - DNA, 25 bp, Homo sapien
ttaacgttttagatgaacagttcct

SEQ ID NO: 8305 - DNA, 25 bp, Homo sapien
tcgtgtagatttttcagttcctaca

SEQ ID NO: 8306 - DNA, 25 bp, Homo sapien
tcgtgtagatttatcagttcctaca

SEQ ID NO: 8307 - DNA, 25 bp, Homo sapien
ataatgtcttgtactgtgacgttat

SEQ ID NO: 8308 - DNA, 25 bp, Homo sapien
ataatgtcttgttctgtgacgttat

SEQ ID NO: 8309 - DNA, 25 bp, Homo sapien
gggtcgttcttcgtagtacagtaca

SEQ ID NO: 8310 - DNA, 25 bp, Homo sapien
gggtcgttcttcctagtacagtaca

SEQ ID NO: 8311 - DNA, 25 bp, Homo sapien
taagtacgtcacaccggacagtgac

SEQ ID NO: 8312 - DNA, 25 bp, Homo sapien
taagtacgtcactccggacagtgac

SEQ ID NO: 8313 - DNA, 25 bp, Homo sapien
tagagtacaagtgtctaaaactact

SEQ ID NO: 8314 - DNA, 25 bp, Homo sapien
tagagtacaagtctctaaaactact

SEQ ID NO: 8315 - DNA, 25 bp, Homo sapien
aagttacgatatgactcatgaccat

SEQ ID NO: 8316 - DNA, 25 bp, Homo sapien
aagttacgatatcactcatgaccat

SEQ ID NO: 8317 - DNA, 25 bp, Homo sapien
cggtgtatacgtcgttcaggtgaca

SEQ ID NO: 8318 - DNA, 25 bp, Homo sapien
cggtgtatacgtggttcaggtgaca

SEQ ID NO: 8319 - DNA, 25 bp, Homo sapien
gtagtaactcgtatctcgtggtcaa

SEQ ID NO: 8320 - DNA, 25 bp, Homo sapien
gtagtaactcgtttctcgtggtcaa

SEQ ID NO: 8321 - DNA, 25 bp, Homo sapien
ggagcagcgatatctctctcgacca

SEQ ID NO: 8322 - DNA, 25 bp, Homo sapien
ggagcagcgataactctctcgacca

SEQ ID NO: 8323 - DNA, 25 bp, Homo sapien
ttacacacttcgagtgttcagacat

SEQ ID NO: 8324 - DNA, 25 bp, Homo sapien
ttacacacttcgtgtgttcagacat

SEQ ID NO: 8325 - DNA, 25 bp, Homo sapien
acaacgggtccttcgataacacagt

SEQ ID NO: 8326 - DNA, 25 bp, Homo sapien
acaacgggtcctacgataacacagt

SEQ ID NO: 8327 - DNA, 25 bp, Homo sapien
gtcttaattcttaaatacatacagt

SEQ ID NO: 8328 - DNA, 25 bp, Homo sapien
gtcttaattctttaatacatacagt

SEQ ID NO: 8329 - DNA, 25 bp, Homo sapien
gggtgatgaccaagacgtaactccg

SEQ ID NO: 8330 - DNA, 25 bp, Homo sapien
gggtgatgaccatgacgtaactccg

SEQ ID NO: 8331 - DNA, 25 bp, Homo sapien
gtgaagggtgtcgaggagtgtctcc

SEQ ID NO: 8332 - DNA, 25 bp, Homo sapien
gtgaagggtgtccaggagtgtctcc

SEQ ID NO: 8333 - DNA, 25 bp, Homo sapien
aacgttcgtcgtcgtggtctctccc

SEQ ID NO: 8334 - DNA, 25 bp, Homo sapien
aacgttcgtcgtggtggtctctccc

SEQ ID NO: 8335 - DNA, 25 bp, Homo sapien
aactggagttcgtgttactactgtc

SEQ ID NO: 8336 - DNA, 25 bp, Homo sapien
aactggagttcgagttactactgtc

SEQ ID NO: 8337 - DNA, 25 bp, Homo sapien
tcccgtgacttcaagttcactatag

SEQ ID NO: 8338 - DNA, 25 bp, Homo sapien
tcccgtgacttctagttcactatag

SEQ ID NO: 8339 - DNA, 25 bp, Homo sapien
gtttctcgtgtcctttctactacgc

SEQ ID NO: 8340 - DNA, 25 bp, Homo sapien
gtttctcgtgtcgtttctactacgc

SEQ ID NO: 8341 - DNA, 25 bp, Homo sapien
gtttgtcgaccttttcgtacagagt

SEQ ID NO: 8342 - DNA, 25 bp, Homo sapien
gtttgtcgacctattcgtacagagt

SEQ ID NO: 8343 - DNA, 25 bp, Homo sapien
tatttacacactacgtacggtaaag

SEQ ID NO: 8344 - DNA, 25 bp, Homo sapien
tatttacacacttcgtacggtaaag

SEQ ID NO: 8345 - DNA, 25 bp, Homo sapien
tatatagtcacgaaagtcagtaaac

SEQ ID NO: 8346 - DNA, 25 bp, Homo sapien
tatatagtcacgtaagtcagtaaac

SEQ ID NO: 8347 - DNA, 25 bp, Homo sapien
ttccaagtggacaggtaaccgtcac

SEQ ID NO: 8348 - DNA, 25 bp, Homo sapien
ttccaagtggactggtaaccgtcac

SEQ ID NO: 8349 - DNA, 25 bp, Homo sapien
gttacgagtgtatgttaacttactc

SEQ ID NO: 8350 - DNA, 25 bp, Homo sapien
gttacgagtgtaagttaacttactc

SEQ ID NO: 8351 - DNA, 25 bp, Homo sapien
taagtaggttgtttacacgtaactc

SEQ ID NO: 8352 - DNA, 25 bp, Homo sapien
taagtaggttgtatacacgtaactc

SEQ ID NO: 8353 - DNA, 25 bp, Homo sapien
tacatactgtattcacttacaaggt

SEQ ID NO: 8354 - DNA, 25 bp, Homo sapien
tacatactgtatacacttacaaggt

SEQ ID NO: 8355 - DNA, 25 bp, Homo sapien
tctatagctccgttacttaagacag

SEQ ID NO: 8356 - DNA, 25 bp, Homo sapien
tctatagctccgatacttaagacag

SEQ ID NO: 8357 - DNA, 25 bp, Homo sapien
gaatagaacttacaacttgtagaca

SEQ ID NO: 8358 - DNA, 25 bp, Homo sapien
gaatagaacttagaacttgtagaca

SEQ ID NO: 8359 - DNA, 25 bp, Homo sapien
agacgagacttctctacacaaagtt

SEQ ID NO: 8360 - DNA, 25 bp, Homo sapien
agacgagacttcactacacaaagtt

SEQ ID NO: 8361 - DNA, 25 bp, Homo sapien
gactcctcgtatctacagtttactc

SEQ ID NO: 8362 - DNA, 25 bp, Homo sapien
gactcctcgtatgtacagtttactc

SEQ ID NO: 8363 - DNA, 25 bp, Homo sapien
ttctcggtattatgtgtatgtcacc

SEQ ID NO: 8364 - DNA, 25 bp, Homo sapien
ttctcggtattaagtgtatgtcacc

SEQ ID NO: 8365 - DNA, 25 bp, Homo sapien
ttcgtgacgacagagacagacatct

SEQ ID NO: 8366 - DNA, 25 bp, Homo sapien
ttcgtgacgacacagacagacatct

SEQ ID NO: 8367 - DNA, 25 bp, Homo sapien
aaatatacgatgaccaaacagctgt

SEQ ID NO: 8368 - DNA, 25 bp, Homo sapien
aaatatacgatgtccaaacagctgt

SEQ ID NO: 8369 - DNA, 25 bp, Homo sapien
ttccgagttcgttcattatatctcg

SEQ ID NO: 8370 - DNA, 25 bp, Homo sapien
ttccgagttcgtacattatatctcg

SEQ ID NO: 8371 - DNA, 25 bp, Homo sapien
gttatctcgatgtacctatatttgt

SEQ ID NO: 8372 - DNA, 25 bp, Homo sapien
gttatctcgatgaacctatatttgt

SEQ ID NO: 8373 - DNA, 25 bp, Homo sapien
tatgactcggacgacgtattacagt

SEQ ID NO: 8374 - DNA, 25 bp, Homo sapien
tatgactcggaccacgtattacagt

SEQ ID NO: 8375 - DNA, 25 bp, Homo sapien
gttatgacgtagcaccctatctcat

SEQ ID NO: 8376 - DNA, 25 bp, Homo sapien
gttatgacgtaggaccctatctcat

SEQ ID NO: 8377 - DNA, 25 bp, Homo sapien
ggaaccggctcgacgtcagcgactt

SEQ ID NO: 8378 - DNA, 25 bp, Homo sapien
ggaaccggctcgtcgtcagcgactt

SEQ ID NO: 8379 - DNA, 25 bp, Homo sapien
ttggtgagtgcgacgacagtattct

SEQ ID NO: 8380 - DNA, 25 bp, Homo sapien
ttggtgagtgcgtcgacagtattct

SEQ ID NO: 8381 - DNA, 25 bp, Homo sapien
cgttggtagacgtcttcggttttct

SEQ ID NO: 8382 - DNA, 25 bp, Homo sapien
cgttggtagacgacttcggttttct

SEQ ID NO: 8383 - DNA, 25 bp, Homo sapien
gcctttgcgtcaatgtttactctta

SEQ ID NO: 8384 - DNA, 25 bp, Homo sapien
gcctttgcgtcattgtttactctta

SEQ ID NO: 8385 - DNA, 25 bp, Homo sapien
acgtaatggtcatgtttaatcctct

SEQ ID NO: 8386 - DNA, 25 bp, Homo sapien
acgtaatggtcaagtttaatcctct

SEQ ID NO: 8387 - DNA, 25 bp, Homo sapien
ttgtatcctttcgtcaagacgtccg

SEQ ID NO: 8388 - DNA, 25 bp, Homo sapien
ttgtatcctttcctcaagacgtccg

SEQ ID NO: 8389 - DNA, 25 bp, Homo sapien
gggtcgtactattccttcctacctc

SEQ ID NO: 8390 - DNA, 25 bp, Homo sapien
gggtcgtactataccttcctacctc

SEQ ID NO: 8391 - DNA, 25 bp, Homo sapien
tcgggacataagatgtctctgtcct

SEQ ID NO: 8392 - DNA, 25 bp, Homo sapien
tcgggacataagttgtctctgtcct

SEQ ID NO: 8393 - DNA, 25 bp, Homo sapien
ttcagtcacgtaacagttgttcaaa

SEQ ID NO: 8394 - DNA, 25 bp, Homo sapien
ttcagtcacgtatcagttgttcaaa

SEQ ID NO: 8395 - DNA, 25 bp, Homo sapien
ttgagaccgtacacactttccaacg

SEQ ID NO: 8396 - DNA, 25 bp, Homo sapien
ttgagaccgtactcactttccaacg

SEQ ID NO: 8397 - DNA, 25 bp, Homo sapien
gtagtcctaggaccaactctaccct

SEQ ID NO: 8398 - DNA, 25 bp, Homo sapien
gtagtcctaggagcaactctaccct

SEQ ID NO: 8399 - DNA, 25 bp, Homo sapien
aacgtccgtgtgacacctcacagtc

SEQ ID NO: 8400 - DNA, 25 bp, Homo sapien
aacgtccgtgtgtcacctcacagtc

SEQ ID NO: 8401 - DNA, 25 bp, Homo sapien
agacgattggttaacactaccagac

SEQ ID NO: 8402 - DNA, 25 bp, Homo sapien
agacgattggtttacactaccagac

SEQ ID NO: 8403 - DNA, 25 bp, Homo sapien
taatgagaatattttccttctttat

SEQ ID NO: 8404 - DNA, 25 bp, Homo sapien
taatgagaatatattccttctttat

SEQ ID NO: 8405 - DNA, 25 bp, Homo sapien
tacgaactcctgttgtcttcaagtg

SEQ ID NO: 8406 - DNA, 25 bp, Homo sapien
tacgaactcctgatgtcttcaagtg

SEQ ID NO: 8407 - DNA, 25 bp, Homo sapien
gtgtcctctctgtctgtctcctggt

SEQ ID NO: 8408 - DNA, 25 bp, Homo sapien
gtgtcctctctgactgtctcctggt

SEQ ID NO: 8409 - DNA, 25 bp, Homo sapien
gggggtctccgtaactatcaccttt

SEQ ID NO: 8410 - DNA, 25 bp, Homo sapien
gggggtctccgttactatcaccttt

SEQ ID NO: 8411 - DNA, 25 bp, Homo sapien
gtgtgggaactcctatgtctccttg

SEQ ID NO: 8412 - DNA, 25 bp, Homo sapien
gtgtgggaactcgtatgtctccttg

SEQ ID NO: 8413 - DNA, 25 bp, Homo sapien
cctagcatagcgtagtcctaagtaa

SEQ ID NO: 8414 - DNA, 25 bp, Homo sapien
cctagcatagcgaagtcctaagtaa

SEQ ID NO: 8415 - DNA, 25 bp, Homo sapien
ccctgccagaggtcttactacgaac

SEQ ID NO: 8416 - DNA, 25 bp, Homo sapien
ccctgccagaggacttactacgaac

SEQ ID NO: 8417 - DNA, 25 bp, Homo sapien
tcctgtacccgaagacagaacaaag

SEQ ID NO: 8418 - DNA, 25 bp, Homo sapien
tcctgtacccgatgacagaacaaag

SEQ ID NO: 8419 - DNA, 25 bp, Homo sapien
cgtacgactccacgactagaaaatt

SEQ ID NO: 8420 - DNA, 25 bp, Homo sapien
cgtacgactccaggactagaaaatt

SEQ ID NO: 8421 - DNA, 25 bp, Homo sapien
gtcccatctcgttacacaaaggtat

SEQ ID NO: 8422 - DNA, 25 bp, Homo sapien
gtcccatctcgtaacacaaaggtat

SEQ ID NO: 8423 - DNA, 25 bp, Homo sapien
tatctgtacttttgactacagaccg

SEQ ID NO: 8424 - DNA, 25 bp, Homo sapien
tatctgtactttagactacagaccg

SEQ ID NO: 8425 - DNA, 25 bp, Homo sapien
aaacaaatctttgttcgacgaagga

SEQ ID NO: 8426 - DNA, 25 bp, Homo sapien
aaacaaatctttcttcgacgaagga

SEQ ID NO: 8427 - DNA, 25 bp, Homo sapien
cgtaactccggtgcttctcgaaggg

SEQ ID NO: 8428 - DNA, 25 bp, Homo sapien
cgtaactccggtccttctcgaaggg

SEQ ID NO: 8429 - DNA, 25 bp, Homo sapien
gaccccgacgtcctcgctaagaggg

SEQ ID NO: 8430 - DNA, 25 bp, Homo sapien
gaccccgacgtcgtcgctaagaggg

SEQ ID NO: 8431 - DNA, 25 bp, Homo sapien
acctgtctcttgtttaggacgtagt

SEQ ID NO: 8432 - DNA, 25 bp, Homo sapien
acctgtctcttgattaggacgtagt

SEQ ID NO: 8433 - DNA, 25 bp, Homo sapien
tttcgtcgtccgttttgagaccgtt

SEQ ID NO: 8434 - DNA, 25 bp, Homo sapien
tttcgtcgtccgatttgagaccgtt

SEQ ID NO: 8435 - DNA, 25 bp, Homo sapien
tttcgtttgcggttgacgacggcgt

SEQ ID NO: 8436 - DNA, 25 bp, Homo sapien
tttcgtttgcggatgacgacggcgt

SEQ ID NO: 8437 - DNA, 25 bp, Homo sapien
ccgacccggtttgtcgatgggacag

SEQ ID NO: 8438 - DNA, 25 bp, Homo sapien
ccgacccggtttctcgatgggacag

SEQ ID NO: 8439 - DNA, 25 bp, Homo sapien
cccaagagtttcctcgactgggtaa

SEQ ID NO: 8440 - DNA, 25 bp, Homo sapien
cccaagagtttcgtcgactgggtaa

SEQ ID NO: 8441 - DNA, 25 bp, Homo sapien
gtgtccgattttacgggtgtctaag

SEQ ID NO: 8442 - DNA, 25 bp, Homo sapien
gtgtccgatttttcgggtgtctaag

SEQ ID NO: 8443 - DNA, 25 bp, Homo sapien
ttccgttgtcgtcagcggggtttgt

SEQ ID NO: 8444 - DNA, 25 bp, Homo sapien
ttccgttgtcgtgagcggggtttgt

SEQ ID NO: 8445 - DNA, 25 bp, Homo sapien
ttacacttcggtcaccggggtcccg

SEQ ID NO: 8446 - DNA, 25 bp, Homo sapien
ttacacttcggtgaccggggtcccg

SEQ ID NO: 8447 - DNA, 25 bp, Homo sapien
ttcgtttgagactgcccttacctct

SEQ ID NO: 8448 - DNA, 25 bp, Homo sapien
ttcgtttgagacagcccttacctct

SEQ ID NO: 8449 - DNA, 25 bp, Homo sapien
ttatctttgagtcgaccacttaaag

SEQ ID NO: 8450 - DNA, 25 bp, Homo sapien
ttatctttgagtggaccacttaaag

SEQ ID NO: 8451 - DNA, 25 bp, Homo sapien
atgtatttgatacagtcctcctatg

SEQ ID NO: 8452 - DNA, 25 bp, Homo sapien
atgtatttgatagagtcctcctatg

SEQ ID NO: 8453 - DNA, 25 bp, Homo sapien
gacctcgagtcttcgaatatccaga

SEQ ID NO: 8454 - DNA, 25 bp, Homo sapien
gacctcgagtctacgaatatccaga

SEQ ID NO: 8455 - DNA, 25 bp, Homo sapien
cgaccgagacatgaagataacccga

SEQ ID NO: 8456 - DNA, 25 bp, Homo sapien
cgaccgagacatcaagataacccga

SEQ ID NO: 8457 - DNA, 25 bp, Homo sapien
ctacggtgcgtatacactggtcaga

SEQ ID NO: 8458 - DNA, 25 bp, Homo sapien
ctacggtgcgtaaacactggtcaga

SEQ ID NO: 8459 - DNA, 25 bp, Homo sapien
cgagtgtcgagaacgccgaccgaga

SEQ ID NO: 8460 - DNA, 25 bp, Homo sapien
cgagtgtcgagatcgccgaccgaga

SEQ ID NO: 8461 - DNA, 25 bp, Homo sapien
acaaaacatttgatgaccgtatgaa

SEQ ID NO: 8462 - DNA, 25 bp, Homo sapien
acaaaacatttgttgaccgtatgaa

SEQ ID NO: 8463 - DNA, 25 bp, Homo sapien
tattttactcgatgtccgtgtttcg

SEQ ID NO: 8464 - DNA, 25 bp, Homo sapien
tattttactcgaagtccgtgtttcg

SEQ ID NO: 8465 - DNA, 25 bp, Homo sapien
ggtttctgtctataaaacttttcgt

SEQ ID NO: 8466 - DNA, 25 bp, Homo sapien
ggtttctgtctaaaaaacttttcgt

SEQ ID NO: 8467 - DNA, 25 bp, Homo sapien
ttgtctatacgagatgtacacatta

SEQ ID NO: 8468 - DNA, 25 bp, Homo sapien
ttgtctatacgacatgtacacatta

SEQ ID NO: 8469 - DNA, 25 bp, Homo sapien
ttatgagacatgaatacacatcacg

SEQ ID NO: 8470 - DNA, 25 bp, Homo sapien
ttatgagacatgtatacacatcacg

SEQ ID NO: 8471 - DNA, 25 bp, Homo sapien
ctcgaagagaggttcatccatctac

SEQ ID NO: 8472 - DNA, 25 bp, Homo sapien
ctcgaagagaggatcatccatctac

SEQ ID NO: 8473 - DNA, 25 bp, Homo sapien
ttgaagaggtgacgtcagtggtctc

SEQ ID NO: 8474 - DNA, 25 bp, Homo sapien
ttgaagaggtgaggtcagtggtctc

SEQ ID NO: 8475 - DNA, 25 bp, Homo sapien
tctacagggagtgcaggaaggtcct

SEQ ID NO: 8476 - DNA, 25 bp, Homo sapien
tctacagggagtccaggaaggtcct

SEQ ID NO: 8477 - DNA, 25 bp, Homo sapien
cgctaccaggggtcaggtaccggcc

SEQ ID NO: 8478 - DNA, 25 bp, Homo sapien
cgctaccaggggacaggtaccggcc

SEQ ID NO: 8479 - DNA, 25 bp, Homo sapien
ggagagtaatacgtgtacgagatcc

SEQ ID NO: 8480 - DNA, 25 bp, Homo sapien
ggagagtaatacctgtacgagatcc

SEQ ID NO: 8481 - DNA, 25 bp, Homo sapien
ggagaagactactggtccgtgaccg

SEQ ID NO: 8482 - DNA, 25 bp, Homo sapien
ggagaagactacaggtccgtgaccg

SEQ ID NO: 8483 - DNA, 25 bp, Homo sapien
tggttagaaatacgtcaggtcgaac

SEQ ID NO: 8484 - DNA, 25 bp, Homo sapien
tggttagaaataggtcaggtcgaac

SEQ ID NO: 8485 - DNA, 25 bp, Homo sapien
ctttttcggagtgtcaagactgaga

SEQ ID NO: 8486 - DNA, 25 bp, Homo sapien
ctttttcggagtctcaagactgaga

SEQ ID NO: 8487 - DNA, 25 bp, Homo sapien
tcaccacagacagtccgagggtgag

SEQ ID NO: 8488 - DNA, 25 bp, Homo sapien
tcaccacagacactccgagggtgag

SEQ ID NO: 8489 - DNA, 25 bp, Homo sapien
ataaattagcactcgtacgggaaga

SEQ ID NO: 8490 - DNA, 25 bp, Homo sapien
ataaattagcacacgtacgggaaga

SEQ ID NO: 8491 - DNA, 25 bp, Homo sapien
ggataatcttcgtttccgggaccct

SEQ ID NO: 8492 - DNA, 25 bp, Homo sapien
ggataatcttcgattccgggaccct

SEQ ID NO: 8493 - DNA, 25 bp, Homo sapien
aggatctacatcatctcgccgtgga

SEQ ID NO: 8494 - DNA, 25 bp, Homo sapien
aggatctacatcttctcgccgtgga

SEQ ID NO: 8495 - DNA, 25 bp, Homo sapien
aaagacgcgaaacgaccaccgagga

SEQ ID NO: 8496 - DNA, 25 bp, Homo sapien
aaagacgcgaaaggaccaccgagga

SEQ ID NO: 8497 - DNA, 25 bp, Homo sapien
gctctcgaacaccaccaacgaagag

SEQ ID NO: 8498 - DNA, 25 bp, Homo sapien
gctctcgaacacgaccaacgaagag

SEQ ID NO: 8499 - DNA, 25 bp, Homo sapien
cgggtcctttccacacgagagccgg

SEQ ID NO: 8500 - DNA, 25 bp, Homo sapien
cgggtcctttcctcacgagagccgg

SEQ ID NO: 8501 - DNA, 25 bp, Homo sapien
cttacaagttcaaggacggaaccga

SEQ ID NO: 8502 - DNA, 25 bp, Homo sapien
cttacaagttcatggacggaaccga

SEQ ID NO: 8503 - DNA, 25 bp, Homo sapien
accacatgatacatgggagatctcc

SEQ ID NO: 8504 - DNA, 25 bp, Homo sapien
accacatgatacttgggagatctcc

SEQ ID NO: 8505 - DNA, 25 bp, Homo sapien
catgagatatcttgtaagtacgatc

SEQ ID NO: 8506 - DNA, 25 bp, Homo sapien
catgagatatctagtaagtacgatc

SEQ ID NO: 8507 - DNA, 25 bp, Homo sapien
gaagtagggcaggacctagtcccgt

SEQ ID NO: 8508 - DNA, 25 bp, Homo sapien
gaagtagggcagcacctagtcccgt

SEQ ID NO: 8509 - DNA, 25 bp, Homo sapien
ggtctagaaggaatgaccaccctgt

SEQ ID NO: 8510 - DNA, 25 bp, Homo sapien
ggtctagaaggattgaccaccctgt

SEQ ID NO: 8511 - DNA, 25 bp, Homo sapien
gtaagaataaggagaacacagtcca

SEQ ID NO: 8512 - DNA, 25 bp, Homo sapien
gtaagaataaggtgaacacagtcca

SEQ ID NO: 8513 - DNA, 25 bp, Homo sapien
gagaagaaatcgtcttatttctaca

SEQ ID NO: 8514 - DNA, 25 bp, Homo sapien
gagaagaaatcgacttatttctaca

SEQ ID NO: 8515 - DNA, 25 bp, Homo sapien
taggactgaaggacctttctacccg

SEQ ID NO: 8516 - DNA, 25 bp, Homo sapien
taggactgaaggtcctttctacccg

SEQ ID NO: 8517 - DNA, 25 bp, Homo sapien
gacttatatgtagataggtctccac

SEQ ID NO: 8518 - DNA, 25 bp, Homo sapien
gacttatatgtacataggtctccac

SEQ ID NO: 8519 - DNA, 25 bp, Homo sapien
gtctaagtcgtagattgtgtgcact

SEQ ID NO: 8520 - DNA, 25 bp, Homo sapien
gtctaagtcgtacattgtgtgcact

SEQ ID NO: 8521 - DNA, 25 bp, Homo sapien
aaacctcatcaaagacgacgaccgt

SEQ ID NO: 8522 - DNA, 25 bp, Homo sapien
aaacctcatcaatgacgacgaccgt

SEQ ID NO: 8523 - DNA, 25 bp, Homo sapien
gaccctctagttaaaccgacctcgt

SEQ ID NO: 8524 - DNA, 25 bp, Homo sapien
gaccctctagtttaaccgacctcgt

SEQ ID NO: 8525 - DNA, 25 bp, Homo sapien
tcctcccgactgtcgacattgagtc

SEQ ID NO: 8526 - DNA, 25 bp, Homo sapien
tcctcccgactgacgacattgagtc

SEQ ID NO: 8527 - DNA, 25 bp, Homo sapien
ctcctctcagggaaccatctagcag

SEQ ID NO: 8528 - DNA, 25 bp, Homo sapien
ctcctctcagggtaccatctagcag

SEQ ID NO: 8529 - DNA, 25 bp, Homo sapien
acttgtaccgagtccgtccatccgt

SEQ ID NO: 8530 - DNA, 25 bp, Homo sapien
acttgtaccgagaccgtccatccgt

SEQ ID NO: 8531 - DNA, 25 bp, Homo sapien
gtttcacgagcgacccatatacagt

SEQ ID NO: 8532 - DNA, 25 bp, Homo sapien
gtttcacgagcgtcccatatacagt

SEQ ID NO: 8533 - DNA, 25 bp, Homo sapien
gaggaaaaccctttttactacttcg

SEQ ID NO: 8534 - DNA, 25 bp, Homo sapien
gaggaaaaccctatttactacttcg

SEQ ID NO: 8535 - DNA, 25 bp, Homo sapien
gaagtaaatcggataatccttgtac

SEQ ID NO: 8536 - DNA, 25 bp, Homo sapien
gaagtaaatcggttaatccttgtac

SEQ ID NO: 8537 - DNA, 25 bp, Homo sapien
aagtcaaatcgttagaagttcctta

SEQ ID NO: 8538 - DNA, 25 bp, Homo sapien
aagtcaaatcgtaagaagttcctta

SEQ ID NO: 8539 - DNA, 25 bp, Homo sapien
gtaaagagcggcaggagactcttgt

SEQ ID NO: 8540 - DNA, 25 bp, Homo sapien
gtaaagagcggctggagactcttgt

SEQ ID NO: 8541 - DNA, 25 bp, Homo sapien
tccaagaagaggtaggtgacctata

SEQ ID NO: 8542 - DNA, 25 bp, Homo sapien
tccaagaagaggaaggtgacctata

SEQ ID NO: 8543 - DNA, 25 bp, Homo sapien
gagaatacgaggaacggtaccctaa

SEQ ID NO: 8544 - DNA, 25 bp, Homo sapien
gagaatacgaggtacggtaccctaa

SEQ ID NO: 8545 - DNA, 25 bp, Homo sapien
acagtaaggttctctaggaacgcaa

SEQ ID NO: 8546 - DNA, 25 bp, Homo sapien
acagtaaggttcactaggaacgcaa

SEQ ID NO: 8547 - DNA, 25 bp, Homo sapien
actgtgaaacctaccgaagaaacta

SEQ ID NO: 8548 - DNA, 25 bp, Homo sapien
actgtgaaaccttccgaagaaacta

SEQ ID NO: 8549 - DNA, 25 bp, Homo sapien
acctctgtcggaactagtcgtacga

SEQ ID NO: 8550 - DNA, 25 bp, Homo sapien
acctctgtcggatctagtcgtacga

SEQ ID NO: 8551 - DNA, 25 bp, Homo sapien
tgccgcgccggttgttcttctactc

SEQ ID NO: 8552 - DNA, 25 bp, Homo sapien
tgccgcgccggtagttcttctactc

SEQ ID NO: 8553 - DNA, 25 bp, Homo sapien
ggaaggctcgatgctctccttccgt

SEQ ID NO: 8554 - DNA, 25 bp, Homo sapien
ggaaggctcgatcctctccttccgt

SEQ ID NO: 8555 - DNA, 25 bp, Homo sapien
atggtactcggtcgtgtcctttccg

SEQ ID NO: 8556 - DNA, 25 bp, Homo sapien
atggtactcggtggtgtcctttccg

SEQ ID NO: 8557 - DNA, 25 bp, Homo sapien
tgcccgttgtgtggaatctttactg

SEQ ID NO: 8558 - DNA, 25 bp, Homo sapien
tgcccgttgtgtcgaatctttactg

SEQ ID NO: 8559 - DNA, 25 bp, Homo sapien
gacgtgttcgtacaagtctctcatc

SEQ ID NO: 8560 - DNA, 25 bp, Homo sapien
gacgtgttcgtagaagtctctcatc

SEQ ID NO: 8561 - DNA, 25 bp, Homo sapien
ctatgtgtccgaggtaagattcttg

SEQ ID NO: 8562 - DNA, 25 bp, Homo sapien
ctatgtgtccgacgtaagattcttg

SEQ ID NO: 8563 - DNA, 25 bp, Homo sapien
cttcaggcgacgagtggtatagtga

SEQ ID NO: 8564 - DNA, 25 bp, Homo sapien
cttcaggcgacgtgtggtatagtga

SEQ ID NO: 8565 - DNA, 25 bp, Homo sapien
gcaggtccggtagcacgctcgtcga

SEQ ID NO: 8566 - DNA, 25 bp, Homo sapien
gcaggtccggtaccacgctcgtcga

SEQ ID NO: 8567 - DNA, 25 bp, Homo sapien
cccgaggtctcacttgtcgtagaag

SEQ ID NO: 8568 - DNA, 25 bp, Homo sapien
cccgaggtctcagttgtcgtagaag

SEQ ID NO: 8569 - DNA, 25 bp, Homo sapien
accgagattgagttgtcgagtcagg

SEQ ID NO: 8570 - DNA, 25 bp, Homo sapien
accgagattgagatgtcgagtcagg

SEQ ID NO: 8571 - DNA, 25 bp, Homo sapien
ttaccaaggtgtaacttaacttagg

SEQ ID NO: 8572 - DNA, 25 bp, Homo sapien
ttaccaaggtgttacttaacttagg

SEQ ID NO: 8573 - DNA, 25 bp, Homo sapien
gttcaagcactgtatacaattaacg

SEQ ID NO: 8574 - DNA, 25 bp, Homo sapien
gttcaagcactgaatacaattaacg

SEQ ID NO: 8575 - DNA, 25 bp, Homo sapien
gtgcaataaccaaaacagtcactgt

SEQ ID NO: 8576 - DNA, 25 bp, Homo sapien
gtgcaataaccataacagtcactgt

SEQ ID NO: 8577 - DNA, 25 bp, Homo sapien
gacattgacatgttatatgtacttc

SEQ ID NO: 8578 - DNA, 25 bp, Homo sapien
gacattgacatgatatatgtacttc

SEQ ID NO: 8579 - DNA, 25 bp, Homo sapien
catgagaagtacaactgtcacttct

SEQ ID NO: 8580 - DNA, 25 bp, Homo sapien
catgagaagtactactgtcacttct

SEQ ID NO: 8581 - DNA, 25 bp, Homo sapien
tggtgagatgttcatgtcactatcg

SEQ ID NO: 8582 - DNA, 25 bp, Homo sapien
tggtgagatgttgatgtcactatcg

SEQ ID NO: 8583 - DNA, 25 bp, Homo sapien
tttaggaattgtaaaccacttctag

SEQ ID NO: 8584 - DNA, 25 bp, Homo sapien
tttaggaattgttaaccacttctag

SEQ ID NO: 8585 - DNA, 25 bp, Homo sapien
ctacgatgtgtcaacccgtctactt

SEQ ID NO: 8586 - DNA, 25 bp, Homo sapien
ctacgatgtgtctacccgtctactt

SEQ ID NO: 8587 - DNA, 25 bp, Homo sapien
gtcgattatacttacgtaacgattt

SEQ ID NO: 8588 - DNA, 25 bp, Homo sapien
gtcgattatactaacgtaacgattt

SEQ ID NO: 8589 - DNA, 25 bp, Homo sapien
aagctatgaactgagaccctgtact

SEQ ID NO: 8590 - DNA, 25 bp, Homo sapien
aagctatgaactcagaccctgtact

SEQ ID NO: 8591 - DNA, 25 bp, Homo sapien
ctgacggaaggtctcatatgggtag

SEQ ID NO: 8592 - DNA, 25 bp, Homo sapien
ctgacggaaggtgtcatatgggtag

SEQ ID NO: 8593 - DNA, 25 bp, Homo sapien
gacgttttactcgtccacggggagt

SEQ ID NO: 8594 - DNA, 25 bp, Homo sapien
gacgttttactcctccacggggagt

SEQ ID NO: 8595 - DNA, 25 bp, Homo sapien
gcttctcgtcgtcctcctgctgggt

SEQ ID NO: 8596 - DNA, 25 bp, Homo sapien
gcttctcgtcgtgctcctgctgggt

SEQ ID NO: 8597 - DNA, 25 bp, Homo sapien
accgggtcgaccttttcagaggggt

SEQ ID NO: 8598 - DNA, 25 bp, Homo sapien
accgggtcgaccatttcagaggggt

SEQ ID NO: 8599 - DNA, 25 bp, Homo sapien
gtccgaacctccttagtccctgtta

SEQ ID NO: 8600 - DNA, 25 bp, Homo sapien
gtccgaacctccatagtccctgtta

SEQ ID NO: 8601 - DNA, 25 bp, Homo sapien
acaagactgacatgtctttagttac

SEQ ID NO: 8602 - DNA, 25 bp, Homo sapien
acaagactgacaagtctttagttac

SEQ ID NO: 8603 - DNA, 25 bp, Homo sapien
gaaacacgaccctctttgcacagtc

SEQ ID NO: 8604 - DNA, 25 bp, Homo sapien
gaaacacgacccactttgcacagtc

SEQ ID NO: 8605 - DNA, 25 bp, Homo sapien
aagtagaactccaccgaagtggaaa

SEQ ID NO: 8606 - DNA, 25 bp, Homo sapien
aagtagaactcctccgaagtggaaa

SEQ ID NO: 8607 - DNA, 25 bp, Homo sapien
gacaaaaagaacccgacgaaaatgg

SEQ ID NO: 8608 - DNA, 25 bp, Homo sapien
gacaaaaagaacgcgacgaaaatgg

SEQ ID NO: 8609 - DNA, 25 bp, Homo sapien
taagaaggtccagcaaaggacacac

SEQ ID NO: 8610 - DNA, 25 bp, Homo sapien
taagaaggtccaccaaaggacacac

SEQ ID NO: 8611 - DNA, 25 bp, Homo sapien
actcagagggcctcagggacacgga

SEQ ID NO: 8612 - DNA, 25 bp, Homo sapien
actcagagggccacagggacacgga

SEQ ID NO: 8613 - DNA, 25 bp, Homo sapien
tcaaagagtgcgagaagatacctga

SEQ ID NO: 8614 - DNA, 25 bp, Homo sapien
tcaaagagtgcgtgaagatacctga

SEQ ID NO: 8615 - DNA, 25 bp, Homo sapien
gcccggggcgtcacacgtcgttaga

SEQ ID NO: 8616 - DNA, 25 bp, Homo sapien
gcccggggcgtctcacgtcgttaga

SEQ ID NO: 8617 - DNA, 25 bp, Homo sapien
tcccgtgcggcgacgaccagtagcg

SEQ ID NO: 8618 - DNA, 25 bp, Homo sapien
tcccgtgcggcgtcgaccagtagcg

SEQ ID NO: 8619 - DNA, 25 bp, Homo sapien
tccgcgcacgggtcgaacaagtacg

SEQ ID NO: 8620 - DNA, 25 bp, Homo sapien
tccgcgcacgggacgaacaagtacg

SEQ ID NO: 8621 - DNA, 25 bp, Homo sapien
tgatgacttgggactttgtacgtac

SEQ ID NO: 8622 - DNA, 25 bp, Homo sapien
tgatgacttgggtctttgtacgtac

SEQ ID NO: 8623 - DNA, 25 bp, Homo sapien
acactgtaatcgaagtgttgtcgta

SEQ ID NO: 8624 - DNA, 25 bp, Homo sapien
acactgtaatcgtagtgttgtcgta

SEQ ID NO: 8625 - DNA, 25 bp, Homo sapien
tccgacactacagtatgttcttctg

SEQ ID NO: 8626 - DNA, 25 bp, Homo sapien
tccgacactacactatgttcttctg

SEQ ID NO: 8627 - DNA, 25 bp, Homo sapien
ccccgatcaaggtttctgtactcgg

SEQ ID NO: 8628 - DNA, 25 bp, Homo sapien
ccccgatcaaggattctgtactcgg

SEQ ID NO: 8629 - DNA, 25 bp, Homo sapien
ccggtagagaggatgttcgtgtctt

SEQ ID NO: 8630 - DNA, 25 bp, Homo sapien
ccggtagagaggttgttcgtgtctt

SEQ ID NO: 8631 - DNA, 25 bp, Homo sapien
gacctctctgggtgttacgatactt

SEQ ID NO: 8632 - DNA, 25 bp, Homo sapien
gacctctctgggagttacgatactt

SEQ ID NO: 8633 - DNA, 25 bp, Homo sapien
aggtaggaccctcgaccagactgac

SEQ ID NO: 8634 - DNA, 25 bp, Homo sapien
aggtaggaccctggaccagactgac

SEQ ID NO: 8635 - DNA, 25 bp, Homo sapien
ctagagagggagtccggcctacttg

SEQ ID NO: 8636 - DNA, 25 bp, Homo sapien
ctagagagggagaccggcctacttg

SEQ ID NO: 8637 - DNA, 25 bp, Homo sapien
cgacggacagtgtcgggctaccatg

SEQ ID NO: 8638 - DNA, 25 bp, Homo sapien
cgacggacagtgacgggctaccatg

SEQ ID NO: 8639 - DNA, 25 bp, Homo sapien
ggacctactggaaggagtcatcgaa

SEQ ID NO: 8640 - DNA, 25 bp, Homo sapien
ggacctactggatggagtcatcgaa

SEQ ID NO: 8641 - DNA, 25 bp, Homo sapien
gtgggaacttggtacttaacctcaa

SEQ ID NO: 8642 - DNA, 25 bp, Homo sapien
gtgggaacttggaacttaacctcaa

SEQ ID NO: 8643 - DNA, 25 bp, Homo sapien
ggggattctccattgtaaacctagg

SEQ ID NO: 8644 - DNA, 25 bp, Homo sapien
ggggattctccaatgtaaacctagg

SEQ ID NO: 8645 - DNA, 25 bp, Homo sapien
ggtttcgaccctttaaggagtctcg

SEQ ID NO: 8646 - DNA, 25 bp, Homo sapien
ggtttcgaccctataaggagtctcg

SEQ ID NO: 8647 - DNA, 25 bp, Homo sapien
gtacttaccttgtgtagtcgtaatg

SEQ ID NO: 8648 - DNA, 25 bp, Homo sapien
gtacttaccttgagtagtcgtaatg

SEQ ID NO: 8649 - DNA, 25 bp, Homo sapien
cgtaaaacttgttagtccatacagt

SEQ ID NO: 8650 - DNA, 25 bp, Homo sapien
cgtaaaacttgtaagtccatacagt

SEQ ID NO: 8651 - DNA, 25 bp, Homo sapien
gacctccttcgttctgtacagaagt

SEQ ID NO: 8652 - DNA, 25 bp, Homo sapien
gacctccttcgtactgtacagaagt

SEQ ID NO: 8653 - DNA, 25 bp, Homo sapien
agtccgtctccgaccgtacgagtgg

SEQ ID NO: 8654 - DNA, 25 bp, Homo sapien
agtccgtctccgtccgtacgagtgg

SEQ ID NO: 8655 - DNA, 25 bp, Homo sapien
catctcgagccgtcagtacgagtgg

SEQ ID NO: 8656 - DNA, 25 bp, Homo sapien
catctcgagccgacagtacgagtgg

SEQ ID NO: 8657 - DNA, 25 bp, Homo sapien
atctcgaacgggaacgacgagtacc

SEQ ID NO: 8658 - DNA, 25 bp, Homo sapien
atctcgaacgggtacgacgagtacc

SEQ ID NO: 8659 - DNA, 25 bp, Homo sapien
atagacgacccgacactacggtgac

SEQ ID NO: 8660 - DNA, 25 bp, Homo sapien
atagacgacccgtcactacggtgac

SEQ ID NO: 8661 - DNA, 25 bp, Homo sapien
tttgagagtgagatcctgtttttcc

SEQ ID NO: 8662 - DNA, 25 bp, Homo sapien
tttgagagtgagttcctgtttttcc

SEQ ID NO: 8663 - DNA, 25 bp, Homo sapien
tgacgggcgactctgtcttttccgt

SEQ ID NO: 8664 - DNA, 25 bp, Homo sapien
tgacgggcgactgtgtcttttccgt

SEQ ID NO: 8665 - DNA, 25 bp, Homo sapien
ccgtccgcgggttactgtgtctcta

SEQ ID NO: 8666 - DNA, 25 bp, Homo sapien
ccgtccgcgggtaactgtgtctcta

SEQ ID NO: 8667 - DNA, 25 bp, Homo sapien
cgcgactacgggttatttctacggg

SEQ ID NO: 8668 - DNA, 25 bp, Homo sapien
cgcgactacgggatatttctacggg

SEQ ID NO: 8669 - DNA, 25 bp, Homo sapien
ggtcacggtgatcctcgtctgaccg

SEQ ID NO: 8670 - DNA, 25 bp, Homo sapien
ggtcacggtgatgctcgtctgaccg

SEQ ID NO: 8671 - DNA, 25 bp, Homo sapien
ggtgtcagggttcctccgtctgtgt

SEQ ID NO: 8672 - DNA, 25 bp, Homo sapien
ggtgtcagggttgctccgtctgtgt

SEQ ID NO: 8673 - DNA, 25 bp, Homo sapien
tatctgggagacaggtccgtcgtaa

SEQ ID NO: 8674 - DNA, 25 bp, Homo sapien
tatctgggagactggtccgtcgtaa

SEQ ID NO: 8675 - DNA, 25 bp, Homo sapien
cctcatcaaagacgacgaccgtaaa

SEQ ID NO: 8676 - DNA, 25 bp, Homo sapien
cctcatcaaagaggacgaccgtaaa

SEQ ID NO: 8677 - DNA, 25 bp, Homo sapien
gtgacactctcaatgggcttcgagc

SEQ ID NO: 8678 - DNA, 25 bp, Homo sapien
gtgacactctcattgggcttcgagc

SEQ ID NO: 8679 - DNA, 25 bp, Homo sapien
cgaccttatgtcgtcagacctcaca

SEQ ID NO: 8680 - DNA, 25 bp, Homo sapien
cgaccttatgtcctcagacctcaca

SEQ ID NO: 8681 - DNA, 25 bp, Homo sapien
ttgtcggtgtcgtgaagtacgaaca

SEQ ID NO: 8682 - DNA, 25 bp, Homo sapien
ttgtcggtgtcgagaagtacgaaca

SEQ ID NO: 8683 - DNA, 25 bp, Homo sapien
ttactgggtcgttagataacggatc

SEQ ID NO: 8684 - DNA, 25 bp, Homo sapien
ttactgggtcgtaagataacggatc

SEQ ID NO: 8685 - DNA, 25 bp, Homo sapien
aaaaggtgtcctcctcagggagtac

SEQ ID NO: 8686 - DNA, 25 bp, Homo sapien
aaaaggtgtcctgctcagggagtac

SEQ ID NO: 8687 - DNA, 25 bp, Homo sapien
aggagagtccgaactcacggagttc

SEQ ID NO: 8688 - DNA, 25 bp, Homo sapien
aggagagtccgatctcacggagttc

SEQ ID NO: 8689 - DNA, 25 bp, Homo sapien
ttacgagataaccacatcaaagttg

SEQ ID NO: 8690 - DNA, 25 bp, Homo sapien
ttacgagataacgacatcaaagttg

SEQ ID NO: 8691 - DNA, 25 bp, Homo sapien
cattgattacagtcatgtattgtca

SEQ ID NO: 8692 - DNA, 25 bp, Homo sapien
cattgattacagacatgtattgtca

SEQ ID NO: 8693 - DNA, 25 bp, Homo sapien
gtgtggtgacggaggttcctctacc

SEQ ID NO: 8694 - DNA, 25 bp, Homo sapien
gtgtggtgacggtggttcctctacc

SEQ ID NO: 8695 - DNA, 25 bp, Homo sapien
tttgaggtactttgacaaaggtcac

SEQ ID NO: 8696 - DNA, 25 bp, Homo sapien
tttgaggtacttagacaaaggtcac

SEQ ID NO: 8697 - DNA, 25 bp, Homo sapien
aggagatagtgaaaccgacacccga

SEQ ID NO: 8698 - DNA, 25 bp, Homo sapien
aggagatagtgataccgacacccga

SEQ ID NO: 8699 - DNA, 25 bp, Homo sapien
taggtaatggagataccgatgccac

SEQ ID NO: 8700 - DNA, 25 bp, Homo sapien
taggtaatggagttaccgatgccac

SEQ ID NO: 8701 - DNA, 25 bp, Homo sapien
gtcaacgtcgggaacacggtcaacg

SEQ ID NO: 8702 - DNA, 25 bp, Homo sapien
gtcaacgtcgggtacacggtcaacg

SEQ ID NO: 8703 - DNA, 25 bp, Homo sapien
ggtctaagagttctaccggtgttac

SEQ ID NO: 8704 - DNA, 25 bp, Homo sapien
ggtctaagagttgtaccggtgttac

SEQ ID NO: 8705 - DNA, 25 bp, Homo sapien
ggtctcatcgactttcagcgtgttt

SEQ ID NO: 8706 - DNA, 25 bp, Homo sapien
ggtctcatcgacattcagcgtgttt

SEQ ID NO: 8707 - DNA, 25 bp, Homo sapien
gttcctactccgactctccgtgttg

SEQ ID NO: 8708 - DNA, 25 bp, Homo sapien
gttcctactccgtctctccgtgttg

SEQ ID NO: 8709 - DNA, 25 bp, Homo sapien
gtcgtcaatcattcccggtatcgtg

SEQ ID NO: 8710 - DNA, 25 bp, Homo sapien
gtcgtcaatcatacccggtatcgtg

SEQ ID NO: 8711 - DNA, 25 bp, Homo sapien
actaggtcgtcgtcgaccgtttcga

SEQ ID NO: 8712 - DNA, 25 bp, Homo sapien
actaggtcgtcgacgaccgtttcga

SEQ ID NO: 8713 - DNA, 25 bp, Homo sapien
gtcacggcgtaagagtaccatacag

SEQ ID NO: 8714 - DNA, 25 bp, Homo sapien
gtcacggcgtaacagtaccatacag

SEQ ID NO: 8715 - DNA, 25 bp, Homo sapien
gacacagtcgattgatcgcagtagg

SEQ ID NO: 8716 - DNA, 25 bp, Homo sapien
gacacagtcgatagatcgcagtagg

SEQ ID NO: 8717 - DNA, 25 bp, Homo sapien
cttaaccagtcccctagtcagaggg

SEQ ID NO: 8718 - DNA, 25 bp, Homo sapien
cttaaccagtccgctagtcagaggg

SEQ ID NO: 8719 - DNA, 25 bp, Homo sapien
gtaatcactttggaccggacggtgt

SEQ ID NO: 8720 - DNA, 25 bp, Homo sapien
gtaatcactttgcaccggacggtgt

SEQ ID NO: 8721 - DNA, 25 bp, Homo sapien
cgatagtcactttcctcacacattt

SEQ ID NO: 8722 - DNA, 25 bp, Homo sapien
cgatagtcacttacctcacacattt

SEQ ID NO: 8723 - DNA, 25 bp, Homo sapien
gaaaggaccgattcgctcataatga

SEQ ID NO: 8724 - DNA, 25 bp, Homo sapien
gaaaggaccgatacgctcataatga

SEQ ID NO: 8725 - DNA, 25 bp, Homo sapien
aactaggtcgaaaagttctttaaac

SEQ ID NO: 8726 - DNA, 25 bp, Homo sapien
aactaggtcgaatagttctttaaac

SEQ ID NO: 8727 - DNA, 25 bp, Homo sapien
gaagagacagtctatttctcactaa

SEQ ID NO: 8728 - DNA, 25 bp, Homo sapien
gaagagacagtcaatttctcactaa

SEQ ID NO: 8729 - DNA, 25 bp, Homo sapien
ggtgtaggtaccgacactgccagaa

SEQ ID NO: 8730 - DNA, 25 bp, Homo sapien
ggtgtaggtacccacactgccagaa

SEQ ID NO: 8731 - DNA, 25 bp, Homo sapien
tgtggtgtacgtctaaaaccacgaa

SEQ ID NO: 8732 - DNA, 25 bp, Homo sapien
tgtggtgtacgtgtaaaaccacgaa

SEQ ID NO: 8733 - DNA, 25 bp, Homo sapien
agggtttccacttaagtaacgactt

SEQ ID NO: 8734 - DNA, 25 bp, Homo sapien
agggtttccactaaagtaacgactt

SEQ ID NO: 8735 - DNA, 25 bp, Homo sapien
gggtcaatcacaaacgtaatagtcg

SEQ ID NO: 8736 - DNA, 25 bp, Homo sapien
gggtcaatcacatacgtaatagtcg

SEQ ID NO: 8737 - DNA, 25 bp, Homo sapien
gtcttttcctcacagggtacagtga

SEQ ID NO: 8738 - DNA, 25 bp, Homo sapien
gtcttttcctcagagggtacagtga

SEQ ID NO: 8739 - DNA, 25 bp, Homo sapien
tttcgtcttcaaagaagtcactaga

SEQ ID NO: 8740 - DNA, 25 bp, Homo sapien
tttcgtcttcaatgaagtcactaga

SEQ ID NO: 8741 - DNA, 25 bp, Homo sapien
gggtcttctttacaagtcctactct

SEQ ID NO: 8742 - DNA, 25 bp, Homo sapien
gggtcttctttagaagtcctactct

SEQ ID NO: 8743 - DNA, 25 bp, Homo sapien
gggtctcatttaaagaacctaactt

SEQ ID NO: 8744 - DNA, 25 bp, Homo sapien
gggtctcatttatagaacctaactt

SEQ ID NO: 8745 - DNA, 25 bp, Homo sapien
tcggttcctttgtccggcgtaaccg

SEQ ID NO: 8746 - DNA, 25 bp, Homo sapien
tcggttcctttgaccggcgtaaccg

SEQ ID NO: 8747 - DNA, 25 bp, Homo sapien
ggtcgctcaggaacgcgctgacgct

SEQ ID NO: 8748 - DNA, 25 bp, Homo sapien
ggtcgctcaggatcgcgctgacgct

SEQ ID NO: 8749 - DNA, 25 bp, Homo sapien
ggacgacccggtcgagaaccaccgt

SEQ ID NO: 8750 - DNA, 25 bp, Homo sapien
ggacgacccggtggagaaccaccgt

SEQ ID NO: 8751 - DNA, 25 bp, Homo sapien
aagaagacccagtgaaactaacctc

SEQ ID NO: 8752 - DNA, 25 bp, Homo sapien
aagaagacccagagaaactaacctc

SEQ ID NO: 8753 - DNA, 25 bp, Homo sapien
aaagtccctggtaacgttaaatctc

SEQ ID NO: 8754 - DNA, 25 bp, Homo sapien
aaagtccctggttacgttaaatctc

SEQ ID NO: 8755 - DNA, 25 bp, Homo sapien
aacaacatgtcgaagtcacagttcc

SEQ ID NO: 8756 - DNA, 25 bp, Homo sapien
aacaacatgtcgtagtcacagttcc

SEQ ID NO: 8757 - DNA, 25 bp, Homo sapien
cgatctcctcgaggttcccgttgtt

SEQ ID NO: 8758 - DNA, 25 bp, Homo sapien
cgatctcctcgacgttcccgttgtt

SEQ ID NO: 8759 - DNA, 25 bp, Homo sapien
gtcggtgtcacagagtccaggtttt

SEQ ID NO: 8760 - DNA, 25 bp, Homo sapien
gtcggtgtcacacagtccaggtttt

SEQ ID NO: 8761 - DNA, 25 bp, Homo sapien
ggacttaaaccgattatcgtcaata

SEQ ID NO: 8762 - DNA, 25 bp, Homo sapien
ggacttaaaccgtttatcgtcaata

SEQ ID NO: 8763 - DNA, 25 bp, Homo sapien
cctttactgtacaggtttcccaaag

SEQ ID NO: 8764 - DNA, 25 bp, Homo sapien
cctttactgtactggtttcccaaag

SEQ ID NO: 8765 - DNA, 25 bp, Homo sapien
cttgtaagactagttttacccagac

SEQ ID NO: 8766 - DNA, 25 bp, Homo sapien
cttgtaagactacttttacccagac

SEQ ID NO: 8767 - DNA, 25 bp, Homo sapien
acggttattgactcgtttaagaacc

SEQ ID NO: 8768 - DNA, 25 bp, Homo sapien
acggttattgacacgtttaagaacc

SEQ ID NO: 8769 - DNA, 25 bp, Homo sapien
aagatatcaggacagttcaaattac

SEQ ID NO: 8770 - DNA, 25 bp, Homo sapien
aagatatcaggagagttcaaattac

SEQ ID NO: 8771 - DNA, 25 bp, Homo sapien
gaagagccggggataagaccaagta

SEQ ID NO: 8772 - DNA, 25 bp, Homo sapien
gaagagccggggttaagaccaagta

SEQ ID NO: 8773 - DNA, 25 bp, Homo sapien
acgccggacccgaaagggtcgacta

SEQ ID NO: 8774 - DNA, 25 bp, Homo sapien
acgccggacccgtaagggtcgacta

SEQ ID NO: 8775 - DNA, 25 bp, Homo sapien
cctaggtgtccttagaagagctaca

SEQ ID NO: 8776 - DNA, 25 bp, Homo sapien
cctaggtgtcctaagaagagctaca

SEQ ID NO: 8777 - DNA, 25 bp, Homo sapien
cataggttcttatttagtgtaccac

SEQ ID NO: 8778 - DNA, 25 bp, Homo sapien
cataggttcttaattagtgtaccac

SEQ ID NO: 8779 - DNA, 25 bp, Homo sapien
agagagacgtcgagaaccatcatca

SEQ ID NO: 8780 - DNA, 25 bp, Homo sapien
agagagacgtcgtgaaccatcatca

SEQ ID NO: 8781 - DNA, 25 bp, Homo sapien
acgaacggacggtggtcctcttcca

SEQ ID NO: 8782 - DNA, 25 bp, Homo sapien
acgaacggacggaggtcctcttcca

SEQ ID NO: 8783 - DNA, 25 bp, Homo sapien
tagatgtcttataggattctgttcc

SEQ ID NO: 8784 - DNA, 25 bp, Homo sapien
tagatgtcttattggattctgttcc

SEQ ID NO: 8785 - DNA, 25 bp, Homo sapien
ttttgtccgataagactcattttac

SEQ ID NO: 8786 - DNA, 25 bp, Homo sapien
ttttgtccgatatgactcattttac

SEQ ID NO: 8787 - DNA, 25 bp, Homo sapien
ctgttggtgccctgactaatgtttc

SEQ ID NO: 8788 - DNA, 25 bp, Homo sapien
ctgttggtgcccagactaatgtttc

SEQ ID NO: 8789 - DNA, 25 bp, Homo sapien
gacggggttcacgtcacctagtctc

SEQ ID NO: 8790 - DNA, 25 bp, Homo sapien
gacggggttcacctcacctagtctc

SEQ ID NO: 8791 - DNA, 25 bp, Homo sapien
ggcgaaagacgacaagacctcaaac

SEQ ID NO: 8792 - DNA, 25 bp, Homo sapien
ggcgaaagacgagaagacctcaaac

SEQ ID NO: 8793 - DNA, 25 bp, Homo sapien
gacttgacgtctctaggattatatc

SEQ ID NO: 8794 - DNA, 25 bp, Homo sapien
gacttgacgtctgtaggattatatc

SEQ ID NO: 8795 - DNA, 25 bp, Homo sapien
tcttttctgttcgagtcgtaggacg

SEQ ID NO: 8796 - DNA, 25 bp, Homo sapien
tcttttctgttccagtcgtaggacg

SEQ ID NO: 8797 - DNA, 25 bp, Homo sapien
actgtagtttctctacagtgaacgt

SEQ ID NO: 8798 - DNA, 25 bp, Homo sapien
actgtagtttctgtacagtgaacgt

SEQ ID NO: 8799 - DNA, 25 bp, Homo sapien
ctgtatcgtctcttccgtataaggt

SEQ ID NO: 8800 - DNA, 25 bp, Homo sapien
ctgtatcgtctcatccgtataaggt

SEQ ID NO: 8801 - DNA, 25 bp, Homo sapien
acctatactactggttatcggtaaa

SEQ ID NO: 8802 - DNA, 25 bp, Homo sapien
acctatactactcgttatcggtaaa

SEQ ID NO: 8803 - DNA, 25 bp, Homo sapien
gagacaacataacgtgtgccgaacc

SEQ ID NO: 8804 - DNA, 25 bp, Homo sapien
gagacaacataaggtgtgccgaacc

SEQ ID NO: 8805 - DNA, 25 bp, Homo sapien
acacccggcccgaagtaaagacccg

SEQ ID NO: 8806 - DNA, 25 bp, Homo sapien
acacccggcccgtagtaaagacccg

SEQ ID NO: 8807 - DNA, 25 bp, Homo sapien
tcaaaggttgattaataatctcagt

SEQ ID NO: 8808 - DNA, 25 bp, Homo sapien
tcaaaggttgataaataatctcagt

SEQ ID NO: 8809 - DNA, 25 bp, Homo sapien
aaactagggagtacaaaaagtccta

SEQ ID NO: 8810 - DNA, 25 bp, Homo sapien
aaactagggagttcaaaaagtccta

SEQ ID NO: 8811 - DNA, 25 bp, Homo sapien
aataattgactcacaccggagatca

SEQ ID NO: 8812 - DNA, 25 bp, Homo sapien
aataattgactctcaccggagatca

SEQ ID NO: 8813 - DNA, 25 bp, Homo sapien
gtgtatccccttgacaccgagaccc

SEQ ID NO: 8814 - DNA, 25 bp, Homo sapien
gtgtatccccttcacaccgagaccc

SEQ ID NO: 8815 - DNA, 25 bp, Homo sapien
tgtcgaagagccactacatcagccc

SEQ ID NO: 8816 - DNA, 25 bp, Homo sapien
tgtcgaagagcctctacatcagccc

SEQ ID NO: 8817 - DNA, 25 bp, Homo sapien
gcaaacggacttaagagtggaccct

SEQ ID NO: 8818 - DNA, 25 bp, Homo sapien
gcaaacggactttagagtggaccct

SEQ ID NO: 8819 - DNA, 25 bp, Homo sapien
cgttacggatcctgttacggatcct

SEQ ID NO: 8820 - DNA, 25 bp, Homo sapien
cgttacggatccagttacggatcct

SEQ ID NO: 8821 - DNA, 25 bp, Homo sapien
tgtgagtataccttgttgttacttc

SEQ ID NO: 8822 - DNA, 25 bp, Homo sapien
tgtgagtataccatgttgttacttc

SEQ ID NO: 8823 - DNA, 25 bp, Homo sapien
ggttgtgaaccttttactttatatc

SEQ ID NO: 8824 - DNA, 25 bp, Homo sapien
ggttgtgaacctattactttatatc

SEQ ID NO: 8825 - DNA, 25 bp, Homo sapien
ggaaagacaacttgatcgtacatgt

SEQ ID NO: 8826 - DNA, 25 bp, Homo sapien
ggaaagacaactagatcgtacatgt

SEQ ID NO: 8827 - DNA, 25 bp, Homo sapien
gctagacaacccacactcgacgttt

SEQ ID NO: 8828 - DNA, 25 bp, Homo sapien
gctagacaaccctcactcgacgttt

SEQ ID NO: 8829 - DNA, 25 bp, Homo sapien
cgtgtaaaagtttctctcagtgtat

SEQ ID NO: 8830 - DNA, 25 bp, Homo sapien
cgtgtaaaagttactctcagtgtat

SEQ ID NO: 8831 - DNA, 25 bp, Homo sapien
tcaatctgatgacaccggtcattct

SEQ ID NO: 8832 - DNA, 25 bp, Homo sapien
tcaatctgatgagaccggtcattct

SEQ ID NO: 8833 - DNA, 25 bp, Homo sapien
aaccccgcgtgaaccggggacaaac

SEQ ID NO: 8834 - DNA, 25 bp, Homo sapien
aaccccgcgtgatccggggacaaac

SEQ ID NO: 8835 - DNA, 25 bp, Homo sapien
tcttgtacgacaaccattagaaagg

SEQ ID NO: 8836 - DNA, 25 bp, Homo sapien
tcttgtacgacatccattagaaagg

SEQ ID NO: 8837 - DNA, 25 bp, Homo sapien
tttcgtagaccccctgtgaagaccg

SEQ ID NO: 8838 - DNA, 25 bp, Homo sapien
tttcgtagacccgctgtgaagaccg

SEQ ID NO: 8839 - DNA, 25 bp, Homo sapien
tttactcaccgtctatgtcaaagtg

SEQ ID NO: 8840 - DNA, 25 bp, Homo sapien
tttactcaccgtgtatgtcaaagtg

SEQ ID NO: 8841 - DNA, 25 bp, Homo sapien
gtttgtaatgtctgagtgaacctca

SEQ ID NO: 8842 - DNA, 25 bp, Homo sapien
gtttgtaatgtcagagtgaacctca

SEQ ID NO: 8843 - DNA, 25 bp, Homo sapien
tgtttttaagtcactagaaccaagt

SEQ ID NO: 8844 - DNA, 25 bp, Homo sapien
tgtttttaagtctctagaaccaagt

SEQ ID NO: 8845 - DNA, 25 bp, Homo sapien
cttttctacagtgtctaatcgcaga

SEQ ID NO: 8846 - DNA, 25 bp, Homo sapien
cttttctacagtctctaatcgcaga

SEQ ID NO: 8847 - DNA, 25 bp, Homo sapien
ttttacgtatgtgtcgagttaccca

SEQ ID NO: 8848 - DNA, 25 bp, Homo sapien
ttttacgtatgtctcgagttaccca

SEQ ID NO: 8849 - DNA, 25 bp, Homo sapien
agtaattccgataagctacggtatg

SEQ ID NO: 8850 - DNA, 25 bp, Homo sapien
agtaattccgattagctacggtatg

SEQ ID NO: 8851 - DNA, 25 bp, Homo sapien
aaacgatcttttgctaccgtatacg

SEQ ID NO: 8852 - DNA, 25 bp, Homo sapien
aaacgatcttttcctaccgtatacg

SEQ ID NO: 8853 - DNA, 25 bp, Homo sapien
aagactacgacttattccacacgtg

SEQ ID NO: 8854 - DNA, 25 bp, Homo sapien
aagactacgactaattccacacgtg

SEQ ID NO: 8855 - DNA, 25 bp, Homo sapien
agaacgaaaactaatgtcggttcga

SEQ ID NO: 8856 - DNA, 25 bp, Homo sapien
agaacgaaaacttatgtcggttcga

SEQ ID NO: 8857 - DNA, 25 bp, Homo sapien
acacacagtagtaaggtctgtccac

SEQ ID NO: 8858 - DNA, 25 bp, Homo sapien
acacacagtagttaggtctgtccac

SEQ ID NO: 8859 - DNA, 25 bp, Homo sapien
gcaaacgcccgtcataaacgttaga

SEQ ID NO: 8860 - DNA, 25 bp, Homo sapien
gcaaacgcccgtgataaacgttaga

SEQ ID NO: 8861 - DNA, 25 bp, Homo sapien
cgacagctaattctggcctcgaaca

SEQ ID NO: 8862 - DNA, 25 bp, Homo sapien
cgacagctaattgtggcctcgaaca

SEQ ID NO: 8863 - DNA, 25 bp, Homo sapien
ccttacgttcgttttgactcgtaaa

SEQ ID NO: 8864 - DNA, 25 bp, Homo sapien
ccttacgttcgtattgactcgtaaa

SEQ ID NO: 8865 - DNA, 25 bp, Homo sapien
gtgttacctttctttagacgagtaa

SEQ ID NO: 8866 - DNA, 25 bp, Homo sapien
gtgttacctttcattagacgagtaa

SEQ ID NO: 8867 - DNA, 25 bp, Homo sapien
accgtgcctggtacacacacacgaa

SEQ ID NO: 8868 - DNA, 25 bp, Homo sapien
accgtgcctggttcacacacacgaa

SEQ ID NO: 8869 - DNA, 25 bp, Homo sapien
cctttaagactccacgaagacagac

SEQ ID NO: 8870 - DNA, 25 bp, Homo sapien
cctttaagactcgacgaagacagac

SEQ ID NO: 8871 - DNA, 25 bp, Homo sapien
agaagtttgaaaaaagctactcgac

SEQ ID NO: 8872 - DNA, 25 bp, Homo sapien
agaagtttgaaataagctactcgac

SEQ ID NO: 8873 - DNA, 25 bp, Homo sapien
ttgtaggtgttacttgtgttcacac

SEQ ID NO: 8874 - DNA, 25 bp, Homo sapien
ttgtaggtgttagttgtgttcacac

SEQ ID NO: 8875 - DNA, 25 bp, Homo sapien
gtacgcacctacacttggttctaca

SEQ ID NO: 8876 - DNA, 25 bp, Homo sapien
gtacgcacctactcttggttctaca

SEQ ID NO: 8877 - DNA, 25 bp, Homo sapien
gggtctctttcgtttgtctacacct

SEQ ID NO: 8878 - DNA, 25 bp, Homo sapien
gggtctctttcgattgtctacacct

SEQ ID NO: 8879 - DNA, 25 bp, Homo sapien
gggaggttgtgatccgtcacgacct

SEQ ID NO: 8880 - DNA, 25 bp, Homo sapien
gggaggttgtgaaccgtcacgacct

SEQ ID NO: 8881 - DNA, 25 bp, Homo sapien
agggtatcgtggaaccgctacaact

SEQ ID NO: 8882 - DNA, 25 bp, Homo sapien
agggtatcgtggtaccgctacaact

SEQ ID NO: 8883 - DNA, 25 bp, Homo sapien
gagtcgtaccggacagtaccacttt

SEQ ID NO: 8884 - DNA, 25 bp, Homo sapien
gagtcgtaccggtcagtaccacttt

SEQ ID NO: 8885 - DNA, 25 bp, Homo sapien
tcggttctccgtccttccgtactta

SEQ ID NO: 8886 - DNA, 25 bp, Homo sapien
tcggttctccgtgcttccgtactta

SEQ ID NO: 8887 - DNA, 25 bp, Homo sapien
agctctctcgtttacgtcgctccga

SEQ ID NO: 8888 - DNA, 25 bp, Homo sapien
agctctctcgttaacgtcgctccga

SEQ ID NO: 8889 - DNA, 25 bp, Homo sapien
agagtcacgtatgaacgtccccgag

SEQ ID NO: 8890 - DNA, 25 bp, Homo sapien
agagtcacgtatcaacgtccccgag

SEQ ID NO: 8891 - DNA, 25 bp, Homo sapien
aatatcgacacagacgcagacgacg

SEQ ID NO: 8892 - DNA, 25 bp, Homo sapien
aatatcgacacacacgcagacgacg

SEQ ID NO: 8893 - DNA, 25 bp, Homo sapien
accaattctagacctctcctaaggg

SEQ ID NO: 8894 - DNA, 25 bp, Homo sapien
accaattctagagctctcctaaggg

SEQ ID NO: 8895 - DNA, 25 bp, Homo sapien
tacgtcttagagatcacaccgagga

SEQ ID NO: 8896 - DNA, 25 bp, Homo sapien
tacgtcttagagttcacaccgagga

SEQ ID NO: 8897 - DNA, 25 bp, Homo sapien
gatacttttacgttcacccgaggat

SEQ ID NO: 8898 - DNA, 25 bp, Homo sapien
gatacttttacgatcacccgaggat

SEQ ID NO: 8899 - DNA, 25 bp, Homo sapien
accagaaatgtctttctggccacat

SEQ ID NO: 8900 - DNA, 25 bp, Homo sapien
accagaaatgtcattctggccacat

SEQ ID NO: 8901 - DNA, 25 bp, Homo sapien
caaatttacggtgatggtgtcacat

SEQ ID NO: 8902 - DNA, 25 bp, Homo sapien
caaatttacggtcatggtgtcacat

SEQ ID NO: 8903 - DNA, 25 bp, Homo sapien
caagtttcgacgtcggcggacctgt

SEQ ID NO: 8904 - DNA, 25 bp, Homo sapien
caagtttcgacgacggcggacctgt

SEQ ID NO: 8905 - DNA, 25 bp, Homo sapien
cccggtttctcgacgagtcgttgcc

SEQ ID NO: 8906 - DNA, 25 bp, Homo sapien
cccggtttctcgtcgagtcgttgcc

SEQ ID NO: 8907 - DNA, 25 bp, Homo sapien
acagccgttctcttcttagtcaggg

SEQ ID NO: 8908 - DNA, 25 bp, Homo sapien
acagccgttctcatcttagtcaggg

SEQ ID NO: 8909 - DNA, 25 bp, Homo sapien
cacccggtgttggagacggacgaca

SEQ ID NO: 8910 - DNA, 25 bp, Homo sapien
cacccggtgttgcagacggacgaca

SEQ ID NO: 8911 - DNA, 25 bp, Homo sapien
acccgacttgacctagtgcgagacg

SEQ ID NO: 8912 - DNA, 25 bp, Homo sapien
acccgacttgacgtagtgcgagacg

SEQ ID NO: 8913 - DNA, 25 bp, Homo sapien
gtttcatgactacaccatcgagagg

SEQ ID NO: 8914 - DNA, 25 bp, Homo sapien
gtttcatgactagaccatcgagagg

SEQ ID NO: 8915 - DNA, 25 bp, Homo sapien
acggcagagcgtgtacttccgaccc

SEQ ID NO: 8916 - DNA, 25 bp, Homo sapien
acggcagagcgtctacttccgaccc

SEQ ID NO: 8917 - DNA, 25 bp, Homo sapien
cagaagagagaaacctattagaccc

SEQ ID NO: 8918 - DNA, 25 bp, Homo sapien
cagaagagagaatcctattagaccc

SEQ ID NO: 8919 - DNA, 25 bp, Homo sapien
ctaaaagggatcaagttgtctatct

SEQ ID NO: 8920 - DNA, 25 bp, Homo sapien
ctaaaagggatctagttgtctatct

SEQ ID NO: 8921 - DNA, 25 bp, Homo sapien
aaaaagggatcgtccgtcgtcaact

SEQ ID NO: 8922 - DNA, 25 bp, Homo sapien
aaaaagggatcgaccgtcgtcaact

SEQ ID NO: 8923 - DNA, 25 bp, Homo sapien
aacgtaggagagaagggtcgactct

SEQ ID NO: 8924 - DNA, 25 bp, Homo sapien
aacgtaggagagtagggtcgactct

SEQ ID NO: 8925 - DNA, 25 bp, Homo sapien
acactaaaagatgagtcgtcgacct

SEQ ID NO: 8926 - DNA, 25 bp, Homo sapien
acactaaaagatcagtcgtcgacct

SEQ ID NO: 8927 - DNA, 25 bp, Homo sapien
tgaacaagacgacgacaccttcagc

SEQ ID NO: 8928 - DNA, 25 bp, Homo sapien
tgaacaagacgaggacaccttcagc

SEQ ID NO: 8929 - DNA, 25 bp, Homo sapien
acacgagtagtgtccgagttgtaac

SEQ ID NO: 8930 - DNA, 25 bp, Homo sapien
acacgagtagtgaccgagttgtaac

SEQ ID NO: 8931 - DNA, 25 bp, Homo sapien
aagaatcagaggtccactgtgtccg

SEQ ID NO: 8932 - DNA, 25 bp, Homo sapien
aagaatcagaggaccactgtgtccg

SEQ ID NO: 8933 - DNA, 25 bp, Homo sapien
aaagatactgtgacccgtcgacaca

SEQ ID NO: 8934 - DNA, 25 bp, Homo sapien
aaagatactgtgtcccgtcgacaca

SEQ ID NO: 8935 - DNA, 25 bp, Homo sapien
catgtaatagttatgtccgttgaac

SEQ ID NO: 8936 - DNA, 25 bp, Homo sapien
catgtaatagttttgtccgttgaac

SEQ ID NO: 8937 - DNA, 25 bp, Homo sapien
cacttgagttttcaagacattcatg

SEQ ID NO: 8938 - DNA, 25 bp, Homo sapien
cacttgagttttgaagacattcatg

SEQ ID NO: 8939 - DNA, 25 bp, Homo sapien
tggacgtttatagtgaacattccgt

SEQ ID NO: 8940 - DNA, 25 bp, Homo sapien
tggacgtttatactgaacattccgt

SEQ ID NO: 8941 - DNA, 25 bp, Homo sapien
tcggtgacttctttccggtctccat

SEQ ID NO: 8942 - DNA, 25 bp, Homo sapien
tcggtgacttctatccggtctccat

SEQ ID NO: 8943 - DNA, 25 bp, Homo sapien
agtagacttcttcgtcgtggaccat

SEQ ID NO: 8944 - DNA, 25 bp, Homo sapien
agtagacttcttggtcgtggaccat

SEQ ID NO: 8945 - DNA, 25 bp, Homo sapien
gggtcatctgtaggtagacatcgac

SEQ ID NO: 8946 - DNA, 25 bp, Homo sapien
gggtcatctgtacgtagacatcgac

SEQ ID NO: 8947 - DNA, 25 bp, Homo sapien
gtaagtacgtcacaccggacagtga

SEQ ID NO: 8948 - DNA, 25 bp, Homo sapien
gtaagtacgtcagaccggacagtga

SEQ ID NO: 8949 - DNA, 25 bp, Homo sapien
aggtacgtcagaggtactaacgaaa

SEQ ID NO: 8950 - DNA, 25 bp, Homo sapien
aggtacgtcagacgtactaacgaaa

SEQ ID NO: 8951 - DNA, 25 bp, Homo sapien
gagttacgtctcgactcatccacct

SEQ ID NO: 8952 - DNA, 25 bp, Homo sapien
gagttacgtctccactcatccacct

SEQ ID NO: 8953 - DNA, 25 bp, Homo sapien
ggggtgactgtcctccgatgtgacc

SEQ ID NO: 8954 - DNA, 25 bp, Homo sapien
ggggtgactgtcgtccgatgtgacc

SEQ ID NO: 8955 - DNA, 25 bp, Homo sapien
gtagagtctcgtatctctgggagag

SEQ ID NO: 8956 - DNA, 25 bp, Homo sapien
gtagagtctcgtttctctgggagag

SEQ ID NO: 8957 - DNA, 25 bp, Homo sapien
ggtaggacgtcgtaacttcccgcac

SEQ ID NO: 8958 - DNA, 25 bp, Homo sapien
ggtaggacgtcgaaacttcccgcac

SEQ ID NO: 8959 - DNA, 25 bp, Homo sapien
cttacacacttcgagtgttcagaca

SEQ ID NO: 8960 - DNA, 25 bp, Homo sapien
cttacacacttccagtgttcagaca

SEQ ID NO: 8961 - DNA, 25 bp, Homo sapien
aacaggtgtcagtcgttaccactag

SEQ ID NO: 8962 - DNA, 25 bp, Homo sapien
aacaggtgtcagacgttaccactag

SEQ ID NO: 8963 - DNA, 25 bp, Homo sapien
gtttacttgtacagtaaaaccaagt

SEQ ID NO: 8964 - DNA, 25 bp, Homo sapien
gtttacttgtactgtaaaaccaagt

SEQ ID NO: 8965 - DNA, 25 bp, Homo sapien
gagtgatagtacgagtgaaactcac

SEQ ID NO: 8966 - DNA, 25 bp, Homo sapien
gagtgatagtaccagtgaaactcac

SEQ ID NO: 8967 - DNA, 25 bp, Homo sapien
aagggtatacaaggacgtagtccac

SEQ ID NO: 8968 - DNA, 25 bp, Homo sapien
aagggtatacaacgacgtagtccac

SEQ ID NO: 8969 - DNA, 25 bp, Homo sapien
tagacggtcgatacggcgtccccac

SEQ ID NO: 8970 - DNA, 25 bp, Homo sapien
tagacggtcgattcggcgtccccac

SEQ ID NO: 8971 - DNA, 25 bp, Homo sapien
agggcgtcgtcgtcgtcctaccgtc

SEQ ID NO: 8972 - DNA, 25 bp, Homo sapien
agggcgtcgtcgacgtcctaccgtc

SEQ ID NO: 8973 - DNA, 25 bp, Homo sapien
ctcgtgacagtccagttcacgtgta

SEQ ID NO: 8974 - DNA, 25 bp, Homo sapien
ctcgtgacagtcgagttcacgtgta

SEQ ID NO: 8975 - DNA, 25 bp, Homo sapien
gtcttcgactcttcattcacgtaga

SEQ ID NO: 8976 - DNA, 25 bp, Homo sapien
gtcttcgactctacattcacgtaga

SEQ ID NO: 8977 - DNA, 25 bp, Homo sapien
tggtttgtcgaccttttcgtacaga

SEQ ID NO: 8978 - DNA, 25 bp, Homo sapien
tggtttgtcgacgttttcgtacaga

SEQ ID NO: 8979 - DNA, 25 bp, Homo sapien
agtctcttccctgtacggtaagtag

SEQ ID NO: 8980 - DNA, 25 bp, Homo sapien
agtctcttccctctacggtaagtag

SEQ ID NO: 8981 - DNA, 25 bp, Homo sapien
tatatacgaccgtttatcggaacac

SEQ ID NO: 8982 - DNA, 25 bp, Homo sapien
tatatacgaccgattatcggaacac

SEQ ID NO: 8983 - DNA, 25 bp, Homo sapien
caaacgtgacgagagacccgtcacg

SEQ ID NO: 8984 - DNA, 25 bp, Homo sapien
caaacgtgacgacagacccgtcacg

SEQ ID NO: 8985 - DNA, 25 bp, Homo sapien
cagttacgtggttctcgtcattctc

SEQ ID NO: 8986 - DNA, 25 bp, Homo sapien
cagttacgtggtactcgtcattctc

SEQ ID NO: 8987 - DNA, 25 bp, Homo sapien
aagtacgtgtctcatgtaagtaacc

SEQ ID NO: 8988 - DNA, 25 bp, Homo sapien
aagtacgtgtctgatgtaagtaacc

SEQ ID NO: 8989 - DNA, 25 bp, Homo sapien
taaatactagtttcctaacagaggt

SEQ ID NO: 8990 - DNA, 25 bp, Homo sapien
taaatactagttacctaacagaggt

SEQ ID NO: 8991 - DNA, 25 bp, Homo sapien
ttctgtgacccatcgtaaagacagt

SEQ ID NO: 8992 - DNA, 25 bp, Homo sapien
ttctgtgacccaacgtaaagacagt

SEQ ID NO: 8993 - DNA, 25 bp, Homo sapien
gaatctgtacgtaccgaattagaaa

SEQ ID NO: 8994 - DNA, 25 bp, Homo sapien
gaatctgtacgttccgaattagaaa

SEQ ID NO: 8995 - DNA, 25 bp, Homo sapien
gttgtaacgacttccataaagaatt

SEQ ID NO: 8996 - DNA, 25 bp, Homo sapien
gttgtaacgactaccataaagaatt

SEQ ID NO: 8997 - DNA, 25 bp, Homo sapien
atgactcatgaccatacgagatttt

SEQ ID NO: 8998 - DNA, 25 bp, Homo sapien
atgactcatgacgatacgagatttt

SEQ ID NO: 8999 - DNA, 25 bp, Homo sapien
tgaccgtatgtttacgtcgatttcc

SEQ ID NO: 9000 - DNA, 25 bp, Homo sapien
tgaccgtatgttaacgtcgatttcc

SEQ ID NO: 9001 - DNA, 25 bp, Homo sapien
gttgttgtatacgacgacgagaatc

SEQ ID NO: 9002 - DNA, 25 bp, Homo sapien
gttgttgtataccacgacgagaatc

SEQ ID NO: 9003 - DNA, 25 bp, Homo sapien
tatggggttactatccggtgggacc

SEQ ID NO: 9004 - DNA, 25 bp, Homo sapien
tatggggttactttccggtgggacc

SEQ ID NO: 9005 - DNA, 25 bp, Homo sapien
gctccgagtgtgtcactcaaacgtc

SEQ ID NO: 9006 - DNA, 25 bp, Homo sapien
gctccgagtgtgacactcaaacgtc

SEQ ID NO: 9007 - DNA, 25 bp, Homo sapien
gtattcgtcttgacataaaactcgt

SEQ ID NO: 9008 - DNA, 25 bp, Homo sapien
gtattcgtcttgtcataaaactcgt

SEQ ID NO: 9009 - DNA, 25 bp, Homo sapien
atttgatctgacagagttgacacgt

SEQ ID NO: 9010 - DNA, 25 bp, Homo sapien
atttgatctgactgagttgacacgt

SEQ ID NO: 9011 - DNA, 25 bp, Homo sapien
gtttgagtaccgaaagatctacgat

SEQ ID NO: 9012 - DNA, 25 bp, Homo sapien
gtttgagtaccgtaagatctacgat

SEQ ID NO: 9013 - DNA, 25 bp, Homo sapien
gtaactgaaccgactacagtcttct

SEQ ID NO: 9014 - DNA, 25 bp, Homo sapien
gtaactgaaccgtctacagtcttct

SEQ ID NO: 9015 - DNA, 25 bp, Homo sapien
attgaggaagtgacgtcacgaatct

SEQ ID NO: 9016 - DNA, 25 bp, Homo sapien
attgaggaagtgtcgtcacgaatct

SEQ ID NO: 9017 - DNA, 25 bp, Homo sapien
acgttggtagacgtcttcggttttc

SEQ ID NO: 9018 - DNA, 25 bp, Homo sapien
acgttggtagacctcttcggttttc

SEQ ID NO: 9019 - DNA, 25 bp, Homo sapien
ccttttgtactacctgttgtcttga

SEQ ID NO: 9020 - DNA, 25 bp, Homo sapien
ccttttgtactagctgttgtcttga

SEQ ID NO: 9021 - DNA, 25 bp, Homo sapien
gtaataggtcatcactttatctgtt

SEQ ID NO: 9022 - DNA, 25 bp, Homo sapien
gtaataggtcatgactttatctgtt

SEQ ID NO: 9023 - DNA, 25 bp, Homo sapien
ctctcaccctttgtgataacgtccg

SEQ ID NO: 9024 - DNA, 25 bp, Homo sapien
ctctcaccctttctgataacgtccg

SEQ ID NO: 9025 - DNA, 25 bp, Homo sapien
aggcgtagacgtttccttcccgtcc

SEQ ID NO: 9026 - DNA, 25 bp, Homo sapien
aggcgtagacgtatccttcccgtcc

SEQ ID NO: 9027 - DNA, 25 bp, Homo sapien
tagtggagaataaatagtccttcac

SEQ ID NO: 9028 - DNA, 25 bp, Homo sapien
tagtggagaatatatagtccttcac

SEQ ID NO: 9029 - DNA, 25 bp, Homo sapien
ttcgtgacacttgagttttcaagac

SEQ ID NO: 9030 - DNA, 25 bp, Homo sapien
ttcgtgacacttcagttttcaagac

SEQ ID NO: 9031 - DNA, 25 bp, Homo sapien
gtagtgacatcgaccgtttccagac

SEQ ID NO: 9032 - DNA, 25 bp, Homo sapien
gtagtgacatcgtccgtttccagac

SEQ ID NO: 9033 - DNA, 25 bp, Homo sapien
agaactacaggaccttctctcgcgc

SEQ ID NO: 9034 - DNA, 25 bp, Homo sapien
agaactacaggagcttctctcgcgc

SEQ ID NO: 9035 - DNA, 25 bp, Homo sapien
aataactcgtggtcctctctcagtc

SEQ ID NO: 9036 - DNA, 25 bp, Homo sapien
aataactcgtggacctctctcagtc

SEQ ID NO: 9037 - DNA, 25 bp, Homo sapien
agtacctctcggataaacaccaacg

SEQ ID NO: 9038 - DNA, 25 bp, Homo sapien
agtacctctcggttaaacaccaacg

SEQ ID NO: 9039 - DNA, 25 bp, Homo sapien
gatcagaacatgtgtcctgtcctta

SEQ ID NO: 9040 - DNA, 25 bp, Homo sapien
gatcagaacatgagtcctgtcctta

SEQ ID NO: 9041 - DNA, 25 bp, Homo sapien
tagaactactttacgctgtctaatg

SEQ ID NO: 9042 - DNA, 25 bp, Homo sapien
tagaactacttttcgctgtctaatg

SEQ ID NO: 9043 - DNA, 25 bp, Homo sapien
gtgttctcctgttcgcctctctgtt

SEQ ID NO: 9044 - DNA, 25 bp, Homo sapien
gtgttctcctgtacgcctctctgtt

SEQ ID NO: 9045 - DNA, 25 bp, Homo sapien
ggtgtcgttcggatattccacttgt

SEQ ID NO: 9046 - DNA, 25 bp, Homo sapien
ggtgtcgttcggttattccacttgt

SEQ ID NO: 9047 - DNA, 25 bp, Homo sapien
ggggttgaactcttgtcccactgtg

SEQ ID NO: 9048 - DNA, 25 bp, Homo sapien
ggggttgaactcatgtcccactgtg

SEQ ID NO: 9049 - DNA, 25 bp, Homo sapien
taacgagactgatgtcttaacgtaa

SEQ ID NO: 9050 - DNA, 25 bp, Homo sapien
taacgagactgaagtcttaacgtaa

SEQ ID NO: 9051 - DNA, 25 bp, Homo sapien
tcccgggttaaggatcttacacgaa

SEQ ID NO: 9052 - DNA, 25 bp, Homo sapien
tcccgggttaagcatcttacacgaa

SEQ ID NO: 9053 - DNA, 25 bp, Homo sapien
ttaccttacccaagacataacaggg

SEQ ID NO: 9054 - DNA, 25 bp, Homo sapien
ttaccttacccatgacataacaggg

SEQ ID NO: 9055 - DNA, 25 bp, Homo sapien
tccggactccaaactataagagttt

SEQ ID NO: 9056 - DNA, 25 bp, Homo sapien
tccggactccaatctataagagttt

SEQ ID NO: 9057 - DNA, 25 bp, Homo sapien
ggggacccacttttctacaaagttt

SEQ ID NO: 9058 - DNA, 25 bp, Homo sapien
ggggacccacttatctacaaagttt

SEQ ID NO: 9059 - DNA, 25 bp, Homo sapien
agtttgtattattaacacgagacat

SEQ ID NO: 9060 - DNA, 25 bp, Homo sapien
agtttgtattataaacacgagacat

SEQ ID NO: 9061 - DNA, 25 bp, Homo sapien
cattatctttctttacgacgaggaa

SEQ ID NO: 9062 - DNA, 25 bp, Homo sapien
cattatctttctatacgacgaggaa

SEQ ID NO: 9063 - DNA, 25 bp, Homo sapien
cgttcttcttccataacgatagtgg

SEQ ID NO: 9064 - DNA, 25 bp, Homo sapien
cgttcttcttccttaacgatagtgg

SEQ ID NO: 9065 - DNA, 25 bp, Homo sapien
tgacccttcgtcctgctacaagttc

SEQ ID NO: 9066 - DNA, 25 bp, Homo sapien
tgacccttcgtcgtgctacaagttc

SEQ ID NO: 9067 - DNA, 25 bp, Homo sapien
acacctgtcgtcgaccttaggtatc

SEQ ID NO: 9068 - DNA, 25 bp, Homo sapien
acacctgtcgtccaccttaggtatc

SEQ ID NO: 9069 - DNA, 25 bp, Homo sapien
tctatctgtctgacttcggtgactt

SEQ ID NO: 9070 - DNA, 25 bp, Homo sapien
tctatctgtctgtcttcggtgactt

SEQ ID NO: 9071 - DNA, 25 bp, Homo sapien
tttctgttcgagtcgtaggacggtc

SEQ ID NO: 9072 - DNA, 25 bp, Homo sapien
tttctgttcgagacgtaggacggtc

SEQ ID NO: 9073 - DNA, 25 bp, Homo sapien
aaccgccttctcgtcgacgagggca

SEQ ID NO: 9074 - DNA, 25 bp, Homo sapien
aaccgccttctcctcgacgagggca

SEQ ID NO: 9075 - DNA, 25 bp, Homo sapien
actcagtacattttccactgaggaa

SEQ ID NO: 9076 - DNA, 25 bp, Homo sapien
actcagtacattatccactgaggaa

SEQ ID NO: 9077 - DNA, 25 bp, Homo sapien
tgtccgatattcaacagttatcaag

SEQ ID NO: 9078 - DNA, 25 bp, Homo sapien
tgtccgatattctacagttatcaag

SEQ ID NO: 9079 - DNA, 25 bp, Homo sapien
gttccgtttacgtgacagcagtttg

SEQ ID NO: 9080 - DNA, 25 bp, Homo sapien
gttccgtttacgagacagcagtttg

SEQ ID NO: 9081 - DNA, 25 bp, Homo sapien
tcactctctcttgaccagggttctg

SEQ ID NO: 9082 - DNA, 25 bp, Homo sapien
tcactctctcttcaccagggttctg

SEQ ID NO: 9083 - DNA, 25 bp, Homo sapien
tatgtttgagagttccctgtacttg

SEQ ID NO: 9084 - DNA, 25 bp, Homo sapien
tatgtttgagagatccctgtacttg

SEQ ID NO: 9085 - DNA, 25 bp, Homo sapien
tatattttgattaaccatataatgt

SEQ ID NO: 9086 - DNA, 25 bp, Homo sapien
tatattttgatttaccatataatgt

SEQ ID NO: 9087 - DNA, 25 bp, Homo sapien
tatttgtaagtaacgtcctcaatgt

SEQ ID NO: 9088 - DNA, 25 bp, Homo sapien
tatttgtaagtatcgtcctcaatgt

SEQ ID NO: 9089 - DNA, 25 bp, Homo sapien
gattgtcgtcgatgaattctcaggt

SEQ ID NO: 9090 - DNA, 25 bp, Homo sapien
gattgtcgtcgaagaattctcaggt

SEQ ID NO: 9091 - DNA, 25 bp, Homo sapien
acccggtaccgcaagaagactccga

SEQ ID NO: 9092 - DNA, 25 bp, Homo sapien
acccggtaccgctagaagactccga

SEQ ID NO: 9093 - DNA, 25 bp, Homo sapien
ctccgggtcgacgacgaagatctga

SEQ ID NO: 9094 - DNA, 25 bp, Homo sapien
ctccgggtcgaccacgaagatctga

SEQ ID NO: 9095 - DNA, 25 bp, Homo sapien
cgtagttcgtaggacgtaccggcaa

SEQ ID NO: 9096 - DNA, 25 bp, Homo sapien
cgtagttcgtagcacgtaccggcaa

SEQ ID NO: 9097 - DNA, 25 bp, Homo sapien
acaagtcactttgacaaccgttgaa

SEQ ID NO: 9098 - DNA, 25 bp, Homo sapien
acaagtcactttcacaaccgttgaa

SEQ ID NO: 9099 - DNA, 25 bp, Homo sapien
atattttactgtttccgatatgtcg

SEQ ID NO: 9100 - DNA, 25 bp, Homo sapien
atattttactgtatccgatatgtcg

SEQ ID NO: 9101 - DNA, 25 bp, Homo sapien
ggttcttcgttgtcaacccgtttcg

SEQ ID NO: 9102 - DNA, 25 bp, Homo sapien
ggttcttcgttgacaacccgtttcg

SEQ ID NO: 9103 - DNA, 25 bp, Homo sapien
ctaggtatcgtagatgacacgttta

SEQ ID NO: 9104 - DNA, 25 bp, Homo sapien
ctaggtatcgtacatgacacgttta

SEQ ID NO: 9105 - DNA, 25 bp, Homo sapien
cagtgaacagtgatctaccttcgag

SEQ ID NO: 9106 - DNA, 25 bp, Homo sapien
cagtgaacagtgttctaccttcgag

SEQ ID NO: 9107 - DNA, 25 bp, Homo sapien
taccgttgaagtaacgacggtgact

SEQ ID NO: 9108 - DNA, 25 bp, Homo sapien
taccgttgaagttacgacggtgact

SEQ ID NO: 9109 - DNA, 25 bp, Homo sapien
tttcgaaaggtgtcacaggtgtctg

SEQ ID NO: 9110 - DNA, 25 bp, Homo sapien
tttcgaaaggtgacacaggtgtctg

SEQ ID NO: 9111 - DNA, 25 bp, Homo sapien
gctaaggacatgtagagacgggtcc

SEQ ID NO: 9112 - DNA, 25 bp, Homo sapien
gctaaggacatgaagagacgggtcc

SEQ ID NO: 9113 - DNA, 25 bp, Homo sapien
cccagagaggagtacaacgcgggcc

SEQ ID NO: 9114 - DNA, 25 bp, Homo sapien
cccagagaggagaacaacgcgggcc

SEQ ID NO: 9115 - DNA, 25 bp, Homo sapien
cagaagagaaacagttacggtattc

SEQ ID NO: 9116 - DNA, 25 bp, Homo sapien
cagaagagaaactgttacggtattc

SEQ ID NO: 9117 - DNA, 25 bp, Homo sapien
cgagtgggacactgtgtcggtctcc

SEQ ID NO: 9118 - DNA, 25 bp, Homo sapien
cgagtgggacacagtgtcggtctcc

SEQ ID NO: 9119 - DNA, 25 bp, Homo sapien
gggttggtaatcgtaagagtcacac

SEQ ID NO: 9120 - DNA, 25 bp, Homo sapien
gggttggtaatcctaagagtcacac

SEQ ID NO: 9121 - DNA, 25 bp, Homo sapien
tatgttatgtgaacccaagatgaac

SEQ ID NO: 9122 - DNA, 25 bp, Homo sapien
tatgttatgtgatcccaagatgaac

SEQ ID NO: 9123 - DNA, 25 bp, Homo sapien
tcaccacacgacagtccagggggac

SEQ ID NO: 9124 - DNA, 25 bp, Homo sapien
tcaccacacgactgtccagggggac

SEQ ID NO: 9125 - DNA, 25 bp, Homo sapien
tatatttacgcacgaccgggactga

SEQ ID NO: 9126 - DNA, 25 bp, Homo sapien
tatatttacgcaggaccgggactga

SEQ ID NO: 9127 - DNA, 25 bp, Homo sapien
gaacatcttcagttcccggctctct

SEQ ID NO: 9128 - DNA, 25 bp, Homo sapien
gaacatcttcagatcccggctctct

SEQ ID NO: 9129 - DNA, 25 bp, Homo sapien
ggatctacatcatctcgccgtggag

SEQ ID NO: 9130 - DNA, 25 bp, Homo sapien
ggatctacatcaactcgccgtggag

SEQ ID NO: 9131 - DNA, 25 bp, Homo sapien
aagacaccgacaagccccgcggtga

SEQ ID NO: 9132 - DNA, 25 bp, Homo sapien
aagacaccgacatgccccgcggtga

SEQ ID NO: 9133 - DNA, 25 bp, Homo sapien
agacgaccaaacgaccagacgaaga

SEQ ID NO: 9134 - DNA, 25 bp, Homo sapien
agacgaccaaaccaccagacgaaga

SEQ ID NO: 9135 - DNA, 25 bp, Homo sapien
ggtacctcatcctcgcgaacgggag

SEQ ID NO: 9136 - DNA, 25 bp, Homo sapien
ggtacctcatccacgcgaacgggag

SEQ ID NO: 9137 - DNA, 25 bp, Homo sapien
ctgtcatcgtatgaaccgggaccca

SEQ ID NO: 9138 - DNA, 25 bp, Homo sapien
ctgtcatcgtatcaaccgggaccca

SEQ ID NO: 9139 - DNA, 25 bp, Homo sapien
acccaagtactctagggtagaaccc

SEQ ID NO: 9140 - DNA, 25 bp, Homo sapien
acccaagtactcaagggtagaaccc

SEQ ID NO: 9141 - DNA, 25 bp, Homo sapien
cataggaacgtttgtgtagacagtc

SEQ ID NO: 9142 - DNA, 25 bp, Homo sapien
cataggaacgttagtgtagacagtc

SEQ ID NO: 9143 - DNA, 25 bp, Homo sapien
gggagagccgtggactctgtcactc

SEQ ID NO: 9144 - DNA, 25 bp, Homo sapien
gggagagccgtgcactctgtcactc

SEQ ID NO: 9145 - DNA, 25 bp, Homo sapien
gtctcgaaggaaggaccacgacttc

SEQ ID NO: 9146 - DNA, 25 bp, Homo sapien
gtctcgaaggaacgaccacgacttc

SEQ ID NO: 9147 - DNA, 25 bp, Homo sapien
gaagaacaagtgaaagaccatttac

SEQ ID NO: 9148 - DNA, 25 bp, Homo sapien
gaagaacaagtgtaagaccatttac

SEQ ID NO: 9149 - DNA, 25 bp, Homo sapien
cgaaggacaatgtgtcttatttaca

SEQ ID NO: 9150 - DNA, 25 bp, Homo sapien
cgaaggacaatgagtcttatttaca

SEQ ID NO: 9151 - DNA, 25 bp, Homo sapien
taggaaggtatgacctttcttcggt

SEQ ID NO: 9152 - DNA, 25 bp, Homo sapien
taggaaggtatgtcctttcttcggt

SEQ ID NO: 9153 - DNA, 25 bp, Homo sapien
gacgtttatgttgtagctacctcat

SEQ ID NO: 9154 - DNA, 25 bp, Homo sapien
gacgtttatgttctagctacctcat

SEQ ID NO: 9155 - DNA, 25 bp, Homo sapien
gactatatcgtagtatatggttcct

SEQ ID NO: 9156 - DNA, 25 bp, Homo sapien
gactatatcgtactatatggttcct

SEQ ID NO: 9157 - DNA, 25 bp, Homo sapien
gacaccttatctacaggagtaccgt

SEQ ID NO: 9158 - DNA, 25 bp, Homo sapien
gacaccttatcttcaggagtaccgt

SEQ ID NO: 9159 - DNA, 25 bp, Homo sapien
gagtccttctttaacgtcgtaccct

SEQ ID NO: 9160 - DNA, 25 bp, Homo sapien
gagtccttcttttacgtcgtaccct

SEQ ID NO: 9161 - DNA, 25 bp, Homo sapien
gtctccgacgtgtcctctcagagtc

SEQ ID NO: 9162 - DNA, 25 bp, Homo sapien
gtctccgacgtgacctctcagagtc

SEQ ID NO: 9163 - DNA, 25 bp, Homo sapien
cctcgtgagggtacccgtcaggtat

SEQ ID NO: 9164 - DNA, 25 bp, Homo sapien
cctcgtgagggttcccgtcaggtat

SEQ ID NO: 9165 - DNA, 25 bp, Homo sapien
ctctgtctccggtaccgcgcccgct

SEQ ID NO: 9166 - DNA, 25 bp, Homo sapien
ctctgtctccggaaccgcgcccgct

SEQ ID NO: 9167 - DNA, 25 bp, Homo sapien
ctattccggtgaacccaacgtccgt

SEQ ID NO: 9168 - DNA, 25 bp, Homo sapien
ctattccggtgatcccaacgtccgt

SEQ ID NO: 9169 - DNA, 25 bp, Homo sapien
ggaatacctcctcttacgatatccg

SEQ ID NO: 9170 - DNA, 25 bp, Homo sapien
ggaatacctcctgttacgatatccg

SEQ ID NO: 9171 - DNA, 25 bp, Homo sapien
ggaggaattccgaaagtacgatttc

SEQ ID NO: 9172 - DNA, 25 bp, Homo sapien
ggaggaattccgtaagtacgatttc

SEQ ID NO: 9173 - DNA, 25 bp, Homo sapien
gaagagtcaattatagaattcccta

SEQ ID NO: 9174 - DNA, 25 bp, Homo sapien
gaagagtcaattttagaattcccta

SEQ ID NO: 9175 - DNA, 25 bp, Homo sapien
tggtaatggtacacaggagcctctg

SEQ ID NO: 9176 - DNA, 25 bp, Homo sapien
tggtaatggtactcaggagcctctg

SEQ ID NO: 9177 - DNA, 25 bp, Homo sapien
ccaacgaagtactacagggaccaga

SEQ ID NO: 9178 - DNA, 25 bp, Homo sapien
ccaacgaagtacaacagggaccaga

SEQ ID NO: 9179 - DNA, 25 bp, Homo sapien
caacgaagagagaacggacccgatg

SEQ ID NO: 9180 - DNA, 25 bp, Homo sapien
caacgaagagagtacggacccgatg

SEQ ID NO: 9181 - DNA, 25 bp, Homo sapien
gccgtgaccggctctaggaccggaa

SEQ ID NO: 9182 - DNA, 25 bp, Homo sapien
gccgtgaccggcactaggaccggaa

SEQ ID NO: 9183 - DNA, 25 bp, Homo sapien
cacttagcaatcaccgaagagaaga

SEQ ID NO: 9184 - DNA, 25 bp, Homo sapien
cacttagcaatctccgaagagaaga

SEQ ID NO: 9185 - DNA, 25 bp, Homo sapien
cgactctcttcaaacagtcgacgct

SEQ ID NO: 9186 - DNA, 25 bp, Homo sapien
cgactctcttcatacagtcgacgct

SEQ ID NO: 9187 - DNA, 25 bp, Homo sapien
tggcacctcgtttgccttacgtacc

SEQ ID NO: 9188 - DNA, 25 bp, Homo sapien
tggcacctcgttagccttacgtacc

SEQ ID NO: 9189 - DNA, 25 bp, Homo sapien
gtggcggctcgagacttttgcgtct

SEQ ID NO: 9190 - DNA, 25 bp, Homo sapien
gtggcggctcgacacttttgcgtct

SEQ ID NO: 9191 - DNA, 25 bp, Homo sapien
gatggtactcggtcgtgtcctttcc

SEQ ID NO: 9192 - DNA, 25 bp, Homo sapien
gatggtactcggacgtgtcctttcc

SEQ ID NO: 9193 - DNA, 25 bp, Homo sapien
gatccgttatagttcgattctttcc

SEQ ID NO: 9194 - DNA, 25 bp, Homo sapien
gatccgttatagatcgattctttcc

SEQ ID NO: 9195 - DNA, 25 bp, Homo sapien
acgtattacgtaagaacttttgtac

SEQ ID NO: 9196 - DNA, 25 bp, Homo sapien
acgtattacgtatgaacttttgtac

SEQ ID NO: 9197 - DNA, 25 bp, Homo sapien
gactgtgttgacgaagtttcgttac

SEQ ID NO: 9198 - DNA, 25 bp, Homo sapien
gactgtgttgaccaagtttcgttac

SEQ ID NO: 9199 - DNA, 25 bp, Homo sapien
attctatggactaatgtttacgtca

SEQ ID NO: 9200 - DNA, 25 bp, Homo sapien
attctatggacttatgtttacgtca

SEQ ID NO: 9201 - DNA, 25 bp, Homo sapien
gtctttctgttcgtacgctcgtcga

SEQ ID NO: 9202 - DNA, 25 bp, Homo sapien
gtctttctgttcctacgctcgtcga

SEQ ID NO: 9203 - DNA, 25 bp, Homo sapien
tcgatttagtctcctgtcgtaggag

SEQ ID NO: 9204 - DNA, 25 bp, Homo sapien
tcgatttagtctgctgtcgtaggag

SEQ ID NO: 9205 - DNA, 25 bp, Homo sapien
acactttgacgtcgtcgagtcacgg

SEQ ID NO: 9206 - DNA, 25 bp, Homo sapien
acactttgacgtggtcgagtcacgg

SEQ ID NO: 9207 - DNA, 25 bp, Homo sapien
tactcagtcgggtcttacacttcgg

SEQ ID NO: 9208 - DNA, 25 bp, Homo sapien
tactcagtcgggacttacacttcgg

SEQ ID NO: 9209 - DNA, 25 bp, Homo sapien
tttaagcacgttttatagacttcgg

SEQ ID NO: 9210 - DNA, 25 bp, Homo sapien
tttaagcacgttatatagacttcgg

SEQ ID NO: 9211 - DNA, 25 bp, Homo sapien
tgacgaaaaccgaaaagatacactt

SEQ ID NO: 9212 - DNA, 25 bp, Homo sapien
tgacgaaaaccgtaaagatacactt

SEQ ID NO: 9213 - DNA, 25 bp, Homo sapien
tgcattgatttatatgtactcgtac

SEQ ID NO: 9214 - DNA, 25 bp, Homo sapien
tgcattgatttaaatgtactcgtac

SEQ ID NO: 9215 - DNA, 25 bp, Homo sapien
atactgagagtcaactgtgtatgac

SEQ ID NO: 9216 - DNA, 25 bp, Homo sapien
atactgagagtctactgtgtatgac

SEQ ID NO: 9217 - DNA, 25 bp, Homo sapien
gggagtaagttcgtgtactactgtc

SEQ ID NO: 9218 - DNA, 25 bp, Homo sapien
gggagtaagttcctgtactactgtc

SEQ ID NO: 9219 - DNA, 25 bp, Homo sapien
gaggatacttgtaaattactccgac

SEQ ID NO: 9220 - DNA, 25 bp, Homo sapien
gaggatacttgttaattactccgac

SEQ ID NO: 9221 - DNA, 25 bp, Homo sapien
ctacctattcaatccgtcgactact

SEQ ID NO: 9222 - DNA, 25 bp, Homo sapien
ctacctattcaaaccgtcgactact

SEQ ID NO: 9223 - DNA, 25 bp, Homo sapien
agtcacttctacaacgacagaagtt

SEQ ID NO: 9224 - DNA, 25 bp, Homo sapien
agtcacttctactacgacagaagtt

SEQ ID NO: 9225 - DNA, 25 bp, Homo sapien
gagctgtgtaaacgaacactgtact

SEQ ID NO: 9226 - DNA, 25 bp, Homo sapien
gagctgtgtaaaggaacactgtact

SEQ ID NO: 9227 - DNA, 25 bp, Homo sapien
tggagcaggtgccttactctggtag

SEQ ID NO: 9228 - DNA, 25 bp, Homo sapien
tggagcaggtgcgttactctggtag

SEQ ID NO: 9229 - DNA, 25 bp, Homo sapien
gacgtgctacttgcccaccgggtag

SEQ ID NO: 9230 - DNA, 25 bp, Homo sapien
gacgtgctacttccccaccgggtag

SEQ ID NO: 9231 - DNA, 25 bp, Homo sapien
actctcgtctgtgtctccctggtgt

SEQ ID NO: 9232 - DNA, 25 bp, Homo sapien
actctcgtctgtctctccctggtgt

SEQ ID NO: 9233 - DNA, 25 bp, Homo sapien
tccagggtcgtccatttcaggggtt

SEQ ID NO: 9234 - DNA, 25 bp, Homo sapien
tccagggtcgtcgatttcaggggtt

SEQ ID NO: 9235 - DNA, 25 bp, Homo sapien
gccgttctcttcttagtcagggcat

SEQ ID NO: 9236 - DNA, 25 bp, Homo sapien
gccgttctcttcatagtcagggcat

SEQ ID NO: 9237 - DNA, 25 bp, Homo sapien
taagagactgtctagtctgggtctt

SEQ ID NO: 9238 - DNA, 25 bp, Homo sapien
taagagactgtcaagtctgggtctt

SEQ ID NO: 9239 - DNA, 25 bp, Homo sapien
tgaaacagaccctctatccggagcc

SEQ ID NO: 9240 - DNA, 25 bp, Homo sapien
tgaaacagacccactatccggagcc

SEQ ID NO: 9241 - DNA, 25 bp, Homo sapien
cacgtaagacccacctaagggaacc

SEQ ID NO: 9242 - DNA, 25 bp, Homo sapien
cacgtaagaccctcctaagggaacc

SEQ ID NO: 9243 - DNA, 25 bp, Homo sapien
acagaaaccacaaccacaaagttgg

SEQ ID NO: 9244 - DNA, 25 bp, Homo sapien
acagaaaccacatccacaaagttgg

SEQ ID NO: 9245 - DNA, 25 bp, Homo sapien
taaacaggtccttcaacaggtcccg

SEQ ID NO: 9246 - DNA, 25 bp, Homo sapien
taaacaggtcctacaacaggtcccg

SEQ ID NO: 9247 - DNA, 25 bp, Homo sapien
caaagggaccttcagaagaccggac

SEQ ID NO: 9248 - DNA, 25 bp, Homo sapien
caaagggaccttgagaagaccggac

SEQ ID NO: 9249 - DNA, 25 bp, Homo sapien
tccaagagccgcaggaagtaccaga

SEQ ID NO: 9250 - DNA, 25 bp, Homo sapien
tccaagagccgctggaagtaccaga

SEQ ID NO: 9251 - DNA, 25 bp, Homo sapien
cccggggcgtcacacgtcgttagag

SEQ ID NO: 9252 - DNA, 25 bp, Homo sapien
cccggggcgtcagacgtcgttagag

SEQ ID NO: 9253 - DNA, 25 bp, Homo sapien
ttctccgccggctggacacataggt

SEQ ID NO: 9254 - DNA, 25 bp, Homo sapien
ttctccgccggcaggacacataggt

SEQ ID NO: 9255 - DNA, 25 bp, Homo sapien
tcacgccacgcgaagtcccaagtag

SEQ ID NO: 9256 - DNA, 25 bp, Homo sapien
tcacgccacgcgtagtcccaagtag

SEQ ID NO: 9257 - DNA, 25 bp, Homo sapien
cttatgctatggtgtctttgtcgtg

SEQ ID NO: 9258 - DNA, 25 bp, Homo sapien
cttatgctatggagtctttgtcgtg

SEQ ID NO: 9259 - DNA, 25 bp, Homo sapien
ataccttggacgatggttagacgta

SEQ ID NO: 9260 - DNA, 25 bp, Homo sapien
ataccttggacgttggttagacgta

SEQ ID NO: 9261 - DNA, 25 bp, Homo sapien
tctagacactcagagtagttctttt

SEQ ID NO: 9262 - DNA, 25 bp, Homo sapien
tctagacactcacagtagttctttt

SEQ ID NO: 9263 - DNA, 25 bp, Homo sapien
cgccgatccccttagtctgtctggt

SEQ ID NO: 9264 - DNA, 25 bp, Homo sapien
cgccgatcccctaagtctgtctggt

SEQ ID NO: 9265 - DNA, 25 bp, Homo sapien
ccagagacaggatgtgtatagtctt

SEQ ID NO: 9266 - DNA, 25 bp, Homo sapien
ccagagacaggaagtgtatagtctt

SEQ ID NO: 9267 - DNA, 25 bp, Homo sapien
acctttggagtaacggacgagtatt

SEQ ID NO: 9268 - DNA, 25 bp, Homo sapien
acctttggagtatcggacgagtatt

SEQ ID NO: 9269 - DNA, 25 bp, Homo sapien
cagtgacccgtgatccagtactatt

SEQ ID NO: 9270 - DNA, 25 bp, Homo sapien
cagtgacccgtgttccagtactatt

SEQ ID NO: 9271 - DNA, 25 bp, Homo sapien
taggagtagaggtcggttccctctg

SEQ ID NO: 9272 - DNA, 25 bp, Homo sapien
taggagtagaggacggttccctctg

SEQ ID NO: 9273 - DNA, 25 bp, Homo sapien
ccgacaaacgagtcggtgacccctg

SEQ ID NO: 9274 - DNA, 25 bp, Homo sapien
ccgacaaacgagacggtgacccctg

SEQ ID NO: 9275 - DNA, 25 bp, Homo sapien
cgcgacatcgggagcgccatcgaca

SEQ ID NO: 9276 - DNA, 25 bp, Homo sapien
cgcgacatcgggtgcgccatcgaca

SEQ ID NO: 9277 - DNA, 25 bp, Homo sapien
gaagacaatggttagttaacctcaa

SEQ ID NO: 9278 - DNA, 25 bp, Homo sapien
gaagacaatggtaagttaacctcaa

SEQ ID NO: 9279 - DNA, 25 bp, Homo sapien
gggaacttccatagatacacacagg

SEQ ID NO: 9280 - DNA, 25 bp, Homo sapien
gggaacttccattgatacacacagg

SEQ ID NO: 9281 - DNA, 25 bp, Homo sapien
ttctgacctactgtataccgaggtg

SEQ ID NO: 9282 - DNA, 25 bp, Homo sapien
ttctgacctactctataccgaggtg

SEQ ID NO: 9283 - DNA, 25 bp, Homo sapien
tcgttaccttcgtgggtagtatcgt

SEQ ID NO: 9284 - DNA, 25 bp, Homo sapien
tcgttaccttcgagggtagtatcgt

SEQ ID NO: 9285 - DNA, 25 bp, Homo sapien
ctgaaacttgtatgacatgtaccgt

SEQ ID NO: 9286 - DNA, 25 bp, Homo sapien
ctgaaacttgtaagacatgtaccgt

SEQ ID NO: 9287 - DNA, 25 bp, Homo sapien
tgaatccttacttaggtacttaagt

SEQ ID NO: 9288 - DNA, 25 bp, Homo sapien
tgaatccttactaaggtacttaagt

SEQ ID NO: 9289 - DNA, 25 bp, Homo sapien
gagttcgtctctcatcggtaggtcc

SEQ ID NO: 9290 - DNA, 25 bp, Homo sapien
gagttcgtctctgatcggtaggtcc

SEQ ID NO: 9291 - DNA, 25 bp, Homo sapien
catctcagactcgtcgagtagagcc

SEQ ID NO: 9292 - DNA, 25 bp, Homo sapien
catctcagactcctcgagtagagcc

SEQ ID NO: 9293 - DNA, 25 bp, Homo sapien
ctatggtaaccgtatcgagagtacc

SEQ ID NO: 9294 - DNA, 25 bp, Homo sapien
ctatggtaaccgaatcgagagtacc

SEQ ID NO: 9295 - DNA, 25 bp, Homo sapien
tataggaaccgacgagacgtagtga

SEQ ID NO: 9296 - DNA, 25 bp, Homo sapien
tataggaaccgaggagacgtagtga

SEQ ID NO: 9297 - DNA, 25 bp, Homo sapien
cttgaatgagttccagtgtgttggc

SEQ ID NO: 9298 - DNA, 25 bp, Homo sapien
cttgaatgagttgcagtgtgttggc

SEQ ID NO: 9299 - DNA, 25 bp, Homo sapien
tcgaggttgactcctttctttccgt

SEQ ID NO: 9300 - DNA, 25 bp, Homo sapien
tcgaggttgactgctttctttccgt

SEQ ID NO: 9301 - DNA, 25 bp, Homo sapien
ggcgtcacgaggtgtactgtcctca

SEQ ID NO: 9302 - DNA, 25 bp, Homo sapien
ggcgtcacgaggagtactgtcctca

SEQ ID NO: 9303 - DNA, 25 bp, Homo sapien
agtcgactcgagtatatttctttag

SEQ ID NO: 9304 - DNA, 25 bp, Homo sapien
agtcgactcgagaatatttctttag

SEQ ID NO: 9305 - DNA, 25 bp, Homo sapien
ggagtgtccggtcattctttgtccg

SEQ ID NO: 9306 - DNA, 25 bp, Homo sapien
ggagtgtccggtgattctttgtccg

SEQ ID NO: 9307 - DNA, 25 bp, Homo sapien
gacggccggtgaaccccgtctgtgt

SEQ ID NO: 9308 - DNA, 25 bp, Homo sapien
gacggccggtgatccccgtctgtgt

SEQ ID NO: 9309 - DNA, 25 bp, Homo sapien
actctagaggagaaggaccgtcagc

SEQ ID NO: 9310 - DNA, 25 bp, Homo sapien
actctagaggagtaggaccgtcagc

SEQ ID NO: 9311 - DNA, 25 bp, Homo sapien
cctataagaacagacaacgtaaacg

SEQ ID NO: 9312 - DNA, 25 bp, Homo sapien
cctataagaacacacaacgtaaacg

SEQ ID NO: 9313 - DNA, 25 bp, Homo sapien
tgtgaccacttaaggcggcctgaac

SEQ ID NO: 9314 - DNA, 25 bp, Homo sapien
tgtgaccacttatggcggcctgaac

SEQ ID NO: 9315 - DNA, 25 bp, Homo sapien
tgaccttaagtctcggatctcacat

SEQ ID NO: 9316 - DNA, 25 bp, Homo sapien
tgaccttaagtcacggatctcacat

SEQ ID NO: 9317 - DNA, 25 bp, Homo sapien
gtgtcggttcgggaactacgtagaa

SEQ ID NO: 9318 - DNA, 25 bp, Homo sapien
gtgtcggttcggcaactacgtagaa

SEQ ID NO: 9319 - DNA, 25 bp, Homo sapien
tttatggttctcgaagtacgagatc

SEQ ID NO: 9320 - DNA, 25 bp, Homo sapien
tttatggttctccaagtacgagatc

SEQ ID NO: 9321 - DNA, 25 bp, Homo sapien
aaaaccgtttatcctcagggagtct

SEQ ID NO: 9322 - DNA, 25 bp, Homo sapien
aaaaccgtttatgctcagggagtct

SEQ ID NO: 9323 - DNA, 25 bp, Homo sapien
aatgagtgtctgactcagagtattc

SEQ ID NO: 9324 - DNA, 25 bp, Homo sapien
aatgagtgtctgtctcagagtattc

SEQ ID NO: 9325 - DNA, 25 bp, Homo sapien
tgaactaaccacttcgaaatactgt

SEQ ID NO: 9326 - DNA, 25 bp, Homo sapien
tgaactaaccacatcgaaatactgt

SEQ ID NO: 9327 - DNA, 25 bp, Homo sapien
cctgtgataaaatccgtgattgaca

SEQ ID NO: 9328 - DNA, 25 bp, Homo sapien
cctgtgataaaaaccgtgattgaca

SEQ ID NO: 9329 - DNA, 25 bp, Homo sapien
ttggtagacgtgaggtcgtctttgc

SEQ ID NO: 9330 - DNA, 25 bp, Homo sapien
ttggtagacgtgtggtcgtctttgc

SEQ ID NO: 9331 - DNA, 25 bp, Homo sapien
ttctggttctcctgccaacggtcac

SEQ ID NO: 9332 - DNA, 25 bp, Homo sapien
ttctggttctccagccaacggtcac

SEQ ID NO: 9333 - DNA, 25 bp, Homo sapien
ggcggagtgtcaagtccaacgccat

SEQ ID NO: 9334 - DNA, 25 bp, Homo sapien
ggcggagtgtcatgtccaacgccat

SEQ ID NO: 9335 - DNA, 25 bp, Homo sapien
aaagtggaacttgttccactgccac

SEQ ID NO: 9336 - DNA, 25 bp, Homo sapien
aaagtggaacttcttccactgccac

SEQ ID NO: 9337 - DNA, 25 bp, Homo sapien
gaaactatcggtcacactgtacaac

SEQ ID NO: 9338 - DNA, 25 bp, Homo sapien
gaaactatcggtgacactgtacaac

SEQ ID NO: 9339 - DNA, 25 bp, Homo sapien
cgtcaagagtcgtgtatgagtttac

SEQ ID NO: 9340 - DNA, 25 bp, Homo sapien
cgtcaagagtcgagtatgagtttac

SEQ ID NO: 9341 - DNA, 25 bp, Homo sapien
ctactcatagtatatctgcgtattg

SEQ ID NO: 9342 - DNA, 25 bp, Homo sapien
ctactcatagtaaatctgcgtattg

SEQ ID NO: 9343 - DNA, 25 bp, Homo sapien
gactaccaacagtctctccgtcttg

SEQ ID NO: 9344 - DNA, 25 bp, Homo sapien
gactaccaacagactctccgtcttg

SEQ ID NO: 9345 - DNA, 25 bp, Homo sapien
cgtgaatcagtactatcggtatatg

SEQ ID NO: 9346 - DNA, 25 bp, Homo sapien
cgtgaatcagtagtatcggtatatg

SEQ ID NO: 9347 - DNA, 25 bp, Homo sapien
gtgtaagtccgattactctgttata

SEQ ID NO: 9348 - DNA, 25 bp, Homo sapien
gtgtaagtccgaatactctgttata

SEQ ID NO: 9349 - DNA, 25 bp, Homo sapien
tcacggcgtaagagtaccatacagt

SEQ ID NO: 9350 - DNA, 25 bp, Homo sapien
tcacggcgtaagtgtaccatacagt

SEQ ID NO: 9351 - DNA, 25 bp, Homo sapien
ctgctagagtcgtttttcaagtagg

SEQ ID NO: 9352 - DNA, 25 bp, Homo sapien
ctgctagagtcgattttcaagtagg

SEQ ID NO: 9353 - DNA, 25 bp, Homo sapien
taaaccagtccctctatagagaggt

SEQ ID NO: 9354 - DNA, 25 bp, Homo sapien
taaaccagtcccactatagagaggt

SEQ ID NO: 9355 - DNA, 25 bp, Homo sapien
cgtaatcactttggaccggacggtg

SEQ ID NO: 9356 - DNA, 25 bp, Homo sapien
cgtaatcactttcgaccggacggtg

SEQ ID NO: 9357 - DNA, 25 bp, Homo sapien
gaagtcattatcctccgtactaatg

SEQ ID NO: 9358 - DNA, 25 bp, Homo sapien
gaagtcattatcgtccgtactaatg

SEQ ID NO: 9359 - DNA, 25 bp, Homo sapien
aagaaggatcattcccagataagag

SEQ ID NO: 9360 - DNA, 25 bp, Homo sapien
aagaaggatcatacccagataagag

SEQ ID NO: 9361 - DNA, 25 bp, Homo sapien
caacgaggttcaaattcttaaaagt

SEQ ID NO: 9362 - DNA, 25 bp, Homo sapien
caacgaggttcatattcttaaaagt

SEQ ID NO: 9363 - DNA, 25 bp, Homo sapien
cgtaaggtatgtttattcttccaat

SEQ ID NO: 9364 - DNA, 25 bp, Homo sapien
cgtaaggtatgtatattcttccaat

SEQ ID NO: 9365 - DNA, 25 bp, Homo sapien
ggtgtagtaccttcatgtccaaacg

SEQ ID NO: 9366 - DNA, 25 bp, Homo sapien
ggtgtagtacctacatgtccaaacg

SEQ ID NO: 9367 - DNA, 25 bp, Homo sapien
cgtggtgactctcaacaacaagaag

SEQ ID NO: 9368 - DNA, 25 bp, Homo sapien
cgtggtgactctgaacaacaagaag

SEQ ID NO: 9369 - DNA, 25 bp, Homo sapien
gagtttccacactgagtagacatct

SEQ ID NO: 9370 - DNA, 25 bp, Homo sapien
gagtttccacacagagtagacatct

SEQ ID NO: 9371 - DNA, 25 bp, Homo sapien
gggacaccgcaccatacgacatatc

SEQ ID NO: 9372 - DNA, 25 bp, Homo sapien
gggacaccgcacgatacgacatatc

SEQ ID NO: 9373 - DNA, 25 bp, Homo sapien
ccttggtcccagaggtcgtacagaa

SEQ ID NO: 9374 - DNA, 25 bp, Homo sapien
ccttggtcccagtggtcgtacagaa

SEQ ID NO: 9375 - DNA, 25 bp, Homo sapien
cttgtgtttcaacgatctacgagaa

SEQ ID NO: 9376 - DNA, 25 bp, Homo sapien
cttgtgtttcaaggatctacgagaa

SEQ ID NO: 9377 - DNA, 25 bp, Homo sapien
cccgtcttctttggaccgtcactta

SEQ ID NO: 9378 - DNA, 25 bp, Homo sapien
cccgtcttctttcgaccgtcactta

SEQ ID NO: 9379 - DNA, 25 bp, Homo sapien
agggctgatttcaacatccaactat

SEQ ID NO: 9380 - DNA, 25 bp, Homo sapien
agggctgatttctacatccaactat

SEQ ID NO: 9381 - DNA, 25 bp, Homo sapien
cggttcgtttcctccgtccaatact

SEQ ID NO: 9382 - DNA, 25 bp, Homo sapien
cggttcgtttccaccgtccaatact

SEQ ID NO: 9383 - DNA, 25 bp, Homo sapien
gccgtcccaggtgtcgctgtcgact

SEQ ID NO: 9384 - DNA, 25 bp, Homo sapien
gccgtcccaggtctcgctgtcgact

SEQ ID NO: 9385 - DNA, 25 bp, Homo sapien
cgcaacccgggtagtatctcacact

SEQ ID NO: 9386 - DNA, 25 bp, Homo sapien
cgcaacccgggttgtatctcacact

SEQ ID NO: 9387 - DNA, 25 bp, Homo sapien
cagaagagccagtagaaaaaccgtc

SEQ ID NO: 9388 - DNA, 25 bp, Homo sapien
cagaagagccagaagaaaaaccgtc

SEQ ID NO: 9389 - DNA, 25 bp, Homo sapien
aagtccctggtaacgttaaatctct

SEQ ID NO: 9390 - DNA, 25 bp, Homo sapien
aagtccctggtatcgttaaatctct

SEQ ID NO: 9391 - DNA, 25 bp, Homo sapien
ataacaacgggatgtgacagatctc

SEQ ID NO: 9392 - DNA, 25 bp, Homo sapien
ataacaacgggaagtgacagatctc

SEQ ID NO: 9393 - DNA, 25 bp, Homo sapien
gagccaccgagacgtcctacgattt

SEQ ID NO: 9394 - DNA, 25 bp, Homo sapien
gagccaccgagaggtcctacgattt

SEQ ID NO: 9395 - DNA, 25 bp, Homo sapien
gtggtgtcatacgtgtcctgattta

SEQ ID NO: 9396 - DNA, 25 bp, Homo sapien
gtggtgtcatacctgtcctgattta

SEQ ID NO: 9397 - DNA, 25 bp, Homo sapien
cgacttaatactatcattagttata

SEQ ID NO: 9398 - DNA, 25 bp, Homo sapien
cgacttaatactttcattagttata

SEQ ID NO: 9399 - DNA, 25 bp, Homo sapien
cttgtacttacacttttaccgaagg

SEQ ID NO: 9400 - DNA, 25 bp, Homo sapien
cttgtacttacagttttaccgaagg

SEQ ID NO: 9401 - DNA, 25 bp, Homo sapien
ctctgtaaacccttattccgacagg

SEQ ID NO: 9402 - DNA, 25 bp, Homo sapien
ctctgtaaacccatattccgacagg

SEQ ID NO: 9403 - DNA, 25 bp, Homo sapien
ggactttattcctctgtgtaaaagg

SEQ ID NO: 9404 - DNA, 25 bp, Homo sapien
ggactttattccactgtgtaaaagg

SEQ ID NO: 9405 - DNA, 25 bp, Homo sapien
aggtttcatgccattctaaaagtag

SEQ ID NO: 9406 - DNA, 25 bp, Homo sapien
aggtttcatgcctttctaaaagtag

SEQ ID NO: 9407 - DNA, 25 bp, Homo sapien
atgttcccgggcataaaccagagta

SEQ ID NO: 9408 - DNA, 25 bp, Homo sapien
atgttcccgggcttaaaccagagta

SEQ ID NO: 9409 - DNA, 25 bp, Homo sapien
tcgcgcggaggcaaagacggtcaca

SEQ ID NO: 9410 - DNA, 25 bp, Homo sapien
tcgcgcggaggctaagacggtcaca

SEQ ID NO: 9411 - DNA, 25 bp, Homo sapien
ttaccgtggggtcataaaggttaca

SEQ ID NO: 9412 - DNA, 25 bp, Homo sapien
ttaccgtggggtgataaaggttaca

SEQ ID NO: 9413 - DNA, 25 bp, Homo sapien
tcgtatggtttaactttatgtatcc

SEQ ID NO: 9414 - DNA, 25 bp, Homo sapien
tcgtatggtttatctttatgtatcc

SEQ ID NO: 9415 - DNA, 25 bp, Homo sapien
cgagagacgtcgagacctttttacc

SEQ ID NO: 9416 - DNA, 25 bp, Homo sapien
cgagagacgtcgtgacctttttacc

SEQ ID NO: 9417 - DNA, 25 bp, Homo sapien
acgtaagtaaggaggttctcttcaa

SEQ ID NO: 9418 - DNA, 25 bp, Homo sapien
acgtaagtaaggtggttctcttcaa

SEQ ID NO: 9419 - DNA, 25 bp, Homo sapien
gagtgtctagactaggattttctca

SEQ ID NO: 9420 - DNA, 25 bp, Homo sapien
gagtgtctagacaaggattttctca

SEQ ID NO: 9421 - DNA, 25 bp, Homo sapien
ggtcttaacgaagatcatcttatac

SEQ ID NO: 9422 - DNA, 25 bp, Homo sapien
ggtcttaacgaacatcatcttatac

SEQ ID NO: 9423 - DNA, 25 bp, Homo sapien
atgtttgtgcccacgtagattttat

SEQ ID NO: 9424 - DNA, 25 bp, Homo sapien
atgtttgtgccctcgtagattttat

SEQ ID NO: 9425 - DNA, 25 bp, Homo sapien
cgaccgggttctctcacactgtctg

SEQ ID NO: 9426 - DNA, 25 bp, Homo sapien
cgaccgggttctgtcacactgtctg

SEQ ID NO: 9427 - DNA, 25 bp, Homo sapien
gggcgaaagacgacaagacctcaaa

SEQ ID NO: 9428 - DNA, 25 bp, Homo sapien
gggcgaaagacgtcaagacctcaaa

SEQ ID NO: 9429 - DNA, 25 bp, Homo sapien
tcgacaaggtctctaggtttacacc

SEQ ID NO: 9430 - DNA, 25 bp, Homo sapien
tcgacaaggtctgtaggtttacacc

SEQ ID NO: 9431 - DNA, 25 bp, Homo sapien
acttttcggttcgactctagtcgta

SEQ ID NO: 9432 - DNA, 25 bp, Homo sapien
acttttcggttccactctagtcgta

SEQ ID NO: 9433 - DNA, 25 bp, Homo sapien
aggtaggttctacacgtatgacacg

SEQ ID NO: 9434 - DNA, 25 bp, Homo sapien
aggtaggttctagacgtatgacacg

SEQ ID NO: 9435 - DNA, 25 bp, Homo sapien
aatgtacagtcttatgactataaat

SEQ ID NO: 9436 - DNA, 25 bp, Homo sapien
aatgtacagtctaatgactataaat

SEQ ID NO: 9437 - DNA, 25 bp, Homo sapien
gtatattctactcagtttggtacaa

SEQ ID NO: 9438 - DNA, 25 bp, Homo sapien
gtatattctactgagtttggtacaa

SEQ ID NO: 9439 - DNA, 25 bp, Homo sapien
ggggataaactaaggggcctagacc

SEQ ID NO: 9440 - DNA, 25 bp, Homo sapien
ggggataaactatggggcctagacc

SEQ ID NO: 9441 - DNA, 25 bp, Homo sapien
gacccggtcatcgataaacgtaccc

SEQ ID NO: 9442 - DNA, 25 bp, Homo sapien
gacccggtcatccataaacgtaccc

SEQ ID NO: 9443 - DNA, 25 bp, Homo sapien
cagaacggtgtaaccaaatactccc

SEQ ID NO: 9444 - DNA, 25 bp, Homo sapien
cagaacggtgtatccaaatactccc

SEQ ID NO: 9445 - DNA, 25 bp, Homo sapien
ataatagtcgggacaagttaatccc

SEQ ID NO: 9446 - DNA, 25 bp, Homo sapien
ataatagtcgggtcaagttaatccc

SEQ ID NO: 9447 - DNA, 25 bp, Homo sapien
aaagagttgattacccggagaccgg

SEQ ID NO: 9448 - DNA, 25 bp, Homo sapien
aaagagttgatttcccggagaccgg

SEQ ID NO: 9449 - DNA, 25 bp, Homo sapien
acgagtcccatttcccgatacccgt

SEQ ID NO: 9450 - DNA, 25 bp, Homo sapien
acgagtcccattacccgatacccgt

SEQ ID NO: 9451 - DNA, 25 bp, Homo sapien
gtgtcgaggagtgtctccccatccc

SEQ ID NO: 9452 - DNA, 25 bp, Homo sapien
gtgtcgaggagtctctccccatccc

SEQ ID NO: 9453 - DNA, 25 bp, Homo sapien
ccagaggagcttaagagcggcccgt

SEQ ID NO: 9454 - DNA, 25 bp, Homo sapien
ccagaggagctttagagcggcccgt

SEQ ID NO: 9455 - DNA, 25 bp, Homo sapien
cgttcgagttcctgagggacgccgt

SEQ ID NO: 9456 - DNA, 25 bp, Homo sapien
cgttcgagttccagagggacgccgt

SEQ ID NO: 9457 - DNA, 25 bp, Homo sapien
gtcggagatctctttagggtcttgt

SEQ ID NO: 9458 - DNA, 25 bp, Homo sapien
gtcggagatctcattagggtcttgt

SEQ ID NO: 9459 - DNA, 25 bp, Homo sapien
aacgtgaactcttgttactgttttt

SEQ ID NO: 9460 - DNA, 25 bp, Homo sapien
aacgtgaactctagttactgttttt

SEQ ID NO: 9461 - DNA, 25 bp, Homo sapien
cggtgaatcaattgtagtctcttag

SEQ ID NO: 9462 - DNA, 25 bp, Homo sapien
cggtgaatcaatagtagtctcttag

SEQ ID NO: 9463 - DNA, 25 bp, Homo sapien
gacgaataccactacgacgtcctta

SEQ ID NO: 9464 - DNA, 25 bp, Homo sapien
gacgaataccacaacgacgtcctta

SEQ ID NO: 9465 - DNA, 25 bp, Homo sapien
ggtaaagaagaggtactcagtgact

SEQ ID NO: 9466 - DNA, 25 bp, Homo sapien
ggtaaagaagagctactcagtgact

SEQ ID NO: 9467 - DNA, 25 bp, Homo sapien
gtacgtagtgacaccgagtcattct

SEQ ID NO: 9468 - DNA, 25 bp, Homo sapien
gtacgtagtgactccgagtcattct

SEQ ID NO: 9469 - DNA, 25 bp, Homo sapien
agaccaaggtgcaggggcgacaaac

SEQ ID NO: 9470 - DNA, 25 bp, Homo sapien
agaccaaggtgctggggcgacaaac

SEQ ID NO: 9471 - DNA, 25 bp, Homo sapien
ttagtgtaccgatctaattgaaagc

SEQ ID NO: 9472 - DNA, 25 bp, Homo sapien
ttagtgtaccgaactaattgaaagc

SEQ ID NO: 9473 - DNA, 25 bp, Homo sapien
taagtctacgcgtcccttcgaaacc

SEQ ID NO: 9474 - DNA, 25 bp, Homo sapien
taagtctacgcgacccttcgaaacc

SEQ ID NO: 9475 - DNA, 25 bp, Homo sapien
ttactcaccgtctatgtcaaagtgt

SEQ ID NO: 9476 - DNA, 25 bp, Homo sapien
ttactcaccgtcaatgtcaaagtgt

SEQ ID NO: 9477 - DNA, 25 bp, Homo sapien
ctttataatgtcttgtgcgaaacat

SEQ ID NO: 9478 - DNA, 25 bp, Homo sapien
ctttataatgtcatgtgcgaaacat

SEQ ID NO: 9479 - DNA, 25 bp, Homo sapien
ttttgttaactcactgaagacagac

SEQ ID NO: 9480 - DNA, 25 bp, Homo sapien
ttttgttaactctctgaagacagac

SEQ ID NO: 9481 - DNA, 25 bp, Homo sapien
cttttcaccgtcgtacaaggtgaat

SEQ ID NO: 9482 - DNA, 25 bp, Homo sapien
cttttcaccgtcctacaaggtgaat

SEQ ID NO: 9483 - DNA, 25 bp, Homo sapien
attttacgatgtaccgggtttcgat

SEQ ID NO: 9484 - DNA, 25 bp, Homo sapien
attttacgatgttccgggtttcgat

SEQ ID NO: 9485 - DNA, 25 bp, Homo sapien
gacacttcacgaatagtctcaagcg

SEQ ID NO: 9486 - DNA, 25 bp, Homo sapien
gacacttcacgattagtctcaagcg

SEQ ID NO: 9487 - DNA, 25 bp, Homo sapien
tgaagtattagtttcgttacctaac

SEQ ID NO: 9488 - DNA, 25 bp, Homo sapien
tgaagtattagtatcgttacctaac

SEQ ID NO: 9489 - DNA, 25 bp, Homo sapien
agagactacatgttactctaaactg

SEQ ID NO: 9490 - DNA, 25 bp, Homo sapien
agagactacatgatactctaaactg

SEQ ID NO: 9491 - DNA, 25 bp, Homo sapien
acacgaaaagtaagtgtcacttaga

SEQ ID NO: 9492 - DNA, 25 bp, Homo sapien
acacgaaaagtatgtgtcacttaga

SEQ ID NO: 9493 - DNA, 25 bp, Homo sapien
ccgacaagtagtcgtgtctcggacc

SEQ ID NO: 9494 - DNA, 25 bp, Homo sapien
ccgacaagtagtggtgtctcggacc

SEQ ID NO: 9495 - DNA, 25 bp, Homo sapien
cgcgctgcaaacgcccgtcataaac

SEQ ID NO: 9496 - DNA, 25 bp, Homo sapien
cgcgctgcaaacccccgtcataaac

SEQ ID NO: 9497 - DNA, 25 bp, Homo sapien
tcgaacaggccttctaacgtttatg

SEQ ID NO: 9498 - DNA, 25 bp, Homo sapien
tcgaacaggcctactaacgtttatg

SEQ ID NO: 9499 - DNA, 25 bp, Homo sapien
cgttgtcgttcttttgcgtcgaaat

SEQ ID NO: 9500 - DNA, 25 bp, Homo sapien
cgttgtcgttctattgcgtcgaaat

SEQ ID NO: 9501 - DNA, 25 bp, Homo sapien
cgttagtctcctactttgtagtaaa

SEQ ID NO: 9502 - DNA, 25 bp, Homo sapien
cgttagtctccttctttgtagtaaa

SEQ ID NO: 9503 - DNA, 25 bp, Homo sapien
cctgtccgggtttctacagagacgg

SEQ ID NO: 9504 - DNA, 25 bp, Homo sapien
cctgtccgggttactacagagacgg

SEQ ID NO: 9505 - DNA, 25 bp, Homo sapien
acctcttcacagtcgccacagaaga

SEQ ID NO: 9506 - DNA, 25 bp, Homo sapien
acctcttcacagacgccacagaaga

SEQ ID NO: 9507 - DNA, 25 bp, Homo sapien
accagttctcaaaggagaccctcga

SEQ ID NO: 9508 - DNA, 25 bp, Homo sapien
accagttctcaatggagaccctcga

SEQ ID NO: 9509 - DNA, 25 bp, Homo sapien
acgtgtgagtgtatgtgggtcccac

SEQ ID NO: 9510 - DNA, 25 bp, Homo sapien
acgtgtgagtgtttgtgggtcccac

SEQ ID NO: 9511 - DNA, 25 bp, Homo sapien
tggtatcatgtaaacttgtttctca

SEQ ID NO: 9512 - DNA, 25 bp, Homo sapien
tggtatcatgtatacttgtttctca

SEQ ID NO: 9513 - DNA, 25 bp, Homo sapien
tggagacctttctatgtctacaact

SEQ ID NO: 9514 - DNA, 25 bp, Homo sapien
tggagacctttcaatgtctacaact

SEQ ID NO: 9515 - DNA, 25 bp, Homo sapien
gaggagcgaaggtagtcgtccacct

SEQ ID NO: 9516 - DNA, 25 bp, Homo sapien
gaggagcgaaggaagtcgtccacct

SEQ ID NO: 9517 - DNA, 25 bp, Homo sapien
gaggactctgtgctaaggctcaact

SEQ ID NO: 9518 - DNA, 25 bp, Homo sapien
gaggactctgtggtaaggctcaact

SEQ ID NO: 9519 - DNA, 25 bp, Homo sapien
gagtcgtaccggagaaaccgtgact

SEQ ID NO: 9520 - DNA, 25 bp, Homo sapien
gagtcgtaccggtgaaaccgtgact

SEQ ID NO: 9521 - DNA, 25 bp, Homo sapien
cggttctccgtccttccgtacttag

SEQ ID NO: 9522 - DNA, 25 bp, Homo sapien
cggttctccgtcgttccgtacttag

SEQ ID NO: 9523 - DNA, 25 bp, Homo sapien
aaggagtttcctttatcgtctccga

SEQ ID NO: 9524 - DNA, 25 bp, Homo sapien
aaggagtttcctatatcgtctccga

SEQ ID NO: 9525 - DNA, 25 bp, Homo sapien
gtaagttacttctactcgaaccgag

SEQ ID NO: 9526 - DNA, 25 bp, Homo sapien
gtaagttacttcaactcgaaccgag

SEQ ID NO: 9527 - DNA, 25 bp, Homo sapien
agtagacactcaagtacgaagtcga

SEQ ID NO: 9528 - DNA, 25 bp, Homo sapien
agtagacactcatgtacgaagtcga

SEQ ID NO: 9529 - DNA, 25 bp, Homo sapien
ctaaagacgagactactgtcaagga

SEQ ID NO: 9530 - DNA, 25 bp, Homo sapien
ctaaagacgagagtactgtcaagga

SEQ ID NO: 9531 - DNA, 25 bp, Homo sapien
tatatcgtgagattcataccaggat

SEQ ID NO: 9532 - DNA, 25 bp, Homo sapien
tatatcgtgagaatcataccaggat

SEQ ID NO: 9533 - DNA, 25 bp, Homo sapien
gacattcttagtaccaccgagatat

SEQ ID NO: 9534 - DNA, 25 bp, Homo sapien
gacattcttagttccaccgagatat

SEQ ID NO: 9535 - DNA, 25 bp, Homo sapien
ccagaacgattcattgttgacaaat

SEQ ID NO: 9536 - DNA, 25 bp, Homo sapien
ccagaacgattctttgttgacaaat

SEQ ID NO: 9537 - DNA, 25 bp, Homo sapien
ccaaagtttggtaactcgggtccat

SEQ ID NO: 9538 - DNA, 25 bp, Homo sapien
ccaaagtttggttactcgggtccat

SEQ ID NO: 9539 - DNA, 25 bp, Homo sapien
taagttctcagttcactgtgacctt

SEQ ID NO: 9540 - DNA, 25 bp, Homo sapien
taagttctcagtacactgtgacctt

SEQ ID NO: 9541 - DNA, 25 bp, Homo sapien
gacaggtttgtgaccgtcgtctccc

SEQ ID NO: 9542 - DNA, 25 bp, Homo sapien
gacaggtttgtgtccgtcgtctccc

SEQ ID NO: 9543 - DNA, 25 bp, Homo sapien
aagctcttctagttcttccgcgtgg

SEQ ID NO: 9544 - DNA, 25 bp, Homo sapien
aagctcttctagatcttccgcgtgg

SEQ ID NO: 9545 - DNA, 25 bp, Homo sapien
ccctcggtgtcagtagcggtctaga

SEQ ID NO: 9546 - DNA, 25 bp, Homo sapien
ccctcggtgtcactagcggtctaga

SEQ ID NO: 9547 - DNA, 25 bp, Homo sapien
cacccgcgtactaaccggtagagga

SEQ ID NO: 9548 - DNA, 25 bp, Homo sapien
cacccgcgtacttaccggtagagga

SEQ ID NO: 9549 - DNA, 25 bp, Homo sapien
tactaatcactactccaacgagtgg

SEQ ID NO: 9550 - DNA, 25 bp, Homo sapien
tactaatcactagtccaacgagtgg

SEQ ID NO: 9551 - DNA, 25 bp, Homo sapien
accgaagtgactgtactttaggtcc

SEQ ID NO: 9552 - DNA, 25 bp, Homo sapien
accgaagtgactctactttaggtcc

SEQ ID NO: 9553 - DNA, 25 bp, Homo sapien
gagaaggagacacacacctagatcc

SEQ ID NO: 9554 - DNA, 25 bp, Homo sapien
gagaaggagacagacacctagatcc

SEQ ID NO: 9555 - DNA, 25 bp, Homo sapien
tctaaaagggatcaagttgtctatc

SEQ ID NO: 9556 - DNA, 25 bp, Homo sapien
tctaaaagggatgaagttgtctatc

SEQ ID NO: 9557 - DNA, 25 bp, Homo sapien
caaaaagggatcgtccgtcgtcaac

SEQ ID NO: 9558 - DNA, 25 bp, Homo sapien
caaaaagggatcctccgtcgtcaac

SEQ ID NO: 9559 - DNA, 25 bp, Homo sapien
ataagtaggaggttgactgtcgctc

SEQ ID NO: 9560 - DNA, 25 bp, Homo sapien
ataagtaggaggatgactgtcgctc

SEQ ID NO: 9561 - DNA, 25 bp, Homo sapien
aagaacgaaaactgagtgtcgacct

SEQ ID NO: 9562 - DNA, 25 bp, Homo sapien
aagaacgaaaacagagtgtcgacct

SEQ ID NO: 9563 - DNA, 25 bp, Homo sapien
gtgcgcgaacaagcacaccttcagc

SEQ ID NO: 9564 - DNA, 25 bp, Homo sapien
gtgcgcgaacaaccacaccttcagc

SEQ ID NO: 9565 - DNA, 25 bp, Homo sapien
acgagagaggttgacacgttagagc

SEQ ID NO: 9566 - DNA, 25 bp, Homo sapien
acgagagaggttcacacgttagagc

SEQ ID NO: 9567 - DNA, 25 bp, Homo sapien
gagagtaagaggtcgaacttacgcc

SEQ ID NO: 9568 - DNA, 25 bp, Homo sapien
gagagtaagaggacgaacttacgcc

SEQ ID NO: 9569 - DNA, 25 bp, Homo sapien
aaagtgacgggtagacactgtaccc

SEQ ID NO: 9570 - DNA, 25 bp, Homo sapien
aaagtgacgggttgacactgtaccc

SEQ ID NO: 9571 - DNA, 25 bp, Homo sapien
cacagagatgttattcctataaacg

SEQ ID NO: 9572 - DNA, 25 bp, Homo sapien
cacagagatgtttttcctataaacg

SEQ ID NO: 9573 - DNA, 25 bp, Homo sapien
actatggttttcattcgacttattg

SEQ ID NO: 9574 - DNA, 25 bp, Homo sapien
actatggttttctttcgacttattg

SEQ ID NO: 9575 - DNA, 25 bp, Homo sapien
ggagttttatcttcatacttctcgt

SEQ ID NO: 9576 - DNA, 25 bp, Homo sapien
ggagttttatctacatacttctcgt

SEQ ID NO: 9577 - DNA, 25 bp, Homo sapien
gttgacttcgttaccatcgtctcat

SEQ ID NO: 9578 - DNA, 25 bp, Homo sapien
gttgacttcgtttccatcgtctcat

SEQ ID NO: 9579 - DNA, 25 bp, Homo sapien
gatgacatgttacgtcgttcctgat

SEQ ID NO: 9580 - DNA, 25 bp, Homo sapien
gatgacatgttaggtcgttcctgat

SEQ ID NO: 9581 - DNA, 25 bp, Homo sapien
ggtgacttcgtgatgtgcgaccgac

SEQ ID NO: 9582 - DNA, 25 bp, Homo sapien
ggtgacttcgtgttgtgcgaccgac

SEQ ID NO: 9583 - DNA, 25 bp, Homo sapien
tgagacgtcagttcgacggacgaaa

SEQ ID NO: 9584 - DNA, 25 bp, Homo sapien
tgagacgtcagtacgacggacgaaa

SEQ ID NO: 9585 - DNA, 25 bp, Homo sapien
tcacgtcgtggactacagacgaaga

SEQ ID NO: 9586 - DNA, 25 bp, Homo sapien
tcacgtcgtggagtacagacgaaga

SEQ ID NO: 9587 - DNA, 25 bp, Homo sapien
gaggtcgtctatctacactcacacc

SEQ ID NO: 9588 - DNA, 25 bp, Homo sapien
gaggtcgtctatgtacactcacacc

SEQ ID NO: 9589 - DNA, 25 bp, Homo sapien
caggaggtgtgtgcaccatgtgacc

SEQ ID NO: 9590 - DNA, 25 bp, Homo sapien
caggaggtgtgtccaccatgtgacc

SEQ ID NO: 9591 - DNA, 25 bp, Homo sapien
gaggtccgtcgtccactgggtatcg

SEQ ID NO: 9592 - DNA, 25 bp, Homo sapien
gaggtccgtcgtgcactgggtatcg

SEQ ID NO: 9593 - DNA, 25 bp, Homo sapien
agtaggagtcggacttcgggtcact

SEQ ID NO: 9594 - DNA, 25 bp, Homo sapien
agtaggagtcggtcttcgggtcact

SEQ ID NO: 9595 - DNA, 25 bp, Homo sapien
actacaagttcgtctttcgcgcact

SEQ ID NO: 9596 - DNA, 25 bp, Homo sapien
actacaagttcgactttcgcgcact

SEQ ID NO: 9597 - DNA, 25 bp, Homo sapien
aactaggtgcaggacggtgtcctag

SEQ ID NO: 9598 - DNA, 25 bp, Homo sapien
aactaggtgcagcacggtgtcctag

SEQ ID NO: 9599 - DNA, 25 bp, Homo sapien
tcttagtgtgtcaagaagtcccagt

SEQ ID NO: 9600 - DNA, 25 bp, Homo sapien
tcttagtgtgtctagaagtcccagt

SEQ ID NO: 9601 - DNA, 25 bp, Homo sapien
ctaggagtagtcgatggtcctcgac

SEQ ID NO: 9602 - DNA, 25 bp, Homo sapien
ctaggagtagtccatggtcctcgac

SEQ ID NO: 9603 - DNA, 25 bp, Homo sapien
aaagtggatcaaagagtcgtcggac

SEQ ID NO: 9604 - DNA, 25 bp, Homo sapien
aaagtggatcaatgagtcgtcggac

SEQ ID NO: 9605 - DNA, 25 bp, Homo sapien
ttaagtcgaattgagtcgaccccac

SEQ ID NO: 9606 - DNA, 25 bp, Homo sapien
ttaagtcgaattcagtcgaccccac

SEQ ID NO: 9607 - DNA, 25 bp, Homo sapien
tgtaggcgcgtctgcgacctaccct

SEQ ID NO: 9608 - DNA, 25 bp, Homo sapien
tgtaggcgcgtcagcgacctaccct

SEQ ID NO: 9609 - DNA, 25 bp, Homo sapien
gtgtaggtccgtagagactccgtga

SEQ ID NO: 9610 - DNA, 25 bp, Homo sapien
gtgtaggtccgttgagactccgtga

SEQ ID NO: 9611 - DNA, 25 bp, Homo sapien
ctcttgacgtcttcggactctagga

SEQ ID NO: 9612 - DNA, 25 bp, Homo sapien
ctcttgacgtctacggactctagga

SEQ ID NO: 9613 - DNA, 25 bp, Homo sapien
ggacttcgacaccatttcgacgaga

SEQ ID NO: 9614 - DNA, 25 bp, Homo sapien
ggacttcgacacgatttcgacgaga

SEQ ID NO: 9615 - DNA, 25 bp, Homo sapien
cagaccttcccagtcacgtacagta

SEQ ID NO: 9616 - DNA, 25 bp, Homo sapien
cagaccttcccactcacgtacagta

SEQ ID NO: 9617 - DNA, 25 bp, Homo sapien
ggtaactaaccgtacgatcggtaaa

SEQ ID NO: 9618 - DNA, 25 bp, Homo sapien
ggtaactaaccgaacgatcggtaaa

SEQ ID NO: 9619 - DNA, 25 bp, Homo sapien
atacatgtacgaggacacccgtcag

SEQ ID NO: 9620 - DNA, 25 bp, Homo sapien
atacatgtacgacgacacccgtcag

SEQ ID NO: 9621 - DNA, 25 bp, Homo sapien
gacgttaggtcgatccgtaccctcc

SEQ ID NO: 9622 - DNA, 25 bp, Homo sapien
gacgttaggtcgttccgtaccctcc

SEQ ID NO: 9623 - DNA, 25 bp, Homo sapien
gatgtatgtacgtatctaatctacc

SEQ ID NO: 9624 - DNA, 25 bp, Homo sapien
gatgtatgtacgaatctaatctacc

SEQ ID NO: 9625 - DNA, 25 bp, Homo sapien
ataactgtcttaccaatacgtagag

SEQ ID NO: 9626 - DNA, 25 bp, Homo sapien
ataactgtcttagcaatacgtagag

SEQ ID NO: 9627 - DNA, 25 bp, Homo sapien
attctacgacccatcgtaaagacag

SEQ ID NO: 9628 - DNA, 25 bp, Homo sapien
attctacgacccttcgtaaagacag

SEQ ID NO: 9629 - DNA, 25 bp, Homo sapien
tgtctacttccgtagtctacggaag

SEQ ID NO: 9630 - DNA, 25 bp, Homo sapien
tgtctacttccgaagtctacggaag

SEQ ID NO: 9631 - DNA, 25 bp, Homo sapien
atttagaacatccaaacgagaaagt

SEQ ID NO: 9632 - DNA, 25 bp, Homo sapien
atttagaacatcgaaacgagaaagt

SEQ ID NO: 9633 - DNA, 25 bp, Homo sapien
tgactaccttcattagacgaattgt

SEQ ID NO: 9634 - DNA, 25 bp, Homo sapien
tgactaccttcaatagacgaattgt

SEQ ID NO: 9635 - DNA, 25 bp, Homo sapien
tgaccgttagttagtcgtttaatct

SEQ ID NO: 9636 - DNA, 25 bp, Homo sapien
tgaccgttagtttgtcgtttaatct

SEQ ID NO: 9637 - DNA, 25 bp, Homo sapien
gtggttgtaacttcggtgacgagtc

SEQ ID NO: 9638 - DNA, 25 bp, Homo sapien
gtggttgtaactacggtgacgagtc

SEQ ID NO: 9639 - DNA, 25 bp, Homo sapien
aagatgttaccaacgacagagtagt

SEQ ID NO: 9640 - DNA, 25 bp, Homo sapien
aagatgttaccatcgacagagtagt

SEQ ID NO: 9641 - DNA, 25 bp, Homo sapien
tacggtgtgtcgtcaccaaacgacg

SEQ ID NO: 9642 - DNA, 25 bp, Homo sapien
tacggtgtgtcgacaccaaacgacg

SEQ ID NO: 9643 - DNA, 25 bp, Homo sapien
tacttgtctgtgacatgtttactcg

SEQ ID NO: 9644 - DNA, 25 bp, Homo sapien
tacttgtctgtgtcatgtttactcg

SEQ ID NO: 9645 - DNA, 25 bp, Homo sapien
acttgtcgtatctccggttctccgt

SEQ ID NO: 9646 - DNA, 25 bp, Homo sapien
acttgtcgtatcaccggttctccgt

SEQ ID NO: 9647 - DNA, 25 bp, Homo sapien
gtttagtagtccaactagatgtcat

SEQ ID NO: 9648 - DNA, 25 bp, Homo sapien
gtttagtagtcctactagatgtcat

SEQ ID NO: 9649 - DNA, 25 bp, Homo sapien
ggttccgaactcaactcagtgtcct

SEQ ID NO: 9650 - DNA, 25 bp, Homo sapien
ggttccgaactctactcagtgtcct

SEQ ID NO: 9651 - DNA, 25 bp, Homo sapien
aatgaggaaggtactcgactagaac

SEQ ID NO: 9652 - DNA, 25 bp, Homo sapien
aatgaggaaggttctcgactagaac

SEQ ID NO: 9653 - DNA, 25 bp, Homo sapien
acgagtggagacgtggtccctgttc

SEQ ID NO: 9654 - DNA, 25 bp, Homo sapien
acgagtggagacctggtccctgttc

SEQ ID NO: 9655 - DNA, 25 bp, Homo sapien
ccttgtcttctacgttttcgttgac

SEQ ID NO: 9656 - DNA, 25 bp, Homo sapien
ccttgtcttctaggttttcgttgac

SEQ ID NO: 9657 - DNA, 25 bp, Homo sapien
aacgtgttacatcacttgtgttgtt

SEQ ID NO: 9658 - DNA, 25 bp, Homo sapien
aacgtgttacatgacttgtgttgtt

SEQ ID NO: 9659 - DNA, 25 bp, Homo sapien
ctcacttcagatgtctttacgtccg

SEQ ID NO: 9660 - DNA, 25 bp, Homo sapien
ctcacttcagatctctttacgtccg

SEQ ID NO: 9661 - DNA, 25 bp, Homo sapien
accggtagacgtggtcactttcccc

SEQ ID NO: 9662 - DNA, 25 bp, Homo sapien
accggtagacgtcgtcactttcccc

SEQ ID NO: 9663 - DNA, 25 bp, Homo sapien
agtgtcgagaaagactctccctcac

SEQ ID NO: 9664 - DNA, 25 bp, Homo sapien
agtgtcgagaaacactctccctcac

SEQ ID NO: 9665 - DNA, 25 bp, Homo sapien
tttcgtgacacttgagttttcaaga

SEQ ID NO: 9666 - DNA, 25 bp, Homo sapien
tttcgtgacactagagttttcaaga

SEQ ID NO: 9667 - DNA, 25 bp, Homo sapien
ggtagtgacatcgaccgtttccaga

SEQ ID NO: 9668 - DNA, 25 bp, Homo sapien
ggtagtgacatccaccgtttccaga

SEQ ID NO: 9669 - DNA, 25 bp, Homo sapien
agtcagtacgagtcctttcgtcgga

SEQ ID NO: 9670 - DNA, 25 bp, Homo sapien
agtcagtacgagacctttcgtcgga

SEQ ID NO: 9671 - DNA, 25 bp, Homo sapien
aactaccgtgggtttctcttcgaga

SEQ ID NO: 9672 - DNA, 25 bp, Homo sapien
aactaccgtgggattctcttcgaga

SEQ ID NO: 9673 - DNA, 25 bp, Homo sapien
agtacatactgtattcacttacaag

SEQ ID NO: 9674 - DNA, 25 bp, Homo sapien
agtacatactgttttcacttacaag

SEQ ID NO: 9675 - DNA, 25 bp, Homo sapien
gcagagtaatgttgccgtgtcacaa

SEQ ID NO: 9676 - DNA, 25 bp, Homo sapien
gcagagtaatgtagccgtgtcacaa

SEQ ID NO: 9677 - DNA, 25 bp, Homo sapien
aaaacgtacggtgtcctgtctaaag

SEQ ID NO: 9678 - DNA, 25 bp, Homo sapien
aaaacgtacggtctcctgtctaaag

SEQ ID NO: 9679 - DNA, 25 bp, Homo sapien
aactcgtccggatcccgtctcagtt

SEQ ID NO: 9680 - DNA, 25 bp, Homo sapien
aactcgtccggaacccgtctcagtt

SEQ ID NO: 9681 - DNA, 25 bp, Homo sapien
gggttcgttcgtatttctctcctgt

SEQ ID NO: 9682 - DNA, 25 bp, Homo sapien
gggttcgttcgtttttctctcctgt

SEQ ID NO: 9683 - DNA, 25 bp, Homo sapien
gttgtgtatacttttccgtcacctg

SEQ ID NO: 9684 - DNA, 25 bp, Homo sapien
gttgtgtatactattccgtcacctg

SEQ ID NO: 9685 - DNA, 25 bp, Homo sapien
cgttaacggacttattacttaaatg

SEQ ID NO: 9686 - DNA, 25 bp, Homo sapien
cgttaacggactaattacttaaatg

SEQ ID NO: 9687 - DNA, 25 bp, Homo sapien
caccccgttgagagtcttactagaa

SEQ ID NO: 9688 - DNA, 25 bp, Homo sapien
caccccgttgagtgtcttactagaa

SEQ ID NO: 9689 - DNA, 25 bp, Homo sapien
gtccttcccgacaaagtaccagagg

SEQ ID NO: 9690 - DNA, 25 bp, Homo sapien
gtccttcccgactaagtaccagagg

SEQ ID NO: 9691 - DNA, 25 bp, Homo sapien
tcccgtctccttacactacaagggt

SEQ ID NO: 9692 - DNA, 25 bp, Homo sapien
tcccgtctcctttcactacaagggt

SEQ ID NO: 9693 - DNA, 25 bp, Homo sapien
tggacttcatcttcttcaaagtgtt

SEQ ID NO: 9694 - DNA, 25 bp, Homo sapien
tggacttcatctacttcaaagtgtt

SEQ ID NO: 9695 - DNA, 25 bp, Homo sapien
cgggttttactgatacaaacagatt

SEQ ID NO: 9696 - DNA, 25 bp, Homo sapien
cgggttttactgttacaaacagatt

SEQ ID NO: 9697 - DNA, 25 bp, Homo sapien
atattcgtttgtctacgtagggaac

SEQ ID NO: 9698 - DNA, 25 bp, Homo sapien
atattcgtttgtgtacgtagggaac

SEQ ID NO: 9699 - DNA, 25 bp, Homo sapien
tattatctctttctacacgatcggg

SEQ ID NO: 9700 - DNA, 25 bp, Homo sapien
tattatctctttgtacacgatcggg

SEQ ID NO: 9701 - DNA, 25 bp, Homo sapien
ctgcaccttctactgtcacgaaggg

SEQ ID NO: 9702 - DNA, 25 bp, Homo sapien
ctgcaccttctagtgtcacgaaggg

SEQ ID NO: 9703 - DNA, 25 bp, Homo sapien
gtcacctgctacgactcacagtggc

SEQ ID NO: 9704 - DNA, 25 bp, Homo sapien
gtcacctgctaccactcacagtggc

SEQ ID NO: 9705 - DNA, 25 bp, Homo sapien
tcgaccttccgaattcggtgtacct

SEQ ID NO: 9706 - DNA, 25 bp, Homo sapien
tcgaccttccgatttcggtgtacct

SEQ ID NO: 9707 - DNA, 25 bp, Homo sapien
ttctcctgtccattgtaggtcgttc

SEQ ID NO: 9708 - DNA, 25 bp, Homo sapien
ttctcctgtccaatgtaggtcgttc

SEQ ID NO: 9709 - DNA, 25 bp, Homo sapien
tgccaccttctcgactcgtgggaca

SEQ ID NO: 9710 - DNA, 25 bp, Homo sapien
tgccaccttctccactcgtgggaca

SEQ ID NO: 9711 - DNA, 25 bp, Homo sapien
aagagacattctacagtctgaggaa

SEQ ID NO: 9712 - DNA, 25 bp, Homo sapien
aagagacattcttcagtctgaggaa

SEQ ID NO: 9713 - DNA, 25 bp, Homo sapien
aacgtaggatttgacaacttatcaa

SEQ ID NO: 9714 - DNA, 25 bp, Homo sapien
aacgtaggatttcacaacttatcaa

SEQ ID NO: 9715 - DNA, 25 bp, Homo sapien
tgcgtcttcgaccaccggtagttta

SEQ ID NO: 9716 - DNA, 25 bp, Homo sapien
tgcgtcttcgacgaccggtagttta

SEQ ID NO: 9717 - DNA, 25 bp, Homo sapien
tctcgtcttcacacagtcggttctt

SEQ ID NO: 9718 - DNA, 25 bp, Homo sapien
tctcgtcttcactcagtcggttctt

SEQ ID NO: 9719 - DNA, 25 bp, Homo sapien
atttgttcgagattccactgttctg

SEQ ID NO: 9720 - DNA, 25 bp, Homo sapien
atttgttcgagaatccactgttctg

SEQ ID NO: 9721 - DNA, 25 bp, Homo sapien
aactttttgatttaccttattctct

SEQ ID NO: 9722 - DNA, 25 bp, Homo sapien
aactttttgattaaccttattctct

SEQ ID NO: 9723 - DNA, 25 bp, Homo sapien
attttagacactactcgtcttaatt

SEQ ID NO: 9724 - DNA, 25 bp, Homo sapien
attttagacacttctcgtcttaatt

SEQ ID NO: 9725 - DNA, 25 bp, Homo sapien
gatttgtacggttatatttgtagtt

SEQ ID NO: 9726 - DNA, 25 bp, Homo sapien
gatttgtacggtaatatttgtagtt

SEQ ID NO: 9727 - DNA, 25 bp, Homo sapien
cgtctggaccgcaaagaatcggact

SEQ ID NO: 9728 - DNA, 25 bp, Homo sapien
cgtctggaccgctaagaatcggact

SEQ ID NO: 9729 - DNA, 25 bp, Homo sapien
tcctggctcaccagagaatcagtac

SEQ ID NO: 9730 - DNA, 25 bp, Homo sapien
tcctggctcacctgagaatcagtac

SEQ ID NO: 9731 - DNA, 25 bp, Homo sapien
ctcgtatctcgtccaaccggtcagg

SEQ ID NO: 9732 - DNA, 25 bp, Homo sapien
ctcgtatctcgtgcaaccggtcagg

SEQ ID NO: 9733 - DNA, 25 bp, Homo sapien
aatacgtattttcagacacgtttga

SEQ ID NO: 9734 - DNA, 25 bp, Homo sapien
aatacgtattttgagacacgtttga

SEQ ID NO: 9735 - DNA, 25 bp, Homo sapien
taagttattctttagtcctgttgac

SEQ ID NO: 9736 - DNA, 25 bp, Homo sapien
taagttattcttaagtcctgttgac

SEQ ID NO: 9737 - DNA, 25 bp, Homo sapien
gggttcttcgttgtcaacccgtttc

SEQ ID NO: 9738 - DNA, 25 bp, Homo sapien
gggttcttcgttctcaacccgtttc

SEQ ID NO: 9739 - DNA, 25 bp, Homo sapien
ttagggtagtgacatcgaccgtttc

SEQ ID NO: 9740 - DNA, 25 bp, Homo sapien
ttagggtagtgagatcgaccgtttc

SEQ ID NO: 9741 - DNA, 25 bp, Homo sapien
aacaggaacaggtcgtacactttgt

SEQ ID NO: 9742 - DNA, 25 bp, Homo sapien
aacaggaacaggacgtacactttgt

SEQ ID NO: 9743 - DNA, 25 bp, Homo sapien
accagaatagtaggtgtaccttcgg

SEQ ID NO: 9744 - DNA, 25 bp, Homo sapien
accagaatagtacgtgtaccttcgg

SEQ ID NO: 9745 - DNA, 25 bp, Homo sapien
attcgaaagagttaataccctgttg

SEQ ID NO: 9746 - DNA, 25 bp, Homo sapien
attcgaaagagtaaataccctgttg

SEQ ID NO: 9747 - DNA, 25 bp, Homo sapien
gctaggaacgagaaaagactctgcc

SEQ ID NO: 9748 - DNA, 25 bp, Homo sapien
gctaggaacgagtaaagactctgcc

SEQ ID NO: 9749 - DNA, 25 bp, Homo sapien
caccaagacaagtcaaggacggcct

SEQ ID NO: 9750 - DNA, 25 bp, Homo sapien
caccaagacaagacaaggacggcct

SEQ ID NO: 9751 - DNA, 25 bp, Homo sapien
caaacgaaaacgatgacttgtctct

SEQ ID NO: 9752 - DNA, 25 bp, Homo sapien
caaacgaaaacgttgacttgtctct

SEQ ID NO: 9753 - DNA, 25 bp, Homo sapien
tgagggagaccgttgtcttatcgtc

SEQ ID NO: 9754 - DNA, 25 bp, Homo sapien
tgagggagaccgatgtcttatcgtc

SEQ ID NO: 9755 - DNA, 25 bp, Homo sapien
gaggtgagacgtgtgcatctacgac

SEQ ID NO: 9756 - DNA, 25 bp, Homo sapien
gaggtgagacgtctgcatctacgac

SEQ ID NO: 9757 - DNA, 25 bp, Homo sapien
ttctatggtgtccacaggatcgaac

SEQ ID NO: 9758 - DNA, 25 bp, Homo sapien
ttctatggtgtcgacaggatcgaac

SEQ ID NO: 9759 - DNA, 25 bp, Homo sapien
ttccgtgcgggtgacacgggtggac

SEQ ID NO: 9760 - DNA, 25 bp, Homo sapien
ttccgtgcgggtcacacgggtggac

SEQ ID NO: 9761 - DNA, 25 bp, Homo sapien
gtatctgtaccgagaccgggaccga

SEQ ID NO: 9762 - DNA, 25 bp, Homo sapien
gtatctgtaccgtgaccgggaccga

SEQ ID NO: 9763 - DNA, 25 bp, Homo sapien
aagactgttcacgacccggcgtccg

SEQ ID NO: 9764 - DNA, 25 bp, Homo sapien
aagactgttcaccacccggcgtccg

SEQ ID NO: 9765 - DNA, 25 bp, Homo sapien
gagactcgtcgacagacccccgtgg

SEQ ID NO: 9766 - DNA, 25 bp, Homo sapien
gagactcgtcgagagacccccgtgg

SEQ ID NO: 9767 - DNA, 25 bp, Homo sapien
aggacctagaaaaccccgtcgcgga

SEQ ID NO: 9768 - DNA, 25 bp, Homo sapien
aggacctagaaatccccgtcgcgga

SEQ ID NO: 9769 - DNA, 25 bp, Homo sapien
gggactccaacagaccggcggagac

SEQ ID NO: 9770 - DNA, 25 bp, Homo sapien
gggactccaacacaccggcggagac

SEQ ID NO: 9771 - DNA, 25 bp, Homo sapien
gggtcccataccatctcagaccgga

SEQ ID NO: 9772 - DNA, 25 bp, Homo sapien
gggtcccataccttctcagaccgga

SEQ ID NO: 9773 - DNA, 25 bp, Homo sapien
ctgtcaccgttccttcgggtatcca

SEQ ID NO: 9774 - DNA, 25 bp, Homo sapien
ctgtcaccgttcgttcgggtatcca

SEQ ID NO: 9775 - DNA, 25 bp, Homo sapien
tacccatgtgtgtgggtatgtaccc

SEQ ID NO: 9776 - DNA, 25 bp, Homo sapien
tacccatgtgtgagggtatgtaccc

SEQ ID NO: 9777 - DNA, 25 bp, Homo sapien
caaggaacgacctggtgtacagtct

SEQ ID NO: 9778 - DNA, 25 bp, Homo sapien
caaggaacgaccaggtgtacagtct

SEQ ID NO: 9779 - DNA, 25 bp, Homo sapien
aggagggacctacacgtctgtaccc

SEQ ID NO: 9780 - DNA, 25 bp, Homo sapien
aggagggacctagacgtctgtaccc

SEQ ID NO: 9781 - DNA, 25 bp, Homo sapien
tttcgaggggtagaccacgacgctg

SEQ ID NO: 9782 - DNA, 25 bp, Homo sapien
tttcgaggggtacaccacgacgctg

SEQ ID NO: 9783 - DNA, 25 bp, Homo sapien
aagaagaacacgaagaaccatttcg

SEQ ID NO: 9784 - DNA, 25 bp, Homo sapien
aagaagaacacgtagaaccatttcg

SEQ ID NO: 9785 - DNA, 25 bp, Homo sapien
aaaggacaacggtagtttgttctca

SEQ ID NO: 9786 - DNA, 25 bp, Homo sapien
aaaggacaacggaagtttgttctca

SEQ ID NO: 9787 - DNA, 25 bp, Homo sapien
tatagtgggttgaacttttcttctc

SEQ ID NO: 9788 - DNA, 25 bp, Homo sapien
tatagtgggttgtacttttcttctc

SEQ ID NO: 9789 - DNA, 25 bp, Homo sapien
ctgggttctttcgtcctcctcgact

SEQ ID NO: 9790 - DNA, 25 bp, Homo sapien
ctgggttctttcctcctcctcgact

SEQ ID NO: 9791 - DNA, 25 bp, Homo sapien
gagattcgtacgtctttcgtgtcct

SEQ ID NO: 9792 - DNA, 25 bp, Homo sapien
gagattcgtacgactttcgtgtcct

SEQ ID NO: 9793 - DNA, 25 bp, Homo sapien
gaaccttacgttaaagtgtgctact

SEQ ID NO: 9794 - DNA, 25 bp, Homo sapien
gaaccttacgtttaagtgtgctact

SEQ ID NO: 9795 - DNA, 25 bp, Homo sapien
gactccttacatagtgtccgtcact

SEQ ID NO: 9796 - DNA, 25 bp, Homo sapien
gactccttacattgtgtccgtcact

SEQ ID NO: 9797 - DNA, 25 bp, Homo sapien
ggtcccgtagtgaaccctccggtac

SEQ ID NO: 9798 - DNA, 25 bp, Homo sapien
ggtcccgtagtgtaccctccggtac

SEQ ID NO: 9799 - DNA, 25 bp, Homo sapien
acttgaacgtggactcctaccggta

SEQ ID NO: 9800 - DNA, 25 bp, Homo sapien
acttgaacgtggtctcctaccggta

SEQ ID NO: 9801 - DNA, 25 bp, Homo sapien
ctctgcctcgtggtccacgtcccac

SEQ ID NO: 9802 - DNA, 25 bp, Homo sapien
ctctgcctcgtgctccacgtcccac

SEQ ID NO: 9803 - DNA, 25 bp, Homo sapien
ctcttccggtcgtcccggacacacg

SEQ ID NO: 9804 - DNA, 25 bp, Homo sapien
ctcttccggtcgacccggacacacg

SEQ ID NO: 9805 - DNA, 25 bp, Homo sapien
ggattacctctcgtcgttaggaaag

SEQ ID NO: 9806 - DNA, 25 bp, Homo sapien
ggattacctctcctcgttaggaaag

SEQ ID NO: 9807 - DNA, 25 bp, Homo sapien
gaagaatctaccatcacgtgaaatc

SEQ ID NO: 9808 - DNA, 25 bp, Homo sapien
gaagaatctaccttcacgtgaaatc

SEQ ID NO: 9809 - DNA, 25 bp, Homo sapien
gaaagaaatgtttcacatgtctccc

SEQ ID NO: 9810 - DNA, 25 bp, Homo sapien
gaaagaaatgttacacatgtctccc

SEQ ID NO: 9811 - DNA, 25 bp, Homo sapien
cgagaatggacgaacagggaccatc

SEQ ID NO: 9812 - DNA, 25 bp, Homo sapien
cgagaatggacgtacagggaccatc

SEQ ID NO: 9813 - DNA, 25 bp, Homo sapien
aacgaagtactacagggaccagagt

SEQ ID NO: 9814 - DNA, 25 bp, Homo sapien
aacgaagtactagagggaccagagt

SEQ ID NO: 9815 - DNA, 25 bp, Homo sapien
gcaagaataagaaggcccgtacgtg

SEQ ID NO: 9816 - DNA, 25 bp, Homo sapien
gcaagaataagatggcccgtacgtg

SEQ ID NO: 9817 - DNA, 25 bp, Homo sapien
ccgtgaccggctctaggaccggaac

SEQ ID NO: 9818 - DNA, 25 bp, Homo sapien
ccgtgaccggctgtaggaccggaac

SEQ ID NO: 9819 - DNA, 25 bp, Homo sapien
cccgtgcaagtcatgggcgagaaac

SEQ ID NO: 9820 - DNA, 25 bp, Homo sapien
cccgtgcaagtcttgggcgagaaac

SEQ ID NO: 9821 - DNA, 25 bp, Homo sapien
acgattcgtttttcgaggacgacgt

SEQ ID NO: 9822 - DNA, 25 bp, Homo sapien
acgattcgttttacgaggacgacgt

SEQ ID NO: 9823 - DNA, 25 bp, Homo sapien
ggcgacctgttattacctctctcac

SEQ ID NO: 9824 - DNA, 25 bp, Homo sapien
ggcgacctgttaatacctctctcac

SEQ ID NO: 9825 - DNA, 25 bp, Homo sapien
agtggcggctcgagacttttgcgtc

SEQ ID NO: 9826 - DNA, 25 bp, Homo sapien
agtggcggctcgtgacttttgcgtc

SEQ ID NO: 9827 - DNA, 25 bp, Homo sapien
gacgggactccgtgtgtcccggctc

SEQ ID NO: 9828 - DNA, 25 bp, Homo sapien
gacgggactccgagtgtcccggctc

SEQ ID NO: 9829 - DNA, 25 bp, Homo sapien
ggaatgttatcgttgtatcttttcc

SEQ ID NO: 9830 - DNA, 25 bp, Homo sapien
ggaatgttatcgatgtatcttttcc

SEQ ID NO: 9831 - DNA, 25 bp, Homo sapien
cataccgtttaacgaacttttgtac

SEQ ID NO: 9832 - DNA, 25 bp, Homo sapien
cataccgtttaaggaacttttgtac

SEQ ID NO: 9833 - DNA, 25 bp, Homo sapien
actgtgttcgtggaataatctagac

SEQ ID NO: 9834 - DNA, 25 bp, Homo sapien
actgtgttcgtgcaataatctagac

SEQ ID NO: 9835 - DNA, 25 bp, Homo sapien
acttatgtcgtaaaagtttcgtcag

SEQ ID NO: 9836 - DNA, 25 bp, Homo sapien
acttatgtcgtataagtttcgtcag

SEQ ID NO: 9837 - DNA, 25 bp, Homo sapien
ctatgttgtatggtcgtcgtcgcag

SEQ ID NO: 9838 - DNA, 25 bp, Homo sapien
ctatgttgtatgctcgtcgtcgcag

SEQ ID NO: 9839 - DNA, 25 bp, Homo sapien
ggttatttatctcacttgtaggacg

SEQ ID NO: 9840 - DNA, 25 bp, Homo sapien
ggttatttatctgacttgtaggacg

SEQ ID NO: 9841 - DNA, 25 bp, Homo sapien
atttcacgagactgtacgtcacgag

SEQ ID NO: 9842 - DNA, 25 bp, Homo sapien
atttcacgagacagtacgtcacgag

SEQ ID NO: 9843 - DNA, 25 bp, Homo sapien
actcgatacgggtccgtagactggg

SEQ ID NO: 9844 - DNA, 25 bp, Homo sapien
actcgatacgggaccgtagactggg

SEQ ID NO: 9845 - DNA, 25 bp, Homo sapien
tctagggcagagtacttgacttcgg

SEQ ID NO: 9846 - DNA, 25 bp, Homo sapien
tctagggcagagaacttgacttcgg

SEQ ID NO: 9847 - DNA, 25 bp, Homo sapien
gtgtacgaaaaggaaccaactaaat

SEQ ID NO: 9848 - DNA, 25 bp, Homo sapien
gtgtacgaaaagcaaccaactaaat

SEQ ID NO: 9849 - DNA, 25 bp, Homo sapien
gtgcatgtacgaatcatcattatca

SEQ ID NO: 9850 - DNA, 25 bp, Homo sapien
gtgcatgtacgattcatcattatca

SEQ ID NO: 9851 - DNA, 25 bp, Homo sapien
tactgagagtcaactgtgtatgact

SEQ ID NO: 9852 - DNA, 25 bp, Homo sapien
tactgagagtcatctgtgtatgact

SEQ ID NO: 9853 - DNA, 25 bp, Homo sapien
agtcagagagtagggtgtatacttc

SEQ ID NO: 9854 - DNA, 25 bp, Homo sapien
agtcagagagtacggtgtatacttc

SEQ ID NO: 9855 - DNA, 25 bp, Homo sapien
agggtcgaaggtaaatctacccgac

SEQ ID NO: 9856 - DNA, 25 bp, Homo sapien
agggtcgaaggttaatctacccgac

SEQ ID NO: 9857 - DNA, 25 bp, Homo sapien
tacaactgtcacttctgtacgacct

SEQ ID NO: 9858 - DNA, 25 bp, Homo sapien
tacaactgtcacatctgtacgacct

SEQ ID NO: 9859 - DNA, 25 bp, Homo sapien
gtcacgtctctcgacgacaagacga

SEQ ID NO: 9860 - DNA, 25 bp, Homo sapien
gtcacgtctctccacgacaagacga

SEQ ID NO: 9861 - DNA, 25 bp, Homo sapien
ggacgttgtacaaccgaaatagact

SEQ ID NO: 9862 - DNA, 25 bp, Homo sapien
ggacgttgtacatccgaaatagact

SEQ ID NO: 9863 - DNA, 25 bp, Homo sapien
ttgagctgacgtatctgatctggta

SEQ ID NO: 9864 - DNA, 25 bp, Homo sapien
ttgagctgacgtttctgatctggta

SEQ ID NO: 9865 - DNA, 25 bp, Homo sapien
tacggctcttcctctaccgacggtg

SEQ ID NO: 9866 - DNA, 25 bp, Homo sapien
tacggctcttccactaccgacggtg

SEQ ID NO: 9867 - DNA, 25 bp, Homo sapien
ctaccgtctgtggtctccctggcgt

SEQ ID NO: 9868 - DNA, 25 bp, Homo sapien
ctaccgtctgtgctctccctggcgt

SEQ ID NO: 9869 - DNA, 25 bp, Homo sapien
ccaaggtctccaggttcgcggggta

SEQ ID NO: 9870 - DNA, 25 bp, Homo sapien
ccaaggtctccacgttcgcggggta

SEQ ID NO: 9871 - DNA, 25 bp, Homo sapien
ttccgtttctcttttcgaaggtcta

SEQ ID NO: 9872 - DNA, 25 bp, Homo sapien
ttccgtttctctattcgaaggtcta

SEQ ID NO: 9873 - DNA, 25 bp, Homo sapien
gacattacgtgtattctaaggtcat

SEQ ID NO: 9874 - DNA, 25 bp, Homo sapien
gacattacgtgttttctaaggtcat

SEQ ID NO: 9875 - DNA, 25 bp, Homo sapien
aagacatccgcaggtatcagggcga

SEQ ID NO: 9876 - DNA, 25 bp, Homo sapien
aagacatccgcacgtatcagggcga

SEQ ID NO: 9877 - DNA, 25 bp, Homo sapien
acgacgaatcggaccgtttgggacc

SEQ ID NO: 9878 - DNA, 25 bp, Homo sapien
acgacgaatcggtccgtttgggacc

SEQ ID NO: 9879 - DNA, 25 bp, Homo sapien
ccacgtcaaccactccaaaagatgg

SEQ ID NO: 9880 - DNA, 25 bp, Homo sapien
ccacgtcaaccagtccaaaagatgg

SEQ ID NO: 9881 - DNA, 25 bp, Homo sapien
tcaaaaggaactccaaaggttaccg

SEQ ID NO: 9882 - DNA, 25 bp, Homo sapien
tcaaaaggaactgcaaaggttaccg

SEQ ID NO: 9883 - DNA, 25 bp, Homo sapien
aaagggaccttcagaagaccggacg

SEQ ID NO: 9884 - DNA, 25 bp, Homo sapien
aaagggaccttctgaagaccggacg

SEQ ID NO: 9885 - DNA, 25 bp, Homo sapien
acgcaatgaccaactgaaaccagac

SEQ ID NO: 9886 - DNA, 25 bp, Homo sapien
acgcaatgaccatctgaaaccagac

SEQ ID NO: 9887 - DNA, 25 bp, Homo sapien
catcggagccctgaactctctgacg

SEQ ID NO: 9888 - DNA, 25 bp, Homo sapien
catcggagccctcaactctctgacg

SEQ ID NO: 9889 - DNA, 25 bp, Homo sapien
tctggaccgttctggaactctagtc

SEQ ID NO: 9890 - DNA, 25 bp, Homo sapien
tctggaccgttcaggaactctagtc

SEQ ID NO: 9891 - DNA, 25 bp, Homo sapien
tcaccacagtcgaagtgcactaagg

SEQ ID NO: 9892 - DNA, 25 bp, Homo sapien
tcaccacagtcgtagtgcactaagg

SEQ ID NO: 9893 - DNA, 25 bp, Homo sapien
ctttacgaaaggtgtgacttgactg

SEQ ID NO: 9894 - DNA, 25 bp, Homo sapien
ctttacgaaaggagtgacttgactg

SEQ ID NO: 9895 - DNA, 25 bp, Homo sapien
gtcgacaggggatcgattagacgtc

SEQ ID NO: 9896 - DNA, 25 bp, Homo sapien
gtcgacaggggaacgattagacgtc

SEQ ID NO: 9897 - DNA, 25 bp, Homo sapien
cgttcacccgaggatacggtctttt

SEQ ID NO: 9898 - DNA, 25 bp, Homo sapien
cgttcacccgagcatacggtctttt

SEQ ID NO: 9899 - DNA, 25 bp, Homo sapien
cgtcatcgcacctacgtccgttgag

SEQ ID NO: 9900 - DNA, 25 bp, Homo sapien
cgtcatcgcaccaacgtccgttgag

SEQ ID NO: 9901 - DNA, 25 bp, Homo sapien
cgtcgagagcagcaacgtcgtttgc

SEQ ID NO: 9902 - DNA, 25 bp, Homo sapien
cgtcgagagcaggaacgtcgtttgc

SEQ ID NO: 9903 - DNA, 25 bp, Homo sapien
gtctttgcgatacgtgtctacgttt

SEQ ID NO: 9904 - DNA, 25 bp, Homo sapien
gtctttgcgataggtgtctacgttt

SEQ ID NO: 9905 - DNA, 25 bp, Homo sapien
cagtaactccggataggtgactatt

SEQ ID NO: 9906 - DNA, 25 bp, Homo sapien
cagtaactccggttaggtgactatt

SEQ ID NO: 9907 - DNA, 25 bp, Homo sapien
ttgtagacgatttcggttcccttgt

SEQ ID NO: 9908 - DNA, 25 bp, Homo sapien
ttgtagacgattacggttcccttgt

SEQ ID NO: 9909 - DNA, 25 bp, Homo sapien
aacagacacgactcgtggccctctg

SEQ ID NO: 9910 - DNA, 25 bp, Homo sapien
aacagacacgacacgtggccctctg

SEQ ID NO: 9911 - DNA, 25 bp, Homo sapien
cctcatcgtaggagtcctcatcaca

SEQ ID NO: 9912 - DNA, 25 bp, Homo sapien
cctcatcgtaggtgtcctcatcaca

SEQ ID NO: 9913 - DNA, 25 bp, Homo sapien
accgacttctggtgtcaaccctaca

SEQ ID NO: 9914 - DNA, 25 bp, Homo sapien
accgacttctggagtcaaccctaca

SEQ ID NO: 9915 - DNA, 25 bp, Homo sapien
gagaccttccagatgaagacaccga

SEQ ID NO: 9916 - DNA, 25 bp, Homo sapien
gagaccttccagttgaagacaccga

SEQ ID NO: 9917 - DNA, 25 bp, Homo sapien
gttctgaccacaaaaacgacgagag

SEQ ID NO: 9918 - DNA, 25 bp, Homo sapien
gttctgaccacataaacgacgagag

SEQ ID NO: 9919 - DNA, 25 bp, Homo sapien
tttcgttaccaatacggtagtattt

SEQ ID NO: 9920 - DNA, 25 bp, Homo sapien
tttcgttaccaaaacggtagtattt

SEQ ID NO: 9921 - DNA, 25 bp, Homo sapien
actgatacctgtagagctaagtctt

SEQ ID NO: 9922 - DNA, 25 bp, Homo sapien
actgatacctgttgagctaagtctt

SEQ ID NO: 9923 - DNA, 25 bp, Homo sapien
acggatctttactagatatttacgt

SEQ ID NO: 9924 - DNA, 25 bp, Homo sapien
acggatctttacaagatatttacgt

SEQ ID NO: 9925 - DNA, 25 bp, Homo sapien
gtggaatcgttccactcgaaggtcc

SEQ ID NO: 9926 - DNA, 25 bp, Homo sapien
gtggaatcgttcgactcgaaggtcc

SEQ ID NO: 9927 - DNA, 25 bp, Homo sapien
cgccattcaggtgctcagaggtccg

SEQ ID NO: 9928 - DNA, 25 bp, Homo sapien
cgccattcaggtcctcagaggtccg

SEQ ID NO: 9929 - DNA, 25 bp, Homo sapien
tctaaggacacctactcaagtactc

SEQ ID NO: 9930 - DNA, 25 bp, Homo sapien
tctaaggacaccaactcaagtactc

SEQ ID NO: 9931 - DNA, 25 bp, Homo sapien
gtatggaacacaaccggtgtacgtc

SEQ ID NO: 9932 - DNA, 25 bp, Homo sapien
gtatggaacacatccggtgtacgtc

SEQ ID NO: 9933 - DNA, 25 bp, Homo sapien
cctataagtcggatccagttggggc

SEQ ID NO: 9934 - DNA, 25 bp, Homo sapien
cctataagtcggttccagttggggc

SEQ ID NO: 9935 - DNA, 25 bp, Homo sapien
ctacggaggtctttccttttttcct

SEQ ID NO: 9936 - DNA, 25 bp, Homo sapien
ctacggaggtctatccttttttcct

SEQ ID NO: 9937 - DNA, 25 bp, Homo sapien
cggttcacaggttgtattcatctac

SEQ ID NO: 9938 - DNA, 25 bp, Homo sapien
cggttcacaggtagtattcatctac

SEQ ID NO: 9939 - DNA, 25 bp, Homo sapien
ggcaatcgatcataatattctgtta

SEQ ID NO: 9940 - DNA, 25 bp, Homo sapien
ggcaatcgatcaaaatattctgtta

SEQ ID NO: 9941 - DNA, 25 bp, Homo sapien
ggaggtcactgtcattttatgatct

SEQ ID NO: 9942 - DNA, 25 bp, Homo sapien
ggaggtcactgtgattttatgatct

SEQ ID NO: 9943 - DNA, 25 bp, Homo sapien
aggacatcgtgacatccgtgtgtgt

SEQ ID NO: 9944 - DNA, 25 bp, Homo sapien
aggacatcgtgagatccgtgtgtgt

SEQ ID NO: 9945 - DNA, 25 bp, Homo sapien
tctacacggtcgaaggaccctagag

SEQ ID NO: 9946 - DNA, 25 bp, Homo sapien
tctacacggtcgtaggaccctagag

SEQ ID NO: 9947 - DNA, 25 bp, Homo sapien
ccttaagttacatcgacttcgaaga

SEQ ID NO: 9948 - DNA, 25 bp, Homo sapien
ccttaagttacaacgacttcgaaga

SEQ ID NO: 9949 - DNA, 25 bp, Homo sapien
gaccctgaagtatcgatccgtgaac

SEQ ID NO: 9950 - DNA, 25 bp, Homo sapien
gaccctgaagtaacgatccgtgaac

SEQ ID NO: 9951 - DNA, 25 bp, Homo sapien
gactccaaggtatggtcctcgcagt

SEQ ID NO: 9952 - DNA, 25 bp, Homo sapien
gactccaaggtaaggtcctcgcagt

SEQ ID NO: 9953 - DNA, 25 bp, Homo sapien
gtgcgacatcgcaaacgcgtagaag

SEQ ID NO: 9954 - DNA, 25 bp, Homo sapien
gtgcgacatcgctaacgcgtagaag

SEQ ID NO: 9955 - DNA, 25 bp, Homo sapien
tgttgggtctcgagacagtcggaac

SEQ ID NO: 9956 - DNA, 25 bp, Homo sapien
tgttgggtctcgtgacagtcggaac

SEQ ID NO: 9957 - DNA, 25 bp, Homo sapien
gtttatcctgtatttccagggatct

SEQ ID NO: 9958 - DNA, 25 bp, Homo sapien
gtttatcctgtaattccagggatct

SEQ ID NO: 9959 - DNA, 25 bp, Homo sapien
tgatcgtgtgacgttccagagcttc

SEQ ID NO: 9960 - DNA, 25 bp, Homo sapien
tgatcgtgtgaccttccagagcttc

SEQ ID NO: 9961 - DNA, 25 bp, Homo sapien
cccggttaacctttcagtaatactt

SEQ ID NO: 9962 - DNA, 25 bp, Homo sapien
cccggttaacctatcagtaatactt

SEQ ID NO: 9963 - DNA, 25 bp, Homo sapien
actcggaaatacaccgtggttgaca

SEQ ID NO: 9964 - DNA, 25 bp, Homo sapien
actcggaaatactccgtggttgaca

SEQ ID NO: 9965 - DNA, 25 bp, Homo sapien
cctcttgaatcgaggtcttttcgac

SEQ ID NO: 9966 - DNA, 25 bp, Homo sapien
cctcttgaatcgtggtcttttcgac

SEQ ID NO: 9967 - DNA, 25 bp, Homo sapien
tctctgggaccgtgggtaactttac

SEQ ID NO: 9968 - DNA, 25 bp, Homo sapien
tctctgggaccgagggtaactttac

SEQ ID NO: 9969 - DNA, 25 bp, Homo sapien
ctcgggagtcggagtccgagacccc

SEQ ID NO: 9970 - DNA, 25 bp, Homo sapien
ctcgggagtcggtgtccgagacccc

SEQ ID NO: 9971 - DNA, 25 bp, Homo sapien
aacggcaactgttttccactcttcc

SEQ ID NO: 9972 - DNA, 25 bp, Homo sapien
aacggcaactgtattccactcttcc

SEQ ID NO: 9973 - DNA, 25 bp, Homo sapien
gcaagattcagtcacacttaccgtc

SEQ ID NO: 9974 - DNA, 25 bp, Homo sapien
gcaagattcagtgacacttaccgtc

SEQ ID NO: 9975 - DNA, 25 bp, Homo sapien
tcgaccgagtatcaggttgagtttc

SEQ ID NO: 9976 - DNA, 25 bp, Homo sapien
tcgaccgagtatgaggttgagtttc

SEQ ID NO: 9977 - DNA, 25 bp, Homo sapien
tcatgaccatagtttatctgatttg

SEQ ID NO: 9978 - DNA, 25 bp, Homo sapien
tcatgaccatagattatctgatttg

SEQ ID NO: 9979 - DNA, 25 bp, Homo sapien
caaaccataagtttcaacgttcgtg

SEQ ID NO: 9980 - DNA, 25 bp, Homo sapien
caaaccataagtatcaacgttcgtg

SEQ ID NO: 9981 - DNA, 25 bp, Homo sapien
accgctgtcagatacgcggttagtg

SEQ ID NO: 9982 - DNA, 25 bp, Homo sapien
accgctgtcagaaacgcggttagtg

SEQ ID NO: 9983 - DNA, 25 bp, Homo sapien
gtttgtaagtacaaaaccgttcata

SEQ ID NO: 9984 - DNA, 25 bp, Homo sapien
gtttgtaagtactaaaccgttcata

SEQ ID NO: 9985 - DNA, 25 bp, Homo sapien
caatcgtagtagaagactcagacat

SEQ ID NO: 9986 - DNA, 25 bp, Homo sapien
caatcgtagtagtagactcagacat

SEQ ID NO: 9987 - DNA, 25 bp, Homo sapien
ttcaagtgtctaaatacaatacggt

SEQ ID NO: 9988 - DNA, 25 bp, Homo sapien
ttcaagtgtctatatacaatacggt

SEQ ID NO: 9989 - DNA, 25 bp, Homo sapien
aaacagtgcccattctaggtacggt

SEQ ID NO: 9990 - DNA, 25 bp, Homo sapien
aaacagtgcccaatctaggtacggt

SEQ ID NO: 9991 - DNA, 25 bp, Homo sapien
cgaagaaccttccaccagacgtcgg

SEQ ID NO: 9992 - DNA, 25 bp, Homo sapien
cgaagaaccttcgaccagacgtcgg

SEQ ID NO: 9993 - DNA, 25 bp, Homo sapien
gaagcacttgtcctatcacgtcagg

SEQ ID NO: 9994 - DNA, 25 bp, Homo sapien
gaagcacttgtcgtatcacgtcagg

SEQ ID NO: 9995 - DNA, 25 bp, Homo sapien
cagaaggttgtttccatacagaagg

SEQ ID NO: 9996 - DNA, 25 bp, Homo sapien
cagaaggttgttaccatacagaagg

SEQ ID NO: 9997 - DNA, 25 bp, Homo sapien
aggaggtcctagaatcctttaaagt

SEQ ID NO: 9998 - DNA, 25 bp, Homo sapien
aggaggtcctagtatcctttaaagt

SEQ ID NO: 9999 - DNA, 25 bp, Homo sapien
cgaaggtctagacttccttcgacaa

SEQ ID NO: 10000 - DNA, 25 bp, Homo sapien
cgaaggtctagagttccttcgacaa

SEQ ID NO: 10001 - DNA, 25 bp, Homo sapien
gggttatcgacttgacttaccgaaa

SEQ ID NO: 10002 - DNA, 25 bp, Homo sapien
gggttatcgactagacttaccgaaa

SEQ ID NO: 10003 - DNA, 25 bp, Homo sapien
gcggcgtcgttcataacaactggaa

SEQ ID NO: 10004 - DNA, 25 bp, Homo sapien
gcggcgtcgttcttaacaactggaa

SEQ ID NO: 10005 - DNA, 25 bp, Homo sapien
gattcttacgactgacgagcgaagt

SEQ ID NO: 10006 - DNA, 25 bp, Homo sapien
gattcttacgacagacgagcgaagt

SEQ ID NO: 10007 - DNA, 25 bp, Homo sapien
ggagcgtcgaaccagtacgagaatg

SEQ ID NO: 10008 - DNA, 25 bp, Homo sapien
ggagcgtcgaacgagtacgagaatg

SEQ ID NO: 10009 - DNA, 25 bp, Homo sapien
ctttggaggtcagaggtcgagaaca

SEQ ID NO: 10010 - DNA, 25 bp, Homo sapien
ctttggaggtcacaggtcgagaaca

SEQ ID NO: 10011 - DNA, 25 bp, Homo sapien
ctgtggtttggacgatcacggaact

SEQ ID NO: 10012 - DNA, 25 bp, Homo sapien
ctgtggtttggaggatcacggaact

SEQ ID NO: 10013 - DNA, 25 bp, Homo sapien
acgccggttctgaaggacctccgca

SEQ ID NO: 10014 - DNA, 25 bp, Homo sapien
acgccggttctgtaggacctccgca

SEQ ID NO: 10015 - DNA, 25 bp, Homo sapien
agaggccggtttgaagactccggca

SEQ ID NO: 10016 - DNA, 25 bp, Homo sapien
agaggccggtttcaagactccggca

SEQ ID NO: 10017 - DNA, 25 bp, Homo sapien
ggtaacggttctagaactccatcct

SEQ ID NO: 10018 - DNA, 25 bp, Homo sapien
ggtaacggttcttgaactccatcct

SEQ ID NO: 10019 - DNA, 25 bp, Homo sapien
gcacctccacggtactccctcgtct

SEQ ID NO: 10020 - DNA, 25 bp, Homo sapien
gcacctccacggaactccctcgtct

SEQ ID NO: 10021 - DNA, 25 bp, Homo sapien
cgtaacccgaggaacgtctctccga

SEQ ID NO: 10022 - DNA, 25 bp, Homo sapien
cgtaacccgaggtacgtctctccga

SEQ ID NO: 10023 - DNA, 25 bp, Homo sapien
agtggagaccaaggaaaccccgtcg

SEQ ID NO: 10024 - DNA, 25 bp, Homo sapien
agtggagaccaacgaaaccccgtcg

SEQ ID NO: 10025 - DNA, 25 bp, Homo sapien
aagtctccagggaactaaaactcgt

SEQ ID NO: 10026 - DNA, 25 bp, Homo sapien
aagtctccagggtactaaaactcgt

SEQ ID NO: 10027 - DNA, 25 bp, Homo sapien
ccggaacccgggtgtgtaaagtctc

SEQ ID NO: 10028 - DNA, 25 bp, Homo sapien
ccggaacccgggagtgtaaagtctc

SEQ ID NO: 10029 - DNA, 25 bp, Homo sapien
ccgagcgccaggacgtccagatcat

SEQ ID NO: 10030 - DNA, 25 bp, Homo sapien
ccgagcgccaggtcgtccagatcat

SEQ ID NO: 10031 - DNA, 25 bp, Homo sapien
gtggtgtcaaattacctccttcgta

SEQ ID NO: 10032 - DNA, 25 bp, Homo sapien
gtggtgtcaaataacctccttcgta

SEQ ID NO: 10033 - DNA, 25 bp, Homo sapien
gacagttcaactgtcataagtttat

SEQ ID NO: 10034 - DNA, 25 bp, Homo sapien
gacagttcaactctcataagtttat

SEQ ID NO: 10035 - DNA, 25 bp, Homo sapien
tattctctcatttgttaccgttcgg

SEQ ID NO: 10036 - DNA, 25 bp, Homo sapien
tattctctcattagttaccgttcgg

SEQ ID NO: 10037 - DNA, 25 bp, Homo sapien
gcttcaaccctcgtctccgtatagg

SEQ ID NO: 10038 - DNA, 25 bp, Homo sapien
gcttcaaccctcctctccgtatagg

SEQ ID NO: 10039 - DNA, 25 bp, Homo sapien
cactcttttcctgtctcgtaaatgg

SEQ ID NO: 10040 - DNA, 25 bp, Homo sapien
cactcttttcctctctcgtaaatgg

SEQ ID NO: 10041 - DNA, 25 bp, Homo sapien
ttgtttcctgttacttcaaatgtag

SEQ ID NO: 10042 - DNA, 25 bp, Homo sapien
ttgtttcctgtttcttcaaatgtag

SEQ ID NO: 10043 - DNA, 25 bp, Homo sapien
atttaaccgtggattactcaaagga

SEQ ID NO: 10044 - DNA, 25 bp, Homo sapien
atttaaccgtggtttactcaaagga

SEQ ID NO: 10045 - DNA, 25 bp, Homo sapien
ccccgagggatatcgacagtcgtca

SEQ ID NO: 10046 - DNA, 25 bp, Homo sapien
ccccgagggataacgacagtcgtca

SEQ ID NO: 10047 - DNA, 25 bp, Homo sapien
cctgggtgttataacgtaatgacta

SEQ ID NO: 10048 - DNA, 25 bp, Homo sapien
cctgggtgttattacgtaatgacta

SEQ ID NO: 10049 - DNA, 25 bp, Homo sapien
ttaatatgggtgactttatcgttcc

SEQ ID NO: 10050 - DNA, 25 bp, Homo sapien
ttaatatgggtgtctttatcgttcc

SEQ ID NO: 10051 - DNA, 25 bp, Homo sapien
tttactagaccgagactttgtttcc

SEQ ID NO: 10052 - DNA, 25 bp, Homo sapien
tttactagaccgtgactttgtttcc

SEQ ID NO: 10053 - DNA, 25 bp, Homo sapien
agtaagtaggagagaatcattcacc

SEQ ID NO: 10054 - DNA, 25 bp, Homo sapien
agtaagtaggagtgaatcattcacc

SEQ ID NO: 10055 - DNA, 25 bp, Homo sapien
gaggtcttaatgctcttattctcac

SEQ ID NO: 10056 - DNA, 25 bp, Homo sapien
gaggtcttaatggtcttattctcac

SEQ ID NO: 10057 - DNA, 25 bp, Homo sapien
cgttagtaaggagattatcttcgac

SEQ ID NO: 10058 - DNA, 25 bp, Homo sapien
cgttagtaaggacattatcttcgac

SEQ ID NO: 10059 - DNA, 25 bp, Homo sapien
tttttgacacacataagatttcagt

SEQ ID NO: 10060 - DNA, 25 bp, Homo sapien
tttttgacacacttaagatttcagt

SEQ ID NO: 10061 - DNA, 25 bp, Homo sapien
tcagggtctacttcccactgtccgt

SEQ ID NO: 10062 - DNA, 25 bp, Homo sapien
tcagggtctactacccactgtccgt

SEQ ID NO: 10063 - DNA, 25 bp, Homo sapien
gtggcgaaaggtcgacaccccgaaa

SEQ ID NO: 10064 - DNA, 25 bp, Homo sapien
gtggcgaaaggtggacaccccgaaa

SEQ ID NO: 10065 - DNA, 25 bp, Homo sapien
cgaagaggtcgtcgtcggcgtcaaa

SEQ ID NO: 10066 - DNA, 25 bp, Homo sapien
cgaagaggtcgtggtcggcgtcaaa

SEQ ID NO: 10067 - DNA, 25 bp, Homo sapien
ccttcctgggtccactcgtgtcgta

SEQ ID NO: 10068 - DNA, 25 bp, Homo sapien
ccttcctgggtcgactcgtgtcgta

SEQ ID NO: 10069 - DNA, 25 bp, Homo sapien
gaggaggttcgtctacgtccgacag

SEQ ID NO: 10070 - DNA, 25 bp, Homo sapien
gaggaggttcgtgtacgtccgacag

SEQ ID NO: 10071 - DNA, 25 bp, Homo sapien
aggtaatcgtactgtgtactgtcaa

SEQ ID NO: 10072 - DNA, 25 bp, Homo sapien
aggtaatcgtacagtgtactgtcaa

SEQ ID NO: 10073 - DNA, 25 bp, Homo sapien
ttagatatacatcaattcgttcaat

SEQ ID NO: 10074 - DNA, 25 bp, Homo sapien
ttagatatacatgaattcgttcaat

SEQ ID NO: 10075 - DNA, 25 bp, Homo sapien
gagtagaaccggaggctctacgaca

SEQ ID NO: 10076 - DNA, 25 bp, Homo sapien
gagtagaaccggtggctctacgaca

SEQ ID NO: 10077 - DNA, 25 bp, Homo sapien
ggaccaggtcaaggacaaccgtccc

SEQ ID NO: 10078 - DNA, 25 bp, Homo sapien
ggaccaggtcaacgacaaccgtccc

SEQ ID NO: 10079 - DNA, 25 bp, Homo sapien
ggaggacccggtagaccaaatcccc

SEQ ID NO: 10080 - DNA, 25 bp, Homo sapien
ggaggacccggttgaccaaatcccc

SEQ ID NO: 10081 - DNA, 25 bp, Homo sapien
gaagcgtcggggacataaacttccc

SEQ ID NO: 10082 - DNA, 25 bp, Homo sapien
gaagcgtcggggtcataaacttccc

SEQ ID NO: 10083 - DNA, 25 bp, Homo sapien
caaacgaggggcaccagaggacccg

SEQ ID NO: 10084 - DNA, 25 bp, Homo sapien
caaacgaggggctccagaggacccg

SEQ ID NO: 10085 - DNA, 25 bp, Homo sapien
cgagcccgagtctcccgagtagcag

SEQ ID NO: 10086 - DNA, 25 bp, Homo sapien
cgagcccgagtcacccgagtagcag

SEQ ID NO: 10087 - DNA, 25 bp, Homo sapien
taggaggacgggaccccgacgaccc

SEQ ID NO: 10088 - DNA, 25 bp, Homo sapien
taggaggacgggtccccgacgaccc

SEQ ID NO: 10089 - DNA, 25 bp, Homo sapien
ctccgaggagggtcacgggcgaccc

SEQ ID NO: 10090 - DNA, 25 bp, Homo sapien
ctccgaggagggacacgggcgaccc

SEQ ID NO: 10091 - DNA, 25 bp, Homo sapien
gactctgagtttcaggaggacctct

SEQ ID NO: 10092 - DNA, 25 bp, Homo sapien
gactctgagtttgaggaggacctct

SEQ ID NO: 10093 - DNA, 25 bp, Homo sapien
tgactggatctcgatggagactatt

SEQ ID NO: 10094 - DNA, 25 bp, Homo sapien
tgactggatctccatggagactatt

SEQ ID NO: 10095 - DNA, 25 bp, Homo sapien
taacgttggtctcgattgtcgtttt

SEQ ID NO: 10096 - DNA, 25 bp, Homo sapien
taacgttggtctggattgtcgtttt

SEQ ID NO: 10097 - DNA, 25 bp, Homo sapien
gtgttatcacgacttgtgtcttagt

SEQ ID NO: 10098 - DNA, 25 bp, Homo sapien
gtgttatcacgagttgtgtcttagt

SEQ ID NO: 10099 - DNA, 25 bp, Homo sapien
accagattccactaccgaccttagt

SEQ ID NO: 10100 - DNA, 25 bp, Homo sapien
accagattccacaaccgaccttagt

SEQ ID NO: 10101 - DNA, 25 bp, Homo sapien
ggtatgtgaagaactctactgtcat

SEQ ID NO: 10102 - DNA, 25 bp, Homo sapien
ggtatgtgaagatctctactgtcat

SEQ ID NO: 10103 - DNA, 25 bp, Homo sapien
acgtacggtgaaagtcagttgtcct

SEQ ID NO: 10104 - DNA, 25 bp, Homo sapien
acgtacggtgaatgtcagttgtcct

SEQ ID NO: 10105 - DNA, 25 bp, Homo sapien
gacacaagggtcgtggagcctaaac

SEQ ID NO: 10106 - DNA, 25 bp, Homo sapien
gacacaagggtcctggagcctaaac

SEQ ID NO: 10107 - DNA, 25 bp, Homo sapien
tagtagccgacctttaagtacaacc

SEQ ID NO: 10108 - DNA, 25 bp, Homo sapien
tagtagccgaccattaagtacaacc

SEQ ID NO: 10109 - DNA, 25 bp, Homo sapien
tctgccgtcgacaccttagaagacc

SEQ ID NO: 10110 - DNA, 25 bp, Homo sapien
tctgccgtcgactccttagaagacc

SEQ ID NO: 10111 - DNA, 25 bp, Homo sapien
cgtgccaccgtttacttcagtaatg

SEQ ID NO: 10112 - DNA, 25 bp, Homo sapien
cgtgccaccgttaacttcagtaatg

SEQ ID NO: 10113 - DNA, 25 bp, Homo sapien
gccttttaattctttgacggaacta

SEQ ID NO: 10114 - DNA, 25 bp, Homo sapien
gccttttaattcattgacggaacta

SEQ ID NO: 10115 - DNA, 25 bp, Homo sapien
ttattttcctcgactcagagagaga

SEQ ID NO: 10116 - DNA, 25 bp, Homo sapien
ttattttcctcgtctcagagagaga

SEQ ID NO: 10117 - DNA, 25 bp, Homo sapien
acttttcaccgtcgtacaaggtgaa

SEQ ID NO: 10118 - DNA, 25 bp, Homo sapien
acttttcaccgtggtacaaggtgaa

SEQ ID NO: 10119 - DNA, 25 bp, Homo sapien
ttattgagtcgttccggagttgcag

SEQ ID NO: 10120 - DNA, 25 bp, Homo sapien
ttattgagtcgtaccggagttgcag

SEQ ID NO: 10121 - DNA, 25 bp, Homo sapien
accttcacgacgtgactcagacgtc

SEQ ID NO: 10122 - DNA, 25 bp, Homo sapien
accttcacgacgagactcagacgtc

SEQ ID NO: 10123 - DNA, 25 bp, Homo sapien
gaagtttagtctggttactcgtgct

SEQ ID NO: 10124 - DNA, 25 bp, Homo sapien
gaagtttagtctcgttactcgtgct

SEQ ID NO: 10125 - DNA, 25 bp, Homo sapien
cagagagaagtctacttaagactcg

SEQ ID NO: 10126 - DNA, 25 bp, Homo sapien
cagagagaagtcaacttaagactcg

SEQ ID NO: 10127 - DNA, 25 bp, Homo sapien
gacgagagaataagtcacactataa

SEQ ID NO: 10128 - DNA, 25 bp, Homo sapien
gacgagagaatatgtcacactataa

SEQ ID NO: 10129 - DNA, 25 bp, Homo sapien
cgacgaaagagagtgcgtcagacac

SEQ ID NO: 10130 - DNA, 25 bp, Homo sapien
cgacgaaagagactgcgtcagacac

SEQ ID NO: 10131 - DNA, 25 bp, Homo sapien
cgcgcggctgaggtcgtggacaagt

SEQ ID NO: 10132 - DNA, 25 bp, Homo sapien
cgcgcggctgagctcgtggacaagt

SEQ ID NO: 10133 - DNA, 25 bp, Homo sapien
tctaacgtttatgacgggcgtttgc

SEQ ID NO: 10134 - DNA, 25 bp, Homo sapien
tctaacgtttatcacgggcgtttgc

SEQ ID NO: 10135 - DNA, 25 bp, Homo sapien
ccgttgtcgttcttttgcgtcgaaa

SEQ ID NO: 10136 - DNA, 25 bp, Homo sapien
ccgttgtcgttcatttgcgtcgaaa

SEQ ID NO: 10137 - DNA, 25 bp, Homo sapien
cacgttttctcttttctgtagaaag

SEQ ID NO: 10138 - DNA, 25 bp, Homo sapien
cacgttttctctattctgtagaaag

SEQ ID NO: 10139 - DNA, 25 bp, Homo sapien
tgtcctcggtatttcgtacaacgtg

SEQ ID NO: 10140 - DNA, 25 bp, Homo sapien
tgtcctcggtatatcgtacaacgtg

SEQ ID NO: 10141 - DNA, 25 bp, Homo sapien
taccatgtcaagtccacaagaagat

SEQ ID NO: 10142 - DNA, 25 bp, Homo sapien
taccatgtcaagaccacaagaagat

SEQ ID NO: 10143 - DNA, 25 bp, Homo sapien
actcattttgaacgacaacgactga

SEQ ID NO: 10144 - DNA, 25 bp, Homo sapien
actcattttgaaggacaacgactga

SEQ ID NO: 10145 - DNA, 25 bp, Homo sapien
ccgttgttgtgtagtagtcatccca

SEQ ID NO: 10146 - DNA, 25 bp, Homo sapien
ccgttgttgtgttgtagtcatccca

SEQ ID NO: 10147 - DNA, 25 bp, Homo sapien
gggtcgatagtgagttgatcctcag

SEQ ID NO: 10148 - DNA, 25 bp, Homo sapien
gggtcgatagtgtgttgatcctcag

SEQ ID NO: 10149 - DNA, 25 bp, Homo sapien
ggcatactgttttacttctctgact

SEQ ID NO: 10150 - DNA, 25 bp, Homo sapien
ggcatactgtttaacttctctgact

SEQ ID NO: 10151 - DNA, 25 bp, Homo sapien
ggggtagacgaacgaaccttcacct

SEQ ID NO: 10152 - DNA, 25 bp, Homo sapien
ggggtagacgaaggaaccttcacct

SEQ ID NO: 10153 - DNA, 25 bp, Homo sapien
ggaagacctgggagtcgtctcaact

SEQ ID NO: 10154 - DNA, 25 bp, Homo sapien
ggaagacctgggtgtcgtctcaact

SEQ ID NO: 10155 - DNA, 25 bp, Homo sapien
aagacgactcggacgaaccgtccgc

SEQ ID NO: 10156 - DNA, 25 bp, Homo sapien
aagacgactcggtcgaaccgtccgc

SEQ ID NO: 10157 - DNA, 25 bp, Homo sapien
aggtatctcctctgtatccgtcctc

SEQ ID NO: 10158 - DNA, 25 bp, Homo sapien
aggtatctcctcagtatccgtcctc

SEQ ID NO: 10159 - DNA, 25 bp, Homo sapien
cgaggacttcacttgtatctcccac

SEQ ID NO: 10160 - DNA, 25 bp, Homo sapien
cgaggacttcacatgtatctcccac

SEQ ID NO: 10161 - DNA, 25 bp, Homo sapien
gtaagttactcctgaatccacgacg

SEQ ID NO: 10162 - DNA, 25 bp, Homo sapien
gtaagttactccagaatccacgacg

SEQ ID NO: 10163 - DNA, 25 bp, Homo sapien
cagaactaccgaagtacatacgtca

SEQ ID NO: 10164 - DNA, 25 bp, Homo sapien
cagaactaccgatgtacatacgtca

SEQ ID NO: 10165 - DNA, 25 bp, Homo sapien
taacaactactagtctgtcataggg

SEQ ID NO: 10166 - DNA, 25 bp, Homo sapien
taacaactactactctgtcataggg

SEQ ID NO: 10167 - DNA, 25 bp, Homo sapien
atatatcgtgagattcataccagga

SEQ ID NO: 10168 - DNA, 25 bp, Homo sapien
atatatcgtgagtttcataccagga

SEQ ID NO: 10169 - DNA, 25 bp, Homo sapien
tgacattcttagtaccaccgagata

SEQ ID NO: 10170 - DNA, 25 bp, Homo sapien
tgacattcttagaaccaccgagata

SEQ ID NO: 10171 - DNA, 25 bp, Homo sapien
ccagaagatctcaatgtcaccgaaa

SEQ ID NO: 10172 - DNA, 25 bp, Homo sapien
ccagaagatctctatgtcaccgaaa

SEQ ID NO: 10173 - DNA, 25 bp, Homo sapien
ccaaatttaggtatgtatcgtcgaa

SEQ ID NO: 10174 - DNA, 25 bp, Homo sapien
ccaaatttaggtttgtatcgtcgaa

SEQ ID NO: 10175 - DNA, 25 bp, Homo sapien
agagtgtctcattaactgcctctat

SEQ ID NO: 10176 - DNA, 25 bp, Homo sapien
agagtgtctcataaactgcctctat

SEQ ID NO: 10177 - DNA, 25 bp, Homo sapien
taaggacgttttaccgtcgtctcca

SEQ ID NO: 10178 - DNA, 25 bp, Homo sapien
taaggacgtttttccgtcgtctcca

SEQ ID NO: 10179 - DNA, 25 bp, Homo sapien
aaagacctggtattctgtcctctga

SEQ ID NO: 10180 - DNA, 25 bp, Homo sapien
aaagacctggtaatctgtcctctga

SEQ ID NO: 10181 - DNA, 25 bp, Homo sapien
cctcggtgtcagtagcggtctagag

SEQ ID NO: 10182 - DNA, 25 bp, Homo sapien
cctcggtgtcagaagcggtctagag

SEQ ID NO: 10183 - DNA, 25 bp, Homo sapien
agtccgtcgtacgtccggtgtagga

SEQ ID NO: 10184 - DNA, 25 bp, Homo sapien
agtccgtcgtacctccggtgtagga

SEQ ID NO: 10185 - DNA, 25 bp, Homo sapien
acattcgtctacctacccgttaggg

SEQ ID NO: 10186 - DNA, 25 bp, Homo sapien
acattcgtctacgtacccgttaggg

SEQ ID NO: 10187 - DNA, 25 bp, Homo sapien
cagagttctatagtactttggtcct

SEQ ID NO: 10188 - DNA, 25 bp, Homo sapien
cagagttctatactactttggtcct

SEQ ID NO: 10189 - DNA, 25 bp, Homo sapien
agacagtaataacaaccgtgtatcc

SEQ ID NO: 10190 - DNA, 25 bp, Homo sapien
agacagtaataagaaccgtgtatcc

SEQ ID NO: 10191 - DNA, 25 bp, Homo sapien
tctaaaatgtgtagacatctgtttc

SEQ ID NO: 10192 - DNA, 25 bp, Homo sapien
tctaaaatgtgttgacatctgtttc

SEQ ID NO: 10193 - DNA, 25 bp, Homo sapien
aaaagagtagtttcccggtctatac

SEQ ID NO: 10194 - DNA, 25 bp, Homo sapien
aaaagagtagttacccggtctatac

SEQ ID NO: 10195 - DNA, 25 bp, Homo sapien
agataaatgaagttctactgtcttc

SEQ ID NO: 10196 - DNA, 25 bp, Homo sapien
agataaatgaagatctactgtcttc

SEQ ID NO: 10197 - DNA, 25 bp, Homo sapien
agttacgtaaagaactagtgtccct

SEQ ID NO: 10198 - DNA, 25 bp, Homo sapien
agttacgtaaagtactagtgtccct

SEQ ID NO: 10199 - DNA, 25 bp, Homo sapien
gtgccgcgagaagtacaacttccgc

SEQ ID NO: 10200 - DNA, 25 bp, Homo sapien
gtgccgcgagaactacaacttccgc

SEQ ID NO: 10201 - DNA, 25 bp, Homo sapien
aagagaagtgacagaacgttcggtc

SEQ ID NO: 10202 - DNA, 25 bp, Homo sapien
aagagaagtgactgaacgttcggtc

SEQ ID NO: 10203 - DNA, 25 bp, Homo sapien
caaagtgagaggtaaacttcggact

SEQ ID NO: 10204 - DNA, 25 bp, Homo sapien
caaagtgagaggaaaacttcggact

SEQ ID NO: 10205 - DNA, 25 bp, Homo sapien
aaagtcgacgggagttattacactt

SEQ ID NO: 10206 - DNA, 25 bp, Homo sapien
aaagtcgacgggtgttattacactt

SEQ ID NO: 10207 - DNA, 25 bp, Homo sapien
caaggacgtgttgttttactacaga

SEQ ID NO: 10208 - DNA, 25 bp, Homo sapien
caaggacgtgttcttttactacaga

SEQ ID NO: 10209 - DNA, 25 bp, Homo sapien
acatcggttgtttcgttaacttttg

SEQ ID NO: 10210 - DNA, 25 bp, Homo sapien
acatcggttgttacgttaacttttg

SEQ ID NO: 10211 - DNA, 25 bp, Homo sapien
gtatcgttaagttacatactaactg

SEQ ID NO: 10212 - DNA, 25 bp, Homo sapien
gtatcgttaagtaacatactaactg

SEQ ID NO: 10213 - DNA, 25 bp, Homo sapien
ttatacttgtgtacagatgtctcta

SEQ ID NO: 10214 - DNA, 25 bp, Homo sapien
ttatacttgtgttcagatgtctcta

SEQ ID NO: 10215 - DNA, 25 bp, Homo sapien
atgtcatacgttttgtatgactgac

SEQ ID NO: 10216 - DNA, 25 bp, Homo sapien
atgtcatacgttatgtatgactgac

SEQ ID NO: 10217 - DNA, 25 bp, Homo sapien
ggagtgacttctgatactgcactca

SEQ ID NO: 10218 - DNA, 25 bp, Homo sapien
ggagtgacttctcatactgcactca

SEQ ID NO: 10219 - DNA, 25 bp, Homo sapien
tgagacgtgtgtgagtaggcatcac

SEQ ID NO: 10220 - DNA, 25 bp, Homo sapien
tgagacgtgtgtcagtaggcatcac

SEQ ID NO: 10221 - DNA, 25 bp, Homo sapien
ttagacgtcggacctaaacaacact

SEQ ID NO: 10222 - DNA, 25 bp, Homo sapien
ttagacgtcggagctaaacaacact

SEQ ID NO: 10223 - DNA, 25 bp, Homo sapien
tgagtgtcgcttctagaactcacac

SEQ ID NO: 10224 - DNA, 25 bp, Homo sapien
tgagtgtcgcttgtagaactcacac

SEQ ID NO: 10225 - DNA, 25 bp, Homo sapien
cagaggggtcgtcaacgattcgacc

SEQ ID NO: 10226 - DNA, 25 bp, Homo sapien
cagaggggtcgtgaacgattcgacc

SEQ ID NO: 10227 - DNA, 25 bp, Homo sapien
gacggtagaggtcacatagggtatc

SEQ ID NO: 10228 - DNA, 25 bp, Homo sapien
gacggtagaggtgacatagggtatc

SEQ ID NO: 10229 - DNA, 25 bp, Homo sapien
ttaacggatggtatctgaggtctct

SEQ ID NO: 10230 - DNA, 25 bp, Homo sapien
ttaacggatggtttctgaggtctct

SEQ ID NO: 10231 - DNA, 25 bp, Homo sapien
aactacaagttcgtctttcgcgcac

SEQ ID NO: 10232 - DNA, 25 bp, Homo sapien
aactacaagttcctctttcgcgcac

SEQ ID NO: 10233 - DNA, 25 bp, Homo sapien
gaactaggtgcaggacggtgtccta

SEQ ID NO: 10234 - DNA, 25 bp, Homo sapien
gaactaggtgcacgacggtgtccta

SEQ ID NO: 10235 - DNA, 25 bp, Homo sapien
tctcagtgtgtaaagtttcgtccag

SEQ ID NO: 10236 - DNA, 25 bp, Homo sapien
tctcagtgtgtatagtttcgtccag

SEQ ID NO: 10237 - DNA, 25 bp, Homo sapien
gtaggagactcaatggtcgctctac

SEQ ID NO: 10238 - DNA, 25 bp, Homo sapien
gtaggagactcattggtcgctctac

SEQ ID NO: 10239 - DNA, 25 bp, Homo sapien
cacatgaactcatagagtcgttgac

SEQ ID NO: 10240 - DNA, 25 bp, Homo sapien
cacatgaactcaaagagtcgttgac

SEQ ID NO: 10241 - DNA, 25 bp, Homo sapien
cttaagtcgaattgagtcgacccca

SEQ ID NO: 10242 - DNA, 25 bp, Homo sapien
cttaagtcgaatagagtcgacccca

SEQ ID NO: 10243 - DNA, 25 bp, Homo sapien
ggacggtcggtctgtccgctaccct

SEQ ID NO: 10244 - DNA, 25 bp, Homo sapien
ggacggtcggtcagtccgctaccct

SEQ ID NO: 10245 - DNA, 25 bp, Homo sapien
gtgaggtccgtcctacgtctcccgg

SEQ ID NO: 10246 - DNA, 25 bp, Homo sapien
gtgaggtccgtcgtacgtctcccgg

SEQ ID NO: 10247 - DNA, 25 bp, Homo sapien
ctctctgtccgttcggtatccgata

SEQ ID NO: 10248 - DNA, 25 bp, Homo sapien
ctctctgtccgtacggtatccgata

SEQ ID NO: 10249 - DNA, 25 bp, Homo sapien
acttcgacaccatttcgacgagact

SEQ ID NO: 10250 - DNA, 25 bp, Homo sapien
acttcgacaccaattcgacgagact

SEQ ID NO: 10251 - DNA, 25 bp, Homo sapien
acagactttcctacaccacgaagag

SEQ ID NO: 10252 - DNA, 25 bp, Homo sapien
acagactttccttcaccacgaagag

SEQ ID NO: 10253 - DNA, 25 bp, Homo sapien
ggtatctgactcatacactaggaaa

SEQ ID NO: 10254 - DNA, 25 bp, Homo sapien
ggtatctgactcttacactaggaaa

SEQ ID NO: 10255 - DNA, 25 bp, Homo sapien
gaatacatgtatgtaacctcgtaca

SEQ ID NO: 10256 - DNA, 25 bp, Homo sapien
gaatacatgtatctaacctcgtaca

SEQ ID NO: 10257 - DNA, 25 bp, Homo sapien
aacgtcgggtgttcgtgtcccgtcc

SEQ ID NO: 10258 - DNA, 25 bp, Homo sapien
aacgtcgggtgtacgtgtcccgtcc

SEQ ID NO: 10259 - DNA, 25 bp, Homo sapien
catgagtgtcgcttctagaactcac

SEQ ID NO: 10260 - DNA, 25 bp, Homo sapien
catgagtgtcgcatctagaactcac

SEQ ID NO: 10261 - DNA, 25 bp, Homo sapien
atgtattactgtcacaaacgtgacg

SEQ ID NO: 10262 - DNA, 25 bp, Homo sapien
atgtattactgtgacaaacgtgacg

SEQ ID NO: 10263 - DNA, 25 bp, Homo sapien
tcagactctcgtgctactagagaag

SEQ ID NO: 10264 - DNA, 25 bp, Homo sapien
tcagactctcgtcctactagagaag

SEQ ID NO: 10265 - DNA, 25 bp, Homo sapien
gtcactgttacatgtctacggacag

SEQ ID NO: 10266 - DNA, 25 bp, Homo sapien
gtcactgttacaagtctacggacag

SEQ ID NO: 10267 - DNA, 25 bp, Homo sapien
tttgacaccccgaaacgagcaacgt

SEQ ID NO: 10268 - DNA, 25 bp, Homo sapien
tttgacaccccgtaacgagcaacgt

SEQ ID NO: 10269 - DNA, 25 bp, Homo sapien
ttcgttctcctctgaaacgaattgt

SEQ ID NO: 10270 - DNA, 25 bp, Homo sapien
ttcgttctcctcagaaacgaattgt

SEQ ID NO: 10271 - DNA, 25 bp, Homo sapien
tgacctcacttgactgtaatatcgt

SEQ ID NO: 10272 - DNA, 25 bp, Homo sapien
tgacctcacttgtctgtaatatcgt

SEQ ID NO: 10273 - DNA, 25 bp, Homo sapien
ggttgttgttgttcgtagtggagtt

SEQ ID NO: 10274 - DNA, 25 bp, Homo sapien
ggttgttgttgtacgtagtggagtt

SEQ ID NO: 10275 - DNA, 25 bp, Homo sapien
ttaagatgttaccaacgacagagta

SEQ ID NO: 10276 - DNA, 25 bp, Homo sapien
ttaagatgttacgaacgacagagta

SEQ ID NO: 10277 - DNA, 25 bp, Homo sapien
ataagtgtgtacttacaacaaagtc

SEQ ID NO: 10278 - DNA, 25 bp, Homo sapien
ataagtgtgtacatacaacaaagtc

SEQ ID NO: 10279 - DNA, 25 bp, Homo sapien
actgtgtgtgtcacaatgacactcg

SEQ ID NO: 10280 - DNA, 25 bp, Homo sapien
actgtgtgtgtctcaatgacactcg

SEQ ID NO: 10281 - DNA, 25 bp, Homo sapien
atttagtgtcccaagtcgtctccgt

SEQ ID NO: 10282 - DNA, 25 bp, Homo sapien
atttagtgtccctagtcgtctccgt

SEQ ID NO: 10283 - DNA, 25 bp, Homo sapien
ttctagtgtccgtcgagacgttaac

SEQ ID NO: 10284 - DNA, 25 bp, Homo sapien
ttctagtgtccgacgagacgttaac

SEQ ID NO: 10285 - DNA, 25 bp, Homo sapien
ttcacgtcaccgaggagtcgtctct

SEQ ID NO: 10286 - DNA, 25 bp, Homo sapien
ttcacgtcaccgtggagtcgtctct

SEQ ID NO: 10287 - DNA, 25 bp, Homo sapien
aactcgaagaaggtgtccgacagaa

SEQ ID NO: 10288 - DNA, 25 bp, Homo sapien
aactcgaagaagctgtccgacagaa

SEQ ID NO: 10289 - DNA, 25 bp, Homo sapien
agtcgagagacttccgtccctgacc

SEQ ID NO: 10290 - DNA, 25 bp, Homo sapien
agtcgagagactaccgtccctgacc

SEQ ID NO: 10291 - DNA, 25 bp, Homo sapien
ttgtctttagtcatctccttagacg

SEQ ID NO: 10292 - DNA, 25 bp, Homo sapien
ttgtctttagtcttctccttagacg

SEQ ID NO: 10293 - DNA, 25 bp, Homo sapien
acgtcgtgtcatctgtatgttagtt

SEQ ID NO: 10294 - DNA, 25 bp, Homo sapien
acgtcgtgtcatgtgtatgttagtt

SEQ ID NO: 10295 - DNA, 25 bp, Homo sapien
tcactctcgagatccgtgttttatt

SEQ ID NO: 10296 - DNA, 25 bp, Homo sapien
tcactctcgagaaccgtgttttatt

SEQ ID NO: 10297 - DNA, 25 bp, Homo sapien
aacggtgtacggaactctttatttc

SEQ ID NO: 10298 - DNA, 25 bp, Homo sapien
aacggtgtacggtactctttatttc

SEQ ID NO: 10299 - DNA, 25 bp, Homo sapien
agtgtgagtaactacttcttttgac

SEQ ID NO: 10300 - DNA, 25 bp, Homo sapien
agtgtgagtaacaacttcttttgac

SEQ ID NO: 10301 - DNA, 25 bp, Homo sapien
ttttgacgtcaaacttttcgatgac

SEQ ID NO: 10302 - DNA, 25 bp, Homo sapien
ttttgacgtcaatcttttcgatgac

SEQ ID NO: 10303 - DNA, 25 bp, Homo sapien
gggtaggacttgaacctttcacatc

SEQ ID NO: 10304 - DNA, 25 bp, Homo sapien
gggtaggacttgtacctttcacatc

SEQ ID NO: 10305 - DNA, 25 bp, Homo sapien
actcgacgtgcgtccttgtacccga

SEQ ID NO: 10306 - DNA, 25 bp, Homo sapien
actcgacgtgcgaccttgtacccga

SEQ ID NO: 10307 - DNA, 25 bp, Homo sapien
ctaccgtgggtttctcttcgagact

SEQ ID NO: 10308 - DNA, 25 bp, Homo sapien
ctaccgtgggttactcttcgagact

SEQ ID NO: 10309 - DNA, 25 bp, Homo sapien
actactgtcggttttgattacgaac

SEQ ID NO: 10310 - DNA, 25 bp, Homo sapien
actactgtcggtattgattacgaac

SEQ ID NO: 10311 - DNA, 25 bp, Homo sapien
gacagatagggttgtcagttcccac

SEQ ID NO: 10312 - DNA, 25 bp, Homo sapien
gacagatagggtagtcagttcccac

SEQ ID NO: 10313 - DNA, 25 bp, Homo sapien
cgtacaagtggtgtcattataacat

SEQ ID NO: 10314 - DNA, 25 bp, Homo sapien
cgtacaagtggtctcattataacat

SEQ ID NO: 10315 - DNA, 25 bp, Homo sapien
aacagtcgacgctccgtctaacatt

SEQ ID NO: 10316 - DNA, 25 bp, Homo sapien
aacagtcgacgcaccgtctaacatt

SEQ ID NO: 10317 - DNA, 25 bp, Homo sapien
ggggttcgttcgtatttctctcctg

SEQ ID NO: 10318 - DNA, 25 bp, Homo sapien
ggggttcgttcgaatttctctcctg

SEQ ID NO: 10319 - DNA, 25 bp, Homo sapien
cggtttagtgtcaacttggtccctg

SEQ ID NO: 10320 - DNA, 25 bp, Homo sapien
cggtttagtgtctacttggtccctg

SEQ ID NO: 10321 - DNA, 25 bp, Homo sapien
gtctactcgtgctatttttacggtg

SEQ ID NO: 10322 - DNA, 25 bp, Homo sapien
gtctactcgtgcaatttttacggtg

SEQ ID NO: 10323 - DNA, 25 bp, Homo sapien
accccgttgagagtcttactagaac

SEQ ID NO: 10324 - DNA, 25 bp, Homo sapien
accccgttgagactcttactagaac

SEQ ID NO: 10325 - DNA, 25 bp, Homo sapien
tccctccgagacacttaacagagac

SEQ ID NO: 10326 - DNA, 25 bp, Homo sapien
tccctccgagactcttaacagagac

SEQ ID NO: 10327 - DNA, 25 bp, Homo sapien
tcaccgttccctgcaaagaggacgt

SEQ ID NO: 10328 - DNA, 25 bp, Homo sapien
tcaccgttccctccaaagaggacgt

SEQ ID NO: 10329 - DNA, 25 bp, Homo sapien
gacgacatcccttcttctaaaggtt

SEQ ID NO: 10330 - DNA, 25 bp, Homo sapien
gacgacatccctacttctaaaggtt

SEQ ID NO: 10331 - DNA, 25 bp, Homo sapien
ccgaagtgttttatcgactaaaatt

SEQ ID NO: 10332 - DNA, 25 bp, Homo sapien
ccgaagtgttttttcgactaaaatt

SEQ ID NO: 10333 - DNA, 25 bp, Homo sapien
tatacttctcttttgacaaggatac

SEQ ID NO: 10334 - DNA, 25 bp, Homo sapien
tatacttctcttatgacaaggatac

SEQ ID NO: 10335 - DNA, 25 bp, Homo sapien
ctatttctgtgtatgtcaatcgtgg

SEQ ID NO: 10336 - DNA, 25 bp, Homo sapien
ctatttctgtgtttgtcaatcgtgg

SEQ ID NO: 10337 - DNA, 25 bp, Homo sapien
cgtagcacctttctcctaagagggt

SEQ ID NO: 10338 - DNA, 25 bp, Homo sapien
cgtagcacctttgtcctaagagggt

SEQ ID NO: 10339 - DNA, 25 bp, Homo sapien
tgtcaacttacttgcacaagtggtt

SEQ ID NO: 10340 - DNA, 25 bp, Homo sapien
tgtcaacttactagcacaagtggtt

SEQ ID NO: 10341 - DNA, 25 bp, Homo sapien
gtcgaacaaccaacttaccggacct

SEQ ID NO: 10342 - DNA, 25 bp, Homo sapien
gtcgaacaaccatcttaccggacct

SEQ ID NO: 10343 - DNA, 25 bp, Homo sapien
attctccggtcctctgtatgacctt

SEQ ID NO: 10344 - DNA, 25 bp, Homo sapien
attctccggtccactgtatgacctt

SEQ ID NO: 10345 - DNA, 25 bp, Homo sapien
ggcacaattctctctcggagaacat

SEQ ID NO: 10346 - DNA, 25 bp, Homo sapien
ggcacaattctcactcggagaacat

SEQ ID NO: 10347 - DNA, 25 bp, Homo sapien
gaagagaattctctatcagtgaaac

SEQ ID NO: 10348 - DNA, 25 bp, Homo sapien
gaagagaattctgtatcagtgaaac

SEQ ID NO: 10349 - DNA, 25 bp, Homo sapien
gacgaggatcttgtaattagcacta

SEQ ID NO: 10350 - DNA, 25 bp, Homo sapien
gacgaggatcttctaattagcacta

SEQ ID NO: 10351 - DNA, 25 bp, Homo sapien
atggtttacgcctacggtagctatc

SEQ ID NO: 10352 - DNA, 25 bp, Homo sapien
atggtttacgccaacggtagctatc

SEQ ID NO: 10353 - DNA, 25 bp, Homo sapien
tgtatcttctacaccgggtcttcgt

SEQ ID NO: 10354 - DNA, 25 bp, Homo sapien
tgtatcttctactccgggtcttcgt

SEQ ID NO: 10355 - DNA, 25 bp, Homo sapien
tttattgtagaatccctgactacgg

SEQ ID NO: 10356 - DNA, 25 bp, Homo sapien
tttattgtagaaaccctgactacgg

SEQ ID NO: 10357 - DNA, 25 bp, Homo sapien
aattttgtagataaagtcctaaacc

SEQ ID NO: 10358 - DNA, 25 bp, Homo sapien
aattttgtagattaagtcctaaacc

SEQ ID NO: 10359 - DNA, 25 bp, Homo sapien
gtgttttagtccaccgacttaatgt

SEQ ID NO: 10360 - DNA, 25 bp, Homo sapien
gtgttttagtcctccgacttaatgt

SEQ ID NO: 10361 - DNA, 25 bp, Homo sapien
gactttagtcctgacacattatatg

SEQ ID NO: 10362 - DNA, 25 bp, Homo sapien
gactttagtcctcacacattatatg

SEQ ID NO: 10363 - DNA, 25 bp, Homo sapien
gtcttgactccaacgacaatcgtaa

SEQ ID NO: 10364 - DNA, 25 bp, Homo sapien
gtcttgactccatcgacaatcgtaa

SEQ ID NO: 10365 - DNA, 25 bp, Homo sapien
cctcgaactacagtgtaaaccgata

SEQ ID NO: 10366 - DNA, 25 bp, Homo sapien
cctcgaactacactgtaaaccgata

SEQ ID NO: 10367 - DNA, 25 bp, Homo sapien
ctgacactcgtccaacaagtgtagg

SEQ ID NO: 10368 - DNA, 25 bp, Homo sapien
ctgacactcgtcgaacaagtgtagg

SEQ ID NO: 10369 - DNA, 25 bp, Homo sapien
aagtactacatcgtcaacatttagg

SEQ ID NO: 10370 - DNA, 25 bp, Homo sapien
aagtactacatcctcaacatttagg

SEQ ID NO: 10371 - DNA, 25 bp, Homo sapien
tatgatacattttatcactgtccgg

SEQ ID NO: 10372 - DNA, 25 bp, Homo sapien
tatgatacatttaatcactgtccgg

SEQ ID NO: 10373 - DNA, 25 bp, Homo sapien
ggattgatctttacaactacccttg

SEQ ID NO: 10374 - DNA, 25 bp, Homo sapien
ggattgatcttttcaactacccttg

SEQ ID NO: 10375 - DNA, 25 bp, Homo sapien
agttgtggtggatcaaaccgttctt

SEQ ID NO: 10376 - DNA, 25 bp, Homo sapien
agttgtggtggaacaaaccgttctt

SEQ ID NO: 10377 - DNA, 25 bp, Homo sapien
caatggtgaagcaactaccgtcttg

SEQ ID NO: 10378 - DNA, 25 bp, Homo sapien
caatggtgaagctactaccgtcttg

SEQ ID NO: 10379 - DNA, 25 bp, Homo sapien
ccgaggtacggtgtcgtaccgtttg

SEQ ID NO: 10380 - DNA, 25 bp, Homo sapien
ccgaggtacggtctcgtaccgtttg

SEQ ID NO: 10381 - DNA, 25 bp, Homo sapien
tcacataacgtatatgaccttgtcg

SEQ ID NO: 10382 - DNA, 25 bp, Homo sapien
tcacataacgtaaatgaccttgtcg

SEQ ID NO: 10383 - DNA, 25 bp, Homo sapien
cctaagtcacagtaaagacttgcac

SEQ ID NO: 10384 - DNA, 25 bp, Homo sapien
cctaagtcacagaaaagacttgcac

SEQ ID NO: 10385 - DNA, 25 bp, Homo sapien
caccaaggacagtccgtacgggggc

SEQ ID NO: 10386 - DNA, 25 bp, Homo sapien
caccaaggacagaccgtacgggggc

SEQ ID NO: 10387 - DNA, 25 bp, Homo sapien
cataaaagaacgagggacgtcgact

SEQ ID NO: 10388 - DNA, 25 bp, Homo sapien
cataaaagaacgtgggacgtcgact

SEQ ID NO: 10389 - DNA, 25 bp, Homo sapien
tgtcacagagaccatgacttatctc

SEQ ID NO: 10390 - DNA, 25 bp, Homo sapien
tgtcacagagacgatgacttatctc

SEQ ID NO: 10391 - DNA, 25 bp, Homo sapien
gtgaaggacgcgtgacttcgtaccg

SEQ ID NO: 10392 - DNA, 25 bp, Homo sapien
gtgaaggacgcgagacttcgtaccg

SEQ ID NO: 10393 - DNA, 25 bp, Homo sapien
tctaacagtgaccaagacgttccac

SEQ ID NO: 10394 - DNA, 25 bp, Homo sapien
tctaacagtgacgaagacgttccac

SEQ ID NO: 10395 - DNA, 25 bp, Homo sapien
gtccggtcagacgacacgggttcga

SEQ ID NO: 10396 - DNA, 25 bp, Homo sapien
gtccggtcagaccacacgggttcga

SEQ ID NO: 10397 - DNA, 25 bp, Homo sapien
gttcgtcgtcccagcctggactcgg

SEQ ID NO: 10398 - DNA, 25 bp, Homo sapien
gttcgtcgtccctgcctggactcgg

SEQ ID NO: 10399 - DNA, 25 bp, Homo sapien
gaaaggtcgtcctccacggactccg

SEQ ID NO: 10400 - DNA, 25 bp, Homo sapien
gaaaggtcgtccaccacggactccg

SEQ ID NO: 10401 - DNA, 25 bp, Homo sapien
agactcgtcgacagacccccgtggt

SEQ ID NO: 10402 - DNA, 25 bp, Homo sapien
agactcgtcgactgacccccgtggt

SEQ ID NO: 10403 - DNA, 25 bp, Homo sapien
aggacaagactgtgacccgaccggg

SEQ ID NO: 10404 - DNA, 25 bp, Homo sapien
aggacaagactgagacccgaccggg

SEQ ID NO: 10405 - DNA, 25 bp, Homo sapien
aggaactccacagacacagacgggg

SEQ ID NO: 10406 - DNA, 25 bp, Homo sapien
aggaactccacacacacagacgggg

SEQ ID NO: 10407 - DNA, 25 bp, Homo sapien
cgggacaccaacgaccacaaggcga

SEQ ID NO: 10408 - DNA, 25 bp, Homo sapien
cgggacaccaaccaccacaaggcga

SEQ ID NO: 10409 - DNA, 25 bp, Homo sapien
ggacccgttccgtccgaatcgtcga

SEQ ID NO: 10410 - DNA, 25 bp, Homo sapien
ggacccgttccgaccgaatcgtcga

SEQ ID NO: 10411 - DNA, 25 bp, Homo sapien
cacatacgtatgatgccgattcctc

SEQ ID NO: 10412 - DNA, 25 bp, Homo sapien
cacatacgtatgttgccgattcctc

SEQ ID NO: 10413 - DNA, 25 bp, Homo sapien
cataagaagacctgatacgactatc

SEQ ID NO: 10414 - DNA, 25 bp, Homo sapien
cataagaagaccagatacgactatc

SEQ ID NO: 10415 - DNA, 25 bp, Homo sapien
gaaccggacttacgagtctcgtccc

SEQ ID NO: 10416 - DNA, 25 bp, Homo sapien
gaaccggacttaggagtctcgtccc

SEQ ID NO: 10417 - DNA, 25 bp, Homo sapien
tttacggaacttggaccacgcgacc

SEQ ID NO: 10418 - DNA, 25 bp, Homo sapien
tttacggaacttcgaccacgcgacc

SEQ ID NO: 10419 - DNA, 25 bp, Homo sapien
aagaacgacgagagaccacgttatc

SEQ ID NO: 10420 - DNA, 25 bp, Homo sapien
aagaacgacgagtgaccacgttatc

SEQ ID NO: 10421 - DNA, 25 bp, Homo sapien
aggacaacggactcgttgtgctaca

SEQ ID NO: 10422 - DNA, 25 bp, Homo sapien
aggacaacggacacgttgtgctaca

SEQ ID NO: 10423 - DNA, 25 bp, Homo sapien
tatggtgtagggtcttttctgtctc

SEQ ID NO: 10424 - DNA, 25 bp, Homo sapien
tatggtgtagggacttttctgtctc

SEQ ID NO: 10425 - DNA, 25 bp, Homo sapien
ttgtgggttttgtcctctctcgacg

SEQ ID NO: 10426 - DNA, 25 bp, Homo sapien
ttgtgggttttgacctctctcgacg

SEQ ID NO: 10427 - DNA, 25 bp, Homo sapien
tttggatctctcgactgttcggtcc

SEQ ID NO: 10428 - DNA, 25 bp, Homo sapien
tttggatctctccactgttcggtcc

SEQ ID NO: 10429 - DNA, 25 bp, Homo sapien
ggatactttccttacatgtgtctac

SEQ ID NO: 10430 - DNA, 25 bp, Homo sapien
ggatactttcctaacatgtgtctac

SEQ ID NO: 10431 - DNA, 25 bp, Homo sapien
gatttgtcgtataggtcgactaact

SEQ ID NO: 10432 - DNA, 25 bp, Homo sapien
gatttgtcgtattggtcgactaact

SEQ ID NO: 10433 - DNA, 25 bp, Homo sapien
cgtccctgtgtatccgggcgtgtac

SEQ ID NO: 10434 - DNA, 25 bp, Homo sapien
cgtccctgtgtaaccgggcgtgtac

SEQ ID NO: 10435 - DNA, 25 bp, Homo sapien
atatgaactgtgaaacctaccgaag

SEQ ID NO: 10436 - DNA, 25 bp, Homo sapien
atatgaactgtgtaacctaccgaag

SEQ ID NO: 10437 - DNA, 25 bp, Homo sapien
ttctgcctcgtggtccacgtcccac

SEQ ID NO: 10438 - DNA, 25 bp, Homo sapien
ttctgcctcgtgctccacgtcccac

SEQ ID NO: 10439 - DNA, 25 bp, Homo sapien
gtgtcctgtcgttcccgtcgaacac

SEQ ID NO: 10440 - DNA, 25 bp, Homo sapien
gtgtcctgtcgtacccgtcgaacac

SEQ ID NO: 10441 - DNA, 25 bp, Homo sapien
gagttaccttacgtacggggataat

SEQ ID NO: 10442 - DNA, 25 bp, Homo sapien
gagttaccttacctacggggataat

SEQ ID NO: 10443 - DNA, 25 bp, Homo sapien
agaagaagtcccatcggtgaagaag

SEQ ID NO: 10444 - DNA, 25 bp, Homo sapien
agaagaagtcccttcggtgaagaag

SEQ ID NO: 10445 - DNA, 25 bp, Homo sapien
taaaagagtcggtgacatgttcaac

SEQ ID NO: 10446 - DNA, 25 bp, Homo sapien
taaaagagtcggagacatgttcaac

SEQ ID NO: 10447 - DNA, 25 bp, Homo sapien
acacagaaggggacgagggaccctc

SEQ ID NO: 10448 - DNA, 25 bp, Homo sapien
acacagaaggggtcgagggaccctc

SEQ ID NO: 10449 - DNA, 25 bp, Homo sapien
gaagaagacgtccacagagaccacc

SEQ ID NO: 10450 - DNA, 25 bp, Homo sapien
gaagaagacgtcgacagagaccacc

SEQ ID NO: 10451 - DNA, 25 bp, Homo sapien
ctgcaagaataagaaggcccgtacg

SEQ ID NO: 10452 - DNA, 25 bp, Homo sapien
ctgcaagaataacaaggcccgtacg

SEQ ID NO: 10453 - DNA, 25 bp, Homo sapien
ccgaaccggtcacgagaaccgcagg

SEQ ID NO: 10454 - DNA, 25 bp, Homo sapien
ccgaaccggtcaggagaaccgcagg

SEQ ID NO: 10455 - DNA, 25 bp, Homo sapien
tcccgagccatcaggagggcctaga

SEQ ID NO: 10456 - DNA, 25 bp, Homo sapien
tcccgagccatctggagggcctaga

SEQ ID NO: 10457 - DNA, 25 bp, Homo sapien
caacagttcgttgtctcgacataga

SEQ ID NO: 10458 - DNA, 25 bp, Homo sapien
caacagttcgttctctcgacataga

SEQ ID NO: 10459 - DNA, 25 bp, Homo sapien
acgactcgtggttcgtctccctcga

SEQ ID NO: 10460 - DNA, 25 bp, Homo sapien
acgactcgtggtacgtctccctcga

SEQ ID NO: 10461 - DNA, 25 bp, Homo sapien
ggcgtcactgcttctgttttcgtac

SEQ ID NO: 10462 - DNA, 25 bp, Homo sapien
ggcgtcactgctactgttttcgtac

SEQ ID NO: 10463 - DNA, 25 bp, Homo sapien
cgagaggatccgtgtcccacgggtc

SEQ ID NO: 10464 - DNA, 25 bp, Homo sapien
cgagaggatccgagtcccacgggtc

SEQ ID NO: 10465 - DNA, 25 bp, Homo sapien
gacatgtattcgagttcactgtttg

SEQ ID NO: 10466 - DNA, 25 bp, Homo sapien
gacatgtattcgtgttcactgtttg

SEQ ID NO: 10467 - DNA, 25 bp, Homo sapien
aaaccggttttgtactttatcgtac

SEQ ID NO: 10468 - DNA, 25 bp, Homo sapien
aaaccggttttgaactttatcgtac

SEQ ID NO: 10469 - DNA, 25 bp, Homo sapien
atgttttccaattctacgtcgtacg

SEQ ID NO: 10470 - DNA, 25 bp, Homo sapien
atgttttccaatactacgtcgtacg

SEQ ID NO: 10471 - DNA, 25 bp, Homo sapien
ttccatttgttcaaagttctgtctg

SEQ ID NO: 10472 - DNA, 25 bp, Homo sapien
ttccatttgttctaagttctgtctg

SEQ ID NO: 10473 - DNA, 25 bp, Homo sapien
ttcttattcgtaaggtttcgtcgtg

SEQ ID NO: 10474 - DNA, 25 bp, Homo sapien
ttcttattcgtatggtttcgtcgtg

SEQ ID NO: 10475 - DNA, 25 bp, Homo sapien
gttattatgtctcctgtgtgtgtcg

SEQ ID NO: 10476 - DNA, 25 bp, Homo sapien
gttattatgtctgctgtgtgtgtcg

SEQ ID NO: 10477 - DNA, 25 bp, Homo sapien
atttctactagaggtcgtgtcgtct

SEQ ID NO: 10478 - DNA, 25 bp, Homo sapien
atttctactagacgtcgtgtcgtct

SEQ ID NO: 10479 - DNA, 25 bp, Homo sapien
ccgatcgatacgtcctcggtgcgcg

SEQ ID NO: 10480 - DNA, 25 bp, Homo sapien
ccgatcgatacgacctcggtgcgcg

SEQ ID NO: 10481 - DNA, 25 bp, Homo sapien
caccggtcgaaggacctcgggtccg

SEQ ID NO: 10482 - DNA, 25 bp, Homo sapien
caccggtcgaagcacctcgggtccg

SEQ ID NO: 10483 - DNA, 25 bp, Homo sapien
gttacgagaaataaacaccgcaaat

SEQ ID NO: 10484 - DNA, 25 bp, Homo sapien
gttacgagaaattaacaccgcaaat

SEQ ID NO: 10485 - DNA, 25 bp, Homo sapien
agtgcacagtacattgatggcttca

SEQ ID NO: 10486 - DNA, 25 bp, Homo sapien
agtgcacagtactttgatggcttca

SEQ ID NO: 10487 - DNA, 25 bp, Homo sapien
atacgtgacgatcagtttgttgtac

SEQ ID NO: 10488 - DNA, 25 bp, Homo sapien
atacgtgacgatgagtttgttgtac

SEQ ID NO: 10489 - DNA, 25 bp, Homo sapien
gagtcagagagtagggtgtatactt

SEQ ID NO: 10490 - DNA, 25 bp, Homo sapien
gagtcagagagttgggtgtatactt

SEQ ID NO: 10491 - DNA, 25 bp, Homo sapien
gtgtcgaagtgtaacacttcctccg

SEQ ID NO: 10492 - DNA, 25 bp, Homo sapien
gtgtcgaagtgttacacttcctccg

SEQ ID NO: 10493 - DNA, 25 bp, Homo sapien
gttacgtacagttccttctctaccc

SEQ ID NO: 10494 - DNA, 25 bp, Homo sapien
gttacgtacagtaccttctctaccc

SEQ ID NO: 10495 - DNA, 25 bp, Homo sapien
ttctacgtcttcaccgtgacgacac

SEQ ID NO: 10496 - DNA, 25 bp, Homo sapien
ttctacgtcttctccgtgacgacac

SEQ ID NO: 10497 - DNA, 25 bp, Homo sapien
tagacgtgtgtcaacacgaaatcct

SEQ ID NO: 10498 - DNA, 25 bp, Homo sapien
tagacgtgtgtctacacgaaatcct

SEQ ID NO: 10499 - DNA, 25 bp, Homo sapien
cgagactgtagttttcacctaggtt

SEQ ID NO: 10500 - DNA, 25 bp, Homo sapien
cgagactgtagtattcacctaggtt

SEQ ID NO: 10501 - DNA, 25 bp, Homo sapien
tacagacttctccaaacccgcgtgt

SEQ ID NO: 10502 - DNA, 25 bp, Homo sapien
tacagacttctcgaaacccgcgtgt

SEQ ID NO: 10503 - DNA, 25 bp, Homo sapien
accctctactagtctcctctgtggt

SEQ ID NO: 10504 - DNA, 25 bp, Homo sapien
accctctactagactcctctgtggt

SEQ ID NO: 10505 - DNA, 25 bp, Homo sapien
tcaatgtcccgaggatcccgggtct

SEQ ID NO: 10506 - DNA, 25 bp, Homo sapien
tcaatgtcccgacgatcccgggtct

SEQ ID NO: 10507 - DNA, 25 bp, Homo sapien
tccgtttctcttttcgaaggtctac

SEQ ID NO: 10508 - DNA, 25 bp, Homo sapien
tccgtttctcttatcgaaggtctac

SEQ ID NO: 10509 - DNA, 25 bp, Homo sapien
actttactgtagtgtccaggtcact

SEQ ID NO: 10510 - DNA, 25 bp, Homo sapien
actttactgtagagtccaggtcact

SEQ ID NO: 10511 - DNA, 25 bp, Homo sapien
ccgacctccctaggagcagcggtga

SEQ ID NO: 10512 - DNA, 25 bp, Homo sapien
ccgacctccctacgagcagcggtga

SEQ ID NO: 10513 - DNA, 25 bp, Homo sapien
gtcacacctgtgacctttggcgcac

SEQ ID NO: 10514 - DNA, 25 bp, Homo sapien
gtcacacctgtgtcctttggcgcac

SEQ ID NO: 10515 - DNA, 25 bp, Homo sapien
atctcactccagtccgaaaaaccgg

SEQ ID NO: 10516 - DNA, 25 bp, Homo sapien
atctcactccagaccgaaaaaccgg

SEQ ID NO: 10517 - DNA, 25 bp, Homo sapien
acagtcgacactccagaaggagtcc

SEQ ID NO: 10518 - DNA, 25 bp, Homo sapien
acagtcgacactgcagaaggagtcc

SEQ ID NO: 10519 - DNA, 25 bp, Homo sapien
tagggacaccgtagaagtacctcgg

SEQ ID NO: 10520 - DNA, 25 bp, Homo sapien
tagggacaccgttgaagtacctcgg

SEQ ID NO: 10521 - DNA, 25 bp, Homo sapien
tcgtcagaaaccactgaacctcagg

SEQ ID NO: 10522 - DNA, 25 bp, Homo sapien
tcgtcagaaacctctgaacctcagg

SEQ ID NO: 10523 - DNA, 25 bp, Homo sapien
ctcagtgcacgctctacaatccagg

SEQ ID NO: 10524 - DNA, 25 bp, Homo sapien
ctcagtgcacgcactacaatccagg

SEQ ID NO: 10525 - DNA, 25 bp, Homo sapien
cagcgtggagacttctggaaccagg

SEQ ID NO: 10526 - DNA, 25 bp, Homo sapien
cagcgtggagacatctggaaccagg

SEQ ID NO: 10527 - DNA, 25 bp, Homo sapien
ctccactcgaaggtacacgtacagg

SEQ ID NO: 10528 - DNA, 25 bp, Homo sapien
ctccactcgaagctacacgtacagg

SEQ ID NO: 10529 - DNA, 25 bp, Homo sapien
attccacaacggtctcctctgactg

SEQ ID NO: 10530 - DNA, 25 bp, Homo sapien
attccacaacggactcctctgactg

SEQ ID NO: 10531 - DNA, 25 bp, Homo sapien
ctttgacagggtccacgattcactc

SEQ ID NO: 10532 - DNA, 25 bp, Homo sapien
ctttgacagggtgcacgattcactc

SEQ ID NO: 10533 - DNA, 25 bp, Homo sapien
tcttcccgcaggtcgtgtcgtcctt

SEQ ID NO: 10534 - DNA, 25 bp, Homo sapien
tcttcccgcaggacgtgtcgtcctt

SEQ ID NO: 10535 - DNA, 25 bp, Homo sapien
ctcttcgactccagacgtccggtga

SEQ ID NO: 10536 - DNA, 25 bp, Homo sapien
ctcttcgactcctgacgtccggtga

SEQ ID NO: 10537 - DNA, 25 bp, Homo sapien
tcacagcacgttcagtcgtttgacg

SEQ ID NO: 10538 - DNA, 25 bp, Homo sapien
tcacagcacgttgagtcgtttgacg

SEQ ID NO: 10539 - DNA, 25 bp, Homo sapien
tggtttgttcgatggtcgtctcggg

SEQ ID NO: 10540 - DNA, 25 bp, Homo sapien
tggtttgttcgaaggtcgtctcggg

SEQ ID NO: 10541 - DNA, 25 bp, Homo sapien
aaggtcctccagagtgtcgtacttt

SEQ ID NO: 10542 - DNA, 25 bp, Homo sapien
aaggtcctccagtgtgtcgtacttt

SEQ ID NO: 10543 - DNA, 25 bp, Homo sapien
ggtacataaacgttgtcgtctcttt

SEQ ID NO: 10544 - DNA, 25 bp, Homo sapien
ggtacataaacgatgtcgtctcttt

SEQ ID NO: 10545 - DNA, 25 bp, Homo sapien
agtaacagtacactagtccctcttg

SEQ ID NO: 10546 - DNA, 25 bp, Homo sapien
agtaacagtacagtagtccctcttg

SEQ ID NO: 10547 - DNA, 25 bp, Homo sapien
ctcatcgtaggagtcctcatcacat

SEQ ID NO: 10548 - DNA, 25 bp, Homo sapien
ctcatcgtaggactcctcatcacat

SEQ ID NO: 10549 - DNA, 25 bp, Homo sapien
acccagtataggtgacagaccctaa

SEQ ID NO: 10550 - DNA, 25 bp, Homo sapien
acccagtataggagacagaccctaa

SEQ ID NO: 10551 - DNA, 25 bp, Homo sapien
gtagaacttccgaaagaaccaccac

SEQ ID NO: 10552 - DNA, 25 bp, Homo sapien
gtagaacttccgtaagaaccaccac

SEQ ID NO: 10553 - DNA, 25 bp, Homo sapien
cgttctgaccacaaaaacgacgaga

SEQ ID NO: 10554 - DNA, 25 bp, Homo sapien
cgttctgaccactaaaacgacgaga

SEQ ID NO: 10555 - DNA, 25 bp, Homo sapien
ctatctgtacccataccggagattt

SEQ ID NO: 10556 - DNA, 25 bp, Homo sapien
ctatctgtacccttaccggagattt

SEQ ID NO: 10557 - DNA, 25 bp, Homo sapien
tcttatcctacttgggtacgagttt

SEQ ID NO: 10558 - DNA, 25 bp, Homo sapien
tcttatcctactagggtacgagttt

SEQ ID NO: 10559 - DNA, 25 bp, Homo sapien
aacggagcacttacagtattttcgt

SEQ ID NO: 10560 - DNA, 25 bp, Homo sapien
aacggagcactttcagtattttcgt

SEQ ID NO: 10561 - DNA, 25 bp, Homo sapien
ttggacgaattctctgtattgtctc

SEQ ID NO: 10562 - DNA, 25 bp, Homo sapien
ttggacgaattcactgtattgtctc

SEQ ID NO: 10563 - DNA, 25 bp, Homo sapien
cggcacaactatcaacgtcaaggcc

SEQ ID NO: 10564 - DNA, 25 bp, Homo sapien
cggcacaactatgaacgtcaaggcc

SEQ ID NO: 10565 - DNA, 25 bp, Homo sapien
agtcaagtcaacgagactcaatctc

SEQ ID NO: 10566 - DNA, 25 bp, Homo sapien
agtcaagtcaaccagactcaatctc

SEQ ID NO: 10567 - DNA, 25 bp, Homo sapien
taacggaccgacgaccgaggtactc

SEQ ID NO: 10568 - DNA, 25 bp, Homo sapien
taacggaccgaccaccgaggtactc

SEQ ID NO: 10569 - DNA, 25 bp, Homo sapien
ctataagtcggatccagttggggcg

SEQ ID NO: 10570 - DNA, 25 bp, Homo sapien
ctataagtcggaaccagttggggcg

SEQ ID NO: 10571 - DNA, 25 bp, Homo sapien
gtagtacggggtttccttttgttcc

SEQ ID NO: 10572 - DNA, 25 bp, Homo sapien
gtagtacggggtatccttttgttcc

SEQ ID NO: 10573 - DNA, 25 bp, Homo sapien
tctgttcacatttgtttgagtacta

SEQ ID NO: 10574 - DNA, 25 bp, Homo sapien
tctgttcacattagtttgagtacta

SEQ ID NO: 10575 - DNA, 25 bp, Homo sapien
catcgagtcgtataagactttttat

SEQ ID NO: 10576 - DNA, 25 bp, Homo sapien
catcgagtcgtaaaagactttttat

SEQ ID NO: 10577 - DNA, 25 bp, Homo sapien
gttatacacgttgagtcacacaccg

SEQ ID NO: 10578 - DNA, 25 bp, Homo sapien
gttatacacgttcagtcacacaccg

SEQ ID NO: 10579 - DNA, 25 bp, Homo sapien
gaggacatcgtgacatccgtgtgtg

SEQ ID NO: 10580 - DNA, 25 bp, Homo sapien
gaggacatcgtgtcatccgtgtgtg

SEQ ID NO: 10581 - DNA, 25 bp, Homo sapien
tcctctacggcgagaaccgttagtg

SEQ ID NO: 10582 - DNA, 25 bp, Homo sapien
tcctctacggcgtgaaccgttagtg

SEQ ID NO: 10583 - DNA, 25 bp, Homo sapien
tactttattcactgattcgttgtag

SEQ ID NO: 10584 - DNA, 25 bp, Homo sapien
tactttattcacagattcgttgtag

SEQ ID NO: 10585 - DNA, 25 bp, Homo sapien
tgaccatgaagtcacgataccttta

SEQ ID NO: 10586 - DNA, 25 bp, Homo sapien
tgaccatgaagtgacgataccttta

SEQ ID NO: 10587 - DNA, 25 bp, Homo sapien
gacctcaatcgtctgtcctactcag

SEQ ID NO: 10588 - DNA, 25 bp, Homo sapien
gacctcaatcgtgtgtcctactcag

SEQ ID NO: 10589 - DNA, 25 bp, Homo sapien
tggggaatcctttacgctagacact

SEQ ID NO: 10590 - DNA, 25 bp, Homo sapien
tggggaatccttaacgctagacact

SEQ ID NO: 10591 - DNA, 25 bp, Homo sapien
tcgggggtctaccttcagtctcacc

SEQ ID NO: 10592 - DNA, 25 bp, Homo sapien
tcgggggtctacgttcagtctcacc

SEQ ID NO: 10593 - DNA, 25 bp, Homo sapien
gttcttccttcagtccagttgagtt

SEQ ID NO: 10594 - DNA, 25 bp, Homo sapien
gttcttccttcactccagttgagtt

SEQ ID NO: 10595 - DNA, 25 bp, Homo sapien
gtttatctaggctttccgaggggtc

SEQ ID NO: 10596 - DNA, 25 bp, Homo sapien
gtttatctaggcattccgaggggtc

SEQ ID NO: 10597 - DNA, 25 bp, Homo sapien
ctgtaagacctcctcaggactactc

SEQ ID NO: 10598 - DNA, 25 bp, Homo sapien
ctgtaagacctcgtcaggactactc

SEQ ID NO: 10599 - DNA, 25 bp, Homo sapien
ggtaagaacatcctcagttcgacag

SEQ ID NO: 10600 - DNA, 25 bp, Homo sapien
ggtaagaacatcgtcagttcgacag

SEQ ID NO: 10601 - DNA, 25 bp, Homo sapien
tctctgaagcatgtcacgttgtcac

SEQ ID NO: 10602 - DNA, 25 bp, Homo sapien
tctctgaagcatctcacgttgtcac

SEQ ID NO: 10603 - DNA, 25 bp, Homo sapien
tccagggacgcgtcgggactcttga

SEQ ID NO: 10604 - DNA, 25 bp, Homo sapien
tccagggacgcgacgggactcttga

SEQ ID NO: 10605 - DNA, 25 bp, Homo sapien
tctcggaggcagaggtcgacacccc

SEQ ID NO: 10606 - DNA, 25 bp, Homo sapien
tctcggaggcagtggtcgacacccc

SEQ ID NO: 10607 - DNA, 25 bp, Homo sapien
atggcaaccaagttcctaccgttcc

SEQ ID NO: 10608 - DNA, 25 bp, Homo sapien
atggcaaccaagatcctaccgttcc

SEQ ID NO: 10609 - DNA, 25 bp, Homo sapien
aaaacacttaatcctacttacactg

SEQ ID NO: 10610 - DNA, 25 bp, Homo sapien
aaaacacttaatgctacttacactg

SEQ ID NO: 10611 - DNA, 25 bp, Homo sapien
tgcacgagagtcatgttgtttgtcg

SEQ ID NO: 10612 - DNA, 25 bp, Homo sapien
tgcacgagagtcttgttgtttgtcg

SEQ ID NO: 10613 - DNA, 25 bp, Homo sapien
catgaccatatcttgtcagattaag

SEQ ID NO: 10614 - DNA, 25 bp, Homo sapien
catgaccatatcatgtcagattaag

SEQ ID NO: 10615 - DNA, 25 bp, Homo sapien
agtaacaattctttcaacgtccgtg

SEQ ID NO: 10616 - DNA, 25 bp, Homo sapien
agtaacaattctatcaacgtccgtg

SEQ ID NO: 10617 - DNA, 25 bp, Homo sapien
aaccgattctcgattccggtatggt

SEQ ID NO: 10618 - DNA, 25 bp, Homo sapien
aaccgattctcgtttccggtatggt

SEQ ID NO: 10619 - DNA, 25 bp, Homo sapien
gtttaaagtctaaataccgtttgtc

SEQ ID NO: 10620 - DNA, 25 bp, Homo sapien
gtttaaagtctatataccgtttgtc

SEQ ID NO: 10621 - DNA, 25 bp, Homo sapien
taatatcgtagcaaacgtcatcgtt

SEQ ID NO: 10622 - DNA, 25 bp, Homo sapien
taatatcgtagctaacgtcatcgtt

SEQ ID NO: 10623 - DNA, 25 bp, Homo sapien
atacgaagtgtccattacctatgtt

SEQ ID NO: 10624 - DNA, 25 bp, Homo sapien
atacgaagtgtcgattacctatgtt

SEQ ID NO: 10625 - DNA, 25 bp, Homo sapien
aaaaaaggcgtcgacttctgtgttg

SEQ ID NO: 10626 - DNA, 25 bp, Homo sapien
aaaaaaggcgtccacttctgtgttg

SEQ ID NO: 10627 - DNA, 25 bp, Homo sapien
agtaagaggctaaccgccaggtagg

SEQ ID NO: 10628 - DNA, 25 bp, Homo sapien
agtaagaggctatccgccaggtagg

SEQ ID NO: 10629 - DNA, 25 bp, Homo sapien
gtagagactacgacccttcaggagg

SEQ ID NO: 10630 - DNA, 25 bp, Homo sapien
gtagagactacgtcccttcaggagg

SEQ ID NO: 10631 - DNA, 25 bp, Homo sapien
aagtgtctcgttccacctactgggg

SEQ ID NO: 10632 - DNA, 25 bp, Homo sapien
aagtgtctcgttgcacctactgggg

SEQ ID NO: 10633 - DNA, 25 bp, Homo sapien
gggtcactaggactcttgtcgaagt

SEQ ID NO: 10634 - DNA, 25 bp, Homo sapien
gggtcactaggagtcttgtcgaagt

SEQ ID NO: 10635 - DNA, 25 bp, Homo sapien
gaaggtcagaggattccgtgtcata

SEQ ID NO: 10636 - DNA, 25 bp, Homo sapien
gaaggtcagaggtttccgtgtcata

SEQ ID NO: 10637 - DNA, 25 bp, Homo sapien
aagtgctcgagttgttcacgtcaaa

SEQ ID NO: 10638 - DNA, 25 bp, Homo sapien
aagtgctcgagtagttcacgtcaaa

SEQ ID NO: 10639 - DNA, 25 bp, Homo sapien
gacggggtcctttacacacgggtta

SEQ ID NO: 10640 - DNA, 25 bp, Homo sapien
gacggggtccttaacacacgggtta

SEQ ID NO: 10641 - DNA, 25 bp, Homo sapien
gattcttacgactgacgagcgaagt

SEQ ID NO: 10642 - DNA, 25 bp, Homo sapien
gattcttacgacagacgagcgaagt

SEQ ID NO: 10643 - DNA, 25 bp, Homo sapien
tcggaccacaaccacgtacacgaaa

SEQ ID NO: 10644 - DNA, 25 bp, Homo sapien
tcggaccacaacgacgtacacgaaa

SEQ ID NO: 10645 - DNA, 25 bp, Homo sapien
cttctggcctcgaaaggtcagaaat

SEQ ID NO: 10646 - DNA, 25 bp, Homo sapien
cttctggcctcgtaaggtcagaaat

SEQ ID NO: 10647 - DNA, 25 bp, Homo sapien
cgtttggtttcgtaaagtccggaga

SEQ ID NO: 10648 - DNA, 25 bp, Homo sapien
cgtttggtttcgaaaagtccggaga

SEQ ID NO: 10649 - DNA, 25 bp, Homo sapien
aacaccggtttccaaagacccgaca

SEQ ID NO: 10650 - DNA, 25 bp, Homo sapien
aacaccggtttcgaaagacccgaca

SEQ ID NO: 10651 - DNA, 25 bp, Homo sapien
aagggggttccgacacgacccgcac

SEQ ID NO: 10652 - DNA, 25 bp, Homo sapien
aagggggttccgtcacgacccgcac

SEQ ID NO: 10653 - DNA, 25 bp, Homo sapien
gctaatgttctcgacaaccagtcct

SEQ ID NO: 10654 - DNA, 25 bp, Homo sapien
gctaatgttctccacaaccagtcct

SEQ ID NO: 10655 - DNA, 25 bp, Homo sapien
tgaacgtccccgtacctcagtctat

SEQ ID NO: 10656 - DNA, 25 bp, Homo sapien
tgaacgtccccgaacctcagtctat

SEQ ID NO: 10657 - DNA, 25 bp, Homo sapien
atgaaccacggcacgtcactccgtt

SEQ ID NO: 10658 - DNA, 25 bp, Homo sapien
atgaaccacggctcgtcactccgtt

SEQ ID NO: 10659 - DNA, 25 bp, Homo sapien
gggagaccgaggtctaacccgtgtt

SEQ ID NO: 10660 - DNA, 25 bp, Homo sapien
gggagaccgaggactaacccgtgtt

SEQ ID NO: 10661 - DNA, 25 bp, Homo sapien
gaatgtccagggaaactactgactt

SEQ ID NO: 10662 - DNA, 25 bp, Homo sapien
gaatgtccagggtaactactgactt

SEQ ID NO: 10663 - DNA, 25 bp, Homo sapien
gtgactccccggtgtcgtaacttcc

SEQ ID NO: 10664 - DNA, 25 bp, Homo sapien
gtgactccccggagtcgtaacttcc

SEQ ID NO: 10665 - DNA, 25 bp, Homo sapien
accagaccccggagtctctaaacta

SEQ ID NO: 10666 - DNA, 25 bp, Homo sapien
accagaccccggtgtctctaaacta

SEQ ID NO: 10667 - DNA, 25 bp, Homo sapien
gaggggaagagttctctcctatcga

SEQ ID NO: 10668 - DNA, 25 bp, Homo sapien
gaggggaagagtactctcctatcga

SEQ ID NO: 10669 - DNA, 25 bp, Homo sapien
gacggtgtccatgtactataattga

SEQ ID NO: 10670 - DNA, 25 bp, Homo sapien
gacggtgtccatctactataattga

SEQ ID NO: 10671 - DNA, 25 bp, Homo sapien
aaacttcccagtatagttaccatgg

SEQ ID NO: 10672 - DNA, 25 bp, Homo sapien
aaacttcccagtttagttaccatgg

SEQ ID NO: 10673 - DNA, 25 bp, Homo sapien
gacttcacccttgtgtcctaagagt

SEQ ID NO: 10674 - DNA, 25 bp, Homo sapien
gacttcacccttctgtcctaagagt

SEQ ID NO: 10675 - DNA, 25 bp, Homo sapien
gtcttacccacttttacgtaaatga

SEQ ID NO: 10676 - DNA, 25 bp, Homo sapien
gtcttacccactattacgtaaatga

SEQ ID NO: 10677 - DNA, 25 bp, Homo sapien
cgtttcctgtgtgtgcaagtgtgta

SEQ ID NO: 10678 - DNA, 25 bp, Homo sapien
cgtttcctgtgtctgcaagtgtgta

SEQ ID NO: 10679 - DNA, 25 bp, Homo sapien
gtatttactctggtttccaagttta

SEQ ID NO: 10680 - DNA, 25 bp, Homo sapien
gtatttactctgctttccaagttta

SEQ ID NO: 10681 - DNA, 25 bp, Homo sapien
ggcccaacgcggtccgacagtatca

SEQ ID NO: 10682 - DNA, 25 bp, Homo sapien
ggcccaacgcggaccgacagtatca

SEQ ID NO: 10683 - DNA, 25 bp, Homo sapien
gacccggtcgggaaactaaggacac

SEQ ID NO: 10684 - DNA, 25 bp, Homo sapien
gacccggtcgggtaactaaggacac

SEQ ID NO: 10685 - DNA, 25 bp, Homo sapien
taacatcgtgggtgtgtctatggcc

SEQ ID NO: 10686 - DNA, 25 bp, Homo sapien
taacatcgtgggagtgtctatggcc

SEQ ID NO: 10687 - DNA, 25 bp, Homo sapien
ttactagaccgagactttgtttcct

SEQ ID NO: 10688 - DNA, 25 bp, Homo sapien
ttactagaccgacactttgtttcct

SEQ ID NO: 10689 - DNA, 25 bp, Homo sapien
taaagtagacagacatttgttccac

SEQ ID NO: 10690 - DNA, 25 bp, Homo sapien
taaagtagacagtcatttgttccac

SEQ ID NO: 10691 - DNA, 25 bp, Homo sapien
tgaggtcttaatgctcttattctca

SEQ ID NO: 10692 - DNA, 25 bp, Homo sapien
tgaggtcttaatcctcttattctca

SEQ ID NO: 10693 - DNA, 25 bp, Homo sapien
gagattaaactagattttctcgacg

SEQ ID NO: 10694 - DNA, 25 bp, Homo sapien
gagattaaactacattttctcgacg

SEQ ID NO: 10695 - DNA, 25 bp, Homo sapien
ggttagacacaaataacttatacag

SEQ ID NO: 10696 - DNA, 25 bp, Homo sapien
ggttagacacaattaacttatacag

SEQ ID NO: 10697 - DNA, 25 bp, Homo sapien
ttcagggtctacttcccactgtccg

SEQ ID NO: 10698 - DNA, 25 bp, Homo sapien
ttcagggtctacatcccactgtccg

SEQ ID NO: 10699 - DNA, 25 bp, Homo sapien
gtcggtcaaaggtgacccttctcaa

SEQ ID NO: 10700 - DNA, 25 bp, Homo sapien
gtcggtcaaaggagacccttctcaa

SEQ ID NO: 10701 - DNA, 25 bp, Homo sapien
cgaggacgagttacccgcgtccgaa

SEQ ID NO: 10702 - DNA, 25 bp, Homo sapien
cgaggacgagtttcccgcgtccgaa

SEQ ID NO: 10703 - DNA, 25 bp, Homo sapien
ccgtgacatggtccacaccttctat

SEQ ID NO: 10704 - DNA, 25 bp, Homo sapien
ccgtgacatggtgcacaccttctat

SEQ ID NO: 10705 - DNA, 25 bp, Homo sapien
aggaggttcgtctacgtccgacagt

SEQ ID NO: 10706 - DNA, 25 bp, Homo sapien
aggaggttcgtcaacgtccgacagt

SEQ ID NO: 10707 - DNA, 25 bp, Homo sapien
aggaggtcgacgtgtagtacgtcca

SEQ ID NO: 10708 - DNA, 25 bp, Homo sapien
aggaggtcgacgagtagtacgtcca

SEQ ID NO: 10709 - DNA, 25 bp, Homo sapien
ttggtatagtatccattgttcacac

SEQ ID NO: 10710 - DNA, 25 bp, Homo sapien
ttggtatagtatgcattgttcacac

SEQ ID NO: 10711 - DNA, 25 bp, Homo sapien
aggtaacgacggaggctgtcactgt

SEQ ID NO: 10712 - DNA, 25 bp, Homo sapien
aggtaacgacggtggctgtcactgt

SEQ ID NO: 10713 - DNA, 25 bp, Homo sapien
aagacaagtcaaggacggcctcctc

SEQ ID NO: 10714 - DNA, 25 bp, Homo sapien
aagacaagtcaacgacggcctcctc

SEQ ID NO: 10715 - DNA, 25 bp, Homo sapien
gaggacccggtagaccaaatccccg

SEQ ID NO: 10716 - DNA, 25 bp, Homo sapien
gaggacccggtacaccaaatccccg

SEQ ID NO: 10717 - DNA, 25 bp, Homo sapien
gagggcaggaggacaaaatccccgt

SEQ ID NO: 10718 - DNA, 25 bp, Homo sapien
gagggcaggaggtcaaaatccccgt

SEQ ID NO: 10719 - DNA, 25 bp, Homo sapien
agagagaggaggtgccagaatccct

SEQ ID NO: 10720 - DNA, 25 bp, Homo sapien
agagagaggaggagccagaatccct

SEQ ID NO: 10721 - DNA, 25 bp, Homo sapien
acgaggtctcgagtccccggtccat

SEQ ID NO: 10722 - DNA, 25 bp, Homo sapien
acgaggtctcgactccccggtccat

SEQ ID NO: 10723 - DNA, 25 bp, Homo sapien
aacgtcatcaagaggtcgaccatct

SEQ ID NO: 10724 - DNA, 25 bp, Homo sapien
aacgtcatcaagtggtcgaccatct

SEQ ID NO: 10725 - DNA, 25 bp, Homo sapien
acctgggtccggtccgtgtggaccc

SEQ ID NO: 10726 - DNA, 25 bp, Homo sapien
acctgggtccggaccgtgtggaccc

SEQ ID NO: 10727 - DNA, 25 bp, Homo sapien
acggtagagtttcaggaggactcac

SEQ ID NO: 10728 - DNA, 25 bp, Homo sapien
acggtagagtttgaggaggactcac

SEQ ID NO: 10729 - DNA, 25 bp, Homo sapien
gtgaaggatctccatgcgtgataat

SEQ ID NO: 10730 - DNA, 25 bp, Homo sapien
gtgaaggatctcgatgcgtgataat

SEQ ID NO: 10731 - DNA, 25 bp, Homo sapien
ttaatgtagtttcgatataggtttt

SEQ ID NO: 10732 - DNA, 25 bp, Homo sapien
ttaatgtagtttggatataggtttt

SEQ ID NO: 10733 - DNA, 25 bp, Homo sapien
ttattttctcgatcaaggtacttgt

SEQ ID NO: 10734 - DNA, 25 bp, Homo sapien
ttattttctcgaacaaggtacttgt

SEQ ID NO: 10735 - DNA, 25 bp, Homo sapien
tcaatgttcacacgaagagtcttgt

SEQ ID NO: 10736 - DNA, 25 bp, Homo sapien
tcaatgttcacaggaagagtcttgt

SEQ ID NO: 10737 - DNA, 25 bp, Homo sapien
agggttgttaagacgtactgtccat

SEQ ID NO: 10738 - DNA, 25 bp, Homo sapien
agggttgttaagtcgtactgtccat

SEQ ID NO: 10739 - DNA, 25 bp, Homo sapien
aacgtacggtgaaagtcagttgtcc

SEQ ID NO: 10740 - DNA, 25 bp, Homo sapien
aacgtacggtgatagtcagttgtcc

SEQ ID NO: 10741 - DNA, 25 bp, Homo sapien
ggaccacagggtttgggaactaaga

SEQ ID NO: 10742 - DNA, 25 bp, Homo sapien
ggaccacagggtatgggaactaaga

SEQ ID NO: 10743 - DNA, 25 bp, Homo sapien
agtagggacatagacgatcaactcg

SEQ ID NO: 10744 - DNA, 25 bp, Homo sapien
agtagggacatacacgatcaactcg

SEQ ID NO: 10745 - DNA, 25 bp, Homo sapien
agtccgtacgagaacaccacaagcc

SEQ ID NO: 10746 - DNA, 25 bp, Homo sapien
agtccgtacgagtacaccacaagcc

SEQ ID NO: 10747 - DNA, 25 bp, Homo sapien
tgaacaccgttaactcaagtaaacg

SEQ ID NO: 10748 - DNA, 25 bp, Homo sapien
tgaacaccgttatctcaagtaaacg

SEQ ID NO: 10749 - DNA, 25 bp, Homo sapien
gtgtttaagttctttctaggaactc

SEQ ID NO: 10750 - DNA, 25 bp, Homo sapien
gtgtttaagttcattctaggaactc

SEQ ID NO: 10751 - DNA, 25 bp, Homo sapien
tttttatccgtcacgtcgtggaaat

SEQ ID NO: 10752 - DNA, 25 bp, Homo sapien
tttttatccgtctcgtcgtggaaat

SEQ ID NO: 10753 - DNA, 25 bp, Homo sapien
actctttgccggacacaggtagaca

SEQ ID NO: 10754 - DNA, 25 bp, Homo sapien
actctttgccggtcacaggtagaca

SEQ ID NO: 10755 - DNA, 25 bp, Homo sapien
ttcgttcgatcttcttgagttgcat

SEQ ID NO: 10756 - DNA, 25 bp, Homo sapien
ttcgttcgatctacttgagttgcat

SEQ ID NO: 10757 - DNA, 25 bp, Homo sapien
cacgtgtccagtcgtccagtcgtct

SEQ ID NO: 10758 - DNA, 25 bp, Homo sapien
cacgtgtccagtggtccagtcgtct

SEQ ID NO: 10759 - DNA, 25 bp, Homo sapien
agaagtttagtctggttactcgtgc

SEQ ID NO: 10760 - DNA, 25 bp, Homo sapien
agaagtttagtcaggttactcgtgc

SEQ ID NO: 10761 - DNA, 25 bp, Homo sapien
tatgtaaagtcaggtgttacactcg

SEQ ID NO: 10762 - DNA, 25 bp, Homo sapien
tatgtaaagtcacgtgttacactcg

SEQ ID NO: 10763 - DNA, 25 bp, Homo sapien
gagaagaacgtcctccacgtaaacg

SEQ ID NO: 10764 - DNA, 25 bp, Homo sapien
gagaagaacgtcgtccacgtaaacg

SEQ ID NO: 10765 - DNA, 25 bp, Homo sapien
cgtaaataacgagagttcagacact

SEQ ID NO: 10766 - DNA, 25 bp, Homo sapien
cgtaaataacgacagttcagacact

SEQ ID NO: 10767 - DNA, 25 bp, Homo sapien
gcgaaagcgaaacgcgcggctgagg

SEQ ID NO: 10768 - DNA, 25 bp, Homo sapien
gcgaaagcgaaaggcgcggctgagg

SEQ ID NO: 10769 - DNA, 25 bp, Homo sapien
gtttatgacgggcgtttgcagcgcg

SEQ ID NO: 10770 - DNA, 25 bp, Homo sapien
gtttatgacgggggtttgcagcgcg

SEQ ID NO: 10771 - DNA, 25 bp, Homo sapien
tcttctctctgtatcgtcgtcgaaa

SEQ ID NO: 10772 - DNA, 25 bp, Homo sapien
tcttctctctgtttcgtcgtcgaaa

SEQ ID NO: 10773 - DNA, 25 bp, Homo sapien
gagtttattctttccgttacgaaag

SEQ ID NO: 10774 - DNA, 25 bp, Homo sapien
gagtttattcttaccgttacgaaag

SEQ ID NO: 10775 - DNA, 25 bp, Homo sapien
gttcgtcgtgtgtcgcgtacaagtg

SEQ ID NO: 10776 - DNA, 25 bp, Homo sapien
gttcgtcgtgtgacgcgtacaagtg

SEQ ID NO: 10777 - DNA, 25 bp, Homo sapien
tccacgtgccggtcgcacaagaaca

SEQ ID NO: 10778 - DNA, 25 bp, Homo sapien
tccacgtgccggacgcacaagaaca

SEQ ID NO: 10779 - DNA, 25 bp, Homo sapien
tacactttggacaggacaggactaa

SEQ ID NO: 10780 - DNA, 25 bp, Homo sapien
tacactttggactggacaggactaa

SEQ ID NO: 10781 - DNA, 25 bp, Homo sapien
tcccactttgtgagtggatcacaca

SEQ ID NO: 10782 - DNA, 25 bp, Homo sapien
tcccactttgtgtgtggatcacaca

SEQ ID NO: 10783 - DNA, 25 bp, Homo sapien
gtcggctaaggcctgtgatcctctg

SEQ ID NO: 10784 - DNA, 25 bp, Homo sapien
gtcggctaaggcgtgtgatcctctg

SEQ ID NO: 10785 - DNA, 25 bp, Homo sapien
gtgacatctttttacacttctgtgt

SEQ ID NO: 10786 - DNA, 25 bp, Homo sapien
gtgacatcttttaacacttctgtgt

SEQ ID NO: 10787 - DNA, 25 bp, Homo sapien
ggagtaacgacagaagcttctcgtc

SEQ ID NO: 10788 - DNA, 25 bp, Homo sapien
ggagtaacgacacaagcttctcgtc

SEQ ID NO: 10789 - DNA, 25 bp, Homo sapien
ggaagtacctagtgaggtcttttac

SEQ ID NO: 10790 - DNA, 25 bp, Homo sapien
ggaagtacctagagaggtcttttac

SEQ ID NO: 10791 - DNA, 25 bp, Homo sapien
agaacgtcggcaggaccgtctcgac

SEQ ID NO: 10792 - DNA, 25 bp, Homo sapien
agaacgtcggcacgaccgtctcgac

SEQ ID NO: 10793 - DNA, 25 bp, Homo sapien
acagtatctccctgtcccgtcggtg

SEQ ID NO: 10794 - DNA, 25 bp, Homo sapien
acagtatctcccagtcccgtcggtg

SEQ ID NO: 10795 - DNA, 25 bp, Homo sapien
acaggagtctcactagtcctcccag

SEQ ID NO: 10796 - DNA, 25 bp, Homo sapien
acaggagtctcagtagtcctcccag

SEQ ID NO: 10797 - DNA, 25 bp, Homo sapien
tgtaagttactcctgaatccacgac

SEQ ID NO: 10798 - DNA, 25 bp, Homo sapien
tgtaagttactcgtgaatccacgac

SEQ ID NO: 10799 - DNA, 25 bp, Homo sapien
tcagaactatcaagacaccgtaacg

SEQ ID NO: 10800 - DNA, 25 bp, Homo sapien
tcagaactatcatgacaccgtaacg

SEQ ID NO: 10801 - DNA, 25 bp, Homo sapien
aagacatctacttttgtcaatagag

SEQ ID NO: 10802 - DNA, 25 bp, Homo sapien
aagacatctactattgtcaatagag

SEQ ID NO: 10803 - DNA, 25 bp, Homo sapien
aagaagtgattttagacacacggac

SEQ ID NO: 10804 - DNA, 25 bp, Homo sapien
aagaagtgatttaagacacacggac

SEQ ID NO: 10805 - DNA, 25 bp, Homo sapien
taacgatattagtaccaccgacgaa

SEQ ID NO: 10806 - DNA, 25 bp, Homo sapien
taacgatattagaaccaccgacgaa

SEQ ID NO: 10807 - DNA, 25 bp, Homo sapien
agtaaatctacaatatacccggaag

SEQ ID NO: 10808 - DNA, 25 bp, Homo sapien
agtaaatctacattatacccggaag

SEQ ID NO: 10809 - DNA, 25 bp, Homo sapien
caaatatttcggtttgctcggaagt

SEQ ID NO: 10810 - DNA, 25 bp, Homo sapien
caaatatttcggattgctcggaagt

SEQ ID NO: 10811 - DNA, 25 bp, Homo sapien
aagatcggtcaattatcgtctcttt

SEQ ID NO: 10812 - DNA, 25 bp, Homo sapien
aagatcggtcaaatatcgtctcttt

SEQ ID NO: 10813 - DNA, 25 bp, Homo sapien
agactacgtgttattctgtacccat

SEQ ID NO: 10814 - DNA, 25 bp, Homo sapien
agactacgtgtttttctgtacccat

SEQ ID NO: 10815 - DNA, 25 bp, Homo sapien
agtaccttacgtttgtatcctccga

SEQ ID NO: 10816 - DNA, 25 bp, Homo sapien
agtaccttacgtatgtatcctccga

SEQ ID NO: 10817 - DNA, 25 bp, Homo sapien
gtccgttctcagatactggtcacga

SEQ ID NO: 10818 - DNA, 25 bp, Homo sapien
gtccgttctcagttactggtcacga

SEQ ID NO: 10819 - DNA, 25 bp, Homo sapien
agtccgtcgtacgtccggtgtagga

SEQ ID NO: 10820 - DNA, 25 bp, Homo sapien
agtccgtcgtacctccggtgtagga

SEQ ID NO: 10821 - DNA, 25 bp, Homo sapien
caattctcgtcctccgacttacggg

SEQ ID NO: 10822 - DNA, 25 bp, Homo sapien
caattctcgtccaccgacttacggg

SEQ ID NO: 10823 - DNA, 25 bp, Homo sapien
ccggtgtccgttgtacttccggtcc

SEQ ID NO: 10824 - DNA, 25 bp, Homo sapien
ccggtgtccgttctacttccggtcc

SEQ ID NO: 10825 - DNA, 25 bp, Homo sapien
gaactatctatacataactcgttca

SEQ ID NO: 10826 - DNA, 25 bp, Homo sapien
gaactatctatagataactcgttca

SEQ ID NO: 10827 - DNA, 25 bp, Homo sapien
gtaagtacatttagacatcggattc

SEQ ID NO: 10828 - DNA, 25 bp, Homo sapien
gtaagtacattttgacatcggattc

SEQ ID NO: 10829 - DNA, 25 bp, Homo sapien
gaagaagtagaatcacctcggttta

SEQ ID NO: 10830 - DNA, 25 bp, Homo sapien
gaagaagtagaaacacctcggttta

SEQ ID NO: 10831 - DNA, 25 bp, Homo sapien
gataaatgaagttctactgtcttct

SEQ ID NO: 10832 - DNA, 25 bp, Homo sapien
gataaatgaagtactactgtcttct

SEQ ID NO: 10833 - DNA, 25 bp, Homo sapien
aagacgtgaactgtagtgtctcgct

SEQ ID NO: 10834 - DNA, 25 bp, Homo sapien
aagacgtgaactctagtgtctcgct

SEQ ID NO: 10835 - DNA, 25 bp, Homo sapien
ttcccgtagaagatagaacttccga

SEQ ID NO: 10836 - DNA, 25 bp, Homo sapien
ttcccgtagaagttagaacttccga

SEQ ID NO: 10837 - DNA, 25 bp, Homo sapien
aggagattctgaacgttcgtcgtcg

SEQ ID NO: 10838 - DNA, 25 bp, Homo sapien
aggagattctgatcgttcgtcgtcg

SEQ ID NO: 10839 - DNA, 25 bp, Homo sapien
caaggtagagtaataaacttctgtc

SEQ ID NO: 10840 - DNA, 25 bp, Homo sapien
caaggtagagtattaaacttctgtc

SEQ ID NO: 10841 - DNA, 25 bp, Homo sapien
acaatatacgggagtaattctacga

SEQ ID NO: 10842 - DNA, 25 bp, Homo sapien
acaatatacgggtgtaattctacga

SEQ ID NO: 10843 - DNA, 25 bp, Homo sapien
ctaagggtcttcagttgtttacaga

SEQ ID NO: 10844 - DNA, 25 bp, Homo sapien
ctaagggtcttctgttgtttacaga

SEQ ID NO: 10845 - DNA, 25 bp, Homo sapien
actactggttttcgttggtttgtac

SEQ ID NO: 10846 - DNA, 25 bp, Homo sapien
actactggttttggttggtttgtac

SEQ ID NO: 10847 - DNA, 25 bp, Homo sapien
ggtcgtagtgagttcatacttcgta

SEQ ID NO: 10848 - DNA, 25 bp, Homo sapien
ggtcgtagtgagatcatacttcgta

SEQ ID NO: 10849 - DNA, 25 bp, Homo sapien
atacttgtgtacagatgtctctact

SEQ ID NO: 10850 - DNA, 25 bp, Homo sapien
atacttgtgtactgatgtctctact

SEQ ID NO: 10851 - DNA, 25 bp, Homo sapien
atttctacgtatgttactgatgact

SEQ ID NO: 10852 - DNA, 25 bp, Homo sapien
atttctacgtatcttactgatgact

SEQ ID NO: 10853 - DNA, 25 bp, Homo sapien
caaatgacttctgactattggtcga

SEQ ID NO: 10854 - DNA, 25 bp, Homo sapien
caaatgacttctcactattggtcga

SEQ ID NO: 10855 - DNA, 25 bp, Homo sapien
gagactgtacgtcacgaggacagcc

SEQ ID NO: 10856 - DNA, 25 bp, Homo sapien
gagactgtacgtgacgaggacagcc

SEQ ID NO: 10857 - DNA, 25 bp, Homo sapien
tggacgtcggcctagacgaacacgt

SEQ ID NO: 10858 - DNA, 25 bp, Homo sapien
tggacgtcggccaagacgaacacgt

SEQ ID NO: 10859 - DNA, 25 bp, Homo sapien
gtgttcgtcgttgaagagacacaac

SEQ ID NO: 10860 - DNA, 25 bp, Homo sapien
gtgttcgtcgttcaagagacacaac

SEQ ID NO: 10861 - DNA, 25 bp, Homo sapien
tgtgtctgtcgtccagatctcgaca

SEQ ID NO: 10862 - DNA, 25 bp, Homo sapien
tgtgtctgtcgtgcagatctcgaca

SEQ ID NO: 10863 - DNA, 25 bp, Homo sapien
gcggcgtgaggtcaactatggtaac

SEQ ID NO: 10864 - DNA, 25 bp, Homo sapien
gcggcgtgaggtgaactatggtaac

SEQ ID NO: 10865 - DNA, 25 bp, Homo sapien
ttccgggggtcttactacgggtcct

SEQ ID NO: 10866 - DNA, 25 bp, Homo sapien
ttccgggggtctaactacgggtcct

SEQ ID NO: 10867 - DNA, 25 bp, Homo sapien
aaactacaagttcgtctttcgcgca

SEQ ID NO: 10868 - DNA, 25 bp, Homo sapien
aaactacaagttggtctttcgcgca

SEQ ID NO: 10869 - DNA, 25 bp, Homo sapien
gacacaggtcggatcctggtcctag

SEQ ID NO: 10870 - DNA, 25 bp, Homo sapien
gacacaggtcggttcctggtcctag

SEQ ID NO: 10871 - DNA, 25 bp, Homo sapien
gtaccatccgtactgttgtcgtcca

SEQ ID NO: 10872 - DNA, 25 bp, Homo sapien
gtaccatccgtagtgttgtcgtcca

SEQ ID NO: 10873 - DNA, 25 bp, Homo sapien
atggagactcgataggtacttctac

SEQ ID NO: 10874 - DNA, 25 bp, Homo sapien
atggagactcgaaaggtacttctac

SEQ ID NO: 10875 - DNA, 25 bp, Homo sapien
agaggagactctaaagagatcttac

SEQ ID NO: 10876 - DNA, 25 bp, Homo sapien
agaggagactcttaagagatcttac

SEQ ID NO: 10877 - DNA, 25 bp, Homo sapien
gttagttcgaatagtaggaccctta

SEQ ID NO: 10878 - DNA, 25 bp, Homo sapien
gttagttcgaattgtaggaccctta

SEQ ID NO: 10879 - DNA, 25 bp, Homo sapien
ggcggtcgtgtctgaaggtcttact

SEQ ID NO: 10880 - DNA, 25 bp, Homo sapien
ggcggtcgtgtcagaaggtcttact

SEQ ID NO: 10881 - DNA, 25 bp, Homo sapien
cgtagggtcctctactaccgccggt

SEQ ID NO: 10882 - DNA, 25 bp, Homo sapien
cgtagggtcctcaactaccgccggt

SEQ ID NO: 10883 - DNA, 25 bp, Homo sapien
ctgtgtgcctctcagtgtccgatat

SEQ ID NO: 10884 - DNA, 25 bp, Homo sapien
ctgtgtgcctctgagtgtccgatat

SEQ ID NO: 10885 - DNA, 25 bp, Homo sapien
gcactgtcaccctagatcgctagct

SEQ ID NO: 10886 - DNA, 25 bp, Homo sapien
gcactgtcacccaagatcgctagct

SEQ ID NO: 10887 - DNA, 25 bp, Homo sapien
cgaactttcgtctgaacacagaaga

SEQ ID NO: 10888 - DNA, 25 bp, Homo sapien
cgaactttcgtcagaacacagaaga

SEQ ID NO: 10889 - DNA, 25 bp, Homo sapien
ggttcagtacgtactccagtcgaaa

SEQ ID NO: 10890 - DNA, 25 bp, Homo sapien
ggttcagtacgttctccagtcgaaa

SEQ ID NO: 10891 - DNA, 25 bp, Homo sapien
gagtctcatgtatttgaactcgaat

SEQ ID NO: 10892 - DNA, 25 bp, Homo sapien
gagtctcatgtaattgaactcgaat

SEQ ID NO: 10893 - DNA, 25 bp, Homo sapien
gacaccgtggtgagtgtccggtcct

SEQ ID NO: 10894 - DNA, 25 bp, Homo sapien
gacaccgtggtgtgtgtccggtcct

SEQ ID NO: 10895 - DNA, 25 bp, Homo sapien
gcatgaggagtcgtctcgacctcct

SEQ ID NO: 10896 - DNA, 25 bp, Homo sapien
gcatgaggagtcctctcgacctcct

SEQ ID NO: 10897 - DNA, 25 bp, Homo sapien
tccatgtaagtctgtccaaatgact

SEQ ID NO: 10898 - DNA, 25 bp, Homo sapien
tccatgtaagtcagtccaaatgact

SEQ ID NO: 10899 - DNA, 25 bp, Homo sapien
tgtcagttcgtcctactagacaact

SEQ ID NO: 10900 - DNA, 25 bp, Homo sapien
tgtcagttcgtcgtactagacaact

SEQ ID NO: 10901 - DNA, 25 bp, Homo sapien
tgtcccgtaacatcgactaggacag

SEQ ID NO: 10902 - DNA, 25 bp, Homo sapien
tgtcccgtaacaacgactaggacag

SEQ ID NO: 10903 - DNA, 25 bp, Homo sapien
ttctgacacgcgacgaaacaggacc

SEQ ID NO: 10904 - DNA, 25 bp, Homo sapien
ttctgacacgcgtcgaaacaggacc

SEQ ID NO: 10905 - DNA, 25 bp, Homo sapien
ttgtaaagtctctgaaagaatccgt

SEQ ID NO: 10906 - DNA, 25 bp, Homo sapien
ttgtaaagtctcagaaagaatccgt

SEQ ID NO: 10907 - DNA, 25 bp, Homo sapien
tcacaccacttgaacgtggactcct

SEQ ID NO: 10908 - DNA, 25 bp, Homo sapien
tcacaccacttgtacgtggactcct

SEQ ID NO: 10909 - DNA, 25 bp, Homo sapien
tcatcttgtgtgtcagtcgtgagtt

SEQ ID NO: 10910 - DNA, 25 bp, Homo sapien
tcatcttgtgtgacagtcgtgagtt

SEQ ID NO: 10911 - DNA, 25 bp, Homo sapien
actagttttcggtatacgacgagta

SEQ ID NO: 10912 - DNA, 25 bp, Homo sapien
actagttttcggaatacgacgagta

SEQ ID NO: 10913 - DNA, 25 bp, Homo sapien
tgaatagttttcgaaacacagtact

SEQ ID NO: 10914 - DNA, 25 bp, Homo sapien
tgaatagttttccaaacacagtact

SEQ ID NO: 10915 - DNA, 25 bp, Homo sapien
acaatttctacgacaatgacagtcg

SEQ ID NO: 10916 - DNA, 25 bp, Homo sapien
acaatttctacgtcaatgacagtcg

SEQ ID NO: 10917 - DNA, 25 bp, Homo sapien
agtctcttgtcctaagtcctcgtcg

SEQ ID NO: 10918 - DNA, 25 bp, Homo sapien
agtctcttgtccaaagtcctcgtcg

SEQ ID NO: 10919 - DNA, 25 bp, Homo sapien
tgtcctctgccgagagtcgttacac

SEQ ID NO: 10920 - DNA, 25 bp, Homo sapien
tgtcctctgccgtgagtcgttacac

SEQ ID NO: 10921 - DNA, 25 bp, Homo sapien
tcacgtcaccgaggagtcgtctctg

SEQ ID NO: 10922 - DNA, 25 bp, Homo sapien
tcacgtcaccgacgagtcgtctctg

SEQ ID NO: 10923 - DNA, 25 bp, Homo sapien
ttacgacgtaaggtgtccggagaag

SEQ ID NO: 10924 - DNA, 25 bp, Homo sapien
ttacgacgtaagctgtccggagaag

SEQ ID NO: 10925 - DNA, 25 bp, Homo sapien
cttcgtcggtcatccgtcccgtgaa

SEQ ID NO: 10926 - DNA, 25 bp, Homo sapien
cttcgtcggtcaaccgtcccgtgaa

SEQ ID NO: 10927 - DNA, 25 bp, Homo sapien
tgtgtcttagtaacatgtcctaaat

SEQ ID NO: 10928 - DNA, 25 bp, Homo sapien
tgtgtcttagtatcatgtcctaaat

SEQ ID NO: 10929 - DNA, 25 bp, Homo sapien
aatgtgtcagtcatgactttacgtt

SEQ ID NO: 10930 - DNA, 25 bp, Homo sapien
aatgtgtcagtcttgactttacgtt

SEQ ID NO: 10931 - DNA, 25 bp, Homo sapien
tacactccgtagtcattattgtatg

SEQ ID NO: 10932 - DNA, 25 bp, Homo sapien
tacactccgtagacattattgtatg

SEQ ID NO: 10933 - DNA, 25 bp, Homo sapien
acggtgtacggaactctttatttcg

SEQ ID NO: 10934 - DNA, 25 bp, Homo sapien
acggtgtacggatctctttatttcg

SEQ ID NO: 10935 - DNA, 25 bp, Homo sapien
agtgaagtcactcacttacttttga

SEQ ID NO: 10936 - DNA, 25 bp, Homo sapien
agtgaagtcactgacttacttttga

SEQ ID NO: 10937 - DNA, 25 bp, Homo sapien
atcgtgagtcatgttacttaatgac

SEQ ID NO: 10938 - DNA, 25 bp, Homo sapien
atcgtgagtcatcttacttaatgac

SEQ ID NO: 10939 - DNA, 25 bp, Homo sapien
ataggacttatttactcttgagatc

SEQ ID NO: 10940 - DNA, 25 bp, Homo sapien
ataggacttattaactcttgagatc

SEQ ID NO: 10941 - DNA, 25 bp, Homo sapien
gactccgtgacttcctttaagactc

SEQ ID NO: 10942 - DNA, 25 bp, Homo sapien
gactccgtgactacctttaagactc

SEQ ID NO: 10943 - DNA, 25 bp, Homo sapien
ctatcgtggttctctatagtcgaca

SEQ ID NO: 10944 - DNA, 25 bp, Homo sapien
ctatcgtggttcactatagtcgaca

SEQ ID NO: 10945 - DNA, 25 bp, Homo sapien
accttggtataacgattacgacgta

SEQ ID NO: 10946 - DNA, 25 bp, Homo sapien
accttggtataaggattacgacgta

SEQ ID NO: 10947 - DNA, 25 bp, Homo sapien
agacagatagggttgtcagttccca

SEQ ID NO: 10948 - DNA, 25 bp, Homo sapien
agacagatagggatgtcagttccca

SEQ ID NO: 10949 - DNA, 25 bp, Homo sapien
ggtagaaggagaactcatcaaacat

SEQ ID NO: 10950 - DNA, 25 bp, Homo sapien
ggtagaaggagatctcatcaaacat

SEQ ID NO: 10951 - DNA, 25 bp, Homo sapien
gtaaacgagagctcctacgttaatt

SEQ ID NO: 10952 - DNA, 25 bp, Homo sapien
gtaaacgagagcacctacgttaatt

SEQ ID NO: 10953 - DNA, 25 bp, Homo sapien
ggttcgtactgaaagtccttcactt

SEQ ID NO: 10954 - DNA, 25 bp, Homo sapien
ggttcgtactgatagtccttcactt

SEQ ID NO: 10955 - DNA, 25 bp, Homo sapien
cagttattatctattagtgttcctg

SEQ ID NO: 10956 - DNA, 25 bp, Homo sapien
cagttattatcttttagtgttcctg

SEQ ID NO: 10957 - DNA, 25 bp, Homo sapien
cgtctcttgcagtttttgtcggagt

SEQ ID NO: 10958 - DNA, 25 bp, Homo sapien
cgtctcttgcagattttgtcggagt

SEQ ID NO: 10959 - DNA, 25 bp, Homo sapien
gtccccttcggtgtctctctaggat

SEQ ID NO: 10960 - DNA, 25 bp, Homo sapien
gtccccttcggtctctctctaggat

SEQ ID NO: 10961 - DNA, 25 bp, Homo sapien
tccctccgaggaggtcttctaagat

SEQ ID NO: 10962 - DNA, 25 bp, Homo sapien
tccctccgaggacgtcttctaagat

SEQ ID NO: 10963 - DNA, 25 bp, Homo sapien
tccctacaccctggtacgaacagga

SEQ ID NO: 10964 - DNA, 25 bp, Homo sapien
tccctacaccctcgtacgaacagga

SEQ ID NO: 10965 - DNA, 25 bp, Homo sapien
agtgacatcccgtcgtccaaaggat

SEQ ID NO: 10966 - DNA, 25 bp, Homo sapien
agtgacatcccgacgtccaaaggat

SEQ ID NO: 10967 - DNA, 25 bp, Homo sapien
caacagtgttttgtacctgagaatt

SEQ ID NO: 10968 - DNA, 25 bp, Homo sapien
caacagtgttttctacctgagaatt

SEQ ID NO: 10969 - DNA, 25 bp, Homo sapien
aagaacttttgtctgcaagagacac

SEQ ID NO: 10970 - DNA, 25 bp, Homo sapien
aagaacttttgtgtgcaagagacac

SEQ ID NO: 10971 - DNA, 25 bp, Homo sapien
aaattctcttgtactttaaccggag

SEQ ID NO: 10972 - DNA, 25 bp, Homo sapien
aaattctcttgttctttaaccggag

SEQ ID NO: 10973 - DNA, 25 bp, Homo sapien
aacagcgtcctttttcctttaggag

SEQ ID NO: 10974 - DNA, 25 bp, Homo sapien
aacagcgtccttattcctttaggag

SEQ ID NO: 10975 - DNA, 25 bp, Homo sapien
tgtcaactattatctcaacagtggg

SEQ ID NO: 10976 - DNA, 25 bp, Homo sapien
tgtcaactattaactcaacagtggg

SEQ ID NO: 10977 - DNA, 25 bp, Homo sapien
ggtagaacaaccactcacacggccg

SEQ ID NO: 10978 - DNA, 25 bp, Homo sapien
ggtagaacaacctctcacacggccg

SEQ ID NO: 10979 - DNA, 25 bp, Homo sapien
attcagaggacctcgtgtctggctg

SEQ ID NO: 10980 - DNA, 25 bp, Homo sapien
attcagaggaccacgtgtctggctg

SEQ ID NO: 10981 - DNA, 25 bp, Homo sapien
acagaggtctacacgtggtagagga

SEQ ID NO: 10982 - DNA, 25 bp, Homo sapien
acagaggtctactcgtggtagagga

SEQ ID NO: 10983 - DNA, 25 bp, Homo sapien
tgtcctgtccttatctgtgacgccg

SEQ ID NO: 10984 - DNA, 25 bp, Homo sapien
tgtcctgtccttttctgtgacgccg

SEQ ID NO: 10985 - DNA, 25 bp, Homo sapien
aacaggatctttcatatgttaacag

SEQ ID NO: 10986 - DNA, 25 bp, Homo sapien
aacaggatctttgatatgttaacag

SEQ ID NO: 10987 - DNA, 25 bp, Homo sapien
taaggtttaggtcaagggtctaccg

SEQ ID NO: 10988 - DNA, 25 bp, Homo sapien
taaggtttaggtgaagggtctaccg

SEQ ID NO: 10989 - DNA, 25 bp, Homo sapien
tccgtgtctttcaaacgggttccgt

SEQ ID NO: 10990 - DNA, 25 bp, Homo sapien
tccgtgtctttctaacgggttccgt

SEQ ID NO: 10991 - DNA, 25 bp, Homo sapien
tccttttagatttacccgtactagg

SEQ ID NO: 10992 - DNA, 25 bp, Homo sapien
tccttttagattaacccgtactagg

SEQ ID NO: 10993 - DNA, 25 bp, Homo sapien
gatcttgtaattagcactacgaacc

SEQ ID NO: 10994 - DNA, 25 bp, Homo sapien
gatcttgtaatttgcactacgaacc

SEQ ID NO: 10995 - DNA, 25 bp, Homo sapien
gattgtaagtcctctcactaaaccg

SEQ ID NO: 10996 - DNA, 25 bp, Homo sapien
gattgtaagtccactcactaaaccg

SEQ ID NO: 10997 - DNA, 25 bp, Homo sapien
cactagtaagccaaacatcgttatg

SEQ ID NO: 10998 - DNA, 25 bp, Homo sapien
cactagtaagcctaacatcgttatg

SEQ ID NO: 10999 - DNA, 25 bp, Homo sapien
ggacatgacgcctacacacataaac

SEQ ID NO: 11000 - DNA, 25 bp, Homo sapien
ggacatgacgccaacacacataaac

SEQ ID NO: 11001 - DNA, 25 bp, Homo sapien
cctgtgaccgaggtcgaacacaaag

SEQ ID NO: 11002 - DNA, 25 bp, Homo sapien
cctgtgaccgagctcgaacacaaag

SEQ ID NO: 11003 - DNA, 25 bp, Homo sapien
ctctcgacaccgactgacaaggagg

SEQ ID NO: 11004 - DNA, 25 bp, Homo sapien
ctctcgacaccgtctgacaaggagg

SEQ ID NO: 11005 - DNA, 25 bp, Homo sapien
tgtaaatcacgtcagacataatagg

SEQ ID NO: 11006 - DNA, 25 bp, Homo sapien
tgtaaatcacgtgagacataatagg

SEQ ID NO: 11007 - DNA, 25 bp, Homo sapien
tatgaaactatgtttacatccacgg

SEQ ID NO: 11008 - DNA, 25 bp, Homo sapien
tatgaaactatgattacatccacgg

SEQ ID NO: 11009 - DNA, 25 bp, Homo sapien
gattcataatacacacacacccatg

SEQ ID NO: 11010 - DNA, 25 bp, Homo sapien
gattcataatactcacacacccatg

SEQ ID NO: 11011 - DNA, 25 bp, Homo sapien
atacctaagggatctaaacccctgt

SEQ ID NO: 11012 - DNA, 25 bp, Homo sapien
atacctaagggaactaaacccctgt

SEQ ID NO: 11013 - DNA, 25 bp, Homo sapien
aatacggaagagtatcaccgcttgt

SEQ ID NO: 11014 - DNA, 25 bp, Homo sapien
aatacggaagagaatcaccgcttgt

SEQ ID NO: 11015 - DNA, 25 bp, Homo sapien
actcaggtagctgtcgactctgttt

SEQ ID NO: 11016 - DNA, 25 bp, Homo sapien
actcaggtagctctcgactctgttt

SEQ ID NO: 11017 - DNA, 25 bp, Homo sapien
cacagtaacacttgtgaccgtcttt

SEQ ID NO: 11018 - DNA, 25 bp, Homo sapien
cacagtaacactagtgaccgtcttt

SEQ ID NO: 11019 - DNA, 25 bp, Homo sapien
agtctagacgataaacgacctgatc

SEQ ID NO: 11020 - DNA, 25 bp, Homo sapien
agtctagacgattaacgacctgatc

SEQ ID NO: 11021 - DNA, 25 bp, Homo sapien
cacttgaggaagtcttcgtggggac

SEQ ID NO: 11022 - DNA, 25 bp, Homo sapien
cacttgaggaagacttcgtggggac

SEQ ID NO: 11023 - DNA, 25 bp, Homo sapien
acaaaagtagacttcgttagggact

SEQ ID NO: 11024 - DNA, 25 bp, Homo sapien
acaaaagtagacatcgttagggact

SEQ ID NO: 11025 - DNA, 25 bp, Homo sapien
tgtgaacaggtacatgtactaattc

SEQ ID NO: 11026 - DNA, 25 bp, Homo sapien
tgtgaacaggtagatgtactaattc

SEQ ID NO: 11027 - DNA, 25 bp, Homo sapien
gtgaagtagaggtagtagtctctcc

SEQ ID NO: 11028 - DNA, 25 bp, Homo sapien
gtgaagtagaggaagtagtctctcc

SEQ ID NO: 11029 - DNA, 25 bp, Homo sapien
tatggaaagtgacaagacgtctccc

SEQ ID NO: 11030 - DNA, 25 bp, Homo sapien
tatggaaagtgagaagacgtctccc

SEQ ID NO: 11031 - DNA, 25 bp, Homo sapien
ggcgagactgacgaagagcttgtac

SEQ ID NO: 11032 - DNA, 25 bp, Homo sapien
ggcgagactgaccaagagcttgtac

SEQ ID NO: 11033 - DNA, 25 bp, Homo sapien
agttcggtcctctcggtaggaccgg

SEQ ID NO: 11034 - DNA, 25 bp, Homo sapien
agttcggtcctcacggtaggaccgg

SEQ ID NO: 11035 - DNA, 25 bp, Homo sapien
gaacgggtcgcactcctacggccgg

SEQ ID NO: 11036 - DNA, 25 bp, Homo sapien
gaacgggtcgcagtcctacggccgg

SEQ ID NO: 11037 - DNA, 25 bp, Homo sapien
gacgactcgtcacgaccctcttggt

SEQ ID NO: 11038 - DNA, 25 bp, Homo sapien
gacgactcgtcaggaccctcttggt

SEQ ID NO: 11039 - DNA, 25 bp, Homo sapien
cggacgtccctgagacccgtctggg

SEQ ID NO: 11040 - DNA, 25 bp, Homo sapien
cggacgtccctgtgacccgtctggg

SEQ ID NO: 11041 - DNA, 25 bp, Homo sapien
cgaggactccacagaaacacggggg

SEQ ID NO: 11042 - DNA, 25 bp, Homo sapien
cgaggactccactgaaacacggggg

SEQ ID NO: 11043 - DNA, 25 bp, Homo sapien
tggactactccagaaccaagggtag

SEQ ID NO: 11044 - DNA, 25 bp, Homo sapien
tggactactccacaaccaagggtag

SEQ ID NO: 11045 - DNA, 25 bp, Homo sapien
ggaccacgttccaccagagactctt

SEQ ID NO: 11046 - DNA, 25 bp, Homo sapien
ggaccacgttcctccagagactctt

SEQ ID NO: 11047 - DNA, 25 bp, Homo sapien
acatacgtatgatgccgattcctct

SEQ ID NO: 11048 - DNA, 25 bp, Homo sapien
acatacgtatgaagccgattcctct

SEQ ID NO: 11049 - DNA, 25 bp, Homo sapien
cctaaatagaactcgaagactactg

SEQ ID NO: 11050 - DNA, 25 bp, Homo sapien
cctaaatagaacacgaagactactg

SEQ ID NO: 11051 - DNA, 25 bp, Homo sapien
cacaagaacttacacgactctcagg

SEQ ID NO: 11052 - DNA, 25 bp, Homo sapien
cacaagaacttagacgactctcagg

SEQ ID NO: 11053 - DNA, 25 bp, Homo sapien
atcccgaactctggacacacgcaga

SEQ ID NO: 11054 - DNA, 25 bp, Homo sapien
atcccgaactctcgacacacgcaga

SEQ ID NO: 11055 - DNA, 25 bp, Homo sapien
atgacgacatcgagaccattactac

SEQ ID NO: 11056 - DNA, 25 bp, Homo sapien
atgacgacatcgtgaccattactac

SEQ ID NO: 11057 - DNA, 25 bp, Homo sapien
aagagagacatctctagtctgctaa

SEQ ID NO: 11058 - DNA, 25 bp, Homo sapien
aagagagacatcactagtctgctaa

SEQ ID NO: 11059 - DNA, 25 bp, Homo sapien
agtggttagggttcctgtattcttc

SEQ ID NO: 11060 - DNA, 25 bp, Homo sapien
agtggttagggtacctgtattcttc

SEQ ID NO: 11061 - DNA, 25 bp, Homo sapien
tgtgggtttttggtgtacctctgtc

SEQ ID NO: 11062 - DNA, 25 bp, Homo sapien
tgtgggtttttgctgtacctctgtc

SEQ ID NO: 11063 - DNA, 25 bp, Homo sapien
tttggtttttcgagactcgtagtcc

SEQ ID NO: 11064 - DNA, 25 bp, Homo sapien
tttggtttttcgtgactcgtagtcc

SEQ ID NO: 11065 - DNA, 25 bp, Homo sapien
ttggttgtcttttacactagtgctc

SEQ ID NO: 11066 - DNA, 25 bp, Homo sapien
ttggttgtctttaacactagtgctc

SEQ ID NO: 11067 - DNA, 25 bp, Homo sapien
agattgtacttaaaggtctcgtatc

SEQ ID NO: 11068 - DNA, 25 bp, Homo sapien
agattgtacttataggtctcgtatc

SEQ ID NO: 11069 - DNA, 25 bp, Homo sapien
acgtcgctctgtgttcgagggtgtc

SEQ ID NO: 11070 - DNA, 25 bp, Homo sapien
acgtcgctctgtcttcgagggtgtc

SEQ ID NO: 11071 - DNA, 25 bp, Homo sapien
aatagaactgtgaactgtatccgaa

SEQ ID NO: 11072 - DNA, 25 bp, Homo sapien
aatagaactgtgtactgtatccgaa

SEQ ID NO: 11073 - DNA, 25 bp, Homo sapien
tatgtgacatgtgttcatctcgaac

SEQ ID NO: 11074 - DNA, 25 bp, Homo sapien
tatgtgacatgtcttcatctcgaac

SEQ ID NO: 11075 - DNA, 25 bp, Homo sapien
cttggacctgtctctccgaggacac

SEQ ID NO: 11076 - DNA, 25 bp, Homo sapien
cttggacctgtcactccgaggacac

SEQ ID NO: 11077 - DNA, 25 bp, Homo sapien
acgttctcgtctggtacggggaaca

SEQ ID NO: 11078 - DNA, 25 bp, Homo sapien
acgttctcgtctcgtacggggaaca

SEQ ID NO: 11079 - DNA, 25 bp, Homo sapien
ggtaacgtcgtctttcggcaagaag

SEQ ID NO: 11080 - DNA, 25 bp, Homo sapien
ggtaacgtcgtcattcggcaagaag

SEQ ID NO: 11081 - DNA, 25 bp, Homo sapien
aagaagaatcggtgtcctttcgagg

SEQ ID NO: 11082 - DNA, 25 bp, Homo sapien
aagaagaatcggagtcctttcgagg

SEQ ID NO: 11083 - DNA, 25 bp, Homo sapien
cagacgaggtggtcgaccttccctc

SEQ ID NO: 11084 - DNA, 25 bp, Homo sapien
cagacgaggtggacgaccttccctc

SEQ ID NO: 11085 - DNA, 25 bp, Homo sapien
gtgaaataacgtccacagaatcctc

SEQ ID NO: 11086 - DNA, 25 bp, Homo sapien
gtgaaataacgtgcacagaatcctc

SEQ ID NO: 11087 - DNA, 25 bp, Homo sapien
ggtaatggacataaatcttatcaac

SEQ ID NO: 11088 - DNA, 25 bp, Homo sapien
ggtaatggacattaatcttatcaac

SEQ ID NO: 11089 - DNA, 25 bp, Homo sapien
tcgacagtcgttctgaggacccagg

SEQ ID NO: 11090 - DNA, 25 bp, Homo sapien
tcgacagtcgttgtgaggacccagg

SEQ ID NO: 11091 - DNA, 25 bp, Homo sapien
ccgacggagttctggggaccacaga

SEQ ID NO: 11092 - DNA, 25 bp, Homo sapien
ccgacggagttcaggggaccacaga

SEQ ID NO: 11093 - DNA, 25 bp, Homo sapien
acggaagttcggtgctacgtcaaga

SEQ ID NO: 11094 - DNA, 25 bp, Homo sapien
acggaagttcggagctacgtcaaga

SEQ ID NO: 11095 - DNA, 25 bp, Homo sapien
gtactctctggttgccgtcactaca

SEQ ID NO: 11096 - DNA, 25 bp, Homo sapien
gtactctctggtagccgtcactaca

SEQ ID NO: 11097 - DNA, 25 bp, Homo sapien
gaccctcgtactctgtctcttcgtc

SEQ ID NO: 11098 - DNA, 25 bp, Homo sapien
gaccctcgtactgtgtctcttcgtc

SEQ ID NO: 11099 - DNA, 25 bp, Homo sapien
gaagacgatccgtgcgcaagtggtc

SEQ ID NO: 11100 - DNA, 25 bp, Homo sapien
gaagacgatccgagcgcaagtggtc

SEQ ID NO: 11101 - DNA, 25 bp, Homo sapien
aatcgactccaatgtcactgtcttg

SEQ ID NO: 11102 - DNA, 25 bp, Homo sapien
aatcgactccaaagtcactgtcttg

SEQ ID NO: 11103 - DNA, 25 bp, Homo sapien
aaaaccggttttgtactttatcgta

SEQ ID NO: 11104 - DNA, 25 bp, Homo sapien
aaaaccggttttctactttatcgta

SEQ ID NO: 11105 - DNA, 25 bp, Homo sapien
tgtgtttcctagtttaagtcgacgt

SEQ ID NO: 11106 - DNA, 25 bp, Homo sapien
tgtgtttcctagattaagtcgacgt

SEQ ID NO: 11107 - DNA, 25 bp, Homo sapien
accatattttcatatgtctgtgcgt

SEQ ID NO: 11108 - DNA, 25 bp, Homo sapien
accatattttcaaatgtctgtgcgt

SEQ ID NO: 11109 - DNA, 25 bp, Homo sapien
tctatatctagaacggtgtctcggg

SEQ ID NO: 11110 - DNA, 25 bp, Homo sapien
tctatatctagatcggtgtctcggg

SEQ ID NO: 11111 - DNA, 25 bp, Homo sapien
tctagtttacttcgtgtgtaggtac

SEQ ID NO: 11112 - DNA, 25 bp, Homo sapien
tctagtttacttggtgtgtaggtac

SEQ ID NO: 11113 - DNA, 25 bp, Homo sapien
tcagtgtagtcttgaagcgtgtgac

SEQ ID NO: 11114 - DNA, 25 bp, Homo sapien
tcagtgtagtctagaagcgtgtgac

SEQ ID NO: 11115 - DNA, 25 bp, Homo sapien
cgcgatgtaagtaccgacgggtccg

SEQ ID NO: 11116 - DNA, 25 bp, Homo sapien
cgcgatgtaagttccgacgggtccg

SEQ ID NO: 11117 - DNA, 25 bp, Homo sapien
cgacgagatgaaggaccaggagtcc

SEQ ID NO: 11118 - DNA, 25 bp, Homo sapien
cgacgagatgaacgaccaggagtcc

SEQ ID NO: 11119 - DNA, 25 bp, Homo sapien
gttaagatcagtacacaagtcaaat

SEQ ID NO: 11120 - DNA, 25 bp, Homo sapien
gttaagatcagttcacaagtcaaat

SEQ ID NO: 11121 - DNA, 25 bp, Homo sapien
agtgaccatatttgtttgtcatcga

SEQ ID NO: 11122 - DNA, 25 bp, Homo sapien
agtgaccatattagtttgtcatcga

SEQ ID NO: 11123 - DNA, 25 bp, Homo sapien
acatcgtgacatccgtgtgtgttga

SEQ ID NO: 11124 - DNA, 25 bp, Homo sapien
acatcgtgacatgcgtgtgtgttga

SEQ ID NO: 11125 - DNA, 25 bp, Homo sapien
ggtcagacgagtcagtttcgtctca

SEQ ID NO: 11126 - DNA, 25 bp, Homo sapien
ggtcagacgagtgagtttcgtctca

SEQ ID NO: 11127 - DNA, 25 bp, Homo sapien
tgtgtgtaagttacgacttcataac

SEQ ID NO: 11128 - DNA, 25 bp, Homo sapien
tgtgtgtaagtttcgacttcataac

SEQ ID NO: 11129 - DNA, 25 bp, Homo sapien
gtatacgacagttctgattctcttc

SEQ ID NO: 11130 - DNA, 25 bp, Homo sapien
gtatacgacagtactgattctcttc

SEQ ID NO: 11131 - DNA, 25 bp, Homo sapien
tgttaccgggtcacctgtcgacacg

SEQ ID NO: 11132 - DNA, 25 bp, Homo sapien
tgttaccgggtctcctgtcgacacg

SEQ ID NO: 11133 - DNA, 25 bp, Homo sapien
ttaactactgtgtcactaaagtcct

SEQ ID NO: 11134 - DNA, 25 bp, Homo sapien
ttaactactgtgacactaaagtcct

SEQ ID NO: 11135 - DNA, 25 bp, Homo sapien
gaaccgtgtcaagactctagtgtgt

SEQ ID NO: 11136 - DNA, 25 bp, Homo sapien
gaaccgtgtcaacactctagtgtgt

SEQ ID NO: 11137 - DNA, 25 bp, Homo sapien
aagattcgtcaacacactagctagt

SEQ ID NO: 11138 - DNA, 25 bp, Homo sapien
aagattcgtcaagacactagctagt

SEQ ID NO: 11139 - DNA, 25 bp, Homo sapien
aaccctccgtactgatccgactggg

SEQ ID NO: 11140 - DNA, 25 bp, Homo sapien
aaccctccgtacagatccgactggg

SEQ ID NO: 11141 - DNA, 25 bp, Homo sapien
caatcgctcactaagagcccgtggc

SEQ ID NO: 11142 - DNA, 25 bp, Homo sapien
caatcgctcacttagagcccgtggc

SEQ ID NO: 11143 - DNA, 25 bp, Homo sapien
ctactcttccttttgacagcggtct

SEQ ID NO: 11144 - DNA, 25 bp, Homo sapien
ctactcttccttatgacagcggtct

SEQ ID NO: 11145 - DNA, 25 bp, Homo sapien
actatttatagtgtcaacggtgcgt

SEQ ID NO: 11146 - DNA, 25 bp, Homo sapien
actatttatagtctcaacggtgcgt

SEQ ID NO: 11147 - DNA, 25 bp, Homo sapien
cgaactcctacaaggcaacggtata

SEQ ID NO: 11148 - DNA, 25 bp, Homo sapien
cgaactcctacatggcaacggtata

SEQ ID NO: 11149 - DNA, 25 bp, Homo sapien
ggtcccactggtacccttcgggtaa

SEQ ID NO: 11150 - DNA, 25 bp, Homo sapien
ggtcccactggttcccttcgggtaa

SEQ ID NO: 11151 - DNA, 25 bp, Homo sapien
tctactacccggtccaaaccgggta

SEQ ID NO: 11152 - DNA, 25 bp, Homo sapien
tctactacccggaccaaaccgggta

SEQ ID NO: 11153 - DNA, 25 bp, Homo sapien
actaagcgaagaccaaccggacgcc

SEQ ID NO: 11154 - DNA, 25 bp, Homo sapien
actaagcgaagagcaaccggacgcc

SEQ ID NO: 11155 - DNA, 25 bp, Homo sapien
agtaatgacaacaagaagtcccgag

SEQ ID NO: 11156 - DNA, 25 bp, Homo sapien
agtaatgacaactagaagtcccgag

SEQ ID NO: 11157 - DNA, 25 bp, Homo sapien
gggcggaaaccctcgaaccgtcagg

SEQ ID NO: 11158 - DNA, 25 bp, Homo sapien
gggcggaaacccacgaaccgtcagg

SEQ ID NO: 11159 - DNA, 25 bp, Homo sapien
cgtcctgaacccactagaaccagag

SEQ ID NO: 11160 - DNA, 25 bp, Homo sapien
cgtcctgaaccctctagaaccagag

SEQ ID NO: 11161 - DNA, 25 bp, Homo sapien
agcgtggagacttctggaaccaggt

SEQ ID NO: 11162 - DNA, 25 bp, Homo sapien
agcgtggagactactggaaccaggt

SEQ ID NO: 11163 - DNA, 25 bp, Homo sapien
gacctatgactgtggtaacgacaag

SEQ ID NO: 11164 - DNA, 25 bp, Homo sapien
gacctatgactgaggtaacgacaag

SEQ ID NO: 11165 - DNA, 25 bp, Homo sapien
ttccacaacggtctcctctgactgt

SEQ ID NO: 11166 - DNA, 25 bp, Homo sapien
ttccacaacggtgtcctctgactgt

SEQ ID NO: 11167 - DNA, 25 bp, Homo sapien
tagttgaggggtcagtacattcatc

SEQ ID NO: 11168 - DNA, 25 bp, Homo sapien
tagttgaggggtgagtacattcatc

SEQ ID NO: 11169 - DNA, 25 bp, Homo sapien
ttatccaccggtgtcgtgtctccat

SEQ ID NO: 11170 - DNA, 25 bp, Homo sapien
ttatccaccggtctcgtgtctccat

SEQ ID NO: 11171 - DNA, 25 bp, Homo sapien
tctacctcgccttcgtggtcgtcga

SEQ ID NO: 11172 - DNA, 25 bp, Homo sapien
tctacctcgcctacgtggtcgtcga

SEQ ID NO: 11173 - DNA, 25 bp, Homo sapien
caaccgagtcgtcgtcggtctaacg

SEQ ID NO: 11174 - DNA, 25 bp, Homo sapien
caaccgagtcgtggtcggtctaacg

SEQ ID NO: 11175 - DNA, 25 bp, Homo sapien
agttttgtgtcggggtctctcctag

SEQ ID NO: 11176 - DNA, 25 bp, Homo sapien
agttttgtgtcgcggtctctcctag

SEQ ID NO: 11177 - DNA, 25 bp, Homo sapien
attgtctttcggagtatacgtcatt

SEQ ID NO: 11178 - DNA, 25 bp, Homo sapien
attgtctttcggtgtatacgtcatt

SEQ ID NO: 11179 - DNA, 25 bp, Homo sapien
aggtacataaacgttgtcgtctctt

SEQ ID NO: 11180 - DNA, 25 bp, Homo sapien
aggtacataaaccttgtcgtctctt

SEQ ID NO: 11181 - DNA, 25 bp, Homo sapien
gtacactatacagtagtgcttcttt

SEQ ID NO: 11182 - DNA, 25 bp, Homo sapien
gtacactatacactagtgcttcttt

SEQ ID NO: 11183 - DNA, 25 bp, Homo sapien
tatccttcttaagtcctcgatccat

SEQ ID NO: 11184 - DNA, 25 bp, Homo sapien
tatccttcttaactcctcgatccat

SEQ ID NO: 11185 - DNA, 25 bp, Homo sapien
accctacgtttactgaaggcctaga

SEQ ID NO: 11186 - DNA, 25 bp, Homo sapien
accctacgtttagtgaaggcctaga

SEQ ID NO: 11187 - DNA, 25 bp, Homo sapien
tgaacgtttgttaagagagccttac

SEQ ID NO: 11188 - DNA, 25 bp, Homo sapien
tgaacgtttgtttagagagccttac

SEQ ID NO: 11189 - DNA, 25 bp, Homo sapien
tccgttctgaccacaaaaacgacga

SEQ ID NO: 11190 - DNA, 25 bp, Homo sapien
tccgttctgacctcaaaaacgacga

SEQ ID NO: 11191 - DNA, 25 bp, Homo sapien
tcctagggacccataaagacggttt

SEQ ID NO: 11192 - DNA, 25 bp, Homo sapien
tcctagggacccttaaagacggttt

SEQ ID NO: 11193 - DNA, 25 bp, Homo sapien
tttcagctacgttgggtacgatgtt

SEQ ID NO: 11194 - DNA, 25 bp, Homo sapien
tttcagctacgtagggtacgatgtt

SEQ ID NO: 11195 - DNA, 25 bp, Homo sapien
tacggtgacattacagtttcgtctg

SEQ ID NO: 11196 - DNA, 25 bp, Homo sapien
tacggtgacatttcagtttcgtctg

SEQ ID NO: 11197 - DNA, 25 bp, Homo sapien
gaagtcgaaattttcttattgtctc

SEQ ID NO: 11198 - DNA, 25 bp, Homo sapien
gaagtcgaaattatcttattgtctc

SEQ ID NO: 11199 - DNA, 25 bp, Homo sapien
cggcacagattctcgtctaacatcc

SEQ ID NO: 11200 - DNA, 25 bp, Homo sapien
cggcacagattcacgtctaacatcc

SEQ ID NO: 11201 - DNA, 25 bp, Homo sapien
ggccagtaactcaagacactaattc

SEQ ID NO: 11202 - DNA, 25 bp, Homo sapien
ggccagtaactctagacactaattc

SEQ ID NO: 11203 - DNA, 25 bp, Homo sapien
gggaatgaccaggacgaaggtactc

SEQ ID NO: 11204 - DNA, 25 bp, Homo sapien
gggaatgaccagcacgaaggtactc

SEQ ID NO: 11205 - DNA, 25 bp, Homo sapien
ggcgatgtagggtccaactgggtgc

SEQ ID NO: 11206 - DNA, 25 bp, Homo sapien
ggcgatgtagggaccaactgggtgc

SEQ ID NO: 11207 - DNA, 25 bp, Homo sapien
gagtaggggttatccttgttaatcc

SEQ ID NO: 11208 - DNA, 25 bp, Homo sapien
gagtaggggttaaccttgttaatcc

SEQ ID NO: 11209 - DNA, 25 bp, Homo sapien
atctgtggtcatatgtttgtctaca

SEQ ID NO: 11210 - DNA, 25 bp, Homo sapien
atctgtggtcatttgtttgtctaca

SEQ ID NO: 11211 - DNA, 25 bp, Homo sapien
acatcgctcgtttaagacctttcat

SEQ ID NO: 11212 - DNA, 25 bp, Homo sapien
acatcgctcgttaaagacctttcat

SEQ ID NO: 11213 - DNA, 25 bp, Homo sapien
ccgaggtccgtgtttttatcttata

SEQ ID NO: 11214 - DNA, 25 bp, Homo sapien
ccgaggtccgtgattttatcttata

SEQ ID NO: 11215 - DNA, 25 bp, Homo sapien
cggcacatctacctcttcctgtgtg

SEQ ID NO: 11216 - DNA, 25 bp, Homo sapien
cggcacatctacgtcttcctgtgtg

SEQ ID NO: 11217 - DNA, 25 bp, Homo sapien
gtccgtcacatgagataccgtttag

SEQ ID NO: 11218 - DNA, 25 bp, Homo sapien
gtccgtcacatgtgataccgtttag

SEQ ID NO: 11219 - DNA, 25 bp, Homo sapien
tcactttgtcactgtttcgattagt

SEQ ID NO: 11220 - DNA, 25 bp, Homo sapien
tcactttgtcacagtttcgattagt

SEQ ID NO: 11221 - DNA, 25 bp, Homo sapien
gagacctcttaaaagtatccgttta

SEQ ID NO: 11222 - DNA, 25 bp, Homo sapien
gagacctcttaatagtatccgttta

SEQ ID NO: 11223 - DNA, 25 bp, Homo sapien
tacccagatctatggtcctgtcgag

SEQ ID NO: 11224 - DNA, 25 bp, Homo sapien
tacccagatctaaggtcctgtcgag

SEQ ID NO: 11225 - DNA, 25 bp, Homo sapien
tggttgaatcacaaaactagactac

SEQ ID NO: 11226 - DNA, 25 bp, Homo sapien
tggttgaatcactaaactagactac

SEQ ID NO: 11227 - DNA, 25 bp, Homo sapien
gtcggggacttacgttcctctccac

SEQ ID NO: 11228 - DNA, 25 bp, Homo sapien
gtcggggacttaggttcctctccac

SEQ ID NO: 11229 - DNA, 25 bp, Homo sapien
ttcttccaccgactccggttggtct

SEQ ID NO: 11230 - DNA, 25 bp, Homo sapien
ttcttccaccgagtccggttggtct

SEQ ID NO: 11231 - DNA, 25 bp, Homo sapien
ttcgttcacccgtagttctaggggc

SEQ ID NO: 11232 - DNA, 25 bp, Homo sapien
ttcgttcacccgaagttctaggggc

SEQ ID NO: 11233 - DNA, 25 bp, Homo sapien
gcttatgactcgatgtcagaaactc

SEQ ID NO: 11234 - DNA, 25 bp, Homo sapien
gcttatgactcgttgtcagaaactc

SEQ ID NO: 11235 - DNA, 25 bp, Homo sapien
gtttatgtaactgtacagttcacag

SEQ ID NO: 11236 - DNA, 25 bp, Homo sapien
gtttatgtaactctacagttcacag

SEQ ID NO: 11237 - DNA, 25 bp, Homo sapien
tcgactgaagaatgtctcggtttca

SEQ ID NO: 11238 - DNA, 25 bp, Homo sapien
tcgactgaagaaagtctcggtttca

SEQ ID NO: 11239 - DNA, 25 bp, Homo sapien
ctgccctgaaggtcgggactcttca

SEQ ID NO: 11240 - DNA, 25 bp, Homo sapien
ctgccctgaaggacgggactcttca

SEQ ID NO: 11241 - DNA, 25 bp, Homo sapien
ctcgggggactgaggtcaccctacc

SEQ ID NO: 11242 - DNA, 25 bp, Homo sapien
ctcgggggactgtggtcaccctacc

SEQ ID NO: 11243 - DNA, 25 bp, Homo sapien
caagcgaagtcagttcctaccttcc

SEQ ID NO: 11244 - DNA, 25 bp, Homo sapien
caagcgaagtcacttcctaccttcc

SEQ ID NO: 11245 - DNA, 25 bp, Homo sapien
agaacacaaacatgcctgtcactcg

SEQ ID NO: 11246 - DNA, 25 bp, Homo sapien
agaacacaaacaagcctgtcactcg

SEQ ID NO: 11247 - DNA, 25 bp, Homo sapien
tgcgacgaagaagtctcgttatgcg

SEQ ID NO: 11248 - DNA, 25 bp, Homo sapien
tgcgacgaagaactctcgttatgcg

SEQ ID NO: 11249 - DNA, 25 bp, Homo sapien
tttccgagttactttcctattagag

SEQ ID NO: 11250 - DNA, 25 bp, Homo sapien
tttccgagttacattcctattagag

SEQ ID NO: 11251 - DNA, 25 bp, Homo sapien
atagagaatcctttaccactctcgg

SEQ ID NO: 11252 - DNA, 25 bp, Homo sapien
atagagaatcctataccactctcgg

SEQ ID NO: 11253 - DNA, 25 bp, Homo sapien
aaacaatgtactaattccgagttgg

SEQ ID NO: 11254 - DNA, 25 bp, Homo sapien
aaacaatgtacttattccgagttgg

SEQ ID NO: 11255 - DNA, 25 bp, Homo sapien
atcgattagtcaaaaccgttatgtg

SEQ ID NO: 11256 - DNA, 25 bp, Homo sapien
atcgattagtcataaccgttatgtg

SEQ ID NO: 11257 - DNA, 25 bp, Homo sapien
taaatcaacagtccgtagtatcgtt

SEQ ID NO: 11258 - DNA, 25 bp, Homo sapien
taaatcaacagtgcgtagtatcgtt

SEQ ID NO: 11259 - DNA, 25 bp, Homo sapien
caataatgtacgagttcactaagtt

SEQ ID NO: 11260 - DNA, 25 bp, Homo sapien
caataatgtacgtgttcactaagtt

SEQ ID NO: 11261 - DNA, 25 bp, Homo sapien
aaacatggtgtcgacggtctttatg

SEQ ID NO: 11262 - DNA, 25 bp, Homo sapien
aaacatggtgtccacggtctttatg

SEQ ID NO: 11263 - DNA, 25 bp, Homo sapien
acgacagacggcacgctccagggtg

SEQ ID NO: 11264 - DNA, 25 bp, Homo sapien
acgacagacggctcgctccagggtg

SEQ ID NO: 11265 - DNA, 25 bp, Homo sapien
cacagacgtgtcgtcccgaaggagg

SEQ ID NO: 11266 - DNA, 25 bp, Homo sapien
cacagacgtgtcctcccgaaggagg

SEQ ID NO: 11267 - DNA, 25 bp, Homo sapien
catatgtccgtccaccctaaggagg

SEQ ID NO: 11268 - DNA, 25 bp, Homo sapien
catatgtccgtcgaccctaaggagg

SEQ ID NO: 11269 - DNA, 25 bp, Homo sapien
ccaggtgcactcgaagctggtgaag

SEQ ID NO: 11270 - DNA, 25 bp, Homo sapien
ccaggtgcactccaagctggtgaag

SEQ ID NO: 11271 - DNA, 25 bp, Homo sapien
gaaggcagaccactcactagtagaa

SEQ ID NO: 11272 - DNA, 25 bp, Homo sapien
gaaggcagaccagtcactagtagaa

SEQ ID NO: 11273 - DNA, 25 bp, Homo sapien
caagcactccgtgttcacgttaaga

SEQ ID NO: 11274 - DNA, 25 bp, Homo sapien
caagcactccgtcttcacgttaaga

SEQ ID NO: 11275 - DNA, 25 bp, Homo sapien
aagtgccctttaccacggtgcgtac

SEQ ID NO: 11276 - DNA, 25 bp, Homo sapien
aagtgccctttagcacggtgcgtac

SEQ ID NO: 11277 - DNA, 25 bp, Homo sapien
gaattgtacgactgtacaggtcgat

SEQ ID NO: 11278 - DNA, 25 bp, Homo sapien
gaattgtacgacagtacaggtcgat

SEQ ID NO: 11279 - DNA, 25 bp, Homo sapien
tggacgacaagtgacagtcagaaca

SEQ ID NO: 11280 - DNA, 25 bp, Homo sapien
tggacgacaagtcacagtcagaaca

SEQ ID NO: 11281 - DNA, 25 bp, Homo sapien
tctctggtcaccaaagggacgaaac

SEQ ID NO: 11282 - DNA, 25 bp, Homo sapien
tctctggtcacctaagggacgaaac

SEQ ID NO: 11283 - DNA, 25 bp, Homo sapien
ctcttggtccttaaaatccgaagac

SEQ ID NO: 11284 - DNA, 25 bp, Homo sapien
ctcttggtcctttaaatccgaagac

SEQ ID NO: 11285 - DNA, 25 bp, Homo sapien
tactacgggtcctaaaatcaccgaa

SEQ ID NO: 11286 - DNA, 25 bp, Homo sapien
tactacgggtccaaaaatcaccgaa

SEQ ID NO: 11287 - DNA, 25 bp, Homo sapien
agggggttcgacacgaacgtccaga

SEQ ID NO: 11288 - DNA, 25 bp, Homo sapien
agggggttcgactcgaacgtccaga

SEQ ID NO: 11289 - DNA, 25 bp, Homo sapien
gccaggtgttcctcaaccgtgtctc

SEQ ID NO: 11290 - DNA, 25 bp, Homo sapien
gccaggtgttccacaaccgtgtctc

SEQ ID NO: 11291 - DNA, 25 bp, Homo sapien
ttggagcccacgaacccttcgtagt

SEQ ID NO: 11292 - DNA, 25 bp, Homo sapien
ttggagcccacgtacccttcgtagt

SEQ ID NO: 11293 - DNA, 25 bp, Homo sapien
taggaccacagtgatctcctcctgt

SEQ ID NO: 11294 - DNA, 25 bp, Homo sapien
taggaccacagtcatctcctcctgt

SEQ ID NO: 11295 - DNA, 25 bp, Homo sapien
gacggactgggtcacaacccgtatt

SEQ ID NO: 11296 - DNA, 25 bp, Homo sapien
gacggactgggtgacaacccgtatt

SEQ ID NO: 11297 - DNA, 25 bp, Homo sapien
aggaccgaggagaatgactctatgt

SEQ ID NO: 11298 - DNA, 25 bp, Homo sapien
aggaccgaggagtatgactctatgt

SEQ ID NO: 11299 - DNA, 25 bp, Homo sapien
gtgcggcccgggttcaactactctt

SEQ ID NO: 11300 - DNA, 25 bp, Homo sapien
gtgcggcccgggatcaactactctt

SEQ ID NO: 11301 - DNA, 25 bp, Homo sapien
tcgagagcccggattacttaataga

SEQ ID NO: 11302 - DNA, 25 bp, Homo sapien
tcgagagcccggtttacttaataga

SEQ ID NO: 11303 - DNA, 25 bp, Homo sapien
acggggaatagttccgactctgtga

SEQ ID NO: 11304 - DNA, 25 bp, Homo sapien
acggggaatagtaccgactctgtga

SEQ ID NO: 11305 - DNA, 25 bp, Homo sapien
gcagtggcgtatgtcttagattcga

SEQ ID NO: 11306 - DNA, 25 bp, Homo sapien
gcagtggcgtatctcttagattcga

SEQ ID NO: 11307 - DNA, 25 bp, Homo sapien
ccttcgacctatactttacagatgg

SEQ ID NO: 11308 - DNA, 25 bp, Homo sapien
ccttcgacctattctttacagatgg

SEQ ID NO: 11309 - DNA, 25 bp, Homo sapien
gcttcgaccctgttttacaagacat

SEQ ID NO: 11310 - DNA, 25 bp, Homo sapien
gcttcgaccctgatttacaagacat

SEQ ID NO: 11311 - DNA, 25 bp, Homo sapien
gacctcaccactttttgaagtctag

SEQ ID NO: 11312 - DNA, 25 bp, Homo sapien
gacctcaccactatttgaagtctag

SEQ ID NO: 11313 - DNA, 25 bp, Homo sapien
cgtggttcttgtttgtcaagttcga

SEQ ID NO: 11314 - DNA, 25 bp, Homo sapien
cgtggttcttgtatgtcaagttcga

SEQ ID NO: 11315 - DNA, 25 bp, Homo sapien
gatttatcagtgattccgaacttaa

SEQ ID NO: 11316 - DNA, 25 bp, Homo sapien
gatttatcagtgtttccgaacttaa

SEQ ID NO: 11317 - DNA, 25 bp, Homo sapien
gagccaccggggtctgcagttcgac

SEQ ID NO: 11318 - DNA, 25 bp, Homo sapien
gagccaccggggactgcagttcgac

SEQ ID NO: 11319 - DNA, 25 bp, Homo sapien
ccccgtcgtaggaacttcagagcct

SEQ ID NO: 11320 - DNA, 25 bp, Homo sapien
ccccgtcgtaggtacttcagagcct

SEQ ID NO: 11321 - DNA, 25 bp, Homo sapien
acctgtgcgagtgtgtctcaggtcc

SEQ ID NO: 11322 - DNA, 25 bp, Homo sapien
acctgtgcgagtctgtctcaggtcc

SEQ ID NO: 11323 - DNA, 25 bp, Homo sapien
ttactgtcgacacattttggtcacg

SEQ ID NO: 11324 - DNA, 25 bp, Homo sapien
ttactgtcgacagattttggtcacg

SEQ ID NO: 11325 - DNA, 25 bp, Homo sapien
acaaagtacgaatgtatttttgcac

SEQ ID NO: 11326 - DNA, 25 bp, Homo sapien
acaaagtacgaaagtatttttgcac

SEQ ID NO: 11327 - DNA, 25 bp, Homo sapien
taaaggtgtaatcttagtcttctca

SEQ ID NO: 11328 - DNA, 25 bp, Homo sapien
taaaggtgtaatgttagtcttctca

SEQ ID NO: 11329 - DNA, 25 bp, Homo sapien
gagattaaactagattttctcgacg

SEQ ID NO: 11330 - DNA, 25 bp, Homo sapien
gagattaaactacattttctcgacg

SEQ ID NO: 11331 - DNA, 25 bp, Homo sapien
ggtgttaaacaactagaccttaacg

SEQ ID NO: 11332 - DNA, 25 bp, Homo sapien
ggtgttaaacaagtagaccttaacg

SEQ ID NO: 11333 - DNA, 25 bp, Homo sapien
gctcaggtatctcattccactttcg

SEQ ID NO: 11334 - DNA, 25 bp, Homo sapien
gctcaggtatctgattccactttcg

SEQ ID NO: 11335 - DNA, 25 bp, Homo sapien
gggttaagagcgagatccttttaca

SEQ ID NO: 11336 - DNA, 25 bp, Homo sapien
gggttaagagcgtgatccttttaca

SEQ ID NO: 11337 - DNA, 25 bp, Homo sapien
ccagagacaggtgactccgtgggaa

SEQ ID NO: 11338 - DNA, 25 bp, Homo sapien
ccagagacaggtcactccgtgggaa

SEQ ID NO: 11339 - DNA, 25 bp, Homo sapien
gagtcatccgtaccaaccgttacat

SEQ ID NO: 11340 - DNA, 25 bp, Homo sapien
gagtcatccgtagcaaccgttacat

SEQ ID NO: 11341 - DNA, 25 bp, Homo sapien
taggaacccgtccacgtccgtatgt

SEQ ID NO: 11342 - DNA, 25 bp, Homo sapien
taggaacccgtcgacgtccgtatgt

SEQ ID NO: 11343 - DNA, 25 bp, Homo sapien
tagtgacacccgtgtactaccctct

SEQ ID NO: 11344 - DNA, 25 bp, Homo sapien
tagtgacacccgagtactaccctct

SEQ ID NO: 11345 - DNA, 25 bp, Homo sapien
ttagtgtagatccggttgtcgctcc

SEQ ID NO: 11346 - DNA, 25 bp, Homo sapien
ttagtgtagatcgggttgtcgctcc

SEQ ID NO: 11347 - DNA, 25 bp, Homo sapien
gagttcggtacgagttcttctccgt

SEQ ID NO: 11348 - DNA, 25 bp, Homo sapien
gagttcggtacgtgttcttctccgt

SEQ ID NO: 11349 - DNA, 25 bp, Homo sapien
gggacaggccacgaggtcctcccgt

SEQ ID NO: 11350 - DNA, 25 bp, Homo sapien
gggacaggccaccaggtcctcccgt

SEQ ID NO: 11351 - DNA, 25 bp, Homo sapien
gccggtaccgacagtaaaactcccg

SEQ ID NO: 11352 - DNA, 25 bp, Homo sapien
gccggtaccgactgtaaaactcccg

SEQ ID NO: 11353 - DNA, 25 bp, Homo sapien
ggggtacccgggtgaaaaaccccgt

SEQ ID NO: 11354 - DNA, 25 bp, Homo sapien
ggggtacccgggagaaaaaccccgt

SEQ ID NO: 11355 - DNA, 25 bp, Homo sapien
aagacccgagagagaccaaacccct

SEQ ID NO: 11356 - DNA, 25 bp, Homo sapien
aagacccgagagtgaccaaacccct

SEQ ID NO: 11357 - DNA, 25 bp, Homo sapien
cacggtgtcggtgacccccgtctcc

SEQ ID NO: 11358 - DNA, 25 bp, Homo sapien
cacggtgtcggtcacccccgtctcc

SEQ ID NO: 11359 - DNA, 25 bp, Homo sapien
aggtcgggtctcttaccgtcgctcc

SEQ ID NO: 11360 - DNA, 25 bp, Homo sapien
aggtcgggtctcataccgtcgctcc

SEQ ID NO: 11361 - DNA, 25 bp, Homo sapien
tgggctaggagtcctaccgcgaccc

SEQ ID NO: 11362 - DNA, 25 bp, Homo sapien
tgggctaggagtgctaccgcgaccc

SEQ ID NO: 11363 - DNA, 25 bp, Homo sapien
gagggagtagtacagtgagacaccc

SEQ ID NO: 11364 - DNA, 25 bp, Homo sapien
gagggagtagtagagtgagacaccc

SEQ ID NO: 11365 - DNA, 25 bp, Homo sapien
tggggagctcgtcactgacggaaac

SEQ ID NO: 11366 - DNA, 25 bp, Homo sapien
tggggagctcgtgactgacggaaac

SEQ ID NO: 11367 - DNA, 25 bp, Homo sapien
gtaatgagggggaagagggtatact

SEQ ID NO: 11368 - DNA, 25 bp, Homo sapien
gtaatgagggggtagagggtatact

SEQ ID NO: 11369 - DNA, 25 bp, Homo sapien
tttcctcttgagttaaggtcttcgt

SEQ ID NO: 11370 - DNA, 25 bp, Homo sapien
tttcctcttgagataaggtcttcgt

SEQ ID NO: 11371 - DNA, 25 bp, Homo sapien
aatcttctctacagacaaggtcttc

SEQ ID NO: 11372 - DNA, 25 bp, Homo sapien
aatcttctctactgacaaggtcttc

SEQ ID NO: 11373 - DNA, 25 bp, Homo sapien
gtcttcgtgacaaagacttaccact

SEQ ID NO: 11374 - DNA, 25 bp, Homo sapien
gtcttcgtgacatagacttaccact

SEQ ID NO: 11375 - DNA, 25 bp, Homo sapien
agacacggtcgagactgagttccac

SEQ ID NO: 11376 - DNA, 25 bp, Homo sapien
agacacggtcgacactgagttccac

SEQ ID NO: 11377 - DNA, 25 bp, Homo sapien
agccacaaggtccttcggaataaac

SEQ ID NO: 11378 - DNA, 25 bp, Homo sapien
agccacaaggtcgttcggaataaac

SEQ ID NO: 11379 - DNA, 25 bp, Homo sapien
gtgggacagtctacgagtctaaacg

SEQ ID NO: 11380 - DNA, 25 bp, Homo sapien
gtgggacagtcttcgagtctaaacg

SEQ ID NO: 11381 - DNA, 25 bp, Homo sapien
tttcgtcgaaacttcgaatagtccg

SEQ ID NO: 11382 - DNA, 25 bp, Homo sapien
tttcgtcgaaacatcgaatagtccg

SEQ ID NO: 11383 - DNA, 25 bp, Homo sapien
cttaatgacgcgtatatcaataaag

SEQ ID NO: 11384 - DNA, 25 bp, Homo sapien
cttaatgacgcgaatatcaataaag

SEQ ID NO: 11385 - DNA, 25 bp, Homo sapien
tttgtttggttctttaccgaaatac

SEQ ID NO: 11386 - DNA, 25 bp, Homo sapien
tttgtttggttcattaccgaaatac

SEQ ID NO: 11387 - DNA, 25 bp, Homo sapien
ttttattcctcgaccggtagacaat

SEQ ID NO: 11388 - DNA, 25 bp, Homo sapien
ttttattcctcgtccggtagacaat

SEQ ID NO: 11389 - DNA, 25 bp, Homo sapien
ctctttgccggacacaggtagacag

SEQ ID NO: 11390 - DNA, 25 bp, Homo sapien
ctctttgccggagacaggtagacag

SEQ ID NO: 11391 - DNA, 25 bp, Homo sapien
tcgttgagtttcctgtagtgtgtca

SEQ ID NO: 11392 - DNA, 25 bp, Homo sapien
tcgttgagtttcgtgtagtgtgtca

SEQ ID NO: 11393 - DNA, 25 bp, Homo sapien
cgggctacagtacgtcacacgcgtt

SEQ ID NO: 11394 - DNA, 25 bp, Homo sapien
cgggctacagtaggtcacacgcgtt

SEQ ID NO: 11395 - DNA, 25 bp, Homo sapien
aagtgttaccgacgtcactactcct

SEQ ID NO: 11396 - DNA, 25 bp, Homo sapien
aagtgttaccgaggtcactactcct

SEQ ID NO: 11397 - DNA, 25 bp, Homo sapien
aatgtacatatcgtgtgttatctac

SEQ ID NO: 11398 - DNA, 25 bp, Homo sapien
aatgtacatatcctgtgttatctac

SEQ ID NO: 11399 - DNA, 25 bp, Homo sapien
gaagagactactcctttagtatcta

SEQ ID NO: 11400 - DNA, 25 bp, Homo sapien
gaagagactactgctttagtatcta

SEQ ID NO: 11401 - DNA, 25 bp, Homo sapien
ttaaataactattttagacactact

SEQ ID NO: 11402 - DNA, 25 bp, Homo sapien
ttaaataactatattagacactact

SEQ ID NO: 11403 - DNA, 25 bp, Homo sapien
gcagctaggacggcgaaagcgaaac

SEQ ID NO: 11404 - DNA, 25 bp, Homo sapien
gcagctaggacgccgaaagcgaaac

SEQ ID NO: 11405 - DNA, 25 bp, Homo sapien
acttgtccacgacctcagccgcgcg

SEQ ID NO: 11406 - DNA, 25 bp, Homo sapien
acttgtccacgagctcagccgcgcg

SEQ ID NO: 11407 - DNA, 25 bp, Homo sapien
cttcttctgtcaggtctactacaag

SEQ ID NO: 11408 - DNA, 25 bp, Homo sapien
cttcttctgtcacgtctactacaag

SEQ ID NO: 11409 - DNA, 25 bp, Homo sapien
gttcgtatttcttctggttacgaaa

SEQ ID NO: 11410 - DNA, 25 bp, Homo sapien
gttcgtatttctactggttacgaaa

SEQ ID NO: 11411 - DNA, 25 bp, Homo sapien
tttctgtacgtttcgctagtaatgt

SEQ ID NO: 11412 - DNA, 25 bp, Homo sapien
tttctgtacgttacgctagtaatgt

SEQ ID NO: 11413 - DNA, 25 bp, Homo sapien
tcccttcgtcggtcgaacacaaatg

SEQ ID NO: 11414 - DNA, 25 bp, Homo sapien
tcccttcgtcggacgaacacaaatg

SEQ ID NO: 11415 - DNA, 25 bp, Homo sapien
ttaccctgtgcgagcgccaactaag

SEQ ID NO: 11416 - DNA, 25 bp, Homo sapien
ttaccctgtgcgtgcgccaactaag

SEQ ID NO: 11417 - DNA, 25 bp, Homo sapien
cccactttgtgagtggatcacacag

SEQ ID NO: 11418 - DNA, 25 bp, Homo sapien
cccactttgtgactggatcacacag

SEQ ID NO: 11419 - DNA, 25 bp, Homo sapien
tcggctactggtcgtgggtctcctg

SEQ ID NO: 11420 - DNA, 25 bp, Homo sapien
tcggctactggtggtgggtctcctg

SEQ ID NO: 11421 - DNA, 25 bp, Homo sapien
agtgacatctttttacacttctgtg

SEQ ID NO: 11422 - DNA, 25 bp, Homo sapien
agtgacatctttatacacttctgtg

SEQ ID NO: 11423 - DNA, 25 bp, Homo sapien
gagacaacgaaggaagtctgtctgg

SEQ ID NO: 11424 - DNA, 25 bp, Homo sapien
gagacaacgaagcaagtctgtctgg

SEQ ID NO: 11425 - DNA, 25 bp, Homo sapien
gaggtacagagtctgtagtcttttc

SEQ ID NO: 11426 - DNA, 25 bp, Homo sapien
gaggtacagagtgtgtagtcttttc

SEQ ID NO: 11427 - DNA, 25 bp, Homo sapien
cgagacgagaggtgacgcctctgac

SEQ ID NO: 11428 - DNA, 25 bp, Homo sapien
cgagacgagaggagacgcctctgac

SEQ ID NO: 11429 - DNA, 25 bp, Homo sapien
ctagtagtgccgagtcccgtgtgta

SEQ ID NO: 11430 - DNA, 25 bp, Homo sapien
ctagtagtgccgtgtcccgtgtgta

SEQ ID NO: 11431 - DNA, 25 bp, Homo sapien
agtgtatgtcactgtgtctccctca

SEQ ID NO: 11432 - DNA, 25 bp, Homo sapien
agtgtatgtcacagtgtctccctca

SEQ ID NO: 11433 - DNA, 25 bp, Homo sapien
tgtatgttcacgtgtctgtccacac

SEQ ID NO: 11434 - DNA, 25 bp, Homo sapien
tgtatgttcacgagtctgtccacac

SEQ ID NO: 11435 - DNA, 25 bp, Homo sapien
tacggatcgttcaaaactcgacacg

SEQ ID NO: 11436 - DNA, 25 bp, Homo sapien
tacggatcgttctaaactcgacacg

SEQ ID NO: 11437 - DNA, 25 bp, Homo sapien
agacggtacacgatatttcataaag

SEQ ID NO: 11438 - DNA, 25 bp, Homo sapien
agacggtacacgttatttcataaag

SEQ ID NO: 11439 - DNA, 25 bp, Homo sapien
agaagtcctctcatcgacaacggac

SEQ ID NO: 11440 - DNA, 25 bp, Homo sapien
agaagtcctctcttcgacaacggac

SEQ ID NO: 11441 - DNA, 25 bp, Homo sapien
tgtaagatttcgtccgtacaacggg

SEQ ID NO: 11442 - DNA, 25 bp, Homo sapien
tgtaagatttcgaccgtacaacggg

SEQ ID NO: 11443 - DNA, 25 bp, Homo sapien
taagatctcacgaatcgttccagag

SEQ ID NO: 11444 - DNA, 25 bp, Homo sapien
taagatctcacgtatcgttccagag

SEQ ID NO: 11445 - DNA, 25 bp, Homo sapien
caaaacatcctgtttgagtccagag

SEQ ID NO: 11446 - DNA, 25 bp, Homo sapien
caaaacatcctgattgagtccagag

SEQ ID NO: 11447 - DNA, 25 bp, Homo sapien
caagacttgcagatgttcgccaagt

SEQ ID NO: 11448 - DNA, 25 bp, Homo sapien
caagacttgcagttgttcgccaagt

SEQ ID NO: 11449 - DNA, 25 bp, Homo sapien
agactacagtttattgtaccttcgt

SEQ ID NO: 11450 - DNA, 25 bp, Homo sapien
agactacagttttttgtaccttcgt

SEQ ID NO: 11451 - DNA, 25 bp, Homo sapien
acaccttacgtctttattcgccgag

SEQ ID NO: 11452 - DNA, 25 bp, Homo sapien
acaccttacgtcattattcgccgag

SEQ ID NO: 11453 - DNA, 25 bp, Homo sapien
tagacttccagttactctgtctcag

SEQ ID NO: 11454 - DNA, 25 bp, Homo sapien
tagacttccagtaactctgtctcag

SEQ ID NO: 11455 - DNA, 25 bp, Homo sapien
agcactcgacctaccgttcgagagt

SEQ ID NO: 11456 - DNA, 25 bp, Homo sapien
agcactcgaccttccgttcgagagt

SEQ ID NO: 11457 - DNA, 25 bp, Homo sapien
aactactctccgtccgattccgagt

SEQ ID NO: 11458 - DNA, 25 bp, Homo sapien
aactactctccgaccgattccgagt

SEQ ID NO: 11459 - DNA, 25 bp, Homo sapien
ccgttgtcctgtgttgtctcgttcc

SEQ ID NO: 11460 - DNA, 25 bp, Homo sapien
ccgttgtcctgtcttgtctcgttcc

SEQ ID NO: 11461 - DNA, 25 bp, Homo sapien
gagactacctattgatgagtcttaa

SEQ ID NO: 11462 - DNA, 25 bp, Homo sapien
gagactacctatagatgagtcttaa

SEQ ID NO: 11463 - DNA, 25 bp, Homo sapien
aatgtatagtttagaatgttctatc

SEQ ID NO: 11464 - DNA, 25 bp, Homo sapien
aatgtatagttttgaatgttctatc

SEQ ID NO: 11465 - DNA, 25 bp, Homo sapien
gaagtatgacattagaccttttctt

SEQ ID NO: 11466 - DNA, 25 bp, Homo sapien
gaagtatgacataagaccttttctt

SEQ ID NO: 11467 - DNA, 25 bp, Homo sapien
gtcaaaagaagtcctctatcttcgt

SEQ ID NO: 11468 - DNA, 25 bp, Homo sapien
gtcaaaagaagtgctctatcttcgt

SEQ ID NO: 11469 - DNA, 25 bp, Homo sapien
tagaaggaactagtagtatctacgc

SEQ ID NO: 11470 - DNA, 25 bp, Homo sapien
tagaaggaactactagtatctacgc

SEQ ID NO: 11471 - DNA, 25 bp, Homo sapien
atttacagacagaagaacttccgac

SEQ ID NO: 11472 - DNA, 25 bp, Homo sapien
atttacagacagtagaacttccgac

SEQ ID NO: 11473 - DNA, 25 bp, Homo sapien
tggagagtacctgagactgccgacg

SEQ ID NO: 11474 - DNA, 25 bp, Homo sapien
tggagagtacctcagactgccgacg

SEQ ID NO: 11475 - DNA, 25 bp, Homo sapien
aacggagatggtcaaccgtctgtcg

SEQ ID NO: 11476 - DNA, 25 bp, Homo sapien
aacggagatggtgaaccgtctgtcg

SEQ ID NO: 11477 - DNA, 25 bp, Homo sapien
ccagagaaagtgaagaacttctaga

SEQ ID NO: 11478 - DNA, 25 bp, Homo sapien
ccagagaaagtgtagaacttctaga

SEQ ID NO: 11479 - DNA, 25 bp, Homo sapien
ccaaggatctttacagattactagg

SEQ ID NO: 11480 - DNA, 25 bp, Homo sapien
ccaaggatcttttcagattactagg

SEQ ID NO: 11481 - DNA, 25 bp, Homo sapien
cactactggttttcgttggtttgta

SEQ ID NO: 11482 - DNA, 25 bp, Homo sapien
cactactggtttacgttggtttgta

SEQ ID NO: 11483 - DNA, 25 bp, Homo sapien
tcgggttagacttacgagtttgtac

SEQ ID NO: 11484 - DNA, 25 bp, Homo sapien
tcgggttagactaacgagtttgtac

SEQ ID NO: 11485 - DNA, 25 bp, Homo sapien
ttgaacgtatcgatacagatttctc

SEQ ID NO: 11486 - DNA, 25 bp, Homo sapien
ttgaacgtatcgttacagatttctc

SEQ ID NO: 11487 - DNA, 25 bp, Homo sapien
gactttctagttacttatgtttacg

SEQ ID NO: 11488 - DNA, 25 bp, Homo sapien
gactttctagtttcttatgtttacg

SEQ ID NO: 11489 - DNA, 25 bp, Homo sapien
aaattgtctgtcgtacttagtttga

SEQ ID NO: 11490 - DNA, 25 bp, Homo sapien
aaattgtctgtcctacttagtttga

SEQ ID NO: 11491 - DNA, 25 bp, Homo sapien
aaagtactagacctacaggacaaac

SEQ ID NO: 11492 - DNA, 25 bp, Homo sapien
aaagtactagacgtacaggacaaac

SEQ ID NO: 11493 - DNA, 25 bp, Homo sapien
tgtgtacgtggttacacggaaaact

SEQ ID NO: 11494 - DNA, 25 bp, Homo sapien
tgtgtacgtggtaacacggaaaact

SEQ ID NO: 11495 - DNA, 25 bp, Homo sapien
tggttcctcgtaccaagagacaaac

SEQ ID NO: 11496 - DNA, 25 bp, Homo sapien
tggttcctcgtagcaagagacaaac

SEQ ID NO: 11497 - DNA, 25 bp, Homo sapien
tcttctgtctcgtcgacctcgacta

SEQ ID NO: 11498 - DNA, 25 bp, Homo sapien
tcttctgtctcgacgacctcgacta

SEQ ID NO: 11499 - DNA, 25 bp, Homo sapien
cgtgtcgtttatcatacgtattgaa

SEQ ID NO: 11500 - DNA, 25 bp, Homo sapien
cgtgtcgtttatgatacgtattgaa

SEQ ID NO: 11501 - DNA, 25 bp, Homo sapien
tccgcgaggagcatcgaggcgtcct

SEQ ID NO: 11502 - DNA, 25 bp, Homo sapien
tccgcgaggagcttcgaggcgtcct

SEQ ID NO: 11503 - DNA, 25 bp, Homo sapien
aaatcacagtaacttgtgtcggaca

SEQ ID NO: 11504 - DNA, 25 bp, Homo sapien
aaatcacagtaagttgtgtcggaca

SEQ ID NO: 11505 - DNA, 25 bp, Homo sapien
gaacacagtcagaaccttgtcaagt

SEQ ID NO: 11506 - DNA, 25 bp, Homo sapien
gaacacagtcagtaccttgtcaagt

SEQ ID NO: 11507 - DNA, 25 bp, Homo sapien
tgtagaattctaacgtgtcttgcaa

SEQ ID NO: 11508 - DNA, 25 bp, Homo sapien
tgtagaattctatcgtgtcttgcaa

SEQ ID NO: 11509 - DNA, 25 bp, Homo sapien
acagatgtctcatgacgttttctac

SEQ ID NO: 11510 - DNA, 25 bp, Homo sapien
acagatgtctcaagacgttttctac

SEQ ID NO: 11511 - DNA, 25 bp, Homo sapien
aggtgtacgtcaaagacactcttac

SEQ ID NO: 11512 - DNA, 25 bp, Homo sapien
aggtgtacgtcatagacactcttac

SEQ ID NO: 11513 - DNA, 25 bp, Homo sapien
tcgacgaggattagggacccgttac

SEQ ID NO: 11514 - DNA, 25 bp, Homo sapien
tcgacgaggatttgggacccgttac

SEQ ID NO: 11515 - DNA, 25 bp, Homo sapien
gagggacgtgtttgaactctctctc

SEQ ID NO: 11516 - DNA, 25 bp, Homo sapien
gagggacgtgttagaactctctctc

SEQ ID NO: 11517 - DNA, 25 bp, Homo sapien
gagagagtccttggtccgtctcagt

SEQ ID NO: 11518 - DNA, 25 bp, Homo sapien
gagagagtccttcgtccgtctcagt

SEQ ID NO: 11519 - DNA, 25 bp, Homo sapien
tcgggtcctacttgtcgactcgaca

SEQ ID NO: 11520 - DNA, 25 bp, Homo sapien
tcgggtcctactagtcgactcgaca

SEQ ID NO: 11521 - DNA, 25 bp, Homo sapien
taccgtcgtcctttaggtcccgact

SEQ ID NO: 11522 - DNA, 25 bp, Homo sapien
taccgtcgtcctataggtcccgact

SEQ ID NO: 11523 - DNA, 25 bp, Homo sapien
gcactcgtctcctggagcggacaga

SEQ ID NO: 11524 - DNA, 25 bp, Homo sapien
gcactcgtctccaggagcggacaga

SEQ ID NO: 11525 - DNA, 25 bp, Homo sapien
gtcgacgtacgtcatcgccggaaac

SEQ ID NO: 11526 - DNA, 25 bp, Homo sapien
gtcgacgtacgtgatcgccggaaac

SEQ ID NO: 11527 - DNA, 25 bp, Homo sapien
actcgtcactgtaatgtgacccacc

SEQ ID NO: 11528 - DNA, 25 bp, Homo sapien
actcgtcactgttatgtgacccacc

SEQ ID NO: 11529 - DNA, 25 bp, Homo sapien
gacgacctctgtagtggccgactcc

SEQ ID NO: 11530 - DNA, 25 bp, Homo sapien
gacgacctctgttgtggccgactcc

SEQ ID NO: 11531 - DNA, 25 bp, Homo sapien
tgcatgaggagtcgtctcgacctcc

SEQ ID NO: 11532 - DNA, 25 bp, Homo sapien
tgcatgaggagtggtctcgacctcc

SEQ ID NO: 11533 - DNA, 25 bp, Homo sapien
tccgaggaggtcttctaagattcct

SEQ ID NO: 11534 - DNA, 25 bp, Homo sapien
tccgaggaggtcatctaagattcct

SEQ ID NO: 11535 - DNA, 25 bp, Homo sapien
gcggacagtctttgacagacacact

SEQ ID NO: 11536 - DNA, 25 bp, Homo sapien
gcggacagtcttagacagacacact

SEQ ID NO: 11537 - DNA, 25 bp, Homo sapien
gggagagtatctcagactaggacac

SEQ ID NO: 11538 - DNA, 25 bp, Homo sapien
gggagagtatctgagactaggacac

SEQ ID NO: 11539 - DNA, 25 bp, Homo sapien
gatcgaccgagtctgaacagtgacc

SEQ ID NO: 11540 - DNA, 25 bp, Homo sapien
gatcgaccgagtgtgaacagtgacc

SEQ ID NO: 11541 - DNA, 25 bp, Homo sapien
ttcatcgactcgtgaacgaggtccg

SEQ ID NO: 11542 - DNA, 25 bp, Homo sapien
ttcatcgactcgagaacgaggtccg

SEQ ID NO: 11543 - DNA, 25 bp, Homo sapien
atcacaccacttgaacgtggactcc

SEQ ID NO: 11544 - DNA, 25 bp, Homo sapien
atcacaccacttcaacgtggactcc

SEQ ID NO: 11545 - DNA, 25 bp, Homo sapien
gtatttcgtgtgtcggcgtgagtac

SEQ ID NO: 11546 - DNA, 25 bp, Homo sapien
gtatttcgtgtgacggcgtgagtac

SEQ ID NO: 11547 - DNA, 25 bp, Homo sapien
gctaggtttcgaaggtcgacgacga

SEQ ID NO: 11548 - DNA, 25 bp, Homo sapien
gctaggtttcgatggtcgacgacga

SEQ ID NO: 11549 - DNA, 25 bp, Homo sapien
aggcgagttttcgacgaacacagat

SEQ ID NO: 11550 - DNA, 25 bp, Homo sapien
aggcgagttttccacgaacacagat

SEQ ID NO: 11551 - DNA, 25 bp, Homo sapien
agaacatttcctcaagagacagtcg

SEQ ID NO: 11552 - DNA, 25 bp, Homo sapien
agaacatttcctgaagagacagtcg

SEQ ID NO: 11553 - DNA, 25 bp, Homo sapien
ccaatgtcttccaaagtacctgtcg

SEQ ID NO: 11554 - DNA, 25 bp, Homo sapien
ccaatgtcttcctaagtacctgtcg

SEQ ID NO: 11555 - DNA, 25 bp, Homo sapien
ttctcgctgtccatgtgtcctcacg

SEQ ID NO: 11556 - DNA, 25 bp, Homo sapien
ttctcgctgtccttgtgtcctcacg

SEQ ID NO: 11557 - DNA, 25 bp, Homo sapien
tcatctacgtccgctcgagcctctg

SEQ ID NO: 11558 - DNA, 25 bp, Homo sapien
tcatctacgtcccctcgagcctctg

SEQ ID NO: 11559 - DNA, 25 bp, Homo sapien
attacgacgtaaggtgtccggagaa

SEQ ID NO: 11560 - DNA, 25 bp, Homo sapien
attacgacgtaacgtgtccggagaa

SEQ ID NO: 11561 - DNA, 25 bp, Homo sapien
agtcgtcgtccgtgcgtcccggaac

SEQ ID NO: 11562 - DNA, 25 bp, Homo sapien
agtcgtcgtccgagcgtcccggaac

SEQ ID NO: 11563 - DNA, 25 bp, Homo sapien
aagtgtgttgtaacgacttccataa

SEQ ID NO: 11564 - DNA, 25 bp, Homo sapien
aagtgtgttgtatcgacttccataa

SEQ ID NO: 11565 - DNA, 25 bp, Homo sapien
gagtgggacatcatctactttactt

SEQ ID NO: 11566 - DNA, 25 bp, Homo sapien
gagtgggacatcttctactttactt

SEQ ID NO: 11567 - DNA, 25 bp, Homo sapien
gagaaccccgaatcattatatgttt

SEQ ID NO: 11568 - DNA, 25 bp, Homo sapien
gagaaccccgaaacattatatgttt

SEQ ID NO: 11569 - DNA, 25 bp, Homo sapien
ctagtgtgagtaactacttcttttg

SEQ ID NO: 11570 - DNA, 25 bp, Homo sapien
ctagtgtgagtatctacttcttttg

SEQ ID NO: 11571 - DNA, 25 bp, Homo sapien
agttaagtcgattactcggtttttc

SEQ ID NO: 11572 - DNA, 25 bp, Homo sapien
agttaagtcgataactcggtttttc

SEQ ID NO: 11573 - DNA, 25 bp, Homo sapien
tcgtggttattctgactgtcagtgc

SEQ ID NO: 11574 - DNA, 25 bp, Homo sapien
tcgtggttattcagactgtcagtgc

SEQ ID NO: 11575 - DNA, 25 bp, Homo sapien
tttgacttagttactcttgagagtc

SEQ ID NO: 11576 - DNA, 25 bp, Homo sapien
tttgacttagtttctcttgagagtc

SEQ ID NO: 11577 - DNA, 25 bp, Homo sapien
tacgacgttctatcctttaaggtgt

SEQ ID NO: 11578 - DNA, 25 bp, Homo sapien
tacgacgttctaacctttaaggtgt

SEQ ID NO: 11579 - DNA, 25 bp, Homo sapien
gtaacgtttccctgtaagacgacag

SEQ ID NO: 11580 - DNA, 25 bp, Homo sapien
gtaacgtttcccagtaagacgacag

SEQ ID NO: 11581 - DNA, 25 bp, Homo sapien
actttggtctaaagaggtcgacggt

SEQ ID NO: 11582 - DNA, 25 bp, Homo sapien
actttggtctaatgaggtcgacggt

SEQ ID NO: 11583 - DNA, 25 bp, Homo sapien
gagacttatgggttggacgatccca

SEQ ID NO: 11584 - DNA, 25 bp, Homo sapien
gagacttatgggatggacgatccca

SEQ ID NO: 11585 - DNA, 25 bp, Homo sapien
aggagtttgagaagacatcaaccat

SEQ ID NO: 11586 - DNA, 25 bp, Homo sapien
aggagtttgagatgacatcaaccat

SEQ ID NO: 11587 - DNA, 25 bp, Homo sapien
agtaaagaagattcgcgacacaatt

SEQ ID NO: 11588 - DNA, 25 bp, Homo sapien
agtaaagaagatacgcgacacaatt

SEQ ID NO: 11589 - DNA, 25 bp, Homo sapien
ggttcgatgaatgacacatcgatgt

SEQ ID NO: 11590 - DNA, 25 bp, Homo sapien
ggttcgatgaatcacacatcgatgt

SEQ ID NO: 11591 - DNA, 25 bp, Homo sapien
catttgtatcataaatgtcgtcatg

SEQ ID NO: 11592 - DNA, 25 bp, Homo sapien
catttgtatcattaatgtcgtcatg

SEQ ID NO: 11593 - DNA, 25 bp, Homo sapien
acgtcttatgaccttttgttacaga

SEQ ID NO: 11594 - DNA, 25 bp, Homo sapien
acgtcttatgacgttttgttacaga

SEQ ID NO: 11595 - DNA, 25 bp, Homo sapien
cgtccccttcggtgtctctctagga

SEQ ID NO: 11596 - DNA, 25 bp, Homo sapien
cgtccccttcggagtctctctagga

SEQ ID NO: 11597 - DNA, 25 bp, Homo sapien
gtgacctccgggtgctctcaagact

SEQ ID NO: 11598 - DNA, 25 bp, Homo sapien
gtgacctccgggagctctcaagact

SEQ ID NO: 11599 - DNA, 25 bp, Homo sapien
tctcctccgtcaaagacacacagga

SEQ ID NO: 11600 - DNA, 25 bp, Homo sapien
tctcctccgtcatagacacacagga

SEQ ID NO: 11601 - DNA, 25 bp, Homo sapien
gtgtacctcagaacctccgaaagga

SEQ ID NO: 11602 - DNA, 25 bp, Homo sapien
gtgtacctcagatcctccgaaagga

SEQ ID NO: 11603 - DNA, 25 bp, Homo sapien
aaactttaggtctcactgaggatat

SEQ ID NO: 11604 - DNA, 25 bp, Homo sapien
aaactttaggtcacactgaggatat

SEQ ID NO: 11605 - DNA, 25 bp, Homo sapien
aagatatttggtgaccggaagaacc

SEQ ID NO: 11606 - DNA, 25 bp, Homo sapien
aagatatttggtcaccggaagaacc

SEQ ID NO: 11607 - DNA, 25 bp, Homo sapien
aaattcttttcatctaacactgaca

SEQ ID NO: 11608 - DNA, 25 bp, Homo sapien
aaattcttttcaactaacactgaca

SEQ ID NO: 11609 - DNA, 25 bp, Homo sapien
aactaatcctttattgtctgtgcag

SEQ ID NO: 11610 - DNA, 25 bp, Homo sapien
aactaatccttttttgtctgtgcag

SEQ ID NO: 11611 - DNA, 25 bp, Homo sapien
catacttacttttcttgacatgagg

SEQ ID NO: 11612 - DNA, 25 bp, Homo sapien
catacttactttacttgacatgagg

SEQ ID NO: 11613 - DNA, 25 bp, Homo sapien
ggtacgaacaggacccaagtgtccg

SEQ ID NO: 11614 - DNA, 25 bp, Homo sapien
ggtacgaacaggtcccaagtgtccg

SEQ ID NO: 11615 - DNA, 25 bp, Homo sapien
tcaaggagtccctacagtgtctcgt

SEQ ID NO: 11616 - DNA, 25 bp, Homo sapien
tcaaggagtcccaacagtgtctcgt

SEQ ID NO: 11617 - DNA, 25 bp, Homo sapien
acagaggtcgtcgaggaagtaggac

SEQ ID NO: 11618 - DNA, 25 bp, Homo sapien
acagaggtcgtccaggaagtaggac

SEQ ID NO: 11619 - DNA, 25 bp, Homo sapien
taaatgtcataaacgacgacaagta

SEQ ID NO: 11620 - DNA, 25 bp, Homo sapien
taaatgtcataatcgacgacaagta

SEQ ID NO: 11621 - DNA, 25 bp, Homo sapien
cacggatctaatacttctctaagag

SEQ ID NO: 11622 - DNA, 25 bp, Homo sapien
cacggatctaattcttctctaagag

SEQ ID NO: 11623 - DNA, 25 bp, Homo sapien
taaggttctatgtcatgagtctcag

SEQ ID NO: 11624 - DNA, 25 bp, Homo sapien
taaggttctatgacatgagtctcag

SEQ ID NO: 11625 - DNA, 25 bp, Homo sapien
ttgagtcctgtcactcgggttcggt

SEQ ID NO: 11626 - DNA, 25 bp, Homo sapien
ttgagtcctgtctctcgggttcggt

SEQ ID NO: 11627 - DNA, 25 bp, Homo sapien
tccgattctgtctcctacctatcgg

SEQ ID NO: 11628 - DNA, 25 bp, Homo sapien
tccgattctgtcacctacctatcgg

SEQ ID NO: 11629 - DNA, 25 bp, Homo sapien
ggctttctcttctgctaccgtaacc

SEQ ID NO: 11630 - DNA, 25 bp, Homo sapien
ggctttctcttcagctaccgtaacc

SEQ ID NO: 11631 - DNA, 25 bp, Homo sapien
ggttgtattacacaccacataatcg

SEQ ID NO: 11632 - DNA, 25 bp, Homo sapien
ggttgtattacagaccacataatcg

SEQ ID NO: 11633 - DNA, 25 bp, Homo sapien
gaatgtaagtcaaactacccttaag

SEQ ID NO: 11634 - DNA, 25 bp, Homo sapien
gaatgtaagtcatactacccttaag

SEQ ID NO: 11635 - DNA, 25 bp, Homo sapien
ggtacgaaaccctaaactacttaag

SEQ ID NO: 11636 - DNA, 25 bp, Homo sapien
ggtacgaaacccaaaactacttaag

SEQ ID NO: 11637 - DNA, 25 bp, Homo sapien
cgataaacgcagttaaacactaaag

SEQ ID NO: 11638 - DNA, 25 bp, Homo sapien
cgataaacgcagataaacactaaag

SEQ ID NO: 11639 - DNA, 25 bp, Homo sapien
actatcggctcaaagacaactgagg

SEQ ID NO: 11640 - DNA, 25 bp, Homo sapien
actatcggctcatagacaactgagg

SEQ ID NO: 11641 - DNA, 25 bp, Homo sapien
catgaaagtaacctaacataaaggt

SEQ ID NO: 11642 - DNA, 25 bp, Homo sapien
catgaaagtaacgtaacataaaggt

SEQ ID NO: 11643 - DNA, 25 bp, Homo sapien
atgaaacgttctttacatcaagtag

SEQ ID NO: 11644 - DNA, 25 bp, Homo sapien
atgaaacgttctatacatcaagtag

SEQ ID NO: 11645 - DNA, 25 bp, Homo sapien
ggaactgaaatctaaacctcaactg

SEQ ID NO: 11646 - DNA, 25 bp, Homo sapien
ggaactgaaatcaaaacctcaactg

SEQ ID NO: 11647 - DNA, 25 bp, Homo sapien
aatcgaagaggaataaatctcactt

SEQ ID NO: 11648 - DNA, 25 bp, Homo sapien
aatcgaagaggattaaatctcactt

SEQ ID NO: 11649 - DNA, 25 bp, Homo sapien
aaatagaaacggttataccctcctg

SEQ ID NO: 11650 - DNA, 25 bp, Homo sapien
aaatagaaacggatataccctcctg

SEQ ID NO: 11651 - DNA, 25 bp, Homo sapien
ttcgaatagtctatacccgtgttct

SEQ ID NO: 11652 - DNA, 25 bp, Homo sapien
ttcgaatagtctttacccgtgttct

SEQ ID NO: 11653 - DNA, 25 bp, Homo sapien
cacaccagtacctggaccgtcttat

SEQ ID NO: 11654 - DNA, 25 bp, Homo sapien
cacaccagtaccaggaccgtcttat

SEQ ID NO: 11655 - DNA, 25 bp, Homo sapien
actccacgaacaggtaccgtagctc

SEQ ID NO: 11656 - DNA, 25 bp, Homo sapien
actccacgaacacgtaccgtagctc

SEQ ID NO: 11657 - DNA, 25 bp, Homo sapien
tggaagaagaacagccggagcgact

SEQ ID NO: 11658 - DNA, 25 bp, Homo sapien
tggaagaagaactgccggagcgact

SEQ ID NO: 11659 - DNA, 25 bp, Homo sapien
gaagagtagactgtctacaggtact

SEQ ID NO: 11660 - DNA, 25 bp, Homo sapien
gaagagtagactctctacaggtact

SEQ ID NO: 11661 - DNA, 25 bp, Homo sapien
ggaacagcgacacctcgacaacttc

SEQ ID NO: 11662 - DNA, 25 bp, Homo sapien
ggaacagcgacagctcgacaacttc

SEQ ID NO: 11663 - DNA, 25 bp, Homo sapien
gtacaagaggagtagtgtcactgtc

SEQ ID NO: 11664 - DNA, 25 bp, Homo sapien
gtacaagaggagaagtgtcactgtc

SEQ ID NO: 11665 - DNA, 25 bp, Homo sapien
actagagaaagtggagaaagcccct

SEQ ID NO: 11666 - DNA, 25 bp, Homo sapien
actagagaaagtcgagaaagcccct

SEQ ID NO: 11667 - DNA, 25 bp, Homo sapien
agaccaagtcgagaagagctgtcac

SEQ ID NO: 11668 - DNA, 25 bp, Homo sapien
agaccaagtcgacaagagctgtcac

SEQ ID NO: 11669 - DNA, 25 bp, Homo sapien
agatggaactccatagaggaccgcg

SEQ ID NO: 11670 - DNA, 25 bp, Homo sapien
agatggaactccttagaggaccgcg

SEQ ID NO: 11671 - DNA, 25 bp, Homo sapien
gaggtggtcacactcttgtgcaccg

SEQ ID NO: 11672 - DNA, 25 bp, Homo sapien
gaggtggtcacagtcttgtgcaccg

SEQ ID NO: 11673 - DNA, 25 bp, Homo sapien
tacgagtcgactcgattctcctcgg

SEQ ID NO: 11674 - DNA, 25 bp, Homo sapien
tacgagtcgactggattctcctcgg

SEQ ID NO: 11675 - DNA, 25 bp, Homo sapien
gacgcacgttgtagccctctactgg

SEQ ID NO: 11676 - DNA, 25 bp, Homo sapien
gacgcacgttgttgccctctactgg

SEQ ID NO: 11677 - DNA, 25 bp, Homo sapien
ggaggatccctgaagacacaggtgg

SEQ ID NO: 11678 - DNA, 25 bp, Homo sapien
ggaggatccctgtagacacaggtgg

SEQ ID NO: 11679 - DNA, 25 bp, Homo sapien
gggcatcctgtctacaactagggtg

SEQ ID NO: 11680 - DNA, 25 bp, Homo sapien
gggcatcctgtcaacaactagggtg

SEQ ID NO: 11681 - DNA, 25 bp, Homo sapien
gagccattgacgaaccaggacttgt

SEQ ID NO: 11682 - DNA, 25 bp, Homo sapien
gagccattgacgtaccaggacttgt

SEQ ID NO: 11683 - DNA, 25 bp, Homo sapien
aaaagtgtgtagttcacattccact

SEQ ID NO: 11684 - DNA, 25 bp, Homo sapien
aaaagtgtgtagatcacattccact

SEQ ID NO: 11685 - DNA, 25 bp, Homo sapien
taagagagtaactcactcgactcag

SEQ ID NO: 11686 - DNA, 25 bp, Homo sapien
taagagagtaacacactcgactcag

SEQ ID NO: 11687 - DNA, 25 bp, Homo sapien
ctcaagagtttacgacctagtcagg

SEQ ID NO: 11688 - DNA, 25 bp, Homo sapien
ctcaagagtttaggacctagtcagg

SEQ ID NO: 11689 - DNA, 25 bp, Homo sapien
gtccagaacctcgacctctcgagac

SEQ ID NO: 11690 - DNA, 25 bp, Homo sapien
gtccagaacctccacctctcgagac

SEQ ID NO: 11691 - DNA, 25 bp, Homo sapien
ggtcaacaccgtagtccacttctac

SEQ ID NO: 11692 - DNA, 25 bp, Homo sapien
ggtcaacaccgttgtccacttctac

SEQ ID NO: 11693 - DNA, 25 bp, Homo sapien
aagaacgacctcctgacgctgctca

SEQ ID NO: 11694 - DNA, 25 bp, Homo sapien
aagaacgacctcgtgacgctgctca

SEQ ID NO: 11695 - DNA, 25 bp, Homo sapien
ggtgatgggtcgtttgatgtctctc

SEQ ID NO: 11696 - DNA, 25 bp, Homo sapien
ggtgatgggtcgattgatgtctctc

SEQ ID NO: 11697 - DNA, 25 bp, Homo sapien
gtgggtttttggtgtacctctgtct

SEQ ID NO: 11698 - DNA, 25 bp, Homo sapien
gtgggtttttggagtacctctgtct

SEQ ID NO: 11699 - DNA, 25 bp, Homo sapien
gtgttggtcttgtcaagattagtcc

SEQ ID NO: 11700 - DNA, 25 bp, Homo sapien
gtgttggtcttgacaagattagtcc

SEQ ID NO: 11701 - DNA, 25 bp, Homo sapien
ggttggtttccactaatgtaggtcg

SEQ ID NO: 11702 - DNA, 25 bp, Homo sapien
ggttggtttccagtaatgtaggtcg

SEQ ID NO: 11703 - DNA, 25 bp, Homo sapien
agtttgtctataagtagctttactc

SEQ ID NO: 11704 - DNA, 25 bp, Homo sapien
agtttgtctatatgtagctttactc

SEQ ID NO: 11705 - DNA, 25 bp, Homo sapien
gacacgtgtttttctgtggtttgtc

SEQ ID NO: 11706 - DNA, 25 bp, Homo sapien
gacacgtgttttactgtggtttgtc

SEQ ID NO: 11707 - DNA, 25 bp, Homo sapien
tctgtcactgtgtctcgtatccgga

SEQ ID NO: 11708 - DNA, 25 bp, Homo sapien
tctgtcactgtgactcgtatccgga

SEQ ID NO: 11709 - DNA, 25 bp, Homo sapien
ttctgactattggtcgacttccgaa

SEQ ID NO: 11710 - DNA, 25 bp, Homo sapien
ttctgactattgctcgacttccgaa

SEQ ID NO: 11711 - DNA, 25 bp, Homo sapien
gcttgaacctgtctactcaaagaca

SEQ ID NO: 11712 - DNA, 25 bp, Homo sapien
gcttgaacctgtgtactcaaagaca

SEQ ID NO: 11713 - DNA, 25 bp, Homo sapien
cagttccgtgtcgtaatggtacaca

SEQ ID NO: 11714 - DNA, 25 bp, Homo sapien
cagttccgtgtcctaatggtacaca

SEQ ID NO: 11715 - DNA, 25 bp, Homo sapien
ccgagtagccctctcgatcaaacag

SEQ ID NO: 11716 - DNA, 25 bp, Homo sapien
ccgagtagccctgtcgatcaaacag

SEQ ID NO: 11717 - DNA, 25 bp, Homo sapien
acacaaatcggagtcctcttaactg

SEQ ID NO: 11718 - DNA, 25 bp, Homo sapien
acacaaatcggactcctcttaactg

SEQ ID NO: 11719 - DNA, 25 bp, Homo sapien
taaacgaactggacctctctccctg

SEQ ID NO: 11720 - DNA, 25 bp, Homo sapien
taaacgaactggtcctctctccctg

SEQ ID NO: 11721 - DNA, 25 bp, Homo sapien
gatgaaactaagttcctctttcctg

SEQ ID NO: 11722 - DNA, 25 bp, Homo sapien
gatgaaactaagatcctctttcctg

SEQ ID NO: 11723 - DNA, 25 bp, Homo sapien
gagcaagagttaggacaaggaccca

SEQ ID NO: 11724 - DNA, 25 bp, Homo sapien
gagcaagagttacgacaaggaccca

SEQ ID NO: 11725 - DNA, 25 bp, Homo sapien
caccagtcgtgtcttggaccccggt

SEQ ID NO: 11726 - DNA, 25 bp, Homo sapien
caccagtcgtgtgttggaccccggt

SEQ ID NO: 11727 - DNA, 25 bp, Homo sapien
ccggccgtgtactggggtcccgaca

SEQ ID NO: 11728 - DNA, 25 bp, Homo sapien
ccggccgtgtacaggggtcccgaca

SEQ ID NO: 11729 - DNA, 25 bp, Homo sapien
cacgaaattccgtaggtatcaagac

SEQ ID NO: 11730 - DNA, 25 bp, Homo sapien
cacgaaattccgaaggtatcaagac

SEQ ID NO: 11731 - DNA, 25 bp, Homo sapien
cggatattggttgatcgtctacaag

SEQ ID NO: 11732 - DNA, 25 bp, Homo sapien
cggatattggttcatcgtctacaag

SEQ ID NO: 11733 - DNA, 25 bp, Homo sapien
gaccgtcggtctttgtcctgcgtcg

SEQ ID NO: 11734 - DNA, 25 bp, Homo sapien
gaccgtcggtctatgtcctgcgtcg

SEQ ID NO: 11735 - DNA, 25 bp, Homo sapien
aaaaacgaaccgtggttacagtgcc

SEQ ID NO: 11736 - DNA, 25 bp, Homo sapien
aaaaacgaaccgaggttacagtgcc

SEQ ID NO: 11737 - DNA, 25 bp, Homo sapien
ataatcctccgtgatgtcaatttcg

SEQ ID NO: 11738 - DNA, 25 bp, Homo sapien
ataatcctccgtcatgtcaatttcg

SEQ ID NO: 11739 - DNA, 25 bp, Homo sapien
aaaacccggttcaggtactattttt

SEQ ID NO: 11740 - DNA, 25 bp, Homo sapien
aaaacccggttctggtactattttt

SEQ ID NO: 11741 - DNA, 25 bp, Homo sapien
aattgttacacctcttaagtcgtgt

SEQ ID NO: 11742 - DNA, 25 bp, Homo sapien
aattgttacaccacttaagtcgtgt

SEQ ID NO: 11743 - DNA, 25 bp, Homo sapien
aactatgtttcatagtgtttcgtac

SEQ ID NO: 11744 - DNA, 25 bp, Homo sapien
aactatgtttcaaagtgtttcgtac

SEQ ID NO: 11745 - DNA, 25 bp, Homo sapien
ttagtacgttgacagtgtcttagtc

SEQ ID NO: 11746 - DNA, 25 bp, Homo sapien
ttagtacgttgagagtgtcttagtc

SEQ ID NO: 11747 - DNA, 25 bp, Homo sapien
ctagtttacttcgtgtgtaggtact

SEQ ID NO: 11748 - DNA, 25 bp, Homo sapien
ctagtttacttcctgtgtaggtact

SEQ ID NO: 11749 - DNA, 25 bp, Homo sapien
gacgtgtgactcttaagggtgacgt

SEQ ID NO: 11750 - DNA, 25 bp, Homo sapien
gacgtgtgactcataagggtgacgt

SEQ ID NO: 11751 - DNA, 25 bp, Homo sapien
ccagaaggacgtactcgagtggtcc

SEQ ID NO: 11752 - DNA, 25 bp, Homo sapien
ccagaaggacgttctcgagtggtcc

SEQ ID NO: 11753 - DNA, 25 bp, Homo sapien
cccacgaagagagacctagggtgcg

SEQ ID NO: 11754 - DNA, 25 bp, Homo sapien
cccacgaagagacacctagggtgcg

SEQ ID NO: 11755 - DNA, 25 bp, Homo sapien
ctcagataacgtaccacaggaaggt

SEQ ID NO: 11756 - DNA, 25 bp, Homo sapien
ctcagataacgttccacaggaaggt

SEQ ID NO: 11757 - DNA, 25 bp, Homo sapien
tcgtcgtccatacttttatggataa

SEQ ID NO: 11758 - DNA, 25 bp, Homo sapien
tcgtcgtccatagttttatggataa

SEQ ID NO: 11759 - DNA, 25 bp, Homo sapien
tacatgtaactactgtgtatttgac

SEQ ID NO: 11760 - DNA, 25 bp, Homo sapien
tacatgtaactagtgtgtatttgac

SEQ ID NO: 11761 - DNA, 25 bp, Homo sapien
ttcatcaacagtacggtatgtctga

SEQ ID NO: 11762 - DNA, 25 bp, Homo sapien
ttcatcaacagttcggtatgtctga

SEQ ID NO: 11763 - DNA, 25 bp, Homo sapien
tgatagaagtctacggttcttacgc

SEQ ID NO: 11764 - DNA, 25 bp, Homo sapien
tgatagaagtcttcggttcttacgc

SEQ ID NO: 11765 - DNA, 25 bp, Homo sapien
gttaacggtcttgagtgtcttatct

SEQ ID NO: 11766 - DNA, 25 bp, Homo sapien
gttaacggtcttcagtgtcttatct

SEQ ID NO: 11767 - DNA, 25 bp, Homo sapien
tgtcaccggtgtcgattgtagtaac

SEQ ID NO: 11768 - DNA, 25 bp, Homo sapien
tgtcaccggtgtggattgtagtaac

SEQ ID NO: 11769 - DNA, 25 bp, Homo sapien
agtaaaactgtgtcatataacgttc

SEQ ID NO: 11770 - DNA, 25 bp, Homo sapien
agtaaaactgtgacatataacgttc

SEQ ID NO: 11771 - DNA, 25 bp, Homo sapien
atagaatcttcgacaacgttgtgtg

SEQ ID NO: 11772 - DNA, 25 bp, Homo sapien
atagaatcttcgtcaacgttgtgtg

SEQ ID NO: 11773 - DNA, 25 bp, Homo sapien
aaaatttcgttaccaatacggtagt

SEQ ID NO: 11774 - DNA, 25 bp, Homo sapien
aaaatttcgttagcaatacggtagt

SEQ ID NO: 11775 - DNA, 25 bp, Homo sapien
ataccttcatctcatccgacaggag

SEQ ID NO: 11776 - DNA, 25 bp, Homo sapien
ataccttcatctgatccgacaggag

SEQ ID NO: 11777 - DNA, 25 bp, Homo sapien
cagactcacccttgagtcccagaga

SEQ ID NO: 11778 - DNA, 25 bp, Homo sapien
cagactcaccctagagtcccagaga

SEQ ID NO: 11779 - DNA, 25 bp, Homo sapien
caccgactccttctcggagaggtct

SEQ ID NO: 11780 - DNA, 25 bp, Homo sapien
caccgactccttgtcggagaggtct

SEQ ID NO: 11781 - DNA, 25 bp, Homo sapien
actgtttatcgtaagcaacacgggt

SEQ ID NO: 11782 - DNA, 25 bp, Homo sapien
actgtttatcgttagcaacacgggt

SEQ ID NO: 11783 - DNA, 25 bp, Homo sapien
aagaactctcacttggaaaccgatg

SEQ ID NO: 11784 - DNA, 25 bp, Homo sapien
aagaactctcacatggaaaccgatg

SEQ ID NO: 11785 - DNA, 25 bp, Homo sapien
gtccaactgggtgccatcggtgtaa

SEQ ID NO: 11786 - DNA, 25 bp, Homo sapien
gtccaactgggtcccatcggtgtaa

SEQ ID NO: 11787 - DNA, 25 bp, Homo sapien
ttacgtcacaggtcccaaccgtcaa

SEQ ID NO: 11788 - DNA, 25 bp, Homo sapien
ttacgtcacaggacccaaccgtcaa

SEQ ID NO: 11789 - DNA, 25 bp, Homo sapien
aactaccggaggtacaactccgcca

SEQ ID NO: 11790 - DNA, 25 bp, Homo sapien
aactaccggaggaacaactccgcca

SEQ ID NO: 11791 - DNA, 25 bp, Homo sapien
gtacggtgacaaaagtctctcccgg

SEQ ID NO: 11792 - DNA, 25 bp, Homo sapien
gtacggtgacaatagtctctcccgg

SEQ ID NO: 11793 - DNA, 25 bp, Homo sapien
gacgacgagaacgacccaatcccgg

SEQ ID NO: 11794 - DNA, 25 bp, Homo sapien
gacgacgagaaccacccaatcccgg

SEQ ID NO: 11795 - DNA, 25 bp, Homo sapien
ctccggaaccctcgtcgaaacggag

SEQ ID NO: 11796 - DNA, 25 bp, Homo sapien
ctccggaaccctggtcgaaacggag

SEQ ID NO: 11797 - DNA, 25 bp, Homo sapien
gcttagacgtcgtcccgaaccagag

SEQ ID NO: 11798 - DNA, 25 bp, Homo sapien
gcttagacgtcgacccgaaccagag

SEQ ID NO: 11799 - DNA, 25 bp, Homo sapien
aggacctatgactcctgtaagcaca

SEQ ID NO: 11800 - DNA, 25 bp, Homo sapien
aggacctatgacacctgtaagcaca

SEQ ID NO: 11801 - DNA, 25 bp, Homo sapien
gtacccaacgatacctttgacgtag

SEQ ID NO: 11802 - DNA, 25 bp, Homo sapien
gtacccaacgattcctttgacgtag

SEQ ID NO: 11803 - DNA, 25 bp, Homo sapien
gtctcgggggtcctacttctctcac

SEQ ID NO: 11804 - DNA, 25 bp, Homo sapien
gtctcgggggtcgtacttctctcac

SEQ ID NO: 11805 - DNA, 25 bp, Homo sapien
gtatcccggagtgagagtgtaccca

SEQ ID NO: 11806 - DNA, 25 bp, Homo sapien
gtatcccggagtcagagtgtaccca

SEQ ID NO: 11807 - DNA, 25 bp, Homo sapien
tttccgcgcactggtgtctcgtaga

SEQ ID NO: 11808 - DNA, 25 bp, Homo sapien
tttccgcgcactcgtgtctcgtaga

SEQ ID NO: 11809 - DNA, 25 bp, Homo sapien
cgcaccgcgtcgaggacgtcgtaga

SEQ ID NO: 11810 - DNA, 25 bp, Homo sapien
cgcaccgcgtcgtggacgtcgtaga

SEQ ID NO: 11811 - DNA, 25 bp, Homo sapien
acggtttcggcgtgtgtcctcgaca

SEQ ID NO: 11812 - DNA, 25 bp, Homo sapien
acggtttcggcgagtgtcctcgaca

SEQ ID NO: 11813 - DNA, 25 bp, Homo sapien
agtctttctcggtgtgttagtcatt

SEQ ID NO: 11814 - DNA, 25 bp, Homo sapien
agtctttctcggagtgttagtcatt

SEQ ID NO: 11815 - DNA, 25 bp, Homo sapien
aggtcaaacgacgattgtcgtatct

SEQ ID NO: 11816 - DNA, 25 bp, Homo sapien
aggtcaaacgaccattgtcgtatct

SEQ ID NO: 11817 - DNA, 25 bp, Homo sapien
gtactcaactagatgtgactgttta

SEQ ID NO: 11818 - DNA, 25 bp, Homo sapien
gtactcaactagttgtgactgttta

SEQ ID NO: 11819 - DNA, 25 bp, Homo sapien
tctcgatttgaaggtttcgatgtca

SEQ ID NO: 11820 - DNA, 25 bp, Homo sapien
tctcgatttgaacgtttcgatgtca

SEQ ID NO: 11821 - DNA, 25 bp, Homo sapien
cctacgttagagtgagggaccgtga

SEQ ID NO: 11822 - DNA, 25 bp, Homo sapien
cctacgttagagagagggaccgtga

SEQ ID NO: 11823 - DNA, 25 bp, Homo sapien
gagacgttatcgaaagggacctaag

SEQ ID NO: 11824 - DNA, 25 bp, Homo sapien
gagacgttatcgtaagggacctaag

SEQ ID NO: 11825 - DNA, 25 bp, Homo sapien
ccccgtctaccgacaaataactagg

SEQ ID NO: 11826 - DNA, 25 bp, Homo sapien
ccccgtctaccgtcaaataactagg

SEQ ID NO: 11827 - DNA, 25 bp, Homo sapien
cacaggcgccggaagaagaccttct

SEQ ID NO: 11828 - DNA, 25 bp, Homo sapien
cacaggcgccggtagaagaccttct

SEQ ID NO: 11829 - DNA, 25 bp, Homo sapien
tacgttcacccgaggatacggtctt

SEQ ID NO: 11830 - DNA, 25 bp, Homo sapien
tacgttcacccgtggatacggtctt

SEQ ID NO: 11831 - DNA, 25 bp, Homo sapien
taggtcacagttacaaactcctagt

SEQ ID NO: 11832 - DNA, 25 bp, Homo sapien
taggtcacagtttcaaactcctagt

SEQ ID NO: 11833 - DNA, 25 bp, Homo sapien
gaagagaaaatactcaattgtcgtc

SEQ ID NO: 11834 - DNA, 25 bp, Homo sapien
gaagagaaaatagtcaattgtcgtc

SEQ ID NO: 11835 - DNA, 25 bp, Homo sapien
agacgaagaaactcgaaccttctcg

SEQ ID NO: 11836 - DNA, 25 bp, Homo sapien
agacgaagaaacacgaaccttctcg

SEQ ID NO: 11837 - DNA, 25 bp, Homo sapien
gatacgaatacaacaagaacttttg

SEQ ID NO: 11838 - DNA, 25 bp, Homo sapien
gatacgaatacatcaagaacttttg

SEQ ID NO: 11839 - DNA, 25 bp, Homo sapien
tgaatcgactcaaaacgttgtctct

SEQ ID NO: 11840 - DNA, 25 bp, Homo sapien
tgaatcgactcataacgttgtctct

SEQ ID NO: 11841 - DNA, 25 bp, Homo sapien
gaatgtaaggtatccctctgggttt

SEQ ID NO: 11842 - DNA, 25 bp, Homo sapien
gaatgtaaggtaaccctctgggttt

SEQ ID NO: 11843 - DNA, 25 bp, Homo sapien
ggattcgaggtttcccttagaatta

SEQ ID NO: 11844 - DNA, 25 bp, Homo sapien
ggattcgaggttacccttagaatta

SEQ ID NO: 11845 - DNA, 25 bp, Homo sapien
agtgtgtgtgtcacctttccctaca

SEQ ID NO: 11846 - DNA, 25 bp, Homo sapien
agtgtgtgtgtctcctttccctaca

SEQ ID NO: 11847 - DNA, 25 bp, Homo sapien
gagtcgctcgtgacagtccagttca

SEQ ID NO: 11848 - DNA, 25 bp, Homo sapien
gagtcgctcgtgtcagtccagttca

SEQ ID NO: 11849 - DNA, 25 bp, Homo sapien
accgaggtccgtgtttttatcttat

SEQ ID NO: 11850 - DNA, 25 bp, Homo sapien
accgaggtccgtctttttatcttat

SEQ ID NO: 11851 - DNA, 25 bp, Homo sapien
ccggcgtctttccctcttcgtttgt

SEQ ID NO: 11852 - DNA, 25 bp, Homo sapien
ccggcgtctttcgctcttcgtttgt

SEQ ID NO: 11853 - DNA, 25 bp, Homo sapien
agtcacgtcattgtaactttattag

SEQ ID NO: 11854 - DNA, 25 bp, Homo sapien
agtcacgtcattctaactttattag

SEQ ID NO: 11855 - DNA, 25 bp, Homo sapien
tgtcacttatgtttactcatgattg

SEQ ID NO: 11856 - DNA, 25 bp, Homo sapien
tgtcacttatgtatactcatgattg

SEQ ID NO: 11857 - DNA, 25 bp, Homo sapien
gagtcctcctcaattaccacgattg

SEQ ID NO: 11858 - DNA, 25 bp, Homo sapien
gagtcctcctcatttaccacgattg

SEQ ID NO: 11859 - DNA, 25 bp, Homo sapien
ttacacccgtctttggaccggtcag

SEQ ID NO: 11860 - DNA, 25 bp, Homo sapien
ttacacccgtctatggaccggtcag

SEQ ID NO: 11861 - DNA, 25 bp, Homo sapien
gaatgatatctctgaaactagacag

SEQ ID NO: 11862 - DNA, 25 bp, Homo sapien
gaatgatatctcagaaactagacag

SEQ ID NO: 11863 - DNA, 25 bp, Homo sapien
gcgtggcgacttctcgactcatcca

SEQ ID NO: 11864 - DNA, 25 bp, Homo sapien
gcgtggcgacttgtcgactcatcca

SEQ ID NO: 11865 - DNA, 25 bp, Homo sapien
gttactggcacctttcccatcggct

SEQ ID NO: 11866 - DNA, 25 bp, Homo sapien
gttactggcaccattcccatcggct

SEQ ID NO: 11867 - DNA, 25 bp, Homo sapien
tcgttcacccgtagttctaggggct

SEQ ID NO: 11868 - DNA, 25 bp, Homo sapien
tcgttcacccgttgttctaggggct

SEQ ID NO: 11869 - DNA, 25 bp, Homo sapien
tacgtatgactcttgactaaagacc

SEQ ID NO: 11870 - DNA, 25 bp, Homo sapien
tacgtatgactcatgactaaagacc

SEQ ID NO: 11871 - DNA, 25 bp, Homo sapien
taatgtactcttgatagttaccggt

SEQ ID NO: 11872 - DNA, 25 bp, Homo sapien
taatgtactcttcatagttaccggt

SEQ ID NO: 11873 - DNA, 25 bp, Homo sapien
tacatgaagaagttcctttctacga

SEQ ID NO: 11874 - DNA, 25 bp, Homo sapien
tacatgaagaagatcctttctacga

SEQ ID NO: 11875 - DNA, 25 bp, Homo sapien
tgaccatgaaggaagggagcctgta

SEQ ID NO: 11876 - DNA, 25 bp, Homo sapien
tgaccatgaaggtagggagcctgta

SEQ ID NO: 11877 - DNA, 25 bp, Homo sapien
tctttggactagaaggaaccactcc

SEQ ID NO: 11878 - DNA, 25 bp, Homo sapien
tctttggactagtaggaaccactcc

SEQ ID NO: 11879 - DNA, 25 bp, Homo sapien
aagggagcaggaccgacgaccttcc

SEQ ID NO: 11880 - DNA, 25 bp, Homo sapien
aagggagcaggagcgacgaccttcc

SEQ ID NO: 11881 - DNA, 25 bp, Homo sapien
aggaccacaacacacctactgttcg

SEQ ID NO: 11882 - DNA, 25 bp, Homo sapien
aggaccacaacagacctactgttcg

SEQ ID NO: 11883 - DNA, 25 bp, Homo sapien
tggacgcaaggaccacgcttgtgcg

SEQ ID NO: 11884 - DNA, 25 bp, Homo sapien
tggacgcaaggagcacgcttgtgcg

SEQ ID NO: 11885 - DNA, 25 bp, Homo sapien
tgtccacaggactgtcccttgtaga

SEQ ID NO: 11886 - DNA, 25 bp, Homo sapien
tgtccacaggacagtcccttgtaga

SEQ ID NO: 11887 - DNA, 25 bp, Homo sapien
agagcagctcctttcgcatctcgtg

SEQ ID NO: 11888 - DNA, 25 bp, Homo sapien
agagcagctcctatcgcatctcgtg

SEQ ID NO: 11889 - DNA, 25 bp, Homo sapien
aaaccagtcttgtcccgagtctcgg

SEQ ID NO: 11890 - DNA, 25 bp, Homo sapien
aaaccagtcttgacccgagtctcgg

SEQ ID NO: 11891 - DNA, 25 bp, Homo sapien
acctttcgtcgaaaaccggttgtag

SEQ ID NO: 11892 - DNA, 25 bp, Homo sapien
acctttcgtcgataaccggttgtag

SEQ ID NO: 11893 - DNA, 25 bp, Homo sapien
ttaaatcactataacacgtgtggta

SEQ ID NO: 11894 - DNA, 25 bp, Homo sapien
ttaaatcactattacacgtgtggta

SEQ ID NO: 11895 - DNA, 25 bp, Homo sapien
attaatgacagaagtcacgtaagtc

SEQ ID NO: 11896 - DNA, 25 bp, Homo sapien
attaatgacagatgtcacgtaagtc

SEQ ID NO: 11897 - DNA, 25 bp, Homo sapien
caacgttggtgagaggtcgttcacc

SEQ ID NO: 11898 - DNA, 25 bp, Homo sapien
caacgttggtgacaggtcgttcacc

SEQ ID NO: 11899 - DNA, 25 bp, Homo sapien
acgtacaagtgcacggccagggcgt

SEQ ID NO: 11900 - DNA, 25 bp, Homo sapien
acgtacaagtgctcggccagggcgt

SEQ ID NO: 11901 - DNA, 25 bp, Homo sapien
cgacgaagatcctccacaaggaggt

SEQ ID NO: 11902 - DNA, 25 bp, Homo sapien
cgacgaagatccaccacaaggaggt

SEQ ID NO: 11903 - DNA, 25 bp, Homo sapien
acaaacgtccgtcaacaccaaaagg

SEQ ID NO: 11904 - DNA, 25 bp, Homo sapien
acaaacgtccgtgaacaccaaaagg

SEQ ID NO: 11905 - DNA, 25 bp, Homo sapien
ccgaaaccaccgaaacctggtcagg

SEQ ID NO: 11906 - DNA, 25 bp, Homo sapien
ccgaaaccaccgtaacctggtcagg

SEQ ID NO: 11907 - DNA, 25 bp, Homo sapien
taagaggaaccaaccagtgtagtaa

SEQ ID NO: 11908 - DNA, 25 bp, Homo sapien
taagaggaaccatccagtgtagtaa

SEQ ID NO: 11909 - DNA, 25 bp, Homo sapien
ctaagagcaccgtttgcacttaaac

SEQ ID NO: 11910 - DNA, 25 bp, Homo sapien
ctaagagcaccgattgcacttaaac

SEQ ID NO: 11911 - DNA, 25 bp, Homo sapien
cagtgtgcccctaagcctgtgcgtc

SEQ ID NO: 11912 - DNA, 25 bp, Homo sapien
cagtgtgccccttagcctgtgcgtc

SEQ ID NO: 11913 - DNA, 25 bp, Homo sapien
caatgtctacgatgactacggtcct

SEQ ID NO: 11914 - DNA, 25 bp, Homo sapien
caatgtctacgaagactacggtcct

SEQ ID NO: 11915 - DNA, 25 bp, Homo sapien
gtgagacggtatgacagtaaaccct

SEQ ID NO: 11916 - DNA, 25 bp, Homo sapien
gtgagacggtatcacagtaaaccct

SEQ ID NO: 11917 - DNA, 25 bp, Homo sapien
gttgtggtcccgaaatgaaaacact

SEQ ID NO: 11918 - DNA, 25 bp, Homo sapien
gttgtggtcccgtaatgaaaacact

SEQ ID NO: 11919 - DNA, 25 bp, Homo sapien
cttcaggtaccgaaaaaaccgaaac

SEQ ID NO: 11920 - DNA, 25 bp, Homo sapien
cttcaggtaccgtaaaaaccgaaac

SEQ ID NO: 11921 - DNA, 25 bp, Homo sapien
aagggtctcaaaaatacacagagac

SEQ ID NO: 11922 - DNA, 25 bp, Homo sapien
aagggtctcaaatatacacagagac

SEQ ID NO: 11923 - DNA, 25 bp, Homo sapien
caagggtgtccgaaataagtccaga

SEQ ID NO: 11924 - DNA, 25 bp, Homo sapien
caagggtgtccgtaataagtccaga

SEQ ID NO: 11925 - DNA, 25 bp, Homo sapien
ggcccgggttccacaacctgtgacg

SEQ ID NO: 11926 - DNA, 25 bp, Homo sapien
ggcccgggttcctcaacctgtgacg

SEQ ID NO: 11927 - DNA, 25 bp, Homo sapien
tcgtgggtccccagatccttacgag

SEQ ID NO: 11928 - DNA, 25 bp, Homo sapien
tcgtgggtcccctgatccttacgag

SEQ ID NO: 11929 - DNA, 25 bp, Homo sapien
gtggacgtctacctattctccctta

SEQ ID NO: 11930 - DNA, 25 bp, Homo sapien
gtggacgtctacgtattctccctta

SEQ ID NO: 11931 - DNA, 25 bp, Homo sapien
gaggatacggttcattacaccgttc

SEQ ID NO: 11932 - DNA, 25 bp, Homo sapien
gaggatacggttgattacaccgttc

SEQ ID NO: 11933 - DNA, 25 bp, Homo sapien
tggtagaggggaatacgacctactt

SEQ ID NO: 11934 - DNA, 25 bp, Homo sapien
tggtagaggggattacgacctactt

SEQ ID NO: 11935 - DNA, 25 bp, Homo sapien
gggtccggcctgtgcacactctctt

SEQ ID NO: 11936 - DNA, 25 bp, Homo sapien
gggtccggcctgagcacactctctt

SEQ ID NO: 11937 - DNA, 25 bp, Homo sapien
ttaggagccctgttgtttaactgat

SEQ ID NO: 11938 - DNA, 25 bp, Homo sapien
ttaggagccctgatgtttaactgat

SEQ ID NO: 11939 - DNA, 25 bp, Homo sapien
taggtggagatttcgccgttcgtaa

SEQ ID NO: 11940 - DNA, 25 bp, Homo sapien
taggtggagattacgccgttcgtaa

SEQ ID NO: 11941 - DNA, 25 bp, Homo sapien
gaagtgcgtgataccttagggacga

SEQ ID NO: 11942 - DNA, 25 bp, Homo sapien
gaagtgcgtgattccttagggacga

SEQ ID NO: 11943 - DNA, 25 bp, Homo sapien
cccgttgcacatctttacaactcgg

SEQ ID NO: 11944 - DNA, 25 bp, Homo sapien
cccgttgcacatgtttacaactcgg

SEQ ID NO: 11945 - DNA, 25 bp, Homo sapien
tctttaccctagtgtctaaatacat

SEQ ID NO: 11946 - DNA, 25 bp, Homo sapien
tctttaccctagagtctaaatacat

SEQ ID NO: 11947 - DNA, 25 bp, Homo sapien
cgaccaaccacatagtctgaactaa

SEQ ID NO: 11948 - DNA, 25 bp, Homo sapien
cgaccaaccacaaagtctgaactaa

SEQ ID NO: 11949 - DNA, 25 bp, Homo sapien
cgtgacctctttttgtgtaacatga

SEQ ID NO: 11950 - DNA, 25 bp, Homo sapien
cgtgacctctttatgtgtaacatga

SEQ ID NO: 11951 - DNA, 25 bp, Homo sapien
ctttactcttttcctcgaatgtgag

SEQ ID NO: 11952 - DNA, 25 bp, Homo sapien
ctttactcttttgctcgaatgtgag

SEQ ID NO: 11953 - DNA, 25 bp, Homo sapien
cacgaccgggggtaccagtgtcgac

SEQ ID NO: 11954 - DNA, 25 bp, Homo sapien
cacgaccgggggaaccagtgtcgac

SEQ ID NO: 11955 - DNA, 25 bp, Homo sapien
actgtcgtagaggacatcaggtcct

SEQ ID NO: 11956 - DNA, 25 bp, Homo sapien
actgtcgtagagcacatcaggtcct

SEQ ID NO: 11957 - DNA, 25 bp, Homo sapien
ctctgcagttacagtcacagatccg

SEQ ID NO: 11958 - DNA, 25 bp, Homo sapien
ctctgcagttactgtcacagatccg

SEQ ID NO: 11959 - DNA, 25 bp, Homo sapien
cttctcgcgaatccatttgactccg

SEQ ID NO: 11960 - DNA, 25 bp, Homo sapien
cttctcgcgaatgcatttgactccg

SEQ ID NO: 11961 - DNA, 25 bp, Homo sapien
ataacgtacaagttggtttttaccg

SEQ ID NO: 11962 - DNA, 25 bp, Homo sapien
ataacgtacaagatggtttttaccg

SEQ ID NO: 11963 - DNA, 25 bp, Homo sapien
agggtgtaatatcttcgtgtctcga

SEQ ID NO: 11964 - DNA, 25 bp, Homo sapien
agggtgtaatatgttcgtgtctcga

SEQ ID NO: 11965 - DNA, 25 bp, Homo sapien
tccgagatcagatatttgtttctga

SEQ ID NO: 11966 - DNA, 25 bp, Homo sapien
tccgagatcagaaatttgtttctga

SEQ ID NO: 11967 - DNA, 25 bp, Homo sapien
aaagagcaaaaatgtgaccttagac

SEQ ID NO: 11968 - DNA, 25 bp, Homo sapien
aaagagcaaaaaagtgaccttagac

SEQ ID NO: 11969 - DNA, 25 bp, Homo sapien
atcgtcagtaaaacatatccatttc

SEQ ID NO: 11970 - DNA, 25 bp, Homo sapien
atcgtcagtaaatcatatccatttc

SEQ ID NO: 11971 - DNA, 25 bp, Homo sapien
ggtattagacggtgaaccttttaac

SEQ ID NO: 11972 - DNA, 25 bp, Homo sapien
ggtattagacggagaaccttttaac

SEQ ID NO: 11973 - DNA, 25 bp, Homo sapien
cgtctaagagggtcgtcctggttaa

SEQ ID NO: 11974 - DNA, 25 bp, Homo sapien
cgtctaagagggacgtcctggttaa

SEQ ID NO: 11975 - DNA, 25 bp, Homo sapien
tttaaggacgtctcgaaaccgttaa

SEQ ID NO: 11976 - DNA, 25 bp, Homo sapien
tttaaggacgtcacgaaaccgttaa

SEQ ID NO: 11977 - DNA, 25 bp, Homo sapien
acggcccacgtcagcgcgtgttcgt

SEQ ID NO: 11978 - DNA, 25 bp, Homo sapien
acggcccacgtctgcgcgtgttcgt

SEQ ID NO: 11979 - DNA, 25 bp, Homo sapien
ctaggacaacctttacgacttctcg

SEQ ID NO: 11980 - DNA, 25 bp, Homo sapien
ctaggacaacctatacgacttctcg

SEQ ID NO: 11981 - DNA, 25 bp, Homo sapien
tctaggtgtctccatttacgttcac

SEQ ID NO: 11982 - DNA, 25 bp, Homo sapien
tctaggtgtctcgatttacgttcac

SEQ ID NO: 11983 - DNA, 25 bp, Homo sapien
tggtagctcgaggtatctattccgt

SEQ ID NO: 11984 - DNA, 25 bp, Homo sapien
tggtagctcgagctatctattccgt

SEQ ID NO: 11985 - DNA, 25 bp, Homo sapien
gagaaggtccgaaaccgtcctcccg

SEQ ID NO: 11986 - DNA, 25 bp, Homo sapien
gagaaggtccgataccgtcctcccg

SEQ ID NO: 11987 - DNA, 25 bp, Homo sapien
tgcacggtcaacatgaaccgcctcg

SEQ ID NO: 11988 - DNA, 25 bp, Homo sapien
tgcacggtcaacttgaaccgcctcg

SEQ ID NO: 11989 - DNA, 25 bp, Homo sapien
gcggcccagtcagaggaaaccccgt

SEQ ID NO: 11990 - DNA, 25 bp, Homo sapien
gcggcccagtcacaggaaaccccgt

SEQ ID NO: 11991 - DNA, 25 bp, Homo sapien
aagccagacggaaaccaaaacctct

SEQ ID NO: 11992 - DNA, 25 bp, Homo sapien
aagccagacggataccaaaacctct

SEQ ID NO: 11993 - DNA, 25 bp, Homo sapien
gccgaggacgaggacccaacgtcca

SEQ ID NO: 11994 - DNA, 25 bp, Homo sapien
gccgaggacgagcacccaacgtcca

SEQ ID NO: 11995 - DNA, 25 bp, Homo sapien
ggtcgggtctcttaccgtcgctcct

SEQ ID NO: 11996 - DNA, 25 bp, Homo sapien
ggtcgggtctctaaccgtcgctcct

SEQ ID NO: 11997 - DNA, 25 bp, Homo sapien
ggtaggtagggttgtcctcgaccac

SEQ ID NO: 11998 - DNA, 25 bp, Homo sapien
ggtaggtagggtagtcctcgaccac

SEQ ID NO: 11999 - DNA, 25 bp, Homo sapien
gagtcgtgagtatatgtgagtcccc

SEQ ID NO: 12000 - DNA, 25 bp, Homo sapien
gagtcgtgagtaaatgtgagtcccc

SEQ ID NO: 12001 - DNA, 25 bp, Homo sapien
gggaggtaacgagtcacgtgacacc

SEQ ID NO: 12002 - DNA, 25 bp, Homo sapien
gggaggtaacgactcacgtgacacc

SEQ ID NO: 12003 - DNA, 25 bp, Homo sapien
ttctagggacggagagagcgactac

SEQ ID NO: 12004 - DNA, 25 bp, Homo sapien
ttctagggacggtgagagcgactac

SEQ ID NO: 12005 - DNA, 25 bp, Homo sapien
ggttcctcttggtccggtcgttact

SEQ ID NO: 12006 - DNA, 25 bp, Homo sapien
ggttcctcttggaccggtcgttact

SEQ ID NO: 12007 - DNA, 25 bp, Homo sapien
aggtcttcctacagactaaggtttc

SEQ ID NO: 12008 - DNA, 25 bp, Homo sapien
aggtcttcctactgactaaggtttc

SEQ ID NO: 12009 - DNA, 25 bp, Homo sapien
agtgttttgtaaacaacggtatcct

SEQ ID NO: 12010 - DNA, 25 bp, Homo sapien
agtgttttgtaatcaacggtatcct

SEQ ID NO: 12011 - DNA, 25 bp, Homo sapien
gagtcagttgttgacggagtgttcc

SEQ ID NO: 12012 - DNA, 25 bp, Homo sapien
gagtcagttgttcacggagtgttcc

SEQ ID NO: 12013 - DNA, 25 bp, Homo sapien
gtccatcgggtcctccagaataaac

SEQ ID NO: 12014 - DNA, 25 bp, Homo sapien
gtccatcgggtcgtccagaataaac

SEQ ID NO: 12015 - DNA, 25 bp, Homo sapien
gtcgggagtgtcctcggtaaaacgt

SEQ ID NO: 12016 - DNA, 25 bp, Homo sapien
gtcgggagtgtcgtcggtaaaacgt

SEQ ID NO: 12017 - DNA, 25 bp, Homo sapien
tgtctgtgaaggttcgaatatcgac

SEQ ID NO: 12018 - DNA, 25 bp, Homo sapien
tgtctgtgaaggatcgaatatcgac

SEQ ID NO: 12019 - DNA, 25 bp, Homo sapien
gtatatgaactctagtcaataaacg

SEQ ID NO: 12020 - DNA, 25 bp, Homo sapien
gtatatgaactcaagtcaataaacg

SEQ ID NO: 12021 - DNA, 25 bp, Homo sapien
ttgtttggttctttaccgaaatact

SEQ ID NO: 12022 - DNA, 25 bp, Homo sapien
ttgtttggttctataccgaaatact

SEQ ID NO: 12023 - DNA, 25 bp, Homo sapien
tgattttcttttgtatccgtaaaat

SEQ ID NO: 12024 - DNA, 25 bp, Homo sapien
tgattttcttttctatccgtaaaat

SEQ ID NO: 12025 - DNA, 25 bp, Homo sapien
ctcttttccgacttgacatgaatag

SEQ ID NO: 12026 - DNA, 25 bp, Homo sapien
ctcttttccgacatgacatgaatag

SEQ ID NO: 12027 - DNA, 25 bp, Homo sapien
tactatggattcacgagtgagtata

SEQ ID NO: 12028 - DNA, 25 bp, Homo sapien
tactatggattctcgagtgagtata

SEQ ID NO: 12029 - DNA, 25 bp, Homo sapien
agcaggagtcagaagtcaagtctct

SEQ ID NO: 12030 - DNA, 25 bp, Homo sapien
agcaggagtcagtagtcaagtctct

SEQ ID NO: 12031 - DNA, 25 bp, Homo sapien
ggagtggtaccgatggatactccgt

SEQ ID NO: 12032 - DNA, 25 bp, Homo sapien
ggagtggtaccgttggatactccgt

SEQ ID NO: 12033 - DNA, 25 bp, Homo sapien
attgtacagttcgtgtagtgtcttc

SEQ ID NO: 12034 - DNA, 25 bp, Homo sapien
attgtacagttcctgtagtgtcttc

SEQ ID NO: 12035 - DNA, 25 bp, Homo sapien
ggtaagcagtctcgtttgtgtctag

SEQ ID NO: 12036 - DNA, 25 bp, Homo sapien
ggtaagcagtctggtttgtgtctag

SEQ ID NO: 12037 - DNA, 25 bp, Homo sapien
gtgtaaacttacttcatgtgcctac

SEQ ID NO: 12038 - DNA, 25 bp, Homo sapien
gtgtaaacttacatcatgtgcctac

SEQ ID NO: 12039 - DNA, 25 bp, Homo sapien
gtatgtcttcgcgcagctaggacgg

SEQ ID NO: 12040 - DNA, 25 bp, Homo sapien
gtatgtcttcgcccagctaggacgg

SEQ ID NO: 12041 - DNA, 25 bp, Homo sapien
cctcagccgcgcgtttcgctttcgc

SEQ ID NO: 12042 - DNA, 25 bp, Homo sapien
cctcagccgcgcctttcgctttcgc

SEQ ID NO: 12043 - DNA, 25 bp, Homo sapien
cttcgcgtcttcgtgttcgtacaag

SEQ ID NO: 12044 - DNA, 25 bp, Homo sapien
cttcgcgtcttcctgttcgtacaag

SEQ ID NO: 12045 - DNA, 25 bp, Homo sapien
tcgttactttctctgtgttagagaa

SEQ ID NO: 12046 - DNA, 25 bp, Homo sapien
tcgttactttctgtgtgttagagaa

SEQ ID NO: 12047 - DNA, 25 bp, Homo sapien
tatctttatagttcgacagaacagt

SEQ ID NO: 12048 - DNA, 25 bp, Homo sapien
tatctttatagtacgacagaacagt

SEQ ID NO: 12049 - DNA, 25 bp, Homo sapien
tatatcgtgtcgtcgaaacaaaccg

SEQ ID NO: 12050 - DNA, 25 bp, Homo sapien
tatatcgtgtcgacgaaacaaaccg

SEQ ID NO: 12051 - DNA, 25 bp, Homo sapien
tacatactcgggagagacccacatg

SEQ ID NO: 12052 - DNA, 25 bp, Homo sapien
tacatactcgggtgagacccacatg

SEQ ID NO: 12053 - DNA, 25 bp, Homo sapien
ccacatgtggtgtagggagtccaag

SEQ ID NO: 12054 - DNA, 25 bp, Homo sapien
ccacatgtggtgaagggagtccaag

SEQ ID NO: 12055 - DNA, 25 bp, Homo sapien
cctagtaccggtcgtgggtcccgta

SEQ ID NO: 12056 - DNA, 25 bp, Homo sapien
cctagtaccggtggtgggtcccgta

SEQ ID NO: 12057 - DNA, 25 bp, Homo sapien
ggtcacatctttgaacactaccttg

SEQ ID NO: 12058 - DNA, 25 bp, Homo sapien
ggtcacatctttcaacactaccttg

SEQ ID NO: 12059 - DNA, 25 bp, Homo sapien
agcaacgaaggacgactgtcggtgt

SEQ ID NO: 12060 - DNA, 25 bp, Homo sapien
agcaacgaaggaggactgtcggtgt

SEQ ID NO: 12061 - DNA, 25 bp, Homo sapien
agagacagtgtctaggtacttcttc

SEQ ID NO: 12062 - DNA, 25 bp, Homo sapien
agagacagtgtcaaggtacttcttc

SEQ ID NO: 12063 - DNA, 25 bp, Homo sapien
ggtagacaggtcctaggtccctgtc

SEQ ID NO: 12064 - DNA, 25 bp, Homo sapien
ggtagacaggtcgtaggtccctgtc

SEQ ID NO: 12065 - DNA, 25 bp, Homo sapien
gccgagtaggcgaagacaccgttta

SEQ ID NO: 12066 - DNA, 25 bp, Homo sapien
gccgagtaggcgtagacaccgttta

SEQ ID NO: 12067 - DNA, 25 bp, Homo sapien
ccgtctatgcactgtccacctttag

SEQ ID NO: 12068 - DNA, 25 bp, Homo sapien
ccgtctatgcacagtccacctttag

SEQ ID NO: 12069 - DNA, 25 bp, Homo sapien
gtacgagtcccgtgtctatctaccc

SEQ ID NO: 12070 - DNA, 25 bp, Homo sapien
gtacgagtcccgagtctatctaccc

SEQ ID NO: 12071 - DNA, 25 bp, Homo sapien
ttacggatagtaacgaaaactgcac

SEQ ID NO: 12072 - DNA, 25 bp, Homo sapien
ttacggatagtatcgaaaactgcac

SEQ ID NO: 12073 - DNA, 25 bp, Homo sapien
acaggtaacgtatcttacccagaca

SEQ ID NO: 12074 - DNA, 25 bp, Homo sapien
acaggtaacgtaacttacccagaca

SEQ ID NO: 12075 - DNA, 25 bp, Homo sapien
agagagtaactcactcgactcagaa

SEQ ID NO: 12076 - DNA, 25 bp, Homo sapien
agagagtaactctctcgactcagaa

SEQ ID NO: 12077 - DNA, 25 bp, Homo sapien
gtaaacgtttcgacggtactcaggg

SEQ ID NO: 12078 - DNA, 25 bp, Homo sapien
gtaaacgtttcgtcggtactcaggg

SEQ ID NO: 12079 - DNA, 25 bp, Homo sapien
gtaaattacacgacggagtcataga

SEQ ID NO: 12080 - DNA, 25 bp, Homo sapien
gtaaattacacgtcggagtcataga

SEQ ID NO: 12081 - DNA, 25 bp, Homo sapien
caaaatatgactcattggacttaag

SEQ ID NO: 12082 - DNA, 25 bp, Homo sapien
caaaatatgactgattggacttaag

SEQ ID NO: 12083 - DNA, 25 bp, Homo sapien
aaagacctaccagtgttgcataagt

SEQ ID NO: 12084 - DNA, 25 bp, Homo sapien
aaagacctaccactgttgcataagt

SEQ ID NO: 12085 - DNA, 25 bp, Homo sapien
aataactattttagacactactcgt

SEQ ID NO: 12086 - DNA, 25 bp, Homo sapien
aataactatttttgacactactcgt

SEQ ID NO: 12087 - DNA, 25 bp, Homo sapien
accactctagtgtttatggtcacac

SEQ ID NO: 12088 - DNA, 25 bp, Homo sapien
accactctagtgattatggtcacac

SEQ ID NO: 12089 - DNA, 25 bp, Homo sapien
tgactcgaaatattctcgtctctag

SEQ ID NO: 12090 - DNA, 25 bp, Homo sapien
tgactcgaaataatctcgtctctag

SEQ ID NO: 12091 - DNA, 25 bp, Homo sapien
agacagtcacctaaactctagtgag

SEQ ID NO: 12092 - DNA, 25 bp, Homo sapien
agacagtcaccttaactctagtgag

SEQ ID NO: 12093 - DNA, 25 bp, Homo sapien
actactataccgtttacggttcgga

SEQ ID NO: 12094 - DNA, 25 bp, Homo sapien
actactataccgattacggttcgga

SEQ ID NO: 12095 - DNA, 25 bp, Homo sapien
cttctacctgtcgtttcgtggctac

SEQ ID NO: 12096 - DNA, 25 bp, Homo sapien
cttctacctgtcctttcgtggctac

SEQ ID NO: 12097 - DNA, 25 bp, Homo sapien
gggacacactgttttgtgtcggaga

SEQ ID NO: 12098 - DNA, 25 bp, Homo sapien
gggacacactgtattgtgtcggaga

SEQ ID NO: 12099 - DNA, 25 bp, Homo sapien
tgtactattttagactagtgtcacc

SEQ ID NO: 12100 - DNA, 25 bp, Homo sapien
tgtactattttacactagtgtcacc

SEQ ID NO: 12101 - DNA, 25 bp, Homo sapien
ggagttgtaattccactttactaca

SEQ ID NO: 12102 - DNA, 25 bp, Homo sapien
ggagttgtaattgcactttactaca

SEQ ID NO: 12103 - DNA, 25 bp, Homo sapien
gagacaatagacaggcttatctatg

SEQ ID NO: 12104 - DNA, 25 bp, Homo sapien
gagacaatagactggcttatctatg

SEQ ID NO: 12105 - DNA, 25 bp, Homo sapien
tacgtagacgaagtgggtatctacc

SEQ ID NO: 12106 - DNA, 25 bp, Homo sapien
tacgtagacgaactgggtatctacc

SEQ ID NO: 12107 - DNA, 25 bp, Homo sapien
tagtactaaagaagaacgtctcacc

SEQ ID NO: 12108 - DNA, 25 bp, Homo sapien
tagtactaaagatgaacgtctcacc

SEQ ID NO: 12109 - DNA, 25 bp, Homo sapien
gtggagagtacctgagactgccgac

SEQ ID NO: 12110 - DNA, 25 bp, Homo sapien
gtggagagtaccagagactgccgac

SEQ ID NO: 12111 - DNA, 25 bp, Homo sapien
tcgtacggagatggtgaacctttct

SEQ ID NO: 12112 - DNA, 25 bp, Homo sapien
tcgtacggagatcgtgaacctttct

SEQ ID NO: 12113 - DNA, 25 bp, Homo sapien
cgacagaaaagtcgagtaattcttt

SEQ ID NO: 12114 - DNA, 25 bp, Homo sapien
cgacagaaaagtggagtaattcttt

SEQ ID NO: 12115 - DNA, 25 bp, Homo sapien
acgaggatacttgtaaattactccg

SEQ ID NO: 12116 - DNA, 25 bp, Homo sapien
acgaggatacttctaaattactccg

SEQ ID NO: 12117 - DNA, 25 bp, Homo sapien
ctctctggtcttcgttgtgttctgg

SEQ ID NO: 12118 - DNA, 25 bp, Homo sapien
ctctctggtcttggttgtgttctgg

SEQ ID NO: 12119 - DNA, 25 bp, Homo sapien
cagtgttacgacttgactttcgtac

SEQ ID NO: 12120 - DNA, 25 bp, Homo sapien
cagtgttacgacatgactttcgtac

SEQ ID NO: 12121 - DNA, 25 bp, Homo sapien
acagtacgtcgaatgacttaacgtc

SEQ ID NO: 12122 - DNA, 25 bp, Homo sapien
acagtacgtcgattgacttaacgtc

SEQ ID NO: 12123 - DNA, 25 bp, Homo sapien
gaccctctacgttaactttgttatg

SEQ ID NO: 12124 - DNA, 25 bp, Homo sapien
gaccctctacgtaaactttgttatg

SEQ ID NO: 12125 - DNA, 25 bp, Homo sapien
aacacttctgtcactgttttagtcg

SEQ ID NO: 12126 - DNA, 25 bp, Homo sapien
aacacttctgtctctgttttagtcg

SEQ ID NO: 12127 - DNA, 25 bp, Homo sapien
aaaacgtttgacgtcaggtaataac

SEQ ID NO: 12128 - DNA, 25 bp, Homo sapien
aaaacgtttgacctcaggtaataac

SEQ ID NO: 12129 - DNA, 25 bp, Homo sapien
tttggttccgtatcaggtaacaact

SEQ ID NO: 12130 - DNA, 25 bp, Homo sapien
tttggttccgtaacaggtaacaact

SEQ ID NO: 12131 - DNA, 25 bp, Homo sapien
atttaagatcgaacaagagaccaac

SEQ ID NO: 12132 - DNA, 25 bp, Homo sapien
atttaagatcgatcaagagaccaac

SEQ ID NO: 12133 - DNA, 25 bp, Homo sapien
ttcactgtctgtgacgaacacgaca

SEQ ID NO: 12134 - DNA, 25 bp, Homo sapien
ttcactgtctgtcacgaacacgaca

SEQ ID NO: 12135 - DNA, 25 bp, Homo sapien
ttcgtttatcgtcacgtatgatata

SEQ ID NO: 12136 - DNA, 25 bp, Homo sapien
ttcgtttatcgtgacgtatgatata

SEQ ID NO: 12137 - DNA, 25 bp, Homo sapien
tcgtgtcgaggtcctgtgtggctcc

SEQ ID NO: 12138 - DNA, 25 bp, Homo sapien
tcgtgtcgaggtgctgtgtggctcc

SEQ ID NO: 12139 - DNA, 25 bp, Homo sapien
tcagagtatacgtgtgtgggacgac

SEQ ID NO: 12140 - DNA, 25 bp, Homo sapien
tcagagtatacgagtgtgggacgac

SEQ ID NO: 12141 - DNA, 25 bp, Homo sapien
gaaccagtcgagacactcagacaac

SEQ ID NO: 12142 - DNA, 25 bp, Homo sapien
gaaccagtcgagtcactcagacaac

SEQ ID NO: 12143 - DNA, 25 bp, Homo sapien
ttgaacacagtcgtttcttgactaa

SEQ ID NO: 12144 - DNA, 25 bp, Homo sapien
ttgaacacagtcctttcttgactaa

SEQ ID NO: 12145 - DNA, 25 bp, Homo sapien
aaagatgtatcttcgtacgtttttc

SEQ ID NO: 12146 - DNA, 25 bp, Homo sapien
aaagatgtatctacgtacgtttttc

SEQ ID NO: 12147 - DNA, 25 bp, Homo sapien
caatgtacgtcaaagacgtgtttat

SEQ ID NO: 12148 - DNA, 25 bp, Homo sapien
caatgtacgtcatagacgtgtttat

SEQ ID NO: 12149 - DNA, 25 bp, Homo sapien
ttcgaacggttatgggacccgttac

SEQ ID NO: 12150 - DNA, 25 bp, Homo sapien
ttcgaacggttaagggacccgttac

SEQ ID NO: 12151 - DNA, 25 bp, Homo sapien
agtgaccgtgattgtcaccttctac

SEQ ID NO: 12152 - DNA, 25 bp, Homo sapien
agtgaccgtgatagtcaccttctac

SEQ ID NO: 12153 - DNA, 25 bp, Homo sapien
agaagagtccgtaccccgttatact

SEQ ID NO: 12154 - DNA, 25 bp, Homo sapien
agaagagtccgttccccgttatact

SEQ ID NO: 12155 - DNA, 25 bp, Homo sapien
agggtcgtcaccttacactcgacac

SEQ ID NO: 12156 - DNA, 25 bp, Homo sapien
agggtcgtcaccatacactcgacac

SEQ ID NO: 12157 - DNA, 25 bp, Homo sapien
tacgaggtctctttccgtcccgact

SEQ ID NO: 12158 - DNA, 25 bp, Homo sapien
tacgaggtctctatccgtcccgact

SEQ ID NO: 12159 - DNA, 25 bp, Homo sapien
cccactgtctcgtggatcgaaagac

SEQ ID NO: 12160 - DNA, 25 bp, Homo sapien
cccactgtctcgaggatcgaaagac

SEQ ID NO: 12161 - DNA, 25 bp, Homo sapien
tgtcgaccgtaaacttcgagataac

SEQ ID NO: 12162 - DNA, 25 bp, Homo sapien
tgtcgaccgtaatcttcgagataac

SEQ ID NO: 12163 - DNA, 25 bp, Homo sapien
gtgaatggacttatgtgaccctacc

SEQ ID NO: 12164 - DNA, 25 bp, Homo sapien
gtgaatggacttttgtgaccctacc

SEQ ID NO: 12165 - DNA, 25 bp, Homo sapien
gcgcctacatgaggtgccgactcgc

SEQ ID NO: 12166 - DNA, 25 bp, Homo sapien
gcgcctacatgacgtgccgactcgc

SEQ ID NO: 12167 - DNA, 25 bp, Homo sapien
gacatgaaagtattctacgacctcc

SEQ ID NO: 12168 - DNA, 25 bp, Homo sapien
gacatgaaagtaatctacgacctcc

SEQ ID NO: 12169 - DNA, 25 bp, Homo sapien
cagtgaggactttcgtagacttcat

SEQ ID NO: 12170 - DNA, 25 bp, Homo sapien
cagtgaggacttacgtagacttcat

SEQ ID NO: 12171 - DNA, 25 bp, Homo sapien
gggtaggtacttagtagacacacac

SEQ ID NO: 12172 - DNA, 25 bp, Homo sapien
gggtaggtactttgtagacacacac

SEQ ID NO: 12173 - DNA, 25 bp, Homo sapien
ggtgtgagatgtagtactagctacc

SEQ ID NO: 12174 - DNA, 25 bp, Homo sapien
ggtgtgagatgttgtactagctacc

SEQ ID NO: 12175 - DNA, 25 bp, Homo sapien
gatcgacgtcggtggaacagcgtcc

SEQ ID NO: 12176 - DNA, 25 bp, Homo sapien
gatcgacgtcggaggaacagcgtcc

SEQ ID NO: 12177 - DNA, 25 bp, Homo sapien
tatcagtcggagcagaagacggacc

SEQ ID NO: 12178 - DNA, 25 bp, Homo sapien
tatcagtcggaggagaagacggacc

SEQ ID NO: 12179 - DNA, 25 bp, Homo sapien
atccaccgagagaaacggcactcac

SEQ ID NO: 12180 - DNA, 25 bp, Homo sapien
atccaccgagagtaacggcactcac

SEQ ID NO: 12181 - DNA, 25 bp, Homo sapien
ctatattactgtgaacgtgtcggaa

SEQ ID NO: 12182 - DNA, 25 bp, Homo sapien
ctatattactgtcaacgtgtcggaa

SEQ ID NO: 12183 - DNA, 25 bp, Homo sapien
acccaggtttcgtcgtgtacgagaa

SEQ ID NO: 12184 - DNA, 25 bp, Homo sapien
acccaggtttcgacgtgtacgagaa

SEQ ID NO: 12185 - DNA, 25 bp, Homo sapien
acgaggttctttgcacgaacgagaa

SEQ ID NO: 12186 - DNA, 25 bp, Homo sapien
acgaggttctttccacgaacgagaa

SEQ ID NO: 12187 - DNA, 25 bp, Homo sapien
agatcgtatatttctcaaacgaagg

SEQ ID NO: 12188 - DNA, 25 bp, Homo sapien
agatcgtatattactcaaacgaagg

SEQ ID NO: 12189 - DNA, 25 bp, Homo sapien
acattgtttaccttgaacacagtcg

SEQ ID NO: 12190 - DNA, 25 bp, Homo sapien
acattgtttaccatgaacacagtcg

SEQ ID NO: 12191 - DNA, 25 bp, Homo sapien
attctcgctgtccatgtgtcctcac

SEQ ID NO: 12192 - DNA, 25 bp, Homo sapien
attctcgctgtcgatgtgtcctcac

SEQ ID NO: 12193 - DNA, 25 bp, Homo sapien
ttcttcgtcgtcgttctgtccgtcc

SEQ ID NO: 12194 - DNA, 25 bp, Homo sapien
ttcttcgtcgtccttctgtccgtcc

SEQ ID NO: 12195 - DNA, 25 bp, Homo sapien
tattacgtcgtaaattctcgggtcc

SEQ ID NO: 12196 - DNA, 25 bp, Homo sapien
tattacgtcgtatattctcgggtcc

SEQ ID NO: 12197 - DNA, 25 bp, Homo sapien
gatttctacgaaggtctccggtcct

SEQ ID NO: 12198 - DNA, 25 bp, Homo sapien
gatttctacgaacgtctccggtcct

SEQ ID NO: 12199 - DNA, 25 bp, Homo sapien
taagtatgttaaaccttctcagtca

SEQ ID NO: 12200 - DNA, 25 bp, Homo sapien
taagtatgttaatccttctcagtca

SEQ ID NO: 12201 - DNA, 25 bp, Homo sapien
gtggtgtaaatccttacttactatt

SEQ ID NO: 12202 - DNA, 25 bp, Homo sapien
gtggtgtaaatcgttacttactatt

SEQ ID NO: 12203 - DNA, 25 bp, Homo sapien
agaaggtgacagtcatcctatattt

SEQ ID NO: 12204 - DNA, 25 bp, Homo sapien
agaaggtgacagacatcctatattt

SEQ ID NO: 12205 - DNA, 25 bp, Homo sapien
gtctagtgtccgacttctacttttg

SEQ ID NO: 12206 - DNA, 25 bp, Homo sapien
gtctagtgtccgtcttctacttttg

SEQ ID NO: 12207 - DNA, 25 bp, Homo sapien
actcatagtcggtctatgtttcttt

SEQ ID NO: 12208 - DNA, 25 bp, Homo sapien
actcatagtcggactatgtttcttt

SEQ ID NO: 12209 - DNA, 25 bp, Homo sapien
tcaggtttactcttctgttcgtctc

SEQ ID NO: 12210 - DNA, 25 bp, Homo sapien
tcaggtttactcatctgttcgtctc

SEQ ID NO: 12211 - DNA, 25 bp, Homo sapien
tttgagtttcgtccttgtcgagacc

SEQ ID NO: 12212 - DNA, 25 bp, Homo sapien
tttgagtttcgtgcttgtcgagacc

SEQ ID NO: 12213 - DNA, 25 bp, Homo sapien
cggtagagtttaggacttctcaggg

SEQ ID NO: 12214 - DNA, 25 bp, Homo sapien
cggtagagtttacgacttctcaggg

SEQ ID NO: 12215 - DNA, 25 bp, Homo sapien
gtagactgtgttctagtacaacaag

SEQ ID NO: 12216 - DNA, 25 bp, Homo sapien
gtagactgtgttgtagtacaacaag

SEQ ID NO: 12217 - DNA, 25 bp, Homo sapien
cgtttgtgtgtacgtggttacacgg

SEQ ID NO: 12218 - DNA, 25 bp, Homo sapien
cgtttgtgtgtaggtggttacacgg

SEQ ID NO: 12219 - DNA, 25 bp, Homo sapien
agatatttgggtaacggacacccca

SEQ ID NO: 12220 - DNA, 25 bp, Homo sapien
agatatttgggttacggacacccca

SEQ ID NO: 12221 - DNA, 25 bp, Homo sapien
agacgtttcagaagacgaccaccca

SEQ ID NO: 12222 - DNA, 25 bp, Homo sapien
agacgtttcagatgacgaccaccca

SEQ ID NO: 12223 - DNA, 25 bp, Homo sapien
agtaagtaaaagttacggacccatt

SEQ ID NO: 12224 - DNA, 25 bp, Homo sapien
agtaagtaaaagatacggacccatt

SEQ ID NO: 12225 - DNA, 25 bp, Homo sapien
agtacatgaacagacagtcgtatgt

SEQ ID NO: 12226 - DNA, 25 bp, Homo sapien
agtacatgaacacacagtcgtatgt

SEQ ID NO: 12227 - DNA, 25 bp, Homo sapien
caagtttatggtaaactctgtcatg

SEQ ID NO: 12228 - DNA, 25 bp, Homo sapien
caagtttatggttaactctgtcatg

SEQ ID NO: 12229 - DNA, 25 bp, Homo sapien
catatttgtacgtatcttttacagg

SEQ ID NO: 12230 - DNA, 25 bp, Homo sapien
catatttgtacgaatcttttacagg

SEQ ID NO: 12231 - DNA, 25 bp, Homo sapien
ctctcccttcgaaattcgtctggtc

SEQ ID NO: 12232 - DNA, 25 bp, Homo sapien
ctctcccttcgatattcgtctggtc

SEQ ID NO: 12233 - DNA, 25 bp, Homo sapien
tgtgtccccgggtccgtgaaagact

SEQ ID NO: 12234 - DNA, 25 bp, Homo sapien
tgtgtccccgggaccgtgaaagact

SEQ ID NO: 12235 - DNA, 25 bp, Homo sapien
gtgtccctccgaaagaccaactgct

SEQ ID NO: 12236 - DNA, 25 bp, Homo sapien
gtgtccctccgatagaccaactgct

SEQ ID NO: 12237 - DNA, 25 bp, Homo sapien
aggtacccaactgttacaaaccgac

SEQ ID NO: 12238 - DNA, 25 bp, Homo sapien
aggtacccaactcttacaaaccgac

SEQ ID NO: 12239 - DNA, 25 bp, Homo sapien
gaaattaagcgtctcacggacggga

SEQ ID NO: 12240 - DNA, 25 bp, Homo sapien
gaaattaagcgtgtcacggacggga

SEQ ID NO: 12241 - DNA, 25 bp, Homo sapien
acaaaggttcggtccgggtagaacc

SEQ ID NO: 12242 - DNA, 25 bp, Homo sapien
acaaaggttcggaccgggtagaacc

SEQ ID NO: 12243 - DNA, 25 bp, Homo sapien
gaaattttcgatcaactaaaggacc

SEQ ID NO: 12244 - DNA, 25 bp, Homo sapien
gaaattttcgatgaactaaaggacc

SEQ ID NO: 12245 - DNA, 25 bp, Homo sapien
caaaatctgtttatgttcttcgaag

SEQ ID NO: 12246 - DNA, 25 bp, Homo sapien
caaaatctgtttttgttcttcgaag

SEQ ID NO: 12247 - DNA, 25 bp, Homo sapien
catgttacgttttctaagtttcggg

SEQ ID NO: 12248 - DNA, 25 bp, Homo sapien
catgttacgtttactaagtttcggg

SEQ ID NO: 12249 - DNA, 25 bp, Homo sapien
gctaccacagtgacccgaggtggag

SEQ ID NO: 12250 - DNA, 25 bp, Homo sapien
gctaccacagtgtcccgaggtggag

SEQ ID NO: 12251 - DNA, 25 bp, Homo sapien
ttcaggagttcctaccgtagcacgt

SEQ ID NO: 12252 - DNA, 25 bp, Homo sapien
ttcaggagttccaaccgtagcacgt

SEQ ID NO: 12253 - DNA, 25 bp, Homo sapien
aacgaggttctccagcctacgagac

SEQ ID NO: 12254 - DNA, 25 bp, Homo sapien
aacgaggttctcgagcctacgagac

SEQ ID NO: 12255 - DNA, 25 bp, Homo sapien
ctaaagtgtacataccgagacagga

SEQ ID NO: 12256 - DNA, 25 bp, Homo sapien
ctaaagtgtacaaaccgagacagga

SEQ ID NO: 12257 - DNA, 25 bp, Homo sapien
actaggatgaacactctatgtagga

SEQ ID NO: 12258 - DNA, 25 bp, Homo sapien
actaggatgaactctctatgtagga

SEQ ID NO: 12259 - DNA, 25 bp, Homo sapien
acaggtcacatttcctcagtatcag

SEQ ID NO: 12260 - DNA, 25 bp, Homo sapien
acaggtcacattacctcagtatcag

SEQ ID NO: 12261 - DNA, 25 bp, Homo sapien
aggtccgtcgtccactgggtatcgg

SEQ ID NO: 12262 - DNA, 25 bp, Homo sapien
aggtccgtcgtcgactgggtatcgg

SEQ ID NO: 12263 - DNA, 25 bp, Homo sapien
ggtctcgtcgacgtaacaccttcgg

SEQ ID NO: 12264 - DNA, 25 bp, Homo sapien
ggtctcgtcgacctaacaccttcgg

SEQ ID NO: 12265 - DNA, 25 bp, Homo sapien
cgttgtcttctgtcgcacctaacct

SEQ ID NO: 12266 - DNA, 25 bp, Homo sapien
cgttgtcttctgacgcacctaacct

SEQ ID NO: 12267 - DNA, 25 bp, Homo sapien
gagttcgtttcattctccataatcg

SEQ ID NO: 12268 - DNA, 25 bp, Homo sapien
gagttcgtttcaatctccataatcg

SEQ ID NO: 12269 - DNA, 25 bp, Homo sapien
aaacgtcaagtcaaatcccgttaag

SEQ ID NO: 12270 - DNA, 25 bp, Homo sapien
aaacgtcaagtctaatcccgttaag

SEQ ID NO: 12271 - DNA, 25 bp, Homo sapien
tagaaactccataataccgttaggt

SEQ ID NO: 12272 - DNA, 25 bp, Homo sapien
tagaaactccattataccgttaggt

SEQ ID NO: 12273 - DNA, 25 bp, Homo sapien
cgaagaaccacgaaacacacggaag

SEQ ID NO: 12274 - DNA, 25 bp, Homo sapien
cgaagaaccacgtaacacacggaag

SEQ ID NO: 12275 - DNA, 25 bp, Homo sapien
gaatagtcaccatagaacctgagag

SEQ ID NO: 12276 - DNA, 25 bp, Homo sapien
gaatagtcaccaaagaacctgagag

SEQ ID NO: 12277 - DNA, 25 bp, Homo sapien
cgataagtgagtacctaaaaacaga

SEQ ID NO: 12278 - DNA, 25 bp, Homo sapien
cgataagtgagttcctaaaaacaga

SEQ ID NO: 12279 - DNA, 25 bp, Homo sapien
gatgaagagttccacacaccagaag

SEQ ID NO: 12280 - DNA, 25 bp, Homo sapien
gatgaagagttcgacacaccagaag

SEQ ID NO: 12281 - DNA, 25 bp, Homo sapien
gagatcgaaatttacaaaccgaaat

SEQ ID NO: 12282 - DNA, 25 bp, Homo sapien
gagatcgaaattaacaaaccgaaat

SEQ ID NO: 12283 - DNA, 25 bp, Homo sapien
aagatcgaggggaaaaaccggacct

SEQ ID NO: 12284 - DNA, 25 bp, Homo sapien
aagatcgaggggtaaaaccggacct

SEQ ID NO: 12285 - DNA, 25 bp, Homo sapien
ggaaagaagaggtataccctatcct

SEQ ID NO: 12286 - DNA, 25 bp, Homo sapien
ggaaagaagaggaataccctatcct

SEQ ID NO: 12287 - DNA, 25 bp, Homo sapien
aagtgaaagtacattcacggtttct

SEQ ID NO: 12288 - DNA, 25 bp, Homo sapien
aagtgaaagtactttcacggtttct

SEQ ID NO: 12289 - DNA, 25 bp, Homo sapien
gcacaccagtacctggaccgtctta

SEQ ID NO: 12290 - DNA, 25 bp, Homo sapien
gcacaccagtacgtggaccgtctta

SEQ ID NO: 12291 - DNA, 25 bp, Homo sapien
ctaccctagtccttgaccgtatctg

SEQ ID NO: 12292 - DNA, 25 bp, Homo sapien
ctaccctagtccatgaccgtatctg

SEQ ID NO: 12293 - DNA, 25 bp, Homo sapien
cttggaagaagaacagccggagcga

SEQ ID NO: 12294 - DNA, 25 bp, Homo sapien
cttggaagaagatcagccggagcga

SEQ ID NO: 12295 - DNA, 25 bp, Homo sapien
ccggacgaagtactgcttcaggtac

SEQ ID NO: 12296 - DNA, 25 bp, Homo sapien
ccggacgaagtagtgcttcaggtac

SEQ ID NO: 12297 - DNA, 25 bp, Homo sapien
gcaaagagaagtgacagaacgttcg

SEQ ID NO: 12298 - DNA, 25 bp, Homo sapien
gcaaagagaagtcacagaacgttcg

SEQ ID NO: 12299 - DNA, 25 bp, Homo sapien
ctaaagatcgagttaagtcgattac

SEQ ID NO: 12300 - DNA, 25 bp, Homo sapien
ctaaagatcgagataagtcgattac

SEQ ID NO: 12301 - DNA, 25 bp, Homo sapien
acggagaagacagaagaagcctccg

SEQ ID NO: 12302 - DNA, 25 bp, Homo sapien
acggagaagacacaagaagcctccg

SEQ ID NO: 12303 - DNA, 25 bp, Homo sapien
aaaccaccgagagaaggttcgtcac

SEQ ID NO: 12304 - DNA, 25 bp, Homo sapien
aaaccaccgagacaaggttcgtcac

SEQ ID NO: 12305 - DNA, 25 bp, Homo sapien
caatgataagtcactagtggctccg

SEQ ID NO: 12306 - DNA, 25 bp, Homo sapien
caatgataagtctctagtggctccg

SEQ ID NO: 12307 - DNA, 25 bp, Homo sapien
aggggtctcgacctcttgaactccg

SEQ ID NO: 12308 - DNA, 25 bp, Homo sapien
aggggtctcgacgtcttgaactccg

SEQ ID NO: 12309 - DNA, 25 bp, Homo sapien
tacggtacactagatctcggacccg

SEQ ID NO: 12310 - DNA, 25 bp, Homo sapien
tacggtacactacatctcggacccg

SEQ ID NO: 12311 - DNA, 25 bp, Homo sapien
actcactagtttcctcgtccactgg

SEQ ID NO: 12312 - DNA, 25 bp, Homo sapien
actcactagtttgctcgtccactgg

SEQ ID NO: 12313 - DNA, 25 bp, Homo sapien
acaactcctctttgactccggtcgg

SEQ ID NO: 12314 - DNA, 25 bp, Homo sapien
acaactcctcttagactccggtcgg

SEQ ID NO: 12315 - DNA, 25 bp, Homo sapien
ggacctccactttcggctacgggtg

SEQ ID NO: 12316 - DNA, 25 bp, Homo sapien
ggacctccacttacggctacgggtg

SEQ ID NO: 12317 - DNA, 25 bp, Homo sapien
gtcccactgacgaccgactggttgt

SEQ ID NO: 12318 - DNA, 25 bp, Homo sapien
gtcccactgacgtccgactggttgt

SEQ ID NO: 12319 - DNA, 25 bp, Homo sapien
aaacgacatgagttcaatccaccgt

SEQ ID NO: 12320 - DNA, 25 bp, Homo sapien
aaacgacatgagatcaatccaccgt

SEQ ID NO: 12321 - DNA, 25 bp, Homo sapien
agaagaaagtaattcatactctccg

SEQ ID NO: 12322 - DNA, 25 bp, Homo sapien
agaagaaagtaaatcatactctccg

SEQ ID NO: 12323 - DNA, 25 bp, Homo sapien
cctaaagggtgtctaccgtgtcagg

SEQ ID NO: 12324 - DNA, 25 bp, Homo sapien
cctaaagggtgtgtaccgtgtcagg

SEQ ID NO: 12325 - DNA, 25 bp, Homo sapien
agtcaaaatctctccgtctcgaccg

SEQ ID NO: 12326 - DNA, 25 bp, Homo sapien
agtcaaaatctcaccgtctcgaccg

SEQ ID NO: 12327 - DNA, 25 bp, Homo sapien
ccgttcaaagttatcctctcgacac

SEQ ID NO: 12328 - DNA, 25 bp, Homo sapien
ccgttcaaagttttcctctcgacac

SEQ ID NO: 12329 - DNA, 25 bp, Homo sapien
agtatagacctctcgcgtccgtcca

SEQ ID NO: 12330 - DNA, 25 bp, Homo sapien
agtatagacctcacgcgtccgtcca

SEQ ID NO: 12331 - DNA, 25 bp, Homo sapien
cgatcgacttcaacggttcgtcctc

SEQ ID NO: 12332 - DNA, 25 bp, Homo sapien
cgatcgacttcatcggttcgtcctc

SEQ ID NO: 12333 - DNA, 25 bp, Homo sapien
ttgggactttggtgtacctcacgtc

SEQ ID NO: 12334 - DNA, 25 bp, Homo sapien
ttgggactttggagtacctcacgtc

SEQ ID NO: 12335 - DNA, 25 bp, Homo sapien
gtattggtttgttcaccgaatgttc

SEQ ID NO: 12336 - DNA, 25 bp, Homo sapien
gtattggtttgtacaccgaatgttc

SEQ ID NO: 12337 - DNA, 25 bp, Homo sapien
tattaggtttcgaccaatagaggtc

SEQ ID NO: 12338 - DNA, 25 bp, Homo sapien
tattaggtttcgtccaatagaggtc

SEQ ID NO: 12339 - DNA, 25 bp, Homo sapien
cgtttgtcagtaggagctatattac

SEQ ID NO: 12340 - DNA, 25 bp, Homo sapien
cgtttgtcagtacgagctatattac

SEQ ID NO: 12341 - DNA, 25 bp, Homo sapien
tattcagtgtttatctgggtttacc

SEQ ID NO: 12342 - DNA, 25 bp, Homo sapien
tattcagtgtttttctgggtttacc

SEQ ID NO: 12343 - DNA, 25 bp, Homo sapien
tgttgtcactgtcgactgtttggta

SEQ ID NO: 12344 - DNA, 25 bp, Homo sapien
tgttgtcactgtggactgtttggta

SEQ ID NO: 12345 - DNA, 25 bp, Homo sapien
ttatctctgccgtggtccttccgaa

SEQ ID NO: 12346 - DNA, 25 bp, Homo sapien
ttatctctgccgaggtccttccgaa

SEQ ID NO: 12347 - DNA, 25 bp, Homo sapien
tatacacccggtctctccgaacgaa

SEQ ID NO: 12348 - DNA, 25 bp, Homo sapien
tatacacccggtgtctccgaacgaa

SEQ ID NO: 12349 - DNA, 25 bp, Homo sapien
cagtgggtcgtcgtcagtggaccat

SEQ ID NO: 12350 - DNA, 25 bp, Homo sapien
cagtgggtcgtcctcagtggaccat

SEQ ID NO: 12351 - DNA, 25 bp, Homo sapien
gagagcatctacctcacttcgaaca

SEQ ID NO: 12352 - DNA, 25 bp, Homo sapien
gagagcatctacgtcacttcgaaca

SEQ ID NO: 12353 - DNA, 25 bp, Homo sapien
acaagtaaaagagtcacctctcatg

SEQ ID NO: 12354 - DNA, 25 bp, Homo sapien
acaagtaaaagactcacctctcatg

SEQ ID NO: 12355 - DNA, 25 bp, Homo sapien
aagaaatcggacactactcccctgt

SEQ ID NO: 12356 - DNA, 25 bp, Homo sapien
aagaaatcggactctactcccctgt

SEQ ID NO: 12357 - DNA, 25 bp, Homo sapien
gggtggaacaagattctcttttctg

SEQ ID NO: 12358 - DNA, 25 bp, Homo sapien
gggtggaacaagtttctcttttctg

SEQ ID NO: 12359 - DNA, 25 bp, Homo sapien
ggactcaaagaaggaagaccaccca

SEQ ID NO: 12360 - DNA, 25 bp, Homo sapien
ggactcaaagaacgaagaccaccca

SEQ ID NO: 12361 - DNA, 25 bp, Homo sapien
aacccaggaatcatggacctaccgg

SEQ ID NO: 12362 - DNA, 25 bp, Homo sapien
aacccaggaatcttggacctaccgg

SEQ ID NO: 12363 - DNA, 25 bp, Homo sapien
cagtccgtagtatcgttcggccccc

SEQ ID NO: 12364 - DNA, 25 bp, Homo sapien
cagtccgtagtaacgttcggccccc

SEQ ID NO: 12365 - DNA, 25 bp, Homo sapien
tcgagaattccgtcgcgtagcctca

SEQ ID NO: 12366 - DNA, 25 bp, Homo sapien
tcgagaattccgacgcgtagcctca

SEQ ID NO: 12367 - DNA, 25 bp, Homo sapien
cagacttgtcggacgaggtcgtaaa

SEQ ID NO: 12368 - DNA, 25 bp, Homo sapien
cagacttgtcggtcgaggtcgtaaa

SEQ ID NO: 12369 - DNA, 25 bp, Homo sapien
gaccgtcggctcttggtcctcgacg

SEQ ID NO: 12370 - DNA, 25 bp, Homo sapien
gaccgtcggctcatggtcctcgacg

SEQ ID NO: 12371 - DNA, 25 bp, Homo sapien
caaaaacatcggtggaaactccgcg

SEQ ID NO: 12372 - DNA, 25 bp, Homo sapien
caaaaacatcggaggaaactccgcg

SEQ ID NO: 12373 - DNA, 25 bp, Homo sapien
tcgactaccccgaggtcaattccgt

SEQ ID NO: 12374 - DNA, 25 bp, Homo sapien
tcgactaccccgtggtcaattccgt

SEQ ID NO: 12375 - DNA, 25 bp, Homo sapien
gtaaaaccccttaggagatatttct

SEQ ID NO: 12376 - DNA, 25 bp, Homo sapien
gtaaaacccctttggagatatttct

SEQ ID NO: 12377 - DNA, 25 bp, Homo sapien
aattgtcaccacactgtaggtctct

SEQ ID NO: 12378 - DNA, 25 bp, Homo sapien
aattgtcaccactctgtaggtctct

SEQ ID NO: 12379 - DNA, 25 bp, Homo sapien
acatgtatctcagtgtagtatttac

SEQ ID NO: 12380 - DNA, 25 bp, Homo sapien
acatgtatctcactgtagtatttac

SEQ ID NO: 12381 - DNA, 25 bp, Homo sapien
gattagattgaccagagtgttcgtc

SEQ ID NO: 12382 - DNA, 25 bp, Homo sapien
gattagattgacgagagtgttcgtc

SEQ ID NO: 12383 - DNA, 25 bp, Homo sapien
catgtcttcatcatactgtaggact

SEQ ID NO: 12384 - DNA, 25 bp, Homo sapien
catgtcttcatcttactgtaggact

SEQ ID NO: 12385 - DNA, 25 bp, Homo sapien
gacggtgaactttacgtagtgtcat

SEQ ID NO: 12386 - DNA, 25 bp, Homo sapien
gacggtgaacttaacgtagtgtcat

SEQ ID NO: 12387 - DNA, 25 bp, Homo sapien
aaccaaggggtcgtgagtgtgtcac

SEQ ID NO: 12388 - DNA, 25 bp, Homo sapien
aaccaaggggtcctgagtgtgtcac

SEQ ID NO: 12389 - DNA, 25 bp, Homo sapien
ccccgacaggtcgactcagaggcgg

SEQ ID NO: 12390 - DNA, 25 bp, Homo sapien
ccccgacaggtccactcagaggcgg

SEQ ID NO: 12391 - DNA, 25 bp, Homo sapien
actcagataacgtaccacaggaagg

SEQ ID NO: 12392 - DNA, 25 bp, Homo sapien
actcagataacgaaccacaggaagg

SEQ ID NO: 12393 - DNA, 25 bp, Homo sapien
gactctcaacctaactcgaaggaaa

SEQ ID NO: 12394 - DNA, 25 bp, Homo sapien
gactctcaaccttactcgaaggaaa

SEQ ID NO: 12395 - DNA, 25 bp, Homo sapien
ctcatagtatatctgcgtattggat

SEQ ID NO: 12396 - DNA, 25 bp, Homo sapien
ctcatagtatatgtgcgtattggat

SEQ ID NO: 12397 - DNA, 25 bp, Homo sapien
tcatagatagaatcggtttcgtgac

SEQ ID NO: 12398 - DNA, 25 bp, Homo sapien
tcatagatagaaacggtttcgtgac

SEQ ID NO: 12399 - DNA, 25 bp, Homo sapien
ttgatgttgtcaacggttcttagtc

SEQ ID NO: 12400 - DNA, 25 bp, Homo sapien
ttgatgttgtcatcggttcttagtc

SEQ ID NO: 12401 - DNA, 25 bp, Homo sapien
tggtgcgtatcgtcggttcttatgt

SEQ ID NO: 12402 - DNA, 25 bp, Homo sapien
tggtgcgtatcgacggttcttatgt

SEQ ID NO: 12403 - DNA, 25 bp, Homo sapien
gtgtcaccggtgtcgattgtagtaa

SEQ ID NO: 12404 - DNA, 25 bp, Homo sapien
gtgtcaccggtgacgattgtagtaa

SEQ ID NO: 12405 - DNA, 25 bp, Homo sapien
acgtaaaactttacgaatgacgtca

SEQ ID NO: 12406 - DNA, 25 bp, Homo sapien
acgtaaaacttttcgaatgacgtca

SEQ ID NO: 12407 - DNA, 25 bp, Homo sapien
tctagaaacgatttcaacttgttag

SEQ ID NO: 12408 - DNA, 25 bp, Homo sapien
tctagaaacgatatcaacttgttag

SEQ ID NO: 12409 - DNA, 25 bp, Homo sapien
ataccttatctcataccaatggtag

SEQ ID NO: 12410 - DNA, 25 bp, Homo sapien
ataccttatctcttaccaatggtag

SEQ ID NO: 12411 - DNA, 25 bp, Homo sapien
aagattcatccaactacgaagtgag

SEQ ID NO: 12412 - DNA, 25 bp, Homo sapien
aagattcatccatctacgaagtgag

SEQ ID NO: 12413 - DNA, 25 bp, Homo sapien
agatttcctctacgtctccagtgac

SEQ ID NO: 12414 - DNA, 25 bp, Homo sapien
agatttcctctaggtctccagtgac

SEQ ID NO: 12415 - DNA, 25 bp, Homo sapien
atggtcgctctactacgtcaaggct

SEQ ID NO: 12416 - DNA, 25 bp, Homo sapien
atggtcgctctagtacgtcaaggct

SEQ ID NO: 12417 - DNA, 25 bp, Homo sapien
tgtgtcgtaccagtcgcagaggtgt

SEQ ID NO: 12418 - DNA, 25 bp, Homo sapien
tgtgtcgtaccactcgcagaggtgt

SEQ ID NO: 12419 - DNA, 25 bp, Homo sapien
gaattctctatcagtgaaaccgatt

SEQ ID NO: 12420 - DNA, 25 bp, Homo sapien
gaattctctatctgtgaaaccgatt

SEQ ID NO: 12421 - DNA, 25 bp, Homo sapien
tccaactgggtgccatcggtgtaag

SEQ ID NO: 12422 - DNA, 25 bp, Homo sapien
tccaactgggtggcatcggtgtaag

SEQ ID NO: 12423 - DNA, 25 bp, Homo sapien
ttcgtactaaggtccctaagaccca

SEQ ID NO: 12424 - DNA, 25 bp, Homo sapien
ttcgtactaaggaccctaagaccca

SEQ ID NO: 12425 - DNA, 25 bp, Homo sapien
atctacaggggacataccacaccgg

SEQ ID NO: 12426 - DNA, 25 bp, Homo sapien
atctacaggggagataccacaccgg

SEQ ID NO: 12427 - DNA, 25 bp, Homo sapien
tagtgtgacgaagaactccagtcgg

SEQ ID NO: 12428 - DNA, 25 bp, Homo sapien
tagtgtgacgaacaactccagtcgg

SEQ ID NO: 12429 - DNA, 25 bp, Homo sapien
gacaggtgcagatccaacttccgcg

SEQ ID NO: 12430 - DNA, 25 bp, Homo sapien
gacaggtgcagaaccaacttccgcg

SEQ ID NO: 12431 - DNA, 25 bp, Homo sapien
cccgagaacaatcgtaaaacagcgt

SEQ ID NO: 12432 - DNA, 25 bp, Homo sapien
cccgagaacaatggtaaaacagcgt

SEQ ID NO: 12433 - DNA, 25 bp, Homo sapien
tggcagaactcgtcccgatcgcaga

SEQ ID NO: 12434 - DNA, 25 bp, Homo sapien
tggcagaactcgacccgatcgcaga

SEQ ID NO: 12435 - DNA, 25 bp, Homo sapien
ggaactctgtcgtcccgaagctaca

SEQ ID NO: 12436 - DNA, 25 bp, Homo sapien
ggaactctgtcgacccgaagctaca

SEQ ID NO: 12437 - DNA, 25 bp, Homo sapien
gactactcacagtatcctttcagtg

SEQ ID NO: 12438 - DNA, 25 bp, Homo sapien
gactactcacagaatcctttcagtg

SEQ ID NO: 12439 - DNA, 25 bp, Homo sapien
gtctccggagtggtccgttctcgcc

SEQ ID NO: 12440 - DNA, 25 bp, Homo sapien
gtctccggagtgctccgttctcgcc

SEQ ID NO: 12441 - DNA, 25 bp, Homo sapien
ttacccggagtgcagtgtcctccgt

SEQ ID NO: 12442 - DNA, 25 bp, Homo sapien
ttacccggagtggagtgtcctccgt

SEQ ID NO: 12443 - DNA, 25 bp, Homo sapien
cttcttccgtacttggtgccgtaga

SEQ ID NO: 12444 - DNA, 25 bp, Homo sapien
cttcttccgtacatggtgccgtaga

SEQ ID NO: 12445 - DNA, 25 bp, Homo sapien
tacctcctcgtcaaggtcgcgtaca

SEQ ID NO: 12446 - DNA, 25 bp, Homo sapien
tacctcctcgtctaggtcgcgtaca

SEQ ID NO: 12447 - DNA, 25 bp, Homo sapien
taccgtcggtacctcgtgtcccgaa

SEQ ID NO: 12448 - DNA, 25 bp, Homo sapien
taccgtcggtacgtcgtgtcccgaa

SEQ ID NO: 12449 - DNA, 25 bp, Homo sapien
atttcgtccgacgacgtttagcctt

SEQ ID NO: 12450 - DNA, 25 bp, Homo sapien
atttcgtccgaccacgtttagcctt

SEQ ID NO: 12451 - DNA, 25 bp, Homo sapien
gtctcacccgacgttttctacgtct

SEQ ID NO: 12452 - DNA, 25 bp, Homo sapien
gtctcacccgaccttttctacgtct

SEQ ID NO: 12453 - DNA, 25 bp, Homo sapien
tgactcaatagactctagtcttctg

SEQ ID NO: 12454 - DNA, 25 bp, Homo sapien
tgactcaatagagtctagtcttctg

SEQ ID NO: 12455 - DNA, 25 bp, Homo sapien
ctcgatttgaaggtttcgatgtcag

SEQ ID NO: 12456 - DNA, 25 bp, Homo sapien
ctcgatttgaagctttcgatgtcag

SEQ ID NO: 12457 - DNA, 25 bp, Homo sapien
ggcgggttgaggtgtggactgtaag

SEQ ID NO: 12458 - DNA, 25 bp, Homo sapien
ggcgggttgaggagtggactgtaag

SEQ ID NO: 12459 - DNA, 25 bp, Homo sapien
ggacgttgacgacatgagaccagtg

SEQ ID NO: 12460 - DNA, 25 bp, Homo sapien
ggacgttgacgagatgagaccagtg

SEQ ID NO: 12461 - DNA, 25 bp, Homo sapien
tccgtcgtccgcacatatatacagg

SEQ ID NO: 12462 - DNA, 25 bp, Homo sapien
tccgtcgtccgctcatatatacagg

SEQ ID NO: 12463 - DNA, 25 bp, Homo sapien
agaatcgaccggtgagagaccatct

SEQ ID NO: 12464 - DNA, 25 bp, Homo sapien
agaatcgaccggagagagaccatct

SEQ ID NO: 12465 - DNA, 25 bp, Homo sapien
tcacgtttcccaaggagtccgtatt

SEQ ID NO: 12466 - DNA, 25 bp, Homo sapien
tcacgtttcccatggagtccgtatt

SEQ ID NO: 12467 - DNA, 25 bp, Homo sapien
taacggtcacaggaaaagacctctg

SEQ ID NO: 12468 - DNA, 25 bp, Homo sapien
taacggtcacagcaaaagacctctg

SEQ ID NO: 12469 - DNA, 25 bp, Homo sapien
gaagagaccgactattcaatttctt

SEQ ID NO: 12470 - DNA, 25 bp, Homo sapien
gaagagaccgacaattcaatttctt

SEQ ID NO: 12471 - DNA, 25 bp, Homo sapien
aagaaagagtaagacgaacttcttc

SEQ ID NO: 12472 - DNA, 25 bp, Homo sapien
aagaaagagtaacacgaacttcttc

SEQ ID NO: 12473 - DNA, 25 bp, Homo sapien
acgagaagtacaacaccggcttttg

SEQ ID NO: 12474 - DNA, 25 bp, Homo sapien
acgagaagtacatcaccggcttttg

SEQ ID NO: 12475 - DNA, 25 bp, Homo sapien
tagagagtcctctataagtttcact

SEQ ID NO: 12476 - DNA, 25 bp, Homo sapien
tagagagtcctcaataagtttcact

SEQ ID NO: 12477 - DNA, 25 bp, Homo sapien
agtacagtgttcgacttggtgtctt

SEQ ID NO: 12478 - DNA, 25 bp, Homo sapien
agtacagtgttccacttggtgtctt

SEQ ID NO: 12479 - DNA, 25 bp, Homo sapien
gtgacttggctctcccttagggtga

SEQ ID NO: 12480 - DNA, 25 bp, Homo sapien
gtgacttggctcacccttagggtga

SEQ ID NO: 12481 - DNA, 25 bp, Homo sapien
gagtatggtgtcacccttcctagaa

SEQ ID NO: 12482 - DNA, 25 bp, Homo sapien
gagtatggtgtctcccttcctagaa

SEQ ID NO: 12483 - DNA, 25 bp, Homo sapien
tggtgggtccggacacccagtgtca

SEQ ID NO: 12484 - DNA, 25 bp, Homo sapien
tggtgggtccggtcacccagtgtca

SEQ ID NO: 12485 - DNA, 25 bp, Homo sapien
taccgaggtccgtgtttttatctta

SEQ ID NO: 12486 - DNA, 25 bp, Homo sapien
taccgaggtccgagtttttatctta

SEQ ID NO: 12487 - DNA, 25 bp, Homo sapien
tccggcgtctttccctcttcgtttg

SEQ ID NO: 12488 - DNA, 25 bp, Homo sapien
tccggcgtctttgcctcttcgtttg

SEQ ID NO: 12489 - DNA, 25 bp, Homo sapien
cgacgtctaactctatagtttttag

SEQ ID NO: 12490 - DNA, 25 bp, Homo sapien
cgacgtctaactgtatagtttttag

SEQ ID NO: 12491 - DNA, 25 bp, Homo sapien
gtacacttacggtttactaattttg

SEQ ID NO: 12492 - DNA, 25 bp, Homo sapien
gtacacttacggattactaattttg

SEQ ID NO: 12493 - DNA, 25 bp, Homo sapien
gagtcatcctcacgttcccgacatg

SEQ ID NO: 12494 - DNA, 25 bp, Homo sapien
gagtcatcctcaggttcccgacatg

SEQ ID NO: 12495 - DNA, 25 bp, Homo sapien
ttgacccctttgtcgaccagtacag

SEQ ID NO: 12496 - DNA, 25 bp, Homo sapien
ttgacccctttgacgaccagtacag

SEQ ID NO: 12497 - DNA, 25 bp, Homo sapien
ttaatgagtccttctaaactagaag

SEQ ID NO: 12498 - DNA, 25 bp, Homo sapien
ttaatgagtcctactaaactagaag

SEQ ID NO: 12499 - DNA, 25 bp, Homo sapien
cgtttacgatctttagatcgatcca

SEQ ID NO: 12500 - DNA, 25 bp, Homo sapien
cgtttacgatctatagatcgatcca

SEQ ID NO: 12501 - DNA, 25 bp, Homo sapien
tcgttgtagacctcttcccatggac

SEQ ID NO: 12502 - DNA, 25 bp, Homo sapien
tcgttgtagaccacttcccatggac

SEQ ID NO: 12503 - DNA, 25 bp, Homo sapien
tcgttacaccggagtcttatgtgga

SEQ ID NO: 12504 - DNA, 25 bp, Homo sapien
tcgttacaccggtgtcttatgtgga

SEQ ID NO: 12505 - DNA, 25 bp, Homo sapien
tgtccgatccgtgactaagacgacc

SEQ ID NO: 12506 - DNA, 25 bp, Homo sapien
tgtccgatccgtcactaagacgacc

SEQ ID NO: 12507 - DNA, 25 bp, Homo sapien
actagagtctctcctagtgtaccgc

SEQ ID NO: 12508 - DNA, 25 bp, Homo sapien
actagagtctctgctagtgtaccgc

SEQ ID NO: 12509 - DNA, 25 bp, Homo sapien
tctcttgaagagaagtcctttcacc

SEQ ID NO: 12510 - DNA, 25 bp, Homo sapien
tctcttgaagagtagtcctttcacc

SEQ ID NO: 12511 - DNA, 25 bp, Homo sapien
gactcatgaaggaagccaacataga

SEQ ID NO: 12512 - DNA, 25 bp, Homo sapien
gactcatgaaggtagccaacataga

SEQ ID NO: 12513 - DNA, 25 bp, Homo sapien
ctttggactagaaggaaccactcct

SEQ ID NO: 12514 - DNA, 25 bp, Homo sapien
ctttggactagatggaaccactcct

SEQ ID NO: 12515 - DNA, 25 bp, Homo sapien
tggtagctaggtcagagccttctcg

SEQ ID NO: 12516 - DNA, 25 bp, Homo sapien
tggtagctaggtgagagccttctcg

SEQ ID NO: 12517 - DNA, 25 bp, Homo sapien
tgaaccaacgtaagacacaccttac

SEQ ID NO: 12518 - DNA, 25 bp, Homo sapien
tgaaccaacgtatgacacaccttac

SEQ ID NO: 12519 - DNA, 25 bp, Homo sapien
gggtccaagcgacacgctcctgtct

SEQ ID NO: 12520 - DNA, 25 bp, Homo sapien
gggtccaagcgagacgctcctgtct

SEQ ID NO: 12521 - DNA, 25 bp, Homo sapien
ttcggtccacgtcacttccctttga

SEQ ID NO: 12522 - DNA, 25 bp, Homo sapien
ttcggtccacgtgacttccctttga

SEQ ID NO: 12523 - DNA, 25 bp, Homo sapien
acagtggcttcttccgcatctcgag

SEQ ID NO: 12524 - DNA, 25 bp, Homo sapien
acagtggcttctaccgcatctcgag

SEQ ID NO: 12525 - DNA, 25 bp, Homo sapien
aaaaggtgtttttctccgagccggt

SEQ ID NO: 12526 - DNA, 25 bp, Homo sapien
aaaaggtgttttactccgagccggt

SEQ ID NO: 12527 - DNA, 25 bp, Homo sapien
acattgtcgtcattaacccaccgtg

SEQ ID NO: 12528 - DNA, 25 bp, Homo sapien
acattgtcgtcaataacccaccgtg

SEQ ID NO: 12529 - DNA, 25 bp, Homo sapien
ttagttacgcacataacacgggtca

SEQ ID NO: 12530 - DNA, 25 bp, Homo sapien
ttagttacgcacttaacacgggtca

SEQ ID NO: 12531 - DNA, 25 bp, Homo sapien
tgtcatgactagacgacacatgtcg

SEQ ID NO: 12532 - DNA, 25 bp, Homo sapien
tgtcatgactagtcgacacatgtcg

SEQ ID NO: 12533 - DNA, 25 bp, Homo sapien
aacgttggtgagaggtcgttcaccg

SEQ ID NO: 12534 - DNA, 25 bp, Homo sapien
aacgttggtgagtggtcgttcaccg

SEQ ID NO: 12535 - DNA, 25 bp, Homo sapien
tcgacgaaggacacggtccgggcct

SEQ ID NO: 12536 - DNA, 25 bp, Homo sapien
tcgacgaaggactcggtccgggcct

SEQ ID NO: 12537 - DNA, 25 bp, Homo sapien
tcggaaagtctcttcgcccaggacc

SEQ ID NO: 12538 - DNA, 25 bp, Homo sapien
tcggaaagtctcatcgcccaggacc

SEQ ID NO: 12539 - DNA, 25 bp, Homo sapien
gcagaacatcgtacacccagaaagc

SEQ ID NO: 12540 - DNA, 25 bp, Homo sapien
gcagaacatcgttcacccagaaagc

SEQ ID NO: 12541 - DNA, 25 bp, Homo sapien
ggtaaacgcccgagacctggtcaga

SEQ ID NO: 12542 - DNA, 25 bp, Homo sapien
ggtaaacgcccgtgacctggtcaga

SEQ ID NO: 12543 - DNA, 25 bp, Homo sapien
ttaagagacccaaacgatgtgtaga

SEQ ID NO: 12544 - DNA, 25 bp, Homo sapien
ttaagagacccatacgatgtgtaga

SEQ ID NO: 12545 - DNA, 25 bp, Homo sapien
tacttaaaaccgtttggctctagaa

SEQ ID NO: 12546 - DNA, 25 bp, Homo sapien
tacttaaaaccgattggctctagaa

SEQ ID NO: 12547 - DNA, 25 bp, Homo sapien
ggacgtgtcccctttgcgctgtgcc

SEQ ID NO: 12548 - DNA, 25 bp, Homo sapien
ggacgtgtccccattgcgctgtgcc

SEQ ID NO: 12549 - DNA, 25 bp, Homo sapien
ttcgtcatctcctgcgactggtcct

SEQ ID NO: 12550 - DNA, 25 bp, Homo sapien
ttcgtcatctccagcgactggtcct

SEQ ID NO: 12551 - DNA, 25 bp, Homo sapien
gtcgacgagtgtccaggacaagacc

SEQ ID NO: 12552 - DNA, 25 bp, Homo sapien
gtcgacgagtgtgcaggacaagacc

SEQ ID NO: 12553 - DNA, 25 bp, Homo sapien
gtgagtcacttacagtcggaaacac

SEQ ID NO: 12554 - DNA, 25 bp, Homo sapien
gtgagtcacttagagtcggaaacac

SEQ ID NO: 12555 - DNA, 25 bp, Homo sapien
ctgtcagttccgagaaaagactaaa

SEQ ID NO: 12556 - DNA, 25 bp, Homo sapien
ctgtcagttccgtgaaaagactaaa

SEQ ID NO: 12557 - DNA, 25 bp, Homo sapien
cttgggtctcaacatataacggaga

SEQ ID NO: 12558 - DNA, 25 bp, Homo sapien
cttgggtctcaagatataacggaga

SEQ ID NO: 12559 - DNA, 25 bp, Homo sapien
caggggtgttagaaattcgcctaga

SEQ ID NO: 12560 - DNA, 25 bp, Homo sapien
caggggtgttagtaattcgcctaga

SEQ ID NO: 12561 - DNA, 25 bp, Homo sapien
acggggaatccaacgaacacttgcg

SEQ ID NO: 12562 - DNA, 25 bp, Homo sapien
acggggaatccatcgaacacttgcg

SEQ ID NO: 12563 - DNA, 25 bp, Homo sapien
ggctgggacccaggaacctctcggt

SEQ ID NO: 12564 - DNA, 25 bp, Homo sapien
ggctgggacccacgaacctctcggt

SEQ ID NO: 12565 - DNA, 25 bp, Homo sapien
tgtagggggctcctatcgccccttg

SEQ ID NO: 12566 - DNA, 25 bp, Homo sapien
tgtagggggctcgtatcgccccttg

SEQ ID NO: 12567 - DNA, 25 bp, Homo sapien
ggggatgtgtgtcagtgactccttt

SEQ ID NO: 12568 - DNA, 25 bp, Homo sapien
ggggatgtgtgtgagtgactccttt

SEQ ID NO: 12569 - DNA, 25 bp, Homo sapien
gtggaaggaggaacgactcctacat

SEQ ID NO: 12570 - DNA, 25 bp, Homo sapien
gtggaaggaggatcgactcctacat

SEQ ID NO: 12571 - DNA, 25 bp, Homo sapien
gggtccagagcgtgaacaactcctt

SEQ ID NO: 12572 - DNA, 25 bp, Homo sapien
gggtccagagcgagaacaactcctt

SEQ ID NO: 12573 - DNA, 25 bp, Homo sapien
ttaagagaccccagaagtttaattt

SEQ ID NO: 12574 - DNA, 25 bp, Homo sapien
ttaagagacccctgaagtttaattt

SEQ ID NO: 12575 - DNA, 25 bp, Homo sapien
agagaggcctgtagtcacgttgtca

SEQ ID NO: 12576 - DNA, 25 bp, Homo sapien
agagaggcctgttgtcacgttgtca

SEQ ID NO: 12577 - DNA, 25 bp, Homo sapien
gaggtgatgtctctagtgtgactac

SEQ ID NO: 12578 - DNA, 25 bp, Homo sapien
gaggtgatgtctgtagtgtgactac

SEQ ID NO: 12579 - DNA, 25 bp, Homo sapien
caggtgacatatcttgtaaatactt

SEQ ID NO: 12580 - DNA, 25 bp, Homo sapien
caggtgacatatgttgtaaatactt

SEQ ID NO: 12581 - DNA, 25 bp, Homo sapien
tatgaactactgtgtctgtaataca

SEQ ID NO: 12582 - DNA, 25 bp, Homo sapien
tatgaactactgagtctgtaataca

SEQ ID NO: 12583 - DNA, 25 bp, Homo sapien
ggacctaatcccaatctggactata

SEQ ID NO: 12584 - DNA, 25 bp, Homo sapien
ggacctaatccctatctggactata

SEQ ID NO: 12585 - DNA, 25 bp, Homo sapien
gttaccttttttcagtagacgatta

SEQ ID NO: 12586 - DNA, 25 bp, Homo sapien
gttaccttttttgagtagacgatta

SEQ ID NO: 12587 - DNA, 25 bp, Homo sapien
gattatctttttactcgaaacggta

SEQ ID NO: 12588 - DNA, 25 bp, Homo sapien
gattatcttttttctcgaaacggta

SEQ ID NO: 12589 - DNA, 25 bp, Homo sapien
actccggcgcggacacaggtcgact

SEQ ID NO: 12590 - DNA, 25 bp, Homo sapien
actccggcgcggtcacaggtcgact

SEQ ID NO: 12591 - DNA, 25 bp, Homo sapien
ccgtcgacggcgacagcaggtcgct

SEQ ID NO: 12592 - DNA, 25 bp, Homo sapien
ccgtcgacggcgtcagcaggtcgct

SEQ ID NO: 12593 - DNA, 25 bp, Homo sapien
gcctccggtgtgcacctagatccgt

SEQ ID NO: 12594 - DNA, 25 bp, Homo sapien
gcctccggtgtggacctagatccgt

SEQ ID NO: 12595 - DNA, 25 bp, Homo sapien
ttctcgcgaatccatttgactccgt

SEQ ID NO: 12596 - DNA, 25 bp, Homo sapien
ttctcgcgaatcgatttgactccgt

SEQ ID NO: 12597 - DNA, 25 bp, Homo sapien
atagctacaagacgtctattttccg

SEQ ID NO: 12598 - DNA, 25 bp, Homo sapien
atagctacaagaggtctattttccg

SEQ ID NO: 12599 - DNA, 25 bp, Homo sapien
atgtatgaatatcgtactgtggtcc

SEQ ID NO: 12600 - DNA, 25 bp, Homo sapien
atgtatgaatatggtactgtggtcc

SEQ ID NO: 12601 - DNA, 25 bp, Homo sapien
cagatttagaaattgtacttcctga

SEQ ID NO: 12602 - DNA, 25 bp, Homo sapien
cagatttagaaaatgtacttcctga

SEQ ID NO: 12603 - DNA, 25 bp, Homo sapien
aaagtggaaaaaggatacacttcac

SEQ ID NO: 12604 - DNA, 25 bp, Homo sapien
aaagtggaaaaacgatacacttcac

SEQ ID NO: 12605 - DNA, 25 bp, Homo sapien
aggtcgaaaagatataccagttatc

SEQ ID NO: 12606 - DNA, 25 bp, Homo sapien
aggtcgaaaagaaataccagttatc

SEQ ID NO: 12607 - DNA, 25 bp, Homo sapien
ggtgtgtaaggcaagatcctttaac

SEQ ID NO: 12608 - DNA, 25 bp, Homo sapien
ggtgtgtaaggctagatcctttaac

SEQ ID NO: 12609 - DNA, 25 bp, Homo sapien
cgtcatactgggtgatcgaggttaa

SEQ ID NO: 12610 - DNA, 25 bp, Homo sapien
cgtcatactgggagatcgaggttaa

SEQ ID NO: 12611 - DNA, 25 bp, Homo sapien
gttccgatctcgtcgaaaccgttaa

SEQ ID NO: 12612 - DNA, 25 bp, Homo sapien
gttccgatctcgacgaaaccgttaa

SEQ ID NO: 12613 - DNA, 25 bp, Homo sapien
cgtccacaagtcaggtgtgtgtcgt

SEQ ID NO: 12614 - DNA, 25 bp, Homo sapien
cgtccacaagtctggtgtgtgtcgt

SEQ ID NO: 12615 - DNA, 25 bp, Homo sapien
ccaggtcaatgtgtacgtacttccg

SEQ ID NO: 12616 - DNA, 25 bp, Homo sapien
ccaggtcaatgtctacgtacttccg

SEQ ID NO: 12617 - DNA, 25 bp, Homo sapien
caggatatagtgttttactgtacac

SEQ ID NO: 12618 - DNA, 25 bp, Homo sapien
caggatatagtgatttactgtacac

SEQ ID NO: 12619 - DNA, 25 bp, Homo sapien
ggagagatcgaggtatgtcccacgt

SEQ ID NO: 12620 - DNA, 25 bp, Homo sapien
ggagagatcgagctatgtcccacgt

SEQ ID NO: 12621 - DNA, 25 bp, Homo sapien
gtgcgaggtccaatacatgtccccg

SEQ ID NO: 12622 - DNA, 25 bp, Homo sapien
gtgcgaggtccattacatgtccccg

SEQ ID NO: 12623 - DNA, 25 bp, Homo sapien
actgacaggataccatgaacccctg

SEQ ID NO: 12624 - DNA, 25 bp, Homo sapien
actgacaggatagcatgaacccctg

SEQ ID NO: 12625 - DNA, 25 bp, Homo sapien
cgcacagtaagtggtgaacccctag

SEQ ID NO: 12626 - DNA, 25 bp, Homo sapien
cgcacagtaagtcgtgaacccctag

SEQ ID NO: 12627 - DNA, 25 bp, Homo sapien
gaaccaacgaagacacaatgaccta

SEQ ID NO: 12628 - DNA, 25 bp, Homo sapien
gaaccaacgaagtcacaatgaccta

SEQ ID NO: 12629 - DNA, 25 bp, Homo sapien
gagaccaggaggtaccgcaagaccc

SEQ ID NO: 12630 - DNA, 25 bp, Homo sapien
gagaccaggaggaaccgcaagaccc

SEQ ID NO: 12631 - DNA, 25 bp, Homo sapien
gagtagggtctctctgtcgaccggt

SEQ ID NO: 12632 - DNA, 25 bp, Homo sapien
gagtagggtctcactgtcgaccggt

SEQ ID NO: 12633 - DNA, 25 bp, Homo sapien
gaggtggtgtaggtcccgactgact

SEQ ID NO: 12634 - DNA, 25 bp, Homo sapien
gaggtggtgtagctcccgactgact

SEQ ID NO: 12635 - DNA, 25 bp, Homo sapien
tagaggtaagagtaggtggtcctcc

SEQ ID NO: 12636 - DNA, 25 bp, Homo sapien
tagaggtaagagaaggtggtcctcc

SEQ ID NO: 12637 - DNA, 25 bp, Homo sapien
cgggcggaacgagacacggtaccct

SEQ ID NO: 12638 - DNA, 25 bp, Homo sapien
cgggcggaacgacacacggtaccct

SEQ ID NO: 12639 - DNA, 25 bp, Homo sapien
cggcaggaacgacaacgtgtgctac

SEQ ID NO: 12640 - DNA, 25 bp, Homo sapien
cggcaggaacgagaacgtgtgctac

SEQ ID NO: 12641 - DNA, 25 bp, Homo sapien
gtgcgaccatggtaagcgtgtgtct

SEQ ID NO: 12642 - DNA, 25 bp, Homo sapien
gtgcgaccatggaaagcgtgtgtct

SEQ ID NO: 12643 - DNA, 25 bp, Homo sapien
tagttcttcctaagacaaccggtcc

SEQ ID NO: 12644 - DNA, 25 bp, Homo sapien
tagttcttcctatgacaaccggtcc

SEQ ID NO: 12645 - DNA, 25 bp, Homo sapien
atgtttttgaggaagacgtctatcc

SEQ ID NO: 12646 - DNA, 25 bp, Homo sapien
atgtttttgaggtagacgtctatcc

SEQ ID NO: 12647 - DNA, 25 bp, Homo sapien
taggtcaatgtttacgtgattatcc

SEQ ID NO: 12648 - DNA, 25 bp, Homo sapien
taggtcaatgttaacgtgattatcc

SEQ ID NO: 12649 - DNA, 25 bp, Homo sapien
tgtcaggtcgagtccccaaaacaac

SEQ ID NO: 12650 - DNA, 25 bp, Homo sapien
tgtcaggtcgagaccccaaaacaac

SEQ ID NO: 12651 - DNA, 25 bp, Homo sapien
agtcgagaattcctagactagaaac

SEQ ID NO: 12652 - DNA, 25 bp, Homo sapien
agtcgagaattcgtagactagaaac

SEQ ID NO: 12653 - DNA, 25 bp, Homo sapien
ggtcgtagaatcttacaactatgac

SEQ ID NO: 12654 - DNA, 25 bp, Homo sapien
ggtcgtagaatcatacaactatgac

SEQ ID NO: 12655 - DNA, 25 bp, Homo sapien
ggatgatactactgagaaactaaac

SEQ ID NO: 12656 - DNA, 25 bp, Homo sapien
ggatgatactacagagaaactaaac

SEQ ID NO: 12657 - DNA, 25 bp, Homo sapien
gacgttgagtttttcacacagatat

SEQ ID NO: 12658 - DNA, 25 bp, Homo sapien
gacgttgagtttatcacacagatat

SEQ ID NO: 12659 - DNA, 25 bp, Homo sapien
actctcctttttttttcgtaaatat

SEQ ID NO: 12660 - DNA, 25 bp, Homo sapien
actctcctttttatttcgtaaatat

SEQ ID NO: 12661 - DNA, 25 bp, Homo sapien
atcttttgtccctttacaggaagtt

SEQ ID NO: 12662 - DNA, 25 bp, Homo sapien
atcttttgtcccattacaggaagtt

SEQ ID NO: 12663 - DNA, 25 bp, Homo sapien
tttattggattcaacacgtgataac

SEQ ID NO: 12664 - DNA, 25 bp, Homo sapien
tttattggattctacacgtgataac

SEQ ID NO: 12665 - DNA, 25 bp, Homo sapien
agtacgggttggaagcatagtcgtc

SEQ ID NO: 12666 - DNA, 25 bp, Homo sapien
agtacgggttggtagcatagtcgtc

SEQ ID NO: 12667 - DNA, 25 bp, Homo sapien
taaggtggaccgatgtcgaagtacc

SEQ ID NO: 12668 - DNA, 25 bp, Homo sapien
taaggtggaccgttgtcgaagtacc

SEQ ID NO: 12669 - DNA, 25 bp, Homo sapien
gttgtcggttactgtagtggtcatc

SEQ ID NO: 12670 - DNA, 25 bp, Homo sapien
gttgtcggttacagtagtggtcatc

SEQ ID NO: 12671 - DNA, 25 bp, Homo sapien
atgtattccgttatttgtctatacg

SEQ ID NO: 12672 - DNA, 25 bp, Homo sapien
atgtattccgttttttgtctatacg

SEQ ID NO: 12673 - DNA, 25 bp, Homo sapien
ttacagttgtacattttgtcttacg

SEQ ID NO: 12674 - DNA, 25 bp, Homo sapien
ttacagttgtactttttgtcttacg

SEQ ID NO: 12675 - DNA, 25 bp, Homo sapien
ctactataacggcattttgaggccg

SEQ ID NO: 12676 - DNA, 25 bp, Homo sapien
ctactataacgggattttgaggccg

SEQ ID NO: 12677 - DNA, 25 bp, Homo sapien
gtttcgctttcgccgtcctagctgc

SEQ ID NO: 12678 - DNA, 25 bp, Homo sapien
gtttcgctttcggcgtcctagctgc

SEQ ID NO: 12679 - DNA, 25 bp, Homo sapien
gtcgtcgtcttcgtaatcgtaatag

SEQ ID NO: 12680 - DNA, 25 bp, Homo sapien
gtcgtcgtcttcctaatcgtaatag

SEQ ID NO: 12681 - DNA, 25 bp, Homo sapien
tcttgtctgtcttcgttcttaggga

SEQ ID NO: 12682 - DNA, 25 bp, Homo sapien
tcttgtctgtctacgttcttaggga

SEQ ID NO: 12683 - DNA, 25 bp, Homo sapien
attatgtcaagtcgtacaggactat

SEQ ID NO: 12684 - DNA, 25 bp, Homo sapien
attatgtcaagtggtacaggactat

SEQ ID NO: 12685 - DNA, 25 bp, Homo sapien
atactgtcttcagaaacaatatagt

SEQ ID NO: 12686 - DNA, 25 bp, Homo sapien
atactgtcttcacaaacaatatagt

SEQ ID NO: 12687 - DNA, 25 bp, Homo sapien
tcgattcggtgacgaaacaccttgt

SEQ ID NO: 12688 - DNA, 25 bp, Homo sapien
tcgattcggtgaggaaacaccttgt

SEQ ID NO: 12689 - DNA, 25 bp, Homo sapien
catgggtgagtagtaactccagacg

SEQ ID NO: 12690 - DNA, 25 bp, Homo sapien
catgggtgagtactaactccagacg

SEQ ID NO: 12691 - DNA, 25 bp, Homo sapien
catgaccggtgtccacggtcccgtt

SEQ ID NO: 12692 - DNA, 25 bp, Homo sapien
catgaccggtgtgcacggtcccgtt

SEQ ID NO: 12693 - DNA, 25 bp, Homo sapien
gaacatctgtgtgacaatcccgtct

SEQ ID NO: 12694 - DNA, 25 bp, Homo sapien
gaacatctgtgtcacaatcccgtct

SEQ ID NO: 12695 - DNA, 25 bp, Homo sapien
atcatctaggcgtgacttcggtcgt

SEQ ID NO: 12696 - DNA, 25 bp, Homo sapien
atcatctaggcgagacttcggtcgt

SEQ ID NO: 12697 - DNA, 25 bp, Homo sapien
aagaagtgtctgtgtacttcgtctt

SEQ ID NO: 12698 - DNA, 25 bp, Homo sapien
aagaagtgtctgagtacttcgtctt

SEQ ID NO: 12699 - DNA, 25 bp, Homo sapien
ggtagctaggtcagagccttctcgc

SEQ ID NO: 12700 - DNA, 25 bp, Homo sapien
ggtagctaggtctgagccttctcgc

SEQ ID NO: 12701 - DNA, 25 bp, Homo sapien
gacaggtggtcgaagacaggtatca

SEQ ID NO: 12702 - DNA, 25 bp, Homo sapien
gacaggtggtcgtagacaggtatca

SEQ ID NO: 12703 - DNA, 25 bp, Homo sapien
cgccagtgaccgaaccgccttgtag

SEQ ID NO: 12704 - DNA, 25 bp, Homo sapien
cgccagtgaccgtaccgccttgtag

SEQ ID NO: 12705 - DNA, 25 bp, Homo sapien
ggtacgacccagtatcttctcacac

SEQ ID NO: 12706 - DNA, 25 bp, Homo sapien
ggtacgacccagaatcttctcacac

SEQ ID NO: 12707 - DNA, 25 bp, Homo sapien
ttcgtgactgtaacaaactatgtca

SEQ ID NO: 12708 - DNA, 25 bp, Homo sapien
ttcgtgactgtatcaaactatgtca

SEQ ID NO: 12709 - DNA, 25 bp, Homo sapien
taaggtatgtaaatctctcttacga

SEQ ID NO: 12710 - DNA, 25 bp, Homo sapien
taaggtatgtaattctctcttacga

SEQ ID NO: 12711 - DNA, 25 bp, Homo sapien
gagtgtaatctaaccgtcctagtaa

SEQ ID NO: 12712 - DNA, 25 bp, Homo sapien
gagtgtaatctatccgtcctagtaa

SEQ ID NO: 12713 - DNA, 25 bp, Homo sapien
tatatgtttcgaacggtacctataa

SEQ ID NO: 12714 - DNA, 25 bp, Homo sapien
tatatgtttcgatcggtacctataa

SEQ ID NO: 12715 - DNA, 25 bp, Homo sapien
gtcaagtgaacgactgagtctaaga

SEQ ID NO: 12716 - DNA, 25 bp, Homo sapien
gtcaagtgaacgtctgagtctaaga

SEQ ID NO: 12717 - DNA, 25 bp, Homo sapien
aagaaggacacattgacgactaaag

SEQ ID NO: 12718 - DNA, 25 bp, Homo sapien
aagaaggacacaatgacgactaaag

SEQ ID NO: 12719 - DNA, 25 bp, Homo sapien
aaacactagtcagagttcttataag

SEQ ID NO: 12720 - DNA, 25 bp, Homo sapien
aaacactagtcacagttcttataag

SEQ ID NO: 12721 - DNA, 25 bp, Homo sapien
gagaaacgtaaaattgcgctaccgt

SEQ ID NO: 12722 - DNA, 25 bp, Homo sapien
gagaaacgtaaatttgcgctaccgt

SEQ ID NO: 12723 - DNA, 25 bp, Homo sapien
gaacaacctactgatttggcctact

SEQ ID NO: 12724 - DNA, 25 bp, Homo sapien
gaacaacctactcatttggcctact

SEQ ID NO: 12725 - DNA, 25 bp, Homo sapien
caccgtacacataatgtcgatctag

SEQ ID NO: 12726 - DNA, 25 bp, Homo sapien
caccgtacacattatgtcgatctag

SEQ ID NO: 12727 - DNA, 25 bp, Homo sapien
acgacagtcacgacgaactctgtga

SEQ ID NO: 12728 - DNA, 25 bp, Homo sapien
acgacagtcacgtcgaactctgtga

SEQ ID NO: 12729 - DNA, 25 bp, Homo sapien
gagtacttccgtttagacgtatgga

SEQ ID NO: 12730 - DNA, 25 bp, Homo sapien
gagtacttccgtatagacgtatgga

SEQ ID NO: 12731 - DNA, 25 bp, Homo sapien
tgtgtcctgtccttatctgtgacgc

SEQ ID NO: 12732 - DNA, 25 bp, Homo sapien
tgtgtcctgtccatatctgtgacgc

SEQ ID NO: 12733 - DNA, 25 bp, Homo sapien
gacgtcacagtctctgtcgtcggga

SEQ ID NO: 12734 - DNA, 25 bp, Homo sapien
gacgtcacagtcactgtcgtcggga

SEQ ID NO: 12735 - DNA, 25 bp, Homo sapien
gtactattttagactagtgtcacct

SEQ ID NO: 12736 - DNA, 25 bp, Homo sapien
gtactattttagtctagtgtcacct

SEQ ID NO: 12737 - DNA, 25 bp, Homo sapien
gattgttagttgtcgttctactcga

SEQ ID NO: 12738 - DNA, 25 bp, Homo sapien
gattgttagttgacgttctactcga

SEQ ID NO: 12739 - DNA, 25 bp, Homo sapien
gataaaagtacaggtcggttctaca

SEQ ID NO: 12740 - DNA, 25 bp, Homo sapien
gataaaagtacacgtcggttctaca

SEQ ID NO: 12741 - DNA, 25 bp, Homo sapien
agtagagtagtcgtggagttctacc

SEQ ID NO: 12742 - DNA, 25 bp, Homo sapien
agtagagtagtcctggagttctacc

SEQ ID NO: 12743 - DNA, 25 bp, Homo sapien
agtaagtagtagtagtaactcccac

SEQ ID NO: 12744 - DNA, 25 bp, Homo sapien
agtaagtagtagaagtaactcccac

SEQ ID NO: 12745 - DNA, 25 bp, Homo sapien
agtggagagtacctgagactgccga

SEQ ID NO: 12746 - DNA, 25 bp, Homo sapien
agtggagagtacgtgagactgccga

SEQ ID NO: 12747 - DNA, 25 bp, Homo sapien
cctacggagagtggtgaaactgtta

SEQ ID NO: 12748 - DNA, 25 bp, Homo sapien
cctacggagagtcgtgaaactgtta

SEQ ID NO: 12749 - DNA, 25 bp, Homo sapien
caccgataaagtctcggatctttat

SEQ ID NO: 12750 - DNA, 25 bp, Homo sapien
caccgataaagtgtcggatctttat

SEQ ID NO: 12751 - DNA, 25 bp, Homo sapien
tacggtgaattcagtcaatttcacg

SEQ ID NO: 12752 - DNA, 25 bp, Homo sapien
tacggtgaattctgtcaatttcacg

SEQ ID NO: 12753 - DNA, 25 bp, Homo sapien
tcttgtgtacttggtccttcttgag

SEQ ID NO: 12754 - DNA, 25 bp, Homo sapien
tcttgtgtacttcgtccttcttgag

SEQ ID NO: 12755 - DNA, 25 bp, Homo sapien
ttgtcgttacgctgctctgttctac

SEQ ID NO: 12756 - DNA, 25 bp, Homo sapien
ttgtcgttacgcagctctgttctac

SEQ ID NO: 12757 - DNA, 25 bp, Homo sapien
gcacctagtcagattctgtatactc

SEQ ID NO: 12758 - DNA, 25 bp, Homo sapien
gcacctagtcagtttctgtatactc

SEQ ID NO: 12759 - DNA, 25 bp, Homo sapien
gaccactcgacctactgtttatctg

SEQ ID NO: 12760 - DNA, 25 bp, Homo sapien
gaccactcgaccaactgtttatctg

SEQ ID NO: 12761 - DNA, 25 bp, Homo sapien
aacacccgtcgaggtctgtttttcg

SEQ ID NO: 12762 - DNA, 25 bp, Homo sapien
aacacccgtcgacgtctgtttttcg

SEQ ID NO: 12763 - DNA, 25 bp, Homo sapien
aaacgtcactgtgtcgaggaacatc

SEQ ID NO: 12764 - DNA, 25 bp, Homo sapien
aaacgtcactgtctcgaggaacatc

SEQ ID NO: 12765 - DNA, 25 bp, Homo sapien
tttgtgttctgaccaggtgacagac

SEQ ID NO: 12766 - DNA, 25 bp, Homo sapien
tttgtgttctgagcaggtgacagac

SEQ ID NO: 12767 - DNA, 25 bp, Homo sapien
tggggtcgtaacacgagacacagac

SEQ ID NO: 12768 - DNA, 25 bp, Homo sapien
tggggtcgtaactcgagacacagac

SEQ ID NO: 12769 - DNA, 25 bp, Homo sapien
tttcactgtctgtgacgaacacgac

SEQ ID NO: 12770 - DNA, 25 bp, Homo sapien
tttcactgtctgagacgaacacgac

SEQ ID NO: 12771 - DNA, 25 bp, Homo sapien
ttcttcttatgtcgtaaacgtacta

SEQ ID NO: 12772 - DNA, 25 bp, Homo sapien
ttcttcttatgtggtaaacgtacta

SEQ ID NO: 12773 - DNA, 25 bp, Homo sapien
cgtccgtgataggttagtggactcc

SEQ ID NO: 12774 - DNA, 25 bp, Homo sapien
cgtccgtgatagcttagtggactcc

SEQ ID NO: 12775 - DNA, 25 bp, Homo sapien
ccttagagaagttagtgggcgtcga

SEQ ID NO: 12776 - DNA, 25 bp, Homo sapien
ccttagagaagtaagtgggcgtcga

SEQ ID NO: 12777 - DNA, 25 bp, Homo sapien
cgaaaccgtcagagacacagacgga

SEQ ID NO: 12778 - DNA, 25 bp, Homo sapien
cgaaaccgtcagtgacacagacgga

SEQ ID NO: 12779 - DNA, 25 bp, Homo sapien
gtaacacaaccgttgctactgcaac

SEQ ID NO: 12780 - DNA, 25 bp, Homo sapien
gtaacacaaccgatgctactgcaac

SEQ ID NO: 12781 - DNA, 25 bp, Homo sapien
acaaaagattgtgactctttagtac

SEQ ID NO: 12782 - DNA, 25 bp, Homo sapien
acaaaagattgtcactctttagtac

SEQ ID NO: 12783 - DNA, 25 bp, Homo sapien
agactagactcgtttcgactgttta

SEQ ID NO: 12784 - DNA, 25 bp, Homo sapien
agactagactcgattcgactgttta

SEQ ID NO: 12785 - DNA, 25 bp, Homo sapien
ttcgagacgggtcaaggagtcccta

SEQ ID NO: 12786 - DNA, 25 bp, Homo sapien
ttcgagacgggtgaaggagtcccta

SEQ ID NO: 12787 - DNA, 25 bp, Homo sapien
acggtacagggtcgtcacacctcac

SEQ ID NO: 12788 - DNA, 25 bp, Homo sapien
acggtacagggtggtcacacctcac

SEQ ID NO: 12789 - DNA, 25 bp, Homo sapien
actcgaagtgcgacgtcccgttcac

SEQ ID NO: 12790 - DNA, 25 bp, Homo sapien
actcgaagtgcgtcgtcccgttcac

SEQ ID NO: 12791 - DNA, 25 bp, Homo sapien
aggggtgtcactgtactactaacac

SEQ ID NO: 12792 - DNA, 25 bp, Homo sapien
aggggtgtcactctactactaacac

SEQ ID NO: 12793 - DNA, 25 bp, Homo sapien
gacggggtagtattccgtcaccgac

SEQ ID NO: 12794 - DNA, 25 bp, Homo sapien
gacggggtagtaatccgtcaccgac

SEQ ID NO: 12795 - DNA, 25 bp, Homo sapien
ctgtcgtcgtcgaagactcggaaga

SEQ ID NO: 12796 - DNA, 25 bp, Homo sapien
ctgtcgtcgtcgtagactcggaaga

SEQ ID NO: 12797 - DNA, 25 bp, Homo sapien
ctcgtcgacgcgacctctagataac

SEQ ID NO: 12798 - DNA, 25 bp, Homo sapien
ctcgtcgacgcgtcctctagataac

SEQ ID NO: 12799 - DNA, 25 bp, Homo sapien
tgaatgtaccttgtctcgacacccc

SEQ ID NO: 12800 - DNA, 25 bp, Homo sapien
tgaatgtaccttctctcgacacccc

SEQ ID NO: 12801 - DNA, 25 bp, Homo sapien
cggactaatctacgtgaccgactcc

SEQ ID NO: 12802 - DNA, 25 bp, Homo sapien
cggactaatctaggtgaccgactcc

SEQ ID NO: 12803 - DNA, 25 bp, Homo sapien
tgacacggaaatgtacacacctcct

SEQ ID NO: 12804 - DNA, 25 bp, Homo sapien
tgacacggaaatctacacacctcct

SEQ ID NO: 12805 - DNA, 25 bp, Homo sapien
cgacgtgagtgctgttgtaactttt

SEQ ID NO: 12806 - DNA, 25 bp, Homo sapien
cgacgtgagtgcagttgtaactttt

SEQ ID NO: 12807 - DNA, 25 bp, Homo sapien
caggtaggacgttccgtagcacgcc

SEQ ID NO: 12808 - DNA, 25 bp, Homo sapien
caggtaggacgtaccgtagcacgcc

SEQ ID NO: 12809 - DNA, 25 bp, Homo sapien
tgtgtgtgtgactgtcggtaagccc

SEQ ID NO: 12810 - DNA, 25 bp, Homo sapien
tgtgtgtgtgacagtcggtaagccc

SEQ ID NO: 12811 - DNA, 25 bp, Homo sapien
gacacgtcgcggaggaagagtctcc

SEQ ID NO: 12812 - DNA, 25 bp, Homo sapien
gacacgtcgcggtggaagagtctcc

SEQ ID NO: 12813 - DNA, 25 bp, Homo sapien
aacgagtgtcaggagaaacgtgtcc

SEQ ID NO: 12814 - DNA, 25 bp, Homo sapien
aacgagtgtcagcagaaacgtgtcc

SEQ ID NO: 12815 - DNA, 25 bp, Homo sapien
tcatccagggagaaagtgacctcac

SEQ ID NO: 12816 - DNA, 25 bp, Homo sapien
tcatccagggagtaagtgacctcac

SEQ ID NO: 12817 - DNA, 25 bp, Homo sapien
ggctatttatgtcatatgacgctaa

SEQ ID NO: 12818 - DNA, 25 bp, Homo sapien
ggctatttatgtgatatgacgctaa

SEQ ID NO: 12819 - DNA, 25 bp, Homo sapien
cgtcatttttcgtcggtcgacacga

SEQ ID NO: 12820 - DNA, 25 bp, Homo sapien
cgtcatttttcgacggtcgacacga

SEQ ID NO: 12821 - DNA, 25 bp, Homo sapien
cgaggttcttcctcggacacagact

SEQ ID NO: 12822 - DNA, 25 bp, Homo sapien
cgaggttcttccacggacacagact

SEQ ID NO: 12823 - DNA, 25 bp, Homo sapien
gaggtcatcgttcaccacgaaaagg

SEQ ID NO: 12824 - DNA, 25 bp, Homo sapien
gaggtcatcgttgaccacgaaaagg

SEQ ID NO: 12825 - DNA, 25 bp, Homo sapien
gaattgtactttcagtaaaacagtc

SEQ ID NO: 12826 - DNA, 25 bp, Homo sapien
gaattgtactttgagtaaaacagtc

SEQ ID NO: 12827 - DNA, 25 bp, Homo sapien
tattctcgctgtccatgtgtcctca

SEQ ID NO: 12828 - DNA, 25 bp, Homo sapien
tattctcgctgtgcatgtgtcctca

SEQ ID NO: 12829 - DNA, 25 bp, Homo sapien
ttttccgtcgtcgtcgtttccgttc

SEQ ID NO: 12830 - DNA, 25 bp, Homo sapien
ttttccgtcgtcctcgtttccgttc

SEQ ID NO: 12831 - DNA, 25 bp, Homo sapien
ctttttgtcgtgtctttccggtcac

SEQ ID NO: 12832 - DNA, 25 bp, Homo sapien
ctttttgtcgtgactttccggtcac

SEQ ID NO: 12833 - DNA, 25 bp, Homo sapien
gtcgtctctgaacgttccgtgtccg

SEQ ID NO: 12834 - DNA, 25 bp, Homo sapien
gtcgtctctgaaggttccgtgtccg

SEQ ID NO: 12835 - DNA, 25 bp, Homo sapien
ttaatgtttaagatgatccagtcac

SEQ ID NO: 12836 - DNA, 25 bp, Homo sapien
ttaatgtttaagttgatccagtcac

SEQ ID NO: 12837 - DNA, 25 bp, Homo sapien
ggtgagtgtaaaaccgatacaattc

SEQ ID NO: 12838 - DNA, 25 bp, Homo sapien
ggtgagtgtaaatccgatacaattc

SEQ ID NO: 12839 - DNA, 25 bp, Homo sapien
ggaaggtactagtcttcctactttt

SEQ ID NO: 12840 - DNA, 25 bp, Homo sapien
ggaaggtactagacttcctactttt

SEQ ID NO: 12841 - DNA, 25 bp, Homo sapien
ggttaggtcttccttctctcttctc

SEQ ID NO: 12842 - DNA, 25 bp, Homo sapien
ggttaggtcttcgttctctcttctc

SEQ ID NO: 12843 - DNA, 25 bp, Homo sapien
gtctcaatagtgtctttttctcgta

SEQ ID NO: 12844 - DNA, 25 bp, Homo sapien
gtctcaatagtgactttttctcgta

SEQ ID NO: 12845 - DNA, 25 bp, Homo sapien
ctcaggttagtatgttttagtcctc

SEQ ID NO: 12846 - DNA, 25 bp, Homo sapien
ctcaggttagtaagttttagtcctc

SEQ ID NO: 12847 - DNA, 25 bp, Homo sapien
gttaatttgtcgtttgtcgaaccgt

SEQ ID NO: 12848 - DNA, 25 bp, Homo sapien
gttaatttgtcgattgtcgaaccgt

SEQ ID NO: 12849 - DNA, 25 bp, Homo sapien
ggtcggtcttaggactattcagctt

SEQ ID NO: 12850 - DNA, 25 bp, Homo sapien
ggtcggtcttagcactattcagctt

SEQ ID NO: 12851 - DNA, 25 bp, Homo sapien
gtagacgttcgtggacattctaaag

SEQ ID NO: 12852 - DNA, 25 bp, Homo sapien
gtagacgttcgtcgacattctaaag

SEQ ID NO: 12853 - DNA, 25 bp, Homo sapien
actattgtctgacgtcgttctacca

SEQ ID NO: 12854 - DNA, 25 bp, Homo sapien
actattgtctgaggtcgttctacca

SEQ ID NO: 12855 - DNA, 25 bp, Homo sapien
gaactcttgtgtcatagaaccccca

SEQ ID NO: 12856 - DNA, 25 bp, Homo sapien
gaactcttgtgtgatagaaccccca

SEQ ID NO: 12857 - DNA, 25 bp, Homo sapien
aagtctcttgagaggtcacactcca

SEQ ID NO: 12858 - DNA, 25 bp, Homo sapien
aagtctcttgagtggtcacactcca

SEQ ID NO: 12859 - DNA, 25 bp, Homo sapien
agtcatagaaagttcgtcgccaatc

SEQ ID NO: 12860 - DNA, 25 bp, Homo sapien
agtcatagaaagatcgtcgccaatc

SEQ ID NO: 12861 - DNA, 25 bp, Homo sapien
accatgaactacgactatacgagtg

SEQ ID NO: 12862 - DNA, 25 bp, Homo sapien
accatgaactaccactatacgagtg

SEQ ID NO: 12863 - DNA, 25 bp, Homo sapien
agtcgtcactgaaatatcttcatag

SEQ ID NO: 12864 - DNA, 25 bp, Homo sapien
agtcgtcactgatatatcttcatag

SEQ ID NO: 12865 - DNA, 25 bp, Homo sapien
cattacccgtacaaactttgtcagg

SEQ ID NO: 12866 - DNA, 25 bp, Homo sapien
cattacccgtactaactttgtcagg

SEQ ID NO: 12867 - DNA, 25 bp, Homo sapien
cataccttgacaaacttctctgcgg

SEQ ID NO: 12868 - DNA, 25 bp, Homo sapien
cataccttgacatacttctctgcgg

SEQ ID NO: 12869 - DNA, 25 bp, Homo sapien
cgtagtccccgacttcctctaagga

SEQ ID NO: 12870 - DNA, 25 bp, Homo sapien
cgtagtccccgagttcctctaagga

SEQ ID NO: 12871 - DNA, 25 bp, Homo sapien
ggtgtccctccgaaagaccaactgc

SEQ ID NO: 12872 - DNA, 25 bp, Homo sapien
ggtgtccctccgtaagaccaactgc

SEQ ID NO: 12873 - DNA, 25 bp, Homo sapien
gggtccctaattgacgtcaaacaat

SEQ ID NO: 12874 - DNA, 25 bp, Homo sapien
gggtccctaattcacgtcaaacaat

SEQ ID NO: 12875 - DNA, 25 bp, Homo sapien
ggaactcaagctactctgacaggaa

SEQ ID NO: 12876 - DNA, 25 bp, Homo sapien
ggaactcaagcttctctgacaggaa

SEQ ID NO: 12877 - DNA, 25 bp, Homo sapien
acaaaggaaggtctggcagagacac

SEQ ID NO: 12878 - DNA, 25 bp, Homo sapien
acaaaggaaggtgtggcagagacac

SEQ ID NO: 12879 - DNA, 25 bp, Homo sapien
caatttaacgatcgtctgaagatcc

SEQ ID NO: 12880 - DNA, 25 bp, Homo sapien
caatttaacgatggtctgaagatcc

SEQ ID NO: 12881 - DNA, 25 bp, Homo sapien
caaagatggattcttgtctgtcaag

SEQ ID NO: 12882 - DNA, 25 bp, Homo sapien
caaagatggattgttgtctgtcaag

SEQ ID NO: 12883 - DNA, 25 bp, Homo sapien
cgaagttcggttacgtttttcaagt

SEQ ID NO: 12884 - DNA, 25 bp, Homo sapien
cgaagttcggtttcgtttttcaagt

SEQ ID NO: 12885 - DNA, 25 bp, Homo sapien
cgatacccgatttccagggttgtag

SEQ ID NO: 12886 - DNA, 25 bp, Homo sapien
cgatacccgattaccagggttgtag

SEQ ID NO: 12887 - DNA, 25 bp, Homo sapien
attctacgtcataccagaggtgcag

SEQ ID NO: 12888 - DNA, 25 bp, Homo sapien
attctacgtcattccagaggtgcag

SEQ ID NO: 12889 - DNA, 25 bp, Homo sapien
agcaggactcttcagcgcacgacct

SEQ ID NO: 12890 - DNA, 25 bp, Homo sapien
agcaggactcttgagcgcacgacct

SEQ ID NO: 12891 - DNA, 25 bp, Homo sapien
actagaagtccataacgagccgggt

SEQ ID NO: 12892 - DNA, 25 bp, Homo sapien
actagaagtccaaaacgagccgggt

SEQ ID NO: 12893 - DNA, 25 bp, Homo sapien
agtaggaggaacactacagaggcga

SEQ ID NO: 12894 - DNA, 25 bp, Homo sapien
agtaggaggaactctacagaggcga

SEQ ID NO: 12895 - DNA, 25 bp, Homo sapien
ctggtaccgaaatccaacgtatcac

SEQ ID NO: 12896 - DNA, 25 bp, Homo sapien
ctggtaccgaaaaccaacgtatcac

SEQ ID NO: 12897 - DNA, 25 bp, Homo sapien
gagtaccgactccagggcgactcga

SEQ ID NO: 12898 - DNA, 25 bp, Homo sapien
gagtaccgactcgagggcgactcga

SEQ ID NO: 12899 - DNA, 25 bp, Homo sapien
gtgtgtcgtcgaataacaccatagg

SEQ ID NO: 12900 - DNA, 25 bp, Homo sapien
gtgtgtcgtcgattaacaccatagg

SEQ ID NO: 12901 - DNA, 25 bp, Homo sapien
tgtgagtctatgtcgcgacctaccc

SEQ ID NO: 12902 - DNA, 25 bp, Homo sapien
tgtgagtctatgacgcgacctaccc

SEQ ID NO: 12903 - DNA, 25 bp, Homo sapien
gattcgtgtcacttatccctgaatc

SEQ ID NO: 12904 - DNA, 25 bp, Homo sapien
gattcgtgtcacatatccctgaatc

SEQ ID NO: 12905 - DNA, 25 bp, Homo sapien
gaacctgagtacaatatcaccaagg

SEQ ID NO: 12906 - DNA, 25 bp, Homo sapien
gaacctgagtactatatcaccaagg

SEQ ID NO: 12907 - DNA, 25 bp, Homo sapien
tcacaagtcctaatagacctatcgg

SEQ ID NO: 12908 - DNA, 25 bp, Homo sapien
tcacaagtcctattagacctatcgg

SEQ ID NO: 12909 - DNA, 25 bp, Homo sapien
gacagaatcgacaaactccagactg

SEQ ID NO: 12910 - DNA, 25 bp, Homo sapien
gacagaatcgactaactccagactg

SEQ ID NO: 12911 - DNA, 25 bp, Homo sapien
acagatctcgagtaaacctaagtag

SEQ ID NO: 12912 - DNA, 25 bp, Homo sapien
acagatctcgagaaaacctaagtag

SEQ ID NO: 12913 - DNA, 25 bp, Homo sapien
gaagggagtcgagcaaccaaagacg

SEQ ID NO: 12914 - DNA, 25 bp, Homo sapien
gaagggagtcgaccaaccaaagacg

SEQ ID NO: 12915 - DNA, 25 bp, Homo sapien
gttaacgtcgtccaacaccgaagag

SEQ ID NO: 12916 - DNA, 25 bp, Homo sapien
gttaacgtcgtcgaacaccgaagag

SEQ ID NO: 12917 - DNA, 25 bp, Homo sapien
gttcaaacgtcaagaaaccgaaacg

SEQ ID NO: 12918 - DNA, 25 bp, Homo sapien
gttcaaacgtcatgaaaccgaaacg

SEQ ID NO: 12919 - DNA, 25 bp, Homo sapien
agtatgaaggcgaagaacaccatcc

SEQ ID NO: 12920 - DNA, 25 bp, Homo sapien
agtatgaaggcgtagaacaccatcc

SEQ ID NO: 12921 - DNA, 25 bp, Homo sapien
gaatgagaggatagtacccatctct

SEQ ID NO: 12922 - DNA, 25 bp, Homo sapien
gaatgagaggattgtacccatctct

SEQ ID NO: 12923 - DNA, 25 bp, Homo sapien
tgaaggtgacagaatatccggtttc

SEQ ID NO: 12924 - DNA, 25 bp, Homo sapien
tgaaggtgacagtatatccggtttc

SEQ ID NO: 12925 - DNA, 25 bp, Homo sapien
ggtagtcacagaaggagccgtctta

SEQ ID NO: 12926 - DNA, 25 bp, Homo sapien
ggtagtcacagatggagccgtctta

SEQ ID NO: 12927 - DNA, 25 bp, Homo sapien
cgaccctacgacgttgagctcttcg

SEQ ID NO: 12928 - DNA, 25 bp, Homo sapien
cgaccctacgaccttgagctcttcg

SEQ ID NO: 12929 - DNA, 25 bp, Homo sapien
cgtgagaaaagagtatccggtagca

SEQ ID NO: 12930 - DNA, 25 bp, Homo sapien
cgtgagaaaagactatccggtagca

SEQ ID NO: 12931 - DNA, 25 bp, Homo sapien
tccaaagaacgacttctgtaaggac

SEQ ID NO: 12932 - DNA, 25 bp, Homo sapien
tccaaagaacgagttctgtaaggac

SEQ ID NO: 12933 - DNA, 25 bp, Homo sapien
aagtacgaaagtcgtacgaagtctc

SEQ ID NO: 12934 - DNA, 25 bp, Homo sapien
aagtacgaaagtggtacgaagtctc

SEQ ID NO: 12935 - DNA, 25 bp, Homo sapien
aaagtcggcgagtaggtcgagttac

SEQ ID NO: 12936 - DNA, 25 bp, Homo sapien
aaagtcggcgagaaggtcgagttac

SEQ ID NO: 12937 - DNA, 25 bp, Homo sapien
aagagtaacgtctcaagaacgcccc

SEQ ID NO: 12938 - DNA, 25 bp, Homo sapien
aagagtaacgtcacaagaacgcccc

SEQ ID NO: 12939 - DNA, 25 bp, Homo sapien
aaaacaccgtgaacaagaggtccct

SEQ ID NO: 12940 - DNA, 25 bp, Homo sapien
aaaacaccgtgatcaagaggtccct

SEQ ID NO: 12941 - DNA, 25 bp, Homo sapien
agatacgaatagacgaagggtctcc

SEQ ID NO: 12942 - DNA, 25 bp, Homo sapien
agatacgaatagtcgaagggtctcc

SEQ ID NO: 12943 - DNA, 25 bp, Homo sapien
caggggtctcgacctcttgaactcc

SEQ ID NO: 12944 - DNA, 25 bp, Homo sapien
caggggtctcgagctcttgaactcc

SEQ ID NO: 12945 - DNA, 25 bp, Homo sapien
aagaggtaccgagtcctggactcac

SEQ ID NO: 12946 - DNA, 25 bp, Homo sapien
aagaggtaccgactcctggactcac

SEQ ID NO: 12947 - DNA, 25 bp, Homo sapien
acaactgtttcgttcttagactccg

SEQ ID NO: 12948 - DNA, 25 bp, Homo sapien
acaactgtttcgatcttagactccg

SEQ ID NO: 12949 - DNA, 25 bp, Homo sapien
actccgctctagaactcgtggtccg

SEQ ID NO: 12950 - DNA, 25 bp, Homo sapien
actccgctctagtactcgtggtccg

SEQ ID NO: 12951 - DNA, 25 bp, Homo sapien
ggaagtccctcttagttctcgggtt

SEQ ID NO: 12952 - DNA, 25 bp, Homo sapien
ggaagtccctctaagttctcgggtt

SEQ ID NO: 12953 - DNA, 25 bp, Homo sapien
tgtcttccttcgagtatactggttt

SEQ ID NO: 12954 - DNA, 25 bp, Homo sapien
tgtcttccttcgtgtatactggttt

SEQ ID NO: 12955 - DNA, 25 bp, Homo sapien
tcaagtcacttgtacaagtccccgt

SEQ ID NO: 12956 - DNA, 25 bp, Homo sapien
tcaagtcacttgaacaagtccccgt

SEQ ID NO: 12957 - DNA, 25 bp, Homo sapien
gaaacgacaagtaaccaaacttccg

SEQ ID NO: 12958 - DNA, 25 bp, Homo sapien
gaaacgacaagttaccaaacttccg

SEQ ID NO: 12959 - DNA, 25 bp, Homo sapien
tcagaaggttgtctacacctacagg

SEQ ID NO: 12960 - DNA, 25 bp, Homo sapien
tcagaaggttgtgtacacctacagg

SEQ ID NO: 12961 - DNA, 25 bp, Homo sapien
gcaatagatatctacgctcgcactg

SEQ ID NO: 12962 - DNA, 25 bp, Homo sapien
gcaatagatatcaacgctcgcactg

SEQ ID NO: 12963 - DNA, 25 bp, Homo sapien
cctccataactcctatcctctcata

SEQ ID NO: 12964 - DNA, 25 bp, Homo sapien
cctccataactcgtatcctctcata

SEQ ID NO: 12965 - DNA, 25 bp, Homo sapien
agtgtagaccctcgactcgtctcca

SEQ ID NO: 12966 - DNA, 25 bp, Homo sapien
agtgtagaccctggactcgtctcca

SEQ ID NO: 12967 - DNA, 25 bp, Homo sapien
ggtacacgaccctgtggttgtcctt

SEQ ID NO: 12968 - DNA, 25 bp, Homo sapien
ggtacacgacccagtggttgtcctt

SEQ ID NO: 12969 - DNA, 25 bp, Homo sapien
ttgtgcgacgttctcgggtttccgg

SEQ ID NO: 12970 - DNA, 25 bp, Homo sapien
ttgtgcgacgttgtcgggtttccgg

SEQ ID NO: 12971 - DNA, 25 bp, Homo sapien
ttggtgtcgtgtcaccggaatctgc

SEQ ID NO: 12972 - DNA, 25 bp, Homo sapien
ttggtgtcgtgtgaccggaatctgc

SEQ ID NO: 12973 - DNA, 25 bp, Homo sapien
atttgtgatccgaccgtaaaaggtc

SEQ ID NO: 12974 - DNA, 25 bp, Homo sapien
atttgtgatccgtccgtaaaaggtc

SEQ ID NO: 12975 - DNA, 25 bp, Homo sapien
ttcttatccataggacttatttact

SEQ ID NO: 12976 - DNA, 25 bp, Homo sapien
ttcttatccatacgacttatttact

SEQ ID NO: 12977 - DNA, 25 bp, Homo sapien
tcacgtttttacctggggtatacac

SEQ ID NO: 12978 - DNA, 25 bp, Homo sapien
tcacgtttttacgtggggtatacac

SEQ ID NO: 12979 - DNA, 25 bp, Homo sapien
tgtagtgccatccacgtgtggtgga

SEQ ID NO: 12980 - DNA, 25 bp, Homo sapien
tgtagtgccatcgacgtgtggtgga

SEQ ID NO: 12981 - DNA, 25 bp, Homo sapien
tctacgtatccatggtattgttgaa

SEQ ID NO: 12982 - DNA, 25 bp, Homo sapien
tctacgtatccaaggtattgttgaa

SEQ ID NO: 12983 - DNA, 25 bp, Homo sapien
tataactccagttccttgaccgaga

SEQ ID NO: 12984 - DNA, 25 bp, Homo sapien
tataactccagtaccttgaccgaga

SEQ ID NO: 12985 - DNA, 25 bp, Homo sapien
actgggtgtcatcagtgtgactaat

SEQ ID NO: 12986 - DNA, 25 bp, Homo sapien
actgggtgtcatgagtgtgactaat

SEQ ID NO: 12987 - DNA, 25 bp, Homo sapien
gaggacattacacacgtagtcataa

SEQ ID NO: 12988 - DNA, 25 bp, Homo sapien
gaggacattacagacgtagtcataa

SEQ ID NO: 12989 - DNA, 25 bp, Homo sapien
agagtcagaagaacccctcgtcatg

SEQ ID NO: 12990 - DNA, 25 bp, Homo sapien
agagtcagaagatcccctcgtcatg

SEQ ID NO: 12991 - DNA, 25 bp, Homo sapien
agaatgcgaactacgtctcccatag

SEQ ID NO: 12992 - DNA, 25 bp, Homo sapien
agaatgcgaacttcgtctcccatag

SEQ ID NO: 12993 - DNA, 25 bp, Homo sapien
gtcggtaccctaattcttccttctg

SEQ ID NO: 12994 - DNA, 25 bp, Homo sapien
gtcggtaccctatttcttccttctg

SEQ ID NO: 12995 - DNA, 25 bp, Homo sapien
ttgacgtcaaaagtgttgaccccca

SEQ ID NO: 12996 - DNA, 25 bp, Homo sapien
ttgacgtcaaaactgttgaccccca

SEQ ID NO: 12997 - DNA, 25 bp, Homo sapien
accccggggtcgatggacctagcgc

SEQ ID NO: 12998 - DNA, 25 bp, Homo sapien
accccggggtcgttggacctagcgc

SEQ ID NO: 12999 - DNA, 25 bp, Homo sapien
ctacacggagtccttggtcctgtcc

SEQ ID NO: 13000 - DNA, 25 bp, Homo sapien
ctacacggagtcgttggtcctgtcc

SEQ ID NO: 13001 - DNA, 25 bp, Homo sapien
cgacgaaaaccatccgtgcgagtca

SEQ ID NO: 13002 - DNA, 25 bp, Homo sapien
cgacgaaaaccaaccgtgcgagtca

SEQ ID NO: 13003 - DNA, 25 bp, Homo sapien
ccgacttgaagaacggtgtcggtaa

SEQ ID NO: 13004 - DNA, 25 bp, Homo sapien
ccgacttgaagatcggtgtcggtaa

SEQ ID NO: 13005 - DNA, 25 bp, Homo sapien
cgcttgagacacttgagtcgactca

SEQ ID NO: 13006 - DNA, 25 bp, Homo sapien
cgcttgagacacatgagtcgactca

SEQ ID NO: 13007 - DNA, 25 bp, Homo sapien
aattcacagtggaggaacctctgcg

SEQ ID NO: 13008 - DNA, 25 bp, Homo sapien
aattcacagtggtggaacctctgcg

SEQ ID NO: 13009 - DNA, 25 bp, Homo sapien
cgatccacccggtggtaatatttcg

SEQ ID NO: 13010 - DNA, 25 bp, Homo sapien
cgatccacccggaggtaatatttcg

SEQ ID NO: 13011 - DNA, 25 bp, Homo sapien
aaaagacacccgagagggaatttct

SEQ ID NO: 13012 - DNA, 25 bp, Homo sapien
aaaagacacccgtgagggaatttct

SEQ ID NO: 13013 - DNA, 25 bp, Homo sapien
aattcgacggcacgttgtaggtcct

SEQ ID NO: 13014 - DNA, 25 bp, Homo sapien
aattcgacggcaggttgtaggtcct

SEQ ID NO: 13015 - DNA, 25 bp, Homo sapien
catgtatctcagtgtagtatttact

SEQ ID NO: 13016 - DNA, 25 bp, Homo sapien
catgtatctcagagtagtatttact

SEQ ID NO: 13017 - DNA, 25 bp, Homo sapien
gatgagattccgtaagtattctact

SEQ ID NO: 13018 - DNA, 25 bp, Homo sapien
gatgagattccgaaagtattctact

SEQ ID NO: 13019 - DNA, 25 bp, Homo sapien
acgggtcttttcagactggtcgact

SEQ ID NO: 13020 - DNA, 25 bp, Homo sapien
acgggtcttttctgactggtcgact

SEQ ID NO: 13021 - DNA, 25 bp, Homo sapien
ggagtagatacttgacgagtctcag

SEQ ID NO: 13022 - DNA, 25 bp, Homo sapien
ggagtagatactagacgagtctcag

SEQ ID NO: 13023 - DNA, 25 bp, Homo sapien
cctcagggagtcttagatgtgaacg

SEQ ID NO: 13024 - DNA, 25 bp, Homo sapien
cctcagggagtcatagatgtgaacg

SEQ ID NO: 13025 - DNA, 25 bp, Homo sapien
ccacagagaccgttaagcgtgaggt

SEQ ID NO: 13026 - DNA, 25 bp, Homo sapien
ccacagagaccgataagcgtgaggt

SEQ ID NO: 13027 - DNA, 25 bp, Homo sapien
catctgaaagtctgctacagaaagg

SEQ ID NO: 13028 - DNA, 25 bp, Homo sapien
catctgaaagtcagctacagaaagg

SEQ ID NO: 13029 - DNA, 25 bp, Homo sapien
tcgatctcaaataactctcagggga

SEQ ID NO: 13030 - DNA, 25 bp, Homo sapien
tcgatctcaaattactctcagggga

SEQ ID NO: 13031 - DNA, 25 bp, Homo sapien
tgatcaagtatgtctccgaggtgga

SEQ ID NO: 13032 - DNA, 25 bp, Homo sapien
tgatcaagtatgactccgaggtgga

SEQ ID NO: 13033 - DNA, 25 bp, Homo sapien
caccaatattactcgagtttcggac

SEQ ID NO: 13034 - DNA, 25 bp, Homo sapien
caccaatattacacgagtttcggac

SEQ ID NO: 13035 - DNA, 25 bp, Homo sapien
tactcatttgtcgagattttgtact

SEQ ID NO: 13036 - DNA, 25 bp, Homo sapien
tactcatttgtccagattttgtact

SEQ ID NO: 13037 - DNA, 25 bp, Homo sapien
ccggtgacgatcctcgattatttct

SEQ ID NO: 13038 - DNA, 25 bp, Homo sapien
ccggtgacgatcgtcgattatttct

SEQ ID NO: 13039 - DNA, 25 bp, Homo sapien
gggacacggtcgatacgattctttt

SEQ ID NO: 13040 - DNA, 25 bp, Homo sapien
gggacacggtcgttacgattctttt

SEQ ID NO: 13041 - DNA, 25 bp, Homo sapien
aacgaaatacttttacacatccttt

SEQ ID NO: 13042 - DNA, 25 bp, Homo sapien
aacgaaatacttatacacatccttt

SEQ ID NO: 13043 - DNA, 25 bp, Homo sapien
gtcgaaagacctttaccagtcttta

SEQ ID NO: 13044 - DNA, 25 bp, Homo sapien
gtcgaaagacctataccagtcttta

SEQ ID NO: 13045 - DNA, 25 bp, Homo sapien
aataccttatctcataccaatggta

SEQ ID NO: 13046 - DNA, 25 bp, Homo sapien
aataccttatctgataccaatggta

SEQ ID NO: 13047 - DNA, 25 bp, Homo sapien
taaaccttcttctcgtctaaagtgg

SEQ ID NO: 13048 - DNA, 25 bp, Homo sapien
taaaccttcttcacgtctaaagtgg

SEQ ID NO: 13049 - DNA, 25 bp, Homo sapien
gactttcaccgtctactggagtaga

SEQ ID NO: 13050 - DNA, 25 bp, Homo sapien
gactttcaccgtgtactggagtaga

SEQ ID NO: 13051 - DNA, 25 bp, Homo sapien
ctagggtcctctcgtactcaggggt

SEQ ID NO: 13052 - DNA, 25 bp, Homo sapien
ctagggtcctctggtactcaggggt

SEQ ID NO: 13053 - DNA, 25 bp, Homo sapien
ttgtccgctacagtccgagagcggt

SEQ ID NO: 13054 - DNA, 25 bp, Homo sapien
ttgtccgctacactccgagagcggt

SEQ ID NO: 13055 - DNA, 25 bp, Homo sapien
aattccgttacttccgaaacggtgt

SEQ ID NO: 13056 - DNA, 25 bp, Homo sapien
aattccgttactaccgaaacggtgt

SEQ ID NO: 13057 - DNA, 25 bp, Homo sapien
caatatgggtcctatcggtatagag

SEQ ID NO: 13058 - DNA, 25 bp, Homo sapien
caatatgggtccaatcggtatagag

SEQ ID NO: 13059 - DNA, 25 bp, Homo sapien
taagactccggttcccttgactcca

SEQ ID NO: 13060 - DNA, 25 bp, Homo sapien
taagactccggtacccttgactcca

SEQ ID NO: 13061 - DNA, 25 bp, Homo sapien
gaacctggggtatcacctcaaccgg

SEQ ID NO: 13062 - DNA, 25 bp, Homo sapien
gaacctggggtaacacctcaaccgg

SEQ ID NO: 13063 - DNA, 25 bp, Homo sapien
aagaaggtcaacgacatccagtcgg

SEQ ID NO: 13064 - DNA, 25 bp, Homo sapien
aagaaggtcaaccacatccagtcgg

SEQ ID NO: 13065 - DNA, 25 bp, Homo sapien
acaaagggtcagtcgcagaccctcc

SEQ ID NO: 13066 - DNA, 25 bp, Homo sapien
acaaagggtcagacgcagaccctcc

SEQ ID NO: 13067 - DNA, 25 bp, Homo sapien
acccaggttcagaggtgacaacagc

SEQ ID NO: 13068 - DNA, 25 bp, Homo sapien
acccaggttcagtggtgacaacagc

SEQ ID NO: 13069 - DNA, 25 bp, Homo sapien
ctcggaaggcactaccacatccaga

SEQ ID NO: 13070 - DNA, 25 bp, Homo sapien
ctcggaaggcacaaccacatccaga

SEQ ID NO: 13071 - DNA, 25 bp, Homo sapien
ggacagtagacgaacccaacgccga

SEQ ID NO: 13072 - DNA, 25 bp, Homo sapien
ggacagtagacgtacccaacgccga

SEQ ID NO: 13073 - DNA, 25 bp, Homo sapien
agctcgtcaccgtatcccatacaga

SEQ ID NO: 13074 - DNA, 25 bp, Homo sapien
agctcgtcaccgaatcccatacaga

SEQ ID NO: 13075 - DNA, 25 bp, Homo sapien
gaggtccgggaaaccgttctcgacc

SEQ ID NO: 13076 - DNA, 25 bp, Homo sapien
gaggtccgggaatccgttctcgacc

SEQ ID NO: 13077 - DNA, 25 bp, Homo sapien
cgactcgggtagcacgtgtaccacc

SEQ ID NO: 13078 - DNA, 25 bp, Homo sapien
cgactcgggtaggacgtgtaccacc

SEQ ID NO: 13079 - DNA, 25 bp, Homo sapien
ttcttccgtacttggtgccgtagac

SEQ ID NO: 13080 - DNA, 25 bp, Homo sapien
ttcttccgtactaggtgccgtagac

SEQ ID NO: 13081 - DNA, 25 bp, Homo sapien
acctcctcgtcaaggtcgcgtacag

SEQ ID NO: 13082 - DNA, 25 bp, Homo sapien
acctcctcgtcatggtcgcgtacag

SEQ ID NO: 13083 - DNA, 25 bp, Homo sapien
cgaccacgtgacctgtttccgacag

SEQ ID NO: 13084 - DNA, 25 bp, Homo sapien
cgaccacgtgacgtgtttccgacag

SEQ ID NO: 13085 - DNA, 25 bp, Homo sapien
gacgtccgttgaccacgtttgcctc

SEQ ID NO: 13086 - DNA, 25 bp, Homo sapien
gacgtccgttgagcacgtttgcctc

SEQ ID NO: 13087 - DNA, 25 bp, Homo sapien
agtctcacccgacgttttctacgtc

SEQ ID NO: 13088 - DNA, 25 bp, Homo sapien
agtctcacccgaggttttctacgtc

SEQ ID NO: 13089 - DNA, 25 bp, Homo sapien
agtcagaacgactgtcagtttctcg

SEQ ID NO: 13090 - DNA, 25 bp, Homo sapien
agtcagaacgacagtcagtttctcg

SEQ ID NO: 13091 - DNA, 25 bp, Homo sapien
cccagtctgacaggtttggtgtctg

SEQ ID NO: 13092 - DNA, 25 bp, Homo sapien
cccagtctgacacgtttggtgtctg

SEQ ID NO: 13093 - DNA, 25 bp, Homo sapien
aacagagtctgacaagggcttacag

SEQ ID NO: 13094 - DNA, 25 bp, Homo sapien
aacagagtctgagaagggcttacag

SEQ ID NO: 13095 - DNA, 25 bp, Homo sapien
gaacttgaggactggagtccactag

SEQ ID NO: 13096 - DNA, 25 bp, Homo sapien
gaacttgaggacaggagtccactag

SEQ ID NO: 13097 - DNA, 25 bp, Homo sapien
ccgtcgtccgcacatatatacaggt

SEQ ID NO: 13098 - DNA, 25 bp, Homo sapien
ccgtcgtccgcagatatatacaggt

SEQ ID NO: 13099 - DNA, 25 bp, Homo sapien
aaagtcgtcaggtcgaatacaagtc

SEQ ID NO: 13100 - DNA, 25 bp, Homo sapien
aaagtcgtcaggacgaatacaagtc

SEQ ID NO: 13101 - DNA, 25 bp, Homo sapien
tcgagatctcacgaaaatccgtctc

SEQ ID NO: 13102 - DNA, 25 bp, Homo sapien
tcgagatctcaccaaaatccgtctc

SEQ ID NO: 13103 - DNA, 25 bp, Homo sapien
tatagggtcctggaacagagccttg

SEQ ID NO: 13104 - DNA, 25 bp, Homo sapien
tatagggtcctgcaacagagccttg

SEQ ID NO: 13105 - DNA, 25 bp, Homo sapien
agagagtcccttataaaagtctctt

SEQ ID NO: 13106 - DNA, 25 bp, Homo sapien
agagagtcccttttaaaagtctctt

SEQ ID NO: 13107 - DNA, 25 bp, Homo sapien
actagaaattaacgaaactgtcttg

SEQ ID NO: 13108 - DNA, 25 bp, Homo sapien
actagaaattaaggaaactgtcttg

SEQ ID NO: 13109 - DNA, 25 bp, Homo sapien
cggagtgagtaaaaccgtccttttg

SEQ ID NO: 13110 - DNA, 25 bp, Homo sapien
cggagtgagtaataccgtccttttg

SEQ ID NO: 13111 - DNA, 25 bp, Homo sapien
ttaaagatcaaggtacccactcgac

SEQ ID NO: 13112 - DNA, 25 bp, Homo sapien
ttaaagatcaagctacccactcgac

SEQ ID NO: 13113 - DNA, 25 bp, Homo sapien
gtatgttgtccatgtgtgtgtctct

SEQ ID NO: 13114 - DNA, 25 bp, Homo sapien
gtatgttgtccaagtgtgtgtctct

SEQ ID NO: 13115 - DNA, 25 bp, Homo sapien
cgtcgtggtctctcccttggacggg

SEQ ID NO: 13116 - DNA, 25 bp, Homo sapien
cgtcgtggtctcacccttggacggg

SEQ ID NO: 13117 - DNA, 25 bp, Homo sapien
ggtgtggtcgtcgcccttcagacaa

SEQ ID NO: 13118 - DNA, 25 bp, Homo sapien
ggtgtggtcgtcccccttcagacaa

SEQ ID NO: 13119 - DNA, 25 bp, Homo sapien
gttgagtcggacgaacccagtgtaa

SEQ ID NO: 13120 - DNA, 25 bp, Homo sapien
gttgagtcggaccaacccagtgtaa

SEQ ID NO: 13121 - DNA, 25 bp, Homo sapien
taggtgtgtccgtgattctttctga

SEQ ID NO: 13122 - DNA, 25 bp, Homo sapien
taggtgtgtccgagattctttctga

SEQ ID NO: 13123 - DNA, 25 bp, Homo sapien
tctttcaccgaggtgatcgattatg

SEQ ID NO: 13124 - DNA, 25 bp, Homo sapien
tctttcaccgagctgatcgattatg

SEQ ID NO: 13125 - DNA, 25 bp, Homo sapien
cgttcacacgtactaattgtgtcta

SEQ ID NO: 13126 - DNA, 25 bp, Homo sapien
cgttcacacgtagtaattgtgtcta

SEQ ID NO: 13127 - DNA, 25 bp, Homo sapien
atcgacttaggatcgtcaattttag

SEQ ID NO: 13128 - DNA, 25 bp, Homo sapien
atcgacttaggaacgtcaattttag

SEQ ID NO: 13129 - DNA, 25 bp, Homo sapien
aggtaactcccaacgatcaccaatg

SEQ ID NO: 13130 - DNA, 25 bp, Homo sapien
aggtaactcccatcgatcaccaatg

SEQ ID NO: 13131 - DNA, 25 bp, Homo sapien
agtgaacccttgcagtcgccagatg

SEQ ID NO: 13132 - DNA, 25 bp, Homo sapien
agtgaacccttggagtcgccagatg

SEQ ID NO: 13133 - DNA, 25 bp, Homo sapien
gaactgatctcttctccgacaaagt

SEQ ID NO: 13134 - DNA, 25 bp, Homo sapien
gaactgatctctactccgacaaagt

SEQ ID NO: 13135 - DNA, 25 bp, Homo sapien
ctgaagatcttagtatcgatcacag

SEQ ID NO: 13136 - DNA, 25 bp, Homo sapien
ctgaagatcttactatcgatcacag

SEQ ID NO: 13137 - DNA, 25 bp, Homo sapien
ttttgtagacattcattccatggtc

SEQ ID NO: 13138 - DNA, 25 bp, Homo sapien
ttttgtagacatacattccatggtc

SEQ ID NO: 13139 - DNA, 25 bp, Homo sapien
tttatacactgatgtttcttggtcg

SEQ ID NO: 13140 - DNA, 25 bp, Homo sapien
tttatacactgaagtttcttggtcg

SEQ ID NO: 13141 - DNA, 25 bp, Homo sapien
tttttaccgaactgtcataagagcc

SEQ ID NO: 13142 - DNA, 25 bp, Homo sapien
tttttaccgaacagtcataagagcc

SEQ ID NO: 13143 - DNA, 25 bp, Homo sapien
tcctcgagtcttcacggtgtaccga

SEQ ID NO: 13144 - DNA, 25 bp, Homo sapien
tcctcgagtcttgacggtgtaccga

SEQ ID NO: 13145 - DNA, 25 bp, Homo sapien
ctcttctgatggaattctttcaccg

SEQ ID NO: 13146 - DNA, 25 bp, Homo sapien
ctcttctgatggtattctttcaccg

SEQ ID NO: 13147 - DNA, 25 bp, Homo sapien
gacattgaagtgaaaccccaagacg

SEQ ID NO: 13148 - DNA, 25 bp, Homo sapien
gacattgaagtgtaaccccaagacg

SEQ ID NO: 13149 - DNA, 25 bp, Homo sapien
ctttggggtctgatcgaccactcct

SEQ ID NO: 13150 - DNA, 25 bp, Homo sapien
ctttggggtctgttcgaccactcct

SEQ ID NO: 13151 - DNA, 25 bp, Homo sapien
tgtcggacagctccgtaggcatctc

SEQ ID NO: 13152 - DNA, 25 bp, Homo sapien
tgtcggacagctgcgtaggcatctc

SEQ ID NO: 13153 - DNA, 25 bp, Homo sapien
tgtcctcaactagaccaggtcgtac

SEQ ID NO: 13154 - DNA, 25 bp, Homo sapien
tgtcctcaactacaccaggtcgtac

SEQ ID NO: 13155 - DNA, 25 bp, Homo sapien
cggtccgtgggacacgacccgtgtc

SEQ ID NO: 13156 - DNA, 25 bp, Homo sapien
cggtccgtgggagacgacccgtgtc

SEQ ID NO: 13157 - DNA, 25 bp, Homo sapien
cttcggtccggtcctgacccgggga

SEQ ID NO: 13158 - DNA, 25 bp, Homo sapien
cttcggtccggtgctgacccgggga

SEQ ID NO: 13159 - DNA, 25 bp, Homo sapien
ccgggacgttctacagccggtcgag

SEQ ID NO: 13160 - DNA, 25 bp, Homo sapien
ccgggacgttcttcagccggtcgag

SEQ ID NO: 13161 - DNA, 25 bp, Homo sapien
atgggggtctttttaccggtcaggt

SEQ ID NO: 13162 - DNA, 25 bp, Homo sapien
atgggggtctttataccggtcaggt

SEQ ID NO: 13163 - DNA, 25 bp, Homo sapien
agaattgtccgagaacccgaccgag

SEQ ID NO: 13164 - DNA, 25 bp, Homo sapien
agaattgtccgacaacccgaccgag

SEQ ID NO: 13165 - DNA, 25 bp, Homo sapien
gtttagttaccatacacagggttag

SEQ ID NO: 13166 - DNA, 25 bp, Homo sapien
gtttagttaccaaacacagggttag

SEQ ID NO: 13167 - DNA, 25 bp, Homo sapien
gtagtacatgaaccacaccttagcg

SEQ ID NO: 13168 - DNA, 25 bp, Homo sapien
gtagtacatgaagcacaccttagcg

SEQ ID NO: 13169 - DNA, 25 bp, Homo sapien
aagtgtggtggtaatagcacttacc

SEQ ID NO: 13170 - DNA, 25 bp, Homo sapien
aagtgtggtggttatagcacttacc

SEQ ID NO: 13171 - DNA, 25 bp, Homo sapien
tcgatgggtacgaggtcccggtctt

SEQ ID NO: 13172 - DNA, 25 bp, Homo sapien
tcgatgggtacgtggtcccggtctt

SEQ ID NO: 13173 - DNA, 25 bp, Homo sapien
gtaaagtgtacactcccgggactcg

SEQ ID NO: 13174 - DNA, 25 bp, Homo sapien
gtaaagtgtacagtcccgggactcg

SEQ ID NO: 13175 - DNA, 25 bp, Homo sapien
gtcggaaatgtaacccgggacaatg

SEQ ID NO: 13176 - DNA, 25 bp, Homo sapien
gtcggaaatgtatcccgggacaatg

SEQ ID NO: 13177 - DNA, 25 bp, Homo sapien
gtaaacgcccgagacctggtcagag

SEQ ID NO: 13178 - DNA, 25 bp, Homo sapien
gtaaacgcccgacacctggtcagag

SEQ ID NO: 13179 - DNA, 25 bp, Homo sapien
ttatagaaccctatatatgtcgtga

SEQ ID NO: 13180 - DNA, 25 bp, Homo sapien
ttatagaaccctttatatgtcgtga

SEQ ID NO: 13181 - DNA, 25 bp, Homo sapien
ttctataaacactttcaggtggtaa

SEQ ID NO: 13182 - DNA, 25 bp, Homo sapien
ttctataaacacattcaggtggtaa

SEQ ID NO: 13183 - DNA, 25 bp, Homo sapien
ggtactgccccaggtgagactggaa

SEQ ID NO: 13184 - DNA, 25 bp, Homo sapien
ggtactgccccacgtgagactggaa

SEQ ID NO: 13185 - DNA, 25 bp, Homo sapien
cgtctccattcctggtaccggtctt

SEQ ID NO: 13186 - DNA, 25 bp, Homo sapien
cgtctccattccaggtaccggtctt

SEQ ID NO: 13187 - DNA, 25 bp, Homo sapien
ccgtccgaattccaggaagacgcct

SEQ ID NO: 13188 - DNA, 25 bp, Homo sapien
ccgtccgaattcgaggaagacgcct

SEQ ID NO: 13189 - DNA, 25 bp, Homo sapien
taggtcgacttaggagtcgggaccc

SEQ ID NO: 13190 - DNA, 25 bp, Homo sapien
taggtcgacttacgagtcgggaccc

SEQ ID NO: 13191 - DNA, 25 bp, Homo sapien
ttctagttccacaaagaggcgatta

SEQ ID NO: 13192 - DNA, 25 bp, Homo sapien
ttctagttccactaagaggcgatta

SEQ ID NO: 13193 - DNA, 25 bp, Homo sapien
cttcaggtctcacaggaaagactaa

SEQ ID NO: 13194 - DNA, 25 bp, Homo sapien
cttcaggtctcagaggaaagactaa

SEQ ID NO: 13195 - DNA, 25 bp, Homo sapien
atgaagtgtcaggagattctccaca

SEQ ID NO: 13196 - DNA, 25 bp, Homo sapien
atgaagtgtcagcagattctccaca

SEQ ID NO: 13197 - DNA, 25 bp, Homo sapien
agggggattccaaaccacctcgacg

SEQ ID NO: 13198 - DNA, 25 bp, Homo sapien
agggggattccataccacctcgacg

SEQ ID NO: 13199 - DNA, 25 bp, Homo sapien
ggggctgatccaggacctcttcagt

SEQ ID NO: 13200 - DNA, 25 bp, Homo sapien
ggggctgatccacgacctcttcagt

SEQ ID NO: 13201 - DNA, 25 bp, Homo sapien
gtaggggtaatccttcgtccaatcc

SEQ ID NO: 13202 - DNA, 25 bp, Homo sapien
gtaggggtaatcgttcgtccaatcc

SEQ ID NO: 13203 - DNA, 25 bp, Homo sapien
ggaggtagggtgctgtcgatcctta

SEQ ID NO: 13204 - DNA, 25 bp, Homo sapien
ggaggtagggtggtgtcgatcctta

SEQ ID NO: 13205 - DNA, 25 bp, Homo sapien
gagcgaaggaggtcagtctctagta

SEQ ID NO: 13206 - DNA, 25 bp, Homo sapien
gagcgaaggaggacagtctctagta

SEQ ID NO: 13207 - DNA, 25 bp, Homo sapien
gtcctagtcgggtcacaactcctct

SEQ ID NO: 13208 - DNA, 25 bp, Homo sapien
gtcctagtcgggacacaactcctct

SEQ ID NO: 13209 - DNA, 25 bp, Homo sapien
acaggactccgtagaagattctttt

SEQ ID NO: 13210 - DNA, 25 bp, Homo sapien
acaggactccgttgaagattctttt

SEQ ID NO: 13211 - DNA, 25 bp, Homo sapien
gaaatgtcctgtacgtactattttt

SEQ ID NO: 13212 - DNA, 25 bp, Homo sapien
gaaatgtcctgttcgtactattttt

SEQ ID NO: 13213 - DNA, 25 bp, Homo sapien
gaaggtgctgtatctttgtcgtatc

SEQ ID NO: 13214 - DNA, 25 bp, Homo sapien
gaaggtgctgtaactttgtcgtatc

SEQ ID NO: 13215 - DNA, 25 bp, Homo sapien
aaggtcgacgacttttcttaaattt

SEQ ID NO: 13216 - DNA, 25 bp, Homo sapien
aaggtcgacgacatttcttaaattt

SEQ ID NO: 13217 - DNA, 25 bp, Homo sapien
tttcaactactgctgtctgtgaaca

SEQ ID NO: 13218 - DNA, 25 bp, Homo sapien
tttcaactactggtgtctgtgaaca

SEQ ID NO: 13219 - DNA, 25 bp, Homo sapien
agatctaaaactggatctggatctg

SEQ ID NO: 13220 - DNA, 25 bp, Homo sapien
agatctaaaactcgatctggatctg

SEQ ID NO: 13221 - DNA, 25 bp, Homo sapien
gtatcaacttttacgactgtgttta

SEQ ID NO: 13222 - DNA, 25 bp, Homo sapien
gtatcaactttttcgactgtgttta

SEQ ID NO: 13223 - DNA, 25 bp, Homo sapien
gattctcgatttatcctaggggtat

SEQ ID NO: 13224 - DNA, 25 bp, Homo sapien
gattctcgatttttcctaggggtat

SEQ ID NO: 13225 - DNA, 25 bp, Homo sapien
tctagtgcggtgacgtgaggtcgat

SEQ ID NO: 13226 - DNA, 25 bp, Homo sapien
tctagtgcggtgtcgtgaggtcgat

SEQ ID NO: 13227 - DNA, 25 bp, Homo sapien
cgacgtcgggccaacgcgaggtctt

SEQ ID NO: 13228 - DNA, 25 bp, Homo sapien
cgacgtcgggcctacgcgaggtctt

SEQ ID NO: 13229 - DNA, 25 bp, Homo sapien
tcggaccgggtctccgtcgatccgt

SEQ ID NO: 13230 - DNA, 25 bp, Homo sapien
tcggaccgggtcaccgtcgatccgt

SEQ ID NO: 13231 - DNA, 25 bp, Homo sapien
tttgcagagcaactgtcgagtctcg

SEQ ID NO: 13232 - DNA, 25 bp, Homo sapien
tttgcagagcaagtgtcgagtctcg

SEQ ID NO: 13233 - DNA, 25 bp, Homo sapien
tacccaaggacgaatctacggtccg

SEQ ID NO: 13234 - DNA, 25 bp, Homo sapien
tacccaaggacgtatctacggtccg

SEQ ID NO: 13235 - DNA, 25 bp, Homo sapien
atctccgaccaacgactgaggtccg

SEQ ID NO: 13236 - DNA, 25 bp, Homo sapien
atctccgaccaaggactgaggtccg

SEQ ID NO: 13237 - DNA, 25 bp, Homo sapien
tgaatttgcaaattacttcggtaca

SEQ ID NO: 13238 - DNA, 25 bp, Homo sapien
tgaatttgcaaaatacttcggtaca

SEQ ID NO: 13239 - DNA, 25 bp, Homo sapien
gtggaaacacgatagtctcttacac

SEQ ID NO: 13240 - DNA, 25 bp, Homo sapien
gtggaaacacgaaagtctcttacac

SEQ ID NO: 13241 - DNA, 25 bp, Homo sapien
cgtatggatggatataccagttatc

SEQ ID NO: 13242 - DNA, 25 bp, Homo sapien
cgtatggatggaaataccagttatc

SEQ ID NO: 13243 - DNA, 25 bp, Homo sapien
gggtgaagtcggaaagtcgcattcc

SEQ ID NO: 13244 - DNA, 25 bp, Homo sapien
gggtgaagtcggtaagtcgcattcc

SEQ ID NO: 13245 - DNA, 25 bp, Homo sapien
ggtcagatggtctcatcgtttctaa

SEQ ID NO: 13246 - DNA, 25 bp, Homo sapien
ggtcagatggtcacatcgtttctaa

SEQ ID NO: 13247 - DNA, 25 bp, Homo sapien
tgtcgttgattgtcgaacctttaca

SEQ ID NO: 13248 - DNA, 25 bp, Homo sapien
tgtcgttgattgacgaacctttaca

SEQ ID NO: 13249 - DNA, 25 bp, Homo sapien
acgtctcagggtagcgtatgtagcg

SEQ ID NO: 13250 - DNA, 25 bp, Homo sapien
acgtctcagggttgcgtatgtagcg

SEQ ID NO: 13251 - DNA, 25 bp, Homo sapien
cgacttcattgttaacgtacttcgg

SEQ ID NO: 13252 - DNA, 25 bp, Homo sapien
cgacttcattgtaaacgtacttcgg

SEQ ID NO: 13253 - DNA, 25 bp, Homo sapien
caacaagtgtgtaaatactgtcgtc

SEQ ID NO: 13254 - DNA, 25 bp, Homo sapien
caacaagtgtgttaatactgtcgtc

SEQ ID NO: 13255 - DNA, 25 bp, Homo sapien
aggtagaatgtaggtgttctaccac

SEQ ID NO: 13256 - DNA, 25 bp, Homo sapien
aggtagaatgtacgtgttctaccac

SEQ ID NO: 13257 - DNA, 25 bp, Homo sapien
tggagtcgacccacattctccgact

SEQ ID NO: 13258 - DNA, 25 bp, Homo sapien
tggagtcgaccctcattctccgact

SEQ ID NO: 13259 - DNA, 25 bp, Homo sapien
acccaggaacgactcgaaaccctag

SEQ ID NO: 13260 - DNA, 25 bp, Homo sapien
acccaggaacgagtcgaaaccctag

SEQ ID NO: 13261 - DNA, 25 bp, Homo sapien
cgaccgaacgaaagaggaatccctg

SEQ ID NO: 13262 - DNA, 25 bp, Homo sapien
cgaccgaacgaatgaggaatccctg

SEQ ID NO: 13263 - DNA, 25 bp, Homo sapien
aacccgacgaaacacaaagactgta

SEQ ID NO: 13264 - DNA, 25 bp, Homo sapien
aacccgacgaaagacaaagactgta

SEQ ID NO: 13265 - DNA, 25 bp, Homo sapien
caggaccaggggtccaaaacgtccg

SEQ ID NO: 13266 - DNA, 25 bp, Homo sapien
caggaccaggggaccaaaacgtccg

SEQ ID NO: 13267 - DNA, 25 bp, Homo sapien
tgagtagggtctctctgtcgaccgg

SEQ ID NO: 13268 - DNA, 25 bp, Homo sapien
tgagtagggtctgtctgtcgaccgg

SEQ ID NO: 13269 - DNA, 25 bp, Homo sapien
cgaggggtctcgtcccgcagtacgt

SEQ ID NO: 13270 - DNA, 25 bp, Homo sapien
cgaggggtctcgacccgcagtacgt

SEQ ID NO: 13271 - DNA, 25 bp, Homo sapien
taagggtagaggtccgtggtcccta

SEQ ID NO: 13272 - DNA, 25 bp, Homo sapien
taagggtagaggaccgtggtcccta

SEQ ID NO: 13273 - DNA, 25 bp, Homo sapien
gcggtcgagaactcggacgtgtccc

SEQ ID NO: 13274 - DNA, 25 bp, Homo sapien
gcggtcgagaacacggacgtgtccc

SEQ ID NO: 13275 - DNA, 25 bp, Homo sapien
gcggcaggaacgacaacgtgtgcta

SEQ ID NO: 13276 - DNA, 25 bp, Homo sapien
gcggcaggaacgtcaacgtgtgcta

SEQ ID NO: 13277 - DNA, 25 bp, Homo sapien
gcgacgccgggttatatcggtcgtc

SEQ ID NO: 13278 - DNA, 25 bp, Homo sapien
gcgacgccgggtaatatcggtcgtc

SEQ ID NO: 13279 - DNA, 25 bp, Homo sapien
gattcggtccaggaaaccgttactc

SEQ ID NO: 13280 - DNA, 25 bp, Homo sapien
gattcggtccagcaaaccgttactc

SEQ ID NO: 13281 - DNA, 25 bp, Homo sapien
gatttctttcggtaggcgacgatcc

SEQ ID NO: 13282 - DNA, 25 bp, Homo sapien
gatttctttcggaaggcgacgatcc

SEQ ID NO: 13283 - DNA, 25 bp, Homo sapien
acaagtgttaatgttacggatttcc

SEQ ID NO: 13284 - DNA, 25 bp, Homo sapien
acaagtgttaatcttacggatttcc

SEQ ID NO: 13285 - DNA, 25 bp, Homo sapien
tgtcaggtcgacaccaaataaacca

SEQ ID NO: 13286 - DNA, 25 bp, Homo sapien
tgtcaggtcgactccaaataaacca

SEQ ID NO: 13287 - DNA, 25 bp, Homo sapien
gtgtcgagatacacaagacagaccc

SEQ ID NO: 13288 - DNA, 25 bp, Homo sapien
gtgtcgagatactcaagacagaccc

SEQ ID NO: 13289 - DNA, 25 bp, Homo sapien
gtgtagtgacatgatactaacctga

SEQ ID NO: 13290 - DNA, 25 bp, Homo sapien
gtgtagtgacatcatactaacctga

SEQ ID NO: 13291 - DNA, 25 bp, Homo sapien
aggatagttacagtaaaactaacac

SEQ ID NO: 13292 - DNA, 25 bp, Homo sapien
aggatagttacactaaaactaacac

SEQ ID NO: 13293 - DNA, 25 bp, Homo sapien
agagttcggtctggagctaacagaa

SEQ ID NO: 13294 - DNA, 25 bp, Homo sapien
agagttcggtctcgagctaacagaa

SEQ ID NO: 13295 - DNA, 25 bp, Homo sapien
gaccccttggtttgaccttaaatgt

SEQ ID NO: 13296 - DNA, 25 bp, Homo sapien
gaccccttggttagaccttaaatgt

SEQ ID NO: 13297 - DNA, 25 bp, Homo sapien
tatcattttccggtttacaaatatt

SEQ ID NO: 13298 - DNA, 25 bp, Homo sapien
tatcattttccgctttacaaatatt

SEQ ID NO: 13299 - DNA, 25 bp, Homo sapien
tattttgattgtacacgtgtaacac

SEQ ID NO: 13300 - DNA, 25 bp, Homo sapien
tattttgattgttcacgtgtaacac

SEQ ID NO: 13301 - DNA, 25 bp, Homo sapien
gaagtatgttagtggcatactcgtc

SEQ ID NO: 13302 - DNA, 25 bp, Homo sapien
gaagtatgttagaggcatactcgtc

SEQ ID NO: 13303 - DNA, 25 bp, Homo sapien
acaaggtgtgacgttgtaaagtctc

SEQ ID NO: 13304 - DNA, 25 bp, Homo sapien
acaaggtgtgaccttgtaaagtctc

SEQ ID NO: 13305 - DNA, 25 bp, Homo sapien
aggtgtgcgttctgacgttgaagtc

SEQ ID NO: 13306 - DNA, 25 bp, Homo sapien
aggtgtgcgttcagacgttgaagtc

SEQ ID NO: 13307 - DNA, 25 bp, Homo sapien
cacgttgtgctttatgttttatacg

SEQ ID NO: 13308 - DNA, 25 bp, Homo sapien
cacgttgtgcttaatgttttatacg

SEQ ID NO: 13309 - DNA, 25 bp, Homo sapien
cactacagatgtatcttctgcttag

SEQ ID NO: 13310 - DNA, 25 bp, Homo sapien
cactacagatgtttcttctgcttag

SEQ ID NO: 13311 - DNA, 25 bp, Homo sapien
acaccactactataacggcattttg

SEQ ID NO: 13312 - DNA, 25 bp, Homo sapien
acaccactactaaaacggcattttg

SEQ ID NO: 13313 - DNA, 25 bp, Homo sapien
ccgtcctagctgcgcgaagacatac

SEQ ID NO: 13314 - DNA, 25 bp, Homo sapien
ccgtcctagctgggcgaagacatac

SEQ ID NO: 13315 - DNA, 25 bp, Homo sapien
gacgtcgtcatcacatagtaaacgt

SEQ ID NO: 13316 - DNA, 25 bp, Homo sapien
gacgtcgtcatctcatagtaaacgt

SEQ ID NO: 13317 - DNA, 25 bp, Homo sapien
ctcttcgtctcttcggtttagatga

SEQ ID NO: 13318 - DNA, 25 bp, Homo sapien
ctcttcgtctctacggtttagatga

SEQ ID NO: 13319 - DNA, 25 bp, Homo sapien
cttatggtcgaaggtcgtacaggaa

SEQ ID NO: 13320 - DNA, 25 bp, Homo sapien
cttatggtcgaacgtcgtacaggaa

SEQ ID NO: 13321 - DNA, 25 bp, Homo sapien
actgtgttctagtacaacaagaagt

SEQ ID NO: 13322 - DNA, 25 bp, Homo sapien
actgtgttctagaacaacaagaagt

SEQ ID NO: 13323 - DNA, 25 bp, Homo sapien
tcatgaggtgtccacaaaactatgt

SEQ ID NO: 13324 - DNA, 25 bp, Homo sapien
tcatgaggtgtcgacaaaactatgt

SEQ ID NO: 13325 - DNA, 25 bp, Homo sapien
acatgggtgagtagtaactccagac

SEQ ID NO: 13326 - DNA, 25 bp, Homo sapien
acatgggtgagttgtaactccagac

SEQ ID NO: 13327 - DNA, 25 bp, Homo sapien
agtgacgggtagacactgtacccga

SEQ ID NO: 13328 - DNA, 25 bp, Homo sapien
agtgacgggtagtcactgtacccga

SEQ ID NO: 13329 - DNA, 25 bp, Homo sapien
agtaattggtgttactgtcaccgtc

SEQ ID NO: 13330 - DNA, 25 bp, Homo sapien
agtaattggtgtaactgtcaccgtc

SEQ ID NO: 13331 - DNA, 25 bp, Homo sapien
agtctactctgaggttttccggtat

SEQ ID NO: 13332 - DNA, 25 bp, Homo sapien
agtctactctgacgttttccggtat

SEQ ID NO: 13333 - DNA, 25 bp, Homo sapien
caacgtatacggatgaagttttctt

SEQ ID NO: 13334 - DNA, 25 bp, Homo sapien
caacgtatacggttgaagttttctt

SEQ ID NO: 13335 - DNA, 25 bp, Homo sapien
cgacttaggtctcacctttctgtct

SEQ ID NO: 13336 - DNA, 25 bp, Homo sapien
cgacttaggtctgacctttctgtct

SEQ ID NO: 13337 - DNA, 25 bp, Homo sapien
gacgaggagcgctcgcaggtactcc

SEQ ID NO: 13338 - DNA, 25 bp, Homo sapien
gacgaggagcgcacgcaggtactcc

SEQ ID NO: 13339 - DNA, 25 bp, Homo sapien
cccacgagacggacccgagtctgta

SEQ ID NO: 13340 - DNA, 25 bp, Homo sapien
cccacgagacggtcccgagtctgta

SEQ ID NO: 13341 - DNA, 25 bp, Homo sapien
ggtcgcgcacggtgtctcttccgat

SEQ ID NO: 13342 - DNA, 25 bp, Homo sapien
ggtcgcgcacggagtctcttccgat

SEQ ID NO: 13343 - DNA, 25 bp, Homo sapien
ttcgtgctcgacacgaactcctcga

SEQ ID NO: 13344 - DNA, 25 bp, Homo sapien
ttcgtgctcgactcgaactcctcga

SEQ ID NO: 13345 - DNA, 25 bp, Homo sapien
agtacggactgtctctacctcttca

SEQ ID NO: 13346 - DNA, 25 bp, Homo sapien
agtacggactgtgtctacctcttca

SEQ ID NO: 13347 - DNA, 25 bp, Homo sapien
acgagggagtcgttctgtcctagaa

SEQ ID NO: 13348 - DNA, 25 bp, Homo sapien
acgagggagtcgatctgtcctagaa

SEQ ID NO: 13349 - DNA, 25 bp, Homo sapien
agtcgttttagatcgttctctagaa

SEQ ID NO: 13350 - DNA, 25 bp, Homo sapien
agtcgttttagaacgttctctagaa

SEQ ID NO: 13351 - DNA, 25 bp, Homo sapien
gtcctattatacaatgactcagaga

SEQ ID NO: 13352 - DNA, 25 bp, Homo sapien
gtcctattatactatgactcagaga

SEQ ID NO: 13353 - DNA, 25 bp, Homo sapien
gaccacggtactaaatgacacacaa

SEQ ID NO: 13354 - DNA, 25 bp, Homo sapien
gaccacggtacttaatgacacacaa

SEQ ID NO: 13355 - DNA, 25 bp, Homo sapien
cactactcgtcttaattactataaa

SEQ ID NO: 13356 - DNA, 25 bp, Homo sapien
cactactcgtctaaattactataaa

SEQ ID NO: 13357 - DNA, 25 bp, Homo sapien
tcgagaaacgtaaaattgcgctacc

SEQ ID NO: 13358 - DNA, 25 bp, Homo sapien
tcgagaaacgtataattgcgctacc

SEQ ID NO: 13359 - DNA, 25 bp, Homo sapien
gaccttaactattttagtggaccct

SEQ ID NO: 13360 - DNA, 25 bp, Homo sapien
gaccttaactatattagtggaccct

SEQ ID NO: 13361 - DNA, 25 bp, Homo sapien
ctacacgacgacaaaagtcgaccac

SEQ ID NO: 13362 - DNA, 25 bp, Homo sapien
ctacacgacgactaaagtcgaccac

SEQ ID NO: 13363 - DNA, 25 bp, Homo sapien
agacatcacggtcactatcttgact

SEQ ID NO: 13364 - DNA, 25 bp, Homo sapien
agacatcacggtgactatcttgact

SEQ ID NO: 13365 - DNA, 25 bp, Homo sapien
gatcgtatcgactttagagtttcga

SEQ ID NO: 13366 - DNA, 25 bp, Homo sapien
gatcgtatcgacattagagtttcga

SEQ ID NO: 13367 - DNA, 25 bp, Homo sapien
gagtctcgtgtcttcatgtggcgac

SEQ ID NO: 13368 - DNA, 25 bp, Homo sapien
gagtctcgtgtcatcatgtggcgac

SEQ ID NO: 13369 - DNA, 25 bp, Homo sapien
tgacctcgagtcctctttcgaggag

SEQ ID NO: 13370 - DNA, 25 bp, Homo sapien
tgacctcgagtcgtctttcgaggag

SEQ ID NO: 13371 - DNA, 25 bp, Homo sapien
gtactattatctttcgttggtcggt

SEQ ID NO: 13372 - DNA, 25 bp, Homo sapien
gtactattatctatcgttggtcggt

SEQ ID NO: 13373 - DNA, 25 bp, Homo sapien
ggttgatgttcgtcgtcgtttcggt

SEQ ID NO: 13374 - DNA, 25 bp, Homo sapien
ggttgatgttcgacgtcgtttcggt

SEQ ID NO: 13375 - DNA, 25 bp, Homo sapien
gataataggtcacctcgtattaaca

SEQ ID NO: 13376 - DNA, 25 bp, Homo sapien
gataataggtcagctcgtattaaca

SEQ ID NO: 13377 - DNA, 25 bp, Homo sapien
tagtgtcgagtcgtaggtgtgtccc

SEQ ID NO: 13378 - DNA, 25 bp, Homo sapien
tagtgtcgagtcctaggtgtgtccc

SEQ ID NO: 13379 - DNA, 25 bp, Homo sapien
gtacacgagtaggtaggagcccact

SEQ ID NO: 13380 - DNA, 25 bp, Homo sapien
gtacacgagtagctaggagcccact

SEQ ID NO: 13381 - DNA, 25 bp, Homo sapien
acgtggaggtacctggagtcctaag

SEQ ID NO: 13382 - DNA, 25 bp, Homo sapien
acgtggaggtacgtggagtcctaag

SEQ ID NO: 13383 - DNA, 25 bp, Homo sapien
gtacctggagatgtaaatacactta

SEQ ID NO: 13384 - DNA, 25 bp, Homo sapien
gtacctggagatctaaatacactta

SEQ ID NO: 13385 - DNA, 25 bp, Homo sapien
tacagtgacaatctcggtagtttta

SEQ ID NO: 13386 - DNA, 25 bp, Homo sapien
tacagtgacaatgtcggtagtttta

SEQ ID NO: 13387 - DNA, 25 bp, Homo sapien
ttacggtgaattcagtcaatttcac

SEQ ID NO: 13388 - DNA, 25 bp, Homo sapien
ttacggtgaattgagtcaatttcac

SEQ ID NO: 13389 - DNA, 25 bp, Homo sapien
tactgttgtattgtcccttcggtag

SEQ ID NO: 13390 - DNA, 25 bp, Homo sapien
tactgttgtattctcccttcggtag

SEQ ID NO: 13391 - DNA, 25 bp, Homo sapien
ctctcgtgttacgtgcatgtcttag

SEQ ID NO: 13392 - DNA, 25 bp, Homo sapien
ctctcgtgttacctgcatgtcttag

SEQ ID NO: 13393 - DNA, 25 bp, Homo sapien
ccattattagtgatctgtactctcg

SEQ ID NO: 13394 - DNA, 25 bp, Homo sapien
ccattattagtgttctgtactctcg

SEQ ID NO: 13395 - DNA, 25 bp, Homo sapien
tcgccatgtactatgtctttatctg

SEQ ID NO: 13396 - DNA, 25 bp, Homo sapien
tcgccatgtactttgtctttatctg

SEQ ID NO: 13397 - DNA, 25 bp, Homo sapien
tacacctcttaagtcgtgtttttcg

SEQ ID NO: 13398 - DNA, 25 bp, Homo sapien
tacacctcttaactcgtgtttttcg

SEQ ID NO: 13399 - DNA, 25 bp, Homo sapien
taaatctcctatggtgtggttattc

SEQ ID NO: 13400 - DNA, 25 bp, Homo sapien
taaatctcctatcgtgtggttattc

SEQ ID NO: 13401 - DNA, 25 bp, Homo sapien
attcttgtttgtcttgggtacagac

SEQ ID NO: 13402 - DNA, 25 bp, Homo sapien
attcttgtttgtgttgggtacagac

SEQ ID NO: 13403 - DNA, 25 bp, Homo sapien
ttacgggtcgaattacgccgacaac

SEQ ID NO: 13404 - DNA, 25 bp, Homo sapien
ttacgggtcgaaatacgccgacaac

SEQ ID NO: 13405 - DNA, 25 bp, Homo sapien
tttccgtagtctgtaacgaacagta

SEQ ID NO: 13406 - DNA, 25 bp, Homo sapien
tttccgtagtctctaacgaacagta

SEQ ID NO: 13407 - DNA, 25 bp, Homo sapien
ttgtctactttgttgtaaacgactt

SEQ ID NO: 13408 - DNA, 25 bp, Homo sapien
ttgtctactttgatgtaaacgactt

SEQ ID NO: 13409 - DNA, 25 bp, Homo sapien
tccgtacatctgtagtcggactctc

SEQ ID NO: 13410 - DNA, 25 bp, Homo sapien
tccgtacatctgaagtcggactctc

SEQ ID NO: 13411 - DNA, 25 bp, Homo sapien
ctttatagtaactagtgtcggccta

SEQ ID NO: 13412 - DNA, 25 bp, Homo sapien
ctttatagtaacaagtgtcggccta

SEQ ID NO: 13413 - DNA, 25 bp, Homo sapien
caagaagtgagaagaaccgaccgag

SEQ ID NO: 13414 - DNA, 25 bp, Homo sapien
caagaagtgagatgaaccgaccgag

SEQ ID NO: 13415 - DNA, 25 bp, Homo sapien
gaacgagaacggaagaaccgaaact

SEQ ID NO: 13416 - DNA, 25 bp, Homo sapien
gaacgagaacggtagaaccgaaact

SEQ ID NO: 13417 - DNA, 25 bp, Homo sapien
acaaaaactctggactctgaggtcg

SEQ ID NO: 13418 - DNA, 25 bp, Homo sapien
acaaaaactctgcactctgaggtcg

SEQ ID NO: 13419 - DNA, 25 bp, Homo sapien
aaaacgtctgttacgactcgtttag

SEQ ID NO: 13420 - DNA, 25 bp, Homo sapien
aaaacgtctgtttcgactcgtttag

SEQ ID NO: 13421 - DNA, 25 bp, Homo sapien
ttcgaggggtcttatgtctccttat

SEQ ID NO: 13422 - DNA, 25 bp, Homo sapien
ttcgaggggtctaatgtctccttat

SEQ ID NO: 13423 - DNA, 25 bp, Homo sapien
agcgaaggtagtcgtccacctctct

SEQ ID NO: 13424 - DNA, 25 bp, Homo sapien
agcgaaggtagtggtccacctctct

SEQ ID NO: 13425 - DNA, 25 bp, Homo sapien
cactagagagggagtccggcctact

SEQ ID NO: 13426 - DNA, 25 bp, Homo sapien
cactagagagggtgtccggcctact

SEQ ID NO: 13427 - DNA, 25 bp, Homo sapien
gtgggtgacactggagactccgact

SEQ ID NO: 13428 - DNA, 25 bp, Homo sapien
gtgggtgacactcgagactccgact

SEQ ID NO: 13429 - DNA, 25 bp, Homo sapien
gacgacggcgagtttgtcgtcccac

SEQ ID NO: 13430 - DNA, 25 bp, Homo sapien
gacgacggcgagattgtcgtcccac

SEQ ID NO: 13431 - DNA, 25 bp, Homo sapien
cagtgtccgatatgtcgacgaagct

SEQ ID NO: 13432 - DNA, 25 bp, Homo sapien
cagtgtccgataagtcgacgaagct

SEQ ID NO: 13433 - DNA, 25 bp, Homo sapien
cctgtcgaccgagatacacgaaacg

SEQ ID NO: 13434 - DNA, 25 bp, Homo sapien
cctgtcgaccgacatacacgaaacg

SEQ ID NO: 13435 - DNA, 25 bp, Homo sapien
aggaagtacactaggctcgaacccc

SEQ ID NO: 13436 - DNA, 25 bp, Homo sapien
aggaagtacacttggctcgaacccc

SEQ ID NO: 13437 - DNA, 25 bp, Homo sapien
agagaccaacgtctcgaccgtccgc

SEQ ID NO: 13438 - DNA, 25 bp, Homo sapien
agagaccaacgtgtcgaccgtccgc

SEQ ID NO: 13439 - DNA, 25 bp, Homo sapien
tgaaccgaagaagacgaagctacct

SEQ ID NO: 13440 - DNA, 25 bp, Homo sapien
tgaaccgaagaacacgaagctacct

SEQ ID NO: 13441 - DNA, 25 bp, Homo sapien
aagacggagtcgagttgaagttctc

SEQ ID NO: 13442 - DNA, 25 bp, Homo sapien
aagacggagtcgtgttgaagttctc

SEQ ID NO: 13443 - DNA, 25 bp, Homo sapien
cagtataggtattccggagacgacc

SEQ ID NO: 13444 - DNA, 25 bp, Homo sapien
cagtataggtataccggagacgacc

SEQ ID NO: 13445 - DNA, 25 bp, Homo sapien
gtggtatcgtgattgggtacgaccc

SEQ ID NO: 13446 - DNA, 25 bp, Homo sapien
gtggtatcgtgaatgggtacgaccc

SEQ ID NO: 13447 - DNA, 25 bp, Homo sapien
gtctgtgacgagacggaagagtcca

SEQ ID NO: 13448 - DNA, 25 bp, Homo sapien
gtctgtgacgagtcggaagagtcca

SEQ ID NO: 13449 - DNA, 25 bp, Homo sapien
aaggagtcatcgaacagactctcac

SEQ ID NO: 13450 - DNA, 25 bp, Homo sapien
aaggagtcatcgtacagactctcac

SEQ ID NO: 13451 - DNA, 25 bp, Homo sapien
gatccaggaagttagaggacctcga

SEQ ID NO: 13452 - DNA, 25 bp, Homo sapien
gatccaggaagtaagaggacctcga

SEQ ID NO: 13453 - DNA, 25 bp, Homo sapien
ctgttgactgtgaagtgagactaca

SEQ ID NO: 13454 - DNA, 25 bp, Homo sapien
ctgttgactgtgtagtgagactaca

SEQ ID NO: 13455 - DNA, 25 bp, Homo sapien
ccactttacttgtcggtagttacga

SEQ ID NO: 13456 - DNA, 25 bp, Homo sapien
ccactttacttgacggtagttacga

SEQ ID NO: 13457 - DNA, 25 bp, Homo sapien
acggtttactgctagtgacagtaga

SEQ ID NO: 13458 - DNA, 25 bp, Homo sapien
acggtttactgcaagtgacagtaga

SEQ ID NO: 13459 - DNA, 25 bp, Homo sapien
actgtccgtcgtttccacgaaaagg

SEQ ID NO: 13460 - DNA, 25 bp, Homo sapien
actgtccgtcgtatccacgaaaagg

SEQ ID NO: 13461 - DNA, 25 bp, Homo sapien
attctgtgttatcacaagttaagtc

SEQ ID NO: 13462 - DNA, 25 bp, Homo sapien
attctgtgttatgacaagttaagtc

SEQ ID NO: 13463 - DNA, 25 bp, Homo sapien
atttcgtgtgtgtcatgtgtcacaa

SEQ ID NO: 13464 - DNA, 25 bp, Homo sapien
atttcgtgtgtgacatgtgtcacaa

SEQ ID NO: 13465 - DNA, 25 bp, Homo sapien
tattgtcttgtcgaggttcagtatc

SEQ ID NO: 13466 - DNA, 25 bp, Homo sapien
tattgtcttgtccaggttcagtatc

SEQ ID NO: 13467 - DNA, 25 bp, Homo sapien
ttactgctcgtgtcgtttcaggtcc

SEQ ID NO: 13468 - DNA, 25 bp, Homo sapien
ttactgctcgtgacgtttcaggtcc

SEQ ID NO: 13469 - DNA, 25 bp, Homo sapien
ttcgttcttaagtttcacgtccacg

SEQ ID NO: 13470 - DNA, 25 bp, Homo sapien
ttcgttcttaagattcacgtccacg

SEQ ID NO: 13471 - DNA, 25 bp, Homo sapien
attattgatttaaggtgtcctatcc

SEQ ID NO: 13472 - DNA, 25 bp, Homo sapien
attattgatttatggtgtcctatcc

SEQ ID NO: 13473 - DNA, 25 bp, Homo sapien
tggtatgtatatcgatacaagtcac

SEQ ID NO: 13474 - DNA, 25 bp, Homo sapien
tggtatgtatatggatacaagtcac

SEQ ID NO: 13475 - DNA, 25 bp, Homo sapien
gagtaaggtacactcttccaccttt

SEQ ID NO: 13476 - DNA, 25 bp, Homo sapien
gagtaaggtacagtcttccaccttt

SEQ ID NO: 13477 - DNA, 25 bp, Homo sapien
ggttggtcacttcctcttaccgtcc

SEQ ID NO: 13478 - DNA, 25 bp, Homo sapien
ggttggtcacttgctcttaccgtcc

SEQ ID NO: 13479 - DNA, 25 bp, Homo sapien
gtgctgagtatgtactttttatctc

SEQ ID NO: 13480 - DNA, 25 bp, Homo sapien
gtgctgagtatgaactttttatctc

SEQ ID NO: 13481 - DNA, 25 bp, Homo sapien
ctggtgtcgtaattcttgttcgtct

SEQ ID NO: 13482 - DNA, 25 bp, Homo sapien
ctggtgtcgtaaatcttgttcgtct

SEQ ID NO: 13483 - DNA, 25 bp, Homo sapien
tttatttgtagactagtcgacatct

SEQ ID NO: 13484 - DNA, 25 bp, Homo sapien
tttatttgtagagtagtcgacatct

SEQ ID NO: 13485 - DNA, 25 bp, Homo sapien
ggacgtcttactaactttcagatct

SEQ ID NO: 13486 - DNA, 25 bp, Homo sapien
ggacgtcttacttactttcagatct

SEQ ID NO: 13487 - DNA, 25 bp, Homo sapien
tatagacgctattgacatctcaaag

SEQ ID NO: 13488 - DNA, 25 bp, Homo sapien
tatagacgctatagacatctcaaag

SEQ ID NO: 13489 - DNA, 25 bp, Homo sapien
ctattgtctgacgtcgttctaccag

SEQ ID NO: 13490 - DNA, 25 bp, Homo sapien
ctattgtctgacctcgttctaccag

SEQ ID NO: 13491 - DNA, 25 bp, Homo sapien
tctcttatgtatagaacccgtccag

SEQ ID NO: 13492 - DNA, 25 bp, Homo sapien
tctcttatgtattgaacccgtccag

SEQ ID NO: 13493 - DNA, 25 bp, Homo sapien
gattcttgatgtggtaacgagtcca

SEQ ID NO: 13494 - DNA, 25 bp, Homo sapien
gattcttgatgtcgtaacgagtcca

SEQ ID NO: 13495 - DNA, 25 bp, Homo sapien
actttaatacagttcgtggatgatc

SEQ ID NO: 13496 - DNA, 25 bp, Homo sapien
actttaatacagatcgtggatgatc

SEQ ID NO: 13497 - DNA, 25 bp, Homo sapien
ccatgaactacgactatacgagtgt

SEQ ID NO: 13498 - DNA, 25 bp, Homo sapien
ccatgaactacgtctatacgagtgt

SEQ ID NO: 13499 - DNA, 25 bp, Homo sapien
aagagacgcatgtaattcttcgagg

SEQ ID NO: 13500 - DNA, 25 bp, Homo sapien
aagagacgcatgaaattcttcgagg

SEQ ID NO: 13501 - DNA, 25 bp, Homo sapien
ccagtacgcataaattcttatcagg

SEQ ID NO: 13502 - DNA, 25 bp, Homo sapien
ccagtacgcatatattcttatcagg

SEQ ID NO: 13503 - DNA, 25 bp, Homo sapien
ccaaactgccataattctctcgagg

SEQ ID NO: 13504 - DNA, 25 bp, Homo sapien
ccaaactgccattattctctcgagg

SEQ ID NO: 13505 - DNA, 25 bp, Homo sapien
gacgtcactccacttactcttttgg

SEQ ID NO: 13506 - DNA, 25 bp, Homo sapien
gacgtcactccagttactcttttgg

SEQ ID NO: 13507 - DNA, 25 bp, Homo sapien
cgtcgtcccctttgaacacagatgc

SEQ ID NO: 13508 - DNA, 25 bp, Homo sapien
cgtcgtccccttagaacacagatgc

SEQ ID NO: 13509 - DNA, 25 bp, Homo sapien
gaggtccattttaccaaactagact

SEQ ID NO: 13510 - DNA, 25 bp, Homo sapien
gaggtccatttttccaaactagact

SEQ ID NO: 13511 - DNA, 25 bp, Homo sapien
ggaactttacgtgttccgaaggaga

SEQ ID NO: 13512 - DNA, 25 bp, Homo sapien
ggaactttacgtcttccgaaggaga

SEQ ID NO: 13513 - DNA, 25 bp, Homo sapien
aataggaaggttcgtgctgatacac

SEQ ID NO: 13514 - DNA, 25 bp, Homo sapien
aataggaaggttggtgctgatacac

SEQ ID NO: 13515 - DNA, 25 bp, Homo sapien
aatagttatcgacttcggttgatcc

SEQ ID NO: 13516 - DNA, 25 bp, Homo sapien
aatagttatcgagttcggttgatcc

SEQ ID NO: 13517 - DNA, 25 bp, Homo sapien
gcaaagatggattcttgtctgtcaa

SEQ ID NO: 13518 - DNA, 25 bp, Homo sapien
gcaaagatggatacttgtctgtcaa

SEQ ID NO: 13519 - DNA, 25 bp, Homo sapien
ccaagatccggtccttcgttctcaa

SEQ ID NO: 13520 - DNA, 25 bp, Homo sapien
ccaagatccggtgcttcgttctcaa

SEQ ID NO: 13521 - DNA, 25 bp, Homo sapien
catacccgacgttcccggtttcatg

SEQ ID NO: 13522 - DNA, 25 bp, Homo sapien
catacccgacgtacccggtttcatg

SEQ ID NO: 13523 - DNA, 25 bp, Homo sapien
actcgttcgacaaccccagggctag

SEQ ID NO: 13524 - DNA, 25 bp, Homo sapien
actcgttcgacatccccagggctag

SEQ ID NO: 13525 - DNA, 25 bp, Homo sapien
gacccgatcttggagcgacgacgac

SEQ ID NO: 13526 - DNA, 25 bp, Homo sapien
gacccgatcttgcagcgacgacgac

SEQ ID NO: 13527 - DNA, 25 bp, Homo sapien
cagatacgccagtggagtctcggcg

SEQ ID NO: 13528 - DNA, 25 bp, Homo sapien
cagatacgccagaggagtctcggcg

SEQ ID NO: 13529 - DNA, 25 bp, Homo sapien
aggaagagcacgacgaagaggtcac

SEQ ID NO: 13530 - DNA, 25 bp, Homo sapien
aggaagagcacgtcgaagaggtcac

SEQ ID NO: 13531 - DNA, 25 bp, Homo sapien
acgtggggtcaatccatgtagtcac

SEQ ID NO: 13532 - DNA, 25 bp, Homo sapien
acgtggggtcaaaccatgtagtcac

SEQ ID NO: 13533 - DNA, 25 bp, Homo sapien
agtgagtcgcgttccagggtcatca

SEQ ID NO: 13534 - DNA, 25 bp, Homo sapien
agtgagtcgcgtaccagggtcatca

SEQ ID NO: 13535 - DNA, 25 bp, Homo sapien
ttgtagtccactaagaactcatgat

SEQ ID NO: 13536 - DNA, 25 bp, Homo sapien
ttgtagtccacttagaactcatgat

SEQ ID NO: 13537 - DNA, 25 bp, Homo sapien
tggacgtacctttgcgacacacctt

SEQ ID NO: 13538 - DNA, 25 bp, Homo sapien
tggacgtaccttagcgacacacctt

SEQ ID NO: 13539 - DNA, 25 bp, Homo sapien
ttgtgtgtacgacttccacaaactc

SEQ ID NO: 13540 - DNA, 25 bp, Homo sapien
ttgtgtgtacgagttccacaaactc

SEQ ID NO: 13541 - DNA, 25 bp, Homo sapien
cgttttgtagactctacccaaagtc

SEQ ID NO: 13542 - DNA, 25 bp, Homo sapien
cgttttgtagacactacccaaagtc

SEQ ID NO: 13543 - DNA, 25 bp, Homo sapien
ttccagatcctaatatcctgcgacg

SEQ ID NO: 13544 - DNA, 25 bp, Homo sapien
ttccagatcctattatcctgcgacg

SEQ ID NO: 13545 - DNA, 25 bp, Homo sapien
gaacagatagacaagatcctagaag

SEQ ID NO: 13546 - DNA, 25 bp, Homo sapien
gaacagatagactagatcctagaag

SEQ ID NO: 13547 - DNA, 25 bp, Homo sapien
gacagaagtgtccaatacctaatgt

SEQ ID NO: 13548 - DNA, 25 bp, Homo sapien
gacagaagtgtcgaatacctaatgt

SEQ ID NO: 13549 - DNA, 25 bp, Homo sapien
tgaagaggatcgaaaatacaaaccg

SEQ ID NO: 13550 - DNA, 25 bp, Homo sapien
tgaagaggatcgtaaatacaaaccg

SEQ ID NO: 13551 - DNA, 25 bp, Homo sapien
cttagagtgtctcagacacacaaac

SEQ ID NO: 13552 - DNA, 25 bp, Homo sapien
cttagagtgtctgagacacacaaac

SEQ ID NO: 13553 - DNA, 25 bp, Homo sapien
gtaaaagtcaagaacacgtcgaaag

SEQ ID NO: 13554 - DNA, 25 bp, Homo sapien
gtaaaagtcaagtacacgtcgaaag

SEQ ID NO: 13555 - DNA, 25 bp, Homo sapien
ttgaaggacgaaccactaccagccg

SEQ ID NO: 13556 - DNA, 25 bp, Homo sapien
ttgaaggacgaagcactaccagccg

SEQ ID NO: 13557 - DNA, 25 bp, Homo sapien
ctattagagacaaacgacccaaccg

SEQ ID NO: 13558 - DNA, 25 bp, Homo sapien
ctattagagacatacgacccaaccg

SEQ ID NO: 13559 - DNA, 25 bp, Homo sapien
gaagagtgtagaaataacctttccg

SEQ ID NO: 13560 - DNA, 25 bp, Homo sapien
gaagagtgtagatataacctttccg

SEQ ID NO: 13561 - DNA, 25 bp, Homo sapien
gggtgtacaaataaagtaccttctg

SEQ ID NO: 13562 - DNA, 25 bp, Homo sapien
gggtgtacaaattaagtaccttctg

SEQ ID NO: 13563 - DNA, 25 bp, Homo sapien
gggcacctacacttagtgattcttg

SEQ ID NO: 13564 - DNA, 25 bp, Homo sapien
gggcacctacacatagtgattcttg

SEQ ID NO: 13565 - DNA, 25 bp, Homo sapien
tcggagccctcagatccggacgcta

SEQ ID NO: 13566 - DNA, 25 bp, Homo sapien
tcggagccctcacatccggacgcta

SEQ ID NO: 13567 - DNA, 25 bp, Homo sapien
tccaagacacgactgttgaagcacg

SEQ ID NO: 13568 - DNA, 25 bp, Homo sapien
tccaagacacgagtgttgaagcacg

SEQ ID NO: 13569 - DNA, 25 bp, Homo sapien
agtacgaaagtcgtacgaagtctct

SEQ ID NO: 13570 - DNA, 25 bp, Homo sapien
agtacgaaagtcctacgaagtctct

SEQ ID NO: 13571 - DNA, 25 bp, Homo sapien
atagtcggtcagagagtactagtca

SEQ ID NO: 13572 - DNA, 25 bp, Homo sapien
atagtcggtcagtgagtactagtca

SEQ ID NO: 13573 - DNA, 25 bp, Homo sapien
aagaagacgtccacagagaccaccc

SEQ ID NO: 13574 - DNA, 25 bp, Homo sapien
aagaagacgtcctcagagaccaccc

SEQ ID NO: 13575 - DNA, 25 bp, Homo sapien
caagaagccggaagaagagatccct

SEQ ID NO: 13576 - DNA, 25 bp, Homo sapien
caagaagccggatgaagagatccct

SEQ ID NO: 13577 - DNA, 25 bp, Homo sapien
cccaaagtcaggacgaagatgtccc

SEQ ID NO: 13578 - DNA, 25 bp, Homo sapien
cccaaagtcaggtcgaagatgtccc

SEQ ID NO: 13579 - DNA, 25 bp, Homo sapien
acagaaggggtacctcttttactcc

SEQ ID NO: 13580 - DNA, 25 bp, Homo sapien
acagaaggggtagctcttttactcc

SEQ ID NO: 13581 - DNA, 25 bp, Homo sapien
agagaggaccgtatcagtggtaccc

SEQ ID NO: 13582 - DNA, 25 bp, Homo sapien
agagaggaccgtttcagtggtaccc

SEQ ID NO: 13583 - DNA, 25 bp, Homo sapien
agagcacacttgtctgtagtacccg

SEQ ID NO: 13584 - DNA, 25 bp, Homo sapien
agagcacacttgactgtagtacccg

SEQ ID NO: 13585 - DNA, 25 bp, Homo sapien
acgtccacttgtctacgtaggcggt

SEQ ID NO: 13586 - DNA, 25 bp, Homo sapien
acgtccacttgtgtacgtaggcggt

SEQ ID NO: 13587 - DNA, 25 bp, Homo sapien
aagtccactcttaatccgtgtgact

SEQ ID NO: 13588 - DNA, 25 bp, Homo sapien
aagtccactctttatccgtgtgact

SEQ ID NO: 13589 - DNA, 25 bp, Homo sapien
cgtagatcctcttttatctggtcat

SEQ ID NO: 13590 - DNA, 25 bp, Homo sapien
cgtagatcctctattatctggtcat

SEQ ID NO: 13591 - DNA, 25 bp, Homo sapien
agacggcacttgtcaggtcctccgt

SEQ ID NO: 13592 - DNA, 25 bp, Homo sapien
agacggcacttgacaggtcctccgt

SEQ ID NO: 13593 - DNA, 25 bp, Homo sapien
gaaggcatatttcatatacgttctc

SEQ ID NO: 13594 - DNA, 25 bp, Homo sapien
gaaggcatatttgatatacgttctc

SEQ ID NO: 13595 - DNA, 25 bp, Homo sapien
acaggggtcagtcgtacccgacagg

SEQ ID NO: 13596 - DNA, 25 bp, Homo sapien
acaggggtcagtggtacccgacagg

SEQ ID NO: 13597 - DNA, 25 bp, Homo sapien
cctaaagaatcgtagtctccagtat

SEQ ID NO: 13598 - DNA, 25 bp, Homo sapien
cctaaagaatcgaagtctccagtat

SEQ ID NO: 13599 - DNA, 25 bp, Homo sapien
ctccataactcctatcctctcatat

SEQ ID NO: 13600 - DNA, 25 bp, Homo sapien
ctccataactccaatcctctcatat

SEQ ID NO: 13601 - DNA, 25 bp, Homo sapien
tggtgaccactactacttctaccag

SEQ ID NO: 13602 - DNA, 25 bp, Homo sapien
tggtgaccactagtacttctaccag

SEQ ID NO: 13603 - DNA, 25 bp, Homo sapien
gtgtctagacccaggggtgtcactg

SEQ ID NO: 13604 - DNA, 25 bp, Homo sapien
gtgtctagaccctggggtgtcactg

SEQ ID NO: 13605 - DNA, 25 bp, Homo sapien
ttgtcgaccggtctgggttccgacc

SEQ ID NO: 13606 - DNA, 25 bp, Homo sapien
ttgtcgaccggtgtgggttccgacc

SEQ ID NO: 13607 - DNA, 25 bp, Homo sapien
aggtagacgtgtcaccggaacttgc

SEQ ID NO: 13608 - DNA, 25 bp, Homo sapien
aggtagacgtgtgaccggaacttgc

SEQ ID NO: 13609 - DNA, 25 bp, Homo sapien
tcgttttatccgaccaaacagagct

SEQ ID NO: 13610 - DNA, 25 bp, Homo sapien
tcgttttatccgtccaaacagagct

SEQ ID NO: 13611 - DNA, 25 bp, Homo sapien
tttctttccatggaggtcttaacgt

SEQ ID NO: 13612 - DNA, 25 bp, Homo sapien
tttctttccatgcaggtcttaacgt

SEQ ID NO: 13613 - DNA, 25 bp, Homo sapien
ttctttactttcgatggggttataa

SEQ ID NO: 13614 - DNA, 25 bp, Homo sapien
ttctttactttccatggggttataa

SEQ ID NO: 13615 - DNA, 25 bp, Homo sapien
tgttggtcctctgacgggtcttaga

SEQ ID NO: 13616 - DNA, 25 bp, Homo sapien
tgttggtcctctcacgggtcttaga

SEQ ID NO: 13617 - DNA, 25 bp, Homo sapien
ctttagtccatgaactgtttacaga

SEQ ID NO: 13618 - DNA, 25 bp, Homo sapien
ctttagtccatgtactgtttacaga

SEQ ID NO: 13619 - DNA, 25 bp, Homo sapien
ttaaactcccgttcctgtttggagt

SEQ ID NO: 13620 - DNA, 25 bp, Homo sapien
ttaaactcccgtacctgtttggagt

SEQ ID NO: 13621 - DNA, 25 bp, Homo sapien
gatgcggtcacactctgtgactaat

SEQ ID NO: 13622 - DNA, 25 bp, Homo sapien
gatgcggtcacagtctgtgactaat

SEQ ID NO: 13623 - DNA, 25 bp, Homo sapien
aggacattacacacgtagtcataat

SEQ ID NO: 13624 - DNA, 25 bp, Homo sapien
aggacattacactcgtagtcataat

SEQ ID NO: 13625 - DNA, 25 bp, Homo sapien
agtcgagacagaacccagtggacgg

SEQ ID NO: 13626 - DNA, 25 bp, Homo sapien
agtcgagacagatcccagtggacgg

SEQ ID NO: 13627 - DNA, 25 bp, Homo sapien
atacttcgaacttacttcgtccagg

SEQ ID NO: 13628 - DNA, 25 bp, Homo sapien
atacttcgaactaacttcgtccagg

SEQ ID NO: 13629 - DNA, 25 bp, Homo sapien
gtacttcgtaagtacttctttctgt

SEQ ID NO: 13630 - DNA, 25 bp, Homo sapien
gtacttcgtaagaacttctttctgt

SEQ ID NO: 13631 - DNA, 25 bp, Homo sapien
tgccaaaacctaaggcctcgtccag

SEQ ID NO: 13632 - DNA, 25 bp, Homo sapien
tgccaaaacctatggcctcgtccag

SEQ ID NO: 13633 - DNA, 25 bp, Homo sapien
acccggggatagagaccctagacac

SEQ ID NO: 13634 - DNA, 25 bp, Homo sapien
acccggggatagtgaccctagacac

SEQ ID NO: 13635 - DNA, 25 bp, Homo sapien
caaagggtcgagtggcctagtaccg

SEQ ID NO: 13636 - DNA, 25 bp, Homo sapien
caaagggtcgagaggcctagtaccg

SEQ ID NO: 13637 - DNA, 25 bp, Homo sapien
cgtaaaaaacgaaccgtggttacag

SEQ ID NO: 13638 - DNA, 25 bp, Homo sapien
cgtaaaaaacgatccgtggttacag

SEQ ID NO: 13639 - DNA, 25 bp, Homo sapien
atcgaaataaagtccgttcgtgtaa

SEQ ID NO: 13640 - DNA, 25 bp, Homo sapien
atcgaaataaagaccgttcgtgtaa

SEQ ID NO: 13641 - DNA, 25 bp, Homo sapien
gacttgtaaacgatgtacgtcatca

SEQ ID NO: 13642 - DNA, 25 bp, Homo sapien
gacttgtaaacgttgtacgtcatca

SEQ ID NO: 13643 - DNA, 25 bp, Homo sapien
cttccacagtggaggaactctattc

SEQ ID NO: 13644 - DNA, 25 bp, Homo sapien
cttccacagtggtggaactctattc

SEQ ID NO: 13645 - DNA, 25 bp, Homo sapien
cttccacatgagtcggtgaaccatc

SEQ ID NO: 13646 - DNA, 25 bp, Homo sapien
cttccacatgagacggtgaaccatc

SEQ ID NO: 13647 - DNA, 25 bp, Homo sapien
aacaacccaccgtggggaaccttct

SEQ ID NO: 13648 - DNA, 25 bp, Homo sapien
aacaacccaccgaggggaaccttct

SEQ ID NO: 13649 - DNA, 25 bp, Homo sapien
tcatacttccggtgcgtgtgtggcc

SEQ ID NO: 13650 - DNA, 25 bp, Homo sapien
tcatacttccggagcgtgtgtggcc

SEQ ID NO: 13651 - DNA, 25 bp, Homo sapien
ctattactccaatggagtcttacgt

SEQ ID NO: 13652 - DNA, 25 bp, Homo sapien
ctattactccaaaggagtcttacgt

SEQ ID NO: 13653 - DNA, 25 bp, Homo sapien
agaattcgagaatacgttcgtacgt

SEQ ID NO: 13654 - DNA, 25 bp, Homo sapien
agaattcgagaaaacgttcgtacgt

SEQ ID NO: 13655 - DNA, 25 bp, Homo sapien
ccgggtctttctcagactggtgtag

SEQ ID NO: 13656 - DNA, 25 bp, Homo sapien
ccgggtctttctgagactggtgtag

SEQ ID NO: 13657 - DNA, 25 bp, Homo sapien
tcggggcacactgagactgtctcga

SEQ ID NO: 13658 - DNA, 25 bp, Homo sapien
tcggggcacactcagactgtctcga

SEQ ID NO: 13659 - DNA, 25 bp, Homo sapien
ccttacggggtcttaggtcgtcagc

SEQ ID NO: 13660 - DNA, 25 bp, Homo sapien
ccttacggggtcataggtcgtcagc

SEQ ID NO: 13661 - DNA, 25 bp, Homo sapien
ccctacgagcgaggttggctgacga

SEQ ID NO: 13662 - DNA, 25 bp, Homo sapien
ccctacgagcgacgttggctgacga

SEQ ID NO: 13663 - DNA, 25 bp, Homo sapien
agttcaaagtcgtttacgaacaagg

SEQ ID NO: 13664 - DNA, 25 bp, Homo sapien
agttcaaagtcgattacgaacaagg

SEQ ID NO: 13665 - DNA, 25 bp, Homo sapien
cagtccaagaccatctcgaggagga

SEQ ID NO: 13666 - DNA, 25 bp, Homo sapien
cagtccaagaccttctcgaggagga

SEQ ID NO: 13667 - DNA, 25 bp, Homo sapien
actccgtatattttccgtggtgtga

SEQ ID NO: 13668 - DNA, 25 bp, Homo sapien
actccgtatattatccgtggtgtga

SEQ ID NO: 13669 - DNA, 25 bp, Homo sapien
accgacattttatcagttgtaccga

SEQ ID NO: 13670 - DNA, 25 bp, Homo sapien
accgacattttaacagttgtaccga

SEQ ID NO: 13671 - DNA, 25 bp, Homo sapien
cactcatttgtcgtagttgtgttaa

SEQ ID NO: 13672 - DNA, 25 bp, Homo sapien
cactcatttgtcctagttgtgttaa

SEQ ID NO: 13673 - DNA, 25 bp, Homo sapien
ctccgtagattcctaagttgttatt

SEQ ID NO: 13674 - DNA, 25 bp, Homo sapien
ctccgtagattcgtaagttgttatt

SEQ ID NO: 13675 - DNA, 25 bp, Homo sapien
caggcgagtggttacgagtcttttt

SEQ ID NO: 13676 - DNA, 25 bp, Homo sapien
caggcgagtggtaacgagtcttttt

SEQ ID NO: 13677 - DNA, 25 bp, Homo sapien
tcgaagagtctcgaaagatctcttt

SEQ ID NO: 13678 - DNA, 25 bp, Homo sapien
tcgaagagtctccaaagatctcttt

SEQ ID NO: 13679 - DNA, 25 bp, Homo sapien
tactaaagtcttttacaagtatttc

SEQ ID NO: 13680 - DNA, 25 bp, Homo sapien
tactaaagtcttatacaagtatttc

SEQ ID NO: 13681 - DNA, 25 bp, Homo sapien
aaatcacacattcgtaccaatggtg

SEQ ID NO: 13682 - DNA, 25 bp, Homo sapien
aaatcacacattggtaccaatggtg

SEQ ID NO: 13683 - DNA, 25 bp, Homo sapien
aaaacctccgtacgattctaaaggg

SEQ ID NO: 13684 - DNA, 25 bp, Homo sapien
aaaacctccgtaggattctaaaggg

SEQ ID NO: 13685 - DNA, 25 bp, Homo sapien
tacacttcaccgtcgtatcaagaga

SEQ ID NO: 13686 - DNA, 25 bp, Homo sapien
tacacttcaccgacgtatcaagaga

SEQ ID NO: 13687 - DNA, 25 bp, Homo sapien
cctagggtcctctcgtactcagggg

SEQ ID NO: 13688 - DNA, 25 bp, Homo sapien
cctagggtcctcacgtactcagggg

SEQ ID NO: 13689 - DNA, 25 bp, Homo sapien
cttcgtacgtccacgtccggagcgg

SEQ ID NO: 13690 - DNA, 25 bp, Homo sapien
cttcgtacgtcctcgtccggagcgg

SEQ ID NO: 13691 - DNA, 25 bp, Homo sapien
aactgtcctctcttccaaacgtgtt

SEQ ID NO: 13692 - DNA, 25 bp, Homo sapien
aactgtcctctcatccaaacgtgtt

SEQ ID NO: 13693 - DNA, 25 bp, Homo sapien
cacacttgggtctcaacatataacg

SEQ ID NO: 13694 - DNA, 25 bp, Homo sapien
cacacttgggtcacaacatataacg

SEQ ID NO: 13695 - DNA, 25 bp, Homo sapien
ctaaattcgggtgaccctgaaccac

SEQ ID NO: 13696 - DNA, 25 bp, Homo sapien
ctaaattcgggtcaccctgaaccac

SEQ ID NO: 13697 - DNA, 25 bp, Homo sapien
acaacttggggttcattgaacaggt

SEQ ID NO: 13698 - DNA, 25 bp, Homo sapien
acaacttggggtacattgaacaggt

SEQ ID NO: 13699 - DNA, 25 bp, Homo sapien
caaaaggcaccgaaataacacggcg

SEQ ID NO: 13700 - DNA, 25 bp, Homo sapien
caaaaggcaccgtaataacacggcg

SEQ ID NO: 13701 - DNA, 25 bp, Homo sapien
aaaaggttcagtttaagaacctcct

SEQ ID NO: 13702 - DNA, 25 bp, Homo sapien
aaaaggttcagtataagaacctcct

SEQ ID NO: 13703 - DNA, 25 bp, Homo sapien
tcaaaggttcagaggtcgaaatcta

SEQ ID NO: 13704 - DNA, 25 bp, Homo sapien
tcaaaggttcagtggtcgaaatcta

SEQ ID NO: 13705 - DNA, 25 bp, Homo sapien
cccaagtgcacgtggaactcctaca

SEQ ID NO: 13706 - DNA, 25 bp, Homo sapien
cccaagtgcacgaggaactcctaca

SEQ ID NO: 13707 - DNA, 25 bp, Homo sapien
ctaagaatctcctcggtaggacgag

SEQ ID NO: 13708 - DNA, 25 bp, Homo sapien
ctaagaatctccacggtaggacgag

SEQ ID NO: 13709 - DNA, 25 bp, Homo sapien
gagcttcgcgtgtagcgccatcaac

SEQ ID NO: 13710 - DNA, 25 bp, Homo sapien
gagcttcgcgtgaagcgccatcaac

SEQ ID NO: 13711 - DNA, 25 bp, Homo sapien
tcggtccaggaaaccgttactcctc

SEQ ID NO: 13712 - DNA, 25 bp, Homo sapien
tcggtccaggaatccgttactcctc

SEQ ID NO: 13713 - DNA, 25 bp, Homo sapien
actctaagaatctcctcggtaggac

SEQ ID NO: 13714 - DNA, 25 bp, Homo sapien
actctaagaatcacctcggtaggac

SEQ ID NO: 13715 - DNA, 25 bp, Homo sapien
tgtctgtccggttacctgtcccgac

SEQ ID NO: 13716 - DNA, 25 bp, Homo sapien
tgtctgtccggtaacctgtcccgac

SEQ ID NO: 13717 - DNA, 25 bp, Homo sapien
tctcgtccgggaacggcgcgcacgt

SEQ ID NO: 13718 - DNA, 25 bp, Homo sapien
tctcgtccgggatcggcgcgcacgt

SEQ ID NO: 13719 - DNA, 25 bp, Homo sapien
ctaccctagtctcagtttctcgaag

SEQ ID NO: 13720 - DNA, 25 bp, Homo sapien
ctaccctagtctgagtttctcgaag

SEQ ID NO: 13721 - DNA, 25 bp, Homo sapien
cgactccttctagagtttcggctcg

SEQ ID NO: 13722 - DNA, 25 bp, Homo sapien
cgactccttctacagtttcggctcg

SEQ ID NO: 13723 - DNA, 25 bp, Homo sapien
acgtcgcccctacttgtgtcggtcg

SEQ ID NO: 13724 - DNA, 25 bp, Homo sapien
acgtcgcccctagttgtgtcggtcg

SEQ ID NO: 13725 - DNA, 25 bp, Homo sapien
atcagcgacgagttacagttcttgt

SEQ ID NO: 13726 - DNA, 25 bp, Homo sapien
atcagcgacgagatacagttcttgt

SEQ ID NO: 13727 - DNA, 25 bp, Homo sapien
ccattatcaacttatacggtcgttg

SEQ ID NO: 13728 - DNA, 25 bp, Homo sapien
ccattatcaactaatacggtcgttg

SEQ ID NO: 13729 - DNA, 25 bp, Homo sapien
caactaggtcttcgacagggcctaa

SEQ ID NO: 13730 - DNA, 25 bp, Homo sapien
caactaggtcttggacagggcctaa

SEQ ID NO: 13731 - DNA, 25 bp, Homo sapien
caatcgtgaggattgagtcacgaat

SEQ ID NO: 13732 - DNA, 25 bp, Homo sapien
caatcgtgaggaatgagtcacgaat

SEQ ID NO: 13733 - DNA, 25 bp, Homo sapien
cggtgttacggactctattagatgt

SEQ ID NO: 13734 - DNA, 25 bp, Homo sapien
cggtgttacggagtctattagatgt

SEQ ID NO: 13735 - DNA, 25 bp, Homo sapien
aggaggtcacggacgaagtacaaga

SEQ ID NO: 13736 - DNA, 25 bp, Homo sapien
aggaggtcacggtcgaagtacaaga

SEQ ID NO: 13737 - DNA, 25 bp, Homo sapien
agactctcaccgtctaagtcagcga

SEQ ID NO: 13738 - DNA, 25 bp, Homo sapien
agactctcaccgactaagtcagcga

SEQ ID NO: 13739 - DNA, 25 bp, Homo sapien
cgaaggttccaggaaagaccactta

SEQ ID NO: 13740 - DNA, 25 bp, Homo sapien
cgaaggttccagcaaagaccactta

SEQ ID NO: 13741 - DNA, 25 bp, Homo sapien
aacgagtccactaccgaagaatttt

SEQ ID NO: 13742 - DNA, 25 bp, Homo sapien
aacgagtccacttccgaagaatttt

SEQ ID NO: 13743 - DNA, 25 bp, Homo sapien
agataaaatcatcgagacattcttg

SEQ ID NO: 13744 - DNA, 25 bp, Homo sapien
agataaaatcatggagacattcttg

SEQ ID NO: 13745 - DNA, 25 bp, Homo sapien
gccagttatagacaccgtccttttt

SEQ ID NO: 13746 - DNA, 25 bp, Homo sapien
gccagttatagagaccgtccttttt

SEQ ID NO: 13747 - DNA, 25 bp, Homo sapien
cgtcggtccctatgatggttctagt

SEQ ID NO: 13748 - DNA, 25 bp, Homo sapien
cgtcggtccctaagatggttctagt

SEQ ID NO: 13749 - DNA, 25 bp, Homo sapien
gtagtgttatcacgacttgtgtctt

SEQ ID NO: 13750 - DNA, 25 bp, Homo sapien
gtagtgttatcaggacttgtgtctt

SEQ ID NO: 13751 - DNA, 25 bp, Homo sapien
agtctgtgttcgtcattatgggtgc

SEQ ID NO: 13752 - DNA, 25 bp, Homo sapien
agtctgtgttcgacattatgggtgc

SEQ ID NO: 13753 - DNA, 25 bp, Homo sapien
tgagtcgtcgtctcccttcggtcaa

SEQ ID NO: 13754 - DNA, 25 bp, Homo sapien
tgagtcgtcgtcacccttcggtcaa

SEQ ID NO: 13755 - DNA, 25 bp, Homo sapien
ctgtcggtggacgacaactggtgaa

SEQ ID NO: 13756 - DNA, 25 bp, Homo sapien
ctgtcggtggaccacaactggtgaa

SEQ ID NO: 13757 - DNA, 25 bp, Homo sapien
aggtgttaccctcagttacttttaa

SEQ ID NO: 13758 - DNA, 25 bp, Homo sapien
aggtgttaccctgagttacttttaa

SEQ ID NO: 13759 - DNA, 25 bp, Homo sapien
ctggttcctgtccttcttcgttcac

SEQ ID NO: 13760 - DNA, 25 bp, Homo sapien
ctggttcctgtcgttcttcgttcac

SEQ ID NO: 13761 - DNA, 25 bp, Homo sapien
ggttccagttcttaccgtgttctag

SEQ ID NO: 13762 - DNA, 25 bp, Homo sapien
ggttccagttctaaccgtgttctag

SEQ ID NO: 13763 - DNA, 25 bp, Homo sapien
atgtctcacttattcaatgtatcta

SEQ ID NO: 13764 - DNA, 25 bp, Homo sapien
atgtctcacttaatcaatgtatcta

SEQ ID NO: 13765 - DNA, 25 bp, Homo sapien
ggttacgtcaaaacgatgccaatgt

SEQ ID NO: 13766 - DNA, 25 bp, Homo sapien
ggttacgtcaaatcgatgccaatgt

SEQ ID NO: 13767 - DNA, 25 bp, Homo sapien
gtaatccctctacgagtgaacaatg

SEQ ID NO: 13768 - DNA, 25 bp, Homo sapien
gtaatccctctaggagtgaacaatg

SEQ ID NO: 13769 - DNA, 25 bp, Homo sapien
ttaataccattgacgtccgacattg

SEQ ID NO: 13770 - DNA, 25 bp, Homo sapien
ttaataccattgtcgtccgacattg

SEQ ID NO: 13771 - DNA, 25 bp, Homo sapien
ttacgacagattttgtgtcgattta

SEQ ID NO: 13772 - DNA, 25 bp, Homo sapien
ttacgacagattatgtgtcgattta

SEQ ID NO: 13773 - DNA, 25 bp, Homo sapien
tattctaaagttcatttctatggta

SEQ ID NO: 13774 - DNA, 25 bp, Homo sapien
tattctaaagttgatttctatggta

SEQ ID NO: 13775 - DNA, 25 bp, Homo sapien
ttatatatgtgtctttcttcgagcg

SEQ ID NO: 13776 - DNA, 25 bp, Homo sapien
ttatatatgtgtgtttcttcgagcg

SEQ ID NO: 13777 - DNA, 25 bp, Homo sapien
tatgtatcttctctgtcataagggc

SEQ ID NO: 13778 - DNA, 25 bp, Homo sapien
tatgtatcttctgtgtcataagggc

SEQ ID NO: 13779 - DNA, 25 bp, Homo sapien
ggtcctggctgtccgagtagaagac

SEQ ID NO: 13780 - DNA, 25 bp, Homo sapien
ggtcctggctgtgcgagtagaagac

SEQ ID NO: 13781 - DNA, 25 bp, Homo sapien
tctaccggaaggtgttcagttcacc

SEQ ID NO: 13782 - DNA, 25 bp, Homo sapien
tctaccggaaggagttcagttcacc

SEQ ID NO: 13783 - DNA, 25 bp, Homo sapien
ctactggagaggtaactccttaccc

SEQ ID NO: 13784 - DNA, 25 bp, Homo sapien
ctactggagaggaaactccttaccc

SEQ ID NO: 13785 - DNA, 25 bp, Homo sapien
tttgacgtggataccgactctatcc

SEQ ID NO: 13786 - DNA, 25 bp, Homo sapien
tttgacgtggattccgactctatcc

SEQ ID NO: 13787 - DNA, 25 bp, Homo sapien
ttgtgtagaaatcctgtgtctattc

SEQ ID NO: 13788 - DNA, 25 bp, Homo sapien
ttgtgtagaaatgctgtgtctattc

SEQ ID NO: 13789 - DNA, 25 bp, Homo sapien
tgtctgaaataatctctagattacg

SEQ ID NO: 13790 - DNA, 25 bp, Homo sapien
tgtctgaaataaactctagattacg

SEQ ID NO: 13791 - DNA, 25 bp, Homo sapien
gtggtccgtggacgacacccctgtc

SEQ ID NO: 13792 - DNA, 25 bp, Homo sapien
gtggtccgtggaggacacccctgtc

SEQ ID NO: 13793 - DNA, 25 bp, Homo sapien
cctcagtccgggatgccaccgggat

SEQ ID NO: 13794 - DNA, 25 bp, Homo sapien
cctcagtccgggttgccaccgggat

SEQ ID NO: 13795 - DNA, 25 bp, Homo sapien
cccgggacgttctacagccggtcga

SEQ ID NO: 13796 - DNA, 25 bp, Homo sapien
cccgggacgttcaacagccggtcga

SEQ ID NO: 13797 - DNA, 25 bp, Homo sapien
gcgggcgctttacgcgcggtgacgg

SEQ ID NO: 13798 - DNA, 25 bp, Homo sapien
gcgggcgctttaggcgcggtgacgg

SEQ ID NO: 13799 - DNA, 25 bp, Homo sapien
agagattccctaaaacctgtaccgg

SEQ ID NO: 13800 - DNA, 25 bp, Homo sapien
agagattccctataacctgtaccgg

SEQ ID NO: 13801 - DNA, 25 bp, Homo sapien
aggatgtcaccagtacctgtggtgg

SEQ ID NO: 13802 - DNA, 25 bp, Homo sapien
aggatgtcaccactacctgtggtgg

SEQ ID NO: 13803 - DNA, 25 bp, Homo sapien
tgacatgagacgtcgagacgttagg

SEQ ID NO: 13804 - DNA, 25 bp, Homo sapien
tgacatgagacgacgagacgttagg

SEQ ID NO: 13805 - DNA, 25 bp, Homo sapien
aaggtcatgagtctatgacttactc

SEQ ID NO: 13806 - DNA, 25 bp, Homo sapien
aaggtcatgagtgtatgacttactc

SEQ ID NO: 13807 - DNA, 25 bp, Homo sapien
ttcaggtaagcgtggtcccggactg

SEQ ID NO: 13808 - DNA, 25 bp, Homo sapien
ttcaggtaagcgaggtcccggactg

SEQ ID NO: 13809 - DNA, 25 bp, Homo sapien
ggtagtaagacacttccgggtctcg

SEQ ID NO: 13810 - DNA, 25 bp, Homo sapien
ggtagtaagacagttccgggtctcg

SEQ ID NO: 13811 - DNA, 25 bp, Homo sapien
agtcgggatttaacagagggccttg

SEQ ID NO: 13812 - DNA, 25 bp, Homo sapien
agtcgggatttatcagagggccttg

SEQ ID NO: 13813 - DNA, 25 bp, Homo sapien
ataaagtcccgagtgatcggtcaag

SEQ ID NO: 13814 - DNA, 25 bp, Homo sapien
ataaagtcccgactgatcggtcaag

SEQ ID NO: 13815 - DNA, 25 bp, Homo sapien
aaaacgacccctattaccgctagag

SEQ ID NO: 13816 - DNA, 25 bp, Homo sapien
aaaacgaccccttttaccgctagag

SEQ ID NO: 13817 - DNA, 25 bp, Homo sapien
cgtcagactacctttcaagtgttaa

SEQ ID NO: 13818 - DNA, 25 bp, Homo sapien
cgtcagactaccattcaagtgttaa

SEQ ID NO: 13819 - DNA, 25 bp, Homo sapien
actcgtccccgacaggtactggaca

SEQ ID NO: 13820 - DNA, 25 bp, Homo sapien
actcgtccccgagaggtactggaca

SEQ ID NO: 13821 - DNA, 25 bp, Homo sapien
tcgccgattcacagttctcggctct

SEQ ID NO: 13822 - DNA, 25 bp, Homo sapien
tcgccgattcactgttctcggctct

SEQ ID NO: 13823 - DNA, 25 bp, Homo sapien
gcggccaatgtcttggtgtgagcct

SEQ ID NO: 13824 - DNA, 25 bp, Homo sapien
gcggccaatgtcatggtgtgagcct

SEQ ID NO: 13825 - DNA, 25 bp, Homo sapien
atggacatgtcgtagtcgggaccct

SEQ ID NO: 13826 - DNA, 25 bp, Homo sapien
atggacatgtcgaagtcgggaccct

SEQ ID NO: 13827 - DNA, 25 bp, Homo sapien
atttattgtcaccaagagggaccta

SEQ ID NO: 13828 - DNA, 25 bp, Homo sapien
atttattgtcacgaagagggaccta

SEQ ID NO: 13829 - DNA, 25 bp, Homo sapien
ttcaggttcaatggtaatgtaccga

SEQ ID NO: 13830 - DNA, 25 bp, Homo sapien
ttcaggttcaatcgtaatgtaccga

SEQ ID NO: 13831 - DNA, 25 bp, Homo sapien
atgaattcagggaagttcacgacga

SEQ ID NO: 13832 - DNA, 25 bp, Homo sapien
atgaattcagggtagttcacgacga

SEQ ID NO: 13833 - DNA, 25 bp, Homo sapien
tgggacttccggactgtctccgacg

SEQ ID NO: 13834 - DNA, 25 bp, Homo sapien
tgggacttccggtctgtctccgacg

SEQ ID NO: 13835 - DNA, 25 bp, Homo sapien
cggaccatccgaagctcgtcttcgg

SEQ ID NO: 13836 - DNA, 25 bp, Homo sapien
cggaccatccgatgctcgtcttcgg

SEQ ID NO: 13837 - DNA, 25 bp, Homo sapien
tgggacatcgtgatgtctcgcctcc

SEQ ID NO: 13838 - DNA, 25 bp, Homo sapien
tgggacatcgtgttgtctcgcctcc

SEQ ID NO: 13839 - DNA, 25 bp, Homo sapien
ggggtaagagggttcgtaccctcac

SEQ ID NO: 13840 - DNA, 25 bp, Homo sapien
ggggtaagagggatcgtaccctcac

SEQ ID NO: 13841 - DNA, 25 bp, Homo sapien
agaggaagacaactcatactctaga

SEQ ID NO: 13842 - DNA, 25 bp, Homo sapien
agaggaagacaagtcatactctaga

SEQ ID NO: 13843 - DNA, 25 bp, Homo sapien
cgtttagacgggtcgaaactactcc

SEQ ID NO: 13844 - DNA, 25 bp, Homo sapien
cgtttagacgggacgaaactactcc

SEQ ID NO: 13845 - DNA, 25 bp, Homo sapien
ccagcctaccgtcgaaatgtttgtt

SEQ ID NO: 13846 - DNA, 25 bp, Homo sapien
ccagcctaccgtggaaatgtttgtt

SEQ ID NO: 13847 - DNA, 25 bp, Homo sapien
gactaatatcaggaagacttctttt

SEQ ID NO: 13848 - DNA, 25 bp, Homo sapien
gactaatatcagcaagacttctttt

SEQ ID NO: 13849 - DNA, 25 bp, Homo sapien
aatgtcggtacatgtatttacgttc

SEQ ID NO: 13850 - DNA, 25 bp, Homo sapien
aatgtcggtacaagtatttacgttc

SEQ ID NO: 13851 - DNA, 25 bp, Homo sapien
gtctcgactagtactagttcaattt

SEQ ID NO: 13852 - DNA, 25 bp, Homo sapien
gtctcgactagttctagttcaattt

SEQ ID NO: 13853 - DNA, 25 bp, Homo sapien
tcggtcgtagtgctttgtcatacta

SEQ ID NO: 13854 - DNA, 25 bp, Homo sapien
tcggtcgtagtggtttgtcatacta

SEQ ID NO: 13855 - DNA, 25 bp, Homo sapien
gaacttaagatgagtctccgatcta

SEQ ID NO: 13856 - DNA, 25 bp, Homo sapien
gaacttaagatgtgtctccgatcta

SEQ ID NO: 13857 - DNA, 25 bp, Homo sapien
gaagtcaactttatgactgtaatta

SEQ ID NO: 13858 - DNA, 25 bp, Homo sapien
gaagtcaactttttgactgtaatta

SEQ ID NO: 13859 - DNA, 25 bp, Homo sapien
gagtttacatcttttcctaaggaat

SEQ ID NO: 13860 - DNA, 25 bp, Homo sapien
gagtttacatctattcctaaggaat

SEQ ID NO: 13861 - DNA, 25 bp, Homo sapien
tctgtcgtggtacccgagggtgagt

SEQ ID NO: 13862 - DNA, 25 bp, Homo sapien
tctgtcgtggtagccgagggtgagt

SEQ ID NO: 13863 - DNA, 25 bp, Homo sapien
cagtcgtgcagaacgcgaggtcgtt

SEQ ID NO: 13864 - DNA, 25 bp, Homo sapien
cagtcgtgcagatcgcgaggtcgtt

SEQ ID NO: 13865 - DNA, 25 bp, Homo sapien
agtcggaccgggtctccgtcgatcc

SEQ ID NO: 13866 - DNA, 25 bp, Homo sapien
agtcggaccgggactccgtcgatcc

SEQ ID NO: 13867 - DNA, 25 bp, Homo sapien
tcttcagagcaaggtgtcgagtatc

SEQ ID NO: 13868 - DNA, 25 bp, Homo sapien
tcttcagagcaacgtgtcgagtatc

SEQ ID NO: 13869 - DNA, 25 bp, Homo sapien
tcccaggacggaagttcacgtctcg

SEQ ID NO: 13870 - DNA, 25 bp, Homo sapien
tcccaggacggatgttcacgtctcg

SEQ ID NO: 13871 - DNA, 25 bp, Homo sapien
tgatcccaggaagtctgaggtctac

SEQ ID NO: 13872 - DNA, 25 bp, Homo sapien
tgatcccaggaactctgaggtctac

SEQ ID NO: 13873 - DNA, 25 bp, Homo sapien
acgttggaaaattcgtatcggtata

SEQ ID NO: 13874 - DNA, 25 bp, Homo sapien
acgttggaaaatacgtatcggtata

SEQ ID NO: 13875 - DNA, 25 bp, Homo sapien
ggaataccgtagtatatacttacta

SEQ ID NO: 13876 - DNA, 25 bp, Homo sapien
ggaataccgtagaatatacttacta

SEQ ID NO: 13877 - DNA, 25 bp, Homo sapien
cttggatcggaagactacattagta

SEQ ID NO: 13878 - DNA, 25 bp, Homo sapien
cttggatcggaacactacattagta

SEQ ID NO: 13879 - DNA, 25 bp, Homo sapien
tgtagagagttgaacctctcattaa

SEQ ID NO: 13880 - DNA, 25 bp, Homo sapien
tgtagagagttgtacctctcattaa

SEQ ID NO: 13881 - DNA, 25 bp, Homo sapien
gagtcggagggctcatcgaccctaa

SEQ ID NO: 13882 - DNA, 25 bp, Homo sapien
gagtcggagggcacatcgaccctaa

SEQ ID NO: 13883 - DNA, 25 bp, Homo sapien
atgtgtgtaattccaaacaccctaa

SEQ ID NO: 13884 - DNA, 25 bp, Homo sapien
atgtgtgtaattgcaaacaccctaa

SEQ ID NO: 13885 - DNA, 25 bp, Homo sapien
tgacccatcgagacgcgatgagtcg

SEQ ID NO: 13886 - DNA, 25 bp, Homo sapien
tgacccatcgagtcgcgatgagtcg

SEQ ID NO: 13887 - DNA, 25 bp, Homo sapien
ttacgactctcactttgaccttcgg

SEQ ID NO: 13888 - DNA, 25 bp, Homo sapien
ttacgactctcagtttgaccttcgg

SEQ ID NO: 13889 - DNA, 25 bp, Homo sapien
cccaatatagtggttgaactgtctg

SEQ ID NO: 13890 - DNA, 25 bp, Homo sapien
cccaatatagtgcttgaactgtctg

SEQ ID NO: 13891 - DNA, 25 bp, Homo sapien
ccgagagagacaggtacctttcccc

SEQ ID NO: 13892 - DNA, 25 bp, Homo sapien
ccgagagagacacgtacctttcccc

SEQ ID NO: 13893 - DNA, 25 bp, Homo sapien
tctggagcgcccttcttatcctaac

SEQ ID NO: 13894 - DNA, 25 bp, Homo sapien
tctggagcgcccatcttatcctaac

SEQ ID NO: 13895 - DNA, 25 bp, Homo sapien
ccggagtgaagaaccgaattctatg

SEQ ID NO: 13896 - DNA, 25 bp, Homo sapien
ccggagtgaagatccgaattctatg

SEQ ID NO: 13897 - DNA, 25 bp, Homo sapien
tccgacaaaaggccgaagtccagtg

SEQ ID NO: 13898 - DNA, 25 bp, Homo sapien
tccgacaaaagggcgaagtccagtg

SEQ ID NO: 13899 - DNA, 25 bp, Homo sapien
gacacctcaaaaccgacaaaattat

SEQ ID NO: 13900 - DNA, 25 bp, Homo sapien
gacacctcaaaagcgacaaaattat

SEQ ID NO: 13901 - DNA, 25 bp, Homo sapien
gaggaccccggaagaccgaaaaacc

SEQ ID NO: 13902 - DNA, 25 bp, Homo sapien
gaggaccccggatgaccgaaaaacc

SEQ ID NO: 13903 - DNA, 25 bp, Homo sapien
tgatcgtggtgacactgcgcacggt

SEQ ID NO: 13904 - DNA, 25 bp, Homo sapien
tgatcgtggtgagactgcgcacggt

SEQ ID NO: 13905 - DNA, 25 bp, Homo sapien
catctaggtctgtcttaccagtagt

SEQ ID NO: 13906 - DNA, 25 bp, Homo sapien
catctaggtctgacttaccagtagt

SEQ ID NO: 13907 - DNA, 25 bp, Homo sapien
caaggagacagtggtcctggtccca

SEQ ID NO: 13908 - DNA, 25 bp, Homo sapien
caaggagacagtcgtcctggtccca

SEQ ID NO: 13909 - DNA, 25 bp, Homo sapien
gggtcggatacgatacacgggtccc

SEQ ID NO: 13910 - DNA, 25 bp, Homo sapien
gggtcggatacgttacacgggtccc

SEQ ID NO: 13911 - DNA, 25 bp, Homo sapien
aggaagggacacacaccggtcgaca

SEQ ID NO: 13912 - DNA, 25 bp, Homo sapien
aggaagggacactcaccggtcgaca

SEQ ID NO: 13913 - DNA, 25 bp, Homo sapien
cgaggctcaggtccttcgtcgtctc

SEQ ID NO: 13914 - DNA, 25 bp, Homo sapien
cgaggctcaggtgcttcgtcgtctc

SEQ ID NO: 13915 - DNA, 25 bp, Homo sapien
aatgtggccgaggaagactcggtcc

SEQ ID NO: 13916 - DNA, 25 bp, Homo sapien
aatgtggccgagcaagactcggtcc

SEQ ID NO: 13917 - DNA, 25 bp, Homo sapien
acttcattacggtaggcacgtgacc

SEQ ID NO: 13918 - DNA, 25 bp, Homo sapien
acttcattacggaaggcacgtgacc

SEQ ID NO: 13919 - DNA, 25 bp, Homo sapien
gacaatgtcaaaagaacggttttcc

SEQ ID NO: 13920 - DNA, 25 bp, Homo sapien
gacaatgtcaaatgaacggttttcc

SEQ ID NO: 13921 - DNA, 25 bp, Homo sapien
gcgacggtgtccaccaaatgaacca

SEQ ID NO: 13922 - DNA, 25 bp, Homo sapien
gcgacggtgtcctccaaatgaacca

SEQ ID NO: 13923 - DNA, 25 bp, Homo sapien
gaggtcggatcgactacgaaacccc

SEQ ID NO: 13924 - DNA, 25 bp, Homo sapien
gaggtcggatcgtctacgaaacccc

SEQ ID NO: 13925 - DNA, 25 bp, Homo sapien
acgtcggtcgcgatgtagaaaccaa

SEQ ID NO: 13926 - DNA, 25 bp, Homo sapien
acgtcggtcgcgttgtagaaaccaa

SEQ ID NO: 13927 - DNA, 25 bp, Homo sapien
cgggtaagttcataaaacgtatcta

SEQ ID NO: 13928 - DNA, 25 bp, Homo sapien
cgggtaagttcaaaaaacgtatcta

SEQ ID NO: 13929 - DNA, 25 bp, Homo sapien
tcagaggtcttcataggctaaatta

SEQ ID NO: 13930 - DNA, 25 bp, Homo sapien
tcagaggtcttcttaggctaaatta

SEQ ID NO: 13931 - DNA, 25 bp, Homo sapien
ccattatggtcttgtcgtttaaatt

SEQ ID NO: 13932 - DNA, 25 bp, Homo sapien
ccattatggtctagtcgtttaaatt

SEQ ID NO: 13933 - DNA, 25 bp, Homo sapien
ctgattgtgtcctttgtctaaatta

SEQ ID NO: 13934 - DNA, 25 bp, Homo sapien
ctgattgtgtccattgtctaaatta

SEQ ID NO: 13935 - DNA, 25 bp, Homo sapien
acgattatttatcttgttcaggaaa

SEQ ID NO: 13936 - DNA, 25 bp, Homo sapien
acgattatttatgttgttcaggaaa

SEQ ID NO: 13937 - DNA, 25 bp, Homo sapien
attatgactagatgtgacatcggtc

SEQ ID NO: 13938 - DNA, 25 bp, Homo sapien
attatgactagaagtgacatcggtc

SEQ ID NO: 13939 - DNA, 25 bp, Homo sapien
aatagtgtctggagtgtaaacactc

SEQ ID NO: 13940 - DNA, 25 bp, Homo sapien
aatagtgtctggtgtgtaaacactc

SEQ ID NO: 13941 - DNA, 25 bp, Homo sapien
gaggtgtggtctttcgtgtccagtc

SEQ ID NO: 13942 - DNA, 25 bp, Homo sapien
gaggtgtggtctatcgtgtccagtc

SEQ ID NO: 13943 - DNA, 25 bp, Homo sapien
cagttgtacattttgtcttacgatc

SEQ ID NO: 13944 - DNA, 25 bp, Homo sapien
cagttgtacattatgtcttacgatc

SEQ ID NO: 13945 - DNA, 25 bp, Homo sapien
tctacgtatgttactgatgacttag

SEQ ID NO: 13946 - DNA, 25 bp, Homo sapien
tctacgtatgtttctgatgacttag

SEQ ID NO: 13947 - DNA, 25 bp, Homo sapien
attcacgcacaccactactataacg

SEQ ID NO: 13948 - DNA, 25 bp, Homo sapien
attcacgcacacgactactataacg

SEQ ID NO: 13949 - DNA, 25 bp, Homo sapien
cggcctcaaaatgccgttatagtag

SEQ ID NO: 13950 - DNA, 25 bp, Homo sapien
cggcctcaaaatcccgttatagtag

SEQ ID NO: 13951 - DNA, 25 bp, Homo sapien
gacgtctcggtgacggtagactaag

SEQ ID NO: 13952 - DNA, 25 bp, Homo sapien
gacgtctcggtgtcggtagactaag

SEQ ID NO: 13953 - DNA, 25 bp, Homo sapien
ctccgtctgtgtttggtagacgtga

SEQ ID NO: 13954 - DNA, 25 bp, Homo sapien
ctccgtctgtgtatggtagacgtga

SEQ ID NO: 13955 - DNA, 25 bp, Homo sapien
tactcgcgtgaaacgttacgggtga

SEQ ID NO: 13956 - DNA, 25 bp, Homo sapien
tactcgcgtgaatcgttacgggtga

SEQ ID NO: 13957 - DNA, 25 bp, Homo sapien
actgtctctccttacaacaagagag

SEQ ID NO: 13958 - DNA, 25 bp, Homo sapien
actgtctctcctaacaacaagagag

SEQ ID NO: 13959 - DNA, 25 bp, Homo sapien
ccatgggtgtcaacatatacatatg

SEQ ID NO: 13960 - DNA, 25 bp, Homo sapien
ccatgggtgtcatcatatacatatg

SEQ ID NO: 13961 - DNA, 25 bp, Homo sapien
gacatgggtgagtagtaactccaga

SEQ ID NO: 13962 - DNA, 25 bp, Homo sapien
gacatgggtgagaagtaactccaga

SEQ ID NO: 13963 - DNA, 25 bp, Homo sapien
gagagtgtgtcgacgatgtaccaga

SEQ ID NO: 13964 - DNA, 25 bp, Homo sapien
gagagtgtgtcgtcgatgtaccaga

SEQ ID NO: 13965 - DNA, 25 bp, Homo sapien
gtgagtgtcggttgtatgcctcgtc

SEQ ID NO: 13966 - DNA, 25 bp, Homo sapien
gtgagtgtcggtagtatgcctcgtc

SEQ ID NO: 13967 - DNA, 25 bp, Homo sapien
tgtacctgagcgatgagtcccgtat

SEQ ID NO: 13968 - DNA, 25 bp, Homo sapien
tgtacctgagcgttgagtcccgtat

SEQ ID NO: 13969 - DNA, 25 bp, Homo sapien
tagtaaggttgttgttgttcgtagt

SEQ ID NO: 13970 - DNA, 25 bp, Homo sapien
tagtaaggttgtagttgttcgtagt

SEQ ID NO: 13971 - DNA, 25 bp, Homo sapien
ccgtatcaggtaacaactttatgtt

SEQ ID NO: 13972 - DNA, 25 bp, Homo sapien
ccgtatcaggtatcaactttatgtt

SEQ ID NO: 13973 - DNA, 25 bp, Homo sapien
aagaggaggtctcgtacaggtcttc

SEQ ID NO: 13974 - DNA, 25 bp, Homo sapien
aagaggaggtctggtacaggtcttc

SEQ ID NO: 13975 - DNA, 25 bp, Homo sapien
cgtacgacggggacgatgagtctta

SEQ ID NO: 13976 - DNA, 25 bp, Homo sapien
cgtacgacggggtcgatgagtctta

SEQ ID NO: 13977 - DNA, 25 bp, Homo sapien
gtcgacgaagagtgtcgtgtcctga

SEQ ID NO: 13978 - DNA, 25 bp, Homo sapien
gtcgacgaagagagtcgtgtcctga

SEQ ID NO: 13979 - DNA, 25 bp, Homo sapien
ctcttcgtagacacacatcgctcga

SEQ ID NO: 13980 - DNA, 25 bp, Homo sapien
ctcttcgtagactcacatcgctcga

SEQ ID NO: 13981 - DNA, 25 bp, Homo sapien
gacgacactgtaagtcacctcctaa

SEQ ID NO: 13982 - DNA, 25 bp, Homo sapien
gacgacactgtatgtcacctcctaa

SEQ ID NO: 13983 - DNA, 25 bp, Homo sapien
gaggaagtacgacgtgtgctcgtaa

SEQ ID NO: 13984 - DNA, 25 bp, Homo sapien
gaggaagtacgaggtgtgctcgtaa

SEQ ID NO: 13985 - DNA, 25 bp, Homo sapien
aagtgtttcagatgttacctgaact

SEQ ID NO: 13986 - DNA, 25 bp, Homo sapien
aagtgtttcagaagttacctgaact

SEQ ID NO: 13987 - DNA, 25 bp, Homo sapien
ccgtcctcttcaaatgtctccgaga

SEQ ID NO: 13988 - DNA, 25 bp, Homo sapien
ccgtcctcttcatatgtctccgaga

SEQ ID NO: 13989 - DNA, 25 bp, Homo sapien
gactgacttcgtaaatgaactcaac

SEQ ID NO: 13990 - DNA, 25 bp, Homo sapien
gactgacttcgttaatgaactcaac

SEQ ID NO: 13991 - DNA, 25 bp, Homo sapien
gcaacttctataatgactactggta

SEQ ID NO: 13992 - DNA, 25 bp, Homo sapien
gcaacttctatattgactactggta

SEQ ID NO: 13993 - DNA, 25 bp, Homo sapien
tcgagaatctctaaaataggctatc

SEQ ID NO: 13994 - DNA, 25 bp, Homo sapien
tcgagaatctcttaaataggctatc

SEQ ID NO: 13995 - DNA, 25 bp, Homo sapien
aacgcaatactcacgagtggaccct

SEQ ID NO: 13996 - DNA, 25 bp, Homo sapien
aacgcaatactctcgagtggaccct

SEQ ID NO: 13997 - DNA, 25 bp, Homo sapien
atcaagtagacgaacgaaggcacac

SEQ ID NO: 13998 - DNA, 25 bp, Homo sapien
atcaagtagacgtacgaaggcacac

SEQ ID NO: 13999 - DNA, 25 bp, Homo sapien
ctatcgacggtgaatactgtagact

SEQ ID NO: 14000 - DNA, 25 bp, Homo sapien
ctatcgacggtgtatactgtagact

SEQ ID NO: 14001 - DNA, 25 bp, Homo sapien
tcgttgtcggtatgtatacttcgat

SEQ ID NO: 14002 - DNA, 25 bp, Homo sapien
tcgttgtcggtaagtatacttcgat

SEQ ID NO: 14003 - DNA, 25 bp, Homo sapien
ttggttctcgtctacaatcggtcgc

SEQ ID NO: 14004 - DNA, 25 bp, Homo sapien
ttggttctcgtcaacaatcggtcgc

SEQ ID NO: 14005 - DNA, 25 bp, Homo sapien
tgtacctctgtccattgtcgatgac

SEQ ID NO: 14006 - DNA, 25 bp, Homo sapien
tgtacctctgtcgattgtcgatgac

SEQ ID NO: 14007 - DNA, 25 bp, Homo sapien
tactactttctcacgtctgttgtcg

SEQ ID NO: 14008 - DNA, 25 bp, Homo sapien
tactactttctctcgtctgttgtcg

SEQ ID NO: 14009 - DNA, 25 bp, Homo sapien
tctctcatcgttcaacgtctttcgg

SEQ ID NO: 14010 - DNA, 25 bp, Homo sapien
tctctcatcgttgaacgtctttcgg

SEQ ID NO: 14011 - DNA, 25 bp, Homo sapien
tcgtacatagatcgccgtattgaca

SEQ ID NO: 14012 - DNA, 25 bp, Homo sapien
tcgtacatagatggccgtattgaca

SEQ ID NO: 14013 - DNA, 25 bp, Homo sapien
ctgttcgagtcgtaggacggtccct

SEQ ID NO: 14014 - DNA, 25 bp, Homo sapien
ctgttcgagtcgaaggacggtccct

SEQ ID NO: 14015 - DNA, 25 bp, Homo sapien
ggtacacgagtaggtaggagcccac

SEQ ID NO: 14016 - DNA, 25 bp, Homo sapien
ggtacacgagtacgtaggagcccac

SEQ ID NO: 14017 - DNA, 25 bp, Homo sapien
cgtgcgtctgtacagagagccgaag

SEQ ID NO: 14018 - DNA, 25 bp, Homo sapien
cgtgcgtctgtagagagagccgaag

SEQ ID NO: 14019 - DNA, 25 bp, Homo sapien
gttactggtttcgaaagacctacag

SEQ ID NO: 14020 - DNA, 25 bp, Homo sapien
gttactggtttccaaagacctacag

SEQ ID NO: 14021 - DNA, 25 bp, Homo sapien
acagtgacaatctcggtagttttat

SEQ ID NO: 14022 - DNA, 25 bp, Homo sapien
acagtgacaatcacggtagttttat

SEQ ID NO: 14023 - DNA, 25 bp, Homo sapien
attacggtgaattcagtcaatttca

SEQ ID NO: 14024 - DNA, 25 bp, Homo sapien
attacggtgaatacagtcaatttca

SEQ ID NO: 14025 - DNA, 25 bp, Homo sapien
gacttgtcgattgtcctcttctaca

SEQ ID NO: 14026 - DNA, 25 bp, Homo sapien
gacttgtcgattctcctcttctaca

SEQ ID NO: 14027 - DNA, 25 bp, Homo sapien
gtcttcgattagatcctttctctag

SEQ ID NO: 14028 - DNA, 25 bp, Homo sapien
gtcttcgattagttcctttctctag

SEQ ID NO: 14029 - DNA, 25 bp, Homo sapien
cttttgttgttcgtcgtactcgtcg

SEQ ID NO: 14030 - DNA, 25 bp, Homo sapien
cttttgttgttcctcgtactcgtcg

SEQ ID NO: 14031 - DNA, 25 bp, Homo sapien
taccctttgtcgatcttttatcgtg

SEQ ID NO: 14032 - DNA, 25 bp, Homo sapien
taccctttgtcgttcttttatcgtg

SEQ ID NO: 14033 - DNA, 25 bp, Homo sapien
tcacttctttcggtgtgtgttttcg

SEQ ID NO: 14034 - DNA, 25 bp, Homo sapien
tcacttctttcgctgtgtgttttcg

SEQ ID NO: 14035 - DNA, 25 bp, Homo sapien
gaaagttccttacttgagtttatac

SEQ ID NO: 14036 - DNA, 25 bp, Homo sapien
gaaagttccttagttgagtttatac

SEQ ID NO: 14037 - DNA, 25 bp, Homo sapien
gttgtatttttcgttgcggtctgac

SEQ ID NO: 14038 - DNA, 25 bp, Homo sapien
gttgtatttttccttgcggtctgac

SEQ ID NO: 14039 - DNA, 25 bp, Homo sapien
aacggtgtcccttcgtcggtcgaac

SEQ ID NO: 14040 - DNA, 25 bp, Homo sapien
aacggtgtccctacgtcggtcgaac

SEQ ID NO: 14041 - DNA, 25 bp, Homo sapien
cgtctagccgttcacgatacagtac

SEQ ID NO: 14042 - DNA, 25 bp, Homo sapien
cgtctagccgttgacgatacagtac

SEQ ID NO: 14043 - DNA, 25 bp, Homo sapien
gtgtacgtctgtgtgtgtaaacctt

SEQ ID NO: 14044 - DNA, 25 bp, Homo sapien
gtgtacgtctgtctgtgtaaacctt

SEQ ID NO: 14045 - DNA, 25 bp, Homo sapien
ctcgcgcatctggtgtaggtaccgc

SEQ ID NO: 14046 - DNA, 25 bp, Homo sapien
ctcgcgcatctgctgtaggtaccgc

SEQ ID NO: 14047 - DNA, 25 bp, Homo sapien
ttgttacgagactcggtggtccgtt

SEQ ID NO: 14048 - DNA, 25 bp, Homo sapien
ttgttacgagacacggtggtccgtt

SEQ ID NO: 14049 - DNA, 25 bp, Homo sapien
aaagaagaacgaacggagtgaccga

SEQ ID NO: 14050 - DNA, 25 bp, Homo sapien
aaagaagaacgatcggagtgaccga

SEQ ID NO: 14051 - DNA, 25 bp, Homo sapien
tcagaagagaagcaagcacggaaca

SEQ ID NO: 14052 - DNA, 25 bp, Homo sapien
tcagaagagaaggaagcacggaaca

SEQ ID NO: 14053 - DNA, 25 bp, Homo sapien
taaaaaatctacgacctgtgacggt

SEQ ID NO: 14054 - DNA, 25 bp, Homo sapien
taaaaaatctaccacctgtgacggt

SEQ ID NO: 14055 - DNA, 25 bp, Homo sapien
aaaagtcttgttcctcgtctgtacg

SEQ ID NO: 14056 - DNA, 25 bp, Homo sapien
aaaagtcttgttgctcgtctgtacg

SEQ ID NO: 14057 - DNA, 25 bp, Homo sapien
tttagtagggatttctgttcgcttc

SEQ ID NO: 14058 - DNA, 25 bp, Homo sapien
tttagtagggatatctgttcgcttc

SEQ ID NO: 14059 - DNA, 25 bp, Homo sapien
tcaggaggagtagcttcgccctctc

SEQ ID NO: 14060 - DNA, 25 bp, Homo sapien
tcaggaggagtaccttcgccctctc

SEQ ID NO: 14061 - DNA, 25 bp, Homo sapien
ccatgaagagccagtcctgtctcct

SEQ ID NO: 14062 - DNA, 25 bp, Homo sapien
ccatgaagagcctgtcctgtctcct

SEQ ID NO: 14063 - DNA, 25 bp, Homo sapien
atgaggagaactggacgacacagct

SEQ ID NO: 14064 - DNA, 25 bp, Homo sapien
atgaggagaactcgacgacacagct

SEQ ID NO: 14065 - DNA, 25 bp, Homo sapien
atcgacggtcagtagtgtcccctac

SEQ ID NO: 14066 - DNA, 25 bp, Homo sapien
atcgacggtcagaagtgtcccctac

SEQ ID NO: 14067 - DNA, 25 bp, Homo sapien
ctcattccgacatgtcctaagtcgt

SEQ ID NO: 14068 - DNA, 25 bp, Homo sapien
ctcattccgacaagtcctaagtcgt

SEQ ID NO: 14069 - DNA, 25 bp, Homo sapien
cttctttaccgaaatccgaagtacg

SEQ ID NO: 14070 - DNA, 25 bp, Homo sapien
cttctttaccgatatccgaagtacg

SEQ ID NO: 14071 - DNA, 25 bp, Homo sapien
aggaattttcggtaccgacaacgcg

SEQ ID NO: 14072 - DNA, 25 bp, Homo sapien
aggaattttcggaaccgacaacgcg

SEQ ID NO: 14073 - DNA, 25 bp, Homo sapien
agaaacaacgtgaagaactcgacgc

SEQ ID NO: 14074 - DNA, 25 bp, Homo sapien
agaaacaacgtgtagaactcgacgc

SEQ ID NO: 14075 - DNA, 25 bp, Homo sapien
ctcgacgagacaggacgaaccaccg

SEQ ID NO: 14076 - DNA, 25 bp, Homo sapien
ctcgacgagacacgacgaaccaccg

SEQ ID NO: 14077 - DNA, 25 bp, Homo sapien
agacgtggtcgcaagaaagtctccg

SEQ ID NO: 14078 - DNA, 25 bp, Homo sapien
agacgtggtcgctagaaagtctccg

SEQ ID NO: 14079 - DNA, 25 bp, Homo sapien
tcctagtagtcgtttccgggcgacc

SEQ ID NO: 14080 - DNA, 25 bp, Homo sapien
tcctagtagtcgattccgggcgacc

SEQ ID NO: 14081 - DNA, 25 bp, Homo sapien
ggtgaacgtgaaagggtacgtaccc

SEQ ID NO: 14082 - DNA, 25 bp, Homo sapien
ggtgaacgtgaatgggtacgtaccc

SEQ ID NO: 14083 - DNA, 25 bp, Homo sapien
agggtgaacacgaggacagagaccc

SEQ ID NO: 14084 - DNA, 25 bp, Homo sapien
agggtgaacacgtggacagagaccc

SEQ ID NO: 14085 - DNA, 25 bp, Homo sapien
agtagacagaatcaacagactctcc

SEQ ID NO: 14086 - DNA, 25 bp, Homo sapien
agtagacagaatgaacagactctcc

SEQ ID NO: 14087 - DNA, 25 bp, Homo sapien
acgtcacggaaggtgagtgatccga

SEQ ID NO: 14088 - DNA, 25 bp, Homo sapien
acgtcacggaagctgagtgatccga

SEQ ID NO: 14089 - DNA, 25 bp, Homo sapien
tcttcgagtggaggtcgagactcga

SEQ ID NO: 14090 - DNA, 25 bp, Homo sapien
tcttcgagtggacgtcgagactcga

SEQ ID NO: 14091 - DNA, 25 bp, Homo sapien
ctcgttctatagtttccgagttcga

SEQ ID NO: 14092 - DNA, 25 bp, Homo sapien
ctcgttctatagattccgagttcga

SEQ ID NO: 14093 - DNA, 25 bp, Homo sapien
acacagtttatgtgacggaggtcga

SEQ ID NO: 14094 - DNA, 25 bp, Homo sapien
acacagtttatgagacggaggtcga

SEQ ID NO: 14095 - DNA, 25 bp, Homo sapien
acgtgacctgtttccgacagggagg

SEQ ID NO: 14096 - DNA, 25 bp, Homo sapien
acgtgacctgttaccgacagggagg

SEQ ID NO: 14097 - DNA, 25 bp, Homo sapien
ttctcgtgtattcagaattactaga

SEQ ID NO: 14098 - DNA, 25 bp, Homo sapien
ttctcgtgtattgagaattactaga

SEQ ID NO: 14099 - DNA, 25 bp, Homo sapien
acatttggtcgttgatttcacgaac

SEQ ID NO: 14100 - DNA, 25 bp, Homo sapien
acatttggtcgtagatttcacgaac

SEQ ID NO: 14101 - DNA, 25 bp, Homo sapien
ttaattttcgtcgaggttcacgttt

SEQ ID NO: 14102 - DNA, 25 bp, Homo sapien
ttaattttcgtccaggttcacgttt

SEQ ID NO: 14103 - DNA, 25 bp, Homo sapien
tagtactgcctgtcggtccgggtcc

SEQ ID NO: 14104 - DNA, 25 bp, Homo sapien
tagtactgcctgacggtccgggtcc

SEQ ID NO: 14105 - DNA, 25 bp, Homo sapien
cttgatcttccgttcccgtatccgt

SEQ ID NO: 14106 - DNA, 25 bp, Homo sapien
cttgatcttccgatcccgtatccgt

SEQ ID NO: 14107 - DNA, 25 bp, Homo sapien
cttgagtctgactgatgtcctctcc

SEQ ID NO: 14108 - DNA, 25 bp, Homo sapien
cttgagtctgacagatgtcctctcc

SEQ ID NO: 14109 - DNA, 25 bp, Homo sapien
tcggatttactacttaccacgcgac

SEQ ID NO: 14110 - DNA, 25 bp, Homo sapien
tcggatttactagttaccacgcgac

SEQ ID NO: 14111 - DNA, 25 bp, Homo sapien
gtgggtacttaccttactctccttt

SEQ ID NO: 14112 - DNA, 25 bp, Homo sapien
gtgggtacttacgttactctccttt

SEQ ID NO: 14113 - DNA, 25 bp, Homo sapien
aggttgactcctttctttccgtcgc

SEQ ID NO: 14114 - DNA, 25 bp, Homo sapien
aggttgactcctatctttccgtcgc

SEQ ID NO: 14115 - DNA, 25 bp, Homo sapien
tgctgagtatgtactttttatctcg

SEQ ID NO: 14116 - DNA, 25 bp, Homo sapien
tgctgagtatgttctttttatctcg

SEQ ID NO: 14117 - DNA, 25 bp, Homo sapien
ctggtgtcgttcttctctgacgtcc

SEQ ID NO: 14118 - DNA, 25 bp, Homo sapien
ctggtgtcgttcatctctgacgtcc

SEQ ID NO: 14119 - DNA, 25 bp, Homo sapien
tagttttcttaatctaggacgtaac

SEQ ID NO: 14120 - DNA, 25 bp, Homo sapien
tagttttcttaaactaggacgtaac

SEQ ID NO: 14121 - DNA, 25 bp, Homo sapien
gggtcatacatatttgtacgtatct

SEQ ID NO: 14122 - DNA, 25 bp, Homo sapien
gggtcatacataattgtacgtatct

SEQ ID NO: 14123 - DNA, 25 bp, Homo sapien
atagagtcattaactatcgtgaaca

SEQ ID NO: 14124 - DNA, 25 bp, Homo sapien
atagagtcattatctatcgtgaaca

SEQ ID NO: 14125 - DNA, 25 bp, Homo sapien
acatttctgacttcgacttaccgag

SEQ ID NO: 14126 - DNA, 25 bp, Homo sapien
acatttctgactacgacttaccgag

SEQ ID NO: 14127 - DNA, 25 bp, Homo sapien
ttcctttgtttctcccgtaccgtcg

SEQ ID NO: 14128 - DNA, 25 bp, Homo sapien
ttcctttgtttcacccgtaccgtcg

SEQ ID NO: 14129 - DNA, 25 bp, Homo sapien
aaatatatgtttcgaacggtaccta

SEQ ID NO: 14130 - DNA, 25 bp, Homo sapien
aaatatatgtttggaacggtaccta

SEQ ID NO: 14131 - DNA, 25 bp, Homo sapien
ctttaatacagttcgtggatgatct

SEQ ID NO: 14132 - DNA, 25 bp, Homo sapien
ctttaatacagtacgtggatgatct

SEQ ID NO: 14133 - DNA, 25 bp, Homo sapien
catgtagagtagttaaacgactcgt

SEQ ID NO: 14134 - DNA, 25 bp, Homo sapien
catgtagagtagataaacgactcgt

SEQ ID NO: 14135 - DNA, 25 bp, Homo sapien
aagacagacatgtcattttacggtt

SEQ ID NO: 14136 - DNA, 25 bp, Homo sapien
aagacagacatgacattttacggtt

SEQ ID NO: 14137 - DNA, 25 bp, Homo sapien
taccgatcatggatatctttcgagg

SEQ ID NO: 14138 - DNA, 25 bp, Homo sapien
taccgatcatggttatctttcgagg

SEQ ID NO: 14139 - DNA, 25 bp, Homo sapien
caaactgtgaataagtctttcgatg

SEQ ID NO: 14140 - DNA, 25 bp, Homo sapien
caaactgtgaattagtctttcgatg

SEQ ID NO: 14141 - DNA, 25 bp, Homo sapien
tagtcctaccaggtattcttttagg

SEQ ID NO: 14142 - DNA, 25 bp, Homo sapien
tagtcctaccagctattcttttagg

SEQ ID NO: 14143 - DNA, 25 bp, Homo sapien
ctactacgccctttaaaacagttgg

SEQ ID NO: 14144 - DNA, 25 bp, Homo sapien
ctactacgccctataaaacagttgg

SEQ ID NO: 14145 - DNA, 25 bp, Homo sapien
ggttacgccctataaaacagctaga

SEQ ID NO: 14146 - DNA, 25 bp, Homo sapien
ggttacgccctaaaaaacagctaga

SEQ ID NO: 14147 - DNA, 25 bp, Homo sapien
gaatcttcacctacacaaggagtag

SEQ ID NO: 14148 - DNA, 25 bp, Homo sapien
gaatcttcaccttcacaaggagtag

SEQ ID NO: 14149 - DNA, 25 bp, Homo sapien
acaaggaatgttctgactgataact

SEQ ID NO: 14150 - DNA, 25 bp, Homo sapien
acaaggaatgttgtgactgataact

SEQ ID NO: 14151 - DNA, 25 bp, Homo sapien
atgcgttcgaattgtgttgatactc

SEQ ID NO: 14152 - DNA, 25 bp, Homo sapien
atgcgttcgaatagtgttgatactc

SEQ ID NO: 14153 - DNA, 25 bp, Homo sapien
aagcgacggggttcttcgttgtcaa

SEQ ID NO: 14154 - DNA, 25 bp, Homo sapien
aagcgacggggtacttcgttgtcaa

SEQ ID NO: 14155 - DNA, 25 bp, Homo sapien
caggagtcactttacttgtttcaac

SEQ ID NO: 14156 - DNA, 25 bp, Homo sapien
caggagtcacttaacttgtttcaac

SEQ ID NO: 14157 - DNA, 25 bp, Homo sapien
ccagcccgattcagggttctctatc

SEQ ID NO: 14158 - DNA, 25 bp, Homo sapien
ccagcccgattctgggttctctatc

SEQ ID NO: 14159 - DNA, 25 bp, Homo sapien
acctctaacatcgtgggtgtgtcta

SEQ ID NO: 14160 - DNA, 25 bp, Homo sapien
acctctaacatcctgggtgtgtcta

SEQ ID NO: 14161 - DNA, 25 bp, Homo sapien
caaccgatgttgaagacgacgtgac

SEQ ID NO: 14162 - DNA, 25 bp, Homo sapien
caaccgatgttgtagacgacgtgac

SEQ ID NO: 14163 - DNA, 25 bp, Homo sapien
tctgaactccagtggttcgtaggac

SEQ ID NO: 14164 - DNA, 25 bp, Homo sapien
tctgaactccagaggttcgtaggac

SEQ ID NO: 14165 - DNA, 25 bp, Homo sapien
aggaaccacaccagaagagactcac

SEQ ID NO: 14166 - DNA, 25 bp, Homo sapien
aggaaccacacctgaagagactcac

SEQ ID NO: 14167 - DNA, 25 bp, Homo sapien
tcaggggctcgacctcacaggttcc

SEQ ID NO: 14168 - DNA, 25 bp, Homo sapien
tcaggggctcgagctcacaggttcc

SEQ ID NO: 14169 - DNA, 25 bp, Homo sapien
gtgggtactcacctagggtttcagt

SEQ ID NO: 14170 - DNA, 25 bp, Homo sapien
gtgggtactcacgtagggtttcagt

SEQ ID NO: 14171 - DNA, 25 bp, Homo sapien
ttgtgacgtcctaaacagtttgagt

SEQ ID NO: 14172 - DNA, 25 bp, Homo sapien
ttgtgacgtccttaacagtttgagt

SEQ ID NO: 14173 - DNA, 25 bp, Homo sapien
tggacgtccttctgggacccgtact

SEQ ID NO: 14174 - DNA, 25 bp, Homo sapien
tggacgtccttcagggacccgtact

SEQ ID NO: 14175 - DNA, 25 bp, Homo sapien
tctggtgtacctctgcggtaaatct

SEQ ID NO: 14176 - DNA, 25 bp, Homo sapien
tctggtgtacctgtgcggtaaatct

SEQ ID NO: 14177 - DNA, 25 bp, Homo sapien
gttttgtagactctacccaaagtct

SEQ ID NO: 14178 - DNA, 25 bp, Homo sapien
gttttgtagactgtacccaaagtct

SEQ ID NO: 14179 - DNA, 25 bp, Homo sapien
cgttcccgagccttgttcctcgggt

SEQ ID NO: 14180 - DNA, 25 bp, Homo sapien
cgttcccgagccatgttcctcgggt

SEQ ID NO: 14181 - DNA, 25 bp, Homo sapien
gaaacgaacgacaatcacctggtag

SEQ ID NO: 14182 - DNA, 25 bp, Homo sapien
gaaacgaacgactatcacctggtag

SEQ ID NO: 14183 - DNA, 25 bp, Homo sapien
agcgaacatgtcctaaaccataggt

SEQ ID NO: 14184 - DNA, 25 bp, Homo sapien
agcgaacatgtcgtaaaccataggt

SEQ ID NO: 14185 - DNA, 25 bp, Homo sapien
tgaggaacctgtaaacaataaactg

SEQ ID NO: 14186 - DNA, 25 bp, Homo sapien
tgaggaacctgttaacaataaactg

SEQ ID NO: 14187 - DNA, 25 bp, Homo sapien
cgtaacgcgttcaagaccacacaca

SEQ ID NO: 14188 - DNA, 25 bp, Homo sapien
cgtaacgcgttctagaccacacaca

SEQ ID NO: 14189 - DNA, 25 bp, Homo sapien
gagaaagttcataacctcacacgat

SEQ ID NO: 14190 - DNA, 25 bp, Homo sapien
gagaaagttcattacctcacacgat

SEQ ID NO: 14191 - DNA, 25 bp, Homo sapien
ttgaaatgacagtctccgagacgac

SEQ ID NO: 14192 - DNA, 25 bp, Homo sapien
ttgaaatgacagactccgagacgac

SEQ ID NO: 14193 - DNA, 25 bp, Homo sapien
agttaaatacgagacgacccaactc

SEQ ID NO: 14194 - DNA, 25 bp, Homo sapien
agttaaatacgacacgacccaactc

SEQ ID NO: 14195 - DNA, 25 bp, Homo sapien
gaggttcacgaactaacctcttctc

SEQ ID NO: 14196 - DNA, 25 bp, Homo sapien
gaggttcacgaagtaacctcttctc

SEQ ID NO: 14197 - DNA, 25 bp, Homo sapien
agagttcagaatgaaactacatctt

SEQ ID NO: 14198 - DNA, 25 bp, Homo sapien
agagttcagaatcaaactacatctt

SEQ ID NO: 14199 - DNA, 25 bp, Homo sapien
gctactcgacacttaagaacctatg

SEQ ID NO: 14200 - DNA, 25 bp, Homo sapien
gctactcgacacataagaacctatg

SEQ ID NO: 14201 - DNA, 25 bp, Homo sapien
cgaggccttcgagtaaccgagccag

SEQ ID NO: 14202 - DNA, 25 bp, Homo sapien
cgaggccttcgactaaccgagccag

SEQ ID NO: 14203 - DNA, 25 bp, Homo sapien
ctacaacctacactttcgaggaacg

SEQ ID NO: 14204 - DNA, 25 bp, Homo sapien
ctacaacctacagtttcgaggaacg

SEQ ID NO: 14205 - DNA, 25 bp, Homo sapien
acatcgacaagcatacgtaattagt

SEQ ID NO: 14206 - DNA, 25 bp, Homo sapien
acatcgacaagcttacgtaattagt

SEQ ID NO: 14207 - DNA, 25 bp, Homo sapien
tagtcggtcagagagtactagtcat

SEQ ID NO: 14208 - DNA, 25 bp, Homo sapien
tagtcggtcagacagtactagtcat

SEQ ID NO: 14209 - DNA, 25 bp, Homo sapien
tgaccacgtcctgtagaaacaccct

SEQ ID NO: 14210 - DNA, 25 bp, Homo sapien
tgaccacgtcctctagaaacaccct

SEQ ID NO: 14211 - DNA, 25 bp, Homo sapien
cagaagagcccaagacagagattcc

SEQ ID NO: 14212 - DNA, 25 bp, Homo sapien
cagaagagcccatgacagagattcc

SEQ ID NO: 14213 - DNA, 25 bp, Homo sapien
ccaaagaagtaccataagatgtccc

SEQ ID NO: 14214 - DNA, 25 bp, Homo sapien
ccaaagaagtacgataagatgtccc

SEQ ID NO: 14215 - DNA, 25 bp, Homo sapien
actagatggggatccttacttctcc

SEQ ID NO: 14216 - DNA, 25 bp, Homo sapien
actagatggggaaccttacttctcc

SEQ ID NO: 14217 - DNA, 25 bp, Homo sapien
gactagatcggacgaatcattgccc

SEQ ID NO: 14218 - DNA, 25 bp, Homo sapien
gactagatcggaggaatcattgccc

SEQ ID NO: 14219 - DNA, 25 bp, Homo sapien
ccagaggaaaagtctgagacgccgt

SEQ ID NO: 14220 - DNA, 25 bp, Homo sapien
ccagaggaaaagactgagacgccgt

SEQ ID NO: 14221 - DNA, 25 bp, Homo sapien
tgtccgatatgtcgacgaagctcgt

SEQ ID NO: 14222 - DNA, 25 bp, Homo sapien
tgtccgatatgtggacgaagctcgt

SEQ ID NO: 14223 - DNA, 25 bp, Homo sapien
cgtccgatctgtaagaacggcgcgt

SEQ ID NO: 14224 - DNA, 25 bp, Homo sapien
cgtccgatctgttagaacggcgcgt

SEQ ID NO: 14225 - DNA, 25 bp, Homo sapien
tatagccactcttttactctgggat

SEQ ID NO: 14226 - DNA, 25 bp, Homo sapien
tatagccactctattactctgggat

SEQ ID NO: 14227 - DNA, 25 bp, Homo sapien
ggaggacattggttccgtcctcagt

SEQ ID NO: 14228 - DNA, 25 bp, Homo sapien
ggaggacattggatccgtcctcagt

SEQ ID NO: 14229 - DNA, 25 bp, Homo sapien
gttaggtacattagtcataattctc

SEQ ID NO: 14230 - DNA, 25 bp, Homo sapien
gttaggtacatttgtcataattctc

SEQ ID NO: 14231 - DNA, 25 bp, Homo sapien
gtcagggacgtctcacacccacagg

SEQ ID NO: 14232 - DNA, 25 bp, Homo sapien
gtcagggacgtcacacacccacagg

SEQ ID NO: 14233 - DNA, 25 bp, Homo sapien
tcctaaagaatcgtagtctccagta

SEQ ID NO: 14234 - DNA, 25 bp, Homo sapien
tcctaaagaatcctagtctccagta

SEQ ID NO: 14235 - DNA, 25 bp, Homo sapien
ccaagacgtccatgtatcttcaacg

SEQ ID NO: 14236 - DNA, 25 bp, Homo sapien
ccaagacgtccaagtatcttcaacg

SEQ ID NO: 14237 - DNA, 25 bp, Homo sapien
tcgtgggccaactactcttaccacg

SEQ ID NO: 14238 - DNA, 25 bp, Homo sapien
tcgtgggccaacaactcttaccacg

SEQ ID NO: 14239 - DNA, 25 bp, Homo sapien
ttgtcgagacccaggacctctgcgg

SEQ ID NO: 14240 - DNA, 25 bp, Homo sapien
ttgtcgagaccctggacctctgcgg

SEQ ID NO: 14241 - DNA, 25 bp, Homo sapien
gtgctccgtctcaggggtccgacgc

SEQ ID NO: 14242 - DNA, 25 bp, Homo sapien
gtgctccgtctctggggtccgacgc

SEQ ID NO: 14243 - DNA, 25 bp, Homo sapien
acgagtatcggttcgggatctggtc

SEQ ID NO: 14244 - DNA, 25 bp, Homo sapien
acgagtatcggtacgggatctggtc

SEQ ID NO: 14245 - DNA, 25 bp, Homo sapien
cctagtatccgtacacaatacaagg

SEQ ID NO: 14246 - DNA, 25 bp, Homo sapien
cctagtatccgttcacaatacaagg

SEQ ID NO: 14247 - DNA, 25 bp, Homo sapien
tttctgttaccgtgacaatacttga

SEQ ID NO: 14248 - DNA, 25 bp, Homo sapien
tttctgttaccgagacaatacttga

SEQ ID NO: 14249 - DNA, 25 bp, Homo sapien
tttaatgttccaagacgaagttcaa

SEQ ID NO: 14250 - DNA, 25 bp, Homo sapien
tttaatgttccatgacgaagttcaa

SEQ ID NO: 14251 - DNA, 25 bp, Homo sapien
tctttttgtccctgacgcaccttga

SEQ ID NO: 14252 - DNA, 25 bp, Homo sapien
tctttttgtcccagacgcaccttga

SEQ ID NO: 14253 - DNA, 25 bp, Homo sapien
gtctttgtgcccaatttctaccgac

SEQ ID NO: 14254 - DNA, 25 bp, Homo sapien
gtctttgtgccctatttctaccgac

SEQ ID NO: 14255 - DNA, 25 bp, Homo sapien
tttaaactcccgttcctgtttggag

SEQ ID NO: 14256 - DNA, 25 bp, Homo sapien
tttaaactcccgatcctgtttggag

SEQ ID NO: 14257 - DNA, 25 bp, Homo sapien
agaagtgctcactacttgttgaagt

SEQ ID NO: 14258 - DNA, 25 bp, Homo sapien
agaagtgctcacaacttgttgaagt

SEQ ID NO: 14259 - DNA, 25 bp, Homo sapien
aaacaatgagacatcggtcagtaat

SEQ ID NO: 14260 - DNA, 25 bp, Homo sapien
aaacaatgagacttcggtcagtaat

SEQ ID NO: 14261 - DNA, 25 bp, Homo sapien
aaacgagacagaagttccggcgaca

SEQ ID NO: 14262 - DNA, 25 bp, Homo sapien
aaacgagacagatgttccggcgaca

SEQ ID NO: 14263 - DNA, 25 bp, Homo sapien
gacaccgaactaggtctcgtccgaa

SEQ ID NO: 14264 - DNA, 25 bp, Homo sapien
gacaccgaactacgtctcgtccgaa

SEQ ID NO: 14265 - DNA, 25 bp, Homo sapien
ggacttcgaagagactgtttatcgt

SEQ ID NO: 14266 - DNA, 25 bp, Homo sapien
ggacttcgaagacactgtttatcgt

SEQ ID NO: 14267 - DNA, 25 bp, Homo sapien
cggaaacctaagtacatgtcgactg

SEQ ID NO: 14268 - DNA, 25 bp, Homo sapien
cggaaacctaagaacatgtcgactg

SEQ ID NO: 14269 - DNA, 25 bp, Homo sapien
acacaggggactgaggcacctgacc

SEQ ID NO: 14270 - DNA, 25 bp, Homo sapien
acacaggggactcaggcacctgacc

SEQ ID NO: 14271 - DNA, 25 bp, Homo sapien
aagagggtcgagatggtccttacag

SEQ ID NO: 14272 - DNA, 25 bp, Homo sapien
aagagggtcgagttggtccttacag

SEQ ID NO: 14273 - DNA, 25 bp, Homo sapien
taacgactataagtctgtggttcag

SEQ ID NO: 14274 - DNA, 25 bp, Homo sapien
taacgactataactctgtggttcag

SEQ ID NO: 14275 - DNA, 25 bp, Homo sapien
atcggattaaagaccgtatgttaca

SEQ ID NO: 14276 - DNA, 25 bp, Homo sapien
atcggattaaagtccgtatgttaca

SEQ ID NO: 14277 - DNA, 25 bp, Homo sapien
cgatggacttgtaaaatttcataca

SEQ ID NO: 14278 - DNA, 25 bp, Homo sapien
cgatggacttgttaaatttcataca

SEQ ID NO: 14279 - DNA, 25 bp, Homo sapien
gtatggaaggagaaggatctcatcc

SEQ ID NO: 14280 - DNA, 25 bp, Homo sapien
gtatggaaggagtaggatctcatcc

SEQ ID NO: 14281 - DNA, 25 bp, Homo sapien
tcttacatgacgacgggaaccttcg

SEQ ID NO: 14282 - DNA, 25 bp, Homo sapien
tcttacatgacgtcgggaaccttcg

SEQ ID NO: 14283 - DNA, 25 bp, Homo sapien
aaacctccctagagcgaggaccttc

SEQ ID NO: 14284 - DNA, 25 bp, Homo sapien
aaacctccctagtgcgaggaccttc

SEQ ID NO: 14285 - DNA, 25 bp, Homo sapien
acgaactccaaggtgcggtgtggcc

SEQ ID NO: 14286 - DNA, 25 bp, Homo sapien
acgaactccaagctgcggtgtggcc

SEQ ID NO: 14287 - DNA, 25 bp, Homo sapien
ctcttctaccagtggtgcgtgtcgt

SEQ ID NO: 14288 - DNA, 25 bp, Homo sapien
ctcttctaccagaggtgcgtgtcgt

SEQ ID NO: 14289 - DNA, 25 bp, Homo sapien
cttctgacgaaggtagagtcgtact

SEQ ID NO: 14290 - DNA, 25 bp, Homo sapien
cttctgacgaagctagagtcgtact

SEQ ID NO: 14291 - DNA, 25 bp, Homo sapien
ccctcttgactatgactgaggtcgt

SEQ ID NO: 14292 - DNA, 25 bp, Homo sapien
ccctcttgactaagactgaggtcgt

SEQ ID NO: 14293 - DNA, 25 bp, Homo sapien
aggcgtcccactgacgaccgactgg

SEQ ID NO: 14294 - DNA, 25 bp, Homo sapien
aggcgtcccactcacgaccgactgg

SEQ ID NO: 14295 - DNA, 25 bp, Homo sapien
ccgtgctgggtctgaagtctcatcg

SEQ ID NO: 14296 - DNA, 25 bp, Homo sapien
ccgtgctgggtcagaagtctcatcg

SEQ ID NO: 14297 - DNA, 25 bp, Homo sapien
cctacgagcgaggttggctgacgac

SEQ ID NO: 14298 - DNA, 25 bp, Homo sapien
cctacgagcgagcttggctgacgac

SEQ ID NO: 14299 - DNA, 25 bp, Homo sapien
ttcatagtgtcgttgaacactaagg

SEQ ID NO: 14300 - DNA, 25 bp, Homo sapien
ttcatagtgtcgatgaacactaagg

SEQ ID NO: 14301 - DNA, 25 bp, Homo sapien
cattcatagactcattcgtccatgg

SEQ ID NO: 14302 - DNA, 25 bp, Homo sapien
cattcatagactgattcgtccatgg

SEQ ID NO: 14303 - DNA, 25 bp, Homo sapien
cattctgtagttttccgtgaaggta

SEQ ID NO: 14304 - DNA, 25 bp, Homo sapien
cattctgtagttatccgtgaaggta

SEQ ID NO: 14305 - DNA, 25 bp, Homo sapien
ctataggttctatctaggttacgga

SEQ ID NO: 14306 - DNA, 25 bp, Homo sapien
ctataggttctaactaggttacgga

SEQ ID NO: 14307 - DNA, 25 bp, Homo sapien
ttactgtttccgatatgtcgtataa

SEQ ID NO: 14308 - DNA, 25 bp, Homo sapien
ttactgtttccgttatgtcgtataa

SEQ ID NO: 14309 - DNA, 25 bp, Homo sapien
tgtaagagttccttacgttcgtttt

SEQ ID NO: 14310 - DNA, 25 bp, Homo sapien
tgtaagagttccatacgttcgtttt

SEQ ID NO: 14311 - DNA, 25 bp, Homo sapien
cccgacgagtggtacgagggttctt

SEQ ID NO: 14312 - DNA, 25 bp, Homo sapien
cccgacgagtggaacgagggttctt

SEQ ID NO: 14313 - DNA, 25 bp, Homo sapien
gaccaaggagtcaaaagagtttctt

SEQ ID NO: 14314 - DNA, 25 bp, Homo sapien
gaccaaggagtctaaagagtttctt

SEQ ID NO: 14315 - DNA, 25 bp, Homo sapien
gttagaagttccttacaactgtttc

SEQ ID NO: 14316 - DNA, 25 bp, Homo sapien
gttagaagttccatacaactgtttc

SEQ ID NO: 14317 - DNA, 25 bp, Homo sapien
taatgaactttattaccatatgggt

SEQ ID NO: 14318 - DNA, 25 bp, Homo sapien
taatgaactttaataccatatgggt

SEQ ID NO: 14319 - DNA, 25 bp, Homo sapien
ataaacaacctcagatttcatgagg

SEQ ID NO: 14320 - DNA, 25 bp, Homo sapien
ataaacaacctctgatttcatgagg

SEQ ID NO: 14321 - DNA, 25 bp, Homo sapien
cttctacttcctgaacttcaagagg

SEQ ID NO: 14322 - DNA, 25 bp, Homo sapien
cttctacttcctcaacttcaagagg

SEQ ID NO: 14323 - DNA, 25 bp, Homo sapien
cattggtccgtctcaccacgagcgg

SEQ ID NO: 14324 - DNA, 25 bp, Homo sapien
cattggtccgtcacaccacgagcgg

SEQ ID NO: 14325 - DNA, 25 bp, Homo sapien
tttctacgtccaacacgctagtggg

SEQ ID NO: 14326 - DNA, 25 bp, Homo sapien
tttctacgtccatcacgctagtggg

SEQ ID NO: 14327 - DNA, 25 bp, Homo sapien
tagtccctctctcagacataggtgt

SEQ ID NO: 14328 - DNA, 25 bp, Homo sapien
tagtccctctctgagacataggtgt

SEQ ID NO: 14329 - DNA, 25 bp, Homo sapien
ccaagttgggccttaactatatcgg

SEQ ID NO: 14330 - DNA, 25 bp, Homo sapien
ccaagttgggccataactatatcgg

SEQ ID NO: 14331 - DNA, 25 bp, Homo sapien
ttaagtatcgggtccaagaactagc

SEQ ID NO: 14332 - DNA, 25 bp, Homo sapien
ttaagtatcgggaccaagaactagc

SEQ ID NO: 14333 - DNA, 25 bp, Homo sapien
cacactttcgggtgatcggaacagg

SEQ ID NO: 14334 - DNA, 25 bp, Homo sapien
cacactttcgggagatcggaacagg

SEQ ID NO: 14335 - DNA, 25 bp, Homo sapien
tctaaaaggcccaaaacaagtgtag

SEQ ID NO: 14336 - DNA, 25 bp, Homo sapien
tctaaaaggccctaaacaagtgtag

SEQ ID NO: 14337 - DNA, 25 bp, Homo sapien
caaaagttcatgtacaacaagctgt

SEQ ID NO: 14338 - DNA, 25 bp, Homo sapien
caaaagttcatgaacaacaagctgt

SEQ ID NO: 14339 - DNA, 25 bp, Homo sapien
aaagacgtctccacggtgaagatca

SEQ ID NO: 14340 - DNA, 25 bp, Homo sapien
aaagacgtctcctcggtgaagatca

SEQ ID NO: 14341 - DNA, 25 bp, Homo sapien
cgacaatgacagtcggtaacccacc

SEQ ID NO: 14342 - DNA, 25 bp, Homo sapien
cgacaatgacagacggtaacccacc

SEQ ID NO: 14343 - DNA, 25 bp, Homo sapien
tgaaacagaaaagtcagacgtctca

SEQ ID NO: 14344 - DNA, 25 bp, Homo sapien
tgaaacagaaaactcagacgtctca

SEQ ID NO: 14345 - DNA, 25 bp, Homo sapien
agcttcgcgtgtagtgccatccacg

SEQ ID NO: 14346 - DNA, 25 bp, Homo sapien
agcttcgcgtgttgtgccatccacg

SEQ ID NO: 14347 - DNA, 25 bp, Homo sapien
tgttctcaggtgttaccgtccctcc

SEQ ID NO: 14348 - DNA, 25 bp, Homo sapien
tgttctcaggtgataccgtccctcc

SEQ ID NO: 14349 - DNA, 25 bp, Homo sapien
gtctctctcggtactagtttctcac

SEQ ID NO: 14350 - DNA, 25 bp, Homo sapien
gtctctctcggttctagtttctcac

SEQ ID NO: 14351 - DNA, 25 bp, Homo sapien
ccgaagtccggttcttgtcctcgat

SEQ ID NO: 14352 - DNA, 25 bp, Homo sapien
ccgaagtccggtacttgtcctcgat

SEQ ID NO: 14353 - DNA, 25 bp, Homo sapien
ctagtagtcaggtatcgtgtgccat

SEQ ID NO: 14354 - DNA, 25 bp, Homo sapien
ctagtagtcaggaatcgtgtgccat

SEQ ID NO: 14355 - DNA, 25 bp, Homo sapien
atccgttcagttaatctgttcgaag

SEQ ID NO: 14356 - DNA, 25 bp, Homo sapien
atccgttcagtttatctgttcgaag

SEQ ID NO: 14357 - DNA, 25 bp, Homo sapien
ctaccgtttctagtgtttgtggtgt

SEQ ID NO: 14358 - DNA, 25 bp, Homo sapien
ctaccgtttctactgtttgtggtgt

SEQ ID NO: 14359 - DNA, 25 bp, Homo sapien
tacacttcccgactctggtggtcgt

SEQ ID NO: 14360 - DNA, 25 bp, Homo sapien
tacacttcccgagtctggtggtcgt

SEQ ID NO: 14361 - DNA, 25 bp, Homo sapien
taatgacctgaggaccggtcttcgt

SEQ ID NO: 14362 - DNA, 25 bp, Homo sapien
taatgacctgagcaccggtcttcgt

SEQ ID NO: 14363 - DNA, 25 bp, Homo sapien
acatcatcaccttacacggtcggtc

SEQ ID NO: 14364 - DNA, 25 bp, Homo sapien
acatcatcacctaacacggtcggtc

SEQ ID NO: 14365 - DNA, 25 bp, Homo sapien
cgaatcggtcctctacaggacccaa

SEQ ID NO: 14366 - DNA, 25 bp, Homo sapien
cgaatcggtcctgtacaggacccaa

SEQ ID NO: 14367 - DNA, 25 bp, Homo sapien
tcggagagagacagtagtcgacgaa

SEQ ID NO: 14368 - DNA, 25 bp, Homo sapien
tcggagagagactgtagtcgacgaa

SEQ ID NO: 14369 - DNA, 25 bp, Homo sapien
catctgtaagacctctatgagtata

SEQ ID NO: 14370 - DNA, 25 bp, Homo sapien
catctgtaagacgtctatgagtata

SEQ ID NO: 14371 - DNA, 25 bp, Homo sapien
tacggaatcacagcagattacaaga

SEQ ID NO: 14372 - DNA, 25 bp, Homo sapien
tacggaatcacaccagattacaaga

SEQ ID NO: 14373 - DNA, 25 bp, Homo sapien
tgaacctcacggacttgtactagga

SEQ ID NO: 14374 - DNA, 25 bp, Homo sapien
tgaacctcacggtcttgtactagga

SEQ ID NO: 14375 - DNA, 25 bp, Homo sapien
taagttctcaggaacagtctcagaa

SEQ ID NO: 14376 - DNA, 25 bp, Homo sapien
taagttctcaggtacagtctcagaa

SEQ ID NO: 14377 - DNA, 25 bp, Homo sapien
aaagttcactctgcatgatatgttt

SEQ ID NO: 14378 - DNA, 25 bp, Homo sapien
aaagttcactctccatgatatgttt

SEQ ID NO: 14379 - DNA, 25 bp, Homo sapien
cataataaacatacggcttgtttgt

SEQ ID NO: 14380 - DNA, 25 bp, Homo sapien
cataataaacattcggcttgtttgt

SEQ ID NO: 14381 - DNA, 25 bp, Homo sapien
gaaagtcaagagaccgctccttctt

SEQ ID NO: 14382 - DNA, 25 bp, Homo sapien
gaaagtcaagagtccgctccttctt

SEQ ID NO: 14383 - DNA, 25 bp, Homo sapien
tcgtcgaaattatggtcagttcagt

SEQ ID NO: 14384 - DNA, 25 bp, Homo sapien
tcgtcgaaattaaggtcagttcagt

SEQ ID NO: 14385 - DNA, 25 bp, Homo sapien
gtcgacgaatcgaaagtcttgtctt

SEQ ID NO: 14386 - DNA, 25 bp, Homo sapien
gtcgacgaatcgtaagtcttgtctt

SEQ ID NO: 14387 - DNA, 25 bp, Homo sapien
ctgtgtgtgttctacattaggtgtc

SEQ ID NO: 14388 - DNA, 25 bp, Homo sapien
ctgtgtgtgttcaacattaggtgtc

SEQ ID NO: 14389 - DNA, 25 bp, Homo sapien
gagtgtctttaccacttgtctgaat

SEQ ID NO: 14390 - DNA, 25 bp, Homo sapien
gagtgtctttacgacttgtctgaat

SEQ ID NO: 14391 - DNA, 25 bp, Homo sapien
tgtcggtggacgacaactggtgaac

SEQ ID NO: 14392 - DNA, 25 bp, Homo sapien
tgtcggtggacgtcaactggtgaac

SEQ ID NO: 14393 - DNA, 25 bp, Homo sapien
cggtttcgacccaggtactgttgaa

SEQ ID NO: 14394 - DNA, 25 bp, Homo sapien
cggtttcgaccctggtactgttgaa

SEQ ID NO: 14395 - DNA, 25 bp, Homo sapien
catttgtctgtctttctgttccacg

SEQ ID NO: 14396 - DNA, 25 bp, Homo sapien
catttgtctgtcattctgttccacg

SEQ ID NO: 14397 - DNA, 25 bp, Homo sapien
gtttaccgtattttccgtttctacg

SEQ ID NO: 14398 - DNA, 25 bp, Homo sapien
gtttaccgtattatccgtttctacg

SEQ ID NO: 14399 - DNA, 25 bp, Homo sapien
aaggtcacctctttacaagtgtttg

SEQ ID NO: 14400 - DNA, 25 bp, Homo sapien
aaggtcacctctatacaagtgtttg

SEQ ID NO: 14401 - DNA, 25 bp, Homo sapien
tgtaccgtaacaaatgacctacatg

SEQ ID NO: 14402 - DNA, 25 bp, Homo sapien
tgtaccgtaacatatgacctacatg

SEQ ID NO: 14403 - DNA, 25 bp, Homo sapien
tatccgactagacttgtaacttatg

SEQ ID NO: 14404 - DNA, 25 bp, Homo sapien
tatccgactagagttgtaacttatg

SEQ ID NO: 14405 - DNA, 25 bp, Homo sapien
tcatatcaatatgtctcggactttg

SEQ ID NO: 14406 - DNA, 25 bp, Homo sapien
tcatatcaatatctctcggactttg

SEQ ID NO: 14407 - DNA, 25 bp, Homo sapien
cctctgtcaattttggtgagttgtc

SEQ ID NO: 14408 - DNA, 25 bp, Homo sapien
cctctgtcaattatggtgagttgtc

SEQ ID NO: 14409 - DNA, 25 bp, Homo sapien
ctatgtaaaggtcctctttatgttc

SEQ ID NO: 14410 - DNA, 25 bp, Homo sapien
ctatgtaaaggtgctctttatgttc

SEQ ID NO: 14411 - DNA, 25 bp, Homo sapien
ttacaataggtgtcctcgtgtcggc

SEQ ID NO: 14412 - DNA, 25 bp, Homo sapien
ttacaataggtgacctcgtgtcggc

SEQ ID NO: 14413 - DNA, 25 bp, Homo sapien
tgtatcttctctgtcataagggcgt

SEQ ID NO: 14414 - DNA, 25 bp, Homo sapien
tgtatcttctctctcataagggcgt

SEQ ID NO: 14415 - DNA, 25 bp, Homo sapien
ctgttcctgggtccagaaggacgac

SEQ ID NO: 14416 - DNA, 25 bp, Homo sapien
ctgttcctgggtgcagaaggacgac

SEQ ID NO: 14417 - DNA, 25 bp, Homo sapien
ttcccctataggtgtctcatggaac

SEQ ID NO: 14418 - DNA, 25 bp, Homo sapien
ttcccctataggagtctcatggaac

SEQ ID NO: 14419 - DNA, 25 bp, Homo sapien
acaccgagggagtaacctcttccct

SEQ ID NO: 14420 - DNA, 25 bp, Homo sapien
acaccgagggagaaacctcttccct

SEQ ID NO: 14421 - DNA, 25 bp, Homo sapien
ttttgcgaggacttcctcttctcct

SEQ ID NO: 14422 - DNA, 25 bp, Homo sapien
ttttgcgaggacatcctcttctcct

SEQ ID NO: 14423 - DNA, 25 bp, Homo sapien
gttttcggtaaaactcattctttcg

SEQ ID NO: 14424 - DNA, 25 bp, Homo sapien
gttttcggtaaatctcattctttcg

SEQ ID NO: 14425 - DNA, 25 bp, Homo sapien
tctgtgtgacaatcccgtctggttg

SEQ ID NO: 14426 - DNA, 25 bp, Homo sapien
tctgtgtgacaaacccgtctggttg

SEQ ID NO: 14427 - DNA, 25 bp, Homo sapien
gtcggcctaagaagcgacccctgtc

SEQ ID NO: 14428 - DNA, 25 bp, Homo sapien
gtcggcctaagatgcgacccctgtc

SEQ ID NO: 14429 - DNA, 25 bp, Homo sapien
cctcagtctcagactcctcagggga

SEQ ID NO: 14430 - DNA, 25 bp, Homo sapien
cctcagtctcagtctcctcagggga

SEQ ID NO: 14431 - DNA, 25 bp, Homo sapien
ggcgtcagggacctcaaccccggga

SEQ ID NO: 14432 - DNA, 25 bp, Homo sapien
ggcgtcagggacgtcaaccccggga

SEQ ID NO: 14433 - DNA, 25 bp, Homo sapien
ttcgcagggcctaccgccggttcgg

SEQ ID NO: 14434 - DNA, 25 bp, Homo sapien
ttcgcagggccttccgccggttcgg

SEQ ID NO: 14435 - DNA, 25 bp, Homo sapien
gagatgccacggacactcctatcgg

SEQ ID NO: 14436 - DNA, 25 bp, Homo sapien
gagatgccacggtcactcctatcgg

SEQ ID NO: 14437 - DNA, 25 bp, Homo sapien
agggtgacccgagaccttccgtcgg

SEQ ID NO: 14438 - DNA, 25 bp, Homo sapien
agggtgacccgacaccttccgtcgg

SEQ ID NO: 14439 - DNA, 25 bp, Homo sapien
tcgactggaacttcgagaggtcgtg

SEQ ID NO: 14440 - DNA, 25 bp, Homo sapien
tcgactggaactacgagaggtcgtg

SEQ ID NO: 14441 - DNA, 25 bp, Homo sapien
cgtacttgagtgacgtgacgctctc

SEQ ID NO: 14442 - DNA, 25 bp, Homo sapien
cgtacttgagtgtcgtgacgctctc

SEQ ID NO: 14443 - DNA, 25 bp, Homo sapien
tctgaggaaccgtggtgtcaggctc

SEQ ID NO: 14444 - DNA, 25 bp, Homo sapien
tctgaggaaccgaggtgtcaggctc

SEQ ID NO: 14445 - DNA, 25 bp, Homo sapien
ttagggttagactctgtccgggtcc

SEQ ID NO: 14446 - DNA, 25 bp, Homo sapien
ttagggttagacactgtccgggtcc

SEQ ID NO: 14447 - DNA, 25 bp, Homo sapien
agtgtggaaataacacaggcccccg

SEQ ID NO: 14448 - DNA, 25 bp, Homo sapien
agtgtggaaatatcacaggcccccg

SEQ ID NO: 14449 - DNA, 25 bp, Homo sapien
aagtgaacccaagtagatcttcaac

SEQ ID NO: 14450 - DNA, 25 bp, Homo sapien
aagtgaacccaactagatcttcaac

SEQ ID NO: 14451 - DNA, 25 bp, Homo sapien
ataagacacccaggattccctacga

SEQ ID NO: 14452 - DNA, 25 bp, Homo sapien
ataagacacccacgattccctacga

SEQ ID NO: 14453 - DNA, 25 bp, Homo sapien
aagactccatgtaaacgtcttagta

SEQ ID NO: 14454 - DNA, 25 bp, Homo sapien
aagactccatgttaacgtcttagta

SEQ ID NO: 14455 - DNA, 25 bp, Homo sapien
aagtagtcccagtggactgtgtaag

SEQ ID NO: 14456 - DNA, 25 bp, Homo sapien
aagtagtcccagaggactgtgtaag

SEQ ID NO: 14457 - DNA, 25 bp, Homo sapien
acccgacttcgaaggtctctgtcac

SEQ ID NO: 14458 - DNA, 25 bp, Homo sapien
acccgacttcgatggtctctgtcac

SEQ ID NO: 14459 - DNA, 25 bp, Homo sapien
ggcgccactgtgtggtgcgtccact

SEQ ID NO: 14460 - DNA, 25 bp, Homo sapien
ggcgccactgtgaggtgcgtccact

SEQ ID NO: 14461 - DNA, 25 bp, Homo sapien
tgtccttcgtgatgtctgcgaccct

SEQ ID NO: 14462 - DNA, 25 bp, Homo sapien
tgtccttcgtgaagtctgcgaccct

SEQ ID NO: 14463 - DNA, 25 bp, Homo sapien
ttattgtgtgaccaagtggaacctc

SEQ ID NO: 14464 - DNA, 25 bp, Homo sapien
ttattgtgtgacgaagtggaacctc

SEQ ID NO: 14465 - DNA, 25 bp, Homo sapien
ttagggtccaatatgaagtaccgac

SEQ ID NO: 14466 - DNA, 25 bp, Homo sapien
ttagggtccaatttgaagtaccgac

SEQ ID NO: 14467 - DNA, 25 bp, Homo sapien
tgagatccacgaggtctgccagaca

SEQ ID NO: 14468 - DNA, 25 bp, Homo sapien
tgagatccacgacgtctgccagaca

SEQ ID NO: 14469 - DNA, 25 bp, Homo sapien
tgacgaccttcccgtttgtgtccgc

SEQ ID NO: 14470 - DNA, 25 bp, Homo sapien
tgacgaccttccggtttgtgtccgc

SEQ ID NO: 14471 - DNA, 25 bp, Homo sapien
gcgaccatccgtgactcttattacc

SEQ ID NO: 14472 - DNA, 25 bp, Homo sapien
gcgaccatccgtcactcttattacc

SEQ ID NO: 14473 - DNA, 25 bp, Homo sapien
gtcgagacgactctttctccttcct

SEQ ID NO: 14474 - DNA, 25 bp, Homo sapien
gtcgagacgactgtttctccttcct

SEQ ID NO: 14475 - DNA, 25 bp, Homo sapien
gtcgggcgaagttcgcgaccctcac

SEQ ID NO: 14476 - DNA, 25 bp, Homo sapien
gtcgggcgaagtacgcgaccctcac

SEQ ID NO: 14477 - DNA, 25 bp, Homo sapien
gttgaagacataagtctttactaac

SEQ ID NO: 14478 - DNA, 25 bp, Homo sapien
gttgaagacatatgtctttactaac

SEQ ID NO: 14479 - DNA, 25 bp, Homo sapien
gtttagaggttatcgaaaccacacg

SEQ ID NO: 14480 - DNA, 25 bp, Homo sapien
gtttagaggttaacgaaaccacacg

SEQ ID NO: 14481 - DNA, 25 bp, Homo sapien
ctagtttaagtgaaaatcttctgtc

SEQ ID NO: 14482 - DNA, 25 bp, Homo sapien
ctagtttaagtgtaaatcttctgtc

SEQ ID NO: 14483 - DNA, 25 bp, Homo sapien
gtaaaacgctagaaagactttctta

SEQ ID NO: 14484 - DNA, 25 bp, Homo sapien
gtaaaacgctagtaagactttctta

SEQ ID NO: 14485 - DNA, 25 bp, Homo sapien
aatcgtcgtatcagggtttacgttg

SEQ ID NO: 14486 - DNA, 25 bp, Homo sapien
aatcgtcgtatctgggtttacgttg

SEQ ID NO: 14487 - DNA, 25 bp, Homo sapien
gtctcgtcattcaggtcagtacttt

SEQ ID NO: 14488 - DNA, 25 bp, Homo sapien
gtctcgtcattctggtcagtacttt

SEQ ID NO: 14489 - DNA, 25 bp, Homo sapien
tcggtacgtagtcctttggactcta

SEQ ID NO: 14490 - DNA, 25 bp, Homo sapien
tcggtacgtagtgctttggactcta

SEQ ID NO: 14491 - DNA, 25 bp, Homo sapien
gatacaaaagttcagttccgactta

SEQ ID NO: 14492 - DNA, 25 bp, Homo sapien
gatacaaaagttgagttccgactta

SEQ ID NO: 14493 - DNA, 25 bp, Homo sapien
aactcaattagtggtgaccacattt

SEQ ID NO: 14494 - DNA, 25 bp, Homo sapien
aactcaattagtcgtgaccacattt

SEQ ID NO: 14495 - DNA, 25 bp, Homo sapien
agactcaatctgtttcactaaaagg

SEQ ID NO: 14496 - DNA, 25 bp, Homo sapien
agactcaatctgattcactaaaagg

SEQ ID NO: 14497 - DNA, 25 bp, Homo sapien
cctagagtctggatcacgagggaag

SEQ ID NO: 14498 - DNA, 25 bp, Homo sapien
cctagagtctggttcacgagggaag

SEQ ID NO: 14499 - DNA, 25 bp, Homo sapien
agagtcgtagtctcggacgaggaca

SEQ ID NO: 14500 - DNA, 25 bp, Homo sapien
agagtcgtagtcacggacgaggaca

SEQ ID NO: 14501 - DNA, 25 bp, Homo sapien
gtcgtgggagtgtctcggtcgatcc

SEQ ID NO: 14502 - DNA, 25 bp, Homo sapien
gtcgtgggagtgactcggtcgatcc

SEQ ID NO: 14503 - DNA, 25 bp, Homo sapien
gtgtgtcaagtgcaagtgcgatgtc

SEQ ID NO: 14504 - DNA, 25 bp, Homo sapien
gtgtgtcaagtggaagtgcgatgtc

SEQ ID NO: 14505 - DNA, 25 bp, Homo sapien
tcgtctaaggggagtccactgtcgt

SEQ ID NO: 14506 - DNA, 25 bp, Homo sapien
tcgtctaaggggtgtccactgtcgt

SEQ ID NO: 14507 - DNA, 25 bp, Homo sapien
tctcgacaggggttctgtgagttct

SEQ ID NO: 14508 - DNA, 25 bp, Homo sapien
tctcgacaggggatctgtgagttct

SEQ ID NO: 14509 - DNA, 25 bp, Homo sapien
actgggagccggaagtatcggtata

SEQ ID NO: 14510 - DNA, 25 bp, Homo sapien
actgggagccggtagtatcggtata

SEQ ID NO: 14511 - DNA, 25 bp, Homo sapien
ggagaaccgtaggactcttcgtaca

SEQ ID NO: 14512 - DNA, 25 bp, Homo sapien
ggagaaccgtagcactcttcgtaca

SEQ ID NO: 14513 - DNA, 25 bp, Homo sapien
cttggatctagtaaaactcattaag

SEQ ID NO: 14514 - DNA, 25 bp, Homo sapien
cttggatctagttaaactcattaag

SEQ ID NO: 14515 - DNA, 25 bp, Homo sapien
gtagagacttcgtaccttcaatcac

SEQ ID NO: 14516 - DNA, 25 bp, Homo sapien
gtagagacttcgaaccttcaatcac

SEQ ID NO: 14517 - DNA, 25 bp, Homo sapien
aacgtgggtccgacatcaccgctaa

SEQ ID NO: 14518 - DNA, 25 bp, Homo sapien
aacgtgggtccgtcatcaccgctaa

SEQ ID NO: 14519 - DNA, 25 bp, Homo sapien
gtcgtaatgggttatacccctagta

SEQ ID NO: 14520 - DNA, 25 bp, Homo sapien
gtcgtaatgggtaatacccctagta

SEQ ID NO: 14521 - DNA, 25 bp, Homo sapien
ctgaaacagcagaccggtcagtacg

SEQ ID NO: 14522 - DNA, 25 bp, Homo sapien
ctgaaacagcagtccggtcagtacg

SEQ ID NO: 14523 - DNA, 25 bp, Homo sapien
taactccagactagtcgacggttgg

SEQ ID NO: 14524 - DNA, 25 bp, Homo sapien
taactccagacttgtcgacggttgg

SEQ ID NO: 14525 - DNA, 25 bp, Homo sapien
gatatactagacattcacgatgttg

SEQ ID NO: 14526 - DNA, 25 bp, Homo sapien
gatatactagactttcacgatgttg

SEQ ID NO: 14527 - DNA, 25 bp, Homo sapien
cgagaaactacgtattctcccgctg

SEQ ID NO: 14528 - DNA, 25 bp, Homo sapien
cgagaaactacgaattctcccgctg

SEQ ID NO: 14529 - DNA, 25 bp, Homo sapien
gattggaacctccatcttgtcaata

SEQ ID NO: 14530 - DNA, 25 bp, Homo sapien
gattggaacctcgatcttgtcaata

SEQ ID NO: 14531 - DNA, 25 bp, Homo sapien
ccggagtctcaaatcattcttatag

SEQ ID NO: 14532 - DNA, 25 bp, Homo sapien
ccggagtctcaattcattcttatag

SEQ ID NO: 14533 - DNA, 25 bp, Homo sapien
cccaacaccggttcaagtctcagtt

SEQ ID NO: 14534 - DNA, 25 bp, Homo sapien
cccaacaccggtacaagtctcagtt

SEQ ID NO: 14535 - DNA, 25 bp, Homo sapien
gggagacaccaacaggaaaacaatt

SEQ ID NO: 14536 - DNA, 25 bp, Homo sapien
gggagacaccaagaggaaaacaatt

SEQ ID NO: 14537 - DNA, 25 bp, Homo sapien
gtgaacaccccgtaaggaaaaactt

SEQ ID NO: 14538 - DNA, 25 bp, Homo sapien
gtgaacaccccgaaaggaaaaactt

SEQ ID NO: 14539 - DNA, 25 bp, Homo sapien
agatctcggaaggaccgagaacgtg

SEQ ID NO: 14540 - DNA, 25 bp, Homo sapien
agatctcggaagcaccgagaacgtg

SEQ ID NO: 14541 - DNA, 25 bp, Homo sapien
cactcaagtctgtcgagaccagacg

SEQ ID NO: 14542 - DNA, 25 bp, Homo sapien
cactcaagtctgacgagaccagacg

SEQ ID NO: 14543 - DNA, 25 bp, Homo sapien
gagacgaggttggtcggactcctac

SEQ ID NO: 14544 - DNA, 25 bp, Homo sapien
gagacgaggttgctcggactcctac

SEQ ID NO: 14545 - DNA, 25 bp, Homo sapien
tgggtacgggtcgacaaggtctcct

SEQ ID NO: 14546 - DNA, 25 bp, Homo sapien
tgggtacgggtccacaaggtctcct

SEQ ID NO: 14547 - DNA, 25 bp, Homo sapien
aggtagggagaaaacacaggtcacc

SEQ ID NO: 14548 - DNA, 25 bp, Homo sapien
aggtagggagaatacacaggtcacc

SEQ ID NO: 14549 - DNA, 25 bp, Homo sapien
aggtcgagaggtatgtcctattccc

SEQ ID NO: 14550 - DNA, 25 bp, Homo sapien
aggtcgagaggtttgtcctattccc

SEQ ID NO: 14551 - DNA, 25 bp, Homo sapien
tacgtggcttggtagtactggtcct

SEQ ID NO: 14552 - DNA, 25 bp, Homo sapien
tacgtggcttggaagtactggtcct

SEQ ID NO: 14553 - DNA, 25 bp, Homo sapien
ctaggattaacgaggatacgtgtcc

SEQ ID NO: 14554 - DNA, 25 bp, Homo sapien
ctaggattaacgtggatacgtgtcc

SEQ ID NO: 14555 - DNA, 25 bp, Homo sapien
gagataaccaaaaggacggttttcc

SEQ ID NO: 14556 - DNA, 25 bp, Homo sapien
gagataaccaaatggacggttttcc

SEQ ID NO: 14557 - DNA, 25 bp, Homo sapien
cggatcttccaagaaatcgagaccc

SEQ ID NO: 14558 - DNA, 25 bp, Homo sapien
cggatcttccaacaaatcgagaccc

SEQ ID NO: 14559 - DNA, 25 bp, Homo sapien
gaagaggtaccgaggacaaaacccc

SEQ ID NO: 14560 - DNA, 25 bp, Homo sapien
gaagaggtaccgtggacaaaacccc

SEQ ID NO: 14561 - DNA, 25 bp, Homo sapien
aaaacgtttccgagtaacaaccagg

SEQ ID NO: 14562 - DNA, 25 bp, Homo sapien
aaaacgtttccgtgtaacaaccagg

SEQ ID NO: 14563 - DNA, 25 bp, Homo sapien
gcatgtttatctttaaaacgatctg

SEQ ID NO: 14564 - DNA, 25 bp, Homo sapien
gcatgtttatctataaaacgatctg

SEQ ID NO: 14565 - DNA, 25 bp, Homo sapien
gtcgagggttttgagtttaaattgt

SEQ ID NO: 14566 - DNA, 25 bp, Homo sapien
gtcgagggttttcagtttaaattgt

SEQ ID NO: 14567 - DNA, 25 bp, Homo sapien
accggcatggttttcgttttatgtt

SEQ ID NO: 14568 - DNA, 25 bp, Homo sapien
accggcatggttatcgttttatgtt

SEQ ID NO: 14569 - DNA, 25 bp, Homo sapien
cggcagtggcgtatgtcttagattc

SEQ ID NO: 14570 - DNA, 25 bp, Homo sapien
cggcagtggcgtttgtcttagattc

SEQ ID NO: 14571 - DNA, 25 bp, Homo sapien
aggttatcataacttttcaggtttc

SEQ ID NO: 14572 - DNA, 25 bp, Homo sapien
aggttatcataagttttcaggtttc

SEQ ID NO: 14573 - DNA, 25 bp, Homo sapien
tacttgttacgagtgacgatggact

SEQ ID NO: 14574 - DNA, 25 bp, Homo sapien
tacttgttacgactgacgatggact

SEQ ID NO: 14575 - DNA, 25 bp, Homo sapien
aaatatttgacgaatgacagatcct

SEQ ID NO: 14576 - DNA, 25 bp, Homo sapien
aaatatttgacgtatgacagatcct

SEQ ID NO: 14577 - DNA, 25 bp, Homo sapien
atagtgtgtgcgtgtcggtcacaga

SEQ ID NO: 14578 - DNA, 25 bp, Homo sapien
atagtgtgtgcgagtcggtcacaga

SEQ ID NO: 14579 - DNA, 25 bp, Homo sapien
tgtgtacttcgtttcgttgtcggta

SEQ ID NO: 14580 - DNA, 25 bp, Homo sapien
tgtgtacttcgtatcgttgtcggta

SEQ ID NO: 14581 - DNA, 25 bp, Homo sapien
ttctacgtatgttactgatgactta

SEQ ID NO: 14582 - DNA, 25 bp, Homo sapien
ttctacgtatgtaactgatgactta

SEQ ID NO: 14583 - DNA, 25 bp, Homo sapien
caaggactattcacgcacaccacta

SEQ ID NO: 14584 - DNA, 25 bp, Homo sapien
caaggactattctcgcacaccacta

SEQ ID NO: 14585 - DNA, 25 bp, Homo sapien
caaaatgccgttatagtagtggtgt

SEQ ID NO: 14586 - DNA, 25 bp, Homo sapien
caaaatgccgttttagtagtggtgt

SEQ ID NO: 14587 - DNA, 25 bp, Homo sapien
gactctacggagttcgtgagaccag

SEQ ID NO: 14588 - DNA, 25 bp, Homo sapien
gactctacggagatcgtgagaccag

SEQ ID NO: 14589 - DNA, 25 bp, Homo sapien
accgttcgtcgtatcgggacgacga

SEQ ID NO: 14590 - DNA, 25 bp, Homo sapien
accgttcgtcgtttcgggacgacga

SEQ ID NO: 14591 - DNA, 25 bp, Homo sapien
tacagacgtggaattcggtgtcgag

SEQ ID NO: 14592 - DNA, 25 bp, Homo sapien
tacagacgtggatttcggtgtcgag

SEQ ID NO: 14593 - DNA, 25 bp, Homo sapien
tcgttactcctattcaccagagacg

SEQ ID NO: 14594 - DNA, 25 bp, Homo sapien
tcgttactcctaatcaccagagacg

SEQ ID NO: 14595 - DNA, 25 bp, Homo sapien
tatcggcgttcaacaactgaagacg

SEQ ID NO: 14596 - DNA, 25 bp, Homo sapien
tatcggcgttcatcaactgaagacg

SEQ ID NO: 14597 - DNA, 25 bp, Homo sapien
actaacgggaagtgaactcaagact

SEQ ID NO: 14598 - DNA, 25 bp, Homo sapien
actaacgggaagagaactcaagact

SEQ ID NO: 14599 - DNA, 25 bp, Homo sapien
tacaacggtgggacgacttgacaga

SEQ ID NO: 14600 - DNA, 25 bp, Homo sapien
tacaacggtgggtcgacttgacaga

SEQ ID NO: 14601 - DNA, 25 bp, Homo sapien
tagagagttccgtcgattccgtgta

SEQ ID NO: 14602 - DNA, 25 bp, Homo sapien
tagagagttccgacgattccgtgta

SEQ ID NO: 14603 - DNA, 25 bp, Homo sapien
ttgtcctcgggtaagagtcctcact

SEQ ID NO: 14604 - DNA, 25 bp, Homo sapien
ttgtcctcgggttagagtcctcact

SEQ ID NO: 14605 - DNA, 25 bp, Homo sapien
ctagtaaggttgttgttgttcgtag

SEQ ID NO: 14606 - DNA, 25 bp, Homo sapien
ctagtaaggttgatgttgttcgtag

SEQ ID NO: 14607 - DNA, 25 bp, Homo sapien
cgtactagaagtacatttgttcgtt

SEQ ID NO: 14608 - DNA, 25 bp, Homo sapien
cgtactagaagttcatttgttcgtt

SEQ ID NO: 14609 - DNA, 25 bp, Homo sapien
tcataagaggttctaagagtatctc

SEQ ID NO: 14610 - DNA, 25 bp, Homo sapien
tcataagaggttgtaagagtatctc

SEQ ID NO: 14611 - DNA, 25 bp, Homo sapien
gagacagagggtcttgagtatctac

SEQ ID NO: 14612 - DNA, 25 bp, Homo sapien
gagacagagggtgttgagtatctac

SEQ ID NO: 14613 - DNA, 25 bp, Homo sapien
cagtcacagaggttgcgtgtttgta

SEQ ID NO: 14614 - DNA, 25 bp, Homo sapien
cagtcacagaggatgcgtgtttgta

SEQ ID NO: 14615 - DNA, 25 bp, Homo sapien
accttagagaccagacatcggtaga

SEQ ID NO: 14616 - DNA, 25 bp, Homo sapien
accttagagacctgacatcggtaga

SEQ ID NO: 14617 - DNA, 25 bp, Homo sapien
gacactatgtacaccgctagctaga

SEQ ID NO: 14618 - DNA, 25 bp, Homo sapien
gacactatgtactccgctagctaga

SEQ ID NO: 14619 - DNA, 25 bp, Homo sapien
acagaggaagtacactaggctcgaa

SEQ ID NO: 14620 - DNA, 25 bp, Homo sapien
acagaggaagtagactaggctcgaa

SEQ ID NO: 14621 - DNA, 25 bp, Homo sapien
gaagtgtttcagatgttacctgaac

SEQ ID NO: 14622 - DNA, 25 bp, Homo sapien
gaagtgtttcagttgttacctgaac

SEQ ID NO: 14623 - DNA, 25 bp, Homo sapien
gtactcctttcagttgtaccagaga

SEQ ID NO: 14624 - DNA, 25 bp, Homo sapien
gtactcctttcacttgtaccagaga

SEQ ID NO: 14625 - DNA, 25 bp, Homo sapien
gatacttattcgacataggactcaa

SEQ ID NO: 14626 - DNA, 25 bp, Homo sapien
gatacttattcgtcataggactcaa

SEQ ID NO: 14627 - DNA, 25 bp, Homo sapien
gggaactgtctttatcgacctgata

SEQ ID NO: 14628 - DNA, 25 bp, Homo sapien
gggaactgtcttaatcgacctgata

SEQ ID NO: 14629 - DNA, 25 bp, Homo sapien
tgagaatattagcaacgtggtcatc

SEQ ID NO: 14630 - DNA, 25 bp, Homo sapien
tgagaatattaggaacgtggtcatc

SEQ ID NO: 14631 - DNA, 25 bp, Homo sapien
gacgactaaataccacatggtcacc

SEQ ID NO: 14632 - DNA, 25 bp, Homo sapien
gacgactaaatagcacatggtcacc

SEQ ID NO: 14633 - DNA, 25 bp, Homo sapien
gtataaatagacaacaaggtcacga

SEQ ID NO: 14634 - DNA, 25 bp, Homo sapien
gtataaatagactacaaggtcacga

SEQ ID NO: 14635 - DNA, 25 bp, Homo sapien
cactgacgtgtgagtcgtcacgact

SEQ ID NO: 14636 - DNA, 25 bp, Homo sapien
cactgacgtgtgtgtcgtcacgact

SEQ ID NO: 14637 - DNA, 25 bp, Homo sapien
acctcttcgtgttcgtatatctgat

SEQ ID NO: 14638 - DNA, 25 bp, Homo sapien
acctcttcgtgtacgtatatctgat

SEQ ID NO: 14639 - DNA, 25 bp, Homo sapien
tttggatccgtccacaatctcgtcc

SEQ ID NO: 14640 - DNA, 25 bp, Homo sapien
tttggatccgtcgacaatctcgtcc

SEQ ID NO: 14641 - DNA, 25 bp, Homo sapien
tcgtacccagtcactgtgtcatgac

SEQ ID NO: 14642 - DNA, 25 bp, Homo sapien
tcgtacccagtctctgtgtcatgac

SEQ ID NO: 14643 - DNA, 25 bp, Homo sapien
ctacttcagtctgtcgtcgattgtc

SEQ ID NO: 14644 - DNA, 25 bp, Homo sapien
ctacttcagtctctcgtcgattgtc

SEQ ID NO: 14645 - DNA, 25 bp, Homo sapien
gttaccctgttctcgtcttctacgc

SEQ ID NO: 14646 - DNA, 25 bp, Homo sapien
gttaccctgttcacgtcttctacgc

SEQ ID NO: 14647 - DNA, 25 bp, Homo sapien
cgtacatagatcgccgtattgacac

SEQ ID NO: 14648 - DNA, 25 bp, Homo sapien
cgtacatagatccccgtattgacac

SEQ ID NO: 14649 - DNA, 25 bp, Homo sapien
gtccgttgacttagttctctatcct

SEQ ID NO: 14650 - DNA, 25 bp, Homo sapien
gtccgttgactttgttctctatcct

SEQ ID NO: 14651 - DNA, 25 bp, Homo sapien
acggtaaggtcgacgggacgccact

SEQ ID NO: 14652 - DNA, 25 bp, Homo sapien
acggtaaggtcgtcgggacgccact

SEQ ID NO: 14653 - DNA, 25 bp, Homo sapien
ccggacgaccgtaccgggaccgaag

SEQ ID NO: 14654 - DNA, 25 bp, Homo sapien
ccggacgaccgttccgggaccgaag

SEQ ID NO: 14655 - DNA, 25 bp, Homo sapien
cgttactggtttcgaaagacctaca

SEQ ID NO: 14656 - DNA, 25 bp, Homo sapien
cgttactggtttggaaagacctaca

SEQ ID NO: 14657 - DNA, 25 bp, Homo sapien
cgatgaattcgttctatgttttact

SEQ ID NO: 14658 - DNA, 25 bp, Homo sapien
cgatgaattcgtactatgttttact

SEQ ID NO: 14659 - DNA, 25 bp, Homo sapien
ttcgagtgatactcatcttattttg

SEQ ID NO: 14660 - DNA, 25 bp, Homo sapien
ttcgagtgatacacatcttattttg

SEQ ID NO: 14661 - DNA, 25 bp, Homo sapien
agattagtcatttgtccttttacga

SEQ ID NO: 14662 - DNA, 25 bp, Homo sapien
agattagtcattagtccttttacga

SEQ ID NO: 14663 - DNA, 25 bp, Homo sapien
tattatcgattgtcattgtctcacg

SEQ ID NO: 14664 - DNA, 25 bp, Homo sapien
tattatcgattgacattgtctcacg

SEQ ID NO: 14665 - DNA, 25 bp, Homo sapien
tttttatgtcgaatctccgtatccg

SEQ ID NO: 14666 - DNA, 25 bp, Homo sapien
tttttatgtcgattctccgtatccg

SEQ ID NO: 14667 - DNA, 25 bp, Homo sapien
accctttgtcgatcttttatcgtgt

SEQ ID NO: 14668 - DNA, 25 bp, Homo sapien
accctttgtcgaacttttatcgtgt

SEQ ID NO: 14669 - DNA, 25 bp, Homo sapien
gaccgatttttcagtgttgttttcg

SEQ ID NO: 14670 - DNA, 25 bp, Homo sapien
gaccgatttttctgtgttgttttcg

SEQ ID NO: 14671 - DNA, 25 bp, Homo sapien
cagagttcttttggtctgttctatc

SEQ ID NO: 14672 - DNA, 25 bp, Homo sapien
cagagttcttttcgtctgttctatc

SEQ ID NO: 14673 - DNA, 25 bp, Homo sapien
agttcgattctttcctttggttaac

SEQ ID NO: 14674 - DNA, 25 bp, Homo sapien
agttcgattcttacctttggttaac

SEQ ID NO: 14675 - DNA, 25 bp, Homo sapien
agacttgtgacctctcggtcgatcg

SEQ ID NO: 14676 - DNA, 25 bp, Homo sapien
agacttgtgaccactcggtcgatcg

SEQ ID NO: 14677 - DNA, 25 bp, Homo sapien
cggtgtaccgtttcgatatagtact

SEQ ID NO: 14678 - DNA, 25 bp, Homo sapien
cggtgtaccgttacgatatagtact

SEQ ID NO: 14679 - DNA, 25 bp, Homo sapien
tgttacgtctgtgttagtgattctc

SEQ ID NO: 14680 - DNA, 25 bp, Homo sapien
tgttacgtctgtcttagtgattctc

SEQ ID NO: 14681 - DNA, 25 bp, Homo sapien
cgacgtgcatctgtgtgtgtatctt

SEQ ID NO: 14682 - DNA, 25 bp, Homo sapien
cgacgtgcatctctgtgtgtatctt

SEQ ID NO: 14683 - DNA, 25 bp, Homo sapien
ttcgtttgtacatctgtggtcctct

SEQ ID NO: 14684 - DNA, 25 bp, Homo sapien
ttcgtttgtacaactgtggtcctct

SEQ ID NO: 14685 - DNA, 25 bp, Homo sapien
agaggaaagacgacgggtgacttac

SEQ ID NO: 14686 - DNA, 25 bp, Homo sapien
agaggaaagacgtcgggtgacttac

SEQ ID NO: 14687 - DNA, 25 bp, Homo sapien
gagaggaacgtctaccgacggatta

SEQ ID NO: 14688 - DNA, 25 bp, Homo sapien
gagaggaacgtcaaccgacggatta

SEQ ID NO: 14689 - DNA, 25 bp, Homo sapien
ataaggaatcacagaccgtgaaagt

SEQ ID NO: 14690 - DNA, 25 bp, Homo sapien
ataaggaatcactgaccgtgaaagt

SEQ ID NO: 14691 - DNA, 25 bp, Homo sapien
gatttcgtcgtcgtcgtactgacgt

SEQ ID NO: 14692 - DNA, 25 bp, Homo sapien
gatttcgtcgtcctcgtactgacgt

SEQ ID NO: 14693 - DNA, 25 bp, Homo sapien
acgttgtatatgttcgtttcgctta

SEQ ID NO: 14694 - DNA, 25 bp, Homo sapien
acgttgtatatgatcgtttcgctta

SEQ ID NO: 14695 - DNA, 25 bp, Homo sapien
acagtgggtgtggtcgtcgcccttc

SEQ ID NO: 14696 - DNA, 25 bp, Homo sapien
acagtgggtgtgctcgtcgcccttc

SEQ ID NO: 14697 - DNA, 25 bp, Homo sapien
cccatgaagtaggttttattcttct

SEQ ID NO: 14698 - DNA, 25 bp, Homo sapien
cccatgaagtagcttttattcttct

SEQ ID NO: 14699 - DNA, 25 bp, Homo sapien
cagtgagagagatttcggaaaccgt

SEQ ID NO: 14700 - DNA, 25 bp, Homo sapien
cagtgagagagaattcggaaaccgt

SEQ ID NO: 14701 - DNA, 25 bp, Homo sapien
atgacgagaagaaatcggacactac

SEQ ID NO: 14702 - DNA, 25 bp, Homo sapien
atgacgagaagatatcggacactac

SEQ ID NO: 14703 - DNA, 25 bp, Homo sapien
actcattccgacatgtcctaagtcg

SEQ ID NO: 14704 - DNA, 25 bp, Homo sapien
actcattccgacttgtcctaagtcg

SEQ ID NO: 14705 - DNA, 25 bp, Homo sapien
cgagtcttttcttaatcctaagacg

SEQ ID NO: 14706 - DNA, 25 bp, Homo sapien
cgagtcttttctaaatcctaagacg

SEQ ID NO: 14707 - DNA, 25 bp, Homo sapien
tgacaaattttctgatcccaagacg

SEQ ID NO: 14708 - DNA, 25 bp, Homo sapien
tgacaaattttcagatcccaagacg

SEQ ID NO: 14709 - DNA, 25 bp, Homo sapien
gtaaaattctagaagagactacacc

SEQ ID NO: 14710 - DNA, 25 bp, Homo sapien
gtaaaattctagtagagactacacc

SEQ ID NO: 14711 - DNA, 25 bp, Homo sapien
acggacgtgtcaggagaacccgtcg

SEQ ID NO: 14712 - DNA, 25 bp, Homo sapien
acggacgtgtcacgagaacccgtcg

SEQ ID NO: 14713 - DNA, 25 bp, Homo sapien
tacggagcgcgaagaggacttaccg

SEQ ID NO: 14714 - DNA, 25 bp, Homo sapien
tacggagcgcgatgaggacttaccg

SEQ ID NO: 14715 - DNA, 25 bp, Homo sapien
tctagtagttcttccgagggtcacg

SEQ ID NO: 14716 - DNA, 25 bp, Homo sapien
tctagtagttctaccgagggtcacg

SEQ ID NO: 14717 - DNA, 25 bp, Homo sapien
gtcgacacggacaagaggcacccgt

SEQ ID NO: 14718 - DNA, 25 bp, Homo sapien
gtcgacacggactagaggcacccgt

SEQ ID NO: 14719 - DNA, 25 bp, Homo sapien
cgaggtcaaccgaggccgagacctc

SEQ ID NO: 14720 - DNA, 25 bp, Homo sapien
cgaggtcaaccgtggccgagacctc

SEQ ID NO: 14721 - DNA, 25 bp, Homo sapien
acgaagagaactcgtcagactcctc

SEQ ID NO: 14722 - DNA, 25 bp, Homo sapien
acgaagagaactggtcagactcctc

SEQ ID NO: 14723 - DNA, 25 bp, Homo sapien
acgaacggaagtggaagacgtctaa

SEQ ID NO: 14724 - DNA, 25 bp, Homo sapien
acgaacggaagtcgaagacgtctaa

SEQ ID NO: 14725 - DNA, 25 bp, Homo sapien
atcttcgaaggagacgtatactaca

SEQ ID NO: 14726 - DNA, 25 bp, Homo sapien
atcttcgaaggacacgtatactaca

SEQ ID NO: 14727 - DNA, 25 bp, Homo sapien
cgttctatagtttccgagttcgagt

SEQ ID NO: 14728 - DNA, 25 bp, Homo sapien
cgttctatagttaccgagttcgagt

SEQ ID NO: 14729 - DNA, 25 bp, Homo sapien
cgtccgttttagttgaggggtcagt

SEQ ID NO: 14730 - DNA, 25 bp, Homo sapien
cgtccgttttagatgaggggtcagt

SEQ ID NO: 14731 - DNA, 25 bp, Homo sapien
ctcctctgtttcgacgaggtctcgg

SEQ ID NO: 14732 - DNA, 25 bp, Homo sapien
ctcctctgtttccacgaggtctcgg

SEQ ID NO: 14733 - DNA, 25 bp, Homo sapien
cttctagtgtagattcaagttcaga

SEQ ID NO: 14734 - DNA, 25 bp, Homo sapien
cttctagtgtagtttcaagttcaga

SEQ ID NO: 14735 - DNA, 25 bp, Homo sapien
gttattggtcgttcatttactaaac

SEQ ID NO: 14736 - DNA, 25 bp, Homo sapien
gttattggtcgtacatttactaaac

SEQ ID NO: 14737 - DNA, 25 bp, Homo sapien
ataactgtttgtctagtttcattcg

SEQ ID NO: 14738 - DNA, 25 bp, Homo sapien
ataactgtttgtgtagtttcattcg

SEQ ID NO: 14739 - DNA, 25 bp, Homo sapien
ttagacctcttttcggttctggacc

SEQ ID NO: 14740 - DNA, 25 bp, Homo sapien
ttagacctctttacggttctggacc

SEQ ID NO: 14741 - DNA, 25 bp, Homo sapien
ctctgtctcttcgtctcctcggacc

SEQ ID NO: 14742 - DNA, 25 bp, Homo sapien
ctctgtctcttcctctcctcggacc

SEQ ID NO: 14743 - DNA, 25 bp, Homo sapien
gcttgacttgtctttacgtcctccc

SEQ ID NO: 14744 - DNA, 25 bp, Homo sapien
gcttgacttgtcattacgtcctccc

SEQ ID NO: 14745 - DNA, 25 bp, Homo sapien
ctgacttgtctacttccgtagtcta

SEQ ID NO: 14746 - DNA, 25 bp, Homo sapien
ctgacttgtctagttccgtagtcta

SEQ ID NO: 14747 - DNA, 25 bp, Homo sapien
ctggacgtttccagtctctgtcttt

SEQ ID NO: 14748 - DNA, 25 bp, Homo sapien
ctggacgtttcctgtctctgtcttt

SEQ ID NO: 14749 - DNA, 25 bp, Homo sapien
ggtcggtaccctaattcttccttct

SEQ ID NO: 14750 - DNA, 25 bp, Homo sapien
ggtcggtacccttattcttccttct

SEQ ID NO: 14751 - DNA, 25 bp, Homo sapien
tgacagagtatgaactttctcattg

SEQ ID NO: 14752 - DNA, 25 bp, Homo sapien
tgacagagtatgtactttctcattg

SEQ ID NO: 14753 - DNA, 25 bp, Homo sapien
acaggtgggtacttaccttactctc

SEQ ID NO: 14754 - DNA, 25 bp, Homo sapien
acaggtgggtacataccttactctc

SEQ ID NO: 14755 - DNA, 25 bp, Homo sapien
tactgtttccgatatgtcgtataac

SEQ ID NO: 14756 - DNA, 25 bp, Homo sapien
tactgtttccgaaatgtcgtataac

SEQ ID NO: 14757 - DNA, 25 bp, Homo sapien
gttcatacacgtgttagtatactct

SEQ ID NO: 14758 - DNA, 25 bp, Homo sapien
gttcatacacgtcttagtatactct

SEQ ID NO: 14759 - DNA, 25 bp, Homo sapien
atagacgtcatcagcaggtagaaca

SEQ ID NO: 14760 - DNA, 25 bp, Homo sapien
atagacgtcatctgcaggtagaaca

SEQ ID NO: 14761 - DNA, 25 bp, Homo sapien
acattgtgtgtttacgacagaacag

SEQ ID NO: 14762 - DNA, 25 bp, Homo sapien
acattgtgtgttaacgacagaacag

SEQ ID NO: 14763 - DNA, 25 bp, Homo sapien
tctttgtcgtttcacccgtacatag

SEQ ID NO: 14764 - DNA, 25 bp, Homo sapien
tctttgtcgtttgacccgtacatag

SEQ ID NO: 14765 - DNA, 25 bp, Homo sapien
aaattactgttcgttaacggtccga

SEQ ID NO: 14766 - DNA, 25 bp, Homo sapien
aaattactgttccttaacggtccga

SEQ ID NO: 14767 - DNA, 25 bp, Homo sapien
catgtatatgtctctgagagtggct

SEQ ID NO: 14768 - DNA, 25 bp, Homo sapien
catgtatatgtcactgagagtggct

SEQ ID NO: 14769 - DNA, 25 bp, Homo sapien
ttgcgaatcaagtaaacgtactcgt

SEQ ID NO: 14770 - DNA, 25 bp, Homo sapien
ttgcgaatcaagaaaacgtactcgt

SEQ ID NO: 14771 - DNA, 25 bp, Homo sapien
acgaagtcgaagtgattcaactgtt

SEQ ID NO: 14772 - DNA, 25 bp, Homo sapien
acgaagtcgaagagattcaactgtt

SEQ ID NO: 14773 - DNA, 25 bp, Homo sapien
tacgtcatcatgcaagtcctttgtg

SEQ ID NO: 14774 - DNA, 25 bp, Homo sapien
tacgtcatcatggaagtcctttgtg

SEQ ID NO: 14775 - DNA, 25 bp, Homo sapien
tcaaataaacgtaagtccgttcatg

SEQ ID NO: 14776 - DNA, 25 bp, Homo sapien
tcaaataaacgttagtccgttcatg

SEQ ID NO: 14777 - DNA, 25 bp, Homo sapien
gtcctccgacgatgtctcctttagg

SEQ ID NO: 14778 - DNA, 25 bp, Homo sapien
gtcctccgacgaagtctcctttagg

SEQ ID NO: 14779 - DNA, 25 bp, Homo sapien
aatcgctcctagaaagaacacttgg

SEQ ID NO: 14780 - DNA, 25 bp, Homo sapien
aatcgctcctagtaagaacacttgg

SEQ ID NO: 14781 - DNA, 25 bp, Homo sapien
tcgtcgtcatagtacaaacagtaaa

SEQ ID NO: 14782 - DNA, 25 bp, Homo sapien
tcgtcgtcatagaacaaacagtaaa

SEQ ID NO: 14783 - DNA, 25 bp, Homo sapien
gaatactttcgcatacacaccggaa

SEQ ID NO: 14784 - DNA, 25 bp, Homo sapien
gaatactttcgcttacacaccggaa

SEQ ID NO: 14785 - DNA, 25 bp, Homo sapien
cagatgtaattctttgactgtacaa

SEQ ID NO: 14786 - DNA, 25 bp, Homo sapien
cagatgtaattcattgactgtacaa

SEQ ID NO: 14787 - DNA, 25 bp, Homo sapien
tctgttacatacatgtgctgtattc

SEQ ID NO: 14788 - DNA, 25 bp, Homo sapien
tctgttacatacttgtgctgtattc

SEQ ID NO: 14789 - DNA, 25 bp, Homo sapien
aagacgtcttcgattttgttgaaga

SEQ ID NO: 14790 - DNA, 25 bp, Homo sapien
aagacgtcttcgtttttgttgaaga

SEQ ID NO: 14791 - DNA, 25 bp, Homo sapien
aagagactcatgtttcatttcagac

SEQ ID NO: 14792 - DNA, 25 bp, Homo sapien
aagagactcatgattcatttcagac

SEQ ID NO: 14793 - DNA, 25 bp, Homo sapien
caaggggatgctaaggtttgtactc

SEQ ID NO: 14794 - DNA, 25 bp, Homo sapien
caaggggatgcttaggtttgtactc

SEQ ID NO: 14795 - DNA, 25 bp, Homo sapien
cctctaacatcgtgggtgtgtctat

SEQ ID NO: 14796 - DNA, 25 bp, Homo sapien
cctctaacatcgagggtgtgtctat

SEQ ID NO: 14797 - DNA, 25 bp, Homo sapien
cccaaccactgtcacggagggtcga

SEQ ID NO: 14798 - DNA, 25 bp, Homo sapien
cccaaccactgtgacggagggtcga

SEQ ID NO: 14799 - DNA, 25 bp, Homo sapien
tctataacccaaacggtctcgatga

SEQ ID NO: 14800 - DNA, 25 bp, Homo sapien
tctataacccaatcggtctcgatga

SEQ ID NO: 14801 - DNA, 25 bp, Homo sapien
acgttaactccacaaggtagttcac

SEQ ID NO: 14802 - DNA, 25 bp, Homo sapien
acgttaactccagaaggtagttcac

SEQ ID NO: 14803 - DNA, 25 bp, Homo sapien
ctaggtgagccgtcaacggtttacc

SEQ ID NO: 14804 - DNA, 25 bp, Homo sapien
ctaggtgagccgacaacggtttacc

SEQ ID NO: 14805 - DNA, 25 bp, Homo sapien
gtgggctcgactcagggtcccacgt

SEQ ID NO: 14806 - DNA, 25 bp, Homo sapien
gtgggctcgactgagggtcccacgt

SEQ ID NO: 14807 - DNA, 25 bp, Homo sapien
tattccgtccggatacagtttgagt

SEQ ID NO: 14808 - DNA, 25 bp, Homo sapien
tattccgtccggttacagtttgagt

SEQ ID NO: 14809 - DNA, 25 bp, Homo sapien
acgtgcgtcctcgaaggcccgtagt

SEQ ID NO: 14810 - DNA, 25 bp, Homo sapien
acgtgcgtcctccaaggcccgtagt

SEQ ID NO: 14811 - DNA, 25 bp, Homo sapien
ctgtgtcgacctcgtagggccagtc

SEQ ID NO: 14812 - DNA, 25 bp, Homo sapien
ctgtgtcgacctggtagggccagtc

SEQ ID NO: 14813 - DNA, 25 bp, Homo sapien
gtctttgagactctcgaataaatgt

SEQ ID NO: 14814 - DNA, 25 bp, Homo sapien
gtctttgagactgtcgaataaatgt

SEQ ID NO: 14815 - DNA, 25 bp, Homo sapien
gtttccgagactttcttgtctcatt

SEQ ID NO: 14816 - DNA, 25 bp, Homo sapien
gtttccgagactatcttgtctcatt

SEQ ID NO: 14817 - DNA, 25 bp, Homo sapien
acaccgaccgtaaatcacccgtgtg

SEQ ID NO: 14818 - DNA, 25 bp, Homo sapien
acaccgaccgtatatcacccgtgtg

SEQ ID NO: 14819 - DNA, 25 bp, Homo sapien
ggaacaccttgtaaacacatactgt

SEQ ID NO: 14820 - DNA, 25 bp, Homo sapien
ggaacaccttgttaacacatactgt

SEQ ID NO: 14821 - DNA, 25 bp, Homo sapien
ggagaacctgtaacaacataaagtt

SEQ ID NO: 14822 - DNA, 25 bp, Homo sapien
ggagaacctgtatcaacataaagtt

SEQ ID NO: 14823 - DNA, 25 bp, Homo sapien
gggtaatcgtttagactcacacctt

SEQ ID NO: 14824 - DNA, 25 bp, Homo sapien
gggtaatcgttttgactcacacctt

SEQ ID NO: 14825 - DNA, 25 bp, Homo sapien
aacagaaagtgtgtgacctacaaat

SEQ ID NO: 14826 - DNA, 25 bp, Homo sapien
aacagaaagtgtctgacctacaaat

SEQ ID NO: 14827 - DNA, 25 bp, Homo sapien
tttgaaatgacagtctccgagacga

SEQ ID NO: 14828 - DNA, 25 bp, Homo sapien
tttgaaatgacactctccgagacga

SEQ ID NO: 14829 - DNA, 25 bp, Homo sapien
gttaaactagagagtaaccgaacta

SEQ ID NO: 14830 - DNA, 25 bp, Homo sapien
gttaaactagagtgtaaccgaacta

SEQ ID NO: 14831 - DNA, 25 bp, Homo sapien
gtgtcggtcaaaggtgacccttctc

SEQ ID NO: 14832 - DNA, 25 bp, Homo sapien
gtgtcggtcaaacgtgacccttctc

SEQ ID NO: 14833 - DNA, 25 bp, Homo sapien
aggactcacacaggaaaccagtctc

SEQ ID NO: 14834 - DNA, 25 bp, Homo sapien
aggactcacacacgaaaccagtctc

SEQ ID NO: 14835 - DNA, 25 bp, Homo sapien
ggtccgacgagtgaagaacctctcg

SEQ ID NO: 14836 - DNA, 25 bp, Homo sapien
ggtccgacgagtcaagaacctctcg

SEQ ID NO: 14837 - DNA, 25 bp, Homo sapien
gggtagttacgaggtagaacagcca

SEQ ID NO: 14838 - DNA, 25 bp, Homo sapien
gggtagttacgacgtagaacagcca

SEQ ID NO: 14839 - DNA, 25 bp, Homo sapien
cgtacaacttacttgtcttagggaa

SEQ ID NO: 14840 - DNA, 25 bp, Homo sapien
cgtacaacttacatgtcttagggaa

SEQ ID NO: 14841 - DNA, 25 bp, Homo sapien
gaaatcgtaggaccatcgtaataag

SEQ ID NO: 14842 - DNA, 25 bp, Homo sapien
gaaatcgtaggagcatcgtaataag

SEQ ID NO: 14843 - DNA, 25 bp, Homo sapien
tcactgtcgagagtgtaagtcacgt

SEQ ID NO: 14844 - DNA, 25 bp, Homo sapien
tcactgtcgagactgtaagtcacgt

SEQ ID NO: 14845 - DNA, 25 bp, Homo sapien
tgacctcgtccttcagaaacatccg

SEQ ID NO: 14846 - DNA, 25 bp, Homo sapien
tgacctcgtcctacagaaacatccg

SEQ ID NO: 14847 - DNA, 25 bp, Homo sapien
ccaaagtccctgtcagagacttacc

SEQ ID NO: 14848 - DNA, 25 bp, Homo sapien
ccaaagtccctgacagagacttacc

SEQ ID NO: 14849 - DNA, 25 bp, Homo sapien
acatgaagtctgtaagatcttcacg

SEQ ID NO: 14850 - DNA, 25 bp, Homo sapien
acatgaagtctgaaagatcttcacg

SEQ ID NO: 14851 - DNA, 25 bp, Homo sapien
caatgagggagagaactgtacttct

SEQ ID NO: 14852 - DNA, 25 bp, Homo sapien
caatgagggagacaactgtacttct

SEQ ID NO: 14853 - DNA, 25 bp, Homo sapien
actcaatcggggaccatatgtcatc

SEQ ID NO: 14854 - DNA, 25 bp, Homo sapien
actcaatcggggtccatatgtcatc

SEQ ID NO: 14855 - DNA, 25 bp, Homo sapien
cacaggagaagtcaccataaacgcc

SEQ ID NO: 14856 - DNA, 25 bp, Homo sapien
cacaggagaagtgaccataaacgcc

SEQ ID NO: 14857 - DNA, 25 bp, Homo sapien
tgacgacgagtactaggggagctct

SEQ ID NO: 14858 - DNA, 25 bp, Homo sapien
tgacgacgagtagtaggggagctct

SEQ ID NO: 14859 - DNA, 25 bp, Homo sapien
gagacatatgttaacaggtcgtcgt

SEQ ID NO: 14860 - DNA, 25 bp, Homo sapien
gagacatatgtttacaggtcgtcgt

SEQ ID NO: 14861 - DNA, 25 bp, Homo sapien
ttatgtcactcttgtttctggagtc

SEQ ID NO: 14862 - DNA, 25 bp, Homo sapien
ttatgtcactctagtttctggagtc

SEQ ID NO: 14863 - DNA, 25 bp, Homo sapien
aatgtacattgattctcgtttcacg

SEQ ID NO: 14864 - DNA, 25 bp, Homo sapien
aatgtacattgaatctcgtttcacg

SEQ ID NO: 14865 - DNA, 25 bp, Homo sapien
tttaggacgtttgtcttacattacc

SEQ ID NO: 14866 - DNA, 25 bp, Homo sapien
tttaggacgtttctcttacattacc

SEQ ID NO: 14867 - DNA, 25 bp, Homo sapien
tcgttgggtgtctactactcccaaa

SEQ ID NO: 14868 - DNA, 25 bp, Homo sapien
tcgttgggtgtcaactactcccaaa

SEQ ID NO: 14869 - DNA, 25 bp, Homo sapien
ccctgggcatcctgtctacaactag

SEQ ID NO: 14870 - DNA, 25 bp, Homo sapien
ccctgggcatccagtctacaactag

SEQ ID NO: 14871 - DNA, 25 bp, Homo sapien
ccggggtctctctgatcttgactcg

SEQ ID NO: 14872 - DNA, 25 bp, Homo sapien
ccggggtctctcagatcttgactcg

SEQ ID NO: 14873 - DNA, 25 bp, Homo sapien
acctcgggtcgctcatctttcacag

SEQ ID NO: 14874 - DNA, 25 bp, Homo sapien
acctcgggtcgcacatctttcacag

SEQ ID NO: 14875 - DNA, 25 bp, Homo sapien
ggagaccccggtcctctcgacgtag

SEQ ID NO: 14876 - DNA, 25 bp, Homo sapien
ggagaccccggtgctctcgacgtag

SEQ ID NO: 14877 - DNA, 25 bp, Homo sapien
cggtggtccttcaggggtctcgacc

SEQ ID NO: 14878 - DNA, 25 bp, Homo sapien
cggtggtccttctggggtctcgacc

SEQ ID NO: 14879 - DNA, 25 bp, Homo sapien
gaagagtctccgtccgggtctaggc

SEQ ID NO: 14880 - DNA, 25 bp, Homo sapien
gaagagtctccgaccgggtctaggc

SEQ ID NO: 14881 - DNA, 25 bp, Homo sapien
tatactgtatccacgataataaagg

SEQ ID NO: 14882 - DNA, 25 bp, Homo sapien
tatactgtatcctcgataataaagg

SEQ ID NO: 14883 - DNA, 25 bp, Homo sapien
gtttctctttcgtccagatattgta

SEQ ID NO: 14884 - DNA, 25 bp, Homo sapien
gtttctctttcgaccagatattgta

SEQ ID NO: 14885 - DNA, 25 bp, Homo sapien
gtgatatgttccaaacaacttatga

SEQ ID NO: 14886 - DNA, 25 bp, Homo sapien
gtgatatgttcctaacaacttatga

SEQ ID NO: 14887 - DNA, 25 bp, Homo sapien
gtttgtttccttgactcacattgat

SEQ ID NO: 14888 - DNA, 25 bp, Homo sapien
gtttgtttccttcactcacattgat

SEQ ID NO: 14889 - DNA, 25 bp, Homo sapien
ttttaggaactcacttctcttgact

SEQ ID NO: 14890 - DNA, 25 bp, Homo sapien
ttttaggaactctcttctcttgact

SEQ ID NO: 14891 - DNA, 25 bp, Homo sapien
tcataaccaccgtagcttttggcgt

SEQ ID NO: 14892 - DNA, 25 bp, Homo sapien
tcataaccaccgaagcttttggcgt

SEQ ID NO: 14893 - DNA, 25 bp, Homo sapien
taagaagtgctcactacttgttgaa

SEQ ID NO: 14894 - DNA, 25 bp, Homo sapien
taagaagtgctctctacttgttgaa

SEQ ID NO: 14895 - DNA, 25 bp, Homo sapien
aacgaaccatcttaggtcagacagt

SEQ ID NO: 14896 - DNA, 25 bp, Homo sapien
aacgaaccatctaaggtcagacagt

SEQ ID NO: 14897 - DNA, 25 bp, Homo sapien
aaagagaaatcgtacctgagactac

SEQ ID NO: 14898 - DNA, 25 bp, Homo sapien
aaagagaaatcgaacctgagactac

SEQ ID NO: 14899 - DNA, 25 bp, Homo sapien
agagacgaatagatctgtccgtgta

SEQ ID NO: 14900 - DNA, 25 bp, Homo sapien
agagacgaatagttctgtccgtgta

SEQ ID NO: 14901 - DNA, 25 bp, Homo sapien
cacgttagaaacgtactgttggtct

SEQ ID NO: 14902 - DNA, 25 bp, Homo sapien
cacgttagaaacctactgttggtct

SEQ ID NO: 14903 - DNA, 25 bp, Homo sapien
gtatacgaaacgtatagtctcgacc

SEQ ID NO: 14904 - DNA, 25 bp, Homo sapien
gtatacgaaacgaatagtctcgacc

SEQ ID NO: 14905 - DNA, 25 bp, Homo sapien
tccaggagacactggcactcggacc

SEQ ID NO: 14906 - DNA, 25 bp, Homo sapien
tccaggagacacaggcactcggacc

SEQ ID NO: 14907 - DNA, 25 bp, Homo sapien
gtggtgtcgtagatgacgtcctcca

SEQ ID NO: 14908 - DNA, 25 bp, Homo sapien
gtggtgtcgtagttgacgtcctcca

SEQ ID NO: 14909 - DNA, 25 bp, Homo sapien
tatgtagttctggtcttcggttcag

SEQ ID NO: 14910 - DNA, 25 bp, Homo sapien
tatgtagttctgctcttcggttcag

SEQ ID NO: 14911 - DNA, 25 bp, Homo sapien
tcatagtaaacgtcagtatagttca

SEQ ID NO: 14912 - DNA, 25 bp, Homo sapien
tcatagtaaacgacagtatagttca

SEQ ID NO: 14913 - DNA, 25 bp, Homo sapien
gatgtcgattagcaaagtcttttca

SEQ ID NO: 14914 - DNA, 25 bp, Homo sapien
gatgtcgattaggaaagtcttttca

SEQ ID NO: 14915 - DNA, 25 bp, Homo sapien
tatggatatggacagtatgtcttcc

SEQ ID NO: 14916 - DNA, 25 bp, Homo sapien
tatggatatggagagtatgtcttcc

SEQ ID NO: 14917 - DNA, 25 bp, Homo sapien
atgctaatgacgactgtttaccttc

SEQ ID NO: 14918 - DNA, 25 bp, Homo sapien
atgctaatgacgtctgtttaccttc

SEQ ID NO: 14919 - DNA, 25 bp, Homo sapien
actcttctaagcagcaggactcttc

SEQ ID NO: 14920 - DNA, 25 bp, Homo sapien
actcttctaagctgcaggactcttc

SEQ ID NO: 14921 - DNA, 25 bp, Homo sapien
gacaccttcaagtgcgaggtcaacc

SEQ ID NO: 14922 - DNA, 25 bp, Homo sapien
gacaccttcaagagcgaggtcaacc

SEQ ID NO: 14923 - DNA, 25 bp, Homo sapien
ctctctcgtaactgggtggacggtc

SEQ ID NO: 14924 - DNA, 25 bp, Homo sapien
ctctctcgtaacagggtggacggtc

SEQ ID NO: 14925 - DNA, 25 bp, Homo sapien
cttctgacgaaggtagagtcgtact

SEQ ID NO: 14926 - DNA, 25 bp, Homo sapien
cttctgacgaagctagagtcgtact

SEQ ID NO: 14927 - DNA, 25 bp, Homo sapien
acccttatgtacaggacgtcgattt

SEQ ID NO: 14928 - DNA, 25 bp, Homo sapien
acccttatgtactggacgtcgattt

SEQ ID NO: 14929 - DNA, 25 bp, Homo sapien
acgtgcgtccttgtacccgacgtga

SEQ ID NO: 14930 - DNA, 25 bp, Homo sapien
acgtgcgtccttctacccgacgtga

SEQ ID NO: 14931 - DNA, 25 bp, Homo sapien
cactcgatgggtcagaatctctaag

SEQ ID NO: 14932 - DNA, 25 bp, Homo sapien
cactcgatgggtgagaatctctaag

SEQ ID NO: 14933 - DNA, 25 bp, Homo sapien
acgctagagggcatggttcgcgact

SEQ ID NO: 14934 - DNA, 25 bp, Homo sapien
acgctagagggcttggttcgcgact

SEQ ID NO: 14935 - DNA, 25 bp, Homo sapien
tcatagtgtcgttgaacactaaggt

SEQ ID NO: 14936 - DNA, 25 bp, Homo sapien
tcatagtgtcgtagaacactaaggt

SEQ ID NO: 14937 - DNA, 25 bp, Homo sapien
tgtttataatcattactccagtagg

SEQ ID NO: 14938 - DNA, 25 bp, Homo sapien
tgtttataatcaatactccagtagg

SEQ ID NO: 14939 - DNA, 25 bp, Homo sapien
catcttgagttcgtccgccgagagg

SEQ ID NO: 14940 - DNA, 25 bp, Homo sapien
catcttgagttcctccgccgagagg

SEQ ID NO: 14941 - DNA, 25 bp, Homo sapien
tttcttaggttttcaggcacgagac

SEQ ID NO: 14942 - DNA, 25 bp, Homo sapien
tttcttaggtttacaggcacgagac

SEQ ID NO: 14943 - DNA, 25 bp, Homo sapien
ttttatcaggttcgacatcgctaaa

SEQ ID NO: 14944 - DNA, 25 bp, Homo sapien
ttttatcaggttggacatcgctaaa

SEQ ID NO: 14945 - DNA, 25 bp, Homo sapien
tatacagagttcgaagtacctctcc

SEQ ID NO: 14946 - DNA, 25 bp, Homo sapien
tatacagagttccaagtacctctcc

SEQ ID NO: 14947 - DNA, 25 bp, Homo sapien
cctacgagtggtgacagtcatttat

SEQ ID NO: 14948 - DNA, 25 bp, Homo sapien
cctacgagtggtcacagtcatttat

SEQ ID NO: 14949 - DNA, 25 bp, Homo sapien
acgaacggagtcagaaatgcttctt

SEQ ID NO: 14950 - DNA, 25 bp, Homo sapien
acgaacggagtctgaaatgcttctt

SEQ ID NO: 14951 - DNA, 25 bp, Homo sapien
ataacaggtacctgataatgttgtc

SEQ ID NO: 14952 - DNA, 25 bp, Homo sapien
ataacaggtaccagataatgttgtc

SEQ ID NO: 14953 - DNA, 25 bp, Homo sapien
aaccgacattatgactccattggtt

SEQ ID NO: 14954 - DNA, 25 bp, Homo sapien
aaccgacattatcactccattggtt

SEQ ID NO: 14955 - DNA, 25 bp, Homo sapien
gaaaaaaccctcattttagtcgatg

SEQ ID NO: 14956 - DNA, 25 bp, Homo sapien
gaaaaaaccctctttttagtcgatg

SEQ ID NO: 14957 - DNA, 25 bp, Homo sapien
ttcaatcctcgtttgtcatcgaagt

SEQ ID NO: 14958 - DNA, 25 bp, Homo sapien
ttcaatcctcgtatgtcatcgaagt

SEQ ID NO: 14959 - DNA, 25 bp, Homo sapien
cattggtcggtctcgtaagaaacgg

SEQ ID NO: 14960 - DNA, 25 bp, Homo sapien
cattggtcggtcacgtaagaaacgg

SEQ ID NO: 14961 - DNA, 25 bp, Homo sapien
tttctacacgtcacacaccgcgagg

SEQ ID NO: 14962 - DNA, 25 bp, Homo sapien
tttctacacgtctcacaccgcgagg

SEQ ID NO: 14963 - DNA, 25 bp, Homo sapien
gtgtccactcctcctctacagaggt

SEQ ID NO: 14964 - DNA, 25 bp, Homo sapien
gtgtccactcctgctctacagaggt

SEQ ID NO: 14965 - DNA, 25 bp, Homo sapien
aaggttggacccttaacgacaccgg

SEQ ID NO: 14966 - DNA, 25 bp, Homo sapien
aaggttggacccataacgacaccgg

SEQ ID NO: 14967 - DNA, 25 bp, Homo sapien
taagactgagtacaccaagaccagc

SEQ ID NO: 14968 - DNA, 25 bp, Homo sapien
taagactgagtagaccaagaccagc

SEQ ID NO: 14969 - DNA, 25 bp, Homo sapien
ccttcttggaggtactggacacagg

SEQ ID NO: 14970 - DNA, 25 bp, Homo sapien
ccttcttggaggaactggacacagg

SEQ ID NO: 14971 - DNA, 25 bp, Homo sapien
tcaaagctgccctgataaaacttag

SEQ ID NO: 14972 - DNA, 25 bp, Homo sapien
tcaaagctgcccagataaaacttag

SEQ ID NO: 14973 - DNA, 25 bp, Homo sapien
tcaaaagttcatgtacaacaagctg

SEQ ID NO: 14974 - DNA, 25 bp, Homo sapien
tcaaaagttcatctacaacaagctg

SEQ ID NO: 14975 - DNA, 25 bp, Homo sapien
acaaagtcctccattaggaagatca

SEQ ID NO: 14976 - DNA, 25 bp, Homo sapien
acaaagtcctcctttaggaagatca

SEQ ID NO: 14977 - DNA, 25 bp, Homo sapien
cgatatatgacataggagacccatt

SEQ ID NO: 14978 - DNA, 25 bp, Homo sapien
cgatatatgacaaaggagacccatt

SEQ ID NO: 14979 - DNA, 25 bp, Homo sapien
tcaaacggaaaagactgacgtatta

SEQ ID NO: 14980 - DNA, 25 bp, Homo sapien
tcaaacggaaaacactgacgtatta

SEQ ID NO: 14981 - DNA, 25 bp, Homo sapien
aataaccgcgtaatgcgccattcac

SEQ ID NO: 14982 - DNA, 25 bp, Homo sapien
aataaccgcgtattgcgccattcac

SEQ ID NO: 14983 - DNA, 25 bp, Homo sapien
gtttcacgatcgtgactcctctcac

SEQ ID NO: 14984 - DNA, 25 bp, Homo sapien
gtttcacgatcgagactcctctcac

SEQ ID NO: 14985 - DNA, 25 bp, Homo sapien
ggtgtccccgtgaacgtatcgtccc

SEQ ID NO: 14986 - DNA, 25 bp, Homo sapien
ggtgtccccgtgtacgtatcgtccc

SEQ ID NO: 14987 - DNA, 25 bp, Homo sapien
ccgagatctctgactctgtccactt

SEQ ID NO: 14988 - DNA, 25 bp, Homo sapien
ccgagatctctgtctctgtccactt

SEQ ID NO: 14989 - DNA, 25 bp, Homo sapien
ccagtaggtgtgttatcttgccagt

SEQ ID NO: 14990 - DNA, 25 bp, Homo sapien
ccagtaggtgtgatatcttgccagt

SEQ ID NO: 14991 - DNA, 25 bp, Homo sapien
atccttcagtcgaactcttctgaag

SEQ ID NO: 14992 - DNA, 25 bp, Homo sapien
atccttcagtcgtactcttctgaag

SEQ ID NO: 14993 - DNA, 25 bp, Homo sapien
cctccgtcttcctctcttgtgtggt

SEQ ID NO: 14994 - DNA, 25 bp, Homo sapien
cctccgtcttccactcttgtgtggt

SEQ ID NO: 14995 - DNA, 25 bp, Homo sapien
tacacctccgcgtcgtctgcttgtg

SEQ ID NO: 14996 - DNA, 25 bp, Homo sapien
tacacctccgcgacgtctgcttgtg

SEQ ID NO: 14997 - DNA, 25 bp, Homo sapien
tcctcaccgttaggaccggctgtcg

SEQ ID NO: 14998 - DNA, 25 bp, Homo sapien
tcctcaccgttacgaccggctgtcg

SEQ ID NO: 14999 - DNA, 25 bp, Homo sapien
cgatcatgatatgagtcggtcggtc

SEQ ID NO: 15000 - DNA, 25 bp, Homo sapien
cgatcatgatatcagtcggtcggtc

SEQ ID NO: 15001 - DNA, 25 bp, Homo sapien
gaaccggtcctgttacatcgccaaa

SEQ ID NO: 15002 - DNA, 25 bp, Homo sapien
gaaccggtcctgatacatcgccaaa

SEQ ID NO: 15003 - DNA, 25 bp, Homo sapien
agtcgaggaagaacgagtcgaacat

SEQ ID NO: 15004 - DNA, 25 bp, Homo sapien
agtcgaggaagatcgagtcgaacat

SEQ ID NO: 15005 - DNA, 25 bp, Homo sapien
acatcatagaacatgttgacgtata

SEQ ID NO: 15006 - DNA, 25 bp, Homo sapien
acatcatagaacttgttgacgtata

SEQ ID NO: 15007 - DNA, 25 bp, Homo sapien
taacgaaacagtgcatagtccaaga

SEQ ID NO: 15008 - DNA, 25 bp, Homo sapien
taacgaaacagtccatagtccaaga

SEQ ID NO: 15009 - DNA, 25 bp, Homo sapien
ggtaaatcactaaactgtgtcagga

SEQ ID NO: 15010 - DNA, 25 bp, Homo sapien
ggtaaatcactatactgtgtcagga

SEQ ID NO: 15011 - DNA, 25 bp, Homo sapien
agtttactcagtatctagctcagaa

SEQ ID NO: 15012 - DNA, 25 bp, Homo sapien
agtttactcagtttctagctcagaa

SEQ ID NO: 15013 - DNA, 25 bp, Homo sapien
aactgtttattcgactgatctgata

SEQ ID NO: 15014 - DNA, 25 bp, Homo sapien
aactgtttattccactgatctgata

SEQ ID NO: 15015 - DNA, 25 bp, Homo sapien
ccataataaacatacggcttgtttg

SEQ ID NO: 15016 - DNA, 25 bp, Homo sapien
ccataataaacaaacggcttgtttg

SEQ ID NO: 15017 - DNA, 25 bp, Homo sapien
gagaaatgaaacacgcctcttcttt

SEQ ID NO: 15018 - DNA, 25 bp, Homo sapien
gagaaatgaaactcgcctcttcttt

SEQ ID NO: 15019 - DNA, 25 bp, Homo sapien
acgtcaaagggaagtcagtactcat

SEQ ID NO: 15020 - DNA, 25 bp, Homo sapien
acgtcaaagggatgtcagtactcat

SEQ ID NO: 15021 - DNA, 25 bp, Homo sapien
agacaaatgttatgtacgttacctt

SEQ ID NO: 15022 - DNA, 25 bp, Homo sapien
agacaaatgttaagtacgttacctt

SEQ ID NO: 15023 - DNA, 25 bp, Homo sapien
agttggtcgttctaagtcgtggttc

SEQ ID NO: 15024 - DNA, 25 bp, Homo sapien
agttggtcgttcaaagtcgtggttc

SEQ ID NO: 15025 - DNA, 25 bp, Homo sapien
gtggtattctacttatttctcgaat

SEQ ID NO: 15026 - DNA, 25 bp, Homo sapien
gtggtattctacatatttctcgaat

SEQ ID NO: 15027 - DNA, 25 bp, Homo sapien
gtcgtactggtgaacaactttagaa

SEQ ID NO: 15028 - DNA, 25 bp, Homo sapien
gtcgtactggtgtacaactttagaa

SEQ ID NO: 15029 - DNA, 25 bp, Homo sapien
tccgtttcaccgaagaacctctgaa

SEQ ID NO: 15030 - DNA, 25 bp, Homo sapien
tccgtttcaccgtagaacctctgaa

SEQ ID NO: 15031 - DNA, 25 bp, Homo sapien
cgacattttccttgtgtctttgaac

SEQ ID NO: 15032 - DNA, 25 bp, Homo sapien
cgacattttcctagtgtctttgaac

SEQ ID NO: 15033 - DNA, 25 bp, Homo sapien
ggggttgtccctagttccttttacg

SEQ ID NO: 15034 - DNA, 25 bp, Homo sapien
ggggttgtcccttgttccttttacg

SEQ ID NO: 15035 - DNA, 25 bp, Homo sapien
tatggtgctcttttaaatcgtttac

SEQ ID NO: 15036 - DNA, 25 bp, Homo sapien
tatggtgctcttataaatcgtttac

SEQ ID NO: 15037 - DNA, 25 bp, Homo sapien
taccgttacagaaggactcgtttcg

SEQ ID NO: 15038 - DNA, 25 bp, Homo sapien
taccgttacagatggactcgtttcg

SEQ ID NO: 15039 - DNA, 25 bp, Homo sapien
gactccgaccaatctgaactcttcg

SEQ ID NO: 15040 - DNA, 25 bp, Homo sapien
gactccgaccaaactgaactcttcg

SEQ ID NO: 15041 - DNA, 25 bp, Homo sapien
ggaaatcaattactctcggactttt

SEQ ID NO: 15042 - DNA, 25 bp, Homo sapien
ggaaatcaattagtctcggactttt

SEQ ID NO: 15043 - DNA, 25 bp, Homo sapien
ccttcaattgtatctgtgagtcttc

SEQ ID NO: 15044 - DNA, 25 bp, Homo sapien
ccttcaattgtaactgtgagtcttc

SEQ ID NO: 15045 - DNA, 25 bp, Homo sapien
ctattaggtagacacttttatgttc

SEQ ID NO: 15046 - DNA, 25 bp, Homo sapien
ctattaggtagagacttttatgttc

SEQ ID NO: 15047 - DNA, 25 bp, Homo sapien
tatacaacaatgacccgtgtcggac

SEQ ID NO: 15048 - DNA, 25 bp, Homo sapien
tatacaacaatgtcccgtgtcggac

SEQ ID NO: 15049 - DNA, 25 bp, Homo sapien
tatgttcttcttgtcgaacaggggt

SEQ ID NO: 15050 - DNA, 25 bp, Homo sapien
tatgttcttcttctcgaacaggggt

SEQ ID NO: 15051 - DNA, 25 bp, Homo sapien
tgtgtttacttgtacacaaaggacc

SEQ ID NO: 15052 - DNA, 25 bp, Homo sapien
tgtgtttacttgaacacaaaggacc

SEQ ID NO: 15053 - DNA, 25 bp, Homo sapien
tgccctgtagtgtgtcaatttacac

SEQ ID NO: 15054 - DNA, 25 bp, Homo sapien
tgccctgtagtgagtcaatttacac

SEQ ID NO: 15055 - DNA, 25 bp, Homo sapien
gtacacagggagagacacgattccc

SEQ ID NO: 15056 - DNA, 25 bp, Homo sapien
gtacacagggagtgacacgattccc

SEQ ID NO: 15057 - DNA, 25 bp, Homo sapien
gttgtggggacgtaccgacttgtcc

SEQ ID NO: 15058 - DNA, 25 bp, Homo sapien
gttgtggggacgaaccgacttgtcc

SEQ ID NO: 15059 - DNA, 25 bp, Homo sapien
cttgtcgcaagacctcatttcttcg

SEQ ID NO: 15060 - DNA, 25 bp, Homo sapien
cttgtcgcaagagctcatttcttcg

SEQ ID NO: 15061 - DNA, 25 bp, Homo sapien
tcttgttacaaatacatctcggttg

SEQ ID NO: 15062 - DNA, 25 bp, Homo sapien
tcttgttacaaaaacatctcggttg

SEQ ID NO: 15063 - DNA, 25 bp, Homo sapien
gttcgcacaaaaggacctcggtccg

SEQ ID NO: 15064 - DNA, 25 bp, Homo sapien
gttcgcacaaaacgacctcggtccg

SEQ ID NO: 15065 - DNA, 25 bp, Homo sapien
tactccagccagaacccgttgggga

SEQ ID NO: 15066 - DNA, 25 bp, Homo sapien
tactccagccagtacccgttgggga

SEQ ID NO: 15067 - DNA, 25 bp, Homo sapien
cggctcagcgggtacaaccccaggg

SEQ ID NO: 15068 - DNA, 25 bp, Homo sapien
cggctcagcgggaacaaccccaggg

SEQ ID NO: 15069 - DNA, 25 bp, Homo sapien
tactccaggggaagagccaccttgg

SEQ ID NO: 15070 - DNA, 25 bp, Homo sapien
tactccaggggatgagccaccttgg

SEQ ID NO: 15071 - DNA, 25 bp, Homo sapien
aaagttgtaccatgaacccctatgg

SEQ ID NO: 15072 - DNA, 25 bp, Homo sapien
aaagttgtaccaagaacccctatgg

SEQ ID NO: 15073 - DNA, 25 bp, Homo sapien
aggggacacgtgtcgaccttcttgg

SEQ ID NO: 15074 - DNA, 25 bp, Homo sapien
aggggacacgtgacgaccttcttgg

SEQ ID NO: 15075 - DNA, 25 bp, Homo sapien
ctcgtcggagacctcgagtatgtgg

SEQ ID NO: 15076 - DNA, 25 bp, Homo sapien
ctcgtcggagacgtcgagtatgtgg

SEQ ID NO: 15077 - DNA, 25 bp, Homo sapien
ccgtagtcggatggtcgttacctcc

SEQ ID NO: 15078 - DNA, 25 bp, Homo sapien
ccgtagtcggatcgtcgttacctcc

SEQ ID NO: 15079 - DNA, 25 bp, Homo sapien
tgtaggaaccctggtgtcaggtccg

SEQ ID NO: 15080 - DNA, 25 bp, Homo sapien
tgtaggaaccctcgtgtcaggtccg

SEQ ID NO: 15081 - DNA, 25 bp, Homo sapien
aagaagtgtaactccgccgggtacc

SEQ ID NO: 15082 - DNA, 25 bp, Homo sapien
aagaagtgtaacaccgccgggtacc

SEQ ID NO: 15083 - DNA, 25 bp, Homo sapien
gtggcggtaaagacaccggcccacc

SEQ ID NO: 15084 - DNA, 25 bp, Homo sapien
gtggcggtaaagtcaccggcccacc

SEQ ID NO: 15085 - DNA, 25 bp, Homo sapien
agtagaacccaaccaggtcttcggc

SEQ ID NO: 15086 - DNA, 25 bp, Homo sapien
agtagaacccaagcaggtcttcggc

SEQ ID NO: 15087 - DNA, 25 bp, Homo sapien
aaagcacaccaagtgtcactctgac

SEQ ID NO: 15088 - DNA, 25 bp, Homo sapien
aaagcacaccaactgtcactctgac

SEQ ID NO: 15089 - DNA, 25 bp, Homo sapien
aagagtcccaagaagactctatagg

SEQ ID NO: 15090 - DNA, 25 bp, Homo sapien
aagagtcccaagtagactctatagg

SEQ ID NO: 15091 - DNA, 25 bp, Homo sapien
acggagtccaaggaggctgactaag

SEQ ID NO: 15092 - DNA, 25 bp, Homo sapien
acggagtccaagcaggctgactaag

SEQ ID NO: 15093 - DNA, 25 bp, Homo sapien
cacggacgaggcaggtctcgagtcc

SEQ ID NO: 15094 - DNA, 25 bp, Homo sapien
cacggacgaggctggtctcgagtcc

SEQ ID NO: 15095 - DNA, 25 bp, Homo sapien
cgtcgcgactggtcggttcgcaccg

SEQ ID NO: 15096 - DNA, 25 bp, Homo sapien
cgtcgcgactggacggttcgcaccg

SEQ ID NO: 15097 - DNA, 25 bp, Homo sapien
tgtccgtccgtctcgatgcaaccgt

SEQ ID NO: 15098 - DNA, 25 bp, Homo sapien
tgtccgtccgtcacgatgcaaccgt

SEQ ID NO: 15099 - DNA, 25 bp, Homo sapien
ctttgtgtcggtcaaaggtgaccct

SEQ ID NO: 15100 - DNA, 25 bp, Homo sapien
ctttgtgtcggtgaaaggtgaccct

SEQ ID NO: 15101 - DNA, 25 bp, Homo sapien
cttgggtcctttagtgtaagtaccc

SEQ ID NO: 15102 - DNA, 25 bp, Homo sapien
cttgggtccttttgtgtaagtaccc

SEQ ID NO: 15103 - DNA, 25 bp, Homo sapien
tgggtcgtctctggttggactaaac

SEQ ID NO: 15104 - DNA, 25 bp, Homo sapien
tgggtcgtctctcgttggactaaac

SEQ ID NO: 15105 - DNA, 25 bp, Homo sapien
atggccttcgtcgtatgtgttgaga

SEQ ID NO: 15106 - DNA, 25 bp, Homo sapien
atggccttcgtcctatgtgttgaga

SEQ ID NO: 15107 - DNA, 25 bp, Homo sapien
tggaccattgtcatctgtagatacc

SEQ ID NO: 15108 - DNA, 25 bp, Homo sapien
tggaccattgtcttctgtagatacc

SEQ ID NO: 15109 - DNA, 25 bp, Homo sapien
ggtgtcgaacctgttcttcatgtcc

SEQ ID NO: 15110 - DNA, 25 bp, Homo sapien
ggtgtcgaacctcttcttcatgtcc

SEQ ID NO: 15111 - DNA, 25 bp, Homo sapien
ggtcgggcgaagttcgcgaccctca

SEQ ID NO: 15112 - DNA, 25 bp, Homo sapien
ggtcgggcgaagatcgcgaccctca

SEQ ID NO: 15113 - DNA, 25 bp, Homo sapien
ggttagaaaatagtcgtttgtacat

SEQ ID NO: 15114 - DNA, 25 bp, Homo sapien
ggttagaaaatactcgtttgtacat

SEQ ID NO: 15115 - DNA, 25 bp, Homo sapien
gagttagaggaacagatatccgacg

SEQ ID NO: 15116 - DNA, 25 bp, Homo sapien
gagttagaggaagagatatccgacg

SEQ ID NO: 15117 - DNA, 25 bp, Homo sapien
caattaagtgtaaaacttcgttgac

SEQ ID NO: 15118 - DNA, 25 bp, Homo sapien
caattaagtgtataacttcgttgac

SEQ ID NO: 15119 - DNA, 25 bp, Homo sapien
cggtaaaagggtaaaactttctgac

SEQ ID NO: 15120 - DNA, 25 bp, Homo sapien
cggtaaaagggttaaactttctgac

SEQ ID NO: 15121 - DNA, 25 bp, Homo sapien
cgtgtatacgtaagatttactctgt

SEQ ID NO: 15122 - DNA, 25 bp, Homo sapien
cgtgtatacgtatgatttactctgt

SEQ ID NO: 15123 - DNA, 25 bp, Homo sapien
cttctacagactaaggtccgacttt

SEQ ID NO: 15124 - DNA, 25 bp, Homo sapien
cttctacagacttaggtccgacttt

SEQ ID NO: 15125 - DNA, 25 bp, Homo sapien
tgcgacgtagtcgaagtggtactaa

SEQ ID NO: 15126 - DNA, 25 bp, Homo sapien
tgcgacgtagtccaagtggtactaa

SEQ ID NO: 15127 - DNA, 25 bp, Homo sapien
ttaagactagttagttaccgataca

SEQ ID NO: 15128 - DNA, 25 bp, Homo sapien
ttaagactagtttgttaccgataca

SEQ ID NO: 15129 - DNA, 25 bp, Homo sapien
aataaatacgatggtcgatccattt

SEQ ID NO: 15130 - DNA, 25 bp, Homo sapien
aataaatacgatcgtcgatccattt

SEQ ID NO: 15131 - DNA, 25 bp, Homo sapien
tcgacgtcaaaatttcaacacaagg

SEQ ID NO: 15132 - DNA, 25 bp, Homo sapien
tcgacgtcaaaaattcaacacaagg

SEQ ID NO: 15133 - DNA, 25 bp, Homo sapien
ccctagagtctggatcacgagggaa

SEQ ID NO: 15134 - DNA, 25 bp, Homo sapien
ccctagagtctgcatcacgagggaa

SEQ ID NO: 15135 - DNA, 25 bp, Homo sapien
acagtgtcggtctcgagcgaagaga

SEQ ID NO: 15136 - DNA, 25 bp, Homo sapien
acagtgtcggtcacgagcgaagaga

SEQ ID NO: 15137 - DNA, 25 bp, Homo sapien
agccggagagtctctggcgacgtcc

SEQ ID NO: 15138 - DNA, 25 bp, Homo sapien
agccggagagtcactggcgacgtcc

SEQ ID NO: 15139 - DNA, 25 bp, Homo sapien
gggtgagagtccaacgtggatactc

SEQ ID NO: 15140 - DNA, 25 bp, Homo sapien
gggtgagagtcctacgtggatactc

SEQ ID NO: 15141 - DNA, 25 bp, Homo sapien
taggtaaggttgacgtccaggtacg

SEQ ID NO: 15142 - DNA, 25 bp, Homo sapien
taggtaaggttgtcgtccaggtacg

SEQ ID NO: 15143 - DNA, 25 bp, Homo sapien
tactcgtcaggttggttatgacttg

SEQ ID NO: 15144 - DNA, 25 bp, Homo sapien
tactcgtcaggtaggttatgacttg

SEQ ID NO: 15145 - DNA, 25 bp, Homo sapien
tactggccgcggagtatatggtatt

SEQ ID NO: 15146 - DNA, 25 bp, Homo sapien
tactggccgcggtgtatatggtatt

SEQ ID NO: 15147 - DNA, 25 bp, Homo sapien
tcaggaaccttagactcttcgtctg

SEQ ID NO: 15148 - DNA, 25 bp, Homo sapien
tcaggaaccttacactcttcgtctg

SEQ ID NO: 15149 - DNA, 25 bp, Homo sapien
cttgaaactactagaactatattgg

SEQ ID NO: 15150 - DNA, 25 bp, Homo sapien
cttgaaactacttgaactatattgg

SEQ ID NO: 15151 - DNA, 25 bp, Homo sapien
ctgtagaatcggtcctttaatcgac

SEQ ID NO: 15152 - DNA, 25 bp, Homo sapien
ctgtagaatcggacctttaatcgac

SEQ ID NO: 15153 - DNA, 25 bp, Homo sapien
acgtgggtccgacatcaccgctaag

SEQ ID NO: 15154 - DNA, 25 bp, Homo sapien
acgtgggtccgagatcaccgctaag

SEQ ID NO: 15155 - DNA, 25 bp, Homo sapien
tatttttgcgtctctaggtaggctt

SEQ ID NO: 15156 - DNA, 25 bp, Homo sapien
tatttttgcgtcactaggtaggctt

SEQ ID NO: 15157 - DNA, 25 bp, Homo sapien
atgaaacagtaacgtcagctctgtc

SEQ ID NO: 15158 - DNA, 25 bp, Homo sapien
atgaaacagtaaggtcagctctgtc

SEQ ID NO: 15159 - DNA, 25 bp, Homo sapien
ctgattaagtctcgtcgagtctttg

SEQ ID NO: 15160 - DNA, 25 bp, Homo sapien
ctgattaagtctggtcgagtctttg

SEQ ID NO: 15161 - DNA, 25 bp, Homo sapien
atatactagacattcacgatgttgt

SEQ ID NO: 15162 - DNA, 25 bp, Homo sapien
atatactagacaatcacgatgttgt

SEQ ID NO: 15163 - DNA, 25 bp, Homo sapien
caaacgtacgcattccgtaagcgtg

SEQ ID NO: 15164 - DNA, 25 bp, Homo sapien
caaacgtacgcaatccgtaagcgtg

SEQ ID NO: 15165 - DNA, 25 bp, Homo sapien
cggtttcaacctcgatttgtctaaa

SEQ ID NO: 15166 - DNA, 25 bp, Homo sapien
cggtttcaacctggatttgtctaaa

SEQ ID NO: 15167 - DNA, 25 bp, Homo sapien
attcgagttcaaagttcttcttaag

SEQ ID NO: 15168 - DNA, 25 bp, Homo sapien
attcgagttcaatgttcttcttaag

SEQ ID NO: 15169 - DNA, 25 bp, Homo sapien
cttcagacaccgaagtaaagttttt

SEQ ID NO: 15170 - DNA, 25 bp, Homo sapien
cttcagacaccgtagtaaagttttt

SEQ ID NO: 15171 - DNA, 25 bp, Homo sapien
ggagacaccaacaggaaaacaattt

SEQ ID NO: 15172 - DNA, 25 bp, Homo sapien
ggagacaccaactggaaaacaattt

SEQ ID NO: 15173 - DNA, 25 bp, Homo sapien
gggaaatccacatatcaagaaactt

SEQ ID NO: 15174 - DNA, 25 bp, Homo sapien
gggaaatccacaaatcaagaaactt

SEQ ID NO: 15175 - DNA, 25 bp, Homo sapien
acatctcgaagaggactcggagctt

SEQ ID NO: 15176 - DNA, 25 bp, Homo sapien
acatctcgaagacgactcggagctt

SEQ ID NO: 15177 - DNA, 25 bp, Homo sapien
aaccacagtcggaacagacactaag

SEQ ID NO: 15178 - DNA, 25 bp, Homo sapien
aaccacagtcggtacagacactaag

SEQ ID NO: 15179 - DNA, 25 bp, Homo sapien
gacacacatcggtctgacgtcacag

SEQ ID NO: 15180 - DNA, 25 bp, Homo sapien
gacacacatcggactgacgtcacag

SEQ ID NO: 15181 - DNA, 25 bp, Homo sapien
gcgcgcgtcgaccaagagtctcacg

SEQ ID NO: 15182 - DNA, 25 bp, Homo sapien
gcgcgcgtcgacgaagagtctcacg

SEQ ID NO: 15183 - DNA, 25 bp, Homo sapien
aggtggcgaaagactaaggtctaac

SEQ ID NO: 15184 - DNA, 25 bp, Homo sapien
aggtggcgaaagtctaaggtctaac

SEQ ID NO: 15185 - DNA, 25 bp, Homo sapien
gggtcaacggtagtgtcgcattgcc

SEQ ID NO: 15186 - DNA, 25 bp, Homo sapien
gggtcaacggtactgtcgcattgcc

SEQ ID NO: 15187 - DNA, 25 bp, Homo sapien
ggagggacgtatcgacaatggtcct

SEQ ID NO: 15188 - DNA, 25 bp, Homo sapien
ggagggacgtatggacaatggtcct

SEQ ID NO: 15189 - DNA, 25 bp, Homo sapien
actggagctccgtcggagtcgtgcc

SEQ ID NO: 15190 - DNA, 25 bp, Homo sapien
actggagctccgacggagtcgtgcc

SEQ ID NO: 15191 - DNA, 25 bp, Homo sapien
agataaccaaaaggacggttttccg

SEQ ID NO: 15192 - DNA, 25 bp, Homo sapien
agataaccaaaacgacggttttccg

SEQ ID NO: 15193 - DNA, 25 bp, Homo sapien
agaatttcagaagagaattacctcc

SEQ ID NO: 15194 - DNA, 25 bp, Homo sapien
agaatttcagaacagaattacctcc

SEQ ID NO: 15195 - DNA, 25 bp, Homo sapien
gataaggtaaaacgaaagaacccac

SEQ ID NO: 15196 - DNA, 25 bp, Homo sapien
gataaggtaaaaggaaagaacccac

SEQ ID NO: 15197 - DNA, 25 bp, Homo sapien
aaaagttatcggtcaacgaacaagg

SEQ ID NO: 15198 - DNA, 25 bp, Homo sapien
aaaagttatcggacaacgaacaagg

SEQ ID NO: 15199 - DNA, 25 bp, Homo sapien
atgacttactcttgaaacacgatgg

SEQ ID NO: 15200 - DNA, 25 bp, Homo sapien
atgacttactctagaaacacgatgg

SEQ ID NO: 15201 - DNA, 25 bp, Homo sapien
atggttctctggacgtaaatgtcgt

SEQ ID NO: 15202 - DNA, 25 bp, Homo sapien
atggttctctggtcgtaaatgtcgt

SEQ ID NO: 15203 - DNA, 25 bp, Homo sapien
cagtgtcttagttcgtcattatgtt

SEQ ID NO: 15204 - DNA, 25 bp, Homo sapien
cagtgtcttagtacgtcattatgtt

SEQ ID NO: 15205 - DNA, 25 bp, Homo sapien
cggcagtcgggatagttgttacttg

SEQ ID NO: 15206 - DNA, 25 bp, Homo sapien
cggcagtcgggaaagttgttacttg

SEQ ID NO: 15207 - DNA, 25 bp, Homo sapien
gttgtcatcatcataacttggtttt

SEQ ID NO: 15208 - DNA, 25 bp, Homo sapien
gttgtcatcatcttaacttggtttt

SEQ ID NO: 15209 - DNA, 25 bp, Homo sapien
tctcggtaactagtgacgacgtgga

SEQ ID NO: 15210 - DNA, 25 bp, Homo sapien
tctcggtaactactgacgacgtgga

SEQ ID NO: 15211 - DNA, 25 bp, Homo sapien
aaaatttacgagtatcgaagttcct

SEQ ID NO: 15212 - DNA, 25 bp, Homo sapien
aaaatttacgagaatcgaagttcct

SEQ ID NO: 15213 - DNA, 25 bp, Homo sapien
aagtgtgtactcgatcggtcgtgga

SEQ ID NO: 15214 - DNA, 25 bp, Homo sapien
aagtgtgtactccatcggtcgtgga

SEQ ID NO: 15215 - DNA, 25 bp, Homo sapien
ctgtgtacttcattacttactgaga

SEQ ID NO: 15216 - DNA, 25 bp, Homo sapien
ctgtgtacttcaatacttactgaga

SEQ ID NO: 15217 - DNA, 25 bp, Homo sapien
ttcgtacgttgaagtacttctaata

SEQ ID NO: 15218 - DNA, 25 bp, Homo sapien
ttcgtacgttgatgtacttctaata

SEQ ID NO: 15219 - DNA, 25 bp, Homo sapien
tagctccgcaaggactattcacgca

SEQ ID NO: 15220 - DNA, 25 bp, Homo sapien
tagctccgcaagcactattcacgca

SEQ ID NO: 15221 - DNA, 25 bp, Homo sapien
cgttatagtagtggtgtgcgtgaat

SEQ ID NO: 15222 - DNA, 25 bp, Homo sapien
cgttatagtagtcgtgtgcgtgaat

SEQ ID NO: 15223 - DNA, 25 bp, Homo sapien
gactcgacaggaactgtagacacga

SEQ ID NO: 15224 - DNA, 25 bp, Homo sapien
gactcgacaggatctgtagacacga

SEQ ID NO: 15225 - DNA, 25 bp, Homo sapien
ctactgtcgtcgacgtcgggaacga

SEQ ID NO: 15226 - DNA, 25 bp, Homo sapien
ctactgtcgtcgtcgtcgggaacga

SEQ ID NO: 15227 - DNA, 25 bp, Homo sapien
ctctaagtggatttgtctcgtcgag

SEQ ID NO: 15228 - DNA, 25 bp, Homo sapien
ctctaagtggatatgtctcgtcgag

SEQ ID NO: 15229 - DNA, 25 bp, Homo sapien
actcgaactccttgaccctagagac

SEQ ID NO: 15230 - DNA, 25 bp, Homo sapien
actcgaactcctagaccctagagac

SEQ ID NO: 15231 - DNA, 25 bp, Homo sapien
aagtctgctcctaacacccgaagct

SEQ ID NO: 15232 - DNA, 25 bp, Homo sapien
aagtctgctccttacacccgaagct

SEQ ID NO: 15233 - DNA, 25 bp, Homo sapien
gatgaccggaccttaaacctaaact

SEQ ID NO: 15234 - DNA, 25 bp, Homo sapien
gatgaccggaccataaacctaaact

SEQ ID NO: 15235 - DNA, 25 bp, Homo sapien
acagtaggagggaaacaccgacaag

SEQ ID NO: 15236 - DNA, 25 bp, Homo sapien
acagtaggagggtaacaccgacaag

SEQ ID NO: 15237 - DNA, 25 bp, Homo sapien
acgtagagtctctggaatctcctta

SEQ ID NO: 15238 - DNA, 25 bp, Homo sapien
acgtagagtctcaggaatctcctta

SEQ ID NO: 15239 - DNA, 25 bp, Homo sapien
ttcgtacccgagctacaatccttag

SEQ ID NO: 15240 - DNA, 25 bp, Homo sapien
ttcgtacccgaggtacaatccttag

SEQ ID NO: 15241 - DNA, 25 bp, Homo sapien
tctctgtatccgaatatgttttgta

SEQ ID NO: 15242 - DNA, 25 bp, Homo sapien
tctctgtatccgtatatgttttgta

SEQ ID NO: 15243 - DNA, 25 bp, Homo sapien
tagcgtactaaacacattttgtgtt

SEQ ID NO: 15244 - DNA, 25 bp, Homo sapien
tagcgtactaaagacattttgtgtt

SEQ ID NO: 15245 - DNA, 25 bp, Homo sapien
cataagaggttctaagagtatctcg

SEQ ID NO: 15246 - DNA, 25 bp, Homo sapien
cataagaggttcaaagagtatctcg

SEQ ID NO: 15247 - DNA, 25 bp, Homo sapien
tgtgaagggtgtcgaggagtgtctc

SEQ ID NO: 15248 - DNA, 25 bp, Homo sapien
tgtgaagggtgtggaggagtgtctc

SEQ ID NO: 15249 - DNA, 25 bp, Homo sapien
cgagtccgaggtttgagttcctgta

SEQ ID NO: 15250 - DNA, 25 bp, Homo sapien
cgagtccgaggtatgagttcctgta

SEQ ID NO: 15251 - DNA, 25 bp, Homo sapien
acccagagtccgacggtcgtcgaga

SEQ ID NO: 15252 - DNA, 25 bp, Homo sapien
acccagagtccgtcggtcgtcgaga

SEQ ID NO: 15253 - DNA, 25 bp, Homo sapien
ccgaatatgtctaccggtgtgagta

SEQ ID NO: 15254 - DNA, 25 bp, Homo sapien
ccgaatatgtcttccggtgtgagta

SEQ ID NO: 15255 - DNA, 25 bp, Homo sapien
aacagtaggtaccacacggtctgaa

SEQ ID NO: 15256 - DNA, 25 bp, Homo sapien
aacagtaggtacgacacggtctgaa

SEQ ID NO: 15257 - DNA, 25 bp, Homo sapien
aatattcgttacatcgtttctgaag

SEQ ID NO: 15258 - DNA, 25 bp, Homo sapien
aatattcgttacttcgtttctgaag

SEQ ID NO: 15259 - DNA, 25 bp, Homo sapien
tactcctcgttaatgttgtccagca

SEQ ID NO: 15260 - DNA, 25 bp, Homo sapien
tactcctcgttattgttgtccagca

SEQ ID NO: 15261 - DNA, 25 bp, Homo sapien
acattatatgttcatagtgacccag

SEQ ID NO: 15262 - DNA, 25 bp, Homo sapien
acattatatgttgatagtgacccag

SEQ ID NO: 15263 - DNA, 25 bp, Homo sapien
agacagaaatttttcgtacctcaga

SEQ ID NO: 15264 - DNA, 25 bp, Homo sapien
agacagaaatttatcgtacctcaga

SEQ ID NO: 15265 - DNA, 25 bp, Homo sapien
gtgaaatacttttaagtgactcagc

SEQ ID NO: 15266 - DNA, 25 bp, Homo sapien
gtgaaatactttaaagtgactcagc

SEQ ID NO: 15267 - DNA, 25 bp, Homo sapien
gacgtcgaaatgacagtcagtcacc

SEQ ID NO: 15268 - DNA, 25 bp, Homo sapien
gacgtcgaaatgtcagtcagtcacc

SEQ ID NO: 15269 - DNA, 25 bp, Homo sapien
gacgtaagagatctacaaggtcatc

SEQ ID NO: 15270 - DNA, 25 bp, Homo sapien
gacgtaagagatgtacaaggtcatc

SEQ ID NO: 15271 - DNA, 25 bp, Homo sapien
cacactgacgtgtgagtcgtcacga

SEQ ID NO: 15272 - DNA, 25 bp, Homo sapien
cacactgacgtgagagtcgtcacga

SEQ ID NO: 15273 - DNA, 25 bp, Homo sapien
gaccctgtctacgacgagtctctga

SEQ ID NO: 15274 - DNA, 25 bp, Homo sapien
gaccctgtctaccacgagtctctga

SEQ ID NO: 15275 - DNA, 25 bp, Homo sapien
gaacctgtctatcaaactcgtcgtc

SEQ ID NO: 15276 - DNA, 25 bp, Homo sapien
gaacctgtctatgaaactcgtcgtc

SEQ ID NO: 15277 - DNA, 25 bp, Homo sapien
aggtccctgtcagtgacgtcttgac

SEQ ID NO: 15278 - DNA, 25 bp, Homo sapien
aggtccctgtcactgacgtcttgac

SEQ ID NO: 15279 - DNA, 25 bp, Homo sapien
acttcgtcatctcctgcgactggtc

SEQ ID NO: 15280 - DNA, 25 bp, Homo sapien
acttcgtcatctgctgcgactggtc

SEQ ID NO: 15281 - DNA, 25 bp, Homo sapien
gctaccttttcatgtctatcacgtg

SEQ ID NO: 15282 - DNA, 25 bp, Homo sapien
gctaccttttcaagtctatcacgtg

SEQ ID NO: 15283 - DNA, 25 bp, Homo sapien
cgtaatgagttcctagtattgagtc

SEQ ID NO: 15284 - DNA, 25 bp, Homo sapien
cgtaatgagttcgtagtattgagtc

SEQ ID NO: 15285 - DNA, 25 bp, Homo sapien
tcttctcttctctgagagttcaccg

SEQ ID NO: 15286 - DNA, 25 bp, Homo sapien
tcttctcttctcagagagttcaccg

SEQ ID NO: 15287 - DNA, 25 bp, Homo sapien
tcctgtcaggtcacggagaccacct

SEQ ID NO: 15288 - DNA, 25 bp, Homo sapien
tcctgtcaggtctcggagaccacct

SEQ ID NO: 15289 - DNA, 25 bp, Homo sapien
ccgggtactcgtacccgtagaccaa

SEQ ID NO: 15290 - DNA, 25 bp, Homo sapien
ccgggtactcgttcccgtagaccaa

SEQ ID NO: 15291 - DNA, 25 bp, Homo sapien
acggtgtctacttcccagaccgaca

SEQ ID NO: 15292 - DNA, 25 bp, Homo sapien
acggtgtctactacccagaccgaca

SEQ ID NO: 15293 - DNA, 25 bp, Homo sapien
cgagggtattcttttacgtattaca

SEQ ID NO: 15294 - DNA, 25 bp, Homo sapien
cgagggtattctattacgtattaca

SEQ ID NO: 15295 - DNA, 25 bp, Homo sapien
acagtttacttcagtttacgttttg

SEQ ID NO: 15296 - DNA, 25 bp, Homo sapien
acagtttacttctgtttacgttttg

SEQ ID NO: 15297 - DNA, 25 bp, Homo sapien
aaacttctacttttcagtgtttgag

SEQ ID NO: 15298 - DNA, 25 bp, Homo sapien
aaacttctacttatcagtgtttgag

SEQ ID NO: 15299 - DNA, 25 bp, Homo sapien
tatcgttcgattgaaatattctctg

SEQ ID NO: 15300 - DNA, 25 bp, Homo sapien
tatcgttcgattcaaatattctctg

SEQ ID NO: 15301 - DNA, 25 bp, Homo sapien
tcttgtaggtcagtcctacgttccg

SEQ ID NO: 15302 - DNA, 25 bp, Homo sapien
tcttgtaggtcactcctacgttccg

SEQ ID NO: 15303 - DNA, 25 bp, Homo sapien
ctcctagtgtcgtctgtatttccgt

SEQ ID NO: 15304 - DNA, 25 bp, Homo sapien
ctcctagtgtcgactgtatttccgt

SEQ ID NO: 15305 - DNA, 25 bp, Homo sapien
tcacatttttctcagttgttgtgtg

SEQ ID NO: 15306 - DNA, 25 bp, Homo sapien
tcacatttttctgagttgttgtgtg

SEQ ID NO: 15307 - DNA, 25 bp, Homo sapien
cgtaagtgttttcaggttattcttc

SEQ ID NO: 15308 - DNA, 25 bp, Homo sapien
cgtaagtgttttgaggttattcttc

SEQ ID NO: 15309 - DNA, 25 bp, Homo sapien
ctcacgttctttaccgtttgttgac

SEQ ID NO: 15310 - DNA, 25 bp, Homo sapien
ctcacgttcttttccgtttgttgac

SEQ ID NO: 15311 - DNA, 25 bp, Homo sapien
cagatctttctcctcacgtgtcatg

SEQ ID NO: 15312 - DNA, 25 bp, Homo sapien
cagatctttctcgtcacgtgtcatg

SEQ ID NO: 15313 - DNA, 25 bp, Homo sapien
acggtgtaccggtcctactactacg

SEQ ID NO: 15314 - DNA, 25 bp, Homo sapien
acggtgtaccggacctactactacg

SEQ ID NO: 15315 - DNA, 25 bp, Homo sapien
cgttacgtgtgttctgaggagttcc

SEQ ID NO: 15316 - DNA, 25 bp, Homo sapien
cgttacgtgtgtactgaggagttcc

SEQ ID NO: 15317 - DNA, 25 bp, Homo sapien
cgcacgtgtcggttctggggttctt

SEQ ID NO: 15318 - DNA, 25 bp, Homo sapien
cgcacgtgtcggatctggggttctt

SEQ ID NO: 15319 - DNA, 25 bp, Homo sapien
attcgtttgtacatctgtggtcctc

SEQ ID NO: 15320 - DNA, 25 bp, Homo sapien
attcgtttgtacttctgtggtcctc

SEQ ID NO: 15321 - DNA, 25 bp, Homo sapien
atgtgaaagagttcgtggagtctcc

SEQ ID NO: 15322 - DNA, 25 bp, Homo sapien
atgtgaaagagtacgtggagtctcc

SEQ ID NO: 15323 - DNA, 25 bp, Homo sapien
cggggaaacgtctacgtcgggaccc

SEQ ID NO: 15324 - DNA, 25 bp, Homo sapien
cggggaaacgtcaacgtcgggaccc

SEQ ID NO: 15325 - DNA, 25 bp, Homo sapien
aagaagacgtcaagaccgacaagta

SEQ ID NO: 15326 - DNA, 25 bp, Homo sapien
aagaagacgtcatgaccgacaagta

SEQ ID NO: 15327 - DNA, 25 bp, Homo sapien
aggacactcagtgaccctactcgac

SEQ ID NO: 15328 - DNA, 25 bp, Homo sapien
aggacactcagtcaccctactcgac

SEQ ID NO: 15329 - DNA, 25 bp, Homo sapien
gaccgtgtatatgtcttctacctta

SEQ ID NO: 15330 - DNA, 25 bp, Homo sapien
gaccgtgtatatctcttctacctta

SEQ ID NO: 15331 - DNA, 25 bp, Homo sapien
aacggaggttgtcgtccctccttac

SEQ ID NO: 15332 - DNA, 25 bp, Homo sapien
aacggaggttgtggtccctccttac

SEQ ID NO: 15333 - DNA, 25 bp, Homo sapien
gacaaacgaagttcgtttttccttc

SEQ ID NO: 15334 - DNA, 25 bp, Homo sapien
gacaaacgaagtacgtttttccttc

SEQ ID NO: 15335 - DNA, 25 bp, Homo sapien
cggagagagagctttacaaaactgt

SEQ ID NO: 15336 - DNA, 25 bp, Homo sapien
cggagagagagcattacaaaactgt

SEQ ID NO: 15337 - DNA, 25 bp, Homo sapien
aggacgagagaataagtcacactat

SEQ ID NO: 15338 - DNA, 25 bp, Homo sapien
aggacgagagaaaaagtcacactat

SEQ ID NO: 15339 - DNA, 25 bp, Homo sapien
agtaatagtcagaatgtccaacgac

SEQ ID NO: 15340 - DNA, 25 bp, Homo sapien
agtaatagtcagtatgtccaacgac

SEQ ID NO: 15341 - DNA, 25 bp, Homo sapien
aagtctttaagatgttaccaacgac

SEQ ID NO: 15342 - DNA, 25 bp, Homo sapien
aagtctttaagaagttaccaacgac

SEQ ID NO: 15343 - DNA, 25 bp, Homo sapien
aaaatctgttaatggttcacaaacg

SEQ ID NO: 15344 - DNA, 25 bp, Homo sapien
aaaatctgttaaaggttcacaaacg

SEQ ID NO: 15345 - DNA, 25 bp, Homo sapien
agacgaattccgaaacacacacacg

SEQ ID NO: 15346 - DNA, 25 bp, Homo sapien
agacgaattccgtaacacacacacg

SEQ ID NO: 15347 - DNA, 25 bp, Homo sapien
aacggtacggactgtggaacacccg

SEQ ID NO: 15348 - DNA, 25 bp, Homo sapien
aacggtacggacagtggaacacccg

SEQ ID NO: 15349 - DNA, 25 bp, Homo sapien
gtacggagcgcgaagaggacttacc

SEQ ID NO: 15350 - DNA, 25 bp, Homo sapien
gtacggagcgcgtagaggacttacc

SEQ ID NO: 15351 - DNA, 25 bp, Homo sapien
tctgagtccttacgtaggtgaacgt

SEQ ID NO: 15352 - DNA, 25 bp, Homo sapien
tctgagtccttaggtaggtgaacgt

SEQ ID NO: 15353 - DNA, 25 bp, Homo sapien
tccacgtcgacgagggtctctacct

SEQ ID NO: 15354 - DNA, 25 bp, Homo sapien
tccacgtcgacgtgggtctctacct

SEQ ID NO: 15355 - DNA, 25 bp, Homo sapien
gaggcacccggacgagtgacgtccc

SEQ ID NO: 15356 - DNA, 25 bp, Homo sapien
gaggcacccggaggagtgacgtccc

SEQ ID NO: 15357 - DNA, 25 bp, Homo sapien
gacacgagacacaggacggagccgc

SEQ ID NO: 15358 - DNA, 25 bp, Homo sapien
gacacgagacactggacggagccgc

SEQ ID NO: 15359 - DNA, 25 bp, Homo sapien
agaacggtacaccatagagagacaa

SEQ ID NO: 15360 - DNA, 25 bp, Homo sapien
agaacggtacacgatagagagacaa

SEQ ID NO: 15361 - DNA, 25 bp, Homo sapien
agtcgaaccgatgacgactactaag

SEQ ID NO: 15362 - DNA, 25 bp, Homo sapien
agtcgaaccgatcacgactactaag

SEQ ID NO: 15363 - DNA, 25 bp, Homo sapien
ctagtaaagtcatccgagttcgtgt

SEQ ID NO: 15364 - DNA, 25 bp, Homo sapien
ctagtaaagtcaaccgagttcgtgt

SEQ ID NO: 15365 - DNA, 25 bp, Homo sapien
ccatcttcagtctaccgggtcgagt

SEQ ID NO: 15366 - DNA, 25 bp, Homo sapien
ccatcttcagtcaaccgggtcgagt

SEQ ID NO: 15367 - DNA, 25 bp, Homo sapien
ccttctagtcaggaccgagggtcgg

SEQ ID NO: 15368 - DNA, 25 bp, Homo sapien
ccttctagtcagcaccgagggtcgg

SEQ ID NO: 15369 - DNA, 25 bp, Homo sapien
cccttcggtagtaccacagttcggc

SEQ ID NO: 15370 - DNA, 25 bp, Homo sapien
cccttcggtagttccacagttcggc

SEQ ID NO: 15371 - DNA, 25 bp, Homo sapien
ctcatttgtcgttcggtttactaaa

SEQ ID NO: 15372 - DNA, 25 bp, Homo sapien
ctcatttgtcgtacggtttactaaa

SEQ ID NO: 15373 - DNA, 25 bp, Homo sapien
gataactgtttgtctagtttcattc

SEQ ID NO: 15374 - DNA, 25 bp, Homo sapien
gataactgtttgactagtttcattc

SEQ ID NO: 15375 - DNA, 25 bp, Homo sapien
ttaacacgtttttcatttcgtgaag

SEQ ID NO: 15376 - DNA, 25 bp, Homo sapien
ttaacacgttttacatttcgtgaag

SEQ ID NO: 15377 - DNA, 25 bp, Homo sapien
cgtctgtccttcgtaccccgagagg

SEQ ID NO: 15378 - DNA, 25 bp, Homo sapien
cgtctgtccttcctaccccgagagg

SEQ ID NO: 15379 - DNA, 25 bp, Homo sapien
ccttgtcttgtttagtctcccggtc

SEQ ID NO: 15380 - DNA, 25 bp, Homo sapien
ccttgtcttgttaagtctcccggtc

SEQ ID NO: 15381 - DNA, 25 bp, Homo sapien
gttatgacttgtcaattccggtgtt

SEQ ID NO: 15382 - DNA, 25 bp, Homo sapien
gttatgacttgtgaattccggtgtt

SEQ ID NO: 15383 - DNA, 25 bp, Homo sapien
gtagtggtgtctgacctttgtcttt

SEQ ID NO: 15384 - DNA, 25 bp, Homo sapien
gtagtggtgtctcacctttgtcttt

SEQ ID NO: 15385 - DNA, 25 bp, Homo sapien
gtcgatccctcttcgtcttccttgt

SEQ ID NO: 15386 - DNA, 25 bp, Homo sapien
gtcgatccctctacgtcttccttgt

SEQ ID NO: 15387 - DNA, 25 bp, Homo sapien
cttgaatcgaggtcttttcgacttg

SEQ ID NO: 15388 - DNA, 25 bp, Homo sapien
cttgaatcgaggacttttcgacttg

SEQ ID NO: 15389 - DNA, 25 bp, Homo sapien
tgacggtcgaggtcctaccttcctc

SEQ ID NO: 15390 - DNA, 25 bp, Homo sapien
tgacggtcgaggacctaccttcctc

SEQ ID NO: 15391 - DNA, 25 bp, Homo sapien
gtactagttgtactaaatgtcaatc

SEQ ID NO: 15392 - DNA, 25 bp, Homo sapien
gtactagttgtagtaaatgtcaatc

SEQ ID NO: 15393 - DNA, 25 bp, Homo sapien
tgtcgtcatgataattacgttctct

SEQ ID NO: 15394 - DNA, 25 bp, Homo sapien
tgtcgtcatgattattacgttctct

SEQ ID NO: 15395 - DNA, 25 bp, Homo sapien
agtgacgtcatagtcaggagctccg

SEQ ID NO: 15396 - DNA, 25 bp, Homo sapien
agtgacgtcatactcaggagctccg

SEQ ID NO: 15397 - DNA, 25 bp, Homo sapien
actttagtgtattgagtacagacca

SEQ ID NO: 15398 - DNA, 25 bp, Homo sapien
actttagtgtatagagtacagacca

SEQ ID NO: 15399 - DNA, 25 bp, Homo sapien
tttctgtcgttcagaccagtaagtc

SEQ ID NO: 15400 - DNA, 25 bp, Homo sapien
tttctgtcgttctgaccagtaagtc

SEQ ID NO: 15401 - DNA, 25 bp, Homo sapien
aatattttccctgacctgtaccgag

SEQ ID NO: 15402 - DNA, 25 bp, Homo sapien
aatattttccctcacctgtaccgag

SEQ ID NO: 15403 - DNA, 25 bp, Homo sapien
catatgtttgtctacacgggtgtga

SEQ ID NO: 15404 - DNA, 25 bp, Homo sapien
catatgtttgtcaacacgggtgtga

SEQ ID NO: 15405 - DNA, 25 bp, Homo sapien
ttgcgaagtacatgaacagacagtc

SEQ ID NO: 15406 - DNA, 25 bp, Homo sapien
ttgcgaagtacaagaacagacagtc

SEQ ID NO: 15407 - DNA, 25 bp, Homo sapien
gtcgaataagacaaaactacgtcgt

SEQ ID NO: 15408 - DNA, 25 bp, Homo sapien
gtcgaataagactaaactacgtcgt

SEQ ID NO: 15409 - DNA, 25 bp, Homo sapien
atactcttaatccaagtcctttgtg

SEQ ID NO: 15410 - DNA, 25 bp, Homo sapien
atactcttaatcgaagtcctttgtg

SEQ ID NO: 15411 - DNA, 25 bp, Homo sapien
tccttgaacagtgtcctctacagtg

SEQ ID NO: 15412 - DNA, 25 bp, Homo sapien
tccttgaacagtctcctctacagtg

SEQ ID NO: 15413 - DNA, 25 bp, Homo sapien
ttcctctctccgaagttcctttagg

SEQ ID NO: 15414 - DNA, 25 bp, Homo sapien
ttcctctctccgtagttcctttagg

SEQ ID NO: 15415 - DNA, 25 bp, Homo sapien
gagacctcccagtaataccactttg

SEQ ID NO: 15416 - DNA, 25 bp, Homo sapien
gagacctcccagaaataccactttg

SEQ ID NO: 15417 - DNA, 25 bp, Homo sapien
tcgtcgttatagtacagaacatttg

SEQ ID NO: 15418 - DNA, 25 bp, Homo sapien
tcgtcgttatagaacagaacatttg

SEQ ID NO: 15419 - DNA, 25 bp, Homo sapien
gagttacttggaaaacacctaatat

SEQ ID NO: 15420 - DNA, 25 bp, Homo sapien
gagttacttggataacacctaatat

SEQ ID NO: 15421 - DNA, 25 bp, Homo sapien
agatcatgttcgtttctactgtaaa

SEQ ID NO: 15422 - DNA, 25 bp, Homo sapien
agatcatgttcgattctactgtaaa

SEQ ID NO: 15423 - DNA, 25 bp, Homo sapien
ctgtctcttacgatgtcgattattt

SEQ ID NO: 15424 - DNA, 25 bp, Homo sapien
ctgtctcttacgttgtcgattattt

SEQ ID NO: 15425 - DNA, 25 bp, Homo sapien
tcttccgtatctttgttgacagtag

SEQ ID NO: 15426 - DNA, 25 bp, Homo sapien
tcttccgtatctatgttgacagtag

SEQ ID NO: 15427 - DNA, 25 bp, Homo sapien
gaggtcatcgtttctagtttcagag

SEQ ID NO: 15428 - DNA, 25 bp, Homo sapien
gaggtcatcgttactagtttcagag

SEQ ID NO: 15429 - DNA, 25 bp, Homo sapien
aaggtgaacttcaatcgtatttatc

SEQ ID NO: 15430 - DNA, 25 bp, Homo sapien
aaggtgaacttctatcgtatttatc

SEQ ID NO: 15431 - DNA, 25 bp, Homo sapien
cctcagacgctgtaaggtgtgtgtt

SEQ ID NO: 15432 - DNA, 25 bp, Homo sapien
cctcagacgctgaaaggtgtgtgtt

SEQ ID NO: 15433 - DNA, 25 bp, Homo sapien
acccaacggaggaacggagggtcac

SEQ ID NO: 15434 - DNA, 25 bp, Homo sapien
acccaacggaggtacggagggtcac

SEQ ID NO: 15435 - DNA, 25 bp, Homo sapien
tcaaagggaagtcagtactcatcga

SEQ ID NO: 15436 - DNA, 25 bp, Homo sapien
tcaaagggaagtgagtactcatcga

SEQ ID NO: 15437 - DNA, 25 bp, Homo sapien
atacttggtccaaaagtcgtgttca

SEQ ID NO: 15438 - DNA, 25 bp, Homo sapien
atacttggtccataagtcgtgttca

SEQ ID NO: 15439 - DNA, 25 bp, Homo sapien
gatatgtggtcctcccggttctcgc

SEQ ID NO: 15440 - DNA, 25 bp, Homo sapien
gatatgtggtccacccggttctcgc

SEQ ID NO: 15441 - DNA, 25 bp, Homo sapien
gttgtcggctccaggggtcatccgt

SEQ ID NO: 15442 - DNA, 25 bp, Homo sapien
gttgtcggctcctggggtcatccgt

SEQ ID NO: 15443 - DNA, 25 bp, Homo sapien
tctctcctccggattttactcgcgt

SEQ ID NO: 15444 - DNA, 25 bp, Homo sapien
tctctcctccggtttttactcgcgt

SEQ ID NO: 15445 - DNA, 25 bp, Homo sapien
atcgttccactcgaaggtccctcgt

SEQ ID NO: 15446 - DNA, 25 bp, Homo sapien
atcgttccactccaaggtccctcgt

SEQ ID NO: 15447 - DNA, 25 bp, Homo sapien
accgtgtgacctctcgtggtccagc

SEQ ID NO: 15448 - DNA, 25 bp, Homo sapien
accgtgtgacctgtcgtggtccagc

SEQ ID NO: 15449 - DNA, 25 bp, Homo sapien
ttttataacactttcaagtaaatgt

SEQ ID NO: 15450 - DNA, 25 bp, Homo sapien
ttttataacactatcaagtaaatgt

SEQ ID NO: 15451 - DNA, 25 bp, Homo sapien
gtgtttcagactaatttcttcgatt

SEQ ID NO: 15452 - DNA, 25 bp, Homo sapien
gtgtttcagacttatttcttcgatt

SEQ ID NO: 15453 - DNA, 25 bp, Homo sapien
gtcatcacacaatacgtaccctgtg

SEQ ID NO: 15454 - DNA, 25 bp, Homo sapien
gtcatcacacaaaacgtaccctgtg

SEQ ID NO: 15455 - DNA, 25 bp, Homo sapien
gtgttacacctttatatccatagtg

SEQ ID NO: 15456 - DNA, 25 bp, Homo sapien
gtgttacaccttaatatccatagtg

SEQ ID NO: 15457 - DNA, 25 bp, Homo sapien
ggagtaacctgtaccatatctaata

SEQ ID NO: 15458 - DNA, 25 bp, Homo sapien
ggagtaacctgttccatatctaata

SEQ ID NO: 15459 - DNA, 25 bp, Homo sapien
ggaagacagtttaatactcacaatt

SEQ ID NO: 15460 - DNA, 25 bp, Homo sapien
ggaagacagttttatactcacaatt

SEQ ID NO: 15461 - DNA, 25 bp, Homo sapien
aagaaaacgtgtgtcgtcctcaaca

SEQ ID NO: 15462 - DNA, 25 bp, Homo sapien
aagaaaacgtgtctcgtcctcaaca

SEQ ID NO: 15463 - DNA, 25 bp, Homo sapien
atgtgaaaggaattctacctgacga

SEQ ID NO: 15464 - DNA, 25 bp, Homo sapien
atgtgaaaggaaatctacctgacga

SEQ ID NO: 15465 - DNA, 25 bp, Homo sapien
gttacatcagacacgtaccctagaa

SEQ ID NO: 15466 - DNA, 25 bp, Homo sapien
gttacatcagactcgtaccctagaa

SEQ ID NO: 15467 - DNA, 25 bp, Homo sapien
gtgtgtctacaatttgaccctaaac

SEQ ID NO: 15468 - DNA, 25 bp, Homo sapien
gtgtgtctacaaattgaccctaaac

SEQ ID NO: 15469 - DNA, 25 bp, Homo sapien
agggtctcaccagagatccatacct

SEQ ID NO: 15470 - DNA, 25 bp, Homo sapien
agggtctcaccacagatccatacct

SEQ ID NO: 15471 - DNA, 25 bp, Homo sapien
gaggtgccgcgagaagtacaacttc

SEQ ID NO: 15472 - DNA, 25 bp, Homo sapien
gaggtgccgcgacaagtacaacttc

SEQ ID NO: 15473 - DNA, 25 bp, Homo sapien
gagtagtgcgaggtcgaacaacccg

SEQ ID NO: 15474 - DNA, 25 bp, Homo sapien
gagtagtgcgagctcgaacaacccg

SEQ ID NO: 15475 - DNA, 25 bp, Homo sapien
cgtacaacttacttgtcttagggaa

SEQ ID NO: 15476 - DNA, 25 bp, Homo sapien
cgtacaacttacatgtcttagggaa

SEQ ID NO: 15477 - DNA, 25 bp, Homo sapien
cgactagatctacttcatgagaaag

SEQ ID NO: 15478 - DNA, 25 bp, Homo sapien
cgactagatctagttcatgagaaag

SEQ ID NO: 15479 - DNA, 25 bp, Homo sapien
gtcactgtcgagagtgtaagtcacg

SEQ ID NO: 15480 - DNA, 25 bp, Homo sapien
gtcactgtcgagtgtgtaagtcacg

SEQ ID NO: 15481 - DNA, 25 bp, Homo sapien
cctcttcttcggtgacgagtcgacg

SEQ ID NO: 15482 - DNA, 25 bp, Homo sapien
cctcttcttcggagacgagtcgacg

SEQ ID NO: 15483 - DNA, 25 bp, Homo sapien
caaaatctttgtcaagacgcgatcc

SEQ ID NO: 15484 - DNA, 25 bp, Homo sapien
caaaatctttgtgaagacgcgatcc

SEQ ID NO: 15485 - DNA, 25 bp, Homo sapien
aagataattgtaaacgactcttccg

SEQ ID NO: 15486 - DNA, 25 bp, Homo sapien
aagataattgtatacgactcttccg

SEQ ID NO: 15487 - DNA, 25 bp, Homo sapien
aaaaggttagaggagaccttcgtct

SEQ ID NO: 15488 - DNA, 25 bp, Homo sapien
aaaaggttagagcagaccttcgtct

SEQ ID NO: 15489 - DNA, 25 bp, Homo sapien
agtaaaaacgggaccactaagtttc

SEQ ID NO: 15490 - DNA, 25 bp, Homo sapien
agtaaaaacgggtccactaagtttc

SEQ ID NO: 15491 - DNA, 25 bp, Homo sapien
gaagagtaaagttccaaagtgtctc

SEQ ID NO: 15492 - DNA, 25 bp, Homo sapien
gaagagtaaagtaccaaagtgtctc

SEQ ID NO: 15493 - DNA, 25 bp, Homo sapien
tagtataagtcacgaagggtctact

SEQ ID NO: 15494 - DNA, 25 bp, Homo sapien
tagtataagtcaggaagggtctact

SEQ ID NO: 15495 - DNA, 25 bp, Homo sapien
taaaatatgtgtcgacgtcgtctct

SEQ ID NO: 15496 - DNA, 25 bp, Homo sapien
taaaatatgtgtggacgtcgtctct

SEQ ID NO: 15497 - DNA, 25 bp, Homo sapien
aattatcaccttgttctcggtagtc

SEQ ID NO: 15498 - DNA, 25 bp, Homo sapien
aattatcaccttcttctcggtagtc

SEQ ID NO: 15499 - DNA, 25 bp, Homo sapien
aaattcagtggagtctgtctgtgac

SEQ ID NO: 15500 - DNA, 25 bp, Homo sapien
aaattcagtggactctgtctgtgac

SEQ ID NO: 15501 - DNA, 25 bp, Homo sapien
tatatgtactttggttgtagatccc

SEQ ID NO: 15502 - DNA, 25 bp, Homo sapien
tatatgtactttcgttgtagatccc

SEQ ID NO: 15503 - DNA, 25 bp, Homo sapien
cgttgggtgtctactactcccaaac

SEQ ID NO: 15504 - DNA, 25 bp, Homo sapien
cgttgggtgtcttctactcccaaac

SEQ ID NO: 15505 - DNA, 25 bp, Homo sapien
ctcttggggactctctctactaatc

SEQ ID NO: 15506 - DNA, 25 bp, Homo sapien
ctcttggggactgtctctactaatc

SEQ ID NO: 15507 - DNA, 25 bp, Homo sapien
cacgggaccctctgactcattactt

SEQ ID NO: 15508 - DNA, 25 bp, Homo sapien
cacgggaccctcagactcattactt

SEQ ID NO: 15509 - DNA, 25 bp, Homo sapien
gtcgtggtaccttccctttcactct

SEQ ID NO: 15510 - DNA, 25 bp, Homo sapien
gtcgtggtacctaccctttcactct

SEQ ID NO: 15511 - DNA, 25 bp, Homo sapien
gtgaacgcccggtcgtctacgcgcg

SEQ ID NO: 15512 - DNA, 25 bp, Homo sapien
gtgaacgcccggacgtctacgcgcg

SEQ ID NO: 15513 - DNA, 25 bp, Homo sapien
gtagaggaccttctggagtccgacc

SEQ ID NO: 15514 - DNA, 25 bp, Homo sapien
gtagaggaccttgtggagtccgacc

SEQ ID NO: 15515 - DNA, 25 bp, Homo sapien
cgtaacggttcctccgggtcggtcc

SEQ ID NO: 15516 - DNA, 25 bp, Homo sapien
cgtaacggttccaccgggtcggtcc

SEQ ID NO: 15517 - DNA, 25 bp, Homo sapien
ttatattagtcctccgtagaaaagg

SEQ ID NO: 15518 - DNA, 25 bp, Homo sapien
ttatattagtccaccgtagaaaagg

SEQ ID NO: 15519 - DNA, 25 bp, Homo sapien
cttagttttgtctctacagatttga

SEQ ID NO: 15520 - DNA, 25 bp, Homo sapien
cttagttttgtcactacagatttga

SEQ ID NO: 15521 - DNA, 25 bp, Homo sapien
tgacatgtaccctagaaatgtatga

SEQ ID NO: 15522 - DNA, 25 bp, Homo sapien
tgacatgtacccaagaaatgtatga

SEQ ID NO: 15523 - DNA, 25 bp, Homo sapien
gtttcagtttccacacttatttgag

SEQ ID NO: 15524 - DNA, 25 bp, Homo sapien
gtttcagtttcctcacttatttgag

SEQ ID NO: 15525 - DNA, 25 bp, Homo sapien
gtgtgaccgtcgacttctttcgact

SEQ ID NO: 15526 - DNA, 25 bp, Homo sapien
gtgtgaccgtcgtcttctttcgact

SEQ ID NO: 15527 - DNA, 25 bp, Homo sapien
tcatcatcgaggtagtttttgtccg

SEQ ID NO: 15528 - DNA, 25 bp, Homo sapien
tcatcatcgaggaagtttttgtccg

SEQ ID NO: 15529 - DNA, 25 bp, Homo sapien
caagacatttcgactttcttgacag

SEQ ID NO: 15530 - DNA, 25 bp, Homo sapien
caagacatttcgtctttcttgacag

SEQ ID NO: 15531 - DNA, 25 bp, Homo sapien
taacaggaccatttcggtacaaagt

SEQ ID NO: 15532 - DNA, 25 bp, Homo sapien
taacaggaccatatcggtacaaagt

SEQ ID NO: 15533 - DNA, 25 bp, Homo sapien
aaagtcgccatgtacgaacgagaac

SEQ ID NO: 15534 - DNA, 25 bp, Homo sapien
aaagtcgccatgaacgaacgagaac

SEQ ID NO: 15535 - DNA, 25 bp, Homo sapien
tcaaggcaagttactataccgtgta

SEQ ID NO: 15536 - DNA, 25 bp, Homo sapien
tcaaggcaagtttctataccgtgta

SEQ ID NO: 15537 - DNA, 25 bp, Homo sapien
agacgtgagaacttcatttcgtgct

SEQ ID NO: 15538 - DNA, 25 bp, Homo sapien
agacgtgagaacatcatttcgtgct

SEQ ID NO: 15539 - DNA, 25 bp, Homo sapien
agtaacaaagtcctacgtactgagc

SEQ ID NO: 15540 - DNA, 25 bp, Homo sapien
agtaacaaagtcgtacgtactgagc

SEQ ID NO: 15541 - DNA, 25 bp, Homo sapien
aaggagataagtccactactgtcac

SEQ ID NO: 15542 - DNA, 25 bp, Homo sapien
aaggagataagtgcactactgtcac

SEQ ID NO: 15543 - DNA, 25 bp, Homo sapien
gtgtcgtgtctacctgcgtccccga

SEQ ID NO: 15544 - DNA, 25 bp, Homo sapien
gtgtcgtgtctagctgcgtccccga

SEQ ID NO: 15545 - DNA, 25 bp, Homo sapien
ttatgtagttctggtcttcggttca

SEQ ID NO: 15546 - DNA, 25 bp, Homo sapien
ttatgtagttctcgtcttcggttca

SEQ ID NO: 15547 - DNA, 25 bp, Homo sapien
tcttagtgctacagcaactcgttca

SEQ ID NO: 15548 - DNA, 25 bp, Homo sapien
tcttagtgctactgcaactcgttca

SEQ ID NO: 15549 - DNA, 25 bp, Homo sapien
gatgtctttacgtccggtctttcca

SEQ ID NO: 15550 - DNA, 25 bp, Homo sapien
gatgtctttacgaccggtctttcca

SEQ ID NO: 15551 - DNA, 25 bp, Homo sapien
atgcttagtggaggagtgattctcc

SEQ ID NO: 15552 - DNA, 25 bp, Homo sapien
atgcttagtggacgagtgattctcc

SEQ ID NO: 15553 - DNA, 25 bp, Homo sapien
tgtctcagtgggaactttacctgtc

SEQ ID NO: 15554 - DNA, 25 bp, Homo sapien
tgtctcagtgggtactttacctgtc

SEQ ID NO: 15555 - DNA, 25 bp, Homo sapien
actctaggtgaggtatcaggaattc

SEQ ID NO: 15556 - DNA, 25 bp, Homo sapien
actctaggtgagctatcaggaattc

SEQ ID NO: 15557 - DNA, 25 bp, Homo sapien
aactatgtttagttgcacggaaacc

SEQ ID NO: 15558 - DNA, 25 bp, Homo sapien
aactatgtttagatgcacggaaacc

SEQ ID NO: 15559 - DNA, 25 bp, Homo sapien
tttactgtagactgaagggtctcgc

SEQ ID NO: 15560 - DNA, 25 bp, Homo sapien
tttactgtagacagaagggtctcgc

SEQ ID NO: 15561 - DNA, 25 bp, Homo sapien
attttactagagatgggacgtcgac

SEQ ID NO: 15562 - DNA, 25 bp, Homo sapien
attttactagagttgggacgtcgac

SEQ ID NO: 15563 - DNA, 25 bp, Homo sapien
accggtttagtaacagatcgacttt

SEQ ID NO: 15564 - DNA, 25 bp, Homo sapien
accggtttagtatcagatcgacttt

SEQ ID NO: 15565 - DNA, 25 bp, Homo sapien
cgtgcgtccttgtacccgacgtgag

SEQ ID NO: 15566 - DNA, 25 bp, Homo sapien
cgtgcgtccttgaacccgacgtgag

SEQ ID NO: 15567 - DNA, 25 bp, Homo sapien
ccgacggagggtgagaatcctaacg

SEQ ID NO: 15568 - DNA, 25 bp, Homo sapien
ccgacggagggtcagaatcctaacg

SEQ ID NO: 15569 - DNA, 25 bp, Homo sapien
ccgccgagggtcagggtacccgtct

SEQ ID NO: 15570 - DNA, 25 bp, Homo sapien
ccgccgagggtctgggtacccgtct

SEQ ID NO: 15571 - DNA, 25 bp, Homo sapien
gtcagaggtgtcggaaacgtaatct

SEQ ID NO: 15572 - DNA, 25 bp, Homo sapien
gtcagaggtgtccgaaacgtaatct

SEQ ID NO: 15573 - DNA, 25 bp, Homo sapien
tatatagatcgatcgacttcaacgg

SEQ ID NO: 15574 - DNA, 25 bp, Homo sapien
tatatagatcgaacgacttcaacgg

SEQ ID NO: 15575 - DNA, 25 bp, Homo sapien
cagtctttgttcacgtacttgaaag

SEQ ID NO: 15576 - DNA, 25 bp, Homo sapien
cagtctttgttctcgtacttgaaag

SEQ ID NO: 15577 - DNA, 25 bp, Homo sapien
gtttcttaggttttcaggcacgaga

SEQ ID NO: 15578 - DNA, 25 bp, Homo sapien
gtttcttaggttatcaggcacgaga

SEQ ID NO: 15579 - DNA, 25 bp, Homo sapien
ttttcgacggatcctccggcaagag

SEQ ID NO: 15580 - DNA, 25 bp, Homo sapien
ttttcgacggatgctccggcaagag

SEQ ID NO: 15581 - DNA, 25 bp, Homo sapien
tttacgaggttctgacctccttcct

SEQ ID NO: 15582 - DNA, 25 bp, Homo sapien
tttacgaggttcagacctccttcct

SEQ ID NO: 15583 - DNA, 25 bp, Homo sapien
tcgagagtctgtgcttcatctgact

SEQ ID NO: 15584 - DNA, 25 bp, Homo sapien
tcgagagtctgtccttcatctgact

SEQ ID NO: 15585 - DNA, 25 bp, Homo sapien
caatacggtatcagtctaattttta

SEQ ID NO: 15586 - DNA, 25 bp, Homo sapien
caatacggtatctgtctaattttta

SEQ ID NO: 15587 - DNA, 25 bp, Homo sapien
atagtacggagtctacaaacttttg

SEQ ID NO: 15588 - DNA, 25 bp, Homo sapien
atagtacggagtgtacaaacttttg

SEQ ID NO: 15589 - DNA, 25 bp, Homo sapien
aaagtcgagttcgacttaattggtc

SEQ ID NO: 15590 - DNA, 25 bp, Homo sapien
aaagtcgagttccacttaattggtc

SEQ ID NO: 15591 - DNA, 25 bp, Homo sapien
aaaaagtccctcgacttttatgatg

SEQ ID NO: 15592 - DNA, 25 bp, Homo sapien
aaaaagtccctccacttttatgatg

SEQ ID NO: 15593 - DNA, 25 bp, Homo sapien
tcgaactccgacttttcatcgaacg

SEQ ID NO: 15594 - DNA, 25 bp, Homo sapien
tcgaactccgacatttcatcgaacg

SEQ ID NO: 15595 - DNA, 25 bp, Homo sapien
catcaggtggtcctaaaagtcgagg

SEQ ID NO: 15596 - DNA, 25 bp, Homo sapien
catcaggtggtcgtaaaagtcgagg

SEQ ID NO: 15597 - DNA, 25 bp, Homo sapien
acttctcacgtccacacagagcggg

SEQ ID NO: 15598 - DNA, 25 bp, Homo sapien
acttctcacgtcgacacagagcggg

SEQ ID NO: 15599 - DNA, 25 bp, Homo sapien
ctgacctaccctcctacgagaggtg

SEQ ID NO: 15600 - DNA, 25 bp, Homo sapien
ctgacctaccctgctacgagaggtg

SEQ ID NO: 15601 - DNA, 25 bp, Homo sapien
aggtctggccgcacacgataccgta

SEQ ID NO: 15602 - DNA, 25 bp, Homo sapien
aggtctggccgctcacgataccgta

SEQ ID NO: 15603 - DNA, 25 bp, Homo sapien
gacttagttcacgtaagactcaact

SEQ ID NO: 15604 - DNA, 25 bp, Homo sapien
gacttagttcacctaagactcaact

SEQ ID NO: 15605 - DNA, 25 bp, Homo sapien
ccttcctgcgagtttctgggctagg

SEQ ID NO: 15606 - DNA, 25 bp, Homo sapien
ccttcctgcgagattctgggctagg

SEQ ID NO: 15607 - DNA, 25 bp, Homo sapien
tccaagttgcctaagttacaaatgg

SEQ ID NO: 15608 - DNA, 25 bp, Homo sapien
tccaagttgccttagttacaaatgg

SEQ ID NO: 15609 - DNA, 25 bp, Homo sapien
aaaagtaaccgtgtaactacaattg

SEQ ID NO: 15610 - DNA, 25 bp, Homo sapien
aaaagtaaccgtctaactacaattg

SEQ ID NO: 15611 - DNA, 25 bp, Homo sapien
caaaagactccgtttaagagaattc

SEQ ID NO: 15612 - DNA, 25 bp, Homo sapien
caaaagactccgattaagagaattc

SEQ ID NO: 15613 - DNA, 25 bp, Homo sapien
gtcaaatgaccgtagggacctaatc

SEQ ID NO: 15614 - DNA, 25 bp, Homo sapien
gtcaaatgaccgaagggacctaatc

SEQ ID NO: 15615 - DNA, 25 bp, Homo sapien
tccaacagaaaaagctaccgtttag

SEQ ID NO: 15616 - DNA, 25 bp, Homo sapien
tccaacagaaaatgctaccgtttag

SEQ ID NO: 15617 - DNA, 25 bp, Homo sapien
gtccaaccggtaccaggcccttcga

SEQ ID NO: 15618 - DNA, 25 bp, Homo sapien
gtccaaccggtagcaggcccttcga

SEQ ID NO: 15619 - DNA, 25 bp, Homo sapien
cttcacgaagtgtagctccttctac

SEQ ID NO: 15620 - DNA, 25 bp, Homo sapien
cttcacgaagtgaagctccttctac

SEQ ID NO: 15621 - DNA, 25 bp, Homo sapien
acttgtcgacacgtggattcgtccc

SEQ ID NO: 15622 - DNA, 25 bp, Homo sapien
acttgtcgacacctggattcgtccc

SEQ ID NO: 15623 - DNA, 25 bp, Homo sapien
gagactctactgacgtccccgactc

SEQ ID NO: 15624 - DNA, 25 bp, Homo sapien
gagactctactgtcgtccccgactc

SEQ ID NO: 15625 - DNA, 25 bp, Homo sapien
atccaggttcggtttctccgtccat

SEQ ID NO: 15626 - DNA, 25 bp, Homo sapien
atccaggttcggattctccgtccat

SEQ ID NO: 15627 - DNA, 25 bp, Homo sapien
cttccggtcgggaactcttccacag

SEQ ID NO: 15628 - DNA, 25 bp, Homo sapien
cttccggtcgggtactcttccacag

SEQ ID NO: 15629 - DNA, 25 bp, Homo sapien
cctctctctttgtctcttttacacg

SEQ ID NO: 15630 - DNA, 25 bp, Homo sapien
cctctctctttgactcttttacacg

SEQ ID NO: 15631 - DNA, 25 bp, Homo sapien
tctacctgactctcctgactctgtg

SEQ ID NO: 15632 - DNA, 25 bp, Homo sapien
tctacctgactcacctgactctgtg

SEQ ID NO: 15633 - DNA, 25 bp, Homo sapien
gtccgtcgaggctgcccggactgtg

SEQ ID NO: 15634 - DNA, 25 bp, Homo sapien
gtccgtcgaggcagcccggactgtg

SEQ ID NO: 15635 - DNA, 25 bp, Homo sapien
accccagtgatagacgtcggaggtt

SEQ ID NO: 15636 - DNA, 25 bp, Homo sapien
accccagtgatacacgtcggaggtt

SEQ ID NO: 15637 - DNA, 25 bp, Homo sapien
ataccggtcataagaaccccaggta

SEQ ID NO: 15638 - DNA, 25 bp, Homo sapien
ataccggtcatatgaaccccaggta

SEQ ID NO: 15639 - DNA, 25 bp, Homo sapien
gagtcacggaagaacaccgagactg

SEQ ID NO: 15640 - DNA, 25 bp, Homo sapien
gagtcacggaagtacaccgagactg

SEQ ID NO: 15641 - DNA, 25 bp, Homo sapien
cagtcataagacatgtttaactcgt

SEQ ID NO: 15642 - DNA, 25 bp, Homo sapien
cagtcataagacttgtttaactcgt

SEQ ID NO: 15643 - DNA, 25 bp, Homo sapien
aacgaaacagtgcatagtccaagac

SEQ ID NO: 15644 - DNA, 25 bp, Homo sapien
aacgaaacagtggatagtccaagac

SEQ ID NO: 15645 - DNA, 25 bp, Homo sapien
gacacgaaccatgtatgtgcaagac

SEQ ID NO: 15646 - DNA, 25 bp, Homo sapien
gacacgaaccatctatgtgcaagac

SEQ ID NO: 15647 - DNA, 25 bp, Homo sapien
cagtcaacttattgtcgtgtccaaa

SEQ ID NO: 15648 - DNA, 25 bp, Homo sapien
cagtcaacttatagtcgtgtccaaa

SEQ ID NO: 15649 - DNA, 25 bp, Homo sapien
catagattctatagctagacctgaa

SEQ ID NO: 15650 - DNA, 25 bp, Homo sapien
catagattctattgctagacctgaa

SEQ ID NO: 15651 - DNA, 25 bp, Homo sapien
ccaaagtaaacagaccctcctgctg

SEQ ID NO: 15652 - DNA, 25 bp, Homo sapien
ccaaagtaaacacaccctcctgctg

SEQ ID NO: 15653 - DNA, 25 bp, Homo sapien
aaagagaagacaaccctattatctg

SEQ ID NO: 15654 - DNA, 25 bp, Homo sapien
aaagagaagacatccctattatctg

SEQ ID NO: 15655 - DNA, 25 bp, Homo sapien
aacggaaagaagaagacagtcctat

SEQ ID NO: 15656 - DNA, 25 bp, Homo sapien
aacggaaagaagtagacagtcctat

SEQ ID NO: 15657 - DNA, 25 bp, Homo sapien
cgatagagagtatagacgttctctt

SEQ ID NO: 15658 - DNA, 25 bp, Homo sapien
cgatagagagtaaagacgttctctt

SEQ ID NO: 15659 - DNA, 25 bp, Homo sapien
aattgggaactagagacgtcgtttc

SEQ ID NO: 15660 - DNA, 25 bp, Homo sapien
aattgggaactacagacgtcgtttc

SEQ ID NO: 15661 - DNA, 25 bp, Homo sapien
gtgagtctttacactaatgtctaat

SEQ ID NO: 15662 - DNA, 25 bp, Homo sapien
gtgagtctttactctaatgtctaat

SEQ ID NO: 15663 - DNA, 25 bp, Homo sapien
gtcgtaccttcgaacaacagttaaa

SEQ ID NO: 15664 - DNA, 25 bp, Homo sapien
gtcgtaccttcgtacaacagttaaa

SEQ ID NO: 15665 - DNA, 25 bp, Homo sapien
cctatccccgacagaaacttagaga

SEQ ID NO: 15666 - DNA, 25 bp, Homo sapien
cctatccccgactgaaacttagaga

SEQ ID NO: 15667 - DNA, 25 bp, Homo sapien
tcctcttccccttgttgtttgagat

SEQ ID NO: 15668 - DNA, 25 bp, Homo sapien
tcctcttcccctagttgtttgagat

SEQ ID NO: 15669 - DNA, 25 bp, Homo sapien
cggtattctcctattcgtgttggta

SEQ ID NO: 15670 - DNA, 25 bp, Homo sapien
cggtattctccttttcgtgttggta

SEQ ID NO: 15671 - DNA, 25 bp, Homo sapien
tggttcctctttcgagtcgtctgta

SEQ ID NO: 15672 - DNA, 25 bp, Homo sapien
tggttcctctttggagtcgtctgta

SEQ ID NO: 15673 - DNA, 25 bp, Homo sapien
tccgtcgtactgttaaggtctattg

SEQ ID NO: 15674 - DNA, 25 bp, Homo sapien
tccgtcgtactgataaggtctattg

SEQ ID NO: 15675 - DNA, 25 bp, Homo sapien
cccgaccagttcagtagtcacgttg

SEQ ID NO: 15676 - DNA, 25 bp, Homo sapien
cccgaccagttctgtagtcacgttg

SEQ ID NO: 15677 - DNA, 25 bp, Homo sapien
acccagactctacttggacgtctta

SEQ ID NO: 15678 - DNA, 25 bp, Homo sapien
acccagactctagttggacgtctta

SEQ ID NO: 15679 - DNA, 25 bp, Homo sapien
tccacaaccttatctgagactcttc

SEQ ID NO: 15680 - DNA, 25 bp, Homo sapien
tccacaaccttaactgagactcttc

SEQ ID NO: 15681 - DNA, 25 bp, Homo sapien
attcaggtcacaacttttacggttc

SEQ ID NO: 15682 - DNA, 25 bp, Homo sapien
attcaggtcacatcttttacggttc

SEQ ID NO: 15683 - DNA, 25 bp, Homo sapien
tgtcatgtaaagacctggtgtgtac

SEQ ID NO: 15684 - DNA, 25 bp, Homo sapien
tgtcatgtaaagtcctggtgtgtac

SEQ ID NO: 15685 - DNA, 25 bp, Homo sapien
tcgtccggtctttccggacaggggt

SEQ ID NO: 15686 - DNA, 25 bp, Homo sapien
tcgtccggtcttaccggacaggggt

SEQ ID NO: 15687 - DNA, 25 bp, Homo sapien
tgtgtttgtgtgtacctgaaggacc

SEQ ID NO: 15688 - DNA, 25 bp, Homo sapien
tgtgtttgtgtgaacctgaaggacc

SEQ ID NO: 15689 - DNA, 25 bp, Homo sapien
taacccagtgtgtgtcagaacttcc

SEQ ID NO: 15690 - DNA, 25 bp, Homo sapien
taacccagtgtgagtcagaacttcc

SEQ ID NO: 15691 - DNA, 25 bp, Homo sapien
tacactgggagcatcgacgcaaccc

SEQ ID NO: 15692 - DNA, 25 bp, Homo sapien
tacactgggagcttcgacgcaaccc

SEQ ID NO: 15693 - DNA, 25 bp, Homo sapien
cttggcgtagacacacgacctgcac

SEQ ID NO: 15694 - DNA, 25 bp, Homo sapien
cttggcgtagactcacgacctgcac

SEQ ID NO: 15695 - DNA, 25 bp, Homo sapien
atgcgcagagacttcagtatattta

SEQ ID NO: 15696 - DNA, 25 bp, Homo sapien
atgcgcagagacatcagtatattta

SEQ ID NO: 15697 - DNA, 25 bp, Homo sapien
ctgtcacagaaaccaaccggtctcg

SEQ ID NO: 15698 - DNA, 25 bp, Homo sapien
ctgtcacagaaagcaaccggtctcg

SEQ ID NO: 15699 - DNA, 25 bp, Homo sapien
gtgccacgaaaaggtgctcggtccg

SEQ ID NO: 15700 - DNA, 25 bp, Homo sapien
gtgccacgaaaacgtgctcggtccg

SEQ ID NO: 15701 - DNA, 25 bp, Homo sapien
ttcgggtcacagaacccctgtgggg

SEQ ID NO: 15702 - DNA, 25 bp, Homo sapien
ttcgggtcacagtacccctgtgggg

SEQ ID NO: 15703 - DNA, 25 bp, Homo sapien
ccttcggcgggacaatccctagtgg

SEQ ID NO: 15704 - DNA, 25 bp, Homo sapien
ccttcggcgggagaatccctagtgg

SEQ ID NO: 15705 - DNA, 25 bp, Homo sapien
ccgtgacggcgaaggccatcttcgg

SEQ ID NO: 15706 - DNA, 25 bp, Homo sapien
ccgtgacggcgatggccatcttcgg

SEQ ID NO: 15707 - DNA, 25 bp, Homo sapien
gttacgtccattcctacatctatgg

SEQ ID NO: 15708 - DNA, 25 bp, Homo sapien
gttacgtccattgctacatctatgg

SEQ ID NO: 15709 - DNA, 25 bp, Homo sapien
gaggcgagcacgtcgaacatcttgg

SEQ ID NO: 15710 - DNA, 25 bp, Homo sapien
gaggcgagcacgacgaacatcttgg

SEQ ID NO: 15711 - DNA, 25 bp, Homo sapien
aggtcagatacgaacatactgtgtg

SEQ ID NO: 15712 - DNA, 25 bp, Homo sapien
aggtcagatacgtacatactgtgtg

SEQ ID NO: 15713 - DNA, 25 bp, Homo sapien
ctgtacgtatatggtcttcctcgct

SEQ ID NO: 15714 - DNA, 25 bp, Homo sapien
ctgtacgtatatcgtcttcctcgct

SEQ ID NO: 15715 - DNA, 25 bp, Homo sapien
gtcggaaccgtcgcggtcatctccg

SEQ ID NO: 15716 - DNA, 25 bp, Homo sapien
gtcggaaccgtcccggtcatctccg

SEQ ID NO: 15717 - DNA, 25 bp, Homo sapien
gtggttactcgtaccgccgaggccg

SEQ ID NO: 15718 - DNA, 25 bp, Homo sapien
gtggttactcgttccgccgaggccg

SEQ ID NO: 15719 - DNA, 25 bp, Homo sapien
ggcgagagacattgccggcgcctcc

SEQ ID NO: 15720 - DNA, 25 bp, Homo sapien
ggcgagagacatagccggcgcctcc

SEQ ID NO: 15721 - DNA, 25 bp, Homo sapien
gccgaacgccaaggaggtcttggtc

SEQ ID NO: 15722 - DNA, 25 bp, Homo sapien
gccgaacgccaacgaggtcttggtc

SEQ ID NO: 15723 - DNA, 25 bp, Homo sapien
gatattcccccagtgtcacactgac

SEQ ID NO: 15724 - DNA, 25 bp, Homo sapien
gatattcccccactgtcacactgac

SEQ ID NO: 15725 - DNA, 25 bp, Homo sapien
catatgagtcccacatgaccttggt

SEQ ID NO: 15726 - DNA, 25 bp, Homo sapien
catatgagtccctcatgaccttggt

SEQ ID NO: 15727 - DNA, 25 bp, Homo sapien
ggaggagtcgcgtccaggccctaag

SEQ ID NO: 15728 - DNA, 25 bp, Homo sapien
ggaggagtcgcgaccaggccctaag

SEQ ID NO: 15729 - DNA, 25 bp, Homo sapien
gccaggctgagcaggtcgcataccg

SEQ ID NO: 15730 - DNA, 25 bp, Homo sapien
gccaggctgagctggtcgcataccg

SEQ ID NO: 15731 - DNA, 25 bp, Homo sapien
ccggactccgcggacgtgtcgcacc

SEQ ID NO: 15732 - DNA, 25 bp, Homo sapien
ccggactccgcgcacgtgtcgcacc

SEQ ID NO: 15733 - DNA, 25 bp, Homo sapien
cgtccgtccgtccgtccggcttccg

SEQ ID NO: 15734 - DNA, 25 bp, Homo sapien
cgtccgtccgtcggtccggcttccg

SEQ ID NO: 15735 - DNA, 25 bp, Homo sapien
ctgttcgagtcgtaggacggtccct

SEQ ID NO: 15736 - DNA, 25 bp, Homo sapien
ctgttcgagtcgaaggacggtccct

SEQ ID NO: 15737 - DNA, 25 bp, Homo sapien
tttgggtctttgaatgatgctccgt

SEQ ID NO: 15738 - DNA, 25 bp, Homo sapien
tttgggtctttgtatgatgctccgt

SEQ ID NO: 15739 - DNA, 25 bp, Homo sapien
ggtcgtctctggttggactaaacgt

SEQ ID NO: 15740 - DNA, 25 bp, Homo sapien
ggtcgtctctggatggactaaacgt

SEQ ID NO: 15741 - DNA, 25 bp, Homo sapien
agggttcttgtcgagttcatagaac

SEQ ID NO: 15742 - DNA, 25 bp, Homo sapien
agggttcttgtccagttcatagaac

SEQ ID NO: 15743 - DNA, 25 bp, Homo sapien
tggtacgacttttccttcgtgaaac

SEQ ID NO: 15744 - DNA, 25 bp, Homo sapien
tggtacgactttaccttcgtgaaac

SEQ ID NO: 15745 - DNA, 25 bp, Homo sapien
gtgtgctccgtcaccttcgattacc

SEQ ID NO: 15746 - DNA, 25 bp, Homo sapien
gtgtgctccgtctccttcgattacc

SEQ ID NO: 15747 - DNA, 25 bp, Homo sapien
gtcgcgccggagttggtcccgtcct

SEQ ID NO: 15748 - DNA, 25 bp, Homo sapien
gtcgcgccggagatggtcccgtcct

SEQ ID NO: 15749 - DNA, 25 bp, Homo sapien
gtctctaaaaacgtgttccgacact

SEQ ID NO: 15750 - DNA, 25 bp, Homo sapien
gtctctaaaaacctgttccgacact

SEQ ID NO: 15751 - DNA, 25 bp, Homo sapien
agatcgatggaactgtcctccgacg

SEQ ID NO: 15752 - DNA, 25 bp, Homo sapien
agatcgatggaagtgtcctccgacg

SEQ ID NO: 15753 - DNA, 25 bp, Homo sapien
gatattacaggaagtttttctcgac

SEQ ID NO: 15754 - DNA, 25 bp, Homo sapien
gatattacaggatgtttttctcgac

SEQ ID NO: 15755 - DNA, 25 bp, Homo sapien
taatcaggtgtcatatctttctgat

SEQ ID NO: 15756 - DNA, 25 bp, Homo sapien
taatcaggtgtcttatctttctgat

SEQ ID NO: 15757 - DNA, 25 bp, Homo sapien
ttcacggtagtctctatttactgtt

SEQ ID NO: 15758 - DNA, 25 bp, Homo sapien
ttcacggtagtcactatttactgtt

SEQ ID NO: 15759 - DNA, 25 bp, Homo sapien
tactacctagaaagaggtcctcttt

SEQ ID NO: 15760 - DNA, 25 bp, Homo sapien
tactacctagaatgaggtcctcttt

SEQ ID NO: 15761 - DNA, 25 bp, Homo sapien
ggactagtcacgaagtacggttaga

SEQ ID NO: 15762 - DNA, 25 bp, Homo sapien
ggactagtcacgtagtacggttaga

SEQ ID NO: 15763 - DNA, 25 bp, Homo sapien
tggagactagtcagggtcggactaa

SEQ ID NO: 15764 - DNA, 25 bp, Homo sapien
tggagactagtctgggtcggactaa

SEQ ID NO: 15765 - DNA, 25 bp, Homo sapien
aataaaacgtctggtgaccaaacat

SEQ ID NO: 15766 - DNA, 25 bp, Homo sapien
aataaaacgtctcgtgaccaaacat

SEQ ID NO: 15767 - DNA, 25 bp, Homo sapien
gcgtcaacttattctcgaaacaagg

SEQ ID NO: 15768 - DNA, 25 bp, Homo sapien
gcgtcaacttatactcgaaacaagg

SEQ ID NO: 15769 - DNA, 25 bp, Homo sapien
cctagagtctagaaaccaggtaaat

SEQ ID NO: 15770 - DNA, 25 bp, Homo sapien
cctagagtctagtaaccaggtaaat

SEQ ID NO: 15771 - DNA, 25 bp, Homo sapien
cccagtatcgggtcggagagataga

SEQ ID NO: 15772 - DNA, 25 bp, Homo sapien
cccagtatcgggacggagagataga

SEQ ID NO: 15773 - DNA, 25 bp, Homo sapien
caggcggacaggttctggagatacc

SEQ ID NO: 15774 - DNA, 25 bp, Homo sapien
caggcggacaggatctggagatacc

SEQ ID NO: 15775 - DNA, 25 bp, Homo sapien
cggcgtgaggtcaactatggtaacc

SEQ ID NO: 15776 - DNA, 25 bp, Homo sapien
cggcgtgaggtctactatggtaacc

SEQ ID NO: 15777 - DNA, 25 bp, Homo sapien
tggtgagtgtcactagagctaggac

SEQ ID NO: 15778 - DNA, 25 bp, Homo sapien
tggtgagtgtcagtagagctaggac

SEQ ID NO: 15779 - DNA, 25 bp, Homo sapien
atcgtgaggtcaggttaccgacttt

SEQ ID NO: 15780 - DNA, 25 bp, Homo sapien
atcgtgaggtcacgttaccgacttt

SEQ ID NO: 15781 - DNA, 25 bp, Homo sapien
gaccggcacgtgaccgttatggatt

SEQ ID NO: 15782 - DNA, 25 bp, Homo sapien
gaccggcacgtgtccgttatggatt

SEQ ID NO: 15783 - DNA, 25 bp, Homo sapien
accggacacggttccctcttctgtt

SEQ ID NO: 15784 - DNA, 25 bp, Homo sapien
accggacacggtaccctcttctgtt

SEQ ID NO: 15785 - DNA, 25 bp, Homo sapien
tatgaaacctgaaacatagtccgtg

SEQ ID NO: 15786 - DNA, 25 bp, Homo sapien
tatgaaacctgatacatagtccgtg

SEQ ID NO: 15787 - DNA, 25 bp, Homo sapien
ttagaacctggttaccttagatctc

SEQ ID NO: 15788 - DNA, 25 bp, Homo sapien
ttagaacctggtaaccttagatctc

SEQ ID NO: 15789 - DNA, 25 bp, Homo sapien
ggtcggacctcgacatcaccgacaa

SEQ ID NO: 15790 - DNA, 25 bp, Homo sapien
ggtcggacctcgtcatcaccgacaa

SEQ ID NO: 15791 - DNA, 25 bp, Homo sapien
tcgttggtacgtgaagtcaaccata

SEQ ID NO: 15792 - DNA, 25 bp, Homo sapien
tcgttggtacgtcaagtcaaccata

SEQ ID NO: 15793 - DNA, 25 bp, Homo sapien
tttggaaagacagtcgagagctgtc

SEQ ID NO: 15794 - DNA, 25 bp, Homo sapien
tttggaaagacactcgagagctgtc

SEQ ID NO: 15795 - DNA, 25 bp, Homo sapien
tttaatagtcgtcgtcagaattcgt

SEQ ID NO: 15796 - DNA, 25 bp, Homo sapien
tttaatagtcgtggtcagaattcgt

SEQ ID NO: 15797 - DNA, 25 bp, Homo sapien
ttatagaacagatctcagatcgttt

SEQ ID NO: 15798 - DNA, 25 bp, Homo sapien
ttatagaacagaactcagatcgttt

SEQ ID NO: 15799 - DNA, 25 bp, Homo sapien
cagagagacgcgtacccgctaggtg

SEQ ID NO: 15800 - DNA, 25 bp, Homo sapien
cagagagacgcgaacccgctaggtg

SEQ ID NO: 15801 - DNA, 25 bp, Homo sapien
tccaacccacgactctgtctagggt

SEQ ID NO: 15802 - DNA, 25 bp, Homo sapien
tccaacccacgagtctgtctagggt

SEQ ID NO: 15803 - DNA, 25 bp, Homo sapien
gattcggtccgagagtccttttaag

SEQ ID NO: 15804 - DNA, 25 bp, Homo sapien
gattcggtccgacagtccttttaag

SEQ ID NO: 15805 - DNA, 25 bp, Homo sapien
gtgtcaacacagtgtcgatttttgt

SEQ ID NO: 15806 - DNA, 25 bp, Homo sapien
gtgtcaacacagagtcgatttttgt

SEQ ID NO: 15807 - DNA, 25 bp, Homo sapien
agacctaacaggtacgatctttatt

SEQ ID NO: 15808 - DNA, 25 bp, Homo sapien
agacctaacaggaacgatctttatt

SEQ ID NO: 15809 - DNA, 25 bp, Homo sapien
agatcaacacctagaacgtaaagtt

SEQ ID NO: 15810 - DNA, 25 bp, Homo sapien
agatcaacaccttgaacgtaaagtt

SEQ ID NO: 15811 - DNA, 25 bp, Homo sapien
tctctctggagtggaccgagaggtt

SEQ ID NO: 15812 - DNA, 25 bp, Homo sapien
tctctctggagtcgaccgagaggtt

SEQ ID NO: 15813 - DNA, 25 bp, Homo sapien
tcaccccgtcggactataactatag

SEQ ID NO: 15814 - DNA, 25 bp, Homo sapien
tcaccccgtcggtctataactatag

SEQ ID NO: 15815 - DNA, 25 bp, Homo sapien
gtcacaatgtgatcttatacactag

SEQ ID NO: 15816 - DNA, 25 bp, Homo sapien
gtcacaatgtgaacttatacactag

SEQ ID NO: 15817 - DNA, 25 bp, Homo sapien
ggtctcgtcacgatagagtctcacg

SEQ ID NO: 15818 - DNA, 25 bp, Homo sapien
ggtctcgtcacgttagagtctcacg

SEQ ID NO: 15819 - DNA, 25 bp, Homo sapien
gaccggggaaatctaagtgtctaag

SEQ ID NO: 15820 - DNA, 25 bp, Homo sapien
gaccggggaaatgtaagtgtctaag

SEQ ID NO: 15821 - DNA, 25 bp, Homo sapien
agggcaaggtaaaagtaattcccgt

SEQ ID NO: 15822 - DNA, 25 bp, Homo sapien
agggcaaggtaatagtaattcccgt

SEQ ID NO: 15823 - DNA, 25 bp, Homo sapien
cgagagagagtacacacacatcccc

SEQ ID NO: 15824 - DNA, 25 bp, Homo sapien
cgagagagagtagacacacatcccc

SEQ ID NO: 15825 - DNA, 25 bp, Homo sapien
gactggtgcgggcggacgtcggtcc

SEQ ID NO: 15826 - DNA, 25 bp, Homo sapien
gactggtgcggggggacgtcggtcc

SEQ ID NO: 15827 - DNA, 25 bp, Homo sapien
aattccagacaggagacggatttcc

SEQ ID NO: 15828 - DNA, 25 bp, Homo sapien
aattccagacagcagacggatttcc

SEQ ID NO: 15829 - DNA, 25 bp, Homo sapien
aaagtttcagatacaggaaactccc

SEQ ID NO: 15830 - DNA, 25 bp, Homo sapien
aaagtttcagattcaggaaactccc

SEQ ID NO: 15831 - DNA, 25 bp, Homo sapien
ataatgcgaaacgaagaaacgccac

SEQ ID NO: 15832 - DNA, 25 bp, Homo sapien
ataatgcgaaaccaagaaacgccac

SEQ ID NO: 15833 - DNA, 25 bp, Homo sapien
taaaagcaccaccacgaaaacccgg

SEQ ID NO: 15834 - DNA, 25 bp, Homo sapien
taaaagcaccacgacgaaaacccgg

SEQ ID NO: 15835 - DNA, 25 bp, Homo sapien
taaaacttctcgagaaacacgaatg

SEQ ID NO: 15836 - DNA, 25 bp, Homo sapien
taaaacttctcgtgaaacacgaatg

SEQ ID NO: 15837 - DNA, 25 bp, Homo sapien
ggttactacttaaacgtaaacttcg

SEQ ID NO: 15838 - DNA, 25 bp, Homo sapien
ggttactacttatacgtaaacttcg

SEQ ID NO: 15839 - DNA, 25 bp, Homo sapien
cggtgtctcttaccatataatgtct

SEQ ID NO: 15840 - DNA, 25 bp, Homo sapien
cggtgtctcttagcatataatgtct

SEQ ID NO: 15841 - DNA, 25 bp, Homo sapien
aggcagtcggtacatgtttgtcttg

SEQ ID NO: 15842 - DNA, 25 bp, Homo sapien
aggcagtcggtagatgtttgtcttg

SEQ ID NO: 15843 - DNA, 25 bp, Homo sapien
tttcatcctaagatcgtttgtcctg

SEQ ID NO: 15844 - DNA, 25 bp, Homo sapien
tttcatcctaagttcgtttgtcctg

SEQ ID NO: 15845 - DNA, 25 bp, Homo sapien
tcgtggtgacactgcgcacggtgct

SEQ ID NO: 15846 - DNA, 25 bp, Homo sapien
tcgtggtgacacagcgcacggtgct

SEQ ID NO: 15847 - DNA, 25 bp, Homo sapien
tacttagtagaaaccacgagttcct

SEQ ID NO: 15848 - DNA, 25 bp, Homo sapien
tacttagtagaatccacgagttcct

SEQ ID NO: 15849 - DNA, 25 bp, Homo sapien
cagtgtctagtctccggtgtggtag

SEQ ID NO: 15850 - DNA, 25 bp, Homo sapien
cagtgtctagtcaccggtgtggtag

SEQ ID NO: 15851 - DNA, 25 bp, Homo sapien
catgtcgttcatcactttcgacagt

SEQ ID NO: 15852 - DNA, 25 bp, Homo sapien
catgtcgttcatgactttcgacagt

SEQ ID NO: 15853 - DNA, 25 bp, Homo sapien
ttctgcgtctagaagtacttctcca

SEQ ID NO: 15854 - DNA, 25 bp, Homo sapien
ttctgcgtctagtagtacttctcca

SEQ ID NO: 15855 - DNA, 25 bp, Homo sapien
cgtagcgcgtgaaaaaggtcgcata

SEQ ID NO: 15856 - DNA, 25 bp, Homo sapien
cgtagcgcgtgataaaggtcgcata

SEQ ID NO: 15857 - DNA, 25 bp, Homo sapien
tagtggtgtgcgtgaatagtccttg

SEQ ID NO: 15858 - DNA, 25 bp, Homo sapien
tagtggtgtgcgagaatagtccttg

SEQ ID NO: 15859 - DNA, 25 bp, Homo sapien
ccgtcacagtgaggagtagcacgta

SEQ ID NO: 15860 - DNA, 25 bp, Homo sapien
ccgtcacagtgacgagtagcacgta

SEQ ID NO: 15861 - DNA, 25 bp, Homo sapien
cactctccgtccagtcgggaacagt

SEQ ID NO: 15862 - DNA, 25 bp, Homo sapien
cactctccgtcctgtcgggaacagt

SEQ ID NO: 15863 - DNA, 25 bp, Homo sapien
ctccacgggacttcgtgtctcggta

SEQ ID NO: 15864 - DNA, 25 bp, Homo sapien
ctccacgggactacgtgtctcggta

SEQ ID NO: 15865 - DNA, 25 bp, Homo sapien
cgacgtgacccttgaccctgagtct

SEQ ID NO: 15866 - DNA, 25 bp, Homo sapien
cgacgtgaccctagaccctgagtct

SEQ ID NO: 15867 - DNA, 25 bp, Homo sapien
gaccctgaccctatacctcgagatt

SEQ ID NO: 15868 - DNA, 25 bp, Homo sapien
gaccctgaccctttacctcgagatt

SEQ ID NO: 15869 - DNA, 25 bp, Homo sapien
tatgagacgcacctgtataaccaaa

SEQ ID NO: 15870 - DNA, 25 bp, Homo sapien
tatgagacgcacgtgtataaccaaa

SEQ ID NO: 15871 - DNA, 25 bp, Homo sapien
tagtaaaggaagtaacaccacagag

SEQ ID NO: 15872 - DNA, 25 bp, Homo sapien
tagtaaaggaagaaacaccacagag

SEQ ID NO: 15873 - DNA, 25 bp, Homo sapien
acagagcgtactggaacttcacaac

SEQ ID NO: 15874 - DNA, 25 bp, Homo sapien
acagagcgtactcgaacttcacaac

SEQ ID NO: 15875 - DNA, 25 bp, Homo sapien
actcgaacacagcacaatcacggta

SEQ ID NO: 15876 - DNA, 25 bp, Homo sapien
actcgaacacaggacaatcacggta

SEQ ID NO: 15877 - DNA, 25 bp, Homo sapien
tctcttagtccgacaggattcagta

SEQ ID NO: 15878 - DNA, 25 bp, Homo sapien
tctcttagtccgtcaggattcagta

SEQ ID NO: 15879 - DNA, 25 bp, Homo sapien
tatgtctaaccgtccgttttctgtc

SEQ ID NO: 15880 - DNA, 25 bp, Homo sapien
tatgtctaaccgaccgttttctgtc

SEQ ID NO: 15881 - DNA, 25 bp, Homo sapien
acgaaagggttctacgaatataccg

SEQ ID NO: 15882 - DNA, 25 bp, Homo sapien
acgaaagggttcaacgaatataccg

SEQ ID NO: 15883 - DNA, 25 bp, Homo sapien
gtgaaggagttccagtcggaaccgt

SEQ ID NO: 15884 - DNA, 25 bp, Homo sapien
gtgaaggagttcgagtcggaaccgt

SEQ ID NO: 15885 - DNA, 25 bp, Homo sapien
ggtctcgtaggattagattcctcgc

SEQ ID NO: 15886 - DNA, 25 bp, Homo sapien
ggtctcgtaggaatagattcctcgc

SEQ ID NO: 15887 - DNA, 25 bp, Homo sapien
tgtctcaggtggacgtgtctcgtaa

SEQ ID NO: 15888 - DNA, 25 bp, Homo sapien
tgtctcaggtggtcgtgtctcgtaa

SEQ ID NO: 15889 - DNA, 25 bp, Homo sapien
accgagaattctactcgtgtgttta

SEQ ID NO: 15890 - DNA, 25 bp, Homo sapien
accgagaattcttctcgtgtgttta

SEQ ID NO: 15891 - DNA, 25 bp, Homo sapien
cacacgaaggttcaagtgtgttaat

SEQ ID NO: 15892 - DNA, 25 bp, Homo sapien
cacacgaaggttgaagtgtgttaat

SEQ ID NO: 15893 - DNA, 25 bp, Homo sapien
catatagtttatgtttcgtgacacg

SEQ ID NO: 15894 - DNA, 25 bp, Homo sapien
catatagtttatctttcgtgacacg

SEQ ID NO: 15895 - DNA, 25 bp, Homo sapien
gtcacatgttacatttgttcatcga

SEQ ID NO: 15896 - DNA, 25 bp, Homo sapien
gtcacatgttacttttgttcatcga

SEQ ID NO: 15897 - DNA, 25 bp, Homo sapien
caaatactgtgtcatgtgtcctccg

SEQ ID NO: 15898 - DNA, 25 bp, Homo sapien
caaatactgtgtgatgtgtcctccg

SEQ ID NO: 15899 - DNA, 25 bp, Homo sapien
gacagaaatttttcgtacctcagac

SEQ ID NO: 15900 - DNA, 25 bp, Homo sapien
gacagaaattttacgtacctcagac

SEQ ID NO: 15901 - DNA, 25 bp, Homo sapien
gaacgaaattatagacgagctcaga

SEQ ID NO: 15902 - DNA, 25 bp, Homo sapien
gaacgaaattattgacgagctcaga

SEQ ID NO: 15903 - DNA, 25 bp, Homo sapien
gtagaaagatttcagtcacgtaaca

SEQ ID NO: 15904 - DNA, 25 bp, Homo sapien
gtagaaagatttgagtcacgtaaca

SEQ ID NO: 15905 - DNA, 25 bp, Homo sapien
tgtaaagagtgtcaaatgtacactc

SEQ ID NO: 15906 - DNA, 25 bp, Homo sapien
tgtaaagagtgtgaaatgtacactc

SEQ ID NO: 15907 - DNA, 25 bp, Homo sapien
tacacgtgagtgaacgagtgcgaga

SEQ ID NO: 15908 - DNA, 25 bp, Homo sapien
tacacgtgagtgtacgagtgcgaga

SEQ ID NO: 15909 - DNA, 25 bp, Homo sapien
acacgcagctacaagagtcggtcga

SEQ ID NO: 15910 - DNA, 25 bp, Homo sapien
acacgcagctactagagtcggtcga

SEQ ID NO: 15911 - DNA, 25 bp, Homo sapien
taactcttcgtacataacgtgtcgg

SEQ ID NO: 15912 - DNA, 25 bp, Homo sapien
taactcttcgtagataacgtgtcgg

SEQ ID NO: 15913 - DNA, 25 bp, Homo sapien
tgtcctacttctgtacctctgtgac

SEQ ID NO: 15914 - DNA, 25 bp, Homo sapien
tgtcctacttctctacctctgtgac

SEQ ID NO: 15915 - DNA, 25 bp, Homo sapien
gttgtcgtccctccttactctggac

SEQ ID NO: 15916 - DNA, 25 bp, Homo sapien
gttgtcgtccctgcttactctggac

SEQ ID NO: 15917 - DNA, 25 bp, Homo sapien
gagcctctcctctagtcgtatccgg

SEQ ID NO: 15918 - DNA, 25 bp, Homo sapien
gagcctctcctcaagtcgtatccgg

SEQ ID NO: 15919 - DNA, 25 bp, Homo sapien
cgtaatcgatatctgactataagtt

SEQ ID NO: 15920 - DNA, 25 bp, Homo sapien
cgtaatcgatatgtgactataagtt

SEQ ID NO: 15921 - DNA, 25 bp, Homo sapien
ggagtctcttcctgagacgttcaag

SEQ ID NO: 15922 - DNA, 25 bp, Homo sapien
ggagtctcttccagagacgttcaag

SEQ ID NO: 15923 - DNA, 25 bp, Homo sapien
catgtcaggtcgacgtgaatcccgt

SEQ ID NO: 15924 - DNA, 25 bp, Homo sapien
catgtcaggtcgtcgtgaatcccgt

SEQ ID NO: 15925 - DNA, 25 bp, Homo sapien
cagttcacgtgtactccgacaacca

SEQ ID NO: 15926 - DNA, 25 bp, Homo sapien
cagttcacgtgttctccgacaacca

SEQ ID NO: 15927 - DNA, 25 bp, Homo sapien
gtctgacgtcgttctaccagatcaa

SEQ ID NO: 15928 - DNA, 25 bp, Homo sapien
gtctgacgtcgtactaccagatcaa

SEQ ID NO: 15929 - DNA, 25 bp, Homo sapien
gtcggtatgtatacttcgatcgtaa

SEQ ID NO: 15930 - DNA, 25 bp, Homo sapien
gtcggtatgtattcttcgatcgtaa

SEQ ID NO: 15931 - DNA, 25 bp, Homo sapien
cggtatatacttgtctctcgttttg

SEQ ID NO: 15932 - DNA, 25 bp, Homo sapien
cggtatatacttctctctcgttttg

SEQ ID NO: 15933 - DNA, 25 bp, Homo sapien
ctaactctgtttttccgtgtttgag

SEQ ID NO: 15934 - DNA, 25 bp, Homo sapien
ctaactctgtttatccgtgtttgag

SEQ ID NO: 15935 - DNA, 25 bp, Homo sapien
ctaacgtgtcttgcaaaatctctgg

SEQ ID NO: 15936 - DNA, 25 bp, Homo sapien
ctaacgtgtcttccaaaatctctgg

SEQ ID NO: 15937 - DNA, 25 bp, Homo sapien
gatctcttttcagaccacttcgtcg

SEQ ID NO: 15938 - DNA, 25 bp, Homo sapien
gatctcttttcacaccacttcgtcg

SEQ ID NO: 15939 - DNA, 25 bp, Homo sapien
aatctttgtccgtctgtttctctcg

SEQ ID NO: 15940 - DNA, 25 bp, Homo sapien
aatctttgtccgactgtttctctcg

SEQ ID NO: 15941 - DNA, 25 bp, Homo sapien
aactttttcgaattacgttgttacg

SEQ ID NO: 15942 - DNA, 25 bp, Homo sapien
aactttttcgaaatacgttgttacg

SEQ ID NO: 15943 - DNA, 25 bp, Homo sapien
gagactttttcacgatactgatctc

SEQ ID NO: 15944 - DNA, 25 bp, Homo sapien
gagactttttcaggatactgatctc

SEQ ID NO: 15945 - DNA, 25 bp, Homo sapien
tagagactttttaccgattgatcag

SEQ ID NO: 15946 - DNA, 25 bp, Homo sapien
tagagacttttttccgattgatcag

SEQ ID NO: 15947 - DNA, 25 bp, Homo sapien
atctcttctcctcagtgtcgactcg

SEQ ID NO: 15948 - DNA, 25 bp, Homo sapien
atctcttctcctgagtgtcgactcg

SEQ ID NO: 15949 - DNA, 25 bp, Homo sapien
tcgtgtgtcgggaggtacgtactac

SEQ ID NO: 15950 - DNA, 25 bp, Homo sapien
tcgtgtgtcgggtggtacgtactac

SEQ ID NO: 15951 - DNA, 25 bp, Homo sapien
cgtgtgtcgggaggtacgtactacc

SEQ ID NO: 15952 - DNA, 25 bp, Homo sapien
cgtgtgtcgggacgtacgtactacc

SEQ ID NO: 15953 - DNA, 25 bp, Homo sapien
cgacacgaccggagtcggggttcct

SEQ ID NO: 15954 - DNA, 25 bp, Homo sapien
cgacacgaccggtgtcggggttcct

SEQ ID NO: 15955 - DNA, 25 bp, Homo sapien
tctcggtccgacctctgtggtcctg

SEQ ID NO: 15956 - DNA, 25 bp, Homo sapien
tctcggtccgacgtctgtggtcctg

SEQ ID NO: 15957 - DNA, 25 bp, Homo sapien
atttcgaaagattgtgaagtcacct

SEQ ID NO: 15958 - DNA, 25 bp, Homo sapien
atttcgaaagatagtgaagtcacct

SEQ ID NO: 15959 - DNA, 25 bp, Homo sapien
cataggtaaaagtccgtcgggaccc

SEQ ID NO: 15960 - DNA, 25 bp, Homo sapien
cataggtaaaagaccgtcgggaccc

SEQ ID NO: 15961 - DNA, 25 bp, Homo sapien
taaagagagacacgtaccggacatt

SEQ ID NO: 15962 - DNA, 25 bp, Homo sapien
taaagagagacaggtaccggacatt

SEQ ID NO: 15963 - DNA, 25 bp, Homo sapien
ttcgtggtcccgtgaagtttctact

SEQ ID NO: 15964 - DNA, 25 bp, Homo sapien
ttcgtggtcccgagaagtttctact

SEQ ID NO: 15965 - DNA, 25 bp, Homo sapien
gtgacagtgacttggctctccctta

SEQ ID NO: 15966 - DNA, 25 bp, Homo sapien
gtgacagtgactaggctctccctta

SEQ ID NO: 15967 - DNA, 25 bp, Homo sapien
acggagtgcagtggtactccccttt

SEQ ID NO: 15968 - DNA, 25 bp, Homo sapien
acggagtgcagtcgtactccccttt

SEQ ID NO: 15969 - DNA, 25 bp, Homo sapien
gaaggagagagtttctatgccctta

SEQ ID NO: 15970 - DNA, 25 bp, Homo sapien
gaaggagagagtatctatgccctta

SEQ ID NO: 15971 - DNA, 25 bp, Homo sapien
acggagagagagctttacaaaactg

SEQ ID NO: 15972 - DNA, 25 bp, Homo sapien
acggagagagaggtttacaaaactg

SEQ ID NO: 15973 - DNA, 25 bp, Homo sapien
caaggagaagattatacgaaccaca

SEQ ID NO: 15974 - DNA, 25 bp, Homo sapien
caaggagaagataatacgaaccaca

SEQ ID NO: 15975 - DNA, 25 bp, Homo sapien
agagagatcggtatagaaccgacga

SEQ ID NO: 15976 - DNA, 25 bp, Homo sapien
agagagatcggtttagaaccgacga

SEQ ID NO: 15977 - DNA, 25 bp, Homo sapien
agtaccataagatgtccccgacgac

SEQ ID NO: 15978 - DNA, 25 bp, Homo sapien
agtaccataagaagtccccgacgac

SEQ ID NO: 15979 - DNA, 25 bp, Homo sapien
aagtttaacacacgttctacaagag

SEQ ID NO: 15980 - DNA, 25 bp, Homo sapien
aagtttaacacaggttctacaagag

SEQ ID NO: 15981 - DNA, 25 bp, Homo sapien
ccaaggaaaccctaactcaacgacg

SEQ ID NO: 15982 - DNA, 25 bp, Homo sapien
ccaaggaaacccaaactcaacgacg

SEQ ID NO: 15983 - DNA, 25 bp, Homo sapien
tcagacgggtcgtgtggaccacccg

SEQ ID NO: 15984 - DNA, 25 bp, Homo sapien
tcagacgggtcgagtggaccacccg

SEQ ID NO: 15985 - DNA, 25 bp, Homo sapien
gacggagtccacagacccttacgac

SEQ ID NO: 15986 - DNA, 25 bp, Homo sapien
gacggagtccactgacccttacgac

SEQ ID NO: 15987 - DNA, 25 bp, Homo sapien
acgcagtcctctcgtgtgtgaacgt

SEQ ID NO: 15988 - DNA, 25 bp, Homo sapien
acgcagtcctctggtgtgtgaacgt

SEQ ID NO: 15989 - DNA, 25 bp, Homo sapien
ccctcgaccggagtctagtacacgt

SEQ ID NO: 15990 - DNA, 25 bp, Homo sapien
ccctcgaccggactctagtacacgt

SEQ ID NO: 15991 - DNA, 25 bp, Homo sapien
gaggctccgcgacgagtccgtaacc

SEQ ID NO: 15992 - DNA, 25 bp, Homo sapien
gaggctccgcgaggagtccgtaacc

SEQ ID NO: 15993 - DNA, 25 bp, Homo sapien
tgaccgagcgaacgactcggccgac

SEQ ID NO: 15994 - DNA, 25 bp, Homo sapien
tgaccgagcgaaggactcggccgac

SEQ ID NO: 15995 - DNA, 25 bp, Homo sapien
gatcggtcacaggacatagacgaga

SEQ ID NO: 15996 - DNA, 25 bp, Homo sapien
gatcggtcacagcacatagacgaga

SEQ ID NO: 15997 - DNA, 25 bp, Homo sapien
aaggacactcgaccaccgtatatag

SEQ ID NO: 15998 - DNA, 25 bp, Homo sapien
aaggacactcgagcaccgtatatag

SEQ ID NO: 15999 - DNA, 25 bp, Homo sapien
tcctagataagtgagaccaggtatg

SEQ ID NO: 16000 - DNA, 25 bp, Homo sapien
tcctagataagtcagaccaggtatg

SEQ ID NO: 16001 - DNA, 25 bp, Homo sapien
ctagttataatcaccgtggtcgtag

SEQ ID NO: 16002 - DNA, 25 bp, Homo sapien
ctagttataatctccgtggtcgtag

SEQ ID NO: 16003 - DNA, 25 bp, Homo sapien
catgttacgacacaccgctggtgag

SEQ ID NO: 16004 - DNA, 25 bp, Homo sapien
catgttacgacagaccgctggtgag

SEQ ID NO: 16005 - DNA, 25 bp, Homo sapien
cccttcggtagtaccacagttcggc

SEQ ID NO: 16006 - DNA, 25 bp, Homo sapien
cccttcggtagttccacagttcggc

SEQ ID NO: 16007 - DNA, 25 bp, Homo sapien
accaaaggtcgttcctatgtctaaa

SEQ ID NO: 16008 - DNA, 25 bp, Homo sapien
accaaaggtcgtacctatgtctaaa

SEQ ID NO: 16009 - DNA, 25 bp, Homo sapien
ataacgtgtgggtctttgtaatctc

SEQ ID NO: 16010 - DNA, 25 bp, Homo sapien
ataacgtgtgggactttgtaatctc

SEQ ID NO: 16011 - DNA, 25 bp, Homo sapien
taacacgtttttcatttcgtgaagt

SEQ ID NO: 16012 - DNA, 25 bp, Homo sapien
taacacgtttttgatttcgtgaagt

SEQ ID NO: 16013 - DNA, 25 bp, Homo sapien
tacacgtccttcgaccgacactggg

SEQ ID NO: 16014 - DNA, 25 bp, Homo sapien
tacacgtccttccaccgacactggg

SEQ ID NO: 16015 - DNA, 25 bp, Homo sapien
ctctcgtcgggtcaagtgtcccggg

SEQ ID NO: 16016 - DNA, 25 bp, Homo sapien
ctctcgtcgggtgaagtgtcccggg

SEQ ID NO: 16017 - DNA, 25 bp, Homo sapien
ctaggtcctgtgcattccgcggtgt

SEQ ID NO: 16018 - DNA, 25 bp, Homo sapien
ctaggtcctgtggattccgcggtgt

SEQ ID NO: 16019 - DNA, 25 bp, Homo sapien
tagtcgtttctccatttgtcgttac

SEQ ID NO: 16020 - DNA, 25 bp, Homo sapien
tagtcgtttctcgatttgtcgttac

SEQ ID NO: 16021 - DNA, 25 bp, Homo sapien
agtcgatccctcttcgtcttccttg

SEQ ID NO: 16022 - DNA, 25 bp, Homo sapien
agtcgatccctcatcgtcttccttg

SEQ ID NO: 16023 - DNA, 25 bp, Homo sapien
cttcaatcggggtctttcgactgtc

SEQ ID NO: 16024 - DNA, 25 bp, Homo sapien
cttcaatcggggactttcgactgtc

SEQ ID NO: 16025 - DNA, 25 bp, Homo sapien
ttgacatgagggacgtattgttctc

SEQ ID NO: 16026 - DNA, 25 bp, Homo sapien
ttgacatgagggtcgtattgttctc

SEQ ID NO: 16027 - DNA, 25 bp, Homo sapien
tactagttgtactaaatgtcaatcg

SEQ ID NO: 16028 - DNA, 25 bp, Homo sapien
tactagttgtacaaaatgtcaatcg

SEQ ID NO: 16029 - DNA, 25 bp, Homo sapien
gttagtccatgaactgttacttctt

SEQ ID NO: 16030 - DNA, 25 bp, Homo sapien
gttagtccatgatctgttacttctt

SEQ ID NO: 16031 - DNA, 25 bp, Homo sapien
gtgacgcactaggtgtagttgtccc

SEQ ID NO: 16032 - DNA, 25 bp, Homo sapien
gtgacgcactagctgtagttgtccc

SEQ ID NO: 16033 - DNA, 25 bp, Homo sapien
ctgtccggtagttgacgtaactccc

SEQ ID NO: 16034 - DNA, 25 bp, Homo sapien
ctgtccggtagtagacgtaactccc

SEQ ID NO: 16035 - DNA, 25 bp, Homo sapien
ctttctgtcgttaacgaagactttc

SEQ ID NO: 16036 - DNA, 25 bp, Homo sapien
ctttctgtcgtttacgaagactttc

SEQ ID NO: 16037 - DNA, 25 bp, Homo sapien
gattctttctctgacttcgtaccag

SEQ ID NO: 16038 - DNA, 25 bp, Homo sapien
gattctttctctcacttcgtaccag

SEQ ID NO: 16039 - DNA, 25 bp, Homo sapien
ttatcttatgtctcacgtccgtgaa

SEQ ID NO: 16040 - DNA, 25 bp, Homo sapien
ttatcttatgtcacacgtccgtgaa

SEQ ID NO: 16041 - DNA, 25 bp, Homo sapien
taccgaagtacatacgtcagtgata

SEQ ID NO: 16042 - DNA, 25 bp, Homo sapien
taccgaagtacaaacgtcagtgata

SEQ ID NO: 16043 - DNA, 25 bp, Homo sapien
tgggtaaaagacgtaaccgacgtct

SEQ ID NO: 16044 - DNA, 25 bp, Homo sapien
tgggtaaaagacctaaccgacgtct

SEQ ID NO: 16045 - DNA, 25 bp, Homo sapien
tattcgttgactagaacccttttgt

SEQ ID NO: 16046 - DNA, 25 bp, Homo sapien
tattcgttgacttgaacccttttgt

SEQ ID NO: 16047 - DNA, 25 bp, Homo sapien
ttccttgcgcggtgtcctctcttcg

SEQ ID NO: 16048 - DNA, 25 bp, Homo sapien
ttccttgcgcggagtcctctcttcg

SEQ ID NO: 16049 - DNA, 25 bp, Homo sapien
cttccttctctggattccctcgaag

SEQ ID NO: 16050 - DNA, 25 bp, Homo sapien
cttccttctctgcattccctcgaag

SEQ ID NO: 16051 - DNA, 25 bp, Homo sapien
gacccttccgaatagtctcccttag

SEQ ID NO: 16052 - DNA, 25 bp, Homo sapien
gacccttccgaaaagtctcccttag

SEQ ID NO: 16053 - DNA, 25 bp, Homo sapien
cattgtgtcaacatagaacatttgt

SEQ ID NO: 16054 - DNA, 25 bp, Homo sapien
cattgtgtcaacttagaacatttgt

SEQ ID NO: 16055 - DNA, 25 bp, Homo sapien
tgttttcggactaaacgtcataaat

SEQ ID NO: 16056 - DNA, 25 bp, Homo sapien
tgttttcggacttaacgtcataaat

SEQ ID NO: 16057 - DNA, 25 bp, Homo sapien
tgaatgtgcacgtttctctatacaa

SEQ ID NO: 16058 - DNA, 25 bp, Homo sapien
tgaatgtgcacgattctctatacaa

SEQ ID NO: 16059 - DNA, 25 bp, Homo sapien
ttactgttagatcgtatctacttgt

SEQ ID NO: 16060 - DNA, 25 bp, Homo sapien
ttactgttagatggtatctacttgt

SEQ ID NO: 16061 - DNA, 25 bp, Homo sapien
tttccgtcatgttagatgtcatagt

SEQ ID NO: 16062 - DNA, 25 bp, Homo sapien
tttccgtcatgtaagatgtcatagt

SEQ ID NO: 16063 - DNA, 25 bp, Homo sapien
tactgtcatcggttctagatttagg

SEQ ID NO: 16064 - DNA, 25 bp, Homo sapien
tactgtcatcggatctagatttagg

SEQ ID NO: 16065 - DNA, 25 bp, Homo sapien
aactgaatttctacgtatgttactg

SEQ ID NO: 16066 - DNA, 25 bp, Homo sapien
aactgaatttcttcgtatgttactg

SEQ ID NO: 16067 - DNA, 25 bp, Homo sapien
ctgtaacgttagtaacggtgtctgg

SEQ ID NO: 16068 - DNA, 25 bp, Homo sapien
ctgtaacgttagaaacggtgtctgg

SEQ ID NO: 16069 - DNA, 25 bp, Homo sapien
aacctaaggtggacgacgaaggtcc

SEQ ID NO: 16070 - DNA, 25 bp, Homo sapien
aacctaaggtggtcgacgaaggtcc

SEQ ID NO: 16071 - DNA, 25 bp, Homo sapien
actaaaggtgactcgacggcataca

SEQ ID NO: 16072 - DNA, 25 bp, Homo sapien
actaaaggtgacacgacggcataca

SEQ ID NO: 16073 - DNA, 25 bp, Homo sapien
tacttggtccaaaagtcgtgttcag

SEQ ID NO: 16074 - DNA, 25 bp, Homo sapien
tacttggtccaatagtcgtgttcag

SEQ ID NO: 16075 - DNA, 25 bp, Homo sapien
tatctcggtccgacctctgtggtcc

SEQ ID NO: 16076 - DNA, 25 bp, Homo sapien
tatctcggtccgtcctctgtggtcc

SEQ ID NO: 16077 - DNA, 25 bp, Homo sapien
gtgtgtctgccctgcgccgaatcct

SEQ ID NO: 16078 - DNA, 25 bp, Homo sapien
gtgtgtctgcccagcgccgaatcct

SEQ ID NO: 16079 - DNA, 25 bp, Homo sapien
tcttccgtccgacttgtttcgtact

SEQ ID NO: 16080 - DNA, 25 bp, Homo sapien
tcttccgtccgagttgtttcgtact

SEQ ID NO: 16081 - DNA, 25 bp, Homo sapien
tcgtttccaccctagttctcgtcgt

SEQ ID NO: 16082 - DNA, 25 bp, Homo sapien
tcgtttccacccaagttctcgtcgt

SEQ ID NO: 16083 - DNA, 25 bp, Homo sapien
tagttcgacctactcggctccaggt

SEQ ID NO: 16084 - DNA, 25 bp, Homo sapien
tagttcgacctagtcggctccaggt

SEQ ID NO: 16085 - DNA, 25 bp, Homo sapien
cttttataacactttcaagtaaatg

SEQ ID NO: 16086 - DNA, 25 bp, Homo sapien
cttttataacacattcaagtaaatg

SEQ ID NO: 16087 - DNA, 25 bp, Homo sapien
tttttgttacctaattctttacatt

SEQ ID NO: 16088 - DNA, 25 bp, Homo sapien
tttttgttaccttattctttacatt

SEQ ID NO: 16089 - DNA, 25 bp, Homo sapien
tgtcgagtcccttaatcccctgtct

SEQ ID NO: 16090 - DNA, 25 bp, Homo sapien
tgtcgagtccctaaatcccctgtct

SEQ ID NO: 16091 - DNA, 25 bp, Homo sapien
tgtcttcaccgtgaatgaccatatc

SEQ ID NO: 16092 - DNA, 25 bp, Homo sapien
tgtcttcaccgtcaatgaccatatc

SEQ ID NO: 16093 - DNA, 25 bp, Homo sapien
gagaacacacgtcaactaatgaata

SEQ ID NO: 16094 - DNA, 25 bp, Homo sapien
gagaacacacgtgaactaatgaata

SEQ ID NO: 16095 - DNA, 25 bp, Homo sapien
ggcagaagcttagactctacaactt

SEQ ID NO: 16096 - DNA, 25 bp, Homo sapien
ggcagaagcttacactctacaactt

SEQ ID NO: 16097 - DNA, 25 bp, Homo sapien
gtaaaacgtggtactccttagacta

SEQ ID NO: 16098 - DNA, 25 bp, Homo sapien
gtaaaacgtggttctccttagacta

SEQ ID NO: 16099 - DNA, 25 bp, Homo sapien
gtgaaagaagtatcgccgctgcgac

SEQ ID NO: 16100 - DNA, 25 bp, Homo sapien
gtgaaagaagtaacgccgctgcgac

SEQ ID NO: 16101 - DNA, 25 bp, Homo sapien
ggtcagagtggacctacgccctgaa

SEQ ID NO: 16102 - DNA, 25 bp, Homo sapien
ggtcagagtggagctacgccctgaa

SEQ ID NO: 16103 - DNA, 25 bp, Homo sapien
gttttactgatgttagacctcaatc

SEQ ID NO: 16104 - DNA, 25 bp, Homo sapien
gttttactgatgatagacctcaatc

SEQ ID NO: 16105 - DNA, 25 bp, Homo sapien
gagggtctcaccagagatccatacc

SEQ ID NO: 16106 - DNA, 25 bp, Homo sapien
gagggtctcacctgagatccatacc

SEQ ID NO: 16107 - DNA, 25 bp, Homo sapien
agtgtgacccgaagaagtcaatgtt

SEQ ID NO: 16108 - DNA, 25 bp, Homo sapien
agtgtgacccgatgaagtcaatgtt

SEQ ID NO: 16109 - DNA, 25 bp, Homo sapien
gacgtactgcgagacgaaggacctc

SEQ ID NO: 16110 - DNA, 25 bp, Homo sapien
gacgtactgcgacacgaaggacctc

SEQ ID NO: 16111 - DNA, 25 bp, Homo sapien
gacacacttcatcttaggtctctag

SEQ ID NO: 16112 - DNA, 25 bp, Homo sapien
gacacacttcatgttaggtctctag

SEQ ID NO: 16113 - DNA, 25 bp, Homo sapien
ggactaatctaatctcttgggagac

SEQ ID NO: 16114 - DNA, 25 bp, Homo sapien
ggactaatctaaactcttgggagac

SEQ ID NO: 16115 - DNA, 25 bp, Homo sapien
tgtgactgcgacctaggtcgaggac

SEQ ID NO: 16116 - DNA, 25 bp, Homo sapien
tgtgactgcgacgtaggtcgaggac

SEQ ID NO: 16117 - DNA, 25 bp, Homo sapien
ccgtccttctactgaggtcgagtca

SEQ ID NO: 16118 - DNA, 25 bp, Homo sapien
ccgtccttctacagaggtcgagtca

SEQ ID NO: 16119 - DNA, 25 bp, Homo sapien
atctttactacgaacgaccgatccg

SEQ ID NO: 16120 - DNA, 25 bp, Homo sapien
atctttactacgtacgaccgatccg

SEQ ID NO: 16121 - DNA, 25 bp, Homo sapien
gaaatcacttctgcacgcctatccg

SEQ ID NO: 16122 - DNA, 25 bp, Homo sapien
gaaatcacttctccacgcctatccg

SEQ ID NO: 16123 - DNA, 25 bp, Homo sapien
aaagaggtgacaccacaccgtctcc

SEQ ID NO: 16124 - DNA, 25 bp, Homo sapien
aaagaggtgacagcacaccgtctcc

SEQ ID NO: 16125 - DNA, 25 bp, Homo sapien
tctaaaacagggacacctcgatttc

SEQ ID NO: 16126 - DNA, 25 bp, Homo sapien
tctaaaacagggtcacctcgatttc

SEQ ID NO: 16127 - DNA, 25 bp, Homo sapien
aaatagagtaaccttcacaaatttc

SEQ ID NO: 16128 - DNA, 25 bp, Homo sapien
aaatagagtaacgttcacaaatttc

SEQ ID NO: 16129 - DNA, 25 bp, Homo sapien
aaagtataaggtcaccaagagttca

SEQ ID NO: 16130 - DNA, 25 bp, Homo sapien
aaagtataaggtgaccaagagttca

SEQ ID NO: 16131 - DNA, 25 bp, Homo sapien
ggtaaagaacttaggactcgtactt

SEQ ID NO: 16132 - DNA, 25 bp, Homo sapien
ggtaaagaactttggactcgtactt

SEQ ID NO: 16133 - DNA, 25 bp, Homo sapien
agatagaaatctgtgtctacggtgc

SEQ ID NO: 16134 - DNA, 25 bp, Homo sapien
agatagaaatctctgtctacggtgc

SEQ ID NO: 16135 - DNA, 25 bp, Homo sapien
aagacctcagggacgttgtctggac

SEQ ID NO: 16136 - DNA, 25 bp, Homo sapien
aagacctcagggtcgttgtctggac

SEQ ID NO: 16137 - DNA, 25 bp, Homo sapien
gataaatcattggttgtaactgacc

SEQ ID NO: 16138 - DNA, 25 bp, Homo sapien
gataaatcattgcttgtaactgacc

SEQ ID NO: 16139 - DNA, 25 bp, Homo sapien
agttggagttctaactctgccacca

SEQ ID NO: 16140 - DNA, 25 bp, Homo sapien
agttggagttcttactctgccacca

SEQ ID NO: 16141 - DNA, 25 bp, Homo sapien
tacttggtgcaatgtctcctacatc

SEQ ID NO: 16142 - DNA, 25 bp, Homo sapien
tacttggtgcaaagtctcctacatc

SEQ ID NO: 16143 - DNA, 25 bp, Homo sapien
tcggagtaacctgagaccatgtacc

SEQ ID NO: 16144 - DNA, 25 bp, Homo sapien
tcggagtaacctcagaccatgtacc

SEQ ID NO: 16145 - DNA, 25 bp, Homo sapien
gtacggagagactccccgtgtcctc

SEQ ID NO: 16146 - DNA, 25 bp, Homo sapien
gtacggagagacaccccgtgtcctc

SEQ ID NO: 16147 - DNA, 25 bp, Homo sapien
ggacgtagtaccggcgccgccggcg

SEQ ID NO: 16148 - DNA, 25 bp, Homo sapien
ggacgtagtacccgcgccgccggcg

SEQ ID NO: 16149 - DNA, 25 bp, Homo sapien
gtggagacactacgagggcccgacc

SEQ ID NO: 16150 - DNA, 25 bp, Homo sapien
gtggagacactaggagggcccgacc

SEQ ID NO: 16151 - DNA, 25 bp, Homo sapien
gagacggtcctcttcggaggtcccc

SEQ ID NO: 16152 - DNA, 25 bp, Homo sapien
gagacggtcctcatcggaggtcccc

SEQ ID NO: 16153 - DNA, 25 bp, Homo sapien
ttagtaaagtcctccgagatgcatc

SEQ ID NO: 16154 - DNA, 25 bp, Homo sapien
ttagtaaagtccaccgagatgcatc

SEQ ID NO: 16155 - DNA, 25 bp, Homo sapien
ttagttttgtctctacagatttgac

SEQ ID NO: 16156 - DNA, 25 bp, Homo sapien
ttagttttgtctgtacagatttgac

SEQ ID NO: 16157 - DNA, 25 bp, Homo sapien
acgacgtttataccaaaaatgttga

SEQ ID NO: 16158 - DNA, 25 bp, Homo sapien
acgacgtttatagcaaaaatgttga

SEQ ID NO: 16159 - DNA, 25 bp, Homo sapien
gttctatttccgtctaaatgtgtga

SEQ ID NO: 16160 - DNA, 25 bp, Homo sapien
gttctatttccgactaaatgtgtga

SEQ ID NO: 16161 - DNA, 25 bp, Homo sapien
gttgactacgtctctccttctgact

SEQ ID NO: 16162 - DNA, 25 bp, Homo sapien
gttgactacgtcactccttctgact

SEQ ID NO: 16163 - DNA, 25 bp, Homo sapien
atgatcgtacggtaagttcttttac

SEQ ID NO: 16164 - DNA, 25 bp, Homo sapien
atgatcgtacggaaagttcttttac

SEQ ID NO: 16165 - DNA, 25 bp, Homo sapien
gaacattctcgaaccgttttagtca

SEQ ID NO: 16166 - DNA, 25 bp, Homo sapien
gaacattctcgatccgttttagtca

SEQ ID NO: 16167 - DNA, 25 bp, Homo sapien
aagacaggtccagctttgtaacaag

SEQ ID NO: 16168 - DNA, 25 bp, Homo sapien
aagacaggtccacctttgtaacaag

SEQ ID NO: 16169 - DNA, 25 bp, Homo sapien
aaaagtcgccatgtacgaacgagaa

SEQ ID NO: 16170 - DNA, 25 bp, Homo sapien
aaaagtcgccatctacgaacgagaa

SEQ ID NO: 16171 - DNA, 25 bp, Homo sapien
gtcaagccacatgacctaaactaga

SEQ ID NO: 16172 - DNA, 25 bp, Homo sapien
gtcaagccacatcacctaaactaga

SEQ ID NO: 16173 - DNA, 25 bp, Homo sapien
aacgaacgtacctgtccttttagac

SEQ ID NO: 16174 - DNA, 25 bp, Homo sapien
aacgaacgtaccagtccttttagac

SEQ ID NO: 16175 - DNA, 25 bp, Homo sapien
cactaaaagagtcactcctgacgtc

SEQ ID NO: 16176 - DNA, 25 bp, Homo sapien
cactaaaagagtgactcctgacgtc

SEQ ID NO: 16177 - DNA, 25 bp, Homo sapien
taaaacataagtgacaacgtgtcat

SEQ ID NO: 16178 - DNA, 25 bp, Homo sapien
taaaacataagtcacaacgtgtcat

SEQ ID NO: 16179 - DNA, 25 bp, Homo sapien
gtacctttatctacgtccgtccgac

SEQ ID NO: 16180 - DNA, 25 bp, Homo sapien
gtacctttatcttcgtccgtccgac

SEQ ID NO: 16181 - DNA, 25 bp, Homo sapien
ttaggagttgtctcttcggtctcga

SEQ ID NO: 16182 - DNA, 25 bp, Homo sapien
ttaggagttgtcacttcggtctcga

SEQ ID NO: 16183 - DNA, 25 bp, Homo sapien
attatatggctaagcaactacttga

SEQ ID NO: 16184 - DNA, 25 bp, Homo sapien
attatatggctatgcaactacttga

SEQ ID NO: 16185 - DNA, 25 bp, Homo sapien
tatgttttacgtttcggactttcaa

SEQ ID NO: 16186 - DNA, 25 bp, Homo sapien
tatgttttacgtatcggactttcaa

SEQ ID NO: 16187 - DNA, 25 bp, Homo sapien
ttctcttatagtaggatgactttcc

SEQ ID NO: 16188 - DNA, 25 bp, Homo sapien
ttctcttatagttggatgactttcc

SEQ ID NO: 16189 - DNA, 25 bp, Homo sapien
ttctcaggagtgaaatatctttact

SEQ ID NO: 16190 - DNA, 25 bp, Homo sapien
ttctcaggagtgtaatatctttact

SEQ ID NO: 16191 - DNA, 25 bp, Homo sapien
actctaggtgaggtatcaggaattc

SEQ ID NO: 16192 - DNA, 25 bp, Homo sapien
actctaggtgagctatcaggaattc

SEQ ID NO: 16193 - DNA, 25 bp, Homo sapien
agtaatgtgttgagccggaagaccg

SEQ ID NO: 16194 - DNA, 25 bp, Homo sapien
agtaatgtgttgtgccggaagaccg

SEQ ID NO: 16195 - DNA, 25 bp, Homo sapien
aattttagtgtgttgaaggaccccg

SEQ ID NO: 16196 - DNA, 25 bp, Homo sapien
aattttagtgtgatgaaggaccccg

SEQ ID NO: 16197 - DNA, 25 bp, Homo sapien
cttttgtcttagaaggtgacgtcga

SEQ ID NO: 16198 - DNA, 25 bp, Homo sapien
cttttgtcttagtaggtgacgtcga

SEQ ID NO: 16199 - DNA, 25 bp, Homo sapien
ctcgtctcttgaacaggtcacttat

SEQ ID NO: 16200 - DNA, 25 bp, Homo sapien
ctcgtctcttgatcaggtcacttat

SEQ ID NO: 16201 - DNA, 25 bp, Homo sapien
gtgcgtccttgtacccgacgtgagt

SEQ ID NO: 16202 - DNA, 25 bp, Homo sapien
gtgcgtccttgttcccgacgtgagt

SEQ ID NO: 16203 - DNA, 25 bp, Homo sapien
ccggcgtgacttggaccccagacgt

SEQ ID NO: 16204 - DNA, 25 bp, Homo sapien
ccggcgtgacttcgaccccagacgt

SEQ ID NO: 16205 - DNA, 25 bp, Homo sapien
cacgcaggagtcacgggacccgact

SEQ ID NO: 16206 - DNA, 25 bp, Homo sapien
cacgcaggagtctcgggacccgact

SEQ ID NO: 16207 - DNA, 25 bp, Homo sapien
ggtcagggtgttccagacacggact

SEQ ID NO: 16208 - DNA, 25 bp, Homo sapien
ggtcagggtgttgcagacacggact

SEQ ID NO: 16209 - DNA, 25 bp, Homo sapien
aattaatagttgtgacctcaacgtt

SEQ ID NO: 16210 - DNA, 25 bp, Homo sapien
aattaatagttgagacctcaacgtt

SEQ ID NO: 16211 - DNA, 25 bp, Homo sapien
cacggcttgttcacatctagaaagt

SEQ ID NO: 16212 - DNA, 25 bp, Homo sapien
cacggcttgttctcatctagaaagt

SEQ ID NO: 16213 - DNA, 25 bp, Homo sapien
ggtaactttggttttcattcacaac

SEQ ID NO: 16214 - DNA, 25 bp, Homo sapien
ggtaactttggtattcattcacaac

SEQ ID NO: 16215 - DNA, 25 bp, Homo sapien
ttcttgtgggatttcacggtctaaa

SEQ ID NO: 16216 - DNA, 25 bp, Homo sapien
ttcttgtgggatatcacggtctaaa

SEQ ID NO: 16217 - DNA, 25 bp, Homo sapien
ttcggggtcagtcctctctcgacct

SEQ ID NO: 16218 - DNA, 25 bp, Homo sapien
ttcggggtcagtgctctctcgacct

SEQ ID NO: 16219 - DNA, 25 bp, Homo sapien
acgggactcgaggtctcccgtcgct

SEQ ID NO: 16220 - DNA, 25 bp, Homo sapien
acgggactcgagctctcccgtcgct

SEQ ID NO: 16221 - DNA, 25 bp, Homo sapien
caagacgcgatccttgtatgtttcc

SEQ ID NO: 16222 - DNA, 25 bp, Homo sapien
caagacgcgatcgttgtatgtttcc

SEQ ID NO: 16223 - DNA, 25 bp, Homo sapien
tagtacggactcgtgtctatttttg

SEQ ID NO: 16224 - DNA, 25 bp, Homo sapien
tagtacggactcctgtctatttttg

SEQ ID NO: 16225 - DNA, 25 bp, Homo sapien
atagtgatctccagttactttgttt

SEQ ID NO: 16226 - DNA, 25 bp, Homo sapien
atagtgatctcctgttactttgttt

SEQ ID NO: 16227 - DNA, 25 bp, Homo sapien
aaaattgcttacgattctttgagtc

SEQ ID NO: 16228 - DNA, 25 bp, Homo sapien
aaaattgcttaccattctttgagtc

SEQ ID NO: 16229 - DNA, 25 bp, Homo sapien
ctcgtaacccgatttttagcgagta

SEQ ID NO: 16230 - DNA, 25 bp, Homo sapien
ctcgtaacccgaattttagcgagta

SEQ ID NO: 16231 - DNA, 25 bp, Homo sapien
actgtaactggtctatactttcagg

SEQ ID NO: 16232 - DNA, 25 bp, Homo sapien
actgtaactggtgtatactttcagg

SEQ ID NO: 16233 - DNA, 25 bp, Homo sapien
tttctccgtacctctaagtcagagt

SEQ ID NO: 16234 - DNA, 25 bp, Homo sapien
tttctccgtaccactaagtcagagt

SEQ ID NO: 16235 - DNA, 25 bp, Homo sapien
ggtactactactcctgctatgggtg

SEQ ID NO: 16236 - DNA, 25 bp, Homo sapien
ggtactactactgctgctatgggtg

SEQ ID NO: 16237 - DNA, 25 bp, Homo sapien
aggtttcccgtcgactcgagtggag

SEQ ID NO: 16238 - DNA, 25 bp, Homo sapien
aggtttcccgtccactcgagtggag

SEQ ID NO: 16239 - DNA, 25 bp, Homo sapien
tcttcgtcctacgagaactgagtac

SEQ ID NO: 16240 - DNA, 25 bp, Homo sapien
tcttcgtcctaccagaactgagtac

SEQ ID NO: 16241 - DNA, 25 bp, Homo sapien
ttcgtgtcagatccaggtggtagtg

SEQ ID NO: 16242 - DNA, 25 bp, Homo sapien
ttcgtgtcagatgcaggtggtagtg

SEQ ID NO: 16243 - DNA, 25 bp, Homo sapien
tcttgtttgtcaaagtccagaatgg

SEQ ID NO: 16244 - DNA, 25 bp, Homo sapien
tcttgtttgtcatagtccagaatgg

SEQ ID NO: 16245 - DNA, 25 bp, Homo sapien
tcttagtaacatgtcctaaatgtcg

SEQ ID NO: 16246 - DNA, 25 bp, Homo sapien
tcttagtaacatctcctaaatgtcg

SEQ ID NO: 16247 - DNA, 25 bp, Homo sapien
taacgactccgtatccataatatcg

SEQ ID NO: 16248 - DNA, 25 bp, Homo sapien
taacgactccgtttccataatatcg

SEQ ID NO: 16249 - DNA, 25 bp, Homo sapien
gataaatgatcgttgttcaccaatc

SEQ ID NO: 16250 - DNA, 25 bp, Homo sapien
gataaatgatcgatgttcaccaatc

SEQ ID NO: 16251 - DNA, 25 bp, Homo sapien
catacagaacgagtagtcactttta

SEQ ID NO: 16252 - DNA, 25 bp, Homo sapien
catacagaacgactagtcactttta

SEQ ID NO: 16253 - DNA, 25 bp, Homo sapien
tccaaaggagtctgtgctcagttga

SEQ ID NO: 16254 - DNA, 25 bp, Homo sapien
tccaaaggagtcagtgctcagttga

SEQ ID NO: 16255 - DNA, 25 bp, Homo sapien
acttctcaagtttagactggttcta

SEQ ID NO: 16256 - DNA, 25 bp, Homo sapien
acttctcaagttaagactggttcta

SEQ ID NO: 16257 - DNA, 25 bp, Homo sapien
ctttcgacatctcgactccgtgctt

SEQ ID NO: 16258 - DNA, 25 bp, Homo sapien
ctttcgacatctggactccgtgctt

SEQ ID NO: 16259 - DNA, 25 bp, Homo sapien
cacggttcatgtagtccctcactct

SEQ ID NO: 16260 - DNA, 25 bp, Homo sapien
cacggttcatgttgtccctcactct

SEQ ID NO: 16261 - DNA, 25 bp, Homo sapien
ccagtgggtgtcttctccgtcgacc

SEQ ID NO: 16262 - DNA, 25 bp, Homo sapien
ccagtgggtgtcatctccgtcgacc

SEQ ID NO: 16263 - DNA, 25 bp, Homo sapien
gtcctcggagggactcttccacagt

SEQ ID NO: 16264 - DNA, 25 bp, Homo sapien
gtcctcggagggtctcttccacagt

SEQ ID NO: 16265 - DNA, 25 bp, Homo sapien
ccccttgtttgttcactttccgagt

SEQ ID NO: 16266 - DNA, 25 bp, Homo sapien
ccccttgtttgtacactttccgagt

SEQ ID NO: 16267 - DNA, 25 bp, Homo sapien
tctcgtgactcgtctactccttcgg

SEQ ID NO: 16268 - DNA, 25 bp, Homo sapien
tctcgtgactcgactactccttcgg

SEQ ID NO: 16269 - DNA, 25 bp, Homo sapien
tacgttccggccacaccggactctg

SEQ ID NO: 16270 - DNA, 25 bp, Homo sapien
tacgttccggcctcaccggactctg

SEQ ID NO: 16271 - DNA, 25 bp, Homo sapien
tcctcctgggacgacgtggactgtg

SEQ ID NO: 16272 - DNA, 25 bp, Homo sapien
tcctcctgggaccacgtggactgtg

SEQ ID NO: 16273 - DNA, 25 bp, Homo sapien
tcacggcaaacaacctctcgaggtc

SEQ ID NO: 16274 - DNA, 25 bp, Homo sapien
tcacggcaaacatcctctcgaggtc

SEQ ID NO: 16275 - DNA, 25 bp, Homo sapien
aagtacaggcagaccgtcgaactac

SEQ ID NO: 16276 - DNA, 25 bp, Homo sapien
aagtacaggcagtccgtcgaactac

SEQ ID NO: 16277 - DNA, 25 bp, Homo sapien
gagtcataagagtacttctatacat

SEQ ID NO: 16278 - DNA, 25 bp, Homo sapien
gagtcataagagaacttctatacat

SEQ ID NO: 16279 - DNA, 25 bp, Homo sapien
actgcacatgagaacgtcactaaac

SEQ ID NO: 16280 - DNA, 25 bp, Homo sapien
actgcacatgagtacgtcactaaac

SEQ ID NO: 16281 - DNA, 25 bp, Homo sapien
gaagagaaccttcgtttgcaagact

SEQ ID NO: 16282 - DNA, 25 bp, Homo sapien
gaagagaaccttggtttgcaagact

SEQ ID NO: 16283 - DNA, 25 bp, Homo sapien
tcagtgacaccaatgtcttccaaag

SEQ ID NO: 16284 - DNA, 25 bp, Homo sapien
tcagtgacaccattgtcttccaaag

SEQ ID NO: 16285 - DNA, 25 bp, Homo sapien
gcataagtccttgttgtacctaaag

SEQ ID NO: 16286 - DNA, 25 bp, Homo sapien
gcataagtccttcttgtacctaaag

SEQ ID NO: 16287 - DNA, 25 bp, Homo sapien
gaaacgaacattgatggtcctgaag

SEQ ID NO: 16288 - DNA, 25 bp, Homo sapien
gaaacgaacattcatggtcctgaag

SEQ ID NO: 16289 - DNA, 25 bp, Homo sapien
gaaacgagaagttttctactttttg

SEQ ID NO: 16290 - DNA, 25 bp, Homo sapien
gaaacgagaagtattctactttttg

SEQ ID NO: 16291 - DNA, 25 bp, Homo sapien
acggaagagaagcagacagtaccgg

SEQ ID NO: 16292 - DNA, 25 bp, Homo sapien
acggaagagaaggagacagtaccgg

SEQ ID NO: 16293 - DNA, 25 bp, Homo sapien
accgaaagtagaggagacttcagtt

SEQ ID NO: 16294 - DNA, 25 bp, Homo sapien
accgaaagtagacgagacttcagtt

SEQ ID NO: 16295 - DNA, 25 bp, Homo sapien
aattctggaactcgagactctctta

SEQ ID NO: 16296 - DNA, 25 bp, Homo sapien
aattctggaactggagactctctta

SEQ ID NO: 16297 - DNA, 25 bp, Homo sapien
gtgtgtttacatacagacttcaact

SEQ ID NO: 16298 - DNA, 25 bp, Homo sapien
gtgtgtttacattcagacttcaact

SEQ ID NO: 16299 - DNA, 25 bp, Homo sapien
ccggagtcttcaacaatagttacaa

SEQ ID NO: 16300 - DNA, 25 bp, Homo sapien
ccggagtcttcatcaatagttacaa

SEQ ID NO: 16301 - DNA, 25 bp, Homo sapien
aaccagcttccgaagaacattaaag

SEQ ID NO: 16302 - DNA, 25 bp, Homo sapien
aaccagcttccgtagaacattaaag

SEQ ID NO: 16303 - DNA, 25 bp, Homo sapien
gtcccatccccttatttatgtagga

SEQ ID NO: 16304 - DNA, 25 bp, Homo sapien
gtcccatcccctaatttatgtagga

SEQ ID NO: 16305 - DNA, 25 bp, Homo sapien
ggcttatctccctttcccgttggta

SEQ ID NO: 16306 - DNA, 25 bp, Homo sapien
ggcttatctcccattcccgttggta

SEQ ID NO: 16307 - DNA, 25 bp, Homo sapien
ttcagttcccttcctcgggtcagta

SEQ ID NO: 16308 - DNA, 25 bp, Homo sapien
ttcagttcccttgctcgggtcagta

SEQ ID NO: 16309 - DNA, 25 bp, Homo sapien
tcttccgtccggtttggttcgtgtg

SEQ ID NO: 16310 - DNA, 25 bp, Homo sapien
tcttccgtccggattggttcgtgtg

SEQ ID NO: 16311 - DNA, 25 bp, Homo sapien
cttacccgccggtctagagtccggg

SEQ ID NO: 16312 - DNA, 25 bp, Homo sapien
cttacccgccggactagagtccggg

SEQ ID NO: 16313 - DNA, 25 bp, Homo sapien
ccgcaagtcgtacttggcgtcggtg

SEQ ID NO: 16314 - DNA, 25 bp, Homo sapien
ccgcaagtcgtagttggcgtcggtg

SEQ ID NO: 16315 - DNA, 25 bp, Homo sapien
ctccaaacggtgtacggaactcttt

SEQ ID NO: 16316 - DNA, 25 bp, Homo sapien
ctccaaacggtgaacggaactcttt

SEQ ID NO: 16317 - DNA, 25 bp, Homo sapien
tcaggtcgacaacgtcctaccgttc

SEQ ID NO: 16318 - DNA, 25 bp, Homo sapien
tcaggtcgacaaggtcctaccgttc

SEQ ID NO: 16319 - DNA, 25 bp, Homo sapien
ctgtcatgtcaaaactctaaaggtc

SEQ ID NO: 16320 - DNA, 25 bp, Homo sapien
ctgtcatgtcaatactctaaaggtc

SEQ ID NO: 16321 - DNA, 25 bp, Homo sapien
tcgccgttaacttccgcaaaggtat

SEQ ID NO: 16322 - DNA, 25 bp, Homo sapien
tcgccgttaactaccgcaaaggtat

SEQ ID NO: 16323 - DNA, 25 bp, Homo sapien
cgtagtcatttttaccgtgaaaatc

SEQ ID NO: 16324 - DNA, 25 bp, Homo sapien
cgtagtcattttaaccgtgaaaatc

SEQ ID NO: 16325 - DNA, 25 bp, Homo sapien
acccagttcgtaaacagaactgaac

SEQ ID NO: 16326 - DNA, 25 bp, Homo sapien
acccagttcgtatacagaactgaac

SEQ ID NO: 16327 - DNA, 25 bp, Homo sapien
gacctgaggacactcgagaagaacc

SEQ ID NO: 16328 - DNA, 25 bp, Homo sapien
gacctgaggacagtcgagaagaacc

SEQ ID NO: 16329 - DNA, 25 bp, Homo sapien
gacctgtggacagacagacaggcag

SEQ ID NO: 16330 - DNA, 25 bp, Homo sapien
gacctgtggacacacagacaggcag

SEQ ID NO: 16331 - DNA, 25 bp, Homo sapien
agggcggacagtacagtatttcgag

SEQ ID NO: 16332 - DNA, 25 bp, Homo sapien
agggcggacagttcagtatttcgag

SEQ ID NO: 16333 - DNA, 25 bp, Homo sapien
ctagtcaagacacaagaccttgtcg

SEQ ID NO: 16334 - DNA, 25 bp, Homo sapien
ctagtcaagacagaagaccttgtcg

SEQ ID NO: 16335 - DNA, 25 bp, Homo sapien
gacgtcacaaaaactttacgttccg

SEQ ID NO: 16336 - DNA, 25 bp, Homo sapien
gacgtcacaaaatctttacgttccg

SEQ ID NO: 16337 - DNA, 25 bp, Homo sapien
tggcacaggactcctctgtggtgcg

SEQ ID NO: 16338 - DNA, 25 bp, Homo sapien
tggcacaggactgctctgtggtgcg

SEQ ID NO: 16339 - DNA, 25 bp, Homo sapien
acttagtccgggaggatccctatgg

SEQ ID NO: 16340 - DNA, 25 bp, Homo sapien
acttagtccgggtggatccctatgg

SEQ ID NO: 16341 - DNA, 25 bp, Homo sapien
agttcgggtaagaaacaactatcgg

SEQ ID NO: 16342 - DNA, 25 bp, Homo sapien
agttcgggtaagtaacaactatcgg

SEQ ID NO: 16343 - DNA, 25 bp, Homo sapien
atttcaccgatacacacagtttcgg

SEQ ID NO: 16344 - DNA, 25 bp, Homo sapien
atttcaccgatagacacagtttcgg

SEQ ID NO: 16345 - DNA, 25 bp, Homo sapien
ggttcatctacatgaagatcttcag

SEQ ID NO: 16346 - DNA, 25 bp, Homo sapien
ggttcatctacaagaagatcttcag

SEQ ID NO: 16347 - DNA, 25 bp, Homo sapien
taagtcgtgaacaagaactcgtcga

SEQ ID NO: 16348 - DNA, 25 bp, Homo sapien
taagtcgtgaactagaactcgtcga

SEQ ID NO: 16349 - DNA, 25 bp, Homo sapien
ctgtcgtgtaactacgtcttctcgc

SEQ ID NO: 16350 - DNA, 25 bp, Homo sapien
ctgtcgtgtaacaacgtcttctcgc

SEQ ID NO: 16351 - DNA, 25 bp, Homo sapien
gtgaaccgtaatcgtcgatctacct

SEQ ID NO: 16352 - DNA, 25 bp, Homo sapien
gtgaaccgtaatggtcgatctacct

SEQ ID NO: 16353 - DNA, 25 bp, Homo sapien
ttgagttacagtagggtcgaggtcc

SEQ ID NO: 16354 - DNA, 25 bp, Homo sapien
ttgagttacagttgggtcgaggtcc

SEQ ID NO: 16355 - DNA, 25 bp, Homo sapien
agccgagagcttggccccgtcctcc

SEQ ID NO: 16356 - DNA, 25 bp, Homo sapien
agccgagagcttcgccccgtcctcc

SEQ ID NO: 16357 - DNA, 25 bp, Homo sapien
ccgaggtccctggagttcttcgtcc

SEQ ID NO: 16358 - DNA, 25 bp, Homo sapien
ccgaggtccctgcagttcttcgtcc

SEQ ID NO: 16359 - DNA, 25 bp, Homo sapien
tgatattcccccagtgtcacactga

SEQ ID NO: 16360 - DNA, 25 bp, Homo sapien
tgatattccccctgtgtcacactga

SEQ ID NO: 16361 - DNA, 25 bp, Homo sapien
ttaggtactctcttcatgtccatga

SEQ ID NO: 16362 - DNA, 25 bp, Homo sapien
ttaggtactctcatcatgtccatga

SEQ ID NO: 16363 - DNA, 25 bp, Homo sapien
ggaggagtcggttctcctggccaac

SEQ ID NO: 16364 - DNA, 25 bp, Homo sapien
ggaggagtcggtactcctggccaac

SEQ ID NO: 16365 - DNA, 25 bp, Homo sapien
agccaggctgagcaggtcgcatacc

SEQ ID NO: 16366 - DNA, 25 bp, Homo sapien
agccaggctgaggaggtcgcatacc

SEQ ID NO: 16367 - DNA, 25 bp, Homo sapien
cccggccaggaggtcgtacgacaac

SEQ ID NO: 16368 - DNA, 25 bp, Homo sapien
cccggccaggagctcgtacgacaac

SEQ ID NO: 16369 - DNA, 25 bp, Homo sapien
ccgtccgtccgtccgtccggcttcc

SEQ ID NO: 16370 - DNA, 25 bp, Homo sapien
ccgtccgtccgtgcgtccggcttcc

SEQ ID NO: 16371 - DNA, 25 bp, Homo sapien
acgtggacagaggtaggaggttcct

SEQ ID NO: 16372 - DNA, 25 bp, Homo sapien
acgtggacagagctaggaggttcct

SEQ ID NO: 16373 - DNA, 25 bp, Homo sapien
ccggttactggaacggatccgtcct

SEQ ID NO: 16374 - DNA, 25 bp, Homo sapien
ccggttactggatcggatccgtcct

SEQ ID NO: 16375 - DNA, 25 bp, Homo sapien
ggtcgatgtgtctgggtctaccagt

SEQ ID NO: 16376 - DNA, 25 bp, Homo sapien
ggtcgatgtgtcagggtctaccagt

SEQ ID NO: 16377 - DNA, 25 bp, Homo sapien
gggttcctgttactgtcataagact

SEQ ID NO: 16378 - DNA, 25 bp, Homo sapien
gggttcctgttagtgtcataagact

SEQ ID NO: 16379 - DNA, 25 bp, Homo sapien
ggtacctttatggttctcgaagtac

SEQ ID NO: 16380 - DNA, 25 bp, Homo sapien
ggtacctttatgcttctcgaagtac

SEQ ID NO: 16381 - DNA, 25 bp, Homo sapien
tttggtccttcaaacttcggtgacc

SEQ ID NO: 16382 - DNA, 25 bp, Homo sapien
tttggtccttcatacttcggtgacc

SEQ ID NO: 16383 - DNA, 25 bp, Homo sapien
cgtcctcggagatgtgtcggagacc

SEQ ID NO: 16384 - DNA, 25 bp, Homo sapien
cgtcctcggagaagtgtcggagacc

SEQ ID NO: 16385 - DNA, 25 bp, Homo sapien
tctcatattaacgtgtatctaccat

SEQ ID NO: 16386 - DNA, 25 bp, Homo sapien
tctcatattaacctgtatctaccat

SEQ ID NO: 16387 - DNA, 25 bp, Homo sapien
attcagttgagacgtgtacatccac

SEQ ID NO: 16388 - DNA, 25 bp, Homo sapien
attcagttgagaggtgtacatccac

SEQ ID NO: 16389 - DNA, 25 bp, Homo sapien
gacatccagtgaattctacattgac

SEQ ID NO: 16390 - DNA, 25 bp, Homo sapien
gacatccagtgatttctacattgac

SEQ ID NO: 16391 - DNA, 25 bp, Homo sapien
cgaaaccaggttttctcatctcgat

SEQ ID NO: 16392 - DNA, 25 bp, Homo sapien
cgaaaccaggttatctcatctcgat

SEQ ID NO: 16393 - DNA, 25 bp, Homo sapien
cattcaggtgtctctatcttttagt

SEQ ID NO: 16394 - DNA, 25 bp, Homo sapien
cattcaggtgtcactatcttttagt

SEQ ID NO: 16395 - DNA, 25 bp, Homo sapien
aaccactgatactgggtcttcttgt

SEQ ID NO: 16396 - DNA, 25 bp, Homo sapien
aaccactgatacagggtcttcttgt

SEQ ID NO: 16397 - DNA, 25 bp, Homo sapien
gggtagtcacgagtcatctacgact

SEQ ID NO: 16398 - DNA, 25 bp, Homo sapien
gggtagtcacgactcatctacgact

SEQ ID NO: 16399 - DNA, 25 bp, Homo sapien
tgtgaggtgtacaggtgtccacaac

SEQ ID NO: 16400 - DNA, 25 bp, Homo sapien
tgtgaggtgtactggtgtccacaac

SEQ ID NO: 16401 - DNA, 25 bp, Homo sapien
acaaagaagatggtgaccaaagtac

SEQ ID NO: 16402 - DNA, 25 bp, Homo sapien
acaaagaagatgctgaccaaagtac

SEQ ID NO: 16403 - DNA, 25 bp, Homo sapien
ctacagactattaccgattaaagtg

SEQ ID NO: 16404 - DNA, 25 bp, Homo sapien
ctacagactatttccgattaaagtg

SEQ ID NO: 16405 - DNA, 25 bp, Homo sapien
tcagattaccgtcacgaaggtaaat

SEQ ID NO: 16406 - DNA, 25 bp, Homo sapien
tcagattaccgtgacgaaggtaaat

SEQ ID NO: 16407 - DNA, 25 bp, Homo sapien
cagactcgtcggtcgaagtaaccga

SEQ ID NO: 16408 - DNA, 25 bp, Homo sapien
cagactcgtcggacgaagtaaccga

SEQ ID NO: 16409 - DNA, 25 bp, Homo sapien
gcagcccagcggttctgacgaaaca

SEQ ID NO: 16410 - DNA, 25 bp, Homo sapien
gcagcccagcggatctgacgaaaca

SEQ ID NO: 16411 - DNA, 25 bp, Homo sapien
ccgaggacgggcaacattgtagacc

SEQ ID NO: 16412 - DNA, 25 bp, Homo sapien
ccgaggacgggctacattgtagacc

SEQ ID NO: 16413 - DNA, 25 bp, Homo sapien
ctgcgtgggtcacaccacgacggac

SEQ ID NO: 16414 - DNA, 25 bp, Homo sapien
ctgcgtgggtcagaccacgacggac

SEQ ID NO: 16415 - DNA, 25 bp, Homo sapien
ttcggggtaagaataccgacatagt

SEQ ID NO: 16416 - DNA, 25 bp, Homo sapien
ttcggggtaagattaccgacatagt

SEQ ID NO: 16417 - DNA, 25 bp, Homo sapien
cccgacgaggaaacggttcgagatt

SEQ ID NO: 16418 - DNA, 25 bp, Homo sapien
cccgacgaggaatcggttcgagatt

SEQ ID NO: 16419 - DNA, 25 bp, Homo sapien
gggaccagccggtactccctttgtt

SEQ ID NO: 16420 - DNA, 25 bp, Homo sapien
gggaccagccggaactccctttgtt

SEQ ID NO: 16421 - DNA, 25 bp, Homo sapien
gtataggaacctgacttcatttcgg

SEQ ID NO: 16422 - DNA, 25 bp, Homo sapien
gtataggaacctcacttcatttcgg

SEQ ID NO: 16423 - DNA, 25 bp, Homo sapien
ttagaacctggttaccttagatctc

SEQ ID NO: 16424 - DNA, 25 bp, Homo sapien
ttagaacctggtaaccttagatctc

SEQ ID NO: 16425 - DNA, 25 bp, Homo sapien
cggtggacccgtggaccccgaccta

SEQ ID NO: 16426 - DNA, 25 bp, Homo sapien
cggtggacccgtcgaccccgaccta

SEQ ID NO: 16427 - DNA, 25 bp, Homo sapien
gtcttggacgtaaactcccacatct

SEQ ID NO: 16428 - DNA, 25 bp, Homo sapien
gtcttggacgtatactcccacatct

SEQ ID NO: 16429 - DNA, 25 bp, Homo sapien
tccctgggaaaagtcgagagacttc

SEQ ID NO: 16430 - DNA, 25 bp, Homo sapien
tccctgggaaaactcgagagacttc

SEQ ID NO: 16431 - DNA, 25 bp, Homo sapien
tctgtgacagtccttacagaattct

SEQ ID NO: 16432 - DNA, 25 bp, Homo sapien
tctgtgacagtcgttacagaattct

SEQ ID NO: 16433 - DNA, 25 bp, Homo sapien
cttgagacaaactacattacgttct

SEQ ID NO: 16434 - DNA, 25 bp, Homo sapien
cttgagacaaacaacattacgttct

SEQ ID NO: 16435 - DNA, 25 bp, Homo sapien
cggaggaccgacaacccgtctaggg

SEQ ID NO: 16436 - DNA, 25 bp, Homo sapien
cggaggaccgactacccgtctaggg

SEQ ID NO: 16437 - DNA, 25 bp, Homo sapien
cacgagtcccgctcgctgtctaagg

SEQ ID NO: 16438 - DNA, 25 bp, Homo sapien
cacgagtcccgcacgctgtctaagg

SEQ ID NO: 16439 - DNA, 25 bp, Homo sapien
gttgcggtcacagtggcttcttaat

SEQ ID NO: 16440 - DNA, 25 bp, Homo sapien
gttgcggtcacactggcttcttaat

SEQ ID NO: 16441 - DNA, 25 bp, Homo sapien
ttgtcatccacgtgtgactttttat

SEQ ID NO: 16442 - DNA, 25 bp, Homo sapien
ttgtcatccacgagtgactttttat

SEQ ID NO: 16443 - DNA, 25 bp, Homo sapien
agctactaaacgtaagcttgtttct

SEQ ID NO: 16444 - DNA, 25 bp, Homo sapien
agctactaaacgaaagcttgtttct

SEQ ID NO: 16445 - DNA, 25 bp, Homo sapien
aaataaaccctcaggatatagtgtt

SEQ ID NO: 16446 - DNA, 25 bp, Homo sapien
aaataaaccctctggatatagtgtt

SEQ ID NO: 16447 - DNA, 25 bp, Homo sapien
tcgttgcggtctgacaaacgtgtgt

SEQ ID NO: 16448 - DNA, 25 bp, Homo sapien
tcgttgcggtctcacaaacgtgtgt

SEQ ID NO: 16449 - DNA, 25 bp, Homo sapien
gctcagtccgtcctccaaacgtata

SEQ ID NO: 16450 - DNA, 25 bp, Homo sapien
gctcagtccgtcgtccaaacgtata

SEQ ID NO: 16451 - DNA, 25 bp, Homo sapien
ctacgagactgtggacaaacgacag

SEQ ID NO: 16452 - DNA, 25 bp, Homo sapien
ctacgagactgtcgacaaacgacag

SEQ ID NO: 16453 - DNA, 25 bp, Homo sapien
aggtatacagagatagacgtcaccg

SEQ ID NO: 16454 - DNA, 25 bp, Homo sapien
aggtatacagagttagacgtcaccg

SEQ ID NO: 16455 - DNA, 25 bp, Homo sapien
gagggtaatcggttactgtctacag

SEQ ID NO: 16456 - DNA, 25 bp, Homo sapien
gagggtaatcggatactgtctacag

SEQ ID NO: 16457 - DNA, 25 bp, Homo sapien
ggaaacggaatgttaacttcgtcgg

SEQ ID NO: 16458 - DNA, 25 bp, Homo sapien
ggaaacggaatgataacttcgtcgg

SEQ ID NO: 16459 - DNA, 25 bp, Homo sapien
cggagagaggtggaacaatcttcgc

SEQ ID NO: 16460 - DNA, 25 bp, Homo sapien
cggagagaggtgcaacaatcttcgc

SEQ ID NO: 16461 - DNA, 25 bp, Homo sapien
accggaccgggacgaggtcggcgac

SEQ ID NO: 16462 - DNA, 25 bp, Homo sapien
accggaccgggaggaggtcggcgac

SEQ ID NO: 16463 - DNA, 25 bp, Homo sapien
acaatgtcaaaagaacggttttcct

SEQ ID NO: 16464 - DNA, 25 bp, Homo sapien
acaatgtcaaaacaacggttttcct

SEQ ID NO: 16465 - DNA, 25 bp, Homo sapien
aagagaatcaaacaggaaaccacct

SEQ ID NO: 16466 - DNA, 25 bp, Homo sapien
aagagaatcaaagaggaaaccacct

SEQ ID NO: 16467 - DNA, 25 bp, Homo sapien
gaagaatcgaaagttaaatccactc

SEQ ID NO: 16468 - DNA, 25 bp, Homo sapien
gaagaatcgaaacttaaatccactc

SEQ ID NO: 16469 - DNA, 25 bp, Homo sapien
gaaaaacacaacctcagggtcccgg

SEQ ID NO: 16470 - DNA, 25 bp, Homo sapien
gaaaaacacaacgtcagggtcccgg

SEQ ID NO: 16471 - DNA, 25 bp, Homo sapien
acaaaatttcggagagctacaactg

SEQ ID NO: 16472 - DNA, 25 bp, Homo sapien
acaaaatttcggtgagctacaactg

SEQ ID NO: 16473 - DNA, 25 bp, Homo sapien
ttactacgttaggtagtgcacttag

SEQ ID NO: 16474 - DNA, 25 bp, Homo sapien
ttactacgttagctagtgcacttag

SEQ ID NO: 16475 - DNA, 25 bp, Homo sapien
gtgttcgtactcctaatacctgtct

SEQ ID NO: 16476 - DNA, 25 bp, Homo sapien
gtgttcgtactcgtaatacctgtct

SEQ ID NO: 16477 - DNA, 25 bp, Homo sapien
aacgtgtgtgcagtagttgtctgtc

SEQ ID NO: 16478 - DNA, 25 bp, Homo sapien
aacgtgtgtgcactagttgtctgtc

SEQ ID NO: 16479 - DNA, 25 bp, Homo sapien
gtttcatcttggatcggttcgtttg

SEQ ID NO: 16480 - DNA, 25 bp, Homo sapien
gtttcatcttggttcggttcgtttg

SEQ ID NO: 16481 - DNA, 25 bp, Homo sapien
gcgtgtagtgccatccacgtgtggt

SEQ ID NO: 16482 - DNA, 25 bp, Homo sapien
gcgtgtagtgccttccacgtgtggt

SEQ ID NO: 16483 - DNA, 25 bp, Homo sapien
tcgagtagaataggacgaggtccgt

SEQ ID NO: 16484 - DNA, 25 bp, Homo sapien
tcgagtagaatacgacgaggtccgt

SEQ ID NO: 16485 - DNA, 25 bp, Homo sapien
cactgtctagtttctcgggcttcgt

SEQ ID NO: 16486 - DNA, 25 bp, Homo sapien
cactgtctagttactcgggcttcgt

SEQ ID NO: 16487 - DNA, 25 bp, Homo sapien
ttgtcgtgtctttccggtcacacgt

SEQ ID NO: 16488 - DNA, 25 bp, Homo sapien
ttgtcgtgtcttaccggtcacacgt

SEQ ID NO: 16489 - DNA, 25 bp, Homo sapien
attctgcgtcggttcactttacaca

SEQ ID NO: 16490 - DNA, 25 bp, Homo sapien
attctgcgtcggatcactttacaca

SEQ ID NO: 16491 - DNA, 25 bp, Homo sapien
ctagggccgtagcgcgtgaaaaagg

SEQ ID NO: 16492 - DNA, 25 bp, Homo sapien
ctagggccgtagggcgtgaaaaagg

SEQ ID NO: 16493 - DNA, 25 bp, Homo sapien
tgcgtgaatagtccttgcggagcta

SEQ ID NO: 16494 - DNA, 25 bp, Homo sapien
tgcgtgaatagtgcttgcggagcta

SEQ ID NO: 16495 - DNA, 25 bp, Homo sapien
tctctcagagtctggtagtgcacga

SEQ ID NO: 16496 - DNA, 25 bp, Homo sapien
tctctcagagtcaggtagtgcacga

SEQ ID NO: 16497 - DNA, 25 bp, Homo sapien
ccacctggacgaagtcgtggaacat

SEQ ID NO: 16498 - DNA, 25 bp, Homo sapien
ccacctggacgatgtcgtggaacat

SEQ ID NO: 16499 - DNA, 25 bp, Homo sapien
cactccaaagattcgtgtggtcgat

SEQ ID NO: 16500 - DNA, 25 bp, Homo sapien
cactccaaagatacgtgtggtcgat

SEQ ID NO: 16501 - DNA, 25 bp, Homo sapien
ctcgtccgacccatgatggggtact

SEQ ID NO: 16502 - DNA, 25 bp, Homo sapien
ctcgtccgacccttgatggggtact

SEQ ID NO: 16503 - DNA, 25 bp, Homo sapien
tacctgactcctgttctcgagtaat

SEQ ID NO: 16504 - DNA, 25 bp, Homo sapien
tacctgactcctcttctcgagtaat

SEQ ID NO: 16505 - DNA, 25 bp, Homo sapien
cattggacgcctttacttccgaaat

SEQ ID NO: 16506 - DNA, 25 bp, Homo sapien
cattggacgcctatacttccgaaat

SEQ ID NO: 16507 - DNA, 25 bp, Homo sapien
atgtaaatgtcataaacgacgacaa

SEQ ID NO: 16508 - DNA, 25 bp, Homo sapien
atgtaaatgtcaaaaacgacgacaa

SEQ ID NO: 16509 - DNA, 25 bp, Homo sapien
gcagtagtcctaaagactctcaaac

SEQ ID NO: 16510 - DNA, 25 bp, Homo sapien
gcagtagtcctatagactctcaaac

SEQ ID NO: 16511 - DNA, 25 bp, Homo sapien
ccgtaaccaggtttactcactagta

SEQ ID NO: 16512 - DNA, 25 bp, Homo sapien
ccgtaaccaggtatactcactagta

SEQ ID NO: 16513 - DNA, 25 bp, Homo sapien
ctctcggcccactggacttcagagt

SEQ ID NO: 16514 - DNA, 25 bp, Homo sapien
ctctcggcccacaggacttcagagt

SEQ ID NO: 16515 - DNA, 25 bp, Homo sapien
tcttgtgaccgtaccgtccttctgc

SEQ ID NO: 16516 - DNA, 25 bp, Homo sapien
tcttgtgaccgttccgtccttctgc

SEQ ID NO: 16517 - DNA, 25 bp, Homo sapien
tacgaaagtgtgatcctgattattc

SEQ ID NO: 16518 - DNA, 25 bp, Homo sapien
tacgaaagtgtgttcctgattattc

SEQ ID NO: 16519 - DNA, 25 bp, Homo sapien
gaagtagggttcctcggtagagacc

SEQ ID NO: 16520 - DNA, 25 bp, Homo sapien
gaagtagggttcgtcggtagagacc

SEQ ID NO: 16521 - DNA, 25 bp, Homo sapien
ggtctcgtaggtggttcttcagtgc

SEQ ID NO: 16522 - DNA, 25 bp, Homo sapien
ggtctcgtaggtcgttcttcagtgc

SEQ ID NO: 16523 - DNA, 25 bp, Homo sapien
gtctcaggtggacgtgtctcgtaag

SEQ ID NO: 16524 - DNA, 25 bp, Homo sapien
gtctcaggtggaggtgtctcgtaag

SEQ ID NO: 16525 - DNA, 25 bp, Homo sapien
tctcgtcattctctcgtgttgtata

SEQ ID NO: 16526 - DNA, 25 bp, Homo sapien
tctcgtcattctgtcgtgttgtata

SEQ ID NO: 16527 - DNA, 25 bp, Homo sapien
caacagtagattcatggttctaagt

SEQ ID NO: 16528 - DNA, 25 bp, Homo sapien
caacagtagattgatggttctaagt

SEQ ID NO: 16529 - DNA, 25 bp, Homo sapien
tcacaagtgtcttgattttgacagt

SEQ ID NO: 16530 - DNA, 25 bp, Homo sapien
tcacaagtgtctagattttgacagt

SEQ ID NO: 16531 - DNA, 25 bp, Homo sapien
gtcaatgtgtctcttgtatattaca

SEQ ID NO: 16532 - DNA, 25 bp, Homo sapien
gtcaatgtgtctgttgtatattaca

SEQ ID NO: 16533 - DNA, 25 bp, Homo sapien
aaaactagtgtctgttgtgtttacc

SEQ ID NO: 16534 - DNA, 25 bp, Homo sapien
aaaactagtgtcagttgtgtttacc

SEQ ID NO: 16535 - DNA, 25 bp, Homo sapien
acacaaatttagtcgtcgttcgtaa

SEQ ID NO: 16536 - DNA, 25 bp, Homo sapien
acacaaatttagacgtcgttcgtaa

SEQ ID NO: 16537 - DNA, 25 bp, Homo sapien
aaccaaagttctgagagtgtctcaa

SEQ ID NO: 16538 - DNA, 25 bp, Homo sapien
aaccaaagttctcagagtgtctcaa

SEQ ID NO: 16539 - DNA, 25 bp, Homo sapien
tagaaagatttcagtcacgtaacag

SEQ ID NO: 16540 - DNA, 25 bp, Homo sapien
tagaaagatttctgtcacgtaacag

SEQ ID NO: 16541 - DNA, 25 bp, Homo sapien
tgtagaagacgtacaaatttactac

SEQ ID NO: 16542 - DNA, 25 bp, Homo sapien
tgtagaagacgttcaaatttactac

SEQ ID NO: 16543 - DNA, 25 bp, Homo sapien
aagacagaggtgactatgtctatac

SEQ ID NO: 16544 - DNA, 25 bp, Homo sapien
aagacagaggtgtctatgtctatac

SEQ ID NO: 16545 - DNA, 25 bp, Homo sapien
cacgacacagcctgaagtcggtaga

SEQ ID NO: 16546 - DNA, 25 bp, Homo sapien
cacgacacagccagaagtcggtaga

SEQ ID NO: 16547 - DNA, 25 bp, Homo sapien
aagatctcctacgtaaactgtacgg

SEQ ID NO: 16548 - DNA, 25 bp, Homo sapien
aagatctcctacctaaactgtacgg

SEQ ID NO: 16549 - DNA, 25 bp, Homo sapien
gtctgaacttctcttactactgtga

SEQ ID NO: 16550 - DNA, 25 bp, Homo sapien
gtctgaacttctgttactactgtga

SEQ ID NO: 16551 - DNA, 25 bp, Homo sapien
catgtgtcctgtccttatctgtgac

SEQ ID NO: 16552 - DNA, 25 bp, Homo sapien
catgtgtcctgtgcttatctgtgac

SEQ ID NO: 16553 - DNA, 25 bp, Homo sapien
gagggttcttgtttcgtctctcgat

SEQ ID NO: 16554 - DNA, 25 bp, Homo sapien
gagggttcttgtatcgtctctcgat

SEQ ID NO: 16555 - DNA, 25 bp, Homo sapien
ctgatacgttatcgttactttagat

SEQ ID NO: 16556 - DNA, 25 bp, Homo sapien
ctgatacgttatggttactttagat

SEQ ID NO: 16557 - DNA, 25 bp, Homo sapien
cggagtctcttcctgagacgttcaa

SEQ ID NO: 16558 - DNA, 25 bp, Homo sapien
cggagtctcttcgtgagacgttcaa

SEQ ID NO: 16559 - DNA, 25 bp, Homo sapien
cgaggtcaggtctcggacttcacac

SEQ ID NO: 16560 - DNA, 25 bp, Homo sapien
cgaggtcaggtcacggacttcacac

SEQ ID NO: 16561 - DNA, 25 bp, Homo sapien
aggtccgcgttcagcgagaaccact

SEQ ID NO: 16562 - DNA, 25 bp, Homo sapien
aggtccgcgttctgcgagaaccact

SEQ ID NO: 16563 - DNA, 25 bp, Homo sapien
ctcgcgtctctcttcagttacacga

SEQ ID NO: 16564 - DNA, 25 bp, Homo sapien
ctcgcgtctctcatcagttacacga

SEQ ID NO: 16565 - DNA, 25 bp, Homo sapien
tcagttcgtagtccttcgatgtaat

SEQ ID NO: 16566 - DNA, 25 bp, Homo sapien
tcagttcgtagtgcttcgatgtaat

SEQ ID NO: 16567 - DNA, 25 bp, Homo sapien
cagtgaacctaggacttcgttttat

SEQ ID NO: 16568 - DNA, 25 bp, Homo sapien
cagtgaacctagcacttcgttttat

SEQ ID NO: 16569 - DNA, 25 bp, Homo sapien
ctcattattacattccgtgtttggt

SEQ ID NO: 16570 - DNA, 25 bp, Homo sapien
ctcattattacaatccgtgtttggt

SEQ ID NO: 16571 - DNA, 25 bp, Homo sapien
ttcacgttactttaaacaactttgg

SEQ ID NO: 16572 - DNA, 25 bp, Homo sapien
ttcacgttacttaaaacaactttgg

SEQ ID NO: 16573 - DNA, 25 bp, Homo sapien
tcctttttacgacgactctttcgtg

SEQ ID NO: 16574 - DNA, 25 bp, Homo sapien
tcctttttacgaggactctttcgtg

SEQ ID NO: 16575 - DNA, 25 bp, Homo sapien
atcttgtgaccgtaccgtccttctg

SEQ ID NO: 16576 - DNA, 25 bp, Homo sapien
atcttgtgaccgaaccgtccttctg

SEQ ID NO: 16577 - DNA, 25 bp, Homo sapien
actttttcgaattacgttgttacgt

SEQ ID NO: 16578 - DNA, 25 bp, Homo sapien
actttttcgaataacgttgttacgt

SEQ ID NO: 16579 - DNA, 25 bp, Homo sapien
acgtttctgtcatagtcgttatccg

SEQ ID NO: 16580 - DNA, 25 bp, Homo sapien
acgtttctgtcaaagtcgttatccg

SEQ ID NO: 16581 - DNA, 25 bp, Homo sapien
tgttacttttcgacgtgattgatca

SEQ ID NO: 16582 - DNA, 25 bp, Homo sapien
tgttacttttcgtcgtgattgatca

SEQ ID NO: 16583 - DNA, 25 bp, Homo sapien
tattccgactctacatgtgtacacg

SEQ ID NO: 16584 - DNA, 25 bp, Homo sapien
tattccgactcttcatgtgtacacg

SEQ ID NO: 16585 - DNA, 25 bp, Homo sapien
gcggtcgtacggagtagtctctacg

SEQ ID NO: 16586 - DNA, 25 bp, Homo sapien
gcggtcgtacggtgtagtctctacg

SEQ ID NO: 16587 - DNA, 25 bp, Homo sapien
tcgtagtgtgggtactactgtctac

SEQ ID NO: 16588 - DNA, 25 bp, Homo sapien
tcgtagtgtgggaactactgtctac

SEQ ID NO: 16589 - DNA, 25 bp, Homo sapien
cgacctacgggagtcgtgggtcctc

SEQ ID NO: 16590 - DNA, 25 bp, Homo sapien
cgacctacgggactcgtgggtcctc

SEQ ID NO: 16591 - DNA, 25 bp, Homo sapien
agcctgtgtcgactcttcgttcctg

SEQ ID NO: 16592 - DNA, 25 bp, Homo sapien
agcctgtgtcgagtcttcgttcctg

SEQ ID NO: 16593 - DNA, 25 bp, Homo sapien
tccgaaggatgtaatacagtcactt

SEQ ID NO: 16594 - DNA, 25 bp, Homo sapien
tccgaaggatgttatacagtcactt

SEQ ID NO: 16595 - DNA, 25 bp, Homo sapien
agtgtaaaagatactatgcgaccct

SEQ ID NO: 16596 - DNA, 25 bp, Homo sapien
agtgtaaaagattctatgcgaccct

SEQ ID NO: 16597 - DNA, 25 bp, Homo sapien
gtaaagagaactgcactgtcaccct

SEQ ID NO: 16598 - DNA, 25 bp, Homo sapien
gtaaagagaactccactgtcaccct

SEQ ID NO: 16599 - DNA, 25 bp, Homo sapien
cttaaagatcaaggtacccactcga

SEQ ID NO: 16600 - DNA, 25 bp, Homo sapien
cttaaagatcaacgtacccactcga

SEQ ID NO: 16601 - DNA, 25 bp, Homo sapien
gtgaatgactcagttacaccttaga

SEQ ID NO: 16602 - DNA, 25 bp, Homo sapien
gtgaatgactcacttacaccttaga

SEQ ID NO: 16603 - DNA, 25 bp, Homo sapien
gggtgtgactgtctactccctcaga

SEQ ID NO: 16604 - DNA, 25 bp, Homo sapien
gggtgtgactgtgtactccctcaga

SEQ ID NO: 16605 - DNA, 25 bp, Homo sapien
agactgtagagtttaatgccacaag

SEQ ID NO: 16606 - DNA, 25 bp, Homo sapien
agactgtagagtataatgccacaag

SEQ ID NO: 16607 - DNA, 25 bp, Homo sapien
acaagtaggatcttaacacaaacag

SEQ ID NO: 16608 - DNA, 25 bp, Homo sapien
acaagtaggatcataacacaaacag

SEQ ID NO: 16609 - DNA, 25 bp, Homo sapien
gacaggtgaagtatacagagaccca

SEQ ID NO: 16610 - DNA, 25 bp, Homo sapien
gacaggtgaagtttacagagaccca

SEQ ID NO: 16611 - DNA, 25 bp, Homo sapien
gagagatcggtatagaaccgacgag

SEQ ID NO: 16612 - DNA, 25 bp, Homo sapien
gagagatcggtaaagaaccgacgag

SEQ ID NO: 16613 - DNA, 25 bp, Homo sapien
agtaacaccgaaagtccgccgacac

SEQ ID NO: 16614 - DNA, 25 bp, Homo sapien
agtaacaccgaatgtccgccgacac

SEQ ID NO: 16615 - DNA, 25 bp, Homo sapien
agtttaacacacgttctacaagagt

SEQ ID NO: 16616 - DNA, 25 bp, Homo sapien
agtttaacacaccttctacaagagt

SEQ ID NO: 16617 - DNA, 25 bp, Homo sapien
caaggaaaccctaactcaacgacgt

SEQ ID NO: 16618 - DNA, 25 bp, Homo sapien
caaggaaacccttactcaacgacgt

SEQ ID NO: 16619 - DNA, 25 bp, Homo sapien
tacaagggagagtgcgaccacctcg

SEQ ID NO: 16620 - DNA, 25 bp, Homo sapien
tacaagggagagagcgaccacctcg

SEQ ID NO: 16621 - DNA, 25 bp, Homo sapien
agacgcggtccgagtcgccgtgctc

SEQ ID NO: 16622 - DNA, 25 bp, Homo sapien
agacgcggtccgtgtcgccgtgctc

SEQ ID NO: 16623 - DNA, 25 bp, Homo sapien
acgtcggtcgcttggtcgtgtagga

SEQ ID NO: 16624 - DNA, 25 bp, Homo sapien
acgtcggtcgctaggtcgtgtagga

SEQ ID NO: 16625 - DNA, 25 bp, Homo sapien
cccgtcgacactcaggtctagagta

SEQ ID NO: 16626 - DNA, 25 bp, Homo sapien
cccgtcgacactgaggtctagagta

SEQ ID NO: 16627 - DNA, 25 bp, Homo sapien
aggggtccgccacgagcctacatct

SEQ ID NO: 16628 - DNA, 25 bp, Homo sapien
aggggtccgccaggagcctacatct

SEQ ID NO: 16629 - DNA, 25 bp, Homo sapien
gaccgagcgaacgactcggccgact

SEQ ID NO: 16630 - DNA, 25 bp, Homo sapien
gaccgagcgaaccactcggccgact

SEQ ID NO: 16631 - DNA, 25 bp, Homo sapien
tcgagtcggtgacacacctagaaga

SEQ ID NO: 16632 - DNA, 25 bp, Homo sapien
tcgagtcggtgagacacctagaaga

SEQ ID NO: 16633 - DNA, 25 bp, Homo sapien
atatagtgtagacgaccccgatgta

SEQ ID NO: 16634 - DNA, 25 bp, Homo sapien
atatagtgtagaggaccccgatgta

SEQ ID NO: 16635 - DNA, 25 bp, Homo sapien
cttagtagaagaacactcgggtatg

SEQ ID NO: 16636 - DNA, 25 bp, Homo sapien
cttagtagaagatcactcgggtatg

SEQ ID NO: 16637 - DNA, 25 bp, Homo sapien
tctagttataatcaccgtggtcgta

SEQ ID NO: 16638 - DNA, 25 bp, Homo sapien
tctagttataatgaccgtggtcgta

SEQ ID NO: 16639 - DNA, 25 bp, Homo sapien
atgttacgacacaccgctggtgagt

SEQ ID NO: 16640 - DNA, 25 bp, Homo sapien
atgttacgacactccgctggtgagt

SEQ ID NO: 16641 - DNA, 25 bp, Homo sapien
cccctgtctgagacccatgttacga

SEQ ID NO: 16642 - DNA, 25 bp, Homo sapien
cccctgtctgagtcccatgttacga

SEQ ID NO: 16643 - DNA, 25 bp, Homo sapien
aaccgaaaggtctccaagtcagaga

SEQ ID NO: 16644 - DNA, 25 bp, Homo sapien
aaccgaaaggtcaccaagtcagaga

SEQ ID NO: 16645 - DNA, 25 bp, Homo sapien
taacgtgtgggtctttgtaatctct

SEQ ID NO: 16646 - DNA, 25 bp, Homo sapien
taacgtgtgggtgtttgtaatctct

SEQ ID NO: 16647 - DNA, 25 bp, Homo sapien
taactcgttcatcgattactttctt

SEQ ID NO: 16648 - DNA, 25 bp, Homo sapien
taactcgttcatggattactttctt

SEQ ID NO: 16649 - DNA, 25 bp, Homo sapien
tcgtagtccttcgatgtaatgtcga

SEQ ID NO: 16650 - DNA, 25 bp, Homo sapien
tcgtagtccttccatgtaatgtcga

SEQ ID NO: 16651 - DNA, 25 bp, Homo sapien
tctcgtcgggtcaagtgtcccgggt

SEQ ID NO: 16652 - DNA, 25 bp, Homo sapien
tctcgtcgggtctagtgtcccgggt

SEQ ID NO: 16653 - DNA, 25 bp, Homo sapien
aacgtcgctctgtgttcgagggtgt

SEQ ID NO: 16654 - DNA, 25 bp, Homo sapien
aacgtcgctctgagttcgagggtgt

SEQ ID NO: 16655 - DNA, 25 bp, Homo sapien
atcgtttgtcgaactgtttcgttct

SEQ ID NO: 16656 - DNA, 25 bp, Homo sapien
atcgtttgtcgatctgtttcgttct

SEQ ID NO: 16657 - DNA, 25 bp, Homo sapien
aaggtgtccgtcttctgttcctctc

SEQ ID NO: 16658 - DNA, 25 bp, Homo sapien
aaggtgtccgtcatctgttcctctc

SEQ ID NO: 16659 - DNA, 25 bp, Homo sapien
tcaatcggtcggataggttcatgtc

SEQ ID NO: 16660 - DNA, 25 bp, Homo sapien
tcaatcggtcggttaggttcatgtc

SEQ ID NO: 16661 - DNA, 25 bp, Homo sapien
tccgatggtgcgagtcgttgtcttc

SEQ ID NO: 16662 - DNA, 25 bp, Homo sapien
tccgatggtgcgtgtcgttgtcttc

SEQ ID NO: 16663 - DNA, 25 bp, Homo sapien
ttacagtggaatttatagtcaactc

SEQ ID NO: 16664 - DNA, 25 bp, Homo sapien
ttacagtggaatatatagtcaactc

SEQ ID NO: 16665 - DNA, 25 bp, Homo sapien
agacgtcaatagactatagactttt

SEQ ID NO: 16666 - DNA, 25 bp, Homo sapien
agacgtcaatagtctatagactttt

SEQ ID NO: 16667 - DNA, 25 bp, Homo sapien
gcgacggactcgagagttctcatct

SEQ ID NO: 16668 - DNA, 25 bp, Homo sapien
gcgacggactcgtgagttctcatct

SEQ ID NO: 16669 - DNA, 25 bp, Homo sapien
tccgtcggtagtggacgtctcccgc

SEQ ID NO: 16670 - DNA, 25 bp, Homo sapien
tccgtcggtagtcgacgtctcccgc

SEQ ID NO: 16671 - DNA, 25 bp, Homo sapien
aggttttgtcttaacgaaacagtgc

SEQ ID NO: 16672 - DNA, 25 bp, Homo sapien
aggttttgtctttacgaaacagtgc

SEQ ID NO: 16673 - DNA, 25 bp, Homo sapien
gtattctgttttcattgacactacg

SEQ ID NO: 16674 - DNA, 25 bp, Homo sapien
gtattctgttttgattgacactacg

SEQ ID NO: 16675 - DNA, 25 bp, Homo sapien
atttttgtcgtttcgtccgcgacga

SEQ ID NO: 16676 - DNA, 25 bp, Homo sapien
atttttgtcgttacgtccgcgacga

SEQ ID NO: 16677 - DNA, 25 bp, Homo sapien
tctgtatagtctttacctagtgtta

SEQ ID NO: 16678 - DNA, 25 bp, Homo sapien
tctgtatagtctatacctagtgtta

SEQ ID NO: 16679 - DNA, 25 bp, Homo sapien
ttggaacataactgtaacgacgatt

SEQ ID NO: 16680 - DNA, 25 bp, Homo sapien
ttggaacataacagtaacgacgatt

SEQ ID NO: 16681 - DNA, 25 bp, Homo sapien
ctattttgactaatgagccaattgt

SEQ ID NO: 16682 - DNA, 25 bp, Homo sapien
ctattttgactattgagccaattgt

SEQ ID NO: 16683 - DNA, 25 bp, Homo sapien
tttgtatgggttagtcacttcttcg

SEQ ID NO: 16684 - DNA, 25 bp, Homo sapien
tttgtatgggtttgtcacttcttcg

SEQ ID NO: 16685 - DNA, 25 bp, Homo sapien
gtgttatctctgtcttccctgtagg

SEQ ID NO: 16686 - DNA, 25 bp, Homo sapien
gtgttatctctgacttccctgtagg

SEQ ID NO: 16687 - DNA, 25 bp, Homo sapien
ggctctttcctctatgttccctaag

SEQ ID NO: 16688 - DNA, 25 bp, Homo sapien
ggctctttcctcaatgttccctaag

SEQ ID NO: 16689 - DNA, 25 bp, Homo sapien
gtttttgtgacaaactgaacccttg

SEQ ID NO: 16690 - DNA, 25 bp, Homo sapien
gtttttgtgacatactgaacccttg

SEQ ID NO: 16691 - DNA, 25 bp, Homo sapien
tcttgttcgaataaaccgtagttaa

SEQ ID NO: 16692 - DNA, 25 bp, Homo sapien
tcttgttcgaattaaccgtagttaa

SEQ ID NO: 16693 - DNA, 25 bp, Homo sapien
atgaatgtgcacgtttctctataca

SEQ ID NO: 16694 - DNA, 25 bp, Homo sapien
atgaatgtgcacctttctctataca

SEQ ID NO: 16695 - DNA, 25 bp, Homo sapien
ttataggagaacctactctactcag

SEQ ID NO: 16696 - DNA, 25 bp, Homo sapien
ttataggagaacgtactctactcag

SEQ ID NO: 16697 - DNA, 25 bp, Homo sapien
ttttcaggtactgaagatgtaccta

SEQ ID NO: 16698 - DNA, 25 bp, Homo sapien
ttttcaggtactcaagatgtaccta

SEQ ID NO: 16699 - DNA, 25 bp, Homo sapien
tacgttctgttacctctgatttatg

SEQ ID NO: 16700 - DNA, 25 bp, Homo sapien
tacgttctgttagctctgatttatg

SEQ ID NO: 16701 - DNA, 25 bp, Homo sapien
agacacaattgtctccgatgttatg

SEQ ID NO: 16702 - DNA, 25 bp, Homo sapien
agacacaattgtgtccgatgttatg

SEQ ID NO: 16703 - DNA, 25 bp, Homo sapien
cagtactcgttgtccggtgtcagta

SEQ ID NO: 16704 - DNA, 25 bp, Homo sapien
cagtactcgttgaccggtgtcagta

SEQ ID NO: 16705 - DNA, 25 bp, Homo sapien
gactctgaggggaacacaaggtgtc

SEQ ID NO: 16706 - DNA, 25 bp, Homo sapien
gactctgaggggtacacaaggtgtc

SEQ ID NO: 16707 - DNA, 25 bp, Homo sapien
ataaagtagaggtcgacgagaatcc

SEQ ID NO: 16708 - DNA, 25 bp, Homo sapien
ataaagtagaggacgacgagaatcc

SEQ ID NO: 16709 - DNA, 25 bp, Homo sapien
actaaggaccagtactagggttccg

SEQ ID NO: 16710 - DNA, 25 bp, Homo sapien
actaaggaccagaactagggttccg

SEQ ID NO: 16711 - DNA, 25 bp, Homo sapien
attatcggaccaccctggaggtctc

SEQ ID NO: 16712 - DNA, 25 bp, Homo sapien
attatcggaccagcctggaggtctc

SEQ ID NO: 16713 - DNA, 25 bp, Homo sapien
gtgtcagacccgttcccgaggttct

SEQ ID NO: 16714 - DNA, 25 bp, Homo sapien
gtgtcagacccgatcccgaggttct

SEQ ID NO: 16715 - DNA, 25 bp, Homo sapien
gttctcggtccgtcgctgatgttct

SEQ ID NO: 16716 - DNA, 25 bp, Homo sapien
gttctcggtccgacgctgatgttct

SEQ ID NO: 16717 - DNA, 25 bp, Homo sapien
tgtagttcacccaataggtctctct

SEQ ID NO: 16718 - DNA, 25 bp, Homo sapien
tgtagttcaccctataggtctctct

SEQ ID NO: 16719 - DNA, 25 bp, Homo sapien
tgtatccgtcgacaagagtccaggt

SEQ ID NO: 16720 - DNA, 25 bp, Homo sapien
tgtatccgtcgagaagagtccaggt

SEQ ID NO: 16721 - DNA, 25 bp, Homo sapien
tattttgagacatctccagtaaatg

SEQ ID NO: 16722 - DNA, 25 bp, Homo sapien
tattttgagacaactccagtaaatg

SEQ ID NO: 16723 - DNA, 25 bp, Homo sapien
tttgttgtcaccaaggacttaaatt

SEQ ID NO: 16724 - DNA, 25 bp, Homo sapien
tttgttgtcacctaggacttaaatt

SEQ ID NO: 16725 - DNA, 25 bp, Homo sapien
tgtgtgtccggttaggttccaatct

SEQ ID NO: 16726 - DNA, 25 bp, Homo sapien
tgtgtgtccggtaaggttccaatct

SEQ ID NO: 16727 - DNA, 25 bp, Homo sapien
ctttttaccggtagagtaaccaaac

SEQ ID NO: 16728 - DNA, 25 bp, Homo sapien
ctttttaccggttgagtaaccaaac

SEQ ID NO: 16729 - DNA, 25 bp, Homo sapien
gacttacacactaaataatacaaat

SEQ ID NO: 16730 - DNA, 25 bp, Homo sapien
gacttacacacttaataatacaaat

SEQ ID NO: 16731 - DNA, 25 bp, Homo sapien
ggccacgacgattaaaccaatactt

SEQ ID NO: 16732 - DNA, 25 bp, Homo sapien
ggccacgacgataaaaccaatactt

SEQ ID NO: 16733 - DNA, 25 bp, Homo sapien
agtaaatcggataatccttgtactt

SEQ ID NO: 16734 - DNA, 25 bp, Homo sapien
agtaaatcggattatccttgtactt

SEQ ID NO: 16735 - DNA, 25 bp, Homo sapien
gtgaaacaattatccgactagactt

SEQ ID NO: 16736 - DNA, 25 bp, Homo sapien
gtgaaacaattaaccgactagactt

SEQ ID NO: 16737 - DNA, 25 bp, Homo sapien
gtcgtgatagggtcccgactagaag

SEQ ID NO: 16738 - DNA, 25 bp, Homo sapien
gtcgtgatagggacccgactagaag

SEQ ID NO: 16739 - DNA, 25 bp, Homo sapien
tgttactcggtcacgccgtcaaccg

SEQ ID NO: 16740 - DNA, 25 bp, Homo sapien
tgttactcggtctcgccgtcaaccg

SEQ ID NO: 16741 - DNA, 25 bp, Homo sapien
acgtgtttcatcgacgacccaaccg

SEQ ID NO: 16742 - DNA, 25 bp, Homo sapien
acgtgtttcatccacgacccaaccg

SEQ ID NO: 16743 - DNA, 25 bp, Homo sapien
gtctcgaccctacactagccatgta

SEQ ID NO: 16744 - DNA, 25 bp, Homo sapien
gtctcgaccctagactagccatgta

SEQ ID NO: 16745 - DNA, 25 bp, Homo sapien
tcgactctgcggacgaaccatcgtc

SEQ ID NO: 16746 - DNA, 25 bp, Homo sapien
tcgactctgcggtcgaaccatcgtc

SEQ ID NO: 16747 - DNA, 25 bp, Homo sapien
actactgtgtatcttaccctcgacg

SEQ ID NO: 16748 - DNA, 25 bp, Homo sapien
actactgtgtatgttaccctcgacg

SEQ ID NO: 16749 - DNA, 25 bp, Homo sapien
aggtgtaaattttcctgtggcggac

SEQ ID NO: 16750 - DNA, 25 bp, Homo sapien
aggtgtaaatttacctgtggcggac

SEQ ID NO: 16751 - DNA, 25 bp, Homo sapien
tgtgtactgtccttggcgacgatac

SEQ ID NO: 16752 - DNA, 25 bp, Homo sapien
tgtgtactgtccatggcgacgatac

SEQ ID NO: 16753 - DNA, 25 bp, Homo sapien
ccacctcgtctctaggtcgacggag

SEQ ID NO: 16754 - DNA, 25 bp, Homo sapien
ccacctcgtctcaaggtcgacggag

SEQ ID NO: 16755 - DNA, 25 bp, Homo sapien
cgtctttacacaacccgtactcggt

SEQ ID NO: 16756 - DNA, 25 bp, Homo sapien
cgtctttacacatcccgtactcggt

SEQ ID NO: 16757 - DNA, 25 bp, Homo sapien
gaacctttacacgacctcgtatccg

SEQ ID NO: 16758 - DNA, 25 bp, Homo sapien
gaacctttacaccacctcgtatccg

SEQ ID NO: 16759 - DNA, 25 bp, Homo sapien
agaaagggtgtcagccccgtgtcct

SEQ ID NO: 16760 - DNA, 25 bp, Homo sapien
agaaagggtgtctgccccgtgtcct

SEQ ID NO: 16761 - DNA, 25 bp, Homo sapien
ctaaaacagggacacctcgatttct

SEQ ID NO: 16762 - DNA, 25 bp, Homo sapien
ctaaaacagggagacctcgatttct

SEQ ID NO: 16763 - DNA, 25 bp, Homo sapien
aaaagtataaggtcaccaagagttc

SEQ ID NO: 16764 - DNA, 25 bp, Homo sapien
aaaagtataaggacaccaagagttc

SEQ ID NO: 16765 - DNA, 25 bp, Homo sapien
aaagtatatgttcaccctggtattt

SEQ ID NO: 16766 - DNA, 25 bp, Homo sapien
aaagtatatgttgaccctggtattt

SEQ ID NO: 16767 - DNA, 25 bp, Homo sapien
agagtaagagcaattaggacacctt

SEQ ID NO: 16768 - DNA, 25 bp, Homo sapien
agagtaagagcatttaggacacctt

SEQ ID NO: 16769 - DNA, 25 bp, Homo sapien
agaaaaagtctcagtttacgtggtc

SEQ ID NO: 16770 - DNA, 25 bp, Homo sapien
agaaaaagtctctgtttacgtggtc

SEQ ID NO: 16771 - DNA, 25 bp, Homo sapien
agaactcacgggtagttgcgtgtgc

SEQ ID NO: 16772 - DNA, 25 bp, Homo sapien
agaactcacgggaagttgcgtgtgc

SEQ ID NO: 16773 - DNA, 25 bp, Homo sapien
agatcacttggaggttacgtagacc

SEQ ID NO: 16774 - DNA, 25 bp, Homo sapien
agatcacttggacgttacgtagacc

SEQ ID NO: 16775 - DNA, 25 bp, Homo sapien
tggactactctatgtcctccgacca

SEQ ID NO: 16776 - DNA, 25 bp, Homo sapien
tggactactctaagtcctccgacca

SEQ ID NO: 16777 - DNA, 25 bp, Homo sapien
attaatgtacaactcgtccactata

SEQ ID NO: 16778 - DNA, 25 bp, Homo sapien
attaatgtacaagtcgtccactata

SEQ ID NO: 16779 - DNA, 25 bp, Homo sapien
actcgtgataagaggaccactgtgc

SEQ ID NO: 16780 - DNA, 25 bp, Homo sapien
actcgtgataagtggaccactgtgc

SEQ ID NO: 16781 - DNA, 25 bp, Homo sapien
gtacggaagacatctaaccctcctt

SEQ ID NO: 16782 - DNA, 25 bp, Homo sapien
gtacggaagacaactaaccctcctt

SEQ ID NO: 16783 - DNA, 25 bp, Homo sapien
tggcacagaccgtcaccgaccgggt

SEQ ID NO: 16784 - DNA, 25 bp, Homo sapien
tggcacagaccgacaccgaccgggt

SEQ ID NO: 16785 - DNA, 25 bp, Homo sapien
tggagacactacgagggcccgacct

SEQ ID NO: 16786 - DNA, 25 bp, Homo sapien
tggagacactaccagggcccgacct

SEQ ID NO: 16787 - DNA, 25 bp, Homo sapien
acgcggaactacttgagggccctcg

SEQ ID NO: 16788 - DNA, 25 bp, Homo sapien
acgcggaactacatgagggccctcg

SEQ ID NO: 16789 - DNA, 25 bp, Homo sapien
ttgtgaagtgactaagggtgcactc

SEQ ID NO: 16790 - DNA, 25 bp, Homo sapien
ttgtgaagtgacaaagggtgcactc

SEQ ID NO: 16791 - DNA, 25 bp, Homo sapien
tatgtttttatccagagatgttcac

SEQ ID NO: 16792 - DNA, 25 bp, Homo sapien
tatgtttttatcgagagatgttcac

SEQ ID NO: 16793 - DNA, 25 bp, Homo sapien
cagagtttgtaggacccaatgttga

SEQ ID NO: 16794 - DNA, 25 bp, Homo sapien
cagagtttgtagcacccaatgttga

SEQ ID NO: 16795 - DNA, 25 bp, Homo sapien
agtttttctccgacaaatgtacgga

SEQ ID NO: 16796 - DNA, 25 bp, Homo sapien
agtttttctccgtcaaatgtacgga

SEQ ID NO: 16797 - DNA, 25 bp, Homo sapien
ggtcctacgtcttactccttatgat

SEQ ID NO: 16798 - DNA, 25 bp, Homo sapien
ggtcctacgtctaactccttatgat

SEQ ID NO: 16799 - DNA, 25 bp, Homo sapien
ctcggcactacgtaggctcttttac

SEQ ID NO: 16800 - DNA, 25 bp, Homo sapien
ctcggcactacgaaggctcttttac

SEQ ID NO: 16801 - DNA, 25 bp, Homo sapien
gagacatttcctgagtctcttgtca

SEQ ID NO: 16802 - DNA, 25 bp, Homo sapien
gagacatttcctcagtctcttgtca

SEQ ID NO: 16803 - DNA, 25 bp, Homo sapien
gagacaatacctctttgtaataacg

SEQ ID NO: 16804 - DNA, 25 bp, Homo sapien
gagacaatacctgtttgtaataacg

SEQ ID NO: 16805 - DNA, 25 bp, Homo sapien
aaaagacgccaaggttcagaactag

SEQ ID NO: 16806 - DNA, 25 bp, Homo sapien
aaaagacgccaacgttcagaactag

SEQ ID NO: 16807 - DNA, 25 bp, Homo sapien
gtgaggcaccatgactctaaaagat

SEQ ID NO: 16808 - DNA, 25 bp, Homo sapien
gtgaggcaccatcactctaaaagat

SEQ ID NO: 16809 - DNA, 25 bp, Homo sapien
gagacgtaacccttccttttacgtt

SEQ ID NO: 16810 - DNA, 25 bp, Homo sapien
gagacgtaacccatccttttacgtt

SEQ ID NO: 16811 - DNA, 25 bp, Homo sapien
catacacaaggtcctctcgagctac

SEQ ID NO: 16812 - DNA, 25 bp, Homo sapien
catacacaaggtgctctcgagctac

SEQ ID NO: 16813 - DNA, 25 bp, Homo sapien
tttactaaaggtgactcgacggcat

SEQ ID NO: 16814 - DNA, 25 bp, Homo sapien
tttactaaaggtcactcgacggcat

SEQ ID NO: 16815 - DNA, 25 bp, Homo sapien
tcacgtgtattcaacgtccaccgac

SEQ ID NO: 16816 - DNA, 25 bp, Homo sapien
tcacgtgtattctacgtccaccgac

SEQ ID NO: 16817 - DNA, 25 bp, Homo sapien
ttgtgatgtttgtataccgtctcga

SEQ ID NO: 16818 - DNA, 25 bp, Homo sapien
ttgtgatgtttgaataccgtctcga

SEQ ID NO: 16819 - DNA, 25 bp, Homo sapien
tctatggtggtacgaatatacttca

SEQ ID NO: 16820 - DNA, 25 bp, Homo sapien
tctatggtggtaggaatatacttca

SEQ ID NO: 16821 - DNA, 25 bp, Homo sapien
atgttttacgtttcggactttcaat

SEQ ID NO: 16822 - DNA, 25 bp, Homo sapien
atgttttacgttacggactttcaat

SEQ ID NO: 16823 - DNA, 25 bp, Homo sapien
tgttgtgttaggacgtactttacct

SEQ ID NO: 16824 - DNA, 25 bp, Homo sapien
tgttgtgttaggtcgtactttacct

SEQ ID NO: 16825 - DNA, 25 bp, Homo sapien
tttacgggtaggaatcgtttctact

SEQ ID NO: 16826 - DNA, 25 bp, Homo sapien
tttacgggtaggtatcgtttctact

SEQ ID NO: 16827 - DNA, 25 bp, Homo sapien
cgtcttgaggagagtcgaggatttc

SEQ ID NO: 16828 - DNA, 25 bp, Homo sapien
cgtcttgaggagtgtcgaggatttc

SEQ ID NO: 16829 - DNA, 25 bp, Homo sapien
tattgtttagggaacggactgaccg

SEQ ID NO: 16830 - DNA, 25 bp, Homo sapien
tattgtttagggtacggactgaccg

SEQ ID NO: 16831 - DNA, 25 bp, Homo sapien
cgaattttatgtgtgtaagatcccc

SEQ ID NO: 16832 - DNA, 25 bp, Homo sapien
cgaattttatgtctgtaagatcccc

SEQ ID NO: 16833 - DNA, 25 bp, Homo sapien
cttttgctctgttaggtcgtcgggt

SEQ ID NO: 16834 - DNA, 25 bp, Homo sapien
cttttgctctgtaaggtcgtcgggt

SEQ ID NO: 16835 - DNA, 25 bp, Homo sapien
ctctagttattgaaaggtacgcctt

SEQ ID NO: 16836 - DNA, 25 bp, Homo sapien
ctctagttattgtaaggtacgcctt

SEQ ID NO: 16837 - DNA, 25 bp, Homo sapien
atggtccttcgtcacgtccgcctgt

SEQ ID NO: 16838 - DNA, 25 bp, Homo sapien
atggtccttcgtgacgtccgcctgt

SEQ ID NO: 16839 - DNA, 25 bp, Homo sapien
ctctcggggattggactccgccgtg

SEQ ID NO: 16840 - DNA, 25 bp, Homo sapien
ctctcggggattcgactccgccgtg

SEQ ID NO: 16841 - DNA, 25 bp, Homo sapien
tccacgcaggagtcacgggacccga

SEQ ID NO: 16842 - DNA, 25 bp, Homo sapien
tccacgcaggagacacgggacccga

SEQ ID NO: 16843 - DNA, 25 bp, Homo sapien
agcaggagtatcctcagctacgggt

SEQ ID NO: 16844 - DNA, 25 bp, Homo sapien
agcaggagtatcgtcagctacgggt

SEQ ID NO: 16845 - DNA, 25 bp, Homo sapien
aaatcaggtatgtgcagttacatgt

SEQ ID NO: 16846 - DNA, 25 bp, Homo sapien
aaatcaggtatgagcagttacatgt

SEQ ID NO: 16847 - DNA, 25 bp, Homo sapien
cagttcttgtttgctgtctgaatgt

SEQ ID NO: 16848 - DNA, 25 bp, Homo sapien
cagttcttgtttcctgtctgaatgt

SEQ ID NO: 16849 - DNA, 25 bp, Homo sapien
gtacatttgggtttcattagacatc

SEQ ID NO: 16850 - DNA, 25 bp, Homo sapien
gtacatttgggtatcattagacatc

SEQ ID NO: 16851 - DNA, 25 bp, Homo sapien
gcctgtggggattatcacagttaaa

SEQ ID NO: 16852 - DNA, 25 bp, Homo sapien
gcctgtggggataatcacagttaaa

SEQ ID NO: 16853 - DNA, 25 bp, Homo sapien
tgtgaggatgaacctgttgacgact

SEQ ID NO: 16854 - DNA, 25 bp, Homo sapien
tgtgaggatgaagctgttgacgact

SEQ ID NO: 16855 - DNA, 25 bp, Homo sapien
aaagtggaccgaggtaccaggtcct

SEQ ID NO: 16856 - DNA, 25 bp, Homo sapien
aaagtggaccgacgtaccaggtcct

SEQ ID NO: 16857 - DNA, 25 bp, Homo sapien
aagatagaactgttctattgttcgc

SEQ ID NO: 16858 - DNA, 25 bp, Homo sapien
aagatagaactgatctattgttcgc

SEQ ID NO: 16859 - DNA, 25 bp, Homo sapien
tgagccgactctaactcatttttcg

SEQ ID NO: 16860 - DNA, 25 bp, Homo sapien
tgagccgactcttactcatttttcg

SEQ ID NO: 16861 - DNA, 25 bp, Homo sapien
gatgtctctaccagtgactattttt

SEQ ID NO: 16862 - DNA, 25 bp, Homo sapien
gatgtctctacctgtgactattttt

SEQ ID NO: 16863 - DNA, 25 bp, Homo sapien
aatgtcttccggtttcttcgactct

SEQ ID NO: 16864 - DNA, 25 bp, Homo sapien
aatgtcttccggattcttcgactct

SEQ ID NO: 16865 - DNA, 25 bp, Homo sapien
cctactcccgactgatattcggaga

SEQ ID NO: 16866 - DNA, 25 bp, Homo sapien
cctactcccgacagatattcggaga

SEQ ID NO: 16867 - DNA, 25 bp, Homo sapien
acacgtcccggtatatttcacagag

SEQ ID NO: 16868 - DNA, 25 bp, Homo sapien
acacgtcccggtttatttcacagag

SEQ ID NO: 16869 - DNA, 25 bp, Homo sapien
tcctcggtagtcaatcactacagag

SEQ ID NO: 16870 - DNA, 25 bp, Homo sapien
tcctcggtagtctatcactacagag

SEQ ID NO: 16871 - DNA, 25 bp, Homo sapien
cctacgattcaggactcgtcggtag

SEQ ID NO: 16872 - DNA, 25 bp, Homo sapien
cctacgattcagcactcgtcggtag

SEQ ID NO: 16873 - DNA, 25 bp, Homo sapien
aggattactttcgacactatgtgag

SEQ ID NO: 16874 - DNA, 25 bp, Homo sapien
aggattactttccacactatgtgag

SEQ ID NO: 16875 - DNA, 25 bp, Homo sapien
tcgttcctacgtcctaacatgtaga

SEQ ID NO: 16876 - DNA, 25 bp, Homo sapien
tcgttcctacgtgctaacatgtaga

SEQ ID NO: 16877 - DNA, 25 bp, Homo sapien
ccagtacaatgctgctgcgtagtag

SEQ ID NO: 16878 - DNA, 25 bp, Homo sapien
ccagtacaatgcagctgcgtagtag

SEQ ID NO: 16879 - DNA, 25 bp, Homo sapien
tctgtttttcagaagtcccgggtgg

SEQ ID NO: 16880 - DNA, 25 bp, Homo sapien
tctgtttttcagtagtcccgggtgg

SEQ ID NO: 16881 - DNA, 25 bp, Homo sapien
tcttagtcacaggttaccaaagttt

SEQ ID NO: 16882 - DNA, 25 bp, Homo sapien
tcttagtcacagcttaccaaagttt

SEQ ID NO: 16883 - DNA, 25 bp, Homo sapien
taacgttccgtttaccctgagtatg

SEQ ID NO: 16884 - DNA, 25 bp, Homo sapien
taacgttccgttaaccctgagtatg

SEQ ID NO: 16885 - DNA, 25 bp, Homo sapien
gatgaactttcgttgttccttcttc

SEQ ID NO: 16886 - DNA, 25 bp, Homo sapien
gatgaactttcgatgttccttcttc

SEQ ID NO: 16887 - DNA, 25 bp, Homo sapien
gtcatccaacgaggtctcattctta

SEQ ID NO: 16888 - DNA, 25 bp, Homo sapien
gtcatccaacgacgtctcattctta

SEQ ID NO: 16889 - DNA, 25 bp, Homo sapien
tcgacaaagggtcgtttctagttgg

SEQ ID NO: 16890 - DNA, 25 bp, Homo sapien
tcgacaaagggtggtttctagttgg

SEQ ID NO: 16891 - DNA, 25 bp, Homo sapien
acgttctcgggtttccgggttctag

SEQ ID NO: 16892 - DNA, 25 bp, Homo sapien
acgttctcgggtatccgggttctag

SEQ ID NO: 16893 - DNA, 25 bp, Homo sapien
ctacgttccattcacccagtgtctg

SEQ ID NO: 16894 - DNA, 25 bp, Homo sapien
ctacgttccattgacccagtgtctg

SEQ ID NO: 16895 - DNA, 25 bp, Homo sapien
ctcgtttcatgtttctccgtcccgt

SEQ ID NO: 16896 - DNA, 25 bp, Homo sapien
ctcgtttcatgtatctccgtcccgt

SEQ ID NO: 16897 - DNA, 25 bp, Homo sapien
ctgattggtgtcttacccgtctaca

SEQ ID NO: 16898 - DNA, 25 bp, Homo sapien
ctgattggtgtcatacccgtctaca

SEQ ID NO: 16899 - DNA, 25 bp, Homo sapien
cattccaggggcactcctcctaagt

SEQ ID NO: 16900 - DNA, 25 bp, Homo sapien
cattccaggggctctcctcctaagt

SEQ ID NO: 16901 - DNA, 25 bp, Homo sapien
tccctggtgggacgtccttcacagt

SEQ ID NO: 16902 - DNA, 25 bp, Homo sapien
tccctggtgggaggtccttcacagt

SEQ ID NO: 16903 - DNA, 25 bp, Homo sapien
ttcgttgactacgtctctccttctg

SEQ ID NO: 16904 - DNA, 25 bp, Homo sapien
ttcgttgactacctctctccttctg

SEQ ID NO: 16905 - DNA, 25 bp, Homo sapien
tacgatctggctaccgactccattg

SEQ ID NO: 16906 - DNA, 25 bp, Homo sapien
tacgatctggcttccgactccattg

SEQ ID NO: 16907 - DNA, 25 bp, Homo sapien
taccgtccggacgacgtcggattcg

SEQ ID NO: 16908 - DNA, 25 bp, Homo sapien
taccgtccggaccacgtcggattcg

SEQ ID NO: 16909 - DNA, 25 bp, Homo sapien
tcacgtgtcacagagtccgggggtc

SEQ ID NO: 16910 - DNA, 25 bp, Homo sapien
tcacgtgtcacacagtccgggggtc

SEQ ID NO: 16911 - DNA, 25 bp, Homo sapien
taatacagagacatctccggaggtc

SEQ ID NO: 16912 - DNA, 25 bp, Homo sapien
taatacagagacttctccggaggtc

SEQ ID NO: 16913 - DNA, 25 bp, Homo sapien
tagagtcattaactatcgtgaacat

SEQ ID NO: 16914 - DNA, 25 bp, Homo sapien
tagagtcattaagtatcgtgaacat

SEQ ID NO: 16915 - DNA, 25 bp, Homo sapien
ataggtcacataaagttcacgtaaa

SEQ ID NO: 16916 - DNA, 25 bp, Homo sapien
ataggtcacatatagttcacgtaaa

SEQ ID NO: 16917 - DNA, 25 bp, Homo sapien
aagtcggaccttcaggttgagaaga

SEQ ID NO: 16918 - DNA, 25 bp, Homo sapien
aagtcggaccttgaggttgagaaga

SEQ ID NO: 16919 - DNA, 25 bp, Homo sapien
ttggacacctatctgttgcagagag

SEQ ID NO: 16920 - DNA, 25 bp, Homo sapien
ttggacacctatgtgttgcagagag

SEQ ID NO: 16921 - DNA, 25 bp, Homo sapien
ctaaacccgtatgtctttcgtaaag

SEQ ID NO: 16922 - DNA, 25 bp, Homo sapien
ctaaacccgtatctctttcgtaaag

SEQ ID NO: 16923 - DNA, 25 bp, Homo sapien
gaacaatcaatcctgttctgtgaag

SEQ ID NO: 16924 - DNA, 25 bp, Homo sapien
gaacaatcaatcgtgttctgtgaag

SEQ ID NO: 16925 - DNA, 25 bp, Homo sapien
aaacagaagctaatgtcttggtctg

SEQ ID NO: 16926 - DNA, 25 bp, Homo sapien
aaacagaagctattgtcttggtctg

SEQ ID NO: 16927 - DNA, 25 bp, Homo sapien
cgagagtaggatcgaatagaccggt

SEQ ID NO: 16928 - DNA, 25 bp, Homo sapien
cgagagtaggatggaatagaccggt

SEQ ID NO: 16929 - DNA, 25 bp, Homo sapien
acacagaaagcaggaatcctacgtt

SEQ ID NO: 16930 - DNA, 25 bp, Homo sapien
acacagaaagcacgaatcctacgtt

SEQ ID NO: 16931 - DNA, 25 bp, Homo sapien
atagtggaaacacgatagtctctta

SEQ ID NO: 16932 - DNA, 25 bp, Homo sapien
atagtggaaacaggatagtctctta

SEQ ID NO: 16933 - DNA, 25 bp, Homo sapien
agtgtgacttacaaaaattcgacac

SEQ ID NO: 16934 - DNA, 25 bp, Homo sapien
agtgtgacttactaaaattcgacac

SEQ ID NO: 16935 - DNA, 25 bp, Homo sapien
gacggtgtacttttcacttattcaa

SEQ ID NO: 16936 - DNA, 25 bp, Homo sapien
gacggtgtacttatcacttattcaa

SEQ ID NO: 16937 - DNA, 25 bp, Homo sapien
aacaggtttcggaacgaaagttcaa

SEQ ID NO: 16938 - DNA, 25 bp, Homo sapien
aacaggtttcggtacgaaagttcaa

SEQ ID NO: 16939 - DNA, 25 bp, Homo sapien
cacctactcccgactgatattcgga

SEQ ID NO: 16940 - DNA, 25 bp, Homo sapien
cacctactcccgtctgatattcgga

SEQ ID NO: 16941 - DNA, 25 bp, Homo sapien
gcttatctccctttcccgttggtac

SEQ ID NO: 16942 - DNA, 25 bp, Homo sapien
gcttatctccctatcccgttggtac

SEQ ID NO: 16943 - DNA, 25 bp, Homo sapien
ttcattccacttctcggagtgactg

SEQ ID NO: 16944 - DNA, 25 bp, Homo sapien
ttcattccacttgtcggagtgactg

SEQ ID NO: 16945 - DNA, 25 bp, Homo sapien
ctcttcccctattttggtacgtatg

SEQ ID NO: 16946 - DNA, 25 bp, Homo sapien
ctcttcccctatattggtacgtatg

SEQ ID NO: 16947 - DNA, 25 bp, Homo sapien
cttcctcactacttttgttccgtgg

SEQ ID NO: 16948 - DNA, 25 bp, Homo sapien
cttcctcactacatttgttccgtgg

SEQ ID NO: 16949 - DNA, 25 bp, Homo sapien
tccgtaagtcgactccggtggtgtg

SEQ ID NO: 16950 - DNA, 25 bp, Homo sapien
tccgtaagtcgagtccggtggtgtg

SEQ ID NO: 16951 - DNA, 25 bp, Homo sapien
cctccaacagggtccgagacgttca

SEQ ID NO: 16952 - DNA, 25 bp, Homo sapien
cctccaacagggaccgagacgttca

SEQ ID NO: 16953 - DNA, 25 bp, Homo sapien
catagtgaaaacagcgtacttctac

SEQ ID NO: 16954 - DNA, 25 bp, Homo sapien
catagtgaaaactgcgtacttctac

SEQ ID NO: 16955 - DNA, 25 bp, Homo sapien
gtcatgacacagaactctaaaatcg

SEQ ID NO: 16956 - DNA, 25 bp, Homo sapien
gtcatgacacagtactctaaaatcg

SEQ ID NO: 16957 - DNA, 25 bp, Homo sapien
tgacctaaactagaccaaactgtcg

SEQ ID NO: 16958 - DNA, 25 bp, Homo sapien
tgacctaaactacaccaaactgtcg

SEQ ID NO: 16959 - DNA, 25 bp, Homo sapien
gggtcagttgtttcctcgaaagttg

SEQ ID NO: 16960 - DNA, 25 bp, Homo sapien
gggtcagttgttacctcgaaagttg

SEQ ID NO: 16961 - DNA, 25 bp, Homo sapien
ctacctattcaacagacgacagtaa

SEQ ID NO: 16962 - DNA, 25 bp, Homo sapien
ctacctattcaagagacgacagtaa

SEQ ID NO: 16963 - DNA, 25 bp, Homo sapien
tactacaaggacaccgagaagaccc

SEQ ID NO: 16964 - DNA, 25 bp, Homo sapien
tactacaaggactccgagaagaccc

SEQ ID NO: 16965 - DNA, 25 bp, Homo sapien
ggacctgtggaagaagtcagtcctg

SEQ ID NO: 16966 - DNA, 25 bp, Homo sapien
ggacctgtggaacaagtcagtcctg

SEQ ID NO: 16967 - DNA, 25 bp, Homo sapien
cacaggggaagtacaaggtctatag

SEQ ID NO: 16968 - DNA, 25 bp, Homo sapien
cacaggggaagttcaaggtctatag

SEQ ID NO: 16969 - DNA, 25 bp, Homo sapien
gatcataaggaacaagaccctagtg

SEQ ID NO: 16970 - DNA, 25 bp, Homo sapien
gatcataaggaagaagaccctagtg

SEQ ID NO: 16971 - DNA, 25 bp, Homo sapien
tgacaacaaatgaatctcgtctctg

SEQ ID NO: 16972 - DNA, 25 bp, Homo sapien
tgacaacaaatgtatctcgtctctg

SEQ ID NO: 16973 - DNA, 25 bp, Homo sapien
ctgagaacaggcgggttgaggtgtg

SEQ ID NO: 16974 - DNA, 25 bp, Homo sapien
ctgagaacaggccggttgaggtgtg

SEQ ID NO: 16975 - DNA, 25 bp, Homo sapien
ttagtgacaacgagggttaccctgg

SEQ ID NO: 16976 - DNA, 25 bp, Homo sapien
ttagtgacaacgtgggttaccctgg

SEQ ID NO: 16977 - DNA, 25 bp, Homo sapien
aagtgtgggccgagacaccatgtcg

SEQ ID NO: 16978 - DNA, 25 bp, Homo sapien
aagtgtgggccgtgacaccatgtcg

SEQ ID NO: 16979 - DNA, 25 bp, Homo sapien
aagtgcctcgaacaacaggtctggt

SEQ ID NO: 16980 - DNA, 25 bp, Homo sapien
aagtgcctcgaagaacaggtctggt

SEQ ID NO: 16981 - DNA, 25 bp, Homo sapien
gtccatcgagacagaagagctctcc

SEQ ID NO: 16982 - DNA, 25 bp, Homo sapien
gtccatcgagactgaagagctctcc

SEQ ID NO: 16983 - DNA, 25 bp, Homo sapien
tatacgtacgtgtcatgacctgtca

SEQ ID NO: 16984 - DNA, 25 bp, Homo sapien
tatacgtacgtgacatgacctgtca

SEQ ID NO: 16985 - DNA, 25 bp, Homo sapien
ctctactagaacgacgaccttgacg

SEQ ID NO: 16986 - DNA, 25 bp, Homo sapien
ctctactagaaccacgaccttgacg

SEQ ID NO: 16987 - DNA, 25 bp, Homo sapien
ggaacgttaatacctcgatctactt

SEQ ID NO: 16988 - DNA, 25 bp, Homo sapien
ggaacgttaatagctcgatctactt

SEQ ID NO: 16989 - DNA, 25 bp, Homo sapien
atggttactgttcaggtggttctac

SEQ ID NO: 16990 - DNA, 25 bp, Homo sapien
atggttactgttgaggtggttctac

SEQ ID NO: 16991 - DNA, 25 bp, Homo sapien
ccgtgagttctttcatccgacttcc

SEQ ID NO: 16992 - DNA, 25 bp, Homo sapien
ccgtgagttcttacatccgacttcc

SEQ ID NO: 16993 - DNA, 25 bp, Homo sapien
ccgggtgtcttggagcctgtcgacc

SEQ ID NO: 16994 - DNA, 25 bp, Homo sapien
ccgggtgtcttgcagcctgtcgacc

SEQ ID NO: 16995 - DNA, 25 bp, Homo sapien
caatttacttccagttcctacgagg

SEQ ID NO: 16996 - DNA, 25 bp, Homo sapien
caatttacttcctgttcctacgagg

SEQ ID NO: 16997 - DNA, 25 bp, Homo sapien
aagtacggtacttcatttgccatga

SEQ ID NO: 16998 - DNA, 25 bp, Homo sapien
aagtacggtactacatttgccatga

SEQ ID NO: 16999 - DNA, 25 bp, Homo sapien
aggaggagtcggttctcctggccaa

SEQ ID NO: 17000 - DNA, 25 bp, Homo sapien
aggaggagtcggatctcctggccaa

SEQ ID NO: 17001 - DNA, 25 bp, Homo sapien
cggccagggggtcagagcactaacc

SEQ ID NO: 17002 - DNA, 25 bp, Homo sapien
cggccagggggtgagagcactaacc

SEQ ID NO: 17003 - DNA, 25 bp, Homo sapien
cacaagccaggaacggacgaagtac

SEQ ID NO: 17004 - DNA, 25 bp, Homo sapien
cacaagccaggatcggacgaagtac

SEQ ID NO: 17005 - DNA, 25 bp, Homo sapien
ccctctgcacgtcgtccgggtagga

SEQ ID NO: 17006 - DNA, 25 bp, Homo sapien
ccctctgcacgtggtccgggtagga

SEQ ID NO: 17007 - DNA, 25 bp, Homo sapien
cggagcacgacgtcgacagggtcct

SEQ ID NO: 17008 - DNA, 25 bp, Homo sapien
cggagcacgacgacgacagggtcct

SEQ ID NO: 17009 - DNA, 25 bp, Homo sapien
ggtggactagagacggacccgacct

SEQ ID NO: 17010 - DNA, 25 bp, Homo sapien
ggtggactagagtcggacccgacct

SEQ ID NO: 17011 - DNA, 25 bp, Homo sapien
gagtcgatagtgacggagcgaccct

SEQ ID NO: 17012 - DNA, 25 bp, Homo sapien
gagtcgatagtgtcggagcgaccct

SEQ ID NO: 17013 - DNA, 25 bp, Homo sapien
ctacgactgttatctgtcattagac

SEQ ID NO: 17014 - DNA, 25 bp, Homo sapien
ctacgactgttaactgtcattagac

SEQ ID NO: 17015 - DNA, 25 bp, Homo sapien
tacttttacgtgtgtcgtaaagact

SEQ ID NO: 17016 - DNA, 25 bp, Homo sapien
tacttttacgtgagtcgtaaagact

SEQ ID NO: 17017 - DNA, 25 bp, Homo sapien
tgttggctcttcttttgtgggcgac

SEQ ID NO: 17018 - DNA, 25 bp, Homo sapien
tgttggctcttcatttgtgggcgac

SEQ ID NO: 17019 - DNA, 25 bp, Homo sapien
ccgctactctagtgtgtccgacgcc

SEQ ID NO: 17020 - DNA, 25 bp, Homo sapien
ccgctactctagagtgtccgacgcc

SEQ ID NO: 17021 - DNA, 25 bp, Homo sapien
ctccagtattaaacgttagtgcctt

SEQ ID NO: 17022 - DNA, 25 bp, Homo sapien
ctccagtattaatcgttagtgcctt

SEQ ID NO: 17023 - DNA, 25 bp, Homo sapien
cattcacgtgtgcaccgttaattcc

SEQ ID NO: 17024 - DNA, 25 bp, Homo sapien
cattcacgtgtggaccgttaattcc

SEQ ID NO: 17025 - DNA, 25 bp, Homo sapien
gacgaatccttgtatttacagttca

SEQ ID NO: 17026 - DNA, 25 bp, Homo sapien
gacgaatccttgaatttacagttca

SEQ ID NO: 17027 - DNA, 25 bp, Homo sapien
acgaaaccaggttttctcatctcga

SEQ ID NO: 17028 - DNA, 25 bp, Homo sapien
acgaaaccaggtattctcatctcga

SEQ ID NO: 17029 - DNA, 25 bp, Homo sapien
aacacaggagtgtctcgtcttttat

SEQ ID NO: 17030 - DNA, 25 bp, Homo sapien
aacacaggagtgactcgtcttttat

SEQ ID NO: 17031 - DNA, 25 bp, Homo sapien
agtcacactgagttctggtgttttt

SEQ ID NO: 17032 - DNA, 25 bp, Homo sapien
agtcacactgagatctggtgttttt

SEQ ID NO: 17033 - DNA, 25 bp, Homo sapien
gagacgacactagtgtagttatact

SEQ ID NO: 17034 - DNA, 25 bp, Homo sapien
gagacgacactactgtagttatact

SEQ ID NO: 17035 - DNA, 25 bp, Homo sapien
cttcgggtcgtcagggttctcatcg

SEQ ID NO: 17036 - DNA, 25 bp, Homo sapien
cttcgggtcgtctgggttctcatcg

SEQ ID NO: 17037 - DNA, 25 bp, Homo sapien
catcagaacggtgtaaccaaatact

SEQ ID NO: 17038 - DNA, 25 bp, Homo sapien
catcagaacggtctaaccaaatact

SEQ ID NO: 17039 - DNA, 25 bp, Homo sapien
catacaactactctcggaaaaagtg

SEQ ID NO: 17040 - DNA, 25 bp, Homo sapien
catacaactactgtcggaaaaagtg

SEQ ID NO: 17041 - DNA, 25 bp, Homo sapien
caacaatacgtcctgaaaggtaatt

SEQ ID NO: 17042 - DNA, 25 bp, Homo sapien
caacaatacgtcgtgaaaggtaatt

SEQ ID NO: 17043 - DNA, 25 bp, Homo sapien
agactctcgtgtcgacaggaccgta

SEQ ID NO: 17044 - DNA, 25 bp, Homo sapien
agactctcgtgtggacaggaccgta

SEQ ID NO: 17045 - DNA, 25 bp, Homo sapien
gcggcccttcgttgttgagactaaa

SEQ ID NO: 17046 - DNA, 25 bp, Homo sapien
gcggcccttcgtagttgagactaaa

SEQ ID NO: 17047 - DNA, 25 bp, Homo sapien
gcgagccgcggcatcagacataaca

SEQ ID NO: 17048 - DNA, 25 bp, Homo sapien
gcgagccgcggcttcagacataaca

SEQ ID NO: 17049 - DNA, 25 bp, Homo sapien
tgcgtgggtcacaccacgacggact

SEQ ID NO: 17050 - DNA, 25 bp, Homo sapien
tgcgtgggtcactccacgacggact

SEQ ID NO: 17051 - DNA, 25 bp, Homo sapien
attcggggtaagaataccgacatag

SEQ ID NO: 17052 - DNA, 25 bp, Homo sapien
attcggggtaagtataccgacatag

SEQ ID NO: 17053 - DNA, 25 bp, Homo sapien
cgacgcgtgtaagagtgtcgaactc

SEQ ID NO: 17054 - DNA, 25 bp, Homo sapien
cgacgcgtgtaacagtgtcgaactc

SEQ ID NO: 17055 - DNA, 25 bp, Homo sapien
gagaccttccggaaccacttttatc

SEQ ID NO: 17056 - DNA, 25 bp, Homo sapien
gagaccttccggtaccacttttatc

SEQ ID NO: 17057 - DNA, 25 bp, Homo sapien
gtataaacactcgtattcagttggg

SEQ ID NO: 17058 - DNA, 25 bp, Homo sapien
gtataaacactcctattcagttggg

SEQ ID NO: 17059 - DNA, 25 bp, Homo sapien
gtttaaactgatacctgtagagcta

SEQ ID NO: 17060 - DNA, 25 bp, Homo sapien
gtttaaactgattcctgtagagcta

SEQ ID NO: 17061 - DNA, 25 bp, Homo sapien
ggtgcaccgtgtagctaccctccta

SEQ ID NO: 17062 - DNA, 25 bp, Homo sapien
ggtgcaccgtgttgctaccctccta

SEQ ID NO: 17063 - DNA, 25 bp, Homo sapien
gtcgtttgcgtaagacttgcacatc

SEQ ID NO: 17064 - DNA, 25 bp, Homo sapien
gtcgtttgcgtatgacttgcacatc

SEQ ID NO: 17065 - DNA, 25 bp, Homo sapien
ccttcggtgaattagcaggaacatc

SEQ ID NO: 17066 - DNA, 25 bp, Homo sapien
ccttcggtgaataagcaggaacatc

SEQ ID NO: 17067 - DNA, 25 bp, Homo sapien
gctcgtagtgcaacagttcaaaatc

SEQ ID NO: 17068 - DNA, 25 bp, Homo sapien
gctcgtagtgcatcagttcaaaatc

SEQ ID NO: 17069 - DNA, 25 bp, Homo sapien
ttggactaaacgtcaatcgtagtct

SEQ ID NO: 17070 - DNA, 25 bp, Homo sapien
ttggactaaacgacaatcgtagtct

SEQ ID NO: 17071 - DNA, 25 bp, Homo sapien
taccgaggacaaaacccctcgaggt

SEQ ID NO: 17072 - DNA, 25 bp, Homo sapien
taccgaggacaatacccctcgaggt

SEQ ID NO: 17073 - DNA, 25 bp, Homo sapien
cagtcccgacctgtgtcgtacgagg

SEQ ID NO: 17074 - DNA, 25 bp, Homo sapien
cagtcccgacctctgtcgtacgagg

SEQ ID NO: 17075 - DNA, 25 bp, Homo sapien
tctgcggtcccaaggctctcgtgga

SEQ ID NO: 17076 - DNA, 25 bp, Homo sapien
tctgcggtcccatggctctcgtgga

SEQ ID NO: 17077 - DNA, 25 bp, Homo sapien
tctgcacccgacaggggtagtttta

SEQ ID NO: 17078 - DNA, 25 bp, Homo sapien
tctgcacccgactggggtagtttta

SEQ ID NO: 17079 - DNA, 25 bp, Homo sapien
gaccacagacgtaacagatttttct

SEQ ID NO: 17080 - DNA, 25 bp, Homo sapien
gaccacagacgttacagatttttct

SEQ ID NO: 17081 - DNA, 25 bp, Homo sapien
gtataaagctccaggagtattcgtc

SEQ ID NO: 17082 - DNA, 25 bp, Homo sapien
gtataaagctcctggagtattcgtc

SEQ ID NO: 17083 - DNA, 25 bp, Homo sapien
tcgtccgggtctgacataggtaggt

SEQ ID NO: 17084 - DNA, 25 bp, Homo sapien
tcgtccgggtctcacataggtaggt

SEQ ID NO: 17085 - DNA, 25 bp, Homo sapien
gctctgtccgtactccacgggtagg

SEQ ID NO: 17086 - DNA, 25 bp, Homo sapien
gctctgtccgtagtccacgggtagg

SEQ ID NO: 17087 - DNA, 25 bp, Homo sapien
gtcccgtaactgtcgtcagaagagg

SEQ ID NO: 17088 - DNA, 25 bp, Homo sapien
gtcccgtaactgacgtcagaagagg

SEQ ID NO: 17089 - DNA, 25 bp, Homo sapien
gtcgggctcaagaagacgtcgaccg

SEQ ID NO: 17090 - DNA, 25 bp, Homo sapien
gtcgggctcaagtagacgtcgaccg

SEQ ID NO: 17091 - DNA, 25 bp, Homo sapien
gggtggctccggtcgtcgtctacac

SEQ ID NO: 17092 - DNA, 25 bp, Homo sapien
gggtggctccggacgtcgtctacac

SEQ ID NO: 17093 - DNA, 25 bp, Homo sapien
gacatacggtaatgatgattctcga

SEQ ID NO: 17094 - DNA, 25 bp, Homo sapien
gacatacggtaaagatgattctcga

SEQ ID NO: 17095 - DNA, 25 bp, Homo sapien
gtaaaggtcgacgaatattatcgtc

SEQ ID NO: 17096 - DNA, 25 bp, Homo sapien
gtaaaggtcgaccaatattatcgtc

SEQ ID NO: 17097 - DNA, 25 bp, Homo sapien
acctagaccggcggaaagtctaggc

SEQ ID NO: 17098 - DNA, 25 bp, Homo sapien
acctagaccggccgaaagtctaggc

SEQ ID NO: 17099 - DNA, 25 bp, Homo sapien
taatgtcaaacctggggttttacct

SEQ ID NO: 17100 - DNA, 25 bp, Homo sapien
taatgtcaaaccaggggttttacct

SEQ ID NO: 17101 - DNA, 25 bp, Homo sapien
agagaatcaaacaggaaaccacctc

SEQ ID NO: 17102 - DNA, 25 bp, Homo sapien
agagaatcaaactggaaaccacctc

SEQ ID NO: 17103 - DNA, 25 bp, Homo sapien
ggaggttcaagagtgacaatcattc

SEQ ID NO: 17104 - DNA, 25 bp, Homo sapien
ggaggttcaagactgacaatcattc

SEQ ID NO: 17105 - DNA, 25 bp, Homo sapien
gaaccaaacagacatgaggtcctgg

SEQ ID NO: 17106 - DNA, 25 bp, Homo sapien
gaaccaaacagagatgaggtcctgg

SEQ ID NO: 17107 - DNA, 25 bp, Homo sapien
acaagaatctgtgagggaatcccgg

SEQ ID NO: 17108 - DNA, 25 bp, Homo sapien
acaagaatctgtcagggaatcccgg

SEQ ID NO: 17109 - DNA, 25 bp, Homo sapien
tttactacgttaggtagtgcactta

SEQ ID NO: 17110 - DNA, 25 bp, Homo sapien
tttactacgttacgtagtgcactta

SEQ ID NO: 17111 - DNA, 25 bp, Homo sapien
atgttctgtctcattagccgtgtct

SEQ ID NO: 17112 - DNA, 25 bp, Homo sapien
atgttctgtctctttagccgtgtct

SEQ ID NO: 17113 - DNA, 25 bp, Homo sapien
aagttggtctaaagtttcgtcgtct

SEQ ID NO: 17114 - DNA, 25 bp, Homo sapien
aagttggtctaatgtttcgtcgtct

SEQ ID NO: 17115 - DNA, 25 bp, Homo sapien
cttccattatgtatctgttgacttg

SEQ ID NO: 17116 - DNA, 25 bp, Homo sapien
cttccattatgtttctgttgacttg

SEQ ID NO: 17117 - DNA, 25 bp, Homo sapien
catctgtgtgacaatcccgtctggt

SEQ ID NO: 17118 - DNA, 25 bp, Homo sapien
catctgtgtgactatcccgtctggt

SEQ ID NO: 17119 - DNA, 25 bp, Homo sapien
ttctggtaaattgacgtcggtctct

SEQ ID NO: 17120 - DNA, 25 bp, Homo sapien
ttctggtaaattcacgtcggtctct

SEQ ID NO: 17121 - DNA, 25 bp, Homo sapien
acctgtctgtcttcccgtggtcgtc

SEQ ID NO: 17122 - DNA, 25 bp, Homo sapien
acctgtctgtctacccgtggtcgtc

SEQ ID NO: 17123 - DNA, 25 bp, Homo sapien
cctgttcgtttatgcggttacgact

SEQ ID NO: 17124 - DNA, 25 bp, Homo sapien
cctgttcgtttaagcggttacgact

SEQ ID NO: 17125 - DNA, 25 bp, Homo sapien
cattctagggtgttcatcttataat

SEQ ID NO: 17126 - DNA, 25 bp, Homo sapien
cattctagggtgatcatcttataat

SEQ ID NO: 17127 - DNA, 25 bp, Homo sapien
ctgaaactagggccgtagcgcgtga

SEQ ID NO: 17128 - DNA, 25 bp, Homo sapien
ctgaaactaggggcgtagcgcgtga

SEQ ID NO: 17129 - DNA, 25 bp, Homo sapien
tatgcgacctttttcacgcgctacg

SEQ ID NO: 17130 - DNA, 25 bp, Homo sapien
tatgcgacctttatcacgcgctacg

SEQ ID NO: 17131 - DNA, 25 bp, Homo sapien
gctatgagtatctgcgacggcacga

SEQ ID NO: 17132 - DNA, 25 bp, Homo sapien
gctatgagtatcagcgacggcacga

SEQ ID NO: 17133 - DNA, 25 bp, Homo sapien
ccacctggacgaagtcgtggaacat

SEQ ID NO: 17134 - DNA, 25 bp, Homo sapien
ccacctggacgatgtcgtggaacat

SEQ ID NO: 17135 - DNA, 25 bp, Homo sapien
tcacccggaggacctcgtgggacga

SEQ ID NO: 17136 - DNA, 25 bp, Homo sapien
tcacccggaggagctcgtgggacga

SEQ ID NO: 17137 - DNA, 25 bp, Homo sapien
tgcgtccccgacagtgtttgggtac

SEQ ID NO: 17138 - DNA, 25 bp, Homo sapien
tgcgtccccgactgtgtttgggtac

SEQ ID NO: 17139 - DNA, 25 bp, Homo sapien
gtcgctcctcctcgttccggtagag

SEQ ID NO: 17140 - DNA, 25 bp, Homo sapien
gtcgctcctcctggttccggtagag

SEQ ID NO: 17141 - DNA, 25 bp, Homo sapien
cgtgtcacaccttttgtccgtataa

SEQ ID NO: 17142 - DNA, 25 bp, Homo sapien
cgtgtcacacctattgtccgtataa

SEQ ID NO: 17143 - DNA, 25 bp, Homo sapien
gtattatgtctttaaaacgacgaac

SEQ ID NO: 17144 - DNA, 25 bp, Homo sapien
gtattatgtcttaaaaacgacgaac

SEQ ID NO: 17145 - DNA, 25 bp, Homo sapien
gagatgtccttaagactatcgaaag

SEQ ID NO: 17146 - DNA, 25 bp, Homo sapien
gagatgtccttatgactatcgaaag

SEQ ID NO: 17147 - DNA, 25 bp, Homo sapien
cggtcacctgggttctcgactgtag

SEQ ID NO: 17148 - DNA, 25 bp, Homo sapien
cggtcacctgggatctcgactgtag

SEQ ID NO: 17149 - DNA, 25 bp, Homo sapien
ctcggcctacctgagcttcgcgtgt

SEQ ID NO: 17150 - DNA, 25 bp, Homo sapien
ctcggcctacctcagcttcgcgtgt

SEQ ID NO: 17151 - DNA, 25 bp, Homo sapien
ggtggaccgttctgaccgttccgtc

SEQ ID NO: 17152 - DNA, 25 bp, Homo sapien
ggtggaccgttcagaccgttccgtc

SEQ ID NO: 17153 - DNA, 25 bp, Homo sapien
tacaatgtagtgtcacgagattttc

SEQ ID NO: 17154 - DNA, 25 bp, Homo sapien
tacaatgtagtgacacgagattttc

SEQ ID NO: 17155 - DNA, 25 bp, Homo sapien
ggaaggagtcgtacacgtggaatcc

SEQ ID NO: 17156 - DNA, 25 bp, Homo sapien
ggaaggagtcgttcacgtggaatcc

SEQ ID NO: 17157 - DNA, 25 bp, Homo sapien
gagacggatcgtcttcctcagtgtc

SEQ ID NO: 17158 - DNA, 25 bp, Homo sapien
gagacggatcgtgttcctcagtgtc

SEQ ID NO: 17159 - DNA, 25 bp, Homo sapien
gtaccggggtgacctcgtcacgaga

SEQ ID NO: 17160 - DNA, 25 bp, Homo sapien
gtaccggggtgagctcgtcacgaga

SEQ ID NO: 17161 - DNA, 25 bp, Homo sapien
tcgtcgagtttcctactgttataag

SEQ ID NO: 17162 - DNA, 25 bp, Homo sapien
tcgtcgagtttcgtactgttataag

SEQ ID NO: 17163 - DNA, 25 bp, Homo sapien
aagtcgtttcataacgtcttacagt

SEQ ID NO: 17164 - DNA, 25 bp, Homo sapien
aagtcgtttcattacgtcttacagt

SEQ ID NO: 17165 - DNA, 25 bp, Homo sapien
atcacaagtgtcttgattttgacag

SEQ ID NO: 17166 - DNA, 25 bp, Homo sapien
atcacaagtgtcatgattttgacag

SEQ ID NO: 17167 - DNA, 25 bp, Homo sapien
ccagatgtgtgtcgatgtattgcta

SEQ ID NO: 17168 - DNA, 25 bp, Homo sapien
ccagatgtgtgtggatgtattgcta

SEQ ID NO: 17169 - DNA, 25 bp, Homo sapien
aagtaacatgtcgtattgtttcacg

SEQ ID NO: 17170 - DNA, 25 bp, Homo sapien
aagtaacatgtcctattgtttcacg

SEQ ID NO: 17171 - DNA, 25 bp, Homo sapien
gacgataaatgttttctgttcatat

SEQ ID NO: 17172 - DNA, 25 bp, Homo sapien
gacgataaatgtattctgttcatat

SEQ ID NO: 17173 - DNA, 25 bp, Homo sapien
acaaagtaactaagagtgtctcatt

SEQ ID NO: 17174 - DNA, 25 bp, Homo sapien
acaaagtaactatgagtgtctcatt

SEQ ID NO: 17175 - DNA, 25 bp, Homo sapien
taatagagtaatttttcgtacatag

SEQ ID NO: 17176 - DNA, 25 bp, Homo sapien
taatagagtaatatttcgtacatag

SEQ ID NO: 17177 - DNA, 25 bp, Homo sapien
tagagacgactaacgaattttatct

SEQ ID NO: 17178 - DNA, 25 bp, Homo sapien
tagagacgactatcgaattttatct

SEQ ID NO: 17179 - DNA, 25 bp, Homo sapien
cagtaacgatggactagtgttatac

SEQ ID NO: 17180 - DNA, 25 bp, Homo sapien
cagtaacgatggtctagtgttatac

SEQ ID NO: 17181 - DNA, 25 bp, Homo sapien
acaggacagtccaggagtcgttaca

SEQ ID NO: 17182 - DNA, 25 bp, Homo sapien
acaggacagtcctggagtcgttaca

SEQ ID NO: 17183 - DNA, 25 bp, Homo sapien
aaagggtcctctgaatacgtgaagt

SEQ ID NO: 17184 - DNA, 25 bp, Homo sapien
aaagggtcctctcaatacgtgaagt

SEQ ID NO: 17185 - DNA, 25 bp, Homo sapien
gatgacatcctcctatagtcttgta

SEQ ID NO: 17186 - DNA, 25 bp, Homo sapien
gatgacatcctcgtatagtcttgta

SEQ ID NO: 17187 - DNA, 25 bp, Homo sapien
cattaaactcgtcactgtaatgtga

SEQ ID NO: 17188 - DNA, 25 bp, Homo sapien
cattaaactcgtgactgtaatgtga

SEQ ID NO: 17189 - DNA, 25 bp, Homo sapien
catggaatctcgttgtacgtttcga

SEQ ID NO: 17190 - DNA, 25 bp, Homo sapien
catggaatctcgatgtacgtttcga

SEQ ID NO: 17191 - DNA, 25 bp, Homo sapien
tcgatacttagacgtgactttcagt

SEQ ID NO: 17192 - DNA, 25 bp, Homo sapien
tcgatacttagaggtgactttcagt

SEQ ID NO: 17193 - DNA, 25 bp, Homo sapien
cccgggacttctagtgtagattcaa

SEQ ID NO: 17194 - DNA, 25 bp, Homo sapien
cccgggacttcttgtgtagattcaa

SEQ ID NO: 17195 - DNA, 25 bp, Homo sapien
tcgaggtcaggtctcggacttcaca

SEQ ID NO: 17196 - DNA, 25 bp, Homo sapien
tcgaggtcaggtgtcggacttcaca

SEQ ID NO: 17197 - DNA, 25 bp, Homo sapien
gaggtccgcgtcaccgagagaccct

SEQ ID NO: 17198 - DNA, 25 bp, Homo sapien
gaggtccgcgtctccgagagaccct

SEQ ID NO: 17199 - DNA, 25 bp, Homo sapien
gctctcctactctcacagtgacaga

SEQ ID NO: 17200 - DNA, 25 bp, Homo sapien
gctctcctactcacacagtgacaga

SEQ ID NO: 17201 - DNA, 25 bp, Homo sapien
ttcagttactctctacggtagtgaa

SEQ ID NO: 17202 - DNA, 25 bp, Homo sapien
ttcagttactctgtacggtagtgaa

SEQ ID NO: 17203 - DNA, 25 bp, Homo sapien
cttgaacttaggttactcgttttat

SEQ ID NO: 17204 - DNA, 25 bp, Homo sapien
cttgaacttaggatactcgttttat

SEQ ID NO: 17205 - DNA, 25 bp, Homo sapien
cctcattattacattccgtgtttgg

SEQ ID NO: 17206 - DNA, 25 bp, Homo sapien
cctcattattactttccgtgtttgg

SEQ ID NO: 17207 - DNA, 25 bp, Homo sapien
tatcacgttttttcgacaataatgg

SEQ ID NO: 17208 - DNA, 25 bp, Homo sapien
tatcacgtttttacgacaataatgg

SEQ ID NO: 17209 - DNA, 25 bp, Homo sapien
tccttttgtcgaggaatctctctcg

SEQ ID NO: 17210 - DNA, 25 bp, Homo sapien
tccttttgtcgacgaatctctctcg

SEQ ID NO: 17211 - DNA, 25 bp, Homo sapien
cttctcacacgattagtccttcgtg

SEQ ID NO: 17212 - DNA, 25 bp, Homo sapien
cttctcacacgaatagtccttcgtg

SEQ ID NO: 17213 - DNA, 25 bp, Homo sapien
cttcttaggaactgacgtctgtgcg

SEQ ID NO: 17214 - DNA, 25 bp, Homo sapien
cttcttaggaacagacgtctgtgcg

SEQ ID NO: 17215 - DNA, 25 bp, Homo sapien
cgtcttcttcgacgagttacttccg

SEQ ID NO: 17216 - DNA, 25 bp, Homo sapien
cgtcttcttcgaggagttacttccg

SEQ ID NO: 17217 - DNA, 25 bp, Homo sapien
ggttcgtctttgacggtttacatta

SEQ ID NO: 17218 - DNA, 25 bp, Homo sapien
ggttcgtctttgtcggtttacatta

SEQ ID NO: 17219 - DNA, 25 bp, Homo sapien
tttgggtcgttcttcgtagtacagt

SEQ ID NO: 17220 - DNA, 25 bp, Homo sapien
tttgggtcgttcatcgtagtacagt

SEQ ID NO: 17221 - DNA, 25 bp, Homo sapien
cgtgaccgtcggagacgtctctacg

SEQ ID NO: 17222 - DNA, 25 bp, Homo sapien
cgtgaccgtcggtgacgtctctacg

SEQ ID NO: 17223 - DNA, 25 bp, Homo sapien
tgtatacacgggtactactactcct

SEQ ID NO: 17224 - DNA, 25 bp, Homo sapien
tgtatacacgggaactactactcct

SEQ ID NO: 17225 - DNA, 25 bp, Homo sapien
cacctaggcgacgagtcgggtccgc

SEQ ID NO: 17226 - DNA, 25 bp, Homo sapien
cacctaggcgaccagtcgggtccgc

SEQ ID NO: 17227 - DNA, 25 bp, Homo sapien
aaccgtggtctactcttctctccgg

SEQ ID NO: 17228 - DNA, 25 bp, Homo sapien
aaccgtggtctagtcttctctccgg

SEQ ID NO: 17229 - DNA, 25 bp, Homo sapien
ttaccaagtcgaatttcgaccactg

SEQ ID NO: 17230 - DNA, 25 bp, Homo sapien
ttaccaagtcgattttcgaccactg

SEQ ID NO: 17231 - DNA, 25 bp, Homo sapien
taacgaaaagatactgtgacccgtc

SEQ ID NO: 17232 - DNA, 25 bp, Homo sapien
taacgaaaagattctgtgacccgtc

SEQ ID NO: 17233 - DNA, 25 bp, Homo sapien
taaagacgaacttcactgaagtctc

SEQ ID NO: 17234 - DNA, 25 bp, Homo sapien
taaagacgaactacactgaagtctc

SEQ ID NO: 17235 - DNA, 25 bp, Homo sapien
attaaagaacaggacaccaagtcga

SEQ ID NO: 17236 - DNA, 25 bp, Homo sapien
attaaagaacagcacaccaagtcga

SEQ ID NO: 17237 - DNA, 25 bp, Homo sapien
tgtaatagaagacatccctatcgat

SEQ ID NO: 17238 - DNA, 25 bp, Homo sapien
tgtaatagaagagatccctatcgat

SEQ ID NO: 17239 - DNA, 25 bp, Homo sapien
cgtgaggacggaagactcccctaga

SEQ ID NO: 17240 - DNA, 25 bp, Homo sapien
cgtgaggacggatgactcccctaga

SEQ ID NO: 17241 - DNA, 25 bp, Homo sapien
aagactgtagagtttaatgccacaa

SEQ ID NO: 17242 - DNA, 25 bp, Homo sapien
aagactgtagagattaatgccacaa

SEQ ID NO: 17243 - DNA, 25 bp, Homo sapien
caagtaggatcttaacacaaacagt

SEQ ID NO: 17244 - DNA, 25 bp, Homo sapien
caagtaggatctaaacacaaacagt

SEQ ID NO: 17245 - DNA, 25 bp, Homo sapien
gcaagtggagtgtcagtatagacca

SEQ ID NO: 17246 - DNA, 25 bp, Homo sapien
gcaagtggagtgacagtatagacca

SEQ ID NO: 17247 - DNA, 25 bp, Homo sapien
ccggagagacggaaaagaaccacac

SEQ ID NO: 17248 - DNA, 25 bp, Homo sapien
ccggagagacggtaaagaaccacac

SEQ ID NO: 17249 - DNA, 25 bp, Homo sapien
gaagaaccgaacatagtcccacact

SEQ ID NO: 17250 - DNA, 25 bp, Homo sapien
gaagaaccgaacttagtcccacact

SEQ ID NO: 17251 - DNA, 25 bp, Homo sapien
acttctacgacaactctttcaaact

SEQ ID NO: 17252 - DNA, 25 bp, Homo sapien
acttctacgacatctctttcaaact

SEQ ID NO: 17253 - DNA, 25 bp, Homo sapien
ccaacggaaatcctcctcagtacga

SEQ ID NO: 17254 - DNA, 25 bp, Homo sapien
ccaacggaaatcgtcctcagtacga

SEQ ID NO: 17255 - DNA, 25 bp, Homo sapien
taaaggaatagttgcatctagtctc

SEQ ID NO: 17256 - DNA, 25 bp, Homo sapien
taaaggaatagtagcatctagtctc

SEQ ID NO: 17257 - DNA, 25 bp, Homo sapien
gagagggtgacgacgacctcgttcc

SEQ ID NO: 17258 - DNA, 25 bp, Homo sapien
gagagggtgacgtcgacctcgttcc

SEQ ID NO: 17259 - DNA, 25 bp, Homo sapien
gtcggtgctgagctactcgtcgtcc

SEQ ID NO: 17260 - DNA, 25 bp, Homo sapien
gtcggtgctgaggtactcgtcgtcc

SEQ ID NO: 17261 - DNA, 25 bp, Homo sapien
ccggtgacgtccagcgtcggacgtc

SEQ ID NO: 17262 - DNA, 25 bp, Homo sapien
ccggtgacgtcctgcgtcggacgtc

SEQ ID NO: 17263 - DNA, 25 bp, Homo sapien
aaggggtccgccacgagcctacatc

SEQ ID NO: 17264 - DNA, 25 bp, Homo sapien
aaggggtccgcctcgagcctacatc

SEQ ID NO: 17265 - DNA, 25 bp, Homo sapien
tgtcggaggaacgactcggtctgac

SEQ ID NO: 17266 - DNA, 25 bp, Homo sapien
tgtcggaggaaccactcggtctgac

SEQ ID NO: 17267 - DNA, 25 bp, Homo sapien
attgtggtgagtcacactctgctca

SEQ ID NO: 17268 - DNA, 25 bp, Homo sapien
attgtggtgagtgacactctgctca

SEQ ID NO: 17269 - DNA, 25 bp, Homo sapien
tagaggtagtagtctctccgagtta

SEQ ID NO: 17270 - DNA, 25 bp, Homo sapien
tagaggtagtagactctccgagtta

SEQ ID NO: 17271 - DNA, 25 bp, Homo sapien
ccatagtgatagacacggtggtatg

SEQ ID NO: 17272 - DNA, 25 bp, Homo sapien
ccatagtgatagtcacggtggtatg

SEQ ID NO: 17273 - DNA, 25 bp, Homo sapien
tctagttataatcaccgtggtcgta

SEQ ID NO: 17274 - DNA, 25 bp, Homo sapien
tctagttataatgaccgtggtcgta

SEQ ID NO: 17275 - DNA, 25 bp, Homo sapien
atcgtctcactccacacctgagtga

SEQ ID NO: 17276 - DNA, 25 bp, Homo sapien
atcgtctcactcgacacctgagtga

SEQ ID NO: 17277 - DNA, 25 bp, Homo sapien
aactgtatacagtacccatgttgat

SEQ ID NO: 17278 - DNA, 25 bp, Homo sapien
aactgtatacagaacccatgttgat

SEQ ID NO: 17279 - DNA, 25 bp, Homo sapien
ccgaaagacgtctctacgaatgaaa

SEQ ID NO: 17280 - DNA, 25 bp, Homo sapien
ccgaaagacgtcactacgaatgaaa

SEQ ID NO: 17281 - DNA, 25 bp, Homo sapien
taacgaggtgttcttttacatatac

SEQ ID NO: 17282 - DNA, 25 bp, Homo sapien
taacgaggtgttgttttacatatac

SEQ ID NO: 17283 - DNA, 25 bp, Homo sapien
actaccttgatgttattcttttact

SEQ ID NO: 17284 - DNA, 25 bp, Homo sapien
actaccttgatgatattcttttact

SEQ ID NO: 17285 - DNA, 25 bp, Homo sapien
agtgtactttctgatcgtaattgac

SEQ ID NO: 17286 - DNA, 25 bp, Homo sapien
agtgtactttctcatcgtaattgac

SEQ ID NO: 17287 - DNA, 25 bp, Homo sapien
actacgtgggttaactgtctctgga

SEQ ID NO: 17288 - DNA, 25 bp, Homo sapien
actacgtgggtttactgtctctgga

SEQ ID NO: 17289 - DNA, 25 bp, Homo sapien
acgtccgtccgtttgtcggggtcgt

SEQ ID NO: 17290 - DNA, 25 bp, Homo sapien
acgtccgtccgtatgtcggggtcgt

SEQ ID NO: 17291 - DNA, 25 bp, Homo sapien
tcttctagtcgtactccccgtgtct

SEQ ID NO: 17292 - DNA, 25 bp, Homo sapien
tcttctagtcgttctccccgtgtct

SEQ ID NO: 17293 - DNA, 25 bp, Homo sapien
aatgttctcgtctccgttaccactg

SEQ ID NO: 17294 - DNA, 25 bp, Homo sapien
aatgttctcgtcaccgttaccactg

SEQ ID NO: 17295 - DNA, 25 bp, Homo sapien
tcaggtcctcggactgttcacctgt

SEQ ID NO: 17296 - DNA, 25 bp, Homo sapien
tcaggtcctcggtctgttcacctgt

SEQ ID NO: 17297 - DNA, 25 bp, Homo sapien
tgacggttgtggacgtcgttccccg

SEQ ID NO: 17298 - DNA, 25 bp, Homo sapien
tgacggttgtggtcgtcgttccccg

SEQ ID NO: 17299 - DNA, 25 bp, Homo sapien
ttgataggagattcggtgtcgaacc

SEQ ID NO: 17300 - DNA, 25 bp, Homo sapien
ttgataggagatacggtgtcgaacc

SEQ ID NO: 17301 - DNA, 25 bp, Homo sapien
aggacgtcaatgactactataattt

SEQ ID NO: 17302 - DNA, 25 bp, Homo sapien
aggacgtcaatgtctactataattt

SEQ ID NO: 17303 - DNA, 25 bp, Homo sapien
ggacgggactgacgtatttacaact

SEQ ID NO: 17304 - DNA, 25 bp, Homo sapien
ggacgggactgaggtatttacaact

SEQ ID NO: 17305 - DNA, 25 bp, Homo sapien
gtactcgtccatggtactctccctt

SEQ ID NO: 17306 - DNA, 25 bp, Homo sapien
gtactcgtccatcgtactctccctt

SEQ ID NO: 17307 - DNA, 25 bp, Homo sapien
attttgttcagtagaagtacatctc

SEQ ID NO: 17308 - DNA, 25 bp, Homo sapien
attttgttcagttgaagtacatctc

SEQ ID NO: 17309 - DNA, 25 bp, Homo sapien
gttctctgatttcacatgattacgt

SEQ ID NO: 17310 - DNA, 25 bp, Homo sapien
gttctctgatttgacatgattacgt

SEQ ID NO: 17311 - DNA, 25 bp, Homo sapien
agtgttttgtcgtgacgtaccaaag

SEQ ID NO: 17312 - DNA, 25 bp, Homo sapien
agtgttttgtcgagacgtaccaaag

SEQ ID NO: 17313 - DNA, 25 bp, Homo sapien
aatttttacgtctcagtcagtgtta

SEQ ID NO: 17314 - DNA, 25 bp, Homo sapien
aatttttacgtcacagtcagtgtta

SEQ ID NO: 17315 - DNA, 25 bp, Homo sapien
ggaacctacgacttaacgagacgtt

SEQ ID NO: 17316 - DNA, 25 bp, Homo sapien
ggaacctacgacataacgagacgtt

SEQ ID NO: 17317 - DNA, 25 bp, Homo sapien
atttcgtgactttgattccgattgt

SEQ ID NO: 17318 - DNA, 25 bp, Homo sapien
atttcgtgacttagattccgattgt

SEQ ID NO: 17319 - DNA, 25 bp, Homo sapien
ttattttggtttagctccgacctcg

SEQ ID NO: 17320 - DNA, 25 bp, Homo sapien
ttattttggttttgctccgacctcg

SEQ ID NO: 17321 - DNA, 25 bp, Homo sapien
gttagttcctgttcttcaacttatg

SEQ ID NO: 17322 - DNA, 25 bp, Homo sapien
gttagttcctgtacttcaacttatg

SEQ ID NO: 17323 - DNA, 25 bp, Homo sapien
gtctctttcccaattctctcggttg

SEQ ID NO: 17324 - DNA, 25 bp, Homo sapien
gtctctttcccatttctctcggttg

SEQ ID NO: 17325 - DNA, 25 bp, Homo sapien
gtttctgtgtccattattacccctg

SEQ ID NO: 17326 - DNA, 25 bp, Homo sapien
gtttctgtgtcctttattacccctg

SEQ ID NO: 17327 - DNA, 25 bp, Homo sapien
tccgtgttccatgtacacgattaca

SEQ ID NO: 17328 - DNA, 25 bp, Homo sapien
tccgtgttccatctacacgattaca

SEQ ID NO: 17329 - DNA, 25 bp, Homo sapien
atgatatgtcgtcgttcttcaatca

SEQ ID NO: 17330 - DNA, 25 bp, Homo sapien
atgatatgtcgtggttcttcaatca

SEQ ID NO: 17331 - DNA, 25 bp, Homo sapien
gcttaagcgagaacccgtcactcat

SEQ ID NO: 17332 - DNA, 25 bp, Homo sapien
gcttaagcgagatcccgtcactcat

SEQ ID NO: 17333 - DNA, 25 bp, Homo sapien
ttctctaagttctagagtgtactca

SEQ ID NO: 17334 - DNA, 25 bp, Homo sapien
ttctctaagttcaagagtgtactca

SEQ ID NO: 17335 - DNA, 25 bp, Homo sapien
tcttcttaagtacctgtatgttatg

SEQ ID NO: 17336 - DNA, 25 bp, Homo sapien
tcttcttaagtagctgtatgttatg

SEQ ID NO: 17337 - DNA, 25 bp, Homo sapien
agaccatgattactctgatattatg

SEQ ID NO: 17338 - DNA, 25 bp, Homo sapien
agaccatgattagtctgatattatg

SEQ ID NO: 17339 - DNA, 25 bp, Homo sapien
aactagaccttctccggtatcagtt

SEQ ID NO: 17340 - DNA, 25 bp, Homo sapien
aactagaccttcaccggtatcagtt

SEQ ID NO: 17341 - DNA, 25 bp, Homo sapien
tactagggtcggacacacagggtcg

SEQ ID NO: 17342 - DNA, 25 bp, Homo sapien
tactagggtcggtcacacagggtcg

SEQ ID NO: 17343 - DNA, 25 bp, Homo sapien
caaaaagagtggtaccagaagttcg

SEQ ID NO: 17344 - DNA, 25 bp, Homo sapien
caaaaagagtggaaccagaagttcg

SEQ ID NO: 17345 - DNA, 25 bp, Homo sapien
atacaggaccagaagaccgggtgcg

SEQ ID NO: 17346 - DNA, 25 bp, Homo sapien
atacaggaccagtagaccgggtgcg

SEQ ID NO: 17347 - DNA, 25 bp, Homo sapien
ttcgacgaccaaagtgtcaggtctc

SEQ ID NO: 17348 - DNA, 25 bp, Homo sapien
ttcgacgaccaatgtgtcaggtctc

SEQ ID NO: 17349 - DNA, 25 bp, Homo sapien
gtaccgagaccctcgctgggtgtct

SEQ ID NO: 17350 - DNA, 25 bp, Homo sapien
gtaccgagacccacgctgggtgtct

SEQ ID NO: 17351 - DNA, 25 bp, Homo sapien
gcccgtcgtccatcctgagtttact

SEQ ID NO: 17352 - DNA, 25 bp, Homo sapien
gcccgtcgtccaacctgagtttact

SEQ ID NO: 17353 - DNA, 25 bp, Homo sapien
cagagtagacccaacctaggtttct

SEQ ID NO: 17354 - DNA, 25 bp, Homo sapien
cagagtagaccctacctaggtttct

SEQ ID NO: 17355 - DNA, 25 bp, Homo sapien
ttcttcgacgaccaaagtgtcaggt

SEQ ID NO: 17356 - DNA, 25 bp, Homo sapien
ttcttcgacgacgaaagtgtcaggt

SEQ ID NO: 17357 - DNA, 25 bp, Homo sapien
ttctcgtcgacagttacggtaaatg

SEQ ID NO: 17358 - DNA, 25 bp, Homo sapien
ttctcgtcgacacttacggtaaatg

SEQ ID NO: 17359 - DNA, 25 bp, Homo sapien
tttatttgacaaaggactccaatgt

SEQ ID NO: 17360 - DNA, 25 bp, Homo sapien
tttatttgacaatggactccaatgt

SEQ ID NO: 17361 - DNA, 25 bp, Homo sapien
gtgtgtgtccggttaggttccaatc

SEQ ID NO: 17362 - DNA, 25 bp, Homo sapien
gtgtgtgtccggataggttccaatc

SEQ ID NO: 17363 - DNA, 25 bp, Homo sapien
ctctttcgccggtttgttaccaaac

SEQ ID NO: 17364 - DNA, 25 bp, Homo sapien
ctctttcgccggattgttaccaaac

SEQ ID NO: 17365 - DNA, 25 bp, Homo sapien
tgacttacacactaaataatacaaa

SEQ ID NO: 17366 - DNA, 25 bp, Homo sapien
tgacttacacacaaaataatacaaa

SEQ ID NO: 17367 - DNA, 25 bp, Homo sapien
cggcaaacaagatgtaccaaactat

SEQ ID NO: 17368 - DNA, 25 bp, Homo sapien
cggcaaacaagaagtaccaaactat

SEQ ID NO: 17369 - DNA, 25 bp, Homo sapien
gagaaagtcacaagatcctatttat

SEQ ID NO: 17370 - DNA, 25 bp, Homo sapien
gagaaagtcacatgatcctatttat

SEQ ID NO: 17371 - DNA, 25 bp, Homo sapien
gtgaacgaatatgacccactttact

SEQ ID NO: 17372 - DNA, 25 bp, Homo sapien
gtgaacgaatatcacccactttact

SEQ ID NO: 17373 - DNA, 25 bp, Homo sapien
gcgcgtctagggtccccagtactag

SEQ ID NO: 17374 - DNA, 25 bp, Homo sapien
gcgcgtctagggaccccagtactag

SEQ ID NO: 17375 - DNA, 25 bp, Homo sapien
gtctcgtggtcgacgccccgacgat

SEQ ID NO: 17376 - DNA, 25 bp, Homo sapien
gtctcgtggtcgtcgccccgacgat

SEQ ID NO: 17377 - DNA, 25 bp, Homo sapien
accggattgatgtcgacccaaacgt

SEQ ID NO: 17378 - DNA, 25 bp, Homo sapien
accggattgatgacgacccaaacgt

SEQ ID NO: 17379 - DNA, 25 bp, Homo sapien
ctctagccagtatgacagtccataa

SEQ ID NO: 17380 - DNA, 25 bp, Homo sapien
ctctagccagtaagacagtccataa

SEQ ID NO: 17381 - DNA, 25 bp, Homo sapien
cgactctgcggacgaaccatcgtct

SEQ ID NO: 17382 - DNA, 25 bp, Homo sapien
cgactctgcggaggaaccatcgtct

SEQ ID NO: 17383 - DNA, 25 bp, Homo sapien
gactcgtggttcgtctccctcgact

SEQ ID NO: 17384 - DNA, 25 bp, Homo sapien
gactcgtggttcctctccctcgact

SEQ ID NO: 17385 - DNA, 25 bp, Homo sapien
ggtgtcacactttccctgtggtgga

SEQ ID NO: 17386 - DNA, 25 bp, Homo sapien
ggtgtcacacttaccctgtggtgga

SEQ ID NO: 17387 - DNA, 25 bp, Homo sapien
tgtctcgtgttctgtggtgacggta

SEQ ID NO: 17388 - DNA, 25 bp, Homo sapien
tgtctcgtgttcagtggtgacggta

SEQ ID NO: 17389 - DNA, 25 bp, Homo sapien
tgttcccccgttcatggtcacggac

SEQ ID NO: 17390 - DNA, 25 bp, Homo sapien
tgttcccccgttgatggtcacggac

SEQ ID NO: 17391 - DNA, 25 bp, Homo sapien
ctctttacaagtctctacgacgacg

SEQ ID NO: 17392 - DNA, 25 bp, Homo sapien
ctctttacaagtgtctacgacgacg

SEQ ID NO: 17393 - DNA, 25 bp, Homo sapien
acactaatacattccgtctagtcgg

SEQ ID NO: 17394 - DNA, 25 bp, Homo sapien
acactaatacataccgtctagtcgg

SEQ ID NO: 17395 - DNA, 25 bp, Homo sapien
agtggtatggtgtgtaaacccccta

SEQ ID NO: 17396 - DNA, 25 bp, Homo sapien
agtggtatggtgagtaaacccccta

SEQ ID NO: 17397 - DNA, 25 bp, Homo sapien
tagacaagaggtttccatcactttt

SEQ ID NO: 17398 - DNA, 25 bp, Homo sapien
tagacaagaggtatccatcactttt

SEQ ID NO: 17399 - DNA, 25 bp, Homo sapien
aacaaggatatgtcacaaaagttac

SEQ ID NO: 17400 - DNA, 25 bp, Homo sapien
aacaaggatatgacacaaaagttac

SEQ ID NO: 17401 - DNA, 25 bp, Homo sapien
acgtaaaatggtacccaggagttat

SEQ ID NO: 17402 - DNA, 25 bp, Homo sapien
acgtaaaatggttcccaggagttat

SEQ ID NO: 17403 - DNA, 25 bp, Homo sapien
tcaaagagtcggatttaggcacttt

SEQ ID NO: 17404 - DNA, 25 bp, Homo sapien
tcaaagagtcggttttaggcacttt

SEQ ID NO: 17405 - DNA, 25 bp, Homo sapien
taaaagactgtttcgtttacaagtc

SEQ ID NO: 17406 - DNA, 25 bp, Homo sapien
taaaagactgttacgtttacaagtc

SEQ ID NO: 17407 - DNA, 25 bp, Homo sapien
taaatctaggtgtatctctatgtgc

SEQ ID NO: 17408 - DNA, 25 bp, Homo sapien
taaatctaggtgaatctctatgtgc

SEQ ID NO: 17409 - DNA, 25 bp, Homo sapien
gagtcacgagggtgttcgtagtacc

SEQ ID NO: 17410 - DNA, 25 bp, Homo sapien
gagtcacgagggagttcgtagtacc

SEQ ID NO: 17411 - DNA, 25 bp, Homo sapien
gagactctatttactcacgatcacg

SEQ ID NO: 17412 - DNA, 25 bp, Homo sapien
gagactctattttctcacgatcacg

SEQ ID NO: 17413 - DNA, 25 bp, Homo sapien
tcaactaggttacgtcgtccattac

SEQ ID NO: 17414 - DNA, 25 bp, Homo sapien
tcaactaggttaggtcgtccattac

SEQ ID NO: 17415 - DNA, 25 bp, Homo sapien
acaggagaagtcaggtcaacttgac

SEQ ID NO: 17416 - DNA, 25 bp, Homo sapien
acaggagaagtctggtcaacttgac

SEQ ID NO: 17417 - DNA, 25 bp, Homo sapien
aactaggaggactcttcccgtcctt

SEQ ID NO: 17418 - DNA, 25 bp, Homo sapien
aactaggaggacacttcccgtcctt

SEQ ID NO: 17419 - DNA, 25 bp, Homo sapien
tgtagtcaagacgtttccgtccctt

SEQ ID NO: 17420 - DNA, 25 bp, Homo sapien
tgtagtcaagacctttccgtccctt

SEQ ID NO: 17421 - DNA, 25 bp, Homo sapien
cgtggagacatatccgggccggacc

SEQ ID NO: 17422 - DNA, 25 bp, Homo sapien
cgtggagacataaccgggccggacc

SEQ ID NO: 17423 - DNA, 25 bp, Homo sapien
tcgagggagaacttgaggtccccct

SEQ ID NO: 17424 - DNA, 25 bp, Homo sapien
tcgagggagaacatgaggtccccct

SEQ ID NO: 17425 - DNA, 25 bp, Homo sapien
tggtcgcaggaaagggcgtccactc

SEQ ID NO: 17426 - DNA, 25 bp, Homo sapien
tggtcgcaggaatgggcgtccactc

SEQ ID NO: 17427 - DNA, 25 bp, Homo sapien
tatgttttcagttcggggttccact

SEQ ID NO: 17428 - DNA, 25 bp, Homo sapien
tatgttttcagtacggggttccact

SEQ ID NO: 17429 - DNA, 25 bp, Homo sapien
aagttactgggttaccatagtttca

SEQ ID NO: 17430 - DNA, 25 bp, Homo sapien
aagttactgggtaaccatagtttca

SEQ ID NO: 17431 - DNA, 25 bp, Homo sapien
gatttcttcacaacgaattgtgcac

SEQ ID NO: 17432 - DNA, 25 bp, Homo sapien
gatttcttcacatcgaattgtgcac

SEQ ID NO: 17433 - DNA, 25 bp, Homo sapien
tttccgtaccgtcacctctggtcat

SEQ ID NO: 17434 - DNA, 25 bp, Homo sapien
tttccgtaccgtgacctctggtcat

SEQ ID NO: 17435 - DNA, 25 bp, Homo sapien
ggtaacgacttcatccattttatgt

SEQ ID NO: 17436 - DNA, 25 bp, Homo sapien
ggtaacgacttcttccattttatgt

SEQ ID NO: 17437 - DNA, 25 bp, Homo sapien
gaacatatacgactgacccttgtca

SEQ ID NO: 17438 - DNA, 25 bp, Homo sapien
gaacatatacgagtgacccttgtca

SEQ ID NO: 17439 - DNA, 25 bp, Homo sapien
gagacaatactttttacctctgaag

SEQ ID NO: 17440 - DNA, 25 bp, Homo sapien
gagacaatacttattacctctgaag

SEQ ID NO: 17441 - DNA, 25 bp, Homo sapien
gaaacacctaaaggtgtcacgtaaa

SEQ ID NO: 17442 - DNA, 25 bp, Homo sapien
gaaacacctaaacgtgtcacgtaaa

SEQ ID NO: 17443 - DNA, 25 bp, Homo sapien
gaagacggacaagacgtcaacagaa

SEQ ID NO: 17444 - DNA, 25 bp, Homo sapien
gaagacggacaacacgtcaacagaa

SEQ ID NO: 17445 - DNA, 25 bp, Homo sapien
ggtagagtaaccaaaccttaccatt

SEQ ID NO: 17446 - DNA, 25 bp, Homo sapien
ggtagagtaacctaaccttaccatt

SEQ ID NO: 17447 - DNA, 25 bp, Homo sapien
ccgaacgacaagaacctgtcctcta

SEQ ID NO: 17448 - DNA, 25 bp, Homo sapien
ccgaacgacaagtacctgtcctcta

SEQ ID NO: 17449 - DNA, 25 bp, Homo sapien
tctcccatggtctcgacgcgtctat

SEQ ID NO: 17450 - DNA, 25 bp, Homo sapien
tctcccatggtcacgacgcgtctat

SEQ ID NO: 17451 - DNA, 25 bp, Homo sapien
cgtccagtattcactacgacctcga

SEQ ID NO: 17452 - DNA, 25 bp, Homo sapien
cgtccagtattctctacgacctcga

SEQ ID NO: 17453 - DNA, 25 bp, Homo sapien
aggttttttcgaagtacgatctcga

SEQ ID NO: 17454 - DNA, 25 bp, Homo sapien
aggttttttcgatgtacgatctcga

SEQ ID NO: 17455 - DNA, 25 bp, Homo sapien
ctaggtagggtacgacagaacttga

SEQ ID NO: 17456 - DNA, 25 bp, Homo sapien
ctaggtagggtaggacagaacttga

SEQ ID NO: 17457 - DNA, 25 bp, Homo sapien
ggttgtagttgtgacactacttcaa

SEQ ID NO: 17458 - DNA, 25 bp, Homo sapien
ggttgtagttgtcacactacttcaa

SEQ ID NO: 17459 - DNA, 25 bp, Homo sapien
ttgtttgttggtacatctgtacgac

SEQ ID NO: 17460 - DNA, 25 bp, Homo sapien
ttgtttgttggttcatctgtacgac

SEQ ID NO: 17461 - DNA, 25 bp, Homo sapien
tacaggtgtaggagactcttcgact

SEQ ID NO: 17462 - DNA, 25 bp, Homo sapien
tacaggtgtaggtgactcttcgact

SEQ ID NO: 17463 - DNA, 25 bp, Homo sapien
ttcgaggaagagacgagtactttac

SEQ ID NO: 17464 - DNA, 25 bp, Homo sapien
ttcgaggaagagtcgagtactttac

SEQ ID NO: 17465 - DNA, 25 bp, Homo sapien
atgttgaggtagtacagacgtgacc

SEQ ID NO: 17466 - DNA, 25 bp, Homo sapien
atgttgaggtagaacagacgtgacc

SEQ ID NO: 17467 - DNA, 25 bp, Homo sapien
gtttttctatggagtaaatacccct

SEQ ID NO: 17468 - DNA, 25 bp, Homo sapien
gtttttctatggtgtaaatacccct

SEQ ID NO: 17469 - DNA, 25 bp, Homo sapien
ctttgccacgtaagcgtgtcgccgt

SEQ ID NO: 17470 - DNA, 25 bp, Homo sapien
ctttgccacgtatgcgtgtcgccgt

SEQ ID NO: 17471 - DNA, 25 bp, Homo sapien
ctgtttccgatatgtcgtataacct

SEQ ID NO: 17472 - DNA, 25 bp, Homo sapien
ctgtttccgataagtcgtataacct

SEQ ID NO: 17473 - DNA, 25 bp, Homo sapien
tagtgtccttacaacgtacgcccta

SEQ ID NO: 17474 - DNA, 25 bp, Homo sapien
tagtgtccttactacgtacgcccta

SEQ ID NO: 17475 - DNA, 25 bp, Homo sapien
actatgggggtttgtatccccgtat

SEQ ID NO: 17476 - DNA, 25 bp, Homo sapien
actatgggggttagtatccccgtat

SEQ ID NO: 17477 - DNA, 25 bp, Homo sapien
tcgagaggacgttccgtggacccga

SEQ ID NO: 17478 - DNA, 25 bp, Homo sapien
tcgagaggacgtaccgtggacccga

SEQ ID NO: 17479 - DNA, 25 bp, Homo sapien
ggcaggaacctctgagacacgaggt

SEQ ID NO: 17480 - DNA, 25 bp, Homo sapien
ggcaggaacctcagagacacgaggt

SEQ ID NO: 17481 - DNA, 25 bp, Homo sapien
cgaggactacgacacattacagtgt

SEQ ID NO: 17482 - DNA, 25 bp, Homo sapien
cgaggactacgagacattacagtgt

SEQ ID NO: 17483 - DNA, 25 bp, Homo sapien
tatcacggtactagcgtgggaatgt

SEQ ID NO: 17484 - DNA, 25 bp, Homo sapien
tatcacggtacttgcgtgggaatgt

SEQ ID NO: 17485 - DNA, 25 bp, Homo sapien
atactctggtagattcattgacttt

SEQ ID NO: 17486 - DNA, 25 bp, Homo sapien
atactctggtagtttcattgacttt

SEQ ID NO: 17487 - DNA, 25 bp, Homo sapien
ctttcggagtatacgtcatttataa

SEQ ID NO: 17488 - DNA, 25 bp, Homo sapien
ctttcggagtattcgtcatttataa

SEQ ID NO: 17489 - DNA, 25 bp, Homo sapien
ggtgtggacgatgtcctttagacat

SEQ ID NO: 17490 - DNA, 25 bp, Homo sapien
ggtgtggacgatctcctttagacat

SEQ ID NO: 17491 - DNA, 25 bp, Homo sapien
tagtgagatcacctccgagagacac

SEQ ID NO: 17492 - DNA, 25 bp, Homo sapien
tagtgagatcacgtccgagagacac

SEQ ID NO: 17493 - DNA, 25 bp, Homo sapien
aagtagacgatgttgtgtttctacc

SEQ ID NO: 17494 - DNA, 25 bp, Homo sapien
aagtagacgatgatgtgtttctacc

SEQ ID NO: 17495 - DNA, 25 bp, Homo sapien
ttgaactgacttgtgagtcttttct

SEQ ID NO: 17496 - DNA, 25 bp, Homo sapien
ttgaactgacttctgagtcttttct

SEQ ID NO: 17497 - DNA, 25 bp, Homo sapien
gttgtcactctactgatatgtttat

SEQ ID NO: 17498 - DNA, 25 bp, Homo sapien
gttgtcactctagtgatatgtttat

SEQ ID NO: 17499 - DNA, 25 bp, Homo sapien
cgaatgtcctctctgatctgtcctt

SEQ ID NO: 17500 - DNA, 25 bp, Homo sapien
cgaatgtcctctgtgatctgtcctt

SEQ ID NO: 17501 - DNA, 25 bp, Homo sapien
accttttcgactcatattacggaga

SEQ ID NO: 17502 - DNA, 25 bp, Homo sapien
accttttcgactgatattacggaga

SEQ ID NO: 17503 - DNA, 25 bp, Homo sapien
aagttccgtggtaactttcacaggt

SEQ ID NO: 17504 - DNA, 25 bp, Homo sapien
aagttccgtggttactttcacaggt

SEQ ID NO: 17505 - DNA, 25 bp, Homo sapien
gttccggagtcacacgtagtaagag

SEQ ID NO: 17506 - DNA, 25 bp, Homo sapien
gttccggagtcagacgtagtaagag

SEQ ID NO: 17507 - DNA, 25 bp, Homo sapien
gtcactcggtgtgaggactctgtga

SEQ ID NO: 17508 - DNA, 25 bp, Homo sapien
gtcactcggtgtcaggactctgtga

SEQ ID NO: 17509 - DNA, 25 bp, Homo sapien
ggattactttcgacactatgtgagt

SEQ ID NO: 17510 - DNA, 25 bp, Homo sapien
ggattactttcgtcactatgtgagt

SEQ ID NO: 17511 - DNA, 25 bp, Homo sapien
cagtctccaccgtcacagtagtaga

SEQ ID NO: 17512 - DNA, 25 bp, Homo sapien
cagtctccaccgacacagtagtaga

SEQ ID NO: 17513 - DNA, 25 bp, Homo sapien
ctgccagtcaattctacctaggtta

SEQ ID NO: 17514 - DNA, 25 bp, Homo sapien
ctgccagtcaatactacctaggtta

SEQ ID NO: 17515 - DNA, 25 bp, Homo sapien
tctctttcccaattctctcggttgg

SEQ ID NO: 17516 - DNA, 25 bp, Homo sapien
tctctttcccaaatctctcggttgg

SEQ ID NO: 17517 - DNA, 25 bp, Homo sapien
gtcatagtctcagaacctaaatgtt

SEQ ID NO: 17518 - DNA, 25 bp, Homo sapien
gtcatagtctcacaacctaaatgtt

SEQ ID NO: 17519 - DNA, 25 bp, Homo sapien
cttaagatctttaccctagagtctg

SEQ ID NO: 17520 - DNA, 25 bp, Homo sapien
cttaagatcttttccctagagtctg

SEQ ID NO: 17521 - DNA, 25 bp, Homo sapien
gtctgattttacttttcacagattg

SEQ ID NO: 17522 - DNA, 25 bp, Homo sapien
gtctgattttacatttcacagattg

SEQ ID NO: 17523 - DNA, 25 bp, Homo sapien
gtgtgtagttcacattccacttttc

SEQ ID NO: 17524 - DNA, 25 bp, Homo sapien
gtgtgtagttcagattccacttttc

SEQ ID NO: 17525 - DNA, 25 bp, Homo sapien
tgacagaaagggttttctgtctatc

SEQ ID NO: 17526 - DNA, 25 bp, Homo sapien
tgacagaaagggatttctgtctatc

SEQ ID NO: 17527 - DNA, 25 bp, Homo sapien
gacgttctcgggtttccgggttcta

SEQ ID NO: 17528 - DNA, 25 bp, Homo sapien
gacgttctcgggattccgggttcta

SEQ ID NO: 17529 - DNA, 25 bp, Homo sapien
ctactctccgtgttcccaagtgtca

SEQ ID NO: 17530 - DNA, 25 bp, Homo sapien
ctactctccgtgatcccaagtgtca

SEQ ID NO: 17531 - DNA, 25 bp, Homo sapien
ctgttgaaagtctctcgagtcccgt

SEQ ID NO: 17532 - DNA, 25 bp, Homo sapien
ctgttgaaagtcactcgagtcccgt

SEQ ID NO: 17533 - DNA, 25 bp, Homo sapien
tttgtttgaagtgtcccgtctacga

SEQ ID NO: 17534 - DNA, 25 bp, Homo sapien
tttgtttgaagtctcccgtctacga

SEQ ID NO: 17535 - DNA, 25 bp, Homo sapien
ttctccgggggtctacccgcctaag

SEQ ID NO: 17536 - DNA, 25 bp, Homo sapien
ttctccgggggtgtacccgcctaag

SEQ ID NO: 17537 - DNA, 25 bp, Homo sapien
gtccctgaggggtcgtcactcccag

SEQ ID NO: 17538 - DNA, 25 bp, Homo sapien
gtccctgaggggacgtcactcccag

SEQ ID NO: 17539 - DNA, 25 bp, Homo sapien
tcgtctgtacgggtctctccctctc

SEQ ID NO: 17540 - DNA, 25 bp, Homo sapien
tcgtctgtacggctctctccctctc

SEQ ID NO: 17541 - DNA, 25 bp, Homo sapien
tagttagtttacactgactcctttg

SEQ ID NO: 17542 - DNA, 25 bp, Homo sapien
tagttagtttactctgactcctttg

SEQ ID NO: 17543 - DNA, 25 bp, Homo sapien
taacgttcttacgaccgtgtatgcg

SEQ ID NO: 17544 - DNA, 25 bp, Homo sapien
taacgttcttaccaccgtgtatgcg

SEQ ID NO: 17545 - DNA, 25 bp, Homo sapien
cactgtagacactcgcacaggggcg

SEQ ID NO: 17546 - DNA, 25 bp, Homo sapien
cactgtagacacacgcacaggggcg

SEQ ID NO: 17547 - DNA, 25 bp, Homo sapien
atagcgacgaaaagacccggaggtc

SEQ ID NO: 17548 - DNA, 25 bp, Homo sapien
atagcgacgaaatgacccggaggtc

SEQ ID NO: 17549 - DNA, 25 bp, Homo sapien
aagagtaagtaagactccggaatac

SEQ ID NO: 17550 - DNA, 25 bp, Homo sapien
aagagtaagtaacactccggaatac

SEQ ID NO: 17551 - DNA, 25 bp, Homo sapien
atagtgttacaacagttctccagac

SEQ ID NO: 17552 - DNA, 25 bp, Homo sapien
atagtgttacaagagttctccagac

SEQ ID NO: 17553 - DNA, 25 bp, Homo sapien
gagtcggcctaaggagtttcagcga

SEQ ID NO: 17554 - DNA, 25 bp, Homo sapien
gagtcggcctaacgagtttcagcga

SEQ ID NO: 17555 - DNA, 25 bp, Homo sapien
ggtggagaccttatatggcagacga

SEQ ID NO: 17556 - DNA, 25 bp, Homo sapien
ggtggagaccttttatggcagacga

SEQ ID NO: 17557 - DNA, 25 bp, Homo sapien
caagacgtccatgtatcttcaacgg

SEQ ID NO: 17558 - DNA, 25 bp, Homo sapien
caagacgtccatctatcttcaacgg

SEQ ID NO: 17559 - DNA, 25 bp, Homo sapien
gaaagatcacatgttctgtggtaac

SEQ ID NO: 17560 - DNA, 25 bp, Homo sapien
gaaagatcacatcttctgtggtaac

SEQ ID NO: 17561 - DNA, 25 bp, Homo sapien
gaaaaaacgttatttacctggtaac

SEQ ID NO: 17562 - DNA, 25 bp, Homo sapien
gaaaaaacgttaattacctggtaac

SEQ ID NO: 17563 - DNA, 25 bp, Homo sapien
acaagagtgactcctacctgctgcg

SEQ ID NO: 17564 - DNA, 25 bp, Homo sapien
acaagagtgactgctacctgctgcg

SEQ ID NO: 17565 - DNA, 25 bp, Homo sapien
acaacaaggaagcaggtaatccctt

SEQ ID NO: 17566 - DNA, 25 bp, Homo sapien
acaacaaggaaggaggtaatccctt

SEQ ID NO: 17567 - DNA, 25 bp, Homo sapien
tctgtagaggaacaggaagacctta

SEQ ID NO: 17568 - DNA, 25 bp, Homo sapien
tctgtagaggaagaggaagacctta

SEQ ID NO: 17569 - DNA, 25 bp, Homo sapien
tcagtatggcaaagaaatatcctac

SEQ ID NO: 17570 - DNA, 25 bp, Homo sapien
tcagtatggcaatgaaatatcctac

SEQ ID NO: 17571 - DNA, 25 bp, Homo sapien
tgacagtgtcttagtccaattcacc

SEQ ID NO: 17572 - DNA, 25 bp, Homo sapien
tgacagtgtctttgtccaattcacc

SEQ ID NO: 17573 - DNA, 25 bp, Homo sapien
acacggtattcgtctaaaattcacc

SEQ ID NO: 17574 - DNA, 25 bp, Homo sapien
acacggtattcgactaaaattcacc

SEQ ID NO: 17575 - DNA, 25 bp, Homo sapien
acaccttcccggagtaattacgctg

SEQ ID NO: 17576 - DNA, 25 bp, Homo sapien
acaccttcccggtgtaattacgctg

SEQ ID NO: 17577 - DNA, 25 bp, Homo sapien
tacctttcccctttcgtaattggtc

SEQ ID NO: 17578 - DNA, 25 bp, Homo sapien
tacctttcccctatcgtaattggtc

SEQ ID NO: 17579 - DNA, 25 bp, Homo sapien
tatgttttccctatgtctgaggtgg

SEQ ID NO: 17580 - DNA, 25 bp, Homo sapien
tatgttttccctttgtctgaggtgg

SEQ ID NO: 17581 - DNA, 25 bp, Homo sapien
ttctgcccctcttttaagacgacag

SEQ ID NO: 17582 - DNA, 25 bp, Homo sapien
ttctgcccctctattaagacgacag

SEQ ID NO: 17583 - DNA, 25 bp, Homo sapien
ttttgccactacttttatgcagtga

SEQ ID NO: 17584 - DNA, 25 bp, Homo sapien
ttttgccactacatttatgcagtga

SEQ ID NO: 17585 - DNA, 25 bp, Homo sapien
tactcacgatcacgttcgagggttg

SEQ ID NO: 17586 - DNA, 25 bp, Homo sapien
tactcacgatcaggttcgagggttg

SEQ ID NO: 17587 - DNA, 25 bp, Homo sapien
ccccagaatgggtcgtgacggtaca

SEQ ID NO: 17588 - DNA, 25 bp, Homo sapien
ccccagaatgggacgtgacggtaca

SEQ ID NO: 17589 - DNA, 25 bp, Homo sapien
cgagagtttgaaagtcgattactac

SEQ ID NO: 17590 - DNA, 25 bp, Homo sapien
cgagagtttgaatgtcgattactac

SEQ ID NO: 17591 - DNA, 25 bp, Homo sapien
ccatgacctagaatcaaagacacgt

SEQ ID NO: 17592 - DNA, 25 bp, Homo sapien
ccatgacctagattcaaagacacgt

SEQ ID NO: 17593 - DNA, 25 bp, Homo sapien
cgctaatactaagtcccactgtcgt

SEQ ID NO: 17594 - DNA, 25 bp, Homo sapien
cgctaatactaactcccactgtcgt

SEQ ID NO: 17595 - DNA, 25 bp, Homo sapien
gtggacttttcttcactcaaagtta

SEQ ID NO: 17596 - DNA, 25 bp, Homo sapien
gtggacttttctacactcaaagtta

SEQ ID NO: 17597 - DNA, 25 bp, Homo sapien
gaaccacttctgcagtaaacagtaa

SEQ ID NO: 17598 - DNA, 25 bp, Homo sapien
gaaccacttctggagtaaacagtaa

SEQ ID NO: 17599 - DNA, 25 bp, Homo sapien
taaaaggactaaggagacacgatcc

SEQ ID NO: 17600 - DNA, 25 bp, Homo sapien
taaaaggactaacgagacacgatcc

SEQ ID NO: 17601 - DNA, 25 bp, Homo sapien
gacctagtggcagtgagccgtcttc

SEQ ID NO: 17602 - DNA, 25 bp, Homo sapien
gacctagtggcactgagccgtcttc

SEQ ID NO: 17603 - DNA, 25 bp, Homo sapien
cacgaggggtttacaaggttagtgt

SEQ ID NO: 17604 - DNA, 25 bp, Homo sapien
cacgaggggttttcaaggttagtgt

SEQ ID NO: 17605 - DNA, 25 bp, Homo sapien
aggtcaaaggatcctaaaccctgag

SEQ ID NO: 17606 - DNA, 25 bp, Homo sapien
aggtcaaaggatgctaaaccctgag

SEQ ID NO: 17607 - DNA, 25 bp, Homo sapien
ggcgaaaaagtgttatatctcctgg

SEQ ID NO: 17608 - DNA, 25 bp, Homo sapien
ggcgaaaaagtgatatatctcctgg

SEQ ID NO: 17609 - DNA, 25 bp, Homo sapien
catcggaaagagcagcatcaggtgg

SEQ ID NO: 17610 - DNA, 25 bp, Homo sapien
catcggaaagaggagcatcaggtgg

SEQ ID NO: 17611 - DNA, 25 bp, Homo sapien
tctcgtcacacaaggggcaccctgg

SEQ ID NO: 17612 - DNA, 25 bp, Homo sapien
tctcgtcacacatggggcaccctgg

SEQ ID NO: 17613 - DNA, 25 bp, Homo sapien
acttggtgccgtagacaccacatcg

SEQ ID NO: 17614 - DNA, 25 bp, Homo sapien
acttggtgccgttgacaccacatcg

SEQ ID NO: 17615 - DNA, 25 bp, Homo sapien
aactgcctacgataaactgccggtg

SEQ ID NO: 17616 - DNA, 25 bp, Homo sapien
aactgcctacgaaaaactgccggtg

SEQ ID NO: 17617 - DNA, 25 bp, Homo sapien
ccatcggactaaaagcgtcgtagat

SEQ ID NO: 17618 - DNA, 25 bp, Homo sapien
ccatcggactaatagcgtcgtagat

SEQ ID NO: 17619 - DNA, 25 bp, Homo sapien
cggcatctagtgtaattaccttcac

SEQ ID NO: 17620 - DNA, 25 bp, Homo sapien
cggcatctagtgaaattaccttcac

SEQ ID NO: 17621 - DNA, 25 bp, Homo sapien
tctctctagactaaagacctctaag

SEQ ID NO: 17622 - DNA, 25 bp, Homo sapien
tctctctagacttaagacctctaag

SEQ ID NO: 17623 - DNA, 25 bp, Homo sapien
gtcatacgttaaagactacagctta

SEQ ID NO: 17624 - DNA, 25 bp, Homo sapien
gtcatacgttaatgactacagctta

SEQ ID NO: 17625 - DNA, 25 bp, Homo sapien
gtgtacctgtatcacgaggggttac

SEQ ID NO: 17626 - DNA, 25 bp, Homo sapien
gtgtacctgtatgacgaggggttac

SEQ ID NO: 17627 - DNA, 25 bp, Homo sapien
cgtgagttcctgttcccactgtctc

SEQ ID NO: 17628 - DNA, 25 bp, Homo sapien
cgtgagttcctgatcccactgtctc

SEQ ID NO: 17629 - DNA, 25 bp, Homo sapien
cacgggttcttggagcctccgttct

SEQ ID NO: 17630 - DNA, 25 bp, Homo sapien
cacgggttcttgcagcctccgttct

SEQ ID NO: 17631 - DNA, 25 bp, Homo sapien
ctacttttcgtttacttccctcggg

SEQ ID NO: 17632 - DNA, 25 bp, Homo sapien
ctacttttcgttaacttccctcggg

SEQ ID NO: 17633 - DNA, 25 bp, Homo sapien
gaccgtcttatatatgttgccataa

SEQ ID NO: 17634 - DNA, 25 bp, Homo sapien
gaccgtcttataaatgttgccataa

SEQ ID NO: 17635 - DNA, 25 bp, Homo sapien
ggagtggacggtactcccggccaca

SEQ ID NO: 17636 - DNA, 25 bp, Homo sapien
ggagtggacggttctcccggccaca

SEQ ID NO: 17637 - DNA, 25 bp, Homo sapien
gggcacgacgggtcaagcgactccc

SEQ ID NO: 17638 - DNA, 25 bp, Homo sapien
gggcacgacgggacaagcgactccc

SEQ ID NO: 17639 - DNA, 25 bp, Homo sapien
acaacgccacggagacacggactac

SEQ ID NO: 17640 - DNA, 25 bp, Homo sapien
acaacgccacggtgacacggactac

SEQ ID NO: 17641 - DNA, 25 bp, Homo sapien
cccatagactagttttcgggtagga

SEQ ID NO: 17642 - DNA, 25 bp, Homo sapien
cccatagactagatttcgggtagga

SEQ ID NO: 17643 - DNA, 25 bp, Homo sapien
acgggaacgacgagtaccggtgctt

SEQ ID NO: 17644 - DNA, 25 bp, Homo sapien
acgggaacgacgtgtaccggtgctt

SEQ ID NO: 17645 - DNA, 25 bp, Homo sapien
aagtgcaacgacacggaccggtcct

SEQ ID NO: 17646 - DNA, 25 bp, Homo sapien
aagtgcaacgactcggaccggtcct

SEQ ID NO: 17647 - DNA, 25 bp, Homo sapien
aaagggaagtcgtcggccgtcgtcc

SEQ ID NO: 17648 - DNA, 25 bp, Homo sapien
aaagggaagtcgacggccgtcgtcc

SEQ ID NO: 17649 - DNA, 25 bp, Homo sapien
agcgtagatgtgtactggactctcc

SEQ ID NO: 17650 - DNA, 25 bp, Homo sapien
agcgtagatgtgaactggactctcc

SEQ ID NO: 17651 - DNA, 25 bp, Homo sapien
aactttcagtgtttcgtaccgaact

SEQ ID NO: 17652 - DNA, 25 bp, Homo sapien
aactttcagtgtatcgtaccgaact

SEQ ID NO: 17653 - DNA, 25 bp, Homo sapien
tcttgggtcttccttttggctcgct

SEQ ID NO: 17654 - DNA, 25 bp, Homo sapien
tcttgggtcttcgttttggctcgct

SEQ ID NO: 17655 - DNA, 25 bp, Homo sapien
gggtcgtaccagtgtgtgtgtcacc

SEQ ID NO: 17656 - DNA, 25 bp, Homo sapien
gggtcgtaccagagtgtgtgtcacc

SEQ ID NO: 17657 - DNA, 25 bp, Homo sapien
ctcctttgtagaaggtagtgtcctt

SEQ ID NO: 17658 - DNA, 25 bp, Homo sapien
ctcctttgtagatggtagtgtcctt

SEQ ID NO: 17659 - DNA, 25 bp, Homo sapien
attcaatgtacgaacggtagatttc

SEQ ID NO: 17660 - DNA, 25 bp, Homo sapien
attcaatgtacgtacggtagatttc

SEQ ID NO: 17661 - DNA, 25 bp, Homo sapien
tgtcagttcctttaatttcatttac

SEQ ID NO: 17662 - DNA, 25 bp, Homo sapien
tgtcagttccttaaatttcatttac

SEQ ID NO: 17663 - DNA, 25 bp, Homo sapien
aatgccgtgagttctttcatccgac

SEQ ID NO: 17664 - DNA, 25 bp, Homo sapien
aatgccgtgagtactttcatccgac

SEQ ID NO: 17665 - DNA, 25 bp, Homo sapien
taacacaggagtgtctcgtctttta

SEQ ID NO: 17666 - DNA, 25 bp, Homo sapien
taacacaggagtctctcgtctttta

SEQ ID NO: 17667 - DNA, 25 bp, Homo sapien
cttatacggagttcgtggtgttttc

SEQ ID NO: 17668 - DNA, 25 bp, Homo sapien
cttatacggagtacgtggtgttttc

SEQ ID NO: 17669 - DNA, 25 bp, Homo sapien
agagacgacactagtgtagttatac

SEQ ID NO: 17670 - DNA, 25 bp, Homo sapien
agagacgacacttgtgtagttatac

SEQ ID NO: 17671 - DNA, 25 bp, Homo sapien
cgaggtcgacaccgttgttcttact

SEQ ID NO: 17672 - DNA, 25 bp, Homo sapien
cgaggtcgacacggttgttcttact

SEQ ID NO: 17673 - DNA, 25 bp, Homo sapien
ccttgagagggaccttctcaaatat

SEQ ID NO: 17674 - DNA, 25 bp, Homo sapien
ccttgagagggagcttctcaaatat

SEQ ID NO: 17675 - DNA, 25 bp, Homo sapien
cagtcgaacatttcgaaaacaatag

SEQ ID NO: 17676 - DNA, 25 bp, Homo sapien
cagtcgaacattacgaaaacaatag

SEQ ID NO: 17677 - DNA, 25 bp, Homo sapien
catctacatgtcctccagaggaatt

SEQ ID NO: 17678 - DNA, 25 bp, Homo sapien
catctacatgtcgtccagaggaatt

SEQ ID NO: 17679 - DNA, 25 bp, Homo sapien
gactctcgtgtcgacaggaccgtag

SEQ ID NO: 17680 - DNA, 25 bp, Homo sapien
gactctcgtgtccacaggaccgtag

SEQ ID NO: 17681 - DNA, 25 bp, Homo sapien
gacctcctcgttactgagactaaca

SEQ ID NO: 17682 - DNA, 25 bp, Homo sapien
gacctcctcgtttctgagactaaca

SEQ ID NO: 17683 - DNA, 25 bp, Homo sapien
tcgaacccggtcttcacgccttaca

SEQ ID NO: 17684 - DNA, 25 bp, Homo sapien
tcgaacccggtcatcacgccttaca

SEQ ID NO: 17685 - DNA, 25 bp, Homo sapien
gcgacgggttacaccgacagacgag

SEQ ID NO: 17686 - DNA, 25 bp, Homo sapien
gcgacgggttactccgacagacgag

SEQ ID NO: 17687 - DNA, 25 bp, Homo sapien
aaagtctcggggtagatcaacacaa

SEQ ID NO: 17688 - DNA, 25 bp, Homo sapien
aaagtctcggggaagatcaacacaa

SEQ ID NO: 17689 - DNA, 25 bp, Homo sapien
cagtggtaagacaggacgaacgtac

SEQ ID NO: 17690 - DNA, 25 bp, Homo sapien
cagtggtaagactggacgaacgtac

SEQ ID NO: 17691 - DNA, 25 bp, Homo sapien
agagactttgggaaccccgttcaac

SEQ ID NO: 17692 - DNA, 25 bp, Homo sapien
agagactttgggtaccccgttcaac

SEQ ID NO: 17693 - DNA, 25 bp, Homo sapien
aggtactaaaacgaacccattaggg

SEQ ID NO: 17694 - DNA, 25 bp, Homo sapien
aggtactaaaaccaacccattaggg

SEQ ID NO: 17695 - DNA, 25 bp, Homo sapien
ttttaaaaccgaaccctctgagatg

SEQ ID NO: 17696 - DNA, 25 bp, Homo sapien
ttttaaaaccgatccctctgagatg

SEQ ID NO: 17697 - DNA, 25 bp, Homo sapien
gtgcacctttagactctctacgtca

SEQ ID NO: 17698 - DNA, 25 bp, Homo sapien
gtgcacctttagtctctctacgtca

SEQ ID NO: 17699 - DNA, 25 bp, Homo sapien
gtcgtcacgggtagacctgttaccc

SEQ ID NO: 17700 - DNA, 25 bp, Homo sapien
gtcgtcacgggttgacctgttaccc

SEQ ID NO: 17701 - DNA, 25 bp, Homo sapien
tcttcgcgtggaaagaccggaaatc

SEQ ID NO: 17702 - DNA, 25 bp, Homo sapien
tcttcgcgtggatagaccggaaatc

SEQ ID NO: 17703 - DNA, 25 bp, Homo sapien
ttcctttggacctgtccgaaaagtc

SEQ ID NO: 17704 - DNA, 25 bp, Homo sapien
ttcctttggaccagtccgaaaagtc

SEQ ID NO: 17705 - DNA, 25 bp, Homo sapien
ctttaatagcagtctaattacgtgt

SEQ ID NO: 17706 - DNA, 25 bp, Homo sapien
ctttaatagcagactaattacgtgt

SEQ ID NO: 17707 - DNA, 25 bp, Homo sapien
acccgggactgaaactccctcgatg

SEQ ID NO: 17708 - DNA, 25 bp, Homo sapien
acccgggactgatactccctcgatg

SEQ ID NO: 17709 - DNA, 25 bp, Homo sapien
acgtcgaccgccttttcgtcgacgg

SEQ ID NO: 17710 - DNA, 25 bp, Homo sapien
acgtcgaccgccatttcgtcgacgg

SEQ ID NO: 17711 - DNA, 25 bp, Homo sapien
cctccggcccggagcctcgtcggag

SEQ ID NO: 17712 - DNA, 25 bp, Homo sapien
cctccggcccggtgcctcgtcggag

SEQ ID NO: 17713 - DNA, 25 bp, Homo sapien
ccttcgaccccgaggatcgttttta

SEQ ID NO: 17714 - DNA, 25 bp, Homo sapien
ccttcgaccccgtggatcgttttta

SEQ ID NO: 17715 - DNA, 25 bp, Homo sapien
gtacactccgatgaagtctttttac

SEQ ID NO: 17716 - DNA, 25 bp, Homo sapien
gtacactccgatcaagtctttttac

SEQ ID NO: 17717 - DNA, 25 bp, Homo sapien
gttaaagatctcagcgtggtctgtc

SEQ ID NO: 17718 - DNA, 25 bp, Homo sapien
gttaaagatctctgcgtggtctgtc

SEQ ID NO: 17719 - DNA, 25 bp, Homo sapien
ctctacggtctcagtctatggtgtt

SEQ ID NO: 17720 - DNA, 25 bp, Homo sapien
ctctacggtctctgtctatggtgtt

SEQ ID NO: 17721 - DNA, 25 bp, Homo sapien
ctctcgcgacgactgcagtggaggt

SEQ ID NO: 17722 - DNA, 25 bp, Homo sapien
ctctcgcgacgagtgcagtggaggt

SEQ ID NO: 17723 - DNA, 25 bp, Homo sapien
gtccgacgagacaccgcaaagtagg

SEQ ID NO: 17724 - DNA, 25 bp, Homo sapien
gtccgacgagactccgcaaagtagg

SEQ ID NO: 17725 - DNA, 25 bp, Homo sapien
agcgtcgggctccagcatctgcgcg

SEQ ID NO: 17726 - DNA, 25 bp, Homo sapien
agcgtcgggctcgagcatctgcgcg

SEQ ID NO: 17727 - DNA, 25 bp, Homo sapien
ggtggctccggtcgtcgtctacact

SEQ ID NO: 17728 - DNA, 25 bp, Homo sapien
ggtggctccggtggtcgtctacact

SEQ ID NO: 17729 - DNA, 25 bp, Homo sapien
ggacttcgataaaggggttctcgat

SEQ ID NO: 17730 - DNA, 25 bp, Homo sapien
ggacttcgataatggggttctcgat

SEQ ID NO: 17731 - DNA, 25 bp, Homo sapien
gtaactaggtactcgaattttgtct

SEQ ID NO: 17732 - DNA, 25 bp, Homo sapien
gtaactaggtacacgaattttgtct

SEQ ID NO: 17733 - DNA, 25 bp, Homo sapien
acctgacctgcaacgattctaggtc

SEQ ID NO: 17734 - DNA, 25 bp, Homo sapien
acctgacctgcatcgattctaggtc

SEQ ID NO: 17735 - DNA, 25 bp, Homo sapien
attatgacctaagaagggttttcct

SEQ ID NO: 17736 - DNA, 25 bp, Homo sapien
attatgacctaacaagggttttcct

SEQ ID NO: 17737 - DNA, 25 bp, Homo sapien
tagtataaacaagaaggaacccctc

SEQ ID NO: 17738 - DNA, 25 bp, Homo sapien
tagtataaacaacaaggaacccctc

SEQ ID NO: 17739 - DNA, 25 bp, Homo sapien
tgaatctaaagagagaacacccttc

SEQ ID NO: 17740 - DNA, 25 bp, Homo sapien
tgaatctaaagacagaacacccttc

SEQ ID NO: 17741 - DNA, 25 bp, Homo sapien
gaaaaggaagacgaagaacgcctgg

SEQ ID NO: 17742 - DNA, 25 bp, Homo sapien
gaaaaggaagaccaagaacgcctgg

SEQ ID NO: 17743 - DNA, 25 bp, Homo sapien
aagacaattctgtagagaatcccgg

SEQ ID NO: 17744 - DNA, 25 bp, Homo sapien
aagacaattctgaagagaatcccgg

SEQ ID NO: 17745 - DNA, 25 bp, Homo sapien
gttttactgactggagtgtctacca

SEQ ID NO: 17746 - DNA, 25 bp, Homo sapien
gttttactgactcgagtgtctacca

SEQ ID NO: 17747 - DNA, 25 bp, Homo sapien
agtgtagtctgtttttagtccttac

SEQ ID NO: 17748 - DNA, 25 bp, Homo sapien
agtgtagtctgtatttagtccttac

SEQ ID NO: 17749 - DNA, 25 bp, Homo sapien
agtcgtggtcactgtgcttgtcgtc

SEQ ID NO: 17750 - DNA, 25 bp, Homo sapien
agtcgtggtcacagtgcttgtcgtc

SEQ ID NO: 17751 - DNA, 25 bp, Homo sapien
tttcacatcattaccggtttgtctg

SEQ ID NO: 17752 - DNA, 25 bp, Homo sapien
tttcacatcatttccggtttgtctg

SEQ ID NO: 17753 - DNA, 25 bp, Homo sapien
ctttatctgtgtccaatcccttagg

SEQ ID NO: 17754 - DNA, 25 bp, Homo sapien
ctttatctgtgtgcaatcccttagg

SEQ ID NO: 17755 - DNA, 25 bp, Homo sapien
ttctcagtaacaaacctcggtcgtt

SEQ ID NO: 17756 - DNA, 25 bp, Homo sapien
ttctcagtaacatacctcggtcgtt

SEQ ID NO: 17757 - DNA, 25 bp, Homo sapien
tcttctagttcttccgcgtggagtc

SEQ ID NO: 17758 - DNA, 25 bp, Homo sapien
tcttctagttctaccgcgtggagtc

SEQ ID NO: 17759 - DNA, 25 bp, Homo sapien
gtcctgtgtcgtctacccgtggacc

SEQ ID NO: 17760 - DNA, 25 bp, Homo sapien
gtcctgtgtcgtgtacccgtggacc

SEQ ID NO: 17761 - DNA, 25 bp, Homo sapien
tctgtcgtgagtttcatcttaatat

SEQ ID NO: 17762 - DNA, 25 bp, Homo sapien
tctgtcgtgagtatcatcttaatat

SEQ ID NO: 17763 - DNA, 25 bp, Homo sapien
gcggtcttgtctgaaactagggccg

SEQ ID NO: 17764 - DNA, 25 bp, Homo sapien
gcggtcttgtctcaaactagggccg

SEQ ID NO: 17765 - DNA, 25 bp, Homo sapien
cctttttcacgcgctacggccctag

SEQ ID NO: 17766 - DNA, 25 bp, Homo sapien
cctttttcacgccctacggccctag

SEQ ID NO: 17767 - DNA, 25 bp, Homo sapien
ctatgagatcgtacgactccacgac

SEQ ID NO: 17768 - DNA, 25 bp, Homo sapien
ctatgagatcgttcgactccacgac

SEQ ID NO: 17769 - DNA, 25 bp, Homo sapien
ccacctggacgaagtcgtggaacat

SEQ ID NO: 17770 - DNA, 25 bp, Homo sapien
ccacctggacgatgtcgtggaacat

SEQ ID NO: 17771 - DNA, 25 bp, Homo sapien
acccgggcgaccttgaggacgacgt

SEQ ID NO: 17772 - DNA, 25 bp, Homo sapien
acccgggcgaccatgaggacgacgt

SEQ ID NO: 17773 - DNA, 25 bp, Homo sapien
gcaccgcgactcagttgtgggtcgt

SEQ ID NO: 17774 - DNA, 25 bp, Homo sapien
gcaccgcgactctgttgtgggtcgt

SEQ ID NO: 17775 - DNA, 25 bp, Homo sapien
tcgctccgaccttacgttcacggga

SEQ ID NO: 17776 - DNA, 25 bp, Homo sapien
tcgctccgacctaacgttcacggga

SEQ ID NO: 17777 - DNA, 25 bp, Homo sapien
gtgtcacaactcatatgtccttaag

SEQ ID NO: 17778 - DNA, 25 bp, Homo sapien
gtgtcacaactcttatgtccttaag

SEQ ID NO: 17779 - DNA, 25 bp, Homo sapien
ggtcttgtctcttaagtatctgaag

SEQ ID NO: 17780 - DNA, 25 bp, Homo sapien
ggtcttgtctctaaagtatctgaag

SEQ ID NO: 17781 - DNA, 25 bp, Homo sapien
ggacgatgtcctttagacattgagg

SEQ ID NO: 17782 - DNA, 25 bp, Homo sapien
ggacgatgtcctatagacattgagg

SEQ ID NO: 17783 - DNA, 25 bp, Homo sapien
tggtccctttgatctacgacgagtg

SEQ ID NO: 17784 - DNA, 25 bp, Homo sapien
tggtccctttgaactacgacgagtg

SEQ ID NO: 17785 - DNA, 25 bp, Homo sapien
gatcggccactcgagctgtccgtcg

SEQ ID NO: 17786 - DNA, 25 bp, Homo sapien
gatcggccactccagctgtccgtcg

SEQ ID NO: 17787 - DNA, 25 bp, Homo sapien
ggtcggcagactcgaccgttcccgt

SEQ ID NO: 17788 - DNA, 25 bp, Homo sapien
ggtcggcagactggaccgttcccgt

SEQ ID NO: 17789 - DNA, 25 bp, Homo sapien
tataaatgagtgtccaagttccgtc

SEQ ID NO: 17790 - DNA, 25 bp, Homo sapien
tataaatgagtgaccaagttccgtc

SEQ ID NO: 17791 - DNA, 25 bp, Homo sapien
gtgtgaaagaggacctaggttaacc

SEQ ID NO: 17792 - DNA, 25 bp, Homo sapien
gtgtgaaagaggtcctaggttaacc

SEQ ID NO: 17793 - DNA, 25 bp, Homo sapien
ggaaggatgtaccatcgattaggtc

SEQ ID NO: 17794 - DNA, 25 bp, Homo sapien
ggaaggatgtacgatcgattaggtc

SEQ ID NO: 17795 - DNA, 25 bp, Homo sapien
caccggtgcggagtctcgtagtgat

SEQ ID NO: 17796 - DNA, 25 bp, Homo sapien
caccggtgcggactctcgtagtgat

SEQ ID NO: 17797 - DNA, 25 bp, Homo sapien
acgcgagtcctcctcgttactagaa

SEQ ID NO: 17798 - DNA, 25 bp, Homo sapien
acgcgagtcctcgtcgttactagaa

SEQ ID NO: 17799 - DNA, 25 bp, Homo sapien
aacgacgatctcgtcgtcctgacag

SEQ ID NO: 17800 - DNA, 25 bp, Homo sapien
aacgacgatctcctcgtcctgacag

SEQ ID NO: 17801 - DNA, 25 bp, Homo sapien
tcacgaagagtttgatgtttcacgg

SEQ ID NO: 17802 - DNA, 25 bp, Homo sapien
tcacgaagagttagatgtttcacgg

SEQ ID NO: 17803 - DNA, 25 bp, Homo sapien
ccagatgtattcaattatcgtgatc

SEQ ID NO: 17804 - DNA, 25 bp, Homo sapien
ccagatgtattctattatcgtgatc

SEQ ID NO: 17805 - DNA, 25 bp, Homo sapien
taaagagcacttgtttatgttaccg

SEQ ID NO: 17806 - DNA, 25 bp, Homo sapien
taaagagcacttctttatgttaccg

SEQ ID NO: 17807 - DNA, 25 bp, Homo sapien
gagataaatgtatatcgtttctgtc

SEQ ID NO: 17808 - DNA, 25 bp, Homo sapien
gagataaatgtaaatcgtttctgtc

SEQ ID NO: 17809 - DNA, 25 bp, Homo sapien
acagaagtaacatacgtgtagtttc

SEQ ID NO: 17810 - DNA, 25 bp, Homo sapien
acagaagtaacaaacgtgtagtttc

SEQ ID NO: 17811 - DNA, 25 bp, Homo sapien
gtaaaagtcactcctcttcgcatag

SEQ ID NO: 17812 - DNA, 25 bp, Homo sapien
gtaaaagtcactgctcttcgcatag

SEQ ID NO: 17813 - DNA, 25 bp, Homo sapien
ttcaggtctagtgatattcctatcg

SEQ ID NO: 17814 - DNA, 25 bp, Homo sapien
ttcaggtctagtcatattcctatcg

SEQ ID NO: 17815 - DNA, 25 bp, Homo sapien
gtaggcgtatggactcgtgttagtc

SEQ ID NO: 17816 - DNA, 25 bp, Homo sapien
gtaggcgtatggtctcgtgttagtc

SEQ ID NO: 17817 - DNA, 25 bp, Homo sapien
acagtgacagcctccgtcgttacct

SEQ ID NO: 17818 - DNA, 25 bp, Homo sapien
acagtgacagccaccgtcgttacct

SEQ ID NO: 17819 - DNA, 25 bp, Homo sapien
gcaaggctccccaatacggactcgt

SEQ ID NO: 17820 - DNA, 25 bp, Homo sapien
gcaaggctcccctatacggactcgt

SEQ ID NO: 17821 - DNA, 25 bp, Homo sapien
gtgacagtcatcctatatttgtagt

SEQ ID NO: 17822 - DNA, 25 bp, Homo sapien
gtgacagtcatcgtatatttgtagt

SEQ ID NO: 17823 - DNA, 25 bp, Homo sapien
ttacagtacttcgtcagtatataga

SEQ ID NO: 17824 - DNA, 25 bp, Homo sapien
ttacagtacttcctcagtatataga

SEQ ID NO: 17825 - DNA, 25 bp, Homo sapien
cttagagtctcctttcgtttacgac

SEQ ID NO: 17826 - DNA, 25 bp, Homo sapien
cttagagtctccattcgtttacgac

SEQ ID NO: 17827 - DNA, 25 bp, Homo sapien
tttacgaattaacgttcgtttcggt

SEQ ID NO: 17828 - DNA, 25 bp, Homo sapien
tttacgaattaaggttcgtttcggt

SEQ ID NO: 17829 - DNA, 25 bp, Homo sapien
cttgcgtagacttttgttgtttcaa

SEQ ID NO: 17830 - DNA, 25 bp, Homo sapien
cttgcgtagactattgttgtttcaa

SEQ ID NO: 17831 - DNA, 25 bp, Homo sapien
ttttaaggctttctgtgacgttcaa

SEQ ID NO: 17832 - DNA, 25 bp, Homo sapien
ttttaaggctttgtgtgacgttcaa

SEQ ID NO: 17833 - DNA, 25 bp, Homo sapien
gaggcctcgtcgacggcgaaccgtc

SEQ ID NO: 17834 - DNA, 25 bp, Homo sapien
gaggcctcgtcgtcggcgaaccgtc

SEQ ID NO: 17835 - DNA, 25 bp, Homo sapien
gcgacctctccgtcgggagaccgta

SEQ ID NO: 17836 - DNA, 25 bp, Homo sapien
gcgacctctccgacgggagaccgta

SEQ ID NO: 17837 - DNA, 25 bp, Homo sapien
ctttcggttcctcgacggagtgtga

SEQ ID NO: 17838 - DNA, 25 bp, Homo sapien
ctttcggttcctggacggagtgtga

SEQ ID NO: 17839 - DNA, 25 bp, Homo sapien
tcttgaacttaggttactcgtttta

SEQ ID NO: 17840 - DNA, 25 bp, Homo sapien
tcttgaacttagcttactcgtttta

SEQ ID NO: 17841 - DNA, 25 bp, Homo sapien
cattatgtatatacatgtcttacgg

SEQ ID NO: 17842 - DNA, 25 bp, Homo sapien
cattatgtatattcatgtcttacgg

SEQ ID NO: 17843 - DNA, 25 bp, Homo sapien
gtccagtgttctttgtcaataaagg

SEQ ID NO: 17844 - DNA, 25 bp, Homo sapien
gtccagtgttctatgtcaataaagg

SEQ ID NO: 17845 - DNA, 25 bp, Homo sapien
actccttttgtgtgtaacttctctg

SEQ ID NO: 17846 - DNA, 25 bp, Homo sapien
actccttttgtgagtaacttctctg

SEQ ID NO: 17847 - DNA, 25 bp, Homo sapien
ggcctgtctcaccataaaccttcgg

SEQ ID NO: 17848 - DNA, 25 bp, Homo sapien
ggcctgtctcacgataaaccttcgg

SEQ ID NO: 17849 - DNA, 25 bp, Homo sapien
ctgtctaacgggatgtacattgtcg

SEQ ID NO: 17850 - DNA, 25 bp, Homo sapien
ctgtctaacgggttgtacattgtcg

SEQ ID NO: 17851 - DNA, 25 bp, Homo sapien
gcctctttgagtctacactatctcg

SEQ ID NO: 17852 - DNA, 25 bp, Homo sapien
gcctctttgagtgtacactatctcg

SEQ ID NO: 17853 - DNA, 25 bp, Homo sapien
cgtactgttacgtagggttacatta

SEQ ID NO: 17854 - DNA, 25 bp, Homo sapien
cgtactgttacgaagggttacatta

SEQ ID NO: 17855 - DNA, 25 bp, Homo sapien
tttattgagtcgacttcgtagtcta

SEQ ID NO: 17856 - DNA, 25 bp, Homo sapien
tttattgagtcgtcttcgtagtcta

SEQ ID NO: 17857 - DNA, 25 bp, Homo sapien
tccagagtcggtacgacgactcacg

SEQ ID NO: 17858 - DNA, 25 bp, Homo sapien
tccagagtcggttcgacgactcacg

SEQ ID NO: 17859 - DNA, 25 bp, Homo sapien
acgtagaagtggtcgtcgacctcgt

SEQ ID NO: 17860 - DNA, 25 bp, Homo sapien
acgtagaagtggacgtcgacctcgt

SEQ ID NO: 17861 - DNA, 25 bp, Homo sapien
ccaccacgtcggtaggtgggtaccc

SEQ ID NO: 17862 - DNA, 25 bp, Homo sapien
ccaccacgtcggaaggtgggtaccc

SEQ ID NO: 17863 - DNA, 25 bp, Homo sapien
tgaacctgtgtgaagcttcctcccg

SEQ ID NO: 17864 - DNA, 25 bp, Homo sapien
tgaacctgtgtgtagcttcctcccg

SEQ ID NO: 17865 - DNA, 25 bp, Homo sapien
gactctagtgtgtttgttcaccctc

SEQ ID NO: 17866 - DNA, 25 bp, Homo sapien
gactctagtgtgattgttcaccctc

SEQ ID NO: 17867 - DNA, 25 bp, Homo sapien
aacgaaaagatactgtgacccgtcg

SEQ ID NO: 17868 - DNA, 25 bp, Homo sapien
aacgaaaagatagtgtgacccgtcg

SEQ ID NO: 17869 - DNA, 25 bp, Homo sapien
taacaagaactgactgacacactcg

SEQ ID NO: 17870 - DNA, 25 bp, Homo sapien
taacaagaactgtctgacacactcg

SEQ ID NO: 17871 - DNA, 25 bp, Homo sapien
attagagacaaacgacccaaccgac

SEQ ID NO: 17872 - DNA, 25 bp, Homo sapien
attagagacaaaggacccaaccgac

SEQ ID NO: 17873 - DNA, 25 bp, Homo sapien
tgtagatgacagaaaccacaaccac

SEQ ID NO: 17874 - DNA, 25 bp, Homo sapien
tgtagatgacagtaaccacaaccac

SEQ ID NO: 17875 - DNA, 25 bp, Homo sapien
gtcgaggaggagtcgccactctaga

SEQ ID NO: 17876 - DNA, 25 bp, Homo sapien
gtcgaggaggagacgccactctaga

SEQ ID NO: 17877 - DNA, 25 bp, Homo sapien
cagtacttaggtataagtgtcccca

SEQ ID NO: 17878 - DNA, 25 bp, Homo sapien
cagtacttaggtttaagtgtcccca

SEQ ID NO: 17879 - DNA, 25 bp, Homo sapien
ccagtgacgatttgacgtcaaaagt

SEQ ID NO: 17880 - DNA, 25 bp, Homo sapien
ccagtgacgattagacgtcaaaagt

SEQ ID NO: 17881 - DNA, 25 bp, Homo sapien
ccaagtgagagtgaaagtccaacga

SEQ ID NO: 17882 - DNA, 25 bp, Homo sapien
ccaagtgagagtcaaagtccaacga

SEQ ID NO: 17883 - DNA, 25 bp, Homo sapien
ccggagaacgggtaagactgacaac

SEQ ID NO: 17884 - DNA, 25 bp, Homo sapien
ccggagaacgggaaagactgacaac

SEQ ID NO: 17885 - DNA, 25 bp, Homo sapien
gaagaacggaacgagactataaact

SEQ ID NO: 17886 - DNA, 25 bp, Homo sapien
gaagaacggaaccagactataaact

SEQ ID NO: 17887 - DNA, 25 bp, Homo sapien
tacttctacgacaactctttcaaac

SEQ ID NO: 17888 - DNA, 25 bp, Homo sapien
tacttctacgactactctttcaaac

SEQ ID NO: 17889 - DNA, 25 bp, Homo sapien
ccaaccgtagacacttccacgagga

SEQ ID NO: 17890 - DNA, 25 bp, Homo sapien
ccaaccgtagactcttccacgagga

SEQ ID NO: 17891 - DNA, 25 bp, Homo sapien
ttaaatcgaatgtgtcagtcatgac

SEQ ID NO: 17892 - DNA, 25 bp, Homo sapien
ttaaatcgaatgagtcagtcatgac

SEQ ID NO: 17893 - DNA, 25 bp, Homo sapien
agagggtgacgacgacctcgttcct

SEQ ID NO: 17894 - DNA, 25 bp, Homo sapien
agagggtgacgaggacctcgttcct

SEQ ID NO: 17895 - DNA, 25 bp, Homo sapien
gtcgtcgtcctgttcgcgtcggtcc

SEQ ID NO: 17896 - DNA, 25 bp, Homo sapien
gtcgtcgtcctgatcgcgtcggtcc

SEQ ID NO: 17897 - DNA, 25 bp, Homo sapien
gccccgtgactgaagagtcgtgacc

SEQ ID NO: 17898 - DNA, 25 bp, Homo sapien
gccccgtgactgtagagtcgtgacc

SEQ ID NO: 17899 - DNA, 25 bp, Homo sapien
gagggtcccactacgaacctcttcg

SEQ ID NO: 17900 - DNA, 25 bp, Homo sapien
gagggtcccacttcgaacctcttcg

SEQ ID NO: 17901 - DNA, 25 bp, Homo sapien
tgtggactgtaagacctagtatgac

SEQ ID NO: 17902 - DNA, 25 bp, Homo sapien
tgtggactgtaacacctagtatgac

SEQ ID NO: 17903 - DNA, 25 bp, Homo sapien
ttgtgtagtagaacccctcgactta

SEQ ID NO: 17904 - DNA, 25 bp, Homo sapien
ttgtgtagtagatcccctcgactta

SEQ ID NO: 17905 - DNA, 25 bp, Homo sapien
tggtacgtatgtcctctctgacttt

SEQ ID NO: 17906 - DNA, 25 bp, Homo sapien
tggtacgtatgtgctctctgacttt

SEQ ID NO: 17907 - DNA, 25 bp, Homo sapien
ccagtaggttgaaactctggtatgt

SEQ ID NO: 17908 - DNA, 25 bp, Homo sapien
ccagtaggttgatactctggtatgt

SEQ ID NO: 17909 - DNA, 25 bp, Homo sapien
ccgtaggtatcaagacttgtgtgtg

SEQ ID NO: 17910 - DNA, 25 bp, Homo sapien
ccgtaggtatcatgacttgtgtgtg

SEQ ID NO: 17911 - DNA, 25 bp, Homo sapien
gggcgtccctcgtcacctcgaggta

SEQ ID NO: 17912 - DNA, 25 bp, Homo sapien
gggcgtccctcgacacctcgaggta

SEQ ID NO: 17913 - DNA, 25 bp, Homo sapien
gaagtgtagtactcccaatgaggag

SEQ ID NO: 17914 - DNA, 25 bp, Homo sapien
gaagtgtagtacacccaatgaggag

SEQ ID NO: 17915 - DNA, 25 bp, Homo sapien
tccatgtgtctctgccgacatgaaa

SEQ ID NO: 17916 - DNA, 25 bp, Homo sapien
tccatgtgtctcagccgacatgaaa

SEQ ID NO: 17917 - DNA, 25 bp, Homo sapien
tacactattttggttacttacgaaa

SEQ ID NO: 17918 - DNA, 25 bp, Homo sapien
tacactattttgcttacttacgaaa

SEQ ID NO: 17919 - DNA, 25 bp, Homo sapien
tcaccgtttatgtaagtcttattag

SEQ ID NO: 17920 - DNA, 25 bp, Homo sapien
tcaccgtttatgaaagtcttattag

SEQ ID NO: 17921 - DNA, 25 bp, Homo sapien
atcacggtacttgtcatgtttaaac

SEQ ID NO: 17922 - DNA, 25 bp, Homo sapien
atcacggtacttctcatgtttaaac

SEQ ID NO: 17923 - DNA, 25 bp, Homo sapien
gaggtggtgactactgtttcgagac

SEQ ID NO: 17924 - DNA, 25 bp, Homo sapien
gaggtggtgacttctgtttcgagac

SEQ ID NO: 17925 - DNA, 25 bp, Homo sapien
agggtccgtccgtcttacgagggct

SEQ ID NO: 17926 - DNA, 25 bp, Homo sapien
agggtccgtccgacttacgagggct

SEQ ID NO: 17927 - DNA, 25 bp, Homo sapien
tacgtccttcgtctctccggtcgtt

SEQ ID NO: 17928 - DNA, 25 bp, Homo sapien
tacgtccttcgtgtctccggtcgtt

SEQ ID NO: 17929 - DNA, 25 bp, Homo sapien
gtagtcccgtcgtccgttcgttctg

SEQ ID NO: 17930 - DNA, 25 bp, Homo sapien
gtagtcccgtcgaccgttcgttctg

SEQ ID NO: 17931 - DNA, 25 bp, Homo sapien
tctgtagcccggacacgtcccggtg

SEQ ID NO: 17932 - DNA, 25 bp, Homo sapien
tctgtagcccggtcacgtcccggtg

SEQ ID NO: 17933 - DNA, 25 bp, Homo sapien
ttgtcgtttgtcgaaccgttccggg

SEQ ID NO: 17934 - DNA, 25 bp, Homo sapien
ttgtcgtttgtccaaccgttccggg

SEQ ID NO: 17935 - DNA, 25 bp, Homo sapien
gtttcggaggagtatggtgtcaccc

SEQ ID NO: 17936 - DNA, 25 bp, Homo sapien
gtttcggaggagaatggtgtcaccc

SEQ ID NO: 17937 - DNA, 25 bp, Homo sapien
cgacgtagaagtcatactttcatcc

SEQ ID NO: 17938 - DNA, 25 bp, Homo sapien
cgacgtagaagtgatactttcatcc

SEQ ID NO: 17939 - DNA, 25 bp, Homo sapien
acgacgagtgacgaagtattccatt

SEQ ID NO: 17940 - DNA, 25 bp, Homo sapien
acgacgagtgaccaagtattccatt

SEQ ID NO: 17941 - DNA, 25 bp, Homo sapien
gtgaccgtctcatcagtatcccttt

SEQ ID NO: 17942 - DNA, 25 bp, Homo sapien
gtgaccgtctcaacagtatcccttt

SEQ ID NO: 17943 - DNA, 25 bp, Homo sapien
ttgtctttcggagtatacgtcattt

SEQ ID NO: 17944 - DNA, 25 bp, Homo sapien
ttgtctttcggactatacgtcattt

SEQ ID NO: 17945 - DNA, 25 bp, Homo sapien
gggtttctctcaaatcaatcattgt

SEQ ID NO: 17946 - DNA, 25 bp, Homo sapien
gggtttctctcatatcaatcattgt

SEQ ID NO: 17947 - DNA, 25 bp, Homo sapien
aatttctgtcgttcagaccagtaag

SEQ ID NO: 17948 - DNA, 25 bp, Homo sapien
aatttctgtcgtacagaccagtaag

SEQ ID NO: 17949 - DNA, 25 bp, Homo sapien
aatgtctctgtgtaagtcctgtgta

SEQ ID NO: 17950 - DNA, 25 bp, Homo sapien
aatgtctctgtgaaagtcctgtgta

SEQ ID NO: 17951 - DNA, 25 bp, Homo sapien
ggaacgacacacacacggagtacgt

SEQ ID NO: 17952 - DNA, 25 bp, Homo sapien
ggaacgacacactcacggagtacgt

SEQ ID NO: 17953 - DNA, 25 bp, Homo sapien
catttcgtgactttgattccgattg

SEQ ID NO: 17954 - DNA, 25 bp, Homo sapien
catttcgtgactatgattccgattg

SEQ ID NO: 17955 - DNA, 25 bp, Homo sapien
attgttgttgttagactccacgggt

SEQ ID NO: 17956 - DNA, 25 bp, Homo sapien
attgttgttgtttgactccacgggt

SEQ ID NO: 17957 - DNA, 25 bp, Homo sapien
ttgttgtcagtattttaccttagcg

SEQ ID NO: 17958 - DNA, 25 bp, Homo sapien
ttgttgtcagtaatttaccttagcg

SEQ ID NO: 17959 - DNA, 25 bp, Homo sapien
gttccttccaaattctacgtcttgg

SEQ ID NO: 17960 - DNA, 25 bp, Homo sapien
gttccttccaaaatctacgtcttgg

SEQ ID NO: 17961 - DNA, 25 bp, Homo sapien
ttgtcttgtcttgtatgacctcctg

SEQ ID NO: 17962 - DNA, 25 bp, Homo sapien
ttgtcttgtcttctatgacctcctg

SEQ ID NO: 17963 - DNA, 25 bp, Homo sapien
ccactggtccatttcgaatctacag

SEQ ID NO: 17964 - DNA, 25 bp, Homo sapien
ccactggtccatatcgaatctacag

SEQ ID NO: 17965 - DNA, 25 bp, Homo sapien
atgaagtctcgtcgatgtttaatca

SEQ ID NO: 17966 - DNA, 25 bp, Homo sapien
atgaagtctcgtggatgtttaatca

SEQ ID NO: 17967 - DNA, 25 bp, Homo sapien
gtttacaccgagtcctagtcaccat

SEQ ID NO: 17968 - DNA, 25 bp, Homo sapien
gtttacaccgagacctagtcaccat

SEQ ID NO: 17969 - DNA, 25 bp, Homo sapien
ctctaagttctagagtgtactcact

SEQ ID NO: 17970 - DNA, 25 bp, Homo sapien
ctctaagttctacagtgtactcact

SEQ ID NO: 17971 - DNA, 25 bp, Homo sapien
tccacttagagttaccgtagttttc

SEQ ID NO: 17972 - DNA, 25 bp, Homo sapien
tccacttagagtaaccgtagttttc

SEQ ID NO: 17973 - DNA, 25 bp, Homo sapien
gaccatgattactctgatattatgt

SEQ ID NO: 17974 - DNA, 25 bp, Homo sapien
gaccatgattacactgatattatgt

SEQ ID NO: 17975 - DNA, 25 bp, Homo sapien
gaactatctttttccgatagttgtt

SEQ ID NO: 17976 - DNA, 25 bp, Homo sapien
gaactatcttttaccgatagttgtt

SEQ ID NO: 17977 - DNA, 25 bp, Homo sapien
gaacagattgtgacaacagttagtc

SEQ ID NO: 17978 - DNA, 25 bp, Homo sapien
gaacagattgtgtcaacagttagtc

SEQ ID NO: 17979 - DNA, 25 bp, Homo sapien
cagaaaagttggtacaggaggtcct

SEQ ID NO: 17980 - DNA, 25 bp, Homo sapien
cagaaaagttggaacaggaggtcct

SEQ ID NO: 17981 - DNA, 25 bp, Homo sapien
aaaggtatgtagcagacagggtctc

SEQ ID NO: 17982 - DNA, 25 bp, Homo sapien
aaaggtatgtaggagacagggtctc

SEQ ID NO: 17983 - DNA, 25 bp, Homo sapien
gacacaccaatacgtctaggtactc

SEQ ID NO: 17984 - DNA, 25 bp, Homo sapien
gacacaccaataggtctaggtactc

SEQ ID NO: 17985 - DNA, 25 bp, Homo sapien
gccaatcaaacgtacgtgtgtgtct

SEQ ID NO: 17986 - DNA, 25 bp, Homo sapien
gccaatcaaacgaacgtgtgtgtct

SEQ ID NO: 17987 - DNA, 25 bp, Homo sapien
ccgtactcacaacctacggtcgtta

SEQ ID NO: 17988 - DNA, 25 bp, Homo sapien
ccgtactcacaagctacggtcgtta

SEQ ID NO: 17989 - DNA, 25 bp, Homo sapien
taagtagaacccaaccaggtcttcg

SEQ ID NO: 17990 - DNA, 25 bp, Homo sapien
taagtagaaccctaccaggtcttcg

SEQ ID NO: 17991 - DNA, 25 bp, Homo sapien
tggtttcacactcaaagtgtcaact

SEQ ID NO: 17992 - DNA, 25 bp, Homo sapien
tggtttcacactgaaagtgtcaact

SEQ ID NO: 17993 - DNA, 25 bp, Homo sapien
ggtcacgtcacagtgacagtttatt

SEQ ID NO: 17994 - DNA, 25 bp, Homo sapien
ggtcacgtcacactgacagtttatt

SEQ ID NO: 17995 - DNA, 25 bp, Homo sapien
gggtctgacacaaggacccggactt

SEQ ID NO: 17996 - DNA, 25 bp, Homo sapien
gggtctgacacatggacccggactt

SEQ ID NO: 17997 - DNA, 25 bp, Homo sapien
ggaggtcacgagtaggtcccgaacc

SEQ ID NO: 17998 - DNA, 25 bp, Homo sapien
ggaggtcacgagaaggtcccgaacc

SEQ ID NO: 17999 - DNA, 25 bp, Homo sapien
cctggtgccggaaggtcaaaaccgt

SEQ ID NO: 18000 - DNA, 25 bp, Homo sapien
cctggtgccggatggtcaaaaccgt

SEQ ID NO: 18001 - DNA, 25 bp, Homo sapien
gtgactcagcacgtaaaaaactaaa

SEQ ID NO: 18002 - DNA, 25 bp, Homo sapien
gtgactcagcacctaaaaaactaaa

SEQ ID NO: 18003 - DNA, 25 bp, Homo sapien
cgtgcaaaagatgagaccaacactt

SEQ ID NO: 18004 - DNA, 25 bp, Homo sapien
cgtgcaaaagatcagaccaacactt

SEQ ID NO: 18005 - DNA, 25 bp, Homo sapien
ggataattcgatgatccttctcgta

SEQ ID NO: 18006 - DNA, 25 bp, Homo sapien
ggataattcgatcatccttctcgta

SEQ ID NO: 18007 - DNA, 25 bp, Homo sapien
cgtgaacgaatatgacccactttac

SEQ ID NO: 18008 - DNA, 25 bp, Homo sapien
cgtgaacgaataagacccactttac

SEQ ID NO: 18009 - DNA, 25 bp, Homo sapien
cggctcatagcgtccgccagtctgt

SEQ ID NO: 18010 - DNA, 25 bp, Homo sapien
cggctcatagcgaccgccagtctgt

SEQ ID NO: 18011 - DNA, 25 bp, Homo sapien
gtcgacgggtcgaccatcggacagt

SEQ ID NO: 18012 - DNA, 25 bp, Homo sapien
gtcgacgggtcgtccatcggacagt

SEQ ID NO: 18013 - DNA, 25 bp, Homo sapien
ccctgttcggtgtccccgtgaacgt

SEQ ID NO: 18014 - DNA, 25 bp, Homo sapien
ccctgttcggtgaccccgtgaacgt

SEQ ID NO: 18015 - DNA, 25 bp, Homo sapien
ctcctacccagtgacacaggcataa

SEQ ID NO: 18016 - DNA, 25 bp, Homo sapien
ctcctacccagtcacacaggcataa

SEQ ID NO: 18017 - DNA, 25 bp, Homo sapien
cgacctccggtacctagggagtatc

SEQ ID NO: 18018 - DNA, 25 bp, Homo sapien
cgacctccggtagctagggagtatc

SEQ ID NO: 18019 - DNA, 25 bp, Homo sapien
gaccggtcggtccttgagctacact

SEQ ID NO: 18020 - DNA, 25 bp, Homo sapien
gaccggtcggtcgttgagctacact

SEQ ID NO: 18021 - DNA, 25 bp, Homo sapien
agcggtcccgattcaccttgggtga

SEQ ID NO: 18022 - DNA, 25 bp, Homo sapien
agcggtcccgatacaccttgggtga

SEQ ID NO: 18023 - DNA, 25 bp, Homo sapien
gtacctatggtctgtggtgacgtca

SEQ ID NO: 18024 - DNA, 25 bp, Homo sapien
gtacctatggtcagtggtgacgtca

SEQ ID NO: 18025 - DNA, 25 bp, Homo sapien
tccccacgacgtctgtggtcacgaa

SEQ ID NO: 18026 - DNA, 25 bp, Homo sapien
tccccacgacgtgtgtggtcacgaa

SEQ ID NO: 18027 - DNA, 25 bp, Homo sapien
ccttaactagttcgtctagacacgt

SEQ ID NO: 18028 - DNA, 25 bp, Homo sapien
ccttaactagttggtctagacacgt

SEQ ID NO: 18029 - DNA, 25 bp, Homo sapien
cactaattatctcagttacgtcgtg

SEQ ID NO: 18030 - DNA, 25 bp, Homo sapien
cactaattatctgagttacgtcgtg

SEQ ID NO: 18031 - DNA, 25 bp, Homo sapien
ctaaagagtttctttagactggcgg

SEQ ID NO: 18032 - DNA, 25 bp, Homo sapien
ctaaagagtttcattagactggcgg

SEQ ID NO: 18033 - DNA, 25 bp, Homo sapien
acgaaatacttttacacatcctttt

SEQ ID NO: 18034 - DNA, 25 bp, Homo sapien
acgaaatactttaacacatcctttt

SEQ ID NO: 18035 - DNA, 25 bp, Homo sapien
aaaagatacgtgtcaataccgattt

SEQ ID NO: 18036 - DNA, 25 bp, Homo sapien
aaaagatacgtgacaataccgattt

SEQ ID NO: 18037 - DNA, 25 bp, Homo sapien
cctaagacaaggaccatgtgagttt

SEQ ID NO: 18038 - DNA, 25 bp, Homo sapien
cctaagacaaggtccatgtgagttt

SEQ ID NO: 18039 - DNA, 25 bp, Homo sapien
cctaaaatgagtttttgtcactgta

SEQ ID NO: 18040 - DNA, 25 bp, Homo sapien
cctaaaatgagtatttgtcactgta

SEQ ID NO: 18041 - DNA, 25 bp, Homo sapien
taacaaaggatcgttgtaccgagtc

SEQ ID NO: 18042 - DNA, 25 bp, Homo sapien
taacaaaggatccttgtaccgagtc

SEQ ID NO: 18043 - DNA, 25 bp, Homo sapien
ttaaaactagggtactcttcggtaa

SEQ ID NO: 18044 - DNA, 25 bp, Homo sapien
ttaaaactagggaactcttcggtaa

SEQ ID NO: 18045 - DNA, 25 bp, Homo sapien
aagacagggtcgtgtcgtcggttct

SEQ ID NO: 18046 - DNA, 25 bp, Homo sapien
aagacagggtcgagtcgtcggttct

SEQ ID NO: 18047 - DNA, 25 bp, Homo sapien
agctcgatgtgtaagtcgtcataac

SEQ ID NO: 18048 - DNA, 25 bp, Homo sapien
agctcgatgtgttagtcgtcataac

SEQ ID NO: 18049 - DNA, 25 bp, Homo sapien
taaaacgtgtttggtccgagtatac

SEQ ID NO: 18050 - DNA, 25 bp, Homo sapien
taaaacgtgtttcgtccgagtatac

SEQ ID NO: 18051 - DNA, 25 bp, Homo sapien
aaattataggtcaggtcccgtatga

SEQ ID NO: 18052 - DNA, 25 bp, Homo sapien
aaattataggtctggtcccgtatga

SEQ ID NO: 18053 - DNA, 25 bp, Homo sapien
acaagggagacgtcttgggtctgtt

SEQ ID NO: 18054 - DNA, 25 bp, Homo sapien
acaagggagacgacttgggtctgtt

SEQ ID NO: 18055 - DNA, 25 bp, Homo sapien
tagcaacacggcatcgtgtcccgtt

SEQ ID NO: 18056 - DNA, 25 bp, Homo sapien
tagcaacacggcttcgtgtcccgtt

SEQ ID NO: 18057 - DNA, 25 bp, Homo sapien
ctcaggacaagactgtgacccgacc

SEQ ID NO: 18058 - DNA, 25 bp, Homo sapien
ctcaggacaagagtgtgacccgacc

SEQ ID NO: 18059 - DNA, 25 bp, Homo sapien
tgtcgagggagaccatgggttcccc

SEQ ID NO: 18060 - DNA, 25 bp, Homo sapien
tgtcgagggagagcatgggttcccc

SEQ ID NO: 18061 - DNA, 25 bp, Homo sapien
gtcagggagagaaaggtttccactg

SEQ ID NO: 18062 - DNA, 25 bp, Homo sapien
gtcagggagagataggtttccactg

SEQ ID NO: 18063 - DNA, 25 bp, Homo sapien
aaatttggtcagtggtgattccact

SEQ ID NO: 18064 - DNA, 25 bp, Homo sapien
aaatttggtcagaggtgattccact

SEQ ID NO: 18065 - DNA, 25 bp, Homo sapien
aattctgagacgttacctttttgac

SEQ ID NO: 18066 - DNA, 25 bp, Homo sapien
aattctgagacgatacctttttgac

SEQ ID NO: 18067 - DNA, 25 bp, Homo sapien
atttcagtcacgtaacagttgttca

SEQ ID NO: 18068 - DNA, 25 bp, Homo sapien
atttcagtcacgaaacagttgttca

SEQ ID NO: 18069 - DNA, 25 bp, Homo sapien
ttgttgtctaccgaccgttgatctt

SEQ ID NO: 18070 - DNA, 25 bp, Homo sapien
ttgttgtctacccaccgttgatctt

SEQ ID NO: 18071 - DNA, 25 bp, Homo sapien
ttgttccgagtttacgcctgaacct

SEQ ID NO: 18072 - DNA, 25 bp, Homo sapien
ttgttccgagttaacgcctgaacct

SEQ ID NO: 18073 - DNA, 25 bp, Homo sapien
aactatgacgactggcccttataac

SEQ ID NO: 18074 - DNA, 25 bp, Homo sapien
aactatgacgacaggcccttataac

SEQ ID NO: 18075 - DNA, 25 bp, Homo sapien
ttggacaaactgaattcctgtgaac

SEQ ID NO: 18076 - DNA, 25 bp, Homo sapien
ttggacaaactgtattcctgtgaac

SEQ ID NO: 18077 - DNA, 25 bp, Homo sapien
aaataactaaaggttctagtgctac

SEQ ID NO: 18078 - DNA, 25 bp, Homo sapien
aaataactaaagcttctagtgctac

SEQ ID NO: 18079 - DNA, 25 bp, Homo sapien
gaagagacaaaggactttataacac

SEQ ID NO: 18080 - DNA, 25 bp, Homo sapien
gaagagacaaagcactttataacac

SEQ ID NO: 18081 - DNA, 25 bp, Homo sapien
gaggaggtcgaaataaccttatcaa

SEQ ID NO: 18082 - DNA, 25 bp, Homo sapien
gaggaggtcgaattaaccttatcaa

SEQ ID NO: 18083 - DNA, 25 bp, Homo sapien
gtgacgacgaagaacctacgattca

SEQ ID NO: 18084 - DNA, 25 bp, Homo sapien
gtgacgacgaagtacctacgattca

SEQ ID NO: 18085 - DNA, 25 bp, Homo sapien
ccgacagtggtaccacgaccgtcat

SEQ ID NO: 18086 - DNA, 25 bp, Homo sapien
ccgacagtggtagcacgaccgtcat

SEQ ID NO: 18087 - DNA, 25 bp, Homo sapien
cttccaagtaccacagaccgcgagt

SEQ ID NO: 18088 - DNA, 25 bp, Homo sapien
cttccaagtacctcagaccgcgagt

SEQ ID NO: 18089 - DNA, 25 bp, Homo sapien
ttgtttaatccgttgtgagtccgag

SEQ ID NO: 18090 - DNA, 25 bp, Homo sapien
ttgtttaatccgatgtgagtccgag

SEQ ID NO: 18091 - DNA, 25 bp, Homo sapien
aagttgaggtaccaagagctactgg

SEQ ID NO: 18092 - DNA, 25 bp, Homo sapien
aagttgaggtacgaagagctactgg

SEQ ID NO: 18093 - DNA, 25 bp, Homo sapien
gtctagtagttgaccgacgatctta

SEQ ID NO: 18094 - DNA, 25 bp, Homo sapien
gtctagtagttgtccgacgatctta

SEQ ID NO: 18095 - DNA, 25 bp, Homo sapien
ttgttgttcgggtcgagtcttacga

SEQ ID NO: 18096 - DNA, 25 bp, Homo sapien
ttgttgttcgggacgagtcttacga

SEQ ID NO: 18097 - DNA, 25 bp, Homo sapien
tgagtctagggcagagtacttgact

SEQ ID NO: 18098 - DNA, 25 bp, Homo sapien
tgagtctagggctgagtacttgact

SEQ ID NO: 18099 - DNA, 25 bp, Homo sapien
cagttgtagacgacgtagtatttac

SEQ ID NO: 18100 - DNA, 25 bp, Homo sapien
cagttgtagacgtcgtagtatttac

SEQ ID NO: 18101 - DNA, 25 bp, Homo sapien
cgctcagtgtagtgagagtcgcgac

SEQ ID NO: 18102 - DNA, 25 bp, Homo sapien
cgctcagtgtagagagagtcgcgac

SEQ ID NO: 18103 - DNA, 25 bp, Homo sapien
tttctcggtgagagtaagactcccc

SEQ ID NO: 18104 - DNA, 25 bp, Homo sapien
tttctcggtgagtgtaagactcccc

SEQ ID NO: 18105 - DNA, 25 bp, Homo sapien
catctgtgccagaagagtgtccggt

SEQ ID NO: 18106 - DNA, 25 bp, Homo sapien
catctgtgccagtagagtgtccggt

SEQ ID NO: 18107 - DNA, 25 bp, Homo sapien
tatgtttccgcgttaggttatactt

SEQ ID NO: 18108 - DNA, 25 bp, Homo sapien
tatgtttccgcgataggttatactt

SEQ ID NO: 18109 - DNA, 25 bp, Homo sapien
atagtgcacttaatactgacatcta

SEQ ID NO: 18110 - DNA, 25 bp, Homo sapien
atagtgcacttattactgacatcta

SEQ ID NO: 18111 - DNA, 25 bp, Homo sapien
atagtgtaggagtattttccccgtt

SEQ ID NO: 18112 - DNA, 25 bp, Homo sapien
atagtgtaggagaattttccccgtt

SEQ ID NO: 18113 - DNA, 25 bp, Homo sapien
tgtgacgaggagtccggaacaccta

SEQ ID NO: 18114 - DNA, 25 bp, Homo sapien
tgtgacgaggagaccggaacaccta

SEQ ID NO: 18115 - DNA, 25 bp, Homo sapien
tccagtgagcccagacacacgacgg

SEQ ID NO: 18116 - DNA, 25 bp, Homo sapien
tccagtgagccctgacacacgacgg

SEQ ID NO: 18117 - DNA, 25 bp, Homo sapien
gacgggaccgtacaattactagagt

SEQ ID NO: 18118 - DNA, 25 bp, Homo sapien
gacgggaccgtagaattactagagt

SEQ ID NO: 18119 - DNA, 25 bp, Homo sapien
cgagggtactcgggggagacatagt

SEQ ID NO: 18120 - DNA, 25 bp, Homo sapien
cgagggtactcgcgggagacatagt

SEQ ID NO: 18121 - DNA, 25 bp, Homo sapien
actgtaagtatctctagttgacatt

SEQ ID NO: 18122 - DNA, 25 bp, Homo sapien
actgtaagtatcactagttgacatt

SEQ ID NO: 18123 - DNA, 25 bp, Homo sapien
ctctgtgaagttctcagttttaagt

SEQ ID NO: 18124 - DNA, 25 bp, Homo sapien
ctctgtgaagttgtcagttttaagt

SEQ ID NO: 18125 - DNA, 25 bp, Homo sapien
tcctggagtaatgtcaatctaaagt

SEQ ID NO: 18126 - DNA, 25 bp, Homo sapien
tcctggagtaatctcaatctaaagt

SEQ ID NO: 18127 - DNA, 25 bp, Homo sapien
cttcgtacgaattccccgacagtaa

SEQ ID NO: 18128 - DNA, 25 bp, Homo sapien
cttcgtacgaataccccgacagtaa

SEQ ID NO: 18129 - DNA, 25 bp, Homo sapien
tcaaagagactgtgtgtgttctaca

SEQ ID NO: 18130 - DNA, 25 bp, Homo sapien
tcaaagagactgagtgtgttctaca

SEQ ID NO: 18131 - DNA, 25 bp, Homo sapien
ttgaacttcttagaagtcgtatttc

SEQ ID NO: 18132 - DNA, 25 bp, Homo sapien
ttgaacttcttacaagtcgtatttc

SEQ ID NO: 18133 - DNA, 25 bp, Homo sapien
tctatattatctctagagtggtttc

SEQ ID NO: 18134 - DNA, 25 bp, Homo sapien
tctatattatctgtagagtggtttc

SEQ ID NO: 18135 - DNA, 25 bp, Homo sapien
ctgaagttttcttgaagttgtcctt

SEQ ID NO: 18136 - DNA, 25 bp, Homo sapien
ctgaagttttctagaagttgtcctt

SEQ ID NO: 18137 - DNA, 25 bp, Homo sapien
cacctttctgtctatgttacgggat

SEQ ID NO: 18138 - DNA, 25 bp, Homo sapien
cacctttctgtcaatgttacgggat

SEQ ID NO: 18139 - DNA, 25 bp, Homo sapien
cacaccttcgggactattcacgaat

SEQ ID NO: 18140 - DNA, 25 bp, Homo sapien
cacaccttcgggtctattcacgaat

SEQ ID NO: 18141 - DNA, 25 bp, Homo sapien
tccggagtactctcgacgtagacgc

SEQ ID NO: 18142 - DNA, 25 bp, Homo sapien
tccggagtactcacgacgtagacgc

SEQ ID NO: 18143 - DNA, 25 bp, Homo sapien
gcccggtgtcggactaccgacgact

SEQ ID NO: 18144 - DNA, 25 bp, Homo sapien
gcccggtgtcggtctaccgacgact

SEQ ID NO: 18145 - DNA, 25 bp, Homo sapien
aaggattactttcgacactatgtga

SEQ ID NO: 18146 - DNA, 25 bp, Homo sapien
aaggattactttggacactatgtga

SEQ ID NO: 18147 - DNA, 25 bp, Homo sapien
agttactatcggtcacacgtgtgag

SEQ ID NO: 18148 - DNA, 25 bp, Homo sapien
agttactatcggacacacgtgtgag

SEQ ID NO: 18149 - DNA, 25 bp, Homo sapien
ttctggtacaggtcacacaggtgta

SEQ ID NO: 18150 - DNA, 25 bp, Homo sapien
ttctggtacaggacacacaggtgta

SEQ ID NO: 18151 - DNA, 25 bp, Homo sapien
cttctcctcacaaacctgggtgcgt

SEQ ID NO: 18152 - DNA, 25 bp, Homo sapien
cttctcctcacatacctgggtgcgt

SEQ ID NO: 18153 - DNA, 25 bp, Homo sapien
gcgttatcctcagacaataaatgta

SEQ ID NO: 18154 - DNA, 25 bp, Homo sapien
gcgttatcctcacacaataaatgta

SEQ ID NO: 18155 - DNA, 25 bp, Homo sapien
gtttaatcctctactgataagtgta

SEQ ID NO: 18156 - DNA, 25 bp, Homo sapien
gtttaatcctcttctgataagtgta

SEQ ID NO: 18157 - DNA, 25 bp, Homo sapien
ggttcgtttgacttttgacagatca

SEQ ID NO: 18158 - DNA, 25 bp, Homo sapien
ggttcgtttgacatttgacagatca

SEQ ID NO: 18159 - DNA, 25 bp, Homo sapien
gagtgtcttcgtcttttcgaatttg

SEQ ID NO: 18160 - DNA, 25 bp, Homo sapien
gagtgtcttcgtgttttcgaatttg

SEQ ID NO: 18161 - DNA, 25 bp, Homo sapien
gtaacttacaggttcttttagtttc

SEQ ID NO: 18162 - DNA, 25 bp, Homo sapien
gtaacttacaggatcttttagtttc

SEQ ID NO: 18163 - DNA, 25 bp, Homo sapien
cgacttaaggtatttcggagttgtc

SEQ ID NO: 18164 - DNA, 25 bp, Homo sapien
cgacttaaggtaattcggagttgtc

SEQ ID NO: 18165 - DNA, 25 bp, Homo sapien
tcgtatctattgtcccaagtgtgtc

SEQ ID NO: 18166 - DNA, 25 bp, Homo sapien
tcgtatctattgacccaagtgtgtc

SEQ ID NO: 18167 - DNA, 25 bp, Homo sapien
tgttagaacatctactaggtcatct

SEQ ID NO: 18168 - DNA, 25 bp, Homo sapien
tgttagaacatcaactaggtcatct

SEQ ID NO: 18169 - DNA, 25 bp, Homo sapien
tgatttacagtctctcgtgtctaga

SEQ ID NO: 18170 - DNA, 25 bp, Homo sapien
tgatttacagtcactcgtgtctaga

SEQ ID NO: 18171 - DNA, 25 bp, Homo sapien
tccctgaggggtcgtcactcccaga

SEQ ID NO: 18172 - DNA, 25 bp, Homo sapien
tccctgaggggtggtcactcccaga

SEQ ID NO: 18173 - DNA, 25 bp, Homo sapien
agtccctgggggtccgtaccctaac

SEQ ID NO: 18174 - DNA, 25 bp, Homo sapien
agtccctgggggaccgtaccctaac

SEQ ID NO: 18175 - DNA, 25 bp, Homo sapien
accttaggtaggtcctccactacct

SEQ ID NO: 18176 - DNA, 25 bp, Homo sapien
accttaggtaggacctccactacct

SEQ ID NO: 18177 - DNA, 25 bp, Homo sapien
tatgtgtactacactgatctctttg

SEQ ID NO: 18178 - DNA, 25 bp, Homo sapien
tatgtgtactactctgatctctttg

SEQ ID NO: 18179 - DNA, 25 bp, Homo sapien
gtgacttctgtcttactcttgttcg

SEQ ID NO: 18180 - DNA, 25 bp, Homo sapien
gtgacttctgtcatactcttgttcg

SEQ ID NO: 18181 - DNA, 25 bp, Homo sapien
actactagacactccactaggggtg

SEQ ID NO: 18182 - DNA, 25 bp, Homo sapien
actactagacacaccactaggggtg

SEQ ID NO: 18183 - DNA, 25 bp, Homo sapien
agacgacgactcttgacccggggac

SEQ ID NO: 18184 - DNA, 25 bp, Homo sapien
agacgacgactcatgacccggggac

SEQ ID NO: 18185 - DNA, 25 bp, Homo sapien
taaaagtcataagacccagacgaac

SEQ ID NO: 18186 - DNA, 25 bp, Homo sapien
taaaagtcataacacccagacgaac

SEQ ID NO: 18187 - DNA, 25 bp, Homo sapien
aagtggtacaaccggtccgaccaga

SEQ ID NO: 18188 - DNA, 25 bp, Homo sapien
aagtggtacaacgggtccgaccaga

SEQ ID NO: 18189 - DNA, 25 bp, Homo sapien
cggagagcgacagagatcttcaaga

SEQ ID NO: 18190 - DNA, 25 bp, Homo sapien
cggagagcgacacagatcttcaaga

SEQ ID NO: 18191 - DNA, 25 bp, Homo sapien
ggtaaaagcttcaactcgggaacga

SEQ ID NO: 18192 - DNA, 25 bp, Homo sapien
ggtaaaagcttctactcgggaacga

SEQ ID NO: 18193 - DNA, 25 bp, Homo sapien
taaactgtacttgtgtttcaacgat

SEQ ID NO: 18194 - DNA, 25 bp, Homo sapien
taaactgtacttctgtttcaacgat

SEQ ID NO: 18195 - DNA, 25 bp, Homo sapien
aaactctcataggtgtttcgttaca

SEQ ID NO: 18196 - DNA, 25 bp, Homo sapien
aaactctcatagctgtttcgttaca

SEQ ID NO: 18197 - DNA, 25 bp, Homo sapien
gtaaaaaacttccttttagatacga

SEQ ID NO: 18198 - DNA, 25 bp, Homo sapien
gtaaaaaacttcgttttagatacga

SEQ ID NO: 18199 - DNA, 25 bp, Homo sapien
aaacaaagtcacctgtcctttgcgt

SEQ ID NO: 18200 - DNA, 25 bp, Homo sapien
aaacaaagtcacgtgtcctttgcgt

SEQ ID NO: 18201 - DNA, 25 bp, Homo sapien
aagaagaacagcaggaatccgccgt

SEQ ID NO: 18202 - DNA, 25 bp, Homo sapien
aagaagaacagctggaatccgccgt

SEQ ID NO: 18203 - DNA, 25 bp, Homo sapien
actgtacagaaacacggaatcatga

SEQ ID NO: 18204 - DNA, 25 bp, Homo sapien
actgtacagaaagacggaatcatga

SEQ ID NO: 18205 - DNA, 25 bp, Homo sapien
tcggtaaggaaaacacaaaaccact

SEQ ID NO: 18206 - DNA, 25 bp, Homo sapien
tcggtaaggaaatcacaaaaccact

SEQ ID NO: 18207 - DNA, 25 bp, Homo sapien
cgtgacattgttgtccacttctccc

SEQ ID NO: 18208 - DNA, 25 bp, Homo sapien
cgtgacattgttctccacttctccc

SEQ ID NO: 18209 - DNA, 25 bp, Homo sapien
cacgtgtagatttacaaagattccc

SEQ ID NO: 18210 - DNA, 25 bp, Homo sapien
cacgtgtagattaacaaagattccc

SEQ ID NO: 18211 - DNA, 25 bp, Homo sapien
tccctttcaagtagagacttcccgt

SEQ ID NO: 18212 - DNA, 25 bp, Homo sapien
tccctttcaagttgagacttcccgt

SEQ ID NO: 18213 - DNA, 25 bp, Homo sapien
acctcatctgccagtttaattgcag

SEQ ID NO: 18214 - DNA, 25 bp, Homo sapien
acctcatctgcctgtttaattgcag

SEQ ID NO: 18215 - DNA, 25 bp, Homo sapien
ttctgtttccctcatagtctgggga

SEQ ID NO: 18216 - DNA, 25 bp, Homo sapien
ttctgtttccctgatagtctgggga

SEQ ID NO: 18217 - DNA, 25 bp, Homo sapien
acgtttatccccattttaagagaag

SEQ ID NO: 18218 - DNA, 25 bp, Homo sapien
acgtttatcccctttttaagagaag

SEQ ID NO: 18219 - DNA, 25 bp, Homo sapien
cgtttcgccttccttttaacaggag

SEQ ID NO: 18220 - DNA, 25 bp, Homo sapien
cgtttcgccttcgttttaacaggag

SEQ ID NO: 18221 - DNA, 25 bp, Homo sapien
attctgacctcagttcgaggagctg

SEQ ID NO: 18222 - DNA, 25 bp, Homo sapien
attctgacctcacttcgaggagctg

SEQ ID NO: 18223 - DNA, 25 bp, Homo sapien
gacgaaacgaggtctgacggtctgt

SEQ ID NO: 18224 - DNA, 25 bp, Homo sapien
gacgaaacgaggactgacggtctgt

SEQ ID NO: 18225 - DNA, 25 bp, Homo sapien
aagtgtataggcagtgagtctactc

SEQ ID NO: 18226 - DNA, 25 bp, Homo sapien
aagtgtataggctgtgagtctactc

SEQ ID NO: 18227 - DNA, 25 bp, Homo sapien
cactgtctctagatcctaaagtaag

SEQ ID NO: 18228 - DNA, 25 bp, Homo sapien
cactgtctctagttcctaaagtaag

SEQ ID NO: 18229 - DNA, 25 bp, Homo sapien
caagtagtactatcctctccagggt

SEQ ID NO: 18230 - DNA, 25 bp, Homo sapien
caagtagtactaacctctccagggt

SEQ ID NO: 18231 - DNA, 25 bp, Homo sapien
gtaaatatcttcgtacccaaaggta

SEQ ID NO: 18232 - DNA, 25 bp, Homo sapien
gtaaatatcttcctacccaaaggta

SEQ ID NO: 18233 - DNA, 25 bp, Homo sapien
ggaacaattactacggacaagataa

SEQ ID NO: 18234 - DNA, 25 bp, Homo sapien
ggaacaattacttcggacaagataa

SEQ ID NO: 18235 - DNA, 25 bp, Homo sapien
aacgtaaggataagcgacaccatca

SEQ ID NO: 18236 - DNA, 25 bp, Homo sapien
aacgtaaggatatgcgacaccatca

SEQ ID NO: 18237 - DNA, 25 bp, Homo sapien
acgtaggagcaaggtaccctcttct

SEQ ID NO: 18238 - DNA, 25 bp, Homo sapien
acgtaggagcaacgtaccctcttct

SEQ ID NO: 18239 - DNA, 25 bp, Homo sapien
tccacgggggtcacaaacgatagtt

SEQ ID NO: 18240 - DNA, 25 bp, Homo sapien
tccacgggggtctcaaacgatagtt

SEQ ID NO: 18241 - DNA, 25 bp, Homo sapien
cgagagggagtcgaaacacactcgg

SEQ ID NO: 18242 - DNA, 25 bp, Homo sapien
cgagagggagtccaaacacactcgg

SEQ ID NO: 18243 - DNA, 25 bp, Homo sapien
ggagaggcgtgtcaactaccactgg

SEQ ID NO: 18244 - DNA, 25 bp, Homo sapien
ggagaggcgtgtgaactaccactgg

SEQ ID NO: 18245 - DNA, 25 bp, Homo sapien
tcgtgaaaaggtggttacccgtgag

SEQ ID NO: 18246 - DNA, 25 bp, Homo sapien
tcgtgaaaaggtcgttacccgtgag

SEQ ID NO: 18247 - DNA, 25 bp, Homo sapien
ctcgtcgtgaaagtggcaccaagag

SEQ ID NO: 18248 - DNA, 25 bp, Homo sapien
ctcgtcgtgaaactggcaccaagag

SEQ ID NO: 18249 - DNA, 25 bp, Homo sapien
tacttggtgccgtagacaccacatc

SEQ ID NO: 18250 - DNA, 25 bp, Homo sapien
tacttggtgccgaagacaccacatc

SEQ ID NO: 18251 - DNA, 25 bp, Homo sapien
aacccctgaagagatcgacacggtt

SEQ ID NO: 18252 - DNA, 25 bp, Homo sapien
aacccctgaagacatcgacacggtt

SEQ ID NO: 18253 - DNA, 25 bp, Homo sapien
caggggacgacaaagcgcgagtact

SEQ ID NO: 18254 - DNA, 25 bp, Homo sapien
caggggacgacatagcgcgagtact

SEQ ID NO: 18255 - DNA, 25 bp, Homo sapien
tcggcatctagtgtaattaccttca

SEQ ID NO: 18256 - DNA, 25 bp, Homo sapien
tcggcatctagtctaattaccttca

SEQ ID NO: 18257 - DNA, 25 bp, Homo sapien
gactcttagctacttacccgtaacg

SEQ ID NO: 18258 - DNA, 25 bp, Homo sapien
gactcttagctagttacccgtaacg

SEQ ID NO: 18259 - DNA, 25 bp, Homo sapien
aattacgtataaggtctaccggtta

SEQ ID NO: 18260 - DNA, 25 bp, Homo sapien
aattacgtataacgtctaccggtta

SEQ ID NO: 18261 - DNA, 25 bp, Homo sapien
gacgtcctgtacctgagggtgtata

SEQ ID NO: 18262 - DNA, 25 bp, Homo sapien
gacgtcctgtacgtgagggtgtata

SEQ ID NO: 18263 - DNA, 25 bp, Homo sapien
ctgacgtcctcttctaccagggttc

SEQ ID NO: 18264 - DNA, 25 bp, Homo sapien
ctgacgtcctctactaccagggttc

SEQ ID NO: 18265 - DNA, 25 bp, Homo sapien
ctcggtgtccttctaagccagttct

SEQ ID NO: 18266 - DNA, 25 bp, Homo sapien
ctcggtgtccttgtaagccagttct

SEQ ID NO: 18267 - DNA, 25 bp, Homo sapien
ccttttccgttatctgtcccttcgg

SEQ ID NO: 18268 - DNA, 25 bp, Homo sapien
ccttttccgttaactgtcccttcgg

SEQ ID NO: 18269 - DNA, 25 bp, Homo sapien
agccgtcttttcatgttgacctaaa

SEQ ID NO: 18270 - DNA, 25 bp, Homo sapien
agccgtcttttcttgttgacctaaa

SEQ ID NO: 18271 - DNA, 25 bp, Homo sapien
gcgttgcgcgtggtcctcggtccaa

SEQ ID NO: 18272 - DNA, 25 bp, Homo sapien
gcgttgcgcgtgctcctcggtccaa

SEQ ID NO: 18273 - DNA, 25 bp, Homo sapien
ggtgacgaccggtctctgcccacag

SEQ ID NO: 18274 - DNA, 25 bp, Homo sapien
ggtgacgaccggactctgcccacag

SEQ ID NO: 18275 - DNA, 25 bp, Homo sapien
caagagtcccgatctgccgtcgaca

SEQ ID NO: 18276 - DNA, 25 bp, Homo sapien
caagagtcccgaactgccgtcgaca

SEQ ID NO: 18277 - DNA, 25 bp, Homo sapien
cctcagagcgagacagcgggtccga

SEQ ID NO: 18278 - DNA, 25 bp, Homo sapien
cctcagagcgagtcagcgggtccga

SEQ ID NO: 18279 - DNA, 25 bp, Homo sapien
acaccgagaaggagtcagtggactt

SEQ ID NO: 18280 - DNA, 25 bp, Homo sapien
acaccgagaaggtgtcagtggactt

SEQ ID NO: 18281 - DNA, 25 bp, Homo sapien
atacaccaaactaggagtcggtcct

SEQ ID NO: 18282 - DNA, 25 bp, Homo sapien
atacaccaaacttggagtcggtcct

SEQ ID NO: 18283 - DNA, 25 bp, Homo sapien
agaggaacatcttcgcgaccctcct

SEQ ID NO: 18284 - DNA, 25 bp, Homo sapien
agaggaacatctacgcgaccctcct

SEQ ID NO: 18285 - DNA, 25 bp, Homo sapien
aaaggtgaatcgtagtgagatcacc

SEQ ID NO: 18286 - DNA, 25 bp, Homo sapien
aaaggtgaatcgaagtgagatcacc

SEQ ID NO: 18287 - DNA, 25 bp, Homo sapien
aacagttcgagtaaaggaccatact

SEQ ID NO: 18288 - DNA, 25 bp, Homo sapien
aacagttcgagttaaggaccatact

SEQ ID NO: 18289 - DNA, 25 bp, Homo sapien
tcgtgggagttttgtctttggcatc

SEQ ID NO: 18290 - DNA, 25 bp, Homo sapien
tcgtgggagtttagtctttggcatc

SEQ ID NO: 18291 - DNA, 25 bp, Homo sapien
gtgggttaagagatcgttgtgcagc

SEQ ID NO: 18292 - DNA, 25 bp, Homo sapien
gtgggttaagagttcgttgtgcagc

SEQ ID NO: 18293 - DNA, 25 bp, Homo sapien
agtcctttgtagagtgggaccgtct

SEQ ID NO: 18294 - DNA, 25 bp, Homo sapien
agtcctttgtagtgtgggaccgtct

SEQ ID NO: 18295 - DNA, 25 bp, Homo sapien
gtaattcaattgacggtgatgtcct

SEQ ID NO: 18296 - DNA, 25 bp, Homo sapien
gtaattcaattgtcggtgatgtcct

SEQ ID NO: 18297 - DNA, 25 bp, Homo sapien
tctccttcctatggatccttattta

SEQ ID NO: 18298 - DNA, 25 bp, Homo sapien
tctccttcctatcgatccttattta

SEQ ID NO: 18299 - DNA, 25 bp, Homo sapien
aatgccgtcgggatattcttccgat

SEQ ID NO: 18300 - DNA, 25 bp, Homo sapien
aatgccgtcgggttattcttccgat

SEQ ID NO: 18301 - DNA, 25 bp, Homo sapien
taaccgaggagttgtccgttgtttt

SEQ ID NO: 18302 - DNA, 25 bp, Homo sapien
taaccgaggagtagtccgttgtttt

SEQ ID NO: 18303 - DNA, 25 bp, Homo sapien
ctgtacgaggatagggtacgttttt

SEQ ID NO: 18304 - DNA, 25 bp, Homo sapien
ctgtacgaggattgggtacgttttt

SEQ ID NO: 18305 - DNA, 25 bp, Homo sapien
cgacgagacgaaaagtgtcgtgttt

SEQ ID NO: 18306 - DNA, 25 bp, Homo sapien
cgacgagacgaatagtgtcgtgttt

SEQ ID NO: 18307 - DNA, 25 bp, Homo sapien
gggtaggtgtcacttcgtccgttct

SEQ ID NO: 18308 - DNA, 25 bp, Homo sapien
gggtaggtgtcagttcgtccgttct

SEQ ID NO: 18309 - DNA, 25 bp, Homo sapien
cgggagtagggtccttccgcagcat

SEQ ID NO: 18310 - DNA, 25 bp, Homo sapien
cgggagtagggtgcttccgcagcat

SEQ ID NO: 18311 - DNA, 25 bp, Homo sapien
tcagcgaacatgtcctaaaccatag

SEQ ID NO: 18312 - DNA, 25 bp, Homo sapien
tcagcgaacatgacctaaaccatag

SEQ ID NO: 18313 - DNA, 25 bp, Homo sapien
ctttataatgtccttcagaggaatt

SEQ ID NO: 18314 - DNA, 25 bp, Homo sapien
ctttataatgtcgttcagaggaatt

SEQ ID NO: 18315 - DNA, 25 bp, Homo sapien
tctggactccggatcaaggactgtt

SEQ ID NO: 18316 - DNA, 25 bp, Homo sapien
tctggactccggttcaaggactgtt

SEQ ID NO: 18317 - DNA, 25 bp, Homo sapien
gacctcctcgttactgagactaaca

SEQ ID NO: 18318 - DNA, 25 bp, Homo sapien
gacctcctcgtttctgagactaaca

SEQ ID NO: 18319 - DNA, 25 bp, Homo sapien
caacccgtgtaaacgatcctagaca

SEQ ID NO: 18320 - DNA, 25 bp, Homo sapien
caacccgtgtaatcgatcctagaca

SEQ ID NO: 18321 - DNA, 25 bp, Homo sapien
gtcggggtataaaccgagagacgtt

SEQ ID NO: 18322 - DNA, 25 bp, Homo sapien
gtcggggtataatccgagagacgtt

SEQ ID NO: 18323 - DNA, 25 bp, Homo sapien
gaagcgtgagggatggtccaccata

SEQ ID NO: 18324 - DNA, 25 bp, Homo sapien
gaagcgtgagggttggtccaccata

SEQ ID NO: 18325 - DNA, 25 bp, Homo sapien
ctcagggtagtagtgacgacaactc

SEQ ID NO: 18326 - DNA, 25 bp, Homo sapien
ctcagggtagtactgacgacaactc

SEQ ID NO: 18327 - DNA, 25 bp, Homo sapien
aagattcggtggacactggttgaac

SEQ ID NO: 18328 - DNA, 25 bp, Homo sapien
aagattcggtggtcactggttgaac

SEQ ID NO: 18329 - DNA, 25 bp, Homo sapien
tgattacttaaagttcccattggat

SEQ ID NO: 18330 - DNA, 25 bp, Homo sapien
tgattacttaaacttcccattggat

SEQ ID NO: 18331 - DNA, 25 bp, Homo sapien
aattaaaactcgacacttctggagg

SEQ ID NO: 18332 - DNA, 25 bp, Homo sapien
aattaaaactcgtcacttctggagg

SEQ ID NO: 18333 - DNA, 25 bp, Homo sapien
gcacctttagactctctacgtcacg

SEQ ID NO: 18334 - DNA, 25 bp, Homo sapien
gcacctttagacactctacgtcacg

SEQ ID NO: 18335 - DNA, 25 bp, Homo sapien
tgccccgggccttccgtaaaagtcg

SEQ ID NO: 18336 - DNA, 25 bp, Homo sapien
tgccccgggcctaccgtaaaagtcg

SEQ ID NO: 18337 - DNA, 25 bp, Homo sapien
cctttaatagcagtctaattacgtg

SEQ ID NO: 18338 - DNA, 25 bp, Homo sapien
cctttaatagcactctaattacgtg

SEQ ID NO: 18339 - DNA, 25 bp, Homo sapien
agcgggaactggaactccttgagtc

SEQ ID NO: 18340 - DNA, 25 bp, Homo sapien
agcgggaactggtactccttgagtc

SEQ ID NO: 18341 - DNA, 25 bp, Homo sapien
gcgacccgccttgagtcgtgagtag

SEQ ID NO: 18342 - DNA, 25 bp, Homo sapien
gcgacccgccttcagtcgtgagtag

SEQ ID NO: 18343 - DNA, 25 bp, Homo sapien
ccctggcaccgactgcgagtctgga

SEQ ID NO: 18344 - DNA, 25 bp, Homo sapien
ccctggcaccgagtgcgagtctgga

SEQ ID NO: 18345 - DNA, 25 bp, Homo sapien
tttcccacggacgggtcggttgtaa

SEQ ID NO: 18346 - DNA, 25 bp, Homo sapien
tttcccacggaccggtcggttgtaa

SEQ ID NO: 18347 - DNA, 25 bp, Homo sapien
tgtacactccgatgaagtcttttta

SEQ ID NO: 18348 - DNA, 25 bp, Homo sapien
tgtacactccgaagaagtcttttta

SEQ ID NO: 18349 - DNA, 25 bp, Homo sapien
tatacaggatccgcgtgtcgttgta

SEQ ID NO: 18350 - DNA, 25 bp, Homo sapien
tatacaggatccccgtgtcgttgta

SEQ ID NO: 18351 - DNA, 25 bp, Homo sapien
catacgttctacctctctcggtgta

SEQ ID NO: 18352 - DNA, 25 bp, Homo sapien
catacgttctacgtctctcggtgta

SEQ ID NO: 18353 - DNA, 25 bp, Homo sapien
ccagtacgtcggtgcataggtgtgt

SEQ ID NO: 18354 - DNA, 25 bp, Homo sapien
ccagtacgtcggagcataggtgtgt

SEQ ID NO: 18355 - DNA, 25 bp, Homo sapien
ccgcaggtactggagcaacagtcgg

SEQ ID NO: 18356 - DNA, 25 bp, Homo sapien
ccgcaggtactgcagcaacagtcgg

SEQ ID NO: 18357 - DNA, 25 bp, Homo sapien
ccggactggactagttcaaattatt

SEQ ID NO: 18358 - DNA, 25 bp, Homo sapien
ccggactggacttgttcaaattatt

SEQ ID NO: 18359 - DNA, 25 bp, Homo sapien
aggagcccctgtcgtcgacactact

SEQ ID NO: 18360 - DNA, 25 bp, Homo sapien
aggagcccctgtggtcgacactact

SEQ ID NO: 18361 - DNA, 25 bp, Homo sapien
tgggattccataatgggtgtccgat

SEQ ID NO: 18362 - DNA, 25 bp, Homo sapien
tgggattccatattgggtgtccgat

SEQ ID NO: 18363 - DNA, 25 bp, Homo sapien
gtaacactgacataactatttgcgt

SEQ ID NO: 18364 - DNA, 25 bp, Homo sapien
gtaacactgacaaaactatttgcgt

SEQ ID NO: 18365 - DNA, 25 bp, Homo sapien
tccgtgtgagtcatatttttgcgtc

SEQ ID NO: 18366 - DNA, 25 bp, Homo sapien
tccgtgtgagtcttatttttgcgtc

SEQ ID NO: 18367 - DNA, 25 bp, Homo sapien
cggatgaacacagaaggttgtttcc

SEQ ID NO: 18368 - DNA, 25 bp, Homo sapien
cggatgaacacacaaggttgtttcc

SEQ ID NO: 18369 - DNA, 25 bp, Homo sapien
atatcatctacaagaagggaccccc

SEQ ID NO: 18370 - DNA, 25 bp, Homo sapien
atatcatctacatgaagggaccccc

SEQ ID NO: 18371 - DNA, 25 bp, Homo sapien
aatcacaaaaagtctaccctactat

SEQ ID NO: 18372 - DNA, 25 bp, Homo sapien
aatcacaaaaagactaccctactat

SEQ ID NO: 18373 - DNA, 25 bp, Homo sapien
aacagaagaccgaagaagtcgctaa

SEQ ID NO: 18374 - DNA, 25 bp, Homo sapien
aacagaagaccgtagaagtcgctaa

SEQ ID NO: 18375 - DNA, 25 bp, Homo sapien
acacagtttgaacgacatccagacg

SEQ ID NO: 18376 - DNA, 25 bp, Homo sapien
acacagtttgaaggacatccagacg

SEQ ID NO: 18377 - DNA, 25 bp, Homo sapien
tgtttctctgtcaggaagtctaata

SEQ ID NO: 18378 - DNA, 25 bp, Homo sapien
tgtttctctgtctggaagtctaata

SEQ ID NO: 18379 - DNA, 25 bp, Homo sapien
atgtgtttttgtaacgtctatctcg

SEQ ID NO: 18380 - DNA, 25 bp, Homo sapien
atgtgtttttgttacgtctatctcg

SEQ ID NO: 18381 - DNA, 25 bp, Homo sapien
agtgtcgctaactgtgtctttgtat

SEQ ID NO: 18382 - DNA, 25 bp, Homo sapien
agtgtcgctaacagtgtctttgtat

SEQ ID NO: 18383 - DNA, 25 bp, Homo sapien
ttctgttcatgaaccggttttgtcg

SEQ ID NO: 18384 - DNA, 25 bp, Homo sapien
ttctgttcatgatccggttttgtcg

SEQ ID NO: 18385 - DNA, 25 bp, Homo sapien
acctgttcacagttctccagtagag

SEQ ID NO: 18386 - DNA, 25 bp, Homo sapien
acctgttcacagatctccagtagag

SEQ ID NO: 18387 - DNA, 25 bp, Homo sapien
atcctctgtcacgatcactggtgtt

SEQ ID NO: 18388 - DNA, 25 bp, Homo sapien
atcctctgtcaccatcactggtgtt

SEQ ID NO: 18389 - DNA, 25 bp, Homo sapien
tacctgtgttactaccaggagagtc

SEQ ID NO: 18390 - DNA, 25 bp, Homo sapien
tacctgtgttacaaccaggagagtc

SEQ ID NO: 18391 - DNA, 25 bp, Homo sapien
tcgacttctcgtcctccagtggaac

SEQ ID NO: 18392 - DNA, 25 bp, Homo sapien
tcgacttctcgtgctccagtggaac

SEQ ID NO: 18393 - DNA, 25 bp, Homo sapien
tacagtctctgtttccttgtaagtt

SEQ ID NO: 18394 - DNA, 25 bp, Homo sapien
tacagtctctgtatccttgtaagtt

SEQ ID NO: 18395 - DNA, 25 bp, Homo sapien
gggtgttacggcggtcttgtctgaa

SEQ ID NO: 18396 - DNA, 25 bp, Homo sapien
gggtgttacggccgtcttgtctgaa

SEQ ID NO: 18397 - DNA, 25 bp, Homo sapien
tcacgcgctacggccctagtttcag

SEQ ID NO: 18398 - DNA, 25 bp, Homo sapien
tcacgcgctacgcccctagtttcag

SEQ ID NO: 18399 - DNA, 25 bp, Homo sapien
ctatatagatcgatcgacttcaacg

SEQ ID NO: 18400 - DNA, 25 bp, Homo sapien
ctatatagatcgttcgacttcaacg

SEQ ID NO: 18401 - DNA, 25 bp, Homo sapien
ccctctgtgacgtactcagaaaacg

SEQ ID NO: 18402 - DNA, 25 bp, Homo sapien
ccctctgtgacgaactcagaaaacg

SEQ ID NO: 18403 - DNA, 25 bp, Homo sapien
cttcggaggaccttgaagtagtagt

SEQ ID NO: 18404 - DNA, 25 bp, Homo sapien
cttcggaggaccatgaagtagtagt

SEQ ID NO: 18405 - DNA, 25 bp, Homo sapien
tcacgtccccagctgtaggtgtcgt

SEQ ID NO: 18406 - DNA, 25 bp, Homo sapien
tcacgtccccaggtgtaggtgtcgt

SEQ ID NO: 18407 - DNA, 25 bp, Homo sapien
ctagtctccgactctaggtcaggga

SEQ ID NO: 18408 - DNA, 25 bp, Homo sapien
ctagtctccgacactaggtcaggga

SEQ ID NO: 18409 - DNA, 25 bp, Homo sapien
cgtttcacactcatatgtgccagta

SEQ ID NO: 18410 - DNA, 25 bp, Homo sapien
cgtttcacactcttatgtgccagta

SEQ ID NO: 18411 - DNA, 25 bp, Homo sapien
gtcttgtctcttaagtatctgaagt

SEQ ID NO: 18412 - DNA, 25 bp, Homo sapien
gtcttgtctctttagtatctgaagt

SEQ ID NO: 18413 - DNA, 25 bp, Homo sapien
gacgtcttcctcttacgtttctggg

SEQ ID NO: 18414 - DNA, 25 bp, Homo sapien
gacgtcttcctcatacgtttctggg

SEQ ID NO: 18415 - DNA, 25 bp, Homo sapien
agtcgagtccctactggaacgggtg

SEQ ID NO: 18416 - DNA, 25 bp, Homo sapien
agtcgagtcccttctggaacgggtg

SEQ ID NO: 18417 - DNA, 25 bp, Homo sapien
gaggacctcttcgacgccgtcggcg

SEQ ID NO: 18418 - DNA, 25 bp, Homo sapien
gaggacctcttccacgccgtcggcg

SEQ ID NO: 18419 - DNA, 25 bp, Homo sapien
gggacctcgtctccggggtcgtccg

SEQ ID NO: 18420 - DNA, 25 bp, Homo sapien
gggacctcgtctgcggggtcgtccg

SEQ ID NO: 18421 - DNA, 25 bp, Homo sapien
aataagtcaccgtgcaagtgtcgcc

SEQ ID NO: 18422 - DNA, 25 bp, Homo sapien
aataagtcaccgagcaagtgtcgcc

SEQ ID NO: 18423 - DNA, 25 bp, Homo sapien
gggaagagaggaagaacagttctcc

SEQ ID NO: 18424 - DNA, 25 bp, Homo sapien
gggaagagaggatgaacagttctcc

SEQ ID NO: 18425 - DNA, 25 bp, Homo sapien
gaagagtagttttctcgattgcgtc

SEQ ID NO: 18426 - DNA, 25 bp, Homo sapien
gaagagtagtttactcgattgcgtc

SEQ ID NO: 18427 - DNA, 25 bp, Homo sapien
cacggtgtacggagtactgttgtat

SEQ ID NO: 18428 - DNA, 25 bp, Homo sapien
cacggtgtacggtgtactgttgtat

SEQ ID NO: 18429 - DNA, 25 bp, Homo sapien
accggtaccgtcatcatagtagaca

SEQ ID NO: 18430 - DNA, 25 bp, Homo sapien
accggtaccgtcttcatagtagaca

SEQ ID NO: 18431 - DNA, 25 bp, Homo sapien
taagagtatcgctcgtatgagacag

SEQ ID NO: 18432 - DNA, 25 bp, Homo sapien
taagagtatcgcacgtatgagacag

SEQ ID NO: 18433 - DNA, 25 bp, Homo sapien
ctagaagagttatcaagtgtgtcca

SEQ ID NO: 18434 - DNA, 25 bp, Homo sapien
ctagaagagttaacaagtgtgtcca

SEQ ID NO: 18435 - DNA, 25 bp, Homo sapien
ccagaagatgtctactatagttttt

SEQ ID NO: 18436 - DNA, 25 bp, Homo sapien
ccagaagatgtcaactatagttttt

SEQ ID NO: 18437 - DNA, 25 bp, Homo sapien
tcacagatgattggttgtctttatc

SEQ ID NO: 18438 - DNA, 25 bp, Homo sapien
tcacagatgattcgttgtctttatc

SEQ ID NO: 18439 - DNA, 25 bp, Homo sapien
tgaaaaatgttctgtcgtttcagtc

SEQ ID NO: 18440 - DNA, 25 bp, Homo sapien
tgaaaaatgttcagtcgtttcagtc

SEQ ID NO: 18441 - DNA, 25 bp, Homo sapien
tacaaactagagtagacgttgtttc

SEQ ID NO: 18442 - DNA, 25 bp, Homo sapien
tacaaactagagaagacgttgtttc

SEQ ID NO: 18443 - DNA, 25 bp, Homo sapien
acaaagtacaaggtacttcgaatct

SEQ ID NO: 18444 - DNA, 25 bp, Homo sapien
acaaagtacaagctacttcgaatct

SEQ ID NO: 18445 - DNA, 25 bp, Homo sapien
cacgtgtactataatacttgttatg

SEQ ID NO: 18446 - DNA, 25 bp, Homo sapien
cacgtgtactattatacttgttatg

SEQ ID NO: 18447 - DNA, 25 bp, Homo sapien
tccggttacgtgactcgtagttata

SEQ ID NO: 18448 - DNA, 25 bp, Homo sapien
tccggttacgtgtctcgtagttata

SEQ ID NO: 18449 - DNA, 25 bp, Homo sapien
gactgtggtgcctccgtctgtccgt

SEQ ID NO: 18450 - DNA, 25 bp, Homo sapien
gactgtggtgccaccgtctgtccgt

SEQ ID NO: 18451 - DNA, 25 bp, Homo sapien
cttagggaacccaaccgtgactcgt

SEQ ID NO: 18452 - DNA, 25 bp, Homo sapien
cttagggaaccctaccgtgactcgt

SEQ ID NO: 18453 - DNA, 25 bp, Homo sapien
gacagtcgtatctgtaatttcgagt

SEQ ID NO: 18454 - DNA, 25 bp, Homo sapien
gacagtcgtatcagtaatttcgagt

SEQ ID NO: 18455 - DNA, 25 bp, Homo sapien
tctcagactctcgtgctactagaga

SEQ ID NO: 18456 - DNA, 25 bp, Homo sapien
tctcagactctcctgctactagaga

SEQ ID NO: 18457 - DNA, 25 bp, Homo sapien
ttttagagacgcacttcttatacga

SEQ ID NO: 18458 - DNA, 25 bp, Homo sapien
ttttagagacgctcttcttatacga

SEQ ID NO: 18459 - DNA, 25 bp, Homo sapien
atacatgtcttacttcgtttcgtgt

SEQ ID NO: 18460 - DNA, 25 bp, Homo sapien
atacatgtcttagttcgtttcgtgt

SEQ ID NO: 18461 - DNA, 25 bp, Homo sapien
tcttgctaatgtatgtttctttctt

SEQ ID NO: 18462 - DNA, 25 bp, Homo sapien
tcttgctaatgtttgtttctttctt

SEQ ID NO: 18463 - DNA, 25 bp, Homo sapien
ttgtaaagacttctttgtcgtttca

SEQ ID NO: 18464 - DNA, 25 bp, Homo sapien
ttgtaaagacttgtttgtcgtttca

SEQ ID NO: 18465 - DNA, 25 bp, Homo sapien
aagacttctggtgagtcgtatccac

SEQ ID NO: 18466 - DNA, 25 bp, Homo sapien
aagacttctggtcagtcgtatccac

SEQ ID NO: 18467 - DNA, 25 bp, Homo sapien
tggagctgtctgtctgtgtagaaca

SEQ ID NO: 18468 - DNA, 25 bp, Homo sapien
tggagctgtctgactgtgtagaaca

SEQ ID NO: 18469 - DNA, 25 bp, Homo sapien
ttcggttcctcgacggagtgtgacg

SEQ ID NO: 18470 - DNA, 25 bp, Homo sapien
ttcggttcctcgtcggagtgtgacg

SEQ ID NO: 18471 - DNA, 25 bp, Homo sapien
ctttgacttttgaaccgtatgtgac

SEQ ID NO: 18472 - DNA, 25 bp, Homo sapien
ctttgacttttgtaccgtatgtgac

SEQ ID NO: 18473 - DNA, 25 bp, Homo sapien
ctatagacttttagaatcgttacga

SEQ ID NO: 18474 - DNA, 25 bp, Homo sapien
ctatagactttttgaatcgttacga

SEQ ID NO: 18475 - DNA, 25 bp, Homo sapien
tcgccaagtttccttctaaagaagg

SEQ ID NO: 18476 - DNA, 25 bp, Homo sapien
tcgccaagtttcgttctaaagaagg

SEQ ID NO: 18477 - DNA, 25 bp, Homo sapien
tccccgttgtgtttcgtaacttttg

SEQ ID NO: 18478 - DNA, 25 bp, Homo sapien
tccccgttgtgtatcgtaacttttg

SEQ ID NO: 18479 - DNA, 25 bp, Homo sapien
ggtccttctttgatcaaccttaccg

SEQ ID NO: 18480 - DNA, 25 bp, Homo sapien
ggtccttctttgttcaaccttaccg

SEQ ID NO: 18481 - DNA, 25 bp, Homo sapien
ttctaaagagataacactctacgag

SEQ ID NO: 18482 - DNA, 25 bp, Homo sapien
ttctaaagagattacactctacgag

SEQ ID NO: 18483 - DNA, 25 bp, Homo sapien
ggtactttatggagtacactatcac

SEQ ID NO: 18484 - DNA, 25 bp, Homo sapien
ggtactttatggtgtacactatcac

SEQ ID NO: 18485 - DNA, 25 bp, Homo sapien
gttcgtatttattgggtaccataac

SEQ ID NO: 18486 - DNA, 25 bp, Homo sapien
gttcgtatttatagggtaccataac

SEQ ID NO: 18487 - DNA, 25 bp, Homo sapien
ttttggggtacgacgtatctattac

SEQ ID NO: 18488 - DNA, 25 bp, Homo sapien
ttttggggtacgtcgtatctattac

SEQ ID NO: 18489 - DNA, 25 bp, Homo sapien
ttccgtggtcgttctacacacacac

SEQ ID NO: 18490 - DNA, 25 bp, Homo sapien
ttccgtggtcgtactacacacacac

SEQ ID NO: 18491 - DNA, 25 bp, Homo sapien
tgctaggagtagacagtcgactcct

SEQ ID NO: 18492 - DNA, 25 bp, Homo sapien
tgctaggagtagtcagtcgactcct

SEQ ID NO: 18493 - DNA, 25 bp, Homo sapien
ccaccacgtcggtaggtgggtaccc

SEQ ID NO: 18494 - DNA, 25 bp, Homo sapien
ccaccacgtcggaaggtgggtaccc

SEQ ID NO: 18495 - DNA, 25 bp, Homo sapien
gtgcacctgtcgagagacctttccc

SEQ ID NO: 18496 - DNA, 25 bp, Homo sapien
gtgcacctgtcgtgagacctttccc

SEQ ID NO: 18497 - DNA, 25 bp, Homo sapien
aacgtcgtcggttttgttcacctcc

SEQ ID NO: 18498 - DNA, 25 bp, Homo sapien
aacgtcgtcggtattgttcacctcc

SEQ ID NO: 18499 - DNA, 25 bp, Homo sapien
gaacgacaacagtggtggacgtccc

SEQ ID NO: 18500 - DNA, 25 bp, Homo sapien
gaacgacaacagaggtggacgtccc

SEQ ID NO: 18501 - DNA, 25 bp, Homo sapien
gaacaagaactaggatgaacactct

SEQ ID NO: 18502 - DNA, 25 bp, Homo sapien
gaacaagaactacgatgaacactct

SEQ ID NO: 18503 - DNA, 25 bp, Homo sapien
ttagagacaaacgacccaaccgact

SEQ ID NO: 18504 - DNA, 25 bp, Homo sapien
ttagagacaaaccacccaaccgact

SEQ ID NO: 18505 - DNA, 25 bp, Homo sapien
tgtaaagacgtaaaatccaaacacg

SEQ ID NO: 18506 - DNA, 25 bp, Homo sapien
tgtaaagacgtataatccaaacacg

SEQ ID NO: 18507 - DNA, 25 bp, Homo sapien
gacgagaaggagacacacacctaga

SEQ ID NO: 18508 - DNA, 25 bp, Homo sapien
gacgagaaggagtcacacacctaga

SEQ ID NO: 18509 - DNA, 25 bp, Homo sapien
attgtaggtggttactcgtccccac

SEQ ID NO: 18510 - DNA, 25 bp, Homo sapien
attgtaggtggtaactcgtccccac

SEQ ID NO: 18511 - DNA, 25 bp, Homo sapien
tctgtgacatgtttactcgaacaat

SEQ ID NO: 18512 - DNA, 25 bp, Homo sapien
tctgtgacatgtatactcgaacaat

SEQ ID NO: 18513 - DNA, 25 bp, Homo sapien
aggtagagaagaagacgtccacaga

SEQ ID NO: 18514 - DNA, 25 bp, Homo sapien
aggtagagaagatgacgtccacaga

SEQ ID NO: 18515 - DNA, 25 bp, Homo sapien
agagtaaggtgttgacatcgacaac

SEQ ID NO: 18516 - DNA, 25 bp, Homo sapien
agagtaaggtgtagacatcgacaac

SEQ ID NO: 18517 - DNA, 25 bp, Homo sapien
ggaagaacggaacgagactataaac

SEQ ID NO: 18518 - DNA, 25 bp, Homo sapien
ggaagaacggaaggagactataaac

SEQ ID NO: 18519 - DNA, 25 bp, Homo sapien
gtcttgtacgacaaccattagaaag

SEQ ID NO: 18520 - DNA, 25 bp, Homo sapien
gtcttgtacgactaccattagaaag

SEQ ID NO: 18521 - DNA, 25 bp, Homo sapien
cgaccatagacaactcccagagaac

SEQ ID NO: 18522 - DNA, 25 bp, Homo sapien
cgaccatagacatctcccagagaac

SEQ ID NO: 18523 - DNA, 25 bp, Homo sapien
taaatcgaatgtgtcagtcatgact

SEQ ID NO: 18524 - DNA, 25 bp, Homo sapien
taaatcgaatgtctcagtcatgact

SEQ ID NO: 18525 - DNA, 25 bp, Homo sapien
agaaggcgagtacacaccgtatcgc

SEQ ID NO: 18526 - DNA, 25 bp, Homo sapien
agaaggcgagtagacaccgtatcgc

SEQ ID NO: 18527 - DNA, 25 bp, Homo sapien
ttaggtcgtccctgacctcgagtcc

SEQ ID NO: 18528 - DNA, 25 bp, Homo sapien
ttaggtcgtcccagacctcgagtcc

SEQ ID NO: 18529 - DNA, 25 bp, Homo sapien
tcctcgacgtcctagagatcggacc

SEQ ID NO: 18530 - DNA, 25 bp, Homo sapien
tcctcgacgtccaagagatcggacc

SEQ ID NO: 18531 - DNA, 25 bp, Homo sapien
agtcggttccactcgaaccactgtc

SEQ ID NO: 18532 - DNA, 25 bp, Homo sapien
agtcggttccacacgaaccactgtc

SEQ ID NO: 18533 - DNA, 25 bp, Homo sapien
acgtgtcactgttaagacctttgac

SEQ ID NO: 18534 - DNA, 25 bp, Homo sapien
acgtgtcactgtaaagacctttgac

SEQ ID NO: 18535 - DNA, 25 bp, Homo sapien
gtgtcagtgaagtcactcacttact

SEQ ID NO: 18536 - DNA, 25 bp, Homo sapien
gtgtcagtgaagacactcacttact

SEQ ID NO: 18537 - DNA, 25 bp, Homo sapien
ttgtgtacttggactctgtacagtt

SEQ ID NO: 18538 - DNA, 25 bp, Homo sapien
ttgtgtacttggtctctgtacagtt

SEQ ID NO: 18539 - DNA, 25 bp, Homo sapien
cgtagttttgatactttacgactgt

SEQ ID NO: 18540 - DNA, 25 bp, Homo sapien
cgtagttttgattctttacgactgt

SEQ ID NO: 18541 - DNA, 25 bp, Homo sapien
tccgttgtctcatacttaagtactg

SEQ ID NO: 18542 - DNA, 25 bp, Homo sapien
tccgttgtctcaaacttaagtactg

SEQ ID NO: 18543 - DNA, 25 bp, Homo sapien
gggtaccaccggtacctacagcgtc

SEQ ID NO: 18544 - DNA, 25 bp, Homo sapien
gggtaccaccggaacctacagcgtc

SEQ ID NO: 18545 - DNA, 25 bp, Homo sapien
agaggtactcactatcattaaggag

SEQ ID NO: 18546 - DNA, 25 bp, Homo sapien
agaggtactcacaatcattaaggag

SEQ ID NO: 18547 - DNA, 25 bp, Homo sapien
atcatgtccctgaacgatatgaaag

SEQ ID NO: 18548 - DNA, 25 bp, Homo sapien
atcatgtccctgtacgatatgaaag

SEQ ID NO: 18549 - DNA, 25 bp, Homo sapien
acactattttggttacttacgaaag

SEQ ID NO: 18550 - DNA, 25 bp, Homo sapien
acactattttggatacttacgaaag

SEQ ID NO: 18551 - DNA, 25 bp, Homo sapien
gaaccttctaaggacacttataaag

SEQ ID NO: 18552 - DNA, 25 bp, Homo sapien
gaaccttctaagcacacttataaag

SEQ ID NO: 18553 - DNA, 25 bp, Homo sapien
atacaccgacttgtgttcgattaaa

SEQ ID NO: 18554 - DNA, 25 bp, Homo sapien
atacaccgacttctgttcgattaaa

SEQ ID NO: 18555 - DNA, 25 bp, Homo sapien
agacgaacgggttctttgtttcgaa

SEQ ID NO: 18556 - DNA, 25 bp, Homo sapien
agacgaacgggtactttgtttcgaa

SEQ ID NO: 18557 - DNA, 25 bp, Homo sapien
tagtggggtcactcttaagtggtac

SEQ ID NO: 18558 - DNA, 25 bp, Homo sapien
tagtggggtcacacttaagtggtac

SEQ ID NO: 18559 - DNA, 25 bp, Homo sapien
tctaatcgttgtctctccggtgtac

SEQ ID NO: 18560 - DNA, 25 bp, Homo sapien
tctaatcgttgtgtctccggtgtac

SEQ ID NO: 18561 - DNA, 25 bp, Homo sapien
ttagtcacttcttcggtccggtcag

SEQ ID NO: 18562 - DNA, 25 bp, Homo sapien
ttagtcacttctacggtccggtcag

SEQ ID NO: 18563 - DNA, 25 bp, Homo sapien
tcgtcgccgtccacagtccagtgtg

SEQ ID NO: 18564 - DNA, 25 bp, Homo sapien
tcgtcgccgtcctcagtccagtgtg

SEQ ID NO: 18565 - DNA, 25 bp, Homo sapien
tgtcgtttgtccaccgttaagttgt

SEQ ID NO: 18566 - DNA, 25 bp, Homo sapien
tgtcgtttgtcctccgttaagttgt

SEQ ID NO: 18567 - DNA, 25 bp, Homo sapien
tttcgttgtggtaatgggtcgtgcc

SEQ ID NO: 18568 - DNA, 25 bp, Homo sapien
tttcgttgtggttatgggtcgtgcc

SEQ ID NO: 18569 - DNA, 25 bp, Homo sapien
gtcccgtgaagtttctacttcaacc

SEQ ID NO: 18570 - DNA, 25 bp, Homo sapien
gtcccgtgaagtatctacttcaacc

SEQ ID NO: 18571 - DNA, 25 bp, Homo sapien
cgcacacgatttgaagattccactt

SEQ ID NO: 18572 - DNA, 25 bp, Homo sapien
cgcacacgatttcaagattccactt

SEQ ID NO: 18573 - DNA, 25 bp, Homo sapien
ggacgacagttctcatctctccctt

SEQ ID NO: 18574 - DNA, 25 bp, Homo sapien
ggacgacagttcacatctctccctt

SEQ ID NO: 18575 - DNA, 25 bp, Homo sapien
tctttcggatactactcagtactgt

SEQ ID NO: 18576 - DNA, 25 bp, Homo sapien
tctttcggatacaactcagtactgt

SEQ ID NO: 18577 - DNA, 25 bp, Homo sapien
gggttttctaagaaacaagacattc

SEQ ID NO: 18578 - DNA, 25 bp, Homo sapien
gggttttctaagtaacaagacattc

SEQ ID NO: 18579 - DNA, 25 bp, Homo sapien
ggcactttcatttcacgaacagtaa

SEQ ID NO: 18580 - DNA, 25 bp, Homo sapien
ggcactttcattacacgaacagtaa

SEQ ID NO: 18581 - DNA, 25 bp, Homo sapien
atattactagtccaagtaacagtga

SEQ ID NO: 18582 - DNA, 25 bp, Homo sapien
atattactagtcgaagtaacagtga

SEQ ID NO: 18583 - DNA, 25 bp, Homo sapien
aaaagtaccgacgacactgagacgt

SEQ ID NO: 18584 - DNA, 25 bp, Homo sapien
aaaagtaccgaccacactgagacgt

SEQ ID NO: 18585 - DNA, 25 bp, Homo sapien
atttctgacttcgacttaccgagaa

SEQ ID NO: 18586 - DNA, 25 bp, Homo sapien
atttctgacttccacttaccgagaa

SEQ ID NO: 18587 - DNA, 25 bp, Homo sapien
tgttagttgtggtcgtcctacgagg

SEQ ID NO: 18588 - DNA, 25 bp, Homo sapien
tgttagttgtggacgtcctacgagg

SEQ ID NO: 18589 - DNA, 25 bp, Homo sapien
ttttgtgacagtgtctgacctaagg

SEQ ID NO: 18590 - DNA, 25 bp, Homo sapien
ttttgtgacagtctctgacctaagg

SEQ ID NO: 18591 - DNA, 25 bp, Homo sapien
tttctttcagtttgtgacgcatgcg

SEQ ID NO: 18592 - DNA, 25 bp, Homo sapien
tttctttcagttagtgacgcatgcg

SEQ ID NO: 18593 - DNA, 25 bp, Homo sapien
tgtattatgtaccttaatgcctttg

SEQ ID NO: 18594 - DNA, 25 bp, Homo sapien
tgtattatgtacgttaatgcctttg

SEQ ID NO: 18595 - DNA, 25 bp, Homo sapien
cttgtctctaattgacagtctatag

SEQ ID NO: 18596 - DNA, 25 bp, Homo sapien
cttgtctctaatagacagtctatag

SEQ ID NO: 18597 - DNA, 25 bp, Homo sapien
atctgaggtcttcatctgttaatca

SEQ ID NO: 18598 - DNA, 25 bp, Homo sapien
atctgaggtcttgatctgttaatca

SEQ ID NO: 18599 - DNA, 25 bp, Homo sapien
atcgtggtcaccagaaccagtccca

SEQ ID NO: 18600 - DNA, 25 bp, Homo sapien
atcgtggtcacctgaaccagtccca

SEQ ID NO: 18601 - DNA, 25 bp, Homo sapien
ctgtttaagtttgtagtcgacctat

SEQ ID NO: 18602 - DNA, 25 bp, Homo sapien
ctgtttaagtttctagtcgacctat

SEQ ID NO: 18603 - DNA, 25 bp, Homo sapien
tcccttcgtgtatccagtgtagttc

SEQ ID NO: 18604 - DNA, 25 bp, Homo sapien
tcccttcgtgtaaccagtgtagttc

SEQ ID NO: 18605 - DNA, 25 bp, Homo sapien
gccctgtatcgcattcatattatcg

SEQ ID NO: 18606 - DNA, 25 bp, Homo sapien
gccctgtatcgctttcatattatcg

SEQ ID NO: 18607 - DNA, 25 bp, Homo sapien
ggaactatctttaatctcaaatgtg

SEQ ID NO: 18608 - DNA, 25 bp, Homo sapien
ggaactatcttttatctcaaatgtg

SEQ ID NO: 18609 - DNA, 25 bp, Homo sapien
gtaaagattcttacttaatcagtcg

SEQ ID NO: 18610 - DNA, 25 bp, Homo sapien
gtaaagattctttcttaatcagtcg

SEQ ID NO: 18611 - DNA, 25 bp, Homo sapien
gaaaattactgttcgttaacggtcc

SEQ ID NO: 18612 - DNA, 25 bp, Homo sapien
gaaaattactgtacgttaacggtcc

SEQ ID NO: 18613 - DNA, 25 bp, Homo sapien
ttaagggtttgtcgtcgtgggtctc

SEQ ID NO: 18614 - DNA, 25 bp, Homo sapien
ttaagggtttgtggtcgtgggtctc

SEQ ID NO: 18615 - DNA, 25 bp, Homo sapien
gtcacgatgaatcgtagaggactct

SEQ ID NO: 18616 - DNA, 25 bp, Homo sapien
gtcacgatgaatggtagaggactct

SEQ ID NO: 18617 - DNA, 25 bp, Homo sapien
tgccaatcaaacgtacgtgtgtgtc

SEQ ID NO: 18618 - DNA, 25 bp, Homo sapien
tgccaatcaaacctacgtgtgtgtc

SEQ ID NO: 18619 - DNA, 25 bp, Homo sapien
ccgcattgaagaactacgtgtgtta

SEQ ID NO: 18620 - DNA, 25 bp, Homo sapien
ccgcattgaagatctacgtgtgtta

SEQ ID NO: 18621 - DNA, 25 bp, Homo sapien
gacgaactccaacagtacgtcttat

SEQ ID NO: 18622 - DNA, 25 bp, Homo sapien
gacgaactccaagagtacgtcttat

SEQ ID NO: 18623 - DNA, 25 bp, Homo sapien
gatatcccgtaaaagtctcacacgt

SEQ ID NO: 18624 - DNA, 25 bp, Homo sapien
gatatcccgtaatagtctcacacgt

SEQ ID NO: 18625 - DNA, 25 bp, Homo sapien
gtcacgtatcacaagtaagtttatt

SEQ ID NO: 18626 - DNA, 25 bp, Homo sapien
gtcacgtatcactagtaagtttatt

SEQ ID NO: 18627 - DNA, 25 bp, Homo sapien
cgagtctgaacagtgaccccgatcg

SEQ ID NO: 18628 - DNA, 25 bp, Homo sapien
cgagtctgaacactgaccccgatcg

SEQ ID NO: 18629 - DNA, 25 bp, Homo sapien
cggtcgagacgaaggtacccacagc

SEQ ID NO: 18630 - DNA, 25 bp, Homo sapien
cggtcgagacgatggtacccacagc

SEQ ID NO: 18631 - DNA, 25 bp, Homo sapien
tggagtagtgcgaggtcgaacaacc

SEQ ID NO: 18632 - DNA, 25 bp, Homo sapien
tggagtagtgcgtggtcgaacaacc

SEQ ID NO: 18633 - DNA, 25 bp, Homo sapien
ggtctcacgacctaacaaaagtaaa

SEQ ID NO: 18634 - DNA, 25 bp, Homo sapien
ggtctcacgaccaaacaaaagtaaa

SEQ ID NO: 18635 - DNA, 25 bp, Homo sapien
gtgtctaaaagaagtcaccaatata

SEQ ID NO: 18636 - DNA, 25 bp, Homo sapien
gtgtctaaaagatgtcaccaatata

SEQ ID NO: 18637 - DNA, 25 bp, Homo sapien
ggactaacgtatgaaaaccctctta

SEQ ID NO: 18638 - DNA, 25 bp, Homo sapien
ggactaacgtatcaaaaccctctta

SEQ ID NO: 18639 - DNA, 25 bp, Homo sapien
gtcggacacacaatagccacattta

SEQ ID NO: 18640 - DNA, 25 bp, Homo sapien
gtcggacacacattagccacattta

SEQ ID NO: 18641 - DNA, 25 bp, Homo sapien
tgtgacacaaagtccgtcacctctg

SEQ ID NO: 18642 - DNA, 25 bp, Homo sapien
tgtgacacaaagaccgtcacctctg

SEQ ID NO: 18643 - DNA, 25 bp, Homo sapien
cgtcgtcgtggtgcaccaacggcat

SEQ ID NO: 18644 - DNA, 25 bp, Homo sapien
cgtcgtcgtggtccaccaacggcat

SEQ ID NO: 18645 - DNA, 25 bp, Homo sapien
tcttgcgtggtttcccggtgaacgt

SEQ ID NO: 18646 - DNA, 25 bp, Homo sapien
tcttgcgtggttacccggtgaacgt

SEQ ID NO: 18647 - DNA, 25 bp, Homo sapien
ctttgctacccagacacgagggaaa

SEQ ID NO: 18648 - DNA, 25 bp, Homo sapien
ctttgctacccacacacgagggaaa

SEQ ID NO: 18649 - DNA, 25 bp, Homo sapien
cgcccagcgacgagacggagacgac

SEQ ID NO: 18650 - DNA, 25 bp, Homo sapien
cgcccagcgacgtgacggagacgac

SEQ ID NO: 18651 - DNA, 25 bp, Homo sapien
cgaccgcgacggcctgcgccacgat

SEQ ID NO: 18652 - DNA, 25 bp, Homo sapien
cgaccgcgacgggctgcgccacgat

SEQ ID NO: 18653 - DNA, 25 bp, Homo sapien
gggcccgcgtacgatctttggagat

SEQ ID NO: 18654 - DNA, 25 bp, Homo sapien
gggcccgcgtaccatctttggagat

SEQ ID NO: 18655 - DNA, 25 bp, Homo sapien
gtacacttcgattgtggtggctact

SEQ ID NO: 18656 - DNA, 25 bp, Homo sapien
gtacacttcgatagtggtggctact

SEQ ID NO: 18657 - DNA, 25 bp, Homo sapien
ccccacgacgtctgtggtcacgaag

SEQ ID NO: 18658 - DNA, 25 bp, Homo sapien
ccccacgacgtcagtggtcacgaag

SEQ ID NO: 18659 - DNA, 25 bp, Homo sapien
actccttgactttcggtctacgaca

SEQ ID NO: 18660 - DNA, 25 bp, Homo sapien
actccttgacttacggtctacgaca

SEQ ID NO: 18661 - DNA, 25 bp, Homo sapien
cgttcactaattgtcggtctacaag

SEQ ID NO: 18662 - DNA, 25 bp, Homo sapien
cgttcactaattctcggtctacaag

SEQ ID NO: 18663 - DNA, 25 bp, Homo sapien
gaacagagtttcttctagatcccag

SEQ ID NO: 18664 - DNA, 25 bp, Homo sapien
gaacagagtttcatctagatcccag

SEQ ID NO: 18665 - DNA, 25 bp, Homo sapien
acgtaagaacttttccgatttttgt

SEQ ID NO: 18666 - DNA, 25 bp, Homo sapien
acgtaagaacttatccgatttttgt

SEQ ID NO: 18667 - DNA, 25 bp, Homo sapien
cagtaaagaatgtcgttatccattt

SEQ ID NO: 18668 - DNA, 25 bp, Homo sapien
cagtaaagaatgacgttatccattt

SEQ ID NO: 18669 - DNA, 25 bp, Homo sapien
gtccaaggaaagaaccatggtttgt

SEQ ID NO: 18670 - DNA, 25 bp, Homo sapien
gtccaaggaaagtaccatggtttgt

SEQ ID NO: 18671 - DNA, 25 bp, Homo sapien
ccaaagactggtcttcttccttacg

SEQ ID NO: 18672 - DNA, 25 bp, Homo sapien
ccaaagactggtgttcttccttacg

SEQ ID NO: 18673 - DNA, 25 bp, Homo sapien
aacaaaaggatgttctttacgtgtc

SEQ ID NO: 18674 - DNA, 25 bp, Homo sapien
aacaaaaggatgatctttacgtgtc

SEQ ID NO: 18675 - DNA, 25 bp, Homo sapien
taaaactagggtactcttcggtaag

SEQ ID NO: 18676 - DNA, 25 bp, Homo sapien
taaaactagggttctcttcggtaag

SEQ ID NO: 18677 - DNA, 25 bp, Homo sapien
aacaaaagggtctccgacggtatac

SEQ ID NO: 18678 - DNA, 25 bp, Homo sapien
aacaaaagggtcaccgacggtatac

SEQ ID NO: 18679 - DNA, 25 bp, Homo sapien
taattgagtgtcaagacggactaac

SEQ ID NO: 18680 - DNA, 25 bp, Homo sapien
taattgagtgtctagacggactaac

SEQ ID NO: 18681 - DNA, 25 bp, Homo sapien
ctagaaacgttgagaccggatatac

SEQ ID NO: 18682 - DNA, 25 bp, Homo sapien
ctagaaacgttgtgaccggatatac

SEQ ID NO: 18683 - DNA, 25 bp, Homo sapien
cagtttacgagtgagaacccgtaaa

SEQ ID NO: 18684 - DNA, 25 bp, Homo sapien
cagtttacgagtcagaacccgtaaa

SEQ ID NO: 18685 - DNA, 25 bp, Homo sapien
aaggtgagtacgtttggccgtttct

SEQ ID NO: 18686 - DNA, 25 bp, Homo sapien
aaggtgagtacgattggccgtttct

SEQ ID NO: 18687 - DNA, 25 bp, Homo sapien
tagtcaagacgtttccgtcccttat

SEQ ID NO: 18688 - DNA, 25 bp, Homo sapien
tagtcaagacgtatccgtcccttat

SEQ ID NO: 18689 - DNA, 25 bp, Homo sapien
cgcaccgaagagtttggaccacagc

SEQ ID NO: 18690 - DNA, 25 bp, Homo sapien
cgcaccgaagagattggaccacagc

SEQ ID NO: 18691 - DNA, 25 bp, Homo sapien
gattcggaggaatattgggtcccac

SEQ ID NO: 18692 - DNA, 25 bp, Homo sapien
gattcggaggaaaattgggtcccac

SEQ ID NO: 18693 - DNA, 25 bp, Homo sapien
gtcaaggaagtaaagtgtgttccca

SEQ ID NO: 18694 - DNA, 25 bp, Homo sapien
gtcaaggaagtatagtgtgttccca

SEQ ID NO: 18695 - DNA, 25 bp, Homo sapien
tatagaccgtagaggtgattctcat

SEQ ID NO: 18696 - DNA, 25 bp, Homo sapien
tatagaccgtagtggtgattctcat

SEQ ID NO: 18697 - DNA, 25 bp, Homo sapien
aattctaagagtggatttgttcgac

SEQ ID NO: 18698 - DNA, 25 bp, Homo sapien
aattctaagagtcgatttgttcgac

SEQ ID NO: 18699 - DNA, 25 bp, Homo sapien
ggtattcagaacaagacattcttca

SEQ ID NO: 18700 - DNA, 25 bp, Homo sapien
ggtattcagaactagacattcttca

SEQ ID NO: 18701 - DNA, 25 bp, Homo sapien
cttttgactacagaccgttcgattt

SEQ ID NO: 18702 - DNA, 25 bp, Homo sapien
cttttgactacacaccgttcgattt

SEQ ID NO: 18703 - DNA, 25 bp, Homo sapien
ttgttaacggtttaccttcagtatt

SEQ ID NO: 18704 - DNA, 25 bp, Homo sapien
ttgttaacggttaaccttcagtatt

SEQ ID NO: 18705 - DNA, 25 bp, Homo sapien
aagtatccgcagactcgtctcaaac

SEQ ID NO: 18706 - DNA, 25 bp, Homo sapien
aagtatccgcagtctcgtctcaaac

SEQ ID NO: 18707 - DNA, 25 bp, Homo sapien
tggccaacacgtttttccttcgaac

SEQ ID NO: 18708 - DNA, 25 bp, Homo sapien
tggccaacacgtatttccttcgaac

SEQ ID NO: 18709 - DNA, 25 bp, Homo sapien
aaagacctataagtgtctgtcgatc

SEQ ID NO: 18710 - DNA, 25 bp, Homo sapien
aaagacctataactgtctgtcgatc

SEQ ID NO: 18711 - DNA, 25 bp, Homo sapien
taaaaagacgtataaactttataaa

SEQ ID NO: 18712 - DNA, 25 bp, Homo sapien
taaaaagacgtaaaaactttataaa

SEQ ID NO: 18713 - DNA, 25 bp, Homo sapien
aggagaacggaacaccgttagtaaa

SEQ ID NO: 18714 - DNA, 25 bp, Homo sapien
aggagaacggaagaccgttagtaaa

SEQ ID NO: 18715 - DNA, 25 bp, Homo sapien
ttacgtagaagtgactccatataca

SEQ ID NO: 18716 - DNA, 25 bp, Homo sapien
ttacgtagaagtcactccatataca

SEQ ID NO: 18717 - DNA, 25 bp, Homo sapien
cgactgtgtgtaccgcgacagtcct

SEQ ID NO: 18718 - DNA, 25 bp, Homo sapien
cgactgtgtgtagcgcgacagtcct

SEQ ID NO: 18719 - DNA, 25 bp, Homo sapien
tccgaataccgacgagactaccact

SEQ ID NO: 18720 - DNA, 25 bp, Homo sapien
tccgaataccgaggagactaccact

SEQ ID NO: 18721 - DNA, 25 bp, Homo sapien
attgttcttgtaccattgacgtcca

SEQ ID NO: 18722 - DNA, 25 bp, Homo sapien
attgttcttgtagcattgacgtcca

SEQ ID NO: 18723 - DNA, 25 bp, Homo sapien
gttgtctgtatctagagtctctgtg

SEQ ID NO: 18724 - DNA, 25 bp, Homo sapien
gttgtctgtatcaagagtctctgtg

SEQ ID NO: 18725 - DNA, 25 bp, Homo sapien
cgtaagtactttaccgacattatag

SEQ ID NO: 18726 - DNA, 25 bp, Homo sapien
cgtaagtacttttccgacattatag

SEQ ID NO: 18727 - DNA, 25 bp, Homo sapien
tttgttcgtcgaaacgccttacgag

SEQ ID NO: 18728 - DNA, 25 bp, Homo sapien
tttgttcgtcgatacgccttacgag

SEQ ID NO: 18729 - DNA, 25 bp, Homo sapien
tgagcggtgtgtgacgaccttcgac

SEQ ID NO: 18730 - DNA, 25 bp, Homo sapien
tgagcggtgtgtcacgaccttcgac

SEQ ID NO: 18731 - DNA, 25 bp, Homo sapien
gtgattgtagacttactaacttgtc

SEQ ID NO: 18732 - DNA, 25 bp, Homo sapien
gtgattgtagacatactaacttgtc

SEQ ID NO: 18733 - DNA, 25 bp, Homo sapien
gcgtaagtagtgaacgaagtcgacc

SEQ ID NO: 18734 - DNA, 25 bp, Homo sapien
gcgtaagtagtgtacgaagtcgacc

SEQ ID NO: 18735 - DNA, 25 bp, Homo sapien
ttgacggtgtagaagaaacctagcc

SEQ ID NO: 18736 - DNA, 25 bp, Homo sapien
ttgacggtgtagtagaaacctagcc

SEQ ID NO: 18737 - DNA, 25 bp, Homo sapien
agctgtgtccgaagaaggtccgact

SEQ ID NO: 18738 - DNA, 25 bp, Homo sapien
agctgtgtccgatgaaggtccgact

SEQ ID NO: 18739 - DNA, 25 bp, Homo sapien
acggttatccggttaaggtactctt

SEQ ID NO: 18740 - DNA, 25 bp, Homo sapien
acggttatccggataaggtactctt

SEQ ID NO: 18741 - DNA, 25 bp, Homo sapien
caagtagtcatgacacagaactcta

SEQ ID NO: 18742 - DNA, 25 bp, Homo sapien
caagtagtcatgtcacagaactcta

SEQ ID NO: 18743 - DNA, 25 bp, Homo sapien
tatataggaaaggttaacgcccgat

SEQ ID NO: 18744 - DNA, 25 bp, Homo sapien
tatataggaaagcttaacgcccgat

SEQ ID NO: 18745 - DNA, 25 bp, Homo sapien
tgaggaaagacttacgaacaccgta

SEQ ID NO: 18746 - DNA, 25 bp, Homo sapien
tgaggaaagactaacgaacaccgta

SEQ ID NO: 18747 - DNA, 25 bp, Homo sapien
tccaggagtccgtagacaccgactc

SEQ ID NO: 18748 - DNA, 25 bp, Homo sapien
tccaggagtccgaagacaccgactc

SEQ ID NO: 18749 - DNA, 25 bp, Homo sapien
acgacgagtggcaggaattactaga

SEQ ID NO: 18750 - DNA, 25 bp, Homo sapien
acgacgagtggctggaattactaga

SEQ ID NO: 18751 - DNA, 25 bp, Homo sapien
gcgagggacgtcacgagagagtcaa

SEQ ID NO: 18752 - DNA, 25 bp, Homo sapien
gcgagggacgtctcgagagagtcaa

SEQ ID NO: 18753 - DNA, 25 bp, Homo sapien
atcgaatttgtcagtatgtacatat

SEQ ID NO: 18754 - DNA, 25 bp, Homo sapien
atcgaatttgtctgtatgtacatat

SEQ ID NO: 18755 - DNA, 25 bp, Homo sapien
cccttgaagtctttgtagtctttaa

SEQ ID NO: 18756 - DNA, 25 bp, Homo sapien
cccttgaagtctatgtagtctttaa

SEQ ID NO: 18757 - DNA, 25 bp, Homo sapien
tcctggaagtctgtcctacttacca

SEQ ID NO: 18758 - DNA, 25 bp, Homo sapien
tcctggaagtctctcctacttacca

SEQ ID NO: 18759 - DNA, 25 bp, Homo sapien
acctttaggacttccccgacagagc

SEQ ID NO: 18760 - DNA, 25 bp, Homo sapien
acctttaggactaccccgacagagc

SEQ ID NO: 18761 - DNA, 25 bp, Homo sapien
caaagagactgtgtgtgttctacat

SEQ ID NO: 18762 - DNA, 25 bp, Homo sapien
caaagagactgtctgtgttctacat

SEQ ID NO: 18763 - DNA, 25 bp, Homo sapien
tccaatgtcatagaggtgtacattc

SEQ ID NO: 18764 - DNA, 25 bp, Homo sapien
tccaatgtcatacaggtgtacattc

SEQ ID NO: 18765 - DNA, 25 bp, Homo sapien
aaccctaattttctagggttcttcg

SEQ ID NO: 18766 - DNA, 25 bp, Homo sapien
aaccctaattttgtagggttcttcg

SEQ ID NO: 18767 - DNA, 25 bp, Homo sapien
caagtgtttgtatcaggttgtcctt

SEQ ID NO: 18768 - DNA, 25 bp, Homo sapien
caagtgtttgtaacaggttgtcctt

SEQ ID NO: 18769 - DNA, 25 bp, Homo sapien
actattactgtctaggttgtacttt

SEQ ID NO: 18770 - DNA, 25 bp, Homo sapien
actattactgtcaaggttgtacttt

SEQ ID NO: 18771 - DNA, 25 bp, Homo sapien
tctacacttgggaagtgtatcacaa

SEQ ID NO: 18772 - DNA, 25 bp, Homo sapien
tctacacttgggtagtgtatcacaa

SEQ ID NO: 18773 - DNA, 25 bp, Homo sapien
gctccgggtctcgtcgacgtaacac

SEQ ID NO: 18774 - DNA, 25 bp, Homo sapien
gctccgggtctcctcgacgtaacac

SEQ ID NO: 18775 - DNA, 25 bp, Homo sapien
agtacccgggtcagaaccgaccgac

SEQ ID NO: 18776 - DNA, 25 bp, Homo sapien
agtacccgggtctgaaccgaccgac

SEQ ID NO: 18777 - DNA, 25 bp, Homo sapien
aggtcggtcttttgacacgtcctga

SEQ ID NO: 18778 - DNA, 25 bp, Homo sapien
aggtcggtctttagacacgtcctga

SEQ ID NO: 18779 - DNA, 25 bp, Homo sapien
ggtgtaccacggaacgactcgttgg

SEQ ID NO: 18780 - DNA, 25 bp, Homo sapien
ggtgtaccacggtacgactcgttgg

SEQ ID NO: 18781 - DNA, 25 bp, Homo sapien
tcgaggtaacggtgacaactagtga

SEQ ID NO: 18782 - DNA, 25 bp, Homo sapien
tcgaggtaacggagacaactagtga

SEQ ID NO: 18783 - DNA, 25 bp, Homo sapien
cttctccaacatacctcggaggtac

SEQ ID NO: 18784 - DNA, 25 bp, Homo sapien
cttctccaacattcctcggaggtac

SEQ ID NO: 18785 - DNA, 25 bp, Homo sapien
ctatataccaaatacataaagtatc

SEQ ID NO: 18786 - DNA, 25 bp, Homo sapien
ctatataccaaaaacataaagtatc

SEQ ID NO: 18787 - DNA, 25 bp, Homo sapien
tttaatctccgtcatgtaaggtata

SEQ ID NO: 18788 - DNA, 25 bp, Homo sapien
tttaatctccgtgatgtaaggtata

SEQ ID NO: 18789 - DNA, 25 bp, Homo sapien
tctgtctgtgaccttgtgcaatcta

SEQ ID NO: 18790 - DNA, 25 bp, Homo sapien
tctgtctgtgacgttgtgcaatcta

SEQ ID NO: 18791 - DNA, 25 bp, Homo sapien
actttatcgtacctttgtgaaatga

SEQ ID NO: 18792 - DNA, 25 bp, Homo sapien
actttatcgtacgtttgtgaaatga

SEQ ID NO: 18793 - DNA, 25 bp, Homo sapien
gaaattactaggtttttaatctcgc

SEQ ID NO: 18794 - DNA, 25 bp, Homo sapien
gaaattactaggattttaatctcgc

SEQ ID NO: 18795 - DNA, 25 bp, Homo sapien
acatgtacaggattttacggttcat

SEQ ID NO: 18796 - DNA, 25 bp, Homo sapien
acatgtacaggaatttacggttcat

SEQ ID NO: 18797 - DNA, 25 bp, Homo sapien
cttacacttgtgacctaagtgtgtc

SEQ ID NO: 18798 - DNA, 25 bp, Homo sapien
cttacacttgtgtcctaagtgtgtc

SEQ ID NO: 18799 - DNA, 25 bp, Homo sapien
agaatacagtcatctaggtctgtct

SEQ ID NO: 18800 - DNA, 25 bp, Homo sapien
agaatacagtcaactaggtctgtct

SEQ ID NO: 18801 - DNA, 25 bp, Homo sapien
tacttgtaagtctatagtgtctgac

SEQ ID NO: 18802 - DNA, 25 bp, Homo sapien
tacttgtaagtcaatagtgtctgac

SEQ ID NO: 18803 - DNA, 25 bp, Homo sapien
gccccgtacgggaggccttccgaga

SEQ ID NO: 18804 - DNA, 25 bp, Homo sapien
gccccgtacgggtggccttccgaga

SEQ ID NO: 18805 - DNA, 25 bp, Homo sapien
ggtcccaggggagaccgaccctgac

SEQ ID NO: 18806 - DNA, 25 bp, Homo sapien
ggtcccaggggacaccgaccctgac

SEQ ID NO: 18807 - DNA, 25 bp, Homo sapien
gaccagtggaggtccgccgacttct

SEQ ID NO: 18808 - DNA, 25 bp, Homo sapien
gaccagtggaggaccgccgacttct

SEQ ID NO: 18809 - DNA, 25 bp, Homo sapien
ctaagtgtactcccaataccttatc

SEQ ID NO: 18810 - DNA, 25 bp, Homo sapien
ctaagtgtactcgcaataccttatc

SEQ ID NO: 18811 - DNA, 25 bp, Homo sapien
gtgaatttgtcaactccgtgttcgt

SEQ ID NO: 18812 - DNA, 25 bp, Homo sapien
gtgaatttgtcatctccgtgttcgt

SEQ ID NO: 18813 - DNA, 25 bp, Homo sapien
aacaataactactccctcggtggtg

SEQ ID NO: 18814 - DNA, 25 bp, Homo sapien
aacaataactacaccctcggtggtg

SEQ ID NO: 18815 - DNA, 25 bp, Homo sapien
tcgagtagaaccatacgcccgggga

SEQ ID NO: 18816 - DNA, 25 bp, Homo sapien
tcgagtagaaccttacgcccgggga

SEQ ID NO: 18817 - DNA, 25 bp, Homo sapien
agtagacgtatacggacccggagaa

SEQ ID NO: 18818 - DNA, 25 bp, Homo sapien
agtagacgtatagggacccggagaa

SEQ ID NO: 18819 - DNA, 25 bp, Homo sapien
ataagactatactggccgcggagta

SEQ ID NO: 18820 - DNA, 25 bp, Homo sapien
ataagactatacaggccgcggagta

SEQ ID NO: 18821 - DNA, 25 bp, Homo sapien
ccagaggacctcgagtcttcgaata

SEQ ID NO: 18822 - DNA, 25 bp, Homo sapien
ccagaggacctccagtcttcgaata

SEQ ID NO: 18823 - DNA, 25 bp, Homo sapien
ccaaaaacttcgaccgtgtgaagat

SEQ ID NO: 18824 - DNA, 25 bp, Homo sapien
ccaaaaacttcgtccgtgtgaagat

SEQ ID NO: 18825 - DNA, 25 bp, Homo sapien
ataaattacgttatgtctatgaaat

SEQ ID NO: 18826 - DNA, 25 bp, Homo sapien
ataaattacgttttgtctatgaaat

SEQ ID NO: 18827 - DNA, 25 bp, Homo sapien
gtacaacttgaagttttacgtacaa

SEQ ID NO: 18828 - DNA, 25 bp, Homo sapien
gtacaacttgaacttttacgtacaa

SEQ ID NO: 18829 - DNA, 25 bp, Homo sapien
ggaatcttgtatcttttagactaac

SEQ ID NO: 18830 - DNA, 25 bp, Homo sapien
ggaatcttgtatgttttagactaac

SEQ ID NO: 18831 - DNA, 25 bp, Homo sapien
aaacctttgacctgtcttgttagac

SEQ ID NO: 18832 - DNA, 25 bp, Homo sapien
aaacctttgaccagtcttgttagac

SEQ ID NO: 18833 - DNA, 25 bp, Homo sapien
aaacgagaactgaggcagtcgaccc

SEQ ID NO: 18834 - DNA, 25 bp, Homo sapien
aaacgagaactgtggcagtcgaccc

SEQ ID NO: 18835 - DNA, 25 bp, Homo sapien
agtgtagtaaaacacggaatctttc

SEQ ID NO: 18836 - DNA, 25 bp, Homo sapien
agtgtagtaaaagacggaatctttc

SEQ ID NO: 18837 - DNA, 25 bp, Homo sapien
gtgtaacgaaaacagaattaccact

SEQ ID NO: 18838 - DNA, 25 bp, Homo sapien
gtgtaacgaaaagagaattaccact

SEQ ID NO: 18839 - DNA, 25 bp, Homo sapien
aggaatctgtatacccgaatcccct

SEQ ID NO: 18840 - DNA, 25 bp, Homo sapien
aggaatctgtattcccgaatcccct

SEQ ID NO: 18841 - DNA, 25 bp, Homo sapien
agattctgttgtcacagagattccc

SEQ ID NO: 18842 - DNA, 25 bp, Homo sapien
agattctgttgtgacagagattccc

SEQ ID NO: 18843 - DNA, 25 bp, Homo sapien
ggattttcctgtaagaattccgtct

SEQ ID NO: 18844 - DNA, 25 bp, Homo sapien
ggattttcctgttagaattccgtct

SEQ ID NO: 18845 - DNA, 25 bp, Homo sapien
atatgagttgccattaaacttagca

SEQ ID NO: 18846 - DNA, 25 bp, Homo sapien
atatgagttgcctttaaacttagca

SEQ ID NO: 18847 - DNA, 25 bp, Homo sapien
ctcttttacacctctagttcgggga

SEQ ID NO: 18848 - DNA, 25 bp, Homo sapien
ctcttttacaccactagttcgggga

SEQ ID NO: 18849 - DNA, 25 bp, Homo sapien
gttgatctcccggactttggtgaag

SEQ ID NO: 18850 - DNA, 25 bp, Homo sapien
gttgatctcccgcactttggtgaag

SEQ ID NO: 18851 - DNA, 25 bp, Homo sapien
gttcatcgtttccttttgatgagag

SEQ ID NO: 18852 - DNA, 25 bp, Homo sapien
gttcatcgtttcgttttgatgagag

SEQ ID NO: 18853 - DNA, 25 bp, Homo sapien
ctttagattcacgttcgtagaagga

SEQ ID NO: 18854 - DNA, 25 bp, Homo sapien
ctttagattcaccttcgtagaagga

SEQ ID NO: 18855 - DNA, 25 bp, Homo sapien
ttagaggagaggtctcaggtctcgt

SEQ ID NO: 18856 - DNA, 25 bp, Homo sapien
ttagaggagaggactcaggtctcgt

SEQ ID NO: 18857 - DNA, 25 bp, Homo sapien
acgaggaagtgcagcagtctacagt

SEQ ID NO: 18858 - DNA, 25 bp, Homo sapien
acgaggaagtgctgcagtctacagt

SEQ ID NO: 18859 - DNA, 25 bp, Homo sapien
tcgaagtcacagttccaaagtaacg

SEQ ID NO: 18860 - DNA, 25 bp, Homo sapien
tcgaagtcacagatccaaagtaacg

SEQ ID NO: 18861 - DNA, 25 bp, Homo sapien
tcgacggtgtaatcccacagaaggt

SEQ ID NO: 18862 - DNA, 25 bp, Homo sapien
tcgacggtgtaaacccacagaaggt

SEQ ID NO: 18863 - DNA, 25 bp, Homo sapien
gaataacttataaaaccacaagggt

SEQ ID NO: 18864 - DNA, 25 bp, Homo sapien
gaataacttatataaccacaagggt

SEQ ID NO: 18865 - DNA, 25 bp, Homo sapien
gaacaattacgttggcactaagata

SEQ ID NO: 18866 - DNA, 25 bp, Homo sapien
gaacaattacgtaggcactaagata

SEQ ID NO: 18867 - DNA, 25 bp, Homo sapien
gagacgaaggactgcgagaaaatca

SEQ ID NO: 18868 - DNA, 25 bp, Homo sapien
gagacgaaggacagcgagaaaatca

SEQ ID NO: 18869 - DNA, 25 bp, Homo sapien
acgggagcgacaggacccgtctcga

SEQ ID NO: 18870 - DNA, 25 bp, Homo sapien
acgggagcgacacgacccgtctcga

SEQ ID NO: 18871 - DNA, 25 bp, Homo sapien
ctccgtggggtcacgaaccgggact

SEQ ID NO: 18872 - DNA, 25 bp, Homo sapien
ctccgtggggtctcgaaccgggact

SEQ ID NO: 18873 - DNA, 25 bp, Homo sapien
cccccggggatcgagaaaccacgag

SEQ ID NO: 18874 - DNA, 25 bp, Homo sapien
cccccggggatccagaaaccacgag

SEQ ID NO: 18875 - DNA, 25 bp, Homo sapien
cgcgtggtgcgtccacatccacggg

SEQ ID NO: 18876 - DNA, 25 bp, Homo sapien
cgcgtggtgcgtgcacatccacggg

SEQ ID NO: 18877 - DNA, 25 bp, Homo sapien
cactgaaagagttgattacccggag

SEQ ID NO: 18878 - DNA, 25 bp, Homo sapien
cactgaaagagtagattacccggag

SEQ ID NO: 18879 - DNA, 25 bp, Homo sapien
ctgtgaacagaaagaccacccagac

SEQ ID NO: 18880 - DNA, 25 bp, Homo sapien
ctgtgaacagaatgaccacccagac

SEQ ID NO: 18881 - DNA, 25 bp, Homo sapien
atgtgcgtgccgacgagccactagc

SEQ ID NO: 18882 - DNA, 25 bp, Homo sapien
atgtgcgtgccgtcgagccactagc

SEQ ID NO: 18883 - DNA, 25 bp, Homo sapien
tgacaccctgaaatctatccaggtt

SEQ ID NO: 18884 - DNA, 25 bp, Homo sapien
tgacaccctgaattctatccaggtt

SEQ ID NO: 18885 - DNA, 25 bp, Homo sapien
ggcagggcactccagacgcaggtac

SEQ ID NO: 18886 - DNA, 25 bp, Homo sapien
ggcagggcactcgagacgcaggtac

SEQ ID NO: 18887 - DNA, 25 bp, Homo sapien
tggcagaggtccttgaacgccgcga

SEQ ID NO: 18888 - DNA, 25 bp, Homo sapien
tggcagaggtccatgaacgccgcga

SEQ ID NO: 18889 - DNA, 25 bp, Homo sapien
gacgttttctacgtctacccgtccg

SEQ ID NO: 18890 - DNA, 25 bp, Homo sapien
gacgttttctacctctacccgtccg

SEQ ID NO: 18891 - DNA, 25 bp, Homo sapien
cccgttcgatcagtgtaccggtcac

SEQ ID NO: 18892 - DNA, 25 bp, Homo sapien
cccgttcgatcactgtaccggtcac

SEQ ID NO: 18893 - DNA, 25 bp, Homo sapien
cgtacgtccgtagagtgagggttaa

SEQ ID NO: 18894 - DNA, 25 bp, Homo sapien
cgtacgtccgtacagtgagggttaa

SEQ ID NO: 18895 - DNA, 25 bp, Homo sapien
cctcgactacctgttcgatgggttc

SEQ ID NO: 18896 - DNA, 25 bp, Homo sapien
cctcgactacctcttcgatgggttc

SEQ ID NO: 18897 - DNA, 25 bp, Homo sapien
cgtgtgtgccttgtagagatgattc

SEQ ID NO: 18898 - DNA, 25 bp, Homo sapien
cgtgtgtgccttctagagatgattc

SEQ ID NO: 18899 - DNA, 25 bp, Homo sapien
ctttgttccgttgtacggccgtttc

SEQ ID NO: 18900 - DNA, 25 bp, Homo sapien
ctttgttccgttctacggccgtttc

SEQ ID NO: 18901 - DNA, 25 bp, Homo sapien
gcttctttctcttgggcctaacgac

SEQ ID NO: 18902 - DNA, 25 bp, Homo sapien
gcttctttctctagggcctaacgac

SEQ ID NO: 18903 - DNA, 25 bp, Homo sapien
ccttcgcggggtcctcggtaccgaa

SEQ ID NO: 18904 - DNA, 25 bp, Homo sapien
ccttcgcggggtgctcggtaccgaa

SEQ ID NO: 18905 - DNA, 25 bp, Homo sapien
agttccgaccagtgctgctccaagt

SEQ ID NO: 18906 - DNA, 25 bp, Homo sapien
agttccgaccagagctgctccaagt

SEQ ID NO: 18907 - DNA, 25 bp, Homo sapien
gcaatagtcgggaactggacgtcaa

SEQ ID NO: 18908 - DNA, 25 bp, Homo sapien
gcaatagtcgggtactggacgtcaa

SEQ ID NO: 18909 - DNA, 25 bp, Homo sapien
ctcagagcgagacagcgggtccgac

SEQ ID NO: 18910 - DNA, 25 bp, Homo sapien
ctcagagcgagagagcgggtccgac

SEQ ID NO: 18911 - DNA, 25 bp, Homo sapien
ggcccggacaaggagacagtgccct

SEQ ID NO: 18912 - DNA, 25 bp, Homo sapien
ggcccggacaagcagacagtgccct

SEQ ID NO: 18913 - DNA, 25 bp, Homo sapien
tcctaggaaagtagagtgcggtcct

SEQ ID NO: 18914 - DNA, 25 bp, Homo sapien
tcctaggaaagttgagtgcggtcct

SEQ ID NO: 18915 - DNA, 25 bp, Homo sapien
tcagaggaaaagttggaacctccgt

SEQ ID NO: 18916 - DNA, 25 bp, Homo sapien
tcagaggaaaagatggaacctccgt

SEQ ID NO: 18917 - DNA, 25 bp, Homo sapien
taatagaggaattttagaactccac

SEQ ID NO: 18918 - DNA, 25 bp, Homo sapien
taatagaggaatattagaactccac

SEQ ID NO: 18919 - DNA, 25 bp, Homo sapien
tcacacagttgtagtcagagaccaa

SEQ ID NO: 18920 - DNA, 25 bp, Homo sapien
tcacacagttgttgtcagagaccaa

SEQ ID NO: 18921 - DNA, 25 bp, Homo sapien
tgttgggtctttacgtttaggcttc

SEQ ID NO: 18922 - DNA, 25 bp, Homo sapien
tgttgggtcttttcgtttaggcttc

SEQ ID NO: 18923 - DNA, 25 bp, Homo sapien
tagtgggttatctgttccttgggtc

SEQ ID NO: 18924 - DNA, 25 bp, Homo sapien
tagtgggttatcagttccttgggtc

SEQ ID NO: 18925 - DNA, 25 bp, Homo sapien
acttcgtttgtcaccgtgtgtgtcc

SEQ ID NO: 18926 - DNA, 25 bp, Homo sapien
acttcgtttgtctccgtgtgtgtcc

SEQ ID NO: 18927 - DNA, 25 bp, Homo sapien
ctccttcctatggatccttatttag

SEQ ID NO: 18928 - DNA, 25 bp, Homo sapien
ctccttcctatgcatccttatttag

SEQ ID NO: 18929 - DNA, 25 bp, Homo sapien
tgtcctcgacagaatctcttccgta

SEQ ID NO: 18930 - DNA, 25 bp, Homo sapien
tgtcctcgacagtatctcttccgta

SEQ ID NO: 18931 - DNA, 25 bp, Homo sapien
acgcgaggtcgtttacttgtatttt

SEQ ID NO: 18932 - DNA, 25 bp, Homo sapien
acgcgaggtcgtatacttgtatttt

SEQ ID NO: 18933 - DNA, 25 bp, Homo sapien
gtcgagacgtcgacgaggagttttc

SEQ ID NO: 18934 - DNA, 25 bp, Homo sapien
gtcgagacgtcgtcgaggagttttc

SEQ ID NO: 18935 - DNA, 25 bp, Homo sapien
tcgacgagtacgagggttgttcact

SEQ ID NO: 18936 - DNA, 25 bp, Homo sapien
tcgacgagtacgtgggttgttcact

SEQ ID NO: 18937 - DNA, 25 bp, Homo sapien
tggtgacgtaggtgggtcgtccttt

SEQ ID NO: 18938 - DNA, 25 bp, Homo sapien
tggtgacgtaggagggtcgtccttt

SEQ ID NO: 18939 - DNA, 25 bp, Homo sapien
ggagggacaggtcgtcccgcaccat

SEQ ID NO: 18940 - DNA, 25 bp, Homo sapien
ggagggacaggtggtcccgcaccat

SEQ ID NO: 18941 - DNA, 25 bp, Homo sapien
cggaggaacctgttcctaaaaccta

SEQ ID NO: 18942 - DNA, 25 bp, Homo sapien
cggaggaacctgatcctaaaaccta

SEQ ID NO: 18943 - DNA, 25 bp, Homo sapien
cagtaacaattccttcaggaagatt

SEQ ID NO: 18944 - DNA, 25 bp, Homo sapien
cagtaacaattcgttcaggaagatt

SEQ ID NO: 18945 - DNA, 25 bp, Homo sapien
gtctgagactcctctaaaagaagtt

SEQ ID NO: 18946 - DNA, 25 bp, Homo sapien
gtctgagactccactaaaagaagtt

SEQ ID NO: 18947 - DNA, 25 bp, Homo sapien
acctcctcgttactgagactaacag

SEQ ID NO: 18948 - DNA, 25 bp, Homo sapien
acctcctcgttagtgagactaacag

SEQ ID NO: 18949 - DNA, 25 bp, Homo sapien
aacttgtactaaggatcgataacta

SEQ ID NO: 18950 - DNA, 25 bp, Homo sapien
aacttgtactaacgatcgataacta

SEQ ID NO: 18951 - DNA, 25 bp, Homo sapien
tcgtggtgactaataacgagatctt

SEQ ID NO: 18952 - DNA, 25 bp, Homo sapien
tcgtggtgactattaacgagatctt

SEQ ID NO: 18953 - DNA, 25 bp, Homo sapien
gactgtagggaaggtccacgaactg

SEQ ID NO: 18954 - DNA, 25 bp, Homo sapien
gactgtagggaacgtccacgaactg

SEQ ID NO: 18955 - DNA, 25 bp, Homo sapien
ggtccaggtggtttgacgacaactc

SEQ ID NO: 18956 - DNA, 25 bp, Homo sapien
ggtccaggtggtatgacgacaactc

SEQ ID NO: 18957 - DNA, 25 bp, Homo sapien
attcatgtaggtgactgagaacatc

SEQ ID NO: 18958 - DNA, 25 bp, Homo sapien
attcatgtaggtcactgagaacatc

SEQ ID NO: 18959 - DNA, 25 bp, Homo sapien
caatgtataaacgttccaaatggat

SEQ ID NO: 18960 - DNA, 25 bp, Homo sapien
caatgtataaaccttccaaatggat

SEQ ID NO: 18961 - DNA, 25 bp, Homo sapien
tatgtaaaacataaccatctgggat

SEQ ID NO: 18962 - DNA, 25 bp, Homo sapien
tatgtaaaacattaccatctgggat

SEQ ID NO: 18963 - DNA, 25 bp, Homo sapien
aacacctagagcatctcgagtccgt

SEQ ID NO: 18964 - DNA, 25 bp, Homo sapien
aacacctagagcttctcgagtccgt

SEQ ID NO: 18965 - DNA, 25 bp, Homo sapien
tctcgctacgggagacgcttcaacc

SEQ ID NO: 18966 - DNA, 25 bp, Homo sapien
tctcgctacgggtgacgcttcaacc

SEQ ID NO: 18967 - DNA, 25 bp, Homo sapien
gtctacgtcaagcagggcttcaacc

SEQ ID NO: 18968 - DNA, 25 bp, Homo sapien
gtctacgtcaaggagggcttcaacc

SEQ ID NO: 18969 - DNA, 25 bp, Homo sapien
tgcccccagcgcgccgcgaacacgc

SEQ ID NO: 18970 - DNA, 25 bp, Homo sapien
tgcccccagcgccccgcgaacacgc

SEQ ID NO: 18971 - DNA, 25 bp, Homo sapien
cttctagggcggactaatctacgtg

SEQ ID NO: 18972 - DNA, 25 bp, Homo sapien
cttctagggcggtctaatctacgtg

SEQ ID NO: 18973 - DNA, 25 bp, Homo sapien
cagacgagatggacccgttcgagtt

SEQ ID NO: 18974 - DNA, 25 bp, Homo sapien
cagacgagatggtcccgttcgagtt

SEQ ID NO: 18975 - DNA, 25 bp, Homo sapien
acgtcgacccgcatccagtgtagga

SEQ ID NO: 18976 - DNA, 25 bp, Homo sapien
acgtcgacccgcttccagtgtagga

SEQ ID NO: 18977 - DNA, 25 bp, Homo sapien
ttccaccactctaacgagtctagga

SEQ ID NO: 18978 - DNA, 25 bp, Homo sapien
ttccaccactcttacgagtctagga

SEQ ID NO: 18979 - DNA, 25 bp, Homo sapien
ttccggacctacgttggttagtgag

SEQ ID NO: 18980 - DNA, 25 bp, Homo sapien
ttccggacctaccttggttagtgag

SEQ ID NO: 18981 - DNA, 25 bp, Homo sapien
tgtcacggtcactttagttattttg

SEQ ID NO: 18982 - DNA, 25 bp, Homo sapien
tgtcacggtcacattagttattttg

SEQ ID NO: 18983 - DNA, 25 bp, Homo sapien
tctacaagtaccaccgttcttcgtg

SEQ ID NO: 18984 - DNA, 25 bp, Homo sapien
tctacaagtacctccgttcttcgtg

SEQ ID NO: 18985 - DNA, 25 bp, Homo sapien
ccacagtttacctttcgtcgtgtgt

SEQ ID NO: 18986 - DNA, 25 bp, Homo sapien
ccacagtttaccattcgtcgtgtgt

SEQ ID NO: 18987 - DNA, 25 bp, Homo sapien
tagagtactgaccaatacgtgtgtg

SEQ ID NO: 18988 - DNA, 25 bp, Homo sapien
tagagtactgacgaatacgtgtgtg

SEQ ID NO: 18989 - DNA, 25 bp, Homo sapien
actacgagactgaagataacatcga

SEQ ID NO: 18990 - DNA, 25 bp, Homo sapien
actacgagactgtagataacatcga

SEQ ID NO: 18991 - DNA, 25 bp, Homo sapien
cgatgtctacgcagacacttctcgg

SEQ ID NO: 18992 - DNA, 25 bp, Homo sapien
cgatgtctacgctgacacttctcgg

SEQ ID NO: 18993 - DNA, 25 bp, Homo sapien
atcaggcccagtaacggtacctact

SEQ ID NO: 18994 - DNA, 25 bp, Homo sapien
atcaggcccagttacggtacctact

SEQ ID NO: 18995 - DNA, 25 bp, Homo sapien
ttggattgtccaatgggtgtctcag

SEQ ID NO: 18996 - DNA, 25 bp, Homo sapien
ttggattgtccattgggtgtctcag

SEQ ID NO: 18997 - DNA, 25 bp, Homo sapien
cgttcactcacaccttcttttgtcg

SEQ ID NO: 18998 - DNA, 25 bp, Homo sapien
cgttcactcacagcttcttttgtcg

SEQ ID NO: 18999 - DNA, 25 bp, Homo sapien
ccgagcacccaggtctgtttattcg

SEQ ID NO: 19000 - DNA, 25 bp, Homo sapien
ccgagcacccagctctgtttattcg

SEQ ID NO: 19001 - DNA, 25 bp, Homo sapien
ggggaaacaacaaggttttctcact

SEQ ID NO: 19002 - DNA, 25 bp, Homo sapien
ggggaaacaacatggttttctcact

SEQ ID NO: 19003 - DNA, 25 bp, Homo sapien
tacaagatcacaagaagggccccac

SEQ ID NO: 19004 - DNA, 25 bp, Homo sapien
tacaagatcacatgaagggccccac

SEQ ID NO: 19005 - DNA, 25 bp, Homo sapien
tcagtaactaaggaagaaaccccat

SEQ ID NO: 19006 - DNA, 25 bp, Homo sapien
tcagtaactaagcaagaaaccccat

SEQ ID NO: 19007 - DNA, 25 bp, Homo sapien
aaaagaggtacaaagaatcgctcta

SEQ ID NO: 19008 - DNA, 25 bp, Homo sapien
aaaagaggtacatagaatcgctcta

SEQ ID NO: 19009 - DNA, 25 bp, Homo sapien
cgaagaagtttgaggactatccaca

SEQ ID NO: 19010 - DNA, 25 bp, Homo sapien
cgaagaagtttgtggactatccaca

SEQ ID NO: 19011 - DNA, 25 bp, Homo sapien
gtttttcgtctggactacactaata

SEQ ID NO: 19012 - DNA, 25 bp, Homo sapien
gtttttcgtctgcactacactaata

SEQ ID NO: 19013 - DNA, 25 bp, Homo sapien
gattttgtctgtaaaacgtatctct

SEQ ID NO: 19014 - DNA, 25 bp, Homo sapien
gattttgtctgttaaacgtatctct

SEQ ID NO: 19015 - DNA, 25 bp, Homo sapien
aattacgtcttgtttaactctgtat

SEQ ID NO: 19016 - DNA, 25 bp, Homo sapien
aattacgtcttgattaactctgtat

SEQ ID NO: 19017 - DNA, 25 bp, Homo sapien
acctttttctatatggtgtttttgt

SEQ ID NO: 19018 - DNA, 25 bp, Homo sapien
acctttttctatttggtgtttttgt

SEQ ID NO: 19019 - DNA, 25 bp, Homo sapien
aacctttgaccttactcctagtggt

SEQ ID NO: 19020 - DNA, 25 bp, Homo sapien
aacctttgacctaactcctagtggt

SEQ ID NO: 19021 - DNA, 25 bp, Homo sapien
atactcttcttcgatacttgtggtt

SEQ ID NO: 19022 - DNA, 25 bp, Homo sapien
atactcttcttccatacttgtggtt

SEQ ID NO: 19023 - DNA, 25 bp, Homo sapien
cccgtcgtcttacacctggtgagtc

SEQ ID NO: 19024 - DNA, 25 bp, Homo sapien
cccgtcgtcttagacctggtgagtc

SEQ ID NO: 19025 - DNA, 25 bp, Homo sapien
tcacttctcgtggtctctgggtcgc

SEQ ID NO: 19026 - DNA, 25 bp, Homo sapien
tcacttctcgtgctctctgggtcgc

SEQ ID NO: 19027 - DNA, 25 bp, Homo sapien
cttccgtttctgttccttgaagtat

SEQ ID NO: 19028 - DNA, 25 bp, Homo sapien
cttccgtttctgatccttgaagtat

SEQ ID NO: 19029 - DNA, 25 bp, Homo sapien
acgtcgttattaggccgcgctagaa

SEQ ID NO: 19030 - DNA, 25 bp, Homo sapien
acgtcgttattacgccgcgctagaa

SEQ ID NO: 19031 - DNA, 25 bp, Homo sapien
cggccctagtttcagacaagaccgc

SEQ ID NO: 19032 - DNA, 25 bp, Homo sapien
cggccctagtttgagacaagaccgc

SEQ ID NO: 19033 - DNA, 25 bp, Homo sapien
atcattaagtctacgacgttcagct

SEQ ID NO: 19034 - DNA, 25 bp, Homo sapien
atcattaagtcttcgacgttcagct

SEQ ID NO: 19035 - DNA, 25 bp, Homo sapien
atcactcgtgagtaccacgaaagag

SEQ ID NO: 19036 - DNA, 25 bp, Homo sapien
atcactcgtgagaaccacgaaagag

SEQ ID NO: 19037 - DNA, 25 bp, Homo sapien
tttcacgaacccagactagtagtag

SEQ ID NO: 19038 - DNA, 25 bp, Homo sapien
tttcacgaaccctgactagtagtag

SEQ ID NO: 19039 - DNA, 25 bp, Homo sapien
tacaccctttacctgagacgtgtgt

SEQ ID NO: 19040 - DNA, 25 bp, Homo sapien
tacaccctttacgtgagacgtgtgt

SEQ ID NO: 19041 - DNA, 25 bp, Homo sapien
cagacgaccacttctggtccgggac

SEQ ID NO: 19042 - DNA, 25 bp, Homo sapien
cagacgaccactactggtccgggac

SEQ ID NO: 19043 - DNA, 25 bp, Homo sapien
cgagttctcatacttcgtcccacga

SEQ ID NO: 19044 - DNA, 25 bp, Homo sapien
cgagttctcatagttcgtcccacga

SEQ ID NO: 19045 - DNA, 25 bp, Homo sapien
gtcgttgtcgtctttgtaccttaca

SEQ ID NO: 19046 - DNA, 25 bp, Homo sapien
gtcgttgtcgtcattgtaccttaca

SEQ ID NO: 19047 - DNA, 25 bp, Homo sapien
cgtctctacctcttcggtccagagg

SEQ ID NO: 19048 - DNA, 25 bp, Homo sapien
cgtctctacctcatcggtccagagg

SEQ ID NO: 19049 - DNA, 25 bp, Homo sapien
acgtggactcctaccggtaagggtc

SEQ ID NO: 19050 - DNA, 25 bp, Homo sapien
acgtggactccttccggtaagggtc

SEQ ID NO: 19051 - DNA, 25 bp, Homo sapien
gagaggcccttcgtcgtccgcgtgc

SEQ ID NO: 19052 - DNA, 25 bp, Homo sapien
gagaggcccttcctcgtccgcgtgc

SEQ ID NO: 19053 - DNA, 25 bp, Homo sapien
gggtccctcccaccagtcgtcgcgt

SEQ ID NO: 19054 - DNA, 25 bp, Homo sapien
gggtccctcccagcagtcgtcgcgt

SEQ ID NO: 19055 - DNA, 25 bp, Homo sapien
acaagtcccggaccaggtgtaggtc

SEQ ID NO: 19056 - DNA, 25 bp, Homo sapien
acaagtcccggagcaggtgtaggtc

SEQ ID NO: 19057 - DNA, 25 bp, Homo sapien
tccgaagtgggaaggagagtttctc

SEQ ID NO: 19058 - DNA, 25 bp, Homo sapien
tccgaagtgggatggagagtttctc

SEQ ID NO: 19059 - DNA, 25 bp, Homo sapien
agtagagtcgttttagatcgttctc

SEQ ID NO: 19060 - DNA, 25 bp, Homo sapien
agtagagtcgttatagatcgttctc

SEQ ID NO: 19061 - DNA, 25 bp, Homo sapien
cacggtgtacggagtactgttgtat

SEQ ID NO: 19062 - DNA, 25 bp, Homo sapien
cacggtgtacggtgtactgttgtat

SEQ ID NO: 19063 - DNA, 25 bp, Homo sapien
ccggtaccgtcatcatagtagacac

SEQ ID NO: 19064 - DNA, 25 bp, Homo sapien
ccggtaccgtcaacatagtagacac

SEQ ID NO: 19065 - DNA, 25 bp, Homo sapien
aagagtatctcgaagtagtacaaca

SEQ ID NO: 19066 - DNA, 25 bp, Homo sapien
aagagtatctcgtagtagtacaaca

SEQ ID NO: 19067 - DNA, 25 bp, Homo sapien
cgaagacgtgtttaagttgtaccat

SEQ ID NO: 19068 - DNA, 25 bp, Homo sapien
cgaagacgtgttaaagttgtaccat

SEQ ID NO: 19069 - DNA, 25 bp, Homo sapien
ccgagaaaggtgtacaggtttcgtt

SEQ ID NO: 19070 - DNA, 25 bp, Homo sapien
ccgagaaaggtgaacaggtttcgtt

SEQ ID NO: 19071 - DNA, 25 bp, Homo sapien
ccatatgtacttggttatgttttac

SEQ ID NO: 19072 - DNA, 25 bp, Homo sapien
ccatatgtacttcgttatgttttac

SEQ ID NO: 19073 - DNA, 25 bp, Homo sapien
gtaaaattggtctgtctttcactct

SEQ ID NO: 19074 - DNA, 25 bp, Homo sapien
gtaaaattggtcagtctttcactct

SEQ ID NO: 19075 - DNA, 25 bp, Homo sapien
attacaaaagagttcgacatgtttc

SEQ ID NO: 19076 - DNA, 25 bp, Homo sapien
attacaaaagagatcgacatgtttc

SEQ ID NO: 19077 - DNA, 25 bp, Homo sapien
cacaaagtacaaggtacttcgaatc

SEQ ID NO: 19078 - DNA, 25 bp, Homo sapien
cacaaagtacaacgtacttcgaatc

SEQ ID NO: 19079 - DNA, 25 bp, Homo sapien
accgagtacttacgtcttgtcagtg

SEQ ID NO: 19080 - DNA, 25 bp, Homo sapien
accgagtacttaggtcttgtcagtg

SEQ ID NO: 19081 - DNA, 25 bp, Homo sapien
gaccgtgtaatgtctacgagttatg

SEQ ID NO: 19082 - DNA, 25 bp, Homo sapien
gaccgtgtaatgactacgagttatg

SEQ ID NO: 19083 - DNA, 25 bp, Homo sapien
aggtcggtcctccacacgtcttcgg

SEQ ID NO: 19084 - DNA, 25 bp, Homo sapien
aggtcggtcctcgacacgtcttcgg

SEQ ID NO: 19085 - DNA, 25 bp, Homo sapien
gtaggacctacctactcttactcgt

SEQ ID NO: 19086 - DNA, 25 bp, Homo sapien
gtaggacctaccaactcttactcgt

SEQ ID NO: 19087 - DNA, 25 bp, Homo sapien
agacagactactttacaccgttggt

SEQ ID NO: 19088 - DNA, 25 bp, Homo sapien
agacagactactatacaccgttggt

SEQ ID NO: 19089 - DNA, 25 bp, Homo sapien
cctccaagtctagctcctctagaga

SEQ ID NO: 19090 - DNA, 25 bp, Homo sapien
cctccaagtctacctcctctagaga

SEQ ID NO: 19091 - DNA, 25 bp, Homo sapien
atcgtaaactcgacttctgtagaga

SEQ ID NO: 19092 - DNA, 25 bp, Homo sapien
atcgtaaactcgtcttctgtagaga

SEQ ID NO: 19093 - DNA, 25 bp, Homo sapien
atacaagtctcagtttgtgtcgtcg

SEQ ID NO: 19094 - DNA, 25 bp, Homo sapien
atacaagtctcactttgtgtcgtcg

SEQ ID NO: 19095 - DNA, 25 bp, Homo sapien
gactacaggtcctattcttgtctat

SEQ ID NO: 19096 - DNA, 25 bp, Homo sapien
gactacaggtccaattcttgtctat

SEQ ID NO: 19097 - DNA, 25 bp, Homo sapien
ttaaaagttaccttttacggtgtca

SEQ ID NO: 19098 - DNA, 25 bp, Homo sapien
ttaaaagttaccatttacggtgtca

SEQ ID NO: 19099 - DNA, 25 bp, Homo sapien
aaacgttccggtgactcatgtcgag

SEQ ID NO: 19100 - DNA, 25 bp, Homo sapien
aaacgttccggtcactcatgtcgag

SEQ ID NO: 19101 - DNA, 25 bp, Homo sapien
cgggacttcgtgtctcggtaacaac

SEQ ID NO: 19102 - DNA, 25 bp, Homo sapien
cgggacttcgtgactcggtaacaac

SEQ ID NO: 19103 - DNA, 25 bp, Homo sapien
cttacgagtctcgtcccgtggtgga

SEQ ID NO: 19104 - DNA, 25 bp, Homo sapien
cttacgagtctcctcccgtggtgga

SEQ ID NO: 19105 - DNA, 25 bp, Homo sapien
tctttgacttttgaaccgtatgtga

SEQ ID NO: 19106 - DNA, 25 bp, Homo sapien
tctttgacttttcaaccgtatgtga

SEQ ID NO: 19107 - DNA, 25 bp, Homo sapien
tacagacttttctgaaactgacgta

SEQ ID NO: 19108 - DNA, 25 bp, Homo sapien
tacagacttttcagaaactgacgta

SEQ ID NO: 19109 - DNA, 25 bp, Homo sapien
cgcgtacatcttttccagaagaagg

SEQ ID NO: 19110 - DNA, 25 bp, Homo sapien
cgcgtacatcttatccagaagaagg

SEQ ID NO: 19111 - DNA, 25 bp, Homo sapien
tccgcccttggtccagactaagttg

SEQ ID NO: 19112 - DNA, 25 bp, Homo sapien
tccgcccttggtgcagactaagttg

SEQ ID NO: 19113 - DNA, 25 bp, Homo sapien
gtccttctcggtaccatacaatccg

SEQ ID NO: 19114 - DNA, 25 bp, Homo sapien
gtccttctcggttccatacaatccg

SEQ ID NO: 19115 - DNA, 25 bp, Homo sapien
ttcgtaatagtcactcactctcgag

SEQ ID NO: 19116 - DNA, 25 bp, Homo sapien
ttcgtaatagtctctcactctcgag

SEQ ID NO: 19117 - DNA, 25 bp, Homo sapien
ttttagtgtcgtagtatactctcat

SEQ ID NO: 19118 - DNA, 25 bp, Homo sapien
ttttagtgtcgttgtatactctcat

SEQ ID NO: 19119 - DNA, 25 bp, Homo sapien
gatatatatgtggataccatacgac

SEQ ID NO: 19120 - DNA, 25 bp, Homo sapien
gatatatatgtgcataccatacgac

SEQ ID NO: 19121 - DNA, 25 bp, Homo sapien
tttaagttgtagactaactactcag

SEQ ID NO: 19122 - DNA, 25 bp, Homo sapien
tttaagttgtagtctaactactcag

SEQ ID NO: 19123 - DNA, 25 bp, Homo sapien
ttctccgggtcgaacaacacgtccg

SEQ ID NO: 19124 - DNA, 25 bp, Homo sapien
ttctccgggtcgtacaacacgtccg

SEQ ID NO: 19125 - DNA, 25 bp, Homo sapien
tgtccgcactcgactagtcactgct

SEQ ID NO: 19126 - DNA, 25 bp, Homo sapien
tgtccgcactcgtctagtcactgct

SEQ ID NO: 19127 - DNA, 25 bp, Homo sapien
caccacgtcggtaggtgggtacccg

SEQ ID NO: 19128 - DNA, 25 bp, Homo sapien
caccacgtcggttggtgggtacccg

SEQ ID NO: 19129 - DNA, 25 bp, Homo sapien
tgtcgaccccggtggtcttgtctcc

SEQ ID NO: 19130 - DNA, 25 bp, Homo sapien
tgtcgaccccggaggtcttgtctcc

SEQ ID NO: 19131 - DNA, 25 bp, Homo sapien
ttacgcgcggtgacggctcacgccc

SEQ ID NO: 19132 - DNA, 25 bp, Homo sapien
ttacgcgcggtgtcggctcacgccc

SEQ ID NO: 19133 - DNA, 25 bp, Homo sapien
aactctacgacatagggcacgtccc

SEQ ID NO: 19134 - DNA, 25 bp, Homo sapien
aactctacgacaaagggcacgtccc

SEQ ID NO: 19135 - DNA, 25 bp, Homo sapien
aacaccgaacaggatgacagtacct

SEQ ID NO: 19136 - DNA, 25 bp, Homo sapien
aacaccgaacagcatgacagtacct

SEQ ID NO: 19137 - DNA, 25 bp, Homo sapien
tagaacgataacgatccgagaccac

SEQ ID NO: 19138 - DNA, 25 bp, Homo sapien
tagaacgataaccatccgagaccac

SEQ ID NO: 19139 - DNA, 25 bp, Homo sapien
gagtaaaactaaaatgtctaaaccg

SEQ ID NO: 19140 - DNA, 25 bp, Homo sapien
gagtaaaactaatatgtctaaaccg

SEQ ID NO: 19141 - DNA, 25 bp, Homo sapien
gagagtaacgaaaagacaaccagac

SEQ ID NO: 19142 - DNA, 25 bp, Homo sapien
gagagtaacgaatagacaaccagac

SEQ ID NO: 19143 - DNA, 25 bp, Homo sapien
aattgtaggtggttactcgtcccca

SEQ ID NO: 19144 - DNA, 25 bp, Homo sapien
aattgtaggtggatactcgtcccca

SEQ ID NO: 19145 - DNA, 25 bp, Homo sapien
tgtgtacgaatgtcttcgacgcaat

SEQ ID NO: 19146 - DNA, 25 bp, Homo sapien
tgtgtacgaatgacttcgacgcaat

SEQ ID NO: 19147 - DNA, 25 bp, Homo sapien
cgagtaggaagaaggtcaacgacat

SEQ ID NO: 19148 - DNA, 25 bp, Homo sapien
cgagtaggaagatggtcaacgacat

SEQ ID NO: 19149 - DNA, 25 bp, Homo sapien
gacgaaagagagtgcgtcagacacc

SEQ ID NO: 19150 - DNA, 25 bp, Homo sapien
gacgaaagagagagcgtcagacacc

SEQ ID NO: 19151 - DNA, 25 bp, Homo sapien
gacgaagacggaaacggataactcc

SEQ ID NO: 19152 - DNA, 25 bp, Homo sapien
gacgaagacggatacggataactcc

SEQ ID NO: 19153 - DNA, 25 bp, Homo sapien
gattagtccgactacagttagataa

SEQ ID NO: 19154 - DNA, 25 bp, Homo sapien
gattagtccgacaacagttagataa

SEQ ID NO: 19155 - DNA, 25 bp, Homo sapien
cgaccatagacaactcccagagaac

SEQ ID NO: 19156 - DNA, 25 bp, Homo sapien
cgaccatagacatctcccagagaac

SEQ ID NO: 19157 - DNA, 25 bp, Homo sapien
gtaaatgaatgttcccactactgct

SEQ ID NO: 19158 - DNA, 25 bp, Homo sapien
gtaaatgaatgtacccactactgct

SEQ ID NO: 19159 - DNA, 25 bp, Homo sapien
ctgaagagagggtcccaccgttcct

SEQ ID NO: 19160 - DNA, 25 bp, Homo sapien
ctgaagagagggacccaccgttcct

SEQ ID NO: 19161 - DNA, 25 bp, Homo sapien
taggtcgtccctgacctcgagtcct

SEQ ID NO: 19162 - DNA, 25 bp, Homo sapien
taggtcgtccctcacctcgagtcct

SEQ ID NO: 19163 - DNA, 25 bp, Homo sapien
gtcctgtgtccgttagagatcaccc

SEQ ID NO: 19164 - DNA, 25 bp, Homo sapien
gtcctgtgtccgatagagatcaccc

SEQ ID NO: 19165 - DNA, 25 bp, Homo sapien
ctgtccttccactagggtcactgtc

SEQ ID NO: 19166 - DNA, 25 bp, Homo sapien
ctgtccttccacaagggtcactgtc

SEQ ID NO: 19167 - DNA, 25 bp, Homo sapien
cgtcgtctctgaaatcctttcgtac

SEQ ID NO: 19168 - DNA, 25 bp, Homo sapien
cgtcgtctctgatatcctttcgtac

SEQ ID NO: 19169 - DNA, 25 bp, Homo sapien
gtctcactgatgttcgactcaccct

SEQ ID NO: 19170 - DNA, 25 bp, Homo sapien
gtctcactgatgatcgactcaccct

SEQ ID NO: 19171 - DNA, 25 bp, Homo sapien
tgtgtctacttagagtcatctcctt

SEQ ID NO: 19172 - DNA, 25 bp, Homo sapien
tgtgtctacttacagtcatctcctt

SEQ ID NO: 19173 - DNA, 25 bp, Homo sapien
tgtgtctacttagagtcatctcctt

SEQ ID NO: 19174 - DNA, 25 bp, Homo sapien
tgtgtctacttacagtcatctcctt

SEQ ID NO: 19175 - DNA, 25 bp, Homo sapien
ttgtctcttcagacttactacgatg

SEQ ID NO: 19176 - DNA, 25 bp, Homo sapien
ttgtctcttcagtcttactacgatg

SEQ ID NO: 19177 - DNA, 25 bp, Homo sapien
gtgtcacctctgatacctctaagtc

SEQ ID NO: 19178 - DNA, 25 bp, Homo sapien
gtgtcacctctgttacctctaagtc

SEQ ID NO: 19179 - DNA, 25 bp, Homo sapien
cttagggactcatataattcatgag

SEQ ID NO: 19180 - DNA, 25 bp, Homo sapien
cttagggactcaaataattcatgag

SEQ ID NO: 19181 - DNA, 25 bp, Homo sapien
catcatgtccctgaacgatatgaaa

SEQ ID NO: 19182 - DNA, 25 bp, Homo sapien
catcatgtccctcaacgatatgaaa

SEQ ID NO: 19183 - DNA, 25 bp, Homo sapien
tgacatcgttttcaagtattcaaga

SEQ ID NO: 19184 - DNA, 25 bp, Homo sapien
tgacatcgttttgaagtattcaaga

SEQ ID NO: 19185 - DNA, 25 bp, Homo sapien
tgacatgtttaatgacacttcaaat

SEQ ID NO: 19186 - DNA, 25 bp, Homo sapien
tgacatgtttaaagacacttcaaat

SEQ ID NO: 19187 - DNA, 25 bp, Homo sapien
tataatgtttaaaacacgatgacaa

SEQ ID NO: 19188 - DNA, 25 bp, Homo sapien
tataatgtttaatacacgatgacaa

SEQ ID NO: 19189 - DNA, 25 bp, Homo sapien
cacgaaactgttgattttgttacaa

SEQ ID NO: 19190 - DNA, 25 bp, Homo sapien
cacgaaactgttcattttgttacaa

SEQ ID NO: 19191 - DNA, 25 bp, Homo sapien
agtttggactcatcttaagtcgaac

SEQ ID NO: 19192 - DNA, 25 bp, Homo sapien
agtttggactcaacttaagtcgaac

SEQ ID NO: 19193 - DNA, 25 bp, Homo sapien
agtctcatccatactctaccggtga

SEQ ID NO: 19194 - DNA, 25 bp, Homo sapien
agtctcatccattctctaccggtga

SEQ ID NO: 19195 - DNA, 25 bp, Homo sapien
agtttctcaacttctgtctcggaag

SEQ ID NO: 19196 - DNA, 25 bp, Homo sapien
agtttctcaactactgtctcggaag

SEQ ID NO: 19197 - DNA, 25 bp, Homo sapien
cgtgtcacccacacgtgttctggtg

SEQ ID NO: 19198 - DNA, 25 bp, Homo sapien
cgtgtcacccactcgtgttctggtg

SEQ ID NO: 19199 - DNA, 25 bp, Homo sapien
cgtccttagtccatcggtttggtct

SEQ ID NO: 19200 - DNA, 25 bp, Homo sapien
cgtccttagtccttcggtttggtct

SEQ ID NO: 19201 - DNA, 25 bp, Homo sapien
ttcgttgtggtaatgggtcgtgcct

SEQ ID NO: 19202 - DNA, 25 bp, Homo sapien
ttcgttgtggtattgggtcgtgcct

SEQ ID NO: 19203 - DNA, 25 bp, Homo sapien
ggcctggtacgattcctgtcggacc

SEQ ID NO: 19204 - DNA, 25 bp, Homo sapien
ggcctggtacgaatcctgtcggacc

SEQ ID NO: 19205 - DNA, 25 bp, Homo sapien
gaaacttgttgacacttccgtctct

SEQ ID NO: 19206 - DNA, 25 bp, Homo sapien
gaaacttgttgagacttccgtctct

SEQ ID NO: 19207 - DNA, 25 bp, Homo sapien
gaatgtgtccgacgtctctccctct

SEQ ID NO: 19208 - DNA, 25 bp, Homo sapien
gaatgtgtccgaggtctctccctct

SEQ ID NO: 19209 - DNA, 25 bp, Homo sapien
atctttcggatactactcagtactg

SEQ ID NO: 19210 - DNA, 25 bp, Homo sapien
atctttcggatagtactcagtactg

SEQ ID NO: 19211 - DNA, 25 bp, Homo sapien
ggttattcaggtactacaaaatatc

SEQ ID NO: 19212 - DNA, 25 bp, Homo sapien
ggttattcaggttctacaaaatatc

SEQ ID NO: 19213 - DNA, 25 bp, Homo sapien
gtcactttcgaaaaccgaatataag

SEQ ID NO: 19214 - DNA, 25 bp, Homo sapien
gtcactttcgaataccgaatataag

SEQ ID NO: 19215 - DNA, 25 bp, Homo sapien
ggactttacttacacataagatcag

SEQ ID NO: 19216 - DNA, 25 bp, Homo sapien
ggactttacttagacataagatcag

SEQ ID NO: 19217 - DNA, 25 bp, Homo sapien
ccaaaagtaccgacgacactgagac

SEQ ID NO: 19218 - DNA, 25 bp, Homo sapien
ccaaaagtaccgtcgacactgagac

SEQ ID NO: 19219 - DNA, 25 bp, Homo sapien
ttttagacttacgtgttcgggacac

SEQ ID NO: 19220 - DNA, 25 bp, Homo sapien
ttttagacttacctgttcgggacac

SEQ ID NO: 19221 - DNA, 25 bp, Homo sapien
tatcgtttctgtcgggtccgtagaa

SEQ ID NO: 19222 - DNA, 25 bp, Homo sapien
tatcgtttctgtggggtccgtagaa

SEQ ID NO: 19223 - DNA, 25 bp, Homo sapien
ttactcctagtggttgtcctaggag

SEQ ID NO: 19224 - DNA, 25 bp, Homo sapien
ttactcctagtgcttgtcctaggag

SEQ ID NO: 19225 - DNA, 25 bp, Homo sapien
tttctgctagtgtcgttatcagggt

SEQ ID NO: 19226 - DNA, 25 bp, Homo sapien
tttctgctagtgacgttatcagggt

SEQ ID NO: 19227 - DNA, 25 bp, Homo sapien
tgtttcgtgctagcaatgttcattg

SEQ ID NO: 19228 - DNA, 25 bp, Homo sapien
tgtttcgtgctaccaatgttcattg

SEQ ID NO: 19229 - DNA, 25 bp, Homo sapien
gtatgtccacagtgcagtacagtag

SEQ ID NO: 19230 - DNA, 25 bp, Homo sapien
gtatgtccacagagcagtacagtag

SEQ ID NO: 19231 - DNA, 25 bp, Homo sapien
tctgaggtcttcatctgttaatcat

SEQ ID NO: 19232 - DNA, 25 bp, Homo sapien
tctgaggtcttcttctgttaatcat

SEQ ID NO: 19233 - DNA, 25 bp, Homo sapien
tcgtagtaggactctttcagtccca

SEQ ID NO: 19234 - DNA, 25 bp, Homo sapien
tcgtagtaggacactttcagtccca

SEQ ID NO: 19235 - DNA, 25 bp, Homo sapien
tctgtttaagtttgtagtcgaccta

SEQ ID NO: 19236 - DNA, 25 bp, Homo sapien
tctgtttaagttagtagtcgaccta

SEQ ID NO: 19237 - DNA, 25 bp, Homo sapien
attcgcctttgttccgttgtacggc

SEQ ID NO: 19238 - DNA, 25 bp, Homo sapien
attcgcctttgtaccgttgtacggc

SEQ ID NO: 19239 - DNA, 25 bp, Homo sapien
tccgccttcgcaaacaagtacttcg

SEQ ID NO: 19240 - DNA, 25 bp, Homo sapien
tccgccttcgcatacaagtacttcg

SEQ ID NO: 19241 - DNA, 25 bp, Homo sapien
ggtctatcttgtaacttcaaatgta

SEQ ID NO: 19242 - DNA, 25 bp, Homo sapien
ggtctatcttgttacttcaaatgta

SEQ ID NO: 19243 - DNA, 25 bp, Homo sapien
ggaagacttttaaacatatctagtc

SEQ ID NO: 19244 - DNA, 25 bp, Homo sapien
ggaagacttttatacatatctagtc

SEQ ID NO: 19245 - DNA, 25 bp, Homo sapien
gagaaattcttttctataagtaccg

SEQ ID NO: 19246 - DNA, 25 bp, Homo sapien
gagaaattctttactataagtaccg

SEQ ID NO: 19247 - DNA, 25 bp, Homo sapien
gataagaggtttctcgtgtggtacc

SEQ ID NO: 19248 - DNA, 25 bp, Homo sapien
gataagaggtttgtcgtgtggtacc

SEQ ID NO: 19249 - DNA, 25 bp, Homo sapien
tccgtacacgggatttgtgggactc

SEQ ID NO: 19250 - DNA, 25 bp, Homo sapien
tccgtacacgggttttgtgggactc

SEQ ID NO: 19251 - DNA, 25 bp, Homo sapien
ttccacgatcaagactacgggtgtt

SEQ ID NO: 19252 - DNA, 25 bp, Homo sapien
ttccacgatcaacactacgggtgtt

SEQ ID NO: 19253 - DNA, 25 bp, Homo sapien
attgcagtttaaaaccgtagtttac

SEQ ID NO: 19254 - DNA, 25 bp, Homo sapien
attgcagtttaataccgtagtttac

SEQ ID NO: 19255 - DNA, 25 bp, Homo sapien
gacgaacttcactgaagtctctatt

SEQ ID NO: 19256 - DNA, 25 bp, Homo sapien
gacgaacttcacagaagtctctatt

SEQ ID NO: 19257 - DNA, 25 bp, Homo sapien
cccgaagaccctaaaagtgtcccgt

SEQ ID NO: 19258 - DNA, 25 bp, Homo sapien
cccgaagacccttaaagtgtcccgt

SEQ ID NO: 19259 - DNA, 25 bp, Homo sapien
ggactacgacacattacagtgtttt

SEQ ID NO: 19260 - DNA, 25 bp, Homo sapien
ggactacgacactttacagtgtttt

SEQ ID NO: 19261 - DNA, 25 bp, Homo sapien
gttgacacgataggtacacccgatg

SEQ ID NO: 19262 - DNA, 25 bp, Homo sapien
gttgacacgatacgtacacccgatg

SEQ ID NO: 19263 - DNA, 25 bp, Homo sapien
aggtcgacgtcgaaggactccaaga

SEQ ID NO: 19264 - DNA, 25 bp, Homo sapien
aggtcgacgtcgtaggactccaaga

SEQ ID NO: 19265 - DNA, 25 bp, Homo sapien
ttttggtggtcgaggcaccagagac

SEQ ID NO: 19266 - DNA, 25 bp, Homo sapien
ttttggtggtcgtggcaccagagac

SEQ ID NO: 19267 - DNA, 25 bp, Homo sapien
tatcagaccaatgaacaacgtgaca

SEQ ID NO: 19268 - DNA, 25 bp, Homo sapien
tatcagaccaatcaacaacgtgaca

SEQ ID NO: 19269 - DNA, 25 bp, Homo sapien
tgtctgagtaaaagtaccaaaacat

SEQ ID NO: 19270 - DNA, 25 bp, Homo sapien
tgtctgagtaaatgtaccaaaacat

SEQ ID NO: 19271 - DNA, 25 bp, Homo sapien
gcaagtatacataacacggacctta

SEQ ID NO: 19272 - DNA, 25 bp, Homo sapien
gcaagtatacattacacggacctta

SEQ ID NO: 19273 - DNA, 25 bp, Homo sapien
tgtcggaagaaatgaccacatattg

SEQ ID NO: 19274 - DNA, 25 bp, Homo sapien
tgtcggaagaaaagaccacatattg

SEQ ID NO: 19275 - DNA, 25 bp, Homo sapien
agtgaagaaagaactcgaccagttg

SEQ ID NO: 19276 - DNA, 25 bp, Homo sapien
agtgaagaaagatctcgaccagttg

SEQ ID NO: 19277 - DNA, 25 bp, Homo sapien
gtcgctcggtggtccctcggctact

SEQ ID NO: 19278 - DNA, 25 bp, Homo sapien
gtcgctcggtggaccctcggctact

SEQ ID NO: 19279 - DNA, 25 bp, Homo sapien
cttcttgcgtggtttcccggtgaac

SEQ ID NO: 19280 - DNA, 25 bp, Homo sapien
cttcttgcgtggattcccggtgaac

SEQ ID NO: 19281 - DNA, 25 bp, Homo sapien
acttcgtcccacgaaaacagggaaa

SEQ ID NO: 19282 - DNA, 25 bp, Homo sapien
acttcgtcccaccaaaacagggaaa

SEQ ID NO: 19283 - DNA, 25 bp, Homo sapien
cgcccagcgacgagacggtgtcgac

SEQ ID NO: 19284 - DNA, 25 bp, Homo sapien
cgcccagcgacgtgacggtgtcgac

SEQ ID NO: 19285 - DNA, 25 bp, Homo sapien
gtccctcgaggacctgggtcacagt

SEQ ID NO: 19286 - DNA, 25 bp, Homo sapien
gtccctcgaggagctgggtcacagt

SEQ ID NO: 19287 - DNA, 25 bp, Homo sapien
gggcgccagcgagatcttcatgaga

SEQ ID NO: 19288 - DNA, 25 bp, Homo sapien
gggcgccagcgacatcttcatgaga

SEQ ID NO: 19289 - DNA, 25 bp, Homo sapien
ggagactagcgctctggtgtgctac

SEQ ID NO: 19290 - DNA, 25 bp, Homo sapien
ggagactagcgcactggtgtgctac

SEQ ID NO: 19291 - DNA, 25 bp, Homo sapien
accgaacgtcgctgcggcgacgaag

SEQ ID NO: 19292 - DNA, 25 bp, Homo sapien
accgaacgtcgcagcggcgacgaag

SEQ ID NO: 19293 - DNA, 25 bp, Homo sapien
ccccgttgtcctcgtcgtcgagaag

SEQ ID NO: 19294 - DNA, 25 bp, Homo sapien
ccccgttgtcctggtcgtcgagaag

SEQ ID NO: 19295 - DNA, 25 bp, Homo sapien
cgtgtccaagccttgcgtcgtagaa

SEQ ID NO: 19296 - DNA, 25 bp, Homo sapien
cgtgtccaagccatgcgtcgtagaa

SEQ ID NO: 19297 - DNA, 25 bp, Homo sapien
aaagtaaagtcttctagatacccag

SEQ ID NO: 19298 - DNA, 25 bp, Homo sapien
aaagtaaagtctactagatacccag

SEQ ID NO: 19299 - DNA, 25 bp, Homo sapien
acgtaagattatttttatatttcta

SEQ ID NO: 19300 - DNA, 25 bp, Homo sapien
acgtaagattatatttatatttcta

SEQ ID NO: 19301 - DNA, 25 bp, Homo sapien
cagaacagtttgtgtgacttcattg

SEQ ID NO: 19302 - DNA, 25 bp, Homo sapien
cagaacagtttgagtgacttcattg

SEQ ID NO: 19303 - DNA, 25 bp, Homo sapien
gtccaaaacaaggtaccgaaatttt

SEQ ID NO: 19304 - DNA, 25 bp, Homo sapien
gtccaaaacaagctaccgaaatttt

SEQ ID NO: 19305 - DNA, 25 bp, Homo sapien
tccaaaccaggttttcttgagttgt

SEQ ID NO: 19306 - DNA, 25 bp, Homo sapien
tccaaaccaggtattcttgagttgt

SEQ ID NO: 19307 - DNA, 25 bp, Homo sapien
taaaacaacggagtgcttgtgtgtc

SEQ ID NO: 19308 - DNA, 25 bp, Homo sapien
taaaacaacggactgcttgtgtgtc

SEQ ID NO: 19309 - DNA, 25 bp, Homo sapien
aacaagaggagaagtttacggttac

SEQ ID NO: 19310 - DNA, 25 bp, Homo sapien
aacaagaggagatgtttacggttac

SEQ ID NO: 19311 - DNA, 25 bp, Homo sapien
acaaaacagggctccgacgacgctc

SEQ ID NO: 19312 - DNA, 25 bp, Homo sapien
acaaaacagggcaccgacgacgctc

SEQ ID NO: 19313 - DNA, 25 bp, Homo sapien
caaaaatagggcacgacgagcgttc

SEQ ID NO: 19314 - DNA, 25 bp, Homo sapien
caaaaatagggctcgacgagcgttc

SEQ ID NO: 19315 - DNA, 25 bp, Homo sapien
aaataaggtggtcacggagtctatc

SEQ ID NO: 19316 - DNA, 25 bp, Homo sapien
aaataaggtggtgacggagtctatc

SEQ ID NO: 19317 - DNA, 25 bp, Homo sapien
gacttttacgatagaacccgaatac

SEQ ID NO: 19318 - DNA, 25 bp, Homo sapien
gacttttacgattgaacccgaatac

SEQ ID NO: 19319 - DNA, 25 bp, Homo sapien
tagctgtattatagtgcctatatct

SEQ ID NO: 19320 - DNA, 25 bp, Homo sapien
tagctgtattattgtgcctatatct

SEQ ID NO: 19321 - DNA, 25 bp, Homo sapien
agtccgtacgttttctgtcctaatt

SEQ ID NO: 19322 - DNA, 25 bp, Homo sapien
agtccgtacgttatctgtcctaatt

SEQ ID NO: 19323 - DNA, 25 bp, Homo sapien
cccagagagggtatcggtccatatc

SEQ ID NO: 19324 - DNA, 25 bp, Homo sapien
cccagagagggtttcggtccatatc

SEQ ID NO: 19325 - DNA, 25 bp, Homo sapien
ttaggagcaggctttagggcgccac

SEQ ID NO: 19326 - DNA, 25 bp, Homo sapien
ttaggagcaggcattagggcgccac

SEQ ID NO: 19327 - DNA, 25 bp, Homo sapien
tcgaaccaggagtgtgtggtcgccc

SEQ ID NO: 19328 - DNA, 25 bp, Homo sapien
tcgaaccaggagagtgtggtcgccc

SEQ ID NO: 19329 - DNA, 25 bp, Homo sapien
tcctaagaccagtaggggtttcggt

SEQ ID NO: 19330 - DNA, 25 bp, Homo sapien
tcctaagaccagaaggggtttcggt

SEQ ID NO: 19331 - DNA, 25 bp, Homo sapien
acaattaaagtaagggttcgtccga

SEQ ID NO: 19332 - DNA, 25 bp, Homo sapien
acaattaaagtatgggttcgtccga

SEQ ID NO: 19333 - DNA, 25 bp, Homo sapien
catattagaaatgagaactcgttca

SEQ ID NO: 19334 - DNA, 25 bp, Homo sapien
catattagaaatcagaactcgttca

SEQ ID NO: 19335 - DNA, 25 bp, Homo sapien
ttgttgtagacagaccatgattact

SEQ ID NO: 19336 - DNA, 25 bp, Homo sapien
ttgttgtagacacaccatgattact

SEQ ID NO: 19337 - DNA, 25 bp, Homo sapien
cttttgtaagataagccttcagttt

SEQ ID NO: 19338 - DNA, 25 bp, Homo sapien
cttttgtaagattagccttcagttt

SEQ ID NO: 19339 - DNA, 25 bp, Homo sapien
ataactcgaagactcgttctaaagt

SEQ ID NO: 19340 - DNA, 25 bp, Homo sapien
ataactcgaagagtcgttctaaagt

SEQ ID NO: 19341 - DNA, 25 bp, Homo sapien
gtaacataccgaagttgtctttgaa

SEQ ID NO: 19342 - DNA, 25 bp, Homo sapien
gtaacataccgatgttgtctttgaa

SEQ ID NO: 19343 - DNA, 25 bp, Homo sapien
agtaagacctattcgctgtttcctc

SEQ ID NO: 19344 - DNA, 25 bp, Homo sapien
agtaagacctatacgctgtttcctc

SEQ ID NO: 19345 - DNA, 25 bp, Homo sapien
agaagacgtgtctcaacttttaata

SEQ ID NO: 19346 - DNA, 25 bp, Homo sapien
agaagacgtgtcacaacttttaata

SEQ ID NO: 19347 - DNA, 25 bp, Homo sapien
cagcagcagcaacagtcttagaaga

SEQ ID NO: 19348 - DNA, 25 bp, Homo sapien
cagcagcagcaagagtcttagaaga

SEQ ID NO: 19349 - DNA, 25 bp, Homo sapien
tagatagtaaaggatcaacatacac

SEQ ID NO: 19350 - DNA, 25 bp, Homo sapien
tagatagtaaagcatcaacatacac

SEQ ID NO: 19351 - DNA, 25 bp, Homo sapien
aacgactaaggtcgtagtaccgtcc

SEQ ID NO: 19352 - DNA, 25 bp, Homo sapien
aacgactaaggtggtagtaccgtcc

SEQ ID NO: 19353 - DNA, 25 bp, Homo sapien
atccgaataccgacgagactaccac

SEQ ID NO: 19354 - DNA, 25 bp, Homo sapien
atccgaataccgtcgagactaccac

SEQ ID NO: 19355 - DNA, 25 bp, Homo sapien
aaagttccagacctatgaacgtcca

SEQ ID NO: 19356 - DNA, 25 bp, Homo sapien
aaagttccagacgtatgaacgtcca

SEQ ID NO: 19357 - DNA, 25 bp, Homo sapien
gtatctcagactaggacactctcgg

SEQ ID NO: 19358 - DNA, 25 bp, Homo sapien
gtatctcagacttggacactctcgg

SEQ ID NO: 19359 - DNA, 25 bp, Homo sapien
cgttgtttgttggtacatctgtacg

SEQ ID NO: 19360 - DNA, 25 bp, Homo sapien
cgttgtttgttgctacatctgtacg

SEQ ID NO: 19361 - DNA, 25 bp, Homo sapien
tccttagttctctagtctccttgag

SEQ ID NO: 19362 - DNA, 25 bp, Homo sapien
tccttagttctcaagtctccttgag

SEQ ID NO: 19363 - DNA, 25 bp, Homo sapien
tcatgagcgttttatacgaccttga

SEQ ID NO: 19364 - DNA, 25 bp, Homo sapien
tcatgagcgtttaatacgaccttga

SEQ ID NO: 19365 - DNA, 25 bp, Homo sapien
gtgatagtcgtgactacaacactgc

SEQ ID NO: 19366 - DNA, 25 bp, Homo sapien
gtgatagtcgtgtctacaacactgc

SEQ ID NO: 19367 - DNA, 25 bp, Homo sapien
cgtatatagtgttacaactctactc

SEQ ID NO: 19368 - DNA, 25 bp, Homo sapien
cgtatatagtgtaacaactctactc

SEQ ID NO: 19369 - DNA, 25 bp, Homo sapien
tgagacgactagtgaacacccgacc

SEQ ID NO: 19370 - DNA, 25 bp, Homo sapien
tgagacgactagagaacacccgacc

SEQ ID NO: 19371 - DNA, 25 bp, Homo sapien
acgggtactccgttaaaggacacct

SEQ ID NO: 19372 - DNA, 25 bp, Homo sapien
acgggtactccgataaaggacacct

SEQ ID NO: 19373 - DNA, 25 bp, Homo sapien
gcgggagcgacgaaaaggactctct

SEQ ID NO: 19374 - DNA, 25 bp, Homo sapien
gcgggagcgacgtaaaggactctct

SEQ ID NO: 19375 - DNA, 25 bp, Homo sapien
gcaagtggtcggacacagagacttc

SEQ ID NO: 19376 - DNA, 25 bp, Homo sapien
gcaagtggtcggtcacagagacttc

SEQ ID NO: 19377 - DNA, 25 bp, Homo sapien
aaagtgacagggaagagtcaccgat

SEQ ID NO: 19378 - DNA, 25 bp, Homo sapien
aaagtgacagggtagagtcaccgat

SEQ ID NO: 19379 - DNA, 25 bp, Homo sapien
acgtgaactagatagactacatgta

SEQ ID NO: 19380 - DNA, 25 bp, Homo sapien
acgtgaactagaaagactacatgta

SEQ ID NO: 19381 - DNA, 25 bp, Homo sapien
ccaccgagagtcagaagaatccgtc

SEQ ID NO: 19382 - DNA, 25 bp, Homo sapien
ccaccgagagtctgaagaatccgtc

SEQ ID NO: 19383 - DNA, 25 bp, Homo sapien
gaaccgacggtctgaaataacagta

SEQ ID NO: 19384 - DNA, 25 bp, Homo sapien
gaaccgacggtcagaaataacagta

SEQ ID NO: 19385 - DNA, 25 bp, Homo sapien
gttagggacgtcacagtaagatgac

SEQ ID NO: 19386 - DNA, 25 bp, Homo sapien
gttagggacgtctcagtaagatgac

SEQ ID NO: 19387 - DNA, 25 bp, Homo sapien
ggtgaaactttcagtcgacgattat

SEQ ID NO: 19388 - DNA, 25 bp, Homo sapien
ggtgaaactttctgtcgacgattat

SEQ ID NO: 19389 - DNA, 25 bp, Homo sapien
tctcgatagtctatgtgtcgttaaa

SEQ ID NO: 19390 - DNA, 25 bp, Homo sapien
tctcgatagtctttgtgtcgttaaa

SEQ ID NO: 19391 - DNA, 25 bp, Homo sapien
cttgaagtcttaccttcgtgtccac

SEQ ID NO: 19392 - DNA, 25 bp, Homo sapien
cttgaagtcttagcttcgtgtccac

SEQ ID NO: 19393 - DNA, 25 bp, Homo sapien
atttacgagactacctccgtggacc

SEQ ID NO: 19394 - DNA, 25 bp, Homo sapien
atttacgagacttcctccgtggacc

SEQ ID NO: 19395 - DNA, 25 bp, Homo sapien
acgaaagaatgttacttttgtacct

SEQ ID NO: 19396 - DNA, 25 bp, Homo sapien
acgaaagaatgtaacttttgtacct

SEQ ID NO: 19397 - DNA, 25 bp, Homo sapien
gccgagattacaatcgggttttctc

SEQ ID NO: 19398 - DNA, 25 bp, Homo sapien
gccgagattacattcgggttttctc

SEQ ID NO: 19399 - DNA, 25 bp, Homo sapien
ccaccaaaccttctgaggttcttcg

SEQ ID NO: 19400 - DNA, 25 bp, Homo sapien
ccaccaaaccttgtgaggttcttcg

SEQ ID NO: 19401 - DNA, 25 bp, Homo sapien
tccagaggtattttggtgtttcctt

SEQ ID NO: 19402 - DNA, 25 bp, Homo sapien
tccagaggtattatggtgtttcctt

SEQ ID NO: 19403 - DNA, 25 bp, Homo sapien
aacggttctgactttagtttctatt

SEQ ID NO: 19404 - DNA, 25 bp, Homo sapien
aacggttctgacattagtttctatt

SEQ ID NO: 19405 - DNA, 25 bp, Homo sapien
tcaacttgtcagtgtgtatcaagta

SEQ ID NO: 19406 - DNA, 25 bp, Homo sapien
tcaacttgtcagagtgtatcaagta

SEQ ID NO: 19407 - DNA, 25 bp, Homo sapien
aactccgaagacaggtacggacaac

SEQ ID NO: 19408 - DNA, 25 bp, Homo sapien
aactccgaagactggtacggacaac

SEQ ID NO: 19409 - DNA, 25 bp, Homo sapien
aagtacccgggtcagaaccgaccga

SEQ ID NO: 19410 - DNA, 25 bp, Homo sapien
aagtacccgggtgagaaccgaccga

SEQ ID NO: 19411 - DNA, 25 bp, Homo sapien
aatcggttgctctgacctgaccgag

SEQ ID NO: 19412 - DNA, 25 bp, Homo sapien
aatcggttgctcagacctgaccgag

SEQ ID NO: 19413 - DNA, 25 bp, Homo sapien
ggaccgtcgagaagacgtgtctcgg

SEQ ID NO: 19414 - DNA, 25 bp, Homo sapien
ggaccgtcgagatgacgtgtctcgg

SEQ ID NO: 19415 - DNA, 25 bp, Homo sapien
tgaggtcgtacggaaacacactggg

SEQ ID NO: 19416 - DNA, 25 bp, Homo sapien
tgaggtcgtacgcaaacacactggg

SEQ ID NO: 19417 - DNA, 25 bp, Homo sapien
tttgctaacgacatcctgtcaggta

SEQ ID NO: 19418 - DNA, 25 bp, Homo sapien
tttgctaacgacttcctgtcaggta

SEQ ID NO: 19419 - DNA, 25 bp, Homo sapien
attgcagtaacatcatgcagactat

SEQ ID NO: 19420 - DNA, 25 bp, Homo sapien
attgcagtaacaacatgcagactat

SEQ ID NO: 19421 - DNA, 25 bp, Homo sapien
tctagagtcccgtctctgaggtata

SEQ ID NO: 19422 - DNA, 25 bp, Homo sapien
tctagagtcccgactctgaggtata

SEQ ID NO: 19423 - DNA, 25 bp, Homo sapien
ttacgtcggtgccttttgaagtgta

SEQ ID NO: 19424 - DNA, 25 bp, Homo sapien
ttacgtcggtgcgttttgaagtgta

SEQ ID NO: 19425 - DNA, 25 bp, Homo sapien
tcttcggaccgtttgttaaacgtga

SEQ ID NO: 19426 - DNA, 25 bp, Homo sapien
tcttcggaccgtatgttaaacgtga

SEQ ID NO: 19427 - DNA, 25 bp, Homo sapien
aatttcagtgtcagtttaaacgtca

SEQ ID NO: 19428 - DNA, 25 bp, Homo sapien
aatttcagtgtctgtttaaacgtca

SEQ ID NO: 19429 - DNA, 25 bp, Homo sapien
tacatgtacaggattttacggttca

SEQ ID NO: 19430 - DNA, 25 bp, Homo sapien
tacatgtacaggtttttacggttca

SEQ ID NO: 19431 - DNA, 25 bp, Homo sapien
tctggacttatttcctacggttgac

SEQ ID NO: 19432 - DNA, 25 bp, Homo sapien
tctggacttattacctacggttgac

SEQ ID NO: 19433 - DNA, 25 bp, Homo sapien
tagaatacagtcatctaggtctgtc

SEQ ID NO: 19434 - DNA, 25 bp, Homo sapien
tagaatacagtcttctaggtctgtc

SEQ ID NO: 19435 - DNA, 25 bp, Homo sapien
cttgtaagtctatagtgtctgacgt

SEQ ID NO: 19436 - DNA, 25 bp, Homo sapien
cttgtaagtctaaagtgtctgacgt

SEQ ID NO: 19437 - DNA, 25 bp, Homo sapien
cccctcgactgtaggccataggaga

SEQ ID NO: 19438 - DNA, 25 bp, Homo sapien
cccctcgactgttggccataggaga

SEQ ID NO: 19439 - DNA, 25 bp, Homo sapien
cggtcccaggggagaccgaccctga

SEQ ID NO: 19440 - DNA, 25 bp, Homo sapien
cggtcccaggggtgaccgaccctga

SEQ ID NO: 19441 - DNA, 25 bp, Homo sapien
ccggccagggggtcagagcactaac

SEQ ID NO: 19442 - DNA, 25 bp, Homo sapien
ccggccagggggacagagcactaac

SEQ ID NO: 19443 - DNA, 25 bp, Homo sapien
gtgcaaggtctacaaaacccgtata

SEQ ID NO: 19444 - DNA, 25 bp, Homo sapien
gtgcaaggtctagaaaacccgtata

SEQ ID NO: 19445 - DNA, 25 bp, Homo sapien
atgggggtttgtatccccgtatact

SEQ ID NO: 19446 - DNA, 25 bp, Homo sapien
atgggggtttgtttccccgtatact

SEQ ID NO: 19447 - DNA, 25 bp, Homo sapien
ccgacataactcttcctaccggggg

SEQ ID NO: 19448 - DNA, 25 bp, Homo sapien
ccgacataactcatcctaccggggg

SEQ ID NO: 19449 - DNA, 25 bp, Homo sapien
tcgagagaagtcgcgcccgggaagt

SEQ ID NO: 19450 - DNA, 25 bp, Homo sapien
tcgagagaagtcccgcccgggaagt

SEQ ID NO: 19451 - DNA, 25 bp, Homo sapien
tatgacgtagtcgagccacggaaat

SEQ ID NO: 19452 - DNA, 25 bp, Homo sapien
tatgacgtagtccagccacggaaat

SEQ ID NO: 19453 - DNA, 25 bp, Homo sapien
aataaactatactacccggacagtg

SEQ ID NO: 19454 - DNA, 25 bp, Homo sapien
aataaactatacaacccggacagtg

SEQ ID NO: 19455 - DNA, 25 bp, Homo sapien
acaaggacctatgactcctgtaagc

SEQ ID NO: 19456 - DNA, 25 bp, Homo sapien
acaaggacctatcactcctgtaagc

SEQ ID NO: 19457 - DNA, 25 bp, Homo sapien
gataaaacctagacacatgtaagat

SEQ ID NO: 19458 - DNA, 25 bp, Homo sapien
gataaaacctagtcacatgtaagat

SEQ ID NO: 19459 - DNA, 25 bp, Homo sapien
aaaatcgtgtcacatatgtacgaat

SEQ ID NO: 19460 - DNA, 25 bp, Homo sapien
aaaatcgtgtcagatatgtacgaat

SEQ ID NO: 19461 - DNA, 25 bp, Homo sapien
ggaaacttctaagtgagttcacaat

SEQ ID NO: 19462 - DNA, 25 bp, Homo sapien
ggaaacttctaactgagttcacaat

SEQ ID NO: 19463 - DNA, 25 bp, Homo sapien
ggattctttatacgattgtcaatac

SEQ ID NO: 19464 - DNA, 25 bp, Homo sapien
ggattctttataggattgtcaatac

SEQ ID NO: 19465 - DNA, 25 bp, Homo sapien
gaacccttttacgtcgtttgggact

SEQ ID NO: 19466 - DNA, 25 bp, Homo sapien
gaacccttttacctcgtttgggact

SEQ ID NO: 19467 - DNA, 25 bp, Homo sapien
agaacggagatgaacggggtcatcc

SEQ ID NO: 19468 - DNA, 25 bp, Homo sapien
agaacggagatgtacggggtcatcc

SEQ ID NO: 19469 - DNA, 25 bp, Homo sapien
accagtgaacaacaggagatctttc

SEQ ID NO: 19470 - DNA, 25 bp, Homo sapien
accagtgaacaagaggagatctttc

SEQ ID NO: 19471 - DNA, 25 bp, Homo sapien
cagttagagaaaaggcgaattctcc

SEQ ID NO: 19472 - DNA, 25 bp, Homo sapien
cagttagagaaatggcgaattctcc

SEQ ID NO: 19473 - DNA, 25 bp, Homo sapien
aaggaatctgtatacccgaatcccc

SEQ ID NO: 19474 - DNA, 25 bp, Homo sapien
aaggaatctgtaaacccgaatcccc

SEQ ID NO: 19475 - DNA, 25 bp, Homo sapien
gggtctccgttacaagaattcgcgc

SEQ ID NO: 19476 - DNA, 25 bp, Homo sapien
gggtctccgttagaagaattcgcgc

SEQ ID NO: 19477 - DNA, 25 bp, Homo sapien
ggagttcctcattgagaagttttct

SEQ ID NO: 19478 - DNA, 25 bp, Homo sapien
ggagttcctcatagagaagttttct

SEQ ID NO: 19479 - DNA, 25 bp, Homo sapien
ggagattcacctataaacgttaata

SEQ ID NO: 19480 - DNA, 25 bp, Homo sapien
ggagattcacctttaaacgttaata

SEQ ID NO: 19481 - DNA, 25 bp, Homo sapien
ggggtttacccgtcttatcggaggg

SEQ ID NO: 19482 - DNA, 25 bp, Homo sapien
ggggtttacccgacttatcggaggg

SEQ ID NO: 19483 - DNA, 25 bp, Homo sapien
tatatatacctcgaccttgggatag

SEQ ID NO: 19484 - DNA, 25 bp, Homo sapien
tatatatacctccaccttgggatag

SEQ ID NO: 19485 - DNA, 25 bp, Homo sapien
tttatactttcttatttcatgaagt

SEQ ID NO: 19486 - DNA, 25 bp, Homo sapien
tttatactttctaatttcatgaagt

SEQ ID NO: 19487 - DNA, 25 bp, Homo sapien
ctttattgttaattcgtctaaggac

SEQ ID NO: 19488 - DNA, 25 bp, Homo sapien
ctttattgttaaatcgtctaaggac

SEQ ID NO: 19489 - DNA, 25 bp, Homo sapien
tcttggggaagacctccgagtctct

SEQ ID NO: 19490 - DNA, 25 bp, Homo sapien
tcttggggaagagctccgagtctct

SEQ ID NO: 19491 - DNA, 25 bp, Homo sapien
gtccaggaaggactacagctacagt

SEQ ID NO: 19492 - DNA, 25 bp, Homo sapien
gtccaggaaggagtacagctacagt

SEQ ID NO: 19493 - DNA, 25 bp, Homo sapien
gtcctactcaagacctcatgtaccg

SEQ ID NO: 19494 - DNA, 25 bp, Homo sapien
gtcctactcaagtcctcatgtaccg

SEQ ID NO: 19495 - DNA, 25 bp, Homo sapien
cggtagtcaatcactacagagaggt

SEQ ID NO: 19496 - DNA, 25 bp, Homo sapien
cggtagtcaatctctacagagaggt

SEQ ID NO: 19497 - DNA, 25 bp, Homo sapien
cgaataacttataaaaccacaaggg

SEQ ID NO: 19498 - DNA, 25 bp, Homo sapien
cgaataacttattaaaccacaaggg

SEQ ID NO: 19499 - DNA, 25 bp, Homo sapien
gacaacattccgtggcctaacgaga

SEQ ID NO: 19500 - DNA, 25 bp, Homo sapien
gacaacattccgaggcctaacgaga

SEQ ID NO: 19501 - DNA, 25 bp, Homo sapien
cgaggaaggcgacgacgaagaacca

SEQ ID NO: 19502 - DNA, 25 bp, Homo sapien
cgaggaaggcgaggacgaagaacca

SEQ ID NO: 19503 - DNA, 25 bp, Homo sapien
aagaagggtacaggacagagaccta

SEQ ID NO: 19504 - DNA, 25 bp, Homo sapien
aagaagggtacacgacagagaccta

SEQ ID NO: 19505 - DNA, 25 bp, Homo sapien
cccgtaacgggtctgacacaaggac

SEQ ID NO: 19506 - DNA, 25 bp, Homo sapien
cccgtaacgggtgtgacacaaggac

SEQ ID NO: 19507 - DNA, 25 bp, Homo sapien
catcgtagggttgtcgaacacagga

SEQ ID NO: 19508 - DNA, 25 bp, Homo sapien
catcgtagggttctcgaacacagga

SEQ ID NO: 19509 - DNA, 25 bp, Homo sapien
ccagtgggacgtgaccatccagagg

SEQ ID NO: 19510 - DNA, 25 bp, Homo sapien
ccagtgggacgtcaccatccagagg

SEQ ID NO: 19511 - DNA, 25 bp, Homo sapien
acactgaaagagttgattacccgga

SEQ ID NO: 19512 - DNA, 25 bp, Homo sapien
acactgaaagagatgattacccgga

SEQ ID NO: 19513 - DNA, 25 bp, Homo sapien
ccttgaaagtaagatctactcttga

SEQ ID NO: 19514 - DNA, 25 bp, Homo sapien
ccttgaaagtaacatctactcttga

SEQ ID NO: 19515 - DNA, 25 bp, Homo sapien
agtcggagtcagtacatccactaga

SEQ ID NO: 19516 - DNA, 25 bp, Homo sapien
agtcggagtcagaacatccactaga

SEQ ID NO: 19517 - DNA, 25 bp, Homo sapien
gaaccactgtctatcataaacggtt

SEQ ID NO: 19518 - DNA, 25 bp, Homo sapien
gaaccactgtctttcataaacggtt

SEQ ID NO: 19519 - DNA, 25 bp, Homo sapien
ggcagacggcagactgaccagtgtc

SEQ ID NO: 19520 - DNA, 25 bp, Homo sapien
ggcagacggcagtctgaccagtgtc

SEQ ID NO: 19521 - DNA, 25 bp, Homo sapien
tcagggtccgtcaggaccacgacga

SEQ ID NO: 19522 - DNA, 25 bp, Homo sapien
tcagggtccgtctggaccacgacga

SEQ ID NO: 19523 - DNA, 25 bp, Homo sapien
acgttttctacgtctacccgtccgt

SEQ ID NO: 19524 - DNA, 25 bp, Homo sapien
acgttttctacgactacccgtccgt

SEQ ID NO: 19525 - DNA, 25 bp, Homo sapien
tcctattgttcagtgtcgaccgtcc

SEQ ID NO: 19526 - DNA, 25 bp, Homo sapien
tcctattgttcactgtcgaccgtcc

SEQ ID NO: 19527 - DNA, 25 bp, Homo sapien
tcgacgccgtagaaggcgtggctca

SEQ ID NO: 19528 - DNA, 25 bp, Homo sapien
tcgacgccgtagtaggcgtggctca

SEQ ID NO: 19529 - DNA, 25 bp, Homo sapien
ttcttcgtctctgttcggtgggttc

SEQ ID NO: 19530 - DNA, 25 bp, Homo sapien
ttcttcgtctctcttcggtgggttc

SEQ ID NO: 19531 - DNA, 25 bp, Homo sapien
taggtgaccttcgtcgagaggtttg

SEQ ID NO: 19532 - DNA, 25 bp, Homo sapien
taggtgaccttcctcgagaggtttg

SEQ ID NO: 19533 - DNA, 25 bp, Homo sapien
tttgttccgttgtacggccgtttct

SEQ ID NO: 19534 - DNA, 25 bp, Homo sapien
tttgttccgttgaacggccgtttct

SEQ ID NO: 19535 - DNA, 25 bp, Homo sapien
tcttgtatctttgtggtcctagatc

SEQ ID NO: 19536 - DNA, 25 bp, Homo sapien
tcttgtatctttctggtcctagatc

SEQ ID NO: 19537 - DNA, 25 bp, Homo sapien
tacttcggcgggtactcggtctgaa

SEQ ID NO: 19538 - DNA, 25 bp, Homo sapien
tacttcggcgggaactcggtctgaa

SEQ ID NO: 19539 - DNA, 25 bp, Homo sapien
cccgtctctggtcctgctctgaagt

SEQ ID NO: 19540 - DNA, 25 bp, Homo sapien
cccgtctctggtgctgctctgaagt

SEQ ID NO: 19541 - DNA, 25 bp, Homo sapien
cgctaccctgggaactgggtcaagt

SEQ ID NO: 19542 - DNA, 25 bp, Homo sapien
cgctaccctgggtactgggtcaagt

SEQ ID NO: 19543 - DNA, 25 bp, Homo sapien
ttctgaggacgaggaccggtgtccc

SEQ ID NO: 19544 - DNA, 25 bp, Homo sapien
ttctgaggacgacgaccggtgtccc

SEQ ID NO: 19545 - DNA, 25 bp, Homo sapien
ggcccaatacgaccaacatgtcccg

SEQ ID NO: 19546 - DNA, 25 bp, Homo sapien
ggcccaatacgagcaacatgtcccg

SEQ ID NO: 19547 - DNA, 25 bp, Homo sapien
tcccgaaagacgttgatgtgtcacc

SEQ ID NO: 19548 - DNA, 25 bp, Homo sapien
tcccgaaagacgatgatgtgtcacc

SEQ ID NO: 19549 - DNA, 25 bp, Homo sapien
cacgggacaaagtagaacgacccgg

SEQ ID NO: 19550 - DNA, 25 bp, Homo sapien
cacgggacaaagaagaacgacccgg

SEQ ID NO: 19551 - DNA, 25 bp, Homo sapien
aggagacgacaatttgacctccact

SEQ ID NO: 19552 - DNA, 25 bp, Homo sapien
aggagacgacaaattgacctccact

SEQ ID NO: 19553 - DNA, 25 bp, Homo sapien
tgacagagtttcattggacgtcgaa

SEQ ID NO: 19554 - DNA, 25 bp, Homo sapien
tgacagagtttctttggacgtcgaa

SEQ ID NO: 19555 - DNA, 25 bp, Homo sapien
tttgtggtttagttctttagacccc

SEQ ID NO: 19556 - DNA, 25 bp, Homo sapien
tttgtggtttagatctttagacccc

SEQ ID NO: 19557 - DNA, 25 bp, Homo sapien
tttctgggtttcgctctcttccccg

SEQ ID NO: 19558 - DNA, 25 bp, Homo sapien
tttctgggtttccctctcttccccg

SEQ ID NO: 19559 - DNA, 25 bp, Homo sapien
gtcgacgattgactctcttgctccg

SEQ ID NO: 19560 - DNA, 25 bp, Homo sapien
gtcgacgattgagtctcttgctccg

SEQ ID NO: 19561 - DNA, 25 bp, Homo sapien
actcggttttcgtctcgttgtccct

SEQ ID NO: 19562 - DNA, 25 bp, Homo sapien
actcggttttcgactcgttgtccct

SEQ ID NO: 19563 - DNA, 25 bp, Homo sapien
cctttcttcggtacctatagctcag

SEQ ID NO: 19564 - DNA, 25 bp, Homo sapien
cctttcttcggttcctatagctcag

SEQ ID NO: 19565 - DNA, 25 bp, Homo sapien
tttcttcgaacgttaccttgcctag

SEQ ID NO: 19566 - DNA, 25 bp, Homo sapien
tttcttcgaacgataccttgcctag

SEQ ID NO: 19567 - DNA, 25 bp, Homo sapien
acgtcaggtcgtatattctcatctt

SEQ ID NO: 19568 - DNA, 25 bp, Homo sapien
acgtcaggtcgtttattctcatctt

SEQ ID NO: 19569 - DNA, 25 bp, Homo sapien
gtgtgagagtcttacggggttcttc

SEQ ID NO: 19570 - DNA, 25 bp, Homo sapien
gtgtgagagtctaacggggttcttc

SEQ ID NO: 19571 - DNA, 25 bp, Homo sapien
tcgtagacgacgaaggtgaattctc

SEQ ID NO: 19572 - DNA, 25 bp, Homo sapien
tcgtagacgacgtaggtgaattctc

SEQ ID NO: 19573 - DNA, 25 bp, Homo sapien
gatcgacagggtcgtgcgttcgttt

SEQ ID NO: 19574 - DNA, 25 bp, Homo sapien
gatcgacagggtggtgcgttcgttt

SEQ ID NO: 19575 - DNA, 25 bp, Homo sapien
gagtgactcggtgtcggcctaccat

SEQ ID NO: 19576 - DNA, 25 bp, Homo sapien
gagtgactcggtctcggcctaccat

SEQ ID NO: 19577 - DNA, 25 bp, Homo sapien
gacggtgacccgttccggaacccga

SEQ ID NO: 19578 - DNA, 25 bp, Homo sapien
gacggtgacccgatccggaacccga

SEQ ID NO: 19579 - DNA, 25 bp, Homo sapien
ataagtgacttcagtccaaaagata

SEQ ID NO: 19580 - DNA, 25 bp, Homo sapien
ataagtgacttctgtccaaaagata

SEQ ID NO: 19581 - DNA, 25 bp, Homo sapien
atccgagacccgtctaaaaagacac

SEQ ID NO: 19582 - DNA, 25 bp, Homo sapien
atccgagacccgactaaaaagacac

SEQ ID NO: 19583 - DNA, 25 bp, Homo sapien
acacgacccgtcagaggagtcaaca

SEQ ID NO: 19584 - DNA, 25 bp, Homo sapien
acacgacccgtctgaggagtcaaca

SEQ ID NO: 19585 - DNA, 25 bp, Homo sapien
agacttcaagaggtcgtataactac

SEQ ID NO: 19586 - DNA, 25 bp, Homo sapien
agacttcaagagctcgtataactac

SEQ ID NO: 19587 - DNA, 25 bp, Homo sapien
agtcgatgtcaaagaacgaatctac

SEQ ID NO: 19588 - DNA, 25 bp, Homo sapien
agtcgatgtcaatgaacgaatctac

SEQ ID NO: 19589 - DNA, 25 bp, Homo sapien
gatctcggcgaaactgacacaacta

SEQ ID NO: 19590 - DNA, 25 bp, Homo sapien
gatctcggcgaatctgacacaacta

SEQ ID NO: 19591 - DNA, 25 bp, Homo sapien
cgtccaggggtatacacacacacgc

SEQ ID NO: 19592 - DNA, 25 bp, Homo sapien
cgtccaggggtaaacacacacacgc

SEQ ID NO: 19593 - DNA, 25 bp, Homo sapien
cttcatgaagtcaaggagacactcg

SEQ ID NO: 19594 - DNA, 25 bp, Homo sapien
cttcatgaagtctaggagacactcg

SEQ ID NO: 19595 - DNA, 25 bp, Homo sapien
gattagaaacgaggtccaagaaaga

SEQ ID NO: 19596 - DNA, 25 bp, Homo sapien
gattagaaacgacgtccaagaaaga

SEQ ID NO: 19597 - DNA, 25 bp, Homo sapien
gttgataccgactttccatgtggga

SEQ ID NO: 19598 - DNA, 25 bp, Homo sapien
gttgataccgacattccatgtggga

SEQ ID NO: 19599 - DNA, 25 bp, Homo sapien
taaactcttgtcttctcgtgcacgt

SEQ ID NO: 19600 - DNA, 25 bp, Homo sapien
taaactcttgtcatctcgtgcacgt

SEQ ID NO: 19601 - DNA, 25 bp, Homo sapien
tctcgctacgggagacgcttcaacc

SEQ ID NO: 19602 - DNA, 25 bp, Homo sapien
tctcgctacgggtgacgcttcaacc

SEQ ID NO: 19603 - DNA, 25 bp, Homo sapien
gaggtcccatgcaggagcttcaaac

SEQ ID NO: 19604 - DNA, 25 bp, Homo sapien
gaggtcccatgctggagcttcaaac

SEQ ID NO: 19605 - DNA, 25 bp, Homo sapien
tgtccccaacccgacgccggacatc

SEQ ID NO: 19606 - DNA, 25 bp, Homo sapien
tgtccccaaccccacgccggacatc

SEQ ID NO: 19607 - DNA, 25 bp, Homo sapien
ccttacgggaccacacactctagtt

SEQ ID NO: 19608 - DNA, 25 bp, Homo sapien
ccttacgggacctcacactctagtt

SEQ ID NO: 19609 - DNA, 25 bp, Homo sapien
ctcactaaggagaccacttctactt

SEQ ID NO: 19610 - DNA, 25 bp, Homo sapien
ctcactaaggagtccacttctactt

SEQ ID NO: 19611 - DNA, 25 bp, Homo sapien
cgtgacctgtcatccagtcgtgtaa

SEQ ID NO: 19612 - DNA, 25 bp, Homo sapien
cgtgacctgtcaaccagtcgtgtaa

SEQ ID NO: 19613 - DNA, 25 bp, Homo sapien
gtcctcggtgtaaacgagtctcgga

SEQ ID NO: 19614 - DNA, 25 bp, Homo sapien
gtcctcggtgtatacgagtctcgga

SEQ ID NO: 19615 - DNA, 25 bp, Homo sapien
ccgctctctcgtgaaggtctacgga

SEQ ID NO: 19616 - DNA, 25 bp, Homo sapien
ccgctctctcgtcaaggtctacgga

SEQ ID NO: 19617 - DNA, 25 bp, Homo sapien
agggaccggtgcttcagttatttta

SEQ ID NO: 19618 - DNA, 25 bp, Homo sapien
agggaccggtgcatcagttatttta

SEQ ID NO: 19619 - DNA, 25 bp, Homo sapien
tctcagtgcataacggtgtttcgta

SEQ ID NO: 19620 - DNA, 25 bp, Homo sapien
tctcagtgcatatcggtgtttcgta

SEQ ID NO: 19621 - DNA, 25 bp, Homo sapien
atgccacaggttcgtttgtcgtctt

SEQ ID NO: 19622 - DNA, 25 bp, Homo sapien
atgccacaggttggtttgtcgtctt

SEQ ID NO: 19623 - DNA, 25 bp, Homo sapien
gacgacgatgtcgtgatagtcgttt

SEQ ID NO: 19624 - DNA, 25 bp, Homo sapien
gacgacgatgtcctgatagtcgttt

SEQ ID NO: 19625 - DNA, 25 bp, Homo sapien
tatacgacgatgacgttaaatcggt

SEQ ID NO: 19626 - DNA, 25 bp, Homo sapien
tatacgacgatgtcgttaaatcggt

SEQ ID NO: 19627 - DNA, 25 bp, Homo sapien
ctgttacgtactcacactctatgtg

SEQ ID NO: 19628 - DNA, 25 bp, Homo sapien
ctgttacgtactgacactctatgtg

SEQ ID NO: 19629 - DNA, 25 bp, Homo sapien
gcctgtctccaggtacggtcactat

SEQ ID NO: 19630 - DNA, 25 bp, Homo sapien
gcctgtctccagctacggtcactat

SEQ ID NO: 19631 - DNA, 25 bp, Homo sapien
gatccggtcataagttaggtccagt

SEQ ID NO: 19632 - DNA, 25 bp, Homo sapien
gatccggtcatatgttaggtccagt

SEQ ID NO: 19633 - DNA, 25 bp, Homo sapien
cgtccaccgaccttgtgttctttcg

SEQ ID NO: 19634 - DNA, 25 bp, Homo sapien
cgtccaccgaccatgtgttctttcg

SEQ ID NO: 19635 - DNA, 25 bp, Homo sapien
acgtcgaccccggttgtccttgtcg

SEQ ID NO: 19636 - DNA, 25 bp, Homo sapien
acgtcgaccccgcttgtccttgtcg

SEQ ID NO: 19637 - DNA, 25 bp, Homo sapien
gagtcactaccactagtttcttcac

SEQ ID NO: 19638 - DNA, 25 bp, Homo sapien
gagtcactaccagtagtttcttcac

SEQ ID NO: 19639 - DNA, 25 bp, Homo sapien
ccacaggtcgaacaagggtttccac

SEQ ID NO: 19640 - DNA, 25 bp, Homo sapien
ccacaggtcgaagaagggtttccac

SEQ ID NO: 19641 - DNA, 25 bp, Homo sapien
ccagagactgtagaaataacaccca

SEQ ID NO: 19642 - DNA, 25 bp, Homo sapien
ccagagactgtacaaataacaccca

SEQ ID NO: 19643 - DNA, 25 bp, Homo sapien
aactaaaggtcatacgtaatgatca

SEQ ID NO: 19644 - DNA, 25 bp, Homo sapien
aactaaaggtcaaacgtaatgatca

SEQ ID NO: 19645 - DNA, 25 bp, Homo sapien
caagatggtgtcaaagacatcaaag

SEQ ID NO: 19646 - DNA, 25 bp, Homo sapien
caagatggtgtctaagacatcaaag

SEQ ID NO: 19647 - DNA, 25 bp, Homo sapien
ctattattcgttggaacactataga

SEQ ID NO: 19648 - DNA, 25 bp, Homo sapien
ctattattcgttcgaacactataga

SEQ ID NO: 19649 - DNA, 25 bp, Homo sapien
agattatatgtcgtccaactatgat

SEQ ID NO: 19650 - DNA, 25 bp, Homo sapien
agattatatgtcctccaactatgat

SEQ ID NO: 19651 - DNA, 25 bp, Homo sapien
gaattctcgtttctcgacgtcttag

SEQ ID NO: 19652 - DNA, 25 bp, Homo sapien
gaattctcgtttgtcgacgtcttag

SEQ ID NO: 19653 - DNA, 25 bp, Homo sapien
ctcttaatatcagtttggtcatttg

SEQ ID NO: 19654 - DNA, 25 bp, Homo sapien
ctcttaatatcactttggtcatttg

SEQ ID NO: 19655 - DNA, 25 bp, Homo sapien
accatgttctctacctctcgtcggt

SEQ ID NO: 19656 - DNA, 25 bp, Homo sapien
accatgttctcttcctctcgtcggt

SEQ ID NO: 19657 - DNA, 25 bp, Homo sapien
acactttctccttctactgtgtgtg

SEQ ID NO: 19658 - DNA, 25 bp, Homo sapien
acactttctcctactactgtgtgtg

SEQ ID NO: 19659 - DNA, 25 bp, Homo sapien
ccgatcgtctgtacctcttgtggtg

SEQ ID NO: 19660 - DNA, 25 bp, Homo sapien
ccgatcgtctgttcctcttgtggtg

SEQ ID NO: 19661 - DNA, 25 bp, Homo sapien
acacttctgtgtttacttgctcgcg

SEQ ID NO: 19662 - DNA, 25 bp, Homo sapien
acacttctgtgtatacttgctcgcg

SEQ ID NO: 19663 - DNA, 25 bp, Homo sapien
tactgtttcgagacacttgacctgt

SEQ ID NO: 19664 - DNA, 25 bp, Homo sapien
tactgtttcgagtcacttgacctgt

SEQ ID NO: 19665 - DNA, 25 bp, Homo sapien
aacggtcaacgtcgttattaggccg

SEQ ID NO: 19666 - DNA, 25 bp, Homo sapien
aacggtcaacgtggttattaggccg

SEQ ID NO: 19667 - DNA, 25 bp, Homo sapien
ttcagacaagaccgccgtaacaccc

SEQ ID NO: 19668 - DNA, 25 bp, Homo sapien
ttcagacaagacggccgtaacaccc

SEQ ID NO: 19669 - DNA, 25 bp, Homo sapien
ccatcattaatggacgattcagtat

SEQ ID NO: 19670 - DNA, 25 bp, Homo sapien
ccatcattaatgcacgattcagtat

SEQ ID NO: 19671 - DNA, 25 bp, Homo sapien
tatcgattgatatcccgtaacggag

SEQ ID NO: 19672 - DNA, 25 bp, Homo sapien
tatcgattgataacccgtaacggag

SEQ ID NO: 19673 - DNA, 25 bp, Homo sapien
ttatcacagacatccgtactactgg

SEQ ID NO: 19674 - DNA, 25 bp, Homo sapien
ttatcacagacaaccgtactactgg

SEQ ID NO: 19675 - DNA, 25 bp, Homo sapien
ctacaccctttacctgagacgtgtg

SEQ ID NO: 19676 - DNA, 25 bp, Homo sapien
ctacaccctttagctgagacgtgtg

SEQ ID NO: 19677 - DNA, 25 bp, Homo sapien
acgacaccgtctcagttccgaggac

SEQ ID NO: 19678 - DNA, 25 bp, Homo sapien
acgacaccgtctgagttccgaggac

SEQ ID NO: 19679 - DNA, 25 bp, Homo sapien
gagttctcatacttcgtcccacgaa

SEQ ID NO: 19680 - DNA, 25 bp, Homo sapien
gagttctcatacatcgtcccacgaa

SEQ ID NO: 19681 - DNA, 25 bp, Homo sapien
gtgtactgtctcttttaccacctag

SEQ ID NO: 19682 - DNA, 25 bp, Homo sapien
gtgtactgtctcatttaccacctag

SEQ ID NO: 19683 - DNA, 25 bp, Homo sapien
cgtcgtctattcctcttccgagcag

SEQ ID NO: 19684 - DNA, 25 bp, Homo sapien
cgtcgtctattcgtcttccgagcag

SEQ ID NO: 19685 - DNA, 25 bp, Homo sapien
cactgtaacttcaccggtcagagga

SEQ ID NO: 19686 - DNA, 25 bp, Homo sapien
cactgtaacttctccggtcagagga

SEQ ID NO: 19687 - DNA, 25 bp, Homo sapien
atggttctcttggtgtcgaggtgac

SEQ ID NO: 19688 - DNA, 25 bp, Homo sapien
atggttctcttgctgtcgaggtgac

SEQ ID NO: 19689 - DNA, 25 bp, Homo sapien
agcggtcctcatccaccagtcgtgc

SEQ ID NO: 19690 - DNA, 25 bp, Homo sapien
agcggtcctcatgcaccagtcgtgc

SEQ ID NO: 19691 - DNA, 25 bp, Homo sapien
acgtgagccacttccaccggtggtc

SEQ ID NO: 19692 - DNA, 25 bp, Homo sapien
acgtgagccactaccaccggtggtc

SEQ ID NO: 19693 - DNA, 25 bp, Homo sapien
acagagtaccagtaagaagtttctc

SEQ ID NO: 19694 - DNA, 25 bp, Homo sapien
acagagtaccagaaagaagtttctc

SEQ ID NO: 19695 - DNA, 25 bp, Homo sapien
tagtcagtacgtttaaatcgtctcc

SEQ ID NO: 19696 - DNA, 25 bp, Homo sapien
tagtcagtacgtataaatcgtctcc

SEQ ID NO: 19697 - DNA, 25 bp, Homo sapien
cgagtgacgagtactctgtgtgtgt

SEQ ID NO: 19698 - DNA, 25 bp, Homo sapien
cgagtgacgagttctctgtgtgtgt

SEQ ID NO: 19699 - DNA, 25 bp, Homo sapien
ttccggtactcattcatatagtgac

SEQ ID NO: 19700 - DNA, 25 bp, Homo sapien
ttccggtactcaatcatatagtgac

SEQ ID NO: 19701 - DNA, 25 bp, Homo sapien
ttagatatcacgaagaactacgaga

SEQ ID NO: 19702 - DNA, 25 bp, Homo sapien
ttagatatcacgtagaactacgaga

SEQ ID NO: 19703 - DNA, 25 bp, Homo sapien
tcctagtatgtctaagactgtacca

SEQ ID NO: 19704 - DNA, 25 bp, Homo sapien
tcctagtatgtcaaagactgtacca

SEQ ID NO: 19705 - DNA, 25 bp, Homo sapien
ccagaagtagggtcaggtgtcttag

SEQ ID NO: 19706 - DNA, 25 bp, Homo sapien
ccagaagtagggacaggtgtcttag

SEQ ID NO: 19707 - DNA, 25 bp, Homo sapien
caaagtactgtagtgtacttcttta

SEQ ID NO: 19708 - DNA, 25 bp, Homo sapien
caaagtactgtactgtacttcttta

SEQ ID NO: 19709 - DNA, 25 bp, Homo sapien
cgtaaaggtcttcgtgtctttcatc

SEQ ID NO: 19710 - DNA, 25 bp, Homo sapien
cgtaaaggtcttggtgtctttcatc

SEQ ID NO: 19711 - DNA, 25 bp, Homo sapien
ttacaaaagagttcgacatgtttcg

SEQ ID NO: 19712 - DNA, 25 bp, Homo sapien
ttacaaaagagtacgacatgtttcg

SEQ ID NO: 19713 - DNA, 25 bp, Homo sapien
aagagaagaagatcttcgactatcg

SEQ ID NO: 19714 - DNA, 25 bp, Homo sapien
aagagaagaagaacttcgactatcg

SEQ ID NO: 19715 - DNA, 25 bp, Homo sapien
caaatcgaattactacttgactgtg

SEQ ID NO: 19716 - DNA, 25 bp, Homo sapien
caaatcgaattagtacttgactgtg

SEQ ID NO: 19717 - DNA, 25 bp, Homo sapien
accgtgtaatgtctacgagttatgt

SEQ ID NO: 19718 - DNA, 25 bp, Homo sapien
accgtgtaatgtgtacgagttatgt

SEQ ID NO: 19719 - DNA, 25 bp, Homo sapien
agtgtgtcactcaaacgtcactgtg

SEQ ID NO: 19720 - DNA, 25 bp, Homo sapien
agtgtgtcactctaacgtcactgtg

SEQ ID NO: 19721 - DNA, 25 bp, Homo sapien
ggtgtgcactcctacttacacgtac

SEQ ID NO: 19722 - DNA, 25 bp, Homo sapien
ggtgtgcactccaacttacacgtac

SEQ ID NO: 19723 - DNA, 25 bp, Homo sapien
gagaaactactcttaatcgtagaag

SEQ ID NO: 19724 - DNA, 25 bp, Homo sapien
gagaaactactcataatcgtagaag

SEQ ID NO: 19725 - DNA, 25 bp, Homo sapien
gctggacatctcctacacctagaag

SEQ ID NO: 19726 - DNA, 25 bp, Homo sapien
gctggacatctcgtacacctagaag

SEQ ID NO: 19727 - DNA, 25 bp, Homo sapien
gaattgtaaaccacttctagagaga

SEQ ID NO: 19728 - DNA, 25 bp, Homo sapien
gaattgtaaacctcttctagagaga

SEQ ID NO: 19729 - DNA, 25 bp, Homo sapien
tagagtagtctctttcttggtagtc

SEQ ID NO: 19730 - DNA, 25 bp, Homo sapien
tagagtagtctcattcttggtagtc

SEQ ID NO: 19731 - DNA, 25 bp, Homo sapien
atcagtcgtacctttgtgtgtgttt

SEQ ID NO: 19732 - DNA, 25 bp, Homo sapien
atcagtcgtaccattgtgtgtgttt

SEQ ID NO: 19733 - DNA, 25 bp, Homo sapien
atgaataattccttttgtggactac

SEQ ID NO: 19734 - DNA, 25 bp, Homo sapien
atgaataattccatttgtggactac

SEQ ID NO: 19735 - DNA, 25 bp, Homo sapien
aaccgtcccggtttcacggtcgtag

SEQ ID NO: 19736 - DNA, 25 bp, Homo sapien
aaccgtcccggtatcacggtcgtag

SEQ ID NO: 19737 - DNA, 25 bp, Homo sapien
caggtctcccggttacggaacacga

SEQ ID NO: 19738 - DNA, 25 bp, Homo sapien
caggtctcccggatacggaacacga

SEQ ID NO: 19739 - DNA, 25 bp, Homo sapien
ttcgtacgtccacgtccggagcgga

SEQ ID NO: 19740 - DNA, 25 bp, Homo sapien
ttcgtacgtccaggtccggagcgga

SEQ ID NO: 19741 - DNA, 25 bp, Homo sapien
tttgtactttgttcccgactgtaca

SEQ ID NO: 19742 - DNA, 25 bp, Homo sapien
tttgtactttgtacccgactgtaca

SEQ ID NO: 19743 - DNA, 25 bp, Homo sapien
acagtttttcctcgacgtgtacgac

SEQ ID NO: 19744 - DNA, 25 bp, Homo sapien
acagtttttcctggacgtgtacgac

SEQ ID NO: 19745 - DNA, 25 bp, Homo sapien
cggtcatacttttctctgaccgaaa

SEQ ID NO: 19746 - DNA, 25 bp, Homo sapien
cggtcatactttactctgaccgaaa

SEQ ID NO: 19747 - DNA, 25 bp, Homo sapien
ccgtccctttcgacgtgacaactgg

SEQ ID NO: 19748 - DNA, 25 bp, Homo sapien
ccgtccctttcgtcgtgacaactgg

SEQ ID NO: 19749 - DNA, 25 bp, Homo sapien
ttcgtcggtcgtggagacatatccg

SEQ ID NO: 19750 - DNA, 25 bp, Homo sapien
ttcgtcggtcgtcgagacatatccg

SEQ ID NO: 19751 - DNA, 25 bp, Homo sapien
tgcgtcgatgtcgagtcaccgtcga

SEQ ID NO: 19752 - DNA, 25 bp, Homo sapien
tgcgtcgatgtccagtcaccgtcga

SEQ ID NO: 19753 - DNA, 25 bp, Homo sapien
ttcgtacgttcgagttacgtccgat

SEQ ID NO: 19754 - DNA, 25 bp, Homo sapien
ttcgtacgttcgtgttacgtccgat

SEQ ID NO: 19755 - DNA, 25 bp, Homo sapien
ttatctgtcgtgtataccatcgagt

SEQ ID NO: 19756 - DNA, 25 bp, Homo sapien
ttatctgtcgtgaataccatcgagt

SEQ ID NO: 19757 - DNA, 25 bp, Homo sapien
cattaattcggaataacgtactatg

SEQ ID NO: 19758 - DNA, 25 bp, Homo sapien
cattaattcggattaacgtactatg

SEQ ID NO: 19759 - DNA, 25 bp, Homo sapien
tcttaccggtggaaacactcgaccg

SEQ ID NO: 19760 - DNA, 25 bp, Homo sapien
tcttaccggtggtaacactcgaccg

SEQ ID NO: 19761 - DNA, 25 bp, Homo sapien
cattccgaaccgacaccgactaggt

SEQ ID NO: 19762 - DNA, 25 bp, Homo sapien
cattccgaaccgtcaccgactaggt

SEQ ID NO: 19763 - DNA, 25 bp, Homo sapien
caccacgtcggtaggtgggtacccg

SEQ ID NO: 19764 - DNA, 25 bp, Homo sapien
caccacgtcggttggtgggtacccg

SEQ ID NO: 19765 - DNA, 25 bp, Homo sapien
tgactcctacggtggtcagtttctc

SEQ ID NO: 19766 - DNA, 25 bp, Homo sapien
tgactcctacggaggtcagtttctc

SEQ ID NO: 19767 - DNA, 25 bp, Homo sapien
ttgcgacacaggacggtcttacccc

SEQ ID NO: 19768 - DNA, 25 bp, Homo sapien
ttgcgacacaggtcggtcttacccc

SEQ ID NO: 19769 - DNA, 25 bp, Homo sapien
acaccacgaagaggagccagtcctc

SEQ ID NO: 19770 - DNA, 25 bp, Homo sapien
acaccacgaagacgagccagtcctc

SEQ ID NO: 19771 - DNA, 25 bp, Homo sapien
acaacacgaaaggactaacgaccat

SEQ ID NO: 19772 - DNA, 25 bp, Homo sapien
acaacacgaaagcactaacgaccat

SEQ ID NO: 19773 - DNA, 25 bp, Homo sapien
ataactatgaaaaccgagtaccgat

SEQ ID NO: 19774 - DNA, 25 bp, Homo sapien
ataactatgaaatccgagtaccgat

SEQ ID NO: 19775 - DNA, 25 bp, Homo sapien
agatacaacttcaatgtcctaacgg

SEQ ID NO: 19776 - DNA, 25 bp, Homo sapien
agatacaacttctatgtcctaacgg

SEQ ID NO: 19777 - DNA, 25 bp, Homo sapien
agagagtaacgaaaagacaaccaga

SEQ ID NO: 19778 - DNA, 25 bp, Homo sapien
agagagtaacgataagacaaccaga

SEQ ID NO: 19779 - DNA, 25 bp, Homo sapien
gatgtgtaagtacacactgtcccaa

SEQ ID NO: 19780 - DNA, 25 bp, Homo sapien
gatgtgtaagtagacactgtcccaa

SEQ ID NO: 19781 - DNA, 25 bp, Homo sapien
gtacgtcgaatgacttaacgtcaat

SEQ ID NO: 19782 - DNA, 25 bp, Homo sapien
gtacgtcgaatgtcttaacgtcaat

SEQ ID NO: 19783 - DNA, 25 bp, Homo sapien
cgtgaggatgaagtcatactatact

SEQ ID NO: 19784 - DNA, 25 bp, Homo sapien
cgtgaggatgaactcatactatact

SEQ ID NO: 19785 - DNA, 25 bp, Homo sapien
gacgaaacggagatggtcaaccgtc

SEQ ID NO: 19786 - DNA, 25 bp, Homo sapien
gacgaaacggagttggtcaaccgtc

SEQ ID NO: 19787 - DNA, 25 bp, Homo sapien
acaacgactaggaaggtactaatcc

SEQ ID NO: 19788 - DNA, 25 bp, Homo sapien
acaacgactaggtaggtactaatcc

SEQ ID NO: 19789 - DNA, 25 bp, Homo sapien
tcatagcgtcgctaagttaagtata

SEQ ID NO: 19790 - DNA, 25 bp, Homo sapien
tcatagcgtcgcaaagttaagtata

SEQ ID NO: 19791 - DNA, 25 bp, Homo sapien
gtccacagtgacgaccaccagagaa

SEQ ID NO: 19792 - DNA, 25 bp, Homo sapien
gtccacagtgaccaccaccagagaa

SEQ ID NO: 19793 - DNA, 25 bp, Homo sapien
gtaccaaaatagtcaccagacgaat

SEQ ID NO: 19794 - DNA, 25 bp, Homo sapien
gtaccaaaatagacaccagacgaat

SEQ ID NO: 19795 - DNA, 25 bp, Homo sapien
cgggaggagaggtcccgacctccct

SEQ ID NO: 19796 - DNA, 25 bp, Homo sapien
cgggaggagaggacccgacctccct

SEQ ID NO: 19797 - DNA, 25 bp, Homo sapien
ggagggtcccctacactactgtcct

SEQ ID NO: 19798 - DNA, 25 bp, Homo sapien
ggagggtccccttcactactgtcct

SEQ ID NO: 19799 - DNA, 25 bp, Homo sapien
cgacgtgtcgccttagatatatccc

SEQ ID NO: 19800 - DNA, 25 bp, Homo sapien
cgacgtgtcgccatagatatatccc

SEQ ID NO: 19801 - DNA, 25 bp, Homo sapien
tgtccttccactagggtcactgtcg

SEQ ID NO: 19802 - DNA, 25 bp, Homo sapien
tgtccttccacttgggtcactgtcg

SEQ ID NO: 19803 - DNA, 25 bp, Homo sapien
ttgtcgtgtccaaatctttagtgtc

SEQ ID NO: 19804 - DNA, 25 bp, Homo sapien
ttgtcgtgtccatatctttagtgtc

SEQ ID NO: 19805 - DNA, 25 bp, Homo sapien
cgtctcccgatgttacatgtcccgt

SEQ ID NO: 19806 - DNA, 25 bp, Homo sapien
cgtctcccgatgatacatgtcccgt

SEQ ID NO: 19807 - DNA, 25 bp, Homo sapien
tgtgtctacttagagtcatctcctt

SEQ ID NO: 19808 - DNA, 25 bp, Homo sapien
tgtgtctacttacagtcatctcctt

SEQ ID NO: 19809 - DNA, 25 bp, Homo sapien
tggtctcctagatgtcgagtccctt

SEQ ID NO: 19810 - DNA, 25 bp, Homo sapien
tggtctcctagaagtcgagtccctt

SEQ ID NO: 19811 - DNA, 25 bp, Homo sapien
tgagtctttgagaccgtacacactt

SEQ ID NO: 19812 - DNA, 25 bp, Homo sapien
tgagtctttgagtccgtacacactt

SEQ ID NO: 19813 - DNA, 25 bp, Homo sapien
tagtcttttagttcttctagagtac

SEQ ID NO: 19814 - DNA, 25 bp, Homo sapien
tagtcttttagtacttctagagtac

SEQ ID NO: 19815 - DNA, 25 bp, Homo sapien
cgtgagggcttctaatattctatta

SEQ ID NO: 19816 - DNA, 25 bp, Homo sapien
cgtgagggcttcaaatattctatta

SEQ ID NO: 19817 - DNA, 25 bp, Homo sapien
atttgtctctgtgacaattgtatca

SEQ ID NO: 19818 - DNA, 25 bp, Homo sapien
atttgtctctgtcacaattgtatca

SEQ ID NO: 19819 - DNA, 25 bp, Homo sapien
acgatcttagtccagaattcaagat

SEQ ID NO: 19820 - DNA, 25 bp, Homo sapien
acgatcttagtcgagaattcaagat

SEQ ID NO: 19821 - DNA, 25 bp, Homo sapien
ctcaatgtttaatacaagtacaata

SEQ ID NO: 19822 - DNA, 25 bp, Homo sapien
ctcaatgtttaaaacaagtacaata

SEQ ID NO: 19823 - DNA, 25 bp, Homo sapien
tatgtctttaaaacgacgaacaaga

SEQ ID NO: 19824 - DNA, 25 bp, Homo sapien
tatgtctttaaatcgacgaacaaga

SEQ ID NO: 19825 - DNA, 25 bp, Homo sapien
cgaagtctttgacttgtatgactaa

SEQ ID NO: 19826 - DNA, 25 bp, Homo sapien
cgaagtctttgagttgtatgactaa

SEQ ID NO: 19827 - DNA, 25 bp, Homo sapien
cagtttggactcatcttaagtcgaa

SEQ ID NO: 19828 - DNA, 25 bp, Homo sapien
cagtttggactcttcttaagtcgaa

SEQ ID NO: 19829 - DNA, 25 bp, Homo sapien
ggtctccaacatctactaccggtca

SEQ ID NO: 19830 - DNA, 25 bp, Homo sapien
ggtctccaacatgtactaccggtca

SEQ ID NO: 19831 - DNA, 25 bp, Homo sapien
cagtttctcaacttctgtctcggaa

SEQ ID NO: 19832 - DNA, 25 bp, Homo sapien
cagtttctcaacatctgtctcggaa

SEQ ID NO: 19833 - DNA, 25 bp, Homo sapien
gcgttctccaacatggtcttgtgtc

SEQ ID NO: 19834 - DNA, 25 bp, Homo sapien
gcgttctccaacttggtcttgtgtc

SEQ ID NO: 19835 - DNA, 25 bp, Homo sapien
ggtcctatgactatcggttgggtac

SEQ ID NO: 19836 - DNA, 25 bp, Homo sapien
ggtcctatgactttcggttgggtac

SEQ ID NO: 19837 - DNA, 25 bp, Homo sapien
tcgtttgtcgtatgggactgtggtc

SEQ ID NO: 19838 - DNA, 25 bp, Homo sapien
tcgtttgtcgtaagggactgtggtc

SEQ ID NO: 19839 - DNA, 25 bp, Homo sapien
ctgacgtagtactgcctgtcggtcc

SEQ ID NO: 19840 - DNA, 25 bp, Homo sapien
ctgacgtagtacagcctgtcggtcc

SEQ ID NO: 19841 - DNA, 25 bp, Homo sapien
gaaacttgtgtcagaacttcctcta

SEQ ID NO: 19842 - DNA, 25 bp, Homo sapien
gaaacttgtgtctgaacttcctcta

SEQ ID NO: 19843 - DNA, 25 bp, Homo sapien
agaattgttcgaaactcacgttctc

SEQ ID NO: 19844 - DNA, 25 bp, Homo sapien
agaattgttcgatactcacgttctc

SEQ ID NO: 19845 - DNA, 25 bp, Homo sapien
agatcctttgaacactacttacgag

SEQ ID NO: 19846 - DNA, 25 bp, Homo sapien
agatcctttgaagactacttacgag

SEQ ID NO: 19847 - DNA, 25 bp, Homo sapien
ataccgtcatgtacactgaaatatg

SEQ ID NO: 19848 - DNA, 25 bp, Homo sapien
ataccgtcatgttcactgaaatatg

SEQ ID NO: 19849 - DNA, 25 bp, Homo sapien
aataattccatagaccgaagttaag

SEQ ID NO: 19850 - DNA, 25 bp, Homo sapien
aataattccatacaccgaagttaag

SEQ ID NO: 19851 - DNA, 25 bp, Homo sapien
agtgtgtacttacaacaaagtctag

SEQ ID NO: 19852 - DNA, 25 bp, Homo sapien
agtgtgtacttagaacaaagtctag

SEQ ID NO: 19853 - DNA, 25 bp, Homo sapien
cgtccatgtatgacgacatcgagac

SEQ ID NO: 19854 - DNA, 25 bp, Homo sapien
cgtccatgtatgtcgacatcgagac

SEQ ID NO: 19855 - DNA, 25 bp, Homo sapien
ggtctaattaaggttcgttgacacg

SEQ ID NO: 19856 - DNA, 25 bp, Homo sapien
ggtctaattaagcttcgttgacacg

SEQ ID NO: 19857 - DNA, 25 bp, Homo sapien
agtgtcttttctctgtcgctgacta

SEQ ID NO: 19858 - DNA, 25 bp, Homo sapien
agtgtcttttctgtgtcgctgacta

SEQ ID NO: 19859 - DNA, 25 bp, Homo sapien
tctctctacgtatctgtgtcttgga

SEQ ID NO: 19860 - DNA, 25 bp, Homo sapien
tctctctacgtaactgtgtcttgga

SEQ ID NO: 19861 - DNA, 25 bp, Homo sapien
ctttctttcgggttgatctaggagt

SEQ ID NO: 19862 - DNA, 25 bp, Homo sapien
ctttctttcgggatgatctaggagt

SEQ ID NO: 19863 - DNA, 25 bp, Homo sapien
ttcgtcgtggtgagatgttcatgtc

SEQ ID NO: 19864 - DNA, 25 bp, Homo sapien
ttcgtcgtggtgtgatgttcatgtc

SEQ ID NO: 19865 - DNA, 25 bp, Homo sapien
tacagtctcaagtgtcaacagtagt

SEQ ID NO: 19866 - DNA, 25 bp, Homo sapien
tacagtctcaagagtcaacagtagt

SEQ ID NO: 19867 - DNA, 25 bp, Homo sapien
caaccgttccagcagttaatagagt

SEQ ID NO: 19868 - DNA, 25 bp, Homo sapien
caaccgttccaggagttaatagagt

SEQ ID NO: 19869 - DNA, 25 bp, Homo sapien
tcgtatagtgactaattgtattcca

SEQ ID NO: 19870 - DNA, 25 bp, Homo sapien
tcgtatagtgacaaattgtattcca

SEQ ID NO: 19871 - DNA, 25 bp, Homo sapien
ggttctttgtaaatttactcgacaa

SEQ ID NO: 19872 - DNA, 25 bp, Homo sapien
ggttctttgtaattttactcgacaa

SEQ ID NO: 19873 - DNA, 25 bp, Homo sapien
tttgccgtcttttcactgtgaccac

SEQ ID NO: 19874 - DNA, 25 bp, Homo sapien
tttgccgtctttacactgtgaccac

SEQ ID NO: 19875 - DNA, 25 bp, Homo sapien
ccgccgttcttaagatatgtcttac

SEQ ID NO: 19876 - DNA, 25 bp, Homo sapien
ccgccgttcttatgatatgtcttac

SEQ ID NO: 19877 - DNA, 25 bp, Homo sapien
gacttacgtttcgttctaaatcgta

SEQ ID NO: 19878 - DNA, 25 bp, Homo sapien
gacttacgtttccttctaaatcgta

SEQ ID NO: 19879 - DNA, 25 bp, Homo sapien
gaagacttctgagtaccttactgtc

SEQ ID NO: 19880 - DNA, 25 bp, Homo sapien
gaagacttctgactaccttactgtc

SEQ ID NO: 19881 - DNA, 25 bp, Homo sapien
gaaagatatcgttcaacattatccg

SEQ ID NO: 19882 - DNA, 25 bp, Homo sapien
gaaagatatcgtacaacattatccg

SEQ ID NO: 19883 - DNA, 25 bp, Homo sapien
gaaaactatcttctcgtgttagaac

SEQ ID NO: 19884 - DNA, 25 bp, Homo sapien
gaaaactatcttgtcgtgttagaac

SEQ ID NO: 19885 - DNA, 25 bp, Homo sapien
gatacacaggttgtagttgtgacac

SEQ ID NO: 19886 - DNA, 25 bp, Homo sapien
gatacacaggttctagttgtgacac

SEQ ID NO: 19887 - DNA, 25 bp, Homo sapien
tccatagtgatagacacggtggtat

SEQ ID NO: 19888 - DNA, 25 bp, Homo sapien
tccatagtgatacacacggtggtat

SEQ ID NO: 19889 - DNA, 25 bp, Homo sapien
atttcattgacaccacctgtatgtg

SEQ ID NO: 19890 - DNA, 25 bp, Homo sapien
atttcattgacagcacctgtatgtg

SEQ ID NO: 19891 - DNA, 25 bp, Homo sapien
acacaatgtccgttaagtgtctctt

SEQ ID NO: 19892 - DNA, 25 bp, Homo sapien
acacaatgtccgataagtgtctctt

SEQ ID NO: 19893 - DNA, 25 bp, Homo sapien
cacgagcgacccatatacagtttcc

SEQ ID NO: 19894 - DNA, 25 bp, Homo sapien
cacgagcgacccttatacagtttcc

SEQ ID NO: 19895 - DNA, 25 bp, Homo sapien
ggtcgtagaccgatctaagtctttg

SEQ ID NO: 19896 - DNA, 25 bp, Homo sapien
ggtcgtagaccgttctaagtctttg

SEQ ID NO: 19897 - DNA, 25 bp, Homo sapien
gttcacacttcttacatcgtcgttg

SEQ ID NO: 19898 - DNA, 25 bp, Homo sapien
gttcacacttctaacatcgtcgttg

SEQ ID NO: 19899 - DNA, 25 bp, Homo sapien
cagagtcgaccgagtgcccagagac

SEQ ID NO: 19900 - DNA, 25 bp, Homo sapien
cagagtcgaccgtgtgcccagagac

SEQ ID NO: 19901 - DNA, 25 bp, Homo sapien
tctggtgagtcgtatccacactaaa

SEQ ID NO: 19902 - DNA, 25 bp, Homo sapien
tctggtgagtcgaatccacactaaa

SEQ ID NO: 19903 - DNA, 25 bp, Homo sapien
ttcattcggatgtacaacgtagtaa

SEQ ID NO: 19904 - DNA, 25 bp, Homo sapien
ttcattcggatgaacaacgtagtaa

SEQ ID NO: 19905 - DNA, 25 bp, Homo sapien
ttcggtagacacacgaaaaagacat

SEQ ID NO: 19906 - DNA, 25 bp, Homo sapien
ttcggtagacactcgaaaaagacat

SEQ ID NO: 19907 - DNA, 25 bp, Homo sapien
gtcacagaacaggtcacgaatttat

SEQ ID NO: 19908 - DNA, 25 bp, Homo sapien
gtcacagaacagctcacgaatttat

SEQ ID NO: 19909 - DNA, 25 bp, Homo sapien
ggacgaagaaactgaccaacaatgt

SEQ ID NO: 19910 - DNA, 25 bp, Homo sapien
ggacgaagaaacagaccaacaatgt

SEQ ID NO: 19911 - DNA, 25 bp, Homo sapien
ggtagaaggacaaactcgacctggg

SEQ ID NO: 19912 - DNA, 25 bp, Homo sapien
ggtagaaggacatactcgacctggg

SEQ ID NO: 19913 - DNA, 25 bp, Homo sapien
ggtgactccaggtcccgtcggcgac

SEQ ID NO: 19914 - DNA, 25 bp, Homo sapien
ggtgactccaggacccgtcggcgac

SEQ ID NO: 19915 - DNA, 25 bp, Homo sapien
gtgtttactggaaaccacggtgaca

SEQ ID NO: 19916 - DNA, 25 bp, Homo sapien
gtgtttactggataccacggtgaca

SEQ ID NO: 19917 - DNA, 25 bp, Homo sapien
cgtgtccccgaacaacggtcgataa

SEQ ID NO: 19918 - DNA, 25 bp, Homo sapien
cgtgtccccgaagaacggtcgataa

SEQ ID NO: 19919 - DNA, 25 bp, Homo sapien
gccccggacgacaaaggacgtcgac

SEQ ID NO: 19920 - DNA, 25 bp, Homo sapien
gccccggacgactaaggacgtcgac

SEQ ID NO: 19921 - DNA, 25 bp, Homo sapien
aagaccccggcgacttaggtcgcag

SEQ ID NO: 19922 - DNA, 25 bp, Homo sapien
aagaccccggcgtcttaggtcgcag

SEQ ID NO: 19923 - DNA, 25 bp, Homo sapien
ggcgccagcgagatcttcatgagag

SEQ ID NO: 19924 - DNA, 25 bp, Homo sapien
ggcgccagcgagttcttcatgagag

SEQ ID NO: 19925 - DNA, 25 bp, Homo sapien
tttggacagtcctctggtctgcact

SEQ ID NO: 19926 - DNA, 25 bp, Homo sapien
tttggacagtccactggtctgcact

SEQ ID NO: 19927 - DNA, 25 bp, Homo sapien
acacgtagactcgaggcggacggag

SEQ ID NO: 19928 - DNA, 25 bp, Homo sapien
acacgtagactccaggcggacggag

SEQ ID NO: 19929 - DNA, 25 bp, Homo sapien
atcaccgtggtcgtaggtctgacaa

SEQ ID NO: 19930 - DNA, 25 bp, Homo sapien
atcaccgtggtcctaggtctgacaa

SEQ ID NO: 19931 - DNA, 25 bp, Homo sapien
cgtctccagatcctaccgctgtaaa

SEQ ID NO: 19932 - DNA, 25 bp, Homo sapien
cgtctccagatcgtaccgctgtaaa

SEQ ID NO: 19933 - DNA, 25 bp, Homo sapien
aaccagactcttcagatacgccagt

SEQ ID NO: 19934 - DNA, 25 bp, Homo sapien
aaccagactcttgagatacgccagt

SEQ ID NO: 19935 - DNA, 25 bp, Homo sapien
acgaaatatgttttataatcatcta

SEQ ID NO: 19936 - DNA, 25 bp, Homo sapien
acgaaatatgttatataatcatcta

SEQ ID NO: 19937 - DNA, 25 bp, Homo sapien
cagaaattcttagtagacttcaaag

SEQ ID NO: 19938 - DNA, 25 bp, Homo sapien
cagaaattcttactagacttcaaag

SEQ ID NO: 19939 - DNA, 25 bp, Homo sapien
gtccagaagaaactacgcaaaatta

SEQ ID NO: 19940 - DNA, 25 bp, Homo sapien
gtccagaagaaagtacgcaaaatta

SEQ ID NO: 19941 - DNA, 25 bp, Homo sapien
tccaaaaggggaagtcttaactctg

SEQ ID NO: 19942 - DNA, 25 bp, Homo sapien
tccaaaaggggatgtcttaactctg

SEQ ID NO: 19943 - DNA, 25 bp, Homo sapien
cacacaaaggtgtgtgcttcctgtc

SEQ ID NO: 19944 - DNA, 25 bp, Homo sapien
cacacaaaggtgagtgcttcctgtc

SEQ ID NO: 19945 - DNA, 25 bp, Homo sapien
atacaagggagatctcctacattac

SEQ ID NO: 19946 - DNA, 25 bp, Homo sapien
atacaagggagaactcctacattac

SEQ ID NO: 19947 - DNA, 25 bp, Homo sapien
acaaaagagaggaaacccgagttac

SEQ ID NO: 19948 - DNA, 25 bp, Homo sapien
acaaaagagaggtaacccgagttac

SEQ ID NO: 19949 - DNA, 25 bp, Homo sapien
agaaaaagagcgagtcggccgtatc

SEQ ID NO: 19950 - DNA, 25 bp, Homo sapien
agaaaaagagcgtgtcggccgtatc

SEQ ID NO: 19951 - DNA, 25 bp, Homo sapien
aaaaaaggacgttagcggcgtcttc

SEQ ID NO: 19952 - DNA, 25 bp, Homo sapien
aaaaaaggacgtaagcggcgtcttc

SEQ ID NO: 19953 - DNA, 25 bp, Homo sapien
agactttgagaaacgaaccggaacc

SEQ ID NO: 19954 - DNA, 25 bp, Homo sapien
agactttgagaatcgaaccggaacc

SEQ ID NO: 19955 - DNA, 25 bp, Homo sapien
ttagctgtattatagtgcctatatc

SEQ ID NO: 19956 - DNA, 25 bp, Homo sapien
ttagctgtattaaagtgcctatatc

SEQ ID NO: 19957 - DNA, 25 bp, Homo sapien
ggtactgacttctttgtcataagtt

SEQ ID NO: 19958 - DNA, 25 bp, Homo sapien
ggtactgacttcattgtcataagtt

SEQ ID NO: 19959 - DNA, 25 bp, Homo sapien
ccaagtaggggtatggcacgtaaga

SEQ ID NO: 19960 - DNA, 25 bp, Homo sapien
ccaagtaggggtttggcacgtaaga

SEQ ID NO: 19961 - DNA, 25 bp, Homo sapien
acgtgagaaggcttgtggagcatca

SEQ ID NO: 19962 - DNA, 25 bp, Homo sapien
acgtgagaaggcatgtggagcatca

SEQ ID NO: 19963 - DNA, 25 bp, Homo sapien
acagacaaggagtggagccggtcct

SEQ ID NO: 19964 - DNA, 25 bp, Homo sapien
acagacaaggagaggagccggtcct

SEQ ID NO: 19965 - DNA, 25 bp, Homo sapien
ccacagacacagacggggttcaccg

SEQ ID NO: 19966 - DNA, 25 bp, Homo sapien
ccacagacacagtcggggttcaccg

SEQ ID NO: 19967 - DNA, 25 bp, Homo sapien
cacgaagaaggttcggggtcccgac

SEQ ID NO: 19968 - DNA, 25 bp, Homo sapien
cacgaagaaggtacggggtcccgac

SEQ ID NO: 19969 - DNA, 25 bp, Homo sapien
cataagtacggattagaaggttcca

SEQ ID NO: 19970 - DNA, 25 bp, Homo sapien
cataagtacggaatagaaggttcca

SEQ ID NO: 19971 - DNA, 25 bp, Homo sapien
tatttgacgaatgacagatcctaac

SEQ ID NO: 19972 - DNA, 25 bp, Homo sapien
tatttgacgaatcacagatcctaac

SEQ ID NO: 19973 - DNA, 25 bp, Homo sapien
cacgtttgaaatagcatatcagttt

SEQ ID NO: 19974 - DNA, 25 bp, Homo sapien
cacgtttgaaattgcatatcagttt

SEQ ID NO: 19975 - DNA, 25 bp, Homo sapien
atctatacataactcgttcatcgat

SEQ ID NO: 19976 - DNA, 25 bp, Homo sapien
atctatacataagtcgttcatcgat

SEQ ID NO: 19977 - DNA, 25 bp, Homo sapien
gaatttcgaagttgtactctttaca

SEQ ID NO: 19978 - DNA, 25 bp, Homo sapien
gaatttcgaagtagtactctttaca

SEQ ID NO: 19979 - DNA, 25 bp, Homo sapien
aaagactagtaaggatgtttctcac

SEQ ID NO: 19980 - DNA, 25 bp, Homo sapien
aaagactagtaacgatgtttctcac

SEQ ID NO: 19981 - DNA, 25 bp, Homo sapien
gaaagacgtataggaaactttccaa

SEQ ID NO: 19982 - DNA, 25 bp, Homo sapien
gaaagacgtatacgaaactttccaa

SEQ ID NO: 19983 - DNA, 25 bp, Homo sapien
caaagcagtcagacacatgtgataa

SEQ ID NO: 19984 - DNA, 25 bp, Homo sapien
caaagcagtcagtcacatgtgataa

SEQ ID NO: 19985 - DNA, 25 bp, Homo sapien
ggatgagaaacacctatagatacac

SEQ ID NO: 19986 - DNA, 25 bp, Homo sapien
ggatgagaaacagctatagatacac

SEQ ID NO: 19987 - DNA, 25 bp, Homo sapien
atacgtaaagatctagacgtcgtaa

SEQ ID NO: 19988 - DNA, 25 bp, Homo sapien
atacgtaaagatgtagacgtcgtaa

SEQ ID NO: 19989 - DNA, 25 bp, Homo sapien
atcgaaaccgtcagagacacagacg

SEQ ID NO: 19990 - DNA, 25 bp, Homo sapien
atcgaaaccgtctgagacacagacg

SEQ ID NO: 19991 - DNA, 25 bp, Homo sapien
gtaccgacacaccatgaacccgagt

SEQ ID NO: 19992 - DNA, 25 bp, Homo sapien
gtaccgacacacgatgaacccgagt

SEQ ID NO: 19993 - DNA, 25 bp, Homo sapien
gtctctgcactaatcaactaccgag

SEQ ID NO: 19994 - DNA, 25 bp, Homo sapien
gtctctgcactattcaactaccgag

SEQ ID NO: 19995 - DNA, 25 bp, Homo sapien
gttgtcgtcttttactaatactatg

SEQ ID NO: 19996 - DNA, 25 bp, Homo sapien
gttgtcgtctttaactaatactatg

SEQ ID NO: 19997 - DNA, 25 bp, Homo sapien
tcctaatgtctctctctctagttgg

SEQ ID NO: 19998 - DNA, 25 bp, Homo sapien
tcctaatgtctcactctctagttgg

SEQ ID NO: 19999 - DNA, 25 bp, Homo sapien
ttatggtgtatatttaccacttgac

SEQ ID NO: 20000 - DNA, 25 bp, Homo sapien
ttatggtgtataattaccacttgac

SEQ ID NO: 20001 - DNA, 25 bp, Homo sapien
tgtcgatgcgtgacgaccaccggct

SEQ ID NO: 20002 - DNA, 25 bp, Homo sapien
tgtcgatgcgtgtcgaccaccggct

SEQ ID NO: 20003 - DNA, 25 bp, Homo sapien
ttcagagttcggtaccactctagtc

SEQ ID NO: 20004 - DNA, 25 bp, Homo sapien
ttcagagttcggaaccactctagtc

SEQ ID NO: 20005 - DNA, 25 bp, Homo sapien
cacgacgtgtggttactacccacct

SEQ ID NO: 20006 - DNA, 25 bp, Homo sapien
cacgacgtgtggatactacccacct

SEQ ID NO: 20007 - DNA, 25 bp, Homo sapien
gtactctcgacgtagacgcgactcc

SEQ ID NO: 20008 - DNA, 25 bp, Homo sapien
gtactctcgacgaagacgcgactcc

SEQ ID NO: 20009 - DNA, 25 bp, Homo sapien
ggtggtcgagccagaaccggctctc

SEQ ID NO: 20010 - DNA, 25 bp, Homo sapien
ggtggtcgagcctgaaccggctctc

SEQ ID NO: 20011 - DNA, 25 bp, Homo sapien
tggttgggtcggacacagagataac

SEQ ID NO: 20012 - DNA, 25 bp, Homo sapien
tggttgggtcggtcacagagataac

SEQ ID NO: 20013 - DNA, 25 bp, Homo sapien
acaaaggagaggaagagcacgacga

SEQ ID NO: 20014 - DNA, 25 bp, Homo sapien
acaaaggagaggtagagcacgacga

SEQ ID NO: 20015 - DNA, 25 bp, Homo sapien
agtagagtatagtcagatcagtcac

SEQ ID NO: 20016 - DNA, 25 bp, Homo sapien
agtagagtatagacagatcagtcac

SEQ ID NO: 20017 - DNA, 25 bp, Homo sapien
catatggagtattacagattccgtc

SEQ ID NO: 20018 - DNA, 25 bp, Homo sapien
catatggagtataacagattccgtc

SEQ ID NO: 20019 - DNA, 25 bp, Homo sapien
gaatgtcggactacatatatcctac

SEQ ID NO: 20020 - DNA, 25 bp, Homo sapien
gaatgtcggacttcatatatcctac

SEQ ID NO: 20021 - DNA, 25 bp, Homo sapien
gtgtagtggagtgtcataaatgtat

SEQ ID NO: 20022 - DNA, 25 bp, Homo sapien
gtgtagtggagtctcataaatgtat

SEQ ID NO: 20023 - DNA, 25 bp, Homo sapien
atggtgaaactgatctctccatgta

SEQ ID NO: 20024 - DNA, 25 bp, Homo sapien
atggtgaaactgttctctccatgta

SEQ ID NO: 20025 - DNA, 25 bp, Homo sapien
ggtttcagaactatcgttcgcaata

SEQ ID NO: 20026 - DNA, 25 bp, Homo sapien
ggtttcagaactttcgttcgcaata

SEQ ID NO: 20027 - DNA, 25 bp, Homo sapien
gtcttgtaatctttcttcgacaacc

SEQ ID NO: 20028 - DNA, 25 bp, Homo sapien
gtcttgtaatctatcttcgacaacc

SEQ ID NO: 20029 - DNA, 25 bp, Homo sapien
catattacgaacaaactccgaggcc

SEQ ID NO: 20030 - DNA, 25 bp, Homo sapien
catattacgaactaactccgaggcc

SEQ ID NO: 20031 - DNA, 25 bp, Homo sapien
gacgaaagaatgttacttttgtacc

SEQ ID NO: 20032 - DNA, 25 bp, Homo sapien
gacgaaagaatgatacttttgtacc

SEQ ID NO: 20033 - DNA, 25 bp, Homo sapien
gacgaagtacacatgatgttttatc

SEQ ID NO: 20034 - DNA, 25 bp, Homo sapien
gacgaagtacacttgatgttttatc

SEQ ID NO: 20035 - DNA, 25 bp, Homo sapien
ccaaatctttagtgtcgtcgtcttc

SEQ ID NO: 20036 - DNA, 25 bp, Homo sapien
ccaaatctttagagtcgtcgtcttc

SEQ ID NO: 20037 - DNA, 25 bp, Homo sapien
catagtgatattttgggtctccttt

SEQ ID NO: 20038 - DNA, 25 bp, Homo sapien
catagtgatattatgggtctccttt

SEQ ID NO: 20039 - DNA, 25 bp, Homo sapien
atcgtttccactgtatacttctatt

SEQ ID NO: 20040 - DNA, 25 bp, Homo sapien
atcgtttccactctatacttctatt

SEQ ID NO: 20041 - DNA, 25 bp, Homo sapien
tccctgtgcggtggttacttcagta

SEQ ID NO: 20042 - DNA, 25 bp, Homo sapien
tccctgtgcggtcgttacttcagta

SEQ ID NO: 20043 - DNA, 25 bp, Homo sapien
ctcccctgggtaaggacggtcagac

SEQ ID NO: 20044 - DNA, 25 bp, Homo sapien
ctcccctgggtatggacggtcagac

SEQ ID NO: 20045 - DNA, 25 bp, Homo sapien
acgtccggtgtaggagtacggacca

SEQ ID NO: 20046 - DNA, 25 bp, Homo sapien
acgtccggtgtacgagtacggacca

SEQ ID NO: 20047 - DNA, 25 bp, Homo sapien
tcgtgtgcacactgaacgtagacca

SEQ ID NO: 20048 - DNA, 25 bp, Homo sapien
tcgtgtgcacacagaacgtagacca

SEQ ID NO: 20049 - DNA, 25 bp, Homo sapien
gggaagtacacgaagacgtacctcc

SEQ ID NO: 20050 - DNA, 25 bp, Homo sapien
gggaagtacacgtagacgtacctcc

SEQ ID NO: 20051 - DNA, 25 bp, Homo sapien
gtagaggtgtagaaacacctattgc

SEQ ID NO: 20052 - DNA, 25 bp, Homo sapien
gtagaggtgtagtaacacctattgc

SEQ ID NO: 20053 - DNA, 25 bp, Homo sapien
cttgttagtcgattccttcagtcga

SEQ ID NO: 20054 - DNA, 25 bp, Homo sapien
cttgttagtcgaatccttcagtcga

SEQ ID NO: 20055 - DNA, 25 bp, Homo sapien
tttcagtcgacaccactgaccgtca

SEQ ID NO: 20056 - DNA, 25 bp, Homo sapien
tttcagtcgacagcactgaccgtca

SEQ ID NO: 20057 - DNA, 25 bp, Homo sapien
tctagatctccgtgctagagagtga

SEQ ID NO: 20058 - DNA, 25 bp, Homo sapien
tctagatctccgagctagagagtga

SEQ ID NO: 20059 - DNA, 25 bp, Homo sapien
tctggtgtccgagttgtatactgtt

SEQ ID NO: 20060 - DNA, 25 bp, Homo sapien
tctggtgtccgacttgtatactgtt

SEQ ID NO: 20061 - DNA, 25 bp, Homo sapien
ttttgatcctgacttgtaacgttat

SEQ ID NO: 20062 - DNA, 25 bp, Homo sapien
ttttgatcctgagttgtaacgttat

SEQ ID NO: 20063 - DNA, 25 bp, Homo sapien
acattcacattcgtttagtacatca

SEQ ID NO: 20064 - DNA, 25 bp, Homo sapien
acattcacattcctttagtacatca

SEQ ID NO: 20065 - DNA, 25 bp, Homo sapien
aatgtactgctttacttcggttcag

SEQ ID NO: 20066 - DNA, 25 bp, Homo sapien
aatgtactgcttaacttcggttcag

SEQ ID NO: 20067 - DNA, 25 bp, Homo sapien
tggactgtagatttgtacggttata

SEQ ID NO: 20068 - DNA, 25 bp, Homo sapien
tggactgtagatatgtacggttata

SEQ ID NO: 20069 - DNA, 25 bp, Homo sapien
ggaacgacgagtagtcgtaggtcca

SEQ ID NO: 20070 - DNA, 25 bp, Homo sapien
ggaacgacgagttgtcgtaggtcca

SEQ ID NO: 20071 - DNA, 25 bp, Homo sapien
cttagtaagtgacgagtctctgact

SEQ ID NO: 20072 - DNA, 25 bp, Homo sapien
cttagtaagtgaggagtctctgact

SEQ ID NO: 20073 - DNA, 25 bp, Homo sapien
cgttacgtctgtaggaacgatttga

SEQ ID NO: 20074 - DNA, 25 bp, Homo sapien
cgttacgtctgttggaacgatttga

SEQ ID NO: 20075 - DNA, 25 bp, Homo sapien
gccccatgtgtacctgaacccttga

SEQ ID NO: 20076 - DNA, 25 bp, Homo sapien
gccccatgtgtagctgaacccttga

SEQ ID NO: 20077 - DNA, 25 bp, Homo sapien
gccgaggtggcgtctaccgcctagc

SEQ ID NO: 20078 - DNA, 25 bp, Homo sapien
gccgaggtggcgactaccgcctagc

SEQ ID NO: 20079 - DNA, 25 bp, Homo sapien
gtcagtggtacatgaacaacaccaa

SEQ ID NO: 20080 - DNA, 25 bp, Homo sapien
gtcagtggtacaagaacaacaccaa

SEQ ID NO: 20081 - DNA, 25 bp, Homo sapien
tatgggggtttgtatccccgtatac

SEQ ID NO: 20082 - DNA, 25 bp, Homo sapien
tatgggggtttgaatccccgtatac

SEQ ID NO: 20083 - DNA, 25 bp, Homo sapien
cgacgatgtccttcctccgaggaac

SEQ ID NO: 20084 - DNA, 25 bp, Homo sapien
cgacgatgtcctacctccgaggaac

SEQ ID NO: 20085 - DNA, 25 bp, Homo sapien
tcagtcggactcgcccacgcggaca

SEQ ID NO: 20086 - DNA, 25 bp, Homo sapien
tcagtcggactcccccacgcggaca

SEQ ID NO: 20087 - DNA, 25 bp, Homo sapien
actcgagactccttcgaacggaaga

SEQ ID NO: 20088 - DNA, 25 bp, Homo sapien
actcgagactccatcgaacggaaga

SEQ ID NO: 20089 - DNA, 25 bp, Homo sapien
aagacacgtaacttcatcggaacgg

SEQ ID NO: 20090 - DNA, 25 bp, Homo sapien
aagacacgtaacatcatcggaacgg

SEQ ID NO: 20091 - DNA, 25 bp, Homo sapien
gacaagtgaccaaataactctaagc

SEQ ID NO: 20092 - DNA, 25 bp, Homo sapien
gacaagtgaccatataactctaagc

SEQ ID NO: 20093 - DNA, 25 bp, Homo sapien
gaagaaacgcgaaaccttctaagta

SEQ ID NO: 20094 - DNA, 25 bp, Homo sapien
gaagaaacgcgataccttctaagta

SEQ ID NO: 20095 - DNA, 25 bp, Homo sapien
gaaaatcgtgtcacatatgtacgaa

SEQ ID NO: 20096 - DNA, 25 bp, Homo sapien
gaaaatcgtgtctcatatgtacgaa

SEQ ID NO: 20097 - DNA, 25 bp, Homo sapien
aacacgttcttagtgatattacgaa

SEQ ID NO: 20098 - DNA, 25 bp, Homo sapien
aacacgttcttactgatattacgaa

SEQ ID NO: 20099 - DNA, 25 bp, Homo sapien
aggaactctttttcgtaattgaatc

SEQ ID NO: 20100 - DNA, 25 bp, Homo sapien
aggaactcttttacgtaattgaatc

SEQ ID NO: 20101 - DNA, 25 bp, Homo sapien
gaccccttcttcgtcggtggaatct

SEQ ID NO: 20102 - DNA, 25 bp, Homo sapien
gaccccttcttcctcggtggaatct

SEQ ID NO: 20103 - DNA, 25 bp, Homo sapien
agcacggggtcacgtcgggtcaccc

SEQ ID NO: 20104 - DNA, 25 bp, Homo sapien
agcacggggtcaggtcgggtcaccc

SEQ ID NO: 20105 - DNA, 25 bp, Homo sapien
ccaggaacagacgtgggagctgttc

SEQ ID NO: 20106 - DNA, 25 bp, Homo sapien
ccaggaacagacctgggagctgttc

SEQ ID NO: 20107 - DNA, 25 bp, Homo sapien
caggaagacaaggtgggatctgtcc

SEQ ID NO: 20108 - DNA, 25 bp, Homo sapien
caggaagacaagctgggatctgtcc

SEQ ID NO: 20109 - DNA, 25 bp, Homo sapien
aggagattcaaagaggatctcttac

SEQ ID NO: 20110 - DNA, 25 bp, Homo sapien
aggagattcaaacaggatctcttac

SEQ ID NO: 20111 - DNA, 25 bp, Homo sapien
agggttgtcgaacacaggaaccctc

SEQ ID NO: 20112 - DNA, 25 bp, Homo sapien
agggttgtcgaagacaggaaccctc

SEQ ID NO: 20113 - DNA, 25 bp, Homo sapien
ggattccgaaaggagaacgtttctt

SEQ ID NO: 20114 - DNA, 25 bp, Homo sapien
ggattccgaaagcagaacgtttctt

SEQ ID NO: 20115 - DNA, 25 bp, Homo sapien
gggtagatcaacacaaactttatac

SEQ ID NO: 20116 - DNA, 25 bp, Homo sapien
gggtagatcaactcaaactttatac

SEQ ID NO: 20117 - DNA, 25 bp, Homo sapien
agtcgtgatccctctttcgggacgg

SEQ ID NO: 20118 - DNA, 25 bp, Homo sapien
agtcgtgatcccactttcgggacgg

SEQ ID NO: 20119 - DNA, 25 bp, Homo sapien
cgaataaatccctacctttgaagag

SEQ ID NO: 20120 - DNA, 25 bp, Homo sapien
cgaataaatcccaacctttgaagag

SEQ ID NO: 20121 - DNA, 25 bp, Homo sapien
tttaatcatcgacgtttcagttaag

SEQ ID NO: 20122 - DNA, 25 bp, Homo sapien
tttaatcatcgaggtttcagttaag

SEQ ID NO: 20123 - DNA, 25 bp, Homo sapien
ccttttgttgtgtattctatgacac

SEQ ID NO: 20124 - DNA, 25 bp, Homo sapien
ccttttgttgtgaattctatgacac

SEQ ID NO: 20125 - DNA, 25 bp, Homo sapien
tcttgtggtagctaggtcagagcct

SEQ ID NO: 20126 - DNA, 25 bp, Homo sapien
tcttgtggtagcaaggtcagagcct

SEQ ID NO: 20127 - DNA, 25 bp, Homo sapien
ctctgggaagaagtactgtctcact

SEQ ID NO: 20128 - DNA, 25 bp, Homo sapien
ctctgggaagaactactgtctcact

SEQ ID NO: 20129 - DNA, 25 bp, Homo sapien
gtccaccacagtggactcatgtaag

SEQ ID NO: 20130 - DNA, 25 bp, Homo sapien
gtccaccacagtcgactcatgtaag

SEQ ID NO: 20131 - DNA, 25 bp, Homo sapien
tccgatcacacccgctcagagtaga

SEQ ID NO: 20132 - DNA, 25 bp, Homo sapien
tccgatcacaccggctcagagtaga

SEQ ID NO: 20133 - DNA, 25 bp, Homo sapien
gattagacggtcaaatcgcaaaagg

SEQ ID NO: 20134 - DNA, 25 bp, Homo sapien
gattagacggtctaatcgcaaaagg

SEQ ID NO: 20135 - DNA, 25 bp, Homo sapien
cgtcaaattctctgggccagagaga

SEQ ID NO: 20136 - DNA, 25 bp, Homo sapien
cgtcaaattctcagggccagagaga

SEQ ID NO: 20137 - DNA, 25 bp, Homo sapien
ggaggaagtgaacgagaacaaccag

SEQ ID NO: 20138 - DNA, 25 bp, Homo sapien
ggaggaagtgaaggagaacaaccag

SEQ ID NO: 20139 - DNA, 25 bp, Homo sapien
acgaagagagagacctgaagagcca

SEQ ID NO: 20140 - DNA, 25 bp, Homo sapien
acgaagagagagtcctgaagagcca

SEQ ID NO: 20141 - DNA, 25 bp, Homo sapien
ccctcgacggctgctgaagaagaac

SEQ ID NO: 20142 - DNA, 25 bp, Homo sapien
ccctcgacggctcctgaagaagaac

SEQ ID NO: 20143 - DNA, 25 bp, Homo sapien
caactcggggtttcggaacatagaa

SEQ ID NO: 20144 - DNA, 25 bp, Homo sapien
caactcggggttacggaacatagaa

SEQ ID NO: 20145 - DNA, 25 bp, Homo sapien
atagcgagagatgacgaacccaagg

SEQ ID NO: 20146 - DNA, 25 bp, Homo sapien
atagcgagagatcacgaacccaagg

SEQ ID NO: 20147 - DNA, 25 bp, Homo sapien
gacccgaaaggaggatctcccggag

SEQ ID NO: 20148 - DNA, 25 bp, Homo sapien
gacccgaaaggacgatctcccggag

SEQ ID NO: 20149 - DNA, 25 bp, Homo sapien
caccttgaaaggtaggttactttga

SEQ ID NO: 20150 - DNA, 25 bp, Homo sapien
caccttgaaaggaaggttactttga

SEQ ID NO: 20151 - DNA, 25 bp, Homo sapien
agtcttagcaaatactgtactacga

SEQ ID NO: 20152 - DNA, 25 bp, Homo sapien
agtcttagcaaaaactgtactacga

SEQ ID NO: 20153 - DNA, 25 bp, Homo sapien
gatcatagtcacaacataaatcgtt

SEQ ID NO: 20154 - DNA, 25 bp, Homo sapien
gatcatagtcactacataaatcgtt

SEQ ID NO: 20155 - DNA, 25 bp, Homo sapien
gactgggtaccgacttaataggtct

SEQ ID NO: 20156 - DNA, 25 bp, Homo sapien
gactgggtaccgtcttaataggtct

SEQ ID NO: 20157 - DNA, 25 bp, Homo sapien
actacggggccctggacacacggac

SEQ ID NO: 20158 - DNA, 25 bp, Homo sapien
actacggggcccaggacacacggac

SEQ ID NO: 20159 - DNA, 25 bp, Homo sapien
gacggggtctacacaccactcgtgt

SEQ ID NO: 20160 - DNA, 25 bp, Homo sapien
gacggggtctactcaccactcgtgt

SEQ ID NO: 20161 - DNA, 25 bp, Homo sapien
cacgtgattacagtgtcacagtctg

SEQ ID NO: 20162 - DNA, 25 bp, Homo sapien
cacgtgattacactgtcacagtctg

SEQ ID NO: 20163 - DNA, 25 bp, Homo sapien
ccgacccgtcaatgtctggactcag

SEQ ID NO: 20164 - DNA, 25 bp, Homo sapien
ccgacccgtcaaagtctggactcag

SEQ ID NO: 20165 - DNA, 25 bp, Homo sapien
ttcccgtccgtaaaagcggggtctt

SEQ ID NO: 20166 - DNA, 25 bp, Homo sapien
ttcccgtccgtataagcggggtctt

SEQ ID NO: 20167 - DNA, 25 bp, Homo sapien
ctccggtgcttctcgaagggtctgt

SEQ ID NO: 20168 - DNA, 25 bp, Homo sapien
ctccggtgcttcacgaagggtctgt

SEQ ID NO: 20169 - DNA, 25 bp, Homo sapien
actttttcctttgacgaaggtttat

SEQ ID NO: 20170 - DNA, 25 bp, Homo sapien
actttttcctttcacgaaggtttat

SEQ ID NO: 20171 - DNA, 25 bp, Homo sapien
tctttatctttgagtcgaccactta

SEQ ID NO: 20172 - DNA, 25 bp, Homo sapien
tctttatctttgtgtcgaccactta

SEQ ID NO: 20173 - DNA, 25 bp, Homo sapien
tcttcgcgtgggtccagtctatcga

SEQ ID NO: 20174 - DNA, 25 bp, Homo sapien
tcttcgcgtgggaccagtctatcga

SEQ ID NO: 20175 - DNA, 25 bp, Homo sapien
agactcccatcaccaaaatggtcgt

SEQ ID NO: 20176 - DNA, 25 bp, Homo sapien
agactcccatcagcaaaatggtcgt

SEQ ID NO: 20177 - DNA, 25 bp, Homo sapien
cccccagggacaggagtgtctaacg

SEQ ID NO: 20178 - DNA, 25 bp, Homo sapien
cccccagggacacgagtgtctaacg

SEQ ID NO: 20179 - DNA, 25 bp, Homo sapien
gttctgacgggacaggagtgcctct

SEQ ID NO: 20180 - DNA, 25 bp, Homo sapien
gttctgacgggagaggagtgcctct

SEQ ID NO: 20181 - DNA, 25 bp, Homo sapien
gcctcaatcgacgagacagttccag

SEQ ID NO: 20182 - DNA, 25 bp, Homo sapien
gcctcaatcgaccagacagttccag

SEQ ID NO: 20183 - DNA, 25 bp, Homo sapien
tcagtgaaagacgtggtgttacacc

SEQ ID NO: 20184 - DNA, 25 bp, Homo sapien
tcagtgaaagacctggtgttacacc

SEQ ID NO: 20185 - DNA, 25 bp, Homo sapien
caccggaagaactagaaccgcgcga

SEQ ID NO: 20186 - DNA, 25 bp, Homo sapien
caccggaagaacaagaaccgcgcga

SEQ ID NO: 20187 - DNA, 25 bp, Homo sapien
caggaaaaagatgacgaccgttcac

SEQ ID NO: 20188 - DNA, 25 bp, Homo sapien
caggaaaaagatcacgaccgttcac

SEQ ID NO: 20189 - DNA, 25 bp, Homo sapien
cagcgagatcttcatgagagctcaa

SEQ ID NO: 20190 - DNA, 25 bp, Homo sapien
cagcgagatcttgatgagagctcaa

SEQ ID NO: 20191 - DNA, 25 bp, Homo sapien
gctagtgaatttatgttgacaccac

SEQ ID NO: 20192 - DNA, 25 bp, Homo sapien
gctagtgaatttttgttgacaccac

SEQ ID NO: 20193 - DNA, 25 bp, Homo sapien
gatctcgggttttcttccttacccc

SEQ ID NO: 20194 - DNA, 25 bp, Homo sapien
gatctcgggtttacttccttacccc

SEQ ID NO: 20195 - DNA, 25 bp, Homo sapien
gtgagatatgactctacttactccc

SEQ ID NO: 20196 - DNA, 25 bp, Homo sapien
gtgagatatgacactacttactccc

SEQ ID NO: 20197 - DNA, 25 bp, Homo sapien
ttcgggttcgacgactcgttcaccc

SEQ ID NO: 20198 - DNA, 25 bp, Homo sapien
ttcgggttcgaccactcgttcaccc

SEQ ID NO: 20199 - DNA, 25 bp, Homo sapien
cgttcgttcgttactacttgacaca

SEQ ID NO: 20200 - DNA, 25 bp, Homo sapien
cgttcgttcgtttctacttgacaca

SEQ ID NO: 20201 - DNA, 25 bp, Homo sapien
attttctctctcttctctttcatac

SEQ ID NO: 20202 - DNA, 25 bp, Homo sapien
attttctctctcatctctttcatac

SEQ ID NO: 20203 - DNA, 25 bp, Homo sapien
gacagtgtgtcttactttctaactt

SEQ ID NO: 20204 - DNA, 25 bp, Homo sapien
gacagtgtgtctaactttctaactt

SEQ ID NO: 20205 - DNA, 25 bp, Homo sapien
tcggagtcttacctcgtgtctccct

SEQ ID NO: 20206 - DNA, 25 bp, Homo sapien
tcggagtcttacgtcgtgtctccct

SEQ ID NO: 20207 - DNA, 25 bp, Homo sapien
tctacacgtacttggtgacacccct

SEQ ID NO: 20208 - DNA, 25 bp, Homo sapien
tctacacgtactaggtgacacccct

SEQ ID NO: 20209 - DNA, 25 bp, Homo sapien
tgcacagtggagttgacttcgtctt

SEQ ID NO: 20210 - DNA, 25 bp, Homo sapien
tgcacagtggagatgacttcgtctt

SEQ ID NO: 20211 - DNA, 25 bp, Homo sapien
ccgtgaccgggatcggtccactcat

SEQ ID NO: 20212 - DNA, 25 bp, Homo sapien
ccgtgaccgggaacggtccactcat

SEQ ID NO: 20213 - DNA, 25 bp, Homo sapien
tggctgactctggaccggaacctga

SEQ ID NO: 20214 - DNA, 25 bp, Homo sapien
tggctgactctgcaccggaacctga

SEQ ID NO: 20215 - DNA, 25 bp, Homo sapien
ataagttattctacacagaaatgtt

SEQ ID NO: 20216 - DNA, 25 bp, Homo sapien
ataagttattcttcacagaaatgtt

SEQ ID NO: 20217 - DNA, 25 bp, Homo sapien
tccgagacctgacctcaaaaagtac

SEQ ID NO: 20218 - DNA, 25 bp, Homo sapien
tccgagacctgagctcaaaaagtac

SEQ ID NO: 20219 - DNA, 25 bp, Homo sapien
taccgacactgccagaacgcgaacc

SEQ ID NO: 20220 - DNA, 25 bp, Homo sapien
taccgacactgcgagaacgcgaacc

SEQ ID NO: 20221 - DNA, 25 bp, Homo sapien
agggacttcctaaggtgtcgtaacc

SEQ ID NO: 20222 - DNA, 25 bp, Homo sapien
agggacttcctatggtgtcgtaacc

SEQ ID NO: 20223 - DNA, 25 bp, Homo sapien
agaggaataccagagacgattatac

SEQ ID NO: 20224 - DNA, 25 bp, Homo sapien
agaggaataccacagacgattatac

SEQ ID NO: 20225 - DNA, 25 bp, Homo sapien
aggctcggcggaaccgacagaacat

SEQ ID NO: 20226 - DNA, 25 bp, Homo sapien
aggctcggcggatccgacagaacat

SEQ ID NO: 20227 - DNA, 25 bp, Homo sapien
gagacctcggggtgtacacaaccgc

SEQ ID NO: 20228 - DNA, 25 bp, Homo sapien
gagacctcggggagtacacaaccgc

SEQ ID NO: 20229 - DNA, 25 bp, Homo sapien
agctactggagctacggtaacaccg

SEQ ID NO: 20230 - DNA, 25 bp, Homo sapien
agctactggagcaacggtaacaccg

SEQ ID NO: 20231 - DNA, 25 bp, Homo sapien
tgacacgacgaggaccaaaacagag

SEQ ID NO: 20232 - DNA, 25 bp, Homo sapien
tgacacgacgagcaccaaaacagag

SEQ ID NO: 20233 - DNA, 25 bp, Homo sapien
gtaccgacgacaaccatgaccgaga

SEQ ID NO: 20234 - DNA, 25 bp, Homo sapien
gtaccgacgacatccatgaccgaga

SEQ ID NO: 20235 - DNA, 25 bp, Homo sapien
tatacatctttctacgtcgtaagag

SEQ ID NO: 20236 - DNA, 25 bp, Homo sapien
tatacatctttcaacgtcgtaagag

SEQ ID NO: 20237 - DNA, 25 bp, Homo sapien
cgtgctcgtgcgaagggttcgaacc

SEQ ID NO: 20238 - DNA, 25 bp, Homo sapien
cgtgctcgtgcgtagggttcgaacc

SEQ ID NO: 20239 - DNA, 25 bp, Homo sapien
gggccctgtccaagaacttcaaccg

SEQ ID NO: 20240 - DNA, 25 bp, Homo sapien
gggccctgtccatgaacttcaaccg

SEQ ID NO: 20241 - DNA, 25 bp, Homo sapien
tgcctccatcctgtgcctgaaacgt

SEQ ID NO: 20242 - DNA, 25 bp, Homo sapien
tgcctccatcctctgcctgaaacgt

SEQ ID NO: 20243 - DNA, 25 bp, Homo sapien
tccaaagagccgaccactatagtat

SEQ ID NO: 20244 - DNA, 25 bp, Homo sapien
tccaaagagccgtccactatagtat

SEQ ID NO: 20245 - DNA, 25 bp, Homo sapien
cacactaagagtaccgccttcctgt

SEQ ID NO: 20246 - DNA, 25 bp, Homo sapien
cacactaagagttccgccttcctgt

SEQ ID NO: 20247 - DNA, 25 bp, Homo sapien
ccgttacccgtctcacactggtagg

SEQ ID NO: 20248 - DNA, 25 bp, Homo sapien
ccgttacccgtcacacactggtagg

SEQ ID NO: 20249 - DNA, 25 bp, Homo sapien
acgtcccttgtactcgagttagtga

SEQ ID NO: 20250 - DNA, 25 bp, Homo sapien
acgtcccttgtagtcgagttagtga

SEQ ID NO: 20251 - DNA, 25 bp, Homo sapien
tcgtcgttcttcataaggttacaga

SEQ ID NO: 20252 - DNA, 25 bp, Homo sapien
tcgtcgttcttcttaaggttacaga

SEQ ID NO: 20253 - DNA, 25 bp, Homo sapien
gggtactcctgttttacggttttca

SEQ ID NO: 20254 - DNA, 25 bp, Homo sapien
gggtactcctgtattacggttttca

SEQ ID NO: 20255 - DNA, 25 bp, Homo sapien
gattcactgtcatacggtgatatta

SEQ ID NO: 20256 - DNA, 25 bp, Homo sapien
gattcactgtcaaacggtgatatta

SEQ ID NO: 20257 - DNA, 25 bp, Homo sapien
aagttccccggttaatttgtcgttt

SEQ ID NO: 20258 - DNA, 25 bp, Homo sapien
aagttccccggtaaatttgtcgttt

SEQ ID NO: 20259 - DNA, 25 bp, Homo sapien
gccgacgacttcctgtaggtctctt

SEQ ID NO: 20260 - DNA, 25 bp, Homo sapien
gccgacgacttcgtgtaggtctctt

SEQ ID NO: 20261 - DNA, 25 bp, Homo sapien
ctagacgatcgatgtgtaatcctgt

SEQ ID NO: 20262 - DNA, 25 bp, Homo sapien
ctagacgatcgaagtgtaatcctgt

SEQ ID NO: 20263 - DNA, 25 bp, Homo sapien
ccccgttatgactctactcttgtcg

SEQ ID NO: 20264 - DNA, 25 bp, Homo sapien
ccccgttatgacactactcttgtcg

SEQ ID NO: 20265 - DNA, 25 bp, Homo sapien
gacctttaccagatacgtgtgacga

SEQ ID NO: 20266 - DNA, 25 bp, Homo sapien
gacctttaccagttacgtgtgacga

SEQ ID NO: 20267 - DNA, 25 bp, Homo sapien
gtaccggtcgtaaagtctgtgggat

SEQ ID NO: 20268 - DNA, 25 bp, Homo sapien
gtaccggtcgtatagtctgtgggat

SEQ ID NO: 20269 - DNA, 25 bp, Homo sapien
acccgtgacataggtgtctttacgt

SEQ ID NO: 20270 - DNA, 25 bp, Homo sapien
acccgtgacatacgtgtctttacgt

SEQ ID NO: 20271 - DNA, 25 bp, Homo sapien
actacgacaccagtcttccttacgg

SEQ ID NO: 20272 - DNA, 25 bp, Homo sapien
actacgacaccactcttccttacgg

SEQ ID NO: 20273 - DNA, 25 bp, Homo sapien
gagaactctcgactgtcaccttcga

SEQ ID NO: 20274 - DNA, 25 bp, Homo sapien
gagaactctcgagtgtcaccttcga

SEQ ID NO: 20275 - DNA, 25 bp, Homo sapien
agtcaggaaactcaaggggtttcac

SEQ ID NO: 20276 - DNA, 25 bp, Homo sapien
agtcaggaaactgaaggggtttcac

SEQ ID NO: 20277 - DNA, 25 bp, Homo sapien
cagagattaacgaaactgacaacca

SEQ ID NO: 20278 - DNA, 25 bp, Homo sapien
cagagattaacgtaactgacaacca

SEQ ID NO: 20279 - DNA, 25 bp, Homo sapien
aacctaattgtccaactaatgatta

SEQ ID NO: 20280 - DNA, 25 bp, Homo sapien
aacctaattgtcgaactaatgatta

SEQ ID NO: 20281 - DNA, 25 bp, Homo sapien
acagaattttcacagtaagtcgaaa

SEQ ID NO: 20282 - DNA, 25 bp, Homo sapien
acagaattttcagagtaagtcgaaa

SEQ ID NO: 20283 - DNA, 25 bp, Homo sapien
tagtttgcttctgaacgacgataga

SEQ ID NO: 20284 - DNA, 25 bp, Homo sapien
tagtttgcttctcaacgacgataga

SEQ ID NO: 20285 - DNA, 25 bp, Homo sapien
gattaaccgtttcacaactactgag

SEQ ID NO: 20286 - DNA, 25 bp, Homo sapien
gattaaccgtttgacaactactgag

SEQ ID NO: 20287 - DNA, 25 bp, Homo sapien
gatatgacctttcctcgtagctata

SEQ ID NO: 20288 - DNA, 25 bp, Homo sapien
gatatgacctttgctcgtagctata

SEQ ID NO: 20289 - DNA, 25 bp, Homo sapien
cgtttagaagttgttctgccattta

SEQ ID NO: 20290 - DNA, 25 bp, Homo sapien
cgtttagaagttcttctgccattta

SEQ ID NO: 20291 - DNA, 25 bp, Homo sapien
ccatgtcgcacttcatctactacgg

SEQ ID NO: 20292 - DNA, 25 bp, Homo sapien
ccatgtcgcactacatctactacgg

SEQ ID NO: 20293 - DNA, 25 bp, Homo sapien
tatttcgtcactatatgtgtcgtgt

SEQ ID NO: 20294 - DNA, 25 bp, Homo sapien
tatttcgtcactttatgtgtcgtgt

SEQ ID NO: 20295 - DNA, 25 bp, Homo sapien
cgttcgtgtcgtaccgcttgtggtg

SEQ ID NO: 20296 - DNA, 25 bp, Homo sapien
cgttcgtgtcgttccgcttgtggtg

SEQ ID NO: 20297 - DNA, 25 bp, Homo sapien
actttccgtgactacttgctctacg

SEQ ID NO: 20298 - DNA, 25 bp, Homo sapien
actttccgtgacaacttgctctacg

SEQ ID NO: 20299 - DNA, 25 bp, Homo sapien
gagtattttcggactttgacactgt

SEQ ID NO: 20300 - DNA, 25 bp, Homo sapien
gagtattttcggtctttgacactgt

SEQ ID NO: 20301 - DNA, 25 bp, Homo sapien
gccgtccaaacggtcaacgtcgtta

SEQ ID NO: 20302 - DNA, 25 bp, Homo sapien
gccgtccaaacgctcaacgtcgtta

SEQ ID NO: 20303 - DNA, 25 bp, Homo sapien
ttctagcgcggcctaataacgacgt

SEQ ID NO: 20304 - DNA, 25 bp, Homo sapien
ttctagcgcggcgtaataacgacgt

SEQ ID NO: 20305 - DNA, 25 bp, Homo sapien
ccaccatagtcagaacgagttcatt

SEQ ID NO: 20306 - DNA, 25 bp, Homo sapien
ccaccatagtcacaacgagttcatt

SEQ ID NO: 20307 - DNA, 25 bp, Homo sapien
tatcatgtcgattcatgtatgtgtt

SEQ ID NO: 20308 - DNA, 25 bp, Homo sapien
tatcatgtcgatacatgtatgtgtt

SEQ ID NO: 20309 - DNA, 25 bp, Homo sapien
tattttcgagactcgttatatgtcg

SEQ ID NO: 20310 - DNA, 25 bp, Homo sapien
tattttcgagacacgttatatgtcg

SEQ ID NO: 20311 - DNA, 25 bp, Homo sapien
agacacacctctacaacggaactgg

SEQ ID NO: 20312 - DNA, 25 bp, Homo sapien
agacacacctcttcaacggaactgg

SEQ ID NO: 20313 - DNA, 25 bp, Homo sapien
acacgaccctctttgcacagtcgag

SEQ ID NO: 20314 - DNA, 25 bp, Homo sapien
acacgaccctctatgcacagtcgag

SEQ ID NO: 20315 - DNA, 25 bp, Homo sapien
agtctctcgatgttctctccataga

SEQ ID NO: 20316 - DNA, 25 bp, Homo sapien
agtctctcgatgatctctccataga

SEQ ID NO: 20317 - DNA, 25 bp, Homo sapien
ttgtcgtcgacttttcccaccgacg

SEQ ID NO: 20318 - DNA, 25 bp, Homo sapien
ttgtcgtcgactattcccaccgacg

SEQ ID NO: 20319 - DNA, 25 bp, Homo sapien
ttgtacgtcctcctttcggatcagt

SEQ ID NO: 20320 - DNA, 25 bp, Homo sapien
ttgtacgtcctcgtttcggatcagt

SEQ ID NO: 20321 - DNA, 25 bp, Homo sapien
attacgacggccagggtcaaggagt

SEQ ID NO: 20322 - DNA, 25 bp, Homo sapien
attacgacggcctgggtcaaggagt

SEQ ID NO: 20323 - DNA, 25 bp, Homo sapien
gtcggtcgcttggtcgtgtaggaac

SEQ ID NO: 20324 - DNA, 25 bp, Homo sapien
gtcggtcgcttgctcgtgtaggaac

SEQ ID NO: 20325 - DNA, 25 bp, Homo sapien
gagcggtccttttccgacgaggtcc

SEQ ID NO: 20326 - DNA, 25 bp, Homo sapien
gagcggtcctttaccgacgaggtcc

SEQ ID NO: 20327 - DNA, 25 bp, Homo sapien
agcggcctacttcactcccggagtg

SEQ ID NO: 20328 - DNA, 25 bp, Homo sapien
agcggcctacttgactcccggagtg

SEQ ID NO: 20329 - DNA, 25 bp, Homo sapien
aagacgtcacagaaggaagactttc

SEQ ID NO: 20330 - DNA, 25 bp, Homo sapien
aagacgtcacagtaggaagactttc

SEQ ID NO: 20331 - DNA, 25 bp, Homo sapien
gtgtcgacgtatataaagacttcac

SEQ ID NO: 20332 - DNA, 25 bp, Homo sapien
gtgtcgacgtatttaaagacttcac

SEQ ID NO: 20333 - DNA, 25 bp, Homo sapien
tgagtccgtcgtacactgtgtgtgt

SEQ ID NO: 20334 - DNA, 25 bp, Homo sapien
tgagtccgtcgttcactgtgtgtgt

SEQ ID NO: 20335 - DNA, 25 bp, Homo sapien
ttctcgttccgcttcacttgtgtct

SEQ ID NO: 20336 - DNA, 25 bp, Homo sapien
ttctcgttccgcatcacttgtgtct

SEQ ID NO: 20337 - DNA, 25 bp, Homo sapien
tttgagtaccgaaagatctacgata

SEQ ID NO: 20338 - DNA, 25 bp, Homo sapien
tttgagtaccgatagatctacgata

SEQ ID NO: 20339 - DNA, 25 bp, Homo sapien
tcgtttatgcggttacgacttaata

SEQ ID NO: 20340 - DNA, 25 bp, Homo sapien
tcgtttatgcggatacgacttaata

SEQ ID NO: 20341 - DNA, 25 bp, Homo sapien
ctcagtaaagggtcaaacgtttagt

SEQ ID NO: 20342 - DNA, 25 bp, Homo sapien
ctcagtaaagggacaaacgtttagt

SEQ ID NO: 20343 - DNA, 25 bp, Homo sapien
caggtgactgtggacgaatacttta

SEQ ID NO: 20344 - DNA, 25 bp, Homo sapien
caggtgactgtgcacgaatacttta

SEQ ID NO: 20345 - DNA, 25 bp, Homo sapien
gagaaggacatgtagtctttcttac

SEQ ID NO: 20346 - DNA, 25 bp, Homo sapien
gagaaggacatgaagtctttcttac

SEQ ID NO: 20347 - DNA, 25 bp, Homo sapien
gtcactaaaggtaacgcgttgtttg

SEQ ID NO: 20348 - DNA, 25 bp, Homo sapien
gtcactaaaggttacgcgttgtttg

SEQ ID NO: 20349 - DNA, 25 bp, Homo sapien
taagaatagttatcgacttcggttg

SEQ ID NO: 20350 - DNA, 25 bp, Homo sapien
taagaatagttaacgacttcggttg

SEQ ID NO: 20351 - DNA, 25 bp, Homo sapien
caaataaggttccactttactgtcg

SEQ ID NO: 20352 - DNA, 25 bp, Homo sapien
caaataaggttcgactttactgtcg

SEQ ID NO: 20353 - DNA, 25 bp, Homo sapien
actgtgtattgtgtcgtagtcgttc

SEQ ID NO: 20354 - DNA, 25 bp, Homo sapien
actgtgtattgtctcgtagtcgttc

SEQ ID NO: 20355 - DNA, 25 bp, Homo sapien
aagtgttctactcttcgtacctgtc

SEQ ID NO: 20356 - DNA, 25 bp, Homo sapien
aagtgttctactgttcgtacctgtc

SEQ ID NO: 20357 - DNA, 25 bp, Homo sapien
gagcgtgcatttaagtataccgtac

SEQ ID NO: 20358 - DNA, 25 bp, Homo sapien
gagcgtgcattttagtataccgtac

SEQ ID NO: 20359 - DNA, 25 bp, Homo sapien
ggacagtactattttatcgtacaac

SEQ ID NO: 20360 - DNA, 25 bp, Homo sapien
ggacagtactatattatcgtacaac

SEQ ID NO: 20361 - DNA, 25 bp, Homo sapien
gcggccgacctctactactactaaa

SEQ ID NO: 20362 - DNA, 25 bp, Homo sapien
gcggccgacctcaactactactaaa

SEQ ID NO: 20363 - DNA, 25 bp, Homo sapien
aaaggtgaaatcttttactagcgaa

SEQ ID NO: 20364 - DNA, 25 bp, Homo sapien
aaaggtgaaatcatttactagcgaa

SEQ ID NO: 20365 - DNA, 25 bp, Homo sapien
taacttctcgttctctgtcgtagtc

SEQ ID NO: 20366 - DNA, 25 bp, Homo sapien
taacttctcgttgtctgtcgtagtc

SEQ ID NO: 20367 - DNA, 25 bp, Homo sapien
ataatctaccgtttgtaggtctctt

SEQ ID NO: 20368 - DNA, 25 bp, Homo sapien
ataatctaccgtatgtaggtctctt

SEQ ID NO: 20369 - DNA, 25 bp, Homo sapien
ataaaaattctcgttttgtctctac

SEQ ID NO: 20370 - DNA, 25 bp, Homo sapien
ataaaaattctccttttgtctctac

SEQ ID NO: 20371 - DNA, 25 bp, Homo sapien
atttagttcattctgtgtcgaaagc

SEQ ID NO: 20372 - DNA, 25 bp, Homo sapien
atttagttcattgtgtgtcgaaagc

SEQ ID NO: 20373 - DNA, 25 bp, Homo sapien
cagagccgtccgtctaccaactaga

SEQ ID NO: 20374 - DNA, 25 bp, Homo sapien
cagagccgtccgactaccaactaga

SEQ ID NO: 20375 - DNA, 25 bp, Homo sapien
aggtagtccgagaactccagcacga

SEQ ID NO: 20376 - DNA, 25 bp, Homo sapien
aggtagtccgagtactccagcacga

SEQ ID NO: 20377 - DNA, 25 bp, Homo sapien
cgtctgtatagttccctactgtaca

SEQ ID NO: 20378 - DNA, 25 bp, Homo sapien
cgtctgtatagtaccctactgtaca

SEQ ID NO: 20379 - DNA, 25 bp, Homo sapien
gtagagtcttttcttcacgtataac

SEQ ID NO: 20380 - DNA, 25 bp, Homo sapien
gtagagtcttttgttcacgtataac

SEQ ID NO: 20381 - DNA, 25 bp, Homo sapien
cctcgaacttttcataaccgtaaat

SEQ ID NO: 20382 - DNA, 25 bp, Homo sapien
cctcgaacttttgataaccgtaaat

SEQ ID NO: 20383 - DNA, 25 bp, Homo sapien
ccacccgtttctactgacagtgaga

SEQ ID NO: 20384 - DNA, 25 bp, Homo sapien
ccacccgtttcttctgacagtgaga

SEQ ID NO: 20385 - DNA, 25 bp, Homo sapien
ctagtcgtacgttcggacaaagacg

SEQ ID NO: 20386 - DNA, 25 bp, Homo sapien
ctagtcgtacgtacggacaaagacg

SEQ ID NO: 20387 - DNA, 25 bp, Homo sapien
gcgtcgatgtcgagtcaccgtcgac

SEQ ID NO: 20388 - DNA, 25 bp, Homo sapien
gcgtcgatgtcgtgtcaccgtcgac

SEQ ID NO: 20389 - DNA, 25 bp, Homo sapien
gttcgactcgtcctgtccggtcact

SEQ ID NO: 20390 - DNA, 25 bp, Homo sapien
gttcgactcgtcgtgtccggtcact

SEQ ID NO: 20391 - DNA, 25 bp, Homo sapien
tattatctgtcgtgtataccatcga

SEQ ID NO: 20392 - DNA, 25 bp, Homo sapien
tattatctgtcgagtataccatcga

SEQ ID NO: 20393 - DNA, 25 bp, Homo sapien
ttaagatcgtgaatcagtactatcg

SEQ ID NO: 20394 - DNA, 25 bp, Homo sapien
ttaagatcgtgattcagtactatcg

SEQ ID NO: 20395 - DNA, 25 bp, Homo sapien
ctttgacgtgttaaacgatcgtatc

SEQ ID NO: 20396 - DNA, 25 bp, Homo sapien
ctttgacgtgtttaacgatcgtatc

SEQ ID NO: 20397 - DNA, 25 bp, Homo sapien
gttacggactcctcaccgcgtaggt

SEQ ID NO: 20398 - DNA, 25 bp, Homo sapien
gttacggactccacaccgcgtaggt

SEQ ID NO: 20399 - DNA, 25 bp, Homo sapien
acctcacgtggtagtgtgtggtccc

SEQ ID NO: 20400 - DNA, 25 bp, Homo sapien
acctcacgtggttgtgtgtggtccc

SEQ ID NO: 20401 - DNA, 25 bp, Homo sapien
aatcctaggtgtggttgtgtctccg

SEQ ID NO: 20402 - DNA, 25 bp, Homo sapien
aatcctaggtgtcgttgtgtctccg

SEQ ID NO: 20403 - DNA, 25 bp, Homo sapien
gaggtcctaggtgaccgtgtttccc

SEQ ID NO: 20404 - DNA, 25 bp, Homo sapien
gaggtcctaggtcaccgtgtttccc

SEQ ID NO: 20405 - DNA, 25 bp, Homo sapien
gagacccggagagaggacgactccc

SEQ ID NO: 20406 - DNA, 25 bp, Homo sapien
gagacccggagacaggacgactccc

SEQ ID NO: 20407 - DNA, 25 bp, Homo sapien
agaacggtaaaggacagagtcccgt

SEQ ID NO: 20408 - DNA, 25 bp, Homo sapien
agaacggtaaagcacagagtcccgt

SEQ ID NO: 20409 - DNA, 25 bp, Homo sapien
agaccggtcaacaccgtagtccact

SEQ ID NO: 20410 - DNA, 25 bp, Homo sapien
agaccggtcaactccgtagtccact

SEQ ID NO: 20411 - DNA, 25 bp, Homo sapien
aacgtacaacttacttgtcttaggg

SEQ ID NO: 20412 - DNA, 25 bp, Homo sapien
aacgtacaactttcttgtcttaggg

SEQ ID NO: 20413 - DNA, 25 bp, Homo sapien
aggaaacgtcaaagtacctctcgga

SEQ ID NO: 20414 - DNA, 25 bp, Homo sapien
aggaaacgtcaatgtacctctcgga

SEQ ID NO: 20415 - DNA, 25 bp, Homo sapien
tgtttgttaagaaacatgtcaccaa

SEQ ID NO: 20416 - DNA, 25 bp, Homo sapien
tgtttgttaagatacatgtcaccaa

SEQ ID NO: 20417 - DNA, 25 bp, Homo sapien
gtatcgaattcatgttactacgaca

SEQ ID NO: 20418 - DNA, 25 bp, Homo sapien
gtatcgaattcaagttactacgaca

SEQ ID NO: 20419 - DNA, 25 bp, Homo sapien
gtggagccgtaagtactacacgaac

SEQ ID NO: 20420 - DNA, 25 bp, Homo sapien
gtggagccgtaactactacacgaac

SEQ ID NO: 20421 - DNA, 25 bp, Homo sapien
ggtgacacggaaatgtacacacctc

SEQ ID NO: 20422 - DNA, 25 bp, Homo sapien
ggtgacacggaattgtacacacctc

SEQ ID NO: 20423 - DNA, 25 bp, Homo sapien
atcaactaccggaggtacaactccg

SEQ ID NO: 20424 - DNA, 25 bp, Homo sapien
atcaactaccggtggtacaactccg

SEQ ID NO: 20425 - DNA, 25 bp, Homo sapien
tcagacaccacttaagtcaagtgtc

SEQ ID NO: 20426 - DNA, 25 bp, Homo sapien
tcagacaccactaaagtcaagtgtc

SEQ ID NO: 20427 - DNA, 25 bp, Homo sapien
caagtacgacaccagacgcaaagac

SEQ ID NO: 20428 - DNA, 25 bp, Homo sapien
caagtacgacacgagacgcaaagac

SEQ ID NO: 20429 - DNA, 25 bp, Homo sapien
gacccaaacgacatcagcagacaat

SEQ ID NO: 20430 - DNA, 25 bp, Homo sapien
gacccaaacgacttcagcagacaat

SEQ ID NO: 20431 - DNA, 25 bp, Homo sapien
ggtgggtaagagtcccgtcataccc

SEQ ID NO: 20432 - DNA, 25 bp, Homo sapien
ggtgggtaagagacccgtcataccc

SEQ ID NO: 20433 - DNA, 25 bp, Homo sapien
ggggtcgatccctgacctctagtcc

SEQ ID NO: 20434 - DNA, 25 bp, Homo sapien
ggggtcgatcccagacctctagtcc

SEQ ID NO: 20435 - DNA, 25 bp, Homo sapien
tgtcgtcgacccttgatatcgtccc

SEQ ID NO: 20436 - DNA, 25 bp, Homo sapien
tgtcgtcgacccatgatatcgtccc

SEQ ID NO: 20437 - DNA, 25 bp, Homo sapien
ttcctgaccagtagaggttacctcg

SEQ ID NO: 20438 - DNA, 25 bp, Homo sapien
ttcctgaccagttgaggttacctcg

SEQ ID NO: 20439 - DNA, 25 bp, Homo sapien
gtcgtgtccaaatctttagtgtcgt

SEQ ID NO: 20440 - DNA, 25 bp, Homo sapien
gtcgtgtccaaaactttagtgtcgt

SEQ ID NO: 20441 - DNA, 25 bp, Homo sapien
tgtcgtggcatctacttctctccgt

SEQ ID NO: 20442 - DNA, 25 bp, Homo sapien
tgtcgtggcatcaacttctctccgt

SEQ ID NO: 20443 - DNA, 25 bp, Homo sapien
tgtgtctacttagagtcatctcctt

SEQ ID NO: 20444 - DNA, 25 bp, Homo sapien
tgtgtctacttacagtcatctcctt

SEQ ID NO: 20445 - DNA, 25 bp, Homo sapien
gtccgtccgtcttgtcgatccactt

SEQ ID NO: 20446 - DNA, 25 bp, Homo sapien
gtccgtccgtctagtcgatccactt

SEQ ID NO: 20447 - DNA, 25 bp, Homo sapien
tgacttttctagttacggactcatt

SEQ ID NO: 20448 - DNA, 25 bp, Homo sapien
tgacttttctagatacggactcatt

SEQ ID NO: 20449 - DNA, 25 bp, Homo sapien
agtctaatcgagtcttatagtatac

SEQ ID NO: 20450 - DNA, 25 bp, Homo sapien
agtctaatcgagacttatagtatac

SEQ ID NO: 20451 - DNA, 25 bp, Homo sapien
tgaggcgtcacttcagattttttag

SEQ ID NO: 20452 - DNA, 25 bp, Homo sapien
tgaggcgtcactacagattttttag

SEQ ID NO: 20453 - DNA, 25 bp, Homo sapien
tatctgtgtcttggaatttgtctca

SEQ ID NO: 20454 - DNA, 25 bp, Homo sapien
tatctgtgtcttcgaatttgtctca

SEQ ID NO: 20455 - DNA, 25 bp, Homo sapien
agacggtctttacagattaaacaat

SEQ ID NO: 20456 - DNA, 25 bp, Homo sapien
agacggtctttagagattaaacaat

SEQ ID NO: 20457 - DNA, 25 bp, Homo sapien
gacttgtgttaaaacaacgaaacta

SEQ ID NO: 20458 - DNA, 25 bp, Homo sapien
gacttgtgttaatacaacgaaacta

SEQ ID NO: 20459 - DNA, 25 bp, Homo sapien
gttactgtttaaagaccacacaaga

SEQ ID NO: 20460 - DNA, 25 bp, Homo sapien
gttactgtttaatgaccacacaaga

SEQ ID NO: 20461 - DNA, 25 bp, Homo sapien
cgaacttttgtaaagtgtctgtcaa

SEQ ID NO: 20462 - DNA, 25 bp, Homo sapien
cgaacttttgtatagtgtctgtcaa

SEQ ID NO: 20463 - DNA, 25 bp, Homo sapien
tcgattttcggttagtctttgtcaa

SEQ ID NO: 20464 - DNA, 25 bp, Homo sapien
tcgattttcggtaagtctttgtcaa

SEQ ID NO: 20465 - DNA, 25 bp, Homo sapien
gtttccctagtaagttctactggca

SEQ ID NO: 20466 - DNA, 25 bp, Homo sapien
gtttccctagtatgttctactggca

SEQ ID NO: 20467 - DNA, 25 bp, Homo sapien
gtttcaactactgctgtctgtgaac

SEQ ID NO: 20468 - DNA, 25 bp, Homo sapien
gtttcaactactcctgtctgtgaac

SEQ ID NO: 20469 - DNA, 25 bp, Homo sapien
gtttatccaacgatatgtcctgttc

SEQ ID NO: 20470 - DNA, 25 bp, Homo sapien
gtttatccaacgttatgtcctgttc

SEQ ID NO: 20471 - DNA, 25 bp, Homo sapien
ggtccttgacacaggatctgggtat

SEQ ID NO: 20472 - DNA, 25 bp, Homo sapien
ggtccttgacactggatctgggtat

SEQ ID NO: 20473 - DNA, 25 bp, Homo sapien
tgtctctgtctcttgaattgtgtac

SEQ ID NO: 20474 - DNA, 25 bp, Homo sapien
tgtctctgtctcatgaattgtgtac

SEQ ID NO: 20475 - DNA, 25 bp, Homo sapien
ctagagtgtactcactcttaggtcc

SEQ ID NO: 20476 - DNA, 25 bp, Homo sapien
ctagagtgtactgactcttaggtcc

SEQ ID NO: 20477 - DNA, 25 bp, Homo sapien
aactagtaggtcgacactgtcctcc

SEQ ID NO: 20478 - DNA, 25 bp, Homo sapien
aactagtaggtccacactgtcctcc

SEQ ID NO: 20479 - DNA, 25 bp, Homo sapien
tgaagtgtttcacactgtagttatc

SEQ ID NO: 20480 - DNA, 25 bp, Homo sapien
tgaagtgtttcagactgtagttatc

SEQ ID NO: 20481 - DNA, 25 bp, Homo sapien
gtatttttagacacacactctagtg

SEQ ID NO: 20482 - DNA, 25 bp, Homo sapien
gtatttttagactcacactctagtg

SEQ ID NO: 20483 - DNA, 25 bp, Homo sapien
agtacatcgtttaccttttagtatg

SEQ ID NO: 20484 - DNA, 25 bp, Homo sapien
agtacatcgttttccttttagtatg

SEQ ID NO: 20485 - DNA, 25 bp, Homo sapien
aaagattccgaagacgaaatctata

SEQ ID NO: 20486 - DNA, 25 bp, Homo sapien
aaagattccgaacacgaaatctata

SEQ ID NO: 20487 - DNA, 25 bp, Homo sapien
aagtgtgtacttacaacaaagtcta

SEQ ID NO: 20488 - DNA, 25 bp, Homo sapien
aagtgtgtactttcaacaaagtcta

SEQ ID NO: 20489 - DNA, 25 bp, Homo sapien
tggtctgatgggacgacaagagtac

SEQ ID NO: 20490 - DNA, 25 bp, Homo sapien
tggtctgatgggtcgacaagagtac

SEQ ID NO: 20491 - DNA, 25 bp, Homo sapien
cgtgtctaatctagattcctgtacc

SEQ ID NO: 20492 - DNA, 25 bp, Homo sapien
cgtgtctaatcttgattcctgtacc

SEQ ID NO: 20493 - DNA, 25 bp, Homo sapien
agtgtccctctcttcttgctgtacc

SEQ ID NO: 20494 - DNA, 25 bp, Homo sapien
agtgtccctctcatcttgctgtacc

SEQ ID NO: 20495 - DNA, 25 bp, Homo sapien
gtctctccgtccacgtctatgtcga

SEQ ID NO: 20496 - DNA, 25 bp, Homo sapien
gtctctccgtcctcgtctatgtcga

SEQ ID NO: 20497 - DNA, 25 bp, Homo sapien
ttcgttgtcggtatgtatacttcga

SEQ ID NO: 20498 - DNA, 25 bp, Homo sapien
ttcgttgtcggtttgtatacttcga

SEQ ID NO: 20499 - DNA, 25 bp, Homo sapien
tacttcttcgtgaagatggtctttc

SEQ ID NO: 20500 - DNA, 25 bp, Homo sapien
tacttcttcgtgtagatggtctttc

SEQ ID NO: 20501 - DNA, 25 bp, Homo sapien
tttcattgagtgtcgtcatacagtg

SEQ ID NO: 20502 - DNA, 25 bp, Homo sapien
tttcattgagtgacgtcatacagtg

SEQ ID NO: 20503 - DNA, 25 bp, Homo sapien
caacaggtccggtgtaagactgagt

SEQ ID NO: 20504 - DNA, 25 bp, Homo sapien
caacaggtccggagtaagactgagt

SEQ ID NO: 20505 - DNA, 25 bp, Homo sapien
cgtatatgaaaggtaagacttccga

SEQ ID NO: 20506 - DNA, 25 bp, Homo sapien
cgtatatgaaagctaagacttccga

SEQ ID NO: 20507 - DNA, 25 bp, Homo sapien
ggatacttgtaaattactccgacaa

SEQ ID NO: 20508 - DNA, 25 bp, Homo sapien
ggatacttgtaatttactccgacaa

SEQ ID NO: 20509 - DNA, 25 bp, Homo sapien
tgtaccgtctttgtccgtgtacccg

SEQ ID NO: 20510 - DNA, 25 bp, Homo sapien
tgtaccgtctttctccgtgtacccg

SEQ ID NO: 20511 - DNA, 25 bp, Homo sapien
cccagtcttcttcgtagtgtctatc

SEQ ID NO: 20512 - DNA, 25 bp, Homo sapien
cccagtcttcttggtagtgtctatc

SEQ ID NO: 20513 - DNA, 25 bp, Homo sapien
tcagttcccgtggtagagactagta

SEQ ID NO: 20514 - DNA, 25 bp, Homo sapien
tcagttcccgtgctagagactagta

SEQ ID NO: 20515 - DNA, 25 bp, Homo sapien
aaagtctctcgagtcccgtacgagc

SEQ ID NO: 20516 - DNA, 25 bp, Homo sapien
aaagtctctcgactcccgtacgagc

SEQ ID NO: 20517 - DNA, 25 bp, Homo sapien
acagattgtgacaacagttagtcct

SEQ ID NO: 20518 - DNA, 25 bp, Homo sapien
acagattgtgactacagttagtcct

SEQ ID NO: 20519 - DNA, 25 bp, Homo sapien
cgaaagatatctactacctttgaac

SEQ ID NO: 20520 - DNA, 25 bp, Homo sapien
cgaaagatatcttctacctttgaac

SEQ ID NO: 20521 - DNA, 25 bp, Homo sapien
gtaaacgacttttcccgttgtgaca

SEQ ID NO: 20522 - DNA, 25 bp, Homo sapien
gtaaacgactttacccgttgtgaca

SEQ ID NO: 20523 - DNA, 25 bp, Homo sapien
taaatatactaaacgacacggtgaa

SEQ ID NO: 20524 - DNA, 25 bp, Homo sapien
taaatatactaatcgacacggtgaa

SEQ ID NO: 20525 - DNA, 25 bp, Homo sapien
tttcattgacaccacctgtatgtgt

SEQ ID NO: 20526 - DNA, 25 bp, Homo sapien
tttcattgacacgacctgtatgtgt

SEQ ID NO: 20527 - DNA, 25 bp, Homo sapien
catcaagttccgttaacgtgtattc

SEQ ID NO: 20528 - DNA, 25 bp, Homo sapien
catcaagttccgataacgtgtattc

SEQ ID NO: 20529 - DNA, 25 bp, Homo sapien
agacgtcgacccttatacatgtttt

SEQ ID NO: 20530 - DNA, 25 bp, Homo sapien
agacgtcgacccatatacatgtttt

SEQ ID NO: 20531 - DNA, 25 bp, Homo sapien
gcgtcgtagacgagtgaaggtttct

SEQ ID NO: 20532 - DNA, 25 bp, Homo sapien
gcgtcgtagacgtgtgaaggtttct

SEQ ID NO: 20533 - DNA, 25 bp, Homo sapien
gagtctacagtcgttaactgtcttg

SEQ ID NO: 20534 - DNA, 25 bp, Homo sapien
gagtctacagtccttaactgtcttg

SEQ ID NO: 20535 - DNA, 25 bp, Homo sapien
agagtcgaccacctagccgacgaaa

SEQ ID NO: 20536 - DNA, 25 bp, Homo sapien
agagtcgaccacgtagccgacgaaa

SEQ ID NO: 20537 - DNA, 25 bp, Homo sapien
tctgtgtcgaggatataaactcaaa

SEQ ID NO: 20538 - DNA, 25 bp, Homo sapien
tctgtgtcgaggttataaactcaaa

SEQ ID NO: 20539 - DNA, 25 bp, Homo sapien
tttcatgggtattaactaactaaga

SEQ ID NO: 20540 - DNA, 25 bp, Homo sapien
tttcatgggtataaactaactaaga

SEQ ID NO: 20541 - DNA, 25 bp, Homo sapien
cgttggtggtacttcaaataagaca

SEQ ID NO: 20542 - DNA, 25 bp, Homo sapien
cgttggtggtacatcaaataagaca

SEQ ID NO: 20543 - DNA, 25 bp, Homo sapien
aagtcaagaacacgtcgaaagtttt

SEQ ID NO: 20544 - DNA, 25 bp, Homo sapien
aagtcaagaacaggtcgaaagtttt

SEQ ID NO: 20545 - DNA, 25 bp, Homo sapien
cgagacatagaagatccaacgaatt

SEQ ID NO: 20546 - DNA, 25 bp, Homo sapien
cgagacatagaacatccaacgaatt

SEQ ID NO: 20547 - DNA, 25 bp, Homo sapien
gaaaacggacactcgtgaacaagtg

SEQ ID NO: 20548 - DNA, 25 bp, Homo sapien
gaaaacggacacacgtgaacaagtg

SEQ ID NO: 20549 - DNA, 25 bp, Homo sapien
ctccagtgcactgacgtcggtgtac

SEQ ID NO: 20550 - DNA, 25 bp, Homo sapien
ctccagtgcactcacgtcggtgtac

SEQ ID NO: 20551 - DNA, 25 bp, Homo sapien
cagttttctaggtcccacggagaga

SEQ ID NO: 20552 - DNA, 25 bp, Homo sapien
cagttttctaggacccacggagaga

SEQ ID NO: 20553 - DNA, 25 bp, Homo sapien
tcgtgtccccggaccggaccgaaga

SEQ ID NO: 20554 - DNA, 25 bp, Homo sapien
tcgtgtccccggtccggaccgaaga

SEQ ID NO: 20555 - DNA, 25 bp, Homo sapien
ccaccggacactcgagagagacgac

SEQ ID NO: 20556 - DNA, 25 bp, Homo sapien
ccaccggacactggagagagacgac

SEQ ID NO: 20557 - DNA, 25 bp, Homo sapien
tgtccaccggacctgtatggtgcac

SEQ ID NO: 20558 - DNA, 25 bp, Homo sapien
tgtccaccggacgtgtatggtgcac

SEQ ID NO: 20559 - DNA, 25 bp, Homo sapien
gtcacctacggaatctcttatgata

SEQ ID NO: 20560 - DNA, 25 bp, Homo sapien
gtcacctacggattctcttatgata

SEQ ID NO: 20561 - DNA, 25 bp, Homo sapien
tttggacagtcctctggtctgcact

SEQ ID NO: 20562 - DNA, 25 bp, Homo sapien
tttggacagtccactggtctgcact

SEQ ID NO: 20563 - DNA, 25 bp, Homo sapien
ctacgtagacctttcggttacggac

SEQ ID NO: 20564 - DNA, 25 bp, Homo sapien
ctacgtagacctatcggttacggac

SEQ ID NO: 20565 - DNA, 25 bp, Homo sapien
tccgtcggtgtcgtcggtgtcgaaa

SEQ ID NO: 20566 - DNA, 25 bp, Homo sapien
tccgtcggtgtcctcggtgtcgaaa

SEQ ID NO: 20567 - DNA, 25 bp, Homo sapien
ctcactgatatcctctgtctggaac

SEQ ID NO: 20568 - DNA, 25 bp, Homo sapien
ctcactgatatcgtctgtctggaac

SEQ ID NO: 20569 - DNA, 25 bp, Homo sapien
cacatcgtattcttggatcggcagt

SEQ ID NO: 20570 - DNA, 25 bp, Homo sapien
cacatcgtattcatggatcggcagt

SEQ ID NO: 20571 - DNA, 25 bp, Homo sapien
acacaaagttttatgagtcggtcta

SEQ ID NO: 20572 - DNA, 25 bp, Homo sapien
acacaaagttttttgagtcggtcta

SEQ ID NO: 20573 - DNA, 25 bp, Homo sapien
cagaaatgtctttctggccacatgt

SEQ ID NO: 20574 - DNA, 25 bp, Homo sapien
cagaaatgtcttactggccacatgt

SEQ ID NO: 20575 - DNA, 25 bp, Homo sapien
gaccagagaaattctgacaaaattt

SEQ ID NO: 20576 - DNA, 25 bp, Homo sapien
gaccagagaaatactgacaaaattt

SEQ ID NO: 20577 - DNA, 25 bp, Homo sapien
ctcacaaaggaatgaccctaattag

SEQ ID NO: 20578 - DNA, 25 bp, Homo sapien
ctcacaaaggaaagaccctaattag

SEQ ID NO: 20579 - DNA, 25 bp, Homo sapien
cccagagaggtcgtggacttcattg

SEQ ID NO: 20580 - DNA, 25 bp, Homo sapien
cccagagaggtcctggacttcattg

SEQ ID NO: 20581 - DNA, 25 bp, Homo sapien
ataaaggtacaagtcgactctttac

SEQ ID NO: 20582 - DNA, 25 bp, Homo sapien
ataaaggtacaactcgactctttac

SEQ ID NO: 20583 - DNA, 25 bp, Homo sapien
acaaaaggtaaagacacaggtcact

SEQ ID NO: 20584 - DNA, 25 bp, Homo sapien
acaaaaggtaaacacacaggtcact

SEQ ID NO: 20585 - DNA, 25 bp, Homo sapien
gaaaaaggtcggactcggaccgtta

SEQ ID NO: 20586 - DNA, 25 bp, Homo sapien
gaaaaaggtcggtctcggaccgtta

SEQ ID NO: 20587 - DNA, 25 bp, Homo sapien
aacaagaagacctatcggtccttct

SEQ ID NO: 20588 - DNA, 25 bp, Homo sapien
aacaagaagaccaatcggtccttct

SEQ ID NO: 20589 - DNA, 25 bp, Homo sapien
aacgaggaagaaagagacgggccct

SEQ ID NO: 20590 - DNA, 25 bp, Homo sapien
aacgaggaagaatgagacgggccct

SEQ ID NO: 20591 - DNA, 25 bp, Homo sapien
cgagaagaagtataggtccgatatc

SEQ ID NO: 20592 - DNA, 25 bp, Homo sapien
cgagaagaagtaaaggtccgatatc

SEQ ID NO: 20593 - DNA, 25 bp, Homo sapien
gggtaccattcagtagtcaaatcgt

SEQ ID NO: 20594 - DNA, 25 bp, Homo sapien
gggtaccattcactagtcaaatcgt

SEQ ID NO: 20595 - DNA, 25 bp, Homo sapien
ccaaagagtggtatgggacgtcaag

SEQ ID NO: 20596 - DNA, 25 bp, Homo sapien
ccaaagagtggtttgggacgtcaag

SEQ ID NO: 20597 - DNA, 25 bp, Homo sapien
cctagaaagaaccttggtgcgaaag

SEQ ID NO: 20598 - DNA, 25 bp, Homo sapien
cctagaaagaacgttggtgcgaaag

SEQ ID NO: 20599 - DNA, 25 bp, Homo sapien
caccgaaaggacaggggtccggacc

SEQ ID NO: 20600 - DNA, 25 bp, Homo sapien
caccgaaaggactggggtccggacc

SEQ ID NO: 20601 - DNA, 25 bp, Homo sapien
ccccgacgagagacggagggtcacc

SEQ ID NO: 20602 - DNA, 25 bp, Homo sapien
ccccgacgagagtcggagggtcacc

SEQ ID NO: 20603 - DNA, 25 bp, Homo sapien
ccaaagaaggactggggtctctgac

SEQ ID NO: 20604 - DNA, 25 bp, Homo sapien
ccaaagaaggacaggggtctctgac

SEQ ID NO: 20605 - DNA, 25 bp, Homo sapien
tcatagacgggataaagtgttccga

SEQ ID NO: 20606 - DNA, 25 bp, Homo sapien
tcatagacgggaaaaagtgttccga

SEQ ID NO: 20607 - DNA, 25 bp, Homo sapien
tatgagagaaatgacagagttcacc

SEQ ID NO: 20608 - DNA, 25 bp, Homo sapien
tatgagagaaatcacagagttcacc

SEQ ID NO: 20609 - DNA, 25 bp, Homo sapien
cgtgtggaaatatgtcattccggtt

SEQ ID NO: 20610 - DNA, 25 bp, Homo sapien
cgtgtggaaataagtcattccggtt

SEQ ID NO: 20611 - DNA, 25 bp, Homo sapien
ggaggaacataagctacttccgcat

SEQ ID NO: 20612 - DNA, 25 bp, Homo sapien
ggaggaacataacctacttccgcat

SEQ ID NO: 20613 - DNA, 25 bp, Homo sapien
gtaagtttgaaatcactcgtttcag

SEQ ID NO: 20614 - DNA, 25 bp, Homo sapien
gtaagtttgaaaacactcgtttcag

SEQ ID NO: 20615 - DNA, 25 bp, Homo sapien
aaatgctagaaacgtgtattctgac

SEQ ID NO: 20616 - DNA, 25 bp, Homo sapien
aaatgctagaaaggtgtattctgac

SEQ ID NO: 20617 - DNA, 25 bp, Homo sapien
gaaaacgacagtaaaattaccccga

SEQ ID NO: 20618 - DNA, 25 bp, Homo sapien
gaaaacgacagttaaattaccccga

SEQ ID NO: 20619 - DNA, 25 bp, Homo sapien
acaaagacagtgtaacaagttttaa

SEQ ID NO: 20620 - DNA, 25 bp, Homo sapien
acaaagacagtgaaacaagttttaa

SEQ ID NO: 20621 - DNA, 25 bp, Homo sapien
gaagagacatacatcgtattaagac

SEQ ID NO: 20622 - DNA, 25 bp, Homo sapien
gaagagacatacttcgtattaagac

SEQ ID NO: 20623 - DNA, 25 bp, Homo sapien
ggacagaaaggtgtagtctcgagac

SEQ ID NO: 20624 - DNA, 25 bp, Homo sapien
ggacagaaaggtctagtctcgagac

SEQ ID NO: 20625 - DNA, 25 bp, Homo sapien
cagacaaacctcagacttacgagac

SEQ ID NO: 20626 - DNA, 25 bp, Homo sapien
cagacaaacctctgacttacgagac

SEQ ID NO: 20627 - DNA, 25 bp, Homo sapien
ctccaactcctagaactcgacgagt

SEQ ID NO: 20628 - DNA, 25 bp, Homo sapien
ctccaactcctacaactcgacgagt

SEQ ID NO: 20629 - DNA, 25 bp, Homo sapien
gtcttatcacacatgagctactcgg

SEQ ID NO: 20630 - DNA, 25 bp, Homo sapien
gtcttatcacacttgagctactcgg

SEQ ID NO: 20631 - DNA, 25 bp, Homo sapien
gttaggacttcttactgctacgagg

SEQ ID NO: 20632 - DNA, 25 bp, Homo sapien
gttaggacttctaactgctacgagg

SEQ ID NO: 20633 - DNA, 25 bp, Homo sapien
tccttatagctctcgcagtacttgg

SEQ ID NO: 20634 - DNA, 25 bp, Homo sapien
tccttatagctcacgcagtacttgg

SEQ ID NO: 20635 - DNA, 25 bp, Homo sapien
gttttggtctaaatacctattgtac

SEQ ID NO: 20636 - DNA, 25 bp, Homo sapien
gttttggtctaattacctattgtac

SEQ ID NO: 20637 - DNA, 25 bp, Homo sapien
tcgactaggtagtagaccatgtgac

SEQ ID NO: 20638 - DNA, 25 bp, Homo sapien
tcgactaggtagaagaccatgtgac

SEQ ID NO: 20639 - DNA, 25 bp, Homo sapien
tagaagtagtcgtagaccatcggct

SEQ ID NO: 20640 - DNA, 25 bp, Homo sapien
tagaagtagtcgaagaccatcggct

SEQ ID NO: 20641 - DNA, 25 bp, Homo sapien
gcggaggtcgactgactcctcctct

SEQ ID NO: 20642 - DNA, 25 bp, Homo sapien
gcggaggtcgacagactcctcctct

SEQ ID NO: 20643 - DNA, 25 bp, Homo sapien
agtagttgtacgacgtcgacgaccc

SEQ ID NO: 20644 - DNA, 25 bp, Homo sapien
agtagttgtacgtcgtcgacgaccc

SEQ ID NO: 20645 - DNA, 25 bp, Homo sapien
tcggtcaggccgtcgtcgagcctct

SEQ ID NO: 20646 - DNA, 25 bp, Homo sapien
tcggtcaggccgacgtcgagcctct

SEQ ID NO: 20647 - DNA, 25 bp, Homo sapien
gggttgtgtgggacacatagtcttc

SEQ ID NO: 20648 - DNA, 25 bp, Homo sapien
gggttgtgtgggtcacatagtcttc

SEQ ID NO: 20649 - DNA, 25 bp, Homo sapien
gcaagaggaaggactactctcgaga

SEQ ID NO: 20650 - DNA, 25 bp, Homo sapien
gcaagaggaaggtctactctcgaga

SEQ ID NO: 20651 - DNA, 25 bp, Homo sapien
agtagagatagtgaaaccgtatacc

SEQ ID NO: 20652 - DNA, 25 bp, Homo sapien
agtagagatagtcaaaccgtatacc

SEQ ID NO: 20653 - DNA, 25 bp, Homo sapien
tatgagtagtagtactaaaccagtc

SEQ ID NO: 20654 - DNA, 25 bp, Homo sapien
tatgagtagtagaactaaaccagtc

SEQ ID NO: 20655 - DNA, 25 bp, Homo sapien
aatatggaacgtcgatctatcctac

SEQ ID NO: 20656 - DNA, 25 bp, Homo sapien
aatatggaacgtggatctatcctac

SEQ ID NO: 20657 - DNA, 25 bp, Homo sapien
agtgtctggagtgtaaacactcctt

SEQ ID NO: 20658 - DNA, 25 bp, Homo sapien
agtgtctggagtctaaacactcctt

SEQ ID NO: 20659 - DNA, 25 bp, Homo sapien
gatggggaactaaaaccacactgtt

SEQ ID NO: 20660 - DNA, 25 bp, Homo sapien
gatggggaactataaccacactgtt

SEQ ID NO: 20661 - DNA, 25 bp, Homo sapien
tgttgagaacttatacgtcgcatca

SEQ ID NO: 20662 - DNA, 25 bp, Homo sapien
tgttgagaacttttacgtcgcatca

SEQ ID NO: 20663 - DNA, 25 bp, Homo sapien
gttcgttgaaaccttcttccgaaac

SEQ ID NO: 20664 - DNA, 25 bp, Homo sapien
gttcgttgaaacgttcttccgaaac

SEQ ID NO: 20665 - DNA, 25 bp, Homo sapien
aatatgacgaagaaatccgggtccg

SEQ ID NO: 20666 - DNA, 25 bp, Homo sapien
aatatgacgaagtaatccgggtccg

SEQ ID NO: 20667 - DNA, 25 bp, Homo sapien
tggaagagacgacttaatttggtcc

SEQ ID NO: 20668 - DNA, 25 bp, Homo sapien
tggaagagacgagttaatttggtcc

SEQ ID NO: 20669 - DNA, 25 bp, Homo sapien
gttacgaatccgttgattttactcc

SEQ ID NO: 20670 - DNA, 25 bp, Homo sapien
gttacgaatccgatgattttactcc

SEQ ID NO: 20671 - DNA, 25 bp, Homo sapien
ccaaaataacagtgtcgtcgactgc

SEQ ID NO: 20672 - DNA, 25 bp, Homo sapien
ccaaaataacagagtcgtcgactgc

SEQ ID NO: 20673 - DNA, 25 bp, Homo sapien
gtaagtcatattcttggttcacttt

SEQ ID NO: 20674 - DNA, 25 bp, Homo sapien
gtaagtcatattgttggttcacttt

SEQ ID NO: 20675 - DNA, 25 bp, Homo sapien
caggtttcaactgtatacgtccttt

SEQ ID NO: 20676 - DNA, 25 bp, Homo sapien
caggtttcaactctatacgtccttt

SEQ ID NO: 20677 - DNA, 25 bp, Homo sapien
gtttgtgtcggtacttacttcgtta

SEQ ID NO: 20678 - DNA, 25 bp, Homo sapien
gtttgtgtcggttcttacttcgtta

SEQ ID NO: 20679 - DNA, 25 bp, Homo sapien
ccacccgtgggttttaccgtctgac

SEQ ID NO: 20680 - DNA, 25 bp, Homo sapien
ccacccgtgggtattaccgtctgac

SEQ ID NO: 20681 - DNA, 25 bp, Homo sapien
gactcggggtagagtagacgaccac

SEQ ID NO: 20682 - DNA, 25 bp, Homo sapien
gactcggggtagtgtagacgaccac

SEQ ID NO: 20683 - DNA, 25 bp, Homo sapien
tatctgtgaaacaagagtcgaccac

SEQ ID NO: 20684 - DNA, 25 bp, Homo sapien
tatctgtgaaactagagtcgaccac

SEQ ID NO: 20685 - DNA, 25 bp, Homo sapien
aggagcagacacctagcgtccgacc

SEQ ID NO: 20686 - DNA, 25 bp, Homo sapien
aggagcagacacgtagcgtccgacc

SEQ ID NO: 20687 - DNA, 25 bp, Homo sapien
agtaggagtctgagactgctgctgc

SEQ ID NO: 20688 - DNA, 25 bp, Homo sapien
agtaggagtctgtgactgctgctgc

SEQ ID NO: 20689 - DNA, 25 bp, Homo sapien
cgtatagtcgataccgttcactgta

SEQ ID NO: 20690 - DNA, 25 bp, Homo sapien
cgtatagtcgattccgttcactgta

SEQ ID NO: 20691 - DNA, 25 bp, Homo sapien
acgtgtcgcgacctacttaccgtca

SEQ ID NO: 20692 - DNA, 25 bp, Homo sapien
acgtgtcgcgacgtacttaccgtca

SEQ ID NO: 20693 - DNA, 25 bp, Homo sapien
ctctatcctccgaagctagagatta

SEQ ID NO: 20694 - DNA, 25 bp, Homo sapien
ctctatcctccgtagctagagatta

SEQ ID NO: 20695 - DNA, 25 bp, Homo sapien
acttgtgtccgactctcgactcttt

SEQ ID NO: 20696 - DNA, 25 bp, Homo sapien
acttgtgtccgagtctcgactcttt

SEQ ID NO: 20697 - DNA, 25 bp, Homo sapien
ttttagttcccagttagatctgtat

SEQ ID NO: 20698 - DNA, 25 bp, Homo sapien
ttttagttcccacttagatctgtat

SEQ ID NO: 20699 - DNA, 25 bp, Homo sapien
ttttacatttccatgtgtactataa

SEQ ID NO: 20700 - DNA, 25 bp, Homo sapien
ttttacatttccttgtgtactataa

SEQ ID NO: 20701 - DNA, 25 bp, Homo sapien
tactatgtttacttcgtcgcgttta

SEQ ID NO: 20702 - DNA, 25 bp, Homo sapien
tactatgtttacatcgtcgcgttta

SEQ ID NO: 20703 - DNA, 25 bp, Homo sapien
ctgtgactgggtttctggttatact

SEQ ID NO: 20704 - DNA, 25 bp, Homo sapien
ctgtgactgggtatctggttatact

SEQ ID NO: 20705 - DNA, 25 bp, Homo sapien
tggccgacgagcagcgagagtcacc

SEQ ID NO: 20706 - DNA, 25 bp, Homo sapien
tggccgacgagctgcgagagtcacc

SEQ ID NO: 20707 - DNA, 25 bp, Homo sapien
ttcgacgagtactgggagttacgac

SEQ ID NO: 20708 - DNA, 25 bp, Homo sapien
ttcgacgagtacagggagttacgac

SEQ ID NO: 20709 - DNA, 25 bp, Homo sapien
attattgtgtacgacagatattcga

SEQ ID NO: 20710 - DNA, 25 bp, Homo sapien
attattgtgtaccacagatattcga

SEQ ID NO: 20711 - DNA, 25 bp, Homo sapien
actactgtggacagacaccacttta

SEQ ID NO: 20712 - DNA, 25 bp, Homo sapien
actactgtggactgacaccacttta

SEQ ID NO: 20713 - DNA, 25 bp, Homo sapien
aagtagtaggactaaccgactctgc

SEQ ID NO: 20714 - DNA, 25 bp, Homo sapien
aagtagtaggacaaaccgactctgc

SEQ ID NO: 20715 - DNA, 25 bp, Homo sapien
gtcgagggtacacaaaaacacctag

SEQ ID NO: 20716 - DNA, 25 bp, Homo sapien
gtcgagggtacagaaaaacacctag

SEQ ID NO: 20717 - DNA, 25 bp, Homo sapien
acttccgggttctgaaaccccggac

SEQ ID NO: 20718 - DNA, 25 bp, Homo sapien
acttccgggttcagaaaccccggac

SEQ ID NO: 20719 - DNA, 25 bp, Homo sapien
tcgacgggtgttccttcgcgggaac

SEQ ID NO: 20720 - DNA, 25 bp, Homo sapien
tcgacgggtgttgcttcgcgggaac

SEQ ID NO: 20721 - DNA, 25 bp, Homo sapien
tcgagtccgcctctctccggagaga

SEQ ID NO: 20722 - DNA, 25 bp, Homo sapien
tcgagtccgcctgtctccggagaga

SEQ ID NO: 20723 - DNA, 25 bp, Homo sapien
cgtcggcgtccatgaacggacagag

SEQ ID NO: 20724 - DNA, 25 bp, Homo sapien
cgtcggcgtccaagaacggacagag

SEQ ID NO: 20725 - DNA, 25 bp, Homo sapien
acccgtgacgtagtctcggacacgg

SEQ ID NO: 20726 - DNA, 25 bp, Homo sapien
acccgtgacgtactctcggacacgg

SEQ ID NO: 20727 - DNA, 25 bp, Homo sapien
cgaacccgccgaaatctactcaaga

SEQ ID NO: 20728 - DNA, 25 bp, Homo sapien
cgaacccgccgatatctactcaaga

SEQ ID NO: 20729 - DNA, 25 bp, Homo sapien
gacagagcacaagacacttcaacga

SEQ ID NO: 20730 - DNA, 25 bp, Homo sapien
gacagagcacaacacacttcaacga

SEQ ID NO: 20731 - DNA, 25 bp, Homo sapien
cgacaaatgtcctcgacttcgagaa

SEQ ID NO: 20732 - DNA, 25 bp, Homo sapien
cgacaaatgtccacgacttcgagaa

SEQ ID NO: 20733 - DNA, 25 bp, Homo sapien
gagcaccagttttttcatttacgaa

SEQ ID NO: 20734 - DNA, 25 bp, Homo sapien
gagcaccagtttattcatttacgaa

SEQ ID NO: 20735 - DNA, 25 bp, Homo sapien
aggacctctctttctggattgataa

SEQ ID NO: 20736 - DNA, 25 bp, Homo sapien
aggacctctcttactggattgataa

SEQ ID NO: 20737 - DNA, 25 bp, Homo sapien
cgaccccttcttcgtcggtggaatc

SEQ ID NO: 20738 - DNA, 25 bp, Homo sapien
cgaccccttcttggtcggtggaatc

SEQ ID NO: 20739 - DNA, 25 bp, Homo sapien
gccgttggcgtacgtcgggccactc

SEQ ID NO: 20740 - DNA, 25 bp, Homo sapien
gccgttggcgtaggtcgggccactc

SEQ ID NO: 20741 - DNA, 25 bp, Homo sapien
cccgcgtcaggaaaggggcagtctc

SEQ ID NO: 20742 - DNA, 25 bp, Homo sapien
cccgcgtcaggataggggcagtctc

SEQ ID NO: 20743 - DNA, 25 bp, Homo sapien
gaggaagtaggacggggagtggtcc

SEQ ID NO: 20744 - DNA, 25 bp, Homo sapien
gaggaagtaggagggggagtggtcc

SEQ ID NO: 20745 - DNA, 25 bp, Homo sapien
ggaagactagatgtggatcctatac

SEQ ID NO: 20746 - DNA, 25 bp, Homo sapien
ggaagactagatctggatcctatac

SEQ ID NO: 20747 - DNA, 25 bp, Homo sapien
gttctagtacaacaagaagtccttc

SEQ ID NO: 20748 - DNA, 25 bp, Homo sapien
gttctagtacaagaagaagtccttc

SEQ ID NO: 20749 - DNA, 25 bp, Homo sapien
ggatttcaaacgtacaacttacttg

SEQ ID NO: 20750 - DNA, 25 bp, Homo sapien
ggatttcaaacgaacaacttacttg

SEQ ID NO: 20751 - DNA, 25 bp, Homo sapien
acgggatcactagaaagactttata

SEQ ID NO: 20752 - DNA, 25 bp, Homo sapien
acgggatcactacaaagactttata

SEQ ID NO: 20753 - DNA, 25 bp, Homo sapien
agtctgctcgcctatttactaaagg

SEQ ID NO: 20754 - DNA, 25 bp, Homo sapien
agtctgctcgccaatttactaaagg

SEQ ID NO: 20755 - DNA, 25 bp, Homo sapien
gaataaatccctacctttgaagagt

SEQ ID NO: 20756 - DNA, 25 bp, Homo sapien
gaataaatcccttcctttgaagagt

SEQ ID NO: 20757 - DNA, 25 bp, Homo sapien
ttttagatccctcctttaagttgtg

SEQ ID NO: 20758 - DNA, 25 bp, Homo sapien
ttttagatccctgctttaagttgtg

SEQ ID NO: 20759 - DNA, 25 bp, Homo sapien
ctgttatttgtcgattcgatgactg

SEQ ID NO: 20760 - DNA, 25 bp, Homo sapien
ctgttatttgtccattcgatgactg

SEQ ID NO: 20761 - DNA, 25 bp, Homo sapien
ctttttgtcgacctaggtaaagatt

SEQ ID NO: 20762 - DNA, 25 bp, Homo sapien
ctttttgtcgacgtaggtaaagatt

SEQ ID NO: 20763 - DNA, 25 bp, Homo sapien
tctgtggaagactaacgtgtctaat

SEQ ID NO: 20764 - DNA, 25 bp, Homo sapien
tctgtggaagacaaacgtgtctaat

SEQ ID NO: 20765 - DNA, 25 bp, Homo sapien
gtccgagagaagacccgttactaag

SEQ ID NO: 20766 - DNA, 25 bp, Homo sapien
gtccgagagaagtcccgttactaag

SEQ ID NO: 20767 - DNA, 25 bp, Homo sapien
ccgaagaacgggtactagtagtaca

SEQ ID NO: 20768 - DNA, 25 bp, Homo sapien
ccgaagaacgggaactagtagtaca

SEQ ID NO: 20769 - DNA, 25 bp, Homo sapien
ttgtacggtgaaaccgaacatataa

SEQ ID NO: 20770 - DNA, 25 bp, Homo sapien
ttgtacggtgaatccgaacatataa

SEQ ID NO: 20771 - DNA, 25 bp, Homo sapien
ccgtcaaattctctgggccagagag

SEQ ID NO: 20772 - DNA, 25 bp, Homo sapien
ccgtcaaattctgtgggccagagag

SEQ ID NO: 20773 - DNA, 25 bp, Homo sapien
gtcaaattgagaagagcacacaaca

SEQ ID NO: 20774 - DNA, 25 bp, Homo sapien
gtcaaattgagatgagcacacaaca

SEQ ID NO: 20775 - DNA, 25 bp, Homo sapien
gtgcgacaggggaaactgaaaccca

SEQ ID NO: 20776 - DNA, 25 bp, Homo sapien
gtgcgacaggggtaactgaaaccca

SEQ ID NO: 20777 - DNA, 25 bp, Homo sapien
gacccgccggctgtagaaccagaac

SEQ ID NO: 20778 - DNA, 25 bp, Homo sapien
gacccgccggctctagaaccagaac

SEQ ID NO: 20779 - DNA, 25 bp, Homo sapien
gccacgggctcttcgcgaacaggaa

SEQ ID NO: 20780 - DNA, 25 bp, Homo sapien
gccacgggctctacgcgaacaggaa

SEQ ID NO: 20781 - DNA, 25 bp, Homo sapien
gacccgaggactcacaaccaagaag

SEQ ID NO: 20782 - DNA, 25 bp, Homo sapien
gacccgaggactgacaaccaagaag

SEQ ID NO: 20783 - DNA, 25 bp, Homo sapien
accgaaggagggactcctcgtagag

SEQ ID NO: 20784 - DNA, 25 bp, Homo sapien
accgaaggagggtctcctcgtagag

SEQ ID NO: 20785 - DNA, 25 bp, Homo sapien
cccgctgaagaagtggtcctcttgg

SEQ ID NO: 20786 - DNA, 25 bp, Homo sapien
cccgctgaagaactggtcctcttgg

SEQ ID NO: 20787 - DNA, 25 bp, Homo sapien
gtcttagcaaatactgtactacgac

SEQ ID NO: 20788 - DNA, 25 bp, Homo sapien
gtcttagcaaattctgtactacgac

SEQ ID NO: 20789 - DNA, 25 bp, Homo sapien
ggtcaatcacaaacgtaatagtcga

SEQ ID NO: 20790 - DNA, 25 bp, Homo sapien
ggtcaatcacaatcgtaatagtcga

SEQ ID NO: 20791 - DNA, 25 bp, Homo sapien
gagtgggtaccgttccaagtaccgc

SEQ ID NO: 20792 - DNA, 25 bp, Homo sapien
gagtgggtaccgatccaagtaccgc

SEQ ID NO: 20793 - DNA, 25 bp, Homo sapien
ccacggtggacccgtggaccccgac

SEQ ID NO: 20794 - DNA, 25 bp, Homo sapien
ccacggtggaccggtggaccccgac

SEQ ID NO: 20795 - DNA, 25 bp, Homo sapien
agtagggacttctgcaccgaccgta

SEQ ID NO: 20796 - DNA, 25 bp, Homo sapien
agtagggacttcagcaccgaccgta

SEQ ID NO: 20797 - DNA, 25 bp, Homo sapien
acgtgattacagtgtcacagtctgt

SEQ ID NO: 20798 - DNA, 25 bp, Homo sapien
acgtgattacagagtcacagtctgt

SEQ ID NO: 20799 - DNA, 25 bp, Homo sapien
tcacgaccctaatgtccgcactcgg

SEQ ID NO: 20800 - DNA, 25 bp, Homo sapien
tcacgaccctaaagtccgcactcgg

SEQ ID NO: 20801 - DNA, 25 bp, Homo sapien
cgtcccgtccaagagggacggtctt

SEQ ID NO: 20802 - DNA, 25 bp, Homo sapien
cgtcccgtccaacagggacggtctt

SEQ ID NO: 20803 - DNA, 25 bp, Homo sapien
tcccggcacatcaacaagaggtctt

SEQ ID NO: 20804 - DNA, 25 bp, Homo sapien
tcccggcacatctacaagaggtctt

SEQ ID NO: 20805 - DNA, 25 bp, Homo sapien
gttttcgtgtcctcaaaagatgttt

SEQ ID NO: 20806 - DNA, 25 bp, Homo sapien
gttttcgtgtccacaaaagatgttt

SEQ ID NO: 20807 - DNA, 25 bp, Homo sapien
ttttagtccgggagaacgagactta

SEQ ID NO: 20808 - DNA, 25 bp, Homo sapien
ttttagtccgggtgaacgagactta

SEQ ID NO: 20809 - DNA, 25 bp, Homo sapien
tcgtcgctggcgtcgaggtcactga

SEQ ID NO: 20810 - DNA, 25 bp, Homo sapien
tcgtcgctggcgacgaggtcactga

SEQ ID NO: 20811 - DNA, 25 bp, Homo sapien
accctcaaagtcatcgtgtcacagg

SEQ ID NO: 20812 - DNA, 25 bp, Homo sapien
accctcaaagtcttcgtgtcacagg

SEQ ID NO: 20813 - DNA, 25 bp, Homo sapien
cccccagggactcgtagtcgggacg

SEQ ID NO: 20814 - DNA, 25 bp, Homo sapien
cccccagggactggtagtcgggacg

SEQ ID NO: 20815 - DNA, 25 bp, Homo sapien
tcacggtgtgacaggtagtcggcct

SEQ ID NO: 20816 - DNA, 25 bp, Homo sapien
tcacggtgtgactggtagtcggcct

SEQ ID NO: 20817 - DNA, 25 bp, Homo sapien
gtgatcaatgtcagagcggctccag

SEQ ID NO: 20818 - DNA, 25 bp, Homo sapien
gtgatcaatgtctgagcggctccag

SEQ ID NO: 20819 - DNA, 25 bp, Homo sapien
ctagttaaagacttaggggtacctt

SEQ ID NO: 20820 - DNA, 25 bp, Homo sapien
ctagttaaagacataggggtacctt

SEQ ID NO: 20821 - DNA, 25 bp, Homo sapien
tcaggaagaaacaggacggtccgtg

SEQ ID NO: 20822 - DNA, 25 bp, Homo sapien
tcaggaagaaactggacggtccgtg

SEQ ID NO: 20823 - DNA, 25 bp, Homo sapien
acggaagagaaaacagtactgttcc

SEQ ID NO: 20824 - DNA, 25 bp, Homo sapien
acggaagagaaatcagtactgttcc

SEQ ID NO: 20825 - DNA, 25 bp, Homo sapien
gaggtgaactctcagtggacttcaa

SEQ ID NO: 20826 - DNA, 25 bp, Homo sapien
gaggtgaactctgagtggacttcaa

SEQ ID NO: 20827 - DNA, 25 bp, Homo sapien
gacagggatcttacgtgtggtccca

SEQ ID NO: 20828 - DNA, 25 bp, Homo sapien
gacagggatctttcgtgtggtccca

SEQ ID NO: 20829 - DNA, 25 bp, Homo sapien
tctgggattgtcttccctacactcc

SEQ ID NO: 20830 - DNA, 25 bp, Homo sapien
tctgggattgtcatccctacactcc

SEQ ID NO: 20831 - DNA, 25 bp, Homo sapien
ttgggtttgtaatcaccacacctct

SEQ ID NO: 20832 - DNA, 25 bp, Homo sapien
ttgggtttgtaaacaccacacctct

SEQ ID NO: 20833 - DNA, 25 bp, Homo sapien
gtgggtctcactctacgtacaaccc

SEQ ID NO: 20834 - DNA, 25 bp, Homo sapien
gtgggtctcactgtacgtacaaccc

SEQ ID NO: 20835 - DNA, 25 bp, Homo sapien
gttcgttcgttactacttgacacat

SEQ ID NO: 20836 - DNA, 25 bp, Homo sapien
gttcgttcgttagtacttgacacat

SEQ ID NO: 20837 - DNA, 25 bp, Homo sapien
tgttacgattacttgtcttctcaac

SEQ ID NO: 20838 - DNA, 25 bp, Homo sapien
tgttacgattacatgtcttctcaac

SEQ ID NO: 20839 - DNA, 25 bp, Homo sapien
gtcacgatgtacttcttgacaacct

SEQ ID NO: 20840 - DNA, 25 bp, Homo sapien
gtcacgatgtacatcttgacaacct

SEQ ID NO: 20841 - DNA, 25 bp, Homo sapien
gtgacgtatgtatcctatgtcttcc

SEQ ID NO: 20842 - DNA, 25 bp, Homo sapien
gtgacgtatgtaacctatgtcttcc

SEQ ID NO: 20843 - DNA, 25 bp, Homo sapien
cgtcacgacttagtgagaccctcct

SEQ ID NO: 20844 - DNA, 25 bp, Homo sapien
cgtcacgacttactgagaccctcct

SEQ ID NO: 20845 - DNA, 25 bp, Homo sapien
cctacatgaggtagtacccgtcgtc

SEQ ID NO: 20846 - DNA, 25 bp, Homo sapien
cctacatgaggttgtacccgtcgtc

SEQ ID NO: 20847 - DNA, 25 bp, Homo sapien
ccgtaaccagggttgccacgtgtat

SEQ ID NO: 20848 - DNA, 25 bp, Homo sapien
ccgtaaccagggatgccacgtgtat

SEQ ID NO: 20849 - DNA, 25 bp, Homo sapien
ggcgtgactcctgagccggacctga

SEQ ID NO: 20850 - DNA, 25 bp, Homo sapien
ggcgtgactcctcagccggacctga

SEQ ID NO: 20851 - DNA, 25 bp, Homo sapien
acaaagtgtttcacaagtaatctga

SEQ ID NO: 20852 - DNA, 25 bp, Homo sapien
acaaagtgtttctcaagtaatctga

SEQ ID NO: 20853 - DNA, 25 bp, Homo sapien
caggactctcaggtcaaacatagac

SEQ ID NO: 20854 - DNA, 25 bp, Homo sapien
caggactctcagctcaaacatagac

SEQ ID NO: 20855 - DNA, 25 bp, Homo sapien
taccgccactggcagaacgcgaacc

SEQ ID NO: 20856 - DNA, 25 bp, Homo sapien
taccgccactgggagaacgcgaacc

SEQ ID NO: 20857 - DNA, 25 bp, Homo sapien
tcgggactcctaaagggtcgaacac

SEQ ID NO: 20858 - DNA, 25 bp, Homo sapien
tcgggactcctatagggtcgaacac

SEQ ID NO: 20859 - DNA, 25 bp, Homo sapien
cgagtgacataccaaaatagttata

SEQ ID NO: 20860 - DNA, 25 bp, Homo sapien
cgagtgacatacgaaaatagttata

SEQ ID NO: 20861 - DNA, 25 bp, Homo sapien
gtgtcgtcggtggagacaaagatca

SEQ ID NO: 20862 - DNA, 25 bp, Homo sapien
gtgtcgtcggtgcagacaaagatca

SEQ ID NO: 20863 - DNA, 25 bp, Homo sapien
agccacgggagtagtaacagactca

SEQ ID NO: 20864 - DNA, 25 bp, Homo sapien
agccacgggagttgtaacagactca

SEQ ID NO: 20865 - DNA, 25 bp, Homo sapien
agctactgtgggaacgtgagacaca

SEQ ID NO: 20866 - DNA, 25 bp, Homo sapien
agctactgtgggtacgtgagacaca

SEQ ID NO: 20867 - DNA, 25 bp, Homo sapien
agcacgtcgagtgcttatgacgcaa

SEQ ID NO: 20868 - DNA, 25 bp, Homo sapien
agcacgtcgagtccttatgacgcaa

SEQ ID NO: 20869 - DNA, 25 bp, Homo sapien
taccgtcgagtgacatcgtccacga

SEQ ID NO: 20870 - DNA, 25 bp, Homo sapien
taccgtcgagtgtcatcgtccacga

SEQ ID NO: 20871 - DNA, 25 bp, Homo sapien
atattagttagtccaacgtctaaga

SEQ ID NO: 20872 - DNA, 25 bp, Homo sapien
atattagttagtgcaacgtctaaga

SEQ ID NO: 20873 - DNA, 25 bp, Homo sapien
ctgatctaggtctgcggtctgaaac

SEQ ID NO: 20874 - DNA, 25 bp, Homo sapien
ctgatctaggtcagcggtctgaaac

SEQ ID NO: 20875 - DNA, 25 bp, Homo sapien
ctgctgtcacgaagggttcgaaagt

SEQ ID NO: 20876 - DNA, 25 bp, Homo sapien
ctgctgtcacgatgggttcgaaagt

SEQ ID NO: 20877 - DNA, 25 bp, Homo sapien
cctaccactcctggtgcgaggaaag

SEQ ID NO: 20878 - DNA, 25 bp, Homo sapien
cctaccactcctcgtgcgaggaaag

SEQ ID NO: 20879 - DNA, 25 bp, Homo sapien
tcccataaaacgttccgagatagta

SEQ ID NO: 20880 - DNA, 25 bp, Homo sapien
tcccataaaacgatccgagatagta

SEQ ID NO: 20881 - DNA, 25 bp, Homo sapien
acacactaagagtaccgccttcctg

SEQ ID NO: 20882 - DNA, 25 bp, Homo sapien
acacactaagagaaccgccttcctg

SEQ ID NO: 20883 - DNA, 25 bp, Homo sapien
ctcacacgactctcgacatgtcttg

SEQ ID NO: 20884 - DNA, 25 bp, Homo sapien
ctcacacgactcacgacatgtcttg

SEQ ID NO: 20885 - DNA, 25 bp, Homo sapien
acccgcactcgacgtccttcgtgta

SEQ ID NO: 20886 - DNA, 25 bp, Homo sapien
acccgcactcgaggtccttcgtgta

SEQ ID NO: 20887 - DNA, 25 bp, Homo sapien
tctcgcccttcgataggtcttcaga

SEQ ID NO: 20888 - DNA, 25 bp, Homo sapien
tctcgcccttcgttaggtcttcaga

SEQ ID NO: 20889 - DNA, 25 bp, Homo sapien
ctgtctcctctttttagggttcaca

SEQ ID NO: 20890 - DNA, 25 bp, Homo sapien
ctgtctcctcttattagggttcaca

SEQ ID NO: 20891 - DNA, 25 bp, Homo sapien
ttctggtcgtcatagggtatactaa

SEQ ID NO: 20892 - DNA, 25 bp, Homo sapien
ttctggtcgtcaaagggtatactaa

SEQ ID NO: 20893 - DNA, 25 bp, Homo sapien
agtctacccacctgaatgggtcttt

SEQ ID NO: 20894 - DNA, 25 bp, Homo sapien
agtctacccaccagaatgggtcttt

SEQ ID NO: 20895 - DNA, 25 bp, Homo sapien
aaccctcacgacagccaaggtcttt

SEQ ID NO: 20896 - DNA, 25 bp, Homo sapien
aaccctcacgactgccaaggtcttt

SEQ ID NO: 20897 - DNA, 25 bp, Homo sapien
gctagacgatcgatgtgtaatcctg

SEQ ID NO: 20898 - DNA, 25 bp, Homo sapien
gctagacgatcgttgtgtaatcctg

SEQ ID NO: 20899 - DNA, 25 bp, Homo sapien
accccgttagtctcctactttgtag

SEQ ID NO: 20900 - DNA, 25 bp, Homo sapien
accccgttagtcacctactttgtag

SEQ ID NO: 20901 - DNA, 25 bp, Homo sapien
acctttacgagaccacttcgacgac

SEQ ID NO: 20902 - DNA, 25 bp, Homo sapien
acctttacgagagcacttcgacgac

SEQ ID NO: 20903 - DNA, 25 bp, Homo sapien
gtcggtatactaaagcgtctgcgga

SEQ ID NO: 20904 - DNA, 25 bp, Homo sapien
gtcggtatactatagcgtctgcgga

SEQ ID NO: 20905 - DNA, 25 bp, Homo sapien
gccacccgtgacataggtgtcttta

SEQ ID NO: 20906 - DNA, 25 bp, Homo sapien
gccacccgtgacttaggtgtcttta

SEQ ID NO: 20907 - DNA, 25 bp, Homo sapien
tcctacctcaacgtcttgtcttagg

SEQ ID NO: 20908 - DNA, 25 bp, Homo sapien
tcctacctcaacctcttgtcttagg

SEQ ID NO: 20909 - DNA, 25 bp, Homo sapien
agaacgtccgagtgtcacacttgta

SEQ ID NO: 20910 - DNA, 25 bp, Homo sapien
agaacgtccgagagtcacacttgta

SEQ ID NO: 20911 - DNA, 25 bp, Homo sapien
aaggggaacccatactggtttcgac

SEQ ID NO: 20912 - DNA, 25 bp, Homo sapien
aaggggaacccaaactggtttcgac

SEQ ID NO: 20913 - DNA, 25 bp, Homo sapien
tgcgggacaaagaaacttaaaccta

SEQ ID NO: 20914 - DNA, 25 bp, Homo sapien
tgcgggacaaagtaacttaaaccta

SEQ ID NO: 20915 - DNA, 25 bp, Homo sapien
ccgaatttcgacgactgtaaactta

SEQ ID NO: 20916 - DNA, 25 bp, Homo sapien
ccgaatttcgaccactgtaaactta

SEQ ID NO: 20917 - DNA, 25 bp, Homo sapien
aacattattttcacaggagtcaaga

SEQ ID NO: 20918 - DNA, 25 bp, Homo sapien
aacattattttctcaggagtcaaga

SEQ ID NO: 20919 - DNA, 25 bp, Homo sapien
cgaatgttttcactgatgacgaaga

SEQ ID NO: 20920 - DNA, 25 bp, Homo sapien
cgaatgttttcagtgatgacgaaga

SEQ ID NO: 20921 - DNA, 25 bp, Homo sapien
gaaattacctctcctgcaatactgg

SEQ ID NO: 20922 - DNA, 25 bp, Homo sapien
gaaattacctctgctgcaatactgg

SEQ ID NO: 20923 - DNA, 25 bp, Homo sapien
tatgaccttctcctgtagactacct

SEQ ID NO: 20924 - DNA, 25 bp, Homo sapien
tatgaccttctcgtgtagactacct

SEQ ID NO: 20925 - DNA, 25 bp, Homo sapien
actgttaaagttgttcccatgttta

SEQ ID NO: 20926 - DNA, 25 bp, Homo sapien
actgttaaagttcttcccatgttta

SEQ ID NO: 20927 - DNA, 25 bp, Homo sapien
ccatgtcgagacagtcgacaaccgc

SEQ ID NO: 20928 - DNA, 25 bp, Homo sapien
ccatgtcgagactgtcgacaaccgc

SEQ ID NO: 20929 - DNA, 25 bp, Homo sapien
ttttgtcgtagtatatcgtgtcgtc

SEQ ID NO: 20930 - DNA, 25 bp, Homo sapien
ttttgtcgtagtttatcgtgtcgtc

SEQ ID NO: 20931 - DNA, 25 bp, Homo sapien
tcttcttgttacgatctgtggtact

SEQ ID NO: 20932 - DNA, 25 bp, Homo sapien
tcttcttgttaccatctgtggtact

SEQ ID NO: 20933 - DNA, 25 bp, Homo sapien
tatctcggtatatacttgtctctcg

SEQ ID NO: 20934 - DNA, 25 bp, Homo sapien
tatctcggtataaacttgtctctcg

SEQ ID NO: 20935 - DNA, 25 bp, Homo sapien
gtctttgtgactaattttactactg

SEQ ID NO: 20936 - DNA, 25 bp, Homo sapien
gtctttgtgacttattttactactg

SEQ ID NO: 20937 - DNA, 25 bp, Homo sapien
tacaactaaccgtgcgaaaggccgc

SEQ ID NO: 20938 - DNA, 25 bp, Homo sapien
tacaactaaccgagcgaaaggccgc

SEQ ID NO: 20939 - DNA, 25 bp, Homo sapien
cggcctaataacgacgttgaccgtt

SEQ ID NO: 20940 - DNA, 25 bp, Homo sapien
cggcctaataaccacgttgaccgtt

SEQ ID NO: 20941 - DNA, 25 bp, Homo sapien
caccgagagtcagaagaatccgtcg

SEQ ID NO: 20942 - DNA, 25 bp, Homo sapien
caccgagagtcacaagaatccgtcg

SEQ ID NO: 20943 - DNA, 25 bp, Homo sapien
tatcatgtcctatcctagtttcgtg

SEQ ID NO: 20944 - DNA, 25 bp, Homo sapien
tatcatgtcctaacctagtttcgtg

SEQ ID NO: 20945 - DNA, 25 bp, Homo sapien
gcttctctagactctactattgtcg

SEQ ID NO: 20946 - DNA, 25 bp, Homo sapien
gcttctctagacactactattgtcg

SEQ ID NO: 20947 - DNA, 25 bp, Homo sapien
aaccacgtctctaccaaggacttcg

SEQ ID NO: 20948 - DNA, 25 bp, Homo sapien
aaccacgtctcttccaaggacttcg

SEQ ID NO: 20949 - DNA, 25 bp, Homo sapien
aacacgaccctctttgcacagtcga

SEQ ID NO: 20950 - DNA, 25 bp, Homo sapien
aacacgaccctcattgcacagtcga

SEQ ID NO: 20951 - DNA, 25 bp, Homo sapien
gtctctcgatgttctctccatagac

SEQ ID NO: 20952 - DNA, 25 bp, Homo sapien
gtctctcgatgtactctccatagac

SEQ ID NO: 20953 - DNA, 25 bp, Homo sapien
ttgtgacgattaatcctccgacgac

SEQ ID NO: 20954 - DNA, 25 bp, Homo sapien
ttgtgacgattattcctccgacgac

SEQ ID NO: 20955 - DNA, 25 bp, Homo sapien
tatgtcgtcccatgttaccatcacg

SEQ ID NO: 20956 - DNA, 25 bp, Homo sapien
tatgtcgtcccaagttaccatcacg

SEQ ID NO: 20957 - DNA, 25 bp, Homo sapien
gacgtcggcctgttgtcagaagagt

SEQ ID NO: 20958 - DNA, 25 bp, Homo sapien
gacgtcggcctgatgtcagaagagt

SEQ ID NO: 20959 - DNA, 25 bp, Homo sapien
cgtcggtcgcttggtcgtgtaggaa

SEQ ID NO: 20960 - DNA, 25 bp, Homo sapien
cgtcggtcgcttcgtcgtgtaggaa

SEQ ID NO: 20961 - DNA, 25 bp, Homo sapien
gaggagtgctttctcgtcgagcgcc

SEQ ID NO: 20962 - DNA, 25 bp, Homo sapien
gaggagtgctttgtcgtcgagcgcc

SEQ ID NO: 20963 - DNA, 25 bp, Homo sapien
aggtcgtcccttcctccggagttag

SEQ ID NO: 20964 - DNA, 25 bp, Homo sapien
aggtcgtcccttgctccggagttag

SEQ ID NO: 20965 - DNA, 25 bp, Homo sapien
aagtcgtaccacactgaagagatta

SEQ ID NO: 20966 - DNA, 25 bp, Homo sapien
aagtcgtaccactctgaagagatta

SEQ ID NO: 20967 - DNA, 25 bp, Homo sapien
gtgtcacttttattacgtacagtca

SEQ ID NO: 20968 - DNA, 25 bp, Homo sapien
gtgtcacttttaatacgtacagtca

SEQ ID NO: 20969 - DNA, 25 bp, Homo sapien
cctacatccgtgacctgtcgtcgtt

SEQ ID NO: 20970 - DNA, 25 bp, Homo sapien
cctacatccgtgtcctgtcgtcgtt

SEQ ID NO: 20971 - DNA, 25 bp, Homo sapien
atttcggtccggtcactctgtatct

SEQ ID NO: 20972 - DNA, 25 bp, Homo sapien
atttcggtccggacactctgtatct

SEQ ID NO: 20973 - DNA, 25 bp, Homo sapien
ttcgggtctcgaaacgcctcgatgt

SEQ ID NO: 20974 - DNA, 25 bp, Homo sapien
ttcgggtctcgatacgcctcgatgt

SEQ ID NO: 20975 - DNA, 25 bp, Homo sapien
gtcgtattttcgaaacgtcctcata

SEQ ID NO: 20976 - DNA, 25 bp, Homo sapien
gtcgtattttcgtaacgtcctcata

SEQ ID NO: 20977 - DNA, 25 bp, Homo sapien
ctctgtaaatggtgtattctttcgt

SEQ ID NO: 20978 - DNA, 25 bp, Homo sapien
ctctgtaaatggagtattctttcgt

SEQ ID NO: 20979 - DNA, 25 bp, Homo sapien
ttcagttgtttggagaaccttgtac

SEQ ID NO: 20980 - DNA, 25 bp, Homo sapien
ttcagttgtttgcagaaccttgtac

SEQ ID NO: 20981 - DNA, 25 bp, Homo sapien
agactatgacatagagactttttac

SEQ ID NO: 20982 - DNA, 25 bp, Homo sapien
agactatgacattgagactttttac

SEQ ID NO: 20983 - DNA, 25 bp, Homo sapien
tcactaaaggtaacgcgttgtttgt

SEQ ID NO: 20984 - DNA, 25 bp, Homo sapien
tcactaaaggtatcgcgttgtttgt

SEQ ID NO: 20985 - DNA, 25 bp, Homo sapien
ttaaaaacgttacgttctcgtttgt

SEQ ID NO: 20986 - DNA, 25 bp, Homo sapien
ttaaaaacgttaggttctcgtttgt

SEQ ID NO: 20987 - DNA, 25 bp, Homo sapien
aaaacaggtccgtactcttatagtg

SEQ ID NO: 20988 - DNA, 25 bp, Homo sapien
aaaacaggtccgaactcttatagtg

SEQ ID NO: 20989 - DNA, 25 bp, Homo sapien
atgtagtttgtacctctgtcgtgag

SEQ ID NO: 20990 - DNA, 25 bp, Homo sapien
atgtagtttgtagctctgtcgtgag

SEQ ID NO: 20991 - DNA, 25 bp, Homo sapien
atgtatcacgtaagtatcacctgtc

SEQ ID NO: 20992 - DNA, 25 bp, Homo sapien
atgtatcacgtatgtatcacctgtc

SEQ ID NO: 20993 - DNA, 25 bp, Homo sapien
ggagcgtgcatttaagtataccgta

SEQ ID NO: 20994 - DNA, 25 bp, Homo sapien
ggagcgtgcattaaagtataccgta

SEQ ID NO: 20995 - DNA, 25 bp, Homo sapien
aggtacgtagacatttattaccaga

SEQ ID NO: 20996 - DNA, 25 bp, Homo sapien
aggtacgtagacttttattaccaga

SEQ ID NO: 20997 - DNA, 25 bp, Homo sapien
gtggttcacctgtctgtacgtaaga

SEQ ID NO: 20998 - DNA, 25 bp, Homo sapien
gtggttcacctgactgtacgtaaga

SEQ ID NO: 20999 - DNA, 25 bp, Homo sapien
aaggtgaaatcttttactagcgaat

SEQ ID NO: 21000 - DNA, 25 bp, Homo sapien
aaggtgaaatctattactagcgaat

SEQ ID NO: 21001 - DNA, 25 bp, Homo sapien
ctgacaactcttgtctacgtcggtt

SEQ ID NO: 21002 - DNA, 25 bp, Homo sapien
ctgacaactcttctctacgtcggtt

SEQ ID NO: 21003 - DNA, 25 bp, Homo sapien
aaaaattctcgttttgtctctactt

SEQ ID NO: 21004 - DNA, 25 bp, Homo sapien
aaaaattctcgtattgtctctactt

SEQ ID NO: 21005 - DNA, 25 bp, Homo sapien
aaaatatctctctgtctttctgtta

SEQ ID NO: 21006 - DNA, 25 bp, Homo sapien
aaaatatctctcagtctttctgtta

SEQ ID NO: 21007 - DNA, 25 bp, Homo sapien
attcgctcagtcattatgtcgtcgt

SEQ ID NO: 21008 - DNA, 25 bp, Homo sapien
attcgctcagtctttatgtcgtcgt

SEQ ID NO: 21009 - DNA, 25 bp, Homo sapien
tcggagcagtcctctccgaatcggt

SEQ ID NO: 21010 - DNA, 25 bp, Homo sapien
tcggagcagtccactccgaatcggt

SEQ ID NO: 21011 - DNA, 25 bp, Homo sapien
gtagagatcccgaactcggacccgg

SEQ ID NO: 21012 - DNA, 25 bp, Homo sapien
gtagagatcccgtactcggacccgg

SEQ ID NO: 21013 - DNA, 25 bp, Homo sapien
acgtctgtacggaccactaccacta

SEQ ID NO: 21014 - DNA, 25 bp, Homo sapien
acgtctgtacggtccactaccacta

SEQ ID NO: 21015 - DNA, 25 bp, Homo sapien
ggctctttgttctgtcacgaacact

SEQ ID NO: 21016 - DNA, 25 bp, Homo sapien
ggctctttgttcagtcacgaacact

SEQ ID NO: 21017 - DNA, 25 bp, Homo sapien
cgaccttatgtctgaaacgttatat

SEQ ID NO: 21018 - DNA, 25 bp, Homo sapien
cgaccttatgtcagaaacgttatat

SEQ ID NO: 21019 - DNA, 25 bp, Homo sapien
ccacctgactttactgacgacggaa

SEQ ID NO: 21020 - DNA, 25 bp, Homo sapien
ccacctgacttttctgacgacggaa

SEQ ID NO: 21021 - DNA, 25 bp, Homo sapien
gtcgtactaccttctgacgagggac

SEQ ID NO: 21022 - DNA, 25 bp, Homo sapien
gtcgtactacctactgacgagggac

SEQ ID NO: 21023 - DNA, 25 bp, Homo sapien
gtcgtacactgtcagttctcccgac

SEQ ID NO: 21024 - DNA, 25 bp, Homo sapien
gtcgtacactgtgagttctcccgac

SEQ ID NO: 21025 - DNA, 25 bp, Homo sapien
gtaggacgtcgtaacttcccgcact

SEQ ID NO: 21026 - DNA, 25 bp, Homo sapien
gtaggacgtcgttacttcccgcact

SEQ ID NO: 21027 - DNA, 25 bp, Homo sapien
ttgacggtgtcttcttacacatcag

SEQ ID NO: 21028 - DNA, 25 bp, Homo sapien
ttgacggtgtctacttacacatcag

SEQ ID NO: 21029 - DNA, 25 bp, Homo sapien
tttaagatcgtgaatcagtactatc

SEQ ID NO: 21030 - DNA, 25 bp, Homo sapien
tttaagatcgtgtatcagtactatc

SEQ ID NO: 21031 - DNA, 25 bp, Homo sapien
tctaagtgtgtaaacgtatcgttac

SEQ ID NO: 21032 - DNA, 25 bp, Homo sapien
tctaagtgtgtatacgtatcgttac

SEQ ID NO: 21033 - DNA, 25 bp, Homo sapien
gtcagcgacccatcactccgagtgt

SEQ ID NO: 21034 - DNA, 25 bp, Homo sapien
gtcagcgacccaacactccgagtgt

SEQ ID NO: 21035 - DNA, 25 bp, Homo sapien
tacctcagtgcgaggacggccgcct

SEQ ID NO: 21036 - DNA, 25 bp, Homo sapien
tacctcagtgcgtggacggccgcct

SEQ ID NO: 21037 - DNA, 25 bp, Homo sapien
aaatccaggtggaactgctacgccg

SEQ ID NO: 21038 - DNA, 25 bp, Homo sapien
aaatccaggtggtactgctacgccg

SEQ ID NO: 21039 - DNA, 25 bp, Homo sapien
ggaggtcctaggtgaccgtgtttcc

SEQ ID NO: 21040 - DNA, 25 bp, Homo sapien
ggaggtcctaggagaccgtgtttcc

SEQ ID NO: 21041 - DNA, 25 bp, Homo sapien
ggagacccgaaaggaggatctcccg

SEQ ID NO: 21042 - DNA, 25 bp, Homo sapien
ggagacccgaaacgaggatctcccg

SEQ ID NO: 21043 - DNA, 25 bp, Homo sapien
gagacgaccggaaggccacggtccc

SEQ ID NO: 21044 - DNA, 25 bp, Homo sapien
gagacgaccggatggccacggtccc

SEQ ID NO: 21045 - DNA, 25 bp, Homo sapien
aagaccggaaactccaccgcgacgt

SEQ ID NO: 21046 - DNA, 25 bp, Homo sapien
aagaccggaaacaccaccgcgacgt

SEQ ID NO: 21047 - DNA, 25 bp, Homo sapien
acaagtcctcttattgcgtcaggag

SEQ ID NO: 21048 - DNA, 25 bp, Homo sapien
acaagtcctctttttgcgtcaggag

SEQ ID NO: 21049 - DNA, 25 bp, Homo sapien
taaagaaaccgaatgtcctctctga

SEQ ID NO: 21050 - DNA, 25 bp, Homo sapien
taaagaaaccgattgtcctctctga

SEQ ID NO: 21051 - DNA, 25 bp, Homo sapien
gtactatttaaagactatgttccaa

SEQ ID NO: 21052 - DNA, 25 bp, Homo sapien
gtactatttaaacactatgttccaa

SEQ ID NO: 21053 - DNA, 25 bp, Homo sapien
gtctgagacccatgttacgacacac

SEQ ID NO: 21054 - DNA, 25 bp, Homo sapien
gtctgagacccaagttacgacacac

SEQ ID NO: 21055 - DNA, 25 bp, Homo sapien
tgggagaccgaaagtagttacaact

SEQ ID NO: 21056 - DNA, 25 bp, Homo sapien
tgggagaccgaatgtagttacaact

SEQ ID NO: 21057 - DNA, 25 bp, Homo sapien
tctgaccgtgctaatgtatacaccc

SEQ ID NO: 21058 - DNA, 25 bp, Homo sapien
tctgaccgtgcttatgtatacaccc

SEQ ID NO: 21059 - DNA, 25 bp, Homo sapien
atcggtctcgggacggaccactccg

SEQ ID NO: 21060 - DNA, 25 bp, Homo sapien
atcggtctcgggtcggaccactccg

SEQ ID NO: 21061 - DNA, 25 bp, Homo sapien
gtctagtccccgtctgtcaagtccg

SEQ ID NO: 21062 - DNA, 25 bp, Homo sapien
gtctagtccccgactgtcaagtccg

SEQ ID NO: 21063 - DNA, 25 bp, Homo sapien
aacgccgacgcgaacgcgaagaacg

SEQ ID NO: 21064 - DNA, 25 bp, Homo sapien
aacgccgacgcgtacgcgaagaacg

SEQ ID NO: 21065 - DNA, 25 bp, Homo sapien
ccacgaccacttcagacacgacagg

SEQ ID NO: 21066 - DNA, 25 bp, Homo sapien
ccacgaccacttgagacacgacagg

SEQ ID NO: 21067 - DNA, 25 bp, Homo sapien
tgggggaaggctcctgtaagtaccc

SEQ ID NO: 21068 - DNA, 25 bp, Homo sapien
tgggggaaggctgctgtaagtaccc

SEQ ID NO: 21069 - DNA, 25 bp, Homo sapien
ggacgggaagtcccagcctctgtcc

SEQ ID NO: 21070 - DNA, 25 bp, Homo sapien
ggacgggaagtcgcagcctctgtcc

SEQ ID NO: 21071 - DNA, 25 bp, Homo sapien
gtcgtcgacccttgatatcgtccct

SEQ ID NO: 21072 - DNA, 25 bp, Homo sapien
gtcgtcgaccctagatatcgtccct

SEQ ID NO: 21073 - DNA, 25 bp, Homo sapien
gtcgtcgaccttaggtatccactcg

SEQ ID NO: 21074 - DNA, 25 bp, Homo sapien
gtcgtcgacctttggtatccactcg

SEQ ID NO: 21075 - DNA, 25 bp, Homo sapien
gtgtcgtccaaatgtcttacgttat

SEQ ID NO: 21076 - DNA, 25 bp, Homo sapien
gtgtcgtccaaaagtcttacgttat

SEQ ID NO: 21077 - DNA, 25 bp, Homo sapien
tctgtgtcatcaagttctgtatagt

SEQ ID NO: 21078 - DNA, 25 bp, Homo sapien
tctgtgtcatcatgttctgtatagt

SEQ ID NO: 21079 - DNA, 25 bp, Homo sapien
tgtgtctacttagagtcatctcctt

SEQ ID NO: 21080 - DNA, 25 bp, Homo sapien
tgtgtctacttacagtcatctcctt

SEQ ID NO: 21081 - DNA, 25 bp, Homo sapien
tgttcgtccgtccttcttcctctgt

SEQ ID NO: 21082 - DNA, 25 bp, Homo sapien
tgttcgtccgtcgttcttcctctgt

SEQ ID NO: 21083 - DNA, 25 bp, Homo sapien
tgacttttctagttacggactcatt

SEQ ID NO: 21084 - DNA, 25 bp, Homo sapien
tgacttttctagatacggactcatt

SEQ ID NO: 21085 - DNA, 25 bp, Homo sapien
gtctaatcgagtcttatagtatact

SEQ ID NO: 21086 - DNA, 25 bp, Homo sapien
gtctaatcgagtgttatagtatact

SEQ ID NO: 21087 - DNA, 25 bp, Homo sapien
tattggtctacttccgagattttta

SEQ ID NO: 21088 - DNA, 25 bp, Homo sapien
tattggtctactaccgagattttta

SEQ ID NO: 21089 - DNA, 25 bp, Homo sapien
tagtctgtgaccacaatgtttttat

SEQ ID NO: 21090 - DNA, 25 bp, Homo sapien
tagtctgtgacctcaatgtttttat

SEQ ID NO: 21091 - DNA, 25 bp, Homo sapien
aacagtcagtctggaattttcgaat

SEQ ID NO: 21092 - DNA, 25 bp, Homo sapien
aacagtcagtctcgaattttcgaat

SEQ ID NO: 21093 - DNA, 25 bp, Homo sapien
gctgtgtatctacgaaaactgaata

SEQ ID NO: 21094 - DNA, 25 bp, Homo sapien
gctgtgtatctaggaaaactgaata

SEQ ID NO: 21095 - DNA, 25 bp, Homo sapien
tgtttatattggaactcaccgaaga

SEQ ID NO: 21096 - DNA, 25 bp, Homo sapien
tgtttatattggtactcaccgaaga

SEQ ID NO: 21097 - DNA, 25 bp, Homo sapien
agtttttgtgaaagtgtcactcaac

SEQ ID NO: 21098 - DNA, 25 bp, Homo sapien
agtttttgtgaatgtgtcactcaac

SEQ ID NO: 21099 - DNA, 25 bp, Homo sapien
tacggttttgacaagtggtttcaac

SEQ ID NO: 21100 - DNA, 25 bp, Homo sapien
tacggttttgactagtggtttcaac

SEQ ID NO: 21101 - DNA, 25 bp, Homo sapien
gtttcgctagtaatgttttgtcaca

SEQ ID NO: 21102 - DNA, 25 bp, Homo sapien
gtttcgctagtattgttttgtcaca

SEQ ID NO: 21103 - DNA, 25 bp, Homo sapien
gattattacaacgacttctgtcgaa

SEQ ID NO: 21104 - DNA, 25 bp, Homo sapien
gattattacaaccacttctgtcgaa

SEQ ID NO: 21105 - DNA, 25 bp, Homo sapien
gttacagtgtcacaatgtacctttc

SEQ ID NO: 21106 - DNA, 25 bp, Homo sapien
gttacagtgtcagaatgtacctttc

SEQ ID NO: 21107 - DNA, 25 bp, Homo sapien
ggtcctatcccatatactctgtgtt

SEQ ID NO: 21108 - DNA, 25 bp, Homo sapien
ggtcctatcccaaatactctgtgtt

SEQ ID NO: 21109 - DNA, 25 bp, Homo sapien
ttgtctctcacctaagtatgttgta

SEQ ID NO: 21110 - DNA, 25 bp, Homo sapien
ttgtctctcaccaaagtatgttgta

SEQ ID NO: 21111 - DNA, 25 bp, Homo sapien
gtcttagagtattatcttgtgtctc

SEQ ID NO: 21112 - DNA, 25 bp, Homo sapien
gtcttagagtataatcttgtgtctc

SEQ ID NO: 21113 - DNA, 25 bp, Homo sapien
aactgtagtgtctcgcttgactcta

SEQ ID NO: 21114 - DNA, 25 bp, Homo sapien
aactgtagtgtcacgcttgactcta

SEQ ID NO: 21115 - DNA, 25 bp, Homo sapien
gaagtgtcttcttcactaggtgatc

SEQ ID NO: 21116 - DNA, 25 bp, Homo sapien
gaagtgtcttctacactaggtgatc

SEQ ID NO: 21117 - DNA, 25 bp, Homo sapien
actattttagacactactcgtctta

SEQ ID NO: 21118 - DNA, 25 bp, Homo sapien
actattttagactctactcgtctta

SEQ ID NO: 21119 - DNA, 25 bp, Homo sapien
agtcatgtttacgtcttttattacg

SEQ ID NO: 21120 - DNA, 25 bp, Homo sapien
agtcatgtttacctcttttattacg

SEQ ID NO: 21121 - DNA, 25 bp, Homo sapien
agattccgaactacgtcttatattg

SEQ ID NO: 21122 - DNA, 25 bp, Homo sapien
agattccgaacttcgtcttatattg

SEQ ID NO: 21123 - DNA, 25 bp, Homo sapien
gaagttacactttcgaaaagatcta

SEQ ID NO: 21124 - DNA, 25 bp, Homo sapien
gaagttacacttacgaaaagatcta

SEQ ID NO: 21125 - DNA, 25 bp, Homo sapien
gtctcatttacgttgacagaatact

SEQ ID NO: 21126 - DNA, 25 bp, Homo sapien
gtctcatttacgatgacagaatact

SEQ ID NO: 21127 - DNA, 25 bp, Homo sapien
gtgtacatctatcatgtcactgtcc

SEQ ID NO: 21128 - DNA, 25 bp, Homo sapien
gtgtacatctatgatgtcactgtcc

SEQ ID NO: 21129 - DNA, 25 bp, Homo sapien
ggtttccgtctctgtttcaccgtcc

SEQ ID NO: 21130 - DNA, 25 bp, Homo sapien
ggtttccgtctcagtttcaccgtcc

SEQ ID NO: 21131 - DNA, 25 bp, Homo sapien
gatcccgcgttcttagtcactgtca

SEQ ID NO: 21132 - DNA, 25 bp, Homo sapien
gatcccgcgttcatagtcactgtca

SEQ ID NO: 21133 - DNA, 25 bp, Homo sapien
ttacttgtcggtagttacgattaca

SEQ ID NO: 21134 - DNA, 25 bp, Homo sapien
ttacttgtcggttgttacgattaca

SEQ ID NO: 21135 - DNA, 25 bp, Homo sapien
aattttcgtcgaggttcacgttttc

SEQ ID NO: 21136 - DNA, 25 bp, Homo sapien
aattttcgtcgacgttcacgttttc

SEQ ID NO: 21137 - DNA, 25 bp, Homo sapien
ttcctatcggtgtgctagtaagtgt

SEQ ID NO: 21138 - DNA, 25 bp, Homo sapien
ttcctatcggtgagctagtaagtgt

SEQ ID NO: 21139 - DNA, 25 bp, Homo sapien
acagttccggtgaatagacgtcgat

SEQ ID NO: 21140 - DNA, 25 bp, Homo sapien
acagttccggtgtatagacgtcgat

SEQ ID NO: 21141 - DNA, 25 bp, Homo sapien
tcaaagtgagaggtaaacttcggac

SEQ ID NO: 21142 - DNA, 25 bp, Homo sapien
tcaaagtgagagctaaacttcggac

SEQ ID NO: 21143 - DNA, 25 bp, Homo sapien
agggattcttaaatgactccgtcaa

SEQ ID NO: 21144 - DNA, 25 bp, Homo sapien
agggattcttaattgactccgtcaa

SEQ ID NO: 21145 - DNA, 25 bp, Homo sapien
ccgtctgtcttttgtcctatacccg

SEQ ID NO: 21146 - DNA, 25 bp, Homo sapien
ccgtctgtctttagtcctatacccg

SEQ ID NO: 21147 - DNA, 25 bp, Homo sapien
ccccgtcttcgttgacgttgttgtc

SEQ ID NO: 21148 - DNA, 25 bp, Homo sapien
ccccgtcttcgtagacgttgttgtc

SEQ ID NO: 21149 - DNA, 25 bp, Homo sapien
cctcgagttctctgtggagcgcttc

SEQ ID NO: 21150 - DNA, 25 bp, Homo sapien
cctcgagttctcagtggagcgcttc

SEQ ID NO: 21151 - DNA, 25 bp, Homo sapien
aagtctctcgagtcccgtacgagct

SEQ ID NO: 21152 - DNA, 25 bp, Homo sapien
aagtctctcgagacccgtacgagct

SEQ ID NO: 21153 - DNA, 25 bp, Homo sapien
ctaaatcgtcgaaacagcagtacat

SEQ ID NO: 21154 - DNA, 25 bp, Homo sapien
ctaaatcgtcgatacagcagtacat

SEQ ID NO: 21155 - DNA, 25 bp, Homo sapien
cgaagaataacgacacccctgatac

SEQ ID NO: 21156 - DNA, 25 bp, Homo sapien
cgaagaataacgtcacccctgatac

SEQ ID NO: 21157 - DNA, 25 bp, Homo sapien
gtcacagattattccctacttgatg

SEQ ID NO: 21158 - DNA, 25 bp, Homo sapien
gtcacagattataccctacttgatg

SEQ ID NO: 21159 - DNA, 25 bp, Homo sapien
tagatattatacaacctacgggagg

SEQ ID NO: 21160 - DNA, 25 bp, Homo sapien
tagatattatactacctacgggagg

SEQ ID NO: 21161 - DNA, 25 bp, Homo sapien
gattatttcacccctcttactgtgt

SEQ ID NO: 21162 - DNA, 25 bp, Homo sapien
gattatttcaccgctcttactgtgt

SEQ ID NO: 21163 - DNA, 25 bp, Homo sapien
taagattccggttacgtgactcgta

SEQ ID NO: 21164 - DNA, 25 bp, Homo sapien
taagattccggtaacgtgactcgta

SEQ ID NO: 21165 - DNA, 25 bp, Homo sapien
agatacactccgtagtcattattgt

SEQ ID NO: 21166 - DNA, 25 bp, Homo sapien
agatacactccgaagtcattattgt

SEQ ID NO: 21167 - DNA, 25 bp, Homo sapien
attactatacggatcgaattttcgt

SEQ ID NO: 21168 - DNA, 25 bp, Homo sapien
attactatacggttcgaattttcgt

SEQ ID NO: 21169 - DNA, 25 bp, Homo sapien
tcgagttacactcatttactgtttg

SEQ ID NO: 21170 - DNA, 25 bp, Homo sapien
tcgagttacactgatttactgtttg

SEQ ID NO: 21171 - DNA, 25 bp, Homo sapien
cagatcccagcttacagtacgaaag

SEQ ID NO: 21172 - DNA, 25 bp, Homo sapien
cagatcccagctaacagtacgaaag

SEQ ID NO: 21173 - DNA, 25 bp, Homo sapien
agtagtggtcgacacaacgtcgaaa

SEQ ID NO: 21174 - DNA, 25 bp, Homo sapien
agtagtggtcgagacaacgtcgaaa

SEQ ID NO: 21175 - DNA, 25 bp, Homo sapien
ttccagtggtgattctacatcataa

SEQ ID NO: 21176 - DNA, 25 bp, Homo sapien
ttccagtggtgaatctacatcataa

SEQ ID NO: 21177 - DNA, 25 bp, Homo sapien
ccttcggggtcatataaaactacat

SEQ ID NO: 21178 - DNA, 25 bp, Homo sapien
ccttcggggtcaaataaaactacat

SEQ ID NO: 21179 - DNA, 25 bp, Homo sapien
aatcgaggaaccaaagaactatctt

SEQ ID NO: 21180 - DNA, 25 bp, Homo sapien
aatcgaggaacctaagaactatctt

SEQ ID NO: 21181 - DNA, 25 bp, Homo sapien
cgagacttgaactctccacagtttt

SEQ ID NO: 21182 - DNA, 25 bp, Homo sapien
cgagacttgaacactccacagtttt

SEQ ID NO: 21183 - DNA, 25 bp, Homo sapien
gaagaaagacactcgtcaaggtggt

SEQ ID NO: 21184 - DNA, 25 bp, Homo sapien
gaagaaagacacacgtcaaggtggt

SEQ ID NO: 21185 - DNA, 25 bp, Homo sapien
agtaccggacgtcacgacggtgtcg

SEQ ID NO: 21186 - DNA, 25 bp, Homo sapien
agtaccggacgtgacgacggtgtcg

SEQ ID NO: 21187 - DNA, 25 bp, Homo sapien
cgattttaagtctcccagagagttc

SEQ ID NO: 21188 - DNA, 25 bp, Homo sapien
cgattttaagtcacccagagagttc

SEQ ID NO: 21189 - DNA, 25 bp, Homo sapien
gtgtacccctgaaccggtatgaaga

SEQ ID NO: 21190 - DNA, 25 bp, Homo sapien
gtgtacccctgatccggtatgaaga

SEQ ID NO: 21191 - DNA, 25 bp, Homo sapien
ggcgcacctgcactcagagaagtac

SEQ ID NO: 21192 - DNA, 25 bp, Homo sapien
ggcgcacctgcagtcagagaagtac

SEQ ID NO: 21193 - DNA, 25 bp, Homo sapien
ggtccatcgcgacctgcaggaggtc

SEQ ID NO: 21194 - DNA, 25 bp, Homo sapien
ggtccatcgcgagctgcaggaggtc

SEQ ID NO: 21195 - DNA, 25 bp, Homo sapien
gtctccctgaatgctgtactgtaga

SEQ ID NO: 21196 - DNA, 25 bp, Homo sapien
gtctccctgaatcctgtactgtaga

SEQ ID NO: 21197 - DNA, 25 bp, Homo sapien
cgtgacacttaatctcggtctgcga

SEQ ID NO: 21198 - DNA, 25 bp, Homo sapien
cgtgacacttaaactcggtctgcga

SEQ ID NO: 21199 - DNA, 25 bp, Homo sapien
tacgtagacctttcggttacggact

SEQ ID NO: 21200 - DNA, 25 bp, Homo sapien
tacgtagaccttacggttacggact

SEQ ID NO: 21201 - DNA, 25 bp, Homo sapien
gccgtcagtgacgtcatagtcagga

SEQ ID NO: 21202 - DNA, 25 bp, Homo sapien
gccgtcagtgacctcatagtcagga

SEQ ID NO: 21203 - DNA, 25 bp, Homo sapien
caccgtgagttactctataccggaa

SEQ ID NO: 21204 - DNA, 25 bp, Homo sapien
caccgtgagttagtctataccggaa

SEQ ID NO: 21205 - DNA, 25 bp, Homo sapien
gacacatcgtattcttggatcggca

SEQ ID NO: 21206 - DNA, 25 bp, Homo sapien
gacacatcgtatacttggatcggca

SEQ ID NO: 21207 - DNA, 25 bp, Homo sapien
cgtaaagtctgtttggatcgaacta

SEQ ID NO: 21208 - DNA, 25 bp, Homo sapien
cgtaaagtctgtatggatcgaacta

SEQ ID NO: 21209 - DNA, 25 bp, Homo sapien
aggaaatgtcttttgacgcaccacc

SEQ ID NO: 21210 - DNA, 25 bp, Homo sapien
aggaaatgtcttatgacgcaccacc

SEQ ID NO: 21211 - DNA, 25 bp, Homo sapien
acggaggaaatcttatcaaaagcat

SEQ ID NO: 21212 - DNA, 25 bp, Homo sapien
acggaggaaatcatatcaaaagcat

SEQ ID NO: 21213 - DNA, 25 bp, Homo sapien
ctcaaaaggtaatggatcacaatgt

SEQ ID NO: 21214 - DNA, 25 bp, Homo sapien
ctcaaaaggtaaaggatcacaatgt

SEQ ID NO: 21215 - DNA, 25 bp, Homo sapien
caccagaaggtcagggtttacaaat

SEQ ID NO: 21216 - DNA, 25 bp, Homo sapien
caccagaaggtctgggtttacaaat

SEQ ID NO: 21217 - DNA, 25 bp, Homo sapien
aagtaggatacatgtcgatctttac

SEQ ID NO: 21218 - DNA, 25 bp, Homo sapien
aagtaggatacaagtcgatctttac

SEQ ID NO: 21219 - DNA, 25 bp, Homo sapien
tacacaaaggtatatggctggtcac

SEQ ID NO: 21220 - DNA, 25 bp, Homo sapien
tacacaaaggtaaatggctggtcac

SEQ ID NO: 21221 - DNA, 25 bp, Homo sapien
tccaacaggtccactcggtccggta

SEQ ID NO: 21222 - DNA, 25 bp, Homo sapien
tccaacaggtcctctcggtccggta

SEQ ID NO: 21223 - DNA, 25 bp, Homo sapien
aagacaagtctgtctcggtccgtcc

SEQ ID NO: 21224 - DNA, 25 bp, Homo sapien
aagacaagtctgactcggtccgtcc

SEQ ID NO: 21225 - DNA, 25 bp, Homo sapien
agagaacgaagaaacccgggactcc

SEQ ID NO: 21226 - DNA, 25 bp, Homo sapien
agagaacgaagatacccgggactcc

SEQ ID NO: 21227 - DNA, 25 bp, Homo sapien
agtaaaagtgtatggttcgactctc

SEQ ID NO: 21228 - DNA, 25 bp, Homo sapien
agtaaaagtgtaaggttcgactctc

SEQ ID NO: 21229 - DNA, 25 bp, Homo sapien
ggtacaattaaaggtacagcttcgt

SEQ ID NO: 21230 - DNA, 25 bp, Homo sapien
ggtacaattaaacgtacagcttcgt

SEQ ID NO: 21231 - DNA, 25 bp, Homo sapien
aagaaggcgagtatcgggacgtcaa

SEQ ID NO: 21232 - DNA, 25 bp, Homo sapien
aagaaggcgagtttcgggacgtcaa

SEQ ID NO: 21233 - DNA, 25 bp, Homo sapien
tctcaagcggacgttgcggcgaaag

SEQ ID NO: 21234 - DNA, 25 bp, Homo sapien
tctcaagcggaccttgcggcgaaag

SEQ ID NO: 21235 - DNA, 25 bp, Homo sapien
cgtccaagggacaggggtccgaccc

SEQ ID NO: 21236 - DNA, 25 bp, Homo sapien
cgtccaagggactggggtccgaccc

SEQ ID NO: 21237 - DNA, 25 bp, Homo sapien
tcccagtggataacgggggtctccg

SEQ ID NO: 21238 - DNA, 25 bp, Homo sapien
tcccagtggatatcgggggtctccg

SEQ ID NO: 21239 - DNA, 25 bp, Homo sapien
acccaacggaagaagagggcttcac

SEQ ID NO: 21240 - DNA, 25 bp, Homo sapien
acccaacggaagtagagggcttcac

SEQ ID NO: 21241 - DNA, 25 bp, Homo sapien
ctcaactgtgagtacaagtcttcca

SEQ ID NO: 21242 - DNA, 25 bp, Homo sapien
ctcaactgtgagaacaagtcttcca

SEQ ID NO: 21243 - DNA, 25 bp, Homo sapien
atatgaaggagatcaagtgtccacc

SEQ ID NO: 21244 - DNA, 25 bp, Homo sapien
atatgaaggagaacaagtgtccacc

SEQ ID NO: 21245 - DNA, 25 bp, Homo sapien
aggtcgaataatttcagtgtccaat

SEQ ID NO: 21246 - DNA, 25 bp, Homo sapien
aggtcgaataatatcagtgtccaat

SEQ ID NO: 21247 - DNA, 25 bp, Homo sapien
ggtggacacataggtccatccacag

SEQ ID NO: 21248 - DNA, 25 bp, Homo sapien
ggtggacacatacgtccatccacag

SEQ ID NO: 21249 - DNA, 25 bp, Homo sapien
tgtgtaattgaaatcatcgtcttca

SEQ ID NO: 21250 - DNA, 25 bp, Homo sapien
tgtgtaattgaattcatcgtcttca

SEQ ID NO: 21251 - DNA, 25 bp, Homo sapien
gtgatcttgaaattactatctctga

SEQ ID NO: 21252 - DNA, 25 bp, Homo sapien
gtgatcttgaaaatactatctctga

SEQ ID NO: 21253 - DNA, 25 bp, Homo sapien
gaaacacgattttaagtctcccaga

SEQ ID NO: 21254 - DNA, 25 bp, Homo sapien
gaaacacgatttaaagtctcccaga

SEQ ID NO: 21255 - DNA, 25 bp, Homo sapien
gaaaccactcgttaaaccgtttgaa

SEQ ID NO: 21256 - DNA, 25 bp, Homo sapien
gaaaccactcgtaaaaccgtttgaa

SEQ ID NO: 21257 - DNA, 25 bp, Homo sapien
cgatacacgacgaaatcacttagaa

SEQ ID NO: 21258 - DNA, 25 bp, Homo sapien
cgatacacgacgtaatcacttagaa

SEQ ID NO: 21259 - DNA, 25 bp, Homo sapien
cgaaagaagactgtgtctcgagagt

SEQ ID NO: 21260 - DNA, 25 bp, Homo sapien
cgaaagaagactctgtctcgagagt

SEQ ID NO: 21261 - DNA, 25 bp, Homo sapien
ccagacaaacctcagacttacgaga

SEQ ID NO: 21262 - DNA, 25 bp, Homo sapien
ccagacaaacctgagacttacgaga

SEQ ID NO: 21263 - DNA, 25 bp, Homo sapien
ctgcaagtcctcgacactagtagag

SEQ ID NO: 21264 - DNA, 25 bp, Homo sapien
ctgcaagtcctccacactagtagag

SEQ ID NO: 21265 - DNA, 25 bp, Homo sapien
cgttaaccgaccatcgagcacggag

SEQ ID NO: 21266 - DNA, 25 bp, Homo sapien
cgttaaccgaccttcgagcacggag

SEQ ID NO: 21267 - DNA, 25 bp, Homo sapien
gttaggctgtctttgactacagtcg

SEQ ID NO: 21268 - DNA, 25 bp, Homo sapien
gttaggctgtctatgactacagtcg

SEQ ID NO: 21269 - DNA, 25 bp, Homo sapien
atttttagtcttccaagacttgtcg

SEQ ID NO: 21270 - DNA, 25 bp, Homo sapien
atttttagtcttgcaagacttgtcg

SEQ ID NO: 21271 - DNA, 25 bp, Homo sapien
tacttatggtcagtgtacaattgac

SEQ ID NO: 21272 - DNA, 25 bp, Homo sapien
tacttatggtcactgtacaattgac

SEQ ID NO: 21273 - DNA, 25 bp, Homo sapien
cactcaccggagtgtccatatcgac

SEQ ID NO: 21274 - DNA, 25 bp, Homo sapien
cactcaccggagagtccatatcgac

SEQ ID NO: 21275 - DNA, 25 bp, Homo sapien
tgagacgagtcgagtccccgtcgtc

SEQ ID NO: 21276 - DNA, 25 bp, Homo sapien
tgagacgagtcgtgtccccgtcgtc

SEQ ID NO: 21277 - DNA, 25 bp, Homo sapien
taggaggtcggtcctccacacgtct

SEQ ID NO: 21278 - DNA, 25 bp, Homo sapien
taggaggtcggtgctccacacgtct

SEQ ID NO: 21279 - DNA, 25 bp, Homo sapien
taagtgttgtatacgtcgagatacc

SEQ ID NO: 21280 - DNA, 25 bp, Homo sapien
taagtgttgtattcgtcgagatacc

SEQ ID NO: 21281 - DNA, 25 bp, Homo sapien
cggggcagcacctcgtcgaggtcct

SEQ ID NO: 21282 - DNA, 25 bp, Homo sapien
cggggcagcaccacgtcgaggtcct

SEQ ID NO: 21283 - DNA, 25 bp, Homo sapien
cggttgtgtgctcctcacgtttccc

SEQ ID NO: 21284 - DNA, 25 bp, Homo sapien
cggttgtgtgctgctcacgtttccc

SEQ ID NO: 21285 - DNA, 25 bp, Homo sapien
tcgacggaagctactactctccgac

SEQ ID NO: 21286 - DNA, 25 bp, Homo sapien
tcgacggaagcttctactctccgac

SEQ ID NO: 21287 - DNA, 25 bp, Homo sapien
agacgagaaagtcaagaccgtgacc

SEQ ID NO: 21288 - DNA, 25 bp, Homo sapien
agacgagaaagtgaagaccgtgacc

SEQ ID NO: 21289 - DNA, 25 bp, Homo sapien
agacttggtaggtatgaaccgagtc

SEQ ID NO: 21290 - DNA, 25 bp, Homo sapien
agacttggtaggaatgaaccgagtc

SEQ ID NO: 21291 - DNA, 25 bp, Homo sapien
cgaagttggaatcgaccccgacgtc

SEQ ID NO: 21292 - DNA, 25 bp, Homo sapien
cgaagttggaatggaccccgacgtc

SEQ ID NO: 21293 - DNA, 25 bp, Homo sapien
agtattgtgaaggtaaacagaccct

SEQ ID NO: 21294 - DNA, 25 bp, Homo sapien
agtattgtgaagctaaacagaccct

SEQ ID NO: 21295 - DNA, 25 bp, Homo sapien
aaggggatacataagaccaatctat

SEQ ID NO: 21296 - DNA, 25 bp, Homo sapien
aaggggatacattagaccaatctat

SEQ ID NO: 21297 - DNA, 25 bp, Homo sapien
gtatgacgaactaaaagtccaactt

SEQ ID NO: 21298 - DNA, 25 bp, Homo sapien
gtatgacgaacttaaagtccaactt

SEQ ID NO: 21299 - DNA, 25 bp, Homo sapien
ttcgatgaaccgatttgtccgacca

SEQ ID NO: 21300 - DNA, 25 bp, Homo sapien
ttcgatgaaccgttttgtccgacca

SEQ ID NO: 21301 - DNA, 25 bp, Homo sapien
tacatcacaaatgtcgccggtaccg

SEQ ID NO: 21302 - DNA, 25 bp, Homo sapien
tacatcacaaatctcgccggtaccg

SEQ ID NO: 21303 - DNA, 25 bp, Homo sapien
gagtatgcgaggtgactttgcgtcc

SEQ ID NO: 21304 - DNA, 25 bp, Homo sapien
gagtatgcgaggagactttgcgtcc

SEQ ID NO: 21305 - DNA, 25 bp, Homo sapien
ttagtaccaccgagatatgtcctcc

SEQ ID NO: 21306 - DNA, 25 bp, Homo sapien
ttagtaccaccgtgatatgtcctcc

SEQ ID NO: 21307 - DNA, 25 bp, Homo sapien
agaaataacccgtagtcgcgaccac

SEQ ID NO: 21308 - DNA, 25 bp, Homo sapien
agaaataacccgaagtcgcgaccac

SEQ ID NO: 21309 - DNA, 25 bp, Homo sapien
gagaattaaatcctgggttcccact

SEQ ID NO: 21310 - DNA, 25 bp, Homo sapien
gagaattaaatcgtgggttcccact

SEQ ID NO: 21311 - DNA, 25 bp, Homo sapien
aggtgaacaagagtgtcgtcctctg

SEQ ID NO: 21312 - DNA, 25 bp, Homo sapien
aggtgaacaagactgtcgtcctctg

SEQ ID NO: 21313 - DNA, 25 bp, Homo sapien
tgtctcaccgagacgttctctctta

SEQ ID NO: 21314 - DNA, 25 bp, Homo sapien
tgtctcaccgagtcgttctctctta

SEQ ID NO: 21315 - DNA, 25 bp, Homo sapien
ctcgtctaagaggtcttacctctta

SEQ ID NO: 21316 - DNA, 25 bp, Homo sapien
ctcgtctaagagctcttacctctta

SEQ ID NO: 21317 - DNA, 25 bp, Homo sapien
tactcgtggttgagaccgtacatac

SEQ ID NO: 21318 - DNA, 25 bp, Homo sapien
tactcgtggttgtgaccgtacatac

SEQ ID NO: 21319 - DNA, 25 bp, Homo sapien
cttttcgaagtcttagagtcacacc

SEQ ID NO: 21320 - DNA, 25 bp, Homo sapien
cttttcgaagtcatagagtcacacc

SEQ ID NO: 21321 - DNA, 25 bp, Homo sapien
cagagcgagacagcgggtccgacct

SEQ ID NO: 21322 - DNA, 25 bp, Homo sapien
cagagcgagacaccgggtccgacct

SEQ ID NO: 21323 - DNA, 25 bp, Homo sapien
tagttgtagctgaaaccgctcgggc

SEQ ID NO: 21324 - DNA, 25 bp, Homo sapien
tagttgtagctgtaaccgctcgggc

SEQ ID NO: 21325 - DNA, 25 bp, Homo sapien
cgtaaccgactaaccgttggtagat

SEQ ID NO: 21326 - DNA, 25 bp, Homo sapien
cgtaaccgactatccgttggtagat

SEQ ID NO: 21327 - DNA, 25 bp, Homo sapien
gagtcgacgaacttttactgtcgat

SEQ ID NO: 21328 - DNA, 25 bp, Homo sapien
gagtcgacgaacatttactgtcgat

SEQ ID NO: 21329 - DNA, 25 bp, Homo sapien
cccatccgtccgttatactggttta

SEQ ID NO: 21330 - DNA, 25 bp, Homo sapien
cccatccgtccgatatactggttta

SEQ ID NO: 21331 - DNA, 25 bp, Homo sapien
cctctggtccgtccttcatcgttat

SEQ ID NO: 21332 - DNA, 25 bp, Homo sapien
cctctggtccgtgcttcatcgttat

SEQ ID NO: 21333 - DNA, 25 bp, Homo sapien
gtctatgtcccacgtgtaaacgttt

SEQ ID NO: 21334 - DNA, 25 bp, Homo sapien
gtctatgtcccaggtgtaaacgttt

SEQ ID NO: 21335 - DNA, 25 bp, Homo sapien
tttaatttaccggtgtctaactgta

SEQ ID NO: 21336 - DNA, 25 bp, Homo sapien
tttaatttaccgctgtctaactgta

SEQ ID NO: 21337 - DNA, 25 bp, Homo sapien
actatgtttacttcgtcgcgtttat

SEQ ID NO: 21338 - DNA, 25 bp, Homo sapien
actatgtttactacgtcgcgtttat

SEQ ID NO: 21339 - DNA, 25 bp, Homo sapien
tgtgaagggtcgttagtgagtttat

SEQ ID NO: 21340 - DNA, 25 bp, Homo sapien
tgtgaagggtcgatagtgagtttat

SEQ ID NO: 21341 - DNA, 25 bp, Homo sapien
tggctaaggtctaagtagagtccct

SEQ ID NO: 21342 - DNA, 25 bp, Homo sapien
tggctaaggtcttagtagagtccct

SEQ ID NO: 21343 - DNA, 25 bp, Homo sapien
tggtacggtacgttggagtctctgt

SEQ ID NO: 21344 - DNA, 25 bp, Homo sapien
tggtacggtacgatggagtctctgt

SEQ ID NO: 21345 - DNA, 25 bp, Homo sapien
ttattgtgttcacgaacgacgtcag

SEQ ID NO: 21346 - DNA, 25 bp, Homo sapien
ttattgtgttcaggaacgacgtcag

SEQ ID NO: 21347 - DNA, 25 bp, Homo sapien
ctacttgaacgtatagcactctcag

SEQ ID NO: 21348 - DNA, 25 bp, Homo sapien
ctacttgaacgtttagcactctcag

SEQ ID NO: 21349 - DNA, 25 bp, Homo sapien
caatctaggtgctaaccactctgat

SEQ ID NO: 21350 - DNA, 25 bp, Homo sapien
caatctaggtgcaaaccactctgat

SEQ ID NO: 21351 - DNA, 25 bp, Homo sapien
actcgtgtacgacaaaccccctagt

SEQ ID NO: 21352 - DNA, 25 bp, Homo sapien
actcgtgtacgagaaaccccctagt

SEQ ID NO: 21353 - DNA, 25 bp, Homo sapien
acttacagggtttgaaacctcaaat

SEQ ID NO: 21354 - DNA, 25 bp, Homo sapien
acttacagggttagaaacctcaaat

SEQ ID NO: 21355 - DNA, 25 bp, Homo sapien
tcgacgagaggttcctatcctccaa

SEQ ID NO: 21356 - DNA, 25 bp, Homo sapien
tcgacgagaggtacctatcctccaa

SEQ ID NO: 21357 - DNA, 25 bp, Homo sapien
ctcacgtcggtctaccttcctgaaa

SEQ ID NO: 21358 - DNA, 25 bp, Homo sapien
ctcacgtcggtcaaccttcctgaaa

SEQ ID NO: 21359 - DNA, 25 bp, Homo sapien
cacctggagccctgtaccggagaag

SEQ ID NO: 21360 - DNA, 25 bp, Homo sapien
cacctggagcccagtaccggagaag

SEQ ID NO: 21361 - DNA, 25 bp, Homo sapien
acacggtcgcgaggtcccgacgcag

SEQ ID NO: 21362 - DNA, 25 bp, Homo sapien
acacggtcgcgacgtcccgacgcag

SEQ ID NO: 21363 - DNA, 25 bp, Homo sapien
actccgtccgagaatcgaccggtga

SEQ ID NO: 21364 - DNA, 25 bp, Homo sapien
actccgtccgagtatcgaccggtga

SEQ ID NO: 21365 - DNA, 25 bp, Homo sapien
tgaaggccgagagacacgatcaagc

SEQ ID NO: 21366 - DNA, 25 bp, Homo sapien
tgaaggccgagacacacgatcaagc

SEQ ID NO: 21367 - DNA, 25 bp, Homo sapien
cgaaaattctcgtagacgtatcaaa

SEQ ID NO: 21368 - DNA, 25 bp, Homo sapien
cgaaaattctcgaagacgtatcaaa

SEQ ID NO: 21369 - DNA, 25 bp, Homo sapien
ggcaaacgattactactgatttcaa

SEQ ID NO: 21370 - DNA, 25 bp, Homo sapien
ggcaaacgattagtactgatttcaa

SEQ ID NO: 21371 - DNA, 25 bp, Homo sapien
tgacctagtcttttcggttatttaa

SEQ ID NO: 21372 - DNA, 25 bp, Homo sapien
tgacctagtcttatcggttatttaa

SEQ ID NO: 21373 - DNA, 25 bp, Homo sapien
ctcccgacttcttcctcggggtaaa

SEQ ID NO: 21374 - DNA, 25 bp, Homo sapien
ctcccgacttctacctcggggtaaa

SEQ ID NO: 21375 - DNA, 25 bp, Homo sapien
cccgtgtgaacgatgtcgggtgccc

SEQ ID NO: 21376 - DNA, 25 bp, Homo sapien
cccgtgtgaacgttgtcgggtgccc

SEQ ID NO: 21377 - DNA, 25 bp, Homo sapien
tctccttggacttggggagacgttc

SEQ ID NO: 21378 - DNA, 25 bp, Homo sapien
tctccttggactaggggagacgttc

SEQ ID NO: 21379 - DNA, 25 bp, Homo sapien
aggatggtgagtcaggatagggttc

SEQ ID NO: 21380 - DNA, 25 bp, Homo sapien
aggatggtgagtgaggatagggttc

SEQ ID NO: 21381 - DNA, 25 bp, Homo sapien
ggaaactgtatgtgagtaccggatc

SEQ ID NO: 21382 - DNA, 25 bp, Homo sapien
ggaaactgtatgagagtaccggatc

SEQ ID NO: 21383 - DNA, 25 bp, Homo sapien
ttgtatatacatagaaaagccttcg

SEQ ID NO: 21384 - DNA, 25 bp, Homo sapien
ttgtatatacattgaaaagccttcg

SEQ ID NO: 21385 - DNA, 25 bp, Homo sapien
gttttactattgaaccacgtttatg

SEQ ID NO: 21386 - DNA, 25 bp, Homo sapien
gttttactattgtaccacgtttatg

SEQ ID NO: 21387 - DNA, 25 bp, Homo sapien
aggcatagactagaaacattattac

SEQ ID NO: 21388 - DNA, 25 bp, Homo sapien
aggcatagactacaaacattattac

SEQ ID NO: 21389 - DNA, 25 bp, Homo sapien
agtctgactccgtcatattatggga

SEQ ID NO: 21390 - DNA, 25 bp, Homo sapien
agtctgactccgacatattatggga

SEQ ID NO: 21391 - DNA, 25 bp, Homo sapien
aacaactcccacagctttacggggt

SEQ ID NO: 21392 - DNA, 25 bp, Homo sapien
aacaactcccactgctttacggggt

SEQ ID NO: 21393 - DNA, 25 bp, Homo sapien
ctttaaagtcctctgtttaaggtgg

SEQ ID NO: 21394 - DNA, 25 bp, Homo sapien
ctttaaagtcctgtgtttaaggtgg

SEQ ID NO: 21395 - DNA, 25 bp, Homo sapien
gtgtttttccgtgaatcgaggaccg

SEQ ID NO: 21396 - DNA, 25 bp, Homo sapien
gtgtttttccgtcaatcgaggaccg

SEQ ID NO: 21397 - DNA, 25 bp, Homo sapien
tattttcgtctaccagttaagaatt

SEQ ID NO: 21398 - DNA, 25 bp, Homo sapien
tattttcgtctagcagttaagaatt

SEQ ID NO: 21399 - DNA, 25 bp, Homo sapien
gttttggaaccatgtactcgtaatt

SEQ ID NO: 21400 - DNA, 25 bp, Homo sapien
gttttggaaccaagtactcgtaatt

SEQ ID NO: 21401 - DNA, 25 bp, Homo sapien
cggttggcatacaccgacttactaa

SEQ ID NO: 21402 - DNA, 25 bp, Homo sapien
cggttggcatactccgacttactaa

SEQ ID NO: 21403 - DNA, 25 bp, Homo sapien
cgaggataggtctactatgtactct

SEQ ID NO: 21404 - DNA, 25 bp, Homo sapien
cgaggataggtcaactatgtactct

SEQ ID NO: 21405 - DNA, 25 bp, Homo sapien
tttctgcgtgaaaccgaatattaag

SEQ ID NO: 21406 - DNA, 25 bp, Homo sapien
tttctgcgtgaatccgaatattaag

SEQ ID NO: 21407 - DNA, 25 bp, Homo sapien
cgtgataattctgtcgggctaaatg

SEQ ID NO: 21408 - DNA, 25 bp, Homo sapien
cgtgataattctctcgggctaaatg

SEQ ID NO: 21409 - DNA, 25 bp, Homo sapien
gtacaaacatcacagggacaaacta

SEQ ID NO: 21410 - DNA, 25 bp, Homo sapien
gtacaaacatcagagggacaaacta

SEQ ID NO: 21411 - DNA, 25 bp, Homo sapien
gaacgggtacaaactgaaaccctac

SEQ ID NO: 21412 - DNA, 25 bp, Homo sapien
gaacgggtacaatctgaaaccctac

SEQ ID NO: 21413 - DNA, 25 bp, Homo sapien
gaaccccgtcaagtggaccagacac

SEQ ID NO: 21414 - DNA, 25 bp, Homo sapien
gaaccccgtcaactggaccagacac

SEQ ID NO: 21415 - DNA, 25 bp, Homo sapien
cctcctgtctctaccgaactcggaa

SEQ ID NO: 21416 - DNA, 25 bp, Homo sapien
cctcctgtctcttccgaactcggaa

SEQ ID NO: 21417 - DNA, 25 bp, Homo sapien
acccggcgtactcacaagtggaaac

SEQ ID NO: 21418 - DNA, 25 bp, Homo sapien
acccggcgtactgacaagtggaaac

SEQ ID NO: 21419 - DNA, 25 bp, Homo sapien
acaacaggtggtccccgctgtagag

SEQ ID NO: 21420 - DNA, 25 bp, Homo sapien
acaacaggtggtgcccgctgtagag

SEQ ID NO: 21421 - DNA, 25 bp, Homo sapien
ctccggaaaacgtggtgcactgtgg

SEQ ID NO: 21422 - DNA, 25 bp, Homo sapien
ctccggaaaacgaggtgcactgtgg

SEQ ID NO: 21423 - DNA, 25 bp, Homo sapien
ggtcggaacgaaggtgtctcttgac

SEQ ID NO: 21424 - DNA, 25 bp, Homo sapien
ggtcggaacgaacgtgtctcttgac

SEQ ID NO: 21425 - DNA, 25 bp, Homo sapien
cggtcacaacactaacgatctatga

SEQ ID NO: 21426 - DNA, 25 bp, Homo sapien
cggtcacaacacaaacgatctatga

SEQ ID NO: 21427 - DNA, 25 bp, Homo sapien
ggtgtgacaccgttcctaacactcc

SEQ ID NO: 21428 - DNA, 25 bp, Homo sapien
ggtgtgacaccgatcctaacactcc

SEQ ID NO: 21429 - DNA, 25 bp, Homo sapien
cacgtggggaccccggactcccact

SEQ ID NO: 21430 - DNA, 25 bp, Homo sapien
cacgtggggaccgcggactcccact

SEQ ID NO: 21431 - DNA, 25 bp, Homo sapien
cggtgggtcttctgacacctaccgg

SEQ ID NO: 21432 - DNA, 25 bp, Homo sapien
cggtgggtcttcagacacctaccgg

SEQ ID NO: 21433 - DNA, 25 bp, Homo sapien
acgtgaggtgaaggtccacgactgt

SEQ ID NO: 21434 - DNA, 25 bp, Homo sapien
acgtgaggtgaacgtccacgactgt

SEQ ID NO: 21435 - DNA, 25 bp, Homo sapien
tatagactctctcaagccgcccggt

SEQ ID NO: 21436 - DNA, 25 bp, Homo sapien
tatagactctctgaagccgcccggt

SEQ ID NO: 21437 - DNA, 25 bp, Homo sapien
gctgcgacgccaacagggcccgtgt

SEQ ID NO: 21438 - DNA, 25 bp, Homo sapien
gctgcgacgccatcagggcccgtgt

SEQ ID NO: 21439 - DNA, 25 bp, Homo sapien
ccgacgtcccacacgaagggtcggt

SEQ ID NO: 21440 - DNA, 25 bp, Homo sapien
ccgacgtcccactcgaagggtcggt

SEQ ID NO: 21441 - DNA, 25 bp, Homo sapien
ttttcgtgtcctcaaaagatgtttt

SEQ ID NO: 21442 - DNA, 25 bp, Homo sapien
ttttcgtgtcctgaaaagatgtttt

SEQ ID NO: 21443 - DNA, 25 bp, Homo sapien
ttttattcgggaaggacttactctt

SEQ ID NO: 21444 - DNA, 25 bp, Homo sapien
ttttattcgggatggacttactctt

SEQ ID NO: 21445 - DNA, 25 bp, Homo sapien
ccttgtgttgggtgagagtccttct

SEQ ID NO: 21446 - DNA, 25 bp, Homo sapien
ccttgtgttgggagagagtccttct

SEQ ID NO: 21447 - DNA, 25 bp, Homo sapien
acccagaggagcgacggtcctaggt

SEQ ID NO: 21448 - DNA, 25 bp, Homo sapien
acccagaggagccacggtcctaggt

SEQ ID NO: 21449 - DNA, 25 bp, Homo sapien
cgtcagtggtaccacggtcggagac

SEQ ID NO: 21450 - DNA, 25 bp, Homo sapien
cgtcagtggtacgacggtcggagac

SEQ ID NO: 21451 - DNA, 25 bp, Homo sapien
tccgtggtgaccaggtcgagacgat

SEQ ID NO: 21452 - DNA, 25 bp, Homo sapien
tccgtggtgacctggtcgagacgat

SEQ ID NO: 21453 - DNA, 25 bp, Homo sapien
gctggccctgtcaagcggcacgcag

SEQ ID NO: 21454 - DNA, 25 bp, Homo sapien
gctggccctgtctagcggcacgcag

SEQ ID NO: 21455 - DNA, 25 bp, Homo sapien
ctagtctcaaaccagggtcgacccg

SEQ ID NO: 21456 - DNA, 25 bp, Homo sapien
ctagtctcaaacgagggtcgacccg

SEQ ID NO: 21457 - DNA, 25 bp, Homo sapien
caagaacagaccaggacgtgaaccg

SEQ ID NO: 21458 - DNA, 25 bp, Homo sapien
caagaacagacctggacgtgaaccg

SEQ ID NO: 21459 - DNA, 25 bp, Homo sapien
agagagagagagtcacgatgtaacc

SEQ ID NO: 21460 - DNA, 25 bp, Homo sapien
agagagagagagacacgatgtaacc

SEQ ID NO: 21461 - DNA, 25 bp, Homo sapien
gtagaactataaaccgtattacaag

SEQ ID NO: 21462 - DNA, 25 bp, Homo sapien
gtagaactataatccgtattacaag

SEQ ID NO: 21463 - DNA, 25 bp, Homo sapien
gacggggattatagggtatctacca

SEQ ID NO: 21464 - DNA, 25 bp, Homo sapien
gacggggattattgggtatctacca

SEQ ID NO: 21465 - DNA, 25 bp, Homo sapien
gatgggatttgttgccacaccgacg

SEQ ID NO: 21466 - DNA, 25 bp, Homo sapien
gatgggatttgtagccacaccgacg

SEQ ID NO: 21467 - DNA, 25 bp, Homo sapien
gatgggtttctatccgttccacctc

SEQ ID NO: 21468 - DNA, 25 bp, Homo sapien
gatgggtttctaaccgttccacctc

SEQ ID NO: 21469 - DNA, 25 bp, Homo sapien
gggggtctgactccttcttacctac

SEQ ID NO: 21470 - DNA, 25 bp, Homo sapien
gggggtctgactgcttcttacctac

SEQ ID NO: 21471 - DNA, 25 bp, Homo sapien
ggagcgtgttcgtcgcgttcttcca

SEQ ID NO: 21472 - DNA, 25 bp, Homo sapien
ggagcgtgttcgacgcgttcttcca

SEQ ID NO: 21473 - DNA, 25 bp, Homo sapien
ggtacgtaacttacatgcttctcaa

SEQ ID NO: 21474 - DNA, 25 bp, Homo sapien
ggtacgtaactttcatgcttctcaa

SEQ ID NO: 21475 - DNA, 25 bp, Homo sapien
gataatatgtacttacgtctgcaaa

SEQ ID NO: 21476 - DNA, 25 bp, Homo sapien
gataatatgtacatacgtctgcaaa

SEQ ID NO: 21477 - DNA, 25 bp, Homo sapien
gtgatatgtaacgtatacgtgaccc

SEQ ID NO: 21478 - DNA, 25 bp, Homo sapien
gtgatatgtaacctatacgtgaccc

SEQ ID NO: 21479 - DNA, 25 bp, Homo sapien
agagttatacgtcagaccgacacct

SEQ ID NO: 21480 - DNA, 25 bp, Homo sapien
agagttatacgtgagaccgacacct

SEQ ID NO: 21481 - DNA, 25 bp, Homo sapien
acgagttacttcagtactcctcact

SEQ ID NO: 21482 - DNA, 25 bp, Homo sapien
acgagttacttctgtactcctcact

SEQ ID NO: 21483 - DNA, 25 bp, Homo sapien
gaacacggtaggttgatcactgact

SEQ ID NO: 21484 - DNA, 25 bp, Homo sapien
gaacacggtaggatgatcactgact

SEQ ID NO: 21485 - DNA, 25 bp, Homo sapien
gttaactcttggtagataccgtgat

SEQ ID NO: 21486 - DNA, 25 bp, Homo sapien
gttaactcttggaagataccgtgat

SEQ ID NO: 21487 - DNA, 25 bp, Homo sapien
actaggtcatctttagaaaatctga

SEQ ID NO: 21488 - DNA, 25 bp, Homo sapien
actaggtcatctatagaaaatctga

SEQ ID NO: 21489 - DNA, 25 bp, Homo sapien
ctaaatctcgaggtacaaagttaca

SEQ ID NO: 21490 - DNA, 25 bp, Homo sapien
ctaaatctcgagctacaaagttaca

SEQ ID NO: 21491 - DNA, 25 bp, Homo sapien
ccgcacgtcgagtagaaccatacgc

SEQ ID NO: 21492 - DNA, 25 bp, Homo sapien
ccgcacgtcgagaagaaccatacgc

SEQ ID NO: 21493 - DNA, 25 bp, Homo sapien
tcgtgcgaaccaaaggctcctactc

SEQ ID NO: 21494 - DNA, 25 bp, Homo sapien
tcgtgcgaaccataggctcctactc

SEQ ID NO: 21495 - DNA, 25 bp, Homo sapien
cggtagacttagcataaagtcttaa

SEQ ID NO: 21496 - DNA, 25 bp, Homo sapien
cggtagacttaggataaagtcttaa

SEQ ID NO: 21497 - DNA, 25 bp, Homo sapien
agtgtgacggtggagaccaagggag

SEQ ID NO: 21498 - DNA, 25 bp, Homo sapien
agtgtgacggtgcagaccaagggag

SEQ ID NO: 21499 - DNA, 25 bp, Homo sapien
acttcgacgggaaagacacggtcca

SEQ ID NO: 21500 - DNA, 25 bp, Homo sapien
acttcgacgggatagacacggtcca

SEQ ID NO: 21501 - DNA, 25 bp, Homo sapien
ccgtcacaggagagacgggcactag

SEQ ID NO: 21502 - DNA, 25 bp, Homo sapien
ccgtcacaggagtgacgggcactag

SEQ ID NO: 21503 - DNA, 25 bp, Homo sapien
gcgacgcgggctcgtgacgactctg

SEQ ID NO: 21504 - DNA, 25 bp, Homo sapien
gcgacgcgggctggtgacgactctg

SEQ ID NO: 21505 - DNA, 25 bp, Homo sapien
tcctcgggagtctgtcgtcaccgta

SEQ ID NO: 21506 - DNA, 25 bp, Homo sapien
tcctcgggagtcagtcgtcaccgta

SEQ ID NO: 21507 - DNA, 25 bp, Homo sapien
acttcgtggagtccacgctctatga

SEQ ID NO: 21508 - DNA, 25 bp, Homo sapien
acttcgtggagtgcacgctctatga

SEQ ID NO: 21509 - DNA, 25 bp, Homo sapien
tcatcgtggttaggtgtggactaac

SEQ ID NO: 21510 - DNA, 25 bp, Homo sapien
tcatcgtggttacgtgtggactaac

SEQ ID NO: 21511 - DNA, 25 bp, Homo sapien
ttctctgtcataagggcgtcaaacg

SEQ ID NO: 21512 - DNA, 25 bp, Homo sapien
ttctctgtcatatgggcgtcaaacg

SEQ ID NO: 21513 - DNA, 25 bp, Homo sapien
tattactacctatcggagacggaaa

SEQ ID NO: 21514 - DNA, 25 bp, Homo sapien
tattactacctaacggagacggaaa

SEQ ID NO: 21515 - DNA, 25 bp, Homo sapien
ttaccaaataaggtaccggtaacat

SEQ ID NO: 21516 - DNA, 25 bp, Homo sapien
ttaccaaataagctaccggtaacat

SEQ ID NO: 21517 - DNA, 25 bp, Homo sapien
aaaccctaaacgtccgccgtttctg

SEQ ID NO: 21518 - DNA, 25 bp, Homo sapien
aaaccctaaacgaccgccgtttctg

SEQ ID NO: 21519 - DNA, 25 bp, Homo sapien
cgtaccagatcatgacatatctatg

SEQ ID NO: 21520 - DNA, 25 bp, Homo sapien
cgtaccagatcaagacatatctatg

SEQ ID NO: 21521 - DNA, 25 bp, Homo sapien
ctccgaactcatccttccgtagtgt

SEQ ID NO: 21522 - DNA, 25 bp, Homo sapien
ctccgaactcatgcttccgtagtgt

SEQ ID NO: 21523 - DNA, 25 bp, Homo sapien
ttcgccgtttacaagtccgtccaga

SEQ ID NO: 21524 - DNA, 25 bp, Homo sapien
ttcgccgtttactagtccgtccaga

SEQ ID NO: 21525 - DNA, 25 bp, Homo sapien
gctttcggtccttttatggttcaat

SEQ ID NO: 21526 - DNA, 25 bp, Homo sapien
gctttcggtcctattatggttcaat

SEQ ID NO: 21527 - DNA, 25 bp, Homo sapien
tttctagccggatatgtaatacata

SEQ ID NO: 21528 - DNA, 25 bp, Homo sapien
tttctagccggaaatgtaatacata

SEQ ID NO: 21529 - DNA, 25 bp, Homo sapien
ggtataccgccctgattgggtatga

SEQ ID NO: 21530 - DNA, 25 bp, Homo sapien
ggtataccgcccagattgggtatga

SEQ ID NO: 21531 - DNA, 25 bp, Homo sapien
aatccgttacgaaggcataatcttt

SEQ ID NO: 21532 - DNA, 25 bp, Homo sapien
aatccgttacgatggcataatcttt

SEQ ID NO: 21533 - DNA, 25 bp, Homo sapien
gtctgacatcgttacataagtctta

SEQ ID NO: 21534 - DNA, 25 bp, Homo sapien
gtctgacatcgtaacataagtctta

SEQ ID NO: 21535 - DNA, 25 bp, Homo sapien
gccccgttatacttaattacttgta

SEQ ID NO: 21536 - DNA, 25 bp, Homo sapien
gccccgttatacataattacttgta

SEQ ID NO: 21537 - DNA, 25 bp, Homo sapien
ttacttttacgaaacacctgacgac

SEQ ID NO: 21538 - DNA, 25 bp, Homo sapien
ttacttttacgatacacctgacgac

SEQ ID NO: 21539 - DNA, 25 bp, Homo sapien
tgtacggtcctaaagacttagttga

SEQ ID NO: 21540 - DNA, 25 bp, Homo sapien
tgtacggtcctatagacttagttga

SEQ ID NO: 21541 - DNA, 25 bp, Homo sapien
tggttcccggtcataggtgttatta

SEQ ID NO: 21542 - DNA, 25 bp, Homo sapien
tggttcccggtcttaggtgttatta

SEQ ID NO: 21543 - DNA, 25 bp, Homo sapien
ctctctctctaacctttgtacttaa

SEQ ID NO: 21544 - DNA, 25 bp, Homo sapien
ctctctctctaagctttgtacttaa

SEQ ID NO: 21545 - DNA, 25 bp, Homo sapien
tactacgttaggtagtgcacttaga

SEQ ID NO: 21546 - DNA, 25 bp, Homo sapien
tactacgttaggaagtgcacttaga

SEQ ID NO: 21547 - DNA, 25 bp, Homo sapien
taaggggacccctatctgctattgg

SEQ ID NO: 21548 - DNA, 25 bp, Homo sapien
taaggggaccccaatctgctattgg

SEQ ID NO: 21549 - DNA, 25 bp, Homo sapien
gtggggacaaagaaattgttcctct

SEQ ID NO: 21550 - DNA, 25 bp, Homo sapien
gtggggacaaagtaattgttcctct

SEQ ID NO: 21551 - DNA, 25 bp, Homo sapien
gtctcaatttggactgtataactca

SEQ ID NO: 21552 - DNA, 25 bp, Homo sapien
gtctcaatttggtctgtataactca

SEQ ID NO: 21553 - DNA, 25 bp, Homo sapien
acgttatatttgtttcagggcaaca

SEQ ID NO: 21554 - DNA, 25 bp, Homo sapien
acgttatatttgattcagggcaaca

SEQ ID NO: 21555 - DNA, 25 bp, Homo sapien
cagactgtttctctttgtgacgaaa

SEQ ID NO: 21556 - DNA, 25 bp, Homo sapien
cagactgtttctgtttgtgacgaaa

SEQ ID NO: 21557 - DNA, 25 bp, Homo sapien
aaatcttctacgtctgcaataacgg

SEQ ID NO: 21558 - DNA, 25 bp, Homo sapien
aaatcttctacgactgcaataacgg

SEQ ID NO: 21559 - DNA, 25 bp, Homo sapien
cactactgacacactcatgaacctc

SEQ ID NO: 21560 - DNA, 25 bp, Homo sapien
cactactgacactctcatgaacctc

SEQ ID NO: 21561 - DNA, 25 bp, Homo sapien
cgataaaacgttattctccatttta

SEQ ID NO: 21562 - DNA, 25 bp, Homo sapien
cgataaaacgtttttctccatttta

SEQ ID NO: 21563 - DNA, 25 bp, Homo sapien
gtcatgtcggacctacaacccgtct

SEQ ID NO: 21564 - DNA, 25 bp, Homo sapien
gtcatgtcggacgtacaacccgtct

SEQ ID NO: 21565 - DNA, 25 bp, Homo sapien
tagtgtgtctctatacactgtgtct

SEQ ID NO: 21566 - DNA, 25 bp, Homo sapien
tagtgtgtctctttacactgtgtct

SEQ ID NO: 21567 - DNA, 25 bp, Homo sapien
tcttcgtgtttggatctgtcgtgtc

SEQ ID NO: 21568 - DNA, 25 bp, Homo sapien
tcttcgtgtttgcatctgtcgtgtc

SEQ ID NO: 21569 - DNA, 25 bp, Homo sapien
atctcggtatatacttgtctctcgt

SEQ ID NO: 21570 - DNA, 25 bp, Homo sapien
atctcggtatattcttgtctctcgt

SEQ ID NO: 21571 - DNA, 25 bp, Homo sapien
gtttatggtacaactcgttttactc

SEQ ID NO: 21572 - DNA, 25 bp, Homo sapien
gtttatggtacatctcgttttactc

SEQ ID NO: 21573 - DNA, 25 bp, Homo sapien
gtggtcgtacaactaaccgtgcgaa

SEQ ID NO: 21574 - DNA, 25 bp, Homo sapien
gtggtcgtacaagtaaccgtgcgaa

SEQ ID NO: 21575 - DNA, 25 bp, Homo sapien
taacgacgttgaccgtttggacggc

SEQ ID NO: 21576 - DNA, 25 bp, Homo sapien
taacgacgttgagcgtttggacggc

SEQ ID NO: 21577 - DNA, 25 bp, Homo sapien
ccactgagagccagaagaacccgtc

SEQ ID NO: 21578 - DNA, 25 bp, Homo sapien
ccactgagagcctgaagaacccgtc

SEQ ID NO: 21579 - DNA, 25 bp, Homo sapien
tcatgtcttaacctagtcgttgtgt

SEQ ID NO: 21580 - DNA, 25 bp, Homo sapien
tcatgtcttaacgtagtcgttgtgt

SEQ ID NO: 21581 - DNA, 25 bp, Homo sapien
cttgtctacgacagatctaggttcg

SEQ ID NO: 21582 - DNA, 25 bp, Homo sapien
cttgtctacgactgatctaggttcg

SEQ ID NO: 21583 - DNA, 25 bp, Homo sapien
cacttctactacgtaacgcagtatg

SEQ ID NO: 21584 - DNA, 25 bp, Homo sapien
cacttctactacctaacgcagtatg

SEQ ID NO: 21585 - DNA, 25 bp, Homo sapien
acccgcctagtactgacacagtcat

SEQ ID NO: 21586 - DNA, 25 bp, Homo sapien
acccgcctagtagtgacacagtcat

SEQ ID NO: 21587 - DNA, 25 bp, Homo sapien
tattgtcgtttatcgtctccatgat

SEQ ID NO: 21588 - DNA, 25 bp, Homo sapien
tattgtcgtttaacgtctccatgat

SEQ ID NO: 21589 - DNA, 25 bp, Homo sapien
ttgtttctttagattctaccgacga

SEQ ID NO: 21590 - DNA, 25 bp, Homo sapien
ttgtttctttagtttctaccgacga

SEQ ID NO: 21591 - DNA, 25 bp, Homo sapien
tacttctcctcagttcctagtcgag

SEQ ID NO: 21592 - DNA, 25 bp, Homo sapien
tacttctcctcacttcctagtcgag

SEQ ID NO: 21593 - DNA, 25 bp, Homo sapien
tgcgtccaccatagtcagaacgagt

SEQ ID NO: 21594 - DNA, 25 bp, Homo sapien
tgcgtccaccattgtcagaacgagt

SEQ ID NO: 21595 - DNA, 25 bp, Homo sapien
gggtcgactctttacgtcgtaggga

SEQ ID NO: 21596 - DNA, 25 bp, Homo sapien
gggtcgactcttaacgtcgtaggga

SEQ ID NO: 21597 - DNA, 25 bp, Homo sapien
gagagcgtacttcgtcgtcgggaca

SEQ ID NO: 21598 - DNA, 25 bp, Homo sapien
gagagcgtacttggtcgtcgggaca

SEQ ID NO: 21599 - DNA, 25 bp, Homo sapien
gaggtcccactctggtccgggtcga

SEQ ID NO: 21600 - DNA, 25 bp, Homo sapien
gaggtcccactcaggtccgggtcga

SEQ ID NO: 21601 - DNA, 25 bp, Homo sapien
taaaggtccacttctgaaagagtca

SEQ ID NO: 21602 - DNA, 25 bp, Homo sapien
taaaggtccactactgaaagagtca

SEQ ID NO: 21603 - DNA, 25 bp, Homo sapien
gggtcctctatttctactacaccga

SEQ ID NO: 21604 - DNA, 25 bp, Homo sapien
gggtcctctattactactacaccga

SEQ ID NO: 21605 - DNA, 25 bp, Homo sapien
gaccctatctctgaaacttgtcgtt

SEQ ID NO: 21606 - DNA, 25 bp, Homo sapien
gaccctatctctcaaacttgtcgtt

SEQ ID NO: 21607 - DNA, 25 bp, Homo sapien
gatttcagtcacgtaacagttgttc

SEQ ID NO: 21608 - DNA, 25 bp, Homo sapien
gatttcagtcacctaacagttgttc

SEQ ID NO: 21609 - DNA, 25 bp, Homo sapien
tacggagtcctaataatcgtcgatt

SEQ ID NO: 21610 - DNA, 25 bp, Homo sapien
tacggagtcctattaatcgtcgatt

SEQ ID NO: 21611 - DNA, 25 bp, Homo sapien
ggaggtttcgtacacgtcctcgttt

SEQ ID NO: 21612 - DNA, 25 bp, Homo sapien
ggaggtttcgtagacgtcctcgttt

SEQ ID NO: 21613 - DNA, 25 bp, Homo sapien
acgtgaaatgtttgtaacttcttct

SEQ ID NO: 21614 - DNA, 25 bp, Homo sapien
acgtgaaatgttagtaacttcttct

SEQ ID NO: 21615 - DNA, 25 bp, Homo sapien
ttctttgtttcgaagacaccttggt

SEQ ID NO: 21616 - DNA, 25 bp, Homo sapien
ttctttgtttcgtagacaccttggt

SEQ ID NO: 21617 - DNA, 25 bp, Homo sapien
ttagactttccaagagactcctttg

SEQ ID NO: 21618 - DNA, 25 bp, Homo sapien
ttagactttccatgagactcctttg

SEQ ID NO: 21619 - DNA, 25 bp, Homo sapien
cgtcctaatggtaccgttgttgtgt

SEQ ID NO: 21620 - DNA, 25 bp, Homo sapien
cgtcctaatggttccgttgttgtgt

SEQ ID NO: 21621 - DNA, 25 bp, Homo sapien
gtcaaaaccgttcctcgtcctttgt

SEQ ID NO: 21622 - DNA, 25 bp, Homo sapien
gtcaaaaccgttgctcgtcctttgt

SEQ ID NO: 21623 - DNA, 25 bp, Homo sapien
gtacaaacaacgtgatatctctttg

SEQ ID NO: 21624 - DNA, 25 bp, Homo sapien
gtacaaacaacgagatatctctttg

SEQ ID NO: 21625 - DNA, 25 bp, Homo sapien
gtgtactattgatctctcgtgtgac

SEQ ID NO: 21626 - DNA, 25 bp, Homo sapien
gtgtactattgaactctcgtgtgac

SEQ ID NO: 21627 - DNA, 25 bp, Homo sapien
tcgtgtattctaagatcctctgtct

SEQ ID NO: 21628 - DNA, 25 bp, Homo sapien
tcgtgtattctatgatcctctgtct

SEQ ID NO: 21629 - DNA, 25 bp, Homo sapien
acgtgtctcatgtaagtaaccgtat

SEQ ID NO: 21630 - DNA, 25 bp, Homo sapien
acgtgtctcatgaaagtaaccgtat

SEQ ID NO: 21631 - DNA, 25 bp, Homo sapien
atgtagtgacatcgtattcgacgaa

SEQ ID NO: 21632 - DNA, 25 bp, Homo sapien
atgtagtgacatggtattcgacgaa

SEQ ID NO: 21633 - DNA, 25 bp, Homo sapien
ttgtgtcactctttctgtcgttaac

SEQ ID NO: 21634 - DNA, 25 bp, Homo sapien
ttgtgtcactctatctgtcgttaac

SEQ ID NO: 21635 - DNA, 25 bp, Homo sapien
aaatgttcatctttctggtacgaac

SEQ ID NO: 21636 - DNA, 25 bp, Homo sapien
aaatgttcatctatctggtacgaac

SEQ ID NO: 21637 - DNA, 25 bp, Homo sapien
actcacgtctatcctctcgtcgagg

SEQ ID NO: 21638 - DNA, 25 bp, Homo sapien
actcacgtctatgctctcgtcgagg

SEQ ID NO: 21639 - DNA, 25 bp, Homo sapien
aaaatgtctcatttagtcacgagtt

SEQ ID NO: 21640 - DNA, 25 bp, Homo sapien
aaaatgtctcatatagtcacgagtt

SEQ ID NO: 21641 - DNA, 25 bp, Homo sapien
aaaaatatctctctgtctttctgtt

SEQ ID NO: 21642 - DNA, 25 bp, Homo sapien
aaaaatatctctgtgtctttctgtt

SEQ ID NO: 21643 - DNA, 25 bp, Homo sapien
tactgcccagtcttcttcgtagtgt

SEQ ID NO: 21644 - DNA, 25 bp, Homo sapien
tactgcccagtcatcttcgtagtgt

SEQ ID NO: 21645 - DNA, 25 bp, Homo sapien
gcgtgaagtccgtcccggctacggt

SEQ ID NO: 21646 - DNA, 25 bp, Homo sapien
gcgtgaagtccgacccggctacggt

SEQ ID NO: 21647 - DNA, 25 bp, Homo sapien
ggagacactggcactcggaccacgg

SEQ ID NO: 21648 - DNA, 25 bp, Homo sapien
ggagacactggctctcggaccacgg

SEQ ID NO: 21649 - DNA, 25 bp, Homo sapien
actactcgaggaatcgtatccagta

SEQ ID NO: 21650 - DNA, 25 bp, Homo sapien
actactcgaggattcgtatccagta

SEQ ID NO: 21651 - DNA, 25 bp, Homo sapien
gtgtctctgcggtccgtccgaactc

SEQ ID NO: 21652 - DNA, 25 bp, Homo sapien
gtgtctctgcggaccgtccgaactc

SEQ ID NO: 21653 - DNA, 25 bp, Homo sapien
tggaccttcggttagcaacttctat

SEQ ID NO: 21654 - DNA, 25 bp, Homo sapien
tggaccttcggtaagcaacttctat

SEQ ID NO: 21655 - DNA, 25 bp, Homo sapien
cccgctgtaccttccttaacgtgaa

SEQ ID NO: 21656 - DNA, 25 bp, Homo sapien
cccgctgtacctaccttaacgtgaa

SEQ ID NO: 21657 - DNA, 25 bp, Homo sapien
agtcgtactaccttctgacgaggga

SEQ ID NO: 21658 - DNA, 25 bp, Homo sapien
agtcgtactaccatctgacgaggga

SEQ ID NO: 21659 - DNA, 25 bp, Homo sapien
tcgtcgactcgagtccgtccggacg

SEQ ID NO: 21660 - DNA, 25 bp, Homo sapien
tcgtcgactcgactccgtccggacg

SEQ ID NO: 21661 - DNA, 25 bp, Homo sapien
cgacgcgacggtcgtttccgcacgt

SEQ ID NO: 21662 - DNA, 25 bp, Homo sapien
cgacgcgacggtggtttccgcacgt

SEQ ID NO: 21663 - DNA, 25 bp, Homo sapien
agacggagagtcgttccgactcgag

SEQ ID NO: 21664 - DNA, 25 bp, Homo sapien
agacggagagtccttccgactcgag

SEQ ID NO: 21665 - DNA, 25 bp, Homo sapien
tgtttgagatgtccttaagactatc

SEQ ID NO: 21666 - DNA, 25 bp, Homo sapien
tgtttgagatgtgcttaagactatc

SEQ ID NO: 21667 - DNA, 25 bp, Homo sapien
tcacgagtcaagttacgtatcttac

SEQ ID NO: 21668 - DNA, 25 bp, Homo sapien
tcacgagtcaagatacgtatcttac

SEQ ID NO: 21669 - DNA, 25 bp, Homo sapien
gccgcgagccagtcgtgactgtcgt

SEQ ID NO: 21670 - DNA, 25 bp, Homo sapien
gccgcgagccagacgtgactgtcgt

SEQ ID NO: 21671 - DNA, 25 bp, Homo sapien
caccagtggtctcgagatccctcgt

SEQ ID NO: 21672 - DNA, 25 bp, Homo sapien
caccagtggtctggagatccctcgt

SEQ ID NO: 21673 - DNA, 25 bp, Homo sapien
atcctccgaggtggctggcaccgcg

SEQ ID NO: 21674 - DNA, 25 bp, Homo sapien
atcctccgaggtcgctggcaccgcg

SEQ ID NO: 21675 - DNA, 25 bp, Homo sapien
ggcctccaggactgagggttctcgc

SEQ ID NO: 21676 - DNA, 25 bp, Homo sapien
ggcctccaggacagagggttctcgc

SEQ ID NO: 21677 - DNA, 25 bp, Homo sapien
acgaccacagaaaagagactcaccc

SEQ ID NO: 21678 - DNA, 25 bp, Homo sapien
acgaccacagaatagagactcaccc

SEQ ID NO: 21679 - DNA, 25 bp, Homo sapien
aggacgacgcgcacggcccggaccc

SEQ ID NO: 21680 - DNA, 25 bp, Homo sapien
aggacgacgcgctcggcccggaccc

SEQ ID NO: 21681 - DNA, 25 bp, Homo sapien
tgacacggatggtccacgacggacg

SEQ ID NO: 21682 - DNA, 25 bp, Homo sapien
tgacacggatggaccacgacggacg

SEQ ID NO: 21683 - DNA, 25 bp, Homo sapien
actaaaatacttgttccgtacagga

SEQ ID NO: 21684 - DNA, 25 bp, Homo sapien
actaaaatacttcttccgtacagga

SEQ ID NO: 21685 - DNA, 25 bp, Homo sapien
ttaaagaaatcgagatccactcaga

SEQ ID NO: 21686 - DNA, 25 bp, Homo sapien
ttaaagaaatcgtgatccactcaga

SEQ ID NO: 21687 - DNA, 25 bp, Homo sapien
gtttatttaatattagatttctcaa

SEQ ID NO: 21688 - DNA, 25 bp, Homo sapien
gtttatttaataatagatttctcaa

SEQ ID NO: 21689 - DNA, 25 bp, Homo sapien
tgtctgagacccatgttacgacaca

SEQ ID NO: 21690 - DNA, 25 bp, Homo sapien
tgtctgagacccttgttacgacaca

SEQ ID NO: 21691 - DNA, 25 bp, Homo sapien
ttgaacaccgaaaagttacgacact

SEQ ID NO: 21692 - DNA, 25 bp, Homo sapien
ttgaacaccgaatagttacgacact

SEQ ID NO: 21693 - DNA, 25 bp, Homo sapien
tcctgagggcgtaaagatacgaccc

SEQ ID NO: 21694 - DNA, 25 bp, Homo sapien
tcctgagggcgttaagatacgaccc

SEQ ID NO: 21695 - DNA, 25 bp, Homo sapien
cgctgtccggagaggactcgagcct

SEQ ID NO: 21696 - DNA, 25 bp, Homo sapien
cgctgtccggagtggactcgagcct

SEQ ID NO: 21697 - DNA, 25 bp, Homo sapien
tgtctgtcccggtgtctcggaacac

SEQ ID NO: 21698 - DNA, 25 bp, Homo sapien
tgtctgtcccggagtctcggaacac

SEQ ID NO: 21699 - DNA, 25 bp, Homo sapien
aacgccgacgcgaacgcgaagaacg

SEQ ID NO: 21700 - DNA, 25 bp, Homo sapien
aacgccgacgcgtacgcgaagaacg

SEQ ID NO: 21701 - DNA, 25 bp, Homo sapien
caacacggatatcagacacggtagg

SEQ ID NO: 21702 - DNA, 25 bp, Homo sapien
caacacggatatgagacacggtagg

SEQ ID NO: 21703 - DNA, 25 bp, Homo sapien
ggaaccgagactcgtcgacagaccc

SEQ ID NO: 21704 - DNA, 25 bp, Homo sapien
ggaaccgagactggtcgacagaccc

SEQ ID NO: 21705 - DNA, 25 bp, Homo sapien
gacgggaagtcccagcctctgtccg

SEQ ID NO: 21706 - DNA, 25 bp, Homo sapien
gacgggaagtccgagcctctgtccg

SEQ ID NO: 21707 - DNA, 25 bp, Homo sapien
gagtcacacacttgatccgtctctc

SEQ ID NO: 21708 - DNA, 25 bp, Homo sapien
gagtcacacactagatccgtctctc

SEQ ID NO: 21709 - DNA, 25 bp, Homo sapien
tgagtcgaccgttgggttccttcgt

SEQ ID NO: 21710 - DNA, 25 bp, Homo sapien
tgagtcgaccgtagggttccttcgt

SEQ ID NO: 21711 - DNA, 25 bp, Homo sapien
atgtagtccacagaggttctgtatt

SEQ ID NO: 21712 - DNA, 25 bp, Homo sapien
atgtagtccacacaggttctgtatt

SEQ ID NO: 21713 - DNA, 25 bp, Homo sapien
attactgatacacatgtacctgttg

SEQ ID NO: 21714 - DNA, 25 bp, Homo sapien
attactgatacagatgtacctgttg

SEQ ID NO: 21715 - DNA, 25 bp, Homo sapien
gtgtcgtctaaggaggaatacctgt

SEQ ID NO: 21716 - DNA, 25 bp, Homo sapien
gtgtcgtctaagcaggaatacctgt

SEQ ID NO: 21717 - DNA, 25 bp, Homo sapien
gtgttacgtcctcttttacagtctt

SEQ ID NO: 21718 - DNA, 25 bp, Homo sapien
gtgttacgtcctgttttacagtctt

SEQ ID NO: 21719 - DNA, 25 bp, Homo sapien
tagacctttcggttacggactggtc

SEQ ID NO: 21720 - DNA, 25 bp, Homo sapien
tagacctttcggatacggactggtc

SEQ ID NO: 21721 - DNA, 25 bp, Homo sapien
ccattatgagtacgttatacgtatt

SEQ ID NO: 21722 - DNA, 25 bp, Homo sapien
ccattatgagtaggttatacgtatt

SEQ ID NO: 21723 - DNA, 25 bp, Homo sapien
tcggtactactgtcggagttttcta

SEQ ID NO: 21724 - DNA, 25 bp, Homo sapien
tcggtactactgacggagttttcta

SEQ ID NO: 21725 - DNA, 25 bp, Homo sapien
actttgtgatacaccgatgattttt

SEQ ID NO: 21726 - DNA, 25 bp, Homo sapien
actttgtgatactccgatgattttt

SEQ ID NO: 21727 - DNA, 25 bp, Homo sapien
actagtaatcctcaatggttctaag

SEQ ID NO: 21728 - DNA, 25 bp, Homo sapien
actagtaatcctgaatggttctaag

SEQ ID NO: 21729 - DNA, 25 bp, Homo sapien
cgtacgtgttgtctaaagcgttaaa

SEQ ID NO: 21730 - DNA, 25 bp, Homo sapien
cgtacgtgttgtgtaaagcgttaaa

SEQ ID NO: 21731 - DNA, 25 bp, Homo sapien
tttgttactgtgtaacccgaaagac

SEQ ID NO: 21732 - DNA, 25 bp, Homo sapien
tttgttactgtgaaacccgaaagac

SEQ ID NO: 21733 - DNA, 25 bp, Homo sapien
tgttttgtgaaacgtcgaccactct

SEQ ID NO: 21734 - DNA, 25 bp, Homo sapien
tgttttgtgaaaggtcgaccactct

SEQ ID NO: 21735 - DNA, 25 bp, Homo sapien
acgagttttaagaacgggtgctccc

SEQ ID NO: 21736 - DNA, 25 bp, Homo sapien
acgagttttaagtacgggtgctccc

SEQ ID NO: 21737 - DNA, 25 bp, Homo sapien
tttcgtcagtacctttattgtccag

SEQ ID NO: 21738 - DNA, 25 bp, Homo sapien
tttcgtcagtacgtttattgtccag

SEQ ID NO: 21739 - DNA, 25 bp, Homo sapien
gtgttttactaagacttaatcgaca

SEQ ID NO: 21740 - DNA, 25 bp, Homo sapien
gtgttttactaacacttaatcgaca

SEQ ID NO: 21741 - DNA, 25 bp, Homo sapien
ggtgttatataacaactgacctttc

SEQ ID NO: 21742 - DNA, 25 bp, Homo sapien
ggtgttatataagaactgacctttc

SEQ ID NO: 21743 - DNA, 25 bp, Homo sapien
gtgtctatcactttaaacctggtct

SEQ ID NO: 21744 - DNA, 25 bp, Homo sapien
gtgtctatcactataaacctggtct

SEQ ID NO: 21745 - DNA, 25 bp, Homo sapien
ttctctcgatcgtaagtgtcttgtg

SEQ ID NO: 21746 - DNA, 25 bp, Homo sapien
ttctctcgatcgaaagtgtcttgtg

SEQ ID NO: 21747 - DNA, 25 bp, Homo sapien
taccagagtagtgaattgtgtctac

SEQ ID NO: 21748 - DNA, 25 bp, Homo sapien
taccagagtagtcaattgtgtctac

SEQ ID NO: 21749 - DNA, 25 bp, Homo sapien
aatagtatgctatgactgtgatcac

SEQ ID NO: 21750 - DNA, 25 bp, Homo sapien
aatagtatgctaagactgtgatcac

SEQ ID NO: 21751 - DNA, 25 bp, Homo sapien
aatgtatgtattctagtgtcgactc

SEQ ID NO: 21752 - DNA, 25 bp, Homo sapien
aatgtatgtattgtagtgtcgactc

SEQ ID NO: 21753 - DNA, 25 bp, Homo sapien
atattagtagctgtactgtctactc

SEQ ID NO: 21754 - DNA, 25 bp, Homo sapien
atattagtagctctactgtctactc

SEQ ID NO: 21755 - DNA, 25 bp, Homo sapien
gtcagtgttaactcatctgactctc

SEQ ID NO: 21756 - DNA, 25 bp, Homo sapien
gtcagtgttaacacatctgactctc

SEQ ID NO: 21757 - DNA, 25 bp, Homo sapien
ttatcgacgactagtttaattacgt

SEQ ID NO: 21758 - DNA, 25 bp, Homo sapien
ttatcgacgacttgtttaattacgt

SEQ ID NO: 21759 - DNA, 25 bp, Homo sapien
gtaagatcctaatcaacaagagtta

SEQ ID NO: 21760 - DNA, 25 bp, Homo sapien
gtaagatcctaaacaacaagagtta

SEQ ID NO: 21761 - DNA, 25 bp, Homo sapien
agtgtatcatgaacaaaagacatac

SEQ ID NO: 21762 - DNA, 25 bp, Homo sapien
agtgtatcatgatcaaaagacatac

SEQ ID NO: 21763 - DNA, 25 bp, Homo sapien
gtcgtacatctttactgtgaatcac

SEQ ID NO: 21764 - DNA, 25 bp, Homo sapien
gtcgtacatcttaactgtgaatcac

SEQ ID NO: 21765 - DNA, 25 bp, Homo sapien
tgggtgttcatctttcttcccgtcc

SEQ ID NO: 21766 - DNA, 25 bp, Homo sapien
tgggtgttcatcattcttcccgtcc

SEQ ID NO: 21767 - DNA, 25 bp, Homo sapien
cctgtccaggtttatgtcacggtca

SEQ ID NO: 21768 - DNA, 25 bp, Homo sapien
cctgtccaggttaatgtcacggtca

SEQ ID NO: 21769 - DNA, 25 bp, Homo sapien
attacttttagtggtgtcgagctca

SEQ ID NO: 21770 - DNA, 25 bp, Homo sapien
attacttttagtcgtgtcgagctca

SEQ ID NO: 21771 - DNA, 25 bp, Homo sapien
aaattttacgtttcggtggtttctc

SEQ ID NO: 21772 - DNA, 25 bp, Homo sapien
aaattttacgttacggtggtttctc

SEQ ID NO: 21773 - DNA, 25 bp, Homo sapien
ttccgtgttgtgtagtcatacttgt

SEQ ID NO: 21774 - DNA, 25 bp, Homo sapien
ttccgtgttgtgaagtcatacttgt

SEQ ID NO: 21775 - DNA, 25 bp, Homo sapien
cacagttccggtgaatagacgtcga

SEQ ID NO: 21776 - DNA, 25 bp, Homo sapien
cacagttccggtcaatagacgtcga

SEQ ID NO: 21777 - DNA, 25 bp, Homo sapien
agaatagaagttcaagttacggact

SEQ ID NO: 21778 - DNA, 25 bp, Homo sapien
agaatagaagttgaagttacggact

SEQ ID NO: 21779 - DNA, 25 bp, Homo sapien
gtatatacgttatttgaccttcaga

SEQ ID NO: 21780 - DNA, 25 bp, Homo sapien
gtatatacgttaattgaccttcaga

SEQ ID NO: 21781 - DNA, 25 bp, Homo sapien
gactgtctcttcacctatacgacga

SEQ ID NO: 21782 - DNA, 25 bp, Homo sapien
gactgtctcttctcctatacgacga

SEQ ID NO: 21783 - DNA, 25 bp, Homo sapien
ccagtctctcgtttcctacagtgtc

SEQ ID NO: 21784 - DNA, 25 bp, Homo sapien
ccagtctctcgtatcctacagtgtc

SEQ ID NO: 21785 - DNA, 25 bp, Homo sapien
cccgagtcctactggtccgtctttg

SEQ ID NO: 21786 - DNA, 25 bp, Homo sapien
cccgagtcctacaggtccgtctttg

SEQ ID NO: 21787 - DNA, 25 bp, Homo sapien
agtcgacagagttccgtcgtagagg

SEQ ID NO: 21788 - DNA, 25 bp, Homo sapien
agtcgacagagtaccgtcgtagagg

SEQ ID NO: 21789 - DNA, 25 bp, Homo sapien
cataacgacagagacagtcacacat

SEQ ID NO: 21790 - DNA, 25 bp, Homo sapien
cataacgacagacacagtcacacat

SEQ ID NO: 21791 - DNA, 25 bp, Homo sapien
aagaagtaacggatccaccaactct

SEQ ID NO: 21792 - DNA, 25 bp, Homo sapien
aagaagtaacggttccaccaactct

SEQ ID NO: 21793 - DNA, 25 bp, Homo sapien
ctagaattttctcactactgtgatg

SEQ ID NO: 21794 - DNA, 25 bp, Homo sapien
ctagaattttctgactactgtgatg

SEQ ID NO: 21795 - DNA, 25 bp, Homo sapien
tagaatctctcgaacctccggcgtg

SEQ ID NO: 21796 - DNA, 25 bp, Homo sapien
tagaatctctcgtacctccggcgtg

SEQ ID NO: 21797 - DNA, 25 bp, Homo sapien
gactttacttcctcgctcttagggt

SEQ ID NO: 21798 - DNA, 25 bp, Homo sapien
gactttacttccacgctcttagggt

SEQ ID NO: 21799 - DNA, 25 bp, Homo sapien
tagaacttccgagctcgtcaccgta

SEQ ID NO: 21800 - DNA, 25 bp, Homo sapien
tagaacttccgacctcgtcaccgta

SEQ ID NO: 21801 - DNA, 25 bp, Homo sapien
gtagatacccaccagtcattaagtt

SEQ ID NO: 21802 - DNA, 25 bp, Homo sapien
gtagatacccacgagtcattaagtt

SEQ ID NO: 21803 - DNA, 25 bp, Homo sapien
tcactaacgtgttacgaatttatgt

SEQ ID NO: 21804 - DNA, 25 bp, Homo sapien
tcactaacgtgtaacgaatttatgt

SEQ ID NO: 21805 - DNA, 25 bp, Homo sapien
ctacttaacgagatttaggtcttgt

SEQ ID NO: 21806 - DNA, 25 bp, Homo sapien
ctacttaacgagttttaggtcttgt

SEQ ID NO: 21807 - DNA, 25 bp, Homo sapien
agatcccagtcttcttagtacggag

SEQ ID NO: 21808 - DNA, 25 bp, Homo sapien
agatcccagtctacttagtacggag

SEQ ID NO: 21809 - DNA, 25 bp, Homo sapien
agatactctcgacaaacgtagaatt

SEQ ID NO: 21810 - DNA, 25 bp, Homo sapien
agatactctcgagaaacgtagaatt

SEQ ID NO: 21811 - DNA, 25 bp, Homo sapien
cagtatgacgtattcaagtacaaag

SEQ ID NO: 21812 - DNA, 25 bp, Homo sapien
cagtatgacgtaatcaagtacaaag

SEQ ID NO: 21813 - DNA, 25 bp, Homo sapien
ccttcgggttcaagacaaaatacga

SEQ ID NO: 21814 - DNA, 25 bp, Homo sapien
ccttcgggttcatgacaaaatacga

SEQ ID NO: 21815 - DNA, 25 bp, Homo sapien
atctagggacggtaagaactaactt

SEQ ID NO: 21816 - DNA, 25 bp, Homo sapien
atctagggacggaaagaactaactt

SEQ ID NO: 21817 - DNA, 25 bp, Homo sapien
gacgctattgacatctcaaagtttt

SEQ ID NO: 21818 - DNA, 25 bp, Homo sapien
gacgctattgacttctcaaagtttt

SEQ ID NO: 21819 - DNA, 25 bp, Homo sapien
ggaagaaagacactcgtcaaggtgg

SEQ ID NO: 21820 - DNA, 25 bp, Homo sapien
ggaagaaagacagtcgtcaaggtgg

SEQ ID NO: 21821 - DNA, 25 bp, Homo sapien
aaagaatcgggtccagtcgtcgtcg

SEQ ID NO: 21822 - DNA, 25 bp, Homo sapien
aaagaatcgggtgcagtcgtcgtcg

SEQ ID NO: 21823 - DNA, 25 bp, Homo sapien
atttcaagtcgttggagacaggttc

SEQ ID NO: 21824 - DNA, 25 bp, Homo sapien
atttcaagtcgtaggagacaggttc

SEQ ID NO: 21825 - DNA, 25 bp, Homo sapien
tcgacacctctgaccggaccgaaga

SEQ ID NO: 21826 - DNA, 25 bp, Homo sapien
tcgacacctctgtccggaccgaaga

SEQ ID NO: 21827 - DNA, 25 bp, Homo sapien
agacgtcacctgacccacggtaatc

SEQ ID NO: 21828 - DNA, 25 bp, Homo sapien
agacgtcacctgtcccacggtaatc

SEQ ID NO: 21829 - DNA, 25 bp, Homo sapien
gtccatacgtcatcccagtgagctc

SEQ ID NO: 21830 - DNA, 25 bp, Homo sapien
gtccatacgtcaacccagtgagctc

SEQ ID NO: 21831 - DNA, 25 bp, Homo sapien
gtctcccgtgatagctgtcgggtgt

SEQ ID NO: 21832 - DNA, 25 bp, Homo sapien
gtctcccgtgattgctgtcgggtgt

SEQ ID NO: 21833 - DNA, 25 bp, Homo sapien
cgtgaactgtagtgtctcgcttgac

SEQ ID NO: 21834 - DNA, 25 bp, Homo sapien
cgtgaactgtagagtctcgcttgac

SEQ ID NO: 21835 - DNA, 25 bp, Homo sapien
tcgacaacccgttctgtccgtgact

SEQ ID NO: 21836 - DNA, 25 bp, Homo sapien
tcgacaacccgtactgtccgtgact

SEQ ID NO: 21837 - DNA, 25 bp, Homo sapien
ccaggacacactaagtcgacgtcga

SEQ ID NO: 21838 - DNA, 25 bp, Homo sapien
ccaggacacacttagtcgacgtcga

SEQ ID NO: 21839 - DNA, 25 bp, Homo sapien
cgacccagttacctcagtggtgaga

SEQ ID NO: 21840 - DNA, 25 bp, Homo sapien
cgacccagttacgtcagtggtgaga

SEQ ID NO: 21841 - DNA, 25 bp, Homo sapien
cacaccgatgtctttcggtaggaca

SEQ ID NO: 21842 - DNA, 25 bp, Homo sapien
cacaccgatgtcattcggtaggaca

SEQ ID NO: 21843 - DNA, 25 bp, Homo sapien
gtcacacgtttattgtgagtcaacc

SEQ ID NO: 21844 - DNA, 25 bp, Homo sapien
gtcacacgtttaatgtgagtcaacc

SEQ ID NO: 21845 - DNA, 25 bp, Homo sapien
gagattagttttttgcgacaggacc

SEQ ID NO: 21846 - DNA, 25 bp, Homo sapien
gagattagttttatgcgacaggacc

SEQ ID NO: 21847 - DNA, 25 bp, Homo sapien
ggaggactaatcaccgacaccggca

SEQ ID NO: 21848 - DNA, 25 bp, Homo sapien
ggaggactaatctccgacaccggca

SEQ ID NO: 21849 - DNA, 25 bp, Homo sapien
gtaataaaactaaaggatccaactg

SEQ ID NO: 21850 - DNA, 25 bp, Homo sapien
gtaataaaactataggatccaactg

SEQ ID NO: 21851 - DNA, 25 bp, Homo sapien
gtccgaaaggtccaggtcttccgaa

SEQ ID NO: 21852 - DNA, 25 bp, Homo sapien
gtccgaaaggtcgaggtcttccgaa

SEQ ID NO: 21853 - DNA, 25 bp, Homo sapien
caaaggtatgtagtgtagtccgttc

SEQ ID NO: 21854 - DNA, 25 bp, Homo sapien
caaaggtatgtactgtagtccgttc

SEQ ID NO: 21855 - DNA, 25 bp, Homo sapien
attcagaagctatattttgtgtcct

SEQ ID NO: 21856 - DNA, 25 bp, Homo sapien
attcagaagctaaattttgtgtcct

SEQ ID NO: 21857 - DNA, 25 bp, Homo sapien
ccaacaggtccactcggtccggtag

SEQ ID NO: 21858 - DNA, 25 bp, Homo sapien
ccaacaggtccagtcggtccggtag

SEQ ID NO: 21859 - DNA, 25 bp, Homo sapien
atgacatattcgatatcggtcccac

SEQ ID NO: 21860 - DNA, 25 bp, Homo sapien
atgacatattcgttatcggtcccac

SEQ ID NO: 21861 - DNA, 25 bp, Homo sapien
agtagacggacgtgcccgaggctcc

SEQ ID NO: 21862 - DNA, 25 bp, Homo sapien
agtagacggacgagcccgaggctcc

SEQ ID NO: 21863 - DNA, 25 bp, Homo sapien
tgtggaacggtatcgcgtggacttc

SEQ ID NO: 21864 - DNA, 25 bp, Homo sapien
tgtggaacggtaacgcgtggacttc

SEQ ID NO: 21865 - DNA, 25 bp, Homo sapien
ccgaaacttacagtagagacttcgt

SEQ ID NO: 21866 - DNA, 25 bp, Homo sapien
ccgaaacttacactagagacttcgt

SEQ ID NO: 21867 - DNA, 25 bp, Homo sapien
tagaacggagatgaacggggtcatc

SEQ ID NO: 21868 - DNA, 25 bp, Homo sapien
tagaacggagatcaacggggtcatc

SEQ ID NO: 21869 - DNA, 25 bp, Homo sapien
gtctcaagcggacgttgcggcgaaa

SEQ ID NO: 21870 - DNA, 25 bp, Homo sapien
gtctcaagcggaggttgcggcgaaa

SEQ ID NO: 21871 - DNA, 25 bp, Homo sapien
ccgtccaagggacaggggtccgacc

SEQ ID NO: 21872 - DNA, 25 bp, Homo sapien
ccgtccaagggagaggggtccgacc

SEQ ID NO: 21873 - DNA, 25 bp, Homo sapien
ctgtcgcagcggagcgggggtcccg

SEQ ID NO: 21874 - DNA, 25 bp, Homo sapien
ctgtcgcagcggtgcgggggtcccg

SEQ ID NO: 21875 - DNA, 25 bp, Homo sapien
tcaagacgagagacgagggattctc

SEQ ID NO: 21876 - DNA, 25 bp, Homo sapien
tcaagacgagagtcgagggattctc

SEQ ID NO: 21877 - DNA, 25 bp, Homo sapien
ctcatattagagtcaggtactccca

SEQ ID NO: 21878 - DNA, 25 bp, Homo sapien
ctcatattagagacaggtactccca

SEQ ID NO: 21879 - DNA, 25 bp, Homo sapien
gttcattaagagtaaagtctccacc

SEQ ID NO: 21880 - DNA, 25 bp, Homo sapien
gttcattaagagaaaagtctccacc

SEQ ID NO: 21881 - DNA, 25 bp, Homo sapien
tataaaagaagtatcagtgtcccat

SEQ ID NO: 21882 - DNA, 25 bp, Homo sapien
tataaaagaagtttcagtgtcccat

SEQ ID NO: 21883 - DNA, 25 bp, Homo sapien
ggtcgagaagacttctccatcccac

SEQ ID NO: 21884 - DNA, 25 bp, Homo sapien
ggtcgagaagacatctccatcccac

SEQ ID NO: 21885 - DNA, 25 bp, Homo sapien
tgtgtggtaaaaatacaagacctca

SEQ ID NO: 21886 - DNA, 25 bp, Homo sapien
tgtgtggtaaaattacaagacctca

SEQ ID NO: 21887 - DNA, 25 bp, Homo sapien
ctcgttttgaaatgacagtctccga

SEQ ID NO: 21888 - DNA, 25 bp, Homo sapien
ctcgttttgaaaagacagtctccga

SEQ ID NO: 21889 - DNA, 25 bp, Homo sapien
ggacacagacttgataattacccaa

SEQ ID NO: 21890 - DNA, 25 bp, Homo sapien
ggacacagacttcataattacccaa

SEQ ID NO: 21891 - DNA, 25 bp, Homo sapien
gaaaagacttcttaattacgtttaa

SEQ ID NO: 21892 - DNA, 25 bp, Homo sapien
gaaaagacttctaaattacgtttaa

SEQ ID NO: 21893 - DNA, 25 bp, Homo sapien
tcacagaccgtgaaagtcattaata

SEQ ID NO: 21894 - DNA, 25 bp, Homo sapien
tcacagaccgtgtaagtcattaata

SEQ ID NO: 21895 - DNA, 25 bp, Homo sapien
cagaggggaccctgtctacgacgag

SEQ ID NO: 21896 - DNA, 25 bp, Homo sapien
cagaggggacccagtctacgacgag

SEQ ID NO: 21897 - DNA, 25 bp, Homo sapien
cgagacgaagacagacaacctcgaa

SEQ ID NO: 21898 - DNA, 25 bp, Homo sapien
cgagacgaagactgacaacctcgaa

SEQ ID NO: 21899 - DNA, 25 bp, Homo sapien
cgggaagtactccgacgacaagagg

SEQ ID NO: 21900 - DNA, 25 bp, Homo sapien
cgggaagtactcggacgacaagagg

SEQ ID NO: 21901 - DNA, 25 bp, Homo sapien
ctcgtcccgaccaagagactacgga

SEQ ID NO: 21902 - DNA, 25 bp, Homo sapien
ctcgtcccgacctagagactacgga

SEQ ID NO: 21903 - DNA, 25 bp, Homo sapien
atagagtctatcattgacgtagagc

SEQ ID NO: 21904 - DNA, 25 bp, Homo sapien
atagagtctatctttgacgtagagc

SEQ ID NO: 21905 - DNA, 25 bp, Homo sapien
tcttttgtacttcctgtagaatgtg

SEQ ID NO: 21906 - DNA, 25 bp, Homo sapien
tcttttgtacttgctgtagaatgtg

SEQ ID NO: 21907 - DNA, 25 bp, Homo sapien
acttatggtcagtgtacaattgacg

SEQ ID NO: 21908 - DNA, 25 bp, Homo sapien
acttatggtcagagtacaattgacg

SEQ ID NO: 21909 - DNA, 25 bp, Homo sapien
actacacctggttgtccatagtctg

SEQ ID NO: 21910 - DNA, 25 bp, Homo sapien
actacacctggtagtccatagtctg

SEQ ID NO: 21911 - DNA, 25 bp, Homo sapien
agcagcgaggtcagccactcgtcgc

SEQ ID NO: 21912 - DNA, 25 bp, Homo sapien
agcagcgaggtctgccactcgtcgc

SEQ ID NO: 21913 - DNA, 25 bp, Homo sapien
gtgagcgggagtctcctctcgtcgt

SEQ ID NO: 21914 - DNA, 25 bp, Homo sapien
gtgagcgggagtgtcctctcgtcgt

SEQ ID NO: 21915 - DNA, 25 bp, Homo sapien
taggacttgagtcgtcgagactagg

SEQ ID NO: 21916 - DNA, 25 bp, Homo sapien
taggacttgagtggtcgagactagg

SEQ ID NO: 21917 - DNA, 25 bp, Homo sapien
gcggcagtaccctgggagagtcact

SEQ ID NO: 21918 - DNA, 25 bp, Homo sapien
gcggcagtacccagggagagtcact

SEQ ID NO: 21919 - DNA, 25 bp, Homo sapien
ggagtggtggctcatccttatcacc

SEQ ID NO: 21920 - DNA, 25 bp, Homo sapien
ggagtggtggctgatccttatcacc

SEQ ID NO: 21921 - DNA, 25 bp, Homo sapien
cgtccgaagactcactactctcagg

SEQ ID NO: 21922 - DNA, 25 bp, Homo sapien
cgtccgaagactgactactctcagg

SEQ ID NO: 21923 - DNA, 25 bp, Homo sapien
gaaacgaaaaactacgaccgtcacc

SEQ ID NO: 21924 - DNA, 25 bp, Homo sapien
gaaacgaaaaacaacgaccgtcacc

SEQ ID NO: 21925 - DNA, 25 bp, Homo sapien
gagactctgaagcacaagaacaacc

SEQ ID NO: 21926 - DNA, 25 bp, Homo sapien
gagactctgaaggacaagaacaacc

SEQ ID NO: 21927 - DNA, 25 bp, Homo sapien
gaagttggaatcgaccccgacgtcg

SEQ ID NO: 21928 - DNA, 25 bp, Homo sapien
gaagttggaatccaccccgacgtcg

SEQ ID NO: 21929 - DNA, 25 bp, Homo sapien
cattgtcgaacgaaataccgacctt

SEQ ID NO: 21930 - DNA, 25 bp, Homo sapien
cattgtcgaacgtaataccgacctt

SEQ ID NO: 21931 - DNA, 25 bp, Homo sapien
agctggacaagtagaactaatcgta

SEQ ID NO: 21932 - DNA, 25 bp, Homo sapien
agctggacaagttgaactaatcgta

SEQ ID NO: 21933 - DNA, 25 bp, Homo sapien
gtactgcgaaataaacggtcattat

SEQ ID NO: 21934 - DNA, 25 bp, Homo sapien
gtactgcgaaattaacggtcattat

SEQ ID NO: 21935 - DNA, 25 bp, Homo sapien
tgtactgaaaattacagacgcgcca

SEQ ID NO: 21936 - DNA, 25 bp, Homo sapien
tgtactgaaaataacagacgcgcca

SEQ ID NO: 21937 - DNA, 25 bp, Homo sapien
ttcatgacaaataccggtggtcgtc

SEQ ID NO: 21938 - DNA, 25 bp, Homo sapien
ttcatgacaaattccggtggtcgtc

SEQ ID NO: 21939 - DNA, 25 bp, Homo sapien
agtcttacgaggtctctttccgtcc

SEQ ID NO: 21940 - DNA, 25 bp, Homo sapien
agtcttacgaggactctttccgtcc

SEQ ID NO: 21941 - DNA, 25 bp, Homo sapien
atagtatcgatgagaatgcgacttc

SEQ ID NO: 21942 - DNA, 25 bp, Homo sapien
atagtatcgatgtgaatgcgacttc

SEQ ID NO: 21943 - DNA, 25 bp, Homo sapien
aagtacttcacctggagtgcgacca

SEQ ID NO: 21944 - DNA, 25 bp, Homo sapien
aagtacttcaccaggagtgcgacca

SEQ ID NO: 21945 - DNA, 25 bp, Homo sapien
gaagtgaaccccagggtgcgaccct

SEQ ID NO: 21946 - DNA, 25 bp, Homo sapien
gaagtgaacccctgggtgcgaccct

SEQ ID NO: 21947 - DNA, 25 bp, Homo sapien
gaagtgtcagactagggggtccttt

SEQ ID NO: 21948 - DNA, 25 bp, Homo sapien
gaagtgtcagacaagggggtccttt

SEQ ID NO: 21949 - DNA, 25 bp, Homo sapien
tcgtctccagagacccgtcctgtat

SEQ ID NO: 21950 - DNA, 25 bp, Homo sapien
tcgtctccagagtcccgtcctgtat

SEQ ID NO: 21951 - DNA, 25 bp, Homo sapien
attgtcaagtagtccagtccgttat

SEQ ID NO: 21952 - DNA, 25 bp, Homo sapien
attgtcaagtagaccagtccgttat

SEQ ID NO: 21953 - DNA, 25 bp, Homo sapien
agtgtaggtggcagaccgtcgacct

SEQ ID NO: 21954 - DNA, 25 bp, Homo sapien
agtgtaggtggctgaccgtcgacct

SEQ ID NO: 21955 - DNA, 25 bp, Homo sapien
ttttcgaagtcttagagtcacacct

SEQ ID NO: 21956 - DNA, 25 bp, Homo sapien
ttttcgaagtctaagagtcacacct

SEQ ID NO: 21957 - DNA, 25 bp, Homo sapien
tcagagcgagacagcgggtccgacc

SEQ ID NO: 21958 - DNA, 25 bp, Homo sapien
tcagagcgagactgcgggtccgacc

SEQ ID NO: 21959 - DNA, 25 bp, Homo sapien
gaggtagagctataacgcctgcggc

SEQ ID NO: 21960 - DNA, 25 bp, Homo sapien
gaggtagagctaaaacgcctgcggc

SEQ ID NO: 21961 - DNA, 25 bp, Homo sapien
tgagacacgactagacgctggtaac

SEQ ID NO: 21962 - DNA, 25 bp, Homo sapien
tgagacacgacttgacgctggtaac

SEQ ID NO: 21963 - DNA, 25 bp, Homo sapien
gaggacgactacttatacactctga

SEQ ID NO: 21964 - DNA, 25 bp, Homo sapien
gaggacgactacatatacactctga

SEQ ID NO: 21965 - DNA, 25 bp, Homo sapien
aacgtgtcacgaatacagatattat

SEQ ID NO: 21966 - DNA, 25 bp, Homo sapien
aacgtgtcacgattacagatattat

SEQ ID NO: 21967 - DNA, 25 bp, Homo sapien
gtaaggtaccgtcacttcatcgttt

SEQ ID NO: 21968 - DNA, 25 bp, Homo sapien
gtaaggtaccgtgacttcatcgttt

SEQ ID NO: 21969 - DNA, 25 bp, Homo sapien
gtatctgtccctcgtcgaatattat

SEQ ID NO: 21970 - DNA, 25 bp, Homo sapien
gtatctgtccctggtcgaatattat

SEQ ID NO: 21971 - DNA, 25 bp, Homo sapien
gtattatcatctgtgtctcattacg

SEQ ID NO: 21972 - DNA, 25 bp, Homo sapien
gtattatcatctctgtctcattacg

SEQ ID NO: 21973 - DNA, 25 bp, Homo sapien
ctattatgtacgtagtccgtgtaag

SEQ ID NO: 21974 - DNA, 25 bp, Homo sapien
ctattatgtacgaagtccgtgtaag

SEQ ID NO: 21975 - DNA, 25 bp, Homo sapien
gtcgatacatgtcatagtgcttcta

SEQ ID NO: 21976 - DNA, 25 bp, Homo sapien
gtcgatacatgtgatagtgcttcta

SEQ ID NO: 21977 - DNA, 25 bp, Homo sapien
tgtcaagtgtcttagtggtctaact

SEQ ID NO: 21978 - DNA, 25 bp, Homo sapien
tgtcaagtgtctaagtggtctaact

SEQ ID NO: 21979 - DNA, 25 bp, Homo sapien
tggtaggacgttacgtgtcgtgtct

SEQ ID NO: 21980 - DNA, 25 bp, Homo sapien
tggtaggacgtttcgtgtcgtgtct

SEQ ID NO: 21981 - DNA, 25 bp, Homo sapien
ttatttgtgtcgtcgtacacggttg

SEQ ID NO: 21982 - DNA, 25 bp, Homo sapien
ttatttgtgtcgacgtacacggttg

SEQ ID NO: 21983 - DNA, 25 bp, Homo sapien
aacacttcaagtatagtctcgcttg

SEQ ID NO: 21984 - DNA, 25 bp, Homo sapien
aacacttcaagtttagtctcgcttg

SEQ ID NO: 21985 - DNA, 25 bp, Homo sapien
aacacagggtcgtagactccccggt

SEQ ID NO: 21986 - DNA, 25 bp, Homo sapien
aacacagggtcgaagactccccggt

SEQ ID NO: 21987 - DNA, 25 bp, Homo sapien
aactgtcgactgaacatcacccagt

SEQ ID NO: 21988 - DNA, 25 bp, Homo sapien
aactgtcgactgtacatcacccagt

SEQ ID NO: 21989 - DNA, 25 bp, Homo sapien
tcttcaggtcaatggaacctcaaat

SEQ ID NO: 21990 - DNA, 25 bp, Homo sapien
tcttcaggtcaaaggaacctcaaat

SEQ ID NO: 21991 - DNA, 25 bp, Homo sapien
tcgcggtggtcgacgagcctccaga

SEQ ID NO: 21992 - DNA, 25 bp, Homo sapien
tcgcggtggtcgtcgagcctccaga

SEQ ID NO: 21993 - DNA, 25 bp, Homo sapien
tcactggttacaggttcactgaata

SEQ ID NO: 21994 - DNA, 25 bp, Homo sapien
tcactggttacacgttcactgaata

SEQ ID NO: 21995 - DNA, 25 bp, Homo sapien
ccccggagacccttggtcgtagaga

SEQ ID NO: 21996 - DNA, 25 bp, Homo sapien
ccccggagacccatggtcgtagaga

SEQ ID NO: 21997 - DNA, 25 bp, Homo sapien
aggtccgacggtgctcgtcgtcgac

SEQ ID NO: 21998 - DNA, 25 bp, Homo sapien
aggtccgacggtcctcgtcgtcgac

SEQ ID NO: 21999 - DNA, 25 bp, Homo sapien
ttctccgacgaggtcctcgtgtcgc

SEQ ID NO: 22000 - DNA, 25 bp, Homo sapien
ttctccgacgagctcctcgtgtcgc

SEQ ID NO: 22001 - DNA, 25 bp, Homo sapien
tgaagtgctccagaacccagacgtc

SEQ ID NO: 22002 - DNA, 25 bp, Homo sapien
tgaagtgctccacaacccagacgtc

SEQ ID NO: 22003 - DNA, 25 bp, Homo sapien
aaaacgttcgtacgatagatcaaca

SEQ ID NO: 22004 - DNA, 25 bp, Homo sapien
aaaacgttcgtaggatagatcaaca

SEQ ID NO: 22005 - DNA, 25 bp, Homo sapien
tgcaaaagtgagaacagagttccaa

SEQ ID NO: 22006 - DNA, 25 bp, Homo sapien
tgcaaaagtgagtacagagttccaa

SEQ ID NO: 22007 - DNA, 25 bp, Homo sapien
gacctagtcttttcggttatttaag

SEQ ID NO: 22008 - DNA, 25 bp, Homo sapien
gacctagtctttacggttatttaag

SEQ ID NO: 22009 - DNA, 25 bp, Homo sapien
cacccactcttctaccggaggagaa

SEQ ID NO: 22010 - DNA, 25 bp, Homo sapien
cacccactcttcaaccggaggagaa

SEQ ID NO: 22011 - DNA, 25 bp, Homo sapien
tccgtgtccactagcgaggtgaccc

SEQ ID NO: 22012 - DNA, 25 bp, Homo sapien
tccgtgtccacttgcgaggtgaccc

SEQ ID NO: 22013 - DNA, 25 bp, Homo sapien
tcctgtacatactcgggagagaccc

SEQ ID NO: 22014 - DNA, 25 bp, Homo sapien
tcctgtacatacacgggagagaccc

SEQ ID NO: 22015 - DNA, 25 bp, Homo sapien
cgagtggtttgaggatggactctac

SEQ ID NO: 22016 - DNA, 25 bp, Homo sapien
cgagtggtttgacgatggactctac

SEQ ID NO: 22017 - DNA, 25 bp, Homo sapien
cgtgcatgtgtgtgagtccgaagtc

SEQ ID NO: 22018 - DNA, 25 bp, Homo sapien
cgtgcatgtgtgagagtccgaagtc

SEQ ID NO: 22019 - DNA, 25 bp, Homo sapien
agtatctaattgtaaaagctctcgt

SEQ ID NO: 22020 - DNA, 25 bp, Homo sapien
agtatctaattgaaaaagctctcgt

SEQ ID NO: 22021 - DNA, 25 bp, Homo sapien
ttgtctctgttgaccagtgtaatcg

SEQ ID NO: 22022 - DNA, 25 bp, Homo sapien
ttgtctctgttgtccagtgtaatcg

SEQ ID NO: 22023 - DNA, 25 bp, Homo sapien
ctagtgtctaaatacatgtatatac

SEQ ID NO: 22024 - DNA, 25 bp, Homo sapien
ctagtgtctaaaaacatgtatatac

SEQ ID NO: 22025 - DNA, 25 bp, Homo sapien
agttgcgtctcaacggtatttggaa

SEQ ID NO: 22026 - DNA, 25 bp, Homo sapien
agttgcgtctcatcggtatttggaa

SEQ ID NO: 22027 - DNA, 25 bp, Homo sapien
taaagactccacattatttcgggag

SEQ ID NO: 22028 - DNA, 25 bp, Homo sapien
taaagactccactttatttcgggag

SEQ ID NO: 22029 - DNA, 25 bp, Homo sapien
ttgtgtaatccctgtgttcaagggg

SEQ ID NO: 22030 - DNA, 25 bp, Homo sapien
ttgtgtaatcccagtgttcaagggg

SEQ ID NO: 22031 - DNA, 25 bp, Homo sapien
tggtttaccgtcctgtaaacagggg

SEQ ID NO: 22032 - DNA, 25 bp, Homo sapien
tggtttaccgtcgtgtaaacagggg

SEQ ID NO: 22033 - DNA, 25 bp, Homo sapien
tactgttgtcctcgattcagaactt

SEQ ID NO: 22034 - DNA, 25 bp, Homo sapien
tactgttgtcctggattcagaactt

SEQ ID NO: 22035 - DNA, 25 bp, Homo sapien
actttttgtgacctgaatcagaatt

SEQ ID NO: 22036 - DNA, 25 bp, Homo sapien
actttttgtgacgtgaatcagaatt

SEQ ID NO: 22037 - DNA, 25 bp, Homo sapien
ctttcggcaacaagcgtcagacatt

SEQ ID NO: 22038 - DNA, 25 bp, Homo sapien
ctttcggcaacatgcgtcagacatt

SEQ ID NO: 22039 - DNA, 25 bp, Homo sapien
ttgggaacgagtgacacgtctgatt

SEQ ID NO: 22040 - DNA, 25 bp, Homo sapien
ttgggaacgagtcacacgtctgatt

SEQ ID NO: 22041 - DNA, 25 bp, Homo sapien
ctttctgcgtgaaaccgaatattaa

SEQ ID NO: 22042 - DNA, 25 bp, Homo sapien
ctttctgcgtgataccgaatattaa

SEQ ID NO: 22043 - DNA, 25 bp, Homo sapien
ctttatatcctttctggcatgtatg

SEQ ID NO: 22044 - DNA, 25 bp, Homo sapien
ctttatatccttactggcatgtatg

SEQ ID NO: 22045 - DNA, 25 bp, Homo sapien
gtcataaccttacagaagcaaactg

SEQ ID NO: 22046 - DNA, 25 bp, Homo sapien
gtcataaccttagagaagcaaactg

SEQ ID NO: 22047 - DNA, 25 bp, Homo sapien
cgagaagagcaactagagcaccctc

SEQ ID NO: 22048 - DNA, 25 bp, Homo sapien
cgagaagagcaagtagagcaccctc

SEQ ID NO: 22049 - DNA, 25 bp, Homo sapien
atacctcagcatgtcggccagtcgc

SEQ ID NO: 22050 - DNA, 25 bp, Homo sapien
atacctcagcatctcggccagtcgc

SEQ ID NO: 22051 - DNA, 25 bp, Homo sapien
attctccgtcttaccgtgccggaca

SEQ ID NO: 22052 - DNA, 25 bp, Homo sapien
attctccgtctttccgtgccggaca

SEQ ID NO: 22053 - DNA, 25 bp, Homo sapien
gtccccgacactcaatgtcggaaat

SEQ ID NO: 22054 - DNA, 25 bp, Homo sapien
gtccccgacactgaatgtcggaaat

SEQ ID NO: 22055 - DNA, 25 bp, Homo sapien
acacacagacgtcgaaccggggaag

SEQ ID NO: 22056 - DNA, 25 bp, Homo sapien
acacacagacgtggaaccggggaag

SEQ ID NO: 22057 - DNA, 25 bp, Homo sapien
ctccaacaacagaagctccacggga

SEQ ID NO: 22058 - DNA, 25 bp, Homo sapien
ctccaacaacagtagctccacggga

SEQ ID NO: 22059 - DNA, 25 bp, Homo sapien
ccgcgaaagacaggtcctagaagac

SEQ ID NO: 22060 - DNA, 25 bp, Homo sapien
ccgcgaaagacacgtcctagaagac

SEQ ID NO: 22061 - DNA, 25 bp, Homo sapien
cgagtcaggagataacctctaagac

SEQ ID NO: 22062 - DNA, 25 bp, Homo sapien
cgagtcaggagaaaacctctaagac

SEQ ID NO: 22063 - DNA, 25 bp, Homo sapien
gtcgtgaacgctaaccgactcaacc

SEQ ID NO: 22064 - DNA, 25 bp, Homo sapien
gtcgtgaacgcttaccgactcaacc

SEQ ID NO: 22065 - DNA, 25 bp, Homo sapien
gtgcgcgtgacgtgcggctccgctc

SEQ ID NO: 22066 - DNA, 25 bp, Homo sapien
gtgcgcgtgacgagcggctccgctc

SEQ ID NO: 22067 - DNA, 25 bp, Homo sapien
gtgagggtcgttggactaccgtccc

SEQ ID NO: 22068 - DNA, 25 bp, Homo sapien
gtgagggtcgttcgactaccgtccc

SEQ ID NO: 22069 - DNA, 25 bp, Homo sapien
ctccggaggtcgagtcgtccacctg

SEQ ID NO: 22070 - DNA, 25 bp, Homo sapien
ctccggaggtcgtgtcgtccacctg

SEQ ID NO: 22071 - DNA, 25 bp, Homo sapien
taggacgttccgtagcacgcccggt

SEQ ID NO: 22072 - DNA, 25 bp, Homo sapien
taggacgttccgaagcacgcccggt

SEQ ID NO: 22073 - DNA, 25 bp, Homo sapien
gttccacggtctcaagggtcccgtt

SEQ ID NO: 22074 - DNA, 25 bp, Homo sapien
gttccacggtctgaagggtcccgtt

SEQ ID NO: 22075 - DNA, 25 bp, Homo sapien
ccgtcataccgaggagaggctcggt

SEQ ID NO: 22076 - DNA, 25 bp, Homo sapien
ccgtcataccgacgagaggctcggt

SEQ ID NO: 22077 - DNA, 25 bp, Homo sapien
tgttcttcctgcagaagaagctctt

SEQ ID NO: 22078 - DNA, 25 bp, Homo sapien
tgttcttcctgctgaagaagctctt

SEQ ID NO: 22079 - DNA, 25 bp, Homo sapien
ttcttatctgggaggacggagactt

SEQ ID NO: 22080 - DNA, 25 bp, Homo sapien
ttcttatctgggtggacggagactt

SEQ ID NO: 22081 - DNA, 25 bp, Homo sapien
ttgtttgtcggctgcggtcacttat

SEQ ID NO: 22082 - DNA, 25 bp, Homo sapien
ttgtttgtcggcagcggtcacttat

SEQ ID NO: 22083 - DNA, 25 bp, Homo sapien
cgtcagagtcggagaggctctgcgt

SEQ ID NO: 22084 - DNA, 25 bp, Homo sapien
cgtcagagtcggtgaggctctgcgt

SEQ ID NO: 22085 - DNA, 25 bp, Homo sapien
tcgtcgtgggtctgacgttctggat

SEQ ID NO: 22086 - DNA, 25 bp, Homo sapien
tcgtcgtgggtcagacgttctggat

SEQ ID NO: 22087 - DNA, 25 bp, Homo sapien
ttccgtggtgaccaggtcgagacga

SEQ ID NO: 22088 - DNA, 25 bp, Homo sapien
ttccgtggtgacgaggtcgagacga

SEQ ID NO: 22089 - DNA, 25 bp, Homo sapien
gaccttatcgcaacgagtcacgcag

SEQ ID NO: 22090 - DNA, 25 bp, Homo sapien
gaccttatcgcatcgagtcacgcag

SEQ ID NO: 22091 - DNA, 25 bp, Homo sapien
actttacaaactgaagagtcacccg

SEQ ID NO: 22092 - DNA, 25 bp, Homo sapien
actttacaaactcaagagtcacccg

SEQ ID NO: 22093 - DNA, 25 bp, Homo sapien
gtataagacctcgacgtgcactcgt

SEQ ID NO: 22094 - DNA, 25 bp, Homo sapien
gtataagacctccacgtgcactcgt

SEQ ID NO: 22095 - DNA, 25 bp, Homo sapien
aacgtgaagagtctcggtgtaaccg

SEQ ID NO: 22096 - DNA, 25 bp, Homo sapien
aacgtgaagagtgtcggtgtaaccg

SEQ ID NO: 22097 - DNA, 25 bp, Homo sapien
ggagagacttgtaccggtcgtaaag

SEQ ID NO: 22098 - DNA, 25 bp, Homo sapien
ggagagacttgttccggtcgtaaag

SEQ ID NO: 22099 - DNA, 25 bp, Homo sapien
cgggagtttggacgttcgtactaag

SEQ ID NO: 22100 - DNA, 25 bp, Homo sapien
cgggagtttggaggttcgtactaag

SEQ ID NO: 22101 - DNA, 25 bp, Homo sapien
gggagtgtatgttgacactccgaag

SEQ ID NO: 22102 - DNA, 25 bp, Homo sapien
gggagtgtatgtagacactccgaag

SEQ ID NO: 22103 - DNA, 25 bp, Homo sapien
ttcggggagttttcctatccacacc

SEQ ID NO: 22104 - DNA, 25 bp, Homo sapien
ttcggggagtttacctatccacacc

SEQ ID NO: 22105 - DNA, 25 bp, Homo sapien
gcagtggttgaccctgctgtacctc

SEQ ID NO: 22106 - DNA, 25 bp, Homo sapien
gcagtggttgacgctgctgtacctc

SEQ ID NO: 22107 - DNA, 25 bp, Homo sapien
gttggggtttgatgtctgttgtccc

SEQ ID NO: 22108 - DNA, 25 bp, Homo sapien
gttggggtttgaagtctgttgtccc

SEQ ID NO: 22109 - DNA, 25 bp, Homo sapien
agagtattattcagtcgttttcaac

SEQ ID NO: 22110 - DNA, 25 bp, Homo sapien
agagtattattctgtcgttttcaac

SEQ ID NO: 22111 - DNA, 25 bp, Homo sapien
agatactgacgttacgttttaagac

SEQ ID NO: 22112 - DNA, 25 bp, Homo sapien
agatactgacgtaacgttttaagac

SEQ ID NO: 22113 - DNA, 25 bp, Homo sapien
tgatatgtaacgtatacgtgacccg

SEQ ID NO: 22114 - DNA, 25 bp, Homo sapien
tgatatgtaacgaatacgtgacccg

SEQ ID NO: 22115 - DNA, 25 bp, Homo sapien
tacgtttatacacgactcgtactcc

SEQ ID NO: 22116 - DNA, 25 bp, Homo sapien
tacgtttatacaggactcgtactcc

SEQ ID NO: 22117 - DNA, 25 bp, Homo sapien
agagacgtgtataacagtattctcc

SEQ ID NO: 22118 - DNA, 25 bp, Homo sapien
agagacgtgtattacagtattctcc

SEQ ID NO: 22119 - DNA, 25 bp, Homo sapien
gtaaacttagtatagacttactgac

SEQ ID NO: 22120 - DNA, 25 bp, Homo sapien
gtaaacttagtaaagacttactgac

SEQ ID NO: 22121 - DNA, 25 bp, Homo sapien
gtaactcgttatgacacactcctgc

SEQ ID NO: 22122 - DNA, 25 bp, Homo sapien
gtaactcgttatcacacactcctgc

SEQ ID NO: 22123 - DNA, 25 bp, Homo sapien
agagggagcttctgaaaatcgtgac

SEQ ID NO: 22124 - DNA, 25 bp, Homo sapien
agagggagcttcagaaaatcgtgac

SEQ ID NO: 22125 - DNA, 25 bp, Homo sapien
ctcgaggtccgacgacaatagtcca

SEQ ID NO: 22126 - DNA, 25 bp, Homo sapien
ctcgaggtccgaggacaatagtcca

SEQ ID NO: 22127 - DNA, 25 bp, Homo sapien
cccaaccgacgtcgacaccactacc

SEQ ID NO: 22128 - DNA, 25 bp, Homo sapien
cccaaccgacgtggacaccactacc

SEQ ID NO: 22129 - DNA, 25 bp, Homo sapien
ctcgacgaaacaaaggacgtcatca

SEQ ID NO: 22130 - DNA, 25 bp, Homo sapien
ctcgacgaaacataggacgtcatca

SEQ ID NO: 22131 - DNA, 25 bp, Homo sapien
tatagactaaaaaggactcttaacg

SEQ ID NO: 22132 - DNA, 25 bp, Homo sapien
tatagactaaaatggactcttaacg

SEQ ID NO: 22133 - DNA, 25 bp, Homo sapien
gagtgtgacggtggagaccaaggga

SEQ ID NO: 22134 - DNA, 25 bp, Homo sapien
gagtgtgacggtcgagaccaaggga

SEQ ID NO: 22135 - DNA, 25 bp, Homo sapien
cttcgacgggaaagacacggtccag

SEQ ID NO: 22136 - DNA, 25 bp, Homo sapien
cttcgacgggaatgacacggtccag

SEQ ID NO: 22137 - DNA, 25 bp, Homo sapien
accgcactgggcagccgagcgacag

SEQ ID NO: 22138 - DNA, 25 bp, Homo sapien
accgcactgggctgccgagcgacag

SEQ ID NO: 22139 - DNA, 25 bp, Homo sapien
tgcaccggaggtctgtcgtctcgtg

SEQ ID NO: 22140 - DNA, 25 bp, Homo sapien
tgcaccggaggtgtgtcgtctcgtg

SEQ ID NO: 22141 - DNA, 25 bp, Homo sapien
cctcgggagtctgtcgtcaccgtag

SEQ ID NO: 22142 - DNA, 25 bp, Homo sapien
cctcgggagtctctcgtcaccgtag

SEQ ID NO: 22143 - DNA, 25 bp, Homo sapien
ccatctggagtcagacctcaacgac

SEQ ID NO: 22144 - DNA, 25 bp, Homo sapien
ccatctggagtctgacctcaacgac

SEQ ID NO: 22145 - DNA, 25 bp, Homo sapien
ttcatcgtaggtagtttgtcgaaac

SEQ ID NO: 22146 - DNA, 25 bp, Homo sapien
ttcatcgtaggttgtttgtcgaaac

SEQ ID NO: 22147 - DNA, 25 bp, Homo sapien
tctcgttagtcgacagggcgcaaag

SEQ ID NO: 22148 - DNA, 25 bp, Homo sapien
tctcgttagtcgtcagggcgcaaag

SEQ ID NO: 22149 - DNA, 25 bp, Homo sapien
tgcctctttcttcacgcggcggaaa

SEQ ID NO: 22150 - DNA, 25 bp, Homo sapien
tgcctctttcttgacgcggcggaaa

SEQ ID NO: 22151 - DNA, 25 bp, Homo sapien
acctagaagtaagtgtcgagataca

SEQ ID NO: 22152 - DNA, 25 bp, Homo sapien
acctagaagtaactgtcgagataca

SEQ ID NO: 22153 - DNA, 25 bp, Homo sapien
cccgaagaggtcccgtcgtttcgcg

SEQ ID NO: 22154 - DNA, 25 bp, Homo sapien
cccgaagaggtcgcgtcgtttcgcg

SEQ ID NO: 22155 - DNA, 25 bp, Homo sapien
cctccacatagcagacatagtcttg

SEQ ID NO: 22156 - DNA, 25 bp, Homo sapien
cctccacatagctgacatagtcttg

SEQ ID NO: 22157 - DNA, 25 bp, Homo sapien
tccaacccgtcgaactatacgtgtg

SEQ ID NO: 22158 - DNA, 25 bp, Homo sapien
tccaacccgtcgtactatacgtgtg

SEQ ID NO: 22159 - DNA, 25 bp, Homo sapien
tcgccgtttacaagtccgtccagag

SEQ ID NO: 22160 - DNA, 25 bp, Homo sapien
tcgccgtttacatgtccgtccagag

SEQ ID NO: 22161 - DNA, 25 bp, Homo sapien
gctttcggtccttttatggttcaat

SEQ ID NO: 22162 - DNA, 25 bp, Homo sapien
gctttcggtcctattatggttcaat

SEQ ID NO: 22163 - DNA, 25 bp, Homo sapien
tatcggcacgggtatgagacacaag

SEQ ID NO: 22164 - DNA, 25 bp, Homo sapien
tatcggcacgggaatgagacacaag

SEQ ID NO: 22165 - DNA, 25 bp, Homo sapien
gtagggacccggatctgaagacaga

SEQ ID NO: 22166 - DNA, 25 bp, Homo sapien
gtagggacccggttctgaagacaga

SEQ ID NO: 22167 - DNA, 25 bp, Homo sapien
ttgttacggtgtcggtaatctatat

SEQ ID NO: 22168 - DNA, 25 bp, Homo sapien
ttgttacggtgtgggtaatctatat

SEQ ID NO: 22169 - DNA, 25 bp, Homo sapien
cttagacctcgttcgagaatgtcta

SEQ ID NO: 22170 - DNA, 25 bp, Homo sapien
cttagacctcgtacgagaatgtcta

SEQ ID NO: 22171 - DNA, 25 bp, Homo sapien
ggacactctttcaaagttatctgta

SEQ ID NO: 22172 - DNA, 25 bp, Homo sapien
ggacactctttctaagttatctgta

SEQ ID NO: 22173 - DNA, 25 bp, Homo sapien
ttactgtttcggttactgactgaga

SEQ ID NO: 22174 - DNA, 25 bp, Homo sapien
ttactgtttcggatactgactgaga

SEQ ID NO: 22175 - DNA, 25 bp, Homo sapien
ctttaggtcctgttgtacttttgag

SEQ ID NO: 22176 - DNA, 25 bp, Homo sapien
ctttaggtcctgatgtacttttgag

SEQ ID NO: 22177 - DNA, 25 bp, Homo sapien
cgttgtcccatcttatgtgttatta

SEQ ID NO: 22178 - DNA, 25 bp, Homo sapien
cgttgtcccatcatatgtgttatta

SEQ ID NO: 22179 - DNA, 25 bp, Homo sapien
tccacttcccttcatttgtctaaac

SEQ ID NO: 22180 - DNA, 25 bp, Homo sapien
tccacttcccttgatttgtctaaac

SEQ ID NO: 22181 - DNA, 25 bp, Homo sapien
ttacggtagtgttttcgactatagc

SEQ ID NO: 22182 - DNA, 25 bp, Homo sapien
ttacggtagtgtattcgactatagc

SEQ ID NO: 22183 - DNA, 25 bp, Homo sapien
aaagggtcaccctaccttcctgggt

SEQ ID NO: 22184 - DNA, 25 bp, Homo sapien
aaagggtcacccaaccttcctgggt

SEQ ID NO: 22185 - DNA, 25 bp, Homo sapien
gtcggggacaaaagatatctttttc

SEQ ID NO: 22186 - DNA, 25 bp, Homo sapien
gtcggggacaaatgatatctttttc

SEQ ID NO: 22187 - DNA, 25 bp, Homo sapien
gtcagaatttcgaccgttagactca

SEQ ID NO: 22188 - DNA, 25 bp, Homo sapien
gtcagaatttcgtccgttagactca

SEQ ID NO: 22189 - DNA, 25 bp, Homo sapien
ctgtaatttgttacgggcacgataa

SEQ ID NO: 22190 - DNA, 25 bp, Homo sapien
ctgtaatttgtttcgggcacgataa

SEQ ID NO: 22191 - DNA, 25 bp, Homo sapien
caaattctacgtcttggaacgaaga

SEQ ID NO: 22192 - DNA, 25 bp, Homo sapien
caaattctacgtgttggaacgaaga

SEQ ID NO: 22193 - DNA, 25 bp, Homo sapien
acgaatctccgtgttccagagaagg

SEQ ID NO: 22194 - DNA, 25 bp, Homo sapien
acgaatctccgtcttccagagaagg

SEQ ID NO: 22195 - DNA, 25 bp, Homo sapien
acacagactacactcatgacacctc

SEQ ID NO: 22196 - DNA, 25 bp, Homo sapien
acacagactacagtcatgacacctc

SEQ ID NO: 22197 - DNA, 25 bp, Homo sapien
cgattaacaattactcccatctttc

SEQ ID NO: 22198 - DNA, 25 bp, Homo sapien
cgattaacaatttctcccatctttc

SEQ ID NO: 22199 - DNA, 25 bp, Homo sapien
gtcatgtccacaggagactacctct

SEQ ID NO: 22200 - DNA, 25 bp, Homo sapien
gtcatgtccacacgagactacctct

SEQ ID NO: 22201 - DNA, 25 bp, Homo sapien
ttagtgctctctagtcagtgtgact

SEQ ID NO: 22202 - DNA, 25 bp, Homo sapien
ttagtgctctcttgtcagtgtgact

SEQ ID NO: 22203 - DNA, 25 bp, Homo sapien
ttctcgtgtcttggactttactgtc

SEQ ID NO: 22204 - DNA, 25 bp, Homo sapien
ttctcgtgtcttcgactttactgtc

SEQ ID NO: 22205 - DNA, 25 bp, Homo sapien
tctacgagtaattacattctgtcgt

SEQ ID NO: 22206 - DNA, 25 bp, Homo sapien
tctacgagtaataacattctgtcgt

SEQ ID NO: 22207 - DNA, 25 bp, Homo sapien
ttaccgtagacaacgtcgttttaag

SEQ ID NO: 22208 - DNA, 25 bp, Homo sapien
ttaccgtagacatcgtcgttttaag

SEQ ID NO: 22209 - DNA, 25 bp, Homo sapien
aagtggaagtggtcgtacaactaac

SEQ ID NO: 22210 - DNA, 25 bp, Homo sapien
aagtggaagtggacgtacaactaac

SEQ ID NO: 22211 - DNA, 25 bp, Homo sapien
gcggcctttcgcacggttagttgta

SEQ ID NO: 22212 - DNA, 25 bp, Homo sapien
gcggcctttcgctcggttagttgta

SEQ ID NO: 22213 - DNA, 25 bp, Homo sapien
ccactgagagtcagaagaacccctc

SEQ ID NO: 22214 - DNA, 25 bp, Homo sapien
ccactgagagtctgaagaacccctc

SEQ ID NO: 22215 - DNA, 25 bp, Homo sapien
gagtctatgtcttaaaagtcttctc

SEQ ID NO: 22216 - DNA, 25 bp, Homo sapien
gagtctatgtctaaaaagtcttctc

SEQ ID NO: 22217 - DNA, 25 bp, Homo sapien
ttcgtcacgactaaagtcgttactc

SEQ ID NO: 22218 - DNA, 25 bp, Homo sapien
ttcgtcacgacttaagtcgttactc

SEQ ID NO: 22219 - DNA, 25 bp, Homo sapien
tcacgttctctcgttagcagtagtg

SEQ ID NO: 22220 - DNA, 25 bp, Homo sapien
tcacgttctctccttagcagtagtg

SEQ ID NO: 22221 - DNA, 25 bp, Homo sapien
cctctgtcgtctcctgacacagttt

SEQ ID NO: 22222 - DNA, 25 bp, Homo sapien
cctctgtcgtctgctgacacagttt

SEQ ID NO: 22223 - DNA, 25 bp, Homo sapien
ttattgtcgtttatcgtctccatga

SEQ ID NO: 22224 - DNA, 25 bp, Homo sapien
ttattgtcgtttttcgtctccatga

SEQ ID NO: 22225 - DNA, 25 bp, Homo sapien
atgttcttttgttgtcactgtcgac

SEQ ID NO: 22226 - DNA, 25 bp, Homo sapien
atgttcttttgtagtcactgtcgac

SEQ ID NO: 22227 - DNA, 25 bp, Homo sapien
gtcttcgtgtctttcatccagtcac

SEQ ID NO: 22228 - DNA, 25 bp, Homo sapien
gtcttcgtgtctatcatccagtcac

SEQ ID NO: 22229 - DNA, 25 bp, Homo sapien
ggtgcaaccactagtcagagacgtg

SEQ ID NO: 22230 - DNA, 25 bp, Homo sapien
ggtgcaaccacttgtcagagacgtg

SEQ ID NO: 22231 - DNA, 25 bp, Homo sapien
ccgtgggaccgctactctagaggta

SEQ ID NO: 22232 - DNA, 25 bp, Homo sapien
ccgtgggaccgcaactctagaggta

SEQ ID NO: 22233 - DNA, 25 bp, Homo sapien
agagcgtacttcgtcgtcgggacac

SEQ ID NO: 22234 - DNA, 25 bp, Homo sapien
agagcgtacttcctcgtcgggacac

SEQ ID NO: 22235 - DNA, 25 bp, Homo sapien
ggatcgtcacctcgtcctggtcgac

SEQ ID NO: 22236 - DNA, 25 bp, Homo sapien
ggatcgtcacctggtcctggtcgac

SEQ ID NO: 22237 - DNA, 25 bp, Homo sapien
taggggtccactgttagggacgtca

SEQ ID NO: 22238 - DNA, 25 bp, Homo sapien
taggggtccactcttagggacgtca

SEQ ID NO: 22239 - DNA, 25 bp, Homo sapien
ggttctctatagtcgacactaccga

SEQ ID NO: 22240 - DNA, 25 bp, Homo sapien
ggttctctatagacgacactaccga

SEQ ID NO: 22241 - DNA, 25 bp, Homo sapien
gaccgtttctacgtaaagtttcgat

SEQ ID NO: 22242 - DNA, 25 bp, Homo sapien
gaccgtttctacctaaagtttcgat

SEQ ID NO: 22243 - DNA, 25 bp, Homo sapien
ggtttgttacacttaaatgttcgtc

SEQ ID NO: 22244 - DNA, 25 bp, Homo sapien
ggtttgttacacataaatgttcgtc

SEQ ID NO: 22245 - DNA, 25 bp, Homo sapien
ttctaggagtccaaaagagtcgatc

SEQ ID NO: 22246 - DNA, 25 bp, Homo sapien
ttctaggagtcctaaagagtcgatc

SEQ ID NO: 22247 - DNA, 25 bp, Homo sapien
tagtagtttctcagactttcgtatc

SEQ ID NO: 22248 - DNA, 25 bp, Homo sapien
tagtagtttctctgactttcgtatc

SEQ ID NO: 22249 - DNA, 25 bp, Homo sapien
cagtaaattgtttgtaattcactcg

SEQ ID NO: 22250 - DNA, 25 bp, Homo sapien
cagtaaattgttagtaattcactcg

SEQ ID NO: 22251 - DNA, 25 bp, Homo sapien
cccgtttgtttcacgactcctttcg

SEQ ID NO: 22252 - DNA, 25 bp, Homo sapien
cccgtttgtttctcgactcctttcg

SEQ ID NO: 22253 - DNA, 25 bp, Homo sapien
gcaaatttcacgatgactccttatg

SEQ ID NO: 22254 - DNA, 25 bp, Homo sapien
gcaaatttcacgttgactccttatg

SEQ ID NO: 22255 - DNA, 25 bp, Homo sapien
gtacacaactttaccgttagtttgt

SEQ ID NO: 22256 - DNA, 25 bp, Homo sapien
gtacacaacttttccgttagtttgt

SEQ ID NO: 22257 - DNA, 25 bp, Homo sapien
ggtcaaaaccgttcctcgtcctttg

SEQ ID NO: 22258 - DNA, 25 bp, Homo sapien
ggtcaaaaccgtacctcgtcctttg

SEQ ID NO: 22259 - DNA, 25 bp, Homo sapien
gtaaagaaaccgaatgtcctctctg

SEQ ID NO: 22260 - DNA, 25 bp, Homo sapien
gtaaagaaaccgtatgtcctctctg

SEQ ID NO: 22261 - DNA, 25 bp, Homo sapien
tttttacatggaatctcgttgtacg

SEQ ID NO: 22262 - DNA, 25 bp, Homo sapien
tttttacatggattctcgttgtacg

SEQ ID NO: 22263 - DNA, 25 bp, Homo sapien
tggtgtatatgaatctcactttact

SEQ ID NO: 22264 - DNA, 25 bp, Homo sapien
tggtgtatatgattctcactttact

SEQ ID NO: 22265 - DNA, 25 bp, Homo sapien
gtagtaccagtatacacgatacata

SEQ ID NO: 22266 - DNA, 25 bp, Homo sapien
gtagtaccagtaaacacgatacata

SEQ ID NO: 22267 - DNA, 25 bp, Homo sapien
cctgtatgtcatgtatatcgtacaa

SEQ ID NO: 22268 - DNA, 25 bp, Homo sapien
cctgtatgtcatctatatcgtacaa

SEQ ID NO: 22269 - DNA, 25 bp, Homo sapien
attttgtacgctctcttcgtcgaac

SEQ ID NO: 22270 - DNA, 25 bp, Homo sapien
attttgtacgctgtcttcgtcgaac

SEQ ID NO: 22271 - DNA, 25 bp, Homo sapien
caaatgttccttttatgtacgtgaa

SEQ ID NO: 22272 - DNA, 25 bp, Homo sapien
caaatgttccttatatgtacgtgaa

SEQ ID NO: 22273 - DNA, 25 bp, Homo sapien
gactcgacgcatatctagtgagcgt

SEQ ID NO: 22274 - DNA, 25 bp, Homo sapien
gactcgacgcatttctagtgagcgt

SEQ ID NO: 22275 - DNA, 25 bp, Homo sapien
gatcgtactaattctattcgtaggt

SEQ ID NO: 22276 - DNA, 25 bp, Homo sapien
gatcgtactaatactattcgtaggt

SEQ ID NO: 22277 - DNA, 25 bp, Homo sapien
actgatgccagtcaagactctttac

SEQ ID NO: 22278 - DNA, 25 bp, Homo sapien
actgatgccagtgaagactctttac

SEQ ID NO: 22279 - DNA, 25 bp, Homo sapien
tctcgcctcggatttctacgtaggt

SEQ ID NO: 22280 - DNA, 25 bp, Homo sapien
tctcgcctcggaattctacgtaggt

SEQ ID NO: 22281 - DNA, 25 bp, Homo sapien
gcgtgaacgaccaccacgtgcgtgg

SEQ ID NO: 22282 - DNA, 25 bp, Homo sapien
gcgtgaacgacctccacgtgcgtgg

SEQ ID NO: 22283 - DNA, 25 bp, Homo sapien
ggcgaacacggactactctggccgg

SEQ ID NO: 22284 - DNA, 25 bp, Homo sapien
ggcgaacacggagtactctggccgg

SEQ ID NO: 22285 - DNA, 25 bp, Homo sapien
tgaactcaggagatgtagaccatac

SEQ ID NO: 22286 - DNA, 25 bp, Homo sapien
tgaactcaggagttgtagaccatac

SEQ ID NO: 22287 - DNA, 25 bp, Homo sapien
ttgatctggggatcgtcgtccatac

SEQ ID NO: 22288 - DNA, 25 bp, Homo sapien
ttgatctggggaacgtcgtccatac

SEQ ID NO: 22289 - DNA, 25 bp, Homo sapien
ttgtaacttcggtgacgagtcccac

SEQ ID NO: 22290 - DNA, 25 bp, Homo sapien
ttgtaacttcggagacgagtcccac

SEQ ID NO: 22291 - DNA, 25 bp, Homo sapien
ccaggtcgttcttccgtaaacctaa

SEQ ID NO: 22292 - DNA, 25 bp, Homo sapien
ccaggtcgttctaccgtaaacctaa

SEQ ID NO: 22293 - DNA, 25 bp, Homo sapien
cagtcgttaccactagaagaacgac

SEQ ID NO: 22294 - DNA, 25 bp, Homo sapien
cagtcgttaccagtagaagaacgac

SEQ ID NO: 22295 - DNA, 25 bp, Homo sapien
ctatcgtcatcagttgcgtcgtgag

SEQ ID NO: 22296 - DNA, 25 bp, Homo sapien
ctatcgtcatcacttgcgtcgtgag

SEQ ID NO: 22297 - DNA, 25 bp, Homo sapien
tcgctcacgtgtctgttgtcgcacg

SEQ ID NO: 22298 - DNA, 25 bp, Homo sapien
tcgctcacgtgtgtgttgtcgcacg

SEQ ID NO: 22299 - DNA, 25 bp, Homo sapien
cagaccacagacgtgtccacgtcga

SEQ ID NO: 22300 - DNA, 25 bp, Homo sapien
cagaccacagacctgtccacgtcga

SEQ ID NO: 22301 - DNA, 25 bp, Homo sapien
tttcaggagtaacctgtaccatatc

SEQ ID NO: 22302 - DNA, 25 bp, Homo sapien
tttcaggagtaagctgtaccatatc

SEQ ID NO: 22303 - DNA, 25 bp, Homo sapien
tttccgtatcactagacgaacgttc

SEQ ID NO: 22304 - DNA, 25 bp, Homo sapien
tttccgtatcacaagacgaacgttc

SEQ ID NO: 22305 - DNA, 25 bp, Homo sapien
actccgtacgccatgactgacttct

SEQ ID NO: 22306 - DNA, 25 bp, Homo sapien
actccgtacgccttgactgacttct

SEQ ID NO: 22307 - DNA, 25 bp, Homo sapien
ccaatcgtcgtcctggctgccgtct

SEQ ID NO: 22308 - DNA, 25 bp, Homo sapien
ccaatcgtcgtcgtggctgccgtct

SEQ ID NO: 22309 - DNA, 25 bp, Homo sapien
ctcaccggagtaggaggtccccgcg

SEQ ID NO: 22310 - DNA, 25 bp, Homo sapien
ctcaccggagtacgaggtccccgcg

SEQ ID NO: 22311 - DNA, 25 bp, Homo sapien
ggtcccgacgggttaagggtctccc

SEQ ID NO: 22312 - DNA, 25 bp, Homo sapien
ggtcccgacgggataagggtctccc

SEQ ID NO: 22313 - DNA, 25 bp, Homo sapien
acgacacaggaaaacgagattcctc

SEQ ID NO: 22314 - DNA, 25 bp, Homo sapien
acgacacaggaatacgagattcctc

SEQ ID NO: 22315 - DNA, 25 bp, Homo sapien
ggacgacggcctcgacaggaacctc

SEQ ID NO: 22316 - DNA, 25 bp, Homo sapien
ggacgacggcctggacaggaacctc

SEQ ID NO: 22317 - DNA, 25 bp, Homo sapien
gacgagggtcggaccgacacgttac

SEQ ID NO: 22318 - DNA, 25 bp, Homo sapien
gacgagggtcggtccgacacgttac

SEQ ID NO: 22319 - DNA, 25 bp, Homo sapien
acagacacaattgtctccgatgtta

SEQ ID NO: 22320 - DNA, 25 bp, Homo sapien
acagacacaattctctccgatgtta

SEQ ID NO: 22321 - DNA, 25 bp, Homo sapien
ttaaagaacaggacaccaagtcgaa

SEQ ID NO: 22322 - DNA, 25 bp, Homo sapien
ttaaagaacaggtcaccaagtcgaa

SEQ ID NO: 22323 - DNA, 25 bp, Homo sapien
atttatattttgtaatttaccgata

SEQ ID NO: 22324 - DNA, 25 bp, Homo sapien
atttatattttgaaatttaccgata

SEQ ID NO: 22325 - DNA, 25 bp, Homo sapien
gtgtctaagtaaacatgttacacca

SEQ ID NO: 22326 - DNA, 25 bp, Homo sapien
gtgtctaagtaatcatgttacacca

SEQ ID NO: 22327 - DNA, 25 bp, Homo sapien
ttcgtaacaacgagaggtctcgaac

SEQ ID NO: 22328 - DNA, 25 bp, Homo sapien
ttcgtaacaacgtgaggtctcgaac

SEQ ID NO: 22329 - DNA, 25 bp, Homo sapien
cgtgagggcgtagtagactcgatcc

SEQ ID NO: 22330 - DNA, 25 bp, Homo sapien
cgtgagggcgtactagactcgatcc

SEQ ID NO: 22331 - DNA, 25 bp, Homo sapien
gactgtgcaacgacgggtcgagtcc

SEQ ID NO: 22332 - DNA, 25 bp, Homo sapien
gactgtgcaacgtcgggtcgagtcc

SEQ ID NO: 22333 - DNA, 25 bp, Homo sapien
tgtgtgtccctggagtcttgatacc

SEQ ID NO: 22334 - DNA, 25 bp, Homo sapien
tgtgtgtccctgcagtcttgatacc

SEQ ID NO: 22335 - DNA, 25 bp, Homo sapien
aacgccgacgcgaacgcgaagaacg

SEQ ID NO: 22336 - DNA, 25 bp, Homo sapien
aacgccgacgcgtacgcgaagaacg

SEQ ID NO: 22337 - DNA, 25 bp, Homo sapien
ccgaacctgaaccagacacttaggt

SEQ ID NO: 22338 - DNA, 25 bp, Homo sapien
ccgaacctgaacgagacacttaggt

SEQ ID NO: 22339 - DNA, 25 bp, Homo sapien
ggagacctagaccttcgaagaccct

SEQ ID NO: 22340 - DNA, 25 bp, Homo sapien
ggagacctagacgttcgaagaccct

SEQ ID NO: 22341 - DNA, 25 bp, Homo sapien
gggaacgtcgcaggtccactcgtcc

SEQ ID NO: 22342 - DNA, 25 bp, Homo sapien
gggaacgtcgcacgtccactcgtcc

SEQ ID NO: 22343 - DNA, 25 bp, Homo sapien
ggtgtcacatcttcttccgtctctt

SEQ ID NO: 22344 - DNA, 25 bp, Homo sapien
ggtgtcacatctacttccgtctctt

SEQ ID NO: 22345 - DNA, 25 bp, Homo sapien
ctgagtcgaccgttgggttccttcg

SEQ ID NO: 22346 - DNA, 25 bp, Homo sapien
ctgagtcgaccgatgggttccttcg

SEQ ID NO: 22347 - DNA, 25 bp, Homo sapien
agagtaccacaggtagattcagttt

SEQ ID NO: 22348 - DNA, 25 bp, Homo sapien
agagtaccacagctagattcagttt

SEQ ID NO: 22349 - DNA, 25 bp, Homo sapien
ttgacgtagaaacaagtctcggttg

SEQ ID NO: 22350 - DNA, 25 bp, Homo sapien
ttgacgtagaaagaagtctcggttg

SEQ ID NO: 22351 - DNA, 25 bp, Homo sapien
atgttgtctaaggaagcactaggtc

SEQ ID NO: 22352 - DNA, 25 bp, Homo sapien
atgttgtctaagcaagcactaggtc

SEQ ID NO: 22353 - DNA, 25 bp, Homo sapien
gtgttagtcacacttgacatacctc

SEQ ID NO: 22354 - DNA, 25 bp, Homo sapien
gtgttagtcacagttgacatacctc

SEQ ID NO: 22355 - DNA, 25 bp, Homo sapien
gtgtaatttcggtaacgactgtgtc

SEQ ID NO: 22356 - DNA, 25 bp, Homo sapien
gtgtaatttcggaaacgactgtgtc

SEQ ID NO: 22357 - DNA, 25 bp, Homo sapien
cttgtgtgtagactaagtacgttct

SEQ ID NO: 22358 - DNA, 25 bp, Homo sapien
cttgtgtgtagagtaagtacgttct

SEQ ID NO: 22359 - DNA, 25 bp, Homo sapien
atggttactgttcaggtggttctac

SEQ ID NO: 22360 - DNA, 25 bp, Homo sapien
atggttactgttgaggtggttctac

SEQ ID NO: 22361 - DNA, 25 bp, Homo sapien
gttgtgtcactttcacggaggtttt

SEQ ID NO: 22362 - DNA, 25 bp, Homo sapien
gttgtgtcacttacacggaggtttt

SEQ ID NO: 22363 - DNA, 25 bp, Homo sapien
gctatgacctctaacctggtttaat

SEQ ID NO: 22364 - DNA, 25 bp, Homo sapien
gctatgacctcttacctggtttaat

SEQ ID NO: 22365 - DNA, 25 bp, Homo sapien
ccagtggtcgttaacgaaggtttaa

SEQ ID NO: 22366 - DNA, 25 bp, Homo sapien
ccagtggtcgtttacgaaggtttaa

SEQ ID NO: 22367 - DNA, 25 bp, Homo sapien
agttttcgtgtgtcacccgtgtaaa

SEQ ID NO: 22368 - DNA, 25 bp, Homo sapien
agttttcgtgtgacacccgtgtaaa

SEQ ID NO: 22369 - DNA, 25 bp, Homo sapien
attgttttgtagaaactcgacaatc

SEQ ID NO: 22370 - DNA, 25 bp, Homo sapien
attgttttgtagtaactcgacaatc

SEQ ID NO: 22371 - DNA, 25 bp, Homo sapien
gaattttcagaaggttgtctacacc

SEQ ID NO: 22372 - DNA, 25 bp, Homo sapien
gaattttcagaacgttgtctacacc

SEQ ID NO: 22373 - DNA, 25 bp, Homo sapien
gttttcacgtaccatagttttcatg

SEQ ID NO: 22374 - DNA, 25 bp, Homo sapien
gttttcacgtacgatagttttcatg

SEQ ID NO: 22375 - DNA, 25 bp, Homo sapien
agttatttctaagagtctaggcaca

SEQ ID NO: 22376 - DNA, 25 bp, Homo sapien
agttatttctaacagtctaggcaca

SEQ ID NO: 22377 - DNA, 25 bp, Homo sapien
gtgttttaagcaccttaccggtcac

SEQ ID NO: 22378 - DNA, 25 bp, Homo sapien
gtgttttaagcagcttaccggtcac

SEQ ID NO: 22379 - DNA, 25 bp, Homo sapien
agtgtctatcactttaaacctggtc

SEQ ID NO: 22380 - DNA, 25 bp, Homo sapien
agtgtctatcacattaaacctggtc

SEQ ID NO: 22381 - DNA, 25 bp, Homo sapien
tgtacgtgtcatgaaaggttctgtc

SEQ ID NO: 22382 - DNA, 25 bp, Homo sapien
tgtacgtgtcatcaaaggttctgtc

SEQ ID NO: 22383 - DNA, 25 bp, Homo sapien
taccaagagtactgagttctgtctc

SEQ ID NO: 22384 - DNA, 25 bp, Homo sapien
taccaagagtacagagttctgtctc

SEQ ID NO: 22385 - DNA, 25 bp, Homo sapien
actactccgctatgctgtcttcgtc

SEQ ID NO: 22386 - DNA, 25 bp, Homo sapien
actactccgctaagctgtcttcgtc

SEQ ID NO: 22387 - DNA, 25 bp, Homo sapien
gaactgaagtttctactgtgtcgtc

SEQ ID NO: 22388 - DNA, 25 bp, Homo sapien
gaactgaagtttgtactgtgtcgtc

SEQ ID NO: 22389 - DNA, 25 bp, Homo sapien
aagttagtcctgactagtacgactc

SEQ ID NO: 22390 - DNA, 25 bp, Homo sapien
aagttagtcctgtctagtacgactc

SEQ ID NO: 22391 - DNA, 25 bp, Homo sapien
tttatgtttcacgatcgtgactcct

SEQ ID NO: 22392 - DNA, 25 bp, Homo sapien
tttatgtttcaccatcgtgactcct

SEQ ID NO: 22393 - DNA, 25 bp, Homo sapien
cttagtcactcaacgtttaaagacg

SEQ ID NO: 22394 - DNA, 25 bp, Homo sapien
cttagtcactcatcgtttaaagacg

SEQ ID NO: 22395 - DNA, 25 bp, Homo sapien
ataatttcaatcttcacagaggtag

SEQ ID NO: 22396 - DNA, 25 bp, Homo sapien
ataatttcaatcatcacagaggtag

SEQ ID NO: 22397 - DNA, 25 bp, Homo sapien
atgttaaaactcaacacgagacgaa

SEQ ID NO: 22398 - DNA, 25 bp, Homo sapien
atgttaaaactctacacgagacgaa

SEQ ID NO: 22399 - DNA, 25 bp, Homo sapien
agtctaactctgtttggtaacacac

SEQ ID NO: 22400 - DNA, 25 bp, Homo sapien
agtctaactctgattggtaacacac

SEQ ID NO: 22401 - DNA, 25 bp, Homo sapien
gagtttcagtcgactcttccctctc

SEQ ID NO: 22402 - DNA, 25 bp, Homo sapien
gagtttcagtcgtctcttccctctc

SEQ ID NO: 22403 - DNA, 25 bp, Homo sapien
gagtgtgcaggttttatccggtcga

SEQ ID NO: 22404 - DNA, 25 bp, Homo sapien
gagtgtgcaggtattatccggtcga

SEQ ID NO: 22405 - DNA, 25 bp, Homo sapien
gtgacttttctagttacggactcat

SEQ ID NO: 22406 - DNA, 25 bp, Homo sapien
gtgacttttctacttacggactcat

SEQ ID NO: 22407 - DNA, 25 bp, Homo sapien
agtcttttattacgtggtgttcgtc

SEQ ID NO: 22408 - DNA, 25 bp, Homo sapien
agtcttttattaggtggtgttcgtc

SEQ ID NO: 22409 - DNA, 25 bp, Homo sapien
tagtcacttttgttagtcatatctg

SEQ ID NO: 22410 - DNA, 25 bp, Homo sapien
tagtcacttttgatagtcatatctg

SEQ ID NO: 22411 - DNA, 25 bp, Homo sapien
cgtcagttcttgttattagatctgt

SEQ ID NO: 22412 - DNA, 25 bp, Homo sapien
cgtcagttcttgatattagatctgt

SEQ ID NO: 22413 - DNA, 25 bp, Homo sapien
tagaatgtatatcttataactcact

SEQ ID NO: 22414 - DNA, 25 bp, Homo sapien
tagaatgtatatgttataactcact

SEQ ID NO: 22415 - DNA, 25 bp, Homo sapien
tatacgtcttaagagaacttacaga

SEQ ID NO: 22416 - DNA, 25 bp, Homo sapien
tatacgtcttaacagaacttacaga

SEQ ID NO: 22417 - DNA, 25 bp, Homo sapien
actgtgtacttcattacttactgag

SEQ ID NO: 22418 - DNA, 25 bp, Homo sapien
actgtgtacttctttacttactgag

SEQ ID NO: 22419 - DNA, 25 bp, Homo sapien
cagtcgtcgagtttcctactgttat

SEQ ID NO: 22420 - DNA, 25 bp, Homo sapien
cagtcgtcgagtatcctactgttat

SEQ ID NO: 22421 - DNA, 25 bp, Homo sapien
cccgaggtcagtcagtccacattcg

SEQ ID NO: 22422 - DNA, 25 bp, Homo sapien
cccgaggtcagtgagtccacattcg

SEQ ID NO: 22423 - DNA, 25 bp, Homo sapien
ccgaggcgaagtacctcgacgacgg

SEQ ID NO: 22424 - DNA, 25 bp, Homo sapien
ccgaggcgaagttcctcgacgacgg

SEQ ID NO: 22425 - DNA, 25 bp, Homo sapien
ccctagtcgcaaggtcagcctacat

SEQ ID NO: 22426 - DNA, 25 bp, Homo sapien
ccctagtcgcaacgtcagcctacat

SEQ ID NO: 22427 - DNA, 25 bp, Homo sapien
aagtaagtcaggtgtctgcaactct

SEQ ID NO: 22428 - DNA, 25 bp, Homo sapien
aagtaagtcaggagtctgcaactct

SEQ ID NO: 22429 - DNA, 25 bp, Homo sapien
tctgaattgtttcctacttacgaag

SEQ ID NO: 22430 - DNA, 25 bp, Homo sapien
tctgaattgtttgctacttacgaag

SEQ ID NO: 22431 - DNA, 25 bp, Homo sapien
gttaaattcgtcgtctcttcgaggg

SEQ ID NO: 22432 - DNA, 25 bp, Homo sapien
gttaaattcgtcctctcttcgaggg

SEQ ID NO: 22433 - DNA, 25 bp, Homo sapien
acattcgttccatcagtcttagggt

SEQ ID NO: 22434 - DNA, 25 bp, Homo sapien
acattcgttccaacagtcttagggt

SEQ ID NO: 22435 - DNA, 25 bp, Homo sapien
catgacgacttcaacatcgtccttg

SEQ ID NO: 22436 - DNA, 25 bp, Homo sapien
catgacgacttctacatcgtccttg

SEQ ID NO: 22437 - DNA, 25 bp, Homo sapien
aagaactctcacgactcattgagtg

SEQ ID NO: 22438 - DNA, 25 bp, Homo sapien
aagaactctcaccactcattgagtg

SEQ ID NO: 22439 - DNA, 25 bp, Homo sapien
atctacagacggtcacatatgatgt

SEQ ID NO: 22440 - DNA, 25 bp, Homo sapien
atctacagacggacacatatgatgt

SEQ ID NO: 22441 - DNA, 25 bp, Homo sapien
atctgtaacgagatcttcgtatttg

SEQ ID NO: 22442 - DNA, 25 bp, Homo sapien
atctgtaacgagttcttcgtatttg

SEQ ID NO: 22443 - DNA, 25 bp, Homo sapien
aggtcccggttcttctagagtaacg

SEQ ID NO: 22444 - DNA, 25 bp, Homo sapien
aggtcccggttcatctagagtaacg

SEQ ID NO: 22445 - DNA, 25 bp, Homo sapien
aggtcctcggcgaaacgacataact

SEQ ID NO: 22446 - DNA, 25 bp, Homo sapien
aggtcctcggcgtaacgacataact

SEQ ID NO: 22447 - DNA, 25 bp, Homo sapien
tacagacagcgaatctaaacataag

SEQ ID NO: 22448 - DNA, 25 bp, Homo sapien
tacagacagcgattctaaacataag

SEQ ID NO: 22449 - DNA, 25 bp, Homo sapien
ttcaggtctcacaggaaagactaag

SEQ ID NO: 22450 - DNA, 25 bp, Homo sapien
ttcaggtctcactggaaagactaag

SEQ ID NO: 22451 - DNA, 25 bp, Homo sapien
aattggacgacgtgaagaattactc

SEQ ID NO: 22452 - DNA, 25 bp, Homo sapien
aattggacgacgagaagaattactc

SEQ ID NO: 22453 - DNA, 25 bp, Homo sapien
gacgtcgttgaacctcaaaatcttt

SEQ ID NO: 22454 - DNA, 25 bp, Homo sapien
gacgtcgttgaagctcaaaatcttt

SEQ ID NO: 22455 - DNA, 25 bp, Homo sapien
tcaagataaacatctctaaaagtgg

SEQ ID NO: 22456 - DNA, 25 bp, Homo sapien
tcaagataaacaactctaaaagtgg

SEQ ID NO: 22457 - DNA, 25 bp, Homo sapien
aaaaatagttgtcacagagactcgt

SEQ ID NO: 22458 - DNA, 25 bp, Homo sapien
aaaaatagttgtgacagagactcgt

SEQ ID NO: 22459 - DNA, 25 bp, Homo sapien
caataagaattttctagacaggttc

SEQ ID NO: 22460 - DNA, 25 bp, Homo sapien
caataagaatttactagacaggttc

SEQ ID NO: 22461 - DNA, 25 bp, Homo sapien
aagacaatgtgttccggacaagaga

SEQ ID NO: 22462 - DNA, 25 bp, Homo sapien
aagacaatgtgtaccggacaagaga

SEQ ID NO: 22463 - DNA, 25 bp, Homo sapien
actagccacctgagccgctgaagtc

SEQ ID NO: 22464 - DNA, 25 bp, Homo sapien
actagccacctgtgccgctgaagtc

SEQ ID NO: 22465 - DNA, 25 bp, Homo sapien
gtgtccactatgtccgaaggacctc

SEQ ID NO: 22466 - DNA, 25 bp, Homo sapien
gtgtccactatgaccgaaggacctc

SEQ ID NO: 22467 - DNA, 25 bp, Homo sapien
gtatccctcgatacgttgtgtggtt

SEQ ID NO: 22468 - DNA, 25 bp, Homo sapien
gtatccctcgattcgttgtgtggtt

SEQ ID NO: 22469 - DNA, 25 bp, Homo sapien
cggcactcgacgtgcgtccttgtac

SEQ ID NO: 22470 - DNA, 25 bp, Homo sapien
cggcactcgacgagcgtccttgtac

SEQ ID NO: 22471 - DNA, 25 bp, Homo sapien
tgtgtcaacccgtctacttctcgac

SEQ ID NO: 22472 - DNA, 25 bp, Homo sapien
tgtgtcaacccgactacttctcgac

SEQ ID NO: 22473 - DNA, 25 bp, Homo sapien
caggtctactacaagttcgtacgat

SEQ ID NO: 22474 - DNA, 25 bp, Homo sapien
caggtctactactagttcgtacgat

SEQ ID NO: 22475 - DNA, 25 bp, Homo sapien
aaacctaggactcacagtgatgaga

SEQ ID NO: 22476 - DNA, 25 bp, Homo sapien
aaacctaggactgacagtgatgaga

SEQ ID NO: 22477 - DNA, 25 bp, Homo sapien
agaccgtacttctttgttagtgaga

SEQ ID NO: 22478 - DNA, 25 bp, Homo sapien
agaccgtacttcattgttagtgaga

SEQ ID NO: 22479 - DNA, 25 bp, Homo sapien
gtgacagtttatttgtagtcaccga

SEQ ID NO: 22480 - DNA, 25 bp, Homo sapien
gtgacagtttatatgtagtcaccga

SEQ ID NO: 22481 - DNA, 25 bp, Homo sapien
agtatggagttttttcgactaaacc

SEQ ID NO: 22482 - DNA, 25 bp, Homo sapien
agtatggagtttattcgactaaacc

SEQ ID NO: 22483 - DNA, 25 bp, Homo sapien
aggtagagatctatgagactgaaca

SEQ ID NO: 22484 - DNA, 25 bp, Homo sapien
aggtagagatctttgagactgaaca

SEQ ID NO: 22485 - DNA, 25 bp, Homo sapien
agtaacgaactcttctgatccgaaa

SEQ ID NO: 22486 - DNA, 25 bp, Homo sapien
agtaacgaactcatctgatccgaaa

SEQ ID NO: 22487 - DNA, 25 bp, Homo sapien
acgaagagatcgagagatccggaga

SEQ ID NO: 22488 - DNA, 25 bp, Homo sapien
acgaagagatcgtgagatccggaga

SEQ ID NO: 22489 - DNA, 25 bp, Homo sapien
caaaggttcgtaggtggactcggta

SEQ ID NO: 22490 - DNA, 25 bp, Homo sapien
caaaggttcgtacgtggactcggta

SEQ ID NO: 22491 - DNA, 25 bp, Homo sapien
attccgaagcgtgtcattatgtgcc

SEQ ID NO: 22492 - DNA, 25 bp, Homo sapien
attccgaagcgtctcattatgtgcc

SEQ ID NO: 22493 - DNA, 25 bp, Homo sapien
caacaggtccactcggtccggtagt

SEQ ID NO: 22494 - DNA, 25 bp, Homo sapien
caacaggtccacacggtccggtagt

SEQ ID NO: 22495 - DNA, 25 bp, Homo sapien
tgactcttctcgagtcggtccggtc

SEQ ID NO: 22496 - DNA, 25 bp, Homo sapien
tgactcttctcgtgtcggtccggtc

SEQ ID NO: 22497 - DNA, 25 bp, Homo sapien
aagtacgaccagtcgcccaggctca

SEQ ID NO: 22498 - DNA, 25 bp, Homo sapien
aagtacgaccagacgcccaggctca

SEQ ID NO: 22499 - DNA, 25 bp, Homo sapien
ttctgagacgttcgactaggacttc

SEQ ID NO: 22500 - DNA, 25 bp, Homo sapien
ttctgagacgttggactaggacttc

SEQ ID NO: 22501 - DNA, 25 bp, Homo sapien
ctcgacatataccataggacttcgt

SEQ ID NO: 22502 - DNA, 25 bp, Homo sapien
ctcgacatatacgataggacttcgt

SEQ ID NO: 22503 - DNA, 25 bp, Homo sapien
taaccgaagttaaggggtcgactac

SEQ ID NO: 22504 - DNA, 25 bp, Homo sapien
taaccgaagttatggggtcgactac

SEQ ID NO: 22505 - DNA, 25 bp, Homo sapien
ctacaaccgagacttctacagggaa

SEQ ID NO: 22506 - DNA, 25 bp, Homo sapien
ctacaaccgagagttctacagggaa

SEQ ID NO: 22507 - DNA, 25 bp, Homo sapien
tcaccgaaaggacaggggtccggac

SEQ ID NO: 22508 - DNA, 25 bp, Homo sapien
tcaccgaaaggagaggggtccggac

SEQ ID NO: 22509 - DNA, 25 bp, Homo sapien
tgtccagggaaggaggtgtcacacc

SEQ ID NO: 22510 - DNA, 25 bp, Homo sapien
tgtccagggaagcaggtgtcacacc

SEQ ID NO: 22511 - DNA, 25 bp, Homo sapien
gtacacaggggtctacgggttctcc

SEQ ID NO: 22512 - DNA, 25 bp, Homo sapien
gtacacaggggtgtacgggttctcc

SEQ ID NO: 22513 - DNA, 25 bp, Homo sapien
ctaccatgaggagtcggacttccga

SEQ ID NO: 22514 - DNA, 25 bp, Homo sapien
ctaccatgaggactcggacttccga

SEQ ID NO: 22515 - DNA, 25 bp, Homo sapien
ttcgtttcaggtctgagtctctccc

SEQ ID NO: 22516 - DNA, 25 bp, Homo sapien
ttcgtttcaggtgtgagtctctccc

SEQ ID NO: 22517 - DNA, 25 bp, Homo sapien
aagtaaaaagtctagagtctcccct

SEQ ID NO: 22518 - DNA, 25 bp, Homo sapien
aagtaaaaagtcaagagtctcccct

SEQ ID NO: 22519 - DNA, 25 bp, Homo sapien
cgaagaggacttaccgactcctcac

SEQ ID NO: 22520 - DNA, 25 bp, Homo sapien
cgaagaggactttccgactcctcac

SEQ ID NO: 22521 - DNA, 25 bp, Homo sapien
ttgggacaacagttacggagaccca

SEQ ID NO: 22522 - DNA, 25 bp, Homo sapien
ttgggacaacagatacggagaccca

SEQ ID NO: 22523 - DNA, 25 bp, Homo sapien
gtctttgatagacaaagatctccga

SEQ ID NO: 22524 - DNA, 25 bp, Homo sapien
gtctttgatagagaaagatctccga

SEQ ID NO: 22525 - DNA, 25 bp, Homo sapien
cgtgtttgacttttaagtatcccaa

SEQ ID NO: 22526 - DNA, 25 bp, Homo sapien
cgtgtttgacttataagtatcccaa

SEQ ID NO: 22527 - DNA, 25 bp, Homo sapien
taatacaacttttcattcgtgctta

SEQ ID NO: 22528 - DNA, 25 bp, Homo sapien
taatacaactttacattcgtgctta

SEQ ID NO: 22529 - DNA, 25 bp, Homo sapien
tacggacctgaatcgtctattagaa

SEQ ID NO: 22530 - DNA, 25 bp, Homo sapien
tacggacctgaaacgtctattagaa

SEQ ID NO: 22531 - DNA, 25 bp, Homo sapien
gacgtaggccggacctattacgaga

SEQ ID NO: 22532 - DNA, 25 bp, Homo sapien
gacgtaggccggtcctattacgaga

SEQ ID NO: 22533 - DNA, 25 bp, Homo sapien
accggagacagtagacgaacttgaa

SEQ ID NO: 22534 - DNA, 25 bp, Homo sapien
accggagacagttgacgaacttgaa

SEQ ID NO: 22535 - DNA, 25 bp, Homo sapien
aagaggaactatcacagacatgaga

SEQ ID NO: 22536 - DNA, 25 bp, Homo sapien
aagaggaactatgacagacatgaga

SEQ ID NO: 22537 - DNA, 25 bp, Homo sapien
aagatgtcccgttcgataaatagga

SEQ ID NO: 22538 - DNA, 25 bp, Homo sapien
aagatgtcccgtacgataaatagga

SEQ ID NO: 22539 - DNA, 25 bp, Homo sapien
aatgacgtcgaccattgatggacgt

SEQ ID NO: 22540 - DNA, 25 bp, Homo sapien
aatgacgtcgacgattgatggacgt

SEQ ID NO: 22541 - DNA, 25 bp, Homo sapien
tctattgagacacacttagaatgta

SEQ ID NO: 22542 - DNA, 25 bp, Homo sapien
tctattgagacagacttagaatgta

SEQ ID NO: 22543 - DNA, 25 bp, Homo sapien
catatggtcagtagtaaactatgtt

SEQ ID NO: 22544 - DNA, 25 bp, Homo sapien
catatggtcagttgtaaactatgtt

SEQ ID NO: 22545 - DNA, 25 bp, Homo sapien
catataatcgtgtgtaccatattag

SEQ ID NO: 22546 - DNA, 25 bp, Homo sapien
catataatcgtgagtaccatattag

SEQ ID NO: 22547 - DNA, 25 bp, Homo sapien
agtacgggaggtacgccgacctgtc

SEQ ID NO: 22548 - DNA, 25 bp, Homo sapien
agtacgggaggttcgccgacctgtc

SEQ ID NO: 22549 - DNA, 25 bp, Homo sapien
cgagtggtcgggtttgtcccacgtc

SEQ ID NO: 22550 - DNA, 25 bp, Homo sapien
cgagtggtcgggattgtcccacgtc

SEQ ID NO: 22551 - DNA, 25 bp, Homo sapien
acatggatagtgagtgtcaactagc

SEQ ID NO: 22552 - DNA, 25 bp, Homo sapien
acatggatagtgtgtgtcaactagc

SEQ ID NO: 22553 - DNA, 25 bp, Homo sapien
gggcagtaccactgtcgaggaccgc

SEQ ID NO: 22554 - DNA, 25 bp, Homo sapien
gggcagtaccacagtcgaggaccgc

SEQ ID NO: 22555 - DNA, 25 bp, Homo sapien
gggtggtccgttacaccaaacacgc

SEQ ID NO: 22556 - DNA, 25 bp, Homo sapien
gggtggtccgtttcaccaaacacgc

SEQ ID NO: 22557 - DNA, 25 bp, Homo sapien
caccgatgacgtcacagtctctgtc

SEQ ID NO: 22558 - DNA, 25 bp, Homo sapien
caccgatgacgtgacagtctctgtc

SEQ ID NO: 22559 - DNA, 25 bp, Homo sapien
taacgggaacactggaccgtctacc

SEQ ID NO: 22560 - DNA, 25 bp, Homo sapien
taacgggaacacaggaccgtctacc

SEQ ID NO: 22561 - DNA, 25 bp, Homo sapien
gaagtctgtggaccagaggaccacc

SEQ ID NO: 22562 - DNA, 25 bp, Homo sapien
gaagtctgtggagcagaggaccacc

SEQ ID NO: 22563 - DNA, 25 bp, Homo sapien
gaagttggagaaggagtcactctca

SEQ ID NO: 22564 - DNA, 25 bp, Homo sapien
gaagttggagaacgagtcactctca

SEQ ID NO: 22565 - DNA, 25 bp, Homo sapien
aactatgtgaagaattacccgttct

SEQ ID NO: 22566 - DNA, 25 bp, Homo sapien
aactatgtgaagtattacccgttct

SEQ ID NO: 22567 - DNA, 25 bp, Homo sapien
acgaggacgaagaagaactgacttt

SEQ ID NO: 22568 - DNA, 25 bp, Homo sapien
acgaggacgaagtagaactgacttt

SEQ ID NO: 22569 - DNA, 25 bp, Homo sapien
cgtagggacaggttaaactacattt

SEQ ID NO: 22570 - DNA, 25 bp, Homo sapien
cgtagggacaggataaactacattt

SEQ ID NO: 22571 - DNA, 25 bp, Homo sapien
aggtatgataaatgaggaccgccat

SEQ ID NO: 22572 - DNA, 25 bp, Homo sapien
aggtatgataaaagaggaccgccat

SEQ ID NO: 22573 - DNA, 25 bp, Homo sapien
gtcacagaagaaaactgggctctct

SEQ ID NO: 22574 - DNA, 25 bp, Homo sapien
gtcacagaagaatactgggctctct

SEQ ID NO: 22575 - DNA, 25 bp, Homo sapien
gaactaggaggactcttcccgtcct

SEQ ID NO: 22576 - DNA, 25 bp, Homo sapien
gaactaggaggagtcttcccgtcct

SEQ ID NO: 22577 - DNA, 25 bp, Homo sapien
aaaatcgtagaaagaatgacctctc

SEQ ID NO: 22578 - DNA, 25 bp, Homo sapien
aaaatcgtagaatgaatgacctctc

SEQ ID NO: 22579 - DNA, 25 bp, Homo sapien
aaatcatacacatggaggacccacg

SEQ ID NO: 22580 - DNA, 25 bp, Homo sapien
aaatcatacacaaggaggacccacg

SEQ ID NO: 22581 - DNA, 25 bp, Homo sapien
ggataaaacacagaggggaacccgt

SEQ ID NO: 22582 - DNA, 25 bp, Homo sapien
ggataaaacacacaggggaacccgt

SEQ ID NO: 22583 - DNA, 25 bp, Homo sapien
atatgaagacgatcgggggtcccct

SEQ ID NO: 22584 - DNA, 25 bp, Homo sapien
atatgaagacgaacgggggtcccct

SEQ ID NO: 22585 - DNA, 25 bp, Homo sapien
tgttcaacacggatccgaccgtgat

SEQ ID NO: 22586 - DNA, 25 bp, Homo sapien
tgttcaacacggttccgaccgtgat

SEQ ID NO: 22587 - DNA, 25 bp, Homo sapien
atttcgaatagtctatacccgtgtt

SEQ ID NO: 22588 - DNA, 25 bp, Homo sapien
atttcgaatagtgtatacccgtgtt

SEQ ID NO: 22589 - DNA, 25 bp, Homo sapien
acgtcggcagcgagaccgtcgtctt

SEQ ID NO: 22590 - DNA, 25 bp, Homo sapien
acgtcggcagcgtgaccgtcgtctt

SEQ ID NO: 22591 - DNA, 25 bp, Homo sapien
ttttgtacagtgtagaactacgtca

SEQ ID NO: 22592 - DNA, 25 bp, Homo sapien
ttttgtacagtgaagaactacgtca

SEQ ID NO: 22593 - DNA, 25 bp, Homo sapien
ccagagttagaggtcgaggtccgcc

SEQ ID NO: 22594 - DNA, 25 bp, Homo sapien
ccagagttagagctcgaggtccgcc

SEQ ID NO: 22595 - DNA, 25 bp, Homo sapien
agaagtacctaaggtcgacctgggc

SEQ ID NO: 22596 - DNA, 25 bp, Homo sapien
agaagtacctaacgtcgacctgggc

SEQ ID NO: 22597 - DNA, 25 bp, Homo sapien
caatagagcaacatgagcagtgatc

SEQ ID NO: 22598 - DNA, 25 bp, Homo sapien
caatagagcaacttgagcagtgatc

SEQ ID NO: 22599 - DNA, 25 bp, Homo sapien
atgtaaacgaccttacacatgtaga

SEQ ID NO: 22600 - DNA, 25 bp, Homo sapien
atgtaaacgaccatacacatgtaga

SEQ ID NO: 22601 - DNA, 25 bp, Homo sapien
gaacaacgcgtcatacaatagttag

SEQ ID NO: 22602 - DNA, 25 bp, Homo sapien
gaacaacgcgtcttacaatagttag

SEQ ID NO: 22603 - DNA, 25 bp, Homo sapien
agaagatcggtcaattatcgtctct

SEQ ID NO: 22604 - DNA, 25 bp, Homo sapien
agaagatcggtctattatcgtctct

SEQ ID NO: 22605 - DNA, 25 bp, Homo sapien
gtagtttcccggtctatactgttat

SEQ ID NO: 22606 - DNA, 25 bp, Homo sapien
gtagtttcccggactatactgttat

SEQ ID NO: 22607 - DNA, 25 bp, Homo sapien
gaagttcaccacgtatcgtcattac

SEQ ID NO: 22608 - DNA, 25 bp, Homo sapien
gaagttcaccacctatcgtcattac

SEQ ID NO: 22609 - DNA, 25 bp, Homo sapien
cttaatgtacgtcatcgagtataat

SEQ ID NO: 22610 - DNA, 25 bp, Homo sapien
cttaatgtacgtgatcgagtataat

SEQ ID NO: 22611 - DNA, 25 bp, Homo sapien
gtgacacatcgtaactatgacctta

SEQ ID NO: 22612 - DNA, 25 bp, Homo sapien
gtgacacatcgttactatgacctta

SEQ ID NO: 22613 - DNA, 25 bp, Homo sapien
atgtcaagtgtcttagtggtctaac

SEQ ID NO: 22614 - DNA, 25 bp, Homo sapien
atgtcaagtgtcatagtggtctaac

SEQ ID NO: 22615 - DNA, 25 bp, Homo sapien
ctgaggagcgtgttcgtcgcgttct

SEQ ID NO: 22616 - DNA, 25 bp, Homo sapien
ctgaggagcgtgatcgtcgcgttct

SEQ ID NO: 22617 - DNA, 25 bp, Homo sapien
tatcggtgcgtgtgtctacggtccg

SEQ ID NO: 22618 - DNA, 25 bp, Homo sapien
tatcggtgcgtgagtctacggtccg

SEQ ID NO: 22619 - DNA, 25 bp, Homo sapien
caacttcacaggagtctcggttact

SEQ ID NO: 22620 - DNA, 25 bp, Homo sapien
caacttcacaggtgtctcggttact

SEQ ID NO: 22621 - DNA, 25 bp, Homo sapien
aacaaagtgatgtgtactccctctt

SEQ ID NO: 22622 - DNA, 25 bp, Homo sapien
aacaaagtgatgagtactccctctt

SEQ ID NO: 22623 - DNA, 25 bp, Homo sapien
aaaccgttatgtgacgtatccccat

SEQ ID NO: 22624 - DNA, 25 bp, Homo sapien
aaaccgttatgtcacgtatccccat

SEQ ID NO: 22625 - DNA, 25 bp, Homo sapien
ttcgataccttatgggacccacaca

SEQ ID NO: 22626 - DNA, 25 bp, Homo sapien
ttcgataccttaagggacccacaca

SEQ ID NO: 22627 - DNA, 25 bp, Homo sapien
acgggtggacgagagtctccacaga

SEQ ID NO: 22628 - DNA, 25 bp, Homo sapien
acgggtggacgacagtctccacaga

SEQ ID NO: 22629 - DNA, 25 bp, Homo sapien
cgtccttggtcaggtgtcccgaatg

SEQ ID NO: 22630 - DNA, 25 bp, Homo sapien
cgtccttggtcacgtgtcccgaatg

SEQ ID NO: 22631 - DNA, 25 bp, Homo sapien
ccccggagacccttggtcgtagaga

SEQ ID NO: 22632 - DNA, 25 bp, Homo sapien
ccccggagacccatggtcgtagaga

SEQ ID NO: 22633 - DNA, 25 bp, Homo sapien
tcggaccacagttacgcgtgtagac

SEQ ID NO: 22634 - DNA, 25 bp, Homo sapien
tcggaccacagtaacgcgtgtagac

SEQ ID NO: 22635 - DNA, 25 bp, Homo sapien
catttcctcagagtacccgtatcgc

SEQ ID NO: 22636 - DNA, 25 bp, Homo sapien
catttcctcagactacccgtatcgc

SEQ ID NO: 22637 - DNA, 25 bp, Homo sapien
atgcctctcaagaacctcgaggtcg

SEQ ID NO: 22638 - DNA, 25 bp, Homo sapien
atgcctctcaagtacctcgaggtcg

SEQ ID NO: 22639 - DNA, 25 bp, Homo sapien
ttatcacttcgaagatgactcaaga

SEQ ID NO: 22640 - DNA, 25 bp, Homo sapien
ttatcacttcgatgatgactcaaga

SEQ ID NO: 22641 - DNA, 25 bp, Homo sapien
tcgaaaaggacgataaggatccatt

SEQ ID NO: 22642 - DNA, 25 bp, Homo sapien
tcgaaaaggacgttaaggatccatt

SEQ ID NO: 22643 - DNA, 25 bp, Homo sapien
gaccactaagtttcgagtttcttaa

SEQ ID NO: 22644 - DNA, 25 bp, Homo sapien
gaccactaagttacgagtttcttaa

SEQ ID NO: 22645 - DNA, 25 bp, Homo sapien
ctaaccgactctgcaactgggggaa

SEQ ID NO: 22646 - DNA, 25 bp, Homo sapien
ctaaccgactctccaactgggggaa

SEQ ID NO: 22647 - DNA, 25 bp, Homo sapien
tttcggtcccggatcgggtgagatc

SEQ ID NO: 22648 - DNA, 25 bp, Homo sapien
tttcggtcccggttcgggtgagatc

SEQ ID NO: 22649 - DNA, 25 bp, Homo sapien
tactcttcctaatctgggtcgaccc

SEQ ID NO: 22650 - DNA, 25 bp, Homo sapien
tactcttcctaaactgggtcgaccc

SEQ ID NO: 22651 - DNA, 25 bp, Homo sapien
aatgtttatgacgtagtcgagccac

SEQ ID NO: 22652 - DNA, 25 bp, Homo sapien
aatgtttatgacctagtcgagccac

SEQ ID NO: 22653 - DNA, 25 bp, Homo sapien
taccattcgtgatcagtgtgcatcg

SEQ ID NO: 22654 - DNA, 25 bp, Homo sapien
taccattcgtgaacagtgtgcatcg

SEQ ID NO: 22655 - DNA, 25 bp, Homo sapien
aaggcatttgaaaaagactcgtcgt

SEQ ID NO: 22656 - DNA, 25 bp, Homo sapien
aaggcatttgaataagactcgtcgt

SEQ ID NO: 22657 - DNA, 25 bp, Homo sapien
ttagtcctgttgacatctgatatat

SEQ ID NO: 22658 - DNA, 25 bp, Homo sapien
ttagtcctgttgtcatctgatatat

SEQ ID NO: 22659 - DNA, 25 bp, Homo sapien
cgtacgtgtggacacatgtatatat

SEQ ID NO: 22660 - DNA, 25 bp, Homo sapien
cgtacgtgtggagacatgtatatat

SEQ ID NO: 22661 - DNA, 25 bp, Homo sapien
catgcgtgtcgaaggttctggtgaa

SEQ ID NO: 22662 - DNA, 25 bp, Homo sapien
catgcgtgtcgatggttctggtgaa

SEQ ID NO: 22663 - DNA, 25 bp, Homo sapien
taaagtcacactaatctttacgggg

SEQ ID NO: 22664 - DNA, 25 bp, Homo sapien
taaagtcacacttatctttacgggg

SEQ ID NO: 22665 - DNA, 25 bp, Homo sapien
attaagtcgacctattcatagagga

SEQ ID NO: 22666 - DNA, 25 bp, Homo sapien
attaagtcgaccaattcatagagga

SEQ ID NO: 22667 - DNA, 25 bp, Homo sapien
aggtattccgccatgaacggtgggt

SEQ ID NO: 22668 - DNA, 25 bp, Homo sapien
aggtattccgccttgaacggtgggt

SEQ ID NO: 22669 - DNA, 25 bp, Homo sapien
tgtctttgtccagaggtcgaggctt

SEQ ID NO: 22670 - DNA, 25 bp, Homo sapien
tgtctttgtccacaggtcgaggctt

SEQ ID NO: 22671 - DNA, 25 bp, Homo sapien
actttatttaacattgatctaaatt

SEQ ID NO: 22672 - DNA, 25 bp, Homo sapien
actttatttaactttgatctaaatt

SEQ ID NO: 22673 - DNA, 25 bp, Homo sapien
cgtttttcgacatagagctcaaatt

SEQ ID NO: 22674 - DNA, 25 bp, Homo sapien
cgtttttcgacaaagagctcaaatt

SEQ ID NO: 22675 - DNA, 25 bp, Homo sapien
atcgttggaaagaccgtatacgatt

SEQ ID NO: 22676 - DNA, 25 bp, Homo sapien
atcgttggaaagtccgtatacgatt

SEQ ID NO: 22677 - DNA, 25 bp, Homo sapien
tcctttgtgcgaaaccgaacttttt

SEQ ID NO: 22678 - DNA, 25 bp, Homo sapien
tcctttgtgcgataccgaacttttt

SEQ ID NO: 22679 - DNA, 25 bp, Homo sapien
ctcttgtttctgactggtaattatg

SEQ ID NO: 22680 - DNA, 25 bp, Homo sapien
ctcttgtttctgtctggtaattatg

SEQ ID NO: 22681 - DNA, 25 bp, Homo sapien
gctaaagacccacagatgacaaatg

SEQ ID NO: 22682 - DNA, 25 bp, Homo sapien
gctaaagacccagagatgacaaatg

SEQ ID NO: 22683 - DNA, 25 bp, Homo sapien
ccaaacagtcaagaagaccagactc

SEQ ID NO: 22684 - DNA, 25 bp, Homo sapien
ccaaacagtcaacaagaccagactc

SEQ ID NO: 22685 - DNA, 25 bp, Homo sapien
tcactcatcattcaggacgacagcc

SEQ ID NO: 22686 - DNA, 25 bp, Homo sapien
tcactcatcattgaggacgacagcc

SEQ ID NO: 22687 - DNA, 25 bp, Homo sapien
tcttccgtacttggtgccgtagaca

SEQ ID NO: 22688 - DNA, 25 bp, Homo sapien
tcttccgtacttcgtgccgtagaca

SEQ ID NO: 22689 - DNA, 25 bp, Homo sapien
gtctctgcgaccagaattcggtaaa

SEQ ID NO: 22690 - DNA, 25 bp, Homo sapien
gtctctgcgacctgaattcggtaaa

SEQ ID NO: 22691 - DNA, 25 bp, Homo sapien
aatcacacacctccaacttggaaag

SEQ ID NO: 22692 - DNA, 25 bp, Homo sapien
aatcacacacctgcaacttggaaag

SEQ ID NO: 22693 - DNA, 25 bp, Homo sapien
tcctcaccacaaagtctccggtgga

SEQ ID NO: 22694 - DNA, 25 bp, Homo sapien
tcctcaccacaatgtctccggtgga

SEQ ID NO: 22695 - DNA, 25 bp, Homo sapien
ccgcgacctaaacgtccagagagta

SEQ ID NO: 22696 - DNA, 25 bp, Homo sapien
ccgcgacctaaaggtccagagagta

SEQ ID NO: 22697 - DNA, 25 bp, Homo sapien
cgagtacgacctcaaacgccttaaa

SEQ ID NO: 22698 - DNA, 25 bp, Homo sapien
cgagtacgacctgaaacgccttaaa

SEQ ID NO: 22699 - DNA, 25 bp, Homo sapien
gtacgtcctgacatccactcagata

SEQ ID NO: 22700 - DNA, 25 bp, Homo sapien
gtacgtcctgacttccactcagata

SEQ ID NO: 22701 - DNA, 25 bp, Homo sapien
ttcgtcgtgcgctgggtccacacac

SEQ ID NO: 22702 - DNA, 25 bp, Homo sapien
ttcgtcgtgcgcagggtccacacac

SEQ ID NO: 22703 - DNA, 25 bp, Homo sapien
ctggggtcgtctgcacgtcttcctc

SEQ ID NO: 22704 - DNA, 25 bp, Homo sapien
ctggggtcgtctccacgtcttcctc

SEQ ID NO: 22705 - DNA, 25 bp, Homo sapien
ctcaagagtgtctcgtgtcttcctg

SEQ ID NO: 22706 - DNA, 25 bp, Homo sapien
ctcaagagtgtcacgtgtcttcctg

SEQ ID NO: 22707 - DNA, 25 bp, Homo sapien
tagagacatgcaacgcgccacacgg

SEQ ID NO: 22708 - DNA, 25 bp, Homo sapien
tagagacatgcatcgcgccacacgg

SEQ ID NO: 22709 - DNA, 25 bp, Homo sapien
ggcacgacgggtcaagcgactccca

SEQ ID NO: 22710 - DNA, 25 bp, Homo sapien
ggcacgacgggtgaagcgactccca

SEQ ID NO: 22711 - DNA, 25 bp, Homo sapien
cggctcataccgacggagttccggt

SEQ ID NO: 22712 - DNA, 25 bp, Homo sapien
cggctcataccgtcggagttccggt

SEQ ID NO: 22713 - DNA, 25 bp, Homo sapien
gcgtcgtcccgcaacggaagcttgt

SEQ ID NO: 22714 - DNA, 25 bp, Homo sapien
gcgtcgtcccgctacggaagcttgt

SEQ ID NO: 22715 - DNA, 25 bp, Homo sapien
ctccatctggagtcggacggaccct

SEQ ID NO: 22716 - DNA, 25 bp, Homo sapien
ctccatctggagacggacggaccct

SEQ ID NO: 22717 - DNA, 25 bp, Homo sapien
ttgtgtctgtgacgtgggtccttgt

SEQ ID NO: 22718 - DNA, 25 bp, Homo sapien
ttgtgtctgtgaggtgggtccttgt

SEQ ID NO: 22719 - DNA, 25 bp, Homo sapien
tcgtagagtcagttagggtcctggt

SEQ ID NO: 22720 - DNA, 25 bp, Homo sapien
tcgtagagtcagatagggtcctggt

SEQ ID NO: 22721 - DNA, 25 bp, Homo sapien
tcgtgtgggtcttcgctcgttgact

SEQ ID NO: 22722 - DNA, 25 bp, Homo sapien
tcgtgtgggtctacgctcgttgact

SEQ ID NO: 22723 - DNA, 25 bp, Homo sapien
tgtggtggttcaacggtcgtgacat

SEQ ID NO: 22724 - DNA, 25 bp, Homo sapien
tgtggtggttcatcggtcgtgacat

SEQ ID NO: 22725 - DNA, 25 bp, Homo sapien
tgacctggtccacgaggtacgacga

SEQ ID NO: 22726 - DNA, 25 bp, Homo sapien
tgacctggtccaggaggtacgacga

SEQ ID NO: 22727 - DNA, 25 bp, Homo sapien
tttacaaacgctgaggaggacgaca

SEQ ID NO: 22728 - DNA, 25 bp, Homo sapien
tttacaaacgctcaggaggacgaca

SEQ ID NO: 22729 - DNA, 25 bp, Homo sapien
agtaatagacctaacaggtacgatc

SEQ ID NO: 22730 - DNA, 25 bp, Homo sapien
agtaatagaccttacaggtacgatc

SEQ ID NO: 22731 - DNA, 25 bp, Homo sapien
tacgtaaagatctagacgtcgtaaa

SEQ ID NO: 22732 - DNA, 25 bp, Homo sapien
tacgtaaagatcaagacgtcgtaaa

SEQ ID NO: 22733 - DNA, 25 bp, Homo sapien
ggggaatttaaccagtcgtatcacg

SEQ ID NO: 22734 - DNA, 25 bp, Homo sapien
ggggaatttaacgagtcgtatcacg

SEQ ID NO: 22735 - DNA, 25 bp, Homo sapien
acgggtctatttcaggttcactaac

SEQ ID NO: 22736 - DNA, 25 bp, Homo sapien
acgggtctatttgaggttcactaac

SEQ ID NO: 22737 - DNA, 25 bp, Homo sapien
aggggtgttgtttccgtccgtaccg

SEQ ID NO: 22738 - DNA, 25 bp, Homo sapien
aggggtgttgttaccgtccgtaccg

SEQ ID NO: 22739 - DNA, 25 bp, Homo sapien
cggaagggttattgcactccctacc

SEQ ID NO: 22740 - DNA, 25 bp, Homo sapien
cggaagggttatagcactccctacc

SEQ ID NO: 22741 - DNA, 25 bp, Homo sapien
ggaagggttaacaccctaactcgac

SEQ ID NO: 22742 - DNA, 25 bp, Homo sapien
ggaagggttaactccctaactcgac

SEQ ID NO: 22743 - DNA, 25 bp, Homo sapien
ggagaggtttcaaactgtttctacc

SEQ ID NO: 22744 - DNA, 25 bp, Homo sapien
ggagaggtttcatactgtttctacc

SEQ ID NO: 22745 - DNA, 25 bp, Homo sapien
cagagatttatagtctgtttcgaca

SEQ ID NO: 22746 - DNA, 25 bp, Homo sapien
cagagatttatactctgtttcgaca

SEQ ID NO: 22747 - DNA, 25 bp, Homo sapien
gtcaattcgacttcgactttaagac

SEQ ID NO: 22748 - DNA, 25 bp, Homo sapien
gtcaattcgactacgactttaagac

SEQ ID NO: 22749 - DNA, 25 bp, Homo sapien
attaatatctactgaagtctggccg

SEQ ID NO: 22750 - DNA, 25 bp, Homo sapien
attaatatctacagaagtctggccg

SEQ ID NO: 22751 - DNA, 25 bp, Homo sapien
ctgtttacgtacaatatctactccg

SEQ ID NO: 22752 - DNA, 25 bp, Homo sapien
ctgtttacgtactatatctactccg

SEQ ID NO: 22753 - DNA, 25 bp, Homo sapien
ataccgtacgtaaagtgttactcct

SEQ ID NO: 22754 - DNA, 25 bp, Homo sapien
ataccgtacgtatagtgttactcct

SEQ ID NO: 22755 - DNA, 25 bp, Homo sapien
acgtgtacgtatttctctacagact

SEQ ID NO: 22756 - DNA, 25 bp, Homo sapien
acgtgtacgtatatctctacagact

SEQ ID NO: 22757 - DNA, 25 bp, Homo sapien
taatcgtgtatttaactacttcggt

SEQ ID NO: 22758 - DNA, 25 bp, Homo sapien
taatcgtgtattaaactacttcggt

SEQ ID NO: 22759 - DNA, 25 bp, Homo sapien
tagtgtgacctttgtacaaatcggg

SEQ ID NO: 22760 - DNA, 25 bp, Homo sapien
tagtgtgaccttagtacaaatcggg

SEQ ID NO: 22761 - DNA, 25 bp, Homo sapien
aggagactctgacgtagaatatcaa

SEQ ID NO: 22762 - DNA, 25 bp, Homo sapien
aggagactctgaggtagaatatcaa

SEQ ID NO: 22763 - DNA, 25 bp, Homo sapien
gtagactgagttgacaccgctacac

SEQ ID NO: 22764 - DNA, 25 bp, Homo sapien
gtagactgagttcacaccgctacac

SEQ ID NO: 22765 - DNA, 25 bp, Homo sapien
tgtacagaaatatgagctcatacag

SEQ ID NO: 22766 - DNA, 25 bp, Homo sapien
tgtacagaaataagagctcatacag

SEQ ID NO: 22767 - DNA, 25 bp, Homo sapien
tttagacgaaatagcactcaccagt

SEQ ID NO: 22768 - DNA, 25 bp, Homo sapien
tttagacgaaattgcactcaccagt

SEQ ID NO: 22769 - DNA, 25 bp, Homo sapien
agagtgtgacggtggagaccaaggg

SEQ ID NO: 22770 - DNA, 25 bp, Homo sapien
agagtgtgacggaggagaccaaggg

SEQ ID NO: 22771 - DNA, 25 bp, Homo sapien
ccttcgggagaaacgagtggtccag

SEQ ID NO: 22772 - DNA, 25 bp, Homo sapien
ccttcgggagaatcgagtggtccag

SEQ ID NO: 22773 - DNA, 25 bp, Homo sapien
tcccgacctgggacctggtgacacg

SEQ ID NO: 22774 - DNA, 25 bp, Homo sapien
tcccgacctgggtcctggtgacacg

SEQ ID NO: 22775 - DNA, 25 bp, Homo sapien
tctgaactcgggtatcgggtcctcg

SEQ ID NO: 22776 - DNA, 25 bp, Homo sapien
tctgaactcgggaatcgggtcctcg

SEQ ID NO: 22777 - DNA, 25 bp, Homo sapien
ctcgggagtctgtcgtcaccgtagt

SEQ ID NO: 22778 - DNA, 25 bp, Homo sapien
ctcgggagtctgacgtcaccgtagt

SEQ ID NO: 22779 - DNA, 25 bp, Homo sapien
cccactctggtactgatcgtcatga

SEQ ID NO: 22780 - DNA, 25 bp, Homo sapien
cccactctggtagtgatcgtcatga

SEQ ID NO: 22781 - DNA, 25 bp, Homo sapien
cctaccgacgttaagtttgtcaaga

SEQ ID NO: 22782 - DNA, 25 bp, Homo sapien
cctaccgacgtttagtttgtcaaga

SEQ ID NO: 22783 - DNA, 25 bp, Homo sapien
ctctcgttagtcgacagggcgcaaa

SEQ ID NO: 22784 - DNA, 25 bp, Homo sapien
ctctcgttagtccacagggcgcaaa

SEQ ID NO: 22785 - DNA, 25 bp, Homo sapien
acgttctcttcacagggacggtaaa

SEQ ID NO: 22786 - DNA, 25 bp, Homo sapien
acgttctcttcagagggacggtaaa

SEQ ID NO: 22787 - DNA, 25 bp, Homo sapien
ctagtaagtaaggtcggaggtcact

SEQ ID NO: 22788 - DNA, 25 bp, Homo sapien
ctagtaagtaagctcggaggtcact

SEQ ID NO: 22789 - DNA, 25 bp, Homo sapien
acccgaagaggtcccgtcgtttcgc

SEQ ID NO: 22790 - DNA, 25 bp, Homo sapien
acccgaagaggtgccgtcgtttcgc

SEQ ID NO: 22791 - DNA, 25 bp, Homo sapien
cacctcatagtcagcgagtgtcctg

SEQ ID NO: 22792 - DNA, 25 bp, Homo sapien
cacctcatagtctgcgagtgtcctg

SEQ ID NO: 22793 - DNA, 25 bp, Homo sapien
cgacctccgtcgagttacgtacgtg

SEQ ID NO: 22794 - DNA, 25 bp, Homo sapien
cgacctccgtcgtgttacgtacgtg

SEQ ID NO: 22795 - DNA, 25 bp, Homo sapien
tgccgttccatagctgtcctagtat

SEQ ID NO: 22796 - DNA, 25 bp, Homo sapien
tgccgttccatacctgtcctagtat

SEQ ID NO: 22797 - DNA, 25 bp, Homo sapien
ttccgttccgttatctgagttcaat

SEQ ID NO: 22798 - DNA, 25 bp, Homo sapien
ttccgttccgttttctgagttcaat

SEQ ID NO: 22799 - DNA, 25 bp, Homo sapien
tttcgccctcggtttcagaccacta

SEQ ID NO: 22800 - DNA, 25 bp, Homo sapien
tttcgccctcggattcagaccacta

SEQ ID NO: 22801 - DNA, 25 bp, Homo sapien
gtctgggcccggtaccgaacaagta

SEQ ID NO: 22802 - DNA, 25 bp, Homo sapien
gtctgggcccggaaccgaacaagta

SEQ ID NO: 22803 - DNA, 25 bp, Homo sapien
tgtgaacggtgtcgacgaacacaat

SEQ ID NO: 22804 - DNA, 25 bp, Homo sapien
tgtgaacggtgtggacgaacacaat

SEQ ID NO: 22805 - DNA, 25 bp, Homo sapien
ttgacgtctcgtagtacgataatca

SEQ ID NO: 22806 - DNA, 25 bp, Homo sapien
ttgacgtctcgttgtacgataatca

SEQ ID NO: 22807 - DNA, 25 bp, Homo sapien
aaccttctcgtctttacgttaatga

SEQ ID NO: 22808 - DNA, 25 bp, Homo sapien
aaccttctcgtcattacgttaatga

SEQ ID NO: 22809 - DNA, 25 bp, Homo sapien
actggtgtcgtattacttaagacga

SEQ ID NO: 22810 - DNA, 25 bp, Homo sapien
actggtgtcgtaatacttaagacga

SEQ ID NO: 22811 - DNA, 25 bp, Homo sapien
ctactgacgttcttgtacttttaga

SEQ ID NO: 22812 - DNA, 25 bp, Homo sapien
ctactgacgttcatgtacttttaga

SEQ ID NO: 22813 - DNA, 25 bp, Homo sapien
ttgtaccacggtctgtgttttagta

SEQ ID NO: 22814 - DNA, 25 bp, Homo sapien
ttgtaccacggtgtgtgttttagta

SEQ ID NO: 22815 - DNA, 25 bp, Homo sapien
catattccctgtgatttagtcgaaa

SEQ ID NO: 22816 - DNA, 25 bp, Homo sapien
catattccctgtcatttagtcgaaa

SEQ ID NO: 22817 - DNA, 25 bp, Homo sapien
ctacggtgtcgtcgtgtacctaatc

SEQ ID NO: 22818 - DNA, 25 bp, Homo sapien
ctacggtgtcgtggtgtacctaatc

SEQ ID NO: 22819 - DNA, 25 bp, Homo sapien
gaagggtcacgttttgattccttgg

SEQ ID NO: 22820 - DNA, 25 bp, Homo sapien
gaagggtcacgtattgattccttgg

SEQ ID NO: 22821 - DNA, 25 bp, Homo sapien
gcttaggcataaagattctcatttc

SEQ ID NO: 22822 - DNA, 25 bp, Homo sapien
gcttaggcataatgattctcatttc

SEQ ID NO: 22823 - DNA, 25 bp, Homo sapien
tcagaatttggtgctgtaagtctac

SEQ ID NO: 22824 - DNA, 25 bp, Homo sapien
tcagaatttggtcctgtaagtctac

SEQ ID NO: 22825 - DNA, 25 bp, Homo sapien
tgtctattttatggagacccgataa

SEQ ID NO: 22826 - DNA, 25 bp, Homo sapien
tgtctattttatcgagacccgataa

SEQ ID NO: 22827 - DNA, 25 bp, Homo sapien
agacatctatttctaggactgataa

SEQ ID NO: 22828 - DNA, 25 bp, Homo sapien
agacatctatttgtaggactgataa

SEQ ID NO: 22829 - DNA, 25 bp, Homo sapien
aagacatatcctagttcaaggaata

SEQ ID NO: 22830 - DNA, 25 bp, Homo sapien
aagacatatccttgttcaaggaata

SEQ ID NO: 22831 - DNA, 25 bp, Homo sapien
tcgacccactcactctatgactccc

SEQ ID NO: 22832 - DNA, 25 bp, Homo sapien
tcgacccactcagtctatgactccc

SEQ ID NO: 22833 - DNA, 25 bp, Homo sapien
attcgacaattgtctcaagtgtccc

SEQ ID NO: 22834 - DNA, 25 bp, Homo sapien
attcgacaattgactcaagtgtccc

SEQ ID NO: 22835 - DNA, 25 bp, Homo sapien
aatcctgtccaaggaccgtaccgtc

SEQ ID NO: 22836 - DNA, 25 bp, Homo sapien
aatcctgtccaacgaccgtaccgtc

SEQ ID NO: 22837 - DNA, 25 bp, Homo sapien
attctgtcttctctctgtatcgtcg

SEQ ID NO: 22838 - DNA, 25 bp, Homo sapien
attctgtcttctgtctgtatcgtcg

SEQ ID NO: 22839 - DNA, 25 bp, Homo sapien
catttcgtttttgatctgagtgtcg

SEQ ID NO: 22840 - DNA, 25 bp, Homo sapien
catttcgtttttcatctgagtgtcg

SEQ ID NO: 22841 - DNA, 25 bp, Homo sapien
tcacgtaagtatcacctgtcgtgtc

SEQ ID NO: 22842 - DNA, 25 bp, Homo sapien
tcacgtaagtatgacctgtcgtgtc

SEQ ID NO: 22843 - DNA, 25 bp, Homo sapien
tttccgtacacgaaccttagttgag

SEQ ID NO: 22844 - DNA, 25 bp, Homo sapien
tttccgtacacgtaccttagttgag

SEQ ID NO: 22845 - DNA, 25 bp, Homo sapien
tcgccgcacggaaagtggaagtggt

SEQ ID NO: 22846 - DNA, 25 bp, Homo sapien
tcgccgcacggatagtggaagtggt

SEQ ID NO: 22847 - DNA, 25 bp, Homo sapien
ttcgcacggttagttgtacgaccac

SEQ ID NO: 22848 - DNA, 25 bp, Homo sapien
ttcgcacggttacttgtacgaccac

SEQ ID NO: 22849 - DNA, 25 bp, Homo sapien
ccactgagtagaacgaaaaacctca

SEQ ID NO: 22850 - DNA, 25 bp, Homo sapien
ccactgagtagatcgaaaaacctca

SEQ ID NO: 22851 - DNA, 25 bp, Homo sapien
acgtgtatgtacaaaaacgattctc

SEQ ID NO: 22852 - DNA, 25 bp, Homo sapien
acgtgtatgtactaaaacgattctc

SEQ ID NO: 22853 - DNA, 25 bp, Homo sapien
atgttgtctaattgagtcgttactc

SEQ ID NO: 22854 - DNA, 25 bp, Homo sapien
atgttgtctaatagagtcgttactc

SEQ ID NO: 22855 - DNA, 25 bp, Homo sapien
tctgttctccgtgacgagtcttagg

SEQ ID NO: 22856 - DNA, 25 bp, Homo sapien
tctgttctccgtcacgagtcttagg

SEQ ID NO: 22857 - DNA, 25 bp, Homo sapien
ccttgtctccgaagactcagtcgtc

SEQ ID NO: 22858 - DNA, 25 bp, Homo sapien
ccttgtctccgatgactcagtcgtc

SEQ ID NO: 22859 - DNA, 25 bp, Homo sapien
actcctcgtgtcaatcgtttcatgc

SEQ ID NO: 22860 - DNA, 25 bp, Homo sapien
actcctcgtgtctatcgtttcatgc

SEQ ID NO: 22861 - DNA, 25 bp, Homo sapien
aactgtttgtctagtttcattcgag

SEQ ID NO: 22862 - DNA, 25 bp, Homo sapien
aactgtttgtcttgtttcattcgag

SEQ ID NO: 22863 - DNA, 25 bp, Homo sapien
ctcttctgtagtttgtatcatgtca

SEQ ID NO: 22864 - DNA, 25 bp, Homo sapien
ctcttctgtagtatgtatcatgtca

SEQ ID NO: 22865 - DNA, 25 bp, Homo sapien
tggagacttactcctcagtagactg

SEQ ID NO: 22866 - DNA, 25 bp, Homo sapien
tggagacttactgctcagtagactg

SEQ ID NO: 22867 - DNA, 25 bp, Homo sapien
cgtcgggatgacactcagtcgttag

SEQ ID NO: 22868 - DNA, 25 bp, Homo sapien
cgtcgggatgactctcagtcgttag

SEQ ID NO: 22869 - DNA, 25 bp, Homo sapien
caggactccgtcgtcgtcgggtcga

SEQ ID NO: 22870 - DNA, 25 bp, Homo sapien
caggactccgtcctcgtcgggtcga

SEQ ID NO: 22871 - DNA, 25 bp, Homo sapien
gacccgacgactcgaccgtggtgac

SEQ ID NO: 22872 - DNA, 25 bp, Homo sapien
gacccgacgactggaccgtggtgac

SEQ ID NO: 22873 - DNA, 25 bp, Homo sapien
gcgtcacacgtcgttagaggagctt

SEQ ID NO: 22874 - DNA, 25 bp, Homo sapien
gcgtcacacgtccttagaggagctt

SEQ ID NO: 22875 - DNA, 25 bp, Homo sapien
gggttcttatagtagatcacgactt

SEQ ID NO: 22876 - DNA, 25 bp, Homo sapien
gggttcttatagaagatcacgactt

SEQ ID NO: 22877 - DNA, 25 bp, Homo sapien
gtcagtttctgtaaaagtctctatt

SEQ ID NO: 22878 - DNA, 25 bp, Homo sapien
gtcagtttctgttaaagtctctatt

SEQ ID NO: 22879 - DNA, 25 bp, Homo sapien
ggtcgtactgttttaaacatgtttc

SEQ ID NO: 22880 - DNA, 25 bp, Homo sapien
ggtcgtactgttataaacatgtttc

SEQ ID NO: 22881 - DNA, 25 bp, Homo sapien
gtgtctcgggtctatacaaatgttc

SEQ ID NO: 22882 - DNA, 25 bp, Homo sapien
gtgtctcgggtcaatacaaatgttc

SEQ ID NO: 22883 - DNA, 25 bp, Homo sapien
gagtagttctccagactttagtcac

SEQ ID NO: 22884 - DNA, 25 bp, Homo sapien
gagtagttctcctgactttagtcac

SEQ ID NO: 22885 - DNA, 25 bp, Homo sapien
acgaatttagtttgatatatctctc

SEQ ID NO: 22886 - DNA, 25 bp, Homo sapien
acgaatttagttagatatatctctc

SEQ ID NO: 22887 - DNA, 25 bp, Homo sapien
cgattgtctcgtttagactttgttc

SEQ ID NO: 22888 - DNA, 25 bp, Homo sapien
cgattgtctcgtatagactttgttc

SEQ ID NO: 22889 - DNA, 25 bp, Homo sapien
tgactctttcagatgcttctgtatg

SEQ ID NO: 22890 - DNA, 25 bp, Homo sapien
tgactctttcagttgcttctgtatg

SEQ ID NO: 22891 - DNA, 25 bp, Homo sapien
gacgtaaactataatcctttgttgt

SEQ ID NO: 22892 - DNA, 25 bp, Homo sapien
gacgtaaactattatcctttgttgt

SEQ ID NO: 22893 - DNA, 25 bp, Homo sapien
gatcagaaacatttccgtcttcctg

SEQ ID NO: 22894 - DNA, 25 bp, Homo sapien
gatcagaaacatatccgtcttcctg

SEQ ID NO: 22895 - DNA, 25 bp, Homo sapien
aaggaaacgtcaaagtacctctcgg

SEQ ID NO: 22896 - DNA, 25 bp, Homo sapien
aaggaaacgtcatagtacctctcgg

SEQ ID NO: 22897 - DNA, 25 bp, Homo sapien
ttgtgttatactacgaattcttgtc

SEQ ID NO: 22898 - DNA, 25 bp, Homo sapien
ttgtgttatacttcgaattcttgtc

SEQ ID NO: 22899 - DNA, 25 bp, Homo sapien
tggtggtactgtcatcaccttctac

SEQ ID NO: 22900 - DNA, 25 bp, Homo sapien
tggtggtactgtgatcaccttctac

SEQ ID NO: 22901 - DNA, 25 bp, Homo sapien
tgtgtacgcagtgactcaatacgaa

SEQ ID NO: 22902 - DNA, 25 bp, Homo sapien
tgtgtacgcagtcactcaatacgaa

SEQ ID NO: 22903 - DNA, 25 bp, Homo sapien
tctgtgtccatgattatgacgacac

SEQ ID NO: 22904 - DNA, 25 bp, Homo sapien
tctgtgtccatgtttatgacgacac

SEQ ID NO: 22905 - DNA, 25 bp, Homo sapien
tattttgtacgctctcttcgtcgaa

SEQ ID NO: 22906 - DNA, 25 bp, Homo sapien
tattttgtacgcactcttcgtcgaa

SEQ ID NO: 22907 - DNA, 25 bp, Homo sapien
caattgtttccgtttatgactgaag

SEQ ID NO: 22908 - DNA, 25 bp, Homo sapien
caattgtttccgattatgactgaag

SEQ ID NO: 22909 - DNA, 25 bp, Homo sapien
ttatgactcgccataacttatgaag

SEQ ID NO: 22910 - DNA, 25 bp, Homo sapien
ttatgactcgccttaacttatgaag

SEQ ID NO: 22911 - DNA, 25 bp, Homo sapien
tgactcgatacaaactactttgtgt

SEQ ID NO: 22912 - DNA, 25 bp, Homo sapien
tgactcgatacatactactttgtgt

SEQ ID NO: 22913 - DNA, 25 bp, Homo sapien
gaatcgtcggagactctcagtcgta

SEQ ID NO: 22914 - DNA, 25 bp, Homo sapien
gaatcgtcggagtctctcagtcgta

SEQ ID NO: 22915 - DNA, 25 bp, Homo sapien
atctcgcctcggatttctacgtagg

SEQ ID NO: 22916 - DNA, 25 bp, Homo sapien
atctcgcctcggttttctacgtagg

SEQ ID NO: 22917 - DNA, 25 bp, Homo sapien
cgtgacacactggacacacgtgggg

SEQ ID NO: 22918 - DNA, 25 bp, Homo sapien
cgtgacacactgcacacacgtgggg

SEQ ID NO: 22919 - DNA, 25 bp, Homo sapien
gggacacggtactccacgtgccggt

SEQ ID NO: 22920 - DNA, 25 bp, Homo sapien
gggacacggtacaccacgtgccggt

SEQ ID NO: 22921 - DNA, 25 bp, Homo sapien
tgacccacggtaatcgtcgtcgcaa

SEQ ID NO: 22922 - DNA, 25 bp, Homo sapien
tgacccacggtattcgtcgtcgcaa

SEQ ID NO: 22923 - DNA, 25 bp, Homo sapien
attgatctggggatcgtcgtccata

SEQ ID NO: 22924 - DNA, 25 bp, Homo sapien
attgatctggggttcgtcgtccata

SEQ ID NO: 22925 - DNA, 25 bp, Homo sapien
attgtaacggggtcagactccctcg

SEQ ID NO: 22926 - DNA, 25 bp, Homo sapien
attgtaacggggacagactccctcg

SEQ ID NO: 22927 - DNA, 25 bp, Homo sapien
ctacggacgttcttccaaccctaag

SEQ ID NO: 22928 - DNA, 25 bp, Homo sapien
ctacggacgttcatccaaccctaag

SEQ ID NO: 22929 - DNA, 25 bp, Homo sapien
cgagtcgactacataacaaacaaag

SEQ ID NO: 22930 - DNA, 25 bp, Homo sapien
cgagtcgactacttaacaaacaaag

SEQ ID NO: 22931 - DNA, 25 bp, Homo sapien
cccatcgtcatcactgcgggtagag

SEQ ID NO: 22932 - DNA, 25 bp, Homo sapien
cccatcgtcatctctgcgggtagag

SEQ ID NO: 22933 - DNA, 25 bp, Homo sapien
ttcgtcctactgtcgtttgcgtaag

SEQ ID NO: 22934 - DNA, 25 bp, Homo sapien
ttcgtcctactgacgtttgcgtaag

SEQ ID NO: 22935 - DNA, 25 bp, Homo sapien
ccgaccaagagactacggacgtcga

SEQ ID NO: 22936 - DNA, 25 bp, Homo sapien
ccgaccaagagagtacggacgtcga

SEQ ID NO: 22937 - DNA, 25 bp, Homo sapien
ttttccggaaggatgtaccatcgat

SEQ ID NO: 22938 - DNA, 25 bp, Homo sapien
ttttccggaaggttgtaccatcgat

SEQ ID NO: 22939 - DNA, 25 bp, Homo sapien
tggtccgaggactacgacacattac

SEQ ID NO: 22940 - DNA, 25 bp, Homo sapien
tggtccgaggacaacgacacattac

SEQ ID NO: 22941 - DNA, 25 bp, Homo sapien
ggagtaccacccatagatagacttt

SEQ ID NO: 22942 - DNA, 25 bp, Homo sapien
ggagtaccacccttagatagacttt

SEQ ID NO: 22943 - DNA, 25 bp, Homo sapien
tccaatcgtcgtcctggctgccgtc

SEQ ID NO: 22944 - DNA, 25 bp, Homo sapien
tccaatcgtcgtgctggctgccgtc

SEQ ID NO: 22945 - DNA, 25 bp, Homo sapien
tttctcattggaggtaggctccacc

SEQ ID NO: 22946 - DNA, 25 bp, Homo sapien
tttctcattggacgtaggctccacc

SEQ ID NO: 22947 - DNA, 25 bp, Homo sapien
ggtctcaccggagtaggaggtcccc

SEQ ID NO: 22948 - DNA, 25 bp, Homo sapien
ggtctcaccggactaggaggtcccc

SEQ ID NO: 22949 - DNA, 25 bp, Homo sapien
aacatacagagagaggaggttcctc

SEQ ID NO: 22950 - DNA, 25 bp, Homo sapien
aacatacagagacaggaggttcctc

SEQ ID NO: 22951 - DNA, 25 bp, Homo sapien
aacgtaaggaaggacaggatacctc

SEQ ID NO: 22952 - DNA, 25 bp, Homo sapien
aacgtaaggaagcacaggatacctc

SEQ ID NO: 22953 - DNA, 25 bp, Homo sapien
agagaggtccagaccgactacactc

SEQ ID NO: 22954 - DNA, 25 bp, Homo sapien
agagaggtccagtccgactacactc

SEQ ID NO: 22955 - DNA, 25 bp, Homo sapien
cgacacaagtccttctccggtgtaa

SEQ ID NO: 22956 - DNA, 25 bp, Homo sapien
cgacacaagtccatctccggtgtaa

SEQ ID NO: 22957 - DNA, 25 bp, Homo sapien
agaagaagagtgactcctcagagaa

SEQ ID NO: 22958 - DNA, 25 bp, Homo sapien
agaagaagagtgtctcctcagagaa

SEQ ID NO: 22959 - DNA, 25 bp, Homo sapien
gtaataaacgtgaacattaaccgaa

SEQ ID NO: 22960 - DNA, 25 bp, Homo sapien
gtaataaacgtgtacattaaccgaa

SEQ ID NO: 22961 - DNA, 25 bp, Homo sapien
gtaagtacagatttcatgtaaacca

SEQ ID NO: 22962 - DNA, 25 bp, Homo sapien
gtaagtacagatatcatgtaaacca

SEQ ID NO: 22963 - DNA, 25 bp, Homo sapien
ttgtagataacaagaatctcagact

SEQ ID NO: 22964 - DNA, 25 bp, Homo sapien
ttgtagataacatgaatctcagact

SEQ ID NO: 22965 - DNA, 25 bp, Homo sapien
acggtggagacaccagactcgaccc

SEQ ID NO: 22966 - DNA, 25 bp, Homo sapien
acggtggagacagcagactcgaccc

SEQ ID NO: 22967 - DNA, 25 bp, Homo sapien
tatgtagcagacagggtctcactcc

SEQ ID NO: 22968 - DNA, 25 bp, Homo sapien
tatgtagcagactgggtctcactcc

SEQ ID NO: 22969 - DNA, 25 bp, Homo sapien
agtgtgtctctctcagtctccatcc

SEQ ID NO: 22970 - DNA, 25 bp, Homo sapien
agtgtgtctctcacagtctccatcc

SEQ ID NO: 22971 - DNA, 25 bp, Homo sapien
ctggaactccgaacaacggaagaac

SEQ ID NO: 22972 - DNA, 25 bp, Homo sapien
ctggaactccgatcaacggaagaac

SEQ ID NO: 22973 - DNA, 25 bp, Homo sapien
ccggacccgagaacgacgaccatgg

SEQ ID NO: 22974 - DNA, 25 bp, Homo sapien
ccggacccgagatcgacgaccatgg

SEQ ID NO: 22975 - DNA, 25 bp, Homo sapien
ggtaccagaacgtacaacgacacct

SEQ ID NO: 22976 - DNA, 25 bp, Homo sapien
ggtaccagaacgaacaacgacacct

SEQ ID NO: 22977 - DNA, 25 bp, Homo sapien
gggagaccactgaaccactctcact

SEQ ID NO: 22978 - DNA, 25 bp, Homo sapien
gggagaccactgtaccactctcact

SEQ ID NO: 22979 - DNA, 25 bp, Homo sapien
ggtcgaccctagtactccgtcctgt

SEQ ID NO: 22980 - DNA, 25 bp, Homo sapien
ggtcgaccctagaactccgtcctgt

SEQ ID NO: 22981 - DNA, 25 bp, Homo sapien
cctgtcgacctatggtctgtccctg

SEQ ID NO: 22982 - DNA, 25 bp, Homo sapien
cctgtcgacctaaggtctgtccctg

SEQ ID NO: 22983 - DNA, 25 bp, Homo sapien
gacggtgtcctagtgacttcatctc

SEQ ID NO: 22984 - DNA, 25 bp, Homo sapien
gacggtgtcctactgacttcatctc

SEQ ID NO: 22985 - DNA, 25 bp, Homo sapien
cttgtttcactacaagtctcagttg

SEQ ID NO: 22986 - DNA, 25 bp, Homo sapien
cttgtttcactagaagtctcagttg

SEQ ID NO: 22987 - DNA, 25 bp, Homo sapien
gggggtcctcaagaagtcctaggtc

SEQ ID NO: 22988 - DNA, 25 bp, Homo sapien
gggggtcctcaacaagtcctaggtc

SEQ ID NO: 22989 - DNA, 25 bp, Homo sapien
ggtctacgtctagtccttcataccc

SEQ ID NO: 22990 - DNA, 25 bp, Homo sapien
ggtctacgtctactccttcataccc

SEQ ID NO: 22991 - DNA, 25 bp, Homo sapien
gtaattagtgcgtaacgaactctcg

SEQ ID NO: 22992 - DNA, 25 bp, Homo sapien
gtaattagtgcgaaacgaactctcg

SEQ ID NO: 22993 - DNA, 25 bp, Homo sapien
ccttgtgtgcggacgacgtacgtcc

SEQ ID NO: 22994 - DNA, 25 bp, Homo sapien
ccttgtgtgcggtcgacgtacgtcc

SEQ ID NO: 22995 - DNA, 25 bp, Homo sapien
aatgctttgtgtggttaggtactcc

SEQ ID NO: 22996 - DNA, 25 bp, Homo sapien
aatgctttgtgtcgttaggtactcc

SEQ ID NO: 22997 - DNA, 25 bp, Homo sapien
tgtgtgttatattccgtcgggtttc

SEQ ID NO: 22998 - DNA, 25 bp, Homo sapien
tgtgtgttatataccgtcgggtttc

SEQ ID NO: 22999 - DNA, 25 bp, Homo sapien
agtgtaactgtaaccttgttttcgt

SEQ ID NO: 23000 - DNA, 25 bp, Homo sapien
agtgtaactgtatccttgttttcgt

SEQ ID NO: 23001 - DNA, 25 bp, Homo sapien
cctagtggtgtgacctgagtttatg

SEQ ID NO: 23002 - DNA, 25 bp, Homo sapien
cctagtggtgtgtcctgagtttatg

SEQ ID NO: 23003 - DNA, 25 bp, Homo sapien
acattgtcggtgtcaaccggtaaag

SEQ ID NO: 23004 - DNA, 25 bp, Homo sapien
acattgtcggtgacaaccggtaaag

SEQ ID NO: 23005 - DNA, 25 bp, Homo sapien
tagtatgttgtgaaacggaacactc

SEQ ID NO: 23006 - DNA, 25 bp, Homo sapien
tagtatgttgtgtaacggaacactc

SEQ ID NO: 23007 - DNA, 25 bp, Homo sapien
aatattcttgaatgtggactactcc

SEQ ID NO: 23008 - DNA, 25 bp, Homo sapien
aatattcttgaaagtggactactcc

SEQ ID NO: 23009 - DNA, 25 bp, Homo sapien
agttttcgacgaacacagatttttg

SEQ ID NO: 23010 - DNA, 25 bp, Homo sapien
agttttcgacgatcacagatttttg

SEQ ID NO: 23011 - DNA, 25 bp, Homo sapien
gttagtttgtaaaagaccggtcaca

SEQ ID NO: 23012 - DNA, 25 bp, Homo sapien
gttagtttgtaatagaccggtcaca

SEQ ID NO: 23013 - DNA, 25 bp, Homo sapien
gttgtgttcagcacgttacccctac

SEQ ID NO: 23014 - DNA, 25 bp, Homo sapien
gttgtgttcagctcgttacccctac

SEQ ID NO: 23015 - DNA, 25 bp, Homo sapien
gaggtcttcctttcagtcactgttc

SEQ ID NO: 23016 - DNA, 25 bp, Homo sapien
gaggtcttccttacagtcactgttc

SEQ ID NO: 23017 - DNA, 25 bp, Homo sapien
tgtattcatgtcagatatatcgttc

SEQ ID NO: 23018 - DNA, 25 bp, Homo sapien
tgtattcatgtctgatatatcgttc

SEQ ID NO: 23019 - DNA, 25 bp, Homo sapien
aggtacagagtctgtagtcttttct

SEQ ID NO: 23020 - DNA, 25 bp, Homo sapien
aggtacagagtcagtagtcttttct

SEQ ID NO: 23021 - DNA, 25 bp, Homo sapien
cacttctcgcgttagtcttttgtct

SEQ ID NO: 23022 - DNA, 25 bp, Homo sapien
cacttctcgcgtaagtcttttgtct

SEQ ID NO: 23023 - DNA, 25 bp, Homo sapien
agtgatgttacttctactgtgtctt

SEQ ID NO: 23024 - DNA, 25 bp, Homo sapien
agtgatgttactactactgtgtctt

SEQ ID NO: 23025 - DNA, 25 bp, Homo sapien
gaagtgtctccaacactgtagactc

SEQ ID NO: 23026 - DNA, 25 bp, Homo sapien
gaagtgtctccatcactgtagactc

SEQ ID NO: 23027 - DNA, 25 bp, Homo sapien
gtgtgttatccgaaccggatactct

SEQ ID NO: 23028 - DNA, 25 bp, Homo sapien
gtgtgttatccgtaccggatactct

SEQ ID NO: 23029 - DNA, 25 bp, Homo sapien
gtgtagtcacgttttcctaaatact

SEQ ID NO: 23030 - DNA, 25 bp, Homo sapien
gtgtagtcacgtattcctaaatact

SEQ ID NO: 23031 - DNA, 25 bp, Homo sapien
aatcgtctcaagtcccagagagacg

SEQ ID NO: 23032 - DNA, 25 bp, Homo sapien
aatcgtctcaagacccagagagacg

SEQ ID NO: 23033 - DNA, 25 bp, Homo sapien
tgttaaaactcaacacgagacgaat

SEQ ID NO: 23034 - DNA, 25 bp, Homo sapien
tgttaaaactcatcacgagacgaat

SEQ ID NO: 23035 - DNA, 25 bp, Homo sapien
agttaaactgtctttgtagtaacgc

SEQ ID NO: 23036 - DNA, 25 bp, Homo sapien
agttaaactgtcattgtagtaacgc

SEQ ID NO: 23037 - DNA, 25 bp, Homo sapien
agtgttccgtcgtccttttctcgtc

SEQ ID NO: 23038 - DNA, 25 bp, Homo sapien
agtgttccgtcgaccttttctcgtc

SEQ ID NO: 23039 - DNA, 25 bp, Homo sapien
cgtgtgtcagtgtttttccaggtac

SEQ ID NO: 23040 - DNA, 25 bp, Homo sapien
cgtgtgtcagtgattttccaggtac

SEQ ID NO: 23041 - DNA, 25 bp, Homo sapien
gtgacttttctagttacggactcat

SEQ ID NO: 23042 - DNA, 25 bp, Homo sapien
gtgacttttctacttacggactcat

SEQ ID NO: 23043 - DNA, 25 bp, Homo sapien
gtcgttaaattacttagagtctcac

SEQ ID NO: 23044 - DNA, 25 bp, Homo sapien
gtcgttaaattagttagagtctcac

SEQ ID NO: 23045 - DNA, 25 bp, Homo sapien
gtaacttctgtgtagtaactgtctg

SEQ ID NO: 23046 - DNA, 25 bp, Homo sapien
gtaacttctgtgaagtaactgtctg

SEQ ID NO: 23047 - DNA, 25 bp, Homo sapien
ggtgattctcggagtgaagtctcgt

SEQ ID NO: 23048 - DNA, 25 bp, Homo sapien
ggtgattctcggtgtgaagtctcgt

SEQ ID NO: 23049 - DNA, 25 bp, Homo sapien
tacgaatttagtttgatatatctct

SEQ ID NO: 23050 - DNA, 25 bp, Homo sapien
tacgaatttagtatgatatatctct

SEQ ID NO: 23051 - DNA, 25 bp, Homo sapien
tactctttatatgaggtctttacga

SEQ ID NO: 23052 - DNA, 25 bp, Homo sapien
tactctttatatcaggtctttacga

SEQ ID NO: 23053 - DNA, 25 bp, Homo sapien
accgttgtattcatagacgttataa

SEQ ID NO: 23054 - DNA, 25 bp, Homo sapien
accgttgtattcttagacgttataa

SEQ ID NO: 23055 - DNA, 25 bp, Homo sapien
ttgtgtcacgtgttcgcgttgtaat

SEQ ID NO: 23056 - DNA, 25 bp, Homo sapien
ttgtgtcacgtgatcgcgttgtaat

SEQ ID NO: 23057 - DNA, 25 bp, Homo sapien
ctcgacggtcagtgtcactattcta

SEQ ID NO: 23058 - DNA, 25 bp, Homo sapien
ctcgacggtcagagtcactattcta

SEQ ID NO: 23059 - DNA, 25 bp, Homo sapien
acgagtgtcaatacctacgatgtag

SEQ ID NO: 23060 - DNA, 25 bp, Homo sapien
acgagtgtcaattcctacgatgtag

SEQ ID NO: 23061 - DNA, 25 bp, Homo sapien
ccactatcataaggtccgacctgac

SEQ ID NO: 23062 - DNA, 25 bp, Homo sapien
ccactatcataacgtccgacctgac

SEQ ID NO: 23063 - DNA, 25 bp, Homo sapien
aagtattcgatgtcgtctccgcacc

SEQ ID NO: 23064 - DNA, 25 bp, Homo sapien
aagtattcgatgacgtctccgcacc

SEQ ID NO: 23065 - DNA, 25 bp, Homo sapien
ttgtattggttcctctttcgagtcg

SEQ ID NO: 23066 - DNA, 25 bp, Homo sapien
ttgtattggttcgtctttcgagtcg

SEQ ID NO: 23067 - DNA, 25 bp, Homo sapien
gtaaaatgtgtgtctcttcgtcggg

SEQ ID NO: 23068 - DNA, 25 bp, Homo sapien
gtaaaatgtgtgactcttcgtcggg

SEQ ID NO: 23069 - DNA, 25 bp, Homo sapien
taacatcttccaccagtcccggtgt

SEQ ID NO: 23070 - DNA, 25 bp, Homo sapien
taacatcttccagcagtcccggtgt

SEQ ID NO: 23071 - DNA, 25 bp, Homo sapien
cagtcgtcatctatcattctcgttg

SEQ ID NO: 23072 - DNA, 25 bp, Homo sapien
cagtcgtcatctttcattctcgttg

SEQ ID NO: 23073 - DNA, 25 bp, Homo sapien
caaagtaattccttccattcgtagg

SEQ ID NO: 23074 - DNA, 25 bp, Homo sapien
caaagtaattccatccattcgtagg

SEQ ID NO: 23075 - DNA, 25 bp, Homo sapien
gatttacgtcggatccatagtgatg

SEQ ID NO: 23076 - DNA, 25 bp, Homo sapien
gatttacgtcggttccatagtgatg

SEQ ID NO: 23077 - DNA, 25 bp, Homo sapien
tttactacgacgttcttttcgtctg

SEQ ID NO: 23078 - DNA, 25 bp, Homo sapien
tttactacgacgatcttttcgtctg

SEQ ID NO: 23079 - DNA, 25 bp, Homo sapien
agaggtcaccggtttctaagagtaa

SEQ ID NO: 23080 - DNA, 25 bp, Homo sapien
agaggtcaccggattctaagagtaa

SEQ ID NO: 23081 - DNA, 25 bp, Homo sapien
gagtcctggcgagctacagaagact

SEQ ID NO: 23082 - DNA, 25 bp, Homo sapien
gagtcctggcgacctacagaagact

SEQ ID NO: 23083 - DNA, 25 bp, Homo sapien
ttaccgccggagacaaacacgtaag

SEQ ID NO: 23084 - DNA, 25 bp, Homo sapien
ttaccgccggagtcaaacacgtaag

SEQ ID NO: 23085 - DNA, 25 bp, Homo sapien
ttcacggtcgtagagtcaaaggtaa

SEQ ID NO: 23086 - DNA, 25 bp, Homo sapien
ttcacggtcgtacagtcaaaggtaa

SEQ ID NO: 23087 - DNA, 25 bp, Homo sapien
gattttaggacaccaagaaattaac

SEQ ID NO: 23088 - DNA, 25 bp, Homo sapien
gattttaggacagcaagaaattaac

SEQ ID NO: 23089 - DNA, 25 bp, Homo sapien
taagtgttgatcacgagaaatcatc

SEQ ID NO: 23090 - DNA, 25 bp, Homo sapien
taagtgttgatctcgagaaatcatc

SEQ ID NO: 23091 - DNA, 25 bp, Homo sapien
tcatgtgtaaacaaccaaaagaagt

SEQ ID NO: 23092 - DNA, 25 bp, Homo sapien
tcatgtgtaaactaccaaaagaagt

SEQ ID NO: 23093 - DNA, 25 bp, Homo sapien
tataaaacagtacgtcgaatgactt

SEQ ID NO: 23094 - DNA, 25 bp, Homo sapien
tataaaacagtaggtcgaatgactt

SEQ ID NO: 23095 - DNA, 25 bp, Homo sapien
aaataaatggtatctgacgaggtcc

SEQ ID NO: 23096 - DNA, 25 bp, Homo sapien
aaataaatggtaactgacgaggtcc

SEQ ID NO: 23097 - DNA, 25 bp, Homo sapien
agtaacaatgtgatccgtcaaggga

SEQ ID NO: 23098 - DNA, 25 bp, Homo sapien
agtaacaatgtgttccgtcaaggga

SEQ ID NO: 23099 - DNA, 25 bp, Homo sapien
gaaaccaccttgtccactgacagta

SEQ ID NO: 23100 - DNA, 25 bp, Homo sapien
gaaaccaccttgaccactgacagta

SEQ ID NO: 23101 - DNA, 25 bp, Homo sapien
gttccaccgcggacggaggaccgtc

SEQ ID NO: 23102 - DNA, 25 bp, Homo sapien
gttccaccgcggtcggaggaccgtc

SEQ ID NO: 23103 - DNA, 25 bp, Homo sapien
ctgatcctctccttctgagtgggtt

SEQ ID NO: 23104 - DNA, 25 bp, Homo sapien
ctgatcctctccatctgagtgggtt

SEQ ID NO: 23105 - DNA, 25 bp, Homo sapien
ccggcactcgacgtgcgtccttgta

SEQ ID NO: 23106 - DNA, 25 bp, Homo sapien
ccggcactcgacctgcgtccttgta

SEQ ID NO: 23107 - DNA, 25 bp, Homo sapien
ctgtgtcacccgaaggctcttcgac

SEQ ID NO: 23108 - DNA, 25 bp, Homo sapien
ctgtgtcacccgtaggctcttcgac

SEQ ID NO: 23109 - DNA, 25 bp, Homo sapien
tagacagctcgttacaactgttaga

SEQ ID NO: 23110 - DNA, 25 bp, Homo sapien
tagacagctcgtaacaactgttaga

SEQ ID NO: 23111 - DNA, 25 bp, Homo sapien
tacctgagactacagttacttacga

SEQ ID NO: 23112 - DNA, 25 bp, Homo sapien
tacctgagactagagttacttacga

SEQ ID NO: 23113 - DNA, 25 bp, Homo sapien
agtacctgtcgcttgtatttcgaga

SEQ ID NO: 23114 - DNA, 25 bp, Homo sapien
agtacctgtcgcatgtatttcgaga

SEQ ID NO: 23115 - DNA, 25 bp, Homo sapien
tagacgagtagttatttgagcacca

SEQ ID NO: 23116 - DNA, 25 bp, Homo sapien
tagacgagtagtaatttgagcacca

SEQ ID NO: 23117 - DNA, 25 bp, Homo sapien
aatgggtagttctttcagttagcac

SEQ ID NO: 23118 - DNA, 25 bp, Homo sapien
aatgggtagttcattcagttagcac

SEQ ID NO: 23119 - DNA, 25 bp, Homo sapien
aagtgtcaatctacgtgaattaaca

SEQ ID NO: 23120 - DNA, 25 bp, Homo sapien
aagtgtcaatcttcgtgaattaaca

SEQ ID NO: 23121 - DNA, 25 bp, Homo sapien
aagttacgatatttctttcaactaa

SEQ ID NO: 23122 - DNA, 25 bp, Homo sapien
aagttacgatatatctttcaactaa

SEQ ID NO: 23123 - DNA, 25 bp, Homo sapien
ttaggaagatcaacgaatccgaaga

SEQ ID NO: 23124 - DNA, 25 bp, Homo sapien
ttaggaagatcatcgaatccgaaga

SEQ ID NO: 23125 - DNA, 25 bp, Homo sapien
cacgaaggttcaagtgcatcggact

SEQ ID NO: 23126 - DNA, 25 bp, Homo sapien
cacgaaggttcatgtgcatcggact

SEQ ID NO: 23127 - DNA, 25 bp, Homo sapien
ccccgaaggtccaattatggtctcg

SEQ ID NO: 23128 - DNA, 25 bp, Homo sapien
ccccgaaggtcctattatggtctcg

SEQ ID NO: 23129 - DNA, 25 bp, Homo sapien
tgaaggttcatatcggtaccggtat

SEQ ID NO: 23130 - DNA, 25 bp, Homo sapien
tgaaggttcataacggtaccggtat

SEQ ID NO: 23131 - DNA, 25 bp, Homo sapien
tgactcgtccagagggtacgggtac

SEQ ID NO: 23132 - DNA, 25 bp, Homo sapien
tgactcgtccagtgggtacgggtac

SEQ ID NO: 23133 - DNA, 25 bp, Homo sapien
aaacaccagaacgaccgagtcctca

SEQ ID NO: 23134 - DNA, 25 bp, Homo sapien
aaacaccagaaccaccgagtcctca

SEQ ID NO: 23135 - DNA, 25 bp, Homo sapien
tatctggacgtttccagtctctgtc

SEQ ID NO: 23136 - DNA, 25 bp, Homo sapien
tatctggacgttaccagtctctgtc

SEQ ID NO: 23137 - DNA, 25 bp, Homo sapien
tcccgacgattaagatgaccttagt

SEQ ID NO: 23138 - DNA, 25 bp, Homo sapien
tcccgacgattatgatgaccttagt

SEQ ID NO: 23139 - DNA, 25 bp, Homo sapien
atccgagatctacagggtcacgtat

SEQ ID NO: 23140 - DNA, 25 bp, Homo sapien
atccgagatctagagggtcacgtat

SEQ ID NO: 23141 - DNA, 25 bp, Homo sapien
tgctgaaccgaaacttaaccgggaa

SEQ ID NO: 23142 - DNA, 25 bp, Homo sapien
tgctgaaccgaatcttaaccgggaa

SEQ ID NO: 23143 - DNA, 25 bp, Homo sapien
ctctcgaaagaaagggggtccggta

SEQ ID NO: 23144 - DNA, 25 bp, Homo sapien
ctctcgaaagaatgggggtccggta

SEQ ID NO: 23145 - DNA, 25 bp, Homo sapien
tcttcccagaaacgagggtctaccc

SEQ ID NO: 23146 - DNA, 25 bp, Homo sapien
tcttcccagaaaggagggtctaccc

SEQ ID NO: 23147 - DNA, 25 bp, Homo sapien
ggtctacaggggagtcgagcttccc

SEQ ID NO: 23148 - DNA, 25 bp, Homo sapien
ggtctacaggggtgtcgagcttccc

SEQ ID NO: 23149 - DNA, 25 bp, Homo sapien
taccatgaggagtcggacttccgag

SEQ ID NO: 23150 - DNA, 25 bp, Homo sapien
taccatgaggagacggacttccgag

SEQ ID NO: 23151 - DNA, 25 bp, Homo sapien
tcgtggaaggtgctggtcctctccg

SEQ ID NO: 23152 - DNA, 25 bp, Homo sapien
tcgtggaaggtggtggtcctctccg

SEQ ID NO: 23153 - DNA, 25 bp, Homo sapien
cagggatgagtgtagtatctcccct

SEQ ID NO: 23154 - DNA, 25 bp, Homo sapien
cagggatgagtgaagtatctcccct

SEQ ID NO: 23155 - DNA, 25 bp, Homo sapien
gaagagtgacctaccgtacactccc

SEQ ID NO: 23156 - DNA, 25 bp, Homo sapien
gaagagtgaccttccgtacactccc

SEQ ID NO: 23157 - DNA, 25 bp, Homo sapien
cgtcgagtaaaccttccgtgaccca

SEQ ID NO: 23158 - DNA, 25 bp, Homo sapien
cgtcgagtaaacgttccgtgaccca

SEQ ID NO: 23159 - DNA, 25 bp, Homo sapien
gtctttgacagacacactaagcccc

SEQ ID NO: 23160 - DNA, 25 bp, Homo sapien
gtctttgacagagacactaagcccc

SEQ ID NO: 23161 - DNA, 25 bp, Homo sapien
cgtttgtaactgtgaaaacccacac

SEQ ID NO: 23162 - DNA, 25 bp, Homo sapien
cgtttgtaactgagaaaacccacac

SEQ ID NO: 23163 - DNA, 25 bp, Homo sapien
ctaagaaactgtcgacattgtgaaa

SEQ ID NO: 23164 - DNA, 25 bp, Homo sapien
ctaagaaactgtggacattgtgaaa

SEQ ID NO: 23165 - DNA, 25 bp, Homo sapien
tacaactctggaccttatcgaagag

SEQ ID NO: 23166 - DNA, 25 bp, Homo sapien
tacaactctggagcttatcgaagag

SEQ ID NO: 23167 - DNA, 25 bp, Homo sapien
gtaggtcgcgcgaccatcgaagtag

SEQ ID NO: 23168 - DNA, 25 bp, Homo sapien
gtaggtcgcgcgtccatcgaagtag

SEQ ID NO: 23169 - DNA, 25 bp, Homo sapien
ctcacgaggaggagtacggattgaa

SEQ ID NO: 23170 - DNA, 25 bp, Homo sapien
ctcacgaggaggtgtacggattgaa

SEQ ID NO: 23171 - DNA, 25 bp, Homo sapien
acacagtgaaatcatacacatggag

SEQ ID NO: 23172 - DNA, 25 bp, Homo sapien
acacagtgaaatgatacacatggag

SEQ ID NO: 23173 - DNA, 25 bp, Homo sapien
taatcattagcctcgaaacatagga

SEQ ID NO: 23174 - DNA, 25 bp, Homo sapien
taatcattagccacgaaacatagga

SEQ ID NO: 23175 - DNA, 25 bp, Homo sapien
ccaatgacgtcaagaactcaaggac

SEQ ID NO: 23176 - DNA, 25 bp, Homo sapien
ccaatgacgtcatgaactcaaggac

SEQ ID NO: 23177 - DNA, 25 bp, Homo sapien
tcatcagacgactcatctacaagga

SEQ ID NO: 23178 - DNA, 25 bp, Homo sapien
tcatcagacgacacatctacaagga

SEQ ID NO: 23179 - DNA, 25 bp, Homo sapien
aacatgggacagaactaaaatcgta

SEQ ID NO: 23180 - DNA, 25 bp, Homo sapien
aacatgggacagtactaaaatcgta

SEQ ID NO: 23181 - DNA, 25 bp, Homo sapien
aataacgtactgattagcaactgta

SEQ ID NO: 23182 - DNA, 25 bp, Homo sapien
aataacgtactgtttagcaactgta

SEQ ID NO: 23183 - DNA, 25 bp, Homo sapien
aagaggtacgtttgtccactctgag

SEQ ID NO: 23184 - DNA, 25 bp, Homo sapien
aagaggtacgttagtccactctgag

SEQ ID NO: 23185 - DNA, 25 bp, Homo sapien
cccagggtcgaggtttggccacgag

SEQ ID NO: 23186 - DNA, 25 bp, Homo sapien
cccagggtcgagctttggccacgag

SEQ ID NO: 23187 - DNA, 25 bp, Homo sapien
ctaaaggtaaggtagtgctcacagg

SEQ ID NO: 23188 - DNA, 25 bp, Homo sapien
ctaaaggtaaggaagtgctcacagg

SEQ ID NO: 23189 - DNA, 25 bp, Homo sapien
gagacggagaccaaggggaccgact

SEQ ID NO: 23190 - DNA, 25 bp, Homo sapien
gagacggagacctaggggaccgact

SEQ ID NO: 23191 - DNA, 25 bp, Homo sapien
gggtcggtctgcacaccaagtccgg

SEQ ID NO: 23192 - DNA, 25 bp, Homo sapien
gggtcggtctgctcaccaagtccgg

SEQ ID NO: 23193 - DNA, 25 bp, Homo sapien
ctcgaccgacgtcaagagcacgtct

SEQ ID NO: 23194 - DNA, 25 bp, Homo sapien
ctcgaccgacgtgaagagcacgtct

SEQ ID NO: 23195 - DNA, 25 bp, Homo sapien
tactggactcactgaaccgtctctc

SEQ ID NO: 23196 - DNA, 25 bp, Homo sapien
tactggactcacagaaccgtctctc

SEQ ID NO: 23197 - DNA, 25 bp, Homo sapien
agtctcgtggtctaagaccctcgtc

SEQ ID NO: 23198 - DNA, 25 bp, Homo sapien
agtctcgtggtcaaagaccctcgtc

SEQ ID NO: 23199 - DNA, 25 bp, Homo sapien
taagctggaggagagtccccgacgt

SEQ ID NO: 23200 - DNA, 25 bp, Homo sapien
taagctggaggacagtccccgacgt

SEQ ID NO: 23201 - DNA, 25 bp, Homo sapien
aacacttaggagatcttcgccggcg

SEQ ID NO: 23202 - DNA, 25 bp, Homo sapien
aacacttaggagttcttcgccggcg

SEQ ID NO: 23203 - DNA, 25 bp, Homo sapien
agaggtacgaaacgtctactcctgg

SEQ ID NO: 23204 - DNA, 25 bp, Homo sapien
agaggtacgaaaggtctactcctgg

SEQ ID NO: 23205 - DNA, 25 bp, Homo sapien
gtaaggacagggattacgacacttc

SEQ ID NO: 23206 - DNA, 25 bp, Homo sapien
gtaaggacagggtttacgacacttc

SEQ ID NO: 23207 - DNA, 25 bp, Homo sapien
aggtctgagtcaagggtgacaacca

SEQ ID NO: 23208 - DNA, 25 bp, Homo sapien
aggtctgagtcatgggtgacaacca

SEQ ID NO: 23209 - DNA, 25 bp, Homo sapien
cggactaagaaagactgggactcta

SEQ ID NO: 23210 - DNA, 25 bp, Homo sapien
cggactaagaaacactgggactcta

SEQ ID NO: 23211 - DNA, 25 bp, Homo sapien
gggaaaagaggtctctgtcccgtcc

SEQ ID NO: 23212 - DNA, 25 bp, Homo sapien
gggaaaagaggtgtctgtcccgtcc

SEQ ID NO: 23213 - DNA, 25 bp, Homo sapien
gaagaaatcgaagagtaaggccttc

SEQ ID NO: 23214 - DNA, 25 bp, Homo sapien
gaagaaatcgaacagtaaggccttc

SEQ ID NO: 23215 - DNA, 25 bp, Homo sapien
agaattctaaaaagagtcccttacg

SEQ ID NO: 23216 - DNA, 25 bp, Homo sapien
agaattctaaaatgagtcccttacg

SEQ ID NO: 23217 - DNA, 25 bp, Homo sapien
atacaaagtacagagggttatcctc

SEQ ID NO: 23218 - DNA, 25 bp, Homo sapien
atacaaagtacacagggttatcctc

SEQ ID NO: 23219 - DNA, 25 bp, Homo sapien
atatgaagtaacgtggtttatccct

SEQ ID NO: 23220 - DNA, 25 bp, Homo sapien
atatgaagtaacctggtttatccct

SEQ ID NO: 23221 - DNA, 25 bp, Homo sapien
tctgggaaccggttccgacctcgac

SEQ ID NO: 23222 - DNA, 25 bp, Homo sapien
tctgggaaccggatccgacctcgac

SEQ ID NO: 23223 - DNA, 25 bp, Homo sapien
gacttgtcaatggacaaccctctgt

SEQ ID NO: 23224 - DNA, 25 bp, Homo sapien
gacttgtcaatgcacaaccctctgt

SEQ ID NO: 23225 - DNA, 25 bp, Homo sapien
agtcggagaccgagacgtccgtctt

SEQ ID NO: 23226 - DNA, 25 bp, Homo sapien
agtcggagaccgtgacgtccgtctt

SEQ ID NO: 23227 - DNA, 25 bp, Homo sapien
tgtttgactagtcctagacatatcc

SEQ ID NO: 23228 - DNA, 25 bp, Homo sapien
tgtttgactagtgctagacatatcc

SEQ ID NO: 23229 - DNA, 25 bp, Homo sapien
aagtctacgacgttcagctaacacc

SEQ ID NO: 23230 - DNA, 25 bp, Homo sapien
aagtctacgacgatcagctaacacc

SEQ ID NO: 23231 - DNA, 25 bp, Homo sapien
gaagacctaacgactacacaagacc

SEQ ID NO: 23232 - DNA, 25 bp, Homo sapien
gaagacctaacgtctacacaagacc

SEQ ID NO: 23233 - DNA, 25 bp, Homo sapien
aaaacccactatgaccagtagaccg

SEQ ID NO: 23234 - DNA, 25 bp, Homo sapien
aaaacccactatcaccagtagaccg

SEQ ID NO: 23235 - DNA, 25 bp, Homo sapien
tgtaaacgaccttacacatgtagat

SEQ ID NO: 23236 - DNA, 25 bp, Homo sapien
tgtaaacgacctaacacatgtagat

SEQ ID NO: 23237 - DNA, 25 bp, Homo sapien
tgacaaccgacgagacatgtgtagt

SEQ ID NO: 23238 - DNA, 25 bp, Homo sapien
tgacaaccgacgtgacatgtgtagt

SEQ ID NO: 23239 - DNA, 25 bp, Homo sapien
ggtaggatggacacatagtcgtctt

SEQ ID NO: 23240 - DNA, 25 bp, Homo sapien
ggtaggatggactcatagtcgtctt

SEQ ID NO: 23241 - DNA, 25 bp, Homo sapien
tcgttgtccggtgtcagtacgtttt

SEQ ID NO: 23242 - DNA, 25 bp, Homo sapien
tcgttgtccggtctcagtacgtttt

SEQ ID NO: 23243 - DNA, 25 bp, Homo sapien
aggattactaccacttcgtctttcg

SEQ ID NO: 23244 - DNA, 25 bp, Homo sapien
aggattactacctcttcgtctttcg

SEQ ID NO: 23245 - DNA, 25 bp, Homo sapien
cttacctgttcttctacgtatctat

SEQ ID NO: 23246 - DNA, 25 bp, Homo sapien
cttacctgttctactacgtatctat

SEQ ID NO: 23247 - DNA, 25 bp, Homo sapien
ctgacaagtcgatatcgtcgtctta

SEQ ID NO: 23248 - DNA, 25 bp, Homo sapien
ctgacaagtcgaaatcgtcgtctta

SEQ ID NO: 23249 - DNA, 25 bp, Homo sapien
gacaatcgtctaagactgtctacac

SEQ ID NO: 23250 - DNA, 25 bp, Homo sapien
gacaatcgtctatgactgtctacac

SEQ ID NO: 23251 - DNA, 25 bp, Homo sapien
gtcgagagagcgttatccgacgtgc

SEQ ID NO: 23252 - DNA, 25 bp, Homo sapien
gtcgagagagcgatatccgacgtgc

SEQ ID NO: 23253 - DNA, 25 bp, Homo sapien
agtaggtggtgtgtcgacgagtcac

SEQ ID NO: 23254 - DNA, 25 bp, Homo sapien
agtaggtggtgtctcgacgagtcac

SEQ ID NO: 23255 - DNA, 25 bp, Homo sapien
atatgtagacggagtgacgagtcct

SEQ ID NO: 23256 - DNA, 25 bp, Homo sapien
atatgtagacggtgtgacgagtcct

SEQ ID NO: 23257 - DNA, 25 bp, Homo sapien
taacaagagtagtttttctgccttt

SEQ ID NO: 23258 - DNA, 25 bp, Homo sapien
taacaagagtagattttctgccttt

SEQ ID NO: 23259 - DNA, 25 bp, Homo sapien
ataaagaggtaacgtttatccccat

SEQ ID NO: 23260 - DNA, 25 bp, Homo sapien
ataaagaggtaaggtttatccccat

SEQ ID NO: 23261 - DNA, 25 bp, Homo sapien
ttcgagacccgttgggccccgtaca

SEQ ID NO: 23262 - DNA, 25 bp, Homo sapien
ttcgagacccgtagggccccgtaca

SEQ ID NO: 23263 - DNA, 25 bp, Homo sapien
tctggggtacgagactcccacgcag

SEQ ID NO: 23264 - DNA, 25 bp, Homo sapien
tctggggtacgacactcccacgcag

SEQ ID NO: 23265 - DNA, 25 bp, Homo sapien
gtccttgtctactccgtcccaaggt

SEQ ID NO: 23266 - DNA, 25 bp, Homo sapien
gtccttgtctacaccgtcccaaggt

SEQ ID NO: 23267 - DNA, 25 bp, Homo sapien
cgcccggtcgagtccgtcggcaaga

SEQ ID NO: 23268 - DNA, 25 bp, Homo sapien
cgcccggtcgagaccgtcggcaaga

SEQ ID NO: 23269 - DNA, 25 bp, Homo sapien
acgtccgagcacctccgtacggtaa

SEQ ID NO: 23270 - DNA, 25 bp, Homo sapien
acgtccgagcacgtccgtacggtaa

SEQ ID NO: 23271 - DNA, 25 bp, Homo sapien
tattcagtggaggacccggtcgacg

SEQ ID NO: 23272 - DNA, 25 bp, Homo sapien
tattcagtggagcacccggtcgacg

SEQ ID NO: 23273 - DNA, 25 bp, Homo sapien
ttgtccctgaagacctcgtctgtct

SEQ ID NO: 23274 - DNA, 25 bp, Homo sapien
ttgtccctgaagtcctcgtctgtct

SEQ ID NO: 23275 - DNA, 25 bp, Homo sapien
ttatgacttagacgtatgcgtcaaa

SEQ ID NO: 23276 - DNA, 25 bp, Homo sapien
ttatgacttagaggtatgcgtcaaa

SEQ ID NO: 23277 - DNA, 25 bp, Homo sapien
cagtaaagtctaaaggtgatccatt

SEQ ID NO: 23278 - DNA, 25 bp, Homo sapien
cagtaaagtctataggtgatccatt

SEQ ID NO: 23279 - DNA, 25 bp, Homo sapien
gactctcaattatggttttctagtt

SEQ ID NO: 23280 - DNA, 25 bp, Homo sapien
gactctcaattaaggttttctagtt

SEQ ID NO: 23281 - DNA, 25 bp, Homo sapien
taaccgactctgcaactgggggaac

SEQ ID NO: 23282 - DNA, 25 bp, Homo sapien
taaccgactctggaactgggggaac

SEQ ID NO: 23283 - DNA, 25 bp, Homo sapien
tctagtctccggtgtggtaggatcg

SEQ ID NO: 23284 - DNA, 25 bp, Homo sapien
tctagtctccggagtggtaggatcg

SEQ ID NO: 23285 - DNA, 25 bp, Homo sapien
tatcttcctagtggtggaagtcctc

SEQ ID NO: 23286 - DNA, 25 bp, Homo sapien
tatcttcctagtcgtggaagtcctc

SEQ ID NO: 23287 - DNA, 25 bp, Homo sapien
aatgtttattctggtcgatacttac

SEQ ID NO: 23288 - DNA, 25 bp, Homo sapien
aatgtttattctcgtcgatacttac

SEQ ID NO: 23289 - DNA, 25 bp, Homo sapien
ataccattcgtgatcagtgtgcatc

SEQ ID NO: 23290 - DNA, 25 bp, Homo sapien
ataccattcgtgttcagtgtgcatc

SEQ ID NO: 23291 - DNA, 25 bp, Homo sapien
agagcatgtcggaattgaacacgct

SEQ ID NO: 23292 - DNA, 25 bp, Homo sapien
agagcatgtcggtattgaacacgct

SEQ ID NO: 23293 - DNA, 25 bp, Homo sapien
tgtgaccttgtgcaatctagattgt

SEQ ID NO: 23294 - DNA, 25 bp, Homo sapien
tgtgaccttgtggaatctagattgt

SEQ ID NO: 23295 - DNA, 25 bp, Homo sapien
gaccgtatgttacactttactgtat

SEQ ID NO: 23296 - DNA, 25 bp, Homo sapien
gaccgtatgttagactttactgtat

SEQ ID NO: 23297 - DNA, 25 bp, Homo sapien
cattctgtggtgagtctgactgtaa

SEQ ID NO: 23298 - DNA, 25 bp, Homo sapien
cattctgtggtgtgtctgactgtaa

SEQ ID NO: 23299 - DNA, 25 bp, Homo sapien
cgaaacgtccctcttttaccgtatg

SEQ ID NO: 23300 - DNA, 25 bp, Homo sapien
cgaaacgtccctgttttaccgtatg

SEQ ID NO: 23301 - DNA, 25 bp, Homo sapien
cttaagtcaccagtgttatggtggt

SEQ ID NO: 23302 - DNA, 25 bp, Homo sapien
cttaagtcaccactgttatggtggt

SEQ ID NO: 23303 - DNA, 25 bp, Homo sapien
aattagtcaccactgaagagtgatt

SEQ ID NO: 23304 - DNA, 25 bp, Homo sapien
aattagtcaccagtgaagagtgatt

SEQ ID NO: 23305 - DNA, 25 bp, Homo sapien
acatttgtaacagtggcaggcgtgt

SEQ ID NO: 23306 - DNA, 25 bp, Homo sapien
acatttgtaacactggcaggcgtgt

SEQ ID NO: 23307 - DNA, 25 bp, Homo sapien
atattttataaatgtgccatatgtt

SEQ ID NO: 23308 - DNA, 25 bp, Homo sapien
atattttataaaagtgccatatgtt

SEQ ID NO: 23309 - DNA, 25 bp, Homo sapien
cttttgtcaatagagtctcccagtt

SEQ ID NO: 23310 - DNA, 25 bp, Homo sapien
cttttgtcaatacagtctcccagtt

SEQ ID NO: 23311 - DNA, 25 bp, Homo sapien
tacgttggaaaattcgtatcggtat

SEQ ID NO: 23312 - DNA, 25 bp, Homo sapien
tacgttggaaaaatcgtatcggtat

SEQ ID NO: 23313 - DNA, 25 bp, Homo sapien
ctttaggacgaaaccgaacttgtga

SEQ ID NO: 23314 - DNA, 25 bp, Homo sapien
ctttaggacgaatccgaacttgtga

SEQ ID NO: 23315 - DNA, 25 bp, Homo sapien
ctttgtattctggtcacaaatgtta

SEQ ID NO: 23316 - DNA, 25 bp, Homo sapien
ctttgtattctgctcacaaatgtta

SEQ ID NO: 23317 - DNA, 25 bp, Homo sapien
ctgggtaccctactcacaaaataag

SEQ ID NO: 23318 - DNA, 25 bp, Homo sapien
ctgggtaccctagtcacaaaataag

SEQ ID NO: 23319 - DNA, 25 bp, Homo sapien
agacgactcgcagacaaacacagaa

SEQ ID NO: 23320 - DNA, 25 bp, Homo sapien
agacgactcgcacacaaacacagaa

SEQ ID NO: 23321 - DNA, 25 bp, Homo sapien
agacccccattcaggacgacagatc

SEQ ID NO: 23322 - DNA, 25 bp, Homo sapien
agacccccattctggacgacagatc

SEQ ID NO: 23323 - DNA, 25 bp, Homo sapien
tcttacctaacttgtgacgcaacag

SEQ ID NO: 23324 - DNA, 25 bp, Homo sapien
tcttacctaactagtgacgcaacag

SEQ ID NO: 23325 - DNA, 25 bp, Homo sapien
atctcggtgtcaaaattcgtcgaaa

SEQ ID NO: 23326 - DNA, 25 bp, Homo sapien
atctcggtgtcataattcgtcgaaa

SEQ ID NO: 23327 - DNA, 25 bp, Homo sapien
tagacacaccttaaacttgagacaa

SEQ ID NO: 23328 - DNA, 25 bp, Homo sapien
tagacacacctttaacttgagacaa

SEQ ID NO: 23329 - DNA, 25 bp, Homo sapien
tttacactcctatggctccggtcca

SEQ ID NO: 23330 - DNA, 25 bp, Homo sapien
tttacactcctaaggctccggtcca

SEQ ID NO: 23331 - DNA, 25 bp, Homo sapien
cagacgaccaaacgaccagacgaag

SEQ ID NO: 23332 - DNA, 25 bp, Homo sapien
cagacgaccaaaggaccagacgaag

SEQ ID NO: 23333 - DNA, 25 bp, Homo sapien
gtccgagagcccagaaccccgagaa

SEQ ID NO: 23334 - DNA, 25 bp, Homo sapien
gtccgagagccctgaaccccgagaa

SEQ ID NO: 23335 - DNA, 25 bp, Homo sapien
tacgtctcgcttgatccccagaagt

SEQ ID NO: 23336 - DNA, 25 bp, Homo sapien
tacgtctcgcttcatccccagaagt

SEQ ID NO: 23337 - DNA, 25 bp, Homo sapien
tcgtcgtccgcgtgccggcagacct

SEQ ID NO: 23338 - DNA, 25 bp, Homo sapien
tcgtcgtccgcgagccggcagacct

SEQ ID NO: 23339 - DNA, 25 bp, Homo sapien
gttggggtcccgtcgtcttcctact

SEQ ID NO: 23340 - DNA, 25 bp, Homo sapien
gttggggtcccgacgtcttcctact

SEQ ID NO: 23341 - DNA, 25 bp, Homo sapien
ctgttcagggttgtgtgtttcctgt

SEQ ID NO: 23342 - DNA, 25 bp, Homo sapien
ctgttcagggttctgtgtttcctgt

SEQ ID NO: 23343 - DNA, 25 bp, Homo sapien
tgagaagtgtcgtaggtctccgtgg

SEQ ID NO: 23344 - DNA, 25 bp, Homo sapien
tgagaagtgtcgaaggtctccgtgg

SEQ ID NO: 23345 - DNA, 25 bp, Homo sapien
ggcacagggcgatggactcgctcac

SEQ ID NO: 23346 - DNA, 25 bp, Homo sapien
ggcacagggcgaaggactcgctcac

SEQ ID NO: 23347 - DNA, 25 bp, Homo sapien
aactactgaccgacgggtctccagt

SEQ ID NO: 23348 - DNA, 25 bp, Homo sapien
aactactgaccgtcgggtctccagt

SEQ ID NO: 23349 - DNA, 25 bp, Homo sapien
gtacgcgaaccaacggaccgcttgt

SEQ ID NO: 23350 - DNA, 25 bp, Homo sapien
gtacgcgaaccatcggaccgcttgt

SEQ ID NO: 23351 - DNA, 25 bp, Homo sapien
tccagtctaaggtctgggacagcgt

SEQ ID NO: 23352 - DNA, 25 bp, Homo sapien
tccagtctaaggactgggacagcgt

SEQ ID NO: 23353 - DNA, 25 bp, Homo sapien
cttctgctcgagaggaggtccaggt

SEQ ID NO: 23354 - DNA, 25 bp, Homo sapien
cttctgctcgagtggaggtccaggt

SEQ ID NO: 23355 - DNA, 25 bp, Homo sapien
tgcgtagtaagtaaggttcctgcgt

SEQ ID NO: 23356 - DNA, 25 bp, Homo sapien
tgcgtagtaagttaggttcctgcgt

SEQ ID NO: 23357 - DNA, 25 bp, Homo sapien
ttgtagtaggtcaccgtctgtgact

SEQ ID NO: 23358 - DNA, 25 bp, Homo sapien
ttgtagtaggtctccgtctgtgact

SEQ ID NO: 23359 - DNA, 25 bp, Homo sapien
ttgtattgagttcagaccgtctgaa

SEQ ID NO: 23360 - DNA, 25 bp, Homo sapien
ttgtattgagttgagaccgtctgaa

SEQ ID NO: 23361 - DNA, 25 bp, Homo sapien
cttgtcctggttgagtcaggtcgaa

SEQ ID NO: 23362 - DNA, 25 bp, Homo sapien
cttgtcctggttcagtcaggtcgaa

SEQ ID NO: 23363 - DNA, 25 bp, Homo sapien
tttacattcactcaggtgaacgaag

SEQ ID NO: 23364 - DNA, 25 bp, Homo sapien
tttacattcactgaggtgaacgaag

SEQ ID NO: 23365 - DNA, 25 bp, Homo sapien
aagtatatagacgtcgagggtgacc

SEQ ID NO: 23366 - DNA, 25 bp, Homo sapien
aagtatatagacctcgagggtgacc

SEQ ID NO: 23367 - DNA, 25 bp, Homo sapien
acgagtagtaatcataccgtgtaaa

SEQ ID NO: 23368 - DNA, 25 bp, Homo sapien
acgagtagtaatgataccgtgtaaa

SEQ ID NO: 23369 - DNA, 25 bp, Homo sapien
aggagagatttcataatcgatacgc

SEQ ID NO: 23370 - DNA, 25 bp, Homo sapien
aggagagatttcttaatcgatacgc

SEQ ID NO: 23371 - DNA, 25 bp, Homo sapien
aggtgtcgtgttctgttgtcgattc

SEQ ID NO: 23372 - DNA, 25 bp, Homo sapien
aggtgtcgtgttgtgttgtcgattc

SEQ ID NO: 23373 - DNA, 25 bp, Homo sapien
aacgggggtcctttccgtcccgtcg

SEQ ID NO: 23374 - DNA, 25 bp, Homo sapien
aacgggggtcctatccgtcccgtcg

SEQ ID NO: 23375 - DNA, 25 bp, Homo sapien
gacggggttaccgactctacctccc

SEQ ID NO: 23376 - DNA, 25 bp, Homo sapien
gacggggttacccactctacctccc

SEQ ID NO: 23377 - DNA, 25 bp, Homo sapien
gaactggtataactccctaacgtcc

SEQ ID NO: 23378 - DNA, 25 bp, Homo sapien
gaactggtataagtccctaacgtcc

SEQ ID NO: 23379 - DNA, 25 bp, Homo sapien
tgggaggtttcctctactgtttccg

SEQ ID NO: 23380 - DNA, 25 bp, Homo sapien
tgggaggtttccactactgtttccg

SEQ ID NO: 23381 - DNA, 25 bp, Homo sapien
ctacagagctttacccttttgaacg

SEQ ID NO: 23382 - DNA, 25 bp, Homo sapien
ctacagagcttttcccttttgaacg

SEQ ID NO: 23383 - DNA, 25 bp, Homo sapien
taggatttcactgacgagtttggac

SEQ ID NO: 23384 - DNA, 25 bp, Homo sapien
taggatttcactcacgagtttggac

SEQ ID NO: 23385 - DNA, 25 bp, Homo sapien
tgttacatttacgtaatctggtcct

SEQ ID NO: 23386 - DNA, 25 bp, Homo sapien
tgttacatttacctaatctggtcct

SEQ ID NO: 23387 - DNA, 25 bp, Homo sapien
atttgtttaccgtattctcgtcgcg

SEQ ID NO: 23388 - DNA, 25 bp, Homo sapien
atttgtttaccgaattctcgtcgcg

SEQ ID NO: 23389 - DNA, 25 bp, Homo sapien
tttccgtagtacaattgtccgtcgt

SEQ ID NO: 23390 - DNA, 25 bp, Homo sapien
tttccgtagtactattgtccgtcgt

SEQ ID NO: 23391 - DNA, 25 bp, Homo sapien
attccgtacttgttattacagacgt

SEQ ID NO: 23392 - DNA, 25 bp, Homo sapien
attccgtacttgatattacagacgt

SEQ ID NO: 23393 - DNA, 25 bp, Homo sapien
tcgtcgactgtcaatatacacgagt

SEQ ID NO: 23394 - DNA, 25 bp, Homo sapien
tcgtcgactgtctatatacacgagt

SEQ ID NO: 23395 - DNA, 25 bp, Homo sapien
actttgccgttgttacaaatcgggt

SEQ ID NO: 23396 - DNA, 25 bp, Homo sapien
actttgccgttgatacaaatcgggt

SEQ ID NO: 23397 - DNA, 25 bp, Homo sapien
acagggatccgtagtaaatatacca

SEQ ID NO: 23398 - DNA, 25 bp, Homo sapien
acagggatccgttgtaaatatacca

SEQ ID NO: 23399 - DNA, 25 bp, Homo sapien
catagtctgattgacgacaacgtaa

SEQ ID NO: 23400 - DNA, 25 bp, Homo sapien
catagtctgattcacgacaacgtaa

SEQ ID NO: 23401 - DNA, 25 bp, Homo sapien
gtacagaaatatgagctcatacagt

SEQ ID NO: 23402 - DNA, 25 bp, Homo sapien
gtacagaaatatcagctcatacagt

SEQ ID NO: 23403 - DNA, 25 bp, Homo sapien
gatactagacaaagtgaaccaacat

SEQ ID NO: 23404 - DNA, 25 bp, Homo sapien
gatactagacaatgtgaaccaacat

SEQ ID NO: 23405 - DNA, 25 bp, Homo sapien
aatatacacgtgacgggaccaaagg

SEQ ID NO: 23406 - DNA, 25 bp, Homo sapien
aatatacacgtgtcgggaccaaagg

SEQ ID NO: 23407 - DNA, 25 bp, Homo sapien
acttcgggaggtcgatgatcacgac

SEQ ID NO: 23408 - DNA, 25 bp, Homo sapien
acttcgggaggtggatgatcacgac

SEQ ID NO: 23409 - DNA, 25 bp, Homo sapien
tcccgaccgcgacggcctgcgccac

SEQ ID NO: 23410 - DNA, 25 bp, Homo sapien
tcccgaccgcgagggcctgcgccac

SEQ ID NO: 23411 - DNA, 25 bp, Homo sapien
tccgtaatgcggtcgagggcctacg

SEQ ID NO: 23412 - DNA, 25 bp, Homo sapien
tccgtaatgcggacgagggcctacg

SEQ ID NO: 23413 - DNA, 25 bp, Homo sapien
tcccctgaggtctaactcctctagt

SEQ ID NO: 23414 - DNA, 25 bp, Homo sapien
tcccctgaggtcaaactcctctagt

SEQ ID NO: 23415 - DNA, 25 bp, Homo sapien
cccacctggagtggaacctctacag

SEQ ID NO: 23416 - DNA, 25 bp, Homo sapien
cccacctggagtcgaacctctacag

SEQ ID NO: 23417 - DNA, 25 bp, Homo sapien
agtctaccgtataggtttagcacaa

SEQ ID NO: 23418 - DNA, 25 bp, Homo sapien
agtctaccgtattggtttagcacaa

SEQ ID NO: 23419 - DNA, 25 bp, Homo sapien
tgtcgtaggtctggagttgaccaaa

SEQ ID NO: 23420 - DNA, 25 bp, Homo sapien
tgtcgtaggtctcgagttgaccaaa

SEQ ID NO: 23421 - DNA, 25 bp, Homo sapien
agaacgtcctaacgagtggcggaaa

SEQ ID NO: 23422 - DNA, 25 bp, Homo sapien
agaacgtcctaaggagtggcggaaa

SEQ ID NO: 23423 - DNA, 25 bp, Homo sapien
cattacttaaaggtcggaggtactt

SEQ ID NO: 23424 - DNA, 25 bp, Homo sapien
cattacttaaagctcggaggtactt

SEQ ID NO: 23425 - DNA, 25 bp, Homo sapien
cacacgagtaggtccgtcgatgtcc

SEQ ID NO: 23426 - DNA, 25 bp, Homo sapien
cacacgagtaggaccgtcgatgtcc

SEQ ID NO: 23427 - DNA, 25 bp, Homo sapien
gcccgaagtgcaggtagtgtcaccg

SEQ ID NO: 23428 - DNA, 25 bp, Homo sapien
gcccgaagtgcacgtagtgtcaccg

SEQ ID NO: 23429 - DNA, 25 bp, Homo sapien
agaccgtccgacgtagtgtactacc

SEQ ID NO: 23430 - DNA, 25 bp, Homo sapien
agaccgtccgacctagtgtactacc

SEQ ID NO: 23431 - DNA, 25 bp, Homo sapien
caggtcaccgtagctgtgactgtac

SEQ ID NO: 23432 - DNA, 25 bp, Homo sapien
caggtcaccgtacctgtgactgtac

SEQ ID NO: 23433 - DNA, 25 bp, Homo sapien
tcccgttagtgtaccttgggtcaat

SEQ ID NO: 23434 - DNA, 25 bp, Homo sapien
tcccgttagtgttccttgggtcaat

SEQ ID NO: 23435 - DNA, 25 bp, Homo sapien
atcctcgcctggtctgggaccacat

SEQ ID NO: 23436 - DNA, 25 bp, Homo sapien
atcctcgcctggactgggaccacat

SEQ ID NO: 23437 - DNA, 25 bp, Homo sapien
tggcgccgggacgagtaaacacgta

SEQ ID NO: 23438 - DNA, 25 bp, Homo sapien
tggcgccgggaccagtaaacacgta

SEQ ID NO: 23439 - DNA, 25 bp, Homo sapien
ggtaaggtgagtcacgtagctacaa

SEQ ID NO: 23440 - DNA, 25 bp, Homo sapien
ggtaaggtgagtgacgtagctacaa

SEQ ID NO: 23441 - DNA, 25 bp, Homo sapien
atttacgtcgtggatacacatataa

SEQ ID NO: 23442 - DNA, 25 bp, Homo sapien
atttacgtcgtgcatacacatataa

SEQ ID NO: 23443 - DNA, 25 bp, Homo sapien
caacgtttcttgtttctttagtaga

SEQ ID NO: 23444 - DNA, 25 bp, Homo sapien
caacgtttcttgattctttagtaga

SEQ ID NO: 23445 - DNA, 25 bp, Homo sapien
cttctgttcgacttatgtatagata

SEQ ID NO: 23446 - DNA, 25 bp, Homo sapien
cttctgttcgacatatgtatagata

SEQ ID NO: 23447 - DNA, 25 bp, Homo sapien
ctctagtagacctttactctttaag

SEQ ID NO: 23448 - DNA, 25 bp, Homo sapien
ctctagtagaccattactctttaag

SEQ ID NO: 23449 - DNA, 25 bp, Homo sapien
acctagtagaactgtgttttagtac

SEQ ID NO: 23450 - DNA, 25 bp, Homo sapien
acctagtagaacagtgttttagtac

SEQ ID NO: 23451 - DNA, 25 bp, Homo sapien
atcttaccctgtgattcaccaagag

SEQ ID NO: 23452 - DNA, 25 bp, Homo sapien
atcttaccctgtcattcaccaagag

SEQ ID NO: 23453 - DNA, 25 bp, Homo sapien
tctaggtgacgtcagtatccaagtg

SEQ ID NO: 23454 - DNA, 25 bp, Homo sapien
tctaggtgacgtgagtatccaagtg

SEQ ID NO: 23455 - DNA, 25 bp, Homo sapien
ggtcgattgtgtgattcacctactg

SEQ ID NO: 23456 - DNA, 25 bp, Homo sapien
ggtcgattgtgtcattcacctactg

SEQ ID NO: 23457 - DNA, 25 bp, Homo sapien
cgtgggtcataaggattttccttag

SEQ ID NO: 23458 - DNA, 25 bp, Homo sapien
cgtgggtcataacgattttccttag

SEQ ID NO: 23459 - DNA, 25 bp, Homo sapien
ctcggaacttggtcttgtaagttac

SEQ ID NO: 23460 - DNA, 25 bp, Homo sapien
ctcggaacttggacttgtaagttac

SEQ ID NO: 23461 - DNA, 25 bp, Homo sapien
tgtcctattgttggacccactacaa

SEQ ID NO: 23462 - DNA, 25 bp, Homo sapien
tgtcctattgttcgacccactacaa

SEQ ID NO: 23463 - DNA, 25 bp, Homo sapien
gacactattgttcctttactgagaa

SEQ ID NO: 23464 - DNA, 25 bp, Homo sapien
gacactattgttgctttactgagaa

SEQ ID NO: 23465 - DNA, 25 bp, Homo sapien
gaacacttcagtatgtccaggaaca

SEQ ID NO: 23466 - DNA, 25 bp, Homo sapien
gaacacttcagtttgtccaggaaca

SEQ ID NO: 23467 - DNA, 25 bp, Homo sapien
tcagccactaaggtcaggacccacg

SEQ ID NO: 23468 - DNA, 25 bp, Homo sapien
tcagccactaagctcaggacccacg

SEQ ID NO: 23469 - DNA, 25 bp, Homo sapien
ctcaagaataggttcaagttccact

SEQ ID NO: 23470 - DNA, 25 bp, Homo sapien
ctcaagaataggatcaagttccact

SEQ ID NO: 23471 - DNA, 25 bp, Homo sapien
gtccttcgtcgatgagacgcgaccc

SEQ ID NO: 23472 - DNA, 25 bp, Homo sapien
gtccttcgtcgaagagacgcgaccc

SEQ ID NO: 23473 - DNA, 25 bp, Homo sapien
gttattcttctactccgtatcgtcg

SEQ ID NO: 23474 - DNA, 25 bp, Homo sapien
gttattcttctagtccgtatcgtcg

SEQ ID NO: 23475 - DNA, 25 bp, Homo sapien
ttttgtagtctgtctgagtcgtcgt

SEQ ID NO: 23476 - DNA, 25 bp, Homo sapien
ttttgtagtctgactgagtcgtcgt

SEQ ID NO: 23477 - DNA, 25 bp, Homo sapien
tttactagagaccacactccgtgtt

SEQ ID NO: 23478 - DNA, 25 bp, Homo sapien
tttactagagacgacactccgtgtt

SEQ ID NO: 23479 - DNA, 25 bp, Homo sapien
tttccgactagatctacttcatgag

SEQ ID NO: 23480 - DNA, 25 bp, Homo sapien
tttccgactagaactacttcatgag

SEQ ID NO: 23481 - DNA, 25 bp, Homo sapien
gtagtagcaatagccgttcgccgca

SEQ ID NO: 23482 - DNA, 25 bp, Homo sapien
gtagtagcaatacccgttcgccgca

SEQ ID NO: 23483 - DNA, 25 bp, Homo sapien
gttagttgtacgaccacttccactt

SEQ ID NO: 23484 - DNA, 25 bp, Homo sapien
gttagttgtacgtccacttccactt

SEQ ID NO: 23485 - DNA, 25 bp, Homo sapien
gactgaccagagagaaataacctca

SEQ ID NO: 23486 - DNA, 25 bp, Homo sapien
gactgaccagagtgaaataacctca

SEQ ID NO: 23487 - DNA, 25 bp, Homo sapien
agctagtaacagaaatagacctcac

SEQ ID NO: 23488 - DNA, 25 bp, Homo sapien
agctagtaacagtaatagacctcac

SEQ ID NO: 23489 - DNA, 25 bp, Homo sapien
tttgtacaatcatgagactactacg

SEQ ID NO: 23490 - DNA, 25 bp, Homo sapien
tttgtacaatcaagagactactacg

SEQ ID NO: 23491 - DNA, 25 bp, Homo sapien
cgtcgtttctacctcgaggtcaagg

SEQ ID NO: 23492 - DNA, 25 bp, Homo sapien
cgtcgtttctacgtcgaggtcaagg

SEQ ID NO: 23493 - DNA, 25 bp, Homo sapien
tctttgtctcggagacgtcctgtgt

SEQ ID NO: 23494 - DNA, 25 bp, Homo sapien
tctttgtctcggtgacgtcctgtgt

SEQ ID NO: 23495 - DNA, 25 bp, Homo sapien
ctctctctgcagatcttccgacttg

SEQ ID NO: 23496 - DNA, 25 bp, Homo sapien
ctctctctgcagttcttccgacttg

SEQ ID NO: 23497 - DNA, 25 bp, Homo sapien
taactgtttgtctagtttcattcga

SEQ ID NO: 23498 - DNA, 25 bp, Homo sapien
taactgtttgtcaagtttcattcga

SEQ ID NO: 23499 - DNA, 25 bp, Homo sapien
gcatcgtctgtttttatctactgca

SEQ ID NO: 23500 - DNA, 25 bp, Homo sapien
gcatcgtctgttattatctactgca

SEQ ID NO: 23501 - DNA, 25 bp, Homo sapien
gtgagttatacgttctcgatgtctg

SEQ ID NO: 23502 - DNA, 25 bp, Homo sapien
gtgagttatacgatctcgatgtctg

SEQ ID NO: 23503 - DNA, 25 bp, Homo sapien
ccgggtgagactcctcgactcgtta

SEQ ID NO: 23504 - DNA, 25 bp, Homo sapien
ccgggtgagactgctcgactcgtta

SEQ ID NO: 23505 - DNA, 25 bp, Homo sapien
cacggactgtgcaacgacgggtcga

SEQ ID NO: 23506 - DNA, 25 bp, Homo sapien
cacggactgtgctacgacgggtcga

SEQ ID NO: 23507 - DNA, 25 bp, Homo sapien
tgcccgacgactcgaccgtggtgac

SEQ ID NO: 23508 - DNA, 25 bp, Homo sapien
tgcccgacgactggaccgtggtgac

SEQ ID NO: 23509 - DNA, 25 bp, Homo sapien
cgtccgaccggtagacgtggtcact

SEQ ID NO: 23510 - DNA, 25 bp, Homo sapien
cgtccgaccggttgacgtggtcact

SEQ ID NO: 23511 - DNA, 25 bp, Homo sapien
cgttgtactttatgatcacgacact

SEQ ID NO: 23512 - DNA, 25 bp, Homo sapien
cgttgtactttaagatcacgacact

SEQ ID NO: 23513 - DNA, 25 bp, Homo sapien
gcagtaatctgtcaagtacctcatt

SEQ ID NO: 23514 - DNA, 25 bp, Homo sapien
gcagtaatctgtgaagtacctcatt

SEQ ID NO: 23515 - DNA, 25 bp, Homo sapien
cgtcgttgtgtgttgaagtcttttc

SEQ ID NO: 23516 - DNA, 25 bp, Homo sapien
cgtcgttgtgtgatgaagtcttttc

SEQ ID NO: 23517 - DNA, 25 bp, Homo sapien
tgtctcgggtctatacaaatgttct

SEQ ID NO: 23518 - DNA, 25 bp, Homo sapien
tgtctcgggtctttacaaatgttct

SEQ ID NO: 23519 - DNA, 25 bp, Homo sapien
ggtgggttctttccttgtagtccgt

SEQ ID NO: 23520 - DNA, 25 bp, Homo sapien
ggtgggttctttgcttgtagtccgt

SEQ ID NO: 23521 - DNA, 25 bp, Homo sapien
cagatgatagtttgacttttctact

SEQ ID NO: 23522 - DNA, 25 bp, Homo sapien
cagatgatagttagacttttctact

SEQ ID NO: 23523 - DNA, 25 bp, Homo sapien
agtaaggtgtaccagactttgttct

SEQ ID NO: 23524 - DNA, 25 bp, Homo sapien
agtaaggtgtacgagactttgttct

SEQ ID NO: 23525 - DNA, 25 bp, Homo sapien
gactctttcagatgcttctgtatgt

SEQ ID NO: 23526 - DNA, 25 bp, Homo sapien
gactctttcagaagcttctgtatgt

SEQ ID NO: 23527 - DNA, 25 bp, Homo sapien
gactacagtataaatccttggtatc

SEQ ID NO: 23528 - DNA, 25 bp, Homo sapien
gactacagtatatatccttggtatc

SEQ ID NO: 23529 - DNA, 25 bp, Homo sapien
agattgaagaaattcctcttgactg

SEQ ID NO: 23530 - DNA, 25 bp, Homo sapien
agattgaagaaaatcctcttgactg

SEQ ID NO: 23531 - DNA, 25 bp, Homo sapien
aagaagaacacgaaagtattctcgg

SEQ ID NO: 23532 - DNA, 25 bp, Homo sapien
aagaagaacacgtaagtattctcgg

SEQ ID NO: 23533 - DNA, 25 bp, Homo sapien
taggtgagtataagaacttctcttc

SEQ ID NO: 23534 - DNA, 25 bp, Homo sapien
taggtgagtatatgaacttctcttc

SEQ ID NO: 23535 - DNA, 25 bp, Homo sapien
ggtcggtgagacttgaaatacttcc

SEQ ID NO: 23536 - DNA, 25 bp, Homo sapien
ggtcggtgagacatgaaatacttcc

SEQ ID NO: 23537 - DNA, 25 bp, Homo sapien
ggtgtttgcagtgaccaaagacacg

SEQ ID NO: 23538 - DNA, 25 bp, Homo sapien
ggtgtttgcagtcaccaaagacacg

SEQ ID NO: 23539 - DNA, 25 bp, Homo sapien
tagttgtctcagactattagagaca

SEQ ID NO: 23540 - DNA, 25 bp, Homo sapien
tagttgtctcagtctattagagaca

SEQ ID NO: 23541 - DNA, 25 bp, Homo sapien
ttgtgtgtaccgtctctatgctata

SEQ ID NO: 23542 - DNA, 25 bp, Homo sapien
ttgtgtgtaccgactctatgctata

SEQ ID NO: 23543 - DNA, 25 bp, Homo sapien
aattgtgttcccaaccgatgagacg

SEQ ID NO: 23544 - DNA, 25 bp, Homo sapien
aattgtgttccctaccgatgagacg

SEQ ID NO: 23545 - DNA, 25 bp, Homo sapien
atttggtctctcagtcctcttgaag

SEQ ID NO: 23546 - DNA, 25 bp, Homo sapien
atttggtctctctgtcctcttgaag

SEQ ID NO: 23547 - DNA, 25 bp, Homo sapien
ctgactcgatacaaactactttgtg

SEQ ID NO: 23548 - DNA, 25 bp, Homo sapien
ctgactcgatactaactactttgtg

SEQ ID NO: 23549 - DNA, 25 bp, Homo sapien
aatcgtacgaagctacaccgtatga

SEQ ID NO: 23550 - DNA, 25 bp, Homo sapien
aatcgtacgaaggtacaccgtatga

SEQ ID NO: 23551 - DNA, 25 bp, Homo sapien
atcctcctacgagtctacgcttagg

SEQ ID NO: 23552 - DNA, 25 bp, Homo sapien
atcctcctacgactctacgcttagg

SEQ ID NO: 23553 - DNA, 25 bp, Homo sapien
tacgtccacccgatacaccgggggt

SEQ ID NO: 23554 - DNA, 25 bp, Homo sapien
tacgtccacccgttacaccgggggt

SEQ ID NO: 23555 - DNA, 25 bp, Homo sapien
gaccactaccactaccacggaggtg

SEQ ID NO: 23556 - DNA, 25 bp, Homo sapien
gaccactaccacaaccacggaggtg

SEQ ID NO: 23557 - DNA, 25 bp, Homo sapien
tttcacaccggaaccgtcggtcaga

SEQ ID NO: 23558 - DNA, 25 bp, Homo sapien
tttcacaccggatccgtcggtcaga

SEQ ID NO: 23559 - DNA, 25 bp, Homo sapien
tgtctacaggtgctctctctgcaga

SEQ ID NO: 23560 - DNA, 25 bp, Homo sapien
tgtctacaggtggtctctctgcaga

SEQ ID NO: 23561 - DNA, 25 bp, Homo sapien
tttcgttgggtgtctactactccca

SEQ ID NO: 23562 - DNA, 25 bp, Homo sapien
tttcgttgggtgactactactccca

SEQ ID NO: 23563 - DNA, 25 bp, Homo sapien
tcgatctggttcttccacatcccag

SEQ ID NO: 23564 - DNA, 25 bp, Homo sapien
tcgatctggttcatccacatcccag

SEQ ID NO: 23565 - DNA, 25 bp, Homo sapien
agagtagataattaccatactcaag

SEQ ID NO: 23566 - DNA, 25 bp, Homo sapien
agagtagataataaccatactcaag

SEQ ID NO: 23567 - DNA, 25 bp, Homo sapien
accatgtcttcactcgagacggtaa

SEQ ID NO: 23568 - DNA, 25 bp, Homo sapien
accatgtcttcagtcgagacggtaa

SEQ ID NO: 23569 - DNA, 25 bp, Homo sapien
gttcgtcctactgtcgtttgcgtaa

SEQ ID NO: 23570 - DNA, 25 bp, Homo sapien
gttcgtcctactctcgtttgcgtaa

SEQ ID NO: 23571 - DNA, 25 bp, Homo sapien
ctcctagaacgtctagacgacgtca

SEQ ID NO: 23572 - DNA, 25 bp, Homo sapien
ctcctagaacgtgtagacgacgtca

SEQ ID NO: 23573 - DNA, 25 bp, Homo sapien
ttgctcccagggtgtacgcatctac

SEQ ID NO: 23574 - DNA, 25 bp, Homo sapien
ttgctcccagggagtacgcatctac

SEQ ID NO: 23575 - DNA, 25 bp, Homo sapien
ttgtctccagggtaacacggtacac

SEQ ID NO: 23576 - DNA, 25 bp, Homo sapien
ttgtctccagggaaacacggtacac

SEQ ID NO: 23577 - DNA, 25 bp, Homo sapien
gcgtaccaagcctgactacgatcct

SEQ ID NO: 23578 - DNA, 25 bp, Homo sapien
gcgtaccaagccagactacgatcct

SEQ ID NO: 23579 - DNA, 25 bp, Homo sapien
tccacttctcggagtgactgaccga

SEQ ID NO: 23580 - DNA, 25 bp, Homo sapien
tccacttctcggtgtgactgaccga

SEQ ID NO: 23581 - DNA, 25 bp, Homo sapien
accacttgaacgtggactcctaccg

SEQ ID NO: 23582 - DNA, 25 bp, Homo sapien
accacttgaacgaggactcctaccg

SEQ ID NO: 23583 - DNA, 25 bp, Homo sapien
ccaccgaaggtagtaggtcctaccg

SEQ ID NO: 23584 - DNA, 25 bp, Homo sapien
ccaccgaaggtactaggtcctaccg

SEQ ID NO: 23585 - DNA, 25 bp, Homo sapien
ggcacagcaggagtaggagcttccc

SEQ ID NO: 23586 - DNA, 25 bp, Homo sapien
ggcacagcaggactaggagcttccc

SEQ ID NO: 23587 - DNA, 25 bp, Homo sapien
aagcaggaagatcacggacaccgtc

SEQ ID NO: 23588 - DNA, 25 bp, Homo sapien
aagcaggaagatgacggacaccgtc

SEQ ID NO: 23589 - DNA, 25 bp, Homo sapien
agaagacgtcaagaccgacaagtac

SEQ ID NO: 23590 - DNA, 25 bp, Homo sapien
agaagacgtcaacaccgacaagtac

SEQ ID NO: 23591 - DNA, 25 bp, Homo sapien
cgaacatagtcgtgtccctctgtaa

SEQ ID NO: 23592 - DNA, 25 bp, Homo sapien
cgaacatagtcgagtccctctgtaa

SEQ ID NO: 23593 - DNA, 25 bp, Homo sapien
agaagaagtaggactcttctagggc

SEQ ID NO: 23594 - DNA, 25 bp, Homo sapien
agaagaagtaggtctcttctagggc

SEQ ID NO: 23595 - DNA, 25 bp, Homo sapien
atataagacgtgtctattgccatac

SEQ ID NO: 23596 - DNA, 25 bp, Homo sapien
atataagacgtgactattgccatac

SEQ ID NO: 23597 - DNA, 25 bp, Homo sapien
atactgagtctgacattaataccta

SEQ ID NO: 23598 - DNA, 25 bp, Homo sapien
atactgagtctgtcattaataccta

SEQ ID NO: 23599 - DNA, 25 bp, Homo sapien
gtttgagaacttagaatctacacac

SEQ ID NO: 23600 - DNA, 25 bp, Homo sapien
gtttgagaactttgaatctacacac

SEQ ID NO: 23601 - DNA, 25 bp, Homo sapien
gatcggggagttccaagtcgagacc

SEQ ID NO: 23602 - DNA, 25 bp, Homo sapien
gatcggggagttgcaagtcgagacc

SEQ ID NO: 23603 - DNA, 25 bp, Homo sapien
ccgagtctgtacagggactcgaccc

SEQ ID NO: 23604 - DNA, 25 bp, Homo sapien
ccgagtctgtactgggactcgaccc

SEQ ID NO: 23605 - DNA, 25 bp, Homo sapien
gagtgagtcttttcggtcccatcct

SEQ ID NO: 23606 - DNA, 25 bp, Homo sapien
gagtgagtctttacggtcccatcct

SEQ ID NO: 23607 - DNA, 25 bp, Homo sapien
ctggaactcctaacaacggaagaac

SEQ ID NO: 23608 - DNA, 25 bp, Homo sapien
ctggaactcctatcaacggaagaac

SEQ ID NO: 23609 - DNA, 25 bp, Homo sapien
acacggacccaaacgacatcagcag

SEQ ID NO: 23610 - DNA, 25 bp, Homo sapien
acacggacccaatcgacatcagcag

SEQ ID NO: 23611 - DNA, 25 bp, Homo sapien
aggtaccagaacgtacaacgacacc

SEQ ID NO: 23612 - DNA, 25 bp, Homo sapien
aggtaccagaacctacaacgacacc

SEQ ID NO: 23613 - DNA, 25 bp, Homo sapien
agcgaggaccttctaccactaccct

SEQ ID NO: 23614 - DNA, 25 bp, Homo sapien
agcgaggaccttgtaccactaccct

SEQ ID NO: 23615 - DNA, 25 bp, Homo sapien
gcgacctactaaaacgacgtcccgt

SEQ ID NO: 23616 - DNA, 25 bp, Homo sapien
gcgacctactaatacgacgtcccgt

SEQ ID NO: 23617 - DNA, 25 bp, Homo sapien
agtacgaacatagtcgtgtccctct

SEQ ID NO: 23618 - DNA, 25 bp, Homo sapien
agtacgaacatactcgtgtccctct

SEQ ID NO: 23619 - DNA, 25 bp, Homo sapien
taggtcggacagatgtcgttccctc

SEQ ID NO: 23620 - DNA, 25 bp, Homo sapien
taggtcggacagttgtcgttccctc

SEQ ID NO: 23621 - DNA, 25 bp, Homo sapien
cctgtttccatttagtgtcgattgt

SEQ ID NO: 23622 - DNA, 25 bp, Homo sapien
cctgtttccattaagtgtcgattgt

SEQ ID NO: 23623 - DNA, 25 bp, Homo sapien
ttgggtccccacgaagtcctagacc

SEQ ID NO: 23624 - DNA, 25 bp, Homo sapien
ttgggtccccaccaagtcctagacc

SEQ ID NO: 23625 - DNA, 25 bp, Homo sapien
gtatacgtctacgtccttaggtccc

SEQ ID NO: 23626 - DNA, 25 bp, Homo sapien
gtatacgtctacctccttaggtccc

SEQ ID NO: 23627 - DNA, 25 bp, Homo sapien
gtatgttacttctacgacaactctt

SEQ ID NO: 23628 - DNA, 25 bp, Homo sapien
gtatgttacttcaacgacaactctt

SEQ ID NO: 23629 - DNA, 25 bp, Homo sapien
gtttatgcgtatacgtctacgtcct

SEQ ID NO: 23630 - DNA, 25 bp, Homo sapien
gtttatgcgtattcgtctacgtcct

SEQ ID NO: 23631 - DNA, 25 bp, Homo sapien
actccttttgtgtcacggacgtctc

SEQ ID NO: 23632 - DNA, 25 bp, Homo sapien
actccttttgtgacacggacgtctc

SEQ ID NO: 23633 - DNA, 25 bp, Homo sapien
gtgtcgttttagtccgcgggtcttg

SEQ ID NO: 23634 - DNA, 25 bp, Homo sapien
gtgtcgttttagaccgcgggtcttg

SEQ ID NO: 23635 - DNA, 25 bp, Homo sapien
gttctctaccttaccctgtgtttcg

SEQ ID NO: 23636 - DNA, 25 bp, Homo sapien
gttctctacctttccctgtgtttcg

SEQ ID NO: 23637 - DNA, 25 bp, Homo sapien
tctacttgtgtgacctgaatatatg

SEQ ID NO: 23638 - DNA, 25 bp, Homo sapien
tctacttgtgtgtcctgaatatatg

SEQ ID NO: 23639 - DNA, 25 bp, Homo sapien
tactctgtgtggtcacaccggaaca

SEQ ID NO: 23640 - DNA, 25 bp, Homo sapien
tactctgtgtggacacaccggaaca

SEQ ID NO: 23641 - DNA, 25 bp, Homo sapien
gtagctgtggtgaacgggacacaca

SEQ ID NO: 23642 - DNA, 25 bp, Homo sapien
gtagctgtggtgtacgggacacaca

SEQ ID NO: 23643 - DNA, 25 bp, Homo sapien
atgtatatgaagttggacgtactcc

SEQ ID NO: 23644 - DNA, 25 bp, Homo sapien
atgtatatgaagatggacgtactcc

SEQ ID NO: 23645 - DNA, 25 bp, Homo sapien
tgttttgacttcagaagtcttttcg

SEQ ID NO: 23646 - DNA, 25 bp, Homo sapien
tgttttgacttctgaagtcttttcg

SEQ ID NO: 23647 - DNA, 25 bp, Homo sapien
tgttttggatgaaactcgagtcaac

SEQ ID NO: 23648 - DNA, 25 bp, Homo sapien
tgttttggatgatactcgagtcaac

SEQ ID NO: 23649 - DNA, 25 bp, Homo sapien
gtttctatgagcacgttacaaccta

SEQ ID NO: 23650 - DNA, 25 bp, Homo sapien
gtttctatgagctcgttacaaccta

SEQ ID NO: 23651 - DNA, 25 bp, Homo sapien
agttttcggtgttcaccacgtttac

SEQ ID NO: 23652 - DNA, 25 bp, Homo sapien
agttttcggtgtacaccacgtttac

SEQ ID NO: 23653 - DNA, 25 bp, Homo sapien
ttgtgtttcgatttgactaatcatc

SEQ ID NO: 23654 - DNA, 25 bp, Homo sapien
ttgtgtttcgatatgactaatcatc

SEQ ID NO: 23655 - DNA, 25 bp, Homo sapien
cgagtatcaggttgagtttcgtatc

SEQ ID NO: 23656 - DNA, 25 bp, Homo sapien
cgagtatcaggtagagtttcgtatc

SEQ ID NO: 23657 - DNA, 25 bp, Homo sapien
cactagtcgaggttgactcctttct

SEQ ID NO: 23658 - DNA, 25 bp, Homo sapien
cactagtcgaggatgactcctttct

SEQ ID NO: 23659 - DNA, 25 bp, Homo sapien
tgtctggtactctctcgtgttacgt

SEQ ID NO: 23660 - DNA, 25 bp, Homo sapien
tgtctggtactcactcgtgttacgt

SEQ ID NO: 23661 - DNA, 25 bp, Homo sapien
aatgtcgttctacgatgtgtatcgt

SEQ ID NO: 23662 - DNA, 25 bp, Homo sapien
aatgtcgttctaggatgtgtatcgt

SEQ ID NO: 23663 - DNA, 25 bp, Homo sapien
tcgtggtcgtccttgcgtgaatcgt

SEQ ID NO: 23664 - DNA, 25 bp, Homo sapien
tcgtggtcgtccatgcgtgaatcgt

SEQ ID NO: 23665 - DNA, 25 bp, Homo sapien
atgtcggacgtattttcgtcaatag

SEQ ID NO: 23666 - DNA, 25 bp, Homo sapien
atgtcggacgtaatttcgtcaatag

SEQ ID NO: 23667 - DNA, 25 bp, Homo sapien
agtcgtctcaactccgcggacgtgg

SEQ ID NO: 23668 - DNA, 25 bp, Homo sapien
agtcgtctcaacaccgcggacgtgg

SEQ ID NO: 23669 - DNA, 25 bp, Homo sapien
tgtatcctaaaaacgcgacacgaag

SEQ ID NO: 23670 - DNA, 25 bp, Homo sapien
tgtatcctaaaatcgcgacacgaag

SEQ ID NO: 23671 - DNA, 25 bp, Homo sapien
acgtataaaatcatgtcgtacaaag

SEQ ID NO: 23672 - DNA, 25 bp, Homo sapien
acgtataaaatcttgtcgtacaaag

SEQ ID NO: 23673 - DNA, 25 bp, Homo sapien
aggttaatgttctgtttatcacgtc

SEQ ID NO: 23674 - DNA, 25 bp, Homo sapien
aggttaatgttcagtttatcacgtc

SEQ ID NO: 23675 - DNA, 25 bp, Homo sapien
ggtgttacacgtctttttacaagac

SEQ ID NO: 23676 - DNA, 25 bp, Homo sapien
ggtgttacacgtgtttttacaagac

SEQ ID NO: 23677 - DNA, 25 bp, Homo sapien
gtcgtactcgatgtaattggactta

SEQ ID NO: 23678 - DNA, 25 bp, Homo sapien
gtcgtactcgatctaattggactta

SEQ ID NO: 23679 - DNA, 25 bp, Homo sapien
gttctacagattctctcgagtacca

SEQ ID NO: 23680 - DNA, 25 bp, Homo sapien
gttctacagattgtctcgagtacca

SEQ ID NO: 23681 - DNA, 25 bp, Homo sapien
gttccttcttgatcgtttagtctag

SEQ ID NO: 23682 - DNA, 25 bp, Homo sapien
gttccttcttgaacgtttagtctag

SEQ ID NO: 23683 - DNA, 25 bp, Homo sapien
gtagattctgtgacggaccgtcgag

SEQ ID NO: 23684 - DNA, 25 bp, Homo sapien
gtagattctgtgtcggaccgtcgag

SEQ ID NO: 23685 - DNA, 25 bp, Homo sapien
gttcgaattctgaatggtacttacc

SEQ ID NO: 23686 - DNA, 25 bp, Homo sapien
gttcgaattctgtatggtacttacc

SEQ ID NO: 23687 - DNA, 25 bp, Homo sapien
ctctttatatgaggtctttacgagt

SEQ ID NO: 23688 - DNA, 25 bp, Homo sapien
ctctttatatgacgtctttacgagt

SEQ ID NO: 23689 - DNA, 25 bp, Homo sapien
accgttgttagtcgtcggttataag

SEQ ID NO: 23690 - DNA, 25 bp, Homo sapien
accgttgttagtggtcggttataag

SEQ ID NO: 23691 - DNA, 25 bp, Homo sapien
ctcttgtcgatgtgacgatatatat

SEQ ID NO: 23692 - DNA, 25 bp, Homo sapien
ctcttgtcgatgagacgatatatat

SEQ ID NO: 23693 - DNA, 25 bp, Homo sapien
cctcgtggtcggtgagactttctgt

SEQ ID NO: 23694 - DNA, 25 bp, Homo sapien
cctcgtggtcggagagactttctgt

SEQ ID NO: 23695 - DNA, 25 bp, Homo sapien
cttacggtgtcgtaaaaccgatgag

SEQ ID NO: 23696 - DNA, 25 bp, Homo sapien
cttacggtgtcgaaaaaccgatgag

SEQ ID NO: 23697 - DNA, 25 bp, Homo sapien
cactatcataaggtccgacctgacg

SEQ ID NO: 23698 - DNA, 25 bp, Homo sapien
cactatcataagctccgacctgacg

SEQ ID NO: 23699 - DNA, 25 bp, Homo sapien
ggtacttccagaggtctcaccagtc

SEQ ID NO: 23700 - DNA, 25 bp, Homo sapien
ggtacttccagacgtctcaccagtc

SEQ ID NO: 23701 - DNA, 25 bp, Homo sapien
cttgtttcctatggtcttatgagtg

SEQ ID NO: 23702 - DNA, 25 bp, Homo sapien
cttgtttcctatcgtcttatgagtg

SEQ ID NO: 23703 - DNA, 25 bp, Homo sapien
ggtttttcgttctctacttgtcggg

SEQ ID NO: 23704 - DNA, 25 bp, Homo sapien
ggtttttcgttcactacttgtcggg

SEQ ID NO: 23705 - DNA, 25 bp, Homo sapien
actctcgtcacaccattcgggtcgt

SEQ ID NO: 23706 - DNA, 25 bp, Homo sapien
actctcgtcacagcattcgggtcgt

SEQ ID NO: 23707 - DNA, 25 bp, Homo sapien
cactgtccgttgtcacttctcgtgg

SEQ ID NO: 23708 - DNA, 25 bp, Homo sapien
cactgtccgttgacacttctcgtgg

SEQ ID NO: 23709 - DNA, 25 bp, Homo sapien
aaagaatatgactctctttcgtcgg

SEQ ID NO: 23710 - DNA, 25 bp, Homo sapien
aaagaatatgacactctttcgtcgg

SEQ ID NO: 23711 - DNA, 25 bp, Homo sapien
gatgatactcgtatccgtacttttg

SEQ ID NO: 23712 - DNA, 25 bp, Homo sapien
gatgatactcgtttccgtacttttg

SEQ ID NO: 23713 - DNA, 25 bp, Homo sapien
tttactcgactacacgtctttgtcg

SEQ ID NO: 23714 - DNA, 25 bp, Homo sapien
tttactcgactagacgtctttgtcg

SEQ ID NO: 23715 - DNA, 25 bp, Homo sapien
atgtataccgcgaaactaaagtgta

SEQ ID NO: 23716 - DNA, 25 bp, Homo sapien
atgtataccgcgtaactaaagtgta

SEQ ID NO: 23717 - DNA, 25 bp, Homo sapien
gtgtcactagccaggacagtaagat

SEQ ID NO: 23718 - DNA, 25 bp, Homo sapien
gtgtcactagcctggacagtaagat

SEQ ID NO: 23719 - DNA, 25 bp, Homo sapien
tccgacctcgacctcaaactagaag

SEQ ID NO: 23720 - DNA, 25 bp, Homo sapien
tccgacctcgacgtcaaactagaag

SEQ ID NO: 23721 - DNA, 25 bp, Homo sapien
cacgtagagtctgagtcaaaagtta

SEQ ID NO: 23722 - DNA, 25 bp, Homo sapien
cacgtagagtctcagtcaaaagtta

SEQ ID NO: 23723 - DNA, 25 bp, Homo sapien
ttttgtgatacgaaagacaacaaac

SEQ ID NO: 23724 - DNA, 25 bp, Homo sapien
ttttgtgatacgtaagacaacaaac

SEQ ID NO: 23725 - DNA, 25 bp, Homo sapien
taggtttagatcaagaaacccttac

SEQ ID NO: 23726 - DNA, 25 bp, Homo sapien
taggtttagatctagaaacccttac

SEQ ID NO: 23727 - DNA, 25 bp, Homo sapien
aagtgttaaacgtaccaacaggagg

SEQ ID NO: 23728 - DNA, 25 bp, Homo sapien
aagtgttaaacgaaccaacaggagg

SEQ ID NO: 23729 - DNA, 25 bp, Homo sapien
acaaagtagagacagaagtcgactt

SEQ ID NO: 23730 - DNA, 25 bp, Homo sapien
acaaagtagagagagaagtcgactt

SEQ ID NO: 23731 - DNA, 25 bp, Homo sapien
aaactgaatcggaactgacattacc

SEQ ID NO: 23732 - DNA, 25 bp, Homo sapien
aaactgaatcggtactgacattacc

SEQ ID NO: 23733 - DNA, 25 bp, Homo sapien
aagacacaaggtagtccggaatgcc

SEQ ID NO: 23734 - DNA, 25 bp, Homo sapien
aagacacaaggttgtccggaatgcc

SEQ ID NO: 23735 - DNA, 25 bp, Homo sapien
aaacccactatgaccagtagaccga

SEQ ID NO: 23736 - DNA, 25 bp, Homo sapien
aaacccactatgtccagtagaccga

SEQ ID NO: 23737 - DNA, 25 bp, Homo sapien
gttccggatcggaccgggtaccgtc

SEQ ID NO: 23738 - DNA, 25 bp, Homo sapien
gttccggatcggtccgggtaccgtc

SEQ ID NO: 23739 - DNA, 25 bp, Homo sapien
tttgatccttccagtactgggggtt

SEQ ID NO: 23740 - DNA, 25 bp, Homo sapien
tttgatccttcctgtactgggggtt

SEQ ID NO: 23741 - DNA, 25 bp, Homo sapien
atcgacatcgacgtgagtcggcgga

SEQ ID NO: 23742 - DNA, 25 bp, Homo sapien
atcgacatcgacctgagtcggcgga

SEQ ID NO: 23743 - DNA, 25 bp, Homo sapien
acaggtcacccgtggctcttcgact

SEQ ID NO: 23744 - DNA, 25 bp, Homo sapien
acaggtcacccgaggctcttcgact

SEQ ID NO: 23745 - DNA, 25 bp, Homo sapien
attctagactcgagagacgtttcga

SEQ ID NO: 23746 - DNA, 25 bp, Homo sapien
attctagactcgtgagacgtttcga

SEQ ID NO: 23747 - DNA, 25 bp, Homo sapien
tgtctagaggtaaaacgtcttacga

SEQ ID NO: 23748 - DNA, 25 bp, Homo sapien
tgtctagaggtataacgtcttacga

SEQ ID NO: 23749 - DNA, 25 bp, Homo sapien
gagtccttcgactggaacttcgaga

SEQ ID NO: 23750 - DNA, 25 bp, Homo sapien
gagtccttcgacaggaacttcgaga

SEQ ID NO: 23751 - DNA, 25 bp, Homo sapien
aagtaacagtgattgtagaccacaa

SEQ ID NO: 23752 - DNA, 25 bp, Homo sapien
aagtaacagtgaatgtagaccacaa

SEQ ID NO: 23753 - DNA, 25 bp, Homo sapien
ctaatgagctgtttttcacgttaaa

SEQ ID NO: 23754 - DNA, 25 bp, Homo sapien
ctaatgagctgtatttcacgttaaa

SEQ ID NO: 23755 - DNA, 25 bp, Homo sapien
ctaatgtgaattaccgaatctgtaa

SEQ ID NO: 23756 - DNA, 25 bp, Homo sapien
ctaatgtgaatttccgaatctgtaa

SEQ ID NO: 23757 - DNA, 25 bp, Homo sapien
aagagacgatatttcctttgacagg

SEQ ID NO: 23758 - DNA, 25 bp, Homo sapien
aagagacgatatatcctttgacagg

SEQ ID NO: 23759 - DNA, 25 bp, Homo sapien
ttagaactacgatgaaaatccaaga

SEQ ID NO: 23760 - DNA, 25 bp, Homo sapien
ttagaactacgaagaaaatccaaga

SEQ ID NO: 23761 - DNA, 25 bp, Homo sapien
cgatacatttacatgtcctcggact

SEQ ID NO: 23762 - DNA, 25 bp, Homo sapien
cgatacatttacttgtcctcggact

SEQ ID NO: 23763 - DNA, 25 bp, Homo sapien
tcccaagaatccagttttcggtccg

SEQ ID NO: 23764 - DNA, 25 bp, Homo sapien
tcccaagaatcctgttttcggtccg

SEQ ID NO: 23765 - DNA, 25 bp, Homo sapien
cacaaagatgtcgttggtcgggtgt

SEQ ID NO: 23766 - DNA, 25 bp, Homo sapien
cacaaagatgtccttggtcgggtgt

SEQ ID NO: 23767 - DNA, 25 bp, Homo sapien
cccctagtccttaggtgtcgggtcg

SEQ ID NO: 23768 - DNA, 25 bp, Homo sapien
cccctagtcctttggtgtcgggtcg

SEQ ID NO: 23769 - DNA, 25 bp, Homo sapien
ataaccctgaactgactggtcccga

SEQ ID NO: 23770 - DNA, 25 bp, Homo sapien
ataaccctgaacagactggtcccga

SEQ ID NO: 23771 - DNA, 25 bp, Homo sapien
tttctggtagagacggagtcctgta

SEQ ID NO: 23772 - DNA, 25 bp, Homo sapien
tttctggtagagtcggagtcctgta

SEQ ID NO: 23773 - DNA, 25 bp, Homo sapien
ctcccgacgattaagatgaccttag

SEQ ID NO: 23774 - DNA, 25 bp, Homo sapien
ctcccgacgatttagatgaccttag

SEQ ID NO: 23775 - DNA, 25 bp, Homo sapien
atcgcggatatcaggggaccgtagt

SEQ ID NO: 23776 - DNA, 25 bp, Homo sapien
atcgcggatatctggggaccgtagt

SEQ ID NO: 23777 - DNA, 25 bp, Homo sapien
cggtagaccgaaacttcagaggaaa

SEQ ID NO: 23778 - DNA, 25 bp, Homo sapien
cggtagaccgaatcttcagaggaaa

SEQ ID NO: 23779 - DNA, 25 bp, Homo sapien
tctcaaagaaagtggtgacgtcaga

SEQ ID NO: 23780 - DNA, 25 bp, Homo sapien
tctcaaagaaagaggtgacgtcaga

SEQ ID NO: 23781 - DNA, 25 bp, Homo sapien
actccccaggaacagggacgtccag

SEQ ID NO: 23782 - DNA, 25 bp, Homo sapien
actccccaggaagagggacgtccag

SEQ ID NO: 23783 - DNA, 25 bp, Homo sapien
cgcctctggaggagtcggacctcca

SEQ ID NO: 23784 - DNA, 25 bp, Homo sapien
cgcctctggaggtgtcggacctcca

SEQ ID NO: 23785 - DNA, 25 bp, Homo sapien
cagagagtgacgtcggtctgtccta

SEQ ID NO: 23786 - DNA, 25 bp, Homo sapien
cagagagtgacgacggtctgtccta

SEQ ID NO: 23787 - DNA, 25 bp, Homo sapien
gtccgaagtctgaggtcctctctct

SEQ ID NO: 23788 - DNA, 25 bp, Homo sapien
gtccgaagtctgtggtcctctctct

SEQ ID NO: 23789 - DNA, 25 bp, Homo sapien
gagatacatgtatgtatctccctct

SEQ ID NO: 23790 - DNA, 25 bp, Homo sapien
gagatacatgtaagtatctccctct

SEQ ID NO: 23791 - DNA, 25 bp, Homo sapien
gaacagttattggtctacaccctct

SEQ ID NO: 23792 - DNA, 25 bp, Homo sapien
gaacagttattgctctacaccctct

SEQ ID NO: 23793 - DNA, 25 bp, Homo sapien
cgggaatatcagtccgtcgacccac

SEQ ID NO: 23794 - DNA, 25 bp, Homo sapien
cgggaatatcagaccgtcgacccac

SEQ ID NO: 23795 - DNA, 25 bp, Homo sapien
tcttcggacggaaacaccggaccca

SEQ ID NO: 23796 - DNA, 25 bp, Homo sapien
tcttcggacggatacaccggaccca

SEQ ID NO: 23797 - DNA, 25 bp, Homo sapien
tgtgtgtgactgtcggtaagccccc

SEQ ID NO: 23798 - DNA, 25 bp, Homo sapien
tgtgtgtgactgacggtaagccccc

SEQ ID NO: 23799 - DNA, 25 bp, Homo sapien
caagtgaactagacacaattgataa

SEQ ID NO: 23800 - DNA, 25 bp, Homo sapien
caagtgaactagtcacaattgataa

SEQ ID NO: 23801 - DNA, 25 bp, Homo sapien
tacaactctgaggtcacttgaaacg

SEQ ID NO: 23802 - DNA, 25 bp, Homo sapien
tacaactctgagctcacttgaaacg

SEQ ID NO: 23803 - DNA, 25 bp, Homo sapien
gtgtcgtgtcggacctttaacgtag

SEQ ID NO: 23804 - DNA, 25 bp, Homo sapien
gtgtcgtgtcggtcctttaacgtag

SEQ ID NO: 23805 - DNA, 25 bp, Homo sapien
cacggtagagggactgtttagactg

SEQ ID NO: 23806 - DNA, 25 bp, Homo sapien
cacggtagagggtctgtttagactg

SEQ ID NO: 23807 - DNA, 25 bp, Homo sapien
aacacagtgaaatcatacacatgga

SEQ ID NO: 23808 - DNA, 25 bp, Homo sapien
aacacagtgaaaacatacacatgga

SEQ ID NO: 23809 - DNA, 25 bp, Homo sapien
aatcattagcctcgaaacataggag

SEQ ID NO: 23810 - DNA, 25 bp, Homo sapien
aatcattagcctggaaacataggag

SEQ ID NO: 23811 - DNA, 25 bp, Homo sapien
ccaagtagaccaaacagtcaagaag

SEQ ID NO: 23812 - DNA, 25 bp, Homo sapien
ccaagtagaccatacagtcaagaag

SEQ ID NO: 23813 - DNA, 25 bp, Homo sapien
tcatcagacgactcatctacaagga

SEQ ID NO: 23814 - DNA, 25 bp, Homo sapien
tcatcagacgacacatctacaagga

SEQ ID NO: 23815 - DNA, 25 bp, Homo sapien
gtgtaggacacgacaaaagtcgtag

SEQ ID NO: 23816 - DNA, 25 bp, Homo sapien
gtgtaggacacgtcaaaagtcgtag

SEQ ID NO: 23817 - DNA, 25 bp, Homo sapien
gaagaactactgtcagaacatacga

SEQ ID NO: 23818 - DNA, 25 bp, Homo sapien
gaagaactactgacagaacatacga

SEQ ID NO: 23819 - DNA, 25 bp, Homo sapien
agagctacgtagctcggaacctgac

SEQ ID NO: 23820 - DNA, 25 bp, Homo sapien
agagctacgtaggtcggaacctgac

SEQ ID NO: 23821 - DNA, 25 bp, Homo sapien
tccgggagtcgtgtttgagtccaga

SEQ ID NO: 23822 - DNA, 25 bp, Homo sapien
tccgggagtcgtctttgagtccaga

SEQ ID NO: 23823 - DNA, 25 bp, Homo sapien
caagaggtaaggtttcggtcgacaa

SEQ ID NO: 23824 - DNA, 25 bp, Homo sapien
caagaggtaaggattcggtcgacaa

SEQ ID NO: 23825 - DNA, 25 bp, Homo sapien
agaagaaccgatcgagcgacgcgag

SEQ ID NO: 23826 - DNA, 25 bp, Homo sapien
agaagaaccgatggagcgacgcgag

SEQ ID NO: 23827 - DNA, 25 bp, Homo sapien
ggtcggtctgcacaccaagtccggt

SEQ ID NO: 23828 - DNA, 25 bp, Homo sapien
ggtcggtctgcagaccaagtccggt

SEQ ID NO: 23829 - DNA, 25 bp, Homo sapien
gggttcgacagagcacaagacactt

SEQ ID NO: 23830 - DNA, 25 bp, Homo sapien
gggttcgacagaccacaagacactt

SEQ ID NO: 23831 - DNA, 25 bp, Homo sapien
tagggccgcacgtacacgtacctct

SEQ ID NO: 23832 - DNA, 25 bp, Homo sapien
tagggccgcacgaacacgtacctct

SEQ ID NO: 23833 - DNA, 25 bp, Homo sapien
atcgacgttggtcaagaccctctct

SEQ ID NO: 23834 - DNA, 25 bp, Homo sapien
atcgacgttggtgaagaccctctct

SEQ ID NO: 23835 - DNA, 25 bp, Homo sapien
tggagccggcggaacagccccgact

SEQ ID NO: 23836 - DNA, 25 bp, Homo sapien
tggagccggcggtacagccccgact

SEQ ID NO: 23837 - DNA, 25 bp, Homo sapien
agacaaggtgggatctgtcccggtt

SEQ ID NO: 23838 - DNA, 25 bp, Homo sapien
agacaaggtgggttctgtcccggtt

SEQ ID NO: 23839 - DNA, 25 bp, Homo sapien
aagaggtcaagactcgtcctgtgtc

SEQ ID NO: 23840 - DNA, 25 bp, Homo sapien
aagaggtcaagagtcgtcctgtgtc

SEQ ID NO: 23841 - DNA, 25 bp, Homo sapien
ggttaaggaaggaatcacttacttc

SEQ ID NO: 23842 - DNA, 25 bp, Homo sapien
ggttaaggaaggtatcacttacttc

SEQ ID NO: 23843 - DNA, 25 bp, Homo sapien
gtattggtaaggtatcgcacacacc

SEQ ID NO: 23844 - DNA, 25 bp, Homo sapien
gtattggtaaggaatcgcacacacc

SEQ ID NO: 23845 - DNA, 25 bp, Homo sapien
cgagatgctaaagagtcgggaccta

SEQ ID NO: 23846 - DNA, 25 bp, Homo sapien
cgagatgctaaacagtcgggaccta

SEQ ID NO: 23847 - DNA, 25 bp, Homo sapien
ggacaaagtggacgtctgtcccacc

SEQ ID NO: 23848 - DNA, 25 bp, Homo sapien
ggacaaagtggaggtctgtcccacc

SEQ ID NO: 23849 - DNA, 25 bp, Homo sapien
agacaggccgaggagtatgtgcccc

SEQ ID NO: 23850 - DNA, 25 bp, Homo sapien
agacaggccgagcagtatgtgcccc

SEQ ID NO: 23851 - DNA, 25 bp, Homo sapien
aaattcagaaaggtagtaccccgag

SEQ ID NO: 23852 - DNA, 25 bp, Homo sapien
aaattcagaaagctagtaccccgag

SEQ ID NO: 23853 - DNA, 25 bp, Homo sapien
actactccaagagagggtgttccta

SEQ ID NO: 23854 - DNA, 25 bp, Homo sapien
actactccaagacagggtgttccta

SEQ ID NO: 23855 - DNA, 25 bp, Homo sapien
cagatcggaaacctggtttttctct

SEQ ID NO: 23856 - DNA, 25 bp, Homo sapien
cagatcggaaacgtggtttttctct

SEQ ID NO: 23857 - DNA, 25 bp, Homo sapien
catgggaaccggttctcgtaaggta

SEQ ID NO: 23858 - DNA, 25 bp, Homo sapien
catgggaaccggatctcgtaaggta

SEQ ID NO: 23859 - DNA, 25 bp, Homo sapien
tgacttgtcaatggacaaccctctg

SEQ ID NO: 23860 - DNA, 25 bp, Homo sapien
tgacttgtcaatcgacaaccctctg

SEQ ID NO: 23861 - DNA, 25 bp, Homo sapien
gtcggagactcgaatcgtcttctgt

SEQ ID NO: 23862 - DNA, 25 bp, Homo sapien
gtcggagactcgtatcgtcttctgt

SEQ ID NO: 23863 - DNA, 25 bp, Homo sapien
tttctgactgtcctaaatagtcact

SEQ ID NO: 23864 - DNA, 25 bp, Homo sapien
tttctgactgtcgtaaatagtcact

SEQ ID NO: 23865 - DNA, 25 bp, Homo sapien
aataacttacggttggaatactacc

SEQ ID NO: 23866 - DNA, 25 bp, Homo sapien
aataacttacggatggaatactacc

SEQ ID NO: 23867 - DNA, 25 bp, Homo sapien
aacgactatccgaacaagaagacct

SEQ ID NO: 23868 - DNA, 25 bp, Homo sapien
aacgactatccgtacaagaagacct

SEQ ID NO: 23869 - DNA, 25 bp, Homo sapien
gtgaaagatcccatgacaatgaccg

SEQ ID NO: 23870 - DNA, 25 bp, Homo sapien
gtgaaagatcccttgacaatgaccg

SEQ ID NO: 23871 - DNA, 25 bp, Homo sapien
gtaagaccgacgtcgcacatgtaat

SEQ ID NO: 23872 - DNA, 25 bp, Homo sapien
gtaagaccgacgacgcacatgtaat

SEQ ID NO: 23873 - DNA, 25 bp, Homo sapien
ctgacaaccgacgagacatgtgtag

SEQ ID NO: 23874 - DNA, 25 bp, Homo sapien
ctgacaaccgaccagacatgtgtag

SEQ ID NO: 23875 - DNA, 25 bp, Homo sapien
tgacagatggaccaacgatgtactt

SEQ ID NO: 23876 - DNA, 25 bp, Homo sapien
tgacagatggacgaacgatgtactt

SEQ ID NO: 23877 - DNA, 25 bp, Homo sapien
cgtatgtcaggtgtccgataagtgt

SEQ ID NO: 23878 - DNA, 25 bp, Homo sapien
cgtatgtcaggtctccgataagtgt

SEQ ID NO: 23879 - DNA, 25 bp, Homo sapien
gtgatactaaccactatcgttttcg

SEQ ID NO: 23880 - DNA, 25 bp, Homo sapien
gtgatactaacctctatcgttttcg

SEQ ID NO: 23881 - DNA, 25 bp, Homo sapien
ttccggttacgtgactcgtagttat

SEQ ID NO: 23882 - DNA, 25 bp, Homo sapien
ttccggttacgtcactcgtagttat

SEQ ID NO: 23883 - DNA, 25 bp, Homo sapien
acacggttaggatttcgtcgtctta

SEQ ID NO: 23884 - DNA, 25 bp, Homo sapien
acacggttaggaattcgtcgtctta

SEQ ID NO: 23885 - DNA, 25 bp, Homo sapien
ccgaacatgacgatgactgctcgag

SEQ ID NO: 23886 - DNA, 25 bp, Homo sapien
ccgaacatgacgttgactgctcgag

SEQ ID NO: 23887 - DNA, 25 bp, Homo sapien
gtggagactgtcagccgacgtcgac

SEQ ID NO: 23888 - DNA, 25 bp, Homo sapien
gtggagactgtctgccgacgtcgac

SEQ ID NO: 23889 - DNA, 25 bp, Homo sapien
agtgcttactgtctcgacgagttac

SEQ ID NO: 23890 - DNA, 25 bp, Homo sapien
agtgcttactgtgtcgacgagttac

SEQ ID NO: 23891 - DNA, 25 bp, Homo sapien
agtacaagacggagtgacacgacct

SEQ ID NO: 23892 - DNA, 25 bp, Homo sapien
agtacaagacggtgtgacacgacct

SEQ ID NO: 23893 - DNA, 25 bp, Homo sapien
taagtcagacagagtttttcacttt

SEQ ID NO: 23894 - DNA, 25 bp, Homo sapien
taagtcagacagtgtttttcacttt

SEQ ID NO: 23895 - DNA, 25 bp, Homo sapien
gaataaaggagtatcttttcccctt

SEQ ID NO: 23896 - DNA, 25 bp, Homo sapien
gaataaaggagtttcttttcccctt

SEQ ID NO: 23897 - DNA, 25 bp, Homo sapien
attacggaaccttgggattcctctt

SEQ ID NO: 23898 - DNA, 25 bp, Homo sapien
attacggaacctagggattcctctt

SEQ ID NO: 23899 - DNA, 25 bp, Homo sapien
tgactggaaagagatcttccgctag

SEQ ID NO: 23900 - DNA, 25 bp, Homo sapien
tgactggaaagacatcttccgctag

SEQ ID NO: 23901 - DNA, 25 bp, Homo sapien
tccttagtatcacagtcactccagg

SEQ ID NO: 23902 - DNA, 25 bp, Homo sapien
tccttagtatcagagtcactccagg

SEQ ID NO: 23903 - DNA, 25 bp, Homo sapien
gctcccgttcacgtcggtcggcaaa

SEQ ID NO: 23904 - DNA, 25 bp, Homo sapien
gctcccgttcacctcggtcggcaaa

SEQ ID NO: 23905 - DNA, 25 bp, Homo sapien
actctgacgctactctgacagagac

SEQ ID NO: 23906 - DNA, 25 bp, Homo sapien
actctgacgctagtctgacagagac

SEQ ID NO: 23907 - DNA, 25 bp, Homo sapien
tattcggtggacgtctccgacagac

SEQ ID NO: 23908 - DNA, 25 bp, Homo sapien
tattcggtggacctctccgacagac

SEQ ID NO: 23909 - DNA, 25 bp, Homo sapien
gttcttcctggacctctccgactgc

SEQ ID NO: 23910 - DNA, 25 bp, Homo sapien
gttcttcctggagctctccgactgc

SEQ ID NO: 23911 - DNA, 25 bp, Homo sapien
ttctatgttaagaacttcgtcaaag

SEQ ID NO: 23912 - DNA, 25 bp, Homo sapien
ttctatgttaagtacttcgtcaaag

SEQ ID NO: 23913 - DNA, 25 bp, Homo sapien
tgtacattctaatactttacaagtt

SEQ ID NO: 23914 - DNA, 25 bp, Homo sapien
tgtacattctaaaactttacaagtt

SEQ ID NO: 23915 - DNA, 25 bp, Homo sapien
ggttcctcactaaaggtttctcatt

SEQ ID NO: 23916 - DNA, 25 bp, Homo sapien
ggttcctcactataggtttctcatt

SEQ ID NO: 23917 - DNA, 25 bp, Homo sapien
aacacgacccggaactgttggcaag

SEQ ID NO: 23918 - DNA, 25 bp, Homo sapien
aacacgacccggtactgttggcaag

SEQ ID NO: 23919 - DNA, 25 bp, Homo sapien
aaacatcctcggttgtttgacatgt

SEQ ID NO: 23920 - DNA, 25 bp, Homo sapien
aaacatcctcggatgtttgacatgt

SEQ ID NO: 23921 - DNA, 25 bp, Homo sapien
taaatcctcgtttggacagtcctct

SEQ ID NO: 23922 - DNA, 25 bp, Homo sapien
taaatcctcgttaggacagtcctct

SEQ ID NO: 23923 - DNA, 25 bp, Homo sapien
aaacggtttttctgatacgatcttc

SEQ ID NO: 23924 - DNA, 25 bp, Homo sapien
aaacggtttttcagatacgatcttc

SEQ ID NO: 23925 - DNA, 25 bp, Homo sapien
ataccatctctttgagtcgttcgaa

SEQ ID NO: 23926 - DNA, 25 bp, Homo sapien
ataccatctcttagagtcgttcgaa

SEQ ID NO: 23927 - DNA, 25 bp, Homo sapien
gaaattactgaagtgaacgtacact

SEQ ID NO: 23928 - DNA, 25 bp, Homo sapien
gaaattactgaactgaacgtacact

SEQ ID NO: 23929 - DNA, 25 bp, Homo sapien
taggaactttagacatcagtatctc

SEQ ID NO: 23930 - DNA, 25 bp, Homo sapien
taggaactttagtcatcagtatctc

SEQ ID NO: 23931 - DNA, 25 bp, Homo sapien
agaacgttgtttcacatacctgtac

SEQ ID NO: 23932 - DNA, 25 bp, Homo sapien
agaacgttgtttgacatacctgtac

SEQ ID NO: 23933 - DNA, 25 bp, Homo sapien
tctgtcgtagtggtgtctgaccttt

SEQ ID NO: 23934 - DNA, 25 bp, Homo sapien
tctgtcgtagtgctgtctgaccttt

SEQ ID NO: 23935 - DNA, 25 bp, Homo sapien
gaaataactctcctttgtaccagtg

SEQ ID NO: 23936 - DNA, 25 bp, Homo sapien
gaaataactctcgtttgtaccagtg

SEQ ID NO: 23937 - DNA, 25 bp, Homo sapien
taaagtcctctcagtgtttattatg

SEQ ID NO: 23938 - DNA, 25 bp, Homo sapien
taaagtcctctctgtgtttattatg

SEQ ID NO: 23939 - DNA, 25 bp, Homo sapien
taaaagtcctctctgaaatgtagac

SEQ ID NO: 23940 - DNA, 25 bp, Homo sapien
taaaagtcctctgtgaaatgtagac

SEQ ID NO: 23941 - DNA, 25 bp, Homo sapien
caagtgtgtcaagtgcaagtgcgat

SEQ ID NO: 23942 - DNA, 25 bp, Homo sapien
caagtgtgtcaactgcaagtgcgat

SEQ ID NO: 23943 - DNA, 25 bp, Homo sapien
ctttagtactaagtagaccaatgtt

SEQ ID NO: 23944 - DNA, 25 bp, Homo sapien
ctttagtactaactagaccaatgtt

SEQ ID NO: 23945 - DNA, 25 bp, Homo sapien
tttattacgaaagacgacccaggtt

SEQ ID NO: 23946 - DNA, 25 bp, Homo sapien
tttattacgaaacacgacccaggtt

SEQ ID NO: 23947 - DNA, 25 bp, Homo sapien
ttcttatcggaagatatctccgttt

SEQ ID NO: 23948 - DNA, 25 bp, Homo sapien
ttcttatcggaacatatctccgttt

SEQ ID NO: 23949 - DNA, 25 bp, Homo sapien
ctttgtggagaaacggaatcctaga

SEQ ID NO: 23950 - DNA, 25 bp, Homo sapien
ctttgtggagaatcggaatcctaga

SEQ ID NO: 23951 - DNA, 25 bp, Homo sapien
attgtgtttatcctcgcaaatgata

SEQ ID NO: 23952 - DNA, 25 bp, Homo sapien
attgtgtttatcgtcgcaaatgata

SEQ ID NO: 23953 - DNA, 25 bp, Homo sapien
cccaggactcctctgcagaaataag

SEQ ID NO: 23954 - DNA, 25 bp, Homo sapien
cccaggactcctgtgcagaaataag

SEQ ID NO: 23955 - DNA, 25 bp, Homo sapien
taaggactccaggtgggaacagtaa

SEQ ID NO: 23956 - DNA, 25 bp, Homo sapien
taaggactccagctgggaacagtaa

SEQ ID NO: 23957 - DNA, 25 bp, Homo sapien
agtacgaccccactggggaagtgtt

SEQ ID NO: 23958 - DNA, 25 bp, Homo sapien
agtacgaccccagtggggaagtgtt

SEQ ID NO: 23959 - DNA, 25 bp, Homo sapien
cctccctaacgttggtctcaagtat

SEQ ID NO: 23960 - DNA, 25 bp, Homo sapien
cctccctaacgtaggtctcaagtat

SEQ ID NO: 23961 - DNA, 25 bp, Homo sapien
tcgtactcctcagaaggtccgaaga

SEQ ID NO: 23962 - DNA, 25 bp, Homo sapien
tcgtactcctcacaaggtccgaaga

SEQ ID NO: 23963 - DNA, 25 bp, Homo sapien
tagacatctctcacaggtggaacac

SEQ ID NO: 23964 - DNA, 25 bp, Homo sapien
tagacatctctctcaggtggaacac

SEQ ID NO: 23965 - DNA, 25 bp, Homo sapien
tcacactcctacatgaccgggaaca

SEQ ID NO: 23966 - DNA, 25 bp, Homo sapien
tcacactcctacttgaccgggaaca

SEQ ID NO: 23967 - DNA, 25 bp, Homo sapien
acaacaccacaactacctagacaga

SEQ ID NO: 23968 - DNA, 25 bp, Homo sapien
acaacaccacaagtacctagacaga

SEQ ID NO: 23969 - DNA, 25 bp, Homo sapien
gtccgggacccaaggaccacgagga

SEQ ID NO: 23970 - DNA, 25 bp, Homo sapien
gtccgggacccatggaccacgagga

SEQ ID NO: 23971 - DNA, 25 bp, Homo sapien
tggtctgggaccacatccccagaag

SEQ ID NO: 23972 - DNA, 25 bp, Homo sapien
tggtctgggacctcatccccagaag

SEQ ID NO: 23973 - DNA, 25 bp, Homo sapien
tagacgtcctcgacccggcagacgg

SEQ ID NO: 23974 - DNA, 25 bp, Homo sapien
tagacgtcctcgtcccggcagacgg

SEQ ID NO: 23975 - DNA, 25 bp, Homo sapien
tggtggtacgcctcgccgtgacact

SEQ ID NO: 23976 - DNA, 25 bp, Homo sapien
tggtggtacgccacgccgtgacact

SEQ ID NO: 23977 - DNA, 25 bp, Homo sapien
ggttcgggttgtctcgagtttcctt

SEQ ID NO: 23978 - DNA, 25 bp, Homo sapien
ggttcgggttgtgtcgagtttcctt

SEQ ID NO: 23979 - DNA, 25 bp, Homo sapien
ctaacggaggtttaggtcttctggt

SEQ ID NO: 23980 - DNA, 25 bp, Homo sapien
ctaacggaggttaaggtcttctggt

SEQ ID NO: 23981 - DNA, 25 bp, Homo sapien
gtacactagaaggaaggcacttcac

SEQ ID NO: 23982 - DNA, 25 bp, Homo sapien
gtacactagaagcaaggcacttcac

SEQ ID NO: 23983 - DNA, 25 bp, Homo sapien
cgcacatgaccaagaggtcctacac

SEQ ID NO: 23984 - DNA, 25 bp, Homo sapien
cgcacatgaccatgaggtcctacac

SEQ ID NO: 23985 - DNA, 25 bp, Homo sapien
gagacgggacactacggttccttcg

SEQ ID NO: 23986 - DNA, 25 bp, Homo sapien
gagacgggacacaacggttccttcg

SEQ ID NO: 23987 - DNA, 25 bp, Homo sapien
ctcgacctgaagtgtgggtctgcgt

SEQ ID NO: 23988 - DNA, 25 bp, Homo sapien
ctcgacctgaagagtgggtctgcgt

SEQ ID NO: 23989 - DNA, 25 bp, Homo sapien
ctgtccgtcgagacctaggccaggt

SEQ ID NO: 23990 - DNA, 25 bp, Homo sapien
ctgtccgtcgagtcctaggccaggt

SEQ ID NO: 23991 - DNA, 25 bp, Homo sapien
tccgtcgtaggtgaggtacttccgg

SEQ ID NO: 23992 - DNA, 25 bp, Homo sapien
tccgtcgtaggtcaggtacttccgg

SEQ ID NO: 23993 - DNA, 25 bp, Homo sapien
gtttcgacggtccgtcgcgttggag

SEQ ID NO: 23994 - DNA, 25 bp, Homo sapien
gtttcgacggtcggtcgcgttggag

SEQ ID NO: 23995 - DNA, 25 bp, Homo sapien
atggttgtcaatcagaccctgagac

SEQ ID NO: 23996 - DNA, 25 bp, Homo sapien
atggttgtcaatgagaccctgagac

SEQ ID NO: 23997 - DNA, 25 bp, Homo sapien
cctttccgtgatgtaggtggtcgga

SEQ ID NO: 23998 - DNA, 25 bp, Homo sapien
cctttccgtgatctaggtggtcgga

SEQ ID NO: 23999 - DNA, 25 bp, Homo sapien
attaagttaccctgttgacacgaag

SEQ ID NO: 24000 - DNA, 25 bp, Homo sapien
attaagttacccagttgacacgaag

SEQ ID NO: 24001 - DNA, 25 bp, Homo sapien
tattatagagacacgggaagacact

SEQ ID NO: 24002 - DNA, 25 bp, Homo sapien
tattatagagactcgggaagacact

SEQ ID NO: 24003 - DNA, 25 bp, Homo sapien
tcacgatatattcatactcggtaaa

SEQ ID NO: 24004 - DNA, 25 bp, Homo sapien
tcacgatatattgatactcggtaaa

SEQ ID NO: 24005 - DNA, 25 bp, Homo sapien
gtaacagatttaagtcatcgaactc

SEQ ID NO: 24006 - DNA, 25 bp, Homo sapien
gtaacagatttatgtcatcgaactc

SEQ ID NO: 24007 - DNA, 25 bp, Homo sapien
gaagggtcggttatctttgactatc

SEQ ID NO: 24008 - DNA, 25 bp, Homo sapien
gaagggtcggttttctttgactatc

SEQ ID NO: 24009 - DNA, 25 bp, Homo sapien
gaaggtgggttctttccttgtagtc

SEQ ID NO: 24010 - DNA, 25 bp, Homo sapien
gaaggtgggttcattccttgtagtc

SEQ ID NO: 24011 - DNA, 25 bp, Homo sapien
ggtcgaggttcctcgtccttcgtcc

SEQ ID NO: 24012 - DNA, 25 bp, Homo sapien
ggtcgaggttccacgtccttcgtcc

SEQ ID NO: 24013 - DNA, 25 bp, Homo sapien
ggtatctcggatcattcccttctcc

SEQ ID NO: 24014 - DNA, 25 bp, Homo sapien
ggtatctcggatgattcccttctcc

SEQ ID NO: 24015 - DNA, 25 bp, Homo sapien
ggtcggttttcctcatacttagtcc

SEQ ID NO: 24016 - DNA, 25 bp, Homo sapien
ggtcggttttccacatacttagtcc

SEQ ID NO: 24017 - DNA, 25 bp, Homo sapien
tacagtgctcttacttttttagaac

SEQ ID NO: 24018 - DNA, 25 bp, Homo sapien
tacagtgctctttcttttttagaac

SEQ ID NO: 24019 - DNA, 25 bp, Homo sapien
aggacttcctcttcggtttaccgac

SEQ ID NO: 24020 - DNA, 25 bp, Homo sapien
aggacttcctctacggtttaccgac

SEQ ID NO: 24021 - DNA, 25 bp, Homo sapien
actttgtcatcttttaagttggtcc

SEQ ID NO: 24022 - DNA, 25 bp, Homo sapien
actttgtcatctattaagttggtcc

SEQ ID NO: 24023 - DNA, 25 bp, Homo sapien
tattccgttacacaattcgtgaccg

SEQ ID NO: 24024 - DNA, 25 bp, Homo sapien
tattccgttacagaattcgtgaccg

SEQ ID NO: 24025 - DNA, 25 bp, Homo sapien
gtttccgtagtacaattgtccgtcg

SEQ ID NO: 24026 - DNA, 25 bp, Homo sapien
gtttccgtagtagaattgtccgtcg

SEQ ID NO: 24027 - DNA, 25 bp, Homo sapien
tttccgacgggaacttcacgtacgt

SEQ ID NO: 24028 - DNA, 25 bp, Homo sapien
tttccgacgggatcttcacgtacgt

SEQ ID NO: 24029 - DNA, 25 bp, Homo sapien
tatcactagacgaacgttcacacgt

SEQ ID NO: 24030 - DNA, 25 bp, Homo sapien
tatcactagacgtacgttcacacgt

SEQ ID NO: 24031 - DNA, 25 bp, Homo sapien
cctttggagtctcaaacaatcacgg

SEQ ID NO: 24032 - DNA, 25 bp, Homo sapien
cctttggagtctgaaacaatcacgg

SEQ ID NO: 24033 - DNA, 25 bp, Homo sapien
aaaaggatccggaaacaataccgtt

SEQ ID NO: 24034 - DNA, 25 bp, Homo sapien
aaaaggatccggtaacaataccgtt

SEQ ID NO: 24035 - DNA, 25 bp, Homo sapien
cgaaagactgagacacgaacacgga

SEQ ID NO: 24036 - DNA, 25 bp, Homo sapien
cgaaagactgagtcacgaacacgga

SEQ ID NO: 24037 - DNA, 25 bp, Homo sapien
gtatacgaaattgagaccatcgtgt

SEQ ID NO: 24038 - DNA, 25 bp, Homo sapien
gtatacgaaattcagaccatcgtgt

SEQ ID NO: 24039 - DNA, 25 bp, Homo sapien
cgatacgaaccactgagaccacctt

SEQ ID NO: 24040 - DNA, 25 bp, Homo sapien
cgatacgaaccagtgagaccacctt

SEQ ID NO: 24041 - DNA, 25 bp, Homo sapien
aactatcgactgagggccaactgta

SEQ ID NO: 24042 - DNA, 25 bp, Homo sapien
aactatcgactgtgggccaactgta

SEQ ID NO: 24043 - DNA, 25 bp, Homo sapien
gattcggggtctctactgagttgac

SEQ ID NO: 24044 - DNA, 25 bp, Homo sapien
gattcggggtctgtactgagttgac

SEQ ID NO: 24045 - DNA, 25 bp, Homo sapien
atcccgaccgcgacggcctgcgcca

SEQ ID NO: 24046 - DNA, 25 bp, Homo sapien
atcccgaccgcgtcggcctgcgcca

SEQ ID NO: 24047 - DNA, 25 bp, Homo sapien
cactccaaagggtcgagtggcctag

SEQ ID NO: 24048 - DNA, 25 bp, Homo sapien
cactccaaagggacgagtggcctag

SEQ ID NO: 24049 - DNA, 25 bp, Homo sapien
atcccaacgggcaataacccgtagt

SEQ ID NO: 24050 - DNA, 25 bp, Homo sapien
atcccaacgggctataacccgtagt

SEQ ID NO: 24051 - DNA, 25 bp, Homo sapien
tcccctgtgacagaaactccgtagt

SEQ ID NO: 24052 - DNA, 25 bp, Homo sapien
tcccctgtgacacaaactccgtagt

SEQ ID NO: 24053 - DNA, 25 bp, Homo sapien
gcgccatgtggcagagctactacag

SEQ ID NO: 24054 - DNA, 25 bp, Homo sapien
gcgccatgtggctgagctactacag

SEQ ID NO: 24055 - DNA, 25 bp, Homo sapien
tgtctcgaattggtgtgtacctaaa

SEQ ID NO: 24056 - DNA, 25 bp, Homo sapien
tgtctcgaattgctgtgtacctaaa

SEQ ID NO: 24057 - DNA, 25 bp, Homo sapien
agaatcgactatcgacctgttgaaa

SEQ ID NO: 24058 - DNA, 25 bp, Homo sapien
agaatcgactatggacctgttgaaa

SEQ ID NO: 24059 - DNA, 25 bp, Homo sapien
ttgtacttaagaccaggagtctctt

SEQ ID NO: 24060 - DNA, 25 bp, Homo sapien
ttgtacttaagagcaggagtctctt

SEQ ID NO: 24061 - DNA, 25 bp, Homo sapien
cacacacagcgaggagtgattacct

SEQ ID NO: 24062 - DNA, 25 bp, Homo sapien
cacacacagcgacgagtgattacct

SEQ ID NO: 24063 - DNA, 25 bp, Homo sapien
gacccgaaggaccggtacggtaatg

SEQ ID NO: 24064 - DNA, 25 bp, Homo sapien
gacccgaaggacgggtacggtaatg

SEQ ID NO: 24065 - DNA, 25 bp, Homo sapien
aaacgacacccgtgtggtactagtc

SEQ ID NO: 24066 - DNA, 25 bp, Homo sapien
aaacgacacccgagtggtactagtc

SEQ ID NO: 24067 - DNA, 25 bp, Homo sapien
acgtaggtcactgactcttgatgtc

SEQ ID NO: 24068 - DNA, 25 bp, Homo sapien
acgtaggtcactcactcttgatgtc

SEQ ID NO: 24069 - DNA, 25 bp, Homo sapien
cccagtatagttaccatgggtggta

SEQ ID NO: 24070 - DNA, 25 bp, Homo sapien
cccagtatagtttccatgggtggta

SEQ ID NO: 24071 - DNA, 25 bp, Homo sapien
acccggaccgtgtccagggcacgaa

SEQ ID NO: 24072 - DNA, 25 bp, Homo sapien
acccggaccgtgaccagggcacgaa

SEQ ID NO: 24073 - DNA, 25 bp, Homo sapien
tgtgtcgccgggtgagaaacgactt

SEQ ID NO: 24074 - DNA, 25 bp, Homo sapien
tgtgtcgccgggagagaaacgactt

SEQ ID NO: 24075 - DNA, 25 bp, Homo sapien
tttaaggtgagtggtattacgatat

SEQ ID NO: 24076 - DNA, 25 bp, Homo sapien
tttaaggtgagtcgtattacgatat

SEQ ID NO: 24077 - DNA, 25 bp, Homo sapien
ttaacgacggaaacgtaatcgtaat

SEQ ID NO: 24078 - DNA, 25 bp, Homo sapien
ttaacgacggaatcgtaatcgtaat

SEQ ID NO: 24079 - DNA, 25 bp, Homo sapien
ccaagtttcgggtagtcaatataga

SEQ ID NO: 24080 - DNA, 25 bp, Homo sapien
ccaagtttcgggaagtcaatataga

SEQ ID NO: 24081 - DNA, 25 bp, Homo sapien
cgtttctccgagttacttaagtaat

SEQ ID NO: 24082 - DNA, 25 bp, Homo sapien
cgtttctccgagatacttaagtaat

SEQ ID NO: 24083 - DNA, 25 bp, Homo sapien
atgtcttagacgtgtttctttatag

SEQ ID NO: 24084 - DNA, 25 bp, Homo sapien
atgtcttagacgagtttctttatag

SEQ ID NO: 24085 - DNA, 25 bp, Homo sapien
atactagtaaactgtgtttgtacct

SEQ ID NO: 24086 - DNA, 25 bp, Homo sapien
atactagtaaacagtgtttgtacct

SEQ ID NO: 24087 - DNA, 25 bp, Homo sapien
ctcgacaccgttaattcctctgaag

SEQ ID NO: 24088 - DNA, 25 bp, Homo sapien
ctcgacaccgtttattcctctgaag

SEQ ID NO: 24089 - DNA, 25 bp, Homo sapien
atcttcggtggtcagagtccaagtg

SEQ ID NO: 24090 - DNA, 25 bp, Homo sapien
atcttcggtggtgagagtccaagtg

SEQ ID NO: 24091 - DNA, 25 bp, Homo sapien
gacgtgtttgaggaagtcactcagg

SEQ ID NO: 24092 - DNA, 25 bp, Homo sapien
gacgtgtttgagcaagtcactcagg

SEQ ID NO: 24093 - DNA, 25 bp, Homo sapien
acgggaggtaaagacatgttcctgg

SEQ ID NO: 24094 - DNA, 25 bp, Homo sapien
acgggaggtaaacacatgttcctgg

SEQ ID NO: 24095 - DNA, 25 bp, Homo sapien
ctagcggaagagcaactttaattag

SEQ ID NO: 24096 - DNA, 25 bp, Homo sapien
ctagcggaagaggaactttaattag

SEQ ID NO: 24097 - DNA, 25 bp, Homo sapien
ctgtgcctatttggacctttactaa

SEQ ID NO: 24098 - DNA, 25 bp, Homo sapien
ctgtgcctatttcgacctttactaa

SEQ ID NO: 24099 - DNA, 25 bp, Homo sapien
gacgtccgttttcctatcttgataa

SEQ ID NO: 24100 - DNA, 25 bp, Homo sapien
gacgtccgttttgctatcttgataa

SEQ ID NO: 24101 - DNA, 25 bp, Homo sapien
aaacttgtgtgtgtcctaggatcat

SEQ ID NO: 24102 - DNA, 25 bp, Homo sapien
aaacttgtgtgtctcctaggatcat

SEQ ID NO: 24103 - DNA, 25 bp, Homo sapien
ttcacctcaaagtacaggagccact

SEQ ID NO: 24104 - DNA, 25 bp, Homo sapien
ttcacctcaaagaacaggagccact

SEQ ID NO: 24105 - DNA, 25 bp, Homo sapien
tcacagcaagggaaccttcgctact

SEQ ID NO: 24106 - DNA, 25 bp, Homo sapien
tcacagcaagggtaccttcgctact

SEQ ID NO: 24107 - DNA, 25 bp, Homo sapien
tgtctcttccgatgtgctcgtccta

SEQ ID NO: 24108 - DNA, 25 bp, Homo sapien
tgtctcttccgaagtgctcgtccta

SEQ ID NO: 24109 - DNA, 25 bp, Homo sapien
ttagttcgtttatcgtcacgtatga

SEQ ID NO: 24110 - DNA, 25 bp, Homo sapien
ttagttcgtttaacgtcacgtatga

SEQ ID NO: 24111 - DNA, 25 bp, Homo sapien
ttcttgagtctggtagacgttcgtt

SEQ ID NO: 24112 - DNA, 25 bp, Homo sapien
ttcttgagtctgctagacgttcgtt

SEQ ID NO: 24113 - DNA, 25 bp, Homo sapien
aattcctgagtcaacatctcggtgt

SEQ ID NO: 24114 - DNA, 25 bp, Homo sapien
aattcctgagtctacatctcggtgt

SEQ ID NO: 24115 - DNA, 25 bp, Homo sapien
ttttcgtcaagactacttactaagg

SEQ ID NO: 24116 - DNA, 25 bp, Homo sapien
ttttcgtcaagagtacttactaagg

SEQ ID NO: 24117 - DNA, 25 bp, Homo sapien
cgtagctgtagtagcaatagccgtt

SEQ ID NO: 24118 - DNA, 25 bp, Homo sapien
cgtagctgtagttgcaatagccgtt

SEQ ID NO: 24119 - DNA, 25 bp, Homo sapien
accacttccactttccgtgcggcga

SEQ ID NO: 24120 - DNA, 25 bp, Homo sapien
accacttccactatccgtgcggcga

SEQ ID NO: 24121 - DNA, 25 bp, Homo sapien
agacaaccagacaaaaagaacccga

SEQ ID NO: 24122 - DNA, 25 bp, Homo sapien
agacaaccagactaaaagaacccga

SEQ ID NO: 24123 - DNA, 25 bp, Homo sapien
catctataacagaagacgaacctga

SEQ ID NO: 24124 - DNA, 25 bp, Homo sapien
catctataacagtagacgaacctga

SEQ ID NO: 24125 - DNA, 25 bp, Homo sapien
tctatgtaacgaggagaaactctac

SEQ ID NO: 24126 - DNA, 25 bp, Homo sapien
tctatgtaacgacgagaaactctac

SEQ ID NO: 24127 - DNA, 25 bp, Homo sapien
gtcgtttctcctcagtagtaagaag

SEQ ID NO: 24128 - DNA, 25 bp, Homo sapien
gtcgtttctcctgagtagtaagaag

SEQ ID NO: 24129 - DNA, 25 bp, Homo sapien
ctatgtgtctgtggtgactcatgtg

SEQ ID NO: 24130 - DNA, 25 bp, Homo sapien
ctatgtgtctgtcgtgactcatgtg

SEQ ID NO: 24131 - DNA, 25 bp, Homo sapien
tcttctgttagtgtgtaccacttac

SEQ ID NO: 24132 - DNA, 25 bp, Homo sapien
tcttctgttagtctgtaccacttac

SEQ ID NO: 24133 - DNA, 25 bp, Homo sapien
atctgtctcggatgattcattcgac

SEQ ID NO: 24134 - DNA, 25 bp, Homo sapien
atctgtctcggaagattcattcgac

SEQ ID NO: 24135 - DNA, 25 bp, Homo sapien
ggtccgctgttatgatacttattca

SEQ ID NO: 24136 - DNA, 25 bp, Homo sapien
ggtccgctgttaagatacttattca

SEQ ID NO: 24137 - DNA, 25 bp, Homo sapien
gtggtgtagacgtttcataccgtgt

SEQ ID NO: 24138 - DNA, 25 bp, Homo sapien
gtggtgtagacgattcataccgtgt

SEQ ID NO: 24139 - DNA, 25 bp, Homo sapien
tggggtgatactcactgatactctg

SEQ ID NO: 24140 - DNA, 25 bp, Homo sapien
tggggtgatactgactgatactctg

SEQ ID NO: 24141 - DNA, 25 bp, Homo sapien
cgcggctagcacaacgacggcgcta

SEQ ID NO: 24142 - DNA, 25 bp, Homo sapien
cgcggctagcactacgacggcgcta

SEQ ID NO: 24143 - DNA, 25 bp, Homo sapien
ggaccacgagactcgaccggcggac

SEQ ID NO: 24144 - DNA, 25 bp, Homo sapien
ggaccacgagacacgaccggcggac

SEQ ID NO: 24145 - DNA, 25 bp, Homo sapien
tcgtccgaccggtagacgtggtcac

SEQ ID NO: 24146 - DNA, 25 bp, Homo sapien
tcgtccgaccggaagacgtggtcac

SEQ ID NO: 24147 - DNA, 25 bp, Homo sapien
gtcgttgtactttcatatgaacact

SEQ ID NO: 24148 - DNA, 25 bp, Homo sapien
gtcgttgtacttacatatgaacact

SEQ ID NO: 24149 - DNA, 25 bp, Homo sapien
tggtagtgtattcacaacctacatt

SEQ ID NO: 24150 - DNA, 25 bp, Homo sapien
tggtagtgtattgacaacctacatt

SEQ ID NO: 24151 - DNA, 25 bp, Homo sapien
tgtggtagtcgtttcacagggtttc

SEQ ID NO: 24152 - DNA, 25 bp, Homo sapien
tgtggtagtcgtatcacagggtttc

SEQ ID NO: 24153 - DNA, 25 bp, Homo sapien
tagttgtggtggatcaaaccgttct

SEQ ID NO: 24154 - DNA, 25 bp, Homo sapien
tagttgtggtggttcaaaccgttct

SEQ ID NO: 24155 - DNA, 25 bp, Homo sapien
gtaggggatctttccggaggtctct

SEQ ID NO: 24156 - DNA, 25 bp, Homo sapien
gtaggggatcttaccggaggtctct

SEQ ID NO: 24157 - DNA, 25 bp, Homo sapien
tcagatgatagtttgacttttctac

SEQ ID NO: 24158 - DNA, 25 bp, Homo sapien
tcagatgatagtatgacttttctac

SEQ ID NO: 24159 - DNA, 25 bp, Homo sapien
tagtaaggtgtaccagactttgttc

SEQ ID NO: 24160 - DNA, 25 bp, Homo sapien
tagtaaggtgtagcagactttgttc

SEQ ID NO: 24161 - DNA, 25 bp, Homo sapien
gacttgaagtagaagtcttctgatt

SEQ ID NO: 24162 - DNA, 25 bp, Homo sapien
gacttgaagtagtagtcttctgatt

SEQ ID NO: 24163 - DNA, 25 bp, Homo sapien
gtgactccgtaaaatctgttttata

SEQ ID NO: 24164 - DNA, 25 bp, Homo sapien
gtgactccgtaatatctgttttata

SEQ ID NO: 24165 - DNA, 25 bp, Homo sapien
ggattaaagaaattcctcttgactt

SEQ ID NO: 24166 - DNA, 25 bp, Homo sapien
ggattaaagaaaatcctcttgactt

SEQ ID NO: 24167 - DNA, 25 bp, Homo sapien
agacacagacaaaacagtttccggt

SEQ ID NO: 24168 - DNA, 25 bp, Homo sapien
agacacagacaatacagtttccggt

SEQ ID NO: 24169 - DNA, 25 bp, Homo sapien
taagtggacgaaatatacttcttgc

SEQ ID NO: 24170 - DNA, 25 bp, Homo sapien
taagtggacgaattatacttcttgc

SEQ ID NO: 24171 - DNA, 25 bp, Homo sapien
gtcggggactattaacttatctatc

SEQ ID NO: 24172 - DNA, 25 bp, Homo sapien
gtcggggactataaacttatctatc

SEQ ID NO: 24173 - DNA, 25 bp, Homo sapien
gtcgttctgtcagtaccataacaac

SEQ ID NO: 24174 - DNA, 25 bp, Homo sapien
gtcgttctgtcactaccataacaac

SEQ ID NO: 24175 - DNA, 25 bp, Homo sapien
catcgttttcagacactaaagagac

SEQ ID NO: 24176 - DNA, 25 bp, Homo sapien
catcgttttcagtcactaaagagac

SEQ ID NO: 24177 - DNA, 25 bp, Homo sapien
tttcgtgtcactttctagtggatat

SEQ ID NO: 24178 - DNA, 25 bp, Homo sapien
tttcgtgtcactatctagtggatat

SEQ ID NO: 24179 - DNA, 25 bp, Homo sapien
ttctcttccctatctctcgtgagag

SEQ ID NO: 24180 - DNA, 25 bp, Homo sapien
ttctcttccctaactctcgtgagag

SEQ ID NO: 24181 - DNA, 25 bp, Homo sapien
cctatttgtcccttcacttgtgaag

SEQ ID NO: 24182 - DNA, 25 bp, Homo sapien
cctatttgtcccatcacttgtgaag

SEQ ID NO: 24183 - DNA, 25 bp, Homo sapien
ttaacgtgttacatcacttgtgttg

SEQ ID NO: 24184 - DNA, 25 bp, Homo sapien
ttaacgtgttacttcacttgtgttg

SEQ ID NO: 24185 - DNA, 25 bp, Homo sapien
aagcgtacgacaggacagcggtgac

SEQ ID NO: 24186 - DNA, 25 bp, Homo sapien
aagcgtacgacacgacagcggtgac

SEQ ID NO: 24187 - DNA, 25 bp, Homo sapien
tcgaccgaccgagtcaccggagacg

SEQ ID NO: 24188 - DNA, 25 bp, Homo sapien
tcgaccgaccgactcaccggagacg

SEQ ID NO: 24189 - DNA, 25 bp, Homo sapien
acgtcgagcccgtcgcaccgtgggt

SEQ ID NO: 24190 - DNA, 25 bp, Homo sapien
acgtcgagcccgacgcaccgtgggt

SEQ ID NO: 24191 - DNA, 25 bp, Homo sapien
gacccgtaccggtccgacacggggt

SEQ ID NO: 24192 - DNA, 25 bp, Homo sapien
gacccgtaccggaccgacacggggt

SEQ ID NO: 24193 - DNA, 25 bp, Homo sapien
atccgtcccgtgaaccgtcggggag

SEQ ID NO: 24194 - DNA, 25 bp, Homo sapien
atccgtcccgtgtaccgtcggggag

SEQ ID NO: 24195 - DNA, 25 bp, Homo sapien
tcttcgacccggtcctgtgcgagag

SEQ ID NO: 24196 - DNA, 25 bp, Homo sapien
tcttcgacccggacctgtgcgagag

SEQ ID NO: 24197 - DNA, 25 bp, Homo sapien
ctttcagtcgggtcacagtccgaca

SEQ ID NO: 24198 - DNA, 25 bp, Homo sapien
ctttcagtcgggacacagtccgaca

SEQ ID NO: 24199 - DNA, 25 bp, Homo sapien
caattcggttcattgacatccacag

SEQ ID NO: 24200 - DNA, 25 bp, Homo sapien
caattcggttcaatgacatccacag

SEQ ID NO: 24201 - DNA, 25 bp, Homo sapien
ctgagtagtaaataccgatactgaa

SEQ ID NO: 24202 - DNA, 25 bp, Homo sapien
ctgagtagtaaaaaccgatactgaa

SEQ ID NO: 24203 - DNA, 25 bp, Homo sapien
accatcttccacatcgagagtgtaa

SEQ ID NO: 24204 - DNA, 25 bp, Homo sapien
accatcttccacttcgagagtgtaa

SEQ ID NO: 24205 - DNA, 25 bp, Homo sapien
tcgacgacctctcactctttgtgaa

SEQ ID NO: 24206 - DNA, 25 bp, Homo sapien
tcgacgacctctgactctttgtgaa

SEQ ID NO: 24207 - DNA, 25 bp, Homo sapien
tccgtacgaactgctacgcgtgtca

SEQ ID NO: 24208 - DNA, 25 bp, Homo sapien
tccgtacgaactcctacgcgtgtca

SEQ ID NO: 24209 - DNA, 25 bp, Homo sapien
tggtttccagtgtctgtacgcaaca

SEQ ID NO: 24210 - DNA, 25 bp, Homo sapien
tggtttccagtgactgtacgcaaca

SEQ ID NO: 24211 - DNA, 25 bp, Homo sapien
tattgtccagagtaaacactgacga

SEQ ID NO: 24212 - DNA, 25 bp, Homo sapien
tattgtccagagaaaacactgacga

SEQ ID NO: 24213 - DNA, 25 bp, Homo sapien
ggtactcaggagaacgacacaccct

SEQ ID NO: 24214 - DNA, 25 bp, Homo sapien
ggtactcaggagtacgacacaccct

SEQ ID NO: 24215 - DNA, 25 bp, Homo sapien
ccgactttaggctcgacacaccgta

SEQ ID NO: 24216 - DNA, 25 bp, Homo sapien
ccgactttaggcacgacacaccgta

SEQ ID NO: 24217 - DNA, 25 bp, Homo sapien
ccactgggacaaggaccgatactcg

SEQ ID NO: 24218 - DNA, 25 bp, Homo sapien
ccactgggacaacgaccgatactcg

SEQ ID NO: 24219 - DNA, 25 bp, Homo sapien
tcaaccgaaggaaaccctactctcg

SEQ ID NO: 24220 - DNA, 25 bp, Homo sapien
tcaaccgaaggataccctactctcg

SEQ ID NO: 24221 - DNA, 25 bp, Homo sapien
cgcgaacaggacgtgcaacatcctc

SEQ ID NO: 24222 - DNA, 25 bp, Homo sapien
cgcgaacaggacctgcaacatcctc

SEQ ID NO: 24223 - DNA, 25 bp, Homo sapien
aagaaggacagcgacgacaaccgct

SEQ ID NO: 24224 - DNA, 25 bp, Homo sapien
aagaaggacagccacgacaaccgct

SEQ ID NO: 24225 - DNA, 25 bp, Homo sapien
gaagacgcacatcaccaacacgtct

SEQ ID NO: 24226 - DNA, 25 bp, Homo sapien
gaagacgcacatgaccaacacgtct

SEQ ID NO: 24227 - DNA, 25 bp, Homo sapien
gatacaacgtcaggtcccattacac

SEQ ID NO: 24228 - DNA, 25 bp, Homo sapien
gatacaacgtcacgtcccattacac

SEQ ID NO: 24229 - DNA, 25 bp, Homo sapien
aagaaaaggtccatcttcgagggac

SEQ ID NO: 24230 - DNA, 25 bp, Homo sapien
aagaaaaggtccttcttcgagggac

SEQ ID NO: 24231 - DNA, 25 bp, Homo sapien
tatatacgggtgtttttgaccagac

SEQ ID NO: 24232 - DNA, 25 bp, Homo sapien
tatatacgggtgattttgaccagac

SEQ ID NO: 24233 - DNA, 25 bp, Homo sapien
agtcacgagctgttaatcaataata

SEQ ID NO: 24234 - DNA, 25 bp, Homo sapien
agtcacgagctgataatcaataata

SEQ ID NO: 24235 - DNA, 25 bp, Homo sapien
tttgagaacttagaatgtacacact

SEQ ID NO: 24236 - DNA, 25 bp, Homo sapien
tttgagaacttacaatgtacacact

SEQ ID NO: 24237 - DNA, 25 bp, Homo sapien
atcggggagttccaagtcgagaccg

SEQ ID NO: 24238 - DNA, 25 bp, Homo sapien
atcggggagttcgaagtcgagaccg

SEQ ID NO: 24239 - DNA, 25 bp, Homo sapien
cgaagtcggccgacgacgtcgagcc

SEQ ID NO: 24240 - DNA, 25 bp, Homo sapien
cgaagtcggccgtcgacgtcgagcc

SEQ ID NO: 24241 - DNA, 25 bp, Homo sapien
ggacgtcgtcttttatccacatcct

SEQ ID NO: 24242 - DNA, 25 bp, Homo sapien
ggacgtcgtcttatatccacatcct

SEQ ID NO: 24243 - DNA, 25 bp, Homo sapien
ctggaactcctaacaacggaagaac

SEQ ID NO: 24244 - DNA, 25 bp, Homo sapien
ctggaactcctatcaacggaagaac

SEQ ID NO: 24245 - DNA, 25 bp, Homo sapien
cgtcggacgccatccgcatcaggag

SEQ ID NO: 24246 - DNA, 25 bp, Homo sapien
cgtcggacgccaaccgcatcaggag

SEQ ID NO: 24247 - DNA, 25 bp, Homo sapien
acgggccgagacgacagacactacc

SEQ ID NO: 24248 - DNA, 25 bp, Homo sapien
acgggccgagaccacagacactacc

SEQ ID NO: 24249 - DNA, 25 bp, Homo sapien
gacgggtcctcgattactcaaccct

SEQ ID NO: 24250 - DNA, 25 bp, Homo sapien
gacgggtcctcgtttactcaaccct

SEQ ID NO: 24251 - DNA, 25 bp, Homo sapien
cggtgcctctagaagtacgacaccc

SEQ ID NO: 24252 - DNA, 25 bp, Homo sapien
cggtgcctctagtagtacgacaccc

SEQ ID NO: 24253 - DNA, 25 bp, Homo sapien
agtgaacgatacgtggactactgct

SEQ ID NO: 24254 - DNA, 25 bp, Homo sapien
agtgaacgatacctggactactgct

SEQ ID NO: 24255 - DNA, 25 bp, Homo sapien
agggtgacgacgacctcgttcctcc

SEQ ID NO: 24256 - DNA, 25 bp, Homo sapien
agggtgacgacgtcctcgttcctcc

SEQ ID NO: 24257 - DNA, 25 bp, Homo sapien
tggtccacactttgtgcgacgttct

SEQ ID NO: 24258 - DNA, 25 bp, Homo sapien
tggtccacacttagtgcgacgttct

SEQ ID NO: 24259 - DNA, 25 bp, Homo sapien
tttggtccccacgtcatcctagagc

SEQ ID NO: 24260 - DNA, 25 bp, Homo sapien
tttggtccccacctcatcctagagc

SEQ ID NO: 24261 - DNA, 25 bp, Homo sapien
tgttgtttcgtcgtcctttgtcccg

SEQ ID NO: 24262 - DNA, 25 bp, Homo sapien
tgttgtttcgtcctcctttgtcccg

SEQ ID NO: 24263 - DNA, 25 bp, Homo sapien
gtggttttacctgtactctaacctc

SEQ ID NO: 24264 - DNA, 25 bp, Homo sapien
gtggttttacctctactctaacctc

SEQ ID NO: 24265 - DNA, 25 bp, Homo sapien
gtgtctgtatcgtctcccacgtcct

SEQ ID NO: 24266 - DNA, 25 bp, Homo sapien
gtgtctgtatcgactcccacgtcct

SEQ ID NO: 24267 - DNA, 25 bp, Homo sapien
ctctgattgttatcaccgacgtctt

SEQ ID NO: 24268 - DNA, 25 bp, Homo sapien
ctctgattgttaacaccgacgtctt

SEQ ID NO: 24269 - DNA, 25 bp, Homo sapien
gaggtttctgttacgggcgacttgt

SEQ ID NO: 24270 - DNA, 25 bp, Homo sapien
gaggtttctgtttcgggcgacttgt

SEQ ID NO: 24271 - DNA, 25 bp, Homo sapien
tggtgtcacactttccctgtggtgg

SEQ ID NO: 24272 - DNA, 25 bp, Homo sapien
tggtgtcacactatccctgtggtgg

SEQ ID NO: 24273 - DNA, 25 bp, Homo sapien
ttctttctacgtatccatggtattg

SEQ ID NO: 24274 - DNA, 25 bp, Homo sapien
ttctttctacgtttccatggtattg

SEQ ID NO: 24275 - DNA, 25 bp, Homo sapien
tactctgtgtggtcacaccggaaca

SEQ ID NO: 24276 - DNA, 25 bp, Homo sapien
tactctgtgtggacacaccggaaca

SEQ ID NO: 24277 - DNA, 25 bp, Homo sapien
tctgactatggtcaactggacaaca

SEQ ID NO: 24278 - DNA, 25 bp, Homo sapien
tctgactatggtgaactggacaaca

SEQ ID NO: 24279 - DNA, 25 bp, Homo sapien
ttttatatgtgacctggacgtcaat

SEQ ID NO: 24280 - DNA, 25 bp, Homo sapien
ttttatatgtgagctggacgtcaat

SEQ ID NO: 24281 - DNA, 25 bp, Homo sapien
tagtgtttgattacacacctttccg

SEQ ID NO: 24282 - DNA, 25 bp, Homo sapien
tagtgtttgatttcacacctttccg

SEQ ID NO: 24283 - DNA, 25 bp, Homo sapien
gtgttgaggagtacaactgagcacc

SEQ ID NO: 24284 - DNA, 25 bp, Homo sapien
gtgttgaggagttcaactgagcacc

SEQ ID NO: 24285 - DNA, 25 bp, Homo sapien
gtttcaggacgcacgttgtagccct

SEQ ID NO: 24286 - DNA, 25 bp, Homo sapien
gtttcaggacgctcgttgtagccct

SEQ ID NO: 24287 - DNA, 25 bp, Homo sapien
ggtgttgtgaagtgtaccacgtttc

SEQ ID NO: 24288 - DNA, 25 bp, Homo sapien
ggtgttgtgaagagtaccacgtttc

SEQ ID NO: 24289 - DNA, 25 bp, Homo sapien
cttgttttgatgaagacatttctct

SEQ ID NO: 24290 - DNA, 25 bp, Homo sapien
cttgttttgatgtagacatttctct

SEQ ID NO: 24291 - DNA, 25 bp, Homo sapien
cttatacaacgttagagtttcgttt

SEQ ID NO: 24292 - DNA, 25 bp, Homo sapien
cttatacaacgtaagagtttcgttt

SEQ ID NO: 24293 - DNA, 25 bp, Homo sapien
acactagtcgaggttgactcctttc

SEQ ID NO: 24294 - DNA, 25 bp, Homo sapien
acactagtcgagcttgactcctttc

SEQ ID NO: 24295 - DNA, 25 bp, Homo sapien
ggtctgagtctctcccgtacgtacg

SEQ ID NO: 24296 - DNA, 25 bp, Homo sapien
ggtctgagtctcacccgtacgtacg

SEQ ID NO: 24297 - DNA, 25 bp, Homo sapien
tcgtcgtcgttctgccctcgtatct

SEQ ID NO: 24298 - DNA, 25 bp, Homo sapien
tcgtcgtcgttcagccctcgtatct

SEQ ID NO: 24299 - DNA, 25 bp, Homo sapien
tgtcggtacgttgtctccggatcgt

SEQ ID NO: 24300 - DNA, 25 bp, Homo sapien
tgtcggtacgttctctccggatcgt

SEQ ID NO: 24301 - DNA, 25 bp, Homo sapien
atgtggtacgtatcccggcgagaag

SEQ ID NO: 24302 - DNA, 25 bp, Homo sapien
atgtggtacgtaacccggcgagaag

SEQ ID NO: 24303 - DNA, 25 bp, Homo sapien
ttctctcaactacctcggtgactgg

SEQ ID NO: 24304 - DNA, 25 bp, Homo sapien
ttctctcaactagctcggtgactgg

SEQ ID NO: 24305 - DNA, 25 bp, Homo sapien
gttctacgaatataccgagaccgag

SEQ ID NO: 24306 - DNA, 25 bp, Homo sapien
gttctacgaataaaccgagaccgag

SEQ ID NO: 24307 - DNA, 25 bp, Homo sapien
aatataaagtcacgtctacgaatag

SEQ ID NO: 24308 - DNA, 25 bp, Homo sapien
aatataaagtcaggtctacgaatag

SEQ ID NO: 24309 - DNA, 25 bp, Homo sapien
acgacttagaggatcattttcagta

SEQ ID NO: 24310 - DNA, 25 bp, Homo sapien
acgacttagaggttcattttcagta

SEQ ID NO: 24311 - DNA, 25 bp, Homo sapien
ctagtgtccagtctcatttcaagta

SEQ ID NO: 24312 - DNA, 25 bp, Homo sapien
ctagtgtccagtgtcatttcaagta

SEQ ID NO: 24313 - DNA, 25 bp, Homo sapien
gtctcatgacgttttctacgactta

SEQ ID NO: 24314 - DNA, 25 bp, Homo sapien
gtctcatgacgtattctacgactta

SEQ ID NO: 24315 - DNA, 25 bp, Homo sapien
ggtcacaagttactctcacctcgac

SEQ ID NO: 24316 - DNA, 25 bp, Homo sapien
ggtcacaagttagtctcacctcgac

SEQ ID NO: 24317 - DNA, 25 bp, Homo sapien
gttccgtttgagtcgtctcttctct

SEQ ID NO: 24318 - DNA, 25 bp, Homo sapien
gttccgtttgagacgtctcttctct

SEQ ID NO: 24319 - DNA, 25 bp, Homo sapien
gtaacatgtggtacggtaccgtctg

SEQ ID NO: 24320 - DNA, 25 bp, Homo sapien
gtaacatgtggttcggtaccgtctg

SEQ ID NO: 24321 - DNA, 25 bp, Homo sapien
gttgaaactctggtatgttttacct

SEQ ID NO: 24322 - DNA, 25 bp, Homo sapien
gttgaaactctgctatgttttacct

SEQ ID NO: 24323 - DNA, 25 bp, Homo sapien
ccatgtattacaggtcgtttacgtg

SEQ ID NO: 24324 - DNA, 25 bp, Homo sapien
ccatgtattacacgtcgtttacgtg

SEQ ID NO: 24325 - DNA, 25 bp, Homo sapien
gaccggtttacgagtcgtgtttata

SEQ ID NO: 24326 - DNA, 25 bp, Homo sapien
gaccggtttacgtgtcgtgtttata

SEQ ID NO: 24327 - DNA, 25 bp, Homo sapien
ctacttgtgaattgcgtatatcgtt

SEQ ID NO: 24328 - DNA, 25 bp, Homo sapien
ctacttgtgaatagcgtatatcgtt

SEQ ID NO: 24329 - DNA, 25 bp, Homo sapien
ccatggtcgtagtgtagagtttgtc

SEQ ID NO: 24330 - DNA, 25 bp, Homo sapien
ccatggtcgtagagtagagtttgtc

SEQ ID NO: 24331 - DNA, 25 bp, Homo sapien
tcttacggtgtcgtaaaaccgatga

SEQ ID NO: 24332 - DNA, 25 bp, Homo sapien
tcttacggtgtcctaaaaccgatga

SEQ ID NO: 24333 - DNA, 25 bp, Homo sapien
tcacagtcctaaagacccatcgacg

SEQ ID NO: 24334 - DNA, 25 bp, Homo sapien
tcacagtcctaatgacccatcgacg

SEQ ID NO: 24335 - DNA, 25 bp, Homo sapien
agactctccaaggaccgaccagact

SEQ ID NO: 24336 - DNA, 25 bp, Homo sapien
agactctccaagcaccgaccagact

SEQ ID NO: 24337 - DNA, 25 bp, Homo sapien
tgtctcgtccacgtcctaatcagta

SEQ ID NO: 24338 - DNA, 25 bp, Homo sapien
tgtctcgtccacctcctaatcagta

SEQ ID NO: 24339 - DNA, 25 bp, Homo sapien
gggttatttatctcacttgtaggac

SEQ ID NO: 24340 - DNA, 25 bp, Homo sapien
gggttatttatcacacttgtaggac

SEQ ID NO: 24341 - DNA, 25 bp, Homo sapien
ctcgacctcgtccacacattggggt

SEQ ID NO: 24342 - DNA, 25 bp, Homo sapien
ctcgacctcgtcgacacattggggt

SEQ ID NO: 24343 - DNA, 25 bp, Homo sapien
cacttctcgtattcaaccttagtgg

SEQ ID NO: 24344 - DNA, 25 bp, Homo sapien
cacttctcgtatacaaccttagtgg

SEQ ID NO: 24345 - DNA, 25 bp, Homo sapien
aataaatcgttctcatttacgtcgg

SEQ ID NO: 24346 - DNA, 25 bp, Homo sapien
aataaatcgttcacatttacgtcgg

SEQ ID NO: 24347 - DNA, 25 bp, Homo sapien
aggtatacgtgtacccgtctattgg

SEQ ID NO: 24348 - DNA, 25 bp, Homo sapien
aggtatacgtgttcccgtctattgg

SEQ ID NO: 24349 - DNA, 25 bp, Homo sapien
gtatactgaatatcgtctattcgtc

SEQ ID NO: 24350 - DNA, 25 bp, Homo sapien
gtatactgaataacgtctattcgtc

SEQ ID NO: 24351 - DNA, 25 bp, Homo sapien
agtagtagagggaaacacaatctac

SEQ ID NO: 24352 - DNA, 25 bp, Homo sapien
agtagtagagggtaacacaatctac

SEQ ID NO: 24353 - DNA, 25 bp, Homo sapien
tcgtcgagagccagacgacaaagac

SEQ ID NO: 24354 - DNA, 25 bp, Homo sapien
tcgtcgagagcctgacgacaaagac

SEQ ID NO: 24355 - DNA, 25 bp, Homo sapien
gtctcgcccgacagtcggaaagaga

SEQ ID NO: 24356 - DNA, 25 bp, Homo sapien
gtctcgcccgactgtcggaaagaga

SEQ ID NO: 24357 - DNA, 25 bp, Homo sapien
ctcgagagtcgatgtcagtaaaatt

SEQ ID NO: 24358 - DNA, 25 bp, Homo sapien
ctcgagagtcgaagtcagtaaaatt

SEQ ID NO: 24359 - DNA, 25 bp, Homo sapien
ttcgtgatcgacagtaaaacgaata

SEQ ID NO: 24360 - DNA, 25 bp, Homo sapien
ttcgtgatcgactgtaaaacgaata

SEQ ID NO: 24361 - DNA, 25 bp, Homo sapien
gagttctgtctcgtaaaacccatac

SEQ ID NO: 24362 - DNA, 25 bp, Homo sapien
gagttctgtctcctaaaacccatac

SEQ ID NO: 24363 - DNA, 25 bp, Homo sapien
agagtttattacaccatccgagtaa

SEQ ID NO: 24364 - DNA, 25 bp, Homo sapien
agagtttattactccatccgagtaa

SEQ ID NO: 24365 - DNA, 25 bp, Homo sapien
cagacagtaggacaggtaggacgtt

SEQ ID NO: 24366 - DNA, 25 bp, Homo sapien
cagacagtaggagaggtaggacgtt

SEQ ID NO: 24367 - DNA, 25 bp, Homo sapien
aactagaataggaggcactgacagt

SEQ ID NO: 24368 - DNA, 25 bp, Homo sapien
aactagaataggtggcactgacagt

SEQ ID NO: 24369 - DNA, 25 bp, Homo sapien
gaccaaggtgtaacaggaactgcga

SEQ ID NO: 24370 - DNA, 25 bp, Homo sapien
gaccaaggtgtatcaggaactgcga

SEQ ID NO: 24371 - DNA, 25 bp, Homo sapien
acgacccctattaccgctagaggag

SEQ ID NO: 24372 - DNA, 25 bp, Homo sapien
acgacccctatttccgctagaggag

SEQ ID NO: 24373 - DNA, 25 bp, Homo sapien
ttcccctatcagaccggataccgtg

SEQ ID NO: 24374 - DNA, 25 bp, Homo sapien
ttcccctatcagtccggataccgtg

SEQ ID NO: 24375 - DNA, 25 bp, Homo sapien
tctgctcacatcgtgacagggggtt

SEQ ID NO: 24376 - DNA, 25 bp, Homo sapien
tctgctcacatcctgacagggggtt

SEQ ID NO: 24377 - DNA, 25 bp, Homo sapien
ctcacgatcacgttcgagggttgac

SEQ ID NO: 24378 - DNA, 25 bp, Homo sapien
ctcacgatcacgatcgagggttgac

SEQ ID NO: 24379 - DNA, 25 bp, Homo sapien
caggacactcagtgaccctactcga

SEQ ID NO: 24380 - DNA, 25 bp, Homo sapien
caggacactcagagaccctactcga

SEQ ID NO: 24381 - DNA, 25 bp, Homo sapien
cattctagcacgaagaggctcgtca

SEQ ID NO: 24382 - DNA, 25 bp, Homo sapien
cattctagcacgtagaggctcgtca

SEQ ID NO: 24383 - DNA, 25 bp, Homo sapien
cattcacgaggtgaaatctctacat

SEQ ID NO: 24384 - DNA, 25 bp, Homo sapien
cattcacgaggtcaaatctctacat

SEQ ID NO: 24385 - DNA, 25 bp, Homo sapien
gagtcctaagacctcgagacctcaa

SEQ ID NO: 24386 - DNA, 25 bp, Homo sapien
gagtcctaagacgtcgagacctcaa

SEQ ID NO: 24387 - DNA, 25 bp, Homo sapien
gagtaaaggtacttgagacctcgga

SEQ ID NO: 24388 - DNA, 25 bp, Homo sapien
gagtaaaggtacatgagacctcgga

SEQ ID NO: 24389 - DNA, 25 bp, Homo sapien
caatgtttgtaaattacacctagga

SEQ ID NO: 24390 - DNA, 25 bp, Homo sapien
caatgtttgtaatttacacctagga

SEQ ID NO: 24391 - DNA, 25 bp, Homo sapien
caagttggatatcaccgattcttaa

SEQ ID NO: 24392 - DNA, 25 bp, Homo sapien
caagttggatatgaccgattcttaa

SEQ ID NO: 24393 - DNA, 25 bp, Homo sapien
aaagttgtagattgtaccatttcaa

SEQ ID NO: 24394 - DNA, 25 bp, Homo sapien
aaagttgtagatagtaccatttcaa

SEQ ID NO: 24395 - DNA, 25 bp, Homo sapien
cagagagtagactgaaatccgcaaa

SEQ ID NO: 24396 - DNA, 25 bp, Homo sapien
cagagagtagacagaaatccgcaaa

SEQ ID NO: 24397 - DNA, 25 bp, Homo sapien
tacgatagatatatttcactctgag

SEQ ID NO: 24398 - DNA, 25 bp, Homo sapien
tacgatagatatttttcactctgag

SEQ ID NO: 24399 - DNA, 25 bp, Homo sapien
ccacaggtagattcagttttggttg

SEQ ID NO: 24400 - DNA, 25 bp, Homo sapien
ccacaggtagatacagttttggttg

SEQ ID NO: 24401 - DNA, 25 bp, Homo sapien
caaataactgtcgtgttccgagttg

SEQ ID NO: 24402 - DNA, 25 bp, Homo sapien
caaataactgtcctgttccgagttg

SEQ ID NO: 24403 - DNA, 25 bp, Homo sapien
cgcccatctccgagaggtcgcggtg

SEQ ID NO: 24404 - DNA, 25 bp, Homo sapien
cgcccatctccgtgaggtcgcggtg

SEQ ID NO: 24405 - DNA, 25 bp, Homo sapien
tacgaaccccgacagatgagtccca

SEQ ID NO: 24406 - DNA, 25 bp, Homo sapien
tacgaaccccgagagatgagtccca

SEQ ID NO: 24407 - DNA, 25 bp, Homo sapien
actccccgagcgacggagtacctga

SEQ ID NO: 24408 - DNA, 25 bp, Homo sapien
actccccgagcgtcggagtacctga

SEQ ID NO: 24409 - DNA, 25 bp, Homo sapien
tccacgacgattacgattacgcaat

SEQ ID NO: 24410 - DNA, 25 bp, Homo sapien
tccacgacgatttcgattacgcaat

SEQ ID NO: 24411 - DNA, 25 bp, Homo sapien
catcgcggatatcaggggaccgtag

SEQ ID NO: 24412 - DNA, 25 bp, Homo sapien
catcgcggatatgaggggaccgtag

SEQ ID NO: 24413 - DNA, 25 bp, Homo sapien
ttgttagaccagacttcaaggataa

SEQ ID NO: 24414 - DNA, 25 bp, Homo sapien
ttgttagaccagtcttcaaggataa

SEQ ID NO: 24415 - DNA, 25 bp, Homo sapien
ccaaacgagacctcgaggacctaga

SEQ ID NO: 24416 - DNA, 25 bp, Homo sapien
ccaaacgagaccacgaggacctaga

SEQ ID NO: 24417 - DNA, 25 bp, Homo sapien
gcccccaggacagaggacgaccgga

SEQ ID NO: 24418 - DNA, 25 bp, Homo sapien
gcccccaggacacaggacgaccgga

SEQ ID NO: 24419 - DNA, 25 bp, Homo sapien
ctccccaggagcagggacttcgaca

SEQ ID NO: 24420 - DNA, 25 bp, Homo sapien
ctccccaggagctgggacttcgaca

SEQ ID NO: 24421 - DNA, 25 bp, Homo sapien
aaaccgagaggacaggtcttcgcag

SEQ ID NO: 24422 - DNA, 25 bp, Homo sapien
aaaccgagaggagaggtcttcgcag

SEQ ID NO: 24423 - DNA, 25 bp, Homo sapien
ctagccaaggagcaggtcctaccac

SEQ ID NO: 24424 - DNA, 25 bp, Homo sapien
ctagccaaggaggaggtcctaccac

SEQ ID NO: 24425 - DNA, 25 bp, Homo sapien
gtcacgaacactttagagtccccac

SEQ ID NO: 24426 - DNA, 25 bp, Homo sapien
gtcacgaacactatagagtccccac

SEQ ID NO: 24427 - DNA, 25 bp, Homo sapien
agacgagtcagtttcgtctcaccca

SEQ ID NO: 24428 - DNA, 25 bp, Homo sapien
agacgagtcagtatcgtctcaccca

SEQ ID NO: 24429 - DNA, 25 bp, Homo sapien
gccaagtaccggtaccgtcctccac

SEQ ID NO: 24430 - DNA, 25 bp, Homo sapien
gccaagtaccggaaccgtcctccac

SEQ ID NO: 24431 - DNA, 25 bp, Homo sapien
gtcctgacggggataccgtcccaca

SEQ ID NO: 24432 - DNA, 25 bp, Homo sapien
gtcctgacggggttaccgtcccaca

SEQ ID NO: 24433 - DNA, 25 bp, Homo sapien
aaggtgtgaccgtggtctgccccga

SEQ ID NO: 24434 - DNA, 25 bp, Homo sapien
aaggtgtgaccgaggtctgccccga

SEQ ID NO: 24435 - DNA, 25 bp, Homo sapien
gaaagtgacatgaccactttgtcaa

SEQ ID NO: 24436 - DNA, 25 bp, Homo sapien
gaaagtgacatgtccactttgtcaa

SEQ ID NO: 24437 - DNA, 25 bp, Homo sapien
tttaacctcggagactcttgtcaag

SEQ ID NO: 24438 - DNA, 25 bp, Homo sapien
tttaacctcggacactcttgtcaag

SEQ ID NO: 24439 - DNA, 25 bp, Homo sapien
catcctctcgtgactcttatgacag

SEQ ID NO: 24440 - DNA, 25 bp, Homo sapien
catcctctcgtgtctcttatgacag

SEQ ID NO: 24441 - DNA, 25 bp, Homo sapien
caggaagtggtttcgtttagacacg

SEQ ID NO: 24442 - DNA, 25 bp, Homo sapien
caggaagtggttacgtttagacacg

SEQ ID NO: 24443 - DNA, 25 bp, Homo sapien
ggaacaatgaactcataacatcgga

SEQ ID NO: 24444 - DNA, 25 bp, Homo sapien
ggaacaatgaacacataacatcgga

SEQ ID NO: 24445 - DNA, 25 bp, Homo sapien
gagcattaaactcaacactaaagga

SEQ ID NO: 24446 - DNA, 25 bp, Homo sapien
gagcattaaactgaacactaaagga

SEQ ID NO: 24447 - DNA, 25 bp, Homo sapien
tccaggtccccgaacatgaagaacg

SEQ ID NO: 24448 - DNA, 25 bp, Homo sapien
tccaggtccccgtacatgaagaacg

SEQ ID NO: 24449 - DNA, 25 bp, Homo sapien
acggttagacggtcatctcaaggac

SEQ ID NO: 24450 - DNA, 25 bp, Homo sapien
acggttagacggacatctcaaggac

SEQ ID NO: 24451 - DNA, 25 bp, Homo sapien
agggaggtacaaactctacaaggat

SEQ ID NO: 24452 - DNA, 25 bp, Homo sapien
agggaggtacaatctctacaaggat

SEQ ID NO: 24453 - DNA, 25 bp, Homo sapien
gaaacgtcactatacagaacagtaa

SEQ ID NO: 24454 - DNA, 25 bp, Homo sapien
gaaacgtcactaaacagaacagtaa

SEQ ID NO: 24455 - DNA, 25 bp, Homo sapien
gcaagaccacgactacgaaaccgga

SEQ ID NO: 24456 - DNA, 25 bp, Homo sapien
gcaagaccacgagtacgaaaccgga

SEQ ID NO: 24457 - DNA, 25 bp, Homo sapien
tcaggagtcgaggttaaagcacaga

SEQ ID NO: 24458 - DNA, 25 bp, Homo sapien
tcaggagtcgagcttaaagcacaga

SEQ ID NO: 24459 - DNA, 25 bp, Homo sapien
attaagggaactttctaagtcacaa

SEQ ID NO: 24460 - DNA, 25 bp, Homo sapien
attaagggaactatctaagtcacaa

SEQ ID NO: 24461 - DNA, 25 bp, Homo sapien
cgaagaagaactgactttaggcgaa

SEQ ID NO: 24462 - DNA, 25 bp, Homo sapien
cgaagaagaactcactttaggcgaa

SEQ ID NO: 24463 - DNA, 25 bp, Homo sapien
cggtctgacccgtcagcgtcacggt

SEQ ID NO: 24464 - DNA, 25 bp, Homo sapien
cggtctgacccgacagcgtcacggt

SEQ ID NO: 24465 - DNA, 25 bp, Homo sapien
ggggttcaccggacttacgacacct

SEQ ID NO: 24466 - DNA, 25 bp, Homo sapien
ggggttcaccggtcttacgacacct

SEQ ID NO: 24467 - DNA, 25 bp, Homo sapien
gtggtcgacccatcggacgtacacc

SEQ ID NO: 24468 - DNA, 25 bp, Homo sapien
gtggtcgacccaacggacgtacacc

SEQ ID NO: 24469 - DNA, 25 bp, Homo sapien
tcggtctgtcgtcatcgaccacctt

SEQ ID NO: 24470 - DNA, 25 bp, Homo sapien
tcggtctgtcgtgatcgaccacctt

SEQ ID NO: 24471 - DNA, 25 bp, Homo sapien
tggacggtcgaggaagtaccccgct

SEQ ID NO: 24472 - DNA, 25 bp, Homo sapien
tggacggtcgagcaagtaccccgct

SEQ ID NO: 24473 - DNA, 25 bp, Homo sapien
aatgaccagggaactgtccctcgtt

SEQ ID NO: 24474 - DNA, 25 bp, Homo sapien
aatgaccagggatctgtccctcgtt

SEQ ID NO: 24475 - DNA, 25 bp, Homo sapien
atagggagaagatcgtcccggttct

SEQ ID NO: 24476 - DNA, 25 bp, Homo sapien
atagggagaagaacgtcccggttct

SEQ ID NO: 24477 - DNA, 25 bp, Homo sapien
attttaggaagaaatcactgatctc

SEQ ID NO: 24478 - DNA, 25 bp, Homo sapien
attttaggaagatatcactgatctc

SEQ ID NO: 24479 - DNA, 25 bp, Homo sapien
gattggaagagaatcgagtgctacc

SEQ ID NO: 24480 - DNA, 25 bp, Homo sapien
gattggaagagattcgagtgctacc

SEQ ID NO: 24481 - DNA, 25 bp, Homo sapien
gagatgcaacataagctagagctta

SEQ ID NO: 24482 - DNA, 25 bp, Homo sapien
gagatgcaacattagctagagctta

SEQ ID NO: 24483 - DNA, 25 bp, Homo sapien
gggaaagaggtgtgtcctcgacccc

SEQ ID NO: 24484 - DNA, 25 bp, Homo sapien
gggaaagaggtgagtcctcgacccc

SEQ ID NO: 24485 - DNA, 25 bp, Homo sapien
ggaaagccgggaacggtcgctaccc

SEQ ID NO: 24486 - DNA, 25 bp, Homo sapien
ggaaagccgggatcggtcgctaccc

SEQ ID NO: 24487 - DNA, 25 bp, Homo sapien
taaatacctgaaatgtaaccccgag

SEQ ID NO: 24488 - DNA, 25 bp, Homo sapien
taaatacctgaattgtaaccccgag

SEQ ID NO: 24489 - DNA, 25 bp, Homo sapien
ttccaagaatagttagtgctctcta

SEQ ID NO: 24490 - DNA, 25 bp, Homo sapien
ttccaagaatagatagtgctctcta

SEQ ID NO: 24491 - DNA, 25 bp, Homo sapien
cagatcctcagactgagattttctc

SEQ ID NO: 24492 - DNA, 25 bp, Homo sapien
cagatcctcagagtgagattttctc

SEQ ID NO: 24493 - DNA, 25 bp, Homo sapien
atccggaactggaagtcaacgtcga

SEQ ID NO: 24494 - DNA, 25 bp, Homo sapien
atccggaactggtagtcaacgtcga

SEQ ID NO: 24495 - DNA, 25 bp, Homo sapien
acttagtcgacaaggaagccctcct

SEQ ID NO: 24496 - DNA, 25 bp, Homo sapien
acttagtcgacatggaagccctcct

SEQ ID NO: 24497 - DNA, 25 bp, Homo sapien
gtcacgagaccttagtctacttcct

SEQ ID NO: 24498 - DNA, 25 bp, Homo sapien
gtcacgagacctaagtctacttcct

SEQ ID NO: 24499 - DNA, 25 bp, Homo sapien
atggtctaattcaagatcagtcact

SEQ ID NO: 24500 - DNA, 25 bp, Homo sapien
atggtctaattctagatcagtcact

SEQ ID NO: 24501 - DNA, 25 bp, Homo sapien
aaagcaaggtcacgtaatactactc

SEQ ID NO: 24502 - DNA, 25 bp, Homo sapien
aaagcaaggtcaggtaatactactc

SEQ ID NO: 24503 - DNA, 25 bp, Homo sapien
aataagttcggtacgaaaagacact

SEQ ID NO: 24504 - DNA, 25 bp, Homo sapien
aataagttcggttcgaaaagacact

SEQ ID NO: 24505 - DNA, 25 bp, Homo sapien
tgacaaaccgggtcacaaagacact

SEQ ID NO: 24506 - DNA, 25 bp, Homo sapien
tgacaaaccgggacacaaagacact

SEQ ID NO: 24507 - DNA, 25 bp, Homo sapien
tggtacaaccggtccgaccagaact

SEQ ID NO: 24508 - DNA, 25 bp, Homo sapien
tggtacaaccggaccgaccagaact

SEQ ID NO: 24509 - DNA, 25 bp, Homo sapien
tctgacaaccgacgagacatgtgta

SEQ ID NO: 24510 - DNA, 25 bp, Homo sapien
tctgacaaccgaggagacatgtgta

SEQ ID NO: 24511 - DNA, 25 bp, Homo sapien
tgcactaaggaccagtactagggtt

SEQ ID NO: 24512 - DNA, 25 bp, Homo sapien
tgcactaaggacgagtactagggtt

SEQ ID NO: 24513 - DNA, 25 bp, Homo sapien
cgaagtaatgtctgccatactgtgt

SEQ ID NO: 24514 - DNA, 25 bp, Homo sapien
cgaagtaatgtcagccatactgtgt

SEQ ID NO: 24515 - DNA, 25 bp, Homo sapien
gtatacgaacccagtaccttaatgt

SEQ ID NO: 24516 - DNA, 25 bp, Homo sapien
gtatacgaaccctgtaccttaatgt

SEQ ID NO: 24517 - DNA, 25 bp, Homo sapien
gttcgtactcatttaccttagttgt

SEQ ID NO: 24518 - DNA, 25 bp, Homo sapien
gttcgtactcatataccttagttgt

SEQ ID NO: 24519 - DNA, 25 bp, Homo sapien
cagtggtcagtattatcgttacttg

SEQ ID NO: 24520 - DNA, 25 bp, Homo sapien
cagtggtcagtaatatcgttacttg

SEQ ID NO: 24521 - DNA, 25 bp, Homo sapien
cagtcactgacgtagtactgcctgt

SEQ ID NO: 24522 - DNA, 25 bp, Homo sapien
cagtcactgacgaagtactgcctgt

SEQ ID NO: 24523 - DNA, 25 bp, Homo sapien
ggcaagtagttgtacgacgtcgacg

SEQ ID NO: 24524 - DNA, 25 bp, Homo sapien
ggcaagtagttgaacgacgtcgacg

SEQ ID NO: 24525 - DNA, 25 bp, Homo sapien
gtagtgctttgtcatactacatcac

SEQ ID NO: 24526 - DNA, 25 bp, Homo sapien
gtagtgctttgtgatactacatcac

SEQ ID NO: 24527 - DNA, 25 bp, Homo sapien
cagaaagtcggaagtcgtaccatct

SEQ ID NO: 24528 - DNA, 25 bp, Homo sapien
cagaaagtcggatgtcgtaccatct

SEQ ID NO: 24529 - DNA, 25 bp, Homo sapien
tcgacgaacgtaagattgttccttt

SEQ ID NO: 24530 - DNA, 25 bp, Homo sapien
tcgacgaacgtatgattgttccttt

SEQ ID NO: 24531 - DNA, 25 bp, Homo sapien
aataaaggaaacgttgtcccatctt

SEQ ID NO: 24532 - DNA, 25 bp, Homo sapien
aataaaggaaaccttgtcccatctt

SEQ ID NO: 24533 - DNA, 25 bp, Homo sapien
agttcggaacattggggacactttt

SEQ ID NO: 24534 - DNA, 25 bp, Homo sapien
agttcggaacataggggacactttt

SEQ ID NO: 24535 - DNA, 25 bp, Homo sapien
gaccggacagaagacctctctccag

SEQ ID NO: 24536 - DNA, 25 bp, Homo sapien
gaccggacagaacacctctctccag

SEQ ID NO: 24537 - DNA, 25 bp, Homo sapien
ccgtcagagtgacgaacctcgcagg

SEQ ID NO: 24538 - DNA, 25 bp, Homo sapien
ccgtcagagtgaggaacctcgcagg

SEQ ID NO: 24539 - DNA, 25 bp, Homo sapien
gcccctgtcgcgatgatgccgaaac

SEQ ID NO: 24540 - DNA, 25 bp, Homo sapien
gcccctgtcgcgttgatgccgaaac

SEQ ID NO: 24541 - DNA, 25 bp, Homo sapien
atcgcgtactcttctgtgacgaaac

SEQ ID NO: 24542 - DNA, 25 bp, Homo sapien
atcgcgtactctactgtgacgaaac

SEQ ID NO: 24543 - DNA, 25 bp, Homo sapien
atgtggtcgagtgactcctcgaaac

SEQ ID NO: 24544 - DNA, 25 bp, Homo sapien
atgtggtcgagtcactcctcgaaac

SEQ ID NO: 24545 - DNA, 25 bp, Homo sapien
ttcttggggtacctcccgactaact

SEQ ID NO: 24546 - DNA, 25 bp, Homo sapien
ttcttggggtacgtcccgactaact

SEQ ID NO: 24547 - DNA, 25 bp, Homo sapien
gtctattgagagatttctcggtaac

SEQ ID NO: 24548 - DNA, 25 bp, Homo sapien
gtctattgagagttttctcggtaac

SEQ ID NO: 24549 - DNA, 25 bp, Homo sapien
tacattcgacaattgtctcaagtgt

SEQ ID NO: 24550 - DNA, 25 bp, Homo sapien
tacattcgacaaatgtctcaagtgt

SEQ ID NO: 24551 - DNA, 25 bp, Homo sapien
atcttacccgtagaggtttctcatg

SEQ ID NO: 24552 - DNA, 25 bp, Homo sapien
atcttacccgtacaggtttctcatg

SEQ ID NO: 24553 - DNA, 25 bp, Homo sapien
agacagtagccgactaggttggcaa

SEQ ID NO: 24554 - DNA, 25 bp, Homo sapien
agacagtagccgtctaggttggcaa

SEQ ID NO: 24555 - DNA, 25 bp, Homo sapien
tacgacgatcctgttttatgacatg

SEQ ID NO: 24556 - DNA, 25 bp, Homo sapien
tacgacgatcctcttttatgacatg

SEQ ID NO: 24557 - DNA, 25 bp, Homo sapien
taaatcctcgtttggacagtcctct

SEQ ID NO: 24558 - DNA, 25 bp, Homo sapien
taaatcctcgttaggacagtcctct

SEQ ID NO: 24559 - DNA, 25 bp, Homo sapien
taaaggtttttcgagacctccgtcg

SEQ ID NO: 24560 - DNA, 25 bp, Homo sapien
taaaggtttttccagacctccgtcg

SEQ ID NO: 24561 - DNA, 25 bp, Homo sapien
atccatctctgtccaggtctcgatg

SEQ ID NO: 24562 - DNA, 25 bp, Homo sapien
atccatctctgtgcaggtctcgatg

SEQ ID NO: 24563 - DNA, 25 bp, Homo sapien
cattcttacgacatgtcacgatacg

SEQ ID NO: 24564 - DNA, 25 bp, Homo sapien
cattcttacgacttgtcacgatacg

SEQ ID NO: 24565 - DNA, 25 bp, Homo sapien
ctggaatctgtaaacattcgttctc

SEQ ID NO: 24566 - DNA, 25 bp, Homo sapien
ctggaatctgtatacattcgttctc

SEQ ID NO: 24567 - DNA, 25 bp, Homo sapien
gacgattagtttcacgttacttgac

SEQ ID NO: 24568 - DNA, 25 bp, Homo sapien
gacgattagtttgacgttacttgac

SEQ ID NO: 24569 - DNA, 25 bp, Homo sapien
cgttctactgtctgtcttctcgttc

SEQ ID NO: 24570 - DNA, 25 bp, Homo sapien
cgttctactgtcagtcttctcgttc

SEQ ID NO: 24571 - DNA, 25 bp, Homo sapien
aaataactctcctttgtaccagtgt

SEQ ID NO: 24572 - DNA, 25 bp, Homo sapien
aaataactctccattgtaccagtgt

SEQ ID NO: 24573 - DNA, 25 bp, Homo sapien
catagtaccttcattttaccttagt

SEQ ID NO: 24574 - DNA, 25 bp, Homo sapien
catagtaccttctttttaccttagt

SEQ ID NO: 24575 - DNA, 25 bp, Homo sapien
caaaagtcacctgtaaaatcgtgta

SEQ ID NO: 24576 - DNA, 25 bp, Homo sapien
caaaagtcacctctaaaatcgtgta

SEQ ID NO: 24577 - DNA, 25 bp, Homo sapien
caatagttcgacatgtgccagggat

SEQ ID NO: 24578 - DNA, 25 bp, Homo sapien
caatagttcgacttgtgccagggat

SEQ ID NO: 24579 - DNA, 25 bp, Homo sapien
atatcgagcttagtgaccaatctat

SEQ ID NO: 24580 - DNA, 25 bp, Homo sapien
atatcgagcttactgaccaatctat

SEQ ID NO: 24581 - DNA, 25 bp, Homo sapien
tactctgattatcgaccaagtgtct

SEQ ID NO: 24582 - DNA, 25 bp, Homo sapien
tactctgattatggaccaagtgtct

SEQ ID NO: 24583 - DNA, 25 bp, Homo sapien
ttatccggttaaggtactcttgttt

SEQ ID NO: 24584 - DNA, 25 bp, Homo sapien
ttatccggttaacgtactcttgttt

SEQ ID NO: 24585 - DNA, 25 bp, Homo sapien
ctttgtccggccaggacttccagta

SEQ ID NO: 24586 - DNA, 25 bp, Homo sapien
ctttgtccggcctggacttccagta

SEQ ID NO: 24587 - DNA, 25 bp, Homo sapien
ctcttagtccttctcgagaaatgaa

SEQ ID NO: 24588 - DNA, 25 bp, Homo sapien
ctcttagtccttgtcgagaaatgaa

SEQ ID NO: 24589 - DNA, 25 bp, Homo sapien
ccaggactcctctgcagaaataaga

SEQ ID NO: 24590 - DNA, 25 bp, Homo sapien
ccaggactcctcagcagaaataaga

SEQ ID NO: 24591 - DNA, 25 bp, Homo sapien
gaagtgactcctaggcacaaagtaa

SEQ ID NO: 24592 - DNA, 25 bp, Homo sapien
gaagtgactccttggcacaaagtaa

SEQ ID NO: 24593 - DNA, 25 bp, Homo sapien
agtagacccgacgtgggagaagttt

SEQ ID NO: 24594 - DNA, 25 bp, Homo sapien
agtagacccgacctgggagaagttt

SEQ ID NO: 24595 - DNA, 25 bp, Homo sapien
acttccctaacttgggaacggtact

SEQ ID NO: 24596 - DNA, 25 bp, Homo sapien
acttccctaactagggaacggtact

SEQ ID NO: 24597 - DNA, 25 bp, Homo sapien
ctccgcctatgtaaggtccagaact

SEQ ID NO: 24598 - DNA, 25 bp, Homo sapien
ctccgcctatgttaggtccagaact

SEQ ID NO: 24599 - DNA, 25 bp, Homo sapien
gaaccgtcttctgaggtggagacgc

SEQ ID NO: 24600 - DNA, 25 bp, Homo sapien
gaaccgtcttctcaggtggagacgc

SEQ ID NO: 24601 - DNA, 25 bp, Homo sapien
ctcacaccatcagactcggggacga

SEQ ID NO: 24602 - DNA, 25 bp, Homo sapien
ctcacaccatcacactcggggacga

SEQ ID NO: 24603 - DNA, 25 bp, Homo sapien
acacacaacacgtgcacctaacgga

SEQ ID NO: 24604 - DNA, 25 bp, Homo sapien
acacacaacacgagcacctaacgga

SEQ ID NO: 24605 - DNA, 25 bp, Homo sapien
tgcccgtgcctctaggccgagagga

SEQ ID NO: 24606 - DNA, 25 bp, Homo sapien
tgcccgtgcctcaaggccgagagga

SEQ ID NO: 24607 - DNA, 25 bp, Homo sapien
gtttgggcccaaagacctcgaaagt

SEQ ID NO: 24608 - DNA, 25 bp, Homo sapien
gtttgggcccaatgacctcgaaagt

SEQ ID NO: 24609 - DNA, 25 bp, Homo sapien
tggacgtcctcgagaaggcaccggt

SEQ ID NO: 24610 - DNA, 25 bp, Homo sapien
tggacgtcctcgtgaaggcaccggt

SEQ ID NO: 24611 - DNA, 25 bp, Homo sapien
ggtggtcgactccgtcggcgtccat

SEQ ID NO: 24612 - DNA, 25 bp, Homo sapien
ggtggtcgactcggtcggcgtccat

SEQ ID NO: 24613 - DNA, 25 bp, Homo sapien
cttcggtgttcgtctgactgttgca

SEQ ID NO: 24614 - DNA, 25 bp, Homo sapien
cttcggtgttcgactgactgttgca

SEQ ID NO: 24615 - DNA, 25 bp, Homo sapien
actaacggaggtttaggtcttctgg

SEQ ID NO: 24616 - DNA, 25 bp, Homo sapien
actaacggaggtataggtcttctgg

SEQ ID NO: 24617 - DNA, 25 bp, Homo sapien
gtacatcggcggaacggcatgtcag

SEQ ID NO: 24618 - DNA, 25 bp, Homo sapien
gtacatcggcggtacggcatgtcag

SEQ ID NO: 24619 - DNA, 25 bp, Homo sapien
tcacgaggtccgttagagcgtccca

SEQ ID NO: 24620 - DNA, 25 bp, Homo sapien
tcacgaggtccgatagagcgtccca

SEQ ID NO: 24621 - DNA, 25 bp, Homo sapien
acgacgggacggtcgttctcgctcc

SEQ ID NO: 24622 - DNA, 25 bp, Homo sapien
acgacgggacggacgttctcgctcc

SEQ ID NO: 24623 - DNA, 25 bp, Homo sapien
cacgtcctgaagagtggctcgtgtg

SEQ ID NO: 24624 - DNA, 25 bp, Homo sapien
cacgtcctgaagtgtggctcgtgtg

SEQ ID NO: 24625 - DNA, 25 bp, Homo sapien
ctgtggtcgagcatcaggacaaggt

SEQ ID NO: 24626 - DNA, 25 bp, Homo sapien
ctgtggtcgagcttcaggacaaggt

SEQ ID NO: 24627 - DNA, 25 bp, Homo sapien
tacctcttgtactggtacttctcgg

SEQ ID NO: 24628 - DNA, 25 bp, Homo sapien
tacctcttgtacaggtacttctcgg

SEQ ID NO: 24629 - DNA, 25 bp, Homo sapien
gtatcatacggtcagcgacgtttgg

SEQ ID NO: 24630 - DNA, 25 bp, Homo sapien
gtatcatacggtgagcgacgtttgg

SEQ ID NO: 24631 - DNA, 25 bp, Homo sapien
gtctgcgaggtaggacgcctgtaac

SEQ ID NO: 24632 - DNA, 25 bp, Homo sapien
gtctgcgaggtacgacgcctgtaac

SEQ ID NO: 24633 - DNA, 25 bp, Homo sapien
cgtttttgatctgagtgtcggtggc

SEQ ID NO: 24634 - DNA, 25 bp, Homo sapien
cgtttttgatctcagtgtcggtggc

SEQ ID NO: 24635 - DNA, 25 bp, Homo sapien
agacttaccttcctctgttgaaggg

SEQ ID NO: 24636 - DNA, 25 bp, Homo sapien
agacttaccttcgtctgttgaaggg

SEQ ID NO: 24637 - DNA, 25 bp, Homo sapien
ctattgtaagacctgtatgaagcta

SEQ ID NO: 24638 - DNA, 25 bp, Homo sapien
ctattgtaagacgtgtatgaagcta

SEQ ID NO: 24639 - DNA, 25 bp, Homo sapien
ctaacgagataactgttcgagaata

SEQ ID NO: 24640 - DNA, 25 bp, Homo sapien
ctaacgagataagtgttcgagaata

SEQ ID NO: 24641 - DNA, 25 bp, Homo sapien
cgtaacgacgatgtacttttgtaaa

SEQ ID NO: 24642 - DNA, 25 bp, Homo sapien
cgtaacgacgatctacttttgtaaa

SEQ ID NO: 24643 - DNA, 25 bp, Homo sapien
ttggtcgagttaactttctgaagtc

SEQ ID NO: 24644 - DNA, 25 bp, Homo sapien
ttggtcgagttatctttctgaagtc

SEQ ID NO: 24645 - DNA, 25 bp, Homo sapien
acggtgtcggttgtgttcttggtct

SEQ ID NO: 24646 - DNA, 25 bp, Homo sapien
acggtgtcggttctgttcttggtct

SEQ ID NO: 24647 - DNA, 25 bp, Homo sapien
tttgagggttcagtctcttgtctct

SEQ ID NO: 24648 - DNA, 25 bp, Homo sapien
tttgagggttcactctcttgtctct

SEQ ID NO: 24649 - DNA, 25 bp, Homo sapien
tcgtcgtggtaccttccctttcact

SEQ ID NO: 24650 - DNA, 25 bp, Homo sapien
tcgtcgtggtacgttccctttcact

SEQ ID NO: 24651 - DNA, 25 bp, Homo sapien
tctgttccacggttcccttagtcct

SEQ ID NO: 24652 - DNA, 25 bp, Homo sapien
tctgttccacggatcccttagtcct

SEQ ID NO: 24653 - DNA, 25 bp, Homo sapien
tacagtgttcctaattggtttaatc

SEQ ID NO: 24654 - DNA, 25 bp, Homo sapien
tacagtgttccttattggtttaatc

SEQ ID NO: 24655 - DNA, 25 bp, Homo sapien
tggtttccttcttccgtgttatcac

SEQ ID NO: 24656 - DNA, 25 bp, Homo sapien
tggtttccttctaccgtgttatcac

SEQ ID NO: 24657 - DNA, 25 bp, Homo sapien
ttcctctccttcttaagtagtttcc

SEQ ID NO: 24658 - DNA, 25 bp, Homo sapien
ttcctctccttcataagtagtttcc

SEQ ID NO: 24659 - DNA, 25 bp, Homo sapien
tacttcggttcagaatcggtgtccg

SEQ ID NO: 24660 - DNA, 25 bp, Homo sapien
tacttcggttcacaatcggtgtccg

SEQ ID NO: 24661 - DNA, 25 bp, Homo sapien
agtttccgtagtacaattgtccgtc

SEQ ID NO: 24662 - DNA, 25 bp, Homo sapien
agtttccgtagttcaattgtccgtc

SEQ ID NO: 24663 - DNA, 25 bp, Homo sapien
gtttccgacgggaacttcacgtacg

SEQ ID NO: 24664 - DNA, 25 bp, Homo sapien
gtttccgacgggtacttcacgtacg

SEQ ID NO: 24665 - DNA, 25 bp, Homo sapien
gtacacgaagagaactcgtcagact

SEQ ID NO: 24666 - DNA, 25 bp, Homo sapien
gtacacgaagagtactcgtcagact

SEQ ID NO: 24667 - DNA, 25 bp, Homo sapien
gtgtagagtccaagaactactcaga

SEQ ID NO: 24668 - DNA, 25 bp, Homo sapien
gtgtagagtccatgaactactcaga

SEQ ID NO: 24669 - DNA, 25 bp, Homo sapien
aagaaggtaaggtaaaacatccgac

SEQ ID NO: 24670 - DNA, 25 bp, Homo sapien
aagaaggtaaggaaaaacatccgac

SEQ ID NO: 24671 - DNA, 25 bp, Homo sapien
aaacgatcgactacacaagtactga

SEQ ID NO: 24672 - DNA, 25 bp, Homo sapien
aaacgatcgacttcacaagtactga

SEQ ID NO: 24673 - DNA, 25 bp, Homo sapien
agatcgagaacttaaacagtatctt

SEQ ID NO: 24674 - DNA, 25 bp, Homo sapien
agatcgagaactaaaacagtatctt

SEQ ID NO: 24675 - DNA, 25 bp, Homo sapien
agatagtaaccgtgaaacttacctt

SEQ ID NO: 24676 - DNA, 25 bp, Homo sapien
agatagtaaccgagaaacttacctt

SEQ ID NO: 24677 - DNA, 25 bp, Homo sapien
tcaaatgaccgtagggacctaatcc

SEQ ID NO: 24678 - DNA, 25 bp, Homo sapien
tcaaatgaccgttgggacctaatcc

SEQ ID NO: 24679 - DNA, 25 bp, Homo sapien
tgttcggggttactaaagttacgac

SEQ ID NO: 24680 - DNA, 25 bp, Homo sapien
tgttcggggttagtaaagttacgac

SEQ ID NO: 24681 - DNA, 25 bp, Homo sapien
agcacccggcggtgcacgtggtcca

SEQ ID NO: 24682 - DNA, 25 bp, Homo sapien
agcacccggcggagcacgtggtcca

SEQ ID NO: 24683 - DNA, 25 bp, Homo sapien
acctcaaaggggtcgagtaggcaca

SEQ ID NO: 24684 - DNA, 25 bp, Homo sapien
acctcaaaggggacgagtaggcaca

SEQ ID NO: 24685 - DNA, 25 bp, Homo sapien
aatccaaaaggagtgtaaccacgta

SEQ ID NO: 24686 - DNA, 25 bp, Homo sapien
aatccaaaaggactgtaaccacgta

SEQ ID NO: 24687 - DNA, 25 bp, Homo sapien
gtcccattgacgataataatccgtt

SEQ ID NO: 24688 - DNA, 25 bp, Homo sapien
gtcccattgacgttaataatccgtt

SEQ ID NO: 24689 - DNA, 25 bp, Homo sapien
tcccctctggtggaagactactatt

SEQ ID NO: 24690 - DNA, 25 bp, Homo sapien
tcccctctggtgcaagactactatt

SEQ ID NO: 24691 - DNA, 25 bp, Homo sapien
cgtccgaatgaggtcggtaacagga

SEQ ID NO: 24692 - DNA, 25 bp, Homo sapien
cgtccgaatgagctcggtaacagga

SEQ ID NO: 24693 - DNA, 25 bp, Homo sapien
aagtaccgatatgtaccattgatta

SEQ ID NO: 24694 - DNA, 25 bp, Homo sapien
aagtaccgatatctaccattgatta

SEQ ID NO: 24695 - DNA, 25 bp, Homo sapien
agtctcggttactagtcaggaattt

SEQ ID NO: 24696 - DNA, 25 bp, Homo sapien
agtctcggttacaagtcaggaattt

SEQ ID NO: 24697 - DNA, 25 bp, Homo sapien
accgcggtaggacagtgatacactc

SEQ ID NO: 24698 - DNA, 25 bp, Homo sapien
accgcggtaggagagtgatacactc

SEQ ID NO: 24699 - DNA, 25 bp, Homo sapien
tcgtcgagaggactgtaggtacatt

SEQ ID NO: 24700 - DNA, 25 bp, Homo sapien
tcgtcgagaggagtgtaggtacatt

SEQ ID NO: 24701 - DNA, 25 bp, Homo sapien
aacggacccgtgtgtggtgtacgtc

SEQ ID NO: 24702 - DNA, 25 bp, Homo sapien
aacggacccgtgagtggtgtacgtc

SEQ ID NO: 24703 - DNA, 25 bp, Homo sapien
acgggtcaggacgtcttatagtcgt

SEQ ID NO: 24704 - DNA, 25 bp, Homo sapien
acgggtcaggacctcttatagtcgt

SEQ ID NO: 24705 - DNA, 25 bp, Homo sapien
ccctgaagttccacttcttgagtac

SEQ ID NO: 24706 - DNA, 25 bp, Homo sapien
ccctgaagttcctcttcttgagtac

SEQ ID NO: 24707 - DNA, 25 bp, Homo sapien
ccccgacacgtgtccagatttctga

SEQ ID NO: 24708 - DNA, 25 bp, Homo sapien
ccccgacacgtgaccagatttctga

SEQ ID NO: 24709 - DNA, 25 bp, Homo sapien
ctgttacaccgtagcagaaaacgaa

SEQ ID NO: 24710 - DNA, 25 bp, Homo sapien
ctgttacaccgttgcagaaaacgaa

SEQ ID NO: 24711 - DNA, 25 bp, Homo sapien
ttacaagtcgtgtataattcgaact

SEQ ID NO: 24712 - DNA, 25 bp, Homo sapien
ttacaagtcgtgaataattcgaact

SEQ ID NO: 24713 - DNA, 25 bp, Homo sapien
ctacaagaggaaacgtgaccgaagt

SEQ ID NO: 24714 - DNA, 25 bp, Homo sapien
ctacaagaggaatcgtgaccgaagt

SEQ ID NO: 24715 - DNA, 25 bp, Homo sapien
acgttatgggagttactgaccgagg

SEQ ID NO: 24716 - DNA, 25 bp, Homo sapien
acgttatgggagatactgaccgagg

SEQ ID NO: 24717 - DNA, 25 bp, Homo sapien
ttctcagagaacttatacgtacgta

SEQ ID NO: 24718 - DNA, 25 bp, Homo sapien
ttctcagagaacatatacgtacgta

SEQ ID NO: 24719 - DNA, 25 bp, Homo sapien
tgacttactacctgttattattgag

SEQ ID NO: 24720 - DNA, 25 bp, Homo sapien
tgacttactaccagttattattgag

SEQ ID NO: 24721 - DNA, 25 bp, Homo sapien
tataaacgaacgttatttgtaccgt

SEQ ID NO: 24722 - DNA, 25 bp, Homo sapien
tataaacgaacgatatttgtaccgt

SEQ ID NO: 24723 - DNA, 25 bp, Homo sapien
cgttaatgttaaactcctgtgaagt

SEQ ID NO: 24724 - DNA, 25 bp, Homo sapien
cgttaatgttaatctcctgtgaagt

SEQ ID NO: 24725 - DNA, 25 bp, Homo sapien
tcttctgtgagacctacccaagtgt

SEQ ID NO: 24726 - DNA, 25 bp, Homo sapien
tcttctgtgagagctacccaagtgt

SEQ ID NO: 24727 - DNA, 25 bp, Homo sapien
ctttagtagaggtgtcactacagag

SEQ ID NO: 24728 - DNA, 25 bp, Homo sapien
ctttagtagaggagtcactacagag

SEQ ID NO: 24729 - DNA, 25 bp, Homo sapien
gtggcgttaaagcagaagtcccagg

SEQ ID NO: 24730 - DNA, 25 bp, Homo sapien
gtggcgttaaaggagaagtcccagg

SEQ ID NO: 24731 - DNA, 25 bp, Homo sapien
gctccggaacaggaacttccgatgg

SEQ ID NO: 24732 - DNA, 25 bp, Homo sapien
gctccggaacagcaacttccgatgg

SEQ ID NO: 24733 - DNA, 25 bp, Homo sapien
tgttatcatttgtacgctttactga

SEQ ID NO: 24734 - DNA, 25 bp, Homo sapien
tgttatcatttgaacgctttactga

SEQ ID NO: 24735 - DNA, 25 bp, Homo sapien
cgataacgtttcctctttatgataa

SEQ ID NO: 24736 - DNA, 25 bp, Homo sapien
cgataacgtttcgtctttatgataa

SEQ ID NO: 24737 - DNA, 25 bp, Homo sapien
gagactatttcgtgccagtgatgat

SEQ ID NO: 24738 - DNA, 25 bp, Homo sapien
gagactatttcgagccagtgatgat

SEQ ID NO: 24739 - DNA, 25 bp, Homo sapien
ttcccttacacagaagggtccgact

SEQ ID NO: 24740 - DNA, 25 bp, Homo sapien
ttcccttacacacaagggtccgact

SEQ ID NO: 24741 - DNA, 25 bp, Homo sapien
ccacagaagggtaaggtctccgtac

SEQ ID NO: 24742 - DNA, 25 bp, Homo sapien
ccacagaagggttaggtctccgtac

SEQ ID NO: 24743 - DNA, 25 bp, Homo sapien
gtctctactaaatgtgctacgttca

SEQ ID NO: 24744 - DNA, 25 bp, Homo sapien
gtctctactaaaagtgctacgttca

SEQ ID NO: 24745 - DNA, 25 bp, Homo sapien
ttaccgtttttatgtcacgtttacg

SEQ ID NO: 24746 - DNA, 25 bp, Homo sapien
ttaccgtttttaagtcacgtttacg

SEQ ID NO: 24747 - DNA, 25 bp, Homo sapien
cttcttgagttttagagtctcgtcg

SEQ ID NO: 24748 - DNA, 25 bp, Homo sapien
cttcttgagtttaagagtctcgtcg

SEQ ID NO: 24749 - DNA, 25 bp, Homo sapien
aattcctaggtgaccggtccgtacg

SEQ ID NO: 24750 - DNA, 25 bp, Homo sapien
aattcctaggtgtccggtccgtacg

SEQ ID NO: 24751 - DNA, 25 bp, Homo sapien
tttcgtcatgacctcttcgtcgaga

SEQ ID NO: 24752 - DNA, 25 bp, Homo sapien
tttcgtcatgacgtcttcgtcgaga

SEQ ID NO: 24753 - DNA, 25 bp, Homo sapien
tttagtttccgtagctgtagtagca

SEQ ID NO: 24754 - DNA, 25 bp, Homo sapien
tttagtttccgttgctgtagtagca

SEQ ID NO: 24755 - DNA, 25 bp, Homo sapien
tgcggcgaacggctattgctactac

SEQ ID NO: 24756 - DNA, 25 bp, Homo sapien
tgcggcgaacgggtattgctactac

SEQ ID NO: 24757 - DNA, 25 bp, Homo sapien
acaaccagacaaaaagaacccgacg

SEQ ID NO: 24758 - DNA, 25 bp, Homo sapien
acaaccagacaataagaacccgacg

SEQ ID NO: 24759 - DNA, 25 bp, Homo sapien
gaacctaaaagaagcgaacctaacg

SEQ ID NO: 24760 - DNA, 25 bp, Homo sapien
gaacctaaaagatgcgaacctaacg

SEQ ID NO: 24761 - DNA, 25 bp, Homo sapien
gaacttaagaaaggaggacactctc

SEQ ID NO: 24762 - DNA, 25 bp, Homo sapien
gaacttaagaaacgaggacactctc

SEQ ID NO: 24763 - DNA, 25 bp, Homo sapien
aaagttttctacttcggagacaaca

SEQ ID NO: 24764 - DNA, 25 bp, Homo sapien
aaagttttctacatcggagacaaca

SEQ ID NO: 24765 - DNA, 25 bp, Homo sapien
gacttttctagttacggactcattg

SEQ ID NO: 24766 - DNA, 25 bp, Homo sapien
gacttttctagtaacggactcattg

SEQ ID NO: 24767 - DNA, 25 bp, Homo sapien
tcttgttagtgtcgtgtcctttacg

SEQ ID NO: 24768 - DNA, 25 bp, Homo sapien
tcttgttagtgtggtgtcctttacg

SEQ ID NO: 24769 - DNA, 25 bp, Homo sapien
catctgtctcggatgattcattcga

SEQ ID NO: 24770 - DNA, 25 bp, Homo sapien
catctgtctcggttgattcattcga

SEQ ID NO: 24771 - DNA, 25 bp, Homo sapien
gtaccgtctttacatgtctcttcag

SEQ ID NO: 24772 - DNA, 25 bp, Homo sapien
gtaccgtctttagatgtctcttcag

SEQ ID NO: 24773 - DNA, 25 bp, Homo sapien
ctgtggtgtacgtattctttgtcgt

SEQ ID NO: 24774 - DNA, 25 bp, Homo sapien
ctgtggtgtacgaattctttgtcgt

SEQ ID NO: 24775 - DNA, 25 bp, Homo sapien
gagtggtggagaccttatctctcgt

SEQ ID NO: 24776 - DNA, 25 bp, Homo sapien
gagtggtggagagcttatctctcgt

SEQ ID NO: 24777 - DNA, 25 bp, Homo sapien
cgcggctgtcgagcacgtggcacac

SEQ ID NO: 24778 - DNA, 25 bp, Homo sapien
cgcggctgtcgaccacgtggcacac

SEQ ID NO: 24779 - DNA, 25 bp, Homo sapien
agacgcgagtgcaggaccggccact

SEQ ID NO: 24780 - DNA, 25 bp, Homo sapien
agacgcgagtgctggaccggccact

SEQ ID NO: 24781 - DNA, 25 bp, Homo sapien
acgcacgcacggtgcggacgtctct

SEQ ID NO: 24782 - DNA, 25 bp, Homo sapien
acgcacgcacggagcggacgtctct

SEQ ID NO: 24783 - DNA, 25 bp, Homo sapien
tgtatgtttgcacgtgtacacacgt

SEQ ID NO: 24784 - DNA, 25 bp, Homo sapien
tgtatgtttgcaggtgtacacacgt

SEQ ID NO: 24785 - DNA, 25 bp, Homo sapien
gggtgagtgtctccaagactacatt

SEQ ID NO: 24786 - DNA, 25 bp, Homo sapien
gggtgagtgtctgcaagactacatt

SEQ ID NO: 24787 - DNA, 25 bp, Homo sapien
ttcggtacgtatttcacaaagattt

SEQ ID NO: 24788 - DNA, 25 bp, Homo sapien
ttcggtacgtatatcacaaagattt

SEQ ID NO: 24789 - DNA, 25 bp, Homo sapien
ttagttgtggtggatcaaaccgttc

SEQ ID NO: 24790 - DNA, 25 bp, Homo sapien
ttagttgtggtgcatcaaaccgttc

SEQ ID NO: 24791 - DNA, 25 bp, Homo sapien
aggtgggtcctcgccacgcgtctct

SEQ ID NO: 24792 - DNA, 25 bp, Homo sapien
aggtgggtcctccccacgcgtctct

SEQ ID NO: 24793 - DNA, 25 bp, Homo sapien
gtcgagggaagtcctcacttttcct

SEQ ID NO: 24794 - DNA, 25 bp, Homo sapien
gtcgagggaagtgctcacttttcct

SEQ ID NO: 24795 - DNA, 25 bp, Homo sapien
tgagacaggggcagtactgttgtcc

SEQ ID NO: 24796 - DNA, 25 bp, Homo sapien
tgagacaggggctgtactgttgtcc

SEQ ID NO: 24797 - DNA, 25 bp, Homo sapien
gactaagaaagattcatctgatact

SEQ ID NO: 24798 - DNA, 25 bp, Homo sapien
gactaagaaagaatcatctgatact

SEQ ID NO: 24799 - DNA, 25 bp, Homo sapien
gtgactgccacgatttgtatttata

SEQ ID NO: 24800 - DNA, 25 bp, Homo sapien
gtgactgccacgttttgtatttata

SEQ ID NO: 24801 - DNA, 25 bp, Homo sapien
gctcacaagaatttcacttgtgctt

SEQ ID NO: 24802 - DNA, 25 bp, Homo sapien
gctcacaagaatatcacttgtgctt

SEQ ID NO: 24803 - DNA, 25 bp, Homo sapien
aacaagagataaacatctaaccggt

SEQ ID NO: 24804 - DNA, 25 bp, Homo sapien
aacaagagataatcatctaaccggt

SEQ ID NO: 24805 - DNA, 25 bp, Homo sapien
tagatgagacaaattattccgttct

SEQ ID NO: 24806 - DNA, 25 bp, Homo sapien
tagatgagacaatttattccgttct

SEQ ID NO: 24807 - DNA, 25 bp, Homo sapien
ccgagacgacattaacggtaccttc

SEQ ID NO: 24808 - DNA, 25 bp, Homo sapien
ccgagacgacataaacggtaccttc

SEQ ID NO: 24809 - DNA, 25 bp, Homo sapien
ctctttgtcgactaccagtagaaac

SEQ ID NO: 24810 - DNA, 25 bp, Homo sapien
ctctttgtcgacaaccagtagaaac

SEQ ID NO: 24811 - DNA, 25 bp, Homo sapien
agtctctattccacactgaagaccg

SEQ ID NO: 24812 - DNA, 25 bp, Homo sapien
agtctctattcctcactgaagaccg

SEQ ID NO: 24813 - DNA, 25 bp, Homo sapien
gtttcgtgtcactttctagtggata

SEQ ID NO: 24814 - DNA, 25 bp, Homo sapien
gtttcgtgtcacattctagtggata

SEQ ID NO: 24815 - DNA, 25 bp, Homo sapien
tctcttccctatctctcgtgagagt

SEQ ID NO: 24816 - DNA, 25 bp, Homo sapien
tctcttccctatgtctcgtgagagt

SEQ ID NO: 24817 - DNA, 25 bp, Homo sapien
tatggtgtacccttcatggtgacga

SEQ ID NO: 24818 - DNA, 25 bp, Homo sapien
tatggtgtacccatcatggtgacga

SEQ ID NO: 24819 - DNA, 25 bp, Homo sapien
aagacgatctacagcacgttgtggg

SEQ ID NO: 24820 - DNA, 25 bp, Homo sapien
aagacgatctactgcacgttgtggg

SEQ ID NO: 24821 - DNA, 25 bp, Homo sapien
caagcgtacgacaggacagcggtga

SEQ ID NO: 24822 - DNA, 25 bp, Homo sapien
caagcgtacgactggacagcggtga

SEQ ID NO: 24823 - DNA, 25 bp, Homo sapien
gtcgaccgaccgagtcaccggagac

SEQ ID NO: 24824 - DNA, 25 bp, Homo sapien
gtcgaccgaccgtgtcaccggagac

SEQ ID NO: 24825 - DNA, 25 bp, Homo sapien
gtcgtcaccccgaggacacgtgggt

SEQ ID NO: 24826 - DNA, 25 bp, Homo sapien
gtcgtcaccccgtggacacgtgggt

SEQ ID NO: 24827 - DNA, 25 bp, Homo sapien
acgtccgacgggtaccgaccggaag

SEQ ID NO: 24828 - DNA, 25 bp, Homo sapien
acgtccgacgggaaccgaccggaag

SEQ ID NO: 24829 - DNA, 25 bp, Homo sapien
caccttaccgtgaccgaccggtgag

SEQ ID NO: 24830 - DNA, 25 bp, Homo sapien
caccttaccgtgtccgaccggtgag

SEQ ID NO: 24831 - DNA, 25 bp, Homo sapien
ctccgtctccggtccgtgtggagtg

SEQ ID NO: 24832 - DNA, 25 bp, Homo sapien
ctccgtctccggaccgtgtggagtg

SEQ ID NO: 24833 - DNA, 25 bp, Homo sapien
cttctcttcgggtctacctaggaac

SEQ ID NO: 24834 - DNA, 25 bp, Homo sapien
cttctcttcgggactacctaggaac

SEQ ID NO: 24835 - DNA, 25 bp, Homo sapien
atttgtgtgtgtttcgaccccgaca

SEQ ID NO: 24836 - DNA, 25 bp, Homo sapien
atttgtgtgtgtatcgaccccgaca

SEQ ID NO: 24837 - DNA, 25 bp, Homo sapien
agtagtaggactaaccgactctgca

SEQ ID NO: 24838 - DNA, 25 bp, Homo sapien
agtagtaggacttaccgactctgca

SEQ ID NO: 24839 - DNA, 25 bp, Homo sapien
accttctgagccagtcggttcgtaa

SEQ ID NO: 24840 - DNA, 25 bp, Homo sapien
accttctgagcctgtcggttcgtaa

SEQ ID NO: 24841 - DNA, 25 bp, Homo sapien
ctcgtctccgaccactcaatgtgaa

SEQ ID NO: 24842 - DNA, 25 bp, Homo sapien
ctcgtctccgacgactcaatgtgaa

SEQ ID NO: 24843 - DNA, 25 bp, Homo sapien
gctccagaacccagacgtcgtacga

SEQ ID NO: 24844 - DNA, 25 bp, Homo sapien
gctccagaaccctgacgtcgtacga

SEQ ID NO: 24845 - DNA, 25 bp, Homo sapien
gtgtctccaacactgtagactccga

SEQ ID NO: 24846 - DNA, 25 bp, Homo sapien
gtgtctccaacagtgtagactccga

SEQ ID NO: 24847 - DNA, 25 bp, Homo sapien
agtcgttccccgtagatacacccga

SEQ ID NO: 24848 - DNA, 25 bp, Homo sapien
agtcgttccccgaagatacacccga

SEQ ID NO: 24849 - DNA, 25 bp, Homo sapien
ttggagtctcactaaagacacaccc

SEQ ID NO: 24850 - DNA, 25 bp, Homo sapien
ttggagtctcacaaaagacacaccc

SEQ ID NO: 24851 - DNA, 25 bp, Homo sapien
tccgacttgggcagacggacccgtg

SEQ ID NO: 24852 - DNA, 25 bp, Homo sapien
tccgacttgggctgacggacccgtg

SEQ ID NO: 24853 - DNA, 25 bp, Homo sapien
accactgggtacaagacccgaacac

SEQ ID NO: 24854 - DNA, 25 bp, Homo sapien
accactgggtactagacccgaacac

SEQ ID NO: 24855 - DNA, 25 bp, Homo sapien
acaccggggtaaaccggtcgtctcg

SEQ ID NO: 24856 - DNA, 25 bp, Homo sapien
acaccggggtaatccggtcgtctcg

SEQ ID NO: 24857 - DNA, 25 bp, Homo sapien
gtggaactagaagtgaaactttctc

SEQ ID NO: 24858 - DNA, 25 bp, Homo sapien
gtggaactagaactgaaactttctc

SEQ ID NO: 24859 - DNA, 25 bp, Homo sapien
agaaggacacagacgactccactct

SEQ ID NO: 24860 - DNA, 25 bp, Homo sapien
agaaggacacagtcgactccactct

SEQ ID NO: 24861 - DNA, 25 bp, Homo sapien
gagaagtcgacatgcctctcactct

SEQ ID NO: 24862 - DNA, 25 bp, Homo sapien
gagaagtcgacaagcctctcactct

SEQ ID NO: 24863 - DNA, 25 bp, Homo sapien
atacaacgtcaggtcccattacacg

SEQ ID NO: 24864 - DNA, 25 bp, Homo sapien
atacaacgtcagctcccattacacg

SEQ ID NO: 24865 - DNA, 25 bp, Homo sapien
aaaaaaggtcacgtacccgttgtcc

SEQ ID NO: 24866 - DNA, 25 bp, Homo sapien
aaaaaaggtcacctacccgttgtcc

SEQ ID NO: 24867 - DNA, 25 bp, Homo sapien
aataaaaggttagtattgccagacg

SEQ ID NO: 24868 - DNA, 25 bp, Homo sapien
aataaaaggttactattgccagacg

SEQ ID NO: 24869 - DNA, 25 bp, Homo sapien
taaggaggttctaatcacactacaa

SEQ ID NO: 24870 - DNA, 25 bp, Homo sapien
taaggaggttcttatcacactacaa

SEQ ID NO: 24871 - DNA, 25 bp, Homo sapien
atttgagagatgtattactgtcaca

SEQ ID NO: 24872 - DNA, 25 bp, Homo sapien
atttgagagatgaattactgtcaca

SEQ ID NO: 24873 - DNA, 25 bp, Homo sapien
atcgtcggggttagagatggactct

SEQ ID NO: 24874 - DNA, 25 bp, Homo sapien
atcgtcggggtttgagatggactct

SEQ ID NO: 24875 - DNA, 25 bp, Homo sapien
aacggcgcgtcgtcgacgtcgagcc

SEQ ID NO: 24876 - DNA, 25 bp, Homo sapien
aacggcgcgtcgacgacgtcgagcc

SEQ ID NO: 24877 - DNA, 25 bp, Homo sapien
tggatacgtttgtttatgtacatcc

SEQ ID NO: 24878 - DNA, 25 bp, Homo sapien
tggatacgtttgattatgtacatcc

SEQ ID NO: 24879 - DNA, 25 bp, Homo sapien
acaggatacctctgaaaaaagtaac

SEQ ID NO: 24880 - DNA, 25 bp, Homo sapien
acaggatacctcagaaaaaagtaac

SEQ ID NO: 24881 - DNA, 25 bp, Homo sapien
gactcggacgcctctctcatcgggg

SEQ ID NO: 24882 - DNA, 25 bp, Homo sapien
gactcggacgccactctcatcgggg

SEQ ID NO: 24883 - DNA, 25 bp, Homo sapien
cccgtggccggagaaactctacgtt

SEQ ID NO: 24884 - DNA, 25 bp, Homo sapien
cccgtggccggacaaactctacgtt

SEQ ID NO: 24885 - DNA, 25 bp, Homo sapien
gacgtgagccttaaactcgaccacc

SEQ ID NO: 24886 - DNA, 25 bp, Homo sapien
gacgtgagcctttaactcgaccacc

SEQ ID NO: 24887 - DNA, 25 bp, Homo sapien
cgtgtgcacactgaacgtagaccaa

SEQ ID NO: 24888 - DNA, 25 bp, Homo sapien
cgtgtgcacactcaacgtagaccaa

SEQ ID NO: 24889 - DNA, 25 bp, Homo sapien
aggatacacacaagagactacatgt

SEQ ID NO: 24890 - DNA, 25 bp, Homo sapien
aggatacacacatgagactacatgt

SEQ ID NO: 24891 - DNA, 25 bp, Homo sapien
agagggacgagtcacatcgatccaa

SEQ ID NO: 24892 - DNA, 25 bp, Homo sapien
agagggacgagtgacatcgatccaa

SEQ ID NO: 24893 - DNA, 25 bp, Homo sapien
gtggtccacactttgtgcgacgttc

SEQ ID NO: 24894 - DNA, 25 bp, Homo sapien
gtggtccacactatgtgcgacgttc

SEQ ID NO: 24895 - DNA, 25 bp, Homo sapien
gtgtccctactcgtggtcctacggc

SEQ ID NO: 24896 - DNA, 25 bp, Homo sapien
gtgtccctactcctggtcctacggc

SEQ ID NO: 24897 - DNA, 25 bp, Homo sapien
gtagtgtccctctgcgttctttccc

SEQ ID NO: 24898 - DNA, 25 bp, Homo sapien
gtagtgtccctcagcgttctttccc

SEQ ID NO: 24899 - DNA, 25 bp, Homo sapien
gaggttgactcctttctttccgtcg

SEQ ID NO: 24900 - DNA, 25 bp, Homo sapien
gaggttgactccattctttccgtcg

SEQ ID NO: 24901 - DNA, 25 bp, Homo sapien
agtgtctgtatcgtctcccacgtcc

SEQ ID NO: 24902 - DNA, 25 bp, Homo sapien
agtgtctgtatcctctcccacgtcc

SEQ ID NO: 24903 - DNA, 25 bp, Homo sapien
cgtgacttcactttccgacgtctct

SEQ ID NO: 24904 - DNA, 25 bp, Homo sapien
cgtgacttcactatccgacgtctct

SEQ ID NO: 24905 - DNA, 25 bp, Homo sapien
ggggttctctgtggtgtcacacttt

SEQ ID NO: 24906 - DNA, 25 bp, Homo sapien
ggggttctctgtcgtgtcacacttt

SEQ ID NO: 24907 - DNA, 25 bp, Homo sapien
gggtatctacctttccttcggtggg

SEQ ID NO: 24908 - DNA, 25 bp, Homo sapien
gggtatctacctatccttcggtggg

SEQ ID NO: 24909 - DNA, 25 bp, Homo sapien
tgtcattctaccaccatggtacatg

SEQ ID NO: 24910 - DNA, 25 bp, Homo sapien
tgtcattctacctccatggtacatg

SEQ ID NO: 24911 - DNA, 25 bp, Homo sapien
ttacatgttgtctccagggtaacac

SEQ ID NO: 24912 - DNA, 25 bp, Homo sapien
ttacatgttgtcaccagggtaacac

SEQ ID NO: 24913 - DNA, 25 bp, Homo sapien
ttaagtatgctttcggtgcgtaaca

SEQ ID NO: 24914 - DNA, 25 bp, Homo sapien
ttaagtatgcttacggtgcgtaaca

SEQ ID NO: 24915 - DNA, 25 bp, Homo sapien
tttatagtgtcaacggtgcgtccgg

SEQ ID NO: 24916 - DNA, 25 bp, Homo sapien
tttatagtgtcatcggtgcgtccgg

SEQ ID NO: 24917 - DNA, 25 bp, Homo sapien
caggtttatgttacaacttttgtcg

SEQ ID NO: 24918 - DNA, 25 bp, Homo sapien
caggtttatgtttcaacttttgtcg

SEQ ID NO: 24919 - DNA, 25 bp, Homo sapien
agtggtaatggtacacaggagcctc

SEQ ID NO: 24920 - DNA, 25 bp, Homo sapien
agtggtaatggttcacaggagcctc

SEQ ID NO: 24921 - DNA, 25 bp, Homo sapien
gttcgtaggagcacgctggcgctct

SEQ ID NO: 24922 - DNA, 25 bp, Homo sapien
gttcgtaggagctcgctggcgctct

SEQ ID NO: 24923 - DNA, 25 bp, Homo sapien
cagtggtggaagtccctcgtcttct

SEQ ID NO: 24924 - DNA, 25 bp, Homo sapien
cagtggtggaagaccctcgtcttct

SEQ ID NO: 24925 - DNA, 25 bp, Homo sapien
gttttgttacgacacattctcgtct

SEQ ID NO: 24926 - DNA, 25 bp, Homo sapien
gttttgttacgagacattctcgtct

SEQ ID NO: 24927 - DNA, 25 bp, Homo sapien
ctatatacaacgttgtgtcttggtt

SEQ ID NO: 24928 - DNA, 25 bp, Homo sapien
ctatatacaacgatgtgtcttggtt

SEQ ID NO: 24929 - DNA, 25 bp, Homo sapien
ttacgaagtgaggttgtttctgttt

SEQ ID NO: 24930 - DNA, 25 bp, Homo sapien
ttacgaagtgagcttgtttctgttt

SEQ ID NO: 24931 - DNA, 25 bp, Homo sapien
aggtctgagtctctcccgtacgtac

SEQ ID NO: 24932 - DNA, 25 bp, Homo sapien
aggtctgagtctgtcccgtacgtac

SEQ ID NO: 24933 - DNA, 25 bp, Homo sapien
gtccgtatctgatcgtctcgtactt

SEQ ID NO: 24934 - DNA, 25 bp, Homo sapien
gtccgtatctgaacgtctcgtactt

SEQ ID NO: 24935 - DNA, 25 bp, Homo sapien
ggtgggtacttctcccgtcgactct

SEQ ID NO: 24936 - DNA, 25 bp, Homo sapien
ggtgggtacttcacccgtcgactct

SEQ ID NO: 24937 - DNA, 25 bp, Homo sapien
actgtaggagtatcccgaatagaca

SEQ ID NO: 24938 - DNA, 25 bp, Homo sapien
actgtaggagtaacccgaatagaca

SEQ ID NO: 24939 - DNA, 25 bp, Homo sapien
tctccaacatacctcggaggtacgg

SEQ ID NO: 24940 - DNA, 25 bp, Homo sapien
tctccaacatacgtcggaggtacgg

SEQ ID NO: 24941 - DNA, 25 bp, Homo sapien
ggttctacgaatataccgagaccga

SEQ ID NO: 24942 - DNA, 25 bp, Homo sapien
ggttctacgaatttaccgagaccga

SEQ ID NO: 24943 - DNA, 25 bp, Homo sapien
gagattacaagtttcttactaacag

SEQ ID NO: 24944 - DNA, 25 bp, Homo sapien
gagattacaagtatcttactaacag

SEQ ID NO: 24945 - DNA, 25 bp, Homo sapien
aactaagtgacgatccttttaatag

SEQ ID NO: 24946 - DNA, 25 bp, Homo sapien
aactaagtgacgttccttttaatag

SEQ ID NO: 24947 - DNA, 25 bp, Homo sapien
gcatcgcaagtcctgattttaagat

SEQ ID NO: 24948 - DNA, 25 bp, Homo sapien
gcatcgcaagtcgtgattttaagat

SEQ ID NO: 24949 - DNA, 25 bp, Homo sapien
tgtcaatgagacttctctcgacata

SEQ ID NO: 24950 - DNA, 25 bp, Homo sapien
tgtcaatgagacatctctcgacata

SEQ ID NO: 24951 - DNA, 25 bp, Homo sapien
tgtcacaaataactcgtcgactcga

SEQ ID NO: 24952 - DNA, 25 bp, Homo sapien
tgtcacaaataagtcgtcgactcga

SEQ ID NO: 24953 - DNA, 25 bp, Homo sapien
ttacagtttgaggtgtctgttactc

SEQ ID NO: 24954 - DNA, 25 bp, Homo sapien
ttacagtttgagctgtctgttactc

SEQ ID NO: 24955 - DNA, 25 bp, Homo sapien
tacgagtattggttaggtccgcggt

SEQ ID NO: 24956 - DNA, 25 bp, Homo sapien
tacgagtattggataggtccgcggt

SEQ ID NO: 24957 - DNA, 25 bp, Homo sapien
ttgaatactgtggtctcgttttgac

SEQ ID NO: 24958 - DNA, 25 bp, Homo sapien
ttgaatactgtgctctcgttttgac

SEQ ID NO: 24959 - DNA, 25 bp, Homo sapien
ttcgaaattgtatacgtgtttcgtc

SEQ ID NO: 24960 - DNA, 25 bp, Homo sapien
ttcgaaattgtaaacgtgtttcgtc

SEQ ID NO: 24961 - DNA, 25 bp, Homo sapien
ttacggattcttatcgtgtttacga

SEQ ID NO: 24962 - DNA, 25 bp, Homo sapien
ttacggattcttttcgtgtttacga

SEQ ID NO: 24963 - DNA, 25 bp, Homo sapien
ccaatgtttatttcgttatcgtagt

SEQ ID NO: 24964 - DNA, 25 bp, Homo sapien
ccaatgtttattacgttatcgtagt

SEQ ID NO: 24965 - DNA, 25 bp, Homo sapien
cacacgagtgtcttttaatcttgtg

SEQ ID NO: 24966 - DNA, 25 bp, Homo sapien
cacacgagtgtcatttaatcttgtg

SEQ ID NO: 24967 - DNA, 25 bp, Homo sapien
ctaagagtcgtcgaaataacttata

SEQ ID NO: 24968 - DNA, 25 bp, Homo sapien
ctaagagtcgtccaaataacttata

SEQ ID NO: 24969 - DNA, 25 bp, Homo sapien
ccacagtcctaaagaagactatcga

SEQ ID NO: 24970 - DNA, 25 bp, Homo sapien
ccacagtcctaatgaagactatcga

SEQ ID NO: 24971 - DNA, 25 bp, Homo sapien
acgcgaccctaaagaccgaccgaga

SEQ ID NO: 24972 - DNA, 25 bp, Homo sapien
acgcgaccctaatgaccgaccgaga

SEQ ID NO: 24973 - DNA, 25 bp, Homo sapien
catgtctccctagtctcaggtccga

SEQ ID NO: 24974 - DNA, 25 bp, Homo sapien
catgtctccctactctcaggtccga

SEQ ID NO: 24975 - DNA, 25 bp, Homo sapien
gttttagttacatcttggtagcgac

SEQ ID NO: 24976 - DNA, 25 bp, Homo sapien
gttttagttacaacttggtagcgac

SEQ ID NO: 24977 - DNA, 25 bp, Homo sapien
agtccactcgaccaccttgtcgggg

SEQ ID NO: 24978 - DNA, 25 bp, Homo sapien
agtccactcgacgaccttgtcgggg

SEQ ID NO: 24979 - DNA, 25 bp, Homo sapien
acttctcgtattcaaccttagtggt

SEQ ID NO: 24980 - DNA, 25 bp, Homo sapien
acttctcgtattgaaccttagtggt

SEQ ID NO: 24981 - DNA, 25 bp, Homo sapien
agtactacatcgtcaacatttaggg

SEQ ID NO: 24982 - DNA, 25 bp, Homo sapien
agtactacatcgacaacatttaggg

SEQ ID NO: 24983 - DNA, 25 bp, Homo sapien
gtagcatcgagtacccgtccgggag

SEQ ID NO: 24984 - DNA, 25 bp, Homo sapien
gtagcatcgagttcccgtccgggag

SEQ ID NO: 24985 - DNA, 25 bp, Homo sapien
tgtggtatcgtgtcccgttggtgac

SEQ ID NO: 24986 - DNA, 25 bp, Homo sapien
tgtggtatcgtgacccgttggtgac

SEQ ID NO: 24987 - DNA, 25 bp, Homo sapien
ttaggaggacagaaacatacattac

SEQ ID NO: 24988 - DNA, 25 bp, Homo sapien
ttaggaggacagtaacatacattac

SEQ ID NO: 24989 - DNA, 25 bp, Homo sapien
tcgacgtgacccagacacacagagg

SEQ ID NO: 24990 - DNA, 25 bp, Homo sapien
tcgacgtgaccctgacacacagagg

SEQ ID NO: 24991 - DNA, 25 bp, Homo sapien
tcggttcgccccttcacaaagtagg

SEQ ID NO: 24992 - DNA, 25 bp, Homo sapien
tcggttcgccccatcacaaagtagg

SEQ ID NO: 24993 - DNA, 25 bp, Homo sapien
tacacgagtctatgtcttaaaagtc

SEQ ID NO: 24994 - DNA, 25 bp, Homo sapien
tacacgagtctaagtcttaaaagtc

SEQ ID NO: 24995 - DNA, 25 bp, Homo sapien
tttgtatactacaggaacgaaatac

SEQ ID NO: 24996 - DNA, 25 bp, Homo sapien
tttgtatactactggaacgaaatac

SEQ ID NO: 24997 - DNA, 25 bp, Homo sapien
gagtctccgtgtctgagaacccaag

SEQ ID NO: 24998 - DNA, 25 bp, Homo sapien
gagtctccgtgtgtgagaacccaag

SEQ ID NO: 24999 - DNA, 25 bp, Homo sapien
aatcttacggtagtgacaaccaaag

SEQ ID NO: 25000 - DNA, 25 bp, Homo sapien
aatcttacggtactgacaaccaaag

SEQ ID NO: 25001 - DNA, 25 bp, Homo sapien
caacgagtatgttctgggagacggt

SEQ ID NO: 25002 - DNA, 25 bp, Homo sapien
caacgagtatgtactgggagacggt

SEQ ID NO: 25003 - DNA, 25 bp, Homo sapien
acgaaagtgtgtatggacgacgaca

SEQ ID NO: 25004 - DNA, 25 bp, Homo sapien
acgaaagtgtgtttggacgacgaca

SEQ ID NO: 25005 - DNA, 25 bp, Homo sapien
aacaaaggtgtacagagaataccat

SEQ ID NO: 25006 - DNA, 25 bp, Homo sapien
aacaaaggtgtagagagaataccat

SEQ ID NO: 25007 - DNA, 25 bp, Homo sapien
acgaccccggataccggagacagta

SEQ ID NO: 25008 - DNA, 25 bp, Homo sapien
acgaccccggattccggagacagta

SEQ ID NO: 25009 - DNA, 25 bp, Homo sapien
ttcccttgtcggtgtcggaaccgtg

SEQ ID NO: 25010 - DNA, 25 bp, Homo sapien
ttcccttgtcggagtcggaaccgtg

SEQ ID NO: 25011 - DNA, 25 bp, Homo sapien
tctgtccaatctgaacgtgggtttt

SEQ ID NO: 25012 - DNA, 25 bp, Homo sapien
tctgtccaatctcaacgtgggtttt

SEQ ID NO: 25013 - DNA, 25 bp, Homo sapien
ccgacgtatccgacggaggtctatg

SEQ ID NO: 25014 - DNA, 25 bp, Homo sapien
ccgacgtatccgtcggaggtctatg

SEQ ID NO: 25015 - DNA, 25 bp, Homo sapien
gtagtactaccgtcgacaccgccga

SEQ ID NO: 25016 - DNA, 25 bp, Homo sapien
gtagtactaccgacgacaccgccga

SEQ ID NO: 25017 - DNA, 25 bp, Homo sapien
cgtcttcagcaggagcggcgctcga

SEQ ID NO: 25018 - DNA, 25 bp, Homo sapien
cgtcttcagcagcagcggcgctcga

SEQ ID NO: 25019 - DNA, 25 bp, Homo sapien
gtctgcagtggtgagaagctcgaca

SEQ ID NO: 25020 - DNA, 25 bp, Homo sapien
gtctgcagtggtcagaagctcgaca

SEQ ID NO: 25021 - DNA, 25 bp, Homo sapien
gtagtctcgagacttgaactctcca

SEQ ID NO: 25022 - DNA, 25 bp, Homo sapien
gtagtctcgagagttgaactctcca

SEQ ID NO: 25023 - DNA, 25 bp, Homo sapien
ctgataaagtagtttgaacccggac

SEQ ID NO: 25024 - DNA, 25 bp, Homo sapien
ctgataaagtagattgaacccggac

SEQ ID NO: 25025 - DNA, 25 bp, Homo sapien
tgtctttctaatttcgaccgtagga

SEQ ID NO: 25026 - DNA, 25 bp, Homo sapien
tgtctttctaatatcgaccgtagga

SEQ ID NO: 25027 - DNA, 25 bp, Homo sapien
ggaagtttgagtctcccttcttaga

SEQ ID NO: 25028 - DNA, 25 bp, Homo sapien
ggaagtttgagtgtcccttcttaga

SEQ ID NO: 25029 - DNA, 25 bp, Homo sapien
atagtgtcggatttccctttatatt

SEQ ID NO: 25030 - DNA, 25 bp, Homo sapien
atagtgtcggatatccctttatatt

SEQ ID NO: 25031 - DNA, 25 bp, Homo sapien
agagaagactattaaacgtctcaaa

SEQ ID NO: 25032 - DNA, 25 bp, Homo sapien
agagaagactataaaacgtctcaaa

SEQ ID NO: 25033 - DNA, 25 bp, Homo sapien
agtagataaagtatcatcgtccaga

SEQ ID NO: 25034 - DNA, 25 bp, Homo sapien
agtagataaagtttcatcgtccaga

SEQ ID NO: 25035 - DNA, 25 bp, Homo sapien
cccaagtgtcattgtttgtggttag

SEQ ID NO: 25036 - DNA, 25 bp, Homo sapien
cccaagtgtcatagtttgtggttag

SEQ ID NO: 25037 - DNA, 25 bp, Homo sapien
ccaagtaccgttatcttcgaggttg

SEQ ID NO: 25038 - DNA, 25 bp, Homo sapien
ccaagtaccgttttcttcgaggttg

SEQ ID NO: 25039 - DNA, 25 bp, Homo sapien
cgcccactcccgactcttccggtcg

SEQ ID NO: 25040 - DNA, 25 bp, Homo sapien
cgcccactcccgtctcttccggtcg

SEQ ID NO: 25041 - DNA, 25 bp, Homo sapien
tcttacccgctacaaagagtcccga

SEQ ID NO: 25042 - DNA, 25 bp, Homo sapien
tcttacccgctagaaagagtcccga

SEQ ID NO: 25043 - DNA, 25 bp, Homo sapien
cgtcccggagcgacaggtcctcggt

SEQ ID NO: 25044 - DNA, 25 bp, Homo sapien
cgtcccggagcgtcaggtcctcggt

SEQ ID NO: 25045 - DNA, 25 bp, Homo sapien
cgacgacggtgtcgacgttcctggt

SEQ ID NO: 25046 - DNA, 25 bp, Homo sapien
cgacgacggtgtggacgttcctggt

SEQ ID NO: 25047 - DNA, 25 bp, Homo sapien
cctctcgagtaacacgggacaccgg

SEQ ID NO: 25048 - DNA, 25 bp, Homo sapien
cctctcgagtaagacgggacaccgg

SEQ ID NO: 25049 - DNA, 25 bp, Homo sapien
gtcacgactcttaattcaaggataa

SEQ ID NO: 25050 - DNA, 25 bp, Homo sapien
gtcacgactctttattcaaggataa

SEQ ID NO: 25051 - DNA, 25 bp, Homo sapien
ctccaacagatgtcgaagacttaat

SEQ ID NO: 25052 - DNA, 25 bp, Homo sapien
ctccaacagatgacgaagacttaat

SEQ ID NO: 25053 - DNA, 25 bp, Homo sapien
agtctccaaacagaggacgaccaga

SEQ ID NO: 25054 - DNA, 25 bp, Homo sapien
agtctccaaacacaggacgaccaga

SEQ ID NO: 25055 - DNA, 25 bp, Homo sapien
ctccccaggaacagggacgtccagg

SEQ ID NO: 25056 - DNA, 25 bp, Homo sapien
ctccccaggaactgggacgtccagg

SEQ ID NO: 25057 - DNA, 25 bp, Homo sapien
accagagcgactggagcgactccag

SEQ ID NO: 25058 - DNA, 25 bp, Homo sapien
accagagcgactcgagcgactccag

SEQ ID NO: 25059 - DNA, 25 bp, Homo sapien
aacaagaggaccaggcactaccgct

SEQ ID NO: 25060 - DNA, 25 bp, Homo sapien
aacaagaggacctggcactaccgct

SEQ ID NO: 25061 - DNA, 25 bp, Homo sapien
tttcagagcgctccagagtccgcca

SEQ ID NO: 25062 - DNA, 25 bp, Homo sapien
tttcagagcgctgcagagtccgcca

SEQ ID NO: 25063 - DNA, 25 bp, Homo sapien
tgaacagttcgttcacgaccaccca

SEQ ID NO: 25064 - DNA, 25 bp, Homo sapien
tgaacagttcgtacacgaccaccca

SEQ ID NO: 25065 - DNA, 25 bp, Homo sapien
ggacagtatccgtgtcacgcaccca

SEQ ID NO: 25066 - DNA, 25 bp, Homo sapien
ggacagtatccgagtcacgcaccca

SEQ ID NO: 25067 - DNA, 25 bp, Homo sapien
actgataaggtatccgtctcgacca

SEQ ID NO: 25068 - DNA, 25 bp, Homo sapien
actgataaggtaaccgtctcgacca

SEQ ID NO: 25069 - DNA, 25 bp, Homo sapien
aaggtctcgccgtgtattgcctcca

SEQ ID NO: 25070 - DNA, 25 bp, Homo sapien
aaggtctcgccgagtattgcctcca

SEQ ID NO: 25071 - DNA, 25 bp, Homo sapien
gaaagtcagttgacccttccgaata

SEQ ID NO: 25072 - DNA, 25 bp, Homo sapien
gaaagtcagttgtcccttccgaata

SEQ ID NO: 25073 - DNA, 25 bp, Homo sapien
tttaacgatgaagtatcccgtgaag

SEQ ID NO: 25074 - DNA, 25 bp, Homo sapien
tttaacgatgaactatcccgtgaag

SEQ ID NO: 25075 - DNA, 25 bp, Homo sapien
ttatctttacggacttcttgacagt

SEQ ID NO: 25076 - DNA, 25 bp, Homo sapien
ttatctttacggtcttcttgacagt

SEQ ID NO: 25077 - DNA, 25 bp, Homo sapien
tcagtatttggtctactttagatac

SEQ ID NO: 25078 - DNA, 25 bp, Homo sapien
tcagtatttggtgtactttagatac

SEQ ID NO: 25079 - DNA, 25 bp, Homo sapien
gacgacaatgaacttttcttacgaa

SEQ ID NO: 25080 - DNA, 25 bp, Homo sapien
gacgacaatgaagttttcttacgaa

SEQ ID NO: 25081 - DNA, 25 bp, Homo sapien
agagcattaaactcaacactaaagg

SEQ ID NO: 25082 - DNA, 25 bp, Homo sapien
agagcattaaacacaacactaaagg

SEQ ID NO: 25083 - DNA, 25 bp, Homo sapien
acccgggtgctcacaaacgaaaacg

SEQ ID NO: 25084 - DNA, 25 bp, Homo sapien
acccgggtgctctcaaacgaaaacg

SEQ ID NO: 25085 - DNA, 25 bp, Homo sapien
acgggtagcgagtccggacaaaact

SEQ ID NO: 25086 - DNA, 25 bp, Homo sapien
acgggtagcgagaccggacaaaact

SEQ ID NO: 25087 - DNA, 25 bp, Homo sapien
tagggaggtacaaactctacaagga

SEQ ID NO: 25088 - DNA, 25 bp, Homo sapien
tagggaggtacatactctacaagga

SEQ ID NO: 25089 - DNA, 25 bp, Homo sapien
cagaagaccttatacttacaagtga

SEQ ID NO: 25090 - DNA, 25 bp, Homo sapien
cagaagaccttaaacttacaagtga

SEQ ID NO: 25091 - DNA, 25 bp, Homo sapien
gacaacgacccgttcaacaacttga

SEQ ID NO: 25092 - DNA, 25 bp, Homo sapien
gacaacgacccgatcaacaacttga

SEQ ID NO: 25093 - DNA, 25 bp, Homo sapien
ataaagttcgaggtcaaacctcgga

SEQ ID NO: 25094 - DNA, 25 bp, Homo sapien
ataaagttcgagctcaaacctcgga

SEQ ID NO: 25095 - DNA, 25 bp, Homo sapien
agaggtcacacttaccagaccacaa

SEQ ID NO: 25096 - DNA, 25 bp, Homo sapien
agaggtcacactaaccagaccacaa

SEQ ID NO: 25097 - DNA, 25 bp, Homo sapien
tcgaacgcaaataacctttgacgaa

SEQ ID NO: 25098 - DNA, 25 bp, Homo sapien
tcgaacgcaaattacctttgacgaa

SEQ ID NO: 25099 - DNA, 25 bp, Homo sapien
cgtgtataattgtcggtgtacactt

SEQ ID NO: 25100 - DNA, 25 bp, Homo sapien
cgtgtataattgacggtgtacactt

SEQ ID NO: 25101 - DNA, 25 bp, Homo sapien
aacgtttcctggacggtacacactc

SEQ ID NO: 25102 - DNA, 25 bp, Homo sapien
aacgtttcctggtcggtacacactc

SEQ ID NO: 25103 - DNA, 25 bp, Homo sapien
ccgtatgtccaggaaggactacagc

SEQ ID NO: 25104 - DNA, 25 bp, Homo sapien
ccgtatgtccagcaaggactacagc

SEQ ID NO: 25105 - DNA, 25 bp, Homo sapien
tcgtgtcggcgcacgagaaccgtgt

SEQ ID NO: 25106 - DNA, 25 bp, Homo sapien
tcgtgtcggcgctcgagaaccgtgt

SEQ ID NO: 25107 - DNA, 25 bp, Homo sapien
tggaggtacgcctagacccacgact

SEQ ID NO: 25108 - DNA, 25 bp, Homo sapien
tggaggtacgccaagacccacgact

SEQ ID NO: 25109 - DNA, 25 bp, Homo sapien
aagaccagtataatctgccctcgtt

SEQ ID NO: 25110 - DNA, 25 bp, Homo sapien
aagaccagtatattctgccctcgtt

SEQ ID NO: 25111 - DNA, 25 bp, Homo sapien
ccatggggtaagatcgccccgtgtc

SEQ ID NO: 25112 - DNA, 25 bp, Homo sapien
ccatggggtaagttcgccccgtgtc

SEQ ID NO: 25113 - DNA, 25 bp, Homo sapien
gacttttgggaagttccgaagtctc

SEQ ID NO: 25114 - DNA, 25 bp, Homo sapien
gacttttgggaacttccgaagtctc

SEQ ID NO: 25115 - DNA, 25 bp, Homo sapien
tatggaagagacttcggtctactcc

SEQ ID NO: 25116 - DNA, 25 bp, Homo sapien
tatggaagagacatcggtctactcc

SEQ ID NO: 25117 - DNA, 25 bp, Homo sapien
aatcgaaacatcatcagacgactca

SEQ ID NO: 25118 - DNA, 25 bp, Homo sapien
aatcgaaacatcttcagacgactca

SEQ ID NO: 25119 - DNA, 25 bp, Homo sapien
ggaaggtaagtgtgcctccactctc

SEQ ID NO: 25120 - DNA, 25 bp, Homo sapien
ggaaggtaagtgagcctccactctc

SEQ ID NO: 25121 - DNA, 25 bp, Homo sapien
agagaatccgggaacgaggctccct

SEQ ID NO: 25122 - DNA, 25 bp, Homo sapien
agagaatccgggtacgaggctccct

SEQ ID NO: 25123 - DNA, 25 bp, Homo sapien
acgaaaccaaagatagatccttcga

SEQ ID NO: 25124 - DNA, 25 bp, Homo sapien
acgaaaccaaagttagatccttcga

SEQ ID NO: 25125 - DNA, 25 bp, Homo sapien
tctgtccagaaattacatgcctcag

SEQ ID NO: 25126 - DNA, 25 bp, Homo sapien
tctgtccagaaaatacatgcctcag

SEQ ID NO: 25127 - DNA, 25 bp, Homo sapien
tctgatcccaagacgagatatttta

SEQ ID NO: 25128 - DNA, 25 bp, Homo sapien
tctgatcccaagtcgagatatttta

SEQ ID NO: 25129 - DNA, 25 bp, Homo sapien
atccagaacgtggagacggtatgga

SEQ ID NO: 25130 - DNA, 25 bp, Homo sapien
atccagaacgtgcagacggtatgga

SEQ ID NO: 25131 - DNA, 25 bp, Homo sapien
caatgtatggacaggaagccctcct

SEQ ID NO: 25132 - DNA, 25 bp, Homo sapien
caatgtatggactggaagccctcct

SEQ ID NO: 25133 - DNA, 25 bp, Homo sapien
ggagtgacgagtgtggtccttacct

SEQ ID NO: 25134 - DNA, 25 bp, Homo sapien
ggagtgacgagtctggtccttacct

SEQ ID NO: 25135 - DNA, 25 bp, Homo sapien
agtgcgtcagataccagtctcattt

SEQ ID NO: 25136 - DNA, 25 bp, Homo sapien
agtgcgtcagattccagtctcattt

SEQ ID NO: 25137 - DNA, 25 bp, Homo sapien
aaggaagggtcacgtccgtatctcg

SEQ ID NO: 25138 - DNA, 25 bp, Homo sapien
aaggaagggtcaggtccgtatctcg

SEQ ID NO: 25139 - DNA, 25 bp, Homo sapien
aaaacgtgtcggacgggtaccacct

SEQ ID NO: 25140 - DNA, 25 bp, Homo sapien
aaaacgtgtcggtcgggtaccacct

SEQ ID NO: 25141 - DNA, 25 bp, Homo sapien
aaaaaccgcggttacgacagcaaat

SEQ ID NO: 25142 - DNA, 25 bp, Homo sapien
aaaaaccgcggtaacgacagcaaat

SEQ ID NO: 25143 - DNA, 25 bp, Homo sapien
gagtcacaccggtccagtcaggcgt

SEQ ID NO: 25144 - DNA, 25 bp, Homo sapien
gagtcacaccggaccagtcaggcgt

SEQ ID NO: 25145 - DNA, 25 bp, Homo sapien
cgttgaagaggaacaacatgtcgtc

SEQ ID NO: 25146 - DNA, 25 bp, Homo sapien
cgttgaagaggatcaacatgtcgtc

SEQ ID NO: 25147 - DNA, 25 bp, Homo sapien
aggttcaaggacaacgtcagcggtt

SEQ ID NO: 25148 - DNA, 25 bp, Homo sapien
aggttcaaggactacgtcagcggtt

SEQ ID NO: 25149 - DNA, 25 bp, Homo sapien
cttatatagtgttacgaccaatgtt

SEQ ID NO: 25150 - DNA, 25 bp, Homo sapien
cttatatagtgtaacgaccaatgtt

SEQ ID NO: 25151 - DNA, 25 bp, Homo sapien
tacgtaaacctagtacctaagtggt

SEQ ID NO: 25152 - DNA, 25 bp, Homo sapien
tacgtaaacctactacctaagtggt

SEQ ID NO: 25153 - DNA, 25 bp, Homo sapien
aatgttcgtatcttttacctgggtt

SEQ ID NO: 25154 - DNA, 25 bp, Homo sapien
aatgttcgtatcatttacctgggtt

SEQ ID NO: 25155 - DNA, 25 bp, Homo sapien
cgtcgtgtcatctgtatgttagtta

SEQ ID NO: 25156 - DNA, 25 bp, Homo sapien
cgtcgtgtcatcagtatgttagtta

SEQ ID NO: 25157 - DNA, 25 bp, Homo sapien
aacgttacaacgtagtctcgtaatg

SEQ ID NO: 25158 - DNA, 25 bp, Homo sapien
aacgttacaacgaagtctcgtaatg

SEQ ID NO: 25159 - DNA, 25 bp, Homo sapien
cggtctacaagtagcgactcggacg

SEQ ID NO: 25160 - DNA, 25 bp, Homo sapien
cggtctacaagttgcgactcggacg

SEQ ID NO: 25161 - DNA, 25 bp, Homo sapien
gagagtcgtctaagtccccagcacg

SEQ ID NO: 25162 - DNA, 25 bp, Homo sapien
gagagtcgtctatgtccccagcacg

SEQ ID NO: 25163 - DNA, 25 bp, Homo sapien
acagaaagtcggaagtcgtaccatc

SEQ ID NO: 25164 - DNA, 25 bp, Homo sapien
acagaaagtcggtagtcgtaccatc

SEQ ID NO: 25165 - DNA, 25 bp, Homo sapien
tgacgactacaaagttttcctgtgt

SEQ ID NO: 25166 - DNA, 25 bp, Homo sapien
tgacgactacaatgttttcctgtgt

SEQ ID NO: 25167 - DNA, 25 bp, Homo sapien
cagatttgaaacgttgtgaccattt

SEQ ID NO: 25168 - DNA, 25 bp, Homo sapien
cagatttgaaaccttgtgaccattt

SEQ ID NO: 25169 - DNA, 25 bp, Homo sapien
ggtttgcacattaagggaactttct

SEQ ID NO: 25170 - DNA, 25 bp, Homo sapien
ggtttgcacatttagggaactttct

SEQ ID NO: 25171 - DNA, 25 bp, Homo sapien
gtcctcgacagagtgaggtccttca

SEQ ID NO: 25172 - DNA, 25 bp, Homo sapien
gtcctcgacagactgaggtccttca

SEQ ID NO: 25173 - DNA, 25 bp, Homo sapien
cgtcacggtcgacgagactcccagg

SEQ ID NO: 25174 - DNA, 25 bp, Homo sapien
cgtcacggtcgaggagactcccagg

SEQ ID NO: 25175 - DNA, 25 bp, Homo sapien
gacccctcgtcgaccgatgccttaa

SEQ ID NO: 25176 - DNA, 25 bp, Homo sapien
gacccctcgtcgtccgatgccttaa

SEQ ID NO: 25177 - DNA, 25 bp, Homo sapien
cgctgagtatcttattgacgtataa

SEQ ID NO: 25178 - DNA, 25 bp, Homo sapien
cgctgagtatctaattgacgtataa

SEQ ID NO: 25179 - DNA, 25 bp, Homo sapien
ccctgtgtgtcgttaatcttcttaa

SEQ ID NO: 25180 - DNA, 25 bp, Homo sapien
ccctgtgtgtcgataatcttcttaa

SEQ ID NO: 25181 - DNA, 25 bp, Homo sapien
acctaaggtggtctcctcgacatat

SEQ ID NO: 25182 - DNA, 25 bp, Homo sapien
acctaaggtggtgtcctcgacatat

SEQ ID NO: 25183 - DNA, 25 bp, Homo sapien
tctatatggagacttctctagtcct

SEQ ID NO: 25184 - DNA, 25 bp, Homo sapien
tctatatggagagttctctagtcct

SEQ ID NO: 25185 - DNA, 25 bp, Homo sapien
acatagtccgaattgctcagtcgat

SEQ ID NO: 25186 - DNA, 25 bp, Homo sapien
acatagtccgaaatgctcagtcgat

SEQ ID NO: 25187 - DNA, 25 bp, Homo sapien
atttatgactaaaggtttcacgatc

SEQ ID NO: 25188 - DNA, 25 bp, Homo sapien
atttatgactaatggtttcacgatc

SEQ ID NO: 25189 - DNA, 25 bp, Homo sapien
accagagagacaaaggttgcacatc

SEQ ID NO: 25190 - DNA, 25 bp, Homo sapien
accagagagacataggttgcacatc

SEQ ID NO: 25191 - DNA, 25 bp, Homo sapien
acgaacgtcctaagtttttgacttt

SEQ ID NO: 25192 - DNA, 25 bp, Homo sapien
acgaacgtcctatgtttttgacttt

SEQ ID NO: 25193 - DNA, 25 bp, Homo sapien
taaatcctcgtttggacagtcctct

SEQ ID NO: 25194 - DNA, 25 bp, Homo sapien
taaatcctcgttaggacagtcctct

SEQ ID NO: 25195 - DNA, 25 bp, Homo sapien
aaaggtttttcgagacctccgtcgt

SEQ ID NO: 25196 - DNA, 25 bp, Homo sapien
aaaggtttttcgtgacctccgtcgt

SEQ ID NO: 25197 - DNA, 25 bp, Homo sapien
tcgcgctttgcctgcgtccgcgtag

SEQ ID NO: 25198 - DNA, 25 bp, Homo sapien
tcgcgctttgccagcgtccgcgtag

SEQ ID NO: 25199 - DNA, 25 bp, Homo sapien
cctttgaccggttctacgacgtcgt

SEQ ID NO: 25200 - DNA, 25 bp, Homo sapien
cctttgaccggtactacgacgtcgt

SEQ ID NO: 25201 - DNA, 25 bp, Homo sapien
ctggaatctgtaaccattcgttctc

SEQ ID NO: 25202 - DNA, 25 bp, Homo sapien
ctggaatctgtatccattcgttctc

SEQ ID NO: 25203 - DNA, 25 bp, Homo sapien
ggcatctggtctcacgctacttgta

SEQ ID NO: 25204 - DNA, 25 bp, Homo sapien
ggcatctggtctgacgctacttgta

SEQ ID NO: 25205 - DNA, 25 bp, Homo sapien
tcgatcttcgtccactcatcgttcg

SEQ ID NO: 25206 - DNA, 25 bp, Homo sapien
tcgatcttcgtcgactcatcgttcg

SEQ ID NO: 25207 - DNA, 25 bp, Homo sapien
tagtaacttgtcagtttaccagtat

SEQ ID NO: 25208 - DNA, 25 bp, Homo sapien
tagtaacttgtctgtttaccagtat

SEQ ID NO: 25209 - DNA, 25 bp, Homo sapien
tcatagtaccttcattttaccttag

SEQ ID NO: 25210 - DNA, 25 bp, Homo sapien
tcatagtaccttgattttaccttag

SEQ ID NO: 25211 - DNA, 25 bp, Homo sapien
tccatgtcacctgttaagactcaga

SEQ ID NO: 25212 - DNA, 25 bp, Homo sapien
tccatgtcacctcttaagactcaga

SEQ ID NO: 25213 - DNA, 25 bp, Homo sapien
ccactgtcacacatgtttcagaaga

SEQ ID NO: 25214 - DNA, 25 bp, Homo sapien
ccactgtcacacttgtttcagaaga

SEQ ID NO: 25215 - DNA, 25 bp, Homo sapien
aagtcggacttagttatcgaagtca

SEQ ID NO: 25216 - DNA, 25 bp, Homo sapien
aagtcggacttacttatcgaagtca

SEQ ID NO: 25217 - DNA, 25 bp, Homo sapien
taattactgatttcggacaaatgtc

SEQ ID NO: 25218 - DNA, 25 bp, Homo sapien
taattactgattacggacaaatgtc

SEQ ID NO: 25219 - DNA, 25 bp, Homo sapien
gatttctggtatacggacctaattt

SEQ ID NO: 25220 - DNA, 25 bp, Homo sapien
gatttctggtattcggacctaattt

SEQ ID NO: 25221 - DNA, 25 bp, Homo sapien
tgtccggacctacacgtgtcatcta

SEQ ID NO: 25222 - DNA, 25 bp, Homo sapien
tgtccggacctagacgtgtcatcta

SEQ ID NO: 25223 - DNA, 25 bp, Homo sapien
ctttagtccttctctgatttaggag

SEQ ID NO: 25224 - DNA, 25 bp, Homo sapien
ctttagtccttcactgatttaggag

SEQ ID NO: 25225 - DNA, 25 bp, Homo sapien
cacagatagccttgctgaaataaag

SEQ ID NO: 25226 - DNA, 25 bp, Homo sapien
cacagatagcctagctgaaataaag

SEQ ID NO: 25227 - DNA, 25 bp, Homo sapien
catagtgcttctagccaaatatatg

SEQ ID NO: 25228 - DNA, 25 bp, Homo sapien
catagtgcttcttgccaaatatatg

SEQ ID NO: 25229 - DNA, 25 bp, Homo sapien
tctgtgactcctgtagggaaacttt

SEQ ID NO: 25230 - DNA, 25 bp, Homo sapien
tctgtgactcctctagggaaacttt

SEQ ID NO: 25231 - DNA, 25 bp, Homo sapien
cggcgtccaacgtcggcaactgtct

SEQ ID NO: 25232 - DNA, 25 bp, Homo sapien
cggcgtccaacgacggcaactgtct

SEQ ID NO: 25233 - DNA, 25 bp, Homo sapien
gtggcctactagaacggaccaactt

SEQ ID NO: 25234 - DNA, 25 bp, Homo sapien
gtggcctactagtacggaccaactt

SEQ ID NO: 25235 - DNA, 25 bp, Homo sapien
cagacgcgccatgaggtggtagacc

SEQ ID NO: 25236 - DNA, 25 bp, Homo sapien
cagacgcgccatcaggtggtagacc

SEQ ID NO: 25237 - DNA, 25 bp, Homo sapien
tccacggcacacgaggaggtgacga

SEQ ID NO: 25238 - DNA, 25 bp, Homo sapien
tccacggcacaccaggaggtgacga

SEQ ID NO: 25239 - DNA, 25 bp, Homo sapien
agaccgagaaccagcccgagtcgga

SEQ ID NO: 25240 - DNA, 25 bp, Homo sapien
agaccgagaacctgcccgagtcgga

SEQ ID NO: 25241 - DNA, 25 bp, Homo sapien
accgtcgccacaaggtccgtcggga

SEQ ID NO: 25242 - DNA, 25 bp, Homo sapien
accgtcgccacatggtccgtcggga

SEQ ID NO: 25243 - DNA, 25 bp, Homo sapien
taccgggccaaaagctactggaagt

SEQ ID NO: 25244 - DNA, 25 bp, Homo sapien
taccgggccaaatgctactggaagt

SEQ ID NO: 25245 - DNA, 25 bp, Homo sapien
tcggtatacctcaaaacccaccggt

SEQ ID NO: 25246 - DNA, 25 bp, Homo sapien
tcggtatacctctaaacccaccggt

SEQ ID NO: 25247 - DNA, 25 bp, Homo sapien
tgggtagtagtcctcggaggccctt

SEQ ID NO: 25248 - DNA, 25 bp, Homo sapien
tgggtagtagtcgtcggaggccctt

SEQ ID NO: 25249 - DNA, 25 bp, Homo sapien
atgtctgtgttctcttatctcccat

SEQ ID NO: 25250 - DNA, 25 bp, Homo sapien
atgtctgtgttcacttatctcccat

SEQ ID NO: 25251 - DNA, 25 bp, Homo sapien
ctaaggtaggtttattactctcttt

SEQ ID NO: 25252 - DNA, 25 bp, Homo sapien
ctaaggtaggttaattactctcttt

SEQ ID NO: 25253 - DNA, 25 bp, Homo sapien
aacatgtccggtacgaacagtgtca

SEQ ID NO: 25254 - DNA, 25 bp, Homo sapien
aacatgtccggttcgaacagtgtca

SEQ ID NO: 25255 - DNA, 25 bp, Homo sapien
agcaggtccgcgtaggcgtcgtccc

SEQ ID NO: 25256 - DNA, 25 bp, Homo sapien
agcaggtccgcgaaggcgtcgtccc

SEQ ID NO: 25257 - DNA, 25 bp, Homo sapien
cagacaggccgaggagtatgtgccc

SEQ ID NO: 25258 - DNA, 25 bp, Homo sapien
cagacaggccgacgagtatgtgccc

SEQ ID NO: 25259 - DNA, 25 bp, Homo sapien
acgtcacggaaggagtacggtttgc

SEQ ID NO: 25260 - DNA, 25 bp, Homo sapien
acgtcacggaagcagtacggtttgc

SEQ ID NO: 25261 - DNA, 25 bp, Homo sapien
ccactggtcgtaaccttaggaaagg

SEQ ID NO: 25262 - DNA, 25 bp, Homo sapien
ccactggtcgtatccttaggaaagg

SEQ ID NO: 25263 - DNA, 25 bp, Homo sapien
acctactctgtctgtgtaacttagg

SEQ ID NO: 25264 - DNA, 25 bp, Homo sapien
acctactctgtcagtgtaacttagg

SEQ ID NO: 25265 - DNA, 25 bp, Homo sapien
tatacagtacgtctctgagtttagg

SEQ ID NO: 25266 - DNA, 25 bp, Homo sapien
tatacagtacgtgtctgagtttagg

SEQ ID NO: 25267 - DNA, 25 bp, Homo sapien
tcagagacggtaggaccggtgtcac

SEQ ID NO: 25268 - DNA, 25 bp, Homo sapien
tcagagacggtacgaccggtgtcac

SEQ ID NO: 25269 - DNA, 25 bp, Homo sapien
tagtagagtactgtcgtcggtggtc

SEQ ID NO: 25270 - DNA, 25 bp, Homo sapien
tagtagagtactctcgtcggtggtc

SEQ ID NO: 25271 - DNA, 25 bp, Homo sapien
gaagcctcctgtcacttttgaaggg

SEQ ID NO: 25272 - DNA, 25 bp, Homo sapien
gaagcctcctgtgacttttgaaggg

SEQ ID NO: 25273 - DNA, 25 bp, Homo sapien
tcttgtttgacctgtgtgaggtcta

SEQ ID NO: 25274 - DNA, 25 bp, Homo sapien
tcttgtttgaccagtgtgaggtcta

SEQ ID NO: 25275 - DNA, 25 bp, Homo sapien
cagtgaagtagactttcgagatacc

SEQ ID NO: 25276 - DNA, 25 bp, Homo sapien
cagtgaagtagagtttcgagatacc

SEQ ID NO: 25277 - DNA, 25 bp, Homo sapien
agacataagatgacttctcggtaaa

SEQ ID NO: 25278 - DNA, 25 bp, Homo sapien
agacataagatgtcttctcggtaaa

SEQ ID NO: 25279 - DNA, 25 bp, Homo sapien
gtccatcgagatgtttctgtaagtc

SEQ ID NO: 25280 - DNA, 25 bp, Homo sapien
gtccatcgagatctttctgtaagtc

SEQ ID NO: 25281 - DNA, 25 bp, Homo sapien
accgttcctcgtcctttgtgtggtc

SEQ ID NO: 25282 - DNA, 25 bp, Homo sapien
accgttcctcgtgctttgtgtggtc

SEQ ID NO: 25283 - DNA, 25 bp, Homo sapien
ttcttaaggtgtaattttgtgtctt

SEQ ID NO: 25284 - DNA, 25 bp, Homo sapien
ttcttaaggtgttattttgtgtctt

SEQ ID NO: 25285 - DNA, 25 bp, Homo sapien
ttctctggtcttgtcctctgcacgt

SEQ ID NO: 25286 - DNA, 25 bp, Homo sapien
ttctctggtcttctcctctgcacgt

SEQ ID NO: 25287 - DNA, 25 bp, Homo sapien
tgtagttccaccttcgtccttgaat

SEQ ID NO: 25288 - DNA, 25 bp, Homo sapien
tgtagttccaccatcgtccttgaat

SEQ ID NO: 25289 - DNA, 25 bp, Homo sapien
aggtttacctaaatccgttgaaact

SEQ ID NO: 25290 - DNA, 25 bp, Homo sapien
aggtttacctaattccgttgaaact

SEQ ID NO: 25291 - DNA, 25 bp, Homo sapien
tttcctacgtcttcctatataccac

SEQ ID NO: 25292 - DNA, 25 bp, Homo sapien
tttcctacgtctacctatataccac

SEQ ID NO: 25293 - DNA, 25 bp, Homo sapien
ctctctacattctctacttacttcc

SEQ ID NO: 25294 - DNA, 25 bp, Homo sapien
ctctctacattcactacttacttcc

SEQ ID NO: 25295 - DNA, 25 bp, Homo sapien
ttccggttcatcatctagtgttccg

SEQ ID NO: 25296 - DNA, 25 bp, Homo sapien
ttccggttcatcttctagtgttccg

SEQ ID NO: 25297 - DNA, 25 bp, Homo sapien
gtgtttcgtggctagttgtcacgtc

SEQ ID NO: 25298 - DNA, 25 bp, Homo sapien
gtgtttcgtggcaagttgtcacgtc

SEQ ID NO: 25299 - DNA, 25 bp, Homo sapien
gtttaggtaggtagcgttcgcgtac

SEQ ID NO: 25300 - DNA, 25 bp, Homo sapien
gtttaggtaggttgcgttcgcgtac

SEQ ID NO: 25301 - DNA, 25 bp, Homo sapien
tacacctaagtgaacgtgtcgacga

SEQ ID NO: 25302 - DNA, 25 bp, Homo sapien
tacacctaagtgtacgtgtcgacga

SEQ ID NO: 25303 - DNA, 25 bp, Homo sapien
tgtaatcacgacagacgatatcata

SEQ ID NO: 25304 - DNA, 25 bp, Homo sapien
tgtaatcacgactgacgatatcata

SEQ ID NO: 25305 - DNA, 25 bp, Homo sapien
aaaatattagtgtaaataactccga

SEQ ID NO: 25306 - DNA, 25 bp, Homo sapien
aaaatattagtgaaaataactccga

SEQ ID NO: 25307 - DNA, 25 bp, Homo sapien
aaaaagagtgacacacttagttcat

SEQ ID NO: 25308 - DNA, 25 bp, Homo sapien
aaaaagagtgactcacttagttcat

SEQ ID NO: 25309 - DNA, 25 bp, Homo sapien
ggtacgaaacttacttagtagtctt

SEQ ID NO: 25310 - DNA, 25 bp, Homo sapien
ggtacgaaactttcttagtagtctt

SEQ ID NO: 25311 - DNA, 25 bp, Homo sapien
acaagaacagatctagattaccgtt

SEQ ID NO: 25312 - DNA, 25 bp, Homo sapien
acaagaacagatgtagattaccgtt

SEQ ID NO: 25313 - DNA, 25 bp, Homo sapien
atctgacctaagagagcatatcgtc

SEQ ID NO: 25314 - DNA, 25 bp, Homo sapien
atctgacctaagtgagcatatcgtc

SEQ ID NO: 25315 - DNA, 25 bp, Homo sapien
tctccgagatgtgtagaagttactc

SEQ ID NO: 25316 - DNA, 25 bp, Homo sapien
tctccgagatgtctagaagttactc

SEQ ID NO: 25317 - DNA, 25 bp, Homo sapien
tcgtctccggagtagcagtgggtca

SEQ ID NO: 25318 - DNA, 25 bp, Homo sapien
tcgtctccggagaagcagtgggtca

SEQ ID NO: 25319 - DNA, 25 bp, Homo sapien
cctcaaaggggtcgagtaggcacag

SEQ ID NO: 25320 - DNA, 25 bp, Homo sapien
cctcaaaggggtggagtaggcacag

SEQ ID NO: 25321 - DNA, 25 bp, Homo sapien
gtccaaagtggaggttaacactgta

SEQ ID NO: 25322 - DNA, 25 bp, Homo sapien
gtccaaagtggacgttaacactgta

SEQ ID NO: 25323 - DNA, 25 bp, Homo sapien
gtgtccccttgaaataactctcctt

SEQ ID NO: 25324 - DNA, 25 bp, Homo sapien
gtgtccccttgatataactctcctt

SEQ ID NO: 25325 - DNA, 25 bp, Homo sapien
tgggtccccctgacagaagacaatt

SEQ ID NO: 25326 - DNA, 25 bp, Homo sapien
tgggtccccctgtcagaagacaatt

SEQ ID NO: 25327 - DNA, 25 bp, Homo sapien
acgtcaccattagtggtgacactga

SEQ ID NO: 25328 - DNA, 25 bp, Homo sapien
acgtcaccattactggtgacactga

SEQ ID NO: 25329 - DNA, 25 bp, Homo sapien
taagtcctgtatacccataaatgtg

SEQ ID NO: 25330 - DNA, 25 bp, Homo sapien
taagtcctgtattcccataaatgtg

SEQ ID NO: 25331 - DNA, 25 bp, Homo sapien
gaagtacctttttatcaggaaactt

SEQ ID NO: 25332 - DNA, 25 bp, Homo sapien
gaagtaccttttaatcaggaaactt

SEQ ID NO: 25333 - DNA, 25 bp, Homo sapien
ccgtcggcggcgcaggacgtacatt

SEQ ID NO: 25334 - DNA, 25 bp, Homo sapien
ccgtcggcggcggaggacgtacatt

SEQ ID NO: 25335 - DNA, 25 bp, Homo sapien
cgtcggaggatggaacacgacgtct

SEQ ID NO: 25336 - DNA, 25 bp, Homo sapien
cgtcggaggatgcaacacgacgtct

SEQ ID NO: 25337 - DNA, 25 bp, Homo sapien
acgagcccgagtcgtaggtacgtcc

SEQ ID NO: 25338 - DNA, 25 bp, Homo sapien
acgagcccgagtggtaggtacgtcc

SEQ ID NO: 25339 - DNA, 25 bp, Homo sapien
gtggaccggactgcttagacgtcgt

SEQ ID NO: 25340 - DNA, 25 bp, Homo sapien
gtggaccggactccttagacgtcgt

SEQ ID NO: 25341 - DNA, 25 bp, Homo sapien
gccgtgagggccacccttgtacggt

SEQ ID NO: 25342 - DNA, 25 bp, Homo sapien
gccgtgagggcctcccttgtacggt

SEQ ID NO: 25343 - DNA, 25 bp, Homo sapien
ccccgtctacggtgccagtatttga

SEQ ID NO: 25344 - DNA, 25 bp, Homo sapien
ccccgtctacggagccagtatttga

SEQ ID NO: 25345 - DNA, 25 bp, Homo sapien
tcctcggcagcgagcctagaagcaa

SEQ ID NO: 25346 - DNA, 25 bp, Homo sapien
tcctcggcagcgtgcctagaagcaa

SEQ ID NO: 25347 - DNA, 25 bp, Homo sapien
catacagtattgtaagacttcgaac

SEQ ID NO: 25348 - DNA, 25 bp, Homo sapien
catacagtattgaaagacttcgaac

SEQ ID NO: 25349 - DNA, 25 bp, Homo sapien
acactgaggacaacggtacctaagt

SEQ ID NO: 25350 - DNA, 25 bp, Homo sapien
acactgaggacatcggtacctaagt

SEQ ID NO: 25351 - DNA, 25 bp, Homo sapien
ttatgagacgtcttaccgccgaggt

SEQ ID NO: 25352 - DNA, 25 bp, Homo sapien
ttatgagacgtcataccgccgaggt

SEQ ID NO: 25353 - DNA, 25 bp, Homo sapien
tttacggtaaacagtgacgacgtag

SEQ ID NO: 25354 - DNA, 25 bp, Homo sapien
tttacggtaaactgtgacgacgtag

SEQ ID NO: 25355 - DNA, 25 bp, Homo sapien
atctatacactttttatacggtacg

SEQ ID NO: 25356 - DNA, 25 bp, Homo sapien
atctatacacttattatacggtacg

SEQ ID NO: 25357 - DNA, 25 bp, Homo sapien
tctaataagactgatcttgactcgt

SEQ ID NO: 25358 - DNA, 25 bp, Homo sapien
tctaataagactcatcttgactcgt

SEQ ID NO: 25359 - DNA, 25 bp, Homo sapien
tcgttaatgttaaactcctgtgaag

SEQ ID NO: 25360 - DNA, 25 bp, Homo sapien
tcgttaatgttatactcctgtgaag

SEQ ID NO: 25361 - DNA, 25 bp, Homo sapien
ttcttctgtgagacctacccaagtg

SEQ ID NO: 25362 - DNA, 25 bp, Homo sapien
ttcttctgtgagtcctacccaagtg

SEQ ID NO: 25363 - DNA, 25 bp, Homo sapien
atctttagtagatgggcgcacaagg

SEQ ID NO: 25364 - DNA, 25 bp, Homo sapien
atctttagtagaagggcgcacaagg

SEQ ID NO: 25365 - DNA, 25 bp, Homo sapien
tatcttcagaagtagacgccacagg

SEQ ID NO: 25366 - DNA, 25 bp, Homo sapien
tatcttcagaagaagacgccacagg

SEQ ID NO: 25367 - DNA, 25 bp, Homo sapien
gcccggagagatgagcttccactgg

SEQ ID NO: 25368 - DNA, 25 bp, Homo sapien
gcccggagagatcagcttccactgg

SEQ ID NO: 25369 - DNA, 25 bp, Homo sapien
ttatcgaattgaaacttacacgtga

SEQ ID NO: 25370 - DNA, 25 bp, Homo sapien
ttatcgaattgatacttacacgtga

SEQ ID NO: 25371 - DNA, 25 bp, Homo sapien
tgataagtttacgatcattgataat

SEQ ID NO: 25372 - DNA, 25 bp, Homo sapien
tgataagtttaccatcattgataat

SEQ ID NO: 25373 - DNA, 25 bp, Homo sapien
gaacatctgcgaggtcagggatgat

SEQ ID NO: 25374 - DNA, 25 bp, Homo sapien
gaacatctgcgacgtcagggatgat

SEQ ID NO: 25375 - DNA, 25 bp, Homo sapien
gttcccttccatgatacgggcctac

SEQ ID NO: 25376 - DNA, 25 bp, Homo sapien
gttcccttccatcatacgggcctac

SEQ ID NO: 25377 - DNA, 25 bp, Homo sapien
cgctagaagaagaacgggtaccgtc

SEQ ID NO: 25378 - DNA, 25 bp, Homo sapien
cgctagaagaagtacgggtaccgtc

SEQ ID NO: 25379 - DNA, 25 bp, Homo sapien
tgacctagtaatttcgaacttctag

SEQ ID NO: 25380 - DNA, 25 bp, Homo sapien
tgacctagtaatatcgaacttctag

SEQ ID NO: 25381 - DNA, 25 bp, Homo sapien
tttctcattttacgtacagtgtccg

SEQ ID NO: 25382 - DNA, 25 bp, Homo sapien
tttctcattttaggtacagtgtccg

SEQ ID NO: 25383 - DNA, 25 bp, Homo sapien
tttccgtgtgtatctaagagttccg

SEQ ID NO: 25384 - DNA, 25 bp, Homo sapien
tttccgtgtgtaactaagagttccg

SEQ ID NO: 25385 - DNA, 25 bp, Homo sapien
tttaccggtgtggtatcgtgtcccg

SEQ ID NO: 25386 - DNA, 25 bp, Homo sapien
tttaccggtgtgctatcgtgtcccg

SEQ ID NO: 25387 - DNA, 25 bp, Homo sapien
agtttactgagtgaactttctcgga

SEQ ID NO: 25388 - DNA, 25 bp, Homo sapien
agtttactgagtcaactttctcgga

SEQ ID NO: 25389 - DNA, 25 bp, Homo sapien
ccaaccgtagtactaggcgcgctgg

SEQ ID NO: 25390 - DNA, 25 bp, Homo sapien
ccaaccgtagtagtaggcgcgctgg

SEQ ID NO: 25391 - DNA, 25 bp, Homo sapien
aacggctattgctactacagctacg

SEQ ID NO: 25392 - DNA, 25 bp, Homo sapien
aacggctattgcaactacagctacg

SEQ ID NO: 25393 - DNA, 25 bp, Homo sapien
aagacaaccagacaaaaagaacccg

SEQ ID NO: 25394 - DNA, 25 bp, Homo sapien
aagacaaccagagaaaaagaacccg

SEQ ID NO: 25395 - DNA, 25 bp, Homo sapien
gaaacctgaaagacggaaccggtac

SEQ ID NO: 25396 - DNA, 25 bp, Homo sapien
gaaacctgaaagtcggaaccggtac

SEQ ID NO: 25397 - DNA, 25 bp, Homo sapien
accttaggaaaggagtagactcctc

SEQ ID NO: 25398 - DNA, 25 bp, Homo sapien
accttaggaaagcagtagactcctc

SEQ ID NO: 25399 - DNA, 25 bp, Homo sapien
gttagttctacaacgttagttaaca

SEQ ID NO: 25400 - DNA, 25 bp, Homo sapien
gttagttctacatcgttagttaaca

SEQ ID NO: 25401 - DNA, 25 bp, Homo sapien
atctattactagtcggatcagtctt

SEQ ID NO: 25402 - DNA, 25 bp, Homo sapien
atctattactagacggatcagtctt

SEQ ID NO: 25403 - DNA, 25 bp, Homo sapien
ttatgggtacgtcgtgtcctgtctt

SEQ ID NO: 25404 - DNA, 25 bp, Homo sapien
ttatgggtacgtggtgtcctgtctt

SEQ ID NO: 25405 - DNA, 25 bp, Homo sapien
tctctttgttggtgatactcattca

SEQ ID NO: 25406 - DNA, 25 bp, Homo sapien
tctctttgttggagatactcattca

SEQ ID NO: 25407 - DNA, 25 bp, Homo sapien
ccttgttgtttgagatgtccttaag

SEQ ID NO: 25408 - DNA, 25 bp, Homo sapien
ccttgttgtttgtgatgtccttaag

SEQ ID NO: 25409 - DNA, 25 bp, Homo sapien
ctcgtggtcgtcgtatattttgtat

SEQ ID NO: 25410 - DNA, 25 bp, Homo sapien
ctcgtggtcgtcctatattttgtat

SEQ ID NO: 25411 - DNA, 25 bp, Homo sapien
aggaggacgaaccttgtctactcgt

SEQ ID NO: 25412 - DNA, 25 bp, Homo sapien
aggaggacgaacgttgtctactcgt

SEQ ID NO: 25413 - DNA, 25 bp, Homo sapien
ccggtgcaacgatcacgtgagccac

SEQ ID NO: 25414 - DNA, 25 bp, Homo sapien
ccggtgcaacgaacacgtgagccac

SEQ ID NO: 25415 - DNA, 25 bp, Homo sapien
gcgagaccaggcagaacgcggccag

SEQ ID NO: 25416 - DNA, 25 bp, Homo sapien
gcgagaccaggctgaacgcggccag

SEQ ID NO: 25417 - DNA, 25 bp, Homo sapien
tacccgcacggacacggacgtcgag

SEQ ID NO: 25418 - DNA, 25 bp, Homo sapien
tacccgcacggagacggacgtcgag

SEQ ID NO: 25419 - DNA, 25 bp, Homo sapien
taaccgttctgttcggtgtacacat

SEQ ID NO: 25420 - DNA, 25 bp, Homo sapien
taaccgttctgtacggtgtacacat

SEQ ID NO: 25421 - DNA, 25 bp, Homo sapien
cgtttatcgtctccatgatacgatt

SEQ ID NO: 25422 - DNA, 25 bp, Homo sapien
cgtttatcgtctgcatgatacgatt

SEQ ID NO: 25423 - DNA, 25 bp, Homo sapien
tcccggttctagttccaaagattgt

SEQ ID NO: 25424 - DNA, 25 bp, Homo sapien
tcccggttctagatccaaagattgt

SEQ ID NO: 25425 - DNA, 25 bp, Homo sapien
ctggttgtttgattcacacccgttt

SEQ ID NO: 25426 - DNA, 25 bp, Homo sapien
ctggttgtttgaatcacacccgttt

SEQ ID NO: 25427 - DNA, 25 bp, Homo sapien
agggtggttctcgacgagtccgttt

SEQ ID NO: 25428 - DNA, 25 bp, Homo sapien
agggtggttctccacgagtccgttt

SEQ ID NO: 25429 - DNA, 25 bp, Homo sapien
agaggagacagtttcactatatttc

SEQ ID NO: 25430 - DNA, 25 bp, Homo sapien
agaggagacagtatcactatatttc

SEQ ID NO: 25431 - DNA, 25 bp, Homo sapien
tcagaaggggacgacttagtgtacc

SEQ ID NO: 25432 - DNA, 25 bp, Homo sapien
tcagaaggggaccacttagtgtacc

SEQ ID NO: 25433 - DNA, 25 bp, Homo sapien
agactaagaaagattcatctgatac

SEQ ID NO: 25434 - DNA, 25 bp, Homo sapien
agactaagaaagtttcatctgatac

SEQ ID NO: 25435 - DNA, 25 bp, Homo sapien
catgactgaccaatgtggtattttt

SEQ ID NO: 25436 - DNA, 25 bp, Homo sapien
catgactgaccattgtggtattttt

SEQ ID NO: 25437 - DNA, 25 bp, Homo sapien
tcgacaacgaatgtctatattgcta

SEQ ID NO: 25438 - DNA, 25 bp, Homo sapien
tcgacaacgaatctctatattgcta

SEQ ID NO: 25439 - DNA, 25 bp, Homo sapien
taacgaagacatatcactaaaaggt

SEQ ID NO: 25440 - DNA, 25 bp, Homo sapien
taacgaagacatttcactaaaaggt

SEQ ID NO: 25441 - DNA, 25 bp, Homo sapien
gtagatgagacaaattattccgttc

SEQ ID NO: 25442 - DNA, 25 bp, Homo sapien
gtagatgagacatattattccgttc

SEQ ID NO: 25443 - DNA, 25 bp, Homo sapien
cggagacagttttcggtcgcgtctc

SEQ ID NO: 25444 - DNA, 25 bp, Homo sapien
cggagacagtttacggtcgcgtctc

SEQ ID NO: 25445 - DNA, 25 bp, Homo sapien
gcgtgtttcgattccggtggttacg

SEQ ID NO: 25446 - DNA, 25 bp, Homo sapien
gcgtgtttcgataccggtggttacg

SEQ ID NO: 25447 - DNA, 25 bp, Homo sapien
tgtccggtccggacactgtaagccg

SEQ ID NO: 25448 - DNA, 25 bp, Homo sapien
tgtccggtccggtcactgtaagccg

SEQ ID NO: 25449 - DNA, 25 bp, Homo sapien
gtgtcctgtccttatctgtgacgcc

SEQ ID NO: 25450 - DNA, 25 bp, Homo sapien
gtgtcctgtcctaatctgtgacgcc

SEQ ID NO: 25451 - DNA, 25 bp, Homo sapien
tctcgttctcctatcgactctgggt

SEQ ID NO: 25452 - DNA, 25 bp, Homo sapien
tctcgttctcctttcgactctgggt

SEQ ID NO: 25453 - DNA, 25 bp, Homo sapien
atggtgtacccttcatggtgacgac

SEQ ID NO: 25454 - DNA, 25 bp, Homo sapien
atggtgtaccctacatggtgacgac

SEQ ID NO: 25455 - DNA, 25 bp, Homo sapien
aagagactcacttacagtgttccgg

SEQ ID NO: 25456 - DNA, 25 bp, Homo sapien
aagagactcactaacagtgttccgg

SEQ ID NO: 25457 - DNA, 25 bp, Homo sapien
acaagacgtcacaggacggtgaaac

SEQ ID NO: 25458 - DNA, 25 bp, Homo sapien
acaagacgtcactggacggtgaaac

SEQ ID NO: 25459 - DNA, 25 bp, Homo sapien
ccagaccgaccgaaggaccgagaac

SEQ ID NO: 25460 - DNA, 25 bp, Homo sapien
ccagaccgaccgtaggaccgagaac

SEQ ID NO: 25461 - DNA, 25 bp, Homo sapien
gtctcagttccgaggacacgacagg

SEQ ID NO: 25462 - DNA, 25 bp, Homo sapien
gtctcagttccgtggacacgacagg

SEQ ID NO: 25463 - DNA, 25 bp, Homo sapien
gagtccgaccggtccaacgacacga

SEQ ID NO: 25464 - DNA, 25 bp, Homo sapien
gagtccgaccggaccaacgacacga

SEQ ID NO: 25465 - DNA, 25 bp, Homo sapien
ccctgtaccgtgtcggaccgaggac

SEQ ID NO: 25466 - DNA, 25 bp, Homo sapien
ccctgtaccgtgacggaccgaggac

SEQ ID NO: 25467 - DNA, 25 bp, Homo sapien
ctccgtcctgtgtccgttagagatc

SEQ ID NO: 25468 - DNA, 25 bp, Homo sapien
ctccgtcctgtgaccgttagagatc

SEQ ID NO: 25469 - DNA, 25 bp, Homo sapien
cgttttcgaggaaccgtctaggagc

SEQ ID NO: 25470 - DNA, 25 bp, Homo sapien
cgttttcgaggatccgtctaggagc

SEQ ID NO: 25471 - DNA, 25 bp, Homo sapien
actttgtgagtggatcacacaggaa

SEQ ID NO: 25472 - DNA, 25 bp, Homo sapien
actttgtgagtgcatcacacaggaa

SEQ ID NO: 25473 - DNA, 25 bp, Homo sapien
cgttttaaggacttcctactctgga

SEQ ID NO: 25474 - DNA, 25 bp, Homo sapien
cgttttaaggacatcctactctgga

SEQ ID NO: 25475 - DNA, 25 bp, Homo sapien
catctttgaacactaccttgtagag

SEQ ID NO: 25476 - DNA, 25 bp, Homo sapien
catctttgaacagtaccttgtagag

SEQ ID NO: 25477 - DNA, 25 bp, Homo sapien
atgtttgatcgagtacatgtcgaac

SEQ ID NO: 25478 - DNA, 25 bp, Homo sapien
atgtttgatcgactacatgtcgaac

SEQ ID NO: 25479 - DNA, 25 bp, Homo sapien
cgactccaacgacgacaggtctcga

SEQ ID NO: 25480 - DNA, 25 bp, Homo sapien
cgactccaacgaggacaggtctcga

SEQ ID NO: 25481 - DNA, 25 bp, Homo sapien
gtgtcttcaaacacgagtatccgtg

SEQ ID NO: 25482 - DNA, 25 bp, Homo sapien
gtgtcttcaaactcgagtatccgtg

SEQ ID NO: 25483 - DNA, 25 bp, Homo sapien
gtacttctccggtacctacatccgg

SEQ ID NO: 25484 - DNA, 25 bp, Homo sapien
gtacttctccggaacctacatccgg

SEQ ID NO: 25485 - DNA, 25 bp, Homo sapien
tcggagtctgaggaaacgacctccc

SEQ ID NO: 25486 - DNA, 25 bp, Homo sapien
tcggagtctgagcaaacgacctccc

SEQ ID NO: 25487 - DNA, 25 bp, Homo sapien
accctctagggaagacggacgcgcc

SEQ ID NO: 25488 - DNA, 25 bp, Homo sapien
accctctagggatgacggacgcgcc

SEQ ID NO: 25489 - DNA, 25 bp, Homo sapien
agctcgtgggctaagacaccgacaa

SEQ ID NO: 25490 - DNA, 25 bp, Homo sapien
agctcgtgggcttagacaccgacaa

SEQ ID NO: 25491 - DNA, 25 bp, Homo sapien
ctctctggggtgttccggtgtctcg

SEQ ID NO: 25492 - DNA, 25 bp, Homo sapien
ctctctggggtgatccggtgtctcg

SEQ ID NO: 25493 - DNA, 25 bp, Homo sapien
ctaactagagcacaaccgttgtctc

SEQ ID NO: 25494 - DNA, 25 bp, Homo sapien
ctaactagagcagaaccgttgtctc

SEQ ID NO: 25495 - DNA, 25 bp, Homo sapien
gaagacgacgaaataacttcctact

SEQ ID NO: 25496 - DNA, 25 bp, Homo sapien
gaagacgacgaattaacttcctact

SEQ ID NO: 25497 - DNA, 25 bp, Homo sapien
tgtagaaggaaaagacgtctcatct

SEQ ID NO: 25498 - DNA, 25 bp, Homo sapien
tgtagaaggaaatgacgtctcatct

SEQ ID NO: 25499 - DNA, 25 bp, Homo sapien
gttatacgtcagaccgacacctacc

SEQ ID NO: 25500 - DNA, 25 bp, Homo sapien
gttatacgtcagtccgacacctacc

SEQ ID NO: 25501 - DNA, 25 bp, Homo sapien
aatagagatcataccctctgtaccg

SEQ ID NO: 25502 - DNA, 25 bp, Homo sapien
aatagagatcattccctctgtaccg

SEQ ID NO: 25503 - DNA, 25 bp, Homo sapien
aacaaaaggtgacgttcttcacacc

SEQ ID NO: 25504 - DNA, 25 bp, Homo sapien
aacaaaaggtgaggttcttcacacc

SEQ ID NO: 25505 - DNA, 25 bp, Homo sapien
ataaggaggttctcacctacacagg

SEQ ID NO: 25506 - DNA, 25 bp, Homo sapien
ataaggaggttcacacctacacagg

SEQ ID NO: 25507 - DNA, 25 bp, Homo sapien
attgtaagtatgtattacgctccag

SEQ ID NO: 25508 - DNA, 25 bp, Homo sapien
attgtaagtatgaattacgctccag

SEQ ID NO: 25509 - DNA, 25 bp, Homo sapien
ttggtgagtctaaggtatccactgt

SEQ ID NO: 25510 - DNA, 25 bp, Homo sapien
ttggtgagtctatggtatccactgt

SEQ ID NO: 25511 - DNA, 25 bp, Homo sapien
aagtgtgtctacttagagtcatctc

SEQ ID NO: 25512 - DNA, 25 bp, Homo sapien
aagtgtgtctacatagagtcatctc

SEQ ID NO: 25513 - DNA, 25 bp, Homo sapien
aagtgtgtctacttagagtcatctc

SEQ ID NO: 25514 - DNA, 25 bp, Homo sapien
aagtgtgtctacatagagtcatctc

SEQ ID NO: 25515 - DNA, 25 bp, Homo sapien
tacggatcactctgaaacaaagtaa

SEQ ID NO: 25516 - DNA, 25 bp, Homo sapien
tacggatcactcagaaacaaagtaa

SEQ ID NO: 25517 - DNA, 25 bp, Homo sapien
accggacccaacactagtcgaggtt

SEQ ID NO: 25518 - DNA, 25 bp, Homo sapien
accggacccaactctagtcgaggtt

SEQ ID NO: 25519 - DNA, 25 bp, Homo sapien
ctcccggccaacgataatcgtatct

SEQ ID NO: 25520 - DNA, 25 bp, Homo sapien
ctcccggccaaccataatcgtatct

SEQ ID NO: 25521 - DNA, 25 bp, Homo sapien
cgtagtgaccgaacaactcaccatg

SEQ ID NO: 25522 - DNA, 25 bp, Homo sapien
cgtagtgaccgatcaactcaccatg

SEQ ID NO: 25523 - DNA, 25 bp, Homo sapien
agtcgttccgatgacactcaccacc

SEQ ID NO: 25524 - DNA, 25 bp, Homo sapien
agtcgttccgatcacactcaccacc

SEQ ID NO: 25525 - DNA, 25 bp, Homo sapien
gaggatacacacaagagactacatg

SEQ ID NO: 25526 - DNA, 25 bp, Homo sapien
gaggatacacactagagactacatg

SEQ ID NO: 25527 - DNA, 25 bp, Homo sapien
tcaagggcccactacgactaccaag

SEQ ID NO: 25528 - DNA, 25 bp, Homo sapien
tcaagggcccacaacgactaccaag

SEQ ID NO: 25529 - DNA, 25 bp, Homo sapien
gggtcccactctcgtgacctgtacg

SEQ ID NO: 25530 - DNA, 25 bp, Homo sapien
gggtcccactctggtgacctgtacg

SEQ ID NO: 25531 - DNA, 25 bp, Homo sapien
atggtcctaccgtggtcgctacctc

SEQ ID NO: 25532 - DNA, 25 bp, Homo sapien
atggtcctaccgaggtcgctacctc

SEQ ID NO: 25533 - DNA, 25 bp, Homo sapien
ttttgccctccgtttgttcgtccac

SEQ ID NO: 25534 - DNA, 25 bp, Homo sapien
ttttgccctccgattgttcgtccac

SEQ ID NO: 25535 - DNA, 25 bp, Homo sapien
cgaggttgactcctttctttccgtc

SEQ ID NO: 25536 - DNA, 25 bp, Homo sapien
cgaggttgactcgtttctttccgtc

SEQ ID NO: 25537 - DNA, 25 bp, Homo sapien
gagtgttagatcatcgtcccctgtc

SEQ ID NO: 25538 - DNA, 25 bp, Homo sapien
gagtgttagatcttcgtcccctgtc

SEQ ID NO: 25539 - DNA, 25 bp, Homo sapien
tattggttcctctttcgagtcgtct

SEQ ID NO: 25540 - DNA, 25 bp, Homo sapien
tattggttcctcattcgagtcgtct

SEQ ID NO: 25541 - DNA, 25 bp, Homo sapien
gggagtagcccttctgtcacacttt

SEQ ID NO: 25542 - DNA, 25 bp, Homo sapien
gggagtagccctactgtcacacttt

SEQ ID NO: 25543 - DNA, 25 bp, Homo sapien
gggagtatactttcccttcattgtg

SEQ ID NO: 25544 - DNA, 25 bp, Homo sapien
gggagtatacttacccttcattgtg

SEQ ID NO: 25545 - DNA, 25 bp, Homo sapien
gtcagtctgaccaccatggtagaag

SEQ ID NO: 25546 - DNA, 25 bp, Homo sapien
gtcagtctgacctccatggtagaag

SEQ ID NO: 25547 - DNA, 25 bp, Homo sapien
ttatctctcgtctcaacgggtgaac

SEQ ID NO: 25548 - DNA, 25 bp, Homo sapien
ttatctctcgtcacaacgggtgaac

SEQ ID NO: 25549 - DNA, 25 bp, Homo sapien
ctcttcgtccgcaccggaggtaaca

SEQ ID NO: 25550 - DNA, 25 bp, Homo sapien
ctcttcgtccgctccggaggtaaca

SEQ ID NO: 25551 - DNA, 25 bp, Homo sapien
ctcttctttcggtaccggggtccgg

SEQ ID NO: 25552 - DNA, 25 bp, Homo sapien
ctcttctttcggaaccggggtccgg

SEQ ID NO: 25553 - DNA, 25 bp, Homo sapien
ctcaggtttttcacagaatttagtg

SEQ ID NO: 25554 - DNA, 25 bp, Homo sapien
ctcaggtttttctcagaatttagtg

SEQ ID NO: 25555 - DNA, 25 bp, Homo sapien
tgtcgtaatggtacacaggggtcta

SEQ ID NO: 25556 - DNA, 25 bp, Homo sapien
tgtcgtaatggttcacaggggtcta

SEQ ID NO: 25557 - DNA, 25 bp, Homo sapien
gtcgtcttcgagtcccggggtactt

SEQ ID NO: 25558 - DNA, 25 bp, Homo sapien
gtcgtcttcgagacccggggtactt

SEQ ID NO: 25559 - DNA, 25 bp, Homo sapien
gggtgcaacgcctcgtcgtcgttct

SEQ ID NO: 25560 - DNA, 25 bp, Homo sapien
gggtgcaacgccacgtcgtcgttct

SEQ ID NO: 25561 - DNA, 25 bp, Homo sapien
cgctttggacaccaactctgtcgtc

SEQ ID NO: 25562 - DNA, 25 bp, Homo sapien
cgctttggacacgaactctgtcgtc

SEQ ID NO: 25563 - DNA, 25 bp, Homo sapien
cttatcacacatgagctactcggta

SEQ ID NO: 25564 - DNA, 25 bp, Homo sapien
cttatcacacatcagctactcggta

SEQ ID NO: 25565 - DNA, 25 bp, Homo sapien
cttcaagtgatgtgatactctgatt

SEQ ID NO: 25566 - DNA, 25 bp, Homo sapien
cttcaagtgatgagatactctgatt

SEQ ID NO: 25567 - DNA, 25 bp, Homo sapien
aaggtttacgttctaccgtgtagag

SEQ ID NO: 25568 - DNA, 25 bp, Homo sapien
aaggtttacgttgtaccgtgtagag

SEQ ID NO: 25569 - DNA, 25 bp, Homo sapien
gtcgacactcttgacgtctgactct

SEQ ID NO: 25570 - DNA, 25 bp, Homo sapien
gtcgacactcttcacgtctgactct

SEQ ID NO: 25571 - DNA, 25 bp, Homo sapien
tggggtgacttgtcctagtgacgtt

SEQ ID NO: 25572 - DNA, 25 bp, Homo sapien
tggggtgacttgacctagtgacgtt

SEQ ID NO: 25573 - DNA, 25 bp, Homo sapien
gagagacgtctgtcgacgatagaca

SEQ ID NO: 25574 - DNA, 25 bp, Homo sapien
gagagacgtctgacgacgatagaca

SEQ ID NO: 25575 - DNA, 25 bp, Homo sapien
tgccgaaacctccacgaggcgacgg

SEQ ID NO: 25576 - DNA, 25 bp, Homo sapien
tgccgaaacctcgacgaggcgacgg

SEQ ID NO: 25577 - DNA, 25 bp, Homo sapien
ttggtttgaatatcccggacgacga

SEQ ID NO: 25578 - DNA, 25 bp, Homo sapien
ttggtttgaataacccggacgacga

SEQ ID NO: 25579 - DNA, 25 bp, Homo sapien
gagattacgtaaaccctgctgacag

SEQ ID NO: 25580 - DNA, 25 bp, Homo sapien
gagattacgtaatccctgctgacag

SEQ ID NO: 25581 - DNA, 25 bp, Homo sapien
cactatttcgatgacttttgatacg

SEQ ID NO: 25582 - DNA, 25 bp, Homo sapien
cactatttcgatcacttttgatacg

SEQ ID NO: 25583 - DNA, 25 bp, Homo sapien
cttacaaggtaccttattttataat

SEQ ID NO: 25584 - DNA, 25 bp, Homo sapien
cttacaaggtacgttattttataat

SEQ ID NO: 25585 - DNA, 25 bp, Homo sapien
tgacaatcagtatctcttgtaagtt

SEQ ID NO: 25586 - DNA, 25 bp, Homo sapien
tgacaatcagtaactcttgtaagtt

SEQ ID NO: 25587 - DNA, 25 bp, Homo sapien
gtcacaaataactcgtcgactcgac

SEQ ID NO: 25588 - DNA, 25 bp, Homo sapien
gtcacaaataacacgtcgactcgac

SEQ ID NO: 25589 - DNA, 25 bp, Homo sapien
atcacgtttgagaatccgtctctcg

SEQ ID NO: 25590 - DNA, 25 bp, Homo sapien
atcacgtttgagtatccgtctctcg

SEQ ID NO: 25591 - DNA, 25 bp, Homo sapien
tccgtgtgtgtgttacggttccggt

SEQ ID NO: 25592 - DNA, 25 bp, Homo sapien
tccgtgtgtgtgatacggttccggt

SEQ ID NO: 25593 - DNA, 25 bp, Homo sapien
tttacgattgtgtttcggttccgcg

SEQ ID NO: 25594 - DNA, 25 bp, Homo sapien
tttacgattgtgattcggttccgcg

SEQ ID NO: 25595 - DNA, 25 bp, Homo sapien
attgtagaattctaacgtgtcttgc

SEQ ID NO: 25596 - DNA, 25 bp, Homo sapien
attgtagaattcaaacgtgtcttgc

SEQ ID NO: 25597 - DNA, 25 bp, Homo sapien
tctacggatttcaatctgtgttgag

SEQ ID NO: 25598 - DNA, 25 bp, Homo sapien
tctacggatttctatctgtgttgag

SEQ ID NO: 25599 - DNA, 25 bp, Homo sapien
accaatgtttatttcgttatcgtag

SEQ ID NO: 25600 - DNA, 25 bp, Homo sapien
accaatgtttatatcgttatcgtag

SEQ ID NO: 25601 - DNA, 25 bp, Homo sapien
cacaagatgttttgtaatcttgtac

SEQ ID NO: 25602 - DNA, 25 bp, Homo sapien
cacaagatgtttagtaatcttgtac

SEQ ID NO: 25603 - DNA, 25 bp, Homo sapien
ttaacgatcgtctgaagatccttta

SEQ ID NO: 25604 - DNA, 25 bp, Homo sapien
ttaacgatcgtcagaagatccttta

SEQ ID NO: 25605 - DNA, 25 bp, Homo sapien
atttcagtccagaagaaactacgca

SEQ ID NO: 25606 - DNA, 25 bp, Homo sapien
atttcagtccagtagaaactacgca

SEQ ID NO: 25607 - DNA, 25 bp, Homo sapien
taaccggcaagaagaactacacgga

SEQ ID NO: 25608 - DNA, 25 bp, Homo sapien
taaccggcaagatgaactacacgga

SEQ ID NO: 25609 - DNA, 25 bp, Homo sapien
catgtcacctcagtggacctctcga

SEQ ID NO: 25610 - DNA, 25 bp, Homo sapien
catgtcacctcactggacctctcga

SEQ ID NO: 25611 - DNA, 25 bp, Homo sapien
tttatactcattttcggtaacgacg

SEQ ID NO: 25612 - DNA, 25 bp, Homo sapien
tttatactcattatcggtaacgacg

SEQ ID NO: 25613 - DNA, 25 bp, Homo sapien
cacttccacgactcctttcgagggt

SEQ ID NO: 25614 - DNA, 25 bp, Homo sapien
cacttccacgacacctttcgagggt

SEQ ID NO: 25615 - DNA, 25 bp, Homo sapien
aactagccattgtcctacgtatggt

SEQ ID NO: 25616 - DNA, 25 bp, Homo sapien
aactagccattgacctacgtatggt

SEQ ID NO: 25617 - DNA, 25 bp, Homo sapien
cgtactctatcctgaaacctgatgg

SEQ ID NO: 25618 - DNA, 25 bp, Homo sapien
cgtactctatccagaaacctgatgg

SEQ ID NO: 25619 - DNA, 25 bp, Homo sapien
tgacgtccttagacccgccgaggag

SEQ ID NO: 25620 - DNA, 25 bp, Homo sapien
tgacgtccttagtcccgccgaggag

SEQ ID NO: 25621 - DNA, 25 bp, Homo sapien
tagaggtttggtgcacttcgggtac

SEQ ID NO: 25622 - DNA, 25 bp, Homo sapien
tagaggtttggtccacttcgggtac

SEQ ID NO: 25623 - DNA, 25 bp, Homo sapien
tagttatcgaagaaacttcggtgtc

SEQ ID NO: 25624 - DNA, 25 bp, Homo sapien
tagttatcgaagtaacttcggtgtc

SEQ ID NO: 25625 - DNA, 25 bp, Homo sapien
ttcgtgtcccgcaactactacaggg

SEQ ID NO: 25626 - DNA, 25 bp, Homo sapien
ttcgtgtcccgctactactacaggg

SEQ ID NO: 25627 - DNA, 25 bp, Homo sapien
gtggttcctccctttctactcaggg

SEQ ID NO: 25628 - DNA, 25 bp, Homo sapien
gtggttcctcccattctactcaggg

SEQ ID NO: 25629 - DNA, 25 bp, Homo sapien
ggtttactacgtattcttacaaagg

SEQ ID NO: 25630 - DNA, 25 bp, Homo sapien
ggtttactacgttttcttacaaagg

SEQ ID NO: 25631 - DNA, 25 bp, Homo sapien
ggtttgtgtcttcgaaataactacg

SEQ ID NO: 25632 - DNA, 25 bp, Homo sapien
ggtttgtgtcttggaaataactacg

SEQ ID NO: 25633 - DNA, 25 bp, Homo sapien
ggagtctccgtgtctgagaacccaa

SEQ ID NO: 25634 - DNA, 25 bp, Homo sapien
ggagtctccgtgactgagaacccaa

SEQ ID NO: 25635 - DNA, 25 bp, Homo sapien
aggatacttggtgtgacagacccaa

SEQ ID NO: 25636 - DNA, 25 bp, Homo sapien
aggatacttggtctgacagacccaa

SEQ ID NO: 25637 - DNA, 25 bp, Homo sapien
acccgtacttgttctcggggacgag

SEQ ID NO: 25638 - DNA, 25 bp, Homo sapien
acccgtacttgtactcggggacgag

SEQ ID NO: 25639 - DNA, 25 bp, Homo sapien
acgagagagtttaagggacactaca

SEQ ID NO: 25640 - DNA, 25 bp, Homo sapien
acgagagagttttagggacactaca

SEQ ID NO: 25641 - DNA, 25 bp, Homo sapien
ttagagtagggttcaggaaaccgat

SEQ ID NO: 25642 - DNA, 25 bp, Homo sapien
ttagagtagggtacaggaaaccgat

SEQ ID NO: 25643 - DNA, 25 bp, Homo sapien
agacgactgggacacgggaaccgac

SEQ ID NO: 25644 - DNA, 25 bp, Homo sapien
agacgactgggagacgggaaccgac

SEQ ID NO: 25645 - DNA, 25 bp, Homo sapien
acccttgtcgagcatgtgaacggta

SEQ ID NO: 25646 - DNA, 25 bp, Homo sapien
acccttgtcgaggatgtgaacggta

SEQ ID NO: 25647 - DNA, 25 bp, Homo sapien
ttaccatatgacctacgtgggattt

SEQ ID NO: 25648 - DNA, 25 bp, Homo sapien
ttaccatatgacgtacgtgggattt

SEQ ID NO: 25649 - DNA, 25 bp, Homo sapien
accagtagtccgagaaggtctcgta

SEQ ID NO: 25650 - DNA, 25 bp, Homo sapien
accagtagtccgtgaaggtctcgta

SEQ ID NO: 25651 - DNA, 25 bp, Homo sapien
ccggtcgtcccggacacacgtctga

SEQ ID NO: 25652 - DNA, 25 bp, Homo sapien
ccggtcgtcccgcacacacgtctga

SEQ ID NO: 25653 - DNA, 25 bp, Homo sapien
cccttcggagaggtccggacctcga

SEQ ID NO: 25654 - DNA, 25 bp, Homo sapien
cccttcggagagctccggacctcga

SEQ ID NO: 25655 - DNA, 25 bp, Homo sapien
tctgcaggtactcaggagaacgaca

SEQ ID NO: 25656 - DNA, 25 bp, Homo sapien
tctgcaggtactgaggagaacgaca

SEQ ID NO: 25657 - DNA, 25 bp, Homo sapien
gtttcgaaggtcgacgacgacccac

SEQ ID NO: 25658 - DNA, 25 bp, Homo sapien
gtttcgaaggtccacgacgacccac

SEQ ID NO: 25659 - DNA, 25 bp, Homo sapien
tggtgataaggattggaccccggac

SEQ ID NO: 25660 - DNA, 25 bp, Homo sapien
tggtgataaggaatggaccccggac

SEQ ID NO: 25661 - DNA, 25 bp, Homo sapien
tgttttgagaagttcgaccgtaaac

SEQ ID NO: 25662 - DNA, 25 bp, Homo sapien
tgttttgagaagatcgaccgtaaac

SEQ ID NO: 25663 - DNA, 25 bp, Homo sapien
atgtttgagagttccctgtacttga

SEQ ID NO: 25664 - DNA, 25 bp, Homo sapien
atgtttgagagtaccctgtacttga

SEQ ID NO: 25665 - DNA, 25 bp, Homo sapien
gaccgtgtccgagtttccttttatt

SEQ ID NO: 25666 - DNA, 25 bp, Homo sapien
gaccgtgtccgactttccttttatt

SEQ ID NO: 25667 - DNA, 25 bp, Homo sapien
ggaccgacacgttacaaccgttaaa

SEQ ID NO: 25668 - DNA, 25 bp, Homo sapien
ggaccgacacgtaacaaccgttaaa

SEQ ID NO: 25669 - DNA, 25 bp, Homo sapien
gtgacaaccgtaaaactcgtcctaa

SEQ ID NO: 25670 - DNA, 25 bp, Homo sapien
gtgacaaccgtataactcgtcctaa

SEQ ID NO: 25671 - DNA, 25 bp, Homo sapien
cttaagtgtcataagtttgtcacaa

SEQ ID NO: 25672 - DNA, 25 bp, Homo sapien
cttaagtgtcattagtttgtcacaa

SEQ ID NO: 25673 - DNA, 25 bp, Homo sapien
ccactagtccatatcccggttctag

SEQ ID NO: 25674 - DNA, 25 bp, Homo sapien
ccactagtccatttcccggttctag

SEQ ID NO: 25675 - DNA, 25 bp, Homo sapien
cccgtgatccagtactattccttcg

SEQ ID NO: 25676 - DNA, 25 bp, Homo sapien
cccgtgatccagaactattccttcg

SEQ ID NO: 25677 - DNA, 25 bp, Homo sapien
tcttacccgctacaaagagtcccga

SEQ ID NO: 25678 - DNA, 25 bp, Homo sapien
tcttacccgctagaaagagtcccga

SEQ ID NO: 25679 - DNA, 25 bp, Homo sapien
atgaaccgaaggacgaggtcccgag

SEQ ID NO: 25680 - DNA, 25 bp, Homo sapien
atgaaccgaaggtcgaggtcccgag

SEQ ID NO: 25681 - DNA, 25 bp, Homo sapien
gatagaacggttagacggtcctgag

SEQ ID NO: 25682 - DNA, 25 bp, Homo sapien
gatagaacggtttgacggtcctgag

SEQ ID NO: 25683 - DNA, 25 bp, Homo sapien
cgactccgagacaccaggaaccgag

SEQ ID NO: 25684 - DNA, 25 bp, Homo sapien
cgactccgagactccaggaaccgag

SEQ ID NO: 25685 - DNA, 25 bp, Homo sapien
gtaacgacctttctcgaaggatgag

SEQ ID NO: 25686 - DNA, 25 bp, Homo sapien
gtaacgacctttgtcgaaggatgag

SEQ ID NO: 25687 - DNA, 25 bp, Homo sapien
cccccggagtcgtcgaaggttatat

SEQ ID NO: 25688 - DNA, 25 bp, Homo sapien
cccccggagtcgacgaaggttatat

SEQ ID NO: 25689 - DNA, 25 bp, Homo sapien
gtccccagacctactgacgatcaga

SEQ ID NO: 25690 - DNA, 25 bp, Homo sapien
gtccccagaccttctgacgatcaga

SEQ ID NO: 25691 - DNA, 25 bp, Homo sapien
cctcccgggacctgggagacaagag

SEQ ID NO: 25692 - DNA, 25 bp, Homo sapien
cctcccgggaccagggagacaagag

SEQ ID NO: 25693 - DNA, 25 bp, Homo sapien
tctaccgggaccagcgggtacccta

SEQ ID NO: 25694 - DNA, 25 bp, Homo sapien
tctaccgggacctgcgggtacccta

SEQ ID NO: 25695 - DNA, 25 bp, Homo sapien
taaccgaggagactcggaacccgat

SEQ ID NO: 25696 - DNA, 25 bp, Homo sapien
taaccgaggagagtcggaacccgat

SEQ ID NO: 25697 - DNA, 25 bp, Homo sapien
tttaaagtcggtgtgagtccctgac

SEQ ID NO: 25698 - DNA, 25 bp, Homo sapien
tttaaagtcggtctgagtccctgac

SEQ ID NO: 25699 - DNA, 25 bp, Homo sapien
tcgagcagccggtagactcactcca

SEQ ID NO: 25700 - DNA, 25 bp, Homo sapien
tcgagcagccggaagactcactcca

SEQ ID NO: 25701 - DNA, 25 bp, Homo sapien
agggacgtgtcctcgtgacccctca

SEQ ID NO: 25702 - DNA, 25 bp, Homo sapien
agggacgtgtccacgtgacccctca

SEQ ID NO: 25703 - DNA, 25 bp, Homo sapien
gaggatgaaccgacgccgaccgcca

SEQ ID NO: 25704 - DNA, 25 bp, Homo sapien
gaggatgaaccgtcgccgaccgcca

SEQ ID NO: 25705 - DNA, 25 bp, Homo sapien
ggttcgaccgaattctgtgacccat

SEQ ID NO: 25706 - DNA, 25 bp, Homo sapien
ggttcgaccgaaatctgtgacccat

SEQ ID NO: 25707 - DNA, 25 bp, Homo sapien
aactgtcagatgcaccgtttccaaa

SEQ ID NO: 25708 - DNA, 25 bp, Homo sapien
aactgtcagatggaccgtttccaaa

SEQ ID NO: 25709 - DNA, 25 bp, Homo sapien
ttaacgtatcaagtgcaccgtgaac

SEQ ID NO: 25710 - DNA, 25 bp, Homo sapien
ttaacgtatcaactgcaccgtgaac

SEQ ID NO: 25711 - DNA, 25 bp, Homo sapien
tttccttgtgtgtgttactgtgaca

SEQ ID NO: 25712 - DNA, 25 bp, Homo sapien
tttccttgtgtgagttactgtgaca

SEQ ID NO: 25713 - DNA, 25 bp, Homo sapien
atcagttttgtgtcgtctaaagaca

SEQ ID NO: 25714 - DNA, 25 bp, Homo sapien
atcagttttgtgacgtctaaagaca

SEQ ID NO: 25715 - DNA, 25 bp, Homo sapien
gagcattggtatccttctcatacca

SEQ ID NO: 25716 - DNA, 25 bp, Homo sapien
gagcattggtatgcttctcatacca

SEQ ID NO: 25717 - DNA, 25 bp, Homo sapien
gaccgatcataagacatccaaagag

SEQ ID NO: 25718 - DNA, 25 bp, Homo sapien
gaccgatcataacacatccaaagag

SEQ ID NO: 25719 - DNA, 25 bp, Homo sapien
acctcagggatgctcaaacaagaac

SEQ ID NO: 25720 - DNA, 25 bp, Homo sapien
acctcagggatggtcaaacaagaac

SEQ ID NO: 25721 - DNA, 25 bp, Homo sapien
gtcaagcgagggtccggacaacaca

SEQ ID NO: 25722 - DNA, 25 bp, Homo sapien
gtcaagcgagggaccggacaacaca

SEQ ID NO: 25723 - DNA, 25 bp, Homo sapien
tgggtaggaaacctctacaaactat

SEQ ID NO: 25724 - DNA, 25 bp, Homo sapien
tgggtaggaaacgtctacaaactat

SEQ ID NO: 25725 - DNA, 25 bp, Homo sapien
taggaaccacaaacttacagagaga

SEQ ID NO: 25726 - DNA, 25 bp, Homo sapien
taggaaccacaatcttacagagaga

SEQ ID NO: 25727 - DNA, 25 bp, Homo sapien
taaacgacaccgacaagacacttgg

SEQ ID NO: 25728 - DNA, 25 bp, Homo sapien
taaacgacaccgtcaagacacttgg

SEQ ID NO: 25729 - DNA, 25 bp, Homo sapien
caaacgaccagacgaagacctcggg

SEQ ID NO: 25730 - DNA, 25 bp, Homo sapien
caaacgaccagaggaagacctcggg

SEQ ID NO: 25731 - DNA, 25 bp, Homo sapien
gcagtatagccaaaagagacctcaa

SEQ ID NO: 25732 - DNA, 25 bp, Homo sapien
gcagtatagccataagagacctcaa

SEQ ID NO: 25733 - DNA, 25 bp, Homo sapien
tcaacggaaaaagagacgtgtcata

SEQ ID NO: 25734 - DNA, 25 bp, Homo sapien
tcaacggaaaaacagacgtgtcata

SEQ ID NO: 25735 - DNA, 25 bp, Homo sapien
ttctagtaaatgagacgttacactt

SEQ ID NO: 25736 - DNA, 25 bp, Homo sapien
ttctagtaaatgtgacgttacactt

SEQ ID NO: 25737 - DNA, 25 bp, Homo sapien
aatcgttccgggtcggtctccgtct

SEQ ID NO: 25738 - DNA, 25 bp, Homo sapien
aatcgttccgggacggtctccgtct

SEQ ID NO: 25739 - DNA, 25 bp, Homo sapien
gacatgtacacaggaaggatacctc

SEQ ID NO: 25740 - DNA, 25 bp, Homo sapien
gacatgtacacacgaaggatacctc

SEQ ID NO: 25741 - DNA, 25 bp, Homo sapien
ctctgacaaccgacgagacatgtgt

SEQ ID NO: 25742 - DNA, 25 bp, Homo sapien
ctctgacaaccgtcgagacatgtgt

SEQ ID NO: 25743 - DNA, 25 bp, Homo sapien
gtcggacgtcccatagaccgaacgc

SEQ ID NO: 25744 - DNA, 25 bp, Homo sapien
gtcggacgtcccttagaccgaacgc

SEQ ID NO: 25745 - DNA, 25 bp, Homo sapien
gacacgagtacaatctaaccgccgc

SEQ ID NO: 25746 - DNA, 25 bp, Homo sapien
gacacgagtacattctaaccgccgc

SEQ ID NO: 25747 - DNA, 25 bp, Homo sapien
ctggaggttacgttctaccccttct

SEQ ID NO: 25748 - DNA, 25 bp, Homo sapien
ctggaggttacgatctaccccttct

SEQ ID NO: 25749 - DNA, 25 bp, Homo sapien
ttgttgaagaactgttccaggtctc

SEQ ID NO: 25750 - DNA, 25 bp, Homo sapien
ttgttgaagaacagttccaggtctc

SEQ ID NO: 25751 - DNA, 25 bp, Homo sapien
cttgtggacacgtttcggtcagtcc

SEQ ID NO: 25752 - DNA, 25 bp, Homo sapien
cttgtggacacgattcggtcagtcc

SEQ ID NO: 25753 - DNA, 25 bp, Homo sapien
ataccagaaccagtcgagacactca

SEQ ID NO: 25754 - DNA, 25 bp, Homo sapien
ataccagaaccactcgagacactca

SEQ ID NO: 25755 - DNA, 25 bp, Homo sapien
gaaggaagtcgttcccagctctcac

SEQ ID NO: 25756 - DNA, 25 bp, Homo sapien
gaaggaagtcgtacccagctctcac

SEQ ID NO: 25757 - DNA, 25 bp, Homo sapien
agaagtctcccgagacgaagcccct

SEQ ID NO: 25758 - DNA, 25 bp, Homo sapien
agaagtctcccgtgacgaagcccct

SEQ ID NO: 25759 - DNA, 25 bp, Homo sapien
agaaccgcaacagagacctctacca

SEQ ID NO: 25760 - DNA, 25 bp, Homo sapien
agaaccgcaacacagacctctacca

SEQ ID NO: 25761 - DNA, 25 bp, Homo sapien
gaccacgatacaaaacttcttcgag

SEQ ID NO: 25762 - DNA, 25 bp, Homo sapien
gaccacgatacataacttcttcgag

SEQ ID NO: 25763 - DNA, 25 bp, Homo sapien
ttgttacccgataagaaacttttga

SEQ ID NO: 25764 - DNA, 25 bp, Homo sapien
ttgttacccgattagaaacttttga

SEQ ID NO: 25765 - DNA, 25 bp, Homo sapien
ccctagaactagagactcatgagta

SEQ ID NO: 25766 - DNA, 25 bp, Homo sapien
ccctagaactagtgactcatgagta

SEQ ID NO: 25767 - DNA, 25 bp, Homo sapien
tagtactgagatcgagatcccgttt

SEQ ID NO: 25768 - DNA, 25 bp, Homo sapien
tagtactgagatggagatcccgttt

SEQ ID NO: 25769 - DNA, 25 bp, Homo sapien
gactactgaagtggggctctctcat

SEQ ID NO: 25770 - DNA, 25 bp, Homo sapien
gactactgaagtcgggctctctcat

SEQ ID NO: 25771 - DNA, 25 bp, Homo sapien
aatcagtcaattgacagttcttgtt

SEQ ID NO: 25772 - DNA, 25 bp, Homo sapien
aatcagtcaattcacagttcttgtt

SEQ ID NO: 25773 - DNA, 25 bp, Homo sapien
aaagaaagttgtcaaggtcgttctc

SEQ ID NO: 25774 - DNA, 25 bp, Homo sapien
aaagaaagttgtgaaggtcgttctc

SEQ ID NO: 25775 - DNA, 25 bp, Homo sapien
taaatttacggtactaggtcctacc

SEQ ID NO: 25776 - DNA, 25 bp, Homo sapien
taaatttacggttctaggtcctacc

SEQ ID NO: 25777 - DNA, 25 bp, Homo sapien
aacatcctcagttcgacagccacgg

SEQ ID NO: 25778 - DNA, 25 bp, Homo sapien
aacatcctcagtacgacagccacgg

SEQ ID NO: 25779 - DNA, 25 bp, Homo sapien
acggacaccgaggaccagtaccggc

SEQ ID NO: 25780 - DNA, 25 bp, Homo sapien
acggacaccgagcaccagtaccggc

SEQ ID NO: 25781 - DNA, 25 bp, Homo sapien
ttctgaagtaggaacagcatctgac

SEQ ID NO: 25782 - DNA, 25 bp, Homo sapien
ttctgaagtaggtacagcatctgac

SEQ ID NO: 25783 - DNA, 25 bp, Homo sapien
catgttcaagaggatcgtcaggttg

SEQ ID NO: 25784 - DNA, 25 bp, Homo sapien
catgttcaagagcatcgtcaggttg

SEQ ID NO: 25785 - DNA, 25 bp, Homo sapien
cgtctgagagtgtctacctaatgtt

SEQ ID NO: 25786 - DNA, 25 bp, Homo sapien
cgtctgagagtgactacctaatgtt

SEQ ID NO: 25787 - DNA, 25 bp, Homo sapien
aacaaacgatagacgtctaactggt

SEQ ID NO: 25788 - DNA, 25 bp, Homo sapien
aacaaacgatagtcgtctaactggt

SEQ ID NO: 25789 - DNA, 25 bp, Homo sapien
aagtaatacagtctactctgaggtt

SEQ ID NO: 25790 - DNA, 25 bp, Homo sapien
aagtaatacagtgtactctgaggtt

SEQ ID NO: 25791 - DNA, 25 bp, Homo sapien
gtcgagtagatcagttcgttcggtt

SEQ ID NO: 25792 - DNA, 25 bp, Homo sapien
gtcgagtagatctgttcgttcggtt

SEQ ID NO: 25793 - DNA, 25 bp, Homo sapien
acgttcgagtcgtcgtcttacgggt

SEQ ID NO: 25794 - DNA, 25 bp, Homo sapien
acgttcgagtcgacgtcttacgggt

SEQ ID NO: 25795 - DNA, 25 bp, Homo sapien
tgtctacaacgacgtcgactcggtc

SEQ ID NO: 25796 - DNA, 25 bp, Homo sapien
tgtctacaacgaggtcgactcggtc

SEQ ID NO: 25797 - DNA, 25 bp, Homo sapien
cgggtcgtactaagttcttctcgcc

SEQ ID NO: 25798 - DNA, 25 bp, Homo sapien
cgggtcgtactatgttcttctcgcc

SEQ ID NO: 25799 - DNA, 25 bp, Homo sapien
agaggtaagtggtcgtgtcctagtc

SEQ ID NO: 25800 - DNA, 25 bp, Homo sapien
agaggtaagtggacgtgtcctagtc

SEQ ID NO: 25801 - DNA, 25 bp, Homo sapien
ctgacgactacatattattccgagc

SEQ ID NO: 25802 - DNA, 25 bp, Homo sapien
ctgacgactacaaattattccgagc

SEQ ID NO: 25803 - DNA, 25 bp, Homo sapien
cagattctaaaagtttgtcgttttc

SEQ ID NO: 25804 - DNA, 25 bp, Homo sapien
cagattctaaaactttgtcgttttc

SEQ ID NO: 25805 - DNA, 25 bp, Homo sapien
ttctgcacacgtctagggtgctttt

SEQ ID NO: 25806 - DNA, 25 bp, Homo sapien
ttctgcacacgtgtagggtgctttt

SEQ ID NO: 25807 - DNA, 25 bp, Homo sapien
aggtccccacgaaagcggccttcag

SEQ ID NO: 25808 - DNA, 25 bp, Homo sapien
aggtccccacgatagcggccttcag

SEQ ID NO: 25809 - DNA, 25 bp, Homo sapien
tcgaccgacggacgacgcccaagag

SEQ ID NO: 25810 - DNA, 25 bp, Homo sapien
tcgaccgacggaggacgcccaagag

SEQ ID NO: 25811 - DNA, 25 bp, Homo sapien
gactccgacaggaccgggcctgaca

SEQ ID NO: 25812 - DNA, 25 bp, Homo sapien
gactccgacaggtccgggcctgaca

SEQ ID NO: 25813 - DNA, 25 bp, Homo sapien
atccgcaggtatcagggcgacataa

SEQ ID NO: 25814 - DNA, 25 bp, Homo sapien
atccgcaggtatgagggcgacataa

SEQ ID NO: 25815 - DNA, 25 bp, Homo sapien
ccttcgtgtggaaacgtgtattaac

SEQ ID NO: 25816 - DNA, 25 bp, Homo sapien
ccttcgtgtggatacgtgtattaac

SEQ ID NO: 25817 - DNA, 25 bp, Homo sapien
tatagtggagtcctacgtctctaaa

SEQ ID NO: 25818 - DNA, 25 bp, Homo sapien
tatagtggagtcgtacgtctctaaa

SEQ ID NO: 25819 - DNA, 25 bp, Homo sapien
ttatatgtgacatgttcttacggtc

SEQ ID NO: 25820 - DNA, 25 bp, Homo sapien
ttatatgtgacaagttcttacggtc

SEQ ID NO: 25821 - DNA, 25 bp, Homo sapien
agatataccgatgtgctctagtctg

SEQ ID NO: 25822 - DNA, 25 bp, Homo sapien
agatataccgatctgctctagtctg

SEQ ID NO: 25823 - DNA, 25 bp, Homo sapien
cgtagatatatgaggtgttccgatc

SEQ ID NO: 25824 - DNA, 25 bp, Homo sapien
cgtagatatatgtggtgttccgatc

SEQ ID NO: 25825 - DNA, 25 bp, Homo sapien
ggaagactgatggtgtgcgacatct

SEQ ID NO: 25826 - DNA, 25 bp, Homo sapien
ggaagactgatgctgtgcgacatct

SEQ ID NO: 25827 - DNA, 25 bp, Homo sapien
cgaatagcacagtttaggagacttt

SEQ ID NO: 25828 - DNA, 25 bp, Homo sapien
cgaatagcacagattaggagacttt

SEQ ID NO: 25829 - DNA, 25 bp, Homo sapien
gagaattccgattcgaaagtctctt

SEQ ID NO: 25830 - DNA, 25 bp, Homo sapien
gagaattccgatacgaaagtctctt

SEQ ID NO: 25831 - DNA, 25 bp, Homo sapien
gaaaggtttcgtcgtgaaccgtccc

SEQ ID NO: 25832 - DNA, 25 bp, Homo sapien
gaaaggtttcgtggtgaaccgtccc

SEQ ID NO: 25833 - DNA, 25 bp, Homo sapien
cggtctttgtcctgcgtcgactgtc

SEQ ID NO: 25834 - DNA, 25 bp, Homo sapien
cggtctttgtccagcgtcgactgtc

SEQ ID NO: 25835 - DNA, 25 bp, Homo sapien
tctcctttgtaccagtgtgggtcgt

SEQ ID NO: 25836 - DNA, 25 bp, Homo sapien
tctcctttgtacgagtgtgggtcgt

SEQ ID NO: 25837 - DNA, 25 bp, Homo sapien
ctggaatctgtaaccattcgttctc

SEQ ID NO: 25838 - DNA, 25 bp, Homo sapien
ctggaatctgtatccattcgttctc

SEQ ID NO: 25839 - DNA, 25 bp, Homo sapien
ggaccctgcgtctcctcgtgtgtgt

SEQ ID NO: 25840 - DNA, 25 bp, Homo sapien
ggaccctgcgtcacctcgtgtgtgt

SEQ ID NO: 25841 - DNA, 25 bp, Homo sapien
gatacatcttttatcttacgtgtcg

SEQ ID NO: 25842 - DNA, 25 bp, Homo sapien
gatacatcttttttcttacgtgtcg

SEQ ID NO: 25843 - DNA, 25 bp, Homo sapien
tatatacttagtgattctcaagtct

SEQ ID NO: 25844 - DNA, 25 bp, Homo sapien
tatatacttagtcattctcaagtct

SEQ ID NO: 25845 - DNA, 25 bp, Homo sapien
cactgtcgtcttgacttttaccata

SEQ ID NO: 25846 - DNA, 25 bp, Homo sapien
cactgtcgtcttcacttttaccata

SEQ ID NO: 25847 - DNA, 25 bp, Homo sapien
ctcacagtccttgtgttgacactaa

SEQ ID NO: 25848 - DNA, 25 bp, Homo sapien
ctcacagtccttctgttgacactaa

SEQ ID NO: 25849 - DNA, 25 bp, Homo sapien
gaccacggtccaattctctggataa

SEQ ID NO: 25850 - DNA, 25 bp, Homo sapien
gaccacggtccatttctctggataa

SEQ ID NO: 25851 - DNA, 25 bp, Homo sapien
gccatgtggttagtttacatataca

SEQ ID NO: 25852 - DNA, 25 bp, Homo sapien
gccatgtggttactttacatataca

SEQ ID NO: 25853 - DNA, 25 bp, Homo sapien
cattagtgcacttggacaagatgta

SEQ ID NO: 25854 - DNA, 25 bp, Homo sapien
cattagtgcactaggacaagatgta

SEQ ID NO: 25855 - DNA, 25 bp, Homo sapien
ggattttttacaaggaccaatgtct

SEQ ID NO: 25856 - DNA, 25 bp, Homo sapien
ggattttttacatggaccaatgtct

SEQ ID NO: 25857 - DNA, 25 bp, Homo sapien
aattttcggcatctagtgtaattac

SEQ ID NO: 25858 - DNA, 25 bp, Homo sapien
aattttcggcatgtagtgtaattac

SEQ ID NO: 25859 - DNA, 25 bp, Homo sapien
tttataccgttctcagattccgtga

SEQ ID NO: 25860 - DNA, 25 bp, Homo sapien
tttataccgttcacagattccgtga

SEQ ID NO: 25861 - DNA, 25 bp, Homo sapien
acagatagccttgctgaaataaagt

SEQ ID NO: 25862 - DNA, 25 bp, Homo sapien
acagatagccttcctgaaataaagt

SEQ ID NO: 25863 - DNA, 25 bp, Homo sapien
cgaaggacttcgagcaaaacttatt

SEQ ID NO: 25864 - DNA, 25 bp, Homo sapien
cgaaggacttcgtgcaaaacttatt

SEQ ID NO: 25865 - DNA, 25 bp, Homo sapien
cctgagctccgtgtcaaaactcttg

SEQ ID NO: 25866 - DNA, 25 bp, Homo sapien
cctgagctccgtctcaaaactcttg

SEQ ID NO: 25867 - DNA, 25 bp, Homo sapien
ggcgtccggacgtcaagaccgtctt

SEQ ID NO: 25868 - DNA, 25 bp, Homo sapien
ggcgtccggacgacaagaccgtctt

SEQ ID NO: 25869 - DNA, 25 bp, Homo sapien
cgtcggcctaagaagcgacccctgt

SEQ ID NO: 25870 - DNA, 25 bp, Homo sapien
cgtcggcctaagtagcgacccctgt

SEQ ID NO: 25871 - DNA, 25 bp, Homo sapien
cgagagcctgatgagcgacatgaac

SEQ ID NO: 25872 - DNA, 25 bp, Homo sapien
cgagagcctgatcagcgacatgaac

SEQ ID NO: 25873 - DNA, 25 bp, Homo sapien
tcacaccgtccctgaggggtcgtca

SEQ ID NO: 25874 - DNA, 25 bp, Homo sapien
tcacaccgtcccagaggggtcgtca

SEQ ID NO: 25875 - DNA, 25 bp, Homo sapien
aaccaagcacgaaccgacggtctga

SEQ ID NO: 25876 - DNA, 25 bp, Homo sapien
aaccaagcacgatccgacggtctga

SEQ ID NO: 25877 - DNA, 25 bp, Homo sapien
gaccgtcgtcccaaatgcggtcggg

SEQ ID NO: 25878 - DNA, 25 bp, Homo sapien
gaccgtcgtccctaatgcggtcggg

SEQ ID NO: 25879 - DNA, 25 bp, Homo sapien
tcctcggccaacaatctccagaagt

SEQ ID NO: 25880 - DNA, 25 bp, Homo sapien
tcctcggccaactatctccagaagt

SEQ ID NO: 25881 - DNA, 25 bp, Homo sapien
ttcggtatacctcaaaacccaccgg

SEQ ID NO: 25882 - DNA, 25 bp, Homo sapien
ttcggtatacctgaaaacccaccgg

SEQ ID NO: 25883 - DNA, 25 bp, Homo sapien
tgaggatgtgcggcgagccacctct

SEQ ID NO: 25884 - DNA, 25 bp, Homo sapien
tgaggatgtgcgccgagccacctct

SEQ ID NO: 25885 - DNA, 25 bp, Homo sapien
aattttgtctcgtgttatccccgtt

SEQ ID NO: 25886 - DNA, 25 bp, Homo sapien
aattttgtctcgagttatccccgtt

SEQ ID NO: 25887 - DNA, 25 bp, Homo sapien
accaaggaggtagtttctctctctc

SEQ ID NO: 25888 - DNA, 25 bp, Homo sapien
accaaggaggtactttctctctctc

SEQ ID NO: 25889 - DNA, 25 bp, Homo sapien
caaagttagaggagaacttgtctac

SEQ ID NO: 25890 - DNA, 25 bp, Homo sapien
caaagttagaggtgaacttgtctac

SEQ ID NO: 25891 - DNA, 25 bp, Homo sapien
gtagcaggtccctcggttgtctctc

SEQ ID NO: 25892 - DNA, 25 bp, Homo sapien
gtagcaggtcccacggttgtctctc

SEQ ID NO: 25893 - DNA, 25 bp, Homo sapien
cggcgagtgcaagagtaggttcacc

SEQ ID NO: 25894 - DNA, 25 bp, Homo sapien
cggcgagtgcaacagtaggttcacc

SEQ ID NO: 25895 - DNA, 25 bp, Homo sapien
gcacgttacggagtgaaggtttcct

SEQ ID NO: 25896 - DNA, 25 bp, Homo sapien
gcacgttacggactgaaggtttcct

SEQ ID NO: 25897 - DNA, 25 bp, Homo sapien
cgcactggtgaagtacaggtccccg

SEQ ID NO: 25898 - DNA, 25 bp, Homo sapien
cgcactggtgaactacaggtccccg

SEQ ID NO: 25899 - DNA, 25 bp, Homo sapien
acacggtacgtttccggtaattagg

SEQ ID NO: 25900 - DNA, 25 bp, Homo sapien
acacggtacgttaccggtaattagg

SEQ ID NO: 25901 - DNA, 25 bp, Homo sapien
caagagtagtctctgacgtattggt

SEQ ID NO: 25902 - DNA, 25 bp, Homo sapien
caagagtagtctgtgacgtattggt

SEQ ID NO: 25903 - DNA, 25 bp, Homo sapien
tctgagcgtgtgtccgtgtgtgtct

SEQ ID NO: 25904 - DNA, 25 bp, Homo sapien
tctgagcgtgtgaccgtgtgtgtct

SEQ ID NO: 25905 - DNA, 25 bp, Homo sapien
atatgagacgtgtcgtcgggtcgtc

SEQ ID NO: 25906 - DNA, 25 bp, Homo sapien
atatgagacgtgacgtcgggtcgtc

SEQ ID NO: 25907 - DNA, 25 bp, Homo sapien
cttcatgagactttctcgggagacg

SEQ ID NO: 25908 - DNA, 25 bp, Homo sapien
cttcatgagactatctcgggagacg

SEQ ID NO: 25909 - DNA, 25 bp, Homo sapien
ctcctttgtaccagtgtgggtcgtc

SEQ ID NO: 25910 - DNA, 25 bp, Homo sapien
ctcctttgtacctgtgtgggtcgtc

SEQ ID NO: 25911 - DNA, 25 bp, Homo sapien
caggtcagcgaccttgtaaggtcac

SEQ ID NO: 25912 - DNA, 25 bp, Homo sapien
caggtcagcgacgttgtaaggtcac

SEQ ID NO: 25913 - DNA, 25 bp, Homo sapien
gacattgagagacgttctcggttaa

SEQ ID NO: 25914 - DNA, 25 bp, Homo sapien
gacattgagagaggttctcggttaa

SEQ ID NO: 25915 - DNA, 25 bp, Homo sapien
cgtcaatgtaatgttccagtaagat

SEQ ID NO: 25916 - DNA, 25 bp, Homo sapien
cgtcaatgtaatcttccagtaagat

SEQ ID NO: 25917 - DNA, 25 bp, Homo sapien
ccgatcgtctgtacctcttgtggtg

SEQ ID NO: 25918 - DNA, 25 bp, Homo sapien
ccgatcgtctgttcctcttgtggtg

SEQ ID NO: 25919 - DNA, 25 bp, Homo sapien
tctcaaccgtgtactgtttatggtt

SEQ ID NO: 25920 - DNA, 25 bp, Homo sapien
tctcaaccgtgttctgtttatggtt

SEQ ID NO: 25921 - DNA, 25 bp, Homo sapien
tcctcagggtctgtcgtcttgttat

SEQ ID NO: 25922 - DNA, 25 bp, Homo sapien
tcctcagggtctctcgtcttgttat

SEQ ID NO: 25923 - DNA, 25 bp, Homo sapien
gtgtgtttcctctaccctatgtatt

SEQ ID NO: 25924 - DNA, 25 bp, Homo sapien
gtgtgtttcctcaaccctatgtatt

SEQ ID NO: 25925 - DNA, 25 bp, Homo sapien
aaggtttacctaaatccgttgaaac

SEQ ID NO: 25926 - DNA, 25 bp, Homo sapien
aaggtttacctatatccgttgaaac

SEQ ID NO: 25927 - DNA, 25 bp, Homo sapien
ttttccctcgtgataccttaaccga

SEQ ID NO: 25928 - DNA, 25 bp, Homo sapien
ttttccctcgtgttaccttaaccga

SEQ ID NO: 25929 - DNA, 25 bp, Homo sapien
gttttccatgtttcttgtacatcga

SEQ ID NO: 25930 - DNA, 25 bp, Homo sapien
gttttccatgttacttgtacatcga

SEQ ID NO: 25931 - DNA, 25 bp, Homo sapien
ctccgttgtcttatttacgtctccg

SEQ ID NO: 25932 - DNA, 25 bp, Homo sapien
ctccgttgtcttttttacgtctccg

SEQ ID NO: 25933 - DNA, 25 bp, Homo sapien
gttttacgtattcatgttagtcaac

SEQ ID NO: 25934 - DNA, 25 bp, Homo sapien
gttttacgtattgatgttagtcaac

SEQ ID NO: 25935 - DNA, 25 bp, Homo sapien
tttagagatacgttgagttccgacg

SEQ ID NO: 25936 - DNA, 25 bp, Homo sapien
tttagagatacgatgagttccgacg

SEQ ID NO: 25937 - DNA, 25 bp, Homo sapien
tactacggtaaagaggtcgacacgt

SEQ ID NO: 25938 - DNA, 25 bp, Homo sapien
tactacggtaaacaggtcgacacgt

SEQ ID NO: 25939 - DNA, 25 bp, Homo sapien
gtagtaattatacacggtatacata

SEQ ID NO: 25940 - DNA, 25 bp, Homo sapien
gtagtaattatagacggtatacata

SEQ ID NO: 25941 - DNA, 25 bp, Homo sapien
gaaagtatcaattgaatgtactcca

SEQ ID NO: 25942 - DNA, 25 bp, Homo sapien
gaaagtatcaatagaatgtactcca

SEQ ID NO: 25943 - DNA, 25 bp, Homo sapien
gagaaaaatgacaagacccgtcaca

SEQ ID NO: 25944 - DNA, 25 bp, Homo sapien
gagaaaaatgactagacccgtcaca

SEQ ID NO: 25945 - DNA, 25 bp, Homo sapien
gagagagaacaaaacttctagtctt

SEQ ID NO: 25946 - DNA, 25 bp, Homo sapien
gagagagaacaatacttctagtctt

SEQ ID NO: 25947 - DNA, 25 bp, Homo sapien
aaaagaaccctatttacgtcgtcgt

SEQ ID NO: 25948 - DNA, 25 bp, Homo sapien
aaaagaaccctaattacgtcgtcgt

SEQ ID NO: 25949 - DNA, 25 bp, Homo sapien
attgaagtaacaacggacttaactc

SEQ ID NO: 25950 - DNA, 25 bp, Homo sapien
attgaagtaacatcggacttaactc

SEQ ID NO: 25951 - DNA, 25 bp, Homo sapien
tctctgaaactagacacagtaagtc

SEQ ID NO: 25952 - DNA, 25 bp, Homo sapien
tctctgaaactacacacagtaagtc

SEQ ID NO: 25953 - DNA, 25 bp, Homo sapien
tgactccgggcagagtcgacggtca

SEQ ID NO: 25954 - DNA, 25 bp, Homo sapien
tgactccgggcacagtcgacggtca

SEQ ID NO: 25955 - DNA, 25 bp, Homo sapien
ttcatcatggcgacggtcgggacag

SEQ ID NO: 25956 - DNA, 25 bp, Homo sapien
ttcatcatggcgtcggtcgggacag

SEQ ID NO: 25957 - DNA, 25 bp, Homo sapien
ctcctaaagggtcgaacacacgcga

SEQ ID NO: 25958 - DNA, 25 bp, Homo sapien
ctcctaaagggtggaacacacgcga

SEQ ID NO: 25959 - DNA, 25 bp, Homo sapien
cgcgcacatgtgtgtatacacccca

SEQ ID NO: 25960 - DNA, 25 bp, Homo sapien
cgcgcacatgtgagtatacacccca

SEQ ID NO: 25961 - DNA, 25 bp, Homo sapien
gtctccacctcgactataaacaagg

SEQ ID NO: 25962 - DNA, 25 bp, Homo sapien
gtctccacctcgtctataaacaagg

SEQ ID NO: 25963 - DNA, 25 bp, Homo sapien
gagtcccctcgttatgggacctgtg

SEQ ID NO: 25964 - DNA, 25 bp, Homo sapien
gagtcccctcgtaatgggacctgtg

SEQ ID NO: 25965 - DNA, 25 bp, Homo sapien
tataataccctttaaccaaaatgtc

SEQ ID NO: 25966 - DNA, 25 bp, Homo sapien
tataatacccttaaaccaaaatgtc

SEQ ID NO: 25967 - DNA, 25 bp, Homo sapien
ctacctcgtactagaccaggaattt

SEQ ID NO: 25968 - DNA, 25 bp, Homo sapien
ctacctcgtacttgaccaggaattt

SEQ ID NO: 25969 - DNA, 25 bp, Homo sapien
gctacccgggcgccagcgagatctt

SEQ ID NO: 25970 - DNA, 25 bp, Homo sapien
gctacccgggcggcagcgagatctt

SEQ ID NO: 25971 - DNA, 25 bp, Homo sapien
gacgtcgggaggtcgaacgcgactt

SEQ ID NO: 25972 - DNA, 25 bp, Homo sapien
gacgtcgggaggacgaacgcgactt

SEQ ID NO: 25973 - DNA, 25 bp, Homo sapien
acgacgtcccggagaagacgactct

SEQ ID NO: 25974 - DNA, 25 bp, Homo sapien
acgacgtcccggtgaagacgactct

SEQ ID NO: 25975 - DNA, 25 bp, Homo sapien
tcctacctcgacgtcttagactcgt

SEQ ID NO: 25976 - DNA, 25 bp, Homo sapien
tcctacctcgacctcttagactcgt

SEQ ID NO: 25977 - DNA, 25 bp, Homo sapien
gccgtgggtcgcttccctctttatg

SEQ ID NO: 25978 - DNA, 25 bp, Homo sapien
gccgtgggtcgcatccctctttatg

SEQ ID NO: 25979 - DNA, 25 bp, Homo sapien
ccgagtcaggtctgtccctaattgg

SEQ ID NO: 25980 - DNA, 25 bp, Homo sapien
ccgagtcaggtcagtccctaattgg

SEQ ID NO: 25981 - DNA, 25 bp, Homo sapien
ccgtaggcaggcaggcaacagacaa

SEQ ID NO: 25982 - DNA, 25 bp, Homo sapien
ccgtaggcaggctggcaacagacaa

SEQ ID NO: 25983 - DNA, 25 bp, Homo sapien
ccgatacaagttgtaacacgttcaa

SEQ ID NO: 25984 - DNA, 25 bp, Homo sapien
ccgatacaagttctaacacgttcaa

SEQ ID NO: 25985 - DNA, 25 bp, Homo sapien
ccttacactggtcttaagtaccaag

SEQ ID NO: 25986 - DNA, 25 bp, Homo sapien
ccttacactggtgttaagtaccaag

SEQ ID NO: 25987 - DNA, 25 bp, Homo sapien
gttttgtcgatttatacgtccaggt

SEQ ID NO: 25988 - DNA, 25 bp, Homo sapien
gttttgtcgattaatacgtccaggt

SEQ ID NO: 25989 - DNA, 25 bp, Homo sapien
attatgtagttaaaccgtcgacggg

SEQ ID NO: 25990 - DNA, 25 bp, Homo sapien
attatgtagttataccgtcgacggg

SEQ ID NO: 25991 - DNA, 25 bp, Homo sapien
ctactgtataactattactacggcg

SEQ ID NO: 25992 - DNA, 25 bp, Homo sapien
ctactgtataacaattactacggcg

SEQ ID NO: 25993 - DNA, 25 bp, Homo sapien
gctatatatgatgatctcttacgcg

SEQ ID NO: 25994 - DNA, 25 bp, Homo sapien
gctatatatgatcatctcttacgcg

SEQ ID NO: 25995 - DNA, 25 bp, Homo sapien
ttcagtcgttaaatacctgtcgaag

SEQ ID NO: 25996 - DNA, 25 bp, Homo sapien
ttcagtcgttaattacctgtcgaag

SEQ ID NO: 25997 - DNA, 25 bp, Homo sapien
tttttcatggagattaccctaagat

SEQ ID NO: 25998 - DNA, 25 bp, Homo sapien
tttttcatggagtttaccctaagat

SEQ ID NO: 25999 - DNA, 25 bp, Homo sapien
ttgtcatcgaagtgacccacgaggt

SEQ ID NO: 26000 - DNA, 25 bp, Homo sapien
ttgtcatcgaagagacccacgaggt

SEQ ID NO: 26001 - DNA, 25 bp, Homo sapien
ttttattacgaaagacgacccaggt

SEQ ID NO: 26002 - DNA, 25 bp, Homo sapien
ttttattacgaatgacgacccaggt

SEQ ID NO: 26003 - DNA, 25 bp, Homo sapien
gacccgggcgctgagcttccactga

SEQ ID NO: 26004 - DNA, 25 bp, Homo sapien
gacccgggcgctcagcttccactga

SEQ ID NO: 26005 - DNA, 25 bp, Homo sapien
acccgaactatgacactctcacgga

SEQ ID NO: 26006 - DNA, 25 bp, Homo sapien
acccgaactatgtcactctcacgga

SEQ ID NO: 26007 - DNA, 25 bp, Homo sapien
ccgagtttaccgttcatatgataat

SEQ ID NO: 26008 - DNA, 25 bp, Homo sapien
ccgagtttaccgatcatatgataat

SEQ ID NO: 26009 - DNA, 25 bp, Homo sapien
agacacatccagagtcagaggctga

SEQ ID NO: 26010 - DNA, 25 bp, Homo sapien
agacacatccagtgtcagaggctga

SEQ ID NO: 26011 - DNA, 25 bp, Homo sapien
agttcccttccatgatacgggccta

SEQ ID NO: 26012 - DNA, 25 bp, Homo sapien
agttcccttccaagatacgggccta

SEQ ID NO: 26013 - DNA, 25 bp, Homo sapien
cgcttcagaagagggtcgcgctacg

SEQ ID NO: 26014 - DNA, 25 bp, Homo sapien
cgcttcagaagacggtcgcgctacg

SEQ ID NO: 26015 - DNA, 25 bp, Homo sapien
gtaccgttaatcttcaacagtaccg

SEQ ID NO: 26016 - DNA, 25 bp, Homo sapien
gtaccgttaatcatcaacagtaccg

SEQ ID NO: 26017 - DNA, 25 bp, Homo sapien
tgacagatttcaagtcagtgtaccg

SEQ ID NO: 26018 - DNA, 25 bp, Homo sapien
tgacagatttcatgtcagtgtaccg

SEQ ID NO: 26019 - DNA, 25 bp, Homo sapien
ttcctacgtttggtagtggtgtccg

SEQ ID NO: 26020 - DNA, 25 bp, Homo sapien
ttcctacgtttgctagtggtgtccg

SEQ ID NO: 26021 - DNA, 25 bp, Homo sapien
ttttaccggtgtggtatcgtgtccc

SEQ ID NO: 26022 - DNA, 25 bp, Homo sapien
ttttaccggtgtcgtatcgtgtccc

SEQ ID NO: 26023 - DNA, 25 bp, Homo sapien
tgtgtttactggtaattctctgaac

SEQ ID NO: 26024 - DNA, 25 bp, Homo sapien
tgtgtttactggaaattctctgaac

SEQ ID NO: 26025 - DNA, 25 bp, Homo sapien
tgcattctccaaccgtagtactagg

SEQ ID NO: 26026 - DNA, 25 bp, Homo sapien
tgcattctccaagcgtagtactagg

SEQ ID NO: 26027 - DNA, 25 bp, Homo sapien
tgctactacagctacggaaactaaa

SEQ ID NO: 26028 - DNA, 25 bp, Homo sapien
tgctactacagcaacggaaactaaa

SEQ ID NO: 26029 - DNA, 25 bp, Homo sapien
agaaaacgacagtaaaattaccccg

SEQ ID NO: 26030 - DNA, 25 bp, Homo sapien
agaaaacgacagaaaaattaccccg

SEQ ID NO: 26031 - DNA, 25 bp, Homo sapien
gagaaacaggagtaaggaaccctac

SEQ ID NO: 26032 - DNA, 25 bp, Homo sapien
gagaaacaggagaaaggaaccctac

SEQ ID NO: 26033 - DNA, 25 bp, Homo sapien
tttagtgtaagagagtaactcactc

SEQ ID NO: 26034 - DNA, 25 bp, Homo sapien
tttagtgtaagacagtaactcactc

SEQ ID NO: 26035 - DNA, 25 bp, Homo sapien
agtcagttctattgttagttacaca

SEQ ID NO: 26036 - DNA, 25 bp, Homo sapien
agtcagttctatagttagttacaca

SEQ ID NO: 26037 - DNA, 25 bp, Homo sapien
atcgactattgttgtgatcacctat

SEQ ID NO: 26038 - DNA, 25 bp, Homo sapien
atcgactattgtagtgatcacctat

SEQ ID NO: 26039 - DNA, 25 bp, Homo sapien
tacagtgggtgtggtcgtcgccctt

SEQ ID NO: 26040 - DNA, 25 bp, Homo sapien
tacagtgggtgtcgtcgtcgccctt

SEQ ID NO: 26041 - DNA, 25 bp, Homo sapien
cttgtgttgggtgagagtccttctg

SEQ ID NO: 26042 - DNA, 25 bp, Homo sapien
cttgtgttgggtcagagtccttctg

SEQ ID NO: 26043 - DNA, 25 bp, Homo sapien
ttcttttgtgacaattaccgttaag

SEQ ID NO: 26044 - DNA, 25 bp, Homo sapien
ttcttttgtgactattaccgttaag

SEQ ID NO: 26045 - DNA, 25 bp, Homo sapien
gtcgtgtctgtcatactgttgttta

SEQ ID NO: 26046 - DNA, 25 bp, Homo sapien
gtcgtgtctgtcttactgttgttta

SEQ ID NO: 26047 - DNA, 25 bp, Homo sapien
gagggtgagtcgatccgttgttctt

SEQ ID NO: 26048 - DNA, 25 bp, Homo sapien
gagggtgagtcgttccgttgttctt

SEQ ID NO: 26049 - DNA, 25 bp, Homo sapien
cgtggtacaacgtcacggatagctt

SEQ ID NO: 26050 - DNA, 25 bp, Homo sapien
cgtggtacaacgacacggatagctt

SEQ ID NO: 26051 - DNA, 25 bp, Homo sapien
tctgtcgtcaggagacagggtccag

SEQ ID NO: 26052 - DNA, 25 bp, Homo sapien
tctgtcgtcaggtgacagggtccag

SEQ ID NO: 26053 - DNA, 25 bp, Homo sapien
acaagtggtgacagaggtcgtcgag

SEQ ID NO: 26054 - DNA, 25 bp, Homo sapien
acaagtggtgactgaggtcgtcgag

SEQ ID NO: 26055 - DNA, 25 bp, Homo sapien
acccgtgtctcgtcagtgtgtctat

SEQ ID NO: 26056 - DNA, 25 bp, Homo sapien
acccgtgtctcgacagtgtgtctat

SEQ ID NO: 26057 - DNA, 25 bp, Homo sapien
cgtttatcgtcacgtatgatataat

SEQ ID NO: 26058 - DNA, 25 bp, Homo sapien
cgtttatcgtcaggtatgatataat

SEQ ID NO: 26059 - DNA, 25 bp, Homo sapien
gagttcgtacgttctcgaaagataa

SEQ ID NO: 26060 - DNA, 25 bp, Homo sapien
gagttcgtacgtactcgaaagataa

SEQ ID NO: 26061 - DNA, 25 bp, Homo sapien
gtggtttttgcatctacaccttatt

SEQ ID NO: 26062 - DNA, 25 bp, Homo sapien
gtggtttttgcaactacaccttatt

SEQ ID NO: 26063 - DNA, 25 bp, Homo sapien
cttgtttggttctgaacgacctttt

SEQ ID NO: 26064 - DNA, 25 bp, Homo sapien
cttgtttggttcagaacgacctttt

SEQ ID NO: 26065 - DNA, 25 bp, Homo sapien
aagtaaacagttacacgtattttcg

SEQ ID NO: 26066 - DNA, 25 bp, Homo sapien
aagtaaacagtttcacgtattttcg

SEQ ID NO: 26067 - DNA, 25 bp, Homo sapien
tgagaaggtggcactacggtgtatc

SEQ ID NO: 26068 - DNA, 25 bp, Homo sapien
tgagaaggtggctctacggtgtatc

SEQ ID NO: 26069 - DNA, 25 bp, Homo sapien
ggaaagaatgagttcactcagagac

SEQ ID NO: 26070 - DNA, 25 bp, Homo sapien
ggaaagaatgagatcactcagagac

SEQ ID NO: 26071 - DNA, 25 bp, Homo sapien
cgatcgatcaaaatgtttactttga

SEQ ID NO: 26072 - DNA, 25 bp, Homo sapien
cgatcgatcaaattgtttactttga

SEQ ID NO: 26073 - DNA, 25 bp, Homo sapien
ggagaagaaatcgtcttatttctac

SEQ ID NO: 26074 - DNA, 25 bp, Homo sapien
ggagaagaaatcctcttatttctac

SEQ ID NO: 26075 - DNA, 25 bp, Homo sapien
tggaaacatccttactaaatcgtag

SEQ ID NO: 26076 - DNA, 25 bp, Homo sapien
tggaaacatcctaactaaatcgtag

SEQ ID NO: 26077 - DNA, 25 bp, Homo sapien
taggagaacatcataacgtccccta

SEQ ID NO: 26078 - DNA, 25 bp, Homo sapien
taggagaacatcttaacgtccccta

SEQ ID NO: 26079 - DNA, 25 bp, Homo sapien
cggaaacgtctttctctacggtctc

SEQ ID NO: 26080 - DNA, 25 bp, Homo sapien
cggaaacgtcttactctacggtctc

SEQ ID NO: 26081 - DNA, 25 bp, Homo sapien
ggtgtaactaattccgagttcgttc

SEQ ID NO: 26082 - DNA, 25 bp, Homo sapien
ggtgtaactaataccgagttcgttc

SEQ ID NO: 26083 - DNA, 25 bp, Homo sapien
gaataaatcgtcttgatcagtcaaa

SEQ ID NO: 26084 - DNA, 25 bp, Homo sapien
gaataaatcgtcatgatcagtcaaa

SEQ ID NO: 26085 - DNA, 25 bp, Homo sapien
gtcctgtccttatctgtgacgccgt

SEQ ID NO: 26086 - DNA, 25 bp, Homo sapien
gtcctgtccttaactgtgacgccgt

SEQ ID NO: 26087 - DNA, 25 bp, Homo sapien
tacctctttcctttcgactgtcggg

SEQ ID NO: 26088 - DNA, 25 bp, Homo sapien
tacctctttcctatcgactgtcggg

SEQ ID NO: 26089 - DNA, 25 bp, Homo sapien
tatctgttccctaaagactgtgtga

SEQ ID NO: 26090 - DNA, 25 bp, Homo sapien
tatctgttcccttaagactgtgtga

SEQ ID NO: 26091 - DNA, 25 bp, Homo sapien
aaggactcgtgttacagggtctcga

SEQ ID NO: 26092 - DNA, 25 bp, Homo sapien
aaggactcgtgtaacagggtctcga

SEQ ID NO: 26093 - DNA, 25 bp, Homo sapien
aaagacgtcccgaaggagacagact

SEQ ID NO: 26094 - DNA, 25 bp, Homo sapien
aaagacgtcccgtaggagacagact

SEQ ID NO: 26095 - DNA, 25 bp, Homo sapien
cccagtgcaccgaagggacgcgaac

SEQ ID NO: 26096 - DNA, 25 bp, Homo sapien
cccagtgcaccgtagggacgcgaac

SEQ ID NO: 26097 - DNA, 25 bp, Homo sapien
gttaagtatcggagcgaccgacggc

SEQ ID NO: 26098 - DNA, 25 bp, Homo sapien
gttaagtatcggtgcgaccgacggc

SEQ ID NO: 26099 - DNA, 25 bp, Homo sapien
gtagttcgccgctcgcgaagaacgc

SEQ ID NO: 26100 - DNA, 25 bp, Homo sapien
gtagttcgccgcacgcgaagaacgc

SEQ ID NO: 26101 - DNA, 25 bp, Homo sapien
cccctgtaccgtgtcggaccgagga

SEQ ID NO: 26102 - DNA, 25 bp, Homo sapien
cccctgtaccgtctcggaccgagga

SEQ ID NO: 26103 - DNA, 25 bp, Homo sapien
tccgtcctgtcgtccgggtagtcct

SEQ ID NO: 26104 - DNA, 25 bp, Homo sapien
tccgtcctgtcgaccgggtagtcct

SEQ ID NO: 26105 - DNA, 25 bp, Homo sapien
ctgtctcttgggaaccggggtgact

SEQ ID NO: 26106 - DNA, 25 bp, Homo sapien
ctgtctcttgggtaccggggtgact

SEQ ID NO: 26107 - DNA, 25 bp, Homo sapien
gtttgtggtgcgaccctagtgacat

SEQ ID NO: 26108 - DNA, 25 bp, Homo sapien
gtttgtggtgcgtccctagtgacat

SEQ ID NO: 26109 - DNA, 25 bp, Homo sapien
catttatgtgagttctcattgacga

SEQ ID NO: 26110 - DNA, 25 bp, Homo sapien
catttatgtgagatctcattgacga

SEQ ID NO: 26111 - DNA, 25 bp, Homo sapien
attaaccggacactccttcgagtag

SEQ ID NO: 26112 - DNA, 25 bp, Homo sapien
attaaccggacagtccttcgagtag

SEQ ID NO: 26113 - DNA, 25 bp, Homo sapien
attttgaacgacaacgactgagaga

SEQ ID NO: 26114 - DNA, 25 bp, Homo sapien
attttgaacgactacgactgagaga

SEQ ID NO: 26115 - DNA, 25 bp, Homo sapien
gcctgagacgatcacgagacggcga

SEQ ID NO: 26116 - DNA, 25 bp, Homo sapien
gcctgagacgatgacgagacggcga

SEQ ID NO: 26117 - DNA, 25 bp, Homo sapien
cggcttcaggtaggtaggtatccga

SEQ ID NO: 26118 - DNA, 25 bp, Homo sapien
cggcttcaggtacgtaggtatccga

SEQ ID NO: 26119 - DNA, 25 bp, Homo sapien
tgtgtcgtccggtcggtcttctcgg

SEQ ID NO: 26120 - DNA, 25 bp, Homo sapien
tgtgtcgtccggacggtcttctcgg

SEQ ID NO: 26121 - DNA, 25 bp, Homo sapien
ggtaggacgacaacacgacctcccg

SEQ ID NO: 26122 - DNA, 25 bp, Homo sapien
ggtaggacgacatcacgacctcccg

SEQ ID NO: 26123 - DNA, 25 bp, Homo sapien
ccctctagggaagacggacgcgccg

SEQ ID NO: 26124 - DNA, 25 bp, Homo sapien
ccctctagggaacacggacgcgccg

SEQ ID NO: 26125 - DNA, 25 bp, Homo sapien
tagctcgtgggctaagacaccgaca

SEQ ID NO: 26126 - DNA, 25 bp, Homo sapien
tagctcgtgggcaaagacaccgaca

SEQ ID NO: 26127 - DNA, 25 bp, Homo sapien
tccgttgaggggttccggttctact

SEQ ID NO: 26128 - DNA, 25 bp, Homo sapien
tccgttgaggggatccggttctact

SEQ ID NO: 26129 - DNA, 25 bp, Homo sapien
gctgtactgcaacaaccgtatgtcc

SEQ ID NO: 26130 - DNA, 25 bp, Homo sapien
gctgtactgcaagaaccgtatgtcc

SEQ ID NO: 26131 - DNA, 25 bp, Homo sapien
gtacaagcgataaaacgtttactct

SEQ ID NO: 26132 - DNA, 25 bp, Homo sapien
gtacaagcgatataacgtttactct

SEQ ID NO: 26133 - DNA, 25 bp, Homo sapien
tgaagagactaatccgtctctacct

SEQ ID NO: 26134 - DNA, 25 bp, Homo sapien
tgaagagactaaaccgtctctacct

SEQ ID NO: 26135 - DNA, 25 bp, Homo sapien
acttaaacggagacgacacacctcc

SEQ ID NO: 26136 - DNA, 25 bp, Homo sapien
acttaaacggagtcgacacacctcc

SEQ ID NO: 26137 - DNA, 25 bp, Homo sapien
aataggcgtgacatccgacccgacc

SEQ ID NO: 26138 - DNA, 25 bp, Homo sapien
aataggcgtgacttccgacccgacc

SEQ ID NO: 26139 - DNA, 25 bp, Homo sapien
acaaaaggtgacgttcttcacacct

SEQ ID NO: 26140 - DNA, 25 bp, Homo sapien
acaaaaggtgaccttcttcacacct

SEQ ID NO: 26141 - DNA, 25 bp, Homo sapien
aaagagagggtctcgccagaacgct

SEQ ID NO: 26142 - DNA, 25 bp, Homo sapien
aaagagagggtcacgccagaacgct

SEQ ID NO: 26143 - DNA, 25 bp, Homo sapien
aaaggtaagtaatatccgacttaca

SEQ ID NO: 26144 - DNA, 25 bp, Homo sapien
aaaggtaagtaaaatccgacttaca

SEQ ID NO: 26145 - DNA, 25 bp, Homo sapien
cgagtgagtataatagagtctcctg

SEQ ID NO: 26146 - DNA, 25 bp, Homo sapien
cgagtgagtatattagagtctcctg

SEQ ID NO: 26147 - DNA, 25 bp, Homo sapien
aagtgtgtctacttagagtcatctc

SEQ ID NO: 26148 - DNA, 25 bp, Homo sapien
aagtgtgtctacatagagtcatctc

SEQ ID NO: 26149 - DNA, 25 bp, Homo sapien
ggcaagttgttcgtagtagtctttc

SEQ ID NO: 26150 - DNA, 25 bp, Homo sapien
ggcaagttgttcctagtagtctttc

SEQ ID NO: 26151 - DNA, 25 bp, Homo sapien
cggtatagactctttcaagtcataa

SEQ ID NO: 26152 - DNA, 25 bp, Homo sapien
cggtatagactcattcaagtcataa

SEQ ID NO: 26153 - DNA, 25 bp, Homo sapien
ctgaggtgcaaccactagtcagaga

SEQ ID NO: 26154 - DNA, 25 bp, Homo sapien
ctgaggtgcaacgactagtcagaga

SEQ ID NO: 26155 - DNA, 25 bp, Homo sapien
actcccgacgcctacggaaaggttc

SEQ ID NO: 26156 - DNA, 25 bp, Homo sapien
actcccgacgccaacggaaaggttc

SEQ ID NO: 26157 - DNA, 25 bp, Homo sapien
cttgacctatacagacgtaaccttg

SEQ ID NO: 26158 - DNA, 25 bp, Homo sapien
cttgacctatactgacgtaaccttg

SEQ ID NO: 26159 - DNA, 25 bp, Homo sapien
agtgtcaccaaaacgtctaccactg

SEQ ID NO: 26160 - DNA, 25 bp, Homo sapien
agtgtcaccaaatcgtctaccactg

SEQ ID NO: 26161 - DNA, 25 bp, Homo sapien
cgtacaacacgcaagtatacacatg

SEQ ID NO: 26162 - DNA, 25 bp, Homo sapien
cgtacaacacgctagtatacacatg

SEQ ID NO: 26163 - DNA, 25 bp, Homo sapien
ggggacccgacgtcgtactaaccag

SEQ ID NO: 26164 - DNA, 25 bp, Homo sapien
ggggacccgacgacgtactaaccag

SEQ ID NO: 26165 - DNA, 25 bp, Homo sapien
gtggggccacacatggtcgacctga

SEQ ID NO: 26166 - DNA, 25 bp, Homo sapien
gtggggccacacttggtcgacctga

SEQ ID NO: 26167 - DNA, 25 bp, Homo sapien
gggtctctaccctggtgtcgttctt

SEQ ID NO: 26168 - DNA, 25 bp, Homo sapien
gggtctctacccaggtgtcgttctt

SEQ ID NO: 26169 - DNA, 25 bp, Homo sapien
ttttgatttaccttattctcttcct

SEQ ID NO: 26170 - DNA, 25 bp, Homo sapien
ttttgatttaccatattctcttcct

SEQ ID NO: 26171 - DNA, 25 bp, Homo sapien
ttgggtgttcatctttcttcccgtc

SEQ ID NO: 26172 - DNA, 25 bp, Homo sapien
ttgggtgttcatgtttcttcccgtc

SEQ ID NO: 26173 - DNA, 25 bp, Homo sapien
gggtttatgacgtgtcctacctgtc

SEQ ID NO: 26174 - DNA, 25 bp, Homo sapien
gggtttatgacgagtcctacctgtc

SEQ ID NO: 26175 - DNA, 25 bp, Homo sapien
atgtgtagtctccttttcgacggct

SEQ ID NO: 26176 - DNA, 25 bp, Homo sapien
atgtgtagtctcgttttcgacggct

SEQ ID NO: 26177 - DNA, 25 bp, Homo sapien
ggtagccctaattatacgactcgtt

SEQ ID NO: 26178 - DNA, 25 bp, Homo sapien
ggtagccctaataatacgactcgtt

SEQ ID NO: 26179 - DNA, 25 bp, Homo sapien
agtagtcttcttgttacgatctgtg

SEQ ID NO: 26180 - DNA, 25 bp, Homo sapien
agtagtcttcttcttacgatctgtg

SEQ ID NO: 26181 - DNA, 25 bp, Homo sapien
tacagtcccgacaccatgttaaggt

SEQ ID NO: 26182 - DNA, 25 bp, Homo sapien
tacagtcccgactccatgttaaggt

SEQ ID NO: 26183 - DNA, 25 bp, Homo sapien
taatcagtcgactacagggttgata

SEQ ID NO: 26184 - DNA, 25 bp, Homo sapien
taatcagtcgacaacagggttgata

SEQ ID NO: 26185 - DNA, 25 bp, Homo sapien
tcctgagacgacaccggtggtcgaa

SEQ ID NO: 26186 - DNA, 25 bp, Homo sapien
tcctgagacgactccggtggtcgaa

SEQ ID NO: 26187 - DNA, 25 bp, Homo sapien
ctctttgttccgaccgggacgccgg

SEQ ID NO: 26188 - DNA, 25 bp, Homo sapien
ctctttgttccgtccgggacgccgg

SEQ ID NO: 26189 - DNA, 25 bp, Homo sapien
ctcgatttcttcacaacgaattgtg

SEQ ID NO: 26190 - DNA, 25 bp, Homo sapien
ctcgatttcttctcaacgaattgtg

SEQ ID NO: 26191 - DNA, 25 bp, Homo sapien
tcttctacttgttcacacggggttg

SEQ ID NO: 26192 - DNA, 25 bp, Homo sapien
tcttctacttgtacacacggggttg

SEQ ID NO: 26193 - DNA, 25 bp, Homo sapien
gacgttcctcggtcccgtgggtcct

SEQ ID NO: 26194 - DNA, 25 bp, Homo sapien
gacgttcctcggacccgtgggtcct

SEQ ID NO: 26195 - DNA, 25 bp, Homo sapien
ccggtgtgtcaatccccgtgtcctt

SEQ ID NO: 26196 - DNA, 25 bp, Homo sapien
ccggtgtgtcaaaccccgtgtcctt

SEQ ID NO: 26197 - DNA, 25 bp, Homo sapien
cgatttaggacacgaaccgtgactc

SEQ ID NO: 26198 - DNA, 25 bp, Homo sapien
cgatttaggacaggaaccgtgactc

SEQ ID NO: 26199 - DNA, 25 bp, Homo sapien
ctttatacgaccagggccgtcggag

SEQ ID NO: 26200 - DNA, 25 bp, Homo sapien
ctttatacgacctgggccgtcggag

SEQ ID NO: 26201 - DNA, 25 bp, Homo sapien
tttatatgtataatgcctctcgatg

SEQ ID NO: 26202 - DNA, 25 bp, Homo sapien
tttatatgtatattgcctctcgatg

SEQ ID NO: 26203 - DNA, 25 bp, Homo sapien
agtgctgtacgttgcgactggtaag

SEQ ID NO: 26204 - DNA, 25 bp, Homo sapien
agtgctgtacgtagcgactggtaag

SEQ ID NO: 26205 - DNA, 25 bp, Homo sapien
ggtctcgacgtcgtcctactgccgt

SEQ ID NO: 26206 - DNA, 25 bp, Homo sapien
ggtctcgacgtcctcctactgccgt

SEQ ID NO: 26207 - DNA, 25 bp, Homo sapien
ggttgtctcgtcatcctggacgtgt

SEQ ID NO: 26208 - DNA, 25 bp, Homo sapien
ggttgtctcgtcttcctggacgtgt

SEQ ID NO: 26209 - DNA, 25 bp, Homo sapien
ggacggtatctgtcgtacgggactt

SEQ ID NO: 26210 - DNA, 25 bp, Homo sapien
ggacggtatctgacgtacgggactt

SEQ ID NO: 26211 - DNA, 25 bp, Homo sapien
tccggaatctctcctagaggaacgg

SEQ ID NO: 26212 - DNA, 25 bp, Homo sapien
tccggaatctctgctagaggaacgg

SEQ ID NO: 26213 - DNA, 25 bp, Homo sapien
taggttttatctaaacaggacacag

SEQ ID NO: 26214 - DNA, 25 bp, Homo sapien
taggttttatcttaacaggacacag

SEQ ID NO: 26215 - DNA, 25 bp, Homo sapien
gagatctacttactccgtaatgaca

SEQ ID NO: 26216 - DNA, 25 bp, Homo sapien
gagatctacttagtccgtaatgaca

SEQ ID NO: 26217 - DNA, 25 bp, Homo sapien
acgatttatgtagtcatctatgaac

SEQ ID NO: 26218 - DNA, 25 bp, Homo sapien
acgatttatgtactcatctatgaac

SEQ ID NO: 26219 - DNA, 25 bp, Homo sapien
agtacaaggtacttcgaatctttaa

SEQ ID NO: 26220 - DNA, 25 bp, Homo sapien
agtacaaggtacatcgaatctttaa

SEQ ID NO: 26221 - DNA, 25 bp, Homo sapien
tagataagtcagacactattacaga

SEQ ID NO: 26222 - DNA, 25 bp, Homo sapien
tagataagtcagtcactattacaga

SEQ ID NO: 26223 - DNA, 25 bp, Homo sapien
gtcacgaacctacatcgtcgactta

SEQ ID NO: 26224 - DNA, 25 bp, Homo sapien
gtcacgaacctagatcgtcgactta

SEQ ID NO: 26225 - DNA, 25 bp, Homo sapien
atgactgctcgagtatctgacctcg

SEQ ID NO: 26226 - DNA, 25 bp, Homo sapien
atgactgctcgactatctgacctcg

SEQ ID NO: 26227 - DNA, 25 bp, Homo sapien
cccgtcgtcttgatcgtttaccggt

SEQ ID NO: 26228 - DNA, 25 bp, Homo sapien
cccgtcgtcttgttcgtttaccggt

SEQ ID NO: 26229 - DNA, 25 bp, Homo sapien
gtacgtttgtttgtagttcacgtcg

SEQ ID NO: 26230 - DNA, 25 bp, Homo sapien
gtacgtttgtttctagttcacgtcg

SEQ ID NO: 26231 - DNA, 25 bp, Homo sapien
atgtgaattactttatatctcgtgc

SEQ ID NO: 26232 - DNA, 25 bp, Homo sapien
atgtgaattactatatatctcgtgc

SEQ ID NO: 26233 - DNA, 25 bp, Homo sapien
tctaggatttactttacggttctga

SEQ ID NO: 26234 - DNA, 25 bp, Homo sapien
tctaggatttacattacggttctga

SEQ ID NO: 26235 - DNA, 25 bp, Homo sapien
ctgaatttctacgtatgttactgat

SEQ ID NO: 26236 - DNA, 25 bp, Homo sapien
ctgaatttctacctatgttactgat

SEQ ID NO: 26237 - DNA, 25 bp, Homo sapien
cacagaatgtgtacacgattttcta

SEQ ID NO: 26238 - DNA, 25 bp, Homo sapien
cacagaatgtgttcacgattttcta

SEQ ID NO: 26239 - DNA, 25 bp, Homo sapien
gtaaaatgtcttcagatacttgcta

SEQ ID NO: 26240 - DNA, 25 bp, Homo sapien
gtaaaatgtcttgagatacttgcta

SEQ ID NO: 26241 - DNA, 25 bp, Homo sapien
agtttcaggtctagtgatattccta

SEQ ID NO: 26242 - DNA, 25 bp, Homo sapien
agtttcaggtcttgtgatattccta

SEQ ID NO: 26243 - DNA, 25 bp, Homo sapien
tttatcagaccaatgaacaacgtga

SEQ ID NO: 26244 - DNA, 25 bp, Homo sapien
tttatcagaccattgaacaacgtga

SEQ ID NO: 26245 - DNA, 25 bp, Homo sapien
aattcagatctacagagacatctga

SEQ ID NO: 26246 - DNA, 25 bp, Homo sapien
aattcagatctagagagacatctga

SEQ ID NO: 26247 - DNA, 25 bp, Homo sapien
attatatatcagttgatcaagacac

SEQ ID NO: 26248 - DNA, 25 bp, Homo sapien
attatatatcagatgatcaagacac

SEQ ID NO: 26249 - DNA, 25 bp, Homo sapien
taccggtacaacgttctagaggagt

SEQ ID NO: 26250 - DNA, 25 bp, Homo sapien
taccggtacaaccttctagaggagt

SEQ ID NO: 26251 - DNA, 25 bp, Homo sapien
tagtccacaccttcctcgactgtgt

SEQ ID NO: 26252 - DNA, 25 bp, Homo sapien
tagtccacacctacctcgactgtgt

SEQ ID NO: 26253 - DNA, 25 bp, Homo sapien
cctctcgaccaacacactgagtgag

SEQ ID NO: 26254 - DNA, 25 bp, Homo sapien
cctctcgaccaagacactgagtgag

SEQ ID NO: 26255 - DNA, 25 bp, Homo sapien
atgacgtcccggaccccgacgggag

SEQ ID NO: 26256 - DNA, 25 bp, Homo sapien
atgacgtcccggtccccgacgggag

SEQ ID NO: 26257 - DNA, 25 bp, Homo sapien
tgagctccgacgtcaccctcgggta

SEQ ID NO: 26258 - DNA, 25 bp, Homo sapien
tgagctccgacgacaccctcgggta

SEQ ID NO: 26259 - DNA, 25 bp, Homo sapien
tgagtcacccagaacacccgatgtc

SEQ ID NO: 26260 - DNA, 25 bp, Homo sapien
tgagtcacccagtacacccgatgtc

SEQ ID NO: 26261 - DNA, 25 bp, Homo sapien
tgtatagtcccgtacacactcaagg

SEQ ID NO: 26262 - DNA, 25 bp, Homo sapien
tgtatagtcccgaacacactcaagg

SEQ ID NO: 26263 - DNA, 25 bp, Homo sapien
gtggttttcccgagttgtcaggacg

SEQ ID NO: 26264 - DNA, 25 bp, Homo sapien
gtggttttcccgtgttgtcaggacg

SEQ ID NO: 26265 - DNA, 25 bp, Homo sapien
aggtttctactcgttttgcttacgg

SEQ ID NO: 26266 - DNA, 25 bp, Homo sapien
aggtttctactccttttgcttacgg

SEQ ID NO: 26267 - DNA, 25 bp, Homo sapien
gtttgtctctctctatgacttcgtc

SEQ ID NO: 26268 - DNA, 25 bp, Homo sapien
gtttgtctctctgtatgacttcgtc

SEQ ID NO: 26269 - DNA, 25 bp, Homo sapien
gtcttacgtgtcctgagacccccga

SEQ ID NO: 26270 - DNA, 25 bp, Homo sapien
gtcttacgtgtcgtgagacccccga

SEQ ID NO: 26271 - DNA, 25 bp, Homo sapien
ggatacttggtgtgacagacccaac

SEQ ID NO: 26272 - DNA, 25 bp, Homo sapien
ggatacttggtgagacagacccaac

SEQ ID NO: 26273 - DNA, 25 bp, Homo sapien
aacctgatcggtgactacgggcccg

SEQ ID NO: 26274 - DNA, 25 bp, Homo sapien
aacctgatcggtcactacgggcccg

SEQ ID NO: 26275 - DNA, 25 bp, Homo sapien
caccggtatcttaagagagacctcc

SEQ ID NO: 26276 - DNA, 25 bp, Homo sapien
caccggtatctttagagagacctcc

SEQ ID NO: 26277 - DNA, 25 bp, Homo sapien
acacgacgtggttcaagactaccca

SEQ ID NO: 26278 - DNA, 25 bp, Homo sapien
acacgacgtggtacaagactaccca

SEQ ID NO: 26279 - DNA, 25 bp, Homo sapien
ggacgatgggtacacgagaaccacc

SEQ ID NO: 26280 - DNA, 25 bp, Homo sapien
ggacgatgggtagacgagaaccacc

SEQ ID NO: 26281 - DNA, 25 bp, Homo sapien
acgtcattgtcgaaattagacacca

SEQ ID NO: 26282 - DNA, 25 bp, Homo sapien
acgtcattgtcgtaattagacacca

SEQ ID NO: 26283 - DNA, 25 bp, Homo sapien
tacacattgtattcggtgtcatgtt

SEQ ID NO: 26284 - DNA, 25 bp, Homo sapien
tacacattgtatacggtgtcatgtt

SEQ ID NO: 26285 - DNA, 25 bp, Homo sapien
taactgtagttgagaagccgtagta

SEQ ID NO: 26286 - DNA, 25 bp, Homo sapien
taactgtagttgtgaagccgtagta

SEQ ID NO: 26287 - DNA, 25 bp, Homo sapien
ggtgtacgttctcaaacgacctgta

SEQ ID NO: 26288 - DNA, 25 bp, Homo sapien
ggtgtacgttctgaaacgacctgta

SEQ ID NO: 26289 - DNA, 25 bp, Homo sapien
cctaagacggaggtaccggacctga

SEQ ID NO: 26290 - DNA, 25 bp, Homo sapien
cctaagacggagctaccggacctga

SEQ ID NO: 26291 - DNA, 25 bp, Homo sapien
ttgaaggtactaacgcagaccgacc

SEQ ID NO: 26292 - DNA, 25 bp, Homo sapien
ttgaaggtactatcgcagaccgacc

SEQ ID NO: 26293 - DNA, 25 bp, Homo sapien
tatacagagatagacgtcaccgacc

SEQ ID NO: 26294 - DNA, 25 bp, Homo sapien
tatacagagatacacgtcaccgacc

SEQ ID NO: 26295 - DNA, 25 bp, Homo sapien
gtgggtaaaggataggacccaagac

SEQ ID NO: 26296 - DNA, 25 bp, Homo sapien
gtgggtaaaggaaaggacccaagac

SEQ ID NO: 26297 - DNA, 25 bp, Homo sapien
gtgggtatggtgcacaatccctaaa

SEQ ID NO: 26298 - DNA, 25 bp, Homo sapien
gtgggtatggtggacaatccctaaa

SEQ ID NO: 26299 - DNA, 25 bp, Homo sapien
gacatttgaagtacatctgtctaaa

SEQ ID NO: 26300 - DNA, 25 bp, Homo sapien
gacatttgaagttcatctgtctaaa

SEQ ID NO: 26301 - DNA, 25 bp, Homo sapien
gacattgtcgacgttttcattaatt

SEQ ID NO: 26302 - DNA, 25 bp, Homo sapien
gacattgtcgaccttttcattaatt

SEQ ID NO: 26303 - DNA, 25 bp, Homo sapien
gggttcgacgattgaaccgttatta

SEQ ID NO: 26304 - DNA, 25 bp, Homo sapien
gggttcgacgatagaaccgttatta

SEQ ID NO: 26305 - DNA, 25 bp, Homo sapien
ggcgacaccacaatctgtcctagta

SEQ ID NO: 26306 - DNA, 25 bp, Homo sapien
ggcgacaccacattctgtcctagta

SEQ ID NO: 26307 - DNA, 25 bp, Homo sapien
ttaagacgcaacagtagtttcaaat

SEQ ID NO: 26308 - DNA, 25 bp, Homo sapien
ttaagacgcaactgtagtttcaaat

SEQ ID NO: 26309 - DNA, 25 bp, Homo sapien
cacgtgccatagacccggtaactat

SEQ ID NO: 26310 - DNA, 25 bp, Homo sapien
cacgtgccatagtcccggtaactat

SEQ ID NO: 26311 - DNA, 25 bp, Homo sapien
ctgagactccagtcggttccactcg

SEQ ID NO: 26312 - DNA, 25 bp, Homo sapien
ctgagactccagacggttccactcg

SEQ ID NO: 26313 - DNA, 25 bp, Homo sapien
tacccgctacaaagagtcccgacga

SEQ ID NO: 26314 - DNA, 25 bp, Homo sapien
tacccgctacaatgagtcccgacga

SEQ ID NO: 26315 - DNA, 25 bp, Homo sapien
acccgacagagagcagtcgtcccgg

SEQ ID NO: 26316 - DNA, 25 bp, Homo sapien
acccgacagagaccagtcgtcccgg

SEQ ID NO: 26317 - DNA, 25 bp, Homo sapien
gaacagacgtaaacacaggtccagg

SEQ ID NO: 26318 - DNA, 25 bp, Homo sapien
gaacagacgtaatcacaggtccagg

SEQ ID NO: 26319 - DNA, 25 bp, Homo sapien
accgacccagacaccgggaacagat

SEQ ID NO: 26320 - DNA, 25 bp, Homo sapien
accgacccagactccgggaacagat

SEQ ID NO: 26321 - DNA, 25 bp, Homo sapien
aaacgatctattctcgatgccgtga

SEQ ID NO: 26322 - DNA, 25 bp, Homo sapien
aaacgatctattgtcgatgccgtga

SEQ ID NO: 26323 - DNA, 25 bp, Homo sapien
ccccgtcatgtggtacaagttgtta

SEQ ID NO: 26324 - DNA, 25 bp, Homo sapien
ccccgtcatgtgctacaagttgtta

SEQ ID NO: 26325 - DNA, 25 bp, Homo sapien
cgaccccaaggtatgactatcgtca

SEQ ID NO: 26326 - DNA, 25 bp, Homo sapien
cgaccccaaggtttgactatcgtca

SEQ ID NO: 26327 - DNA, 25 bp, Homo sapien
tccccggaaccacagagactctgag

SEQ ID NO: 26328 - DNA, 25 bp, Homo sapien
tccccggaaccagagagactctgag

SEQ ID NO: 26329 - DNA, 25 bp, Homo sapien
tcccgagtcctaacgggtacaccta

SEQ ID NO: 26330 - DNA, 25 bp, Homo sapien
tcccgagtcctatcgggtacaccta

SEQ ID NO: 26331 - DNA, 25 bp, Homo sapien
gataccgaaggatgtcgggacccag

SEQ ID NO: 26332 - DNA, 25 bp, Homo sapien
gataccgaaggaagtcgggacccag

SEQ ID NO: 26333 - DNA, 25 bp, Homo sapien
tactaaagggtgacggtcacgctgg

SEQ ID NO: 26334 - DNA, 25 bp, Homo sapien
tactaaagggtgtcggtcacgctgg

SEQ ID NO: 26335 - DNA, 25 bp, Homo sapien
tctgacatccggtgatgacgacaca

SEQ ID NO: 26336 - DNA, 25 bp, Homo sapien
tctgacatccggagatgacgacaca

SEQ ID NO: 26337 - DNA, 25 bp, Homo sapien
aggttagtgctcgacgtgaccccca

SEQ ID NO: 26338 - DNA, 25 bp, Homo sapien
aggttagtgctccacgtgaccccca

SEQ ID NO: 26339 - DNA, 25 bp, Homo sapien
taggatgaatcgagaacgcccgtcc

SEQ ID NO: 26340 - DNA, 25 bp, Homo sapien
taggatgaatcgtgaacgcccgtcc

SEQ ID NO: 26341 - DNA, 25 bp, Homo sapien
ggttcgaccaaattctacgacccat

SEQ ID NO: 26342 - DNA, 25 bp, Homo sapien
ggttcgaccaaaatctacgacccat

SEQ ID NO: 26343 - DNA, 25 bp, Homo sapien
aaagtgacatgaccactttgtcaaa

SEQ ID NO: 26344 - DNA, 25 bp, Homo sapien
aaagtgacatgagcactttgtcaaa

SEQ ID NO: 26345 - DNA, 25 bp, Homo sapien
ttccgtatcgaacgtggacgggacc

SEQ ID NO: 26346 - DNA, 25 bp, Homo sapien
ttccgtatcgaaggtggacgggacc

SEQ ID NO: 26347 - DNA, 25 bp, Homo sapien
tgtccttgtcggtcgtccgggactt

SEQ ID NO: 26348 - DNA, 25 bp, Homo sapien
tgtccttgtcggacgtccgggactt

SEQ ID NO: 26349 - DNA, 25 bp, Homo sapien
ctcctttgtgtgttaccaaagactc

SEQ ID NO: 26350 - DNA, 25 bp, Homo sapien
ctcctttgtgtgataccaaagactc

SEQ ID NO: 26351 - DNA, 25 bp, Homo sapien
taattgttgtcgtttctacgaacca

SEQ ID NO: 26352 - DNA, 25 bp, Homo sapien
taattgttgtcgattctacgaacca

SEQ ID NO: 26353 - DNA, 25 bp, Homo sapien
ccttctagtagacacatccaaagag

SEQ ID NO: 26354 - DNA, 25 bp, Homo sapien
ccttctagtagagacatccaaagag

SEQ ID NO: 26355 - DNA, 25 bp, Homo sapien
cctagggtagacaccacctaagaac

SEQ ID NO: 26356 - DNA, 25 bp, Homo sapien
cctagggtagactccacctaagaac

SEQ ID NO: 26357 - DNA, 25 bp, Homo sapien
gtctatcgggggtccgcgccacata

SEQ ID NO: 26358 - DNA, 25 bp, Homo sapien
gtctatcgggggaccgcgccacata

SEQ ID NO: 26359 - DNA, 25 bp, Homo sapien
tgtgccggaaactgtcacagaactg

SEQ ID NO: 26360 - DNA, 25 bp, Homo sapien
tgtgccggaaacagtcacagaactg

SEQ ID NO: 26361 - DNA, 25 bp, Homo sapien
tgaaagtcacaacctgtaagaacga

SEQ ID NO: 26362 - DNA, 25 bp, Homo sapien
tgaaagtcacaagctgtaagaacga

SEQ ID NO: 26363 - DNA, 25 bp, Homo sapien
atgacaacccgaacaagaactagga

SEQ ID NO: 26364 - DNA, 25 bp, Homo sapien
atgacaacccgatcaagaactagga

SEQ ID NO: 26365 - DNA, 25 bp, Homo sapien
aataaacgtccacatgaacgtcggg

SEQ ID NO: 26366 - DNA, 25 bp, Homo sapien
aataaacgtccagatgaacgtcggg

SEQ ID NO: 26367 - DNA, 25 bp, Homo sapien
gtccatagccagaaggagacctcaa

SEQ ID NO: 26368 - DNA, 25 bp, Homo sapien
gtccatagccagtaggagacctcaa

SEQ ID NO: 26369 - DNA, 25 bp, Homo sapien
ccgaacggaaaaagtggacttctaa

SEQ ID NO: 26370 - DNA, 25 bp, Homo sapien
ccgaacggaaaatgtggacttctaa

SEQ ID NO: 26371 - DNA, 25 bp, Homo sapien
tacaagaaactggtgtacgttaatc

SEQ ID NO: 26372 - DNA, 25 bp, Homo sapien
tacaagaaactgctgtacgttaatc

SEQ ID NO: 26373 - DNA, 25 bp, Homo sapien
gacagttttcggtcgcgtctcatct

SEQ ID NO: 26374 - DNA, 25 bp, Homo sapien
gacagttttcggacgcgtctcatct

SEQ ID NO: 26375 - DNA, 25 bp, Homo sapien
gtacatgtataaccaagggtgctct

SEQ ID NO: 26376 - DNA, 25 bp, Homo sapien
gtacatgtataagcaagggtgctct

SEQ ID NO: 26377 - DNA, 25 bp, Homo sapien
tcgttgaagaggaacaacatgtcgt

SEQ ID NO: 26378 - DNA, 25 bp, Homo sapien
tcgttgaagaggtacaacatgtcgt

SEQ ID NO: 26379 - DNA, 25 bp, Homo sapien
tgtcgaagcgccagtgaccgaaccg

SEQ ID NO: 26380 - DNA, 25 bp, Homo sapien
tgtcgaagcgcctgtgaccgaaccg

SEQ ID NO: 26381 - DNA, 25 bp, Homo sapien
gtctacagacacttgtaacacgcaa

SEQ ID NO: 26382 - DNA, 25 bp, Homo sapien
gtctacagacacatgtaacacgcaa

SEQ ID NO: 26383 - DNA, 25 bp, Homo sapien
tcggagacgtccttctcagaccttc

SEQ ID NO: 26384 - DNA, 25 bp, Homo sapien
tcggagacgtccatctcagaccttc

SEQ ID NO: 26385 - DNA, 25 bp, Homo sapien
ttcgttggagaaggttcaatagtcc

SEQ ID NO: 26386 - DNA, 25 bp, Homo sapien
ttcgttggagaacgttcaatagtcc

SEQ ID NO: 26387 - DNA, 25 bp, Homo sapien
tcttggtgttcgtatcagtcagtcc

SEQ ID NO: 26388 - DNA, 25 bp, Homo sapien
tcttggtgttcgaatcagtcagtcc

SEQ ID NO: 26389 - DNA, 25 bp, Homo sapien
ctccagaaccgagtcgagactctgg

SEQ ID NO: 26390 - DNA, 25 bp, Homo sapien
ctccagaaccgactcgagactctgg

SEQ ID NO: 26391 - DNA, 25 bp, Homo sapien
cgtaaaagatcgtcccacgtctcca

SEQ ID NO: 26392 - DNA, 25 bp, Homo sapien
cgtaaaagatcgacccacgtctcca

SEQ ID NO: 26393 - DNA, 25 bp, Homo sapien
agaacctcaacgagaagagctcctc

SEQ ID NO: 26394 - DNA, 25 bp, Homo sapien
agaacctcaacgtgaagagctcctc

SEQ ID NO: 26395 - DNA, 25 bp, Homo sapien
aaaccgtcagtctagaattctcccg

SEQ ID NO: 26396 - DNA, 25 bp, Homo sapien
aaaccgtcagtcaagaattctcccg

SEQ ID NO: 26397 - DNA, 25 bp, Homo sapien
gactccaacgatgaattcctctacg

SEQ ID NO: 26398 - DNA, 25 bp, Homo sapien
gactccaacgatcaattcctctacg

SEQ ID NO: 26399 - DNA, 25 bp, Homo sapien
gtgcaccgataacaccttgtctcac

SEQ ID NO: 26400 - DNA, 25 bp, Homo sapien
gtgcaccgataagaccttgtctcac

SEQ ID NO: 26401 - DNA, 25 bp, Homo sapien
gtggccagtaaaaaactcttgacta

SEQ ID NO: 26402 - DNA, 25 bp, Homo sapien
gtggccagtaaataactcttgacta

SEQ ID NO: 26403 - DNA, 25 bp, Homo sapien
cttctaagactccagagtcccgttt

SEQ ID NO: 26404 - DNA, 25 bp, Homo sapien
cttctaagactcgagagtcccgttt

SEQ ID NO: 26405 - DNA, 25 bp, Homo sapien
tttgactctgacagggggctccttg

SEQ ID NO: 26406 - DNA, 25 bp, Homo sapien
tttgactctgactgggggctccttg

SEQ ID NO: 26407 - DNA, 25 bp, Homo sapien
acacgtcaatgtctagttttacgtt

SEQ ID NO: 26408 - DNA, 25 bp, Homo sapien
acacgtcaatgtgtagttttacgtt

SEQ ID NO: 26409 - DNA, 25 bp, Homo sapien
aaaaaactgggtcctaggtttcgtc

SEQ ID NO: 26410 - DNA, 25 bp, Homo sapien
aaaaaactgggtgctaggtttcgtc

SEQ ID NO: 26411 - DNA, 25 bp, Homo sapien
gaaaagattggtgacacggtccatg

SEQ ID NO: 26412 - DNA, 25 bp, Homo sapien
gaaaagattggtcacacggtccatg

SEQ ID NO: 26413 - DNA, 25 bp, Homo sapien
acatatttctattacgacggccagg

SEQ ID NO: 26414 - DNA, 25 bp, Homo sapien
acatatttctataacgacggccagg

SEQ ID NO: 26415 - DNA, 25 bp, Homo sapien
gaaggacccgacgaccagaccgggt

SEQ ID NO: 26416 - DNA, 25 bp, Homo sapien
gaaggacccgaccaccagaccgggt

SEQ ID NO: 26417 - DNA, 25 bp, Homo sapien
attgaacggtagacagtcatctggt

SEQ ID NO: 26418 - DNA, 25 bp, Homo sapien
attgaacggtagtcagtcatctggt

SEQ ID NO: 26419 - DNA, 25 bp, Homo sapien
cattcgttatgaaatgtcatctgtg

SEQ ID NO: 26420 - DNA, 25 bp, Homo sapien
cattcgttatgatatgtcatctgtg

SEQ ID NO: 26421 - DNA, 25 bp, Homo sapien
atgtctgatgagtctaatttcgtct

SEQ ID NO: 26422 - DNA, 25 bp, Homo sapien
atgtctgatgagactaatttcgtct

SEQ ID NO: 26423 - DNA, 25 bp, Homo sapien
gaaaacgagaagacctagatgtcgt

SEQ ID NO: 26424 - DNA, 25 bp, Homo sapien
gaaaacgagaagtcctagatgtcgt

SEQ ID NO: 26425 - DNA, 25 bp, Homo sapien
aagtacaagactcttcgtagatgtg

SEQ ID NO: 26426 - DNA, 25 bp, Homo sapien
aagtacaagactgttcgtagatgtg

SEQ ID NO: 26427 - DNA, 25 bp, Homo sapien
cgtcataactacgttgtggtgtagt

SEQ ID NO: 26428 - DNA, 25 bp, Homo sapien
cgtcataactaccttgtggtgtagt

SEQ ID NO: 26429 - DNA, 25 bp, Homo sapien
tatcgagtacgttctactgttgtgt

SEQ ID NO: 26430 - DNA, 25 bp, Homo sapien
tatcgagtacgtactactgttgtgt

SEQ ID NO: 26431 - DNA, 25 bp, Homo sapien
tcctaactacgacgtctcgggtcgt

SEQ ID NO: 26432 - DNA, 25 bp, Homo sapien
tcctaactacgaggtctcgggtcgt

SEQ ID NO: 26433 - DNA, 25 bp, Homo sapien
gacgactactaagttactacgccgt

SEQ ID NO: 26434 - DNA, 25 bp, Homo sapien
gacgactactaacttactacgccgt

SEQ ID NO: 26435 - DNA, 25 bp, Homo sapien
ggtgtgacttgactgtcgcgacgtc

SEQ ID NO: 26436 - DNA, 25 bp, Homo sapien
ggtgtgacttgagtgtcgcgacgtc

SEQ ID NO: 26437 - DNA, 25 bp, Homo sapien
acgacacgatatcttgtccgagtcg

SEQ ID NO: 26438 - DNA, 25 bp, Homo sapien
acgacacgatatgttgtccgagtcg

SEQ ID NO: 26439 - DNA, 25 bp, Homo sapien
actttaacgacagtttggtcattct

SEQ ID NO: 26440 - DNA, 25 bp, Homo sapien
actttaacgacactttggtcattct

SEQ ID NO: 26441 - DNA, 25 bp, Homo sapien
cttccggaacgtctatgggaatctt

SEQ ID NO: 26442 - DNA, 25 bp, Homo sapien
cttccggaacgtgtatgggaatctt

SEQ ID NO: 26443 - DNA, 25 bp, Homo sapien
acatccccacgacgaaggccttgtg

SEQ ID NO: 26444 - DNA, 25 bp, Homo sapien
acatccccacgaggaaggccttgtg

SEQ ID NO: 26445 - DNA, 25 bp, Homo sapien
ccgaagacggtagaggtcacatagg

SEQ ID NO: 26446 - DNA, 25 bp, Homo sapien
ccgaagacggtacaggtcacatagg

SEQ ID NO: 26447 - DNA, 25 bp, Homo sapien
gggacccgaaggacccgtgctccaa

SEQ ID NO: 26448 - DNA, 25 bp, Homo sapien
gggacccgaaggtcccgtgctccaa

SEQ ID NO: 26449 - DNA, 25 bp, Homo sapien
cccacgcaggtagaaggtcgacaaa

SEQ ID NO: 26450 - DNA, 25 bp, Homo sapien
cccacgcaggtacaaggtcgacaaa

SEQ ID NO: 26451 - DNA, 25 bp, Homo sapien
gccttctgtccgaaacgtctaaagc

SEQ ID NO: 26452 - DNA, 25 bp, Homo sapien
gccttctgtccgtaacgtctaaagc

SEQ ID NO: 26453 - DNA, 25 bp, Homo sapien
ttacgtgaagtcttactttcacacg

SEQ ID NO: 26454 - DNA, 25 bp, Homo sapien
ttacgtgaagtcatactttcacacg

SEQ ID NO: 26455 - DNA, 25 bp, Homo sapien
gatattggactaatcttatacggtc

SEQ ID NO: 26456 - DNA, 25 bp, Homo sapien
gatattggactattcttatacggtc

SEQ ID NO: 26457 - DNA, 25 bp, Homo sapien
agagttccactagtctcctgactag

SEQ ID NO: 26458 - DNA, 25 bp, Homo sapien
agagttccactactctcctgactag

SEQ ID NO: 26459 - DNA, 25 bp, Homo sapien
cgaggtatttacaggtgtctcagaa

SEQ ID NO: 26460 - DNA, 25 bp, Homo sapien
cgaggtatttactggtgtctcagaa

SEQ ID NO: 26461 - DNA, 25 bp, Homo sapien
gtaaataatcggttacgtgacatct

SEQ ID NO: 26462 - DNA, 25 bp, Homo sapien
gtaaataatcggatacgtgacatct

SEQ ID NO: 26463 - DNA, 25 bp, Homo sapien
tccaaagtaacgtatcagggacttt

SEQ ID NO: 26464 - DNA, 25 bp, Homo sapien
tccaaagtaacgaatcagggacttt

SEQ ID NO: 26465 - DNA, 25 bp, Homo sapien
agaatgtacacactacaaagtctca

SEQ ID NO: 26466 - DNA, 25 bp, Homo sapien
agaatgtacacagtacaaagtctca

SEQ ID NO: 26467 - DNA, 25 bp, Homo sapien
gagaattctctagtataactgtcca

SEQ ID NO: 26468 - DNA, 25 bp, Homo sapien
gagaattctctactataactgtcca

SEQ ID NO: 26469 - DNA, 25 bp, Homo sapien
ggacacttagtcgagactcactgtc

SEQ ID NO: 26470 - DNA, 25 bp, Homo sapien
ggacacttagtccagactcactgtc

SEQ ID NO: 26471 - DNA, 25 bp, Homo sapien
gtccaatagtactagtcgagggtct

SEQ ID NO: 26472 - DNA, 25 bp, Homo sapien
gtccaatagtacaagtcgagggtct

SEQ ID NO: 26473 - DNA, 25 bp, Homo sapien
ctggacgacccgaacacatggggtc

SEQ ID NO: 26474 - DNA, 25 bp, Homo sapien
ctggacgacccgtacacatggggtc

SEQ ID NO: 26475 - DNA, 25 bp, Homo sapien
tctggactcctgacatctggggtgt

SEQ ID NO: 26476 - DNA, 25 bp, Homo sapien
tctggactcctgtcatctggggtgt

SEQ ID NO: 26477 - DNA, 25 bp, Homo sapien
gagacaccttttatgtgagtcgtct

SEQ ID NO: 26478 - DNA, 25 bp, Homo sapien
gagacaccttttttgtgagtcgtct

SEQ ID NO: 26479 - DNA, 25 bp, Homo sapien
ggtaaactttgtttcttctaagtct

SEQ ID NO: 26480 - DNA, 25 bp, Homo sapien
ggtaaactttgtatcttctaagtct

SEQ ID NO: 26481 - DNA, 25 bp, Homo sapien
gacgttgtcgtcttttactaatact

SEQ ID NO: 26482 - DNA, 25 bp, Homo sapien
gacgttgtcgtcatttactaatact

SEQ ID NO: 26483 - DNA, 25 bp, Homo sapien
ccaactcttgtcgtttaacgacgaa

SEQ ID NO: 26484 - DNA, 25 bp, Homo sapien
ccaactcttgtcctttaacgacgaa

SEQ ID NO: 26485 - DNA, 25 bp, Homo sapien
gaccgagagccaacttccacagcaa

SEQ ID NO: 26486 - DNA, 25 bp, Homo sapien
gaccgagagccatcttccacagcaa

SEQ ID NO: 26487 - DNA, 25 bp, Homo sapien
gtccatgtggttagtctgcatctaa

SEQ ID NO: 26488 - DNA, 25 bp, Homo sapien
gtccatgtggtttgtctgcatctaa

SEQ ID NO: 26489 - DNA, 25 bp, Homo sapien
caaactgaccgttggtaaagtataa

SEQ ID NO: 26490 - DNA, 25 bp, Homo sapien
caaactgaccgtaggtaaagtataa

SEQ ID NO: 26491 - DNA, 25 bp, Homo sapien
gcttttcgttacaaggtacaattaa

SEQ ID NO: 26492 - DNA, 25 bp, Homo sapien
gcttttcgttactaggtacaattaa

SEQ ID NO: 26493 - DNA, 25 bp, Homo sapien
aattaatcggctagagtcaaattac

SEQ ID NO: 26494 - DNA, 25 bp, Homo sapien
aattaatcggcttgagtcaaattac

SEQ ID NO: 26495 - DNA, 25 bp, Homo sapien
ttaaccgtaccgtgaatttctgacg

SEQ ID NO: 26496 - DNA, 25 bp, Homo sapien
ttaaccgtaccgagaatttctgacg

SEQ ID NO: 26497 - DNA, 25 bp, Homo sapien
agtaaactcacgtcgtgaaatcaag

SEQ ID NO: 26498 - DNA, 25 bp, Homo sapien
agtaaactcacgacgtgaaatcaag

SEQ ID NO: 26499 - DNA, 25 bp, Homo sapien
aaggtctctgttacggaacattatt

SEQ ID NO: 26500 - DNA, 25 bp, Homo sapien
aaggtctctgtttcggaacattatt

SEQ ID NO: 26501 - DNA, 25 bp, Homo sapien
agtgagctcagtgtcaaaagttaca

SEQ ID NO: 26502 - DNA, 25 bp, Homo sapien
agtgagctcagtctcaaaagttaca

SEQ ID NO: 26503 - DNA, 25 bp, Homo sapien
aggagtctcgggtcaaactacgtcc

SEQ ID NO: 26504 - DNA, 25 bp, Homo sapien
aggagtctcgggacaaactacgtcc

SEQ ID NO: 26505 - DNA, 25 bp, Homo sapien
cgtctgtcctataaaagacccccgt

SEQ ID NO: 26506 - DNA, 25 bp, Homo sapien
cgtctgtcctattaaagacccccgt

SEQ ID NO: 26507 - DNA, 25 bp, Homo sapien
gacggcctcgacaggaacctcggac

SEQ ID NO: 26508 - DNA, 25 bp, Homo sapien
gacggcctcgactggaacctcggac

SEQ ID NO: 26509 - DNA, 25 bp, Homo sapien
tgacaggtccgctgggtctgtgcct

SEQ ID NO: 26510 - DNA, 25 bp, Homo sapien
tgacaggtccgcagggtctgtgcct

SEQ ID NO: 26511 - DNA, 25 bp, Homo sapien
gactcaagcagagactactgttcat

SEQ ID NO: 26512 - DNA, 25 bp, Homo sapien
gactcaagcagacactactgttcat

SEQ ID NO: 26513 - DNA, 25 bp, Homo sapien
gacatctaccgaaagacccggtggg

SEQ ID NO: 26514 - DNA, 25 bp, Homo sapien
gacatctaccgatagacccggtggg

SEQ ID NO: 26515 - DNA, 25 bp, Homo sapien
cacggctcactcgagtccgcagaag

SEQ ID NO: 26516 - DNA, 25 bp, Homo sapien
cacggctcactccagtccgcagaag

SEQ ID NO: 26517 - DNA, 25 bp, Homo sapien
ggcggatcttcgtaaacgccacctg

SEQ ID NO: 26518 - DNA, 25 bp, Homo sapien
ggcggatcttcgaaaacgccacctg

SEQ ID NO: 26519 - DNA, 25 bp, Homo sapien
tgagaatgtgcggcgagccacctct

SEQ ID NO: 26520 - DNA, 25 bp, Homo sapien
tgagaatgtgcgccgagccacctct

SEQ ID NO: 26521 - DNA, 25 bp, Homo sapien
aggagtttgtcgagcgtaccccctt

SEQ ID NO: 26522 - DNA, 25 bp, Homo sapien
aggagtttgtcgtgcgtaccccctt

SEQ ID NO: 26523 - DNA, 25 bp, Homo sapien
acaaaaaggggagtctccttcctac

SEQ ID NO: 26524 - DNA, 25 bp, Homo sapien
acaaaaaggggactctccttcctac

SEQ ID NO: 26525 - DNA, 25 bp, Homo sapien
ataaagtagatgagtcacttcttac

SEQ ID NO: 26526 - DNA, 25 bp, Homo sapien
ataaagtagatgtgtcacttcttac

SEQ ID NO: 26527 - DNA, 25 bp, Homo sapien
agtaaagaggcctacggtttcctag

SEQ ID NO: 26528 - DNA, 25 bp, Homo sapien
agtaaagaggccaacggtttcctag

SEQ ID NO: 26529 - DNA, 25 bp, Homo sapien
cgaggacggccctacgggttcagtc

SEQ ID NO: 26530 - DNA, 25 bp, Homo sapien
cgaggacggcccaacgggttcagtc

SEQ ID NO: 26531 - DNA, 25 bp, Homo sapien
ggcacgttacggagtgaaggtttcc

SEQ ID NO: 26532 - DNA, 25 bp, Homo sapien
ggcacgttacggtgtgaaggtttcc

SEQ ID NO: 26533 - DNA, 25 bp, Homo sapien
tcgcggttggacaaaaggtcctccg

SEQ ID NO: 26534 - DNA, 25 bp, Homo sapien
tcgcggttggactaaaggtcctccg

SEQ ID NO: 26535 - DNA, 25 bp, Homo sapien
cctattacgacttacactgttttgg

SEQ ID NO: 26536 - DNA, 25 bp, Homo sapien
cctattacgactaacactgttttgg

SEQ ID NO: 26537 - DNA, 25 bp, Homo sapien
tgatagagtcacactgagttctggt

SEQ ID NO: 26538 - DNA, 25 bp, Homo sapien
tgatagagtcactctgagttctggt

SEQ ID NO: 26539 - DNA, 25 bp, Homo sapien
tttacgacgttttaccgtgtgttgt

SEQ ID NO: 26540 - DNA, 25 bp, Homo sapien
tttacgacgtttaaccgtgtgttgt

SEQ ID NO: 26541 - DNA, 25 bp, Homo sapien
gtcgttgaagtgactcgggtcgtcg

SEQ ID NO: 26542 - DNA, 25 bp, Homo sapien
gtcgttgaagtgtctcgggtcgtcg

SEQ ID NO: 26543 - DNA, 25 bp, Homo sapien
cagtcttgaccttttaggaggtcgt

SEQ ID NO: 26544 - DNA, 25 bp, Homo sapien
cagtcttgacctattaggaggtcgt

SEQ ID NO: 26545 - DNA, 25 bp, Homo sapien
ctaccgtttccctgtgtatggtgtc

SEQ ID NO: 26546 - DNA, 25 bp, Homo sapien
ctaccgtttcccagtgtatggtgtc

SEQ ID NO: 26547 - DNA, 25 bp, Homo sapien
agtgtcatcgctatgtaagtgtcct

SEQ ID NO: 26548 - DNA, 25 bp, Homo sapien
agtgtcatcgctttgtaagtgtcct

SEQ ID NO: 26549 - DNA, 25 bp, Homo sapien
gaatgtcaccgagtttcgacttaca

SEQ ID NO: 26550 - DNA, 25 bp, Homo sapien
gaatgtcaccgactttcgacttaca

SEQ ID NO: 26551 - DNA, 25 bp, Homo sapien
cctaggtaaagtcttctcagtaaat

SEQ ID NO: 26552 - DNA, 25 bp, Homo sapien
cctaggtaaagtgttctcagtaaat

SEQ ID NO: 26553 - DNA, 25 bp, Homo sapien
accgagtcagtgtttctttgtggtg

SEQ ID NO: 26554 - DNA, 25 bp, Homo sapien
accgagtcagtgattctttgtggtg

SEQ ID NO: 26555 - DNA, 25 bp, Homo sapien
tcccgagacccgacttttagtggtc

SEQ ID NO: 26556 - DNA, 25 bp, Homo sapien
tcccgagacccgtcttttagtggtc

SEQ ID NO: 26557 - DNA, 25 bp, Homo sapien
cgacaggcgtttctcgcgtgttact

SEQ ID NO: 26558 - DNA, 25 bp, Homo sapien
cgacaggcgtttgtcgcgtgttact

SEQ ID NO: 26559 - DNA, 25 bp, Homo sapien
ggtgtattcatcttaccaaggatat

SEQ ID NO: 26560 - DNA, 25 bp, Homo sapien
ggtgtattcatcataccaaggatat

SEQ ID NO: 26561 - DNA, 25 bp, Homo sapien
aaggtattccaaactcctggtcaac

SEQ ID NO: 26562 - DNA, 25 bp, Homo sapien
aaggtattccaatctcctggtcaac

SEQ ID NO: 26563 - DNA, 25 bp, Homo sapien
gtcgattccttgttacctttctcga

SEQ ID NO: 26564 - DNA, 25 bp, Homo sapien
gtcgattccttgatacctttctcga

SEQ ID NO: 26565 - DNA, 25 bp, Homo sapien
ctttgtcccttttcatgtacacgga

SEQ ID NO: 26566 - DNA, 25 bp, Homo sapien
ctttgtccctttacatgtacacgga

SEQ ID NO: 26567 - DNA, 25 bp, Homo sapien
tccgatgtcttcagagtgtcactcc

SEQ ID NO: 26568 - DNA, 25 bp, Homo sapien
tccgatgtcttctgagtgtcactcc

SEQ ID NO: 26569 - DNA, 25 bp, Homo sapien
cctaagtatttaagtcgtagtcata

SEQ ID NO: 26570 - DNA, 25 bp, Homo sapien
cctaagtatttatgtcgtagtcata

SEQ ID NO: 26571 - DNA, 25 bp, Homo sapien
tgtctatagactttcgtgttccacg

SEQ ID NO: 26572 - DNA, 25 bp, Homo sapien
tgtctatagactatcgtgttccacg

SEQ ID NO: 26573 - DNA, 25 bp, Homo sapien
tagacagtattagtagtatcgcact

SEQ ID NO: 26574 - DNA, 25 bp, Homo sapien
tagacagtattactagtatcgcact

SEQ ID NO: 26575 - DNA, 25 bp, Homo sapien
cagtgactaatttgagtactacata

SEQ ID NO: 26576 - DNA, 25 bp, Homo sapien
cagtgactaattagagtactacata

SEQ ID NO: 26577 - DNA, 25 bp, Homo sapien
aaagtagtcatttgagaggatccct

SEQ ID NO: 26578 - DNA, 25 bp, Homo sapien
aaagtagtcattagagaggatccct

SEQ ID NO: 26579 - DNA, 25 bp, Homo sapien
gtagaaacaaatgaaagagccccac

SEQ ID NO: 26580 - DNA, 25 bp, Homo sapien
gtagaaacaaatcaaagagccccac

SEQ ID NO: 26581 - DNA, 25 bp, Homo sapien
actaaggaaaaagatcttagtctct

SEQ ID NO: 26582 - DNA, 25 bp, Homo sapien
actaaggaaaaacatcttagtctct

SEQ ID NO: 26583 - DNA, 25 bp, Homo sapien
acgaaaaaggactcatcttacgttt

SEQ ID NO: 26584 - DNA, 25 bp, Homo sapien
acgaaaaaggacacatcttacgttt

SEQ ID NO: 26585 - DNA, 25 bp, Homo sapien
aatcgagaagactacagcctacatc

SEQ ID NO: 26586 - DNA, 25 bp, Homo sapien
aatcgagaagacaacagcctacatc

SEQ ID NO: 26587 - DNA, 25 bp, Homo sapien
gactgtaaaactcgacacagagatc

SEQ ID NO: 26588 - DNA, 25 bp, Homo sapien
gactgtaaaactggacacagagatc

SEQ ID NO: 26589 - DNA, 25 bp, Homo sapien
gactccggacctactagtcagagaa

SEQ ID NO: 26590 - DNA, 25 bp, Homo sapien
gactccggaccttctagtcagagaa

SEQ ID NO: 26591 - DNA, 25 bp, Homo sapien
tacaacagttgctacggcgggaagt

SEQ ID NO: 26592 - DNA, 25 bp, Homo sapien
tacaacagttgcaacggcgggaagt

SEQ ID NO: 26593 - DNA, 25 bp, Homo sapien
tccaccgtagtgaccgaacaactca

SEQ ID NO: 26594 - DNA, 25 bp, Homo sapien
tccaccgtagtgtccgaacaactca

SEQ ID NO: 26595 - DNA, 25 bp, Homo sapien
cgtcccgacgggtaggataccccta

SEQ ID NO: 26596 - DNA, 25 bp, Homo sapien
cgtcccgacgggaaggataccccta

SEQ ID NO: 26597 - DNA, 25 bp, Homo sapien
cgacccgacctcaacacaaaaggtt

SEQ ID NO: 26598 - DNA, 25 bp, Homo sapien
cgacccgacctctacacaaaaggtt

SEQ ID NO: 26599 - DNA, 25 bp, Homo sapien
cgactcctcctcgaagggaccgggt

SEQ ID NO: 26600 - DNA, 25 bp, Homo sapien
cgactcctcctccaagggaccgggt

SEQ ID NO: 26601 - DNA, 25 bp, Homo sapien
gtgaactcccatgaacaaaacattg

SEQ ID NO: 26602 - DNA, 25 bp, Homo sapien
gtgaactcccatcaacaaaacattg

SEQ ID NO: 26603 - DNA, 25 bp, Homo sapien
ctactccctctaaaccacggatttt

SEQ ID NO: 26604 - DNA, 25 bp, Homo sapien
ctactccctctataccacggatttt

SEQ ID NO: 26605 - DNA, 25 bp, Homo sapien
tccccaacgactccagtgacgattt

SEQ ID NO: 26606 - DNA, 25 bp, Homo sapien
tccccaacgactgcagtgacgattt

SEQ ID NO: 26607 - DNA, 25 bp, Homo sapien
gagtccggcggacgtagacgcacct

SEQ ID NO: 26608 - DNA, 25 bp, Homo sapien
gagtccggcggaggtagacgcacct

SEQ ID NO: 26609 - DNA, 25 bp, Homo sapien
gacgtcccggagaagacgactctat

SEQ ID NO: 26610 - DNA, 25 bp, Homo sapien
gacgtcccggagtagacgactctat

SEQ ID NO: 26611 - DNA, 25 bp, Homo sapien
ttccactaccgaccttagtacactc

SEQ ID NO: 26612 - DNA, 25 bp, Homo sapien
ttccactaccgagcttagtacactc

SEQ ID NO: 26613 - DNA, 25 bp, Homo sapien
tgcactttgtcattcccttgtcttc

SEQ ID NO: 26614 - DNA, 25 bp, Homo sapien
tgcactttgtcaatcccttgtcttc

SEQ ID NO: 26615 - DNA, 25 bp, Homo sapien
gtcatgtcttgagtccctaagtttg

SEQ ID NO: 26616 - DNA, 25 bp, Homo sapien
gtcatgtcttgactccctaagtttg

SEQ ID NO: 26617 - DNA, 25 bp, Homo sapien
gtccaggtcaggaggtcaaaatatt

SEQ ID NO: 26618 - DNA, 25 bp, Homo sapien
gtccaggtcaggtggtcaaaatatt

SEQ ID NO: 26619 - DNA, 25 bp, Homo sapien
gactacaagtgtgtcaagtgcaagt

SEQ ID NO: 26620 - DNA, 25 bp, Homo sapien
gactacaagtgtctcaagtgcaagt

SEQ ID NO: 26621 - DNA, 25 bp, Homo sapien
ctgacacggtgtctattgtaccagg

SEQ ID NO: 26622 - DNA, 25 bp, Homo sapien
ctgacacggtgtgtattgtaccagg

SEQ ID NO: 26623 - DNA, 25 bp, Homo sapien
ggttttgtcgatttatacgtccagg

SEQ ID NO: 26624 - DNA, 25 bp, Homo sapien
ggttttgtcgatatatacgtccagg

SEQ ID NO: 26625 - DNA, 25 bp, Homo sapien
atattaacatacaacacgccgagag

SEQ ID NO: 26626 - DNA, 25 bp, Homo sapien
atattaacatactacacgccgagag

SEQ ID NO: 26627 - DNA, 25 bp, Homo sapien
ggactacttaactcttactacggac

SEQ ID NO: 26628 - DNA, 25 bp, Homo sapien
ggactacttaacacttactacggac

SEQ ID NO: 26629 - DNA, 25 bp, Homo sapien
gaataattgtctgacttacttaccg

SEQ ID NO: 26630 - DNA, 25 bp, Homo sapien
gaataattgtctcacttacttaccg

SEQ ID NO: 26631 - DNA, 25 bp, Homo sapien
catgtcgtatacatactctgtgtaa

SEQ ID NO: 26632 - DNA, 25 bp, Homo sapien
catgtcgtatacttactctgtgtaa

SEQ ID NO: 26633 - DNA, 25 bp, Homo sapien
ctattcagatggattaccttatgat

SEQ ID NO: 26634 - DNA, 25 bp, Homo sapien
ctattcagatggtttaccttatgat

SEQ ID NO: 26635 - DNA, 25 bp, Homo sapien
cgtttcaccaagtctaccctcggtt

SEQ ID NO: 26636 - DNA, 25 bp, Homo sapien
cgtttcaccaagactaccctcggtt

SEQ ID NO: 26637 - DNA, 25 bp, Homo sapien
tgtttaaactaaactcgtccaaggt

SEQ ID NO: 26638 - DNA, 25 bp, Homo sapien
tgtttaaactaatctcgtccaaggt

SEQ ID NO: 26639 - DNA, 25 bp, Homo sapien
actcgcagggctcgcttccctagat

SEQ ID NO: 26640 - DNA, 25 bp, Homo sapien
actcgcagggctggcttccctagat

SEQ ID NO: 26641 - DNA, 25 bp, Homo sapien
aatccgaacttgacgacccacggat

SEQ ID NO: 26642 - DNA, 25 bp, Homo sapien
aatccgaacttgtcgacccacggat

SEQ ID NO: 26643 - DNA, 25 bp, Homo sapien
ccagtttctcgccacgaccgaggat

SEQ ID NO: 26644 - DNA, 25 bp, Homo sapien
ccagtttctcgcgacgaccgaggat

SEQ ID NO: 26645 - DNA, 25 bp, Homo sapien
gaccatcctgtcgtcggcgtgcgga

SEQ ID NO: 26646 - DNA, 25 bp, Homo sapien
gaccatcctgtcctcggcgtgcgga

SEQ ID NO: 26647 - DNA, 25 bp, Homo sapien
ggttcacacttttccgatgggccac

SEQ ID NO: 26648 - DNA, 25 bp, Homo sapien
ggttcacactttaccgatgggccac

SEQ ID NO: 26649 - DNA, 25 bp, Homo sapien
cctcttagaagtaggtcactactcg

SEQ ID NO: 26650 - DNA, 25 bp, Homo sapien
cctcttagaagttggtcactactcg

SEQ ID NO: 26651 - DNA, 25 bp, Homo sapien
gacctgacgaacttaaaatctacgt

SEQ ID NO: 26652 - DNA, 25 bp, Homo sapien
gacctgacgaacataaaatctacgt

SEQ ID NO: 26653 - DNA, 25 bp, Homo sapien
tagagaatttcaggtctggtctacg

SEQ ID NO: 26654 - DNA, 25 bp, Homo sapien
tagagaatttcacgtctggtctacg

SEQ ID NO: 26655 - DNA, 25 bp, Homo sapien
agtcggacttgtgtgtgtgtgtctc

SEQ ID NO: 26656 - DNA, 25 bp, Homo sapien
agtcggacttgtctgtgtgtgtctc

SEQ ID NO: 26657 - DNA, 25 bp, Homo sapien
tgtagaccgtgtctatgtgtctctc

SEQ ID NO: 26658 - DNA, 25 bp, Homo sapien
tgtagaccgtgtgtatgtgtctctc

SEQ ID NO: 26659 - DNA, 25 bp, Homo sapien
tatttagtgacgtaattcctgttac

SEQ ID NO: 26660 - DNA, 25 bp, Homo sapien
tatttagtgacgaaattcctgttac

SEQ ID NO: 26661 - DNA, 25 bp, Homo sapien
ctttccgcgtgcattctccaaccgt

SEQ ID NO: 26662 - DNA, 25 bp, Homo sapien
ctttccgcgtgctttctccaaccgt

SEQ ID NO: 26663 - DNA, 25 bp, Homo sapien
ccagcgcgcctagtactacggttgg

SEQ ID NO: 26664 - DNA, 25 bp, Homo sapien
ccagcgcgcctactactacggttgg

SEQ ID NO: 26665 - DNA, 25 bp, Homo sapien
tagaacagagacgaaataattcccc

SEQ ID NO: 26666 - DNA, 25 bp, Homo sapien
tagaacagagaccaaataattcccc

SEQ ID NO: 26667 - DNA, 25 bp, Homo sapien
aggaacgggagaaagaacacccgtc

SEQ ID NO: 26668 - DNA, 25 bp, Homo sapien
aggaacgggagatagaacacccgtc

SEQ ID NO: 26669 - DNA, 25 bp, Homo sapien
accgttagaagagacgtaaccagtc

SEQ ID NO: 26670 - DNA, 25 bp, Homo sapien
accgttagaagacacgtaaccagtc

SEQ ID NO: 26671 - DNA, 25 bp, Homo sapien
atgagtttactctttagtctaccga

SEQ ID NO: 26672 - DNA, 25 bp, Homo sapien
atgagtttactcattagtctaccga

SEQ ID NO: 26673 - DNA, 25 bp, Homo sapien
aacatagttgtttgacgtaccctat

SEQ ID NO: 26674 - DNA, 25 bp, Homo sapien
aacatagttgttagacgtaccctat

SEQ ID NO: 26675 - DNA, 25 bp, Homo sapien
ggacatgggtgtagagtcgaccctt

SEQ ID NO: 26676 - DNA, 25 bp, Homo sapien
ggacatgggtgttgagtcgaccctt

SEQ ID NO: 26677 - DNA, 25 bp, Homo sapien
agttgtgggtcgtagtcgacacttg

SEQ ID NO: 26678 - DNA, 25 bp, Homo sapien
agttgtgggtcgaagtcgacacttg

SEQ ID NO: 26679 - DNA, 25 bp, Homo sapien
ctttttgtaaacatgacacgtaaag

SEQ ID NO: 26680 - DNA, 25 bp, Homo sapien
ctttttgtaaacttgacacgtaaag

SEQ ID NO: 26681 - DNA, 25 bp, Homo sapien
gtagttctatacctctgttgtctaa

SEQ ID NO: 26682 - DNA, 25 bp, Homo sapien
gtagttctatacgtctgttgtctaa

SEQ ID NO: 26683 - DNA, 25 bp, Homo sapien
ccagtgatcagtgatccgtttcttt

SEQ ID NO: 26684 - DNA, 25 bp, Homo sapien
ccagtgatcagtcatccgtttcttt

SEQ ID NO: 26685 - DNA, 25 bp, Homo sapien
aggggtacagtctccgaggtatctt

SEQ ID NO: 26686 - DNA, 25 bp, Homo sapien
aggggtacagtcaccgaggtatctt

SEQ ID NO: 26687 - DNA, 25 bp, Homo sapien
tctgctcgtgggaccgaggtcctcg

SEQ ID NO: 26688 - DNA, 25 bp, Homo sapien
tctgctcgtgggtccgaggtcctcg

SEQ ID NO: 26689 - DNA, 25 bp, Homo sapien
ggtacttagggtcaccgaggttcct

SEQ ID NO: 26690 - DNA, 25 bp, Homo sapien
ggtacttagggtgaccgaggttcct

SEQ ID NO: 26691 - DNA, 25 bp, Homo sapien
cataccattcgtgatcagtgtgcat

SEQ ID NO: 26692 - DNA, 25 bp, Homo sapien
cataccattcgtcatcagtgtgcat

SEQ ID NO: 26693 - DNA, 25 bp, Homo sapien
tcgtttatcgtcacgtatgatataa

SEQ ID NO: 26694 - DNA, 25 bp, Homo sapien
tcgtttatcgtctcgtatgatataa

SEQ ID NO: 26695 - DNA, 25 bp, Homo sapien
agtatatcgtgtcgtcgaaacaaac

SEQ ID NO: 26696 - DNA, 25 bp, Homo sapien
agtatatcgtgtggtcgaaacaaac

SEQ ID NO: 26697 - DNA, 25 bp, Homo sapien
ggttttatgttagcacaacatactt

SEQ ID NO: 26698 - DNA, 25 bp, Homo sapien
ggttttatgttaccacaacatactt

SEQ ID NO: 26699 - DNA, 25 bp, Homo sapien
ggttctgtttcaatacaccctatgt

SEQ ID NO: 26700 - DNA, 25 bp, Homo sapien
ggttctgtttcattacaccctatgt

SEQ ID NO: 26701 - DNA, 25 bp, Homo sapien
ggagtatcacatattacttttatcg

SEQ ID NO: 26702 - DNA, 25 bp, Homo sapien
ggagtatcacattttacttttatcg

SEQ ID NO: 26703 - DNA, 25 bp, Homo sapien
tgagaactggtgtctatattctatc

SEQ ID NO: 26704 - DNA, 25 bp, Homo sapien
tgagaactggtgactatattctatc

SEQ ID NO: 26705 - DNA, 25 bp, Homo sapien
aaaagaagtgagtacacactaagtc

SEQ ID NO: 26706 - DNA, 25 bp, Homo sapien
aaaagaagtgagaacacactaagtc

SEQ ID NO: 26707 - DNA, 25 bp, Homo sapien
agatgatcgaaaagttaaacctttc

SEQ ID NO: 26708 - DNA, 25 bp, Homo sapien
agatgatcgaaatgttaaacctttc

SEQ ID NO: 26709 - DNA, 25 bp, Homo sapien
cgaaggagaaaggtgtctttttctc

SEQ ID NO: 26710 - DNA, 25 bp, Homo sapien
cgaaggagaaagctgtctttttctc

SEQ ID NO: 26711 - DNA, 25 bp, Homo sapien
gacatacatccgtctagtatatccg

SEQ ID NO: 26712 - DNA, 25 bp, Homo sapien
gacatacatccgactagtatatccg

SEQ ID NO: 26713 - DNA, 25 bp, Homo sapien
ggacggagatcacacgtcgtcccga

SEQ ID NO: 26714 - DNA, 25 bp, Homo sapien
ggacggagatcagacgtcgtcccga

SEQ ID NO: 26715 - DNA, 25 bp, Homo sapien
ggtaagactcctgtctcgacgacta

SEQ ID NO: 26716 - DNA, 25 bp, Homo sapien
ggtaagactcctctctcgacgacta

SEQ ID NO: 26717 - DNA, 25 bp, Homo sapien
ggtgtatcgcattcccgtccgagtc

SEQ ID NO: 26718 - DNA, 25 bp, Homo sapien
ggtgtatcgcatacccgtccgagtc

SEQ ID NO: 26719 - DNA, 25 bp, Homo sapien
tgtggatcctatactcaccgacccg

SEQ ID NO: 26720 - DNA, 25 bp, Homo sapien
tgtggatcctattctcaccgacccg

SEQ ID NO: 26721 - DNA, 25 bp, Homo sapien
tgtccttctggatcccgacgaccgt

SEQ ID NO: 26722 - DNA, 25 bp, Homo sapien
tgtccttctggaacccgacgaccgt

SEQ ID NO: 26723 - DNA, 25 bp, Homo sapien
tcggtctttccgtatctatctgggt

SEQ ID NO: 26724 - DNA, 25 bp, Homo sapien
tcggtctttccgaatctatctgggt

SEQ ID NO: 26725 - DNA, 25 bp, Homo sapien
gttacatttcccaatacactctggg

SEQ ID NO: 26726 - DNA, 25 bp, Homo sapien
gttacatttccctatacactctggg

SEQ ID NO: 26727 - DNA, 25 bp, Homo sapien
aacgtgacctgttagaatgtctgtg

SEQ ID NO: 26728 - DNA, 25 bp, Homo sapien
aacgtgacctgtaagaatgtctgtg

SEQ ID NO: 26729 - DNA, 25 bp, Homo sapien
aaaacgtgtccgaactgttcagact

SEQ ID NO: 26730 - DNA, 25 bp, Homo sapien
aaaacgtgtccgtactgttcagact

SEQ ID NO: 26731 - DNA, 25 bp, Homo sapien
catgcgacgacgagcggtccggact

SEQ ID NO: 26732 - DNA, 25 bp, Homo sapien
catgcgacgacgtgcggtccggact

SEQ ID NO: 26733 - DNA, 25 bp, Homo sapien
actataagatggaggacacacgaac

SEQ ID NO: 26734 - DNA, 25 bp, Homo sapien
actataagatggtggacacacgaac

SEQ ID NO: 26735 - DNA, 25 bp, Homo sapien
gtttactctgtctcgcgaaagacct

SEQ ID NO: 26736 - DNA, 25 bp, Homo sapien
gtttactctgtcacgcgaaagacct

SEQ ID NO: 26737 - DNA, 25 bp, Homo sapien
ccctgtgtaggtgtcggacagcaga

SEQ ID NO: 26738 - DNA, 25 bp, Homo sapien
ccctgtgtaggtctcggacagcaga

SEQ ID NO: 26739 - DNA, 25 bp, Homo sapien
tctgaggtgtcgtcacgggtagacc

SEQ ID NO: 26740 - DNA, 25 bp, Homo sapien
tctgaggtgtcgacacgggtagacc

SEQ ID NO: 26741 - DNA, 25 bp, Homo sapien
gtctctcggtggaccgggaactact

SEQ ID NO: 26742 - DNA, 25 bp, Homo sapien
gtctctcggtggtccgggaactact

SEQ ID NO: 26743 - DNA, 25 bp, Homo sapien
ttttgtgggtcgtccatggtacgat

SEQ ID NO: 26744 - DNA, 25 bp, Homo sapien
ttttgtgggtcgaccatggtacgat

SEQ ID NO: 26745 - DNA, 25 bp, Homo sapien
tttttatgtgacaccgattgtaact

SEQ ID NO: 26746 - DNA, 25 bp, Homo sapien
tttttatgtgactccgattgtaact

SEQ ID NO: 26747 - DNA, 25 bp, Homo sapien
tttacctgactcctgttctcgagta

SEQ ID NO: 26748 - DNA, 25 bp, Homo sapien
tttacctgactcgtgttctcgagta

SEQ ID NO: 26749 - DNA, 25 bp, Homo sapien
ttcttcagactcgtacgtccacgaa

SEQ ID NO: 26750 - DNA, 25 bp, Homo sapien
ttcttcagactcctacgtccacgaa

SEQ ID NO: 26751 - DNA, 25 bp, Homo sapien
ggaccaagacgactcgaaccacgag

SEQ ID NO: 26752 - DNA, 25 bp, Homo sapien
ggaccaagacgagtcgaaccacgag

SEQ ID NO: 26753 - DNA, 25 bp, Homo sapien
cagttgaagagaggtgaacacacga

SEQ ID NO: 26754 - DNA, 25 bp, Homo sapien
cagttgaagagacgtgaacacacga

SEQ ID NO: 26755 - DNA, 25 bp, Homo sapien
ttcgtctccgaatcggtcctctaca

SEQ ID NO: 26756 - DNA, 25 bp, Homo sapien
ttcgtctccgaaacggtcctctaca

SEQ ID NO: 26757 - DNA, 25 bp, Homo sapien
caggacgtggcacagaccgtcaccg

SEQ ID NO: 26758 - DNA, 25 bp, Homo sapien
caggacgtggcagagaccgtcaccg

SEQ ID NO: 26759 - DNA, 25 bp, Homo sapien
ccgaaggagacagactcgagcctcg

SEQ ID NO: 26760 - DNA, 25 bp, Homo sapien
ccgaaggagacacactcgagcctcg

SEQ ID NO: 26761 - DNA, 25 bp, Homo sapien
cctcgtagggtctcagtcaggacac

SEQ ID NO: 26762 - DNA, 25 bp, Homo sapien
cctcgtagggtcacagtcaggacac

SEQ ID NO: 26763 - DNA, 25 bp, Homo sapien
taccgttaggttcgacccggtccct

SEQ ID NO: 26764 - DNA, 25 bp, Homo sapien
taccgttaggttggacccggtccct

SEQ ID NO: 26765 - DNA, 25 bp, Homo sapien
tacgttccgttacaaccgactgtcc

SEQ ID NO: 26766 - DNA, 25 bp, Homo sapien
tacgttccgttagaaccgactgtcc

SEQ ID NO: 26767 - DNA, 25 bp, Homo sapien
tataccgtacgagaaacggttacct

SEQ ID NO: 26768 - DNA, 25 bp, Homo sapien
tataccgtacgacaaacggttacct

SEQ ID NO: 26769 - DNA, 25 bp, Homo sapien
tcgaggacgacgttaaactcttcct

SEQ ID NO: 26770 - DNA, 25 bp, Homo sapien
tcgaggacgacgataaactcttcct

SEQ ID NO: 26771 - DNA, 25 bp, Homo sapien
cattaagtagggtgaaccttacact

SEQ ID NO: 26772 - DNA, 25 bp, Homo sapien
cattaagtagggagaaccttacact

SEQ ID NO: 26773 - DNA, 25 bp, Homo sapien
tcattagaacggacccatccgacac

SEQ ID NO: 26774 - DNA, 25 bp, Homo sapien
tcattagaacggtcccatccgacac

SEQ ID NO: 26775 - DNA, 25 bp, Homo sapien
tacaaaagacgtttcccggtccaac

SEQ ID NO: 26776 - DNA, 25 bp, Homo sapien
tacaaaagacgtatcccggtccaac

SEQ ID NO: 26777 - DNA, 25 bp, Homo sapien
aaagagagagggaccccgcgacgct

SEQ ID NO: 26778 - DNA, 25 bp, Homo sapien
aaagagagagggtccccgcgacgct

SEQ ID NO: 26779 - DNA, 25 bp, Homo sapien
aaagtggacgagtaagtccattaca

SEQ ID NO: 26780 - DNA, 25 bp, Homo sapien
aaagtggacgagaaagtccattaca

SEQ ID NO: 26781 - DNA, 25 bp, Homo sapien
tcgagggtactaagagacgattcga

SEQ ID NO: 26782 - DNA, 25 bp, Homo sapien
tcgagggtactatgagacgattcga

SEQ ID NO: 26783 - DNA, 25 bp, Homo sapien
aagtgtgtctacttagagtcatctc

SEQ ID NO: 26784 - DNA, 25 bp, Homo sapien
aagtgtgtctacatagagtcatctc

SEQ ID NO: 26785 - DNA, 25 bp, Homo sapien
cacagtatgttataggtcgtgtcta

SEQ ID NO: 26786 - DNA, 25 bp, Homo sapien
cacagtatgttaaaggtcgtgtcta

SEQ ID NO: 26787 - DNA, 25 bp, Homo sapien
ggaacgacgtacaaaaagtctatca

SEQ ID NO: 26788 - DNA, 25 bp, Homo sapien
ggaacgacgtactaaaagtctatca

SEQ ID NO: 26789 - DNA, 25 bp, Homo sapien
ttaggagagcaacacgtatcagcga

SEQ ID NO: 26790 - DNA, 25 bp, Homo sapien
ttaggagagcaagacgtatcagcga

SEQ ID NO: 26791 - DNA, 25 bp, Homo sapien
cccgagacgtccacggagaaggtgc

SEQ ID NO: 26792 - DNA, 25 bp, Homo sapien
cccgagacgtcctcggagaaggtgc

SEQ ID NO: 26793 - DNA, 25 bp, Homo sapien
ctcgcgcgcttctgaaacggtgtcg

SEQ ID NO: 26794 - DNA, 25 bp, Homo sapien
ctcgcgcgcttcagaaacggtgtcg

SEQ ID NO: 26795 - DNA, 25 bp, Homo sapien
cgtgtcaactattatctcaacagtg

SEQ ID NO: 26796 - DNA, 25 bp, Homo sapien
cgtgtcaactataatctcaacagtg

SEQ ID NO: 26797 - DNA, 25 bp, Homo sapien
gggtaaacagacactactctacatt

SEQ ID NO: 26798 - DNA, 25 bp, Homo sapien
gggtaaacagactctactctacatt

SEQ ID NO: 26799 - DNA, 25 bp, Homo sapien
gtcgggaaggacttcgtctaaccac

SEQ ID NO: 26800 - DNA, 25 bp, Homo sapien
gtcgggaaggacatcgtctaaccac

SEQ ID NO: 26801 - DNA, 25 bp, Homo sapien
ttgggggacaccatggttccgtgtc

SEQ ID NO: 26802 - DNA, 25 bp, Homo sapien
ttgggggacaccttggttccgtgtc

SEQ ID NO: 26803 - DNA, 25 bp, Homo sapien
gggtagagcccctggttcgtctctg

SEQ ID NO: 26804 - DNA, 25 bp, Homo sapien
gggtagagccccaggttcgtctctg

SEQ ID NO: 26805 - DNA, 25 bp, Homo sapien
gttgaacttaccttacttccttcgg

SEQ ID NO: 26806 - DNA, 25 bp, Homo sapien
gttgaacttaccatacttccttcgg

SEQ ID NO: 26807 - DNA, 25 bp, Homo sapien
tgggtgtctcatctactcctttccc

SEQ ID NO: 26808 - DNA, 25 bp, Homo sapien
tgggtgtctcatgtactcctttccc

SEQ ID NO: 26809 - DNA, 25 bp, Homo sapien
ggtttatgacgtgtcctacctgtct

SEQ ID NO: 26810 - DNA, 25 bp, Homo sapien
ggtttatgacgtctcctacctgtct

SEQ ID NO: 26811 - DNA, 25 bp, Homo sapien
aatgtgtagtctccttttcgacggc

SEQ ID NO: 26812 - DNA, 25 bp, Homo sapien
aatgtgtagtctgcttttcgacggc

SEQ ID NO: 26813 - DNA, 25 bp, Homo sapien
caggtgcgtccgtttttcgcgtcct

SEQ ID NO: 26814 - DNA, 25 bp, Homo sapien
caggtgcgtccgattttcgcgtcct

SEQ ID NO: 26815 - DNA, 25 bp, Homo sapien
gtgttgtgtctcgttgatactctgt

SEQ ID NO: 26816 - DNA, 25 bp, Homo sapien
gtgttgtgtctccttgatactctgt

SEQ ID NO: 26817 - DNA, 25 bp, Homo sapien
acggtacccgtagtccgttgtttgg

SEQ ID NO: 26818 - DNA, 25 bp, Homo sapien
acggtacccgtactccgttgtttgg

SEQ ID NO: 26819 - DNA, 25 bp, Homo sapien
ataatcattactccagtaggttgaa

SEQ ID NO: 26820 - DNA, 25 bp, Homo sapien
ataatcattactgcagtaggttgaa

SEQ ID NO: 26821 - DNA, 25 bp, Homo sapien
acccgaacgactaccggtggtctga

SEQ ID NO: 26822 - DNA, 25 bp, Homo sapien
acccgaacgacttccggtggtctga

SEQ ID NO: 26823 - DNA, 25 bp, Homo sapien
accccggttccgcgcgggaggcgag

SEQ ID NO: 26824 - DNA, 25 bp, Homo sapien
accccggttccgggcgggaggcgag

SEQ ID NO: 26825 - DNA, 25 bp, Homo sapien
ctcctgttcttcacgggacttgtgg

SEQ ID NO: 26826 - DNA, 25 bp, Homo sapien
ctcctgttcttctcgggacttgtgg

SEQ ID NO: 26827 - DNA, 25 bp, Homo sapien
tcctcttacttgttccccgagtttg

SEQ ID NO: 26828 - DNA, 25 bp, Homo sapien
tcctcttacttgatccccgagtttg

SEQ ID NO: 26829 - DNA, 25 bp, Homo sapien
gagtcacctcggtcacctgggttct

SEQ ID NO: 26830 - DNA, 25 bp, Homo sapien
gagtcacctcggacacctgggttct

SEQ ID NO: 26831 - DNA, 25 bp, Homo sapien
cgtcgtcgtcatttccctgtctctt

SEQ ID NO: 26832 - DNA, 25 bp, Homo sapien
cgtcgtcgtcatatccctgtctctt

SEQ ID NO: 26833 - DNA, 25 bp, Homo sapien
accatgttggaaccaccttcgactc

SEQ ID NO: 26834 - DNA, 25 bp, Homo sapien
accatgttggaagcaccttcgactc

SEQ ID NO: 26835 - DNA, 25 bp, Homo sapien
tcttctgacgagagggccgtcgcag

SEQ ID NO: 26836 - DNA, 25 bp, Homo sapien
tcttctgacgagtgggccgtcgcag

SEQ ID NO: 26837 - DNA, 25 bp, Homo sapien
aatttaaagattagccactcgactg

SEQ ID NO: 26838 - DNA, 25 bp, Homo sapien
aatttaaagatttgccactcgactg

SEQ ID NO: 26839 - DNA, 25 bp, Homo sapien
cagtgctgtacgttgcgactggtaa

SEQ ID NO: 26840 - DNA, 25 bp, Homo sapien
cagtgctgtacgatgcgactggtaa

SEQ ID NO: 26841 - DNA, 25 bp, Homo sapien
ggcgtcgtcgtcgtcctaccgtcag

SEQ ID NO: 26842 - DNA, 25 bp, Homo sapien
ggcgtcgtcgtcctcctaccgtcag

SEQ ID NO: 26843 - DNA, 25 bp, Homo sapien
ttcaggtctctcctcctcggacgtg

SEQ ID NO: 26844 - DNA, 25 bp, Homo sapien
ttcaggtctctcgtcctcggacgtg

SEQ ID NO: 26845 - DNA, 25 bp, Homo sapien
gtgtctagtgttgtcgacgggactt

SEQ ID NO: 26846 - DNA, 25 bp, Homo sapien
gtgtctagtgttctcgacgggactt

SEQ ID NO: 26847 - DNA, 25 bp, Homo sapien
gtgtcgttgtctcatcgaggaacgg

SEQ ID NO: 26848 - DNA, 25 bp, Homo sapien
gtgtcgttgtctgatcgaggaacgg

SEQ ID NO: 26849 - DNA, 25 bp, Homo sapien
aagtgtctctttatatcaggacaca

SEQ ID NO: 26850 - DNA, 25 bp, Homo sapien
aagtgtctctttttatcaggacaca

SEQ ID NO: 26851 - DNA, 25 bp, Homo sapien
ggatcacttttcagaatacgtacga

SEQ ID NO: 26852 - DNA, 25 bp, Homo sapien
ggatcacttttctgaatacgtacga

SEQ ID NO: 26853 - DNA, 25 bp, Homo sapien
cagtattgagtgtttcttcattaac

SEQ ID NO: 26854 - DNA, 25 bp, Homo sapien
cagtattgagtgattcttcattaac

SEQ ID NO: 26855 - DNA, 25 bp, Homo sapien
aataagagtacgtcgattcattgac

SEQ ID NO: 26856 - DNA, 25 bp, Homo sapien
aataagagtacgacgattcattgac

SEQ ID NO: 26857 - DNA, 25 bp, Homo sapien
aagaaagtcctcaactagtataaga

SEQ ID NO: 26858 - DNA, 25 bp, Homo sapien
aagaaagtcctctactagtataaga

SEQ ID NO: 26859 - DNA, 25 bp, Homo sapien
ggtagagagtccttctatgtcaata

SEQ ID NO: 26860 - DNA, 25 bp, Homo sapien
ggtagagagtccatctatgtcaata

SEQ ID NO: 26861 - DNA, 25 bp, Homo sapien
atgaacgtccaggttgtcgcatacg

SEQ ID NO: 26862 - DNA, 25 bp, Homo sapien
atgaacgtccagcttgtcgcatacg

SEQ ID NO: 26863 - DNA, 25 bp, Homo sapien
taccaactcttgtcgtttaacgacg

SEQ ID NO: 26864 - DNA, 25 bp, Homo sapien
taccaactcttgacgtttaacgacg

SEQ ID NO: 26865 - DNA, 25 bp, Homo sapien
cttattcttcttacggttcgacgtc

SEQ ID NO: 26866 - DNA, 25 bp, Homo sapien
cttattcttctttcggttcgacgtc

SEQ ID NO: 26867 - DNA, 25 bp, Homo sapien
cagtgaagattaattcttctcggtc

SEQ ID NO: 26868 - DNA, 25 bp, Homo sapien
cagtgaagattatttcttctcggtc

SEQ ID NO: 26869 - DNA, 25 bp, Homo sapien
cttggacgtcttattaggttcggct

SEQ ID NO: 26870 - DNA, 25 bp, Homo sapien
cttggacgtctttttaggttcggct

SEQ ID NO: 26871 - DNA, 25 bp, Homo sapien
cggatttctacgtaggtcgtactgc

SEQ ID NO: 26872 - DNA, 25 bp, Homo sapien
cggatttctacgaaggtcgtactgc

SEQ ID NO: 26873 - DNA, 25 bp, Homo sapien
accgagacttgtccaatcgttctca

SEQ ID NO: 26874 - DNA, 25 bp, Homo sapien
accgagacttgtgcaatcgttctca

SEQ ID NO: 26875 - DNA, 25 bp, Homo sapien
gtcaaagtggttcaatacattacta

SEQ ID NO: 26876 - DNA, 25 bp, Homo sapien
gtcaaagtggttgaatacattacta

SEQ ID NO: 26877 - DNA, 25 bp, Homo sapien
gtttcaggtctagtgatattcctat

SEQ ID NO: 26878 - DNA, 25 bp, Homo sapien
gtttcaggtctactgatattcctat

SEQ ID NO: 26879 - DNA, 25 bp, Homo sapien
ttttcaggcacgagacacatcgtaa

SEQ ID NO: 26880 - DNA, 25 bp, Homo sapien
ttttcaggcacgtgacacatcgtaa

SEQ ID NO: 26881 - DNA, 25 bp, Homo sapien
aattcagctaaatgaacatcgtgac

SEQ ID NO: 26882 - DNA, 25 bp, Homo sapien
aattcagctaaaagaacatcgtgac

SEQ ID NO: 26883 - DNA, 25 bp, Homo sapien
agtttagaccaacataactacggac

SEQ ID NO: 26884 - DNA, 25 bp, Homo sapien
agtttagaccaagataactacggac

SEQ ID NO: 26885 - DNA, 25 bp, Homo sapien
taccggaaacacatacagacgaagt

SEQ ID NO: 26886 - DNA, 25 bp, Homo sapien
taccggaaacacttacagacgaagt

SEQ ID NO: 26887 - DNA, 25 bp, Homo sapien
gtgtcgcacacctccagtactgacg

SEQ ID NO: 26888 - DNA, 25 bp, Homo sapien
gtgtcgcacaccaccagtactgacg

SEQ ID NO: 26889 - DNA, 25 bp, Homo sapien
cgttcgacgacataacactgaacga

SEQ ID NO: 26890 - DNA, 25 bp, Homo sapien
cgttcgacgacaaaacactgaacga

SEQ ID NO: 26891 - DNA, 25 bp, Homo sapien
gtagtactccggaaacaccagaagg

SEQ ID NO: 26892 - DNA, 25 bp, Homo sapien
gtagtactccggtaacaccagaagg

SEQ ID NO: 26893 - DNA, 25 bp, Homo sapien
gtgtctccgttatcaccctcaggac

SEQ ID NO: 26894 - DNA, 25 bp, Homo sapien
gtgtctccgttaacaccctcaggac

SEQ ID NO: 26895 - DNA, 25 bp, Homo sapien
gtcccggagacaccaccgtgtgtcg

SEQ ID NO: 26896 - DNA, 25 bp, Homo sapien
gtcccggagacagcaccgtgtgtcg

SEQ ID NO: 26897 - DNA, 25 bp, Homo sapien
tttaaaccagctaaactcgagtagg

SEQ ID NO: 26898 - DNA, 25 bp, Homo sapien
tttaaaccagcttaactcgagtagg

SEQ ID NO: 26899 - DNA, 25 bp, Homo sapien
gtgatacactcgagttgtcaggacg

SEQ ID NO: 26900 - DNA, 25 bp, Homo sapien
gtgatacactcgtgttgtcaggacg

SEQ ID NO: 26901 - DNA, 25 bp, Homo sapien
aggggttacccgtattgtgttacga

SEQ ID NO: 26902 - DNA, 25 bp, Homo sapien
aggggttacccgaattgtgttacga

SEQ ID NO: 26903 - DNA, 25 bp, Homo sapien
gttgtttcctacagtcttacttgta

SEQ ID NO: 26904 - DNA, 25 bp, Homo sapien
gttgtttcctactgtcttacttgta

SEQ ID NO: 26905 - DNA, 25 bp, Homo sapien
tgtttacggtcctgtcgccacagga

SEQ ID NO: 26906 - DNA, 25 bp, Homo sapien
tgtttacggtccagtcgccacagga

SEQ ID NO: 26907 - DNA, 25 bp, Homo sapien
gggtcgttagggagcacgaccctaa

SEQ ID NO: 26908 - DNA, 25 bp, Homo sapien
gggtcgttagggtgcacgaccctaa

SEQ ID NO: 26909 - DNA, 25 bp, Homo sapien
acctgtatggtgcacgccgacgcat

SEQ ID NO: 26910 - DNA, 25 bp, Homo sapien
acctgtatggtggacgccgacgcat

SEQ ID NO: 26911 - DNA, 25 bp, Homo sapien
caccggtatgtttagattcggtcat

SEQ ID NO: 26912 - DNA, 25 bp, Homo sapien
caccggtatgttaagattcggtcat

SEQ ID NO: 26913 - DNA, 25 bp, Homo sapien
cacacgttaggtgaaacacccgcac

SEQ ID NO: 26914 - DNA, 25 bp, Homo sapien
cacacgttaggtcaaacacccgcac

SEQ ID NO: 26915 - DNA, 25 bp, Homo sapien
gagcgacgattgagaacaacacccc

SEQ ID NO: 26916 - DNA, 25 bp, Homo sapien
gagcgacgattgtgaacaacacccc

SEQ ID NO: 26917 - DNA, 25 bp, Homo sapien
gaactcattgtcgacaagaacaaag

SEQ ID NO: 26918 - DNA, 25 bp, Homo sapien
gaactcattgtccacaagaacaaag

SEQ ID NO: 26919 - DNA, 25 bp, Homo sapien
tcaattttcgacagtaacagtagtt

SEQ ID NO: 26920 - DNA, 25 bp, Homo sapien
tcaattttcgactgtaacagtagtt

SEQ ID NO: 26921 - DNA, 25 bp, Homo sapien
taagtaattccgataagctacggta

SEQ ID NO: 26922 - DNA, 25 bp, Homo sapien
taagtaattccgttaagctacggta

SEQ ID NO: 26923 - DNA, 25 bp, Homo sapien
gtatacttctattacacgaccggag

SEQ ID NO: 26924 - DNA, 25 bp, Homo sapien
gtatacttctataacacgaccggag

SEQ ID NO: 26925 - DNA, 25 bp, Homo sapien
tattataaggaatcacagaccgtga

SEQ ID NO: 26926 - DNA, 25 bp, Homo sapien
tattataaggaaacacagaccgtga

SEQ ID NO: 26927 - DNA, 25 bp, Homo sapien
ttagagttatacgtcagaccgacac

SEQ ID NO: 26928 - DNA, 25 bp, Homo sapien
ttagagttatacctcagaccgacac

SEQ ID NO: 26929 - DNA, 25 bp, Homo sapien
tatcgtagaactcgtagtctccacc

SEQ ID NO: 26930 - DNA, 25 bp, Homo sapien
tatcgtagaactggtagtctccacc

SEQ ID NO: 26931 - DNA, 25 bp, Homo sapien
atgagaaggaggtaggactccaaac

SEQ ID NO: 26932 - DNA, 25 bp, Homo sapien
atgagaaggaggaaggactccaaac

SEQ ID NO: 26933 - DNA, 25 bp, Homo sapien
agtgcgaaaggtcgaaggaaccaaa

SEQ ID NO: 26934 - DNA, 25 bp, Homo sapien
agtgcgaaaggtggaaggaaccaaa

SEQ ID NO: 26935 - DNA, 25 bp, Homo sapien
tcagttgttaagactagatctcaaa

SEQ ID NO: 26936 - DNA, 25 bp, Homo sapien
tcagttgttaagtctagatctcaaa

SEQ ID NO: 26937 - DNA, 25 bp, Homo sapien
aagttgtcaacttcccatgtaagtt

SEQ ID NO: 26938 - DNA, 25 bp, Homo sapien
aagttgtcaactacccatgtaagtt

SEQ ID NO: 26939 - DNA, 25 bp, Homo sapien
gacgagttcacataaccctttatgt

SEQ ID NO: 26940 - DNA, 25 bp, Homo sapien
gacgagttcacaaaaccctttatgt

SEQ ID NO: 26941 - DNA, 25 bp, Homo sapien
ccgggaaccacgactcacttctatt

SEQ ID NO: 26942 - DNA, 25 bp, Homo sapien
ccgggaaccacgtctcacttctatt

SEQ ID NO: 26943 - DNA, 25 bp, Homo sapien
gtatcgaccaacattttacagaagt

SEQ ID NO: 26944 - DNA, 25 bp, Homo sapien
gtatcgaccaactttttacagaagt

SEQ ID NO: 26945 - DNA, 25 bp, Homo sapien
acacgtgccatagacccggtaacta

SEQ ID NO: 26946 - DNA, 25 bp, Homo sapien
acacgtgccatacacccggtaacta

SEQ ID NO: 26947 - DNA, 25 bp, Homo sapien
ctggtaccaacgtcgggttcagtac

SEQ ID NO: 26948 - DNA, 25 bp, Homo sapien
ctggtaccaacgacgggttcagtac

SEQ ID NO: 26949 - DNA, 25 bp, Homo sapien
tacccgctacaaagagtcccgacga

SEQ ID NO: 26950 - DNA, 25 bp, Homo sapien
tacccgctacaatgagtcccgacga

SEQ ID NO: 26951 - DNA, 25 bp, Homo sapien
acccgaagagttgacgctccagtgt

SEQ ID NO: 26952 - DNA, 25 bp, Homo sapien
acccgaagagttcacgctccagtgt

SEQ ID NO: 26953 - DNA, 25 bp, Homo sapien
gagtcaagtagagacagatccagtc

SEQ ID NO: 26954 - DNA, 25 bp, Homo sapien
gagtcaagtagacacagatccagtc

SEQ ID NO: 26955 - DNA, 25 bp, Homo sapien
gaccgacccagacaccgggaacaga

SEQ ID NO: 26956 - DNA, 25 bp, Homo sapien
gaccgacccagagaccgggaacaga

SEQ ID NO: 26957 - DNA, 25 bp, Homo sapien
cataggtacattctcgaggcacgaa

SEQ ID NO: 26958 - DNA, 25 bp, Homo sapien
cataggtacattgtcgaggcacgaa

SEQ ID NO: 26959 - DNA, 25 bp, Homo sapien
gtccccgtaattataccagtcctaa

SEQ ID NO: 26960 - DNA, 25 bp, Homo sapien
gtccccgtaattttaccagtcctaa

SEQ ID NO: 26961 - DNA, 25 bp, Homo sapien
ctaccctccaggactcagtatcgaa

SEQ ID NO: 26962 - DNA, 25 bp, Homo sapien
ctaccctccaggtctcagtatcgaa

SEQ ID NO: 26963 - DNA, 25 bp, Homo sapien
gtccccggaaccacagagactctga

SEQ ID NO: 26964 - DNA, 25 bp, Homo sapien
gtccccggaacctcagagactctga

SEQ ID NO: 26965 - DNA, 25 bp, Homo sapien
tccggagtccaaacgagtccgtcat

SEQ ID NO: 26966 - DNA, 25 bp, Homo sapien
tccggagtccaatcgagtccgtcat

SEQ ID NO: 26967 - DNA, 25 bp, Homo sapien
gctaccgaagcgaccggagccacga

SEQ ID NO: 26968 - DNA, 25 bp, Homo sapien
gctaccgaagcgtccggagccacga

SEQ ID NO: 26969 - DNA, 25 bp, Homo sapien
actaacacgggtctaggtgcccgtt

SEQ ID NO: 26970 - DNA, 25 bp, Homo sapien
actaacacgggtgtaggtgcccgtt

SEQ ID NO: 26971 - DNA, 25 bp, Homo sapien
tctgcagagctgtcggtggacgaca

SEQ ID NO: 26972 - DNA, 25 bp, Homo sapien
tctgcagagctgacggtggacgaca

SEQ ID NO: 26973 - DNA, 25 bp, Homo sapien
agcggagcgctcacgggcacacgca

SEQ ID NO: 26974 - DNA, 25 bp, Homo sapien
agcggagcgctctcgggcacacgca

SEQ ID NO: 26975 - DNA, 25 bp, Homo sapien
acggaggacccgtgagaccccgctg

SEQ ID NO: 26976 - DNA, 25 bp, Homo sapien
acggaggacccgagagaccccgctg

SEQ ID NO: 26977 - DNA, 25 bp, Homo sapien
ggccgaccaacaaaccgataccagt

SEQ ID NO: 26978 - DNA, 25 bp, Homo sapien
ggccgaccaacataccgataccagt

SEQ ID NO: 26979 - DNA, 25 bp, Homo sapien
aagtgacccaaattccgtacgaaac

SEQ ID NO: 26980 - DNA, 25 bp, Homo sapien
aagtgacccaaaatccgtacgaaac

SEQ ID NO: 26981 - DNA, 25 bp, Homo sapien
tccgtatcgaacgtggacgggaccg

SEQ ID NO: 26982 - DNA, 25 bp, Homo sapien
tccgtatcgaacctggacgggaccg

SEQ ID NO: 26983 - DNA, 25 bp, Homo sapien
tttcctcggtggtgcgcgggtactc

SEQ ID NO: 26984 - DNA, 25 bp, Homo sapien
tttcctcggtggagcgcgggtactc

SEQ ID NO: 26985 - DNA, 25 bp, Homo sapien
ccacgtttgtggtcccgggtactcg

SEQ ID NO: 26986 - DNA, 25 bp, Homo sapien
ccacgtttgtggacccgggtactcg

SEQ ID NO: 26987 - DNA, 25 bp, Homo sapien
ctcattgtattgttttaggacacta

SEQ ID NO: 26988 - DNA, 25 bp, Homo sapien
ctcattgtattgatttaggacacta

SEQ ID NO: 26989 - DNA, 25 bp, Homo sapien
cattttgtagaccaacgtccgaaaa

SEQ ID NO: 26990 - DNA, 25 bp, Homo sapien
cattttgtagacgaacgtccgaaaa

SEQ ID NO: 26991 - DNA, 25 bp, Homo sapien
tcatgagtaacaaccaccgaagaac

SEQ ID NO: 26992 - DNA, 25 bp, Homo sapien
tcatgagtaacatccaccgaagaac

SEQ ID NO: 26993 - DNA, 25 bp, Homo sapien
tcctcggtggtgtcggaccctacaa

SEQ ID NO: 26994 - DNA, 25 bp, Homo sapien
tcctcggtggtgacggaccctacaa

SEQ ID NO: 26995 - DNA, 25 bp, Homo sapien
atgctggaacacctatacagacatg

SEQ ID NO: 26996 - DNA, 25 bp, Homo sapien
atgctggaacacgtatacagacatg

SEQ ID NO: 26997 - DNA, 25 bp, Homo sapien
ggtagaataaaacctacgtaaaacc

SEQ ID NO: 26998 - DNA, 25 bp, Homo sapien
ggtagaataaaagctacgtaaaacc

SEQ ID NO: 26999 - DNA, 25 bp, Homo sapien
gacgaaaagaactacaacgacggac

SEQ ID NO: 27000 - DNA, 25 bp, Homo sapien
gacgaaaagaacaacaacgacggac

SEQ ID NO: 27001 - DNA, 25 bp, Homo sapien
aaaaacgtagcacataaacctacgg

SEQ ID NO: 27002 - DNA, 25 bp, Homo sapien
aaaaacgtagcagataaacctacgg

SEQ ID NO: 27003 - DNA, 25 bp, Homo sapien
ggccaaaccactacggaacctacaa

SEQ ID NO: 27004 - DNA, 25 bp, Homo sapien
ggccaaaccacttcggaacctacaa

SEQ ID NO: 27005 - DNA, 25 bp, Homo sapien
tcccaggagacattgtggagatcaa

SEQ ID NO: 27006 - DNA, 25 bp, Homo sapien
tcccaggagacaatgtggagatcaa

SEQ ID NO: 27007 - DNA, 25 bp, Homo sapien
tcaacgaaactggtctagagaatct

SEQ ID NO: 27008 - DNA, 25 bp, Homo sapien
tcaacgaaactgctctagagaatct

SEQ ID NO: 27009 - DNA, 25 bp, Homo sapien
ccgttttacggattcgtctcgacct

SEQ ID NO: 27010 - DNA, 25 bp, Homo sapien
ccgttttacggaatcgtctcgacct

SEQ ID NO: 27011 - DNA, 25 bp, Homo sapien
tgtacatgtataaccaagggtgctc

SEQ ID NO: 27012 - DNA, 25 bp, Homo sapien
tgtacatgtatatccaagggtgctc

SEQ ID NO: 27013 - DNA, 25 bp, Homo sapien
cctgtaagtgtcaacacacgatctc

SEQ ID NO: 27014 - DNA, 25 bp, Homo sapien
cctgtaagtgtctacacacgatctc

SEQ ID NO: 27015 - DNA, 25 bp, Homo sapien
atccgggacggtggtgacacgaacc

SEQ ID NO: 27016 - DNA, 25 bp, Homo sapien
atccgggacggtcgtgacacgaacc

SEQ ID NO: 27017 - DNA, 25 bp, Homo sapien
gtccgtacagaatttataccgacaa

SEQ ID NO: 27018 - DNA, 25 bp, Homo sapien
gtccgtacagaaattataccgacaa

SEQ ID NO: 27019 - DNA, 25 bp, Homo sapien
taccgagtagtacattcacatcttc

SEQ ID NO: 27020 - DNA, 25 bp, Homo sapien
taccgagtagtagattcacatcttc

SEQ ID NO: 27021 - DNA, 25 bp, Homo sapien
ttctcgtgaacacttcagtatgtcc

SEQ ID NO: 27022 - DNA, 25 bp, Homo sapien
ttctcgtgaacagttcagtatgtcc

SEQ ID NO: 27023 - DNA, 25 bp, Homo sapien
gtcgtagtattggtaacagttgtcc

SEQ ID NO: 27024 - DNA, 25 bp, Homo sapien
gtcgtagtattgctaacagttgtcc

SEQ ID NO: 27025 - DNA, 25 bp, Homo sapien
tctcgagaacggtccggatctagcg

SEQ ID NO: 27026 - DNA, 25 bp, Homo sapien
tctcgagaacggaccggatctagcg

SEQ ID NO: 27027 - DNA, 25 bp, Homo sapien
gggagaagatcgtcccggttctacc

SEQ ID NO: 27028 - DNA, 25 bp, Homo sapien
gggagaagatcgacccggttctacc

SEQ ID NO: 27029 - DNA, 25 bp, Homo sapien
gaatactcatgaaggacgattcacc

SEQ ID NO: 27030 - DNA, 25 bp, Homo sapien
gaatactcatgatggacgattcacc

SEQ ID NO: 27031 - DNA, 25 bp, Homo sapien
aaccgtcagtctagaattctcccgt

SEQ ID NO: 27032 - DNA, 25 bp, Homo sapien
aaccgtcagtcttgaattctcccgt

SEQ ID NO: 27033 - DNA, 25 bp, Homo sapien
aataccggaacgaaaattcaccacg

SEQ ID NO: 27034 - DNA, 25 bp, Homo sapien
aataccggaacgtaaattcaccacg

SEQ ID NO: 27035 - DNA, 25 bp, Homo sapien
tgtacacggacaacttaccttgccc

SEQ ID NO: 27036 - DNA, 25 bp, Homo sapien
tgtacacggacatcttaccttgccc

SEQ ID NO: 27037 - DNA, 25 bp, Homo sapien
gggcccgtccataaactcgtggcac

SEQ ID NO: 27038 - DNA, 25 bp, Homo sapien
gggcccgtccattaactcgtggcac

SEQ ID NO: 27039 - DNA, 25 bp, Homo sapien
cggtctgcacaccaagtccggtctt

SEQ ID NO: 27040 - DNA, 25 bp, Homo sapien
cggtctgcacacgaagtccggtctt

SEQ ID NO: 27041 - DNA, 25 bp, Homo sapien
ctactcctgctatgggtgctccttg

SEQ ID NO: 27042 - DNA, 25 bp, Homo sapien
ctactcctgctaagggtgctccttg

SEQ ID NO: 27043 - DNA, 25 bp, Homo sapien
aaatcacagagtgctgtatcttatt

SEQ ID NO: 27044 - DNA, 25 bp, Homo sapien
aaatcacagagtcctgtatcttatt

SEQ ID NO: 27045 - DNA, 25 bp, Homo sapien
aaattcacggtaccaggtttagtgt

SEQ ID NO: 27046 - DNA, 25 bp, Homo sapien
aaattcacggtagcaggtttagtgt

SEQ ID NO: 27047 - DNA, 25 bp, Homo sapien
ggaaacggttcgacgacaggccaag

SEQ ID NO: 27048 - DNA, 25 bp, Homo sapien
ggaaacggttcgtcgacaggccaag

SEQ ID NO: 27049 - DNA, 25 bp, Homo sapien
tataattcgtcatcacaggaccaag

SEQ ID NO: 27050 - DNA, 25 bp, Homo sapien
tataattcgtcaacacaggaccaag

SEQ ID NO: 27051 - DNA, 25 bp, Homo sapien
gacaagtaacccaccgagaccggac

SEQ ID NO: 27052 - DNA, 25 bp, Homo sapien
gacaagtaaccctccgagaccggac

SEQ ID NO: 27053 - DNA, 25 bp, Homo sapien
acagtgaaagtgacagataccgtgg

SEQ ID NO: 27054 - DNA, 25 bp, Homo sapien
acagtgaaagtgtcagataccgtgg

SEQ ID NO: 27055 - DNA, 25 bp, Homo sapien
acaatgtttgtaaattacacctagg

SEQ ID NO: 27056 - DNA, 25 bp, Homo sapien
acaatgtttgtatattacacctagg

SEQ ID NO: 27057 - DNA, 25 bp, Homo sapien
tgtctgttgacgtctaatacaatct

SEQ ID NO: 27058 - DNA, 25 bp, Homo sapien
tgtctgttgacgactaatacaatct

SEQ ID NO: 27059 - DNA, 25 bp, Homo sapien
gttaagacaaagtacatacaatcgt

SEQ ID NO: 27060 - DNA, 25 bp, Homo sapien
gttaagacaaagaacatacaatcgt

SEQ ID NO: 27061 - DNA, 25 bp, Homo sapien
gagtacaaccgtctctatagatgag

SEQ ID NO: 27062 - DNA, 25 bp, Homo sapien
gagtacaaccgtgtctatagatgag

SEQ ID NO: 27063 - DNA, 25 bp, Homo sapien
cgtcacccgtacctggtgtgtgtgt

SEQ ID NO: 27064 - DNA, 25 bp, Homo sapien
cgtcacccgtacgtggtgtgtgtgt

SEQ ID NO: 27065 - DNA, 25 bp, Homo sapien
tgttatggtacatctctgtattcgt

SEQ ID NO: 27066 - DNA, 25 bp, Homo sapien
tgttatggtacaactctgtattcgt

SEQ ID NO: 27067 - DNA, 25 bp, Homo sapien
tacatagactacgactctcatgtcg

SEQ ID NO: 27068 - DNA, 25 bp, Homo sapien
tacatagactaccactctcatgtcg

SEQ ID NO: 27069 - DNA, 25 bp, Homo sapien
gacgacgacgaccatctctactggt

SEQ ID NO: 27070 - DNA, 25 bp, Homo sapien
gacgacgacgacgatctctactggt

SEQ ID NO: 27071 - DNA, 25 bp, Homo sapien
agtgtgtacgttcacggttcctgtc

SEQ ID NO: 27072 - DNA, 25 bp, Homo sapien
agtgtgtacgttgacggttcctgtc

SEQ ID NO: 27073 - DNA, 25 bp, Homo sapien
agtaatagatatctttcgtctagtc

SEQ ID NO: 27074 - DNA, 25 bp, Homo sapien
agtaatagatatgtttcgtctagtc

SEQ ID NO: 27075 - DNA, 25 bp, Homo sapien
ctttaacgaacgttttgttgacatt

SEQ ID NO: 27076 - DNA, 25 bp, Homo sapien
ctttaacgaacgatttgttgacatt

SEQ ID NO: 27077 - DNA, 25 bp, Homo sapien
gtttttgaatccattcgtgaatctt

SEQ ID NO: 27078 - DNA, 25 bp, Homo sapien
gtttttgaatcctttcgtgaatctt

SEQ ID NO: 27079 - DNA, 25 bp, Homo sapien
agtctcccgagacgaagcccctatt

SEQ ID NO: 27080 - DNA, 25 bp, Homo sapien
agtctcccgagaggaagcccctatt

SEQ ID NO: 27081 - DNA, 25 bp, Homo sapien
acacgagagagacaggtcaccagag

SEQ ID NO: 27082 - DNA, 25 bp, Homo sapien
acacgagagagagaggtcaccagag

SEQ ID NO: 27083 - DNA, 25 bp, Homo sapien
gtctcccgagggacggatgtcccaa

SEQ ID NO: 27084 - DNA, 25 bp, Homo sapien
gtctcccgagggtcggatgtcccaa

SEQ ID NO: 27085 - DNA, 25 bp, Homo sapien
gccacagagggctgagggtcctaaa

SEQ ID NO: 27086 - DNA, 25 bp, Homo sapien
gccacagagggcagagggtcctaaa

SEQ ID NO: 27087 - DNA, 25 bp, Homo sapien
gtcatgtctgtctgaaagtaccaaa

SEQ ID NO: 27088 - DNA, 25 bp, Homo sapien
gtcatgtctgtcagaaagtaccaaa

SEQ ID NO: 27089 - DNA, 25 bp, Homo sapien
ttcgtaagagtcaagtatccgatag

SEQ ID NO: 27090 - DNA, 25 bp, Homo sapien
ttcgtaagagtctagtatccgatag

SEQ ID NO: 27091 - DNA, 25 bp, Homo sapien
gtttatgcgactctcttctgcgtac

SEQ ID NO: 27092 - DNA, 25 bp, Homo sapien
gtttatgcgactgtcttctgcgtac

SEQ ID NO: 27093 - DNA, 25 bp, Homo sapien
gtagatcacgacttgtcttccacta

SEQ ID NO: 27094 - DNA, 25 bp, Homo sapien
gtagatcacgacatgtcttccacta

SEQ ID NO: 27095 - DNA, 25 bp, Homo sapien
caggtataaacttgcttacagatat

SEQ ID NO: 27096 - DNA, 25 bp, Homo sapien
caggtataaactagcttacagatat

SEQ ID NO: 27097 - DNA, 25 bp, Homo sapien
aagtgataaatcgatactgactatc

SEQ ID NO: 27098 - DNA, 25 bp, Homo sapien
aagtgataaatccatactgactatc

SEQ ID NO: 27099 - DNA, 25 bp, Homo sapien
caccaagaacgattgattgacgtta

SEQ ID NO: 27100 - DNA, 25 bp, Homo sapien
caccaagaacgaatgattgacgtta

SEQ ID NO: 27101 - DNA, 25 bp, Homo sapien
cagagagtgaaattaaacataccta

SEQ ID NO: 27102 - DNA, 25 bp, Homo sapien
cagagagtgaaaataaacataccta

SEQ ID NO: 27103 - DNA, 25 bp, Homo sapien
cagtaattagttatgttactgtcca

SEQ ID NO: 27104 - DNA, 25 bp, Homo sapien
cagtaattagttttgttactgtcca

SEQ ID NO: 27105 - DNA, 25 bp, Homo sapien
atgcacacttctgtgaccgactcct

SEQ ID NO: 27106 - DNA, 25 bp, Homo sapien
atgcacacttctctgaccgactcct

SEQ ID NO: 27107 - DNA, 25 bp, Homo sapien
gggtccaatctacctgtccagttct

SEQ ID NO: 27108 - DNA, 25 bp, Homo sapien
gggtccaatctagctgtccagttct

SEQ ID NO: 27109 - DNA, 25 bp, Homo sapien
gtcgacgacggaccacatgagggtc

SEQ ID NO: 27110 - DNA, 25 bp, Homo sapien
gtcgacgacggagcacatgagggtc

SEQ ID NO: 27111 - DNA, 25 bp, Homo sapien
ccacagtcccggaacacttgggggt

SEQ ID NO: 27112 - DNA, 25 bp, Homo sapien
ccacagtcccggtacacttgggggt

SEQ ID NO: 27113 - DNA, 25 bp, Homo sapien
ccagcactcttacatgtgtgggtct

SEQ ID NO: 27114 - DNA, 25 bp, Homo sapien
ccagcactcttagatgtgtgggtct

SEQ ID NO: 27115 - DNA, 25 bp, Homo sapien
cgaaaactttggttcgtgtcaatat

SEQ ID NO: 27116 - DNA, 25 bp, Homo sapien
cgaaaactttggatcgtgtcaatat

SEQ ID NO: 27117 - DNA, 25 bp, Homo sapien
aactaagtcgtcttgtcgttaatac

SEQ ID NO: 27118 - DNA, 25 bp, Homo sapien
aactaagtcgtcatgtcgttaatac

SEQ ID NO: 27119 - DNA, 25 bp, Homo sapien
acactctgttctctaacgtagacga

SEQ ID NO: 27120 - DNA, 25 bp, Homo sapien
acactctgttctgtaacgtagacga

SEQ ID NO: 27121 - DNA, 25 bp, Homo sapien
gccgaagttcggtttcataagacaa

SEQ ID NO: 27122 - DNA, 25 bp, Homo sapien
gccgaagttcggattcataagacaa

SEQ ID NO: 27123 - DNA, 25 bp, Homo sapien
agtccgaggttgtaatcagcatgaa

SEQ ID NO: 27124 - DNA, 25 bp, Homo sapien
agtccgaggttgaaatcagcatgaa

SEQ ID NO: 27125 - DNA, 25 bp, Homo sapien
ccatttcactaacctagatgtataa

SEQ ID NO: 27126 - DNA, 25 bp, Homo sapien
ccatttcactaagctagatgtataa

SEQ ID NO: 27127 - DNA, 25 bp, Homo sapien
tacttcgtgtctaagttcattgtaa

SEQ ID NO: 27128 - DNA, 25 bp, Homo sapien
tacttcgtgtcttagttcattgtaa

SEQ ID NO: 27129 - DNA, 25 bp, Homo sapien
cttaaaggtctcgtatcaattatag

SEQ ID NO: 27130 - DNA, 25 bp, Homo sapien
cttaaaggtctcctatcaattatag

SEQ ID NO: 27131 - DNA, 25 bp, Homo sapien
gttgaccttcctcaacttattgtag

SEQ ID NO: 27132 - DNA, 25 bp, Homo sapien
gttgaccttcctgaacttattgtag

SEQ ID NO: 27133 - DNA, 25 bp, Homo sapien
ggtgacccgacgtggacaactaaag

SEQ ID NO: 27134 - DNA, 25 bp, Homo sapien
ggtgacccgacgaggacaactaaag

SEQ ID NO: 27135 - DNA, 25 bp, Homo sapien
acggttcaagttacggaacattatc

SEQ ID NO: 27136 - DNA, 25 bp, Homo sapien
acggttcaagtttcggaacattatc

SEQ ID NO: 27137 - DNA, 25 bp, Homo sapien
ggtttcattcgttaaacattacgac

SEQ ID NO: 27138 - DNA, 25 bp, Homo sapien
ggtttcattcgtaaaacattacgac

SEQ ID NO: 27139 - DNA, 25 bp, Homo sapien
gagggtctatgctgtgaaactatcc

SEQ ID NO: 27140 - DNA, 25 bp, Homo sapien
gagggtctatgcagtgaaactatcc

SEQ ID NO: 27141 - DNA, 25 bp, Homo sapien
aggtacagtacatttaaagaccccc

SEQ ID NO: 27142 - DNA, 25 bp, Homo sapien
aggtacagtacaattaaagaccccc

SEQ ID NO: 27143 - DNA, 25 bp, Homo sapien
ttgacggacccgagggaacacgcac

SEQ ID NO: 27144 - DNA, 25 bp, Homo sapien
ttgacggacccgtgggaacacgcac

SEQ ID NO: 27145 - DNA, 25 bp, Homo sapien
tgtgaaggtccgtagggatctgttc

SEQ ID NO: 27146 - DNA, 25 bp, Homo sapien
tgtgaaggtccgaagggatctgttc

SEQ ID NO: 27147 - DNA, 25 bp, Homo sapien
actcagggaagtgaatgtgtctact

SEQ ID NO: 27148 - DNA, 25 bp, Homo sapien
actcagggaagtcaatgtgtctact

SEQ ID NO: 27149 - DNA, 25 bp, Homo sapien
cacaccaacgagacgcgcaggtgga

SEQ ID NO: 27150 - DNA, 25 bp, Homo sapien
cacaccaacgagtcgcgcaggtgga

SEQ ID NO: 27151 - DNA, 25 bp, Homo sapien
cgactgaaatacgtagccggagaag

SEQ ID NO: 27152 - DNA, 25 bp, Homo sapien
cgactgaaatacctagccggagaag

SEQ ID NO: 27153 - DNA, 25 bp, Homo sapien
aagggggtcttataaatccgaccag

SEQ ID NO: 27154 - DNA, 25 bp, Homo sapien
aagggggtcttaaaaatccgaccag

SEQ ID NO: 27155 - DNA, 25 bp, Homo sapien
ggtggcgacttgcaaatctcccact

SEQ ID NO: 27156 - DNA, 25 bp, Homo sapien
ggtggcgacttggaaatctcccact

SEQ ID NO: 27157 - DNA, 25 bp, Homo sapien
aggagtgttcggagatcccttctgt

SEQ ID NO: 27158 - DNA, 25 bp, Homo sapien
aggagtgttcggtgatcccttctgt

SEQ ID NO: 27159 - DNA, 25 bp, Homo sapien
gaaagatgacggtagttcctttctt

SEQ ID NO: 27160 - DNA, 25 bp, Homo sapien
gaaagatgacggaagttcctttctt

SEQ ID NO: 27161 - DNA, 25 bp, Homo sapien
ggtaaagagaagaagtccttctagc

SEQ ID NO: 27162 - DNA, 25 bp, Homo sapien
ggtaaagagaagtagtccttctagc

SEQ ID NO: 27163 - DNA, 25 bp, Homo sapien
aaaacagcgtcctcgctttcggacg

SEQ ID NO: 27164 - DNA, 25 bp, Homo sapien
aaaacagcgtccacgctttcggacg

SEQ ID NO: 27165 - DNA, 25 bp, Homo sapien
caaaacggacccacggtgtgtcatt

SEQ ID NO: 27166 - DNA, 25 bp, Homo sapien
caaaacggaccctcggtgtgtcatt

SEQ ID NO: 27167 - DNA, 25 bp, Homo sapien
acagtgtagagtctggacgggttcc

SEQ ID NO: 27168 - DNA, 25 bp, Homo sapien
acagtgtagagtgtggacgggttcc

SEQ ID NO: 27169 - DNA, 25 bp, Homo sapien
gtccggtgtggctaagggtccttct

SEQ ID NO: 27170 - DNA, 25 bp, Homo sapien
gtccggtgtggcaaagggtccttct

SEQ ID NO: 27171 - DNA, 25 bp, Homo sapien
gtctttgacaacaacgttcttccgt

SEQ ID NO: 27172 - DNA, 25 bp, Homo sapien
gtctttgacaactacgttcttccgt

SEQ ID NO: 27173 - DNA, 25 bp, Homo sapien
acatgagcactaaccgtagtcctgg

SEQ ID NO: 27174 - DNA, 25 bp, Homo sapien
acatgagcactatccgtagtcctgg

SEQ ID NO: 27175 - DNA, 25 bp, Homo sapien
tcgagtacgttctactgttgtgtcg

SEQ ID NO: 27176 - DNA, 25 bp, Homo sapien
tcgagtacgttcaactgttgtgtcg

SEQ ID NO: 27177 - DNA, 25 bp, Homo sapien
gttgatgaggtcactggtcgtctcg

SEQ ID NO: 27178 - DNA, 25 bp, Homo sapien
gttgatgaggtctctggtcgtctcg

SEQ ID NO: 27179 - DNA, 25 bp, Homo sapien
tatgttgaccttaagaggtcgtgtc

SEQ ID NO: 27180 - DNA, 25 bp, Homo sapien
tatgttgacctttagaggtcgtgtc

SEQ ID NO: 27181 - DNA, 25 bp, Homo sapien
actgtatgcctctgtgtgatgtgtc

SEQ ID NO: 27182 - DNA, 25 bp, Homo sapien
actgtatgcctcagtgtgatgtgtc

SEQ ID NO: 27183 - DNA, 25 bp, Homo sapien
catgtcatcggtacttgatgtatgt

SEQ ID NO: 27184 - DNA, 25 bp, Homo sapien
catgtcatcggttcttgatgtatgt

SEQ ID NO: 27185 - DNA, 25 bp, Homo sapien
tgaattcgacggttctttcattagg

SEQ ID NO: 27186 - DNA, 25 bp, Homo sapien
tgaattcgacggatctttcattagg

SEQ ID NO: 27187 - DNA, 25 bp, Homo sapien
catggttaagtttatccacataagt

SEQ ID NO: 27188 - DNA, 25 bp, Homo sapien
catggttaagttaatccacataagt

SEQ ID NO: 27189 - DNA, 25 bp, Homo sapien
actctcggtcgaaggttctttgggg

SEQ ID NO: 27190 - DNA, 25 bp, Homo sapien
actctcggtcgatggttctttgggg

SEQ ID NO: 27191 - DNA, 25 bp, Homo sapien
gtcccagacccgtcctcgttatggg

SEQ ID NO: 27192 - DNA, 25 bp, Homo sapien
gtcccagacccgacctcgttatggg

SEQ ID NO: 27193 - DNA, 25 bp, Homo sapien
cgactcggcgtgagctgtcgtgaac

SEQ ID NO: 27194 - DNA, 25 bp, Homo sapien
cgactcggcgtgtgctgtcgtgaac

SEQ ID NO: 27195 - DNA, 25 bp, Homo sapien
tgattcgactcgttcagtgtaggaa

SEQ ID NO: 27196 - DNA, 25 bp, Homo sapien
tgattcgactcgatcagtgtaggaa

SEQ ID NO: 27197 - DNA, 25 bp, Homo sapien
ggtgtagttccaactccttgtgacc

SEQ ID NO: 27198 - DNA, 25 bp, Homo sapien
ggtgtagttccatctccttgtgacc

SEQ ID NO: 27199 - DNA, 25 bp, Homo sapien
aggggtctcctgttcctctcttcga

SEQ ID NO: 27200 - DNA, 25 bp, Homo sapien
aggggtctcctgatcctctcttcga

SEQ ID NO: 27201 - DNA, 25 bp, Homo sapien
tcgtccttttgtcactcgtcgcgga

SEQ ID NO: 27202 - DNA, 25 bp, Homo sapien
tcgtccttttgtgactcgtcgcgga

SEQ ID NO: 27203 - DNA, 25 bp, Homo sapien
aagtctggttctttgagtgtcctcc

SEQ ID NO: 27204 - DNA, 25 bp, Homo sapien
aagtctggttctatgagtgtcctcc

SEQ ID NO: 27205 - DNA, 25 bp, Homo sapien
ccgtagatcttctagtcgtactccc

SEQ ID NO: 27206 - DNA, 25 bp, Homo sapien
ccgtagatcttcaagtcgtactccc

SEQ ID NO: 27207 - DNA, 25 bp, Homo sapien
cgtcgtattatgttagttatcacct

SEQ ID NO: 27208 - DNA, 25 bp, Homo sapien
cgtcgtattatgatagttatcacct

SEQ ID NO: 27209 - DNA, 25 bp, Homo sapien
ctgacggtatcgatgagtaatcact

SEQ ID NO: 27210 - DNA, 25 bp, Homo sapien
ctgacggtatcgttgagtaatcact

SEQ ID NO: 27211 - DNA, 25 bp, Homo sapien
ggaaagtgacaagttggagtacata

SEQ ID NO: 27212 - DNA, 25 bp, Homo sapien
ggaaagtgacaacttggagtacata

SEQ ID NO: 27213 - DNA, 25 bp, Homo sapien
gaagtagtcctcagcggggttccct

SEQ ID NO: 27214 - DNA, 25 bp, Homo sapien
gaagtagtcctctgcggggttccct

SEQ ID NO: 27215 - DNA, 25 bp, Homo sapien
ggaaacgaaacctacacagttcccc

SEQ ID NO: 27216 - DNA, 25 bp, Homo sapien
ggaaacgaaaccaacacagttcccc

SEQ ID NO: 27217 - DNA, 25 bp, Homo sapien
gaaaaggaataaaaacgtcttcttt

SEQ ID NO: 27218 - DNA, 25 bp, Homo sapien
gaaaaggaataataacgtcttcttt

SEQ ID NO: 27219 - DNA, 25 bp, Homo sapien
ccaataaaaggatacagcgttgttt

SEQ ID NO: 27220 - DNA, 25 bp, Homo sapien
ccaataaaaggaaacagcgttgttt

SEQ ID NO: 27221 - DNA, 25 bp, Homo sapien
gacttaagaacaacagcctcgtctc

SEQ ID NO: 27222 - DNA, 25 bp, Homo sapien
gacttaagaacatcagcctcgtctc

SEQ ID NO: 27223 - DNA, 25 bp, Homo sapien
atataaaacgttcgtacgatagatc

SEQ ID NO: 27224 - DNA, 25 bp, Homo sapien
atataaaacgttggtacgatagatc

SEQ ID NO: 27225 - DNA, 25 bp, Homo sapien
ggcttcggcgtcttcggtcagagaa

SEQ ID NO: 27226 - DNA, 25 bp, Homo sapien
ggcttcggcgtcatcggtcagagaa

SEQ ID NO: 27227 - DNA, 25 bp, Homo sapien
acctaggtgtaaacggcagcgaagt

SEQ ID NO: 27228 - DNA, 25 bp, Homo sapien
acctaggtgtaatcggcagcgaagt

SEQ ID NO: 27229 - DNA, 25 bp, Homo sapien
tcacccgtcgtgtccgggaaccagt

SEQ ID NO: 27230 - DNA, 25 bp, Homo sapien
tcacccgtcgtgaccgggaaccagt

SEQ ID NO: 27231 - DNA, 25 bp, Homo sapien
taccacgacgggaaccgcaaccaca

SEQ ID NO: 27232 - DNA, 25 bp, Homo sapien
taccacgacgggtaccgcaaccaca

SEQ ID NO: 27233 - DNA, 25 bp, Homo sapien
ctcaccagacctgatcccaaagagg

SEQ ID NO: 27234 - DNA, 25 bp, Homo sapien
ctcaccagacctcatcccaaagagg

SEQ ID NO: 27235 - DNA, 25 bp, Homo sapien
ccctcccctcgcccaaactcgtggt

SEQ ID NO: 27236 - DNA, 25 bp, Homo sapien
ccctcccctcgcgcaaactcgtggt

SEQ ID NO: 27237 - DNA, 25 bp, Homo sapien
atcacccacgtcaacgacaaatttg

SEQ ID NO: 27238 - DNA, 25 bp, Homo sapien
atcacccacgtctacgacaaatttg

SEQ ID NO: 27239 - DNA, 25 bp, Homo sapien
ctacctccttgttcccgagagtttg

SEQ ID NO: 27240 - DNA, 25 bp, Homo sapien
ctacctccttgtacccgagagtttg

SEQ ID NO: 27241 - DNA, 25 bp, Homo sapien
caccgtaagctcctgagacgtttct

SEQ ID NO: 27242 - DNA, 25 bp, Homo sapien
caccgtaagctcgtgagacgtttct

SEQ ID NO: 27243 - DNA, 25 bp, Homo sapien
atcccgacgtactcagacgtcttct

SEQ ID NO: 27244 - DNA, 25 bp, Homo sapien
atcccgacgtacacagacgtcttct

SEQ ID NO: 27245 - DNA, 25 bp, Homo sapien
gcccagacgactaagacgtctctgt

SEQ ID NO: 27246 - DNA, 25 bp, Homo sapien
gcccagacgacttagacgtctctgt

SEQ ID NO: 27247 - DNA, 25 bp, Homo sapien
cttccctacgaggtctgtgtccgtc

SEQ ID NO: 27248 - DNA, 25 bp, Homo sapien
cttccctacgagctctgtgtccgtc

SEQ ID NO: 27249 - DNA, 25 bp, Homo sapien
cacttgtgtcttgtccttgaccgtc

SEQ ID NO: 27250 - DNA, 25 bp, Homo sapien
cacttgtgtcttctccttgaccgtc

SEQ ID NO: 27251 - DNA, 25 bp, Homo sapien
ttacatgttcttattccaagttgtg

SEQ ID NO: 27252 - DNA, 25 bp, Homo sapien
ttacatgttctttttccaagttgtg

SEQ ID NO: 27253 - DNA, 25 bp, Homo sapien
tctcagagggtttgttcaaaagttt

SEQ ID NO: 27254 - DNA, 25 bp, Homo sapien
tctcagagggttagttcaaaagttt

SEQ ID NO: 27255 - DNA, 25 bp, Homo sapien
tagactacaagtgtgtcaagtgcaa

SEQ ID NO: 27256 - DNA, 25 bp, Homo sapien
tagactacaagtctgtcaagtgcaa

SEQ ID NO: 27257 - DNA, 25 bp, Homo sapien
taaccagggtacctaatgtaccaat

SEQ ID NO: 27258 - DNA, 25 bp, Homo sapien
taaccagggtacgtaatgtaccaat

SEQ ID NO: 27259 - DNA, 25 bp, Homo sapien
ggtttaagtgacgtttctctcatgt

SEQ ID NO: 27260 - DNA, 25 bp, Homo sapien
ggtttaagtgacctttctctcatgt

SEQ ID NO: 27261 - DNA, 25 bp, Homo sapien
ttatataacactgtccgtctacagg

SEQ ID NO: 27262 - DNA, 25 bp, Homo sapien
ttatataacactctccgtctacagg

SEQ ID NO: 27263 - DNA, 25 bp, Homo sapien
ttgattatacgctatgtactacaga

SEQ ID NO: 27264 - DNA, 25 bp, Homo sapien
ttgattatacgcaatgtactacaga

SEQ ID NO: 27265 - DNA, 25 bp, Homo sapien
gttattcgttgcatcgttacttacc

SEQ ID NO: 27266 - DNA, 25 bp, Homo sapien
gttattcgttgcttcgttacttacc

SEQ ID NO: 27267 - DNA, 25 bp, Homo sapien
atcgtagttacgacttatcgtacta

SEQ ID NO: 27268 - DNA, 25 bp, Homo sapien
atcgtagttacgtcttatcgtacta

SEQ ID NO: 27269 - DNA, 25 bp, Homo sapien
gctattcagatggattaccttatga

SEQ ID NO: 27270 - DNA, 25 bp, Homo sapien
gctattcagatgcattaccttatga

SEQ ID NO: 27271 - DNA, 25 bp, Homo sapien
ttttaccaggtataccatacgtgtt

SEQ ID NO: 27272 - DNA, 25 bp, Homo sapien
ttttaccaggtaaaccatacgtgtt

SEQ ID NO: 27273 - DNA, 25 bp, Homo sapien
tgtttacaccggacctcgtctgggt

SEQ ID NO: 27274 - DNA, 25 bp, Homo sapien
tgtttacaccggtcctcgtctgggt

SEQ ID NO: 27275 - DNA, 25 bp, Homo sapien
gctccaaagtctaaccttccctggt

SEQ ID NO: 27276 - DNA, 25 bp, Homo sapien
gctccaaagtcttaccttccctggt

SEQ ID NO: 27277 - DNA, 25 bp, Homo sapien
ccggagatctgagagtccgacggat

SEQ ID NO: 27278 - DNA, 25 bp, Homo sapien
ccggagatctgacagtccgacggat

SEQ ID NO: 27279 - DNA, 25 bp, Homo sapien
ctgtgtccgtcccacgaccgtagga

SEQ ID NO: 27280 - DNA, 25 bp, Homo sapien
ctgtgtccgtccgacgaccgtagga

SEQ ID NO: 27281 - DNA, 25 bp, Homo sapien
aaccatctccgctgacaggtgagga

SEQ ID NO: 27282 - DNA, 25 bp, Homo sapien
aaccatctccgcagacaggtgagga

SEQ ID NO: 27283 - DNA, 25 bp, Homo sapien
gttcgcgacttttccatcgaaggcc

SEQ ID NO: 27284 - DNA, 25 bp, Homo sapien
gttcgcgactttaccatcgaaggcc

SEQ ID NO: 27285 - DNA, 25 bp, Homo sapien
acgttataaagttacggagactctc

SEQ ID NO: 27286 - DNA, 25 bp, Homo sapien
acgttataaagtaacggagactctc

SEQ ID NO: 27287 - DNA, 25 bp, Homo sapien
gaggagacgtgattaaaacgtcact

SEQ ID NO: 27288 - DNA, 25 bp, Homo sapien
gaggagacgtgaataaaacgtcact

SEQ ID NO: 27289 - DNA, 25 bp, Homo sapien
gtagagaatttcaggtctggtctac

SEQ ID NO: 27290 - DNA, 25 bp, Homo sapien
gtagagaatttctggtctggtctac

SEQ ID NO: 27291 - DNA, 25 bp, Homo sapien
acatcagatttacctgtgaggtctc

SEQ ID NO: 27292 - DNA, 25 bp, Homo sapien
acatcagatttagctgtgaggtctc

SEQ ID NO: 27293 - DNA, 25 bp, Homo sapien
tgtgagatatgtctggtactctctc

SEQ ID NO: 27294 - DNA, 25 bp, Homo sapien
tgtgagatatgtgtggtactctctc

SEQ ID NO: 27295 - DNA, 25 bp, Homo sapien
atgttaggacacttttctactgttc

SEQ ID NO: 27296 - DNA, 25 bp, Homo sapien
atgttaggacacatttctactgttc

SEQ ID NO: 27297 - DNA, 25 bp, Homo sapien
gacgagcgcaggccgtctttccgcg

SEQ ID NO: 27298 - DNA, 25 bp, Homo sapien
gacgagcgcagggcgtctttccgcg

SEQ ID NO: 27299 - DNA, 25 bp, Homo sapien
cctagtactacggttggagaatgca

SEQ ID NO: 27300 - DNA, 25 bp, Homo sapien
cctagtactacgcttggagaatgca

SEQ ID NO: 27301 - DNA, 25 bp, Homo sapien
aaagaagtaccataagatgtccccg

SEQ ID NO: 27302 - DNA, 25 bp, Homo sapien
aaagaagtaccaaaagatgtccccg

SEQ ID NO: 27303 - DNA, 25 bp, Homo sapien
gagacacaagtaaagataaccctcg

SEQ ID NO: 27304 - DNA, 25 bp, Homo sapien
gagacacaagtatagataaccctcg

SEQ ID NO: 27305 - DNA, 25 bp, Homo sapien
atcaagtagtaggactaaccgactc

SEQ ID NO: 27306 - DNA, 25 bp, Homo sapien
atcaagtagtagcactaaccgactc

SEQ ID NO: 27307 - DNA, 25 bp, Homo sapien
agatttagtaccaagactacgtaca

SEQ ID NO: 27308 - DNA, 25 bp, Homo sapien
agatttagtacctagactacgtaca

SEQ ID NO: 27309 - DNA, 25 bp, Homo sapien
acatagtctgattgacgacaacgta

SEQ ID NO: 27310 - DNA, 25 bp, Homo sapien
acatagtctgatagacgacaacgta

SEQ ID NO: 27311 - DNA, 25 bp, Homo sapien
gcgacatgggtgagtagtaactcca

SEQ ID NO: 27312 - DNA, 25 bp, Homo sapien
gcgacatgggtgtgtagtaactcca

SEQ ID NO: 27313 - DNA, 25 bp, Homo sapien
cagttgtggccgtagtacatcgtga

SEQ ID NO: 27314 - DNA, 25 bp, Homo sapien
cagttgtggccgaagtacatcgtga

SEQ ID NO: 27315 - DNA, 25 bp, Homo sapien
cttttgtaaccttagtaccgtgagg

SEQ ID NO: 27316 - DNA, 25 bp, Homo sapien
cttttgtaacctaagtaccgtgagg

SEQ ID NO: 27317 - DNA, 25 bp, Homo sapien
ctactttctcacgtctgttgtcgaa

SEQ ID NO: 27318 - DNA, 25 bp, Homo sapien
ctactttctcacctctgttgtcgaa

SEQ ID NO: 27319 - DNA, 25 bp, Homo sapien
cactgtgtatcgtcatcttttgtta

SEQ ID NO: 27320 - DNA, 25 bp, Homo sapien
cactgtgtatcgacatcttttgtta

SEQ ID NO: 27321 - DNA, 25 bp, Homo sapien
cgggtcgagacctctcgggtcgttt

SEQ ID NO: 27322 - DNA, 25 bp, Homo sapien
cgggtcgagaccactcgggtcgttt

SEQ ID NO: 27323 - DNA, 25 bp, Homo sapien
cagactgagggaaccgggtcgacct

SEQ ID NO: 27324 - DNA, 25 bp, Homo sapien
cagactgagggatccgggtcgacct

SEQ ID NO: 27325 - DNA, 25 bp, Homo sapien
gaggcttagggtcacaccggttccg

SEQ ID NO: 27326 - DNA, 25 bp, Homo sapien
gaggcttagggtgacaccggttccg

SEQ ID NO: 27327 - DNA, 25 bp, Homo sapien
acaccaggtagtggtaacgttgcat

SEQ ID NO: 27328 - DNA, 25 bp, Homo sapien
acaccaggtagtcgtaacgttgcat

SEQ ID NO: 27329 - DNA, 25 bp, Homo sapien
tcttaatgtacgtcatcgagtataa

SEQ ID NO: 27330 - DNA, 25 bp, Homo sapien
tcttaatgtacgacatcgagtataa

SEQ ID NO: 27331 - DNA, 25 bp, Homo sapien
cgtctgtcgtgtggtcagaagtaaa

SEQ ID NO: 27332 - DNA, 25 bp, Homo sapien
cgtctgtcgtgtcgtcagaagtaaa

SEQ ID NO: 27333 - DNA, 25 bp, Homo sapien
tgtcttggttactacagaagactgt

SEQ ID NO: 27334 - DNA, 25 bp, Homo sapien
tgtcttggttacaacagaagactgt

SEQ ID NO: 27335 - DNA, 25 bp, Homo sapien
ggagttttttcgactaaaccactgt

SEQ ID NO: 27336 - DNA, 25 bp, Homo sapien
ggagttttttcgtctaaaccactgt

SEQ ID NO: 27337 - DNA, 25 bp, Homo sapien
gtgaatcacataattctgttcatgt

SEQ ID NO: 27338 - DNA, 25 bp, Homo sapien
gtgaatcacatatttctgttcatgt

SEQ ID NO: 27339 - DNA, 25 bp, Homo sapien
tggaaccgtcggtctctttcatagt

SEQ ID NO: 27340 - DNA, 25 bp, Homo sapien
tggaaccgtcggactctttcatagt

SEQ ID NO: 27341 - DNA, 25 bp, Homo sapien
aaagaagtgagtacacactaagtct

SEQ ID NO: 27342 - DNA, 25 bp, Homo sapien
aaagaagtgagttcacactaagtct

SEQ ID NO: 27343 - DNA, 25 bp, Homo sapien
agtatgggaaatcgaaactcttatc

SEQ ID NO: 27344 - DNA, 25 bp, Homo sapien
agtatgggaaatggaaactcttatc

SEQ ID NO: 27345 - DNA, 25 bp, Homo sapien
acgtaagaaaaatcggcttttttct

SEQ ID NO: 27346 - DNA, 25 bp, Homo sapien
acgtaagaaaaaacggcttttttct

SEQ ID NO: 27347 - DNA, 25 bp, Homo sapien
ataagtacgtcgtcatatagtcact

SEQ ID NO: 27348 - DNA, 25 bp, Homo sapien
ataagtacgtcgacatatagtcact

SEQ ID NO: 27349 - DNA, 25 bp, Homo sapien
aggggagaacgacacgaaacgcgac

SEQ ID NO: 27350 - DNA, 25 bp, Homo sapien
aggggagaacgagacgaaacgcgac

SEQ ID NO: 27351 - DNA, 25 bp, Homo sapien
ggagagatcctatcggtacacagac

SEQ ID NO: 27352 - DNA, 25 bp, Homo sapien
ggagagatcctaacggtacacagac

SEQ ID NO: 27353 - DNA, 25 bp, Homo sapien
ggttagtgtcttttccgtaggagac

SEQ ID NO: 27354 - DNA, 25 bp, Homo sapien
ggttagtgtcttatccgtaggagac

SEQ ID NO: 27355 - DNA, 25 bp, Homo sapien
cgttgagtccttgtcgatagaccgg

SEQ ID NO: 27356 - DNA, 25 bp, Homo sapien
cgttgagtccttctcgatagaccgg

SEQ ID NO: 27357 - DNA, 25 bp, Homo sapien
gtgttctctggatcgactgactaag

SEQ ID NO: 27358 - DNA, 25 bp, Homo sapien
gtgttctctggaacgactgactaag

SEQ ID NO: 27359 - DNA, 25 bp, Homo sapien
tccgtcttcctctgatcatcctggt

SEQ ID NO: 27360 - DNA, 25 bp, Homo sapien
tccgtcttcctcagatcatcctggt

SEQ ID NO: 27361 - DNA, 25 bp, Homo sapien
gaaactttcctcctacacacctggg

SEQ ID NO: 27362 - DNA, 25 bp, Homo sapien
gaaactttcctcgtacacacctggg

SEQ ID NO: 27363 - DNA, 25 bp, Homo sapien
atgtacactcttaaatcgtactagg

SEQ ID NO: 27364 - DNA, 25 bp, Homo sapien
atgtacactctttaatcgtactagg

SEQ ID NO: 27365 - DNA, 25 bp, Homo sapien
aaagacgtgtccttatagctctcgc

SEQ ID NO: 27366 - DNA, 25 bp, Homo sapien
aaagacgtgtccatatagctctcgc

SEQ ID NO: 27367 - DNA, 25 bp, Homo sapien
tcatcgagcgcgaggcgtcctgagt

SEQ ID NO: 27368 - DNA, 25 bp, Homo sapien
tcatcgagcgcgtggcgtcctgagt

SEQ ID NO: 27369 - DNA, 25 bp, Homo sapien
ccgtatcatggaaggtcgaccaacg

SEQ ID NO: 27370 - DNA, 25 bp, Homo sapien
ccgtatcatggatggtcgaccaacg

SEQ ID NO: 27371 - DNA, 25 bp, Homo sapien
cgtcttcactgtgtcggtaggaacc

SEQ ID NO: 27372 - DNA, 25 bp, Homo sapien
cgtcttcactgtctcggtaggaacc

SEQ ID NO: 27373 - DNA, 25 bp, Homo sapien
cgatgtaccggtgtcggacggaaca

SEQ ID NO: 27374 - DNA, 25 bp, Homo sapien
cgatgtaccggtctcggacggaaca

SEQ ID NO: 27375 - DNA, 25 bp, Homo sapien
tgtctgaggtgtagaccgggacacc

SEQ ID NO: 27376 - DNA, 25 bp, Homo sapien
tgtctgaggtgttgaccgggacacc

SEQ ID NO: 27377 - DNA, 25 bp, Homo sapien
cgcgttcgtgtggaaccgggacacc

SEQ ID NO: 27378 - DNA, 25 bp, Homo sapien
cgcgttcgtgtgcaaccgggacacc

SEQ ID NO: 27379 - DNA, 25 bp, Homo sapien
tttttgtgggtcgtccatggtacga

SEQ ID NO: 27380 - DNA, 25 bp, Homo sapien
tttttgtgggtcctccatggtacga

SEQ ID NO: 27381 - DNA, 25 bp, Homo sapien
ttgttgtcggactccggtatgtcac

SEQ ID NO: 27382 - DNA, 25 bp, Homo sapien
ttgttgtcggacaccggtatgtcac

SEQ ID NO: 27383 - DNA, 25 bp, Homo sapien
gtaacctagactaccgtcgttgaga

SEQ ID NO: 27384 - DNA, 25 bp, Homo sapien
gtaacctagacttccgtcgttgaga

SEQ ID NO: 27385 - DNA, 25 bp, Homo sapien
ttctccagactttagtcacagagac

SEQ ID NO: 27386 - DNA, 25 bp, Homo sapien
ttctccagacttaagtcacagagac

SEQ ID NO: 27387 - DNA, 25 bp, Homo sapien
cggaccaagacgactcgaaccacga

SEQ ID NO: 27388 - DNA, 25 bp, Homo sapien
cggaccaagacgtctcgaaccacga

SEQ ID NO: 27389 - DNA, 25 bp, Homo sapien
cagtcagaagagtcggtaaactata

SEQ ID NO: 27390 - DNA, 25 bp, Homo sapien
cagtcagaagagacggtaaactata

SEQ ID NO: 27391 - DNA, 25 bp, Homo sapien
gtcgtcccgaacgtcgtcgacctaa

SEQ ID NO: 27392 - DNA, 25 bp, Homo sapien
gtcgtcccgaacctcgtcgacctaa

SEQ ID NO: 27393 - DNA, 25 bp, Homo sapien
ggacgcggcgacctgagtgtcacac

SEQ ID NO: 27394 - DNA, 25 bp, Homo sapien
ggacgcggcgacgtgagtgtcacac

SEQ ID NO: 27395 - DNA, 25 bp, Homo sapien
gacgtcagacaggtcagagtcctcg

SEQ ID NO: 27396 - DNA, 25 bp, Homo sapien
gacgtcagacagctcagagtcctcg

SEQ ID NO: 27397 - DNA, 25 bp, Homo sapien
acctgtgaggtctcagacaagaact

SEQ ID NO: 27398 - DNA, 25 bp, Homo sapien
acctgtgaggtcacagacaagaact

SEQ ID NO: 27399 - DNA, 25 bp, Homo sapien
gtcctggagttactacagcggtgcc

SEQ ID NO: 27400 - DNA, 25 bp, Homo sapien
gtcctggagttagtacagcggtgcc

SEQ ID NO: 27401 - DNA, 25 bp, Homo sapien
acgttcctagtatacccgacgtgcc

SEQ ID NO: 27402 - DNA, 25 bp, Homo sapien
acgttcctagtaaacccgacgtgcc

SEQ ID NO: 27403 - DNA, 25 bp, Homo sapien
acttccgacaacaaccggtcgtctt

SEQ ID NO: 27404 - DNA, 25 bp, Homo sapien
acttccgacaactaccggtcgtctt

SEQ ID NO: 27405 - DNA, 25 bp, Homo sapien
actcagagacagtaaacgataccct

SEQ ID NO: 27406 - DNA, 25 bp, Homo sapien
actcagagacagaaaacgataccct

SEQ ID NO: 27407 - DNA, 25 bp, Homo sapien
actttagagggtaataacttaacct

SEQ ID NO: 27408 - DNA, 25 bp, Homo sapien
actttagagggttataacttaacct

SEQ ID NO: 27409 - DNA, 25 bp, Homo sapien
tcactagaaaggacccatctgaact

SEQ ID NO: 27410 - DNA, 25 bp, Homo sapien
tcactagaaaggtcccatctgaact

SEQ ID NO: 27411 - DNA, 25 bp, Homo sapien
taactacacgaggtcccagtccaac

SEQ ID NO: 27412 - DNA, 25 bp, Homo sapien
taactacacgagctcccagtccaac

SEQ ID NO: 27413 - DNA, 25 bp, Homo sapien
caacgaagggagacccgaccgagac

SEQ ID NO: 27414 - DNA, 25 bp, Homo sapien
caacgaagggagtcccgaccgagac

SEQ ID NO: 27415 - DNA, 25 bp, Homo sapien
tacaagatgagatattccgaacaga

SEQ ID NO: 27416 - DNA, 25 bp, Homo sapien
tacaagatgagaaattccgaacaga

SEQ ID NO: 27417 - DNA, 25 bp, Homo sapien
tacgagggataaagacgaactgtac

SEQ ID NO: 27418 - DNA, 25 bp, Homo sapien
tacgagggataatgacgaactgtac

SEQ ID NO: 27419 - DNA, 25 bp, Homo sapien
aagtgtgtctacttagagtcatctc

SEQ ID NO: 27420 - DNA, 25 bp, Homo sapien
aagtgtgtctacatagagtcatctc

SEQ ID NO: 27421 - DNA, 25 bp, Homo sapien
gtcacatgtttatacttcgtgtcac

SEQ ID NO: 27422 - DNA, 25 bp, Homo sapien
gtcacatgtttaaacttcgtgtcac

SEQ ID NO: 27423 - DNA, 25 bp, Homo sapien
ggcgaaggtcaaagaggtctagtcc

SEQ ID NO: 27424 - DNA, 25 bp, Homo sapien
ggcgaaggtcaatgaggtctagtcc

SEQ ID NO: 27425 - DNA, 25 bp, Homo sapien
tggtgagaggaacgagtactccgcc

SEQ ID NO: 27426 - DNA, 25 bp, Homo sapien
tggtgagaggaaggagtactccgcc

SEQ ID NO: 27427 - DNA, 25 bp, Homo sapien
tcccggacgtcgagggagaacatgc

SEQ ID NO: 27428 - DNA, 25 bp, Homo sapien
tcccggacgtcgtgggagaacatgc

SEQ ID NO: 27429 - DNA, 25 bp, Homo sapien
gtcggacgtcctgtgaacccggtcg

SEQ ID NO: 27430 - DNA, 25 bp, Homo sapien
gtcggacgtcctctgaacccggtcg

SEQ ID NO: 27431 - DNA, 25 bp, Homo sapien
gtgtactatatacttcactaaagtg

SEQ ID NO: 27432 - DNA, 25 bp, Homo sapien
gtgtactatatagttcactaaagtg

SEQ ID NO: 27433 - DNA, 25 bp, Homo sapien
agggtatactaagctttacaacatt

SEQ ID NO: 27434 - DNA, 25 bp, Homo sapien
agggtatactaacctttacaacatt

SEQ ID NO: 27435 - DNA, 25 bp, Homo sapien
cggaacacggacctctctaaacgac

SEQ ID NO: 27436 - DNA, 25 bp, Homo sapien
cggaacacggacgtctctaaacgac

SEQ ID NO: 27437 - DNA, 25 bp, Homo sapien
cgggggccactatgtgttatgtcgc

SEQ ID NO: 27438 - DNA, 25 bp, Homo sapien
cgggggccactaagtgttatgtcgc

SEQ ID NO: 27439 - DNA, 25 bp, Homo sapien
ggggaagaccccagacgttccttgt

SEQ ID NO: 27440 - DNA, 25 bp, Homo sapien
ggggaagacccctgacgttccttgt

SEQ ID NO: 27441 - DNA, 25 bp, Homo sapien
gatacgttccttgactctcttcgtt

SEQ ID NO: 27442 - DNA, 25 bp, Homo sapien
gatacgttccttcactctcttcgtt

SEQ ID NO: 27443 - DNA, 25 bp, Homo sapien
ggatacgtctcgtttttcatttccc

SEQ ID NO: 27444 - DNA, 25 bp, Homo sapien
ggatacgtctcgattttcatttccc

SEQ ID NO: 27445 - DNA, 25 bp, Homo sapien
aggtttatgtatctgtccctcgtcg

SEQ ID NO: 27446 - DNA, 25 bp, Homo sapien
aggtttatgtatgtgtccctcgtcg

SEQ ID NO: 27447 - DNA, 25 bp, Homo sapien
tcaatgttgtctttttctgactgcg

SEQ ID NO: 27448 - DNA, 25 bp, Homo sapien
tcaatgttgtctatttctgactgcg

SEQ ID NO: 27449 - DNA, 25 bp, Homo sapien
caaggtggtcagtatttggtctact

SEQ ID NO: 27450 - DNA, 25 bp, Homo sapien
caaggtggtcagaatttggtctact

SEQ ID NO: 27451 - DNA, 25 bp, Homo sapien
gacgttgttctccttatagtctctt

SEQ ID NO: 27452 - DNA, 25 bp, Homo sapien
gacgttgttctcgttatagtctctt

SEQ ID NO: 27453 - DNA, 25 bp, Homo sapien
tacgacgaccctggtcctttttccg

SEQ ID NO: 27454 - DNA, 25 bp, Homo sapien
tacgacgaccctcgtcctttttccg

SEQ ID NO: 27455 - DNA, 25 bp, Homo sapien
cacaactcctttcgacgggttgaat

SEQ ID NO: 27456 - DNA, 25 bp, Homo sapien
cacaactcctttggacgggttgaat

SEQ ID NO: 27457 - DNA, 25 bp, Homo sapien
acccgatcactcgacgagtttgtaa

SEQ ID NO: 27458 - DNA, 25 bp, Homo sapien
acccgatcactccacgagtttgtaa

SEQ ID NO: 27459 - DNA, 25 bp, Homo sapien
cccggatcacgtcgaagactcgggg

SEQ ID NO: 27460 - DNA, 25 bp, Homo sapien
cccggatcacgtggaagactcgggg

SEQ ID NO: 27461 - DNA, 25 bp, Homo sapien
tccgatctcttcacgcggctcgggg

SEQ ID NO: 27462 - DNA, 25 bp, Homo sapien
tccgatctcttctcgcggctcgggg

SEQ ID NO: 27463 - DNA, 25 bp, Homo sapien
tcctacttcttgtcccttctgtcgg

SEQ ID NO: 27464 - DNA, 25 bp, Homo sapien
tcctacttcttgacccttctgtcgg

SEQ ID NO: 27465 - DNA, 25 bp, Homo sapien
atacagtactggtccctggtgtagg

SEQ ID NO: 27466 - DNA, 25 bp, Homo sapien
atacagtactggaccctggtgtagg

SEQ ID NO: 27467 - DNA, 25 bp, Homo sapien
gtgtcgtctacctccctgtctaggt

SEQ ID NO: 27468 - DNA, 25 bp, Homo sapien
gtgtcgtctaccaccctgtctaggt

SEQ ID NO: 27469 - DNA, 25 bp, Homo sapien
ccatggtggaaaatctgtgtacgtc

SEQ ID NO: 27470 - DNA, 25 bp, Homo sapien
ccatggtggaaattctgtgtacgtc

SEQ ID NO: 27471 - DNA, 25 bp, Homo sapien
ctctcttcgggcagtggtccgtgca

SEQ ID NO: 27472 - DNA, 25 bp, Homo sapien
ctctcttcgggctgtggtccgtgca

SEQ ID NO: 27473 - DNA, 25 bp, Homo sapien
ccttagaagattaagatcactgtca

SEQ ID NO: 27474 - DNA, 25 bp, Homo sapien
ccttagaagatttagatcactgtca

SEQ ID NO: 27475 - DNA, 25 bp, Homo sapien
agtgcaacgaaggactacgtagtaa

SEQ ID NO: 27476 - DNA, 25 bp, Homo sapien
agtgcaacgaagcactacgtagtaa

SEQ ID NO: 27477 - DNA, 25 bp, Homo sapien
gcgtcgtcgtcgtcctaccgtcagt

SEQ ID NO: 27478 - DNA, 25 bp, Homo sapien
gcgtcgtcgtcgacctaccgtcagt

SEQ ID NO: 27479 - DNA, 25 bp, Homo sapien
ctaggtcgtctcctacttccgacgg

SEQ ID NO: 27480 - DNA, 25 bp, Homo sapien
ctaggtcgtctcgtacttccgacgg

SEQ ID NO: 27481 - DNA, 25 bp, Homo sapien
tgtcgtagtcgttcctcatgacctt

SEQ ID NO: 27482 - DNA, 25 bp, Homo sapien
tgtcgtagtcgtacctcatgacctt

SEQ ID NO: 27483 - DNA, 25 bp, Homo sapien
tgtgtctagcgtccatcgggacctc

SEQ ID NO: 27484 - DNA, 25 bp, Homo sapien
tgtgtctagcgtgcatcgggacctc

SEQ ID NO: 27485 - DNA, 25 bp, Homo sapien
gagtttctttgtcagtacaagacaa

SEQ ID NO: 27486 - DNA, 25 bp, Homo sapien
gagtttctttgtgagtacaagacaa

SEQ ID NO: 27487 - DNA, 25 bp, Homo sapien
ggtgatcttttcacgaaacgacgag

SEQ ID NO: 27488 - DNA, 25 bp, Homo sapien
ggtgatcttttctcgaaacgacgag

SEQ ID NO: 27489 - DNA, 25 bp, Homo sapien
cagtatggagttttttcgactaaac

SEQ ID NO: 27490 - DNA, 25 bp, Homo sapien
cagtatggagttatttcgactaaac

SEQ ID NO: 27491 - DNA, 25 bp, Homo sapien
aaataatagacgacagtgtcattca

SEQ ID NO: 27492 - DNA, 25 bp, Homo sapien
aaataatagacgtcagtgtcattca

SEQ ID NO: 27493 - DNA, 25 bp, Homo sapien
aaggaagtcctaaacacgatgagag

SEQ ID NO: 27494 - DNA, 25 bp, Homo sapien
aaggaagtcctatacacgatgagag

SEQ ID NO: 27495 - DNA, 25 bp, Homo sapien
ttgaggagagccacaagtctacaag

SEQ ID NO: 27496 - DNA, 25 bp, Homo sapien
ttgaggagagcctcaagtctacaag

SEQ ID NO: 27497 - DNA, 25 bp, Homo sapien
tagaactaccacgtatagtccttcg

SEQ ID NO: 27498 - DNA, 25 bp, Homo sapien
tagaactaccacctatagtccttcg

SEQ ID NO: 27499 - DNA, 25 bp, Homo sapien
gtccaactcatcgacgttaaacgtc

SEQ ID NO: 27500 - DNA, 25 bp, Homo sapien
gtccaactcatccacgttaaacgtc

SEQ ID NO: 27501 - DNA, 25 bp, Homo sapien
ttgagtttttacacggttcgtcgtc

SEQ ID NO: 27502 - DNA, 25 bp, Homo sapien
ttgagtttttactcggttcgtcgtc

SEQ ID NO: 27503 - DNA, 25 bp, Homo sapien
ccatagaaatttgtctttgtgtacg

SEQ ID NO: 27504 - DNA, 25 bp, Homo sapien
ccatagaaatttctctttgtgtacg

SEQ ID NO: 27505 - DNA, 25 bp, Homo sapien
ccctttgactctgttctgtttctgc

SEQ ID NO: 27506 - DNA, 25 bp, Homo sapien
ccctttgactctcttctgtttctgc

SEQ ID NO: 27507 - DNA, 25 bp, Homo sapien
tattggactttctggtggtacttgc

SEQ ID NO: 27508 - DNA, 25 bp, Homo sapien
tattggactttcaggtggtacttgc

SEQ ID NO: 27509 - DNA, 25 bp, Homo sapien
aatcgagattgtcaattgtaacttc

SEQ ID NO: 27510 - DNA, 25 bp, Homo sapien
aatcgagattgtgaattgtaacttc

SEQ ID NO: 27511 - DNA, 25 bp, Homo sapien
tacagaatggttcagtatcgaccaa

SEQ ID NO: 27512 - DNA, 25 bp, Homo sapien
tacagaatggttgagtatcgaccaa

SEQ ID NO: 27513 - DNA, 25 bp, Homo sapien
gtttcaggtctgagtctctcccgta

SEQ ID NO: 27514 - DNA, 25 bp, Homo sapien
gtttcaggtctgtgtctctcccgta

SEQ ID NO: 27515 - DNA, 25 bp, Homo sapien
tttctcaagcggaaggacatcacta

SEQ ID NO: 27516 - DNA, 25 bp, Homo sapien
tttctcaagcggtaggacatcacta

SEQ ID NO: 27517 - DNA, 25 bp, Homo sapien
aattcagatatgtacggacattgac

SEQ ID NO: 27518 - DNA, 25 bp, Homo sapien
aattcagatatgaacggacattgac

SEQ ID NO: 27519 - DNA, 25 bp, Homo sapien
gtaatataagactcatcaaaaggac

SEQ ID NO: 27520 - DNA, 25 bp, Homo sapien
gtaatataagacacatcaaaaggac

SEQ ID NO: 27521 - DNA, 25 bp, Homo sapien
taacggaacactcagtaaagtcact

SEQ ID NO: 27522 - DNA, 25 bp, Homo sapien
taacggaacactgagtaaagtcact

SEQ ID NO: 27523 - DNA, 25 bp, Homo sapien
agtgtcgcacacctccagtactgac

SEQ ID NO: 27524 - DNA, 25 bp, Homo sapien
agtgtcgcacacgtccagtactgac

SEQ ID NO: 27525 - DNA, 25 bp, Homo sapien
gagtcgtcgcaaaactactaaggac

SEQ ID NO: 27526 - DNA, 25 bp, Homo sapien
gagtcgtcgcaatactactaaggac

SEQ ID NO: 27527 - DNA, 25 bp, Homo sapien
ggtgacccgggatcacacataagag

SEQ ID NO: 27528 - DNA, 25 bp, Homo sapien
ggtgacccgggaacacacataagag

SEQ ID NO: 27529 - DNA, 25 bp, Homo sapien
cagtgaccacggtgaccccgaggac

SEQ ID NO: 27530 - DNA, 25 bp, Homo sapien
cagtgaccacggagaccccgaggac

SEQ ID NO: 27531 - DNA, 25 bp, Homo sapien
tcccggagacaccaccgtgtgtcgt

SEQ ID NO: 27532 - DNA, 25 bp, Homo sapien
tcccggagacacgaccgtgtgtcgt

SEQ ID NO: 27533 - DNA, 25 bp, Homo sapien
gttctaaaccagatgaatccgtagg

SEQ ID NO: 27534 - DNA, 25 bp, Homo sapien
gttctaaaccagttgaatccgtagg

SEQ ID NO: 27535 - DNA, 25 bp, Homo sapien
cagaacgcgtgtagtttcgacggtg

SEQ ID NO: 27536 - DNA, 25 bp, Homo sapien
cagaacgcgtgttgtttcgacggtg

SEQ ID NO: 27537 - DNA, 25 bp, Homo sapien
aggagagttcccttatttagtatcc

SEQ ID NO: 27538 - DNA, 25 bp, Homo sapien
aggagagttcccatatttagtatcc

SEQ ID NO: 27539 - DNA, 25 bp, Homo sapien
gtagtattggacaatcttacgttca

SEQ ID NO: 27540 - DNA, 25 bp, Homo sapien
gtagtattggactatcttacgttca

SEQ ID NO: 27541 - DNA, 25 bp, Homo sapien
ggtattcggtcctttccctacggac

SEQ ID NO: 27542 - DNA, 25 bp, Homo sapien
ggtattcggtccattccctacggac

SEQ ID NO: 27543 - DNA, 25 bp, Homo sapien
gggtcagagtggacctacgccctga

SEQ ID NO: 27544 - DNA, 25 bp, Homo sapien
gggtcagagtggtcctacgccctga

SEQ ID NO: 27545 - DNA, 25 bp, Homo sapien
ccctacggggtgcagacacgacgga

SEQ ID NO: 27546 - DNA, 25 bp, Homo sapien
ccctacggggtggagacacgacgga

SEQ ID NO: 27547 - DNA, 25 bp, Homo sapien
ccaccggtatgtttagattcggtca

SEQ ID NO: 27548 - DNA, 25 bp, Homo sapien
ccaccggtatgtatagattcggtca

SEQ ID NO: 27549 - DNA, 25 bp, Homo sapien
agccaccggtggtacaacccgtgca

SEQ ID NO: 27550 - DNA, 25 bp, Homo sapien
agccaccggtggaacaacccgtgca

SEQ ID NO: 27551 - DNA, 25 bp, Homo sapien
gacaagactctggaacacaaaccca

SEQ ID NO: 27552 - DNA, 25 bp, Homo sapien
gacaagactctgcaacacaaaccca

SEQ ID NO: 27553 - DNA, 25 bp, Homo sapien
gaatcagtctggaaccagaagaaca

SEQ ID NO: 27554 - DNA, 25 bp, Homo sapien
gaatcagtctggtaccagaagaaca

SEQ ID NO: 27555 - DNA, 25 bp, Homo sapien
aatcatatgtcgtcactaaaagaga

SEQ ID NO: 27556 - DNA, 25 bp, Homo sapien
aatcatatgtcgacactaaaagaga

SEQ ID NO: 27557 - DNA, 25 bp, Homo sapien
tcagtattttaccttagcgaggtac

SEQ ID NO: 27558 - DNA, 25 bp, Homo sapien
tcagtattttacgttagcgaggtac

SEQ ID NO: 27559 - DNA, 25 bp, Homo sapien
cagtaatatctataacgacgtgaca

SEQ ID NO: 27560 - DNA, 25 bp, Homo sapien
cagtaatatctaaaacgacgtgaca

SEQ ID NO: 27561 - DNA, 25 bp, Homo sapien
attattaagaggatcacagaccgaa

SEQ ID NO: 27562 - DNA, 25 bp, Homo sapien
attattaagaggttcacagaccgaa

SEQ ID NO: 27563 - DNA, 25 bp, Homo sapien
attagagttatacgtcagaccgaca

SEQ ID NO: 27564 - DNA, 25 bp, Homo sapien
attagagttataggtcagaccgaca

SEQ ID NO: 27565 - DNA, 25 bp, Homo sapien
tgatatgtgaaaggtgacgtccgcc

SEQ ID NO: 27566 - DNA, 25 bp, Homo sapien
tgatatgtgaaacgtgacgtccgcc

SEQ ID NO: 27567 - DNA, 25 bp, Homo sapien
gtaaaggaagaacgactatccgaac

SEQ ID NO: 27568 - DNA, 25 bp, Homo sapien
gtaaaggaagaaggactatccgaac

SEQ ID NO: 27569 - DNA, 25 bp, Homo sapien
ccgaaagatttatcggaactcagaa

SEQ ID NO: 27570 - DNA, 25 bp, Homo sapien
ccgaaagatttaacggaactcagaa

SEQ ID NO: 27571 - DNA, 25 bp, Homo sapien
agacatttttgaactagatccaaag

SEQ ID NO: 27572 - DNA, 25 bp, Homo sapien
agacatttttgatctagatccaaag

SEQ ID NO: 27573 - DNA, 25 bp, Homo sapien
acagtttaatagtcttcctgaaagt

SEQ ID NO: 27574 - DNA, 25 bp, Homo sapien
acagtttaatagacttcctgaaagt

SEQ ID NO: 27575 - DNA, 25 bp, Homo sapien
agattcaacgattccactattaggt

SEQ ID NO: 27576 - DNA, 25 bp, Homo sapien
agattcaacgataccactattaggt

SEQ ID NO: 27577 - DNA, 25 bp, Homo sapien
ctgagggacccgaacaccttcatct

SEQ ID NO: 27578 - DNA, 25 bp, Homo sapien
ctgagggacccgtacaccttcatct

SEQ ID NO: 27579 - DNA, 25 bp, Homo sapien
gagtcgaccgaggtttttacagaga

SEQ ID NO: 27580 - DNA, 25 bp, Homo sapien
gagtcgaccgagctttttacagaga

SEQ ID NO: 27581 - DNA, 25 bp, Homo sapien
aaagtgacacattatcctgtgtaaa

SEQ ID NO: 27582 - DNA, 25 bp, Homo sapien
aaagtgacacataatcctgtgtaaa

SEQ ID NO: 27583 - DNA, 25 bp, Homo sapien
caggtacaagagtcgggtagtcgaa

SEQ ID NO: 27584 - DNA, 25 bp, Homo sapien
caggtacaagagacgggtagtcgaa

SEQ ID NO: 27585 - DNA, 25 bp, Homo sapien
tcccgtccagtaagagtccgacgca

SEQ ID NO: 27586 - DNA, 25 bp, Homo sapien
tcccgtccagtatgagtccgacgca

SEQ ID NO: 27587 - DNA, 25 bp, Homo sapien
acaccggaagttgagtttacctacg

SEQ ID NO: 27588 - DNA, 25 bp, Homo sapien
acaccggaagttcagtttacctacg

SEQ ID NO: 27589 - DNA, 25 bp, Homo sapien
acgtcaggaggttccgatccggtcg

SEQ ID NO: 27590 - DNA, 25 bp, Homo sapien
acgtcaggaggtaccgatccggtcg

SEQ ID NO: 27591 - DNA, 25 bp, Homo sapien
gaggaacaagattccggagacaaga

SEQ ID NO: 27592 - DNA, 25 bp, Homo sapien
gaggaacaagataccggagacaaga

SEQ ID NO: 27593 - DNA, 25 bp, Homo sapien
cactaacggattctcggggacgaac

SEQ ID NO: 27594 - DNA, 25 bp, Homo sapien
cactaacggattgtcggggacgaac

SEQ ID NO: 27595 - DNA, 25 bp, Homo sapien
ccttcgacatctataccgtgtgaaa

SEQ ID NO: 27596 - DNA, 25 bp, Homo sapien
ccttcgacatctttaccgtgtgaaa

SEQ ID NO: 27597 - DNA, 25 bp, Homo sapien
ccacccgacttgacctagtgcgaga

SEQ ID NO: 27598 - DNA, 25 bp, Homo sapien
ccacccgacttgtcctagtgcgaga

SEQ ID NO: 27599 - DNA, 25 bp, Homo sapien
cgcccggaacagacggaagtcgaac

SEQ ID NO: 27600 - DNA, 25 bp, Homo sapien
cgcccggaacagtcggaagtcgaac

SEQ ID NO: 27601 - DNA, 25 bp, Homo sapien
tctcggaacacaagcgagggtccgt

SEQ ID NO: 27602 - DNA, 25 bp, Homo sapien
tctcggaacacatgcgagggtccgt

SEQ ID NO: 27603 - DNA, 25 bp, Homo sapien
acacagacgacgaccgggcgcacga

SEQ ID NO: 27604 - DNA, 25 bp, Homo sapien
acacagacgacgtccgggcgcacga

SEQ ID NO: 27605 - DNA, 25 bp, Homo sapien
tttacacagggtctaggtgcaggtg

SEQ ID NO: 27606 - DNA, 25 bp, Homo sapien
tttacacagggtgtaggtgcaggtg

SEQ ID NO: 27607 - DNA, 25 bp, Homo sapien
tgacagaggtcgtcgaggaagtagg

SEQ ID NO: 27608 - DNA, 25 bp, Homo sapien
tgacagaggtcgacgaggaagtagg

SEQ ID NO: 27609 - DNA, 25 bp, Homo sapien
aggggcgacgtcgggggcgtgagga

SEQ ID NO: 27610 - DNA, 25 bp, Homo sapien
aggggcgacgtccggggcgtgagga

SEQ ID NO: 27611 - DNA, 25 bp, Homo sapien
cgcggaggcccgaaggaccgcaaca

SEQ ID NO: 27612 - DNA, 25 bp, Homo sapien
cgcggaggcccgtaggaccgcaaca

SEQ ID NO: 27613 - DNA, 25 bp, Homo sapien
ggtccagcaaaggacacactctcat

SEQ ID NO: 27614 - DNA, 25 bp, Homo sapien
ggtccagcaaagcacacactctcat

SEQ ID NO: 27615 - DNA, 25 bp, Homo sapien
gtgtcccgtcaaatcctacgtcaac

SEQ ID NO: 27616 - DNA, 25 bp, Homo sapien
gtgtcccgtcaattcctacgtcaac

SEQ ID NO: 27617 - DNA, 25 bp, Homo sapien
tcacatccacttcgtcgtgagactc

SEQ ID NO: 27618 - DNA, 25 bp, Homo sapien
tcacatccacttggtcgtgagactc

SEQ ID NO: 27619 - DNA, 25 bp, Homo sapien
ttccacgacggctcgggtggtacgc

SEQ ID NO: 27620 - DNA, 25 bp, Homo sapien
ttccacgacggcacgggtggtacgc

SEQ ID NO: 27621 - DNA, 25 bp, Homo sapien
tcgttgtagtggtccgacggttccg

SEQ ID NO: 27622 - DNA, 25 bp, Homo sapien
tcgttgtagtggaccgacggttccg

SEQ ID NO: 27623 - DNA, 25 bp, Homo sapien
cacctttacgtagtttcaggactca

SEQ ID NO: 27624 - DNA, 25 bp, Homo sapien
cacctttacgtactttcaggactca

SEQ ID NO: 27625 - DNA, 25 bp, Homo sapien
atttattgacatggtcacgaaacga

SEQ ID NO: 27626 - DNA, 25 bp, Homo sapien
atttattgacatcgtcacgaaacga

SEQ ID NO: 27627 - DNA, 25 bp, Homo sapien
cagtggtaccgaaccccgaaggagt

SEQ ID NO: 27628 - DNA, 25 bp, Homo sapien
cagtggtaccgatccccgaaggagt

SEQ ID NO: 27629 - DNA, 25 bp, Homo sapien
tcctcggtgatgacggacaacagaa

SEQ ID NO: 27630 - DNA, 25 bp, Homo sapien
tcctcggtgatgtcggacaacagaa

SEQ ID NO: 27631 - DNA, 25 bp, Homo sapien
tgcaggagacaccagaacagatagt

SEQ ID NO: 27632 - DNA, 25 bp, Homo sapien
tgcaggagacacgagaacagatagt

SEQ ID NO: 27633 - DNA, 25 bp, Homo sapien
tgagacgaaaacctacgaagagcct

SEQ ID NO: 27634 - DNA, 25 bp, Homo sapien
tgagacgaaaacgtacgaagagcct

SEQ ID NO: 27635 - DNA, 25 bp, Homo sapien
tacacaaaaacgtacgaacggacct

SEQ ID NO: 27636 - DNA, 25 bp, Homo sapien
tacacaaaaacgaacgaacggacct

SEQ ID NO: 27637 - DNA, 25 bp, Homo sapien
ggtaacaagtaacgagaaaccaccg

SEQ ID NO: 27638 - DNA, 25 bp, Homo sapien
ggtaacaagtaaggagaaaccaccg

SEQ ID NO: 27639 - DNA, 25 bp, Homo sapien
gccacaacaccaaggaatctaatcg

SEQ ID NO: 27640 - DNA, 25 bp, Homo sapien
gccacaacaccatggaatctaatcg

SEQ ID NO: 27641 - DNA, 25 bp, Homo sapien
cccacggaacccagggaagtcatcg

SEQ ID NO: 27642 - DNA, 25 bp, Homo sapien
cccacggaaccctgggaagtcatcg

SEQ ID NO: 27643 - DNA, 25 bp, Homo sapien
cagaaactactaggtctagacgaaa

SEQ ID NO: 27644 - DNA, 25 bp, Homo sapien
cagaaactactacgtctagacgaaa

SEQ ID NO: 27645 - DNA, 25 bp, Homo sapien
agtctgtctcggtgtacgtccgaca

SEQ ID NO: 27646 - DNA, 25 bp, Homo sapien
agtctgtctcggagtacgtccgaca

SEQ ID NO: 27647 - DNA, 25 bp, Homo sapien
ctatagtgtttccaagaagtgacac

SEQ ID NO: 27648 - DNA, 25 bp, Homo sapien
ctatagtgtttcgaagaagtgacac

SEQ ID NO: 27649 - DNA, 25 bp, Homo sapien
tctgaagtcacgaacctacatcgtc

SEQ ID NO: 27650 - DNA, 25 bp, Homo sapien
tctgaagtcacgtacctacatcgtc

SEQ ID NO: 27651 - DNA, 25 bp, Homo sapien
tctccgagacgacggtccaatcgtc

SEQ ID NO: 27652 - DNA, 25 bp, Homo sapien
tctccgagacgagggtccaatcgtc

SEQ ID NO: 27653 - DNA, 25 bp, Homo sapien
gtctcatagagagagtactaccaaa

SEQ ID NO: 27654 - DNA, 25 bp, Homo sapien
gtctcatagagacagtactaccaaa

SEQ ID NO: 27655 - DNA, 25 bp, Homo sapien
tttccagtggtgattctacatcata

SEQ ID NO: 27656 - DNA, 25 bp, Homo sapien
tttccagtggtgtttctacatcata

SEQ ID NO: 27657 - DNA, 25 bp, Homo sapien
tgtctggtaggacttcaagtgaccg

SEQ ID NO: 27658 - DNA, 25 bp, Homo sapien
tgtctggtaggagttcaagtgaccg

SEQ ID NO: 27659 - DNA, 25 bp, Homo sapien
ggtagtctattcttacagttgtacc

SEQ ID NO: 27660 - DNA, 25 bp, Homo sapien
ggtagtctattcatacagttgtacc

SEQ ID NO: 27661 - DNA, 25 bp, Homo sapien
atgtaagaacggtccagatctactc

SEQ ID NO: 27662 - DNA, 25 bp, Homo sapien
atgtaagaacggaccagatctactc

SEQ ID NO: 27663 - DNA, 25 bp, Homo sapien
gaaacacgagtgtcccggatctcct

SEQ ID NO: 27664 - DNA, 25 bp, Homo sapien
gaaacacgagtgacccggatctcct

SEQ ID NO: 27665 - DNA, 25 bp, Homo sapien
ggaacaaaagacaggacgattctcc

SEQ ID NO: 27666 - DNA, 25 bp, Homo sapien
ggaacaaaagactggacgattctcc

SEQ ID NO: 27667 - DNA, 25 bp, Homo sapien
taaagtaatcatcagagtattcccg

SEQ ID NO: 27668 - DNA, 25 bp, Homo sapien
taaagtaatcatgagagtattcccg

SEQ ID NO: 27669 - DNA, 25 bp, Homo sapien
ccaacaggaacgagtaattccctct

SEQ ID NO: 27670 - DNA, 25 bp, Homo sapien
ccaacaggaacgtgtaattccctct

SEQ ID NO: 27671 - DNA, 25 bp, Homo sapien
tacacaggaaggatacctctgcttc

SEQ ID NO: 27672 - DNA, 25 bp, Homo sapien
tacacaggaaggttacctctgcttc

SEQ ID NO: 27673 - DNA, 25 bp, Homo sapien
gcacaggtctattcctctgcgtcac

SEQ ID NO: 27674 - DNA, 25 bp, Homo sapien
gcacaggtctatacctctgcgtcac

SEQ ID NO: 27675 - DNA, 25 bp, Homo sapien
gcgtcggcgacagcaggctgctcat

SEQ ID NO: 27676 - DNA, 25 bp, Homo sapien
gcgtcggcgacaccaggctgctcat

SEQ ID NO: 27677 - DNA, 25 bp, Homo sapien
ccaccctgcagtggtggcgtccttt

SEQ ID NO: 27678 - DNA, 25 bp, Homo sapien
ccaccctgcagtcgtggcgtccttt

SEQ ID NO: 27679 - DNA, 25 bp, Homo sapien
catattgcatagtgtagatctcttt

SEQ ID NO: 27680 - DNA, 25 bp, Homo sapien
catattgcatagagtagatctcttt

SEQ ID NO: 27681 - DNA, 25 bp, Homo sapien
gataatctctaccaacagtgttttg

SEQ ID NO: 27682 - DNA, 25 bp, Homo sapien
gataatctctacgaacagtgttttg

SEQ ID NO: 27683 - DNA, 25 bp, Homo sapien
ccgaaaggttgacacagggtacttg

SEQ ID NO: 27684 - DNA, 25 bp, Homo sapien
ccgaaaggttgagacagggtacttg

SEQ ID NO: 27685 - DNA, 25 bp, Homo sapien
aaaacttcagacataggacacaacg

SEQ ID NO: 27686 - DNA, 25 bp, Homo sapien
aaaacttcagacttaggacacaacg

SEQ ID NO: 27687 - DNA, 25 bp, Homo sapien
aaataacccgtagtcgcgaccacac

SEQ ID NO: 27688 - DNA, 25 bp, Homo sapien
aaataacccgtactcgcgaccacac

SEQ ID NO: 27689 - DNA, 25 bp, Homo sapien
tacagtaaaattgtgactccgtagg

SEQ ID NO: 27690 - DNA, 25 bp, Homo sapien
tacagtaaaattctgactccgtagg

SEQ ID NO: 27691 - DNA, 25 bp, Homo sapien
ttaagttttcatcttacccgtagag

SEQ ID NO: 27692 - DNA, 25 bp, Homo sapien
ttaagttttcatgttacccgtagag

SEQ ID NO: 27693 - DNA, 25 bp, Homo sapien
cgttattgacgttgtcagaccgatt

SEQ ID NO: 27694 - DNA, 25 bp, Homo sapien
cgttattgacgtagtcagaccgatt

SEQ ID NO: 27695 - DNA, 25 bp, Homo sapien
tataactagagacgactaacgaatt

SEQ ID NO: 27696 - DNA, 25 bp, Homo sapien
tataactagagaggactaacgaatt

SEQ ID NO: 27697 - DNA, 25 bp, Homo sapien
gacaaacgtcgttgtactaaaatgt

SEQ ID NO: 27698 - DNA, 25 bp, Homo sapien
gacaaacgtcgtagtactaaaatgt

SEQ ID NO: 27699 - DNA, 25 bp, Homo sapien
gactatcctcgtctccgttatatgt

SEQ ID NO: 27700 - DNA, 25 bp, Homo sapien
gactatcctcgtgtccgttatatgt

SEQ ID NO: 27701 - DNA, 25 bp, Homo sapien
tcgttaccgacctgctcttacttcg

SEQ ID NO: 27702 - DNA, 25 bp, Homo sapien
tcgttaccgaccagctcttacttcg

SEQ ID NO: 27703 - DNA, 25 bp, Homo sapien
ctctagacacacaactcgtcaagtg

SEQ ID NO: 27704 - DNA, 25 bp, Homo sapien
ctctagacacactactcgtcaagtg

SEQ ID NO: 27705 - DNA, 25 bp, Homo sapien
tgtgtaccgcgacagtcctatgtgt

SEQ ID NO: 27706 - DNA, 25 bp, Homo sapien
tgtgtaccgcgagagtcctatgtgt

SEQ ID NO: 27707 - DNA, 25 bp, Homo sapien
gttacgtcgtgtacgatctttgtct

SEQ ID NO: 27708 - DNA, 25 bp, Homo sapien
gttacgtcgtgttcgatctttgtct

SEQ ID NO: 27709 - DNA, 25 bp, Homo sapien
gtgtaagtaaattcgatctgtctgc

SEQ ID NO: 27710 - DNA, 25 bp, Homo sapien
gtgtaagtaaatacgatctgtctgc

SEQ ID NO: 27711 - DNA, 25 bp, Homo sapien
cgtcttaagaaatcctgttagtttt

SEQ ID NO: 27712 - DNA, 25 bp, Homo sapien
cgtcttaagaaaacctgttagtttt

SEQ ID NO: 27713 - DNA, 25 bp, Homo sapien
gttttttaatccatcagtaaaatgt

SEQ ID NO: 27714 - DNA, 25 bp, Homo sapien
gttttttaatccttcagtaaaatgt

SEQ ID NO: 27715 - DNA, 25 bp, Homo sapien
agtctctggtgtcgaccccaatatt

SEQ ID NO: 27716 - DNA, 25 bp, Homo sapien
agtctctggtgtggaccccaatatt

SEQ ID NO: 27717 - DNA, 25 bp, Homo sapien
aacacgaggaggtcgcacactcaga

SEQ ID NO: 27718 - DNA, 25 bp, Homo sapien
aacacgaggaggacgcacactcaga

SEQ ID NO: 27719 - DNA, 25 bp, Homo sapien
ctctatcacgggaccgggacccgaa

SEQ ID NO: 27720 - DNA, 25 bp, Homo sapien
ctctatcacgggtccgggacccgaa

SEQ ID NO: 27721 - DNA, 25 bp, Homo sapien
acctacaaggtctccggagacccaa

SEQ ID NO: 27722 - DNA, 25 bp, Homo sapien
acctacaaggtcaccggagacccaa

SEQ ID NO: 27723 - DNA, 25 bp, Homo sapien
tacatgttcgtttaaatctcgagaa

SEQ ID NO: 27724 - DNA, 25 bp, Homo sapien
tacatgttcgttaaaatctcgagaa

SEQ ID NO: 27725 - DNA, 25 bp, Homo sapien
aatgtcaaagaaagtctaccgtata

SEQ ID NO: 27726 - DNA, 25 bp, Homo sapien
aatgtcaaagaatgtctaccgtata

SEQ ID NO: 27727 - DNA, 25 bp, Homo sapien
gtttctgtaagtctgtctcggtgta

SEQ ID NO: 27728 - DNA, 25 bp, Homo sapien
gtttctgtaagtgtgtctcggtgta

SEQ ID NO: 27729 - DNA, 25 bp, Homo sapien
aatgacgagttttctcacgtacgta

SEQ ID NO: 27730 - DNA, 25 bp, Homo sapien
aatgacgagtttactcacgtacgta

SEQ ID NO: 27731 - DNA, 25 bp, Homo sapien
cagacgatgaatgttctaacagtat

SEQ ID NO: 27732 - DNA, 25 bp, Homo sapien
cagacgatgaatcttctaacagtat

SEQ ID NO: 27733 - DNA, 25 bp, Homo sapien
agtcgaaggatcccactcctagtct

SEQ ID NO: 27734 - DNA, 25 bp, Homo sapien
agtcgaaggatcgcactcctagtct

SEQ ID NO: 27735 - DNA, 25 bp, Homo sapien
caaatagtcgtgttgatctgactta

SEQ ID NO: 27736 - DNA, 25 bp, Homo sapien
caaatagtcgtgatgatctgactta

SEQ ID NO: 27737 - DNA, 25 bp, Homo sapien
ctgaaggattcaagatacatatcta

SEQ ID NO: 27738 - DNA, 25 bp, Homo sapien
ctgaaggattcatgatacatatcta

SEQ ID NO: 27739 - DNA, 25 bp, Homo sapien
gatataacgttcgtgttctgtacca

SEQ ID NO: 27740 - DNA, 25 bp, Homo sapien
gatataacgttcctgttctgtacca

SEQ ID NO: 27741 - DNA, 25 bp, Homo sapien
tgtcacctgtcctggatctactcct

SEQ ID NO: 27742 - DNA, 25 bp, Homo sapien
tgtcacctgtccaggatctactcct

SEQ ID NO: 27743 - DNA, 25 bp, Homo sapien
ggggtcccatatccgtcttcagttt

SEQ ID NO: 27744 - DNA, 25 bp, Homo sapien
ggggtcccatatgcgtcttcagttt

SEQ ID NO: 27745 - DNA, 25 bp, Homo sapien
gggagacgtgatgacatgacttgtc

SEQ ID NO: 27746 - DNA, 25 bp, Homo sapien
gggagacgtgatcacatgacttgtc

SEQ ID NO: 27747 - DNA, 25 bp, Homo sapien
ccacttctgcggtcacctgaggtgc

SEQ ID NO: 27748 - DNA, 25 bp, Homo sapien
ccacttctgcggacacctgaggtgc

SEQ ID NO: 27749 - DNA, 25 bp, Homo sapien
catctgtctgaccacttcggggtcg

SEQ ID NO: 27750 - DNA, 25 bp, Homo sapien
catctgtctgacgacttcggggtcg

SEQ ID NO: 27751 - DNA, 25 bp, Homo sapien
cgatagttccttcgtttcgtgaatg

SEQ ID NO: 27752 - DNA, 25 bp, Homo sapien
cgatagttccttggtttcgtgaatg

SEQ ID NO: 27753 - DNA, 25 bp, Homo sapien
aataaccgtacgtttcgttacaccg

SEQ ID NO: 27754 - DNA, 25 bp, Homo sapien
aataaccgtacgattcgttacaccg

SEQ ID NO: 27755 - DNA, 25 bp, Homo sapien
cgaactgaccttctacagtagacga

SEQ ID NO: 27756 - DNA, 25 bp, Homo sapien
cgaactgaccttgtacagtagacga

SEQ ID NO: 27757 - DNA, 25 bp, Homo sapien
cgaagttcggtttcataagacaact

SEQ ID NO: 27758 - DNA, 25 bp, Homo sapien
cgaagttcggttacataagacaact

SEQ ID NO: 27759 - DNA, 25 bp, Homo sapien
cggagtcttagatttcaacagttaa

SEQ ID NO: 27760 - DNA, 25 bp, Homo sapien
cggagtcttagaattcaacagttaa

SEQ ID NO: 27761 - DNA, 25 bp, Homo sapien
ccatttcgacacgttagacattaga

SEQ ID NO: 27762 - DNA, 25 bp, Homo sapien
ccatttcgacaccttagacattaga

SEQ ID NO: 27763 - DNA, 25 bp, Homo sapien
cctttagtggtcaattaacatgtaa

SEQ ID NO: 27764 - DNA, 25 bp, Homo sapien
cctttagtggtctattaacatgtaa

SEQ ID NO: 27765 - DNA, 25 bp, Homo sapien
actccaaggtttttcaatgtcgtag

SEQ ID NO: 27766 - DNA, 25 bp, Homo sapien
actccaaggtttatcaatgtcgtag

SEQ ID NO: 27767 - DNA, 25 bp, Homo sapien
acgtccgacattgtcaaagattata

SEQ ID NO: 27768 - DNA, 25 bp, Homo sapien
acgtccgacattctcaaagattata

SEQ ID NO: 27769 - DNA, 25 bp, Homo sapien
gtgagtccgagatgtgcaactaata

SEQ ID NO: 27770 - DNA, 25 bp, Homo sapien
gtgagtccgagaagtgcaactaata

SEQ ID NO: 27771 - DNA, 25 bp, Homo sapien
tgggtctaaggttcggacaaatatc

SEQ ID NO: 27772 - DNA, 25 bp, Homo sapien
tgggtctaaggtacggacaaatatc

SEQ ID NO: 27773 - DNA, 25 bp, Homo sapien
gagttttatcgtcataagacaaatc

SEQ ID NO: 27774 - DNA, 25 bp, Homo sapien
gagttttatcgtgataagacaaatc

SEQ ID NO: 27775 - DNA, 25 bp, Homo sapien
ggtggtatcgtcagtaaaacatatc

SEQ ID NO: 27776 - DNA, 25 bp, Homo sapien
ggtggtatcgtctgtaaaacatatc

SEQ ID NO: 27777 - DNA, 25 bp, Homo sapien
gaagtagtatctcatactgaccccc

SEQ ID NO: 27778 - DNA, 25 bp, Homo sapien
gaagtagtatctgatactgaccccc

SEQ ID NO: 27779 - DNA, 25 bp, Homo sapien
tgatcgacactgaaggtgaacctcc

SEQ ID NO: 27780 - DNA, 25 bp, Homo sapien
tgatcgacactgtaggtgaacctcc

SEQ ID NO: 27781 - DNA, 25 bp, Homo sapien
tggactggcagttggtcatccgtcc

SEQ ID NO: 27782 - DNA, 25 bp, Homo sapien
tggactggcagtaggtcatccgtcc

SEQ ID NO: 27783 - DNA, 25 bp, Homo sapien
cgactctgggaagaagtactgtctc

SEQ ID NO: 27784 - DNA, 25 bp, Homo sapien
cgactctgggaacaagtactgtctc

SEQ ID NO: 27785 - DNA, 25 bp, Homo sapien
agcctcgacggtacgccagttgcga

SEQ ID NO: 27786 - DNA, 25 bp, Homo sapien
agcctcgacggttcgccagttgcga

SEQ ID NO: 27787 - DNA, 25 bp, Homo sapien
ccgacgacaatagtccacgcaggag

SEQ ID NO: 27788 - DNA, 25 bp, Homo sapien
ccgacgacaatactccacgcaggag

SEQ ID NO: 27789 - DNA, 25 bp, Homo sapien
ggtacaaaacaggtcacgacctacg

SEQ ID NO: 27790 - DNA, 25 bp, Homo sapien
ggtacaaaacagctcacgacctacg

SEQ ID NO: 27791 - DNA, 25 bp, Homo sapien
ggaaggtacaacaagaatcctccac

SEQ ID NO: 27792 - DNA, 25 bp, Homo sapien
ggaaggtacaactagaatcctccac

SEQ ID NO: 27793 - DNA, 25 bp, Homo sapien
cgggtgtcacgctagatccctcttt

SEQ ID NO: 27794 - DNA, 25 bp, Homo sapien
cgggtgtcacgcaagatccctcttt

SEQ ID NO: 27795 - DNA, 25 bp, Homo sapien
gagggatctaggaagatcctttacc

SEQ ID NO: 27796 - DNA, 25 bp, Homo sapien
gagggatctaggtagatcctttacc

SEQ ID NO: 27797 - DNA, 25 bp, Homo sapien
aggtaaatgaattagtgtcttcacc

SEQ ID NO: 27798 - DNA, 25 bp, Homo sapien
aggtaaatgaataagtgtcttcacc

SEQ ID NO: 27799 - DNA, 25 bp, Homo sapien
aagaacaggtcaaagtgctcccacg

SEQ ID NO: 27800 - DNA, 25 bp, Homo sapien
aagaacaggtcatagtgctcccacg

SEQ ID NO: 27801 - DNA, 25 bp, Homo sapien
aagaacggaccacagtcctgtccct

SEQ ID NO: 27802 - DNA, 25 bp, Homo sapien
aagaacggaccagagtcctgtccct

SEQ ID NO: 27803 - DNA, 25 bp, Homo sapien
acgtaggaagtacctcgggggttcc

SEQ ID NO: 27804 - DNA, 25 bp, Homo sapien
acgtaggaagtagctcgggggttcc

SEQ ID NO: 27805 - DNA, 25 bp, Homo sapien
tcctaggggacgtgggagtcctctt

SEQ ID NO: 27806 - DNA, 25 bp, Homo sapien
tcctaggggacgagggagtcctctt

SEQ ID NO: 27807 - DNA, 25 bp, Homo sapien
cgttatggacgtaacgaattttctt

SEQ ID NO: 27808 - DNA, 25 bp, Homo sapien
cgttatggacgttacgaattttctt

SEQ ID NO: 27809 - DNA, 25 bp, Homo sapien
cgagtcggcataagtacttcactgg

SEQ ID NO: 27810 - DNA, 25 bp, Homo sapien
cgagtcggcatatgtacttcactgg

SEQ ID NO: 27811 - DNA, 25 bp, Homo sapien
gttcgagtcttccattgacgtgtgt

SEQ ID NO: 27812 - DNA, 25 bp, Homo sapien
gttcgagtcttcgattgacgtgtgt

SEQ ID NO: 27813 - DNA, 25 bp, Homo sapien
tgttacgaggtcctatggtgtacgg

SEQ ID NO: 27814 - DNA, 25 bp, Homo sapien
tgttacgaggtcgtatggtgtacgg

SEQ ID NO: 27815 - DNA, 25 bp, Homo sapien
atttatgcccgtacgaggtcgtgtc

SEQ ID NO: 27816 - DNA, 25 bp, Homo sapien
atttatgcccgttcgaggtcgtgtc

SEQ ID NO: 27817 - DNA, 25 bp, Homo sapien
ttagtcgacctctgtgtggcgtgtt

SEQ ID NO: 27818 - DNA, 25 bp, Homo sapien
ttagtcgacctcagtgtggcgtgtt

SEQ ID NO: 27819 - DNA, 25 bp, Homo sapien
atctcagtcttcagttgtggtaggt

SEQ ID NO: 27820 - DNA, 25 bp, Homo sapien
atctcagtcttctgttgtggtaggt

SEQ ID NO: 27821 - DNA, 25 bp, Homo sapien
cccaattgatagtctttcacttagg

SEQ ID NO: 27822 - DNA, 25 bp, Homo sapien
cccaattgatagactttcacttagg

SEQ ID NO: 27823 - DNA, 25 bp, Homo sapien
cccaatgtaaaacgttccacatggt

SEQ ID NO: 27824 - DNA, 25 bp, Homo sapien
cccaatgtaaaaggttccacatggt

SEQ ID NO: 27825 - DNA, 25 bp, Homo sapien
actccagtaaagattactccaaggg

SEQ ID NO: 27826 - DNA, 25 bp, Homo sapien
actccagtaaagtttactccaaggg

SEQ ID NO: 27827 - DNA, 25 bp, Homo sapien
ccccagaggacgtacttcttatggg

SEQ ID NO: 27828 - DNA, 25 bp, Homo sapien
ccccagaggacgaacttcttatggg

SEQ ID NO: 27829 - DNA, 25 bp, Homo sapien
cacatcgtgttgagtcttctgacac

SEQ ID NO: 27830 - DNA, 25 bp, Homo sapien
cacatcgtgttgtgtcttctgacac

SEQ ID NO: 27831 - DNA, 25 bp, Homo sapien
cagacttcgagtgtcggttaggaga

SEQ ID NO: 27832 - DNA, 25 bp, Homo sapien
cagacttcgagtctcggttaggaga

SEQ ID NO: 27833 - DNA, 25 bp, Homo sapien
agtcgggtcacaactcctctggacc

SEQ ID NO: 27834 - DNA, 25 bp, Homo sapien
agtcgggtcacatctcctctggacc

SEQ ID NO: 27835 - DNA, 25 bp, Homo sapien
gactgaggtctcttttcctctttaa

SEQ ID NO: 27836 - DNA, 25 bp, Homo sapien
gactgaggtctcatttcctctttaa

SEQ ID NO: 27837 - DNA, 25 bp, Homo sapien
ggttgtccttgtcgtcctgtgggag

SEQ ID NO: 27838 - DNA, 25 bp, Homo sapien
ggttgtccttgtggtcctgtgggag

SEQ ID NO: 27839 - DNA, 25 bp, Homo sapien
ccaggtgagtttggtggttcgctcc

SEQ ID NO: 27840 - DNA, 25 bp, Homo sapien
ccaggtgagtttcgtggttcgctcc

SEQ ID NO: 27841 - DNA, 25 bp, Homo sapien
tcccagaatttctgagtgtcccgtc

SEQ ID NO: 27842 - DNA, 25 bp, Homo sapien
tcccagaatttcagagtgtcccgtc

SEQ ID NO: 27843 - DNA, 25 bp, Homo sapien
aacgagacttatcgattaacacgtc

SEQ ID NO: 27844 - DNA, 25 bp, Homo sapien
aacgagacttatggattaacacgtc

SEQ ID NO: 27845 - DNA, 25 bp, Homo sapien
atgacggttcgagtgaagtacacgt

SEQ ID NO: 27846 - DNA, 25 bp, Homo sapien
atgacggttcgactgaagtacacgt

SEQ ID NO: 27847 - DNA, 25 bp, Homo sapien
caaatgacatatactcgtgactaaa

SEQ ID NO: 27848 - DNA, 25 bp, Homo sapien
caaatgacatattctcgtgactaaa

SEQ ID NO: 27849 - DNA, 25 bp, Homo sapien
ctaaagtcctcatgggttacttcct

SEQ ID NO: 27850 - DNA, 25 bp, Homo sapien
ctaaagtcctcaagggttacttcct

SEQ ID NO: 27851 - DNA, 25 bp, Homo sapien
caaagaagtaccataagatgtcccc

SEQ ID NO: 27852 - DNA, 25 bp, Homo sapien
caaagaagtaccttaagatgtcccc

SEQ ID NO: 27853 - DNA, 25 bp, Homo sapien
aaaagatatgataaacttccgtatc

SEQ ID NO: 27854 - DNA, 25 bp, Homo sapien
aaaagatatgattaacttccgtatc

SEQ ID NO: 27855 - DNA, 25 bp, Homo sapien
ccagataaaatgaccacggaggttt

SEQ ID NO: 27856 - DNA, 25 bp, Homo sapien
ccagataaaatgtccacggaggttt

SEQ ID NO: 27857 - DNA, 25 bp, Homo sapien
tatgtaagaactaacaccccgtctg

SEQ ID NO: 27858 - DNA, 25 bp, Homo sapien
tatgtaagaacttacaccccgtctg

SEQ ID NO: 27859 - DNA, 25 bp, Homo sapien
agtagaaatagtcgtcatactatcg

SEQ ID NO: 27860 - DNA, 25 bp, Homo sapien
agtagaaatagtggtcatactatcg

SEQ ID NO: 27861 - DNA, 25 bp, Homo sapien
ggcccagctacatcggcagacgtaa

SEQ ID NO: 27862 - DNA, 25 bp, Homo sapien
ggcccagctacaacggcagacgtaa

SEQ ID NO: 27863 - DNA, 25 bp, Homo sapien
gaacctaggtgtaaacggcagcgaa

SEQ ID NO: 27864 - DNA, 25 bp, Homo sapien
gaacctaggtgttaacggcagcgaa

SEQ ID NO: 27865 - DNA, 25 bp, Homo sapien
cgacccagtggtacggcgaccgaag

SEQ ID NO: 27866 - DNA, 25 bp, Homo sapien
cgacccagtggttcggcgaccgaag

SEQ ID NO: 27867 - DNA, 25 bp, Homo sapien
ggagccccggggttcgcaacgcata

SEQ ID NO: 27868 - DNA, 25 bp, Homo sapien
ggagccccggggatcgcaacgcata

SEQ ID NO: 27869 - DNA, 25 bp, Homo sapien
ccccacgactgtctccgacaaaagg

SEQ ID NO: 27870 - DNA, 25 bp, Homo sapien
ccccacgactgtgtccgacaaaagg

SEQ ID NO: 27871 - DNA, 25 bp, Homo sapien
cccaccgacctggaaacgtgtgtgt

SEQ ID NO: 27872 - DNA, 25 bp, Homo sapien
cccaccgacctgcaaacgtgtgtgt

SEQ ID NO: 27873 - DNA, 25 bp, Homo sapien
tcccgtctcgactcacaatcgtttt

SEQ ID NO: 27874 - DNA, 25 bp, Homo sapien
tcccgtctcgacacacaatcgtttt

SEQ ID NO: 27875 - DNA, 25 bp, Homo sapien
atcaccacttgttcctgatttgtgt

SEQ ID NO: 27876 - DNA, 25 bp, Homo sapien
atcaccacttgtacctgatttgtgt

SEQ ID NO: 27877 - DNA, 25 bp, Homo sapien
aacacacttgacaactgatgtttgt

SEQ ID NO: 27878 - DNA, 25 bp, Homo sapien
aacacacttgactactgatgtttgt

SEQ ID NO: 27879 - DNA, 25 bp, Homo sapien
tatactcccataagtaaggtcttct

SEQ ID NO: 27880 - DNA, 25 bp, Homo sapien
tatactcccatatgtaaggtcttct

SEQ ID NO: 27881 - DNA, 25 bp, Homo sapien
aaccccatcgcgaagtactttacgt

SEQ ID NO: 27882 - DNA, 25 bp, Homo sapien
aaccccatcgcgtagtactttacgt

SEQ ID NO: 27883 - DNA, 25 bp, Homo sapien
cttccgcgctgtggtgtgtccgtcg

SEQ ID NO: 27884 - DNA, 25 bp, Homo sapien
cttccgcgctgtcgtgtgtccgtcg

SEQ ID NO: 27885 - DNA, 25 bp, Homo sapien
acattgttgtgtgctctgtgccggt

SEQ ID NO: 27886 - DNA, 25 bp, Homo sapien
acattgttgtgtcctctgtgccggt

SEQ ID NO: 27887 - DNA, 25 bp, Homo sapien
ataatcgtttttctccagtggtcgg

SEQ ID NO: 27888 - DNA, 25 bp, Homo sapien
ataatcgtttttgtccagtggtcgg

SEQ ID NO: 27889 - DNA, 25 bp, Homo sapien
tctgaagggtttttcatatcagatt

SEQ ID NO: 27890 - DNA, 25 bp, Homo sapien
tctgaagggtttatcatatcagatt

SEQ ID NO: 27891 - DNA, 25 bp, Homo sapien
tgtaatcatgttcgtcagatgctta

SEQ ID NO: 27892 - DNA, 25 bp, Homo sapien
tgtaatcatgttggtcagatgctta

SEQ ID NO: 27893 - DNA, 25 bp, Homo sapien
gatccaggtgtgtcacttcctacat

SEQ ID NO: 27894 - DNA, 25 bp, Homo sapien
gatccaggtgtgacacttcctacat

SEQ ID NO: 27895 - DNA, 25 bp, Homo sapien
gagacttaggtggactttctcccag

SEQ ID NO: 27896 - DNA, 25 bp, Homo sapien
gagacttaggtgcactttctcccag

SEQ ID NO: 27897 - DNA, 25 bp, Homo sapien
tattaacactaggtactgtctatgg

SEQ ID NO: 27898 - DNA, 25 bp, Homo sapien
tattaacactagctactgtctatgg

SEQ ID NO: 27899 - DNA, 25 bp, Homo sapien
tctgtctgagacgattgtctacgga

SEQ ID NO: 27900 - DNA, 25 bp, Homo sapien
tctgtctgagaccattgtctacgga

SEQ ID NO: 27901 - DNA, 25 bp, Homo sapien
gttagttcgactaccgttgtctccc

SEQ ID NO: 27902 - DNA, 25 bp, Homo sapien
gttagttcgacttccgttgtctccc

SEQ ID NO: 27903 - DNA, 25 bp, Homo sapien
taaaccgacttcacgttatcgacga

SEQ ID NO: 27904 - DNA, 25 bp, Homo sapien
taaaccgacttctcgttatcgacga

SEQ ID NO: 27905 - DNA, 25 bp, Homo sapien
tccattaagttggacttctttaaga

SEQ ID NO: 27906 - DNA, 25 bp, Homo sapien
tccattaagttgcacttctttaaga

SEQ ID NO: 27907 - DNA, 25 bp, Homo sapien
ggtatttactctggtttccaagttt

SEQ ID NO: 27908 - DNA, 25 bp, Homo sapien
ggtatttactctcgtttccaagttt

SEQ ID NO: 27909 - DNA, 25 bp, Homo sapien
tgcttacctccgatacctgcggtgg

SEQ ID NO: 27910 - DNA, 25 bp, Homo sapien
tgcttacctccgttacctgcggtgg

SEQ ID NO: 27911 - DNA, 25 bp, Homo sapien
ctcctacatgtcatcccttgctggt

SEQ ID NO: 27912 - DNA, 25 bp, Homo sapien
ctcctacatgtcttcccttgctggt

SEQ ID NO: 27913 - DNA, 25 bp, Homo sapien
ccggagttttaggtttaccgtgagt

SEQ ID NO: 27914 - DNA, 25 bp, Homo sapien
ccggagttttagctttaccgtgagt

SEQ ID NO: 27915 - DNA, 25 bp, Homo sapien
tcctggtctgttcctgtaccggaga

SEQ ID NO: 27916 - DNA, 25 bp, Homo sapien
tcctggtctgttgctgtaccggaga

SEQ ID NO: 27917 - DNA, 25 bp, Homo sapien
gccgtagtcgacgtctgcaggggaa

SEQ ID NO: 27918 - DNA, 25 bp, Homo sapien
gccgtagtcgacctctgcaggggaa

SEQ ID NO: 27919 - DNA, 25 bp, Homo sapien
ttcgcgacttttccatcgaaggcct

SEQ ID NO: 27920 - DNA, 25 bp, Homo sapien
ttcgcgacttttgcatcgaaggcct

SEQ ID NO: 27921 - DNA, 25 bp, Homo sapien
ttccaggttaagtatcggagcgacc

SEQ ID NO: 27922 - DNA, 25 bp, Homo sapien
ttccaggttaagaatcggagcgacc

SEQ ID NO: 27923 - DNA, 25 bp, Homo sapien
aggtagactctacgtaaaagactgt

SEQ ID NO: 27924 - DNA, 25 bp, Homo sapien
aggtagactctaggtaaaagactgt

SEQ ID NO: 27925 - DNA, 25 bp, Homo sapien
aaagaatattacgagtcggagtctc

SEQ ID NO: 27926 - DNA, 25 bp, Homo sapien
aaagaatattaccagtcggagtctc

SEQ ID NO: 27927 - DNA, 25 bp, Homo sapien
acatgtgcttctcctgtctaggctc

SEQ ID NO: 27928 - DNA, 25 bp, Homo sapien
acatgtgcttctgctgtctaggctc

SEQ ID NO: 27929 - DNA, 25 bp, Homo sapien
ctgtgataactactgtgtatcttac

SEQ ID NO: 27930 - DNA, 25 bp, Homo sapien
ctgtgataactagtgtgtatcttac

SEQ ID NO: 27931 - DNA, 25 bp, Homo sapien
cgtgttgagccgttatttatcgtta

SEQ ID NO: 27932 - DNA, 25 bp, Homo sapien
cgtgttgagccgatatttatcgtta

SEQ ID NO: 27933 - DNA, 25 bp, Homo sapien
caagcaagtagacgagcgcaggccg

SEQ ID NO: 27934 - DNA, 25 bp, Homo sapien
caagcaagtagaggagcgcaggccg

SEQ ID NO: 27935 - DNA, 25 bp, Homo sapien
acggttggagaatgcacgcggaaag

SEQ ID NO: 27936 - DNA, 25 bp, Homo sapien
acggttggagaaagcacgcggaaag

SEQ ID NO: 27937 - DNA, 25 bp, Homo sapien
aaggagtaacaataatgtctcactc

SEQ ID NO: 27938 - DNA, 25 bp, Homo sapien
aaggagtaacaaaaatgtctcactc

SEQ ID NO: 27939 - DNA, 25 bp, Homo sapien
ggggacgaaaagataagtccctctc

SEQ ID NO: 27940 - DNA, 25 bp, Homo sapien
ggggacgaaaagttaagtccctctc

SEQ ID NO: 27941 - DNA, 25 bp, Homo sapien
aagtaaaggtgtcaacacacgactc

SEQ ID NO: 27942 - DNA, 25 bp, Homo sapien
aagtaaaggtgtgaacacacgactc

SEQ ID NO: 27943 - DNA, 25 bp, Homo sapien
ttatcttagtagagacgacacgacc

SEQ ID NO: 27944 - DNA, 25 bp, Homo sapien
ttatcttagtagtgacgacacgacc

SEQ ID NO: 27945 - DNA, 25 bp, Homo sapien
aaggtctacgagtgacgtacgaaga

SEQ ID NO: 27946 - DNA, 25 bp, Homo sapien
aaggtctacgagagacgtacgaaga

SEQ ID NO: 27947 - DNA, 25 bp, Homo sapien
cgacatgggtgagtagtaactccag

SEQ ID NO: 27948 - DNA, 25 bp, Homo sapien
cgacatgggtgactagtaactccag

SEQ ID NO: 27949 - DNA, 25 bp, Homo sapien
catattcggtggtcgtctatgtcga

SEQ ID NO: 27950 - DNA, 25 bp, Homo sapien
catattcggtggacgtctatgtcga

SEQ ID NO: 27951 - DNA, 25 bp, Homo sapien
ctctttgtcccgtatcactcgtagg

SEQ ID NO: 27952 - DNA, 25 bp, Homo sapien
ctctttgtcccgaatcactcgtagg

SEQ ID NO: 27953 - DNA, 25 bp, Homo sapien
atctgtttccccagctacgtcgaca

SEQ ID NO: 27954 - DNA, 25 bp, Homo sapien
atctgtttcccctgctacgtcgaca

SEQ ID NO: 27955 - DNA, 25 bp, Homo sapien
acttgtgtatcgtcaccagttttta

SEQ ID NO: 27956 - DNA, 25 bp, Homo sapien
acttgtgtatcgacaccagttttta

SEQ ID NO: 27957 - DNA, 25 bp, Homo sapien
gtgtacgtatcctcacgtattcttt

SEQ ID NO: 27958 - DNA, 25 bp, Homo sapien
gtgtacgtatccacacgtattcttt

SEQ ID NO: 27959 - DNA, 25 bp, Homo sapien
acgtctcggaggaccgtcggtccct

SEQ ID NO: 27960 - DNA, 25 bp, Homo sapien
acgtctcggaggtccgtcggtccct

SEQ ID NO: 27961 - DNA, 25 bp, Homo sapien
gcgtcttggcgtgcagccgtcccgt

SEQ ID NO: 27962 - DNA, 25 bp, Homo sapien
gcgtcttggcgtccagccgtcccgt

SEQ ID NO: 27963 - DNA, 25 bp, Homo sapien
cctcaggtagtgctacggtcaccat

SEQ ID NO: 27964 - DNA, 25 bp, Homo sapien
cctcaggtagtggtacggtcaccat

SEQ ID NO: 27965 - DNA, 25 bp, Homo sapien
tctcttaaggtaagtcactggtaaa

SEQ ID NO: 27966 - DNA, 25 bp, Homo sapien
tctcttaaggtatgtcactggtaaa

SEQ ID NO: 27967 - DNA, 25 bp, Homo sapien
tgtccgtctgtgtcagtaagtacaa

SEQ ID NO: 27968 - DNA, 25 bp, Homo sapien
tgtccgtctgtgacagtaagtacaa

SEQ ID NO: 27969 - DNA, 25 bp, Homo sapien
ctgtctttttcaacgagaacgacat

SEQ ID NO: 27970 - DNA, 25 bp, Homo sapien
ctgtctttttcatcgagaacgacat

SEQ ID NO: 27971 - DNA, 25 bp, Homo sapien
tggagttttttcgactaaaccactg

SEQ ID NO: 27972 - DNA, 25 bp, Homo sapien
tggagttttttccactaaaccactg

SEQ ID NO: 27973 - DNA, 25 bp, Homo sapien
gatactcctatcactgtgttcatgt

SEQ ID NO: 27974 - DNA, 25 bp, Homo sapien
gatactcctatctctgtgttcatgt

SEQ ID NO: 27975 - DNA, 25 bp, Homo sapien
taagaaccgttgtctgttatagaat

SEQ ID NO: 27976 - DNA, 25 bp, Homo sapien
taagaaccgttgactgttatagaat

SEQ ID NO: 27977 - DNA, 25 bp, Homo sapien
aaagaatagacgtctcgatagagtc

SEQ ID NO: 27978 - DNA, 25 bp, Homo sapien
aaagaatagacgactcgatagagtc

SEQ ID NO: 27979 - DNA, 25 bp, Homo sapien
ttatggaagaatcgaaccttaacct

SEQ ID NO: 27980 - DNA, 25 bp, Homo sapien
ttatggaagaatggaaccttaacct

SEQ ID NO: 27981 - DNA, 25 bp, Homo sapien
acgaaaaatagagtgatttcatcct

SEQ ID NO: 27982 - DNA, 25 bp, Homo sapien
acgaaaaatagactgatttcatcct

SEQ ID NO: 27983 - DNA, 25 bp, Homo sapien
gaataagtacgtcgtcatatagtca

SEQ ID NO: 27984 - DNA, 25 bp, Homo sapien
gaataagtacgtggtcatatagtca

SEQ ID NO: 27985 - DNA, 25 bp, Homo sapien
aagagaacaactcgacgaaacgtcc

SEQ ID NO: 27986 - DNA, 25 bp, Homo sapien
aagagaacaactggacgaaacgtcc

SEQ ID NO: 27987 - DNA, 25 bp, Homo sapien
gagagacctcctcaccgtaacggac

SEQ ID NO: 27988 - DNA, 25 bp, Homo sapien
gagagacctcctgaccgtaacggac

SEQ ID NO: 27989 - DNA, 25 bp, Homo sapien
gtgtgtatcctttgtcctaggatag

SEQ ID NO: 27990 - DNA, 25 bp, Homo sapien
gtgtgtatccttagtcctaggatag

SEQ ID NO: 27991 - DNA, 25 bp, Homo sapien
gttgtgtccctaagtcacagtaaag

SEQ ID NO: 27992 - DNA, 25 bp, Homo sapien
gttgtgtccctatgtcacagtaaag

SEQ ID NO: 27993 - DNA, 25 bp, Homo sapien
ttggtcttcgagtcgactacataac

SEQ ID NO: 27994 - DNA, 25 bp, Homo sapien
ttggtcttcgagacgactacataac

SEQ ID NO: 27995 - DNA, 25 bp, Homo sapien
tactctttcccagtagactcctggt

SEQ ID NO: 27996 - DNA, 25 bp, Homo sapien
tactctttcccactagactcctggt

SEQ ID NO: 27997 - DNA, 25 bp, Homo sapien
aaatttgtatcgaacactaccttgg

SEQ ID NO: 27998 - DNA, 25 bp, Homo sapien
aaatttgtatcgtacactaccttgg

SEQ ID NO: 27999 - DNA, 25 bp, Homo sapien
agagtgtaatctacaagtctacagg

SEQ ID NO: 28000 - DNA, 25 bp, Homo sapien
agagtgtaatcttcaagtctacagg

SEQ ID NO: 28001 - DNA, 25 bp, Homo sapien
agagtacttccgtttagacgtatgg

SEQ ID NO: 28002 - DNA, 25 bp, Homo sapien
agagtacttccgattagacgtatgg

SEQ ID NO: 28003 - DNA, 25 bp, Homo sapien
agacgtaggccatggtcactgtcgt

SEQ ID NO: 28004 - DNA, 25 bp, Homo sapien
agacgtaggccaaggtcactgtcgt

SEQ ID NO: 28005 - DNA, 25 bp, Homo sapien
cgacgtcggtggaacagcgtccccg

SEQ ID NO: 28006 - DNA, 25 bp, Homo sapien
cgacgtcggtggtacagcgtccccg

SEQ ID NO: 28007 - DNA, 25 bp, Homo sapien
cgtcgttacatgtctcggagccctc

SEQ ID NO: 28008 - DNA, 25 bp, Homo sapien
cgtcgttacatgactcggagccctc

SEQ ID NO: 28009 - DNA, 25 bp, Homo sapien
ctttcacgtagtaccggaccggacc

SEQ ID NO: 28010 - DNA, 25 bp, Homo sapien
ctttcacgtagttccggaccggacc

SEQ ID NO: 28011 - DNA, 25 bp, Homo sapien
gtaggacggttttacagaggacacc

SEQ ID NO: 28012 - DNA, 25 bp, Homo sapien
gtaggacggtttaacagaggacacc

SEQ ID NO: 28013 - DNA, 25 bp, Homo sapien
gacgtcctgtgaacccggtcgaacc

SEQ ID NO: 28014 - DNA, 25 bp, Homo sapien
gacgtcctgtgatcccggtcgaacc

SEQ ID NO: 28015 - DNA, 25 bp, Homo sapien
gtttgtgggaacttccatagataca

SEQ ID NO: 28016 - DNA, 25 bp, Homo sapien
gtttgtgggaacatccatagataca

SEQ ID NO: 28017 - DNA, 25 bp, Homo sapien
ttgttgggactatctcgtaagttca

SEQ ID NO: 28018 - DNA, 25 bp, Homo sapien
ttgttgggactaactcgtaagttca

SEQ ID NO: 28019 - DNA, 25 bp, Homo sapien
ggtgatctgactaccgtcgtttgat

SEQ ID NO: 28020 - DNA, 25 bp, Homo sapien
ggtgatctgacttccgtcgtttgat

SEQ ID NO: 28021 - DNA, 25 bp, Homo sapien
ccattttcggtactcgaaacgtctt

SEQ ID NO: 28022 - DNA, 25 bp, Homo sapien
ccattttcggtagtcgaaacgtctt

SEQ ID NO: 28023 - DNA, 25 bp, Homo sapien
gggcgtcaaacgactgaatacagta

SEQ ID NO: 28024 - DNA, 25 bp, Homo sapien
gggcgtcaaacgtctgaatacagta

SEQ ID NO: 28025 - DNA, 25 bp, Homo sapien
tcgctcgataagtctctaagatata

SEQ ID NO: 28026 - DNA, 25 bp, Homo sapien
tcgctcgataagactctaagatata

SEQ ID NO: 28027 - DNA, 25 bp, Homo sapien
gtcgtcctcacaacgtctaaaatag

SEQ ID NO: 28028 - DNA, 25 bp, Homo sapien
gtcgtcctcacatcgtctaaaatag

SEQ ID NO: 28029 - DNA, 25 bp, Homo sapien
cgacccgcgacttcagtatcacgag

SEQ ID NO: 28030 - DNA, 25 bp, Homo sapien
cgacccgcgactacagtatcacgag

SEQ ID NO: 28031 - DNA, 25 bp, Homo sapien
gactagagacgacctcatagtcccg

SEQ ID NO: 28032 - DNA, 25 bp, Homo sapien
gactagagacgagctcatagtcccg

SEQ ID NO: 28033 - DNA, 25 bp, Homo sapien
aactgtaagagctaccacagtgacc

SEQ ID NO: 28034 - DNA, 25 bp, Homo sapien
aactgtaagagcaaccacagtgacc

SEQ ID NO: 28035 - DNA, 25 bp, Homo sapien
ccaggacgtcgaagtaccgagggcc

SEQ ID NO: 28036 - DNA, 25 bp, Homo sapien
ccaggacgtcgatgtaccgagggcc

SEQ ID NO: 28037 - DNA, 25 bp, Homo sapien
cgagtctctgactctcaggtcgctc

SEQ ID NO: 28038 - DNA, 25 bp, Homo sapien
cgagtctctgacactcaggtcgctc

SEQ ID NO: 28039 - DNA, 25 bp, Homo sapien
acctccgttaaaacagtgtcgtctg

SEQ ID NO: 28040 - DNA, 25 bp, Homo sapien
acctccgttaaatcagtgtcgtctg

SEQ ID NO: 28041 - DNA, 25 bp, Homo sapien
cactcaggacagaagaaactaccta

SEQ ID NO: 28042 - DNA, 25 bp, Homo sapien
cactcaggacagtagaaactaccta

SEQ ID NO: 28043 - DNA, 25 bp, Homo sapien
cgtttagaaggtaacaatctaatct

SEQ ID NO: 28044 - DNA, 25 bp, Homo sapien
cgtttagaaggttacaatctaatct

SEQ ID NO: 28045 - DNA, 25 bp, Homo sapien
cagtagaagatgaccatattaaact

SEQ ID NO: 28046 - DNA, 25 bp, Homo sapien
cagtagaagatgtccatattaaact

SEQ ID NO: 28047 - DNA, 25 bp, Homo sapien
tttcgaaacgagacccagtcacata

SEQ ID NO: 28048 - DNA, 25 bp, Homo sapien
tttcgaaacgagtcccagtcacata

SEQ ID NO: 28049 - DNA, 25 bp, Homo sapien
cccgaaaggtagctacccgcacgga

SEQ ID NO: 28050 - DNA, 25 bp, Homo sapien
cccgaaaggtaggtacccgcacgga

SEQ ID NO: 28051 - DNA, 25 bp, Homo sapien
gcacagaagaaaattccgacactaa

SEQ ID NO: 28052 - DNA, 25 bp, Homo sapien
gcacagaagaaatttccgacactaa

SEQ ID NO: 28053 - DNA, 25 bp, Homo sapien
taagagtaagacttagacaactgac

SEQ ID NO: 28054 - DNA, 25 bp, Homo sapien
taagagtaagacatagacaactgac

SEQ ID NO: 28055 - DNA, 25 bp, Homo sapien
cataagtagtagtcataggttctcc

SEQ ID NO: 28056 - DNA, 25 bp, Homo sapien
cataagtagtagacataggttctcc

SEQ ID NO: 28057 - DNA, 25 bp, Homo sapien
gcccacgatgttcttatgtgttcac

SEQ ID NO: 28058 - DNA, 25 bp, Homo sapien
gcccacgatgttgttatgtgttcac

SEQ ID NO: 28059 - DNA, 25 bp, Homo sapien
cgtacacggttgagattcgtagtcc

SEQ ID NO: 28060 - DNA, 25 bp, Homo sapien
cgtacacggttgtgattcgtagtcc

SEQ ID NO: 28061 - DNA, 25 bp, Homo sapien
tgtagtgagaggtaaggtatctccc

SEQ ID NO: 28062 - DNA, 25 bp, Homo sapien
tgtagtgagaggaaaggtatctccc

SEQ ID NO: 28063 - DNA, 25 bp, Homo sapien
ccgtagaggtcgacggaggaacccc

SEQ ID NO: 28064 - DNA, 25 bp, Homo sapien
ccgtagaggtcgtcggaggaacccc

SEQ ID NO: 28065 - DNA, 25 bp, Homo sapien
tctcggtaccctaggagcccggtcg

SEQ ID NO: 28066 - DNA, 25 bp, Homo sapien
tctcggtacccttggagcccggtcg

SEQ ID NO: 28067 - DNA, 25 bp, Homo sapien
tgtgtaccgtctctatgctataatg

SEQ ID NO: 28068 - DNA, 25 bp, Homo sapien
tgtgtaccgtctgtatgctataatg

SEQ ID NO: 28069 - DNA, 25 bp, Homo sapien
cagggatacaatatgtacttacatg

SEQ ID NO: 28070 - DNA, 25 bp, Homo sapien
cagggatacaatttgtacttacatg

SEQ ID NO: 28071 - DNA, 25 bp, Homo sapien
agacacacggtccttcgtgaacact

SEQ ID NO: 28072 - DNA, 25 bp, Homo sapien
agacacacggtcgttcgtgaacact

SEQ ID NO: 28073 - DNA, 25 bp, Homo sapien
gggacctactaccttaatagtcact

SEQ ID NO: 28074 - DNA, 25 bp, Homo sapien
gggacctactacgttaatagtcact

SEQ ID NO: 28075 - DNA, 25 bp, Homo sapien
tgggaggacaccaagtcaccattat

SEQ ID NO: 28076 - DNA, 25 bp, Homo sapien
tgggaggacacctagtcaccattat

SEQ ID NO: 28077 - DNA, 25 bp, Homo sapien
ggtcggtcccctgactctcttcgtt

SEQ ID NO: 28078 - DNA, 25 bp, Homo sapien
ggtcggtcccctcactctcttcgtt

SEQ ID NO: 28079 - DNA, 25 bp, Homo sapien
ggagagccgtcttttcatgttgacc

SEQ ID NO: 28080 - DNA, 25 bp, Homo sapien
ggagagccgtctattcatgttgacc

SEQ ID NO: 28081 - DNA, 25 bp, Homo sapien
taaggttactatatggtgtccctcc

SEQ ID NO: 28082 - DNA, 25 bp, Homo sapien
taaggttactatttggtgtccctcc

SEQ ID NO: 28083 - DNA, 25 bp, Homo sapien
ctcaaattgtcttttgtctgacctg

SEQ ID NO: 28084 - DNA, 25 bp, Homo sapien
ctcaaattgtctattgtctgacctg

SEQ ID NO: 28085 - DNA, 25 bp, Homo sapien
ccaagatgttcaagatctttgtctt

SEQ ID NO: 28086 - DNA, 25 bp, Homo sapien
ccaagatgttcatgatctttgtctt

SEQ ID NO: 28087 - DNA, 25 bp, Homo sapien
cacgtgtgtttctttactgtacctt

SEQ ID NO: 28088 - DNA, 25 bp, Homo sapien
cacgtgtgtttcattactgtacctt

SEQ ID NO: 28089 - DNA, 25 bp, Homo sapien
tctactacccgtgtcctttgttcag

SEQ ID NO: 28090 - DNA, 25 bp, Homo sapien
tctactacccgtctcctttgttcag

SEQ ID NO: 28091 - DNA, 25 bp, Homo sapien
caactcctttgtgacgaacttaaag

SEQ ID NO: 28092 - DNA, 25 bp, Homo sapien
caactcctttgtcacgaacttaaag

SEQ ID NO: 28093 - DNA, 25 bp, Homo sapien
gtgatctcatttgcacgatatttta

SEQ ID NO: 28094 - DNA, 25 bp, Homo sapien
gtgatctcatttccacgatatttta

SEQ ID NO: 28095 - DNA, 25 bp, Homo sapien
cacgcactccgtcgagacctagggg

SEQ ID NO: 28096 - DNA, 25 bp, Homo sapien
cacgcactccgtggagacctagggg

SEQ ID NO: 28097 - DNA, 25 bp, Homo sapien
ccgtccgtctctaccggatcggggt

SEQ ID NO: 28098 - DNA, 25 bp, Homo sapien
ccgtccgtctcttccggatcggggt

SEQ ID NO: 28099 - DNA, 25 bp, Homo sapien
gtcttttcttcgtccctgtccgcgg

SEQ ID NO: 28100 - DNA, 25 bp, Homo sapien
gtcttttcttcgaccctgtccgcgg

SEQ ID NO: 28101 - DNA, 25 bp, Homo sapien
taacagtagttgtacccttcgtggg

SEQ ID NO: 28102 - DNA, 25 bp, Homo sapien
taacagtagttgaacccttcgtggg

SEQ ID NO: 28103 - DNA, 25 bp, Homo sapien
aaagtgtctaaaaccctagtcaagt

SEQ ID NO: 28104 - DNA, 25 bp, Homo sapien
aaagtgtctaaatccctagtcaagt

SEQ ID NO: 28105 - DNA, 25 bp, Homo sapien
cagatgttggaagtgttgtcactct

SEQ ID NO: 28106 - DNA, 25 bp, Homo sapien
cagatgttggaactgttgtcactct

SEQ ID NO: 28107 - DNA, 25 bp, Homo sapien
ctccttgtagagagaggttgtcaat

SEQ ID NO: 28108 - DNA, 25 bp, Homo sapien
ctccttgtagagtgaggttgtcaat

SEQ ID NO: 28109 - DNA, 25 bp, Homo sapien
cttagaagattaagatcactgtcat

SEQ ID NO: 28110 - DNA, 25 bp, Homo sapien
cttagaagattatgatcactgtcat

SEQ ID NO: 28111 - DNA, 25 bp, Homo sapien
ttatggagtacactatcacgtgtca

SEQ ID NO: 28112 - DNA, 25 bp, Homo sapien
ttatggagtacagtatcacgtgtca

SEQ ID NO: 28113 - DNA, 25 bp, Homo sapien
atgcgacacgagtccgacggtaagt

SEQ ID NO: 28114 - DNA, 25 bp, Homo sapien
atgcgacacgagaccgacggtaagt

SEQ ID NO: 28115 - DNA, 25 bp, Homo sapien
acgtgtgtctctatactgacggagg

SEQ ID NO: 28116 - DNA, 25 bp, Homo sapien
acgtgtgtctctttactgacggagg

SEQ ID NO: 28117 - DNA, 25 bp, Homo sapien
ggttagacgtctgtctgtgaccgtt

SEQ ID NO: 28118 - DNA, 25 bp, Homo sapien
ggttagacgtctctctgtgaccgtt

SEQ ID NO: 28119 - DNA, 25 bp, Homo sapien
tgttagacgtagttaccgtgtgccc

SEQ ID NO: 28120 - DNA, 25 bp, Homo sapien
tgttagacgtagataccgtgtgccc

SEQ ID NO: 28121 - DNA, 25 bp, Homo sapien
agtttcttctgacgtacagagttca

SEQ ID NO: 28122 - DNA, 25 bp, Homo sapien
agtttcttctgaggtacagagttca

SEQ ID NO: 28123 - DNA, 25 bp, Homo sapien
ggtagaatctttaggacgaaaccga

SEQ ID NO: 28124 - DNA, 25 bp, Homo sapien
ggtagaatcttttggacgaaaccga

SEQ ID NO: 28125 - DNA, 25 bp, Homo sapien
gtaccgaagtgttttatcgactaaa

SEQ ID NO: 28126 - DNA, 25 bp, Homo sapien
gtaccgaagtgtattatcgactaaa

SEQ ID NO: 28127 - DNA, 25 bp, Homo sapien
aaataaagacgagagatccttacat

SEQ ID NO: 28128 - DNA, 25 bp, Homo sapien
aaataaagacgacagatccttacat

SEQ ID NO: 28129 - DNA, 25 bp, Homo sapien
aaagacgaggtccaagaacctgaga

SEQ ID NO: 28130 - DNA, 25 bp, Homo sapien
aaagacgaggtcgaagaacctgaga

SEQ ID NO: 28131 - DNA, 25 bp, Homo sapien
gaaaggagagcctaaacgttcacgg

SEQ ID NO: 28132 - DNA, 25 bp, Homo sapien
gaaaggagagccaaaacgttcacgg

SEQ ID NO: 28133 - DNA, 25 bp, Homo sapien
acgggaactccaacaggtccactcg

SEQ ID NO: 28134 - DNA, 25 bp, Homo sapien
acgggaactccatcaggtccactcg

SEQ ID NO: 28135 - DNA, 25 bp, Homo sapien
ccgaaacgactaacagtgtcaactc

SEQ ID NO: 28136 - DNA, 25 bp, Homo sapien
ccgaaacgactatcagtgtcaactc

SEQ ID NO: 28137 - DNA, 25 bp, Homo sapien
ggttcgtatactacgtcttcgactc

SEQ ID NO: 28138 - DNA, 25 bp, Homo sapien
ggttcgtatacttcgtcttcgactc

SEQ ID NO: 28139 - DNA, 25 bp, Homo sapien
agacaatctactgtgtattgtgtcg

SEQ ID NO: 28140 - DNA, 25 bp, Homo sapien
agacaatctactctgtattgtgtcg

SEQ ID NO: 28141 - DNA, 25 bp, Homo sapien
accttattctcttcctctttttgtc

SEQ ID NO: 28142 - DNA, 25 bp, Homo sapien
accttattctctacctctttttgtc

SEQ ID NO: 28143 - DNA, 25 bp, Homo sapien
tattcagactctacgggtaattttc

SEQ ID NO: 28144 - DNA, 25 bp, Homo sapien
tattcagactcttcgggtaattttc

SEQ ID NO: 28145 - DNA, 25 bp, Homo sapien
acttggactttgtattttacttacg

SEQ ID NO: 28146 - DNA, 25 bp, Homo sapien
acttggactttgaattttacttacg

SEQ ID NO: 28147 - DNA, 25 bp, Homo sapien
ctcagaaatgttcagtaatctcaga

SEQ ID NO: 28148 - DNA, 25 bp, Homo sapien
ctcagaaatgttgagtaatctcaga

SEQ ID NO: 28149 - DNA, 25 bp, Homo sapien
gtccacaggtctcagagttccccga

SEQ ID NO: 28150 - DNA, 25 bp, Homo sapien
gtccacaggtctgagagttccccga

SEQ ID NO: 28151 - DNA, 25 bp, Homo sapien
tgtacacaagggaaagacgatccta

SEQ ID NO: 28152 - DNA, 25 bp, Homo sapien
tgtacacaagggtaagacgatccta

SEQ ID NO: 28153 - DNA, 25 bp, Homo sapien
ttcagagatgatcgacatctaacgt

SEQ ID NO: 28154 - DNA, 25 bp, Homo sapien
ttcagagatgatggacatctaacgt

SEQ ID NO: 28155 - DNA, 25 bp, Homo sapien
gaagaggagacatcatccaaagaag

SEQ ID NO: 28156 - DNA, 25 bp, Homo sapien
gaagaggagacaacatccaaagaag

SEQ ID NO: 28157 - DNA, 25 bp, Homo sapien
ggtgacgtcgaacctcgaaaaacag

SEQ ID NO: 28158 - DNA, 25 bp, Homo sapien
ggtgacgtcgaagctcgaaaaacag

SEQ ID NO: 28159 - DNA, 25 bp, Homo sapien
agtgtcgtaacgagaccagactcgg

SEQ ID NO: 28160 - DNA, 25 bp, Homo sapien
agtgtcgtaacgtgaccagactcgg

SEQ ID NO: 28161 - DNA, 25 bp, Homo sapien
cacgtcacgcaagactcaagtgacg

SEQ ID NO: 28162 - DNA, 25 bp, Homo sapien
cacgtcacgcaacactcaagtgacg

SEQ ID NO: 28163 - DNA, 25 bp, Homo sapien
gggtctccggaatctctcctagagg

SEQ ID NO: 28164 - DNA, 25 bp, Homo sapien
gggtctccggaaactctcctagagg

SEQ ID NO: 28165 - DNA, 25 bp, Homo sapien
atgtactcagaggaacctccggaac

SEQ ID NO: 28166 - DNA, 25 bp, Homo sapien
atgtactcagagcaacctccggaac

SEQ ID NO: 28167 - DNA, 25 bp, Homo sapien
tccccgaacgacctacgggagtcgt

SEQ ID NO: 28168 - DNA, 25 bp, Homo sapien
tccccgaacgacgtacgggagtcgt

SEQ ID NO: 28169 - DNA, 25 bp, Homo sapien
tatcgtaaaccagtgaactccaccg

SEQ ID NO: 28170 - DNA, 25 bp, Homo sapien
tatcgtaaaccactgaactccaccg

SEQ ID NO: 28171 - DNA, 25 bp, Homo sapien
accagagacgggagtttcgcgagta

SEQ ID NO: 28172 - DNA, 25 bp, Homo sapien
accagagacgggtgtttcgcgagta

SEQ ID NO: 28173 - DNA, 25 bp, Homo sapien
gaagagtaacccttagttttctgta

SEQ ID NO: 28174 - DNA, 25 bp, Homo sapien
gaagagtaacccatagttttctgta

SEQ ID NO: 28175 - DNA, 25 bp, Homo sapien
tagtattggacaatcttacgttcac

SEQ ID NO: 28176 - DNA, 25 bp, Homo sapien
tagtattggacattcttacgttcac

SEQ ID NO: 28177 - DNA, 25 bp, Homo sapien
tcattcgagccattcacactagtgc

SEQ ID NO: 28178 - DNA, 25 bp, Homo sapien
tcattcgagccaatcacactagtgc

SEQ ID NO: 28179 - DNA, 25 bp, Homo sapien
ggatcgagagggacctccactttat

SEQ ID NO: 28180 - DNA, 25 bp, Homo sapien
ggatcgagagggtcctccactttat

SEQ ID NO: 28181 - DNA, 25 bp, Homo sapien
tacactgtggatcgaacacacggat

SEQ ID NO: 28182 - DNA, 25 bp, Homo sapien
tacactgtggatggaacacacggat

SEQ ID NO: 28183 - DNA, 25 bp, Homo sapien
gcacaaccttgttcagattcgacca

SEQ ID NO: 28184 - DNA, 25 bp, Homo sapien
gcacaaccttgtacagattcgacca

SEQ ID NO: 28185 - DNA, 25 bp, Homo sapien
cactacacctggaacaacatgtgca

SEQ ID NO: 28186 - DNA, 25 bp, Homo sapien
cactacacctggtacaacatgtgca

SEQ ID NO: 28187 - DNA, 25 bp, Homo sapien
acgaaacctgggttcgataagccag

SEQ ID NO: 28188 - DNA, 25 bp, Homo sapien
acgaaacctgggatcgataagccag

SEQ ID NO: 28189 - DNA, 25 bp, Homo sapien
agaaaatctagtcgaccaaaggtaa

SEQ ID NO: 28190 - DNA, 25 bp, Homo sapien
agaaaatctagtggaccaaaggtaa

SEQ ID NO: 28191 - DNA, 25 bp, Homo sapien
gaaaacatttaggtccataaacgaa

SEQ ID NO: 28192 - DNA, 25 bp, Homo sapien
gaaaacatttagctccataaacgaa

SEQ ID NO: 28193 - DNA, 25 bp, Homo sapien
cagtattttaccttagcgaggtacg

SEQ ID NO: 28194 - DNA, 25 bp, Homo sapien
cagtattttaccatagcgaggtacg

SEQ ID NO: 28195 - DNA, 25 bp, Homo sapien
cgagtaattacattctgtcgtagaa

SEQ ID NO: 28196 - DNA, 25 bp, Homo sapien
cgagtaattacaatctgtcgtagaa

SEQ ID NO: 28197 - DNA, 25 bp, Homo sapien
atgactagaagaagttccagtcaaa

SEQ ID NO: 28198 - DNA, 25 bp, Homo sapien
atgactagaagatgttccagtcaaa

SEQ ID NO: 28199 - DNA, 25 bp, Homo sapien
agactaagatttacgtctaaagaca

SEQ ID NO: 28200 - DNA, 25 bp, Homo sapien
agactaagattttcgtctaaagaca

SEQ ID NO: 28201 - DNA, 25 bp, Homo sapien
ttgaactgtaacaagtgtgacccca

SEQ ID NO: 28202 - DNA, 25 bp, Homo sapien
ttgaactgtaactagtgtgacccca

SEQ ID NO: 28203 - DNA, 25 bp, Homo sapien
gtaatagtgacagagggtcccacac

SEQ ID NO: 28204 - DNA, 25 bp, Homo sapien
gtaatagtgacacagggtcccacac

SEQ ID NO: 28205 - DNA, 25 bp, Homo sapien
ccgagatttttatcggagtcgcaaa

SEQ ID NO: 28206 - DNA, 25 bp, Homo sapien
ccgagatttttaacggagtcgcaaa

SEQ ID NO: 28207 - DNA, 25 bp, Homo sapien
gacactttttgaagagactcaccaa

SEQ ID NO: 28208 - DNA, 25 bp, Homo sapien
gacactttttgatgagactcaccaa

SEQ ID NO: 28209 - DNA, 25 bp, Homo sapien
aacagtttaatagtcttcctgaaag

SEQ ID NO: 28210 - DNA, 25 bp, Homo sapien
aacagtttaatactcttcctgaaag

SEQ ID NO: 28211 - DNA, 25 bp, Homo sapien
attacagacagtttcactgaacggt

SEQ ID NO: 28212 - DNA, 25 bp, Homo sapien
attacagacagtatcactgaacggt

SEQ ID NO: 28213 - DNA, 25 bp, Homo sapien
gagtggacacagactccttcacacg

SEQ ID NO: 28214 - DNA, 25 bp, Homo sapien
gagtggacacagtctccttcacacg

SEQ ID NO: 28215 - DNA, 25 bp, Homo sapien
gtagtgtcacgagattttcgagaca

SEQ ID NO: 28216 - DNA, 25 bp, Homo sapien
gtagtgtcacgacattttcgagaca

SEQ ID NO: 28217 - DNA, 25 bp, Homo sapien
gagaatgaccatgagtcctttataa

SEQ ID NO: 28218 - DNA, 25 bp, Homo sapien
gagaatgaccatcagtcctttataa

SEQ ID NO: 28219 - DNA, 25 bp, Homo sapien
tgacgacagtactcggagagtcgaa

SEQ ID NO: 28220 - DNA, 25 bp, Homo sapien
tgacgacagtacacggagagtcgaa

SEQ ID NO: 28221 - DNA, 25 bp, Homo sapien
ctcagtaccgatagtgtcggtagaa

SEQ ID NO: 28222 - DNA, 25 bp, Homo sapien
ctcagtaccgattgtgtcggtagaa

SEQ ID NO: 28223 - DNA, 25 bp, Homo sapien
gaccccgagatagaggtgtaccgta

SEQ ID NO: 28224 - DNA, 25 bp, Homo sapien
gaccccgagatacaggtgtaccgta

SEQ ID NO: 28225 - DNA, 25 bp, Homo sapien
accaggggtagcagatactaccgta

SEQ ID NO: 28226 - DNA, 25 bp, Homo sapien
accaggggtagctgatactaccgta

SEQ ID NO: 28227 - DNA, 25 bp, Homo sapien
gaggacacaaactacacggaattga

SEQ ID NO: 28228 - DNA, 25 bp, Homo sapien
gaggacacaaacaacacggaattga

SEQ ID NO: 28229 - DNA, 25 bp, Homo sapien
ctaaagagatcttaccggtggaaac

SEQ ID NO: 28230 - DNA, 25 bp, Homo sapien
ctaaagagatctaaccggtggaaac

SEQ ID NO: 28231 - DNA, 25 bp, Homo sapien
atttgacatctaactcgcagtgaaa

SEQ ID NO: 28232 - DNA, 25 bp, Homo sapien
atttgacatctatctcgcagtgaaa

SEQ ID NO: 28233 - DNA, 25 bp, Homo sapien
cacgtactcgtgcaccagtgtcaag

SEQ ID NO: 28234 - DNA, 25 bp, Homo sapien
cacgtactcgtggaccagtgtcaag

SEQ ID NO: 28235 - DNA, 25 bp, Homo sapien
tccccagaacagtaaacagtcgaca

SEQ ID NO: 28236 - DNA, 25 bp, Homo sapien
tccccagaacagaaaacagtcgaca

SEQ ID NO: 28237 - DNA, 25 bp, Homo sapien
ctacgagaacaactgaaggtcgtct

SEQ ID NO: 28238 - DNA, 25 bp, Homo sapien
ctacgagaacaagtgaaggtcgtct

SEQ ID NO: 28239 - DNA, 25 bp, Homo sapien
tcacagacgacgactcttgacccgg

SEQ ID NO: 28240 - DNA, 25 bp, Homo sapien
tcacagacgacgtctcttgacccgg

SEQ ID NO: 28241 - DNA, 25 bp, Homo sapien
gtcttcacaggctcaggttcaggtg

SEQ ID NO: 28242 - DNA, 25 bp, Homo sapien
gtcttcacaggcacaggttcaggtg

SEQ ID NO: 28243 - DNA, 25 bp, Homo sapien
taagaggtcgaggaggacgaggacg

SEQ ID NO: 28244 - DNA, 25 bp, Homo sapien
taagaggtcgagcaggacgaggacg

SEQ ID NO: 28245 - DNA, 25 bp, Homo sapien
aggcggcgggcgccgggagagcgag

SEQ ID NO: 28246 - DNA, 25 bp, Homo sapien
aggcggcgggcggcgggagagcgag

SEQ ID NO: 28247 - DNA, 25 bp, Homo sapien
tcagagggctccagaggccgcaaag

SEQ ID NO: 28248 - DNA, 25 bp, Homo sapien
tcagagggctcctgaggccgcaaag

SEQ ID NO: 28249 - DNA, 25 bp, Homo sapien
cggttcagacagtagtgacacccca

SEQ ID NO: 28250 - DNA, 25 bp, Homo sapien
cggttcagacagaagtgacacccca

SEQ ID NO: 28251 - DNA, 25 bp, Homo sapien
gttactcaccgaagttaccccacag

SEQ ID NO: 28252 - DNA, 25 bp, Homo sapien
gttactcaccgatgttaccccacag

SEQ ID NO: 28253 - DNA, 25 bp, Homo sapien
tctagaacctttatcgtagaactcg

SEQ ID NO: 28254 - DNA, 25 bp, Homo sapien
tctagaacctttttcgtagaactcg

SEQ ID NO: 28255 - DNA, 25 bp, Homo sapien
cacacgagccacttcgtgtggacgc

SEQ ID NO: 28256 - DNA, 25 bp, Homo sapien
cacacgagccacatcgtgtggacgc

SEQ ID NO: 28257 - DNA, 25 bp, Homo sapien
actaggagtcggtcctgcgtgtccg

SEQ ID NO: 28258 - DNA, 25 bp, Homo sapien
actaggagtcggacctgcgtgtccg

SEQ ID NO: 28259 - DNA, 25 bp, Homo sapien
accgtcaacgtggtttcgggccgag

SEQ ID NO: 28260 - DNA, 25 bp, Homo sapien
accgtcaacgtgctttcgggccgag

SEQ ID NO: 28261 - DNA, 25 bp, Homo sapien
atatctatccgtttttcgaggaaga

SEQ ID NO: 28262 - DNA, 25 bp, Homo sapien
atatctatccgtatttcgaggaaga

SEQ ID NO: 28263 - DNA, 25 bp, Homo sapien
ccgtagtcgacctactcccagagga

SEQ ID NO: 28264 - DNA, 25 bp, Homo sapien
ccgtagtcgaccaactcccagagga

SEQ ID NO: 28265 - DNA, 25 bp, Homo sapien
cccggtgactcgacccggaagacag

SEQ ID NO: 28266 - DNA, 25 bp, Homo sapien
cccggtgactcgtcccggaagacag

SEQ ID NO: 28267 - DNA, 25 bp, Homo sapien
ggccagagacaccacggaagacgta

SEQ ID NO: 28268 - DNA, 25 bp, Homo sapien
ggccagagacacgacggaagacgta

SEQ ID NO: 28269 - DNA, 25 bp, Homo sapien
acggacgaagatctcgaagagactc

SEQ ID NO: 28270 - DNA, 25 bp, Homo sapien
acggacgaagatgtcgaagagactc

SEQ ID NO: 28271 - DNA, 25 bp, Homo sapien
gacaaagaagtgtcgagatgaccgt

SEQ ID NO: 28272 - DNA, 25 bp, Homo sapien
gacaaagaagtgacgagatgaccgt

SEQ ID NO: 28273 - DNA, 25 bp, Homo sapien
tgtaaagagtaaaagactaatccct

SEQ ID NO: 28274 - DNA, 25 bp, Homo sapien
tgtaaagagtaatagactaatccct

SEQ ID NO: 28275 - DNA, 25 bp, Homo sapien
gtagaacaccaaagatctctaactg

SEQ ID NO: 28276 - DNA, 25 bp, Homo sapien
gtagaacaccaatgatctctaactg

SEQ ID NO: 28277 - DNA, 25 bp, Homo sapien
ccacggcactcgaggcgaagacatc

SEQ ID NO: 28278 - DNA, 25 bp, Homo sapien
ccacggcactcgtggcgaagacatc

SEQ ID NO: 28279 - DNA, 25 bp, Homo sapien
ggggaaaacccaggtctagagaata

SEQ ID NO: 28280 - DNA, 25 bp, Homo sapien
ggggaaaacccacgtctagagaata

SEQ ID NO: 28281 - DNA, 25 bp, Homo sapien
aagacgtgccggtcgtctcgtaata

SEQ ID NO: 28282 - DNA, 25 bp, Homo sapien
aagacgtgccggacgtctcgtaata

SEQ ID NO: 28283 - DNA, 25 bp, Homo sapien
ttatagagtttcctacagtttgtaa

SEQ ID NO: 28284 - DNA, 25 bp, Homo sapien
ttatagagtttcgtacagtttgtaa

SEQ ID NO: 28285 - DNA, 25 bp, Homo sapien
catcagcatccgaacctacgcgtgc

SEQ ID NO: 28286 - DNA, 25 bp, Homo sapien
catcagcatccgtacctacgcgtgc

SEQ ID NO: 28287 - DNA, 25 bp, Homo sapien
tctctcaagacctacctgagtcgtc

SEQ ID NO: 28288 - DNA, 25 bp, Homo sapien
tctctcaagaccaacctgagtcgtc

SEQ ID NO: 28289 - DNA, 25 bp, Homo sapien
ggtctcaaggacgacgtcttccgaa

SEQ ID NO: 28290 - DNA, 25 bp, Homo sapien
ggtctcaaggaccacgtcttccgaa

SEQ ID NO: 28291 - DNA, 25 bp, Homo sapien
ctttcctggagtaatgtcaatctaa

SEQ ID NO: 28292 - DNA, 25 bp, Homo sapien
ctttcctggagttatgtcaatctaa

SEQ ID NO: 28293 - DNA, 25 bp, Homo sapien
atttcgtgggtgtgttcaaagacac

SEQ ID NO: 28294 - DNA, 25 bp, Homo sapien
atttcgtgggtgagttcaaagacac

SEQ ID NO: 28295 - DNA, 25 bp, Homo sapien
cgtgtctacgttttactagtttccg

SEQ ID NO: 28296 - DNA, 25 bp, Homo sapien
cgtgtctacgttatactagtttccg

SEQ ID NO: 28297 - DNA, 25 bp, Homo sapien
tacagagactagtcacagagttacc

SEQ ID NO: 28298 - DNA, 25 bp, Homo sapien
tacagagactagacacagagttacc

SEQ ID NO: 28299 - DNA, 25 bp, Homo sapien
aaacagaagagacacgacactccct

SEQ ID NO: 28300 - DNA, 25 bp, Homo sapien
aaacagaagagagacgacactccct

SEQ ID NO: 28301 - DNA, 25 bp, Homo sapien
acagaagagacacgacactccctct

SEQ ID NO: 28302 - DNA, 25 bp, Homo sapien
acagaagagacaggacactccctct

SEQ ID NO: 28303 - DNA, 25 bp, Homo sapien
agagactagtcacagagttacccgc

SEQ ID NO: 28304 - DNA, 25 bp, Homo sapien
agagactagtcagagagttacccgc

SEQ ID NO: 28305 - DNA, 25 bp, Homo sapien
cagacgcggaggaaaagttcccgtc

SEQ ID NO: 28306 - DNA, 25 bp, Homo sapien
cagacgcggaggtaaagttcccgtc

SEQ ID NO: 28307 - DNA, 25 bp, Homo sapien
cttactggaaggatcacttcctccg

SEQ ID NO: 28308 - DNA, 25 bp, Homo sapien
cttactggaaggttcacttcctccg

SEQ ID NO: 28309 - DNA, 25 bp, Homo sapien
caaggtctacgttctcccggtctcg

SEQ ID NO: 28310 - DNA, 25 bp, Homo sapien
caaggtctacgtactcccggtctcg

SEQ ID NO: 28311 - DNA, 25 bp, Homo sapien
ccacgagcggtacagtgctggtcag

SEQ ID NO: 28312 - DNA, 25 bp, Homo sapien
ccacgagcggtagagtgctggtcag

SEQ ID NO: 28313 - DNA, 25 bp, Homo sapien
tcccctcggtgtgtgtggtccgttc

SEQ ID NO: 28314 - DNA, 25 bp, Homo sapien
tcccctcggtgtctgtggtccgttc

SEQ ID NO: 28315 - DNA, 25 bp, Homo sapien
ctcttcacgaagtgtagctccttct

SEQ ID NO: 28316 - DNA, 25 bp, Homo sapien
ctcttcacgaagagtagctccttct

SEQ ID NO: 28317 - DNA, 25 bp, Homo sapien
gatcttactactggaaagttccttt

SEQ ID NO: 28318 - DNA, 25 bp, Homo sapien
gatcttactactcgaaagttccttt

SEQ ID NO: 28319 - DNA, 25 bp, Homo sapien
ctcaaatcttggacaggtgtatatt

SEQ ID NO: 28320 - DNA, 25 bp, Homo sapien
ctcaaatcttggtcaggtgtatatt

SEQ ID NO: 28321 - DNA, 25 bp, Homo sapien
tgaaaagttcaaacaggtcgacaac

SEQ ID NO: 28322 - DNA, 25 bp, Homo sapien
tgaaaagttcaatcaggtcgacaac

SEQ ID NO: 28323 - DNA, 25 bp, Homo sapien
gaaataacccgtagtcgcgaccaca

SEQ ID NO: 28324 - DNA, 25 bp, Homo sapien
gaaataacccgttgtcgcgaccaca

SEQ ID NO: 28325 - DNA, 25 bp, Homo sapien
taagataagatttgtgtacccgtca

SEQ ID NO: 28326 - DNA, 25 bp, Homo sapien
taagataagattagtgtacccgtca

SEQ ID NO: 28327 - DNA, 25 bp, Homo sapien
aagataagatttgtgtacccgtcag

SEQ ID NO: 28328 - DNA, 25 bp, Homo sapien
aagataagatttctgtacccgtcag

SEQ ID NO: 28329 - DNA, 25 bp, Homo sapien
gtatatatgtagatgtcaaccaccg

SEQ ID NO: 28330 - DNA, 25 bp, Homo sapien
gtatatatgtagttgtcaaccaccg

SEQ ID NO: 28331 - DNA, 25 bp, Homo sapien
aatatctgaagtcacaacgtaaagt

SEQ ID NO: 28332 - DNA, 25 bp, Homo sapien
aatatctgaagtgacaacgtaaagt

SEQ ID NO: 28333 - DNA, 25 bp, Homo sapien
catacgtgtcgatgactaactaaat

SEQ ID NO: 28334 - DNA, 25 bp, Homo sapien
catacgtgtcgaagactaactaaat

SEQ ID NO: 28335 - DNA, 25 bp, Homo sapien
gacactcccacttccgttagatagt

SEQ ID NO: 28336 - DNA, 25 bp, Homo sapien
gacactcccactaccgttagatagt

SEQ ID NO: 28337 - DNA, 25 bp, Homo sapien
gtatctcgactctgtccgttaccct

SEQ ID NO: 28338 - DNA, 25 bp, Homo sapien
gtatctcgactcagtccgttaccct

SEQ ID NO: 28339 - DNA, 25 bp, Homo sapien
tcacctgcacacaaccgtctagggt

SEQ ID NO: 28340 - DNA, 25 bp, Homo sapien
tcacctgcacactaccgtctagggt

SEQ ID NO: 28341 - DNA, 25 bp, Homo sapien
ccgtctacccgaggaaccatgacgt

SEQ ID NO: 28342 - DNA, 25 bp, Homo sapien
ccgtctacccgacgaaccatgacgt

SEQ ID NO: 28343 - DNA, 25 bp, Homo sapien
gtgtatcgtagtaagacctattcgc

SEQ ID NO: 28344 - DNA, 25 bp, Homo sapien
gtgtatcgtagttagacctattcgc

SEQ ID NO: 28345 - DNA, 25 bp, Homo sapien
agtgatgaaagtggactcttctgac

SEQ ID NO: 28346 - DNA, 25 bp, Homo sapien
agtgatgaaagtcgactcttctgac

SEQ ID NO: 28347 - DNA, 25 bp, Homo sapien
tgacgtaaaaaatccgttcagttaa

SEQ ID NO: 28348 - DNA, 25 bp, Homo sapien
tgacgtaaaaaaaccgttcagttaa

SEQ ID NO: 28349 - DNA, 25 bp, Homo sapien
ttgtttaatcctctactgataagtg

SEQ ID NO: 28350 - DNA, 25 bp, Homo sapien
ttgtttaatcctgtactgataagtg

SEQ ID NO: 28351 - DNA, 25 bp, Homo sapien
tttgagtgtgacgaccactaatatt

SEQ ID NO: 28352 - DNA, 25 bp, Homo sapien
tttgagtgtgaccaccactaatatt

SEQ ID NO: 28353 - DNA, 25 bp, Homo sapien
cccgagtgaacgtgcacatgtagag

SEQ ID NO: 28354 - DNA, 25 bp, Homo sapien
cccgagtgaacgagcacatgtagag

SEQ ID NO: 28355 - DNA, 25 bp, Homo sapien
acctcctcagggacccggaagtgaa

SEQ ID NO: 28356 - DNA, 25 bp, Homo sapien
acctcctcagggtcccggaagtgaa

SEQ ID NO: 28357 - DNA, 25 bp, Homo sapien
gatctctaaggctccaggagtcaaa

SEQ ID NO: 28358 - DNA, 25 bp, Homo sapien
gatctctaaggcaccaggagtcaaa

SEQ ID NO: 28359 - DNA, 25 bp, Homo sapien
cgtgagtgtgtcacgaaattcgaaa

SEQ ID NO: 28360 - DNA, 25 bp, Homo sapien
cgtgagtgtgtctcgaaattcgaaa

SEQ ID NO: 28361 - DNA, 25 bp, Homo sapien
gatgcaacacaaggtactacctaac

SEQ ID NO: 28362 - DNA, 25 bp, Homo sapien
gatgcaacacaacgtactacctaac

SEQ ID NO: 28363 - DNA, 25 bp, Homo sapien
agtttgagaagtcttcgtcgttgtc

SEQ ID NO: 28364 - DNA, 25 bp, Homo sapien
agtttgagaagtgttcgtcgttgtc

SEQ ID NO: 28365 - DNA, 25 bp, Homo sapien
attaatgcatgtttctagactgtac

SEQ ID NO: 28366 - DNA, 25 bp, Homo sapien
attaatgcatgtatctagactgtac

SEQ ID NO: 28367 - DNA, 25 bp, Homo sapien
cacagatgtaattctttgactgtac

SEQ ID NO: 28368 - DNA, 25 bp, Homo sapien
cacagatgtaatactttgactgtac

SEQ ID NO: 28369 - DNA, 25 bp, Homo sapien
tcgtgaagagtaacagcatcatgtc

SEQ ID NO: 28370 - DNA, 25 bp, Homo sapien
tcgtgaagagtatcagcatcatgtc

SEQ ID NO: 28371 - DNA, 25 bp, Homo sapien
cctagaaatgagttgataccactta

SEQ ID NO: 28372 - DNA, 25 bp, Homo sapien
cctagaaatgagatgataccactta

SEQ ID NO: 28373 - DNA, 25 bp, Homo sapien
ccgaaaattgatcaacacgtagttt

SEQ ID NO: 28374 - DNA, 25 bp, Homo sapien
ccgaaaattgatgaacacgtagttt

SEQ ID NO: 28375 - DNA, 25 bp, Homo sapien
tgataatacttcgtgtctaagttca

SEQ ID NO: 28376 - DNA, 25 bp, Homo sapien
tgataatacttcctgtctaagttca

SEQ ID NO: 28377 - DNA, 25 bp, Homo sapien
ggtcccgtctcctggttgtacccgt

SEQ ID NO: 28378 - DNA, 25 bp, Homo sapien
ggtcccgtctccaggttgtacccgt

SEQ ID NO: 28379 - DNA, 25 bp, Homo sapien
ggggtcctctgacattataacgttt

SEQ ID NO: 28380 - DNA, 25 bp, Homo sapien
ggggtcctctgagattataacgttt

SEQ ID NO: 28381 - DNA, 25 bp, Homo sapien
agcgtcgatgactcgtacgcgtgtc

SEQ ID NO: 28382 - DNA, 25 bp, Homo sapien
agcgtcgatgacacgtacgcgtgtc

SEQ ID NO: 28383 - DNA, 25 bp, Homo sapien
cacatttggggtctccgacggtgac

SEQ ID NO: 28384 - DNA, 25 bp, Homo sapien
cacatttggggtgtccgacggtgac

SEQ ID NO: 28385 - DNA, 25 bp, Homo sapien
ccttcgactggaacttcgagaggtc

SEQ ID NO: 28386 - DNA, 25 bp, Homo sapien
ccttcgactggatcttcgagaggtc

SEQ ID NO: 28387 - DNA, 25 bp, Homo sapien
aacacgtttttcatttcgtgaagtg

SEQ ID NO: 28388 - DNA, 25 bp, Homo sapien
aacacgtttttcttttcgtgaagtg

SEQ ID NO: 28389 - DNA, 25 bp, Homo sapien
gaaggtcctacgtttcggtcacacg

SEQ ID NO: 28390 - DNA, 25 bp, Homo sapien
gaaggtcctacgattcggtcacacg

SEQ ID NO: 28391 - DNA, 25 bp, Homo sapien
cgattgacccgtggttagtacgaag

SEQ ID NO: 28392 - DNA, 25 bp, Homo sapien
cgattgacccgtcgttagtacgaag

SEQ ID NO: 28393 - DNA, 25 bp, Homo sapien
ccgaagtttgttcttgagacaacgt

SEQ ID NO: 28394 - DNA, 25 bp, Homo sapien
ccgaagtttgttgttgagacaacgt

SEQ ID NO: 28395 - DNA, 25 bp, Homo sapien
gtagtattgtagtcccacagttaag

SEQ ID NO: 28396 - DNA, 25 bp, Homo sapien
gtagtattgtagacccacagttaag

SEQ ID NO: 28397 - DNA, 25 bp, Homo sapien
catttagaacatacgtacggttgag

SEQ ID NO: 28398 - DNA, 25 bp, Homo sapien
catttagaacattcgtacggttgag

SEQ ID NO: 28399 - DNA, 25 bp, Homo sapien
cccttatagatccattgaccttata

SEQ ID NO: 28400 - DNA, 25 bp, Homo sapien
cccttatagatcgattgaccttata

SEQ ID NO: 28401 - DNA, 25 bp, Homo sapien
cctttgatgtttttcacagttctag

SEQ ID NO: 28402 - DNA, 25 bp, Homo sapien
cctttgatgtttatcacagttctag

SEQ ID NO: 28403 - DNA, 25 bp, Homo sapien
tccgtgtcgaattttcaaaatttgt

SEQ ID NO: 28404 - DNA, 25 bp, Homo sapien
tccgtgtcgaatattcaaaatttgt

SEQ ID NO: 28405 - DNA, 25 bp, Homo sapien
gtcacgtaacagttgttcaaaatat

SEQ ID NO: 28406 - DNA, 25 bp, Homo sapien
gtcacgtaacagatgttcaaaatat

SEQ ID NO: 28407 - DNA, 25 bp, Homo sapien
gacgttcaagattcggacataaatc

SEQ ID NO: 28408 - DNA, 25 bp, Homo sapien
gacgttcaagatacggacataaatc

SEQ ID NO: 28409 - DNA, 25 bp, Homo sapien
cggttttatgttagcacaacatact

SEQ ID NO: 28410 - DNA, 25 bp, Homo sapien
cggttttatgtttgcacaacatact

SEQ ID NO: 28411 - DNA, 25 bp, Homo sapien
aggtcggttcgtcgtcgaaataatc

SEQ ID NO: 28412 - DNA, 25 bp, Homo sapien
aggtcggttcgtggtcgaaataatc

SEQ ID NO: 28413 - DNA, 25 bp, Homo sapien
gtcgatatcgtcgtcttaccccgtc

SEQ ID NO: 28414 - DNA, 25 bp, Homo sapien
gtcgatatcgtcctcttaccccgtc

SEQ ID NO: 28415 - DNA, 25 bp, Homo sapien
aactcaacgtgcagtttagaccccg

SEQ ID NO: 28416 - DNA, 25 bp, Homo sapien
aactcaacgtgctgtttagaccccg

SEQ ID NO: 28417 - DNA, 25 bp, Homo sapien
ggactggcagttggtcatccgtccg

SEQ ID NO: 28418 - DNA, 25 bp, Homo sapien
ggactggcagttcgtcatccgtccg

SEQ ID NO: 28419 - DNA, 25 bp, Homo sapien
cacttcggggtcgatagtaccgtca

SEQ ID NO: 28420 - DNA, 25 bp, Homo sapien
cacttcggggtccatagtaccgtca

SEQ ID NO: 28421 - DNA, 25 bp, Homo sapien
tgaaacctcgcgtgccacattgtga

SEQ ID NO: 28422 - DNA, 25 bp, Homo sapien
tgaaacctcgcgagccacattgtga

SEQ ID NO: 28423 - DNA, 25 bp, Homo sapien
acccgacacaaagtctcatatggtg

SEQ ID NO: 28424 - DNA, 25 bp, Homo sapien
acccgacacaaactctcatatggtg

SEQ ID NO: 28425 - DNA, 25 bp, Homo sapien
ggtactagaaaaggtcagactcgtg

SEQ ID NO: 28426 - DNA, 25 bp, Homo sapien
ggtactagaaaacgtcagactcgtg

SEQ ID NO: 28427 - DNA, 25 bp, Homo sapien
agagtcaaaagaatccgtcgtcgtg

SEQ ID NO: 28428 - DNA, 25 bp, Homo sapien
agagtcaaaagattccgtcgtcgtg

SEQ ID NO: 28429 - DNA, 25 bp, Homo sapien
gggtagttgcaattctacctctctg

SEQ ID NO: 28430 - DNA, 25 bp, Homo sapien
gggtagttgcaaatctacctctctg

SEQ ID NO: 28431 - DNA, 25 bp, Homo sapien
gtggcgacttgcaaatctcccactc

SEQ ID NO: 28432 - DNA, 25 bp, Homo sapien
gtggcgacttgctaatctcccactc

SEQ ID NO: 28433 - DNA, 25 bp, Homo sapien
aggtcacatgtaaaattgtccaccg

SEQ ID NO: 28434 - DNA, 25 bp, Homo sapien
aggtcacatgtataattgtccaccg

SEQ ID NO: 28435 - DNA, 25 bp, Homo sapien
aaggaacagtgaggaatggtccctg

SEQ ID NO: 28436 - DNA, 25 bp, Homo sapien
aaggaacagtgacgaatggtccctg

SEQ ID NO: 28437 - DNA, 25 bp, Homo sapien
aggaaccgggcacagtcgcttccct

SEQ ID NO: 28438 - DNA, 25 bp, Homo sapien
aggaaccgggcagagtcgcttccct

SEQ ID NO: 28439 - DNA, 25 bp, Homo sapien
cactagggtagacacgggctgttcc

SEQ ID NO: 28440 - DNA, 25 bp, Homo sapien
cactagggtagagacgggctgttcc

SEQ ID NO: 28441 - DNA, 25 bp, Homo sapien
gtccagggagagggggatggtatct

SEQ ID NO: 28442 - DNA, 25 bp, Homo sapien
gtccagggagagcgggatggtatct

SEQ ID NO: 28443 - DNA, 25 bp, Homo sapien
agtctagggagtcacggattctttt

SEQ ID NO: 28444 - DNA, 25 bp, Homo sapien
agtctagggagtgacggattctttt

SEQ ID NO: 28445 - DNA, 25 bp, Homo sapien
gagtaggagtgaatactccactggt

SEQ ID NO: 28446 - DNA, 25 bp, Homo sapien
gagtaggagtgattactccactggt

SEQ ID NO: 28447 - DNA, 25 bp, Homo sapien
gttacagtctgtccacctacacttg

SEQ ID NO: 28448 - DNA, 25 bp, Homo sapien
gttacagtctgtgcacctacacttg

SEQ ID NO: 28449 - DNA, 25 bp, Homo sapien
ttctagtggtaccactacggtcagg

SEQ ID NO: 28450 - DNA, 25 bp, Homo sapien
ttctagtggtacgactacggtcagg

SEQ ID NO: 28451 - DNA, 25 bp, Homo sapien
ttgtccggtcgtaacgatgtcggtc

SEQ ID NO: 28452 - DNA, 25 bp, Homo sapien
ttgtccggtcgttacgatgtcggtc

SEQ ID NO: 28453 - DNA, 25 bp, Homo sapien
ttcgtacaggtctgtctgtggtgtt

SEQ ID NO: 28454 - DNA, 25 bp, Homo sapien
ttcgtacaggtcagtctgtggtgtt

SEQ ID NO: 28455 - DNA, 25 bp, Homo sapien
gggatccgagtctcagtctgggttt

SEQ ID NO: 28456 - DNA, 25 bp, Homo sapien
gggatccgagtcacagtctgggttt

SEQ ID NO: 28457 - DNA, 25 bp, Homo sapien
caccaattgttgtcgttattttggt

SEQ ID NO: 28458 - DNA, 25 bp, Homo sapien
caccaattgttgacgttattttggt

SEQ ID NO: 28459 - DNA, 25 bp, Homo sapien
cccatgtcgtaatatctttcattgg

SEQ ID NO: 28460 - DNA, 25 bp, Homo sapien
cccatgtcgtaaaatctttcattgg

SEQ ID NO: 28461 - DNA, 25 bp, Homo sapien
actaaagtacacaggcttccattgg

SEQ ID NO: 28462 - DNA, 25 bp, Homo sapien
actaaagtacactggcttccattgg

SEQ ID NO: 28463 - DNA, 25 bp, Homo sapien
cccacaacacatgactttcatgggt

SEQ ID NO: 28464 - DNA, 25 bp, Homo sapien
cccacaacacatcactttcatgggt

SEQ ID NO: 28465 - DNA, 25 bp, Homo sapien
catatctgtgccttttactgagact

SEQ ID NO: 28466 - DNA, 25 bp, Homo sapien
catatctgtgccatttactgagact

SEQ ID NO: 28467 - DNA, 25 bp, Homo sapien
caacttcagtcctggcgtatgagtc

SEQ ID NO: 28468 - DNA, 25 bp, Homo sapien
caacttcagtccaggcgtatgagtc

SEQ ID NO: 28469 - DNA, 25 bp, Homo sapien
ggtcgaggacaaactgatcgtggcc

SEQ ID NO: 28470 - DNA, 25 bp, Homo sapien
ggtcgaggacaatctgatcgtggcc

SEQ ID NO: 28471 - DNA, 25 bp, Homo sapien
gggacggtccactttcctttataac

SEQ ID NO: 28472 - DNA, 25 bp, Homo sapien
gggacggtccacattcctttataac

SEQ ID NO: 28473 - DNA, 25 bp, Homo sapien
ggtttctctcatagtccgtttaaga

SEQ ID NO: 28474 - DNA, 25 bp, Homo sapien
ggtttctctcattgtccgtttaaga

SEQ ID NO: 28475 - DNA, 25 bp, Homo sapien
acagttctgtttggtggtctcttgg

SEQ ID NO: 28476 - DNA, 25 bp, Homo sapien
acagttctgtttcgtggtctcttgg

SEQ ID NO: 28477 - DNA, 25 bp, Homo sapien
aacccacagattacggaggtccctc

SEQ ID NO: 28478 - DNA, 25 bp, Homo sapien
aacccacagatttcggaggtccctc

SEQ ID NO: 28479 - DNA, 25 bp, Homo sapien
ctcagactttcgagtatcaccgtac

SEQ ID NO: 28480 - DNA, 25 bp, Homo sapien
ctcagactttcgtgtatcaccgtac

SEQ ID NO: 28481 - DNA, 25 bp, Homo sapien
ctagccgttcacgatacagtacacg

SEQ ID NO: 28482 - DNA, 25 bp, Homo sapien
ctagccgttcaccatacagtacacg

SEQ ID NO: 28483 - DNA, 25 bp, Homo sapien
aattgtacagtttcctagatgtaca

SEQ ID NO: 28484 - DNA, 25 bp, Homo sapien
aattgtacagttacctagatgtaca

SEQ ID NO: 28485 - DNA, 25 bp, Homo sapien
cagattacactctaggagttttaca

SEQ ID NO: 28486 - DNA, 25 bp, Homo sapien
cagattacactcaaggagttttaca

SEQ ID NO: 28487 - DNA, 25 bp, Homo sapien
gcgaaacaagccaatcgatttcacc

SEQ ID NO: 28488 - DNA, 25 bp, Homo sapien
gcgaaacaagcctatcgatttcacc

SEQ ID NO: 28489 - DNA, 25 bp, Homo sapien
aaagagtatgttagacttcggactc

SEQ ID NO: 28490 - DNA, 25 bp, Homo sapien
aaagagtatgtttgacttcggactc

SEQ ID NO: 28491 - DNA, 25 bp, Homo sapien
ctcaaataaagaaccacggaggttc

SEQ ID NO: 28492 - DNA, 25 bp, Homo sapien
ctcaaataaagatccacggaggttc

SEQ ID NO: 28493 - DNA, 25 bp, Homo sapien
ccattgtaaaataccgacctgtcag

SEQ ID NO: 28494 - DNA, 25 bp, Homo sapien
ccattgtaaaattccgacctgtcag

SEQ ID NO: 28495 - DNA, 25 bp, Homo sapien
tggtaaaatgtactacgaactactt

SEQ ID NO: 28496 - DNA, 25 bp, Homo sapien
tggtaaaatgtagtacgaactactt

SEQ ID NO: 28497 - DNA, 25 bp, Homo sapien
tgtgaaccaaacgaggacaacgtaa

SEQ ID NO: 28498 - DNA, 25 bp, Homo sapien
tgtgaaccaaaccaggacaacgtaa

SEQ ID NO: 28499 - DNA, 25 bp, Homo sapien
ggaaaccacttaaagtcgcaacgaa

SEQ ID NO: 28500 - DNA, 25 bp, Homo sapien
ggaaaccacttatagtcgcaacgaa

SEQ ID NO: 28501 - DNA, 25 bp, Homo sapien
aacccagtagctacggggtcgaagt

SEQ ID NO: 28502 - DNA, 25 bp, Homo sapien
aacccagtagcttcggggtcgaagt

SEQ ID NO: 28503 - DNA, 25 bp, Homo sapien
gagccccggggttcgcaacgcatac

SEQ ID NO: 28504 - DNA, 25 bp, Homo sapien
gagccccggggtacgcaacgcatac

SEQ ID NO: 28505 - DNA, 25 bp, Homo sapien
cgtgccccgagtgtctgcgaaaagg

SEQ ID NO: 28506 - DNA, 25 bp, Homo sapien
cgtgccccgagtctctgcgaaaagg

SEQ ID NO: 28507 - DNA, 25 bp, Homo sapien
cctccacgtgcaggagacacggggt

SEQ ID NO: 28508 - DNA, 25 bp, Homo sapien
cctccacgtgcacgagacacggggt

SEQ ID NO: 28509 - DNA, 25 bp, Homo sapien
atctccgtctccaccggaactggtt

SEQ ID NO: 28510 - DNA, 25 bp, Homo sapien
atctccgtctcctccggaactggtt

SEQ ID NO: 28511 - DNA, 25 bp, Homo sapien
cactcgcccttgaccggcttggtgt

SEQ ID NO: 28512 - DNA, 25 bp, Homo sapien
cactcgcccttgtccggcttggtgt

SEQ ID NO: 28513 - DNA, 25 bp, Homo sapien
atcaccgttgacttgtcgatgtttt

SEQ ID NO: 28514 - DNA, 25 bp, Homo sapien
atcaccgttgacatgtcgatgtttt

SEQ ID NO: 28515 - DNA, 25 bp, Homo sapien
tagacctcagtaggtagagttcttt

SEQ ID NO: 28516 - DNA, 25 bp, Homo sapien
tagacctcagtacgtagagttcttt

SEQ ID NO: 28517 - DNA, 25 bp, Homo sapien
aactctcatgtcagtagtacggttt

SEQ ID NO: 28518 - DNA, 25 bp, Homo sapien
aactctcatgtctgtagtacggttt

SEQ ID NO: 28519 - DNA, 25 bp, Homo sapien
caccccgtacttcgtgtgtgacgtg

SEQ ID NO: 28520 - DNA, 25 bp, Homo sapien
caccccgtacttggtgtgtgacgtg

SEQ ID NO: 28521 - DNA, 25 bp, Homo sapien
acattgtcagtgttttgtcggtcgg

SEQ ID NO: 28522 - DNA, 25 bp, Homo sapien
acattgtcagtgatttgtcggtcgg

SEQ ID NO: 28523 - DNA, 25 bp, Homo sapien
taaactttgtttatcaacgtggttc

SEQ ID NO: 28524 - DNA, 25 bp, Homo sapien
taaactttgtttttcaacgtggttc

SEQ ID NO: 28525 - DNA, 25 bp, Homo sapien
ttgaacgggtttttaaaccgggtct

SEQ ID NO: 28526 - DNA, 25 bp, Homo sapien
ttgaacgggtttataaaccgggtct

SEQ ID NO: 28527 - DNA, 25 bp, Homo sapien
ttctgaatcattgtgtcaaggattc

SEQ ID NO: 28528 - DNA, 25 bp, Homo sapien
ttctgaatcattctgtcaaggattc

SEQ ID NO: 28529 - DNA, 25 bp, Homo sapien
gataactaggttttcataagcacta

SEQ ID NO: 28530 - DNA, 25 bp, Homo sapien
gataactaggttatcataagcacta

SEQ ID NO: 28531 - DNA, 25 bp, Homo sapien
ggtacctatggaactcatcacccta

SEQ ID NO: 28532 - DNA, 25 bp, Homo sapien
ggtacctatggatctcatcacccta

SEQ ID NO: 28533 - DNA, 25 bp, Homo sapien
actatcacacaggtctcttactcgg

SEQ ID NO: 28534 - DNA, 25 bp, Homo sapien
actatcacacagctctcttactcgg

SEQ ID NO: 28535 - DNA, 25 bp, Homo sapien
tgtactgagaagcttgtcgtagagc

SEQ ID NO: 28536 - DNA, 25 bp, Homo sapien
tgtactgagaaggttgtcgtagagc

SEQ ID NO: 28537 - DNA, 25 bp, Homo sapien
cgttattcaatccttcgtcgtcccg

SEQ ID NO: 28538 - DNA, 25 bp, Homo sapien
cgttattcaatcgttcgtcgtcccg

SEQ ID NO: 28539 - DNA, 25 bp, Homo sapien
tactcggaagtcgtcgtttcgacag

SEQ ID NO: 28540 - DNA, 25 bp, Homo sapien
tactcggaagtcctcgtttcgacag

SEQ ID NO: 28541 - DNA, 25 bp, Homo sapien
tccattgtgtgagttccgtttaaag

SEQ ID NO: 28542 - DNA, 25 bp, Homo sapien
tccattgtgtgacttccgtttaaag

SEQ ID NO: 28543 - DNA, 25 bp, Homo sapien
agatttgagtcaggttcccaatatt

SEQ ID NO: 28544 - DNA, 25 bp, Homo sapien
agatttgagtcacgttcccaatatt

SEQ ID NO: 28545 - DNA, 25 bp, Homo sapien
aggttcttcctacgttcccactttg

SEQ ID NO: 28546 - DNA, 25 bp, Homo sapien
aggttcttcctaggttcccactttg

SEQ ID NO: 28547 - DNA, 25 bp, Homo sapien
gtcctcaggtagactccatgtcttg

SEQ ID NO: 28548 - DNA, 25 bp, Homo sapien
gtcctcaggtagtctccatgtcttg

SEQ ID NO: 28549 - DNA, 25 bp, Homo sapien
accggatctttcgattccggtacgt

SEQ ID NO: 28550 - DNA, 25 bp, Homo sapien
accggatctttccattccggtacgt

SEQ ID NO: 28551 - DNA, 25 bp, Homo sapien
acactcctggtcattccttccggaa

SEQ ID NO: 28552 - DNA, 25 bp, Homo sapien
acactcctggtctttccttccggaa

SEQ ID NO: 28553 - DNA, 25 bp, Homo sapien
cgtagtcgacgtctgcaggggaacg

SEQ ID NO: 28554 - DNA, 25 bp, Homo sapien
cgtagtcgacgtgtgcaggggaacg

SEQ ID NO: 28555 - DNA, 25 bp, Homo sapien
tctttatcagttgcatcgaaggacc

SEQ ID NO: 28556 - DNA, 25 bp, Homo sapien
tctttatcagttccatcgaaggacc

SEQ ID NO: 28557 - DNA, 25 bp, Homo sapien
gtctttatttcacgtatccaggacc

SEQ ID NO: 28558 - DNA, 25 bp, Homo sapien
gtctttatttcaggtatccaggacc

SEQ ID NO: 28559 - DNA, 25 bp, Homo sapien
gaggtagactctacgtaaaagactg

SEQ ID NO: 28560 - DNA, 25 bp, Homo sapien
gaggtagactcttcgtaaaagactg

SEQ ID NO: 28561 - DNA, 25 bp, Homo sapien
aaaaacgtagtatctggggagactc

SEQ ID NO: 28562 - DNA, 25 bp, Homo sapien
aaaaacgtagtaactggggagactc

SEQ ID NO: 28563 - DNA, 25 bp, Homo sapien
cacataaatgttcgtgttgtgactc

SEQ ID NO: 28564 - DNA, 25 bp, Homo sapien
cacataaatgttggtgttgtgactc

SEQ ID NO: 28565 - DNA, 25 bp, Homo sapien
ctgtacaaactagtgtgttgtcgtt

SEQ ID NO: 28566 - DNA, 25 bp, Homo sapien
ctgtacaaactactgtgttgtcgtt

SEQ ID NO: 28567 - DNA, 25 bp, Homo sapien
cttcgtgaacactgtcttttgtata

SEQ ID NO: 28568 - DNA, 25 bp, Homo sapien
cttcgtgaacacagtcttttgtata

SEQ ID NO: 28569 - DNA, 25 bp, Homo sapien
gactcagacaagcaagtagacgagc

SEQ ID NO: 28570 - DNA, 25 bp, Homo sapien
gactcagacaaggaagtagacgagc

SEQ ID NO: 28571 - DNA, 25 bp, Homo sapien
cgcggaaagacggcctgcgctcgtc

SEQ ID NO: 28572 - DNA, 25 bp, Homo sapien
cgcggaaagacgccctgcgctcgtc

SEQ ID NO: 28573 - DNA, 25 bp, Homo sapien
agcgagagtcaataatcttagactc

SEQ ID NO: 28574 - DNA, 25 bp, Homo sapien
agcgagagtcaaaaatcttagactc

SEQ ID NO: 28575 - DNA, 25 bp, Homo sapien
ggagacggaaataaagtgccgacct

SEQ ID NO: 28576 - DNA, 25 bp, Homo sapien
ggagacggaaattaagtgccgacct

SEQ ID NO: 28577 - DNA, 25 bp, Homo sapien
aagaaaacgtataactcgaagactc

SEQ ID NO: 28578 - DNA, 25 bp, Homo sapien
aagaaaacgtattactcgaagactc

SEQ ID NO: 28579 - DNA, 25 bp, Homo sapien
attttgtagtaaagacgtcacgccg

SEQ ID NO: 28580 - DNA, 25 bp, Homo sapien
attttgtagtaatgacgtcacgccg

SEQ ID NO: 28581 - DNA, 25 bp, Homo sapien
tgctacacgtagacgacgacgaaga

SEQ ID NO: 28582 - DNA, 25 bp, Homo sapien
tgctacacgtagtcgacgacgaaga

SEQ ID NO: 28583 - DNA, 25 bp, Homo sapien
cggatggtgtgaagtgtagacccat

SEQ ID NO: 28584 - DNA, 25 bp, Homo sapien
cggatggtgtgatgtgtagacccat

SEQ ID NO: 28585 - DNA, 25 bp, Homo sapien
aaataccggtggtcgtcgacgttga

SEQ ID NO: 28586 - DNA, 25 bp, Homo sapien
aaataccggtggacgtcgacgttga

SEQ ID NO: 28587 - DNA, 25 bp, Homo sapien
cctttcggtcggagtcagtgtagag

SEQ ID NO: 28588 - DNA, 25 bp, Homo sapien
cctttcggtcggtgtcagtgtagag

SEQ ID NO: 28589 - DNA, 25 bp, Homo sapien
tccgtattcgccatgcgtgtcgaag

SEQ ID NO: 28590 - DNA, 25 bp, Homo sapien
tccgtattcgccttgcgtgtcgaag

SEQ ID NO: 28591 - DNA, 25 bp, Homo sapien
ggtcggttcgtcgatcagttttata

SEQ ID NO: 28592 - DNA, 25 bp, Homo sapien
ggtcggttcgtccatcagttttata

SEQ ID NO: 28593 - DNA, 25 bp, Homo sapien
gttactacgccgtccgttgttgtag

SEQ ID NO: 28594 - DNA, 25 bp, Homo sapien
gttactacgccgaccgttgttgtag

SEQ ID NO: 28595 - DNA, 25 bp, Homo sapien
actcagagaggaacagggtctcgct

SEQ ID NO: 28596 - DNA, 25 bp, Homo sapien
actcagagaggatcagggtctcgct

SEQ ID NO: 28597 - DNA, 25 bp, Homo sapien
tgcgtcttcgggtcgacgagcgccc

SEQ ID NO: 28598 - DNA, 25 bp, Homo sapien
tgcgtcttcgggacgacgagcgccc

SEQ ID NO: 28599 - DNA, 25 bp, Homo sapien
ccgtctgggtcgtcggtctctcact

SEQ ID NO: 28600 - DNA, 25 bp, Homo sapien
ccgtctgggtcgacggtctctcact

SEQ ID NO: 28601 - DNA, 25 bp, Homo sapien
accccaaggtattcactggactcac

SEQ ID NO: 28602 - DNA, 25 bp, Homo sapien
accccaaggtatacactggactcac

SEQ ID NO: 28603 - DNA, 25 bp, Homo sapien
acctgcagggtttcgactcagacaa

SEQ ID NO: 28604 - DNA, 25 bp, Homo sapien
acctgcagggttacgactcagacaa

SEQ ID NO: 28605 - DNA, 25 bp, Homo sapien
gcgtgtctttttcagtctaaacgga

SEQ ID NO: 28606 - DNA, 25 bp, Homo sapien
gcgtgtctttttgagtctaaacgga

SEQ ID NO: 28607 - DNA, 25 bp, Homo sapien
ggttgtcttttcaattagaccacta

SEQ ID NO: 28608 - DNA, 25 bp, Homo sapien
ggttgtcttttctattagaccacta

SEQ ID NO: 28609 - DNA, 25 bp, Homo sapien
ggtattatcttctctgtgccactcg

SEQ ID NO: 28610 - DNA, 25 bp, Homo sapien
ggtattatcttcactgtgccactcg

SEQ ID NO: 28611 - DNA, 25 bp, Homo sapien
tatgaaccctgtgactgtaaataat

SEQ ID NO: 28612 - DNA, 25 bp, Homo sapien
tatgaaccctgtcactgtaaataat

SEQ ID NO: 28613 - DNA, 25 bp, Homo sapien
agaataagtacgtcgtcatatagtc

SEQ ID NO: 28614 - DNA, 25 bp, Homo sapien
agaataagtacgacgtcatatagtc

SEQ ID NO: 28615 - DNA, 25 bp, Homo sapien
tgtagagacatagaagtcttaacct

SEQ ID NO: 28616 - DNA, 25 bp, Homo sapien
tgtagagacatacaagtcttaacct

SEQ ID NO: 28617 - DNA, 25 bp, Homo sapien
aaaactaggtactgattttatccgt

SEQ ID NO: 28618 - DNA, 25 bp, Homo sapien
aaaactaggtacagattttatccgt

SEQ ID NO: 28619 - DNA, 25 bp, Homo sapien
ataaagtgtcgtgactactatcgag

SEQ ID NO: 28620 - DNA, 25 bp, Homo sapien
ataaagtgtcgtcactactatcgag

SEQ ID NO: 28621 - DNA, 25 bp, Homo sapien
gaacgaaaactttcgacactatcgc

SEQ ID NO: 28622 - DNA, 25 bp, Homo sapien
gaacgaaaacttacgacactatcgc

SEQ ID NO: 28623 - DNA, 25 bp, Homo sapien
gactcgagcctcgtgaccgtaaggc

SEQ ID NO: 28624 - DNA, 25 bp, Homo sapien
gactcgagcctcctgaccgtaaggc

SEQ ID NO: 28625 - DNA, 25 bp, Homo sapien
tcgtgtgaccctcttccgtaagaac

SEQ ID NO: 28626 - DNA, 25 bp, Homo sapien
tcgtgtgaccctgttccgtaagaac

SEQ ID NO: 28627 - DNA, 25 bp, Homo sapien
gtgtgtctccattgttactgtaaac

SEQ ID NO: 28628 - DNA, 25 bp, Homo sapien
gtgtgtctccatagttactgtaaac

SEQ ID NO: 28629 - DNA, 25 bp, Homo sapien
gtcgtgacctactgaggactcaaac

SEQ ID NO: 28630 - DNA, 25 bp, Homo sapien
gtcgtgacctacagaggactcaaac

SEQ ID NO: 28631 - DNA, 25 bp, Homo sapien
tctttgacccaggtgtctcgatgac

SEQ ID NO: 28632 - DNA, 25 bp, Homo sapien
tctttgacccagctgtctcgatgac

SEQ ID NO: 28633 - DNA, 25 bp, Homo sapien
atttactacgtcaacacgttttagg

SEQ ID NO: 28634 - DNA, 25 bp, Homo sapien
atttactacgtctacacgttttagg

SEQ ID NO: 28635 - DNA, 25 bp, Homo sapien
acagtgtcctctacagtgtctacaa

SEQ ID NO: 28636 - DNA, 25 bp, Homo sapien
acagtgtcctcttcagtgtctacaa

SEQ ID NO: 28637 - DNA, 25 bp, Homo sapien
agaactttcgacagtaactactgac

SEQ ID NO: 28638 - DNA, 25 bp, Homo sapien
agaactttcgactgtaactactgac

SEQ ID NO: 28639 - DNA, 25 bp, Homo sapien
agagaccgtcctcctgtcactgtcg

SEQ ID NO: 28640 - DNA, 25 bp, Homo sapien
agagaccgtcctgctgtcactgtcg

SEQ ID NO: 28641 - DNA, 25 bp, Homo sapien
tcgacgtcggtggaacagcgtcccc

SEQ ID NO: 28642 - DNA, 25 bp, Homo sapien
tcgacgtcggtgcaacagcgtcccc

SEQ ID NO: 28643 - DNA, 25 bp, Homo sapien
cgtcctcggtggtcggagcgtcctc

SEQ ID NO: 28644 - DNA, 25 bp, Homo sapien
cgtcctcggtggacggagcgtcctc

SEQ ID NO: 28645 - DNA, 25 bp, Homo sapien
ctttcgacgagcaagtggcggacgc

SEQ ID NO: 28646 - DNA, 25 bp, Homo sapien
ctttcgacgagctagtggcggacgc

SEQ ID NO: 28647 - DNA, 25 bp, Homo sapien
taggacgtcgagatcagagggcacc

SEQ ID NO: 28648 - DNA, 25 bp, Homo sapien
taggacgtcgagttcagagggcacc

SEQ ID NO: 28649 - DNA, 25 bp, Homo sapien
gacgtcacagcgaccgtgggagacc

SEQ ID NO: 28650 - DNA, 25 bp, Homo sapien
gacgtcacagcgtccgtgggagacc

SEQ ID NO: 28651 - DNA, 25 bp, Homo sapien
ctgacggggacacctccaggaacac

SEQ ID NO: 28652 - DNA, 25 bp, Homo sapien
ctgacggggacagctccaggaacac

SEQ ID NO: 28653 - DNA, 25 bp, Homo sapien
tcttcggagtactcctaagtctcac

SEQ ID NO: 28654 - DNA, 25 bp, Homo sapien
tcttcggagtacacctaagtctcac

SEQ ID NO: 28655 - DNA, 25 bp, Homo sapien
tggtgatctgactaccgtcgtttga

SEQ ID NO: 28656 - DNA, 25 bp, Homo sapien
tggtgatctgacaaccgtcgtttga

SEQ ID NO: 28657 - DNA, 25 bp, Homo sapien
ctcccacgactctacggaacgtaga

SEQ ID NO: 28658 - DNA, 25 bp, Homo sapien
ctcccacgactcaacggaacgtaga

SEQ ID NO: 28659 - DNA, 25 bp, Homo sapien
accaagtacgtaacggaatactaga

SEQ ID NO: 28660 - DNA, 25 bp, Homo sapien
accaagtacgtatcggaatactaga

SEQ ID NO: 28661 - DNA, 25 bp, Homo sapien
cctcgagaagtattcacagtagaca

SEQ ID NO: 28662 - DNA, 25 bp, Homo sapien
cctcgagaagtaatcacagtagaca

SEQ ID NO: 28663 - DNA, 25 bp, Homo sapien
acgtcgccacgtactgtaagtaata

SEQ ID NO: 28664 - DNA, 25 bp, Homo sapien
acgtcgccacgttctgtaagtaata

SEQ ID NO: 28665 - DNA, 25 bp, Homo sapien
tgacccgacgactctagacgaccga

SEQ ID NO: 28666 - DNA, 25 bp, Homo sapien
tgacccgacgacactagacgaccga

SEQ ID NO: 28667 - DNA, 25 bp, Homo sapien
tgactacaacgtcaacaggtcctag

SEQ ID NO: 28668 - DNA, 25 bp, Homo sapien
tgactacaacgtgaacaggtcctag

SEQ ID NO: 28669 - DNA, 25 bp, Homo sapien
aatgataaaggtacaagtcgactct

SEQ ID NO: 28670 - DNA, 25 bp, Homo sapien
aatgataaaggttcaagtcgactct

SEQ ID NO: 28671 - DNA, 25 bp, Homo sapien
cacagagagaagtccgaggagctcg

SEQ ID NO: 28672 - DNA, 25 bp, Homo sapien
cacagagagaagaccgaggagctcg

SEQ ID NO: 28673 - DNA, 25 bp, Homo sapien
gtcggcggtcactctacaggacgcc

SEQ ID NO: 28674 - DNA, 25 bp, Homo sapien
gtcggcggtcacactacaggacgcc

SEQ ID NO: 28675 - DNA, 25 bp, Homo sapien
gactctcttcaaacagtcgacgctc

SEQ ID NO: 28676 - DNA, 25 bp, Homo sapien
gactctcttcaatcagtcgacgctc

SEQ ID NO: 28677 - DNA, 25 bp, Homo sapien
gacactgtcataaagtaaacacctg

SEQ ID NO: 28678 - DNA, 25 bp, Homo sapien
gacactgtcatatagtaaacacctg

SEQ ID NO: 28679 - DNA, 25 bp, Homo sapien
gtttcgaaacgtaagaattacctct

SEQ ID NO: 28680 - DNA, 25 bp, Homo sapien
gtttcgaaacgttagaattacctct

SEQ ID NO: 28681 - DNA, 25 bp, Homo sapien
catagttgaacaaacatatataaat

SEQ ID NO: 28682 - DNA, 25 bp, Homo sapien
catagttgaacatacatatataaat

SEQ ID NO: 28683 - DNA, 25 bp, Homo sapien
agtgtcaacacgacccattaagtat

SEQ ID NO: 28684 - DNA, 25 bp, Homo sapien
agtgtcaacacgtcccattaagtat

SEQ ID NO: 28685 - DNA, 25 bp, Homo sapien
cccgaatagacatgaccatcaagta

SEQ ID NO: 28686 - DNA, 25 bp, Homo sapien
cccgaatagacaagaccatcaagta

SEQ ID NO: 28687 - DNA, 25 bp, Homo sapien
caacgaaaactaggttcagaccata

SEQ ID NO: 28688 - DNA, 25 bp, Homo sapien
caacgaaaactacgttcagaccata

SEQ ID NO: 28689 - DNA, 25 bp, Homo sapien
gtaagacgtataactaaaaactgtc

SEQ ID NO: 28690 - DNA, 25 bp, Homo sapien
gtaagacgtatatctaaaaactgtc

SEQ ID NO: 28691 - DNA, 25 bp, Homo sapien
gtaagtactatactatggtatccct

SEQ ID NO: 28692 - DNA, 25 bp, Homo sapien
gtaagtactatagtatggtatccct

SEQ ID NO: 28693 - DNA, 25 bp, Homo sapien
cagaagtcttgttagtgtcgtgtcc

SEQ ID NO: 28694 - DNA, 25 bp, Homo sapien
cagaagtcttgtaagtgtcgtgtcc

SEQ ID NO: 28695 - DNA, 25 bp, Homo sapien
gtacacggttgagattcgtagtcct

SEQ ID NO: 28696 - DNA, 25 bp, Homo sapien
gtacacggttgacattcgtagtcct

SEQ ID NO: 28697 - DNA, 25 bp, Homo sapien
gaagacgagggagtcgttctgtcct

SEQ ID NO: 28698 - DNA, 25 bp, Homo sapien
gaagacgagggactcgttctgtcct

SEQ ID NO: 28699 - DNA, 25 bp, Homo sapien
acgtgagactgaaggagggacctcc

SEQ ID NO: 28700 - DNA, 25 bp, Homo sapien
acgtgagactgatggagggacctcc

SEQ ID NO: 28701 - DNA, 25 bp, Homo sapien
tatctggtccctgagaggacacccc

SEQ ID NO: 28702 - DNA, 25 bp, Homo sapien
tatctggtccctcagaggacacccc

SEQ ID NO: 28703 - DNA, 25 bp, Homo sapien
gtggtactcttgagtgtcaaatcgt

SEQ ID NO: 28704 - DNA, 25 bp, Homo sapien
gtggtactcttgtgtgtcaaatcgt

SEQ ID NO: 28705 - DNA, 25 bp, Homo sapien
cacgtggaaatatatgtctttatcg

SEQ ID NO: 28706 - DNA, 25 bp, Homo sapien
cacgtggaaataaatgtctttatcg

SEQ ID NO: 28707 - DNA, 25 bp, Homo sapien
cagacacacggtccttcgtgaacac

SEQ ID NO: 28708 - DNA, 25 bp, Homo sapien
cagacacacggtgcttcgtgaacac

SEQ ID NO: 28709 - DNA, 25 bp, Homo sapien
gacgagagacctaagcttggatcac

SEQ ID NO: 28710 - DNA, 25 bp, Homo sapien
gacgagagaccttagcttggatcac

SEQ ID NO: 28711 - DNA, 25 bp, Homo sapien
gccgggaccgcgaactcgcgcattt

SEQ ID NO: 28712 - DNA, 25 bp, Homo sapien
gccgggaccgcgtactcgcgcattt

SEQ ID NO: 28713 - DNA, 25 bp, Homo sapien
gggtcggtcctacgtaccttctttt

SEQ ID NO: 28714 - DNA, 25 bp, Homo sapien
gggtcggtcctaggtaccttctttt

SEQ ID NO: 28715 - DNA, 25 bp, Homo sapien
cacccgtctctaagtcatttgacag

SEQ ID NO: 28716 - DNA, 25 bp, Homo sapien
cacccgtctctatgtcatttgacag

SEQ ID NO: 28717 - DNA, 25 bp, Homo sapien
taatcgttctaccttgggtttccgc

SEQ ID NO: 28718 - DNA, 25 bp, Homo sapien
taatcgttctacgttgggtttccgc

SEQ ID NO: 28719 - DNA, 25 bp, Homo sapien
agtcaaatgtttattgtctgtcctt

SEQ ID NO: 28720 - DNA, 25 bp, Homo sapien
agtcaaatgttttttgtctgtcctt

SEQ ID NO: 28721 - DNA, 25 bp, Homo sapien
ccaagatgtccttagattcttgttc

SEQ ID NO: 28722 - DNA, 25 bp, Homo sapien
ccaagatgtcctaagattcttgttc

SEQ ID NO: 28723 - DNA, 25 bp, Homo sapien
ccggttttgtactttatcgtacctt

SEQ ID NO: 28724 - DNA, 25 bp, Homo sapien
ccggttttgtacattatcgtacctt

SEQ ID NO: 28725 - DNA, 25 bp, Homo sapien
accttcggttgtaactttcgtacca

SEQ ID NO: 28726 - DNA, 25 bp, Homo sapien
accttcggttgttactttcgtacca

SEQ ID NO: 28727 - DNA, 25 bp, Homo sapien
caccgtcctttcacgagattaagat

SEQ ID NO: 28728 - DNA, 25 bp, Homo sapien
caccgtcctttctcgagattaagat

SEQ ID NO: 28729 - DNA, 25 bp, Homo sapien
ggacccatttcgaagacattattat

SEQ ID NO: 28730 - DNA, 25 bp, Homo sapien
ggacccatttcgtagacattattat

SEQ ID NO: 28731 - DNA, 25 bp, Homo sapien
ccacccttgtcgagaccgatacggg

SEQ ID NO: 28732 - DNA, 25 bp, Homo sapien
ccacccttgtcgtgaccgatacggg

SEQ ID NO: 28733 - DNA, 25 bp, Homo sapien
cacacacctctgatccgatcgtggg

SEQ ID NO: 28734 - DNA, 25 bp, Homo sapien
cacacacctctgttccgatcgtggg

SEQ ID NO: 28735 - DNA, 25 bp, Homo sapien
tttacaattcgttctccgtttccgg

SEQ ID NO: 28736 - DNA, 25 bp, Homo sapien
tttacaattcgtactccgtttccgg

SEQ ID NO: 28737 - DNA, 25 bp, Homo sapien
ctaaatatgtgtgaccttttcggag

SEQ ID NO: 28738 - DNA, 25 bp, Homo sapien
ctaaatatgtgtcaccttttcggag

SEQ ID NO: 28739 - DNA, 25 bp, Homo sapien
tcagaggtcaaaaccactatcacag

SEQ ID NO: 28740 - DNA, 25 bp, Homo sapien
tcagaggtcaaatccactatcacag

SEQ ID NO: 28741 - DNA, 25 bp, Homo sapien
gagaggtcacaagttactctcacct

SEQ ID NO: 28742 - DNA, 25 bp, Homo sapien
gagaggtcacaacttactctcacct

SEQ ID NO: 28743 - DNA, 25 bp, Homo sapien
agcggtgacagaagaggtttccact

SEQ ID NO: 28744 - DNA, 25 bp, Homo sapien
agcggtgacagatgaggtttccact

SEQ ID NO: 28745 - DNA, 25 bp, Homo sapien
gtttgacattacagagtcatgtcat

SEQ ID NO: 28746 - DNA, 25 bp, Homo sapien
gtttgacattactgagtcatgtcat

SEQ ID NO: 28747 - DNA, 25 bp, Homo sapien
aggacgtagtaattatctacgttca

SEQ ID NO: 28748 - DNA, 25 bp, Homo sapien
aggacgtagtaaatatctacgttca

SEQ ID NO: 28749 - DNA, 25 bp, Homo sapien
agtgcgactcaatcggagaacgagt

SEQ ID NO: 28750 - DNA, 25 bp, Homo sapien
agtgcgactcaaacggagaacgagt

SEQ ID NO: 28751 - DNA, 25 bp, Homo sapien
cagttcgtctctatatcagtcacgg

SEQ ID NO: 28752 - DNA, 25 bp, Homo sapien
cagttcgtctctttatcagtcacgg

SEQ ID NO: 28753 - DNA, 25 bp, Homo sapien
ggggttacgactcctcctggacctt

SEQ ID NO: 28754 - DNA, 25 bp, Homo sapien
ggggttacgactgctcctggacctt

SEQ ID NO: 28755 - DNA, 25 bp, Homo sapien
tttacgagactacctccgtggaccc

SEQ ID NO: 28756 - DNA, 25 bp, Homo sapien
tttacgagactagctccgtggaccc

SEQ ID NO: 28757 - DNA, 25 bp, Homo sapien
attttgacggactgtacagtgttcc

SEQ ID NO: 28758 - DNA, 25 bp, Homo sapien
attttgacggacagtacagtgttcc

SEQ ID NO: 28759 - DNA, 25 bp, Homo sapien
gagtaatttttcgtacatagatcgc

SEQ ID NO: 28760 - DNA, 25 bp, Homo sapien
gagtaatttttcctacatagatcgc

SEQ ID NO: 28761 - DNA, 25 bp, Homo sapien
gttacgaagagtcttatcgtctaaa

SEQ ID NO: 28762 - DNA, 25 bp, Homo sapien
gttacgaagagtgttatcgtctaaa

SEQ ID NO: 28763 - DNA, 25 bp, Homo sapien
acaataaaagaggttctcctgtaag

SEQ ID NO: 28764 - DNA, 25 bp, Homo sapien
acaataaaagagcttctcctgtaag

SEQ ID NO: 28765 - DNA, 25 bp, Homo sapien
aaattagagtcgacaagacctagaa

SEQ ID NO: 28766 - DNA, 25 bp, Homo sapien
aaattagagtcgtcaagacctagaa

SEQ ID NO: 28767 - DNA, 25 bp, Homo sapien
caaatgagagggtagaacgttccgg

SEQ ID NO: 28768 - DNA, 25 bp, Homo sapien
caaatgagagggaagaacgttccgg

SEQ ID NO: 28769 - DNA, 25 bp, Homo sapien
acagagggtccaacagagtccctcg

SEQ ID NO: 28770 - DNA, 25 bp, Homo sapien
acagagggtccatcagagtccctcg

SEQ ID NO: 28771 - DNA, 25 bp, Homo sapien
actgagaactacttcaggtgatacc

SEQ ID NO: 28772 - DNA, 25 bp, Homo sapien
actgagaactacatcaggtgatacc

SEQ ID NO: 28773 - DNA, 25 bp, Homo sapien
agttcgtagactagtgtagtgtacc

SEQ ID NO: 28774 - DNA, 25 bp, Homo sapien
agttcgtagacttgtgtagtgtacc

SEQ ID NO: 28775 - DNA, 25 bp, Homo sapien
tacacaatcttttgtgtcgtgtctc

SEQ ID NO: 28776 - DNA, 25 bp, Homo sapien
tacacaatctttagtgtcgtgtctc

SEQ ID NO: 28777 - DNA, 25 bp, Homo sapien
actattatttattcacatttttctc

SEQ ID NO: 28778 - DNA, 25 bp, Homo sapien
actattatttatacacatttttctc

SEQ ID NO: 28779 - DNA, 25 bp, Homo sapien
tactcaagacttaggtttatgtttc

SEQ ID NO: 28780 - DNA, 25 bp, Homo sapien
tactcaagactttggtttatgtttc

SEQ ID NO: 28781 - DNA, 25 bp, Homo sapien
cctatgacttatggtttgttgttcg

SEQ ID NO: 28782 - DNA, 25 bp, Homo sapien
cctatgacttatcgtttgttgttcg

SEQ ID NO: 28783 - DNA, 25 bp, Homo sapien
ctgtggtaatttcagaagttctaga

SEQ ID NO: 28784 - DNA, 25 bp, Homo sapien
ctgtggtaatttgagaagttctaga

SEQ ID NO: 28785 - DNA, 25 bp, Homo sapien
tcgtcatgagtttgagtagcatcca

SEQ ID NO: 28786 - DNA, 25 bp, Homo sapien
tcgtcatgagttagagtagcatcca

SEQ ID NO: 28787 - DNA, 25 bp, Homo sapien
ctataaaaggtgaaggcgaaccgta

SEQ ID NO: 28788 - DNA, 25 bp, Homo sapien
ctataaaaggtgtaggcgaaccgta

SEQ ID NO: 28789 - DNA, 25 bp, Homo sapien
ttcctgagatagtgtgacgaacaga

SEQ ID NO: 28790 - DNA, 25 bp, Homo sapien
ttcctgagatagagtgacgaacaga

SEQ ID NO: 28791 - DNA, 25 bp, Homo sapien
agtggtgacactgacaccaaacgaa

SEQ ID NO: 28792 - DNA, 25 bp, Homo sapien
agtggtgacactcacaccaaacgaa

SEQ ID NO: 28793 - DNA, 25 bp, Homo sapien
ggggatcgactcctacaagaaagag

SEQ ID NO: 28794 - DNA, 25 bp, Homo sapien
ggggatcgactcgtacaagaaagag

SEQ ID NO: 28795 - DNA, 25 bp, Homo sapien
agtgtgtcgacgatgtaccagaagg

SEQ ID NO: 28796 - DNA, 25 bp, Homo sapien
agtgtgtcgacgttgtaccagaagg

SEQ ID NO: 28797 - DNA, 25 bp, Homo sapien
acgtcatcagattctccgagtgtcg

SEQ ID NO: 28798 - DNA, 25 bp, Homo sapien
acgtcatcagatactccgagtgtcg

SEQ ID NO: 28799 - DNA, 25 bp, Homo sapien
aggtgtctgcaactctccacggtcg

SEQ ID NO: 28800 - DNA, 25 bp, Homo sapien
aggtgtctgcaagtctccacggtcg

SEQ ID NO: 28801 - DNA, 25 bp, Homo sapien
acttccaagagaacctcagcgagac

SEQ ID NO: 28802 - DNA, 25 bp, Homo sapien
acttccaagagatcctcagcgagac

SEQ ID NO: 28803 - DNA, 25 bp, Homo sapien
tcgacggagaaactcgaggagtagt

SEQ ID NO: 28804 - DNA, 25 bp, Homo sapien
tcgacggagaaagtcgaggagtagt

SEQ ID NO: 28805 - DNA, 25 bp, Homo sapien
tcgtaacaacgagaggtctcgaacc

SEQ ID NO: 28806 - DNA, 25 bp, Homo sapien
tcgtaacaacgacaggtctcgaacc

SEQ ID NO: 28807 - DNA, 25 bp, Homo sapien
accagaaccgtgagtcggtcgaagc

SEQ ID NO: 28808 - DNA, 25 bp, Homo sapien
accagaaccgtgtgtcggtcgaagc

SEQ ID NO: 28809 - DNA, 25 bp, Homo sapien
agaacataaccctgttcgtttatgc

SEQ ID NO: 28810 - DNA, 25 bp, Homo sapien
agaacataacccagttcgtttatgc

SEQ ID NO: 28811 - DNA, 25 bp, Homo sapien
agagtataccggtatatttctatcc

SEQ ID NO: 28812 - DNA, 25 bp, Homo sapien
agagtataccggaatatttctatcc

SEQ ID NO: 28813 - DNA, 25 bp, Homo sapien
gacattgagagatatcatacttgac

SEQ ID NO: 28814 - DNA, 25 bp, Homo sapien
gacattgagagaaatcatacttgac

SEQ ID NO: 28815 - DNA, 25 bp, Homo sapien
agacctagagggacctccactacca

SEQ ID NO: 28816 - DNA, 25 bp, Homo sapien
agacctagagggtcctccactacca

SEQ ID NO: 28817 - DNA, 25 bp, Homo sapien
acgattgagactcgtaactacaaat

SEQ ID NO: 28818 - DNA, 25 bp, Homo sapien
acgattgagactggtaactacaaat

SEQ ID NO: 28819 - DNA, 25 bp, Homo sapien
tataacttgtagtcagagactcaaa

SEQ ID NO: 28820 - DNA, 25 bp, Homo sapien
tataacttgtagacagagactcaaa

SEQ ID NO: 28821 - DNA, 25 bp, Homo sapien
cctacaaagtgtacaacagtcgaaa

SEQ ID NO: 28822 - DNA, 25 bp, Homo sapien
cctacaaagtgttcaacagtcgaaa

SEQ ID NO: 28823 - DNA, 25 bp, Homo sapien
tacaaacatgtgtctcaatgacatg

SEQ ID NO: 28824 - DNA, 25 bp, Homo sapien
tacaaacatgtgactcaatgacatg

SEQ ID NO: 28825 - DNA, 25 bp, Homo sapien
aaaaaagactcgagaccaaacggaa

SEQ ID NO: 28826 - DNA, 25 bp, Homo sapien
aaaaaagactcgtgaccaaacggaa

SEQ ID NO: 28827 - DNA, 25 bp, Homo sapien
actaaagtattgctccaaagtagaa

SEQ ID NO: 28828 - DNA, 25 bp, Homo sapien
actaaagtattggtccaaagtagaa

SEQ ID NO: 28829 - DNA, 25 bp, Homo sapien
gagtatccggtagcataggtgcgta

SEQ ID NO: 28830 - DNA, 25 bp, Homo sapien
gagtatccggtaccataggtgcgta

SEQ ID NO: 28831 - DNA, 25 bp, Homo sapien
agtagaagtacatctctcgagagaa

SEQ ID NO: 28832 - DNA, 25 bp, Homo sapien
agtagaagtacaactctcgagagaa

SEQ ID NO: 28833 - DNA, 25 bp, Homo sapien
gacactagaaatcattccgtcagaa

SEQ ID NO: 28834 - DNA, 25 bp, Homo sapien
gacactagaaatgattccgtcagaa

SEQ ID NO: 28835 - DNA, 25 bp, Homo sapien
gactaagagttttcgttaccgataa

SEQ ID NO: 28836 - DNA, 25 bp, Homo sapien
gactaagagtttacgttaccgataa

SEQ ID NO: 28837 - DNA, 25 bp, Homo sapien
tggacttgaacgaatagtgacccca

SEQ ID NO: 28838 - DNA, 25 bp, Homo sapien
tggacttgaacgtatagtgacccca

SEQ ID NO: 28839 - DNA, 25 bp, Homo sapien
taatagtgacagagggtcccacacg

SEQ ID NO: 28840 - DNA, 25 bp, Homo sapien
taatagtgacagtgggtcccacacg

SEQ ID NO: 28841 - DNA, 25 bp, Homo sapien
gtaaagttctactcgggtccagaga

SEQ ID NO: 28842 - DNA, 25 bp, Homo sapien
gtaaagttctacacgggtccagaga

SEQ ID NO: 28843 - DNA, 25 bp, Homo sapien
aggaatattctgtaagagatcccaa

SEQ ID NO: 28844 - DNA, 25 bp, Homo sapien
aggaatattctgaaagagatcccaa

SEQ ID NO: 28845 - DNA, 25 bp, Homo sapien
ccaagtttatgagtctctgccgaaa

SEQ ID NO: 28846 - DNA, 25 bp, Homo sapien
ccaagtttatgactctctgccgaaa

SEQ ID NO: 28847 - DNA, 25 bp, Homo sapien
tattacagacagtttcactgaacgg

SEQ ID NO: 28848 - DNA, 25 bp, Homo sapien
tattacagacagattcactgaacgg

SEQ ID NO: 28849 - DNA, 25 bp, Homo sapien
ggtcagacacagacccgtcgccagt

SEQ ID NO: 28850 - DNA, 25 bp, Homo sapien
ggtcagacacagtcccgtcgccagt

SEQ ID NO: 28851 - DNA, 25 bp, Homo sapien
gtctcacgacagttcttgtcgaaag

SEQ ID NO: 28852 - DNA, 25 bp, Homo sapien
gtctcacgacagatcttgtcgaaag

SEQ ID NO: 28853 - DNA, 25 bp, Homo sapien
attgactcagagatccgttatataa

SEQ ID NO: 28854 - DNA, 25 bp, Homo sapien
attgactcagagttccgttatataa

SEQ ID NO: 28855 - DNA, 25 bp, Homo sapien
ctgaacgacgactcgggacgagaag

SEQ ID NO: 28856 - DNA, 25 bp, Homo sapien
ctgaacgacgacacgggacgagaag

SEQ ID NO: 28857 - DNA, 25 bp, Homo sapien
ttctcgaaccgtctggtgacgtaaa

SEQ ID NO: 28858 - DNA, 25 bp, Homo sapien
ttctcgaaccgtgtggtgacgtaaa

SEQ ID NO: 28859 - DNA, 25 bp, Homo sapien
gtctcccgacgagaaggcgaccgac

SEQ ID NO: 28860 - DNA, 25 bp, Homo sapien
gtctcccgacgacaaggcgaccgac

SEQ ID NO: 28861 - DNA, 25 bp, Homo sapien
taccgaccagggacactacaccgta

SEQ ID NO: 28862 - DNA, 25 bp, Homo sapien
taccgaccagggtcactacaccgta

SEQ ID NO: 28863 - DNA, 25 bp, Homo sapien
agacctaccacgtcaccaagtctga

SEQ ID NO: 28864 - DNA, 25 bp, Homo sapien
agacctaccacgacaccaagtctga

SEQ ID NO: 28865 - DNA, 25 bp, Homo sapien
cagaggacaacttaccgggaacaac

SEQ ID NO: 28866 - DNA, 25 bp, Homo sapien
cagaggacaactaaccgggaacaac

SEQ ID NO: 28867 - DNA, 25 bp, Homo sapien
aacgggacacacaaccggagtgaaa

SEQ ID NO: 28868 - DNA, 25 bp, Homo sapien
aacgggacacactaccggagtgaaa

SEQ ID NO: 28869 - DNA, 25 bp, Homo sapien
cgaggtcctccgatcaccagtgcaa

SEQ ID NO: 28870 - DNA, 25 bp, Homo sapien
cgaggtcctccgttcaccagtgcaa

SEQ ID NO: 28871 - DNA, 25 bp, Homo sapien
tccaccagtcaacaaacggtccagt

SEQ ID NO: 28872 - DNA, 25 bp, Homo sapien
tccaccagtcaagaaacggtccagt

SEQ ID NO: 28873 - DNA, 25 bp, Homo sapien
ccgaaagaacgactaaggtcgtagt

SEQ ID NO: 28874 - DNA, 25 bp, Homo sapien
ccgaaagaacgagtaaggtcgtagt

SEQ ID NO: 28875 - DNA, 25 bp, Homo sapien
cctacagaacgtctttcgagggtgt

SEQ ID NO: 28876 - DNA, 25 bp, Homo sapien
cctacagaacgtgtttcgagggtgt

SEQ ID NO: 28877 - DNA, 25 bp, Homo sapien
tctcccgagaatgtggtctacaggg

SEQ ID NO: 28878 - DNA, 25 bp, Homo sapien
tctcccgagaatctggtctacaggg

SEQ ID NO: 28879 - DNA, 25 bp, Homo sapien
tgacgagtcgacgagttactggacg

SEQ ID NO: 28880 - DNA, 25 bp, Homo sapien
tgacgagtcgaccagttactggacg

SEQ ID NO: 28881 - DNA, 25 bp, Homo sapien
tgggccgaggggccgggtacaggag

SEQ ID NO: 28882 - DNA, 25 bp, Homo sapien
tgggccgagggggcgggtacaggag

SEQ ID NO: 28883 - DNA, 25 bp, Homo sapien
tggagatgatttaagcgccgcagga

SEQ ID NO: 28884 - DNA, 25 bp, Homo sapien
tggagatgattttagcgccgcagga

SEQ ID NO: 28885 - DNA, 25 bp, Homo sapien
ccggctccactgtggcacccggacg

SEQ ID NO: 28886 - DNA, 25 bp, Homo sapien
ccggctccactgaggcacccggacg

SEQ ID NO: 28887 - DNA, 25 bp, Homo sapien
tgtactcactcttaggtcccggaag

SEQ ID NO: 28888 - DNA, 25 bp, Homo sapien
tgtactcactctaaggtcccggaag

SEQ ID NO: 28889 - DNA, 25 bp, Homo sapien
atgtcaacattttccgtcgagatcg

SEQ ID NO: 28890 - DNA, 25 bp, Homo sapien
atgtcaacatttaccgtcgagatcg

SEQ ID NO: 28891 - DNA, 25 bp, Homo sapien
gccagacgaccgtaactagtgaacc

SEQ ID NO: 28892 - DNA, 25 bp, Homo sapien
gccagacgaccgaaactagtgaacc

SEQ ID NO: 28893 - DNA, 25 bp, Homo sapien
gacaggagtcggtcatgtcttcggt

SEQ ID NO: 28894 - DNA, 25 bp, Homo sapien
gacaggagtcggacatgtcttcggt

SEQ ID NO: 28895 - DNA, 25 bp, Homo sapien
acgacaactcgaggttgaggtccgg

SEQ ID NO: 28896 - DNA, 25 bp, Homo sapien
acgacaactcgacgttgaggtccgg

SEQ ID NO: 28897 - DNA, 25 bp, Homo sapien
tatcgaacagtggtcttgaggaaca

SEQ ID NO: 28898 - DNA, 25 bp, Homo sapien
tatcgaacagtgctcttgaggaaca

SEQ ID NO: 28899 - DNA, 25 bp, Homo sapien
cgtatcgactccttccgaccagagg

SEQ ID NO: 28900 - DNA, 25 bp, Homo sapien
cgtatcgactccatccgaccagagg

SEQ ID NO: 28901 - DNA, 25 bp, Homo sapien
gacccggagccgacctccgaagagg

SEQ ID NO: 28902 - DNA, 25 bp, Homo sapien
gacccggagccgtcctccgaagagg

SEQ ID NO: 28903 - DNA, 25 bp, Homo sapien
tgggtcaagaaccactcagagcgta

SEQ ID NO: 28904 - DNA, 25 bp, Homo sapien
tgggtcaagaacgactcagagcgta

SEQ ID NO: 28905 - DNA, 25 bp, Homo sapien
acggacgaaactacgcagacgggtc

SEQ ID NO: 28906 - DNA, 25 bp, Homo sapien
acggacgaaacttcgcagacgggtc

SEQ ID NO: 28907 - DNA, 25 bp, Homo sapien
ccgacacaagagtgttcaagtgcct

SEQ ID NO: 28908 - DNA, 25 bp, Homo sapien
ccgacacaagagagttcaagtgcct

SEQ ID NO: 28909 - DNA, 25 bp, Homo sapien
acttacgaaggagatgcaatcacct

SEQ ID NO: 28910 - DNA, 25 bp, Homo sapien
acttacgaaggacatgcaatcacct

SEQ ID NO: 28911 - DNA, 25 bp, Homo sapien
gtaggaacacttagactcctcactt

SEQ ID NO: 28912 - DNA, 25 bp, Homo sapien
gtaggaacactttgactcctcactt

SEQ ID NO: 28913 - DNA, 25 bp, Homo sapien
cctgcgtctccgtggcaagacatgt

SEQ ID NO: 28914 - DNA, 25 bp, Homo sapien
cctgcgtctccgaggcaagacatgt

SEQ ID NO: 28915 - DNA, 25 bp, Homo sapien
ggacacccgacaggactcgagacaa

SEQ ID NO: 28916 - DNA, 25 bp, Homo sapien
ggacacccgacacgactcgagacaa

SEQ ID NO: 28917 - DNA, 25 bp, Homo sapien
aagtatgtaccgtcacgtctcgaaa

SEQ ID NO: 28918 - DNA, 25 bp, Homo sapien
aagtatgtaccgacacgtctcgaaa

SEQ ID NO: 28919 - DNA, 25 bp, Homo sapien
ctcttagattggatacacttttaga

SEQ ID NO: 28920 - DNA, 25 bp, Homo sapien
ctcttagattggttacacttttaga

SEQ ID NO: 28921 - DNA, 25 bp, Homo sapien
cagtcagaaaggaacctacgactta

SEQ ID NO: 28922 - DNA, 25 bp, Homo sapien
cagtcagaaaggtacctacgactta

SEQ ID NO: 28923 - DNA, 25 bp, Homo sapien
tagccacaacagtccgtcgacgtga

SEQ ID NO: 28924 - DNA, 25 bp, Homo sapien
tagccacaacagaccgtcgacgtga

SEQ ID NO: 28925 - DNA, 25 bp, Homo sapien
ggtactcaactagtgactcctccaa

SEQ ID NO: 28926 - DNA, 25 bp, Homo sapien
ggtactcaactactgactcctccaa

SEQ ID NO: 28927 - DNA, 25 bp, Homo sapien
gtttctcggatgttattcaaccata

SEQ ID NO: 28928 - DNA, 25 bp, Homo sapien
gtttctcggatgatattcaaccata

SEQ ID NO: 28929 - DNA, 25 bp, Homo sapien
cagtttttcggtgtattcaaaacta

SEQ ID NO: 28930 - DNA, 25 bp, Homo sapien
cagtttttcggtctattcaaaacta

SEQ ID NO: 28931 - DNA, 25 bp, Homo sapien
atgtgacttccttctacgtttctcg

SEQ ID NO: 28932 - DNA, 25 bp, Homo sapien
atgtgacttcctactacgtttctcg

SEQ ID NO: 28933 - DNA, 25 bp, Homo sapien
atcagacgactcatctacaaggacc

SEQ ID NO: 28934 - DNA, 25 bp, Homo sapien
atcagacgactcttctacaaggacc

SEQ ID NO: 28935 - DNA, 25 bp, Homo sapien
aaaagagacgattaagacataccct

SEQ ID NO: 28936 - DNA, 25 bp, Homo sapien
aaaagagacgataaagacataccct

SEQ ID NO: 28937 - DNA, 25 bp, Homo sapien
gaaagaacgaaggacagtaccatct

SEQ ID NO: 28938 - DNA, 25 bp, Homo sapien
gaaagaacgaagcacagtaccatct

SEQ ID NO: 28939 - DNA, 25 bp, Homo sapien
gagactagtcaaccacgatccacac

SEQ ID NO: 28940 - DNA, 25 bp, Homo sapien
gagactagtcaagcacgatccacac

SEQ ID NO: 28941 - DNA, 25 bp, Homo sapien
gagtgggtaggagacactctcccgc

SEQ ID NO: 28942 - DNA, 25 bp, Homo sapien
gagtgggtaggacacactctcccgc

SEQ ID NO: 28943 - DNA, 25 bp, Homo sapien
ctttaaggatggatcctctccgacc

SEQ ID NO: 28944 - DNA, 25 bp, Homo sapien
ctttaaggatggttcctctccgacc

SEQ ID NO: 28945 - DNA, 25 bp, Homo sapien
gacaagggtcattccctcgcgaccg

SEQ ID NO: 28946 - DNA, 25 bp, Homo sapien
gacaagggtcataccctcgcgaccg

SEQ ID NO: 28947 - DNA, 25 bp, Homo sapien
caagggacgtactgaccctggacag

SEQ ID NO: 28948 - DNA, 25 bp, Homo sapien
caagggacgtacagaccctggacag

SEQ ID NO: 28949 - DNA, 25 bp, Homo sapien
tcccaccgggtcttctggtgtggtc

SEQ ID NO: 28950 - DNA, 25 bp, Homo sapien
tcccaccgggtcatctggtgtggtc

SEQ ID NO: 28951 - DNA, 25 bp, Homo sapien
cctcttcacgaagtgtagctccttc

SEQ ID NO: 28952 - DNA, 25 bp, Homo sapien
cctcttcacgaactgtagctccttc

SEQ ID NO: 28953 - DNA, 25 bp, Homo sapien
gggactttcataaaacattccgttt

SEQ ID NO: 28954 - DNA, 25 bp, Homo sapien
gggactttcatataacattccgttt

SEQ ID NO: 28955 - DNA, 25 bp, Homo sapien
tccaaatttaagaccggtgtctgtt

SEQ ID NO: 28956 - DNA, 25 bp, Homo sapien
tccaaatttaagtccggtgtctgtt

SEQ ID NO: 28957 - DNA, 25 bp, Homo sapien
cgtaacagcttcgaaccggtgcaac

SEQ ID NO: 28958 - DNA, 25 bp, Homo sapien
cgtaacagcttccaaccggtgcaac

SEQ ID NO: 28959 - DNA, 25 bp, Homo sapien
ttaaagattccgaagggtctcagac

SEQ ID NO: 28960 - DNA, 25 bp, Homo sapien
ttaaagattccgtagggtctcagac

SEQ ID NO: 28961 - DNA, 25 bp, Homo sapien
ttaaacgaagttgaagtgatccgca

SEQ ID NO: 28962 - DNA, 25 bp, Homo sapien
ttaaacgaagttcaagtgatccgca

SEQ ID NO: 28963 - DNA, 25 bp, Homo sapien
gaacagagttgacgttctccgtaag

SEQ ID NO: 28964 - DNA, 25 bp, Homo sapien
gaacagagttgaggttctccgtaag

SEQ ID NO: 28965 - DNA, 25 bp, Homo sapien
ctatatactgtaaagtcacaccagg

SEQ ID NO: 28966 - DNA, 25 bp, Homo sapien
ctatatactgtatagtcacaccagg

SEQ ID NO: 28967 - DNA, 25 bp, Homo sapien
aaatatctgatacgaacgattacag

SEQ ID NO: 28968 - DNA, 25 bp, Homo sapien
aaatatctgataggaacgattacag

SEQ ID NO: 28969 - DNA, 25 bp, Homo sapien
gcgagtcggtcacaacactaacgat

SEQ ID NO: 28970 - DNA, 25 bp, Homo sapien
gcgagtcggtcagaacactaacgat

SEQ ID NO: 28971 - DNA, 25 bp, Homo sapien
cgacctccactatccgtcgtaagat

SEQ ID NO: 28972 - DNA, 25 bp, Homo sapien
cgacctccactaaccgtcgtaagat

SEQ ID NO: 28973 - DNA, 25 bp, Homo sapien
gattcgtacgtctttcgtgtcctgt

SEQ ID NO: 28974 - DNA, 25 bp, Homo sapien
gattcgtacgtcattcgtgtcctgt

SEQ ID NO: 28975 - DNA, 25 bp, Homo sapien
cacctcgcgaacaacattacgcggt

SEQ ID NO: 28976 - DNA, 25 bp, Homo sapien
cacctcgcgaactacattacgcggt

SEQ ID NO: 28977 - DNA, 25 bp, Homo sapien
ctcgtctagcaaggacgacccgagg

SEQ ID NO: 28978 - DNA, 25 bp, Homo sapien
ctcgtctagcaacgacgacccgagg

SEQ ID NO: 28979 - DNA, 25 bp, Homo sapien
gtataacgtgtacgacactacttcc

SEQ ID NO: 28980 - DNA, 25 bp, Homo sapien
gtataacgtgtaggacactacttcc

SEQ ID NO: 28981 - DNA, 25 bp, Homo sapien
ggatgaacgtgtgaaccgacttgtc

SEQ ID NO: 28982 - DNA, 25 bp, Homo sapien
ggatgaacgtgtcaaccgacttgtc

SEQ ID NO: 28983 - DNA, 25 bp, Homo sapien
gcgtggaaaaattccttcaatagta

SEQ ID NO: 28984 - DNA, 25 bp, Homo sapien
gcgtggaaaaataccttcaatagta

SEQ ID NO: 28985 - DNA, 25 bp, Homo sapien
tattttattttatacttatacagtg

SEQ ID NO: 28986 - DNA, 25 bp, Homo sapien
tattttattttaaacttatacagtg

SEQ ID NO: 28987 - DNA, 25 bp, Homo sapien
tttttgtatgtaaaaacttacattt

SEQ ID NO: 28988 - DNA, 25 bp, Homo sapien
tttttgtatgtataaacttacattt

SEQ ID NO: 28989 - DNA, 25 bp, Homo sapien
gcttcgatgacaaaacgacataaag

SEQ ID NO: 28990 - DNA, 25 bp, Homo sapien
gcttcgatgacataacgacataaag

SEQ ID NO: 28991 - DNA, 25 bp, Homo sapien
cccacagtagtgaaccaggatgaaa

SEQ ID NO: 28992 - DNA, 25 bp, Homo sapien
cccacagtagtgtaccaggatgaaa

SEQ ID NO: 28993 - DNA, 25 bp, Homo sapien
actccagggggtccagggttacaga

SEQ ID NO: 28994 - DNA, 25 bp, Homo sapien
actccagggggtgcagggttacaga

SEQ ID NO: 28995 - DNA, 25 bp, Homo sapien
actcaagagtcatgaaattcacaga

SEQ ID NO: 28996 - DNA, 25 bp, Homo sapien
actcaagagtcaagaaattcacaga

SEQ ID NO: 28997 - DNA, 25 bp, Homo sapien
caaaccaaaagaggtactactcaag

SEQ ID NO: 28998 - DNA, 25 bp, Homo sapien
caaaccaaaagacgtactactcaag

SEQ ID NO: 28999 - DNA, 25 bp, Homo sapien
caacttcaagaacttctacgtcggc

SEQ ID NO: 29000 - DNA, 25 bp, Homo sapien
caacttcaagaagttctacgtcggc

SEQ ID NO: 29001 - DNA, 25 bp, Homo sapien
ctataaatggaacgttctactctga

SEQ ID NO: 29002 - DNA, 25 bp, Homo sapien
ctataaatggaaggttctactctga

SEQ ID NO: 29003 - DNA, 25 bp, Homo sapien
ctcaggagtgaaatatctttactga

SEQ ID NO: 29004 - DNA, 25 bp, Homo sapien
ctcaggagtgaattatctttactga

SEQ ID NO: 29005 - DNA, 25 bp, Homo sapien
tacggaggactaactggatcatgtg

SEQ ID NO: 29006 - DNA, 25 bp, Homo sapien
tacggaggactatctggatcatgtg

SEQ ID NO: 29007 - DNA, 25 bp, Homo sapien
acctacgaaatctctgaagcacgga

SEQ ID NO: 29008 - DNA, 25 bp, Homo sapien
acctacgaaatcactgaagcacgga

SEQ ID NO: 29009 - DNA, 25 bp, Homo sapien
cacgacagaatttccgaacctgttc

SEQ ID NO: 29010 - DNA, 25 bp, Homo sapien
cacgacagaattaccgaacctgttc

SEQ ID NO: 29011 - DNA, 25 bp, Homo sapien
agagttatatgtgtgtctaattctc

SEQ ID NO: 29012 - DNA, 25 bp, Homo sapien
agagttatatgtctgtctaattctc

SEQ ID NO: 29013 - DNA, 25 bp, Homo sapien
aggtcccttcacgagttctctccgt

SEQ ID NO: 29014 - DNA, 25 bp, Homo sapien
aggtcccttcaccagttctctccgt

SEQ ID NO: 29015 - DNA, 25 bp, Homo sapien
gctgtccttgaccaatatgtcctgt

SEQ ID NO: 29016 - DNA, 25 bp, Homo sapien
gctgtccttgacgaatatgtcctgt

SEQ ID NO: 29017 - DNA, 25 bp, Homo sapien
accgtacgaagattactacagtctc

SEQ ID NO: 29018 - DNA, 25 bp, Homo sapien
accgtacgaagaatactacagtctc

SEQ ID NO: 29019 - DNA, 25 bp, Homo sapien
aattcatgggtcacgtcacagtgac

SEQ ID NO: 29020 - DNA, 25 bp, Homo sapien
aattcatgggtctcgtcacagtgac

SEQ ID NO: 29021 - DNA, 25 bp, Homo sapien
acttccagggtcgtgtgagagtgtc

SEQ ID NO: 29022 - DNA, 25 bp, Homo sapien
acttccagggtcctgtgagagtgtc

SEQ ID NO: 29023 - DNA, 25 bp, Homo sapien
aatctcatgttcacttctgtaagtg

SEQ ID NO: 29024 - DNA, 25 bp, Homo sapien
aatctcatgttctcttctgtaagtg

SEQ ID NO: 29025 - DNA, 25 bp, Homo sapien
gtaactgtctccttgtacggaaagt

SEQ ID NO: 29026 - DNA, 25 bp, Homo sapien
gtaactgtctccatgtacggaaagt

SEQ ID NO: 29027 - DNA, 25 bp, Homo sapien
cttacgacccgaggtcggacgacag

SEQ ID NO: 29028 - DNA, 25 bp, Homo sapien
cttacgacccgacgtcggacgacag

SEQ ID NO: 29029 - DNA, 25 bp, Homo sapien
agtgtcgtagttggtctgagcaccg

SEQ ID NO: 29030 - DNA, 25 bp, Homo sapien
agtgtcgtagttcgtctgagcaccg

SEQ ID NO: 29031 - DNA, 25 bp, Homo sapien
ggaaggtgtggctctacagtcacag

SEQ ID NO: 29032 - DNA, 25 bp, Homo sapien
ggaaggtgtggcactacagtcacag

SEQ ID NO: 29033 - DNA, 25 bp, Homo sapien
tcatttagaacatacgtacggttga

SEQ ID NO: 29034 - DNA, 25 bp, Homo sapien
tcatttagaacaaacgtacggttga

SEQ ID NO: 29035 - DNA, 25 bp, Homo sapien
actcaaaagtaccaatgaccttcac

SEQ ID NO: 29036 - DNA, 25 bp, Homo sapien
actcaaaagtacgaatgaccttcac

SEQ ID NO: 29037 - DNA, 25 bp, Homo sapien
tacgggatgtataaatcacattcat

SEQ ID NO: 29038 - DNA, 25 bp, Homo sapien
tacgggatgtattaatcacattcat

SEQ ID NO: 29039 - DNA, 25 bp, Homo sapien
gttcgagaatatacgaaaatctctt

SEQ ID NO: 29040 - DNA, 25 bp, Homo sapien
gttcgagaatattcgaaaatctctt

SEQ ID NO: 29041 - DNA, 25 bp, Homo sapien
atgtcagaaatatcctcaatcttat

SEQ ID NO: 29042 - DNA, 25 bp, Homo sapien
atgtcagaaataacctcaatcttat

SEQ ID NO: 29043 - DNA, 25 bp, Homo sapien
gtgttcagaagtccaacaaatatct

SEQ ID NO: 29044 - DNA, 25 bp, Homo sapien
gtgttcagaagtgcaacaaatatct

SEQ ID NO: 29045 - DNA, 25 bp, Homo sapien
cggtgttaatttactcacaatatag

SEQ ID NO: 29046 - DNA, 25 bp, Homo sapien
cggtgttaattttctcacaatatag

SEQ ID NO: 29047 - DNA, 25 bp, Homo sapien
aacggggttctatcgtccaatatta

SEQ ID NO: 29048 - DNA, 25 bp, Homo sapien
aacggggttctaacgtccaatatta

SEQ ID NO: 29049 - DNA, 25 bp, Homo sapien
ggtcatatacgtgttgtcattcgta

SEQ ID NO: 29050 - DNA, 25 bp, Homo sapien
ggtcatatacgtcttgtcattcgta

SEQ ID NO: 29051 - DNA, 25 bp, Homo sapien
gtctcacagtgtcctttagcttcgg

SEQ ID NO: 29052 - DNA, 25 bp, Homo sapien
gtctcacagtgtgctttagcttcgg

SEQ ID NO: 29053 - DNA, 25 bp, Homo sapien
tctccgcatgtccctatcgtgtcgg

SEQ ID NO: 29054 - DNA, 25 bp, Homo sapien
tctccgcatgtcgctatcgtgtcgg

SEQ ID NO: 29055 - DNA, 25 bp, Homo sapien
ctgtcgaaagtcgatgtcgtgtaag

SEQ ID NO: 29056 - DNA, 25 bp, Homo sapien
ctgtcgaaagtccatgtcgtgtaag

SEQ ID NO: 29057 - DNA, 25 bp, Homo sapien
gagacacccgagtgttcatattgaa

SEQ ID NO: 29058 - DNA, 25 bp, Homo sapien
gagacacccgagagttcatattgaa

SEQ ID NO: 29059 - DNA, 25 bp, Homo sapien
taccacgtccggtgcttcatatggg

SEQ ID NO: 29060 - DNA, 25 bp, Homo sapien
taccacgtccggagcttcatatggg

SEQ ID NO: 29061 - DNA, 25 bp, Homo sapien
aggactgaaagacgactcgaccgtg

SEQ ID NO: 29062 - DNA, 25 bp, Homo sapien
aggactgaaagaggactcgaccgtg

SEQ ID NO: 29063 - DNA, 25 bp, Homo sapien
agatctagaaagagtcgtcacgggt

SEQ ID NO: 29064 - DNA, 25 bp, Homo sapien
agatctagaaagtgtcgtcacgggt

SEQ ID NO: 29065 - DNA, 25 bp, Homo sapien
gtggtcgcaagagtactcctcgtcg

SEQ ID NO: 29066 - DNA, 25 bp, Homo sapien
gtggtcgcaagactactcctcgtcg

SEQ ID NO: 29067 - DNA, 25 bp, Homo sapien
gacgttgttacaatctcgtctcctc

SEQ ID NO: 29068 - DNA, 25 bp, Homo sapien
gacgttgttacattctcgtctcctc

SEQ ID NO: 29069 - DNA, 25 bp, Homo sapien
cgaataaatgtacaattgtccaccg

SEQ ID NO: 29070 - DNA, 25 bp, Homo sapien
cgaataaatgtagaattgtccaccg

SEQ ID NO: 29071 - DNA, 25 bp, Homo sapien
aagtaagagtgacgaaggtagcccc

SEQ ID NO: 29072 - DNA, 25 bp, Homo sapien
aagtaagagtgaggaaggtagcccc

SEQ ID NO: 29073 - DNA, 25 bp, Homo sapien
gaggaaccgggcacagtcgcttccc

SEQ ID NO: 29074 - DNA, 25 bp, Homo sapien
gaggaaccgggctcagtcgcttccc

SEQ ID NO: 29075 - DNA, 25 bp, Homo sapien
gacgacggggtacactggtctttcc

SEQ ID NO: 29076 - DNA, 25 bp, Homo sapien
gacgacggggtagactggtctttcc

SEQ ID NO: 29077 - DNA, 25 bp, Homo sapien
tccgggggtagggtttatgagttct

SEQ ID NO: 29078 - DNA, 25 bp, Homo sapien
tccgggggtaggctttatgagttct

SEQ ID NO: 29079 - DNA, 25 bp, Homo sapien
agttcggtagtaagattattttatt

SEQ ID NO: 29080 - DNA, 25 bp, Homo sapien
agttcggtagtatgattattttatt

SEQ ID NO: 29081 - DNA, 25 bp, Homo sapien
gagagtagggtgtatacttcttaag

SEQ ID NO: 29082 - DNA, 25 bp, Homo sapien
gagagtagggtgaatacttcttaag

SEQ ID NO: 29083 - DNA, 25 bp, Homo sapien
tatacgaagtgtccattacctatgt

SEQ ID NO: 29084 - DNA, 25 bp, Homo sapien
tatacgaagtgtgcattacctatgt

SEQ ID NO: 29085 - DNA, 25 bp, Homo sapien
ctcacgagtgtaggactatttagtg

SEQ ID NO: 29086 - DNA, 25 bp, Homo sapien
ctcacgagtgtacgactatttagtg

SEQ ID NO: 29087 - DNA, 25 bp, Homo sapien
tgtcactagtacaacgatctcggac

SEQ ID NO: 29088 - DNA, 25 bp, Homo sapien
tgtcactagtactacgatctcggac

SEQ ID NO: 29089 - DNA, 25 bp, Homo sapien
atgttagtgacttctgtgtgtgtat

SEQ ID NO: 29090 - DNA, 25 bp, Homo sapien
atgttagtgactactgtgtgtgtat

SEQ ID NO: 29091 - DNA, 25 bp, Homo sapien
tgatccgagtcatctttggtcttct

SEQ ID NO: 29092 - DNA, 25 bp, Homo sapien
tgatccgagtcaactttggtcttct

SEQ ID NO: 29093 - DNA, 25 bp, Homo sapien
caccaatccctctcttatgatgggt

SEQ ID NO: 29094 - DNA, 25 bp, Homo sapien
caccaatccctcacttatgatgggt

SEQ ID NO: 29095 - DNA, 25 bp, Homo sapien
cacatgtccatctttttcatgcgtg

SEQ ID NO: 29096 - DNA, 25 bp, Homo sapien
cacatgtccatcattttcatgcgtg

SEQ ID NO: 29097 - DNA, 25 bp, Homo sapien
gctacataaaatggtcttccatttg

SEQ ID NO: 29098 - DNA, 25 bp, Homo sapien
gctacataaaatcgtcttccatttg

SEQ ID NO: 29099 - DNA, 25 bp, Homo sapien
gctgctcaaatagtccttcattgtg

SEQ ID NO: 29100 - DNA, 25 bp, Homo sapien
gctgctcaaatactccttcattgtg

SEQ ID NO: 29101 - DNA, 25 bp, Homo sapien
tcgctaactgtgtctttgtatgatc

SEQ ID NO: 29102 - DNA, 25 bp, Homo sapien
tcgctaactgtgactttgtatgatc

SEQ ID NO: 29103 - DNA, 25 bp, Homo sapien
acgaagtttagtctagggtatgctc

SEQ ID NO: 29104 - DNA, 25 bp, Homo sapien
acgaagtttagtgtagggtatgctc

SEQ ID NO: 29105 - DNA, 25 bp, Homo sapien
gacgcaggacagagtgtgtgttccc

SEQ ID NO: 29106 - DNA, 25 bp, Homo sapien
gacgcaggacagtgtgtgtgttccc

SEQ ID NO: 29107 - DNA, 25 bp, Homo sapien
gtcgacttcccgacgtcctttataa

SEQ ID NO: 29108 - DNA, 25 bp, Homo sapien
gtcgacttcccgtcgtcctttataa

SEQ ID NO: 29109 - DNA, 25 bp, Homo sapien
gagtctctcctttaagtcctttgaa

SEQ ID NO: 29110 - DNA, 25 bp, Homo sapien
gagtctctccttaaagtcctttgaa

SEQ ID NO: 29111 - DNA, 25 bp, Homo sapien
acatatcatttttccgtctcttggt

SEQ ID NO: 29112 - DNA, 25 bp, Homo sapien
acatatcattttaccgtctcttggt

SEQ ID NO: 29113 - DNA, 25 bp, Homo sapien
aaccccagtgttggagggccagtac

SEQ ID NO: 29114 - DNA, 25 bp, Homo sapien
aaccccagtgttcgagggccagtac

SEQ ID NO: 29115 - DNA, 25 bp, Homo sapien
agtagactttcgagatacctagtag

SEQ ID NO: 29116 - DNA, 25 bp, Homo sapien
agtagactttcgtgatacctagtag

SEQ ID NO: 29117 - DNA, 25 bp, Homo sapien
accgtgtttactttacagtagtacg

SEQ ID NO: 29118 - DNA, 25 bp, Homo sapien
accgtgtttactatacagtagtacg

SEQ ID NO: 29119 - DNA, 25 bp, Homo sapien
ccgtgttaagtttccaacagacgta

SEQ ID NO: 29120 - DNA, 25 bp, Homo sapien
ccgtgttaagttaccaacagacgta

SEQ ID NO: 29121 - DNA, 25 bp, Homo sapien
ccgtatcactcgtagggtatttaac

SEQ ID NO: 29122 - DNA, 25 bp, Homo sapien
ccgtatcactcgaagggtatttaac

SEQ ID NO: 29123 - DNA, 25 bp, Homo sapien
cgaaacaagtctcaacccatttacc

SEQ ID NO: 29124 - DNA, 25 bp, Homo sapien
cgaaacaagtctgaacccatttacc

SEQ ID NO: 29125 - DNA, 25 bp, Homo sapien
acacgagtctgacgaccttcgaacc

SEQ ID NO: 29126 - DNA, 25 bp, Homo sapien
acacgagtctgaggaccttcgaacc

SEQ ID NO: 29127 - DNA, 25 bp, Homo sapien
aaactagtagcaacccgcgaggtcc

SEQ ID NO: 29128 - DNA, 25 bp, Homo sapien
aaactagtagcatcccgcgaggtcc

SEQ ID NO: 29129 - DNA, 25 bp, Homo sapien
aattcgttaaataccgagtcccacg

SEQ ID NO: 29130 - DNA, 25 bp, Homo sapien
aattcgttaaattccgagtcccacg

SEQ ID NO: 29131 - DNA, 25 bp, Homo sapien
ttgtcaaagttatcgacaagtctgt

SEQ ID NO: 29132 - DNA, 25 bp, Homo sapien
ttgtcaaagttaacgacaagtctgt

SEQ ID NO: 29133 - DNA, 25 bp, Homo sapien
gtgatccaacccaggacactcgaca

SEQ ID NO: 29134 - DNA, 25 bp, Homo sapien
gtgatccaaccctggacactcgaca

SEQ ID NO: 29135 - DNA, 25 bp, Homo sapien
gagaaccaggcgtggcactagtaca

SEQ ID NO: 29136 - DNA, 25 bp, Homo sapien
gagaaccaggcgaggcactagtaca

SEQ ID NO: 29137 - DNA, 25 bp, Homo sapien
catccgtatgagacggggtcgaagt

SEQ ID NO: 29138 - DNA, 25 bp, Homo sapien
catccgtatgagtcggggtcgaagt

SEQ ID NO: 29139 - DNA, 25 bp, Homo sapien
tggcacccagggtctcaagcctcgt

SEQ ID NO: 29140 - DNA, 25 bp, Homo sapien
tggcacccagggactcaagcctcgt

SEQ ID NO: 29141 - DNA, 25 bp, Homo sapien
gagtccccggtcgtttacaaaagac

SEQ ID NO: 29142 - DNA, 25 bp, Homo sapien
gagtccccggtcctttacaaaagac

SEQ ID NO: 29143 - DNA, 25 bp, Homo sapien
ccccggtgacgacgacaacgacgga

SEQ ID NO: 29144 - DNA, 25 bp, Homo sapien
ccccggtgacgaggacaacgacgga

SEQ ID NO: 29145 - DNA, 25 bp, Homo sapien
gtgcctcctgccaccgaaagtggtt

SEQ ID NO: 29146 - DNA, 25 bp, Homo sapien
gtgcctcctgcctccgaaagtggtt

SEQ ID NO: 29147 - DNA, 25 bp, Homo sapien
tctaccccttggtcggagcctgggt

SEQ ID NO: 29148 - DNA, 25 bp, Homo sapien
tctaccccttggacggagcctgggt

SEQ ID NO: 29149 - DNA, 25 bp, Homo sapien
tcacccttggacgtgtcacctttat

SEQ ID NO: 29150 - DNA, 25 bp, Homo sapien
tcacccttggacctgtcacctttat

SEQ ID NO: 29151 - DNA, 25 bp, Homo sapien
tccacgacacgagtaatgtcttagt

SEQ ID NO: 29152 - DNA, 25 bp, Homo sapien
tccacgacacgactaatgtcttagt

SEQ ID NO: 29153 - DNA, 25 bp, Homo sapien
actacgaccataacgttaagtgttt

SEQ ID NO: 29154 - DNA, 25 bp, Homo sapien
actacgaccatatcgttaagtgttt

SEQ ID NO: 29155 - DNA, 25 bp, Homo sapien
agccggtactcttttgtagacgtgt

SEQ ID NO: 29156 - DNA, 25 bp, Homo sapien
agccggtactctattgtagacgtgt

SEQ ID NO: 29157 - DNA, 25 bp, Homo sapien
atcagcgacgtgttttcggtgtcgg

SEQ ID NO: 29158 - DNA, 25 bp, Homo sapien
atcagcgacgtgatttcggtgtcgg

SEQ ID NO: 29159 - DNA, 25 bp, Homo sapien
ctatttatagtgtcaacggtgtgtc

SEQ ID NO: 29160 - DNA, 25 bp, Homo sapien
ctatttatagtgacaacggtgtgtc

SEQ ID NO: 29161 - DNA, 25 bp, Homo sapien
gttgaacgggtttttaaaccgggtc

SEQ ID NO: 29162 - DNA, 25 bp, Homo sapien
gttgaacgggttattaaaccgggtc

SEQ ID NO: 29163 - DNA, 25 bp, Homo sapien
ataaactcttgtgttcaaagtgttc

SEQ ID NO: 29164 - DNA, 25 bp, Homo sapien
ataaactcttgtcttcaaagtgttc

SEQ ID NO: 29165 - DNA, 25 bp, Homo sapien
aacgacagcatcttcaaagaactac

SEQ ID NO: 29166 - DNA, 25 bp, Homo sapien
aacgacagcatcatcaaagaactac

SEQ ID NO: 29167 - DNA, 25 bp, Homo sapien
accgttagactcatcatcagaccta

SEQ ID NO: 29168 - DNA, 25 bp, Homo sapien
accgttagactcttcatcagaccta

SEQ ID NO: 29169 - DNA, 25 bp, Homo sapien
cactactcactcttcggtttctgag

SEQ ID NO: 29170 - DNA, 25 bp, Homo sapien
cactactcactcatcggtttctgag

SEQ ID NO: 29171 - DNA, 25 bp, Homo sapien
cctgatcagatacgttgtcttagag

SEQ ID NO: 29172 - DNA, 25 bp, Homo sapien
cctgatcagataggttgtcttagag

SEQ ID NO: 29173 - DNA, 25 bp, Homo sapien
ttttattctaatggttcgtctccgg

SEQ ID NO: 29174 - DNA, 25 bp, Homo sapien
ttttattctaatcgttcgtctccgg

SEQ ID NO: 29175 - DNA, 25 bp, Homo sapien
tactggtaagacaactttctacgag

SEQ ID NO: 29176 - DNA, 25 bp, Homo sapien
tactggtaagactactttctacgag

SEQ ID NO: 29177 - DNA, 25 bp, Homo sapien
gcattatggaggatcctattcagcg

SEQ ID NO: 29178 - DNA, 25 bp, Homo sapien
gcattatggaggttcctattcagcg

SEQ ID NO: 29179 - DNA, 25 bp, Homo sapien
cgactttcagcgtgtttcacaaatt

SEQ ID NO: 29180 - DNA, 25 bp, Homo sapien
cgactttcagcgagtttcacaaatt

SEQ ID NO: 29181 - DNA, 25 bp, Homo sapien
gctagtcttcaagtctcccatttcg

SEQ ID NO: 29182 - DNA, 25 bp, Homo sapien
gctagtcttcaactctcccatttcg

SEQ ID NO: 29183 - DNA, 25 bp, Homo sapien
gtccagtaggaaatccatatcttgt

SEQ ID NO: 29184 - DNA, 25 bp, Homo sapien
gtccagtaggaattccatatcttgt

SEQ ID NO: 29185 - DNA, 25 bp, Homo sapien
taccaggtcttttcctaactcagtt

SEQ ID NO: 29186 - DNA, 25 bp, Homo sapien
taccaggtctttacctaactcagtt

SEQ ID NO: 29187 - DNA, 25 bp, Homo sapien
gacctcccggttattattcctgaag

SEQ ID NO: 29188 - DNA, 25 bp, Homo sapien
gacctcccggtttttattcctgaag

SEQ ID NO: 29189 - DNA, 25 bp, Homo sapien
ctgtcgagttctgacacagggaagt

SEQ ID NO: 29190 - DNA, 25 bp, Homo sapien
ctgtcgagttctcacacagggaagt

SEQ ID NO: 29191 - DNA, 25 bp, Homo sapien
gttttccacggtctatcgagggacc

SEQ ID NO: 29192 - DNA, 25 bp, Homo sapien
gttttccacggtgtatcgagggacc

SEQ ID NO: 29193 - DNA, 25 bp, Homo sapien
tttttacgttggagttcagggactc

SEQ ID NO: 29194 - DNA, 25 bp, Homo sapien
tttttacgttggtgttcagggactc

SEQ ID NO: 29195 - DNA, 25 bp, Homo sapien
aagaggtagaccaagtaaaaccgag

SEQ ID NO: 29196 - DNA, 25 bp, Homo sapien
aagaggtagacctagtaaaaccgag

SEQ ID NO: 29197 - DNA, 25 bp, Homo sapien
aaagagagaaccagtcggaacacgc

SEQ ID NO: 29198 - DNA, 25 bp, Homo sapien
aaagagagaacctgtcggaacacgc

SEQ ID NO: 29199 - DNA, 25 bp, Homo sapien
caaagaagagacaggttggtgactc

SEQ ID NO: 29200 - DNA, 25 bp, Homo sapien
caaagaagagactggttggtgactc

SEQ ID NO: 29201 - DNA, 25 bp, Homo sapien
atgactcaactatatgtgtcgtctt

SEQ ID NO: 29202 - DNA, 25 bp, Homo sapien
atgactcaactaaatgtgtcgtctt

SEQ ID NO: 29203 - DNA, 25 bp, Homo sapien
tcgtgttacacatgcatgttgttag

SEQ ID NO: 29204 - DNA, 25 bp, Homo sapien
tcgtgttacacaagcatgttgttag

SEQ ID NO: 29205 - DNA, 25 bp, Homo sapien
gtagcggactcagacaagcaagtag

SEQ ID NO: 29206 - DNA, 25 bp, Homo sapien
gtagcggactcacacaagcaagtag

SEQ ID NO: 29207 - DNA, 25 bp, Homo sapien
cggcctgcgctcgtctacttgcttg

SEQ ID NO: 29208 - DNA, 25 bp, Homo sapien
cggcctgcgctcctctacttgcttg

SEQ ID NO: 29209 - DNA, 25 bp, Homo sapien
agggagtccagttaatctttacgtt

SEQ ID NO: 29210 - DNA, 25 bp, Homo sapien
agggagtccagtaaatctttacgtt

SEQ ID NO: 29211 - DNA, 25 bp, Homo sapien
gagcagtcatgtaagtagtgccgcc

SEQ ID NO: 29212 - DNA, 25 bp, Homo sapien
gagcagtcatgttagtagtgccgcc

SEQ ID NO: 29213 - DNA, 25 bp, Homo sapien
agaaaacgtataactcgaagactcg

SEQ ID NO: 29214 - DNA, 25 bp, Homo sapien
agaaaacgtatatctcgaagactcg

SEQ ID NO: 29215 - DNA, 25 bp, Homo sapien
tattttgtagtaaagacgtcacgcc

SEQ ID NO: 29216 - DNA, 25 bp, Homo sapien
tattttgtagtatagacgtcacgcc

SEQ ID NO: 29217 - DNA, 25 bp, Homo sapien
ttgtgttcacagacggtacagtaga

SEQ ID NO: 29218 - DNA, 25 bp, Homo sapien
ttgtgttcacagtcggtacagtaga

SEQ ID NO: 29219 - DNA, 25 bp, Homo sapien
tcggatggtgtgaagtgtagaccca

SEQ ID NO: 29220 - DNA, 25 bp, Homo sapien
tcggatggtgtgtagtgtagaccca

SEQ ID NO: 29221 - DNA, 25 bp, Homo sapien
caagatcaggtgtgatgacgtctga

SEQ ID NO: 29222 - DNA, 25 bp, Homo sapien
caagatcaggtgagatgacgtctga

SEQ ID NO: 29223 - DNA, 25 bp, Homo sapien
ccctttcggctgaagtcagtgtcgg

SEQ ID NO: 29224 - DNA, 25 bp, Homo sapien
ccctttcggctgtagtcagtgtcgg

SEQ ID NO: 29225 - DNA, 25 bp, Homo sapien
tccgttgtgctcgtccgtgtcgcgc

SEQ ID NO: 29226 - DNA, 25 bp, Homo sapien
tccgttgtgctcctccgtgtcgcgc

SEQ ID NO: 29227 - DNA, 25 bp, Homo sapien
gtccgttgtaaaacactagtattta

SEQ ID NO: 29228 - DNA, 25 bp, Homo sapien
gtccgttgtaaatcactagtattta

SEQ ID NO: 29229 - DNA, 25 bp, Homo sapien
agcgtttcgtggtccgtatgttgtc

SEQ ID NO: 29230 - DNA, 25 bp, Homo sapien
agcgtttcgtggaccgtatgttgtc

SEQ ID NO: 29231 - DNA, 25 bp, Homo sapien
tactcagagaggaacagggtctcgc

SEQ ID NO: 29232 - DNA, 25 bp, Homo sapien
tactcagagaggtacagggtctcgc

SEQ ID NO: 29233 - DNA, 25 bp, Homo sapien
tcctatatgaggtcgaaggtctacc

SEQ ID NO: 29234 - DNA, 25 bp, Homo sapien
tcctatatgaggacgaaggtctacc

SEQ ID NO: 29235 - DNA, 25 bp, Homo sapien
accttgacggtgaggtcgtactcga

SEQ ID NO: 29236 - DNA, 25 bp, Homo sapien
accttgacggtgtggtcgtactcga

SEQ ID NO: 29237 - DNA, 25 bp, Homo sapien
tccctataggatggagatcgactcc

SEQ ID NO: 29238 - DNA, 25 bp, Homo sapien
tccctataggatcgagatcgactcc

SEQ ID NO: 29239 - DNA, 25 bp, Homo sapien
ctacgaaaggtttgatctagaacta

SEQ ID NO: 29240 - DNA, 25 bp, Homo sapien
ctacgaaaggttagatctagaacta

SEQ ID NO: 29241 - DNA, 25 bp, Homo sapien
tcgtgtctttttggtctaagattac

SEQ ID NO: 29242 - DNA, 25 bp, Homo sapien
tcgtgtctttttcgtctaagattac

SEQ ID NO: 29243 - DNA, 25 bp, Homo sapien
gatttcttttcttgttaatactaat

SEQ ID NO: 29244 - DNA, 25 bp, Homo sapien
gatttcttttctagttaatactaat

SEQ ID NO: 29245 - DNA, 25 bp, Homo sapien
gttttgtctgttttgaaacactact

SEQ ID NO: 29246 - DNA, 25 bp, Homo sapien
gttttgtctgttatgaaacactact

SEQ ID NO: 29247 - DNA, 25 bp, Homo sapien
gttttataccttcgactgaaaagtt

SEQ ID NO: 29248 - DNA, 25 bp, Homo sapien
gttttataccttggactgaaaagtt

SEQ ID NO: 29249 - DNA, 25 bp, Homo sapien
caagttaagtcgtttcataacgtct

SEQ ID NO: 29250 - DNA, 25 bp, Homo sapien
caagttaagtcgattcataacgtct

SEQ ID NO: 29251 - DNA, 25 bp, Homo sapien
atcgtaggaaaggaatctgtatacc

SEQ ID NO: 29252 - DNA, 25 bp, Homo sapien
atcgtaggaaagcaatctgtatacc

SEQ ID NO: 29253 - DNA, 25 bp, Homo sapien
aaaaagttaccgtaactgtatccgt

SEQ ID NO: 29254 - DNA, 25 bp, Homo sapien
aaaaagttaccgaaactgtatccgt

SEQ ID NO: 29255 - DNA, 25 bp, Homo sapien
acacttaagtgtgtactcgatcggt

SEQ ID NO: 29256 - DNA, 25 bp, Homo sapien
acacttaagtgtctactcgatcggt

SEQ ID NO: 29257 - DNA, 25 bp, Homo sapien
aaaacgaaatacttttacacatcct

SEQ ID NO: 29258 - DNA, 25 bp, Homo sapien
aaaacgaaatacatttacacatcct

SEQ ID NO: 29259 - DNA, 25 bp, Homo sapien
aaacgagacctcgtcgctacgggcc

SEQ ID NO: 29260 - DNA, 25 bp, Homo sapien
aaacgagacctcctcgctacgggcc

SEQ ID NO: 29261 - DNA, 25 bp, Homo sapien
tgtgtgaaccccagtccgaagaacg

SEQ ID NO: 29262 - DNA, 25 bp, Homo sapien
tgtgtgaacccctgtccgaagaacg

SEQ ID NO: 29263 - DNA, 25 bp, Homo sapien
tgtgtctccattgttactgtaaacg

SEQ ID NO: 29264 - DNA, 25 bp, Homo sapien
tgtgtctccattcttactgtaaacg

SEQ ID NO: 29265 - DNA, 25 bp, Homo sapien
gcgtgtcgaccttgagcgccgacaa

SEQ ID NO: 29266 - DNA, 25 bp, Homo sapien
gcgtgtcgacctagagcgccgacaa

SEQ ID NO: 29267 - DNA, 25 bp, Homo sapien
tctgactctcaggtcgctccaacgt

SEQ ID NO: 29268 - DNA, 25 bp, Homo sapien
tctgactctcagctcgctccaacgt

SEQ ID NO: 29269 - DNA, 25 bp, Homo sapien
gacatctgacccaacagttttaagt

SEQ ID NO: 29270 - DNA, 25 bp, Homo sapien
gacatctgaccctacagttttaagt

SEQ ID NO: 29271 - DNA, 25 bp, Homo sapien
tacgtgtcctctaaggttactctaa

SEQ ID NO: 29272 - DNA, 25 bp, Homo sapien
tacgtgtcctcttaggttactctaa

SEQ ID NO: 29273 - DNA, 25 bp, Homo sapien
aacggactttgaagttactctaggt

SEQ ID NO: 29274 - DNA, 25 bp, Homo sapien
aacggactttgatgttactctaggt

SEQ ID NO: 29275 - DNA, 25 bp, Homo sapien
tacgagcacgtcaccgttgctgtcg

SEQ ID NO: 29276 - DNA, 25 bp, Homo sapien
tacgagcacgtctccgttgctgtcg

SEQ ID NO: 29277 - DNA, 25 bp, Homo sapien
tcgaccgagtctgaacagtgacccc

SEQ ID NO: 29278 - DNA, 25 bp, Homo sapien
tcgaccgagtctcaacagtgacccc

SEQ ID NO: 29279 - DNA, 25 bp, Homo sapien
cgtaccggtggtcaacggaggtccc

SEQ ID NO: 29280 - DNA, 25 bp, Homo sapien
cgtaccggtggtgaacggaggtccc

SEQ ID NO: 29281 - DNA, 25 bp, Homo sapien
tcttcgacagtgaatgggtcgactg

SEQ ID NO: 29282 - DNA, 25 bp, Homo sapien
tcttcgacagtgtatgggtcgactg

SEQ ID NO: 29283 - DNA, 25 bp, Homo sapien
tctgtacgtcggacacaggcctacc

SEQ ID NO: 29284 - DNA, 25 bp, Homo sapien
tctgtacgtcggtcacaggcctacc

SEQ ID NO: 29285 - DNA, 25 bp, Homo sapien
catctcaccgtgacaggggagacct

SEQ ID NO: 29286 - DNA, 25 bp, Homo sapien
catctcaccgtgtcaggggagacct

SEQ ID NO: 29287 - DNA, 25 bp, Homo sapien
ctgtcgacggcctttcggaggaacc

SEQ ID NO: 29288 - DNA, 25 bp, Homo sapien
ctgtcgacggccattcggaggaacc

SEQ ID NO: 29289 - DNA, 25 bp, Homo sapien
ttctgcgaggactcctcgacgtgcc

SEQ ID NO: 29290 - DNA, 25 bp, Homo sapien
ttctgcgaggacacctcgacgtgcc

SEQ ID NO: 29291 - DNA, 25 bp, Homo sapien
tatttacctgactcctgttctcgag

SEQ ID NO: 29292 - DNA, 25 bp, Homo sapien
tatttacctgacacctgttctcgag

SEQ ID NO: 29293 - DNA, 25 bp, Homo sapien
gtttactcaacttcacggaactaga

SEQ ID NO: 29294 - DNA, 25 bp, Homo sapien
gtttactcaactacacggaactaga

SEQ ID NO: 29295 - DNA, 25 bp, Homo sapien
tgaacaagacgtagacaatacgaca

SEQ ID NO: 29296 - DNA, 25 bp, Homo sapien
tgaacaagacgttgacaatacgaca

SEQ ID NO: 29297 - DNA, 25 bp, Homo sapien
gactcgaacagagtcacactaacac

SEQ ID NO: 29298 - DNA, 25 bp, Homo sapien
gactcgaacagactcacactaacac

SEQ ID NO: 29299 - DNA, 25 bp, Homo sapien
gacgtctccgacagacttaagaaag

SEQ ID NO: 29300 - DNA, 25 bp, Homo sapien
gacgtctccgactgacttaagaaag

SEQ ID NO: 29301 - DNA, 25 bp, Homo sapien
gtgacgtccgaagactacgagacaa

SEQ ID NO: 29302 - DNA, 25 bp, Homo sapien
gtgacgtccgaacactacgagacaa

SEQ ID NO: 29303 - DNA, 25 bp, Homo sapien
ggtaagtcaagtcgacaggtcatag

SEQ ID NO: 29304 - DNA, 25 bp, Homo sapien
ggtaagtcaagtggacaggtcatag

SEQ ID NO: 29305 - DNA, 25 bp, Homo sapien
cgactaagaggtgaaggtgtactct

SEQ ID NO: 29306 - DNA, 25 bp, Homo sapien
cgactaagaggtcaaggtgtactct

SEQ ID NO: 29307 - DNA, 25 bp, Homo sapien
aacacgagagggtcagagtggacct

SEQ ID NO: 29308 - DNA, 25 bp, Homo sapien
aacacgagagggacagagtggacct

SEQ ID NO: 29309 - DNA, 25 bp, Homo sapien
tacgtgtggagacactacgagggcc

SEQ ID NO: 29310 - DNA, 25 bp, Homo sapien
tacgtgtggagagactacgagggcc

SEQ ID NO: 29311 - DNA, 25 bp, Homo sapien
acgtcctcacagacagtgactctac

SEQ ID NO: 29312 - DNA, 25 bp, Homo sapien
acgtcctcacagtcagtgactctac

SEQ ID NO: 29313 - DNA, 25 bp, Homo sapien
tctgtcataaattagcactcgtacg

SEQ ID NO: 29314 - DNA, 25 bp, Homo sapien
tctgtcataaataagcactcgtacg

SEQ ID NO: 29315 - DNA, 25 bp, Homo sapien
gttgtgacaagtgtaatcgactcct

SEQ ID NO: 29316 - DNA, 25 bp, Homo sapien
gttgtgacaagtctaatcgactcct

SEQ ID NO: 29317 - DNA, 25 bp, Homo sapien
atgttgaaaagaactatctatacat

SEQ ID NO: 29318 - DNA, 25 bp, Homo sapien
atgttgaaaagatctatctatacat

SEQ ID NO: 29319 - DNA, 25 bp, Homo sapien
agtgttaaccgatactccttaaagt

SEQ ID NO: 29320 - DNA, 25 bp, Homo sapien
agtgttaaccgaaactccttaaagt

SEQ ID NO: 29321 - DNA, 25 bp, Homo sapien
gtaatcgacgaaactcagttatata

SEQ ID NO: 29322 - DNA, 25 bp, Homo sapien
gtaatcgacgaatctcagttatata

SEQ ID NO: 29323 - DNA, 25 bp, Homo sapien
acaaaacttactattacataccata

SEQ ID NO: 29324 - DNA, 25 bp, Homo sapien
acaaaacttacttttacataccata

SEQ ID NO: 29325 - DNA, 25 bp, Homo sapien
gtaacgacgatgaagatacaacttc

SEQ ID NO: 29326 - DNA, 25 bp, Homo sapien
gtaacgacgatgtagatacaacttc

SEQ ID NO: 29327 - DNA, 25 bp, Homo sapien
gataatacggtacttaagtatccct

SEQ ID NO: 29328 - DNA, 25 bp, Homo sapien
gataatacggtagttaagtatccct

SEQ ID NO: 29329 - DNA, 25 bp, Homo sapien
aaaagaagtcttttagatctcgttc

SEQ ID NO: 29330 - DNA, 25 bp, Homo sapien
aaaagaagtcttatagatctcgttc

SEQ ID NO: 29331 - DNA, 25 bp, Homo sapien
ctaacgattgaggatatcgtatgct

SEQ ID NO: 29332 - DNA, 25 bp, Homo sapien
ctaacgattgagcatatcgtatgct

SEQ ID NO: 29333 - DNA, 25 bp, Homo sapien
agacgagtgtagaaacgttcttgtc

SEQ ID NO: 29334 - DNA, 25 bp, Homo sapien
agacgagtgtagtaacgttcttgtc

SEQ ID NO: 29335 - DNA, 25 bp, Homo sapien
ccggagacagtcattaggcaccttc

SEQ ID NO: 29336 - DNA, 25 bp, Homo sapien
ccggagacagtctttaggcaccttc

SEQ ID NO: 29337 - DNA, 25 bp, Homo sapien
actgtggcacccggacggcccgcgc

SEQ ID NO: 29338 - DNA, 25 bp, Homo sapien
actgtggcaccccgacggcccgcgc

SEQ ID NO: 29339 - DNA, 25 bp, Homo sapien
cgtgcgcgacttcgatgtcaattgt

SEQ ID NO: 29340 - DNA, 25 bp, Homo sapien
cgtgcgcgacttggatgtcaattgt

SEQ ID NO: 29341 - DNA, 25 bp, Homo sapien
tccgagtggacaaaaattcttttgt

SEQ ID NO: 29342 - DNA, 25 bp, Homo sapien
tccgagtggacataaattcttttgt

SEQ ID NO: 29343 - DNA, 25 bp, Homo sapien
aggaacaccggtcgttcgtgataag

SEQ ID NO: 29344 - DNA, 25 bp, Homo sapien
aggaacaccggtggttcgtgataag

SEQ ID NO: 29345 - DNA, 25 bp, Homo sapien
gaaggacagtaacttaggatctact

SEQ ID NO: 29346 - DNA, 25 bp, Homo sapien
gaaggacagtaagttaggatctact

SEQ ID NO: 29347 - DNA, 25 bp, Homo sapien
tcgacgggccgctctcggtggttat

SEQ ID NO: 29348 - DNA, 25 bp, Homo sapien
tcgacgggccgcactcggtggttat

SEQ ID NO: 29349 - DNA, 25 bp, Homo sapien
ggtccggacctaataccgttatttt

SEQ ID NO: 29350 - DNA, 25 bp, Homo sapien
ggtccggacctattaccgttatttt

SEQ ID NO: 29351 - DNA, 25 bp, Homo sapien
cccggtcgttataacatgtttctag

SEQ ID NO: 29352 - DNA, 25 bp, Homo sapien
cccggtcgttattacatgtttctag

SEQ ID NO: 29353 - DNA, 25 bp, Homo sapien
actcggtccggtagtgatttccgtg

SEQ ID NO: 29354 - DNA, 25 bp, Homo sapien
actcggtccggttgtgatttccgtg

SEQ ID NO: 29355 - DNA, 25 bp, Homo sapien
aggttgtgttgtctcgtgtccgtgt

SEQ ID NO: 29356 - DNA, 25 bp, Homo sapien
aggttgtgttgtgtcgtgtccgtgt

SEQ ID NO: 29357 - DNA, 25 bp, Homo sapien
tcccagatcttttgatctgtgtttc

SEQ ID NO: 29358 - DNA, 25 bp, Homo sapien
tcccagatctttagatctgtgtttc

SEQ ID NO: 29359 - DNA, 25 bp, Homo sapien
tcaggttttgacagcatcgacttat

SEQ ID NO: 29360 - DNA, 25 bp, Homo sapien
tcaggttttgactgcatcgacttat

SEQ ID NO: 29361 - DNA, 25 bp, Homo sapien
cagtctcgtttgtgtctagcgtcca

SEQ ID NO: 29362 - DNA, 25 bp, Homo sapien
cagtctcgtttgagtctagcgtcca

SEQ ID NO: 29363 - DNA, 25 bp, Homo sapien
acgtcactttctacggtacaaagac

SEQ ID NO: 29364 - DNA, 25 bp, Homo sapien
acgtcactttcttcggtacaaagac

SEQ ID NO: 29365 - DNA, 25 bp, Homo sapien
gtcccatgtactcaaacgtttatga

SEQ ID NO: 29366 - DNA, 25 bp, Homo sapien
gtcccatgtactgaaacgtttatga

SEQ ID NO: 29367 - DNA, 25 bp, Homo sapien
gccccatgtgtgaaaccacgtaggg

SEQ ID NO: 29368 - DNA, 25 bp, Homo sapien
gccccatgtgtgtaaccacgtaggg

SEQ ID NO: 29369 - DNA, 25 bp, Homo sapien
tcctcacctgtgaccagtcgacggg

SEQ ID NO: 29370 - DNA, 25 bp, Homo sapien
tcctcacctgtgtccagtcgacggg

SEQ ID NO: 29371 - DNA, 25 bp, Homo sapien
tctccgacttgtggtccggcccgtg

SEQ ID NO: 29372 - DNA, 25 bp, Homo sapien
tctccgacttgtcgtccggcccgtg

SEQ ID NO: 29373 - DNA, 25 bp, Homo sapien
cttccactatgtgacctggtgcagg

SEQ ID NO: 29374 - DNA, 25 bp, Homo sapien
cttccactatgtcacctggtgcagg

SEQ ID NO: 29375 - DNA, 25 bp, Homo sapien
tcagaccctaaacctcgattgaagt

SEQ ID NO: 29376 - DNA, 25 bp, Homo sapien
tcagaccctaaagctcgattgaagt

SEQ ID NO: 29377 - DNA, 25 bp, Homo sapien
ggagaacccaacgtctatccctact

SEQ ID NO: 29378 - DNA, 25 bp, Homo sapien
ggagaacccaacctctatccctact

SEQ ID NO: 29379 - DNA, 25 bp, Homo sapien
gtaggtcgacagaaaggtactcccc

SEQ ID NO: 29380 - DNA, 25 bp, Homo sapien
gtaggtcgacagtaaggtactcccc

SEQ ID NO: 29381 - DNA, 25 bp, Homo sapien
tctgaagtgactgagtaatgtcact

SEQ ID NO: 29382 - DNA, 25 bp, Homo sapien
tctgaagtgactcagtaatgtcact

SEQ ID NO: 29383 - DNA, 25 bp, Homo sapien
cggtagtagtaagagacgttgtcac

SEQ ID NO: 29384 - DNA, 25 bp, Homo sapien
cggtagtagtaacagacgttgtcac

SEQ ID NO: 29385 - DNA, 25 bp, Homo sapien
tgagtgcgactcaatcggagaacga

SEQ ID NO: 29386 - DNA, 25 bp, Homo sapien
tgagtgcgactctatcggagaacga

SEQ ID NO: 29387 - DNA, 25 bp, Homo sapien
tagtgtcctctaatgacagacaggt

SEQ ID NO: 29388 - DNA, 25 bp, Homo sapien
tagtgtcctctattgacagacaggt

SEQ ID NO: 29389 - DNA, 25 bp, Homo sapien
ggtgtgtgactcttcacaggctctt

SEQ ID NO: 29390 - DNA, 25 bp, Homo sapien
ggtgtgtgactcatcacaggctctt

SEQ ID NO: 29391 - DNA, 25 bp, Homo sapien
ctagacgaacacgtccgaggctctc

SEQ ID NO: 29392 - DNA, 25 bp, Homo sapien
ctagacgaacacctccgaggctctc

SEQ ID NO: 29393 - DNA, 25 bp, Homo sapien
tatagggcagactacagtcgttccg

SEQ ID NO: 29394 - DNA, 25 bp, Homo sapien
tatagggcagacaacagtcgttccg

SEQ ID NO: 29395 - DNA, 25 bp, Homo sapien
aagtaatttactacacaatgttcgg

SEQ ID NO: 29396 - DNA, 25 bp, Homo sapien
aagtaatttacttcacaatgttcgg

SEQ ID NO: 29397 - DNA, 25 bp, Homo sapien
gttactgtaggttccttcgtcttga

SEQ ID NO: 29398 - DNA, 25 bp, Homo sapien
gttactgtaggtaccttcgtcttga

SEQ ID NO: 29399 - DNA, 25 bp, Homo sapien
aaataaagagccttcttctgagtag

SEQ ID NO: 29400 - DNA, 25 bp, Homo sapien
aaataaagagccatcttctgagtag

SEQ ID NO: 29401 - DNA, 25 bp, Homo sapien
aaaagagtcgatgaagtaactaata

SEQ ID NO: 29402 - DNA, 25 bp, Homo sapien
aaaagagtcgatcaagtaactaata

SEQ ID NO: 29403 - DNA, 25 bp, Homo sapien
agaatgagacggtcagtgagatccc

SEQ ID NO: 29404 - DNA, 25 bp, Homo sapien
agaatgagacggacagtgagatccc

SEQ ID NO: 29405 - DNA, 25 bp, Homo sapien
aagagtgtcgccacagagctccgac

SEQ ID NO: 29406 - DNA, 25 bp, Homo sapien
aagagtgtcgcctcagagctccgac

SEQ ID NO: 29407 - DNA, 25 bp, Homo sapien
atactgtaggactttcagttttacc

SEQ ID NO: 29408 - DNA, 25 bp, Homo sapien
atactgtaggacattcagttttacc

SEQ ID NO: 29409 - DNA, 25 bp, Homo sapien
aatgttctgtctagtgtatactaac

SEQ ID NO: 29410 - DNA, 25 bp, Homo sapien
aatgttctgtcttgtgtatactaac

SEQ ID NO: 29411 - DNA, 25 bp, Homo sapien
taaacaggtttcatgtgtcgagttc

SEQ ID NO: 29412 - DNA, 25 bp, Homo sapien
taaacaggtttcttgtgtcgagttc

SEQ ID NO: 29413 - DNA, 25 bp, Homo sapien
tatatataatgtatcattttgtttc

SEQ ID NO: 29414 - DNA, 25 bp, Homo sapien
tatatataatgtttcattttgtttc

SEQ ID NO: 29415 - DNA, 25 bp, Homo sapien
attcagatacttacaggattgtttc

SEQ ID NO: 29416 - DNA, 25 bp, Homo sapien
attcagatactttcaggattgtttc

SEQ ID NO: 29417 - DNA, 25 bp, Homo sapien
cagtcactatacgatcttttgttcg

SEQ ID NO: 29418 - DNA, 25 bp, Homo sapien
cagtcactataccatcttttgttcg

SEQ ID NO: 29419 - DNA, 25 bp, Homo sapien
cggtgacaatttcgatacgttcttc

SEQ ID NO: 29420 - DNA, 25 bp, Homo sapien
cggtgacaatttggatacgttcttc

SEQ ID NO: 29421 - DNA, 25 bp, Homo sapien
cccgactgatattcggagacattca

SEQ ID NO: 29422 - DNA, 25 bp, Homo sapien
cccgactgatatacggagacattca

SEQ ID NO: 29423 - DNA, 25 bp, Homo sapien
taaaattgtacaggacgataccgag

SEQ ID NO: 29424 - DNA, 25 bp, Homo sapien
taaaattgtacacgacgataccgag

SEQ ID NO: 29425 - DNA, 25 bp, Homo sapien
gtccaggagtagtaagacgaaccat

SEQ ID NO: 29426 - DNA, 25 bp, Homo sapien
gtccaggagtagaaagacgaaccat

SEQ ID NO: 29427 - DNA, 25 bp, Homo sapien
gtcggaaatacaaaacatacgacat

SEQ ID NO: 29428 - DNA, 25 bp, Homo sapien
gtcggaaatacataacatacgacat

SEQ ID NO: 29429 - DNA, 25 bp, Homo sapien
gtggacacactcaaaagactacaac

SEQ ID NO: 29430 - DNA, 25 bp, Homo sapien
gtggacacactctaaagactacaac

SEQ ID NO: 29431 - DNA, 25 bp, Homo sapien
ataggttctcagatgtaccatacaa

SEQ ID NO: 29432 - DNA, 25 bp, Homo sapien
ataggttctcagttgtaccatacaa

SEQ ID NO: 29433 - DNA, 25 bp, Homo sapien
ggtcactcagataacgtaccacagg

SEQ ID NO: 29434 - DNA, 25 bp, Homo sapien
ggtcactcagattacgtaccacagg

SEQ ID NO: 29435 - DNA, 25 bp, Homo sapien
gggcctcgatacctcgtccacgtgg

SEQ ID NO: 29436 - DNA, 25 bp, Homo sapien
gggcctcgatacgtcgtccacgtgg

SEQ ID NO: 29437 - DNA, 25 bp, Homo sapien
acttacccagcaagctcacgaggtc

SEQ ID NO: 29438 - DNA, 25 bp, Homo sapien
acttacccagcatgctcacgaggtc

SEQ ID NO: 29439 - DNA, 25 bp, Homo sapien
ctcccagtacaactcgtaagacgtc

SEQ ID NO: 29440 - DNA, 25 bp, Homo sapien
ctcccagtacaagtcgtaagacgtc

SEQ ID NO: 29441 - DNA, 25 bp, Homo sapien
cgtcacagacgtcaaggttccagtc

SEQ ID NO: 29442 - DNA, 25 bp, Homo sapien
cgtcacagacgtgaaggttccagtc

SEQ ID NO: 29443 - DNA, 25 bp, Homo sapien
ccgtcacaggtgagtgagcacgagc

SEQ ID NO: 29444 - DNA, 25 bp, Homo sapien
ccgtcacaggtgtgtgagcacgagc

SEQ ID NO: 29445 - DNA, 25 bp, Homo sapien
taagattcaaccaatgtgtttatgc

SEQ ID NO: 29446 - DNA, 25 bp, Homo sapien
taagattcaacctatgtgtttatgc

SEQ ID NO: 29447 - DNA, 25 bp, Homo sapien
gagtataccggtatatttctatcct

SEQ ID NO: 29448 - DNA, 25 bp, Homo sapien
gagtataccggtttatttctatcct

SEQ ID NO: 29449 - DNA, 25 bp, Homo sapien
acaattggagtttagcattaacgac

SEQ ID NO: 29450 - DNA, 25 bp, Homo sapien
acaattggagttaagcattaacgac

SEQ ID NO: 29451 - DNA, 25 bp, Homo sapien
agactagggtggacctcacacaccc

SEQ ID NO: 29452 - DNA, 25 bp, Homo sapien
agactagggtggtcctcacacaccc

SEQ ID NO: 29453 - DNA, 25 bp, Homo sapien
ttagatcctgatcgtaatacaaacg

SEQ ID NO: 29454 - DNA, 25 bp, Homo sapien
ttagatcctgatggtaatacaaacg

SEQ ID NO: 29455 - DNA, 25 bp, Homo sapien
cagtaacttgtgtcggacatcggaa

SEQ ID NO: 29456 - DNA, 25 bp, Homo sapien
cagtaacttgtgacggacatcggaa

SEQ ID NO: 29457 - DNA, 25 bp, Homo sapien
ccaccgaagtaggagaacatcataa

SEQ ID NO: 29458 - DNA, 25 bp, Homo sapien
ccaccgaagtagcagaacatcataa

SEQ ID NO: 29459 - DNA, 25 bp, Homo sapien
ccgatacaagtgtctcaatcaactg

SEQ ID NO: 29460 - DNA, 25 bp, Homo sapien
ccgatacaagtgactcaatcaactg

SEQ ID NO: 29461 - DNA, 25 bp, Homo sapien
aaaagactgagttccaatcagagag

SEQ ID NO: 29462 - DNA, 25 bp, Homo sapien
aaaagactgagtaccaatcagagag

SEQ ID NO: 29463 - DNA, 25 bp, Homo sapien
gtacaaagtctagttccaagatgaa

SEQ ID NO: 29464 - DNA, 25 bp, Homo sapien
gtacaaagtctacttccaagatgaa

SEQ ID NO: 29465 - DNA, 25 bp, Homo sapien
agaggaccggtaccatcgcgtggta

SEQ ID NO: 29466 - DNA, 25 bp, Homo sapien
agaggaccggtagcatcgcgtggta

SEQ ID NO: 29467 - DNA, 25 bp, Homo sapien
tgacgtgccgtctacttgagtagaa

SEQ ID NO: 29468 - DNA, 25 bp, Homo sapien
tgacgtgccgtcaacttgagtagaa

SEQ ID NO: 29469 - DNA, 25 bp, Homo sapien
cacgtagaaggtaaatcctctagaa

SEQ ID NO: 29470 - DNA, 25 bp, Homo sapien
cacgtagaaggttaatcctctagaa

SEQ ID NO: 29471 - DNA, 25 bp, Homo sapien
ggataaagtcttcttacctacgtta

SEQ ID NO: 29472 - DNA, 25 bp, Homo sapien
ggataaagtcttgttacctacgtta

SEQ ID NO: 29473 - DNA, 25 bp, Homo sapien
tgagactggaagtcttgaactccga

SEQ ID NO: 29474 - DNA, 25 bp, Homo sapien
tgagactggaagacttgaactccga

SEQ ID NO: 29475 - DNA, 25 bp, Homo sapien
tgaactggcggtacgggtcgcccac

SEQ ID NO: 29476 - DNA, 25 bp, Homo sapien
tgaactggcggttcgggtcgcccac

SEQ ID NO: 29477 - DNA, 25 bp, Homo sapien
aagactccgagttgggtccagagac

SEQ ID NO: 29478 - DNA, 25 bp, Homo sapien
aagactccgagtagggtccagagac

SEQ ID NO: 29479 - DNA, 25 bp, Homo sapien
tgaaattcgtcgaagggttccctaa

SEQ ID NO: 29480 - DNA, 25 bp, Homo sapien
tgaaattcgtcgtagggttccctaa

SEQ ID NO: 29481 - DNA, 25 bp, Homo sapien
cgaagctcagtgtgccgtgcccgaa

SEQ ID NO: 29482 - DNA, 25 bp, Homo sapien
cgaagctcagtgagccgtgcccgaa

SEQ ID NO: 29483 - DNA, 25 bp, Homo sapien
acttcgacaagacgtcacaggacgg

SEQ ID NO: 29484 - DNA, 25 bp, Homo sapien
acttcgacaagaggtcacaggacgg

SEQ ID NO: 29485 - DNA, 25 bp, Homo sapien
atgcagaccagaaccatcccgacgt

SEQ ID NO: 29486 - DNA, 25 bp, Homo sapien
atgcagaccagatccatcccgacgt

SEQ ID NO: 29487 - DNA, 25 bp, Homo sapien
gctcacacgtagttcatagtcaaga

SEQ ID NO: 29488 - DNA, 25 bp, Homo sapien
gctcacacgtagatcatagtcaaga

SEQ ID NO: 29489 - DNA, 25 bp, Homo sapien
ttcgttagaacgataccgtattaaa

SEQ ID NO: 29490 - DNA, 25 bp, Homo sapien
ttcgttagaacgttaccgtattaaa

SEQ ID NO: 29491 - DNA, 25 bp, Homo sapien
ctcgacacacacctctggacagaag

SEQ ID NO: 29492 - DNA, 25 bp, Homo sapien
ctcgacacacacgtctggacagaag

SEQ ID NO: 29493 - DNA, 25 bp, Homo sapien
taagaacgacgactcggtgacggaa

SEQ ID NO: 29494 - DNA, 25 bp, Homo sapien
taagaacgacgagtcggtgacggaa

SEQ ID NO: 29495 - DNA, 25 bp, Homo sapien
tgtcttccgacagtgatagtgccga

SEQ ID NO: 29496 - DNA, 25 bp, Homo sapien
tgtcttccgacactgatagtgccga

SEQ ID NO: 29497 - DNA, 25 bp, Homo sapien
tcttaccagattacgagtacatcga

SEQ ID NO: 29498 - DNA, 25 bp, Homo sapien
tcttaccagatttcgagtacatcga

SEQ ID NO: 29499 - DNA, 25 bp, Homo sapien
cttgaccctcagtcctcagaactga

SEQ ID NO: 29500 - DNA, 25 bp, Homo sapien
cttgaccctcagacctcagaactga

SEQ ID NO: 29501 - DNA, 25 bp, Homo sapien
aagtatgacaagatccgggacacaa

SEQ ID NO: 29502 - DNA, 25 bp, Homo sapien
aagtatgacaagttccgggacacaa

SEQ ID NO: 29503 - DNA, 25 bp, Homo sapien
aaagacgacaactctgaagtgacaa

SEQ ID NO: 29504 - DNA, 25 bp, Homo sapien
aaagacgacaacactgaagtgacaa

SEQ ID NO: 29505 - DNA, 25 bp, Homo sapien
agaagctacctgatacaccaggaaa

SEQ ID NO: 29506 - DNA, 25 bp, Homo sapien
agaagctacctgttacaccaggaaa

SEQ ID NO: 29507 - DNA, 25 bp, Homo sapien
cgaccacgtcagtcgccaggtcaga

SEQ ID NO: 29508 - DNA, 25 bp, Homo sapien
cgaccacgtcagacgccaggtcaga

SEQ ID NO: 29509 - DNA, 25 bp, Homo sapien
ctacaagagagactaggcgacgagt

SEQ ID NO: 29510 - DNA, 25 bp, Homo sapien
ctacaagagagagtaggcgacgagt

SEQ ID NO: 29511 - DNA, 25 bp, Homo sapien
tacacgaaccggtgacggaggtcgt

SEQ ID NO: 29512 - DNA, 25 bp, Homo sapien
tacacgaaccggagacggaggtcgt

SEQ ID NO: 29513 - DNA, 25 bp, Homo sapien
tcgcccaaactcgtggtactcttgg

SEQ ID NO: 29514 - DNA, 25 bp, Homo sapien
tcgcccaaactcctggtactcttgg

SEQ ID NO: 29515 - DNA, 25 bp, Homo sapien
gactcgacccacgtcgtctctggag

SEQ ID NO: 29516 - DNA, 25 bp, Homo sapien
gactcgacccacctcgtctctggag

SEQ ID NO: 29517 - DNA, 25 bp, Homo sapien
gagtcctcgggactcggttcaagag

SEQ ID NO: 29518 - DNA, 25 bp, Homo sapien
gagtcctcgggagtcggttcaagag

SEQ ID NO: 29519 - DNA, 25 bp, Homo sapien
ggagtatttttactctccgtcaaat

SEQ ID NO: 29520 - DNA, 25 bp, Homo sapien
ggagtatttttagtctccgtcaaat

SEQ ID NO: 29521 - DNA, 25 bp, Homo sapien
cccggctccactgtggcacccggac

SEQ ID NO: 29522 - DNA, 25 bp, Homo sapien
cccggctccactctggcacccggac

SEQ ID NO: 29523 - DNA, 25 bp, Homo sapien
cccgtcctctttggtccgacggaag

SEQ ID NO: 29524 - DNA, 25 bp, Homo sapien
cccgtcctctttcgtccgacggaag

SEQ ID NO: 29525 - DNA, 25 bp, Homo sapien
atctacatcatctcgccgtggagcg

SEQ ID NO: 29526 - DNA, 25 bp, Homo sapien
atctacatcatcacgccgtggagcg

SEQ ID NO: 29527 - DNA, 25 bp, Homo sapien
atgttatacatcaaactagtgaacc

SEQ ID NO: 29528 - DNA, 25 bp, Homo sapien
atgttatacatctaactagtgaacc

SEQ ID NO: 29529 - DNA, 25 bp, Homo sapien
tgtatgggttagtcacttcttcggt

SEQ ID NO: 29530 - DNA, 25 bp, Homo sapien
tgtatgggttagacacttcttcggt

SEQ ID NO: 29531 - DNA, 25 bp, Homo sapien
ggtcagatcacggttggtgtactgg

SEQ ID NO: 29532 - DNA, 25 bp, Homo sapien
ggtcagatcacgcttggtgtactgg

SEQ ID NO: 29533 - DNA, 25 bp, Homo sapien
gtcgatcagtcgacgtctgggttca

SEQ ID NO: 29534 - DNA, 25 bp, Homo sapien
gtcgatcagtcgtcgtctgggttca

SEQ ID NO: 29535 - DNA, 25 bp, Homo sapien
cgtactcaccgtttcggtccggcga

SEQ ID NO: 29536 - DNA, 25 bp, Homo sapien
cgtactcaccgtatcggtccggcga

SEQ ID NO: 29537 - DNA, 25 bp, Homo sapien
gaaccggttccgacctcgaccggga

SEQ ID NO: 29538 - DNA, 25 bp, Homo sapien
gaaccggttccgtcctcgaccggga

SEQ ID NO: 29539 - DNA, 25 bp, Homo sapien
actggttcactgaccctccgagaga

SEQ ID NO: 29540 - DNA, 25 bp, Homo sapien
actggttcactgtccctccgagaga

SEQ ID NO: 29541 - DNA, 25 bp, Homo sapien
cacggcgaaactactacaacaggtg

SEQ ID NO: 29542 - DNA, 25 bp, Homo sapien
cacggcgaaacttctacaacaggtg

SEQ ID NO: 29543 - DNA, 25 bp, Homo sapien
ccaaagagaaccagtcaacgtgcct

SEQ ID NO: 29544 - DNA, 25 bp, Homo sapien
ccaaagagaacctgtcaacgtgcct

SEQ ID NO: 29545 - DNA, 25 bp, Homo sapien
aacttacgaaggagatgcaatcacc

SEQ ID NO: 29546 - DNA, 25 bp, Homo sapien
aacttacgaaggtgatgcaatcacc

SEQ ID NO: 29547 - DNA, 25 bp, Homo sapien
ccttcatctcggtcgacatgtcatg

SEQ ID NO: 29548 - DNA, 25 bp, Homo sapien
ccttcatctcggacgacatgtcatg

SEQ ID NO: 29549 - DNA, 25 bp, Homo sapien
actgattcgtcgtggacaacaactt

SEQ ID NO: 29550 - DNA, 25 bp, Homo sapien
actgattcgtcgaggacaacaactt

SEQ ID NO: 29551 - DNA, 25 bp, Homo sapien
gacgatcctcgaggtccgacgacaa

SEQ ID NO: 29552 - DNA, 25 bp, Homo sapien
gacgatcctcgacgtccgacgacaa

SEQ ID NO: 29553 - DNA, 25 bp, Homo sapien
agaagatgaccgtcaccgactataa

SEQ ID NO: 29554 - DNA, 25 bp, Homo sapien
agaagatgaccgacaccgactataa

SEQ ID NO: 29555 - DNA, 25 bp, Homo sapien
cttggatgaccgatacattgtaaga

SEQ ID NO: 29556 - DNA, 25 bp, Homo sapien
cttggatgaccgttacattgtaaga

SEQ ID NO: 29557 - DNA, 25 bp, Homo sapien
ccttcgaaaagtcgagttcgactta

SEQ ID NO: 29558 - DNA, 25 bp, Homo sapien
ccttcgaaaagtggagttcgactta

SEQ ID NO: 29559 - DNA, 25 bp, Homo sapien
ccgaccctaggaggtcgacgtgtag

SEQ ID NO: 29560 - DNA, 25 bp, Homo sapien
ccgaccctaggacgtcgacgtgtag

SEQ ID NO: 29561 - DNA, 25 bp, Homo sapien
gtacccacttcggacccgtccacga

SEQ ID NO: 29562 - DNA, 25 bp, Homo sapien
gtacccacttcgcacccgtccacga

SEQ ID NO: 29563 - DNA, 25 bp, Homo sapien
gtgtcttcggatgtaactccccaac

SEQ ID NO: 29564 - DNA, 25 bp, Homo sapien
gtgtcttcggatctaactccccaac

SEQ ID NO: 29565 - DNA, 25 bp, Homo sapien
ggttctttgagtgtcctccacaacc

SEQ ID NO: 29566 - DNA, 25 bp, Homo sapien
ggttctttgagtctcctccacaacc

SEQ ID NO: 29567 - DNA, 25 bp, Homo sapien
atgtagattctctgtactccaactg

SEQ ID NO: 29568 - DNA, 25 bp, Homo sapien
atgtagattctcagtactccaactg

SEQ ID NO: 29569 - DNA, 25 bp, Homo sapien
cgtcagagacctactacgcaagatg

SEQ ID NO: 29570 - DNA, 25 bp, Homo sapien
cgtcagagaccttctacgcaagatg

SEQ ID NO: 29571 - DNA, 25 bp, Homo sapien
aggacgacgacttacacctagaccc

SEQ ID NO: 29572 - DNA, 25 bp, Homo sapien
aggacgacgactaacacctagaccc

SEQ ID NO: 29573 - DNA, 25 bp, Homo sapien
ggaagtgtaacgtgacaagtaaccc

SEQ ID NO: 29574 - DNA, 25 bp, Homo sapien
ggaagtgtaacgagacaagtaaccc

SEQ ID NO: 29575 - DNA, 25 bp, Homo sapien
caggataccgaacaagtcgcacacg

SEQ ID NO: 29576 - DNA, 25 bp, Homo sapien
caggataccgaagaagtcgcacacg

SEQ ID NO: 29577 - DNA, 25 bp, Homo sapien
agggtacagacaggacgtctccacc

SEQ ID NO: 29578 - DNA, 25 bp, Homo sapien
agggtacagacacgacgtctccacc

SEQ ID NO: 29579 - DNA, 25 bp, Homo sapien
atagtgacaccgatccttcgacacc

SEQ ID NO: 29580 - DNA, 25 bp, Homo sapien
atagtgacaccgttccttcgacacc

SEQ ID NO: 29581 - DNA, 25 bp, Homo sapien
gaaactggtccgtccagtccgactg

SEQ ID NO: 29582 - DNA, 25 bp, Homo sapien
gaaactggtccgaccagtccgactg

SEQ ID NO: 29583 - DNA, 25 bp, Homo sapien
gaaaaggacgtttaccctggtacag

SEQ ID NO: 29584 - DNA, 25 bp, Homo sapien
gaaaaggacgttaaccctggtacag

SEQ ID NO: 29585 - DNA, 25 bp, Homo sapien
cagtgaagggtctttggtgtgtctc

SEQ ID NO: 29586 - DNA, 25 bp, Homo sapien
cagtgaagggtcattggtgtgtctc

SEQ ID NO: 29587 - DNA, 25 bp, Homo sapien
cccttccgaatttgcgtcgacggtc

SEQ ID NO: 29588 - DNA, 25 bp, Homo sapien
cccttccgaattagcgtcgacggtc

SEQ ID NO: 29589 - DNA, 25 bp, Homo sapien
cctttcagaagaaagtctctcggtc

SEQ ID NO: 29590 - DNA, 25 bp, Homo sapien
cctttcagaagatagtctctcggtc

SEQ ID NO: 29591 - DNA, 25 bp, Homo sapien
ccatttggtgagaccgtatttcgtt

SEQ ID NO: 29592 - DNA, 25 bp, Homo sapien
ccatttggtgagtccgtatttcgtt

SEQ ID NO: 29593 - DNA, 25 bp, Homo sapien
tcgtaacagcttcgaaccggtgcaa

SEQ ID NO: 29594 - DNA, 25 bp, Homo sapien
tcgtaacagcttggaaccggtgcaa

SEQ ID NO: 29595 - DNA, 25 bp, Homo sapien
tatcaacatatccatgggtgtcaac

SEQ ID NO: 29596 - DNA, 25 bp, Homo sapien
tatcaacatatcgatgggtgtcaac

SEQ ID NO: 29597 - DNA, 25 bp, Homo sapien
taaagaaattcatgggtcacgtcac

SEQ ID NO: 29598 - DNA, 25 bp, Homo sapien
taaagaaattcaagggtcacgtcac

SEQ ID NO: 29599 - DNA, 25 bp, Homo sapien
gtcacaacttcagtttcgtctacag

SEQ ID NO: 29600 - DNA, 25 bp, Homo sapien
gtcacaacttcactttcgtctacag

SEQ ID NO: 29601 - DNA, 25 bp, Homo sapien
ctatagactctgaacctcacaccgg

SEQ ID NO: 29602 - DNA, 25 bp, Homo sapien
ctatagactctgtacctcacaccgg

SEQ ID NO: 29603 - DNA, 25 bp, Homo sapien
aacatcatcagacgactcatctaca

SEQ ID NO: 29604 - DNA, 25 bp, Homo sapien
aacatcatcagaggactcatctaca

SEQ ID NO: 29605 - DNA, 25 bp, Homo sapien
acgagtcttcagactaactcacgta

SEQ ID NO: 29606 - DNA, 25 bp, Homo sapien
acgagtcttcagtctaactcacgta

SEQ ID NO: 29607 - DNA, 25 bp, Homo sapien
tcgagacccacttccagtcgtagat

SEQ ID NO: 29608 - DNA, 25 bp, Homo sapien
tcgagacccactaccagtcgtagat

SEQ ID NO: 29609 - DNA, 25 bp, Homo sapien
tggtccgacggttccgagtcgtctt

SEQ ID NO: 29610 - DNA, 25 bp, Homo sapien
tggtccgacggtaccgagtcgtctt

SEQ ID NO: 29611 - DNA, 25 bp, Homo sapien
ccctaacgaacgacgatgtcgactt

SEQ ID NO: 29612 - DNA, 25 bp, Homo sapien
ccctaacgaacgtcgatgtcgactt

SEQ ID NO: 29613 - DNA, 25 bp, Homo sapien
ctcctagacgaaacacgacccgtga

SEQ ID NO: 29614 - DNA, 25 bp, Homo sapien
ctcctagacgaatcacgacccgtga

SEQ ID NO: 29615 - DNA, 25 bp, Homo sapien
tcgtgtactgatcacaccgttcacg

SEQ ID NO: 29616 - DNA, 25 bp, Homo sapien
tcgtgtactgatgacaccgttcacg

SEQ ID NO: 29617 - DNA, 25 bp, Homo sapien
tgaacgtcgtagaacctcgtctgtc

SEQ ID NO: 29618 - DNA, 25 bp, Homo sapien
tgaacgtcgtagtacctcgtctgtc

SEQ ID NO: 29619 - DNA, 25 bp, Homo sapien
gactgggaaaactctcttaaatgta

SEQ ID NO: 29620 - DNA, 25 bp, Homo sapien
gactgggaaaacactcttaaatgta

SEQ ID NO: 29621 - DNA, 25 bp, Homo sapien
atatatgtattttattttatactta

SEQ ID NO: 29622 - DNA, 25 bp, Homo sapien
atatatgtatttaattttatactta

SEQ ID NO: 29623 - DNA, 25 bp, Homo sapien
attcctttatttacaactctcattt

SEQ ID NO: 29624 - DNA, 25 bp, Homo sapien
attcctttattttcaactctcattt

SEQ ID NO: 29625 - DNA, 25 bp, Homo sapien
ctgctatgacagacagcagtaaacg

SEQ ID NO: 29626 - DNA, 25 bp, Homo sapien
ctgctatgacagtcagcagtaaacg

SEQ ID NO: 29627 - DNA, 25 bp, Homo sapien
tcccaggggacacctgagattaaag

SEQ ID NO: 29628 - DNA, 25 bp, Homo sapien
tcccaggggacagctgagattaaag

SEQ ID NO: 29629 - DNA, 25 bp, Homo sapien
ctccaggggttgaccggcgtacaga

SEQ ID NO: 29630 - DNA, 25 bp, Homo sapien
ctccaggggttgtccggcgtacaga

SEQ ID NO: 29631 - DNA, 25 bp, Homo sapien
accagaggacttgaaattacaccga

SEQ ID NO: 29632 - DNA, 25 bp, Homo sapien
accagaggacttcaaattacaccga

SEQ ID NO: 29633 - DNA, 25 bp, Homo sapien
gaagacctatcaaagattaccacag

SEQ ID NO: 29634 - DNA, 25 bp, Homo sapien
gaagacctatcatagattaccacag

SEQ ID NO: 29635 - DNA, 25 bp, Homo sapien
aacactccaagatccgtttgtcgaa

SEQ ID NO: 29636 - DNA, 25 bp, Homo sapien
aacactccaagaaccgtttgtcgaa

SEQ ID NO: 29637 - DNA, 25 bp, Homo sapien
caataaaggacaccatcacgtcgga

SEQ ID NO: 29638 - DNA, 25 bp, Homo sapien
caataaaggacagcatcacgtcgga

SEQ ID NO: 29639 - DNA, 25 bp, Homo sapien
actaagtgaagaattttcaccgtga

SEQ ID NO: 29640 - DNA, 25 bp, Homo sapien
actaagtgaagatttttcaccgtga

SEQ ID NO: 29641 - DNA, 25 bp, Homo sapien
tcggaggagtctagagtatcacttg

SEQ ID NO: 29642 - DNA, 25 bp, Homo sapien
tcggaggagtcttgagtatcacttg

SEQ ID NO: 29643 - DNA, 25 bp, Homo sapien
aaacggaatcgtttgagatcagcat

SEQ ID NO: 29644 - DNA, 25 bp, Homo sapien
aaacggaatcgtatgagatcagcat

SEQ ID NO: 29645 - DNA, 25 bp, Homo sapien
agactaagatcttccgatatgttta

SEQ ID NO: 29646 - DNA, 25 bp, Homo sapien
agactaagatctaccgatatgttta

SEQ ID NO: 29647 - DNA, 25 bp, Homo sapien
agttagagacttagtgtcatttctc

SEQ ID NO: 29648 - DNA, 25 bp, Homo sapien
agttagagactttgtgtcatttctc

SEQ ID NO: 29649 - DNA, 25 bp, Homo sapien
gagtcgtccctttacaaattcgccg

SEQ ID NO: 29650 - DNA, 25 bp, Homo sapien
gagtcgtcccttaacaaattcgccg

SEQ ID NO: 29651 - DNA, 25 bp, Homo sapien
ggtgtccttaacctggtatgccgtg

SEQ ID NO: 29652 - DNA, 25 bp, Homo sapien
ggtgtccttaacgtggtatgccgtg

SEQ ID NO: 29653 - DNA, 25 bp, Homo sapien
tctccgtgactgttatataagtctt

SEQ ID NO: 29654 - DNA, 25 bp, Homo sapien
tctccgtgactgatatataagtctt

SEQ ID NO: 29655 - DNA, 25 bp, Homo sapien
accttcatggaggagttccagtcac

SEQ ID NO: 29656 - DNA, 25 bp, Homo sapien
accttcatggagcagttccagtcac

SEQ ID NO: 29657 - DNA, 25 bp, Homo sapien
cactgaaggagtgtgtggagtctct

SEQ ID NO: 29658 - DNA, 25 bp, Homo sapien
cactgaaggagtctgtggagtctct

SEQ ID NO: 29659 - DNA, 25 bp, Homo sapien
atgagacgttacacttacggtaatt

SEQ ID NO: 29660 - DNA, 25 bp, Homo sapien
atgagacgttactcttacggtaatt

SEQ ID NO: 29661 - DNA, 25 bp, Homo sapien
ttcacgtttacgtctgaggacatat

SEQ ID NO: 29662 - DNA, 25 bp, Homo sapien
ttcacgtttacgactgaggacatat

SEQ ID NO: 29663 - DNA, 25 bp, Homo sapien
ccgtcactaccgatgtcgcagacat

SEQ ID NO: 29664 - DNA, 25 bp, Homo sapien
ccgtcactaccgttgtcgcagacat

SEQ ID NO: 29665 - DNA, 25 bp, Homo sapien
agtctagagttctgtctgagaaact

SEQ ID NO: 29666 - DNA, 25 bp, Homo sapien
agtctagagttcagtctgagaaact

SEQ ID NO: 29667 - DNA, 25 bp, Homo sapien
gaaggtgtggctctacagtcacagt

SEQ ID NO: 29668 - DNA, 25 bp, Homo sapien
gaaggtgtggctgtacagtcacagt

SEQ ID NO: 29669 - DNA, 25 bp, Homo sapien
atgatgtcaagttcgtacacgttga

SEQ ID NO: 29670 - DNA, 25 bp, Homo sapien
atgatgtcaagtacgtacacgttga

SEQ ID NO: 29671 - DNA, 25 bp, Homo sapien
ccacggatcgtacaaagaccgttcc

SEQ ID NO: 29672 - DNA, 25 bp, Homo sapien
ccacggatcgtagaaagaccgttcc

SEQ ID NO: 29673 - DNA, 25 bp, Homo sapien
gggactctaaagtcgacacttctac

SEQ ID NO: 29674 - DNA, 25 bp, Homo sapien
gggactctaaagacgacacttctac

SEQ ID NO: 29675 - DNA, 25 bp, Homo sapien
ttagagatctgtagaaaagtccact

SEQ ID NO: 29676 - DNA, 25 bp, Homo sapien
ttagagatctgttgaaaagtccact

SEQ ID NO: 29677 - DNA, 25 bp, Homo sapien
tgtggacatgtaaccaaatctaact

SEQ ID NO: 29678 - DNA, 25 bp, Homo sapien
tgtggacatgtatccaaatctaact

SEQ ID NO: 29679 - DNA, 25 bp, Homo sapien
ggttgcaccagtccaacaaactaca

SEQ ID NO: 29680 - DNA, 25 bp, Homo sapien
ggttgcaccagtgcaacaaactaca

SEQ ID NO: 29681 - DNA, 25 bp, Homo sapien
aggttatacatcacgacacaatatg

SEQ ID NO: 29682 - DNA, 25 bp, Homo sapien
aggttatacatctcgacacaatatg

SEQ ID NO: 29683 - DNA, 25 bp, Homo sapien
aaggtacaacttggtccaaagttag

SEQ ID NO: 29684 - DNA, 25 bp, Homo sapien
aaggtacaacttcgtccaaagttag

SEQ ID NO: 29685 - DNA, 25 bp, Homo sapien
acgtcaatcgtagtcttagatttag

SEQ ID NO: 29686 - DNA, 25 bp, Homo sapien
acgtcaatcgtactcttagatttag

SEQ ID NO: 29687 - DNA, 25 bp, Homo sapien
tatccatcgtgtcctttaggttcac

SEQ ID NO: 29688 - DNA, 25 bp, Homo sapien
tatccatcgtgtgctttaggttcac

SEQ ID NO: 29689 - DNA, 25 bp, Homo sapien
gtccccgatgacctctaggtcgtgg

SEQ ID NO: 29690 - DNA, 25 bp, Homo sapien
gtccccgatgacgtctaggtcgtgg

SEQ ID NO: 29691 - DNA, 25 bp, Homo sapien
atgacgaagccgtagtcgtcgtaat

SEQ ID NO: 29692 - DNA, 25 bp, Homo sapien
atgacgaagccgaagtcgtcgtaat

SEQ ID NO: 29693 - DNA, 25 bp, Homo sapien
cagaccttcgtgtgttgatttgata

SEQ ID NO: 29694 - DNA, 25 bp, Homo sapien
cagaccttcgtgagttgatttgata

SEQ ID NO: 29695 - DNA, 25 bp, Homo sapien
accctcgggtaagctgacattgtga

SEQ ID NO: 29696 - DNA, 25 bp, Homo sapien
accctcgggtaacctgacattgtga

SEQ ID NO: 29697 - DNA, 25 bp, Homo sapien
caggatgcaacaccacgtcacggag

SEQ ID NO: 29698 - DNA, 25 bp, Homo sapien
caggatgcaacagcacgtcacggag

SEQ ID NO: 29699 - DNA, 25 bp, Homo sapien
agagtatcaacagatacgtcagaga

SEQ ID NO: 29700 - DNA, 25 bp, Homo sapien
agagtatcaacacatacgtcagaga

SEQ ID NO: 29701 - DNA, 25 bp, Homo sapien
agagtgaccaaagacgtcagtagtg

SEQ ID NO: 29702 - DNA, 25 bp, Homo sapien
agagtgaccaaacacgtcagtagtg

SEQ ID NO: 29703 - DNA, 25 bp, Homo sapien
cggttagcgtgaatctcgtccacta

SEQ ID NO: 29704 - DNA, 25 bp, Homo sapien
cggttagcgtgattctcgtccacta

SEQ ID NO: 29705 - DNA, 25 bp, Homo sapien
cataagattgggattctagtcccac

SEQ ID NO: 29706 - DNA, 25 bp, Homo sapien
cataagattgggtttctagtcccac

SEQ ID NO: 29707 - DNA, 25 bp, Homo sapien
aaaggagggacgtccgtagccctct

SEQ ID NO: 29708 - DNA, 25 bp, Homo sapien
aaaggagggacgaccgtagccctct

SEQ ID NO: 29709 - DNA, 25 bp, Homo sapien
aaggaaagggggtatgtacttccct

SEQ ID NO: 29710 - DNA, 25 bp, Homo sapien
aaggaaagggggaatgtacttccct

SEQ ID NO: 29711 - DNA, 25 bp, Homo sapien
gggacgaggaaacctgctcttccct

SEQ ID NO: 29712 - DNA, 25 bp, Homo sapien
gggacgaggaaagctgctcttccct

SEQ ID NO: 29713 - DNA, 25 bp, Homo sapien
ggggtcgaagagatttcttagtcct

SEQ ID NO: 29714 - DNA, 25 bp, Homo sapien
ggggtcgaagagttttcttagtcct

SEQ ID NO: 29715 - DNA, 25 bp, Homo sapien
acgccgctagtaacatttttatgtc

SEQ ID NO: 29716 - DNA, 25 bp, Homo sapien
acgccgctagtatcatttttatgtc

SEQ ID NO: 29717 - DNA, 25 bp, Homo sapien
cgaaggttgtcttatacttattgag

SEQ ID NO: 29718 - DNA, 25 bp, Homo sapien
cgaaggttgtctaatacttattgag

SEQ ID NO: 29719 - DNA, 25 bp, Homo sapien
atattaagtcgacctattcatagag

SEQ ID NO: 29720 - DNA, 25 bp, Homo sapien
atattaagtcgagctattcatagag

SEQ ID NO: 29721 - DNA, 25 bp, Homo sapien
ctcgtctcggttggacgttttaggt

SEQ ID NO: 29722 - DNA, 25 bp, Homo sapien
ctcgtctcggttcgacgttttaggt

SEQ ID NO: 29723 - DNA, 25 bp, Homo sapien
cgtcgtcatcacctacggtccgtga

SEQ ID NO: 29724 - DNA, 25 bp, Homo sapien
cgtcgtcatcacgtacggtccgtga

SEQ ID NO: 29725 - DNA, 25 bp, Homo sapien
atgcagtgactgcttctgtcgtact

SEQ ID NO: 29726 - DNA, 25 bp, Homo sapien
atgcagtgactggttctgtcgtact

SEQ ID NO: 29727 - DNA, 25 bp, Homo sapien
tcaatcagtcgaacttggcgtttat

SEQ ID NO: 29728 - DNA, 25 bp, Homo sapien
tcaatcagtcgatcttggcgtttat

SEQ ID NO: 29729 - DNA, 25 bp, Homo sapien
ccctaaggcccactaatgatgagat

SEQ ID NO: 29730 - DNA, 25 bp, Homo sapien
ccctaaggcccagtaatgatgagat

SEQ ID NO: 29731 - DNA, 25 bp, Homo sapien
acacagcccttagtttgagtcagtg

SEQ ID NO: 29732 - DNA, 25 bp, Homo sapien
acacagcccttactttgagtcagtg

SEQ ID NO: 29733 - DNA, 25 bp, Homo sapien
gacaaggaaattccttcttatttgt

SEQ ID NO: 29734 - DNA, 25 bp, Homo sapien
gacaaggaaattgcttcttatttgt

SEQ ID NO: 29735 - DNA, 25 bp, Homo sapien
gaagtcccatatgttttacatttgt

SEQ ID NO: 29736 - DNA, 25 bp, Homo sapien
gaagtcccatatcttttacatttgt

SEQ ID NO: 29737 - DNA, 25 bp, Homo sapien
cgccctcgtgcctttacggtgatcg

SEQ ID NO: 29738 - DNA, 25 bp, Homo sapien
cgccctcgtgccattacggtgatcg

SEQ ID NO: 29739 - DNA, 25 bp, Homo sapien
cgagtatgttcgtcagggtatgctc

SEQ ID NO: 29740 - DNA, 25 bp, Homo sapien
cgagtatgttcgacagggtatgctc

SEQ ID NO: 29741 - DNA, 25 bp, Homo sapien
cacgtcgggtaagacgtggtttccc

SEQ ID NO: 29742 - DNA, 25 bp, Homo sapien
cacgtcgggtaacacgtggtttccc

SEQ ID NO: 29743 - DNA, 25 bp, Homo sapien
cgcgatcccgacctccgtattagaa

SEQ ID NO: 29744 - DNA, 25 bp, Homo sapien
cgcgatcccgacgtccgtattagaa

SEQ ID NO: 29745 - DNA, 25 bp, Homo sapien
gtaacgtcccattaatcgttttgaa

SEQ ID NO: 29746 - DNA, 25 bp, Homo sapien
gtaacgtcccataaatcgttttgaa

SEQ ID NO: 29747 - DNA, 25 bp, Homo sapien
gaataacaccttaaacctttgtagg

SEQ ID NO: 29748 - DNA, 25 bp, Homo sapien
gaataacacctttaacctttgtagg

SEQ ID NO: 29749 - DNA, 25 bp, Homo sapien
gacgaccacctgtggacgggccagg

SEQ ID NO: 29750 - DNA, 25 bp, Homo sapien
gacgaccacctgaggacgggccagg

SEQ ID NO: 29751 - DNA, 25 bp, Homo sapien
aagtagactttcgagatacctagta

SEQ ID NO: 29752 - DNA, 25 bp, Homo sapien
aagtagactttccagatacctagta

SEQ ID NO: 29753 - DNA, 25 bp, Homo sapien
gaagactggttcagataccgtagac

SEQ ID NO: 29754 - DNA, 25 bp, Homo sapien
gaagactggttctgataccgtagac

SEQ ID NO: 29755 - DNA, 25 bp, Homo sapien
cactggtatatttccttaccgagat

SEQ ID NO: 29756 - DNA, 25 bp, Homo sapien
cactggtatattaccttaccgagat

SEQ ID NO: 29757 - DNA, 25 bp, Homo sapien
cctcttgtactgagactttttagac

SEQ ID NO: 29758 - DNA, 25 bp, Homo sapien
cctcttgtactgtgactttttagac

SEQ ID NO: 29759 - DNA, 25 bp, Homo sapien
gaatcgatgttttaaccgactttaa

SEQ ID NO: 29760 - DNA, 25 bp, Homo sapien
gaatcgatgtttaaaccgactttaa

SEQ ID NO: 29761 - DNA, 25 bp, Homo sapien
aacgaggtcttgaaccgatgacaca

SEQ ID NO: 29762 - DNA, 25 bp, Homo sapien
aacgaggtcttgtaccgatgacaca

SEQ ID NO: 29763 - DNA, 25 bp, Homo sapien
agacacttcgacttacccgagggcc

SEQ ID NO: 29764 - DNA, 25 bp, Homo sapien
agacacttcgacatacccgagggcc

SEQ ID NO: 29765 - DNA, 25 bp, Homo sapien
aattagttaaagaccgagtgaccgg

SEQ ID NO: 29766 - DNA, 25 bp, Homo sapien
aattagttaaagtccgagtgaccgg

SEQ ID NO: 29767 - DNA, 25 bp, Homo sapien
gtcgtagtaagtttcaagagtccgt

SEQ ID NO: 29768 - DNA, 25 bp, Homo sapien
gtcgtagtaagtatcaagagtccgt

SEQ ID NO: 29769 - DNA, 25 bp, Homo sapien
tcgtcgagacctagtgacactgcct

SEQ ID NO: 29770 - DNA, 25 bp, Homo sapien
tcgtcgagaccttgtgacactgcct

SEQ ID NO: 29771 - DNA, 25 bp, Homo sapien
cgtaaccagggttgccacgtgtatc

SEQ ID NO: 29772 - DNA, 25 bp, Homo sapien
cgtaaccagggtagccacgtgtatc

SEQ ID NO: 29773 - DNA, 25 bp, Homo sapien
catccttcgacgacgaatagttaat

SEQ ID NO: 29774 - DNA, 25 bp, Homo sapien
catccttcgacgtcgaatagttaat

SEQ ID NO: 29775 - DNA, 25 bp, Homo sapien
gcctccaggacgtcgtgggcctcgt

SEQ ID NO: 29776 - DNA, 25 bp, Homo sapien
gcctccaggacgacgtgggcctcgt

SEQ ID NO: 29777 - DNA, 25 bp, Homo sapien
tccaccgagtcgagaacaaacatac

SEQ ID NO: 29778 - DNA, 25 bp, Homo sapien
tccaccgagtcgtgaacaaacatac

SEQ ID NO: 29779 - DNA, 25 bp, Homo sapien
gccccgagttgacgactacggagga

SEQ ID NO: 29780 - DNA, 25 bp, Homo sapien
gccccgagttgaggactacggagga

SEQ ID NO: 29781 - DNA, 25 bp, Homo sapien
gaccctcgacctaccaacttggtgt

SEQ ID NO: 29782 - DNA, 25 bp, Homo sapien
gaccctcgaccttccaacttggtgt

SEQ ID NO: 29783 - DNA, 25 bp, Homo sapien
ctctccctttgtctgatacctaggg

SEQ ID NO: 29784 - DNA, 25 bp, Homo sapien
ctctccctttgtgtgatacctaggg

SEQ ID NO: 29785 - DNA, 25 bp, Homo sapien
ctccccttcggttgtggtaacttta

SEQ ID NO: 29786 - DNA, 25 bp, Homo sapien
ctccccttcggtagtggtaacttta

SEQ ID NO: 29787 - DNA, 25 bp, Homo sapien
ccgtacgaccaggtgatacttctat

SEQ ID NO: 29788 - DNA, 25 bp, Homo sapien
ccgtacgaccagctgatacttctat

SEQ ID NO: 29789 - DNA, 25 bp, Homo sapien
ctccgtacacatacgttaatattat

SEQ ID NO: 29790 - DNA, 25 bp, Homo sapien
ctccgtacacattcgttaatattat

SEQ ID NO: 29791 - DNA, 25 bp, Homo sapien
cttgtacgtgtctttgtatacgtat

SEQ ID NO: 29792 - DNA, 25 bp, Homo sapien
cttgtacgtgtcattgtatacgtat

SEQ ID NO: 29793 - DNA, 25 bp, Homo sapien
aattcgtcgtcgttttcgtagtggg

SEQ ID NO: 29794 - DNA, 25 bp, Homo sapien
aattcgtcgtcgatttcgtagtggg

SEQ ID NO: 29795 - DNA, 25 bp, Homo sapien
ttaacgacgtactcaacggtgcgtc

SEQ ID NO: 29796 - DNA, 25 bp, Homo sapien
ttaacgacgtacacaacggtgcgtc

SEQ ID NO: 29797 - DNA, 25 bp, Homo sapien
tgcattggtgtattaaaccgatgtc

SEQ ID NO: 29798 - DNA, 25 bp, Homo sapien
tgcattggtgtaataaaccgatgtc

SEQ ID NO: 29799 - DNA, 25 bp, Homo sapien
ttaatcttttcgttcgaaacggttt

SEQ ID NO: 29800 - DNA, 25 bp, Homo sapien
ttaatcttttcgatcgaaacggttt

SEQ ID NO: 29801 - DNA, 25 bp, Homo sapien
gtttgactagtcttttcaaagagcc

SEQ ID NO: 29802 - DNA, 25 bp, Homo sapien
gtttgactagtcatttcaaagagcc

SEQ ID NO: 29803 - DNA, 25 bp, Homo sapien
gagagtatcatcttcctcagaccac

SEQ ID NO: 29804 - DNA, 25 bp, Homo sapien
gagagtatcatcatcctcagaccac

SEQ ID NO: 29805 - DNA, 25 bp, Homo sapien
aactcctgtagtcctacttactgag

SEQ ID NO: 29806 - DNA, 25 bp, Homo sapien
aactcctgtagtgctacttactgag

SEQ ID NO: 29807 - DNA, 25 bp, Homo sapien
cctgatcagatacgttgtcttagag

SEQ ID NO: 29808 - DNA, 25 bp, Homo sapien
cctgatcagataggttgtcttagag

SEQ ID NO: 29809 - DNA, 25 bp, Homo sapien
tttctttccaaagttgtacgtcaga

SEQ ID NO: 29810 - DNA, 25 bp, Homo sapien
tttctttccaaacttgtacgtcaga

SEQ ID NO: 29811 - DNA, 25 bp, Homo sapien
tcttccgaaacacctgtctcgacgg

SEQ ID NO: 29812 - DNA, 25 bp, Homo sapien
tcttccgaaacagctgtctcgacgg

SEQ ID NO: 29813 - DNA, 25 bp, Homo sapien
tgcattatggaggatcctattcagc

SEQ ID NO: 29814 - DNA, 25 bp, Homo sapien
tgcattatggagcatcctattcagc

SEQ ID NO: 29815 - DNA, 25 bp, Homo sapien
tgccttacagggagtccagttaatc

SEQ ID NO: 29816 - DNA, 25 bp, Homo sapien
tgccttacagggtgtccagttaatc

SEQ ID NO: 29817 - DNA, 25 bp, Homo sapien
cttctccgtaaagtctccgttattg

SEQ ID NO: 29818 - DNA, 25 bp, Homo sapien
cttctccgtaaactctccgttattg

SEQ ID NO: 29819 - DNA, 25 bp, Homo sapien
tccgaagacaagttctcgattcttg

SEQ ID NO: 29820 - DNA, 25 bp, Homo sapien
tccgaagacaagatctcgattcttg

SEQ ID NO: 29821 - DNA, 25 bp, Homo sapien
tcgtacagccttgtcctaaccagtc

SEQ ID NO: 29822 - DNA, 25 bp, Homo sapien
tcgtacagccttctcctaaccagtc

SEQ ID NO: 29823 - DNA, 25 bp, Homo sapien
atttcacgattttgtcttccgtgaa

SEQ ID NO: 29824 - DNA, 25 bp, Homo sapien
atttcacgatttagtcttccgtgaa

SEQ ID NO: 29825 - DNA, 25 bp, Homo sapien
ctccgacttgtaaccacgggagagt

SEQ ID NO: 29826 - DNA, 25 bp, Homo sapien
ctccgacttgtatccacgggagagt

SEQ ID NO: 29827 - DNA, 25 bp, Homo sapien
ttgttcacgtctcttcgacggataa

SEQ ID NO: 29828 - DNA, 25 bp, Homo sapien
ttgttcacgtctgttcgacggataa

SEQ ID NO: 29829 - DNA, 25 bp, Homo sapien
atttaccgtgttagttcagtcggaa

SEQ ID NO: 29830 - DNA, 25 bp, Homo sapien
atttaccgtgtttgttcagtcggaa

SEQ ID NO: 29831 - DNA, 25 bp, Homo sapien
aaggaagtctcatgacgagaatcga

SEQ ID NO: 29832 - DNA, 25 bp, Homo sapien
aaggaagtctcaagacgagaatcga

SEQ ID NO: 29833 - DNA, 25 bp, Homo sapien
aagagagaaccagtcggaacacgcg

SEQ ID NO: 29834 - DNA, 25 bp, Homo sapien
aagagagaaccactcggaacacgcg

SEQ ID NO: 29835 - DNA, 25 bp, Homo sapien
caacaagatcaggtgtgatgacgtc

SEQ ID NO: 29836 - DNA, 25 bp, Homo sapien
caacaagatcagctgtgatgacgtc

SEQ ID NO: 29837 - DNA, 25 bp, Homo sapien
atgctgatactatgtttgtagtcct

SEQ ID NO: 29838 - DNA, 25 bp, Homo sapien
atgctgatactaagtttgtagtcct

SEQ ID NO: 29839 - DNA, 25 bp, Homo sapien
tgttacacttaaatgttcgtcacgt

SEQ ID NO: 29840 - DNA, 25 bp, Homo sapien
tgttacacttaattgttcgtcacgt

SEQ ID NO: 29841 - DNA, 25 bp, Homo sapien
tatttcgtgtagcggactcagacaa

SEQ ID NO: 29842 - DNA, 25 bp, Homo sapien
tatttcgtgtaggggactcagacaa

SEQ ID NO: 29843 - DNA, 25 bp, Homo sapien
gctcgtctacttgcttgtctgagtc

SEQ ID NO: 29844 - DNA, 25 bp, Homo sapien
gctcgtctacttccttgtctgagtc

SEQ ID NO: 29845 - DNA, 25 bp, Homo sapien
gtggttccatattatctttactacg

SEQ ID NO: 29846 - DNA, 25 bp, Homo sapien
gtggttccatataatctttactacg

SEQ ID NO: 29847 - DNA, 25 bp, Homo sapien
gagaggtcactgtttattccgacct

SEQ ID NO: 29848 - DNA, 25 bp, Homo sapien
gagaggtcactgattattccgacct

SEQ ID NO: 29849 - DNA, 25 bp, Homo sapien
ggagttcaactatgttcaagaccgt

SEQ ID NO: 29850 - DNA, 25 bp, Homo sapien
ggagttcaactaagttcaagaccgt

SEQ ID NO: 29851 - DNA, 25 bp, Homo sapien
taatttgacgtaatgtcggacgtcc

SEQ ID NO: 29852 - DNA, 25 bp, Homo sapien
taatttgacgtattgtcggacgtcc

SEQ ID NO: 29853 - DNA, 25 bp, Homo sapien
ttgattccagactgtgtcagtgact

SEQ ID NO: 29854 - DNA, 25 bp, Homo sapien
ttgattccagacagtgtcagtgact

SEQ ID NO: 29855 - DNA, 25 bp, Homo sapien
cgtttaggtgtgaacagtaacacaa

SEQ ID NO: 29856 - DNA, 25 bp, Homo sapien
cgtttaggtgtgtacagtaacacaa

SEQ ID NO: 29857 - DNA, 25 bp, Homo sapien
agttaagtcgtttcataacgtctta

SEQ ID NO: 29858 - DNA, 25 bp, Homo sapien
agttaagtcgttacataacgtctta

SEQ ID NO: 29859 - DNA, 25 bp, Homo sapien
ccgctccggttgagtcgagttacgg

SEQ ID NO: 29860 - DNA, 25 bp, Homo sapien
ccgctccggttgtgtcgagttacgg

SEQ ID NO: 29861 - DNA, 25 bp, Homo sapien
tctcgtgacgtcgtctgttcgtcgc

SEQ ID NO: 29862 - DNA, 25 bp, Homo sapien
tctcgtgacgtcctctgttcgtcgc

SEQ ID NO: 29863 - DNA, 25 bp, Homo sapien
cgtatgtagactcgtacagttttag

SEQ ID NO: 29864 - DNA, 25 bp, Homo sapien
cgtatgtagactggtacagttttag

SEQ ID NO: 29865 - DNA, 25 bp, Homo sapien
cctatcgtgtcggacctatcgttgc

SEQ ID NO: 29866 - DNA, 25 bp, Homo sapien
cctatcgtgtcgcacctatcgttgc

SEQ ID NO: 29867 - DNA, 25 bp, Homo sapien
taagacgtgaactgtagtgtctcgc

SEQ ID NO: 29868 - DNA, 25 bp, Homo sapien
taagacgtgaacagtagtgtctcgc

SEQ ID NO: 29869 - DNA, 25 bp, Homo sapien
tcacataaagtgtcacaggtcacct

SEQ ID NO: 29870 - DNA, 25 bp, Homo sapien
tcacataaagtgacacaggtcacct

SEQ ID NO: 29871 - DNA, 25 bp, Homo sapien
catataacggagacaggacacgagt

SEQ ID NO: 29872 - DNA, 25 bp, Homo sapien
catataacggagtcaggacacgagt

SEQ ID NO: 29873 - DNA, 25 bp, Homo sapien
tatggactcgtgttagtcgacgtcc

SEQ ID NO: 29874 - DNA, 25 bp, Homo sapien
tatggactcgtgatagtcgacgtcc

SEQ ID NO: 29875 - DNA, 25 bp, Homo sapien
aaaaggactactagtctagacgata

SEQ ID NO: 29876 - DNA, 25 bp, Homo sapien
aaaaggactacttgtctagacgata

SEQ ID NO: 29877 - DNA, 25 bp, Homo sapien
tcttatatgtttggtttcgacatac

SEQ ID NO: 29878 - DNA, 25 bp, Homo sapien
tcttatatgtttcgtttcgacatac

SEQ ID NO: 29879 - DNA, 25 bp, Homo sapien
gagtttacttattttttatactaaa

SEQ ID NO: 29880 - DNA, 25 bp, Homo sapien
gagtttacttatattttatactaaa

SEQ ID NO: 29881 - DNA, 25 bp, Homo sapien
tgttttgtctgttttgaaacactac

SEQ ID NO: 29882 - DNA, 25 bp, Homo sapien
tgttttgtctgtattgaaacactac

SEQ ID NO: 29883 - DNA, 25 bp, Homo sapien
tttgactttgtacactgaaaatcgt

SEQ ID NO: 29884 - DNA, 25 bp, Homo sapien
tttgactttgtagactgaaaatcgt

SEQ ID NO: 29885 - DNA, 25 bp, Homo sapien
tcgaaaagagtctttcgacaacgtt

SEQ ID NO: 29886 - DNA, 25 bp, Homo sapien
tcgaaaagagtcattcgacaacgtt

SEQ ID NO: 29887 - DNA, 25 bp, Homo sapien
tacgtggaagatgatttagactacc

SEQ ID NO: 29888 - DNA, 25 bp, Homo sapien
tacgtggaagatcatttagactacc

SEQ ID NO: 29889 - DNA, 25 bp, Homo sapien
ataaggagtaacaataatgtctcac

SEQ ID NO: 29890 - DNA, 25 bp, Homo sapien
ataaggagtaactataatgtctcac

SEQ ID NO: 29891 - DNA, 25 bp, Homo sapien
acagaaactagtatactcgttcgag

SEQ ID NO: 29892 - DNA, 25 bp, Homo sapien
acagaaactagtttactcgttcgag

SEQ ID NO: 29893 - DNA, 25 bp, Homo sapien
aacgaaataaagttttaacatctct

SEQ ID NO: 29894 - DNA, 25 bp, Homo sapien
aacgaaataaagatttaacatctct

SEQ ID NO: 29895 - DNA, 25 bp, Homo sapien
aacaacgaagttatttagcgtgtcc

SEQ ID NO: 29896 - DNA, 25 bp, Homo sapien
aacaacgaagttttttagcgtgtcc

SEQ ID NO: 29897 - DNA, 25 bp, Homo sapien
gtcagaaggactagcgtcacggtca

SEQ ID NO: 29898 - DNA, 25 bp, Homo sapien
gtcagaaggacttgcgtcacggtca

SEQ ID NO: 29899 - DNA, 25 bp, Homo sapien
atgtgttcacctctttcagaacacg

SEQ ID NO: 29900 - DNA, 25 bp, Homo sapien
atgtgttcacctgtttcagaacacg

SEQ ID NO: 29901 - DNA, 25 bp, Homo sapien
gagtttactctttagtctaccgaaa

SEQ ID NO: 29902 - DNA, 25 bp, Homo sapien
gagtttactcttaagtctaccgaaa

SEQ ID NO: 29903 - DNA, 25 bp, Homo sapien
gtctacacctctgtagaccacaagt

SEQ ID NO: 29904 - DNA, 25 bp, Homo sapien
gtctacacctctctagaccacaagt

SEQ ID NO: 29905 - DNA, 25 bp, Homo sapien
ggacattgacccacctagtggtaag

SEQ ID NO: 29906 - DNA, 25 bp, Homo sapien
ggacattgaccctcctagtggtaag

SEQ ID NO: 29907 - DNA, 25 bp, Homo sapien
tcgtcgaccttttgttctcgtacac

SEQ ID NO: 29908 - DNA, 25 bp, Homo sapien
tcgtcgacctttagttctcgtacac

SEQ ID NO: 29909 - DNA, 25 bp, Homo sapien
aacagactttgaagttactctaggt

SEQ ID NO: 29910 - DNA, 25 bp, Homo sapien
aacagactttgatgttactctaggt

SEQ ID NO: 29911 - DNA, 25 bp, Homo sapien
acgatccgtcgaaccgtttctgtgt

SEQ ID NO: 29912 - DNA, 25 bp, Homo sapien
acgatccgtcgatccgtttctgtgt

SEQ ID NO: 29913 - DNA, 25 bp, Homo sapien
cgaccgagtctgaacagtgaccccg

SEQ ID NO: 29914 - DNA, 25 bp, Homo sapien
cgaccgagtctgtacagtgaccccg

SEQ ID NO: 29915 - DNA, 25 bp, Homo sapien
ggtccggtcgctgcacggggtcctg

SEQ ID NO: 29916 - DNA, 25 bp, Homo sapien
ggtccggtcgctccacggggtcctg

SEQ ID NO: 29917 - DNA, 25 bp, Homo sapien
tctcttacgggtccagggggactgt

SEQ ID NO: 29918 - DNA, 25 bp, Homo sapien
tctcttacgggtgcagggggactgt

SEQ ID NO: 29919 - DNA, 25 bp, Homo sapien
cttctgtaccggactaaggtttagg

SEQ ID NO: 29920 - DNA, 25 bp, Homo sapien
cttctgtaccggtctaaggtttagg

SEQ ID NO: 29921 - DNA, 25 bp, Homo sapien
caaccacgcggacaggaggtactcc

SEQ ID NO: 29922 - DNA, 25 bp, Homo sapien
caaccacgcggagaggaggtactcc

SEQ ID NO: 29923 - DNA, 25 bp, Homo sapien
tgtgtacgtgcggttggggtgaccc

SEQ ID NO: 29924 - DNA, 25 bp, Homo sapien
tgtgtacgtgcgcttggggtgaccc

SEQ ID NO: 29925 - DNA, 25 bp, Homo sapien
agttctaggggctcccgacgcacgc

SEQ ID NO: 29926 - DNA, 25 bp, Homo sapien
agttctaggggcacccgacgcacgc

SEQ ID NO: 29927 - DNA, 25 bp, Homo sapien
tatttgaggacgtcctgtcttagcg

SEQ ID NO: 29928 - DNA, 25 bp, Homo sapien
tatttgaggacgacctgtcttagcg

SEQ ID NO: 29929 - DNA, 25 bp, Homo sapien
cgtttatagaaatccggatcgtaga

SEQ ID NO: 29930 - DNA, 25 bp, Homo sapien
cgtttatagaaaaccggatcgtaga

SEQ ID NO: 29931 - DNA, 25 bp, Homo sapien
ctcgaaaaagagaacaactcgacga

SEQ ID NO: 29932 - DNA, 25 bp, Homo sapien
ctcgaaaaagagtacaactcgacga

SEQ ID NO: 29933 - DNA, 25 bp, Homo sapien
gatacgaacaacgtttactagacac

SEQ ID NO: 29934 - DNA, 25 bp, Homo sapien
gatacgaacaacctttactagacac

SEQ ID NO: 29935 - DNA, 25 bp, Homo sapien
agtactccactacgacttgagaaat

SEQ ID NO: 29936 - DNA, 25 bp, Homo sapien
agtactccactaggacttgagaaat

SEQ ID NO: 29937 - DNA, 25 bp, Homo sapien
ggtcgtccatacgactcagtacata

SEQ ID NO: 29938 - DNA, 25 bp, Homo sapien
ggtcgtccataccactcagtacata

SEQ ID NO: 29939 - DNA, 25 bp, Homo sapien
tggtatgtcctacactcaggtcaag

SEQ ID NO: 29940 - DNA, 25 bp, Homo sapien
tggtatgtcctagactcaggtcaag

SEQ ID NO: 29941 - DNA, 25 bp, Homo sapien
cggtcagaggagtaggtacatacgt

SEQ ID NO: 29942 - DNA, 25 bp, Homo sapien
cggtcagaggagaaggtacatacgt

SEQ ID NO: 29943 - DNA, 25 bp, Homo sapien
accggacgaggaccagtaggtccct

SEQ ID NO: 29944 - DNA, 25 bp, Homo sapien
accggacgaggagcagtaggtccct

SEQ ID NO: 29945 - DNA, 25 bp, Homo sapien
ccatgtgtgaaaccacgtagggcac

SEQ ID NO: 29946 - DNA, 25 bp, Homo sapien
ccatgtgtgaaagcacgtagggcac

SEQ ID NO: 29947 - DNA, 25 bp, Homo sapien
actccggtaagaacagcgacttact

SEQ ID NO: 29948 - DNA, 25 bp, Homo sapien
actccggtaagatcagcgacttact

SEQ ID NO: 29949 - DNA, 25 bp, Homo sapien
actcgtcaaacgatagagacctata

SEQ ID NO: 29950 - DNA, 25 bp, Homo sapien
actcgtcaaacgttagagacctata

SEQ ID NO: 29951 - DNA, 25 bp, Homo sapien
gtgtacaagtgtaagagacgctcct

SEQ ID NO: 29952 - DNA, 25 bp, Homo sapien
gtgtacaagtgttagagacgctcct

SEQ ID NO: 29953 - DNA, 25 bp, Homo sapien
ctgtgtaaaaggatcttctctacat

SEQ ID NO: 29954 - DNA, 25 bp, Homo sapien
ctgtgtaaaaggttcttctctacat

SEQ ID NO: 29955 - DNA, 25 bp, Homo sapien
gagtgtcaaatgtacactcttaaat

SEQ ID NO: 29956 - DNA, 25 bp, Homo sapien
gagtgtcaaatgaacactcttaaat

SEQ ID NO: 29957 - DNA, 25 bp, Homo sapien
gtctatacgagatgtacacattaaa

SEQ ID NO: 29958 - DNA, 25 bp, Homo sapien
gtctatacgagaagtacacattaaa

SEQ ID NO: 29959 - DNA, 25 bp, Homo sapien
cgttaaatccgtagttacattgata

SEQ ID NO: 29960 - DNA, 25 bp, Homo sapien
cgttaaatccgttgttacattgata

SEQ ID NO: 29961 - DNA, 25 bp, Homo sapien
taacgacgatgaagatacaacttcg

SEQ ID NO: 29962 - DNA, 25 bp, Homo sapien
taacgacgatgatgatacaacttcg

SEQ ID NO: 29963 - DNA, 25 bp, Homo sapien
tgtataagtgtttgttaacgttccc

SEQ ID NO: 29964 - DNA, 25 bp, Homo sapien
tgtataagtgttagttaacgttccc

SEQ ID NO: 29965 - DNA, 25 bp, Homo sapien
acaataagcttggtgactctcgctc

SEQ ID NO: 29966 - DNA, 25 bp, Homo sapien
acaataagcttgctgactctcgctc

SEQ ID NO: 29967 - DNA, 25 bp, Homo sapien
tctaaaataggctatcgtgtgtcgt

SEQ ID NO: 29968 - DNA, 25 bp, Homo sapien
tctaaaataggcaatcgtgtgtcgt

SEQ ID NO: 29969 - DNA, 25 bp, Homo sapien
acgtagtatgtttcgtatcgttgtc

SEQ ID NO: 29970 - DNA, 25 bp, Homo sapien
acgtagtatgttacgtatcgttgtc

SEQ ID NO: 29971 - DNA, 25 bp, Homo sapien
acgacgtagtatttacaggagtttc

SEQ ID NO: 29972 - DNA, 25 bp, Homo sapien
acgacgtagtatatacaggagtttc

SEQ ID NO: 29973 - DNA, 25 bp, Homo sapien
attggacccgtctcggcaccgagtc

SEQ ID NO: 29974 - DNA, 25 bp, Homo sapien
attggacccgtcacggcaccgagtc

SEQ ID NO: 29975 - DNA, 25 bp, Homo sapien
tgagccttaccgaagacacatgtgt

SEQ ID NO: 29976 - DNA, 25 bp, Homo sapien
tgagccttaccgtagacacatgtgt

SEQ ID NO: 29977 - DNA, 25 bp, Homo sapien
cgatgagacaaatcctttctaatgt

SEQ ID NO: 29978 - DNA, 25 bp, Homo sapien
cgatgagacaaaacctttctaatgt

SEQ ID NO: 29979 - DNA, 25 bp, Homo sapien
aaggaacaccggtcgttcgtgataa

SEQ ID NO: 29980 - DNA, 25 bp, Homo sapien
aaggaacaccggacgttcgtgataa

SEQ ID NO: 29981 - DNA, 25 bp, Homo sapien
ggagagtccgaactcacggagttct

SEQ ID NO: 29982 - DNA, 25 bp, Homo sapien
ggagagtccgaagtcacggagttct

SEQ ID NO: 29983 - DNA, 25 bp, Homo sapien
ccgtgacggcactcgtccgggtctt

SEQ ID NO: 29984 - DNA, 25 bp, Homo sapien
ccgtgacggcacacgtccgggtctt

SEQ ID NO: 29985 - DNA, 25 bp, Homo sapien
ctccacaccgtaataccggttgttg

SEQ ID NO: 29986 - DNA, 25 bp, Homo sapien
ctccacaccgtattaccggttgttg

SEQ ID NO: 29987 - DNA, 25 bp, Homo sapien
tacccagtttataactggttacttg

SEQ ID NO: 29988 - DNA, 25 bp, Homo sapien
tacccagtttattactggttacttg

SEQ ID NO: 29989 - DNA, 25 bp, Homo sapien
gtcggacggtgtgtctgtttacctg

SEQ ID NO: 29990 - DNA, 25 bp, Homo sapien
gtcggacggtgtctctgtttacctg

SEQ ID NO: 29991 - DNA, 25 bp, Homo sapien
gacgtgtggtgtaagttgtttccct

SEQ ID NO: 29992 - DNA, 25 bp, Homo sapien
gacgtgtggtgttagttgtttccct

SEQ ID NO: 29993 - DNA, 25 bp, Homo sapien
cccagatcttttgatctgtgtttcg

SEQ ID NO: 29994 - DNA, 25 bp, Homo sapien
cccagatcttttcatctgtgtttcg

SEQ ID NO: 29995 - DNA, 25 bp, Homo sapien
tcgaagtctttggtgacataccttc

SEQ ID NO: 29996 - DNA, 25 bp, Homo sapien
tcgaagtctttgctgacataccttc

SEQ ID NO: 29997 - DNA, 25 bp, Homo sapien
ggagtgtctttgtgtccgttccacg

SEQ ID NO: 29998 - DNA, 25 bp, Homo sapien
ggagtgtctttgagtccgttccacg

SEQ ID NO: 29999 - DNA, 25 bp, Homo sapien
agatcatgttgtcaggacaaacacg

SEQ ID NO: 30000 - DNA, 25 bp, Homo sapien
agatcatgttgtgaggacaaacacg

SEQ ID NO: 30001 - DNA, 25 bp, Homo sapien
atcatgttcataacgttaacagacg

SEQ ID NO: 30002 - DNA, 25 bp, Homo sapien
atcatgttcatatcgttaacagacg

SEQ ID NO: 30003 - DNA, 25 bp, Homo sapien
tcatgtgtgacgacgagtactaggg

SEQ ID NO: 30004 - DNA, 25 bp, Homo sapien
tcatgtgtgacgtcgagtactaggg

SEQ ID NO: 30005 - DNA, 25 bp, Homo sapien
cctccactgtgactcggcgaggagt

SEQ ID NO: 30006 - DNA, 25 bp, Homo sapien
cctccactgtgagtcggcgaggagt

SEQ ID NO: 30007 - DNA, 25 bp, Homo sapien
ttctcccttggaacctgtcccgagt

SEQ ID NO: 30008 - DNA, 25 bp, Homo sapien
ttctcccttggatcctgtcccgagt

SEQ ID NO: 30009 - DNA, 25 bp, Homo sapien
ctaagtcctattgaaccggttcagg

SEQ ID NO: 30010 - DNA, 25 bp, Homo sapien
ctaagtcctattcaaccggttcagg

SEQ ID NO: 30011 - DNA, 25 bp, Homo sapien
tcagagactttataccggttgagat

SEQ ID NO: 30012 - DNA, 25 bp, Homo sapien
tcagagactttaaaccggttgagat

SEQ ID NO: 30013 - DNA, 25 bp, Homo sapien
ggagactccagagtctggtcctact

SEQ ID NO: 30014 - DNA, 25 bp, Homo sapien
ggagactccagactctggtcctact

SEQ ID NO: 30015 - DNA, 25 bp, Homo sapien
agacggactcaagagtgtaccccac

SEQ ID NO: 30016 - DNA, 25 bp, Homo sapien
agacggactcaacagtgtaccccac

SEQ ID NO: 30017 - DNA, 25 bp, Homo sapien
tcgtcgtcaccctggaactgtcact

SEQ ID NO: 30018 - DNA, 25 bp, Homo sapien
tcgtcgtcacccaggaactgtcact

SEQ ID NO: 30019 - DNA, 25 bp, Homo sapien
ctcgtgtcacaagagatctgtacat

SEQ ID NO: 30020 - DNA, 25 bp, Homo sapien
ctcgtgtcacaacagatctgtacat

SEQ ID NO: 30021 - DNA, 25 bp, Homo sapien
tgacttcgacttaccgagaaacgag

SEQ ID NO: 30022 - DNA, 25 bp, Homo sapien
tgacttcgactttccgagaaacgag

SEQ ID NO: 30023 - DNA, 25 bp, Homo sapien
tcgtagttcctaactggagacaggt

SEQ ID NO: 30024 - DNA, 25 bp, Homo sapien
tcgtagttcctatctggagacaggt

SEQ ID NO: 30025 - DNA, 25 bp, Homo sapien
cgttgtgtcactttcacggaggttt

SEQ ID NO: 30026 - DNA, 25 bp, Homo sapien
cgttgtgtcactatcacggaggttt

SEQ ID NO: 30027 - DNA, 25 bp, Homo sapien
ctctagactaaagtacacaggcttc

SEQ ID NO: 30028 - DNA, 25 bp, Homo sapien
ctctagactaaactacacaggcttc

SEQ ID NO: 30029 - DNA, 25 bp, Homo sapien
tatatacgagaaaccaatcgtttcg

SEQ ID NO: 30030 - DNA, 25 bp, Homo sapien
tatatacgagaatccaatcgtttcg

SEQ ID NO: 30031 - DNA, 25 bp, Homo sapien
aataagtttaatcacattgtctcgg

SEQ ID NO: 30032 - DNA, 25 bp, Homo sapien
aataagtttaatgacattgtctcgg

SEQ ID NO: 30033 - DNA, 25 bp, Homo sapien
cttatcgtggtatcgacttggttga

SEQ ID NO: 30034 - DNA, 25 bp, Homo sapien
cttatcgtggtaacgacttggttga

SEQ ID NO: 30035 - DNA, 25 bp, Homo sapien
aatactatgagttcattcttgagtc

SEQ ID NO: 30036 - DNA, 25 bp, Homo sapien
aatactatgagtacattcttgagtc

SEQ ID NO: 30037 - DNA, 25 bp, Homo sapien
agaactggtcgacgaaacactacaa

SEQ ID NO: 30038 - DNA, 25 bp, Homo sapien
agaactggtcgaggaaacactacaa

SEQ ID NO: 30039 - DNA, 25 bp, Homo sapien
ggaatgaaggttcaggaactctacc

SEQ ID NO: 30040 - DNA, 25 bp, Homo sapien
ggaatgaaggttgaggaactctacc

SEQ ID NO: 30041 - DNA, 25 bp, Homo sapien
aaaggtcgtcctccacggactccga

SEQ ID NO: 30042 - DNA, 25 bp, Homo sapien
aaaggtcgtcctgcacggactccga

SEQ ID NO: 30043 - DNA, 25 bp, Homo sapien
ctaatgtaggacattcatgcttctc

SEQ ID NO: 30044 - DNA, 25 bp, Homo sapien
ctaatgtaggactttcatgcttctc

SEQ ID NO: 30045 - DNA, 25 bp, Homo sapien
attggtactcgtccatggtactctc

SEQ ID NO: 30046 - DNA, 25 bp, Homo sapien
attggtactcgtgcatggtactctc

SEQ ID NO: 30047 - DNA, 25 bp, Homo sapien
caagaccggtttctgtagtcgattc

SEQ ID NO: 30048 - DNA, 25 bp, Homo sapien
caagaccggtttgtgtagtcgattc

SEQ ID NO: 30049 - DNA, 25 bp, Homo sapien
tatattaatgagaatattttccttc

SEQ ID NO: 30050 - DNA, 25 bp, Homo sapien
tatattaatgagtatattttccttc

SEQ ID NO: 30051 - DNA, 25 bp, Homo sapien
tccaagtattgatgtcgtttctttc

SEQ ID NO: 30052 - DNA, 25 bp, Homo sapien
tccaagtattgaagtcgtttctttc

SEQ ID NO: 30053 - DNA, 25 bp, Homo sapien
acagtgttataaagtcttatttccg

SEQ ID NO: 30054 - DNA, 25 bp, Homo sapien
acagtgttataatgtcttatttccg

SEQ ID NO: 30055 - DNA, 25 bp, Homo sapien
ggactaataagtcttatatactgtc

SEQ ID NO: 30056 - DNA, 25 bp, Homo sapien
ggactaataagtgttatatactgtc

SEQ ID NO: 30057 - DNA, 25 bp, Homo sapien
tcgagtgactattggaacaactcgg

SEQ ID NO: 30058 - DNA, 25 bp, Homo sapien
tcgagtgactataggaacaactcgg

SEQ ID NO: 30059 - DNA, 25 bp, Homo sapien
aaagaactttagaacacgaatcgtg

SEQ ID NO: 30060 - DNA, 25 bp, Homo sapien
aaagaactttagtacacgaatcgtg

SEQ ID NO: 30061 - DNA, 25 bp, Homo sapien
gcacaaagtatagtcacgtaatcat

SEQ ID NO: 30062 - DNA, 25 bp, Homo sapien
gcacaaagtatactcacgtaatcat

SEQ ID NO: 30063 - DNA, 25 bp, Homo sapien
agtgagaaaacacaagatcactagt

SEQ ID NO: 30064 - DNA, 25 bp, Homo sapien
agtgagaaaacagaagatcactagt

SEQ ID NO: 30065 - DNA, 25 bp, Homo sapien
ttgtcgacaatcaagaagatctatc

SEQ ID NO: 30066 - DNA, 25 bp, Homo sapien
ttgtcgacaatctagaagatctatc

SEQ ID NO: 30067 - DNA, 25 bp, Homo sapien
taggttcctactctaccgactcaag

SEQ ID NO: 30068 - DNA, 25 bp, Homo sapien
taggttcctactgtaccgactcaag

SEQ ID NO: 30069 - DNA, 25 bp, Homo sapien
gcgtcacgtcagagacgtcacctga

SEQ ID NO: 30070 - DNA, 25 bp, Homo sapien
gcgtcacgtcagtgacgtcacctga

SEQ ID NO: 30071 - DNA, 25 bp, Homo sapien
ggtcctcgtatccagtcctcgtgtc

SEQ ID NO: 30072 - DNA, 25 bp, Homo sapien
ggtcctcgtatcgagtcctcgtgtc

SEQ ID NO: 30073 - DNA, 25 bp, Homo sapien
gtatccgtcgacaagagtccaggtt

SEQ ID NO: 30074 - DNA, 25 bp, Homo sapien
gtatccgtcgactagagtccaggtt

SEQ ID NO: 30075 - DNA, 25 bp, Homo sapien
ctccctcgataaggtcgtatccgtc

SEQ ID NO: 30076 - DNA, 25 bp, Homo sapien
ctccctcgataacgtcgtatccgtc

SEQ ID NO: 30077 - DNA, 25 bp, Homo sapien
gctccgagtgcaaggttgcgacgtc

SEQ ID NO: 30078 - DNA, 25 bp, Homo sapien
gctccgagtgcatggttgcgacgtc

SEQ ID NO: 30079 - DNA, 25 bp, Homo sapien
gctaccagtgtgtttcgacccggtc

SEQ ID NO: 30080 - DNA, 25 bp, Homo sapien
gctaccagtgtgattcgacccggtc

SEQ ID NO: 30081 - DNA, 25 bp, Homo sapien
ttagattcaacaaatggattccgac

SEQ ID NO: 30082 - DNA, 25 bp, Homo sapien
ttagattcaacatatggattccgac

SEQ ID NO: 30083 - DNA, 25 bp, Homo sapien
aggataaccgattattttcgtaaac

SEQ ID NO: 30084 - DNA, 25 bp, Homo sapien
aggataaccgataattttcgtaaac

SEQ ID NO: 30085 - DNA, 25 bp, Homo sapien
gaaatatgcgatatagacaaaactc

SEQ ID NO: 30086 - DNA, 25 bp, Homo sapien
gaaatatgcgatttagacaaaactc

SEQ ID NO: 30087 - DNA, 25 bp, Homo sapien
aagtacagggggactccaaatcgtc

SEQ ID NO: 30088 - DNA, 25 bp, Homo sapien
aagtacagggggtctccaaatcgtc

SEQ ID NO: 30089 - DNA, 25 bp, Homo sapien
gctacgatcgggtaccgaaaaagac

SEQ ID NO: 30090 - DNA, 25 bp, Homo sapien
gctacgatcgggaaccgaaaaagac

SEQ ID NO: 30091 - DNA, 25 bp, Homo sapien
acgtagacagggaccgacaaagtaa

SEQ ID NO: 30092 - DNA, 25 bp, Homo sapien
acgtagacagggtccgacaaagtaa

SEQ ID NO: 30093 - DNA, 25 bp, Homo sapien
ccaccgaagtaggagacaccccaga

SEQ ID NO: 30094 - DNA, 25 bp, Homo sapien
ccaccgaagtagcagacaccccaga

SEQ ID NO: 30095 - DNA, 25 bp, Homo sapien
ctatacgaagtgtccattacctatg

SEQ ID NO: 30096 - DNA, 25 bp, Homo sapien
ctatacgaagtgaccattacctatg

SEQ ID NO: 30097 - DNA, 25 bp, Homo sapien
acgaaactggtcttcagatccagag

SEQ ID NO: 30098 - DNA, 25 bp, Homo sapien
acgaaactggtcatcagatccagag

SEQ ID NO: 30099 - DNA, 25 bp, Homo sapien
taagtaattaccaccgaagttcgaa

SEQ ID NO: 30100 - DNA, 25 bp, Homo sapien
taagtaattacctccgaagttcgaa

SEQ ID NO: 30101 - DNA, 25 bp, Homo sapien
cagaagaacccgtcatcgtgtcgga

SEQ ID NO: 30102 - DNA, 25 bp, Homo sapien
cagaagaacccgacatcgtgtcgga

SEQ ID NO: 30103 - DNA, 25 bp, Homo sapien
attacggtacccatacttaggagga

SEQ ID NO: 30104 - DNA, 25 bp, Homo sapien
attacggtacccttacttaggagga

SEQ ID NO: 30105 - DNA, 25 bp, Homo sapien
cgtacgaacatatttctctcagaga

SEQ ID NO: 30106 - DNA, 25 bp, Homo sapien
cgtacgaacataattctctcagaga

SEQ ID NO: 30107 - DNA, 25 bp, Homo sapien
gaagaactatttcctacctagagtt

SEQ ID NO: 30108 - DNA, 25 bp, Homo sapien
gaagaactatttgctacctagagtt

SEQ ID NO: 30109 - DNA, 25 bp, Homo sapien
taagagaggaagtcggtggactcca

SEQ ID NO: 30110 - DNA, 25 bp, Homo sapien
taagagaggaagacggtggactcca

SEQ ID NO: 30111 - DNA, 25 bp, Homo sapien
ctgaactggcggtacgggtcgccca

SEQ ID NO: 30112 - DNA, 25 bp, Homo sapien
ctgaactggcggaacgggtcgccca

SEQ ID NO: 30113 - DNA, 25 bp, Homo sapien
actaggtccgacagagggtccaaca

SEQ ID NO: 30114 - DNA, 25 bp, Homo sapien
actaggtccgactgagggtccaaca

SEQ ID NO: 30115 - DNA, 25 bp, Homo sapien
gataaatctcgaagggagtacccca

SEQ ID NO: 30116 - DNA, 25 bp, Homo sapien
gataaatctcgatgggagtacccca

SEQ ID NO: 30117 - DNA, 25 bp, Homo sapien
taagtattagtgtccggtgtcccca

SEQ ID NO: 30118 - DNA, 25 bp, Homo sapien
taagtattagtgaccggtgtcccca

SEQ ID NO: 30119 - DNA, 25 bp, Homo sapien
agtatccaagcgtacgacaggacag

SEQ ID NO: 30120 - DNA, 25 bp, Homo sapien
agtatccaagcgaacgacaggacag

SEQ ID NO: 30121 - DNA, 25 bp, Homo sapien
cacgagcagacaggaccgccgacgt

SEQ ID NO: 30122 - DNA, 25 bp, Homo sapien
cacgagcagacacgaccgccgacgt

SEQ ID NO: 30123 - DNA, 25 bp, Homo sapien
acacagacgtagtcgctataaagac

SEQ ID NO: 30124 - DNA, 25 bp, Homo sapien
acacagacgtagacgctataaagac

SEQ ID NO: 30125 - DNA, 25 bp, Homo sapien
ttattgacgacatctcgatataaga

SEQ ID NO: 30126 - DNA, 25 bp, Homo sapien
ttattgacgacaactcgatataaga

SEQ ID NO: 30127 - DNA, 25 bp, Homo sapien
atccttagacacactagtgacaaga

SEQ ID NO: 30128 - DNA, 25 bp, Homo sapien
atccttagacactctagtgacaaga

SEQ ID NO: 30129 - DNA, 25 bp, Homo sapien
atccgtaaggaccttagtgacagaa

SEQ ID NO: 30130 - DNA, 25 bp, Homo sapien
atccgtaaggacgttagtgacagaa

SEQ ID NO: 30131 - DNA, 25 bp, Homo sapien
cttctgccgactgttatagcgatga

SEQ ID NO: 30132 - DNA, 25 bp, Homo sapien
cttctgccgactcttatagcgatga

SEQ ID NO: 30133 - DNA, 25 bp, Homo sapien
cttaccagattacgagtacatcgat

SEQ ID NO: 30134 - DNA, 25 bp, Homo sapien
cttaccagattaggagtacatcgat

SEQ ID NO: 30135 - DNA, 25 bp, Homo sapien
gattacctaggcatcagtatatcga

SEQ ID NO: 30136 - DNA, 25 bp, Homo sapien
gattacctaggcttcagtatatcga

SEQ ID NO: 30137 - DNA, 25 bp, Homo sapien
acattacacagttccggtgaataga

SEQ ID NO: 30138 - DNA, 25 bp, Homo sapien
acattacacagtaccggtgaataga

SEQ ID NO: 30139 - DNA, 25 bp, Homo sapien
acaccgacgaagtccgacagcgaaa

SEQ ID NO: 30140 - DNA, 25 bp, Homo sapien
acaccgacgaagaccgacagcgaaa

SEQ ID NO: 30141 - DNA, 25 bp, Homo sapien
aactaaccctagacgctaaggagaa

SEQ ID NO: 30142 - DNA, 25 bp, Homo sapien
aactaaccctagtcgctaaggagaa

SEQ ID NO: 30143 - DNA, 25 bp, Homo sapien
ttgaaaccctagtcgcaaggtcagc

SEQ ID NO: 30144 - DNA, 25 bp, Homo sapien
ttgaaaccctagacgcaaggtcagc

SEQ ID NO: 30145 - DNA, 25 bp, Homo sapien
cctaccacagaacaggtctacgacg

SEQ ID NO: 30146 - DNA, 25 bp, Homo sapien
cctaccacagaagaggtctacgacg

SEQ ID NO: 30147 - DNA, 25 bp, Homo sapien
ctctagcaccggtgcggagtctcgt

SEQ ID NO: 30148 - DNA, 25 bp, Homo sapien
ctctagcaccggagcggagtctcgt

SEQ ID NO: 30149 - DNA, 25 bp, Homo sapien
acctctaacactctggaccgttctg

SEQ ID NO: 30150 - DNA, 25 bp, Homo sapien
acctctaacactgtggaccgttctg

SEQ ID NO: 30151 - DNA, 25 bp, Homo sapien
aggctcacccaaggtccgtgcacgt

SEQ ID NO: 30152 - DNA, 25 bp, Homo sapien
aggctcacccaacgtccgtgcacgt

SEQ ID NO: 30153 - DNA, 25 bp, Homo sapien
gacctacgaaacctcggttcgaaag

SEQ ID NO: 30154 - DNA, 25 bp, Homo sapien
gacctacgaaacgtcggttcgaaag

SEQ ID NO: 30155 - DNA, 25 bp, Homo sapien
gatatcttttacacaagtcgaatat

SEQ ID NO: 30156 - DNA, 25 bp, Homo sapien
gatatcttttactcaagtcgaatat

SEQ ID NO: 30157 - DNA, 25 bp, Homo sapien
gccggctccactgtggcacccgacc

SEQ ID NO: 30158 - DNA, 25 bp, Homo sapien
gccggctccactctggcacccgacc

SEQ ID NO: 30159 - DNA, 25 bp, Homo sapien
ctccgtcctctgtgcgccagtgtga

SEQ ID NO: 30160 - DNA, 25 bp, Homo sapien
ctccgtcctctgagcgccagtgtga

SEQ ID NO: 30161 - DNA, 25 bp, Homo sapien
tactcaatcttcatgcgacgggtgg

SEQ ID NO: 30162 - DNA, 25 bp, Homo sapien
tactcaatcttcttgcgacgggtgg

SEQ ID NO: 30163 - DNA, 25 bp, Homo sapien
aacttatcagtcaaacaggtgacct

SEQ ID NO: 30164 - DNA, 25 bp, Homo sapien
aacttatcagtctaacaggtgacct

SEQ ID NO: 30165 - DNA, 25 bp, Homo sapien
tgtctgggttgtacacatcgttggt

SEQ ID NO: 30166 - DNA, 25 bp, Homo sapien
tgtctgggttgttcacatcgttggt

SEQ ID NO: 30167 - DNA, 25 bp, Homo sapien
gactcaggcacgtttaagtcttagg

SEQ ID NO: 30168 - DNA, 25 bp, Homo sapien
gactcaggcacgattaagtcttagg

SEQ ID NO: 30169 - DNA, 25 bp, Homo sapien
gtcgtttgtcagatctggtcgaaga

SEQ ID NO: 30170 - DNA, 25 bp, Homo sapien
gtcgtttgtcagttctggtcgaaga

SEQ ID NO: 30171 - DNA, 25 bp, Homo sapien
gatctctcgactgttcggtccggga

SEQ ID NO: 30172 - DNA, 25 bp, Homo sapien
gatctctcgactcttcggtccggga

SEQ ID NO: 30173 - DNA, 25 bp, Homo sapien
acacctgtcctttccgtccggtgta

SEQ ID NO: 30174 - DNA, 25 bp, Homo sapien
acacctgtccttaccgtccggtgta

SEQ ID NO: 30175 - DNA, 25 bp, Homo sapien
cacaggttgaggactccccgacgga

SEQ ID NO: 30176 - DNA, 25 bp, Homo sapien
cacaggttgaggtctccccgacgga

SEQ ID NO: 30177 - DNA, 25 bp, Homo sapien
acaatggaagctactagaccaggta

SEQ ID NO: 30178 - DNA, 25 bp, Homo sapien
acaatggaagcttctagaccaggta

SEQ ID NO: 30179 - DNA, 25 bp, Homo sapien
acgggagcctgtgactactgtcact

SEQ ID NO: 30180 - DNA, 25 bp, Homo sapien
acgggagcctgtcactactgtcact

SEQ ID NO: 30181 - DNA, 25 bp, Homo sapien
taacgacgggaactcctacatcacc

SEQ ID NO: 30182 - DNA, 25 bp, Homo sapien
taacgacgggaagtcctacatcacc

SEQ ID NO: 30183 - DNA, 25 bp, Homo sapien
tctgtgggactttagaatactcatc

SEQ ID NO: 30184 - DNA, 25 bp, Homo sapien
tctgtgggacttaagaatactcatc

SEQ ID NO: 30185 - DNA, 25 bp, Homo sapien
actgtattgtcctggtaatcgaatt

SEQ ID NO: 30186 - DNA, 25 bp, Homo sapien
actgtattgtccaggtaatcgaatt

SEQ ID NO: 30187 - DNA, 25 bp, Homo sapien
cacttatccgaggtccgtcgacgaa

SEQ ID NO: 30188 - DNA, 25 bp, Homo sapien
cacttatccgagctccgtcgacgaa

SEQ ID NO: 30189 - DNA, 25 bp, Homo sapien
aggaaaagactctcgctcgactaaa

SEQ ID NO: 30190 - DNA, 25 bp, Homo sapien
aggaaaagactcacgctcgactaaa

SEQ ID NO: 30191 - DNA, 25 bp, Homo sapien
tacctgaaggaccatacatttaaga

SEQ ID NO: 30192 - DNA, 25 bp, Homo sapien
tacctgaaggacgatacatttaaga

SEQ ID NO: 30193 - DNA, 25 bp, Homo sapien
ccttcagaaactcgacggttactta

SEQ ID NO: 30194 - DNA, 25 bp, Homo sapien
ccttcagaaactggacggttactta

SEQ ID NO: 30195 - DNA, 25 bp, Homo sapien
accagactccgtagaggtcgacgga

SEQ ID NO: 30196 - DNA, 25 bp, Homo sapien
accagactccgttgaggtcgacgga

SEQ ID NO: 30197 - DNA, 25 bp, Homo sapien
atcaactcgtcgtcgccgcactaga

SEQ ID NO: 30198 - DNA, 25 bp, Homo sapien
atcaactcgtcgacgccgcactaga

SEQ ID NO: 30199 - DNA, 25 bp, Homo sapien
gttatcggactcgaaaccccgagac

SEQ ID NO: 30200 - DNA, 25 bp, Homo sapien
gttatcggactccaaaccccgagac

SEQ ID NO: 30201 - DNA, 25 bp, Homo sapien
gttctttgagtgtcctccacaacct

SEQ ID NO: 30202 - DNA, 25 bp, Homo sapien
gttctttgagtgacctccacaacct

SEQ ID NO: 30203 - DNA, 25 bp, Homo sapien
gatgtagatttagtaccaagactac

SEQ ID NO: 30204 - DNA, 25 bp, Homo sapien
gatgtagatttactaccaagactac

SEQ ID NO: 30205 - DNA, 25 bp, Homo sapien
tagttaagtaccactccgaaactcg

SEQ ID NO: 30206 - DNA, 25 bp, Homo sapien
tagttaagtacctctccgaaactcg

SEQ ID NO: 30207 - DNA, 25 bp, Homo sapien
aaggacgacgacgaccctagccact

SEQ ID NO: 30208 - DNA, 25 bp, Homo sapien
aaggacgacgaccaccctagccact

SEQ ID NO: 30209 - DNA, 25 bp, Homo sapien
gcacactgaacgtagaccaaactcc

SEQ ID NO: 30210 - DNA, 25 bp, Homo sapien
gcacactgaacgaagaccaaactcc

SEQ ID NO: 30211 - DNA, 25 bp, Homo sapien
ccgcgatccgaagctcagtgtgccg

SEQ ID NO: 30212 - DNA, 25 bp, Homo sapien
ccgcgatccgaacctcagtgtgccg

SEQ ID NO: 30213 - DNA, 25 bp, Homo sapien
agggacagacaggacgaccgtcaca

SEQ ID NO: 30214 - DNA, 25 bp, Homo sapien
agggacagacagcacgaccgtcaca

SEQ ID NO: 30215 - DNA, 25 bp, Homo sapien
aataggacgaggtccgtccgaaccg

SEQ ID NO: 30216 - DNA, 25 bp, Homo sapien
aataggacgaggaccgtccgaaccg

SEQ ID NO: 30217 - DNA, 25 bp, Homo sapien
ctaaactggcggtcctaccggactg

SEQ ID NO: 30218 - DNA, 25 bp, Homo sapien
ctaaactggcggacctaccggactg

SEQ ID NO: 30219 - DNA, 25 bp, Homo sapien
taacaaggtcgctaccttaggacga

SEQ ID NO: 30220 - DNA, 25 bp, Homo sapien
taacaaggtcgcaaccttaggacga

SEQ ID NO: 30221 - DNA, 25 bp, Homo sapien
cagtaaagggtcttttcaggtactg

SEQ ID NO: 30222 - DNA, 25 bp, Homo sapien
cagtaaagggtcatttcaggtactg

SEQ ID NO: 30223 - DNA, 25 bp, Homo sapien
acccttggaacttttccgtaccgtc

SEQ ID NO: 30224 - DNA, 25 bp, Homo sapien
acccttggaactattccgtaccgtc

SEQ ID NO: 30225 - DNA, 25 bp, Homo sapien
atttcctaagaaggtactctcggtc

SEQ ID NO: 30226 - DNA, 25 bp, Homo sapien
atttcctaagaacgtactctcggtc

SEQ ID NO: 30227 - DNA, 25 bp, Homo sapien
cactgttcttggtaacgttttgtat

SEQ ID NO: 30228 - DNA, 25 bp, Homo sapien
cactgttcttggaaacgttttgtat

SEQ ID NO: 30229 - DNA, 25 bp, Homo sapien
cgaatgtttggtaaacggtgttacc

SEQ ID NO: 30230 - DNA, 25 bp, Homo sapien
cgaatgtttggttaacggtgttacc

SEQ ID NO: 30231 - DNA, 25 bp, Homo sapien
tttaacgatcccttaaggtgttacc

SEQ ID NO: 30232 - DNA, 25 bp, Homo sapien
tttaacgatcccataaggtgttacc

SEQ ID NO: 30233 - DNA, 25 bp, Homo sapien
tgtgaaaatctctagggtcgttctc

SEQ ID NO: 30234 - DNA, 25 bp, Homo sapien
tgtgaaaatctcaagggtcgttctc

SEQ ID NO: 30235 - DNA, 25 bp, Homo sapien
gttaaagtctaagatccgtactaca

SEQ ID NO: 30236 - DNA, 25 bp, Homo sapien
gttaaagtctaacatccgtactaca

SEQ ID NO: 30237 - DNA, 25 bp, Homo sapien
tctacgaagtcaaaccgtccctcga

SEQ ID NO: 30238 - DNA, 25 bp, Homo sapien
tctacgaagtcataccgtccctcga

SEQ ID NO: 30239 - DNA, 25 bp, Homo sapien
aaaagcatacggttgatcatctcag

SEQ ID NO: 30240 - DNA, 25 bp, Homo sapien
aaaagcatacggatgatcatctcag

SEQ ID NO: 30241 - DNA, 25 bp, Homo sapien
atcagtctaaagactagatctacta

SEQ ID NO: 30242 - DNA, 25 bp, Homo sapien
atcagtctaaagtctagatctacta

SEQ ID NO: 30243 - DNA, 25 bp, Homo sapien
gtcagctcacacgacccgtcgatat

SEQ ID NO: 30244 - DNA, 25 bp, Homo sapien
gtcagctcacaccacccgtcgatat

SEQ ID NO: 30245 - DNA, 25 bp, Homo sapien
cacggtcccgagtccgacgtcatat

SEQ ID NO: 30246 - DNA, 25 bp, Homo sapien
cacggtcccgagaccgacgtcatat

SEQ ID NO: 30247 - DNA, 25 bp, Homo sapien
cgtaactcacgaacggtgacactct

SEQ ID NO: 30248 - DNA, 25 bp, Homo sapien
cgtaactcacgatcggtgacactct

SEQ ID NO: 30249 - DNA, 25 bp, Homo sapien
cgtagacgtaatgacgaagactcga

SEQ ID NO: 30250 - DNA, 25 bp, Homo sapien
cgtagacgtaatcacgaagactcga

SEQ ID NO: 30251 - DNA, 25 bp, Homo sapien
atcgtgtactgatcacaccgttcac

SEQ ID NO: 30252 - DNA, 25 bp, Homo sapien
atcgtgtactgaacacaccgttcac

SEQ ID NO: 30253 - DNA, 25 bp, Homo sapien
tcgttgtcgtagactcgcttagtct

SEQ ID NO: 30254 - DNA, 25 bp, Homo sapien
tcgttgtcgtagtctcgcttagtct

SEQ ID NO: 30255 - DNA, 25 bp, Homo sapien
ctggattttacttccttaagatgta

SEQ ID NO: 30256 - DNA, 25 bp, Homo sapien
ctggattttactaccttaagatgta

SEQ ID NO: 30257 - DNA, 25 bp, Homo sapien
ttctaattttaatttttatactata

SEQ ID NO: 30258 - DNA, 25 bp, Homo sapien
ttctaattttaaattttatactata

SEQ ID NO: 30259 - DNA, 25 bp, Homo sapien
aatacctttttgacttttatattat

SEQ ID NO: 30260 - DNA, 25 bp, Homo sapien
aatacctttttgtcttttatattat

SEQ ID NO: 30261 - DNA, 25 bp, Homo sapien
gtgctactcgcagtactccataaac

SEQ ID NO: 30262 - DNA, 25 bp, Homo sapien
gtgctactcgcactactccataaac

SEQ ID NO: 30263 - DNA, 25 bp, Homo sapien
ctggtaggacaccttgaactcaacg

SEQ ID NO: 30264 - DNA, 25 bp, Homo sapien
ctggtaggacacgttgaactcaacg

SEQ ID NO: 30265 - DNA, 25 bp, Homo sapien
ctgcagagggttctccgtgttcagg

SEQ ID NO: 30266 - DNA, 25 bp, Homo sapien
ctgcagagggttgtccgtgttcagg

SEQ ID NO: 30267 - DNA, 25 bp, Homo sapien
gagcagggacttcgacatccaccac

SEQ ID NO: 30268 - DNA, 25 bp, Homo sapien
gagcagggacttggacatccaccac

SEQ ID NO: 30269 - DNA, 25 bp, Homo sapien
ggaagtatcactcaaacattccgaa

SEQ ID NO: 30270 - DNA, 25 bp, Homo sapien
ggaagtatcactgaaacattccgaa

SEQ ID NO: 30271 - DNA, 25 bp, Homo sapien
acctccacgagaccatgtttcgtaa

SEQ ID NO: 30272 - DNA, 25 bp, Homo sapien
acctccacgagagcatgtttcgtaa

SEQ ID NO: 30273 - DNA, 25 bp, Homo sapien
aaaagaacgaacttctagtctagag

SEQ ID NO: 30274 - DNA, 25 bp, Homo sapien
aaaagaacgaacatctagtctagag

SEQ ID NO: 30275 - DNA, 25 bp, Homo sapien
tataatagaaaagttgtctccggac

SEQ ID NO: 30276 - DNA, 25 bp, Homo sapien
tataatagaaaacttgtctccggac

SEQ ID NO: 30277 - DNA, 25 bp, Homo sapien
ctcgacgggtctcagagatcctgtc

SEQ ID NO: 30278 - DNA, 25 bp, Homo sapien
ctcgacgggtctgagagatcctgtc

SEQ ID NO: 30279 - DNA, 25 bp, Homo sapien
aacgggagtgtatcggattcggcat

SEQ ID NO: 30280 - DNA, 25 bp, Homo sapien
aacgggagtgtaacggattcggcat

SEQ ID NO: 30281 - DNA, 25 bp, Homo sapien
tgaacaggtcgttccgagttgttta

SEQ ID NO: 30282 - DNA, 25 bp, Homo sapien
tgaacaggtcgtaccgagttgttta

SEQ ID NO: 30283 - DNA, 25 bp, Homo sapien
taagcgacttcaacgtcattgtcta

SEQ ID NO: 30284 - DNA, 25 bp, Homo sapien
taagcgacttcatcgtcattgtcta

SEQ ID NO: 30285 - DNA, 25 bp, Homo sapien
gtccgtacctgttaataacttcccg

SEQ ID NO: 30286 - DNA, 25 bp, Homo sapien
gtccgtacctgtaaataacttcccg

SEQ ID NO: 30287 - DNA, 25 bp, Homo sapien
ggtcattaactaaacgtactccctg

SEQ ID NO: 30288 - DNA, 25 bp, Homo sapien
ggtcattaactatacgtactccctg

SEQ ID NO: 30289 - DNA, 25 bp, Homo sapien
caccgtagctcgttattgacgttgt

SEQ ID NO: 30290 - DNA, 25 bp, Homo sapien
caccgtagctcgatattgacgttgt

SEQ ID NO: 30291 - DNA, 25 bp, Homo sapien
accccatgagcgagtatcctaccat

SEQ ID NO: 30292 - DNA, 25 bp, Homo sapien
accccatgagcgtgtatcctaccat

SEQ ID NO: 30293 - DNA, 25 bp, Homo sapien
cccacaagacgtttgtttatcgtct

SEQ ID NO: 30294 - DNA, 25 bp, Homo sapien
cccacaagacgtatgtttatcgtct

SEQ ID NO: 30295 - DNA, 25 bp, Homo sapien
ggggtaagttacacttactgtaatc

SEQ ID NO: 30296 - DNA, 25 bp, Homo sapien
ggggtaagttactcttactgtaatc

SEQ ID NO: 30297 - DNA, 25 bp, Homo sapien
ttctatttacgtctagactgacaga

SEQ ID NO: 30298 - DNA, 25 bp, Homo sapien
ttctatttacgtgtagactgacaga

SEQ ID NO: 30299 - DNA, 25 bp, Homo sapien
ctcgttctctaccggtgccgacgaa

SEQ ID NO: 30300 - DNA, 25 bp, Homo sapien
ctcgttctctacgggtgccgacgaa

SEQ ID NO: 30301 - DNA, 25 bp, Homo sapien
ggtctagtagtggtgtgtcaggaga

SEQ ID NO: 30302 - DNA, 25 bp, Homo sapien
ggtctagtagtgctgtgtcaggaga

SEQ ID NO: 30303 - DNA, 25 bp, Homo sapien
agagctgtcggctccgagtcacggt

SEQ ID NO: 30304 - DNA, 25 bp, Homo sapien
agagctgtcggcaccgagtcacggt

SEQ ID NO: 30305 - DNA, 25 bp, Homo sapien
attactgtcacaaacgtgacgttga

SEQ ID NO: 30306 - DNA, 25 bp, Homo sapien
attactgtcacatacgtgacgttga

SEQ ID NO: 30307 - DNA, 25 bp, Homo sapien
tacacggtattacaatacgaatttt

SEQ ID NO: 30308 - DNA, 25 bp, Homo sapien
tacacggtattagaatacgaatttt

SEQ ID NO: 30309 - DNA, 25 bp, Homo sapien
acgatcttaaagaacgagacttcct

SEQ ID NO: 30310 - DNA, 25 bp, Homo sapien
acgatcttaaagtacgagacttcct

SEQ ID NO: 30311 - DNA, 25 bp, Homo sapien
tacgtaatcagtcgaagaatcgtcc

SEQ ID NO: 30312 - DNA, 25 bp, Homo sapien
tacgtaatcagtggaagaatcgtcc

SEQ ID NO: 30313 - DNA, 25 bp, Homo sapien
tttaggacctatcgaaaatcgtaga

SEQ ID NO: 30314 - DNA, 25 bp, Homo sapien
tttaggacctatggaaaatcgtaga

SEQ ID NO: 30315 - DNA, 25 bp, Homo sapien
gttctcaccacttctaaaaactaag

SEQ ID NO: 30316 - DNA, 25 bp, Homo sapien
gttctcaccactactaaaaactaag

SEQ ID NO: 30317 - DNA, 25 bp, Homo sapien
gtcgttataatcaaacctagaaagt

SEQ ID NO: 30318 - DNA, 25 bp, Homo sapien
gtcgttataatctaacctagaaagt

SEQ ID NO: 30319 - DNA, 25 bp, Homo sapien
aaaggtacaactttgccaaagtaag

SEQ ID NO: 30320 - DNA, 25 bp, Homo sapien
aaaggtacaactatgccaaagtaag

SEQ ID NO: 30321 - DNA, 25 bp, Homo sapien
gacttaatgtattcctagtactttg

SEQ ID NO: 30322 - DNA, 25 bp, Homo sapien
gacttaatgtatacctagtactttg

SEQ ID NO: 30323 - DNA, 25 bp, Homo sapien
aataccgaagtgctaccttggttcc

SEQ ID NO: 30324 - DNA, 25 bp, Homo sapien
aataccgaagtggtaccttggttcc

SEQ ID NO: 30325 - DNA, 25 bp, Homo sapien
gtccaaatgtaccttggacgaccgt

SEQ ID NO: 30326 - DNA, 25 bp, Homo sapien
gtccaaatgtacgttggacgaccgt

SEQ ID NO: 30327 - DNA, 25 bp, Homo sapien
aaagaaggtctctacgtgacgtaat

SEQ ID NO: 30328 - DNA, 25 bp, Homo sapien
aaagaaggtctcaacgtgacgtaat

SEQ ID NO: 30329 - DNA, 25 bp, Homo sapien
gaccttcggaggttcactcggcgaa

SEQ ID NO: 30330 - DNA, 25 bp, Homo sapien
gaccttcggaggatcactcggcgaa

SEQ ID NO: 30331 - DNA, 25 bp, Homo sapien
tctctgctcgaagctgacttgtgaa

SEQ ID NO: 30332 - DNA, 25 bp, Homo sapien
tctctgctcgaacctgacttgtgaa

SEQ ID NO: 30333 - DNA, 25 bp, Homo sapien
aggactggacgatccgacgtcagga

SEQ ID NO: 30334 - DNA, 25 bp, Homo sapien
aggactggacgaaccgacgtcagga

SEQ ID NO: 30335 - DNA, 25 bp, Homo sapien
aggagtctacaatcggtgtcaggac

SEQ ID NO: 30336 - DNA, 25 bp, Homo sapien
aggagtctacaaacggtgtcaggac

SEQ ID NO: 30337 - DNA, 25 bp, Homo sapien
ggtgaacatctaggtcgtcagtgag

SEQ ID NO: 30338 - DNA, 25 bp, Homo sapien
ggtgaacatctacgtcgtcagtgag

SEQ ID NO: 30339 - DNA, 25 bp, Homo sapien
gggtaagctgacattgtgacacgtg

SEQ ID NO: 30340 - DNA, 25 bp, Homo sapien
gggtaagctgactttgtgacacgtg

SEQ ID NO: 30341 - DNA, 25 bp, Homo sapien
agggtactgatgattctctcaacac

SEQ ID NO: 30342 - DNA, 25 bp, Homo sapien
agggtactgatgtttctctcaacac

SEQ ID NO: 30343 - DNA, 25 bp, Homo sapien
aaaaggagggacgtccgtagccctc

SEQ ID NO: 30344 - DNA, 25 bp, Homo sapien
aaaaggagggacctccgtagccctc

SEQ ID NO: 30345 - DNA, 25 bp, Homo sapien
gggaagaaggggactgttctcacct

SEQ ID NO: 30346 - DNA, 25 bp, Homo sapien
gggaagaaggggtctgttctcacct

SEQ ID NO: 30347 - DNA, 25 bp, Homo sapien
tacgggaggaaacctttcttcacct

SEQ ID NO: 30348 - DNA, 25 bp, Homo sapien
tacgggaggaaagctttcttcacct

SEQ ID NO: 30349 - DNA, 25 bp, Homo sapien
gggggtaccacgatggcttctacct

SEQ ID NO: 30350 - DNA, 25 bp, Homo sapien
gggggtaccacgttggcttctacct

SEQ ID NO: 30351 - DNA, 25 bp, Homo sapien
gcggtgtacctctttctattaagtc

SEQ ID NO: 30352 - DNA, 25 bp, Homo sapien
gcggtgtacctcattctattaagtc

SEQ ID NO: 30353 - DNA, 25 bp, Homo sapien
gagggtgagtcttaactttccgtac

SEQ ID NO: 30354 - DNA, 25 bp, Homo sapien
gagggtgagtctaaactttccgtac

SEQ ID NO: 30355 - DNA, 25 bp, Homo sapien
gattctatagtcaacacttaactgg

SEQ ID NO: 30356 - DNA, 25 bp, Homo sapien
gattctatagtctacacttaactgg

SEQ ID NO: 30357 - DNA, 25 bp, Homo sapien
cgtcgtctcggctctaggtttgagt

SEQ ID NO: 30358 - DNA, 25 bp, Homo sapien
cgtcgtctcggcactaggtttgagt

SEQ ID NO: 30359 - DNA, 25 bp, Homo sapien
ggtgacgactcactgtgtccggtat

SEQ ID NO: 30360 - DNA, 25 bp, Homo sapien
ggtgacgactcagtgtgtccggtat

SEQ ID NO: 30361 - DNA, 25 bp, Homo sapien
gtatgcatcacatgcctgtcgtact

SEQ ID NO: 30362 - DNA, 25 bp, Homo sapien
gtatgcatcacaagcctgtcgtact

SEQ ID NO: 30363 - DNA, 25 bp, Homo sapien
agtcaatgagaccacatgcacttta

SEQ ID NO: 30364 - DNA, 25 bp, Homo sapien
agtcaatgagacgacatgcacttta

SEQ ID NO: 30365 - DNA, 25 bp, Homo sapien
gccctaaggcccactaatgatgaga

SEQ ID NO: 30366 - DNA, 25 bp, Homo sapien
gccctaaggccctctaatgatgaga

SEQ ID NO: 30367 - DNA, 25 bp, Homo sapien
acagaccctccagtttgtgtcagtg

SEQ ID NO: 30368 - DNA, 25 bp, Homo sapien
acagaccctccactttgtgtcagtg

SEQ ID NO: 30369 - DNA, 25 bp, Homo sapien
acaaaacaattaggttttgtcctgt

SEQ ID NO: 30370 - DNA, 25 bp, Homo sapien
acaaaacaattacgttttgtcctgt

SEQ ID NO: 30371 - DNA, 25 bp, Homo sapien
tgaaccaccaatatttcttgtgttg

SEQ ID NO: 30372 - DNA, 25 bp, Homo sapien
tgaaccaccaatttttcttgtgttg

SEQ ID NO: 30373 - DNA, 25 bp, Homo sapien
cccgccgtgcgctgtactctggatg

SEQ ID NO: 30374 - DNA, 25 bp, Homo sapien
cccgccgtgcgcagtactctggatg

SEQ ID NO: 30375 - DNA, 25 bp, Homo sapien
aacctatcgttgtcaggcaggatct

SEQ ID NO: 30376 - DNA, 25 bp, Homo sapien
aacctatcgttgacaggcaggatct

SEQ ID NO: 30377 - DNA, 25 bp, Homo sapien
aacgtttataaggactggggtccct

SEQ ID NO: 30378 - DNA, 25 bp, Homo sapien
aacgtttataagcactggggtccct

SEQ ID NO: 30379 - DNA, 25 bp, Homo sapien
cgtcacttaccgactccgaaagaac

SEQ ID NO: 30380 - DNA, 25 bp, Homo sapien
cgtcacttaccgtctccgaaagaac

SEQ ID NO: 30381 - DNA, 25 bp, Homo sapien
gaacgtccacatttttctaatgtga

SEQ ID NO: 30382 - DNA, 25 bp, Homo sapien
gaacgtccacatatttctaatgtga

SEQ ID NO: 30383 - DNA, 25 bp, Homo sapien
cgaagtaacaattaacccttgaggg

SEQ ID NO: 30384 - DNA, 25 bp, Homo sapien
cgaagtaacaataaacccttgaggg

SEQ ID NO: 30385 - DNA, 25 bp, Homo sapien
gaacaccctcgcaggcatgtgcagg

SEQ ID NO: 30386 - DNA, 25 bp, Homo sapien
gaacaccctcgctggcatgtgcagg

SEQ ID NO: 30387 - DNA, 25 bp, Homo sapien
aaacataccctcgatagtcctagag

SEQ ID NO: 30388 - DNA, 25 bp, Homo sapien
aaacataccctccatagtcctagag

SEQ ID NO: 30389 - DNA, 25 bp, Homo sapien
cgaagactggttcagataccgtaga

SEQ ID NO: 30390 - DNA, 25 bp, Homo sapien
cgaagactggttgagataccgtaga

SEQ ID NO: 30391 - DNA, 25 bp, Homo sapien
acactggtatatttccttaccgaga

SEQ ID NO: 30392 - DNA, 25 bp, Homo sapien
acactggtatatatccttaccgaga

SEQ ID NO: 30393 - DNA, 25 bp, Homo sapien
tctatgtagtcgacctttagtgaac

SEQ ID NO: 30394 - DNA, 25 bp, Homo sapien
tctatgtagtcgtcctttagtgaac

SEQ ID NO: 30395 - DNA, 25 bp, Homo sapien
agattatcgttgacccttattagac

SEQ ID NO: 30396 - DNA, 25 bp, Homo sapien
agattatcgttgtcccttattagac

SEQ ID NO: 30397 - DNA, 25 bp, Homo sapien
taaaggttcagtaccgtaaactaac

SEQ ID NO: 30398 - DNA, 25 bp, Homo sapien
taaaggttcagttccgtaaactaac

SEQ ID NO: 30399 - DNA, 25 bp, Homo sapien
aaaacttgactttccggtgacgatc

SEQ ID NO: 30400 - DNA, 25 bp, Homo sapien
aaaacttgacttaccggtgacgatc

SEQ ID NO: 30401 - DNA, 25 bp, Homo sapien
aataaagttaatacccgataacggg

SEQ ID NO: 30402 - DNA, 25 bp, Homo sapien
aataaagttaattcccgataacggg

SEQ ID NO: 30403 - DNA, 25 bp, Homo sapien
cgggttatattcgtcaagagtcgtg

SEQ ID NO: 30404 - DNA, 25 bp, Homo sapien
cgggttatattcctcaagagtcgtg

SEQ ID NO: 30405 - DNA, 25 bp, Homo sapien
agtacgagacctacgtgacacgggc

SEQ ID NO: 30406 - DNA, 25 bp, Homo sapien
agtacgagaccttcgtgacacgggc

SEQ ID NO: 30407 - DNA, 25 bp, Homo sapien
acaaccggtccttgcccgtagtaac

SEQ ID NO: 30408 - DNA, 25 bp, Homo sapien
acaaccggtcctagcccgtagtaac

SEQ ID NO: 30409 - DNA, 25 bp, Homo sapien
acatccttcgacgacgaatagttaa

SEQ ID NO: 30410 - DNA, 25 bp, Homo sapien
acatccttcgaccacgaatagttaa

SEQ ID NO: 30411 - DNA, 25 bp, Homo sapien
acctccagtgtccacaggagccggt

SEQ ID NO: 30412 - DNA, 25 bp, Homo sapien
acctccagtgtcgacaggagccggt

SEQ ID NO: 30413 - DNA, 25 bp, Homo sapien
tgacaccgatcgagttacaaacaac

SEQ ID NO: 30414 - DNA, 25 bp, Homo sapien
tgacaccgatcgtgttacaaacaac

SEQ ID NO: 30415 - DNA, 25 bp, Homo sapien
tcccacatttgtcacgtcgtaagga

SEQ ID NO: 30416 - DNA, 25 bp, Homo sapien
tcccacatttgtgacgtcgtaagga

SEQ ID NO: 30417 - DNA, 25 bp, Homo sapien
ctcacgtcattaaccagattaggtt

SEQ ID NO: 30418 - DNA, 25 bp, Homo sapien
ctcacgtcattatccagattaggtt

SEQ ID NO: 30419 - DNA, 25 bp, Homo sapien
tcctcctcttcactgagaccaggta

SEQ ID NO: 30420 - DNA, 25 bp, Homo sapien
tcctcctcttcagtgagaccaggta

SEQ ID NO: 30421 - DNA, 25 bp, Homo sapien
tcctaccttctgtctgtgacattaa

SEQ ID NO: 30422 - DNA, 25 bp, Homo sapien
tcctaccttctgactgtgacattaa

SEQ ID NO: 30423 - DNA, 25 bp, Homo sapien
ccgtcgtaaacagagacacttcgta

SEQ ID NO: 30424 - DNA, 25 bp, Homo sapien
ccgtcgtaaacacagacacttcgta

SEQ ID NO: 30425 - DNA, 25 bp, Homo sapien
gtcagtcaagtaacgtacaaattat

SEQ ID NO: 30426 - DNA, 25 bp, Homo sapien
gtcagtcaagtatcgtacaaattat

SEQ ID NO: 30427 - DNA, 25 bp, Homo sapien
ctacgtacgtgttactttattacgt

SEQ ID NO: 30428 - DNA, 25 bp, Homo sapien
ctacgtacgtgtaactttattacgt

SEQ ID NO: 30429 - DNA, 25 bp, Homo sapien
tcctcgtcgtactgttcgtggtggt

SEQ ID NO: 30430 - DNA, 25 bp, Homo sapien
tcctcgtcgtacagttcgtggtggt

SEQ ID NO: 30431 - DNA, 25 bp, Homo sapien
ggtttcgagtctcacaacggggtcg

SEQ ID NO: 30432 - DNA, 25 bp, Homo sapien
ggtttcgagtctgacaacggggtcg

SEQ ID NO: 30433 - DNA, 25 bp, Homo sapien
gcattggtgtattaaaccgatgtcg

SEQ ID NO: 30434 - DNA, 25 bp, Homo sapien
gcattggtgtataaaaccgatgtcg

SEQ ID NO: 30435 - DNA, 25 bp, Homo sapien
tgtgattgtctttcggaaacggttc

SEQ ID NO: 30436 - DNA, 25 bp, Homo sapien
tgtgattgtcttacggaaacggttc

SEQ ID NO: 30437 - DNA, 25 bp, Homo sapien
ttacggtagtctattcaaagtgatc

SEQ ID NO: 30438 - DNA, 25 bp, Homo sapien
ttacggtagtcttttcaaagtgatc

SEQ ID NO: 30439 - DNA, 25 bp, Homo sapien
ggtgtatgagtctttatctagaccc

SEQ ID NO: 30440 - DNA, 25 bp, Homo sapien
ggtgtatgagtcattatctagaccc

SEQ ID NO: 30441 - DNA, 25 bp, Homo sapien
aactttgtagtgttatgtactacac

SEQ ID NO: 30442 - DNA, 25 bp, Homo sapien
aactttgtagtgatatgtactacac

SEQ ID NO: 30443 - DNA, 25 bp, Homo sapien
tcccgactcgagagtgacttcttaa

SEQ ID NO: 30444 - DNA, 25 bp, Homo sapien
tcccgactcgagtgtgacttcttaa

SEQ ID NO: 30445 - DNA, 25 bp, Homo sapien
tccttctaccgatatttgtctcagg

SEQ ID NO: 30446 - DNA, 25 bp, Homo sapien
tccttctaccgaaatttgtctcagg

SEQ ID NO: 30447 - DNA, 25 bp, Homo sapien
tttcttcccaaacaggtccgtacgg

SEQ ID NO: 30448 - DNA, 25 bp, Homo sapien
tttcttcccaaagaggtccgtacgg

SEQ ID NO: 30449 - DNA, 25 bp, Homo sapien
tcgttttatgaagaaccggttcaga

SEQ ID NO: 30450 - DNA, 25 bp, Homo sapien
tcgttttatgaacaaccggttcaga

SEQ ID NO: 30451 - DNA, 25 bp, Homo sapien
tttttcaggtgcatccggtttctac

SEQ ID NO: 30452 - DNA, 25 bp, Homo sapien
tttttcaggtgcttccggtttctac

SEQ ID NO: 30453 - DNA, 25 bp, Homo sapien
ttttcacgataaatctccgttcccg

SEQ ID NO: 30454 - DNA, 25 bp, Homo sapien
ttttcacgataattctccgttcccg

SEQ ID NO: 30455 - DNA, 25 bp, Homo sapien
ttctcaagaacctactcggttcctg

SEQ ID NO: 30456 - DNA, 25 bp, Homo sapien
ttctcaagaaccaactcggttcctg

SEQ ID NO: 30457 - DNA, 25 bp, Homo sapien
cgtctgtcacttacccttaccgatg

SEQ ID NO: 30458 - DNA, 25 bp, Homo sapien
cgtctgtcactttcccttaccgatg

SEQ ID NO: 30459 - DNA, 25 bp, Homo sapien
tcttcaactctttggtttcgcatag

SEQ ID NO: 30460 - DNA, 25 bp, Homo sapien
tcttcaactcttaggtttcgcatag

SEQ ID NO: 30461 - DNA, 25 bp, Homo sapien
ctacgcgtacttacgcccggtcgga

SEQ ID NO: 30462 - DNA, 25 bp, Homo sapien
ctacgcgtactttcgcccggtcgga

SEQ ID NO: 30463 - DNA, 25 bp, Homo sapien
tacgttcacggttcctgtcggatga

SEQ ID NO: 30464 - DNA, 25 bp, Homo sapien
tacgttcacggtacctgtcggatga

SEQ ID NO: 30465 - DNA, 25 bp, Homo sapien
aataacctgtcgagtgtccggagaa

SEQ ID NO: 30466 - DNA, 25 bp, Homo sapien
aataacctgtcgtgtgtccggagaa

SEQ ID NO: 30467 - DNA, 25 bp, Homo sapien
aggaagtctcatgacgagaatcgag

SEQ ID NO: 30468 - DNA, 25 bp, Homo sapien
aggaagtctcatcacgagaatcgag

SEQ ID NO: 30469 - DNA, 25 bp, Homo sapien
aaggaataccggtacgagaactaga

SEQ ID NO: 30470 - DNA, 25 bp, Homo sapien
aaggaataccggaacgagaactaga

SEQ ID NO: 30471 - DNA, 25 bp, Homo sapien
gacagaagaccaggtgtgaacgaca

SEQ ID NO: 30472 - DNA, 25 bp, Homo sapien
gacagaagaccacgtgtgaacgaca

SEQ ID NO: 30473 - DNA, 25 bp, Homo sapien
acgatcgaactacgtttgtatacat

SEQ ID NO: 30474 - DNA, 25 bp, Homo sapien
acgatcgaactaggtttgtatacat

SEQ ID NO: 30475 - DNA, 25 bp, Homo sapien
aaatacacttaagtgtgtactcgat

SEQ ID NO: 30476 - DNA, 25 bp, Homo sapien
aaatacacttaactgtgtactcgat

SEQ ID NO: 30477 - DNA, 25 bp, Homo sapien
cggacggtatttcgtgtagcggact

SEQ ID NO: 30478 - DNA, 25 bp, Homo sapien
cggacggtatttggtgtagcggact

SEQ ID NO: 30479 - DNA, 25 bp, Homo sapien
ctacttgcttgtctgagtccgctac

SEQ ID NO: 30480 - DNA, 25 bp, Homo sapien
ctacttgcttgtgtgagtccgctac

SEQ ID NO: 30481 - DNA, 25 bp, Homo sapien
ggtgtcttccatttagtatcttctc

SEQ ID NO: 30482 - DNA, 25 bp, Homo sapien
ggtgtcttccatatagtatcttctc

SEQ ID NO: 30483 - DNA, 25 bp, Homo sapien
gggaggtacgactttatttcctcct

SEQ ID NO: 30484 - DNA, 25 bp, Homo sapien
gggaggtacgacattatttcctcct

SEQ ID NO: 30485 - DNA, 25 bp, Homo sapien
ggacttcaagtatcatcctgaccgt

SEQ ID NO: 30486 - DNA, 25 bp, Homo sapien
ggacttcaagtaacatcctgaccgt

SEQ ID NO: 30487 - DNA, 25 bp, Homo sapien
atatgtgacgaaatcgagtaaccgt

SEQ ID NO: 30488 - DNA, 25 bp, Homo sapien
atatgtgacgaattcgagtaaccgt

SEQ ID NO: 30489 - DNA, 25 bp, Homo sapien
cttattccaagttgtgtagtcacgt

SEQ ID NO: 30490 - DNA, 25 bp, Homo sapien
cttattccaagtagtgtagtcacgt

SEQ ID NO: 30491 - DNA, 25 bp, Homo sapien
gtattattagtgaacagaatacccg

SEQ ID NO: 30492 - DNA, 25 bp, Homo sapien
gtattattagtgtacagaatacccg

SEQ ID NO: 30493 - DNA, 25 bp, Homo sapien
atgtttagagtttctaaacgtctcc

SEQ ID NO: 30494 - DNA, 25 bp, Homo sapien
atgtttagagttactaaacgtctcc

SEQ ID NO: 30495 - DNA, 25 bp, Homo sapien
ctcgcccagtgtcttgacggtaccg

SEQ ID NO: 30496 - DNA, 25 bp, Homo sapien
ctcgcccagtgtgttgacggtaccg

SEQ ID NO: 30497 - DNA, 25 bp, Homo sapien
gttctctgtcgtagtctgtattcct

SEQ ID NO: 30498 - DNA, 25 bp, Homo sapien
gttctctgtcgttgtctgtattcct

SEQ ID NO: 30499 - DNA, 25 bp, Homo sapien
tcgtatgtagactcgtacagtttta

SEQ ID NO: 30500 - DNA, 25 bp, Homo sapien
tcgtatgtagacacgtacagtttta

SEQ ID NO: 30501 - DNA, 25 bp, Homo sapien
agtcggtccgacaagtagtcgtgtc

SEQ ID NO: 30502 - DNA, 25 bp, Homo sapien
agtcggtccgactagtagtcgtgtc

SEQ ID NO: 30503 - DNA, 25 bp, Homo sapien
agagtcgtgagagagtagtctcgac

SEQ ID NO: 30504 - DNA, 25 bp, Homo sapien
agagtcgtgagacagtagtctcgac

SEQ ID NO: 30505 - DNA, 25 bp, Homo sapien
aacaggtcgagaccaggtacgtcct

SEQ ID NO: 30506 - DNA, 25 bp, Homo sapien
aacaggtcgagagcaggtacgtcct

SEQ ID NO: 30507 - DNA, 25 bp, Homo sapien
tagtataaggaggacaagacgccgt

SEQ ID NO: 30508 - DNA, 25 bp, Homo sapien
tagtataaggagcacaagacgccgt

SEQ ID NO: 30509 - DNA, 25 bp, Homo sapien
tttatgcacgagctactccgacgcc

SEQ ID NO: 30510 - DNA, 25 bp, Homo sapien
tttatgcacgaggtactccgacgcc

SEQ ID NO: 30511 - DNA, 25 bp, Homo sapien
aaaagagactcaagcagagactact

SEQ ID NO: 30512 - DNA, 25 bp, Homo sapien
aaaagagactcatgcagagactact

SEQ ID NO: 30513 - DNA, 25 bp, Homo sapien
gagttgtcttatcttcaaaacgtaa

SEQ ID NO: 30514 - DNA, 25 bp, Homo sapien
gagttgtcttatgttcaaaacgtaa

SEQ ID NO: 30515 - DNA, 25 bp, Homo sapien
gtttcgtgtactctttacaagacaa

SEQ ID NO: 30516 - DNA, 25 bp, Homo sapien
gtttcgtgtactgtttacaagacaa

SEQ ID NO: 30517 - DNA, 25 bp, Homo sapien
tgtttgactttgtacactgaaaatc

SEQ ID NO: 30518 - DNA, 25 bp, Homo sapien
tgtttgactttgaacactgaaaatc

SEQ ID NO: 30519 - DNA, 25 bp, Homo sapien
ttggaaacagaatttcgaatactct

SEQ ID NO: 30520 - DNA, 25 bp, Homo sapien
ttggaaacagaaattcgaatactct

SEQ ID NO: 30521 - DNA, 25 bp, Homo sapien
cgtcgggaacgagatttaacgtaca

SEQ ID NO: 30522 - DNA, 25 bp, Homo sapien
cgtcgggaacgacatttaacgtaca

SEQ ID NO: 30523 - DNA, 25 bp, Homo sapien
tggacgtataaaatcatgtcgtaca

SEQ ID NO: 30524 - DNA, 25 bp, Homo sapien
tggacgtataaattcatgtcgtaca

SEQ ID NO: 30525 - DNA, 25 bp, Homo sapien
agacagaaagatatacgtgtactcc

SEQ ID NO: 30526 - DNA, 25 bp, Homo sapien
agacagaaagatttacgtgtactcc

SEQ ID NO: 30527 - DNA, 25 bp, Homo sapien
cgaaaggacacgttattccatactc

SEQ ID NO: 30528 - DNA, 25 bp, Homo sapien
cgaaaggacacgatattccatactc

SEQ ID NO: 30529 - DNA, 25 bp, Homo sapien
ttcaacatagttgtttgacgtaccc

SEQ ID NO: 30530 - DNA, 25 bp, Homo sapien
ttcaacatagttctttgacgtaccc

SEQ ID NO: 30531 - DNA, 25 bp, Homo sapien
tatgacaccgttcatccgaggaacg

SEQ ID NO: 30532 - DNA, 25 bp, Homo sapien
tatgacaccgttgatccgaggaacg

SEQ ID NO: 30533 - DNA, 25 bp, Homo sapien
cggtgttcaccacgtttacaaatac

SEQ ID NO: 30534 - DNA, 25 bp, Homo sapien
cggtgttcaccaggtttacaaatac

SEQ ID NO: 30535 - DNA, 25 bp, Homo sapien
gtgttatacctttcgtaacagaaga

SEQ ID NO: 30536 - DNA, 25 bp, Homo sapien
gtgttataccttacgtaacagaaga

SEQ ID NO: 30537 - DNA, 25 bp, Homo sapien
gttactccccgtggtagaccacaat

SEQ ID NO: 30538 - DNA, 25 bp, Homo sapien
gttactccccgtcgtagaccacaat

SEQ ID NO: 30539 - DNA, 25 bp, Homo sapien
actttgtaccacaccgacgtcggaa

SEQ ID NO: 30540 - DNA, 25 bp, Homo sapien
actttgtaccactccgacgtcggaa

SEQ ID NO: 30541 - DNA, 25 bp, Homo sapien
ttgtcgaccttttcgtacagagtaa

SEQ ID NO: 30542 - DNA, 25 bp, Homo sapien
ttgtcgacctttacgtacagagtaa

SEQ ID NO: 30543 - DNA, 25 bp, Homo sapien
atcgacgtcttgacgtatgtgtaga

SEQ ID NO: 30544 - DNA, 25 bp, Homo sapien
atcgacgtcttgtcgtatgtgtaga

SEQ ID NO: 30545 - DNA, 25 bp, Homo sapien
cctcttccgtgaacgcgtttgtggt

SEQ ID NO: 30546 - DNA, 25 bp, Homo sapien
cctcttccgtgatcgcgtttgtggt

SEQ ID NO: 30547 - DNA, 25 bp, Homo sapien
gaccgatacgtgaaggtaatcgcac

SEQ ID NO: 30548 - DNA, 25 bp, Homo sapien
gaccgatacgtgtaggtaatcgcac

SEQ ID NO: 30549 - DNA, 25 bp, Homo sapien
gtccgtagagtcgaccggaggtccc

SEQ ID NO: 30550 - DNA, 25 bp, Homo sapien
gtccgtagagtccaccggaggtccc

SEQ ID NO: 30551 - DNA, 25 bp, Homo sapien
gtttcgacggtactcagggggactc

SEQ ID NO: 30552 - DNA, 25 bp, Homo sapien
gtttcgacggtagtcagggggactc

SEQ ID NO: 30553 - DNA, 25 bp, Homo sapien
tctatttacgggtcagggtctgatg

SEQ ID NO: 30554 - DNA, 25 bp, Homo sapien
tctatttacgggacagggtctgatg

SEQ ID NO: 30555 - DNA, 25 bp, Homo sapien
caaccaccggagttgggcgcgtccg

SEQ ID NO: 30556 - DNA, 25 bp, Homo sapien
caaccaccggagatgggcgcgtccg

SEQ ID NO: 30557 - DNA, 25 bp, Homo sapien
tgttcggtcggactggtgtcgatcc

SEQ ID NO: 30558 - DNA, 25 bp, Homo sapien
tgttcggtcggagtggtgtcgatcc

SEQ ID NO: 30559 - DNA, 25 bp, Homo sapien
tttcggcgtgtgtcctcgacaccct

SEQ ID NO: 30560 - DNA, 25 bp, Homo sapien
tttcggcgtgtgacctcgacaccct

SEQ ID NO: 30561 - DNA, 25 bp, Homo sapien
tattgaaggacgaaccactaccagc

SEQ ID NO: 30562 - DNA, 25 bp, Homo sapien
tattgaaggacgtaccactaccagc

SEQ ID NO: 30563 - DNA, 25 bp, Homo sapien
cgttgatagaggtccggagtgtaca

SEQ ID NO: 30564 - DNA, 25 bp, Homo sapien
cgttgatagaggaccggagtgtaca

SEQ ID NO: 30565 - DNA, 25 bp, Homo sapien
ggtgaaaacaggaacaggtcgtaca

SEQ ID NO: 30566 - DNA, 25 bp, Homo sapien
ggtgaaaacaggtacaggtcgtaca

SEQ ID NO: 30567 - DNA, 25 bp, Homo sapien
agaacgaaactcgtttcgtcgacac

SEQ ID NO: 30568 - DNA, 25 bp, Homo sapien
agaacgaaactcctttcgtcgacac

SEQ ID NO: 30569 - DNA, 25 bp, Homo sapien
gtagtaaccactacactttacggaa

SEQ ID NO: 30570 - DNA, 25 bp, Homo sapien
gtagtaaccacttcactttacggaa

SEQ ID NO: 30571 - DNA, 25 bp, Homo sapien
aggtgtcattactacttacgaagag

SEQ ID NO: 30572 - DNA, 25 bp, Homo sapien
aggtgtcattacaacttacgaagag

SEQ ID NO: 30573 - DNA, 25 bp, Homo sapien
gaagtatgtcatacatacatgtcaa

SEQ ID NO: 30574 - DNA, 25 bp, Homo sapien
gaagtatgtcattcatacatgtcaa

SEQ ID NO: 30575 - DNA, 25 bp, Homo sapien
gtcactagacgaggaggtcgtatag

SEQ ID NO: 30576 - DNA, 25 bp, Homo sapien
gtcactagacgacgaggtcgtatag

SEQ ID NO: 30577 - DNA, 25 bp, Homo sapien
caggtgacagagcaagtaggtcttt

SEQ ID NO: 30578 - DNA, 25 bp, Homo sapien
caggtgacagaggaagtaggtcttt

SEQ ID NO: 30579 - DNA, 25 bp, Homo sapien
catgtgaaagagttcgtggagtctc

SEQ ID NO: 30580 - DNA, 25 bp, Homo sapien
catgtgaaagagatcgtggagtctc

SEQ ID NO: 30581 - DNA, 25 bp, Homo sapien
cttgcagtaggagtacggactgtct

SEQ ID NO: 30582 - DNA, 25 bp, Homo sapien
cttgcagtaggactacggactgtct

SEQ ID NO: 30583 - DNA, 25 bp, Homo sapien
gtactcaagagtttacgacctagtc

SEQ ID NO: 30584 - DNA, 25 bp, Homo sapien
gtactcaagagtatacgacctagtc

SEQ ID NO: 30585 - DNA, 25 bp, Homo sapien
gtgacaacgtgtcatagtcttctac

SEQ ID NO: 30586 - DNA, 25 bp, Homo sapien
gtgacaacgtgtgatagtcttctac

SEQ ID NO: 30587 - DNA, 25 bp, Homo sapien
ccgtagaaaatgattatacttcgta

SEQ ID NO: 30588 - DNA, 25 bp, Homo sapien
ccgtagaaaatgtttatacttcgta

SEQ ID NO: 30589 - DNA, 25 bp, Homo sapien
agagtgtcaaatgtacactcttaaa

SEQ ID NO: 30590 - DNA, 25 bp, Homo sapien
agagtgtcaaatctacactcttaaa

SEQ ID NO: 30591 - DNA, 25 bp, Homo sapien
gtcaatacgatatcgtacatgtaaa

SEQ ID NO: 30592 - DNA, 25 bp, Homo sapien
gtcaatacgataacgtacatgtaaa

SEQ ID NO: 30593 - DNA, 25 bp, Homo sapien
ttgacatccgtaaggaccttagtga

SEQ ID NO: 30594 - DNA, 25 bp, Homo sapien
ttgacatccgtatggaccttagtga

SEQ ID NO: 30595 - DNA, 25 bp, Homo sapien
ttacatatactgagagtcaactgtg

SEQ ID NO: 30596 - DNA, 25 bp, Homo sapien
ttacatatactgtgagtcaactgtg

SEQ ID NO: 30597 - DNA, 25 bp, Homo sapien
agtaaagtgtatttatagacccctc

SEQ ID NO: 30598 - DNA, 25 bp, Homo sapien
agtaaagtgtatatatagacccctc

SEQ ID NO: 30599 - DNA, 25 bp, Homo sapien
acaattagtttggatctcgtctctc

SEQ ID NO: 30600 - DNA, 25 bp, Homo sapien
acaattagtttgcatctcgtctctc

SEQ ID NO: 30601 - DNA, 25 bp, Homo sapien
tgtccgaaaatatgcaatacgtttc

SEQ ID NO: 30602 - DNA, 25 bp, Homo sapien
tgtccgaaaataagcaatacgtttc

SEQ ID NO: 30603 - DNA, 25 bp, Homo sapien
tagtatagtggtgacatcgtactgc

SEQ ID NO: 30604 - DNA, 25 bp, Homo sapien
tagtatagtggtcacatcgtactgc

SEQ ID NO: 30605 - DNA, 25 bp, Homo sapien
cagtaggactttcaagacgtctgtc

SEQ ID NO: 30606 - DNA, 25 bp, Homo sapien
cagtaggactttgaagacgtctgtc

SEQ ID NO: 30607 - DNA, 25 bp, Homo sapien
atttcgacaacctcgggagtcagtc

SEQ ID NO: 30608 - DNA, 25 bp, Homo sapien
atttcgacaaccacgggagtcagtc

SEQ ID NO: 30609 - DNA, 25 bp, Homo sapien
gagacacctcacaaacaagtagtag

SEQ ID NO: 30610 - DNA, 25 bp, Homo sapien
gagacacctcactaacaagtagtag

SEQ ID NO: 30611 - DNA, 25 bp, Homo sapien
atggaacacataggttctcagatgt

SEQ ID NO: 30612 - DNA, 25 bp, Homo sapien
atggaacacatacgttctcagatgt

SEQ ID NO: 30613 - DNA, 25 bp, Homo sapien
ttgatgacacggtcgttcggtataa

SEQ ID NO: 30614 - DNA, 25 bp, Homo sapien
ttgatgacacggacgttcggtataa

SEQ ID NO: 30615 - DNA, 25 bp, Homo sapien
gggaagtccagaagtcaggacgcct

SEQ ID NO: 30616 - DNA, 25 bp, Homo sapien
gggaagtccagatgtcaggacgcct

SEQ ID NO: 30617 - DNA, 25 bp, Homo sapien
ccgaagactcagtcgtcgaggggct

SEQ ID NO: 30618 - DNA, 25 bp, Homo sapien
ccgaagactcagacgtcgaggggct

SEQ ID NO: 30619 - DNA, 25 bp, Homo sapien
acccgattgtataatagttccgtcc

SEQ ID NO: 30620 - DNA, 25 bp, Homo sapien
acccgattgtattatagttccgtcc

SEQ ID NO: 30621 - DNA, 25 bp, Homo sapien
aggtccgaggttgttgtctctcttg

SEQ ID NO: 30622 - DNA, 25 bp, Homo sapien
aggtccgaggttcttgtctctcttg

SEQ ID NO: 30623 - DNA, 25 bp, Homo sapien
gcgtgggtgtgactgtctactccct

SEQ ID NO: 30624 - DNA, 25 bp, Homo sapien
gcgtgggtgtgagtgtctactccct

SEQ ID NO: 30625 - DNA, 25 bp, Homo sapien
cgagtctatttgtactctgtcttgt

SEQ ID NO: 30626 - DNA, 25 bp, Homo sapien
cgagtctatttgaactctgtcttgt

SEQ ID NO: 30627 - DNA, 25 bp, Homo sapien
ctggagtctttgagactcgtaattt

SEQ ID NO: 30628 - DNA, 25 bp, Homo sapien
ctggagtctttgtgactcgtaattt

SEQ ID NO: 30629 - DNA, 25 bp, Homo sapien
gggagtgtctttgtgtccgttccac

SEQ ID NO: 30630 - DNA, 25 bp, Homo sapien
gggagtgtctttctgtccgttccac

SEQ ID NO: 30631 - DNA, 25 bp, Homo sapien
ggatctatgttttccgacaagacgg

SEQ ID NO: 30632 - DNA, 25 bp, Homo sapien
ggatctatgtttaccgacaagacgg

SEQ ID NO: 30633 - DNA, 25 bp, Homo sapien
aaagcagtgttgaccgtaaactagg

SEQ ID NO: 30634 - DNA, 25 bp, Homo sapien
aaagcagtgttgtccgtaaactagg

SEQ ID NO: 30635 - DNA, 25 bp, Homo sapien
atcaagtgtggtaacagtaccgtgg

SEQ ID NO: 30636 - DNA, 25 bp, Homo sapien
atcaagtgtggttacagtaccgtgg

SEQ ID NO: 30637 - DNA, 25 bp, Homo sapien
tacaagtagcgactcggacgtgggt

SEQ ID NO: 30638 - DNA, 25 bp, Homo sapien
tacaagtagcgagtcggacgtgggt

SEQ ID NO: 30639 - DNA, 25 bp, Homo sapien
ttcgacttaccgactctgtcccggt

SEQ ID NO: 30640 - DNA, 25 bp, Homo sapien
ttcgacttaccgtctctgtcccggt

SEQ ID NO: 30641 - DNA, 25 bp, Homo sapien
ctagcgtcttctggacccgttcagg

SEQ ID NO: 30642 - DNA, 25 bp, Homo sapien
ctagcgtcttctcgacccgttcagg

SEQ ID NO: 30643 - DNA, 25 bp, Homo sapien
ctctggtacttttccacggggagat

SEQ ID NO: 30644 - DNA, 25 bp, Homo sapien
ctctggtactttaccacggggagat

SEQ ID NO: 30645 - DNA, 25 bp, Homo sapien
gaactctctgacgtaccggaagtac

SEQ ID NO: 30646 - DNA, 25 bp, Homo sapien
gaactctctgacctaccggaagtac

SEQ ID NO: 30647 - DNA, 25 bp, Homo sapien
gagaggtcctaaagagtgcccacac

SEQ ID NO: 30648 - DNA, 25 bp, Homo sapien
gagaggtcctaatgagtgcccacac

SEQ ID NO: 30649 - DNA, 25 bp, Homo sapien
cgtcgtcaaccgtagactctcgaac

SEQ ID NO: 30650 - DNA, 25 bp, Homo sapien
cgtcgtcaaccgaagactctcgaac

SEQ ID NO: 30651 - DNA, 25 bp, Homo sapien
attccgtcaagagacgatccgtaat

SEQ ID NO: 30652 - DNA, 25 bp, Homo sapien
attccgtcaagacacgatccgtaat

SEQ ID NO: 30653 - DNA, 25 bp, Homo sapien
atcagtcgtcactaaccggaaagag

SEQ ID NO: 30654 - DNA, 25 bp, Homo sapien
atcagtcgtcacaaaccggaaagag

SEQ ID NO: 30655 - DNA, 25 bp, Homo sapien
cctccttccctactggagactaggt

SEQ ID NO: 30656 - DNA, 25 bp, Homo sapien
cctccttccctagtggagactaggt

SEQ ID NO: 30657 - DNA, 25 bp, Homo sapien
cgtctgtatcccattggagtgtaat

SEQ ID NO: 30658 - DNA, 25 bp, Homo sapien
cgtctgtatccctttggagtgtaat

SEQ ID NO: 30659 - DNA, 25 bp, Homo sapien
ctctaagtaatcgttcagagagttt

SEQ ID NO: 30660 - DNA, 25 bp, Homo sapien
ctctaagtaatccttcagagagttt

SEQ ID NO: 30661 - DNA, 25 bp, Homo sapien
tctattacagaaaccaaacgtctaa

SEQ ID NO: 30662 - DNA, 25 bp, Homo sapien
tctattacagaatccaaacgtctaa

SEQ ID NO: 30663 - DNA, 25 bp, Homo sapien
taaaatctagaacaactttcgtcgg

SEQ ID NO: 30664 - DNA, 25 bp, Homo sapien
taaaatctagaagaactttcgtcgg

SEQ ID NO: 30665 - DNA, 25 bp, Homo sapien
ttaacgggtaacacgtgtgtctgat

SEQ ID NO: 30666 - DNA, 25 bp, Homo sapien
ttaacgggtaactcgtgtgtctgat

SEQ ID NO: 30667 - DNA, 25 bp, Homo sapien
agataatgattctttctatgtcgac

SEQ ID NO: 30668 - DNA, 25 bp, Homo sapien
agataatgattcattctatgtcgac

SEQ ID NO: 30669 - DNA, 25 bp, Homo sapien
gaataagtggaccaaacactacaac

SEQ ID NO: 30670 - DNA, 25 bp, Homo sapien
gaataagtggacgaaacactacaac

SEQ ID NO: 30671 - DNA, 25 bp, Homo sapien
cggtaaaaaggtccagaaactcaac

SEQ ID NO: 30672 - DNA, 25 bp, Homo sapien
cggtaaaaaggtgcagaaactcaac

SEQ ID NO: 30673 - DNA, 25 bp, Homo sapien
acaaacgcacctccacggtactccc

SEQ ID NO: 30674 - DNA, 25 bp, Homo sapien
acaaacgcacctgcacggtactccc

SEQ ID NO: 30675 - DNA, 25 bp, Homo sapien
ctaatcgtaggaatggatcttttac

SEQ ID NO: 30676 - DNA, 25 bp, Homo sapien
ctaatcgtaggattggatcttttac

SEQ ID NO: 30677 - DNA, 25 bp, Homo sapien
tgttatctggtttccgatggatctc

SEQ ID NO: 30678 - DNA, 25 bp, Homo sapien
tgttatctggttaccgatggatctc

SEQ ID NO: 30679 - DNA, 25 bp, Homo sapien
ctgaatctggttgttatgacgattc

SEQ ID NO: 30680 - DNA, 25 bp, Homo sapien
ctgaatctggttcttatgacgattc

SEQ ID NO: 30681 - DNA, 25 bp, Homo sapien
taagagaatgggttttatctcctcc

SEQ ID NO: 30682 - DNA, 25 bp, Homo sapien
taagagaatgggatttatctcctcc

SEQ ID NO: 30683 - DNA, 25 bp, Homo sapien
caagataatgattctttctatgtcg

SEQ ID NO: 30684 - DNA, 25 bp, Homo sapien
caagataatgatactttctatgtcg

SEQ ID NO: 30685 - DNA, 25 bp, Homo sapien
cagtgttataaagtcttatttccgt

SEQ ID NO: 30686 - DNA, 25 bp, Homo sapien
cagtgttataaactcttatttccgt

SEQ ID NO: 30687 - DNA, 25 bp, Homo sapien
gtgaaataataccttatacacgttg

SEQ ID NO: 30688 - DNA, 25 bp, Homo sapien
gtgaaataatacgttatacacgttg

SEQ ID NO: 30689 - DNA, 25 bp, Homo sapien
tcgtagagactttctaataaatcag

SEQ ID NO: 30690 - DNA, 25 bp, Homo sapien
tcgtagagacttactaataaatcag

SEQ ID NO: 30691 - DNA, 25 bp, Homo sapien
aaaagaattgaaacacgtatatcgc

SEQ ID NO: 30692 - DNA, 25 bp, Homo sapien
aaaagaattgaatcacgtatatcgc

SEQ ID NO: 30693 - DNA, 25 bp, Homo sapien
aaaacaagattattcgtattatcat

SEQ ID NO: 30694 - DNA, 25 bp, Homo sapien
aaaacaagattaatcgtattatcat

SEQ ID NO: 30695 - DNA, 25 bp, Homo sapien
attgaaaatctaacatgaacacagt

SEQ ID NO: 30696 - DNA, 25 bp, Homo sapien
attgaaaatctatcatgaacacagt

SEQ ID NO: 30697 - DNA, 25 bp, Homo sapien
ggttgtaaaatcaaccagttacttt

SEQ ID NO: 30698 - DNA, 25 bp, Homo sapien
ggttgtaaaatctaccagttacttt

SEQ ID NO: 30699 - DNA, 25 bp, Homo sapien
tgtttcctcacttccgtatcgaacg

SEQ ID NO: 30700 - DNA, 25 bp, Homo sapien
tgtttcctcactaccgtatcgaacg

SEQ ID NO: 30701 - DNA, 25 bp, Homo sapien
tctctacgtcaggtgatcgacccgg

SEQ ID NO: 30702 - DNA, 25 bp, Homo sapien
tctctacgtcagctgatcgacccgg

SEQ ID NO: 30703 - DNA, 25 bp, Homo sapien
ggcccgtagtcacgtacgctactgc

SEQ ID NO: 30704 - DNA, 25 bp, Homo sapien
ggcccgtagtcaggtacgctactgc

SEQ ID NO: 30705 - DNA, 25 bp, Homo sapien
gtctggtcgtagaggtaccagagtc

SEQ ID NO: 30706 - DNA, 25 bp, Homo sapien
gtctggtcgtagtggtaccagagtc

SEQ ID NO: 30707 - DNA, 25 bp, Homo sapien
tcccctgtgtaagtctagtaccgtc

SEQ ID NO: 30708 - DNA, 25 bp, Homo sapien
tcccctgtgtaactctagtaccgtc

SEQ ID NO: 30709 - DNA, 25 bp, Homo sapien
gcggacagtgaaaccgctgcgcgtc

SEQ ID NO: 30710 - DNA, 25 bp, Homo sapien
gcggacagtgaatccgctgcgcgtc

SEQ ID NO: 30711 - DNA, 25 bp, Homo sapien
ggctccaggttttcggaccgtgtcg

SEQ ID NO: 30712 - DNA, 25 bp, Homo sapien
ggctccaggtttacggaccgtgtcg

SEQ ID NO: 30713 - DNA, 25 bp, Homo sapien
gactccaacaagtaggagtcccgac

SEQ ID NO: 30714 - DNA, 25 bp, Homo sapien
gactccaacaagaaggagtcccgac

SEQ ID NO: 30715 - DNA, 25 bp, Homo sapien
cagaagaaccaaaagtgttcaaact

SEQ ID NO: 30716 - DNA, 25 bp, Homo sapien
cagaagaaccaatagtgttcaaact

SEQ ID NO: 30717 - DNA, 25 bp, Homo sapien
agaagatgacacaaagtccaaacct

SEQ ID NO: 30718 - DNA, 25 bp, Homo sapien
agaagatgacactaagtccaaacct

SEQ ID NO: 30719 - DNA, 25 bp, Homo sapien
attcaggtccggactgcaaatctct

SEQ ID NO: 30720 - DNA, 25 bp, Homo sapien
attcaggtccggtctgcaaatctct

SEQ ID NO: 30721 - DNA, 25 bp, Homo sapien
tctaagtcagagtaccgaaaataat

SEQ ID NO: 30722 - DNA, 25 bp, Homo sapien
tctaagtcagagaaccgaaaataat

SEQ ID NO: 30723 - DNA, 25 bp, Homo sapien
aacgaacagggtgactcaaaataac

SEQ ID NO: 30724 - DNA, 25 bp, Homo sapien
aacgaacagggtcactcaaaataac

SEQ ID NO: 30725 - DNA, 25 bp, Homo sapien
atacagagttcattttaccgactcg

SEQ ID NO: 30726 - DNA, 25 bp, Homo sapien
atacagagttcaatttaccgactcg

SEQ ID NO: 30727 - DNA, 25 bp, Homo sapien
gtaactggtcatttacgtaccaacg

SEQ ID NO: 30728 - DNA, 25 bp, Homo sapien
gtaactggtcatatacgtaccaacg

SEQ ID NO: 30729 - DNA, 25 bp, Homo sapien
caaactatacgcacgcatgtatgaa

SEQ ID NO: 30730 - DNA, 25 bp, Homo sapien
caaactatacgctcgcatgtatgaa

SEQ ID NO: 30731 - DNA, 25 bp, Homo sapien
cagaagaaactgtcaacagtcgaat

SEQ ID NO: 30732 - DNA, 25 bp, Homo sapien
cagaagaaactgacaacagtcgaat

SEQ ID NO: 30733 - DNA, 25 bp, Homo sapien
ctcaagtacccgactatacagtgga

SEQ ID NO: 30734 - DNA, 25 bp, Homo sapien
ctcaagtacccgtctatacagtgga

SEQ ID NO: 30735 - DNA, 25 bp, Homo sapien
gtacgaacatatttctctcagagac

SEQ ID NO: 30736 - DNA, 25 bp, Homo sapien
gtacgaacatatatctctcagagac

SEQ ID NO: 30737 - DNA, 25 bp, Homo sapien
cgaagacagagttttcccagagtct

SEQ ID NO: 30738 - DNA, 25 bp, Homo sapien
cgaagacagagtattcccagagtct

SEQ ID NO: 30739 - DNA, 25 bp, Homo sapien
taagaagaaacgtcggtccgaatcc

SEQ ID NO: 30740 - DNA, 25 bp, Homo sapien
taagaagaaacgacggtccgaatcc

SEQ ID NO: 30741 - DNA, 25 bp, Homo sapien
tcaacgggcgtgtcggagccgacca

SEQ ID NO: 30742 - DNA, 25 bp, Homo sapien
tcaacgggcgtgacggagccgacca

SEQ ID NO: 30743 - DNA, 25 bp, Homo sapien
tcacagcgaccgtgggagaccgaaa

SEQ ID NO: 30744 - DNA, 25 bp, Homo sapien
tcacagcgaccgagggagaccgaaa

SEQ ID NO: 30745 - DNA, 25 bp, Homo sapien
ggacacaccggaagggataccccag

SEQ ID NO: 30746 - DNA, 25 bp, Homo sapien
ggacacaccggatgggataccccag

SEQ ID NO: 30747 - DNA, 25 bp, Homo sapien
gtaaataagtactccgggtacccca

SEQ ID NO: 30748 - DNA, 25 bp, Homo sapien
gtaaataagtacaccgggtacccca

SEQ ID NO: 30749 - DNA, 25 bp, Homo sapien
taaatttgaaggtacgacgggacac

SEQ ID NO: 30750 - DNA, 25 bp, Homo sapien
taaatttgaaggaacgacgggacac

SEQ ID NO: 30751 - DNA, 25 bp, Homo sapien
tcatcgcgagacagaaccccgacgt

SEQ ID NO: 30752 - DNA, 25 bp, Homo sapien
tcatcgcgagactgaaccccgacgt

SEQ ID NO: 30753 - DNA, 25 bp, Homo sapien
acctgagtcgctcacaaacgacgac

SEQ ID NO: 30754 - DNA, 25 bp, Homo sapien
acctgagtcgctgacaaacgacgac

SEQ ID NO: 30755 - DNA, 25 bp, Homo sapien
acgttttgaccttcgacgaataagc

SEQ ID NO: 30756 - DNA, 25 bp, Homo sapien
acgttttgacctacgacgaataagc

SEQ ID NO: 30757 - DNA, 25 bp, Homo sapien
ggattctaaaccactagaacgaaat

SEQ ID NO: 30758 - DNA, 25 bp, Homo sapien
ggattctaaacctctagaacgaaat

SEQ ID NO: 30759 - DNA, 25 bp, Homo sapien
gttctaagactctcactgacgagaa

SEQ ID NO: 30760 - DNA, 25 bp, Homo sapien
gttctaagactcacactgacgagaa

SEQ ID NO: 30761 - DNA, 25 bp, Homo sapien
tactgtcatactgtcactggattac

SEQ ID NO: 30762 - DNA, 25 bp, Homo sapien
tactgtcatactctcactggattac

SEQ ID NO: 30763 - DNA, 25 bp, Homo sapien
tcttttagacttgagacgtgatcga

SEQ ID NO: 30764 - DNA, 25 bp, Homo sapien
tcttttagacttcagacgtgatcga

SEQ ID NO: 30765 - DNA, 25 bp, Homo sapien
atatactctacgtcatcattagtgg

SEQ ID NO: 30766 - DNA, 25 bp, Homo sapien
atatactctacgacatcattagtgg

SEQ ID NO: 30767 - DNA, 25 bp, Homo sapien
tacatgtaccattaagagtcaatga

SEQ ID NO: 30768 - DNA, 25 bp, Homo sapien
tacatgtaccataaagagtcaatga

SEQ ID NO: 30769 - DNA, 25 bp, Homo sapien
aagtgacgtaagatcaacaccaaac

SEQ ID NO: 30770 - DNA, 25 bp, Homo sapien
aagtgacgtaagttcaacaccaaac

SEQ ID NO: 30771 - DNA, 25 bp, Homo sapien
agaaagtactagacctacaggacaa

SEQ ID NO: 30772 - DNA, 25 bp, Homo sapien
agaaagtactagtcctacaggacaa

SEQ ID NO: 30773 - DNA, 25 bp, Homo sapien
gagagacacaagtacccgggtcaga

SEQ ID NO: 30774 - DNA, 25 bp, Homo sapien
gagagacacaagaacccgggtcaga

SEQ ID NO: 30775 - DNA, 25 bp, Homo sapien
gctcgtacctacaaaaaggtctcga

SEQ ID NO: 30776 - DNA, 25 bp, Homo sapien
gctcgtacctactaaaaggtctcga

SEQ ID NO: 30777 - DNA, 25 bp, Homo sapien
ttctagcacaagagcggacgttagt

SEQ ID NO: 30778 - DNA, 25 bp, Homo sapien
ttctagcacaagtgcggacgttagt

SEQ ID NO: 30779 - DNA, 25 bp, Homo sapien
ggctcgagacctctaggacggcctg

SEQ ID NO: 30780 - DNA, 25 bp, Homo sapien
ggctcgagacctgtaggacggcctg

SEQ ID NO: 30781 - DNA, 25 bp, Homo sapien
ttgaccgaccctgaggtcctccagt

SEQ ID NO: 30782 - DNA, 25 bp, Homo sapien
ttgaccgaccctcaggtcctccagt

SEQ ID NO: 30783 - DNA, 25 bp, Homo sapien
gacccgagtccgacggccgtaacag

SEQ ID NO: 30784 - DNA, 25 bp, Homo sapien
gacccgagtccgtcggccgtaacag

SEQ ID NO: 30785 - DNA, 25 bp, Homo sapien
atatcttgtaacacggaccaatcgt

SEQ ID NO: 30786 - DNA, 25 bp, Homo sapien
atatcttgtaactcggaccaatcgt

SEQ ID NO: 30787 - DNA, 25 bp, Homo sapien
gccagttcaagtaggtgaaccccac

SEQ ID NO: 30788 - DNA, 25 bp, Homo sapien
gccagttcaagttggtgaaccccac

SEQ ID NO: 30789 - DNA, 25 bp, Homo sapien
cctactcctctggtgagccttgtca

SEQ ID NO: 30790 - DNA, 25 bp, Homo sapien
cctactcctctgctgagccttgtca

SEQ ID NO: 30791 - DNA, 25 bp, Homo sapien
acaccacactctctgtgcacattgg

SEQ ID NO: 30792 - DNA, 25 bp, Homo sapien
acaccacactctgtgtgcacattgg

SEQ ID NO: 30793 - DNA, 25 bp, Homo sapien
taacttactttcttgacattgtcgg

SEQ ID NO: 30794 - DNA, 25 bp, Homo sapien
taacttactttcatgacattgtcgg

SEQ ID NO: 30795 - DNA, 25 bp, Homo sapien
ctctatgtttatgtcacattatggt

SEQ ID NO: 30796 - DNA, 25 bp, Homo sapien
ctctatgtttatctcacattatggt

SEQ ID NO: 30797 - DNA, 25 bp, Homo sapien
gactcaggcacgtttaagtcttagg

SEQ ID NO: 30798 - DNA, 25 bp, Homo sapien
gactcaggcacgattaagtcttagg

SEQ ID NO: 30799 - DNA, 25 bp, Homo sapien
tttatagtaccgtctgagtcaaagt

SEQ ID NO: 30800 - DNA, 25 bp, Homo sapien
tttatagtaccgactgagtcaaagt

SEQ ID NO: 30801 - DNA, 25 bp, Homo sapien
agtctcacgacagttcttgtcgaaa

SEQ ID NO: 30802 - DNA, 25 bp, Homo sapien
agtctcacgacacttcttgtcgaaa

SEQ ID NO: 30803 - DNA, 25 bp, Homo sapien
gaacactacttcatctttttcggga

SEQ ID NO: 30804 - DNA, 25 bp, Homo sapien
gaacactacttcttctttttcggga

SEQ ID NO: 30805 - DNA, 25 bp, Homo sapien
agacgtttcgggacctcgctcggga

SEQ ID NO: 30806 - DNA, 25 bp, Homo sapien
agacgtttcgggtcctcgctcggga

SEQ ID NO: 30807 - DNA, 25 bp, Homo sapien
tcaatggggcttacactcgtagaga

SEQ ID NO: 30808 - DNA, 25 bp, Homo sapien
tcaatggggctttcactcgtagaga

SEQ ID NO: 30809 - DNA, 25 bp, Homo sapien
tgaggaccttcttactacggtagat

SEQ ID NO: 30810 - DNA, 25 bp, Homo sapien
tgaggaccttctaactacggtagat

SEQ ID NO: 30811 - DNA, 25 bp, Homo sapien
tattcggagacattcacaatcgata

SEQ ID NO: 30812 - DNA, 25 bp, Homo sapien
tattcggagacaatcacaatcgata

SEQ ID NO: 30813 - DNA, 25 bp, Homo sapien
cttgggactttgtacgtacagatct

SEQ ID NO: 30814 - DNA, 25 bp, Homo sapien
cttgggactttgaacgtacagatct

SEQ ID NO: 30815 - DNA, 25 bp, Homo sapien
ccttgtctgttcttataatcaaact

SEQ ID NO: 30816 - DNA, 25 bp, Homo sapien
ccttgtctgttcatataatcaaact

SEQ ID NO: 30817 - DNA, 25 bp, Homo sapien
gttatatgagcttagtcgacgagac

SEQ ID NO: 30818 - DNA, 25 bp, Homo sapien
gttatatgagctaagtcgacgagac

SEQ ID NO: 30819 - DNA, 25 bp, Homo sapien
aggagaaagctgaaccgacggacaa

SEQ ID NO: 30820 - DNA, 25 bp, Homo sapien
aggagaaagctgtaccgacggacaa

SEQ ID NO: 30821 - DNA, 25 bp, Homo sapien
acccgaaggctcttcgaccgttaaa

SEQ ID NO: 30822 - DNA, 25 bp, Homo sapien
acccgaaggctcatcgaccgttaaa

SEQ ID NO: 30823 - DNA, 25 bp, Homo sapien
ccgatcgaaaaacgaccgttcttat

SEQ ID NO: 30824 - DNA, 25 bp, Homo sapien
ccgatcgaaaaaggaccgttcttat

SEQ ID NO: 30825 - DNA, 25 bp, Homo sapien
gacaagagtcacgtgaggttcggta

SEQ ID NO: 30826 - DNA, 25 bp, Homo sapien
gacaagagtcacctgaggttcggta

SEQ ID NO: 30827 - DNA, 25 bp, Homo sapien
cttagacgtcggtgatcgttcagta

SEQ ID NO: 30828 - DNA, 25 bp, Homo sapien
cttagacgtcggagatcgttcagta

SEQ ID NO: 30829 - DNA, 25 bp, Homo sapien
cgtttcggactttcaatcccgagac

SEQ ID NO: 30830 - DNA, 25 bp, Homo sapien
cgtttcggacttacaatcccgagac

SEQ ID NO: 30831 - DNA, 25 bp, Homo sapien
cgacgattacgattacgcaatcgtc

SEQ ID NO: 30832 - DNA, 25 bp, Homo sapien
cgacgattacgaatacgcaatcgtc

SEQ ID NO: 30833 - DNA, 25 bp, Homo sapien
gtgtacatgtcaactcctaatctac

SEQ ID NO: 30834 - DNA, 25 bp, Homo sapien
gtgtacatgtcatctcctaatctac

SEQ ID NO: 30835 - DNA, 25 bp, Homo sapien
aggtcagtcgtctcccagtacaact

SEQ ID NO: 30836 - DNA, 25 bp, Homo sapien
aggtcagtcgtcacccagtacaact

SEQ ID NO: 30837 - DNA, 25 bp, Homo sapien
gaaacgtgtatttagaccaaacttt

SEQ ID NO: 30838 - DNA, 25 bp, Homo sapien
gaaacgtgtattaagaccaaacttt

SEQ ID NO: 30839 - DNA, 25 bp, Homo sapien
atcggatccgaggactccgggtccg

SEQ ID NO: 30840 - DNA, 25 bp, Homo sapien
atcggatccgagcactccgggtccg

SEQ ID NO: 30841 - DNA, 25 bp, Homo sapien
aagggcgacgcgtcgtacccgcaca

SEQ ID NO: 30842 - DNA, 25 bp, Homo sapien
aagggcgacgcgacgtacccgcaca

SEQ ID NO: 30843 - DNA, 25 bp, Homo sapien
taagtggaagagtcctaagacaccg

SEQ ID NO: 30844 - DNA, 25 bp, Homo sapien
taagtggaagagacctaagacaccg

SEQ ID NO: 30845 - DNA, 25 bp, Homo sapien
taagaggtggtgaacctatcaactc

SEQ ID NO: 30846 - DNA, 25 bp, Homo sapien
taagaggtggtgtacctatcaactc

SEQ ID NO: 30847 - DNA, 25 bp, Homo sapien
caaaacatgcggataccttggacga

SEQ ID NO: 30848 - DNA, 25 bp, Homo sapien
caaaacatgcggttaccttggacga

SEQ ID NO: 30849 - DNA, 25 bp, Homo sapien
aatgacaccgtgtctttcaggacgg

SEQ ID NO: 30850 - DNA, 25 bp, Homo sapien
aatgacaccgtgactttcaggacgg

SEQ ID NO: 30851 - DNA, 25 bp, Homo sapien
acacatttgaacctgttcagtgacc

SEQ ID NO: 30852 - DNA, 25 bp, Homo sapien
acacatttgaacgtgttcagtgacc

SEQ ID NO: 30853 - DNA, 25 bp, Homo sapien
tttcctaagaaggtactctcggtct

SEQ ID NO: 30854 - DNA, 25 bp, Homo sapien
tttcctaagaagctactctcggtct

SEQ ID NO: 30855 - DNA, 25 bp, Homo sapien
ccttctgtgtctaggaacctttttt

SEQ ID NO: 30856 - DNA, 25 bp, Homo sapien
ccttctgtgtcttggaacctttttt

SEQ ID NO: 30857 - DNA, 25 bp, Homo sapien
cctactctgtttgtaagggtttctc

SEQ ID NO: 30858 - DNA, 25 bp, Homo sapien
cctactctgtttctaagggtttctc

SEQ ID NO: 30859 - DNA, 25 bp, Homo sapien
atttagagtcccttaaggataacac

SEQ ID NO: 30860 - DNA, 25 bp, Homo sapien
atttagagtcccataaggataacac

SEQ ID NO: 30861 - DNA, 25 bp, Homo sapien
tcgaagaatcacatgaggagctctc

SEQ ID NO: 30862 - DNA, 25 bp, Homo sapien
tcgaagaatcacttgaggagctctc

SEQ ID NO: 30863 - DNA, 25 bp, Homo sapien
ggttaaagcacagatccgtgtagac

SEQ ID NO: 30864 - DNA, 25 bp, Homo sapien
ggttaaagcacacatccgtgtagac

SEQ ID NO: 30865 - DNA, 25 bp, Homo sapien
tcgtcaagactaaagagtaccctta

SEQ ID NO: 30866 - DNA, 25 bp, Homo sapien
tcgtcaagactatagagtaccctta

SEQ ID NO: 30867 - DNA, 25 bp, Homo sapien
aagagcagacagaagagacacttta

SEQ ID NO: 30868 - DNA, 25 bp, Homo sapien
aagagcagacagtagagacacttta

SEQ ID NO: 30869 - DNA, 25 bp, Homo sapien
atcgagttaagaacgacagatatca

SEQ ID NO: 30870 - DNA, 25 bp, Homo sapien
atcgagttaagatcgacagatatca

SEQ ID NO: 30871 - DNA, 25 bp, Homo sapien
tcggttcaccgagcaggtacgatat

SEQ ID NO: 30872 - DNA, 25 bp, Homo sapien
tcggttcaccgaccaggtacgatat

SEQ ID NO: 30873 - DNA, 25 bp, Homo sapien
ccggtaacctgttccggtgatacgt

SEQ ID NO: 30874 - DNA, 25 bp, Homo sapien
ccggtaacctgtaccggtgatacgt

SEQ ID NO: 30875 - DNA, 25 bp, Homo sapien
cccgtaacatcgactaggacagtct

SEQ ID NO: 30876 - DNA, 25 bp, Homo sapien
cccgtaacatcgtctaggacagtct

SEQ ID NO: 30877 - DNA, 25 bp, Homo sapien
gtccgtccaactgacgaagtactga

SEQ ID NO: 30878 - DNA, 25 bp, Homo sapien
gtccgtccaactcacgaagtactga

SEQ ID NO: 30879 - DNA, 25 bp, Homo sapien
catcgtgtactgatcacaccgttca

SEQ ID NO: 30880 - DNA, 25 bp, Homo sapien
catcgtgtactgttcacaccgttca

SEQ ID NO: 30881 - DNA, 25 bp, Homo sapien
atcgtttgagaatcgtcgttcgtct

SEQ ID NO: 30882 - DNA, 25 bp, Homo sapien
atcgtttgagaaacgtcgttcgtct

SEQ ID NO: 30883 - DNA, 25 bp, Homo sapien
ctgtgaatcttctccgtttagatca

SEQ ID NO: 30884 - DNA, 25 bp, Homo sapien
ctgtgaatcttcaccgtttagatca

SEQ ID NO: 30885 - DNA, 25 bp, Homo sapien
tacctaattctttacattattttca

SEQ ID NO: 30886 - DNA, 25 bp, Homo sapien
tacctaattcttaacattattttca

SEQ ID NO: 30887 - DNA, 25 bp, Homo sapien
aatccatttttactatattacttta

SEQ ID NO: 30888 - DNA, 25 bp, Homo sapien
aatccatttttagtatattacttta

SEQ ID NO: 30889 - DNA, 25 bp, Homo sapien
aggacctaccatgactccactgaac

SEQ ID NO: 30890 - DNA, 25 bp, Homo sapien
aggacctaccatcactccactgaac

SEQ ID NO: 30891 - DNA, 25 bp, Homo sapien
cgagtgaagaacctctcgaactgaa

SEQ ID NO: 30892 - DNA, 25 bp, Homo sapien
cgagtgaagaacgtctcgaactgaa

SEQ ID NO: 30893 - DNA, 25 bp, Homo sapien
ctgcttgggttcctccgagttcgaa

SEQ ID NO: 30894 - DNA, 25 bp, Homo sapien
ctgcttgggttcgtccgagttcgaa

SEQ ID NO: 30895 - DNA, 25 bp, Homo sapien
ggacaagaacttcgacattcctaac

SEQ ID NO: 30896 - DNA, 25 bp, Homo sapien
ggacaagaacttggacattcctaac

SEQ ID NO: 30897 - DNA, 25 bp, Homo sapien
ggagaactcatcaaacatgaccaga

SEQ ID NO: 30898 - DNA, 25 bp, Homo sapien
ggagaactcatctaacatgaccaga

SEQ ID NO: 30899 - DNA, 25 bp, Homo sapien
gacttccacggaacacagaactcaa

SEQ ID NO: 30900 - DNA, 25 bp, Homo sapien
gacttccacggatcacagaactcaa

SEQ ID NO: 30901 - DNA, 25 bp, Homo sapien
gatttcagacaccacttaagtcaag

SEQ ID NO: 30902 - DNA, 25 bp, Homo sapien
gatttcagacacgacttaagtcaag

SEQ ID NO: 30903 - DNA, 25 bp, Homo sapien
tcatagaagacaatgtgttccggac

SEQ ID NO: 30904 - DNA, 25 bp, Homo sapien
tcatagaagacattgtgttccggac

SEQ ID NO: 30905 - DNA, 25 bp, Homo sapien
ctacgtacgggtcctgaagtccttc

SEQ ID NO: 30906 - DNA, 25 bp, Homo sapien
ctacgtacgggtgctgaagtccttc

SEQ ID NO: 30907 - DNA, 25 bp, Homo sapien
aacgtggattatcagatctggacac

SEQ ID NO: 30908 - DNA, 25 bp, Homo sapien
aacgtggattatgagatctggacac

SEQ ID NO: 30909 - DNA, 25 bp, Homo sapien
tttaagacgtcgtcggatttctata

SEQ ID NO: 30910 - DNA, 25 bp, Homo sapien
tttaagacgtcgacggatttctata

SEQ ID NO: 30911 - DNA, 25 bp, Homo sapien
agaacgacttcaagtctgttaactt

SEQ ID NO: 30912 - DNA, 25 bp, Homo sapien
agaacgacttcatgtctgttaactt

SEQ ID NO: 30913 - DNA, 25 bp, Homo sapien
gaccgtcgttaatctcgtctcccgt

SEQ ID NO: 30914 - DNA, 25 bp, Homo sapien
gaccgtcgttaaactcgtctcccgt

SEQ ID NO: 30915 - DNA, 25 bp, Homo sapien
ggtcttctttacaagtcctactctg

SEQ ID NO: 30916 - DNA, 25 bp, Homo sapien
ggtcttctttactagtcctactctg

SEQ ID NO: 30917 - DNA, 25 bp, Homo sapien
ctccgtcgtctcaacttctaggtgt

SEQ ID NO: 30918 - DNA, 25 bp, Homo sapien
ctccgtcgtctctacttctaggtgt

SEQ ID NO: 30919 - DNA, 25 bp, Homo sapien
cccctactgtaggttgagtcctcca

SEQ ID NO: 30920 - DNA, 25 bp, Homo sapien
cccctactgtagcttgagtcctcca

SEQ ID NO: 30921 - DNA, 25 bp, Homo sapien
cccaacgtagactttgtctcattgt

SEQ ID NO: 30922 - DNA, 25 bp, Homo sapien
cccaacgtagacattgtctcattgt

SEQ ID NO: 30923 - DNA, 25 bp, Homo sapien
gaacgttcactatgtactagatatt

SEQ ID NO: 30924 - DNA, 25 bp, Homo sapien
gaacgttcactaagtactagatatt

SEQ ID NO: 30925 - DNA, 25 bp, Homo sapien
tctatttacgtctagactgacagag

SEQ ID NO: 30926 - DNA, 25 bp, Homo sapien
tctatttacgtcaagactgacagag

SEQ ID NO: 30927 - DNA, 25 bp, Homo sapien
cctcttcgtctacgaagacctaaat

SEQ ID NO: 30928 - DNA, 25 bp, Homo sapien
cctcttcgtctaggaagacctaaat

SEQ ID NO: 30929 - DNA, 25 bp, Homo sapien
ggtctactgggaagtacagtcaagt

SEQ ID NO: 30930 - DNA, 25 bp, Homo sapien
ggtctactgggatgtacagtcaagt

SEQ ID NO: 30931 - DNA, 25 bp, Homo sapien
tactggtcttgggcccgtgtcaggt

SEQ ID NO: 30932 - DNA, 25 bp, Homo sapien
tactggtcttggccccgtgtcaggt

SEQ ID NO: 30933 - DNA, 25 bp, Homo sapien
cagttctcgtcaaacataacgttgg

SEQ ID NO: 30934 - DNA, 25 bp, Homo sapien
cagttctcgtcatacataacgttgg

SEQ ID NO: 30935 - DNA, 25 bp, Homo sapien
accgatatctcgtaaataacgtttg

SEQ ID NO: 30936 - DNA, 25 bp, Homo sapien
accgatatctcgaaaataacgtttg

SEQ ID NO: 30937 - DNA, 25 bp, Homo sapien
atagagtgactccagtgaagtgtcc

SEQ ID NO: 30938 - DNA, 25 bp, Homo sapien
atagagtgactcgagtgaagtgtcc

SEQ ID NO: 30939 - DNA, 25 bp, Homo sapien
ctttaggtctcactgaggatattaa

SEQ ID NO: 30940 - DNA, 25 bp, Homo sapien
ctttaggtctcagtgaggatattaa

SEQ ID NO: 30941 - DNA, 25 bp, Homo sapien
ttacgtcataccgtcgtaaaagaaa

SEQ ID NO: 30942 - DNA, 25 bp, Homo sapien
ttacgtcataccctcgtaaaagaaa

SEQ ID NO: 30943 - DNA, 25 bp, Homo sapien
ttgtctttaaccagaatcaaagagt

SEQ ID NO: 30944 - DNA, 25 bp, Homo sapien
ttgtctttaacctgaatcaaagagt

SEQ ID NO: 30945 - DNA, 25 bp, Homo sapien
atagtgtcaatgtgaactcaagaac

SEQ ID NO: 30946 - DNA, 25 bp, Homo sapien
atagtgtcaatgagaactcaagaac

SEQ ID NO: 30947 - DNA, 25 bp, Homo sapien
ttctgaagtgtttacacaactgttg

SEQ ID NO: 30948 - DNA, 25 bp, Homo sapien
ttctgaagtgttaacacaactgttg

SEQ ID NO: 30949 - DNA, 25 bp, Homo sapien
aaaccaagggtactgtaactgtctc

SEQ ID NO: 30950 - DNA, 25 bp, Homo sapien
aaaccaagggtagtgtaactgtctc

SEQ ID NO: 30951 - DNA, 25 bp, Homo sapien
cgtccaaatgtaccttggacgaccg

SEQ ID NO: 30952 - DNA, 25 bp, Homo sapien
cgtccaaatgtagcttggacgaccg

SEQ ID NO: 30953 - DNA, 25 bp, Homo sapien
ttaaacagtgtaacccggacgtaat

SEQ ID NO: 30954 - DNA, 25 bp, Homo sapien
ttaaacagtgtatcccggacgtaat

SEQ ID NO: 30955 - DNA, 25 bp, Homo sapien
tgacctgtgaaggttccgggcgtca

SEQ ID NO: 30956 - DNA, 25 bp, Homo sapien
tgacctgtgaagcttccgggcgtca

SEQ ID NO: 30957 - DNA, 25 bp, Homo sapien
ctctgctcttagttcgacctggaca

SEQ ID NO: 30958 - DNA, 25 bp, Homo sapien
ctctgctcttagatcgacctggaca

SEQ ID NO: 30959 - DNA, 25 bp, Homo sapien
agcgctgtcacgtcgcacgccggag

SEQ ID NO: 30960 - DNA, 25 bp, Homo sapien
agcgctgtcacgacgcacgccggag

SEQ ID NO: 30961 - DNA, 25 bp, Homo sapien
aaggttactaacacgggtctaggtg

SEQ ID NO: 30962 - DNA, 25 bp, Homo sapien
aaggttactaactcgggtctaggtg

SEQ ID NO: 30963 - DNA, 25 bp, Homo sapien
aggtcgaccctcagggtcagtcgtg

SEQ ID NO: 30964 - DNA, 25 bp, Homo sapien
aggtcgaccctctgggtcagtcgtg

SEQ ID NO: 30965 - DNA, 25 bp, Homo sapien
gcggagaccggcatggtgaccgtag

SEQ ID NO: 30966 - DNA, 25 bp, Homo sapien
gcggagaccggcttggtgaccgtag

SEQ ID NO: 30967 - DNA, 25 bp, Homo sapien
aagggtactgatgattctctcaaca

SEQ ID NO: 30968 - DNA, 25 bp, Homo sapien
aagggtactgatcattctctcaaca

SEQ ID NO: 30969 - DNA, 25 bp, Homo sapien
aagggaccggacaccgtaacacaac

SEQ ID NO: 30970 - DNA, 25 bp, Homo sapien
aagggaccggactccgtaacacaac

SEQ ID NO: 30971 - DNA, 25 bp, Homo sapien
ggagaaagggcgactgactacctcc

SEQ ID NO: 30972 - DNA, 25 bp, Homo sapien
ggagaaagggcgtctgactacctcc

SEQ ID NO: 30973 - DNA, 25 bp, Homo sapien
tggaagagggccatgtcgaccacct

SEQ ID NO: 30974 - DNA, 25 bp, Homo sapien
tggaagagggccttgtcgaccacct

SEQ ID NO: 30975 - DNA, 25 bp, Homo sapien
gggaggtacccgacagataactcct

SEQ ID NO: 30976 - DNA, 25 bp, Homo sapien
gggaggtacccgtcagataactcct

SEQ ID NO: 30977 - DNA, 25 bp, Homo sapien
gtggtgaccggcttctattacttcg

SEQ ID NO: 30978 - DNA, 25 bp, Homo sapien
gtggtgaccggcatctattacttcg

SEQ ID NO: 30979 - DNA, 25 bp, Homo sapien
ggggtgtaggagactacttcggtac

SEQ ID NO: 30980 - DNA, 25 bp, Homo sapien
ggggtgtaggagtctacttcggtac

SEQ ID NO: 30981 - DNA, 25 bp, Homo sapien
gatcctaagtcaacggtttactggt

SEQ ID NO: 30982 - DNA, 25 bp, Homo sapien
gatcctaagtcatcggtttactggt

SEQ ID NO: 30983 - DNA, 25 bp, Homo sapien
gacgtcttaaggtcaagtcttcggt

SEQ ID NO: 30984 - DNA, 25 bp, Homo sapien
gacgtcttaaggacaagtcttcggt

SEQ ID NO: 30985 - DNA, 25 bp, Homo sapien
cggtcacgagtcaccggtccgtcgg

SEQ ID NO: 30986 - DNA, 25 bp, Homo sapien
cggtcacgagtctccggtccgtcgg

SEQ ID NO: 30987 - DNA, 25 bp, Homo sapien
gatcgcttctaacgtagctgtgtgt

SEQ ID NO: 30988 - DNA, 25 bp, Homo sapien
gatcgcttctaaggtagctgtgtgt

SEQ ID NO: 30989 - DNA, 25 bp, Homo sapien
agggactagatcaaatgcactgtaa

SEQ ID NO: 30990 - DNA, 25 bp, Homo sapien
agggactagatctaatgcactgtaa

SEQ ID NO: 30991 - DNA, 25 bp, Homo sapien
cgtaagacccccaatagcgaggaag

SEQ ID NO: 30992 - DNA, 25 bp, Homo sapien
cgtaagaccccctatagcgaggaag

SEQ ID NO: 30993 - DNA, 25 bp, Homo sapien
gactaaaccccattctgtggtcaac

SEQ ID NO: 30994 - DNA, 25 bp, Homo sapien
gactaaaccccaatctgtggtcaac

SEQ ID NO: 30995 - DNA, 25 bp, Homo sapien
cgaaaacgacttacaattggtcctt

SEQ ID NO: 30996 - DNA, 25 bp, Homo sapien
cgaaaacgactttcaattggtcctt

SEQ ID NO: 30997 - DNA, 25 bp, Homo sapien
gaacccccatttttctgtgctcagt

SEQ ID NO: 30998 - DNA, 25 bp, Homo sapien
gaacccccatttatctgtgctcagt

SEQ ID NO: 30999 - DNA, 25 bp, Homo sapien
tctcacccaggctctctggatacgt

SEQ ID NO: 31000 - DNA, 25 bp, Homo sapien
tctcacccaggcactctggatacgt

SEQ ID NO: 31001 - DNA, 25 bp, Homo sapien
agtccgttcctggaaggtcaggatg

SEQ ID NO: 31002 - DNA, 25 bp, Homo sapien
agtccgttcctgcaaggtcaggatg

SEQ ID NO: 31003 - DNA, 25 bp, Homo sapien
aaacatgtaaaggcgggggtcggct

SEQ ID NO: 31004 - DNA, 25 bp, Homo sapien
aaacatgtaaagccgggggtcggct

SEQ ID NO: 31005 - DNA, 25 bp, Homo sapien
ccttatgtacggaccgggaggacac

SEQ ID NO: 31006 - DNA, 25 bp, Homo sapien
ccttatgtacggtccgggaggacac

SEQ ID NO: 31007 - DNA, 25 bp, Homo sapien
ccgaccttcacagttttctaaggaa

SEQ ID NO: 31008 - DNA, 25 bp, Homo sapien
ccgaccttcacacttttctaaggaa

SEQ ID NO: 31009 - DNA, 25 bp, Homo sapien
gtaaaacaatctcgacctctaggaa

SEQ ID NO: 31010 - DNA, 25 bp, Homo sapien
gtaaaacaatctggacctctaggaa

SEQ ID NO: 31011 - DNA, 25 bp, Homo sapien
gaagtaccaccgtgcgcctggcaga

SEQ ID NO: 31012 - DNA, 25 bp, Homo sapien
gaagtaccaccgagcgcctggcaga

SEQ ID NO: 31013 - DNA, 25 bp, Homo sapien
ttgatacagtcctcctatgtccaga

SEQ ID NO: 31014 - DNA, 25 bp, Homo sapien
ttgatacagtccacctatgtccaga

SEQ ID NO: 31015 - DNA, 25 bp, Homo sapien
ttgcaagtatgctttagttccgaac

SEQ ID NO: 31016 - DNA, 25 bp, Homo sapien
ttgcaagtatgcattagttccgaac

SEQ ID NO: 31017 - DNA, 25 bp, Homo sapien
agacgaataatctttgttaccagac

SEQ ID NO: 31018 - DNA, 25 bp, Homo sapien
agacgaataatcattgttaccagac

SEQ ID NO: 31019 - DNA, 25 bp, Homo sapien
tatatagtcgctttgtatacgtcaa

SEQ ID NO: 31020 - DNA, 25 bp, Homo sapien
tatatagtcgctatgtatacgtcaa

SEQ ID NO: 31021 - DNA, 25 bp, Homo sapien
agtgtatcttagaccttgagttgac

SEQ ID NO: 31022 - DNA, 25 bp, Homo sapien
agtgtatcttagtccttgagttgac

SEQ ID NO: 31023 - DNA, 25 bp, Homo sapien
gagacggttgatcacggtgattaac

SEQ ID NO: 31024 - DNA, 25 bp, Homo sapien
gagacggttgatgacggtgattaac

SEQ ID NO: 31025 - DNA, 25 bp, Homo sapien
taaaacgattccttaccgggcgatc

SEQ ID NO: 31026 - DNA, 25 bp, Homo sapien
taaaacgattccataccgggcgatc

SEQ ID NO: 31027 - DNA, 25 bp, Homo sapien
tattaagttaatacactgtttcggc

SEQ ID NO: 31028 - DNA, 25 bp, Homo sapien
tattaagttaattcactgtttcggc

SEQ ID NO: 31029 - DNA, 25 bp, Homo sapien
ccgagttactttcctattagaggta

SEQ ID NO: 31030 - DNA, 25 bp, Homo sapien
ccgagttactttgctattagaggta

SEQ ID NO: 31031 - DNA, 25 bp, Homo sapien
atgtagactctcgtgtcgacaggac

SEQ ID NO: 31032 - DNA, 25 bp, Homo sapien
atgtagactctcctgtcgacaggac

SEQ ID NO: 31033 - DNA, 25 bp, Homo sapien
cacaaccggtccttgcccgtagtaa

SEQ ID NO: 31034 - DNA, 25 bp, Homo sapien
cacaaccggtccatgcccgtagtaa

SEQ ID NO: 31035 - DNA, 25 bp, Homo sapien
gccatccatccatcacatgtctaac

SEQ ID NO: 31036 - DNA, 25 bp, Homo sapien
gccatccatccaacacatgtctaac

SEQ ID NO: 31037 - DNA, 25 bp, Homo sapien
cctctcagtgtcgacaggtctggac

SEQ ID NO: 31038 - DNA, 25 bp, Homo sapien
cctctcagtgtccacaggtctggac

SEQ ID NO: 31039 - DNA, 25 bp, Homo sapien
ttcgactccatgtgtacagcccaac

SEQ ID NO: 31040 - DNA, 25 bp, Homo sapien
ttcgactccatgagtacagcccaac

SEQ ID NO: 31041 - DNA, 25 bp, Homo sapien
acgactcacattgtcgaccaagggt

SEQ ID NO: 31042 - DNA, 25 bp, Homo sapien
acgactcacattctcgaccaagggt

SEQ ID NO: 31043 - DNA, 25 bp, Homo sapien
tcttccctttagttgacaccaggac

SEQ ID NO: 31044 - DNA, 25 bp, Homo sapien
tcttccctttagatgacaccaggac

SEQ ID NO: 31045 - DNA, 25 bp, Homo sapien
gtccaccttccgtctgagtcttaaa

SEQ ID NO: 31046 - DNA, 25 bp, Homo sapien
gtccaccttccgactgagtcttaaa

SEQ ID NO: 31047 - DNA, 25 bp, Homo sapien
cggtcctagacaagagacacttcga

SEQ ID NO: 31048 - DNA, 25 bp, Homo sapien
cggtcctagacatgagacacttcga

SEQ ID NO: 31049 - DNA, 25 bp, Homo sapien
aagtatccacagatgacaacttgat

SEQ ID NO: 31050 - DNA, 25 bp, Homo sapien
aagtatccacagttgacaacttgat

SEQ ID NO: 31051 - DNA, 25 bp, Homo sapien
cgcacgacgtgttacgtcgtcatca

SEQ ID NO: 31052 - DNA, 25 bp, Homo sapien
cgcacgacgtgtaacgtcgtcatca

SEQ ID NO: 31053 - DNA, 25 bp, Homo sapien
cctctacgtcgtcagtcgtgatcat

SEQ ID NO: 31054 - DNA, 25 bp, Homo sapien
cctctacgtcgtgagtcgtgatcat

SEQ ID NO: 31055 - DNA, 25 bp, Homo sapien
atgtcttcggtttacatcggggtcg

SEQ ID NO: 31056 - DNA, 25 bp, Homo sapien
atgtcttcggttaacatcggggtcg

SEQ ID NO: 31057 - DNA, 25 bp, Homo sapien
gacttgttgacttacaaccggtagg

SEQ ID NO: 31058 - DNA, 25 bp, Homo sapien
gacttgttgactaacaaccggtagg

SEQ ID NO: 31059 - DNA, 25 bp, Homo sapien
tgtgatatgttccaaacaacttatg

SEQ ID NO: 31060 - DNA, 25 bp, Homo sapien
tgtgatatgttcgaaacaacttatg

SEQ ID NO: 31061 - DNA, 25 bp, Homo sapien
acgttgttgagttcataatgactcg

SEQ ID NO: 31062 - DNA, 25 bp, Homo sapien
acgttgttgagtacataatgactcg

SEQ ID NO: 31063 - DNA, 25 bp, Homo sapien
ggttatgaatataatcgatcgtccg

SEQ ID NO: 31064 - DNA, 25 bp, Homo sapien
ggttatgaatattatcgatcgtccg

SEQ ID NO: 31065 - DNA, 25 bp, Homo sapien
tatgttcgttgttgtatacgacgac

SEQ ID NO: 31066 - DNA, 25 bp, Homo sapien
tatgttcgttgtagtatacgacgac

SEQ ID NO: 31067 - DNA, 25 bp, Homo sapien
tccacatcgattggactgtcatcga

SEQ ID NO: 31068 - DNA, 25 bp, Homo sapien
tccacatcgattcgactgtcatcga

SEQ ID NO: 31069 - DNA, 25 bp, Homo sapien
cctgctaccgactttccttacttgg

SEQ ID NO: 31070 - DNA, 25 bp, Homo sapien
cctgctaccgacattccttacttgg

SEQ ID NO: 31071 - DNA, 25 bp, Homo sapien
tcagctcacaatctcacgtcctagg

SEQ ID NO: 31072 - DNA, 25 bp, Homo sapien
tcagctcacaatgtcacgtcctagg

SEQ ID NO: 31073 - DNA, 25 bp, Homo sapien
tattttataagaataagccttcaga

SEQ ID NO: 31074 - DNA, 25 bp, Homo sapien
tattttataagattaagccttcaga

SEQ ID NO: 31075 - DNA, 25 bp, Homo sapien
ttttaaaaggtcgtcctagtttcac

SEQ ID NO: 31076 - DNA, 25 bp, Homo sapien
ttttaaaaggtcctcctagtttcac

SEQ ID NO: 31077 - DNA, 25 bp, Homo sapien
ttttataagaaagttctgtgccacg

SEQ ID NO: 31078 - DNA, 25 bp, Homo sapien
ttttataagaaacttctgtgccacg

SEQ ID NO: 31079 - DNA, 25 bp, Homo sapien
actcaagaaccgtatgaggtccgag

SEQ ID NO: 31080 - DNA, 25 bp, Homo sapien
actcaagaaccgaatgaggtccgag

SEQ ID NO: 31081 - DNA, 25 bp, Homo sapien
ctccgtaactatcacctttggagtg

SEQ ID NO: 31082 - DNA, 25 bp, Homo sapien
ctccgtaactatgacctttggagtg

SEQ ID NO: 31083 - DNA, 25 bp, Homo sapien
attcatactctttaacaatcgcaag

SEQ ID NO: 31084 - DNA, 25 bp, Homo sapien
attcatactcttaaacaatcgcaag

SEQ ID NO: 31085 - DNA, 25 bp, Homo sapien
aatccacccttaagacccggagcga

SEQ ID NO: 31086 - DNA, 25 bp, Homo sapien
aatccacccttatgacccggagcga

SEQ ID NO: 31087 - DNA, 25 bp, Homo sapien
tgagtcctactgtcccgtcggagga

SEQ ID NO: 31088 - DNA, 25 bp, Homo sapien
tgagtcctactgacccgtcggagga

SEQ ID NO: 31089 - DNA, 25 bp, Homo sapien
tgaagcctctgcagcctcggaagag

SEQ ID NO: 31090 - DNA, 25 bp, Homo sapien
tgaagcctctgctgcctcggaagag

SEQ ID NO: 31091 - DNA, 25 bp, Homo sapien
tagaaagtctctaacggtaaatcgg

SEQ ID NO: 31092 - DNA, 25 bp, Homo sapien
tagaaagtctcttacggtaaatcgg

SEQ ID NO: 31093 - DNA, 25 bp, Homo sapien
gagaagtacacgagactagaacaga

SEQ ID NO: 31094 - DNA, 25 bp, Homo sapien
gagaagtacacgtgactagaacaga

SEQ ID NO: 31095 - DNA, 25 bp, Homo sapien
ttcagaagaccaggtgtacgcaaag

SEQ ID NO: 31096 - DNA, 25 bp, Homo sapien
ttcagaagaccacgtgtacgcaaag

SEQ ID NO: 31097 - DNA, 25 bp, Homo sapien
taaactagaacacgtttctgagact

SEQ ID NO: 31098 - DNA, 25 bp, Homo sapien
taaactagaacaggtttctgagact

SEQ ID NO: 31099 - DNA, 25 bp, Homo sapien
aacacacgatatttcgtgttacgat

SEQ ID NO: 31100 - DNA, 25 bp, Homo sapien
aacacacgatatatcgtgttacgat

SEQ ID NO: 31101 - DNA, 25 bp, Homo sapien
gctcaaacgcggacggtatttcgtg

SEQ ID NO: 31102 - DNA, 25 bp, Homo sapien
gctcaaacgcggtcggtatttcgtg

SEQ ID NO: 31103 - DNA, 25 bp, Homo sapien
ttgtctgagtccgctacacgaaata

SEQ ID NO: 31104 - DNA, 25 bp, Homo sapien
ttgtctgagtcccctacacgaaata

SEQ ID NO: 31105 - DNA, 25 bp, Homo sapien
agggtctttcagatataagtctttc

SEQ ID NO: 31106 - DNA, 25 bp, Homo sapien
agggtctttcagttataagtctttc

SEQ ID NO: 31107 - DNA, 25 bp, Homo sapien
aggatatacgaattagttgtcctcc

SEQ ID NO: 31108 - DNA, 25 bp, Homo sapien
aggatatacgaaatagttgtcctcc

SEQ ID NO: 31109 - DNA, 25 bp, Homo sapien
gtagattcaatgttatgtcttctct

SEQ ID NO: 31110 - DNA, 25 bp, Homo sapien
gtagattcaatgatatgtcttctct

SEQ ID NO: 31111 - DNA, 25 bp, Homo sapien
gagtattcgaaaacggacgtcacct

SEQ ID NO: 31112 - DNA, 25 bp, Homo sapien
gagtattcgaaatcggacgtcacct

SEQ ID NO: 31113 - DNA, 25 bp, Homo sapien
gcttattctacactcgagtgagcct

SEQ ID NO: 31114 - DNA, 25 bp, Homo sapien
gcttattctacagtcgagtgagcct

SEQ ID NO: 31115 - DNA, 25 bp, Homo sapien
gttttagtcgtaaaacgaaatacct

SEQ ID NO: 31116 - DNA, 25 bp, Homo sapien
gttttagtcgtataacgaaatacct

SEQ ID NO: 31117 - DNA, 25 bp, Homo sapien
gtcttagacgtattaagaactctca

SEQ ID NO: 31118 - DNA, 25 bp, Homo sapien
gtcttagacgtaataagaactctca

SEQ ID NO: 31119 - DNA, 25 bp, Homo sapien
ccgtccacagtccagtgtgggtccg

SEQ ID NO: 31120 - DNA, 25 bp, Homo sapien
ccgtccacagtcgagtgtgggtccg

SEQ ID NO: 31121 - DNA, 25 bp, Homo sapien
gcgtccatcgtggtcgtcgggtcct

SEQ ID NO: 31122 - DNA, 25 bp, Homo sapien
gcgtccatcgtgctcgtcgggtcct

SEQ ID NO: 31123 - DNA, 25 bp, Homo sapien
cgtatgtatacgtcgaattagtgtc

SEQ ID NO: 31124 - DNA, 25 bp, Homo sapien
cgtatgtatacgacgaattagtgtc

SEQ ID NO: 31125 - DNA, 25 bp, Homo sapien
gttgtgtactccagacgtgtgtgtc

SEQ ID NO: 31126 - DNA, 25 bp, Homo sapien
gttgtgtactcctgacgtgtgtgtc

SEQ ID NO: 31127 - DNA, 25 bp, Homo sapien
caacgtgtaaacgagtacgtgtacc

SEQ ID NO: 31128 - DNA, 25 bp, Homo sapien
caacgtgtaaaccagtacgtgtacc

SEQ ID NO: 31129 - DNA, 25 bp, Homo sapien
aagagtgtaagaaccgtgagtcact

SEQ ID NO: 31130 - DNA, 25 bp, Homo sapien
aagagtgtaagatccgtgagtcact

SEQ ID NO: 31131 - DNA, 25 bp, Homo sapien
tagtgtaagtaagaccggtagacct

SEQ ID NO: 31132 - DNA, 25 bp, Homo sapien
tagtgtaagtaacaccggtagacct

SEQ ID NO: 31133 - DNA, 25 bp, Homo sapien
tttagtgtcagatcgaccagtgacc

SEQ ID NO: 31134 - DNA, 25 bp, Homo sapien
tttagtgtcagaacgaccagtgacc

SEQ ID NO: 31135 - DNA, 25 bp, Homo sapien
aaagaaacgtcaacgcacgagatct

SEQ ID NO: 31136 - DNA, 25 bp, Homo sapien
aaagaaacgtcatcgcacgagatct

SEQ ID NO: 31137 - DNA, 25 bp, Homo sapien
tgacttattgttgaaacgacgactt

SEQ ID NO: 31138 - DNA, 25 bp, Homo sapien
tgacttattgttcaaacgacgactt

SEQ ID NO: 31139 - DNA, 25 bp, Homo sapien
tctgtctgtctctttcaagagtcaa

SEQ ID NO: 31140 - DNA, 25 bp, Homo sapien
tctgtctgtctcattcaagagtcaa

SEQ ID NO: 31141 - DNA, 25 bp, Homo sapien
tttgtctctctgtacatggaattat

SEQ ID NO: 31142 - DNA, 25 bp, Homo sapien
tttgtctctctgaacatggaattat

SEQ ID NO: 31143 - DNA, 25 bp, Homo sapien
ctgaaaatagaattgtgacacactt

SEQ ID NO: 31144 - DNA, 25 bp, Homo sapien
ctgaaaatagaaatgtgacacactt

SEQ ID NO: 31145 - DNA, 25 bp, Homo sapien
gacgggactgacgtatttacaactt

SEQ ID NO: 31146 - DNA, 25 bp, Homo sapien
gacgggactgacctatttacaactt

SEQ ID NO: 31147 - DNA, 25 bp, Homo sapien
tagggtaaacagacactactctaca

SEQ ID NO: 31148 - DNA, 25 bp, Homo sapien
tagggtaaacagtcactactctaca

SEQ ID NO: 31149 - DNA, 25 bp, Homo sapien
ctagcagtaaagaatgtcgttatcc

SEQ ID NO: 31150 - DNA, 25 bp, Homo sapien
ctagcagtaaagtatgtcgttatcc

SEQ ID NO: 31151 - DNA, 25 bp, Homo sapien
agaaaggacacgttattccatactc

SEQ ID NO: 31152 - DNA, 25 bp, Homo sapien
agaaaggacacgatattccatactc

SEQ ID NO: 31153 - DNA, 25 bp, Homo sapien
tatcaaaagtgtgtagttcacattc

SEQ ID NO: 31154 - DNA, 25 bp, Homo sapien
tatcaaaagtgtctagttcacattc

SEQ ID NO: 31155 - DNA, 25 bp, Homo sapien
atgacaccgttcatccgaggaacgt

SEQ ID NO: 31156 - DNA, 25 bp, Homo sapien
atgacaccgttcttccgaggaacgt

SEQ ID NO: 31157 - DNA, 25 bp, Homo sapien
tcgttcaccgtcctttcacgagatt

SEQ ID NO: 31158 - DNA, 25 bp, Homo sapien
tcgttcaccgtcgtttcacgagatt

SEQ ID NO: 31159 - DNA, 25 bp, Homo sapien
gttactcctattcaccagagacgag

SEQ ID NO: 31160 - DNA, 25 bp, Homo sapien
gttactcctattgaccagagacgag

SEQ ID NO: 31161 - DNA, 25 bp, Homo sapien
agtctacacctctgtagaccacaag

SEQ ID NO: 31162 - DNA, 25 bp, Homo sapien
agtctacacctcagtagaccacaag

SEQ ID NO: 31163 - DNA, 25 bp, Homo sapien
agtttcacgtccacgcgatcgaaag

SEQ ID NO: 31164 - DNA, 25 bp, Homo sapien
agtttcacgtcctcgcgatcgaaag

SEQ ID NO: 31165 - DNA, 25 bp, Homo sapien
tgtcgaccttttcgtacagagtaag

SEQ ID NO: 31166 - DNA, 25 bp, Homo sapien
tgtcgaccttttggtacagagtaag

SEQ ID NO: 31167 - DNA, 25 bp, Homo sapien
tccgcgttctcgtcgtaggtgtagg

SEQ ID NO: 31168 - DNA, 25 bp, Homo sapien
tccgcgttctcgacgtaggtgtagg

SEQ ID NO: 31169 - DNA, 25 bp, Homo sapien
cctttacctgagacgtgtgtgtgat

SEQ ID NO: 31170 - DNA, 25 bp, Homo sapien
cctttacctgagtcgtgtgtgtgat

SEQ ID NO: 31171 - DNA, 25 bp, Homo sapien
accgctgtagaatgatgtcgtcact

SEQ ID NO: 31172 - DNA, 25 bp, Homo sapien
accgctgtagaaagatgtcgtcact

SEQ ID NO: 31173 - DNA, 25 bp, Homo sapien
acgtcagtggtctccggggtccgac

SEQ ID NO: 31174 - DNA, 25 bp, Homo sapien
acgtcagtggtcaccggggtccgac

SEQ ID NO: 31175 - DNA, 25 bp, Homo sapien
gctctgggtagaaccgggcgaactc

SEQ ID NO: 31176 - DNA, 25 bp, Homo sapien
gctctgggtagatccgggcgaactc

SEQ ID NO: 31177 - DNA, 25 bp, Homo sapien
catttcgaggctgacgtggttcatg

SEQ ID NO: 31178 - DNA, 25 bp, Homo sapien
catttcgaggctcacgtggttcatg

SEQ ID NO: 31179 - DNA, 25 bp, Homo sapien
acccccggagacaggtggctactag

SEQ ID NO: 31180 - DNA, 25 bp, Homo sapien
acccccggagactggtggctactag

SEQ ID NO: 31181 - DNA, 25 bp, Homo sapien
ctctcggtccgactggtctggtctc

SEQ ID NO: 31182 - DNA, 25 bp, Homo sapien
ctctcggtccgagtggtctggtctc

SEQ ID NO: 31183 - DNA, 25 bp, Homo sapien
tctctgtacgggtcctcgtccatct

SEQ ID NO: 31184 - DNA, 25 bp, Homo sapien
tctctgtacgggacctcgtccatct

SEQ ID NO: 31185 - DNA, 25 bp, Homo sapien
atcttaagagagacctcctcaccgt

SEQ ID NO: 31186 - DNA, 25 bp, Homo sapien
atcttaagagagtcctcctcaccgt

SEQ ID NO: 31187 - DNA, 25 bp, Homo sapien
taccgaagacggtcctgagtgtaca

SEQ ID NO: 31188 - DNA, 25 bp, Homo sapien
taccgaagacggacctgagtgtaca

SEQ ID NO: 31189 - DNA, 25 bp, Homo sapien
tggtgagcaacttgaacaggtgtca

SEQ ID NO: 31190 - DNA, 25 bp, Homo sapien
tggtgagcaactagaacaggtgtca

SEQ ID NO: 31191 - DNA, 25 bp, Homo sapien
tagaggaactacaagttggcgacga

SEQ ID NO: 31192 - DNA, 25 bp, Homo sapien
tagaggaactactagttggcgacga

SEQ ID NO: 31193 - DNA, 25 bp, Homo sapien
agtgtaaccatgtcttgacggtata

SEQ ID NO: 31194 - DNA, 25 bp, Homo sapien
agtgtaaccatgacttgacggtata

SEQ ID NO: 31195 - DNA, 25 bp, Homo sapien
tagtttcatcactgtctctacaagg

SEQ ID NO: 31196 - DNA, 25 bp, Homo sapien
tagtttcatcacagtctctacaagg

SEQ ID NO: 31197 - DNA, 25 bp, Homo sapien
gtaattgtcagtgcactacttgaaa

SEQ ID NO: 31198 - DNA, 25 bp, Homo sapien
gtaattgtcagtccactacttgaaa

SEQ ID NO: 31199 - DNA, 25 bp, Homo sapien
aggtcatagacaggttgacgacagt

SEQ ID NO: 31200 - DNA, 25 bp, Homo sapien
aggtcatagacacgttgacgacagt

SEQ ID NO: 31201 - DNA, 25 bp, Homo sapien
gtcgacgtagaggaacgaggtttct

SEQ ID NO: 31202 - DNA, 25 bp, Homo sapien
gtcgacgtagagcaacgaggtttct

SEQ ID NO: 31203 - DNA, 25 bp, Homo sapien
ttgatactagactgtcgtggtttct

SEQ ID NO: 31204 - DNA, 25 bp, Homo sapien
ttgatactagacagtcgtggtttct

SEQ ID NO: 31205 - DNA, 25 bp, Homo sapien
acttgcagtaggagtacggactgtc

SEQ ID NO: 31206 - DNA, 25 bp, Homo sapien
acttgcagtaggtgtacggactgtc

SEQ ID NO: 31207 - DNA, 25 bp, Homo sapien
gtatcacgtaagtatcacctgtcgt

SEQ ID NO: 31208 - DNA, 25 bp, Homo sapien
gtatcacgtaagaatcacctgtcgt

SEQ ID NO: 31209 - DNA, 25 bp, Homo sapien
gtgacagtacggaagtgtcttcgtc

SEQ ID NO: 31210 - DNA, 25 bp, Homo sapien
gtgacagtacggtagtgtcttcgtc

SEQ ID NO: 31211 - DNA, 25 bp, Homo sapien
ttaagaagtgtctgtgtacttcgtc

SEQ ID NO: 31212 - DNA, 25 bp, Homo sapien
ttaagaagtgtcagtgtacttcgtc

SEQ ID NO: 31213 - DNA, 25 bp, Homo sapien
caaggacaagatgtcgacttcaaac

SEQ ID NO: 31214 - DNA, 25 bp, Homo sapien
caaggacaagatctcgacttcaaac

SEQ ID NO: 31215 - DNA, 25 bp, Homo sapien
gtcgaatactacgtctaatgacaac

SEQ ID NO: 31216 - DNA, 25 bp, Homo sapien
gtcgaatactacctctaatgacaac

SEQ ID NO: 31217 - DNA, 25 bp, Homo sapien
gacactcctacaagaacttacgaag

SEQ ID NO: 31218 - DNA, 25 bp, Homo sapien
gacactcctacatgaacttacgaag

SEQ ID NO: 31219 - DNA, 25 bp, Homo sapien
tacatatactgagagtcaactgtgt

SEQ ID NO: 31220 - DNA, 25 bp, Homo sapien
tacatatactgacagtcaactgtgt

SEQ ID NO: 31221 - DNA, 25 bp, Homo sapien
gtcaatacgagtctatagacccctc

SEQ ID NO: 31222 - DNA, 25 bp, Homo sapien
gtcaatacgagtgtatagacccctc

SEQ ID NO: 31223 - DNA, 25 bp, Homo sapien
aatagttctcgtgaaccgtctctat

SEQ ID NO: 31224 - DNA, 25 bp, Homo sapien
aatagttctcgtcaaccgtctctat

SEQ ID NO: 31225 - DNA, 25 bp, Homo sapien
gttgagataattactaactctttcg

SEQ ID NO: 31226 - DNA, 25 bp, Homo sapien
gttgagataatttctaactctttcg

SEQ ID NO: 31227 - DNA, 25 bp, Homo sapien
agtaagtatttggacctacgactgc

SEQ ID NO: 31228 - DNA, 25 bp, Homo sapien
agtaagtatttgcacctacgactgc

SEQ ID NO: 31229 - DNA, 25 bp, Homo sapien
cgaggagctactacaaccgactgtc

SEQ ID NO: 31230 - DNA, 25 bp, Homo sapien
cgaggagctacttcaaccgactgtc

SEQ ID NO: 31231 - DNA, 25 bp, Homo sapien
ttccgagaaccagtgagtagtcagc

SEQ ID NO: 31232 - DNA, 25 bp, Homo sapien
ttccgagaaccactgagtagtcagc

SEQ ID NO: 31233 - DNA, 25 bp, Homo sapien
gagacgacccacatcacgaagtgta

SEQ ID NO: 31234 - DNA, 25 bp, Homo sapien
gagacgacccacttcacgaagtgta

SEQ ID NO: 31235 - DNA, 25 bp, Homo sapien
gaaggaaaccagtcctaagagtagt

SEQ ID NO: 31236 - DNA, 25 bp, Homo sapien
gaaggaaaccagacctaagagtagt

SEQ ID NO: 31237 - DNA, 25 bp, Homo sapien
ccgaagacacgctgctatcggtaaa

SEQ ID NO: 31238 - DNA, 25 bp, Homo sapien
ccgaagacacgcagctatcggtaaa

SEQ ID NO: 31239 - DNA, 25 bp, Homo sapien
tgcgaaggacaaggtcaggtagaca

SEQ ID NO: 31240 - DNA, 25 bp, Homo sapien
tgcgaaggacaacgtcaggtagaca

SEQ ID NO: 31241 - DNA, 25 bp, Homo sapien
tccgaagactcagtcgtcgaggggc

SEQ ID NO: 31242 - DNA, 25 bp, Homo sapien
tccgaagactcactcgtcgaggggc

SEQ ID NO: 31243 - DNA, 25 bp, Homo sapien
cgacagtgtctagtagtgtccgtcc

SEQ ID NO: 31244 - DNA, 25 bp, Homo sapien
cgacagtgtctactagtgtccgtcc

SEQ ID NO: 31245 - DNA, 25 bp, Homo sapien
cgtctgaggtcttatttctcctctc

SEQ ID NO: 31246 - DNA, 25 bp, Homo sapien
cgtctgaggtctaatttctcctctc

SEQ ID NO: 31247 - DNA, 25 bp, Homo sapien
tcagaggtgtgaattcacctcacgt

SEQ ID NO: 31248 - DNA, 25 bp, Homo sapien
tcagaggtgtgatttcacctcacgt

SEQ ID NO: 31249 - DNA, 25 bp, Homo sapien
ggagttattgtggtccactcttcgt

SEQ ID NO: 31250 - DNA, 25 bp, Homo sapien
ggagttattgtgctccactcttcgt

SEQ ID NO: 31251 - DNA, 25 bp, Homo sapien
ctggtctctttggtgacgtaatttt

SEQ ID NO: 31252 - DNA, 25 bp, Homo sapien
ctggtctctttgctgacgtaatttt

SEQ ID NO: 31253 - DNA, 25 bp, Homo sapien
gggtcgtctgttgttccgtgtcacc

SEQ ID NO: 31254 - DNA, 25 bp, Homo sapien
gggtcgtctgttcttccgtgtcacc

SEQ ID NO: 31255 - DNA, 25 bp, Homo sapien
aggatcttttggtcactacacgacc

SEQ ID NO: 31256 - DNA, 25 bp, Homo sapien
aggatcttttggacactacacgacc

SEQ ID NO: 31257 - DNA, 25 bp, Homo sapien
aaacgcagtgtttacaccaaaaggt

SEQ ID NO: 31258 - DNA, 25 bp, Homo sapien
aaacgcagtgttaacaccaaaaggt

SEQ ID NO: 31259 - DNA, 25 bp, Homo sapien
tcaaagtagtctaactagaactagg

SEQ ID NO: 31260 - DNA, 25 bp, Homo sapien
tcaaagtagtcttactagaactagg

SEQ ID NO: 31261 - DNA, 25 bp, Homo sapien
tctgaggacgtcttcggagtacagg

SEQ ID NO: 31262 - DNA, 25 bp, Homo sapien
tctgaggacgtcatcggagtacagg

SEQ ID NO: 31263 - DNA, 25 bp, Homo sapien
tcttcgccgtcatcgtgcaccgtgt

SEQ ID NO: 31264 - DNA, 25 bp, Homo sapien
tcttcgccgtcaacgtgcaccgtgt

SEQ ID NO: 31265 - DNA, 25 bp, Homo sapien
gtgctgtgtcttgactcctctcagg

SEQ ID NO: 31266 - DNA, 25 bp, Homo sapien
gtgctgtgtcttcactcctctcagg

SEQ ID NO: 31267 - DNA, 25 bp, Homo sapien
cttggtctgttcctcctgggacgac

SEQ ID NO: 31268 - DNA, 25 bp, Homo sapien
cttggtctgttcgtcctgggacgac

SEQ ID NO: 31269 - DNA, 25 bp, Homo sapien
agacttctagaggacaggatcgtac

SEQ ID NO: 31270 - DNA, 25 bp, Homo sapien
agacttctagagcacaggatcgtac

SEQ ID NO: 31271 - DNA, 25 bp, Homo sapien
ggagaggtcctaaagagtgcccaca

SEQ ID NO: 31272 - DNA, 25 bp, Homo sapien
ggagaggtcctatagagtgcccaca

SEQ ID NO: 31273 - DNA, 25 bp, Homo sapien
actgtcgtcaagaatgacccgagac

SEQ ID NO: 31274 - DNA, 25 bp, Homo sapien
actgtcgtcaagtatgacccgagac

SEQ ID NO: 31275 - DNA, 25 bp, Homo sapien
attattgttaagttcacgacccgaa

SEQ ID NO: 31276 - DNA, 25 bp, Homo sapien
attattgttaagatcacgacccgaa

SEQ ID NO: 31277 - DNA, 25 bp, Homo sapien
ttcgaggtcaaacctcggacacagg

SEQ ID NO: 31278 - DNA, 25 bp, Homo sapien
ttcgaggtcaaagctcggacacagg

SEQ ID NO: 31279 - DNA, 25 bp, Homo sapien
ctacatccgctacgtgcgacgcagg

SEQ ID NO: 31280 - DNA, 25 bp, Homo sapien
ctacatccgctaggtgcgacgcagg

SEQ ID NO: 31281 - DNA, 25 bp, Homo sapien
cctgtgtccccgtcggagtcacagt

SEQ ID NO: 31282 - DNA, 25 bp, Homo sapien
cctgtgtccccgacggagtcacagt

SEQ ID NO: 31283 - DNA, 25 bp, Homo sapien
ccatgaccctcttcgagaggtgtgt

SEQ ID NO: 31284 - DNA, 25 bp, Homo sapien
ccatgaccctctacgagaggtgtgt

SEQ ID NO: 31285 - DNA, 25 bp, Homo sapien
tacctctacaacaccaagagtatgg

SEQ ID NO: 31286 - DNA, 25 bp, Homo sapien
tacctctacaactccaagagtatgg

SEQ ID NO: 31287 - DNA, 25 bp, Homo sapien
taacaatgtaaacacaacttgacgg

SEQ ID NO: 31288 - DNA, 25 bp, Homo sapien
taacaatgtaaagacaacttgacgg

SEQ ID NO: 31289 - DNA, 25 bp, Homo sapien
tgcaaaaggaacaactgtgttacga

SEQ ID NO: 31290 - DNA, 25 bp, Homo sapien
tgcaaaaggaactactgtgttacga

SEQ ID NO: 31291 - DNA, 25 bp, Homo sapien
ccgatatgtgagttctttcttgtca

SEQ ID NO: 31292 - DNA, 25 bp, Homo sapien
ccgatatgtgagatctttcttgtca

SEQ ID NO: 31293 - DNA, 25 bp, Homo sapien
gtacaaaggaacctaaacctcgaac

SEQ ID NO: 31294 - DNA, 25 bp, Homo sapien
gtacaaaggaacgtaaacctcgaac

SEQ ID NO: 31295 - DNA, 25 bp, Homo sapien
gtacgaaaacaacgtgtaaactcaa

SEQ ID NO: 31296 - DNA, 25 bp, Homo sapien
gtacgaaaacaaggtgtaaactcaa

SEQ ID NO: 31297 - DNA, 25 bp, Homo sapien
aacaaagaccctgagatgtctccac

SEQ ID NO: 31298 - DNA, 25 bp, Homo sapien
aacaaagaccctcagatgtctccac

SEQ ID NO: 31299 - DNA, 25 bp, Homo sapien
ctctaacggtaaatcggatctttta

SEQ ID NO: 31300 - DNA, 25 bp, Homo sapien
ctctaacggtaattcggatctttta

SEQ ID NO: 31301 - DNA, 25 bp, Homo sapien
ttactcgtggtttgtgatgtttcac

SEQ ID NO: 31302 - DNA, 25 bp, Homo sapien
ttactcgtggttagtgatgtttcac

SEQ ID NO: 31303 - DNA, 25 bp, Homo sapien
ctgaatccggtttgtttgttatgac

SEQ ID NO: 31304 - DNA, 25 bp, Homo sapien
ctgaatccggttagtttgttatgac

SEQ ID NO: 31305 - DNA, 25 bp, Homo sapien
ggaagtgggtctttatctctctaac

SEQ ID NO: 31306 - DNA, 25 bp, Homo sapien
ggaagtgggtctatatctctctaac

SEQ ID NO: 31307 - DNA, 25 bp, Homo sapien
aacgaaaacgatgacttgtctcttc

SEQ ID NO: 31308 - DNA, 25 bp, Homo sapien
aacgaaaacgatcacttgtctcttc

SEQ ID NO: 31309 - DNA, 25 bp, Homo sapien
agttacataaacaccatattctcgt

SEQ ID NO: 31310 - DNA, 25 bp, Homo sapien
agttacataaactccatattctcgt

SEQ ID NO: 31311 - DNA, 25 bp, Homo sapien
aaggttcaaaaactgtaactacttg

SEQ ID NO: 31312 - DNA, 25 bp, Homo sapien
aaggttcaaaaagtgtaactacttg

SEQ ID NO: 31313 - DNA, 25 bp, Homo sapien
ctgtgacacgtaaacataaaaccag

SEQ ID NO: 31314 - DNA, 25 bp, Homo sapien
ctgtgacacgtatacataaaaccag

SEQ ID NO: 31315 - DNA, 25 bp, Homo sapien
aaagtgaactgtataaacggtaccc

SEQ ID NO: 31316 - DNA, 25 bp, Homo sapien
aaagtgaactgtttaaacggtaccc

SEQ ID NO: 31317 - DNA, 25 bp, Homo sapien
aaaacacgaaattccgtaggtatca

SEQ ID NO: 31318 - DNA, 25 bp, Homo sapien
aaaacacgaaataccgtaggtatca

SEQ ID NO: 31319 - DNA, 25 bp, Homo sapien
gattgaaggatcttccgtgaaccgg

SEQ ID NO: 31320 - DNA, 25 bp, Homo sapien
gattgaaggatcatccgtgaaccgg

SEQ ID NO: 31321 - DNA, 25 bp, Homo sapien
ggtttaagattcgtctcatacattt

SEQ ID NO: 31322 - DNA, 25 bp, Homo sapien
ggtttaagattcctctcatacattt

SEQ ID NO: 31323 - DNA, 25 bp, Homo sapien
atttgtaacccttctgtatcgtccg

SEQ ID NO: 31324 - DNA, 25 bp, Homo sapien
atttgtaaccctactgtatcgtccg

SEQ ID NO: 31325 - DNA, 25 bp, Homo sapien
ctttgtacgacagtaagtgtccctg

SEQ ID NO: 31326 - DNA, 25 bp, Homo sapien
ctttgtacgacactaagtgtccctg

SEQ ID NO: 31327 - DNA, 25 bp, Homo sapien
gcgccgcgagccagtcgtgactgtc

SEQ ID NO: 31328 - DNA, 25 bp, Homo sapien
gcgccgcgagcctgtcgtgactgtc

SEQ ID NO: 31329 - DNA, 25 bp, Homo sapien
ggtccgaccgtggtggtaccagatc

SEQ ID NO: 31330 - DNA, 25 bp, Homo sapien
ggtccgaccgtgctggtaccagatc

SEQ ID NO: 31331 - DNA, 25 bp, Homo sapien
gtccccgtgtgtagcgttagacctc

SEQ ID NO: 31332 - DNA, 25 bp, Homo sapien
gtccccgtgtgttgcgttagacctc

SEQ ID NO: 31333 - DNA, 25 bp, Homo sapien
cgcccctggagtccgtccgtccgtc

SEQ ID NO: 31334 - DNA, 25 bp, Homo sapien
cgcccctggagtgcgtccgtccgtc

SEQ ID NO: 31335 - DNA, 25 bp, Homo sapien
ggactcacgggtatgagacccgttc

SEQ ID NO: 31336 - DNA, 25 bp, Homo sapien
ggactcacgggtttgagacccgttc

SEQ ID NO: 31337 - DNA, 25 bp, Homo sapien
gacgtcccgtaagacagggccgcgc

SEQ ID NO: 31338 - DNA, 25 bp, Homo sapien
gacgtcccgtaacacagggccgcgc

SEQ ID NO: 31339 - DNA, 25 bp, Homo sapien
agaaggaaacataaggttcacatac

SEQ ID NO: 31340 - DNA, 25 bp, Homo sapien
agaaggaaacattaggttcacatac

SEQ ID NO: 31341 - DNA, 25 bp, Homo sapien
aagaagaaccacacaggcgaaatct

SEQ ID NO: 31342 - DNA, 25 bp, Homo sapien
aagaagaaccactcaggcgaaatct

SEQ ID NO: 31343 - DNA, 25 bp, Homo sapien
tttcatgcaccgacaggagaattct

SEQ ID NO: 31344 - DNA, 25 bp, Homo sapien
tttcatgcaccgtcaggagaattct

SEQ ID NO: 31345 - DNA, 25 bp, Homo sapien
ctgtgtcacagttcagaacaaaact

SEQ ID NO: 31346 - DNA, 25 bp, Homo sapien
ctgtgtcacagtacagaacaaaact

SEQ ID NO: 31347 - DNA, 25 bp, Homo sapien
taacagtcagtcgtaacaaaaataa

SEQ ID NO: 31348 - DNA, 25 bp, Homo sapien
taacagtcagtcctaacaaaaataa

SEQ ID NO: 31349 - DNA, 25 bp, Homo sapien
aactaacgtccagtcttccgacgtc

SEQ ID NO: 31350 - DNA, 25 bp, Homo sapien
aactaacgtccactcttccgacgtc

SEQ ID NO: 31351 - DNA, 25 bp, Homo sapien
aactctgtcactgatacgccagacg

SEQ ID NO: 31352 - DNA, 25 bp, Homo sapien
aactctgtcactcatacgccagacg

SEQ ID NO: 31353 - DNA, 25 bp, Homo sapien
cacaagacctctgtcatcgtatgaa

SEQ ID NO: 31354 - DNA, 25 bp, Homo sapien
cacaagacctctctcatcgtatgaa

SEQ ID NO: 31355 - DNA, 25 bp, Homo sapien
agagagagactgtcgaacaacgaga

SEQ ID NO: 31356 - DNA, 25 bp, Homo sapien
agagagagactgacgaacaacgaga

SEQ ID NO: 31357 - DNA, 25 bp, Homo sapien
ctaaagagtccgacaacagtccgac

SEQ ID NO: 31358 - DNA, 25 bp, Homo sapien
ctaaagagtccgtcaacagtccgac

SEQ ID NO: 31359 - DNA, 25 bp, Homo sapien
cataagacttagtctccttacgagc

SEQ ID NO: 31360 - DNA, 25 bp, Homo sapien
cataagacttagactccttacgagc

SEQ ID NO: 31361 - DNA, 25 bp, Homo sapien
cgtaaagaactagtgtccctgagct

SEQ ID NO: 31362 - DNA, 25 bp, Homo sapien
cgtaaagaactactgtccctgagct

SEQ ID NO: 31363 - DNA, 25 bp, Homo sapien
gtcgagacaactttgtccacatcct

SEQ ID NO: 31364 - DNA, 25 bp, Homo sapien
gtcgagacaactatgtccacatcct

SEQ ID NO: 31365 - DNA, 25 bp, Homo sapien
aacgagggcctggacgaccgactcc

SEQ ID NO: 31366 - DNA, 25 bp, Homo sapien
aacgagggcctgcacgaccgactcc

SEQ ID NO: 31367 - DNA, 25 bp, Homo sapien
taacagtgacggtggaacccggaca

SEQ ID NO: 31368 - DNA, 25 bp, Homo sapien
taacagtgacggaggaacccggaca

SEQ ID NO: 31369 - DNA, 25 bp, Homo sapien
cggacacaccggaagggatacccca

SEQ ID NO: 31370 - DNA, 25 bp, Homo sapien
cggacacaccggtagggatacccca

SEQ ID NO: 31371 - DNA, 25 bp, Homo sapien
caagaagtcctaggtcataccccac

SEQ ID NO: 31372 - DNA, 25 bp, Homo sapien
caagaagtcctacgtcataccccac

SEQ ID NO: 31373 - DNA, 25 bp, Homo sapien
caaaaagtccaggagacactggcac

SEQ ID NO: 31374 - DNA, 25 bp, Homo sapien
caaaaagtccagcagacactggcac

SEQ ID NO: 31375 - DNA, 25 bp, Homo sapien
tatcgagtccaggtcgagacccccg

SEQ ID NO: 31376 - DNA, 25 bp, Homo sapien
tatcgagtccagctcgagacccccg

SEQ ID NO: 31377 - DNA, 25 bp, Homo sapien
acgttgatcgtctgaacaccggtac

SEQ ID NO: 31378 - DNA, 25 bp, Homo sapien
acgttgatcgtcagaacaccggtac

SEQ ID NO: 31379 - DNA, 25 bp, Homo sapien
agactttgaactcgagagaccagac

SEQ ID NO: 31380 - DNA, 25 bp, Homo sapien
agactttgaactggagagaccagac

SEQ ID NO: 31381 - DNA, 25 bp, Homo sapien
atgatttaaaccacggatagtcaca

SEQ ID NO: 31382 - DNA, 25 bp, Homo sapien
atgatttaaacctcggatagtcaca

SEQ ID NO: 31383 - DNA, 25 bp, Homo sapien
gagttacaaactttccgtaagtaaa

SEQ ID NO: 31384 - DNA, 25 bp, Homo sapien
gagttacaaactatccgtaagtaaa

SEQ ID NO: 31385 - DNA, 25 bp, Homo sapien
tactcgtcattattcagtgtgatta

SEQ ID NO: 31386 - DNA, 25 bp, Homo sapien
tactcgtcattaatcagtgtgatta

SEQ ID NO: 31387 - DNA, 25 bp, Homo sapien
gtacttttgactacagaccgttcga

SEQ ID NO: 31388 - DNA, 25 bp, Homo sapien
gtacttttgacttcagaccgttcga

SEQ ID NO: 31389 - DNA, 25 bp, Homo sapien
ctactctacgcctgagatcagtcgg

SEQ ID NO: 31390 - DNA, 25 bp, Homo sapien
ctactctacgccagagatcagtcgg

SEQ ID NO: 31391 - DNA, 25 bp, Homo sapien
gtaatcgtccactcagaggtaatcc

SEQ ID NO: 31392 - DNA, 25 bp, Homo sapien
gtaatcgtccacacagaggtaatcc

SEQ ID NO: 31393 - DNA, 25 bp, Homo sapien
aaggactctagtaacaacccgaaac

SEQ ID NO: 31394 - DNA, 25 bp, Homo sapien
aaggactctagttacaacccgaaac

SEQ ID NO: 31395 - DNA, 25 bp, Homo sapien
aaggttgtctacacctacaggaaac

SEQ ID NO: 31396 - DNA, 25 bp, Homo sapien
aaggttgtctactcctacaggaaac

SEQ ID NO: 31397 - DNA, 25 bp, Homo sapien
caggaacgtgagtcccgtggcacga

SEQ ID NO: 31398 - DNA, 25 bp, Homo sapien
caggaacgtgagacccgtggcacga

SEQ ID NO: 31399 - DNA, 25 bp, Homo sapien
ggacgacggacgaactcagggtcca

SEQ ID NO: 31400 - DNA, 25 bp, Homo sapien
ggacgacggacgtactcagggtcca

SEQ ID NO: 31401 - DNA, 25 bp, Homo sapien
gttacgcaccagtgacggagtgagt

SEQ ID NO: 31402 - DNA, 25 bp, Homo sapien
gttacgcaccagagacggagtgagt

SEQ ID NO: 31403 - DNA, 25 bp, Homo sapien
gtcgagccgcctacgacggtccagt

SEQ ID NO: 31404 - DNA, 25 bp, Homo sapien
gtcgagccgccttcgacggtccagt

SEQ ID NO: 31405 - DNA, 25 bp, Homo sapien
ttaacccccggtcgacctctcgagt

SEQ ID NO: 31406 - DNA, 25 bp, Homo sapien
ttaacccccggtggacctctcgagt

SEQ ID NO: 31407 - DNA, 25 bp, Homo sapien
ggcttcgagccgtaggcactaccag

SEQ ID NO: 31408 - DNA, 25 bp, Homo sapien
ggcttcgagccgaaggcactaccag

SEQ ID NO: 31409 - DNA, 25 bp, Homo sapien
aatatcttgtaacacggaccaatcg

SEQ ID NO: 31410 - DNA, 25 bp, Homo sapien
aatatcttgtaagacggaccaatcg

SEQ ID NO: 31411 - DNA, 25 bp, Homo sapien
ggttacaagtaagagagacccaact

SEQ ID NO: 31412 - DNA, 25 bp, Homo sapien
ggttacaagtaacagagacccaact

SEQ ID NO: 31413 - DNA, 25 bp, Homo sapien
gtctcggttgatcagcgcttgtctc

SEQ ID NO: 31414 - DNA, 25 bp, Homo sapien
gtctcggttgatgagcgcttgtctc

SEQ ID NO: 31415 - DNA, 25 bp, Homo sapien
tcacccgatctcctgggacctgtgg

SEQ ID NO: 31416 - DNA, 25 bp, Homo sapien
tcacccgatctcgtgggacctgtgg

SEQ ID NO: 31417 - DNA, 25 bp, Homo sapien
aaacgtttttcgtgtcgactttcgg

SEQ ID NO: 31418 - DNA, 25 bp, Homo sapien
aaacgtttttcgagtcgactttcgg

SEQ ID NO: 31419 - DNA, 25 bp, Homo sapien
ctaatctttatgtcacatcagtgtg

SEQ ID NO: 31420 - DNA, 25 bp, Homo sapien
ctaatctttatgacacatcagtgtg

SEQ ID NO: 31421 - DNA, 25 bp, Homo sapien
actcaggcacgtttaagtcttaggt

SEQ ID NO: 31422 - DNA, 25 bp, Homo sapien
actcaggcacgtataagtcttaggt

SEQ ID NO: 31423 - DNA, 25 bp, Homo sapien
cattaatgtccgtatgagtctgaat

SEQ ID NO: 31424 - DNA, 25 bp, Homo sapien
cattaatgtccgaatgagtctgaat

SEQ ID NO: 31425 - DNA, 25 bp, Homo sapien
tgtcaagtacacgttcttagtgaaa

SEQ ID NO: 31426 - DNA, 25 bp, Homo sapien
tgtcaagtacaccttcttagtgaaa

SEQ ID NO: 31427 - DNA, 25 bp, Homo sapien
gagaccaagtctctttttcgaatac

SEQ ID NO: 31428 - DNA, 25 bp, Homo sapien
gagaccaagtctgtttttcgaatac

SEQ ID NO: 31429 - DNA, 25 bp, Homo sapien
ggagactctttgttccttcccggga

SEQ ID NO: 31430 - DNA, 25 bp, Homo sapien
ggagactctttgatccttcccggga

SEQ ID NO: 31431 - DNA, 25 bp, Homo sapien
tgacgagtgtggtccttacctggaa

SEQ ID NO: 31432 - DNA, 25 bp, Homo sapien
tgacgagtgtggaccttacctggaa

SEQ ID NO: 31433 - DNA, 25 bp, Homo sapien
ccggtagggcatcttctacggagat

SEQ ID NO: 31434 - DNA, 25 bp, Homo sapien
ccggtagggcatgttctacggagat

SEQ ID NO: 31435 - DNA, 25 bp, Homo sapien
tagagggacgcattcatcagtagaa

SEQ ID NO: 31436 - DNA, 25 bp, Homo sapien
tagagggacgcaatcatcagtagaa

SEQ ID NO: 31437 - DNA, 25 bp, Homo sapien
ggtaagggatttcaacgtacaactt

SEQ ID NO: 31438 - DNA, 25 bp, Homo sapien
ggtaagggatttgaacgtacaactt

SEQ ID NO: 31439 - DNA, 25 bp, Homo sapien
ctcgtagggtatttaacatcataat

SEQ ID NO: 31440 - DNA, 25 bp, Homo sapien
ctcgtagggtatataacatcataat

SEQ ID NO: 31441 - DNA, 25 bp, Homo sapien
tgtagttttaagctacatagacaac

SEQ ID NO: 31442 - DNA, 25 bp, Homo sapien
tgtagttttaaggtacatagacaac

SEQ ID NO: 31443 - DNA, 25 bp, Homo sapien
agtgaaaaccggaaccgaggacgga

SEQ ID NO: 31444 - DNA, 25 bp, Homo sapien
agtgaaaaccggtaccgaggacgga

SEQ ID NO: 31445 - DNA, 25 bp, Homo sapien
cccgaaggctcttcgaccgttaaag

SEQ ID NO: 31446 - DNA, 25 bp, Homo sapien
cccgaaggctctacgaccgttaaag

SEQ ID NO: 31447 - DNA, 25 bp, Homo sapien
gagtagaacaaaagacgcgttcaat

SEQ ID NO: 31448 - DNA, 25 bp, Homo sapien
gagtagaacaaatgacgcgttcaat

SEQ ID NO: 31449 - DNA, 25 bp, Homo sapien
ggaaaatcctacttagggtcgagta

SEQ ID NO: 31450 - DNA, 25 bp, Homo sapien
ggaaaatcctacatagggtcgagta

SEQ ID NO: 31451 - DNA, 25 bp, Homo sapien
attaactcgaacgacaggtcgagta

SEQ ID NO: 31452 - DNA, 25 bp, Homo sapien
attaactcgaaccacaggtcgagta

SEQ ID NO: 31453 - DNA, 25 bp, Homo sapien
cgtattggatcttcaataagacaat

SEQ ID NO: 31454 - DNA, 25 bp, Homo sapien
cgtattggatctacaataagacaat

SEQ ID NO: 31455 - DNA, 25 bp, Homo sapien
gtctcgatccggtacgacctatctg

SEQ ID NO: 31456 - DNA, 25 bp, Homo sapien
gtctcgatccggaacgacctatctg

SEQ ID NO: 31457 - DNA, 25 bp, Homo sapien
tgtcgcacttcgactcttcatcgta

SEQ ID NO: 31458 - DNA, 25 bp, Homo sapien
tgtcgcacttcgtctcttcatcgta

SEQ ID NO: 31459 - DNA, 25 bp, Homo sapien
caggtcgatctttccccgtcagtct

SEQ ID NO: 31460 - DNA, 25 bp, Homo sapien
caggtcgatcttaccccgtcagtct

SEQ ID NO: 31461 - DNA, 25 bp, Homo sapien
gaaacgtgtttagaccaactaaact

SEQ ID NO: 31462 - DNA, 25 bp, Homo sapien
gaaacgtgtttacaccaactaaact

SEQ ID NO: 31463 - DNA, 25 bp, Homo sapien
gagggatctcgaaaccacggcgcac

SEQ ID NO: 31464 - DNA, 25 bp, Homo sapien
gagggatctcgataccacggcgcac

SEQ ID NO: 31465 - DNA, 25 bp, Homo sapien
gggagtacgacgtgtaccgtgcaca

SEQ ID NO: 31466 - DNA, 25 bp, Homo sapien
gggagtacgacgagtaccgtgcaca

SEQ ID NO: 31467 - DNA, 25 bp, Homo sapien
tagtgtggaggacaccaggtcaccg

SEQ ID NO: 31468 - DNA, 25 bp, Homo sapien
tagtgtggaggagaccaggtcaccg

SEQ ID NO: 31469 - DNA, 25 bp, Homo sapien
agtgtgtgtgggacctagtcgtcca

SEQ ID NO: 31470 - DNA, 25 bp, Homo sapien
agtgtgtgtgggtcctagtcgtcca

SEQ ID NO: 31471 - DNA, 25 bp, Homo sapien
aaggatcggtcgtcctatagaacga

SEQ ID NO: 31472 - DNA, 25 bp, Homo sapien
aaggatcggtcgacctatagaacga

SEQ ID NO: 31473 - DNA, 25 bp, Homo sapien
atgcccgtgtagcagctacaggagg

SEQ ID NO: 31474 - DNA, 25 bp, Homo sapien
atgcccgtgtaggagctacaggagg

SEQ ID NO: 31475 - DNA, 25 bp, Homo sapien
ataattcctgaagctttcacggacc

SEQ ID NO: 31476 - DNA, 25 bp, Homo sapien
ataattcctgaacctttcacggacc

SEQ ID NO: 31477 - DNA, 25 bp, Homo sapien
tttccagagatgttctacagagtct

SEQ ID NO: 31478 - DNA, 25 bp, Homo sapien
tttccagagatgatctacagagtct

SEQ ID NO: 31479 - DNA, 25 bp, Homo sapien
tttatgtcacggtcactttagttat

SEQ ID NO: 31480 - DNA, 25 bp, Homo sapien
tttatgtcacggacactttagttat

SEQ ID NO: 31481 - DNA, 25 bp, Homo sapien
tactctctctgacgtaaaggttttt

SEQ ID NO: 31482 - DNA, 25 bp, Homo sapien
tactctctctgaggtaaaggttttt

SEQ ID NO: 31483 - DNA, 25 bp, Homo sapien
actttggcactcttgaggaatatat

SEQ ID NO: 31484 - DNA, 25 bp, Homo sapien
actttggcactcatgaggaatatat

SEQ ID NO: 31485 - DNA, 25 bp, Homo sapien
tgaagacaccgtcatgaaaacctct

SEQ ID NO: 31486 - DNA, 25 bp, Homo sapien
tgaagacaccgtgatgaaaacctct

SEQ ID NO: 31487 - DNA, 25 bp, Homo sapien
ggatagaaggcaagactccagatat

SEQ ID NO: 31488 - DNA, 25 bp, Homo sapien
ggatagaaggcatgactccagatat

SEQ ID NO: 31489 - DNA, 25 bp, Homo sapien
cgtcaacgcacgagatcttactata

SEQ ID NO: 31490 - DNA, 25 bp, Homo sapien
cgtcaacgcacgtgatcttactata

SEQ ID NO: 31491 - DNA, 25 bp, Homo sapien
agaactagtacactgaacattagtc

SEQ ID NO: 31492 - DNA, 25 bp, Homo sapien
agaactagtacagtgaacattagtc

SEQ ID NO: 31493 - DNA, 25 bp, Homo sapien
atacgtataacacgagaagacttta

SEQ ID NO: 31494 - DNA, 25 bp, Homo sapien
atacgtataacaggagaagacttta

SEQ ID NO: 31495 - DNA, 25 bp, Homo sapien
tgtcgagtgtcagcagcaatcgcta

SEQ ID NO: 31496 - DNA, 25 bp, Homo sapien
tgtcgagtgtcaccagcaatcgcta

SEQ ID NO: 31497 - DNA, 25 bp, Homo sapien
tacggaggaccctcgacgagtgata

SEQ ID NO: 31498 - DNA, 25 bp, Homo sapien
tacggaggacccacgacgagtgata

SEQ ID NO: 31499 - DNA, 25 bp, Homo sapien
acccgaacagtgactacggtcacct

SEQ ID NO: 31500 - DNA, 25 bp, Homo sapien
acccgaacagtgtctacggtcacct

SEQ ID NO: 31501 - DNA, 25 bp, Homo sapien
gaccgtcgacaagcgcaggtcgtgg

SEQ ID NO: 31502 - DNA, 25 bp, Homo sapien
gaccgtcgacaaccgcaggtcgtgg

SEQ ID NO: 31503 - DNA, 25 bp, Homo sapien
atcgtcgtacagatgtccgattctg

SEQ ID NO: 31504 - DNA, 25 bp, Homo sapien
atcgtcgtacagttgtccgattctg

SEQ ID NO: 31505 - DNA, 25 bp, Homo sapien
aatcgtttgagaatcgtcgttcgtc

SEQ ID NO: 31506 - DNA, 25 bp, Homo sapien
aatcgtttgagattcgtcgttcgtc

SEQ ID NO: 31507 - DNA, 25 bp, Homo sapien
gtagaaatctttacctttacggtcc

SEQ ID NO: 31508 - DNA, 25 bp, Homo sapien
gtagaaatcttttcctttacggtcc

SEQ ID NO: 31509 - DNA, 25 bp, Homo sapien
accttagatcttttatttttgttat

SEQ ID NO: 31510 - DNA, 25 bp, Homo sapien
accttagatcttatatttttgttat

SEQ ID NO: 31511 - DNA, 25 bp, Homo sapien
atccatttttactatattactttat

SEQ ID NO: 31512 - DNA, 25 bp, Homo sapien
atccatttttacaatattactttat

SEQ ID NO: 31513 - DNA, 25 bp, Homo sapien
ggtactccgtcagatccatcggact

SEQ ID NO: 31514 - DNA, 25 bp, Homo sapien
ggtactccgtcacatccatcggact

SEQ ID NO: 31515 - DNA, 25 bp, Homo sapien
ctcgggttcagaaccgttcaatgaa

SEQ ID NO: 31516 - DNA, 25 bp, Homo sapien
ctcgggttcagatccgttcaatgaa

SEQ ID NO: 31517 - DNA, 25 bp, Homo sapien
aacccttgggttctctcgatttaac

SEQ ID NO: 31518 - DNA, 25 bp, Homo sapien
aacccttgggttgtctcgatttaac

SEQ ID NO: 31519 - DNA, 25 bp, Homo sapien
ggacataagactaggaccatgataa

SEQ ID NO: 31520 - DNA, 25 bp, Homo sapien
ggacataagacttggaccatgataa

SEQ ID NO: 31521 - DNA, 25 bp, Homo sapien
gagatatcatttgaacccgactaga

SEQ ID NO: 31522 - DNA, 25 bp, Homo sapien
gagatatcatttcaacccgactaga

SEQ ID NO: 31523 - DNA, 25 bp, Homo sapien
cgactttcacagacacgaaatcagg

SEQ ID NO: 31524 - DNA, 25 bp, Homo sapien
cgactttcacagtcacgaaatcagg

SEQ ID NO: 31525 - DNA, 25 bp, Homo sapien
gtctttacttaacacaaagtcagtg

SEQ ID NO: 31526 - DNA, 25 bp, Homo sapien
gtctttacttaagacaaagtcagtg

SEQ ID NO: 31527 - DNA, 25 bp, Homo sapien
cattatatacatgtagttccgtgta

SEQ ID NO: 31528 - DNA, 25 bp, Homo sapien
cattatatacatctagttccgtgta

SEQ ID NO: 31529 - DNA, 25 bp, Homo sapien
cctagtcgtgggagactatccttcg

SEQ ID NO: 31530 - DNA, 25 bp, Homo sapien
cctagtcgtgggtgactatccttcg

SEQ ID NO: 31531 - DNA, 25 bp, Homo sapien
aacgtggattatcagatctggacac

SEQ ID NO: 31532 - DNA, 25 bp, Homo sapien
aacgtggattatgagatctggacac

SEQ ID NO: 31533 - DNA, 25 bp, Homo sapien
tagtcgaggtacgagatcttctata

SEQ ID NO: 31534 - DNA, 25 bp, Homo sapien
tagtcgaggtaccagatcttctata

SEQ ID NO: 31535 - DNA, 25 bp, Homo sapien
agagacatctctagtctgctaactt

SEQ ID NO: 31536 - DNA, 25 bp, Homo sapien
agagacatctcttgtctgctaactt

SEQ ID NO: 31537 - DNA, 25 bp, Homo sapien
tgaccgtgtatatgtcttctacctt

SEQ ID NO: 31538 - DNA, 25 bp, Homo sapien
tgaccgtgtataagtcttctacctt

SEQ ID NO: 31539 - DNA, 25 bp, Homo sapien
cgtactctctttcacttccacactg

SEQ ID NO: 31540 - DNA, 25 bp, Homo sapien
cgtactctctttgacttccacactg

SEQ ID NO: 31541 - DNA, 25 bp, Homo sapien
ttctccgtttcgtctccgtaatcgt

SEQ ID NO: 31542 - DNA, 25 bp, Homo sapien
ttctccgtttcgactccgtaatcgt

SEQ ID NO: 31543 - DNA, 25 bp, Homo sapien
ccctactgtaggttgagtcctccac

SEQ ID NO: 31544 - DNA, 25 bp, Homo sapien
ccctactgtaggatgagtcctccac

SEQ ID NO: 31545 - DNA, 25 bp, Homo sapien
ccctcatgtacgacttgtcctttgt

SEQ ID NO: 31546 - DNA, 25 bp, Homo sapien
ccctcatgtacgtcttgtcctttgt

SEQ ID NO: 31547 - DNA, 25 bp, Homo sapien
cggacggtgtccatgtactataatt

SEQ ID NO: 31548 - DNA, 25 bp, Homo sapien
cggacggtgtccttgtactataatt

SEQ ID NO: 31549 - DNA, 25 bp, Homo sapien
gtcttatacactttagactaacagg

SEQ ID NO: 31550 - DNA, 25 bp, Homo sapien
gtcttatacactatagactaacagg

SEQ ID NO: 31551 - DNA, 25 bp, Homo sapien
tcttatatagtgttacgaccaatgt

SEQ ID NO: 31552 - DNA, 25 bp, Homo sapien
tcttatatagtgatacgaccaatgt

SEQ ID NO: 31553 - DNA, 25 bp, Homo sapien
aaatctaagcggagacagtctaagt

SEQ ID NO: 31554 - DNA, 25 bp, Homo sapien
aaatctaagcggtgacagtctaagt

SEQ ID NO: 31555 - DNA, 25 bp, Homo sapien
tctgctcttaggacccacgtcacgg

SEQ ID NO: 31556 - DNA, 25 bp, Homo sapien
tctgctcttaggtcccacgtcacgg

SEQ ID NO: 31557 - DNA, 25 bp, Homo sapien
tcagttctcaacacaaacggacggt

SEQ ID NO: 31558 - DNA, 25 bp, Homo sapien
tcagttctcaactcaaacggacggt

SEQ ID NO: 31559 - DNA, 25 bp, Homo sapien
tcaattcgtcattcgatatcgtttg

SEQ ID NO: 31560 - DNA, 25 bp, Homo sapien
tcaattcgtcatacgatatcgtttg

SEQ ID NO: 31561 - DNA, 25 bp, Homo sapien
aaagtagacgttcagtaaatcgcta

SEQ ID NO: 31562 - DNA, 25 bp, Homo sapien
aaagtagacgttgagtaaatcgcta

SEQ ID NO: 31563 - DNA, 25 bp, Homo sapien
ctttcgtttacactggaatattgat

SEQ ID NO: 31564 - DNA, 25 bp, Homo sapien
ctttcgtttacagtggaatattgat

SEQ ID NO: 31565 - DNA, 25 bp, Homo sapien
tttgtcttcgcgctggtaaagaaat

SEQ ID NO: 31566 - DNA, 25 bp, Homo sapien
tttgtcttcgcggtggtaaagaaat

SEQ ID NO: 31567 - DNA, 25 bp, Homo sapien
tgtttttcccaggtaacagaatact

SEQ ID NO: 31568 - DNA, 25 bp, Homo sapien
tgtttttcccagctaacagaatact

SEQ ID NO: 31569 - DNA, 25 bp, Homo sapien
ttcggtcaaccgacgacccaataac

SEQ ID NO: 31570 - DNA, 25 bp, Homo sapien
ttcggtcaaccgtcgacccaataac

SEQ ID NO: 31571 - DNA, 25 bp, Homo sapien
ctctgataggtttaaacgactgata

SEQ ID NO: 31572 - DNA, 25 bp, Homo sapien
ctctgataggttaaaacgactgata

SEQ ID NO: 31573 - DNA, 25 bp, Homo sapien
aaccaaaggtagagtagtacttctc

SEQ ID NO: 31574 - DNA, 25 bp, Homo sapien
aaccaaaggtagtgtagtacttctc

SEQ ID NO: 31575 - DNA, 25 bp, Homo sapien
gtaacatcaggaccttggtagaccg

SEQ ID NO: 31576 - DNA, 25 bp, Homo sapien
gtaacatcaggagcttggtagaccg

SEQ ID NO: 31577 - DNA, 25 bp, Homo sapien
tatacgaacatgacccggacgttcg

SEQ ID NO: 31578 - DNA, 25 bp, Homo sapien
tatacgaacatgtcccggacgttcg

SEQ ID NO: 31579 - DNA, 25 bp, Homo sapien
actttgacgaggtccgcgggtcagt

SEQ ID NO: 31580 - DNA, 25 bp, Homo sapien
actttgacgaggaccgcgggtcagt

SEQ ID NO: 31581 - DNA, 25 bp, Homo sapien
acgtccgccatgactcactggtaca

SEQ ID NO: 31582 - DNA, 25 bp, Homo sapien
acgtccgccatgtctcactggtaca

SEQ ID NO: 31583 - DNA, 25 bp, Homo sapien
gagacgccgtcctcgcgagtccgga

SEQ ID NO: 31584 - DNA, 25 bp, Homo sapien
gagacgccgtccacgcgagtccgga

SEQ ID NO: 31585 - DNA, 25 bp, Homo sapien
acgggtcctaactcgggttcggacg

SEQ ID NO: 31586 - DNA, 25 bp, Homo sapien
acgggtcctaacacgggttcggacg

SEQ ID NO: 31587 - DNA, 25 bp, Homo sapien
ggcaccacaacgagtcgtacgtgtg

SEQ ID NO: 31588 - DNA, 25 bp, Homo sapien
ggcaccacaacgtgtcgtacgtgtg

SEQ ID NO: 31589 - DNA, 25 bp, Homo sapien
gggtgcaccggtaattgtgtaccga

SEQ ID NO: 31590 - DNA, 25 bp, Homo sapien
gggtgcaccggttattgtgtaccga

SEQ ID NO: 31591 - DNA, 25 bp, Homo sapien
acagggacacgagatttctgtaaag

SEQ ID NO: 31592 - DNA, 25 bp, Homo sapien
acagggacacgacatttctgtaaag

SEQ ID NO: 31593 - DNA, 25 bp, Homo sapien
atgggaacttcatccgtaacacaag

SEQ ID NO: 31594 - DNA, 25 bp, Homo sapien
atgggaacttcaaccgtaacacaag

SEQ ID NO: 31595 - DNA, 25 bp, Homo sapien
tgacaaagggcaacggtaactaccc

SEQ ID NO: 31596 - DNA, 25 bp, Homo sapien
tgacaaagggcatcggtaactaccc

SEQ ID NO: 31597 - DNA, 25 bp, Homo sapien
ttgtgaagggtgtagtttgaccacc

SEQ ID NO: 31598 - DNA, 25 bp, Homo sapien
ttgtgaagggtgaagtttgaccacc

SEQ ID NO: 31599 - DNA, 25 bp, Homo sapien
ggaaggacgggtattagtaccccgt

SEQ ID NO: 31600 - DNA, 25 bp, Homo sapien
ggaaggacgggttttagtaccccgt

SEQ ID NO: 31601 - DNA, 25 bp, Homo sapien
tcagtgacgggcttaagactttcgt

SEQ ID NO: 31602 - DNA, 25 bp, Homo sapien
tcagtgacgggcataagactttcgt

SEQ ID NO: 31603 - DNA, 25 bp, Homo sapien
taggtgacggggaatagttccgact

SEQ ID NO: 31604 - DNA, 25 bp, Homo sapien
taggtgacggggtatagttccgact

SEQ ID NO: 31605 - DNA, 25 bp, Homo sapien
accgtcactagcacgtgtttctcct

SEQ ID NO: 31606 - DNA, 25 bp, Homo sapien
accgtcactagctcgtgtttctcct

SEQ ID NO: 31607 - DNA, 25 bp, Homo sapien
agactcttatggtcattccgtgact

SEQ ID NO: 31608 - DNA, 25 bp, Homo sapien
agactcttatggacattccgtgact

SEQ ID NO: 31609 - DNA, 25 bp, Homo sapien
tgggccgagtcgacggatcctcgac

SEQ ID NO: 31610 - DNA, 25 bp, Homo sapien
tgggccgagtcgtcggatcctcgac

SEQ ID NO: 31611 - DNA, 25 bp, Homo sapien
ggctccgttcaccaagctcgtctgt

SEQ ID NO: 31612 - DNA, 25 bp, Homo sapien
ggctccgttcacgaagctcgtctgt

SEQ ID NO: 31613 - DNA, 25 bp, Homo sapien
ggtcacgagtataaatgcgacttca

SEQ ID NO: 31614 - DNA, 25 bp, Homo sapien
ggtcacgagtattaatgcgacttca

SEQ ID NO: 31615 - DNA, 25 bp, Homo sapien
ggaaacacctgcaaacggacttaag

SEQ ID NO: 31616 - DNA, 25 bp, Homo sapien
ggaaacacctgctaacggacttaag

SEQ ID NO: 31617 - DNA, 25 bp, Homo sapien
agactaaaccccattctgtggtcaa

SEQ ID NO: 31618 - DNA, 25 bp, Homo sapien
agactaaacccctttctgtggtcaa

SEQ ID NO: 31619 - DNA, 25 bp, Homo sapien
gagagaacccttggaattggtcctt

SEQ ID NO: 31620 - DNA, 25 bp, Homo sapien
gagagaacccttcgaattggtcctt

SEQ ID NO: 31621 - DNA, 25 bp, Homo sapien
gagacccaccatgaattcaagcctt

SEQ ID NO: 31622 - DNA, 25 bp, Homo sapien
gagacccaccatcaattcaagcctt

SEQ ID NO: 31623 - DNA, 25 bp, Homo sapien
tcctcccaaagctactgtgcgactt

SEQ ID NO: 31624 - DNA, 25 bp, Homo sapien
tcctcccaaagcaactgtgcgactt

SEQ ID NO: 31625 - DNA, 25 bp, Homo sapien
tcggagtcccagaagatcgggatgt

SEQ ID NO: 31626 - DNA, 25 bp, Homo sapien
tcggagtcccagtagatcgggatgt

SEQ ID NO: 31627 - DNA, 25 bp, Homo sapien
taaacatgtaaaggcgggggtcggc

SEQ ID NO: 31628 - DNA, 25 bp, Homo sapien
taaacatgtaaacgcgggggtcggc

SEQ ID NO: 31629 - DNA, 25 bp, Homo sapien
tccttttagtagaccggggacgaga

SEQ ID NO: 31630 - DNA, 25 bp, Homo sapien
tccttttagtagtccggggacgaga

SEQ ID NO: 31631 - DNA, 25 bp, Homo sapien
acttcacaggttttcgagagacaga

SEQ ID NO: 31632 - DNA, 25 bp, Homo sapien
acttcacaggttatcgagagacaga

SEQ ID NO: 31633 - DNA, 25 bp, Homo sapien
aaaaaatcgtacggactacaaggaa

SEQ ID NO: 31634 - DNA, 25 bp, Homo sapien
aaaaaatcgtaccgactacaaggaa

SEQ ID NO: 31635 - DNA, 25 bp, Homo sapien
acggtccaccgctggcactatggaa

SEQ ID NO: 31636 - DNA, 25 bp, Homo sapien
acggtccaccgcaggcactatggaa

SEQ ID NO: 31637 - DNA, 25 bp, Homo sapien
agggcagtctcatccgtacttggaa

SEQ ID NO: 31638 - DNA, 25 bp, Homo sapien
agggcagtctcaaccgtacttggaa

SEQ ID NO: 31639 - DNA, 25 bp, Homo sapien
ttgacatgtactaccatatatggaa

SEQ ID NO: 31640 - DNA, 25 bp, Homo sapien
ttgacatgtacttccatatatggaa

SEQ ID NO: 31641 - DNA, 25 bp, Homo sapien
gaacagtaatcaatcttatcgtaac

SEQ ID NO: 31642 - DNA, 25 bp, Homo sapien
gaacagtaatcattcttatcgtaac

SEQ ID NO: 31643 - DNA, 25 bp, Homo sapien
ctacttgtcgtttactttatcgaag

SEQ ID NO: 31644 - DNA, 25 bp, Homo sapien
ctacttgtcgttaactttatcgaag

SEQ ID NO: 31645 - DNA, 25 bp, Homo sapien
accattgtcttgaccatgagtagga

SEQ ID NO: 31646 - DNA, 25 bp, Homo sapien
accattgtcttgtccatgagtagga

SEQ ID NO: 31647 - DNA, 25 bp, Homo sapien
ttgatggttgtttccgtgacttgac

SEQ ID NO: 31648 - DNA, 25 bp, Homo sapien
ttgatggttgttaccgtgacttgac

SEQ ID NO: 31649 - DNA, 25 bp, Homo sapien
cttagaatattttgtacagggcttc

SEQ ID NO: 31650 - DNA, 25 bp, Homo sapien
cttagaatatttagtacagggcttc

SEQ ID NO: 31651 - DNA, 25 bp, Homo sapien
ttagagttacatgtttgtctcggtc

SEQ ID NO: 31652 - DNA, 25 bp, Homo sapien
ttagagttacatctttgtctcggtc

SEQ ID NO: 31653 - DNA, 25 bp, Homo sapien
tgaatacactgtctttagacgagta

SEQ ID NO: 31654 - DNA, 25 bp, Homo sapien
tgaatacactgtgtttagacgagta

SEQ ID NO: 31655 - DNA, 25 bp, Homo sapien
aatgtagactctcgtgtcgacagga

SEQ ID NO: 31656 - DNA, 25 bp, Homo sapien
aatgtagactctggtgtcgacagga

SEQ ID NO: 31657 - DNA, 25 bp, Homo sapien
acgactccgtcctgtgtcgccgaaa

SEQ ID NO: 31658 - DNA, 25 bp, Homo sapien
acgactccgtccagtgtcgccgaaa

SEQ ID NO: 31659 - DNA, 25 bp, Homo sapien
cgtcaacacagttcgtactgttaac

SEQ ID NO: 31660 - DNA, 25 bp, Homo sapien
cgtcaacacagtacgtactgttaac

SEQ ID NO: 31661 - DNA, 25 bp, Homo sapien
aggtccatgtctgaccggttggacg

SEQ ID NO: 31662 - DNA, 25 bp, Homo sapien
aggtccatgtctcaccggttggacg

SEQ ID NO: 31663 - DNA, 25 bp, Homo sapien
acgtcccttggaaccggccgagacg

SEQ ID NO: 31664 - DNA, 25 bp, Homo sapien
acgtcccttggatccggccgagacg

SEQ ID NO: 31665 - DNA, 25 bp, Homo sapien
acgaccctaatgtccgcactcggtg

SEQ ID NO: 31666 - DNA, 25 bp, Homo sapien
acgaccctaatgaccgcactcggtg

SEQ ID NO: 31667 - DNA, 25 bp, Homo sapien
ttttcgcctattcataggccaggac

SEQ ID NO: 31668 - DNA, 25 bp, Homo sapien
ttttcgcctattgataggccaggac

SEQ ID NO: 31669 - DNA, 25 bp, Homo sapien
gagccccttctctttaggtaccaaa

SEQ ID NO: 31670 - DNA, 25 bp, Homo sapien
gagccccttctcattaggtaccaaa

SEQ ID NO: 31671 - DNA, 25 bp, Homo sapien
ccgtgtccaagaacaaccgtactca

SEQ ID NO: 31672 - DNA, 25 bp, Homo sapien
ccgtgtccaagatcaaccgtactca

SEQ ID NO: 31673 - DNA, 25 bp, Homo sapien
aacgtaacccagtagacatctgtca

SEQ ID NO: 31674 - DNA, 25 bp, Homo sapien
aacgtaacccagaagacatctgtca

SEQ ID NO: 31675 - DNA, 25 bp, Homo sapien
actatccacagtatacggtcgacca

SEQ ID NO: 31676 - DNA, 25 bp, Homo sapien
actatccacagtttacggtcgacca

SEQ ID NO: 31677 - DNA, 25 bp, Homo sapien
cctacactacgatgtgtaacgtcat

SEQ ID NO: 31678 - DNA, 25 bp, Homo sapien
cctacactacgaagtgtaacgtcat

SEQ ID NO: 31679 - DNA, 25 bp, Homo sapien
tcgtgtatacacatcgtatacgtgc

SEQ ID NO: 31680 - DNA, 25 bp, Homo sapien
tcgtgtatacacttcgtatacgtgc

SEQ ID NO: 31681 - DNA, 25 bp, Homo sapien
aacttgttgactcacaaagtaagtg

SEQ ID NO: 31682 - DNA, 25 bp, Homo sapien
aacttgttgactgacaaagtaagtg

SEQ ID NO: 31683 - DNA, 25 bp, Homo sapien
ttagatcgttctctagaaaaccatg

SEQ ID NO: 31684 - DNA, 25 bp, Homo sapien
ttagatcgttctgtagaaaaccatg

SEQ ID NO: 31685 - DNA, 25 bp, Homo sapien
aacgttgttgagttcataatgactc

SEQ ID NO: 31686 - DNA, 25 bp, Homo sapien
aacgttgttgagatcataatgactc

SEQ ID NO: 31687 - DNA, 25 bp, Homo sapien
agtctctgtaaattctcgatctccg

SEQ ID NO: 31688 - DNA, 25 bp, Homo sapien
agtctctgtaaaatctcgatctccg

SEQ ID NO: 31689 - DNA, 25 bp, Homo sapien
ggttgtatcgatttagatactccgt

SEQ ID NO: 31690 - DNA, 25 bp, Homo sapien
ggttgtatcgatatagatactccgt

SEQ ID NO: 31691 - DNA, 25 bp, Homo sapien
cggagatcgatggaactgtcctccg

SEQ ID NO: 31692 - DNA, 25 bp, Homo sapien
cggagatcgatgcaactgtcctccg

SEQ ID NO: 31693 - DNA, 25 bp, Homo sapien
ctgctaccgactttccttacttggt

SEQ ID NO: 31694 - DNA, 25 bp, Homo sapien
ctgctaccgactatccttacttggt

SEQ ID NO: 31695 - DNA, 25 bp, Homo sapien
ctcagctccaacagattatctaagg

SEQ ID NO: 31696 - DNA, 25 bp, Homo sapien
ctcagctccaactgattatctaagg

SEQ ID NO: 31697 - DNA, 25 bp, Homo sapien
taactaaataacaaaattcttacaa

SEQ ID NO: 31698 - DNA, 25 bp, Homo sapien
taactaaataactaaattcttacaa

SEQ ID NO: 31699 - DNA, 25 bp, Homo sapien
tttaccaaaggaaagctacgtttca

SEQ ID NO: 31700 - DNA, 25 bp, Homo sapien
tttaccaaaggatagctacgtttca

SEQ ID NO: 31701 - DNA, 25 bp, Homo sapien
tttatataagattggttggtgccct

SEQ ID NO: 31702 - DNA, 25 bp, Homo sapien
tttatataagataggttggtgccct

SEQ ID NO: 31703 - DNA, 25 bp, Homo sapien
agtcaataacctgtcgagtgtccgg

SEQ ID NO: 31704 - DNA, 25 bp, Homo sapien
agtcaataacctctcgagtgtccgg

SEQ ID NO: 31705 - DNA, 25 bp, Homo sapien
ctccaagactcaccttagggacggt

SEQ ID NO: 31706 - DNA, 25 bp, Homo sapien
ctccaagactcagcttagggacggt

SEQ ID NO: 31707 - DNA, 25 bp, Homo sapien
tattcttactttagttaatccgagg

SEQ ID NO: 31708 - DNA, 25 bp, Homo sapien
tattcttacttttgttaatccgagg

SEQ ID NO: 31709 - DNA, 25 bp, Homo sapien
attcagaccttacgagcacggggag

SEQ ID NO: 31710 - DNA, 25 bp, Homo sapien
attcagaccttaggagcacggggag

SEQ ID NO: 31711 - DNA, 25 bp, Homo sapien
gggtcctactgatcccgtctgggac

SEQ ID NO: 31712 - DNA, 25 bp, Homo sapien
gggtcctactgaacccgtctgggac

SEQ ID NO: 31713 - DNA, 25 bp, Homo sapien
gtgaagcctctgcagcctcggaaga

SEQ ID NO: 31714 - DNA, 25 bp, Homo sapien
gtgaagcctctggagcctcggaaga

SEQ ID NO: 31715 - DNA, 25 bp, Homo sapien
ttagtacttttcatacgaaacttgg

SEQ ID NO: 31716 - DNA, 25 bp, Homo sapien
ttagtacttttcttacgaaacttgg

SEQ ID NO: 31717 - DNA, 25 bp, Homo sapien
gtaaacgtaacgagaaactactaag

SEQ ID NO: 31718 - DNA, 25 bp, Homo sapien
gtaaacgtaacgtgaaactactaag

SEQ ID NO: 31719 - DNA, 25 bp, Homo sapien
ttgaaacgaccgggtcaacgacagg

SEQ ID NO: 31720 - DNA, 25 bp, Homo sapien
ttgaaacgaccgcgtcaacgacagg

SEQ ID NO: 31721 - DNA, 25 bp, Homo sapien
agtaaactagaacacgtttctgaga

SEQ ID NO: 31722 - DNA, 25 bp, Homo sapien
agtaaactagaagacgtttctgaga

SEQ ID NO: 31723 - DNA, 25 bp, Homo sapien
gaaaagacacataactcgtgttaga

SEQ ID NO: 31724 - DNA, 25 bp, Homo sapien
gaaaagacacattactcgtgttaga

SEQ ID NO: 31725 - DNA, 25 bp, Homo sapien
tcttttagctcaaacgcggacggta

SEQ ID NO: 31726 - DNA, 25 bp, Homo sapien
tcttttagctcatacgcggacggta

SEQ ID NO: 31727 - DNA, 25 bp, Homo sapien
agtccgctacacgaaataccgtccg

SEQ ID NO: 31728 - DNA, 25 bp, Homo sapien
agtccgctacaccaaataccgtccg

SEQ ID NO: 31729 - DNA, 25 bp, Homo sapien
aggtgtcgtttctgagttaaattcc

SEQ ID NO: 31730 - DNA, 25 bp, Homo sapien
aggtgtcgtttcagagttaaattcc

SEQ ID NO: 31731 - DNA, 25 bp, Homo sapien
ggactatacgaggtcttatttctcc

SEQ ID NO: 31732 - DNA, 25 bp, Homo sapien
ggactatacgagctcttatttctcc

SEQ ID NO: 31733 - DNA, 25 bp, Homo sapien
ggtatataaagtcactgttcttcct

SEQ ID NO: 31734 - DNA, 25 bp, Homo sapien
ggtatataaagtgactgttcttcct

SEQ ID NO: 31735 - DNA, 25 bp, Homo sapien
gagtattcagttacgtctctcactt

SEQ ID NO: 31736 - DNA, 25 bp, Homo sapien
gagtattcagtttcgtctctcactt

SEQ ID NO: 31737 - DNA, 25 bp, Homo sapien
gtagtaatctaactctctgtgatct

SEQ ID NO: 31738 - DNA, 25 bp, Homo sapien
gtagtaatctaagtctctgtgatct

SEQ ID NO: 31739 - DNA, 25 bp, Homo sapien
agttcttcgtaaagagacattacct

SEQ ID NO: 31740 - DNA, 25 bp, Homo sapien
agttcttcgtaatgagacattacct

SEQ ID NO: 31741 - DNA, 25 bp, Homo sapien
ggtctttcgtatagtataatctcac

SEQ ID NO: 31742 - DNA, 25 bp, Homo sapien
ggtctttcgtattgtataatctcac

SEQ ID NO: 31743 - DNA, 25 bp, Homo sapien
cggtcacacatgtggaggacgtcac

SEQ ID NO: 31744 - DNA, 25 bp, Homo sapien
cggtcacacatgaggaggacgtcac

SEQ ID NO: 31745 - DNA, 25 bp, Homo sapien
gtctccatcgtgtctggagactcgt

SEQ ID NO: 31746 - DNA, 25 bp, Homo sapien
gtctccatcgtgactggagactcgt

SEQ ID NO: 31747 - DNA, 25 bp, Homo sapien
cgtactgtaagagaacctgtcgtct

SEQ ID NO: 31748 - DNA, 25 bp, Homo sapien
cgtactgtaagacaacctgtcgtct

SEQ ID NO: 31749 - DNA, 25 bp, Homo sapien
tcgatggtactctacacgtctgttc

SEQ ID NO: 31750 - DNA, 25 bp, Homo sapien
tcgatggtactcaacacgtctgttc

SEQ ID NO: 31751 - DNA, 25 bp, Homo sapien
cggacttcacaccagtcgtgtacac

SEQ ID NO: 31752 - DNA, 25 bp, Homo sapien
cggacttcacacgagtcgtgtacac

SEQ ID NO: 31753 - DNA, 25 bp, Homo sapien
aacgtagtatgagtagtcgatcact

SEQ ID NO: 31754 - DNA, 25 bp, Homo sapien
aacgtagtatgactagtcgatcact

SEQ ID NO: 31755 - DNA, 25 bp, Homo sapien
ctaccgaagttagagacggagtcct

SEQ ID NO: 31756 - DNA, 25 bp, Homo sapien
ctaccgaagttacagacggagtcct

SEQ ID NO: 31757 - DNA, 25 bp, Homo sapien
tcttagtaaagttctactcgggtcc

SEQ ID NO: 31758 - DNA, 25 bp, Homo sapien
tcttagtaaagtactactcgggtcc

SEQ ID NO: 31759 - DNA, 25 bp, Homo sapien
taacgaaagtgaacacggtgactcg

SEQ ID NO: 31760 - DNA, 25 bp, Homo sapien
taacgaaagtgatcacggtgactcg

SEQ ID NO: 31761 - DNA, 25 bp, Homo sapien
gtaggtgacacgaggacgatgtacc

SEQ ID NO: 31762 - DNA, 25 bp, Homo sapien
gtaggtgacacgtggacgatgtacc

SEQ ID NO: 31763 - DNA, 25 bp, Homo sapien
gtacgagtttgtagaacagtaactc

SEQ ID NO: 31764 - DNA, 25 bp, Homo sapien
gtacgagtttgttgaacagtaactc

SEQ ID NO: 31765 - DNA, 25 bp, Homo sapien
cacgtccccattgacagagtacaca

SEQ ID NO: 31766 - DNA, 25 bp, Homo sapien
cacgtccccattcacagagtacaca

SEQ ID NO: 31767 - DNA, 25 bp, Homo sapien
gttcagttcctttcataggaattag

SEQ ID NO: 31768 - DNA, 25 bp, Homo sapien
gttcagttccttacataggaattag

SEQ ID NO: 31769 - DNA, 25 bp, Homo sapien
tctgtaaaagaattggactacttac

SEQ ID NO: 31770 - DNA, 25 bp, Homo sapien
tctgtaaaagaaatggactacttac

SEQ ID NO: 31771 - DNA, 25 bp, Homo sapien
cgacggactcgagagttctcatctt

SEQ ID NO: 31772 - DNA, 25 bp, Homo sapien
cgacggactcgacagttctcatctt

SEQ ID NO: 31773 - DNA, 25 bp, Homo sapien
agggtaaacagacactactctacat

SEQ ID NO: 31774 - DNA, 25 bp, Homo sapien
agggtaaacagagactactctacat

SEQ ID NO: 31775 - DNA, 25 bp, Homo sapien
cagaagtaacatacgtgtagtttca

SEQ ID NO: 31776 - DNA, 25 bp, Homo sapien
cagaagtaacattcgtgtagtttca

SEQ ID NO: 31777 - DNA, 25 bp, Homo sapien
gaaaggacacgttattccatactct

SEQ ID NO: 31778 - DNA, 25 bp, Homo sapien
gaaaggacacgtaattccatactct

SEQ ID NO: 31779 - DNA, 25 bp, Homo sapien
tcagaaaggtagtgtataccatctc

SEQ ID NO: 31780 - DNA, 25 bp, Homo sapien
tcagaaaggtagagtataccatctc

SEQ ID NO: 31781 - DNA, 25 bp, Homo sapien
agtatgacaccgttcatccgaggaa

SEQ ID NO: 31782 - DNA, 25 bp, Homo sapien
agtatgacaccgatcatccgaggaa

SEQ ID NO: 31783 - DNA, 25 bp, Homo sapien
gggtttcccgtgcttctccggagat

SEQ ID NO: 31784 - DNA, 25 bp, Homo sapien
gggtttcccgtggttctccggagat

SEQ ID NO: 31785 - DNA, 25 bp, Homo sapien
cgttcccgtagtggtccgaggaagt

SEQ ID NO: 31786 - DNA, 25 bp, Homo sapien
cgttcccgtagtcgtccgaggaagt

SEQ ID NO: 31787 - DNA, 25 bp, Homo sapien
cggtctaccactgtgacgcagagag

SEQ ID NO: 31788 - DNA, 25 bp, Homo sapien
cggtctaccactctgacgcagagag

SEQ ID NO: 31789 - DNA, 25 bp, Homo sapien
gtatttcatcccaggtactgagaag

SEQ ID NO: 31790 - DNA, 25 bp, Homo sapien
gtatttcatccctggtactgagaag

SEQ ID NO: 31791 - DNA, 25 bp, Homo sapien
tacttagacctttttgacagataag

SEQ ID NO: 31792 - DNA, 25 bp, Homo sapien
tacttagaccttattgacagataag

SEQ ID NO: 31793 - DNA, 25 bp, Homo sapien
ttacccgtctcctcgacgtgactgg

SEQ ID NO: 31794 - DNA, 25 bp, Homo sapien
ttacccgtctccacgacgtgactgg

SEQ ID NO: 31795 - DNA, 25 bp, Homo sapien
ccctttacctgagacgtgtgtgtga

SEQ ID NO: 31796 - DNA, 25 bp, Homo sapien
ccctttacctgacacgtgtgtgtga

SEQ ID NO: 31797 - DNA, 25 bp, Homo sapien
accgacggtgacagagggtcgtcac

SEQ ID NO: 31798 - DNA, 25 bp, Homo sapien
accgacggtgactgagggtcgtcac

SEQ ID NO: 31799 - DNA, 25 bp, Homo sapien
gaccctgcgtcgtcgggcgtgtcca

SEQ ID NO: 31800 - DNA, 25 bp, Homo sapien
gaccctgcgtcgacgggcgtgtcca

SEQ ID NO: 31801 - DNA, 25 bp, Homo sapien
tgtctcttgggaaccggggtgacta

SEQ ID NO: 31802 - DNA, 25 bp, Homo sapien
tgtctcttgggatccggggtgacta

SEQ ID NO: 31803 - DNA, 25 bp, Homo sapien
ttctacgggtctgtggtgcacgtcg

SEQ ID NO: 31804 - DNA, 25 bp, Homo sapien
ttctacgggtctctggtgcacgtcg

SEQ ID NO: 31805 - DNA, 25 bp, Homo sapien
gaccctcggtggacagtggacacta

SEQ ID NO: 31806 - DNA, 25 bp, Homo sapien
gaccctcggtggtcagtggacacta

SEQ ID NO: 31807 - DNA, 25 bp, Homo sapien
ctcgtacctccacaggtggagtctc

SEQ ID NO: 31808 - DNA, 25 bp, Homo sapien
ctcgtacctccagaggtggagtctc

SEQ ID NO: 31809 - DNA, 25 bp, Homo sapien
tcggtgtcgaggacttcgtggatct

SEQ ID NO: 31810 - DNA, 25 bp, Homo sapien
tcggtgtcgaggtcttcgtggatct

SEQ ID NO: 31811 - DNA, 25 bp, Homo sapien
tcgagaagaacgacctcctgacgct

SEQ ID NO: 31812 - DNA, 25 bp, Homo sapien
tcgagaagaacgtcctcctgacgct

SEQ ID NO: 31813 - DNA, 25 bp, Homo sapien
tcacaaacgacgtcctgtcgactca

SEQ ID NO: 31814 - DNA, 25 bp, Homo sapien
tcacaaacgacgacctgtcgactca

SEQ ID NO: 31815 - DNA, 25 bp, Homo sapien
gtgactacaacgtcaacaggtccta

SEQ ID NO: 31816 - DNA, 25 bp, Homo sapien
gtgactacaacgacaacaggtccta

SEQ ID NO: 31817 - DNA, 25 bp, Homo sapien
ccgaaagagtacaagttgagtcaca

SEQ ID NO: 31818 - DNA, 25 bp, Homo sapien
ccgaaagagtactagttgagtcaca

SEQ ID NO: 31819 - DNA, 25 bp, Homo sapien
gtgtaaccatgtcttgacggtatag

SEQ ID NO: 31820 - DNA, 25 bp, Homo sapien
gtgtaaccatgtgttgacggtatag

SEQ ID NO: 31821 - DNA, 25 bp, Homo sapien
tagcttcatcacacgtatacaagag

SEQ ID NO: 31822 - DNA, 25 bp, Homo sapien
tagcttcatcactcgtatacaagag

SEQ ID NO: 31823 - DNA, 25 bp, Homo sapien
aagtttcacgtccacgcgatcgaaa

SEQ ID NO: 31824 - DNA, 25 bp, Homo sapien
aagtttcacgtcgacgcgatcgaaa

SEQ ID NO: 31825 - DNA, 25 bp, Homo sapien
cgtcaagacgagtttgtagacgagt

SEQ ID NO: 31826 - DNA, 25 bp, Homo sapien
cgtcaagacgagattgtagacgagt

SEQ ID NO: 31827 - DNA, 25 bp, Homo sapien
agtgacgacgagtgacgaagtattc

SEQ ID NO: 31828 - DNA, 25 bp, Homo sapien
agtgacgacgagagacgaagtattc

SEQ ID NO: 31829 - DNA, 25 bp, Homo sapien
gtgtgacgaagatggtcgagtcttc

SEQ ID NO: 31830 - DNA, 25 bp, Homo sapien
gtgtgacgaagaaggtcgagtcttc

SEQ ID NO: 31831 - DNA, 25 bp, Homo sapien
ttagtcggagtaggagtcggacttc

SEQ ID NO: 31832 - DNA, 25 bp, Homo sapien
ttagtcggagtacgagtcggacttc

SEQ ID NO: 31833 - DNA, 25 bp, Homo sapien
tgtcatagtcgttatccgtcttcgt

SEQ ID NO: 31834 - DNA, 25 bp, Homo sapien
tgtcatagtcgtaatccgtcttcgt

SEQ ID NO: 31835 - DNA, 25 bp, Homo sapien
tgacagtacggaagtgtcttcgtct

SEQ ID NO: 31836 - DNA, 25 bp, Homo sapien
tgacagtacggatgtgtcttcgtct

SEQ ID NO: 31837 - DNA, 25 bp, Homo sapien
taagaagtgtctgtgtacttcgtct

SEQ ID NO: 31838 - DNA, 25 bp, Homo sapien
taagaagtgtctctgtacttcgtct

SEQ ID NO: 31839 - DNA, 25 bp, Homo sapien
aggaaagactaaggacttcatctac

SEQ ID NO: 31840 - DNA, 25 bp, Homo sapien
aggaaagactaacgacttcatctac

SEQ ID NO: 31841 - DNA, 25 bp, Homo sapien
agtcgaatactacgtctaatgacaa

SEQ ID NO: 31842 - DNA, 25 bp, Homo sapien
agtcgaatactaggtctaatgacaa

SEQ ID NO: 31843 - DNA, 25 bp, Homo sapien
gagaacactctcttcaatgtacaag

SEQ ID NO: 31844 - DNA, 25 bp, Homo sapien
gagaacactctcatcaatgtacaag

SEQ ID NO: 31845 - DNA, 25 bp, Homo sapien
ccgaaaaactcagagtgatacttgt

SEQ ID NO: 31846 - DNA, 25 bp, Homo sapien
ccgaaaaactcacagtgatacttgt

SEQ ID NO: 31847 - DNA, 25 bp, Homo sapien
agtcaaacagaaactagacaccttg

SEQ ID NO: 31848 - DNA, 25 bp, Homo sapien
agtcaaacagaatctagacaccttg

SEQ ID NO: 31849 - DNA, 25 bp, Homo sapien
aagagaactcgtcagactcctctct

SEQ ID NO: 31850 - DNA, 25 bp, Homo sapien
aagagaactcgtgagactcctctct

SEQ ID NO: 31851 - DNA, 25 bp, Homo sapien
gtctcgacagtgattttaatccttc

SEQ ID NO: 31852 - DNA, 25 bp, Homo sapien
gtctcgacagtgtttttaatccttc

SEQ ID NO: 31853 - DNA, 25 bp, Homo sapien
agacaggtttgtgaccgtcgtctcc

SEQ ID NO: 31854 - DNA, 25 bp, Homo sapien
agacaggtttgtcaccgtcgtctcc

SEQ ID NO: 31855 - DNA, 25 bp, Homo sapien
gtacaggtcgtcacacccgacgtgc

SEQ ID NO: 31856 - DNA, 25 bp, Homo sapien
gtacaggtcgtctcacccgacgtgc

SEQ ID NO: 31857 - DNA, 25 bp, Homo sapien
ttccaagtaccacagaccgcgagtc

SEQ ID NO: 31858 - DNA, 25 bp, Homo sapien
ttccaagtaccagagaccgcgagtc

SEQ ID NO: 31859 - DNA, 25 bp, Homo sapien
tacgagactcccttcgacgccgtga

SEQ ID NO: 31860 - DNA, 25 bp, Homo sapien
tacgagactcccatcgacgccgtga

SEQ ID NO: 31861 - DNA, 25 bp, Homo sapien
tgtgaacaccggtcgtcacatagag

SEQ ID NO: 31862 - DNA, 25 bp, Homo sapien
tgtgaacaccggacgtcacatagag

SEQ ID NO: 31863 - DNA, 25 bp, Homo sapien
gcgaagacaccgtttatgcagagac

SEQ ID NO: 31864 - DNA, 25 bp, Homo sapien
gcgaagacaccgattatgcagagac

SEQ ID NO: 31865 - DNA, 25 bp, Homo sapien
atggaagctactagaccaggtagaa

SEQ ID NO: 31866 - DNA, 25 bp, Homo sapien
atggaagctacttgaccaggtagaa

SEQ ID NO: 31867 - DNA, 25 bp, Homo sapien
tccctagtctcaggtccgaggaaga

SEQ ID NO: 31868 - DNA, 25 bp, Homo sapien
tccctagtctcacgtccgaggaaga

SEQ ID NO: 31869 - DNA, 25 bp, Homo sapien
ttcacgtctcacctgagaaagacct

SEQ ID NO: 31870 - DNA, 25 bp, Homo sapien
ttcacgtctcacgtgagaaagacct

SEQ ID NO: 31871 - DNA, 25 bp, Homo sapien
gacagtgtctagtagtgtccgtccg

SEQ ID NO: 31872 - DNA, 25 bp, Homo sapien
gacagtgtctagaagtgtccgtccg

SEQ ID NO: 31873 - DNA, 25 bp, Homo sapien
tgagatttagtagtcgtcacactcg

SEQ ID NO: 31874 - DNA, 25 bp, Homo sapien
tgagatttagtactcgtcacactcg

SEQ ID NO: 31875 - DNA, 25 bp, Homo sapien
ggagaggtgtgaacttctctattcg

SEQ ID NO: 31876 - DNA, 25 bp, Homo sapien
ggagaggtgtgatcttctctattcg

SEQ ID NO: 31877 - DNA, 25 bp, Homo sapien
atatatatgtgtctccgtctttcgt

SEQ ID NO: 31878 - DNA, 25 bp, Homo sapien
atatatatgtgtgtccgtctttcgt

SEQ ID NO: 31879 - DNA, 25 bp, Homo sapien
tggtactcttaagtcgactttttgt

SEQ ID NO: 31880 - DNA, 25 bp, Homo sapien
tggtactcttaactcgactttttgt

SEQ ID NO: 31881 - DNA, 25 bp, Homo sapien
gtggtcctttcgtttctgtggtacc

SEQ ID NO: 31882 - DNA, 25 bp, Homo sapien
gtggtcctttcgattctgtggtacc

SEQ ID NO: 31883 - DNA, 25 bp, Homo sapien
ggagctctttgtcgtcatagcgaca

SEQ ID NO: 31884 - DNA, 25 bp, Homo sapien
ggagctctttgtggtcatagcgaca

SEQ ID NO: 31885 - DNA, 25 bp, Homo sapien
agaacgtccttttaacttataagga

SEQ ID NO: 31886 - DNA, 25 bp, Homo sapien
agaacgtcctttaaacttataagga

SEQ ID NO: 31887 - DNA, 25 bp, Homo sapien
gtcatattatctaagtatcactcgg

SEQ ID NO: 31888 - DNA, 25 bp, Homo sapien
gtcatattatcttagtatcactcgg

SEQ ID NO: 31889 - DNA, 25 bp, Homo sapien
tctctactgtaccatgtattacagg

SEQ ID NO: 31890 - DNA, 25 bp, Homo sapien
tctctactgtacgatgtattacagg

SEQ ID NO: 31891 - DNA, 25 bp, Homo sapien
tcttacccgtcaagacgtcacatgt

SEQ ID NO: 31892 - DNA, 25 bp, Homo sapien
tcttacccgtcatgacgtcacatgt

SEQ ID NO: 31893 - DNA, 25 bp, Homo sapien
gttcttctatatgctacctccacgg

SEQ ID NO: 31894 - DNA, 25 bp, Homo sapien
gttcttctatatcctacctccacgg

SEQ ID NO: 31895 - DNA, 25 bp, Homo sapien
cgttgagctttcctcctcgctgcga

SEQ ID NO: 31896 - DNA, 25 bp, Homo sapien
cgttgagctttcgtcctcgctgcga

SEQ ID NO: 31897 - DNA, 25 bp, Homo sapien
cgtttagatttgtcactagaatgac

SEQ ID NO: 31898 - DNA, 25 bp, Homo sapien
cgtttagatttgacactagaatgac

SEQ ID NO: 31899 - DNA, 25 bp, Homo sapien
aagaagtaccataagatgtccccga

SEQ ID NO: 31900 - DNA, 25 bp, Homo sapien
aagaagtaccattagatgtccccga

SEQ ID NO: 31901 - DNA, 25 bp, Homo sapien
aactagcgtccaagatgtcaccgaa

SEQ ID NO: 31902 - DNA, 25 bp, Homo sapien
aactagcgtccatgatgtcaccgaa

SEQ ID NO: 31903 - DNA, 25 bp, Homo sapien
tagtaagttctaattcagacccaat

SEQ ID NO: 31904 - DNA, 25 bp, Homo sapien
tagtaagttctatttcagacccaat

SEQ ID NO: 31905 - DNA, 25 bp, Homo sapien
ttcaggtcaacgtcgggaacacggt

SEQ ID NO: 31906 - DNA, 25 bp, Homo sapien
ttcaggtcaacgacgggaacacggt

SEQ ID NO: 31907 - DNA, 25 bp, Homo sapien
ctaagtcgaggtcgtaggaaccggt

SEQ ID NO: 31908 - DNA, 25 bp, Homo sapien
ctaagtcgaggtggtaggaaccggt

SEQ ID NO: 31909 - DNA, 25 bp, Homo sapien
ccttgtcccgcgacgaggtaccgag

SEQ ID NO: 31910 - DNA, 25 bp, Homo sapien
ccttgtcccgcgtcgaggtaccgag

SEQ ID NO: 31911 - DNA, 25 bp, Homo sapien
cccatgaccctcttcgagaggtgtg

SEQ ID NO: 31912 - DNA, 25 bp, Homo sapien
cccatgaccctcatcgagaggtgtg

SEQ ID NO: 31913 - DNA, 25 bp, Homo sapien
ctacacgcaaacactctaaagaagg

SEQ ID NO: 31914 - DNA, 25 bp, Homo sapien
ctacacgcaaactctctaaagaagg

SEQ ID NO: 31915 - DNA, 25 bp, Homo sapien
aacaatgtaaagacgaacttcactg

SEQ ID NO: 31916 - DNA, 25 bp, Homo sapien
aacaatgtaaagtcgaacttcactg

SEQ ID NO: 31917 - DNA, 25 bp, Homo sapien
gactcagaaggagaactcgtttacc

SEQ ID NO: 31918 - DNA, 25 bp, Homo sapien
gactcagaaggacaactcgtttacc

SEQ ID NO: 31919 - DNA, 25 bp, Homo sapien
cagtaaggtgagtagtttctttcac

SEQ ID NO: 31920 - DNA, 25 bp, Homo sapien
cagtaaggtgagaagtttctttcac

SEQ ID NO: 31921 - DNA, 25 bp, Homo sapien
gaaagagtaaacctattcctctaag

SEQ ID NO: 31922 - DNA, 25 bp, Homo sapien
gaaagagtaaacgtattcctctaag

SEQ ID NO: 31923 - DNA, 25 bp, Homo sapien
ttcgagaaagaaagggtgacctcaa

SEQ ID NO: 31924 - DNA, 25 bp, Homo sapien
ttcgagaaagaatgggtgacctcaa

SEQ ID NO: 31925 - DNA, 25 bp, Homo sapien
acaaagacccggaatcgtgtacaac

SEQ ID NO: 31926 - DNA, 25 bp, Homo sapien
acaaagacccggtatcgtgtacaac

SEQ ID NO: 31927 - DNA, 25 bp, Homo sapien
cgtaaggtacctggtgaccttaata

SEQ ID NO: 31928 - DNA, 25 bp, Homo sapien
cgtaaggtacctcgtgaccttaata

SEQ ID NO: 31929 - DNA, 25 bp, Homo sapien
ttctgtggtttgtctgttgtacacg

SEQ ID NO: 31930 - DNA, 25 bp, Homo sapien
ttctgtggtttgactgttgtacacg

SEQ ID NO: 31931 - DNA, 25 bp, Homo sapien
cttttcgggtctcgacattttagac

SEQ ID NO: 31932 - DNA, 25 bp, Homo sapien
cttttcgggtctggacattttagac

SEQ ID NO: 31933 - DNA, 25 bp, Homo sapien
cgtaagtgtgtgcaaattcctagac

SEQ ID NO: 31934 - DNA, 25 bp, Homo sapien
cgtaagtgtgtggaaattcctagac

SEQ ID NO: 31935 - DNA, 25 bp, Homo sapien
agagagaacggatcttatctctgtc

SEQ ID NO: 31936 - DNA, 25 bp, Homo sapien
agagagaacggaacttatctctgtc

SEQ ID NO: 31937 - DNA, 25 bp, Homo sapien
gttacataaacaccatattctcgtt

SEQ ID NO: 31938 - DNA, 25 bp, Homo sapien
gttacataaacagcatattctcgtt

SEQ ID NO: 31939 - DNA, 25 bp, Homo sapien
ggctaaaaagagctgttccgtgtgt

SEQ ID NO: 31940 - DNA, 25 bp, Homo sapien
ggctaaaaagaggtgttccgtgtgt

SEQ ID NO: 31941 - DNA, 25 bp, Homo sapien
tttacacaagacgtatattctcgag

SEQ ID NO: 31942 - DNA, 25 bp, Homo sapien
tttacacaagacctatattctcgag

SEQ ID NO: 31943 - DNA, 25 bp, Homo sapien
aatatgaaggagatcaagtgtccac

SEQ ID NO: 31944 - DNA, 25 bp, Homo sapien
aatatgaaggagttcaagtgtccac

SEQ ID NO: 31945 - DNA, 25 bp, Homo sapien
aaaaagactctttcctaggtacccg

SEQ ID NO: 31946 - DNA, 25 bp, Homo sapien
aaaaagactcttacctaggtacccg

SEQ ID NO: 31947 - DNA, 25 bp, Homo sapien
gagaacaaggccttccgtcaatcgg

SEQ ID NO: 31948 - DNA, 25 bp, Homo sapien
gagaacaaggccatccgtcaatcgg

SEQ ID NO: 31949 - DNA, 25 bp, Homo sapien
gttcaagagttctctcttcactccg

SEQ ID NO: 31950 - DNA, 25 bp, Homo sapien
gttcaagagttcactcttcactccg

SEQ ID NO: 31951 - DNA, 25 bp, Homo sapien
tttatgtaaccctatgttagtcgag

SEQ ID NO: 31952 - DNA, 25 bp, Homo sapien
tttatgtaacccaatgttagtcgag

SEQ ID NO: 31953 - DNA, 25 bp, Homo sapien
ttttgtcgacctagaggtatcgcag

SEQ ID NO: 31954 - DNA, 25 bp, Homo sapien
ttttgtcgaccttgaggtatcgcag

SEQ ID NO: 31955 - DNA, 25 bp, Homo sapien
acgcccgtaggcagtcggtccgtcg

SEQ ID NO: 31956 - DNA, 25 bp, Homo sapien
acgcccgtaggctgtcggtccgtcg

SEQ ID NO: 31957 - DNA, 25 bp, Homo sapien
gagtccgaccgtgtgtcgtccacca

SEQ ID NO: 31958 - DNA, 25 bp, Homo sapien
gagtccgaccgtctgtcgtccacca

SEQ ID NO: 31959 - DNA, 25 bp, Homo sapien
gtccacgtccgtatgtctaagaccc

SEQ ID NO: 31960 - DNA, 25 bp, Homo sapien
gtccacgtccgtttgtctaagaccc

SEQ ID NO: 31961 - DNA, 25 bp, Homo sapien
gactcacctctgtttcgtgagcctc

SEQ ID NO: 31962 - DNA, 25 bp, Homo sapien
gactcacctctgattcgtgagcctc

SEQ ID NO: 31963 - DNA, 25 bp, Homo sapien
cgactcctcggtagtgtagcccctg

SEQ ID NO: 31964 - DNA, 25 bp, Homo sapien
cgactcctcggttgtgtagcccctg

SEQ ID NO: 31965 - DNA, 25 bp, Homo sapien
acgtcccgtaagacagggccgcgcg

SEQ ID NO: 31966 - DNA, 25 bp, Homo sapien
acgtcccgtaagtcagggccgcgcg

SEQ ID NO: 31967 - DNA, 25 bp, Homo sapien
agactgtggaagtaagggactcatc

SEQ ID NO: 31968 - DNA, 25 bp, Homo sapien
agactgtggaagaaagggactcatc

SEQ ID NO: 31969 - DNA, 25 bp, Homo sapien
aaaagttcaattaacgggtatcatc

SEQ ID NO: 31970 - DNA, 25 bp, Homo sapien
aaaagttcaatttacgggtatcatc

SEQ ID NO: 31971 - DNA, 25 bp, Homo sapien
taacgtcccacgatcaggagaattc

SEQ ID NO: 31972 - DNA, 25 bp, Homo sapien
taacgtcccacgttcaggagaattc

SEQ ID NO: 31973 - DNA, 25 bp, Homo sapien
actgtgtccggttcaatatacaacc

SEQ ID NO: 31974 - DNA, 25 bp, Homo sapien
actgtgtccggtacaatatacaacc

SEQ ID NO: 31975 - DNA, 25 bp, Homo sapien
aagaggtctcgtgaacaaaacataa

SEQ ID NO: 31976 - DNA, 25 bp, Homo sapien
aagaggtctcgtcaacaaaacataa

SEQ ID NO: 31977 - DNA, 25 bp, Homo sapien
caaaggttcctactgtagaacagaa

SEQ ID NO: 31978 - DNA, 25 bp, Homo sapien
caaaggttcctagtgtagaacagaa

SEQ ID NO: 31979 - DNA, 25 bp, Homo sapien
agtacctaccctggttatccgactc

SEQ ID NO: 31980 - DNA, 25 bp, Homo sapien
agtacctaccctcgttatccgactc

SEQ ID NO: 31981 - DNA, 25 bp, Homo sapien
agactaccactcgttacccacgagt

SEQ ID NO: 31982 - DNA, 25 bp, Homo sapien
agactaccactccttacccacgagt

SEQ ID NO: 31983 - DNA, 25 bp, Homo sapien
acaagacctctgtcatcgtatgaac

SEQ ID NO: 31984 - DNA, 25 bp, Homo sapien
acaagacctctgacatcgtatgaac

SEQ ID NO: 31985 - DNA, 25 bp, Homo sapien
aagagacgaaggtcgaaccagacga

SEQ ID NO: 31986 - DNA, 25 bp, Homo sapien
aagagacgaaggacgaaccagacga

SEQ ID NO: 31987 - DNA, 25 bp, Homo sapien
ataagaactaccacaaacgttcgag

SEQ ID NO: 31988 - DNA, 25 bp, Homo sapien
ataagaactacctcaaacgttcgag

SEQ ID NO: 31989 - DNA, 25 bp, Homo sapien
caagagaccgagtccgaagtacagg

SEQ ID NO: 31990 - DNA, 25 bp, Homo sapien
caagagaccgagaccgaagtacagg

SEQ ID NO: 31991 - DNA, 25 bp, Homo sapien
caaagagtcgtagtggctgtgtagc

SEQ ID NO: 31992 - DNA, 25 bp, Homo sapien
caaagagtcgtactggctgtgtagc

SEQ ID NO: 31993 - DNA, 25 bp, Homo sapien
cgagacaacgtcgtgtcccggaact

SEQ ID NO: 31994 - DNA, 25 bp, Homo sapien
cgagacaacgtcctgtcccggaact

SEQ ID NO: 31995 - DNA, 25 bp, Homo sapien
ccggtgaggctggacccgacaccgt

SEQ ID NO: 31996 - DNA, 25 bp, Homo sapien
ccggtgaggctgcacccgacaccgt

SEQ ID NO: 31997 - DNA, 25 bp, Homo sapien
aaagttcgaggtcaaacctcggaca

SEQ ID NO: 31998 - DNA, 25 bp, Homo sapien
aaagttcgaggtgaaacctcggaca

SEQ ID NO: 31999 - DNA, 25 bp, Homo sapien
tcaacatccgggagtgaactcccat

SEQ ID NO: 32000 - DNA, 25 bp, Homo sapien
tcaacatccgggtgtgaactcccat

SEQ ID NO: 32001 - DNA, 25 bp, Homo sapien
cgagagacgcatgtcagactcccac

SEQ ID NO: 32002 - DNA, 25 bp, Homo sapien
cgagagacgcatctcagactcccac

SEQ ID NO: 32003 - DNA, 25 bp, Homo sapien
caacataacgtgtgccgaaccagcc

SEQ ID NO: 32004 - DNA, 25 bp, Homo sapien
caacataacgtgagccgaaccagcc

SEQ ID NO: 32005 - DNA, 25 bp, Homo sapien
agtactatagtcgagggagaacccc

SEQ ID NO: 32006 - DNA, 25 bp, Homo sapien
agtactatagtccagggagaacccc

SEQ ID NO: 32007 - DNA, 25 bp, Homo sapien
acgtaccatgtctgcacaccagtac

SEQ ID NO: 32008 - DNA, 25 bp, Homo sapien
acgtaccatgtcagcacaccagtac

SEQ ID NO: 32009 - DNA, 25 bp, Homo sapien
gactatccgaacaagaagacctatc

SEQ ID NO: 32010 - DNA, 25 bp, Homo sapien
gactatccgaactagaagacctatc

SEQ ID NO: 32011 - DNA, 25 bp, Homo sapien
gatttagaaacgaacgacaatcacc

SEQ ID NO: 32012 - DNA, 25 bp, Homo sapien
gatttagaaacgtacgacaatcacc

SEQ ID NO: 32013 - DNA, 25 bp, Homo sapien
cattataaatgtaacactaagtcaa

SEQ ID NO: 32014 - DNA, 25 bp, Homo sapien
cattataaatgttacactaagtcaa

SEQ ID NO: 32015 - DNA, 25 bp, Homo sapien
tttacagttttatgtgtacgactta

SEQ ID NO: 32016 - DNA, 25 bp, Homo sapien
tttacagttttaagtgtacgactta

SEQ ID NO: 32017 - DNA, 25 bp, Homo sapien
tacttttgactacagaccgttcgat

SEQ ID NO: 32018 - DNA, 25 bp, Homo sapien
tacttttgactagagaccgttcgat

SEQ ID NO: 32019 - DNA, 25 bp, Homo sapien
ctcgtctcacacgtagactcgaggc

SEQ ID NO: 32020 - DNA, 25 bp, Homo sapien
ctcgtctcacacctagactcgaggc

SEQ ID NO: 32021 - DNA, 25 bp, Homo sapien
gacaggtctcacctcaaagaatcct

SEQ ID NO: 32022 - DNA, 25 bp, Homo sapien
gacaggtctcacgtcaaagaatcct

SEQ ID NO: 32023 - DNA, 25 bp, Homo sapien
gaaggttcacttccaaccagacact

SEQ ID NO: 32024 - DNA, 25 bp, Homo sapien
gaaggttcacttgcaaccagacact

SEQ ID NO: 32025 - DNA, 25 bp, Homo sapien
aggggtcgtcactcccagagagaga

SEQ ID NO: 32026 - DNA, 25 bp, Homo sapien
aggggtcgtcacacccagagagaga

SEQ ID NO: 32027 - DNA, 25 bp, Homo sapien
atggatactccgtcccgtcgggaca

SEQ ID NO: 32028 - DNA, 25 bp, Homo sapien
atggatactccgacccgtcgggaca

SEQ ID NO: 32029 - DNA, 25 bp, Homo sapien
gacgacccaactcagtcagtcctat

SEQ ID NO: 32030 - DNA, 25 bp, Homo sapien
gacgacccaactgagtcagtcctat

SEQ ID NO: 32031 - DNA, 25 bp, Homo sapien
tcgtaacccaaggagacgacggtga

SEQ ID NO: 32032 - DNA, 25 bp, Homo sapien
tcgtaacccaagcagacgacggtga

SEQ ID NO: 32033 - DNA, 25 bp, Homo sapien
tcgcgtaccatgagacggtccgagt

SEQ ID NO: 32034 - DNA, 25 bp, Homo sapien
tcgcgtaccatgtgacggtccgagt

SEQ ID NO: 32035 - DNA, 25 bp, Homo sapien
tccgtcgcctcgtttgacttccgat

SEQ ID NO: 32036 - DNA, 25 bp, Homo sapien
tccgtcgcctcgattgacttccgat

SEQ ID NO: 32037 - DNA, 25 bp, Homo sapien
ccatgtgacccgtggacactaccgg

SEQ ID NO: 32038 - DNA, 25 bp, Homo sapien
ccatgtgacccgaggacactaccgg

SEQ ID NO: 32039 - DNA, 25 bp, Homo sapien
caatttgtatactcagtacctaagg

SEQ ID NO: 32040 - DNA, 25 bp, Homo sapien
caatttgtatacacagtacctaagg

SEQ ID NO: 32041 - DNA, 25 bp, Homo sapien
aggctacaagaagacaaccctagta

SEQ ID NO: 32042 - DNA, 25 bp, Homo sapien
aggctacaagaacacaaccctagta

SEQ ID NO: 32043 - DNA, 25 bp, Homo sapien
gtcagagtcggagaggctctgcgtc

SEQ ID NO: 32044 - DNA, 25 bp, Homo sapien
gtcagagtcggacaggctctgcgtc

SEQ ID NO: 32045 - DNA, 25 bp, Homo sapien
tcgtcccgatcgactgcggcctttg

SEQ ID NO: 32046 - DNA, 25 bp, Homo sapien
tcgtcccgatcgtctgcggcctttg

SEQ ID NO: 32047 - DNA, 25 bp, Homo sapien
gaacgttaatttgtgactcgttcgg

SEQ ID NO: 32048 - DNA, 25 bp, Homo sapien
gaacgttaatttctgactcgttcgg

SEQ ID NO: 32049 - DNA, 25 bp, Homo sapien
taaaactttttagtcaatccgtgtg

SEQ ID NO: 32050 - DNA, 25 bp, Homo sapien
taaaactttttactcaatccgtgtg

SEQ ID NO: 32051 - DNA, 25 bp, Homo sapien
actcaggcacgtttaagtcttaggt

SEQ ID NO: 32052 - DNA, 25 bp, Homo sapien
actcaggcacgtataagtcttaggt

SEQ ID NO: 32053 - DNA, 25 bp, Homo sapien
ttttatgcacgtaatgacgtctgaa

SEQ ID NO: 32054 - DNA, 25 bp, Homo sapien
ttttatgcacgttatgacgtctgaa

SEQ ID NO: 32055 - DNA, 25 bp, Homo sapien
taagacagtctcgttcttgtgaaac

SEQ ID NO: 32056 - DNA, 25 bp, Homo sapien
taagacagtctccttcttgtgaaac

SEQ ID NO: 32057 - DNA, 25 bp, Homo sapien
aagaaggtactccttcttgtgaaac

SEQ ID NO: 32058 - DNA, 25 bp, Homo sapien
aagaaggtactcgttcttgtgaaac

SEQ ID NO: 32059 - DNA, 25 bp, Homo sapien
gaagtcattgctactctcctgggag

SEQ ID NO: 32060 - DNA, 25 bp, Homo sapien
gaagtcattgcttctctcctgggag

SEQ ID NO: 32061 - DNA, 25 bp, Homo sapien
cactgtactgtggttttcctggaag

SEQ ID NO: 32062 - DNA, 25 bp, Homo sapien
cactgtactgtgcttttcctggaag

SEQ ID NO: 32063 - DNA, 25 bp, Homo sapien
cgacgtcagtggtctttgttaggaa

SEQ ID NO: 32064 - DNA, 25 bp, Homo sapien
cgacgtcagtggactttgttaggaa

SEQ ID NO: 32065 - DNA, 25 bp, Homo sapien
tcagtgatgacgactttgcagagaa

SEQ ID NO: 32066 - DNA, 25 bp, Homo sapien
tcagtgatgacgtctttgcagagaa

SEQ ID NO: 32067 - DNA, 25 bp, Homo sapien
ggtaagggatttcaaacgtacaact

SEQ ID NO: 32068 - DNA, 25 bp, Homo sapien
ggtaagggatttgaaacgtacaact

SEQ ID NO: 32069 - DNA, 25 bp, Homo sapien
cccacgtggactttaaaactgaact

SEQ ID NO: 32070 - DNA, 25 bp, Homo sapien
cccacgtggactataaaactgaact

SEQ ID NO: 32071 - DNA, 25 bp, Homo sapien
ggattgtctacaccacaagactaac

SEQ ID NO: 32072 - DNA, 25 bp, Homo sapien
ggattgtctacagcacaagactaac

SEQ ID NO: 32073 - DNA, 25 bp, Homo sapien
aagaagacccggaaacagtgacgga

SEQ ID NO: 32074 - DNA, 25 bp, Homo sapien
aagaagacccggtaacagtgacgga

SEQ ID NO: 32075 - DNA, 25 bp, Homo sapien
acggcagaggcctcaagtgtaagta

SEQ ID NO: 32076 - DNA, 25 bp, Homo sapien
acggcagaggccacaagtgtaagta

SEQ ID NO: 32077 - DNA, 25 bp, Homo sapien
gagtgtaccataaaactacgttcaa

SEQ ID NO: 32078 - DNA, 25 bp, Homo sapien
gagtgtaccatataactacgttcaa

SEQ ID NO: 32079 - DNA, 25 bp, Homo sapien
gagaaaacctattacatgacgtata

SEQ ID NO: 32080 - DNA, 25 bp, Homo sapien
gagaaaacctataacatgacgtata

SEQ ID NO: 32081 - DNA, 25 bp, Homo sapien
ttacactcacacgtctggtcgagac

SEQ ID NO: 32082 - DNA, 25 bp, Homo sapien
ttacactcacacctctggtcgagac

SEQ ID NO: 32083 - DNA, 25 bp, Homo sapien
gtaatgaatacgtcaatagaacaca

SEQ ID NO: 32084 - DNA, 25 bp, Homo sapien
gtaatgaatacgacaatagaacaca

SEQ ID NO: 32085 - DNA, 25 bp, Homo sapien
agtcagtgtcaaaagtagaactctt

SEQ ID NO: 32086 - DNA, 25 bp, Homo sapien
agtcagtgtcaatagtagaactctt

SEQ ID NO: 32087 - DNA, 25 bp, Homo sapien
gctcggcctacgtagacgacacctg

SEQ ID NO: 32088 - DNA, 25 bp, Homo sapien
gctcggcctacgaagacgacacctg

SEQ ID NO: 32089 - DNA, 25 bp, Homo sapien
gtgtctcttcgtgactcaccaccga

SEQ ID NO: 32090 - DNA, 25 bp, Homo sapien
gtgtctcttcgtcactcaccaccga

SEQ ID NO: 32091 - DNA, 25 bp, Homo sapien
taggttatcagtcacgtccccagct

SEQ ID NO: 32092 - DNA, 25 bp, Homo sapien
taggttatcagtgacgtccccagct

SEQ ID NO: 32093 - DNA, 25 bp, Homo sapien
gactgtctacaggtactcaacaaat

SEQ ID NO: 32094 - DNA, 25 bp, Homo sapien
gactgtctacagctactcaacaaat

SEQ ID NO: 32095 - DNA, 25 bp, Homo sapien
gagtcttccgagaatcagcacgaac

SEQ ID NO: 32096 - DNA, 25 bp, Homo sapien
gagtcttccgagtatcagcacgaac

SEQ ID NO: 32097 - DNA, 25 bp, Homo sapien
gggagtacgacgtgtaccgtgcaca

SEQ ID NO: 32098 - DNA, 25 bp, Homo sapien
gggagtacgacgagtaccgtgcaca

SEQ ID NO: 32099 - DNA, 25 bp, Homo sapien
tgtggggaagagaccagactcacag

SEQ ID NO: 32100 - DNA, 25 bp, Homo sapien
tgtggggaagagtccagactcacag

SEQ ID NO: 32101 - DNA, 25 bp, Homo sapien
tacggtttagggttccagactccag

SEQ ID NO: 32102 - DNA, 25 bp, Homo sapien
tacggtttagggatccagactccag

SEQ ID NO: 32103 - DNA, 25 bp, Homo sapien
aaaagggtggtctccgaagaagacg

SEQ ID NO: 32104 - DNA, 25 bp, Homo sapien
aaaagggtggtcaccgaagaagacg

SEQ ID NO: 32105 - DNA, 25 bp, Homo sapien
atgacttctgtacgaccagagaagg

SEQ ID NO: 32106 - DNA, 25 bp, Homo sapien
atgacttctgtaggaccagagaagg

SEQ ID NO: 32107 - DNA, 25 bp, Homo sapien
aacctttcgtcagtttcgacggacc

SEQ ID NO: 32108 - DNA, 25 bp, Homo sapien
aacctttcgtcactttcgacggacc

SEQ ID NO: 32109 - DNA, 25 bp, Homo sapien
ttttgtcggactttcacatacgtac

SEQ ID NO: 32110 - DNA, 25 bp, Homo sapien
ttttgtcggactatcacatacgtac

SEQ ID NO: 32111 - DNA, 25 bp, Homo sapien
tgtatgcgcagagacttcagtatat

SEQ ID NO: 32112 - DNA, 25 bp, Homo sapien
tgtatgcgcagacacttcagtatat

SEQ ID NO: 32113 - DNA, 25 bp, Homo sapien
atgttactgtccaaaggtctgttat

SEQ ID NO: 32114 - DNA, 25 bp, Homo sapien
atgttactgtcctaaggtctgttat

SEQ ID NO: 32115 - DNA, 25 bp, Homo sapien
tttctgatcccaagacgagatattt

SEQ ID NO: 32116 - DNA, 25 bp, Homo sapien
tttctgatcccatgacgagatattt

SEQ ID NO: 32117 - DNA, 25 bp, Homo sapien
ctgttgtaaggtcatgaagatcctt

SEQ ID NO: 32118 - DNA, 25 bp, Homo sapien
ctgttgtaaggtgatgaagatcctt

SEQ ID NO: 32119 - DNA, 25 bp, Homo sapien
cggaagaaggtcttgacctcggaca

SEQ ID NO: 32120 - DNA, 25 bp, Homo sapien
cggaagaaggtcatgacctcggaca

SEQ ID NO: 32121 - DNA, 25 bp, Homo sapien
gtcaacgcacgagatcttactatag

SEQ ID NO: 32122 - DNA, 25 bp, Homo sapien
gtcaacgcacgacatcttactatag

SEQ ID NO: 32123 - DNA, 25 bp, Homo sapien
aacaagtaatgtcatacaacagtcg

SEQ ID NO: 32124 - DNA, 25 bp, Homo sapien
aacaagtaatgtgatacaacagtcg

SEQ ID NO: 32125 - DNA, 25 bp, Homo sapien
tacgtataacacgagaagactttac

SEQ ID NO: 32126 - DNA, 25 bp, Homo sapien
tacgtataacaccagaagactttac

SEQ ID NO: 32127 - DNA, 25 bp, Homo sapien
tgtagagtaccacaggtagattcag

SEQ ID NO: 32128 - DNA, 25 bp, Homo sapien
tgtagagtaccagaggtagattcag

SEQ ID NO: 32129 - DNA, 25 bp, Homo sapien
taggagtgcctcaggtcgacgtgca

SEQ ID NO: 32130 - DNA, 25 bp, Homo sapien
taggagtgcctctggtcgacgtgca

SEQ ID NO: 32131 - DNA, 25 bp, Homo sapien
tacggcaaccgtttgaccgtcgcct

SEQ ID NO: 32132 - DNA, 25 bp, Homo sapien
tacggcaaccgtatgaccgtcgcct

SEQ ID NO: 32133 - DNA, 25 bp, Homo sapien
cgacccacacgtgctgaggcgtgtc

SEQ ID NO: 32134 - DNA, 25 bp, Homo sapien
cgacccacacgtcctgaggcgtgtc

SEQ ID NO: 32135 - DNA, 25 bp, Homo sapien
accgtactcagtcagtcaagttctg

SEQ ID NO: 32136 - DNA, 25 bp, Homo sapien
accgtactcagtgagtcaagttctg

SEQ ID NO: 32137 - DNA, 25 bp, Homo sapien
agtctgtcttgaatacacgttctac

SEQ ID NO: 32138 - DNA, 25 bp, Homo sapien
agtctgtcttgattacacgttctac

SEQ ID NO: 32139 - DNA, 25 bp, Homo sapien
gggaagaactttacgcttatggttc

SEQ ID NO: 32140 - DNA, 25 bp, Homo sapien
gggaagaacttttcgcttatggttc

SEQ ID NO: 32141 - DNA, 25 bp, Homo sapien
accgtttccttttttcttcgtgttt

SEQ ID NO: 32142 - DNA, 25 bp, Homo sapien
accgtttcctttattcttcgtgttt

SEQ ID NO: 32143 - DNA, 25 bp, Homo sapien
attaatttatctcaacattatttat

SEQ ID NO: 32144 - DNA, 25 bp, Homo sapien
attaatttatctgaacattatttat

SEQ ID NO: 32145 - DNA, 25 bp, Homo sapien
tttgtatcacctggtatccatgttt

SEQ ID NO: 32146 - DNA, 25 bp, Homo sapien
tttgtatcacctcgtatccatgttt

SEQ ID NO: 32147 - DNA, 25 bp, Homo sapien
tcgggttctggtcgttccttgtata

SEQ ID NO: 32148 - DNA, 25 bp, Homo sapien
tcgggttctggtggttccttgtata

SEQ ID NO: 32149 - DNA, 25 bp, Homo sapien
ccttcggtgttcgtctgactgttgc

SEQ ID NO: 32150 - DNA, 25 bp, Homo sapien
ccttcggtgttcctctgactgttgc

SEQ ID NO: 32151 - DNA, 25 bp, Homo sapien
gactatatgattcgtaccaaataga

SEQ ID NO: 32152 - DNA, 25 bp, Homo sapien
gactatatgattggtaccaaataga

SEQ ID NO: 32153 - DNA, 25 bp, Homo sapien
gaaaagtagattagacactccataa

SEQ ID NO: 32154 - DNA, 25 bp, Homo sapien
gaaaagtagatttgacactccataa

SEQ ID NO: 32155 - DNA, 25 bp, Homo sapien
agactgttaatacacagaacctcaa

SEQ ID NO: 32156 - DNA, 25 bp, Homo sapien
agactgttaatagacagaacctcaa

SEQ ID NO: 32157 - DNA, 25 bp, Homo sapien
ttatgtacttaacaaacgactgatg

SEQ ID NO: 32158 - DNA, 25 bp, Homo sapien
ttatgtacttaagaaacgactgatg

SEQ ID NO: 32159 - DNA, 25 bp, Homo sapien
cgatatactaaaaccgattccgtga

SEQ ID NO: 32160 - DNA, 25 bp, Homo sapien
cgatatactaaatccgattccgtga

SEQ ID NO: 32161 - DNA, 25 bp, Homo sapien
ctcgctgtagggagactatctttac

SEQ ID NO: 32162 - DNA, 25 bp, Homo sapien
ctcgctgtagggtgactatctttac

SEQ ID NO: 32163 - DNA, 25 bp, Homo sapien
acggtgaggtaccaggtgtcggaac

SEQ ID NO: 32164 - DNA, 25 bp, Homo sapien
acggtgaggtacgaggtgtcggaac

SEQ ID NO: 32165 - DNA, 25 bp, Homo sapien
gtagtgacgatatacgagtttcaac

SEQ ID NO: 32166 - DNA, 25 bp, Homo sapien
gtagtgacgataaacgagtttcaac

SEQ ID NO: 32167 - DNA, 25 bp, Homo sapien
gtagtaagtctcaagtcaataaact

SEQ ID NO: 32168 - DNA, 25 bp, Homo sapien
gtagtaagtctctagtcaataaact

SEQ ID NO: 32169 - DNA, 25 bp, Homo sapien
atgaccgttagttagtcgtttaatc

SEQ ID NO: 32170 - DNA, 25 bp, Homo sapien
atgaccgttagtaagtcgtttaatc

SEQ ID NO: 32171 - DNA, 25 bp, Homo sapien
acattctctacttacttccaactgt

SEQ ID NO: 32172 - DNA, 25 bp, Homo sapien
acattctctactaacttccaactgt

SEQ ID NO: 32173 - DNA, 25 bp, Homo sapien
gatttcctgtacgatcgtccaatct

SEQ ID NO: 32174 - DNA, 25 bp, Homo sapien
gatttcctgtaccatcgtccaatct

SEQ ID NO: 32175 - DNA, 25 bp, Homo sapien
tcatattagagtcaggtactcccac

SEQ ID NO: 32176 - DNA, 25 bp, Homo sapien
tcatattagagtgaggtactcccac

SEQ ID NO: 32177 - DNA, 25 bp, Homo sapien
ctcccagttcgaacgggtcctggtg

SEQ ID NO: 32178 - DNA, 25 bp, Homo sapien
ctcccagttcgatcgggtcctggtg

SEQ ID NO: 32179 - DNA, 25 bp, Homo sapien
cgggtctatgtcatagtctataatt

SEQ ID NO: 32180 - DNA, 25 bp, Homo sapien
cgggtctatgtcttagtctataatt

SEQ ID NO: 32181 - DNA, 25 bp, Homo sapien
ggtatctaacaccttacactaaagg

SEQ ID NO: 32182 - DNA, 25 bp, Homo sapien
ggtatctaacacgttacactaaagg

SEQ ID NO: 32183 - DNA, 25 bp, Homo sapien
gtcttatatagtgttacgaccaatg

SEQ ID NO: 32184 - DNA, 25 bp, Homo sapien
gtcttatatagtcttacgaccaatg

SEQ ID NO: 32185 - DNA, 25 bp, Homo sapien
aaccatcttaggtcagacagttatt

SEQ ID NO: 32186 - DNA, 25 bp, Homo sapien
aaccatcttaggacagacagttatt

SEQ ID NO: 32187 - DNA, 25 bp, Homo sapien
ccactgtcgaggaccgccgtcgagg

SEQ ID NO: 32188 - DNA, 25 bp, Homo sapien
ccactgtcgaggtccgccgtcgagg

SEQ ID NO: 32189 - DNA, 25 bp, Homo sapien
cgacttccagagaccgctcggaggt

SEQ ID NO: 32190 - DNA, 25 bp, Homo sapien
cgacttccagagtccgctcggaggt

SEQ ID NO: 32191 - DNA, 25 bp, Homo sapien
tcgaccgtttcgaatcattcgttgg

SEQ ID NO: 32192 - DNA, 25 bp, Homo sapien
tcgaccgtttcgtatcattcgttgg

SEQ ID NO: 32193 - DNA, 25 bp, Homo sapien
cgacatttgaatgatctaggtccgt

SEQ ID NO: 32194 - DNA, 25 bp, Homo sapien
cgacatttgaatcatctaggtccgt

SEQ ID NO: 32195 - DNA, 25 bp, Homo sapien
caagtcgtgcttcgagaatcgcagt

SEQ ID NO: 32196 - DNA, 25 bp, Homo sapien
caagtcgtgcttggagaatcgcagt

SEQ ID NO: 32197 - DNA, 25 bp, Homo sapien
gatctcgtttaactgtcaaattcag

SEQ ID NO: 32198 - DNA, 25 bp, Homo sapien
gatctcgtttaagtgtcaaattcag

SEQ ID NO: 32199 - DNA, 25 bp, Homo sapien
ttcttgtcgtttcgtgggaaaacag

SEQ ID NO: 32200 - DNA, 25 bp, Homo sapien
ttcttgtcgtttggtgggaaaacag

SEQ ID NO: 32201 - DNA, 25 bp, Homo sapien
gtctgtcttcccagtggaaaatact

SEQ ID NO: 32202 - DNA, 25 bp, Homo sapien
gtctgtcttccctgtggaaaatact

SEQ ID NO: 32203 - DNA, 25 bp, Homo sapien
ggtcgttttctcaagacccacaaac

SEQ ID NO: 32204 - DNA, 25 bp, Homo sapien
ggtcgttttctctagacccacaaac

SEQ ID NO: 32205 - DNA, 25 bp, Homo sapien
gtctttaagggtcaaacgactaaag

SEQ ID NO: 32206 - DNA, 25 bp, Homo sapien
gtctttaagggtgaaacgactaaag

SEQ ID NO: 32207 - DNA, 25 bp, Homo sapien
taaacaaaggtcgtagagactttct

SEQ ID NO: 32208 - DNA, 25 bp, Homo sapien
taaacaaaggtcctagagactttct

SEQ ID NO: 32209 - DNA, 25 bp, Homo sapien
tgtatcataagtcgtcttgactgcc

SEQ ID NO: 32210 - DNA, 25 bp, Homo sapien
tgtatcataagtggtcttgactgcc

SEQ ID NO: 32211 - DNA, 25 bp, Homo sapien
gtatcaacagtaggtcttgggtcgg

SEQ ID NO: 32212 - DNA, 25 bp, Homo sapien
gtatcaacagtacgtcttgggtcgg

SEQ ID NO: 32213 - DNA, 25 bp, Homo sapien
cacactttagacagggacccggggg

SEQ ID NO: 32214 - DNA, 25 bp, Homo sapien
cacactttagactgggacccggggg

SEQ ID NO: 32215 - DNA, 25 bp, Homo sapien
actaccgaacatgttcctggactag

SEQ ID NO: 32216 - DNA, 25 bp, Homo sapien
actaccgaacatcttcctggactag

SEQ ID NO: 32217 - DNA, 25 bp, Homo sapien
gaacgaccgacattccggccgtcga

SEQ ID NO: 32218 - DNA, 25 bp, Homo sapien
gaacgaccgacaatccggccgtcga

SEQ ID NO: 32219 - DNA, 25 bp, Homo sapien
gagggtccaaactgggtaccggact

SEQ ID NO: 32220 - DNA, 25 bp, Homo sapien
gagggtccaaacagggtaccggact

SEQ ID NO: 32221 - DNA, 25 bp, Homo sapien
acaggagcctcaaagggtctgtggt

SEQ ID NO: 32222 - DNA, 25 bp, Homo sapien
acaggagcctcatagggtctgtggt

SEQ ID NO: 32223 - DNA, 25 bp, Homo sapien
aagggtcctcggacttggtagtgac

SEQ ID NO: 32224 - DNA, 25 bp, Homo sapien
aagggtcctcggtcttggtagtgac

SEQ ID NO: 32225 - DNA, 25 bp, Homo sapien
acatgtcgctatagatttcttaaag

SEQ ID NO: 32226 - DNA, 25 bp, Homo sapien
acatgtcgctattgatttcttaaag

SEQ ID NO: 32227 - DNA, 25 bp, Homo sapien
tatgggaacttcatccgtaacacaa

SEQ ID NO: 32228 - DNA, 25 bp, Homo sapien
tatgggaacttcttccgtaacacaa

SEQ ID NO: 32229 - DNA, 25 bp, Homo sapien
aactggaggtgcttcgtgaacaccc

SEQ ID NO: 32230 - DNA, 25 bp, Homo sapien
aactggaggtgcatcgtgaacaccc

SEQ ID NO: 32231 - DNA, 25 bp, Homo sapien
tgttctagggggtattgaacctcct

SEQ ID NO: 32232 - DNA, 25 bp, Homo sapien
tgttctagggggaattgaacctcct

SEQ ID NO: 32233 - DNA, 25 bp, Homo sapien
gctaaggtcgtgtgttggaccccgt

SEQ ID NO: 32234 - DNA, 25 bp, Homo sapien
gctaaggtcgtgagttggaccccgt

SEQ ID NO: 32235 - DNA, 25 bp, Homo sapien
ctcagttgggtttaagacgtcgttt

SEQ ID NO: 32236 - DNA, 25 bp, Homo sapien
ctcagttgggttaaagacgtcgttt

SEQ ID NO: 32237 - DNA, 25 bp, Homo sapien
tggaagaggacgaacagtctccact

SEQ ID NO: 32238 - DNA, 25 bp, Homo sapien
tggaagaggacgtacagtctccact

SEQ ID NO: 32239 - DNA, 25 bp, Homo sapien
acggtacagagcagttgcttctctt

SEQ ID NO: 32240 - DNA, 25 bp, Homo sapien
acggtacagagctgttgcttctctt

SEQ ID NO: 32241 - DNA, 25 bp, Homo sapien
taaatcttagggtctttcaggtact

SEQ ID NO: 32242 - DNA, 25 bp, Homo sapien
taaatcttagggactttcaggtact

SEQ ID NO: 32243 - DNA, 25 bp, Homo sapien
ggtcccgagtcgacagtgacccgtc

SEQ ID NO: 32244 - DNA, 25 bp, Homo sapien
ggtcccgagtcgtcagtgacccgtc

SEQ ID NO: 32245 - DNA, 25 bp, Homo sapien
cagtgtcccgtcgaccaggcctctg

SEQ ID NO: 32246 - DNA, 25 bp, Homo sapien
cagtgtcccgtccaccaggcctctg

SEQ ID NO: 32247 - DNA, 25 bp, Homo sapien
gagtaccgacttaaagggctctcgg

SEQ ID NO: 32248 - DNA, 25 bp, Homo sapien
gagtaccgactttaagggctctcgg

SEQ ID NO: 32249 - DNA, 25 bp, Homo sapien
cgaaccctgtcgaaaacacttacgg

SEQ ID NO: 32250 - DNA, 25 bp, Homo sapien
cgaaccctgtcgtaaacacttacgg

SEQ ID NO: 32251 - DNA, 25 bp, Homo sapien
aacaacccggttactgacgcgtcca

SEQ ID NO: 32252 - DNA, 25 bp, Homo sapien
aacaacccggtttctgacgcgtcca

SEQ ID NO: 32253 - DNA, 25 bp, Homo sapien
aggaaacccctgtcctgcagtcctt

SEQ ID NO: 32254 - DNA, 25 bp, Homo sapien
aggaaacccctgacctgcagtcctt

SEQ ID NO: 32255 - DNA, 25 bp, Homo sapien
tcgagaccccaggaatttatagcca

SEQ ID NO: 32256 - DNA, 25 bp, Homo sapien
tcgagaccccagcaatttatagcca

SEQ ID NO: 32257 - DNA, 25 bp, Homo sapien
accccggtaaattctatgtctactt

SEQ ID NO: 32258 - DNA, 25 bp, Homo sapien
accccggtaaatactatgtctactt

SEQ ID NO: 32259 - DNA, 25 bp, Homo sapien
cggatccaagactgactggtcgctt

SEQ ID NO: 32260 - DNA, 25 bp, Homo sapien
cggatccaagacagactggtcgctt

SEQ ID NO: 32261 - DNA, 25 bp, Homo sapien
actgttacacagacggcggttggac

SEQ ID NO: 32262 - DNA, 25 bp, Homo sapien
actgttacacagtcggcggttggac

SEQ ID NO: 32263 - DNA, 25 bp, Homo sapien
tctcttctactactccgggtccggg

SEQ ID NO: 32264 - DNA, 25 bp, Homo sapien
tctcttctactagtccgggtccggg

SEQ ID NO: 32265 - DNA, 25 bp, Homo sapien
cttcaccgtccgtttcgaaacagag

SEQ ID NO: 32266 - DNA, 25 bp, Homo sapien
cttcaccgtccgattcgaaacagag

SEQ ID NO: 32267 - DNA, 25 bp, Homo sapien
atacaaaacttcgaccgaagcgaag

SEQ ID NO: 32268 - DNA, 25 bp, Homo sapien
atacaaaacttccaccgaagcgaag

SEQ ID NO: 32269 - DNA, 25 bp, Homo sapien
agagaacgaccatggcttatcggaa

SEQ ID NO: 32270 - DNA, 25 bp, Homo sapien
agagaacgaccaaggcttatcggaa

SEQ ID NO: 32271 - DNA, 25 bp, Homo sapien
agggtcacgtcctctaccactggga

SEQ ID NO: 32272 - DNA, 25 bp, Homo sapien
agggtcacgtccactaccactggga

SEQ ID NO: 32273 - DNA, 25 bp, Homo sapien
ttctgaactgccatcattataggaa

SEQ ID NO: 32274 - DNA, 25 bp, Homo sapien
ttctgaactgccttcattataggaa

SEQ ID NO: 32275 - DNA, 25 bp, Homo sapien
gacctgtacatcttttgtatcgatt

SEQ ID NO: 32276 - DNA, 25 bp, Homo sapien
gacctgtacatcatttgtatcgatt

SEQ ID NO: 32277 - DNA, 25 bp, Homo sapien
ctttggtcttcgtttagtcgtatac

SEQ ID NO: 32278 - DNA, 25 bp, Homo sapien
ctttggtcttcgattagtcgtatac

SEQ ID NO: 32279 - DNA, 25 bp, Homo sapien
tcatttctggtcgacatgtgtagaa

SEQ ID NO: 32280 - DNA, 25 bp, Homo sapien
tcatttctggtccacatgtgtagaa

SEQ ID NO: 32281 - DNA, 25 bp, Homo sapien
tctgattgaggtctccggtatgtga

SEQ ID NO: 32282 - DNA, 25 bp, Homo sapien
tctgattgaggtgtccggtatgtga

SEQ ID NO: 32283 - DNA, 25 bp, Homo sapien
ctagaattactttgtcaggataaac

SEQ ID NO: 32284 - DNA, 25 bp, Homo sapien
ctagaattacttagtcaggataaac

SEQ ID NO: 32285 - DNA, 25 bp, Homo sapien
gtaaataacgatgtcttgccagtac

SEQ ID NO: 32286 - DNA, 25 bp, Homo sapien
gtaaataacgatctcttgccagtac

SEQ ID NO: 32287 - DNA, 25 bp, Homo sapien
cattaaataactattttagacacta

SEQ ID NO: 32288 - DNA, 25 bp, Homo sapien
cattaaataacttttttagacacta

SEQ ID NO: 32289 - DNA, 25 bp, Homo sapien
acacatagacatcgtgtccagtaca

SEQ ID NO: 32290 - DNA, 25 bp, Homo sapien
acacatagacatggtgtccagtaca

SEQ ID NO: 32291 - DNA, 25 bp, Homo sapien
gaccccgtagacgtctcccgagtaa

SEQ ID NO: 32292 - DNA, 25 bp, Homo sapien
gaccccgtagacctctcccgagtaa

SEQ ID NO: 32293 - DNA, 25 bp, Homo sapien
ccgtacaacgtaattcgtgtgttaa

SEQ ID NO: 32294 - DNA, 25 bp, Homo sapien
ccgtacaacgtatttcgtgtgttaa

SEQ ID NO: 32295 - DNA, 25 bp, Homo sapien
atggtcattactgactctgggtgag

SEQ ID NO: 32296 - DNA, 25 bp, Homo sapien
atggtcattactcactctgggtgag

SEQ ID NO: 32297 - DNA, 25 bp, Homo sapien
atcggcttcagtaccggcagtacgg

SEQ ID NO: 32298 - DNA, 25 bp, Homo sapien
atcggcttcagttccggcagtacgg

SEQ ID NO: 32299 - DNA, 25 bp, Homo sapien
acgtgtcctttttcccctacggtcg

SEQ ID NO: 32300 - DNA, 25 bp, Homo sapien
acgtgtccttttacccctacggtcg

SEQ ID NO: 32301 - DNA, 25 bp, Homo sapien
aagacatcctcgagtacaccagcgg

SEQ ID NO: 32302 - DNA, 25 bp, Homo sapien
aagacatcctcgtgtacaccagcgg

SEQ ID NO: 32303 - DNA, 25 bp, Homo sapien
tcccgactatgtcctgagccgaggc

SEQ ID NO: 32304 - DNA, 25 bp, Homo sapien
tcccgactatgtgctgagccgaggc

SEQ ID NO: 32305 - DNA, 25 bp, Homo sapien
ggtcctccctatcttaggttcataa

SEQ ID NO: 32306 - DNA, 25 bp, Homo sapien
ggtcctccctatgttaggttcataa

SEQ ID NO: 32307 - DNA, 25 bp, Homo sapien
cccggccaacgataatcgtatctac

SEQ ID NO: 32308 - DNA, 25 bp, Homo sapien
cccggccaacgaaaatcgtatctac

SEQ ID NO: 32309 - DNA, 25 bp, Homo sapien
ctagtcacctcaccagaattgtcag

SEQ ID NO: 32310 - DNA, 25 bp, Homo sapien
ctagtcacctcagcagaattgtcag

SEQ ID NO: 32311 - DNA, 25 bp, Homo sapien
cgtatcctcaagagaccgtctacca

SEQ ID NO: 32312 - DNA, 25 bp, Homo sapien
cgtatcctcaagtgaccgtctacca

SEQ ID NO: 32313 - DNA, 25 bp, Homo sapien
accccaactactgtgtcacgtcgta

SEQ ID NO: 32314 - DNA, 25 bp, Homo sapien
accccaactactctgtcacgtcgta

SEQ ID NO: 32315 - DNA, 25 bp, Homo sapien
gacccgtcttaagtgtaacgtcgac

SEQ ID NO: 32316 - DNA, 25 bp, Homo sapien
gacccgtcttaactgtaacgtcgac

SEQ ID NO: 32317 - DNA, 25 bp, Homo sapien
tgtctgttcgaccagttacacgtcg

SEQ ID NO: 32318 - DNA, 25 bp, Homo sapien
tgtctgttcgacgagttacacgtcg

SEQ ID NO: 32319 - DNA, 25 bp, Homo sapien
ttgcatgacgtttgataaatcactg

SEQ ID NO: 32320 - DNA, 25 bp, Homo sapien
ttgcatgacgttagataaatcactg

SEQ ID NO: 32321 - DNA, 25 bp, Homo sapien
catgttttgacaaatacatcgactg

SEQ ID NO: 32322 - DNA, 25 bp, Homo sapien
catgttttgacatatacatcgactg

SEQ ID NO: 32323 - DNA, 25 bp, Homo sapien
caatctctcaaactctcggtcacct

SEQ ID NO: 32324 - DNA, 25 bp, Homo sapien
caatctctcaaagtctcggtcacct

SEQ ID NO: 32325 - DNA, 25 bp, Homo sapien
acctcttgaacgtattagagtccct

SEQ ID NO: 32326 - DNA, 25 bp, Homo sapien
acctcttgaacgaattagagtccct

SEQ ID NO: 32327 - DNA, 25 bp, Homo sapien
gtgctacgagtgcacacgtgtcccc

SEQ ID NO: 32328 - DNA, 25 bp, Homo sapien
gtgctacgagtggacacgtgtcccc

SEQ ID NO: 32329 - DNA, 25 bp, Homo sapien
tcatggtccagtagccgttcttggt

SEQ ID NO: 32330 - DNA, 25 bp, Homo sapien
tcatggtccagttgccgttcttggt

SEQ ID NO: 32331 - DNA, 25 bp, Homo sapien
cttgcccagtacgaggtcctagggt

SEQ ID NO: 32332 - DNA, 25 bp, Homo sapien
cttgcccagtaccaggtcctagggt

SEQ ID NO: 32333 - DNA, 25 bp, Homo sapien
gaccttaagaacgtcaatgtttcaa

SEQ ID NO: 32334 - DNA, 25 bp, Homo sapien
gaccttaagaacctcaatgtttcaa

SEQ ID NO: 32335 - DNA, 25 bp, Homo sapien
ttaccaaaggaaagctacgtttcat

SEQ ID NO: 32336 - DNA, 25 bp, Homo sapien
ttaccaaaggaatgctacgtttcat

SEQ ID NO: 32337 - DNA, 25 bp, Homo sapien
tgaaaagagtaagttacggtgaccc

SEQ ID NO: 32338 - DNA, 25 bp, Homo sapien
tgaaaagagtaacttacggtgaccc

SEQ ID NO: 32339 - DNA, 25 bp, Homo sapien
aactcagaattttacgatgtaccgg

SEQ ID NO: 32340 - DNA, 25 bp, Homo sapien
aactcagaatttaacgatgtaccgg

SEQ ID NO: 32341 - DNA, 25 bp, Homo sapien
ctaccaacacgacttcaggtgtcgg

SEQ ID NO: 32342 - DNA, 25 bp, Homo sapien
ctaccaacacgagttcaggtgtcgg

SEQ ID NO: 32343 - DNA, 25 bp, Homo sapien
tttttatgtcgatcttcatccgagg

SEQ ID NO: 32344 - DNA, 25 bp, Homo sapien
tttttatgtcgaacttcatccgagg

SEQ ID NO: 32345 - DNA, 25 bp, Homo sapien
tctcagattcgaacgtagcctgggg

SEQ ID NO: 32346 - DNA, 25 bp, Homo sapien
tctcagattcgatcgtagcctgggg

SEQ ID NO: 32347 - DNA, 25 bp, Homo sapien
ggtgacattctatccctactggtga

SEQ ID NO: 32348 - DNA, 25 bp, Homo sapien
ggtgacattctaaccctactggtga

SEQ ID NO: 32349 - DNA, 25 bp, Homo sapien
ctgctagaacttcaacgcccggaaa

SEQ ID NO: 32350 - DNA, 25 bp, Homo sapien
ctgctagaacttgaacgcccggaaa

SEQ ID NO: 32351 - DNA, 25 bp, Homo sapien
ttagcttgtctactacgaaatttag

SEQ ID NO: 32352 - DNA, 25 bp, Homo sapien
ttagcttgtctagtacgaaatttag

SEQ ID NO: 32353 - DNA, 25 bp, Homo sapien
aggaaacgatagacacaatactgag

SEQ ID NO: 32354 - DNA, 25 bp, Homo sapien
aggaaacgatagtcacaatactgag

SEQ ID NO: 32355 - DNA, 25 bp, Homo sapien
tcgtaaagacagtcgacgaaacaga

SEQ ID NO: 32356 - DNA, 25 bp, Homo sapien
tcgtaaagacagacgacgaaacaga

SEQ ID NO: 32357 - DNA, 25 bp, Homo sapien
gtacacttaaagtacgtttaccgga

SEQ ID NO: 32358 - DNA, 25 bp, Homo sapien
gtacacttaaagaacgtttaccgga

SEQ ID NO: 32359 - DNA, 25 bp, Homo sapien
cgacaccaaccgtacttctgtgaga

SEQ ID NO: 32360 - DNA, 25 bp, Homo sapien
cgacaccaaccgaacttctgtgaga

SEQ ID NO: 32361 - DNA, 25 bp, Homo sapien
cgcaccagtcgtcaaacgttggcat

SEQ ID NO: 32362 - DNA, 25 bp, Homo sapien
cgcaccagtcgtgaaacgttggcat

SEQ ID NO: 32363 - DNA, 25 bp, Homo sapien
cacgaaataccgtccgcgtttgagc

SEQ ID NO: 32364 - DNA, 25 bp, Homo sapien
cacgaaataccgaccgcgtttgagc

SEQ ID NO: 32365 - DNA, 25 bp, Homo sapien
catgtgtgtttccattaaatgttac

SEQ ID NO: 32366 - DNA, 25 bp, Homo sapien
catgtgtgtttcgattaaatgttac

SEQ ID NO: 32367 - DNA, 25 bp, Homo sapien
tgtcgcttacgagtcttgtttccta

SEQ ID NO: 32368 - DNA, 25 bp, Homo sapien
tgtcgcttacgactcttgtttccta

SEQ ID NO: 32369 - DNA, 25 bp, Homo sapien
gtgtcttcaagtacgtgtgtctccc

SEQ ID NO: 32370 - DNA, 25 bp, Homo sapien
gtgtcttcaagttcgtgtgtctccc

SEQ ID NO: 32371 - DNA, 25 bp, Homo sapien
gtgttttacgtttcgtccacaccgt

SEQ ID NO: 32372 - DNA, 25 bp, Homo sapien
gtgttttacgttacgtccacaccgt

SEQ ID NO: 32373 - DNA, 25 bp, Homo sapien
gttaatctacctccactgtgctcgt

SEQ ID NO: 32374 - DNA, 25 bp, Homo sapien
gttaatctacctgcactgtgctcgt

SEQ ID NO: 32375 - DNA, 25 bp, Homo sapien
agttcttctagagtacgatctgtcc

SEQ ID NO: 32376 - DNA, 25 bp, Homo sapien
agttcttctagactacgatctgtcc

SEQ ID NO: 32377 - DNA, 25 bp, Homo sapien
agagtttgttatatactgtatccac

SEQ ID NO: 32378 - DNA, 25 bp, Homo sapien
agagtttgttatttactgtatccac

SEQ ID NO: 32379 - DNA, 25 bp, Homo sapien
ggtgtctacttgtcggaggagtcgc

SEQ ID NO: 32380 - DNA, 25 bp, Homo sapien
ggtgtctacttgacggaggagtcgc

SEQ ID NO: 32381 - DNA, 25 bp, Homo sapien
atgtctccttgtgctactgggtccg

SEQ ID NO: 32382 - DNA, 25 bp, Homo sapien
atgtctccttgtcctactgggtccg

SEQ ID NO: 32383 - DNA, 25 bp, Homo sapien
cactgtatagcctagtcgagtccgt

SEQ ID NO: 32384 - DNA, 25 bp, Homo sapien
cactgtatagccaagtcgagtccgt

SEQ ID NO: 32385 - DNA, 25 bp, Homo sapien
tcggtggtcgtctatgtcgagtctg

SEQ ID NO: 32386 - DNA, 25 bp, Homo sapien
tcggtggtcgtcaatgtcgagtctg

SEQ ID NO: 32387 - DNA, 25 bp, Homo sapien
ccggtgtctccacagacgtgtcgtc

SEQ ID NO: 32388 - DNA, 25 bp, Homo sapien
ccggtgtctccagagacgtgtcgtc

SEQ ID NO: 32389 - DNA, 25 bp, Homo sapien
acacgtctcggagtacgtagtgcct

SEQ ID NO: 32390 - DNA, 25 bp, Homo sapien
acacgtctcggactacgtagtgcct

SEQ ID NO: 32391 - DNA, 25 bp, Homo sapien
aacacggagttgtatagtgagtcct

SEQ ID NO: 32392 - DNA, 25 bp, Homo sapien
aacacggagttgaatagtgagtcct

SEQ ID NO: 32393 - DNA, 25 bp, Homo sapien
tcaacggagtagacactacgggtcc

SEQ ID NO: 32394 - DNA, 25 bp, Homo sapien
tcaacggagtagtcactacgggtcc

SEQ ID NO: 32395 - DNA, 25 bp, Homo sapien
gtaacgaaagtgaacacggtgactc

SEQ ID NO: 32396 - DNA, 25 bp, Homo sapien
gtaacgaaagtgtacacggtgactc

SEQ ID NO: 32397 - DNA, 25 bp, Homo sapien
gaggagactaagatcgacgaggtcc

SEQ ID NO: 32398 - DNA, 25 bp, Homo sapien
gaggagactaagttcgacgaggtcc

SEQ ID NO: 32399 - DNA, 25 bp, Homo sapien
cgacggtttgtgtacgcagtgactc

SEQ ID NO: 32400 - DNA, 25 bp, Homo sapien
cgacggtttgtgaacgcagtgactc

SEQ ID NO: 32401 - DNA, 25 bp, Homo sapien
cgaccgtcctattccgaatacgaca

SEQ ID NO: 32402 - DNA, 25 bp, Homo sapien
cgaccgtcctataccgaatacgaca

SEQ ID NO: 32403 - DNA, 25 bp, Homo sapien
agttcgacattctgtaggaatacta

SEQ ID NO: 32404 - DNA, 25 bp, Homo sapien
agttcgacattcagtaggaatacta

SEQ ID NO: 32405 - DNA, 25 bp, Homo sapien
tcagaaaacatgtagtgacatcgta

SEQ ID NO: 32406 - DNA, 25 bp, Homo sapien
tcagaaaacatgaagtgacatcgta

SEQ ID NO: 32407 - DNA, 25 bp, Homo sapien
agacggactgacaggatccactcat

SEQ ID NO: 32408 - DNA, 25 bp, Homo sapien
agacggactgactggatccactcat

SEQ ID NO: 32409 - DNA, 25 bp, Homo sapien
gaggtaaacagacactactctacat

SEQ ID NO: 32410 - DNA, 25 bp, Homo sapien
gaggtaaacagagactactctacat

SEQ ID NO: 32411 - DNA, 25 bp, Homo sapien
cagaagagacacaagtggtttatac

SEQ ID NO: 32412 - DNA, 25 bp, Homo sapien
cagaagagacactagtggtttatac

SEQ ID NO: 32413 - DNA, 25 bp, Homo sapien
acgaaaggacacgttattccatact

SEQ ID NO: 32414 - DNA, 25 bp, Homo sapien
acgaaaggacaccttattccatact

SEQ ID NO: 32415 - DNA, 25 bp, Homo sapien
cgaaagaggtagtgtgactccttct

SEQ ID NO: 32416 - DNA, 25 bp, Homo sapien
cgaaagaggtagagtgactccttct

SEQ ID NO: 32417 - DNA, 25 bp, Homo sapien
gtataaaccgtaacttcaagagata

SEQ ID NO: 32418 - DNA, 25 bp, Homo sapien
gtataaaccgtatcttcaagagata

SEQ ID NO: 32419 - DNA, 25 bp, Homo sapien
ggtgtttcccggactccacgacgga

SEQ ID NO: 32420 - DNA, 25 bp, Homo sapien
ggtgtttcccggtctccacgacgga

SEQ ID NO: 32421 - DNA, 25 bp, Homo sapien
cgtcccgacgaggtcccgacgaaag

SEQ ID NO: 32422 - DNA, 25 bp, Homo sapien
cgtcccgacgagctcccgacgaaag

SEQ ID NO: 32423 - DNA, 25 bp, Homo sapien
cgtccaccatcaggtcgtcgaagag

SEQ ID NO: 32424 - DNA, 25 bp, Homo sapien
cgtccaccatcacgtcgtcgaagag

SEQ ID NO: 32425 - DNA, 25 bp, Homo sapien
agtacattcatctcaagttgtaaag

SEQ ID NO: 32426 - DNA, 25 bp, Homo sapien
agtacattcatcacaagttgtaaag

SEQ ID NO: 32427 - DNA, 25 bp, Homo sapien
cttcgtgaccttatgtcgaaataag

SEQ ID NO: 32428 - DNA, 25 bp, Homo sapien
cttcgtgaccttttgtcgaaataag

SEQ ID NO: 32429 - DNA, 25 bp, Homo sapien
tgtaccttcctctcgagttctaggt

SEQ ID NO: 32430 - DNA, 25 bp, Homo sapien
tgtaccttcctcacgagttctaggt

SEQ ID NO: 32431 - DNA, 25 bp, Homo sapien
ctttacaccgacactcgttcgtcga

SEQ ID NO: 32432 - DNA, 25 bp, Homo sapien
ctttacaccgactctcgttcgtcga

SEQ ID NO: 32433 - DNA, 25 bp, Homo sapien
accgcacgcggcaggtcgtgtgtcc

SEQ ID NO: 32434 - DNA, 25 bp, Homo sapien
accgcacgcggctggtcgtgtgtcc

SEQ ID NO: 32435 - DNA, 25 bp, Homo sapien
ccggtgtcgtcctggtcgtgtgtca

SEQ ID NO: 32436 - DNA, 25 bp, Homo sapien
ccggtgtcgtccaggtcgtgtgtca

SEQ ID NO: 32437 - DNA, 25 bp, Homo sapien
tgtcctttagtgtccgggatgacta

SEQ ID NO: 32438 - DNA, 25 bp, Homo sapien
tgtcctttagtgaccgggatgacta

SEQ ID NO: 32439 - DNA, 25 bp, Homo sapien
ttttgttctccgaggacgacgtacg

SEQ ID NO: 32440 - DNA, 25 bp, Homo sapien
ttttgttctccgtggacgacgtacg

SEQ ID NO: 32441 - DNA, 25 bp, Homo sapien
gcttccggaggtcacagaggaccta

SEQ ID NO: 32442 - DNA, 25 bp, Homo sapien
gcttccggaggtgacagaggaccta

SEQ ID NO: 32443 - DNA, 25 bp, Homo sapien
tgcgcacccggacagggagcgtctc

SEQ ID NO: 32444 - DNA, 25 bp, Homo sapien
tgcgcacccggagagggagcgtctc

SEQ ID NO: 32445 - DNA, 25 bp, Homo sapien
tcgaggtcgtagagcctcgtcggcc

SEQ ID NO: 32446 - DNA, 25 bp, Homo sapien
tcgaggtcgtagtgcctcgtcggcc

SEQ ID NO: 32447 - DNA, 25 bp, Homo sapien
tcaggagtagtcgtcctccggtccg

SEQ ID NO: 32448 - DNA, 25 bp, Homo sapien
tcaggagtagtcctcctccggtccg

SEQ ID NO: 32449 - DNA, 25 bp, Homo sapien
tcaaacgagtcttcatccgtctcag

SEQ ID NO: 32450 - DNA, 25 bp, Homo sapien
tcaaacgagtctacatccgtctcag

SEQ ID NO: 32451 - DNA, 25 bp, Homo sapien
gtgactcagacgtccctgtctcctt

SEQ ID NO: 32452 - DNA, 25 bp, Homo sapien
gtgactcagacgaccctgtctcctt

SEQ ID NO: 32453 - DNA, 25 bp, Homo sapien
accaaaggtaaaactgtagtctcag

SEQ ID NO: 32454 - DNA, 25 bp, Homo sapien
accaaaggtaaatctgtagtctcag

SEQ ID NO: 32455 - DNA, 25 bp, Homo sapien
atttaactccttctttacgtcttag

SEQ ID NO: 32456 - DNA, 25 bp, Homo sapien
atttaactccttgtttacgtcttag

SEQ ID NO: 32457 - DNA, 25 bp, Homo sapien
tagaaccaaccgacgtatacgaaag

SEQ ID NO: 32458 - DNA, 25 bp, Homo sapien
tagaaccaaccgtcgtatacgaaag

SEQ ID NO: 32459 - DNA, 25 bp, Homo sapien
agttgtgacgtcagccgactgaaag

SEQ ID NO: 32460 - DNA, 25 bp, Homo sapien
agttgtgacgtctgccgactgaaag

SEQ ID NO: 32461 - DNA, 25 bp, Homo sapien
cgcgatctgtcgattgagacgacgt

SEQ ID NO: 32462 - DNA, 25 bp, Homo sapien
cgcgatctgtcgtttgagacgacgt

SEQ ID NO: 32463 - DNA, 25 bp, Homo sapien
ggagacgatagttcggaacgatgtc

SEQ ID NO: 32464 - DNA, 25 bp, Homo sapien
ggagacgatagtacggaacgatgtc

SEQ ID NO: 32465 - DNA, 25 bp, Homo sapien
gaaggagaagaacgtagagtctctc

SEQ ID NO: 32466 - DNA, 25 bp, Homo sapien
gaaggagaagaaggtagagtctctc

SEQ ID NO: 32467 - DNA, 25 bp, Homo sapien
aaagtaggtaagggagaggtacttc

SEQ ID NO: 32468 - DNA, 25 bp, Homo sapien
aaagtaggtaagcgagaggtacttc

SEQ ID NO: 32469 - DNA, 25 bp, Homo sapien
tgtacttgtcagttacgtgtcttct

SEQ ID NO: 32470 - DNA, 25 bp, Homo sapien
tgtacttgtcagatacgtgtcttct

SEQ ID NO: 32471 - DNA, 25 bp, Homo sapien
tgtaagacgtgaactgtagtgtctc

SEQ ID NO: 32472 - DNA, 25 bp, Homo sapien
tgtaagacgtgatctgtagtgtctc

SEQ ID NO: 32473 - DNA, 25 bp, Homo sapien
tatgaagtgacatgtgtcttactac

SEQ ID NO: 32474 - DNA, 25 bp, Homo sapien
tatgaagtgacaagtgtcttactac

SEQ ID NO: 32475 - DNA, 25 bp, Homo sapien
ggaaagactaaggacttcatctact

SEQ ID NO: 32476 - DNA, 25 bp, Homo sapien
ggaaagactaagcacttcatctact

SEQ ID NO: 32477 - DNA, 25 bp, Homo sapien
cgtcgagatctaacctaaagacaac

SEQ ID NO: 32478 - DNA, 25 bp, Homo sapien
cgtcgagatctatcctaaagacaac

SEQ ID NO: 32479 - DNA, 25 bp, Homo sapien
cagtaaactctagtcaaagacaacg

SEQ ID NO: 32480 - DNA, 25 bp, Homo sapien
cagtaaactctactcaaagacaacg

SEQ ID NO: 32481 - DNA, 25 bp, Homo sapien
cgacaaaacttagaattactcgtgt

SEQ ID NO: 32482 - DNA, 25 bp, Homo sapien
cgacaaaacttacaattactcgtgt

SEQ ID NO: 32483 - DNA, 25 bp, Homo sapien
ccgtcaaacaactttgaccgcttag

SEQ ID NO: 32484 - DNA, 25 bp, Homo sapien
ccgtcaaacaacattgaccgcttag

SEQ ID NO: 32485 - DNA, 25 bp, Homo sapien
gtagtaactgtctgctgctactact

SEQ ID NO: 32486 - DNA, 25 bp, Homo sapien
gtagtaactgtcagctgctactact

SEQ ID NO: 32487 - DNA, 25 bp, Homo sapien
gtccgacaggtcattcaccccttat

SEQ ID NO: 32488 - DNA, 25 bp, Homo sapien
gtccgacaggtctttcaccccttat

SEQ ID NO: 32489 - DNA, 25 bp, Homo sapien
agcagacagggtctcactcctcttc

SEQ ID NO: 32490 - DNA, 25 bp, Homo sapien
agcagacagggtgtcactcctcttc

SEQ ID NO: 32491 - DNA, 25 bp, Homo sapien
gtggaaggtcggtcaccgcgacttc

SEQ ID NO: 32492 - DNA, 25 bp, Homo sapien
gtggaaggtcggacaccgcgacttc

SEQ ID NO: 32493 - DNA, 25 bp, Homo sapien
cacgaaacgcgacacgaccggagtc

SEQ ID NO: 32494 - DNA, 25 bp, Homo sapien
cacgaaacgcgagacgaccggagtc

SEQ ID NO: 32495 - DNA, 25 bp, Homo sapien
gagacgtccgtcttacgaccactgc

SEQ ID NO: 32496 - DNA, 25 bp, Homo sapien
gagacgtccgtcatacgaccactgc

SEQ ID NO: 32497 - DNA, 25 bp, Homo sapien
tgactactcctgtctacgactatgg

SEQ ID NO: 32498 - DNA, 25 bp, Homo sapien
tgactactcctgactacgactatgg

SEQ ID NO: 32499 - DNA, 25 bp, Homo sapien
cgaagacaccgtttatgcagagact

SEQ ID NO: 32500 - DNA, 25 bp, Homo sapien
cgaagacaccgtatatgcagagact

SEQ ID NO: 32501 - DNA, 25 bp, Homo sapien
ggtaagtcacctgacaaggtcgaat

SEQ ID NO: 32502 - DNA, 25 bp, Homo sapien
ggtaagtcacctcacaaggtcgaat

SEQ ID NO: 32503 - DNA, 25 bp, Homo sapien
ttcacaggacacttcacaggacaga

SEQ ID NO: 32504 - DNA, 25 bp, Homo sapien
ttcacaggacacatcacaggacaga

SEQ ID NO: 32505 - DNA, 25 bp, Homo sapien
ctctcagtctcacagcgataacgaa

SEQ ID NO: 32506 - DNA, 25 bp, Homo sapien
ctctcagtctcagagcgataacgaa

SEQ ID NO: 32507 - DNA, 25 bp, Homo sapien
ccacgttactagacggtccgactac

SEQ ID NO: 32508 - DNA, 25 bp, Homo sapien
ccacgttactagtcggtccgactac

SEQ ID NO: 32509 - DNA, 25 bp, Homo sapien
gtgagatttagtagtcgtcacactc

SEQ ID NO: 32510 - DNA, 25 bp, Homo sapien
gtgagatttagttgtcgtcacactc

SEQ ID NO: 32511 - DNA, 25 bp, Homo sapien
ggaaggtgttacatacgtcactctc

SEQ ID NO: 32512 - DNA, 25 bp, Homo sapien
ggaaggtgttacttacgtcactctc

SEQ ID NO: 32513 - DNA, 25 bp, Homo sapien
aaatatgtgtcgacgtcgtctcttt

SEQ ID NO: 32514 - DNA, 25 bp, Homo sapien
aaatatgtgtcgtcgtcgtctcttt

SEQ ID NO: 32515 - DNA, 25 bp, Homo sapien
tgagagtcttactagaactcttttt

SEQ ID NO: 32516 - DNA, 25 bp, Homo sapien
tgagagtcttacaagaactcttttt

SEQ ID NO: 32517 - DNA, 25 bp, Homo sapien
gtcgtcttatacagttacttggttc

SEQ ID NO: 32518 - DNA, 25 bp, Homo sapien
gtcgtcttatactgttacttggttc

SEQ ID NO: 32519 - DNA, 25 bp, Homo sapien
gggtccgttgtttgtacagggactc

SEQ ID NO: 32520 - DNA, 25 bp, Homo sapien
gggtccgttgttagtacagggactc

SEQ ID NO: 32521 - DNA, 25 bp, Homo sapien
gtgaagccttcttaactaatggaga

SEQ ID NO: 32522 - DNA, 25 bp, Homo sapien
gtgaagccttctaaactaatggaga

SEQ ID NO: 32523 - DNA, 25 bp, Homo sapien
gttatttacactagtatcttacgag

SEQ ID NO: 32524 - DNA, 25 bp, Homo sapien
gttatttacacttgtatcttacgag

SEQ ID NO: 32525 - DNA, 25 bp, Homo sapien
gtgttctgtaccagtgtaccaaggt

SEQ ID NO: 32526 - DNA, 25 bp, Homo sapien
gtgttctgtacctgtgtaccaaggt

SEQ ID NO: 32527 - DNA, 25 bp, Homo sapien
ttttctcactactgtgatgacatag

SEQ ID NO: 32528 - DNA, 25 bp, Homo sapien
ttttctcactacagtgatgacatag

SEQ ID NO: 32529 - DNA, 25 bp, Homo sapien
gtttgttatatactgtatccacgat

SEQ ID NO: 32530 - DNA, 25 bp, Homo sapien
gtttgttatatagtgtatccacgat

SEQ ID NO: 32531 - DNA, 25 bp, Homo sapien
gtttgctttcatttcgtcaggtagt

SEQ ID NO: 32532 - DNA, 25 bp, Homo sapien
gtttgctttcatatcgtcaggtagt

SEQ ID NO: 32533 - DNA, 25 bp, Homo sapien
gtttgacttccgaacagtaaataga

SEQ ID NO: 32534 - DNA, 25 bp, Homo sapien
gtttgacttccgtacagtaaataga

SEQ ID NO: 32535 - DNA, 25 bp, Homo sapien
gtaacgtaccatagacttcgaccca

SEQ ID NO: 32536 - DNA, 25 bp, Homo sapien
gtaacgtaccattgacttcgaccca

SEQ ID NO: 32537 - DNA, 25 bp, Homo sapien
ggacaccgtcctagctgtcagtcca

SEQ ID NO: 32538 - DNA, 25 bp, Homo sapien
ggacaccgtccttgctgtcagtcca

SEQ ID NO: 32539 - DNA, 25 bp, Homo sapien
gaaagtgtctatgtgagaaccacat

SEQ ID NO: 32540 - DNA, 25 bp, Homo sapien
gaaagtgtctatctgagaaccacat

SEQ ID NO: 32541 - DNA, 25 bp, Homo sapien
tatcagttcaagctggcagaagagt

SEQ ID NO: 32542 - DNA, 25 bp, Homo sapien
tatcagttcaaggtggcagaagagt

SEQ ID NO: 32543 - DNA, 25 bp, Homo sapien
tctagatcaatctgatgacaccggt

SEQ ID NO: 32544 - DNA, 25 bp, Homo sapien
tctagatcaatcagatgacaccggt

SEQ ID NO: 32545 - DNA, 25 bp, Homo sapien
tgtgtccaccgtcacagtgtccgag

SEQ ID NO: 32546 - DNA, 25 bp, Homo sapien
tgtgtccaccgtgacagtgtccgag

SEQ ID NO: 32547 - DNA, 25 bp, Homo sapien
ccctggacgccctgtcgaagtcagg

SEQ ID NO: 32548 - DNA, 25 bp, Homo sapien
ccctggacgcccagtcgaagtcagg

SEQ ID NO: 32549 - DNA, 25 bp, Homo sapien
tacccgtcaggacaccgaaagaagg

SEQ ID NO: 32550 - DNA, 25 bp, Homo sapien
tacccgtcaggagaccgaaagaagg

SEQ ID NO: 32551 - DNA, 25 bp, Homo sapien
atacagactgaagaaaactccagtg

SEQ ID NO: 32552 - DNA, 25 bp, Homo sapien
atacagactgaacaaaactccagtg

SEQ ID NO: 32553 - DNA, 25 bp, Homo sapien
gtaccgaaatgagaatcgtattctt

SEQ ID NO: 32554 - DNA, 25 bp, Homo sapien
gtaccgaaatgacaatcgtattctt

SEQ ID NO: 32555 - DNA, 25 bp, Homo sapien
gataaaagagaatcatcgttgtcac

SEQ ID NO: 32556 - DNA, 25 bp, Homo sapien
gataaaagagaaacatcgttgtcac

SEQ ID NO: 32557 - DNA, 25 bp, Homo sapien
gaaattagaaataactcccgtcagt

SEQ ID NO: 32558 - DNA, 25 bp, Homo sapien
gaaattagaaattactcccgtcagt

SEQ ID NO: 32559 - DNA, 25 bp, Homo sapien
cggaaaaagagacttactctacgaa

SEQ ID NO: 32560 - DNA, 25 bp, Homo sapien
cggaaaaagagagttactctacgaa

SEQ ID NO: 32561 - DNA, 25 bp, Homo sapien
caaagacacatgcttgtcgtcaacg

SEQ ID NO: 32562 - DNA, 25 bp, Homo sapien
caaagacacatggttgtcgtcaacg

SEQ ID NO: 32563 - DNA, 25 bp, Homo sapien
caaggtcattgtgacgacgctcata

SEQ ID NO: 32564 - DNA, 25 bp, Homo sapien
caaggtcattgtcacgacgctcata

SEQ ID NO: 32565 - DNA, 25 bp, Homo sapien
aatagtgtttggtctcgttgtactc

SEQ ID NO: 32566 - DNA, 25 bp, Homo sapien
aatagtgtttggactcgttgtactc

SEQ ID NO: 32567 - DNA, 25 bp, Homo sapien
cgtttatggtttgtcatggttacac

SEQ ID NO: 32568 - DNA, 25 bp, Homo sapien
cgtttatggtttctcatggttacac

SEQ ID NO: 32569 - DNA, 25 bp, Homo sapien
gtttcaggtgttaaacagttccaac

SEQ ID NO: 32570 - DNA, 25 bp, Homo sapien
gtttcaggtgtttaacagttccaac

SEQ ID NO: 32571 - DNA, 25 bp, Homo sapien
agggaagacaacagtactctactga

SEQ ID NO: 32572 - DNA, 25 bp, Homo sapien
agggaagacaactgtactctactga

SEQ ID NO: 32573 - DNA, 25 bp, Homo sapien
gtgtcataagacgacatatatcttt

SEQ ID NO: 32574 - DNA, 25 bp, Homo sapien
gtgtcataagaccacatatatcttt

SEQ ID NO: 32575 - DNA, 25 bp, Homo sapien
gtgtagaaataacctttccgtgtcg

SEQ ID NO: 32576 - DNA, 25 bp, Homo sapien
gtgtagaaataagctttccgtgtcg

SEQ ID NO: 32577 - DNA, 25 bp, Homo sapien
ttgacgaaagtaatttatctcgtcg

SEQ ID NO: 32578 - DNA, 25 bp, Homo sapien
ttgacgaaagtattttatctcgtcg

SEQ ID NO: 32579 - DNA, 25 bp, Homo sapien
attgaacgggttctagtgtaccgat

SEQ ID NO: 32580 - DNA, 25 bp, Homo sapien
attgaacgggttgtagtgtaccgat

SEQ ID NO: 32581 - DNA, 25 bp, Homo sapien
caagaaaactacattcgcgggaccc

SEQ ID NO: 32582 - DNA, 25 bp, Homo sapien
caagaaaactactttcgcgggaccc

SEQ ID NO: 32583 - DNA, 25 bp, Homo sapien
gtaaaaaatccgttcagttaatctg

SEQ ID NO: 32584 - DNA, 25 bp, Homo sapien
gtaaaaaatccgatcagttaatctg

SEQ ID NO: 32585 - DNA, 25 bp, Homo sapien
gatacaaatgtctctgtgtaagtcc

SEQ ID NO: 32586 - DNA, 25 bp, Homo sapien
gatacaaatgtcactgtgtaagtcc

SEQ ID NO: 32587 - DNA, 25 bp, Homo sapien
tgtatagttccctactgtacagtga

SEQ ID NO: 32588 - DNA, 25 bp, Homo sapien
tgtatagttcccaactgtacagtga

SEQ ID NO: 32589 - DNA, 25 bp, Homo sapien
cttgggtcaccaaaggtatcgacgg

SEQ ID NO: 32590 - DNA, 25 bp, Homo sapien
cttgggtcaccataggtatcgacgg

SEQ ID NO: 32591 - DNA, 25 bp, Homo sapien
tgaactccagcgacggagtcacgtc

SEQ ID NO: 32592 - DNA, 25 bp, Homo sapien
tgaactccagcgtcggagtcacgtc

SEQ ID NO: 32593 - DNA, 25 bp, Homo sapien
agtccgacctgtgctgtccgaccga

SEQ ID NO: 32594 - DNA, 25 bp, Homo sapien
agtccgacctgtcctgtccgaccga

SEQ ID NO: 32595 - DNA, 25 bp, Homo sapien
ggaccagtctcgtggtctaagaccc

SEQ ID NO: 32596 - DNA, 25 bp, Homo sapien
ggaccagtctcgaggtctaagaccc

SEQ ID NO: 32597 - DNA, 25 bp, Homo sapien
gatcacctggattcgtagacccgag

SEQ ID NO: 32598 - DNA, 25 bp, Homo sapien
gatcacctggatacgtagacccgag

SEQ ID NO: 32599 - DNA, 25 bp, Homo sapien
cggatctcttgtatatagcccacgg

SEQ ID NO: 32600 - DNA, 25 bp, Homo sapien
cggatctcttgtttatagcccacgg

SEQ ID NO: 32601 - DNA, 25 bp, Homo sapien
aaaggtccctggacagggacccgag

SEQ ID NO: 32602 - DNA, 25 bp, Homo sapien
aaaggtccctggtcagggacccgag

SEQ ID NO: 32603 - DNA, 25 bp, Homo sapien
attgttgaagttcagggacacagac

SEQ ID NO: 32604 - DNA, 25 bp, Homo sapien
attgttgaagttgagggacacagac

SEQ ID NO: 32605 - DNA, 25 bp, Homo sapien
gaaggtttaattacggcgacagttc

SEQ ID NO: 32606 - DNA, 25 bp, Homo sapien
gaaggtttaatttcggcgacagttc

SEQ ID NO: 32607 - DNA, 25 bp, Homo sapien
aacgtcctccttacggacacatgtc

SEQ ID NO: 32608 - DNA, 25 bp, Homo sapien
aacgtcctcctttcggacacatgtc

SEQ ID NO: 32609 - DNA, 25 bp, Homo sapien
ggactgttcccttatagaaaacaac

SEQ ID NO: 32610 - DNA, 25 bp, Homo sapien
ggactgttccctaatagaaaacaac

SEQ ID NO: 32611 - DNA, 25 bp, Homo sapien
gaacgtctctgatacgaaaacataa

SEQ ID NO: 32612 - DNA, 25 bp, Homo sapien
gaacgtctctgaaacgaaaacataa

SEQ ID NO: 32613 - DNA, 25 bp, Homo sapien
aaaggtttcgtacgtaacaatgaac

SEQ ID NO: 32614 - DNA, 25 bp, Homo sapien
aaaggtttcgtaggtaacaatgaac

SEQ ID NO: 32615 - DNA, 25 bp, Homo sapien
aacacctatcatggtttgtcgtatc

SEQ ID NO: 32616 - DNA, 25 bp, Homo sapien
aacacctatcatcgtttgtcgtatc

SEQ ID NO: 32617 - DNA, 25 bp, Homo sapien
tagactaccactcgttacccacgag

SEQ ID NO: 32618 - DNA, 25 bp, Homo sapien
tagactaccactggttacccacgag

SEQ ID NO: 32619 - DNA, 25 bp, Homo sapien
acatagacccggtcgaactatccct

SEQ ID NO: 32620 - DNA, 25 bp, Homo sapien
acatagacccggacgaactatccct

SEQ ID NO: 32621 - DNA, 25 bp, Homo sapien
aaaagcgaacggtgagagaccgacc

SEQ ID NO: 32622 - DNA, 25 bp, Homo sapien
aaaagcgaacggagagagaccgacc

SEQ ID NO: 32623 - DNA, 25 bp, Homo sapien
tagaaaatacctagaacacgtctga

SEQ ID NO: 32624 - DNA, 25 bp, Homo sapien
tagaaaataccttgaacacgtctga

SEQ ID NO: 32625 - DNA, 25 bp, Homo sapien
acagagactcgacacggaagcggtg

SEQ ID NO: 32626 - DNA, 25 bp, Homo sapien
acagagactcgagacggaagcggtg

SEQ ID NO: 32627 - DNA, 25 bp, Homo sapien
ataagagtacgtgttggcgtcgagc

SEQ ID NO: 32628 - DNA, 25 bp, Homo sapien
ataagagtacgtcttggcgtcgagc

SEQ ID NO: 32629 - DNA, 25 bp, Homo sapien
tcgagaagacgtgtctcggcgaacc

SEQ ID NO: 32630 - DNA, 25 bp, Homo sapien
tcgagaagacgtctctcggcgaacc

SEQ ID NO: 32631 - DNA, 25 bp, Homo sapien
ccggtaggtgtcagaagacccaccg

SEQ ID NO: 32632 - DNA, 25 bp, Homo sapien
ccggtaggtgtctgaagacccaccg

SEQ ID NO: 32633 - DNA, 25 bp, Homo sapien
aaacgttacgggtgaagcgcgcccg

SEQ ID NO: 32634 - DNA, 25 bp, Homo sapien
aaacgttacgggagaagcgcgcccg

SEQ ID NO: 32635 - DNA, 25 bp, Homo sapien
ttataacccaggagtcaaccccggt

SEQ ID NO: 32636 - DNA, 25 bp, Homo sapien
ttataacccaggtgtcaaccccggt

SEQ ID NO: 32637 - DNA, 25 bp, Homo sapien
tcggagacggtgtgtcaatccacat

SEQ ID NO: 32638 - DNA, 25 bp, Homo sapien
tcggagacggtgagtcaatccacat

SEQ ID NO: 32639 - DNA, 25 bp, Homo sapien
caaagaaggttggtcgaattgtcct

SEQ ID NO: 32640 - DNA, 25 bp, Homo sapien
caaagaaggttgctcgaattgtcct

SEQ ID NO: 32641 - DNA, 25 bp, Homo sapien
ctcataagtggttaggggaacctcc

SEQ ID NO: 32642 - DNA, 25 bp, Homo sapien
ctcataagtggtaaggggaacctcc

SEQ ID NO: 32643 - DNA, 25 bp, Homo sapien
gaaactacgcaaacgggacccagac

SEQ ID NO: 32644 - DNA, 25 bp, Homo sapien
gaaactacgcaatcgggacccagac

SEQ ID NO: 32645 - DNA, 25 bp, Homo sapien
actatccgaacaagaagacctatcg

SEQ ID NO: 32646 - DNA, 25 bp, Homo sapien
actatccgaacatgaagacctatcg

SEQ ID NO: 32647 - DNA, 25 bp, Homo sapien
gatgttaaggacttatcaatctacc

SEQ ID NO: 32648 - DNA, 25 bp, Homo sapien
gatgttaaggacatatcaatctacc

SEQ ID NO: 32649 - DNA, 25 bp, Homo sapien
catgttaaggtggaccgatgtcgaa

SEQ ID NO: 32650 - DNA, 25 bp, Homo sapien
catgttaaggtgcaccgatgtcgaa

SEQ ID NO: 32651 - DNA, 25 bp, Homo sapien
atttacagttttatgtgtacgactt

SEQ ID NO: 32652 - DNA, 25 bp, Homo sapien
atttacagttttttgtgtacgactt

SEQ ID NO: 32653 - DNA, 25 bp, Homo sapien
atatcattgactcgtgtcggtttat

SEQ ID NO: 32654 - DNA, 25 bp, Homo sapien
atatcattgactggtgtcggtttat

SEQ ID NO: 32655 - DNA, 25 bp, Homo sapien
ccggtctcacgactgactgtacggc

SEQ ID NO: 32656 - DNA, 25 bp, Homo sapien
ccggtctcacgagtgactgtacggc

SEQ ID NO: 32657 - DNA, 25 bp, Homo sapien
tcaccggttctactaaaagaatccg

SEQ ID NO: 32658 - DNA, 25 bp, Homo sapien
tcaccggttctagtaaaagaatccg

SEQ ID NO: 32659 - DNA, 25 bp, Homo sapien
atgaaggtttacgaggaacgaaacc

SEQ ID NO: 32660 - DNA, 25 bp, Homo sapien
atgaaggtttaccaggaacgaaacc

SEQ ID NO: 32661 - DNA, 25 bp, Homo sapien
ggggtactcacgaccaccgagtgaa

SEQ ID NO: 32662 - DNA, 25 bp, Homo sapien
ggggtactcacgtccaccgagtgaa

SEQ ID NO: 32663 - DNA, 25 bp, Homo sapien
gtgtgagttccgtgcctcagtgaac

SEQ ID NO: 32664 - DNA, 25 bp, Homo sapien
gtgtgagttccgagcctcagtgaac

SEQ ID NO: 32665 - DNA, 25 bp, Homo sapien
gcgtctcacgaatctactcatgctt

SEQ ID NO: 32666 - DNA, 25 bp, Homo sapien
gcgtctcacgaaactactcatgctt

SEQ ID NO: 32667 - DNA, 25 bp, Homo sapien
tctcccgtagaggagctaggtcgat

SEQ ID NO: 32668 - DNA, 25 bp, Homo sapien
tctcccgtagagcagctaggtcgat

SEQ ID NO: 32669 - DNA, 25 bp, Homo sapien
gacccgacggacagcgagcgtcgat

SEQ ID NO: 32670 - DNA, 25 bp, Homo sapien
gacccgacggactgcgagcgtcgat

SEQ ID NO: 32671 - DNA, 25 bp, Homo sapien
ttcgggccgagtactgacctcacat

SEQ ID NO: 32672 - DNA, 25 bp, Homo sapien
ttcgggccgagttctgacctcacat

SEQ ID NO: 32673 - DNA, 25 bp, Homo sapien
ccatgtgactacgagggacctcccg

SEQ ID NO: 32674 - DNA, 25 bp, Homo sapien
ccatgtgactaccagggacctcccg

SEQ ID NO: 32675 - DNA, 25 bp, Homo sapien
acaatgctaacatggtacacaagag

SEQ ID NO: 32676 - DNA, 25 bp, Homo sapien
acaatgctaacaaggtacacaagag

SEQ ID NO: 32677 - DNA, 25 bp, Homo sapien
gagaccacctgaaccgaaacccaga

SEQ ID NO: 32678 - DNA, 25 bp, Homo sapien
gagaccacctgatccgaaacccaga

SEQ ID NO: 32679 - DNA, 25 bp, Homo sapien
tcagagtacggacgacaatctccgc

SEQ ID NO: 32680 - DNA, 25 bp, Homo sapien
tcagagtacggaggacaatctccgc

SEQ ID NO: 32681 - DNA, 25 bp, Homo sapien
agtaaccgtatgaggggacctttcg

SEQ ID NO: 32682 - DNA, 25 bp, Homo sapien
agtaaccgtatgtggggacctttcg

SEQ ID NO: 32683 - DNA, 25 bp, Homo sapien
gagaccgttttttggactcgttcag

SEQ ID NO: 32684 - DNA, 25 bp, Homo sapien
gagaccgtttttaggactcgttcag

SEQ ID NO: 32685 - DNA, 25 bp, Homo sapien
aaaacttttggtagaactccgtgag

SEQ ID NO: 32686 - DNA, 25 bp, Homo sapien
aaaacttttggttgaactccgtgag

SEQ ID NO: 32687 - DNA, 25 bp, Homo sapien
agtctgcggtgttgtaacgctaagg

SEQ ID NO: 32688 - DNA, 25 bp, Homo sapien
agtctgcggtgtagtaacgctaagg

SEQ ID NO: 32689 - DNA, 25 bp, Homo sapien
ctttatttggatatcgtacctaaga

SEQ ID NO: 32690 - DNA, 25 bp, Homo sapien
ctttatttggatttcgtacctaaga

SEQ ID NO: 32691 - DNA, 25 bp, Homo sapien
aagacatcccgttcgtgttagtaaa

SEQ ID NO: 32692 - DNA, 25 bp, Homo sapien
aagacatcccgtacgtgttagtaaa

SEQ ID NO: 32693 - DNA, 25 bp, Homo sapien
agtaagagtctcctagtttttcaca

SEQ ID NO: 32694 - DNA, 25 bp, Homo sapien
agtaagagtctcgtagtttttcaca

SEQ ID NO: 32695 - DNA, 25 bp, Homo sapien
aatcatgtaccaagtcttttccgag

SEQ ID NO: 32696 - DNA, 25 bp, Homo sapien
aatcatgtaccatgtcttttccgag

SEQ ID NO: 32697 - DNA, 25 bp, Homo sapien
aaacactgtgcacgtgttctggaag

SEQ ID NO: 32698 - DNA, 25 bp, Homo sapien
aaacactgtgcaggtgttctggaag

SEQ ID NO: 32699 - DNA, 25 bp, Homo sapien
atcgcacgggccatgtcgttcggaa

SEQ ID NO: 32700 - DNA, 25 bp, Homo sapien
atcgcacgggccttgtcgttcggaa

SEQ ID NO: 32701 - DNA, 25 bp, Homo sapien
tctgtagagggtctttcccgagaag

SEQ ID NO: 32702 - DNA, 25 bp, Homo sapien
tctgtagagggtgtttcccgagaag

SEQ ID NO: 32703 - DNA, 25 bp, Homo sapien
aggtaagggatttcaaacgtacaac

SEQ ID NO: 32704 - DNA, 25 bp, Homo sapien
aggtaagggattacaaacgtacaac

SEQ ID NO: 32705 - DNA, 25 bp, Homo sapien
cggacaggggtctgtaacaaagaac

SEQ ID NO: 32706 - DNA, 25 bp, Homo sapien
cggacaggggtcagtaacaaagaac

SEQ ID NO: 32707 - DNA, 25 bp, Homo sapien
agacgggtctcaccacagagaaacg

SEQ ID NO: 32708 - DNA, 25 bp, Homo sapien
agacgggtctcagcacagagaaacg

SEQ ID NO: 32709 - DNA, 25 bp, Homo sapien
tagaacgacctgcaaacaagtagaa

SEQ ID NO: 32710 - DNA, 25 bp, Homo sapien
tagaacgacctggaaacaagtagaa

SEQ ID NO: 32711 - DNA, 25 bp, Homo sapien
acaacagagctccaaatggtaacga

SEQ ID NO: 32712 - DNA, 25 bp, Homo sapien
acaacagagctcgaaatggtaacga

SEQ ID NO: 32713 - DNA, 25 bp, Homo sapien
agggtaccatctaaactaggtctca

SEQ ID NO: 32714 - DNA, 25 bp, Homo sapien
agggtaccatcttaactaggtctca

SEQ ID NO: 32715 - DNA, 25 bp, Homo sapien
aggaacaaataatcttagacgtcta

SEQ ID NO: 32716 - DNA, 25 bp, Homo sapien
aggaacaaataaacttagacgtcta

SEQ ID NO: 32717 - DNA, 25 bp, Homo sapien
tactcctacacagctccgtgtcgaa

SEQ ID NO: 32718 - DNA, 25 bp, Homo sapien
tactcctacacacctccgtgtcgaa

SEQ ID NO: 32719 - DNA, 25 bp, Homo sapien
atagacatgaccatcaagtacgaca

SEQ ID NO: 32720 - DNA, 25 bp, Homo sapien
atagacatgaccttcaagtacgaca

SEQ ID NO: 32721 - DNA, 25 bp, Homo sapien
aaaacgtgtcaagtaaggtacctct

SEQ ID NO: 32722 - DNA, 25 bp, Homo sapien
aaaacgtgtcaactaaggtacctct

SEQ ID NO: 32723 - DNA, 25 bp, Homo sapien
gccggcagacgaactacgacacctt

SEQ ID NO: 32724 - DNA, 25 bp, Homo sapien
gccggcagacgatctacgacacctt

SEQ ID NO: 32725 - DNA, 25 bp, Homo sapien
gacgtccttcgtgaccagtacccga

SEQ ID NO: 32726 - DNA, 25 bp, Homo sapien
gacgtccttcgtcaccagtacccga

SEQ ID NO: 32727 - DNA, 25 bp, Homo sapien
agtccgtccgtccgtccgtccggct

SEQ ID NO: 32728 - DNA, 25 bp, Homo sapien
agtccgtccgtcggtccgtccggct

SEQ ID NO: 32729 - DNA, 25 bp, Homo sapien
gacgtgctctgcatgtagacgaaat

SEQ ID NO: 32730 - DNA, 25 bp, Homo sapien
gacgtgctctgcttgtagacgaaat

SEQ ID NO: 32731 - DNA, 25 bp, Homo sapien
gagtcttctcagattctaccactga

SEQ ID NO: 32732 - DNA, 25 bp, Homo sapien
gagtcttctcagtttctaccactga

SEQ ID NO: 32733 - DNA, 25 bp, Homo sapien
ggtgacgacccgtgtcacggaccga

SEQ ID NO: 32734 - DNA, 25 bp, Homo sapien
ggtgacgacccgagtcacggaccga

SEQ ID NO: 32735 - DNA, 25 bp, Homo sapien
taggggtaaaggaagcacgacccac

SEQ ID NO: 32736 - DNA, 25 bp, Homo sapien
taggggtaaaggtagcacgacccac

SEQ ID NO: 32737 - DNA, 25 bp, Homo sapien
tctcggttaaaggaaccgagatcca

SEQ ID NO: 32738 - DNA, 25 bp, Homo sapien
tctcggttaaagcaaccgagatcca

SEQ ID NO: 32739 - DNA, 25 bp, Homo sapien
caagtgcgaggtcaaccgaggccga

SEQ ID NO: 32740 - DNA, 25 bp, Homo sapien
caagtgcgaggtgaaccgaggccga

SEQ ID NO: 32741 - DNA, 25 bp, Homo sapien
tgtgtgtctgtacaccgaaagtagg

SEQ ID NO: 32742 - DNA, 25 bp, Homo sapien
tgtgtgtctgtagaccgaaagtagg

SEQ ID NO: 32743 - DNA, 25 bp, Homo sapien
acccgttgtgtcactttcacggagg

SEQ ID NO: 32744 - DNA, 25 bp, Homo sapien
acccgttgtgtctctttcacggagg

SEQ ID NO: 32745 - DNA, 25 bp, Homo sapien
accctttggggttatcacagtaact

SEQ ID NO: 32746 - DNA, 25 bp, Homo sapien
accctttggggtaatcacagtaact

SEQ ID NO: 32747 - DNA, 25 bp, Homo sapien
cctttctcgtgaacacttcagtatg

SEQ ID NO: 32748 - DNA, 25 bp, Homo sapien
cctttctcgtgatcacttcagtatg

SEQ ID NO: 32749 - DNA, 25 bp, Homo sapien
gtttctcgtctctagagttccgtta

SEQ ID NO: 32750 - DNA, 25 bp, Homo sapien
gtttctcgtctcaagagttccgtta

SEQ ID NO: 32751 - DNA, 25 bp, Homo sapien
gtgttgctcatcaagaaacattact

SEQ ID NO: 32752 - DNA, 25 bp, Homo sapien
gtgttgctcatctagaaacattact

SEQ ID NO: 32753 - DNA, 25 bp, Homo sapien
gctttgaggatcctgaatacacctt

SEQ ID NO: 32754 - DNA, 25 bp, Homo sapien
gctttgaggatcgtgaatacacctt

SEQ ID NO: 32755 - DNA, 25 bp, Homo sapien
agagagagtccgttcctcagactag

SEQ ID NO: 32756 - DNA, 25 bp, Homo sapien
agagagagtccgatcctcagactag

SEQ ID NO: 32757 - DNA, 25 bp, Homo sapien
gacaacgacggatacgttacatata

SEQ ID NO: 32758 - DNA, 25 bp, Homo sapien
gacaacgacggaaacgttacatata

SEQ ID NO: 32759 - DNA, 25 bp, Homo sapien
ggtacacagagactcactcaatatc

SEQ ID NO: 32760 - DNA, 25 bp, Homo sapien
ggtacacagagagtcactcaatatc

SEQ ID NO: 32761 - DNA, 25 bp, Homo sapien
acatatactcgtgactaaactttac

SEQ ID NO: 32762 - DNA, 25 bp, Homo sapien
acatatactcgtcactaaactttac

SEQ ID NO: 32763 - DNA, 25 bp, Homo sapien
gtaactaccagtcatgacatctaag

SEQ ID NO: 32764 - DNA, 25 bp, Homo sapien
gtaactaccagtgatgacatctaag

SEQ ID NO: 32765 - DNA, 25 bp, Homo sapien
ttgggtgagactagtgtcgctgtca

SEQ ID NO: 32766 - DNA, 25 bp, Homo sapien
ttgggtgagacttgtgtcgctgtca

SEQ ID NO: 32767 - DNA, 25 bp, Homo sapien
tacgggaaacgttgttaaccgttac

SEQ ID NO: 32768 - DNA, 25 bp, Homo sapien
tacgggaaacgtagttaaccgttac

SEQ ID NO: 32769 - DNA, 25 bp, Homo sapien
agacaccaccgtgtgtcgtccggtc

SEQ ID NO: 32770 - DNA, 25 bp, Homo sapien
agacaccaccgtctgtcgtccggtc

SEQ ID NO: 32771 - DNA, 25 bp, Homo sapien
acctgtcagtcacctacgagttccg

SEQ ID NO: 32772 - DNA, 25 bp, Homo sapien
acctgtcagtcagctacgagttccg

SEQ ID NO: 32773 - DNA, 25 bp, Homo sapien
aatccgtcttaggtctacgagttcc

SEQ ID NO: 32774 - DNA, 25 bp, Homo sapien
aatccgtcttagctctacgagttcc

SEQ ID NO: 32775 - DNA, 25 bp, Homo sapien
caggatgtttaccttataggtgtct

SEQ ID NO: 32776 - DNA, 25 bp, Homo sapien
caggatgtttacgttataggtgtct

SEQ ID NO: 32777 - DNA, 25 bp, Homo sapien
cttcttcttttgattcttctagttt

SEQ ID NO: 32778 - DNA, 25 bp, Homo sapien
cttcttcttttgtttcttctagttt

SEQ ID NO: 32779 - DNA, 25 bp, Homo sapien
acttttattatctttatttataatt

SEQ ID NO: 32780 - DNA, 25 bp, Homo sapien
acttttattatcattatttataatt

SEQ ID NO: 32781 - DNA, 25 bp, Homo sapien
tttgagtcatcacttcttatgtatg

SEQ ID NO: 32782 - DNA, 25 bp, Homo sapien
tttgagtcatcagttcttatgtatg

SEQ ID NO: 32783 - DNA, 25 bp, Homo sapien
tcgatggttgatcgtgttttgtaca

SEQ ID NO: 32784 - DNA, 25 bp, Homo sapien
tcgatggttgatggtgttttgtaca

SEQ ID NO: 32785 - DNA, 25 bp, Homo sapien
gtccttcgtgtgtcagtgtttttcc

SEQ ID NO: 32786 - DNA, 25 bp, Homo sapien
gtccttcgtgtgacagtgtttttcc

SEQ ID NO: 32787 - DNA, 25 bp, Homo sapien
gtattatgtttgtacctacaatgac

SEQ ID NO: 32788 - DNA, 25 bp, Homo sapien
gtattatgtttgaacctacaatgac

SEQ ID NO: 32789 - DNA, 25 bp, Homo sapien
ggtaatatggtatccaactccataa

SEQ ID NO: 32790 - DNA, 25 bp, Homo sapien
ggtaatatggtaaccaactccataa

SEQ ID NO: 32791 - DNA, 25 bp, Homo sapien
gacgttgtgttaagtaaatcctcaa

SEQ ID NO: 32792 - DNA, 25 bp, Homo sapien
gacgttgtgttatgtaaatcctcaa

SEQ ID NO: 32793 - DNA, 25 bp, Homo sapien
atttgtctctattaaaacctattcg

SEQ ID NO: 32794 - DNA, 25 bp, Homo sapien
atttgtctctataaaaacctattcg

SEQ ID NO: 32795 - DNA, 25 bp, Homo sapien
ccagtttacagaaccgaatcctgat

SEQ ID NO: 32796 - DNA, 25 bp, Homo sapien
ccagtttacagatccgaatcctgat

SEQ ID NO: 32797 - DNA, 25 bp, Homo sapien
gcaggtgtagggtcgacttctccac

SEQ ID NO: 32798 - DNA, 25 bp, Homo sapien
gcaggtgtagggacgacttctccac

SEQ ID NO: 32799 - DNA, 25 bp, Homo sapien
tcaggtacaagacacggtgtcggaa

SEQ ID NO: 32800 - DNA, 25 bp, Homo sapien
tcaggtacaagagacggtgtcggaa

SEQ ID NO: 32801 - DNA, 25 bp, Homo sapien
agaggtccgaaatcgacgtgtttaa

SEQ ID NO: 32802 - DNA, 25 bp, Homo sapien
agaggtccgaaaacgacgtgtttaa

SEQ ID NO: 32803 - DNA, 25 bp, Homo sapien
ggtagtaagtctcaagtcaataaac

SEQ ID NO: 32804 - DNA, 25 bp, Homo sapien
ggtagtaagtctgaagtcaataaac

SEQ ID NO: 32805 - DNA, 25 bp, Homo sapien
tgtaccgtccgtcgtacttataatc

SEQ ID NO: 32806 - DNA, 25 bp, Homo sapien
tgtaccgtccgtggtacttataatc

SEQ ID NO: 32807 - DNA, 25 bp, Homo sapien
gacttccctcgttctttcgacatcg

SEQ ID NO: 32808 - DNA, 25 bp, Homo sapien
gacttccctcgtactttcgacatcg

SEQ ID NO: 32809 - DNA, 25 bp, Homo sapien
attaacctgtctatctccggagtcg

SEQ ID NO: 32810 - DNA, 25 bp, Homo sapien
attaacctgtctttctccggagtcg

SEQ ID NO: 32811 - DNA, 25 bp, Homo sapien
agtcttttaggtcagacaccggccg

SEQ ID NO: 32812 - DNA, 25 bp, Homo sapien
agtcttttaggtgagacaccggccg

SEQ ID NO: 32813 - DNA, 25 bp, Homo sapien
gtttgttcgatggtcgtctcgggtg

SEQ ID NO: 32814 - DNA, 25 bp, Homo sapien
gtttgttcgatgctcgtctcgggtg

SEQ ID NO: 32815 - DNA, 25 bp, Homo sapien
tcggtgtactttctcgttcggagtt

SEQ ID NO: 32816 - DNA, 25 bp, Homo sapien
tcggtgtactttgtcgttcggagtt

SEQ ID NO: 32817 - DNA, 25 bp, Homo sapien
aggtgtgtatctcttcgacaaggtt

SEQ ID NO: 32818 - DNA, 25 bp, Homo sapien
aggtgtgtatctgttcgacaaggtt

SEQ ID NO: 32819 - DNA, 25 bp, Homo sapien
ctcttaagtcgtgttacagcgattg

SEQ ID NO: 32820 - DNA, 25 bp, Homo sapien
ctcttaagtcgtcttacagcgattg

SEQ ID NO: 32821 - DNA, 25 bp, Homo sapien
atcatcatttggtacaactcgtttg

SEQ ID NO: 32822 - DNA, 25 bp, Homo sapien
atcatcatttggaacaactcgtttg

SEQ ID NO: 32823 - DNA, 25 bp, Homo sapien
atcactgtacgagaacctcttcggg

SEQ ID NO: 32824 - DNA, 25 bp, Homo sapien
atcactgtacgacaacctcttcggg

SEQ ID NO: 32825 - DNA, 25 bp, Homo sapien
ccgactctgacaggtgccctcgggg

SEQ ID NO: 32826 - DNA, 25 bp, Homo sapien
ccgactctgacacgtgccctcgggg

SEQ ID NO: 32827 - DNA, 25 bp, Homo sapien
ctcgtaccgttttttccttctccgg

SEQ ID NO: 32828 - DNA, 25 bp, Homo sapien
ctcgtaccgtttattccttctccgg

SEQ ID NO: 32829 - DNA, 25 bp, Homo sapien
cgaccgtttaaattcttagaaccgt

SEQ ID NO: 32830 - DNA, 25 bp, Homo sapien
cgaccgtttaaaatcttagaaccgt

SEQ ID NO: 32831 - DNA, 25 bp, Homo sapien
gaagtctgcgtgctggaactcccgt

SEQ ID NO: 32832 - DNA, 25 bp, Homo sapien
gaagtctgcgtggtggaactcccgt

SEQ ID NO: 32833 - DNA, 25 bp, Homo sapien
tgtgcttcgtaagtgtcaatatcca

SEQ ID NO: 32834 - DNA, 25 bp, Homo sapien
tgtgcttcgtaactgtcaatatcca

SEQ ID NO: 32835 - DNA, 25 bp, Homo sapien
ttttgttctttctgcgtgaaaccga

SEQ ID NO: 32836 - DNA, 25 bp, Homo sapien
ttttgttctttcagcgtgaaaccga

SEQ ID NO: 32837 - DNA, 25 bp, Homo sapien
gtctgtctcctttcgggtaaaatac

SEQ ID NO: 32838 - DNA, 25 bp, Homo sapien
gtctgtctccttacgggtaaaatac

SEQ ID NO: 32839 - DNA, 25 bp, Homo sapien
gacctgtgtttcacgacccaaacac

SEQ ID NO: 32840 - DNA, 25 bp, Homo sapien
gacctgtgtttctcgacccaaacac

SEQ ID NO: 32841 - DNA, 25 bp, Homo sapien
ctttaatgttcatccgtatacgaag

SEQ ID NO: 32842 - DNA, 25 bp, Homo sapien
ctttaatgttcaaccgtatacgaag

SEQ ID NO: 32843 - DNA, 25 bp, Homo sapien
cattagaaggtcgacgtagttcttc

SEQ ID NO: 32844 - DNA, 25 bp, Homo sapien
cattagaaggtccacgtagttcttc

SEQ ID NO: 32845 - DNA, 25 bp, Homo sapien
aacttcataagtgtctcggacttcc

SEQ ID NO: 32846 - DNA, 25 bp, Homo sapien
aacttcataagtctctcggacttcc

SEQ ID NO: 32847 - DNA, 25 bp, Homo sapien
atatcgaacagtggtcttgaggaac

SEQ ID NO: 32848 - DNA, 25 bp, Homo sapien
atatcgaacagtcgtcttgaggaac

SEQ ID NO: 32849 - DNA, 25 bp, Homo sapien
cacatttaggttcgagtccggaggg

SEQ ID NO: 32850 - DNA, 25 bp, Homo sapien
cacatttaggttggagtccggaggg

SEQ ID NO: 32851 - DNA, 25 bp, Homo sapien
catcatcaacgttggttcctggctg

SEQ ID NO: 32852 - DNA, 25 bp, Homo sapien
catcatcaacgtaggttcctggctg

SEQ ID NO: 32853 - DNA, 25 bp, Homo sapien
atgatccagaacttccgttccgtca

SEQ ID NO: 32854 - DNA, 25 bp, Homo sapien
atgatccagaacatccgttccgtca

SEQ ID NO: 32855 - DNA, 25 bp, Homo sapien
gagtgaggtaacaaaaggctccgga

SEQ ID NO: 32856 - DNA, 25 bp, Homo sapien
gagtgaggtaactaaaggctccgga

SEQ ID NO: 32857 - DNA, 25 bp, Homo sapien
aacagggcacctatgggtccgtcga

SEQ ID NO: 32858 - DNA, 25 bp, Homo sapien
aacagggcacctttgggtccgtcga

SEQ ID NO: 32859 - DNA, 25 bp, Homo sapien
acaggtgtcccgtgtcccgtctggc

SEQ ID NO: 32860 - DNA, 25 bp, Homo sapien
acaggtgtcccgagtcccgtctggc

SEQ ID NO: 32861 - DNA, 25 bp, Homo sapien
caactagctttaatttctctagagg

SEQ ID NO: 32862 - DNA, 25 bp, Homo sapien
caactagctttattttctctagagg

SEQ ID NO: 32863 - DNA, 25 bp, Homo sapien
tttggaaattctgtcttcacgagag

SEQ ID NO: 32864 - DNA, 25 bp, Homo sapien
tttggaaattctctcttcacgagag

SEQ ID NO: 32865 - DNA, 25 bp, Homo sapien
atctggaggtccatctctaaactgg

SEQ ID NO: 32866 - DNA, 25 bp, Homo sapien
atctggaggtccttctctaaactgg

SEQ ID NO: 32867 - DNA, 25 bp, Homo sapien
aatctggggcgttttgaacctagac

SEQ ID NO: 32868 - DNA, 25 bp, Homo sapien
aatctggggcgtattgaacctagac

SEQ ID NO: 32869 - DNA, 25 bp, Homo sapien
acgcaagggtagaagtggaaccacc

SEQ ID NO: 32870 - DNA, 25 bp, Homo sapien
acgcaagggtagtagtggaaccacc

SEQ ID NO: 32871 - DNA, 25 bp, Homo sapien
ttattggtgtctagagaccgtactt

SEQ ID NO: 32872 - DNA, 25 bp, Homo sapien
ttattggtgtcttgagaccgtactt

SEQ ID NO: 32873 - DNA, 25 bp, Homo sapien
gataggatgggctgaagactcctct

SEQ ID NO: 32874 - DNA, 25 bp, Homo sapien
gataggatgggcagaagactcctct

SEQ ID NO: 32875 - DNA, 25 bp, Homo sapien
ttgtgtcagagtagttgattcctct

SEQ ID NO: 32876 - DNA, 25 bp, Homo sapien
ttgtgtcagagttgttgattcctct

SEQ ID NO: 32877 - DNA, 25 bp, Homo sapien
tgaaacttagggtccatgagtgtct

SEQ ID NO: 32878 - DNA, 25 bp, Homo sapien
tgaaacttagggaccatgagtgtct

SEQ ID NO: 32879 - DNA, 25 bp, Homo sapien
ctactgtcggtgacagttcctgtct

SEQ ID NO: 32880 - DNA, 25 bp, Homo sapien
ctactgtcggtgtcagttcctgtct

SEQ ID NO: 32881 - DNA, 25 bp, Homo sapien
cctgtgtatggtgtccaggccctgt

SEQ ID NO: 32882 - DNA, 25 bp, Homo sapien
cctgtgtatggtctccaggccctgt

SEQ ID NO: 32883 - DNA, 25 bp, Homo sapien
ccgagaccggttaagaggtgcccag

SEQ ID NO: 32884 - DNA, 25 bp, Homo sapien
ccgagaccggtttagaggtgcccag

SEQ ID NO: 32885 - DNA, 25 bp, Homo sapien
gttactccgttctgaaagatctcgg

SEQ ID NO: 32886 - DNA, 25 bp, Homo sapien
gttactccgttcagaaagatctcgg

SEQ ID NO: 32887 - DNA, 25 bp, Homo sapien
gtcacaccggttgacgaaggtccga

SEQ ID NO: 32888 - DNA, 25 bp, Homo sapien
gtcacaccggttcacgaaggtccga

SEQ ID NO: 32889 - DNA, 25 bp, Homo sapien
ggaagacctgggtccgaaagtcaat

SEQ ID NO: 32890 - DNA, 25 bp, Homo sapien
ggaagacctgggaccgaaagtcaat

SEQ ID NO: 32891 - DNA, 25 bp, Homo sapien
tgcagcctgagctatttattcgaca

SEQ ID NO: 32892 - DNA, 25 bp, Homo sapien
tgcagcctgagcaatttattcgaca

SEQ ID NO: 32893 - DNA, 25 bp, Homo sapien
ccctcagtaaagtttactgtcgttg

SEQ ID NO: 32894 - DNA, 25 bp, Homo sapien
ccctcagtaaagattactgtcgttg

SEQ ID NO: 32895 - DNA, 25 bp, Homo sapien
gcatactgaaataactaggtcctgt

SEQ ID NO: 32896 - DNA, 25 bp, Homo sapien
gcatactgaaattactaggtcctgt

SEQ ID NO: 32897 - DNA, 25 bp, Homo sapien
gactcttacaagacggtttgtcggc

SEQ ID NO: 32898 - DNA, 25 bp, Homo sapien
gactcttacaagtcggtttgtcggc

SEQ ID NO: 32899 - DNA, 25 bp, Homo sapien
ccttctaccctcgtggtgacggact

SEQ ID NO: 32900 - DNA, 25 bp, Homo sapien
ccttctaccctcctggtgacggact

SEQ ID NO: 32901 - DNA, 25 bp, Homo sapien
ttccctaccgtctcttcagaaaggt

SEQ ID NO: 32902 - DNA, 25 bp, Homo sapien
ttccctaccgtcacttcagaaaggt

SEQ ID NO: 32903 - DNA, 25 bp, Homo sapien
tccaagaacttcaaccgaaggtaga

SEQ ID NO: 32904 - DNA, 25 bp, Homo sapien
tccaagaacttctaccgaaggtaga

SEQ ID NO: 32905 - DNA, 25 bp, Homo sapien
cgagaacgcacttccaccatggaca

SEQ ID NO: 32906 - DNA, 25 bp, Homo sapien
cgagaacgcactaccaccatggaca

SEQ ID NO: 32907 - DNA, 25 bp, Homo sapien
ggagcgacgccaacaccctggacac

SEQ ID NO: 32908 - DNA, 25 bp, Homo sapien
ggagcgacgccatcaccctggacac

SEQ ID NO: 32909 - DNA, 25 bp, Homo sapien
ttgtgacactaacctttttatggaa

SEQ ID NO: 32910 - DNA, 25 bp, Homo sapien
ttgtgacactaagctttttatggaa

SEQ ID NO: 32911 - DNA, 25 bp, Homo sapien
ccgatgacagtcttttgtagtgttt

SEQ ID NO: 32912 - DNA, 25 bp, Homo sapien
ccgatgacagtcatttgtagtgttt

SEQ ID NO: 32913 - DNA, 25 bp, Homo sapien
cgatgaagtctttttaccgtagtct

SEQ ID NO: 32914 - DNA, 25 bp, Homo sapien
cgatgaagtcttattaccgtagtct

SEQ ID NO: 32915 - DNA, 25 bp, Homo sapien
tgtattctagtcacattagacgtaa

SEQ ID NO: 32916 - DNA, 25 bp, Homo sapien
tgtattctagtctcattagacgtaa

SEQ ID NO: 32917 - DNA, 25 bp, Homo sapien
tgtttcgtggtctccggtatctagg

SEQ ID NO: 32918 - DNA, 25 bp, Homo sapien
tgtttcgtggtcaccggtatctagg

SEQ ID NO: 32919 - DNA, 25 bp, Homo sapien
caacagtgtattttacaggattaca

SEQ ID NO: 32920 - DNA, 25 bp, Homo sapien
caacagtgtattatacaggattaca

SEQ ID NO: 32921 - DNA, 25 bp, Homo sapien
tagacacttgatgtcatgacctaat

SEQ ID NO: 32922 - DNA, 25 bp, Homo sapien
tagacacttgatctcatgacctaat

SEQ ID NO: 32923 - DNA, 25 bp, Homo sapien
agttaaaacgatgtttaaccactat

SEQ ID NO: 32924 - DNA, 25 bp, Homo sapien
agttaaaacgatctttaaccactat

SEQ ID NO: 32925 - DNA, 25 bp, Homo sapien
tatacaatagatgattgcaccgaca

SEQ ID NO: 32926 - DNA, 25 bp, Homo sapien
tatacaatagatcattgcaccgaca

SEQ ID NO: 32927 - DNA, 25 bp, Homo sapien
agccccgtaccttccgacacgataa

SEQ ID NO: 32928 - DNA, 25 bp, Homo sapien
agccccgtacctaccgacacgataa

SEQ ID NO: 32929 - DNA, 25 bp, Homo sapien
atccgtacacaggttttctgttaat

SEQ ID NO: 32930 - DNA, 25 bp, Homo sapien
atccgtacacagcttttctgttaat

SEQ ID NO: 32931 - DNA, 25 bp, Homo sapien
atggtacgggacttccttaggtgag

SEQ ID NO: 32932 - DNA, 25 bp, Homo sapien
atggtacgggacatccttaggtgag

SEQ ID NO: 32933 - DNA, 25 bp, Homo sapien
atttcgaccagaacgcggcagtcgg

SEQ ID NO: 32934 - DNA, 25 bp, Homo sapien
atttcgaccagatcgcggcagtcgg

SEQ ID NO: 32935 - DNA, 25 bp, Homo sapien
aaacgtgccgtttttccccagactc

SEQ ID NO: 32936 - DNA, 25 bp, Homo sapien
aaacgtgccgttattccccagactc

SEQ ID NO: 32937 - DNA, 25 bp, Homo sapien
aggaccgtctcaggttcccagtctg

SEQ ID NO: 32938 - DNA, 25 bp, Homo sapien
aggaccgtctcacgttcccagtctg

SEQ ID NO: 32939 - DNA, 25 bp, Homo sapien
tcaccttaacgacgtggccgaggac

SEQ ID NO: 32940 - DNA, 25 bp, Homo sapien
tcaccttaacgaggtggccgaggac

SEQ ID NO: 32941 - DNA, 25 bp, Homo sapien
cctacccaggtttcggtctacataa

SEQ ID NO: 32942 - DNA, 25 bp, Homo sapien
cctacccaggttacggtctacataa

SEQ ID NO: 32943 - DNA, 25 bp, Homo sapien
ctcccgacacaatgaaatctcttta

SEQ ID NO: 32944 - DNA, 25 bp, Homo sapien
ctcccgacacaaagaaatctcttta

SEQ ID NO: 32945 - DNA, 25 bp, Homo sapien
gactactccccaacaaatactgtgg

SEQ ID NO: 32946 - DNA, 25 bp, Homo sapien
gactactccccatcaaatactgtgg

SEQ ID NO: 32947 - DNA, 25 bp, Homo sapien
acgttccaccagagactcttatcgc

SEQ ID NO: 32948 - DNA, 25 bp, Homo sapien
acgttccaccagtgactcttatcgc

SEQ ID NO: 32949 - DNA, 25 bp, Homo sapien
accaaaccgactctgtcagtcgacg

SEQ ID NO: 32950 - DNA, 25 bp, Homo sapien
accaaaccgactgtgtcagtcgacg

SEQ ID NO: 32951 - DNA, 25 bp, Homo sapien
cacagtcggacagtcgtatagtgat

SEQ ID NO: 32952 - DNA, 25 bp, Homo sapien
cacagtcggacactcgtatagtgat

SEQ ID NO: 32953 - DNA, 25 bp, Homo sapien
tctgtagttctccagtactaacgtc

SEQ ID NO: 32954 - DNA, 25 bp, Homo sapien
tctgtagttctcgagtactaacgtc

SEQ ID NO: 32955 - DNA, 25 bp, Homo sapien
gtggatgtactttctaaaattactc

SEQ ID NO: 32956 - DNA, 25 bp, Homo sapien
gtggatgtacttactaaaattactc

SEQ ID NO: 32957 - DNA, 25 bp, Homo sapien
cttttatgtccaaaaatcgtacgtg

SEQ ID NO: 32958 - DNA, 25 bp, Homo sapien
cttttatgtccataaatcgtacgtg

SEQ ID NO: 32959 - DNA, 25 bp, Homo sapien
atctacttaagaggttcgttcagct

SEQ ID NO: 32960 - DNA, 25 bp, Homo sapien
atctacttaagacgttcgttcagct

SEQ ID NO: 32961 - DNA, 25 bp, Homo sapien
tcgttgaaggtaatcgatacactct

SEQ ID NO: 32962 - DNA, 25 bp, Homo sapien
tcgttgaaggtattcgatacactct

SEQ ID NO: 32963 - DNA, 25 bp, Homo sapien
tcgttcttagtgacactcgttcctc

SEQ ID NO: 32964 - DNA, 25 bp, Homo sapien
tcgttcttagtgtcactcgttcctc

SEQ ID NO: 32965 - DNA, 25 bp, Homo sapien
tggtaccagtggacttcactgtagt

SEQ ID NO: 32966 - DNA, 25 bp, Homo sapien
tggtaccagtggtcttcactgtagt

SEQ ID NO: 32967 - DNA, 25 bp, Homo sapien
cgaaaataggttgttctcggatatc

SEQ ID NO: 32968 - DNA, 25 bp, Homo sapien
cgaaaataggttcttctcggatatc

SEQ ID NO: 32969 - DNA, 25 bp, Homo sapien
gacatgttaggactcaatttccaat

SEQ ID NO: 32970 - DNA, 25 bp, Homo sapien
gacatgttaggagtcaatttccaat

SEQ ID NO: 32971 - DNA, 25 bp, Homo sapien
ttgtcaacaggattccactttcagt

SEQ ID NO: 32972 - DNA, 25 bp, Homo sapien
ttgtcaacaggaatccactttcagt

SEQ ID NO: 32973 - DNA, 25 bp, Homo sapien
ctgaaagggagagtctcggttctcc

SEQ ID NO: 32974 - DNA, 25 bp, Homo sapien
ctgaaagggagactctcggttctcc

SEQ ID NO: 32975 - DNA, 25 bp, Homo sapien
gctcaaagtatttacggtgacgccg

SEQ ID NO: 32976 - DNA, 25 bp, Homo sapien
gctcaaagtattaacggtgacgccg

SEQ ID NO: 32977 - DNA, 25 bp, Homo sapien
gactcagaagacgtccaggagtccg

SEQ ID NO: 32978 - DNA, 25 bp, Homo sapien
gactcagaagacctccaggagtccg

SEQ ID NO: 32979 - DNA, 25 bp, Homo sapien
tttttctagtggtcactcatccacc

SEQ ID NO: 32980 - DNA, 25 bp, Homo sapien
tttttctagtggacactcatccacc

SEQ ID NO: 32981 - DNA, 25 bp, Homo sapien
cttcttccattcactagtcattggg

SEQ ID NO: 32982 - DNA, 25 bp, Homo sapien
cttcttccattctctagtcattggg

SEQ ID NO: 32983 - DNA, 25 bp, Homo sapien
ttgacatttcacgtcatgtgtgtac

SEQ ID NO: 32984 - DNA, 25 bp, Homo sapien
ttgacatttcacctcatgtgtgtac

SEQ ID NO: 32985 - DNA, 25 bp, Homo sapien
ctttaacctcgtaacacccgggaaa

SEQ ID NO: 32986 - DNA, 25 bp, Homo sapien
ctttaacctcgttacacccgggaaa

SEQ ID NO: 32987 - DNA, 25 bp, Homo sapien
tctgcttgtcacagggaactttacg

SEQ ID NO: 32988 - DNA, 25 bp, Homo sapien
tctgcttgtcactgggaactttacg

SEQ ID NO: 32989 - DNA, 25 bp, Homo sapien
gaggaaagctacacgtaacatatga

SEQ ID NO: 32990 - DNA, 25 bp, Homo sapien
gaggaaagctactcgtaacatatga

SEQ ID NO: 32991 - DNA, 25 bp, Homo sapien
ttacaagagacgtcgacaaagaagt

SEQ ID NO: 32992 - DNA, 25 bp, Homo sapien
ttacaagagacgacgacaaagaagt

SEQ ID NO: 32993 - DNA, 25 bp, Homo sapien
ggaacttagaaaacgtattacccag

SEQ ID NO: 32994 - DNA, 25 bp, Homo sapien
ggaacttagaaatcgtattacccag

SEQ ID NO: 32995 - DNA, 25 bp, Homo sapien
gacacactgaccttcttgtgtcgga

SEQ ID NO: 32996 - DNA, 25 bp, Homo sapien
gacacactgaccatcttgtgtcgga

SEQ ID NO: 32997 - DNA, 25 bp, Homo sapien
gcctaagccgcaccagtcgtcaaac

SEQ ID NO: 32998 - DNA, 25 bp, Homo sapien
gcctaagccgcagcagtcgtcaaac

SEQ ID NO: 32999 - DNA, 25 bp, Homo sapien
taccgtccgcgtttgagctaaaaga

SEQ ID NO: 33000 - DNA, 25 bp, Homo sapien
taccgtccgcgtatgagctaaaaga

SEQ ID NO: 33001 - DNA, 25 bp, Homo sapien
ttgtcgttcgtctggttaaatggac

SEQ ID NO: 33002 - DNA, 25 bp, Homo sapien
ttgtcgttcgtcaggttaaatggac

SEQ ID NO: 33003 - DNA, 25 bp, Homo sapien
tgtcctatggaggttgatatccgtt

SEQ ID NO: 33004 - DNA, 25 bp, Homo sapien
tgtcctatggagcttgatatccgtt

SEQ ID NO: 33005 - DNA, 25 bp, Homo sapien
gtcgtttctggtctgacgtctctcc

SEQ ID NO: 33006 - DNA, 25 bp, Homo sapien
gtcgtttctggtgtgacgtctctcc

SEQ ID NO: 33007 - DNA, 25 bp, Homo sapien
cgttcttaagtttcacgtccacgcg

SEQ ID NO: 33008 - DNA, 25 bp, Homo sapien
cgttcttaagttacacgtccacgcg

SEQ ID NO: 33009 - DNA, 25 bp, Homo sapien
gtgtacacctactccacttgcgcgt

SEQ ID NO: 33010 - DNA, 25 bp, Homo sapien
gtgtacacctacaccacttgcgcgt

SEQ ID NO: 33011 - DNA, 25 bp, Homo sapien
gtctgtccgtactaacgtatcttcc

SEQ ID NO: 33012 - DNA, 25 bp, Homo sapien
gtctgtccgtacaaacgtatcttcc

SEQ ID NO: 33013 - DNA, 25 bp, Homo sapien
gagtttgttatatactgtatccacg

SEQ ID NO: 33014 - DNA, 25 bp, Homo sapien
gagtttgttataaactgtatccacg

SEQ ID NO: 33015 - DNA, 25 bp, Homo sapien
gagtgtctacatccagggacggtcc

SEQ ID NO: 33016 - DNA, 25 bp, Homo sapien
gagtgtctacatgcagggacggtcc

SEQ ID NO: 33017 - DNA, 25 bp, Homo sapien
ggctctacaggtcctcggcggtccg

SEQ ID NO: 33018 - DNA, 25 bp, Homo sapien
ggctctacaggtgctcggcggtccg

SEQ ID NO: 33019 - DNA, 25 bp, Homo sapien
acatgtagaggcacgcgagcgacgt

SEQ ID NO: 33020 - DNA, 25 bp, Homo sapien
acatgtagaggctcgcgagcgacgt

SEQ ID NO: 33021 - DNA, 25 bp, Homo sapien
cgtgtgtgtgtctatgcacgtaagt

SEQ ID NO: 33022 - DNA, 25 bp, Homo sapien
cgtgtgtgtgtcaatgcacgtaagt

SEQ ID NO: 33023 - DNA, 25 bp, Homo sapien
catggtcgcgcaggagcgtgtactc

SEQ ID NO: 33024 - DNA, 25 bp, Homo sapien
catggtcgcgcacgagcgtgtactc

SEQ ID NO: 33025 - DNA, 25 bp, Homo sapien
aacacgtctcggagtacgtagtgcc

SEQ ID NO: 33026 - DNA, 25 bp, Homo sapien
aacacgtctcggtgtacgtagtgcc

SEQ ID NO: 33027 - DNA, 25 bp, Homo sapien
aaaacgacagtgtctagtagtgtcc

SEQ ID NO: 33028 - DNA, 25 bp, Homo sapien
aaaacgacagtgactagtagtgtcc

SEQ ID NO: 33029 - DNA, 25 bp, Homo sapien
ctaatagggtggatacagtgtgtcc

SEQ ID NO: 33030 - DNA, 25 bp, Homo sapien
ctaatagggtggttacagtgtgtcc

SEQ ID NO: 33031 - DNA, 25 bp, Homo sapien
gtataagaacgtatacaagttactc

SEQ ID NO: 33032 - DNA, 25 bp, Homo sapien
gtataagaacgtttacaagttactc

SEQ ID NO: 33033 - DNA, 25 bp, Homo sapien
aggagactaagatcgacgaggtccg

SEQ ID NO: 33034 - DNA, 25 bp, Homo sapien
aggagactaagaacgacgaggtccg

SEQ ID NO: 33035 - DNA, 25 bp, Homo sapien
gtacggtttggatcggtagatctcg

SEQ ID NO: 33036 - DNA, 25 bp, Homo sapien
gtacggtttggaacggtagatctcg

SEQ ID NO: 33037 - DNA, 25 bp, Homo sapien
caccgtctcagttccgaggacacga

SEQ ID NO: 33038 - DNA, 25 bp, Homo sapien
caccgtctcagtaccgaggacacga

SEQ ID NO: 33039 - DNA, 25 bp, Homo sapien
cctacgaagtcatcgagagaactac

SEQ ID NO: 33040 - DNA, 25 bp, Homo sapien
cctacgaagtcaacgagagaactac

SEQ ID NO: 33041 - DNA, 25 bp, Homo sapien
ataacaactactcgaggaatcgtat

SEQ ID NO: 33042 - DNA, 25 bp, Homo sapien
ataacaactactggaggaatcgtat

SEQ ID NO: 33043 - DNA, 25 bp, Homo sapien
aagcataacgtgaagtccactcagt

SEQ ID NO: 33044 - DNA, 25 bp, Homo sapien
aagcataacgtgtagtccactcagt

SEQ ID NO: 33045 - DNA, 25 bp, Homo sapien
aggagaacagacgtacatagtcgat

SEQ ID NO: 33046 - DNA, 25 bp, Homo sapien
aggagaacagacctacatagtcgat

SEQ ID NO: 33047 - DNA, 25 bp, Homo sapien
aaggagtacacgagcgacgttttat

SEQ ID NO: 33048 - DNA, 25 bp, Homo sapien
aaggagtacacgtgcgacgttttat

SEQ ID NO: 33049 - DNA, 25 bp, Homo sapien
aagaaaggacacgttattccatact

SEQ ID NO: 33050 - DNA, 25 bp, Homo sapien
aagaaaggacaccttattccatact

SEQ ID NO: 33051 - DNA, 25 bp, Homo sapien
ccgaaagaggtagtgtgactccttc

SEQ ID NO: 33052 - DNA, 25 bp, Homo sapien
ccgaaagaggtactgtgactccttc

SEQ ID NO: 33053 - DNA, 25 bp, Homo sapien
gttatgacgacgacttcaaagagtc

SEQ ID NO: 33054 - DNA, 25 bp, Homo sapien
gttatgacgacgtcttcaaagagtc

SEQ ID NO: 33055 - DNA, 25 bp, Homo sapien
gtgtttcccggactccacgacggac

SEQ ID NO: 33056 - DNA, 25 bp, Homo sapien
gtgtttcccggagtccacgacggac

SEQ ID NO: 33057 - DNA, 25 bp, Homo sapien
ctctctcacgagacgaccgaggaca

SEQ ID NO: 33058 - DNA, 25 bp, Homo sapien
ctctctcacgagtcgaccgaggaca

SEQ ID NO: 33059 - DNA, 25 bp, Homo sapien
cctgctcacatcgtctcgtgagaag

SEQ ID NO: 33060 - DNA, 25 bp, Homo sapien
cctgctcacatcctctcgtgagaag

SEQ ID NO: 33061 - DNA, 25 bp, Homo sapien
agtaattcatactctccgggtgaag

SEQ ID NO: 33062 - DNA, 25 bp, Homo sapien
agtaattcatacactccgggtgaag

SEQ ID NO: 33063 - DNA, 25 bp, Homo sapien
atttcgttccgtttttgaaataacg

SEQ ID NO: 33064 - DNA, 25 bp, Homo sapien
atttcgttccgtatttgaaataacg

SEQ ID NO: 33065 - DNA, 25 bp, Homo sapien
agtgtcttccttcgagtatactggt

SEQ ID NO: 33066 - DNA, 25 bp, Homo sapien
agtgtcttccttggagtatactggt

SEQ ID NO: 33067 - DNA, 25 bp, Homo sapien
atttacctgactcctgttctcgagt

SEQ ID NO: 33068 - DNA, 25 bp, Homo sapien
atttacctgactgctgttctcgagt

SEQ ID NO: 33069 - DNA, 25 bp, Homo sapien
cacccacgggtcagggtctcgtcgg

SEQ ID NO: 33070 - DNA, 25 bp, Homo sapien
cacccacgggtctgggtctcgtcgg

SEQ ID NO: 33071 - DNA, 25 bp, Homo sapien
ctccgtactgtttggtcgttgtcga

SEQ ID NO: 33072 - DNA, 25 bp, Homo sapien
ctccgtactgttaggtcgttgtcga

SEQ ID NO: 33073 - DNA, 25 bp, Homo sapien
tttactggtaggtcaccggatgtca

SEQ ID NO: 33074 - DNA, 25 bp, Homo sapien
tttactggtaggacaccggatgtca

SEQ ID NO: 33075 - DNA, 25 bp, Homo sapien
atgtttgttgagacccgggagcgta

SEQ ID NO: 33076 - DNA, 25 bp, Homo sapien
atgtttgttgagtcccgggagcgta

SEQ ID NO: 33077 - DNA, 25 bp, Homo sapien
gttccgtaaggtcaagtggaccgac

SEQ ID NO: 33078 - DNA, 25 bp, Homo sapien
gttccgtaaggtgaagtggaccgac

SEQ ID NO: 33079 - DNA, 25 bp, Homo sapien
gaccctacggatgaggtggctctcg

SEQ ID NO: 33080 - DNA, 25 bp, Homo sapien
gaccctacggatcaggtggctctcg

SEQ ID NO: 33081 - DNA, 25 bp, Homo sapien
tcgacggtcttttcggtcgtccgcc

SEQ ID NO: 33082 - DNA, 25 bp, Homo sapien
tcgacggtctttacggtcgtccgcc

SEQ ID NO: 33083 - DNA, 25 bp, Homo sapien
tgagagtgtcgtgtctgtcgccccg

SEQ ID NO: 33084 - DNA, 25 bp, Homo sapien
tgagagtgtcgtctctgtcgccccg

SEQ ID NO: 33085 - DNA, 25 bp, Homo sapien
ggttcagagacgtcttcatccgcca

SEQ ID NO: 33086 - DNA, 25 bp, Homo sapien
ggttcagagacgacttcatccgcca

SEQ ID NO: 33087 - DNA, 25 bp, Homo sapien
tggagtccgtcgtccctgtcccgtt

SEQ ID NO: 33088 - DNA, 25 bp, Homo sapien
tggagtccgtcgaccctgtcccgtt

SEQ ID NO: 33089 - DNA, 25 bp, Homo sapien
ccaggaggataagctgtggtctagt

SEQ ID NO: 33090 - DNA, 25 bp, Homo sapien
ccaggaggataacctgtggtctagt

SEQ ID NO: 33091 - DNA, 25 bp, Homo sapien
tcttacacccatccatgtacgctta

SEQ ID NO: 33092 - DNA, 25 bp, Homo sapien
tcttacacccatgcatgtacgctta

SEQ ID NO: 33093 - DNA, 25 bp, Homo sapien
tgacactaatacgaccgaacgaaag

SEQ ID NO: 33094 - DNA, 25 bp, Homo sapien
tgacactaataccaccgaacgaaag

SEQ ID NO: 33095 - DNA, 25 bp, Homo sapien
gttgaagtacaggacgaccgaaacg

SEQ ID NO: 33096 - DNA, 25 bp, Homo sapien
gttgaagtacagcacgaccgaaacg

SEQ ID NO: 33097 - DNA, 25 bp, Homo sapien
aaacgaatactgcacatgagaacgt

SEQ ID NO: 33098 - DNA, 25 bp, Homo sapien
aaacgaatactggacatgagaacgt

SEQ ID NO: 33099 - DNA, 25 bp, Homo sapien
agacgagtagttgagaccgaggact

SEQ ID NO: 33100 - DNA, 25 bp, Homo sapien
agacgagtagttcagaccgaggact

SEQ ID NO: 33101 - DNA, 25 bp, Homo sapien
agacgaagtaacagtacactagtcc

SEQ ID NO: 33102 - DNA, 25 bp, Homo sapien
agacgaagtaactgtacactagtcc

SEQ ID NO: 33103 - DNA, 25 bp, Homo sapien
aaaaggtaagtaatatccgacttac

SEQ ID NO: 33104 - DNA, 25 bp, Homo sapien
aaaaggtaagtattatccgacttac

SEQ ID NO: 33105 - DNA, 25 bp, Homo sapien
taaatagtgtctccagttcggcttc

SEQ ID NO: 33106 - DNA, 25 bp, Homo sapien
taaatagtgtctgcagttcggcttc

SEQ ID NO: 33107 - DNA, 25 bp, Homo sapien
gatcgtatccttaatgtacgttctc

SEQ ID NO: 33108 - DNA, 25 bp, Homo sapien
gatcgtatcctttatgtacgttctc

SEQ ID NO: 33109 - DNA, 25 bp, Homo sapien
tagtcgaagtgaccttagtcttcga

SEQ ID NO: 33110 - DNA, 25 bp, Homo sapien
tagtcgaagtgagcttagtcttcga

SEQ ID NO: 33111 - DNA, 25 bp, Homo sapien
caggaaagactaaggacttcatcta

SEQ ID NO: 33112 - DNA, 25 bp, Homo sapien
caggaaagactatggacttcatcta

SEQ ID NO: 33113 - DNA, 25 bp, Homo sapien
agccgagatcttctagacagacaca

SEQ ID NO: 33114 - DNA, 25 bp, Homo sapien
agccgagatcttgtagacagacaca

SEQ ID NO: 33115 - DNA, 25 bp, Homo sapien
cgcaaaatctttcaacagaacgacg

SEQ ID NO: 33116 - DNA, 25 bp, Homo sapien
cgcaaaatctttgaacagaacgacg

SEQ ID NO: 33117 - DNA, 25 bp, Homo sapien
gcaagaaatgacgatattacctcgt

SEQ ID NO: 33118 - DNA, 25 bp, Homo sapien
gcaagaaatgaccatattacctcgt

SEQ ID NO: 33119 - DNA, 25 bp, Homo sapien
tcgaagaagaacttcttcctacttg

SEQ ID NO: 33120 - DNA, 25 bp, Homo sapien
tcgaagaagaacatcttcctacttg

SEQ ID NO: 33121 - DNA, 25 bp, Homo sapien
cactgagtagacatcttctgtcttt

SEQ ID NO: 33122 - DNA, 25 bp, Homo sapien
cactgagtagacttcttctgtcttt

SEQ ID NO: 33123 - DNA, 25 bp, Homo sapien
caccggagtacaggtcctcccttat

SEQ ID NO: 33124 - DNA, 25 bp, Homo sapien
caccggagtacacgtcctcccttat

SEQ ID NO: 33125 - DNA, 25 bp, Homo sapien
caacgaggtctagtacatcccatct

SEQ ID NO: 33126 - DNA, 25 bp, Homo sapien
caacgaggtctactacatcccatct

SEQ ID NO: 33127 - DNA, 25 bp, Homo sapien
tcgaaggtcgacgacgacccacttc

SEQ ID NO: 33128 - DNA, 25 bp, Homo sapien
tcgaaggtcgaccacgacccacttc

SEQ ID NO: 33129 - DNA, 25 bp, Homo sapien
acgaaacgcgacacgaccggagtcg

SEQ ID NO: 33130 - DNA, 25 bp, Homo sapien
acgaaacgcgactcgaccggagtcg

SEQ ID NO: 33131 - DNA, 25 bp, Homo sapien
tgatagtcgccgacgtaccactgtc

SEQ ID NO: 33132 - DNA, 25 bp, Homo sapien
tgatagtcgccgtcgtaccactgtc

SEQ ID NO: 33133 - DNA, 25 bp, Homo sapien
ctgaagtacctttctaccttcgtcg

SEQ ID NO: 33134 - DNA, 25 bp, Homo sapien
ctgaagtaccttactaccttcgtcg

SEQ ID NO: 33135 - DNA, 25 bp, Homo sapien
gacgaagaacctacgattcaggact

SEQ ID NO: 33136 - DNA, 25 bp, Homo sapien
gacgaagaaccttcgattcaggact

SEQ ID NO: 33137 - DNA, 25 bp, Homo sapien
gaggaattacctcaaacctacgaat

SEQ ID NO: 33138 - DNA, 25 bp, Homo sapien
gaggaattacctgaaacctacgaat

SEQ ID NO: 33139 - DNA, 25 bp, Homo sapien
gagcaactacactgcaaggtacaga

SEQ ID NO: 33140 - DNA, 25 bp, Homo sapien
gagcaactacacagcaaggtacaga

SEQ ID NO: 33141 - DNA, 25 bp, Homo sapien
actctcagttcagaccggtccacga

SEQ ID NO: 33142 - DNA, 25 bp, Homo sapien
actctcagttcacaccggtccacga

SEQ ID NO: 33143 - DNA, 25 bp, Homo sapien
tcacactttctgacgagtcaccgac

SEQ ID NO: 33144 - DNA, 25 bp, Homo sapien
tcacactttctgtcgagtcaccgac

SEQ ID NO: 33145 - DNA, 25 bp, Homo sapien
tcactgattgtggtgagtcacactc

SEQ ID NO: 33146 - DNA, 25 bp, Homo sapien
tcactgattgtgctgagtcacactc

SEQ ID NO: 33147 - DNA, 25 bp, Homo sapien
tccggaagtgtttcccgtcgacctc

SEQ ID NO: 33148 - DNA, 25 bp, Homo sapien
tccggaagtgttacccgtcgacctc

SEQ ID NO: 33149 - DNA, 25 bp, Homo sapien
tggaagaagtgttccgtcgtccttt

SEQ ID NO: 33150 - DNA, 25 bp, Homo sapien
tggaagaagtgtaccgtcgtccttt

SEQ ID NO: 33151 - DNA, 25 bp, Homo sapien
gtagacgttcagtaaatcgctattt

SEQ ID NO: 33152 - DNA, 25 bp, Homo sapien
gtagacgttcagaaaatcgctattt

SEQ ID NO: 33153 - DNA, 25 bp, Homo sapien
ttctcttactactgtgactgggttt

SEQ ID NO: 33154 - DNA, 25 bp, Homo sapien
ttctcttactacagtgactgggttt

SEQ ID NO: 33155 - DNA, 25 bp, Homo sapien
gtccgttgtcacttctcgtggtctc

SEQ ID NO: 33156 - DNA, 25 bp, Homo sapien
gtccgttgtcacatctcgtggtctc

SEQ ID NO: 33157 - DNA, 25 bp, Homo sapien
tggcgccttacttacactttgaaag

SEQ ID NO: 33158 - DNA, 25 bp, Homo sapien
tggcgccttactaacactttgaaag

SEQ ID NO: 33159 - DNA, 25 bp, Homo sapien
ggtttttacactcatcgtctataga

SEQ ID NO: 33160 - DNA, 25 bp, Homo sapien
ggtttttacactgatcgtctataga

SEQ ID NO: 33161 - DNA, 25 bp, Homo sapien
gtgtttcgttacagagtccacacct

SEQ ID NO: 33162 - DNA, 25 bp, Homo sapien
gtgtttcgttactgagtccacacct

SEQ ID NO: 33163 - DNA, 25 bp, Homo sapien
tgtgttcttattcgatcgactagtg

SEQ ID NO: 33164 - DNA, 25 bp, Homo sapien
tgtgttcttattggatcgactagtg

SEQ ID NO: 33165 - DNA, 25 bp, Homo sapien
gttattcgtttacctgtaaccaggt

SEQ ID NO: 33166 - DNA, 25 bp, Homo sapien
gttattcgtttagctgtaaccaggt

SEQ ID NO: 33167 - DNA, 25 bp, Homo sapien
ctagtctgttcttgttctcaggtgt

SEQ ID NO: 33168 - DNA, 25 bp, Homo sapien
ctagtctgttctagttctcaggtgt

SEQ ID NO: 33169 - DNA, 25 bp, Homo sapien
ttgttctgtccgaaataaatctagt

SEQ ID NO: 33170 - DNA, 25 bp, Homo sapien
ttgttctgtccgtaataaatctagt

SEQ ID NO: 33171 - DNA, 25 bp, Homo sapien
gtggtaccggtttcttagagaccta

SEQ ID NO: 33172 - DNA, 25 bp, Homo sapien
gtggtaccggttacttagagaccta

SEQ ID NO: 33173 - DNA, 25 bp, Homo sapien
ggaagcgtggttcttatagtccgac

SEQ ID NO: 33174 - DNA, 25 bp, Homo sapien
ggaagcgtggttgttatagtccgac

SEQ ID NO: 33175 - DNA, 25 bp, Homo sapien
gagaagtgaatactgaaaacacact

SEQ ID NO: 33176 - DNA, 25 bp, Homo sapien
gagaagtgaatagtgaaaacacact

SEQ ID NO: 33177 - DNA, 25 bp, Homo sapien
cgatcattcacaagggaacaaacgt

SEQ ID NO: 33178 - DNA, 25 bp, Homo sapien
cgatcattcacatgggaacaaacgt

SEQ ID NO: 33179 - DNA, 25 bp, Homo sapien
gtcacttaaatctgtatccaagcgt

SEQ ID NO: 33180 - DNA, 25 bp, Homo sapien
gtcacttaaatcagtatccaagcgt

SEQ ID NO: 33181 - DNA, 25 bp, Homo sapien
tgtgtccttcgtcctagtcgcacga

SEQ ID NO: 33182 - DNA, 25 bp, Homo sapien
tgtgtccttcgtgctagtcgcacga

SEQ ID NO: 33183 - DNA, 25 bp, Homo sapien
actctctgcccctgcgtaagtggag

SEQ ID NO: 33184 - DNA, 25 bp, Homo sapien
actctctgccccagcgtaagtggag

SEQ ID NO: 33185 - DNA, 25 bp, Homo sapien
aacccgtccacacaccagaagaatg

SEQ ID NO: 33186 - DNA, 25 bp, Homo sapien
aacccgtccacagaccagaagaatg

SEQ ID NO: 33187 - DNA, 25 bp, Homo sapien
tatgcgtcaaaggaaatacttcatg

SEQ ID NO: 33188 - DNA, 25 bp, Homo sapien
tatgcgtcaaagcaaatacttcatg

SEQ ID NO: 33189 - DNA, 25 bp, Homo sapien
gtctcgaagaaagaagctgtctctc

SEQ ID NO: 33190 - DNA, 25 bp, Homo sapien
gtctcgaagaaacaagctgtctctc

SEQ ID NO: 33191 - DNA, 25 bp, Homo sapien
gtaaagaaagtacaaagttctctac

SEQ ID NO: 33192 - DNA, 25 bp, Homo sapien
gtaaagaaagtagaaagttctctac

SEQ ID NO: 33193 - DNA, 25 bp, Homo sapien
gaacaataacagtgaccccgtctag

SEQ ID NO: 33194 - DNA, 25 bp, Homo sapien
gaacaataacagagaccccgtctag

SEQ ID NO: 33195 - DNA, 25 bp, Homo sapien
agaagaaggagacttacacgacgaa

SEQ ID NO: 33196 - DNA, 25 bp, Homo sapien
agaagaaggagagttacacgacgaa

SEQ ID NO: 33197 - DNA, 25 bp, Homo sapien
gaagagacacaacttaagtctacag

SEQ ID NO: 33198 - DNA, 25 bp, Homo sapien
gaagagacacaagttaagtctacag

SEQ ID NO: 33199 - DNA, 25 bp, Homo sapien
cagagttcattttaccgactcgtaa

SEQ ID NO: 33200 - DNA, 25 bp, Homo sapien
cagagttcatttaaccgactcgtaa

SEQ ID NO: 33201 - DNA, 25 bp, Homo sapien
gaggttgttgtctctcttgtacgtc

SEQ ID NO: 33202 - DNA, 25 bp, Homo sapien
gaggttgttgtcactcttgtacgtc

SEQ ID NO: 33203 - DNA, 25 bp, Homo sapien
ggttatggatttcctatttgtactc

SEQ ID NO: 33204 - DNA, 25 bp, Homo sapien
ggttatggatttgctatttgtactc

SEQ ID NO: 33205 - DNA, 25 bp, Homo sapien
ttcaggttagttaatatctccaccg

SEQ ID NO: 33206 - DNA, 25 bp, Homo sapien
ttcaggttagtttatatctccaccg

SEQ ID NO: 33207 - DNA, 25 bp, Homo sapien
tggggaagtacttaccgccactcgg

SEQ ID NO: 33208 - DNA, 25 bp, Homo sapien
tggggaagtactaaccgccactcgg

SEQ ID NO: 33209 - DNA, 25 bp, Homo sapien
gtacagtaaactgacaccaccgttt

SEQ ID NO: 33210 - DNA, 25 bp, Homo sapien
gtacagtaaactcacaccaccgttt

SEQ ID NO: 33211 - DNA, 25 bp, Homo sapien
tgagaaaatgtcttctaccgttcgt

SEQ ID NO: 33212 - DNA, 25 bp, Homo sapien
tgagaaaatgtcatctaccgttcgt

SEQ ID NO: 33213 - DNA, 25 bp, Homo sapien
gagagagaacggatcttatctctgt

SEQ ID NO: 33214 - DNA, 25 bp, Homo sapien
gagagagaacggttcttatctctgt

SEQ ID NO: 33215 - DNA, 25 bp, Homo sapien
ttcgaggggtctcatgtagtaccga

SEQ ID NO: 33216 - DNA, 25 bp, Homo sapien
ttcgaggggtctgatgtagtaccga

SEQ ID NO: 33217 - DNA, 25 bp, Homo sapien
ggtataaatcattccgtgttacctc

SEQ ID NO: 33218 - DNA, 25 bp, Homo sapien
ggtataaatcataccgtgttacctc

SEQ ID NO: 33219 - DNA, 25 bp, Homo sapien
tataaagatccgttaatgatcctag

SEQ ID NO: 33220 - DNA, 25 bp, Homo sapien
tataaagatccgataatgatcctag

SEQ ID NO: 33221 - DNA, 25 bp, Homo sapien
ggagtcaaatgtttattgtctgtcc

SEQ ID NO: 33222 - DNA, 25 bp, Homo sapien
ggagtcaaatgtatattgtctgtcc

SEQ ID NO: 33223 - DNA, 25 bp, Homo sapien
ctgtagattcccgtagtgtctggac

SEQ ID NO: 33224 - DNA, 25 bp, Homo sapien
ctgtagattcccctagtgtctggac

SEQ ID NO: 33225 - DNA, 25 bp, Homo sapien
agtggtcacccgagtgctacgacgg

SEQ ID NO: 33226 - DNA, 25 bp, Homo sapien
agtggtcacccgtgtgctacgacgg

SEQ ID NO: 33227 - DNA, 25 bp, Homo sapien
gaaacctcgtcgactcgagtccgtc

SEQ ID NO: 33228 - DNA, 25 bp, Homo sapien
gaaacctcgtcgtctcgagtccgtc

SEQ ID NO: 33229 - DNA, 25 bp, Homo sapien
gtcgtacacctgcatgtcgtgccgg

SEQ ID NO: 33230 - DNA, 25 bp, Homo sapien
gtcgtacacctggatgtcgtgccgg

SEQ ID NO: 33231 - DNA, 25 bp, Homo sapien
tgaccgtgctcttggtgacggaccc

SEQ ID NO: 33232 - DNA, 25 bp, Homo sapien
tgaccgtgctctaggtgacggaccc

SEQ ID NO: 33233 - DNA, 25 bp, Homo sapien
gacaccctgaaggtgacgagtccgc

SEQ ID NO: 33234 - DNA, 25 bp, Homo sapien
gacaccctgaagctgacgagtccgc

SEQ ID NO: 33235 - DNA, 25 bp, Homo sapien
gtgaacgtttgtaaatgtcacccac

SEQ ID NO: 33236 - DNA, 25 bp, Homo sapien
gtgaacgtttgttaatgtcacccac

SEQ ID NO: 33237 - DNA, 25 bp, Homo sapien
gtccgtctcgtcacagggacaccgg

SEQ ID NO: 33238 - DNA, 25 bp, Homo sapien
gtccgtctcgtctcagggacaccgg

SEQ ID NO: 33239 - DNA, 25 bp, Homo sapien
attttccacttaagggactaccgta

SEQ ID NO: 33240 - DNA, 25 bp, Homo sapien
attttccacttatgggactaccgta

SEQ ID NO: 33241 - DNA, 25 bp, Homo sapien
tgtgttttacttagggactcgactc

SEQ ID NO: 33242 - DNA, 25 bp, Homo sapien
tgtgttttactttgggactcgactc

SEQ ID NO: 33243 - DNA, 25 bp, Homo sapien
gggtcctctattacggaacttctct

SEQ ID NO: 33244 - DNA, 25 bp, Homo sapien
gggtcctctatttcggaacttctct

SEQ ID NO: 33245 - DNA, 25 bp, Homo sapien
gcactgtccacctttagaaaaagac

SEQ ID NO: 33246 - DNA, 25 bp, Homo sapien
gcactgtccaccattagaaaaagac

SEQ ID NO: 33247 - DNA, 25 bp, Homo sapien
cgtaatcttgtcaacaaaaatagac

SEQ ID NO: 33248 - DNA, 25 bp, Homo sapien
cgtaatcttgtctacaaaaatagac

SEQ ID NO: 33249 - DNA, 25 bp, Homo sapien
agaacgctttcaccagaaagttaga

SEQ ID NO: 33250 - DNA, 25 bp, Homo sapien
agaacgctttcagcagaaagttaga

SEQ ID NO: 33251 - DNA, 25 bp, Homo sapien
ttaacccttcatgtcatgtacgaag

SEQ ID NO: 33252 - DNA, 25 bp, Homo sapien
ttaacccttcatctcatgtacgaag

SEQ ID NO: 33253 - DNA, 25 bp, Homo sapien
tgtgtctaccatcgtctatctccgg

SEQ ID NO: 33254 - DNA, 25 bp, Homo sapien
tgtgtctaccatggtctatctccgg

SEQ ID NO: 33255 - DNA, 25 bp, Homo sapien
tttgaccgacggtcgtaactatcaa

SEQ ID NO: 33256 - DNA, 25 bp, Homo sapien
tttgaccgacggacgtaactatcaa

SEQ ID NO: 33257 - DNA, 25 bp, Homo sapien
ttaggaccacggtactaaatgacac

SEQ ID NO: 33258 - DNA, 25 bp, Homo sapien
ttaggaccacggaactaaatgacac

SEQ ID NO: 33259 - DNA, 25 bp, Homo sapien
tgtagaaaccggacgaacgatctga

SEQ ID NO: 33260 - DNA, 25 bp, Homo sapien
tgtagaaaccggtcgaacgatctga

SEQ ID NO: 33261 - DNA, 25 bp, Homo sapien
tagaaaccgtctcacaaacgcagtg

SEQ ID NO: 33262 - DNA, 25 bp, Homo sapien
tagaaaccgtctgacaaacgcagtg

SEQ ID NO: 33263 - DNA, 25 bp, Homo sapien
tagaaactactcgaaggcctagacg

SEQ ID NO: 33264 - DNA, 25 bp, Homo sapien
tagaaactactccaaggcctagacg

SEQ ID NO: 33265 - DNA, 25 bp, Homo sapien
tcaaacgtacacgtccgggagaccg

SEQ ID NO: 33266 - DNA, 25 bp, Homo sapien
tcaaacgtacacctccgggagaccg

SEQ ID NO: 33267 - DNA, 25 bp, Homo sapien
gagacgtgtgtctcggtcccgaccg

SEQ ID NO: 33268 - DNA, 25 bp, Homo sapien
gagacgtgtgtcacggtcccgaccg

SEQ ID NO: 33269 - DNA, 25 bp, Homo sapien
acgttacgggtgaagcgcgcccgtc

SEQ ID NO: 33270 - DNA, 25 bp, Homo sapien
acgttacgggtgtagcgcgcccgtc

SEQ ID NO: 33271 - DNA, 25 bp, Homo sapien
aacgacccggggtctaacgacccgg

SEQ ID NO: 33272 - DNA, 25 bp, Homo sapien
aacgacccggggactaacgacccgg

SEQ ID NO: 33273 - DNA, 25 bp, Homo sapien
tcgaggtcgcggagcaactcctcgg

SEQ ID NO: 33274 - DNA, 25 bp, Homo sapien
tcgaggtcgcggtgcaactcctcgg

SEQ ID NO: 33275 - DNA, 25 bp, Homo sapien
tggagtggttgtcgaacttctcagt

SEQ ID NO: 33276 - DNA, 25 bp, Homo sapien
tggagtggttgtggaacttctcagt

SEQ ID NO: 33277 - DNA, 25 bp, Homo sapien
gtctgtaagggtttgggagcctctt

SEQ ID NO: 33278 - DNA, 25 bp, Homo sapien
gtctgtaagggtatgggagcctctt

SEQ ID NO: 33279 - DNA, 25 bp, Homo sapien
tgaaactacgcaaacgggacccaga

SEQ ID NO: 33280 - DNA, 25 bp, Homo sapien
tgaaactacgcatacgggacccaga

SEQ ID NO: 33281 - DNA, 25 bp, Homo sapien
ttaaatccaacaagagttccagacg

SEQ ID NO: 33282 - DNA, 25 bp, Homo sapien
ttaaatccaacatgagttccagacg

SEQ ID NO: 33283 - DNA, 25 bp, Homo sapien
cagtagtaaaggtatgtcaatcacc

SEQ ID NO: 33284 - DNA, 25 bp, Homo sapien
cagtagtaaaggaatgtcaatcacc

SEQ ID NO: 33285 - DNA, 25 bp, Homo sapien
tagtcacaggagaagtcaggtcaac

SEQ ID NO: 33286 - DNA, 25 bp, Homo sapien
tagtcacaggagtagtcaggtcaac

SEQ ID NO: 33287 - DNA, 25 bp, Homo sapien
gtttcatatttgatgtctacgactt

SEQ ID NO: 33288 - DNA, 25 bp, Homo sapien
gtttcatatttgttgtctacgactt

SEQ ID NO: 33289 - DNA, 25 bp, Homo sapien
actccttcgtcttggtgtctattat

SEQ ID NO: 33290 - DNA, 25 bp, Homo sapien
actccttcgtctaggtgtctattat

SEQ ID NO: 33291 - DNA, 25 bp, Homo sapien
cctacggtctcgtatggctgactga

SEQ ID NO: 33292 - DNA, 25 bp, Homo sapien
cctacggtctcgaatggctgactga

SEQ ID NO: 33293 - DNA, 25 bp, Homo sapien
tcaccggggtaatagatggatccgt

SEQ ID NO: 33294 - DNA, 25 bp, Homo sapien
tcaccggggtaaaagatggatccgt

SEQ ID NO: 33295 - DNA, 25 bp, Homo sapien
agtaggggaccacgagtcgaagacc

SEQ ID NO: 33296 - DNA, 25 bp, Homo sapien
agtaggggaccaggagtcgaagacc

SEQ ID NO: 33297 - DNA, 25 bp, Homo sapien
ggacgggcaccagaccagtcgacag

SEQ ID NO: 33298 - DNA, 25 bp, Homo sapien
ggacgggcaccacaccagtcgacag

SEQ ID NO: 33299 - DNA, 25 bp, Homo sapien
gttggactccgttgacctcaggaga

SEQ ID NO: 33300 - DNA, 25 bp, Homo sapien
gttggactccgtagacctcaggaga

SEQ ID NO: 33301 - DNA, 25 bp, Homo sapien
ggggtacttcgtaagctaccatggg

SEQ ID NO: 33302 - DNA, 25 bp, Homo sapien
ggggtacttcgttagctaccatggg

SEQ ID NO: 33303 - DNA, 25 bp, Homo sapien
tctacactcggagaactggtcgacg

SEQ ID NO: 33304 - DNA, 25 bp, Homo sapien
tctacactcggacaactggtcgacg

SEQ ID NO: 33305 - DNA, 25 bp, Homo sapien
agacaccacggaagacgtaaccgag

SEQ ID NO: 33306 - DNA, 25 bp, Homo sapien
agacaccacggatgacgtaaccgag

SEQ ID NO: 33307 - DNA, 25 bp, Homo sapien
gtcttgaccagtaccgacgttccat

SEQ ID NO: 33308 - DNA, 25 bp, Homo sapien
gtcttgaccagttccgacgttccat

SEQ ID NO: 33309 - DNA, 25 bp, Homo sapien
ccattagatccttgagatgtcccgt

SEQ ID NO: 33310 - DNA, 25 bp, Homo sapien
ccattagatcctagagatgtcccgt

SEQ ID NO: 33311 - DNA, 25 bp, Homo sapien
cacatgtatcacttaggttacccga

SEQ ID NO: 33312 - DNA, 25 bp, Homo sapien
cacatgtatcacataggttacccga

SEQ ID NO: 33313 - DNA, 25 bp, Homo sapien
accatcacgaaccaagatcgtcaga

SEQ ID NO: 33314 - DNA, 25 bp, Homo sapien
accatcacgaacgaagatcgtcaga

SEQ ID NO: 33315 - DNA, 25 bp, Homo sapien
acagtatacggtcgaccatgtccgc

SEQ ID NO: 33316 - DNA, 25 bp, Homo sapien
acagtatacggtggaccatgtccgc

SEQ ID NO: 33317 - DNA, 25 bp, Homo sapien
acgaaccggtcgaggggcccttcgt

SEQ ID NO: 33318 - DNA, 25 bp, Homo sapien
acgaaccggtcgtggggcccttcgt

SEQ ID NO: 33319 - DNA, 25 bp, Homo sapien
ttagaaccgtttttatggatttcac

SEQ ID NO: 33320 - DNA, 25 bp, Homo sapien
ttagaaccgtttatatggatttcac

SEQ ID NO: 33321 - DNA, 25 bp, Homo sapien
acaactgttgtgaaaggatccgtaa

SEQ ID NO: 33322 - DNA, 25 bp, Homo sapien
acaactgttgtgtaaggatccgtaa

SEQ ID NO: 33323 - DNA, 25 bp, Homo sapien
aattatgggtactgtcacgtccagg

SEQ ID NO: 33324 - DNA, 25 bp, Homo sapien
aattatgggtacagtcacgtccagg

SEQ ID NO: 33325 - DNA, 25 bp, Homo sapien
tatcttggagtaatcgaactgtgac

SEQ ID NO: 33326 - DNA, 25 bp, Homo sapien
tatcttggagtattcgaactgtgac

SEQ ID NO: 33327 - DNA, 25 bp, Homo sapien
aagcatcttgttcgtgtacgtaaac

SEQ ID NO: 33328 - DNA, 25 bp, Homo sapien
aagcatcttgttggtgtacgtaaac

SEQ ID NO: 33329 - DNA, 25 bp, Homo sapien
catagtaatctcttgtgttttcaag

SEQ ID NO: 33330 - DNA, 25 bp, Homo sapien
catagtaatctcatgtgttttcaag

SEQ ID NO: 33331 - DNA, 25 bp, Homo sapien
attagttactaaagtcttttacaag

SEQ ID NO: 33332 - DNA, 25 bp, Homo sapien
attagttactaatgtcttttacaag

SEQ ID NO: 33333 - DNA, 25 bp, Homo sapien
acaggtcgtacatctttactgtgaa

SEQ ID NO: 33334 - DNA, 25 bp, Homo sapien
acaggtcgtacaactttactgtgaa

SEQ ID NO: 33335 - DNA, 25 bp, Homo sapien
gttacagcggacactggtcctcgaa

SEQ ID NO: 33336 - DNA, 25 bp, Homo sapien
gttacagcggactctggtcctcgaa

SEQ ID NO: 33337 - DNA, 25 bp, Homo sapien
ttaggaggtacctttcctgagtaag

SEQ ID NO: 33338 - DNA, 25 bp, Homo sapien
ttaggaggtaccattcctgagtaag

SEQ ID NO: 33339 - DNA, 25 bp, Homo sapien
agttaagggatagttacctctaaac

SEQ ID NO: 33340 - DNA, 25 bp, Homo sapien
agttaagggatacttacctctaaac

SEQ ID NO: 33341 - DNA, 25 bp, Homo sapien
ggtccaggggttcagacacagaaac

SEQ ID NO: 33342 - DNA, 25 bp, Homo sapien
ggtccaggggttgagacacagaaac

SEQ ID NO: 33343 - DNA, 25 bp, Homo sapien
taaagaggtgtcagaccagaagaac

SEQ ID NO: 33344 - DNA, 25 bp, Homo sapien
taaagaggtgtctgaccagaagaac

SEQ ID NO: 33345 - DNA, 25 bp, Homo sapien
ctagaaattgtcgaacgaacgtaaa

SEQ ID NO: 33346 - DNA, 25 bp, Homo sapien
ctagaaattgtccaacgaacgtaaa

SEQ ID NO: 33347 - DNA, 25 bp, Homo sapien
aaagacactactcaagactggtcaa

SEQ ID NO: 33348 - DNA, 25 bp, Homo sapien
aaagacactactgaagactggtcaa

SEQ ID NO: 33349 - DNA, 25 bp, Homo sapien
gggactcgactcaaacgtaggcttt

SEQ ID NO: 33350 - DNA, 25 bp, Homo sapien
gggactcgactctaacgtaggcttt

SEQ ID NO: 33351 - DNA, 25 bp, Homo sapien
agggagacaacataacgtgtgccga

SEQ ID NO: 33352 - DNA, 25 bp, Homo sapien
agggagacaacaaaacgtgtgccga

SEQ ID NO: 33353 - DNA, 25 bp, Homo sapien
ctattaacacacacgcgtcgtcgaa

SEQ ID NO: 33354 - DNA, 25 bp, Homo sapien
ctattaacacactcgcgtcgtcgaa

SEQ ID NO: 33355 - DNA, 25 bp, Homo sapien
ttcgtcatgacctcttcgtcgagac

SEQ ID NO: 33356 - DNA, 25 bp, Homo sapien
ttcgtcatgaccacttcgtcgagac

SEQ ID NO: 33357 - DNA, 25 bp, Homo sapien
aatactaagtcacagtaaggtcctt

SEQ ID NO: 33358 - DNA, 25 bp, Homo sapien
aatactaagtcagagtaaggtcctt

SEQ ID NO: 33359 - DNA, 25 bp, Homo sapien
gtcacgagtcaggagataacctcta

SEQ ID NO: 33360 - DNA, 25 bp, Homo sapien
gtcacgagtcagcagataacctcta

SEQ ID NO: 33361 - DNA, 25 bp, Homo sapien
gacactctccgtgagacagtttcga

SEQ ID NO: 33362 - DNA, 25 bp, Homo sapien
gacactctccgtcagacagtttcga

SEQ ID NO: 33363 - DNA, 25 bp, Homo sapien
agtacacccgtcgtccgtacaggct

SEQ ID NO: 33364 - DNA, 25 bp, Homo sapien
agtacacccgtcctccgtacaggct

SEQ ID NO: 33365 - DNA, 25 bp, Homo sapien
cgttctctgacaaccgacgagacat

SEQ ID NO: 33366 - DNA, 25 bp, Homo sapien
cgttctctgacatccgacgagacat

SEQ ID NO: 33367 - DNA, 25 bp, Homo sapien
gcatcgttcctaagatactccatga

SEQ ID NO: 33368 - DNA, 25 bp, Homo sapien
gcatcgttcctatgatactccatga

SEQ ID NO: 33369 - DNA, 25 bp, Homo sapien
ggtgagaaccgtgtctacagaagta

SEQ ID NO: 33370 - DNA, 25 bp, Homo sapien
ggtgagaaccgtctctacagaagta

SEQ ID NO: 33371 - DNA, 25 bp, Homo sapien
aggggtaaaggaagcacgacccact

SEQ ID NO: 33372 - DNA, 25 bp, Homo sapien
aggggtaaaggatgcacgacccact

SEQ ID NO: 33373 - DNA, 25 bp, Homo sapien
tacgggtcaaaggaatcagccacta

SEQ ID NO: 33374 - DNA, 25 bp, Homo sapien
tacgggtcaaagcaatcagccacta

SEQ ID NO: 33375 - DNA, 25 bp, Homo sapien
gacagttgtgggaaccgaggacaca

SEQ ID NO: 33376 - DNA, 25 bp, Homo sapien
gacagttgtgggtaccgaggacaca

SEQ ID NO: 33377 - DNA, 25 bp, Homo sapien
tagtgagttgatcctcagagacaag

SEQ ID NO: 33378 - DNA, 25 bp, Homo sapien
tagtgagttgatgctcagagacaag

SEQ ID NO: 33379 - DNA, 25 bp, Homo sapien
acccgtggcgtcacttggagtcgaa

SEQ ID NO: 33380 - DNA, 25 bp, Homo sapien
acccgtggcgtctcttggagtcgaa

SEQ ID NO: 33381 - DNA, 25 bp, Homo sapien
ggaccctttggggttatcacagtaa

SEQ ID NO: 33382 - DNA, 25 bp, Homo sapien
ggaccctttgggcttatcacagtaa

SEQ ID NO: 33383 - DNA, 25 bp, Homo sapien
atccttttcggatcagttaagtcta

SEQ ID NO: 33384 - DNA, 25 bp, Homo sapien
atccttttcggaacagttaagtcta

SEQ ID NO: 33385 - DNA, 25 bp, Homo sapien
gggattcgttcgtaaagttccgtta

SEQ ID NO: 33386 - DNA, 25 bp, Homo sapien
gggattcgttcgaaaagttccgtta

SEQ ID NO: 33387 - DNA, 25 bp, Homo sapien
agggagacgtcacaaataaccttat

SEQ ID NO: 33388 - DNA, 25 bp, Homo sapien
agggagacgtcagaaataaccttat

SEQ ID NO: 33389 - DNA, 25 bp, Homo sapien
cgaagtgacgaagattaaacacttt

SEQ ID NO: 33390 - DNA, 25 bp, Homo sapien
cgaagtgacgaacattaaacacttt

SEQ ID NO: 33391 - DNA, 25 bp, Homo sapien
gtaggtacggtcgttacctcagctg

SEQ ID NO: 33392 - DNA, 25 bp, Homo sapien
gtaggtacggtccttacctcagctg

SEQ ID NO: 33393 - DNA, 25 bp, Homo sapien
acaacgacggatacgttacatatag

SEQ ID NO: 33394 - DNA, 25 bp, Homo sapien
acaacgacggattcgttacatatag

SEQ ID NO: 33395 - DNA, 25 bp, Homo sapien
gaggtaaagagccttctccaagtcg

SEQ ID NO: 33396 - DNA, 25 bp, Homo sapien
gaggtaaagagcgttctccaagtcg

SEQ ID NO: 33397 - DNA, 25 bp, Homo sapien
cgaagaaatcgtgatataacttctc

SEQ ID NO: 33398 - DNA, 25 bp, Homo sapien
cgaagaaatcgtcatataacttctc

SEQ ID NO: 33399 - DNA, 25 bp, Homo sapien
ccggtaacacctcatgtaatacttg

SEQ ID NO: 33400 - DNA, 25 bp, Homo sapien
ccggtaacacctgatgtaatacttg

SEQ ID NO: 33401 - DNA, 25 bp, Homo sapien
tttggtctcaacttatgttcttcag

SEQ ID NO: 33402 - DNA, 25 bp, Homo sapien
tttggtctcaacatatgttcttcag

SEQ ID NO: 33403 - DNA, 25 bp, Homo sapien
ttaggtgtaaactttagaaccttac

SEQ ID NO: 33404 - DNA, 25 bp, Homo sapien
ttaggtgtaaacattagaaccttac

SEQ ID NO: 33405 - DNA, 25 bp, Homo sapien
gacacccgacaggttcgaccgttac

SEQ ID NO: 33406 - DNA, 25 bp, Homo sapien
gacacccgacagcttcgaccgttac

SEQ ID NO: 33407 - DNA, 25 bp, Homo sapien
gtctcgcatcgacctacaggtccgt

SEQ ID NO: 33408 - DNA, 25 bp, Homo sapien
gtctcgcatcgagctacaggtccgt

SEQ ID NO: 33409 - DNA, 25 bp, Homo sapien
gatcagtacttaaactcacggtcct

SEQ ID NO: 33410 - DNA, 25 bp, Homo sapien
gatcagtacttatactcacggtcct

SEQ ID NO: 33411 - DNA, 25 bp, Homo sapien
aaggtctctttcctgtaacgtttct

SEQ ID NO: 33412 - DNA, 25 bp, Homo sapien
aaggtctctttcgtgtaacgtttct

SEQ ID NO: 33413 - DNA, 25 bp, Homo sapien
cttatgtagtctttttgtttttctt

SEQ ID NO: 33414 - DNA, 25 bp, Homo sapien
cttatgtagtctatttgtttttctt

SEQ ID NO: 33415 - DNA, 25 bp, Homo sapien
tacctttttgacttttatattattt

SEQ ID NO: 33416 - DNA, 25 bp, Homo sapien
tacctttttgacatttatattattt

SEQ ID NO: 33417 - DNA, 25 bp, Homo sapien
attcgattaccactttcatgtagtg

SEQ ID NO: 33418 - DNA, 25 bp, Homo sapien
attcgattaccagtttcatgtagtg

SEQ ID NO: 33419 - DNA, 25 bp, Homo sapien
cgttgagtgggtcgtgtgttttacc

SEQ ID NO: 33420 - DNA, 25 bp, Homo sapien
cgttgagtgggtggtgtgttttacc

SEQ ID NO: 33421 - DNA, 25 bp, Homo sapien
agtcatttcgtgtcggattgtttcc

SEQ ID NO: 33422 - DNA, 25 bp, Homo sapien
agtcatttcgtgacggattgtttcc

SEQ ID NO: 33423 - DNA, 25 bp, Homo sapien
tatttcgttccgtctcttgactgac

SEQ ID NO: 33424 - DNA, 25 bp, Homo sapien
tatttcgttccgactcttgactgac

SEQ ID NO: 33425 - DNA, 25 bp, Homo sapien
cgagtaatagggacggaacccataa

SEQ ID NO: 33426 - DNA, 25 bp, Homo sapien
cgagtaatagggtcggaacccataa

SEQ ID NO: 33427 - DNA, 25 bp, Homo sapien
aactttcggttgtaactcctcgaat

SEQ ID NO: 33428 - DNA, 25 bp, Homo sapien
aactttcggttgaaactcctcgaat

SEQ ID NO: 33429 - DNA, 25 bp, Homo sapien
tttgtcgtttactaagcctactgta

SEQ ID NO: 33430 - DNA, 25 bp, Homo sapien
tttgtcgtttacaaagcctactgta

SEQ ID NO: 33431 - DNA, 25 bp, Homo sapien
cagtagttgtactaaaacatcatga

SEQ ID NO: 33432 - DNA, 25 bp, Homo sapien
cagtagttgtacaaaaacatcatga

SEQ ID NO: 33433 - DNA, 25 bp, Homo sapien
tcggttcgtagaaggacgattccca

SEQ ID NO: 33434 - DNA, 25 bp, Homo sapien
tcggttcgtagatggacgattccca

SEQ ID NO: 33435 - DNA, 25 bp, Homo sapien
tccggcagagtatgggtgtcgtaaa

SEQ ID NO: 33436 - DNA, 25 bp, Homo sapien
tccggcagagtaagggtgtcgtaaa

SEQ ID NO: 33437 - DNA, 25 bp, Homo sapien
cagggtacagaactcgagactttaa

SEQ ID NO: 33438 - DNA, 25 bp, Homo sapien
cagggtacagaagtcgagactttaa

SEQ ID NO: 33439 - DNA, 25 bp, Homo sapien
cggtaaagtatatagcacatacaga

SEQ ID NO: 33440 - DNA, 25 bp, Homo sapien
cggtaaagtataaagcacatacaga

SEQ ID NO: 33441 - DNA, 25 bp, Homo sapien
aatgaggtctgacgtacaataacgc

SEQ ID NO: 33442 - DNA, 25 bp, Homo sapien
aatgaggtctgaggtacaataacgc

SEQ ID NO: 33443 - DNA, 25 bp, Homo sapien
cattcggtctgttttatagatatcg

SEQ ID NO: 33444 - DNA, 25 bp, Homo sapien
cattcggtctgtattatagatatcg

SEQ ID NO: 33445 - DNA, 25 bp, Homo sapien
aattacccttctgtgaccggactcg

SEQ ID NO: 33446 - DNA, 25 bp, Homo sapien
aattacccttctctgaccggactcg

SEQ ID NO: 33447 - DNA, 25 bp, Homo sapien
tagttattgtaataaaccggactcg

SEQ ID NO: 33448 - DNA, 25 bp, Homo sapien
tagttattgtaaaaaaccggactcg

SEQ ID NO: 33449 - DNA, 25 bp, Homo sapien
ctctgtttcgacgaggtctcggttg

SEQ ID NO: 33450 - DNA, 25 bp, Homo sapien
ctctgtttcgaccaggtctcggttg

SEQ ID NO: 33451 - DNA, 25 bp, Homo sapien
ctcgattcctatttgttcggtgtat

SEQ ID NO: 33452 - DNA, 25 bp, Homo sapien
ctcgattcctatatgttcggtgtat

SEQ ID NO: 33453 - DNA, 25 bp, Homo sapien
agacgtttgtttatcgtctcgggtt

SEQ ID NO: 33454 - DNA, 25 bp, Homo sapien
agacgtttgtttttcgtctcgggtt

SEQ ID NO: 33455 - DNA, 25 bp, Homo sapien
accgtttcgtgtgtgtatccatatg

SEQ ID NO: 33456 - DNA, 25 bp, Homo sapien
accgtttcgtgtctgtatccatatg

SEQ ID NO: 33457 - DNA, 25 bp, Homo sapien
catcttgtctgtacagaaccttatg

SEQ ID NO: 33458 - DNA, 25 bp, Homo sapien
catcttgtctgttcagaaccttatg

SEQ ID NO: 33459 - DNA, 25 bp, Homo sapien
tcactcgtcttcgacgccttgactg

SEQ ID NO: 33460 - DNA, 25 bp, Homo sapien
tcactcgtcttccacgccttgactg

SEQ ID NO: 33461 - DNA, 25 bp, Homo sapien
cccttgacatgttccgtctccgagg

SEQ ID NO: 33462 - DNA, 25 bp, Homo sapien
cccttgacatgtaccgtctccgagg

SEQ ID NO: 33463 - DNA, 25 bp, Homo sapien
ttacagttcctgaccgttctcacgg

SEQ ID NO: 33464 - DNA, 25 bp, Homo sapien
ttacagttcctgtccgttctcacgg

SEQ ID NO: 33465 - DNA, 25 bp, Homo sapien
gtccgttatcaggtactcttaaacc

SEQ ID NO: 33466 - DNA, 25 bp, Homo sapien
gtccgttatcagctactcttaaacc

SEQ ID NO: 33467 - DNA, 25 bp, Homo sapien
gggcgtgtgctgctgctagcaccct

SEQ ID NO: 33468 - DNA, 25 bp, Homo sapien
gggcgtgtgctggtgctagcaccct

SEQ ID NO: 33469 - DNA, 25 bp, Homo sapien
tgacttgtgatggtcaatgtcgtca

SEQ ID NO: 33470 - DNA, 25 bp, Homo sapien
tgacttgtgatgctcaatgtcgtca

SEQ ID NO: 33471 - DNA, 25 bp, Homo sapien
tttagttcattctgtgtcgaaagca

SEQ ID NO: 33472 - DNA, 25 bp, Homo sapien
tttagttcattcagtgtcgaaagca

SEQ ID NO: 33473 - DNA, 25 bp, Homo sapien
cttgactacagttccgggaaagata

SEQ ID NO: 33474 - DNA, 25 bp, Homo sapien
cttgactacagtaccgggaaagata

SEQ ID NO: 33475 - DNA, 25 bp, Homo sapien
tgtgtttcaacgatctacgagaaca

SEQ ID NO: 33476 - DNA, 25 bp, Homo sapien
tgtgtttcaacgttctacgagaaca

SEQ ID NO: 33477 - DNA, 25 bp, Homo sapien
ttcttatgttactatcgtatacgaa

SEQ ID NO: 33478 - DNA, 25 bp, Homo sapien
ttcttatgttacaatcgtatacgaa

SEQ ID NO: 33479 - DNA, 25 bp, Homo sapien
tgtagtctggtcgacagtgtcatac

SEQ ID NO: 33480 - DNA, 25 bp, Homo sapien
tgtagtctggtccacagtgtcatac

SEQ ID NO: 33481 - DNA, 25 bp, Homo sapien
accttctataagttttcggtgttca

SEQ ID NO: 33482 - DNA, 25 bp, Homo sapien
accttctataagatttcggtgttca

SEQ ID NO: 33483 - DNA, 25 bp, Homo sapien
caatctaacagtctctgcgaagtca

SEQ ID NO: 33484 - DNA, 25 bp, Homo sapien
caatctaacagtgtctgcgaagtca

SEQ ID NO: 33485 - DNA, 25 bp, Homo sapien
acattacaaggtagacccggagcag

SEQ ID NO: 33486 - DNA, 25 bp, Homo sapien
acattacaaggttgacccggagcag

SEQ ID NO: 33487 - DNA, 25 bp, Homo sapien
ccttcagagtcgttgtccttgggtg

SEQ ID NO: 33488 - DNA, 25 bp, Homo sapien
ccttcagagtcgatgtccttgggtg

SEQ ID NO: 33489 - DNA, 25 bp, Homo sapien
cgttcacagatattcctctctcctt

SEQ ID NO: 33490 - DNA, 25 bp, Homo sapien
cgttcacagataatcctctctcctt

SEQ ID NO: 33491 - DNA, 25 bp, Homo sapien
gggtgtatgacaataaaatccccta

SEQ ID NO: 33492 - DNA, 25 bp, Homo sapien
gggtgtatgacattaaaatccccta

SEQ ID NO: 33493 - DNA, 25 bp, Homo sapien
aaagggacaacgactggagtccgga

SEQ ID NO: 33494 - DNA, 25 bp, Homo sapien
aaagggacaacgtctggagtccgga

SEQ ID NO: 33495 - DNA, 25 bp, Homo sapien
aggacgcacgcgtcttgagttcggc

SEQ ID NO: 33496 - DNA, 25 bp, Homo sapien
aggacgcacgcgacttgagttcggc

SEQ ID NO: 33497 - DNA, 25 bp, Homo sapien
aactaacatcagatgcctctagagg

SEQ ID NO: 33498 - DNA, 25 bp, Homo sapien
aactaacatcagttgcctctagagg

SEQ ID NO: 33499 - DNA, 25 bp, Homo sapien
gctgaatacactgtctttagacgag

SEQ ID NO: 33500 - DNA, 25 bp, Homo sapien
gctgaatacactctctttagacgag

SEQ ID NO: 33501 - DNA, 25 bp, Homo sapien
gtgggtacaccttctctaaactaag

SEQ ID NO: 33502 - DNA, 25 bp, Homo sapien
gtgggtacacctactctaaactaag

SEQ ID NO: 33503 - DNA, 25 bp, Homo sapien
atgtgggtaccttgttgaatataga

SEQ ID NO: 33504 - DNA, 25 bp, Homo sapien
atgtgggtacctagttgaatataga

SEQ ID NO: 33505 - DNA, 25 bp, Homo sapien
acgtccgagggacagtggacacccc

SEQ ID NO: 33506 - DNA, 25 bp, Homo sapien
acgtccgagggagagtggacacccc

SEQ ID NO: 33507 - DNA, 25 bp, Homo sapien
ccttcatgtgggaatgaagctactt

SEQ ID NO: 33508 - DNA, 25 bp, Homo sapien
ccttcatgtgggtatgaagctactt

SEQ ID NO: 33509 - DNA, 25 bp, Homo sapien
gttagcaggcggtgtgagacatctt

SEQ ID NO: 33510 - DNA, 25 bp, Homo sapien
gttagcaggcggagtgagacatctt

SEQ ID NO: 33511 - DNA, 25 bp, Homo sapien
agttggtcagggactgacttctcat

SEQ ID NO: 33512 - DNA, 25 bp, Homo sapien
agttggtcagggtctgacttctcat

SEQ ID NO: 33513 - DNA, 25 bp, Homo sapien
gtaaacatagggtctcgggtatctt

SEQ ID NO: 33514 - DNA, 25 bp, Homo sapien
gtaaacatagggactcgggtatctt

SEQ ID NO: 33515 - DNA, 25 bp, Homo sapien
cgacacagtgggacagtccagtgct

SEQ ID NO: 33516 - DNA, 25 bp, Homo sapien
cgacacagtgggtcagtccagtgct

SEQ ID NO: 33517 - DNA, 25 bp, Homo sapien
ccctgtgtatggtgtccaggccctg

SEQ ID NO: 33518 - DNA, 25 bp, Homo sapien
ccctgtgtatggagtccaggccctg

SEQ ID NO: 33519 - DNA, 25 bp, Homo sapien
ccggacaggtgccaggtgtcggcag

SEQ ID NO: 33520 - DNA, 25 bp, Homo sapien
ccggacaggtgcgaggtgtcggcag

SEQ ID NO: 33521 - DNA, 25 bp, Homo sapien
ctgaactccggctgaagtggtttag

SEQ ID NO: 33522 - DNA, 25 bp, Homo sapien
ctgaactccggcagaagtggtttag

SEQ ID NO: 33523 - DNA, 25 bp, Homo sapien
ctagcagaacggtgaagaggtccga

SEQ ID NO: 33524 - DNA, 25 bp, Homo sapien
ctagcagaacggagaagaggtccga

SEQ ID NO: 33525 - DNA, 25 bp, Homo sapien
tgaaccctaaggtcacaaagaccat

SEQ ID NO: 33526 - DNA, 25 bp, Homo sapien
tgaaccctaaggacacaaagaccat

SEQ ID NO: 33527 - DNA, 25 bp, Homo sapien
actgccccaggctccttatgacgaa

SEQ ID NO: 33528 - DNA, 25 bp, Homo sapien
actgccccaggcaccttatgacgaa

SEQ ID NO: 33529 - DNA, 25 bp, Homo sapien
cacccgtgaatatttacggacgata

SEQ ID NO: 33530 - DNA, 25 bp, Homo sapien
cacccgtgaataattacggacgata

SEQ ID NO: 33531 - DNA, 25 bp, Homo sapien
aaacccctagaaagaactggtcctt

SEQ ID NO: 33532 - DNA, 25 bp, Homo sapien
aaacccctagaatgaactggtcctt

SEQ ID NO: 33533 - DNA, 25 bp, Homo sapien
cgacgtgcaagacgagtttgtcggc

SEQ ID NO: 33534 - DNA, 25 bp, Homo sapien
cgacgtgcaagaggagtttgtcggc

SEQ ID NO: 33535 - DNA, 25 bp, Homo sapien
cgagctacctctgtgggacgtgacg

SEQ ID NO: 33536 - DNA, 25 bp, Homo sapien
cgagctacctctctgggacgtgacg

SEQ ID NO: 33537 - DNA, 25 bp, Homo sapien
cccggaccgtctgttcaagtacagg

SEQ ID NO: 33538 - DNA, 25 bp, Homo sapien
cccggaccgtctcttcaagtacagg

SEQ ID NO: 33539 - DNA, 25 bp, Homo sapien
tccggaccttaccaccgaacttaga

SEQ ID NO: 33540 - DNA, 25 bp, Homo sapien
tccggaccttacgaccgaacttaga

SEQ ID NO: 33541 - DNA, 25 bp, Homo sapien
gactagagctttccaccatcagaca

SEQ ID NO: 33542 - DNA, 25 bp, Homo sapien
gactagagctttgcaccatcagaca

SEQ ID NO: 33543 - DNA, 25 bp, Homo sapien
cgcgaggaacctagaccactggacc

SEQ ID NO: 33544 - DNA, 25 bp, Homo sapien
cgcgaggaaccttgaccactggacc

SEQ ID NO: 33545 - DNA, 25 bp, Homo sapien
tgacaaacgtacttgtcaaaggaac

SEQ ID NO: 33546 - DNA, 25 bp, Homo sapien
tgacaaacgtacatgtcaaaggaac

SEQ ID NO: 33547 - DNA, 25 bp, Homo sapien
ttcacgaaacccttttgtgtgtcat

SEQ ID NO: 33548 - DNA, 25 bp, Homo sapien
ttcacgaaacccatttgtgtgtcat

SEQ ID NO: 33549 - DNA, 25 bp, Homo sapien
ttcaaaaaccatttctaccgtatct

SEQ ID NO: 33550 - DNA, 25 bp, Homo sapien
ttcaaaaaccatatctaccgtatct

SEQ ID NO: 33551 - DNA, 25 bp, Homo sapien
acgactgttatctgtcattagacaa

SEQ ID NO: 33552 - DNA, 25 bp, Homo sapien
acgactgttatcagtcattagacaa

SEQ ID NO: 33553 - DNA, 25 bp, Homo sapien
ctctatctggtctcctgatacatgt

SEQ ID NO: 33554 - DNA, 25 bp, Homo sapien
ctctatctggtcacctgatacatgt

SEQ ID NO: 33555 - DNA, 25 bp, Homo sapien
tcatcagggttcacagagtataaat

SEQ ID NO: 33556 - DNA, 25 bp, Homo sapien
tcatcagggttctcagagtataaat

SEQ ID NO: 33557 - DNA, 25 bp, Homo sapien
gaatacctgtatgtcatgtacttaa

SEQ ID NO: 33558 - DNA, 25 bp, Homo sapien
gaatacctgtatctcatgtacttaa

SEQ ID NO: 33559 - DNA, 25 bp, Homo sapien
ggttatgaacatgtttagaccctct

SEQ ID NO: 33560 - DNA, 25 bp, Homo sapien
ggttatgaacatctttagaccctct

SEQ ID NO: 33561 - DNA, 25 bp, Homo sapien
tttaaagaataattgacccactact

SEQ ID NO: 33562 - DNA, 25 bp, Homo sapien
tttaaagaataaatgacccactact

SEQ ID NO: 33563 - DNA, 25 bp, Homo sapien
aacgacgaccgttccgactcgttaa

SEQ ID NO: 33564 - DNA, 25 bp, Homo sapien
aacgacgaccgtaccgactcgttaa

SEQ ID NO: 33565 - DNA, 25 bp, Homo sapien
tcacaaaggtaactctgtactagat

SEQ ID NO: 33566 - DNA, 25 bp, Homo sapien
tcacaaaggtaagtctgtactagat

SEQ ID NO: 33567 - DNA, 25 bp, Homo sapien
tataggacgggcttcctcaacgcga

SEQ ID NO: 33568 - DNA, 25 bp, Homo sapien
tataggacgggcatcctcaacgcga

SEQ ID NO: 33569 - DNA, 25 bp, Homo sapien
tctttcgaccggacccgacgagcga

SEQ ID NO: 33570 - DNA, 25 bp, Homo sapien
tctttcgaccggtcccgacgagcga

SEQ ID NO: 33571 - DNA, 25 bp, Homo sapien
atgtgtctgtcctttctcccggcga

SEQ ID NO: 33572 - DNA, 25 bp, Homo sapien
atgtgtctgtccattctcccggcga

SEQ ID NO: 33573 - DNA, 25 bp, Homo sapien
caaggcagcctatgtccccgaggtg

SEQ ID NO: 33574 - DNA, 25 bp, Homo sapien
caaggcagcctaagtccccgaggtg

SEQ ID NO: 33575 - DNA, 25 bp, Homo sapien
cgaccatcggacagtcggccgggtc

SEQ ID NO: 33576 - DNA, 25 bp, Homo sapien
cgaccatcggactgtcggccgggtc

SEQ ID NO: 33577 - DNA, 25 bp, Homo sapien
ccgaccatggagtcggtctacggga

SEQ ID NO: 33578 - DNA, 25 bp, Homo sapien
ccgaccatggagacggtctacggga

SEQ ID NO: 33579 - DNA, 25 bp, Homo sapien
cccgggaaggagaaacttctgttat

SEQ ID NO: 33580 - DNA, 25 bp, Homo sapien
cccgggaaggagtaacttctgttat

SEQ ID NO: 33581 - DNA, 25 bp, Homo sapien
gactcccagtcacaacgattgttat

SEQ ID NO: 33582 - DNA, 25 bp, Homo sapien
gactcccagtcagaacgattgttat

SEQ ID NO: 33583 - DNA, 25 bp, Homo sapien
aaagtcccaccagagactttaggta

SEQ ID NO: 33584 - DNA, 25 bp, Homo sapien
aaagtcccaccacagactttaggta

SEQ ID NO: 33585 - DNA, 25 bp, Homo sapien
tcctcagcccgactgtgacgtcgag

SEQ ID NO: 33586 - DNA, 25 bp, Homo sapien
tcctcagcccgagtgtgacgtcgag

SEQ ID NO: 33587 - DNA, 25 bp, Homo sapien
cgacctggtctagtgtagtatgtat

SEQ ID NO: 33588 - DNA, 25 bp, Homo sapien
cgacctggtctactgtagtatgtat

SEQ ID NO: 33589 - DNA, 25 bp, Homo sapien
actactagtgcactgtagatcgtat

SEQ ID NO: 33590 - DNA, 25 bp, Homo sapien
actactagtgcagtgtagatcgtat

SEQ ID NO: 33591 - DNA, 25 bp, Homo sapien
agacctactgtgttcatgaatactc

SEQ ID NO: 33592 - DNA, 25 bp, Homo sapien
agacctactgtgatcatgaatactc

SEQ ID NO: 33593 - DNA, 25 bp, Homo sapien
ttttattccggaaataatctcgacg

SEQ ID NO: 33594 - DNA, 25 bp, Homo sapien
ttttattccggatataatctcgacg

SEQ ID NO: 33595 - DNA, 25 bp, Homo sapien
tttacacttcagacgtaacttcagg

SEQ ID NO: 33596 - DNA, 25 bp, Homo sapien
tttacacttcagtcgtaacttcagg

SEQ ID NO: 33597 - DNA, 25 bp, Homo sapien
tactttaaggtagtactatcgtgtc

SEQ ID NO: 33598 - DNA, 25 bp, Homo sapien
tactttaaggtactactatcgtgtc

SEQ ID NO: 33599 - DNA, 25 bp, Homo sapien
tgtctttgtaggacactgttgtctc

SEQ ID NO: 33600 - DNA, 25 bp, Homo sapien
tgtctttgtaggtcactgttgtctc

SEQ ID NO: 33601 - DNA, 25 bp, Homo sapien
ttttcccgtgttacttcgtgtgtag

SEQ ID NO: 33602 - DNA, 25 bp, Homo sapien
ttttcccgtgtttcttcgtgtgtag

SEQ ID NO: 33603 - DNA, 25 bp, Homo sapien
ctcctgtagtcctacttactgaggt

SEQ ID NO: 33604 - DNA, 25 bp, Homo sapien
ctcctgtagtccaacttactgaggt

SEQ ID NO: 33605 - DNA, 25 bp, Homo sapien
acatttagggaacatcttccgacac

SEQ ID NO: 33606 - DNA, 25 bp, Homo sapien
acatttagggaagatcttccgacac

SEQ ID NO: 33607 - DNA, 25 bp, Homo sapien
ttttctaggtggaagttccttccat

SEQ ID NO: 33608 - DNA, 25 bp, Homo sapien
ttttctaggtggtagttccttccat

SEQ ID NO: 33609 - DNA, 25 bp, Homo sapien
tggtcagggaccttactcggttccc

SEQ ID NO: 33610 - DNA, 25 bp, Homo sapien
tggtcagggaccatactcggttccc

SEQ ID NO: 33611 - DNA, 25 bp, Homo sapien
gccgtaaacgagaaaggtgctccgt

SEQ ID NO: 33612 - DNA, 25 bp, Homo sapien
gccgtaaacgagtaaggtgctccgt

SEQ ID NO: 33613 - DNA, 25 bp, Homo sapien
actcagagagacgttccgtggttct

SEQ ID NO: 33614 - DNA, 25 bp, Homo sapien
actcagagagaccttccgtggttct

SEQ ID NO: 33615 - DNA, 25 bp, Homo sapien
tgttttccgggatcccttctctctc

SEQ ID NO: 33616 - DNA, 25 bp, Homo sapien
tgttttccgggaacccttctctctc

SEQ ID NO: 33617 - DNA, 25 bp, Homo sapien
ttttccacagcgacggtttctgtcc

SEQ ID NO: 33618 - DNA, 25 bp, Homo sapien
ttttccacagcgtcggtttctgtcc

SEQ ID NO: 33619 - DNA, 25 bp, Homo sapien
ttgaacgattgagctcatatgtgtc

SEQ ID NO: 33620 - DNA, 25 bp, Homo sapien
ttgaacgattgacctcatatgtgtc

SEQ ID NO: 33621 - DNA, 25 bp, Homo sapien
cttatgacctcctgcccgagggatc

SEQ ID NO: 33622 - DNA, 25 bp, Homo sapien
cttatgacctccagcccgagggatc

SEQ ID NO: 33623 - DNA, 25 bp, Homo sapien
tccctttctactcagggactcgtta

SEQ ID NO: 33624 - DNA, 25 bp, Homo sapien
tccctttctactgagggactcgtta

SEQ ID NO: 33625 - DNA, 25 bp, Homo sapien
gaagagtctactactacagagctga

SEQ ID NO: 33626 - DNA, 25 bp, Homo sapien
gaagagtctacttctacagagctga

SEQ ID NO: 33627 - DNA, 25 bp, Homo sapien
tgtccagagacgtcgacaggtcaag

SEQ ID NO: 33628 - DNA, 25 bp, Homo sapien
tgtccagagacgacgacaggtcaag

SEQ ID NO: 33629 - DNA, 25 bp, Homo sapien
ttacttagacagacgataagtccta

SEQ ID NO: 33630 - DNA, 25 bp, Homo sapien
ttacttagacagtcgataagtccta

SEQ ID NO: 33631 - DNA, 25 bp, Homo sapien
agacccagacacttctctggtccag

SEQ ID NO: 33632 - DNA, 25 bp, Homo sapien
agacccagacacatctctggtccag

SEQ ID NO: 33633 - DNA, 25 bp, Homo sapien
ggtcaaacgccttgtcaacgtccag

SEQ ID NO: 33634 - DNA, 25 bp, Homo sapien
ggtcaaacgcctagtcaacgtccag

SEQ ID NO: 33635 - DNA, 25 bp, Homo sapien
atgccaacgtttgacgactggtgcg

SEQ ID NO: 33636 - DNA, 25 bp, Homo sapien
atgccaacgtttcacgactggtgcg

SEQ ID NO: 33637 - DNA, 25 bp, Homo sapien
ctttcgtgtgtgttgttaaataacc

SEQ ID NO: 33638 - DNA, 25 bp, Homo sapien
ctttcgtgtgtgatgttaaataacc

SEQ ID NO: 33639 - DNA, 25 bp, Homo sapien
tacgactatgggtttcatatacctc

SEQ ID NO: 33640 - DNA, 25 bp, Homo sapien
tacgactatgggattcatatacctc

SEQ ID NO: 33641 - DNA, 25 bp, Homo sapien
gtcgattccgggacacgtctcccgt

SEQ ID NO: 33642 - DNA, 25 bp, Homo sapien
gtcgattccgggtcacgtctcccgt

SEQ ID NO: 33643 - DNA, 25 bp, Homo sapien
tcgttcttaagtttcacgtccacgc

SEQ ID NO: 33644 - DNA, 25 bp, Homo sapien
tcgttcttaagtatcacgtccacgc

SEQ ID NO: 33645 - DNA, 25 bp, Homo sapien
tagtacccaccaccacttgtcgtct

SEQ ID NO: 33646 - DNA, 25 bp, Homo sapien
tagtacccaccagcacttgtcgtct

SEQ ID NO: 33647 - DNA, 25 bp, Homo sapien
tcggtccgacaagtagtcgtgtctc

SEQ ID NO: 33648 - DNA, 25 bp, Homo sapien
tcggtccgacaactagtcgtgtctc

SEQ ID NO: 33649 - DNA, 25 bp, Homo sapien
atgtattcgtacagatctttcctcg

SEQ ID NO: 33650 - DNA, 25 bp, Homo sapien
atgtattcgtactgatctttcctcg

SEQ ID NO: 33651 - DNA, 25 bp, Homo sapien
tgatgttacttctactgtgtcttcc

SEQ ID NO: 33652 - DNA, 25 bp, Homo sapien
tgatgttacttcaactgtgtcttcc

SEQ ID NO: 33653 - DNA, 25 bp, Homo sapien
tggttctactggtgtcggtccttcg

SEQ ID NO: 33654 - DNA, 25 bp, Homo sapien
tggttctactggagtcggtccttcg

SEQ ID NO: 33655 - DNA, 25 bp, Homo sapien
cacccggaggacacgacgaggtcgt

SEQ ID NO: 33656 - DNA, 25 bp, Homo sapien
cacccggaggactcgacgaggtcgt

SEQ ID NO: 33657 - DNA, 25 bp, Homo sapien
cacgtgtgtgtgtctatgcacgtaa

SEQ ID NO: 33658 - DNA, 25 bp, Homo sapien
cacgtgtgtgtgactatgcacgtaa

SEQ ID NO: 33659 - DNA, 25 bp, Homo sapien
cgatgacgtcggaccgagacgcacc

SEQ ID NO: 33660 - DNA, 25 bp, Homo sapien
cgatgacgtcggtccgagacgcacc

SEQ ID NO: 33661 - DNA, 25 bp, Homo sapien
ccacagtcactgacgtagtactgcc

SEQ ID NO: 33662 - DNA, 25 bp, Homo sapien
ccacagtcactgtcgtagtactgcc

SEQ ID NO: 33663 - DNA, 25 bp, Homo sapien
aaacgacagtgtctagtagtgtccg

SEQ ID NO: 33664 - DNA, 25 bp, Homo sapien
aaacgacagtgtgtagtagtgtccg

SEQ ID NO: 33665 - DNA, 25 bp, Homo sapien
tttagtgagggtccagtgtgtcgtc

SEQ ID NO: 33666 - DNA, 25 bp, Homo sapien
tttagtgagggtgcagtgtgtcgtc

SEQ ID NO: 33667 - DNA, 25 bp, Homo sapien
ggtttgagactttacgaggtaactc

SEQ ID NO: 33668 - DNA, 25 bp, Homo sapien
ggtttgagacttaacgaggtaactc

SEQ ID NO: 33669 - DNA, 25 bp, Homo sapien
gaggacgtagtatgtccgaaggtcc

SEQ ID NO: 33670 - DNA, 25 bp, Homo sapien
gaggacgtagtaagtccgaaggtcc

SEQ ID NO: 33671 - DNA, 25 bp, Homo sapien
gtagggttatgttgctgctacgtcg

SEQ ID NO: 33672 - DNA, 25 bp, Homo sapien
gtagggttatgtagctgctacgtcg

SEQ ID NO: 33673 - DNA, 25 bp, Homo sapien
ccagtcgtcacttcggaaactacga

SEQ ID NO: 33674 - DNA, 25 bp, Homo sapien
ccagtcgtcactacggaaactacga

SEQ ID NO: 33675 - DNA, 25 bp, Homo sapien
actcaagtacaggaacgaacgtact

SEQ ID NO: 33676 - DNA, 25 bp, Homo sapien
actcaagtacagcaacgaacgtact

SEQ ID NO: 33677 - DNA, 25 bp, Homo sapien
agtatgaaactcgaggtaatcgact

SEQ ID NO: 33678 - DNA, 25 bp, Homo sapien
agtatgaaactccaggtaatcgact

SEQ ID NO: 33679 - DNA, 25 bp, Homo sapien
tcgtcgaaacggagtcggcgtcagt

SEQ ID NO: 33680 - DNA, 25 bp, Homo sapien
tcgtcgaaacggtgtcggcgtcagt

SEQ ID NO: 33681 - DNA, 25 bp, Homo sapien
acgagaacggacgtcgagacgtcct

SEQ ID NO: 33682 - DNA, 25 bp, Homo sapien
acgagaacggacctcgagacgtcct

SEQ ID NO: 33683 - DNA, 25 bp, Homo sapien
gaaggagtacacgagcgacgtttta

SEQ ID NO: 33684 - DNA, 25 bp, Homo sapien
gaaggagtacaccagcgacgtttta

SEQ ID NO: 33685 - DNA, 25 bp, Homo sapien
taagaaaggacacgttattccatac

SEQ ID NO: 33686 - DNA, 25 bp, Homo sapien
taagaaaggacaggttattccatac

SEQ ID NO: 33687 - DNA, 25 bp, Homo sapien
ccaaggagactaggtattcccttac

SEQ ID NO: 33688 - DNA, 25 bp, Homo sapien
ccaaggagactacgtattcccttac

SEQ ID NO: 33689 - DNA, 25 bp, Homo sapien
tctaaagagacgacttccataggtc

SEQ ID NO: 33690 - DNA, 25 bp, Homo sapien
tctaaagagacgtcttccataggtc

SEQ ID NO: 33691 - DNA, 25 bp, Homo sapien
agtgtgttcccgaggtcccgtggac

SEQ ID NO: 33692 - DNA, 25 bp, Homo sapien
agtgtgttcccgtggtcccgtggac

SEQ ID NO: 33693 - DNA, 25 bp, Homo sapien
cgactcttccggtcgtcccggacac

SEQ ID NO: 33694 - DNA, 25 bp, Homo sapien
cgactcttccggacgtcccggacac

SEQ ID NO: 33695 - DNA, 25 bp, Homo sapien
ccctgctcacatcgtctcgtgagaa

SEQ ID NO: 33696 - DNA, 25 bp, Homo sapien
ccctgctcacatggtctcgtgagaa

SEQ ID NO: 33697 - DNA, 25 bp, Homo sapien
agtatgttccaattctcgggtaaga

SEQ ID NO: 33698 - DNA, 25 bp, Homo sapien
agtatgttccaaatctcgggtaaga

SEQ ID NO: 33699 - DNA, 25 bp, Homo sapien
gatctcgttccctattgaagtaata

SEQ ID NO: 33700 - DNA, 25 bp, Homo sapien
gatctcgttcccaattgaagtaata

SEQ ID NO: 33701 - DNA, 25 bp, Homo sapien
cgtttcctctatctacgatactggt

SEQ ID NO: 33702 - DNA, 25 bp, Homo sapien
cgtttcctctatgtacgatactggt

SEQ ID NO: 33703 - DNA, 25 bp, Homo sapien
ctctgtacctcgttttgttcagtag

SEQ ID NO: 33704 - DNA, 25 bp, Homo sapien
ctctgtacctcgatttgttcagtag

SEQ ID NO: 33705 - DNA, 25 bp, Homo sapien
tcaccctcggtgtttgtgtcctagg

SEQ ID NO: 33706 - DNA, 25 bp, Homo sapien
tcaccctcggtgattgtgtcctagg

SEQ ID NO: 33707 - DNA, 25 bp, Homo sapien
tccccacggttcctgtcgtctgtga

SEQ ID NO: 33708 - DNA, 25 bp, Homo sapien
tccccacggttcgtgtcgtctgtga

SEQ ID NO: 33709 - DNA, 25 bp, Homo sapien
gtttccgatggatctctggttgtca

SEQ ID NO: 33710 - DNA, 25 bp, Homo sapien
gtttccgatggaactctggttgtca

SEQ ID NO: 33711 - DNA, 25 bp, Homo sapien
tttctgttacggacttggggtcgag

SEQ ID NO: 33712 - DNA, 25 bp, Homo sapien
tttctgttacggtcttggggtcgag

SEQ ID NO: 33713 - DNA, 25 bp, Homo sapien
gtacttcgtaagctaccatgggcga

SEQ ID NO: 33714 - DNA, 25 bp, Homo sapien
gtacttcgtaaggtaccatgggcga

SEQ ID NO: 33715 - DNA, 25 bp, Homo sapien
cgacccgaggctgaagtggtctctc

SEQ ID NO: 33716 - DNA, 25 bp, Homo sapien
cgacccgaggctcaagtggtctctc

SEQ ID NO: 33717 - DNA, 25 bp, Homo sapien
ctcccgactcttccggtcgtcccgg

SEQ ID NO: 33718 - DNA, 25 bp, Homo sapien
ctcccgactcttgcggtcgtcccgg

SEQ ID NO: 33719 - DNA, 25 bp, Homo sapien
acaagtagtcgtgtctcggaccccg

SEQ ID NO: 33720 - DNA, 25 bp, Homo sapien
acaagtagtcgtctctcggaccccg

SEQ ID NO: 33721 - DNA, 25 bp, Homo sapien
ttcagagacgcgagctagcacgccc

SEQ ID NO: 33722 - DNA, 25 bp, Homo sapien
ttcagagacgcgtgctagcacgccc

SEQ ID NO: 33723 - DNA, 25 bp, Homo sapien
tggagtcgtgtctctcctgtccaga

SEQ ID NO: 33724 - DNA, 25 bp, Homo sapien
tggagtcgtgtcactcctgtccaga

SEQ ID NO: 33725 - DNA, 25 bp, Homo sapien
gggtagtcgtaatccttcttatagt

SEQ ID NO: 33726 - DNA, 25 bp, Homo sapien
gggtagtcgtaaaccttcttatagt

SEQ ID NO: 33727 - DNA, 25 bp, Homo sapien
gtattgatccatccattagtcgtta

SEQ ID NO: 33728 - DNA, 25 bp, Homo sapien
gtattgatccatgcattagtcgtta

SEQ ID NO: 33729 - DNA, 25 bp, Homo sapien
tagatattactagtccaagtaacag

SEQ ID NO: 33730 - DNA, 25 bp, Homo sapien
tagatattactactccaagtaacag

SEQ ID NO: 33731 - DNA, 25 bp, Homo sapien
gtgtaggaactacgacaccgcaacg

SEQ ID NO: 33732 - DNA, 25 bp, Homo sapien
gtgtaggaactaggacaccgcaacg

SEQ ID NO: 33733 - DNA, 25 bp, Homo sapien
caaacagaccgtggacatgagaggt

SEQ ID NO: 33734 - DNA, 25 bp, Homo sapien
caaacagaccgtcgacatgagaggt

SEQ ID NO: 33735 - DNA, 25 bp, Homo sapien
tagacgtcgtaggtaagtcgggact

SEQ ID NO: 33736 - DNA, 25 bp, Homo sapien
tagacgtcgtagctaagtcgggact

SEQ ID NO: 33737 - DNA, 25 bp, Homo sapien
aagtacgacagttttactctgacac

SEQ ID NO: 33738 - DNA, 25 bp, Homo sapien
aagtacgacagtattactctgacac

SEQ ID NO: 33739 - DNA, 25 bp, Homo sapien
gtaaggtatgtaaatctctcttacg

SEQ ID NO: 33740 - DNA, 25 bp, Homo sapien
gtaaggtatgtatatctctcttacg

SEQ ID NO: 33741 - DNA, 25 bp, Homo sapien
ataggtcgtagtgagttcatacttc

SEQ ID NO: 33742 - DNA, 25 bp, Homo sapien
ataggtcgtagtcagttcatacttc

SEQ ID NO: 33743 - DNA, 25 bp, Homo sapien
gtagtcgttcttatagtcactcctc

SEQ ID NO: 33744 - DNA, 25 bp, Homo sapien
gtagtcgttcttttagtcactcctc

SEQ ID NO: 33745 - DNA, 25 bp, Homo sapien
gtagtagttatgtcttagactcccg

SEQ ID NO: 33746 - DNA, 25 bp, Homo sapien
gtagtagttatgacttagactcccg

SEQ ID NO: 33747 - DNA, 25 bp, Homo sapien
gtaataactataaacgtgacatctg

SEQ ID NO: 33748 - DNA, 25 bp, Homo sapien
gtaataactatatacgtgacatctg

SEQ ID NO: 33749 - DNA, 25 bp, Homo sapien
agccaacttgtactgacagactatg

SEQ ID NO: 33750 - DNA, 25 bp, Homo sapien
agccaacttgtagtgacagactatg

SEQ ID NO: 33751 - DNA, 25 bp, Homo sapien
ctaaatctactacacgacagaagtg

SEQ ID NO: 33752 - DNA, 25 bp, Homo sapien
ctaaatctactagacgacagaagtg

SEQ ID NO: 33753 - DNA, 25 bp, Homo sapien
aaaaaactagaggaacttacatcgt

SEQ ID NO: 33754 - DNA, 25 bp, Homo sapien
aaaaaactagagcaacttacatcgt

SEQ ID NO: 33755 - DNA, 25 bp, Homo sapien
tgggaagaaggcttacatacatcgt

SEQ ID NO: 33756 - DNA, 25 bp, Homo sapien
tgggaagaaggcatacatacatcgt

SEQ ID NO: 33757 - DNA, 25 bp, Homo sapien
gaggatgaagtcatactatactatc

SEQ ID NO: 33758 - DNA, 25 bp, Homo sapien
gaggatgaagtcttactatactatc

SEQ ID NO: 33759 - DNA, 25 bp, Homo sapien
cagacggccgaggtccgtctcctaa

SEQ ID NO: 33760 - DNA, 25 bp, Homo sapien
cagacggccgagctccgtctcctaa

SEQ ID NO: 33761 - DNA, 25 bp, Homo sapien
caacgaggtctagtacatcccatct

SEQ ID NO: 33762 - DNA, 25 bp, Homo sapien
caacgaggtctactacatcccatct

SEQ ID NO: 33763 - DNA, 25 bp, Homo sapien
gtagacaggtcctaggtccctgtcg

SEQ ID NO: 33764 - DNA, 25 bp, Homo sapien
gtagacaggtccaaggtccctgtcg

SEQ ID NO: 33765 - DNA, 25 bp, Homo sapien
gaagaagaccgaaagacccgttcgt

SEQ ID NO: 33766 - DNA, 25 bp, Homo sapien
gaagaagaccgatagacccgttcgt

SEQ ID NO: 33767 - DNA, 25 bp, Homo sapien
gactataccgcgaccgcctagtcgt

SEQ ID NO: 33768 - DNA, 25 bp, Homo sapien
gactataccgcgtccgcctagtcgt

SEQ ID NO: 33769 - DNA, 25 bp, Homo sapien
cctatgacctcttcacgctgagtcg

SEQ ID NO: 33770 - DNA, 25 bp, Homo sapien
cctatgacctctacacgctgagtcg

SEQ ID NO: 33771 - DNA, 25 bp, Homo sapien
gaacagtgacctaaatctcagagag

SEQ ID NO: 33772 - DNA, 25 bp, Homo sapien
gaacagtgaccttaatctcagagag

SEQ ID NO: 33773 - DNA, 25 bp, Homo sapien
aggacattactttaccccgagaggt

SEQ ID NO: 33774 - DNA, 25 bp, Homo sapien
aggacattacttaaccccgagaggt

SEQ ID NO: 33775 - DNA, 25 bp, Homo sapien
tgtgacactacttcaacaaggacaa

SEQ ID NO: 33776 - DNA, 25 bp, Homo sapien
tgtgacactactacaacaaggacaa

SEQ ID NO: 33777 - DNA, 25 bp, Homo sapien
ctctcagttcagaccggtccacgat

SEQ ID NO: 33778 - DNA, 25 bp, Homo sapien
ctctcagttcagtccggtccacgat

SEQ ID NO: 33779 - DNA, 25 bp, Homo sapien
acctacagtttgtttcggtcccgag

SEQ ID NO: 33780 - DNA, 25 bp, Homo sapien
acctacagtttgattcggtcccgag

SEQ ID NO: 33781 - DNA, 25 bp, Homo sapien
tacactgttgtgtcggtatctaccc

SEQ ID NO: 33782 - DNA, 25 bp, Homo sapien
tacactgttgtgacggtatctaccc

SEQ ID NO: 33783 - DNA, 25 bp, Homo sapien
acacggaatctttcccgtagacttc

SEQ ID NO: 33784 - DNA, 25 bp, Homo sapien
acacggaatcttacccgtagacttc

SEQ ID NO: 33785 - DNA, 25 bp, Homo sapien
tcagagaaataatccgtcgtcctcc

SEQ ID NO: 33786 - DNA, 25 bp, Homo sapien
tcagagaaataaaccgtcgtcctcc

SEQ ID NO: 33787 - DNA, 25 bp, Homo sapien
gagttcagacactgacgtcctattt

SEQ ID NO: 33788 - DNA, 25 bp, Homo sapien
gagttcagacacagacgtcctattt

SEQ ID NO: 33789 - DNA, 25 bp, Homo sapien
tgactctgacactaactgtctgttt

SEQ ID NO: 33790 - DNA, 25 bp, Homo sapien
tgactctgacacaaactgtctgttt

SEQ ID NO: 33791 - DNA, 25 bp, Homo sapien
tgtccgttgtcacttctcgtggtct

SEQ ID NO: 33792 - DNA, 25 bp, Homo sapien
tgtccgttgtcagttctcgtggtct

SEQ ID NO: 33793 - DNA, 25 bp, Homo sapien
ttgggtccataatcacttttaaacg

SEQ ID NO: 33794 - DNA, 25 bp, Homo sapien
ttgggtccataaacacttttaaacg

SEQ ID NO: 33795 - DNA, 25 bp, Homo sapien
gacgtttttagacagctctactaac

SEQ ID NO: 33796 - DNA, 25 bp, Homo sapien
gacgtttttagagagctctactaac

SEQ ID NO: 33797 - DNA, 25 bp, Homo sapien
gtgtgtctacttagagtcatctcct

SEQ ID NO: 33798 - DNA, 25 bp, Homo sapien
gtgtgtctactttgagtcatctcct

SEQ ID NO: 33799 - DNA, 25 bp, Homo sapien
ggttctttgtgttcgtcgacgtagg

SEQ ID NO: 33800 - DNA, 25 bp, Homo sapien
ggttctttgtgtacgtcgacgtagg

SEQ ID NO: 33801 - DNA, 25 bp, Homo sapien
ctttgtagtttctttataccagagt

SEQ ID NO: 33802 - DNA, 25 bp, Homo sapien
ctttgtagtttcattataccagagt

SEQ ID NO: 33803 - DNA, 25 bp, Homo sapien
ctgtcgttaacaattctcagtgtgt

SEQ ID NO: 33804 - DNA, 25 bp, Homo sapien
ctgtcgttaacatttctcagtgtgt

SEQ ID NO: 33805 - DNA, 25 bp, Homo sapien
tttacgtatccctagtaaagactgt

SEQ ID NO: 33806 - DNA, 25 bp, Homo sapien
tttacgtatcccaagtaaagactgt

SEQ ID NO: 33807 - DNA, 25 bp, Homo sapien
gtcttcacgtgtctcttgagacctg

SEQ ID NO: 33808 - DNA, 25 bp, Homo sapien
gtcttcacgtgtgtcttgagacctg

SEQ ID NO: 33809 - DNA, 25 bp, Homo sapien
agtcgtcggtattcttaatatcgta

SEQ ID NO: 33810 - DNA, 25 bp, Homo sapien
agtcgtcggtatacttaatatcgta

SEQ ID NO: 33811 - DNA, 25 bp, Homo sapien
agaagtcgacggttcacataaatca

SEQ ID NO: 33812 - DNA, 25 bp, Homo sapien
agaagtcgacggatcacataaatca

SEQ ID NO: 33813 - DNA, 25 bp, Homo sapien
gtcattaactatcgtgaacatccgt

SEQ ID NO: 33814 - DNA, 25 bp, Homo sapien
gtcattaactatggtgaacatccgt

SEQ ID NO: 33815 - DNA, 25 bp, Homo sapien
cgtcattaaatagtctccagtgagt

SEQ ID NO: 33816 - DNA, 25 bp, Homo sapien
cgtcattaaatactctccagtgagt

SEQ ID NO: 33817 - DNA, 25 bp, Homo sapien
tcgatcactatgctctagtccacag

SEQ ID NO: 33818 - DNA, 25 bp, Homo sapien
tcgatcactatggtctagtccacag

SEQ ID NO: 33819 - DNA, 25 bp, Homo sapien
acactcaacgcctccgtatagggag

SEQ ID NO: 33820 - DNA, 25 bp, Homo sapien
acactcaacgccaccgtatagggag

SEQ ID NO: 33821 - DNA, 25 bp, Homo sapien
cacgtccgacgaaaccagaagcaca

SEQ ID NO: 33822 - DNA, 25 bp, Homo sapien
cacgtccgacgataccagaagcaca

SEQ ID NO: 33823 - DNA, 25 bp, Homo sapien
ttgtcgtaaacagaacaaaactatg

SEQ ID NO: 33824 - DNA, 25 bp, Homo sapien
ttgtcgtaaacacaacaaaactatg

SEQ ID NO: 33825 - DNA, 25 bp, Homo sapien
ttctcgaaaacacacaggtgtaatc

SEQ ID NO: 33826 - DNA, 25 bp, Homo sapien
ttctcgaaaacagacaggtgtaatc

SEQ ID NO: 33827 - DNA, 25 bp, Homo sapien
aaagaaagtacagcatgttcgttac

SEQ ID NO: 33828 - DNA, 25 bp, Homo sapien
aaagaaagtacaccatgttcgttac

SEQ ID NO: 33829 - DNA, 25 bp, Homo sapien
gacaaaagaacatgacaatcgtcta

SEQ ID NO: 33830 - DNA, 25 bp, Homo sapien
gacaaaagaacaagacaatcgtcta

SEQ ID NO: 33831 - DNA, 25 bp, Homo sapien
gaggaaggaaacaaacgacgacgat

SEQ ID NO: 33832 - DNA, 25 bp, Homo sapien
gaggaaggaaactaacgacgacgat

SEQ ID NO: 33833 - DNA, 25 bp, Homo sapien
agaggaacgaaaacttaaatcacgt

SEQ ID NO: 33834 - DNA, 25 bp, Homo sapien
agaggaacgaaatcttaaatcacgt

SEQ ID NO: 33835 - DNA, 25 bp, Homo sapien
cgggttacagttctactgatgtaat

SEQ ID NO: 33836 - DNA, 25 bp, Homo sapien
cgggttacagttgtactgatgtaat

SEQ ID NO: 33837 - DNA, 25 bp, Homo sapien
acgggttcatgtagatcctgtcgta

SEQ ID NO: 33838 - DNA, 25 bp, Homo sapien
acgggttcatgttgatcctgtcgta

SEQ ID NO: 33839 - DNA, 25 bp, Homo sapien
gggtcgagtcgattttcatttgtcc

SEQ ID NO: 33840 - DNA, 25 bp, Homo sapien
gggtcgagtcgaatttcatttgtcc

SEQ ID NO: 33841 - DNA, 25 bp, Homo sapien
ctggtaacgttaaatctctacaccg

SEQ ID NO: 33842 - DNA, 25 bp, Homo sapien
ctggtaacgttatatctctacaccg

SEQ ID NO: 33843 - DNA, 25 bp, Homo sapien
tagctaacgtcttcctcgtcatcgg

SEQ ID NO: 33844 - DNA, 25 bp, Homo sapien
tagctaacgtctacctcgtcatcgg

SEQ ID NO: 33845 - DNA, 25 bp, Homo sapien
cttaagtaaactgacgttcaccatg

SEQ ID NO: 33846 - DNA, 25 bp, Homo sapien
cttaagtaaactcacgttcaccatg

SEQ ID NO: 33847 - DNA, 25 bp, Homo sapien
ttgaatggattcttctactcttagt

SEQ ID NO: 33848 - DNA, 25 bp, Homo sapien
ttgaatggattcatctactcttagt

SEQ ID NO: 33849 - DNA, 25 bp, Homo sapien
cttgagggaagaactttacgcttat

SEQ ID NO: 33850 - DNA, 25 bp, Homo sapien
cttgagggaagatctttacgcttat

SEQ ID NO: 33851 - DNA, 25 bp, Homo sapien
tcgtaggaggctcaggtagttcgtc

SEQ ID NO: 33852 - DNA, 25 bp, Homo sapien
tcgtaggaggctgaggtagttcgtc

SEQ ID NO: 33853 - DNA, 25 bp, Homo sapien
gggtcgaaacagtgaggttctctac

SEQ ID NO: 33854 - DNA, 25 bp, Homo sapien
gggtcgaaacagagaggttctctac

SEQ ID NO: 33855 - DNA, 25 bp, Homo sapien
ataaaggaaccgagagagtatccta

SEQ ID NO: 33856 - DNA, 25 bp, Homo sapien
ataaaggaaccgtgagagtatccta

SEQ ID NO: 33857 - DNA, 25 bp, Homo sapien
ggttcagaaagatctattagttccc

SEQ ID NO: 33858 - DNA, 25 bp, Homo sapien
ggttcagaaagaactattagttccc

SEQ ID NO: 33859 - DNA, 25 bp, Homo sapien
tcagtattcctctgtgtgtctaatc

SEQ ID NO: 33860 - DNA, 25 bp, Homo sapien
tcagtattcctcagtgtgtctaatc

SEQ ID NO: 33861 - DNA, 25 bp, Homo sapien
tggggtcgacccatcgtcgttaagg

SEQ ID NO: 33862 - DNA, 25 bp, Homo sapien
tggggtcgacccttcgtcgttaagg

SEQ ID NO: 33863 - DNA, 25 bp, Homo sapien
atgacaccgtcgttccgtgtccgac

SEQ ID NO: 33864 - DNA, 25 bp, Homo sapien
atgacaccgtcgatccgtgtccgac

SEQ ID NO: 33865 - DNA, 25 bp, Homo sapien
tgtcggacctggtccgtagccgacg

SEQ ID NO: 33866 - DNA, 25 bp, Homo sapien
tgtcggacctggaccgtagccgacg

SEQ ID NO: 33867 - DNA, 25 bp, Homo sapien
gactcgtaatcttcgggacggtcca

SEQ ID NO: 33868 - DNA, 25 bp, Homo sapien
gactcgtaatctacgggacggtcca

SEQ ID NO: 33869 - DNA, 25 bp, Homo sapien
accactactggaccggcagtccgtc

SEQ ID NO: 33870 - DNA, 25 bp, Homo sapien
accactactggagcggcagtccgtc

SEQ ID NO: 33871 - DNA, 25 bp, Homo sapien
tgtgaagttgttaaggtgacacccc

SEQ ID NO: 33872 - DNA, 25 bp, Homo sapien
tgtgaagttgtttaggtgacacccc

SEQ ID NO: 33873 - DNA, 25 bp, Homo sapien
ggcgtctctcgtaccggaacctgcg

SEQ ID NO: 33874 - DNA, 25 bp, Homo sapien
ggcgtctctcgttccggaacctgcg

SEQ ID NO: 33875 - DNA, 25 bp, Homo sapien
ggtctctcacgtgctgggacccgta

SEQ ID NO: 33876 - DNA, 25 bp, Homo sapien
ggtctctcacgtcctgggacccgta

SEQ ID NO: 33877 - DNA, 25 bp, Homo sapien
gtggtttacctcaggggaccgacga

SEQ ID NO: 33878 - DNA, 25 bp, Homo sapien
gtggtttacctctggggaccgacga

SEQ ID NO: 33879 - DNA, 25 bp, Homo sapien
ggagtcttttgttcggagatccgac

SEQ ID NO: 33880 - DNA, 25 bp, Homo sapien
ggagtcttttgtacggagatccgac

SEQ ID NO: 33881 - DNA, 25 bp, Homo sapien
ccaccgtctctttgttagggaaacc

SEQ ID NO: 33882 - DNA, 25 bp, Homo sapien
ccaccgtctcttagttagggaaacc

SEQ ID NO: 33883 - DNA, 25 bp, Homo sapien
cgacttcaggtctcacaggaaagac

SEQ ID NO: 33884 - DNA, 25 bp, Homo sapien
cgacttcaggtcacacaggaaagac

SEQ ID NO: 33885 - DNA, 25 bp, Homo sapien
gagacctttttaccacaggagaaac

SEQ ID NO: 33886 - DNA, 25 bp, Homo sapien
gagacctttttagcacaggagaaac

SEQ ID NO: 33887 - DNA, 25 bp, Homo sapien
gtaacacgcttcttcccgaacgaaa

SEQ ID NO: 33888 - DNA, 25 bp, Homo sapien
gtaacacgcttcatcccgaacgaaa

SEQ ID NO: 33889 - DNA, 25 bp, Homo sapien
tatgtctatacatgtgctattcaag

SEQ ID NO: 33890 - DNA, 25 bp, Homo sapien
tatgtctatacaagtgctattcaag

SEQ ID NO: 33891 - DNA, 25 bp, Homo sapien
tttgtatcacggtagtcgaaacaga

SEQ ID NO: 33892 - DNA, 25 bp, Homo sapien
tttgtatcacggaagtcgaaacaga

SEQ ID NO: 33893 - DNA, 25 bp, Homo sapien
taggtacaaggttactacaattgac

SEQ ID NO: 33894 - DNA, 25 bp, Homo sapien
taggtacaaggtaactacaattgac

SEQ ID NO: 33895 - DNA, 25 bp, Homo sapien
tgtaaaagacgtctcaacgacttgg

SEQ ID NO: 33896 - DNA, 25 bp, Homo sapien
tgtaaaagacgtgtcaacgacttgg

SEQ ID NO: 33897 - DNA, 25 bp, Homo sapien
cataaagaccttccagagactaagg

SEQ ID NO: 33898 - DNA, 25 bp, Homo sapien
cataaagaccttgcagagactaagg

SEQ ID NO: 33899 - DNA, 25 bp, Homo sapien
aaaaacacgactgacacgtgcctgg

SEQ ID NO: 33900 - DNA, 25 bp, Homo sapien
aaaaacacgactcacacgtgcctgg

SEQ ID NO: 33901 - DNA, 25 bp, Homo sapien
ctcaaacgtacacgtccgggagacc

SEQ ID NO: 33902 - DNA, 25 bp, Homo sapien
ctcaaacgtacaggtccgggagacc

SEQ ID NO: 33903 - DNA, 25 bp, Homo sapien
cgtcggcgtttctcggctccgacgg

SEQ ID NO: 33904 - DNA, 25 bp, Homo sapien
cgtcggcgtttcacggctccgacgg

SEQ ID NO: 33905 - DNA, 25 bp, Homo sapien
ttacgacggtgacgacgcccacgtc

SEQ ID NO: 33906 - DNA, 25 bp, Homo sapien
ttacgacggtgaggacgcccacgtc

SEQ ID NO: 33907 - DNA, 25 bp, Homo sapien
gacccgacgggacgagacgacccga

SEQ ID NO: 33908 - DNA, 25 bp, Homo sapien
gacccgacgggaggagacgacccga

SEQ ID NO: 33909 - DNA, 25 bp, Homo sapien
ctcgaaggaccgaggtagactccca

SEQ ID NO: 33910 - DNA, 25 bp, Homo sapien
ctcgaaggaccgtggtagactccca

SEQ ID NO: 33911 - DNA, 25 bp, Homo sapien
cttgaggattttgaacgttcactat

SEQ ID NO: 33912 - DNA, 25 bp, Homo sapien
cttgaggattttcaacgttcactat

SEQ ID NO: 33913 - DNA, 25 bp, Homo sapien
gtcttaagtgggtttcggacccacc

SEQ ID NO: 33914 - DNA, 25 bp, Homo sapien
gtcttaagtgggattcggacccacc

SEQ ID NO: 33915 - DNA, 25 bp, Homo sapien
cgaaactacgcagacgggtcccggg

SEQ ID NO: 33916 - DNA, 25 bp, Homo sapien
cgaaactacgcacacgggtcccggg

SEQ ID NO: 33917 - DNA, 25 bp, Homo sapien
caaatctcacccagagttacctggt

SEQ ID NO: 33918 - DNA, 25 bp, Homo sapien
caaatctcaccctgagttacctggt

SEQ ID NO: 33919 - DNA, 25 bp, Homo sapien
agtaaaacacgattgttaacctaga

SEQ ID NO: 33920 - DNA, 25 bp, Homo sapien
agtaaaacacgaatgttaacctaga

SEQ ID NO: 33921 - DNA, 25 bp, Homo sapien
gtatacaccgggttatctggtctaa

SEQ ID NO: 33922 - DNA, 25 bp, Homo sapien
gtatacaccgggatatctggtctaa

SEQ ID NO: 33923 - DNA, 25 bp, Homo sapien
tttcgatctcttctgtctacgagtt

SEQ ID NO: 33924 - DNA, 25 bp, Homo sapien
tttcgatctcttgtgtctacgagtt

SEQ ID NO: 33925 - DNA, 25 bp, Homo sapien
cactccttcgtcttggtgtctatta

SEQ ID NO: 33926 - DNA, 25 bp, Homo sapien
cactccttcgtcatggtgtctatta

SEQ ID NO: 33927 - DNA, 25 bp, Homo sapien
cgatcacgttcgagggttgactgac

SEQ ID NO: 33928 - DNA, 25 bp, Homo sapien
cgatcacgttcgtgggttgactgac

SEQ ID NO: 33929 - DNA, 25 bp, Homo sapien
tctctggggtgacacatggactcgg

SEQ ID NO: 33930 - DNA, 25 bp, Homo sapien
tctctggggtgagacatggactcgg

SEQ ID NO: 33931 - DNA, 25 bp, Homo sapien
agtaggaggtaatccgatcgaaagc

SEQ ID NO: 33932 - DNA, 25 bp, Homo sapien
agtaggaggtaaaccgatcgaaagc

SEQ ID NO: 33933 - DNA, 25 bp, Homo sapien
ggtagtggcccagatgtcgtcgaca

SEQ ID NO: 33934 - DNA, 25 bp, Homo sapien
ggtagtggcccacatgtcgtcgaca

SEQ ID NO: 33935 - DNA, 25 bp, Homo sapien
gtttcgagtccgtcgacctccggga

SEQ ID NO: 33936 - DNA, 25 bp, Homo sapien
gtttcgagtccgacgacctccggga

SEQ ID NO: 33937 - DNA, 25 bp, Homo sapien
gtccgtactccgacgtcccttggtg

SEQ ID NO: 33938 - DNA, 25 bp, Homo sapien
gtccgtactccgtcgtcccttggtg

SEQ ID NO: 33939 - DNA, 25 bp, Homo sapien
tctacgaccgcagtaccggagcgtg

SEQ ID NO: 33940 - DNA, 25 bp, Homo sapien
tctacgaccgcactaccggagcgtg

SEQ ID NO: 33941 - DNA, 25 bp, Homo sapien
taagacgtccggttcagaaccgtag

SEQ ID NO: 33942 - DNA, 25 bp, Homo sapien
taagacgtccggatcagaaccgtag

SEQ ID NO: 33943 - DNA, 25 bp, Homo sapien
actatgaccagtagaccgactccag

SEQ ID NO: 33944 - DNA, 25 bp, Homo sapien
actatgaccagttgaccgactccag

SEQ ID NO: 33945 - DNA, 25 bp, Homo sapien
ccatgtttccgtggaacgatccgcg

SEQ ID NO: 33946 - DNA, 25 bp, Homo sapien
ccatgtttccgtcgaacgatccgcg

SEQ ID NO: 33947 - DNA, 25 bp, Homo sapien
acttgactcacgaggttacaccgtt

SEQ ID NO: 33948 - DNA, 25 bp, Homo sapien
acttgactcacgtggttacaccgtt

SEQ ID NO: 33949 - DNA, 25 bp, Homo sapien
acatgtccagtcctaagatcacaga

SEQ ID NO: 33950 - DNA, 25 bp, Homo sapien
acatgtccagtcgtaagatcacaga

SEQ ID NO: 33951 - DNA, 25 bp, Homo sapien
aactgtatccgtcgacaagagtcca

SEQ ID NO: 33952 - DNA, 25 bp, Homo sapien
aactgtatccgtggacaagagtcca

SEQ ID NO: 33953 - DNA, 25 bp, Homo sapien
acgaaccggttaaggggcccatcgt

SEQ ID NO: 33954 - DNA, 25 bp, Homo sapien
acgaaccggttatggggcccatcgt

SEQ ID NO: 33955 - DNA, 25 bp, Homo sapien
tagaacagtttagtttgagttctcc

SEQ ID NO: 33956 - DNA, 25 bp, Homo sapien
tagaacagtttactttgagttctcc

SEQ ID NO: 33957 - DNA, 25 bp, Homo sapien
aaataatgttgtacttgggtcctcc

SEQ ID NO: 33958 - DNA, 25 bp, Homo sapien
aaataatgttgttcttgggtcctcc

SEQ ID NO: 33959 - DNA, 25 bp, Homo sapien
aacagtatggcgtgtccgccggacg

SEQ ID NO: 33960 - DNA, 25 bp, Homo sapien
aacagtatggcgagtccgccggacg

SEQ ID NO: 33961 - DNA, 25 bp, Homo sapien
cgtgtgtgagtatgtgacccgtgac

SEQ ID NO: 33962 - DNA, 25 bp, Homo sapien
cgtgtgtgagtaagtgacccgtgac

SEQ ID NO: 33963 - DNA, 25 bp, Homo sapien
acgagtttcgtctggttgtagtaac

SEQ ID NO: 33964 - DNA, 25 bp, Homo sapien
acgagtttcgtcaggttgtagtaac

SEQ ID NO: 33965 - DNA, 25 bp, Homo sapien
acacgtagaatccttgggtttagaa

SEQ ID NO: 33966 - DNA, 25 bp, Homo sapien
acacgtagaatcgttgggtttagaa

SEQ ID NO: 33967 - DNA, 25 bp, Homo sapien
aactcgtaggtcttttctgtttaaa

SEQ ID NO: 33968 - DNA, 25 bp, Homo sapien
aactcgtaggtcatttctgtttaaa

SEQ ID NO: 33969 - DNA, 25 bp, Homo sapien
ttaaggtcgagattttacggtcaac

SEQ ID NO: 33970 - DNA, 25 bp, Homo sapien
ttaaggtcgagaatttacggtcaac

SEQ ID NO: 33971 - DNA, 25 bp, Homo sapien
agtccaggagacactggcactcgga

SEQ ID NO: 33972 - DNA, 25 bp, Homo sapien
agtccaggagactctggcactcgga

SEQ ID NO: 33973 - DNA, 25 bp, Homo sapien
gtttaagagaccttggtctcgagga

SEQ ID NO: 33974 - DNA, 25 bp, Homo sapien
gtttaagagaccatggtctcgagga

SEQ ID NO: 33975 - DNA, 25 bp, Homo sapien
tagttttcggaagttgtctctacaa

SEQ ID NO: 33976 - DNA, 25 bp, Homo sapien
tagttttcggaacttgtctctacaa

SEQ ID NO: 33977 - DNA, 25 bp, Homo sapien
tagtccaggggacattacacgaacc

SEQ ID NO: 33978 - DNA, 25 bp, Homo sapien
tagtccaggggagattacacgaacc

SEQ ID NO: 33979 - DNA, 25 bp, Homo sapien
tcaaagaggtacacgaacgaagaac

SEQ ID NO: 33980 - DNA, 25 bp, Homo sapien
tcaaagaggtactcgaacgaagaac

SEQ ID NO: 33981 - DNA, 25 bp, Homo sapien
tagacactggtcgacacaagtagaa

SEQ ID NO: 33982 - DNA, 25 bp, Homo sapien
tagacactggtccacacaagtagaa

SEQ ID NO: 33983 - DNA, 25 bp, Homo sapien
agagacgtcgtcacagacaggcaag

SEQ ID NO: 33984 - DNA, 25 bp, Homo sapien
agagacgtcgtctcagacaggcaag

SEQ ID NO: 33985 - DNA, 25 bp, Homo sapien
gagatcgacggtaaacgtgtgacaa

SEQ ID NO: 33986 - DNA, 25 bp, Homo sapien
gagatcgacggttaacgtgtgacaa

SEQ ID NO: 33987 - DNA, 25 bp, Homo sapien
tggggacaccagtccggtgacacga

SEQ ID NO: 33988 - DNA, 25 bp, Homo sapien
tggggacaccagaccggtgacacga

SEQ ID NO: 33989 - DNA, 25 bp, Homo sapien
agattacacagacaggtcgtcgaca

SEQ ID NO: 33990 - DNA, 25 bp, Homo sapien
agattacacagagaggtcgtcgaca

SEQ ID NO: 33991 - DNA, 25 bp, Homo sapien
gactcacaacactcggttcgagact

SEQ ID NO: 33992 - DNA, 25 bp, Homo sapien
gactcacaacacacggttcgagact

SEQ ID NO: 33993 - DNA, 25 bp, Homo sapien
atgactacaccatcgagagggtttt

SEQ ID NO: 33994 - DNA, 25 bp, Homo sapien
atgactacaccaacgagagggtttt

SEQ ID NO: 33995 - DNA, 25 bp, Homo sapien
tacacagtcgaggaggagaactcat

SEQ ID NO: 33996 - DNA, 25 bp, Homo sapien
tacacagtcgagcaggagaactcat

SEQ ID NO: 33997 - DNA, 25 bp, Homo sapien
ggacctcacgcatcagatctacgac

SEQ ID NO: 33998 - DNA, 25 bp, Homo sapien
ggacctcacgcaacagatctacgac

SEQ ID NO: 33999 - DNA, 25 bp, Homo sapien
gtaacgtaccgtgtctacgacaccc

SEQ ID NO: 34000 - DNA, 25 bp, Homo sapien
gtaacgtaccgtctctacgacaccc

SEQ ID NO: 34001 - DNA, 25 bp, Homo sapien
gcgttctctgacaaccgacgagaca

SEQ ID NO: 34002 - DNA, 25 bp, Homo sapien
gcgttctctgactaccgacgagaca

SEQ ID NO: 34003 - DNA, 25 bp, Homo sapien
tgttctctagtttacaccagtctag

SEQ ID NO: 34004 - DNA, 25 bp, Homo sapien
tgttctctagttaacaccagtctag

SEQ ID NO: 34005 - DNA, 25 bp, Homo sapien
aggggtgacccttcttacagaggta

SEQ ID NO: 34006 - DNA, 25 bp, Homo sapien
aggggtgaccctacttacagaggta

SEQ ID NO: 34007 - DNA, 25 bp, Homo sapien
gtaggggtaaaggaagcacgaccca

SEQ ID NO: 34008 - DNA, 25 bp, Homo sapien
gtaggggtaaagcaagcacgaccca

SEQ ID NO: 34009 - DNA, 25 bp, Homo sapien
tcaggtcaaagcagatcacacccag

SEQ ID NO: 34010 - DNA, 25 bp, Homo sapien
tcaggtcaaagctgatcacacccag

SEQ ID NO: 34011 - DNA, 25 bp, Homo sapien
tacgggtttggaaatcgagctacca

SEQ ID NO: 34012 - DNA, 25 bp, Homo sapien
tacgggtttggatatcgagctacca

SEQ ID NO: 34013 - DNA, 25 bp, Homo sapien
aaggtaagggatttcaacgtacaac

SEQ ID NO: 34014 - DNA, 25 bp, Homo sapien
aaggtaagggatatcaacgtacaac

SEQ ID NO: 34015 - DNA, 25 bp, Homo sapien
aactctgaggtcacttgaaacgtaa

SEQ ID NO: 34016 - DNA, 25 bp, Homo sapien
aactctgaggtctcttgaaacgtaa

SEQ ID NO: 34017 - DNA, 25 bp, Homo sapien
gggtcctttggtccattacatgtaa

SEQ ID NO: 34018 - DNA, 25 bp, Homo sapien
gggtcctttggtgcattacatgtaa

SEQ ID NO: 34019 - DNA, 25 bp, Homo sapien
tccttttcggatcagttaagtctac

SEQ ID NO: 34020 - DNA, 25 bp, Homo sapien
tccttttcggatgagttaagtctac

SEQ ID NO: 34021 - DNA, 25 bp, Homo sapien
ttcgattcgttggaaagtgtctttc

SEQ ID NO: 34022 - DNA, 25 bp, Homo sapien
ttcgattcgttgcaaagtgtctttc

SEQ ID NO: 34023 - DNA, 25 bp, Homo sapien
gggcgtgtcgtccaaatgtaccttg

SEQ ID NO: 34024 - DNA, 25 bp, Homo sapien
gggcgtgtcgtcgaaatgtaccttg

SEQ ID NO: 34025 - DNA, 25 bp, Homo sapien
aaggtgtagtcagatcaaaacttct

SEQ ID NO: 34026 - DNA, 25 bp, Homo sapien
aaggtgtagtcacatcaaaacttct

SEQ ID NO: 34027 - DNA, 25 bp, Homo sapien
acggagacggcgtcacctcacttcg

SEQ ID NO: 34028 - DNA, 25 bp, Homo sapien
acggagacggcgacacctcacttcg

SEQ ID NO: 34029 - DNA, 25 bp, Homo sapien
agacgtgtcgatcacgtctcttaag

SEQ ID NO: 34030 - DNA, 25 bp, Homo sapien
agacgtgtcgatgacgtctcttaag

SEQ ID NO: 34031 - DNA, 25 bp, Homo sapien
gagttgaaggtctttataccaacgg

SEQ ID NO: 34032 - DNA, 25 bp, Homo sapien
gagttgaaggtcattataccaacgg

SEQ ID NO: 34033 - DNA, 25 bp, Homo sapien
catatgaaatggttaacgacttctt

SEQ ID NO: 34034 - DNA, 25 bp, Homo sapien
catatgaaatggataacgacttctt

SEQ ID NO: 34035 - DNA, 25 bp, Homo sapien
gaggtaaaacgtcttacgattctgt

SEQ ID NO: 34036 - DNA, 25 bp, Homo sapien
gaggtaaaacgtgttacgattctgt

SEQ ID NO: 34037 - DNA, 25 bp, Homo sapien
aggatctaacgaatgttacttcgat

SEQ ID NO: 34038 - DNA, 25 bp, Homo sapien
aggatctaacgattgttacttcgat

SEQ ID NO: 34039 - DNA, 25 bp, Homo sapien
tccgggtccgggtcctgtgtcccaa

SEQ ID NO: 34040 - DNA, 25 bp, Homo sapien
tccgggtccgggacctgtgtcccaa

SEQ ID NO: 34041 - DNA, 25 bp, Homo sapien
tcgaccccactggtcgtaaccttag

SEQ ID NO: 34042 - DNA, 25 bp, Homo sapien
tcgaccccactgctcgtaaccttag

SEQ ID NO: 34043 - DNA, 25 bp, Homo sapien
tctacggaccgacctagacctcggt

SEQ ID NO: 34044 - DNA, 25 bp, Homo sapien
tctacggaccgagctagacctcggt

SEQ ID NO: 34045 - DNA, 25 bp, Homo sapien
tcacgtcactaatctgagacgtcag

SEQ ID NO: 34046 - DNA, 25 bp, Homo sapien
tcacgtcactaaactgagacgtcag

SEQ ID NO: 34047 - DNA, 25 bp, Homo sapien
aaggagtcctctacgggtaagtttt

SEQ ID NO: 34048 - DNA, 25 bp, Homo sapien
aaggagtcctcttcgggtaagtttt

SEQ ID NO: 34049 - DNA, 25 bp, Homo sapien
caatctgtctcttctctttttattt

SEQ ID NO: 34050 - DNA, 25 bp, Homo sapien
caatctgtctctactctttttattt

SEQ ID NO: 34051 - DNA, 25 bp, Homo sapien
cacacatctttgacttttaaatgtt

SEQ ID NO: 34052 - DNA, 25 bp, Homo sapien
cacacatctttgtcttttaaatgtt

SEQ ID NO: 34053 - DNA, 25 bp, Homo sapien
ttcgattaccactttcatgtagtgg

SEQ ID NO: 34054 - DNA, 25 bp, Homo sapien
ttcgattaccacattcatgtagtgg

SEQ ID NO: 34055 - DNA, 25 bp, Homo sapien
cgttggttaggtccttgatctaaag

SEQ ID NO: 34056 - DNA, 25 bp, Homo sapien
cgttggttaggtgcttgatctaaag

SEQ ID NO: 34057 - DNA, 25 bp, Homo sapien
accgacttattgtaggatttcttca

SEQ ID NO: 34058 - DNA, 25 bp, Homo sapien
accgacttattgaaggatttcttca

SEQ ID NO: 34059 - DNA, 25 bp, Homo sapien
agtttgtgtccgttcttgttactgg

SEQ ID NO: 34060 - DNA, 25 bp, Homo sapien
agtttgtgtccgatcttgttactgg

SEQ ID NO: 34061 - DNA, 25 bp, Homo sapien
tgaagttgatgtacattacccataa

SEQ ID NO: 34062 - DNA, 25 bp, Homo sapien
tgaagttgatgttcattacccataa

SEQ ID NO: 34063 - DNA, 25 bp, Homo sapien
atttacggtccgtctacgtacccaa

SEQ ID NO: 34064 - DNA, 25 bp, Homo sapien
atttacggtccgactacgtacccaa

SEQ ID NO: 34065 - DNA, 25 bp, Homo sapien
ttagtttcgtttgagactgccctta

SEQ ID NO: 34066 - DNA, 25 bp, Homo sapien
ttagtttcgtttcagactgccctta

SEQ ID NO: 34067 - DNA, 25 bp, Homo sapien
atcagttcttattaattaaacataa

SEQ ID NO: 34068 - DNA, 25 bp, Homo sapien
atcagttcttataaattaaacataa

SEQ ID NO: 34069 - DNA, 25 bp, Homo sapien
actgttttctaaagggaatctacca

SEQ ID NO: 34070 - DNA, 25 bp, Homo sapien
actgttttctaatgggaatctacca

SEQ ID NO: 34071 - DNA, 25 bp, Homo sapien
ctttgtcggcaagtgggttgtaaac

SEQ ID NO: 34072 - DNA, 25 bp, Homo sapien
ctttgtcggcaactgggttgtaaac

SEQ ID NO: 34073 - DNA, 25 bp, Homo sapien
gagggtctaaacctcagtcttgtga

SEQ ID NO: 34074 - DNA, 25 bp, Homo sapien
gagggtctaaacgtcagtcttgtga

SEQ ID NO: 34075 - DNA, 25 bp, Homo sapien
ccggtagacaattgaggacatcaga

SEQ ID NO: 34076 - DNA, 25 bp, Homo sapien
ccggtagacaatagaggacatcaga

SEQ ID NO: 34077 - DNA, 25 bp, Homo sapien
tacgagaactgagtacaactcacgg

SEQ ID NO: 34078 - DNA, 25 bp, Homo sapien
tacgagaactgactacaactcacgg

SEQ ID NO: 34079 - DNA, 25 bp, Homo sapien
ctactttgtactgttcacttgcgta

SEQ ID NO: 34080 - DNA, 25 bp, Homo sapien
ctactttgtactcttcacttgcgta

SEQ ID NO: 34081 - DNA, 25 bp, Homo sapien
catttccgtgcgggtgacacgggtg

SEQ ID NO: 34082 - DNA, 25 bp, Homo sapien
catttccgtgcgcgtgacacgggtg

SEQ ID NO: 34083 - DNA, 25 bp, Homo sapien
cttttgttaaaggtagaccggaccg

SEQ ID NO: 34084 - DNA, 25 bp, Homo sapien
cttttgttaaagctagaccggaccg

SEQ ID NO: 34085 - DNA, 25 bp, Homo sapien
atctgtttgctctggtctctgactg

SEQ ID NO: 34086 - DNA, 25 bp, Homo sapien
atctgtttgctcaggtctctgactg

SEQ ID NO: 34087 - DNA, 25 bp, Homo sapien
cgacttctgagtgttgtcggtgtct

SEQ ID NO: 34088 - DNA, 25 bp, Homo sapien
cgacttctgagtcttgtcggtgtct

SEQ ID NO: 34089 - DNA, 25 bp, Homo sapien
aacattcgttctactgtgacgggtt

SEQ ID NO: 34090 - DNA, 25 bp, Homo sapien
aacattcgttcttctgtgacgggtt

SEQ ID NO: 34091 - DNA, 25 bp, Homo sapien
accgtatccggtgtcgataaatgtg

SEQ ID NO: 34092 - DNA, 25 bp, Homo sapien
accgtatccggtctcgataaatgtg

SEQ ID NO: 34093 - DNA, 25 bp, Homo sapien
atcttgacgtgtctagacacaaagg

SEQ ID NO: 34094 - DNA, 25 bp, Homo sapien
atcttgacgtgtgtagacacaaagg

SEQ ID NO: 34095 - DNA, 25 bp, Homo sapien
ctccgtacgttctcgctcttaggtt

SEQ ID NO: 34096 - DNA, 25 bp, Homo sapien
ctccgtacgttcacgctcttaggtt

SEQ ID NO: 34097 - DNA, 25 bp, Homo sapien
cttgacttttaccatacagacgtgt

SEQ ID NO: 34098 - DNA, 25 bp, Homo sapien
cttgacttttacgatacagacgtgt

SEQ ID NO: 34099 - DNA, 25 bp, Homo sapien
tttaatgccgtgaccgtcaccaccg

SEQ ID NO: 34100 - DNA, 25 bp, Homo sapien
tttaatgccgtgtccgtcaccaccg

SEQ ID NO: 34101 - DNA, 25 bp, Homo sapien
ctgccgtttcaggaccagtaaacgg

SEQ ID NO: 34102 - DNA, 25 bp, Homo sapien
ctgccgtttcagcaccagtaaacgg

SEQ ID NO: 34103 - DNA, 25 bp, Homo sapien
ggggagtctctgagtcagtcgccct

SEQ ID NO: 34104 - DNA, 25 bp, Homo sapien
ggggagtctctgtgtcagtcgccct

SEQ ID NO: 34105 - DNA, 25 bp, Homo sapien
taacttgacatgatcaatgacgtca

SEQ ID NO: 34106 - DNA, 25 bp, Homo sapien
taacttgacatgttcaatgacgtca

SEQ ID NO: 34107 - DNA, 25 bp, Homo sapien
agttcatgtacgttccgagttatca

SEQ ID NO: 34108 - DNA, 25 bp, Homo sapien
agttcatgtacgatccgagttatca

SEQ ID NO: 34109 - DNA, 25 bp, Homo sapien
ttatcgtaacgttcggggaaacaga

SEQ ID NO: 34110 - DNA, 25 bp, Homo sapien
ttatcgtaacgtacggggaaacaga

SEQ ID NO: 34111 - DNA, 25 bp, Homo sapien
tttgtttcagacttcgacagtaata

SEQ ID NO: 34112 - DNA, 25 bp, Homo sapien
tttgtttcagacatcgacagtaata

SEQ ID NO: 34113 - DNA, 25 bp, Homo sapien
ttctttgtagacctaggactgatag

SEQ ID NO: 34114 - DNA, 25 bp, Homo sapien
ttctttgtagacgtaggactgatag

SEQ ID NO: 34115 - DNA, 25 bp, Homo sapien
ttcgtattgtacgtactattgatcg

SEQ ID NO: 34116 - DNA, 25 bp, Homo sapien
ttcgtattgtacctactattgatcg

SEQ ID NO: 34117 - DNA, 25 bp, Homo sapien
atttacttaagttttaccggttctg

SEQ ID NO: 34118 - DNA, 25 bp, Homo sapien
atttacttaagtattaccggttctg

SEQ ID NO: 34119 - DNA, 25 bp, Homo sapien
aaacgtcaaagtacctctcggataa

SEQ ID NO: 34120 - DNA, 25 bp, Homo sapien
aaacgtcaaagttcctctcggataa

SEQ ID NO: 34121 - DNA, 25 bp, Homo sapien
caggtacaggagagacctggagtca

SEQ ID NO: 34122 - DNA, 25 bp, Homo sapien
caggtacaggagtgacctggagtca

SEQ ID NO: 34123 - DNA, 25 bp, Homo sapien
tcaggacaggtgtgtccatcgagga

SEQ ID NO: 34124 - DNA, 25 bp, Homo sapien
tcaggacaggtgagtccatcgagga

SEQ ID NO: 34125 - DNA, 25 bp, Homo sapien
cgttacacagtcattccatatcctt

SEQ ID NO: 34126 - DNA, 25 bp, Homo sapien
cgttacacagtctttccatatcctt

SEQ ID NO: 34127 - DNA, 25 bp, Homo sapien
ggtgttataacttttaagttcccta

SEQ ID NO: 34128 - DNA, 25 bp, Homo sapien
ggtgttataactattaagttcccta

SEQ ID NO: 34129 - DNA, 25 bp, Homo sapien
ggaagggaatcgtctcaagtcccag

SEQ ID NO: 34130 - DNA, 25 bp, Homo sapien
ggaagggaatcgactcaagtcccag

SEQ ID NO: 34131 - DNA, 25 bp, Homo sapien
gaaggaccaccgagagagagttcca

SEQ ID NO: 34132 - DNA, 25 bp, Homo sapien
gaaggaccaccgtgagagagttcca

SEQ ID NO: 34133 - DNA, 25 bp, Homo sapien
gaagaaaatcaggtgctgtcttagc

SEQ ID NO: 34134 - DNA, 25 bp, Homo sapien
gaagaaaatcagctgctgtcttagc

SEQ ID NO: 34135 - DNA, 25 bp, Homo sapien
ctgaatacactgtctttagacgagt

SEQ ID NO: 34136 - DNA, 25 bp, Homo sapien
ctgaatacactgactttagacgagt

SEQ ID NO: 34137 - DNA, 25 bp, Homo sapien
gggggtaccacttctgtatataagg

SEQ ID NO: 34138 - DNA, 25 bp, Homo sapien
gggggtaccactactgtatataagg

SEQ ID NO: 34139 - DNA, 25 bp, Homo sapien
aaaggggtacctttacccacttaga

SEQ ID NO: 34140 - DNA, 25 bp, Homo sapien
aaaggggtacctatacccacttaga

SEQ ID NO: 34141 - DNA, 25 bp, Homo sapien
tcgtcgcggggactgtgcccctaca

SEQ ID NO: 34142 - DNA, 25 bp, Homo sapien
tcgtcgcggggagtgtgcccctaca

SEQ ID NO: 34143 - DNA, 25 bp, Homo sapien
cttcaagtgatggtaaacagttctt

SEQ ID NO: 34144 - DNA, 25 bp, Homo sapien
cttcaagtgatgctaaacagttctt

SEQ ID NO: 34145 - DNA, 25 bp, Homo sapien
gtcaccagggcgtgttagacttcat

SEQ ID NO: 34146 - DNA, 25 bp, Homo sapien
gtcaccagggcgagttagacttcat

SEQ ID NO: 34147 - DNA, 25 bp, Homo sapien
gaagacaggggcagtgacgtcttca

SEQ ID NO: 34148 - DNA, 25 bp, Homo sapien
gaagacaggggctgtgacgtcttca

SEQ ID NO: 34149 - DNA, 25 bp, Homo sapien
gagaaacaagggtctgaggtcccgt

SEQ ID NO: 34150 - DNA, 25 bp, Homo sapien
gagaaacaagggactgaggtcccgt

SEQ ID NO: 34151 - DNA, 25 bp, Homo sapien
taccacaaagggacacgcctgtccg

SEQ ID NO: 34152 - DNA, 25 bp, Homo sapien
taccacaaagggtcacgcctgtccg

SEQ ID NO: 34153 - DNA, 25 bp, Homo sapien
tctgtgataaggtttcagacccggg

SEQ ID NO: 34154 - DNA, 25 bp, Homo sapien
tctgtgataaggattcagacccggg

SEQ ID NO: 34155 - DNA, 25 bp, Homo sapien
cggataggtgactattagtaccggg

SEQ ID NO: 34156 - DNA, 25 bp, Homo sapien
cggataggtgacaattagtaccggg

SEQ ID NO: 34157 - DNA, 25 bp, Homo sapien
tggaacagcggctgacagttgtttc

SEQ ID NO: 34158 - DNA, 25 bp, Homo sapien
tggaacagcggcagacagttgtttc

SEQ ID NO: 34159 - DNA, 25 bp, Homo sapien
actggagaactgtgaacaggtcttg

SEQ ID NO: 34160 - DNA, 25 bp, Homo sapien
actggagaactgagaacaggtcttg

SEQ ID NO: 34161 - DNA, 25 bp, Homo sapien
agaccggaaggaccaagaagtacca

SEQ ID NO: 34162 - DNA, 25 bp, Homo sapien
agaccggaaggagcaagaagtacca

SEQ ID NO: 34163 - DNA, 25 bp, Homo sapien
gtcccgccagggtccgtcaggacaa

SEQ ID NO: 34164 - DNA, 25 bp, Homo sapien
gtcccgccagggaccgtcaggacaa

SEQ ID NO: 34165 - DNA, 25 bp, Homo sapien
accccgtgatatgttggtacgacta

SEQ ID NO: 34166 - DNA, 25 bp, Homo sapien
accccgtgatatcttggtacgacta

SEQ ID NO: 34167 - DNA, 25 bp, Homo sapien
aaccccacgaacacacaggtgcggt

SEQ ID NO: 34168 - DNA, 25 bp, Homo sapien
aaccccacgaactcacaggtgcggt

SEQ ID NO: 34169 - DNA, 25 bp, Homo sapien
cgacgtcccacacgaagggtcggtt

SEQ ID NO: 34170 - DNA, 25 bp, Homo sapien
cgacgtcccacaggaagggtcggtt

SEQ ID NO: 34171 - DNA, 25 bp, Homo sapien
gaaccacaccttagcggtactgacg

SEQ ID NO: 34172 - DNA, 25 bp, Homo sapien
gaaccacacctttgcggtactgacg

SEQ ID NO: 34173 - DNA, 25 bp, Homo sapien
ctccgggcctccttgaagtaccggt

SEQ ID NO: 34174 - DNA, 25 bp, Homo sapien
ctccgggcctccatgaagtaccggt

SEQ ID NO: 34175 - DNA, 25 bp, Homo sapien
tcccggcatacaccacgagattgac

SEQ ID NO: 34176 - DNA, 25 bp, Homo sapien
tcccggcatacagcacgagattgac

SEQ ID NO: 34177 - DNA, 25 bp, Homo sapien
gacgacgaggtctacaaaatcaaca

SEQ ID NO: 34178 - DNA, 25 bp, Homo sapien
gacgacgaggtcaacaaaatcaaca

SEQ ID NO: 34179 - DNA, 25 bp, Homo sapien
gagaggcacctcatacccggagtcc

SEQ ID NO: 34180 - DNA, 25 bp, Homo sapien
gagaggcacctcttacccggagtcc

SEQ ID NO: 34181 - DNA, 25 bp, Homo sapien
aggacagtaatatttccaagagtcc

SEQ ID NO: 34182 - DNA, 25 bp, Homo sapien
aggacagtaataattccaagagtcc

SEQ ID NO: 34183 - DNA, 25 bp, Homo sapien
tgtctgaagcccttcttcgtggtcc

SEQ ID NO: 34184 - DNA, 25 bp, Homo sapien
tgtctgaagcccatcttcgtggtcc

SEQ ID NO: 34185 - DNA, 25 bp, Homo sapien
gttgaaaacccctttcgtggtaccg

SEQ ID NO: 34186 - DNA, 25 bp, Homo sapien
gttgaaaaccccattcgtggtaccg

SEQ ID NO: 34187 - DNA, 25 bp, Homo sapien
cgacagtctctcctacatctgaatg

SEQ ID NO: 34188 - DNA, 25 bp, Homo sapien
cgacagtctctcgtacatctgaatg

SEQ ID NO: 34189 - DNA, 25 bp, Homo sapien
accacttaggtctccttgtcgatgt

SEQ ID NO: 34190 - DNA, 25 bp, Homo sapien
accacttaggtcaccttgtcgatgt

SEQ ID NO: 34191 - DNA, 25 bp, Homo sapien
tgatcaggattctacataaaacagt

SEQ ID NO: 34192 - DNA, 25 bp, Homo sapien
tgatcaggattcaacataaaacagt

SEQ ID NO: 34193 - DNA, 25 bp, Homo sapien
gatatccatactacggatgacataa

SEQ ID NO: 34194 - DNA, 25 bp, Homo sapien
gatatccatacttcggatgacataa

SEQ ID NO: 34195 - DNA, 25 bp, Homo sapien
gggtaatgaaactcttttaccaact

SEQ ID NO: 34196 - DNA, 25 bp, Homo sapien
gggtaatgaaacacttttaccaact

SEQ ID NO: 34197 - DNA, 25 bp, Homo sapien
ggtttaaacgaaatacatgaaccca

SEQ ID NO: 34198 - DNA, 25 bp, Homo sapien
ggtttaaacgaattacatgaaccca

SEQ ID NO: 34199 - DNA, 25 bp, Homo sapien
accgactcttacgacctctacgagt

SEQ ID NO: 34200 - DNA, 25 bp, Homo sapien
accgactcttaccacctctacgagt

SEQ ID NO: 34201 - DNA, 25 bp, Homo sapien
cgtaaactgttacttcgtatagact

SEQ ID NO: 34202 - DNA, 25 bp, Homo sapien
cgtaaactgttagttcgtatagact

SEQ ID NO: 34203 - DNA, 25 bp, Homo sapien
gaaggaccgcggtcccagacgagac

SEQ ID NO: 34204 - DNA, 25 bp, Homo sapien
gaaggaccgcggacccagacgagac

SEQ ID NO: 34205 - DNA, 25 bp, Homo sapien
gtcatgcccgagaccttagtaggac

SEQ ID NO: 34206 - DNA, 25 bp, Homo sapien
gtcatgcccgagtccttagtaggac

SEQ ID NO: 34207 - DNA, 25 bp, Homo sapien
tagtcttccgactgtaccctggcga

SEQ ID NO: 34208 - DNA, 25 bp, Homo sapien
tagtcttccgacagtaccctggcga

SEQ ID NO: 34209 - DNA, 25 bp, Homo sapien
agaggtccacctgtccccggagacg

SEQ ID NO: 34210 - DNA, 25 bp, Homo sapien
agaggtccacctctccccggagacg

SEQ ID NO: 34211 - DNA, 25 bp, Homo sapien
gacactactccgggtccccaggtct

SEQ ID NO: 34212 - DNA, 25 bp, Homo sapien
gacactactccgcgtccccaggtct

SEQ ID NO: 34213 - DNA, 25 bp, Homo sapien
tcttccttccggtcggtcacaggac

SEQ ID NO: 34214 - DNA, 25 bp, Homo sapien
tcttccttccggacggtcacaggac

SEQ ID NO: 34215 - DNA, 25 bp, Homo sapien
ccccaacggacgaaactgacttgat

SEQ ID NO: 34216 - DNA, 25 bp, Homo sapien
ccccaacggacgtaactgacttgat

SEQ ID NO: 34217 - DNA, 25 bp, Homo sapien
gacgcccagcacctaagtgacctga

SEQ ID NO: 34218 - DNA, 25 bp, Homo sapien
gacgcccagcacgtaagtgacctga

SEQ ID NO: 34219 - DNA, 25 bp, Homo sapien
agtctccaccacgagagtcatttat

SEQ ID NO: 34220 - DNA, 25 bp, Homo sapien
agtctccaccaccagagtcatttat

SEQ ID NO: 34221 - DNA, 25 bp, Homo sapien
cgtccgcagcccagcggttctgacg

SEQ ID NO: 34222 - DNA, 25 bp, Homo sapien
cgtccgcagccctgcggttctgacg

SEQ ID NO: 34223 - DNA, 25 bp, Homo sapien
acgacctgtctcttactttatagta

SEQ ID NO: 34224 - DNA, 25 bp, Homo sapien
acgacctgtctcatactttatagta

SEQ ID NO: 34225 - DNA, 25 bp, Homo sapien
gtctcagtctcaaccgtgtactgtt

SEQ ID NO: 34226 - DNA, 25 bp, Homo sapien
gtctcagtctcatccgtgtactgtt

SEQ ID NO: 34227 - DNA, 25 bp, Homo sapien
aacgcgtactggttcaggtgctgtc

SEQ ID NO: 34228 - DNA, 25 bp, Homo sapien
aacgcgtactggatcaggtgctgtc

SEQ ID NO: 34229 - DNA, 25 bp, Homo sapien
tttaagacacggaaaaatctgtact

SEQ ID NO: 34230 - DNA, 25 bp, Homo sapien
tttaagacacggtaaaatctgtact

SEQ ID NO: 34231 - DNA, 25 bp, Homo sapien
ttcgaactcgagagaactttagact

SEQ ID NO: 34232 - DNA, 25 bp, Homo sapien
ttcgaactcgagtgaactttagact

SEQ ID NO: 34233 - DNA, 25 bp, Homo sapien
tcttctgtagaagactatcgtcgtg

SEQ ID NO: 34234 - DNA, 25 bp, Homo sapien
tcttctgtagaacactatcgtcgtg

SEQ ID NO: 34235 - DNA, 25 bp, Homo sapien
ctgttttgtaagtcatctttcgtac

SEQ ID NO: 34236 - DNA, 25 bp, Homo sapien
ctgttttgtaagacatctttcgtac

SEQ ID NO: 34237 - DNA, 25 bp, Homo sapien
ttttctaccttcatatgtgtctgag

SEQ ID NO: 34238 - DNA, 25 bp, Homo sapien
ttttctaccttcttatgtgtctgag

SEQ ID NO: 34239 - DNA, 25 bp, Homo sapien
acttctctatcctagttagtccgtg

SEQ ID NO: 34240 - DNA, 25 bp, Homo sapien
acttctctatccaagttagtccgtg

SEQ ID NO: 34241 - DNA, 25 bp, Homo sapien
aaaatagcgtcaaccaacttaggca

SEQ ID NO: 34242 - DNA, 25 bp, Homo sapien
aaaatagcgtcatccaacttaggca

SEQ ID NO: 34243 - DNA, 25 bp, Homo sapien
gttttgtaggtttggttccttccga

SEQ ID NO: 34244 - DNA, 25 bp, Homo sapien
gttttgtaggttaggttccttccga

SEQ ID NO: 34245 - DNA, 25 bp, Homo sapien
ttggaagggaccactccgtccgacc

SEQ ID NO: 34246 - DNA, 25 bp, Homo sapien
ttggaagggacctctccgtccgacc

SEQ ID NO: 34247 - DNA, 25 bp, Homo sapien
gtacctggacagaaaccgggcacgt

SEQ ID NO: 34248 - DNA, 25 bp, Homo sapien
gtacctggacagtaaccgggcacgt

SEQ ID NO: 34249 - DNA, 25 bp, Homo sapien
cgtcaggacgaccatcctcgggact

SEQ ID NO: 34250 - DNA, 25 bp, Homo sapien
cgtcaggacgacgatcctcgggact

SEQ ID NO: 34251 - DNA, 25 bp, Homo sapien
tatgtcttgggaccccttcttcgtc

SEQ ID NO: 34252 - DNA, 25 bp, Homo sapien
tatgtcttgggagcccttcttcgtc

SEQ ID NO: 34253 - DNA, 25 bp, Homo sapien
tgtttccccgcgtcggttcgtttcc

SEQ ID NO: 34254 - DNA, 25 bp, Homo sapien
tgtttccccgcgacggttcgtttcc

SEQ ID NO: 34255 - DNA, 25 bp, Homo sapien
tgtttcaacattaccgttgattgtt

SEQ ID NO: 34256 - DNA, 25 bp, Homo sapien
tgtttcaacatttccgttgattgtt

SEQ ID NO: 34257 - DNA, 25 bp, Homo sapien
cctatgactcattccccgggtttct

SEQ ID NO: 34258 - DNA, 25 bp, Homo sapien
cctatgactcataccccgggtttct

SEQ ID NO: 34259 - DNA, 25 bp, Homo sapien
tctcctgttcttcacgggacttgtg

SEQ ID NO: 34260 - DNA, 25 bp, Homo sapien
tctcctgttcttgacgggacttgtg

SEQ ID NO: 34261 - DNA, 25 bp, Homo sapien
ccaggactctacacgacggagttta

SEQ ID NO: 34262 - DNA, 25 bp, Homo sapien
ccaggactctactcgacggagttta

SEQ ID NO: 34263 - DNA, 25 bp, Homo sapien
cttactcaccaggtgacagagcaag

SEQ ID NO: 34264 - DNA, 25 bp, Homo sapien
cttactcaccagctgacagagcaag

SEQ ID NO: 34265 - DNA, 25 bp, Homo sapien
ttatgtcgactgtcagagagtccta

SEQ ID NO: 34266 - DNA, 25 bp, Homo sapien
ttatgtcgactgacagagagtccta

SEQ ID NO: 34267 - DNA, 25 bp, Homo sapien
aatgtggactactccgtggtccgag

SEQ ID NO: 34268 - DNA, 25 bp, Homo sapien
aatgtggactacaccgtggtccgag

SEQ ID NO: 34269 - DNA, 25 bp, Homo sapien
gccgtcaaacgacgcctaaatcggg

SEQ ID NO: 34270 - DNA, 25 bp, Homo sapien
gccgtcaaacgaggcctaaatcggg

SEQ ID NO: 34271 - DNA, 25 bp, Homo sapien
gtttgacgactggtgcggcttaggc

SEQ ID NO: 34272 - DNA, 25 bp, Homo sapien
gtttgacgactgctgcggcttaggc

SEQ ID NO: 34273 - DNA, 25 bp, Homo sapien
tctttttgtgtgtgtagacataacc

SEQ ID NO: 34274 - DNA, 25 bp, Homo sapien
tctttttgtgtgagtagacataacc

SEQ ID NO: 34275 - DNA, 25 bp, Homo sapien
tacgtttagggtagtgacatcgacc

SEQ ID NO: 34276 - DNA, 25 bp, Homo sapien
tacgtttagggttgtgacatcgacc

SEQ ID NO: 34277 - DNA, 25 bp, Homo sapien
gtctttcaggacacaactacaccgt

SEQ ID NO: 34278 - DNA, 25 bp, Homo sapien
gtctttcaggactcaactacaccgt

SEQ ID NO: 34279 - DNA, 25 bp, Homo sapien
gtcgttacaacaattcagtcaaccg

SEQ ID NO: 34280 - DNA, 25 bp, Homo sapien
gtcgttacaacatttcagtcaaccg

SEQ ID NO: 34281 - DNA, 25 bp, Homo sapien
tataaagatctacgactgtgtcgtc

SEQ ID NO: 34282 - DNA, 25 bp, Homo sapien
tataaagatctaggactgtgtcgtc

SEQ ID NO: 34283 - DNA, 25 bp, Homo sapien
cggaccgacataggtacgagttctc

SEQ ID NO: 34284 - DNA, 25 bp, Homo sapien
cggaccgacatacgtacgagttctc

SEQ ID NO: 34285 - DNA, 25 bp, Homo sapien
atgtattcgtattagtcaatacctg

SEQ ID NO: 34286 - DNA, 25 bp, Homo sapien
atgtattcgtataagtcaatacctg

SEQ ID NO: 34287 - DNA, 25 bp, Homo sapien
catttactctcttatgttagttcgg

SEQ ID NO: 34288 - DNA, 25 bp, Homo sapien
catttactctctaatgttagttcgg

SEQ ID NO: 34289 - DNA, 25 bp, Homo sapien
gtcttacttcgtttcgtgtacctta

SEQ ID NO: 34290 - DNA, 25 bp, Homo sapien
gtcttacttcgtatcgtgtacctta

SEQ ID NO: 34291 - DNA, 25 bp, Homo sapien
gacccctcggacgacgacggtgtcg

SEQ ID NO: 34292 - DNA, 25 bp, Homo sapien
gacccctcggaccacgacggtgtcg

SEQ ID NO: 34293 - DNA, 25 bp, Homo sapien
caggagtagtagtctcagccgtagc

SEQ ID NO: 34294 - DNA, 25 bp, Homo sapien
caggagtagtagactcagccgtagc

SEQ ID NO: 34295 - DNA, 25 bp, Homo sapien
tgacgtccgaaccagacgtcacgac

SEQ ID NO: 34296 - DNA, 25 bp, Homo sapien
tgacgtccgaacgagacgtcacgac

SEQ ID NO: 34297 - DNA, 25 bp, Homo sapien
tagagtcctacgacgtagttgacac

SEQ ID NO: 34298 - DNA, 25 bp, Homo sapien
tagagtcctacgtcgtagttgacac

SEQ ID NO: 34299 - DNA, 25 bp, Homo sapien
aacgacagtgtctagtagtgtccgt

SEQ ID NO: 34300 - DNA, 25 bp, Homo sapien
aacgacagtgtcaagtagtgtccgt

SEQ ID NO: 34301 - DNA, 25 bp, Homo sapien
tttaagtcgggtacacgtcgtgttc

SEQ ID NO: 34302 - DNA, 25 bp, Homo sapien
tttaagtcgggttcacgtcgtgttc

SEQ ID NO: 34303 - DNA, 25 bp, Homo sapien
gtttgagactttacgaggtaactcg

SEQ ID NO: 34304 - DNA, 25 bp, Homo sapien
gtttgagacttttcgaggtaactcg

SEQ ID NO: 34305 - DNA, 25 bp, Homo sapien
tgtagggtactattcccacgtctcc

SEQ ID NO: 34306 - DNA, 25 bp, Homo sapien
tgtagggtactaatcccacgtctcc

SEQ ID NO: 34307 - DNA, 25 bp, Homo sapien
ggtagggttatgttgctgctacgtc

SEQ ID NO: 34308 - DNA, 25 bp, Homo sapien
ggtagggttatgatgctgctacgtc

SEQ ID NO: 34309 - DNA, 25 bp, Homo sapien
cgggagcgttattagtgaccatcga

SEQ ID NO: 34310 - DNA, 25 bp, Homo sapien
cgggagcgttataagtgaccatcga

SEQ ID NO: 34311 - DNA, 25 bp, Homo sapien
gatcaagtagtaggactaaccgact

SEQ ID NO: 34312 - DNA, 25 bp, Homo sapien
gatcaagtagtacgactaaccgact

SEQ ID NO: 34313 - DNA, 25 bp, Homo sapien
gtataaaacagtacgtcgaatgact

SEQ ID NO: 34314 - DNA, 25 bp, Homo sapien
gtataaaacagttcgtcgaatgact

SEQ ID NO: 34315 - DNA, 25 bp, Homo sapien
tacgaaagacggtccgagtgtcgat

SEQ ID NO: 34316 - DNA, 25 bp, Homo sapien
tacgaaagacggaccgagtgtcgat

SEQ ID NO: 34317 - DNA, 25 bp, Homo sapien
ccgaagacggtcctgagtgtacact

SEQ ID NO: 34318 - DNA, 25 bp, Homo sapien
ccgaagacggtcgtgagtgtacact

SEQ ID NO: 34319 - DNA, 25 bp, Homo sapien
tgtccgagtcacgagggtgttcgta

SEQ ID NO: 34320 - DNA, 25 bp, Homo sapien
tgtccgagtcaccagggtgttcgta

SEQ ID NO: 34321 - DNA, 25 bp, Homo sapien
acaataaggtaaccgttttagcata

SEQ ID NO: 34322 - DNA, 25 bp, Homo sapien
acaataaggtaagcgttttagcata

SEQ ID NO: 34323 - DNA, 25 bp, Homo sapien
cacagaaggacaacgtttaccttta

SEQ ID NO: 34324 - DNA, 25 bp, Homo sapien
cacagaaggacatcgtttaccttta

SEQ ID NO: 34325 - DNA, 25 bp, Homo sapien
ttaaaggtacgtacttccctccgtc

SEQ ID NO: 34326 - DNA, 25 bp, Homo sapien
ttaaaggtacgttcttccctccgtc

SEQ ID NO: 34327 - DNA, 25 bp, Homo sapien
aagtctttcctctcggtcctcttga

SEQ ID NO: 34328 - DNA, 25 bp, Homo sapien
aagtctttcctcacggtcctcttga

SEQ ID NO: 34329 - DNA, 25 bp, Homo sapien
gacatctccggaggtccgtcgtgaa

SEQ ID NO: 34330 - DNA, 25 bp, Homo sapien
gacatctccggacgtccgtcgtgaa

SEQ ID NO: 34331 - DNA, 25 bp, Homo sapien
cgacgttcacttcctaccgtcggaa

SEQ ID NO: 34332 - DNA, 25 bp, Homo sapien
cgacgttcacttgctaccgtcggaa

SEQ ID NO: 34333 - DNA, 25 bp, Homo sapien
actttgtcgtccttttctcgggaaa

SEQ ID NO: 34334 - DNA, 25 bp, Homo sapien
actttgtcgtccatttctcgggaaa

SEQ ID NO: 34335 - DNA, 25 bp, Homo sapien
gatccgtgtccatttggtgagtaaa

SEQ ID NO: 34336 - DNA, 25 bp, Homo sapien
gatccgtgtccaattggtgagtaaa

SEQ ID NO: 34337 - DNA, 25 bp, Homo sapien
cggtgtcaacttctatacgtatagg

SEQ ID NO: 34338 - DNA, 25 bp, Homo sapien
cggtgtcaacttgtatacgtatagg

SEQ ID NO: 34339 - DNA, 25 bp, Homo sapien
tcgtcgtgacatttttcgtgtaaag

SEQ ID NO: 34340 - DNA, 25 bp, Homo sapien
tcgtcgtgacatatttcgtgtaaag

SEQ ID NO: 34341 - DNA, 25 bp, Homo sapien
tacctgtctgtgattgtgtccgagg

SEQ ID NO: 34342 - DNA, 25 bp, Homo sapien
tacctgtctgtgtttgtgtccgagg

SEQ ID NO: 34343 - DNA, 25 bp, Homo sapien
cccgacggtagcacgtcgtctctga

SEQ ID NO: 34344 - DNA, 25 bp, Homo sapien
cccgacggtagctcgtcgtctctga

SEQ ID NO: 34345 - DNA, 25 bp, Homo sapien
gtttccatcgttttctgcttcgtcc

SEQ ID NO: 34346 - DNA, 25 bp, Homo sapien
gtttccatcgttatctgcttcgtcc

SEQ ID NO: 34347 - DNA, 25 bp, Homo sapien
tttactttcggtgtcttcggtgtgg

SEQ ID NO: 34348 - DNA, 25 bp, Homo sapien
tttactttcggtctcttcggtgtgg

SEQ ID NO: 34349 - DNA, 25 bp, Homo sapien
gacgtgtgtaggaaccctggtgtca

SEQ ID NO: 34350 - DNA, 25 bp, Homo sapien
gacgtgtgtaggtaccctggtgtca

SEQ ID NO: 34351 - DNA, 25 bp, Homo sapien
gagactcggtggtccgttggttctc

SEQ ID NO: 34352 - DNA, 25 bp, Homo sapien
gagactcggtggaccgttggttctc

SEQ ID NO: 34353 - DNA, 25 bp, Homo sapien
cacccggtactgtcggggtctccgg

SEQ ID NO: 34354 - DNA, 25 bp, Homo sapien
cacccggtactgacggggtctccgg

SEQ ID NO: 34355 - DNA, 25 bp, Homo sapien
tcagtagatgtcgtcgggtctccgg

SEQ ID NO: 34356 - DNA, 25 bp, Homo sapien
tcagtagatgtcctcgggtctccgg

SEQ ID NO: 34357 - DNA, 25 bp, Homo sapien
ttcggtacgcggtgctagtctcccc

SEQ ID NO: 34358 - DNA, 25 bp, Homo sapien
ttcggtacgcggagctagtctcccc

SEQ ID NO: 34359 - DNA, 25 bp, Homo sapien
tggctcgagactttcactgtcacaa

SEQ ID NO: 34360 - DNA, 25 bp, Homo sapien
tggctcgagactatcactgtcacaa

SEQ ID NO: 34361 - DNA, 25 bp, Homo sapien
ggaggatagtcatcactatctataa

SEQ ID NO: 34362 - DNA, 25 bp, Homo sapien
ggaggatagtcaacactatctataa

SEQ ID NO: 34363 - DNA, 25 bp, Homo sapien
ggtatgtaaaatacattactctata

SEQ ID NO: 34364 - DNA, 25 bp, Homo sapien
ggtatgtaaaattcattactctata

SEQ ID NO: 34365 - DNA, 25 bp, Homo sapien
ggtaaattacagctccgagataaag

SEQ ID NO: 34366 - DNA, 25 bp, Homo sapien
ggtaaattacaggtccgagataaag

SEQ ID NO: 34367 - DNA, 25 bp, Homo sapien
aggaagtaacaccacagagacgaag

SEQ ID NO: 34368 - DNA, 25 bp, Homo sapien
aggaagtaacacgacagagacgaag

SEQ ID NO: 34369 - DNA, 25 bp, Homo sapien
taccaaacgaaacctgacatgaagg

SEQ ID NO: 34370 - DNA, 25 bp, Homo sapien
taccaaacgaaagctgacatgaagg

SEQ ID NO: 34371 - DNA, 25 bp, Homo sapien
gacgacgtcgacgacagtgagtgta

SEQ ID NO: 34372 - DNA, 25 bp, Homo sapien
gacgacgtcgaccacagtgagtgta

SEQ ID NO: 34373 - DNA, 25 bp, Homo sapien
agtacgaccgtttagtactcccgtc

SEQ ID NO: 34374 - DNA, 25 bp, Homo sapien
agtacgaccgttaagtactcccgtc

SEQ ID NO: 34375 - DNA, 25 bp, Homo sapien
aacgtacgtctgtatagttccctac

SEQ ID NO: 34376 - DNA, 25 bp, Homo sapien
aacgtacgtctgaatagttccctac

SEQ ID NO: 34377 - DNA, 25 bp, Homo sapien
aaagtcgtacgaagtctcttctctg

SEQ ID NO: 34378 - DNA, 25 bp, Homo sapien
aaagtcgtacgatgtctcttctctg

SEQ ID NO: 34379 - DNA, 25 bp, Homo sapien
agtgtgtctacttagagtcatctcc

SEQ ID NO: 34380 - DNA, 25 bp, Homo sapien
agtgtgtctactaagagtcatctcc

SEQ ID NO: 34381 - DNA, 25 bp, Homo sapien
cgtagtagttatgtcttagactccc

SEQ ID NO: 34382 - DNA, 25 bp, Homo sapien
cgtagtagttatctcttagactccc

SEQ ID NO: 34383 - DNA, 25 bp, Homo sapien
gtaataagtcgaatcggacataccg

SEQ ID NO: 34384 - DNA, 25 bp, Homo sapien
gtaataagtcgattcggacataccg

SEQ ID NO: 34385 - DNA, 25 bp, Homo sapien
accctagattgatgtgagacacttg

SEQ ID NO: 34386 - DNA, 25 bp, Homo sapien
accctagattgaagtgagacacttg

SEQ ID NO: 34387 - DNA, 25 bp, Homo sapien
ccgaatctcgtacgtaccagagatg

SEQ ID NO: 34388 - DNA, 25 bp, Homo sapien
ccgaatctcgtaggtaccagagatg

SEQ ID NO: 34389 - DNA, 25 bp, Homo sapien
aataaaactaaggataccgacctgt

SEQ ID NO: 34390 - DNA, 25 bp, Homo sapien
aataaaactaagcataccgacctgt

SEQ ID NO: 34391 - DNA, 25 bp, Homo sapien
cttaggaaaaggtgacaacacgtgt

SEQ ID NO: 34392 - DNA, 25 bp, Homo sapien
cttaggaaaaggagacaacacgtgt

SEQ ID NO: 34393 - DNA, 25 bp, Homo sapien
tgggaagtacggacgtaatactgtc

SEQ ID NO: 34394 - DNA, 25 bp, Homo sapien
tgggaagtacggtcgtaatactgtc

SEQ ID NO: 34395 - DNA, 25 bp, Homo sapien
agtcggcacgactgttctccctatc

SEQ ID NO: 34396 - DNA, 25 bp, Homo sapien
agtcggcacgacagttctccctatc

SEQ ID NO: 34397 - DNA, 25 bp, Homo sapien
cgcaaggtctacgttctcccggtct

SEQ ID NO: 34398 - DNA, 25 bp, Homo sapien
cgcaaggtctaccttctcccggtct

SEQ ID NO: 34399 - DNA, 25 bp, Homo sapien
gaacaggagcctctcctctagtcgt

SEQ ID NO: 34400 - DNA, 25 bp, Homo sapien
gaacaggagcctgtcctctagtcgt

SEQ ID NO: 34401 - DNA, 25 bp, Homo sapien
tgaagaagaccgaaagacccgttcg

SEQ ID NO: 34402 - DNA, 25 bp, Homo sapien
tgaagaagaccgtaagacccgttcg

SEQ ID NO: 34403 - DNA, 25 bp, Homo sapien
agaactacacggaccagctagtacg

SEQ ID NO: 34404 - DNA, 25 bp, Homo sapien
agaactacacggtccagctagtacg

SEQ ID NO: 34405 - DNA, 25 bp, Homo sapien
tcatcgcacggttcacatcgagtag

SEQ ID NO: 34406 - DNA, 25 bp, Homo sapien
tcatcgcacggtacacatcgagtag

SEQ ID NO: 34407 - DNA, 25 bp, Homo sapien
aagatcgacaccttatctacaggag

SEQ ID NO: 34408 - DNA, 25 bp, Homo sapien
aagatcgacaccatatctacaggag

SEQ ID NO: 34409 - DNA, 25 bp, Homo sapien
ggtacgatctcttgacctcacaggg

SEQ ID NO: 34410 - DNA, 25 bp, Homo sapien
ggtacgatctctagacctcacaggg

SEQ ID NO: 34411 - DNA, 25 bp, Homo sapien
ctggacatctcctacacctagaaga

SEQ ID NO: 34412 - DNA, 25 bp, Homo sapien
ctggacatctccaacacctagaaga

SEQ ID NO: 34413 - DNA, 25 bp, Homo sapien
ttttcagttcagtccgacgaccaga

SEQ ID NO: 34414 - DNA, 25 bp, Homo sapien
ttttcagttcagaccgacgaccaga

SEQ ID NO: 34415 - DNA, 25 bp, Homo sapien
ctctcactttagaccgagtcctagg

SEQ ID NO: 34416 - DNA, 25 bp, Homo sapien
ctctcactttagtccgagtcctagg

SEQ ID NO: 34417 - DNA, 25 bp, Homo sapien
atctggttcgtgtccgtatgtccct

SEQ ID NO: 34418 - DNA, 25 bp, Homo sapien
atctggttcgtgaccgtatgtccct

SEQ ID NO: 34419 - DNA, 25 bp, Homo sapien
gaccaggatccttcccagacgttct

SEQ ID NO: 34420 - DNA, 25 bp, Homo sapien
gaccaggatcctacccagacgttct

SEQ ID NO: 34421 - DNA, 25 bp, Homo sapien
tcgaggaagatcttccttcactctc

SEQ ID NO: 34422 - DNA, 25 bp, Homo sapien
tcgaggaagatcatccttcactctc

SEQ ID NO: 34423 - DNA, 25 bp, Homo sapien
gtgagtgtcaactagcgtccatcac

SEQ ID NO: 34424 - DNA, 25 bp, Homo sapien
gtgagtgtcaacaagcgtccatcac

SEQ ID NO: 34425 - DNA, 25 bp, Homo sapien
ccggtttacacaatcgtcgtctttt

SEQ ID NO: 34426 - DNA, 25 bp, Homo sapien
ccggtttacacattcgtcgtctttt

SEQ ID NO: 34427 - DNA, 25 bp, Homo sapien
gtacctgtaggacttcgtctgtgtt

SEQ ID NO: 34428 - DNA, 25 bp, Homo sapien
gtacctgtaggagttcgtctgtgtt

SEQ ID NO: 34429 - DNA, 25 bp, Homo sapien
cgtgtcaagtagtacctttgtaaag

SEQ ID NO: 34430 - DNA, 25 bp, Homo sapien
cgtgtcaagtagaacctttgtaaag

SEQ ID NO: 34431 - DNA, 25 bp, Homo sapien
ggtcattgtgacgacgctcatacag

SEQ ID NO: 34432 - DNA, 25 bp, Homo sapien
ggtcattgtgaccacgctcatacag

SEQ ID NO: 34433 - DNA, 25 bp, Homo sapien
gtgtgtctacttagagtcatctcct

SEQ ID NO: 34434 - DNA, 25 bp, Homo sapien
gtgtgtctactttgagtcatctcct

SEQ ID NO: 34435 - DNA, 25 bp, Homo sapien
atttatttgtgtcgtcgtacacggt

SEQ ID NO: 34436 - DNA, 25 bp, Homo sapien
atttatttgtgtggtcgtacacggt

SEQ ID NO: 34437 - DNA, 25 bp, Homo sapien
ctttatcgtttcttgtatcaagtag

SEQ ID NO: 34438 - DNA, 25 bp, Homo sapien
ctttatcgtttcatgtatcaagtag

SEQ ID NO: 34439 - DNA, 25 bp, Homo sapien
gggtggtataacattaccatacgtg

SEQ ID NO: 34440 - DNA, 25 bp, Homo sapien
gggtggtataactttaccatacgtg

SEQ ID NO: 34441 - DNA, 25 bp, Homo sapien
ccttagacttccttagaacagactg

SEQ ID NO: 34442 - DNA, 25 bp, Homo sapien
ccttagacttccatagaacagactg

SEQ ID NO: 34443 - DNA, 25 bp, Homo sapien
tgtcttcacggtctcgtcaaggttg

SEQ ID NO: 34444 - DNA, 25 bp, Homo sapien
tgtcttcacggtgtcgtcaaggttg

SEQ ID NO: 34445 - DNA, 25 bp, Homo sapien
agtctcggtacatcgtctcaattct

SEQ ID NO: 34446 - DNA, 25 bp, Homo sapien
agtctcggtacaacgtctcaattct

SEQ ID NO: 34447 - DNA, 25 bp, Homo sapien
gagaggtccggagacgaacaataac

SEQ ID NO: 34448 - DNA, 25 bp, Homo sapien
gagaggtccggacacgaacaataac

SEQ ID NO: 34449 - DNA, 25 bp, Homo sapien
gagtcattaactatcgtgaacatcc

SEQ ID NO: 34450 - DNA, 25 bp, Homo sapien
gagtcattaactttcgtgaacatcc

SEQ ID NO: 34451 - DNA, 25 bp, Homo sapien
tcgtcattaaatagtctccagtgag

SEQ ID NO: 34452 - DNA, 25 bp, Homo sapien
tcgtcattaaattgtctccagtgag

SEQ ID NO: 34453 - DNA, 25 bp, Homo sapien
ggcgaacatactcgtcagcacacag

SEQ ID NO: 34454 - DNA, 25 bp, Homo sapien
ggcgaacatactggtcagcacacag

SEQ ID NO: 34455 - DNA, 25 bp, Homo sapien
accgtaaacatcaccgtaacagcag

SEQ ID NO: 34456 - DNA, 25 bp, Homo sapien
accgtaaacatctccgtaacagcag

SEQ ID NO: 34457 - DNA, 25 bp, Homo sapien
ccacagacgaaacctaaagacgaca

SEQ ID NO: 34458 - DNA, 25 bp, Homo sapien
ccacagacgaaagctaaagacgaca

SEQ ID NO: 34459 - DNA, 25 bp, Homo sapien
tgtctacggacagaggaaatcacta

SEQ ID NO: 34460 - DNA, 25 bp, Homo sapien
tgtctacggacacaggaaatcacta

SEQ ID NO: 34461 - DNA, 25 bp, Homo sapien
tttcggagacaaaggaatgtacctt

SEQ ID NO: 34462 - DNA, 25 bp, Homo sapien
tttcggagacaatggaatgtacctt

SEQ ID NO: 34463 - DNA, 25 bp, Homo sapien
ataaaacagtacgtcgaatgactta

SEQ ID NO: 34464 - DNA, 25 bp, Homo sapien
ataaaacagtacctcgaatgactta

SEQ ID NO: 34465 - DNA, 25 bp, Homo sapien
acaagagtatactgaatatcgtcta

SEQ ID NO: 34466 - DNA, 25 bp, Homo sapien
acaagagtatacagaatatcgtcta

SEQ ID NO: 34467 - DNA, 25 bp, Homo sapien
cgaggaacgtgatacgaatacaaca

SEQ ID NO: 34468 - DNA, 25 bp, Homo sapien
cgaggaacgtgaaacgaatacaaca

SEQ ID NO: 34469 - DNA, 25 bp, Homo sapien
gcgaggaacgattacctcaacatca

SEQ ID NO: 34470 - DNA, 25 bp, Homo sapien
gcgaggaacgataacctcaacatca

SEQ ID NO: 34471 - DNA, 25 bp, Homo sapien
cgggttcggtgtctaggactaaagt

SEQ ID NO: 34472 - DNA, 25 bp, Homo sapien
cgggttcggtgtgtaggactaaagt

SEQ ID NO: 34473 - DNA, 25 bp, Homo sapien
gcgcgtccttgtagaacctctacat

SEQ ID NO: 34474 - DNA, 25 bp, Homo sapien
gcgcgtccttgttgaacctctacat

SEQ ID NO: 34475 - DNA, 25 bp, Homo sapien
ggagtgttattttagtcttcgtcct

SEQ ID NO: 34476 - DNA, 25 bp, Homo sapien
ggagtgttatttaagtcttcgtcct

SEQ ID NO: 34477 - DNA, 25 bp, Homo sapien
ttgtaacgtcttaagtcgtgtcacc

SEQ ID NO: 34478 - DNA, 25 bp, Homo sapien
ttgtaacgtctttagtcgtgtcacc

SEQ ID NO: 34479 - DNA, 25 bp, Homo sapien
tagaaacgtctatccgtagtgatcc

SEQ ID NO: 34480 - DNA, 25 bp, Homo sapien
tagaaacgtctaaccgtagtgatcc

SEQ ID NO: 34481 - DNA, 25 bp, Homo sapien
tatataagtataacggtccgctatg

SEQ ID NO: 34482 - DNA, 25 bp, Homo sapien
tatataagtatatcggtccgctatg

SEQ ID NO: 34483 - DNA, 25 bp, Homo sapien
cttgtaatagacatattgtcccttg

SEQ ID NO: 34484 - DNA, 25 bp, Homo sapien
cttgtaatagacttattgtcccttg

SEQ ID NO: 34485 - DNA, 25 bp, Homo sapien
cttgagtatagtcttctttaccttg

SEQ ID NO: 34486 - DNA, 25 bp, Homo sapien
cttgagtatagtgttctttaccttg

SEQ ID NO: 34487 - DNA, 25 bp, Homo sapien
cttagggcgttatggtagtgtcgtc

SEQ ID NO: 34488 - DNA, 25 bp, Homo sapien
cttagggcgttaaggtagtgtcgtc

SEQ ID NO: 34489 - DNA, 25 bp, Homo sapien
ggttcagacaaatcaggtgtcgtcc

SEQ ID NO: 34490 - DNA, 25 bp, Homo sapien
ggttcagacaaaacaggtgtcgtcc

SEQ ID NO: 34491 - DNA, 25 bp, Homo sapien
gaacaggacaccaagtcgaagtcca

SEQ ID NO: 34492 - DNA, 25 bp, Homo sapien
gaacaggacacctagtcgaagtcca

SEQ ID NO: 34493 - DNA, 25 bp, Homo sapien
ataaacgtaacgtctttacggtccc

SEQ ID NO: 34494 - DNA, 25 bp, Homo sapien
ataaacgtaacgactttacggtccc

SEQ ID NO: 34495 - DNA, 25 bp, Homo sapien
gtacatattcgacttggtcaactct

SEQ ID NO: 34496 - DNA, 25 bp, Homo sapien
gtacatattcgagttggtcaactct

SEQ ID NO: 34497 - DNA, 25 bp, Homo sapien
taggggtgacccttcttacagaggt

SEQ ID NO: 34498 - DNA, 25 bp, Homo sapien
taggggtgacccatcttacagaggt

SEQ ID NO: 34499 - DNA, 25 bp, Homo sapien
ggggtagtccgtcagtcctcccgac

SEQ ID NO: 34500 - DNA, 25 bp, Homo sapien
ggggtagtccgtgagtcctcccgac

SEQ ID NO: 34501 - DNA, 25 bp, Homo sapien
ggtgacaccgagtccgaccacgacg

SEQ ID NO: 34502 - DNA, 25 bp, Homo sapien
ggtgacaccgagaccgaccacgacg

SEQ ID NO: 34503 - DNA, 25 bp, Homo sapien
catcgagtacctcaggggacgccac

SEQ ID NO: 34504 - DNA, 25 bp, Homo sapien
catcgagtacctgaggggacgccac

SEQ ID NO: 34505 - DNA, 25 bp, Homo sapien
cccgactcttgtaggtcagtcctac

SEQ ID NO: 34506 - DNA, 25 bp, Homo sapien
cccgactcttgttggtcagtcctac

SEQ ID NO: 34507 - DNA, 25 bp, Homo sapien
gtgaagttgttaaggtgacacccct

SEQ ID NO: 34508 - DNA, 25 bp, Homo sapien
gtgaagttgttatggtgacacccct

SEQ ID NO: 34509 - DNA, 25 bp, Homo sapien
gggtactccgttaaaggacacctcc

SEQ ID NO: 34510 - DNA, 25 bp, Homo sapien
gggtactccgtttaaggacacctcc

SEQ ID NO: 34511 - DNA, 25 bp, Homo sapien
gagtactcgtctgtctgggcccagt

SEQ ID NO: 34512 - DNA, 25 bp, Homo sapien
gagtactcgtctctctgggcccagt

SEQ ID NO: 34513 - DNA, 25 bp, Homo sapien
ggtgggtcacccatgggactcagac

SEQ ID NO: 34514 - DNA, 25 bp, Homo sapien
ggtgggtcacccttgggactcagac

SEQ ID NO: 34515 - DNA, 25 bp, Homo sapien
gagtcttgatatttgacgatccgac

SEQ ID NO: 34516 - DNA, 25 bp, Homo sapien
gagtcttgatatatgacgatccgac

SEQ ID NO: 34517 - DNA, 25 bp, Homo sapien
cccgttgtgtaggtcgagggaaccc

SEQ ID NO: 34518 - DNA, 25 bp, Homo sapien
cccgttgtgtagctcgagggaaccc

SEQ ID NO: 34519 - DNA, 25 bp, Homo sapien
acttcaggtgccagaggagaccgtc

SEQ ID NO: 34520 - DNA, 25 bp, Homo sapien
acttcaggtgcctgaggagaccgtc

SEQ ID NO: 34521 - DNA, 25 bp, Homo sapien
ggaatttgtgtctcaggtacaagac

SEQ ID NO: 34522 - DNA, 25 bp, Homo sapien
ggaatttgtgtcacaggtacaagac

SEQ ID NO: 34523 - DNA, 25 bp, Homo sapien
ggaacaccttctgctacagaaccaa

SEQ ID NO: 34524 - DNA, 25 bp, Homo sapien
ggaacaccttctcctacagaaccaa

SEQ ID NO: 34525 - DNA, 25 bp, Homo sapien
agtttgacttcttgtcgaattcaac

SEQ ID NO: 34526 - DNA, 25 bp, Homo sapien
agtttgacttctagtcgaattcaac

SEQ ID NO: 34527 - DNA, 25 bp, Homo sapien
tgttagattcggtgcgacaacacag

SEQ ID NO: 34528 - DNA, 25 bp, Homo sapien
tgttagattcggagcgacaacacag

SEQ ID NO: 34529 - DNA, 25 bp, Homo sapien
tagacttaacggtactcaagttgat

SEQ ID NO: 34530 - DNA, 25 bp, Homo sapien
tagacttaacggaactcaagttgat

SEQ ID NO: 34531 - DNA, 25 bp, Homo sapien
tagaaaaacgtgttcaacctatgag

SEQ ID NO: 34532 - DNA, 25 bp, Homo sapien
tagaaaaacgtgatcaacctatgag

SEQ ID NO: 34533 - DNA, 25 bp, Homo sapien
cataaagcctgagacgatcacgaga

SEQ ID NO: 34534 - DNA, 25 bp, Homo sapien
cataaagcctgacacgatcacgaga

SEQ ID NO: 34535 - DNA, 25 bp, Homo sapien
agaacaaccactcacacggccggtg

SEQ ID NO: 34536 - DNA, 25 bp, Homo sapien
agaacaaccactgacacggccggtg

SEQ ID NO: 34537 - DNA, 25 bp, Homo sapien
cctacggaagaaagtccgggaacgc

SEQ ID NO: 34538 - DNA, 25 bp, Homo sapien
cctacggaagaatgtccgggaacgc

SEQ ID NO: 34539 - DNA, 25 bp, Homo sapien
tcccggggtctcttacgggtccagg

SEQ ID NO: 34540 - DNA, 25 bp, Homo sapien
tcccggggtctcatacgggtccagg

SEQ ID NO: 34541 - DNA, 25 bp, Homo sapien
ttacgacgaggaaccggtccgactc

SEQ ID NO: 34542 - DNA, 25 bp, Homo sapien
ttacgacgaggatccggtccgactc

SEQ ID NO: 34543 - DNA, 25 bp, Homo sapien
tgactccgacgacactgaggcccga

SEQ ID NO: 34544 - DNA, 25 bp, Homo sapien
tgactccgacgagactgaggcccga

SEQ ID NO: 34545 - DNA, 25 bp, Homo sapien
ccacaaggaggaaggacgaccccag

SEQ ID NO: 34546 - DNA, 25 bp, Homo sapien
ccacaaggaggatggacgaccccag

SEQ ID NO: 34547 - DNA, 25 bp, Homo sapien
ccgtctggggttttcacagtccctt

SEQ ID NO: 34548 - DNA, 25 bp, Homo sapien
ccgtctggggttatcacagtccctt

SEQ ID NO: 34549 - DNA, 25 bp, Homo sapien
tcttaagtgggtttcggacccacct

SEQ ID NO: 34550 - DNA, 25 bp, Homo sapien
tcttaagtgggtatcggacccacct

SEQ ID NO: 34551 - DNA, 25 bp, Homo sapien
cgtgagactgaaggagggacctccc

SEQ ID NO: 34552 - DNA, 25 bp, Homo sapien
cgtgagactgaacgagggacctccc

SEQ ID NO: 34553 - DNA, 25 bp, Homo sapien
gaacatcgtaaccaggagaccctgg

SEQ ID NO: 34554 - DNA, 25 bp, Homo sapien
gaacatcgtaacgaggagaccctgg

SEQ ID NO: 34555 - DNA, 25 bp, Homo sapien
gataaaacaagaggtgtaaccgttc

SEQ ID NO: 34556 - DNA, 25 bp, Homo sapien
gataaaacaagacgtgtaaccgttc

SEQ ID NO: 34557 - DNA, 25 bp, Homo sapien
tatacaccggaggacttgtgtcgcc

SEQ ID NO: 34558 - DNA, 25 bp, Homo sapien
tatacaccggagcacttgtgtcgcc

SEQ ID NO: 34559 - DNA, 25 bp, Homo sapien
ttaccagactttaatgttacgtgtt

SEQ ID NO: 34560 - DNA, 25 bp, Homo sapien
ttaccagacttttatgttacgtgtt

SEQ ID NO: 34561 - DNA, 25 bp, Homo sapien
aactccttctttacgtcttagtcta

SEQ ID NO: 34562 - DNA, 25 bp, Homo sapien
aactccttcttttcgtcttagtcta

SEQ ID NO: 34563 - DNA, 25 bp, Homo sapien
agagtcagttcagtgattcatgtac

SEQ ID NO: 34564 - DNA, 25 bp, Homo sapien
agagtcagttcactgattcatgtac

SEQ ID NO: 34565 - DNA, 25 bp, Homo sapien
ttcactgagttgtccgatggatcga

SEQ ID NO: 34566 - DNA, 25 bp, Homo sapien
ttcactgagttgaccgatggatcga

SEQ ID NO: 34567 - DNA, 25 bp, Homo sapien
actaggagtgttttacatcagatgc

SEQ ID NO: 34568 - DNA, 25 bp, Homo sapien
actaggagtgttatacatcagatgc

SEQ ID NO: 34569 - DNA, 25 bp, Homo sapien
taggaggctcaggtagttcgtccag

SEQ ID NO: 34570 - DNA, 25 bp, Homo sapien
taggaggctcagctagttcgtccag

SEQ ID NO: 34571 - DNA, 25 bp, Homo sapien
atgtcacgccactgtacctccggga

SEQ ID NO: 34572 - DNA, 25 bp, Homo sapien
atgtcacgccacagtacctccggga

SEQ ID NO: 34573 - DNA, 25 bp, Homo sapien
tgacgtatccgtatcgcgacttggg

SEQ ID NO: 34574 - DNA, 25 bp, Homo sapien
tgacgtatccgtttcgcgacttggg

SEQ ID NO: 34575 - DNA, 25 bp, Homo sapien
ttctacaccctttacctgagacgtg

SEQ ID NO: 34576 - DNA, 25 bp, Homo sapien
ttctacacccttaacctgagacgtg

SEQ ID NO: 34577 - DNA, 25 bp, Homo sapien
tctgagtaacggttccgagaccgtg

SEQ ID NO: 34578 - DNA, 25 bp, Homo sapien
tctgagtaacggatccgagaccgtg

SEQ ID NO: 34579 - DNA, 25 bp, Homo sapien
cactatgaccagtagaccgactcca

SEQ ID NO: 34580 - DNA, 25 bp, Homo sapien
cactatgaccagaagaccgactcca

SEQ ID NO: 34581 - DNA, 25 bp, Homo sapien
acacgtgtggccaggagcgctccgc

SEQ ID NO: 34582 - DNA, 25 bp, Homo sapien
acacgtgtggcctggagcgctccgc

SEQ ID NO: 34583 - DNA, 25 bp, Homo sapien
gaaagggctccgaggtctactccgg

SEQ ID NO: 34584 - DNA, 25 bp, Homo sapien
gaaagggctccgtggtctactccgg

SEQ ID NO: 34585 - DNA, 25 bp, Homo sapien
gagtagaccttcctgagatcaccga

SEQ ID NO: 34586 - DNA, 25 bp, Homo sapien
gagtagaccttcgtgagatcaccga

SEQ ID NO: 34587 - DNA, 25 bp, Homo sapien
actgtatccgtcgacaagagtccag

SEQ ID NO: 34588 - DNA, 25 bp, Homo sapien
actgtatccgtccacaagagtccag

SEQ ID NO: 34589 - DNA, 25 bp, Homo sapien
actcgtgtttggagcgtcacctcgt

SEQ ID NO: 34590 - DNA, 25 bp, Homo sapien
actcgtgtttggtgcgtcacctcgt

SEQ ID NO: 34591 - DNA, 25 bp, Homo sapien
tcgtagaagtttttgtggagttccc

SEQ ID NO: 34592 - DNA, 25 bp, Homo sapien
tcgtagaagtttatgtggagttccc

SEQ ID NO: 34593 - DNA, 25 bp, Homo sapien
aattgatgatgacttaggagcctcc

SEQ ID NO: 34594 - DNA, 25 bp, Homo sapien
aattgatgatgagttaggagcctcc

SEQ ID NO: 34595 - DNA, 25 bp, Homo sapien
acagtatggcgtgtccgccggacgt

SEQ ID NO: 34596 - DNA, 25 bp, Homo sapien
acagtatggcgtctccgccggacgt

SEQ ID NO: 34597 - DNA, 25 bp, Homo sapien
aaagttgtgagtgttactcggtcac

SEQ ID NO: 34598 - DNA, 25 bp, Homo sapien
aaagttgtgagtcttactcggtcac

SEQ ID NO: 34599 - DNA, 25 bp, Homo sapien
agattaggtcattatacgtagtacc

SEQ ID NO: 34600 - DNA, 25 bp, Homo sapien
agattaggtcataatacgtagtacc

SEQ ID NO: 34601 - DNA, 25 bp, Homo sapien
taaaaatctcctcaaggtgtagtaa

SEQ ID NO: 34602 - DNA, 25 bp, Homo sapien
taaaaatctcctgaaggtgtagtaa

SEQ ID NO: 34603 - DNA, 25 bp, Homo sapien
taagtcgagggttttgagtttaaat

SEQ ID NO: 34604 - DNA, 25 bp, Homo sapien
taagtcgagggtattgagtttaaat

SEQ ID NO: 34605 - DNA, 25 bp, Homo sapien
gtaagactggagttcttcagtcaat

SEQ ID NO: 34606 - DNA, 25 bp, Homo sapien
gtaagactggagatcttcagtcaat

SEQ ID NO: 34607 - DNA, 25 bp, Homo sapien
aaacagacgggaatgtggagtccga

SEQ ID NO: 34608 - DNA, 25 bp, Homo sapien
aaacagacgggattgtggagtccga

SEQ ID NO: 34609 - DNA, 25 bp, Homo sapien
gataaacagactcatggttgacgaa

SEQ ID NO: 34610 - DNA, 25 bp, Homo sapien
gataaacagactgatggttgacgaa

SEQ ID NO: 34611 - DNA, 25 bp, Homo sapien
tagatttcggaaaatgacttcgaac

SEQ ID NO: 34612 - DNA, 25 bp, Homo sapien
tagatttcggaatatgacttcgaac

SEQ ID NO: 34613 - DNA, 25 bp, Homo sapien
agatcatgggaccattcacgacctc

SEQ ID NO: 34614 - DNA, 25 bp, Homo sapien
agatcatgggacgattcacgacctc

SEQ ID NO: 34615 - DNA, 25 bp, Homo sapien
tttaaaaggacgacaacgtaagttc

SEQ ID NO: 34616 - DNA, 25 bp, Homo sapien
tttaaaaggacgtcaacgtaagttc

SEQ ID NO: 34617 - DNA, 25 bp, Homo sapien
ctagacgagggtgtctaagaacgaa

SEQ ID NO: 34618 - DNA, 25 bp, Homo sapien
ctagacgagggtctctaagaacgaa

SEQ ID NO: 34619 - DNA, 25 bp, Homo sapien
gagagacaggtcaccagagagacaa

SEQ ID NO: 34620 - DNA, 25 bp, Homo sapien
gagagacaggtctccagagagacaa

SEQ ID NO: 34621 - DNA, 25 bp, Homo sapien
cggcgacgaggcagtccatggacaa

SEQ ID NO: 34622 - DNA, 25 bp, Homo sapien
cggcgacgaggctgtccatggacaa

SEQ ID NO: 34623 - DNA, 25 bp, Homo sapien
ttggggtcccattcaggagcacgac

SEQ ID NO: 34624 - DNA, 25 bp, Homo sapien
ttggggtcccatacaggagcacgac

SEQ ID NO: 34625 - DNA, 25 bp, Homo sapien
gattacgagtgacacgagtcgtcca

SEQ ID NO: 34626 - DNA, 25 bp, Homo sapien
gattacgagtgagacgagtcgtcca

SEQ ID NO: 34627 - DNA, 25 bp, Homo sapien
cgactcacccacgacggttaatcgt

SEQ ID NO: 34628 - DNA, 25 bp, Homo sapien
cgactcacccaccacggttaatcgt

SEQ ID NO: 34629 - DNA, 25 bp, Homo sapien
gacacgacacgatcacgggatttag

SEQ ID NO: 34630 - DNA, 25 bp, Homo sapien
gacacgacacgaacacgggatttag

SEQ ID NO: 34631 - DNA, 25 bp, Homo sapien
atacagaacagtaagggaactacta

SEQ ID NO: 34632 - DNA, 25 bp, Homo sapien
atacagaacagttagggaactacta

SEQ ID NO: 34633 - DNA, 25 bp, Homo sapien
ggagacccagtaaaaacatacgtac

SEQ ID NO: 34634 - DNA, 25 bp, Homo sapien
ggagacccagtataaacatacgtac

SEQ ID NO: 34635 - DNA, 25 bp, Homo sapien
aagaacggcgtcgtctaccaccact

SEQ ID NO: 34636 - DNA, 25 bp, Homo sapien
aagaacggcgtcctctaccaccact

SEQ ID NO: 34637 - DNA, 25 bp, Homo sapien
gagagtctccacaccgtagacacat

SEQ ID NO: 34638 - DNA, 25 bp, Homo sapien
gagagtctccactccgtagacacat

SEQ ID NO: 34639 - DNA, 25 bp, Homo sapien
taggtcctacgcacagcacgactag

SEQ ID NO: 34640 - DNA, 25 bp, Homo sapien
taggtcctacgctcagcacgactag

SEQ ID NO: 34641 - DNA, 25 bp, Homo sapien
gatggggcctgtccttcacagagta

SEQ ID NO: 34642 - DNA, 25 bp, Homo sapien
gatggggcctgtgcttcacagagta

SEQ ID NO: 34643 - DNA, 25 bp, Homo sapien
gtggtggaagaagcagccacctcga

SEQ ID NO: 34644 - DNA, 25 bp, Homo sapien
gtggtggaagaaccagccacctcga

SEQ ID NO: 34645 - DNA, 25 bp, Homo sapien
gtcgtcgaagagagaaccacgctgg

SEQ ID NO: 34646 - DNA, 25 bp, Homo sapien
gtcgtcgaagagtgaaccacgctgg

SEQ ID NO: 34647 - DNA, 25 bp, Homo sapien
acgggtcttgcacatacgtccccag

SEQ ID NO: 34648 - DNA, 25 bp, Homo sapien
acgggtcttgcagatacgtccccag

SEQ ID NO: 34649 - DNA, 25 bp, Homo sapien
agactgtaaagtcatttcccgtaaa

SEQ ID NO: 34650 - DNA, 25 bp, Homo sapien
agactgtaaagtgatttcccgtaaa

SEQ ID NO: 34651 - DNA, 25 bp, Homo sapien
ctcgtgggtcgctttgaagtaggta

SEQ ID NO: 34652 - DNA, 25 bp, Homo sapien
ctcgtgggtcgcattgaagtaggta

SEQ ID NO: 34653 - DNA, 25 bp, Homo sapien
ggtcgggttggtctacttcatgtaa

SEQ ID NO: 34654 - DNA, 25 bp, Homo sapien
ggtcgggttggtgtacttcatgtaa

SEQ ID NO: 34655 - DNA, 25 bp, Homo sapien
tcctttagtgtaaacataatcgtta

SEQ ID NO: 34656 - DNA, 25 bp, Homo sapien
tcctttagtgtatacataatcgtta

SEQ ID NO: 34657 - DNA, 25 bp, Homo sapien
tctcagttattaggaaagttctttc

SEQ ID NO: 34658 - DNA, 25 bp, Homo sapien
tctcagttattacgaaagttctttc

SEQ ID NO: 34659 - DNA, 25 bp, Homo sapien
gatagtctttatcataatgaccttg

SEQ ID NO: 34660 - DNA, 25 bp, Homo sapien
gatagtctttatgataatgaccttg

SEQ ID NO: 34661 - DNA, 25 bp, Homo sapien
aggtcgttcatgaacaagaatctag

SEQ ID NO: 34662 - DNA, 25 bp, Homo sapien
aggtcgttcatgtacaagaatctag

SEQ ID NO: 34663 - DNA, 25 bp, Homo sapien
ccggagtgagagtcaccgacacttg

SEQ ID NO: 34664 - DNA, 25 bp, Homo sapien
ccggagtgagagacaccgacacttg

SEQ ID NO: 34665 - DNA, 25 bp, Homo sapien
cgaggtacgacgacacgtcccactg

SEQ ID NO: 34666 - DNA, 25 bp, Homo sapien
cgaggtacgacgtcacgtcccactg

SEQ ID NO: 34667 - DNA, 25 bp, Homo sapien
attagaaggtacagaaacacaactg

SEQ ID NO: 34668 - DNA, 25 bp, Homo sapien
attagaaggtactgaaacacaactg

SEQ ID NO: 34669 - DNA, 25 bp, Homo sapien
catatgaaatggttaacgacttctt

SEQ ID NO: 34670 - DNA, 25 bp, Homo sapien
catatgaaatggataacgacttctt

SEQ ID NO: 34671 - DNA, 25 bp, Homo sapien
agaggtaaaacgtcttacgattctg

SEQ ID NO: 34672 - DNA, 25 bp, Homo sapien
agaggtaaaacgacttacgattctg

SEQ ID NO: 34673 - DNA, 25 bp, Homo sapien
aggtaaatacggatgtagtaccaca

SEQ ID NO: 34674 - DNA, 25 bp, Homo sapien
aggtaaatacggttgtagtaccaca

SEQ ID NO: 34675 - DNA, 25 bp, Homo sapien
gggatagaaacgtatacggcctgtt

SEQ ID NO: 34676 - DNA, 25 bp, Homo sapien
gggatagaaacgaatacggcctgtt

SEQ ID NO: 34677 - DNA, 25 bp, Homo sapien
tctaacccaacagtcgtgaccctgt

SEQ ID NO: 34678 - DNA, 25 bp, Homo sapien
tctaacccaacactcgtgaccctgt

SEQ ID NO: 34679 - DNA, 25 bp, Homo sapien
aaaatctagaacagggagacccggt

SEQ ID NO: 34680 - DNA, 25 bp, Homo sapien
aaaatctagaactgggagacccggt

SEQ ID NO: 34681 - DNA, 25 bp, Homo sapien
tcaccgaacaactgacgaccgacgt

SEQ ID NO: 34682 - DNA, 25 bp, Homo sapien
tcaccgaacaacagacgaccgacgt

SEQ ID NO: 34683 - DNA, 25 bp, Homo sapien
cgacgttcctctcggaaagtctctt

SEQ ID NO: 34684 - DNA, 25 bp, Homo sapien
cgacgttcctctgggaaagtctctt

SEQ ID NO: 34685 - DNA, 25 bp, Homo sapien
atactctcctctctttcttttcgtt

SEQ ID NO: 34686 - DNA, 25 bp, Homo sapien
atactctcctctgtttcttttcgtt

SEQ ID NO: 34687 - DNA, 25 bp, Homo sapien
cgacttctttattttttatgctgtt

SEQ ID NO: 34688 - DNA, 25 bp, Homo sapien
cgacttctttatattttatgctgtt

SEQ ID NO: 34689 - DNA, 25 bp, Homo sapien
ttcgtaataccctttcggtttagag

SEQ ID NO: 34690 - DNA, 25 bp, Homo sapien
ttcgtaatacccattcggtttagag

SEQ ID NO: 34691 - DNA, 25 bp, Homo sapien
ctatgagttcattcttgagtcatgg

SEQ ID NO: 34692 - DNA, 25 bp, Homo sapien
ctatgagttcatacttgagtcatgg

SEQ ID NO: 34693 - DNA, 25 bp, Homo sapien
accgaggagttgtccgttgttttaa

SEQ ID NO: 34694 - DNA, 25 bp, Homo sapien
accgaggagttgaccgttgttttaa

SEQ ID NO: 34695 - DNA, 25 bp, Homo sapien
acagttttagtctggtctcttttgg

SEQ ID NO: 34696 - DNA, 25 bp, Homo sapien
acagttttagtcaggtctcttttgg

SEQ ID NO: 34697 - DNA, 25 bp, Homo sapien
acatgtgactgtcaatgtcatttaa

SEQ ID NO: 34698 - DNA, 25 bp, Homo sapien
acatgtgactgtgaatgtcatttaa

SEQ ID NO: 34699 - DNA, 25 bp, Homo sapien
aatttaggtgacgtcgaacctcgaa

SEQ ID NO: 34700 - DNA, 25 bp, Homo sapien
aatttaggtgacctcgaacctcgaa

SEQ ID NO: 34701 - DNA, 25 bp, Homo sapien
ttattttgtgtttacagaccgacaa

SEQ ID NO: 34702 - DNA, 25 bp, Homo sapien
ttattttgtgttaacagaccgacaa

SEQ ID NO: 34703 - DNA, 25 bp, Homo sapien
agtctattttatcatatatcaaaaa

SEQ ID NO: 34704 - DNA, 25 bp, Homo sapien
agtctattttatgatatatcaaaaa

SEQ ID NO: 34705 - DNA, 25 bp, Homo sapien
actgtttttaagtcgggatccgata

SEQ ID NO: 34706 - DNA, 25 bp, Homo sapien
actgtttttaagacgggatccgata

SEQ ID NO: 34707 - DNA, 25 bp, Homo sapien
accttgggataactgggtgctacaa

SEQ ID NO: 34708 - DNA, 25 bp, Homo sapien
accttgggataagtgggtgctacaa

SEQ ID NO: 34709 - DNA, 25 bp, Homo sapien
tgagtggtcggaacctcagcctgaa

SEQ ID NO: 34710 - DNA, 25 bp, Homo sapien
tgagtggtcggatcctcagcctgaa

SEQ ID NO: 34711 - DNA, 25 bp, Homo sapien
cctgagcgaatacaatcagtacgaa

SEQ ID NO: 34712 - DNA, 25 bp, Homo sapien
cctgagcgaatagaatcagtacgaa

SEQ ID NO: 34713 - DNA, 25 bp, Homo sapien
tcgagaacatgaaataactcgtcga

SEQ ID NO: 34714 - DNA, 25 bp, Homo sapien
tcgagaacatgatataactcgtcga

SEQ ID NO: 34715 - DNA, 25 bp, Homo sapien
caaaaggattactttcgacactatg

SEQ ID NO: 34716 - DNA, 25 bp, Homo sapien
caaaaggattacattcgacactatg

SEQ ID NO: 34717 - DNA, 25 bp, Homo sapien
catgttccgtttatcgacagaggta

SEQ ID NO: 34718 - DNA, 25 bp, Homo sapien
catgttccgtttttcgacagaggta

SEQ ID NO: 34719 - DNA, 25 bp, Homo sapien
tattgctacgatcctgaccggacag

SEQ ID NO: 34720 - DNA, 25 bp, Homo sapien
tattgctacgatgctgaccggacag

SEQ ID NO: 34721 - DNA, 25 bp, Homo sapien
tcatctttcacgattggtctccatg

SEQ ID NO: 34722 - DNA, 25 bp, Homo sapien
tcatctttcacgtttggtctccatg

SEQ ID NO: 34723 - DNA, 25 bp, Homo sapien
atctttactggtcgtatgtcaggtc

SEQ ID NO: 34724 - DNA, 25 bp, Homo sapien
atctttactggtggtatgtcaggtc

SEQ ID NO: 34725 - DNA, 25 bp, Homo sapien
agacatgttggtgcttgaggcgtct

SEQ ID NO: 34726 - DNA, 25 bp, Homo sapien
agacatgttggtccttgaggcgtct

SEQ ID NO: 34727 - DNA, 25 bp, Homo sapien
gagagatcggtgtcgtcattaattc

SEQ ID NO: 34728 - DNA, 25 bp, Homo sapien
gagagatcggtgacgtcattaattc

SEQ ID NO: 34729 - DNA, 25 bp, Homo sapien
gatcttcggtctctgaccacaaact

SEQ ID NO: 34730 - DNA, 25 bp, Homo sapien
gatcttcggtctgtgaccacaaact

SEQ ID NO: 34731 - DNA, 25 bp, Homo sapien
tctaccgacttctcggtctaaggac

SEQ ID NO: 34732 - DNA, 25 bp, Homo sapien
tctaccgacttcacggtctaaggac

SEQ ID NO: 34733 - DNA, 25 bp, Homo sapien
cactgacgtatttcgggacaacgtt

SEQ ID NO: 34734 - DNA, 25 bp, Homo sapien
cactgacgtattacgggacaacgtt

SEQ ID NO: 34735 - DNA, 25 bp, Homo sapien
ttcgatgctcttactcgtccacctg

SEQ ID NO: 34736 - DNA, 25 bp, Homo sapien
ttcgatgctctttctcgtccacctg

SEQ ID NO: 34737 - DNA, 25 bp, Homo sapien
gcttccgtccttgtctcggaaccgg

SEQ ID NO: 34738 - DNA, 25 bp, Homo sapien
gcttccgtccttctctcggaaccgg

SEQ ID NO: 34739 - DNA, 25 bp, Homo sapien
ggtgcacgtcttcttcactgccgac

SEQ ID NO: 34740 - DNA, 25 bp, Homo sapien
ggtgcacgtcttgttcactgccgac

SEQ ID NO: 34741 - DNA, 25 bp, Homo sapien
atccgtgaacgtatccatgcgtcgc

SEQ ID NO: 34742 - DNA, 25 bp, Homo sapien
atccgtgaacgtttccatgcgtcgc

SEQ ID NO: 34743 - DNA, 25 bp, Homo sapien
actccagtctaggtccagtgactcc

SEQ ID NO: 34744 - DNA, 25 bp, Homo sapien
actccagtctagctccagtgactcc

SEQ ID NO: 34745 - DNA, 25 bp, Homo sapien
atcgtcacttaacgaatacacagag

SEQ ID NO: 34746 - DNA, 25 bp, Homo sapien
atcgtcacttaaggaatacacagag

SEQ ID NO: 34747 - DNA, 25 bp, Homo sapien
ttgtttgtagacacgcgatacatgt

SEQ ID NO: 34748 - DNA, 25 bp, Homo sapien
ttgtttgtagactcgcgatacatgt

SEQ ID NO: 34749 - DNA, 25 bp, Homo sapien
cttggttttcgaagtggactcgatg

SEQ ID NO: 34750 - DNA, 25 bp, Homo sapien
cttggttttcgatgtggactcgatg

SEQ ID NO: 34751 - DNA, 25 bp, Homo sapien
aaatgtattcacgtcgttctcatcg

SEQ ID NO: 34752 - DNA, 25 bp, Homo sapien
aaatgtattcacctcgttctcatcg

SEQ ID NO: 34753 - DNA, 25 bp, Homo sapien
attaaagtaatttactccggtcttg

SEQ ID NO: 34754 - DNA, 25 bp, Homo sapien
attaaagtaattaactccggtcttg

SEQ ID NO: 34755 - DNA, 25 bp, Homo sapien
caacgtaaaagtaccgttcgggagg

SEQ ID NO: 34756 - DNA, 25 bp, Homo sapien
caacgtaaaagttccgttcgggagg

SEQ ID NO: 34757 - DNA, 25 bp, Homo sapien
aaggtaaggagaagcctgtgccagt

SEQ ID NO: 34758 - DNA, 25 bp, Homo sapien
aaggtaaggagatgcctgtgccagt

SEQ ID NO: 34759 - DNA, 25 bp, Homo sapien
ttcgggcagaggaagtccagcagca

SEQ ID NO: 34760 - DNA, 25 bp, Homo sapien
ttcgggcagaggtagtccagcagca

SEQ ID NO: 34761 - DNA, 25 bp, Homo sapien
gagtgtcacagaattccagaccctt

SEQ ID NO: 34762 - DNA, 25 bp, Homo sapien
gagtgtcacagatttccagaccctt

SEQ ID NO: 34763 - DNA, 25 bp, Homo sapien
gggtctgaactccttaacttccctt

SEQ ID NO: 34764 - DNA, 25 bp, Homo sapien
gggtctgaactcgttaacttccctt

SEQ ID NO: 34765 - DNA, 25 bp, Homo sapien
gaggggaaccggatccagtcctcga

SEQ ID NO: 34766 - DNA, 25 bp, Homo sapien
gaggggaaccggttccagtcctcga

SEQ ID NO: 34767 - DNA, 25 bp, Homo sapien
gataggcaacccaaggagtaaccta

SEQ ID NO: 34768 - DNA, 25 bp, Homo sapien
gataggcaaccctaggagtaaccta

SEQ ID NO: 34769 - DNA, 25 bp, Homo sapien
ggaagaaatatcttgtccttcctga

SEQ ID NO: 34770 - DNA, 25 bp, Homo sapien
ggaagaaatatcatgtccttcctga

SEQ ID NO: 34771 - DNA, 25 bp, Homo sapien
gatagatatacctgcatatgtcaga

SEQ ID NO: 34772 - DNA, 25 bp, Homo sapien
gatagatataccagcatatgtcaga

SEQ ID NO: 34773 - DNA, 25 bp, Homo sapien
acccgttaaccttctgtatataagg

SEQ ID NO: 34774 - DNA, 25 bp, Homo sapien
acccgttaacctactgtatataagg

SEQ ID NO: 34775 - DNA, 25 bp, Homo sapien
gaatccggacccttacccatatcgg

SEQ ID NO: 34776 - DNA, 25 bp, Homo sapien
gaatccggacccatacccatatcgg

SEQ ID NO: 34777 - DNA, 25 bp, Homo sapien
tgttcggtgccgagtgtcccctcgg

SEQ ID NO: 34778 - DNA, 25 bp, Homo sapien
tgttcggtgccgtgtgtcccctcgg

SEQ ID NO: 34779 - DNA, 25 bp, Homo sapien
ttctcaagtaagtgaaacctctctg

SEQ ID NO: 34780 - DNA, 25 bp, Homo sapien
ttctcaagtaagagaaacctctctg

SEQ ID NO: 34781 - DNA, 25 bp, Homo sapien
tcccagggagaaccagacgttctct

SEQ ID NO: 34782 - DNA, 25 bp, Homo sapien
tcccagggagaagcagacgttctct

SEQ ID NO: 34783 - DNA, 25 bp, Homo sapien
tcagcaggtcggagtacgggttaca

SEQ ID NO: 34784 - DNA, 25 bp, Homo sapien
tcagcaggtcggtgtacgggttaca

SEQ ID NO: 34785 - DNA, 25 bp, Homo sapien
caaagagtagtgtctggacttccgt

SEQ ID NO: 34786 - DNA, 25 bp, Homo sapien
caaagagtagtgactggacttccgt

SEQ ID NO: 34787 - DNA, 25 bp, Homo sapien
gccccaaagtggtacaaccggtccg

SEQ ID NO: 34788 - DNA, 25 bp, Homo sapien
gccccaaagtggaacaaccggtccg

SEQ ID NO: 34789 - DNA, 25 bp, Homo sapien
tgacaacagcagtcagacccgtcgg

SEQ ID NO: 34790 - DNA, 25 bp, Homo sapien
tgacaacagcagacagacccgtcgg

SEQ ID NO: 34791 - DNA, 25 bp, Homo sapien
gacaatacggaatttacacacgtgg

SEQ ID NO: 34792 - DNA, 25 bp, Homo sapien
gacaatacggaaattacacacgtgg

SEQ ID NO: 34793 - DNA, 25 bp, Homo sapien
tctgacatagggtctacattgtttc

SEQ ID NO: 34794 - DNA, 25 bp, Homo sapien
tctgacatagggactacattgtttc

SEQ ID NO: 34795 - DNA, 25 bp, Homo sapien
actggaacattgttcaaggtctatg

SEQ ID NO: 34796 - DNA, 25 bp, Homo sapien
actggaacattgatcaaggtctatg

SEQ ID NO: 34797 - DNA, 25 bp, Homo sapien
gccggaagaagagcagcagactcag

SEQ ID NO: 34798 - DNA, 25 bp, Homo sapien
gccggaagaagaccagcagactcag

SEQ ID NO: 34799 - DNA, 25 bp, Homo sapien
caccgccgagggagccacggcacga

SEQ ID NO: 34800 - DNA, 25 bp, Homo sapien
caccgccgagggtgccacggcacga

SEQ ID NO: 34801 - DNA, 25 bp, Homo sapien
cccccgagtagtaggtgtaggcaca

SEQ ID NO: 34802 - DNA, 25 bp, Homo sapien
cccccgagtagttggtgtaggcaca

SEQ ID NO: 34803 - DNA, 25 bp, Homo sapien
cgcccacgagatacaggagccgcgt

SEQ ID NO: 34804 - DNA, 25 bp, Homo sapien
cgcccacgagattcaggagccgcgt

SEQ ID NO: 34805 - DNA, 25 bp, Homo sapien
cgtccctcacgacgaaggcggcgtc

SEQ ID NO: 34806 - DNA, 25 bp, Homo sapien
cgtccctcacgaggaaggcggcgtc

SEQ ID NO: 34807 - DNA, 25 bp, Homo sapien
acaccagacgcaaagacggtatcgg

SEQ ID NO: 34808 - DNA, 25 bp, Homo sapien
acaccagacgcatagacggtatcgg

SEQ ID NO: 34809 - DNA, 25 bp, Homo sapien
tccggtgtccgtccttgggtctcgg

SEQ ID NO: 34810 - DNA, 25 bp, Homo sapien
tccggtgtccgtgcttgggtctcgg

SEQ ID NO: 34811 - DNA, 25 bp, Homo sapien
tccgtcgaggctgcccggactgtgg

SEQ ID NO: 34812 - DNA, 25 bp, Homo sapien
tccgtcgaggctccccggactgtgg

SEQ ID NO: 34813 - DNA, 25 bp, Homo sapien
ccgagacgtccttcaaatactaaga

SEQ ID NO: 34814 - DNA, 25 bp, Homo sapien
ccgagacgtcctacaaatactaaga

SEQ ID NO: 34815 - DNA, 25 bp, Homo sapien
gacggctacctcatttctggtcgac

SEQ ID NO: 34816 - DNA, 25 bp, Homo sapien
gacggctacctcttttctggtcgac

SEQ ID NO: 34817 - DNA, 25 bp, Homo sapien
agggagaatacttttcgttggtcct

SEQ ID NO: 34818 - DNA, 25 bp, Homo sapien
agggagaatactattcgttggtcct

SEQ ID NO: 34819 - DNA, 25 bp, Homo sapien
ctgtcaatgcccttctctgggtccg

SEQ ID NO: 34820 - DNA, 25 bp, Homo sapien
ctgtcaatgcccatctctgggtccg

SEQ ID NO: 34821 - DNA, 25 bp, Homo sapien
ttgtaaaagctctcgtttaggttcg

SEQ ID NO: 34822 - DNA, 25 bp, Homo sapien
ttgtaaaagctcacgtttaggttcg

SEQ ID NO: 34823 - DNA, 25 bp, Homo sapien
tgttcgaaatctatactttgaatcg

SEQ ID NO: 34824 - DNA, 25 bp, Homo sapien
tgttcgaaatctttactttgaatcg

SEQ ID NO: 34825 - DNA, 25 bp, Homo sapien
accaccacgagctcctagtggatct

SEQ ID NO: 34826 - DNA, 25 bp, Homo sapien
accaccacgagcacctagtggatct

SEQ ID NO: 34827 - DNA, 25 bp, Homo sapien
ctcagacgaacctcaataacgaagt

SEQ ID NO: 34828 - DNA, 25 bp, Homo sapien
ctcagacgaaccacaataacgaagt

SEQ ID NO: 34829 - DNA, 25 bp, Homo sapien
tacattccaactggagatcacaaag

SEQ ID NO: 34830 - DNA, 25 bp, Homo sapien
tacattccaactcgagatcacaaag

SEQ ID NO: 34831 - DNA, 25 bp, Homo sapien
cgaatgaaacacgttttacataagt

SEQ ID NO: 34832 - DNA, 25 bp, Homo sapien
cgaatgaaacaccttttacataagt

SEQ ID NO: 34833 - DNA, 25 bp, Homo sapien
ggtttaagacgaaacatttgccaga

SEQ ID NO: 34834 - DNA, 25 bp, Homo sapien
ggtttaagacgatacatttgccaga

SEQ ID NO: 34835 - DNA, 25 bp, Homo sapien
aacgaccaacgtgagtctctcgagt

SEQ ID NO: 34836 - DNA, 25 bp, Homo sapien
aacgaccaacgtcagtctctcgagt

SEQ ID NO: 34837 - DNA, 25 bp, Homo sapien
cgaagctgcgtcctgtcttcgacgt

SEQ ID NO: 34838 - DNA, 25 bp, Homo sapien
cgaagctgcgtcgtgtcttcgacgt

SEQ ID NO: 34839 - DNA, 25 bp, Homo sapien
ggggacagacagtccctgtacggtc

SEQ ID NO: 34840 - DNA, 25 bp, Homo sapien
ggggacagacagaccctgtacggtc

SEQ ID NO: 34841 - DNA, 25 bp, Homo sapien
gtacatgaaccacaccttagcggta

SEQ ID NO: 34842 - DNA, 25 bp, Homo sapien
gtacatgaaccagaccttagcggta

SEQ ID NO: 34843 - DNA, 25 bp, Homo sapien
tagtctgtccattcaactaggtgac

SEQ ID NO: 34844 - DNA, 25 bp, Homo sapien
tagtctgtccatacaactaggtgac

SEQ ID NO: 34845 - DNA, 25 bp, Homo sapien
cggggtccaccttgcagccgggact

SEQ ID NO: 34846 - DNA, 25 bp, Homo sapien
cggggtccacctagcagccgggact

SEQ ID NO: 34847 - DNA, 25 bp, Homo sapien
aatgttcttccgagtcccccggtct

SEQ ID NO: 34848 - DNA, 25 bp, Homo sapien
aatgttcttccgtgtcccccggtct

SEQ ID NO: 34849 - DNA, 25 bp, Homo sapien
tttatacttccgacgggtcctggac

SEQ ID NO: 34850 - DNA, 25 bp, Homo sapien
tttatacttccgtcgggtcctggac

SEQ ID NO: 34851 - DNA, 25 bp, Homo sapien
acccatcgtcggaaactcgtttaga

SEQ ID NO: 34852 - DNA, 25 bp, Homo sapien
acccatcgtcggtaactcgtttaga

SEQ ID NO: 34853 - DNA, 25 bp, Homo sapien
gacccgtgctccaaatcgacctgta

SEQ ID NO: 34854 - DNA, 25 bp, Homo sapien
gacccgtgctcctaatcgacctgta

SEQ ID NO: 34855 - DNA, 25 bp, Homo sapien
acttccgcacacgacagtcaatgat

SEQ ID NO: 34856 - DNA, 25 bp, Homo sapien
acttccgcacaccacagtcaatgat

SEQ ID NO: 34857 - DNA, 25 bp, Homo sapien
gtccctgcaacgaaggtatctgact

SEQ ID NO: 34858 - DNA, 25 bp, Homo sapien
gtccctgcaacgtaggtatctgact

SEQ ID NO: 34859 - DNA, 25 bp, Homo sapien
acgcctatcgtgtcgtgttctagta

SEQ ID NO: 34860 - DNA, 25 bp, Homo sapien
acgcctatcgtgacgtgttctagta

SEQ ID NO: 34861 - DNA, 25 bp, Homo sapien
ggtcgtaacgtcacttgtactagat

SEQ ID NO: 34862 - DNA, 25 bp, Homo sapien
ggtcgtaacgtctcttgtactagat

SEQ ID NO: 34863 - DNA, 25 bp, Homo sapien
acgagtctgtcgtctactctgcttc

SEQ ID NO: 34864 - DNA, 25 bp, Homo sapien
acgagtctgtcgactactctgcttc

SEQ ID NO: 34865 - DNA, 25 bp, Homo sapien
tgaactcacgtgacctaagctgtat

SEQ ID NO: 34866 - DNA, 25 bp, Homo sapien
tgaactcacgtgtcctaagctgtat

SEQ ID NO: 34867 - DNA, 25 bp, Homo sapien
gtgtcacccggaggaacttctcact

SEQ ID NO: 34868 - DNA, 25 bp, Homo sapien
gtgtcacccggacgaacttctcact

SEQ ID NO: 34869 - DNA, 25 bp, Homo sapien
gctgtctcctagaagaacttccgcg

SEQ ID NO: 34870 - DNA, 25 bp, Homo sapien
gctgtctcctagtagaacttccgcg

SEQ ID NO: 34871 - DNA, 25 bp, Homo sapien
gtcttttatgaggagtttctcgacg

SEQ ID NO: 34872 - DNA, 25 bp, Homo sapien
gtcttttatgagcagtttctcgacg

SEQ ID NO: 34873 - DNA, 25 bp, Homo sapien
tttgctacatggaagttgtccgtag

SEQ ID NO: 34874 - DNA, 25 bp, Homo sapien
tttgctacatggtagttgtccgtag

SEQ ID NO: 34875 - DNA, 25 bp, Homo sapien
agttcctatccgtgttagtacagtt

SEQ ID NO: 34876 - DNA, 25 bp, Homo sapien
agttcctatccgagttagtacagtt

SEQ ID NO: 34877 - DNA, 25 bp, Homo sapien
cgaatgctcattgaacttagaacac

SEQ ID NO: 34878 - DNA, 25 bp, Homo sapien
cgaatgctcattcaacttagaacac

SEQ ID NO: 34879 - DNA, 25 bp, Homo sapien
gtcttgggtctgttcctccttccga

SEQ ID NO: 34880 - DNA, 25 bp, Homo sapien
gtcttgggtctgatcctccttccga

SEQ ID NO: 34881 - DNA, 25 bp, Homo sapien
tgtggtaaggggacacttgtcccga

SEQ ID NO: 34882 - DNA, 25 bp, Homo sapien
tgtggtaaggggtcacttgtcccga

SEQ ID NO: 34883 - DNA, 25 bp, Homo sapien
acgtacaggcgcagaacactgccca

SEQ ID NO: 34884 - DNA, 25 bp, Homo sapien
acgtacaggcgctgaacactgccca

SEQ ID NO: 34885 - DNA, 25 bp, Homo sapien
ctacgcgggagactctcctccggat

SEQ ID NO: 34886 - DNA, 25 bp, Homo sapien
ctacgcgggagagtctcctccggat

SEQ ID NO: 34887 - DNA, 25 bp, Homo sapien
ttagttacggggtgccttcttgtac

SEQ ID NO: 34888 - DNA, 25 bp, Homo sapien
ttagttacggggagccttcttgtac

SEQ ID NO: 34889 - DNA, 25 bp, Homo sapien
gtgtttctccggtaagttttcttcc

SEQ ID NO: 34890 - DNA, 25 bp, Homo sapien
gtgtttctccggaaagttttcttcc

SEQ ID NO: 34891 - DNA, 25 bp, Homo sapien
gtgttacatcatgaactttgatttc

SEQ ID NO: 34892 - DNA, 25 bp, Homo sapien
gtgttacatcatcaactttgatttc

SEQ ID NO: 34893 - DNA, 25 bp, Homo sapien
tatgactaccaatctccggggttct

SEQ ID NO: 34894 - DNA, 25 bp, Homo sapien
tatgactaccaaactccggggttct

SEQ ID NO: 34895 - DNA, 25 bp, Homo sapien
tgctgtcttagtcagggtacatgtt

SEQ ID NO: 34896 - DNA, 25 bp, Homo sapien
tgctgtcttagtgagggtacatgtt

SEQ ID NO: 34897 - DNA, 25 bp, Homo sapien
cagtgacgtcttgaccggaactgtt

SEQ ID NO: 34898 - DNA, 25 bp, Homo sapien
cagtgacgtcttcaccggaactgtt

SEQ ID NO: 34899 - DNA, 25 bp, Homo sapien
cctcgtcgaccagacagaagaccag

SEQ ID NO: 34900 - DNA, 25 bp, Homo sapien
cctcgtcgaccacacagaagaccag

SEQ ID NO: 34901 - DNA, 25 bp, Homo sapien
cttcgtcgagtgtcgagaacgccga

SEQ ID NO: 34902 - DNA, 25 bp, Homo sapien
cttcgtcgagtgacgagaacgccga

SEQ ID NO: 34903 - DNA, 25 bp, Homo sapien
atgtgtgagtcgacagtcggcacga

SEQ ID NO: 34904 - DNA, 25 bp, Homo sapien
atgtgtgagtcgtcagtcggcacga

SEQ ID NO: 34905 - DNA, 25 bp, Homo sapien
ggacggtcgtgccgtcaaacgacgc

SEQ ID NO: 34906 - DNA, 25 bp, Homo sapien
ggacggtcgtgcggtcaaacgacgc

SEQ ID NO: 34907 - DNA, 25 bp, Homo sapien
ctggacgttgacaaggcgtttgacc

SEQ ID NO: 34908 - DNA, 25 bp, Homo sapien
ctggacgttgactaggcgtttgacc

SEQ ID NO: 34909 - DNA, 25 bp, Homo sapien
aacctttttgtgtctagactaatgc

SEQ ID NO: 34910 - DNA, 25 bp, Homo sapien
aacctttttgtgactagactaatgc

SEQ ID NO: 34911 - DNA, 25 bp, Homo sapien
acgtttagggtagtgacatcgaccg

SEQ ID NO: 34912 - DNA, 25 bp, Homo sapien
acgtttagggtactgacatcgaccg

SEQ ID NO: 34913 - DNA, 25 bp, Homo sapien
gttcttaaggatcctacacacaccg

SEQ ID NO: 34914 - DNA, 25 bp, Homo sapien
gttcttaaggatgctacacacaccg

SEQ ID NO: 34915 - DNA, 25 bp, Homo sapien
gtcgtcttataattgtcatcaacag

SEQ ID NO: 34916 - DNA, 25 bp, Homo sapien
gtcgtcttataaatgtcatcaacag

SEQ ID NO: 34917 - DNA, 25 bp, Homo sapien
ttaatagagtattcagttacgtctc

SEQ ID NO: 34918 - DNA, 25 bp, Homo sapien
ttaatagagtatacagttacgtctc

SEQ ID NO: 34919 - DNA, 25 bp, Homo sapien
aatacgtagataactacggttcgtc

SEQ ID NO: 34920 - DNA, 25 bp, Homo sapien
aatacgtagatatctacggttcgtc

SEQ ID NO: 34921 - DNA, 25 bp, Homo sapien
catgaactacggtattagtatcctg

SEQ ID NO: 34922 - DNA, 25 bp, Homo sapien
catgaactacggaattagtatcctg

SEQ ID NO: 34923 - DNA, 25 bp, Homo sapien
tatgtatactctgacattgttgtca

SEQ ID NO: 34924 - DNA, 25 bp, Homo sapien
tatgtatactctcacattgttgtca

SEQ ID NO: 34925 - DNA, 25 bp, Homo sapien
tgtgtctccgtctttcgtaccttat

SEQ ID NO: 34926 - DNA, 25 bp, Homo sapien
tgtgtctccgtcattcgtaccttat

SEQ ID NO: 34927 - DNA, 25 bp, Homo sapien
tgtacccccggactcgacgacttgt

SEQ ID NO: 34928 - DNA, 25 bp, Homo sapien
tgtacccccggagtcgacgacttgt

SEQ ID NO: 34929 - DNA, 25 bp, Homo sapien
ctagtcaggtaggtattagaccatc

SEQ ID NO: 34930 - DNA, 25 bp, Homo sapien
ctagtcaggtagctattagaccatc

SEQ ID NO: 34931 - DNA, 25 bp, Homo sapien
tatgtcggcgaagacgacgtcgaga

SEQ ID NO: 34932 - DNA, 25 bp, Homo sapien
tatgtcggcgaacacgacgtcgaga

SEQ ID NO: 34933 - DNA, 25 bp, Homo sapien
aaataagtccagagagtcgtcacga

SEQ ID NO: 34934 - DNA, 25 bp, Homo sapien
aaataagtccagtgagtcgtcacga

SEQ ID NO: 34935 - DNA, 25 bp, Homo sapien
tagagcagagactggagtcgacacg

SEQ ID NO: 34936 - DNA, 25 bp, Homo sapien
tagagcagagacaggagtcgacacg

SEQ ID NO: 34937 - DNA, 25 bp, Homo sapien
ttaagtacaggcagaccgtcgaact

SEQ ID NO: 34938 - DNA, 25 bp, Homo sapien
ttaagtacaggctgaccgtcgaact

SEQ ID NO: 34939 - DNA, 25 bp, Homo sapien
cgtttgagatataccgatgtgctct

SEQ ID NO: 34940 - DNA, 25 bp, Homo sapien
cgtttgagatattccgatgtgctct

SEQ ID NO: 34941 - DNA, 25 bp, Homo sapien
atgtcaggatattccgtccgttacc

SEQ ID NO: 34942 - DNA, 25 bp, Homo sapien
atgtcaggatataccgtccgttacc

SEQ ID NO: 34943 - DNA, 25 bp, Homo sapien
gagtaaggttcttggtccgactacc

SEQ ID NO: 34944 - DNA, 25 bp, Homo sapien
gagtaaggttctaggtccgactacc

SEQ ID NO: 34945 - DNA, 25 bp, Homo sapien
tcgaggagttataggtccatcgact

SEQ ID NO: 34946 - DNA, 25 bp, Homo sapien
tcgaggagttattggtccatcgact

SEQ ID NO: 34947 - DNA, 25 bp, Homo sapien
ggagcgcgaagaggacttaccgact

SEQ ID NO: 34948 - DNA, 25 bp, Homo sapien
ggagcgcgaagacgacttaccgact

SEQ ID NO: 34949 - DNA, 25 bp, Homo sapien
ttattagtacaggacgtcaatgact

SEQ ID NO: 34950 - DNA, 25 bp, Homo sapien
ttattagtacagcacgtcaatgact

SEQ ID NO: 34951 - DNA, 25 bp, Homo sapien
tcgaaacgacggtaccgccgtacga

SEQ ID NO: 34952 - DNA, 25 bp, Homo sapien
tcgaaacgacggaaccgccgtacga

SEQ ID NO: 34953 - DNA, 25 bp, Homo sapien
agacgaaccggaaggagtcgtacac

SEQ ID NO: 34954 - DNA, 25 bp, Homo sapien
agacgaaccggatggagtcgtacac

SEQ ID NO: 34955 - DNA, 25 bp, Homo sapien
tctcgagtcacgtggtgagtccgta

SEQ ID NO: 34956 - DNA, 25 bp, Homo sapien
tctcgagtcacgaggtgagtccgta

SEQ ID NO: 34957 - DNA, 25 bp, Homo sapien
agatccggagacgttgttagtccag

SEQ ID NO: 34958 - DNA, 25 bp, Homo sapien
agatccggagaccttgttagtccag

SEQ ID NO: 34959 - DNA, 25 bp, Homo sapien
aagaagtgaataattactactccag

SEQ ID NO: 34960 - DNA, 25 bp, Homo sapien
aagaagtgaatatttactactccag

SEQ ID NO: 34961 - DNA, 25 bp, Homo sapien
tagacaggacgttttactgtctccc

SEQ ID NO: 34962 - DNA, 25 bp, Homo sapien
tagacaggacgtattactgtctccc

SEQ ID NO: 34963 - DNA, 25 bp, Homo sapien
aggttcgtgccgtcggtcctttcgg

SEQ ID NO: 34964 - DNA, 25 bp, Homo sapien
aggttcgtgccgacggtcctttcgg

SEQ ID NO: 34965 - DNA, 25 bp, Homo sapien
cctactcccgaggtccgtcgagtga

SEQ ID NO: 34966 - DNA, 25 bp, Homo sapien
cctactcccgagctccgtcgagtga

SEQ ID NO: 34967 - DNA, 25 bp, Homo sapien
ccggtatcctctcctagtctggtta

SEQ ID NO: 34968 - DNA, 25 bp, Homo sapien
ccggtatcctctgctagtctggtta

SEQ ID NO: 34969 - DNA, 25 bp, Homo sapien
ttcgtgtcactttctagtggatata

SEQ ID NO: 34970 - DNA, 25 bp, Homo sapien
ttcgtgtcacttactagtggatata

SEQ ID NO: 34971 - DNA, 25 bp, Homo sapien
tagtccgtttcagtatcttggtaaa

SEQ ID NO: 34972 - DNA, 25 bp, Homo sapien
tagtccgtttcactatcttggtaaa

SEQ ID NO: 34973 - DNA, 25 bp, Homo sapien
cgaggtcaatcttgtatctagtaat

SEQ ID NO: 34974 - DNA, 25 bp, Homo sapien
cgaggtcaatctagtatctagtaat

SEQ ID NO: 34975 - DNA, 25 bp, Homo sapien
ggaccggacactttattgttaaagt

SEQ ID NO: 34976 - DNA, 25 bp, Homo sapien
ggaccggacactatattgttaaagt

SEQ ID NO: 34977 - DNA, 25 bp, Homo sapien
gtaccgtgttttaattctctcatgt

SEQ ID NO: 34978 - DNA, 25 bp, Homo sapien
gtaccgtgtttttattctctcatgt

SEQ ID NO: 34979 - DNA, 25 bp, Homo sapien
ccgactgtaggatgtactcttgtgt

SEQ ID NO: 34980 - DNA, 25 bp, Homo sapien
ccgactgtaggaagtactcttgtgt

SEQ ID NO: 34981 - DNA, 25 bp, Homo sapien
ggttccatctttttcacctcgtccg

SEQ ID NO: 34982 - DNA, 25 bp, Homo sapien
ggttccatctttatcacctcgtccg

SEQ ID NO: 34983 - DNA, 25 bp, Homo sapien
tttccatacctcgtcttgtgttcgg

SEQ ID NO: 34984 - DNA, 25 bp, Homo sapien
tttccatacctcctcttgtgttcgg

SEQ ID NO: 34985 - DNA, 25 bp, Homo sapien
gacgtggtggtaagcccgtgtctca

SEQ ID NO: 34986 - DNA, 25 bp, Homo sapien
gacgtggtggtatgcccgtgtctca

SEQ ID NO: 34987 - DNA, 25 bp, Homo sapien
agactgtagttttcacctaggttcc

SEQ ID NO: 34988 - DNA, 25 bp, Homo sapien
agactgtagtttacacctaggttcc

SEQ ID NO: 34989 - DNA, 25 bp, Homo sapien
tcacccgtagttctaggggctcccg

SEQ ID NO: 34990 - DNA, 25 bp, Homo sapien
tcacccgtagttgtaggggctcccg

SEQ ID NO: 34991 - DNA, 25 bp, Homo sapien
tctgacgatcggtggagtctccgag

SEQ ID NO: 34992 - DNA, 25 bp, Homo sapien
tctgacgatcggaggagtctccgag

SEQ ID NO: 34993 - DNA, 25 bp, Homo sapien
tcgttacgctgctctgttctaccac

SEQ ID NO: 34994 - DNA, 25 bp, Homo sapien
tcgttacgctgcactgttctaccac

SEQ ID NO: 34995 - DNA, 25 bp, Homo sapien
gagactgacgactctcattccgtaa

SEQ ID NO: 34996 - DNA, 25 bp, Homo sapien
gagactgacgacactcattccgtaa

SEQ ID NO: 34997 - DNA, 25 bp, Homo sapien
tgagaggatagtacccatctctaac

SEQ ID NO: 34998 - DNA, 25 bp, Homo sapien
tgagaggatagttcccatctctaac

SEQ ID NO: 34999 - DNA, 25 bp, Homo sapien
ggtaggaaagatccatctctgtata

SEQ ID NO: 35000 - DNA, 25 bp, Homo sapien
ggtaggaaagatgcatctctgtata

SEQ ID NO: 35001 - DNA, 25 bp, Homo sapien
ggactaatctaaatccgagtctaaa

SEQ ID NO: 35002 - DNA, 25 bp, Homo sapien
ggactaatctaattccgagtctaaa

SEQ ID NO: 35003 - DNA, 25 bp, Homo sapien
agaggatacacacaagagactacat

SEQ ID NO: 35004 - DNA, 25 bp, Homo sapien
agaggatacacagaagagactacat

SEQ ID NO: 35005 - DNA, 25 bp, Homo sapien
accaaagaaccatcgacgacggaaa

SEQ ID NO: 35006 - DNA, 25 bp, Homo sapien
accaaagaaccaacgacgacggaaa

SEQ ID NO: 35007 - DNA, 25 bp, Homo sapien
tctagacgacgtcacccagtgacca

SEQ ID NO: 35008 - DNA, 25 bp, Homo sapien
tctagacgacgtgacccagtgacca

SEQ ID NO: 35009 - DNA, 25 bp, Homo sapien
tctagtgtaccgatctttcaccgtc

SEQ ID NO: 35010 - DNA, 25 bp, Homo sapien
tctagtgtaccgttctttcaccgtc

SEQ ID NO: 35011 - DNA, 25 bp, Homo sapien
tgacacgtgtccttttatccgtctc

SEQ ID NO: 35012 - DNA, 25 bp, Homo sapien
tgacacgtgtccatttatccgtctc

SEQ ID NO: 35013 - DNA, 25 bp, Homo sapien
caagagtactgagttctgtctcgta

SEQ ID NO: 35014 - DNA, 25 bp, Homo sapien
caagagtactgacttctgtctcgta

SEQ ID NO: 35015 - DNA, 25 bp, Homo sapien
agtgtgtctacttagagtcatctcc

SEQ ID NO: 35016 - DNA, 25 bp, Homo sapien
agtgtgtctactaagagtcatctcc

SEQ ID NO: 35017 - DNA, 25 bp, Homo sapien
ctagtatgtttagatagtactcttc

SEQ ID NO: 35018 - DNA, 25 bp, Homo sapien
ctagtatgtttacatagtactcttc

SEQ ID NO: 35019 - DNA, 25 bp, Homo sapien
tgtaatgtatgactacatacgatcc

SEQ ID NO: 35020 - DNA, 25 bp, Homo sapien
tgtaatgtatgagtacatacgatcc

SEQ ID NO: 35021 - DNA, 25 bp, Homo sapien
agagaaattagaagtggacactccg

SEQ ID NO: 35022 - DNA, 25 bp, Homo sapien
agagaaattagatgtggacactccg

SEQ ID NO: 35023 - DNA, 25 bp, Homo sapien
tcgggaacccgacgaccagagagtg

SEQ ID NO: 35024 - DNA, 25 bp, Homo sapien
tcgggaacccgaggaccagagagtg

SEQ ID NO: 35025 - DNA, 25 bp, Homo sapien
atgaatcgtagaggactcttacctg

SEQ ID NO: 35026 - DNA, 25 bp, Homo sapien
atgaatcgtagacgactcttacctg

SEQ ID NO: 35027 - DNA, 25 bp, Homo sapien
actttgaaaagacacataactcgtg

SEQ ID NO: 35028 - DNA, 25 bp, Homo sapien
actttgaaaagagacataactcgtg

SEQ ID NO: 35029 - DNA, 25 bp, Homo sapien
gggaagtacggacgtaatactgtct

SEQ ID NO: 35030 - DNA, 25 bp, Homo sapien
gggaagtacggaggtaatactgtct

SEQ ID NO: 35031 - DNA, 25 bp, Homo sapien
agtggacacgggacgtccctcgtct

SEQ ID NO: 35032 - DNA, 25 bp, Homo sapien
agtggacacgggtcgtccctcgtct

SEQ ID NO: 35033 - DNA, 25 bp, Homo sapien
cgctagtattctcttcgtccctgct

SEQ ID NO: 35034 - DNA, 25 bp, Homo sapien
cgctagtattctgttcgtccctgct

SEQ ID NO: 35035 - DNA, 25 bp, Homo sapien
cggacgatgaactccgtccctgtcg

SEQ ID NO: 35036 - DNA, 25 bp, Homo sapien
cggacgatgaacaccgtccctgtcg

SEQ ID NO: 35037 - DNA, 25 bp, Homo sapien
gaagagaactcgtcagactcctctc

SEQ ID NO: 35038 - DNA, 25 bp, Homo sapien
gaagagaactcgacagactcctctc

SEQ ID NO: 35039 - DNA, 25 bp, Homo sapien
aacactaccggaacttgtctcgtac

SEQ ID NO: 35040 - DNA, 25 bp, Homo sapien
aacactaccggatcttgtctcgtac

SEQ ID NO: 35041 - DNA, 25 bp, Homo sapien
ttcatcgcacggttcacatcgagta

SEQ ID NO: 35042 - DNA, 25 bp, Homo sapien
ttcatcgcacggatcacatcgagta

SEQ ID NO: 35043 - DNA, 25 bp, Homo sapien
ataatgaacgcaatactcacgagtg

SEQ ID NO: 35044 - DNA, 25 bp, Homo sapien
ataatgaacgcattactcacgagtg

SEQ ID NO: 35045 - DNA, 25 bp, Homo sapien
gtatcgaatcttcacctacacaagg

SEQ ID NO: 35046 - DNA, 25 bp, Homo sapien
gtatcgaatcttgacctacacaagg

SEQ ID NO: 35047 - DNA, 25 bp, Homo sapien
gttgtgattctctacccacgacaag

SEQ ID NO: 35048 - DNA, 25 bp, Homo sapien
gttgtgattctcaacccacgacaag

SEQ ID NO: 35049 - DNA, 25 bp, Homo sapien
tgtttcgagttccaacccagtctga

SEQ ID NO: 35050 - DNA, 25 bp, Homo sapien
tgtttcgagttcgaacccagtctga

SEQ ID NO: 35051 - DNA, 25 bp, Homo sapien
gttacaccttagaccggagactgag

SEQ ID NO: 35052 - DNA, 25 bp, Homo sapien
gttacaccttagtccggagactgag

SEQ ID NO: 35053 - DNA, 25 bp, Homo sapien
agttgactttcgtccgtagtccctc

SEQ ID NO: 35054 - DNA, 25 bp, Homo sapien
agttgactttcgaccgtagtccctc

SEQ ID NO: 35055 - DNA, 25 bp, Homo sapien
atcggagtctcttcctgagacgttc

SEQ ID NO: 35056 - DNA, 25 bp, Homo sapien
atcggagtctctacctgagacgttc

SEQ ID NO: 35057 - DNA, 25 bp, Homo sapien
ctgagggaactgttcccaccgtctc

SEQ ID NO: 35058 - DNA, 25 bp, Homo sapien
ctgagggaactgatcccaccgtctc

SEQ ID NO: 35059 - DNA, 25 bp, Homo sapien
tgagtgtcaactagcgtccatcact

SEQ ID NO: 35060 - DNA, 25 bp, Homo sapien
tgagtgtcaacttgcgtccatcact

SEQ ID NO: 35061 - DNA, 25 bp, Homo sapien
ttccggtcttaaccatcgtgttttt

SEQ ID NO: 35062 - DNA, 25 bp, Homo sapien
ttccggtcttaagcatcgtgttttt

SEQ ID NO: 35063 - DNA, 25 bp, Homo sapien
atagccttaggtcctgtgttgttct

SEQ ID NO: 35064 - DNA, 25 bp, Homo sapien
atagccttaggtgctgtgttgttct

SEQ ID NO: 35065 - DNA, 25 bp, Homo sapien
tcgtgtcaagtagtacctttgtaaa

SEQ ID NO: 35066 - DNA, 25 bp, Homo sapien
tcgtgtcaagtactacctttgtaaa

SEQ ID NO: 35067 - DNA, 25 bp, Homo sapien
gtaatttgacctgacgtcgagtaag

SEQ ID NO: 35068 - DNA, 25 bp, Homo sapien
gtaatttgacctcacgtcgagtaag

SEQ ID NO: 35069 - DNA, 25 bp, Homo sapien
gtgtgtctacttagagtcatctcct

SEQ ID NO: 35070 - DNA, 25 bp, Homo sapien
gtgtgtctactttgagtcatctcct

SEQ ID NO: 35071 - DNA, 25 bp, Homo sapien
aatttattgtgttcacgaacgacgt

SEQ ID NO: 35072 - DNA, 25 bp, Homo sapien
aatttattgtgtacacgaacgacgt

SEQ ID NO: 35073 - DNA, 25 bp, Homo sapien
tgtctctattctatactcgaagtag

SEQ ID NO: 35074 - DNA, 25 bp, Homo sapien
tgtctctattctttactcgaagtag

SEQ ID NO: 35075 - DNA, 25 bp, Homo sapien
ttcgtataacgaaaccgttacgtag

SEQ ID NO: 35076 - DNA, 25 bp, Homo sapien
ttcgtataacgataccgttacgtag

SEQ ID NO: 35077 - DNA, 25 bp, Homo sapien
tcttatctatacagaaaccggctcg

SEQ ID NO: 35078 - DNA, 25 bp, Homo sapien
tcttatctatactgaaaccggctcg

SEQ ID NO: 35079 - DNA, 25 bp, Homo sapien
gtttcagtgtacctgtcccggtctc

SEQ ID NO: 35080 - DNA, 25 bp, Homo sapien
gtttcagtgtacgtgtcccggtctc

SEQ ID NO: 35081 - DNA, 25 bp, Homo sapien
tccgagacgacggtccaatcgtcgt

SEQ ID NO: 35082 - DNA, 25 bp, Homo sapien
tccgagacgacgctccaatcgtcgt

SEQ ID NO: 35083 - DNA, 25 bp, Homo sapien
aggaggtccgcgaaccaacaactca

SEQ ID NO: 35084 - DNA, 25 bp, Homo sapien
aggaggtccgcgtaccaacaactca

SEQ ID NO: 35085 - DNA, 25 bp, Homo sapien
aaggaatcacagaccgtgaaagtca

SEQ ID NO: 35086 - DNA, 25 bp, Homo sapien
aaggaatcacagtccgtgaaagtca

SEQ ID NO: 35087 - DNA, 25 bp, Homo sapien
atcgtcattaaatagtctccagtga

SEQ ID NO: 35088 - DNA, 25 bp, Homo sapien
atcgtcattaaaaagtctccagtga

SEQ ID NO: 35089 - DNA, 25 bp, Homo sapien
gtagataacatacatctagctagaa

SEQ ID NO: 35090 - DNA, 25 bp, Homo sapien
gtagataacatagatctagctagaa

SEQ ID NO: 35091 - DNA, 25 bp, Homo sapien
gtagtaaacaccaccgtacaaaacg

SEQ ID NO: 35092 - DNA, 25 bp, Homo sapien
gtagtaaacacctccgtacaaaacg

SEQ ID NO: 35093 - DNA, 25 bp, Homo sapien
gtacataccacaccactaagcgaag

SEQ ID NO: 35094 - DNA, 25 bp, Homo sapien
gtacataccacagcactaagcgaag

SEQ ID NO: 35095 - DNA, 25 bp, Homo sapien
tttaaaacacgatgacaatctacta

SEQ ID NO: 35096 - DNA, 25 bp, Homo sapien
tttaaaacacgaagacaatctacta

SEQ ID NO: 35097 - DNA, 25 bp, Homo sapien
atttcggaaaaagagacttactcta

SEQ ID NO: 35098 - DNA, 25 bp, Homo sapien
atttcggaaaaacagacttactcta

SEQ ID NO: 35099 - DNA, 25 bp, Homo sapien
ggtgaaacagacttcaatgtatatc

SEQ ID NO: 35100 - DNA, 25 bp, Homo sapien
ggtgaaacagacatcaatgtatatc

SEQ ID NO: 35101 - DNA, 25 bp, Homo sapien
aaccagagtgactgaagttcttact

SEQ ID NO: 35102 - DNA, 25 bp, Homo sapien
aaccagagtgacagaagttcttact

SEQ ID NO: 35103 - DNA, 25 bp, Homo sapien
cgaggacggtgtgatagtcatcaaa

SEQ ID NO: 35104 - DNA, 25 bp, Homo sapien
cgaggacggtgtcatagtcatcaaa

SEQ ID NO: 35105 - DNA, 25 bp, Homo sapien
agcaggtaccattacatcaagaaca

SEQ ID NO: 35106 - DNA, 25 bp, Homo sapien
agcaggtaccataacatcaagaaca

SEQ ID NO: 35107 - DNA, 25 bp, Homo sapien
ggcgatacagttgtacgaacgtaaa

SEQ ID NO: 35108 - DNA, 25 bp, Homo sapien
ggcgatacagttctacgaacgtaaa

SEQ ID NO: 35109 - DNA, 25 bp, Homo sapien
gggtcgacttttacacacgtaacga

SEQ ID NO: 35110 - DNA, 25 bp, Homo sapien
gggtcgactttttcacacgtaacga

SEQ ID NO: 35111 - DNA, 25 bp, Homo sapien
gcgttagtcttttgtctatacgacc

SEQ ID NO: 35112 - DNA, 25 bp, Homo sapien
gcgttagtctttagtctatacgacc

SEQ ID NO: 35113 - DNA, 25 bp, Homo sapien
gtctcggaccctagtacgttcgacc

SEQ ID NO: 35114 - DNA, 25 bp, Homo sapien
gtctcggacccttgtacgttcgacc

SEQ ID NO: 35115 - DNA, 25 bp, Homo sapien
ctggaacgtacgtctgtatagttcc

SEQ ID NO: 35116 - DNA, 25 bp, Homo sapien
ctggaacgtacgactgtatagttcc

SEQ ID NO: 35117 - DNA, 25 bp, Homo sapien
atgagaagtacaactgtcacttctg

SEQ ID NO: 35118 - DNA, 25 bp, Homo sapien
atgagaagtacatctgtcacttctg

SEQ ID NO: 35119 - DNA, 25 bp, Homo sapien
tccagtactaacagattgtcccttg

SEQ ID NO: 35120 - DNA, 25 bp, Homo sapien
tccagtactaactgattgtcccttg

SEQ ID NO: 35121 - DNA, 25 bp, Homo sapien
tctcgagaatttcctctgtaccttg

SEQ ID NO: 35122 - DNA, 25 bp, Homo sapien
tctcgagaatttgctctgtaccttg

SEQ ID NO: 35123 - DNA, 25 bp, Homo sapien
tccttaagggtctcggtgtagtccg

SEQ ID NO: 35124 - DNA, 25 bp, Homo sapien
tccttaagggtcacggtgtagtccg

SEQ ID NO: 35125 - DNA, 25 bp, Homo sapien
tgttcagtaaaataagtctactccg

SEQ ID NO: 35126 - DNA, 25 bp, Homo sapien
tgttcagtaaaaaaagtctactccg

SEQ ID NO: 35127 - DNA, 25 bp, Homo sapien
gaacacggacccaaacgacatcagc

SEQ ID NO: 35128 - DNA, 25 bp, Homo sapien
gaacacggaccctaacgacatcagc

SEQ ID NO: 35129 - DNA, 25 bp, Homo sapien
ttataacgacactactccgggtccc

SEQ ID NO: 35130 - DNA, 25 bp, Homo sapien
ttataacgacacaactccgggtccc

SEQ ID NO: 35131 - DNA, 25 bp, Homo sapien
aacttaagtcgaattgagtcgaccc

SEQ ID NO: 35132 - DNA, 25 bp, Homo sapien
aacttaagtcgatttgagtcgaccc

SEQ ID NO: 35133 - DNA, 25 bp, Homo sapien
gggttagtaccctttataggtcggt

SEQ ID NO: 35134 - DNA, 25 bp, Homo sapien
gggttagtacccattataggtcggt

SEQ ID NO: 35135 - DNA, 25 bp, Homo sapien
gggggtactgtctccgtacttcgac

SEQ ID NO: 35136 - DNA, 25 bp, Homo sapien
gggggtactgtcaccgtacttcgac

SEQ ID NO: 35137 - DNA, 25 bp, Homo sapien
ggggtgacaccgagtccgaccacga

SEQ ID NO: 35138 - DNA, 25 bp, Homo sapien
ggggtgacaccgtgtccgaccacga

SEQ ID NO: 35139 - DNA, 25 bp, Homo sapien
agtcgaacctcaacgggagctagac

SEQ ID NO: 35140 - DNA, 25 bp, Homo sapien
agtcgaacctcatcgggagctagac

SEQ ID NO: 35141 - DNA, 25 bp, Homo sapien
cccgacttagtttggtgtagaccta

SEQ ID NO: 35142 - DNA, 25 bp, Homo sapien
cccgacttagttaggtgtagaccta

SEQ ID NO: 35143 - DNA, 25 bp, Homo sapien
tgactagtattttagtgggacctcc

SEQ ID NO: 35144 - DNA, 25 bp, Homo sapien
tgactagtatttaagtgggacctcc

SEQ ID NO: 35145 - DNA, 25 bp, Homo sapien
gtggtatcttgaagaggtaactccc

SEQ ID NO: 35146 - DNA, 25 bp, Homo sapien
gtggtatcttgatgaggtaactccc

SEQ ID NO: 35147 - DNA, 25 bp, Homo sapien
cgggttcgtctcgtcgaggaatccc

SEQ ID NO: 35148 - DNA, 25 bp, Homo sapien
cgggttcgtctcctcgaggaatccc

SEQ ID NO: 35149 - DNA, 25 bp, Homo sapien
aggttttcaccctggggacaccgac

SEQ ID NO: 35150 - DNA, 25 bp, Homo sapien
aggttttcacccaggggacaccgac

SEQ ID NO: 35151 - DNA, 25 bp, Homo sapien
gattccgatctcgtcgacatctcac

SEQ ID NO: 35152 - DNA, 25 bp, Homo sapien
gattccgatctcctcgacatctcac

SEQ ID NO: 35153 - DNA, 25 bp, Homo sapien
cccgtcgtgtgatctggttgaaccc

SEQ ID NO: 35154 - DNA, 25 bp, Homo sapien
cccgtcgtgtgaactggttgaaccc

SEQ ID NO: 35155 - DNA, 25 bp, Homo sapien
ttcggtggtactacggagagacccg

SEQ ID NO: 35156 - DNA, 25 bp, Homo sapien
ttcggtggtacttcggagagacccg

SEQ ID NO: 35157 - DNA, 25 bp, Homo sapien
tatctcggttattcaggtactacaa

SEQ ID NO: 35158 - DNA, 25 bp, Homo sapien
tatctcggttatacaggtactacaa

SEQ ID NO: 35159 - DNA, 25 bp, Homo sapien
ggccgacctcttttacaaacctaag

SEQ ID NO: 35160 - DNA, 25 bp, Homo sapien
ggccgacctcttatacaaacctaag

SEQ ID NO: 35161 - DNA, 25 bp, Homo sapien
agtctcgcccttaaggaattcagac

SEQ ID NO: 35162 - DNA, 25 bp, Homo sapien
agtctcgccctttaggaattcagac

SEQ ID NO: 35163 - DNA, 25 bp, Homo sapien
gtgtctacattctggttcaaacaac

SEQ ID NO: 35164 - DNA, 25 bp, Homo sapien
gtgtctacattcaggttcaaacaac

SEQ ID NO: 35165 - DNA, 25 bp, Homo sapien
gtgtcttaagtgactccagttgact

SEQ ID NO: 35166 - DNA, 25 bp, Homo sapien
gtgtcttaagtgtctccagttgact

SEQ ID NO: 35167 - DNA, 25 bp, Homo sapien
ggtacacaagtgtctacccgtaaga

SEQ ID NO: 35168 - DNA, 25 bp, Homo sapien
ggtacacaagtgactacccgtaaga

SEQ ID NO: 35169 - DNA, 25 bp, Homo sapien
atgaaccactgcacgtctcgagaga

SEQ ID NO: 35170 - DNA, 25 bp, Homo sapien
atgaaccactgctcgtctcgagaga

SEQ ID NO: 35171 - DNA, 25 bp, Homo sapien
ggaacgcccgatccacggccgtgta

SEQ ID NO: 35172 - DNA, 25 bp, Homo sapien
ggaacgcccgatgcacggccgtgta

SEQ ID NO: 35173 - DNA, 25 bp, Homo sapien
cacgtagcaggaacgccgcggcagc

SEQ ID NO: 35174 - DNA, 25 bp, Homo sapien
cacgtagcaggatcgccgcggcagc

SEQ ID NO: 35175 - DNA, 25 bp, Homo sapien
acccgtggagtcgaaccggtcaagg

SEQ ID NO: 35176 - DNA, 25 bp, Homo sapien
acccgtggagtccaaccggtcaagg

SEQ ID NO: 35177 - DNA, 25 bp, Homo sapien
ctgaaagacggaaccggtaccactc

SEQ ID NO: 35178 - DNA, 25 bp, Homo sapien
ctgaaagacggatccggtaccactc

SEQ ID NO: 35179 - DNA, 25 bp, Homo sapien
ttctaccgtagacactgatgacccc

SEQ ID NO: 35180 - DNA, 25 bp, Homo sapien
ttctaccgtagagactgatgacccc

SEQ ID NO: 35181 - DNA, 25 bp, Homo sapien
actaaggagtgtatagactccccag

SEQ ID NO: 35182 - DNA, 25 bp, Homo sapien
actaaggagtgtttagactccccag

SEQ ID NO: 35183 - DNA, 25 bp, Homo sapien
ggtcagggagtttcctccgtccctc

SEQ ID NO: 35184 - DNA, 25 bp, Homo sapien
ggtcagggagttacctccgtccctc

SEQ ID NO: 35185 - DNA, 25 bp, Homo sapien
cttatgtgagggagtctacccacct

SEQ ID NO: 35186 - DNA, 25 bp, Homo sapien
cttatgtgagggtgtctacccacct

SEQ ID NO: 35187 - DNA, 25 bp, Homo sapien
gtgtaggtgaaggtgtgttaacccc

SEQ ID NO: 35188 - DNA, 25 bp, Homo sapien
gtgtaggtgaagctgtgttaacccc

SEQ ID NO: 35189 - DNA, 25 bp, Homo sapien
gacgaagtcgaagcagaggaaccca

SEQ ID NO: 35190 - DNA, 25 bp, Homo sapien
gacgaagtcgaaccagaggaaccca

SEQ ID NO: 35191 - DNA, 25 bp, Homo sapien
acacaaacaacaggtgaactcggac

SEQ ID NO: 35192 - DNA, 25 bp, Homo sapien
acacaaacaacacgtgaactcggac

SEQ ID NO: 35193 - DNA, 25 bp, Homo sapien
aagaaccgtaagagtggcgtcggac

SEQ ID NO: 35194 - DNA, 25 bp, Homo sapien
aagaaccgtaagtgtggcgtcggac

SEQ ID NO: 35195 - DNA, 25 bp, Homo sapien
cgattacaagacatttaggtctttt

SEQ ID NO: 35196 - DNA, 25 bp, Homo sapien
cgattacaagacttttaggtctttt

SEQ ID NO: 35197 - DNA, 25 bp, Homo sapien
aatccgttcctttccgtgtagtata

SEQ ID NO: 35198 - DNA, 25 bp, Homo sapien
aatccgttccttaccgtgtagtata

SEQ ID NO: 35199 - DNA, 25 bp, Homo sapien
aaaatccgttcagttaatctgttcg

SEQ ID NO: 35200 - DNA, 25 bp, Homo sapien
aaaatccgttcacttaatctgttcg

SEQ ID NO: 35201 - DNA, 25 bp, Homo sapien
atgtcatcattgtccatagtgaaga

SEQ ID NO: 35202 - DNA, 25 bp, Homo sapien
atgtcatcattgaccatagtgaaga

SEQ ID NO: 35203 - DNA, 25 bp, Homo sapien
ttcttacagttctcacataagatgg

SEQ ID NO: 35204 - DNA, 25 bp, Homo sapien
ttcttacagttcacacataagatgg

SEQ ID NO: 35205 - DNA, 25 bp, Homo sapien
tgttgggtcccgaagttagaccagt

SEQ ID NO: 35206 - DNA, 25 bp, Homo sapien
tgttgggtcccgtagttagaccagt

SEQ ID NO: 35207 - DNA, 25 bp, Homo sapien
ttgtcatgtcacacctccgagagta

SEQ ID NO: 35208 - DNA, 25 bp, Homo sapien
ttgtcatgtcactcctccgagagta

SEQ ID NO: 35209 - DNA, 25 bp, Homo sapien
cgtcgtatccgtagggactctgagg

SEQ ID NO: 35210 - DNA, 25 bp, Homo sapien
cgtcgtatccgttgggactctgagg

SEQ ID NO: 35211 - DNA, 25 bp, Homo sapien
attcttacctcttggtactgaggtg

SEQ ID NO: 35212 - DNA, 25 bp, Homo sapien
attcttacctctaggtactgaggtg

SEQ ID NO: 35213 - DNA, 25 bp, Homo sapien
tactagaaacggttacgggaactgt

SEQ ID NO: 35214 - DNA, 25 bp, Homo sapien
tactagaaacggatacgggaactgt

SEQ ID NO: 35215 - DNA, 25 bp, Homo sapien
caactagaccaggagggacaacggt

SEQ ID NO: 35216 - DNA, 25 bp, Homo sapien
caactagaccagcagggacaacggt

SEQ ID NO: 35217 - DNA, 25 bp, Homo sapien
ccgttaggcctaaggcctcgcgtcg

SEQ ID NO: 35218 - DNA, 25 bp, Homo sapien
ccgttaggcctatggcctcgcgtcg

SEQ ID NO: 35219 - DNA, 25 bp, Homo sapien
gttaaggggcccatcgtcatccgcg

SEQ ID NO: 35220 - DNA, 25 bp, Homo sapien
gttaaggggcccttcgtcatccgcg

SEQ ID NO: 35221 - DNA, 25 bp, Homo sapien
agtagaccttcctgagatcaccgac

SEQ ID NO: 35222 - DNA, 25 bp, Homo sapien
agtagaccttccagagatcaccgac

SEQ ID NO: 35223 - DNA, 25 bp, Homo sapien
gaatgtatccgtacactaaagtcca

SEQ ID NO: 35224 - DNA, 25 bp, Homo sapien
gaatgtatccgttcactaaagtcca

SEQ ID NO: 35225 - DNA, 25 bp, Homo sapien
atgtgtctatctccaccgtgacccg

SEQ ID NO: 35226 - DNA, 25 bp, Homo sapien
atgtgtctatctgcaccgtgacccg

SEQ ID NO: 35227 - DNA, 25 bp, Homo sapien
tttatcgtcgttttcgtgaattccc

SEQ ID NO: 35228 - DNA, 25 bp, Homo sapien
tttatcgtcgttatcgtgaattccc

SEQ ID NO: 35229 - DNA, 25 bp, Homo sapien
ctttatgtatggactggagtttctc

SEQ ID NO: 35230 - DNA, 25 bp, Homo sapien
ctttatgtatggtctggagtttctc

SEQ ID NO: 35231 - DNA, 25 bp, Homo sapien
acttgtgatgtcgtccgtgggacgt

SEQ ID NO: 35232 - DNA, 25 bp, Homo sapien
acttgtgatgtcctccgtgggacgt

SEQ ID NO: 35233 - DNA, 25 bp, Homo sapien
accttctgagtccttacgtaggtga

SEQ ID NO: 35234 - DNA, 25 bp, Homo sapien
accttctgagtcgttacgtaggtga

SEQ ID NO: 35235 - DNA, 25 bp, Homo sapien
tcattagttctttcacgtagtaccg

SEQ ID NO: 35236 - DNA, 25 bp, Homo sapien
tcattagttcttacacgtagtaccg

SEQ ID NO: 35237 - DNA, 25 bp, Homo sapien
aaaaatgtacatcaccagtgtagaa

SEQ ID NO: 35238 - DNA, 25 bp, Homo sapien
aaaaatgtacatgaccagtgtagaa

SEQ ID NO: 35239 - DNA, 25 bp, Homo sapien
aacgcaggacgtcatggatttaaag

SEQ ID NO: 35240 - DNA, 25 bp, Homo sapien
aacgcaggacgtgatggatttaaag

SEQ ID NO: 35241 - DNA, 25 bp, Homo sapien
gtaagcgtcggtggtcatcatcagg

SEQ ID NO: 35242 - DNA, 25 bp, Homo sapien
gtaagcgtcggtcgtcatcatcagg

SEQ ID NO: 35243 - DNA, 25 bp, Homo sapien
acgacaccgggagttgagatccggt

SEQ ID NO: 35244 - DNA, 25 bp, Homo sapien
acgacaccgggacttgagatccggt

SEQ ID NO: 35245 - DNA, 25 bp, Homo sapien
gacgtaatcaatttttactgacaga

SEQ ID NO: 35246 - DNA, 25 bp, Homo sapien
gacgtaatcaatatttactgacaga

SEQ ID NO: 35247 - DNA, 25 bp, Homo sapien
tgctttcggatgattgactagaccc

SEQ ID NO: 35248 - DNA, 25 bp, Homo sapien
tgctttcggatgtttgactagaccc

SEQ ID NO: 35249 - DNA, 25 bp, Homo sapien
cgagtttggtgacactgtccgaccc

SEQ ID NO: 35250 - DNA, 25 bp, Homo sapien
cgagtttggtgagactgtccgaccc

SEQ ID NO: 35251 - DNA, 25 bp, Homo sapien
tataatatcgggacatactatgttc

SEQ ID NO: 35252 - DNA, 25 bp, Homo sapien
tataatatcgggtcatactatgttc

SEQ ID NO: 35253 - DNA, 25 bp, Homo sapien
ctaacgtggcgtgaccaatacagaa

SEQ ID NO: 35254 - DNA, 25 bp, Homo sapien
ctaacgtggcgtcaccaatacagaa

SEQ ID NO: 35255 - DNA, 25 bp, Homo sapien
tggtcaacggcgaccggagagacaa

SEQ ID NO: 35256 - DNA, 25 bp, Homo sapien
tggtcaacggcgtccggagagacaa

SEQ ID NO: 35257 - DNA, 25 bp, Homo sapien
ctcggtcaagggttccatgtgcaag

SEQ ID NO: 35258 - DNA, 25 bp, Homo sapien
ctcggtcaagggatccatgtgcaag

SEQ ID NO: 35259 - DNA, 25 bp, Homo sapien
ttcggggtcccgaaacactgggaca

SEQ ID NO: 35260 - DNA, 25 bp, Homo sapien
ttcggggtcccgtaacactgggaca

SEQ ID NO: 35261 - DNA, 25 bp, Homo sapien
ggagctcgaggaaccgctcgtgcac

SEQ ID NO: 35262 - DNA, 25 bp, Homo sapien
ggagctcgaggatccgctcgtgcac

SEQ ID NO: 35263 - DNA, 25 bp, Homo sapien
ccgacgtcacccaaacggttaaggt

SEQ ID NO: 35264 - DNA, 25 bp, Homo sapien
ccgacgtcaccctaacggttaaggt

SEQ ID NO: 35265 - DNA, 25 bp, Homo sapien
gactacgcacggtacgaggaactga

SEQ ID NO: 35266 - DNA, 25 bp, Homo sapien
gactacgcacggaacgaggaactga

SEQ ID NO: 35267 - DNA, 25 bp, Homo sapien
aacagacactataagggtgtcctat

SEQ ID NO: 35268 - DNA, 25 bp, Homo sapien
aacagacactattagggtgtcctat

SEQ ID NO: 35269 - DNA, 25 bp, Homo sapien
agaaagacctatgaaagaactctac

SEQ ID NO: 35270 - DNA, 25 bp, Homo sapien
agaaagacctatcaaagaactctac

SEQ ID NO: 35271 - DNA, 25 bp, Homo sapien
aaggacggacacatcgtccgccact

SEQ ID NO: 35272 - DNA, 25 bp, Homo sapien
aaggacggacacttcgtccgccact

SEQ ID NO: 35273 - DNA, 25 bp, Homo sapien
cagagtcctcacaccgagtgaccgt

SEQ ID NO: 35274 - DNA, 25 bp, Homo sapien
cagagtcctcactccgagtgaccgt

SEQ ID NO: 35275 - DNA, 25 bp, Homo sapien
tggtacccgacactacgtccactag

SEQ ID NO: 35276 - DNA, 25 bp, Homo sapien
tggtacccgacagtacgtccactag

SEQ ID NO: 35277 - DNA, 25 bp, Homo sapien
tggaggaccttgaagtgacacggta

SEQ ID NO: 35278 - DNA, 25 bp, Homo sapien
tggaggaccttgtagtgacacggta

SEQ ID NO: 35279 - DNA, 25 bp, Homo sapien
atggtggaagaagataggacccgac

SEQ ID NO: 35280 - DNA, 25 bp, Homo sapien
atggtggaagaacataggacccgac

SEQ ID NO: 35281 - DNA, 25 bp, Homo sapien
ttgtcgaaggtaagatggactccgg

SEQ ID NO: 35282 - DNA, 25 bp, Homo sapien
ttgtcgaaggtatgatggactccgg

SEQ ID NO: 35283 - DNA, 25 bp, Homo sapien
gtggtcctccgacagtagtccccgg

SEQ ID NO: 35284 - DNA, 25 bp, Homo sapien
gtggtcctccgagagtagtccccgg

SEQ ID NO: 35285 - DNA, 25 bp, Homo sapien
gctgtaaagtcgatataacctgaaa

SEQ ID NO: 35286 - DNA, 25 bp, Homo sapien
gctgtaaagtcgttataacctgaaa

SEQ ID NO: 35287 - DNA, 25 bp, Homo sapien
ctgtgggtgagactcaccgagagta

SEQ ID NO: 35288 - DNA, 25 bp, Homo sapien
ctgtgggtgagagtcaccgagagta

SEQ ID NO: 35289 - DNA, 25 bp, Homo sapien
gggtgttatgggtctcccgacgtaa

SEQ ID NO: 35290 - DNA, 25 bp, Homo sapien
gggtgttatgggactcccgacgtaa

SEQ ID NO: 35291 - DNA, 25 bp, Homo sapien
tctttcgctagtacagtattcgtta

SEQ ID NO: 35292 - DNA, 25 bp, Homo sapien
tctttcgctagttcagtattcgtta

SEQ ID NO: 35293 - DNA, 25 bp, Homo sapien
ctcagttattaggaaagttctttct

SEQ ID NO: 35294 - DNA, 25 bp, Homo sapien
ctcagttattagcaaagttctttct

SEQ ID NO: 35295 - DNA, 25 bp, Homo sapien
tgtgactcttttcaaatgtcctgtc

SEQ ID NO: 35296 - DNA, 25 bp, Homo sapien
tgtgactcttttgaaatgtcctgtc

SEQ ID NO: 35297 - DNA, 25 bp, Homo sapien
taaagtcttcatgatcctgaatcta

SEQ ID NO: 35298 - DNA, 25 bp, Homo sapien
taaagtcttcatcatcctgaatcta

SEQ ID NO: 35299 - DNA, 25 bp, Homo sapien
gtgtagtcattatcctgtacacttc

SEQ ID NO: 35300 - DNA, 25 bp, Homo sapien
gtgtagtcattaacctgtacacttc

SEQ ID NO: 35301 - DNA, 25 bp, Homo sapien
gtacgtagatcgacgactctccctc

SEQ ID NO: 35302 - DNA, 25 bp, Homo sapien
gtacgtagatcgtcgactctccctc

SEQ ID NO: 35303 - DNA, 25 bp, Homo sapien
cgtttgaaggtcaggatacaaactg

SEQ ID NO: 35304 - DNA, 25 bp, Homo sapien
cgtttgaaggtctggatacaaactg

SEQ ID NO: 35305 - DNA, 25 bp, Homo sapien
aatgaattggtaaacgactgtctac

SEQ ID NO: 35306 - DNA, 25 bp, Homo sapien
aatgaattggtatacgactgtctac

SEQ ID NO: 35307 - DNA, 25 bp, Homo sapien
gagtgaacaacatcctgacgttctg

SEQ ID NO: 35308 - DNA, 25 bp, Homo sapien
gagtgaacaacaacctgacgttctg

SEQ ID NO: 35309 - DNA, 25 bp, Homo sapien
ggagaagaacggaagtacgagcaca

SEQ ID NO: 35310 - DNA, 25 bp, Homo sapien
ggagaagaacggtagtacgagcaca

SEQ ID NO: 35311 - DNA, 25 bp, Homo sapien
cggaaaatacgttatgggtctctat

SEQ ID NO: 35312 - DNA, 25 bp, Homo sapien
cggaaaatacgtaatgggtctctat

SEQ ID NO: 35313 - DNA, 25 bp, Homo sapien
caacccagacaaactacgagcctgt

SEQ ID NO: 35314 - DNA, 25 bp, Homo sapien
caacccagacaatctacgagcctgt

SEQ ID NO: 35315 - DNA, 25 bp, Homo sapien
cgaatctgagtcatggtgaccgggt

SEQ ID NO: 35316 - DNA, 25 bp, Homo sapien
cgaatctgagtcttggtgaccgggt

SEQ ID NO: 35317 - DNA, 25 bp, Homo sapien
ctcccgagtcgtgacggacaccgag

SEQ ID NO: 35318 - DNA, 25 bp, Homo sapien
ctcccgagtcgtcacggacaccgag

SEQ ID NO: 35319 - DNA, 25 bp, Homo sapien
ctgctcccgtgtcctggagtctctt

SEQ ID NO: 35320 - DNA, 25 bp, Homo sapien
ctgctcccgtgtgctggagtctctt

SEQ ID NO: 35321 - DNA, 25 bp, Homo sapien
taccgctcttggttgttaggttctt

SEQ ID NO: 35322 - DNA, 25 bp, Homo sapien
taccgctcttggatgttaggttctt

SEQ ID NO: 35323 - DNA, 25 bp, Homo sapien
tcgcacctcttttttgttggttgtt

SEQ ID NO: 35324 - DNA, 25 bp, Homo sapien
tcgcacctctttattgttggttgtt

SEQ ID NO: 35325 - DNA, 25 bp, Homo sapien
ctgtcgaattccttctcgatttaag

SEQ ID NO: 35326 - DNA, 25 bp, Homo sapien
ctgtcgaattccatctcgatttaag

SEQ ID NO: 35327 - DNA, 25 bp, Homo sapien
acctaagttccttttgatacttgag

SEQ ID NO: 35328 - DNA, 25 bp, Homo sapien
acctaagttcctattgatacttgag

SEQ ID NO: 35329 - DNA, 25 bp, Homo sapien
gaagatggtatctcctttttactga

SEQ ID NO: 35330 - DNA, 25 bp, Homo sapien
gaagatggtatcacctttttactga

SEQ ID NO: 35331 - DNA, 25 bp, Homo sapien
aaggtgatcgtatccgtctttttga

SEQ ID NO: 35332 - DNA, 25 bp, Homo sapien
aaggtgatcgtaaccgtctttttga

SEQ ID NO: 35333 - DNA, 25 bp, Homo sapien
tctgacgtgtgatctatcattaaga

SEQ ID NO: 35334 - DNA, 25 bp, Homo sapien
tctgacgtgtgaactatcattaaga

SEQ ID NO: 35335 - DNA, 25 bp, Homo sapien
cgaattgagggagacgacaatgaac

SEQ ID NO: 35336 - DNA, 25 bp, Homo sapien
cgaattgagggacacgacaatgaac

SEQ ID NO: 35337 - DNA, 25 bp, Homo sapien
ttattgttaagttcacgacccgaaa

SEQ ID NO: 35338 - DNA, 25 bp, Homo sapien
ttattgttaagtacacgacccgaaa

SEQ ID NO: 35339 - DNA, 25 bp, Homo sapien
gttttcgtttgaatctaccaaaagt

SEQ ID NO: 35340 - DNA, 25 bp, Homo sapien
gttttcgtttgattctaccaaaagt

SEQ ID NO: 35341 - DNA, 25 bp, Homo sapien
gtttttatgaactagtctccatagt

SEQ ID NO: 35342 - DNA, 25 bp, Homo sapien
gtttttatgaacaagtctccatagt

SEQ ID NO: 35343 - DNA, 25 bp, Homo sapien
ccttgggataactgggtgctacaag

SEQ ID NO: 35344 - DNA, 25 bp, Homo sapien
ccttgggataacagggtgctacaag

SEQ ID NO: 35345 - DNA, 25 bp, Homo sapien
ccgtgtgtcgagacccagacccaga

SEQ ID NO: 35346 - DNA, 25 bp, Homo sapien
ccgtgtgtcgagtcccagacccaga

SEQ ID NO: 35347 - DNA, 25 bp, Homo sapien
gtagtgtcatatctaatcagtaaca

SEQ ID NO: 35348 - DNA, 25 bp, Homo sapien
gtagtgtcatatgtaatcagtaaca

SEQ ID NO: 35349 - DNA, 25 bp, Homo sapien
cggtagatatgaaagatctcgtcat

SEQ ID NO: 35350 - DNA, 25 bp, Homo sapien
cggtagatatgatagatctcgtcat

SEQ ID NO: 35351 - DNA, 25 bp, Homo sapien
aaaaggattactttcgacactatgt

SEQ ID NO: 35352 - DNA, 25 bp, Homo sapien
aaaaggattactatcgacactatgt

SEQ ID NO: 35353 - DNA, 25 bp, Homo sapien
actttccgtgtttttacacagcgtt

SEQ ID NO: 35354 - DNA, 25 bp, Homo sapien
actttccgtgttattacacagcgtt

SEQ ID NO: 35355 - DNA, 25 bp, Homo sapien
tttcgtctctattatgaccgggagt

SEQ ID NO: 35356 - DNA, 25 bp, Homo sapien
tttcgtctctataatgaccgggagt

SEQ ID NO: 35357 - DNA, 25 bp, Homo sapien
tccgtctcttcaatttcgccggaag

SEQ ID NO: 35358 - DNA, 25 bp, Homo sapien
tccgtctcttcattttcgccggaag

SEQ ID NO: 35359 - DNA, 25 bp, Homo sapien
tcttacttcggtgtctgcgagcgtc

SEQ ID NO: 35360 - DNA, 25 bp, Homo sapien
tcttacttcggtctctgcgagcgtc

SEQ ID NO: 35361 - DNA, 25 bp, Homo sapien
agcttattggtgtctagagaccgta

SEQ ID NO: 35362 - DNA, 25 bp, Homo sapien
agcttattggtgactagagaccgta

SEQ ID NO: 35363 - DNA, 25 bp, Homo sapien
gagaggacttggttcatacaagttc

SEQ ID NO: 35364 - DNA, 25 bp, Homo sapien
gagaggacttggatcatacaagttc

SEQ ID NO: 35365 - DNA, 25 bp, Homo sapien
ggagttgttttgcttaccaccaact

SEQ ID NO: 35366 - DNA, 25 bp, Homo sapien
ggagttgttttggttaccaccaact

SEQ ID NO: 35367 - DNA, 25 bp, Homo sapien
tgtcgcgtacttttggtcacagaat

SEQ ID NO: 35368 - DNA, 25 bp, Homo sapien
tgtcgcgtacttatggtcacagaat

SEQ ID NO: 35369 - DNA, 25 bp, Homo sapien
tcacgtccgtatctcgggcactctt

SEQ ID NO: 35370 - DNA, 25 bp, Homo sapien
tcacgtccgtatgtcgggcactctt

SEQ ID NO: 35371 - DNA, 25 bp, Homo sapien
cgacgtgctcttgctctgcgacgca

SEQ ID NO: 35372 - DNA, 25 bp, Homo sapien
cgacgtgctcttcctctgcgacgca

SEQ ID NO: 35373 - DNA, 25 bp, Homo sapien
tctcgtcctctcgtctcggccggag

SEQ ID NO: 35374 - DNA, 25 bp, Homo sapien
tctcgtcctctcctctcggccggag

SEQ ID NO: 35375 - DNA, 25 bp, Homo sapien
tgattgtccttccttccagtccgac

SEQ ID NO: 35376 - DNA, 25 bp, Homo sapien
tgattgtccttcgttccagtccgac

SEQ ID NO: 35377 - DNA, 25 bp, Homo sapien
atctcggatgtcaccgactgtctca

SEQ ID NO: 35378 - DNA, 25 bp, Homo sapien
atctcggatgtctccgactgtctca

SEQ ID NO: 35379 - DNA, 25 bp, Homo sapien
actcccagtgtagtaaccgtgatca

SEQ ID NO: 35380 - DNA, 25 bp, Homo sapien
actcccagtgtactaaccgtgatca

SEQ ID NO: 35381 - DNA, 25 bp, Homo sapien
atcgttacttaccaaatacagtggt

SEQ ID NO: 35382 - DNA, 25 bp, Homo sapien
atcgttacttacgaaatacagtggt

SEQ ID NO: 35383 - DNA, 25 bp, Homo sapien
tttgtttgtagacacgcgatacatg

SEQ ID NO: 35384 - DNA, 25 bp, Homo sapien
tttgtttgtagagacgcgatacatg

SEQ ID NO: 35385 - DNA, 25 bp, Homo sapien
ttggttctatgtagaccgtatcatt

SEQ ID NO: 35386 - DNA, 25 bp, Homo sapien
ttggttctatgttgaccgtatcatt

SEQ ID NO: 35387 - DNA, 25 bp, Homo sapien
ggtcgtatgtcaggtctattacatc

SEQ ID NO: 35388 - DNA, 25 bp, Homo sapien
ggtcgtatgtcacgtctattacatc

SEQ ID NO: 35389 - DNA, 25 bp, Homo sapien
tttgagaatgtactcgcttactgtg

SEQ ID NO: 35390 - DNA, 25 bp, Homo sapien
tttgagaatgtagtcgcttactgtg

SEQ ID NO: 35391 - DNA, 25 bp, Homo sapien
tgacaacacagtaccgttcgtggga

SEQ ID NO: 35392 - DNA, 25 bp, Homo sapien
tgacaacacagttccgttcgtggga

SEQ ID NO: 35393 - DNA, 25 bp, Homo sapien
ataggagagtgacggcctcggccga

SEQ ID NO: 35394 - DNA, 25 bp, Homo sapien
ataggagagtgagggcctcggccga

SEQ ID NO: 35395 - DNA, 25 bp, Homo sapien
ggagtagtaggaagtccggaatcga

SEQ ID NO: 35396 - DNA, 25 bp, Homo sapien
ggagtagtaggatgtccggaatcga

SEQ ID NO: 35397 - DNA, 25 bp, Homo sapien
aagtacgaccaatgtccagaccctc

SEQ ID NO: 35398 - DNA, 25 bp, Homo sapien
aagtacgaccaaagtccagaccctc

SEQ ID NO: 35399 - DNA, 25 bp, Homo sapien
gggactagaacacaaacatgcctgt

SEQ ID NO: 35400 - DNA, 25 bp, Homo sapien
gggactagaacagaaacatgcctgt

SEQ ID NO: 35401 - DNA, 25 bp, Homo sapien
ggggtagaacgtgaaaacgatccca

SEQ ID NO: 35402 - DNA, 25 bp, Homo sapien
ggggtagaacgtcaaaacgatccca

SEQ ID NO: 35403 - DNA, 25 bp, Homo sapien
agatgacaatcaaatagagacccac

SEQ ID NO: 35404 - DNA, 25 bp, Homo sapien
agatgacaatcatatagagacccac

SEQ ID NO: 35405 - DNA, 25 bp, Homo sapien
gcagtacaaatccttcattcagtga

SEQ ID NO: 35406 - DNA, 25 bp, Homo sapien
gcagtacaaatcgttcattcagtga

SEQ ID NO: 35407 - DNA, 25 bp, Homo sapien
gtataagagtcatgtcgattccgaa

SEQ ID NO: 35408 - DNA, 25 bp, Homo sapien
gtataagagtcaagtcgattccgaa

SEQ ID NO: 35409 - DNA, 25 bp, Homo sapien
cctgtaagaatatcgtcgtttaagg

SEQ ID NO: 35410 - DNA, 25 bp, Homo sapien
cctgtaagaataacgtcgtttaagg

SEQ ID NO: 35411 - DNA, 25 bp, Homo sapien
aatccggacccttacccatatcggt

SEQ ID NO: 35412 - DNA, 25 bp, Homo sapien
aatccggaccctaacccatatcggt

SEQ ID NO: 35413 - DNA, 25 bp, Homo sapien
gtctggtgtccgtgtccccgttggt

SEQ ID NO: 35414 - DNA, 25 bp, Homo sapien
gtctggtgtccgagtccccgttggt

SEQ ID NO: 35415 - DNA, 25 bp, Homo sapien
gtttacagttggtgaacacctcttg

SEQ ID NO: 35416 - DNA, 25 bp, Homo sapien
gtttacagttggagaacacctcttg

SEQ ID NO: 35417 - DNA, 25 bp, Homo sapien
tttcaaggtggatccgacactttct

SEQ ID NO: 35418 - DNA, 25 bp, Homo sapien
tttcaaggtggaaccgacactttct

SEQ ID NO: 35419 - DNA, 25 bp, Homo sapien
tcaggatatgaggagacgggttacc

SEQ ID NO: 35420 - DNA, 25 bp, Homo sapien
tcaggatatgagcagacgggttacc

SEQ ID NO: 35421 - DNA, 25 bp, Homo sapien
acaaagatgacgacgtcgatttcct

SEQ ID NO: 35422 - DNA, 25 bp, Homo sapien
acaaagatgacgtcgtcgatttcct

SEQ ID NO: 35423 - DNA, 25 bp, Homo sapien
ttccaaacagggtcatattgtccgt

SEQ ID NO: 35424 - DNA, 25 bp, Homo sapien
ttccaaacagggacatattgtccgt

SEQ ID NO: 35425 - DNA, 25 bp, Homo sapien
tgaccacccagacagatactgtcgg

SEQ ID NO: 35426 - DNA, 25 bp, Homo sapien
tgaccacccagagagatactgtcgg

SEQ ID NO: 35427 - DNA, 25 bp, Homo sapien
gccaacgcaacgaagtcactagtgg

SEQ ID NO: 35428 - DNA, 25 bp, Homo sapien
gccaacgcaacgtagtcactagtgg

SEQ ID NO: 35429 - DNA, 25 bp, Homo sapien
cgtcgacaagggtctcagttcttta

SEQ ID NO: 35430 - DNA, 25 bp, Homo sapien
cgtcgacaagggactcagttcttta

SEQ ID NO: 35431 - DNA, 25 bp, Homo sapien
gcggcaaattcaacaagagtctata

SEQ ID NO: 35432 - DNA, 25 bp, Homo sapien
gcggcaaattcatcaagagtctata

SEQ ID NO: 35433 - DNA, 25 bp, Homo sapien
ccggacgaatacccaggagctacag

SEQ ID NO: 35434 - DNA, 25 bp, Homo sapien
ccggacgaatacgcaggagctacag

SEQ ID NO: 35435 - DNA, 25 bp, Homo sapien
ttccccaggcacagacacaggcaga

SEQ ID NO: 35436 - DNA, 25 bp, Homo sapien
ttccccaggcactgacacaggcaga

SEQ ID NO: 35437 - DNA, 25 bp, Homo sapien
cccctgtaggtaagccgtggaacga

SEQ ID NO: 35438 - DNA, 25 bp, Homo sapien
cccctgtaggtatgccgtggaacga

SEQ ID NO: 35439 - DNA, 25 bp, Homo sapien
cgacccacgggtgacacggaggtcc

SEQ ID NO: 35440 - DNA, 25 bp, Homo sapien
cgacccacgggtcacacggaggtcc

SEQ ID NO: 35441 - DNA, 25 bp, Homo sapien
gcgactccccaggaacagggacgtc

SEQ ID NO: 35442 - DNA, 25 bp, Homo sapien
gcgactccccagcaacagggacgtc

SEQ ID NO: 35443 - DNA, 25 bp, Homo sapien
accgccgcgccgacgagaagtcgtg

SEQ ID NO: 35444 - DNA, 25 bp, Homo sapien
accgccgcgccgtcgagaagtcgtg

SEQ ID NO: 35445 - DNA, 25 bp, Homo sapien
gtccactgtgctccatgggtgtcgg

SEQ ID NO: 35446 - DNA, 25 bp, Homo sapien
gtccactgtgctgcatgggtgtcgg

SEQ ID NO: 35447 - DNA, 25 bp, Homo sapien
tccgtgcgggtgacacgggtggacg

SEQ ID NO: 35448 - DNA, 25 bp, Homo sapien
tccgtgcgggtgtcacgggtggacg

SEQ ID NO: 35449 - DNA, 25 bp, Homo sapien
ccagactctctggtcaggtacagga

SEQ ID NO: 35450 - DNA, 25 bp, Homo sapien
ccagactctctgctcaggtacagga

SEQ ID NO: 35451 - DNA, 25 bp, Homo sapien
ataccgactccctttagttcgggac

SEQ ID NO: 35452 - DNA, 25 bp, Homo sapien
ataccgactcccattagttcgggac

SEQ ID NO: 35453 - DNA, 25 bp, Homo sapien
taggggagtttgtttcttcggtcct

SEQ ID NO: 35454 - DNA, 25 bp, Homo sapien
taggggagtttgattcttcggtcct

SEQ ID NO: 35455 - DNA, 25 bp, Homo sapien
atgtcaaagttttcttctgctgtcc

SEQ ID NO: 35456 - DNA, 25 bp, Homo sapien
atgtcaaagtttacttctgctgtcc

SEQ ID NO: 35457 - DNA, 25 bp, Homo sapien
tatagataagttcttttcggtctcg

SEQ ID NO: 35458 - DNA, 25 bp, Homo sapien
tatagataagttgttttcggtctcg

SEQ ID NO: 35459 - DNA, 25 bp, Homo sapien
tacgacacatcgtattcttggatcg

SEQ ID NO: 35460 - DNA, 25 bp, Homo sapien
tacgacacatcgaattcttggatcg

SEQ ID NO: 35461 - DNA, 25 bp, Homo sapien
caccacaaagtctccggtggactct

SEQ ID NO: 35462 - DNA, 25 bp, Homo sapien
caccacaaagtcaccggtggactct

SEQ ID NO: 35463 - DNA, 25 bp, Homo sapien
tcaccaggaacctatcgatgacgaa

SEQ ID NO: 35464 - DNA, 25 bp, Homo sapien
tcaccaggaaccaatcgatgacgaa

SEQ ID NO: 35465 - DNA, 25 bp, Homo sapien
tacattggacattgtattcgcaaag

SEQ ID NO: 35466 - DNA, 25 bp, Homo sapien
tacattggacatagtattcgcaaag

SEQ ID NO: 35467 - DNA, 25 bp, Homo sapien
aatcggtatacctttctgtcataag

SEQ ID NO: 35468 - DNA, 25 bp, Homo sapien
aatcggtataccattctgtcataag

SEQ ID NO: 35469 - DNA, 25 bp, Homo sapien
ggtctaacaaaacttttgcactaga

SEQ ID NO: 35470 - DNA, 25 bp, Homo sapien
ggtctaacaaaagttttgcactaga

SEQ ID NO: 35471 - DNA, 25 bp, Homo sapien
aaaacgaaccgtgagtactctacga

SEQ ID NO: 35472 - DNA, 25 bp, Homo sapien
aaaacgaaccgtcagtactctacga

SEQ ID NO: 35473 - DNA, 25 bp, Homo sapien
tacaagggcgacggtgctgtcgacg

SEQ ID NO: 35474 - DNA, 25 bp, Homo sapien
tacaagggcgaccgtgctgtcgacg

SEQ ID NO: 35475 - DNA, 25 bp, Homo sapien
agtgagataaagtcaccttaggtac

SEQ ID NO: 35476 - DNA, 25 bp, Homo sapien
agtgagataaagacaccttaggtac

SEQ ID NO: 35477 - DNA, 25 bp, Homo sapien
tacaagacaccaaaatctagcgcta

SEQ ID NO: 35478 - DNA, 25 bp, Homo sapien
tacaagacaccataatctagcgcta

SEQ ID NO: 35479 - DNA, 25 bp, Homo sapien
ttatggacgcattaacacagagaac

SEQ ID NO: 35480 - DNA, 25 bp, Homo sapien
ttatggacgcataaacacagagaac

SEQ ID NO: 35481 - DNA, 25 bp, Homo sapien
ccgggctcccgttcccaccgggact

SEQ ID NO: 35482 - DNA, 25 bp, Homo sapien
ccgggctcccgtacccaccgggact

SEQ ID NO: 35483 - DNA, 25 bp, Homo sapien
agtgggtccccgagaccctggagtt

SEQ ID NO: 35484 - DNA, 25 bp, Homo sapien
agtgggtccccgtgaccctggagtt

SEQ ID NO: 35485 - DNA, 25 bp, Homo sapien
tgtggtctcccgagggtactcgggg

SEQ ID NO: 35486 - DNA, 25 bp, Homo sapien
tgtggtctcccgtgggtactcgggg

SEQ ID NO: 35487 - DNA, 25 bp, Homo sapien
ccatcgtcggaaactcgtttagacg

SEQ ID NO: 35488 - DNA, 25 bp, Homo sapien
ccatcgtcggaatctcgtttagacg

SEQ ID NO: 35489 - DNA, 25 bp, Homo sapien
gacctcttctccaaagtgcactgat

SEQ ID NO: 35490 - DNA, 25 bp, Homo sapien
gacctcttctcctaagtgcactgat

SEQ ID NO: 35491 - DNA, 25 bp, Homo sapien
tctgctgccacgacgagtcaataga

SEQ ID NO: 35492 - DNA, 25 bp, Homo sapien
tctgctgccacgtcgagtcaataga

SEQ ID NO: 35493 - DNA, 25 bp, Homo sapien
tcacatgacaacgagtaatctcgac

SEQ ID NO: 35494 - DNA, 25 bp, Homo sapien
tcacatgacaaccagtaatctcgac

SEQ ID NO: 35495 - DNA, 25 bp, Homo sapien
cacgactttgtgtgtgtatctgtgt

SEQ ID NO: 35496 - DNA, 25 bp, Homo sapien
cacgactttgtgagtgtatctgtgt

SEQ ID NO: 35497 - DNA, 25 bp, Homo sapien
ggtctgacgtgcgtgtagatgtcgt

SEQ ID NO: 35498 - DNA, 25 bp, Homo sapien
ggtctgacgtgcctgtagatgtcgt

SEQ ID NO: 35499 - DNA, 25 bp, Homo sapien
tacagtcttcttcactctaatgtac

SEQ ID NO: 35500 - DNA, 25 bp, Homo sapien
tacagtcttcttgactctaatgtac

SEQ ID NO: 35501 - DNA, 25 bp, Homo sapien
ttacgactcatgtgctaattcgact

SEQ ID NO: 35502 - DNA, 25 bp, Homo sapien
ttacgactcatgagctaattcgact

SEQ ID NO: 35503 - DNA, 25 bp, Homo sapien
tccacctcgtaaaggacttccgact

SEQ ID NO: 35504 - DNA, 25 bp, Homo sapien
tccacctcgtaatggacttccgact

SEQ ID NO: 35505 - DNA, 25 bp, Homo sapien
tgacaacccagaagagacttctccg

SEQ ID NO: 35506 - DNA, 25 bp, Homo sapien
tgacaacccagatgagacttctccg

SEQ ID NO: 35507 - DNA, 25 bp, Homo sapien
gtctttgagtgacgattcttacgac

SEQ ID NO: 35508 - DNA, 25 bp, Homo sapien
gtctttgagtgaggattcttacgac

SEQ ID NO: 35509 - DNA, 25 bp, Homo sapien
cttttatatgtgggagtttcagagt

SEQ ID NO: 35510 - DNA, 25 bp, Homo sapien
cttttatatgtgcgagtttcagagt

SEQ ID NO: 35511 - DNA, 25 bp, Homo sapien
gttaatagtcgtgggtgtgtacata

SEQ ID NO: 35512 - DNA, 25 bp, Homo sapien
gttaatagtcgtcggtgtgtacata

SEQ ID NO: 35513 - DNA, 25 bp, Homo sapien
gaatgaccatcgtgacttaaatcgt

SEQ ID NO: 35514 - DNA, 25 bp, Homo sapien
gaatgaccatcgagacttaaatcgt

SEQ ID NO: 35515 - DNA, 25 bp, Homo sapien
gtttgagaccgtttccacgcttcca

SEQ ID NO: 35516 - DNA, 25 bp, Homo sapien
gtttgagaccgtatccacgcttcca

SEQ ID NO: 35517 - DNA, 25 bp, Homo sapien
tctggtaagggtagccggttcacca

SEQ ID NO: 35518 - DNA, 25 bp, Homo sapien
tctggtaagggttgccggttcacca

SEQ ID NO: 35519 - DNA, 25 bp, Homo sapien
ccgagcagaggcagaacctgtgcca

SEQ ID NO: 35520 - DNA, 25 bp, Homo sapien
ccgagcagaggctgaacctgtgcca

SEQ ID NO: 35521 - DNA, 25 bp, Homo sapien
aggctgcggggtctcctctaccgga

SEQ ID NO: 35522 - DNA, 25 bp, Homo sapien
aggctgcggggtgtcctctaccgga

SEQ ID NO: 35523 - DNA, 25 bp, Homo sapien
gttgtcggggtcgcacgtcccggtc

SEQ ID NO: 35524 - DNA, 25 bp, Homo sapien
gttgtcggggtcccacgtcccggtc

SEQ ID NO: 35525 - DNA, 25 bp, Homo sapien
atgtttgtccggtacctttgttccc

SEQ ID NO: 35526 - DNA, 25 bp, Homo sapien
atgtttgtccggaacctttgttccc

SEQ ID NO: 35527 - DNA, 25 bp, Homo sapien
gtttcccgacgtacccttggtcttc

SEQ ID NO: 35528 - DNA, 25 bp, Homo sapien
gtttcccgacgttcccttggtcttc

SEQ ID NO: 35529 - DNA, 25 bp, Homo sapien
atatgactaccaatctccggggttc

SEQ ID NO: 35530 - DNA, 25 bp, Homo sapien
atatgactaccattctccggggttc

SEQ ID NO: 35531 - DNA, 25 bp, Homo sapien
gtactgttcacttgcgtagactttt

SEQ ID NO: 35532 - DNA, 25 bp, Homo sapien
gtactgttcactagcgtagactttt

SEQ ID NO: 35533 - DNA, 25 bp, Homo sapien
gactatgtctataccggactacttt

SEQ ID NO: 35534 - DNA, 25 bp, Homo sapien
gactatgtctattccggactacttt

SEQ ID NO: 35535 - DNA, 25 bp, Homo sapien
ccctactagcaatcaacagactgag

SEQ ID NO: 35536 - DNA, 25 bp, Homo sapien
ccctactagcaaacaacagactgag

SEQ ID NO: 35537 - DNA, 25 bp, Homo sapien
atgtctcgagtgtaaaacgaccgta

SEQ ID NO: 35538 - DNA, 25 bp, Homo sapien
atgtctcgagtgaaaaacgaccgta

SEQ ID NO: 35539 - DNA, 25 bp, Homo sapien
acttgtcgaggacctaccggcacga

SEQ ID NO: 35540 - DNA, 25 bp, Homo sapien
acttgtcgaggagctaccggcacga

SEQ ID NO: 35541 - DNA, 25 bp, Homo sapien
gtcgcggacaagttctgcaacgaca

SEQ ID NO: 35542 - DNA, 25 bp, Homo sapien
gtcgcggacaagatctgcaacgaca

SEQ ID NO: 35543 - DNA, 25 bp, Homo sapien
cccgatttaggcgtcgtttgacggc

SEQ ID NO: 35544 - DNA, 25 bp, Homo sapien
cccgatttaggcctcgtttgacggc

SEQ ID NO: 35545 - DNA, 25 bp, Homo sapien
gacatttttgtctacggactaattt

SEQ ID NO: 35546 - DNA, 25 bp, Homo sapien
gacatttttgtcaacggactaattt

SEQ ID NO: 35547 - DNA, 25 bp, Homo sapien
cgtttagggtagtgacatcgaccgt

SEQ ID NO: 35548 - DNA, 25 bp, Homo sapien
cgtttagggtagagacatcgaccgt

SEQ ID NO: 35549 - DNA, 25 bp, Homo sapien
gcgtccaggggtatacacacacacg

SEQ ID NO: 35550 - DNA, 25 bp, Homo sapien
gcgtccaggggtttacacacacacg

SEQ ID NO: 35551 - DNA, 25 bp, Homo sapien
gtctcacaagaaagtcctcaactag

SEQ ID NO: 35552 - DNA, 25 bp, Homo sapien
gtctcacaagaatgtcctcaactag

SEQ ID NO: 35553 - DNA, 25 bp, Homo sapien
tctacgtaaagtttcgattagtctg

SEQ ID NO: 35554 - DNA, 25 bp, Homo sapien
tctacgtaaagtatcgattagtctg

SEQ ID NO: 35555 - DNA, 25 bp, Homo sapien
ttgaaagtagtaatctaactctctg

SEQ ID NO: 35556 - DNA, 25 bp, Homo sapien
ttgaaagtagtattctaactctctg

SEQ ID NO: 35557 - DNA, 25 bp, Homo sapien
gtatacacgggtactactactcctg

SEQ ID NO: 35558 - DNA, 25 bp, Homo sapien
gtatacacgggttctactactcctg

SEQ ID NO: 35559 - DNA, 25 bp, Homo sapien
tactgtaactggtctatactttcag

SEQ ID NO: 35560 - DNA, 25 bp, Homo sapien
tactgtaactggactatactttcag

SEQ ID NO: 35561 - DNA, 25 bp, Homo sapien
tgagactcggccttacgtacagtca

SEQ ID NO: 35562 - DNA, 25 bp, Homo sapien
tgagactcggccatacgtacagtca

SEQ ID NO: 35563 - DNA, 25 bp, Homo sapien
tcggactcgggactcgtcgaccggt

SEQ ID NO: 35564 - DNA, 25 bp, Homo sapien
tcggactcgggagtcgtcgaccggt

SEQ ID NO: 35565 - DNA, 25 bp, Homo sapien
taggaggacggtagtgacctcgtct

SEQ ID NO: 35566 - DNA, 25 bp, Homo sapien
taggaggacggttgtgacctcgtct

SEQ ID NO: 35567 - DNA, 25 bp, Homo sapien
tctcgggacggagagacgtgtacct

SEQ ID NO: 35568 - DNA, 25 bp, Homo sapien
tctcgggacggacagacgtgtacct

SEQ ID NO: 35569 - DNA, 25 bp, Homo sapien
tgtcgtcgacagaaggtacgtcaga

SEQ ID NO: 35570 - DNA, 25 bp, Homo sapien
tgtcgtcgacagtaggtacgtcaga

SEQ ID NO: 35571 - DNA, 25 bp, Homo sapien
agtacctgagactgccgacgacacg

SEQ ID NO: 35572 - DNA, 25 bp, Homo sapien
agtacctgagacagccgacgacacg

SEQ ID NO: 35573 - DNA, 25 bp, Homo sapien
tctataaagtagagctctagaacgt

SEQ ID NO: 35574 - DNA, 25 bp, Homo sapien
tctataaagtagtgctctagaacgt

SEQ ID NO: 35575 - DNA, 25 bp, Homo sapien
tctgacactgtcgtcgacttgatct

SEQ ID NO: 35576 - DNA, 25 bp, Homo sapien
tctgacactgtcctcgacttgatct

SEQ ID NO: 35577 - DNA, 25 bp, Homo sapien
cgtcagagactttagactcctgacc

SEQ ID NO: 35578 - DNA, 25 bp, Homo sapien
cgtcagagacttaagactcctgacc

SEQ ID NO: 35579 - DNA, 25 bp, Homo sapien
gaggagtggtgtcagactccgcacc

SEQ ID NO: 35580 - DNA, 25 bp, Homo sapien
gaggagtggtgtgagactccgcacc

SEQ ID NO: 35581 - DNA, 25 bp, Homo sapien
tcgaggtagtttttgtccgagtcga

SEQ ID NO: 35582 - DNA, 25 bp, Homo sapien
tcgaggtagtttatgtccgagtcga

SEQ ID NO: 35583 - DNA, 25 bp, Homo sapien
tcgagagtcgaatgggtcttctcga

SEQ ID NO: 35584 - DNA, 25 bp, Homo sapien
tcgagagtcgaaagggtcttctcga

SEQ ID NO: 35585 - DNA, 25 bp, Homo sapien
gtaagttacgaagagtcttatcgtc

SEQ ID NO: 35586 - DNA, 25 bp, Homo sapien
gtaagttacgaacagtcttatcgtc

SEQ ID NO: 35587 - DNA, 25 bp, Homo sapien
cgaaacgacggtaccgccgtacgac

SEQ ID NO: 35588 - DNA, 25 bp, Homo sapien
cgaaacgacggttccgccgtacgac

SEQ ID NO: 35589 - DNA, 25 bp, Homo sapien
aaacgaccaccgaggactcgtaccg

SEQ ID NO: 35590 - DNA, 25 bp, Homo sapien
aaacgaccaccgtggactcgtaccg

SEQ ID NO: 35591 - DNA, 25 bp, Homo sapien
acctcggtcacctgggttctcgact

SEQ ID NO: 35592 - DNA, 25 bp, Homo sapien
acctcggtcaccagggttctcgact

SEQ ID NO: 35593 - DNA, 25 bp, Homo sapien
agacactggatcgttttcgtcccgt

SEQ ID NO: 35594 - DNA, 25 bp, Homo sapien
agacactggatccttttcgtcccgt

SEQ ID NO: 35595 - DNA, 25 bp, Homo sapien
aaggtacgtagacatttattaccag

SEQ ID NO: 35596 - DNA, 25 bp, Homo sapien
aaggtacgtagagatttattaccag

SEQ ID NO: 35597 - DNA, 25 bp, Homo sapien
gtaacaggtaggtttcgtttcgtcc

SEQ ID NO: 35598 - DNA, 25 bp, Homo sapien
gtaacaggtaggattcgtttcgtcc

SEQ ID NO: 35599 - DNA, 25 bp, Homo sapien
ggttctgccgacgtgtccgtgtccc

SEQ ID NO: 35600 - DNA, 25 bp, Homo sapien
ggttctgccgacctgtccgtgtccc

SEQ ID NO: 35601 - DNA, 25 bp, Homo sapien
atcataccctctgtaccgtgtgtga

SEQ ID NO: 35602 - DNA, 25 bp, Homo sapien
atcataccctctctaccgtgtgtga

SEQ ID NO: 35603 - DNA, 25 bp, Homo sapien
tggtctctctctccagtcggactca

SEQ ID NO: 35604 - DNA, 25 bp, Homo sapien
tggtctctctctgcagtcggactca

SEQ ID NO: 35605 - DNA, 25 bp, Homo sapien
aatgtcgtccctgaagtcggagtta

SEQ ID NO: 35606 - DNA, 25 bp, Homo sapien
aatgtcgtccctcaagtcggagtta

SEQ ID NO: 35607 - DNA, 25 bp, Homo sapien
atccttatcaccatcatcggaggag

SEQ ID NO: 35608 - DNA, 25 bp, Homo sapien
atccttatcaccttcatcggaggag

SEQ ID NO: 35609 - DNA, 25 bp, Homo sapien
ccgggtctaagtacactatcagtaa

SEQ ID NO: 35610 - DNA, 25 bp, Homo sapien
ccgggtctaagttcactatcagtaa

SEQ ID NO: 35611 - DNA, 25 bp, Homo sapien
ggacgtaggacaagaacctattaaa

SEQ ID NO: 35612 - DNA, 25 bp, Homo sapien
ggacgtaggacatgaacctattaaa

SEQ ID NO: 35613 - DNA, 25 bp, Homo sapien
gtactggtcttaggtttctctaaag

SEQ ID NO: 35614 - DNA, 25 bp, Homo sapien
gtactggtcttacgtttctctaaag

SEQ ID NO: 35615 - DNA, 25 bp, Homo sapien
actgattacagatgtctcatgacgt

SEQ ID NO: 35616 - DNA, 25 bp, Homo sapien
actgattacagaagtctcatgacgt

SEQ ID NO: 35617 - DNA, 25 bp, Homo sapien
ttcgagtactttttccgtctcgtcc

SEQ ID NO: 35618 - DNA, 25 bp, Homo sapien
ttcgagtactttatccgtctcgtcc

SEQ ID NO: 35619 - DNA, 25 bp, Homo sapien
ttcccagtctctctttggtctcgtc

SEQ ID NO: 35620 - DNA, 25 bp, Homo sapien
ttcccagtctctgtttggtctcgtc

SEQ ID NO: 35621 - DNA, 25 bp, Homo sapien
tagacgggtttaaggtccggtccta

SEQ ID NO: 35622 - DNA, 25 bp, Homo sapien
tagacgggtttatggtccggtccta

SEQ ID NO: 35623 - DNA, 25 bp, Homo sapien
cagactgagattttctctggtatca

SEQ ID NO: 35624 - DNA, 25 bp, Homo sapien
cagactgagattatctctggtatca

SEQ ID NO: 35625 - DNA, 25 bp, Homo sapien
aaccgtagttgttacaggtgcttca

SEQ ID NO: 35626 - DNA, 25 bp, Homo sapien
aaccgtagttgtaacaggtgcttca

SEQ ID NO: 35627 - DNA, 25 bp, Homo sapien
ttcgtacattagacggagcttcgag

SEQ ID NO: 35628 - DNA, 25 bp, Homo sapien
ttcgtacattagtcggagcttcgag

SEQ ID NO: 35629 - DNA, 25 bp, Homo sapien
tgtctcctgtcgttctgttctcctc

SEQ ID NO: 35630 - DNA, 25 bp, Homo sapien
tgtctcctgtcgatctgttctcctc

SEQ ID NO: 35631 - DNA, 25 bp, Homo sapien
gggaaccgaccgtcctattccgaat

SEQ ID NO: 35632 - DNA, 25 bp, Homo sapien
gggaaccgaccgacctattccgaat

SEQ ID NO: 35633 - DNA, 25 bp, Homo sapien
atgagaggatagtacccatctctaa

SEQ ID NO: 35634 - DNA, 25 bp, Homo sapien
atgagaggatagaacccatctctaa

SEQ ID NO: 35635 - DNA, 25 bp, Homo sapien
cgagggaagtaaacgcattctttac

SEQ ID NO: 35636 - DNA, 25 bp, Homo sapien
cgagggaagtaatcgcattctttac

SEQ ID NO: 35637 - DNA, 25 bp, Homo sapien
ggacggatctgaactccgcgctcaa

SEQ ID NO: 35638 - DNA, 25 bp, Homo sapien
ggacggatctgatctccgcgctcaa

SEQ ID NO: 35639 - DNA, 25 bp, Homo sapien
gaggtgaaacacaaggtagactaca

SEQ ID NO: 35640 - DNA, 25 bp, Homo sapien
gaggtgaaacactaggtagactaca

SEQ ID NO: 35641 - DNA, 25 bp, Homo sapien
tgaccaaacgaacatcagagcaaat

SEQ ID NO: 35642 - DNA, 25 bp, Homo sapien
tgaccaaacgaagatcagagcaaat

SEQ ID NO: 35643 - DNA, 25 bp, Homo sapien
atgagacacgtctaccacgtgacca

SEQ ID NO: 35644 - DNA, 25 bp, Homo sapien
atgagacacgtcaaccacgtgacca

SEQ ID NO: 35645 - DNA, 25 bp, Homo sapien
tgtaggtacggtaccttcactacac

SEQ ID NO: 35646 - DNA, 25 bp, Homo sapien
tgtaggtacggttccttcactacac

SEQ ID NO: 35647 - DNA, 25 bp, Homo sapien
agacgacgtgcattttatgtcttac

SEQ ID NO: 35648 - DNA, 25 bp, Homo sapien
agacgacgtgcaatttatgtcttac

SEQ ID NO: 35649 - DNA, 25 bp, Homo sapien
ccagagtagtgaattgtgtctacta

SEQ ID NO: 35650 - DNA, 25 bp, Homo sapien
ccagagtagtgatttgtgtctacta

SEQ ID NO: 35651 - DNA, 25 bp, Homo sapien
agtgtgtctacttagagtcatctcc

SEQ ID NO: 35652 - DNA, 25 bp, Homo sapien
agtgtgtctactaagagtcatctcc

SEQ ID NO: 35653 - DNA, 25 bp, Homo sapien
ggtatactgttttacgagttccttc

SEQ ID NO: 35654 - DNA, 25 bp, Homo sapien
ggtatactgtttaacgagttccttc

SEQ ID NO: 35655 - DNA, 25 bp, Homo sapien
agaaatgtatgaaaatcgtactcgc

SEQ ID NO: 35656 - DNA, 25 bp, Homo sapien
agaaatgtatgataatcgtactcgc

SEQ ID NO: 35657 - DNA, 25 bp, Homo sapien
gaagacaattagtttggatctcgtc

SEQ ID NO: 35658 - DNA, 25 bp, Homo sapien
gaagacaattagattggatctcgtc

SEQ ID NO: 35659 - DNA, 25 bp, Homo sapien
tcgaagaacttcctcgaccaaactg

SEQ ID NO: 35660 - DNA, 25 bp, Homo sapien
tcgaagaacttcgtcgaccaaactg

SEQ ID NO: 35661 - DNA, 25 bp, Homo sapien
tgaagtgtcagtgacgtttacccgt

SEQ ID NO: 35662 - DNA, 25 bp, Homo sapien
tgaagtgtcagtcacgtttacccgt

SEQ ID NO: 35663 - DNA, 25 bp, Homo sapien
aattgaatctggtcatagaccgtgt

SEQ ID NO: 35664 - DNA, 25 bp, Homo sapien
aattgaatctggacatagaccgtgt

SEQ ID NO: 35665 - DNA, 25 bp, Homo sapien
gtggaccgatgtcgaagtaccgtgt

SEQ ID NO: 35666 - DNA, 25 bp, Homo sapien
gtggaccgatgtggaagtaccgtgt

SEQ ID NO: 35667 - DNA, 25 bp, Homo sapien
ggtggactcggtctgtgaactcgtt

SEQ ID NO: 35668 - DNA, 25 bp, Homo sapien
ggtggactcggtgtgtgaactcgtt

SEQ ID NO: 35669 - DNA, 25 bp, Homo sapien
tctagtagatcttcttggacctggt

SEQ ID NO: 35670 - DNA, 25 bp, Homo sapien
tctagtagatctacttggacctggt

SEQ ID NO: 35671 - DNA, 25 bp, Homo sapien
gtgagaggtaaggtatctccctgtg

SEQ ID NO: 35672 - DNA, 25 bp, Homo sapien
gtgagaggtaagctatctccctgtg

SEQ ID NO: 35673 - DNA, 25 bp, Homo sapien
gaagagatatagtgtagacgacccc

SEQ ID NO: 35674 - DNA, 25 bp, Homo sapien
gaagagatatagagtagacgacccc

SEQ ID NO: 35675 - DNA, 25 bp, Homo sapien
aacacgtactaccattgagtctgac

SEQ ID NO: 35676 - DNA, 25 bp, Homo sapien
aacacgtactacgattgagtctgac

SEQ ID NO: 35677 - DNA, 25 bp, Homo sapien
gattcatccactgatcacgaatgta

SEQ ID NO: 35678 - DNA, 25 bp, Homo sapien
gattcatccactcatcacgaatgta

SEQ ID NO: 35679 - DNA, 25 bp, Homo sapien
aataatgacacgaatattcactgtg

SEQ ID NO: 35680 - DNA, 25 bp, Homo sapien
aataatgacacgtatattcactgtg

SEQ ID NO: 35681 - DNA, 25 bp, Homo sapien
gagtgtaatctacaagtctacaggg

SEQ ID NO: 35682 - DNA, 25 bp, Homo sapien
gagtgtaatctagaagtctacaggg

SEQ ID NO: 35683 - DNA, 25 bp, Homo sapien
gttgtaattctcgtacaacaaaagt

SEQ ID NO: 35684 - DNA, 25 bp, Homo sapien
gttgtaattctcctacaacaaaagt

SEQ ID NO: 35685 - DNA, 25 bp, Homo sapien
gtgtttcgatttgactaatcatcaa

SEQ ID NO: 35686 - DNA, 25 bp, Homo sapien
gtgtttcgatttcactaatcatcaa

SEQ ID NO: 35687 - DNA, 25 bp, Homo sapien
agttacaccttagaccggagactga

SEQ ID NO: 35688 - DNA, 25 bp, Homo sapien
agttacaccttacaccggagactga

SEQ ID NO: 35689 - DNA, 25 bp, Homo sapien
gattgattattatccgtagacctca

SEQ ID NO: 35690 - DNA, 25 bp, Homo sapien
gattgattattaaccgtagacctca

SEQ ID NO: 35691 - DNA, 25 bp, Homo sapien
caatgggttctatcactgaccatac

SEQ ID NO: 35692 - DNA, 25 bp, Homo sapien
caatgggttctaacactgaccatac

SEQ ID NO: 35693 - DNA, 25 bp, Homo sapien
cttaaggatcctacacacaccgacc

SEQ ID NO: 35694 - DNA, 25 bp, Homo sapien
cttaaggatccttcacacaccgacc

SEQ ID NO: 35695 - DNA, 25 bp, Homo sapien
tttggttccacttcggtccctactc

SEQ ID NO: 35696 - DNA, 25 bp, Homo sapien
tttggttccactacggtccctactc

SEQ ID NO: 35697 - DNA, 25 bp, Homo sapien
tttcggtcgcgtctcatcttccctt

SEQ ID NO: 35698 - DNA, 25 bp, Homo sapien
tttcggtcgcgtgtcatcttccctt

SEQ ID NO: 35699 - DNA, 25 bp, Homo sapien
atgtcgcttacgagtcttgtttcct

SEQ ID NO: 35700 - DNA, 25 bp, Homo sapien
atgtcgcttacgtgtcttgtttcct

SEQ ID NO: 35701 - DNA, 25 bp, Homo sapien
ctagtgcaagaggtccttgtggaag

SEQ ID NO: 35702 - DNA, 25 bp, Homo sapien
ctagtgcaagagctccttgtggaag

SEQ ID NO: 35703 - DNA, 25 bp, Homo sapien
ggtacaggttcacctcgagcttaag

SEQ ID NO: 35704 - DNA, 25 bp, Homo sapien
ggtacaggttcagctcgagcttaag

SEQ ID NO: 35705 - DNA, 25 bp, Homo sapien
gtgtgtctacttagagtcatctcct

SEQ ID NO: 35706 - DNA, 25 bp, Homo sapien
gtgtgtctactttgagtcatctcct

SEQ ID NO: 35707 - DNA, 25 bp, Homo sapien
gtcgtgtttgtggtagtcaaacgct

SEQ ID NO: 35708 - DNA, 25 bp, Homo sapien
gtcgtgtttgtgctagtcaaacgct

SEQ ID NO: 35709 - DNA, 25 bp, Homo sapien
ttcgtccaatccttacacgaagtag

SEQ ID NO: 35710 - DNA, 25 bp, Homo sapien
ttcgtccaatccatacacgaagtag

SEQ ID NO: 35711 - DNA, 25 bp, Homo sapien
gtcttttataaccaaccgaacgtcg

SEQ ID NO: 35712 - DNA, 25 bp, Homo sapien
gtcttttataacgaaccgaacgtcg

SEQ ID NO: 35713 - DNA, 25 bp, Homo sapien
gtctattcatcttgataccggacgg

SEQ ID NO: 35714 - DNA, 25 bp, Homo sapien
gtctattcatctagataccggacgg

SEQ ID NO: 35715 - DNA, 25 bp, Homo sapien
ggttttcgttcctttccggtcgtgt

SEQ ID NO: 35716 - DNA, 25 bp, Homo sapien
ggttttcgttccattccggtcgtgt

SEQ ID NO: 35717 - DNA, 25 bp, Homo sapien
ctccgagacgacggtccaatcgtcg

SEQ ID NO: 35718 - DNA, 25 bp, Homo sapien
ctccgagacgaccgtccaatcgtcg

SEQ ID NO: 35719 - DNA, 25 bp, Homo sapien
gggtgtccgacgacggtccaaccga

SEQ ID NO: 35720 - DNA, 25 bp, Homo sapien
gggtgtccgacgtcggtccaaccga

SEQ ID NO: 35721 - DNA, 25 bp, Homo sapien
aggtatatcctgaccgtcaaaacat

SEQ ID NO: 35722 - DNA, 25 bp, Homo sapien
aggtatatcctgtccgtcaaaacat

SEQ ID NO: 35723 - DNA, 25 bp, Homo sapien
gtgtcaccaaaacgtctaccactga

SEQ ID NO: 35724 - DNA, 25 bp, Homo sapien
gtgtcaccaaaaggtctaccactga

SEQ ID NO: 35725 - DNA, 25 bp, Homo sapien
gtaaagaactaaccttacctacgga

SEQ ID NO: 35726 - DNA, 25 bp, Homo sapien
gtaaagaactaagcttacctacgga

SEQ ID NO: 35727 - DNA, 25 bp, Homo sapien
atagtaaacgacaccgacaagacac

SEQ ID NO: 35728 - DNA, 25 bp, Homo sapien
atagtaaacgactccgacaagacac

SEQ ID NO: 35729 - DNA, 25 bp, Homo sapien
tataactacgtctaccaagacgatg

SEQ ID NO: 35730 - DNA, 25 bp, Homo sapien
tataactacgtcaaccaagacgatg

SEQ ID NO: 35731 - DNA, 25 bp, Homo sapien
tttaaaacgtgttccaacgtcttag

SEQ ID NO: 35732 - DNA, 25 bp, Homo sapien
tttaaaacgtgtaccaacgtcttag

SEQ ID NO: 35733 - DNA, 25 bp, Homo sapien
tttcggaaaaagagacttactctac

SEQ ID NO: 35734 - DNA, 25 bp, Homo sapien
tttcggaaaaagtgacttactctac

SEQ ID NO: 35735 - DNA, 25 bp, Homo sapien
taggtaacagactttgaagttactc

SEQ ID NO: 35736 - DNA, 25 bp, Homo sapien
taggtaacagacattgaagttactc

SEQ ID NO: 35737 - DNA, 25 bp, Homo sapien
taagctaagtcgtaaaggtcttcgt

SEQ ID NO: 35738 - DNA, 25 bp, Homo sapien
taagctaagtcgaaaaggtcttcgt

SEQ ID NO: 35739 - DNA, 25 bp, Homo sapien
agcacgagtgtgaagaatcagttct

SEQ ID NO: 35740 - DNA, 25 bp, Homo sapien
agcacgagtgtgtagaatcagttct

SEQ ID NO: 35741 - DNA, 25 bp, Homo sapien
aggacgacagttagtacaaacgtca

SEQ ID NO: 35742 - DNA, 25 bp, Homo sapien
aggacgacagtttgtacaaacgtca

SEQ ID NO: 35743 - DNA, 25 bp, Homo sapien
aggtcagacagttattcaatcgaga

SEQ ID NO: 35744 - DNA, 25 bp, Homo sapien
aggtcagacagtaattcaatcgaga

SEQ ID NO: 35745 - DNA, 25 bp, Homo sapien
aagtcgacgaccatttcaagtcaca

SEQ ID NO: 35746 - DNA, 25 bp, Homo sapien
aagtcgacgaccttttcaagtcaca

SEQ ID NO: 35747 - DNA, 25 bp, Homo sapien
gggtttcgttctttagtatacgaca

SEQ ID NO: 35748 - DNA, 25 bp, Homo sapien
gggtttcgttctatagtatacgaca

SEQ ID NO: 35749 - DNA, 25 bp, Homo sapien
gtgtctgaccttggtgtctacgaca

SEQ ID NO: 35750 - DNA, 25 bp, Homo sapien
gtgtctgaccttcgtgtctacgaca

SEQ ID NO: 35751 - DNA, 25 bp, Homo sapien
ctggtaatacgttccgttgtactta

SEQ ID NO: 35752 - DNA, 25 bp, Homo sapien
ctggtaatacgtaccgttgtactta

SEQ ID NO: 35753 - DNA, 25 bp, Homo sapien
tgcgagagtacgacggacagttctc

SEQ ID NO: 35754 - DNA, 25 bp, Homo sapien
tgcgagagtacgtcggacagttctc

SEQ ID NO: 35755 - DNA, 25 bp, Homo sapien
tccagaaactcaacgtgcagtttag

SEQ ID NO: 35756 - DNA, 25 bp, Homo sapien
tccagaaactcatcgtgcagtttag

SEQ ID NO: 35757 - DNA, 25 bp, Homo sapien
gttcacgaaatcatgtcttaccatg

SEQ ID NO: 35758 - DNA, 25 bp, Homo sapien
gttcacgaaatcttgtcttaccatg

SEQ ID NO: 35759 - DNA, 25 bp, Homo sapien
gtcccaaggctctcgtggagtcgtt

SEQ ID NO: 35760 - DNA, 25 bp, Homo sapien
gtcccaaggctcacgtggagtcgtt

SEQ ID NO: 35761 - DNA, 25 bp, Homo sapien
tcctcagtaaagacaatctactgtg

SEQ ID NO: 35762 - DNA, 25 bp, Homo sapien
tcctcagtaaagtcaatctactgtg

SEQ ID NO: 35763 - DNA, 25 bp, Homo sapien
gccgagacccgaagacgacttcagc

SEQ ID NO: 35764 - DNA, 25 bp, Homo sapien
gccgagacccgatgacgacttcagc

SEQ ID NO: 35765 - DNA, 25 bp, Homo sapien
taaacgtctaccatcgaggagtccc

SEQ ID NO: 35766 - DNA, 25 bp, Homo sapien
taaacgtctaccttcgaggagtccc

SEQ ID NO: 35767 - DNA, 25 bp, Homo sapien
gacttagtatcaagttcagtgacca

SEQ ID NO: 35768 - DNA, 25 bp, Homo sapien
gacttagtatcatgttcagtgacca

SEQ ID NO: 35769 - DNA, 25 bp, Homo sapien
gttacgacactctttaagagactgt

SEQ ID NO: 35770 - DNA, 25 bp, Homo sapien
gttacgacactcattaagagactgt

SEQ ID NO: 35771 - DNA, 25 bp, Homo sapien
aggtgtactctgtctcgactaagac

SEQ ID NO: 35772 - DNA, 25 bp, Homo sapien
aggtgtactctgactcgactaagac

SEQ ID NO: 35773 - DNA, 25 bp, Homo sapien
ggagagtacccgagcgcgacacaca

SEQ ID NO: 35774 - DNA, 25 bp, Homo sapien
ggagagtacccgtgcgcgacacaca

SEQ ID NO: 35775 - DNA, 25 bp, Homo sapien
tcgacgaccacgaaggcgaggtaga

SEQ ID NO: 35776 - DNA, 25 bp, Homo sapien
tcgacgaccacgtaggcgaggtaga

SEQ ID NO: 35777 - DNA, 25 bp, Homo sapien
cccgacagtgtttgggtactcctag

SEQ ID NO: 35778 - DNA, 25 bp, Homo sapien
cccgacagtgttagggtactcctag

SEQ ID NO: 35779 - DNA, 25 bp, Homo sapien
gtctcgacagtcttgagggacccac

SEQ ID NO: 35780 - DNA, 25 bp, Homo sapien
gtctcgacagtcatgagggacccac

SEQ ID NO: 35781 - DNA, 25 bp, Homo sapien
cgtggaccatcaagaggagcccgtc

SEQ ID NO: 35782 - DNA, 25 bp, Homo sapien
cgtggaccatcatgaggagcccgtc

SEQ ID NO: 35783 - DNA, 25 bp, Homo sapien
ggtctcgatctatcgaggaaccaac

SEQ ID NO: 35784 - DNA, 25 bp, Homo sapien
ggtctcgatctaacgaggaaccaac

SEQ ID NO: 35785 - DNA, 25 bp, Homo sapien
agggtttcggcctggtgtcgaccca

SEQ ID NO: 35786 - DNA, 25 bp, Homo sapien
agggtttcggccaggtgtcgaccca

SEQ ID NO: 35787 - DNA, 25 bp, Homo sapien
attcagatctacagagacatctgag

SEQ ID NO: 35788 - DNA, 25 bp, Homo sapien
attcagatctactgagacatctgag

SEQ ID NO: 35789 - DNA, 25 bp, Homo sapien
taccgtcgtgtgtcttagggttcca

SEQ ID NO: 35790 - DNA, 25 bp, Homo sapien
taccgtcgtgtgacttagggttcca

SEQ ID NO: 35791 - DNA, 25 bp, Homo sapien
ttgtctgtgaaaacgggagtcaccg

SEQ ID NO: 35792 - DNA, 25 bp, Homo sapien
ttgtctgtgaaatcgggagtcaccg

SEQ ID NO: 35793 - DNA, 25 bp, Homo sapien
aatttccggttctcgaggagtctca

SEQ ID NO: 35794 - DNA, 25 bp, Homo sapien
aatttccggttcacgaggagtctca

SEQ ID NO: 35795 - DNA, 25 bp, Homo sapien
ggttcctcgtttactaaacctctag

SEQ ID NO: 35796 - DNA, 25 bp, Homo sapien
ggttcctcgttttctaaacctctag

SEQ ID NO: 35797 - DNA, 25 bp, Homo sapien
aaggtcccctgtaacgtggattcaa

SEQ ID NO: 35798 - DNA, 25 bp, Homo sapien
aaggtcccctgttacgtggattcaa

SEQ ID NO: 35799 - DNA, 25 bp, Homo sapien
atgtcgtgacttgtgttaaaacaac

SEQ ID NO: 35800 - DNA, 25 bp, Homo sapien
atgtcgtgacttctgttaaaacaac

SEQ ID NO: 35801 - DNA, 25 bp, Homo sapien
atgtctcagttggactccatgtgac

SEQ ID NO: 35802 - DNA, 25 bp, Homo sapien
atgtctcagttgcactccatgtgac

SEQ ID NO: 35803 - DNA, 25 bp, Homo sapien
gtactaaatagttcacaccggagat

SEQ ID NO: 35804 - DNA, 25 bp, Homo sapien
gtactaaatagtacacaccggagat

SEQ ID NO: 35805 - DNA, 25 bp, Homo sapien
atgaacgaaggacacgtccggagtt

SEQ ID NO: 35806 - DNA, 25 bp, Homo sapien
atgaacgaaggagacgtccggagtt

SEQ ID NO: 35807 - DNA, 25 bp, Homo sapien
ggaaccccgacttcggtgcacggtc

SEQ ID NO: 35808 - DNA, 25 bp, Homo sapien
ggaaccccgactacggtgcacggtc

SEQ ID NO: 35809 - DNA, 25 bp, Homo sapien
acgagcacgaacgaccgggacgtga

SEQ ID NO: 35810 - DNA, 25 bp, Homo sapien
acgagcacgaaccaccgggacgtga

SEQ ID NO: 35811 - DNA, 25 bp, Homo sapien
aacccactggtagacccggtcaagg

SEQ ID NO: 35812 - DNA, 25 bp, Homo sapien
aacccactggtacacccggtcaagg

SEQ ID NO: 35813 - DNA, 25 bp, Homo sapien
ctcgagcagtactaaccggtccaca

SEQ ID NO: 35814 - DNA, 25 bp, Homo sapien
ctcgagcagtacaaaccggtccaca

SEQ ID NO: 35815 - DNA, 25 bp, Homo sapien
tttaccgagactatgttcgacacca

SEQ ID NO: 35816 - DNA, 25 bp, Homo sapien
tttaccgagactttgttcgacacca

SEQ ID NO: 35817 - DNA, 25 bp, Homo sapien
cgaacggagtgtacagtcccgtcca

SEQ ID NO: 35818 - DNA, 25 bp, Homo sapien
cgaacggagtgttcagtcccgtcca

SEQ ID NO: 35819 - DNA, 25 bp, Homo sapien
cttgagggtatctacctccgtccca

SEQ ID NO: 35820 - DNA, 25 bp, Homo sapien
cttgagggtatcaacctccgtccca

SEQ ID NO: 35821 - DNA, 25 bp, Homo sapien
tctagtaggtgacattgtcttcccc

SEQ ID NO: 35822 - DNA, 25 bp, Homo sapien
tctagtaggtgagattgtcttcccc

SEQ ID NO: 35823 - DNA, 25 bp, Homo sapien
ggtacgtgtgaacgtggttgcatcc

SEQ ID NO: 35824 - DNA, 25 bp, Homo sapien
ggtacgtgtgaaggtggttgcatcc

SEQ ID NO: 35825 - DNA, 25 bp, Homo sapien
gaagtgtaacgtgacaagtaaccca

SEQ ID NO: 35826 - DNA, 25 bp, Homo sapien
gaagtgtaacgtcacaagtaaccca

SEQ ID NO: 35827 - DNA, 25 bp, Homo sapien
aacacagaaaaaggtcggactcgga

SEQ ID NO: 35828 - DNA, 25 bp, Homo sapien
aacacagaaaaacgtcggactcgga

SEQ ID NO: 35829 - DNA, 25 bp, Homo sapien
aaagacgaaaagacggggtgtcgac

SEQ ID NO: 35830 - DNA, 25 bp, Homo sapien
aaagacgaaaagtcggggtgtcgac

SEQ ID NO: 35831 - DNA, 25 bp, Homo sapien
gtaataaaatatttggtcgtgtgtt

SEQ ID NO: 35832 - DNA, 25 bp, Homo sapien
gtaataaaatatatggtcgtgtgtt

SEQ ID NO: 35833 - DNA, 25 bp, Homo sapien
aaatggttctctagctcgttagttt

SEQ ID NO: 35834 - DNA, 25 bp, Homo sapien
aaatggttctcttgctcgttagttt

SEQ ID NO: 35835 - DNA, 25 bp, Homo sapien
ataatccgtttaactttttgtcgtg

SEQ ID NO: 35836 - DNA, 25 bp, Homo sapien
ataatccgtttatctttttgtcgtg

SEQ ID NO: 35837 - DNA, 25 bp, Homo sapien
attcagtacacttttccattcaggg

SEQ ID NO: 35838 - DNA, 25 bp, Homo sapien
attcagtacactattccattcaggg

SEQ ID NO: 35839 - DNA, 25 bp, Homo sapien
tcacgtaagctttctcataaaggcg

SEQ ID NO: 35840 - DNA, 25 bp, Homo sapien
tcacgtaagcttactcataaaggcg

SEQ ID NO: 35841 - DNA, 25 bp, Homo sapien
cgtttaatccataagttgactcagt

SEQ ID NO: 35842 - DNA, 25 bp, Homo sapien
cgtttaatccattagttgactcagt

SEQ ID NO: 35843 - DNA, 25 bp, Homo sapien
attaatgtcactacttatcgagaag

SEQ ID NO: 35844 - DNA, 25 bp, Homo sapien
attaatgtcacttcttatcgagaag

SEQ ID NO: 35845 - DNA, 25 bp, Homo sapien
cgtccccgacaggtcgactcagagg

SEQ ID NO: 35846 - DNA, 25 bp, Homo sapien
cgtccccgacagctcgactcagagg

SEQ ID NO: 35847 - DNA, 25 bp, Homo sapien
ttcctacactccttcgtcttggtgt

SEQ ID NO: 35848 - DNA, 25 bp, Homo sapien
ttcctacactccatcgtcttggtgt

SEQ ID NO: 35849 - DNA, 25 bp, Homo sapien
gtcacaaacgtgacgttgaacgagt

SEQ ID NO: 35850 - DNA, 25 bp, Homo sapien
gtcacaaacgtgtcgttgaacgagt

SEQ ID NO: 35851 - DNA, 25 bp, Homo sapien
tagacacacggactcgcatcgtagt

SEQ ID NO: 35852 - DNA, 25 bp, Homo sapien
tagacacacggagtcgcatcgtagt

SEQ ID NO: 35853 - DNA, 25 bp, Homo sapien
tccttagaaccaatgtgacttcgtg

SEQ ID NO: 35854 - DNA, 25 bp, Homo sapien
tccttagaaccattgtgacttcgtg

SEQ ID NO: 35855 - DNA, 25 bp, Homo sapien
taacgtcgggtccatttgctccgag

SEQ ID NO: 35856 - DNA, 25 bp, Homo sapien
taacgtcgggtcgatttgctccgag

SEQ ID NO: 35857 - DNA, 25 bp, Homo sapien
acgtagattctggtcggagcccgat

SEQ ID NO: 35858 - DNA, 25 bp, Homo sapien
acgtagattctgctcggagcccgat

SEQ ID NO: 35859 - DNA, 25 bp, Homo sapien
gaactactatttaccaaggaccgat

SEQ ID NO: 35860 - DNA, 25 bp, Homo sapien
gaactactattttccaaggaccgat

SEQ ID NO: 35861 - DNA, 25 bp, Homo sapien
aaaatcggttttcacaccggaaccg

SEQ ID NO: 35862 - DNA, 25 bp, Homo sapien
aaaatcggttttgacaccggaaccg

SEQ ID NO: 35863 - DNA, 25 bp, Homo sapien
aatttgtcgtttgtcgaaccgttcc

SEQ ID NO: 35864 - DNA, 25 bp, Homo sapien
aatttgtcgtttctcgaaccgttcc

SEQ ID NO: 35865 - DNA, 25 bp, Homo sapien
tcttttgttggtatagacagtttcc

SEQ ID NO: 35866 - DNA, 25 bp, Homo sapien
tcttttgttggtttagacagtttcc

SEQ ID NO: 35867 - DNA, 25 bp, Homo sapien
taactttgattacgacacgtgggac

SEQ ID NO: 35868 - DNA, 25 bp, Homo sapien
taactttgattaggacacgtgggac

SEQ ID NO: 35869 - DNA, 25 bp, Homo sapien
taaattttcgtctgtcacgaggtga

SEQ ID NO: 35870 - DNA, 25 bp, Homo sapien
taaattttcgtcagtcacgaggtga

SEQ ID NO: 35871 - DNA, 25 bp, Homo sapien
tacactgtatgttgtccacgagtca

SEQ ID NO: 35872 - DNA, 25 bp, Homo sapien
tacactgtatgtagtccacgagtca

SEQ ID NO: 35873 - DNA, 25 bp, Homo sapien
atgaaaatcgtactcgccattagaa

SEQ ID NO: 35874 - DNA, 25 bp, Homo sapien
atgaaaatcgtagtcgccattagaa

SEQ ID NO: 35875 - DNA, 25 bp, Homo sapien
tacttaccacgtatgcgatgttaaa

SEQ ID NO: 35876 - DNA, 25 bp, Homo sapien
tacttaccacgtttgcgatgttaaa

SEQ ID NO: 35877 - DNA, 25 bp, Homo sapien
gtagaggagtctggtcatttacagc

SEQ ID NO: 35878 - DNA, 25 bp, Homo sapien
gtagaggagtctcgtcatttacagc

SEQ ID NO: 35879 - DNA, 25 bp, Homo sapien
tcagacccgggtgtcggatctccgc

SEQ ID NO: 35880 - DNA, 25 bp, Homo sapien
tcagacccgggtctcggatctccgc

SEQ ID NO: 35881 - DNA, 25 bp, Homo sapien
tagacctcaatgttttctcaccgag

SEQ ID NO: 35882 - DNA, 25 bp, Homo sapien
tagacctcaatgatttctcaccgag

SEQ ID NO: 35883 - DNA, 25 bp, Homo sapien
tcactttcggaaatttacgtccctg

SEQ ID NO: 35884 - DNA, 25 bp, Homo sapien
tcactttcggaattttacgtccctg

SEQ ID NO: 35885 - DNA, 25 bp, Homo sapien
tatttcggtgagtgtgactgacccg

SEQ ID NO: 35886 - DNA, 25 bp, Homo sapien
tatttcggtgagagtgactgacccg

SEQ ID NO: 35887 - DNA, 25 bp, Homo sapien
ataatatcgggacatactatgttcg

SEQ ID NO: 35888 - DNA, 25 bp, Homo sapien
ataatatcgggagatactatgttcg

SEQ ID NO: 35889 - DNA, 25 bp, Homo sapien
ctaatgtggtgtattacgtacagaa

SEQ ID NO: 35890 - DNA, 25 bp, Homo sapien
ctaatgtggtgttttacgtacagaa

SEQ ID NO: 35891 - DNA, 25 bp, Homo sapien
ggtacatcaactaccggaggtacaa

SEQ ID NO: 35892 - DNA, 25 bp, Homo sapien
ggtacatcaacttccggaggtacaa

SEQ ID NO: 35893 - DNA, 25 bp, Homo sapien
ccggtctccaggtccgtaagtgaaa

SEQ ID NO: 35894 - DNA, 25 bp, Homo sapien
ccggtctccaggaccgtaagtgaaa

SEQ ID NO: 35895 - DNA, 25 bp, Homo sapien
tcgggtgactcctgaaacatggaaa

SEQ ID NO: 35896 - DNA, 25 bp, Homo sapien
tcgggtgactccagaaacatggaaa

SEQ ID NO: 35897 - DNA, 25 bp, Homo sapien
gtgaaccgagagtaccgcgtctcca

SEQ ID NO: 35898 - DNA, 25 bp, Homo sapien
gtgaaccgagagaaccgcgtctcca

SEQ ID NO: 35899 - DNA, 25 bp, Homo sapien
tctcgacccctataacggtcacagg

SEQ ID NO: 35900 - DNA, 25 bp, Homo sapien
tctcgacccctaaaacggtcacagg

SEQ ID NO: 35901 - DNA, 25 bp, Homo sapien
tgactcaccgacgacaggaccagac

SEQ ID NO: 35902 - DNA, 25 bp, Homo sapien
tgactcaccgaccacaggaccagac

SEQ ID NO: 35903 - DNA, 25 bp, Homo sapien
cgacaaagtaccagaggtagtccga

SEQ ID NO: 35904 - DNA, 25 bp, Homo sapien
cgacaaagtacctgaggtagtccga

SEQ ID NO: 35905 - DNA, 25 bp, Homo sapien
acaaaccgtcgtgagaaggaccgtc

SEQ ID NO: 35906 - DNA, 25 bp, Homo sapien
acaaaccgtcgtcagaaggaccgtc

SEQ ID NO: 35907 - DNA, 25 bp, Homo sapien
aaggtcgagaccaagtcagaccgtc

SEQ ID NO: 35908 - DNA, 25 bp, Homo sapien
aaggtcgagacctagtcagaccgtc

SEQ ID NO: 35909 - DNA, 25 bp, Homo sapien
gagtagactctcacctagtcgccgt

SEQ ID NO: 35910 - DNA, 25 bp, Homo sapien
gagtagactctctcctagtcgccgt

SEQ ID NO: 35911 - DNA, 25 bp, Homo sapien
tgaacgcctacatcacgtctatcag

SEQ ID NO: 35912 - DNA, 25 bp, Homo sapien
tgaacgcctacaacacgtctatcag

SEQ ID NO: 35913 - DNA, 25 bp, Homo sapien
gcgaggaccctgaaccgctacgtca

SEQ ID NO: 35914 - DNA, 25 bp, Homo sapien
gcgaggaccctgtaccgctacgtca

SEQ ID NO: 35915 - DNA, 25 bp, Homo sapien
gtcgagacacgaaggaaggacccac

SEQ ID NO: 35916 - DNA, 25 bp, Homo sapien
gtcgagacacgatggaaggacccac

SEQ ID NO: 35917 - DNA, 25 bp, Homo sapien
tttccgaaggtagacaggacctaga

SEQ ID NO: 35918 - DNA, 25 bp, Homo sapien
tttccgaaggtacacaggacctaga

SEQ ID NO: 35919 - DNA, 25 bp, Homo sapien
tttcaccagcgactgtaggtcccgg

SEQ ID NO: 35920 - DNA, 25 bp, Homo sapien
tttcaccagcgagtgtaggtcccgg

SEQ ID NO: 35921 - DNA, 25 bp, Homo sapien
ctcaaagtacgcaaacctgagacgg

SEQ ID NO: 35922 - DNA, 25 bp, Homo sapien
ctcaaagtacgctaacctgagacgg

SEQ ID NO: 35923 - DNA, 25 bp, Homo sapien
ttaaggtagagtctccacgaggtcg

SEQ ID NO: 35924 - DNA, 25 bp, Homo sapien
ttaaggtagagtgtccacgaggtcg

SEQ ID NO: 35925 - DNA, 25 bp, Homo sapien
gctggaggagagtccccgacgtcac

SEQ ID NO: 35926 - DNA, 25 bp, Homo sapien
gctggaggagagaccccgacgtcac

SEQ ID NO: 35927 - DNA, 25 bp, Homo sapien
tcgttaagacatacattgacgttat

SEQ ID NO: 35928 - DNA, 25 bp, Homo sapien
tcgttaagacattcattgacgttat

SEQ ID NO: 35929 - DNA, 25 bp, Homo sapien
ctaacgtcattgtaagagttctttt

SEQ ID NO: 35930 - DNA, 25 bp, Homo sapien
ctaacgtcattgaaagagttctttt

SEQ ID NO: 35931 - DNA, 25 bp, Homo sapien
tagtgaactttgcaaggtatctttc

SEQ ID NO: 35932 - DNA, 25 bp, Homo sapien
tagtgaactttggaaggtatctttc

SEQ ID NO: 35933 - DNA, 25 bp, Homo sapien
gataaatcttcagatgtttaaactc

SEQ ID NO: 35934 - DNA, 25 bp, Homo sapien
gataaatcttcacatgtttaaactc

SEQ ID NO: 35935 - DNA, 25 bp, Homo sapien
gtacggttatcatctcttaagttct

SEQ ID NO: 35936 - DNA, 25 bp, Homo sapien
gtacggttatcaactcttaagttct

SEQ ID NO: 35937 - DNA, 25 bp, Homo sapien
gactgatatcgaacgaactctcctc

SEQ ID NO: 35938 - DNA, 25 bp, Homo sapien
gactgatatcgatcgaactctcctc

SEQ ID NO: 35939 - DNA, 25 bp, Homo sapien
cttctgtaaggtctcaacactcctg

SEQ ID NO: 35940 - DNA, 25 bp, Homo sapien
cttctgtaaggtgtcaacactcctg

SEQ ID NO: 35941 - DNA, 25 bp, Homo sapien
aaatgtaagtgtctaaccgacttca

SEQ ID NO: 35942 - DNA, 25 bp, Homo sapien
aaatgtaagtgtgtaaccgacttca

SEQ ID NO: 35943 - DNA, 25 bp, Homo sapien
gtagtaagaacatcctctacgctca

SEQ ID NO: 35944 - DNA, 25 bp, Homo sapien
gtagtaagaacaacctctacgctca

SEQ ID NO: 35945 - DNA, 25 bp, Homo sapien
cgagaagactacagcctacatcaca

SEQ ID NO: 35946 - DNA, 25 bp, Homo sapien
cgagaagactactgcctacatcaca

SEQ ID NO: 35947 - DNA, 25 bp, Homo sapien
tcggaaaatacgttatgggtctcta

SEQ ID NO: 35948 - DNA, 25 bp, Homo sapien
tcggaaaatacgatatgggtctcta

SEQ ID NO: 35949 - DNA, 25 bp, Homo sapien
actcctagacgaaacacgacccgtg

SEQ ID NO: 35950 - DNA, 25 bp, Homo sapien
actcctagacgatacacgacccgtg

SEQ ID NO: 35951 - DNA, 25 bp, Homo sapien
ctcccagacgtcagtggagccgggt

SEQ ID NO: 35952 - DNA, 25 bp, Homo sapien
ctcccagacgtctgtggagccgggt

SEQ ID NO: 35953 - DNA, 25 bp, Homo sapien
ccgcaagagtgtgaagaccacgagt

SEQ ID NO: 35954 - DNA, 25 bp, Homo sapien
ccgcaagagtgtcaagaccacgagt

SEQ ID NO: 35955 - DNA, 25 bp, Homo sapien
tgttcgggtcgtccaggactcactt

SEQ ID NO: 35956 - DNA, 25 bp, Homo sapien
tgttcgggtcgtgcaggactcactt

SEQ ID NO: 35957 - DNA, 25 bp, Homo sapien
taccgatcttcgtgtttggatctgt

SEQ ID NO: 35958 - DNA, 25 bp, Homo sapien
taccgatcttcgagtttggatctgt

SEQ ID NO: 35959 - DNA, 25 bp, Homo sapien
tcctattcttcttcttttgattctt

SEQ ID NO: 35960 - DNA, 25 bp, Homo sapien
tcctattcttctacttttgattctt

SEQ ID NO: 35961 - DNA, 25 bp, Homo sapien
ctccatgttccgttcttagttgata

SEQ ID NO: 35962 - DNA, 25 bp, Homo sapien
ctccatgttccgatcttagttgata

SEQ ID NO: 35963 - DNA, 25 bp, Homo sapien
gactcaatttccattgatacatgtg

SEQ ID NO: 35964 - DNA, 25 bp, Homo sapien
gactcaatttcctttgatacatgtg

SEQ ID NO: 35965 - DNA, 25 bp, Homo sapien
gagaacgagacttatcgattaacac

SEQ ID NO: 35966 - DNA, 25 bp, Homo sapien
gagaacgagactaatcgattaacac

SEQ ID NO: 35967 - DNA, 25 bp, Homo sapien
tagaaggtatgttacctttttccga

SEQ ID NO: 35968 - DNA, 25 bp, Homo sapien
tagaaggtatgtaacctttttccga

SEQ ID NO: 35969 - DNA, 25 bp, Homo sapien
tccctgagttgattgtcgattaaga

SEQ ID NO: 35970 - DNA, 25 bp, Homo sapien
tccctgagttgaatgtcgattaaga

SEQ ID NO: 35971 - DNA, 25 bp, Homo sapien
ggattgagaacgaccgacaaagaac

SEQ ID NO: 35972 - DNA, 25 bp, Homo sapien
ggattgagaacgtccgacaaagaac

SEQ ID NO: 35973 - DNA, 25 bp, Homo sapien
ttattagtgaacagaatacccggaa

SEQ ID NO: 35974 - DNA, 25 bp, Homo sapien
ttattagtgaactgaatacccggaa

SEQ ID NO: 35975 - DNA, 25 bp, Homo sapien
ttctcgtgtttacgtacccaaaagt

SEQ ID NO: 35976 - DNA, 25 bp, Homo sapien
ttctcgtgtttaggtacccaaaagt

SEQ ID NO: 35977 - DNA, 25 bp, Homo sapien
agtttttatgaactagtctccatag

SEQ ID NO: 35978 - DNA, 25 bp, Homo sapien
agtttttatgaagtagtctccatag

SEQ ID NO: 35979 - DNA, 25 bp, Homo sapien
cactatgaggataaaggatccacaa

SEQ ID NO: 35980 - DNA, 25 bp, Homo sapien
cactatgaggattaaggatccacaa

SEQ ID NO: 35981 - DNA, 25 bp, Homo sapien
cttcggacggaaacaccggacccaa

SEQ ID NO: 35982 - DNA, 25 bp, Homo sapien
cttcggacggaatcaccggacccaa

SEQ ID NO: 35983 - DNA, 25 bp, Homo sapien
tggtgcatatcctgagcgacgccat

SEQ ID NO: 35984 - DNA, 25 bp, Homo sapien
tggtgcatatccagagcgacgccat

SEQ ID NO: 35985 - DNA, 25 bp, Homo sapien
gtgtcctatcctagactctctcgat

SEQ ID NO: 35986 - DNA, 25 bp, Homo sapien
gtgtcctatccttgactctctcgat

SEQ ID NO: 35987 - DNA, 25 bp, Homo sapien
aatcatctactatgtgacgacgttt

SEQ ID NO: 35988 - DNA, 25 bp, Homo sapien
aatcatctactaagtgacgacgttt

SEQ ID NO: 35989 - DNA, 25 bp, Homo sapien
tttcctagtttaagtcgacgtggtc

SEQ ID NO: 35990 - DNA, 25 bp, Homo sapien
tttcctagtttatgtcgacgtggtc

SEQ ID NO: 35991 - DNA, 25 bp, Homo sapien
tcctttgtttataactgaccggggt

SEQ ID NO: 35992 - DNA, 25 bp, Homo sapien
tcctttgtttattactgaccggggt

SEQ ID NO: 35993 - DNA, 25 bp, Homo sapien
tcactgtcttctatttttacggagg

SEQ ID NO: 35994 - DNA, 25 bp, Homo sapien
tcactgtcttctttttttacggagg

SEQ ID NO: 35995 - DNA, 25 bp, Homo sapien
tctccttatactattttgcggcgtc

SEQ ID NO: 35996 - DNA, 25 bp, Homo sapien
tctccttatacttttttgcggcgtc

SEQ ID NO: 35997 - DNA, 25 bp, Homo sapien
ctccttatttgtttctatgagcacg

SEQ ID NO: 35998 - DNA, 25 bp, Homo sapien
ctccttatttgtatctatgagcacg

SEQ ID NO: 35999 - DNA, 25 bp, Homo sapien
acggatgatctgtgtcatcaagttc

SEQ ID NO: 36000 - DNA, 25 bp, Homo sapien
acggatgatctgagtcatcaagttc

SEQ ID NO: 36001 - DNA, 25 bp, Homo sapien
aggagttgttttgcttaccaccaac

SEQ ID NO: 36002 - DNA, 25 bp, Homo sapien
aggagttgttttccttaccaccaac

SEQ ID NO: 36003 - DNA, 25 bp, Homo sapien
gtttacgtttgtctggtcactgaac

SEQ ID NO: 36004 - DNA, 25 bp, Homo sapien
gtttacgtttgtgtggtcactgaac

SEQ ID NO: 36005 - DNA, 25 bp, Homo sapien
ctcgttcgtatctcgggcgatacta

SEQ ID NO: 36006 - DNA, 25 bp, Homo sapien
ctcgttcgtatcacgggcgatacta

SEQ ID NO: 36007 - DNA, 25 bp, Homo sapien
acgtgctgtcgatgcgtgacgacca

SEQ ID NO: 36008 - DNA, 25 bp, Homo sapien
acgtgctgtcgaagcgtgacgacca

SEQ ID NO: 36009 - DNA, 25 bp, Homo sapien
ctcactcctgtgttctcggaccagg

SEQ ID NO: 36010 - DNA, 25 bp, Homo sapien
ctcactcctgtgatctcggaccagg

SEQ ID NO: 36011 - DNA, 25 bp, Homo sapien
agtatgtcttatcttccactcacgg

SEQ ID NO: 36012 - DNA, 25 bp, Homo sapien
agtatgtcttatgttccactcacgg

SEQ ID NO: 36013 - DNA, 25 bp, Homo sapien
aattggttgtcatcgcacagtcaca

SEQ ID NO: 36014 - DNA, 25 bp, Homo sapien
aattggttgtcaacgcacagtcaca

SEQ ID NO: 36015 - DNA, 25 bp, Homo sapien
tatcctcaggtaaaaccgttacgcc

SEQ ID NO: 36016 - DNA, 25 bp, Homo sapien
tatcctcaggtataaccgttacgcc

SEQ ID NO: 36017 - DNA, 25 bp, Homo sapien
catcgttacttaccaaatacagtgg

SEQ ID NO: 36018 - DNA, 25 bp, Homo sapien
catcgttacttagcaaatacagtgg

SEQ ID NO: 36019 - DNA, 25 bp, Homo sapien
ctcttgttttgtggagcatacggtg

SEQ ID NO: 36020 - DNA, 25 bp, Homo sapien
ctcttgttttgtcgagcatacggtg

SEQ ID NO: 36021 - DNA, 25 bp, Homo sapien
ttctttatgttcgaccgtatcagtt

SEQ ID NO: 36022 - DNA, 25 bp, Homo sapien
ttctttatgttccaccgtatcagtt

SEQ ID NO: 36023 - DNA, 25 bp, Homo sapien
cgttagttccgagctatgtacatcg

SEQ ID NO: 36024 - DNA, 25 bp, Homo sapien
cgttagttccgacctatgtacatcg

SEQ ID NO: 36025 - DNA, 25 bp, Homo sapien
tacgacatctgtttccttactgtcg

SEQ ID NO: 36026 - DNA, 25 bp, Homo sapien
tacgacatctgtatccttactgtcg

SEQ ID NO: 36027 - DNA, 25 bp, Homo sapien
gtcacgacctgttccgtaccggggg

SEQ ID NO: 36028 - DNA, 25 bp, Homo sapien
gtcacgacctgtaccgtaccggggg

SEQ ID NO: 36029 - DNA, 25 bp, Homo sapien
tagtcgagactctgacccccggggc

SEQ ID NO: 36030 - DNA, 25 bp, Homo sapien
tagtcgagactcagacccccggggc

SEQ ID NO: 36031 - DNA, 25 bp, Homo sapien
tgattaggtatcacggagagtcgac

SEQ ID NO: 36032 - DNA, 25 bp, Homo sapien
tgattaggtatctcggagagtcgac

SEQ ID NO: 36033 - DNA, 25 bp, Homo sapien
acgtcgacaccactaccggacccgc

SEQ ID NO: 36034 - DNA, 25 bp, Homo sapien
acgtcgacaccagtaccggacccgc

SEQ ID NO: 36035 - DNA, 25 bp, Homo sapien
cagaccgactactaacagtccctgt

SEQ ID NO: 36036 - DNA, 25 bp, Homo sapien
cagaccgactacaaacagtccctgt

SEQ ID NO: 36037 - DNA, 25 bp, Homo sapien
gagagttaaggtaagagacatccca

SEQ ID NO: 36038 - DNA, 25 bp, Homo sapien
gagagttaaggttagagacatccca

SEQ ID NO: 36039 - DNA, 25 bp, Homo sapien
gactcgtaactacaaatgagaccca

SEQ ID NO: 36040 - DNA, 25 bp, Homo sapien
gactcgtaactagaaatgagaccca

SEQ ID NO: 36041 - DNA, 25 bp, Homo sapien
aaacgacaatggacaggtacactga

SEQ ID NO: 36042 - DNA, 25 bp, Homo sapien
aaacgacaatggtcaggtacactga

SEQ ID NO: 36043 - DNA, 25 bp, Homo sapien
actgtaagacatgttcgtattccaa

SEQ ID NO: 36044 - DNA, 25 bp, Homo sapien
actgtaagacatcttcgtattccaa

SEQ ID NO: 36045 - DNA, 25 bp, Homo sapien
tccttaacagtttctcttctaaggt

SEQ ID NO: 36046 - DNA, 25 bp, Homo sapien
tccttaacagttactcttctaaggt

SEQ ID NO: 36047 - DNA, 25 bp, Homo sapien
cacagaacctcgaacccactaaggt

SEQ ID NO: 36048 - DNA, 25 bp, Homo sapien
cacagaacctcgtacccactaaggt

SEQ ID NO: 36049 - DNA, 25 bp, Homo sapien
cgtcggtgtcggaatgccctatggt

SEQ ID NO: 36050 - DNA, 25 bp, Homo sapien
cgtcggtgtcggtatgccctatggt

SEQ ID NO: 36051 - DNA, 25 bp, Homo sapien
acttgtcaatggacaaccctctgtg

SEQ ID NO: 36052 - DNA, 25 bp, Homo sapien
acttgtcaatggtcaaccctctgtg

SEQ ID NO: 36053 - DNA, 25 bp, Homo sapien
gtgtcaaggtatataagacctttct

SEQ ID NO: 36054 - DNA, 25 bp, Homo sapien
gtgtcaaggtatttaagacctttct

SEQ ID NO: 36055 - DNA, 25 bp, Homo sapien
tcgtaggagactatcagaaggtttc

SEQ ID NO: 36056 - DNA, 25 bp, Homo sapien
tcgtaggagactttcagaaggtttc

SEQ ID NO: 36057 - DNA, 25 bp, Homo sapien
cagagaaccgatcacgtcattttac

SEQ ID NO: 36058 - DNA, 25 bp, Homo sapien
cagagaaccgatgacgtcattttac

SEQ ID NO: 36059 - DNA, 25 bp, Homo sapien
ataccaaaacgacttcttattgcct

SEQ ID NO: 36060 - DNA, 25 bp, Homo sapien
ataccaaaacgagttcttattgcct

SEQ ID NO: 36061 - DNA, 25 bp, Homo sapien
gatcaaccagtgctgtacgttgcga

SEQ ID NO: 36062 - DNA, 25 bp, Homo sapien
gatcaaccagtggtgtacgttgcga

SEQ ID NO: 36063 - DNA, 25 bp, Homo sapien
cagtactcatcgagtacttatcgag

SEQ ID NO: 36064 - DNA, 25 bp, Homo sapien
cagtactcatcgtgtacttatcgag

SEQ ID NO: 36065 - DNA, 25 bp, Homo sapien
ggtgcacaggggtttgtcgttatca

SEQ ID NO: 36066 - DNA, 25 bp, Homo sapien
ggtgcacaggggattgtcgttatca

SEQ ID NO: 36067 - DNA, 25 bp, Homo sapien
cggggataatctatctaggattcat

SEQ ID NO: 36068 - DNA, 25 bp, Homo sapien
cggggataatctttctaggattcat

SEQ ID NO: 36069 - DNA, 25 bp, Homo sapien
ccagacgaacttctagacgggtcag

SEQ ID NO: 36070 - DNA, 25 bp, Homo sapien
ccagacgaacttgtagacgggtcag

SEQ ID NO: 36071 - DNA, 25 bp, Homo sapien
cacacagggtcttcgacaggacgga

SEQ ID NO: 36072 - DNA, 25 bp, Homo sapien
cacacagggtctacgacaggacgga

SEQ ID NO: 36073 - DNA, 25 bp, Homo sapien
ctcacccgcgcggtgcgcgggaaga

SEQ ID NO: 36074 - DNA, 25 bp, Homo sapien
ctcacccgcgcgctgcgcgggaaga

SEQ ID NO: 36075 - DNA, 25 bp, Homo sapien
ccaaacccgggtgactcgggaacac

SEQ ID NO: 36076 - DNA, 25 bp, Homo sapien
ccaaacccgggtcactcgggaacac

SEQ ID NO: 36077 - DNA, 25 bp, Homo sapien
tagtccacgcaggagtcacgggacc

SEQ ID NO: 36078 - DNA, 25 bp, Homo sapien
tagtccacgcagcagtcacgggacc

SEQ ID NO: 36079 - DNA, 25 bp, Homo sapien
ctccgcacaccgacgtgagagtctg

SEQ ID NO: 36080 - DNA, 25 bp, Homo sapien
ctccgcacaccgtcgtgagagtctg

SEQ ID NO: 36081 - DNA, 25 bp, Homo sapien
tgcctcgacctgaagtgtgggtctg

SEQ ID NO: 36082 - DNA, 25 bp, Homo sapien
tgcctcgacctgtagtgtgggtctg

SEQ ID NO: 36083 - DNA, 25 bp, Homo sapien
tttccgtgcgggtgacacgggtgga

SEQ ID NO: 36084 - DNA, 25 bp, Homo sapien
tttccgtgcgggagacacgggtgga

SEQ ID NO: 36085 - DNA, 25 bp, Homo sapien
cgtctctcgctggtcagagacagga

SEQ ID NO: 36086 - DNA, 25 bp, Homo sapien
cgtctctcgctgctcagagacagga

SEQ ID NO: 36087 - DNA, 25 bp, Homo sapien
aactacgaccacgaccttatcggga

SEQ ID NO: 36088 - DNA, 25 bp, Homo sapien
aactacgaccaccaccttatcggga

SEQ ID NO: 36089 - DNA, 25 bp, Homo sapien
tgagggtgtcttcatttccggcggt

SEQ ID NO: 36090 - DNA, 25 bp, Homo sapien
tgagggtgtcttgatttccggcggt

SEQ ID NO: 36091 - DNA, 25 bp, Homo sapien
tgacagcagtttgtcccctcgtcct

SEQ ID NO: 36092 - DNA, 25 bp, Homo sapien
tgacagcagtttctcccctcgtcct

SEQ ID NO: 36093 - DNA, 25 bp, Homo sapien
taaggtagaggtctctgtttgtccg

SEQ ID NO: 36094 - DNA, 25 bp, Homo sapien
taaggtagaggtgtctgtttgtccg

SEQ ID NO: 36095 - DNA, 25 bp, Homo sapien
tatagaaatagtgtccttccgaccg

SEQ ID NO: 36096 - DNA, 25 bp, Homo sapien
tatagaaatagtctccttccgaccg

SEQ ID NO: 36097 - DNA, 25 bp, Homo sapien
cgtacccaaaggtccaggaactcgt

SEQ ID NO: 36098 - DNA, 25 bp, Homo sapien
cgtacccaaaggaccaggaactcgt

SEQ ID NO: 36099 - DNA, 25 bp, Homo sapien
cccagggactcgtagtcgggacgaa

SEQ ID NO: 36100 - DNA, 25 bp, Homo sapien
cccagggactcgaagtcgggacgaa

SEQ ID NO: 36101 - DNA, 25 bp, Homo sapien
gtacattggacattgtattcgcaaa

SEQ ID NO: 36102 - DNA, 25 bp, Homo sapien
gtacattggacaatgtattcgcaaa

SEQ ID NO: 36103 - DNA, 25 bp, Homo sapien
tcaagaggtcgaccatctccctcgt

SEQ ID NO: 36104 - DNA, 25 bp, Homo sapien
tcaagaggtcgagcatctccctcgt

SEQ ID NO: 36105 - DNA, 25 bp, Homo sapien
ggaaacaacaaggttttctcactaa

SEQ ID NO: 36106 - DNA, 25 bp, Homo sapien
ggaaacaacaagcttttctcactaa

SEQ ID NO: 36107 - DNA, 25 bp, Homo sapien
acaaaatcactcgtgagtaccacga

SEQ ID NO: 36108 - DNA, 25 bp, Homo sapien
acaaaatcactcctgagtaccacga

SEQ ID NO: 36109 - DNA, 25 bp, Homo sapien
tcgaaggcgcgcttgaccgacgacg

SEQ ID NO: 36110 - DNA, 25 bp, Homo sapien
tcgaaggcgcgcatgaccgacgacg

SEQ ID NO: 36111 - DNA, 25 bp, Homo sapien
aggagaaaaggatccccgacgtact

SEQ ID NO: 36112 - DNA, 25 bp, Homo sapien
aggagaaaaggaaccccgacgtact

SEQ ID NO: 36113 - DNA, 25 bp, Homo sapien
agtaagacatcataacctcggtcat

SEQ ID NO: 36114 - DNA, 25 bp, Homo sapien
agtaagacatcaaaacctcggtcat

SEQ ID NO: 36115 - DNA, 25 bp, Homo sapien
ggagtattagagcaaaaccagatca

SEQ ID NO: 36116 - DNA, 25 bp, Homo sapien
ggagtattagaggaaaaccagatca

SEQ ID NO: 36117 - DNA, 25 bp, Homo sapien
cggagctcctagtcagacccggtgc

SEQ ID NO: 36118 - DNA, 25 bp, Homo sapien
cggagctcctagacagacccggtgc

SEQ ID NO: 36119 - DNA, 25 bp, Homo sapien
ggcgcgtccccgagtagctcaaggc

SEQ ID NO: 36120 - DNA, 25 bp, Homo sapien
ggcgcgtccccgtgtagctcaaggc

SEQ ID NO: 36121 - DNA, 25 bp, Homo sapien
gtagtgtctcccttgtggccggaga

SEQ ID NO: 36122 - DNA, 25 bp, Homo sapien
gtagtgtctcccatgtggccggaga

SEQ ID NO: 36123 - DNA, 25 bp, Homo sapien
cgcactgtcggtgacatcctgagac

SEQ ID NO: 36124 - DNA, 25 bp, Homo sapien
cgcactgtcggtcacatcctgagac

SEQ ID NO: 36125 - DNA, 25 bp, Homo sapien
tgacctctttcctgtaagtcctgga

SEQ ID NO: 36126 - DNA, 25 bp, Homo sapien
tgacctctttccagtaagtcctgga

SEQ ID NO: 36127 - DNA, 25 bp, Homo sapien
gtctttcccgagaagagcaactaga

SEQ ID NO: 36128 - DNA, 25 bp, Homo sapien
gtctttcccgagtagagcaactaga

SEQ ID NO: 36129 - DNA, 25 bp, Homo sapien
tcgtcaccgacacagagcacctaga

SEQ ID NO: 36130 - DNA, 25 bp, Homo sapien
tcgtcaccgacagagagcacctaga

SEQ ID NO: 36131 - DNA, 25 bp, Homo sapien
ccacacctggaacgtacgtctgtat

SEQ ID NO: 36132 - DNA, 25 bp, Homo sapien
ccacacctggaaggtacgtctgtat

SEQ ID NO: 36133 - DNA, 25 bp, Homo sapien
ccggtactccgacagtgtagattgt

SEQ ID NO: 36134 - DNA, 25 bp, Homo sapien
ccggtactccgagagtgtagattgt

SEQ ID NO: 36135 - DNA, 25 bp, Homo sapien
acgatctctctgcaccagtgtgtac

SEQ ID NO: 36136 - DNA, 25 bp, Homo sapien
acgatctctctggaccagtgtgtac

SEQ ID NO: 36137 - DNA, 25 bp, Homo sapien
tagtctctgtcgtgatacagttcga

SEQ ID NO: 36138 - DNA, 25 bp, Homo sapien
tagtctctgtcgagatacagttcga

SEQ ID NO: 36139 - DNA, 25 bp, Homo sapien
caccggtaacgaggacagtccgacg

SEQ ID NO: 36140 - DNA, 25 bp, Homo sapien
caccggtaacgacgacagtccgacg

SEQ ID NO: 36141 - DNA, 25 bp, Homo sapien
acgacccgagactgagggtcgtccg

SEQ ID NO: 36142 - DNA, 25 bp, Homo sapien
acgacccgagacagagggtcgtccg

SEQ ID NO: 36143 - DNA, 25 bp, Homo sapien
ccttcgggacgtcagttgtagtcgc

SEQ ID NO: 36144 - DNA, 25 bp, Homo sapien
ccttcgggacgtgagttgtagtcgc

SEQ ID NO: 36145 - DNA, 25 bp, Homo sapien
ttatataggaccggttgtacgacga

SEQ ID NO: 36146 - DNA, 25 bp, Homo sapien
ttatataggacccgttgtacgacga

SEQ ID NO: 36147 - DNA, 25 bp, Homo sapien
cttgttaaagtctcgggtgtactaa

SEQ ID NO: 36148 - DNA, 25 bp, Homo sapien
cttgttaaagtcacgggtgtactaa

SEQ ID NO: 36149 - DNA, 25 bp, Homo sapien
actatgaaatcgtggtagtcaagtc

SEQ ID NO: 36150 - DNA, 25 bp, Homo sapien
actatgaaatcgaggtagtcaagtc

SEQ ID NO: 36151 - DNA, 25 bp, Homo sapien
ctgttagtgccgtcttccgcttccc

SEQ ID NO: 36152 - DNA, 25 bp, Homo sapien
ctgttagtgccgacttccgcttccc

SEQ ID NO: 36153 - DNA, 25 bp, Homo sapien
tcttgtagagggtgatggtgcaccc

SEQ ID NO: 36154 - DNA, 25 bp, Homo sapien
tcttgtagagggagatggtgcaccc

SEQ ID NO: 36155 - DNA, 25 bp, Homo sapien
agacagacgaccagatccggtccca

SEQ ID NO: 36156 - DNA, 25 bp, Homo sapien
agacagacgacctgatccggtccca

SEQ ID NO: 36157 - DNA, 25 bp, Homo sapien
gagacctggggtttccgtcttcgga

SEQ ID NO: 36158 - DNA, 25 bp, Homo sapien
gagacctggggtatccgtcttcgga

SEQ ID NO: 36159 - DNA, 25 bp, Homo sapien
agtcccggtggctccgttccggtac

SEQ ID NO: 36160 - DNA, 25 bp, Homo sapien
agtcccggtggcaccgttccggtac

SEQ ID NO: 36161 - DNA, 25 bp, Homo sapien
gtttgccgggtctccggtctctctc

SEQ ID NO: 36162 - DNA, 25 bp, Homo sapien
gtttgccgggtcaccggtctctctc

SEQ ID NO: 36163 - DNA, 25 bp, Homo sapien
ctggttccgtagacccttgtccttc

SEQ ID NO: 36164 - DNA, 25 bp, Homo sapien
ctggttccgtagtcccttgtccttc

SEQ ID NO: 36165 - DNA, 25 bp, Homo sapien
gaggtgacatcaattccggtggtcc

SEQ ID NO: 36166 - DNA, 25 bp, Homo sapien
gaggtgacatcatttccggtggtcc

SEQ ID NO: 36167 - DNA, 25 bp, Homo sapien
agacgttacacttacggtaatttct

SEQ ID NO: 36168 - DNA, 25 bp, Homo sapien
agacgttacactaacggtaatttct

SEQ ID NO: 36169 - DNA, 25 bp, Homo sapien
gtggactgttataccgtgatcgtta

SEQ ID NO: 36170 - DNA, 25 bp, Homo sapien
gtggactgttattccgtgatcgtta

SEQ ID NO: 36171 - DNA, 25 bp, Homo sapien
gccacttctaactgacacagacaga

SEQ ID NO: 36172 - DNA, 25 bp, Homo sapien
gccacttctaacagacacagacaga

SEQ ID NO: 36173 - DNA, 25 bp, Homo sapien
actagttcggtgcaacccacacgac

SEQ ID NO: 36174 - DNA, 25 bp, Homo sapien
actagttcggtggaacccacacgac

SEQ ID NO: 36175 - DNA, 25 bp, Homo sapien
cttgtcgaggacctaccggcacgac

SEQ ID NO: 36176 - DNA, 25 bp, Homo sapien
cttgtcgaggacgtaccggcacgac

SEQ ID NO: 36177 - DNA, 25 bp, Homo sapien
cccagtagtcgcggacaagttctgc

SEQ ID NO: 36178 - DNA, 25 bp, Homo sapien
cccagtagtcgccgacaagttctgc

SEQ ID NO: 36179 - DNA, 25 bp, Homo sapien
gcgtcgtttgacggcacgaccgtcc

SEQ ID NO: 36180 - DNA, 25 bp, Homo sapien
gcgtcgtttgaccgcacgaccgtcc

SEQ ID NO: 36181 - DNA, 25 bp, Homo sapien
actagttttgtgtacggtcaatctt

SEQ ID NO: 36182 - DNA, 25 bp, Homo sapien
actagttttgtgaacggtcaatctt

SEQ ID NO: 36183 - DNA, 25 bp, Homo sapien
tttgtagactagtcgacatctactt

SEQ ID NO: 36184 - DNA, 25 bp, Homo sapien
tttgtagactagacgacatctactt

SEQ ID NO: 36185 - DNA, 25 bp, Homo sapien
gagttgagagggaagtcaccacagt

SEQ ID NO: 36186 - DNA, 25 bp, Homo sapien
gagttgagagggtagtcaccacagt

SEQ ID NO: 36187 - DNA, 25 bp, Homo sapien
gctgtactaagacttccactaacag

SEQ ID NO: 36188 - DNA, 25 bp, Homo sapien
gctgtactaagagttccactaacag

SEQ ID NO: 36189 - DNA, 25 bp, Homo sapien
gattactaaatttcgagtcgatctt

SEQ ID NO: 36190 - DNA, 25 bp, Homo sapien
gattactaaattacgagtcgatctt

SEQ ID NO: 36191 - DNA, 25 bp, Homo sapien
tatcgaaagatatctactacctttg

SEQ ID NO: 36192 - DNA, 25 bp, Homo sapien
tatcgaaagataactactacctttg

SEQ ID NO: 36193 - DNA, 25 bp, Homo sapien
gtatagactgtgtactcgtactttg

SEQ ID NO: 36194 - DNA, 25 bp, Homo sapien
gtatagactgtgaactcgtactttg

SEQ ID NO: 36195 - DNA, 25 bp, Homo sapien
tactgtaaacggatgatctgtgtca

SEQ ID NO: 36196 - DNA, 25 bp, Homo sapien
tactgtaaacggttgatctgtgtca

SEQ ID NO: 36197 - DNA, 25 bp, Homo sapien
tttgagaccagaccttcttagtcag

SEQ ID NO: 36198 - DNA, 25 bp, Homo sapien
tttgagaccagagcttcttagtcag

SEQ ID NO: 36199 - DNA, 25 bp, Homo sapien
cttcggccgaggtttccgtctctgt

SEQ ID NO: 36200 - DNA, 25 bp, Homo sapien
cttcggccgaggattccgtctctgt

SEQ ID NO: 36201 - DNA, 25 bp, Homo sapien
ataaaggacggtttagcgtctcgtc

SEQ ID NO: 36202 - DNA, 25 bp, Homo sapien
ataaaggacggtatagcgtctcgtc

SEQ ID NO: 36203 - DNA, 25 bp, Homo sapien
gtctagaggtacgaaagacggtccg

SEQ ID NO: 36204 - DNA, 25 bp, Homo sapien
gtctagaggtaccaaagacggtccg

SEQ ID NO: 36205 - DNA, 25 bp, Homo sapien
ggtggtgacacgaaccgactcaagt

SEQ ID NO: 36206 - DNA, 25 bp, Homo sapien
ggtggtgacacgtaccgactcaagt

SEQ ID NO: 36207 - DNA, 25 bp, Homo sapien
aaagtaccagaggtagtccgagaac

SEQ ID NO: 36208 - DNA, 25 bp, Homo sapien
aaagtaccagagctagtccgagaac

SEQ ID NO: 36209 - DNA, 25 bp, Homo sapien
ccttataaagtgttgtctgtagaac

SEQ ID NO: 36210 - DNA, 25 bp, Homo sapien
ccttataaagtgatgtctgtagaac

SEQ ID NO: 36211 - DNA, 25 bp, Homo sapien
ccctaccattgtgtcgacttgactc

SEQ ID NO: 36212 - DNA, 25 bp, Homo sapien
ccctaccattgtctcgacttgactc

SEQ ID NO: 36213 - DNA, 25 bp, Homo sapien
cgtaagagtacgtttggacttgaac

SEQ ID NO: 36214 - DNA, 25 bp, Homo sapien
cgtaagagtacgattggacttgaac

SEQ ID NO: 36215 - DNA, 25 bp, Homo sapien
cagaggtgtggttagagtctccaca

SEQ ID NO: 36216 - DNA, 25 bp, Homo sapien
cagaggtgtggtaagagtctccaca

SEQ ID NO: 36217 - DNA, 25 bp, Homo sapien
tcaggagttttcgtcactagacgag

SEQ ID NO: 36218 - DNA, 25 bp, Homo sapien
tcaggagttttcctcactagacgag

SEQ ID NO: 36219 - DNA, 25 bp, Homo sapien
tcgtagaggacatcaggtcctccgg

SEQ ID NO: 36220 - DNA, 25 bp, Homo sapien
tcgtagaggacaacaggtcctccgg

SEQ ID NO: 36221 - DNA, 25 bp, Homo sapien
tcgtaaggtaaaagaacttcacgtg

SEQ ID NO: 36222 - DNA, 25 bp, Homo sapien
tcgtaaggtaaatgaacttcacgtg

SEQ ID NO: 36223 - DNA, 25 bp, Homo sapien
tcaaacacgagtatccgtgtagacg

SEQ ID NO: 36224 - DNA, 25 bp, Homo sapien
tcaaacacgagtttccgtgtagacg

SEQ ID NO: 36225 - DNA, 25 bp, Homo sapien
acaaatacgtgtagtgaccgtaacg

SEQ ID NO: 36226 - DNA, 25 bp, Homo sapien
acaaatacgtgttgtgaccgtaacg

SEQ ID NO: 36227 - DNA, 25 bp, Homo sapien
accaggtatacttgtccgatctcat

SEQ ID NO: 36228 - DNA, 25 bp, Homo sapien
accaggtatactagtccgatctcat

SEQ ID NO: 36229 - DNA, 25 bp, Homo sapien
gacactggatcgttttcgtcccgtc

SEQ ID NO: 36230 - DNA, 25 bp, Homo sapien
gacactggatcgatttcgtcccgtc

SEQ ID NO: 36231 - DNA, 25 bp, Homo sapien
aaaggtacgtagacatttattacca

SEQ ID NO: 36232 - DNA, 25 bp, Homo sapien
aaaggtacgtagtcatttattacca

SEQ ID NO: 36233 - DNA, 25 bp, Homo sapien
tagaaaggtggagtctttacgacac

SEQ ID NO: 36234 - DNA, 25 bp, Homo sapien
tagaaaggtggactctttacgacac

SEQ ID NO: 36235 - DNA, 25 bp, Homo sapien
gtggttcggggagttctgttctacc

SEQ ID NO: 36236 - DNA, 25 bp, Homo sapien
gtggttcggggacttctgttctacc

SEQ ID NO: 36237 - DNA, 25 bp, Homo sapien
agtctttccgttttaccggtcgtaa

SEQ ID NO: 36238 - DNA, 25 bp, Homo sapien
agtctttccgttataccggtcgtaa

SEQ ID NO: 36239 - DNA, 25 bp, Homo sapien
gtctctctctccagtcggactcagt

SEQ ID NO: 36240 - DNA, 25 bp, Homo sapien
gtctctctctcctgtcggactcagt

SEQ ID NO: 36241 - DNA, 25 bp, Homo sapien
gaatagtctcccttaggtcgggttg

SEQ ID NO: 36242 - DNA, 25 bp, Homo sapien
gaatagtctcccataggtcgggttg

SEQ ID NO: 36243 - DNA, 25 bp, Homo sapien
tcatgtacccaaacctcgggtgtag

SEQ ID NO: 36244 - DNA, 25 bp, Homo sapien
tcatgtacccaatcctcgggtgtag

SEQ ID NO: 36245 - DNA, 25 bp, Homo sapien
ccgtcatctacaggtccatcagtaa

SEQ ID NO: 36246 - DNA, 25 bp, Homo sapien
ccgtcatctacacgtccatcagtaa

SEQ ID NO: 36247 - DNA, 25 bp, Homo sapien
gactctgagacaagaaccatctaaa

SEQ ID NO: 36248 - DNA, 25 bp, Homo sapien
gactctgagacatgaaccatctaaa

SEQ ID NO: 36249 - DNA, 25 bp, Homo sapien
ctacgggtctaaggatccctgagag

SEQ ID NO: 36250 - DNA, 25 bp, Homo sapien
ctacgggtctaacgatccctgagag

SEQ ID NO: 36251 - DNA, 25 bp, Homo sapien
aaaacggataaggaagtctcatgac

SEQ ID NO: 36252 - DNA, 25 bp, Homo sapien
aaaacggataagcaagtctcatgac

SEQ ID NO: 36253 - DNA, 25 bp, Homo sapien
gtcagtacgtttaaatcgtctcctc

SEQ ID NO: 36254 - DNA, 25 bp, Homo sapien
gtcagtacgttttaatcgtctcctc

SEQ ID NO: 36255 - DNA, 25 bp, Homo sapien
ggcagtctgtggtttcgtcgtcctc

SEQ ID NO: 36256 - DNA, 25 bp, Homo sapien
ggcagtctgtggattcgtcgtcctc

SEQ ID NO: 36257 - DNA, 25 bp, Homo sapien
gctggtgttagttgtggtcgtccta

SEQ ID NO: 36258 - DNA, 25 bp, Homo sapien
gctggtgttagtagtggtcgtccta

SEQ ID NO: 36259 - DNA, 25 bp, Homo sapien
taattctgtgacttctgcttttcga

SEQ ID NO: 36260 - DNA, 25 bp, Homo sapien
taattctgtgacatctgcttttcga

SEQ ID NO: 36261 - DNA, 25 bp, Homo sapien
ctggtctgtaaacgtagtctgtcac

SEQ ID NO: 36262 - DNA, 25 bp, Homo sapien
ctggtctgtaaaggtagtctgtcac

SEQ ID NO: 36263 - DNA, 25 bp, Homo sapien
acactacattagacagacgtttcag

SEQ ID NO: 36264 - DNA, 25 bp, Homo sapien
acactacattagtcagacgtttcag

SEQ ID NO: 36265 - DNA, 25 bp, Homo sapien
tgtactctccggtttttactcctcg

SEQ ID NO: 36266 - DNA, 25 bp, Homo sapien
tgtactctccggattttactcctcg

SEQ ID NO: 36267 - DNA, 25 bp, Homo sapien
ggacaccgaacgaaatattccatac

SEQ ID NO: 36268 - DNA, 25 bp, Homo sapien
ggacaccgaacgtaatattccatac

SEQ ID NO: 36269 - DNA, 25 bp, Homo sapien
taagagatagaataaccgatccaag

SEQ ID NO: 36270 - DNA, 25 bp, Homo sapien
taagagatagaaaaaccgatccaag

SEQ ID NO: 36271 - DNA, 25 bp, Homo sapien
cgagtgacagaaactcagtttttac

SEQ ID NO: 36272 - DNA, 25 bp, Homo sapien
cgagtgacagaatctcagtttttac

SEQ ID NO: 36273 - DNA, 25 bp, Homo sapien
ggagtgaacagacctcctcgttttc

SEQ ID NO: 36274 - DNA, 25 bp, Homo sapien
ggagtgaacagagctcctcgttttc

SEQ ID NO: 36275 - DNA, 25 bp, Homo sapien
gcgggaagacaaaggtagtcgtctc

SEQ ID NO: 36276 - DNA, 25 bp, Homo sapien
gcgggaagacaatggtagtcgtctc

SEQ ID NO: 36277 - DNA, 25 bp, Homo sapien
cgaggcgaagacatcagacgcaaac

SEQ ID NO: 36278 - DNA, 25 bp, Homo sapien
cgaggcgaagacttcagacgcaaac

SEQ ID NO: 36279 - DNA, 25 bp, Homo sapien
cactggagagtctccggtcacagac

SEQ ID NO: 36280 - DNA, 25 bp, Homo sapien
cactggagagtcaccggtcacagac

SEQ ID NO: 36281 - DNA, 25 bp, Homo sapien
gtgtgttacggttccggtgacagac

SEQ ID NO: 36282 - DNA, 25 bp, Homo sapien
gtgtgttacggtaccggtgacagac

SEQ ID NO: 36283 - DNA, 25 bp, Homo sapien
tagtacacgtgctctccatgtaaac

SEQ ID NO: 36284 - DNA, 25 bp, Homo sapien
tagtacacgtgcactccatgtaaac

SEQ ID NO: 36285 - DNA, 25 bp, Homo sapien
tgtcagtacgtgacatattgttaca

SEQ ID NO: 36286 - DNA, 25 bp, Homo sapien
tgtcagtacgtgtcatattgttaca

SEQ ID NO: 36287 - DNA, 25 bp, Homo sapien
agtgtgtctacttagagtcatctcc

SEQ ID NO: 36288 - DNA, 25 bp, Homo sapien
agtgtgtctactaagagtcatctcc

SEQ ID NO: 36289 - DNA, 25 bp, Homo sapien
gtatactgttttacgagttccttct

SEQ ID NO: 36290 - DNA, 25 bp, Homo sapien
gtatactgtttttcgagttccttct

SEQ ID NO: 36291 - DNA, 25 bp, Homo sapien
gtcacatgttgagaagtgtctcgtt

SEQ ID NO: 36292 - DNA, 25 bp, Homo sapien
gtcacatgttgacaagtgtctcgtt

SEQ ID NO: 36293 - DNA, 25 bp, Homo sapien
agaacagtttagtttgagttctcct

SEQ ID NO: 36294 - DNA, 25 bp, Homo sapien
agaacagtttagattgagttctcct

SEQ ID NO: 36295 - DNA, 25 bp, Homo sapien
tacaaagtgttcctcgtcccacatg

SEQ ID NO: 36296 - DNA, 25 bp, Homo sapien
tacaaagtgttcgtcgtcccacatg

SEQ ID NO: 36297 - DNA, 25 bp, Homo sapien
tgtaagtgtctgacttcgcactcgt

SEQ ID NO: 36298 - DNA, 25 bp, Homo sapien
tgtaagtgtctgtcttcgcactcgt

SEQ ID NO: 36299 - DNA, 25 bp, Homo sapien
tgtgaatacatgtatgtaacctcgt

SEQ ID NO: 36300 - DNA, 25 bp, Homo sapien
tgtgaatacatgaatgtaacctcgt

SEQ ID NO: 36301 - DNA, 25 bp, Homo sapien
gtggctactatgtgtgtagtccgtt

SEQ ID NO: 36302 - DNA, 25 bp, Homo sapien
gtggctactatgagtgtagtccgtt

SEQ ID NO: 36303 - DNA, 25 bp, Homo sapien
ggtaggaacgtgtttgtgacccgtt

SEQ ID NO: 36304 - DNA, 25 bp, Homo sapien
ggtaggaacgtgattgtgacccgtt

SEQ ID NO: 36305 - DNA, 25 bp, Homo sapien
tcgaggatctctttgttacccgtcg

SEQ ID NO: 36306 - DNA, 25 bp, Homo sapien
tcgaggatctctatgttacccgtcg

SEQ ID NO: 36307 - DNA, 25 bp, Homo sapien
taaggtgtataggtttactccttcg

SEQ ID NO: 36308 - DNA, 25 bp, Homo sapien
taaggtgtatagctttactccttcg

SEQ ID NO: 36309 - DNA, 25 bp, Homo sapien
gagaagatttagatgtaacagcctc

SEQ ID NO: 36310 - DNA, 25 bp, Homo sapien
gagaagatttagttgtaacagcctc

SEQ ID NO: 36311 - DNA, 25 bp, Homo sapien
agactcgtcgacttttgatcgagac

SEQ ID NO: 36312 - DNA, 25 bp, Homo sapien
agactcgtcgacatttgatcgagac

SEQ ID NO: 36313 - DNA, 25 bp, Homo sapien
gtttatccgactttacacgaaagtc

SEQ ID NO: 36314 - DNA, 25 bp, Homo sapien
gtttatccgactatacacgaaagtc

SEQ ID NO: 36315 - DNA, 25 bp, Homo sapien
agtaatagtcacaatttagactcgg

SEQ ID NO: 36316 - DNA, 25 bp, Homo sapien
agtaatagtcactatttagactcgg

SEQ ID NO: 36317 - DNA, 25 bp, Homo sapien
aggtaatcaccgatagtctatgtta

SEQ ID NO: 36318 - DNA, 25 bp, Homo sapien
aggtaatcaccgttagtctatgtta

SEQ ID NO: 36319 - DNA, 25 bp, Homo sapien
gtagtttctacgtaaacatacaagt

SEQ ID NO: 36320 - DNA, 25 bp, Homo sapien
gtagtttctacgaaaacatacaagt

SEQ ID NO: 36321 - DNA, 25 bp, Homo sapien
ttcgattctagtacagtcactcaag

SEQ ID NO: 36322 - DNA, 25 bp, Homo sapien
ttcgattctagttcagtcactcaag

SEQ ID NO: 36323 - DNA, 25 bp, Homo sapien
gaagttcccctgtcaggacgacgga

SEQ ID NO: 36324 - DNA, 25 bp, Homo sapien
gaagttcccctgacaggacgacgga

SEQ ID NO: 36325 - DNA, 25 bp, Homo sapien
ggattccttgttctcagtacctcta

SEQ ID NO: 36326 - DNA, 25 bp, Homo sapien
ggattccttgttgtcagtacctcta

SEQ ID NO: 36327 - DNA, 25 bp, Homo sapien
caatgttgtttctaccggcactact

SEQ ID NO: 36328 - DNA, 25 bp, Homo sapien
caatgttgtttcaaccggcactact

SEQ ID NO: 36329 - DNA, 25 bp, Homo sapien
ctttgagtttcttcacccgcgacac

SEQ ID NO: 36330 - DNA, 25 bp, Homo sapien
ctttgagtttctacacccgcgacac

SEQ ID NO: 36331 - DNA, 25 bp, Homo sapien
tcggtatgtcttaacgagccgctcc

SEQ ID NO: 36332 - DNA, 25 bp, Homo sapien
tcggtatgtctttacgagccgctcc

SEQ ID NO: 36333 - DNA, 25 bp, Homo sapien
gttcgtgtacggtccatctccccta

SEQ ID NO: 36334 - DNA, 25 bp, Homo sapien
gttcgtgtacggaccatctccccta

SEQ ID NO: 36335 - DNA, 25 bp, Homo sapien
taccgtgcttcaagtctttgttctt

SEQ ID NO: 36336 - DNA, 25 bp, Homo sapien
taccgtgcttcatgtctttgttctt

SEQ ID NO: 36337 - DNA, 25 bp, Homo sapien
accacggctacaacatcctttggaa

SEQ ID NO: 36338 - DNA, 25 bp, Homo sapien
accacggctacatcatcctttggaa

SEQ ID NO: 36339 - DNA, 25 bp, Homo sapien
cgtcacgatttaactcatcgataag

SEQ ID NO: 36340 - DNA, 25 bp, Homo sapien
cgtcacgatttatctcatcgataag

SEQ ID NO: 36341 - DNA, 25 bp, Homo sapien
gtgtgtctacttagagtcatctcct

SEQ ID NO: 36342 - DNA, 25 bp, Homo sapien
gtgtgtctactttgagtcatctcct

SEQ ID NO: 36343 - DNA, 25 bp, Homo sapien
gtgcgtgagtgtcgacgtcaaacac

SEQ ID NO: 36344 - DNA, 25 bp, Homo sapien
gtgcgtgagtgtggacgtcaaacac

SEQ ID NO: 36345 - DNA, 25 bp, Homo sapien
tgtcacgagattttcgagacagtac

SEQ ID NO: 36346 - DNA, 25 bp, Homo sapien
tgtcacgagattatcgagacagtac

SEQ ID NO: 36347 - DNA, 25 bp, Homo sapien
gtctttcagatgaagaccgacagtg

SEQ ID NO: 36348 - DNA, 25 bp, Homo sapien
gtctttcagatgtagaccgacagtg

SEQ ID NO: 36349 - DNA, 25 bp, Homo sapien
tctacttaatgtttaaccgtcgatg

SEQ ID NO: 36350 - DNA, 25 bp, Homo sapien
tctacttaatgtataaccgtcgatg

SEQ ID NO: 36351 - DNA, 25 bp, Homo sapien
agattgtttacctttccgtctctgt

SEQ ID NO: 36352 - DNA, 25 bp, Homo sapien
agattgtttaccattccgtctctgt

SEQ ID NO: 36353 - DNA, 25 bp, Homo sapien
attccggtacgtggtcccgtcctgt

SEQ ID NO: 36354 - DNA, 25 bp, Homo sapien
attccggtacgtcgtcccgtcctgt

SEQ ID NO: 36355 - DNA, 25 bp, Homo sapien
ggggtccggagtcgtcgcaccacta

SEQ ID NO: 36356 - DNA, 25 bp, Homo sapien
ggggtccggagtggtcgcaccacta

SEQ ID NO: 36357 - DNA, 25 bp, Homo sapien
aggagtatcccgaatagacaaaacc

SEQ ID NO: 36358 - DNA, 25 bp, Homo sapien
aggagtatcccgtatagacaaaacc

SEQ ID NO: 36359 - DNA, 25 bp, Homo sapien
ggtcactcaaaactccctactgtcg

SEQ ID NO: 36360 - DNA, 25 bp, Homo sapien
ggtcactcaaaagtccctactgtcg

SEQ ID NO: 36361 - DNA, 25 bp, Homo sapien
gagaaaattacaccttacctactgg

SEQ ID NO: 36362 - DNA, 25 bp, Homo sapien
gagaaaattacagcttacctactgg

SEQ ID NO: 36363 - DNA, 25 bp, Homo sapien
agagaaaaagtctgacagacgtaac

SEQ ID NO: 36364 - DNA, 25 bp, Homo sapien
agagaaaaagtcagacagacgtaac

SEQ ID NO: 36365 - DNA, 25 bp, Homo sapien
ttgtagtaaacgtgaccaaacgaac

SEQ ID NO: 36366 - DNA, 25 bp, Homo sapien
ttgtagtaaacgagaccaaacgaac

SEQ ID NO: 36367 - DNA, 25 bp, Homo sapien
ctgtaaaagacgtctcaacgacttg

SEQ ID NO: 36368 - DNA, 25 bp, Homo sapien
ctgtaaaagacgactcaacgacttg

SEQ ID NO: 36369 - DNA, 25 bp, Homo sapien
ctcggacaaatgagctactctctct

SEQ ID NO: 36370 - DNA, 25 bp, Homo sapien
ctcggacaaatgtgctactctctct

SEQ ID NO: 36371 - DNA, 25 bp, Homo sapien
taggtaacagactttgaagttactc

SEQ ID NO: 36372 - DNA, 25 bp, Homo sapien
taggtaacagacattgaagttactc

SEQ ID NO: 36373 - DNA, 25 bp, Homo sapien
aataagctaagtcgtaaaggtcttc

SEQ ID NO: 36374 - DNA, 25 bp, Homo sapien
aataagctaagtggtaaaggtcttc

SEQ ID NO: 36375 - DNA, 25 bp, Homo sapien
aagcgacgagatcagaaattcttgt

SEQ ID NO: 36376 - DNA, 25 bp, Homo sapien
aagcgacgagatgagaaattcttgt

SEQ ID NO: 36377 - DNA, 25 bp, Homo sapien
agggacacggtgtagacaagcgtca

SEQ ID NO: 36378 - DNA, 25 bp, Homo sapien
agggacacggtgaagacaagcgtca

SEQ ID NO: 36379 - DNA, 25 bp, Homo sapien
gaacagcgagtgagtacaaccgaga

SEQ ID NO: 36380 - DNA, 25 bp, Homo sapien
gaacagcgagtgtgtacaaccgaga

SEQ ID NO: 36381 - DNA, 25 bp, Homo sapien
gaagtaccgcgacttccaactcaca

SEQ ID NO: 36382 - DNA, 25 bp, Homo sapien
gaagtaccgcgagttccaactcaca

SEQ ID NO: 36383 - DNA, 25 bp, Homo sapien
aggtgtctgttactcaatactcaca

SEQ ID NO: 36384 - DNA, 25 bp, Homo sapien
aggtgtctgttagtcaatactcaca

SEQ ID NO: 36385 - DNA, 25 bp, Homo sapien
gttctagaacttgactgatctacta

SEQ ID NO: 36386 - DNA, 25 bp, Homo sapien
gttctagaacttcactgatctacta

SEQ ID NO: 36387 - DNA, 25 bp, Homo sapien
ggtctctaatacatcacgttgacca

SEQ ID NO: 36388 - DNA, 25 bp, Homo sapien
ggtctctaatacttcacgttgacca

SEQ ID NO: 36389 - DNA, 25 bp, Homo sapien
acgacagagtcgtcgagcagtccta

SEQ ID NO: 36390 - DNA, 25 bp, Homo sapien
acgacagagtcgacgagcagtccta

SEQ ID NO: 36391 - DNA, 25 bp, Homo sapien
ctagagaaatctacggtgacgttta

SEQ ID NO: 36392 - DNA, 25 bp, Homo sapien
ctagagaaatcttcggtgacgttta

SEQ ID NO: 36393 - DNA, 25 bp, Homo sapien
ggtcacaaataatcgttctaccttg

SEQ ID NO: 36394 - DNA, 25 bp, Homo sapien
ggtcacaaataaacgttctaccttg

SEQ ID NO: 36395 - DNA, 25 bp, Homo sapien
cgctagaaccgctcgtggagtcgtt

SEQ ID NO: 36396 - DNA, 25 bp, Homo sapien
cgctagaaccgcacgtggagtcgtt

SEQ ID NO: 36397 - DNA, 25 bp, Homo sapien
aactcagaaacgaacaagttaccga

SEQ ID NO: 36398 - DNA, 25 bp, Homo sapien
aactcagaaacgtacaagttaccga

SEQ ID NO: 36399 - DNA, 25 bp, Homo sapien
gccagacccgactgagtcgttgagg

SEQ ID NO: 36400 - DNA, 25 bp, Homo sapien
gccagacccgacagagtcgttgagg

SEQ ID NO: 36401 - DNA, 25 bp, Homo sapien
cgtaaagtcccgaaaggtagctacc

SEQ ID NO: 36402 - DNA, 25 bp, Homo sapien
cgtaaagtcccgtaaggtagctacc

SEQ ID NO: 36403 - DNA, 25 bp, Homo sapien
gactaagccccgttacagttaccac

SEQ ID NO: 36404 - DNA, 25 bp, Homo sapien
gactaagccccgatacagttaccac

SEQ ID NO: 36405 - DNA, 25 bp, Homo sapien
ctggtagccctactagacgaactgt

SEQ ID NO: 36406 - DNA, 25 bp, Homo sapien
ctggtagccctagtagacgaactgt

SEQ ID NO: 36407 - DNA, 25 bp, Homo sapien
gacggtgtcttctatagacgaatat

SEQ ID NO: 36408 - DNA, 25 bp, Homo sapien
gacggtgtcttcaatagacgaatat

SEQ ID NO: 36409 - DNA, 25 bp, Homo sapien
ggaggtgctactacgccgacaacag

SEQ ID NO: 36410 - DNA, 25 bp, Homo sapien
ggaggtgctacttcgccgacaacag

SEQ ID NO: 36411 - DNA, 25 bp, Homo sapien
gtgacaccacttgagcgagtcgaga

SEQ ID NO: 36412 - DNA, 25 bp, Homo sapien
gtgacaccacttcagcgagtcgaga

SEQ ID NO: 36413 - DNA, 25 bp, Homo sapien
ccgaactgtcttcacggtctcgtca

SEQ ID NO: 36414 - DNA, 25 bp, Homo sapien
ccgaactgtcttgacggtctcgtca

SEQ ID NO: 36415 - DNA, 25 bp, Homo sapien
acttcgcgacgttttagggaccgcc

SEQ ID NO: 36416 - DNA, 25 bp, Homo sapien
acttcgcgacgtattagggaccgcc

SEQ ID NO: 36417 - DNA, 25 bp, Homo sapien
gtggtcgcaccagaggacgtccgcc

SEQ ID NO: 36418 - DNA, 25 bp, Homo sapien
gtggtcgcaccacaggacgtccgcc

SEQ ID NO: 36419 - DNA, 25 bp, Homo sapien
gagtcggatcgacgacgggacctcc

SEQ ID NO: 36420 - DNA, 25 bp, Homo sapien
gagtcggatcgaggacgggacctcc

SEQ ID NO: 36421 - DNA, 25 bp, Homo sapien
agggttcggctctccgggactctca

SEQ ID NO: 36422 - DNA, 25 bp, Homo sapien
agggttcggctcaccgggactctca

SEQ ID NO: 36423 - DNA, 25 bp, Homo sapien
tctcgagactctacggaatctacgg

SEQ ID NO: 36424 - DNA, 25 bp, Homo sapien
tctcgagactcttcggaatctacgg

SEQ ID NO: 36425 - DNA, 25 bp, Homo sapien
cttaccttgacttacttgggttcca

SEQ ID NO: 36426 - DNA, 25 bp, Homo sapien
cttaccttgactaacttgggttcca

SEQ ID NO: 36427 - DNA, 25 bp, Homo sapien
atgtcgtgtaaattcgtaagatccc

SEQ ID NO: 36428 - DNA, 25 bp, Homo sapien
atgtcgtgtaaaatcgtaagatccc

SEQ ID NO: 36429 - DNA, 25 bp, Homo sapien
aatgttcctttctcggagagtcccg

SEQ ID NO: 36430 - DNA, 25 bp, Homo sapien
aatgttcctttcacggagagtcccg

SEQ ID NO: 36431 - DNA, 25 bp, Homo sapien
gattccacgttgttcgtgaaccctc

SEQ ID NO: 36432 - DNA, 25 bp, Homo sapien
gattccacgttgatcgtgaaccctc

SEQ ID NO: 36433 - DNA, 25 bp, Homo sapien
gactctcccgtagcagtggacccaa

SEQ ID NO: 36434 - DNA, 25 bp, Homo sapien
gactctcccgtaccagtggacccaa

SEQ ID NO: 36435 - DNA, 25 bp, Homo sapien
ggtctcactctggattaacacaaag

SEQ ID NO: 36436 - DNA, 25 bp, Homo sapien
ggtctcactctgcattaacacaaag

SEQ ID NO: 36437 - DNA, 25 bp, Homo sapien
tgttacagtccgtgtaccatgtaga

SEQ ID NO: 36438 - DNA, 25 bp, Homo sapien
tgttacagtccgagtaccatgtaga

SEQ ID NO: 36439 - DNA, 25 bp, Homo sapien
gtctaagactagaaacctctgaact

SEQ ID NO: 36440 - DNA, 25 bp, Homo sapien
gtctaagactagtaacctctgaact

SEQ ID NO: 36441 - DNA, 25 bp, Homo sapien
atgtaacagaggtcacctggtatac

SEQ ID NO: 36442 - DNA, 25 bp, Homo sapien
atgtaacagaggacacctggtatac

SEQ ID NO: 36443 - DNA, 25 bp, Homo sapien
gggacgtcccagtcgattccgtgtc

SEQ ID NO: 36444 - DNA, 25 bp, Homo sapien
gggacgtcccagacgattccgtgtc

SEQ ID NO: 36445 - DNA, 25 bp, Homo sapien
ttcgacgtcaaaccacattccgtga

SEQ ID NO: 36446 - DNA, 25 bp, Homo sapien
ttcgacgtcaaagcacattccgtga

SEQ ID NO: 36447 - DNA, 25 bp, Homo sapien
acccactggtagacccggtcaaggt

SEQ ID NO: 36448 - DNA, 25 bp, Homo sapien
acccactggtagtcccggtcaaggt

SEQ ID NO: 36449 - DNA, 25 bp, Homo sapien
actgaccagtaacaccggtctccag

SEQ ID NO: 36450 - DNA, 25 bp, Homo sapien
actgaccagtaagaccggtctccag

SEQ ID NO: 36451 - DNA, 25 bp, Homo sapien
atcgtcggagatatttgactaccat

SEQ ID NO: 36452 - DNA, 25 bp, Homo sapien
atcgtcggagatttttgactaccat

SEQ ID NO: 36453 - DNA, 25 bp, Homo sapien
gaacggagtgtacagtcccgtccat

SEQ ID NO: 36454 - DNA, 25 bp, Homo sapien
gaacggagtgtagagtcccgtccat

SEQ ID NO: 36455 - DNA, 25 bp, Homo sapien
ctggaaggatcacttcctccgtcac

SEQ ID NO: 36456 - DNA, 25 bp, Homo sapien
ctggaaggatcagttcctccgtcac

SEQ ID NO: 36457 - DNA, 25 bp, Homo sapien
tactgtatatgacagttgcctccca

SEQ ID NO: 36458 - DNA, 25 bp, Homo sapien
tactgtatatgagagttgcctccca

SEQ ID NO: 36459 - DNA, 25 bp, Homo sapien
aggtgttgaaggttagctctcaaca

SEQ ID NO: 36460 - DNA, 25 bp, Homo sapien
aggtgttgaaggatagctctcaaca

SEQ ID NO: 36461 - DNA, 25 bp, Homo sapien
agaagtgtaactacatgaacaacat

SEQ ID NO: 36462 - DNA, 25 bp, Homo sapien
agaagtgtaacttcatgaacaacat

SEQ ID NO: 36463 - DNA, 25 bp, Homo sapien
aaaagaacacactcgagactgagat

SEQ ID NO: 36464 - DNA, 25 bp, Homo sapien
aaaagaacacacacgagactgagat

SEQ ID NO: 36465 - DNA, 25 bp, Homo sapien
aaagagaaacacctaaaggtgtcac

SEQ ID NO: 36466 - DNA, 25 bp, Homo sapien
aaagagaaacacgtaaaggtgtcac

SEQ ID NO: 36467 - DNA, 25 bp, Homo sapien
aatgataaaaattggtgtcgttgtt

SEQ ID NO: 36468 - DNA, 25 bp, Homo sapien
aatgataaaaataggtgtcgttgtt

SEQ ID NO: 36469 - DNA, 25 bp, Homo sapien
cttatggttctaaagcgtgctggtt

SEQ ID NO: 36470 - DNA, 25 bp, Homo sapien
cttatggttctatagcgtgctggtt

SEQ ID NO: 36471 - DNA, 25 bp, Homo sapien
tcataccgtttaacgaacttttgta

SEQ ID NO: 36472 - DNA, 25 bp, Homo sapien
tcataccgtttatcgaacttttgta

SEQ ID NO: 36473 - DNA, 25 bp, Homo sapien
attcgatccttgttacaattggttg

SEQ ID NO: 36474 - DNA, 25 bp, Homo sapien
attcgatccttgatacaattggttg

SEQ ID NO: 36475 - DNA, 25 bp, Homo sapien
gtcacgtaagctttctcataaaggc

SEQ ID NO: 36476 - DNA, 25 bp, Homo sapien
gtcacgtaagctatctcataaaggc

SEQ ID NO: 36477 - DNA, 25 bp, Homo sapien
ggtgtttgacccatcattgactcag

SEQ ID NO: 36478 - DNA, 25 bp, Homo sapien
ggtgtttgacccttcattgactcag

SEQ ID NO: 36479 - DNA, 25 bp, Homo sapien
atgtacatccatacttctgtagcag

SEQ ID NO: 36480 - DNA, 25 bp, Homo sapien
atgtacatccattcttctgtagcag

SEQ ID NO: 36481 - DNA, 25 bp, Homo sapien
gtcgctccgaccttacgttcacggg

SEQ ID NO: 36482 - DNA, 25 bp, Homo sapien
gtcgctccgaccatacgttcacggg

SEQ ID NO: 36483 - DNA, 25 bp, Homo sapien
tttcacactccctacgtatccgggt

SEQ ID NO: 36484 - DNA, 25 bp, Homo sapien
tttcacactcccaacgtatccgggt

SEQ ID NO: 36485 - DNA, 25 bp, Homo sapien
gtctaaaccgtcaacgaagacacat

SEQ ID NO: 36486 - DNA, 25 bp, Homo sapien
gtctaaaccgtctacgaagacacat

SEQ ID NO: 36487 - DNA, 25 bp, Homo sapien
ttagaccacgagaagtccgtccagt

SEQ ID NO: 36488 - DNA, 25 bp, Homo sapien
ttagaccacgagtagtccgtccagt

SEQ ID NO: 36489 - DNA, 25 bp, Homo sapien
cacttagaccgcaaggtgcctctac

SEQ ID NO: 36490 - DNA, 25 bp, Homo sapien
cacttagaccgctaggtgcctctac

SEQ ID NO: 36491 - DNA, 25 bp, Homo sapien
taccgtgtgactctatttgactccc

SEQ ID NO: 36492 - DNA, 25 bp, Homo sapien
taccgtgtgactgtatttgactccc

SEQ ID NO: 36493 - DNA, 25 bp, Homo sapien
agacgtaatctggtccagacaccat

SEQ ID NO: 36494 - DNA, 25 bp, Homo sapien
agacgtaatctgctccagacaccat

SEQ ID NO: 36495 - DNA, 25 bp, Homo sapien
gcgtcatttctcctccaggaccgat

SEQ ID NO: 36496 - DNA, 25 bp, Homo sapien
gcgtcatttctcgtccaggaccgat

SEQ ID NO: 36497 - DNA, 25 bp, Homo sapien
aagtccggtcttggacaccggaccc

SEQ ID NO: 36498 - DNA, 25 bp, Homo sapien
aagtccggtcttcgacaccggaccc

SEQ ID NO: 36499 - DNA, 25 bp, Homo sapien
cgatgttgggttactcaaccgaccc

SEQ ID NO: 36500 - DNA, 25 bp, Homo sapien
cgatgttgggtttctcaaccgaccc

SEQ ID NO: 36501 - DNA, 25 bp, Homo sapien
acttattttggtgtaactaattccg

SEQ ID NO: 36502 - DNA, 25 bp, Homo sapien
acttattttggtctaactaattccg

SEQ ID NO: 36503 - DNA, 25 bp, Homo sapien
ttcatgttgctattgacatgtggac

SEQ ID NO: 36504 - DNA, 25 bp, Homo sapien
ttcatgttgctaatgacatgtggac

SEQ ID NO: 36505 - DNA, 25 bp, Homo sapien
taatactgtctttgtgcagggtgac

SEQ ID NO: 36506 - DNA, 25 bp, Homo sapien
taatactgtcttagtgcagggtgac

SEQ ID NO: 36507 - DNA, 25 bp, Homo sapien
aatcagcactgttgtcgaagagtga

SEQ ID NO: 36508 - DNA, 25 bp, Homo sapien
aatcagcactgtagtcgaagagtga

SEQ ID NO: 36509 - DNA, 25 bp, Homo sapien
attaaaacctattcgactcatttta

SEQ ID NO: 36510 - DNA, 25 bp, Homo sapien
attaaaacctatacgactcatttta

SEQ ID NO: 36511 - DNA, 25 bp, Homo sapien
acgtataccagtaggcaatgtaaca

SEQ ID NO: 36512 - DNA, 25 bp, Homo sapien
acgtataccagttggcaatgtaaca

SEQ ID NO: 36513 - DNA, 25 bp, Homo sapien
ttactggagtctggtcactgttccc

SEQ ID NO: 36514 - DNA, 25 bp, Homo sapien
ttactggagtctcgtcactgttccc

SEQ ID NO: 36515 - DNA, 25 bp, Homo sapien
cagactccggtcttgtcaagttccc

SEQ ID NO: 36516 - DNA, 25 bp, Homo sapien
cagactccggtcatgtcaagttccc

SEQ ID NO: 36517 - DNA, 25 bp, Homo sapien
cagataccgaatttttagtcccacg

SEQ ID NO: 36518 - DNA, 25 bp, Homo sapien
cagataccgaatatttagtcccacg

SEQ ID NO: 36519 - DNA, 25 bp, Homo sapien
gtcagtttggaaaattactacacca

SEQ ID NO: 36520 - DNA, 25 bp, Homo sapien
gtcagtttggaatattactacacca

SEQ ID NO: 36521 - DNA, 25 bp, Homo sapien
ttatttcggtgagtgtgactgaccc

SEQ ID NO: 36522 - DNA, 25 bp, Homo sapien
ttatttcggtgactgtgactgaccc

SEQ ID NO: 36523 - DNA, 25 bp, Homo sapien
aaattacggtgacctctacttttcg

SEQ ID NO: 36524 - DNA, 25 bp, Homo sapien
aaattacggtgagctctacttttcg

SEQ ID NO: 36525 - DNA, 25 bp, Homo sapien
taatgtggtgtattacgtacagaaa

SEQ ID NO: 36526 - DNA, 25 bp, Homo sapien
taatgtggtgtaatacgtacagaaa

SEQ ID NO: 36527 - DNA, 25 bp, Homo sapien
caatcggactcaactgagagtaaca

SEQ ID NO: 36528 - DNA, 25 bp, Homo sapien
caatcggactcatctgagagtaaca

SEQ ID NO: 36529 - DNA, 25 bp, Homo sapien
cggctccgacggtccgggtaaatac

SEQ ID NO: 36530 - DNA, 25 bp, Homo sapien
cggctccgacggaccgggtaaatac

SEQ ID NO: 36531 - DNA, 25 bp, Homo sapien
gaagtactcacttcatacatggaaa

SEQ ID NO: 36532 - DNA, 25 bp, Homo sapien
gaagtactcactacatacatggaaa

SEQ ID NO: 36533 - DNA, 25 bp, Homo sapien
gtataccgtacataccgagttagaa

SEQ ID NO: 36534 - DNA, 25 bp, Homo sapien
gtataccgtacaaaccgagttagaa

SEQ ID NO: 36535 - DNA, 25 bp, Homo sapien
ccgacccgataaaacagtaccacag

SEQ ID NO: 36536 - DNA, 25 bp, Homo sapien
ccgacccgataatacagtaccacag

SEQ ID NO: 36537 - DNA, 25 bp, Homo sapien
tgaccaccgtcaactcagaccagag

SEQ ID NO: 36538 - DNA, 25 bp, Homo sapien
tgaccaccgtcatctcagaccagag

SEQ ID NO: 36539 - DNA, 25 bp, Homo sapien
cgacagtaagtatagggtcgtcgga

SEQ ID NO: 36540 - DNA, 25 bp, Homo sapien
cgacagtaagtaaagggtcgtcgga

SEQ ID NO: 36541 - DNA, 25 bp, Homo sapien
aaatcctaccgagagtcgaccgact

SEQ ID NO: 36542 - DNA, 25 bp, Homo sapien
aaatcctaccgacagtcgaccgact

SEQ ID NO: 36543 - DNA, 25 bp, Homo sapien
aagaaaacgcgaagtcggacgcgta

SEQ ID NO: 36544 - DNA, 25 bp, Homo sapien
aagaaaacgcgatgtcggacgcgta

SEQ ID NO: 36545 - DNA, 25 bp, Homo sapien
tgagacactccaactcagtcgactg

SEQ ID NO: 36546 - DNA, 25 bp, Homo sapien
tgagacactccatctcagtcgactg

SEQ ID NO: 36547 - DNA, 25 bp, Homo sapien
ctgatacctctaagtcccgtcctag

SEQ ID NO: 36548 - DNA, 25 bp, Homo sapien
ctgatacctctatgtcccgtcctag

SEQ ID NO: 36549 - DNA, 25 bp, Homo sapien
tctaggacggctctaccgatctcag

SEQ ID NO: 36550 - DNA, 25 bp, Homo sapien
tctaggacggctgtaccgatctcag

SEQ ID NO: 36551 - DNA, 25 bp, Homo sapien
cgagacagcgggtccgacctcacgt

SEQ ID NO: 36552 - DNA, 25 bp, Homo sapien
cgagacagcgggaccgacctcacgt

SEQ ID NO: 36553 - DNA, 25 bp, Homo sapien
cccgaaggtcaggaccgaccagact

SEQ ID NO: 36554 - DNA, 25 bp, Homo sapien
cccgaaggtcagcaccgaccagact

SEQ ID NO: 36555 - DNA, 25 bp, Homo sapien
tttcccgaggagcttacggtccctt

SEQ ID NO: 36556 - DNA, 25 bp, Homo sapien
tttcccgaggaggttacggtccctt

SEQ ID NO: 36557 - DNA, 25 bp, Homo sapien
actcacaagtggaaacgctgacttg

SEQ ID NO: 36558 - DNA, 25 bp, Homo sapien
actcacaagtggtaacgctgacttg

SEQ ID NO: 36559 - DNA, 25 bp, Homo sapien
tttatgggacgtctcgccgtggtcg

SEQ ID NO: 36560 - DNA, 25 bp, Homo sapien
tttatgggacgtgtcgccgtggtcg

SEQ ID NO: 36561 - DNA, 25 bp, Homo sapien
gtctgctaggagtaaccacccgtcc

SEQ ID NO: 36562 - DNA, 25 bp, Homo sapien
gtctgctaggagaaaccacccgtcc

SEQ ID NO: 36563 - DNA, 25 bp, Homo sapien
tgtcgtgagctactcattcacgttt

SEQ ID NO: 36564 - DNA, 25 bp, Homo sapien
tgtcgtgagctagtcattcacgttt

SEQ ID NO: 36565 - DNA, 25 bp, Homo sapien
caggtcagtctttactcatttttgt

SEQ ID NO: 36566 - DNA, 25 bp, Homo sapien
caggtcagtcttaactcatttttgt

SEQ ID NO: 36567 - DNA, 25 bp, Homo sapien
gggtagactcttagacaggattttc

SEQ ID NO: 36568 - DNA, 25 bp, Homo sapien
gggtagactctttgacaggattttc

SEQ ID NO: 36569 - DNA, 25 bp, Homo sapien
gtaaatgtcttcacaggtttttctc

SEQ ID NO: 36570 - DNA, 25 bp, Homo sapien
gtaaatgtcttctcaggtttttctc

SEQ ID NO: 36571 - DNA, 25 bp, Homo sapien
tgtacggttatcatctcttaagttc

SEQ ID NO: 36572 - DNA, 25 bp, Homo sapien
tgtacggttatcttctcttaagttc

SEQ ID NO: 36573 - DNA, 25 bp, Homo sapien
gactgatattatgaactactgtgtc

SEQ ID NO: 36574 - DNA, 25 bp, Homo sapien
gactgatattatcaactactgtgtc

SEQ ID NO: 36575 - DNA, 25 bp, Homo sapien
ttttgtacttgtctcgaacccactg

SEQ ID NO: 36576 - DNA, 25 bp, Homo sapien
ttttgtacttgtgtcgaacccactg

SEQ ID NO: 36577 - DNA, 25 bp, Homo sapien
aatttacagtgtattagaccttctg

SEQ ID NO: 36578 - DNA, 25 bp, Homo sapien
aatttacagtgttttagaccttctg

SEQ ID NO: 36579 - DNA, 25 bp, Homo sapien
gtaagacgttcatcctctatctcga

SEQ ID NO: 36580 - DNA, 25 bp, Homo sapien
gtaagacgttcaacctctatctcga

SEQ ID NO: 36581 - DNA, 25 bp, Homo sapien
agtcgcaaggtcagcctacattcac

SEQ ID NO: 36582 - DNA, 25 bp, Homo sapien
agtcgcaaggtctgcctacattcac

SEQ ID NO: 36583 - DNA, 25 bp, Homo sapien
cgtgaaagtgtttatgatcgtctca

SEQ ID NO: 36584 - DNA, 25 bp, Homo sapien
cgtgaaagtgttaatgatcgtctca

SEQ ID NO: 36585 - DNA, 25 bp, Homo sapien
ctcaccacagatatcgagactccgg

SEQ ID NO: 36586 - DNA, 25 bp, Homo sapien
ctcaccacagatttcgagactccgg

SEQ ID NO: 36587 - DNA, 25 bp, Homo sapien
cctcccagacgtcagtggagccggg

SEQ ID NO: 36588 - DNA, 25 bp, Homo sapien
cctcccagacgtgagtggagccggg

SEQ ID NO: 36589 - DNA, 25 bp, Homo sapien
aaccggaagacgtcggagaccacgg

SEQ ID NO: 36590 - DNA, 25 bp, Homo sapien
aaccggaagacgacggagaccacgg

SEQ ID NO: 36591 - DNA, 25 bp, Homo sapien
acgatgagcgcgacagagactccgg

SEQ ID NO: 36592 - DNA, 25 bp, Homo sapien
acgatgagcgcgtcagagactccgg

SEQ ID NO: 36593 - DNA, 25 bp, Homo sapien
gtccagtttcggttgtggcatcggt

SEQ ID NO: 36594 - DNA, 25 bp, Homo sapien
gtccagtttcggatgtggcatcggt

SEQ ID NO: 36595 - DNA, 25 bp, Homo sapien
tattctttagtcctgttgacatctg

SEQ ID NO: 36596 - DNA, 25 bp, Homo sapien
tattctttagtcgtgttgacatctg

SEQ ID NO: 36597 - DNA, 25 bp, Homo sapien
ctccatgttccgttcttagttgata

SEQ ID NO: 36598 - DNA, 25 bp, Homo sapien
ctccatgttccgatcttagttgata

SEQ ID NO: 36599 - DNA, 25 bp, Homo sapien
caagtgtctccgatcttagtccatg

SEQ ID NO: 36600 - DNA, 25 bp, Homo sapien
caagtgtctccgttcttagtccatg

SEQ ID NO: 36601 - DNA, 25 bp, Homo sapien
gaaaaggttccctattccctagtag

SEQ ID NO: 36602 - DNA, 25 bp, Homo sapien
gaaaaggttcccaattccctagtag

SEQ ID NO: 36603 - DNA, 25 bp, Homo sapien
tgttacgtgttgtacatttcttcca

SEQ ID NO: 36604 - DNA, 25 bp, Homo sapien
tgttacgtgttgaacatttcttcca

SEQ ID NO: 36605 - DNA, 25 bp, Homo sapien
gtgtcactttgtctttcgtattaaa

SEQ ID NO: 36606 - DNA, 25 bp, Homo sapien
gtgtcactttgtgtttcgtattaaa

SEQ ID NO: 36607 - DNA, 25 bp, Homo sapien
aggtttggaagaacaacagacaaac

SEQ ID NO: 36608 - DNA, 25 bp, Homo sapien
aggtttggaagatcaacagacaaac

SEQ ID NO: 36609 - DNA, 25 bp, Homo sapien
gtatttgaacgaaaccgaccagaag

SEQ ID NO: 36610 - DNA, 25 bp, Homo sapien
gtatttgaacgataccgaccagaag

SEQ ID NO: 36611 - DNA, 25 bp, Homo sapien
agtccagtgttcagatcccaaaagt

SEQ ID NO: 36612 - DNA, 25 bp, Homo sapien
agtccagtgttctgatcccaaaagt

SEQ ID NO: 36613 - DNA, 25 bp, Homo sapien
agttttttacgtaactgttcccaag

SEQ ID NO: 36614 - DNA, 25 bp, Homo sapien
agttttttacgttactgttcccaag

SEQ ID NO: 36615 - DNA, 25 bp, Homo sapien
ttacgtggtgataaatgactcccaa

SEQ ID NO: 36616 - DNA, 25 bp, Homo sapien
ttacgtggtgattaatgactcccaa

SEQ ID NO: 36617 - DNA, 25 bp, Homo sapien
tcatggaggacaaagggtacccaag

SEQ ID NO: 36618 - DNA, 25 bp, Homo sapien
tcatggaggacatagggtacccaag

SEQ ID NO: 36619 - DNA, 25 bp, Homo sapien
ggtggtccaggttcaggtcgaccca

SEQ ID NO: 36620 - DNA, 25 bp, Homo sapien
ggtggtccaggtacaggtcgaccca

SEQ ID NO: 36621 - DNA, 25 bp, Homo sapien
gtgcacgttgcgtgcgtaccgtcat

SEQ ID NO: 36622 - DNA, 25 bp, Homo sapien
gtgcacgttgcgagcgtaccgtcat

SEQ ID NO: 36623 - DNA, 25 bp, Homo sapien
atagtactcatatgtgtagacgctt

SEQ ID NO: 36624 - DNA, 25 bp, Homo sapien
atagtactcataagtgtagacgctt

SEQ ID NO: 36625 - DNA, 25 bp, Homo sapien
ttccaattctacgtcgtacgggtcg

SEQ ID NO: 36626 - DNA, 25 bp, Homo sapien
ttccaattctacctcgtacgggtcg

SEQ ID NO: 36627 - DNA, 25 bp, Homo sapien
tcatgtcctatttcacttatcgggg

SEQ ID NO: 36628 - DNA, 25 bp, Homo sapien
tcatgtcctattacacttatcgggg

SEQ ID NO: 36629 - DNA, 25 bp, Homo sapien
tgacatgtccatctttgttcgggtg

SEQ ID NO: 36630 - DNA, 25 bp, Homo sapien
tgacatgtccatgtttgttcgggtg

SEQ ID NO: 36631 - DNA, 25 bp, Homo sapien
ggtcttttactttttgtggcggtac

SEQ ID NO: 36632 - DNA, 25 bp, Homo sapien
ggtcttttacttattgtggcggtac

SEQ ID NO: 36633 - DNA, 25 bp, Homo sapien
acccctttcttgtcgtctgtggccg

SEQ ID NO: 36634 - DNA, 25 bp, Homo sapien
acccctttcttgacgtctgtggccg

SEQ ID NO: 36635 - DNA, 25 bp, Homo sapien
caggactctattgttccttaggtcc

SEQ ID NO: 36636 - DNA, 25 bp, Homo sapien
caggactctattcttccttaggtcc

SEQ ID NO: 36637 - DNA, 25 bp, Homo sapien
cgagctgtttgtcttcctccgacac

SEQ ID NO: 36638 - DNA, 25 bp, Homo sapien
cgagctgtttgtgttcctccgacac

SEQ ID NO: 36639 - DNA, 25 bp, Homo sapien
tgtacttttgtgttgtggtcccgaa

SEQ ID NO: 36640 - DNA, 25 bp, Homo sapien
tgtacttttgtgatgtggtcccgaa

SEQ ID NO: 36641 - DNA, 25 bp, Homo sapien
cgtgtgtgtgtttgcgtgcacacag

SEQ ID NO: 36642 - DNA, 25 bp, Homo sapien
cgtgtgtgtgttagcgtgcacacag

SEQ ID NO: 36643 - DNA, 25 bp, Homo sapien
aggcggtcgtgaccgtgtactccag

SEQ ID NO: 36644 - DNA, 25 bp, Homo sapien
aggcggtcgtgagcgtgtactccag

SEQ ID NO: 36645 - DNA, 25 bp, Homo sapien
caacgtcatcgttgtccggccactg

SEQ ID NO: 36646 - DNA, 25 bp, Homo sapien
caacgtcatcgtagtccggccactg

SEQ ID NO: 36647 - DNA, 25 bp, Homo sapien
actatgtctttaattgaatccgtgt

SEQ ID NO: 36648 - DNA, 25 bp, Homo sapien
actatgtctttatttgaatccgtgt

SEQ ID NO: 36649 - DNA, 25 bp, Homo sapien
acgcttggttgttctctcagatcaa

SEQ ID NO: 36650 - DNA, 25 bp, Homo sapien
acgcttggttgtactctcagatcaa

SEQ ID NO: 36651 - DNA, 25 bp, Homo sapien
ttattttaggtaaaccgacgttgcc

SEQ ID NO: 36652 - DNA, 25 bp, Homo sapien
ttattttaggtataccgacgttgcc

SEQ ID NO: 36653 - DNA, 25 bp, Homo sapien
tatcgttaatacctacaagtcccgg

SEQ ID NO: 36654 - DNA, 25 bp, Homo sapien
tatcgttaatacgtacaagtcccgg

SEQ ID NO: 36655 - DNA, 25 bp, Homo sapien
atctctttcttgatgaacatcagtg

SEQ ID NO: 36656 - DNA, 25 bp, Homo sapien
atctctttcttgttgaacatcagtg

SEQ ID NO: 36657 - DNA, 25 bp, Homo sapien
tttttaggtgtggaggtagtcagta

SEQ ID NO: 36658 - DNA, 25 bp, Homo sapien
tttttaggtgtgcaggtagtcagta

SEQ ID NO: 36659 - DNA, 25 bp, Homo sapien
cgttagtagtacagacaatgaacta

SEQ ID NO: 36660 - DNA, 25 bp, Homo sapien
cgttagtagtactgacaatgaacta

SEQ ID NO: 36661 - DNA, 25 bp, Homo sapien
actactattactttaactgtcttcg

SEQ ID NO: 36662 - DNA, 25 bp, Homo sapien
actactattactataactgtcttcg

SEQ ID NO: 36663 - DNA, 25 bp, Homo sapien
ttcctcactgttataccgtggtaag

SEQ ID NO: 36664 - DNA, 25 bp, Homo sapien
ttcctcactgttttaccgtggtaag

SEQ ID NO: 36665 - DNA, 25 bp, Homo sapien
tagtcagtaacagtccccgggtggt

SEQ ID NO: 36666 - DNA, 25 bp, Homo sapien
tagtcagtaacactccccgggtggt

SEQ ID NO: 36667 - DNA, 25 bp, Homo sapien
attaagtactcctggaggtagacgt

SEQ ID NO: 36668 - DNA, 25 bp, Homo sapien
attaagtactccaggaggtagacgt

SEQ ID NO: 36669 - DNA, 25 bp, Homo sapien
gtactccagcagctaccggaccggg

SEQ ID NO: 36670 - DNA, 25 bp, Homo sapien
gtactccagcaggtaccggaccggg

SEQ ID NO: 36671 - DNA, 25 bp, Homo sapien
tccagcacataataagtacccgtgt

SEQ ID NO: 36672 - DNA, 25 bp, Homo sapien
tccagcacataaaaagtacccgtgt

SEQ ID NO: 36673 - DNA, 25 bp, Homo sapien
gagacttcatgtaaagtaatccctc

SEQ ID NO: 36674 - DNA, 25 bp, Homo sapien
gagacttcatgttaagtaatccctc

SEQ ID NO: 36675 - DNA, 25 bp, Homo sapien
agctcttacgaccaaagaagacccc

SEQ ID NO: 36676 - DNA, 25 bp, Homo sapien
agctcttacgacgaaagaagacccc

SEQ ID NO: 36677 - DNA, 25 bp, Homo sapien
cacacagatgataagacggacctgg

SEQ ID NO: 36678 - DNA, 25 bp, Homo sapien
cacacagatgattagacggacctgg

SEQ ID NO: 36679 - DNA, 25 bp, Homo sapien
ctcgaagacattttgtgtcccagtg

SEQ ID NO: 36680 - DNA, 25 bp, Homo sapien
ctcgaagacattatgtgtcccagtg

SEQ ID NO: 36681 - DNA, 25 bp, Homo sapien
cgacaaacagtttgtgtgtccgatg

SEQ ID NO: 36682 - DNA, 25 bp, Homo sapien
cgacaaacagttagtgtgtccgatg

SEQ ID NO: 36683 - DNA, 25 bp, Homo sapien
cactaccacttgaacttcacgaagg

SEQ ID NO: 36684 - DNA, 25 bp, Homo sapien
cactaccacttgtacttcacgaagg

SEQ ID NO: 36685 - DNA, 25 bp, Homo sapien
cgacctgtcatctcccacgtatagg

SEQ ID NO: 36686 - DNA, 25 bp, Homo sapien
cgacctgtcatcacccacgtatagg

SEQ ID NO: 36687 - DNA, 25 bp, Homo sapien
attctaccaaagacacgtcccttgg

SEQ ID NO: 36688 - DNA, 25 bp, Homo sapien
attctaccaaagtcacgtcccttgg

SEQ ID NO: 36689 - DNA, 25 bp, Homo sapien
gtttacaaaatttacacaccttgtt

SEQ ID NO: 36690 - DNA, 25 bp, Homo sapien
gtttacaaaattaacacaccttgtt

SEQ ID NO: 36691 - DNA, 25 bp, Homo sapien
tgtacagtagacaatgaaacctttt

SEQ ID NO: 36692 - DNA, 25 bp, Homo sapien
tgtacagtagactatgaaacctttt

SEQ ID NO: 36693 - DNA, 25 bp, Homo sapien
tcagagaaccgatcacgtcatttta

SEQ ID NO: 36694 - DNA, 25 bp, Homo sapien
tcagagaaccgaacacgtcatttta

SEQ ID NO: 36695 - DNA, 25 bp, Homo sapien
atcagataacgaaatctacattttt

SEQ ID NO: 36696 - DNA, 25 bp, Homo sapien
atcagataacgatatctacattttt

SEQ ID NO: 36697 - DNA, 25 bp, Homo sapien
gtacaaacagtgttgcgttgacgtg

SEQ ID NO: 36698 - DNA, 25 bp, Homo sapien
gtacaaacagtgatgcgttgacgtg

SEQ ID NO: 36699 - DNA, 25 bp, Homo sapien
tgaatctatcgagtacgttctactg

SEQ ID NO: 36700 - DNA, 25 bp, Homo sapien
tgaatctatcgactacgttctactg

SEQ ID NO: 36701 - DNA, 25 bp, Homo sapien
tgttcaaggcgatttgtcttcgtaa

SEQ ID NO: 36702 - DNA, 25 bp, Homo sapien
tgttcaaggcgaattgtcttcgtaa

SEQ ID NO: 36703 - DNA, 25 bp, Homo sapien
tcggggataatctatctaggattca

SEQ ID NO: 36704 - DNA, 25 bp, Homo sapien
tcggggataatcaatctaggattca

SEQ ID NO: 36705 - DNA, 25 bp, Homo sapien
gaagactacttactgagacgagtcc

SEQ ID NO: 36706 - DNA, 25 bp, Homo sapien
gaagactacttagtgagacgagtcc

SEQ ID NO: 36707 - DNA, 25 bp, Homo sapien
cacaaaggatctaacacagcaggac

SEQ ID NO: 36708 - DNA, 25 bp, Homo sapien
cacaaaggatcttacacagcaggac

SEQ ID NO: 36709 - DNA, 25 bp, Homo sapien
tctacaccgcgagtgtgggacagga

SEQ ID NO: 36710 - DNA, 25 bp, Homo sapien
tctacaccgcgactgtgggacagga

SEQ ID NO: 36711 - DNA, 25 bp, Homo sapien
tcaccccacgcggttcgggacacga

SEQ ID NO: 36712 - DNA, 25 bp, Homo sapien
tcaccccacgcgcttcgggacacga

SEQ ID NO: 36713 - DNA, 25 bp, Homo sapien
gaagtccagcagcagtgggtcgacc

SEQ ID NO: 36714 - DNA, 25 bp, Homo sapien
gaagtccagcaggagtgggtcgacc

SEQ ID NO: 36715 - DNA, 25 bp, Homo sapien
ggtcccgacacagggtgtaggcctg

SEQ ID NO: 36716 - DNA, 25 bp, Homo sapien
ggtcccgacacacggtgtaggcctg

SEQ ID NO: 36717 - DNA, 25 bp, Homo sapien
tgtcccaactccagtcggatgtctg

SEQ ID NO: 36718 - DNA, 25 bp, Homo sapien
tgtcccaactcctgtcggatgtctg

SEQ ID NO: 36719 - DNA, 25 bp, Homo sapien
ttctcgggagactctccgggtccag

SEQ ID NO: 36720 - DNA, 25 bp, Homo sapien
ttctcgggagacactccgggtccag

SEQ ID NO: 36721 - DNA, 25 bp, Homo sapien
tgtcggtcacgcacttgacgaagga

SEQ ID NO: 36722 - DNA, 25 bp, Homo sapien
tgtcggtcacgctcttgacgaagga

SEQ ID NO: 36723 - DNA, 25 bp, Homo sapien
atccgacacgactacctgcacaggg

SEQ ID NO: 36724 - DNA, 25 bp, Homo sapien
atccgacacgacaacctgcacaggg

SEQ ID NO: 36725 - DNA, 25 bp, Homo sapien
tggaggtgacatcaattccggtggt

SEQ ID NO: 36726 - DNA, 25 bp, Homo sapien
tggaggtgacatgaattccggtggt

SEQ ID NO: 36727 - DNA, 25 bp, Homo sapien
tgataaggattggaccccggaccgt

SEQ ID NO: 36728 - DNA, 25 bp, Homo sapien
tgataaggattgcaccccggaccgt

SEQ ID NO: 36729 - DNA, 25 bp, Homo sapien
caagtggaggttactgctcggacct

SEQ ID NO: 36730 - DNA, 25 bp, Homo sapien
caagtggaggtttctgctcggacct

SEQ ID NO: 36731 - DNA, 25 bp, Homo sapien
acaaagaaatgtttccgtgccaccg

SEQ ID NO: 36732 - DNA, 25 bp, Homo sapien
acaaagaaatgtatccgtgccaccg

SEQ ID NO: 36733 - DNA, 25 bp, Homo sapien
tacccgaagaggtcctagtgaacct

SEQ ID NO: 36734 - DNA, 25 bp, Homo sapien
tacccgaagaggacctagtgaacct

SEQ ID NO: 36735 - DNA, 25 bp, Homo sapien
cgtccagggccgacgcggtgcacat

SEQ ID NO: 36736 - DNA, 25 bp, Homo sapien
cgtccagggccgtcgcggtgcacat

SEQ ID NO: 36737 - DNA, 25 bp, Homo sapien
gacctatgggactggtgtttcgaaa

SEQ ID NO: 36738 - DNA, 25 bp, Homo sapien
gacctatgggacaggtgtttcgaaa

SEQ ID NO: 36739 - DNA, 25 bp, Homo sapien
acgaagggatctcgtttcgtcaacc

SEQ ID NO: 36740 - DNA, 25 bp, Homo sapien
acgaagggatctggtttcgtcaacc

SEQ ID NO: 36741 - DNA, 25 bp, Homo sapien
agaacagcgacagttattaccacaa

SEQ ID NO: 36742 - DNA, 25 bp, Homo sapien
agaacagcgacacttattaccacaa

SEQ ID NO: 36743 - DNA, 25 bp, Homo sapien
gaccagaaacatgtacgacacacca

SEQ ID NO: 36744 - DNA, 25 bp, Homo sapien
gaccagaaacatctacgacacacca

SEQ ID NO: 36745 - DNA, 25 bp, Homo sapien
gcagaagcgggcttgactacgcgac

SEQ ID NO: 36746 - DNA, 25 bp, Homo sapien
gcagaagcgggcatgactacgcgac

SEQ ID NO: 36747 - DNA, 25 bp, Homo sapien
cggagaaggactgacatcccgagct

SEQ ID NO: 36748 - DNA, 25 bp, Homo sapien
cggagaaggactcacatcccgagct

SEQ ID NO: 36749 - DNA, 25 bp, Homo sapien
ggaagtcatcagataattccgtaat

SEQ ID NO: 36750 - DNA, 25 bp, Homo sapien
ggaagtcatcagttaattccgtaat

SEQ ID NO: 36751 - DNA, 25 bp, Homo sapien
gaattagatgaaaaacacagtcact

SEQ ID NO: 36752 - DNA, 25 bp, Homo sapien
gaattagatgaataacacagtcact

SEQ ID NO: 36753 - DNA, 25 bp, Homo sapien
agtcctactaatgaacaccggtgac

SEQ ID NO: 36754 - DNA, 25 bp, Homo sapien
agtcctactaatcaacaccggtgac

SEQ ID NO: 36755 - DNA, 25 bp, Homo sapien
gagaggtcctccaggaacaagaggc

SEQ ID NO: 36756 - DNA, 25 bp, Homo sapien
gagaggtcctcctggaacaagaggc

SEQ ID NO: 36757 - DNA, 25 bp, Homo sapien
tagtgtctcccttgtggccggagag

SEQ ID NO: 36758 - DNA, 25 bp, Homo sapien
tagtgtctccctagtggccggagag

SEQ ID NO: 36759 - DNA, 25 bp, Homo sapien
cgcactgtcggtgacatcctgagac

SEQ ID NO: 36760 - DNA, 25 bp, Homo sapien
cgcactgtcggtcacatcctgagac

SEQ ID NO: 36761 - DNA, 25 bp, Homo sapien
aacatcattccaaagtccgtgtgac

SEQ ID NO: 36762 - DNA, 25 bp, Homo sapien
aacatcattccatagtccgtgtgac

SEQ ID NO: 36763 - DNA, 25 bp, Homo sapien
gaattcttcgagagagaacactgac

SEQ ID NO: 36764 - DNA, 25 bp, Homo sapien
gaattcttcgagtgagaacactgac

SEQ ID NO: 36765 - DNA, 25 bp, Homo sapien
aatactttttgtgtcagtgctacac

SEQ ID NO: 36766 - DNA, 25 bp, Homo sapien
aatactttttgtctcagtgctacac

SEQ ID NO: 36767 - DNA, 25 bp, Homo sapien
cctagaccttgaaggtacgtcagtc

SEQ ID NO: 36768 - DNA, 25 bp, Homo sapien
cctagaccttgatggtacgtcagtc

SEQ ID NO: 36769 - DNA, 25 bp, Homo sapien
tcggtactctgttacggtggaatcg

SEQ ID NO: 36770 - DNA, 25 bp, Homo sapien
tcggtactctgtaacggtggaatcg

SEQ ID NO: 36771 - DNA, 25 bp, Homo sapien
gacgactttcttcacctacggagtc

SEQ ID NO: 36772 - DNA, 25 bp, Homo sapien
gacgactttcttgacctacggagtc

SEQ ID NO: 36773 - DNA, 25 bp, Homo sapien
ctagtttcgtttgacactaggtaca

SEQ ID NO: 36774 - DNA, 25 bp, Homo sapien
ctagtttcgtttcacactaggtaca

SEQ ID NO: 36775 - DNA, 25 bp, Homo sapien
gaccgacgttgagcacgagtctgag

SEQ ID NO: 36776 - DNA, 25 bp, Homo sapien
gaccgacgttgaccacgagtctgag

SEQ ID NO: 36777 - DNA, 25 bp, Homo sapien
acgacccgcgactaggagactgagt

SEQ ID NO: 36778 - DNA, 25 bp, Homo sapien
acgacccgcgacaaggagactgagt

SEQ ID NO: 36779 - DNA, 25 bp, Homo sapien
ccttcgggacgtcagttgtagtcgc

SEQ ID NO: 36780 - DNA, 25 bp, Homo sapien
ccttcgggacgtgagttgtagtcgc

SEQ ID NO: 36781 - DNA, 25 bp, Homo sapien
tactgtagtgactacgtcttgacga

SEQ ID NO: 36782 - DNA, 25 bp, Homo sapien
tactgtagtgacaacgtcttgacga

SEQ ID NO: 36783 - DNA, 25 bp, Homo sapien
cttttacaacggtccgggtagtagc

SEQ ID NO: 36784 - DNA, 25 bp, Homo sapien
cttttacaacggaccgggtagtagc

SEQ ID NO: 36785 - DNA, 25 bp, Homo sapien
aattgaaacggtttcgtgacatagc

SEQ ID NO: 36786 - DNA, 25 bp, Homo sapien
aattgaaacggtatcgtgacatagc

SEQ ID NO: 36787 - DNA, 25 bp, Homo sapien
gttggaacaagtatcgtctctaccc

SEQ ID NO: 36788 - DNA, 25 bp, Homo sapien
gttggaacaagtttcgtctctaccc

SEQ ID NO: 36789 - DNA, 25 bp, Homo sapien
tgaggacggacgtgttggttgaccc

SEQ ID NO: 36790 - DNA, 25 bp, Homo sapien
tgaggacggacgagttggttgaccc

SEQ ID NO: 36791 - DNA, 25 bp, Homo sapien
agagagtcgaccatgtgccgtccca

SEQ ID NO: 36792 - DNA, 25 bp, Homo sapien
agagagtcgaccttgtgccgtccca

SEQ ID NO: 36793 - DNA, 25 bp, Homo sapien
aagcggggctattccgtcttgtaga

SEQ ID NO: 36794 - DNA, 25 bp, Homo sapien
aagcggggctataccgtcttgtaga

SEQ ID NO: 36795 - DNA, 25 bp, Homo sapien
agaccccggttctccgacccgtgta

SEQ ID NO: 36796 - DNA, 25 bp, Homo sapien
agaccccggttcaccgacccgtgta

SEQ ID NO: 36797 - DNA, 25 bp, Homo sapien
tccgaccggtctgaaccggtctttc

SEQ ID NO: 36798 - DNA, 25 bp, Homo sapien
tccgaccggtctcaaccggtctttc

SEQ ID NO: 36799 - DNA, 25 bp, Homo sapien
atggtcctcgagacccgggcacttc

SEQ ID NO: 36800 - DNA, 25 bp, Homo sapien
atggtcctcgagtcccgggcacttc

SEQ ID NO: 36801 - DNA, 25 bp, Homo sapien
ggtcacactggtgtcacgggagtcc

SEQ ID NO: 36802 - DNA, 25 bp, Homo sapien
ggtcacactggtctcacgggagtcc

SEQ ID NO: 36803 - DNA, 25 bp, Homo sapien
gagacgttacacttacggtaatttc

SEQ ID NO: 36804 - DNA, 25 bp, Homo sapien
gagacgttacacatacggtaatttc

SEQ ID NO: 36805 - DNA, 25 bp, Homo sapien
gtggagtagttgaccgttacttgtc

SEQ ID NO: 36806 - DNA, 25 bp, Homo sapien
gtggagtagttgtccgttacttgtc

SEQ ID NO: 36807 - DNA, 25 bp, Homo sapien
cacgtctctcgacgacaagacgaga

SEQ ID NO: 36808 - DNA, 25 bp, Homo sapien
cacgtctctcgaggacaagacgaga

SEQ ID NO: 36809 - DNA, 25 bp, Homo sapien
tagttccggactgacaccacgagta

SEQ ID NO: 36810 - DNA, 25 bp, Homo sapien
tagttccggactcacaccacgagta

SEQ ID NO: 36811 - DNA, 25 bp, Homo sapien
cctaagtcgtagaccaccggccgag

SEQ ID NO: 36812 - DNA, 25 bp, Homo sapien
cctaagtcgtagtccaccggccgag

SEQ ID NO: 36813 - DNA, 25 bp, Homo sapien
ccacaggccccagtagtcgcggaca

SEQ ID NO: 36814 - DNA, 25 bp, Homo sapien
ccacaggccccactagtcgcggaca

SEQ ID NO: 36815 - DNA, 25 bp, Homo sapien
tgtcgttgcagaacttgtccgcgac

SEQ ID NO: 36816 - DNA, 25 bp, Homo sapien
tgtcgttgcagatcttgtccgcgac

SEQ ID NO: 36817 - DNA, 25 bp, Homo sapien
gtacattttgtcttacgatcaattg

SEQ ID NO: 36818 - DNA, 25 bp, Homo sapien
gtacattttgtcatacgatcaattg

SEQ ID NO: 36819 - DNA, 25 bp, Homo sapien
ttttacactagtgctcgatgtatgt

SEQ ID NO: 36820 - DNA, 25 bp, Homo sapien
ttttacactagtcctcgatgtatgt

SEQ ID NO: 36821 - DNA, 25 bp, Homo sapien
cagtttgaggtgcttccgctacagt

SEQ ID NO: 36822 - DNA, 25 bp, Homo sapien
cagtttgaggtggttccgctacagt

SEQ ID NO: 36823 - DNA, 25 bp, Homo sapien
gtctttaagatgttaccaacgacag

SEQ ID NO: 36824 - DNA, 25 bp, Homo sapien
gtctttaagatgataccaacgacag

SEQ ID NO: 36825 - DNA, 25 bp, Homo sapien
tgatgtcaaatgtcggtaatctact

SEQ ID NO: 36826 - DNA, 25 bp, Homo sapien
tgatgtcaaatgacggtaatctact

SEQ ID NO: 36827 - DNA, 25 bp, Homo sapien
ttcgtaaagatacagacacggttgt

SEQ ID NO: 36828 - DNA, 25 bp, Homo sapien
ttcgtaaagatagagacacggttgt

SEQ ID NO: 36829 - DNA, 25 bp, Homo sapien
tagttaacgtgttacatcacttgtg

SEQ ID NO: 36830 - DNA, 25 bp, Homo sapien
tagttaacgtgtaacatcacttgtg

SEQ ID NO: 36831 - DNA, 25 bp, Homo sapien
acgtatacaagtatgacaccgttca

SEQ ID NO: 36832 - DNA, 25 bp, Homo sapien
acgtatacaagtttgacaccgttca

SEQ ID NO: 36833 - DNA, 25 bp, Homo sapien
ttgtgtccctgacctctccgtgtca

SEQ ID NO: 36834 - DNA, 25 bp, Homo sapien
ttgtgtccctgagctctccgtgtca

SEQ ID NO: 36835 - DNA, 25 bp, Homo sapien
ttcggacctcagataaccgttctgt

SEQ ID NO: 36836 - DNA, 25 bp, Homo sapien
ttcggacctcagttaaccgttctgt

SEQ ID NO: 36837 - DNA, 25 bp, Homo sapien
actaaggacgttttaccgtcgtctc

SEQ ID NO: 36838 - DNA, 25 bp, Homo sapien
actaaggacgttataccgtcgtctc

SEQ ID NO: 36839 - DNA, 25 bp, Homo sapien
gtctacgtaggagagaaccgttacc

SEQ ID NO: 36840 - DNA, 25 bp, Homo sapien
gtctacgtaggacagaaccgttacc

SEQ ID NO: 36841 - DNA, 25 bp, Homo sapien
tgtgtgagtacgaaacctacacagt

SEQ ID NO: 36842 - DNA, 25 bp, Homo sapien
tgtgtgagtacgtaacctacacagt

SEQ ID NO: 36843 - DNA, 25 bp, Homo sapien
gtgtagtcagaggtgtcggaaacgt

SEQ ID NO: 36844 - DNA, 25 bp, Homo sapien
gtgtagtcagagctgtcggaaacgt

SEQ ID NO: 36845 - DNA, 25 bp, Homo sapien
ccttttacgatgttgtcagtgactc

SEQ ID NO: 36846 - DNA, 25 bp, Homo sapien
ccttttacgatgatgtcagtgactc

SEQ ID NO: 36847 - DNA, 25 bp, Homo sapien
ccccctagagtagtccttgacgtcg

SEQ ID NO: 36848 - DNA, 25 bp, Homo sapien
ccccctagagtactccttgacgtcg

SEQ ID NO: 36849 - DNA, 25 bp, Homo sapien
acacaaagaaatcgactgtgacacg

SEQ ID NO: 36850 - DNA, 25 bp, Homo sapien
acacaaagaaatggactgtgacacg

SEQ ID NO: 36851 - DNA, 25 bp, Homo sapien
cagtaggtagtaaagtaagcaccaa

SEQ ID NO: 36852 - DNA, 25 bp, Homo sapien
cagtaggtagtatagtaagcaccaa

SEQ ID NO: 36853 - DNA, 25 bp, Homo sapien
tgtagagtgttttctaccacagaca

SEQ ID NO: 36854 - DNA, 25 bp, Homo sapien
tgtagagtgtttactaccacagaca

SEQ ID NO: 36855 - DNA, 25 bp, Homo sapien
tcgtagaggacttcagaaggtcagg

SEQ ID NO: 36856 - DNA, 25 bp, Homo sapien
tcgtagaggactacagaaggtcagg

SEQ ID NO: 36857 - DNA, 25 bp, Homo sapien
ttgagtatgtaaaacaacttcagtc

SEQ ID NO: 36858 - DNA, 25 bp, Homo sapien
ttgagtatgtaatacaacttcagtc

SEQ ID NO: 36859 - DNA, 25 bp, Homo sapien
tcgtaaaaaagtcatacctagtaag

SEQ ID NO: 36860 - DNA, 25 bp, Homo sapien
tcgtaaaaaagtgatacctagtaag

SEQ ID NO: 36861 - DNA, 25 bp, Homo sapien
aaataaagtgtcgtgactactatcg

SEQ ID NO: 36862 - DNA, 25 bp, Homo sapien
aaataaagtgtcctgactactatcg

SEQ ID NO: 36863 - DNA, 25 bp, Homo sapien
caagtgtaactcgtccgtatacttt

SEQ ID NO: 36864 - DNA, 25 bp, Homo sapien
caagtgtaactcctccgtatacttt

SEQ ID NO: 36865 - DNA, 25 bp, Homo sapien
gactataggtttacttcgtccgctc

SEQ ID NO: 36866 - DNA, 25 bp, Homo sapien
gactataggttttcttcgtccgctc

SEQ ID NO: 36867 - DNA, 25 bp, Homo sapien
gaaagagtaggacatcttttctaca

SEQ ID NO: 36868 - DNA, 25 bp, Homo sapien
gaaagagtaggagatcttttctaca

SEQ ID NO: 36869 - DNA, 25 bp, Homo sapien
aataataggcggtatctttaacgac

SEQ ID NO: 36870 - DNA, 25 bp, Homo sapien
aataataggcggaatctttaacgac

SEQ ID NO: 36871 - DNA, 25 bp, Homo sapien
gggttcaggagttggtctgttctcc

SEQ ID NO: 36872 - DNA, 25 bp, Homo sapien
gggttcaggagtaggtctgttctcc

SEQ ID NO: 36873 - DNA, 25 bp, Homo sapien
gatttcgtccgtacaacgggtcgaa

SEQ ID NO: 36874 - DNA, 25 bp, Homo sapien
gatttcgtccgttcaacgggtcgaa

SEQ ID NO: 36875 - DNA, 25 bp, Homo sapien
gttctttccgacagtggtctacgag

SEQ ID NO: 36876 - DNA, 25 bp, Homo sapien
gttctttccgactgtggtctacgag

SEQ ID NO: 36877 - DNA, 25 bp, Homo sapien
aagtcgtccgtcgaggtggctccgt

SEQ ID NO: 36878 - DNA, 25 bp, Homo sapien
aagtcgtccgtccaggtggctccgt

SEQ ID NO: 36879 - DNA, 25 bp, Homo sapien
tcaaaccacgaaacttcggatctcg

SEQ ID NO: 36880 - DNA, 25 bp, Homo sapien
tcaaaccacgaatcttcggatctcg

SEQ ID NO: 36881 - DNA, 25 bp, Homo sapien
cctacactctcgaaggcagtgataa

SEQ ID NO: 36882 - DNA, 25 bp, Homo sapien
cctacactctcgtaggcagtgataa

SEQ ID NO: 36883 - DNA, 25 bp, Homo sapien
ggagctaagacgagaagcatctaaa

SEQ ID NO: 36884 - DNA, 25 bp, Homo sapien
ggagctaagacgtgaagcatctaaa

SEQ ID NO: 36885 - DNA, 25 bp, Homo sapien
tcggagtcagtacatccactagaag

SEQ ID NO: 36886 - DNA, 25 bp, Homo sapien
tcggagtcagtagatccactagaag

SEQ ID NO: 36887 - DNA, 25 bp, Homo sapien
gtaagacggaaagaagtcacattct

SEQ ID NO: 36888 - DNA, 25 bp, Homo sapien
gtaagacggaaacaagtcacattct

SEQ ID NO: 36889 - DNA, 25 bp, Homo sapien
gtcaacgagactcaatctctcctcg

SEQ ID NO: 36890 - DNA, 25 bp, Homo sapien
gtcaacgagactgaatctctcctcg

SEQ ID NO: 36891 - DNA, 25 bp, Homo sapien
tcgtactctgtctcttcgtctcctc

SEQ ID NO: 36892 - DNA, 25 bp, Homo sapien
tcgtactctgtcacttcgtctcctc

SEQ ID NO: 36893 - DNA, 25 bp, Homo sapien
ccgacgtgttcgtggtgtcgtccac

SEQ ID NO: 36894 - DNA, 25 bp, Homo sapien
ccgacgtgttcgaggtgtcgtccac

SEQ ID NO: 36895 - DNA, 25 bp, Homo sapien
gtgtgtattatcatctgtgtctcat

SEQ ID NO: 36896 - DNA, 25 bp, Homo sapien
gtgtgtattatcttctgtgtctcat

SEQ ID NO: 36897 - DNA, 25 bp, Homo sapien
tggtctgtaaacgtagtctgtcact

SEQ ID NO: 36898 - DNA, 25 bp, Homo sapien
tggtctgtaaacctagtctgtcact

SEQ ID NO: 36899 - DNA, 25 bp, Homo sapien
aactcagttagtagaacgtttacac

SEQ ID NO: 36900 - DNA, 25 bp, Homo sapien
aactcagttagttgaacgtttacac

SEQ ID NO: 36901 - DNA, 25 bp, Homo sapien
agtatccgtcggttgttctatgctt

SEQ ID NO: 36902 - DNA, 25 bp, Homo sapien
agtatccgtcggatgttctatgctt

SEQ ID NO: 36903 - DNA, 25 bp, Homo sapien
cggagtccagagacatatttctatt

SEQ ID NO: 36904 - DNA, 25 bp, Homo sapien
cggagtccagagtcatatttctatt

SEQ ID NO: 36905 - DNA, 25 bp, Homo sapien
aagtattcgaagtcaacgattcaac

SEQ ID NO: 36906 - DNA, 25 bp, Homo sapien
aagtattcgaagacaacgattcaac

SEQ ID NO: 36907 - DNA, 25 bp, Homo sapien
aagagttacgaacacaggtttctta

SEQ ID NO: 36908 - DNA, 25 bp, Homo sapien
aagagttacgaagacaggtttctta

SEQ ID NO: 36909 - DNA, 25 bp, Homo sapien
aaagtgaaaaacatctgtctgtgtc

SEQ ID NO: 36910 - DNA, 25 bp, Homo sapien
aaagtgaaaaacttctgtctgtgtc

SEQ ID NO: 36911 - DNA, 25 bp, Homo sapien
ggagaacgacatacggacgtcgcgc

SEQ ID NO: 36912 - DNA, 25 bp, Homo sapien
ggagaacgacattcggacgtcgcgc

SEQ ID NO: 36913 - DNA, 25 bp, Homo sapien
aggcgaagtacctcgacgacgggta

SEQ ID NO: 36914 - DNA, 25 bp, Homo sapien
aggcgaagtaccacgacgacgggta

SEQ ID NO: 36915 - DNA, 25 bp, Homo sapien
cagggtatagtctccgtacggagga

SEQ ID NO: 36916 - DNA, 25 bp, Homo sapien
cagggtatagtcaccgtacggagga

SEQ ID NO: 36917 - DNA, 25 bp, Homo sapien
tgtgtgttacggttccggtgacaga

SEQ ID NO: 36918 - DNA, 25 bp, Homo sapien
tgtgtgttacggatccggtgacaga

SEQ ID NO: 36919 - DNA, 25 bp, Homo sapien
tagacgacgtggtcccgaaacaact

SEQ ID NO: 36920 - DNA, 25 bp, Homo sapien
tagacgacgtggacccgaaacaact

SEQ ID NO: 36921 - DNA, 25 bp, Homo sapien
gtcgacgtcgggaacgagatttaac

SEQ ID NO: 36922 - DNA, 25 bp, Homo sapien
gtcgacgtcgggtacgagatttaac

SEQ ID NO: 36923 - DNA, 25 bp, Homo sapien
agtgtgtctacttagagtcatctcc

SEQ ID NO: 36924 - DNA, 25 bp, Homo sapien
agtgtgtctactaagagtcatctcc

SEQ ID NO: 36925 - DNA, 25 bp, Homo sapien
gtgacctttcttaggttctcttact

SEQ ID NO: 36926 - DNA, 25 bp, Homo sapien
gtgacctttctttggttctcttact

SEQ ID NO: 36927 - DNA, 25 bp, Homo sapien
agtcactatttgagatactgttcta

SEQ ID NO: 36928 - DNA, 25 bp, Homo sapien
agtcactatttgtgatactgttcta

SEQ ID NO: 36929 - DNA, 25 bp, Homo sapien
gaataattagatggtacgttccact

SEQ ID NO: 36930 - DNA, 25 bp, Homo sapien
gaataattagatcgtacgttccact

SEQ ID NO: 36931 - DNA, 25 bp, Homo sapien
acgagaaggtgtcgtgtcccattag

SEQ ID NO: 36932 - DNA, 25 bp, Homo sapien
acgagaaggtgtggtgtcccattag

SEQ ID NO: 36933 - DNA, 25 bp, Homo sapien
cttgtaagttgtagtcttcgacatt

SEQ ID NO: 36934 - DNA, 25 bp, Homo sapien
cttgtaagttgttgtcttcgacatt

SEQ ID NO: 36935 - DNA, 25 bp, Homo sapien
ctgtgaatacatgtatgtaacctcg

SEQ ID NO: 36936 - DNA, 25 bp, Homo sapien
ctgtgaatacatctatgtaacctcg

SEQ ID NO: 36937 - DNA, 25 bp, Homo sapien
gtcgcctacatctagtacagcctct

SEQ ID NO: 36938 - DNA, 25 bp, Homo sapien
gtcgcctacatcaagtacagcctct

SEQ ID NO: 36939 - DNA, 25 bp, Homo sapien
gtcgcatacgtctttgttccactct

SEQ ID NO: 36940 - DNA, 25 bp, Homo sapien
gtcgcatacgtcattgttccactct

SEQ ID NO: 36941 - DNA, 25 bp, Homo sapien
ggtcagatccgctggttcccgtcgt

SEQ ID NO: 36942 - DNA, 25 bp, Homo sapien
ggtcagatccgcaggttcccgtcgt

SEQ ID NO: 36943 - DNA, 25 bp, Homo sapien
gtatcggttaagagttatatcttct

SEQ ID NO: 36944 - DNA, 25 bp, Homo sapien
gtatcggttaagtgttatatcttct

SEQ ID NO: 36945 - DNA, 25 bp, Homo sapien
aaacaaagtttgtgtaaagtacctc

SEQ ID NO: 36946 - DNA, 25 bp, Homo sapien
aaacaaagtttgagtaaagtacctc

SEQ ID NO: 36947 - DNA, 25 bp, Homo sapien
taaagtgtgtctacttagagtcatc

SEQ ID NO: 36948 - DNA, 25 bp, Homo sapien
taaagtgtgtcttcttagagtcatc

SEQ ID NO: 36949 - DNA, 25 bp, Homo sapien
taaagtgtgtctacttagagtcatc

SEQ ID NO: 36950 - DNA, 25 bp, Homo sapien
taaagtgtgtcttcttagagtcatc

SEQ ID NO: 36951 - DNA, 25 bp, Homo sapien
tatgagtttactctttagtctaccg

SEQ ID NO: 36952 - DNA, 25 bp, Homo sapien
tatgagtttactgtttagtctaccg

SEQ ID NO: 36953 - DNA, 25 bp, Homo sapien
gggacatcaccgatatctctcatag

SEQ ID NO: 36954 - DNA, 25 bp, Homo sapien
gggacatcaccgttatctctcatag

SEQ ID NO: 36955 - DNA, 25 bp, Homo sapien
gtagactctccttaattatcagtag

SEQ ID NO: 36956 - DNA, 25 bp, Homo sapien
gtagactctcctaaattatcagtag

SEQ ID NO: 36957 - DNA, 25 bp, Homo sapien
tgtcacttctgtacgacctatctaa

SEQ ID NO: 36958 - DNA, 25 bp, Homo sapien
tgtcacttctgttcgacctatctaa

SEQ ID NO: 36959 - DNA, 25 bp, Homo sapien
gaatgtccccggtgtaggcactcga

SEQ ID NO: 36960 - DNA, 25 bp, Homo sapien
gaatgtccccggagtaggcactcga

SEQ ID NO: 36961 - DNA, 25 bp, Homo sapien
aattaccttgcgaagtgtatcccta

SEQ ID NO: 36962 - DNA, 25 bp, Homo sapien
aattaccttgcgtagtgtatcccta

SEQ ID NO: 36963 - DNA, 25 bp, Homo sapien
ccaatgttgtttctaccggcactac

SEQ ID NO: 36964 - DNA, 25 bp, Homo sapien
ccaatgttgtttgtaccggcactac

SEQ ID NO: 36965 - DNA, 25 bp, Homo sapien
cctatagattttgtccggactacta

SEQ ID NO: 36966 - DNA, 25 bp, Homo sapien
cctatagattttctccggactacta

SEQ ID NO: 36967 - DNA, 25 bp, Homo sapien
caccggatgtcgtaagacccgatcc

SEQ ID NO: 36968 - DNA, 25 bp, Homo sapien
caccggatgtcgaaagacccgatcc

SEQ ID NO: 36969 - DNA, 25 bp, Homo sapien
ccgtgatgtcacaagtctccttctc

SEQ ID NO: 36970 - DNA, 25 bp, Homo sapien
ccgtgatgtcactagtctccttctc

SEQ ID NO: 36971 - DNA, 25 bp, Homo sapien
gacctgacctcaggattcttgtctt

SEQ ID NO: 36972 - DNA, 25 bp, Homo sapien
gacctgacctcacgattcttgtctt

SEQ ID NO: 36973 - DNA, 25 bp, Homo sapien
caccgacgggcacatggtcttggga

SEQ ID NO: 36974 - DNA, 25 bp, Homo sapien
caccgacgggcagatggtcttggga

SEQ ID NO: 36975 - DNA, 25 bp, Homo sapien
cccgaacattatatcgatcgatgta

SEQ ID NO: 36976 - DNA, 25 bp, Homo sapien
cccgaacattatttcgatcgatgta

SEQ ID NO: 36977 - DNA, 25 bp, Homo sapien
cgttagttatatgtacgcaagtcct

SEQ ID NO: 36978 - DNA, 25 bp, Homo sapien
cgttagttatatctacgcaagtcct

SEQ ID NO: 36979 - DNA, 25 bp, Homo sapien
cggacgtgacctggacgtcaaccct

SEQ ID NO: 36980 - DNA, 25 bp, Homo sapien
cggacgtgacctcgacgtcaaccct

SEQ ID NO: 36981 - DNA, 25 bp, Homo sapien
gtcacgagattttcgagacagtacg

SEQ ID NO: 36982 - DNA, 25 bp, Homo sapien
gtcacgagatttacgagacagtacg

SEQ ID NO: 36983 - DNA, 25 bp, Homo sapien
ttctactctgattatcgaccaagtg

SEQ ID NO: 36984 - DNA, 25 bp, Homo sapien
ttctactctgataatcgaccaagtg

SEQ ID NO: 36985 - DNA, 25 bp, Homo sapien
cgtcttccgtgtgtcaccgtcatcg

SEQ ID NO: 36986 - DNA, 25 bp, Homo sapien
cgtcttccgtgtctcaccgtcatcg

SEQ ID NO: 36987 - DNA, 25 bp, Homo sapien
agatgttctccgttctccgtcctgt

SEQ ID NO: 36988 - DNA, 25 bp, Homo sapien
agatgttctccgatctccgtcctgt

SEQ ID NO: 36989 - DNA, 25 bp, Homo sapien
ttatctggacgtttccagtctctgt

SEQ ID NO: 36990 - DNA, 25 bp, Homo sapien
ttatctggacgtatccagtctctgt

SEQ ID NO: 36991 - DNA, 25 bp, Homo sapien
gggtccggagtcgtcgcaccactac

SEQ ID NO: 36992 - DNA, 25 bp, Homo sapien
gggtccggagtcctcgcaccactac

SEQ ID NO: 36993 - DNA, 25 bp, Homo sapien
agggactcccggtccgtaataactc

SEQ ID NO: 36994 - DNA, 25 bp, Homo sapien
agggactcccggaccgtaataactc

SEQ ID NO: 36995 - DNA, 25 bp, Homo sapien
gtgacctcaggaaacccctactatc

SEQ ID NO: 36996 - DNA, 25 bp, Homo sapien
gtgacctcaggatacccctactatc

SEQ ID NO: 36997 - DNA, 25 bp, Homo sapien
aaaagatcgacaccttatctacagg

SEQ ID NO: 36998 - DNA, 25 bp, Homo sapien
aaaagatcgacagcttatctacagg

SEQ ID NO: 36999 - DNA, 25 bp, Homo sapien
aaggtaataaactgacgtaacgaac

SEQ ID NO: 37000 - DNA, 25 bp, Homo sapien
aaggtaataaacagacgtaacgaac

SEQ ID NO: 37001 - DNA, 25 bp, Homo sapien
tttgtaaacgaggaccgaagacacc

SEQ ID NO: 37002 - DNA, 25 bp, Homo sapien
tttgtaaacgagcaccgaagacacc

SEQ ID NO: 37003 - DNA, 25 bp, Homo sapien
ttaaaagaggtccaacgacgactac

SEQ ID NO: 37004 - DNA, 25 bp, Homo sapien
ttaaaagaggtcgaacgacgactac

SEQ ID NO: 37005 - DNA, 25 bp, Homo sapien
ccatgacaaaggagtcgtctcctct

SEQ ID NO: 37006 - DNA, 25 bp, Homo sapien
ccatgacaaaggtgtcgtctcctct

SEQ ID NO: 37007 - DNA, 25 bp, Homo sapien
taggtaacggactttgaagttactc

SEQ ID NO: 37008 - DNA, 25 bp, Homo sapien
taggtaacggacattgaagttactc

SEQ ID NO: 37009 - DNA, 25 bp, Homo sapien
aataaatcggtcgtaaaggctatac

SEQ ID NO: 37010 - DNA, 25 bp, Homo sapien
aataaatcggtcctaaaggctatac

SEQ ID NO: 37011 - DNA, 25 bp, Homo sapien
aaccgaccgagtccgtagaattttg

SEQ ID NO: 37012 - DNA, 25 bp, Homo sapien
aaccgaccgagtgcgtagaattttg

SEQ ID NO: 37013 - DNA, 25 bp, Homo sapien
aacggcgaccggagagacaacttcc

SEQ ID NO: 37014 - DNA, 25 bp, Homo sapien
aacggcgaccggtgagacaacttcc

SEQ ID NO: 37015 - DNA, 25 bp, Homo sapien
taaacatgatcgaagtacaaccaga

SEQ ID NO: 37016 - DNA, 25 bp, Homo sapien
taaacatgatcgtagtacaaccaga

SEQ ID NO: 37017 - DNA, 25 bp, Homo sapien
gaagtaacggatccaccaactctca

SEQ ID NO: 37018 - DNA, 25 bp, Homo sapien
gaagtaacggatgcaccaactctca

SEQ ID NO: 37019 - DNA, 25 bp, Homo sapien
ggtgtctgttactcaatactcacac

SEQ ID NO: 37020 - DNA, 25 bp, Homo sapien
ggtgtctgttacacaatactcacac

SEQ ID NO: 37021 - DNA, 25 bp, Homo sapien
ggtgctagagactccagaccactat

SEQ ID NO: 37022 - DNA, 25 bp, Homo sapien
ggtgctagagacaccagaccactat

SEQ ID NO: 37023 - DNA, 25 bp, Homo sapien
ggtttaatcaacgtagtactccact

SEQ ID NO: 37024 - DNA, 25 bp, Homo sapien
ggtttaatcaacctagtactccact

SEQ ID NO: 37025 - DNA, 25 bp, Homo sapien
atcagagtcctcagtcacgtcctcg

SEQ ID NO: 37026 - DNA, 25 bp, Homo sapien
atcagagtcctctgtcacgtcctcg

SEQ ID NO: 37027 - DNA, 25 bp, Homo sapien
agagaaagacctacggtgagtttac

SEQ ID NO: 37028 - DNA, 25 bp, Homo sapien
agagaaagaccttcggtgagtttac

SEQ ID NO: 37029 - DNA, 25 bp, Homo sapien
gagtactacaaaattgtttcgtttc

SEQ ID NO: 37030 - DNA, 25 bp, Homo sapien
gagtactacaaatttgtttcgtttc

SEQ ID NO: 37031 - DNA, 25 bp, Homo sapien
gtccaaatgtcttacgttatatgtt

SEQ ID NO: 37032 - DNA, 25 bp, Homo sapien
gtccaaatgtctaacgttatatgtt

SEQ ID NO: 37033 - DNA, 25 bp, Homo sapien
caataagaaagtacaaggtacctat

SEQ ID NO: 37034 - DNA, 25 bp, Homo sapien
caataagaaagttcaaggtacctat

SEQ ID NO: 37035 - DNA, 25 bp, Homo sapien
cctagactggtctgacgtcgttggg

SEQ ID NO: 37036 - DNA, 25 bp, Homo sapien
cctagactggtcagacgtcgttggg

SEQ ID NO: 37037 - DNA, 25 bp, Homo sapien
gtaagtatcccgaagagtggtcaca

SEQ ID NO: 37038 - DNA, 25 bp, Homo sapien
gtaagtatcccgtagagtggtcaca

SEQ ID NO: 37039 - DNA, 25 bp, Homo sapien
atagtacgccgcagtagggttccac

SEQ ID NO: 37040 - DNA, 25 bp, Homo sapien
atagtacgccgctgtagggttccac

SEQ ID NO: 37041 - DNA, 25 bp, Homo sapien
actggtagccctactagacgaactg

SEQ ID NO: 37042 - DNA, 25 bp, Homo sapien
actggtagcccttctagacgaactg

SEQ ID NO: 37043 - DNA, 25 bp, Homo sapien
cagaggttctcctagtagaagtatt

SEQ ID NO: 37044 - DNA, 25 bp, Homo sapien
cagaggttctccaagtagaagtatt

SEQ ID NO: 37045 - DNA, 25 bp, Homo sapien
cggagaggtgacttcaaggacaaag

SEQ ID NO: 37046 - DNA, 25 bp, Homo sapien
cggagaggtgacatcaaggacaaag

SEQ ID NO: 37047 - DNA, 25 bp, Homo sapien
ccgtgatccctcagaggaccgacga

SEQ ID NO: 37048 - DNA, 25 bp, Homo sapien
ccgtgatccctctgaggaccgacga

SEQ ID NO: 37049 - DNA, 25 bp, Homo sapien
cgggactgactctgcggtccgtacc

SEQ ID NO: 37050 - DNA, 25 bp, Homo sapien
cgggactgactcagcggtccgtacc

SEQ ID NO: 37051 - DNA, 25 bp, Homo sapien
aactcgtggtactcttgggccgacc

SEQ ID NO: 37052 - DNA, 25 bp, Homo sapien
aactcgtggtacacttgggccgacc

SEQ ID NO: 37053 - DNA, 25 bp, Homo sapien
gacgttagaacctaaggactccacc

SEQ ID NO: 37054 - DNA, 25 bp, Homo sapien
gacgttagaaccaaaggactccacc

SEQ ID NO: 37055 - DNA, 25 bp, Homo sapien
gggtcgaatcaggaccgcgaccacc

SEQ ID NO: 37056 - DNA, 25 bp, Homo sapien
gggtcgaatcagcaccgcgaccacc

SEQ ID NO: 37057 - DNA, 25 bp, Homo sapien
cgagtctcgggctctgggacgtccc

SEQ ID NO: 37058 - DNA, 25 bp, Homo sapien
cgagtctcgggcactgggacgtccc

SEQ ID NO: 37059 - DNA, 25 bp, Homo sapien
tctcacactttctgacgagtcaccg

SEQ ID NO: 37060 - DNA, 25 bp, Homo sapien
tctcacactttcagacgagtcaccg

SEQ ID NO: 37061 - DNA, 25 bp, Homo sapien
ctcctttctctctttggtgtccacg

SEQ ID NO: 37062 - DNA, 25 bp, Homo sapien
ctcctttctctcattggtgtccacg

SEQ ID NO: 37063 - DNA, 25 bp, Homo sapien
tgtgtgtatgtctttaagtgcccgt

SEQ ID NO: 37064 - DNA, 25 bp, Homo sapien
tgtgtgtatgtcattaagtgcccgt

SEQ ID NO: 37065 - DNA, 25 bp, Homo sapien
gttcactattcgtcacacggctccg

SEQ ID NO: 37066 - DNA, 25 bp, Homo sapien
gttcactattcgacacacggctccg

SEQ ID NO: 37067 - DNA, 25 bp, Homo sapien
gtttccacactgagtagacatcttc

SEQ ID NO: 37068 - DNA, 25 bp, Homo sapien
gtttccacactgtgtagacatcttc

SEQ ID NO: 37069 - DNA, 25 bp, Homo sapien
gtctactcctcttttgagacccaag

SEQ ID NO: 37070 - DNA, 25 bp, Homo sapien
gtctactcctctattgagacccaag

SEQ ID NO: 37071 - DNA, 25 bp, Homo sapien
ggtctcctctgactgtaaacttata

SEQ ID NO: 37072 - DNA, 25 bp, Homo sapien
ggtctcctctgagtgtaaacttata

SEQ ID NO: 37073 - DNA, 25 bp, Homo sapien
gtttacggtccgtgacacaagacga

SEQ ID NO: 37074 - DNA, 25 bp, Homo sapien
gtttacggtccgagacacaagacga

SEQ ID NO: 37075 - DNA, 25 bp, Homo sapien
gtcaagacgataagtacacctggat

SEQ ID NO: 37076 - DNA, 25 bp, Homo sapien
gtcaagacgatatgtacacctggat

SEQ ID NO: 37077 - DNA, 25 bp, Homo sapien
atgtaagatatgttcactccgggac

SEQ ID NO: 37078 - DNA, 25 bp, Homo sapien
atgtaagatatgatcactccgggac

SEQ ID NO: 37079 - DNA, 25 bp, Homo sapien
ttagtcccacgatctattaccgtga

SEQ ID NO: 37080 - DNA, 25 bp, Homo sapien
ttagtcccacgaactattaccgtga

SEQ ID NO: 37081 - DNA, 25 bp, Homo sapien
attcagtccaattaatgtctcgtgg

SEQ ID NO: 37082 - DNA, 25 bp, Homo sapien
attcagtccaataaatgtctcgtgg

SEQ ID NO: 37083 - DNA, 25 bp, Homo sapien
actactcagtagaccctgtccagtg

SEQ ID NO: 37084 - DNA, 25 bp, Homo sapien
actactcagtagtccctgtccagtg

SEQ ID NO: 37085 - DNA, 25 bp, Homo sapien
gtaaccacgtaacgaccctccagta

SEQ ID NO: 37086 - DNA, 25 bp, Homo sapien
gtaaccacgtaaggaccctccagta

SEQ ID NO: 37087 - DNA, 25 bp, Homo sapien
tatgtccgattagttatgtcaccat

SEQ ID NO: 37088 - DNA, 25 bp, Homo sapien
tatgtccgattacttatgtcaccat

SEQ ID NO: 37089 - DNA, 25 bp, Homo sapien
aagacgacgtgacttgtgtgaccat

SEQ ID NO: 37090 - DNA, 25 bp, Homo sapien
aagacgacgtgagttgtgtgaccat

SEQ ID NO: 37091 - DNA, 25 bp, Homo sapien
gttgaaggatgaaagtcttccctac

SEQ ID NO: 37092 - DNA, 25 bp, Homo sapien
gttgaaggatgatagtcttccctac

SEQ ID NO: 37093 - DNA, 25 bp, Homo sapien
ctttagtttcgaggtagcctccaca

SEQ ID NO: 37094 - DNA, 25 bp, Homo sapien
ctttagtttcgacgtagcctccaca

SEQ ID NO: 37095 - DNA, 25 bp, Homo sapien
aagtttcgaatgttagacttccaca

SEQ ID NO: 37096 - DNA, 25 bp, Homo sapien
aagtttcgaatgatagacttccaca

SEQ ID NO: 37097 - DNA, 25 bp, Homo sapien
acgaagtgtaacagaaagatccaac

SEQ ID NO: 37098 - DNA, 25 bp, Homo sapien
acgaagtgtaactgaaagatccaac

SEQ ID NO: 37099 - DNA, 25 bp, Homo sapien
cgaaagttacacacaacgagatgaa

SEQ ID NO: 37100 - DNA, 25 bp, Homo sapien
cgaaagttacactcaacgagatgaa

SEQ ID NO: 37101 - DNA, 25 bp, Homo sapien
aaaaagagacgactgaagtttacac

SEQ ID NO: 37102 - DNA, 25 bp, Homo sapien
aaaaagagacgagtgaagtttacac

SEQ ID NO: 37103 - DNA, 25 bp, Homo sapien
gaatgaaaaccaagggagtcttctt

SEQ ID NO: 37104 - DNA, 25 bp, Homo sapien
gaatgaaaaccatgggagtcttctt

SEQ ID NO: 37105 - DNA, 25 bp, Homo sapien
ttaaagttataccagcggtttgtct

SEQ ID NO: 37106 - DNA, 25 bp, Homo sapien
ttaaagttatacgagcggtttgtct

SEQ ID NO: 37107 - DNA, 25 bp, Homo sapien
tctataccgtgtgaaaactttttgt

SEQ ID NO: 37108 - DNA, 25 bp, Homo sapien
tctataccgtgtcaaaactttttgt

SEQ ID NO: 37109 - DNA, 25 bp, Homo sapien
aatgtatcatatatcaatttcttgt

SEQ ID NO: 37110 - DNA, 25 bp, Homo sapien
aatgtatcatatttcaatttcttgt

SEQ ID NO: 37111 - DNA, 25 bp, Homo sapien
atgacgtcatttctcagttaatgtc

SEQ ID NO: 37112 - DNA, 25 bp, Homo sapien
atgacgtcatttgtcagttaatgtc

SEQ ID NO: 37113 - DNA, 25 bp, Homo sapien
tttatgtactgcatcttttactcgg

SEQ ID NO: 37114 - DNA, 25 bp, Homo sapien
tttatgtactgcttcttttactcgg

SEQ ID NO: 37115 - DNA, 25 bp, Homo sapien
gatgtaagttcattactttgtgtcc

SEQ ID NO: 37116 - DNA, 25 bp, Homo sapien
gatgtaagttcaatactttgtgtcc

SEQ ID NO: 37117 - DNA, 25 bp, Homo sapien
cgtcaactcactttacttctcggtg

SEQ ID NO: 37118 - DNA, 25 bp, Homo sapien
cgtcaactcactatacttctcggtg

SEQ ID NO: 37119 - DNA, 25 bp, Homo sapien
tggtacactccctagtacctcaggt

SEQ ID NO: 37120 - DNA, 25 bp, Homo sapien
tggtacactcccaagtacctcaggt

SEQ ID NO: 37121 - DNA, 25 bp, Homo sapien
gcgtaagaccctaagagatctcggt

SEQ ID NO: 37122 - DNA, 25 bp, Homo sapien
gcgtaagacccttagagatctcggt

SEQ ID NO: 37123 - DNA, 25 bp, Homo sapien
tttaacctcgagagtctctcacgat

SEQ ID NO: 37124 - DNA, 25 bp, Homo sapien
tttaacctcgagtgtctctcacgat

SEQ ID NO: 37125 - DNA, 25 bp, Homo sapien
cttacgacctagaggtctcttcact

SEQ ID NO: 37126 - DNA, 25 bp, Homo sapien
cttacgacctagtggtctcttcact

SEQ ID NO: 37127 - DNA, 25 bp, Homo sapien
taacttgacgttttaaggacttcct

SEQ ID NO: 37128 - DNA, 25 bp, Homo sapien
taacttgacgttataaggacttcct

SEQ ID NO: 37129 - DNA, 25 bp, Homo sapien
gacagtacagttgtctaaacctcct

SEQ ID NO: 37130 - DNA, 25 bp, Homo sapien
gacagtacagttctctaaacctcct

SEQ ID NO: 37131 - DNA, 25 bp, Homo sapien
ggtgacacttctctctcaagaccta

SEQ ID NO: 37132 - DNA, 25 bp, Homo sapien
ggtgacacttctgtctcaagaccta

SEQ ID NO: 37133 - DNA, 25 bp, Homo sapien
taagtcccgttctagagccggaccc

SEQ ID NO: 37134 - DNA, 25 bp, Homo sapien
taagtcccgttcaagagccggaccc

SEQ ID NO: 37135 - DNA, 25 bp, Homo sapien
gatcgtcgtggcttttcaccggccc

SEQ ID NO: 37136 - DNA, 25 bp, Homo sapien
gatcgtcgtggcatttcaccggccc

SEQ ID NO: 37137 - DNA, 25 bp, Homo sapien
gtgtttttcagtcgacacaattctc

SEQ ID NO: 37138 - DNA, 25 bp, Homo sapien
gtgtttttcagtggacacaattctc

SEQ ID NO: 37139 - DNA, 25 bp, Homo sapien
gttttttgataaacaccctgtcgta

SEQ ID NO: 37140 - DNA, 25 bp, Homo sapien
gttttttgataatcaccctgtcgta

SEQ ID NO: 37141 - DNA, 25 bp, Homo sapien
tataagttcgctgtacccgggtgac

SEQ ID NO: 37142 - DNA, 25 bp, Homo sapien
tataagttcgctctacccgggtgac

SEQ ID NO: 37143 - DNA, 25 bp, Homo sapien
ccatggtcactgtcgtcggagagga

SEQ ID NO: 37144 - DNA, 25 bp, Homo sapien
ccatggtcactgacgtcggagagga

SEQ ID NO: 37145 - DNA, 25 bp, Homo sapien
tctacatgaccatccggcagtttga

SEQ ID NO: 37146 - DNA, 25 bp, Homo sapien
tctacatgaccaaccggcagtttga

SEQ ID NO: 37147 - DNA, 25 bp, Homo sapien
ctactactccatgtgcaattatagg

SEQ ID NO: 37148 - DNA, 25 bp, Homo sapien
ctactactccatctgcaattatagg

SEQ ID NO: 37149 - DNA, 25 bp, Homo sapien
tctttcgagttcgtccattcacgcg

SEQ ID NO: 37150 - DNA, 25 bp, Homo sapien
tctttcgagttcctccattcacgcg

SEQ ID NO: 37151 - DNA, 25 bp, Homo sapien
gctgatggtagctttcaactatccc

SEQ ID NO: 37152 - DNA, 25 bp, Homo sapien
gctgatggtagcattcaactatccc

SEQ ID NO: 37153 - DNA, 25 bp, Homo sapien
cgaatccgaattgacttagttcaca

SEQ ID NO: 37154 - DNA, 25 bp, Homo sapien
cgaatccgaattcacttagttcaca

SEQ ID NO: 37155 - DNA, 25 bp, Homo sapien
gaatctggaattttacgtcctacac

SEQ ID NO: 37156 - DNA, 25 bp, Homo sapien
gaatctggaattatacgtcctacac

SEQ ID NO: 37157 - DNA, 25 bp, Homo sapien
ttaaatcggaagtaggactgtcacc

SEQ ID NO: 37158 - DNA, 25 bp, Homo sapien
ttaaatcggaagaaggactgtcacc

SEQ ID NO: 37159 - DNA, 25 bp, Homo sapien
ataaatgttggacgtcgactggttc

SEQ ID NO: 37160 - DNA, 25 bp, Homo sapien
ataaatgttggaggtcgactggttc

SEQ ID NO: 37161 - DNA, 25 bp, Homo sapien
aatgtggtgtattacgtacagaaag

SEQ ID NO: 37162 - DNA, 25 bp, Homo sapien
aatgtggtgtataacgtacagaaag

SEQ ID NO: 37163 - DNA, 25 bp, Homo sapien
caaggtgactcaactggagacatcg

SEQ ID NO: 37164 - DNA, 25 bp, Homo sapien
caaggtgactcatctggagacatcg

SEQ ID NO: 37165 - DNA, 25 bp, Homo sapien
gacgacgtttggtccgtggaacatc

SEQ ID NO: 37166 - DNA, 25 bp, Homo sapien
gacgacgtttggaccgtggaacatc

SEQ ID NO: 37167 - DNA, 25 bp, Homo sapien
tagacgtcttatcacaacatggaaa

SEQ ID NO: 37168 - DNA, 25 bp, Homo sapien
tagacgtcttatgacaacatggaaa

SEQ ID NO: 37169 - DNA, 25 bp, Homo sapien
tatacgtgtcaaccacgagaagaag

SEQ ID NO: 37170 - DNA, 25 bp, Homo sapien
tatacgtgtcaagcacgagaagaag

SEQ ID NO: 37171 - DNA, 25 bp, Homo sapien
gtacccttataccaagtagacacag

SEQ ID NO: 37172 - DNA, 25 bp, Homo sapien
gtacccttatacgaagtagacacag

SEQ ID NO: 37173 - DNA, 25 bp, Homo sapien
gtctcaccgtactcacagaaccgag

SEQ ID NO: 37174 - DNA, 25 bp, Homo sapien
gtctcaccgtacacacagaaccgag

SEQ ID NO: 37175 - DNA, 25 bp, Homo sapien
gtcagagagtactagtcatgctgat

SEQ ID NO: 37176 - DNA, 25 bp, Homo sapien
gtcagagagtacaagtcatgctgat

SEQ ID NO: 37177 - DNA, 25 bp, Homo sapien
tcaagtcccagagagacgactcgac

SEQ ID NO: 37178 - DNA, 25 bp, Homo sapien
tcaagtcccagacagacgactcgac

SEQ ID NO: 37179 - DNA, 25 bp, Homo sapien
accagagcggacatcggacgtcgta

SEQ ID NO: 37180 - DNA, 25 bp, Homo sapien
accagagcggacttcggacgtcgta

SEQ ID NO: 37181 - DNA, 25 bp, Homo sapien
gggaacgacacaactcagacgctcg

SEQ ID NO: 37182 - DNA, 25 bp, Homo sapien
gggaacgacacatctcagacgctcg

SEQ ID NO: 37183 - DNA, 25 bp, Homo sapien
ctcgcgcaccgaagttccgtcctcg

SEQ ID NO: 37184 - DNA, 25 bp, Homo sapien
ctcgcgcaccgatgttccgtcctcg

SEQ ID NO: 37185 - DNA, 25 bp, Homo sapien
ctggactacgtctctcagacctcag

SEQ ID NO: 37186 - DNA, 25 bp, Homo sapien
ctggactacgtcactcagacctcag

SEQ ID NO: 37187 - DNA, 25 bp, Homo sapien
gagacgtgtgcatctacgaccgcag

SEQ ID NO: 37188 - DNA, 25 bp, Homo sapien
gagacgtgtgcaactacgaccgcag

SEQ ID NO: 37189 - DNA, 25 bp, Homo sapien
aggaggtgtcaggactacgacagaa

SEQ ID NO: 37190 - DNA, 25 bp, Homo sapien
aggaggtgtcagcactacgacagaa

SEQ ID NO: 37191 - DNA, 25 bp, Homo sapien
ggtcccgacgggtccggtccgactt

SEQ ID NO: 37192 - DNA, 25 bp, Homo sapien
ggtcccgacgggaccggtccgactt

SEQ ID NO: 37193 - DNA, 25 bp, Homo sapien
ccccaagagggtgatcctgactctg

SEQ ID NO: 37194 - DNA, 25 bp, Homo sapien
ccccaagagggtcatcctgactctg

SEQ ID NO: 37195 - DNA, 25 bp, Homo sapien
ctatagtgggctcctcgactcgggg

SEQ ID NO: 37196 - DNA, 25 bp, Homo sapien
ctatagtgggctgctcgactcgggg

SEQ ID NO: 37197 - DNA, 25 bp, Homo sapien
ctgctgctgcggtagccaccgcggc

SEQ ID NO: 37198 - DNA, 25 bp, Homo sapien
ctgctgctgcggaagccaccgcggc

SEQ ID NO: 37199 - DNA, 25 bp, Homo sapien
tgtttgtggtcactcctaccacttt

SEQ ID NO: 37200 - DNA, 25 bp, Homo sapien
tgtttgtggtcagtcctaccacttt

SEQ ID NO: 37201 - DNA, 25 bp, Homo sapien
ctcaggtcggtcgaatcatttgttt

SEQ ID NO: 37202 - DNA, 25 bp, Homo sapien
ctcaggtcggtccaatcatttgttt

SEQ ID NO: 37203 - DNA, 25 bp, Homo sapien
ccgtggtaccttcaatcagattttt

SEQ ID NO: 37204 - DNA, 25 bp, Homo sapien
ccgtggtaccttgaatcagattttt

SEQ ID NO: 37205 - DNA, 25 bp, Homo sapien
gttgttgtcctcacaaaatttcgtc

SEQ ID NO: 37206 - DNA, 25 bp, Homo sapien
gttgttgtcctctcaaaatttcgtc

SEQ ID NO: 37207 - DNA, 25 bp, Homo sapien
gggtttcctttaaactcttaagttc

SEQ ID NO: 37208 - DNA, 25 bp, Homo sapien
gggtttcctttatactcttaagttc

SEQ ID NO: 37209 - DNA, 25 bp, Homo sapien
gaggactcttttacacctctagttc

SEQ ID NO: 37210 - DNA, 25 bp, Homo sapien
gaggactctttttcacctctagttc

SEQ ID NO: 37211 - DNA, 25 bp, Homo sapien
ttttctcatgtcctcagacctcagg

SEQ ID NO: 37212 - DNA, 25 bp, Homo sapien
ttttctcatgtcgtcagacctcagg

SEQ ID NO: 37213 - DNA, 25 bp, Homo sapien
cattttcatgtcgaagaccttctag

SEQ ID NO: 37214 - DNA, 25 bp, Homo sapien
cattttcatgtccaagaccttctag

SEQ ID NO: 37215 - DNA, 25 bp, Homo sapien
gtagatagattctacctccttacga

SEQ ID NO: 37216 - DNA, 25 bp, Homo sapien
gtagatagattcaacctccttacga

SEQ ID NO: 37217 - DNA, 25 bp, Homo sapien
cgtccaaacgtcacgctcagtgtca

SEQ ID NO: 37218 - DNA, 25 bp, Homo sapien
cgtccaaacgtctcgctcagtgtca

SEQ ID NO: 37219 - DNA, 25 bp, Homo sapien
cgtccaatagtttcgaatgtctgac

SEQ ID NO: 37220 - DNA, 25 bp, Homo sapien
cgtccaatagttacgaatgtctgac

SEQ ID NO: 37221 - DNA, 25 bp, Homo sapien
gactcccacaatcgacgaggtcgga

SEQ ID NO: 37222 - DNA, 25 bp, Homo sapien
gactcccacaatggacgaggtcgga

SEQ ID NO: 37223 - DNA, 25 bp, Homo sapien
tcccgacgacgttgcggaggtgcgc

SEQ ID NO: 37224 - DNA, 25 bp, Homo sapien
tcccgacgacgtagcggaggtgcgc

SEQ ID NO: 37225 - DNA, 25 bp, Homo sapien
tcccggagagtctcggactcctcgg

SEQ ID NO: 37226 - DNA, 25 bp, Homo sapien
tcccggagagtcacggactcctcgg

SEQ ID NO: 37227 - DNA, 25 bp, Homo sapien
cgagggtcgtcgacacggcccgacg

SEQ ID NO: 37228 - DNA, 25 bp, Homo sapien
cgagggtcgtcgtcacggcccgacg

SEQ ID NO: 37229 - DNA, 25 bp, Homo sapien
aaccatgttcagactgagcatccgt

SEQ ID NO: 37230 - DNA, 25 bp, Homo sapien
aaccatgttcagtctgagcatccgt

SEQ ID NO: 37231 - DNA, 25 bp, Homo sapien
gtaactcttgaactttgcatcacgt

SEQ ID NO: 37232 - DNA, 25 bp, Homo sapien
gtaactcttgaagtttgcatcacgt

SEQ ID NO: 37233 - DNA, 25 bp, Homo sapien
gtccctctgtccatttgtctgtctt

SEQ ID NO: 37234 - DNA, 25 bp, Homo sapien
gtccctctgtccttttgtctgtctt

SEQ ID NO: 37235 - DNA, 25 bp, Homo sapien
tccgttctccgtcctgtgtccgtta

SEQ ID NO: 37236 - DNA, 25 bp, Homo sapien
tccgttctccgtgctgtgtccgtta

SEQ ID NO: 37237 - DNA, 25 bp, Homo sapien
gaaaatgttctcgtgttgtccttgg

SEQ ID NO: 37238 - DNA, 25 bp, Homo sapien
gaaaatgttctcctgttgtccttgg

SEQ ID NO: 37239 - DNA, 25 bp, Homo sapien
ttacgtgttggctttgtcgattaac

SEQ ID NO: 37240 - DNA, 25 bp, Homo sapien
ttacgtgttggcattgtcgattaac

SEQ ID NO: 37241 - DNA, 25 bp, Homo sapien
cggtttcgttgtcgttgtgtttcaa

SEQ ID NO: 37242 - DNA, 25 bp, Homo sapien
cggtttcgttgtggttgtgtttcaa

SEQ ID NO: 37243 - DNA, 25 bp, Homo sapien
gtttggaccgaatactagtaaaact

SEQ ID NO: 37244 - DNA, 25 bp, Homo sapien
gtttggaccgaaaactagtaaaact

SEQ ID NO: 37245 - DNA, 25 bp, Homo sapien
gattgtgtcctaaaacaccgacgaa

SEQ ID NO: 37246 - DNA, 25 bp, Homo sapien
gattgtgtcctataacaccgacgaa

SEQ ID NO: 37247 - DNA, 25 bp, Homo sapien
gtctcttgtttggtccacaacagta

SEQ ID NO: 37248 - DNA, 25 bp, Homo sapien
gtctcttgtttgctccacaacagta

SEQ ID NO: 37249 - DNA, 25 bp, Homo sapien
ggtatgttttatatcgttaccaaca

SEQ ID NO: 37250 - DNA, 25 bp, Homo sapien
ggtatgttttatttcgttaccaaca

SEQ ID NO: 37251 - DNA, 25 bp, Homo sapien
attagtacgggtgaaatgttcccaa

SEQ ID NO: 37252 - DNA, 25 bp, Homo sapien
attagtacgggtcaaatgttcccaa

SEQ ID NO: 37253 - DNA, 25 bp, Homo sapien
tcttgagggttcaaggtttccaagt

SEQ ID NO: 37254 - DNA, 25 bp, Homo sapien
tcttgagggttctaggtttccaagt

SEQ ID NO: 37255 - DNA, 25 bp, Homo sapien
gtggtccagtctagggtgaacacga

SEQ ID NO: 37256 - DNA, 25 bp, Homo sapien
gtggtccagtcttgggtgaacacga

SEQ ID NO: 37257 - DNA, 25 bp, Homo sapien
gtcgttattcggtggtcacgtcgag

SEQ ID NO: 37258 - DNA, 25 bp, Homo sapien
gtcgttattcggaggtcacgtcgag

SEQ ID NO: 37259 - DNA, 25 bp, Homo sapien
cgatatatcgtttacgtgtgtgcat

SEQ ID NO: 37260 - DNA, 25 bp, Homo sapien
cgatatatcgttaacgtgtgtgcat

SEQ ID NO: 37261 - DNA, 25 bp, Homo sapien
gcaacttctacttctacgggtacgt

SEQ ID NO: 37262 - DNA, 25 bp, Homo sapien
gcaacttctactactacgggtacgt

SEQ ID NO: 37263 - DNA, 25 bp, Homo sapien
tcttgtacctaactcgtatttgggg

SEQ ID NO: 37264 - DNA, 25 bp, Homo sapien
tcttgtacctaagtcgtatttgggg

SEQ ID NO: 37265 - DNA, 25 bp, Homo sapien
ccgaggtccaaacgttacttcgggg

SEQ ID NO: 37266 - DNA, 25 bp, Homo sapien
ccgaggtccaaaggttacttcgggg

SEQ ID NO: 37267 - DNA, 25 bp, Homo sapien
gtcgttatccttgtgtctggtgagc

SEQ ID NO: 37268 - DNA, 25 bp, Homo sapien
gtcgttatccttctgtctggtgagc

SEQ ID NO: 37269 - DNA, 25 bp, Homo sapien
atccctgttcttgtacttgggtcac

SEQ ID NO: 37270 - DNA, 25 bp, Homo sapien
atccctgttcttctacttgggtcac

SEQ ID NO: 37271 - DNA, 25 bp, Homo sapien
gccccgtcttttctctttgtgtcct

SEQ ID NO: 37272 - DNA, 25 bp, Homo sapien
gccccgtcttttgtctttgtgtcct

SEQ ID NO: 37273 - DNA, 25 bp, Homo sapien
acgagctgtttgtcttcctccgaca

SEQ ID NO: 37274 - DNA, 25 bp, Homo sapien
acgagctgtttgacttcctccgaca

SEQ ID NO: 37275 - DNA, 25 bp, Homo sapien
tctggttctttgagtgtcctccaca

SEQ ID NO: 37276 - DNA, 25 bp, Homo sapien
tctggttctttgtgtgtcctccaca

SEQ ID NO: 37277 - DNA, 25 bp, Homo sapien
aggtcgtttgtttgtcggtcacctc

SEQ ID NO: 37278 - DNA, 25 bp, Homo sapien
aggtcgtttgttagtcggtcacctc

SEQ ID NO: 37279 - DNA, 25 bp, Homo sapien
ggggtcgtagtatctgtcgtcactt

SEQ ID NO: 37280 - DNA, 25 bp, Homo sapien
ggggtcgtagtaactgtcgtcactt

SEQ ID NO: 37281 - DNA, 25 bp, Homo sapien
aacggagtgtacagtcccgtccata

SEQ ID NO: 37282 - DNA, 25 bp, Homo sapien
aacggagtgtactgtcccgtccata

SEQ ID NO: 37283 - DNA, 25 bp, Homo sapien
atgtcgtttgtattgtgacatccgg

SEQ ID NO: 37284 - DNA, 25 bp, Homo sapien
atgtcgtttgtaatgtgacatccgg

SEQ ID NO: 37285 - DNA, 25 bp, Homo sapien
cagctttgtttacttggatctagta

SEQ ID NO: 37286 - DNA, 25 bp, Homo sapien
cagctttgtttagttggatctagta

SEQ ID NO: 37287 - DNA, 25 bp, Homo sapien
tgttagtgtagatccggttgtcgct

SEQ ID NO: 37288 - DNA, 25 bp, Homo sapien
tgttagtgtagaaccggttgtcgct

SEQ ID NO: 37289 - DNA, 25 bp, Homo sapien
gtcgtataataccaccgagtcccac

SEQ ID NO: 37290 - DNA, 25 bp, Homo sapien
gtcgtataatacgaccgagtcccac

SEQ ID NO: 37291 - DNA, 25 bp, Homo sapien
ttccgttttggtcacacgatccgtc

SEQ ID NO: 37292 - DNA, 25 bp, Homo sapien
ttccgttttggtgacacgatccgtc

SEQ ID NO: 37293 - DNA, 25 bp, Homo sapien
gttttttggtgtacacggatctgtc

SEQ ID NO: 37294 - DNA, 25 bp, Homo sapien
gttttttggtgttcacggatctgtc

SEQ ID NO: 37295 - DNA, 25 bp, Homo sapien
cttcgtgtagttgacaacgtgatta

SEQ ID NO: 37296 - DNA, 25 bp, Homo sapien
cttcgtgtagttcacaacgtgatta

SEQ ID NO: 37297 - DNA, 25 bp, Homo sapien
agtactatatgtttaactgtatcct

SEQ ID NO: 37298 - DNA, 25 bp, Homo sapien
agtactatatgtataactgtatcct

SEQ ID NO: 37299 - DNA, 25 bp, Homo sapien
cttacattttaccacgtcggtaacg

SEQ ID NO: 37300 - DNA, 25 bp, Homo sapien
cttacattttacgacgtcggtaacg

SEQ ID NO: 37301 - DNA, 25 bp, Homo sapien
gcagctaaattttccggtcggtgag

SEQ ID NO: 37302 - DNA, 25 bp, Homo sapien
gcagctaaatttaccggtcggtgag

SEQ ID NO: 37303 - DNA, 25 bp, Homo sapien
taagtaatccaggtctagtagacgt

SEQ ID NO: 37304 - DNA, 25 bp, Homo sapien
taagtaatccagctctagtagacgt

SEQ ID NO: 37305 - DNA, 25 bp, Homo sapien
ctcgtcacagggtccggactacggg

SEQ ID NO: 37306 - DNA, 25 bp, Homo sapien
ctcgtcacagggaccggactacggg

SEQ ID NO: 37307 - DNA, 25 bp, Homo sapien
ccaacagaaacgataaaccggtcgt

SEQ ID NO: 37308 - DNA, 25 bp, Homo sapien
ccaacagaaacgttaaaccggtcgt

SEQ ID NO: 37309 - DNA, 25 bp, Homo sapien
ccgacttccgtgaaattagtccctc

SEQ ID NO: 37310 - DNA, 25 bp, Homo sapien
ccgacttccgtgtaattagtccctc

SEQ ID NO: 37311 - DNA, 25 bp, Homo sapien
ccttgacggtagtaaaagacccact

SEQ ID NO: 37312 - DNA, 25 bp, Homo sapien
ccttgacggtagaaaaagacccact

SEQ ID NO: 37313 - DNA, 25 bp, Homo sapien
tccccagttgagagagacgacccga

SEQ ID NO: 37314 - DNA, 25 bp, Homo sapien
tccccagttgagtgagacgacccga

SEQ ID NO: 37315 - DNA, 25 bp, Homo sapien
cctcacacattttgtacgccctagg

SEQ ID NO: 37316 - DNA, 25 bp, Homo sapien
cctcacacatttagtacgccctagg

SEQ ID NO: 37317 - DNA, 25 bp, Homo sapien
tcgtcaaaggttaagttgccgagcg

SEQ ID NO: 37318 - DNA, 25 bp, Homo sapien
tcgtcaaaggtttagttgccgagcg

SEQ ID NO: 37319 - DNA, 25 bp, Homo sapien
ctacagaccgttcgatttacagagg

SEQ ID NO: 37320 - DNA, 25 bp, Homo sapien
ctacagaccgttggatttacagagg

SEQ ID NO: 37321 - DNA, 25 bp, Homo sapien
cgaccttggtcgtacccgcgtaaag

SEQ ID NO: 37322 - DNA, 25 bp, Homo sapien
cgaccttggtcgaacccgcgtaaag

SEQ ID NO: 37323 - DNA, 25 bp, Homo sapien
tggtacacaaggtcgctcccatgag

SEQ ID NO: 37324 - DNA, 25 bp, Homo sapien
tggtacacaaggacgctcccatgag

SEQ ID NO: 37325 - DNA, 25 bp, Homo sapien
tgttacaaatatagaccccatagtt

SEQ ID NO: 37326 - DNA, 25 bp, Homo sapien
tgttacaaatattgaccccatagtt

SEQ ID NO: 37327 - DNA, 25 bp, Homo sapien
ttgacaagaaatgacaccgttgttt

SEQ ID NO: 37328 - DNA, 25 bp, Homo sapien
ttgacaagaaatcacaccgttgttt

SEQ ID NO: 37329 - DNA, 25 bp, Homo sapien
gatcgagaatactatccccttgtta

SEQ ID NO: 37330 - DNA, 25 bp, Homo sapien
gatcgagaatacaatccccttgtta

SEQ ID NO: 37331 - DNA, 25 bp, Homo sapien
gatcaactaaagaagcaattcttgt

SEQ ID NO: 37332 - DNA, 25 bp, Homo sapien
gatcaactaaagtagcaattcttgt

SEQ ID NO: 37333 - DNA, 25 bp, Homo sapien
tacaaacacgtctatttagacgtcg

SEQ ID NO: 37334 - DNA, 25 bp, Homo sapien
tacaaacacgtcaatttagacgtcg

SEQ ID NO: 37335 - DNA, 25 bp, Homo sapien
taaagtttcacgatattctacgtcg

SEQ ID NO: 37336 - DNA, 25 bp, Homo sapien
taaagtttcacgttattctacgtcg

SEQ ID NO: 37337 - DNA, 25 bp, Homo sapien
ttcaaggtgaccatgttttacgtat

SEQ ID NO: 37338 - DNA, 25 bp, Homo sapien
ttcaaggtgaccttgttttacgtat

SEQ ID NO: 37339 - DNA, 25 bp, Homo sapien
acgggataaaccatttaggattcta

SEQ ID NO: 37340 - DNA, 25 bp, Homo sapien
acgggataaaccttttaggattcta

SEQ ID NO: 37341 - DNA, 25 bp, Homo sapien
ggggaagaccttctgagcgacccgt

SEQ ID NO: 37342 - DNA, 25 bp, Homo sapien
ggggaagaccttgtgagcgacccgt

SEQ ID NO: 37343 - DNA, 25 bp, Homo sapien
accaaggtaacttcagacgcagagc

SEQ ID NO: 37344 - DNA, 25 bp, Homo sapien
accaaggtaactacagacgcagagc

SEQ ID NO: 37345 - DNA, 25 bp, Homo sapien
ccgacccgactactgggtcgaagga

SEQ ID NO: 37346 - DNA, 25 bp, Homo sapien
ccgacccgactagtgggtcgaagga

SEQ ID NO: 37347 - DNA, 25 bp, Homo sapien
tgacccaccgtcggctcggacccga

SEQ ID NO: 37348 - DNA, 25 bp, Homo sapien
tgacccaccgtccgctcggacccga

SEQ ID NO: 37349 - DNA, 25 bp, Homo sapien
caatccagtccgagtagggtcaccg

SEQ ID NO: 37350 - DNA, 25 bp, Homo sapien
caatccagtccgtgtagggtcaccg

SEQ ID NO: 37351 - DNA, 25 bp, Homo sapien
cgtcgctcgccaggtgtggcgcctt

SEQ ID NO: 37352 - DNA, 25 bp, Homo sapien
cgtcgctcgccacgtgtggcgcctt

SEQ ID NO: 37353 - DNA, 25 bp, Homo sapien
cgtcccgaacaccaacgaatgtctg

SEQ ID NO: 37354 - DNA, 25 bp, Homo sapien
cgtcccgaacacgaacgaatgtctg

SEQ ID NO: 37355 - DNA, 25 bp, Homo sapien
tctcggtcaacattctacgaatgaa

SEQ ID NO: 37356 - DNA, 25 bp, Homo sapien
tctcggtcaacaatctacgaatgaa

SEQ ID NO: 37357 - DNA, 25 bp, Homo sapien
ctctcgtgacatatcttgacaagga

SEQ ID NO: 37358 - DNA, 25 bp, Homo sapien
ctctcgtgacatttcttgacaagga

SEQ ID NO: 37359 - DNA, 25 bp, Homo sapien
tagtggtaccgctacatgaaaggac

SEQ ID NO: 37360 - DNA, 25 bp, Homo sapien
tagtggtaccgcaacatgaaaggac

SEQ ID NO: 37361 - DNA, 25 bp, Homo sapien
gaggtaccactacactgtccgaggg

SEQ ID NO: 37362 - DNA, 25 bp, Homo sapien
gaggtaccactagactgtccgaggg

SEQ ID NO: 37363 - DNA, 25 bp, Homo sapien
ggtgataaggattggaccccggacc

SEQ ID NO: 37364 - DNA, 25 bp, Homo sapien
ggtgataaggataggaccccggacc

SEQ ID NO: 37365 - DNA, 25 bp, Homo sapien
gcatggactttaatgccgtgaccgt

SEQ ID NO: 37366 - DNA, 25 bp, Homo sapien
gcatggactttattgccgtgaccgt

SEQ ID NO: 37367 - DNA, 25 bp, Homo sapien
tgtcaagaaattttctctgaccccg

SEQ ID NO: 37368 - DNA, 25 bp, Homo sapien
tgtcaagaaattatctctgaccccg

SEQ ID NO: 37369 - DNA, 25 bp, Homo sapien
taccgtaaagggtcctacgggaacg

SEQ ID NO: 37370 - DNA, 25 bp, Homo sapien
taccgtaaagggacctacgggaacg

SEQ ID NO: 37371 - DNA, 25 bp, Homo sapien
ataccggggccgacccgtgagctat

SEQ ID NO: 37372 - DNA, 25 bp, Homo sapien
ataccggggccgtcccgtgagctat

SEQ ID NO: 37373 - DNA, 25 bp, Homo sapien
aactctgtggggatcctcgtcgaaa

SEQ ID NO: 37374 - DNA, 25 bp, Homo sapien
aactctgtggggttcctcgtcgaaa

SEQ ID NO: 37375 - DNA, 25 bp, Homo sapien
gagaagggattacgttctctcagga

SEQ ID NO: 37376 - DNA, 25 bp, Homo sapien
gagaagggattaggttctctcagga

SEQ ID NO: 37377 - DNA, 25 bp, Homo sapien
ctggaaagtcggtgtttctccgaaa

SEQ ID NO: 37378 - DNA, 25 bp, Homo sapien
ctggaaagtcggagtttctccgaaa

SEQ ID NO: 37379 - DNA, 25 bp, Homo sapien
gaacagacaaaaggtgacacatcac

SEQ ID NO: 37380 - DNA, 25 bp, Homo sapien
gaacagacaaaacgtgacacatcac

SEQ ID NO: 37381 - DNA, 25 bp, Homo sapien
agacagaagtaatgcatgaaccgta

SEQ ID NO: 37382 - DNA, 25 bp, Homo sapien
agacagaagtaaagcatgaaccgta

SEQ ID NO: 37383 - DNA, 25 bp, Homo sapien
acgaagaacggagagaagaccagtc

SEQ ID NO: 37384 - DNA, 25 bp, Homo sapien
acgaagaacggacagaagaccagtc

SEQ ID NO: 37385 - DNA, 25 bp, Homo sapien
gaagcaggagaagtagtccacgact

SEQ ID NO: 37386 - DNA, 25 bp, Homo sapien
gaagcaggagaactagtccacgact

SEQ ID NO: 37387 - DNA, 25 bp, Homo sapien
gaggtaatgaacaaactcctactac

SEQ ID NO: 37388 - DNA, 25 bp, Homo sapien
gaggtaatgaactaactcctactac

SEQ ID NO: 37389 - DNA, 25 bp, Homo sapien
aaggctcaactcgagactcggtgac

SEQ ID NO: 37390 - DNA, 25 bp, Homo sapien
aaggctcaactccagactcggtgac

SEQ ID NO: 37391 - DNA, 25 bp, Homo sapien
ggggtcgctcacaggacattgttgc

SEQ ID NO: 37392 - DNA, 25 bp, Homo sapien
ggggtcgctcactggacattgttgc

SEQ ID NO: 37393 - DNA, 25 bp, Homo sapien
atgtctcctctgagacactcgggag

SEQ ID NO: 37394 - DNA, 25 bp, Homo sapien
atgtctcctctgtgacactcgggag

SEQ ID NO: 37395 - DNA, 25 bp, Homo sapien
tggtcattctgtgagagactcagga

SEQ ID NO: 37396 - DNA, 25 bp, Homo sapien
tggtcattctgtcagagactcagga

SEQ ID NO: 37397 - DNA, 25 bp, Homo sapien
agttcagttccatcagtcagtgtga

SEQ ID NO: 37398 - DNA, 25 bp, Homo sapien
agttcagttccaacagtcagtgtga

SEQ ID NO: 37399 - DNA, 25 bp, Homo sapien
caaatgtatcggaagagacacatgc

SEQ ID NO: 37400 - DNA, 25 bp, Homo sapien
caaatgtatcggtagagacacatgc

SEQ ID NO: 37401 - DNA, 25 bp, Homo sapien
acaccacgggtcgagtcacactgtg

SEQ ID NO: 37402 - DNA, 25 bp, Homo sapien
acaccacgggtccagtcacactgtg

SEQ ID NO: 37403 - DNA, 25 bp, Homo sapien
tcccgagctgcgagtcgacgaagtc

SEQ ID NO: 37404 - DNA, 25 bp, Homo sapien
tcccgagctgcgtgtcgacgaagtc

SEQ ID NO: 37405 - DNA, 25 bp, Homo sapien
tctgtactctgtcgtgtatgaagtc

SEQ ID NO: 37406 - DNA, 25 bp, Homo sapien
tctgtactctgtggtgtatgaagtc

SEQ ID NO: 37407 - DNA, 25 bp, Homo sapien
ttggagacttctgtgattcggagtc

SEQ ID NO: 37408 - DNA, 25 bp, Homo sapien
ttggagacttctctgattcggagtc

SEQ ID NO: 37409 - DNA, 25 bp, Homo sapien
catcatcgtcctgaactagaacgtc

SEQ ID NO: 37410 - DNA, 25 bp, Homo sapien
catcatcgtcctcaactagaacgtc

SEQ ID NO: 37411 - DNA, 25 bp, Homo sapien
aatgacctcgttcaaccggtctgac

SEQ ID NO: 37412 - DNA, 25 bp, Homo sapien
aatgacctcgttgaaccggtctgac

SEQ ID NO: 37413 - DNA, 25 bp, Homo sapien
agaacacacgtccaacggagctgag

SEQ ID NO: 37414 - DNA, 25 bp, Homo sapien
agaacacacgtcgaacggagctgag

SEQ ID NO: 37415 - DNA, 25 bp, Homo sapien
ccttacagggtatgttgtcgtcgat

SEQ ID NO: 37416 - DNA, 25 bp, Homo sapien
ccttacagggtaagttgtcgtcgat

SEQ ID NO: 37417 - DNA, 25 bp, Homo sapien
ccatctttgtgctacgtttgacgta

SEQ ID NO: 37418 - DNA, 25 bp, Homo sapien
ccatctttgtgcaacgtttgacgta

SEQ ID NO: 37419 - DNA, 25 bp, Homo sapien
gcttattcaaggtggtccgtagaga

SEQ ID NO: 37420 - DNA, 25 bp, Homo sapien
gcttattcaaggaggtccgtagaga

SEQ ID NO: 37421 - DNA, 25 bp, Homo sapien
tttacgaacgagtgtgtccgtaagg

SEQ ID NO: 37422 - DNA, 25 bp, Homo sapien
tttacgaacgagagtgtccgtaagg

SEQ ID NO: 37423 - DNA, 25 bp, Homo sapien
ttccgaaacagtagtgtctcgatga

SEQ ID NO: 37424 - DNA, 25 bp, Homo sapien
ttccgaaacagttgtgtctcgatga

SEQ ID NO: 37425 - DNA, 25 bp, Homo sapien
aggaggagatgtgtgttcgtacacc

SEQ ID NO: 37426 - DNA, 25 bp, Homo sapien
aggaggagatgtctgttcgtacacc

SEQ ID NO: 37427 - DNA, 25 bp, Homo sapien
caggagtgacatggcgacatctccc

SEQ ID NO: 37428 - DNA, 25 bp, Homo sapien
caggagtgacatcgcgacatctccc

SEQ ID NO: 37429 - DNA, 25 bp, Homo sapien
aagggaggtttcgtcgtacttcaac

SEQ ID NO: 37430 - DNA, 25 bp, Homo sapien
aagggaggtttcctcgtacttcaac

SEQ ID NO: 37431 - DNA, 25 bp, Homo sapien
cgtcgacggttcccctacggcgtga

SEQ ID NO: 37432 - DNA, 25 bp, Homo sapien
cgtcgacggttcgcctacggcgtga

SEQ ID NO: 37433 - DNA, 25 bp, Homo sapien
tccccgagtgtcgccgagtagggtc

SEQ ID NO: 37434 - DNA, 25 bp, Homo sapien
tccccgagtgtccccgagtagggtc

SEQ ID NO: 37435 - DNA, 25 bp, Homo sapien
gagtgtcaccagtcccggggagtcc

SEQ ID NO: 37436 - DNA, 25 bp, Homo sapien
gagtgtcaccagacccggggagtcc

SEQ ID NO: 37437 - DNA, 25 bp, Homo sapien
gtccactggtaggccggcgtatctc

SEQ ID NO: 37438 - DNA, 25 bp, Homo sapien
gtccactggtagcccggcgtatctc

SEQ ID NO: 37439 - DNA, 25 bp, Homo sapien
taagactctccttcggtaatgtacc

SEQ ID NO: 37440 - DNA, 25 bp, Homo sapien
taagactctcctacggtaatgtacc

SEQ ID NO: 37441 - DNA, 25 bp, Homo sapien
gtgagaggtcgttcaccgtcctttc

SEQ ID NO: 37442 - DNA, 25 bp, Homo sapien
gtgagaggtcgtacaccgtcctttc

SEQ ID NO: 37443 - DNA, 25 bp, Homo sapien
tacggtccgtgacacaagacgagta

SEQ ID NO: 37444 - DNA, 25 bp, Homo sapien
tacggtccgtgagacaagacgagta

SEQ ID NO: 37445 - DNA, 25 bp, Homo sapien
tagttccggactgacaccacgagta

SEQ ID NO: 37446 - DNA, 25 bp, Homo sapien
tagttccggactcacaccacgagta

SEQ ID NO: 37447 - DNA, 25 bp, Homo sapien
gcctataggacgacaacgggccgtg

SEQ ID NO: 37448 - DNA, 25 bp, Homo sapien
gcctataggacgtcaacgggccgtg

SEQ ID NO: 37449 - DNA, 25 bp, Homo sapien
agtattacgacggcgcaacattata

SEQ ID NO: 37450 - DNA, 25 bp, Homo sapien
agtattacgacgccgcaacattata

SEQ ID NO: 37451 - DNA, 25 bp, Homo sapien
gcagaacttgtccgcgactactggg

SEQ ID NO: 37452 - DNA, 25 bp, Homo sapien
gcagaacttgtcggcgactactggg

SEQ ID NO: 37453 - DNA, 25 bp, Homo sapien
ctaattgtttcgttcatacagaatg

SEQ ID NO: 37454 - DNA, 25 bp, Homo sapien
ctaattgtttcgatcatacagaatg

SEQ ID NO: 37455 - DNA, 25 bp, Homo sapien
tgatgtttacacagcgctaaagatt

SEQ ID NO: 37456 - DNA, 25 bp, Homo sapien
tgatgtttacactgcgctaaagatt

SEQ ID NO: 37457 - DNA, 25 bp, Homo sapien
acagtttgaggtgcttccgctacag

SEQ ID NO: 37458 - DNA, 25 bp, Homo sapien
acagtttgaggtccttccgctacag

SEQ ID NO: 37459 - DNA, 25 bp, Homo sapien
gtttatgaaagttccacactacacg

SEQ ID NO: 37460 - DNA, 25 bp, Homo sapien
gtttatgaaagtaccacactacacg

SEQ ID NO: 37461 - DNA, 25 bp, Homo sapien
tggtttaagaattccgtaagtctct

SEQ ID NO: 37462 - DNA, 25 bp, Homo sapien
tggtttaagaataccgtaagtctct

SEQ ID NO: 37463 - DNA, 25 bp, Homo sapien
ggtctaaaatatcagacgtcattat

SEQ ID NO: 37464 - DNA, 25 bp, Homo sapien
ggtctaaaatatgagacgtcattat

SEQ ID NO: 37465 - DNA, 25 bp, Homo sapien
tacggaagagtatcaccgcttgtcg

SEQ ID NO: 37466 - DNA, 25 bp, Homo sapien
tacggaagagtaacaccgcttgtcg

SEQ ID NO: 37467 - DNA, 25 bp, Homo sapien
atataagagacgataacacattccg

SEQ ID NO: 37468 - DNA, 25 bp, Homo sapien
atataagagacgttaacacattccg

SEQ ID NO: 37469 - DNA, 25 bp, Homo sapien
tttataacaggagtctcactagtcc

SEQ ID NO: 37470 - DNA, 25 bp, Homo sapien
tttataacaggactctcactagtcc

SEQ ID NO: 37471 - DNA, 25 bp, Homo sapien
cttggacctggtaagaactgtctcg

SEQ ID NO: 37472 - DNA, 25 bp, Homo sapien
cttggacctggttagaactgtctcg

SEQ ID NO: 37473 - DNA, 25 bp, Homo sapien
gctagaacggaggttaacagtgtcc

SEQ ID NO: 37474 - DNA, 25 bp, Homo sapien
gctagaacggagcttaacagtgtcc

SEQ ID NO: 37475 - DNA, 25 bp, Homo sapien
tatatacggacgaacagaccgttcc

SEQ ID NO: 37476 - DNA, 25 bp, Homo sapien
tatatacggacgtacagaccgttcc

SEQ ID NO: 37477 - DNA, 25 bp, Homo sapien
cacctcatcgcctagagtgttgacc

SEQ ID NO: 37478 - DNA, 25 bp, Homo sapien
cacctcatcgccaagagtgttgacc

SEQ ID NO: 37479 - DNA, 25 bp, Homo sapien
agtagagtcggagtcgtcgctaaag

SEQ ID NO: 37480 - DNA, 25 bp, Homo sapien
agtagagtcggactcgtcgctaaag

SEQ ID NO: 37481 - DNA, 25 bp, Homo sapien
caatattcgtggttgcagtgacgac

SEQ ID NO: 37482 - DNA, 25 bp, Homo sapien
caatattcgtggatgcagtgacgac

SEQ ID NO: 37483 - DNA, 25 bp, Homo sapien
actaccgcaagtggtcctggacgtc

SEQ ID NO: 37484 - DNA, 25 bp, Homo sapien
actaccgcaagtcgtcctggacgtc

SEQ ID NO: 37485 - DNA, 25 bp, Homo sapien
acagaaagaatatgtcctagtgaga

SEQ ID NO: 37486 - DNA, 25 bp, Homo sapien
acagaaagaataagtcctagtgaga

SEQ ID NO: 37487 - DNA, 25 bp, Homo sapien
cgagtaggtaggagcccactcgaat

SEQ ID NO: 37488 - DNA, 25 bp, Homo sapien
cgagtaggtaggtgcccactcgaat

SEQ ID NO: 37489 - DNA, 25 bp, Homo sapien
gagtaaggtgttgacatcgacaaca

SEQ ID NO: 37490 - DNA, 25 bp, Homo sapien
gagtaaggtgttcacatcgacaaca

SEQ ID NO: 37491 - DNA, 25 bp, Homo sapien
gtagtacatgcgtcaatagatcaga

SEQ ID NO: 37492 - DNA, 25 bp, Homo sapien
gtagtacatgcgacaatagatcaga

SEQ ID NO: 37493 - DNA, 25 bp, Homo sapien
tgtacgtaagagaccaaggtcagtc

SEQ ID NO: 37494 - DNA, 25 bp, Homo sapien
tgtacgtaagagtccaaggtcagtc

SEQ ID NO: 37495 - DNA, 25 bp, Homo sapien
atcgtaaatagagtcaaccgagata

SEQ ID NO: 37496 - DNA, 25 bp, Homo sapien
atcgtaaatagactcaaccgagata

SEQ ID NO: 37497 - DNA, 25 bp, Homo sapien
agaacaaagatcatgacgacgtgtg

SEQ ID NO: 37498 - DNA, 25 bp, Homo sapien
agaacaaagatcttgacgacgtgtg

SEQ ID NO: 37499 - DNA, 25 bp, Homo sapien
gacgaggaactcgtccgtctactgg

SEQ ID NO: 37500 - DNA, 25 bp, Homo sapien
gacgaggaactcctccgtctactgg

SEQ ID NO: 37501 - DNA, 25 bp, Homo sapien
gttataggtttaagttctctcgatc

SEQ ID NO: 37502 - DNA, 25 bp, Homo sapien
gttataggtttatgttctctcgatc

SEQ ID NO: 37503 - DNA, 25 bp, Homo sapien
acagaagtagggtgtacttttctcc

SEQ ID NO: 37504 - DNA, 25 bp, Homo sapien
acagaagtagggagtacttttctcc

SEQ ID NO: 37505 - DNA, 25 bp, Homo sapien
ataataggtgtccattaataacgac

SEQ ID NO: 37506 - DNA, 25 bp, Homo sapien
ataataggtgtcgattaataacgac

SEQ ID NO: 37507 - DNA, 25 bp, Homo sapien
tgttcaggagtctacgttacttccc

SEQ ID NO: 37508 - DNA, 25 bp, Homo sapien
tgttcaggagtcaacgttacttccc

SEQ ID NO: 37509 - DNA, 25 bp, Homo sapien
tttcagtcacgtaacagttgttcaa

SEQ ID NO: 37510 - DNA, 25 bp, Homo sapien
tttcagtcacgttacagttgttcaa

SEQ ID NO: 37511 - DNA, 25 bp, Homo sapien
ggttccactccgtcgttgtctacag

SEQ ID NO: 37512 - DNA, 25 bp, Homo sapien
ggttccactccgacgttgtctacag

SEQ ID NO: 37513 - DNA, 25 bp, Homo sapien
agagtcgtcccctgctgtgactacc

SEQ ID NO: 37514 - DNA, 25 bp, Homo sapien
agagtcgtccccagctgtgactacc

SEQ ID NO: 37515 - DNA, 25 bp, Homo sapien
ccaatcaccaagatctggctaccgt

SEQ ID NO: 37516 - DNA, 25 bp, Homo sapien
ccaatcaccaagttctggctaccgt

SEQ ID NO: 37517 - DNA, 25 bp, Homo sapien
cgacactccgaatgtcagtgttaga

SEQ ID NO: 37518 - DNA, 25 bp, Homo sapien
cgacactccgaaagtcagtgttaga

SEQ ID NO: 37519 - DNA, 25 bp, Homo sapien
gggactagatcaaatgcactgtaaa

SEQ ID NO: 37520 - DNA, 25 bp, Homo sapien
gggactagatcatatgcactgtaaa

SEQ ID NO: 37521 - DNA, 25 bp, Homo sapien
gtcggagtcagtacatccactagaa

SEQ ID NO: 37522 - DNA, 25 bp, Homo sapien
gtcggagtcagttcatccactagaa

SEQ ID NO: 37523 - DNA, 25 bp, Homo sapien
cggacgagcagatcgaagtccaatt

SEQ ID NO: 37524 - DNA, 25 bp, Homo sapien
cggacgagcagaacgaagtccaatt

SEQ ID NO: 37525 - DNA, 25 bp, Homo sapien
gaaacgagatcgttactcctcactc

SEQ ID NO: 37526 - DNA, 25 bp, Homo sapien
gaaacgagatcgatactcctcactc

SEQ ID NO: 37527 - DNA, 25 bp, Homo sapien
gtatctcggtccttctcgttacacc

SEQ ID NO: 37528 - DNA, 25 bp, Homo sapien
gtatctcggtccatctcgttacacc

SEQ ID NO: 37529 - DNA, 25 bp, Homo sapien
cgtcggttgtatcgtcgtataccac

SEQ ID NO: 37530 - DNA, 25 bp, Homo sapien
cgtcggttgtatggtcgtataccac

SEQ ID NO: 37531 - DNA, 25 bp, Homo sapien
gtgtagatctctttccgtgttacat

SEQ ID NO: 37532 - DNA, 25 bp, Homo sapien
gtgtagatctctatccgtgttacat

SEQ ID NO: 37533 - DNA, 25 bp, Homo sapien
cgttgacgttgttgaccggtttaca

SEQ ID NO: 37534 - DNA, 25 bp, Homo sapien
cgttgacgttgtagaccggtttaca

SEQ ID NO: 37535 - DNA, 25 bp, Homo sapien
aaccattatgagtacgttatacgta

SEQ ID NO: 37536 - DNA, 25 bp, Homo sapien
aaccattatgagaacgttatacgta

SEQ ID NO: 37537 - DNA, 25 bp, Homo sapien
aatcgctcgataagtctctaagata

SEQ ID NO: 37538 - DNA, 25 bp, Homo sapien
aatcgctcgatatgtctctaagata

SEQ ID NO: 37539 - DNA, 25 bp, Homo sapien
ggagtctcagtttacttcttttata

SEQ ID NO: 37540 - DNA, 25 bp, Homo sapien
ggagtctcagttaacttcttttata

SEQ ID NO: 37541 - DNA, 25 bp, Homo sapien
aagtagttcgaagtcaccttctaaa

SEQ ID NO: 37542 - DNA, 25 bp, Homo sapien
aagtagttcgaactcaccttctaaa

SEQ ID NO: 37543 - DNA, 25 bp, Homo sapien
aagattcgtaacgaagttttcacta

SEQ ID NO: 37544 - DNA, 25 bp, Homo sapien
aagattcgtaaccaagttttcacta

SEQ ID NO: 37545 - DNA, 25 bp, Homo sapien
aatgaagaacgattctgctgtcgtc

SEQ ID NO: 37546 - DNA, 25 bp, Homo sapien
aatgaagaacgaatctgctgtcgtc

SEQ ID NO: 37547 - DNA, 25 bp, Homo sapien
tagaggagacataacagactggact

SEQ ID NO: 37548 - DNA, 25 bp, Homo sapien
tagaggagacattacagactggact

SEQ ID NO: 37549 - DNA, 25 bp, Homo sapien
gagggagagtatctcagactaggac

SEQ ID NO: 37550 - DNA, 25 bp, Homo sapien
gagggagagtatgtcagactaggac

SEQ ID NO: 37551 - DNA, 25 bp, Homo sapien
gaaggataagacaaccgacggagga

SEQ ID NO: 37552 - DNA, 25 bp, Homo sapien
gaaggataagactaccgacggagga

SEQ ID NO: 37553 - DNA, 25 bp, Homo sapien
aagttgtacgagatccgggaggtac

SEQ ID NO: 37554 - DNA, 25 bp, Homo sapien
aagttgtacgagttccgggaggtac

SEQ ID NO: 37555 - DNA, 25 bp, Homo sapien
aggaacgaggtgtcccgggacaact

SEQ ID NO: 37556 - DNA, 25 bp, Homo sapien
aggaacgaggtgacccgggacaact

SEQ ID NO: 37557 - DNA, 25 bp, Homo sapien
gtcgtacgctgtgatacggatgaaa

SEQ ID NO: 37558 - DNA, 25 bp, Homo sapien
gtcgtacgctgtcatacggatgaaa

SEQ ID NO: 37559 - DNA, 25 bp, Homo sapien
gtacggtcactatggtactgaccct

SEQ ID NO: 37560 - DNA, 25 bp, Homo sapien
gtacggtcactaaggtactgaccct

SEQ ID NO: 37561 - DNA, 25 bp, Homo sapien
cagtctctctttggtctcgtcctct

SEQ ID NO: 37562 - DNA, 25 bp, Homo sapien
cagtctctctttcgtctcgtcctct

SEQ ID NO: 37563 - DNA, 25 bp, Homo sapien
caagtcagttttatagacctgttta

SEQ ID NO: 37564 - DNA, 25 bp, Homo sapien
caagtcagttttttagacctgttta

SEQ ID NO: 37565 - DNA, 25 bp, Homo sapien
taagaaactttgagacgactttcct

SEQ ID NO: 37566 - DNA, 25 bp, Homo sapien
taagaaactttgtgacgactttcct

SEQ ID NO: 37567 - DNA, 25 bp, Homo sapien
gaacatgtgtcctgtccttatctgt

SEQ ID NO: 37568 - DNA, 25 bp, Homo sapien
gaacatgtgtccagtccttatctgt

SEQ ID NO: 37569 - DNA, 25 bp, Homo sapien
cttatatgtttggtttcgacatact

SEQ ID NO: 37570 - DNA, 25 bp, Homo sapien
cttatatgtttgctttcgacatact

SEQ ID NO: 37571 - DNA, 25 bp, Homo sapien
ctgagacctacatttatgtataccc

SEQ ID NO: 37572 - DNA, 25 bp, Homo sapien
ctgagacctacaattatgtataccc

SEQ ID NO: 37573 - DNA, 25 bp, Homo sapien
agtcgcctacatctagtacagcctc

SEQ ID NO: 37574 - DNA, 25 bp, Homo sapien
agtcgcctacatgtagtacagcctc

SEQ ID NO: 37575 - DNA, 25 bp, Homo sapien
atgtcgcacatctctgtgtccctac

SEQ ID NO: 37576 - DNA, 25 bp, Homo sapien
atgtcgcacatcactgtgtccctac

SEQ ID NO: 37577 - DNA, 25 bp, Homo sapien
taatcacgatcctcggttcctcgtc

SEQ ID NO: 37578 - DNA, 25 bp, Homo sapien
taatcacgatccacggttcctcgtc

SEQ ID NO: 37579 - DNA, 25 bp, Homo sapien
gtatgacatatgtgtctattcttct

SEQ ID NO: 37580 - DNA, 25 bp, Homo sapien
gtatgacatatgagtctattcttct

SEQ ID NO: 37581 - DNA, 25 bp, Homo sapien
ctataagcttgtggtaataactatc

SEQ ID NO: 37582 - DNA, 25 bp, Homo sapien
ctataagcttgtcgtaataactatc

SEQ ID NO: 37583 - DNA, 25 bp, Homo sapien
taaagtgtgtctacttagagtcatc

SEQ ID NO: 37584 - DNA, 25 bp, Homo sapien
taaagtgtgtcttcttagagtcatc

SEQ ID NO: 37585 - DNA, 25 bp, Homo sapien
aaagtgtgtctacttagagtcatct

SEQ ID NO: 37586 - DNA, 25 bp, Homo sapien
aaagtgtgtctagttagagtcatct

SEQ ID NO: 37587 - DNA, 25 bp, Homo sapien
aagagttatacacgttgagtcacac

SEQ ID NO: 37588 - DNA, 25 bp, Homo sapien
aagagttatacaggttgagtcacac

SEQ ID NO: 37589 - DNA, 25 bp, Homo sapien
ggggtgatacacgaattctcagtag

SEQ ID NO: 37590 - DNA, 25 bp, Homo sapien
ggggtgatacaccaattctcagtag

SEQ ID NO: 37591 - DNA, 25 bp, Homo sapien
gtcgacgtcccttaatttacgtata

SEQ ID NO: 37592 - DNA, 25 bp, Homo sapien
gtcgacgtccctaaatttacgtata

SEQ ID NO: 37593 - DNA, 25 bp, Homo sapien
tgtcacttctgtctaattacagtag

SEQ ID NO: 37594 - DNA, 25 bp, Homo sapien
tgtcacttctgtgtaattacagtag

SEQ ID NO: 37595 - DNA, 25 bp, Homo sapien
acatgtcccgcagacgtaggtccca

SEQ ID NO: 37596 - DNA, 25 bp, Homo sapien
acatgtcccgcacacgtaggtccca

SEQ ID NO: 37597 - DNA, 25 bp, Homo sapien
agtgtcttgggaactagagtcccat

SEQ ID NO: 37598 - DNA, 25 bp, Homo sapien
agtgtcttgggatctagagtcccat

SEQ ID NO: 37599 - DNA, 25 bp, Homo sapien
tatgttcgttcactacaccctatac

SEQ ID NO: 37600 - DNA, 25 bp, Homo sapien
tatgttcgttcagtacaccctatac

SEQ ID NO: 37601 - DNA, 25 bp, Homo sapien
agacatgtttttgtaccacactctc

SEQ ID NO: 37602 - DNA, 25 bp, Homo sapien
agacatgtttttctaccacactctc

SEQ ID NO: 37603 - DNA, 25 bp, Homo sapien
aaggacttcgtctaaccacgacctc

SEQ ID NO: 37604 - DNA, 25 bp, Homo sapien
aaggacttcgtcaaaccacgacctc

SEQ ID NO: 37605 - DNA, 25 bp, Homo sapien
cccgggtgtgtaaagtctcctctca

SEQ ID NO: 37606 - DNA, 25 bp, Homo sapien
cccgggtgtgtatagtctcctctca

SEQ ID NO: 37607 - DNA, 25 bp, Homo sapien
ccggtcggtcgatagttccttcgtt

SEQ ID NO: 37608 - DNA, 25 bp, Homo sapien
ccggtcggtcgaaagttccttcgtt

SEQ ID NO: 37609 - DNA, 25 bp, Homo sapien
acgggacccgacttagtttggtgta

SEQ ID NO: 37610 - DNA, 25 bp, Homo sapien
acgggacccgacatagtttggtgta

SEQ ID NO: 37611 - DNA, 25 bp, Homo sapien
aaccaacctcgaagttgagtcatta

SEQ ID NO: 37612 - DNA, 25 bp, Homo sapien
aaccaacctcgatgttgagtcatta

SEQ ID NO: 37613 - DNA, 25 bp, Homo sapien
atcgttgttttagtaggacgatcct

SEQ ID NO: 37614 - DNA, 25 bp, Homo sapien
atcgttgttttactaggacgatcct

SEQ ID NO: 37615 - DNA, 25 bp, Homo sapien
ggttcgggtccctggactaaaccct

SEQ ID NO: 37616 - DNA, 25 bp, Homo sapien
ggttcgggtcccaggactaaaccct

SEQ ID NO: 37617 - DNA, 25 bp, Homo sapien
gtgtcacgagattttcgagacagta

SEQ ID NO: 37618 - DNA, 25 bp, Homo sapien
gtgtcacgagatattcgagacagta

SEQ ID NO: 37619 - DNA, 25 bp, Homo sapien
atatctacggtatatccacaagtag

SEQ ID NO: 37620 - DNA, 25 bp, Homo sapien
atatctacggtaaatccacaagtag

SEQ ID NO: 37621 - DNA, 25 bp, Homo sapien
tcgtttccgcacgtccagtgagtcg

SEQ ID NO: 37622 - DNA, 25 bp, Homo sapien
tcgtttccgcacctccagtgagtcg

SEQ ID NO: 37623 - DNA, 25 bp, Homo sapien
actgtgtcctcgtcccgtcgacggt

SEQ ID NO: 37624 - DNA, 25 bp, Homo sapien
actgtgtcctcgacccgtcgacggt

SEQ ID NO: 37625 - DNA, 25 bp, Homo sapien
tttatctggacgtttccagtctctg

SEQ ID NO: 37626 - DNA, 25 bp, Homo sapien
tttatctggacgattccagtctctg

SEQ ID NO: 37627 - DNA, 25 bp, Homo sapien
ggtcctgacgtctcgtacacctaca

SEQ ID NO: 37628 - DNA, 25 bp, Homo sapien
ggtcctgacgtcacgtacacctaca

SEQ ID NO: 37629 - DNA, 25 bp, Homo sapien
ggtcgagccgggtccgacattactc

SEQ ID NO: 37630 - DNA, 25 bp, Homo sapien
ggtcgagccgggaccgacattactc

SEQ ID NO: 37631 - DNA, 25 bp, Homo sapien
tgtacccagagataccactcaagtc

SEQ ID NO: 37632 - DNA, 25 bp, Homo sapien
tgtacccagagaaaccactcaagtc

SEQ ID NO: 37633 - DNA, 25 bp, Homo sapien
agaaaaagacacagcttctagagtg

SEQ ID NO: 37634 - DNA, 25 bp, Homo sapien
agaaaaagacactgcttctagagtg

SEQ ID NO: 37635 - DNA, 25 bp, Homo sapien
gaaaggtacgaaaagggtcacgaac

SEQ ID NO: 37636 - DNA, 25 bp, Homo sapien
gaaaggtacgaatagggtcacgaac

SEQ ID NO: 37637 - DNA, 25 bp, Homo sapien
gtaattagagaagtaccgaaaacct

SEQ ID NO: 37638 - DNA, 25 bp, Homo sapien
gtaattagagaactaccgaaaacct

SEQ ID NO: 37639 - DNA, 25 bp, Homo sapien
gtcttagaaagtctccaacagacac

SEQ ID NO: 37640 - DNA, 25 bp, Homo sapien
gtcttagaaagtgtccaacagacac

SEQ ID NO: 37641 - DNA, 25 bp, Homo sapien
atcgtagaagaggttgtccacgctc

SEQ ID NO: 37642 - DNA, 25 bp, Homo sapien
atcgtagaagagcttgtccacgctc

SEQ ID NO: 37643 - DNA, 25 bp, Homo sapien
gaggtaccagaccttcgccggtacc

SEQ ID NO: 37644 - DNA, 25 bp, Homo sapien
gaggtaccagacgttcgccggtacc

SEQ ID NO: 37645 - DNA, 25 bp, Homo sapien
aagattcgactcgaacccgcgatac

SEQ ID NO: 37646 - DNA, 25 bp, Homo sapien
aagattcgactccaacccgcgatac

SEQ ID NO: 37647 - DNA, 25 bp, Homo sapien
acgaacccagtaccttaatgttatg

SEQ ID NO: 37648 - DNA, 25 bp, Homo sapien
acgaacccagtagcttaatgttatg

SEQ ID NO: 37649 - DNA, 25 bp, Homo sapien
acgagcgacccatatacagtttcct

SEQ ID NO: 37650 - DNA, 25 bp, Homo sapien
acgagcgacccaaatacagtttcct

SEQ ID NO: 37651 - DNA, 25 bp, Homo sapien
aaagaatgatgtaaactaacctgac

SEQ ID NO: 37652 - DNA, 25 bp, Homo sapien
aaagaatgatgttaactaacctgac

SEQ ID NO: 37653 - DNA, 25 bp, Homo sapien
cgaagaaccatacgaacaacactga

SEQ ID NO: 37654 - DNA, 25 bp, Homo sapien
cgaagaaccataggaacaacactga

SEQ ID NO: 37655 - DNA, 25 bp, Homo sapien
ggagtactttaccaactaagacacc

SEQ ID NO: 37656 - DNA, 25 bp, Homo sapien
ggagtactttacgaactaagacacc

SEQ ID NO: 37657 - DNA, 25 bp, Homo sapien
gggtgctagagactccagaccacta

SEQ ID NO: 37658 - DNA, 25 bp, Homo sapien
gggtgctagagagtccagaccacta

SEQ ID NO: 37659 - DNA, 25 bp, Homo sapien
ggtttaacgtcatctcgaaccacat

SEQ ID NO: 37660 - DNA, 25 bp, Homo sapien
ggtttaacgtcaactcgaaccacat

SEQ ID NO: 37661 - DNA, 25 bp, Homo sapien
tggcgtcacgtcagagacgtcacct

SEQ ID NO: 37662 - DNA, 25 bp, Homo sapien
tggcgtcacgtctgagacgtcacct

SEQ ID NO: 37663 - DNA, 25 bp, Homo sapien
aaataaacaccgtcgtgagtcttac

SEQ ID NO: 37664 - DNA, 25 bp, Homo sapien
aaataaacaccgacgtgagtcttac

SEQ ID NO: 37665 - DNA, 25 bp, Homo sapien
agactcaaaagtaggtaccgtcttc

SEQ ID NO: 37666 - DNA, 25 bp, Homo sapien
agactcaaaagttggtaccgtcttc

SEQ ID NO: 37667 - DNA, 25 bp, Homo sapien
gtaccgaaattcttattctgtgtat

SEQ ID NO: 37668 - DNA, 25 bp, Homo sapien
gtaccgaaattcatattctgtgtat

SEQ ID NO: 37669 - DNA, 25 bp, Homo sapien
ccctacagaaagacgacaggaccat

SEQ ID NO: 37670 - DNA, 25 bp, Homo sapien
ccctacagaaagtcgacaggaccat

SEQ ID NO: 37671 - DNA, 25 bp, Homo sapien
ccctagactggtctgacgtcgttgg

SEQ ID NO: 37672 - DNA, 25 bp, Homo sapien
ccctagactggtgtgacgtcgttgg

SEQ ID NO: 37673 - DNA, 25 bp, Homo sapien
acagatacaccgaaggggtactcga

SEQ ID NO: 37674 - DNA, 25 bp, Homo sapien
acagatacaccgtaggggtactcga

SEQ ID NO: 37675 - DNA, 25 bp, Homo sapien
tacagagtcacgatgagggtttcag

SEQ ID NO: 37676 - DNA, 25 bp, Homo sapien
tacagagtcacgttgagggtttcag

SEQ ID NO: 37677 - DNA, 25 bp, Homo sapien
actgagtaccccacgtaagtaagac

SEQ ID NO: 37678 - DNA, 25 bp, Homo sapien
actgagtacccctcgtaagtaagac

SEQ ID NO: 37679 - DNA, 25 bp, Homo sapien
taggttcctctctgtgatagtaagt

SEQ ID NO: 37680 - DNA, 25 bp, Homo sapien
taggttcctctcagtgatagtaagt

SEQ ID NO: 37681 - DNA, 25 bp, Homo sapien
gggtcgacactcttacggacaaacg

SEQ ID NO: 37682 - DNA, 25 bp, Homo sapien
gggtcgacactcatacggacaaacg

SEQ ID NO: 37683 - DNA, 25 bp, Homo sapien
cgggaaccacgcagtaggaccacac

SEQ ID NO: 37684 - DNA, 25 bp, Homo sapien
cgggaaccacgctgtaggaccacac

SEQ ID NO: 37685 - DNA, 25 bp, Homo sapien
gccgggaagatcgacggacacgacc

SEQ ID NO: 37686 - DNA, 25 bp, Homo sapien
gccgggaagatccacggacacgacc

SEQ ID NO: 37687 - DNA, 25 bp, Homo sapien
tgtgtgtccactcctggaccgaccg

SEQ ID NO: 37688 - DNA, 25 bp, Homo sapien
tgtgtgtccactgctggaccgaccg

SEQ ID NO: 37689 - DNA, 25 bp, Homo sapien
ttgacgtcccgtggtgactcacacc

SEQ ID NO: 37690 - DNA, 25 bp, Homo sapien
ttgacgtcccgtcgtgactcacacc

SEQ ID NO: 37691 - DNA, 25 bp, Homo sapien
gggtcgattctcgacacaaccgacc

SEQ ID NO: 37692 - DNA, 25 bp, Homo sapien
gggtcgattctccacacaaccgacc

SEQ ID NO: 37693 - DNA, 25 bp, Homo sapien
gtgactcggttcactactggacccc

SEQ ID NO: 37694 - DNA, 25 bp, Homo sapien
gtgactcggttctctactggacccc

SEQ ID NO: 37695 - DNA, 25 bp, Homo sapien
agttccacttcttgagtactcactg

SEQ ID NO: 37696 - DNA, 25 bp, Homo sapien
agttccacttctagagtactcactg

SEQ ID NO: 37697 - DNA, 25 bp, Homo sapien
caattccttcgttacggtgtcaacg

SEQ ID NO: 37698 - DNA, 25 bp, Homo sapien
caattccttcgtaacggtgtcaacg

SEQ ID NO: 37699 - DNA, 25 bp, Homo sapien
tagttatgtcttagactcccgacgt

SEQ ID NO: 37700 - DNA, 25 bp, Homo sapien
tagttatgtctttgactcccgacgt

SEQ ID NO: 37701 - DNA, 25 bp, Homo sapien
agttcactattcgtcacacggctcc

SEQ ID NO: 37702 - DNA, 25 bp, Homo sapien
agttcactattcctcacacggctcc

SEQ ID NO: 37703 - DNA, 25 bp, Homo sapien
gttcccgtaatggtgtaaccctcac

SEQ ID NO: 37704 - DNA, 25 bp, Homo sapien
gttcccgtaatgctgtaaccctcac

SEQ ID NO: 37705 - DNA, 25 bp, Homo sapien
gaggtttcctgatttgacaccccga

SEQ ID NO: 37706 - DNA, 25 bp, Homo sapien
gaggtttcctgaattgacaccccga

SEQ ID NO: 37707 - DNA, 25 bp, Homo sapien
agggtggcttgatctgaaactcaga

SEQ ID NO: 37708 - DNA, 25 bp, Homo sapien
agggtggcttgaactgaaactcaga

SEQ ID NO: 37709 - DNA, 25 bp, Homo sapien
cgtttgggacgttgacgacatgaga

SEQ ID NO: 37710 - DNA, 25 bp, Homo sapien
cgtttgggacgtagacgacatgaga

SEQ ID NO: 37711 - DNA, 25 bp, Homo sapien
ttagagtcgagtaatagacccggag

SEQ ID NO: 37712 - DNA, 25 bp, Homo sapien
ttagagtcgagttatagacccggag

SEQ ID NO: 37713 - DNA, 25 bp, Homo sapien
tatctaaatgagtatacccgggacg

SEQ ID NO: 37714 - DNA, 25 bp, Homo sapien
tatctaaatgagaatacccgggacg

SEQ ID NO: 37715 - DNA, 25 bp, Homo sapien
tctaactgaacatagttaccgagac

SEQ ID NO: 37716 - DNA, 25 bp, Homo sapien
tctaactgaacaaagttaccgagac

SEQ ID NO: 37717 - DNA, 25 bp, Homo sapien
actcaggacaacataagtttcgtga

SEQ ID NO: 37718 - DNA, 25 bp, Homo sapien
actcaggacaacttaagtttcgtga

SEQ ID NO: 37719 - DNA, 25 bp, Homo sapien
cacgtcgaagagtaacgtgtccagg

SEQ ID NO: 37720 - DNA, 25 bp, Homo sapien
cacgtcgaagagaaacgtgtccagg

SEQ ID NO: 37721 - DNA, 25 bp, Homo sapien
gacgagtcacgtaggaaccgccaga

SEQ ID NO: 37722 - DNA, 25 bp, Homo sapien
gacgagtcacgttggaaccgccaga

SEQ ID NO: 37723 - DNA, 25 bp, Homo sapien
gtgtctcattacgtattgccacact

SEQ ID NO: 37724 - DNA, 25 bp, Homo sapien
gtgtctcattacctattgccacact

SEQ ID NO: 37725 - DNA, 25 bp, Homo sapien
gtgagtcgacggtatgttggaccct

SEQ ID NO: 37726 - DNA, 25 bp, Homo sapien
gtgagtcgacggaatgttggaccct

SEQ ID NO: 37727 - DNA, 25 bp, Homo sapien
ttggagcgagtgaaagcggccctct

SEQ ID NO: 37728 - DNA, 25 bp, Homo sapien
ttggagcgagtgtaagcggccctct

SEQ ID NO: 37729 - DNA, 25 bp, Homo sapien
ctatttgttcgatgagcctccactt

SEQ ID NO: 37730 - DNA, 25 bp, Homo sapien
ctatttgttcgaagagcctccactt

SEQ ID NO: 37731 - DNA, 25 bp, Homo sapien
aatgtgtaatagaagacatccctat

SEQ ID NO: 37732 - DNA, 25 bp, Homo sapien
aatgtgtaatagtagacatccctat

SEQ ID NO: 37733 - DNA, 25 bp, Homo sapien
aaagagttataggaccatcgcaact

SEQ ID NO: 37734 - DNA, 25 bp, Homo sapien
aaagagttatagcaccatcgcaact

SEQ ID NO: 37735 - DNA, 25 bp, Homo sapien
cgaatgttagacttccacaggcaag

SEQ ID NO: 37736 - DNA, 25 bp, Homo sapien
cgaatgttagacatccacaggcaag

SEQ ID NO: 37737 - DNA, 25 bp, Homo sapien
aaaaaacgactgttcaggttctacc

SEQ ID NO: 37738 - DNA, 25 bp, Homo sapien
aaaaaacgactgatcaggttctacc

SEQ ID NO: 37739 - DNA, 25 bp, Homo sapien
aaggtaataccaatggtagtttctc

SEQ ID NO: 37740 - DNA, 25 bp, Homo sapien
aaggtaataccattggtagtttctc

SEQ ID NO: 37741 - DNA, 25 bp, Homo sapien
ttgacatactcatcgggtagttttt

SEQ ID NO: 37742 - DNA, 25 bp, Homo sapien
ttgacatactcaacgggtagttttt

SEQ ID NO: 37743 - DNA, 25 bp, Homo sapien
ctgaccgtggacaagtacttttatt

SEQ ID NO: 37744 - DNA, 25 bp, Homo sapien
ctgaccgtggactagtacttttatt

SEQ ID NO: 37745 - DNA, 25 bp, Homo sapien
actcgttcatactccgaatttttat

SEQ ID NO: 37746 - DNA, 25 bp, Homo sapien
actcgttcatacaccgaatttttat

SEQ ID NO: 37747 - DNA, 25 bp, Homo sapien
aagactgattgtcgtcgatgaattc

SEQ ID NO: 37748 - DNA, 25 bp, Homo sapien
aagactgattgtggtcgatgaattc

SEQ ID NO: 37749 - DNA, 25 bp, Homo sapien
tttatatcagtcatctattgctagg

SEQ ID NO: 37750 - DNA, 25 bp, Homo sapien
tttatatcagtcttctattgctagg

SEQ ID NO: 37751 - DNA, 25 bp, Homo sapien
gatgtacagttgtttacctattccc

SEQ ID NO: 37752 - DNA, 25 bp, Homo sapien
gatgtacagttgattacctattccc

SEQ ID NO: 37753 - DNA, 25 bp, Homo sapien
cgtcaccgacatcattgtctcggtg

SEQ ID NO: 37754 - DNA, 25 bp, Homo sapien
cgtcaccgacatgattgtctcggtg

SEQ ID NO: 37755 - DNA, 25 bp, Homo sapien
ttcctaagtcccttgtcctcgaggt

SEQ ID NO: 37756 - DNA, 25 bp, Homo sapien
ttcctaagtcccatgtcctcgaggt

SEQ ID NO: 37757 - DNA, 25 bp, Homo sapien
agtctataacccaaacggtctcgat

SEQ ID NO: 37758 - DNA, 25 bp, Homo sapien
agtctataaccctaacggtctcgat

SEQ ID NO: 37759 - DNA, 25 bp, Homo sapien
ttaagtctcaacagacgacgtccat

SEQ ID NO: 37760 - DNA, 25 bp, Homo sapien
ttaagtctcaactgacgacgtccat

SEQ ID NO: 37761 - DNA, 25 bp, Homo sapien
gttcgacctgagattctctctaact

SEQ ID NO: 37762 - DNA, 25 bp, Homo sapien
gttcgacctgagtttctctctaact

SEQ ID NO: 37763 - DNA, 25 bp, Homo sapien
taattcacgtcctgtaaggattaca

SEQ ID NO: 37764 - DNA, 25 bp, Homo sapien
taattcacgtccagtaaggattaca

SEQ ID NO: 37765 - DNA, 25 bp, Homo sapien
tatacatcagtcaagaaggacttcc

SEQ ID NO: 37766 - DNA, 25 bp, Homo sapien
tatacatcagtctagaaggacttcc

SEQ ID NO: 37767 - DNA, 25 bp, Homo sapien
ggtgacctgtcaaaccagaaccgtc

SEQ ID NO: 37768 - DNA, 25 bp, Homo sapien
ggtgacctgtcataccagaaccgtc

SEQ ID NO: 37769 - DNA, 25 bp, Homo sapien
gggaccttcagaagaccggacgacc

SEQ ID NO: 37770 - DNA, 25 bp, Homo sapien
gggaccttcagatgaccggacgacc

SEQ ID NO: 37771 - DNA, 25 bp, Homo sapien
agtgtcgggcctgtcaccggtgacc

SEQ ID NO: 37772 - DNA, 25 bp, Homo sapien
agtgtcgggcctctcaccggtgacc

SEQ ID NO: 37773 - DNA, 25 bp, Homo sapien
gttactgttcatctagcccgtgtcc

SEQ ID NO: 37774 - DNA, 25 bp, Homo sapien
gttactgttcatgtagcccgtgtcc

SEQ ID NO: 37775 - DNA, 25 bp, Homo sapien
cacggttgataaacgacccgtgtcc

SEQ ID NO: 37776 - DNA, 25 bp, Homo sapien
cacggttgataatcgacccgtgtcc

SEQ ID NO: 37777 - DNA, 25 bp, Homo sapien
ttactgttcctgttacctgggtctc

SEQ ID NO: 37778 - DNA, 25 bp, Homo sapien
ttactgttcctgatacctgggtctc

SEQ ID NO: 37779 - DNA, 25 bp, Homo sapien
cagatgttacctgaactggaggtga

SEQ ID NO: 37780 - DNA, 25 bp, Homo sapien
cagatgttacctcaactggaggtga

SEQ ID NO: 37781 - DNA, 25 bp, Homo sapien
acgtaattccccaaggagatgtcga

SEQ ID NO: 37782 - DNA, 25 bp, Homo sapien
acgtaattcccctaggagatgtcga

SEQ ID NO: 37783 - DNA, 25 bp, Homo sapien
tctcactctccgactggaattatgg

SEQ ID NO: 37784 - DNA, 25 bp, Homo sapien
tctcactctccgtctggaattatgg

SEQ ID NO: 37785 - DNA, 25 bp, Homo sapien
atctcatgacttgtccattcagtag

SEQ ID NO: 37786 - DNA, 25 bp, Homo sapien
atctcatgacttctccattcagtag

SEQ ID NO: 37787 - DNA, 25 bp, Homo sapien
gtaaggtagtctactacaattcctc

SEQ ID NO: 37788 - DNA, 25 bp, Homo sapien
gtaaggtagtcttctacaattcctc

SEQ ID NO: 37789 - DNA, 25 bp, Homo sapien
gtcagaatcggatttccttttcacc

SEQ ID NO: 37790 - DNA, 25 bp, Homo sapien
gtcagaatcggaattccttttcacc

SEQ ID NO: 37791 - DNA, 25 bp, Homo sapien
gataagatgggatttgttgccacac

SEQ ID NO: 37792 - DNA, 25 bp, Homo sapien
gataagatgggaattgttgccacac

SEQ ID NO: 37793 - DNA, 25 bp, Homo sapien
tagggtggtcagtgtgccgtctacc

SEQ ID NO: 37794 - DNA, 25 bp, Homo sapien
tagggtggtcagagtgccgtctacc

SEQ ID NO: 37795 - DNA, 25 bp, Homo sapien
atgagtatggtcgaaggactcctcc

SEQ ID NO: 37796 - DNA, 25 bp, Homo sapien
atgagtatggtccaaggactcctcc

SEQ ID NO: 37797 - DNA, 25 bp, Homo sapien
gaattgtatgtattacgtcacaaac

SEQ ID NO: 37798 - DNA, 25 bp, Homo sapien
gaattgtatgtaatacgtcacaaac

SEQ ID NO: 37799 - DNA, 25 bp, Homo sapien
accaatgttctttatctgagacatg

SEQ ID NO: 37800 - DNA, 25 bp, Homo sapien
accaatgttcttaatctgagacatg

SEQ ID NO: 37801 - DNA, 25 bp, Homo sapien
ttcgggtttggttcactggagaatc

SEQ ID NO: 37802 - DNA, 25 bp, Homo sapien
ttcgggtttggtacactggagaatc

SEQ ID NO: 37803 - DNA, 25 bp, Homo sapien
agggtgtctatgttaacatgcaaac

SEQ ID NO: 37804 - DNA, 25 bp, Homo sapien
agggtgtctatgataacatgcaaac

SEQ ID NO: 37805 - DNA, 25 bp, Homo sapien
cttatattcgaacgacagaagacac

SEQ ID NO: 37806 - DNA, 25 bp, Homo sapien
cttatattcgaaggacagaagacac

SEQ ID NO: 37807 - DNA, 25 bp, Homo sapien
gagacatcatacttaagagactaca

SEQ ID NO: 37808 - DNA, 25 bp, Homo sapien
gagacatcatacataagagactaca

SEQ ID NO: 37809 - DNA, 25 bp, Homo sapien
tacgtcatctacaacaaggactcgg

SEQ ID NO: 37810 - DNA, 25 bp, Homo sapien
tacgtcatctactacaaggactcgg

SEQ ID NO: 37811 - DNA, 25 bp, Homo sapien
tcgcagagtacgagtcaaggtcgac

SEQ ID NO: 37812 - DNA, 25 bp, Homo sapien
tcgcagagtacgtgtcaaggtcgac

SEQ ID NO: 37813 - DNA, 25 bp, Homo sapien
tcttcgtcccgagtcagcagtcgac

SEQ ID NO: 37814 - DNA, 25 bp, Homo sapien
tcttcgtcccgactcagcagtcgac

SEQ ID NO: 37815 - DNA, 25 bp, Homo sapien
ccgaaccggacttacgagtctcgtc

SEQ ID NO: 37816 - DNA, 25 bp, Homo sapien
ccgaaccggactaacgagtctcgtc

SEQ ID NO: 37817 - DNA, 25 bp, Homo sapien
gaggcggacaacgaatcgaacctcg

SEQ ID NO: 37818 - DNA, 25 bp, Homo sapien
gaggcggacaaccaatcgaacctcg

SEQ ID NO: 37819 - DNA, 25 bp, Homo sapien
cctcgcgcaccgaagttccgtcctc

SEQ ID NO: 37820 - DNA, 25 bp, Homo sapien
cctcgcgcaccgtagttccgtcctc

SEQ ID NO: 37821 - DNA, 25 bp, Homo sapien
tctggactacgtctctcagacctca

SEQ ID NO: 37822 - DNA, 25 bp, Homo sapien
tctggactacgtgtctcagacctca

SEQ ID NO: 37823 - DNA, 25 bp, Homo sapien
tcagacgagtggtcagacgagtcag

SEQ ID NO: 37824 - DNA, 25 bp, Homo sapien
tcagacgagtggacagacgagtcag

SEQ ID NO: 37825 - DNA, 25 bp, Homo sapien
gtagtggtcgtaggactcgaaacag

SEQ ID NO: 37826 - DNA, 25 bp, Homo sapien
gtagtggtcgtacgactcgaaacag

SEQ ID NO: 37827 - DNA, 25 bp, Homo sapien
tacctcgtagggtccgaccctactt

SEQ ID NO: 37828 - DNA, 25 bp, Homo sapien
tacctcgtagggaccgaccctactt

SEQ ID NO: 37829 - DNA, 25 bp, Homo sapien
ccgccctgagggactaactgaccag

SEQ ID NO: 37830 - DNA, 25 bp, Homo sapien
ccgccctgagggtctaactgaccag

SEQ ID NO: 37831 - DNA, 25 bp, Homo sapien
cctattgttggtcctgacgtagggg

SEQ ID NO: 37832 - DNA, 25 bp, Homo sapien
cctattgttggtgctgacgtagggg

SEQ ID NO: 37833 - DNA, 25 bp, Homo sapien
ctccaactggtgtgcccgggtcgag

SEQ ID NO: 37834 - DNA, 25 bp, Homo sapien
ctccaactggtgagcccgggtcgag

SEQ ID NO: 37835 - DNA, 25 bp, Homo sapien
ttttgtagataaagtcctaaacctt

SEQ ID NO: 37836 - DNA, 25 bp, Homo sapien
ttttgtagataatgtcctaaacctt

SEQ ID NO: 37837 - DNA, 25 bp, Homo sapien
tcaggtgtactcgaagaatttttct

SEQ ID NO: 37838 - DNA, 25 bp, Homo sapien
tcaggtgtactccaagaatttttct

SEQ ID NO: 37839 - DNA, 25 bp, Homo sapien
cctcggtctctttaggacaattttg

SEQ ID NO: 37840 - DNA, 25 bp, Homo sapien
cctcggtctcttaaggacaattttg

SEQ ID NO: 37841 - DNA, 25 bp, Homo sapien
tcgtgatctccagagacaatattta

SEQ ID NO: 37842 - DNA, 25 bp, Homo sapien
tcgtgatctccacagacaatattta

SEQ ID NO: 37843 - DNA, 25 bp, Homo sapien
gttacgtactctataaaattaatta

SEQ ID NO: 37844 - DNA, 25 bp, Homo sapien
gttacgtactctttaaaattaatta

SEQ ID NO: 37845 - DNA, 25 bp, Homo sapien
gggtacttcttcctcacctgagctc

SEQ ID NO: 37846 - DNA, 25 bp, Homo sapien
gggtacttcttcgtcacctgagctc

SEQ ID NO: 37847 - DNA, 25 bp, Homo sapien
tttactcttttcctcgaatgtgagg

SEQ ID NO: 37848 - DNA, 25 bp, Homo sapien
tttactcttttcgtcgaatgtgagg

SEQ ID NO: 37849 - DNA, 25 bp, Homo sapien
atttatcgtttatgaaaccgttcag

SEQ ID NO: 37850 - DNA, 25 bp, Homo sapien
atttatcgtttaagaaaccgttcag

SEQ ID NO: 37851 - DNA, 25 bp, Homo sapien
tgtagataaagtcctaaaccttcga

SEQ ID NO: 37852 - DNA, 25 bp, Homo sapien
tgtagataaagtgctaaaccttcga

SEQ ID NO: 37853 - DNA, 25 bp, Homo sapien
cgtccagaagtactagtccagttga

SEQ ID NO: 37854 - DNA, 25 bp, Homo sapien
cgtccagaagtagtagtccagttga

SEQ ID NO: 37855 - DNA, 25 bp, Homo sapien
cgtactcacaagtggaaacgctgac

SEQ ID NO: 37856 - DNA, 25 bp, Homo sapien
cgtactcacaagaggaaacgctgac

SEQ ID NO: 37857 - DNA, 25 bp, Homo sapien
acgtcccagagacgtgggtgtctga

SEQ ID NO: 37858 - DNA, 25 bp, Homo sapien
acgtcccagagaggtgggtgtctga

SEQ ID NO: 37859 - DNA, 25 bp, Homo sapien
cctccgaacgagtgccgggtctcga

SEQ ID NO: 37860 - DNA, 25 bp, Homo sapien
cctccgaacgagagccgggtctcga

SEQ ID NO: 37861 - DNA, 25 bp, Homo sapien
ctctcggacgggtcgtgtctcttgg

SEQ ID NO: 37862 - DNA, 25 bp, Homo sapien
ctctcggacgggacgtgtctcttgg

SEQ ID NO: 37863 - DNA, 25 bp, Homo sapien
cacaaggggtagacaggtcccgacg

SEQ ID NO: 37864 - DNA, 25 bp, Homo sapien
cacaaggggtagtcaggtcccgacg

SEQ ID NO: 37865 - DNA, 25 bp, Homo sapien
aaacttttgagtaccgagcaccagt

SEQ ID NO: 37866 - DNA, 25 bp, Homo sapien
aaacttttgagttccgagcaccagt

SEQ ID NO: 37867 - DNA, 25 bp, Homo sapien
taacctgtagaactgggtcaccgac

SEQ ID NO: 37868 - DNA, 25 bp, Homo sapien
taacctgtagaagtgggtcaccgac

SEQ ID NO: 37869 - DNA, 25 bp, Homo sapien
caccgtctgtaaagtgggtcctgtt

SEQ ID NO: 37870 - DNA, 25 bp, Homo sapien
caccgtctgtaatgtgggtcctgtt

SEQ ID NO: 37871 - DNA, 25 bp, Homo sapien
aggtccggccctcctgtgtccgttt

SEQ ID NO: 37872 - DNA, 25 bp, Homo sapien
aggtccggccctgctgtgtccgttt

SEQ ID NO: 37873 - DNA, 25 bp, Homo sapien
aacagtgtgtctgttttacccttgt

SEQ ID NO: 37874 - DNA, 25 bp, Homo sapien
aacagtgtgtctcttttacccttgt

SEQ ID NO: 37875 - DNA, 25 bp, Homo sapien
atcagtgttttctttgactgtcaat

SEQ ID NO: 37876 - DNA, 25 bp, Homo sapien
atcagtgttttcattgactgtcaat

SEQ ID NO: 37877 - DNA, 25 bp, Homo sapien
cttatgtcttttattgatgtcaagt

SEQ ID NO: 37878 - DNA, 25 bp, Homo sapien
cttatgtctttttttgatgtcaagt

SEQ ID NO: 37879 - DNA, 25 bp, Homo sapien
tttcgtggtccgtatgttgtcaaat

SEQ ID NO: 37880 - DNA, 25 bp, Homo sapien
tttcgtggtccgaatgttgtcaaat

SEQ ID NO: 37881 - DNA, 25 bp, Homo sapien
gatttgtccaaaacgacccgagact

SEQ ID NO: 37882 - DNA, 25 bp, Homo sapien
gatttgtccaaatcgacccgagact

SEQ ID NO: 37883 - DNA, 25 bp, Homo sapien
agctctttcctagactcacaccgga

SEQ ID NO: 37884 - DNA, 25 bp, Homo sapien
agctctttcctacactcacaccgga

SEQ ID NO: 37885 - DNA, 25 bp, Homo sapien
ggtctttgtaatctcttagaccaga

SEQ ID NO: 37886 - DNA, 25 bp, Homo sapien
ggtctttgtaatgtcttagaccaga

SEQ ID NO: 37887 - DNA, 25 bp, Homo sapien
tgttcgtgttaaaatcggtccgcaa

SEQ ID NO: 37888 - DNA, 25 bp, Homo sapien
tgttcgtgttaatatcggtccgcaa

SEQ ID NO: 37889 - DNA, 25 bp, Homo sapien
cttgggtgttattgatgttccatac

SEQ ID NO: 37890 - DNA, 25 bp, Homo sapien
cttgggtgttatagatgttccatac

SEQ ID NO: 37891 - DNA, 25 bp, Homo sapien
gcaaggtgcattaggtggctcacga

SEQ ID NO: 37892 - DNA, 25 bp, Homo sapien
gcaaggtgcatttggtggctcacga

SEQ ID NO: 37893 - DNA, 25 bp, Homo sapien
gcgtcccttcggtggtactacggag

SEQ ID NO: 37894 - DNA, 25 bp, Homo sapien
gcgtcccttcggaggtactacggag

SEQ ID NO: 37895 - DNA, 25 bp, Homo sapien
ccgaccttgagtcactgtactcgca

SEQ ID NO: 37896 - DNA, 25 bp, Homo sapien
ccgaccttgagtgactgtactcgca

SEQ ID NO: 37897 - DNA, 25 bp, Homo sapien
gtacatgttatgtctacggacgtgt

SEQ ID NO: 37898 - DNA, 25 bp, Homo sapien
gtacatgttatgactacggacgtgt

SEQ ID NO: 37899 - DNA, 25 bp, Homo sapien
attatttaccaacttctatatgggg

SEQ ID NO: 37900 - DNA, 25 bp, Homo sapien
attatttaccaagttctatatgggg

SEQ ID NO: 37901 - DNA, 25 bp, Homo sapien
tttggaccgaaatttaccgtcgggg

SEQ ID NO: 37902 - DNA, 25 bp, Homo sapien
tttggaccgaaaattaccgtcgggg

SEQ ID NO: 37903 - DNA, 25 bp, Homo sapien
cgtgttagccgtttctctctggggg

SEQ ID NO: 37904 - DNA, 25 bp, Homo sapien
cgtgttagccgtatctctctggggg

SEQ ID NO: 37905 - DNA, 25 bp, Homo sapien
cgtcttgtccttctctcggagagcc

SEQ ID NO: 37906 - DNA, 25 bp, Homo sapien
cgtcttgtccttgtctcggagagcc

SEQ ID NO: 37907 - DNA, 25 bp, Homo sapien
cacccgctgtttctctttcgtaggg

SEQ ID NO: 37908 - DNA, 25 bp, Homo sapien
cacccgctgtttgtctttcgtaggg

SEQ ID NO: 37909 - DNA, 25 bp, Homo sapien
caccggtgatgttacttcttctcaa

SEQ ID NO: 37910 - DNA, 25 bp, Homo sapien
caccggtgatgtaacttcttctcaa

SEQ ID NO: 37911 - DNA, 25 bp, Homo sapien
cgattgttactaaagtgtccctcca

SEQ ID NO: 37912 - DNA, 25 bp, Homo sapien
cgattgttactatagtgtccctcca

SEQ ID NO: 37913 - DNA, 25 bp, Homo sapien
ttcgttacttattgtcttctaccac

SEQ ID NO: 37914 - DNA, 25 bp, Homo sapien
ttcgttacttatagtcttctaccac

SEQ ID NO: 37915 - DNA, 25 bp, Homo sapien
tcgtcagtcgtgatcatcgtacctt

SEQ ID NO: 37916 - DNA, 25 bp, Homo sapien
tcgtcagtcgtgttcatcgtacctt

SEQ ID NO: 37917 - DNA, 25 bp, Homo sapien
cggaggacggtcgactccacgtacg

SEQ ID NO: 37918 - DNA, 25 bp, Homo sapien
cggaggacggtccactccacgtacg

SEQ ID NO: 37919 - DNA, 25 bp, Homo sapien
aagcgttggtacacgcctataccgg

SEQ ID NO: 37920 - DNA, 25 bp, Homo sapien
aagcgttggtactcgcctataccgg

SEQ ID NO: 37921 - DNA, 25 bp, Homo sapien
tactttttactactcgggatctctg

SEQ ID NO: 37922 - DNA, 25 bp, Homo sapien
tactttttactagtcgggatctctg

SEQ ID NO: 37923 - DNA, 25 bp, Homo sapien
cctgtctacttgtcagtgtttcgct

SEQ ID NO: 37924 - DNA, 25 bp, Homo sapien
cctgtctacttgacagtgtttcgct

SEQ ID NO: 37925 - DNA, 25 bp, Homo sapien
cgtcgtagtacgtggccagcccact

SEQ ID NO: 37926 - DNA, 25 bp, Homo sapien
cgtcgtagtacgaggccagcccact

SEQ ID NO: 37927 - DNA, 25 bp, Homo sapien
aatccgtgtttggtgaccagtcctt

SEQ ID NO: 37928 - DNA, 25 bp, Homo sapien
aatccgtgtttgctgaccagtcctt

SEQ ID NO: 37929 - DNA, 25 bp, Homo sapien
tattcgttggttacccgacgtccta

SEQ ID NO: 37930 - DNA, 25 bp, Homo sapien
tattcgttggtttcccgacgtccta

SEQ ID NO: 37931 - DNA, 25 bp, Homo sapien
cgttccggagttgcagacacgatta

SEQ ID NO: 37932 - DNA, 25 bp, Homo sapien
cgttccggagttccagacacgatta

SEQ ID NO: 37933 - DNA, 25 bp, Homo sapien
ggaactcagtgtactaaccgaccct

SEQ ID NO: 37934 - DNA, 25 bp, Homo sapien
ggaactcagtgttctaaccgaccct

SEQ ID NO: 37935 - DNA, 25 bp, Homo sapien
tctcatttgttctcgtcgcgtcacg

SEQ ID NO: 37936 - DNA, 25 bp, Homo sapien
tctcatttgttcacgtcgcgtcacg

SEQ ID NO: 37937 - DNA, 25 bp, Homo sapien
cagcgatatttttctcagtggtaga

SEQ ID NO: 37938 - DNA, 25 bp, Homo sapien
cagcgatattttactcagtggtaga

SEQ ID NO: 37939 - DNA, 25 bp, Homo sapien
aaataactctcatgtcagtagtacg

SEQ ID NO: 37940 - DNA, 25 bp, Homo sapien
aaataactctcaagtcagtagtacg

SEQ ID NO: 37941 - DNA, 25 bp, Homo sapien
ccgtcgacaagagtccaggttaggg

SEQ ID NO: 37942 - DNA, 25 bp, Homo sapien
ccgtcgacaagactccaggttaggg

SEQ ID NO: 37943 - DNA, 25 bp, Homo sapien
cgaaagagaccgtagaactaccgtt

SEQ ID NO: 37944 - DNA, 25 bp, Homo sapien
cgaaagagaccgaagaactaccgtt

SEQ ID NO: 37945 - DNA, 25 bp, Homo sapien
ccattccggaacgtggtcaccgtcg

SEQ ID NO: 37946 - DNA, 25 bp, Homo sapien
ccattccggaacctggtcaccgtcg

SEQ ID NO: 37947 - DNA, 25 bp, Homo sapien
tccattcggagataaaacccgtcgt

SEQ ID NO: 37948 - DNA, 25 bp, Homo sapien
tccattcggagaaaaaacccgtcgt

SEQ ID NO: 37949 - DNA, 25 bp, Homo sapien
ccctagaggagaagagacacgacca

SEQ ID NO: 37950 - DNA, 25 bp, Homo sapien
ccctagaggagatgagacacgacca

SEQ ID NO: 37951 - DNA, 25 bp, Homo sapien
gcaccacaattttgaactctatagg

SEQ ID NO: 37952 - DNA, 25 bp, Homo sapien
gcaccacaatttagaactctatagg

SEQ ID NO: 37953 - DNA, 25 bp, Homo sapien
tctacaaagtttagtcgcctccgtg

SEQ ID NO: 37954 - DNA, 25 bp, Homo sapien
tctacaaagttttgtcgcctccgtg

SEQ ID NO: 37955 - DNA, 25 bp, Homo sapien
cgttaaaccggttagatttctgagg

SEQ ID NO: 37956 - DNA, 25 bp, Homo sapien
cgttaaaccggtaagatttctgagg

SEQ ID NO: 37957 - DNA, 25 bp, Homo sapien
tgacgctctggctccgtccgttagg

SEQ ID NO: 37958 - DNA, 25 bp, Homo sapien
tgacgctctggcaccgtccgttagg

SEQ ID NO: 37959 - DNA, 25 bp, Homo sapien
gtccgagtgtcgtcgccgccgatga

SEQ ID NO: 37960 - DNA, 25 bp, Homo sapien
gtccgagtgtcgacgccgccgatga

SEQ ID NO: 37961 - DNA, 25 bp, Homo sapien
gttcaaagacgtacgtcacccaatt

SEQ ID NO: 37962 - DNA, 25 bp, Homo sapien
gttcaaagacgttcgtcacccaatt

SEQ ID NO: 37963 - DNA, 25 bp, Homo sapien
gtgtcaagtaaagacatcttctctt

SEQ ID NO: 37964 - DNA, 25 bp, Homo sapien
gtgtcaagtaaacacatcttctctt

SEQ ID NO: 37965 - DNA, 25 bp, Homo sapien
gagtgtcaaaggttcacctttttat

SEQ ID NO: 37966 - DNA, 25 bp, Homo sapien
gagtgtcaaaggatcacctttttat

SEQ ID NO: 37967 - DNA, 25 bp, Homo sapien
gactgaaatatgacgtcaacttttt

SEQ ID NO: 37968 - DNA, 25 bp, Homo sapien
gactgaaatatgtcgtcaacttttt

SEQ ID NO: 37969 - DNA, 25 bp, Homo sapien
acatagaagtcttagtctggatcgt

SEQ ID NO: 37970 - DNA, 25 bp, Homo sapien
acatagaagtctaagtctggatcgt

SEQ ID NO: 37971 - DNA, 25 bp, Homo sapien
tagatacgtattcaccatttagtcg

SEQ ID NO: 37972 - DNA, 25 bp, Homo sapien
tagatacgtattgaccatttagtcg

SEQ ID NO: 37973 - DNA, 25 bp, Homo sapien
ttaagtcggtaccttgtattctatt

SEQ ID NO: 37974 - DNA, 25 bp, Homo sapien
ttaagtcggtacgttgtattctatt

SEQ ID NO: 37975 - DNA, 25 bp, Homo sapien
cgtaataatccgtttctaggtttta

SEQ ID NO: 37976 - DNA, 25 bp, Homo sapien
cgtaataatccgattctaggtttta

SEQ ID NO: 37977 - DNA, 25 bp, Homo sapien
ggagaaattctcctgaggtaccgtg

SEQ ID NO: 37978 - DNA, 25 bp, Homo sapien
ggagaaattctcgtgaggtaccgtg

SEQ ID NO: 37979 - DNA, 25 bp, Homo sapien
accaagtgtcactctgaccgaatct

SEQ ID NO: 37980 - DNA, 25 bp, Homo sapien
accaagtgtcacactgaccgaatct

SEQ ID NO: 37981 - DNA, 25 bp, Homo sapien
tcccgcaccatcctgcggtgcagga

SEQ ID NO: 37982 - DNA, 25 bp, Homo sapien
tcccgcaccatcgtgcggtgcagga

SEQ ID NO: 37983 - DNA, 25 bp, Homo sapien
agactcacacttggaccgagccgga

SEQ ID NO: 37984 - DNA, 25 bp, Homo sapien
agactcacacttcgaccgagccgga

SEQ ID NO: 37985 - DNA, 25 bp, Homo sapien
ataccactcctaagtagagccagac

SEQ ID NO: 37986 - DNA, 25 bp, Homo sapien
ataccactcctatgtagagccagac

SEQ ID NO: 37987 - DNA, 25 bp, Homo sapien
gggcctcgtccacgtgtgggtccat

SEQ ID NO: 37988 - DNA, 25 bp, Homo sapien
gggcctcgtccaggtgtgggtccat

SEQ ID NO: 37989 - DNA, 25 bp, Homo sapien
cgctcgcacaggaaggtatgtctgt

SEQ ID NO: 37990 - DNA, 25 bp, Homo sapien
cgctcgcacaggtaggtatgtctgt

SEQ ID NO: 37991 - DNA, 25 bp, Homo sapien
ttacctcaacatttacgtattgttt

SEQ ID NO: 37992 - DNA, 25 bp, Homo sapien
ttacctcaacatatacgtattgttt

SEQ ID NO: 37993 - DNA, 25 bp, Homo sapien
tattcggacaacattctaaaagtga

SEQ ID NO: 37994 - DNA, 25 bp, Homo sapien
tattcggacaactttctaaaagtga

SEQ ID NO: 37995 - DNA, 25 bp, Homo sapien
aaagttagaccctacatgaaagaag

SEQ ID NO: 37996 - DNA, 25 bp, Homo sapien
aaagttagacccaacatgaaagaag

SEQ ID NO: 37997 - DNA, 25 bp, Homo sapien
ggatactctctacgatctcggaggg

SEQ ID NO: 37998 - DNA, 25 bp, Homo sapien
ggatactctctaggatctcggaggg

SEQ ID NO: 37999 - DNA, 25 bp, Homo sapien
gtgataaggtttcagacccgggaag

SEQ ID NO: 38000 - DNA, 25 bp, Homo sapien
gtgataaggtttgagacccgggaag

SEQ ID NO: 38001 - DNA, 25 bp, Homo sapien
gcgattggtttaagacccggtccgt

SEQ ID NO: 38002 - DNA, 25 bp, Homo sapien
gcgattggtttatgacccggtccgt

SEQ ID NO: 38003 - DNA, 25 bp, Homo sapien
gtcaagaaattttctctgaccccgt

SEQ ID NO: 38004 - DNA, 25 bp, Homo sapien
gtcaagaaatttactctgaccccgt

SEQ ID NO: 38005 - DNA, 25 bp, Homo sapien
cttgtaaatgtttccgtggcgacac

SEQ ID NO: 38006 - DNA, 25 bp, Homo sapien
cttgtaaatgttaccgtggcgacac

SEQ ID NO: 38007 - DNA, 25 bp, Homo sapien
tgtagaagggtgacccgtaggctat

SEQ ID NO: 38008 - DNA, 25 bp, Homo sapien
tgtagaagggtgtcccgtaggctat

SEQ ID NO: 38009 - DNA, 25 bp, Homo sapien
ggatccttgggtgtcccgtgacaga

SEQ ID NO: 38010 - DNA, 25 bp, Homo sapien
ggatccttgggtctcccgtgacaga

SEQ ID NO: 38011 - DNA, 25 bp, Homo sapien
tacacggggttaccttctccacggg

SEQ ID NO: 38012 - DNA, 25 bp, Homo sapien
tacacggggttagcttctccacggg

SEQ ID NO: 38013 - DNA, 25 bp, Homo sapien
caggacagagtgtgtgttccccaaa

SEQ ID NO: 38014 - DNA, 25 bp, Homo sapien
caggacagagtgagtgttccccaaa

SEQ ID NO: 38015 - DNA, 25 bp, Homo sapien
gaaagtaaagacgaggaccacaacg

SEQ ID NO: 38016 - DNA, 25 bp, Homo sapien
gaaagtaaagaccaggaccacaacg

SEQ ID NO: 38017 - DNA, 25 bp, Homo sapien
aaagacagaagacggcaaaccctag

SEQ ID NO: 38018 - DNA, 25 bp, Homo sapien
aaagacagaagagggcaaaccctag

SEQ ID NO: 38019 - DNA, 25 bp, Homo sapien
cacgaagaaggcaaagaacccgtcg

SEQ ID NO: 38020 - DNA, 25 bp, Homo sapien
cacgaagaaggctaagaacccgtcg

SEQ ID NO: 38021 - DNA, 25 bp, Homo sapien
ccgagttaagggtaagtgtccacga

SEQ ID NO: 38022 - DNA, 25 bp, Homo sapien
ccgagttaagggaaagtgtccacga

SEQ ID NO: 38023 - DNA, 25 bp, Homo sapien
ccgagttcatggaatgactccttat

SEQ ID NO: 38024 - DNA, 25 bp, Homo sapien
ccgagttcatggtatgactccttat

SEQ ID NO: 38025 - DNA, 25 bp, Homo sapien
gaaggccacctcaagctcgactgta

SEQ ID NO: 38026 - DNA, 25 bp, Homo sapien
gaaggccacctctagctcgactgta

SEQ ID NO: 38027 - DNA, 25 bp, Homo sapien
gggagtctcgaagaagtctgctgac

SEQ ID NO: 38028 - DNA, 25 bp, Homo sapien
gggagtctcgaacaagtctgctgac

SEQ ID NO: 38029 - DNA, 25 bp, Homo sapien
tctcttctcagaagacctcggtgag

SEQ ID NO: 38030 - DNA, 25 bp, Homo sapien
tctcttctcagatgacctcggtgag

SEQ ID NO: 38031 - DNA, 25 bp, Homo sapien
ttgtcttccggtacgacctcagaga

SEQ ID NO: 38032 - DNA, 25 bp, Homo sapien
ttgtcttccggttcgacctcagaga

SEQ ID NO: 38033 - DNA, 25 bp, Homo sapien
tttgtcgtctactcgagtctgggac

SEQ ID NO: 38034 - DNA, 25 bp, Homo sapien
tttgtcgtctacacgagtctgggac

SEQ ID NO: 38035 - DNA, 25 bp, Homo sapien
aacatggtccgaaggatagatgcgt

SEQ ID NO: 38036 - DNA, 25 bp, Homo sapien
aacatggtccgatggatagatgcgt

SEQ ID NO: 38037 - DNA, 25 bp, Homo sapien
gactcctgtgtcgtgtagacatgtg

SEQ ID NO: 38038 - DNA, 25 bp, Homo sapien
gactcctgtgtcctgtagacatgtg

SEQ ID NO: 38039 - DNA, 25 bp, Homo sapien
tccagaggtgccagtgacgcggtat

SEQ ID NO: 38040 - DNA, 25 bp, Homo sapien
tccagaggtgcctgtgacgcggtat

SEQ ID NO: 38041 - DNA, 25 bp, Homo sapien
ttagtagtcagacgtgtgcgagatc

SEQ ID NO: 38042 - DNA, 25 bp, Homo sapien
ttagtagtcagaggtgtgcgagatc

SEQ ID NO: 38043 - DNA, 25 bp, Homo sapien
tcacggccttcagtggtccgagatc

SEQ ID NO: 38044 - DNA, 25 bp, Homo sapien
tcacggccttcactggtccgagatc

SEQ ID NO: 38045 - DNA, 25 bp, Homo sapien
tccatctttgtcgaacacgagagtc

SEQ ID NO: 38046 - DNA, 25 bp, Homo sapien
tccatctttgtccaacacgagagtc

SEQ ID NO: 38047 - DNA, 25 bp, Homo sapien
aaaatcgtcgttcagaacgggagta

SEQ ID NO: 38048 - DNA, 25 bp, Homo sapien
aaaatcgtcgttgagaacgggagta

SEQ ID NO: 38049 - DNA, 25 bp, Homo sapien
tgaactcacgttccaggtagctggt

SEQ ID NO: 38050 - DNA, 25 bp, Homo sapien
tgaactcacgttgcaggtagctggt

SEQ ID NO: 38051 - DNA, 25 bp, Homo sapien
tgattacagtgtcacagtctgttga

SEQ ID NO: 38052 - DNA, 25 bp, Homo sapien
tgattacagtgtgacagtctgttga

SEQ ID NO: 38053 - DNA, 25 bp, Homo sapien
ctaatttgtcgtacctattgtagta

SEQ ID NO: 38054 - DNA, 25 bp, Homo sapien
ctaatttgtcgttcctattgtagta

SEQ ID NO: 38055 - DNA, 25 bp, Homo sapien
tctaggtccaggtggacacgtcgga

SEQ ID NO: 38056 - DNA, 25 bp, Homo sapien
tctaggtccaggaggacacgtcgga

SEQ ID NO: 38057 - DNA, 25 bp, Homo sapien
ttttcagacgagtcggtgtacaagg

SEQ ID NO: 38058 - DNA, 25 bp, Homo sapien
ttttcagacgagacggtgtacaagg

SEQ ID NO: 38059 - DNA, 25 bp, Homo sapien
gtgttcgaagcaataggtctcatgg

SEQ ID NO: 38060 - DNA, 25 bp, Homo sapien
gtgttcgaagcattaggtctcatgg

SEQ ID NO: 38061 - DNA, 25 bp, Homo sapien
gaggagatgtgtgttcgtacaccgt

SEQ ID NO: 38062 - DNA, 25 bp, Homo sapien
gaggagatgtgtcttcgtacaccgt

SEQ ID NO: 38063 - DNA, 25 bp, Homo sapien
cagagagtgaattaggattcgttcc

SEQ ID NO: 38064 - DNA, 25 bp, Homo sapien
cagagagtgaataaggattcgttcc

SEQ ID NO: 38065 - DNA, 25 bp, Homo sapien
taaaggtaggattccctattctcac

SEQ ID NO: 38066 - DNA, 25 bp, Homo sapien
taaaggtaggataccctattctcac

SEQ ID NO: 38067 - DNA, 25 bp, Homo sapien
tgtcgcggtttcgactacggcggtc

SEQ ID NO: 38068 - DNA, 25 bp, Homo sapien
tgtcgcggtttccactacggcggtc

SEQ ID NO: 38069 - DNA, 25 bp, Homo sapien
aacctcccgatggtgccggggcgtc

SEQ ID NO: 38070 - DNA, 25 bp, Homo sapien
aacctcccgatgctgccggggcgtc

SEQ ID NO: 38071 - DNA, 25 bp, Homo sapien
gaaggtcgccagtccctggtgcgcc

SEQ ID NO: 38072 - DNA, 25 bp, Homo sapien
gaaggtcgccagaccctggtgcgcc

SEQ ID NO: 38073 - DNA, 25 bp, Homo sapien
gtcgacctggaggctcccggtactc

SEQ ID NO: 38074 - DNA, 25 bp, Homo sapien
gtcgacctggagcctcccggtactc

SEQ ID NO: 38075 - DNA, 25 bp, Homo sapien
tgcctttatacgaccagggccgtcg

SEQ ID NO: 38076 - DNA, 25 bp, Homo sapien
tgcctttatacgtccagggccgtcg

SEQ ID NO: 38077 - DNA, 25 bp, Homo sapien
cgccgacgggctggtttacggcgac

SEQ ID NO: 38078 - DNA, 25 bp, Homo sapien
cgccgacgggctcgtttacggcgac

SEQ ID NO: 38079 - DNA, 25 bp, Homo sapien
tgtccgcgactactggggcctgtgg

SEQ ID NO: 38080 - DNA, 25 bp, Homo sapien
tgtccgcgactagtggggcctgtgg

SEQ ID NO: 38081 - DNA, 25 bp, Homo sapien
ctgtgtttacgatcctacagacatg

SEQ ID NO: 38082 - DNA, 25 bp, Homo sapien
ctgtgtttacgaacctacagacatg

SEQ ID NO: 38083 - DNA, 25 bp, Homo sapien
gatgttgtcacacagtatataatct

SEQ ID NO: 38084 - DNA, 25 bp, Homo sapien
gatgttgtcacagagtatataatct

SEQ ID NO: 38085 - DNA, 25 bp, Homo sapien
acatgttgagaagtgtctcgttagc

SEQ ID NO: 38086 - DNA, 25 bp, Homo sapien
acatgttgagaactgtctcgttagc

SEQ ID NO: 38087 - DNA, 25 bp, Homo sapien
gatcttcgtaaaggttctctatacc

SEQ ID NO: 38088 - DNA, 25 bp, Homo sapien
gatcttcgtaaacgttctctatacc

SEQ ID NO: 38089 - DNA, 25 bp, Homo sapien
ttggtttaagaattccgtaagtctc

SEQ ID NO: 38090 - DNA, 25 bp, Homo sapien
ttggtttaagaaatccgtaagtctc

SEQ ID NO: 38091 - DNA, 25 bp, Homo sapien
ggtcgtctaaaacacgtatacatca

SEQ ID NO: 38092 - DNA, 25 bp, Homo sapien
ggtcgtctaaaagacgtatacatca

SEQ ID NO: 38093 - DNA, 25 bp, Homo sapien
gagagagagagttcaccgcttagcg

SEQ ID NO: 38094 - DNA, 25 bp, Homo sapien
gagagagagagtacaccgcttagcg

SEQ ID NO: 38095 - DNA, 25 bp, Homo sapien
agagtaagagagaatcacatctgtc

SEQ ID NO: 38096 - DNA, 25 bp, Homo sapien
agagtaagagagtatcacatctgtc

SEQ ID NO: 38097 - DNA, 25 bp, Homo sapien
tttagttcaggaatctacccgtcct

SEQ ID NO: 38098 - DNA, 25 bp, Homo sapien
tttagttcaggattctacccgtcct

SEQ ID NO: 38099 - DNA, 25 bp, Homo sapien
attgagatctgtagagaactgtctc

SEQ ID NO: 38100 - DNA, 25 bp, Homo sapien
attgagatctgttgagaactgtctc

SEQ ID NO: 38101 - DNA, 25 bp, Homo sapien
gacagaagtgtagctgaaacggtcc

SEQ ID NO: 38102 - DNA, 25 bp, Homo sapien
gacagaagtgtacctgaaacggtcc

SEQ ID NO: 38103 - DNA, 25 bp, Homo sapien
aaagtaagtcgaagagacacggtcc

SEQ ID NO: 38104 - DNA, 25 bp, Homo sapien
aaagtaagtcgatgagacacggtcc

SEQ ID NO: 38105 - DNA, 25 bp, Homo sapien
ggactgtgggacgacaccgtctcag

SEQ ID NO: 38106 - DNA, 25 bp, Homo sapien
ggactgtgggaccacaccgtctcag

SEQ ID NO: 38107 - DNA, 25 bp, Homo sapien
gacctagagggacctccactaccag

SEQ ID NO: 38108 - DNA, 25 bp, Homo sapien
gacctagagggagctccactaccag

SEQ ID NO: 38109 - DNA, 25 bp, Homo sapien
cactaatctgagacgtcagttcgac

SEQ ID NO: 38110 - DNA, 25 bp, Homo sapien
cactaatctgagtcgtcagttcgac

SEQ ID NO: 38111 - DNA, 25 bp, Homo sapien
ctacactagacctgggtcctgggtc

SEQ ID NO: 38112 - DNA, 25 bp, Homo sapien
ctacactagaccagggtcctgggtc

SEQ ID NO: 38113 - DNA, 25 bp, Homo sapien
cagaccagaacttagtccagggtac

SEQ ID NO: 38114 - DNA, 25 bp, Homo sapien
cagaccagaactaagtccagggtac

SEQ ID NO: 38115 - DNA, 25 bp, Homo sapien
tcgacgacctggagctccacacgga

SEQ ID NO: 38116 - DNA, 25 bp, Homo sapien
tcgacgacctggtgctccacacgga

SEQ ID NO: 38117 - DNA, 25 bp, Homo sapien
aacgagtagtcttctatcgacataa

SEQ ID NO: 38118 - DNA, 25 bp, Homo sapien
aacgagtagtctactatcgacataa

SEQ ID NO: 38119 - DNA, 25 bp, Homo sapien
tacatcgtcgacttaatgaccgtaa

SEQ ID NO: 38120 - DNA, 25 bp, Homo sapien
tacatcgtcgacataatgaccgtaa

SEQ ID NO: 38121 - DNA, 25 bp, Homo sapien
gtagtaagacgaaccataagacaac

SEQ ID NO: 38122 - DNA, 25 bp, Homo sapien
gtagtaagacgatccataagacaac

SEQ ID NO: 38123 - DNA, 25 bp, Homo sapien
aatgtaactaggtctacaaccgaaa

SEQ ID NO: 38124 - DNA, 25 bp, Homo sapien
aatgtaactaggactacaaccgaaa

SEQ ID NO: 38125 - DNA, 25 bp, Homo sapien
agaacgaaaactttcgacactatcg

SEQ ID NO: 38126 - DNA, 25 bp, Homo sapien
agaacgaaaactatcgacactatcg

SEQ ID NO: 38127 - DNA, 25 bp, Homo sapien
gtcgaggaatacaacggctctgtgt

SEQ ID NO: 38128 - DNA, 25 bp, Homo sapien
gtcgaggaatactacggctctgtgt

SEQ ID NO: 38129 - DNA, 25 bp, Homo sapien
tataggtttaagttctctcgatcgt

SEQ ID NO: 38130 - DNA, 25 bp, Homo sapien
tataggtttaagatctctcgatcgt

SEQ ID NO: 38131 - DNA, 25 bp, Homo sapien
agcgagtagggttgtgtctttgtcc

SEQ ID NO: 38132 - DNA, 25 bp, Homo sapien
agcgagtagggtagtgtctttgtcc

SEQ ID NO: 38133 - DNA, 25 bp, Homo sapien
gagtgaaggttctgtttcaatacac

SEQ ID NO: 38134 - DNA, 25 bp, Homo sapien
gagtgaaggttcagtttcaatacac

SEQ ID NO: 38135 - DNA, 25 bp, Homo sapien
tggtgtagggtcttttctgtctccg

SEQ ID NO: 38136 - DNA, 25 bp, Homo sapien
tggtgtagggtcatttctgtctccg

SEQ ID NO: 38137 - DNA, 25 bp, Homo sapien
tttgtcagatgtacagttgtttacc

SEQ ID NO: 38138 - DNA, 25 bp, Homo sapien
tttgtcagatgttcagttgtttacc

SEQ ID NO: 38139 - DNA, 25 bp, Homo sapien
tgtagtccctgctctgttctacggt

SEQ ID NO: 38140 - DNA, 25 bp, Homo sapien
tgtagtccctgcactgttctacggt

SEQ ID NO: 38141 - DNA, 25 bp, Homo sapien
agtgtctccaacactgtagactccg

SEQ ID NO: 38142 - DNA, 25 bp, Homo sapien
agtgtctccaactctgtagactccg

SEQ ID NO: 38143 - DNA, 25 bp, Homo sapien
taggtcactaaaatacttgttccgt

SEQ ID NO: 38144 - DNA, 25 bp, Homo sapien
taggtcactaaattacttgttccgt

SEQ ID NO: 38145 - DNA, 25 bp, Homo sapien
tgcacctagacatgtttacgttgac

SEQ ID NO: 38146 - DNA, 25 bp, Homo sapien
tgcacctagacaagtttacgttgac

SEQ ID NO: 38147 - DNA, 25 bp, Homo sapien
gtacgacactcaaaagtacctgaaa

SEQ ID NO: 38148 - DNA, 25 bp, Homo sapien
gtacgacactcataagtacctgaaa

SEQ ID NO: 38149 - DNA, 25 bp, Homo sapien
acccgagtcacgacatccagacgaa

SEQ ID NO: 38150 - DNA, 25 bp, Homo sapien
acccgagtcacgtcatccagacgaa

SEQ ID NO: 38151 - DNA, 25 bp, Homo sapien
gtacgtgtctagacgaagttcaaat

SEQ ID NO: 38152 - DNA, 25 bp, Homo sapien
gtacgtgtctagtcgaagttcaaat

SEQ ID NO: 38153 - DNA, 25 bp, Homo sapien
ctaactgagtcgttacgtcccgacc

SEQ ID NO: 38154 - DNA, 25 bp, Homo sapien
ctaactgagtcgatacgtcccgacc

SEQ ID NO: 38155 - DNA, 25 bp, Homo sapien
ggttcacgtgtccagtcggtccacc

SEQ ID NO: 38156 - DNA, 25 bp, Homo sapien
ggttcacgtgtcgagtcggtccacc

SEQ ID NO: 38157 - DNA, 25 bp, Homo sapien
tcgtcacgtggttgtcggactcaac

SEQ ID NO: 38158 - DNA, 25 bp, Homo sapien
tcgtcacgtggtagtcggactcaac

SEQ ID NO: 38159 - DNA, 25 bp, Homo sapien
cgtgtaagtgttttccggttactgt

SEQ ID NO: 38160 - DNA, 25 bp, Homo sapien
cgtgtaagtgttatccggttactgt

SEQ ID NO: 38161 - DNA, 25 bp, Homo sapien
gttttcggtgttcaccacgtttaca

SEQ ID NO: 38162 - DNA, 25 bp, Homo sapien
gttttcggtgttgaccacgtttaca

SEQ ID NO: 38163 - DNA, 25 bp, Homo sapien
ttccatgttgagaacttatacgtcg

SEQ ID NO: 38164 - DNA, 25 bp, Homo sapien
ttccatgttgagtacttatacgtcg

SEQ ID NO: 38165 - DNA, 25 bp, Homo sapien
gacatcaccgatatctctcatagtg

SEQ ID NO: 38166 - DNA, 25 bp, Homo sapien
gacatcaccgatttctctcatagtg

SEQ ID NO: 38167 - DNA, 25 bp, Homo sapien
gtgactccagtttagttctcttcaa

SEQ ID NO: 38168 - DNA, 25 bp, Homo sapien
gtgactccagttaagttctcttcaa

SEQ ID NO: 38169 - DNA, 25 bp, Homo sapien
gtcgagttcatagaacacttcataa

SEQ ID NO: 38170 - DNA, 25 bp, Homo sapien
gtcgagttcatacaacacttcataa

SEQ ID NO: 38171 - DNA, 25 bp, Homo sapien
gacgattctacagtgacttttataa

SEQ ID NO: 38172 - DNA, 25 bp, Homo sapien
gacgattctacactgacttttataa

SEQ ID NO: 38173 - DNA, 25 bp, Homo sapien
gaatgttagatccactctcctgtcc

SEQ ID NO: 38174 - DNA, 25 bp, Homo sapien
gaatgttagatcgactctcctgtcc

SEQ ID NO: 38175 - DNA, 25 bp, Homo sapien
tagatgagtctcatacggactgtgc

SEQ ID NO: 38176 - DNA, 25 bp, Homo sapien
tagatgagtctcttacggactgtgc

SEQ ID NO: 38177 - DNA, 25 bp, Homo sapien
gaggaggagatcctgaactacgtcc

SEQ ID NO: 38178 - DNA, 25 bp, Homo sapien
gaggaggagatcgtgaactacgtcc

SEQ ID NO: 38179 - DNA, 25 bp, Homo sapien
aggagaagagacaggacacggcgac

SEQ ID NO: 38180 - DNA, 25 bp, Homo sapien
aggagaagagactggacacggcgac

SEQ ID NO: 38181 - DNA, 25 bp, Homo sapien
atgacgtagctggagagacggtact

SEQ ID NO: 38182 - DNA, 25 bp, Homo sapien
atgacgtagctgcagagacggtact

SEQ ID NO: 38183 - DNA, 25 bp, Homo sapien
gaagattcttactcggagcagtact

SEQ ID NO: 38184 - DNA, 25 bp, Homo sapien
gaagattcttacacggagcagtact

SEQ ID NO: 38185 - DNA, 25 bp, Homo sapien
agtcgtcctccgaaggactgacaga

SEQ ID NO: 38186 - DNA, 25 bp, Homo sapien
agtcgtcctccgtaggactgacaga

SEQ ID NO: 38187 - DNA, 25 bp, Homo sapien
gtgtacgcccacaggtcgtgaacct

SEQ ID NO: 38188 - DNA, 25 bp, Homo sapien
gtgtacgcccactggtcgtgaacct

SEQ ID NO: 38189 - DNA, 25 bp, Homo sapien
gtctctcttgtacgtccgtcctcgt

SEQ ID NO: 38190 - DNA, 25 bp, Homo sapien
gtctctcttgtaggtccgtcctcgt

SEQ ID NO: 38191 - DNA, 25 bp, Homo sapien
cagagggtctttatagtcccctcta

SEQ ID NO: 38192 - DNA, 25 bp, Homo sapien
cagagggtctttttagtcccctcta

SEQ ID NO: 38193 - DNA, 25 bp, Homo sapien
ttagatgaacgtttttggactttcc

SEQ ID NO: 38194 - DNA, 25 bp, Homo sapien
ttagatgaacgtatttggactttcc

SEQ ID NO: 38195 - DNA, 25 bp, Homo sapien
ccaaagtgtgtttcgtcgatttctt

SEQ ID NO: 38196 - DNA, 25 bp, Homo sapien
ccaaagtgtgttacgtcgatttctt

SEQ ID NO: 38197 - DNA, 25 bp, Homo sapien
ctcttatggtctgtttgtaagtact

SEQ ID NO: 38198 - DNA, 25 bp, Homo sapien
ctcttatggtctctttgtaagtact

SEQ ID NO: 38199 - DNA, 25 bp, Homo sapien
acctggtatccatgtttgtatcacc

SEQ ID NO: 38200 - DNA, 25 bp, Homo sapien
acctggtatccaagtttgtatcacc

SEQ ID NO: 38201 - DNA, 25 bp, Homo sapien
ccgagccctcatcgtaggagtcctc

SEQ ID NO: 38202 - DNA, 25 bp, Homo sapien
ccgagccctcatggtaggagtcctc

SEQ ID NO: 38203 - DNA, 25 bp, Homo sapien
gggttcccacctggtgtgtccctct

SEQ ID NO: 38204 - DNA, 25 bp, Homo sapien
gggttcccacctcgtgtgtccctct

SEQ ID NO: 38205 - DNA, 25 bp, Homo sapien
tttcacctccgttcggagtcctgtc

SEQ ID NO: 38206 - DNA, 25 bp, Homo sapien
tttcacctccgtacggagtcctgtc

SEQ ID NO: 38207 - DNA, 25 bp, Homo sapien
tgtatgacatatgtgtctattcttc

SEQ ID NO: 38208 - DNA, 25 bp, Homo sapien
tgtatgacatatctgtctattcttc

SEQ ID NO: 38209 - DNA, 25 bp, Homo sapien
gttaagacctttgacatgtactatc

SEQ ID NO: 38210 - DNA, 25 bp, Homo sapien
gttaagacctttcacatgtactatc

SEQ ID NO: 38211 - DNA, 25 bp, Homo sapien
taaagtgtgtctacttagagtcatc

SEQ ID NO: 38212 - DNA, 25 bp, Homo sapien
taaagtgtgtcttcttagagtcatc

SEQ ID NO: 38213 - DNA, 25 bp, Homo sapien
aaagtgtgtctacttagagtcatct

SEQ ID NO: 38214 - DNA, 25 bp, Homo sapien
aaagtgtgtctagttagagtcatct

SEQ ID NO: 38215 - DNA, 25 bp, Homo sapien
aagagtatcgctcgtatgagacaga

SEQ ID NO: 38216 - DNA, 25 bp, Homo sapien
aagagtatcgctggtatgagacaga

SEQ ID NO: 38217 - DNA, 25 bp, Homo sapien
tggggtgatacacgaattctcagta

SEQ ID NO: 38218 - DNA, 25 bp, Homo sapien
tggggtgatacaggaattctcagta

SEQ ID NO: 38219 - DNA, 25 bp, Homo sapien
gggtcgtagttggttaatcttcttc

SEQ ID NO: 38220 - DNA, 25 bp, Homo sapien
gggtcgtagttgcttaatcttcttc

SEQ ID NO: 38221 - DNA, 25 bp, Homo sapien
atgccgtgttgttactagattcaga

SEQ ID NO: 38222 - DNA, 25 bp, Homo sapien
atgccgtgttgtaactagattcaga

SEQ ID NO: 38223 - DNA, 25 bp, Homo sapien
atgtcatgtctagctaaggtcacca

SEQ ID NO: 38224 - DNA, 25 bp, Homo sapien
atgtcatgtctacctaaggtcacca

SEQ ID NO: 38225 - DNA, 25 bp, Homo sapien
tgactatcgccgacgagagtctcca

SEQ ID NO: 38226 - DNA, 25 bp, Homo sapien
tgactatcgccgtcgagagtctcca

SEQ ID NO: 38227 - DNA, 25 bp, Homo sapien
tagttgtcgttctactcgatccgaa

SEQ ID NO: 38228 - DNA, 25 bp, Homo sapien
tagttgtcgttcaactcgatccgaa

SEQ ID NO: 38229 - DNA, 25 bp, Homo sapien
gacatgtttttgtaccacactctcg

SEQ ID NO: 38230 - DNA, 25 bp, Homo sapien
gacatgtttttgaaccacactctcg

SEQ ID NO: 38231 - DNA, 25 bp, Homo sapien
agtctcttagacgagccacgacctc

SEQ ID NO: 38232 - DNA, 25 bp, Homo sapien
agtctcttagaccagccacgacctc

SEQ ID NO: 38233 - DNA, 25 bp, Homo sapien
ccacgggtctagatttcccgtccta

SEQ ID NO: 38234 - DNA, 25 bp, Homo sapien
ccacgggtctagttttcccgtccta

SEQ ID NO: 38235 - DNA, 25 bp, Homo sapien
ccggtctacgtgtcttccacttgtt

SEQ ID NO: 38236 - DNA, 25 bp, Homo sapien
ccggtctacgtgacttccacttgtt

SEQ ID NO: 38237 - DNA, 25 bp, Homo sapien
aggggaccgaccttcctcggtcgta

SEQ ID NO: 38238 - DNA, 25 bp, Homo sapien
aggggaccgaccatcctcggtcgta

SEQ ID NO: 38239 - DNA, 25 bp, Homo sapien
aagcagcatcgacatcataagtaga

SEQ ID NO: 38240 - DNA, 25 bp, Homo sapien
aagcagcatcgagatcataagtaga

SEQ ID NO: 38241 - DNA, 25 bp, Homo sapien
actgcgttttaggagaacgagtctt

SEQ ID NO: 38242 - DNA, 25 bp, Homo sapien
actgcgttttagcagaacgagtctt

SEQ ID NO: 38243 - DNA, 25 bp, Homo sapien
ggtggctccggacgacgaagatcct

SEQ ID NO: 38244 - DNA, 25 bp, Homo sapien
ggtggctccggaggacgaagatcct

SEQ ID NO: 38245 - DNA, 25 bp, Homo sapien
ggtccacgagagacgtcgagacctt

SEQ ID NO: 38246 - DNA, 25 bp, Homo sapien
ggtccacgagagtcgtcgagacctt

SEQ ID NO: 38247 - DNA, 25 bp, Homo sapien
gaagtcacagagtatccactagagg

SEQ ID NO: 38248 - DNA, 25 bp, Homo sapien
gaagtcacagagaatccactagagg

SEQ ID NO: 38249 - DNA, 25 bp, Homo sapien
tcgtgtcccgcaactactacagggg

SEQ ID NO: 38250 - DNA, 25 bp, Homo sapien
tcgtgtcccgcatctactacagggg

SEQ ID NO: 38251 - DNA, 25 bp, Homo sapien
gtcggttcactttacacagtcgagg

SEQ ID NO: 38252 - DNA, 25 bp, Homo sapien
gtcggttcacttaacacagtcgagg

SEQ ID NO: 38253 - DNA, 25 bp, Homo sapien
tttagtgggtcgttgtccagtccag

SEQ ID NO: 38254 - DNA, 25 bp, Homo sapien
tttagtgggtcgatgtccagtccag

SEQ ID NO: 38255 - DNA, 25 bp, Homo sapien
gttgtcctgacgtttctcctaccga

SEQ ID NO: 38256 - DNA, 25 bp, Homo sapien
gttgtcctgacgattctcctaccga

SEQ ID NO: 38257 - DNA, 25 bp, Homo sapien
gggccgagacgacagacactacctc

SEQ ID NO: 38258 - DNA, 25 bp, Homo sapien
gggccgagacgagagacactacctc

SEQ ID NO: 38259 - DNA, 25 bp, Homo sapien
tgtgtcccggaagacgatctacagc

SEQ ID NO: 38260 - DNA, 25 bp, Homo sapien
tgtgtcccggaacacgatctacagc

SEQ ID NO: 38261 - DNA, 25 bp, Homo sapien
agaacttgagacaagcttacaggtt

SEQ ID NO: 38262 - DNA, 25 bp, Homo sapien
agaacttgagactagcttacaggtt

SEQ ID NO: 38263 - DNA, 25 bp, Homo sapien
gagaagtggcgatgtagggtccaac

SEQ ID NO: 38264 - DNA, 25 bp, Homo sapien
gagaagtggcgaagtagggtccaac

SEQ ID NO: 38265 - DNA, 25 bp, Homo sapien
gaatatacaaatgagcgaacaactc

SEQ ID NO: 38266 - DNA, 25 bp, Homo sapien
gaatatacaaatcagcgaacaactc

SEQ ID NO: 38267 - DNA, 25 bp, Homo sapien
gatagacaaagatctccgaacaaca

SEQ ID NO: 38268 - DNA, 25 bp, Homo sapien
gatagacaaagaactccgaacaaca

SEQ ID NO: 38269 - DNA, 25 bp, Homo sapien
atcgtagaatagttaaaccaccgtc

SEQ ID NO: 38270 - DNA, 25 bp, Homo sapien
atcgtagaatagataaaccaccgtc

SEQ ID NO: 38271 - DNA, 25 bp, Homo sapien
ggtagtgtaaaggatattccggtcc

SEQ ID NO: 38272 - DNA, 25 bp, Homo sapien
ggtagtgtaaagcatattccggtcc

SEQ ID NO: 38273 - DNA, 25 bp, Homo sapien
aagattcatctgatactccgtgata

SEQ ID NO: 38274 - DNA, 25 bp, Homo sapien
aagattcatctgttactccgtgata

SEQ ID NO: 38275 - DNA, 25 bp, Homo sapien
cgaacccagtaccttaatgttatgt

SEQ ID NO: 38276 - DNA, 25 bp, Homo sapien
cgaacccagtacgttaatgttatgt

SEQ ID NO: 38277 - DNA, 25 bp, Homo sapien
tcggcgacccagtctaactctgttt

SEQ ID NO: 38278 - DNA, 25 bp, Homo sapien
tcggcgacccagactaactctgttt

SEQ ID NO: 38279 - DNA, 25 bp, Homo sapien
aaaagaaccttgaacaactcctgag

SEQ ID NO: 38280 - DNA, 25 bp, Homo sapien
aaaagaaccttgtacaactcctgag

SEQ ID NO: 38281 - DNA, 25 bp, Homo sapien
gaagaagtcataagaaacctatcag

SEQ ID NO: 38282 - DNA, 25 bp, Homo sapien
gaagaagtcatatgaaacctatcag

SEQ ID NO: 38283 - DNA, 25 bp, Homo sapien
agactactgtacgaactataaccgc

SEQ ID NO: 38284 - DNA, 25 bp, Homo sapien
agactactgtaccaactataaccgc

SEQ ID NO: 38285 - DNA, 25 bp, Homo sapien
gaggtgacagcactgcaacccgtct

SEQ ID NO: 38286 - DNA, 25 bp, Homo sapien
gaggtgacagcagtgcaacccgtct

SEQ ID NO: 38287 - DNA, 25 bp, Homo sapien
aggatagtacccatctctaacccga

SEQ ID NO: 38288 - DNA, 25 bp, Homo sapien
aggatagtacccttctctaacccga

SEQ ID NO: 38289 - DNA, 25 bp, Homo sapien
gatgtccttcgtcaagacgtcaagt

SEQ ID NO: 38290 - DNA, 25 bp, Homo sapien
gatgtccttcgtgaagacgtcaagt

SEQ ID NO: 38291 - DNA, 25 bp, Homo sapien
aggagagccctgtagtgagtctgac

SEQ ID NO: 38292 - DNA, 25 bp, Homo sapien
aggagagccctgaagtgagtctgac

SEQ ID NO: 38293 - DNA, 25 bp, Homo sapien
cagcataaaacgacggtaccgttcc

SEQ ID NO: 38294 - DNA, 25 bp, Homo sapien
cagcataaaacgtcggtaccgttcc

SEQ ID NO: 38295 - DNA, 25 bp, Homo sapien
gaccgagaattctactcgtgtgttt

SEQ ID NO: 38296 - DNA, 25 bp, Homo sapien
gaccgagaattcaactcgtgtgttt

SEQ ID NO: 38297 - DNA, 25 bp, Homo sapien
ccggcaagaagaactacacggacca

SEQ ID NO: 38298 - DNA, 25 bp, Homo sapien
ccggcaagaagatctacacggacca

SEQ ID NO: 38299 - DNA, 25 bp, Homo sapien
cagcacgagtggtgtagacgtttca

SEQ ID NO: 38300 - DNA, 25 bp, Homo sapien
cagcacgagtggagtagacgtttca

SEQ ID NO: 38301 - DNA, 25 bp, Homo sapien
cagatacaccgaaggggtactcgac

SEQ ID NO: 38302 - DNA, 25 bp, Homo sapien
cagatacaccgatggggtactcgac

SEQ ID NO: 38303 - DNA, 25 bp, Homo sapien
ccacggtcagttgagaggtttgact

SEQ ID NO: 38304 - DNA, 25 bp, Homo sapien
ccacggtcagttcagaggtttgact

SEQ ID NO: 38305 - DNA, 25 bp, Homo sapien
ctgagtaccccacgtaagtaagact

SEQ ID NO: 38306 - DNA, 25 bp, Homo sapien
ctgagtaccccaggtaagtaagact

SEQ ID NO: 38307 - DNA, 25 bp, Homo sapien
tggtactctctcgtgttacgtgcat

SEQ ID NO: 38308 - DNA, 25 bp, Homo sapien
tggtactctctcctgttacgtgcat

SEQ ID NO: 38309 - DNA, 25 bp, Homo sapien
gtgtcgaactcgtgtgacaggtacg

SEQ ID NO: 38310 - DNA, 25 bp, Homo sapien
gtgtcgaactcgagtgacaggtacg

SEQ ID NO: 38311 - DNA, 25 bp, Homo sapien
cggaagtccccgtgcgacagacgac

SEQ ID NO: 38312 - DNA, 25 bp, Homo sapien
cggaagtccccgagcgacagacgac

SEQ ID NO: 38313 - DNA, 25 bp, Homo sapien
ctcgggaaagactgaggacactacc

SEQ ID NO: 38314 - DNA, 25 bp, Homo sapien
ctcgggaaagacagaggacactacc

SEQ ID NO: 38315 - DNA, 25 bp, Homo sapien
agtgggtcaactcctcggctgacgg

SEQ ID NO: 38316 - DNA, 25 bp, Homo sapien
agtgggtcaactgctcggctgacgg

SEQ ID NO: 38317 - DNA, 25 bp, Homo sapien
cgtcggagtcacagtgggttccacc

SEQ ID NO: 38318 - DNA, 25 bp, Homo sapien
cgtcggagtcactgtgggttccacc

SEQ ID NO: 38319 - DNA, 25 bp, Homo sapien
gtcgggattcgtgtcactgtccacc

SEQ ID NO: 38320 - DNA, 25 bp, Homo sapien
gtcgggattcgtctcactgtccacc

SEQ ID NO: 38321 - DNA, 25 bp, Homo sapien
tgacggtgtttactactcagtcccc

SEQ ID NO: 38322 - DNA, 25 bp, Homo sapien
tgacggtgtttagtactcagtcccc

SEQ ID NO: 38323 - DNA, 25 bp, Homo sapien
cagtctcccttctcagtaccgttag

SEQ ID NO: 38324 - DNA, 25 bp, Homo sapien
cagtctcccttcacagtaccgttag

SEQ ID NO: 38325 - DNA, 25 bp, Homo sapien
agactcccttcgacgccgtgaacgt

SEQ ID NO: 38326 - DNA, 25 bp, Homo sapien
agactcccttcgtcgccgtgaacgt

SEQ ID NO: 38327 - DNA, 25 bp, Homo sapien
atacctctgttggtgactaccccgt

SEQ ID NO: 38328 - DNA, 25 bp, Homo sapien
atacctctgttgctgactaccccgt

SEQ ID NO: 38329 - DNA, 25 bp, Homo sapien
ttcagtagtgtcgtccagacgcctc

SEQ ID NO: 38330 - DNA, 25 bp, Homo sapien
ttcagtagtgtcctccagacgcctc

SEQ ID NO: 38331 - DNA, 25 bp, Homo sapien
ggttcccgtaatggtgtaaccctca

SEQ ID NO: 38332 - DNA, 25 bp, Homo sapien
ggttcccgtaatcgtgtaaccctca

SEQ ID NO: 38333 - DNA, 25 bp, Homo sapien
gagttcccggatactgtacaccaaa

SEQ ID NO: 38334 - DNA, 25 bp, Homo sapien
gagttcccggattctgtacaccaaa

SEQ ID NO: 38335 - DNA, 25 bp, Homo sapien
agagtttcctacagtttgtaaaaaa

SEQ ID NO: 38336 - DNA, 25 bp, Homo sapien
agagtttcctactgtttgtaaaaaa

SEQ ID NO: 38337 - DNA, 25 bp, Homo sapien
ggctctctggggtgacacatggact

SEQ ID NO: 38338 - DNA, 25 bp, Homo sapien
ggctctctggggagacacatggact

SEQ ID NO: 38339 - DNA, 25 bp, Homo sapien
tttccgacgtggaaacgacctgaga

SEQ ID NO: 38340 - DNA, 25 bp, Homo sapien
tttccgacgtggtaacgacctgaga

SEQ ID NO: 38341 - DNA, 25 bp, Homo sapien
ttctccggaggcttactccgcggac

SEQ ID NO: 38342 - DNA, 25 bp, Homo sapien
ttctccggaggcatactccgcggac

SEQ ID NO: 38343 - DNA, 25 bp, Homo sapien
tttctctgaaagtatgtaccgtcac

SEQ ID NO: 38344 - DNA, 25 bp, Homo sapien
tttctctgaaagaatgtaccgtcac

SEQ ID NO: 38345 - DNA, 25 bp, Homo sapien
actaagtcaagcaatatttcgtgat

SEQ ID NO: 38346 - DNA, 25 bp, Homo sapien
actaagtcaagctatatttcgtgat

SEQ ID NO: 38347 - DNA, 25 bp, Homo sapien
agtctacagtcgttaactgtcttgg

SEQ ID NO: 38348 - DNA, 25 bp, Homo sapien
agtctacagtcgataactgtcttgg

SEQ ID NO: 38349 - DNA, 25 bp, Homo sapien
tgacggctaatgtagactggtcaga

SEQ ID NO: 38350 - DNA, 25 bp, Homo sapien
tgacggctaatgaagactggtcaga

SEQ ID NO: 38351 - DNA, 25 bp, Homo sapien
cgtcgtcctactgttttgtccagac

SEQ ID NO: 38352 - DNA, 25 bp, Homo sapien
cgtcgtcctactcttttgtccagac

SEQ ID NO: 38353 - DNA, 25 bp, Homo sapien
ggtaccgactcgtatgggtgacaat

SEQ ID NO: 38354 - DNA, 25 bp, Homo sapien
ggtaccgactcgaatgggtgacaat

SEQ ID NO: 38355 - DNA, 25 bp, Homo sapien
tttggagcgagtgaaagcggccctc

SEQ ID NO: 38356 - DNA, 25 bp, Homo sapien
tttggagcgagtcaaagcggccctc

SEQ ID NO: 38357 - DNA, 25 bp, Homo sapien
ttcttttggtcgacgggacccactt

SEQ ID NO: 38358 - DNA, 25 bp, Homo sapien
ttcttttggtcgtcgggacccactt

SEQ ID NO: 38359 - DNA, 25 bp, Homo sapien
tatgtctttgtaaggtatccactat

SEQ ID NO: 38360 - DNA, 25 bp, Homo sapien
tatgtctttgtatggtatccactat

SEQ ID NO: 38361 - DNA, 25 bp, Homo sapien
actagatttacgtcggatccatagt

SEQ ID NO: 38362 - DNA, 25 bp, Homo sapien
actagatttacgacggatccatagt

SEQ ID NO: 38363 - DNA, 25 bp, Homo sapien
acaacgttaaacttcagaaggtcaa

SEQ ID NO: 38364 - DNA, 25 bp, Homo sapien
acaacgttaaacatcagaaggtcaa

SEQ ID NO: 38365 - DNA, 25 bp, Homo sapien
aaataaagacctataagtgtctgtc

SEQ ID NO: 38366 - DNA, 25 bp, Homo sapien
aaataaagacctttaagtgtctgtc

SEQ ID NO: 38367 - DNA, 25 bp, Homo sapien
aaggtcaaactatagatgttcttct

SEQ ID NO: 38368 - DNA, 25 bp, Homo sapien
aaggtcaaactaaagatgttcttct

SEQ ID NO: 38369 - DNA, 25 bp, Homo sapien
atattcagactctacgggtaatttt

SEQ ID NO: 38370 - DNA, 25 bp, Homo sapien
atattcagactcaacgggtaatttt

SEQ ID NO: 38371 - DNA, 25 bp, Homo sapien
ctgtatctcaaaagtcgttgttatt

SEQ ID NO: 38372 - DNA, 25 bp, Homo sapien
ctgtatctcaaatgtcgttgttatt

SEQ ID NO: 38373 - DNA, 25 bp, Homo sapien
actcccgacgtctccagagtttttt

SEQ ID NO: 38374 - DNA, 25 bp, Homo sapien
actcccgacgtcaccagagtttttt

SEQ ID NO: 38375 - DNA, 25 bp, Homo sapien
agcactgatgtgttcgtcatttttc

SEQ ID NO: 38376 - DNA, 25 bp, Homo sapien
agcactgatgtgatcgtcatttttc

SEQ ID NO: 38377 - DNA, 25 bp, Homo sapien
tttaattcacgtttcattccgtagg

SEQ ID NO: 38378 - DNA, 25 bp, Homo sapien
tttaattcacgtatcattccgtagg

SEQ ID NO: 38379 - DNA, 25 bp, Homo sapien
aggagttatttgttatcctatttcc

SEQ ID NO: 38380 - DNA, 25 bp, Homo sapien
aggagttatttgatatcctatttcc

SEQ ID NO: 38381 - DNA, 25 bp, Homo sapien
tcgtcgactcacaagatctgtttgg

SEQ ID NO: 38382 - DNA, 25 bp, Homo sapien
tcgtcgactcactagatctgtttgg

SEQ ID NO: 38383 - DNA, 25 bp, Homo sapien
tttcagagtcaggattacttcgggt

SEQ ID NO: 38384 - DNA, 25 bp, Homo sapien
tttcagagtcagcattacttcgggt

SEQ ID NO: 38385 - DNA, 25 bp, Homo sapien
tcgtagtcctccaatcggtccgcgt

SEQ ID NO: 38386 - DNA, 25 bp, Homo sapien
tcgtagtcctcctatcggtccgcgt

SEQ ID NO: 38387 - DNA, 25 bp, Homo sapien
cctctaggtccctagtccgtcctat

SEQ ID NO: 38388 - DNA, 25 bp, Homo sapien
cctctaggtcccaagtccgtcctat

SEQ ID NO: 38389 - DNA, 25 bp, Homo sapien
ggtatcgccccgatatgtctctcat

SEQ ID NO: 38390 - DNA, 25 bp, Homo sapien
ggtatcgccccgttatgtctctcat

SEQ ID NO: 38391 - DNA, 25 bp, Homo sapien
ctactcgacgtccaaaggacttcga

SEQ ID NO: 38392 - DNA, 25 bp, Homo sapien
ctactcgacgtcgaaaggacttcga

SEQ ID NO: 38393 - DNA, 25 bp, Homo sapien
ataagactcatcaaaaggacttctg

SEQ ID NO: 38394 - DNA, 25 bp, Homo sapien
ataagactcatctaaaggacttctg

SEQ ID NO: 38395 - DNA, 25 bp, Homo sapien
tcgtcgaccttctaagaagtccctc

SEQ ID NO: 38396 - DNA, 25 bp, Homo sapien
tcgtcgaccttcaaagaagtccctc

SEQ ID NO: 38397 - DNA, 25 bp, Homo sapien
gagtccttcggtagactcgtgtccc

SEQ ID NO: 38398 - DNA, 25 bp, Homo sapien
gagtccttcggttgactcgtgtccc

SEQ ID NO: 38399 - DNA, 25 bp, Homo sapien
agggcgactccattacaccggtgcc

SEQ ID NO: 38400 - DNA, 25 bp, Homo sapien
agggcgactccaatacaccggtgcc

SEQ ID NO: 38401 - DNA, 25 bp, Homo sapien
gtttcgtatcttctcctccggtctc

SEQ ID NO: 38402 - DNA, 25 bp, Homo sapien
gtttcgtatcttgtcctccggtctc

SEQ ID NO: 38403 - DNA, 25 bp, Homo sapien
ggtcaggttcatcatccactgtgcc

SEQ ID NO: 38404 - DNA, 25 bp, Homo sapien
ggtcaggttcatgatccactgtgcc

SEQ ID NO: 38405 - DNA, 25 bp, Homo sapien
ctactgttcctttccggtgacgttc

SEQ ID NO: 38406 - DNA, 25 bp, Homo sapien
ctactgttccttaccggtgacgttc

SEQ ID NO: 38407 - DNA, 25 bp, Homo sapien
caatgttcctgtatgtgtgatgtct

SEQ ID NO: 38408 - DNA, 25 bp, Homo sapien
caatgttcctgtttgtgtgatgtct

SEQ ID NO: 38409 - DNA, 25 bp, Homo sapien
gcaatgtccccgaaaggaggtacac

SEQ ID NO: 38410 - DNA, 25 bp, Homo sapien
gcaatgtccccgtaaggaggtacac

SEQ ID NO: 38411 - DNA, 25 bp, Homo sapien
tctcgtcctccagtggaactttgtg

SEQ ID NO: 38412 - DNA, 25 bp, Homo sapien
tctcgtcctccactggaactttgtg

SEQ ID NO: 38413 - DNA, 25 bp, Homo sapien
atctctctcgaactccaagttcagg

SEQ ID NO: 38414 - DNA, 25 bp, Homo sapien
atctctctcgaagtccaagttcagg

SEQ ID NO: 38415 - DNA, 25 bp, Homo sapien
gttcactgagtctgcaaagttcatc

SEQ ID NO: 38416 - DNA, 25 bp, Homo sapien
gttcactgagtcagcaaagttcatc

SEQ ID NO: 38417 - DNA, 25 bp, Homo sapien
agatgtcggacaatccctatccacc

SEQ ID NO: 38418 - DNA, 25 bp, Homo sapien
agatgtcggacattccctatccacc

SEQ ID NO: 38419 - DNA, 25 bp, Homo sapien
aaaaggaggagattgtgtcccgacc

SEQ ID NO: 38420 - DNA, 25 bp, Homo sapien
aaaaggaggagaatgtgtcccgacc

SEQ ID NO: 38421 - DNA, 25 bp, Homo sapien
agacggggtcaggtgtcacccacgc

SEQ ID NO: 38422 - DNA, 25 bp, Homo sapien
agacggggtcagctgtcacccacgc

SEQ ID NO: 38423 - DNA, 25 bp, Homo sapien
ataccttggtcctagtgctcctcct

SEQ ID NO: 38424 - DNA, 25 bp, Homo sapien
ataccttggtccaagtgctcctcct

SEQ ID NO: 38425 - DNA, 25 bp, Homo sapien
agaaatggtactagattcacataac

SEQ ID NO: 38426 - DNA, 25 bp, Homo sapien
agaaatggtacttgattcacataac

SEQ ID NO: 38427 - DNA, 25 bp, Homo sapien
cacaaagggttttgtctgaactatt

SEQ ID NO: 38428 - DNA, 25 bp, Homo sapien
cacaaagggtttagtctgaactatt

SEQ ID NO: 38429 - DNA, 25 bp, Homo sapien
tacggattggtctcactctggatta

SEQ ID NO: 38430 - DNA, 25 bp, Homo sapien
tacggattggtcacactctggatta

SEQ ID NO: 38431 - DNA, 25 bp, Homo sapien
agggtagtggtgtaacgtcccagaa

SEQ ID NO: 38432 - DNA, 25 bp, Homo sapien
agggtagtggtgaaacgtcccagaa

SEQ ID NO: 38433 - DNA, 25 bp, Homo sapien
attttagttgtacagacaaagacac

SEQ ID NO: 38434 - DNA, 25 bp, Homo sapien
attttagttgtagagacaaagacac

SEQ ID NO: 38435 - DNA, 25 bp, Homo sapien
gtcgactagtcaatacaaacgaaca

SEQ ID NO: 38436 - DNA, 25 bp, Homo sapien
gtcgactagtcattacaaacgaaca

SEQ ID NO: 38437 - DNA, 25 bp, Homo sapien
gactatccgaacaagagactactag

SEQ ID NO: 38438 - DNA, 25 bp, Homo sapien
gactatccgaactagagactactag

SEQ ID NO: 38439 - DNA, 25 bp, Homo sapien
tcctaatagaagagtacggtcgtac

SEQ ID NO: 38440 - DNA, 25 bp, Homo sapien
tcctaatagaagtgtacggtcgtac

SEQ ID NO: 38441 - DNA, 25 bp, Homo sapien
gtcttcgtcccgagtcagcagtcga

SEQ ID NO: 38442 - DNA, 25 bp, Homo sapien
gtcttcgtcccgtgtcagcagtcga

SEQ ID NO: 38443 - DNA, 25 bp, Homo sapien
ttaccgaactgtcataagagccgtc

SEQ ID NO: 38444 - DNA, 25 bp, Homo sapien
ttaccgaactgtgataagagccgtc

SEQ ID NO: 38445 - DNA, 25 bp, Homo sapien
tcaccgaaaggaaagagctcgtcgt

SEQ ID NO: 38446 - DNA, 25 bp, Homo sapien
tcaccgaaaggatagagctcgtcgt

SEQ ID NO: 38447 - DNA, 25 bp, Homo sapien
cgttcgcgaaagaattcgcgccggt

SEQ ID NO: 38448 - DNA, 25 bp, Homo sapien
cgttcgcgaaagtattcgcgccggt

SEQ ID NO: 38449 - DNA, 25 bp, Homo sapien
aagcttggatcacttaagacccgag

SEQ ID NO: 38450 - DNA, 25 bp, Homo sapien
aagcttggatcagttaagacccgag

SEQ ID NO: 38451 - DNA, 25 bp, Homo sapien
cattagacggagcttcgagagccag

SEQ ID NO: 38452 - DNA, 25 bp, Homo sapien
cattagacggaggttcgagagccag

SEQ ID NO: 38453 - DNA, 25 bp, Homo sapien
tctagtagggtagactcttagacag

SEQ ID NO: 38454 - DNA, 25 bp, Homo sapien
tctagtagggtacactcttagacag

SEQ ID NO: 38455 - DNA, 25 bp, Homo sapien
acctctagggttcctcgaagtactt

SEQ ID NO: 38456 - DNA, 25 bp, Homo sapien
acctctagggttgctcgaagtactt

SEQ ID NO: 38457 - DNA, 25 bp, Homo sapien
tgcccgagagggtgaacagacctag

SEQ ID NO: 38458 - DNA, 25 bp, Homo sapien
tgcccgagagggagaacagacctag

SEQ ID NO: 38459 - DNA, 25 bp, Homo sapien
cttgtactggtctagacagacggtt

SEQ ID NO: 38460 - DNA, 25 bp, Homo sapien
cttgtactggtcaagacagacggtt

SEQ ID NO: 38461 - DNA, 25 bp, Homo sapien
tcacacttcgggtgcatcaggacgg

SEQ ID NO: 38462 - DNA, 25 bp, Homo sapien
tcacacttcgggagcatcaggacgg

SEQ ID NO: 38463 - DNA, 25 bp, Homo sapien
tttttagcacgaaggataagcctgt

SEQ ID NO: 38464 - DNA, 25 bp, Homo sapien
tttttagcacgatggataagcctgt

SEQ ID NO: 38465 - DNA, 25 bp, Homo sapien
cagtttaccatagaggttagttctt

SEQ ID NO: 38466 - DNA, 25 bp, Homo sapien
cagtttaccatacaggttagttctt

SEQ ID NO: 38467 - DNA, 25 bp, Homo sapien
tgtgtatctcttcgacaaggttctg

SEQ ID NO: 38468 - DNA, 25 bp, Homo sapien
tgtgtatctcttggacaaggttctg

SEQ ID NO: 38469 - DNA, 25 bp, Homo sapien
ttctgatcccaagacgagatatttt

SEQ ID NO: 38470 - DNA, 25 bp, Homo sapien
ttctgatcccaacacgagatatttt

SEQ ID NO: 38471 - DNA, 25 bp, Homo sapien
gatgtttctctaataaaaatattaa

SEQ ID NO: 38472 - DNA, 25 bp, Homo sapien
gatgtttctctattaaaaatattaa

SEQ ID NO: 38473 - DNA, 25 bp, Homo sapien
gtgtaattttacaaacatgtgtctc

SEQ ID NO: 38474 - DNA, 25 bp, Homo sapien
gtgtaattttactaacatgtgtctc

SEQ ID NO: 38475 - DNA, 25 bp, Homo sapien
tttacgttgtcgacctcaatggatg

SEQ ID NO: 38476 - DNA, 25 bp, Homo sapien
tttacgttgtcgtcctcaatggatg

SEQ ID NO: 38477 - DNA, 25 bp, Homo sapien
tgatatcgtttgtcgaactgtttcg

SEQ ID NO: 38478 - DNA, 25 bp, Homo sapien
tgatatcgtttgacgaactgtttcg

SEQ ID NO: 38479 - DNA, 25 bp, Homo sapien
gtagtatctattccacgatctttgg

SEQ ID NO: 38480 - DNA, 25 bp, Homo sapien
gtagtatctattgcacgatctttgg

SEQ ID NO: 38481 - DNA, 25 bp, Homo sapien
gtgacacaatagagtaccgtttgat

SEQ ID NO: 38482 - DNA, 25 bp, Homo sapien
gtgacacaatagtgtaccgtttgat

SEQ ID NO: 38483 - DNA, 25 bp, Homo sapien
catacaaagtagctgaaggtctcga

SEQ ID NO: 38484 - DNA, 25 bp, Homo sapien
catacaaagtaggtgaaggtctcga

SEQ ID NO: 38485 - DNA, 25 bp, Homo sapien
gacccgaagtagatcggggtatgat

SEQ ID NO: 38486 - DNA, 25 bp, Homo sapien
gacccgaagtagttcggggtatgat

SEQ ID NO: 38487 - DNA, 25 bp, Homo sapien
tttacctaagggtccggtgtctcga

SEQ ID NO: 38488 - DNA, 25 bp, Homo sapien
tttacctaagggaccggtgtctcga

SEQ ID NO: 38489 - DNA, 25 bp, Homo sapien
aacttcatcgggtcggtcttgtggt

SEQ ID NO: 38490 - DNA, 25 bp, Homo sapien
aacttcatcgggacggtcttgtggt

SEQ ID NO: 38491 - DNA, 25 bp, Homo sapien
cccctgtgggtagacaggtctccgg

SEQ ID NO: 38492 - DNA, 25 bp, Homo sapien
cccctgtgggtacacaggtctccgg

SEQ ID NO: 38493 - DNA, 25 bp, Homo sapien
caaacttttgactcgggtctcccgt

SEQ ID NO: 38494 - DNA, 25 bp, Homo sapien
caaacttttgacacgggtctcccgt

SEQ ID NO: 38495 - DNA, 25 bp, Homo sapien
agaacttgaggactggagtccacta

SEQ ID NO: 38496 - DNA, 25 bp, Homo sapien
agaacttgaggagtggagtccacta

SEQ ID NO: 38497 - DNA, 25 bp, Homo sapien
aactgtcgttaaaggaggccgctct

SEQ ID NO: 38498 - DNA, 25 bp, Homo sapien
aactgtcgttaatggaggccgctct

SEQ ID NO: 38499 - DNA, 25 bp, Homo sapien
gtcccaccgtcttcgtgtgccgttt

SEQ ID NO: 38500 - DNA, 25 bp, Homo sapien
gtcccaccgtctacgtgtgccgttt

SEQ ID NO: 38501 - DNA, 25 bp, Homo sapien
gacagagtgtttcttcttacccttg

SEQ ID NO: 38502 - DNA, 25 bp, Homo sapien
gacagagtgtttgttcttacccttg

SEQ ID NO: 38503 - DNA, 25 bp, Homo sapien
atcgtggtttttttgatgtctagta

SEQ ID NO: 38504 - DNA, 25 bp, Homo sapien
atcgtggtttttatgatgtctagta

SEQ ID NO: 38505 - DNA, 25 bp, Homo sapien
tactttctttctttgatagtcagac

SEQ ID NO: 38506 - DNA, 25 bp, Homo sapien
tactttctttctatgatagtcagac

SEQ ID NO: 38507 - DNA, 25 bp, Homo sapien
attatgtgtgtacattttgcacaac

SEQ ID NO: 38508 - DNA, 25 bp, Homo sapien
attatgtgtgtagattttgcacaac

SEQ ID NO: 38509 - DNA, 25 bp, Homo sapien
gagtttcgtccgaacatcccggaac

SEQ ID NO: 38510 - DNA, 25 bp, Homo sapien
gagtttcgtccgtacatcccggaac

SEQ ID NO: 38511 - DNA, 25 bp, Homo sapien
ccgtttgtccgagactcggtccgga

SEQ ID NO: 38512 - DNA, 25 bp, Homo sapien
ccgtttgtccgacactcggtccgga

SEQ ID NO: 38513 - DNA, 25 bp, Homo sapien
ctcgttgtgaatctctatgtccata

SEQ ID NO: 38514 - DNA, 25 bp, Homo sapien
ctcgttgtgaatgtctatgtccata

SEQ ID NO: 38515 - DNA, 25 bp, Homo sapien
atctgtgtgaatttctcgtatgcaa

SEQ ID NO: 38516 - DNA, 25 bp, Homo sapien
atctgtgtgaatatctcgtatgcaa

SEQ ID NO: 38517 - DNA, 25 bp, Homo sapien
tttggtgatactacgaaggtccata

SEQ ID NO: 38518 - DNA, 25 bp, Homo sapien
tttggtgatacttcgaaggtccata

SEQ ID NO: 38519 - DNA, 25 bp, Homo sapien
acaagggcactttggggctcgtaac

SEQ ID NO: 38520 - DNA, 25 bp, Homo sapien
acaagggcacttaggggctcgtaac

SEQ ID NO: 38521 - DNA, 25 bp, Homo sapien
aggtcccttccgacggtacgtgccg

SEQ ID NO: 38522 - DNA, 25 bp, Homo sapien
aggtcccttccgtcggtacgtgccg

SEQ ID NO: 38523 - DNA, 25 bp, Homo sapien
ccgtaccttaggtggacgtgtaccg

SEQ ID NO: 38524 - DNA, 25 bp, Homo sapien
ccgtaccttaggaggacgtgtaccg

SEQ ID NO: 38525 - DNA, 25 bp, Homo sapien
ttctaatgtcttgaacacggtactg

SEQ ID NO: 38526 - DNA, 25 bp, Homo sapien
ttctaatgtcttcaacacggtactg

SEQ ID NO: 38527 - DNA, 25 bp, Homo sapien
tttttgccactacttttatgcagtg

SEQ ID NO: 38528 - DNA, 25 bp, Homo sapien
tttttgccactagttttatgcagtg

SEQ ID NO: 38529 - DNA, 25 bp, Homo sapien
ttctcccaacactttacatcggagg

SEQ ID NO: 38530 - DNA, 25 bp, Homo sapien
ttctcccaacacattacatcggagg

SEQ ID NO: 38531 - DNA, 25 bp, Homo sapien
tgagtgtaccctatatccagtgggg

SEQ ID NO: 38532 - DNA, 25 bp, Homo sapien
tgagtgtaccctttatccagtgggg

SEQ ID NO: 38533 - DNA, 25 bp, Homo sapien
ggtcagagccttctcgcggtgagcc

SEQ ID NO: 38534 - DNA, 25 bp, Homo sapien
ggtcagagccttgtcgcggtgagcc

SEQ ID NO: 38535 - DNA, 25 bp, Homo sapien
accgttcttcgtctctgttcggtgg

SEQ ID NO: 38536 - DNA, 25 bp, Homo sapien
accgttcttcgtgtctgttcggtgg

SEQ ID NO: 38537 - DNA, 25 bp, Homo sapien
taccggtgattcttatttacctagc

SEQ ID NO: 38538 - DNA, 25 bp, Homo sapien
taccggtgattcatatttacctagc

SEQ ID NO: 38539 - DNA, 25 bp, Homo sapien
atcgtgttctgaagtgtttacacaa

SEQ ID NO: 38540 - DNA, 25 bp, Homo sapien
atcgtgttctgatgtgtttacacaa

SEQ ID NO: 38541 - DNA, 25 bp, Homo sapien
gtttgtgtactcttttcttcccacg

SEQ ID NO: 38542 - DNA, 25 bp, Homo sapien
gtttgtgtactcatttcttcccacg

SEQ ID NO: 38543 - DNA, 25 bp, Homo sapien
ttagacacttgtacgatcgacactt

SEQ ID NO: 38544 - DNA, 25 bp, Homo sapien
ttagacacttgttcgatcgacactt

SEQ ID NO: 38545 - DNA, 25 bp, Homo sapien
gaggtcggtactgactcactcgtcg

SEQ ID NO: 38546 - DNA, 25 bp, Homo sapien
gaggtcggtactcactcactcgtcg

SEQ ID NO: 38547 - DNA, 25 bp, Homo sapien
taagttacggtgacccgtcgaccgg

SEQ ID NO: 38548 - DNA, 25 bp, Homo sapien
taagttacggtgtcccgtcgaccgg

SEQ ID NO: 38549 - DNA, 25 bp, Homo sapien
taccttttactcttcggtgctcccg

SEQ ID NO: 38550 - DNA, 25 bp, Homo sapien
taccttttactcatcggtgctcccg

SEQ ID NO: 38551 - DNA, 25 bp, Homo sapien
gccagtactttgtcggtgcgttcgc

SEQ ID NO: 38552 - DNA, 25 bp, Homo sapien
gccagtactttgacggtgcgttcgc

SEQ ID NO: 38553 - DNA, 25 bp, Homo sapien
ggtcccgatacatgtgccagtccca

SEQ ID NO: 38554 - DNA, 25 bp, Homo sapien
ggtcccgatacaagtgccagtccca

SEQ ID NO: 38555 - DNA, 25 bp, Homo sapien
tatcagtgtaatgacggcaatcctt

SEQ ID NO: 38556 - DNA, 25 bp, Homo sapien
tatcagtgtaatcacggcaatcctt

SEQ ID NO: 38557 - DNA, 25 bp, Homo sapien
gtcgttgatggtacccactctccta

SEQ ID NO: 38558 - DNA, 25 bp, Homo sapien
gtcgttgatggttcccactctccta

SEQ ID NO: 38559 - DNA, 25 bp, Homo sapien
cgttcatggttctgtaacacgtaaa

SEQ ID NO: 38560 - DNA, 25 bp, Homo sapien
cgttcatggttcagtaacacgtaaa

SEQ ID NO: 38561 - DNA, 25 bp, Homo sapien
tgaactcaggtcgacaacgtcctac

SEQ ID NO: 38562 - DNA, 25 bp, Homo sapien
tgaactcaggtccacaacgtcctac

SEQ ID NO: 38563 - DNA, 25 bp, Homo sapien
tcacttgtgtatacgtccgaccacg

SEQ ID NO: 38564 - DNA, 25 bp, Homo sapien
tcacttgtgtattcgtccgaccacg

SEQ ID NO: 38565 - DNA, 25 bp, Homo sapien
cccgtcatgttttctcgtcggaaga

SEQ ID NO: 38566 - DNA, 25 bp, Homo sapien
cccgtcatgtttactcgtcggaaga

SEQ ID NO: 38567 - DNA, 25 bp, Homo sapien
gaaattaactccagtgtccgtagtg

SEQ ID NO: 38568 - DNA, 25 bp, Homo sapien
gaaattaactcctgtgtccgtagtg

SEQ ID NO: 38569 - DNA, 25 bp, Homo sapien
gtgacagaacctacggtatctaggg

SEQ ID NO: 38570 - DNA, 25 bp, Homo sapien
gtgacagaaccttcggtatctaggg

SEQ ID NO: 38571 - DNA, 25 bp, Homo sapien
gtgaagagacactcggacaaccggt

SEQ ID NO: 38572 - DNA, 25 bp, Homo sapien
gtgaagagacacacggacaaccggt

SEQ ID NO: 38573 - DNA, 25 bp, Homo sapien
tcctaatgcggagaggacgaaccgg

SEQ ID NO: 38574 - DNA, 25 bp, Homo sapien
tcctaatgcggacaggacgaaccgg

SEQ ID NO: 38575 - DNA, 25 bp, Homo sapien
catccattcggagataaaacccgtc

SEQ ID NO: 38576 - DNA, 25 bp, Homo sapien
catccattcggacataaaacccgtc

SEQ ID NO: 38577 - DNA, 25 bp, Homo sapien
gccctcggggtagacgtacacgcca

SEQ ID NO: 38578 - DNA, 25 bp, Homo sapien
gccctcggggtacacgtacacgcca

SEQ ID NO: 38579 - DNA, 25 bp, Homo sapien
accgtcagttttcagaactcacagg

SEQ ID NO: 38580 - DNA, 25 bp, Homo sapien
accgtcagttttgagaactcacagg

SEQ ID NO: 38581 - DNA, 25 bp, Homo sapien
actccgatttctagacacctcggtg

SEQ ID NO: 38582 - DNA, 25 bp, Homo sapien
actccgatttcttgacacctcggtg

SEQ ID NO: 38583 - DNA, 25 bp, Homo sapien
gaaacaccggtacattctctggtgt

SEQ ID NO: 38584 - DNA, 25 bp, Homo sapien
gaaacaccggtagattctctggtgt

SEQ ID NO: 38585 - DNA, 25 bp, Homo sapien
tcgcctactggctcgcgtccagtgg

SEQ ID NO: 38586 - DNA, 25 bp, Homo sapien
tcgcctactggcacgcgtccagtgg

SEQ ID NO: 38587 - DNA, 25 bp, Homo sapien
gtctgtctgtcgtccacccggtcgg

SEQ ID NO: 38588 - DNA, 25 bp, Homo sapien
gtctgtctgtcgaccacccggtcgg

SEQ ID NO: 38589 - DNA, 25 bp, Homo sapien
gtgtgactgtctactccctcagatt

SEQ ID NO: 38590 - DNA, 25 bp, Homo sapien
gtgtgactgtcttctccctcagatt

SEQ ID NO: 38591 - DNA, 25 bp, Homo sapien
tttcaggtagttacacatcttttct

SEQ ID NO: 38592 - DNA, 25 bp, Homo sapien
tttcaggtagtttcacatcttttct

SEQ ID NO: 38593 - DNA, 25 bp, Homo sapien
gggtccagacgtttcaccggtttta

SEQ ID NO: 38594 - DNA, 25 bp, Homo sapien
gggtccagacgtatcaccggtttta

SEQ ID NO: 38595 - DNA, 25 bp, Homo sapien
ggagtaacgaatcatccaattttat

SEQ ID NO: 38596 - DNA, 25 bp, Homo sapien
ggagtaacgaatgatccaattttat

SEQ ID NO: 38597 - DNA, 25 bp, Homo sapien
cgacagagatctttactggtcgtat

SEQ ID NO: 38598 - DNA, 25 bp, Homo sapien
cgacagagatctatactggtcgtat

SEQ ID NO: 38599 - DNA, 25 bp, Homo sapien
cctgaatacgttccatatttacgcg

SEQ ID NO: 38600 - DNA, 25 bp, Homo sapien
cctgaatacgttgcatatttacgcg

SEQ ID NO: 38601 - DNA, 25 bp, Homo sapien
tttacagtggactgaagtattctgg

SEQ ID NO: 38602 - DNA, 25 bp, Homo sapien
tttacagtggacagaagtattctgg

SEQ ID NO: 38603 - DNA, 25 bp, Homo sapien
ctcatcatgtcaagtactgttttta

SEQ ID NO: 38604 - DNA, 25 bp, Homo sapien
ctcatcatgtcatgtactgttttta

SEQ ID NO: 38605 - DNA, 25 bp, Homo sapien
gagctaattccgttggtcgtaccga

SEQ ID NO: 38606 - DNA, 25 bp, Homo sapien
gagctaattccgatggtcgtaccga

SEQ ID NO: 38607 - DNA, 25 bp, Homo sapien
acgcaaggcactagttaccgaatat

SEQ ID NO: 38608 - DNA, 25 bp, Homo sapien
acgcaaggcacttgttaccgaatat

SEQ ID NO: 38609 - DNA, 25 bp, Homo sapien
tccaggaaagtcctggggtccggac

SEQ ID NO: 38610 - DNA, 25 bp, Homo sapien
tccaggaaagtcgtggggtccggac

SEQ ID NO: 38611 - DNA, 25 bp, Homo sapien
gagatcaccctgtcgggtctcggac

SEQ ID NO: 38612 - DNA, 25 bp, Homo sapien
gagatcaccctgacgggtctcggac

SEQ ID NO: 38613 - DNA, 25 bp, Homo sapien
acatcaatccgtaagaatctcgaga

SEQ ID NO: 38614 - DNA, 25 bp, Homo sapien
acatcaatccgttagaatctcgaga

SEQ ID NO: 38615 - DNA, 25 bp, Homo sapien
gggcctctccagtcggggtaacgac

SEQ ID NO: 38616 - DNA, 25 bp, Homo sapien
gggcctctccagacggggtaacgac

SEQ ID NO: 38617 - DNA, 25 bp, Homo sapien
gacctcgacacagacgggagtccct

SEQ ID NO: 38618 - DNA, 25 bp, Homo sapien
gacctcgacacacacgggagtccct

SEQ ID NO: 38619 - DNA, 25 bp, Homo sapien
tctcgtccaacatagacgtgttttt

SEQ ID NO: 38620 - DNA, 25 bp, Homo sapien
tctcgtccaacaaagacgtgttttt

SEQ ID NO: 38621 - DNA, 25 bp, Homo sapien
ttcgtcggacaaattgtctttttct

SEQ ID NO: 38622 - DNA, 25 bp, Homo sapien
ttcgtcggacaatttgtctttttct

SEQ ID NO: 38623 - DNA, 25 bp, Homo sapien
agtcagaccctatctctgaaacttg

SEQ ID NO: 38624 - DNA, 25 bp, Homo sapien
agtcagaccctaactctgaaacttg

SEQ ID NO: 38625 - DNA, 25 bp, Homo sapien
acggaactctctacgatggcgaaag

SEQ ID NO: 38626 - DNA, 25 bp, Homo sapien
acggaactctcttcgatggcgaaag

SEQ ID NO: 38627 - DNA, 25 bp, Homo sapien
taaagggtctttcacaccggagaca

SEQ ID NO: 38628 - DNA, 25 bp, Homo sapien
taaagggtctttgacaccggagaca

SEQ ID NO: 38629 - DNA, 25 bp, Homo sapien
cagtcgggtcttacacttcggtcac

SEQ ID NO: 38630 - DNA, 25 bp, Homo sapien
cagtcgggtctttcacttcggtcac

SEQ ID NO: 38631 - DNA, 25 bp, Homo sapien
gaccagaggaatttctatcaccccg

SEQ ID NO: 38632 - DNA, 25 bp, Homo sapien
gaccagaggaatatctatcaccccg

SEQ ID NO: 38633 - DNA, 25 bp, Homo sapien
gctataaatgtttctcgtagggacc

SEQ ID NO: 38634 - DNA, 25 bp, Homo sapien
gctataaatgttactcgtagggacc

SEQ ID NO: 38635 - DNA, 25 bp, Homo sapien
gtgtagaaaaggacctcggtgcgtc

SEQ ID NO: 38636 - DNA, 25 bp, Homo sapien
gtgtagaaaaggtcctcggtgcgtc

SEQ ID NO: 38637 - DNA, 25 bp, Homo sapien
catcagttgggtgtccacgaacaga

SEQ ID NO: 38638 - DNA, 25 bp, Homo sapien
catcagttgggtctccacgaacaga

SEQ ID NO: 38639 - DNA, 25 bp, Homo sapien
tagacgaagggtctcctacaccagg

SEQ ID NO: 38640 - DNA, 25 bp, Homo sapien
tagacgaagggtgtcctacaccagg

SEQ ID NO: 38641 - DNA, 25 bp, Homo sapien
aagaacgtaggtatcttccctcaaa

SEQ ID NO: 38642 - DNA, 25 bp, Homo sapien
aagaacgtaggtttcttccctcaaa

SEQ ID NO: 38643 - DNA, 25 bp, Homo sapien
gaatgataagactttgtacccacac

SEQ ID NO: 38644 - DNA, 25 bp, Homo sapien
gaatgataagacattgtacccacac

SEQ ID NO: 38645 - DNA, 25 bp, Homo sapien
gataaaaagggctacacgacgacta

SEQ ID NO: 38646 - DNA, 25 bp, Homo sapien
gataaaaagggcaacacgacgacta

SEQ ID NO: 38647 - DNA, 25 bp, Homo sapien
cgacaaaataggtaaacacacacgc

SEQ ID NO: 38648 - DNA, 25 bp, Homo sapien
cgacaaaataggaaaacacacacgc

SEQ ID NO: 38649 - DNA, 25 bp, Homo sapien
ccgaccctaaggaagaagtccccga

SEQ ID NO: 38650 - DNA, 25 bp, Homo sapien
ccgaccctaaggtagaagtccccga

SEQ ID NO: 38651 - DNA, 25 bp, Homo sapien
ccgagccagagtgattgccctgtag

SEQ ID NO: 38652 - DNA, 25 bp, Homo sapien
ccgagccagagtcattgccctgtag

SEQ ID NO: 38653 - DNA, 25 bp, Homo sapien
aacaaggccaactttagctaccttg

SEQ ID NO: 38654 - DNA, 25 bp, Homo sapien
aacaaggccaacattagctaccttg

SEQ ID NO: 38655 - DNA, 25 bp, Homo sapien
taagggatccaagatcgcgtgcttc

SEQ ID NO: 38656 - DNA, 25 bp, Homo sapien
taagggatccaacatcgcgtgcttc

SEQ ID NO: 38657 - DNA, 25 bp, Homo sapien
tctctatcctagttagtccgtgggg

SEQ ID NO: 38658 - DNA, 25 bp, Homo sapien
tctctatcctagatagtccgtgggg

SEQ ID NO: 38659 - DNA, 25 bp, Homo sapien
tttctctcatgtacgtcatcaggac

SEQ ID NO: 38660 - DNA, 25 bp, Homo sapien
tttctctcatgttcgtcatcaggac

SEQ ID NO: 38661 - DNA, 25 bp, Homo sapien
aattttcaacgttcacgttgggact

SEQ ID NO: 38662 - DNA, 25 bp, Homo sapien
aattttcaacgtacacgttgggact

SEQ ID NO: 38663 - DNA, 25 bp, Homo sapien
ataatttacctcagtgatgattcgt

SEQ ID NO: 38664 - DNA, 25 bp, Homo sapien
ataatttacctctgtgatgattcgt

SEQ ID NO: 38665 - DNA, 25 bp, Homo sapien
tacgtctctattgtgtgacagttat

SEQ ID NO: 38666 - DNA, 25 bp, Homo sapien
tacgtctctattctgtgacagttat

SEQ ID NO: 38667 - DNA, 25 bp, Homo sapien
cctcggacttggtagtgaccggagt

SEQ ID NO: 38668 - DNA, 25 bp, Homo sapien
cctcggacttggaagtgaccggagt

SEQ ID NO: 38669 - DNA, 25 bp, Homo sapien
ctggattacagaggtgcgacgatcg

SEQ ID NO: 38670 - DNA, 25 bp, Homo sapien
ctggattacagacgtgcgacgatcg

SEQ ID NO: 38671 - DNA, 25 bp, Homo sapien
ggtcgccttcacgaggtacctcatc

SEQ ID NO: 38672 - DNA, 25 bp, Homo sapien
ggtcgccttcaccaggtacctcatc

SEQ ID NO: 38673 - DNA, 25 bp, Homo sapien
ttcatcctccgtcaggccgagagtc

SEQ ID NO: 38674 - DNA, 25 bp, Homo sapien
ttcatcctccgtgaggccgagagtc

SEQ ID NO: 38675 - DNA, 25 bp, Homo sapien
aaaagtctacacgagaccggagatt

SEQ ID NO: 38676 - DNA, 25 bp, Homo sapien
aaaagtctacaccagaccggagatt

SEQ ID NO: 38677 - DNA, 25 bp, Homo sapien
tgaactccgaaccacggactcgggt

SEQ ID NO: 38678 - DNA, 25 bp, Homo sapien
tgaactccgaacgacggactcgggt

SEQ ID NO: 38679 - DNA, 25 bp, Homo sapien
gtttacacgtatcaagtcttctaga

SEQ ID NO: 38680 - DNA, 25 bp, Homo sapien
gtttacacgtatgaagtcttctaga

SEQ ID NO: 38681 - DNA, 25 bp, Homo sapien
aaactactgtgtatcgtctttagac

SEQ ID NO: 38682 - DNA, 25 bp, Homo sapien
aaactactgtgtttcgtctttagac

SEQ ID NO: 38683 - DNA, 25 bp, Homo sapien
tcaaacactccgtggcgacgtctga

SEQ ID NO: 38684 - DNA, 25 bp, Homo sapien
tcaaacactccgaggcgacgtctga

SEQ ID NO: 38685 - DNA, 25 bp, Homo sapien
atttccagacggacgggtctggtgt

SEQ ID NO: 38686 - DNA, 25 bp, Homo sapien
atttccagacggtcgggtctggtgt

SEQ ID NO: 38687 - DNA, 25 bp, Homo sapien
tgtctcgctgaatgtggcgtcttgg

SEQ ID NO: 38688 - DNA, 25 bp, Homo sapien
tgtctcgctgaaagtggcgtcttgg

SEQ ID NO: 38689 - DNA, 25 bp, Homo sapien
tcgaggcttgtggttgtcacgacgt

SEQ ID NO: 38690 - DNA, 25 bp, Homo sapien
tcgaggcttgtgcttgtcacgacgt

SEQ ID NO: 38691 - DNA, 25 bp, Homo sapien
caagacagagactgaggagttttcc

SEQ ID NO: 38692 - DNA, 25 bp, Homo sapien
caagacagagacagaggagttttcc

SEQ ID NO: 38693 - DNA, 25 bp, Homo sapien
gtaaaggagtggtccgaacttctcc

SEQ ID NO: 38694 - DNA, 25 bp, Homo sapien
gtaaaggagtggaccgaacttctcc

SEQ ID NO: 38695 - DNA, 25 bp, Homo sapien
aggcgaggtgtcgtacaggtcgacc

SEQ ID NO: 38696 - DNA, 25 bp, Homo sapien
aggcgaggtgtcctacaggtcgacc

SEQ ID NO: 38697 - DNA, 25 bp, Homo sapien
gacgctcatggtcacctacgggcgc

SEQ ID NO: 38698 - DNA, 25 bp, Homo sapien
gacgctcatggtgacctacgggcgc

SEQ ID NO: 38699 - DNA, 25 bp, Homo sapien
aatcgcgtcatgtccgtggtgcacc

SEQ ID NO: 38700 - DNA, 25 bp, Homo sapien
aatcgcgtcatgaccgtggtgcacc

SEQ ID NO: 38701 - DNA, 25 bp, Homo sapien
cgacctcggcggcttccggtactcg

SEQ ID NO: 38702 - DNA, 25 bp, Homo sapien
cgacctcggcgggttccggtactcg

SEQ ID NO: 38703 - DNA, 25 bp, Homo sapien
gccgtttatcgagcagatggctccg

SEQ ID NO: 38704 - DNA, 25 bp, Homo sapien
gccgtttatcgaccagatggctccg

SEQ ID NO: 38705 - DNA, 25 bp, Homo sapien
acgagtatcacacgccgacgggctg

SEQ ID NO: 38706 - DNA, 25 bp, Homo sapien
acgagtatcacaggccgacgggctg

SEQ ID NO: 38707 - DNA, 25 bp, Homo sapien
tataatgttgcgccgtcgtaatact

SEQ ID NO: 38708 - DNA, 25 bp, Homo sapien
tataatgttgcggcgtcgtaatact

SEQ ID NO: 38709 - DNA, 25 bp, Homo sapien
cgcctgttcttcttccaagacctgt

SEQ ID NO: 38710 - DNA, 25 bp, Homo sapien
cgcctgttcttcatccaagacctgt

SEQ ID NO: 38711 - DNA, 25 bp, Homo sapien
tgatgttgtcacacagtatataatc

SEQ ID NO: 38712 - DNA, 25 bp, Homo sapien
tgatgttgtcactcagtatataatc

SEQ ID NO: 38713 - DNA, 25 bp, Homo sapien
actatgttgaaaactcgtggtaagc

SEQ ID NO: 38714 - DNA, 25 bp, Homo sapien
actatgttgaaatctcgtggtaagc

SEQ ID NO: 38715 - DNA, 25 bp, Homo sapien
agttctatgtaaatgttctgactcc

SEQ ID NO: 38716 - DNA, 25 bp, Homo sapien
agttctatgtaattgttctgactcc

SEQ ID NO: 38717 - DNA, 25 bp, Homo sapien
ttgtgttataagaggtctcaaactc

SEQ ID NO: 38718 - DNA, 25 bp, Homo sapien
ttgtgttataagtggtctcaaactc

SEQ ID NO: 38719 - DNA, 25 bp, Homo sapien
gtcgtatatgatcgtactaattcta

SEQ ID NO: 38720 - DNA, 25 bp, Homo sapien
gtcgtatatgatggtactaattcta

SEQ ID NO: 38721 - DNA, 25 bp, Homo sapien
tgtcgaaagagtttacatttactac

SEQ ID NO: 38722 - DNA, 25 bp, Homo sapien
tgtcgaaagagtatacatttactac

SEQ ID NO: 38723 - DNA, 25 bp, Homo sapien
aggtaggagtagaagtcacctttcg

SEQ ID NO: 38724 - DNA, 25 bp, Homo sapien
aggtaggagtagtagtcacctttcg

SEQ ID NO: 38725 - DNA, 25 bp, Homo sapien
gtttagttcaggaatctacccgtcc

SEQ ID NO: 38726 - DNA, 25 bp, Homo sapien
gtttagttcaggtatctacccgtcc

SEQ ID NO: 38727 - DNA, 25 bp, Homo sapien
ctttcgagatttaggaaccgtctct

SEQ ID NO: 38728 - DNA, 25 bp, Homo sapien
ctttcgagattttggaaccgtctct

SEQ ID NO: 38729 - DNA, 25 bp, Homo sapien
agaaacgaaggtctgaaacggtgct

SEQ ID NO: 38730 - DNA, 25 bp, Homo sapien
agaaacgaaggtgtgaaacggtgct

SEQ ID NO: 38731 - DNA, 25 bp, Homo sapien
tacaaaaaggtctcgagaaggtcct

SEQ ID NO: 38732 - DNA, 25 bp, Homo sapien
tacaaaaaggtcacgagaaggtcct

SEQ ID NO: 38733 - DNA, 25 bp, Homo sapien
gggactgtgggacgacaccgtctca

SEQ ID NO: 38734 - DNA, 25 bp, Homo sapien
gggactgtgggaggacaccgtctca

SEQ ID NO: 38735 - DNA, 25 bp, Homo sapien
gacctagagggacctccactaccag

SEQ ID NO: 38736 - DNA, 25 bp, Homo sapien
gacctagagggagctccactaccag

SEQ ID NO: 38737 - DNA, 25 bp, Homo sapien
gacctaaaaagactcacgtatcacg

SEQ ID NO: 38738 - DNA, 25 bp, Homo sapien
gacctaaaaagagtcacgtatcacg

SEQ ID NO: 38739 - DNA, 25 bp, Homo sapien
ctaactagaactaggccgtcatgac

SEQ ID NO: 38740 - DNA, 25 bp, Homo sapien
ctaactagaacttggccgtcatgac

SEQ ID NO: 38741 - DNA, 25 bp, Homo sapien
ctatacaaaacttcgaccgaagcga

SEQ ID NO: 38742 - DNA, 25 bp, Homo sapien
ctatacaaaactacgaccgaagcga

SEQ ID NO: 38743 - DNA, 25 bp, Homo sapien
tgtgtacctcggaaggtccacggga

SEQ ID NO: 38744 - DNA, 25 bp, Homo sapien
tgtgtacctcggtaggtccacggga

SEQ ID NO: 38745 - DNA, 25 bp, Homo sapien
agagacgagacttctctacacaaag

SEQ ID NO: 38746 - DNA, 25 bp, Homo sapien
agagacgagactactctacacaaag

SEQ ID NO: 38747 - DNA, 25 bp, Homo sapien
gacagtgtctacaattcgaccgtaa

SEQ ID NO: 38748 - DNA, 25 bp, Homo sapien
gacagtgtctactattcgaccgtaa

SEQ ID NO: 38749 - DNA, 25 bp, Homo sapien
gtagtaggactaaccgactctgcaa

SEQ ID NO: 38750 - DNA, 25 bp, Homo sapien
gtagtaggactatccgactctgcaa

SEQ ID NO: 38751 - DNA, 25 bp, Homo sapien
taatgagagttttccgacccgataa

SEQ ID NO: 38752 - DNA, 25 bp, Homo sapien
taatgagagtttaccgacccgataa

SEQ ID NO: 38753 - DNA, 25 bp, Homo sapien
gaaggagtcaccatgacgactatcg

SEQ ID NO: 38754 - DNA, 25 bp, Homo sapien
gaaggagtcaccttgacgactatcg

SEQ ID NO: 38755 - DNA, 25 bp, Homo sapien
ttaggtagttacaacgagctcaggt

SEQ ID NO: 38756 - DNA, 25 bp, Homo sapien
ttaggtagttactacgagctcaggt

SEQ ID NO: 38757 - DNA, 25 bp, Homo sapien
tgtaagttatactaacgttcgagtc

SEQ ID NO: 38758 - DNA, 25 bp, Homo sapien
tgtaagttatacaaacgttcgagtc

SEQ ID NO: 38759 - DNA, 25 bp, Homo sapien
tgtacggagtactgttgtattgtcc

SEQ ID NO: 38760 - DNA, 25 bp, Homo sapien
tgtacggagtacagttgtattgtcc

SEQ ID NO: 38761 - DNA, 25 bp, Homo sapien
gttgccggagtctgtttcagagaac

SEQ ID NO: 38762 - DNA, 25 bp, Homo sapien
gttgccggagtcagtttcagagaac

SEQ ID NO: 38763 - DNA, 25 bp, Homo sapien
gttgttactgatattttgtactacc

SEQ ID NO: 38764 - DNA, 25 bp, Homo sapien
gttgttactgattttttgtactacc

SEQ ID NO: 38765 - DNA, 25 bp, Homo sapien
gtttgatatttaacttgtcgttacc

SEQ ID NO: 38766 - DNA, 25 bp, Homo sapien
gtttgatatttatcttgtcgttacc

SEQ ID NO: 38767 - DNA, 25 bp, Homo sapien
tgtacctctgtcttctgctctgtgt

SEQ ID NO: 38768 - DNA, 25 bp, Homo sapien
tgtacctctgtcatctgctctgtgt

SEQ ID NO: 38769 - DNA, 25 bp, Homo sapien
aagtgtctccaacactgtagactcc

SEQ ID NO: 38770 - DNA, 25 bp, Homo sapien
aagtgtctccaagactgtagactcc

SEQ ID NO: 38771 - DNA, 25 bp, Homo sapien
aggtaccaagagctactgggtcagt

SEQ ID NO: 38772 - DNA, 25 bp, Homo sapien
aggtaccaagaggtactgggtcagt

SEQ ID NO: 38773 - DNA, 25 bp, Homo sapien
ggacacagtacaagttgttctgact

SEQ ID NO: 38774 - DNA, 25 bp, Homo sapien
ggacacagtacatgttgttctgact

SEQ ID NO: 38775 - DNA, 25 bp, Homo sapien
gagtaaacaagatgtccttacacat

SEQ ID NO: 38776 - DNA, 25 bp, Homo sapien
gagtaaacaagaagtccttacacat

SEQ ID NO: 38777 - DNA, 25 bp, Homo sapien
accgaagtaacgagaacctaagaca

SEQ ID NO: 38778 - DNA, 25 bp, Homo sapien
accgaagtaacgtgaacctaagaca

SEQ ID NO: 38779 - DNA, 25 bp, Homo sapien
taatcggttacgtgacatctcaaca

SEQ ID NO: 38780 - DNA, 25 bp, Homo sapien
taatcggttacgagacatctcaaca

SEQ ID NO: 38781 - DNA, 25 bp, Homo sapien
ctccaactcggtgaacgtcctcgaa

SEQ ID NO: 38782 - DNA, 25 bp, Homo sapien
ctccaactcggtcaacgtcctcgaa

SEQ ID NO: 38783 - DNA, 25 bp, Homo sapien
gtctctacgtgagcatcgcgcccat

SEQ ID NO: 38784 - DNA, 25 bp, Homo sapien
gtctctacgtgaccatcgcgcccat

SEQ ID NO: 38785 - DNA, 25 bp, Homo sapien
tcgttacgtgttcagtggacccgtc

SEQ ID NO: 38786 - DNA, 25 bp, Homo sapien
tcgttacgtgttgagtggacccgtc

SEQ ID NO: 38787 - DNA, 25 bp, Homo sapien
acgtgtaagtgttttccggttactg

SEQ ID NO: 38788 - DNA, 25 bp, Homo sapien
acgtgtaagtgtattccggttactg

SEQ ID NO: 38789 - DNA, 25 bp, Homo sapien
gttcttcgttgtcaacccgtttcga

SEQ ID NO: 38790 - DNA, 25 bp, Homo sapien
gttcttcgttgtgaacccgtttcga

SEQ ID NO: 38791 - DNA, 25 bp, Homo sapien
tcagtcactgttcagaccttatgta

SEQ ID NO: 38792 - DNA, 25 bp, Homo sapien
tcagtcactgttgagaccttatgta

SEQ ID NO: 38793 - DNA, 25 bp, Homo sapien
ggtatcactcatatacaacatagtg

SEQ ID NO: 38794 - DNA, 25 bp, Homo sapien
ggtatcactcatttacaacatagtg

SEQ ID NO: 38795 - DNA, 25 bp, Homo sapien
tgacgtccatctatgttatctaaag

SEQ ID NO: 38796 - DNA, 25 bp, Homo sapien
tgacgtccatctttgttatctaaag

SEQ ID NO: 38797 - DNA, 25 bp, Homo sapien
cggagttcatctgatccttcattcg

SEQ ID NO: 38798 - DNA, 25 bp, Homo sapien
cggagttcatctcatccttcattcg

SEQ ID NO: 38799 - DNA, 25 bp, Homo sapien
gaatctcacacacgagttttataag

SEQ ID NO: 38800 - DNA, 25 bp, Homo sapien
gaatctcacacaggagttttataag

SEQ ID NO: 38801 - DNA, 25 bp, Homo sapien
gaatcttgacaccgatcttctattt

SEQ ID NO: 38802 - DNA, 25 bp, Homo sapien
gaatcttgacacggatcttctattt

SEQ ID NO: 38803 - DNA, 25 bp, Homo sapien
tacgtgtgtattatcatctgtgtct

SEQ ID NO: 38804 - DNA, 25 bp, Homo sapien
tacgtgtgtattttcatctgtgtct

SEQ ID NO: 38805 - DNA, 25 bp, Homo sapien
aagtggagagtacctgagactgccg

SEQ ID NO: 38806 - DNA, 25 bp, Homo sapien
aagtggagagtagctgagactgccg

SEQ ID NO: 38807 - DNA, 25 bp, Homo sapien
aggagatagaacgagactcggacgc

SEQ ID NO: 38808 - DNA, 25 bp, Homo sapien
aggagatagaaccagactcggacgc

SEQ ID NO: 38809 - DNA, 25 bp, Homo sapien
agagtagacgatgtgacgacggact

SEQ ID NO: 38810 - DNA, 25 bp, Homo sapien
agagtagacgatctgacgacggact

SEQ ID NO: 38811 - DNA, 25 bp, Homo sapien
agtgattcatacgtggaactgtact

SEQ ID NO: 38812 - DNA, 25 bp, Homo sapien
agtgattcatacctggaactgtact

SEQ ID NO: 38813 - DNA, 25 bp, Homo sapien
agtgtcatcctatcggcagatagta

SEQ ID NO: 38814 - DNA, 25 bp, Homo sapien
agtgtcatcctaacggcagatagta

SEQ ID NO: 38815 - DNA, 25 bp, Homo sapien
aagtgtaaaccaagtgttgatccgt

SEQ ID NO: 38816 - DNA, 25 bp, Homo sapien
aagtgtaaaccatgtgttgatccgt

SEQ ID NO: 38817 - DNA, 25 bp, Homo sapien
tgtacactctgatccgtccttccgt

SEQ ID NO: 38818 - DNA, 25 bp, Homo sapien
tgtacactctgaaccgtccttccgt

SEQ ID NO: 38819 - DNA, 25 bp, Homo sapien
aggggtcctactatcggtcccacct

SEQ ID NO: 38820 - DNA, 25 bp, Homo sapien
aggggtcctactttcggtcccacct

SEQ ID NO: 38821 - DNA, 25 bp, Homo sapien
aggtgacagtgacttggctctccct

SEQ ID NO: 38822 - DNA, 25 bp, Homo sapien
aggtgacagtgagttggctctccct

SEQ ID NO: 38823 - DNA, 25 bp, Homo sapien
ctgacaagagtttcgcgattcgttt

SEQ ID NO: 38824 - DNA, 25 bp, Homo sapien
ctgacaagagttacgcgattcgttt

SEQ ID NO: 38825 - DNA, 25 bp, Homo sapien
cccctttggtgtgttatatacatat

SEQ ID NO: 38826 - DNA, 25 bp, Homo sapien
cccctttggtgtcttatatacatat

SEQ ID NO: 38827 - DNA, 25 bp, Homo sapien
ggaccagtttccttagttttatcca

SEQ ID NO: 38828 - DNA, 25 bp, Homo sapien
ggaccagtttccatagttttatcca

SEQ ID NO: 38829 - DNA, 25 bp, Homo sapien
gccgggcttcatgactagcatcgca

SEQ ID NO: 38830 - DNA, 25 bp, Homo sapien
gccgggcttcatcactagcatcgca

SEQ ID NO: 38831 - DNA, 25 bp, Homo sapien
gaggtgtcccaagagtggacgccct

SEQ ID NO: 38832 - DNA, 25 bp, Homo sapien
gaggtgtcccaacagtggacgccct

SEQ ID NO: 38833 - DNA, 25 bp, Homo sapien
tgtctcagaccaacagggtcctctc

SEQ ID NO: 38834 - DNA, 25 bp, Homo sapien
tgtctcagaccatcagggtcctctc

SEQ ID NO: 38835 - DNA, 25 bp, Homo sapien
tgtatgacatgtaccgttaatcttc

SEQ ID NO: 38836 - DNA, 25 bp, Homo sapien
tgtatgacatgttccgttaatcttc

SEQ ID NO: 38837 - DNA, 25 bp, Homo sapien
gatttaaaccttgtagattcgttcg

SEQ ID NO: 38838 - DNA, 25 bp, Homo sapien
gatttaaaccttctagattcgttcg

SEQ ID NO: 38839 - DNA, 25 bp, Homo sapien
aaagtgtgtctacttagagtcatct

SEQ ID NO: 38840 - DNA, 25 bp, Homo sapien
aaagtgtgtctagttagagtcatct

SEQ ID NO: 38841 - DNA, 25 bp, Homo sapien
aaagtgtctctatgtcaggtgacct

SEQ ID NO: 38842 - DNA, 25 bp, Homo sapien
aaagtgtctctaagtcaggtgacct

SEQ ID NO: 38843 - DNA, 25 bp, Homo sapien
taaagtataccatgaagacgtacaa

SEQ ID NO: 38844 - DNA, 25 bp, Homo sapien
taaagtataccaagaagacgtacaa

SEQ ID NO: 38845 - DNA, 25 bp, Homo sapien
ctgggggaactacatatttcagtag

SEQ ID NO: 38846 - DNA, 25 bp, Homo sapien
ctgggggaactagatatttcagtag

SEQ ID NO: 38847 - DNA, 25 bp, Homo sapien
tggagacgtgttccttaatcatttt

SEQ ID NO: 38848 - DNA, 25 bp, Homo sapien
tggagacgtgttgcttaatcatttt

SEQ ID NO: 38849 - DNA, 25 bp, Homo sapien
gactagacctgtggtaataagccaa

SEQ ID NO: 38850 - DNA, 25 bp, Homo sapien
gactagacctgtcgtaataagccaa

SEQ ID NO: 38851 - DNA, 25 bp, Homo sapien
tgtcatgtctagctaaggtcaccat

SEQ ID NO: 38852 - DNA, 25 bp, Homo sapien
tgtcatgtctaggtaaggtcaccat

SEQ ID NO: 38853 - DNA, 25 bp, Homo sapien
ctgacatgttcgacacagtgtccct

SEQ ID NO: 38854 - DNA, 25 bp, Homo sapien
ctgacatgttcgtcacagtgtccct

SEQ ID NO: 38855 - DNA, 25 bp, Homo sapien
ctgtttgttcgaactacgtagcaaa

SEQ ID NO: 38856 - DNA, 25 bp, Homo sapien
ctgtttgttcgatctacgtagcaaa

SEQ ID NO: 38857 - DNA, 25 bp, Homo sapien
gaatcttttgtaccagaacaccacg

SEQ ID NO: 38858 - DNA, 25 bp, Homo sapien
gaatcttttgtagcagaacaccacg

SEQ ID NO: 38859 - DNA, 25 bp, Homo sapien
gagtctctatcgaaagaaccgaccc

SEQ ID NO: 38860 - DNA, 25 bp, Homo sapien
gagtctctatcgtaagaaccgaccc

SEQ ID NO: 38861 - DNA, 25 bp, Homo sapien
aggtttacgaacctctaccgtccac

SEQ ID NO: 38862 - DNA, 25 bp, Homo sapien
aggtttacgaacgtctaccgtccac

SEQ ID NO: 38863 - DNA, 25 bp, Homo sapien
atcggtctcgaggactctcccttta

SEQ ID NO: 38864 - DNA, 25 bp, Homo sapien
atcggtctcgagcactctcccttta

SEQ ID NO: 38865 - DNA, 25 bp, Homo sapien
ggcagacctaccttcactcgtgtca

SEQ ID NO: 38866 - DNA, 25 bp, Homo sapien
ggcagacctaccatcactcgtgtca

SEQ ID NO: 38867 - DNA, 25 bp, Homo sapien
acggccgcatcccatccgtgtgcga

SEQ ID NO: 38868 - DNA, 25 bp, Homo sapien
acggccgcatccgatccgtgtgcga

SEQ ID NO: 38869 - DNA, 25 bp, Homo sapien
gaccgtcatttacaaacgtagtctc

SEQ ID NO: 38870 - DNA, 25 bp, Homo sapien
gaccgtcatttagaaacgtagtctc

SEQ ID NO: 38871 - DNA, 25 bp, Homo sapien
tggtggtcccagatgtcagagatcc

SEQ ID NO: 38872 - DNA, 25 bp, Homo sapien
tggtggtcccagttgtcagagatcc

SEQ ID NO: 38873 - DNA, 25 bp, Homo sapien
ggtcccgactcttcggagtactcct

SEQ ID NO: 38874 - DNA, 25 bp, Homo sapien
ggtcccgactctacggagtactcct

SEQ ID NO: 38875 - DNA, 25 bp, Homo sapien
ccaggtccagaattcgtcactgggt

SEQ ID NO: 38876 - DNA, 25 bp, Homo sapien
ccaggtccagaaatcgtcactgggt

SEQ ID NO: 38877 - DNA, 25 bp, Homo sapien
cgtgtcccgcaactactacaggggt

SEQ ID NO: 38878 - DNA, 25 bp, Homo sapien
cgtgtcccgcaagtactacaggggt

SEQ ID NO: 38879 - DNA, 25 bp, Homo sapien
gtccggtcactctcgctagtcgagg

SEQ ID NO: 38880 - DNA, 25 bp, Homo sapien
gtccggtcactcacgctagtcgagg

SEQ ID NO: 38881 - DNA, 25 bp, Homo sapien
tttattagtccgtgtcctgtcagag

SEQ ID NO: 38882 - DNA, 25 bp, Homo sapien
tttattagtccgagtcctgtcagag

SEQ ID NO: 38883 - DNA, 25 bp, Homo sapien
cgttttctgacgactccactatcga

SEQ ID NO: 38884 - DNA, 25 bp, Homo sapien
cgttttctgacgtctccactatcga

SEQ ID NO: 38885 - DNA, 25 bp, Homo sapien
tgggtccggacgacccacagtcgtc

SEQ ID NO: 38886 - DNA, 25 bp, Homo sapien
tgggtccggacgtcccacagtcgtc

SEQ ID NO: 38887 - DNA, 25 bp, Homo sapien
tggctccgtgagtataccgacatgc

SEQ ID NO: 38888 - DNA, 25 bp, Homo sapien
tggctccgtgagaataccgacatgc

SEQ ID NO: 38889 - DNA, 25 bp, Homo sapien
cttaacttggaaagatcctaggtct

SEQ ID NO: 38890 - DNA, 25 bp, Homo sapien
cttaacttggaatgatcctaggtct

SEQ ID NO: 38891 - DNA, 25 bp, Homo sapien
cgaacatcgtggtcgtgggccagac

SEQ ID NO: 38892 - DNA, 25 bp, Homo sapien
cgaacatcgtggacgtgggccagac

SEQ ID NO: 38893 - DNA, 25 bp, Homo sapien
gacacgatcaagcaggggaccactc

SEQ ID NO: 38894 - DNA, 25 bp, Homo sapien
gacacgatcaaggaggggaccactc

SEQ ID NO: 38895 - DNA, 25 bp, Homo sapien
gatcgataaagaacccataccaacg

SEQ ID NO: 38896 - DNA, 25 bp, Homo sapien
gatcgataaagatcccataccaacg

SEQ ID NO: 38897 - DNA, 25 bp, Homo sapien
agtgtagaactataaaccgtattac

SEQ ID NO: 38898 - DNA, 25 bp, Homo sapien
agtgtagaactaaaaaccgtattac

SEQ ID NO: 38899 - DNA, 25 bp, Homo sapien
gagtgtataaagaatcctacgattc

SEQ ID NO: 38900 - DNA, 25 bp, Homo sapien
gagtgtataaagtatcctacgattc

SEQ ID NO: 38901 - DNA, 25 bp, Homo sapien
aattttatctgaaccgtcgagtatg

SEQ ID NO: 38902 - DNA, 25 bp, Homo sapien
aattttatctgatccgtcgagtatg

SEQ ID NO: 38903 - DNA, 25 bp, Homo sapien
tgaactcccgtctgtgaattaatgt

SEQ ID NO: 38904 - DNA, 25 bp, Homo sapien
tgaactcccgtcagtgaattaatgt

SEQ ID NO: 38905 - DNA, 25 bp, Homo sapien
ttggcaccctcgtgtccctgttcgt

SEQ ID NO: 38906 - DNA, 25 bp, Homo sapien
ttggcaccctcgagtccctgttcgt

SEQ ID NO: 38907 - DNA, 25 bp, Homo sapien
aagagtaccttgagatacttctaag

SEQ ID NO: 38908 - DNA, 25 bp, Homo sapien
aagagtaccttgtgatacttctaag

SEQ ID NO: 38909 - DNA, 25 bp, Homo sapien
aagatcgtcattaaatagtctccag

SEQ ID NO: 38910 - DNA, 25 bp, Homo sapien
aagatcgtcatttaatagtctccag

SEQ ID NO: 38911 - DNA, 25 bp, Homo sapien
aaagcgtatgtagaacaaactctag

SEQ ID NO: 38912 - DNA, 25 bp, Homo sapien
aaagcgtatgtacaacaaactctag

SEQ ID NO: 38913 - DNA, 25 bp, Homo sapien
agaagacgtgtctcggcgaaccctc

SEQ ID NO: 38914 - DNA, 25 bp, Homo sapien
agaagacgtgtcacggcgaaccctc

SEQ ID NO: 38915 - DNA, 25 bp, Homo sapien
aggtaacgttcagtgttagacccag

SEQ ID NO: 38916 - DNA, 25 bp, Homo sapien
aggtaacgttcactgttagacccag

SEQ ID NO: 38917 - DNA, 25 bp, Homo sapien
agagtgtacctttctaaaccgaagt

SEQ ID NO: 38918 - DNA, 25 bp, Homo sapien
agagtgtaccttactaaaccgaagt

SEQ ID NO: 38919 - DNA, 25 bp, Homo sapien
ggtgagccgtctttaagacgtctga

SEQ ID NO: 38920 - DNA, 25 bp, Homo sapien
ggtgagccgtctataagacgtctga

SEQ ID NO: 38921 - DNA, 25 bp, Homo sapien
gaccaacacgaggtcggtccgttcc

SEQ ID NO: 38922 - DNA, 25 bp, Homo sapien
gaccaacacgagctcggtccgttcc

SEQ ID NO: 38923 - DNA, 25 bp, Homo sapien
gacacgaaatcttaataggttctct

SEQ ID NO: 38924 - DNA, 25 bp, Homo sapien
gacacgaaatctaaataggttctct

SEQ ID NO: 38925 - DNA, 25 bp, Homo sapien
agaccgaagatgaatctaggactcc

SEQ ID NO: 38926 - DNA, 25 bp, Homo sapien
agaccgaagatgtatctaggactcc

SEQ ID NO: 38927 - DNA, 25 bp, Homo sapien
taaggacagggattacgacacttca

SEQ ID NO: 38928 - DNA, 25 bp, Homo sapien
taaggacagggaatacgacacttca

SEQ ID NO: 38929 - DNA, 25 bp, Homo sapien
aagaacagaggcaggaagtactcga

SEQ ID NO: 38930 - DNA, 25 bp, Homo sapien
aagaacagaggctggaagtactcga

SEQ ID NO: 38931 - DNA, 25 bp, Homo sapien
accacggtcagttgagaggtttgac

SEQ ID NO: 38932 - DNA, 25 bp, Homo sapien
accacggtcagtagagaggtttgac

SEQ ID NO: 38933 - DNA, 25 bp, Homo sapien
tcctcggtcgacgaagctaaaagac

SEQ ID NO: 38934 - DNA, 25 bp, Homo sapien
tcctcggtcgaccaagctaaaagac

SEQ ID NO: 38935 - DNA, 25 bp, Homo sapien
ctcggtcactcagataacgtaccac

SEQ ID NO: 38936 - DNA, 25 bp, Homo sapien
ctcggtcactcacataacgtaccac

SEQ ID NO: 38937 - DNA, 25 bp, Homo sapien
ggtgtcgccacgactgtcagctacg

SEQ ID NO: 38938 - DNA, 25 bp, Homo sapien
ggtgtcgccacgtctgtcagctacg

SEQ ID NO: 38939 - DNA, 25 bp, Homo sapien
gcggttctcccgtcgtcgagaggac

SEQ ID NO: 38940 - DNA, 25 bp, Homo sapien
gcggttctcccgacgtcgagaggac

SEQ ID NO: 38941 - DNA, 25 bp, Homo sapien
cgtcgtggtgcaccaacggcatcgc

SEQ ID NO: 38942 - DNA, 25 bp, Homo sapien
cgtcgtggtgcagcaacggcatcgc

SEQ ID NO: 38943 - DNA, 25 bp, Homo sapien
gtcgcgtgtcacgtcatggcccgtg

SEQ ID NO: 38944 - DNA, 25 bp, Homo sapien
gtcgcgtgtcacctcatggcccgtg

SEQ ID NO: 38945 - DNA, 25 bp, Homo sapien
ctgtgtgtcaatacgggtctccgtc

SEQ ID NO: 38946 - DNA, 25 bp, Homo sapien
ctgtgtgtcaattcgggtctccgtc

SEQ ID NO: 38947 - DNA, 25 bp, Homo sapien
tcaggacgttgtcttctgtcgcacc

SEQ ID NO: 38948 - DNA, 25 bp, Homo sapien
tcaggacgttgtgttctgtcgcacc

SEQ ID NO: 38949 - DNA, 25 bp, Homo sapien
cggggtgtatacgactctcgtcccc

SEQ ID NO: 38950 - DNA, 25 bp, Homo sapien
cggggtgtataccactctcgtcccc

SEQ ID NO: 38951 - DNA, 25 bp, Homo sapien
cggcccgtttccttatcacgtctgt

SEQ ID NO: 38952 - DNA, 25 bp, Homo sapien
cggcccgtttccatatcacgtctgt

SEQ ID NO: 38953 - DNA, 25 bp, Homo sapien
ataccgtctatgacacctgtaccgt

SEQ ID NO: 38954 - DNA, 25 bp, Homo sapien
ataccgtctatgtcacctgtaccgt

SEQ ID NO: 38955 - DNA, 25 bp, Homo sapien
ctatcagttgtggagactcctccgt

SEQ ID NO: 38956 - DNA, 25 bp, Homo sapien
ctatcagttgtgcagactcctccgt

SEQ ID NO: 38957 - DNA, 25 bp, Homo sapien
gttcagtcgttacgtccatcctccg

SEQ ID NO: 38958 - DNA, 25 bp, Homo sapien
gttcagtcgttaggtccatcctccg

SEQ ID NO: 38959 - DNA, 25 bp, Homo sapien
agtttcagtaatgtaggacccctac

SEQ ID NO: 38960 - DNA, 25 bp, Homo sapien
agtttcagtaatctaggacccctac

SEQ ID NO: 38961 - DNA, 25 bp, Homo sapien
ggttcgccgtgagtcatcaccacaa

SEQ ID NO: 38962 - DNA, 25 bp, Homo sapien
ggttcgccgtgactcatcaccacaa

SEQ ID NO: 38963 - DNA, 25 bp, Homo sapien
ggttccccagctagtacaagaacat

SEQ ID NO: 38964 - DNA, 25 bp, Homo sapien
ggttccccagcttgtacaagaacat

SEQ ID NO: 38965 - DNA, 25 bp, Homo sapien
ggttcactggggtcactacaaaggt

SEQ ID NO: 38966 - DNA, 25 bp, Homo sapien
ggttcactggggacactacaaaggt

SEQ ID NO: 38967 - DNA, 25 bp, Homo sapien
tgccacgagggaagtacgcactgga

SEQ ID NO: 38968 - DNA, 25 bp, Homo sapien
tgccacgagggatgtacgcactgga

SEQ ID NO: 38969 - DNA, 25 bp, Homo sapien
tgtcctggggcttcgacaccgagac

SEQ ID NO: 38970 - DNA, 25 bp, Homo sapien
tgtcctggggctacgacaccgagac

SEQ ID NO: 38971 - DNA, 25 bp, Homo sapien
tttgttctctagtggaagttcccac

SEQ ID NO: 38972 - DNA, 25 bp, Homo sapien
tttgttctctagaggaagttcccac

SEQ ID NO: 38973 - DNA, 25 bp, Homo sapien
acctaagtcaaggagattttcgaat

SEQ ID NO: 38974 - DNA, 25 bp, Homo sapien
acctaagtcaagcagattttcgaat

SEQ ID NO: 38975 - DNA, 25 bp, Homo sapien
aaatctactatcttgacgttcttgg

SEQ ID NO: 38976 - DNA, 25 bp, Homo sapien
aaatctactatcatgacgttcttgg

SEQ ID NO: 38977 - DNA, 25 bp, Homo sapien
tgcggcgttatgtctctgagtcagg

SEQ ID NO: 38978 - DNA, 25 bp, Homo sapien
tgcggcgttatgactctgagtcagg

SEQ ID NO: 38979 - DNA, 25 bp, Homo sapien
cagtgtgtctatggtttttccaggt

SEQ ID NO: 38980 - DNA, 25 bp, Homo sapien
cagtgtgtctatcgtttttccaggt

SEQ ID NO: 38981 - DNA, 25 bp, Homo sapien
ccggaccgactacgttgggttcaag

SEQ ID NO: 38982 - DNA, 25 bp, Homo sapien
ccggaccgactaggttgggttcaag

SEQ ID NO: 38983 - DNA, 25 bp, Homo sapien
atggaagtgtgttaagggtctcctc

SEQ ID NO: 38984 - DNA, 25 bp, Homo sapien
atggaagtgtgtaaagggtctcctc

SEQ ID NO: 38985 - DNA, 25 bp, Homo sapien
tctgttaggtcgtcgggtcctccct

SEQ ID NO: 38986 - DNA, 25 bp, Homo sapien
tctgttaggtcgacgggtcctccct

SEQ ID NO: 38987 - DNA, 25 bp, Homo sapien
ttcttcggtgaagagtatctacctt

SEQ ID NO: 38988 - DNA, 25 bp, Homo sapien
ttcttcggtgaacagtatctacctt

SEQ ID NO: 38989 - DNA, 25 bp, Homo sapien
acagatatgacgtcgggtaccacct

SEQ ID NO: 38990 - DNA, 25 bp, Homo sapien
acagatatgacgacgggtaccacct

SEQ ID NO: 38991 - DNA, 25 bp, Homo sapien
aagacgtaaaacctcggaggagcaa

SEQ ID NO: 38992 - DNA, 25 bp, Homo sapien
aagacgtaaaacgtcggaggagcaa

SEQ ID NO: 38993 - DNA, 25 bp, Homo sapien
aataaagacctataagtgtctgtcg

SEQ ID NO: 38994 - DNA, 25 bp, Homo sapien
aataaagacctaaaagtgtctgtcg

SEQ ID NO: 38995 - DNA, 25 bp, Homo sapien
ataggaaagtacaaaatttacttcg

SEQ ID NO: 38996 - DNA, 25 bp, Homo sapien
ataggaaagtactaaatttacttcg

SEQ ID NO: 38997 - DNA, 25 bp, Homo sapien
taactcagagtcaagggaatctctt

SEQ ID NO: 38998 - DNA, 25 bp, Homo sapien
taactcagagtctagggaatctctt

SEQ ID NO: 38999 - DNA, 25 bp, Homo sapien
cttccgcacagacgtcttgtcttct

SEQ ID NO: 39000 - DNA, 25 bp, Homo sapien
cttccgcacagaggtcttgtcttct

SEQ ID NO: 39001 - DNA, 25 bp, Homo sapien
ctcctccgtccagtggacgtttttt

SEQ ID NO: 39002 - DNA, 25 bp, Homo sapien
ctcctccgtccactggacgtttttt

SEQ ID NO: 39003 - DNA, 25 bp, Homo sapien
tagtcatttcgtgtcggattgtttc

SEQ ID NO: 39004 - DNA, 25 bp, Homo sapien
tagtcatttcgtctcggattgtttc

SEQ ID NO: 39005 - DNA, 25 bp, Homo sapien
ttttaattcagtcgtaattcagttg

SEQ ID NO: 39006 - DNA, 25 bp, Homo sapien
ttttaattcagtggtaattcagttg

SEQ ID NO: 39007 - DNA, 25 bp, Homo sapien
cagggttcttttgtcactattatta

SEQ ID NO: 39008 - DNA, 25 bp, Homo sapien
cagggttcttttctcactattatta

SEQ ID NO: 39009 - DNA, 25 bp, Homo sapien
ggtcggactcctctttagtttgtgt

SEQ ID NO: 39010 - DNA, 25 bp, Homo sapien
ggtcggactcctgtttagtttgtgt

SEQ ID NO: 39011 - DNA, 25 bp, Homo sapien
gttacagctcaggagtccttcaggt

SEQ ID NO: 39012 - DNA, 25 bp, Homo sapien
gttacagctcagcagtccttcaggt

SEQ ID NO: 39013 - DNA, 25 bp, Homo sapien
tgtacagcctccaatgtaccagagt

SEQ ID NO: 39014 - DNA, 25 bp, Homo sapien
tgtacagcctcctatgtaccagagt

SEQ ID NO: 39015 - DNA, 25 bp, Homo sapien
atcacggtcccgagtccgacgtcat

SEQ ID NO: 39016 - DNA, 25 bp, Homo sapien
atcacggtcccgtgtccgacgtcat

SEQ ID NO: 39017 - DNA, 25 bp, Homo sapien
cgtttcggcccgtacttcttcacgt

SEQ ID NO: 39018 - DNA, 25 bp, Homo sapien
cgtttcggcccgaacttcttcacgt

SEQ ID NO: 39019 - DNA, 25 bp, Homo sapien
gtgtcatgagctccaaggacttcga

SEQ ID NO: 39020 - DNA, 25 bp, Homo sapien
gtgtcatgagctgcaaggacttcga

SEQ ID NO: 39021 - DNA, 25 bp, Homo sapien
gacgactcatctacaaggacctctc

SEQ ID NO: 39022 - DNA, 25 bp, Homo sapien
gacgactcatcttcaaggacctctc

SEQ ID NO: 39023 - DNA, 25 bp, Homo sapien
tctacaccggtcgaaaaacctcgtc

SEQ ID NO: 39024 - DNA, 25 bp, Homo sapien
tctacaccggtccaaaaacctcgtc

SEQ ID NO: 39025 - DNA, 25 bp, Homo sapien
cgtccttcgtgtaaaccgaaccgtc

SEQ ID NO: 39026 - DNA, 25 bp, Homo sapien
cgtccttcgtgttaaccgaaccgtc

SEQ ID NO: 39027 - DNA, 25 bp, Homo sapien
agggcactccagacgcaggtactcc

SEQ ID NO: 39028 - DNA, 25 bp, Homo sapien
agggcactccagtcgcaggtactcc

SEQ ID NO: 39029 - DNA, 25 bp, Homo sapien
agggtgttcctacgtcatccggtcc

SEQ ID NO: 39030 - DNA, 25 bp, Homo sapien
agggtgttcctaggtcatccggtcc

SEQ ID NO: 39031 - DNA, 25 bp, Homo sapien
gggacttccaggatcacctcgtgcc

SEQ ID NO: 39032 - DNA, 25 bp, Homo sapien
gggacttccaggttcacctcgtgcc

SEQ ID NO: 39033 - DNA, 25 bp, Homo sapien
actctttccgtgtcacctgagtaca

SEQ ID NO: 39034 - DNA, 25 bp, Homo sapien
actctttccgtgacacctgagtaca

SEQ ID NO: 39035 - DNA, 25 bp, Homo sapien
taatgttacctgagcactgatgtgt

SEQ ID NO: 39036 - DNA, 25 bp, Homo sapien
taatgttacctgtgcactgatgtgt

SEQ ID NO: 39037 - DNA, 25 bp, Homo sapien
tagagtttcccgtgacgggagtcag

SEQ ID NO: 39038 - DNA, 25 bp, Homo sapien
tagagtttcccgagacgggagtcag

SEQ ID NO: 39039 - DNA, 25 bp, Homo sapien
tacgactcttcaaagcaactattgg

SEQ ID NO: 39040 - DNA, 25 bp, Homo sapien
tacgactcttcatagcaactattgg

SEQ ID NO: 39041 - DNA, 25 bp, Homo sapien
atactttgtagactctcaattatgg

SEQ ID NO: 39042 - DNA, 25 bp, Homo sapien
atactttgtagagtctcaattatgg

SEQ ID NO: 39043 - DNA, 25 bp, Homo sapien
ttcactgagaagtatcacttcatcg

SEQ ID NO: 39044 - DNA, 25 bp, Homo sapien
ttcactgagaagaatcacttcatcg

SEQ ID NO: 39045 - DNA, 25 bp, Homo sapien
agatgtcggacaatccctatccacc

SEQ ID NO: 39046 - DNA, 25 bp, Homo sapien
agatgtcggacattccctatccacc

SEQ ID NO: 39047 - DNA, 25 bp, Homo sapien
gaatggtaggtaatgggtccctacc

SEQ ID NO: 39048 - DNA, 25 bp, Homo sapien
gaatggtaggtattgggtccctacc

SEQ ID NO: 39049 - DNA, 25 bp, Homo sapien
cgagagggcgtctttatcatccacc

SEQ ID NO: 39050 - DNA, 25 bp, Homo sapien
cgagagggcgtcattatcatccacc

SEQ ID NO: 39051 - DNA, 25 bp, Homo sapien
accggggtctcttaggacaccacct

SEQ ID NO: 39052 - DNA, 25 bp, Homo sapien
accggggtctctaaggacaccacct

SEQ ID NO: 39053 - DNA, 25 bp, Homo sapien
gaagcggtactccagttacaattac

SEQ ID NO: 39054 - DNA, 25 bp, Homo sapien
gaagcggtactcgagttacaattac

SEQ ID NO: 39055 - DNA, 25 bp, Homo sapien
aataggagtctcgtatcaaactata

SEQ ID NO: 39056 - DNA, 25 bp, Homo sapien
aataggagtctcctatcaaactata

SEQ ID NO: 39057 - DNA, 25 bp, Homo sapien
gactatgttacaacatctcggatta

SEQ ID NO: 39058 - DNA, 25 bp, Homo sapien
gactatgttacatcatctcggatta

SEQ ID NO: 39059 - DNA, 25 bp, Homo sapien
cagggaggttccttatcctcagaat

SEQ ID NO: 39060 - DNA, 25 bp, Homo sapien
cagggaggttccatatcctcagaat

SEQ ID NO: 39061 - DNA, 25 bp, Homo sapien
ttggtagtgtgtctacggaaagacc

SEQ ID NO: 39062 - DNA, 25 bp, Homo sapien
ttggtagtgtgtgtacggaaagacc

SEQ ID NO: 39063 - DNA, 25 bp, Homo sapien
gtgacgtactcagaaaacggacact

SEQ ID NO: 39064 - DNA, 25 bp, Homo sapien
gtgacgtactcacaaaacggacact

SEQ ID NO: 39065 - DNA, 25 bp, Homo sapien
ggactttcactaaagacactactag

SEQ ID NO: 39066 - DNA, 25 bp, Homo sapien
ggactttcactatagacactactag

SEQ ID NO: 39067 - DNA, 25 bp, Homo sapien
cctatccgacggagacgacgtctac

SEQ ID NO: 39068 - DNA, 25 bp, Homo sapien
cctatccgacggtgacgacgtctac

SEQ ID NO: 39069 - DNA, 25 bp, Homo sapien
gtctctcatcctcgtcagggtcgta

SEQ ID NO: 39070 - DNA, 25 bp, Homo sapien
gtctctcatcctggtcagggtcgta

SEQ ID NO: 39071 - DNA, 25 bp, Homo sapien
tctacaacgttggtgagaggtcgtt

SEQ ID NO: 39072 - DNA, 25 bp, Homo sapien
tctacaacgttgctgagaggtcgtt

SEQ ID NO: 39073 - DNA, 25 bp, Homo sapien
tcccgaatagtcatctggttcgtgt

SEQ ID NO: 39074 - DNA, 25 bp, Homo sapien
tcccgaatagtcttctggttcgtgt

SEQ ID NO: 39075 - DNA, 25 bp, Homo sapien
cttccgataagaactgtcagccagt

SEQ ID NO: 39076 - DNA, 25 bp, Homo sapien
cttccgataagatctgtcagccagt

SEQ ID NO: 39077 - DNA, 25 bp, Homo sapien
aggttgagaccacttattcaccgat

SEQ ID NO: 39078 - DNA, 25 bp, Homo sapien
aggttgagaccagttattcaccgat

SEQ ID NO: 39079 - DNA, 25 bp, Homo sapien
gattgaccgagtttgatcgacactg

SEQ ID NO: 39080 - DNA, 25 bp, Homo sapien
gattgaccgagtatgatcgacactg

SEQ ID NO: 39081 - DNA, 25 bp, Homo sapien
ctgagtagggtctctctgtcgaccg

SEQ ID NO: 39082 - DNA, 25 bp, Homo sapien
ctgagtagggtcactctgtcgaccg

SEQ ID NO: 39083 - DNA, 25 bp, Homo sapien
ggtttagggtctactcagagtctct

SEQ ID NO: 39084 - DNA, 25 bp, Homo sapien
ggtttagggtcttctcagagtctct

SEQ ID NO: 39085 - DNA, 25 bp, Homo sapien
cgggtaggcttttacagactgtagt

SEQ ID NO: 39086 - DNA, 25 bp, Homo sapien
cgggtaggctttaacagactgtagt

SEQ ID NO: 39087 - DNA, 25 bp, Homo sapien
tgtatcgtgtgttacacaacgatgt

SEQ ID NO: 39088 - DNA, 25 bp, Homo sapien
tgtatcgtgtgtaacacaacgatgt

SEQ ID NO: 39089 - DNA, 25 bp, Homo sapien
tccactcttccagtcatcagagagg

SEQ ID NO: 39090 - DNA, 25 bp, Homo sapien
tccactcttccactcatcagagagg

SEQ ID NO: 39091 - DNA, 25 bp, Homo sapien
tttagtcacgggtaacagtcacggt

SEQ ID NO: 39092 - DNA, 25 bp, Homo sapien
tttagtcacgggaaacagtcacggt

SEQ ID NO: 39093 - DNA, 25 bp, Homo sapien
gttctagcacttgaaggagtatctt

SEQ ID NO: 39094 - DNA, 25 bp, Homo sapien
gttctagcacttcaaggagtatctt

SEQ ID NO: 39095 - DNA, 25 bp, Homo sapien
ctgtttctcatgacatgagtcttat

SEQ ID NO: 39096 - DNA, 25 bp, Homo sapien
ctgtttctcatgtcatgagtcttat

SEQ ID NO: 39097 - DNA, 25 bp, Homo sapien
tcttagatcccatttaagattgttt

SEQ ID NO: 39098 - DNA, 25 bp, Homo sapien
tcttagatcccaattaagattgttt

SEQ ID NO: 39099 - DNA, 25 bp, Homo sapien
attgtatcttttaacataaatgtaa

SEQ ID NO: 39100 - DNA, 25 bp, Homo sapien
attgtatctttttacataaatgtaa

SEQ ID NO: 39101 - DNA, 25 bp, Homo sapien
gttgttattttcgatacatgtatcc

SEQ ID NO: 39102 - DNA, 25 bp, Homo sapien
gttgttattttccatacatgtatcc

SEQ ID NO: 39103 - DNA, 25 bp, Homo sapien
gtaatacttgtctcctaagatgaaa

SEQ ID NO: 39104 - DNA, 25 bp, Homo sapien
gtaatacttgtcacctaagatgaaa

SEQ ID NO: 39105 - DNA, 25 bp, Homo sapien
cgacttctgtggtcgaactgtcaag

SEQ ID NO: 39106 - DNA, 25 bp, Homo sapien
cgacttctgtggacgaactgtcaag

SEQ ID NO: 39107 - DNA, 25 bp, Homo sapien
ccgatattttgagatcttcgtaacg

SEQ ID NO: 39108 - DNA, 25 bp, Homo sapien
ccgatattttgacatcttcgtaacg

SEQ ID NO: 39109 - DNA, 25 bp, Homo sapien
tcgactctaatgtgtacctttgtct

SEQ ID NO: 39110 - DNA, 25 bp, Homo sapien
tcgactctaatgagtacctttgtct

SEQ ID NO: 39111 - DNA, 25 bp, Homo sapien
cgaatacaaatgaagacactttgac

SEQ ID NO: 39112 - DNA, 25 bp, Homo sapien
cgaatacaaatgtagacactttgac

SEQ ID NO: 39113 - DNA, 25 bp, Homo sapien
gaacacaaagtgctcgagttgttca

SEQ ID NO: 39114 - DNA, 25 bp, Homo sapien
gaacacaaagtggtcgagttgttca

SEQ ID NO: 39115 - DNA, 25 bp, Homo sapien
taatccaagtgctcggtttctcgat

SEQ ID NO: 39116 - DNA, 25 bp, Homo sapien
taatccaagtgcacggtttctcgat

SEQ ID NO: 39117 - DNA, 25 bp, Homo sapien
acagtccccgggtggtctcgttcgg

SEQ ID NO: 39118 - DNA, 25 bp, Homo sapien
acagtccccgggaggtctcgttcgg

SEQ ID NO: 39119 - DNA, 25 bp, Homo sapien
tcccctcgtggaaggaagttcccag

SEQ ID NO: 39120 - DNA, 25 bp, Homo sapien
tcccctcgtggatggaagttcccag

SEQ ID NO: 39121 - DNA, 25 bp, Homo sapien
accaaacttttgactcgggtctccc

SEQ ID NO: 39122 - DNA, 25 bp, Homo sapien
accaaacttttgtctcgggtctccc

SEQ ID NO: 39123 - DNA, 25 bp, Homo sapien
agaatggtaggtaatgggtccctac

SEQ ID NO: 39124 - DNA, 25 bp, Homo sapien
agaatggtaggttatgggtccctac

SEQ ID NO: 39125 - DNA, 25 bp, Homo sapien
gaactgtcgttaaaggaggccgctc

SEQ ID NO: 39126 - DNA, 25 bp, Homo sapien
gaactgtcgttataggaggccgctc

SEQ ID NO: 39127 - DNA, 25 bp, Homo sapien
cccgtagaccgttgtaggccgtatt

SEQ ID NO: 39128 - DNA, 25 bp, Homo sapien
cccgtagaccgtagtaggccgtatt

SEQ ID NO: 39129 - DNA, 25 bp, Homo sapien
aagaatgtattcttcgtgtcccttt

SEQ ID NO: 39130 - DNA, 25 bp, Homo sapien
aagaatgtattcatcgtgtcccttt

SEQ ID NO: 39131 - DNA, 25 bp, Homo sapien
aacgggttcttttcggttcatagat

SEQ ID NO: 39132 - DNA, 25 bp, Homo sapien
aacgggttctttacggttcatagat

SEQ ID NO: 39133 - DNA, 25 bp, Homo sapien
ctatgttttctacgtgatgtgaact

SEQ ID NO: 39134 - DNA, 25 bp, Homo sapien
ctatgttttctaggtgatgtgaact

SEQ ID NO: 39135 - DNA, 25 bp, Homo sapien
attttgtgtcccagtgtcccagaac

SEQ ID NO: 39136 - DNA, 25 bp, Homo sapien
attttgtgtccctgtgtcccagaac

SEQ ID NO: 39137 - DNA, 25 bp, Homo sapien
gtacttgtgccacgagtccccgaac

SEQ ID NO: 39138 - DNA, 25 bp, Homo sapien
gtacttgtgccaggagtccccgaac

SEQ ID NO: 39139 - DNA, 25 bp, Homo sapien
gaccctttccaggagtcctcgggac

SEQ ID NO: 39140 - DNA, 25 bp, Homo sapien
gaccctttccagcagtcctcgggac

SEQ ID NO: 39141 - DNA, 25 bp, Homo sapien
ctgtcgttgaaacttcactccagtc

SEQ ID NO: 39142 - DNA, 25 bp, Homo sapien
ctgtcgttgaaagttcactccagtc

SEQ ID NO: 39143 - DNA, 25 bp, Homo sapien
ataccgttgaaattcctccgcgaac

SEQ ID NO: 39144 - DNA, 25 bp, Homo sapien
ataccgttgaaaatcctccgcgaac

SEQ ID NO: 39145 - DNA, 25 bp, Homo sapien
ttttcgtcataaagaatgtccttag

SEQ ID NO: 39146 - DNA, 25 bp, Homo sapien
ttttcgtcataatgaatgtccttag

SEQ ID NO: 39147 - DNA, 25 bp, Homo sapien
tgttcgtcattatgggtgctctggt

SEQ ID NO: 39148 - DNA, 25 bp, Homo sapien
tgttcgtcattaagggtgctctggt

SEQ ID NO: 39149 - DNA, 25 bp, Homo sapien
agttccagtttaagggtactccggt

SEQ ID NO: 39150 - DNA, 25 bp, Homo sapien
agttccagtttatgggtactccggt

SEQ ID NO: 39151 - DNA, 25 bp, Homo sapien
cctctactctgcagggacgtgtcgg

SEQ ID NO: 39152 - DNA, 25 bp, Homo sapien
cctctactctgctgggacgtgtcgg

SEQ ID NO: 39153 - DNA, 25 bp, Homo sapien
ctctcatgagtctggacgacgggtg

SEQ ID NO: 39154 - DNA, 25 bp, Homo sapien
ctctcatgagtcaggacgacgggtg

SEQ ID NO: 39155 - DNA, 25 bp, Homo sapien
gatttgtccatacgtcttccagggg

SEQ ID NO: 39156 - DNA, 25 bp, Homo sapien
gatttgtccataggtcttccagggg

SEQ ID NO: 39157 - DNA, 25 bp, Homo sapien
ggtgtttcccaacatgtcctagggg

SEQ ID NO: 39158 - DNA, 25 bp, Homo sapien
ggtgtttcccaagatgtcctagggg

SEQ ID NO: 39159 - DNA, 25 bp, Homo sapien
tttcggactcctcttagcagtgggg

SEQ ID NO: 39160 - DNA, 25 bp, Homo sapien
tttcggactcctgttagcagtgggg

SEQ ID NO: 39161 - DNA, 25 bp, Homo sapien
agatctggctcttgctgcgagggcc

SEQ ID NO: 39162 - DNA, 25 bp, Homo sapien
agatctggctctagctgcgagggcc

SEQ ID NO: 39163 - DNA, 25 bp, Homo sapien
ataccttcacctcttcgtatgggtg

SEQ ID NO: 39164 - DNA, 25 bp, Homo sapien
ataccttcacctgttcgtatgggtg

SEQ ID NO: 39165 - DNA, 25 bp, Homo sapien
caaccttccttcttatgtttcggtg

SEQ ID NO: 39166 - DNA, 25 bp, Homo sapien
caaccttccttcatatgtttcggtg

SEQ ID NO: 39167 - DNA, 25 bp, Homo sapien
aaagtgttctagcatagttttcaag

SEQ ID NO: 39168 - DNA, 25 bp, Homo sapien
aaagtgttctaggatagttttcaag

SEQ ID NO: 39169 - DNA, 25 bp, Homo sapien
gttatgtcctactgtgttttatcca

SEQ ID NO: 39170 - DNA, 25 bp, Homo sapien
gttatgtcctacagtgttttatcca

SEQ ID NO: 39171 - DNA, 25 bp, Homo sapien
actgtgacacattgtcgtgtccctt

SEQ ID NO: 39172 - DNA, 25 bp, Homo sapien
actgtgacacatagtcgtgtccctt

SEQ ID NO: 39173 - DNA, 25 bp, Homo sapien
gtaggactgtctgacgtcgacggtt

SEQ ID NO: 39174 - DNA, 25 bp, Homo sapien
gtaggactgtctcacgtcgacggtt

SEQ ID NO: 39175 - DNA, 25 bp, Homo sapien
taatcgtcggggtcctcgactcgtc

SEQ ID NO: 39176 - DNA, 25 bp, Homo sapien
taatcgtcggggacctcgactcgtc

SEQ ID NO: 39177 - DNA, 25 bp, Homo sapien
cttccttttcctacgatggtcctcg

SEQ ID NO: 39178 - DNA, 25 bp, Homo sapien
cttccttttccttcgatggtcctcg

SEQ ID NO: 39179 - DNA, 25 bp, Homo sapien
tgtgtccatttgctccggtggttcc

SEQ ID NO: 39180 - DNA, 25 bp, Homo sapien
tgtgtccatttggtccggtggttcc

SEQ ID NO: 39181 - DNA, 25 bp, Homo sapien
gtccgagataaaggtcgcgggccac

SEQ ID NO: 39182 - DNA, 25 bp, Homo sapien
gtccgagataaacgtcgcgggccac

SEQ ID NO: 39183 - DNA, 25 bp, Homo sapien
cgttcagtgttagacccagagtccc

SEQ ID NO: 39184 - DNA, 25 bp, Homo sapien
cgttcagtgttacacccagagtccc

SEQ ID NO: 39185 - DNA, 25 bp, Homo sapien
ttgtgttagttggtccccgattcca

SEQ ID NO: 39186 - DNA, 25 bp, Homo sapien
ttgtgttagttgctccccgattcca

SEQ ID NO: 39187 - DNA, 25 bp, Homo sapien
cgttgactggtttagtcaactatta

SEQ ID NO: 39188 - DNA, 25 bp, Homo sapien
cgttgactggttaagtcaactatta

SEQ ID NO: 39189 - DNA, 25 bp, Homo sapien
ttaacaccggtctgcagtagtccta

SEQ ID NO: 39190 - DNA, 25 bp, Homo sapien
ttaacaccggtcagcagtagtccta

SEQ ID NO: 39191 - DNA, 25 bp, Homo sapien
ttcacttgtgtatacgtccgaccac

SEQ ID NO: 39192 - DNA, 25 bp, Homo sapien
ttcacttgtgtaaacgtccgaccac

SEQ ID NO: 39193 - DNA, 25 bp, Homo sapien
tacctcacttgtctcctcgagaaga

SEQ ID NO: 39194 - DNA, 25 bp, Homo sapien
tacctcacttgtgtcctcgagaaga

SEQ ID NO: 39195 - DNA, 25 bp, Homo sapien
tgaccattaactactgtgtcactaa

SEQ ID NO: 39196 - DNA, 25 bp, Homo sapien
tgaccattaacttctgtgtcactaa

SEQ ID NO: 39197 - DNA, 25 bp, Homo sapien
gtccaaactctcctgttcaagtagt

SEQ ID NO: 39198 - DNA, 25 bp, Homo sapien
gtccaaactctcgtgttcaagtagt

SEQ ID NO: 39199 - DNA, 25 bp, Homo sapien
ggtgccagacacacggacacgaagg

SEQ ID NO: 39200 - DNA, 25 bp, Homo sapien
ggtgccagacactcggacacgaagg

SEQ ID NO: 39201 - DNA, 25 bp, Homo sapien
tcctccggaggagaggacaaccgat

SEQ ID NO: 39202 - DNA, 25 bp, Homo sapien
tcctccggaggacaggacaaccgat

SEQ ID NO: 39203 - DNA, 25 bp, Homo sapien
aatcaagttggagaaggacacctga

SEQ ID NO: 39204 - DNA, 25 bp, Homo sapien
aatcaagttggacaaggacacctga

SEQ ID NO: 39205 - DNA, 25 bp, Homo sapien
ggaccctgggagatacagtccacca

SEQ ID NO: 39206 - DNA, 25 bp, Homo sapien
ggaccctgggagttacagtccacca

SEQ ID NO: 39207 - DNA, 25 bp, Homo sapien
aacctcatttatactaaccacgaga

SEQ ID NO: 39208 - DNA, 25 bp, Homo sapien
aacctcatttattctaaccacgaga

SEQ ID NO: 39209 - DNA, 25 bp, Homo sapien
cctcatttctattagacccgacgag

SEQ ID NO: 39210 - DNA, 25 bp, Homo sapien
cctcatttctataagacccgacgag

SEQ ID NO: 39211 - DNA, 25 bp, Homo sapien
aaacctctctatcctcgtcctgggt

SEQ ID NO: 39212 - DNA, 25 bp, Homo sapien
aaacctctctatgctcgtcctgggt

SEQ ID NO: 39213 - DNA, 25 bp, Homo sapien
atggcactcggagtccgtcaccggg

SEQ ID NO: 39214 - DNA, 25 bp, Homo sapien
atggcactcggactccgtcaccggg

SEQ ID NO: 39215 - DNA, 25 bp, Homo sapien
ggtctctcgtcgttcttcgcccggg

SEQ ID NO: 39216 - DNA, 25 bp, Homo sapien
ggtctctcgtcgatcttcgcccggg

SEQ ID NO: 39217 - DNA, 25 bp, Homo sapien
agcgtgtgttgcactccttcaatgt

SEQ ID NO: 39218 - DNA, 25 bp, Homo sapien
agcgtgtgttgctctccttcaatgt

SEQ ID NO: 39219 - DNA, 25 bp, Homo sapien
tctcaggtcgctccaacgttttatt

SEQ ID NO: 39220 - DNA, 25 bp, Homo sapien
tctcaggtcgctgcaacgttttatt

SEQ ID NO: 39221 - DNA, 25 bp, Homo sapien
gagtcaagaatacaccgtatttata

SEQ ID NO: 39222 - DNA, 25 bp, Homo sapien
gagtcaagaatagaccgtatttata

SEQ ID NO: 39223 - DNA, 25 bp, Homo sapien
gtgatataaataatccagttattaa

SEQ ID NO: 39224 - DNA, 25 bp, Homo sapien
gtgatataaatattccagttattaa

SEQ ID NO: 39225 - DNA, 25 bp, Homo sapien
aacgtaagattcatatctaggtcat

SEQ ID NO: 39226 - DNA, 25 bp, Homo sapien
aacgtaagattcttatctaggtcat

SEQ ID NO: 39227 - DNA, 25 bp, Homo sapien
cacagaaactctgtgatgttacgtc

SEQ ID NO: 39228 - DNA, 25 bp, Homo sapien
cacagaaactctctgatgttacgtc

SEQ ID NO: 39229 - DNA, 25 bp, Homo sapien
cttactactgtgactgggtttctgg

SEQ ID NO: 39230 - DNA, 25 bp, Homo sapien
cttactactgtgtctgggtttctgg

SEQ ID NO: 39231 - DNA, 25 bp, Homo sapien
tatactcatgtcaagggtctttata

SEQ ID NO: 39232 - DNA, 25 bp, Homo sapien
tatactcatgtctagggtctttata

SEQ ID NO: 39233 - DNA, 25 bp, Homo sapien
gacgtctccttcctttgtcgtacaa

SEQ ID NO: 39234 - DNA, 25 bp, Homo sapien
gacgtctccttcgtttgtcgtacaa

SEQ ID NO: 39235 - DNA, 25 bp, Homo sapien
acgacgttgtgctgtgtttccaaat

SEQ ID NO: 39236 - DNA, 25 bp, Homo sapien
acgacgttgtgcagtgtttccaaat

SEQ ID NO: 39237 - DNA, 25 bp, Homo sapien
cagagtaacagtcctaagggcagga

SEQ ID NO: 39238 - DNA, 25 bp, Homo sapien
cagagtaacagtgctaagggcagga

SEQ ID NO: 39239 - DNA, 25 bp, Homo sapien
agatacctgctgtcgggcctcgacg

SEQ ID NO: 39240 - DNA, 25 bp, Homo sapien
agatacctgctgacgggcctcgacg

SEQ ID NO: 39241 - DNA, 25 bp, Homo sapien
acatcgattcggatacaatctgaga

SEQ ID NO: 39242 - DNA, 25 bp, Homo sapien
acatcgattcggttacaatctgaga

SEQ ID NO: 39243 - DNA, 25 bp, Homo sapien
ggggtcccttcctccgggtagagac

SEQ ID NO: 39244 - DNA, 25 bp, Homo sapien
ggggtcccttccaccgggtagagac

SEQ ID NO: 39245 - DNA, 25 bp, Homo sapien
agaccagctacaccaggtggtccgc

SEQ ID NO: 39246 - DNA, 25 bp, Homo sapien
agaccagctacagcaggtggtccgc

SEQ ID NO: 39247 - DNA, 25 bp, Homo sapien
ctcgtcttcacacagtcggttcttc

SEQ ID NO: 39248 - DNA, 25 bp, Homo sapien
ctcgtcttcacagagtcggttcttc

SEQ ID NO: 39249 - DNA, 25 bp, Homo sapien
cttcgtcggacaaattgtctttttc

SEQ ID NO: 39250 - DNA, 25 bp, Homo sapien
cttcgtcggacatattgtctttttc

SEQ ID NO: 39251 - DNA, 25 bp, Homo sapien
tacagaccctttacgacttcgttcg

SEQ ID NO: 39252 - DNA, 25 bp, Homo sapien
tacagacccttttcgacttcgttcg

SEQ ID NO: 39253 - DNA, 25 bp, Homo sapien
cgcaattctctcttgtgacgtaaag

SEQ ID NO: 39254 - DNA, 25 bp, Homo sapien
cgcaattctctcatgtgacgtaaag

SEQ ID NO: 39255 - DNA, 25 bp, Homo sapien
gacggtgtcttccacaggtcgaaca

SEQ ID NO: 39256 - DNA, 25 bp, Homo sapien
gacggtgtcttcgacaggtcgaaca

SEQ ID NO: 39257 - DNA, 25 bp, Homo sapien
cagtcgtagtgcaccctgtcggacc

SEQ ID NO: 39258 - DNA, 25 bp, Homo sapien
cagtcgtagtgctccctgtcggacc

SEQ ID NO: 39259 - DNA, 25 bp, Homo sapien
gacagagtgaggtccttcacccgtg

SEQ ID NO: 39260 - DNA, 25 bp, Homo sapien
gacagagtgaggaccttcacccgtg

SEQ ID NO: 39261 - DNA, 25 bp, Homo sapien
gcaattatcgttctcgtgagttcct

SEQ ID NO: 39262 - DNA, 25 bp, Homo sapien
gcaattatcgttgtcgtgagttcct

SEQ ID NO: 39263 - DNA, 25 bp, Homo sapien
gtaaaaaagggtggtcacgtgacct

SEQ ID NO: 39264 - DNA, 25 bp, Homo sapien
gtaaaaaagggtcgtcacgtgacct

SEQ ID NO: 39265 - DNA, 25 bp, Homo sapien
cgtcacctgagaaggtcccaacaat

SEQ ID NO: 39266 - DNA, 25 bp, Homo sapien
cgtcacctgagatggtcccaacaat

SEQ ID NO: 39267 - DNA, 25 bp, Homo sapien
tacaagaaggtaggtcacaaccatg

SEQ ID NO: 39268 - DNA, 25 bp, Homo sapien
tacaagaaggtacgtcacaaccatg

SEQ ID NO: 39269 - DNA, 25 bp, Homo sapien
cgaagtaaagggtccgcacctccaa

SEQ ID NO: 39270 - DNA, 25 bp, Homo sapien
cgaagtaaagggaccgcacctccaa

SEQ ID NO: 39271 - DNA, 25 bp, Homo sapien
atcgtaatgaagtatattccccaga

SEQ ID NO: 39272 - DNA, 25 bp, Homo sapien
atcgtaatgaagaatattccccaga

SEQ ID NO: 39273 - DNA, 25 bp, Homo sapien
cggaaataaatgttttaccagacta

SEQ ID NO: 39274 - DNA, 25 bp, Homo sapien
cggaaataaatgatttaccagacta

SEQ ID NO: 39275 - DNA, 25 bp, Homo sapien
cacaaacaagggacacacatacgac

SEQ ID NO: 39276 - DNA, 25 bp, Homo sapien
cacaaacaagggtcacacatacgac

SEQ ID NO: 39277 - DNA, 25 bp, Homo sapien
ccgacaaaaggccgaagtccagtga

SEQ ID NO: 39278 - DNA, 25 bp, Homo sapien
ccgacaaaaggcggaagtccagtga

SEQ ID NO: 39279 - DNA, 25 bp, Homo sapien
ccacagcagaggtgcttccctctag

SEQ ID NO: 39280 - DNA, 25 bp, Homo sapien
ccacagcagaggagcttccctctag

SEQ ID NO: 39281 - DNA, 25 bp, Homo sapien
aaagtcggggaatagtctctcttgt

SEQ ID NO: 39282 - DNA, 25 bp, Homo sapien
aaagtcggggaaaagtctctcttgt

SEQ ID NO: 39283 - DNA, 25 bp, Homo sapien
aggttcccggacgaagtactgcttc

SEQ ID NO: 39284 - DNA, 25 bp, Homo sapien
aggttcccggaccaagtactgcttc

SEQ ID NO: 39285 - DNA, 25 bp, Homo sapien
ggtcgtcccgcaccatcctgcggtg

SEQ ID NO: 39286 - DNA, 25 bp, Homo sapien
ggtcgtcccgcagcatcctgcggtg

SEQ ID NO: 39287 - DNA, 25 bp, Homo sapien
cgtgtcccaagtgtcattcgtgtac

SEQ ID NO: 39288 - DNA, 25 bp, Homo sapien
cgtgtcccaagtctcattcgtgtac

SEQ ID NO: 39289 - DNA, 25 bp, Homo sapien
aaattttcaacgttcacgttgggac

SEQ ID NO: 39290 - DNA, 25 bp, Homo sapien
aaattttcaacgatcacgttgggac

SEQ ID NO: 39291 - DNA, 25 bp, Homo sapien
aaatataacaccttgagtcgagttt

SEQ ID NO: 39292 - DNA, 25 bp, Homo sapien
aaatataacaccatgagtcgagttt

SEQ ID NO: 39293 - DNA, 25 bp, Homo sapien
acaaaagtccatacctggacagttt

SEQ ID NO: 39294 - DNA, 25 bp, Homo sapien
acaaaagtccattcctggacagttt

SEQ ID NO: 39295 - DNA, 25 bp, Homo sapien
cgtccgtctggcttgaccgtgtact

SEQ ID NO: 39296 - DNA, 25 bp, Homo sapien
cgtccgtctggcatgaccgtgtact

SEQ ID NO: 39297 - DNA, 25 bp, Homo sapien
tggtactcgaagacgtgccggtcgt

SEQ ID NO: 39298 - DNA, 25 bp, Homo sapien
tggtactcgaagtcgtgccggtcgt

SEQ ID NO: 39299 - DNA, 25 bp, Homo sapien
gcgccgtgtcgcggcgatcccagtc

SEQ ID NO: 39300 - DNA, 25 bp, Homo sapien
gcgccgtgtcgccgcgatcccagtc

SEQ ID NO: 39301 - DNA, 25 bp, Homo sapien
attgttcctcctcacggccgtggcg

SEQ ID NO: 39302 - DNA, 25 bp, Homo sapien
attgttcctcctgacggccgtggcg

SEQ ID NO: 39303 - DNA, 25 bp, Homo sapien
agatcgtgactcgagaaccggaggt

SEQ ID NO: 39304 - DNA, 25 bp, Homo sapien
agatcgtgactccagaaccggaggt

SEQ ID NO: 39305 - DNA, 25 bp, Homo sapien
tcgaatccctctcacagactcggtg

SEQ ID NO: 39306 - DNA, 25 bp, Homo sapien
tcgaatccctctgacagactcggtg

SEQ ID NO: 39307 - DNA, 25 bp, Homo sapien
gtcgtacttcacttcaattttagag

SEQ ID NO: 39308 - DNA, 25 bp, Homo sapien
gtcgtacttcacatcaattttagag

SEQ ID NO: 39309 - DNA, 25 bp, Homo sapien
ttatacgtccttatgtcttctgacg

SEQ ID NO: 39310 - DNA, 25 bp, Homo sapien
ttatacgtccttttgtcttctgacg

SEQ ID NO: 39311 - DNA, 25 bp, Homo sapien
cttaaaccctgttcggtcatgtgac

SEQ ID NO: 39312 - DNA, 25 bp, Homo sapien
cttaaaccctgtacggtcatgtgac

SEQ ID NO: 39313 - DNA, 25 bp, Homo sapien
atttccagaacgagggtcgtcggag

SEQ ID NO: 39314 - DNA, 25 bp, Homo sapien
atttccagaacgtgggtcgtcggag

SEQ ID NO: 39315 - DNA, 25 bp, Homo sapien
tactcgaggaagttggtcgttcagg

SEQ ID NO: 39316 - DNA, 25 bp, Homo sapien
tactcgaggaagatggtcgttcagg

SEQ ID NO: 39317 - DNA, 25 bp, Homo sapien
ccctcgagccacagtggttgtccgg

SEQ ID NO: 39318 - DNA, 25 bp, Homo sapien
ccctcgagccactgtggttgtccgg

SEQ ID NO: 39319 - DNA, 25 bp, Homo sapien
tagacgaacgactagagggtgtccc

SEQ ID NO: 39320 - DNA, 25 bp, Homo sapien
tagacgaacgacaagagggtgtccc

SEQ ID NO: 39321 - DNA, 25 bp, Homo sapien
gagaagacctggaccgacatgtccc

SEQ ID NO: 39322 - DNA, 25 bp, Homo sapien
gagaagacctggtccgacatgtccc

SEQ ID NO: 39323 - DNA, 25 bp, Homo sapien
aaagaaggtgtctacagcgtccgct

SEQ ID NO: 39324 - DNA, 25 bp, Homo sapien
aaagaaggtgtcaacagcgtccgct

SEQ ID NO: 39325 - DNA, 25 bp, Homo sapien
agacacaaagttaacaacggccgct

SEQ ID NO: 39326 - DNA, 25 bp, Homo sapien
agacacaaagtttacaacggccgct

SEQ ID NO: 39327 - DNA, 25 bp, Homo sapien
aagtccgtctggtccaggacgtccc

SEQ ID NO: 39328 - DNA, 25 bp, Homo sapien
aagtccgtctggaccaggacgtccc

SEQ ID NO: 39329 - DNA, 25 bp, Homo sapien
gacgcgcggcggctagaacggctac

SEQ ID NO: 39330 - DNA, 25 bp, Homo sapien
gacgcgcggcgggtagaacggctac

SEQ ID NO: 39331 - DNA, 25 bp, Homo sapien
cttgttacgagtgacgatggacttg

SEQ ID NO: 39332 - DNA, 25 bp, Homo sapien
cttgttacgagtcacgatggacttg

SEQ ID NO: 39333 - DNA, 25 bp, Homo sapien
tagacgtacaacgagtatcacacgc

SEQ ID NO: 39334 - DNA, 25 bp, Homo sapien
tagacgtacaaccagtatcacacgc

SEQ ID NO: 39335 - DNA, 25 bp, Homo sapien
gtcgccgtaaaccagcccgtcggcg

SEQ ID NO: 39336 - DNA, 25 bp, Homo sapien
gtcgccgtaaacgagcccgtcggcg

SEQ ID NO: 39337 - DNA, 25 bp, Homo sapien
gacttgtttgtcttcactaaaatag

SEQ ID NO: 39338 - DNA, 25 bp, Homo sapien
gacttgtttgtcatcactaaaatag

SEQ ID NO: 39339 - DNA, 25 bp, Homo sapien
tttgtttccacatctaagtaagtcg

SEQ ID NO: 39340 - DNA, 25 bp, Homo sapien
tttgtttccacaactaagtaagtcg

SEQ ID NO: 39341 - DNA, 25 bp, Homo sapien
atatgttaaaacatcgtcagagaca

SEQ ID NO: 39342 - DNA, 25 bp, Homo sapien
atatgttaaaacttcgtcagagaca

SEQ ID NO: 39343 - DNA, 25 bp, Homo sapien
gatgtcttgtaaagttctgaactca

SEQ ID NO: 39344 - DNA, 25 bp, Homo sapien
gatgtcttgtaatgttctgaactca

SEQ ID NO: 39345 - DNA, 25 bp, Homo sapien
ttttgtacaaaggtactcgaatcta

SEQ ID NO: 39346 - DNA, 25 bp, Homo sapien
ttttgtacaaagctactcgaatcta

SEQ ID NO: 39347 - DNA, 25 bp, Homo sapien
gattcttaagaacctacgaagttta

SEQ ID NO: 39348 - DNA, 25 bp, Homo sapien
gattcttaagaagctacgaagttta

SEQ ID NO: 39349 - DNA, 25 bp, Homo sapien
ttcgagaagaaatctttagtactac

SEQ ID NO: 39350 - DNA, 25 bp, Homo sapien
ttcgagaagaaaactttagtactac

SEQ ID NO: 39351 - DNA, 25 bp, Homo sapien
ttgtagaactaaagacacttttacg

SEQ ID NO: 39352 - DNA, 25 bp, Homo sapien
ttgtagaactaatgacacttttacg

SEQ ID NO: 39353 - DNA, 25 bp, Homo sapien
ttgtgtcacggacgtctccctgtcg

SEQ ID NO: 39354 - DNA, 25 bp, Homo sapien
ttgtgtcacggaggtctccctgtcg

SEQ ID NO: 39355 - DNA, 25 bp, Homo sapien
ctttgagagattatcggaccctcgt

SEQ ID NO: 39356 - DNA, 25 bp, Homo sapien
ctttgagagattttcggaccctcgt

SEQ ID NO: 39357 - DNA, 25 bp, Homo sapien
gagatcatagatttgacaacctcct

SEQ ID NO: 39358 - DNA, 25 bp, Homo sapien
gagatcatagatatgacaacctcct

SEQ ID NO: 39359 - DNA, 25 bp, Homo sapien
acaaaaaggtcaataacagatccgt

SEQ ID NO: 39360 - DNA, 25 bp, Homo sapien
acaaaaaggtcattaacagatccgt

SEQ ID NO: 39361 - DNA, 25 bp, Homo sapien
tgtgtactgggtcaagaaccactca

SEQ ID NO: 39362 - DNA, 25 bp, Homo sapien
tgtgtactgggtgaagaaccactca

SEQ ID NO: 39363 - DNA, 25 bp, Homo sapien
gacctagagggacctccactaccag

SEQ ID NO: 39364 - DNA, 25 bp, Homo sapien
gacctagagggagctccactaccag

SEQ ID NO: 39365 - DNA, 25 bp, Homo sapien
gcctaaaggagacctcgtagactca

SEQ ID NO: 39366 - DNA, 25 bp, Homo sapien
gcctaaaggagagctcgtagactca

SEQ ID NO: 39367 - DNA, 25 bp, Homo sapien
ctagaactcgtggtccggacacgac

SEQ ID NO: 39368 - DNA, 25 bp, Homo sapien
ctagaactcgtgctccggacacgac

SEQ ID NO: 39369 - DNA, 25 bp, Homo sapien
tactcagaacacgtcccaacagacg

SEQ ID NO: 39370 - DNA, 25 bp, Homo sapien
tactcagaacacctcccaacagacg

SEQ ID NO: 39371 - DNA, 25 bp, Homo sapien
ttatgtaccacaaatgaccacggga

SEQ ID NO: 39372 - DNA, 25 bp, Homo sapien
ttatgtaccacatatgaccacggga

SEQ ID NO: 39373 - DNA, 25 bp, Homo sapien
acagagaggtatactacactagaca

SEQ ID NO: 39374 - DNA, 25 bp, Homo sapien
acagagaggtattctacactagaca

SEQ ID NO: 39375 - DNA, 25 bp, Homo sapien
gacacgtgacacagatgacgaccca

SEQ ID NO: 39376 - DNA, 25 bp, Homo sapien
gacacgtgacactgatgacgaccca

SEQ ID NO: 39377 - DNA, 25 bp, Homo sapien
gacgtaggacatggtcgtggcacta

(The sequence listing continues in the following parts.)

What is claimed is:

1. An array comprising a plurality of nucleic acid probes, wherein each probe comprises one of the sequences listed in SEQ ID NOS: 1-2,018,500 or the perfect match, perfect mismatch, antisense match or antisense mismatch thereof.

2. The array of claim 1 wherein said array is used to monitor gene expression levels by hybridization to a DNA library.

3. The array of claim 1 wherein said array is used for analysis of genetic variation.

4. The array of claim 1 wherein said array is used for hybridization of tag-labeled compounds.

5. The array of claim 1, wherein said nucleic acid probes are specifically designed for analysis of at least one target sequence.

6. A method of analysis comprising:
hybridizing at least one or more nucleic acids to at least two or more nucleic acid probes;
each of said nucleic acid probes including at least one sequence listed in SEQ ID NOS: 1-2,018,500; or one of
a perfect match;
a perfect mismatch;
an antisense match; or
an antisense mismatch thereof; and
detecting said hybridization.

7. The method of claim 6 wherein said nucleic acid probes are attached to a solid support.

8. The method of claim 6 wherein said analysis comprises monitoring gene expression levels.

9. The method of claim 8 wherein said monitoring gene expression levels comprises comparing gene expression levels of nucleic acids derived from two or more different samples, and further comprises the step of comparing said hybridization patterns between said nucleic acids derived from said two or more different samples.

10. The method of claim 6 wherein said method of analysis comprises identifying biallelic markers.

11. The method of claim 6 wherein said method of analysis comprises identifying polymorphisms.

12. The method of claim 6 wherein said method of analysis comprises a cross-species comparison wherein hybridization patterns of a pool of nucleic acids derived from one species are compared with hybridization patterns of a pool of nucleic acids derived from another species.

13. The method of claim 6 wherein each of said nucleic acids further comprise a tag sequence.

14. The method of claim 6 wherein said method of analysis is a method of identifying family members of a gene.

15. A method comprising using any one or more nucleic acid sequences comprising at least one of the sequences listed in SEQ ID NOS: 1-2,018,500, or the perfect match, perfect mismatch, antisense match or antisense mismatch thereof as a probe.

16. The method of claim 15 wherein said probe is used in an in situ hybridization.

17. The method of claim 15 wherein said probe is used to screen cDNA or genomic libraries, or subclones derived from cDNA or genomic libraries, for additional clones containing segments of DNA that have been isolated and previously sequenced.

18. The method of claim 15 wherein said probe is used in Southern, northern, or dot-blot hybridization to identify or detect the sequence of any gene.

19. The method of claim 15 wherein said probe is used in Southern or dot-blot hybridization of genomic DNA to detect specific mutations in any gene.

20. The method of claim 15 wherein said probe is used to map the 5′ termini of mRNA molecules by primer extensions.
